United States Patent Application Publication US 2007/0134655 A1 - sequence listing, part 5

SEQ ID NO: 157331 - RNA, 32 nt, Human
gagaugugggcagaggaagaggacacugaaga

SEQ ID NO: 157332 - RNA, 24 nt, Human
gagauguguuugcaccacugcacu

SEQ ID NO: 157333 - RNA, 32 nt, Human
gagauguuaauuuaaaaauuuccacuacacuu

SEQ ID NO: 157334 - RNA, 32 nt, Human
gagauguuaucccaccauguaaagucgccugc

SEQ ID NO: 157335 - RNA, 32 nt, Human
gagauguucaagcucauccauucuuuagacac

SEQ ID NO: 157336 - RNA, 28 nt, Human
gagauguucccgggaagccugucuagag

SEQ ID NO: 157337 - RNA, 32 nt, Human
gagauguuccgggcauacugcugugcucugug

SEQ ID NO: 157338 - RNA, 32 nt, Human
gagauguuccuucagaaggcaggaccuggagg

SEQ ID NO: 157339 - RNA, 32 nt, Human
gagauguugagaauguucaucucuccagcccc

SEQ ID NO: 157340 - RNA, 21 nt, Human
gagauguuuggaacacaguca

SEQ ID NO: 157341 - RNA, 32 nt, Human
gagauguuuuggagcaugguagaugggcauca

SEQ ID NO: 157342 - RNA, 32 nt, Human
gagauguuuuuaaauagagauuuguaacauca

SEQ ID NO: 157343 - RNA, 32 nt, Human
gagauuaaccccucccccagacucgugccuug

SEQ ID NO: 157344 - RNA, 32 nt, Human
gagauuaagaaugccaggaauauugucauccu

SEQ ID NO: 157345 - RNA, 32 nt, Human
gagauuaagccaccgcacuccagccugggcga

SEQ ID NO: 157346 - RNA, 32 nt, Human
gagauuacaccauugcauuccagccuaggcaa

SEQ ID NO: 157347 - RNA, 32 nt, Human
gagauuacaccccuggacuccagcuuggguga

SEQ ID NO: 157348 - RNA, 32 nt, Human
gagauuacagaagugagccacuguguccugcc

SEQ ID NO: 157349 - RNA, 32 nt, Human
gagauuacagugagcuauggaucggccacugc

SEQ ID NO: 157350 - RNA, 32 nt, Human
gagauuacgccacugcaccccaaccugggcga

SEQ ID NO: 157351 - RNA, 32 nt, Human
gagauuacgccacugcacuccagccugggcaa

SEQ ID NO: 157352 - RNA, 32 nt, Human
gagauuaggaaagagaaaagguugagaagauc

SEQ ID NO: 157353 - RNA, 21 nt, Human
gagauuaggagaagcugaaaa

SEQ ID NO: 157354 - RNA, 32 nt, Human
gagauuaggccaggagaggagcccggguuggu

SEQ ID NO: 157355 - RNA, 32 nt, Human
gagauuagggauuggugaugacucuuaacgag

SEQ ID NO: 157356 - RNA, 32 nt, Human
gagauuagggauuggugaugacucuuaaugag

SEQ ID NO: 157357 - RNA, 32 nt, Human
gagauuagguugugauacaugaagagccaaga

SEQ ID NO: 157358 - RNA, 32 nt, Human
gagauuauacaggagauucucuuucuucgcug

SEQ ID NO: 157359 - RNA, 32 nt, Human
gagauuaugccacugcacuccagccuggugac

SEQ ID NO: 157360 - RNA, 32 nt, Human
gagauuaugccacuguacuccagccuggguga

SEQ ID NO: 157361 - RNA, 32 nt, Human
gagauuaugccacuguacuccagcguggguga

SEQ ID NO: 157362 - RNA, 32 nt, Human
gagauuaugucacuccagccugggcaacagag

SEQ ID NO: 157363 - RNA, 32 nt, Human
gagauuauuucugcucuucaggaaauuucugc

SEQ ID NO: 157364 - RNA, 32 nt, Human
gagauuauuuguaucuaagaaaccagguaaaa

SEQ ID NO: 157365 - RNA, 21 nt, Human
gagauucaacuuuaccaucca

SEQ ID NO: 157366 - RNA, 32 nt, Human
gagauucacagaggcaaggcagagaacaagac

SEQ ID NO: 157367 - RNA, 32 nt, Human
gagauucagagcagggaggaaaaguuagggua

SEQ ID NO: 157368 - RNA, 32 nt, Human
gagauucaggcagacugguggcaguggaguag

SEQ ID NO: 157369 - RNA, 32 nt, Human
gagauucagucugucuggaaucccggaacccc

SEQ ID NO: 157370 - RNA, 32 nt, Human
gagauuccaggccugacccaucaugccuagcc

SEQ ID NO: 157371 - RNA, 32 nt, Human
gagauuccaucugaaaaacaaaaacaaaaaca

SEQ ID NO: 157372 - RNA, 32 nt, Human
gagauuccauguguuuugcucaucucaccagc

SEQ ID NO: 157373 - RNA, 32 nt, Human
gagauuccauuuuucuccuaucagacuggcag

SEQ ID NO: 157374 - RNA, 32 nt, Human
gagauuccccuggaaaugauguggaagaugag

SEQ ID NO: 157375 - RNA, 32 nt, Human
gagauuccuccccugcuaaaguucuucauggu

SEQ ID NO: 157376 - RNA, 32 nt, Human
gagauucgccugaacccgggaggcagagguug

SEQ ID NO: 157377 - RNA, 32 nt, Human
gagauucuagcaggggacaggauuggcucaga

SEQ ID NO: 157378 - RNA, 32 nt, Human
gagauucucgcucugcugcuuuaguuucggag

SEQ ID NO: 157379 - RNA, 32 nt, Human
gagauucugcauuucuaaggagucucagggau

SEQ ID NO: 157380 - RNA, 32 nt, Human
gagauucugcauuuuaaacaagcuccuggagg

SEQ ID NO: 157381 - RNA, 32 nt, Human
gagauucugcucaucauugcucagcuccucag

SEQ ID NO: 157382 - RNA, 32 nt, Human
gagauucugugccccuugucgggccgcuuguu

SEQ ID NO: 157383 - RNA, 32 nt, Human
gagauucuucauuucugcuuucugcccuguca

SEQ ID NO: 157384 - RNA, 32 nt, Human
gagauugaaaaugaagcaaagauaggaugaau

SEQ ID NO: 157385 - RNA, 32 nt, Human
gagauugaagagaggaagggaacguuggaacc

SEQ ID NO: 157386 - RNA, 32 nt, Human
gagauugagagggaugucgggcaguucccauu

SEQ ID NO: 157387 - RNA, 32 nt, Human
gagauugagcaacuguacuccagcuuggcgac

SEQ ID NO: 157388 - RNA, 32 nt, Human
gagauugagcaucuuguuuguuuugucaccac

SEQ ID NO: 157389 - RNA, 32 nt, Human
gagauugagccacugcacuccagccuggguga

SEQ ID NO: 157390 - RNA, 32 nt, Human
gagauugaggcugaaagaggauccaccauuuu

SEQ ID NO: 157391 - RNA, 21 nt, Human
gagauugaggcugcagugagc

SEQ ID NO: 157392 - RNA, 32 nt, Human
gagauugaggcugcagugagcuguguucacac

SEQ ID NO: 157393 - RNA, 32 nt, Human
gagauugaggugggaggaucaccugagccuaa

SEQ ID NO: 157394 - RNA, 32 nt, Human
gagauugauuauucaaccaggauaccuaauuc

SEQ ID NO: 157395 - RNA, 32 nt, Human
gagauugcaacacugccacuccagccugggug

SEQ ID NO: 157396 - RNA, 32 nt, Human
gagauugcacaauugcacuccagccuggcgac

SEQ ID NO: 157397 - RNA, 32 nt, Human
gagauugcaccacagcacuccaaccuggguga

SEQ ID NO: 157398 - RNA, 32 nt, Human
gagauugcaccaccgcacuccagccuggguga

SEQ ID NO: 157399 - RNA, 32 nt, Human
gagauugcaccacggcacuccagccuggguga

SEQ ID NO: 157400 - RNA, 32 nt, Human
gagauugcaccacuacacuccagccuggauga

SEQ ID NO: 157401 - RNA, 32 nt, Human
gagauugcaccacuacacuccagccugggcaa

SEQ ID NO: 157402 - RNA, 32 nt, Human
gagauugcaccacuacacuccagccuggguga

SEQ ID NO: 157403 - RNA, 32 nt, Human
gagauugcaccacugcacgccagccuggguga

SEQ ID NO: 157404 - RNA, 32 nt, Human
gagauugcaccacugcacuccagcccaggcaa

SEQ ID NO: 157405 - RNA, 32 nt, Human
gagauugcaccacugcacuccagccuaggcga

SEQ ID NO: 157406 - RNA, 32 nt, Human
gagauugcaccacugcacuccagccugaguga

SEQ ID NO: 157407 - RNA, 32 nt, Human
gagauugcaccacugcacuccagccuggcgac

SEQ ID NO: 157408 - RNA, 32 nt, Human
gagauugcaccacugcacuccagccugggcaa

SEQ ID NO: 157409 - RNA, 32 nt, Human
gagauugcaccacugcacuccagccugggcga

SEQ ID NO: 157410 - RNA, 32 nt, Human
gagauugcaccacugcacuccagccugggcgg

SEQ ID NO: 157411 - RNA, 32 nt, Human
gagauugcaccacugcacuccagccuggggac

SEQ ID NO: 157412 - RNA, 32 nt, Human
gagauugcaccacugcacuccagccuggguaa

SEQ ID NO: 157413 - RNA, 32 nt, Human
gagauugcaccacugcacuccagccuggguga

SEQ ID NO: 157414 - RNA, 32 nt, Human
gagauugcaccacugcacuccagccugggugg

SEQ ID NO: 157415 - RNA, 32 nt, Human
gagauugcaccacugcacuccagccuggugac

SEQ ID NO: 157416 - RNA, 32 nt, Human
gagauugcaccacugcacuccagcgagacucu

SEQ ID NO: 157417 - RNA, 32 nt, Human
gagauugcaccacugcacuccagucugggcaa

SEQ ID NO: 157418 - RNA, 32 nt, Human
gagauugcaccacugcacuccagucuggguga

SEQ ID NO: 157419 - RNA, 32 nt, Human
gagauugcaccacugcacuucagccuggugac

SEQ ID NO: 157420 - RNA, 32 nt, Human
gagauugcaccacugcaguucagccuggauga

SEQ ID NO: 157421 - RNA, 32 nt, Human
gagauugcaccacugcauuccaaccugggcgg

SEQ ID NO: 157422 - RNA, 32 nt, Human
gagauugcaccacugcauuccagccuggauga

SEQ ID NO: 157423 - RNA, 32 nt, Human
gagauugcaccacugcauuccagccuggcgac

SEQ ID NO: 157424 - RNA, 32 nt, Human
gagauugcaccacuguacuccaaccugggcga

SEQ ID NO: 157425 - RNA, 32 nt, Human
gagauugcaccacuguacuccagcacucuagc

SEQ ID NO: 157426 - RNA, 32 nt, Human
gagauugcaccacuuacuccagccugggcaac

SEQ ID NO: 157427 - RNA, 32 nt, Human
gagauugcaccacuucacuccagccuggguga

SEQ ID NO: 157428 - RNA, 32 nt, Human
gagauugcaccauugcacuccagccugggcaa

SEQ ID NO: 157429 - RNA, 32 nt, Human
gagauugcaccauugcacuccagccugggcga

SEQ ID NO: 157430 - RNA, 32 nt, Human
gagauugcaccauugcacuccagccugugcaa

SEQ ID NO: 157431 - RNA, 32 nt, Human
gagauugcaccauugcacuccagcuuggguga

SEQ ID NO: 157432 - RNA, 32 nt, Human
gagauugcaccauugcauuccagccugggcaa

SEQ ID NO: 157433 - RNA, 32 nt, Human
gagauugcaccauuguacuccagccugggcaa

SEQ ID NO: 157434 - RNA, 32 nt, Human
gagauugcaccauuucauuccagccugggcaa

SEQ ID NO: 157435 - RNA, 32 nt, Human
gagauugcaccccugcacuccaggcugggcaa

SEQ ID NO: 157436 - RNA, 32 nt, Human
gagauugcaccgcugcacuccagccuggcgac

SEQ ID NO: 157437 - RNA, 32 nt, Human
gagauugcaccuuuguacuccagccugggcaa

SEQ ID NO: 157438 - RNA, 32 nt, Human
gagauugcacuacugcacuccagacuggugac

SEQ ID NO: 157439 - RNA, 32 nt, Human
gagauugcacuauugcacuccagccugggcaa

SEQ ID NO: 157440 - RNA, 32 nt, Human
gagauugcagucaguuccugggugcauugucg

SEQ ID NO: 157441 - RNA, 32 nt, Human
gagauugcagugaaccaagaucgggccacugc

SEQ ID NO: 157442 - RNA, 32 nt, Human
gagauugcagugaacuaagaucacaccauugc

SEQ ID NO: 157443 - RNA, 32 nt, Human
gagauugcagugagcagagauugugccacugc

SEQ ID NO: 157444 - RNA, 32 nt, Human
gagauugcagugagccaagacugcgccacugc

SEQ ID NO: 157445 - RNA, 32 nt, Human
gagauugcagugagccaagaucaagccauugu

SEQ ID NO: 157446 - RNA, 32 nt, Human
gagauugcagugagccaagaucacaccacugc

SEQ ID NO: 157447 - RNA, 32 nt, Human
gagauugcagugagccaagaucgcaccgcugc

SEQ ID NO: 157448 - RNA, 32 nt, Human
gagauugcagugagcccagaucgcaccacugc

SEQ ID NO: 157449 - RNA, 32 nt, Human
gagauugcagugagcccagauugcaccacugc

SEQ ID NO: 157450 - RNA, 32 nt, Human
gagauugcagugagccgaaaucacgccacuac

SEQ ID NO: 157451 - RNA, 32 nt, Human
gagauugcagugagccgagaucacgccauugc

SEQ ID NO: 157452 - RNA, 32 nt, Human
gagauugcagugagccgagaucacgcuacugc

SEQ ID NO: 157453 - RNA, 32 nt, Human
gagauugcagugagccgagaucauugcauugc

SEQ ID NO: 157454 - RNA, 32 nt, Human
gagauugcagugagccgagaucccgccacugc

SEQ ID NO: 157455 - RNA, 32 nt, Human
gagauugcagugagccgagaucgugucacugc

SEQ ID NO: 157456 - RNA, 32 nt, Human
gagauugcagugagccgaggucaugccacugc

SEQ ID NO: 157457 - RNA, 32 nt, Human
gagauugcagugagcugagaccacaccacugc

SEQ ID NO: 157458 - RNA, 32 nt, Human
gagauugcagugagcugagauaaucccacugc

SEQ ID NO: 157459 - RNA, 32 nt, Human
gagauugcagugagcugagaucacgccacugc

SEQ ID NO: 157460 - RNA, 32 nt, Human
gagauugcagugagcugagaucacgccauugc

SEQ ID NO: 157461 - RNA, 32 nt, Human
gagauugcagugagcugagaucaugccauugc

SEQ ID NO: 157462 - RNA, 32 nt, Human
gagauugcagugagcugagaucgcaccacugc

SEQ ID NO: 157463 - RNA, 32 nt, Human
gagauugcagugagcugagaucgcaccauugc

SEQ ID NO: 157464 - RNA, 32 nt, Human
gagauugcagugagcugagaucgugccauugc

SEQ ID NO: 157465 - RNA, 32 nt, Human
gagauugcagugagcugagauugcaccacugc

SEQ ID NO: 157466 - RNA, 32 nt, Human
gagauugcagugagcugagauugcgccacugc

SEQ ID NO: 157467 - RNA, 32 nt, Human
gagauugcagugagcugagauugugccacugu

SEQ ID NO: 157468 - RNA, 32 nt, Human
gagauugcagugagucaagaucucaccacuga

SEQ ID NO: 157469 - RNA, 32 nt, Human
gagauugcaucacugcacuccagccugggcga

SEQ ID NO: 157470 - RNA, 32 nt, Human
gagauugcaucauugcacuccagccugggcaa

SEQ ID NO: 157471 - RNA, 32 nt, Human
gagauugcauggcugcacucuagccuggguga

SEQ ID NO: 157472 - RNA, 32 nt, Human
gagauugccaauuuuccugauuuccuuaaggu

SEQ ID NO: 157473 - RNA, 32 nt, Human
gagauugccacugcacuccagccugggcaaca

SEQ ID NO: 157474 - RNA, 32 nt, Human
gagauugccccacugcacuccagccuaggcaa

SEQ ID NO: 157475 - RNA, 32 nt, Human
gagauugcccccgcuacacuccagccuggucg

SEQ ID NO: 157476 - RNA, 32 nt, Human
gagauugcgccaccgcacuccagccugggcaa

SEQ ID NO: 157477 - RNA, 32 nt, Human
gagauugcgccaccgcacuccagccugggcga

SEQ ID NO: 157478 - RNA, 32 nt, Human
gagauugcgccacugcacaccagucuggagac

SEQ ID NO: 157479 - RNA, 32 nt, Human
gagauugcgccacugcacacuagcuuggguga

SEQ ID NO: 157480 - RNA, 32 nt, Human
gagauugcgccacugcaccccagcaugagcga

SEQ ID NO: 157481 - RNA, 32 nt, Human
gagauugcgccacugcaccccagccuggacaa

SEQ ID NO: 157482 - RNA, 32 nt, Human
gagauugcgccacugcaccccagccugggcga

SEQ ID NO: 157483 - RNA, 32 nt, Human
gagauugcgccacugcaccccagccuggguga

SEQ ID NO: 157484 - RNA, 19 nt, Human
gagauugcgccacugcacu

SEQ ID NO: 157485 - RNA, 32 nt, Human
gagauugcgccacugcacucaagucugggcga

SEQ ID NO: 157486 - RNA, 32 nt, Human
gagauugcgccacugcacuccaaccugggcaa

SEQ ID NO: 157487 - RNA, 32 nt, Human
gagauugcgccacugcacuccagcccuggcga

SEQ ID NO: 157488 - RNA, 32 nt, Human
gagauugcgccacugcacuccagccuagguga

SEQ ID NO: 157489 - RNA, 32 nt, Human
gagauugcgccacugcacuccagccuggcgac

SEQ ID NO: 157490 - RNA, 32 nt, Human
gagauugcgccacugcacuccagccugggaga

SEQ ID NO: 157491 - RNA, 32 nt, Human
gagauugcgccacugcacuccagccugggcaa

SEQ ID NO: 157492 - RNA, 32 nt, Human
gagauugcgccacugcacuccagccugggcag

SEQ ID NO: 157493 - RNA, 32 nt, Human
gagauugcgccacugcacuccagccugggcga

SEQ ID NO: 157494 - RNA, 32 nt, Human
gagauugcgccacugcacuccagccugggcua

SEQ ID NO: 157495 - RNA, 32 nt, Human
gagauugcgccacugcacuccagccuggggga

SEQ ID NO: 157496 - RNA, 32 nt, Human
gagauugcgccacugcacuccagccuggguaa

SEQ ID NO: 157497 - RNA, 32 nt, Human
gagauugcgccacugcacuccagccuggguga

SEQ ID NO: 157498 - RNA, 32 nt, Human
gagauugcgccacugcacuccagccugguuga

SEQ ID NO: 157499 - RNA, 32 nt, Human
gagauugcgccacugcacuccagcgugggcua

SEQ ID NO: 157500 - RNA, 32 nt, Human
gagauugcgccacugcacuccagucugggcga

SEQ ID NO: 157501 - RNA, 32 nt, Human
gagauugcgccacugcacuccagucuggucgg

SEQ ID NO: 157502 - RNA, 32 nt, Human
gagauugcgccacugcacucuagccuaagcaa

SEQ ID NO: 157503 - RNA, 32 nt, Human
gagauugcgccacugcacuucagccuggauga

SEQ ID NO: 157504 - RNA, 32 nt, Human
gagauugcgccacugcacuucagccugggcaa

SEQ ID NO: 157505 - RNA, 32 nt, Human
gagauugcgccacugcaguccgcaguccagcc

SEQ ID NO: 157506 - RNA, 32 nt, Human
gagauugcgccacugcaguccgcagucuggcc

SEQ ID NO: 157507 - RNA, 19 nt, Human
gagauugcgccacugcauu

SEQ ID NO: 157508 - RNA, 32 nt, Human
gagauugcgccacugcauuccagccuggguga

SEQ ID NO: 157509 - RNA, 32 nt, Human
gagauugcgccacugcauucuagccuggauga

SEQ ID NO: 157510 - RNA, 32 nt, Human
gagauugcgccacugcgcuccagccugggcaa

SEQ ID NO: 157511 - RNA, 32 nt, Human
gagauugcgccacuggacuccagccugcguga

SEQ ID NO: 157512 - RNA, 19 nt, Human
gagauugcgccacuguacu

SEQ ID NO: 157513 - RNA, 32 nt, Human
gagauugcgccacuguacuccagccuggcaac

SEQ ID NO: 157514 - RNA, 32 nt, Human
gagauugcgccacuguacuccagccuggguga

SEQ ID NO: 157515 - RNA, 32 nt, Human
gagauugcgccacuguacuccugggcaacagc

SEQ ID NO: 157516 - RNA, 32 nt, Human
gagauugcgccacuucacuccagccuggguga

SEQ ID NO: 157517 - RNA, 32 nt, Human
gagauugcgccauugcacuccagccuagguaa

SEQ ID NO: 157518 - RNA, 32 nt, Human
gagauugcgccauugcacuccagccugggcaa

SEQ ID NO: 157519 - RNA, 32 nt, Human
gagauugcgccauugcacuccagccuggggac

SEQ ID NO: 157520 - RNA, 32 nt, Human
gagauugcgccauugcauuccagccuggguga

SEQ ID NO: 157521 - RNA, 32 nt, Human
gagauugcgccauuguacuccagccugggcaa

SEQ ID NO: 157522 - RNA, 32 nt, Human
gagauugcgccauuguacuccagccuggggga

SEQ ID NO: 157523 - RNA, 32 nt, Human
gagauugcgccccugcacuccaaccuggacaa

SEQ ID NO: 157524 - RNA, 19 nt, Human
gagauugcgccgcugcacu

SEQ ID NO: 157525 - RNA, 32 nt, Human
gagauugcgccgcugcacuccagccugggcga

SEQ ID NO: 157526 - RNA, 32 nt, Human
gagauugcgcuacugaacuccagccuggguua

SEQ ID NO: 157527 - RNA, 32 nt, Human
gagauugcgcuacugcacuccagccugggcga

SEQ ID NO: 157528 - RNA, 32 nt, Human
gagauugcgcugcugcacuccaaccugggcga

SEQ ID NO: 157529 - RNA, 32 nt, Human
gagauugcggugagccaagaucgcgccccugc

SEQ ID NO: 157530 - RNA, 32 nt, Human
gagauugcggugagccaagauggcaccacugc

SEQ ID NO: 157531 - RNA, 32 nt, Human
gagauugcggugagccgggauugcgccagugc

SEQ ID NO: 157532 - RNA, 32 nt, Human
gagauugcggugagccuagaucuugccacugc

SEQ ID NO: 157533 - RNA, 32 nt, Human
gagauugcgucacugcacuccagccugagcaa

SEQ ID NO: 157534 - RNA, 32 nt, Human
gagauugcgucacugcacuccagccugggcga

SEQ ID NO: 157535 - RNA, 32 nt, Human
gagauugcuccauugcacuccagccugggcaa

SEQ ID NO: 157536 - RNA, 32 nt, Human
gagauugcuccauugcacuccagccugggcga

SEQ ID NO: 157537 - RNA, 32 nt, Human
gagauugcucuuaagcugauuucccaaacagg

SEQ ID NO: 157538 - RNA, 32 nt, Human
gagauugcuucuaacauaaaucugcauaaaaa

SEQ ID NO: 157539 - RNA, 32 nt, Human
gagauuggaaacagccagguuggagcagugag

SEQ ID NO: 157540 - RNA, 32 nt, Human
gagauuggaccacugcucuccagccugggcaa

SEQ ID NO: 157541 - RNA, 32 nt, Human
gagauuggccauugcacuccagccugggugac

SEQ ID NO: 157542 - RNA, 32 nt, Human
gagauugggccacugcacuccacccugggcga

SEQ ID NO: 157543 - RNA, 32 nt, Human
gagauugggccccagcaccuggacucaaggca

SEQ ID NO: 157544 - RNA, 32 nt, Human
gagauuggggaguggugaugacucucaacgag

SEQ ID NO: 157545 - RNA, 22 nt, Human
gagauuggguuucaccauguug

SEQ ID NO: 157546 - RNA, 23 nt, Human
gagauuggguuucaccauguugg

SEQ ID NO: 157547 - RNA, 26 nt, Human
gagauuggugacagucaggccuggga

SEQ ID NO: 157548 - RNA, 32 nt, Human
gagauuguaccacugcacuccagccuggucaa

SEQ ID NO: 157549 - RNA, 32 nt, Human
gagauuguaccacugcacuccagucugggcaa

SEQ ID NO: 157550 - RNA, 32 nt, Human
gagauuguaccacugcgcuccaaacuggguga

SEQ ID NO: 157551 - RNA, 32 nt, Human
gagauuguaccaugcacuccagccuggguaac

SEQ ID NO: 157552 - RNA, 32 nt, Human
gagauuguaccauggcacuccagccuggacaa

SEQ ID NO: 157553 - RNA, 32 nt, Human
gagauuguaccauugcacuccagccugggcaa

SEQ ID NO: 157554 - RNA, 32 nt, Human
gagauuguccagcccccgcccuugcacuggac

SEQ ID NO: 157555 - RNA, 32 nt, Human
gagauugucgaucucaucaccauaauaaagag

SEQ ID NO: 157556 - RNA, 32 nt, Human
gagauugugcacuccagccuggguaacagagc

SEQ ID NO: 157557 - RNA, 32 nt, Human
gagauugugcauugcacuccagccugagcaac

SEQ ID NO: 157558 - RNA, 32 nt, Human
gagauugugccacuacacuccagccuggccac

SEQ ID NO: 157559 - RNA, 32 nt, Human
gagauugugccacuacacuccagccugggcaa

SEQ ID NO: 157560 - RNA, 32 nt, Human
gagauugugccacuacacuccagccuggguga

SEQ ID NO: 157561 - RNA, 32 nt, Human
gagauugugccacuccccuccagccugggcga

SEQ ID NO: 157562 - RNA, 32 nt, Human
gagauugugccacugcacaccagccuggacaa

SEQ ID NO: 157563 - RNA, 32 nt, Human
gagauugugccacugcacaccggccuggguga

SEQ ID NO: 157564 - RNA, 32 nt, Human
gagauugugccacugcacacuccaaucugggu

SEQ ID NO: 157565 - RNA, 32 nt, Human
gagauugugccacugcacgcacuccagccugg

SEQ ID NO: 157566 - RNA, 19 nt, Human
gagauugugccacugcacu

SEQ ID NO: 157567 - RNA, 32 nt, Human
gagauugugccacugcacuccaaccuggguga

SEQ ID NO: 157568 - RNA, 32 nt, Human
gagauugugccacugcacuccagccuaggcaa

SEQ ID NO: 157569 - RNA, 32 nt, Human
gagauugugccacugcacuccagccuaggcga

SEQ ID NO: 157570 - RNA, 32 nt, Human
gagauugugccacugcacuccagccuggacga

SEQ ID NO: 157571 - RNA, 32 nt, Human
gagauugugccacugcacuccagccuggcaac

SEQ ID NO: 157572 - RNA, 32 nt, Human
gagauugugccacugcacuccagccugggaga

SEQ ID NO: 157573 - RNA, 32 nt, Human
gagauugugccacugcacuccagccugggcaa

SEQ ID NO: 157574 - RNA, 32 nt, Human
gagauugugccacugcacuccagccugggcca

SEQ ID NO: 157575 - RNA, 32 nt, Human
gagauugugccacugcacuccagccugggcga

SEQ ID NO: 157576 - RNA, 32 nt, Human
gagauugugccacugcacuccagccuggguga

SEQ ID NO: 157577 - RNA, 32 nt, Human
gagauugugccacugcacuccagccuuggcaa

SEQ ID NO: 157578 - RNA, 32 nt, Human
gagauugugccacugcacucccgccugggcga

SEQ ID NO: 157579 - RNA, 32 nt, Human
gagauugugccacugcacucgagccuggguga

SEQ ID NO: 157580 - RNA, 32 nt, Human
gagauugugccacugcacucuagccuggacag

SEQ ID NO: 157581 - RNA, 32 nt, Human
gagauugugccacugcacucuagccuggguga

SEQ ID NO: 157582 - RNA, 32 nt, Human
gagauugugccacugcacuucagccugggcga

SEQ ID NO: 157583 - RNA, 32 nt, Human
gagauugugccacugcacuucagcuuggguga

SEQ ID NO: 157584 - RNA, 32 nt, Human
gagauugugccacugcgcuccagccugggcga

SEQ ID NO: 157585 - RNA, 32 nt, Human
gagauugugccacuguacaccagccuggguga

SEQ ID NO: 157586 - RNA, 32 nt, Human
gagauugugccacuguacuccagccuggaaga

SEQ ID NO: 157587 - RNA, 32 nt, Human
gagauugugccacuguacuccagccuggugac

SEQ ID NO: 157588 - RNA, 32 nt, Human
gagauugugccacuucacuccagccuggguga

SEQ ID NO: 157589 - RNA, 32 nt, Human
gagauugugccacuucauuccagccugggcga

SEQ ID NO: 157590 - RNA, 32 nt, Human
gagauugugccauugcacuccaaccugggcaa

SEQ ID NO: 157591 - RNA, 32 nt, Human
gagauugugccauugcacuccagccugggcaa

SEQ ID NO: 157592 - RNA, 32 nt, Human
gagauugugccauugcacuccagccugggcga

SEQ ID NO: 157593 - RNA, 32 nt, Human
gagauugugccauugcacuccagccugggcua

SEQ ID NO: 157594 - RNA, 32 nt, Human
gagauugugccauugcacuccagccuggguga

SEQ ID NO: 157595 - RNA, 32 nt, Human
gagauugugccccugcacuccagccugagcga

SEQ ID NO: 157596 - RNA, 32 nt, Human
gagauugugccgcugcacuccagccuggcgac

SEQ ID NO: 157597 - RNA, 32 nt, Human
gagauugugcuauuugcacucuagccugggug

SEQ ID NO: 157598 - RNA, 32 nt, Human
gagauugugcugcugcacuccagccugggaga

SEQ ID NO: 157599 - RNA, 32 nt, Human
gagauugugcugcugcacuccagccuggguga

SEQ ID NO: 157600 - RNA, 32 nt, Human
gagauuguggcacugcacuccagucuggguga

SEQ ID NO: 157601 - RNA, 32 nt, Human
gagauugugucauugcacuccagccugggcaa

SEQ ID NO: 157602 - RNA, 32 nt, Human
gagauuguugcaaggaagagauuugugauagu

SEQ ID NO: 157603 - RNA, 32 nt, Human
gagauuuaaagaaaaagaaaguaguaccuuag

SEQ ID NO: 157604 - RNA, 32 nt, Human
gagauuuaaucaauuauacucuggaagcauuu

SEQ ID NO: 157605 - RNA, 32 nt, Human
gagauuuacagagagagaguaacuugcauaag

SEQ ID NO: 157606 - RNA, 32 nt, Human
gagauuuacagcuggcuuacacaugccuuaug

SEQ ID NO: 157607 - RNA, 32 nt, Human
gagauuuacugcacugauggaccucaucaaug

SEQ ID NO: 157608 - RNA, 25 nt, Human
gagauuuaucuauguuguauuauca

SEQ ID NO: 157609 - RNA, 32 nt, Human
gagauuucaagucguacuauggaacaccuuuc

SEQ ID NO: 157610 - RNA, 32 nt, Human
gagauuucaccagugcacuccagccuggguga

SEQ ID NO: 157611 - RNA, 32 nt, Human
gagauuucacuaccuuuauguuaaaaguugug

SEQ ID NO: 157612 - RNA, 32 nt, Human
gagauuucaguuacuuaccugcauguguugua

SEQ ID NO: 157613 - RNA, 32 nt, Human
gagauuuccuaccugauugagauuuucaguag

SEQ ID NO: 157614 - RNA, 32 nt, Human
gagauuugaagccagucaucucagcacugucu

SEQ ID NO: 157615 - RNA, 32 nt, Human
gagauuugcuccauucucuuuggaauaacagg

SEQ ID NO: 157616 - RNA, 32 nt, Human
gagauuugcuugaacccaggaggcagagguug

SEQ ID NO: 157617 - RNA, 32 nt, Human
gagauuuggagauuuguggaaaagugagacug

SEQ ID NO: 157618 - RNA, 20 nt, Human
gagauuugggcggggacaca

SEQ ID NO: 157619 - RNA, 21 nt, Human
gagauuugggugaggacacag

SEQ ID NO: 157620 - RNA, 24 nt, Human
gagauuuggguggagacacggcca

SEQ ID NO: 157621 - RNA, 24 nt, Human
gagauuuggguggggacacagcca

SEQ ID NO: 157622 - RNA, 24 nt, Human
gagauuugguugggaacacagcca

SEQ ID NO: 157623 - RNA, 24 nt, Human
gagauuugguuuauguuaccauua

SEQ ID NO: 157624 - RNA, 32 nt, Human
gagauuugucaccagugagcccuuggcacggu

SEQ ID NO: 157625 - RNA, 32 nt, Human
gagauuuuauuggaagccgcuggugagcaauu

SEQ ID NO: 157626 - RNA, 32 nt, Human
gagauuuugcaacugcacuccagccugggcua

SEQ ID NO: 157627 - RNA, 32 nt, Human
gagauuuugggagcuuuccaaucugccacaaa

SEQ ID NO: 157628 - RNA, 25 nt, Human
gagauuuuggguggggacacagcca

SEQ ID NO: 157629 - RNA, 32 nt, Human
gagauuuuggugaggaaacuugcuggaguuuu

SEQ ID NO: 157630 - RNA, 32 nt, Human
gagauuuuguagcauuuugcaaauggguaugc

SEQ ID NO: 157631 - RNA, 32 nt, Human
gagauuuugucauugaacuggugacaggaugu

SEQ ID NO: 157632 - RNA, 32 nt, Human
gagauuuugugaauaugguggaaaaaugaauu

SEQ ID NO: 157633 - RNA, 32 nt, Human
gagauuuuguugaaguucacacacagaucaca

SEQ ID NO: 157634 - RNA, 24 nt, Human
gagauuuuuacaagucagauuuuu

SEQ ID NO: 157635 - RNA, 32 nt, Human
gagauuuuucauuuuuccaugacauuuuuccu

SEQ ID NO: 157636 - RNA, 32 nt, Human
gagauuuuuccucugcguagagccauccagau

SEQ ID NO: 157637 - RNA, 32 nt, Human
gagcaaaaacuagaaugauacaaagaaagguc

SEQ ID NO: 157638 - RNA, 32 nt, Human
gagcaaaacaaccucugucacacacacaaaaa

SEQ ID NO: 157639 - RNA, 32 nt, Human
gagcaaaacagcugccauagugaacagcauca

SEQ ID NO: 157640 - RNA, 32 nt, Human
gagcaaaaccaccucagacacccgggccuucu

SEQ ID NO: 157641 - RNA, 32 nt, Human
gagcaaaacuaaggaugaaauguaauauucau

SEQ ID NO: 157642 - RNA, 32 nt, Human
gagcaaaacugaccggaaccugggcggugcau

SEQ ID NO: 157643 - RNA, 32 nt, Human
gagcaaaagaacaaagcuuccacaguguggaa

SEQ ID NO: 157644 - RNA, 32 nt, Human
gagcaaaagagacagggagagguggagaagga

SEQ ID NO: 157645 - RNA, 32 nt, Human
gagcaaaaucaacaugacugguggugagagac

SEQ ID NO: 157646 - RNA, 17 nt, Human
gagcaaacagagcagca

SEQ ID NO: 157647 - RNA, 32 nt, Human
gagcaaaccacauguucugucuugaggagcca

SEQ ID NO: 157648 - RNA, 32 nt, Human
gagcaaaccagccuuggcuuucaguuggaugu

SEQ ID NO: 157649 - RNA, 32 nt, Human
gagcaaacccacccuguccucugacgucccuu

SEQ ID NO: 157650 - RNA, 32 nt, Human
gagcaaacccuccaaagcccuccucacgcagu

SEQ ID NO: 157651 - RNA, 32 nt, Human
gagcaaacucaguggugaacagcuccauuucu

SEQ ID NO: 157652 - RNA, 32 nt, Human
gagcaaacugaaaauuacuaugcacuugucag

SEQ ID NO: 157653 - RNA, 32 nt, Human
gagcaaagagagggugacugaggcagacccca

SEQ ID NO: 157654 - RNA, 32 nt, Human
gagcaaagccacaacgcuuucucugcuggauu

SEQ ID NO: 157655 - RNA, 32 nt, Human
gagcaaaggaugcaucuucccacagccuccuc

SEQ ID NO: 157656 - RNA, 32 nt, Human
gagcaaagucacagaaugaaagagaugguucu

SEQ ID NO: 157657 - RNA, 32 nt, Human
gagcaaaucagcccuucucugaacguuguagg

SEQ ID NO: 157658 - RNA, 32 nt, Human
gagcaaaucaguugcuuccuggacuuguguua

SEQ ID NO: 157659 - RNA, 32 nt, Human
gagcaaaugaugaagacauccggaagaaggug

SEQ ID NO: 157660 - RNA, 32 nt, Human
gagcaaauggccacugaguagccccagagguc

SEQ ID NO: 157661 - RNA, 32 nt, Human
gagcaaaugguuuugggcaagggcuuuggcca

SEQ ID NO: 157662 - RNA, 32 nt, Human
gagcaaaugucuauugaacacuuaaaauuaau

SEQ ID NO: 157663 - RNA, 32 nt, Human
gagcaacaaaggcgugaaagaagugaaaagaa

SEQ ID NO: 157664 - RNA, 32 nt, Human
gagcaacaagauacaaggagcccagggcauga

SEQ ID NO: 157665 - RNA, 32 nt, Human
gagcaacacagaaccaaucuacuaaucuacuc

SEQ ID NO: 157666 - RNA, 32 nt, Human
gagcaacacagugagacccccaucucuacaaa

SEQ ID NO: 157667 - RNA, 29 nt, Human
gagcaacauagcgagaccccaucuuuacc

SEQ ID NO: 157668 - RNA, 32 nt, Human
gagcaacauagugagaccccaucccuauaaaa

SEQ ID NO: 157669 - RNA, 32 nt, Human
gagcaacauagugaggaucccaucucuacgcc

SEQ ID NO: 157670 - RNA, 32 nt, Human
gagcaacauaucaaaaccccaucucuacaaaa

SEQ ID NO: 157671 - RNA, 32 nt, Human
gagcaacaugaugagaccccaucucuacaaaa

SEQ ID NO: 157672 - RNA, 32 nt, Human
gagcaacauggcgaaaccccgucucuacuaaa

SEQ ID NO: 157673 - RNA, 32 nt, Human
gagcaacauggcgaaaccccgucuguaauaaa

SEQ ID NO: 157674 - RNA, 32 nt, Human
gagcaacaugguaaaaccccaucucuaccaaa

SEQ ID NO: 157675 - RNA, 32 nt, Human
gagcaacauggugaaacccugucucuaccaaa

SEQ ID NO: 157676 - RNA, 31 nt, Human
gagcaacauggugagagcucaucucuacauu

SEQ ID NO: 157677 - RNA, 32 nt, Human
gagcaaccacagugacaacaguuucauuuuuc

SEQ ID NO: 157678 - RNA, 32 nt, Human
gagcaaccagcaccugcccccuuggaaugcag

SEQ ID NO: 157679 - RNA, 32 nt, Human
gagcaacccugggaaaagugacuucaucccuu

SEQ ID NO: 157680 - RNA, 17 nt, Human
gagcaaccgagagagca

SEQ ID NO: 157681 - RNA, 32 nt, Human
gagcaaccuacugucuaagcaguuuuguaaau

SEQ ID NO: 157682 - RNA, 32 nt, Human
gagcaacgagauggugagcaucagugcaaaug

SEQ ID NO: 157683 - RNA, 32 nt, Human
gagcaacuaucagggcagcucugccuccuccu

SEQ ID NO: 157684 - RNA, 19 nt, Human
gagcaacucuggcaggcac

SEQ ID NO: 157685 - RNA, 32 nt, Human
gagcaacuggacuauagcagggcugggcucug

SEQ ID NO: 157686 - RNA, 32 nt, Human
gagcaacuguacuccagcuuggcgacagagca

SEQ ID NO: 157687 - RNA, 32 nt, Human
gagcaagaacagagccagcacacacauuggag

SEQ ID NO: 157688 - RNA, 32 nt, Human
gagcaagaagaaaagaggaauggugcccgaau

SEQ ID NO: 157689 - RNA, 32 nt, Human
gagcaagaagagcaaggaaggccaggcgcggu

SEQ ID NO: 157690 - RNA, 22 nt, Human
gagcaagaaggaaggaggcaga

SEQ ID NO: 157691 - RNA, 32 nt, Human
gagcaagaagguaggguugcaaggaagggccg

SEQ ID NO: 157692 - RNA, 32 nt, Human
gagcaagaaucagacaucacagaugcaacuuc

SEQ ID NO: 157693 - RNA, 32 nt, Human
gagcaagaccaacuaugugcacgaugcuaaga

SEQ ID NO: 157694 - RNA, 32 nt, Human
gagcaagacgccucucggggccugugccgcac

SEQ ID NO: 157695 - RNA, 32 nt, Human
gagcaagagagcgagggagggagcgcagggcc

SEQ ID NO: 157696 - RNA, 32 nt, Human
gagcaagagucauuccaucacagggacugcau

SEQ ID NO: 157697 - RNA, 32 nt, Human
gagcaagaugcugagcaagggucugaagcgga

SEQ ID NO: 157698 - RNA, 32 nt, Human
gagcaagauuugggucucuccagaccucuggg

SEQ ID NO: 157699 - RNA, 32 nt, Human
gagcaagcaagagcucugaagccagacugccu

SEQ ID NO: 157700 - RNA, 32 nt, Human
gagcaagcagauggccgggugccuggagcacu

SEQ ID NO: 157701 - RNA, 32 nt, Human
gagcaagcaggcccccaccugcccuuagugau

SEQ ID NO: 157702 - RNA, 20 nt, Human
gagcaagccaaggagcagca

SEQ ID NO: 157703 - RNA, 16 nt, Human
gagcaagccacagugc

SEQ ID NO: 157704 - RNA, 32 nt, Human
gagcaagcccagaggcagaggaggcgacagag

SEQ ID NO: 157705 - RNA, 31 nt, Human
gagcaagcccccuuggagcacugcguacaua

SEQ ID NO: 157706 - RNA, 22 nt, Human
gagcaagcucucgagggcagca

SEQ ID NO: 157707 - RNA, 32 nt, Human
gagcaagcuuaucugaucuccugggaucucua

SEQ ID NO: 157708 - RNA, 32 nt, Human
gagcaaggaccccuguaacacauucauccuug

SEQ ID NO: 157709 - RNA, 32 nt, Human
gagcaaggagaauauaacauguuugcaaaguc

SEQ ID NO: 157710 - RNA, 32 nt, Human
gagcaaggcccagccaaggagguacagauucc

SEQ ID NO: 157711 - RNA, 32 nt, Human
gagcaaggcuggaaguucuaaccuucucagua

SEQ ID NO: 157712 - RNA, 32 nt, Human
gagcaaggcuggaucugggcuaggugaccccu

SEQ ID NO: 157713 - RNA, 32 nt, Human
gagcaagggcacaaacugcagcugugagugcg

SEQ ID NO: 157714 - RNA, 32 nt, Human
gagcaagggggcuccugaugggugggggcagg

SEQ ID NO: 157715 - RNA, 32 nt, Human
gagcaagggucucccccagcaggauggguggg

SEQ ID NO: 157716 - RNA, 32 nt, Human
gagcaagguggagggugcagaggggcuggggu

SEQ ID NO: 157717 - RNA, 32 nt, Human
gagcaagucuccaaaucagacagcugccucag

SEQ ID NO: 157718 - RNA, 32 nt, Human
gagcaaguggacagaggagggagccagcuaag

SEQ ID NO: 157719 - RNA, 32 nt, Human
gagcaaguuugagagaagaaugaaucaacugc

SEQ ID NO: 157720 - RNA, 32 nt, Human
gagcaaguuuuguauuugugaccucagcuuug

SEQ ID NO: 157721 - RNA, 32 nt, Human
gagcaauaacugaagacaaggagagauggaac

SEQ ID NO: 157722 - RNA, 32 nt, Human
gagcaauagccuggcuucagagcuggagugcc

SEQ ID NO: 157723 - RNA, 32 nt, Human
gagcaauauuauauacaucuaggguaagaaca

SEQ ID NO: 157724 - RNA, 32 nt, Human
gagcaauccugcaagagcaagguacauaaaca

SEQ ID NO: 157725 - RNA, 32 nt, Human
gagcaaugacaugggggacaguuggcagaugg

SEQ ID NO: 157726 - RNA, 24 nt, Human
gagcaaugaucguaccacugcacu

SEQ ID NO: 157727 - RNA, 32 nt, Human
gagcaaugcagcacucuaggaagccugcuagg

SEQ ID NO: 157728 - RNA, 32 nt, Human
gagcaauggaaaauauguagcugcuuucauua

SEQ ID NO: 157729 - RNA, 32 nt, Human
gagcaauggagauccaggcuggguauagacaa

SEQ ID NO: 157730 - RNA, 32 nt, Human
gagcaauggcaccugggcagugccagggcuua

SEQ ID NO: 157731 - RNA, 32 nt, Human
gagcaauggugccaauagcggcucuuuauuug

SEQ ID NO: 157732 - RNA, 32 nt, Human
gagcaauguggugaaaccccaucucuacuaaa

SEQ ID NO: 157733 - RNA, 32 nt, Human
gagcaauuaugcuguuacuauguaugaguaau

SEQ ID NO: 157734 - RNA, 32 nt, Human
gagcaauugaagaaagggaggagccagauuag

SEQ ID NO: 157735 - RNA, 32 nt, Human
gagcaauugccagaucaugucacccacccagc

SEQ ID NO: 157736 - RNA, 32 nt, Human
gagcaauugccuggcccucccuaagcccuaua

SEQ ID NO: 157737 - RNA, 32 nt, Human
gagcaauuuauacuuuacccucaggcuguccu

SEQ ID NO: 157738 - RNA, 32 nt, Human
gagcaauuugggaggccaaggugggaguuuug

SEQ ID NO: 157739 - RNA, 32 nt, Human
gagcacaaaaggagauuuucauauaacuuguu

SEQ ID NO: 157740 - RNA, 32 nt, Human
gagcacaaagcccgcucuguugagggcugggu

SEQ ID NO: 157741 - RNA, 32 nt, Human
gagcacaagacggagguugagguggggcuaag

SEQ ID NO: 157742 - RNA, 17 nt, Human
gagcacacagagcagca

SEQ ID NO: 157743 - RNA, 32 nt, Human
gagcacacagauaagacagaggggaggaggug

SEQ ID NO: 157744 - RNA, 32 nt, Human
gagcacaccacugcacuccagccugggcaaca

SEQ ID NO: 157745 - RNA, 19 nt, Human
gagcacaccacuguccccu

SEQ ID NO: 157746 - RNA, 22 nt, Human
gagcacaccuagccugcuugcu

SEQ ID NO: 157747 - RNA, 32 nt, Human
gagcacacgacuuccuuggagccugggccuuu

SEQ ID NO: 157748 - RNA, 32 nt, Human
gagcacacuaguuagcagaacagaacccaggg

SEQ ID NO: 157749 - RNA, 32 nt, Human
gagcacacuccauuuucccaugucugacuucg

SEQ ID NO: 157750 - RNA, 32 nt, Human
gagcacacugaugggaagcuucccucucccag

SEQ ID NO: 157751 - RNA, 32 nt, Human
gagcacacugcuggcccaugcgccucggggcu

SEQ ID NO: 157752 - RNA, 32 nt, Human
gagcacagacuagaagucagguucaggaauca

SEQ ID NO: 157753 - RNA, 30 nt, Human
gagcacagacuggaaucagaagacacggag

SEQ ID NO: 157754 - RNA, 32 nt, Human
gagcacagagaagggguagaaugcuccuggga

SEQ ID NO: 157755 - RNA, 23 nt, Human
gagcacagaggagugggccggga

SEQ ID NO: 157756 - RNA, 24 nt, Human
gagcacagaucaugccacugcacu

SEQ ID NO: 157757 - RNA, 32 nt, Human
gagcacagcacugggaaaugggagcacaguac

SEQ ID NO: 157758 - RNA, 32 nt, Human
gagcacagcagcagcucgccuaccucugagcc

SEQ ID NO: 157759 - RNA, 32 nt, Human
gagcacagcaugggccagggccccagaacaca

SEQ ID NO: 157760 - RNA, 32 nt, Human
gagcacagccaagaccugcagagugcccucau

SEQ ID NO: 157761 - RNA, 32 nt, Human
gagcacagccuucuuccccuucgugucuacac

SEQ ID NO: 157762 - RNA, 21 nt, Human
gagcacagcgcccuacuuccc

SEQ ID NO: 157763 - RNA, 32 nt, Human
gagcacagcuaaaugaaacugcugcucuaauu

SEQ ID NO: 157764 - RNA, 32 nt, Human
gagcacagcucaggaacuagacugccuggguu

SEQ ID NO: 157765 - RNA, 32 nt, Human
gagcacaggagacggagguugcugugagcuga

SEQ ID NO: 157766 - RNA, 16 nt, Human
gagcacaggagcagca

SEQ ID NO: 157767 - RNA, 32 nt, Human
gagcacaggagggagguugagguggggcuaag

SEQ ID NO: 157768 - RNA, 32 nt, Human
gagcacaggaguuugaggcugcagugaccuau

SEQ ID NO: 157769 - RNA, 32 nt, Human
gagcacaggcccuguuuguuugcacauaauaa

SEQ ID NO: 157770 - RNA, 20 nt, Human
gagcacaggcuucaugcaca

SEQ ID NO: 157771 - RNA, 32 nt, Human
gagcacaggggcaucuggaggucaagggugcu

SEQ ID NO: 157772 - RNA, 32 nt, Human
gagcacagguucucaguccaagcuguggaaaa

SEQ ID NO: 157773 - RNA, 32 nt, Human
gagcacagguucucagucuaagcuguggaaaa

SEQ ID NO: 157774 - RNA, 32 nt, Human
gagcacaguaaugggaaaugggagcacagugc

SEQ ID NO: 157775 - RNA, 32 nt, Human
gagcacaguacuaggaaaugggagcacaguac

SEQ ID NO: 157776 - RNA, 32 nt, Human
gagcacaguacugggaaauggaagcacauggc

SEQ ID NO: 157777 - RNA, 32 nt, Human
gagcacaguacugggaaaugggagcacaguac

SEQ ID NO: 157778 - RNA, 32 nt, Human
gagcacaguacugggaaaugggagcacagugc

SEQ ID NO: 157779 - RNA, 32 nt, Human
gagcacaguacugggaaaugggagcauaguac

SEQ ID NO: 157780 - RNA, 32 nt, Human
gagcacaguacugggaaaugggagcccacagu

SEQ ID NO: 157781 - RNA, 32 nt, Human
gagcacaguacugggaaaugggagcccaguac

SEQ ID NO: 157782 - RNA, 32 nt, Human
gagcacaguacugggaaaugggaguucacagc

SEQ ID NO: 157783 - RNA, 32 nt, Human
gagcacaguacugggaaaugggggcucacagc

SEQ ID NO: 157784 - RNA, 32 nt, Human
gagcacaguacugggaaaugguagcacaguac

SEQ ID NO: 157785 - RNA, 32 nt, Human
gagcacaguauugggaaaugggagcacaguac

SEQ ID NO: 157786 - RNA, 32 nt, Human
gagcacagugagccuuacucagcacuggggag

SEQ ID NO: 157787 - RNA, 32 nt, Human
gagcacagugcugggaaaugggagcacaaagu

SEQ ID NO: 157788 - RNA, 32 nt, Human
gagcacaguuuugggaaaugggagcacaguac

SEQ ID NO: 157789 - RNA, 21 nt, Human
gagcacauaugcaaugccuga

SEQ ID NO: 157790 - RNA, 16 nt, Human
gagcacauaugggguc

SEQ ID NO: 157791 - RNA, 32 nt, Human
gagcacaucacacguauaggcaggugugaggg

SEQ ID NO: 157792 - RNA, 32 nt, Human
gagcacaugauauacgacuugcucugauaucc

SEQ ID NO: 157793 - RNA, 32 nt, Human
gagcacaugugaauuaaccugcauugauggaa

SEQ ID NO: 157794 - RNA, 32 nt, Human
gagcacaugugugcaugugugugcacacgugu

SEQ ID NO: 157795 - RNA, 26 nt, Human
gagcacauugcagccccaacgguggc

SEQ ID NO: 157796 - RNA, 21 nt, Human
gagcacauuuguggacuucca

SEQ ID NO: 157797 - RNA, 32 nt, Human
gagcacauuuuguggaccugguuccaccuuuc

SEQ ID NO: 157798 - RNA, 32 nt, Human
gagcaccaaacuccgccccaaaaaggagagua

SEQ ID NO: 157799 - RNA, 22 nt, Human
gagcaccaagcaagauggcagc

SEQ ID NO: 157800 - RNA, 32 nt, Human
gagcaccaccaccaccaccacugagauccggc

SEQ ID NO: 157801 - RNA, 32 nt, Human
gagcaccaccaggccucgggccccagaggucc

SEQ ID NO: 157802 - RNA, 32 nt, Human
gagcaccacugcacuaagccagugcggagcug

SEQ ID NO: 157803 - RNA, 32 nt, Human
gagcaccagcaaccccagcuaucuggaucuga

SEQ ID NO: 157804 - RNA, 20 nt, Human
gagcaccagccuaauggagg

SEQ ID NO: 157805 - RNA, 24 nt, Human
gagcaccagccuuggggacccugg

SEQ ID NO: 157806 - RNA, 32 nt, Human
gagcaccagcugggcguggagcugugucaggc

SEQ ID NO: 157807 - RNA, 32 nt, Human
gagcaccaggaucaugaagcccaagagcgaga

SEQ ID NO: 157808 - RNA, 32 nt, Human
gagcaccaggggcagaggcggccagacaaccu

SEQ ID NO: 157809 - RNA, 32 nt, Human
gagcaccauggccgcugggcucugccuuccac

SEQ ID NO: 157810 - RNA, 32 nt, Human
gagcacccaagccaggcagggggucuggcagc

SEQ ID NO: 157811 - RNA, 32 nt, Human
gagcacccaagccaggugggugguggcucuua

SEQ ID NO: 157812 - RNA, 32 nt, Human
gagcacccacagugggguauucuucauaaguu

SEQ ID NO: 157813 - RNA, 32 nt, Human
gagcacccagaacugcuggucagaggccugca

SEQ ID NO: 157814 - RNA, 32 nt, Human
gagcacccagagggauuuuucagugggaagca

SEQ ID NO: 157815 - RNA, 32 nt, Human
gagcacccaggcagacccaguccugguuggga

SEQ ID NO: 157816 - RNA, 32 nt, Human
gagcacccaggccaggaguggagccaggucgc

SEQ ID NO: 157817 - RNA, 32 nt, Human
gagcacccaucuugugucaggcacucugcuaa

SEQ ID NO: 157818 - RNA, 18 nt, Human
gagcaccccaggcaggac

SEQ ID NO: 157819 - RNA, 32 nt, Human
gagcacccccaggaggaggggagggugggagc

SEQ ID NO: 157820 - RNA, 32 nt, Human
gagcacccccuccugguugggccccucaguug

SEQ ID NO: 157821 - RNA, 32 nt, Human
gagcaccccuccugagaccccagacucagaag

SEQ ID NO: 157822 - RNA, 32 nt, Human
gagcacccuccaggauuucaggacaaggcucu

SEQ ID NO: 157823 - RNA, 32 nt, Human
gagcacccuggagggcagagacaagcgggagu

SEQ ID NO: 157824 - RNA, 32 nt, Human
gagcaccgagaagaacugggcgacucccaguc

SEQ ID NO: 157825 - RNA, 32 nt, Human
gagcaccgcagcgggagccagcagggggcagc

SEQ ID NO: 157826 - RNA, 32 nt, Human
gagcaccgccagccaccggcaccaagaccggc

SEQ ID NO: 157827 - RNA, 32 nt, Human
gagcaccgcugcacucgcggccggcgaugcgg

SEQ ID NO: 157828 - RNA, 32 nt, Human
gagcaccggguggcagauguucuaugcagugu

SEQ ID NO: 157829 - RNA, 32 nt, Human
gagcaccuacuaggcgcugggcauuuugcuag

SEQ ID NO: 157830 - RNA, 32 nt, Human
gagcaccuccagcagaugucacucugagugug

SEQ ID NO: 157831 - RNA, 32 nt, Human
gagcaccuccaggagccucaguuucgccuuua

SEQ ID NO: 157832 - RNA, 32 nt, Human
gagcaccucugccuucuuccucuguugccaug

SEQ ID NO: 157833 - RNA, 32 nt, Human
gagcaccugccugcccugccgauguguccugu

SEQ ID NO: 157834 - RNA, 32 nt, Human
gagcaccugcugugugugcacugcuguucuag

SEQ ID NO: 157835 - RNA, 32 nt, Human
gagcaccugggaagccgugaggaggacguggg

SEQ ID NO: 157836 - RNA, 32 nt, Human
gagcaccuggggaucccaggaacccuggucag

SEQ ID NO: 157837 - RNA, 32 nt, Human
gagcaccuggugacacaaaugaaguggcggcu

SEQ ID NO: 157838 - RNA, 32 nt, Human
gagcaccuguaaucccagcuacucgggaggcu

SEQ ID NO: 157839 - RNA, 32 nt, Human
gagcaccuguaaucccagcuacucuggaggcu

SEQ ID NO: 157840 - RNA, 32 nt, Human
gagcaccuguaaucccagcuucucgggaggcu

SEQ ID NO: 157841 - RNA, 32 nt, Human
gagcaccuguaaucccugcuacucgggaggcu

SEQ ID NO: 157842 - RNA, 32 nt, Human
gagcaccuguaauccuagcuacuugggaggcu

SEQ ID NO: 157843 - RNA, 32 nt, Human
gagcaccuguaaucucagcacuuugggaggcc

SEQ ID NO: 157844 - RNA, 32 nt, Human
gagcaccuguaaugucagcuacuugggaggcu

SEQ ID NO: 157845 - RNA, 32 nt, Human
gagcaccuguagucccagcuacucgggaggcu

SEQ ID NO: 157846 - RNA, 32 nt, Human
gagcaccugucauccaggcagcucuucccaau

SEQ ID NO: 157847 - RNA, 32 nt, Human
gagcaccuuccagagaagcuauuccaggucuc

SEQ ID NO: 157848 - RNA, 32 nt, Human
gagcaccuuuccucguggcuguuuccaggcac

SEQ ID NO: 157849 - RNA, 32 nt, Human
gagcaccuuugcucccccuuauccuccuuccu

SEQ ID NO: 157850 - RNA, 32 nt, Human
gagcaccuuuugaaugacuugcaccuggaaga

SEQ ID NO: 157851 - RNA, 32 nt, Human
gagcacgauggaggaggagcugagagagaaag

SEQ ID NO: 157852 - RNA, 20 nt, Human
gagcacgcagggcguccgag

SEQ ID NO: 157853 - RNA, 20 nt, Human
gagcacgcauccuaaugaga

SEQ ID NO: 157854 - RNA, 32 nt, Human
gagcacgccaagcagcuccccaucgcuccgga

SEQ ID NO: 157855 - RNA, 32 nt, Human
gagcacgccacugcacuccagccugggugaca

SEQ ID NO: 157856 - RNA, 32 nt, Human
gagcacgccauugcacuccacacuccagccug

SEQ ID NO: 157857 - RNA, 32 nt, Human
gagcacgccugccucccucuccccuccgcccu

SEQ ID NO: 157858 - RNA, 32 nt, Human
gagcacgcuguaccgccagccccagcccugcc

SEQ ID NO: 157859 - RNA, 32 nt, Human
gagcacgcuucagggauaggagaucauaguca

SEQ ID NO: 157860 - RNA, 32 nt, Human
gagcacggaggcagagacgugggagccgauga

SEQ ID NO: 157861 - RNA, 32 nt, Human
gagcacggcaccgagggagccgccacacgguc

SEQ ID NO: 157862 - RNA, 32 nt, Human
gagcacggcacugggaaaugggagcacaguac

SEQ ID NO: 157863 - RNA, 24 nt, Human
gagcacggccagccuuccgccacg

SEQ ID NO: 157864 - RNA, 32 nt, Human
gagcacgggcaggcucaggcgggaagaaggag

SEQ ID NO: 157865 - RNA, 32 nt, Human
gagcacgguagggcagccuggugagaggggcc

SEQ ID NO: 157866 - RNA, 32 nt, Human
gagcacguauuucuccccucuaguaccucugc

SEQ ID NO: 157867 - RNA, 32 nt, Human
gagcacgucccccacguccucuccuucucgcc

SEQ ID NO: 157868 - RNA, 32 nt, Human
gagcacguguuacugccagucugcgucagcgu

SEQ ID NO: 157869 - RNA, 32 nt, Human
gagcacguuuaaaaucucaguaacuuuggggu

SEQ ID NO: 157870 - RNA, 32 nt, Human
gagcacuaggggcagaggcggccagacaaccu

SEQ ID NO: 157871 - RNA, 32 nt, Human
gagcacuauaaaaucaaaaaccaaugaaaugg

SEQ ID NO: 157872 - RNA, 32 nt, Human
gagcacuauaaaccacauguuuucauuucuag

SEQ ID NO: 157873 - RNA, 32 nt, Human
gagcacuauuaaaauacaugcauuggcucaau

SEQ ID NO: 157874 - RNA, 32 nt, Human
gagcacucacagucuaaggcuggaaguuuaau

SEQ ID NO: 157875 - RNA, 21 nt, Human
gagcacucagcugugacccug

SEQ ID NO: 157876 - RNA, 32 nt, Human
gagcacuccauugcuuucuuuccuggccacac

SEQ ID NO: 157877 - RNA, 32 nt, Human
gagcacucccagcccggggccugcugccucca

SEQ ID NO: 157878 - RNA, 32 nt, Human
gagcacuccugcuuccuugccugcuugcaguu

SEQ ID NO: 157879 - RNA, 32 nt, Human
gagcacucucuaaacuguacagcugguauucc

SEQ ID NO: 157880 - RNA, 32 nt, Human
gagcacugacccacagcacuacaccgaggaca

SEQ ID NO: 157881 - RNA, 32 nt, Human
gagcacugagcagcgcucagaauggaagccau

SEQ ID NO: 157882 - RNA, 32 nt, Human
gagcacugagucucugggauucuggcaaggua

SEQ ID NO: 157883 - RNA, 32 nt, Human
gagcacugcagcauccagccuuucaaagcuga

SEQ ID NO: 157884 - RNA, 32 nt, Human
gagcacugcccgcugugccugccugcaagucu

SEQ ID NO: 157885 - RNA, 32 nt, Human
gagcacugcgcaugcgggaaacccacccugua

SEQ ID NO: 157886 - RNA, 32 nt, Human
gagcacuggagcuggagggagcuccagccaag

SEQ ID NO: 157887 - RNA, 32 nt, Human
gagcacuggagugcagggaggagaggggaagg

SEQ ID NO: 157888 - RNA, 32 nt, Human
gagcacuggggcaggaggaucgcuugugccca

SEQ ID NO: 157889 - RNA, 32 nt, Human
gagcacuguauguuccucucuuuuggaguugu

SEQ ID NO: 157890 - RNA, 32 nt, Human
gagcacugucguccuucagggcuccagccucu

SEQ ID NO: 157891 - RNA, 32 nt, Human
gagcacugugaccuuucuuucccuggaacucu

SEQ ID NO: 157892 - RNA, 32 nt, Human
gagcacuguuagacacacauagaccugcaggc

SEQ ID NO: 157893 - RNA, 22 nt, Human
gagcacuuaguccugcugguuu

SEQ ID NO: 157894 - RNA, 32 nt, Human
gagcacuucccccuccuugaggcaggaauacu

SEQ ID NO: 157895 - RNA, 32 nt, Human
gagcacuucgaggaggaggaggaggccggggu

SEQ ID NO: 157896 - RNA, 32 nt, Human
gagcacuucugagugauaacuaaagcaguuug

SEQ ID NO: 157897 - RNA, 32 nt, Human
gagcacuuuggaauguacauggaaaggaugga

SEQ ID NO: 157898 - RNA, 32 nt, Human
gagcacuuugggaggccaagacaggaggauca

SEQ ID NO: 157899 - RNA, 32 nt, Human
gagcacuuugggaggccgaggugggcggauca

SEQ ID NO: 157900 - RNA, 32 nt, Human
gagcacuuugggaggcugaggugggcagauca

SEQ ID NO: 157901 - RNA, 32 nt, Human
gagcagaaaacccaagggcagguggagagucc

SEQ ID NO: 157902 - RNA, 32 nt, Human
gagcagaaaggagagagaccuauguuugcuaa

SEQ ID NO: 157903 - RNA, 32 nt, Human
gagcagaaaugccaccaaugccaagugcccca

SEQ ID NO: 157904 - RNA, 32 nt, Human
gagcagaacagggaggcuagagcgcagcggga

SEQ ID NO: 157905 - RNA, 32 nt, Human
gagcagaacagucccucacaccuggcccggca

SEQ ID NO: 157906 - RNA, 32 nt, Human
gagcagaacccccauuccccagccucugcugg

SEQ ID NO: 157907 - RNA, 32 nt, Human
gagcagaacucuguggcuggcagccacuauuc

SEQ ID NO: 157908 - RNA, 21 nt, Human
gagcagaacugggagcagaug

SEQ ID NO: 157909 - RNA, 21 nt, Human
gagcagaacuucuuguaccca

SEQ ID NO: 157910 - RNA, 32 nt, Human
gagcagaagaaagguguuccuucccauggaua

SEQ ID NO: 157911 - RNA, 32 nt, Human
gagcagaagaaggagggagggagccagccgcu

SEQ ID NO: 157912 - RNA, 32 nt, Human
gagcagaagaauugagaaagagaaugagacca

SEQ ID NO: 157913 - RNA, 32 nt, Human
gagcagaaggcuugccuuccugggagcagguu

SEQ ID NO: 157914 - RNA, 32 nt, Human
gagcagaagggcugcauuuugcuuaucagaag

SEQ ID NO: 157915 - RNA, 32 nt, Human
gagcagaagucaguggcugcucaccagagagg

SEQ ID NO: 157916 - RNA, 32 nt, Human
gagcagaaucccccacucccaccccaccaacc

SEQ ID NO: 157917 - RNA, 32 nt, Human
gagcagacagagaaaugugaagggugggguuu

SEQ ID NO: 157918 - RNA, 32 nt, Human
gagcagacguaccccugccccaccucagcccg

SEQ ID NO: 157919 - RNA, 20 nt, Human
gagcagacgucugaagcagc

SEQ ID NO: 157920 - RNA, 32 nt, Human
gagcagacguggcuuuuuaugugucuuguugg

SEQ ID NO: 157921 - RNA, 32 nt, Human
gagcagacuggaagaaugggggugggagggug

SEQ ID NO: 157922 - RNA, 32 nt, Human
gagcagacuuucuaacauaccuaguuuugugu

SEQ ID NO: 157923 - RNA, 32 nt, Human
gagcagagaacacuggcuucacagaggacuuu

SEQ ID NO: 157924 - RNA, 32 nt, Human
gagcagagaagcagagauguuccuugaacugc

SEQ ID NO: 157925 - RNA, 32 nt, Human
gagcagagacaccacuucucaagcaccugauu

SEQ ID NO: 157926 - RNA, 22 nt, Human
gagcagagacagccccugguuu

SEQ ID NO: 157927 - RNA, 20 nt, Human
gagcagagacuuaaccccca

SEQ ID NO: 157928 - RNA, 32 nt, Human
gagcagagagacccaacugggagccagagaug

SEQ ID NO: 157929 - RNA, 32 nt, Human
gagcagagagcagaaccuggugugugggacac

SEQ ID NO: 157930 - RNA, 18 nt, Human
gagcagagagcgcaucga

SEQ ID NO: 157931 - RNA, 32 nt, Human
gagcagagaggaaggagaaagaggaggagaga

SEQ ID NO: 157932 - RNA, 32 nt, Human
gagcagagaggaagggauggguggacucacag

SEQ ID NO: 157933 - RNA, 32 nt, Human
gagcagagaggcccagggaggggccagguguc

SEQ ID NO: 157934 - RNA, 24 nt, Human
gagcagagaucacaccacugcacu

SEQ ID NO: 157935 - RNA, 24 nt, Human
gagcagagaucgcgccacugcacu

SEQ ID NO: 157936 - RNA, 32 nt, Human
gagcagagauggggagcuggauccgcgcagaa

SEQ ID NO: 157937 - RNA, 24 nt, Human
gagcagagauugcaccacugcacu

SEQ ID NO: 157938 - RNA, 24 nt, Human
gagcagagauugcgccacugcacu

SEQ ID NO: 157939 - RNA, 24 nt, Human
gagcagagauugcgccauugcacu

SEQ ID NO: 157940 - RNA, 32 nt, Human
gagcagagcagacagcagcagaggggcucccu

SEQ ID NO: 157941 - RNA, 24 nt, Human
gagcagagcagccagagcccugug

SEQ ID NO: 157942 - RNA, 18 nt, Human
gagcagagccaggcccag

SEQ ID NO: 157943 - RNA, 32 nt, Human
gagcagagccuggguuuggagugagugccugg

SEQ ID NO: 157944 - RNA, 32 nt, Human
gagcagagccuuugucucaggagcaaaccagc

SEQ ID NO: 157945 - RNA, 32 nt, Human
gagcagagcuggagcucgaucaugccugcgug

SEQ ID NO: 157946 - RNA, 32 nt, Human
gagcagaggaaagaggaaagacacagagagac

SEQ ID NO: 157947 - RNA, 32 nt, Human
gagcagaggaagagaucccagauaguagccag

SEQ ID NO: 157948 - RNA, 32 nt, Human
gagcagaggacccuguaccaggaugugaugcu

SEQ ID NO: 157949 - RNA, 32 nt, Human
gagcagaggacuccagaggcucagggagcagc

SEQ ID NO: 157950 - RNA, 32 nt, Human
gagcagaggacuggucuggagcugggcaaggg

SEQ ID NO: 157951 - RNA, 21 nt, Human
gagcagaggagcacacagaug

SEQ ID NO: 157952 - RNA, 32 nt, Human
gagcagaggaggaggaggcaugagcgaggcgg

SEQ ID NO: 157953 - RNA, 32 nt, Human
gagcagaggaggaggaggcaugagugaggcgg

SEQ ID NO: 157954 - RNA, 32 nt, Human
gagcagaggaggucuuggcagagguccgcggg

SEQ ID NO: 157955 - RNA, 22 nt, Human
gagcagaggcacaaguuagagc

SEQ ID NO: 157956 - RNA, 21 nt, Human
gagcagaggcagcacucgggc

SEQ ID NO: 157957 - RNA, 32 nt, Human
gagcagaggcagcauuuuugcacuggauaaac

SEQ ID NO: 157958 - RNA, 24 nt, Human
gagcagaggcagguguucccgggc

SEQ ID NO: 157959 - RNA, 24 nt, Human
gagcagaggcccuucacccagagc

SEQ ID NO: 157960 - RNA, 19 nt, Human
gagcagaggcucaggcaca

SEQ ID NO: 157961 - RNA, 21 nt, Human
gagcagaggcuucugggccag

SEQ ID NO: 157962 - RNA, 32 nt, Human
gagcagagggaaaggaggcuggagaggcuucu

SEQ ID NO: 157963 - RNA, 22 nt, Human
gagcagagggagcauggcccag

SEQ ID NO: 157964 - RNA, 32 nt, Human
gagcagagggcaugucaguaaugauugguccc

SEQ ID NO: 157965 - RNA, 32 nt, Human
gagcagagggugugugacagaggaggaaaaua

SEQ ID NO: 157966 - RNA, 18 nt, Human
gagcagaggugagcagca

SEQ ID NO: 157967 - RNA, 32 nt, Human
gagcagaggugagcugagugcagugagccaag

SEQ ID NO: 157968 - RNA, 22 nt, Human
gagcagaggugaggaccuggga

SEQ ID NO: 157969 - RNA, 32 nt, Human
gagcagaggugaggagaggcagccugggaaua

SEQ ID NO: 157970 - RNA, 19 nt, Human
gagcagagguggcagcaga

SEQ ID NO: 157971 - RNA, 24 nt, Human
gagcagagguggccgccguggggg

SEQ ID NO: 157972 - RNA, 21 nt, Human
gagcagagugcccgccccgug

SEQ ID NO: 157973 - RNA, 32 nt, Human
gagcagagugugagagagcuaauggaaguaag

SEQ ID NO: 157974 - RNA, 32 nt, Human
gagcagaguguuggagaccaggaacaaucaga

SEQ ID NO: 157975 - RNA, 22 nt, Human
gagcagaguuggaaacacagug

SEQ ID NO: 157976 - RNA, 23 nt, Human
gagcagaguugucauacugguuu

SEQ ID NO: 157977 - RNA, 32 nt, Human
gagcagauaaggggaucuauaaucuuguaaca

SEQ ID NO: 157978 - RNA, 18 nt, Human
gagcagauaugggcagca

SEQ ID NO: 157979 - RNA, 32 nt, Human
gagcagauccccagggacucaggcuggaauag

SEQ ID NO: 157980 - RNA, 32 nt, Human
gagcagaucucugccagcaagcuuaucuggcc

SEQ ID NO: 157981 - RNA, 23 nt, Human
gagcagaucuucuggugacccca

SEQ ID NO: 157982 - RNA, 32 nt, Human
gagcagaugagaccagcucuugcuugguugga

SEQ ID NO: 157983 - RNA, 21 nt, Human
gagcagaugaucggagcagca

SEQ ID NO: 157984 - RNA, 21 nt, Human
gagcagaugauucgagcagca

SEQ ID NO: 157985 - RNA, 31 nt, Human
gagcagaugcagguguuccagaugaucacca

SEQ ID NO: 157986 - RNA, 31 nt, Human
gagcagauggcagaaacagagagaaacgacg

SEQ ID NO: 157987 - RNA, 32 nt, Human
gagcagauggcagaaacagagagaaacgacga

SEQ ID NO: 157988 - RNA, 18 nt, Human
gagcagauggccaagcag

SEQ ID NO: 157989 - RNA, 18 nt, Human
gagcagauuagagcagca

SEQ ID NO: 157990 - RNA, 32 nt, Human
gagcagcaauuuauccgugugcagccccaaac

SEQ ID NO: 157991 - RNA, 18 nt, Human
gagcagcacagagcagca

SEQ ID NO: 157992 - RNA, 32 nt, Human
gagcagcacaugcaccaggagcaucugagucu

SEQ ID NO: 157993 - RNA, 32 nt, Human
gagcagcacccgcagcucagagcccgggacgu

SEQ ID NO: 157994 - RNA, 32 nt, Human
gagcagcacguggcagucacauggcaggccgu

SEQ ID NO: 157995 - RNA, 16 nt, Human
gagcagcacucggaga

SEQ ID NO: 157996 - RNA, 32 nt, Human
gagcagcacugcacccucacuagccagggugu

SEQ ID NO: 157997 - RNA, 20 nt, Human
gagcagcagaagcagcagau

SEQ ID NO: 157998 - RNA, 32 nt, Human
gagcagcagagcaacaggccugacccagggca

SEQ ID NO: 157999 - RNA, 32 nt, Human
gagcagcagauagagacacaggccuguggucc

SEQ ID NO: 158000 - RNA, 32 nt, Human
gagcagcagaugcucacagaccacacucagcu

SEQ ID NO: 158001 - RNA, 32 nt, Human
gagcagcagcacaacuaggaaaccccaaagcc

SEQ ID NO: 158002 - RNA, 20 nt, Human
gagcagcagcacgagcagua

SEQ ID NO: 158003 - RNA, 16 nt, Human
gagcagcagcagcagc

SEQ ID NO: 158004 - RNA, 21 nt, Human
gagcagcagcagcaggcacag

SEQ ID NO: 158005 - RNA, 32 nt, Human
gagcagcagcagcuggcggagcaauggagaug

SEQ ID NO: 158006 - RNA, 32 nt, Human
gagcagcagccugucuugugguaugucugugg

SEQ ID NO: 158007 - RNA, 32 nt, Human
gagcagcagccugucuugugugagguguucug

SEQ ID NO: 158008 - RNA, 32 nt, Human
gagcagcagcggcccccgcucccgggaaccgu

SEQ ID NO: 158009 - RNA, 21 nt, Human
gagcagcagcuacgggcagca

SEQ ID NO: 158010 - RNA, 32 nt, Human
gagcagcagcuaucugucuuuugcugaucuac

SEQ ID NO: 158011 - RNA, 32 nt, Human
gagcagcaggaguggggagggaagggagccaa

SEQ ID NO: 158012 - RNA, 32 nt, Human
gagcagcagggagagacagagacuggacaugu

SEQ ID NO: 158013 - RNA, 23 nt, Human
gagcagcaggggagcgggcacag

SEQ ID NO: 158014 - RNA, 32 nt, Human
gagcagcagggugcagggcuuggaaggaaugu

SEQ ID NO: 158015 - RNA, 32 nt, Human
gagcagcaggugugggugaggggaagguucug

SEQ ID NO: 158016 - RNA, 32 nt, Human
gagcagcagguguuggcagcagagaacaaacc

SEQ ID NO: 158017 - RNA, 32 nt, Human
gagcagcagugcaggccuggccuguguccccg

SEQ ID NO: 158018 - RNA, 32 nt, Human
gagcagcauaccuccauguugugaaggcaucu

SEQ ID NO: 158019 - RNA, 32 nt, Human
gagcagcauaguugauauuuacccacaaacac

SEQ ID NO: 158020 - RNA, 18 nt, Human
gagcagcauaucuuugcu

SEQ ID NO: 158021 - RNA, 32 nt, Human
gagcagccaacacaccagcccagacagcugca

SEQ ID NO: 158022 - RNA, 32 nt, Human
gagcagccaagaaacugccagcaaugcccaga

SEQ ID NO: 158023 - RNA, 32 nt, Human
gagcagccaagcacacaccugcuggcauguug

SEQ ID NO: 158024 - RNA, 32 nt, Human
gagcagccacacucgcaccuccugggugcugu

SEQ ID NO: 158025 - RNA, 32 nt, Human
gagcagccacuuccuggggccgccggccgggg

SEQ ID NO: 158026 - RNA, 32 nt, Human
gagcagccagaacuuucuuucacgguuacugu

SEQ ID NO: 158027 - RNA, 24 nt, Human
gagcagccagcagcuggcccagug

SEQ ID NO: 158028 - RNA, 32 nt, Human
gagcagccagcccagcccgggaacaagacgga

SEQ ID NO: 158029 - RNA, 32 nt, Human
gagcagccaggagagcuuagggucucagggug

SEQ ID NO: 158030 - RNA, 32 nt, Human
gagcagccaguaaugacaguguccuaacagcu

SEQ ID NO: 158031 - RNA, 32 nt, Human
gagcagccaucaggcuggaggugacgaugagu

SEQ ID NO: 158032 - RNA, 32 nt, Human
gagcagcccaggagaagagagauggggguucc

SEQ ID NO: 158033 - RNA, 32 nt, Human
gagcagcccaggagaugggccuaaaauguucu

SEQ ID NO: 158034 - RNA, 32 nt, Human
gagcagcccaggccugggcaaaaagcgcaaag

SEQ ID NO: 158035 - RNA, 32 nt, Human
gagcagcccagggagccaggccccagacaccg

SEQ ID NO: 158036 - RNA, 32 nt, Human
gagcagcccccaggggccgagcguaccuucug

SEQ ID NO: 158037 - RNA, 32 nt, Human
gagcagccccuccacucugcccaggagagggg

SEQ ID NO: 158038 - RNA, 20 nt, Human
gagcagccccuccucugccg

SEQ ID NO: 158039 - RNA, 32 nt, Human
gagcagcccggcucuuaacagagaugcaggac

SEQ ID NO: 158040 - RNA, 32 nt, Human
gagcagcccuaggcagguccugguuuuuccaa

SEQ ID NO: 158041 - RNA, 32 nt, Human
gagcagcccugccugcugcucuucccccacca

SEQ ID NO: 158042 - RNA, 32 nt, Human
gagcagcccugugaggcugaggcugcagccag

SEQ ID NO: 158043 - RNA, 22 nt, Human
gagcagcccuuuuacaugcaca

SEQ ID NO: 158044 - RNA, 20 nt, Human
gagcagccgcgggcgccgag

SEQ ID NO: 158045 - RNA, 32 nt, Human
gagcagccggguugccccagcgcuggcugccg

SEQ ID NO: 158046 - RNA, 18 nt, Human
gagcagccuagagcagca

SEQ ID NO: 158047 - RNA, 32 nt, Human
gagcagccuagugccagaaauguccaagaugc

SEQ ID NO: 158048 - RNA, 32 nt, Human
gagcagccuaucucccccaagcuggaggcggc

SEQ ID NO: 158049 - RNA, 32 nt, Human
gagcagccucaagcccagagaagacugaggcu

SEQ ID NO: 158050 - RNA, 32 nt, Human
gagcagccucaggaguugaaggggauccuguc

SEQ ID NO: 158051 - RNA, 32 nt, Human
gagcagccuccaugggcacacaggagggcugg

SEQ ID NO: 158052 - RNA, 32 nt, Human
gagcagccuccuaccuccccugccugagcccu

SEQ ID NO: 158053 - RNA, 32 nt, Human
gagcagccugcccugcaaucucuuucucagaa

SEQ ID NO: 158054 - RNA, 32 nt, Human
gagcagccugcuggauccagaacaugacaaca

SEQ ID NO: 158055 - RNA, 32 nt, Human
gagcagccuggacugcagcucucagaggccag

SEQ ID NO: 158056 - RNA, 32 nt, Human
gagcagcgaagaaggggguggggaggggaggg

SEQ ID NO: 158057 - RNA, 19 nt, Human
gagcagcgacccgcggcgg

SEQ ID NO: 158058 - RNA, 20 nt, Human
gagcagcgaccugagcagca

SEQ ID NO: 158059 - RNA, 32 nt, Human
gagcagcgagucagagggggcaucugaacgca

SEQ ID NO: 158060 - RNA, 32 nt, Human
gagcagcgcuucucaaacugacuauucaaguc

SEQ ID NO: 158061 - RNA, 32 nt, Human
gagcagcggacuccggagcgucagccugccuu

SEQ ID NO: 158062 - RNA, 21 nt, Human
gagcagcggccuggagcagca

SEQ ID NO: 158063 - RNA, 32 nt, Human
gagcagcgggcacuccuuccugggcagggugg

SEQ ID NO: 158064 - RNA, 21 nt, Human
gagcagcguccuauaauccua

SEQ ID NO: 158065 - RNA, 17 nt, Human
gagcagcuaccaugcac

SEQ ID NO: 158066 - RNA, 32 nt, Human
gagcagcucaagcaaccaggucuuccugccau

SEQ ID NO: 158067 - RNA, 32 nt, Human
gagcagcucaagccucccagcauugcaguuac

SEQ ID NO: 158068 - RNA, 20 nt, Human
gagcagcucagggcacugcg

SEQ ID NO: 158069 - RNA, 19 nt, Human
gagcagcucaucacaggca

SEQ ID NO: 158070 - RNA, 22 nt, Human
gagcagcuccccaggagcucag

SEQ ID NO: 158071 - RNA, 20 nt, Human
gagcagcuccccuaggucag

SEQ ID NO: 158072 - RNA, 19 nt, Human
gagcagcuccccugcccac

SEQ ID NO: 158073 - RNA, 22 nt, Human
gagcagcuccgaggccgcggcg

SEQ ID NO: 158074 - RNA, 19 nt, Human
gagcagcuccuagcagcau

SEQ ID NO: 158075 - RNA, 21 nt, Human
gagcagcuccuagcagcauca

SEQ ID NO: 158076 - RNA, 22 nt, Human
gagcagcuccuccagcuggcca

SEQ ID NO: 158077 - RNA, 22 nt, Human
gagcagcuccucuaggggccca

SEQ ID NO: 158078 - RNA, 22 nt, Human
gagcagcuccucugcaggcaca

SEQ ID NO: 158079 - RNA, 23 nt, Human
gagcagcuccucugcaggcacag

SEQ ID NO: 158080 - RNA, 20 nt, Human
gagcagcuccucugcauagu

SEQ ID NO: 158081 - RNA, 19 nt, Human
gagcagcuccucugcaugu

SEQ ID NO: 158082 - RNA, 32 nt, Human
gagcagcuccugggcugugcucuguuugaagg

SEQ ID NO: 158083 - RNA, 32 nt, Human
gagcagcucuccccaggcauuugccaagggag

SEQ ID NO: 158084 - RNA, 32 nt, Human
gagcagcucugcuuucucaggucucuacuuac

SEQ ID NO: 158085 - RNA, 22 nt, Human
gagcagcucuguccaaccacag

SEQ ID NO: 158086 - RNA, 32 nt, Human
gagcagcugaccucaucaaagauuuuaccaag

SEQ ID NO: 158087 - RNA, 32 nt, Human
gagcagcugaggaggaggcaggagagagggaa

SEQ ID NO: 158088 - RNA, 32 nt, Human
gagcagcugauaguggaaaacagaauaaugau

SEQ ID NO: 158089 - RNA, 32 nt, Human
gagcagcugccacaacuggccauguccugcca

SEQ ID NO: 158090 - RNA, 32 nt, Human
gagcagcugccuggaagaguucugggaaguau

SEQ ID NO: 158091 - RNA, 32 nt, Human
gagcagcugcucaugggcagagcagcccuugg

SEQ ID NO: 158092 - RNA, 32 nt, Human
gagcagcugcucaugggcagagcugcccucgg

SEQ ID NO: 158093 - RNA, 32 nt, Human
gagcagcugcugcagggcagacagccggaccc

SEQ ID NO: 158094 - RNA, 32 nt, Human
gagcagcuggagcuccuuggaggcaggggcug

SEQ ID NO: 158095 - RNA, 32 nt, Human
gagcagcuggauggugccugaguggguuuggg

SEQ ID NO: 158096 - RNA, 24 nt, Human
gagcagcuggcagagagcccagug

SEQ ID NO: 158097 - RNA, 18 nt, Human
gagcagcuggccccaggc

SEQ ID NO: 158098 - RNA, 23 nt, Human
gagcagcugggacuacaggcaca

SEQ ID NO: 158099 - RNA, 21 nt, Human
gagcagcugggauuacaggug

SEQ ID NO: 158100 - RNA, 31 nt, Human
gagcagcugggauucccgaccaaagccccag

SEQ ID NO: 158101 - RNA, 21 nt, Human
gagcagcugggauugcaggug

SEQ ID NO: 158102 - RNA, 20 nt, Human
gagcagcugggccccggggg

SEQ ID NO: 158103 - RNA, 32 nt, Human
gagcagcugggggcugcagccugcucuguccc

SEQ ID NO: 158104 - RNA, 32 nt, Human
gagcagcuggggguuccaccucaggguggggc

SEQ ID NO: 158105 - RNA, 32 nt, Human
gagcagcugguggccuuggagaacaaguuccg

SEQ ID NO: 158106 - RNA, 32 nt, Human
gagcagcugucugaacuauaggccccagugcu

SEQ ID NO: 158107 - RNA, 32 nt, Human
gagcagcugugagugaggggacaaggggcagg

SEQ ID NO: 158108 - RNA, 22 nt, Human
gagcagcuuagauuucccuacu

SEQ ID NO: 158109 - RNA, 19 nt, Human
gagcagcuucaacaccaca

SEQ ID NO: 158110 - RNA, 15 nt, Human
gagcagcuucagaga

SEQ ID NO: 158111 - RNA, 32 nt, Human
gagcagcuucucaacaugaacuacagccucca

SEQ ID NO: 158112 - RNA, 32 nt, Human
gagcagcuugaguugaagaagacacugcugga

SEQ ID NO: 158113 - RNA, 21 nt, Human
gagcagcuuuaaacucaggga

SEQ ID NO: 158114 - RNA, 21 nt, Human
gagcagcuuuuggcugcguaa

SEQ ID NO: 158115 - RNA, 32 nt, Human
gagcaggaaacuggaguugaggagggcagcuc

SEQ ID NO: 158116 - RNA, 21 nt, Human
gagcaggaacuggaguaaaug

SEQ ID NO: 158117 - RNA, 17 nt, Human
gagcaggaagagcagca

SEQ ID NO: 158118 - RNA, 32 nt, Human
gagcaggaagcacaccugugccauuucuggga

SEQ ID NO: 158119 - RNA, 20 nt, Human
gagcaggaaggcuguugggg

SEQ ID NO: 158120 - RNA, 21 nt, Human
gagcaggaagugcaggcagag

SEQ ID NO: 158121 - RNA, 22 nt, Human
gagcaggaaugcuuuacagaug

SEQ ID NO: 158122 - RNA, 32 nt, Human
gagcaggacacaucucacagugcccgcaggcu

SEQ ID NO: 158123 - RNA, 32 nt, Human
gagcaggacaggagagguacaagugaagugcc

SEQ ID NO: 158124 - RNA, 21 nt, Human
gagcaggacaguuggcagcag

SEQ ID NO: 158125 - RNA, 32 nt, Human
gagcaggaccuggucucccaagagcgggacua

SEQ ID NO: 158126 - RNA, 18 nt, Human
gagcaggacgugagcgca

SEQ ID NO: 158127 - RNA, 20 nt, Human
gagcaggacuugagcaggca

SEQ ID NO: 158128 - RNA, 32 nt, Human
gagcaggagaagcggugcccaccagcuuccag

SEQ ID NO: 158129 - RNA, 21 nt, Human
gagcaggagaauggcgcgaac

SEQ ID NO: 158130 - RNA, 32 nt, Human
gagcaggagaauuccgagcuucuugcccaggc

SEQ ID NO: 158131 - RNA, 32 nt, Human
gagcaggagacuggcaagagcucuuugucuca

SEQ ID NO: 158132 - RNA, 32 nt, Human
gagcaggagagcaggaaggaaacgcaggagga

SEQ ID NO: 158133 - RNA, 32 nt, Human
gagcaggagaggagugucgccgggaggccuuc

SEQ ID NO: 158134 - RNA, 22 nt, Human
gagcaggagcaggacagaagau

SEQ ID NO: 158135 - RNA, 32 nt, Human
gagcaggagccagcgugagacugaggcccccu

SEQ ID NO: 158136 - RNA, 21 nt, Human
gagcaggagcggcggcagcag

SEQ ID NO: 158137 - RNA, 32 nt, Human
gagcaggagcuucuuccaggaguucugagccu

SEQ ID NO: 158138 - RNA, 32 nt, Human
gagcaggaggcagagcccgcgggaagcucgga

SEQ ID NO: 158139 - RNA, 24 nt, Human
gagcaggaggcagaggagcagaug

SEQ ID NO: 158140 - RNA, 32 nt, Human
gagcaggaggcagaggagcagauggagcagcu

SEQ ID NO: 158141 - RNA, 32 nt, Human
gagcaggaggcccucauccuucugcugcccug

SEQ ID NO: 158142 - RNA, 32 nt, Human
gagcaggagggcaggggucaggagaacaggag

SEQ ID NO: 158143 - RNA, 20 nt, Human
gagcaggagguugcagugag

SEQ ID NO: 158144 - RNA, 21 nt, Human
gagcaggaugcagaggcacag

SEQ ID NO: 158145 - RNA, 23 nt, Human
gagcaggaugcucaggaccugga

SEQ ID NO: 158146 - RNA, 32 nt, Human
gagcaggauggaaauacuuugcugcccuugcc

SEQ ID NO: 158147 - RNA, 32 nt, Human
gagcaggcaagaacggggagcuucuguggauu

SEQ ID NO: 158148 - RNA, 18 nt, Human
gagcaggcacaagacagc

SEQ ID NO: 158149 - RNA, 19 nt, Human
gagcaggcacagcacagca

SEQ ID NO: 158150 - RNA, 18 nt, Human
gagcaggcaccagcagca

SEQ ID NO: 158151 - RNA, 17 nt, Human
gagcaggcaccgcagua

SEQ ID NO: 158152 - RNA, 18 nt, Human
gagcaggcacgagacagc

SEQ ID NO: 158153 - RNA, 17 nt, Human
gagcaggcacuugcagc

SEQ ID NO: 158154 - RNA, 17 nt, Human
gagcaggcagagcacca

SEQ ID NO: 158155 - RNA, 17 nt, Human
gagcaggcagagcugca

SEQ ID NO: 158156 - RNA, 19 nt, Human
gagcaggcagagcugcagu

SEQ ID NO: 158157 - RNA, 32 nt, Human
gagcaggcagagcuugucauccccagccuggu

SEQ ID NO: 158158 - RNA, 32 nt, Human
gagcaggcagcaggcuuaucccuucaccagca

SEQ ID NO: 158159 - RNA, 32 nt, Human
gagcaggcagccagggccaucaugagggagca

SEQ ID NO: 158160 - RNA, 32 nt, Human
gagcaggcagcucugggcaugugucuggucac

SEQ ID NO: 158161 - RNA, 32 nt, Human
gagcaggcaggcaaagggggcuuucugaggau

SEQ ID NO: 158162 - RNA, 32 nt, Human
gagcaggcaggcagaguggagagggagagacg

SEQ ID NO: 158163 - RNA, 32 nt, Human
gagcaggcaggcaggagguccuguuagcccug

SEQ ID NO: 158164 - RNA, 19 nt, Human
gagcaggcagggcacagca

SEQ ID NO: 158165 - RNA, 32 nt, Human
gagcaggcaggguggagcgaaggagcuccuua

SEQ ID NO: 158166 - RNA, 20 nt, Human
gagcaggcauaugagcaaca

SEQ ID NO: 158167 - RNA, 32 nt, Human
gagcaggcaugagcugggcuguggugcagagc

SEQ ID NO: 158168 - RNA, 17 nt, Human
gagcaggcaugucggca

SEQ ID NO: 158169 - RNA, 16 nt, Human
gagcaggccaagcugc

SEQ ID NO: 158170 - RNA, 19 nt, Human
gagcaggccacagaacgca

SEQ ID NO: 158171 - RNA, 17 nt, Human
gagcaggccacagaggc

SEQ ID NO: 158172 - RNA, 19 nt, Human
gagcaggccacagccuggc

SEQ ID NO: 158173 - RNA, 16 nt, Human
gagcaggccacagugc

SEQ ID NO: 158174 - RNA, 19 nt, Human
gagcaggccaccagcagca

SEQ ID NO: 158175 - RNA, 18 nt, Human
gagcaggccacugugagc

SEQ ID NO: 158176 - RNA, 19 nt, Human
gagcaggccagccaagcag

SEQ ID NO: 158177 - RNA, 15 nt, Human
gagcaggccaggcgc

SEQ ID NO: 158178 - RNA, 18 nt, Human
gagcaggccagugggagg

SEQ ID NO: 158179 - RNA, 18 nt, Human
gagcaggcccaagggcag

SEQ ID NO: 158180 - RNA, 18 nt, Human
gagcaggcccagaccagc

SEQ ID NO: 158181 - RNA, 19 nt, Human
gagcaggcccauauucagc

SEQ ID NO: 158182 - RNA, 32 nt, Human
gagcaggccccaggcuggaccugcccuguccu

SEQ ID NO: 158183 - RNA, 17 nt, Human
gagcaggccccggcagc

SEQ ID NO: 158184 - RNA, 16 nt, Human
gagcaggcccggccgc

SEQ ID NO: 158185 - RNA, 19 nt, Human
gagcaggcccgggcaggca

SEQ ID NO: 158186 - RNA, 19 nt, Human
gagcaggcccggggcagca

SEQ ID NO: 158187 - RNA, 32 nt, Human
gagcaggcccugcccuccacacccucaugagg

SEQ ID NO: 158188 - RNA, 19 nt, Human
gagcaggccgcgugucaca

SEQ ID NO: 158189 - RNA, 19 nt, Human
gagcaggccggacgcagca

SEQ ID NO: 158190 - RNA, 20 nt, Human
gagcaggccggugagcagca

SEQ ID NO: 158191 - RNA, 16 nt, Human
gagcaggccugccagc

SEQ ID NO: 158192 - RNA, 18 nt, Human
gagcaggccuggugcagc

SEQ ID NO: 158193 - RNA, 32 nt, Human
gagcaggcgauugaaguaauucuguccugcgg

SEQ ID NO: 158194 - RNA, 20 nt, Human
gagcaggcgccagaauccca

SEQ ID NO: 158195 - RNA, 17 nt, Human
gagcaggcggcgcagca

SEQ ID NO: 158196 - RNA, 18 nt, Human
gagcaggcggcugccgca

SEQ ID NO: 158197 - RNA, 32 nt, Human
gagcaggcgggaggcccgaggaagggagccug

SEQ ID NO: 158198 - RNA, 17 nt, Human
gagcaggcgggccagca

SEQ ID NO: 158199 - RNA, 22 nt, Human
gagcaggcggggccgcccagug

SEQ ID NO: 158200 - RNA, 18 nt, Human
gagcaggcgguggcggca

SEQ ID NO: 158201 - RNA, 32 nt, Human
gagcaggcggugggcacccacccugggaccua

SEQ ID NO: 158202 - RNA, 18 nt, Human
gagcaggcuagaggcaca

SEQ ID NO: 158203 - RNA, 18 nt, Human
gagcaggcucagagcagc

SEQ ID NO: 158204 - RNA, 17 nt, Human
gagcaggcucaucagua

SEQ ID NO: 158205 - RNA, 32 nt, Human
gagcaggcucucuccccuccccuccccucccc

SEQ ID NO: 158206 - RNA, 32 nt, Human
gagcaggcucuuccaccuccuucagcuccccc

SEQ ID NO: 158207 - RNA, 20 nt, Human
gagcaggcugcugcugaaaa

SEQ ID NO: 158208 - RNA, 17 nt, Human
gagcaggcuggagcagc

SEQ ID NO: 158209 - RNA, 32 nt, Human
gagcaggcuggcacagagaagaggacaugcgg

SEQ ID NO: 158210 - RNA, 19 nt, Human
gagcaggcugggaacugca

SEQ ID NO: 158211 - RNA, 19 nt, Human
gagcaggcuguggagcagc

SEQ ID NO: 158212 - RNA, 32 nt, Human
gagcaggcuucaucugcucugccauccagccc

SEQ ID NO: 158213 - RNA, 16 nt, Human
gagcaggcuugguaca

SEQ ID NO: 158214 - RNA, 18 nt, Human
gagcaggcuuguggcagc

SEQ ID NO: 158215 - RNA, 21 nt, Human
gagcagggaaaggacuuggaa

SEQ ID NO: 158216 - RNA, 18 nt, Human
gagcagggaagagcagua

SEQ ID NO: 158217 - RNA, 32 nt, Human
gagcagggaaggaggccaggguccgcgcggcu

SEQ ID NO: 158218 - RNA, 32 nt, Human
gagcagggacacacucucaccucaagguagcu

SEQ ID NO: 158219 - RNA, 19 nt, Human
gagcagggacaugggagca

SEQ ID NO: 158220 - RNA, 32 nt, Human
gagcagggacggagggggagaaugggaggaga

SEQ ID NO: 158221 - RNA, 32 nt, Human
gagcagggagaguuccagaaagggggaugaaa

SEQ ID NO: 158222 - RNA, 32 nt, Human
gagcagggagcacuggccguggucuacagcgu

SEQ ID NO: 158223 - RNA, 32 nt, Human
gagcagggcgagaggaacagagccaaugaugu

SEQ ID NO: 158224 - RNA, 32 nt, Human
gagcagggcggggcgggggcuugaggugauuc

SEQ ID NO: 158225 - RNA, 32 nt, Human
gagcagggcucgggggcagcggccaggccccu

SEQ ID NO: 158226 - RNA, 32 nt, Human
gagcagggcugacagcccugaagugaggcugc

SEQ ID NO: 158227 - RNA, 20 nt, Human
gagcagggcuggaaccagca

SEQ ID NO: 158228 - RNA, 32 nt, Human
gagcaggggagaccuggcugggcaugguggcu

SEQ ID NO: 158229 - RNA, 32 nt, Human
gagcaggggagagagugagcgugagcuuggca

SEQ ID NO: 158230 - RNA, 32 nt, Human
gagcaggggcaccucuggaggcaggagaggcc

SEQ ID NO: 158231 - RNA, 32 nt, Human
gagcagggggacaccagggugaaucaggaaga

SEQ ID NO: 158232 - RNA, 32 nt, Human
gagcagggggcugagggcaagcagguggggcu

SEQ ID NO: 158233 - RNA, 32 nt, Human
gagcagggguccagagaggcaggcuggggagg

SEQ ID NO: 158234 - RNA, 19 nt, Human
gagcaggggugagcaggca

SEQ ID NO: 158235 - RNA, 32 nt, Human
gagcaggggugagcaggcaggcuccccucccg

SEQ ID NO: 158236 - RNA, 32 nt, Human
gagcaggggugaggagagcaggagaguagggg

SEQ ID NO: 158237 - RNA, 32 nt, Human
gagcagggugaccccucaucugaaaggcccaa

SEQ ID NO: 158238 - RNA, 32 nt, Human
gagcagggugauggccugcuucugcugccuca

SEQ ID NO: 158239 - RNA, 32 nt, Human
gagcaggguggccugcagcccagagccccagu

SEQ ID NO: 158240 - RNA, 17 nt, Human
gagcagguagaggagca

SEQ ID NO: 158241 - RNA, 23 nt, Human
gagcagguaggaaacagcaaaug

SEQ ID NO: 158242 - RNA, 32 nt, Human
gagcagguaggcuuggcucccucuccagccuc

SEQ ID NO: 158243 - RNA, 20 nt, Human
gagcagguauaugagcaaca

SEQ ID NO: 158244 - RNA, 16 nt, Human
gagcaggucaacagua

SEQ ID NO: 158245 - RNA, 32 nt, Human
gagcaggucaccacgggggagcagccugccca

SEQ ID NO: 158246 - RNA, 17 nt, Human
gagcaggucgcugcagc

SEQ ID NO: 158247 - RNA, 32 nt, Human
gagcaggucgggggacacagggccgaggcagg

SEQ ID NO: 158248 - RNA, 32 nt, Human
gagcaggugaaguugagggggaugggaacuaa

SEQ ID NO: 158249 - RNA, 18 nt, Human
gagcaggugacagaagca

SEQ ID NO: 158250 - RNA, 16 nt, Human
gagcaggugcugcagc

SEQ ID NO: 158251 - RNA, 23 nt, Human
gagcaggugcuggcacaagagca

SEQ ID NO: 158252 - RNA, 19 nt, Human
gagcaggugcuggcaggca

SEQ ID NO: 158253 - RNA, 18 nt, Human
gagcaggugcuuauagca

SEQ ID NO: 158254 - RNA, 19 nt, Human
gagcaggugcuugaaagca

SEQ ID NO: 158255 - RNA, 32 nt, Human
gagcagguggagaaggcuuugcaccggccugc

SEQ ID NO: 158256 - RNA, 17 nt, Human
gagcaggugugagcagc

SEQ ID NO: 158257 - RNA, 32 nt, Human
gagcagguguugugccuggagcugcucuccug

SEQ ID NO: 158258 - RNA, 17 nt, Human
gagcagguucgggcagc

SEQ ID NO: 158259 - RNA, 18 nt, Human
gagcagguucuggcggca

SEQ ID NO: 158260 - RNA, 20 nt, Human
gagcagguugaugagcggca

SEQ ID NO: 158261 - RNA, 32 nt, Human
gagcagguugcugagccaguggcugccccgug

SEQ ID NO: 158262 - RNA, 20 nt, Human
gagcagguuugcaggcacag

SEQ ID NO: 158263 - RNA, 32 nt, Human
gagcaguaaaacugaugacauaaagaaauuaa

SEQ ID NO: 158264 - RNA, 32 nt, Human
gagcaguaaaugaagacagaguggaggacaca

SEQ ID NO: 158265 - RNA, 32 nt, Human
gagcaguagaaaccucacaccuagccagugcc

SEQ ID NO: 158266 - RNA, 32 nt, Human
gagcagucaaucuugcuacauuauuuuugucu

SEQ ID NO: 158267 - RNA, 32 nt, Human
gagcagucaaugacuaauguucuguccuagcc

SEQ ID NO: 158268 - RNA, 32 nt, Human
gagcagucaccaucugaucuucaucaaaggaa

SEQ ID NO: 158269 - RNA, 32 nt, Human
gagcagucagaguccagugcucugccucagac

SEQ ID NO: 158270 - RNA, 23 nt, Human
gagcagucccggagccugagcca

SEQ ID NO: 158271 - RNA, 32 nt, Human
gagcaguccuaucacaagcucauggccuugga

SEQ ID NO: 158272 - RNA, 32 nt, Human
gagcaguccuggggcuuccugguggcugugac

SEQ ID NO: 158273 - RNA, 32 nt, Human
gagcagucugagccugagaccccagcccuggc

SEQ ID NO: 158274 - RNA, 32 nt, Human
gagcagucuggacuucucacugcuacaugaug

SEQ ID NO: 158275 - RNA, 32 nt, Human
gagcagucuggguggauggaaguggcuguccc

SEQ ID NO: 158276 - RNA, 32 nt, Human
gagcagucuuccauuccaacuuuaguuucugc

SEQ ID NO: 158277 - RNA, 32 nt, Human
gagcagugagccccucccucaaggaggucugg

SEQ ID NO: 158278 - RNA, 32 nt, Human
gagcagugaguuacagcgagaggcagagaaag

SEQ ID NO: 158279 - RNA, 32 nt, Human
gagcagugaugccaccuccaagcuuguccuag

SEQ ID NO: 158280 - RNA, 32 nt, Human
gagcagugcacuccagucugcagguacugcac

SEQ ID NO: 158281 - RNA, 32 nt, Human
gagcagugcaggagcagggcgagaggaacaga

SEQ ID NO: 158282 - RNA, 31 nt, Human
gagcagugccucucacggcuugucucaugca

SEQ ID NO: 158283 - RNA, 18 nt, Human
gagcagugcucucggcau

SEQ ID NO: 158284 - RNA, 32 nt, Human
gagcaguggaaaugcaccaaggagaugaggga

SEQ ID NO: 158285 - RNA, 32 nt, Human
gagcaguggagugggagcccagguaagaguau

SEQ ID NO: 158286 - RNA, 20 nt, Human
gagcaguggcaguagcagca

SEQ ID NO: 158287 - RNA, 32 nt, Human
gagcaguggccacauuuucugcagaggaagaa

SEQ ID NO: 158288 - RNA, 32 nt, Human
gagcagugggaccucucauugaacagggcuuu

SEQ ID NO: 158289 - RNA, 23 nt, Human
gagcagugggcagagcccggacc

SEQ ID NO: 158290 - RNA, 32 nt, Human
gagcaguguccaggggaggugcgcagugaacu

SEQ ID NO: 158291 - RNA, 29 nt, Human
gagcagugucugucugcggcaggaugggg

SEQ ID NO: 158292 - RNA, 32 nt, Human
gagcagugugcacauccagacacaucaucucc

SEQ ID NO: 158293 - RNA, 32 nt, Human
gagcaguguggaggaagaugagggccaggaaa

SEQ ID NO: 158294 - RNA, 32 nt, Human
gagcaguguucuauguaugaaugccacauuuu

SEQ ID NO: 158295 - RNA, 20 nt, Human
gagcaguguuuuccugcugg

SEQ ID NO: 158296 - RNA, 21 nt, Human
gagcaguuccaauuccucuca

SEQ ID NO: 158297 - RNA, 32 nt, Human
gagcaguucccaaggacagucagcauuucuag

SEQ ID NO: 158298 - RNA, 24 nt, Human
gagcaguugcacucuacaggcaca

SEQ ID NO: 158299 - RNA, 20 nt, Human
gagcaguugcaggccucaga

SEQ ID NO: 158300 - RNA, 32 nt, Human
gagcaguugccaauauuugcaccaucuucaca

SEQ ID NO: 158301 - RNA, 32 nt, Human
gagcaguuguuuuucccucccugggccucacu

SEQ ID NO: 158302 - RNA, 32 nt, Human
gagcaguuuaggaguccauggaagaaagaaaa

SEQ ID NO: 158303 - RNA, 32 nt, Human
gagcauaaacucaagaaaauagccuugaacuu

SEQ ID NO: 158304 - RNA, 32 nt, Human
gagcauaacuggagggugggcuggggaggggu

SEQ ID NO: 158305 - RNA, 32 nt, Human
gagcauaauccuuggcagggcucagcaggcgc

SEQ ID NO: 158306 - RNA, 32 nt, Human
gagcauacaagaaaacugccaucuucaagcug

SEQ ID NO: 158307 - RNA, 32 nt, Human
gagcauagacuucauggcugacuugcagaaaa

SEQ ID NO: 158308 - RNA, 32 nt, Human
gagcauagaugucuuuuauacaauucuuuuga

SEQ ID NO: 158309 - RNA, 32 nt, Human
gagcauaggaguuugagaccagccuggguaac

SEQ ID NO: 158310 - RNA, 32 nt, Human
gagcauaggccuuccuaugaaguagugcaaag

SEQ ID NO: 158311 - RNA, 32 nt, Human
gagcauaguacugggaaaugggagcacaguac

SEQ ID NO: 158312 - RNA, 32 nt, Human
gagcauauauccacaauguucauuuaaccaau

SEQ ID NO: 158313 - RNA, 32 nt, Human
gagcauaugggugggagacagauggaggguac

SEQ ID NO: 158314 - RNA, 32 nt, Human
gagcauauuuugcucuuaggauggucuuuggg

SEQ ID NO: 158315 - RNA, 21 nt, Human
gagcaucaacaccaacauggc

SEQ ID NO: 158316 - RNA, 32 nt, Human
gagcaucaacagccacauuuuccuggccuuac

SEQ ID NO: 158317 - RNA, 32 nt, Human
gagcaucaacuccaggagaacagggauuucua

SEQ ID NO: 158318 - RNA, 32 nt, Human
gagcaucaagaugacccaccggcacagcccca

SEQ ID NO: 158319 - RNA, 32 nt, Human
gagcaucacaucucacuuuguucggagugguc

SEQ ID NO: 158320 - RNA, 32 nt, Human
gagcaucaccagaacccaggcgcugccccagc

SEQ ID NO: 158321 - RNA, 32 nt, Human
gagcaucacccagauugcugcauggaagccau

SEQ ID NO: 158322 - RNA, 32 nt, Human
gagcaucacuacugaccuguuguaggcagcua

SEQ ID NO: 158323 - RNA, 32 nt, Human
gagcaucagagaggaggcuggguuugacucca

SEQ ID NO: 158324 - RNA, 32 nt, Human
gagcaucagaucaagaaaaaggucugaggcag

SEQ ID NO: 158325 - RNA, 32 nt, Human
gagcaucagcaacccuuuccagguagaaauuc

SEQ ID NO: 158326 - RNA, 31 nt, Human
gagcaucaguuuccucuaaugccaaguggag

SEQ ID NO: 158327 - RNA, 32 nt, Human
gagcaucaugaguaggagggaggcaggagcuu

SEQ ID NO: 158328 - RNA, 32 nt, Human
gagcauccaccaggugggacggggaguguuga

SEQ ID NO: 158329 - RNA, 32 nt, Human
gagcauccaccuccuucucugucucaugugug

SEQ ID NO: 158330 - RNA, 21 nt, Human
gagcauccaggcccaaaggca

SEQ ID NO: 158331 - RNA, 23 nt, Human
gagcauccaucuggugacccugg

SEQ ID NO: 158332 - RNA, 32 nt, Human
gagcauccccagccacaacugccagcucucug

SEQ ID NO: 158333 - RNA, 32 nt, Human
gagcaucccucggggccgaaugcgcaguggac

SEQ ID NO: 158334 - RNA, 19 nt, Human
gagcauccgaccucuugga

SEQ ID NO: 158335 - RNA, 32 nt, Human
gagcauccucacggcauggccucugccuuccc

SEQ ID NO: 158336 - RNA, 32 nt, Human
gagcauccugccugccuucuccacugaggagc

SEQ ID NO: 158337 - RNA, 32 nt, Human
gagcauccuggaggaccuggagagcugggaga

SEQ ID NO: 158338 - RNA, 32 nt, Human
gagcaucuacaaacuccuguggcgagagcugc

SEQ ID NO: 158339 - RNA, 32 nt, Human
gagcaucuaccaugucuaagggucauucgagu

SEQ ID NO: 158340 - RNA, 32 nt, Human
gagcaucucagagugagagaaaaauguagaaa

SEQ ID NO: 158341 - RNA, 32 nt, Human
gagcaucuccucuucuugaaggccaaccugga

SEQ ID NO: 158342 - RNA, 32 nt, Human
gagcaucucucaucucccugaauuccacaucc

SEQ ID NO: 158343 - RNA, 32 nt, Human
gagcaucucugccucccaaagcaucuaccucu

SEQ ID NO: 158344 - RNA, 32 nt, Human
gagcaucucuggagagaaagaggagagccuca

SEQ ID NO: 158345 - RNA, 24 nt, Human
gagcaucucuucaccucuccuccu

SEQ ID NO: 158346 - RNA, 22 nt, Human
gagcaucugaaaggccacagca

SEQ ID NO: 158347 - RNA, 32 nt, Human
gagcaucugccauccaggcauggagagcuagg

SEQ ID NO: 158348 - RNA, 32 nt, Human
gagcaucugucccccuuuagaucucugaagcc

SEQ ID NO: 158349 - RNA, 32 nt, Human
gagcaugacagaaacaaaauguauucaccaag

SEQ ID NO: 158350 - RNA, 32 nt, Human
gagcaugacuccagugcugggcucuugggccc

SEQ ID NO: 158351 - RNA, 32 nt, Human
gagcaugacuuaaaguggaggucuucaguauc

SEQ ID NO: 158352 - RNA, 32 nt, Human
gagcaugaggcuggaugcagugguggugaggc

SEQ ID NO: 158353 - RNA, 32 nt, Human
gagcaugagggacccuuccccucccagggcca

SEQ ID NO: 158354 - RNA, 32 nt, Human
gagcaugagggagagaaaagaaugaggcuuag

SEQ ID NO: 158355 - RNA, 23 nt, Human
gagcaugaucgcgacacugcacu

SEQ ID NO: 158356 - RNA, 32 nt, Human
gagcaugcaaaaagcuuuuuccagcagaacau

SEQ ID NO: 158357 - RNA, 32 nt, Human
gagcaugcagaggaggugagagugggagggag

SEQ ID NO: 158358 - RNA, 32 nt, Human
gagcaugccacuguacuccagccugagcuaca

SEQ ID NO: 158359 - RNA, 32 nt, Human
gagcaugccgcugcacuccagccugggagacu

SEQ ID NO: 158360 - RNA, 32 nt, Human
gagcaugccuaaaagagcacugcaagauuauu

SEQ ID NO: 158361 - RNA, 32 nt, Human
gagcaugccuguagucucagcuacucaggagg

SEQ ID NO: 158362 - RNA, 18 nt, Human
gagcaugcggagccagca

SEQ ID NO: 158363 - RNA, 29 nt, Human
gagcaugcgugcaccauuccagcauccgg

SEQ ID NO: 158364 - RNA, 32 nt, Human
gagcaugcgugcaccauuccagcauccggcaa

SEQ ID NO: 158365 - RNA, 32 nt, Human
gagcaugcugagccaucaugcccaccguggau

SEQ ID NO: 158366 - RNA, 22 nt, Human
gagcaugcuguauucuaccacu

SEQ ID NO: 158367 - RNA, 32 nt, Human
gagcauggagccaggcugcggggucuggguuc

SEQ ID NO: 158368 - RNA, 29 nt, Human
gagcauggaggcgggggcggcugaggcag

SEQ ID NO: 158369 - RNA, 32 nt, Human
gagcauggagucuggagcaggagcagcuguug

SEQ ID NO: 158370 - RNA, 32 nt, Human
gagcauggaucccuccugauuccacucagccc

SEQ ID NO: 158371 - RNA, 32 nt, Human
gagcauggcaggcagagauacagcaagggcaa

SEQ ID NO: 158372 - RNA, 21 nt, Human
gagcauggccagacuauuccc

SEQ ID NO: 158373 - RNA, 32 nt, Human
gagcauggcgugaaccugggaggcagagcuug

SEQ ID NO: 158374 - RNA, 32 nt, Human
gagcaugggacaccuggcugaccacagcaugg

SEQ ID NO: 158375 - RNA, 32 nt, Human
gagcaugggaggcagagguugcagugagccaa

SEQ ID NO: 158376 - RNA, 32 nt, Human
gagcaugggagggaauagaaguuccugggucc

SEQ ID NO: 158377 - RNA, 32 nt, Human
gagcauggggaccacaauuaagccuuuguaac

SEQ ID NO: 158378 - RNA, 32 nt, Human
gagcauggggugggcagugaggucccuguacc

SEQ ID NO: 158379 - RNA, 32 nt, Human
gagcaugggugacagugggagcacacgacuuc

SEQ ID NO: 158380 - RNA, 32 nt, Human
gagcaugguacccuccuugguaaagguaaugg

SEQ ID NO: 158381 - RNA, 32 nt, Human
gagcaugguauucaaguacaagaguggauuaa

SEQ ID NO: 158382 - RNA, 16 nt, Human
gagcauggugagcagc

SEQ ID NO: 158383 - RNA, 32 nt, Human
gagcauggugagcagcccuggugcucagcagc

SEQ ID NO: 158384 - RNA, 32 nt, Human
gagcauguagagguggguccugcaguggucuc

SEQ ID NO: 158385 - RNA, 32 nt, Human
gagcaugucuguaaucccagcuacucgggagg

SEQ ID NO: 158386 - RNA, 18 nt, Human
gagcaugugcuggaucug

SEQ ID NO: 158387 - RNA, 32 nt, Human
gagcauguggagcgagagggaggcagguggac

SEQ ID NO: 158388 - RNA, 23 nt, Human
gagcauguggcucccagaaccca

SEQ ID NO: 158389 - RNA, 32 nt, Human
gagcaugugguacccauguaacaacccaagac

SEQ ID NO: 158390 - RNA, 32 nt, Human
gagcauguugagcuucugguuuggaaacagca

SEQ ID NO: 158391 - RNA, 32 nt, Human
gagcauuaaccccuuugaaaagaaauggacuu

SEQ ID NO: 158392 - RNA, 32 nt, Human
gagcauuaagacguucucccacacagcccuuc

SEQ ID NO: 158393 - RNA, 32 nt, Human
gagcauucagccugugucuucacacaacaaac

SEQ ID NO: 158394 - RNA, 32 nt, Human
gagcauucauucucuccaccaggccuccaggu

SEQ ID NO: 158395 - RNA, 32 nt, Human
gagcauuccaguaucaugcaggguccugugau

SEQ ID NO: 158396 - RNA, 21 nt, Human
gagcauucccauguacccugg

SEQ ID NO: 158397 - RNA, 32 nt, Human
gagcauucugaccucuucuuguuuagagugau

SEQ ID NO: 158398 - RNA, 32 nt, Human
gagcauucuguaauauucuagggucacucccc

SEQ ID NO: 158399 - RNA, 32 nt, Human
gagcauugagaggcagcauggcugcaacugug

SEQ ID NO: 158400 - RNA, 32 nt, Human
gagcauuguggcugucagcaggaagcaacgaa

SEQ ID NO: 158401 - RNA, 32 nt, Human
gagcauuuaagcugcaggugguggcacucggg

SEQ ID NO: 158402 - RNA, 19 nt, Human
gagcauuuaaucuaugcua

SEQ ID NO: 158403 - RNA, 32 nt, Human
gagcauuucuucugugcugggcgcuaugcaag

SEQ ID NO: 158404 - RNA, 32 nt, Human
gagcauuuuccucugcuauaauguccccucaa

SEQ ID NO: 158405 - RNA, 32 nt, Human
gagcauuuugggaacauucuccacccaauggg

SEQ ID NO: 158406 - RNA, 22 nt, Human
gagccaaaaccugccccagaga

SEQ ID NO: 158407 - RNA, 22 nt, Human
gagccaaaauaaccaacaaccu

SEQ ID NO: 158408 - RNA, 24 nt, Human
gagccaaaaucacgccacugcacu

SEQ ID NO: 158409 - RNA, 32 nt, Human
gagccaaaaucaggcuacagcacuccagccug

SEQ ID NO: 158410 - RNA, 24 nt, Human
gagccaaaaucauaacacugcacu

SEQ ID NO: 158411 - RNA, 32 nt, Human
gagccaaaaucauaacacugcacuccaggcug

SEQ ID NO: 158412 - RNA, 23 nt, Human
gagccaaaaucgcaccacugcac

SEQ ID NO: 158413 - RNA, 24 nt, Human
gagccaaaauuacgccacugcacu

SEQ ID NO: 158414 - RNA, 24 nt, Human
gagccaaaauugcaccacugcacu

SEQ ID NO: 158415 - RNA, 32 nt, Human
gagccaaaauugcaccacugcacuccagccug

SEQ ID NO: 158416 - RNA, 32 nt, Human
gagccaaaauugcaccacugcacuccauccug

SEQ ID NO: 158417 - RNA, 32 nt, Human
gagccaaacaggcuggagacguuuaaagaccg

SEQ ID NO: 158418 - RNA, 32 nt, Human
gagccaaacuugccaccaagagcccaacaauc

SEQ ID NO: 158419 - RNA, 19 nt, Human
gagccaaagagaagaggac

SEQ ID NO: 158420 - RNA, 32 nt, Human
gagccaaagagagauuucagcucuguauuugu

SEQ ID NO: 158421 - RNA, 32 nt, Human
gagccaaagaggaauccccucuucucaugcag

SEQ ID NO: 158422 - RNA, 32 nt, Human
gagccaaagguacaccacuacacuccagccug

SEQ ID NO: 158423 - RNA, 32 nt, Human
gagccaaauaugagucauuuguguacaaguau

SEQ ID NO: 158424 - RNA, 32 nt, Human
gagccaaaugucgcuuccugagcaccauacuc

SEQ ID NO: 158425 - RNA, 24 nt, Human
gagccaacaacacuaccucagaga

SEQ ID NO: 158426 - RNA, 32 nt, Human
gagccaacacccuucugauggaaggugggagc

SEQ ID NO: 158427 - RNA, 20 nt, Human
gagccaaccugggcgcauca

SEQ ID NO: 158428 - RNA, 32 nt, Human
gagccaacuaugagaauccagcugccuucuau

SEQ ID NO: 158429 - RNA, 20 nt, Human
gagccaacucugcauucaca

SEQ ID NO: 158430 - RNA, 32 nt, Human
gagccaacugccggaaaggccaugcccuuagg

SEQ ID NO: 158431 - RNA, 25 nt, Human
gagccaacuucaggcugcucagagg

SEQ ID NO: 158432 - RNA, 21 nt, Human
gagccaagaaaguccaguuua

SEQ ID NO: 158433 - RNA, 32 nt, Human
gagccaagaauccuggucuccuugggggaauu

SEQ ID NO: 158434 - RNA, 23 nt, Human
gagccaagacagcaccauugcac

SEQ ID NO: 158435 - RNA, 32 nt, Human
gagccaagacagugccauugcacuccagccug

SEQ ID NO: 158436 - RNA, 24 nt, Human
gagccaagaccacaccacugcacu

SEQ ID NO: 158437 - RNA, 24 nt, Human
gagccaagaccgcaccacugcacu

SEQ ID NO: 158438 - RNA, 32 nt, Human
gagccaagaccgcaccacugcacuccagccug

SEQ ID NO: 158439 - RNA, 24 nt, Human
gagccaagaccgugccacuguacu

SEQ ID NO: 158440 - RNA, 24 nt, Human
gagccaagacuacgccacugcacu

SEQ ID NO: 158441 - RNA, 24 nt, Human
gagccaagacugcaccacugcacu

SEQ ID NO: 158442 - RNA, 32 nt, Human
gagccaagacugcaccacugcacuccagccug

SEQ ID NO: 158443 - RNA, 24 nt, Human
gagccaagacugcgccacugcacu

SEQ ID NO: 158444 - RNA, 24 nt, Human
gagccaagacugugccacugcacu

SEQ ID NO: 158445 - RNA, 32 nt, Human
gagccaagacugugccacugcacuccagccug

SEQ ID NO: 158446 - RNA, 19 nt, Human
gagccaagacuucugagcu

SEQ ID NO: 158447 - RNA, 24 nt, Human
gagccaagacuuguggacagcacu

SEQ ID NO: 158448 - RNA, 24 nt, Human
gagccaagagcgcaccauugcacu

SEQ ID NO: 158449 - RNA, 24 nt, Human
gagccaagagcgugccacugcacu

SEQ ID NO: 158450 - RNA, 18 nt, Human
gagccaagaggcgaaguu

SEQ ID NO: 158451 - RNA, 32 nt, Human
gagccaagagggguggaaaggaagagagcuug

SEQ ID NO: 158452 - RNA, 24 nt, Human
gagccaagaguacaccacugcacu

SEQ ID NO: 158453 - RNA, 32 nt, Human
gagccaagauagcaccacugcacuccagccug

SEQ ID NO: 158454 - RNA, 19 nt, Human
gagccaagauagcucccau

SEQ ID NO: 158455 - RNA, 23 nt, Human
gagccaagauagcucccaugcac

SEQ ID NO: 158456 - RNA, 24 nt, Human
gagccaagauagugccacugcacu

SEQ ID NO: 158457 - RNA, 32 nt, Human
gagccaagauagugccacugcacuccagccug

SEQ ID NO: 158458 - RNA, 32 nt, Human
gagccaagauagugccaucgcacuccagccug

SEQ ID NO: 158459 - RNA, 24 nt, Human
gagccaagaucacaccacugaccu

SEQ ID NO: 158460 - RNA, 24 nt, Human
gagccaagaucacaccacugcacu

SEQ ID NO: 158461 - RNA, 23 nt, Human
gagccaagaucacaccacuguac

SEQ ID NO: 158462 - RNA, 24 nt, Human
gagccaagaucacaccagugcacu

SEQ ID NO: 158463 - RNA, 24 nt, Human
gagccaagaucacaccauugcacu

SEQ ID NO: 158464 - RNA, 24 nt, Human
gagccaagaucacacgacugcauu

SEQ ID NO: 158465 - RNA, 24 nt, Human
gagccaagaucacacuacugcacu

SEQ ID NO: 158466 - RNA, 24 nt, Human
gagccaagaucacagcauugcacu

SEQ ID NO: 158467 - RNA, 28 nt, Human
gagccaagaucacaggagccacugcacu

SEQ ID NO: 158468 - RNA, 24 nt, Human
gagccaagaucacgacacugcacu

SEQ ID NO: 158469 - RNA, 24 nt, Human
gagccaagaucacgccacugaacu

SEQ ID NO: 158470 - RNA, 24 nt, Human
gagccaagaucacgccacugcacu

SEQ ID NO: 158471 - RNA, 24 nt, Human
gagccaagaucacgccacuguacu

SEQ ID NO: 158472 - RNA, 24 nt, Human
gagccaagaucacgccauugcacu

SEQ ID NO: 158473 - RNA, 24 nt, Human
gagccaagaucacgccauuguacu

SEQ ID NO: 158474 - RNA, 24 nt, Human
gagccaagaucacgccucugcacu

SEQ ID NO: 158475 - RNA, 24 nt, Human
gagccaagaucacuccacugcacu

SEQ ID NO: 158476 - RNA, 23 nt, Human
gagccaagaucacugacagcaga

SEQ ID NO: 158477 - RNA, 24 nt, Human
gagccaagaucagaccacugcccu

SEQ ID NO: 158478 - RNA, 24 nt, Human
gagccaagaucaggccacugcacu

SEQ ID NO: 158479 - RNA, 24 nt, Human
gagccaagaucauaccacggcacu

SEQ ID NO: 158480 - RNA, 24 nt, Human
gagccaagaucauaccacugcacu

SEQ ID NO: 158481 - RNA, 24 nt, Human
gagccaagaucauaccauugcacu

SEQ ID NO: 158482 - RNA, 24 nt, Human
gagccaagaucauacuacugcacu

SEQ ID NO: 158483 - RNA, 24 nt, Human
gagccaagaucaugccacuccacu

SEQ ID NO: 158484 - RNA, 24 nt, Human
gagccaagaucaugccacugcacu

SEQ ID NO: 158485 - RNA, 32 nt, Human
gagccaagaucaugccauugcacagcagccug

SEQ ID NO: 158486 - RNA, 24 nt, Human
gagccaagaucaugccauugcacu

SEQ ID NO: 158487 - RNA, 24 nt, Human
gagccaagaucaugccgcugcacu

SEQ ID NO: 158488 - RNA, 24 nt, Human
gagccaagaucaugcuacugcacu

SEQ ID NO: 158489 - RNA, 24 nt, Human
gagccaagaucauuucaccucacu

SEQ ID NO: 158490 - RNA, 24 nt, Human
gagccaagaucccgccacugcacu

SEQ ID NO: 158491 - RNA, 24 nt, Human
gagccaagauccugccacugcacu

SEQ ID NO: 158492 - RNA, 24 nt, Human
gagccaagaucgagccauugcacu

SEQ ID NO: 158493 - RNA, 24 nt, Human
gagccaagaucgcaacauugcacu

SEQ ID NO: 158494 - RNA, 24 nt, Human
gagccaagaucgcaccacugaacu

SEQ ID NO: 158495 - RNA, 24 nt, Human
gagccaagaucgcaccacugcacu

SEQ ID NO: 158496 - RNA, 24 nt, Human
gagccaagaucgcaccacugcucu

SEQ ID NO: 158497 - RNA, 24 nt, Human
gagccaagaucgcaccauuacacu

SEQ ID NO: 158498 - RNA, 24 nt, Human
gagccaagaucgcaccauugcacu

SEQ ID NO: 158499 - RNA, 24 nt, Human
gagccaagaucgcaccauuguacu

SEQ ID NO: 158500 - RNA, 24 nt, Human
gagccaagaucgcacccuuacacu

SEQ ID NO: 158501 - RNA, 24 nt, Human
gagccaagaucgcaucacugcauu

SEQ ID NO: 158502 - RNA, 23 nt, Human
gagccaagaucgcccacugcacu

SEQ ID NO: 158503 - RNA, 24 nt, Human
gagccaagaucgcgccacuacacu

SEQ ID NO: 158504 - RNA, 22 nt, Human
gagccaagaucgcgccacugca

SEQ ID NO: 158505 - RNA, 23 nt, Human
gagccaagaucgcgccacugcac

SEQ ID NO: 158506 - RNA, 24 nt, Human
gagccaagaucgcgccacugcacu

SEQ ID NO: 158507 - RNA, 24 nt, Human
gagccaagaucgcgccacuguacu

SEQ ID NO: 158508 - RNA, 24 nt, Human
gagccaagaucgcgccaucgcacu

SEQ ID NO: 158509 - RNA, 24 nt, Human
gagccaagaucgcgccauucuacu

SEQ ID NO: 158510 - RNA, 24 nt, Human
gagccaagaucgcgccauugcacu

SEQ ID NO: 158511 - RNA, 24 nt, Human
gagccaagaucgcgccccugcacu

SEQ ID NO: 158512 - RNA, 24 nt, Human
gagccaagaucgcgcuacugcacu

SEQ ID NO: 158513 - RNA, 24 nt, Human
gagccaagaucgcgcuauugcacu

SEQ ID NO: 158514 - RNA, 24 nt, Human
gagccaagaucgcggcauugcacu

SEQ ID NO: 158515 - RNA, 24 nt, Human
gagccaagaucgcuccauugcacu

SEQ ID NO: 158516 - RNA, 24 nt, Human
gagccaagaucguaccacugcacu

SEQ ID NO: 158517 - RNA, 32 nt, Human
gagccaagaucguaccacugcacuccagccug

SEQ ID NO: 158518 - RNA, 32 nt, Human
gagccaagaucguaccacugcacuccagucug

SEQ ID NO: 158519 - RNA, 24 nt, Human
gagccaagaucgugacacugcacu

SEQ ID NO: 158520 - RNA, 32 nt, Human
gagccaagaucgugacacugcacuccagccug

SEQ ID NO: 158521 - RNA, 24 nt, Human
gagccaagaucgugcaacugcacu

SEQ ID NO: 158522 - RNA, 32 nt, Human
gagccaagaucgugcaacugcacuccagccug

SEQ ID NO: 158523 - RNA, 24 nt, Human
gagccaagaucgugccaaugcacu

SEQ ID NO: 158524 - RNA, 23 nt, Human
gagccaagaucgugccacgcacu

SEQ ID NO: 158525 - RNA, 23 nt, Human
gagccaagaucgugccacugcac

SEQ ID NO: 158526 - RNA, 24 nt, Human
gagccaagaucgugccacugcacu

SEQ ID NO: 158527 - RNA, 24 nt, Human
gagccaagaucgugccacugcauu

SEQ ID NO: 158528 - RNA, 24 nt, Human
gagccaagaucgugccagugcacu

SEQ ID NO: 158529 - RNA, 24 nt, Human
gagccaagaucgugccauugcacu

SEQ ID NO: 158530 - RNA, 24 nt, Human
gagccaagaucgugucacugcacu

SEQ ID NO: 158531 - RNA, 24 nt, Human
gagccaagaucucgccacugcacu

SEQ ID NO: 158532 - RNA, 24 nt, Human
gagccaagaucuugccacuguacu

SEQ ID NO: 158533 - RNA, 24 nt, Human
gagccaagaugacacaacugcacu

SEQ ID NO: 158534 - RNA, 24 nt, Human
gagccaagaugacaccauugcacu

SEQ ID NO: 158535 - RNA, 24 nt, Human
gagccaagaugaugccauugcacu

SEQ ID NO: 158536 - RNA, 19 nt, Human
gagccaagaugcucagcuu

SEQ ID NO: 158537 - RNA, 24 nt, Human
gagccaagauggcaccacuacauu

SEQ ID NO: 158538 - RNA, 24 nt, Human
gagccaagauggcaccacugcacu

SEQ ID NO: 158539 - RNA, 23 nt, Human
gagccaagauggcaccauugcac

SEQ ID NO: 158540 - RNA, 24 nt, Human
gagccaagauggcgccacuacacu

SEQ ID NO: 158541 - RNA, 32 nt, Human
gagccaagauggcgccacuacacuccagccug

SEQ ID NO: 158542 - RNA, 24 nt, Human
gagccaagauggcgccacugcacu

SEQ ID NO: 158543 - RNA, 24 nt, Human
gagccaagauggcgccacugcauu

SEQ ID NO: 158544 - RNA, 24 nt, Human
gagccaagauggcgccauugcacu

SEQ ID NO: 158545 - RNA, 24 nt, Human
gagccaagauuaugccacugcacu

SEQ ID NO: 158546 - RNA, 24 nt, Human
gagccaagauuaugccauugcacu

SEQ ID NO: 158547 - RNA, 24 nt, Human
gagccaagauuaugucacugcacu

SEQ ID NO: 158548 - RNA, 23 nt, Human
gagccaagauugcacacugcacu

SEQ ID NO: 158549 - RNA, 24 nt, Human
gagccaagauugcaccaccacacu

SEQ ID NO: 158550 - RNA, 32 nt, Human
gagccaagauugcaccaccacacuccagccug

SEQ ID NO: 158551 - RNA, 23 nt, Human
gagccaagauugcaccacggcac

SEQ ID NO: 158552 - RNA, 24 nt, Human
gagccaagauugcaccacugcacu

SEQ ID NO: 158553 - RNA, 24 nt, Human
gagccaagauugcaccacugcauu

SEQ ID NO: 158554 - RNA, 24 nt, Human
gagccaagauugcaccacugcucu

SEQ ID NO: 158555 - RNA, 24 nt, Human
gagccaagauugcaccacuguacu

SEQ ID NO: 158556 - RNA, 24 nt, Human
gagccaagauugcaccagugcacu

SEQ ID NO: 158557 - RNA, 24 nt, Human
gagccaagauugcaccauugaacu

SEQ ID NO: 158558 - RNA, 24 nt, Human
gagccaagauugcaccauugcacu

SEQ ID NO: 158559 - RNA, 24 nt, Human
gagccaagauugcaucacugcacu

SEQ ID NO: 158560 - RNA, 24 nt, Human
gagccaagauugcaucacugcauu

SEQ ID NO: 158561 - RNA, 24 nt, Human
gagccaagauugcgacacugcacu

SEQ ID NO: 158562 - RNA, 24 nt, Human
gagccaagauugcgccacugcacu

SEQ ID NO: 158563 - RNA, 24 nt, Human
gagccaagauugcgccacuguacu

SEQ ID NO: 158564 - RNA, 24 nt, Human
gagccaagauugcgccauugcacu

SEQ ID NO: 158565 - RNA, 24 nt, Human
gagccaagauugcgccauugcauu

SEQ ID NO: 158566 - RNA, 24 nt, Human
gagccaagauugcgccccugcacu

SEQ ID NO: 158567 - RNA, 24 nt, Human
gagccaagauugcgccgcuacauu

SEQ ID NO: 158568 - RNA, 24 nt, Human
gagccaagauugcgccguuguacu

SEQ ID NO: 158569 - RNA, 24 nt, Human
gagccaagauugcgucacugcacu

SEQ ID NO: 158570 - RNA, 22 nt, Human
gagccaagauuguaaccagaga

SEQ ID NO: 158571 - RNA, 24 nt, Human
gagccaagauuguaccacugcacu

SEQ ID NO: 158572 - RNA, 32 nt, Human
gagccaagauuguaccacugcacuccaaccug

SEQ ID NO: 158573 - RNA, 32 nt, Human
gagccaagauuguaccacugcacuccaguuug

SEQ ID NO: 158574 - RNA, 32 nt, Human
gagccaagauugugacacugcacuccagccug

SEQ ID NO: 158575 - RNA, 24 nt, Human
gagccaagauugugccaccacacu

SEQ ID NO: 158576 - RNA, 24 nt, Human
gagccaagauugugccacggcacu

SEQ ID NO: 158577 - RNA, 22 nt, Human
gagccaagauugugccacuacu

SEQ ID NO: 158578 - RNA, 24 nt, Human
gagccaagauugugccacugcacu

SEQ ID NO: 158579 - RNA, 32 nt, Human
gagccaagauugugccacugcacuccagccug

SEQ ID NO: 158580 - RNA, 32 nt, Human
gagccaagauugugccacugcacuccagcgug

SEQ ID NO: 158581 - RNA, 23 nt, Human
gagccaagauugugccacugccu

SEQ ID NO: 158582 - RNA, 24 nt, Human
gagccaagauugugccauugcacu

SEQ ID NO: 158583 - RNA, 24 nt, Human
gagccaagauuuugccacugcacu

SEQ ID NO: 158584 - RNA, 32 nt, Human
gagccaagcagcauccugguucuuggacagca

SEQ ID NO: 158585 - RNA, 22 nt, Human
gagccaagcaucuucccuggga

SEQ ID NO: 158586 - RNA, 21 nt, Human
gagccaagcggcggcagagcg

SEQ ID NO: 158587 - RNA, 21 nt, Human
gagccaagcuccuccaaccac

SEQ ID NO: 158588 - RNA, 19 nt, Human
gagccaaggaagcuuccac

SEQ ID NO: 158589 - RNA, 32 nt, Human
gagccaaggaauucuguggcugugcugcguuu

SEQ ID NO: 158590 - RNA, 32 nt, Human
gagccaaggaguucaagaccagccugggcaac

SEQ ID NO: 158591 - RNA, 24 nt, Human
gagccaaggcagcaaggcaaggag

SEQ ID NO: 158592 - RNA, 32 nt, Human
gagccaagggaugucagggcagcucugugcau

SEQ ID NO: 158593 - RNA, 19 nt, Human
gagccaagggccucacuua

SEQ ID NO: 158594 - RNA, 24 nt, Human
gagccaaggucacaccauugcacu

SEQ ID NO: 158595 - RNA, 24 nt, Human
gagccaaggucacgucacugcacu

SEQ ID NO: 158596 - RNA, 24 nt, Human
gagccaaggucaugccacugcacu

SEQ ID NO: 158597 - RNA, 24 nt, Human
gagccaaggucgcgacacugcacu

SEQ ID NO: 158598 - RNA, 24 nt, Human
gagccaaggucgcgccacugcgcu

SEQ ID NO: 158599 - RNA, 24 nt, Human
gagccaaggucgugccacugcacu

SEQ ID NO: 158600 - RNA, 21 nt, Human
gagccaagguggugucagagg

SEQ ID NO: 158601 - RNA, 32 nt, Human
gagccaagguugaagagucaccucuucccauu

SEQ ID NO: 158602 - RNA, 24 nt, Human
gagccaagguugcgccacugcacu

SEQ ID NO: 158603 - RNA, 27 nt, Human
gagccaagucccuuccauuccuuucca

SEQ ID NO: 158604 - RNA, 17 nt, Human
gagccaagucuguggca

SEQ ID NO: 158605 - RNA, 32 nt, Human
gagccaagugagugaguuugcagaaagcaggu

SEQ ID NO: 158606 - RNA, 24 nt, Human
gagccaaguuugcgccacugcacu

SEQ ID NO: 158607 - RNA, 24 nt, Human
gagccaauaucaugccacugcacu

SEQ ID NO: 158608 - RNA, 24 nt, Human
gagccaauauugcaccauugcacu

SEQ ID NO: 158609 - RNA, 32 nt, Human
gagccaaugaguuggaggcugcagugagcuau

SEQ ID NO: 158610 - RNA, 32 nt, Human
gagccacacagcaggaggugggaccauccagu

SEQ ID NO: 158611 - RNA, 32 nt, Human
gagccacacagcagucacacaacucagaguua

SEQ ID NO: 158612 - RNA, 32 nt, Human
gagccacacagggugaacgggcagcagccggc

SEQ ID NO: 158613 - RNA, 20 nt, Human
gagccacacaugggcaucua

SEQ ID NO: 158614 - RNA, 32 nt, Human
gagccacacucaccuugucaggagacucuucu

SEQ ID NO: 158615 - RNA, 32 nt, Human
gagccacacugaggagaagcacucugaauuca

SEQ ID NO: 158616 - RNA, 32 nt, Human
gagccacacugcauuccagcuggguaacagag

SEQ ID NO: 158617 - RNA, 32 nt, Human
gagccacagcacaggccgugcuggcacuuucu

SEQ ID NO: 158618 - RNA, 32 nt, Human
gagccacagccagcaguaguccucauucaaca

SEQ ID NO: 158619 - RNA, 32 nt, Human
gagccacagcgcccggcccucuugcuuuaacu

SEQ ID NO: 158620 - RNA, 32 nt, Human
gagccacaggaaagggccagaagccagagaaa

SEQ ID NO: 158621 - RNA, 32 nt, Human
gagccacaggcaggggugagagcacccacuga

SEQ ID NO: 158622 - RNA, 32 nt, Human
gagccacagguucucauuccuuuucccauuau

SEQ ID NO: 158623 - RNA, 24 nt, Human
gagccacagucacgccacugcauu

SEQ ID NO: 158624 - RNA, 32 nt, Human
gagccacagucacucuggaacugguccucuga

SEQ ID NO: 158625 - RNA, 21 nt, Human
gagccacagugccuggccuga

SEQ ID NO: 158626 - RNA, 32 nt, Human
gagccacaucacaguauuaccuuuuugaagaa

SEQ ID NO: 158627 - RNA, 32 nt, Human
gagccacaucccucuuacagcuagugaaugag

SEQ ID NO: 158628 - RNA, 15 nt, Human
gagccacaugccuga

SEQ ID NO: 158629 - RNA, 32 nt, Human
gagccacaugcugcugcccugaucucaguggg

SEQ ID NO: 158630 - RNA, 20 nt, Human
gagccacaugcuucucucca

SEQ ID NO: 158631 - RNA, 32 nt, Human
gagccacauuuacaauaccucaggcuaauuac

SEQ ID NO: 158632 - RNA, 21 nt, Human
gagccaccaaacccggccuga

SEQ ID NO: 158633 - RNA, 24 nt, Human
gagccaccaagcaggacagagcag

SEQ ID NO: 158634 - RNA, 21 nt, Human
gagccaccacaacuggccuga

SEQ ID NO: 158635 - RNA, 32 nt, Human
gagccaccacaccaggcccgagaaaugcuuuu

SEQ ID NO: 158636 - RNA, 32 nt, Human
gagccaccacacccagccagugaacucuucuu

SEQ ID NO: 158637 - RNA, 21 nt, Human
gagccaccacacccagccuaa

SEQ ID NO: 158638 - RNA, 32 nt, Human
gagccaccacacccggcacuauauaaguauuu

SEQ ID NO: 158639 - RNA, 32 nt, Human
gagccaccacacccggcccugauaaaacucau

SEQ ID NO: 158640 - RNA, 32 nt, Human
gagccaccacacccggccguggaaugguuuuc

SEQ ID NO: 158641 - RNA, 20 nt, Human
gagccaccacacccggccua

SEQ ID NO: 158642 - RNA, 21 nt, Human
gagccaccacacccggccuga

SEQ ID NO: 158643 - RNA, 32 nt, Human
gagccaccacacccggccugaguagagucuuu

SEQ ID NO: 158644 - RNA, 21 nt, Human
gagccaccacaccuggccuaa

SEQ ID NO: 158645 - RNA, 20 nt, Human
gagccaccacaccuggccug

SEQ ID NO: 158646 - RNA, 21 nt, Human
gagccaccacacguggccuaa

SEQ ID NO: 158647 - RNA, 18 nt, Human
gagccaccacacuuggcc

SEQ ID NO: 158648 - RNA, 20 nt, Human
gagccaccacacuuggccua

SEQ ID NO: 158649 - RNA, 21 nt, Human
gagccaccacauccagccuaa

SEQ ID NO: 158650 - RNA, 21 nt, Human
gagccaccacauccggucuaa

SEQ ID NO: 158651 - RNA, 20 nt, Human
gagccaccacaucuggccua

SEQ ID NO: 158652 - RNA, 21 nt, Human
gagccaccacaucuggccuag

SEQ ID NO: 158653 - RNA, 32 nt, Human
gagccaccaccagccaccucucaggagaagcc

SEQ ID NO: 158654 - RNA, 32 nt, Human
gagccaccacccagcaucccaggcugguggca

SEQ ID NO: 158655 - RNA, 21 nt, Human
gagccaccacgccaagccuga

SEQ ID NO: 158656 - RNA, 32 nt, Human
gagccaccacgccaagccugacuuuaagauuu

SEQ ID NO: 158657 - RNA, 20 nt, Human
gagccaccacgcccagccua

SEQ ID NO: 158658 - RNA, 21 nt, Human
gagccaccacgcccagccuag

SEQ ID NO: 158659 - RNA, 20 nt, Human
gagccaccacgcccagccug

SEQ ID NO: 158660 - RNA, 21 nt, Human
gagccaccacgccccgccuaa

SEQ ID NO: 158661 - RNA, 21 nt, Human
gagccaccacgcccgaccuga

SEQ ID NO: 158662 - RNA, 19 nt, Human
gagccaccacgcccggccu

SEQ ID NO: 158663 - RNA, 20 nt, Human
gagccaccacgcccggccug

SEQ ID NO: 158664 - RNA, 18 nt, Human
gagccaccacgccuggcc

SEQ ID NO: 158665 - RNA, 32 nt, Human
gagccaccacgccuggccaaggcggcacucuu

SEQ ID NO: 158666 - RNA, 19 nt, Human
gagccaccacgccuggccu

SEQ ID NO: 158667 - RNA, 21 nt, Human
gagccaccacgccuggccuaa

SEQ ID NO: 158668 - RNA, 18 nt, Human
gagccaccacgccuggcu

SEQ ID NO: 158669 - RNA, 20 nt, Human
gagccaccacgccuggucua

SEQ ID NO: 158670 - RNA, 18 nt, Human
gagccaccacgcuuggcc

SEQ ID NO: 158671 - RNA, 19 nt, Human
gagccaccacgcuuggucu

SEQ ID NO: 158672 - RNA, 21 nt, Human
gagccaccacucccagccuga

SEQ ID NO: 158673 - RNA, 18 nt, Human
gagccaccacucuuggcc

SEQ ID NO: 158674 - RNA, 17 nt, Human
gagccaccagccaggcc

SEQ ID NO: 158675 - RNA, 20 nt, Human
gagccaccaggcccagccua

SEQ ID NO: 158676 - RNA, 17 nt, Human
gagccaccaggccggcc

SEQ ID NO: 158677 - RNA, 19 nt, Human
gagccaccagggcugcagg

SEQ ID NO: 158678 - RNA, 18 nt, Human
gagccaccauaccuggcc

SEQ ID NO: 158679 - RNA, 24 nt, Human
gagccaccaucguaccacugcacu

SEQ ID NO: 158680 - RNA, 15 nt, Human
gagccaccaucugcc

SEQ ID NO: 158681 - RNA, 17 nt, Human
gagccaccaugauggcc

SEQ ID NO: 158682 - RNA, 18 nt, Human
gagccaccaugccaggcu

SEQ ID NO: 158683 - RNA, 20 nt, Human
gagccaccaugcccaacuaa

SEQ ID NO: 158684 - RNA, 18 nt, Human
gagccaccaugcccagcc

SEQ ID NO: 158685 - RNA, 19 nt, Human
gagccaccaugcccagccu

SEQ ID NO: 158686 - RNA, 20 nt, Human
gagccaccaugcccagccua

SEQ ID NO: 158687 - RNA, 21 nt, Human
gagccaccaugcccagccuaa

SEQ ID NO: 158688 - RNA, 32 nt, Human
gagccaccaugcccagccucuucaagcuuuuu

SEQ ID NO: 158689 - RNA, 20 nt, Human
gagccaccaugcccagccug

SEQ ID NO: 158690 - RNA, 18 nt, Human
gagccaccaugccccgcc

SEQ ID NO: 158691 - RNA, 18 nt, Human
gagccaccaugcccggcc

SEQ ID NO: 158692 - RNA, 19 nt, Human
gagccaccaugcccggccu

SEQ ID NO: 158693 - RNA, 21 nt, Human
gagccaccaugcccggccuaa

SEQ ID NO: 158694 - RNA, 18 nt, Human
gagccaccaugcccggcu

SEQ ID NO: 158695 - RNA, 18 nt, Human
gagccaccaugccuagcc

SEQ ID NO: 158696 - RNA, 18 nt, Human
gagccaccaugccugacc

SEQ ID NO: 158697 - RNA, 18 nt, Human
gagccaccaugccugccc

SEQ ID NO: 158698 - RNA, 18 nt, Human
gagccaccaugccuggcc

SEQ ID NO: 158699 - RNA, 32 nt, Human
gagccaccaugccuggccaggacauauuugaa

SEQ ID NO: 158700 - RNA, 19 nt, Human
gagccaccaugccuggccu

SEQ ID NO: 158701 - RNA, 20 nt, Human
gagccaccaugccuggccua

SEQ ID NO: 158702 - RNA, 32 nt, Human
gagccaccaugccuggccucugugguuuuaau

SEQ ID NO: 158703 - RNA, 20 nt, Human
gagccaccaugccuggccug

SEQ ID NO: 158704 - RNA, 18 nt, Human
gagccaccaugccuggcu

SEQ ID NO: 158705 - RNA, 18 nt, Human
gagccaccaugcucagcc

SEQ ID NO: 158706 - RNA, 21 nt, Human
gagccaccaugcucggccuaa

SEQ ID NO: 158707 - RNA, 18 nt, Human
gagccaccaugcuugccu

SEQ ID NO: 158708 - RNA, 20 nt, Human
gagccaccaugcuugccuga

SEQ ID NO: 158709 - RNA, 32 nt, Human
gagccacccagccuggaagccccugcacgggc

SEQ ID NO: 158710 - RNA, 32 nt, Human
gagccacccggcccuuccuuccucauuguugu

SEQ ID NO: 158711 - RNA, 21 nt, Human
gagccaccgaggcuggccuga

SEQ ID NO: 158712 - RNA, 21 nt, Human
gagccaccgcacccagccuga

SEQ ID NO: 158713 - RNA, 21 nt, Human
gagccaccgcacccggccuga

SEQ ID NO: 158714 - RNA, 19 nt, Human
gagccaccgcaccuggccu

SEQ ID NO: 158715 - RNA, 21 nt, Human
gagccaccgcaccuggccuaa

SEQ ID NO: 158716 - RNA, 21 nt, Human
gagccaccgcaccuggccuga

SEQ ID NO: 158717 - RNA, 20 nt, Human
gagccaccgcacuggccuaa

SEQ ID NO: 158718 - RNA, 32 nt, Human
gagccaccgcccccagccuggccuggcauuuc

SEQ ID NO: 158719 - RNA, 22 nt, Human
gagccaccgccccugacaugag

SEQ ID NO: 158720 - RNA, 22 nt, Human
gagccaccgcgcccagccaaga

SEQ ID NO: 158721 - RNA, 20 nt, Human
gagccaccgcgcccagccua

SEQ ID NO: 158722 - RNA, 21 nt, Human
gagccaccgcgcccagccuaa

SEQ ID NO: 158723 - RNA, 21 nt, Human
gagccaccgcgccccaccuaa

SEQ ID NO: 158724 - RNA, 19 nt, Human
gagccaccgcgcccggccu

SEQ ID NO: 158725 - RNA, 20 nt, Human
gagccaccgcgcccggccua

SEQ ID NO: 158726 - RNA, 21 nt, Human
gagccaccgcgcccggccuag

SEQ ID NO: 158727 - RNA, 32 nt, Human
gagccaccgcgcccggccucagcagguuuuuc

SEQ ID NO: 158728 - RNA, 21 nt, Human
gagccaccgcgcccggccuga

SEQ ID NO: 158729 - RNA, 32 nt, Human
gagccaccgcgcccggccugagugagucuuaa

SEQ ID NO: 158730 - RNA, 18 nt, Human
gagccaccgcgccuggcc

SEQ ID NO: 158731 - RNA, 32 nt, Human
gagccaccgcgccuggccgaugugguucauau

SEQ ID NO: 158732 - RNA, 19 nt, Human
gagccaccgcgccuggccu

SEQ ID NO: 158733 - RNA, 20 nt, Human
gagccaccgcgccuggccua

SEQ ID NO: 158734 - RNA, 21 nt, Human
gagccaccgcgccuggccuaa

SEQ ID NO: 158735 - RNA, 21 nt, Human
gagccaccgcgccuggccuag

SEQ ID NO: 158736 - RNA, 20 nt, Human
gagccaccguacccggccua

SEQ ID NO: 158737 - RNA, 32 nt, Human
gagccaccgugccaggccaacagaguguguuc

SEQ ID NO: 158738 - RNA, 21 nt, Human
gagccaccgugcccaacccua

SEQ ID NO: 158739 - RNA, 19 nt, Human
gagccaccgugcccagccu

SEQ ID NO: 158740 - RNA, 20 nt, Human
gagccaccgugcccagccua

SEQ ID NO: 158741 - RNA, 21 nt, Human
gagccaccgugcccagccuaa

SEQ ID NO: 158742 - RNA, 18 nt, Human
gagccaccgugcccggcc

SEQ ID NO: 158743 - RNA, 20 nt, Human
gagccaccgugcccggccua

SEQ ID NO: 158744 - RNA, 32 nt, Human
gagccaccgugcccggccugugcuuaaauauu

SEQ ID NO: 158745 - RNA, 18 nt, Human
gagccaccgugccuggcc

SEQ ID NO: 158746 - RNA, 32 nt, Human
gagccaccgugccuggccaggccccuucucuu

SEQ ID NO: 158747 - RNA, 32 nt, Human
gagccaccgugccuggccgaggcuccuucuuu

SEQ ID NO: 158748 - RNA, 32 nt, Human
gaggaagccagagacagaaauaggcuaagccu

SEQ ID NO: 158749 - RNA, 32 nt, Human
gaggaagcccaagcuaaccacaugggcaaaaa

SEQ ID NO: 158750 - RNA, 21 nt, Human
gaggaagcccccucuccuucu

SEQ ID NO: 158751 - RNA, 24 nt, Human
gaggaagccccgagcccucggcgg

SEQ ID NO: 158752 - RNA, 32 nt, Human
gaggaagccucagacuuagcacugugaacugg

SEQ ID NO: 158753 - RNA, 32 nt, Human
gaggaagccuggggaguggggugcaggaaaag

SEQ ID NO: 158754 - RNA, 19 nt, Human
gaggaagccugguggcucu

SEQ ID NO: 158755 - RNA, 19 nt, Human
gaggaagcggcggcggcgg

SEQ ID NO: 158756 - RNA, 19 nt, Human
gaggaagcgucagugcccu

SEQ ID NO: 158757 - RNA, 19 nt, Human
gaggaagcuaagugcugcu

SEQ ID NO: 158758 - RNA, 18 nt, Human
gaggaagcucagaucucu

SEQ ID NO: 158759 - RNA, 22 nt, Human
gaggaagcucugcucaggccuc

SEQ ID NO: 158760 - RNA, 32 nt, Human
gaggaagcugcuaaagcacacaaaauguccac

SEQ ID NO: 158761 - RNA, 32 nt, Human
gaggaagcuguucuccccaccccaggugccuu

SEQ ID NO: 158762 - RNA, 21 nt, Human
gaggaagcuuuagauagagac

SEQ ID NO: 158763 - RNA, 21 nt, Human
gaggaaggaauaagcagacag

SEQ ID NO: 158764 - RNA, 32 nt, Human
gaggaaggaauagcacaggucucuccaaagug

SEQ ID NO: 158765 - RNA, 32 nt, Human
gaggaaggacugguaugcccagcuggagggaa

SEQ ID NO: 158766 - RNA, 32 nt, Human
gaggaaggagaaaacugcaucauaacuuuaca

SEQ ID NO: 158767 - RNA, 32 nt, Human
gaggaaggagagaacagugucuuggggaugcu

SEQ ID NO: 158768 - RNA, 19 nt, Human
gaggaaggagaggagaggg

SEQ ID NO: 158769 - RNA, 32 nt, Human
gaggaaggagcaggaggagggaagagaaugaa

SEQ ID NO: 158770 - RNA, 21 nt, Human
gaggaaggagcggcgggcagg

SEQ ID NO: 158771 - RNA, 32 nt, Human
gaggaaggaggaacuguggcgcccagcgcucc

SEQ ID NO: 158772 - RNA, 24 nt, Human
gaggaaggaggaggaaugagaggg

SEQ ID NO: 158773 - RNA, 32 nt, Human
gaggaaggaggcaggcuguggugggacugggu

SEQ ID NO: 158774 - RNA, 19 nt, Human
gaggaaggaggccagcagg

SEQ ID NO: 158775 - RNA, 23 nt, Human
gaggaaggaggcccagcuguggg

SEQ ID NO: 158776 - RNA, 32 nt, Human
gaggaaggaggcggaggucugaguuucgaggg

SEQ ID NO: 158777 - RNA, 21 nt, Human
gaggaaggagggcaggggcgg

SEQ ID NO: 158778 - RNA, 17 nt, Human
gaggaaggagguggagc

SEQ ID NO: 158779 - RNA, 32 nt, Human
gaggaaggaucccuucuccuucuguugacucu

SEQ ID NO: 158780 - RNA, 32 nt, Human
gaggaaggcaccuugcugaaugacuagaaugg

SEQ ID NO: 158781 - RNA, 32 nt, Human
gaggaaggcagagugugacagagcagagccag

SEQ ID NO: 158782 - RNA, 32 nt, Human
gaggaaggccagaggaacagcuuugugcuccg

SEQ ID NO: 158783 - RNA, 32 nt, Human
gaggaaggccgggagaaggggagccaggaccu

SEQ ID NO: 158784 - RNA, 20 nt, Human
gaggaaggcggaggagcggg

SEQ ID NO: 158785 - RNA, 32 nt, Human
gaggaaggcgggcuaaugcagagcagaugggc

SEQ ID NO: 158786 - RNA, 19 nt, Human
gaggaaggcucuugagaug

SEQ ID NO: 158787 - RNA, 32 nt, Human
gaggaaggcucuugagaugguggagaagugcc

SEQ ID NO: 158788 - RNA, 32 nt, Human
gaggaaggcugaggccaagaccccggaagaga

SEQ ID NO: 158789 - RNA, 32 nt, Human
gaggaaggcugccuggaggaaguggccacuuu

SEQ ID NO: 158790 - RNA, 32 nt, Human
gaggaagggaaagacccagagggacgccuaga

SEQ ID NO: 158791 - RNA, 32 nt, Human
gaggaagggaaagagaugugagggaagcauuu

SEQ ID NO: 158792 - RNA, 32 nt, Human
gaggaagggaccggccucccacguccacaggg

SEQ ID NO: 158793 - RNA, 19 nt, Human
gaggaagggagaaggcaga

SEQ ID NO: 158794 - RNA, 32 nt, Human
gaggaagggagggaugaggagguggagugcag

SEQ ID NO: 158795 - RNA, 32 nt, Human
gaggaagggagggcagagggggcuguggccgu

SEQ ID NO: 158796 - RNA, 31 nt, Human
gaggaagggcauguuguaaugccaagcugau

SEQ ID NO: 158797 - RNA, 32 nt, Human
gaggaagggcuggggagaagagcgaggcugua

SEQ ID NO: 158798 - RNA, 32 nt, Human
gaggaaggggaccaagccagagagggacaggu

SEQ ID NO: 158799 - RNA, 32 nt, Human
gaggaagggggugcccugccacccugagaaca

SEQ ID NO: 158800 - RNA, 32 nt, Human
gaggaagggguguggagguccagggagagggu

SEQ ID NO: 158801 - RNA, 23 nt, Human
gaggaagguacugcccauuggga

SEQ ID NO: 158802 - RNA, 32 nt, Human
gaggaaggucugcagggagcagcuggccauuu

SEQ ID NO: 158803 - RNA, 32 nt, Human
gaggaagguggccauggauggaugggcuguau

SEQ ID NO: 158804 - RNA, 31 nt, Human
gaggaagguggggguuucaaagacuggggga

SEQ ID NO: 158805 - RNA, 31 nt, Human
gaggaaguacuuagggagguuggugucagag

SEQ ID NO: 158806 - RNA, 23 nt, Human
gaggaaguagaagggcaaagaca

SEQ ID NO: 158807 - RNA, 32 nt, Human
gaggaaguagauucagagguaaggagaauuuu

SEQ ID NO: 158808 - RNA, 22 nt, Human
gaggaaguccagagacagagca

SEQ ID NO: 158809 - RNA, 32 nt, Human
gaggaagugaacacuggagugaagaagcgguc

SEQ ID NO: 158810 - RNA, 24 nt, Human
gaggaagugaagaaaucaagagca

SEQ ID NO: 158811 - RNA, 32 nt, Human
gaggaagugagaaaguuggcacagucacgccg

SEQ ID NO: 158812 - RNA, 32 nt, Human
gaggaagugagcucuccuggggcgugguuguu

SEQ ID NO: 158813 - RNA, 22 nt, Human
gaggaagugaggauaaagagca

SEQ ID NO: 158814 - RNA, 21 nt, Human
gaggaaguggaaccagagagc

SEQ ID NO: 158815 - RNA, 23 nt, Human
gaggaaguggaagggacaggagc

SEQ ID NO: 158816 - RNA, 24 nt, Human
gaggaaguggaagggacaggagca

SEQ ID NO: 158817 - RNA, 32 nt, Human
gaggaaguggcaccccuccccucaccacagau

SEQ ID NO: 158818 - RNA, 32 nt, Human
gaggaagugggaacagggaggugggaggugga

SEQ ID NO: 158819 - RNA, 32 nt, Human
gaggaagugggagcucagggaggaccccgggc

SEQ ID NO: 158820 - RNA, 32 nt, Human
gaggaagugggguuggaaaaugacgagaugga

SEQ ID NO: 158821 - RNA, 23 nt, Human
gaggaagugugucacagugaaca

SEQ ID NO: 158822 - RNA, 21 nt, Human
gaggaauaaagaacaggagca

SEQ ID NO: 158823 - RNA, 32 nt, Human
gaggaauaaagaacaggagcagagggaagccg

SEQ ID NO: 158824 - RNA, 19 nt, Human
gaggaauagggauggggag

SEQ ID NO: 158825 - RNA, 19 nt, Human
gaggaauaugaacauuuua

SEQ ID NO: 158826 - RNA, 32 nt, Human
gaggaauauggaauccaagggggccaguuccu

SEQ ID NO: 158827 - RNA, 32 nt, Human
gaggaauaugguaaagccaaaauaguugacag

SEQ ID NO: 158828 - RNA, 32 nt, Human
gaggaauauuugacaguacuuauuugauauug

SEQ ID NO: 158829 - RNA, 32 nt, Human
gaggaaucaccguaccaugagcauuaaucaau

SEQ ID NO: 158830 - RNA, 32 nt, Human
gaggaaucaugucaggccugugugugaaagga

SEQ ID NO: 158831 - RNA, 32 nt, Human
gaggaauccauucucuuugaacaucagaaugu

SEQ ID NO: 158832 - RNA, 32 nt, Human
gaggaauccuaccagcggcccauuaguagcac

SEQ ID NO: 158833 - RNA, 32 nt, Human
gaggaaucuauuccugucauggucuagugccu

SEQ ID NO: 158834 - RNA, 32 nt, Human
gaggaaugacacaccacucccuccccaccuug

SEQ ID NO: 158835 - RNA, 32 nt, Human
gaggaaugagccuuuuaauucagaaauggggc

SEQ ID NO: 158836 - RNA, 31 nt, Human
gaggaaugaguguccaggcagaguucagaag

SEQ ID NO: 158837 - RNA, 30 nt, Human
gaggaaugcaccggccgcgccgccgcggga

SEQ ID NO: 158838 - RNA, 32 nt, Human
gaggaauggaaagggaacccagauaggaagcu

SEQ ID NO: 158839 - RNA, 30 nt, Human
gaggaauggacagaagcauccagcaugggg

SEQ ID NO: 158840 - RNA, 32 nt, Human
gaggaauggaguuuccuugaugagccugagag

SEQ ID NO: 158841 - RNA, 32 nt, Human
gaggaaugggucuugugaaauucugagcaaaa

SEQ ID NO: 158842 - RNA, 32 nt, Human
gaggaauguaucagccaguggcuggugguaug

SEQ ID NO: 158843 - RNA, 32 nt, Human
gaggaaugugguuuacauuugagauccaccuu

SEQ ID NO: 158844 - RNA, 32 nt, Human
gaggaauguguugcugucagacugauguagaa

SEQ ID NO: 158845 - RNA, 32 nt, Human
gaggaauuaaacuaucauuuauuugaaauguu

SEQ ID NO: 158846 - RNA, 32 nt, Human
gaggaauuaauacccaccauuaaaggaugucc

SEQ ID NO: 158847 - RNA, 32 nt, Human
gaggaauucugagacuuuagaggccgcacagc

SEQ ID NO: 158848 - RNA, 32 nt, Human
gaggaauucugggaacuaaguuuuucuucucc

SEQ ID NO: 158849 - RNA, 32 nt, Human
gaggaauuguucuggggguccuggagacuuac

SEQ ID NO: 158850 - RNA, 19 nt, Human
gaggaauuugaacauuuua

SEQ ID NO: 158851 - RNA, 32 nt, Human
gaggaauuuguaccuauucuccagaaaacagu

SEQ ID NO: 158852 - RNA, 19 nt, Human
gaggaauuuugaacauuuc

SEQ ID NO: 158853 - RNA, 32 nt, Human
gaggaauuuuucauuuucuuccuggcuggguu

SEQ ID NO: 158854 - RNA, 32 nt, Human
gaggacaaagagagcucaagaggaaugcuuug

SEQ ID NO: 158855 - RNA, 32 nt, Human
gaggacaaagugggcggaucaccugaggucag

SEQ ID NO: 158856 - RNA, 32 nt, Human
gaggacaaauaagaaaugaaacauccuaugaa

SEQ ID NO: 158857 - RNA, 19 nt, Human
gaggacaacuaacauuuua

SEQ ID NO: 158858 - RNA, 32 nt, Human
gaggacaauaagaguuauggcaaaaagcaaaa

SEQ ID NO: 158859 - RNA, 32 nt, Human
gaggacacagaaggacuuggcagcagggugau

SEQ ID NO: 158860 - RNA, 32 nt, Human
gaggacacagcccagcugcaggugugggugua

SEQ ID NO: 158861 - RNA, 20 nt, Human
gaggacacaggcagcuucca

SEQ ID NO: 158862 - RNA, 21 nt, Human
gaggacacauagagcaugcca

SEQ ID NO: 158863 - RNA, 21 nt, Human
gaggacaccagugagcuucca

SEQ ID NO: 158864 - RNA, 32 nt, Human
gaggacaccaucaaccuauauugaaugucaua

SEQ ID NO: 158865 - RNA, 26 nt, Human
gaggacacccuggaagagcaggagca

SEQ ID NO: 158866 - RNA, 18 nt, Human
gaggacaccggcggucca

SEQ ID NO: 158867 - RNA, 20 nt, Human
gaggacacgaggauauugua

SEQ ID NO: 158868 - RNA, 32 nt, Human
gaggacacgggccgcaccacacagugcucccu

SEQ ID NO: 158869 - RNA, 17 nt, Human
gaggacacuaagauucc

SEQ ID NO: 158870 - RNA, 18 nt, Human
gaggacacuagacggucc

SEQ ID NO: 158871 - RNA, 18 nt, Human
gaggacacuagcuuuuca

SEQ ID NO: 158872 - RNA, 32 nt, Human
gaggacacucugagccccuugugaccugcuuc

SEQ ID NO: 158873 - RNA, 21 nt, Human
gaggacacuggaaucaauucu

SEQ ID NO: 158874 - RNA, 32 nt, Human
gaggacacuggcaggagaguagcuggagauga

SEQ ID NO: 158875 - RNA, 23 nt, Human
gaggacacugggaauauauucua

SEQ ID NO: 158876 - RNA, 19 nt, Human
gaggacacuggugguucua

SEQ ID NO: 158877 - RNA, 32 nt, Human
gaggacagaaggaaagaaaaaggaaggcaggg

SEQ ID NO: 158878 - RNA, 32 nt, Human
gaggacagacacaggcuccaaacuccacuaac

SEQ ID NO: 158879 - RNA, 20 nt, Human
gaggacagacagcaauucua

SEQ ID NO: 158880 - RNA, 22 nt, Human
gaggacagacugggacaggaac

SEQ ID NO: 158881 - RNA, 32 nt, Human
gaggacagaggugggggagugggaagugggaa

SEQ ID NO: 158882 - RNA, 32 nt, Human
gaggacagagugacaggagugaggggagagag

SEQ ID NO: 158883 - RNA, 19 nt, Human
gaggacagccaagggccau

SEQ ID NO: 158884 - RNA, 32 nt, Human
gaggacagccuuaugaggguuugcuugagagg

SEQ ID NO: 158885 - RNA, 32 nt, Human
gaggacagcuccugccugcagcuuccagaccc

SEQ ID NO: 158886 - RNA, 18 nt, Human
gaggacagcucgcgacgg

SEQ ID NO: 158887 - RNA, 32 nt, Human
gaggacagcugcagagguggcaguguguggac

SEQ ID NO: 158888 - RNA, 32 nt, Human
gaggacagcuuuaaaagaugaaugacucaaaa

SEQ ID NO: 158889 - RNA, 32 nt, Human
gaggacaggagaagggcccagacacucccucc

SEQ ID NO: 158890 - RNA, 32 nt, Human
gaggacaggcagccccgcgccccugagacugg

SEQ ID NO: 158891 - RNA, 32 nt, Human
gaggacagggcacagagacauggagguguuca

SEQ ID NO: 158892 - RNA, 32 nt, Human
gaggacagggccugggacuguucuuccagauc

SEQ ID NO: 158893 - RNA, 32 nt, Human
gaggacaggugugaggcccucaugggauguag

SEQ ID NO: 158894 - RNA, 32 nt, Human
gaggacagucacugcaaucucuuuaccaccuc

SEQ ID NO: 158895 - RNA, 21 nt, Human
gaggacagucuagggcauuuu

SEQ ID NO: 158896 - RNA, 32 nt, Human
gaggacagugaugugacuucuuggucagaaga

SEQ ID NO: 158897 - RNA, 32 nt, Human
gaggacaguuuugccccacaaggggcacuugg

SEQ ID NO: 158898 - RNA, 21 nt, Human
gaggacauaagauggguacag

SEQ ID NO: 158899 - RNA, 32 nt, Human
gaggacauaaguaucaugucuccuuuaacuag

SEQ ID NO: 158900 - RNA, 32 nt, Human
gaggacauaaugggggccuggccaucccacaa

SEQ ID NO: 158901 - RNA, 32 nt, Human
gaggacauacaugauuuugaaaagcuggaacc

SEQ ID NO: 158902 - RNA, 32 nt, Human
gaggacauaguuuccaggcugcaaugcugaau

SEQ ID NO: 158903 - RNA, 21 nt, Human
gaggacauauucugggcacug

SEQ ID NO: 158904 - RNA, 32 nt, Human
gaggacaucaccaucaucucaggaugaggggc

SEQ ID NO: 158905 - RNA, 22 nt, Human
gaggacaucaccuggggugcug

SEQ ID NO: 158906 - RNA, 22 nt, Human
gaggacaucccaugcggcuacu

SEQ ID NO: 158907 - RNA, 24 nt, Human
gaggacaucccugcugggcugcug

SEQ ID NO: 158908 - RNA, 32 nt, Human
gaggacauccucuccauguucucagcuauccg

SEQ ID NO: 158909 - RNA, 20 nt, Human
gaggacaucuaucguauucu

SEQ ID NO: 158910 - RNA, 32 nt, Human
gaggacaucuuggggagggggagggagcuggg

SEQ ID NO: 158911 - RNA, 32 nt, Human
gaggacaugaagcuauuccucccaccaccagu

SEQ ID NO: 158912 - RNA, 20 nt, Human
gaggacaugagaauaauuca

SEQ ID NO: 158913 - RNA, 32 nt, Human
gaggacaugagauuggggaggggccaggggca

SEQ ID NO: 158914 - RNA, 32 nt, Human
gaggacaugagauuuggaaggggccaggggug

SEQ ID NO: 158915 - RNA, 21 nt, Human
gaggacaugcacauauaucca

SEQ ID NO: 158916 - RNA, 24 nt, Human
gaggacaugccucuucuuccuccu

SEQ ID NO: 158917 - RNA, 20 nt, Human
gaggacauggcaccauucca

SEQ ID NO: 158918 - RNA, 32 nt, Human
gaggacaugggaagguaggaguugccgcccug

SEQ ID NO: 158919 - RNA, 20 nt, Human
gaggacauuccugucaucca

SEQ ID NO: 158920 - RNA, 19 nt, Human
gaggacauuguggcagcca

SEQ ID NO: 158921 - RNA, 18 nt, Human
gaggacauuguggcauuc

SEQ ID NO: 158922 - RNA, 19 nt, Human
gaggacauuuaauauucua

SEQ ID NO: 158923 - RNA, 32 nt, Human
gaggaccaaccaugagccagagcccgggugca

SEQ ID NO: 158924 - RNA, 32 nt, Human
gaggaccacaguuggggguguagggaccaccc

SEQ ID NO: 158925 - RNA, 32 nt, Human
gaggaccacuugagcccaggagauugaggcug

SEQ ID NO: 158926 - RNA, 32 nt, Human
gaggaccagccauugagggguggacccucaga

SEQ ID NO: 158927 - RNA, 19 nt, Human
gaggaccagccccuccucc

SEQ ID NO: 158928 - RNA, 22 nt, Human
gaggaccagccgcccuccuucc

SEQ ID NO: 158929 - RNA, 20 nt, Human
gaggaccagcuaggcucucc

SEQ ID NO: 158930 - RNA, 32 nt, Human
gaggaccagcuuuauccagggacucuaccauu

SEQ ID NO: 158931 - RNA, 32 nt, Human
gaggaccaggaacccggcgacugaggugcuuc

SEQ ID NO: 158932 - RNA, 32 nt, Human
gaggaccaggagacggcuguguagcgggccgc

SEQ ID NO: 158933 - RNA, 32 nt, Human
gaggaccaggagcugguguuccaaggcagaag

SEQ ID NO: 158934 - RNA, 23 nt, Human
gaggaccaggggaucaugucucc

SEQ ID NO: 158935 - RNA, 32 nt, Human
gaggaccaggguggagcugagaagaggaggag

SEQ ID NO: 158936 - RNA, 23 nt, Human
gaggaccaggucucuccgcuccu

SEQ ID NO: 158937 - RNA, 32 nt, Human
gaggaccagugucccccaaagccccucaacua

SEQ ID NO: 158938 - RNA, 32 nt, Human
gaggaccaugcugugagcagcagggcgagagu

SEQ ID NO: 158939 - RNA, 23 nt, Human
gaggacccacugugagcacucca

SEQ ID NO: 158940 - RNA, 32 nt, Human
gaggacccauccugccacaggacccagaaaaa

SEQ ID NO: 158941 - RNA, 32 nt, Human
gaggacccaugcgccacguccuggguggugga

SEQ ID NO: 158942 - RNA, 32 nt, Human
gaggaccccacucugaagccagccuggagcca

SEQ ID NO: 158943 - RNA, 32 nt, Human
gaggaccccugccaccgacuucggcacgguaa

SEQ ID NO: 158944 - RNA, 32 nt, Human
gaggaccccugcccugaauccugcacuugaga

SEQ ID NO: 158945 - RNA, 32 nt, Human
gaggacccucauucccagccuggcuguccaca

SEQ ID NO: 158946 - RNA, 20 nt, Human
gaggacccucccagguuucc

SEQ ID NO: 158947 - RNA, 32 nt, Human
gaggacccuguaugucuggaguucaguccccu

SEQ ID NO: 158948 - RNA, 32 nt, Human
gaggacccuucagagccacccuuucuaguuug

SEQ ID NO: 158949 - RNA, 32 nt, Human
gaggaccgaggcacagaggugcggugacuugc

SEQ ID NO: 158950 - RNA, 32 nt, Human
gaggaccgcuugagcccaggaguuugagacug

SEQ ID NO: 158951 - RNA, 32 nt, Human
gaggaccggccaccccagacuuccugucccgc

SEQ ID NO: 158952 - RNA, 32 nt, Human
gaggaccggcucuuccaccaguucaagcgcuu

SEQ ID NO: 158953 - RNA, 32 nt, Human
gaggaccucacugaggccgagugggaggaccu

SEQ ID NO: 158954 - RNA, 32 nt, Human
gaggaccucagggacuugagguugcauuuuug

SEQ ID NO: 158955 - RNA, 32 nt, Human
gaggaccuccacccucugaccuuucaguuuuc

SEQ ID NO: 158956 - RNA, 32 nt, Human
gaggaccuccaugcccccgccaccuccccacu

SEQ ID NO: 158957 - RNA, 32 nt, Human
gaggaccugaccucacagagggaggcguccag

SEQ ID NO: 158958 - RNA, 32 nt, Human
gaggaccugagccagaugcacaccaucucuga

SEQ ID NO: 158959 - RNA, 32 nt, Human
gaggaccugagcgcugcggcucugcugaaugg

SEQ ID NO: 158960 - RNA, 32 nt, Human
gaggaccugaugccaagggguaaugggcccag

SEQ ID NO: 158961 - RNA, 32 nt, Human
gaggaccuggaaacugcuguuugcccugguau

SEQ ID NO: 158962 - RNA, 32 nt, Human
gaggaccuggagagcugggagaccaugaugag

SEQ ID NO: 158963 - RNA, 32 nt, Human
gaggaccugggccucugcugucagcccaacac

SEQ ID NO: 158964 - RNA, 32 nt, Human
gaggaccuguaaggcaggcccauucagagcua

SEQ ID NO: 158965 - RNA, 32 nt, Human
gaggaccuuuuggcuucucuggagccugcaag

SEQ ID NO: 158966 - RNA, 32 nt, Human
gaggacgaacagcaucuuagccaagaccacaa

SEQ ID NO: 158967 - RNA, 32 nt, Human
gaggacgacauccugaccugcugcugaggcug

SEQ ID NO: 158968 - RNA, 32 nt, Human
gaggacgagagaccuccagccccggcacccgc

SEQ ID NO: 158969 - RNA, 32 nt, Human
gaggacgaggaggcagcaggagcagugacggu

SEQ ID NO: 158970 - RNA, 32 nt, Human
gaggacgaggaugaggaggaggaaggugaaga

SEQ ID NO: 158971 - RNA, 32 nt, Human
gaggacgaggcauguggaucaccugaggucgg

SEQ ID NO: 158972 - RNA, 32 nt, Human
gaggacgaggugccgcugccuggagaauccuc

SEQ ID NO: 158973 - RNA, 32 nt, Human
gaggacgcagagggcagaggcccaguggagcc

SEQ ID NO: 158974 - RNA, 32 nt, Human
gaggacgcccaggaggaggcggcggcggcggc

SEQ ID NO: 158975 - RNA, 32 nt, Human
gaggacgccgaggccuggagugggugguagcc

SEQ ID NO: 158976 - RNA, 20 nt, Human
gaggacgcgagccccgcggc

SEQ ID NO: 158977 - RNA, 32 nt, Human
gaggacgcgccaacauccccgcugcugugcug

SEQ ID NO: 158978 - RNA, 20 nt, Human
gaggacgcgcggaacuucua

SEQ ID NO: 158979 - RNA, 19 nt, Human
gaggacgcugugaucucca

SEQ ID NO: 158980 - RNA, 32 nt, Human
gaggacgcugugaucuccaccuugaagccagg

SEQ ID NO: 158981 - RNA, 32 nt, Human
gaggacgcuuccccuuccuuguuucugcucag

SEQ ID NO: 158982 - RNA, 32 nt, Human
gaggacggagucuugcucugucgcccagguug

SEQ ID NO: 158983 - RNA, 18 nt, Human
gaggacggauugauucca

SEQ ID NO: 158984 - RNA, 32 nt, Human
gaggacgggcaggccagcaagcaggcugccug

SEQ ID NO: 158985 - RNA, 32 nt, Human
gaggacgggcggggccauuuggccucuuucgc

SEQ ID NO: 158986 - RNA, 20 nt, Human
gaggacggguggauauuuca

SEQ ID NO: 158987 - RNA, 22 nt, Human
gaggacgugcuuccugcuucau

SEQ ID NO: 158988 - RNA, 24 nt, Human
gaggacguuaucuuccucuccucc

SEQ ID NO: 158989 - RNA, 32 nt, Human
gaggacuacagcuccacggaggggucuggggg

SEQ ID NO: 158990 - RNA, 19 nt, Human
gaggacuaggcucuccccu

SEQ ID NO: 158991 - RNA, 32 nt, Human
gaggacuagggcuuauccaugccugggaaaug

SEQ ID NO: 158992 - RNA, 19 nt, Human
gaggacucaccuggggcag

SEQ ID NO: 158993 - RNA, 32 nt, Human
gaggacuccaggcagcagacacaugccagggc

SEQ ID NO: 158994 - RNA, 32 nt, Human
gaggacuccauucaugaugaguucgugcggag

SEQ ID NO: 158995 - RNA, 32 nt, Human
gaggacuccugccuuuccuguuuagacaccca

SEQ ID NO: 158996 - RNA, 32 nt, Human
gaggacucucuacccuugccguaucuaaggag

SEQ ID NO: 158997 - RNA, 21 nt, Human
gaggacucucugaagcauucu

SEQ ID NO: 158998 - RNA, 32 nt, Human
gaggacucugcacuuguccaagagaagaaucc

SEQ ID NO: 158999 - RNA, 32 nt, Human
gaggacucugcaguaccuucuccuacaucuag

SEQ ID NO: 159000 - RNA, 32 nt, Human
gaggacucuguggagaugccuguaacccaccg

SEQ ID NO: 159001 - RNA, 32 nt, Human
gaggacugacccuuuccccacaaggaccugcc

SEQ ID NO: 159002 - RNA, 32 nt, Human
gaggacugacgcugcuggccugggcguccccu

SEQ ID NO: 159003 - RNA, 32 nt, Human
gaggacugagcaccccuccuagcggcaucccu

SEQ ID NO: 159004 - RNA, 32 nt, Human
gaggacugaguguguggaaguuuuucauaaac

SEQ ID NO: 159005 - RNA, 32 nt, Human
gaggacugaugggaaagggaaggcuggcagca

SEQ ID NO: 159006 - RNA, 32 nt, Human
gaggacugcaaugagaggauccuggccaugag

SEQ ID NO: 159007 - RNA, 32 nt, Human
gaggacugccccgugcccugaggugacuuccu

SEQ ID NO: 159008 - RNA, 32 nt, Human
gaggacugcccuuuggauguuuaucuucauua

SEQ ID NO: 159009 - RNA, 24 nt, Human
gaggacugcggcucccucccuccu

SEQ ID NO: 159010 - RNA, 32 nt, Human
gaggacugcuggugaccugggaagaaaccuuc

SEQ ID NO: 159011 - RNA, 32 nt, Human
gaggacugcuguccggagaggagggagccuga

SEQ ID NO: 159012 - RNA, 32 nt, Human
gaggacugcuugagcccaggaggucaaggcug

SEQ ID NO: 159013 - RNA, 32 nt, Human
gaggacugcuugagcccaggaguucagggcug

SEQ ID NO: 159014 - RNA, 32 nt, Human
gaggacugcuugagcccaggaguuugagacca

SEQ ID NO: 159015 - RNA, 32 nt, Human
gaggacugcuugagcccaggaguuugagauga

SEQ ID NO: 159016 - RNA, 32 nt, Human
gaggacuggaaaugucuuugagcugaagguca

SEQ ID NO: 159017 - RNA, 20 nt, Human
gaggacuggcugcccuggag

SEQ ID NO: 159018 - RNA, 32 nt, Human
gaggacugggcugugguugggccugaggccug

SEQ ID NO: 159019 - RNA, 32 nt, Human
gaggacuggggagggggccgugggagagcccu

SEQ ID NO: 159020 - RNA, 32 nt, Human
gaggacuggggugcuccgcugagccacuccug

SEQ ID NO: 159021 - RNA, 21 nt, Human
gaggacugggugcugggcugc

SEQ ID NO: 159022 - RNA, 32 nt, Human
gaggacugguugccauggcaaaugcugguucu

SEQ ID NO: 159023 - RNA, 32 nt, Human
gaggacugugucugcuccgugagagcugcgug

SEQ ID NO: 159024 - RNA, 32 nt, Human
gaggacuguuugagcccaggaguucagggcug

SEQ ID NO: 159025 - RNA, 18 nt, Human
gaggacuuaaaauauucc

SEQ ID NO: 159026 - RNA, 32 nt, Human
gaggacuucauucaagacucuauugcaauaga

SEQ ID NO: 159027 - RNA, 32 nt, Human
gaggacuucccccugcugcacagguucagcau

SEQ ID NO: 159028 - RNA, 32 nt, Human
gaggacuucucccacucaucccuguaccugag

SEQ ID NO: 159029 - RNA, 32 nt, Human
gaggacuucuccugccaagcccagggagucug

SEQ ID NO: 159030 - RNA, 32 nt, Human
gaggacuucucuaggaaguccuuccugacuac

SEQ ID NO: 159031 - RNA, 21 nt, Human
gaggacuucuggaacauucca

SEQ ID NO: 159032 - RNA, 32 nt, Human
gaggacuugaagcagaaagcaagugaauacca

SEQ ID NO: 159033 - RNA, 32 nt, Human
gaggacuugaagcagaguucaccagugagcuc

SEQ ID NO: 159034 - RNA, 32 nt, Human
gaggacuugcagagacacguaccacacaguaa

SEQ ID NO: 159035 - RNA, 32 nt, Human
gaggacuugcuguggagaagagagaaaagaga

SEQ ID NO: 159036 - RNA, 32 nt, Human
gaggacuuggagaccaccuuccugugcaggcc

SEQ ID NO: 159037 - RNA, 32 nt, Human
gaggacuuggaggaugcagggaagagaggggc

SEQ ID NO: 159038 - RNA, 32 nt, Human
gaggacuuggcgggcagcaggaggcaaggguu

SEQ ID NO: 159039 - RNA, 32 nt, Human
gaggacuugggaacugccgaggccucugccaa

SEQ ID NO: 159040 - RNA, 32 nt, Human
gaggacuugggauuuggugguuuguugaccuu

SEQ ID NO: 159041 - RNA, 32 nt, Human
gaggacuuugccucuucuccugccucauuccc

SEQ ID NO: 159042 - RNA, 17 nt, Human
gaggagaaaaaauguag

SEQ ID NO: 159043 - RNA, 18 nt, Human
gaggagaaaaaauuaaga

SEQ ID NO: 159044 - RNA, 17 nt, Human
gaggagaaaaagacaga

SEQ ID NO: 159045 - RNA, 18 nt, Human
gaggagaaaaagcccagg

SEQ ID NO: 159046 - RNA, 15 nt, Human
gaggagaaaaagcgg

SEQ ID NO: 159047 - RNA, 18 nt, Human
gaggagaaaacauacaga

SEQ ID NO: 159048 - RNA, 16 nt, Human
gaggagaaaacugcag

SEQ ID NO: 159049 - RNA, 19 nt, Human
gaggagaaaagaucugaga

SEQ ID NO: 159050 - RNA, 18 nt, Human
gaggagaaaccugcauga

SEQ ID NO: 159051 - RNA, 17 nt, Human
gaggagaaaccuugaga

SEQ ID NO: 159052 - RNA, 17 nt, Human
gaggagaaacuuguaga

SEQ ID NO: 159053 - RNA, 17 nt, Human
gaggagaaagaaacaga

SEQ ID NO: 159054 - RNA, 16 nt, Human
gaggagaaagaacaga

SEQ ID NO: 159055 - RNA, 32 nt, Human
gaggagaaagaaugucuuuucgaggcggaggu

SEQ ID NO: 159056 - RNA, 19 nt, Human
gaggagaaagagccccaga

SEQ ID NO: 159057 - RNA, 32 nt, Human
gaggagaaagagugugcguucaagaggcagau

SEQ ID NO: 159058 - RNA, 20 nt, Human
gaggagaaagaugacccaga

SEQ ID NO: 159059 - RNA, 17 nt, Human
gaggagaaagauggaga

SEQ ID NO: 159060 - RNA, 18 nt, Human
gaggagaaagcagugcag

SEQ ID NO: 159061 - RNA, 26 nt, Human
gaggagaaagccccuguguugccaga

SEQ ID NO: 159062 - RNA, 20 nt, Human
gaggagaaagcuaggcuaga

SEQ ID NO: 159063 - RNA, 18 nt, Human
gaggagaaagcugacagg

SEQ ID NO: 159064 - RNA, 19 nt, Human
gaggagaaaggaaaugaga

SEQ ID NO: 159065 - RNA, 32 nt, Human
gaggagaaaggagaaccacugauuuuaucugg

SEQ ID NO: 159066 - RNA, 32 nt, Human
gaggagaaaggagcccaggaaacgggucauuu

SEQ ID NO: 159067 - RNA, 32 nt, Human
gaggagaaaggaugagaguaacuguggagagg

SEQ ID NO: 159068 - RNA, 19 nt, Human
gaggagaaaguucuggaga

SEQ ID NO: 159069 - RNA, 19 nt, Human
gaggagaaauguggacaga

SEQ ID NO: 159070 - RNA, 32 nt, Human
gaggagaaauguguucuucaguaccaucagau

SEQ ID NO: 159071 - RNA, 18 nt, Human
gaggagaacauguugaga

SEQ ID NO: 159072 - RNA, 18 nt, Human
gaggagaacgacgcacgg

SEQ ID NO: 159073 - RNA, 24 nt, Human
gaggagaacuugguagauggggag

SEQ ID NO: 159074 - RNA, 32 nt, Human
gaggagaagaagaaagcggaaaagaggcagau

SEQ ID NO: 159075 - RNA, 18 nt, Human
gaggagaagacgcgcgga

SEQ ID NO: 159076 - RNA, 18 nt, Human
gaggagaagagacgcagg

SEQ ID NO: 159077 - RNA, 32 nt, Human
gaggagaagaggaggaggcagaggaagaaaga

SEQ ID NO: 159078 - RNA, 32 nt, Human
gaggagaagcagcuggcagcggagagagcagc

SEQ ID NO: 159079 - RNA, 19 nt, Human
gaggagaagccauugcaga

SEQ ID NO: 159080 - RNA, 32 nt, Human
gaggagaagcugcaagggaaaagggagggaca

SEQ ID NO: 159081 - RNA, 17 nt, Human
gaggagaagcugcgcga

SEQ ID NO: 159082 - RNA, 17 nt, Human
gaggagaagcuugcaga

SEQ ID NO: 159083 - RNA, 19 nt, Human
gaggagaaggacuggcaga

SEQ ID NO: 159084 - RNA, 17 nt, Human
gaggagaaggagcaaga

SEQ ID NO: 159085 - RNA, 32 nt, Human
gaggagaaggaggucagugcucagggagacau

SEQ ID NO: 159086 - RNA, 16 nt, Human
gaggagaaggaugcag

SEQ ID NO: 159087 - RNA, 32 nt, Human
gaggagaaggcaggcagggcccagugagaggg

SEQ ID NO: 159088 - RNA, 19 nt, Human
gaggagaaggcggcggcgg

SEQ ID NO: 159089 - RNA, 19 nt, Human
gaggagaaggguuuccaga

SEQ ID NO: 159090 - RNA, 32 nt, Human
gaggagaagguggugacccugaucgucggcca

SEQ ID NO: 159091 - RNA, 32 nt, Human
gaggagaaguaagccauuucugccacuuuccc

SEQ ID NO: 159092 - RNA, 17 nt, Human
gaggagaaguuugaaga

SEQ ID NO: 159093 - RNA, 32 nt, Human
gaggagaaucagcuuagagaacuaucaacaca

SEQ ID NO: 159094 - RNA, 23 nt, Human
gaggagaaucaguggcccagcca

SEQ ID NO: 159095 - RNA, 18 nt, Human
gaggagaauuauagcaga

SEQ ID NO: 159096 - RNA, 32 nt, Human
gaggagaauugagccugggaggcggguccgga

SEQ ID NO: 159097 - RNA, 20 nt, Human
gaggagacaaaggccaggac

SEQ ID NO: 159098 - RNA, 24 nt, Human
gaggagacaccauaguggaaacug

SEQ ID NO: 159099 - RNA, 18 nt, Human
gaggagacacgcagagac

SEQ ID NO: 159100 - RNA, 19 nt, Human
gaggagacagagaacuuua

SEQ ID NO: 159101 - RNA, 32 nt, Human
gaggagacagcggcacguucuagcugcgucug

SEQ ID NO: 159102 - RNA, 19 nt, Human
gaggagacagugguaugac

SEQ ID NO: 159103 - RNA, 21 nt, Human
gaggagacauggagccuggga

SEQ ID NO: 159104 - RNA, 17 nt, Human
gaggagaccaagaaagg

SEQ ID NO: 159105 - RNA, 21 nt, Human
gaggagaccaaggcccuggga

SEQ ID NO: 159106 - RNA, 22 nt, Human
gaggagaccaggaggcuaggac

SEQ ID NO: 159107 - RNA, 18 nt, Human
gaggagaccaggcaggac

SEQ ID NO: 159108 - RNA, 19 nt, Human
gaggagaccagggcaggau

SEQ ID NO: 159109 - RNA, 17 nt, Human
gaggagacccagaggac

SEQ ID NO: 159110 - RNA, 19 nt, Human
gaggagaccccaggcaggg

SEQ ID NO: 159111 - RNA, 18 nt, Human
gaggagacccccaggcag

SEQ ID NO: 159112 - RNA, 18 nt, Human
gaggagacccccggagga

SEQ ID NO: 159113 - RNA, 18 nt, Human
gaggagacccccgugggc

SEQ ID NO: 159114 - RNA, 18 nt, Human
gaggagaccccgaaggga

SEQ ID NO: 159115 - RNA, 20 nt, Human
gaggagaccccgggcgagga

SEQ ID NO: 159116 - RNA, 17 nt, Human
gaggagaccccugagac

SEQ ID NO: 159117 - RNA, 17 nt, Human
gaggagacccgaguagg

SEQ ID NO: 159118 - RNA, 18 nt, Human
gaggagacccuuugaagg

SEQ ID NO: 159119 - RNA, 17 nt, Human
gaggagaccgaagagac

SEQ ID NO: 159120 - RNA, 18 nt, Human
gaggagaccggaguggac

SEQ ID NO: 159121 - RNA, 19 nt, Human
gaggagaccuaggaaugac

SEQ ID NO: 159122 - RNA, 20 nt, Human
gaggagaccuauggagggac

SEQ ID NO: 159123 - RNA, 32 nt, Human
gaggagaccucacccacuccucgcucaguuug

SEQ ID NO: 159124 - RNA, 19 nt, Human
gaggagaccucagcagggc

SEQ ID NO: 159125 - RNA, 20 nt, Human
gaggagaccugguccaggau

SEQ ID NO: 159126 - RNA, 20 nt, Human
gaggagacgaaugauagggc

SEQ ID NO: 159127 - RNA, 32 nt, Human
gaggagacgcgaggaggagggaggaggaagag

SEQ ID NO: 159128 - RNA, 17 nt, Human
gaggagacgggcgggac

SEQ ID NO: 159129 - RNA, 23 nt, Human
gaggagacuaagcugucuguaga

SEQ ID NO: 159130 - RNA, 19 nt, Human
gaggagacuaugauauaac

SEQ ID NO: 159131 - RNA, 32 nt, Human
gaggagacucaccucugucgcuuggguuaaac

SEQ ID NO: 159132 - RNA, 17 nt, Human
gaggagacuccacagac

SEQ ID NO: 159133 - RNA, 20 nt, Human
gaggagacucugcacagggc

SEQ ID NO: 159134 - RNA, 27 nt, Human
gaggagacuggccccaggccccagcca

SEQ ID NO: 159135 - RNA, 20 nt, Human
gaggagacugucccagagac

SEQ ID NO: 159136 - RNA, 19 nt, Human
gaggagacuguucagagac

SEQ ID NO: 159137 - RNA, 17 nt, Human
gaggagagaaacugaga

SEQ ID NO: 159138 - RNA, 32 nt, Human
gaggagagaaagagagcaugagagggagcgag

SEQ ID NO: 159139 - RNA, 32 nt, Human
gaggagagaaggaaggagaggugaucuccaga

SEQ ID NO: 159140 - RNA, 32 nt, Human
gaggagagaauguuccaggcagaggaaaaggc

SEQ ID NO: 159141 - RNA, 21 nt, Human
gaggagagaccagucgguaga

SEQ ID NO: 159142 - RNA, 17 nt, Human
gaggagagaccuguaga

SEQ ID NO: 159143 - RNA, 32 nt, Human
gaggagagagaggagaagggaggcaagggagg

SEQ ID NO: 159144 - RNA, 32 nt, Human
gaggagagagaggagaagggaggcaggggagg

SEQ ID NO: 159145 - RNA, 17 nt, Human
gaggagagagauugaga

SEQ ID NO: 159146 - RNA, 32 nt, Human
gaggagagagcagcuucugccacuucccaggu

SEQ ID NO: 159147 - RNA, 17 nt, Human
gaggagagagcggcaga

SEQ ID NO: 159148 - RNA, 32 nt, Human
gaggagagagcggcagagaagcucugagagcc

SEQ ID NO: 159149 - RNA, 32 nt, Human
gaggagagaggagcagcaggcaggcagcucag

SEQ ID NO: 159150 - RNA, 22 nt, Human
gaggagagagggagucuggaga

SEQ ID NO: 159151 - RNA, 32 nt, Human
gaggagagaguagaggccagagcccaggcagg

SEQ ID NO: 159152 - RNA, 20 nt, Human
gaggagagauggauauuuca

SEQ ID NO: 159153 - RNA, 32 nt, Human
gaggagagccagagaaaugacagggaaucuac

SEQ ID NO: 159154 - RNA, 32 nt, Human
gaggagagccagagaaguaacagggaagcuac

SEQ ID NO: 159155 - RNA, 32 nt, Human
gaggagagccagagaagugacagggaagcuac

SEQ ID NO: 159156 - RNA, 24 nt, Human
gaggagagccugguugcccaggga

SEQ ID NO: 159157 - RNA, 22 nt, Human
gaggagagcgcacacccaggca

SEQ ID NO: 159158 - RNA, 24 nt, Human
gaggagagcgcgagagccccagcc

SEQ ID NO: 159159 - RNA, 24 nt, Human
gaggagagcggccggucccagcca

SEQ ID NO: 159160 - RNA, 25 nt, Human
gaggagagcugaagugccccagcca

SEQ ID NO: 159161 - RNA, 22 nt, Human
gaggagagcugacugcccuggg

SEQ ID NO: 159162 - RNA, 24 nt, Human
gaggagagcuuggagcccaagcca

SEQ ID NO: 159163 - RNA, 31 nt, Human
gaggagaggaaacuucucucaguugcuucua

SEQ ID NO: 159164 - RNA, 32 nt, Human
gaggagaggaaaggccaagggaagagaaaagu

SEQ ID NO: 159165 - RNA, 32 nt, Human
gaggagaggaaccauuugugcagaucaucuag

SEQ ID NO: 159166 - RNA, 32 nt, Human
gaggagaggaagagaggacuaagaggggagca

SEQ ID NO: 159167 - RNA, 32 nt, Human
gaggagaggaagagccgcacacuuuuaaacaa

SEQ ID NO: 159168 - RNA, 32 nt, Human
gaggagaggaagugcuuugucaggaacuaggc

SEQ ID NO: 159169 - RNA, 32 nt, Human
gaggagaggagaaaguccaaggaaagauggcu

SEQ ID NO: 159170 - RNA, 32 nt, Human
gaggagaggagaaggccaggggaaugaauuca

SEQ ID NO: 159171 - RNA, 32 nt, Human
gaggagaggagagaggcagagagcggucucag

SEQ ID NO: 159172 - RNA, 32 nt, Human
gaggagaggaugacacuuccucucuguuuccc

SEQ ID NO: 159173 - RNA, 22 nt, Human
gaggagaggcagagccagugug

SEQ ID NO: 159174 - RNA, 19 nt, Human
gaggagaggccugcggcgg

SEQ ID NO: 159175 - RNA, 18 nt, Human
gaggagaggcgacagucg

SEQ ID NO: 159176 - RNA, 16 nt, Human
gaggagaggcugcagg

SEQ ID NO: 159177 - RNA, 19 nt, Human
gaggagaggcugcaggaac

SEQ ID NO: 159178 - RNA, 32 nt, Human
gaggagaggcugucucagcugcagagggguca

SEQ ID NO: 159179 - RNA, 23 nt, Human
gaggagagggaugguucucuaga

SEQ ID NO: 159180 - RNA, 21 nt, Human
gaggagagggccgacuggaga

SEQ ID NO: 159181 - RNA, 24 nt, Human
gaggagagggccugugucuguaga

SEQ ID NO: 159182 - RNA, 19 nt, Human
gaggagagggcggcggcgg

SEQ ID NO: 159183 - RNA, 32 nt, Human
gaggagaggggaggggaccugcccccuccuca

SEQ ID NO: 159184 - RNA, 32 nt, Human
gaggagaggggcaguguucccacccaccugcu

SEQ ID NO: 159185 - RNA, 20 nt, Human
gaggagaguaauacugaaga

SEQ ID NO: 159186 - RNA, 32 nt, Human
gaggagagucccgaggggcagaacagcgggac

SEQ ID NO: 159187 - RNA, 32 nt, Human
gaggagagugguacuggcaguuuauggcugaa

SEQ ID NO: 159188 - RNA, 17 nt, Human
gaggagaguuauacaga

SEQ ID NO: 159189 - RNA, 32 nt, Human
gaggagaguuuggggcagggaggaacagacau

SEQ ID NO: 159190 - RNA, 19 nt, Human
gaggagauaagacagagac

SEQ ID NO: 159191 - RNA, 19 nt, Human
gaggagauauaggacagga

SEQ ID NO: 159192 - RNA, 32 nt, Human
gaggagaucaagcucauuagcaagacuggugg

SEQ ID NO: 159193 - RNA, 32 nt, Human
gaggagaucagaaaaucccucugacaucucca

SEQ ID NO: 159194 - RNA, 20 nt, Human
gaggagaucaugaagaggac

SEQ ID NO: 159195 - RNA, 19 nt, Human
gaggagauccugcaggaac

SEQ ID NO: 159196 - RNA, 23 nt, Human
gaggagaucuguauaauauucua

SEQ ID NO: 159197 - RNA, 32 nt, Human
gaggagaugaaagaggagggacagguucuugg

SEQ ID NO: 159198 - RNA, 32 nt, Human
gaggagaugagggagaagcagcaagcugccca

SEQ ID NO: 159199 - RNA, 32 nt, Human
gaggagaugaggugcagacuccacacuggggu

SEQ ID NO: 159200 - RNA, 20 nt, Human
gaggagaugauggauaaggc

SEQ ID NO: 159201 - RNA, 21 nt, Human
gaggagaugcugggaacuuug

SEQ ID NO: 159202 - RNA, 25 nt, Human
gaggagaugcuuaccaggccugaga

SEQ ID NO: 159203 - RNA, 32 nt, Human
gaggagauggcagaaacggagagaaacgagga

SEQ ID NO: 159204 - RNA, 18 nt, Human
gaggagauggccauagga

SEQ ID NO: 159205 - RNA, 19 nt, Human
gaggagauggggacagggc

SEQ ID NO: 159206 - RNA, 18 nt, Human
gaggagauggggauggac

SEQ ID NO: 159207 - RNA, 22 nt, Human
gaggagauggggcucugggaga

SEQ ID NO: 159208 - RNA, 32 nt, Human
gaggagauggugcuggagccagggagcugcug

SEQ ID NO: 159209 - RNA, 18 nt, Human
gaggagaugucagaagac

SEQ ID NO: 159210 - RNA, 32 nt, Human
gaggagauuuccaugaagggagaggagcccag

SEQ ID NO: 159211 - RNA, 32 nt, Human
gaggagauuuugaaaguagagcagaaauauaa

SEQ ID NO: 159212 - RNA, 32 nt, Human
gaggagcaaagacuggggucuuuugcgaaagg

SEQ ID NO: 159213 - RNA, 32 nt, Human
gaggagcaaagcagcccucuccaggugaacug

SEQ ID NO: 159214 - RNA, 32 nt, Human
gaggagcaaagcuguauccuggaguuggucug

SEQ ID NO: 159215 - RNA, 32 nt, Human
gaggagcaacagcagcagccuuggccgacgcg

SEQ ID NO: 159216 - RNA, 32 nt, Human
gaggagcaagugagcccaggaguucaaggcug

SEQ ID NO: 159217 - RNA, 32 nt, Human
gaggagcacacuuuggggagauguccugguuu

SEQ ID NO: 159218 - RNA, 32 nt, Human
gaggagcacaggcucuuggguggcgaagccag

SEQ ID NO: 159219 - RNA, 32 nt, Human
gaggagcaccacucacuucugcagggagcaag

SEQ ID NO: 159220 - RNA, 22 nt, Human
gaggagcaccugggaagcucug

SEQ ID NO: 159221 - RNA, 18 nt, Human
gaggagcacgaauauucc

SEQ ID NO: 159222 - RNA, 32 nt, Human
gaggagcacgugggaccuucagcugcuccuaa

SEQ ID NO: 159223 - RNA, 32 nt, Human
gaggagcagaggacaggugauggaaauccugc

SEQ ID NO: 159224 - RNA, 32 nt, Human
gaggagcagagggagcggaggaggggccggcc

SEQ ID NO: 159225 - RNA, 32 nt, Human
gaggagcagcagaggaaggggaacaggaaaga

SEQ ID NO: 159226 - RNA, 20 nt, Human
gaggagcagccacaccgaga

SEQ ID NO: 159227 - RNA, 21 nt, Human
gaggagcagcucagucaggac

SEQ ID NO: 159228 - RNA, 32 nt, Human
gaggagcagcugagacaguucaagaugacgac

SEQ ID NO: 159229 - RNA, 32 nt, Human
gaggagcaggagacacaggagacaauggccag

SEQ ID NO: 159230 - RNA, 32 nt, Human
gaggagcaggagaggaaggaaguuaauaccua

SEQ ID NO: 159231 - RNA, 21 nt, Human
gaggagcaggaggagagccug

SEQ ID NO: 159232 - RNA, 32 nt, Human
gaggagcaggagguggagauucccaguuaaaa

SEQ ID NO: 159233 - RNA, 32 nt, Human
gaggagcaggcagcaggcuuaucccuucacca

SEQ ID NO: 159234 - RNA, 26 nt, Human
gaggagcaggcccgcauggccuggga

SEQ ID NO: 159235 - RNA, 32 nt, Human
gaggagcagggacucaccugagcccaggaaua

SEQ ID NO: 159236 - RNA, 32 nt, Human
gaggagcagggguccagagaggcaggcugggg

SEQ ID NO: 159237 - RNA, 32 nt, Human
gaggagcaguagcccgcggagcagggagagaa

SEQ ID NO: 159238 - RNA, 23 nt, Human
gaggagcaucucugaggguucua

SEQ ID NO: 159239 - RNA, 19 nt, Human
gaggagccaccucuucuca

SEQ ID NO: 159240 - RNA, 32 nt, Human
gaggagccacuccuauucccagcugauucuuu

SEQ ID NO: 159241 - RNA, 32 nt, Human
gaggagccacuucugaauucagaguaggacug

SEQ ID NO: 159242 - RNA, 32 nt, Human
gaggagccagagcagggugagcuggagcggcu

SEQ ID NO: 159243 - RNA, 32 nt, Human
gaggagccagagguuggcuuucugggauguga

SEQ ID NO: 159244 - RNA, 32 nt, Human
gaggagccagcaggcaggggagagggagcggg

SEQ ID NO: 159245 - RNA, 32 nt, Human
gaggagccaguguugcaugaugaaaagauggu

SEQ ID NO: 159246 - RNA, 32 nt, Human
gaggagccaucuccuggaggagaaaacucacc

SEQ ID NO: 159247 - RNA, 32 nt, Human
gaggagcccgcccugcacuaucagccucgaga

SEQ ID NO: 159248 - RNA, 32 nt, Human
gaggagcccgggcuauccuucccugaaggagc

SEQ ID NO: 159249 - RNA, 32 nt, Human
gaggagcccgggucaggcuggggaggaacaga

SEQ ID NO: 159250 - RNA, 24 nt, Human
gaggagcccuaggccagccuggga

SEQ ID NO: 159251 - RNA, 32 nt, Human
gaggagcccucagacagcaguggcaucaacuu

SEQ ID NO: 159252 - RNA, 32 nt, Human
gaggagcccuccauuccaauuguccaccccuu

SEQ ID NO: 159253 - RNA, 32 nt, Human
gaggagcccugagaguccgccgccaacgcgca

SEQ ID NO: 159254 - RNA, 32 nt, Human
gaggagcccugccucuccgccccugagcccac

SEQ ID NO: 159255 - RNA, 32 nt, Human
gaggagcccugccugccccgacacccagccca

SEQ ID NO: 159256 - RNA, 32 nt, Human
gaggagccggaggaggaggaggaggaggaggc

SEQ ID NO: 159257 - RNA, 21 nt, Human
gaggagccgggagcccugggg

SEQ ID NO: 159258 - RNA, 26 nt, Human
gaggagccgggccgaggccgcggcgg

SEQ ID NO: 159259 - RNA, 18 nt, Human
gaggagccggggugcucu

SEQ ID NO: 159260 - RNA, 19 nt, Human
gaggagccggggugcucug

SEQ ID NO: 159261 - RNA, 32 nt, Human
gaggagccugcaggaagcugaacuuugaaaga

SEQ ID NO: 159262 - RNA, 32 nt, Human
gaggagccuggcuuagaaucucagccugaaau

SEQ ID NO: 159263 - RNA, 32 nt, Human
gaggagccugugagccaccggcccacgugaaa

SEQ ID NO: 159264 - RNA, 22 nt, Human
gaggagccuugccuugaguucc

SEQ ID NO: 159265 - RNA, 32 nt, Human
gaggagccuuuccagaacuaccaaaaugaaga

SEQ ID NO: 159266 - RNA, 20 nt, Human
gaggagcgauggggacucug

SEQ ID NO: 159267 - RNA, 23 nt, Human
gaggagcgauuugccaucgugcu

SEQ ID NO: 159268 - RNA, 20 nt, Human
gaggagcgcgaacccgcggc

SEQ ID NO: 159269 - RNA, 23 nt, Human
gaggagcgcgcuuccuuuccucc

SEQ ID NO: 159270 - RNA, 32 nt, Human
gaggagcgcuggcugcgcuuaggcaacguucc

SEQ ID NO: 159271 - RNA, 21 nt, Human
gaggagcggccgggccugggg

SEQ ID NO: 159272 - RNA, 20 nt, Human
gaggagcggcgcccgcgggg

SEQ ID NO: 159273 - RNA, 32 nt, Human
gaggagcggcgggagagccaggagggccgccc

SEQ ID NO: 159274 - RNA, 22 nt, Human
gaggagcggcugggcuggggga

SEQ ID NO: 159275 - RNA, 21 nt, Human
gaggagcgggaaccgcggcgg

SEQ ID NO: 159276 - RNA, 25 nt, Human
gaggagcgggaacuggggaauucug

SEQ ID NO: 159277 - RNA, 20 nt, Human
gaggagcgggcgcgcggcgg

SEQ ID NO: 159278 - RNA, 32 nt, Human
gaggagcggggguggagccgggggaagggugg

SEQ ID NO: 159279 - RNA, 32 nt, Human
gaggagcgucucucccuggccgccccgucuga

SEQ ID NO: 159280 - RNA, 32 nt, Human
gaggagcuacacuucccucccuuagugcccgg

SEQ ID NO: 159281 - RNA, 32 nt, Human
gaggagcuacagcccugugcucccgggacccu

SEQ ID NO: 159282 - RNA, 32 nt, Human
gaggagcuagaugacaccaagacacagacacg

SEQ ID NO: 159283 - RNA, 32 nt, Human
gaggagcucucccggcugcaccggcuggagac

SEQ ID NO: 159284 - RNA, 32 nt, Human
gaggagcucugagaacagucuccuucaacagu

SEQ ID NO: 159285 - RNA, 19 nt, Human
gaggagcugaaaaugcaga

SEQ ID NO: 159286 - RNA, 32 nt, Human
gaggagcugaacuugcucaaucuaaggcugau

SEQ ID NO: 159287 - RNA, 19 nt, Human
gaggagcugacacauuuca

SEQ ID NO: 159288 - RNA, 22 nt, Human
gaggagcugagagaagugcucu

SEQ ID NO: 159289 - RNA, 32 nt, Human
gaggagcugagggggaacaggagcagggccac

SEQ ID NO: 159290 - RNA, 32 nt, Human
gaggagcugagugccccaggagcuaguggagg

SEQ ID NO: 159291 - RNA, 19 nt, Human
gaggagcugccaggccugg

SEQ ID NO: 159292 - RNA, 32 nt, Human
gaggagcugccuucggaggcucagggaguccc

SEQ ID NO: 159293 - RNA, 32 nt, Human
gaggagcugcucuuaugaagaagaaccaugaa

SEQ ID NO: 159294 - RNA, 18 nt, Human
gaggagcugcugcugcug

SEQ ID NO: 159295 - RNA, 32 nt, Human
gaggagcuggcgugggagaccgacggccgcug

SEQ ID NO: 159296 - RNA, 20 nt, Human
gaggagcugggaccgcggcg

SEQ ID NO: 159297 - RNA, 19 nt, Human
gaggagcugggauugcagg

SEQ ID NO: 159298 - RNA, 32 nt, Human
gaggagcugucggcugcuuuccauccagcugg

SEQ ID NO: 159299 - RNA, 32 nt, Human
gaggagcugugggaagggggaggagggaggga

SEQ ID NO: 159300 - RNA, 32 nt, Human
gaggagcugugguccagccugcgcggcgggaa

SEQ ID NO: 159301 - RNA, 32 nt, Human
gaggagcuguuggccugggugggcaggaacug

SEQ ID NO: 159302 - RNA, 32 nt, Human
gaggagcuucuaaagaggugacugguauuuug

SEQ ID NO: 159303 - RNA, 32 nt, Human
gaggagcuuuacucuucucucucuuacacaau

SEQ ID NO: 159304 - RNA, 32 nt, Human
gaggaggaaaagagcaucucagagcgccggga

SEQ ID NO: 159305 - RNA, 23 nt, Human
gaggaggaaacugaggcagggac

SEQ ID NO: 159306 - RNA, 21 nt, Human
gaggaggaaagccuccuaauu

SEQ ID NO: 159307 - RNA, 32 nt, Human
gaggaggaaaggaaggagagagaugccucagg

SEQ ID NO: 159308 - RNA, 22 nt, Human
gaggaggaaaggggagaggaac

SEQ ID NO: 159309 - RNA, 32 nt, Human
gaggaggaaauuuggaaauacagugaauauau

SEQ ID NO: 159310 - RNA, 32 nt, Human
gaggaggaacagaaaagaaaagaaaagaaaaa

SEQ ID NO: 159311 - RNA, 32 nt, Human
gaggaggaaccaggcuacuuuccccaguacug

SEQ ID NO: 159312 - RNA, 22 nt, Human
gaggaggaacuccuccccaacu

SEQ ID NO: 159313 - RNA, 32 nt, Human
gaggaggaagaaaaacaggccgagugaaggug

SEQ ID NO: 159314 - RNA, 32 nt, Human
gaggaggaagaaaaugaagaaggagugauuga

SEQ ID NO: 159315 - RNA, 32 nt, Human
gaggaggaagaaaaugagagugggaaggacgc

SEQ ID NO: 159316 - RNA, 32 nt, Human
gaggaggaagaagaggaggaggaggagauggu

SEQ ID NO: 159317 - RNA, 32 nt, Human
gaggaggaagaagaggaggaggaggaggagga

SEQ ID NO: 159318 - RNA, 32 nt, Human
gaggaggaagaagaggaggagggaggaagaaa

SEQ ID NO: 159319 - RNA, 32 nt, Human
gaggaggaagagagggagggaggcgggaggag

SEQ ID NO: 159320 - RNA, 32 nt, Human
gaggaggaagaggagaaggaaaagugacgaag

SEQ ID NO: 159321 - RNA, 32 nt, Human
gaggaggaagaggaggaggaggaagggagcac

SEQ ID NO: 159322 - RNA, 32 nt, Human
gaggaggaagaggggauggagcaggggcugga

SEQ ID NO: 159323 - RNA, 32 nt, Human
gaggaggaagaucaggaggaggaggaagaaga

SEQ ID NO: 159324 - RNA, 32 nt, Human
gaggaggaagauggacuuucagaggagugcga

SEQ ID NO: 159325 - RNA, 32 nt, Human
gaggaggaaggaagaaauggagauuagauugg

SEQ ID NO: 159326 - RNA, 32 nt, Human
gaggaggaaggaggaucacuguggaaaucguc

SEQ ID NO: 159327 - RNA, 19 nt, Human
gaggaggaaggcggcggcg

SEQ ID NO: 159328 - RNA, 32 nt, Human
gaggaggaaggggacagagggagcagguagga

SEQ ID NO: 159329 - RNA, 32 nt, Human
gaggaggaagugagacggggaagggaggagca

SEQ ID NO: 159330 - RNA, 22 nt, Human
gaggaggaaguggcggcggcgg

SEQ ID NO: 159331 - RNA, 32 nt, Human
gaggaggaaugagaggggcaggaagugggguc

SEQ ID NO: 159332 - RNA, 32 nt, Human
gaggaggaaugaggauggguuggggagcgggg

SEQ ID NO: 159333 - RNA, 20 nt, Human
gaggaggacaaagacggcgg

SEQ ID NO: 159334 - RNA, 22 nt, Human
gaggaggacaaagauaaggugg

SEQ ID NO: 159335 - RNA, 19 nt, Human
gaggaggacaacucggacg

SEQ ID NO: 159336 - RNA, 21 nt, Human
gaggaggacaagcggcggcgg

SEQ ID NO: 159337 - RNA, 21 nt, Human
gaggaggacacaggccuggga

SEQ ID NO: 159338 - RNA, 19 nt, Human
gaggaggacagcgccgagg

SEQ ID NO: 159339 - RNA, 20 nt, Human
gaggaggacagggccccggc

SEQ ID NO: 159340 - RNA, 20 nt, Human
gaggaggacaggggcggggg

SEQ ID NO: 159341 - RNA, 20 nt, Human
gaggaggacaucccaugcgg

SEQ ID NO: 159342 - RNA, 32 nt, Human
gaggaggaccccugccuuccucugaggacagg

SEQ ID NO: 159343 - RNA, 32 nt, Human
gaggaggacccgcagagguggcagcggccggg

SEQ ID NO: 159344 - RNA, 19 nt, Human
gaggaggacgacgaggagg

SEQ ID NO: 159345 - RNA, 21 nt, Human
gaggaggacgaggacgacugg

SEQ ID NO: 159346 - RNA, 19 nt, Human
gaggaggacgaggagcugg

SEQ ID NO: 159347 - RNA, 19 nt, Human
gaggaggacgaggaggagg

SEQ ID NO: 159348 - RNA, 21 nt, Human
gaggaggacgaggaugacugg

SEQ ID NO: 159349 - RNA, 22 nt, Human
gaggaggacgagggccuagugg

SEQ ID NO: 159350 - RNA, 18 nt, Human
gaggaggacgcagcggcg

SEQ ID NO: 159351 - RNA, 19 nt, Human
gaggaggacgccgcagagg

SEQ ID NO: 159352 - RNA, 18 nt, Human
gaggaggacgcggcgccg

SEQ ID NO: 159353 - RNA, 32 nt, Human
gaggaggacgcgggccugguggccgaggccga

SEQ ID NO: 159354 - RNA, 21 nt, Human
gaggaggacgggcggacggcg

SEQ ID NO: 159355 - RNA, 32 nt, Human
gaggaggacgugggggcugcaaguggaaagcu

SEQ ID NO: 159356 - RNA, 19 nt, Human
gaggaggacuacauggcgg

SEQ ID NO: 159357 - RNA, 20 nt, Human
gaggaggacucagugcuggc

SEQ ID NO: 159358 - RNA, 19 nt, Human
gaggaggacuccacggugg

SEQ ID NO: 159359 - RNA, 20 nt, Human
gaggaggacugacacggagg

SEQ ID NO: 159360 - RNA, 19 nt, Human
gaggaggacuuccugcggc

SEQ ID NO: 159361 - RNA, 21 nt, Human
gaggaggacuuggagggucug

SEQ ID NO: 159362 - RNA, 19 nt, Human
gaggaggacuuucugcggc

SEQ ID NO: 159363 - RNA, 32 nt, Human
gaggaggagaagcaggggcaggagcggugagg

SEQ ID NO: 159364 - RNA, 32 nt, Human
gaggaggagaaggaggaggaggaagaggagga

SEQ ID NO: 159365 - RNA, 32 nt, Human
gaggaggagaaggaggaggaggagagcgcgag

SEQ ID NO: 159366 - RNA, 32 nt, Human
gaggaggagagaaaggcggcucuucccgugcc

SEQ ID NO: 159367 - RNA, 32 nt, Human
gaggaggagaggaggaaaggaugggggcugaa

SEQ ID NO: 159368 - RNA, 32 nt, Human
gaggaggagaggaggaggggaggagaaggagg

SEQ ID NO: 159369 - RNA, 32 nt, Human
gaggaggagagggaguagaaaggagggaugcg

SEQ ID NO: 159370 - RNA, 32 nt, Human
gaggaggagaugggcaggauuuaguaggacaa

SEQ ID NO: 159371 - RNA, 32 nt, Human
gaggaggagcagagggccuaggaggaccccgg

SEQ ID NO: 159372 - RNA, 18 nt, Human
gaggaggagcccgggcgg

SEQ ID NO: 159373 - RNA, 16 nt, Human
gaggaggagcgccuga

SEQ ID NO: 159374 - RNA, 32 nt, Human
gaggaggagcgcuacccaccuccagggagcac

SEQ ID NO: 159375 - RNA, 32 nt, Human
gaggaggagcugaaaaugcagauuuagcauca

SEQ ID NO: 159376 - RNA, 32 nt, Human
gaggaggagcuggagacaggagggugggagca

SEQ ID NO: 159377 - RNA, 32 nt, Human
gaggaggaggaaaaggagggaaaggggacagg

SEQ ID NO: 159378 - RNA, 32 nt, Human
gaggaggaggaagaggaggagaagguagcuac

SEQ ID NO: 159379 - RNA, 32 nt, Human
gaggaggaggaagaggaggaggaggaagggag

SEQ ID NO: 159380 - RNA, 32 nt, Human
gaggaggaggagaaggaggagagagaggggaa

SEQ ID NO: 159381 - RNA, 32 nt, Human
gaggaggaggagaaggaggaggaggaagagga

SEQ ID NO: 159382 - RNA, 32 nt, Human
gaggaggaggagaaggaggagggcagcuccuu

SEQ ID NO: 159383 - RNA, 32 nt, Human
gaggaggaggagagaggaaagagcggagcagc

SEQ ID NO: 159384 - RNA, 32 nt, Human
gaggaggaggagaugggauagcuuaagcaagu

SEQ ID NO: 159385 - RNA, 32 nt, Human
gaggaggaggaggagaugacuggggagcggga

SEQ ID NO: 159386 - RNA, 32 nt, Human
gaggaggaggaggaggaagagguggaggagga

SEQ ID NO: 159387 - RNA, 32 nt, Human
gaggaggaggaggaggagaggagcagucagca

SEQ ID NO: 159388 - RNA, 32 nt, Human
gaggaggaggaggaggaggagaaggcucuggg

SEQ ID NO: 159389 - RNA, 32 nt, Human
gaggaggaggaggaggaggaggaagagggcag

SEQ ID NO: 159390 - RNA, 32 nt, Human
gaggaggaggaggaggaggaggacgcgggccu

SEQ ID NO: 159391 - RNA, 32 nt, Human
gaggaggaggaggaggaggaggagagcgcggg

SEQ ID NO: 159392 - RNA, 32 nt, Human
gaggaggaggaggaggaggaggaggaggagga

SEQ ID NO: 159393 - RNA, 32 nt, Human
gaggaggaggaggaggaggaggaggaggaggc

SEQ ID NO: 159394 - RNA, 32 nt, Human
gaggaggaggaggaggaggaggaggaggcggc

SEQ ID NO: 159395 - RNA, 32 nt, Human
gaggaggaggaggaggaggaggaggagggggc

SEQ ID NO: 159396 - RNA, 32 nt, Human
gaggaggaggaggaggaggaggaggccagguc

SEQ ID NO: 159397 - RNA, 32 nt, Human
gaggaggaggaggaggaggaggaggcggcggc

SEQ ID NO: 159398 - RNA, 32 nt, Human
gaggaggaggaggaggaggaggagggggcggc

SEQ ID NO: 159399 - RNA, 32 nt, Human
gaggaggaggaggaggaggaggagguggcggc

SEQ ID NO: 159400 - RNA, 32 nt, Human
gaggaggaggaggaggaggaggcaaaguuaga

SEQ ID NO: 159401 - RNA, 32 nt, Human
gaggaggaggaggaggaggaggccagguccug

SEQ ID NO: 159402 - RNA, 32 nt, Human
gaggaggaggaggaggaggagggggccgagaa

SEQ ID NO: 159403 - RNA, 32 nt, Human
gaggaggaggaggaggaggaggucguggauga

SEQ ID NO: 159404 - RNA, 32 nt, Human
gaggaggaggaggaggaggcagcuccggcagc

SEQ ID NO: 159405 - RNA, 32 nt, Human
gaggaggaggaggagguugcagugagccgaga

SEQ ID NO: 159406 - RNA, 32 nt, Human
gaggaggaggaggcggaggaggcgguggaggg

SEQ ID NO: 159407 - RNA, 32 nt, Human
gaggaggaggagguggcggcgagaagauggcg

SEQ ID NO: 159408 - RNA, 32 nt, Human
gaggaggaggcagagaggaguggagggcggag

SEQ ID NO: 159409 - RNA, 32 nt, Human
gaggaggaggcaggagaagcaggcagccugcc

SEQ ID NO: 159410 - RNA, 20 nt, Human
gaggaggaggcccggggcgg

SEQ ID NO: 159411 - RNA, 32 nt, Human
gaggaggaggcgaacccagagaggggcagcaa

SEQ ID NO: 159412 - RNA, 32 nt, Human
gaggaggaggcgaggaggagagacugcuccau

SEQ ID NO: 159413 - RNA, 32 nt, Human
gaggaggaggcggaggaggaggagcaugucgg

SEQ ID NO: 159414 - RNA, 19 nt, Human
gaggaggaggcggcggcgg

SEQ ID NO: 159415 - RNA, 32 nt, Human
gaggaggaggcugagagagggagggcgacggg

SEQ ID NO: 159416 - RNA, 23 nt, Human
gaggaggaggcugcagugagcua

SEQ ID NO: 159417 - RNA, 32 nt, Human
gaggaggagggaaaaggcgagcaaaaaggaag

SEQ ID NO: 159418 - RNA, 32 nt, Human
gaggaggagggaggaggaagagagggagggag

SEQ ID NO: 159419 - RNA, 32 nt, Human
gaggaggagggagggagggaaggagcgcggag

SEQ ID NO: 159420 - RNA, 32 nt, Human
gaggaggagggggaagaggagugggacgauga

SEQ ID NO: 159421 - RNA, 32 nt, Human
gaggaggagggugagagagaagcugggagagc

SEQ ID NO: 159422 - RNA, 20 nt, Human
gaggaggaggucaucgacgg

SEQ ID NO: 159423 - RNA, 21 nt, Human
gaggaggaggugcggcggcgg

SEQ ID NO: 159424 - RNA, 32 nt, Human
gaggaggagguggagcaggaguggggagagag

SEQ ID NO: 159425 - RNA, 21 nt, Human
gaggaggagguggaggaggag

SEQ ID NO: 159426 - RNA, 32 nt, Human
gaggaggagguggaggaggagagguggcagga

SEQ ID NO: 159427 - RNA, 32 nt, Human
gaggaggagguggauguggcagcugagaucua

SEQ ID NO: 159428 - RNA, 32 nt, Human
gaggaggaggugggggcuggaggugcugguag

SEQ ID NO: 159429 - RNA, 32 nt, Human
gaggaggagguguucaucugcaccacagagag

SEQ ID NO: 159430 - RNA, 19 nt, Human
gaggaggagguugcaguga

SEQ ID NO: 159431 - RNA, 32 nt, Human
gaggaggaguuagaggaggaggaggaggagga

SEQ ID NO: 159432 - RNA, 32 nt, Human
gaggaggaguuucuauuaaaaucugucacuug

SEQ ID NO: 159433 - RNA, 32 nt, Human
gaggaggaucagaucuccgcucgagaaucuga

SEQ ID NO: 159434 - RNA, 32 nt, Human
gaggaggauggagagaaugugcuaccauggaa

SEQ ID NO: 159435 - RNA, 32 nt, Human
gaggaggauucugccuuuccuccagugccaug

SEQ ID NO: 159436 - RNA, 18 nt, Human
gaggaggcaagauacaac

SEQ ID NO: 159437 - RNA, 22 nt, Human
gaggaggcaaggcccacggugg

SEQ ID NO: 159438 - RNA, 24 nt, Human
gaggaggcaccggccgcgcggcgg

SEQ ID NO: 159439 - RNA, 32 nt, Human
gaggaggcaccugggagcugagcuuaagaguu

SEQ ID NO: 159440 - RNA, 16 nt, Human
gaggaggcagacagga

SEQ ID NO: 159441 - RNA, 32 nt, Human
gaggaggcagagaagaaagaacggaagaagag

SEQ ID NO: 159442 - RNA, 32 nt, Human
gaggaggcagagccaugaccaaggggaccugg

SEQ ID NO: 159443 - RNA, 32 nt, Human
gaggaggcaggagagagggaaaaagaaaagaa

SEQ ID NO: 159444 - RNA, 32 nt, Human
gaggaggcaggcaagaggggguggaggcgcca

SEQ ID NO: 159445 - RNA, 21 nt, Human
gaggaggcaguuagggaaacu

SEQ ID NO: 159446 - RNA, 23 nt, Human
gaggaggcaugaagagguaacug

SEQ ID NO: 159447 - RNA, 32 nt, Human
gaggaggccagaccugcccugccccauugucc

SEQ ID NO: 159448 - RNA, 32 nt, Human
gaggaggccagcugguaggcagccuggugagg

SEQ ID NO: 159449 - RNA, 32 nt, Human
gaggaggccccagcucccuaggggcugagaag

SEQ ID NO: 159450 - RNA, 22 nt, Human
gaggaggccgacugggcugcug

SEQ ID NO: 159451 - RNA, 32 nt, Human
gaggaggccgagagaugaggccggagcccacc

SEQ ID NO: 159452 - RNA, 22 nt, Human
gaggaggccgagggccccagga

SEQ ID NO: 159453 - RNA, 32 nt, Human
gaggaggccgcaggcaggugguucagugguua

SEQ ID NO: 159454 - RNA, 22 nt, Human
gaggaggccgccggucccaacc

SEQ ID NO: 159455 - RNA, 32 nt, Human
gaggaggccguguuacaaacccugcgcggagc

SEQ ID NO: 159456 - RNA, 32 nt, Human
gaggaggccugaguuccgucauggcccucuau

SEQ ID NO: 159457 - RNA, 22 nt, Human
gaggaggcgagggacagagaca

SEQ ID NO: 159458 - RNA, 32 nt, Human
gaggaggcgcgcuaguggacuggaccucagcg

SEQ ID NO: 159459 - RNA, 21 nt, Human
gaggaggcgcggccagggcgg

SEQ ID NO: 159460 - RNA, 18 nt, Human
gaggaggcggaaaaggac

SEQ ID NO: 159461 - RNA, 32 nt, Human
gaggaggcggagcaucuugaaccugcagcccu

SEQ ID NO: 159462 - RNA, 32 nt, Human
gaggaggcggaggaggaggagcaugucggacg

SEQ ID NO: 159463 - RNA, 32 nt, Human
gaggaggcggaggcagcggcuggaggagcgcg

SEQ ID NO: 159464 - RNA, 21 nt, Human
gaggaggcggaggccgcggcg

SEQ ID NO: 159465 - RNA, 19 nt, Human
gaggaggcggcagacagga

SEQ ID NO: 159466 - RNA, 21 nt, Human
gaggaggcggcagacaggagc

SEQ ID NO: 159467 - RNA, 19 nt, Human
gaggaggcggcagcggcgg

SEQ ID NO: 159468 - RNA, 19 nt, Human
gaggaggcggcauugcuuu

SEQ ID NO: 159469 - RNA, 17 nt, Human
gaggaggcggccacggc

SEQ ID NO: 159470 - RNA, 19 nt, Human
gaggaggcggcggcggcgg

SEQ ID NO: 159471 - RNA, 32 nt, Human
gaggaggcgguggugucagcacugcugcagug

SEQ ID NO: 159472 - RNA, 32 nt, Human
gaggaggcucagacagcaggaaggagagaagg

SEQ ID NO: 159473 - RNA, 19 nt, Human
gaggaggcuccuggugucu

SEQ ID NO: 159474 - RNA, 32 nt, Human
gaggaggcugaaaugaugcaucagauuuacag

SEQ ID NO: 159475 - RNA, 32 nt, Human
gaggaggcugcgacugcggaccccagauucgu

SEQ ID NO: 159476 - RNA, 32 nt, Human
gaggaggcuggcagagcuggggacugagggca

SEQ ID NO: 159477 - RNA, 32 nt, Human
gaggaggcuguggcuguaguugaagaucugga

SEQ ID NO: 159478 - RNA, 32 nt, Human
gaggaggcuguuauuuugggccugaugugaca

SEQ ID NO: 159479 - RNA, 32 nt, Human
gaggaggcuuugacugggcugccugccuguga

SEQ ID NO: 159480 - RNA, 32 nt, Human
gaggagggaaaggcagucagauuccaggcugg

SEQ ID NO: 159481 - RNA, 32 nt, Human
gaggagggaagaggaagaggcaaggggagggu

SEQ ID NO: 159482 - RNA, 32 nt, Human
gaggagggacccuggucucccucuuuggcuac

SEQ ID NO: 159483 - RNA, 31 nt, Human
gaggagggaccuacaaagacuggaaacuauu

SEQ ID NO: 159484 - RNA, 32 nt, Human
gaggagggaccuacaaagacuggaaacuauuc

SEQ ID NO: 159485 - RNA, 32 nt, Human
gaggagggagaagcucuggggagccagcuuug

SEQ ID NO: 159486 - RNA, 32 nt, Human
gaggagggagagaaggaggccgccagacucga

SEQ ID NO: 159487 - RNA, 32 nt, Human
gaggagggagagaaggagggaggcgcuccugg

SEQ ID NO: 159488 - RNA, 18 nt, Human
gaggagggagagggggag

SEQ ID NO: 159489 - RNA, 20 nt, Human
gaggagggagcccgcggcgg

SEQ ID NO: 159490 - RNA, 32 nt, Human
gaggagggaggaacagucagccacagcucucu

SEQ ID NO: 159491 - RNA, 32 nt, Human
gaggagggaggcaggaggugagguuggaaguu

SEQ ID NO: 159492 - RNA, 19 nt, Human
gaggagggaggccaggcgg

SEQ ID NO: 159493 - RNA, 19 nt, Human
gaggagggaggccgggcgg

SEQ ID NO: 159494 - RNA, 32 nt, Human
gaggagggagggagggacaggugccuggagcc

SEQ ID NO: 159495 - RNA, 32 nt, Human
gaggagggagggggaaguggagaggggagcau

SEQ ID NO: 159496 - RNA, 32 nt, Human
gaggagggaggugcugugagccuagcgagaug

SEQ ID NO: 159497 - RNA, 23 nt, Human
gaggagggauggagccgcugaga

SEQ ID NO: 159498 - RNA, 32 nt, Human
gaggagggcaaaucacuugagcucaggaguuu

SEQ ID NO: 159499 - RNA, 32 nt, Human
gaggagggcagaucaacugaggucaggaguuu

SEQ ID NO: 159500 - RNA, 22 nt, Human
gaggagggcagaucacgagguc

SEQ ID NO: 159501 - RNA, 32 nt, Human
gaggagggcagaucacuugagaucaggaguuc

SEQ ID NO: 159502 - RNA, 22 nt, Human
gaggagggcaggagccgcggga

SEQ ID NO: 159503 - RNA, 32 nt, Human
gaggagggcaggcagagucgguggccagucug

SEQ ID NO: 159504 - RNA, 32 nt, Human
gaggagggcaucaccuucccagugggaaaagg

SEQ ID NO: 159505 - RNA, 19 nt, Human
gaggagggccaugccgcug

SEQ ID NO: 159506 - RNA, 23 nt, Human
gaggagggccccagcaguucugg

SEQ ID NO: 159507 - RNA, 20 nt, Human
gaggagggccccagcgagga

SEQ ID NO: 159508 - RNA, 22 nt, Human
gaggagggcccccagccuggga

SEQ ID NO: 159509 - RNA, 21 nt, Human
gaggagggccgagacaggagc

SEQ ID NO: 159510 - RNA, 18 nt, Human
gaggagggccggcggcgg

SEQ ID NO: 159511 - RNA, 32 nt, Human
gaggagggcguucccaggaggagggagugaug

SEQ ID NO: 159512 - RNA, 21 nt, Human
gaggagggcuaugcacuggga

SEQ ID NO: 159513 - RNA, 32 nt, Human
gaggagggcucugggcugaggagcucaguggg

SEQ ID NO: 159514 - RNA, 20 nt, Human
gaggagggcuggacaagaau

SEQ ID NO: 159515 - RNA, 32 nt, Human
gaggagggcuggaggcagagaguguaagugug

SEQ ID NO: 159516 - RNA, 32 nt, Human
gaggagggcuggagggacaggagggcggauca

SEQ ID NO: 159517 - RNA, 32 nt, Human
gaggagggcuguguguugcugccugagggcac

SEQ ID NO: 159518 - RNA, 32 nt, Human
gaggaggggaaagagaagcccagacaaacagc

SEQ ID NO: 159519 - RNA, 32 nt, Human
gaggaggggaaagagcugcuggcggucgggag

SEQ ID NO: 159520 - RNA, 32 nt, Human
gaggaggggagagagaaagagagguggggaga

SEQ ID NO: 159521 - RNA, 32 nt, Human
gaggaggggagaggagaagggaaauggaggug

SEQ ID NO: 159522 - RNA, 32 nt, Human
gaggaggggagaggagaggaaagugggaggag

SEQ ID NO: 159523 - RNA, 32 nt, Human
gaggaggggaggacuugccucgccgaggccgc

SEQ ID NO: 159524 - RNA, 32 nt, Human
gaggaggggaggaggaggaggaggaggagguc

SEQ ID NO: 159525 - RNA, 32 nt, Human
gaggaggggaggugcagggaagaggggccggc

SEQ ID NO: 159526 - RNA, 32 nt, Human
gaggaggggagguggaagaauuauaaugguac

SEQ ID NO: 159527 - RNA, 32 nt, Human
gaggaggggaugggagaaaguaggggaugugg

SEQ ID NO: 159528 - RNA, 32 nt, Human
gaggaggggcaaaggccgcgcuccucagcugg

SEQ ID NO: 159529 - RNA, 22 nt, Human
gaggaggggcagagaccuggga

SEQ ID NO: 159530 - RNA, 19 nt, Human
gaggaggggccgcgggcgg

SEQ ID NO: 159531 - RNA, 32 nt, Human
gaggaggggccgcugccacccaccucccugcc

SEQ ID NO: 159532 - RNA, 20 nt, Human
gaggaggggccggcccgcgg

SEQ ID NO: 159533 - RNA, 32 nt, Human
gaggagggggaagaggaggaggaggcugugga

SEQ ID NO: 159534 - RNA, 32 nt, Human
gaggagggggaagaggaggaggagguuguuga

SEQ ID NO: 159535 - RNA, 32 nt, Human
gaggagggggaggaagaggagguggagaagga

SEQ ID NO: 159536 - RNA, 32 nt, Human
gaggagggggaugcagaggugaugcagcuggg

SEQ ID NO: 159537 - RNA, 32 nt, Human
gaggagggggccugagacuggaccugggucug

SEQ ID NO: 159538 - RNA, 18 nt, Human
gaggaggggggcggggag

SEQ ID NO: 159539 - RNA, 32 nt, Human
gaggagggguacagggcucucaagccugaggu

SEQ ID NO: 159540 - RNA, 32 nt, Human
gaggagggguggcagaggauuguuuggccagg

SEQ ID NO: 159541 - RNA, 32 nt, Human
gaggaggguagggagagaagcugagaccagga

SEQ ID NO: 159542 - RNA, 32 nt, Human
gaggagggucugcagccaguucauucccaggg

SEQ ID NO: 159543 - RNA, 32 nt, Human
gaggagggucugugauacaucacaaggaggaa

SEQ ID NO: 159544 - RNA, 31 nt, Human
gaggagggugagagagaagcugggagagcag

SEQ ID NO: 159545 - RNA, 22 nt, Human
gaggaggguggaucacgagguc

SEQ ID NO: 159546 - RNA, 32 nt, Human
gaggagggugggccaugaggagaagaugcugu

SEQ ID NO: 159547 - RNA, 23 nt, Human
gaggagggugugaagccuugaga

SEQ ID NO: 159548 - RNA, 20 nt, Human
gaggagguaaacauuggaga

SEQ ID NO: 159549 - RNA, 19 nt, Human
gaggagguagaauugcaga

SEQ ID NO: 159550 - RNA, 32 nt, Human
gaggagguagugcuguaggcccagggggucag

SEQ ID NO: 159551 - RNA, 32 nt, Human
gaggaggucgaggcgcacagggcaagcaggaa

SEQ ID NO: 159552 - RNA, 21 nt, Human
gaggaggucucagucccagcc

SEQ ID NO: 159553 - RNA, 16 nt, Human
gaggaggucugggaga

SEQ ID NO: 159554 - RNA, 17 nt, Human
gaggaggucuggugaga

SEQ ID NO: 159555 - RNA, 18 nt, Human
gaggaggugaauauuuca

SEQ ID NO: 159556 - RNA, 32 nt, Human
gaggaggugagaggagaggaaggagaaaacug

SEQ ID NO: 159557 - RNA, 20 nt, Human
gaggagguggaacccgcggc

SEQ ID NO: 159558 - RNA, 21 nt, Human
gaggagguggaacccgcggcg

SEQ ID NO: 159559 - RNA, 19 nt, Human
gaggagguggagaaggagg

SEQ ID NO: 159560 - RNA, 21 nt, Human
gaggagguggaggaggaggag

SEQ ID NO: 159561 - RNA, 32 nt, Human
gaggagguggaggaggaggaggaagaucagga

SEQ ID NO: 159562 - RNA, 32 nt, Human
gaggagguggaggaggaggaggaggaggagga

SEQ ID NO: 159563 - RNA, 32 nt, Human
gaggagguggcauccaccagcccaggcaucga

SEQ ID NO: 159564 - RNA, 32 nt, Human
gaggaggugggaacagaagagagaaggaggca

SEQ ID NO: 159565 - RNA, 32 nt, Human
gaggaggugggccggcacacagcuccagugcu

SEQ ID NO: 159566 - RNA, 32 nt, Human
gaggagguggguggaggcaugcaggggagacg

SEQ ID NO: 159567 - RNA, 16 nt, Human
gaggaggugguggaga

SEQ ID NO: 159568 - RNA, 18 nt, Human
gaggagguucgagaggac

SEQ ID NO: 159569 - RNA, 32 nt, Human
gaggagguuucucaccccacagauaacccaag

SEQ ID NO: 159570 - RNA, 32 nt, Human
gaggaguaaaugcagggcuggccaggcgaccu

SEQ ID NO: 159571 - RNA, 20 nt, Human
gaggaguacauggaggacuc

SEQ ID NO: 159572 - RNA, 32 nt, Human
gaggaguacugcagaggucacagggaagucac

SEQ ID NO: 159573 - RNA, 32 nt, Human
gaggaguacugcagaggucacagggaagucag

SEQ ID NO: 159574 - RNA, 32 nt, Human
gaggaguacuugagcccaggaguucgagguua

SEQ ID NO: 159575 - RNA, 32 nt, Human
gaggaguaggagccggucucccagaaggcgga

SEQ ID NO: 159576 - RNA, 32 nt, Human
gaggaguagggugggagggaacgacagagacg

SEQ ID NO: 159577 - RNA, 32 nt, Human
gaggagucaggcuuaaaacuuguuggagggga

SEQ ID NO: 159578 - RNA, 32 nt, Human
gaggagucauguuggagguuggggaagaaccu

SEQ ID NO: 159579 - RNA, 32 nt, Human
gaggaguccagggagaggcgggaucacggccc

SEQ ID NO: 159580 - RNA, 32 nt, Human
gaggaguccuuuccucucugccugcccuuucc

SEQ ID NO: 159581 - RNA, 31 nt, Human
gaggaguccuuuucugaguagaguccacaga

SEQ ID NO: 159582 - RNA, 32 nt, Human
gaggagucgccgcugccgccacugccugugcu

SEQ ID NO: 159583 - RNA, 32 nt, Human
gaggagucucagagcaaggugcguucuagaug

SEQ ID NO: 159584 - RNA, 32 nt, Human
gaggagucuguggcuuuuuguucagaauuaag

SEQ ID NO: 159585 - RNA, 21 nt, Human
gaggagugaaagcgccuaggg

SEQ ID NO: 159586 - RNA, 32 nt, Human
gaggagugacuucucccucucuuccaguccug

SEQ ID NO: 159587 - RNA, 24 nt, Human
gaggagugagcagagggucuggga

SEQ ID NO: 159588 - RNA, 22 nt, Human
gaggagugagcaggccccgggg

SEQ ID NO: 159589 - RNA, 22 nt, Human
gaggagugagggaacccugggg

SEQ ID NO: 159590 - RNA, 19 nt, Human
gaggagugaggucaccugg

SEQ ID NO: 159591 - RNA, 32 nt, Human
gaggagugagguggcucuggccucccauguca

SEQ ID NO: 159592 - RNA, 32 nt, Human
gaggagugagugugcauguugucaaaguuucu

SEQ ID NO: 159593 - RNA, 22 nt, Human
gaggagugcacagccccagcca

SEQ ID NO: 159594 - RNA, 32 nt, Human
gaggagugcccaggagagauggugaaaaugac

SEQ ID NO: 159595 - RNA, 21 nt, Human
gaggagugcuuuucuucucaa

SEQ ID NO: 159596 - RNA, 19 nt, Human
gaggaguggaaaugccugg

SEQ ID NO: 159597 - RNA, 32 nt, Human
gaggaguggaaggaaaccgcugccuuuaucuu

SEQ ID NO: 159598 - RNA, 32 nt, Human
gaggaguggaguucucuguucuagagugacag

SEQ ID NO: 159599 - RNA, 32 nt, Human
gaggaguggcaggaaagagggagcaggugccc

SEQ ID NO: 159600 - RNA, 20 nt, Human
gaggaguggcccggcccugg

SEQ ID NO: 159601 - RNA, 31 nt, Human
gaggaguggcuacuggagccguguguuaggc

SEQ ID NO: 159602 - RNA, 23 nt, Human
gaggagugggagaauaaccggga

SEQ ID NO: 159603 - RNA, 23 nt, Human
gaggagugggagggcccagcaag

SEQ ID NO: 159604 - RNA, 21 nt, Human
gaggagugggagggccugagg

SEQ ID NO: 159605 - RNA, 24 nt, Human
gaggagugggcaucaggccuggga

SEQ ID NO: 159606 - RNA, 27 nt, Human
gaggagugggguggugucagacccugg

SEQ ID NO: 159607 - RNA, 32 nt, Human
gaggagugugggcuggcagagagcuucgaggg

SEQ ID NO: 159608 - RNA, 32 nt, Human
gaggagugugugugcacguauucaucugugug

SEQ ID NO: 159609 - RNA, 32 nt, Human
gaggaguguuugagcccaggaguucaaggcca

SEQ ID NO: 159610 - RNA, 32 nt, Human
gaggaguuaaucauucagaccuuuaucagcag

SEQ ID NO: 159611 - RNA, 32 nt, Human
gaggaguuagaggaggaggaggaggaggaaga

SEQ ID NO: 159612 - RNA, 21 nt, Human
gaggaguucucaggccugggg

SEQ ID NO: 159613 - RNA, 32 nt, Human
gaggaguucugaugacccagggguuagggcug

SEQ ID NO: 159614 - RNA, 32 nt, Human
gaggaguucuguugccuuuccugcugcucacc

SEQ ID NO: 159615 - RNA, 32 nt, Human
gaggaguugcuacuggcaucuccuggguggag

SEQ ID NO: 159616 - RNA, 32 nt, Human
gaggaguuuaacgccggaagguggugacuaau

SEQ ID NO: 159617 - RNA, 32 nt, Human
gaggaguuuccccugcugaagagcccugccug

SEQ ID NO: 159618 - RNA, 32 nt, Human
gaggauaacuugaacccaggaguucaagauca

SEQ ID NO: 159619 - RNA, 22 nt, Human
gaggauaagccacugggcacug

SEQ ID NO: 159620 - RNA, 23 nt, Human
gaggauacaaacuggauauuuua

SEQ ID NO: 159621 - RNA, 32 nt, Human
gaggauacacagauagcggauaagcacaugag

SEQ ID NO: 159622 - RNA, 32 nt, Human
gaggauacccagggcaggccucacauagaaaa

SEQ ID NO: 159623 - RNA, 32 nt, Human
gaggauacccuuugacaaacccuguggauaaa

SEQ ID NO: 159624 - RNA, 18 nt, Human
gaggauacucucauccca

SEQ ID NO: 159625 - RNA, 19 nt, Human
gaggauagaacauugcagg

SEQ ID NO: 159626 - RNA, 32 nt, Human
gaggauagcaaucagagguugggcuggcugga

SEQ ID NO: 159627 - RNA, 32 nt, Human
gaggauagcgauuaucucuacuucuccaccuc

SEQ ID NO: 159628 - RNA, 32 nt, Human
gaggauagcgugagcccaggaguuugagacca

SEQ ID NO: 159629 - RNA, 32 nt, Human
gaggauagcuugagcccaggaguucgagacuu

SEQ ID NO: 159630 - RNA, 32 nt, Human
gaggauagcuugagcccaggaguuugaggcua

SEQ ID NO: 159631 - RNA, 32 nt, Human
gaggauaggagaagaggaggaggaggagcggg

SEQ ID NO: 159632 - RNA, 32 nt, Human
gaggauaguuggcuuccugccucucuccucua

SEQ ID NO: 159633 - RNA, 18 nt, Human
gaggauauaaauauuuca

SEQ ID NO: 159634 - RNA, 20 nt, Human
gaggauauagggcguuucca

SEQ ID NO: 159635 - RNA, 32 nt, Human
gaggauaucucuggugcugcuucuguauauuu

SEQ ID NO: 159636 - RNA, 31 nt, Human
gaggauaugcccuccauucuugcugauguau

SEQ ID NO: 159637 - RNA, 21 nt, Human
gaggauauguaaaacauucua

SEQ ID NO: 159638 - RNA, 24 nt, Human
gaggauauucauugugagguucua

SEQ ID NO: 159639 - RNA, 32 nt, Human
gaggauauugcuucucagccuuuuggcuaaga

SEQ ID NO: 159640 - RNA, 21 nt, Human
gaggauauuguaguauuauca

SEQ ID NO: 159641 - RNA, 32 nt, Human
gaggaucaaaguaggcaagauggcgucgagcg

SEQ ID NO: 159642 - RNA, 32 nt, Human
gaggaucaaaugaggggcuccacccacggcaa

SEQ ID NO: 159643 - RNA, 32 nt, Human
gaggaucaacacagauagcacuuccuccagga

SEQ ID NO: 159644 - RNA, 32 nt, Human
gaggaucaagacgaaaaccugcaaugacaacu

SEQ ID NO: 159645 - RNA, 32 nt, Human
gaggaucaauugagcccaggagcucuagacca

SEQ ID NO: 159646 - RNA, 32 nt, Human
gaggaucacaagagcccaggagguugagaaug

SEQ ID NO: 159647 - RNA, 32 nt, Human
gaggaucacaugaacccaggagguugaagcug

SEQ ID NO: 159648 - RNA, 32 nt, Human
gaggaucacaugagcccaggagguugaggcug

SEQ ID NO: 159649 - RNA, 32 nt, Human
gaggaucaccagaggccagcagguccacacca

SEQ ID NO: 159650 - RNA, 32 nt, Human
gaggaucaccugagacuggagauguagaggcu

SEQ ID NO: 159651 - RNA, 32 nt, Human
gaggaucaccugagcccaggaguuugagacua

SEQ ID NO: 159652 - RNA, 32 nt, Human
gaggaucaccugaguccaggaggucgaggcug

SEQ ID NO: 159653 - RNA, 32 nt, Human
gaggaucacugagaccagccugggcaacauag

SEQ ID NO: 159654 - RNA, 32 nt, Human
gaggaucacuggagcccaggaggucaaggcug

SEQ ID NO: 159655 - RNA, 32 nt, Human
gaggaucacuggaguucgaggcugcagugagc

SEQ ID NO: 159656 - RNA, 32 nt, Human
gaggaucacuugaacccaagaggcagaguuug

SEQ ID NO: 159657 - RNA, 32 nt, Human
gaggaucacuugaacccaggagguagaggcug

SEQ ID NO: 159658 - RNA, 32 nt, Human
gaggaucacuugaacccaggagguugaggcug

SEQ ID NO: 159659 - RNA, 32 nt, Human
gaggaucacuugaaccuaggaggcagagguug

SEQ ID NO: 159660 - RNA, 32 nt, Human
gaggaucacuugagcccaggagauugaggcug

SEQ ID NO: 159661 - RNA, 32 nt, Human
gaggaucacuugagcccaggaggucaaggcug

SEQ ID NO: 159662 - RNA, 32 nt, Human
gaggaucacuugagcccaggaggucgaggcug

SEQ ID NO: 159663 - RNA, 32 nt, Human
gaggaucacuugagcccaggaggucgagguug

SEQ ID NO: 159664 - RNA, 32 nt, Human
gaggaucacuugagcccaggaggucuaggcug

SEQ ID NO: 159665 - RNA, 32 nt, Human
gaggaucacuugagcccaggagguggaggcug

SEQ ID NO: 159666 - RNA, 32 nt, Human
gaggaucacuugagcccaggagguugaggcug

SEQ ID NO: 159667 - RNA, 32 nt, Human
gaggaucacuugagcccaggagucugaggcuu

SEQ ID NO: 159668 - RNA, 32 nt, Human
gaggaucacuugagcccaggaguuggagacca

SEQ ID NO: 159669 - RNA, 32 nt, Human
gaggaucacuugagcccaggaguuugagacca

SEQ ID NO: 159670 - RNA, 32 nt, Human
gaggaucacuugagcccaggaguuugaggcca

SEQ ID NO: 159671 - RNA, 32 nt, Human
gaggaucacuugagcccaggaguuugaggcug

SEQ ID NO: 159672 - RNA, 32 nt, Human
gaggaucacuugagcccaggaguuugagguug

SEQ ID NO: 159673 - RNA, 32 nt, Human
gaggaucacuugaguccaggaggcggaggcug

SEQ ID NO: 159674 - RNA, 32 nt, Human
gaggaucagagggaggggaggcagccaagaga

SEQ ID NO: 159675 - RNA, 32 nt, Human
gaggaucagaugcuugagcuucugagcaggcc

SEQ ID NO: 159676 - RNA, 31 nt, Human
gaggaucagcccaaggaggaggaagaggaaa

SEQ ID NO: 159677 - RNA, 32 nt, Human
gaggaucagcccaaggaggaggaagaggaaaa

SEQ ID NO: 159678 - RNA, 32 nt, Human
gaggaucaguugagcccaggaguucaagacca

SEQ ID NO: 159679 - RNA, 32 nt, Human
gaggaucauuugagcccaggaggucaaggcug

SEQ ID NO: 159680 - RNA, 32 nt, Human
gaggaucauuugagcccaggaguucgagacca

SEQ ID NO: 159681 - RNA, 32 nt, Human
gaggaucauuugagcccaggaguuugagacca

SEQ ID NO: 159682 - RNA, 32 nt, Human
gaggauccagaacugcagcccauccucgcugg

SEQ ID NO: 159683 - RNA, 32 nt, Human
gaggaucccaggaguucaaauccugccugggc

SEQ ID NO: 159684 - RNA, 21 nt, Human
gaggauccccgaccacccuag

SEQ ID NO: 159685 - RNA, 19 nt, Human
gaggaucccuggagcccug

SEQ ID NO: 159686 - RNA, 32 nt, Human
gaggaucccuugagcccaggaggucgaggcug

SEQ ID NO: 159687 - RNA, 32 nt, Human
gaggaucccuugaggccaggagguggagucua

SEQ ID NO: 159688 - RNA, 32 nt, Human
gaggaucccuugaguccaggagguugaggcug

SEQ ID NO: 159689 - RNA, 32 nt, Human
gaggaucccuuucccucccgcccugcuuuugc

SEQ ID NO: 159690 - RNA, 32 nt, Human
gaggauccuuccugccucuuccagcucccagg

SEQ ID NO: 159691 - RNA, 32 nt, Human
gaggaucgccugaaccucagaggcagagguug

SEQ ID NO: 159692 - RNA, 32 nt, Human
gaggaucgccugagcaugggaggcagagguug

SEQ ID NO: 159693 - RNA, 32 nt, Human
gaggaucgccugagcccaggagguggagguug

SEQ ID NO: 159694 - RNA, 32 nt, Human
gaggaucgccugagcccaggaguuugagacca

SEQ ID NO: 159695 - RNA, 21 nt, Human
gaggaucgcuggagccuggga

SEQ ID NO: 159696 - RNA, 32 nt, Human
gaggaucgcuugaacccaggaagcagagguug

SEQ ID NO: 159697 - RNA, 32 nt, Human
gaggaucgcuugaacccaggaaguagagguug

SEQ ID NO: 159698 - RNA, 32 nt, Human
gaggaucgcuugaacccaggaaguggagacug

SEQ ID NO: 159699 - RNA, 32 nt, Human
gaggaucgcuugaacccaggaggcggagguug

SEQ ID NO: 159700 - RNA, 32 nt, Human
gaggaucgcuugaacccaggagguagaagcug

SEQ ID NO: 159701 - RNA, 32 nt, Human
gaggaucgcuugaacccaggagguagaggcug

SEQ ID NO: 159702 - RNA, 32 nt, Human
gaggaucgcuugaacccaggagguggagguug

SEQ ID NO: 159703 - RNA, 32 nt, Human
gaggaucgcuugaacccgggaggcagcaguug

SEQ ID NO: 159704 - RNA, 32 nt, Human
gaggaucgcuugaaccugagaggcagagguug

SEQ ID NO: 159705 - RNA, 32 nt, Human
gaggaucgcuugagcccaggagcucgagacca

SEQ ID NO: 159706 - RNA, 32 nt, Human
gaggaucgcuugagcccaggaggcagaggcug

SEQ ID NO: 159707 - RNA, 32 nt, Human
gaggaucgcuugagcccaggaggcggagguug

SEQ ID NO: 159708 - RNA, 32 nt, Human
gaggaucgcuugagcccaggaggucgaagcug

SEQ ID NO: 159709 - RNA, 32 nt, Human
gaggaucgcuugagcccaggagucugagacca

SEQ ID NO: 159710 - RNA, 32 nt, Human
gaggaucgcuugagcccaggaguucaagacca

SEQ ID NO: 159711 - RNA, 32 nt, Human
gaggaucgcuugagcccaggaguucaggaccu

SEQ ID NO: 159712 - RNA, 32 nt, Human
gaggaucgcuugagcccaggaguuccagacua

SEQ ID NO: 159713 - RNA, 32 nt, Human
gaggaucgcuugagcccaggaguucgagauua

SEQ ID NO: 159714 - RNA, 32 nt, Human
gaggaucgcuugagcccaggaguugaagucca

SEQ ID NO: 159715 - RNA, 32 nt, Human
gaggaucgcuugagcccaggaguuuaagacca

SEQ ID NO: 159716 - RNA, 32 nt, Human
gaggaucgcuugagcccaggaguuuaagaccu

SEQ ID NO: 159717 - RNA, 32 nt, Human
gaggaucgcuugagcccaggaguuugaaacca

SEQ ID NO: 159718 - RNA, 32 nt, Human
gaggaucgcuugagcccaggaguuugacacca

SEQ ID NO: 159719 - RNA, 32 nt, Human
gaggaucgcuugagcccaggaguuugagacca

SEQ ID NO: 159720 - RNA, 32 nt, Human
gaggaucgcuugagcccaggaguuugaggaug

SEQ ID NO: 159721 - RNA, 32 nt, Human
gaggaucgguugagcccaggaguucgaagcug

SEQ ID NO: 159722 - RNA, 32 nt, Human
gaggaucgucuuuaccugaggauuucuagcca

SEQ ID NO: 159723 - RNA, 32 nt, Human
gaggaucguuugagcccaggaguugaagacca

SEQ ID NO: 159724 - RNA, 18 nt, Human
gaggaucuaauuugcaga

SEQ ID NO: 159725 - RNA, 32 nt, Human
gaggaucucuugagcccaggagaugcaggcuu

SEQ ID NO: 159726 - RNA, 32 nt, Human
gaggaucucuugagcccaggaggucaaggcua

SEQ ID NO: 159727 - RNA, 32 nt, Human
gaggaucucuugagcccaggaguucgagacca

SEQ ID NO: 159728 - RNA, 32 nt, Human
gaggaucucuugagcccaggaguuggagucca

SEQ ID NO: 159729 - RNA, 32 nt, Human
gaggaucucuugagcccaggaguuugagaccc

SEQ ID NO: 159730 - RNA, 32 nt, Human
gaggaucucuugagcccaggaguuugagacua

SEQ ID NO: 159731 - RNA, 32 nt, Human
gaggaucucuugaggcugggaggcagagguug

SEQ ID NO: 159732 - RNA, 32 nt, Human
gaggaucugcuuggucuugauaagcuauguug

SEQ ID NO: 159733 - RNA, 32 nt, Human
gaggaucuucccaccauacagacagcgagauc

SEQ ID NO: 159734 - RNA, 32 nt, Human
gaggaucuuuugaacccaggaguucaggguca

SEQ ID NO: 159735 - RNA, 29 nt, Human
gaggaugaacaacaaguucgacgcuuuga

SEQ ID NO: 159736 - RNA, 32 nt, Human
gaggaugaagugauauggugagcagcggacuu

SEQ ID NO: 159737 - RNA, 32 nt, Human
gaggaugacaucaccacauuucuaguuucaug

SEQ ID NO: 159738 - RNA, 32 nt, Human
gaggaugaccagagccaaggcucacagaaaag

SEQ ID NO: 159739 - RNA, 32 nt, Human
gaggaugaccagcuagacucccauggaauugg

SEQ ID NO: 159740 - RNA, 32 nt, Human
gaggaugaccugcaccgugugccuuuaaugca

SEQ ID NO: 159741 - RNA, 32 nt, Human
gaggaugacuccagucccugcacgcccuggca

SEQ ID NO: 159742 - RNA, 32 nt, Human
gaggaugacuugaacgcaggaggcugaggcug

SEQ ID NO: 159743 - RNA, 32 nt, Human
gaggaugacuugagcccaggaguuugagacca

SEQ ID NO: 159744 - RNA, 29 nt, Human
gaggaugagagagaacauggccaggggcc

SEQ ID NO: 159745 - RNA, 32 nt, Human
gaggaugagagggcacagggagguggguuggg

SEQ ID NO: 159746 - RNA, 32 nt, Human
gaggaugaggacaaaccaaagccuuuguucuu

SEQ ID NO: 159747 - RNA, 32 nt, Human
gaggaugaggagaaacggaaugaggaagugcg

SEQ ID NO: 159748 - RNA, 32 nt, Human
gaggaugaggagacagaaaacaaguagcccuu

SEQ ID NO: 159749 - RNA, 32 nt, Human
gaggaugaggaggaggcccugcccucaaacgu

SEQ ID NO: 159750 - RNA, 32 nt, Human
gaggaugaggagggggagagccuggacucugu

SEQ ID NO: 159751 - RNA, 32 nt, Human
gaggaugaggaguaugccgaggaggagguggc

SEQ ID NO: 159752 - RNA, 32 nt, Human
gaggaugaggaugaggaggaguaugaugaaga

SEQ ID NO: 159753 - RNA, 32 nt, Human
gaggaugagguagggaggugauccagagaagg

SEQ ID NO: 159754 - RNA, 20 nt, Human
gaggaugagucaguuccuga

SEQ ID NO: 159755 - RNA, 18 nt, Human
gaggaugcaaacauucca

SEQ ID NO: 159756 - RNA, 32 nt, Human
gaggaugcaaagacauccagagugauauaaug

SEQ ID NO: 159757 - RNA, 32 nt, Human
gaggaugcaauggcacggaccuuggcuugacc

SEQ ID NO: 159758 - RNA, 32 nt, Human
gaggaugcagaauuaggagcaagcauuccgag

SEQ ID NO: 159759 - RNA, 32 nt, Human
gaggaugcagagugggagaccuuaaaaccguc

SEQ ID NO: 159760 - RNA, 32 nt, Human
gaggaugcagugagcuauggucauaccaccgc

SEQ ID NO: 159761 - RNA, 32 nt, Human
gaggaugccagaguucauggguuucuagaaga

SEQ ID NO: 159762 - RNA, 32 nt, Human
gaggaugccaggaugcaggucaaggaaggcau

SEQ ID NO: 159763 - RNA, 32 nt, Human
gaggaugcccguauuuucaucuuccauucuaa

SEQ ID NO: 159764 - RNA, 22 nt, Human
gaggaugccgccgcggcugcug

SEQ ID NO: 159765 - RNA, 24 nt, Human
gaggaugccucauuuuagcaaacu

SEQ ID NO: 159766 - RNA, 22 nt, Human
gaggaugcggagaagaaccaga

SEQ ID NO: 159767 - RNA, 29 nt, Human
gaggaugcuggagcuggagugggaagccc

SEQ ID NO: 159768 - RNA, 19 nt, Human
gaggaugcugugaaauucc

SEQ ID NO: 159769 - RNA, 32 nt, Human
gaggaugcuguggccacacaagugcuggacga

SEQ ID NO: 159770 - RNA, 21 nt, Human
gaggaugcuguggcuguucua

SEQ ID NO: 159771 - RNA, 20 nt, Human
gaggaugcuuaaugauucca

SEQ ID NO: 159772 - RNA, 17 nt, Human
gaggaugcuugauucca

SEQ ID NO: 159773 - RNA, 32 nt, Human
gaggauggaaacaccugccgcgcucugagccc

SEQ ID NO: 159774 - RNA, 32 nt, Human
gaggauggaagcaggugaggagcuagaccaca

SEQ ID NO: 159775 - RNA, 29 nt, Human
gaggauggacccaggagaucccgcuggug

SEQ ID NO: 159776 - RNA, 32 nt, Human
gaggauggagagaggcacugauagaggccaga

SEQ ID NO: 159777 - RNA, 32 nt, Human
gaggauggagugaugggguagggaggaggaaa

SEQ ID NO: 159778 - RNA, 32 nt, Human
gaggauggaguggggucccauggugcaggucu

SEQ ID NO: 159779 - RNA, 31 nt, Human
gaggauggcaaagagagucgcaucucagugc

SEQ ID NO: 159780 - RNA, 32 nt, Human
gaggauggcccagggugagguggcauggucca

SEQ ID NO: 159781 - RNA, 32 nt, Human
gaggauggccuggucugaaucuggaguaauua

SEQ ID NO: 159782 - RNA, 22 nt, Human
gaggauggcgcugguacugcug

SEQ ID NO: 159783 - RNA, 32 nt, Human
gaggauggcgugaacccgggaggcagagcuug

SEQ ID NO: 159784 - RNA, 32 nt, Human
gaggauggcucacgccuguaaucccagcacuu

SEQ ID NO: 159785 - RNA, 32 nt, Human
gaggauggcuucaagcccuaauguugcuugag

SEQ ID NO: 159786 - RNA, 32 nt, Human
gaggauggcuugaacccaagagguggaggcug

SEQ ID NO: 159787 - RNA, 32 nt, Human
gaggauggcuugaaccugggaggcagagguug

SEQ ID NO: 159788 - RNA, 32 nt, Human
gaggauggcuugagcccaagaggcagagguug

SEQ ID NO: 159789 - RNA, 32 nt, Human
gaggauggcuugagcccaggagauugaggcug

SEQ ID NO: 159790 - RNA, 32 nt, Human
gaggauggcuugagcccaggaguucaagacca

SEQ ID NO: 159791 - RNA, 32 nt, Human
gaggauggcuugagcccaggaguucaaggaug

SEQ ID NO: 159792 - RNA, 32 nt, Human
gaggauggcuugagcccaggaguuugagauca

SEQ ID NO: 159793 - RNA, 32 nt, Human
gaggauggcuugagcccaggaguuugaggcug

SEQ ID NO: 159794 - RNA, 32 nt, Human
gaggauggcuugagcccaggaguuugagguug

SEQ ID NO: 159795 - RNA, 32 nt, Human
gaggauggcuugcgcucaggaggcagagguua

SEQ ID NO: 159796 - RNA, 32 nt, Human
gaggauggcuugggcccaggaggucgaggcug

SEQ ID NO: 159797 - RNA, 32 nt, Human
gaggaugggaagagggagaggagcagaaaaag

SEQ ID NO: 159798 - RNA, 32 nt, Human
gaggaugggaggggugagcagcagggagagug

SEQ ID NO: 159799 - RNA, 32 nt, Human
gaggaugggauuagcgaagcuguggagacugc

SEQ ID NO: 159800 - RNA, 32 nt, Human
gaggauggggcuccuauccacccuggccagca

SEQ ID NO: 159801 - RNA, 32 nt, Human
gaggaugggggcaugacacuccagugucaaaa

SEQ ID NO: 159802 - RNA, 24 nt, Human
gaggauggggguuugggaccaguu

SEQ ID NO: 159803 - RNA, 31 nt, Human
gaggaugggguggaaucugaggggugagccu

SEQ ID NO: 159804 - RNA, 32 nt, Human
gaggaugggguuucacuauguuggccagacug

SEQ ID NO: 159805 - RNA, 29 nt, Human
gaggauggugcagaaggagagucaagcga

SEQ ID NO: 159806 - RNA, 32 nt, Human
gaggauggugugaaccugggaggcagagcuug

SEQ ID NO: 159807 - RNA, 32 nt, Human
gaggauguaauauauacagacacacacauguu

SEQ ID NO: 159808 - RNA, 32 nt, Human
gaggauguauuuauaugagauguauguguucu

SEQ ID NO: 159809 - RNA, 32 nt, Human
gaggauguccacccucugucucaggccuuuuu

SEQ ID NO: 159810 - RNA, 32 nt, Human
gaggaugugaaugacagugucagcaagugagc

SEQ ID NO: 159811 - RNA, 32 nt, Human
gaggauguggguugggacagguaguaccuaaa

SEQ ID NO: 159812 - RNA, 32 nt, Human
gaggaugugguagugaccucaccagaggaguu

SEQ ID NO: 159813 - RNA, 32 nt, Human
gaggauguggugagccccaucauucugcaccu

SEQ ID NO: 159814 - RNA, 32 nt, Human
gaggauguuagacuugcucccucuccaagaca

SEQ ID NO: 159815 - RNA, 32 nt, Human
gaggauguuccacuuagagcagucuucaaaau

SEQ ID NO: 159816 - RNA, 32 nt, Human
gaggauguucucugcgcucccaggccggcauc

SEQ ID NO: 159817 - RNA, 32 nt, Human
gaggauuaccucugugacccagaagagaugcc

SEQ ID NO: 159818 - RNA, 32 nt, Human
gaggauuaccugagcccaggaguucgagacca

SEQ ID NO: 159819 - RNA, 32 nt, Human
gaggauuacuugagcccaggaguucgagauca

SEQ ID NO: 159820 - RNA, 23 nt, Human
gaggauuaggaaugaguauucca

SEQ ID NO: 159821 - RNA, 32 nt, Human
gaggauuaggagaaggaagagggaacgccaca

SEQ ID NO: 159822 - RNA, 32 nt, Human
gaggauuaguagaagagaguggguccagauuu

SEQ ID NO: 159823 - RNA, 32 nt, Human
gaggauuaguccaccugucccuccugggcugc

SEQ ID NO: 159824 - RNA, 32 nt, Human
gaggauucaaacuguuggggcuggaagaacuu

SEQ ID NO: 159825 - RNA, 32 nt, Human
gaggauucagggccggagguucuggugggggc

SEQ ID NO: 159826 - RNA, 32 nt, Human
gaggauucauguccaaagggcucccagagacc

SEQ ID NO: 159827 - RNA, 32 nt, Human
gaggauucucauaaggaaagcaaugacuguuc

SEQ ID NO: 159828 - RNA, 32 nt, Human
gaggauucucccccgaguccccaaaucagcag

SEQ ID NO: 159829 - RNA, 32 nt, Human
gaggauucugaccuugacuuucauaucaacaa

SEQ ID NO: 159830 - RNA, 32 nt, Human
gaggauucuggcugggaagaaaaagagccuca

SEQ ID NO: 159831 - RNA, 32 nt, Human
gaggauugcauucuauuuucuauaugacccuc

SEQ ID NO: 159832 - RNA, 32 nt, Human
gaggauugccucugcugacccucagucuccuc

SEQ ID NO: 159833 - RNA, 32 nt, Human
gaggauugccugagcccaggagguggaaacug

SEQ ID NO: 159834 - RNA, 32 nt, Human
gaggauugccugagcccaggaguuugaggcuc

SEQ ID NO: 159835 - RNA, 32 nt, Human
gaggauugccugagcccaggaguuugagggug

SEQ ID NO: 159836 - RNA, 21 nt, Human
gaggauugcuggagccuggga

SEQ ID NO: 159837 - RNA, 32 nt, Human
gaggauugcuuaagcccaggagcuagagccua

SEQ ID NO: 159838 - RNA, 32 nt, Human
gaggauugcuuaagcccgggaggcagaaccug

SEQ ID NO: 159839 - RNA, 32 nt, Human
gaggauugcuugaacccaagaggucgaggcug

SEQ ID NO: 159840 - RNA, 32 nt, Human
gaggauugcuugaacccaggaguuucagacca

SEQ ID NO: 159841 - RNA, 32 nt, Human
gaggauugcuugaacccgggaggcagagguug

SEQ ID NO: 159842 - RNA, 32 nt, Human
gaggauugcuugagaccagccugggugacaca

SEQ ID NO: 159843 - RNA, 32 nt, Human
gaggauugcuugagcccaggagagugaggcua

SEQ ID NO: 159844 - RNA, 32 nt, Human
gaggauugcuugagcccaggagcuggagauca

SEQ ID NO: 159845 - RNA, 32 nt, Human
gaggauugcuugagcccaggaggcagagguug

SEQ ID NO: 159846 - RNA, 32 nt, Human
gaggauugcuugagcccaggaggucgaggcug

SEQ ID NO: 159847 - RNA, 32 nt, Human
gaggauugcuugagcccaggaguucaagacca

SEQ ID NO: 159848 - RNA, 32 nt, Human
gaggauugcuugagcccaggaguuugacacca

SEQ ID NO: 159849 - RNA, 32 nt, Human
gaggauugcuugagcccaggaguuugagacca

SEQ ID NO: 159850 - RNA, 32 nt, Human
gaggauugcuugagcccaggaguuugaggcug

SEQ ID NO: 159851 - RNA, 32 nt, Human
gaggauugcuugagcccaggaguuugagguug

SEQ ID NO: 159852 - RNA, 32 nt, Human
gaggauugcuugagcccaggaguuugagucca

SEQ ID NO: 159853 - RNA, 18 nt, Human
gaggauugcuugaggcca

SEQ ID NO: 159854 - RNA, 32 nt, Human
gaggauugcuugaggccagccugggcaacaua

SEQ ID NO: 159855 - RNA, 18 nt, Human
gaggauugcuugagucca

SEQ ID NO: 159856 - RNA, 32 nt, Human
gaggauugcuugaguccaggagguugaggcug

SEQ ID NO: 159857 - RNA, 18 nt, Human
gaggauuguagcauuuua

SEQ ID NO: 159858 - RNA, 32 nt, Human
gaggauuguuugagcccaggagguugaggcug

SEQ ID NO: 159859 - RNA, 32 nt, Human
gaggauuguuugagcccaggaguucaaggcag

SEQ ID NO: 159860 - RNA, 32 nt, Human
gaggauuuauccugccuucuccacaagcaugu

SEQ ID NO: 159861 - RNA, 32 nt, Human
gaggauuucucagacacaugcaccagauucug

SEQ ID NO: 159862 - RNA, 32 nt, Human
gaggauuugacagcauuuccccaguugcccuu

SEQ ID NO: 159863 - RNA, 32 nt, Human
gaggauuugcagcccccagcccuggguucaag

SEQ ID NO: 159864 - RNA, 32 nt, Human
gaggauuuggagaaguuaaggcugcaaggcca

SEQ ID NO: 159865 - RNA, 26 nt, Human
gaggauuuggagcuuuuaagccaguu

SEQ ID NO: 159866 - RNA, 32 nt, Human
gaggauuugggcagaaccugagguuuugccau

SEQ ID NO: 159867 - RNA, 32 nt, Human
gaggauuuucacccaugugcauggaaaagaug

SEQ ID NO: 159868 - RNA, 32 nt, Human
gaggauuuucacccaugugcauggaauaaaug

SEQ ID NO: 159869 - RNA, 32 nt, Human
gaggauuuuggagaagagagacaggaggggua

SEQ ID NO: 159870 - RNA, 32 nt, Human
gaggauuuuguuuuguaguuugcagaugagca

SEQ ID NO: 159871 - RNA, 26 nt, Human
gaggauuuuugguauugauauaguua

SEQ ID NO: 159872 - RNA, 32 nt, Human
gaggcaaaaggacucuuguggaagauggaacu

SEQ ID NO: 159873 - RNA, 32 nt, Human
gaggcaaaaggcagcucacggggccuuccauu

SEQ ID NO: 159874 - RNA, 32 nt, Human
gaggcaaacagccugggcuucucaccccacca

SEQ ID NO: 159875 - RNA, 32 nt, Human
gaggcaaagaaaaggaacggacauucgguccu

SEQ ID NO: 159876 - RNA, 32 nt, Human
gaggcaaagaggagggcaggucugagggaccc

SEQ ID NO: 159877 - RNA, 32 nt, Human
gaggcaaagccaggccaggguacagugagaac

SEQ ID NO: 159878 - RNA, 32 nt, Human
gaggcaaaggaaacuggguggggaggaucaau

SEQ ID NO: 159879 - RNA, 19 nt, Human
gaggcaaaggaugcaguga

SEQ ID NO: 159880 - RNA, 22 nt, Human
gaggcaaaggcagguggaucac

SEQ ID NO: 159881 - RNA, 32 nt, Human
gaggcaaaggcagguggaucaccugaggucag

SEQ ID NO: 159882 - RNA, 32 nt, Human
gaggcaaaggccuggacagcuugacuuguggg

SEQ ID NO: 159883 - RNA, 22 nt, Human
gaggcaaaggcgggcggaucac

SEQ ID NO: 159884 - RNA, 21 nt, Human
gaggcaaaggcugcagugagc

SEQ ID NO: 159885 - RNA, 32 nt, Human
gaggcaaagguggguagaucaccugaggucgg

SEQ ID NO: 159886 - RNA, 21 nt, Human
gaggcaaagguugcagugagc

SEQ ID NO: 159887 - RNA, 18 nt, Human
gaggcaaaugacauuuca

SEQ ID NO: 159888 - RNA, 22 nt, Human
gaggcaacaagaaucgcuugaa

SEQ ID NO: 159889 - RNA, 32 nt, Human
gaggcaacacagggugggcacugacccacccc

SEQ ID NO: 159890 - RNA, 32 nt, Human
gaggcaacauggcaagauccccucucuaccaa

SEQ ID NO: 159891 - RNA, 32 nt, Human
gaggcaacgggcggcagguugcaguggagggg

SEQ ID NO: 159892 - RNA, 21 nt, Human
gaggcaagaaaaucgcuugaa

SEQ ID NO: 159893 - RNA, 22 nt, Human
gaggcaagaaaaucgcuugaac

SEQ ID NO: 159894 - RNA, 32 nt, Human
gaggcaagaaacucgcacccacuguggacugg

SEQ ID NO: 159895 - RNA, 32 nt, Human
gaggcaagaagagcaccaucacugccuauuuc

SEQ ID NO: 159896 - RNA, 32 nt, Human
gaggcaagagaaucacuugaaccucggaggcu

SEQ ID NO: 159897 - RNA, 22 nt, Human
gaggcaagagaaucgcuugaac

SEQ ID NO: 159898 - RNA, 32 nt, Human
gaggcaagagcagaggccccugagugugcacc

SEQ ID NO: 159899 - RNA, 18 nt, Human
gaggcaagaggacugcuu

SEQ ID NO: 159900 - RNA, 32 nt, Human
gaggcaagauggcaccauuacacuccagccug

SEQ ID NO: 159901 - RNA, 32 nt, Human
gaggcaagcaagcucucuugccgaggagccag

SEQ ID NO: 159902 - RNA, 24 nt, Human
gaggcaaggaguuugagaccagcu

SEQ ID NO: 159903 - RNA, 32 nt, Human
gaggcaaggcaaucacuucgucuugccauuga

SEQ ID NO: 159904 - RNA, 32 nt, Human
gaggcaaggcaugagagggcaaguuuguugug

SEQ ID NO: 159905 - RNA, 22 nt, Human
gaggcaaggggacgccggcggg

SEQ ID NO: 159906 - RNA, 21 nt, Human
gaggcaagguggggccugcag

SEQ ID NO: 159907 - RNA, 32 nt, Human
gaggcaagucucugguacucaggcuggagugc

SEQ ID NO: 159908 - RNA, 32 nt, Human
gaggcaauaucacuaggacuuuagcugugacc

SEQ ID NO: 159909 - RNA, 32 nt, Human
gaggcaaugacuguuggccaguucucaccggg

SEQ ID NO: 159910 - RNA, 21 nt, Human
gaggcacaagaaucgcuugaa

SEQ ID NO: 159911 - RNA, 21 nt, Human
gaggcacaagaaucgcuugag

SEQ ID NO: 159912 - RNA, 21 nt, Human
gaggcacaagaauugcuugaa

SEQ ID NO: 159913 - RNA, 32 nt, Human
gaggcacaaggcacaacaggcugcucugggau

SEQ ID NO: 159914 - RNA, 32 nt, Human
gaggcacacagccuaaagucagcacagcagag

SEQ ID NO: 159915 - RNA, 32 nt, Human
gaggcacaccucagacugaaugagucagaauc

SEQ ID NO: 159916 - RNA, 32 nt, Human
gaggcacacugacgaacagccuggguuaaucc

SEQ ID NO: 159917 - RNA, 32 nt, Human
gaggcacagacaccuggugagugaggcuucaa

SEQ ID NO: 159918 - RNA, 32 nt, Human
gaggcacagacacgugcuccugguccaugugc

SEQ ID NO: 159919 - RNA, 18 nt, Human
gaggcacagagggcugcu

SEQ ID NO: 159920 - RNA, 32 nt, Human
gaggcacagaugggcuaagggagcaccuguag

SEQ ID NO: 159921 - RNA, 32 nt, Human
gaggcacagcugagcgccaaagccacaggcug

SEQ ID NO: 159922 - RNA, 24 nt, Human
gaggcacaggcgggaggaucacuu

SEQ ID NO: 159923 - RNA, 32 nt, Human
gaggcacagggagagggcaggaagggacagga

SEQ ID NO: 159924 - RNA, 32 nt, Human
gaggcacagggaggggagagaugggcgacccc

SEQ ID NO: 159925 - RNA, 32 nt, Human
gaggcacagggaggggagagaugggcggcccc

SEQ ID NO: 159926 - RNA, 32 nt, Human
gaggcaccaagugucucaggcagcgaggaaau

SEQ ID NO: 159927 - RNA, 32 nt, Human
gaggcaccaccagguuacagacaaggaccuuc

SEQ ID NO: 159928 - RNA, 32 nt, Human
gaggcaccacugcacucuagccugggcaagag

SEQ ID NO: 159929 - RNA, 21 nt, Human
gaggcaccagaauugcuugaa

SEQ ID NO: 159930 - RNA, 32 nt, Human
gaggcaccaggcacccagaagugaaagacagg

SEQ ID NO: 159931 - RNA, 23 nt, Human
gaggcacccaaagggcaggagca

SEQ ID NO: 159932 - RNA, 23 nt, Human
gaggcacccagaggcagugucca

SEQ ID NO: 159933 - RNA, 23 nt, Human
gaggcacccuucccauugugcca

SEQ ID NO: 159934 - RNA, 32 nt, Human
gaggcaccuagaaguugaggcagccagcugug

SEQ ID NO: 159935 - RNA, 32 nt, Human
gaggcaccuccaccaacagcccacgcugcugg

SEQ ID NO: 159936 - RNA, 32 nt, Human
gaggcaccuccaggcaggccaggcugccucgg

SEQ ID NO: 159937 - RNA, 18 nt, Human
gaggcaccuguaauccca

SEQ ID NO: 159938 - RNA, 32 nt, Human
gaggcaccuguaaucccagcuacuugggaggc

SEQ ID NO: 159939 - RNA, 32 nt, Human
gaggcacgagagcugggagaagaggcaaagcu

SEQ ID NO: 159940 - RNA, 32 nt, Human
gaggcacgagggcuggaguccacaggcuuuua

SEQ ID NO: 159941 - RNA, 32 nt, Human
gaggcacggaaagucuggacccuugugggacc

SEQ ID NO: 159942 - RNA, 21 nt, Human
gaggcacuagaaucgcuugag

SEQ ID NO: 159943 - RNA, 32 nt, Human
gaggcacucaggcugguuuccaggacaaacau

SEQ ID NO: 159944 - RNA, 32 nt, Human
gaggcacugcagcuaugggcacugccucagcc

SEQ ID NO: 159945 - RNA, 32 nt, Human
gaggcacugcagcugcucgguugcccagccuc

SEQ ID NO: 159946 - RNA, 19 nt, Human
gaggcacugggcccuggga

SEQ ID NO: 159947 - RNA, 32 nt, Human
gaggcacuggggaugcuuccugccuggccuuc

SEQ ID NO: 159948 - RNA, 32 nt, Human
gaggcagaaaaagugggggagguggaggggga

SEQ ID NO: 159949 - RNA, 32 nt, Human
gaggcagaaacaccagccucugccaacaccgg

SEQ ID NO: 159950 - RNA, 15 nt, Human
gaggcagaaaccuca

SEQ ID NO: 159951 - RNA, 21 nt, Human
gaggcagaaccugcagugagc

SEQ ID NO: 159952 - RNA, 22 nt, Human
gaggcagaagaaccccuugaac

SEQ ID NO: 159953 - RNA, 21 nt, Human
gaggcagaagaauagcuugag

SEQ ID NO: 159954 - RNA, 22 nt, Human
gaggcagaagaaucacuucaac

SEQ ID NO: 159955 - RNA, 22 nt, Human
gaggcagaagaaucacuugaac

SEQ ID NO: 159956 - RNA, 22 nt, Human
gaggcagaagaaucgcuuaaac

SEQ ID NO: 159957 - RNA, 21 nt, Human
gaggcagaagaaucgcuugaa

SEQ ID NO: 159958 - RNA, 22 nt, Human
gaggcagaagaaucgcuugaac

SEQ ID NO: 159959 - RNA, 21 nt, Human
gaggcagaagaaucgcuugag

SEQ ID NO: 159960 - RNA, 22 nt, Human
gaggcagaagaaucgcuugagc

SEQ ID NO: 159961 - RNA, 21 nt, Human
gaggcagaagaaucguuugaa

SEQ ID NO: 159962 - RNA, 21 nt, Human
gaggcagaagaauggcuugaa

SEQ ID NO: 159963 - RNA, 21 nt, Human
gaggcagaagaauugcuugaa

SEQ ID NO: 159964 - RNA, 21 nt, Human
gaggcagaaggaucgcuugaa

SEQ ID NO: 159965 - RNA, 22 nt, Human
gaggcagaaggaucgcuugaac

SEQ ID NO: 159966 - RNA, 19 nt, Human
gaggcagaaguugcaguga

SEQ ID NO: 159967 - RNA, 21 nt, Human
gaggcagaaguugcagugagc

SEQ ID NO: 159968 - RNA, 32 nt, Human
gaggcagaaucaugugaaugggugcauccaag

SEQ ID NO: 159969 - RNA, 32 nt, Human
gaggcagaauggcgugaacccaggaggcggag

SEQ ID NO: 159970 - RNA, 32 nt, Human
gaggcagacauacaccagaaaugggggagaaa

SEQ ID NO: 159971 - RNA, 32 nt, Human
gaggcagacggaucacuccugaggccaggagu

SEQ ID NO: 159972 - RNA, 22 nt, Human
gaggcagagacggaaccagaga

SEQ ID NO: 159973 - RNA, 32 nt, Human
gaggcagagagacagagagggagagagggaca

SEQ ID NO: 159974 - RNA, 32 nt, Human
gaggcagagagaugaauggaauggagccgcau

SEQ ID NO: 159975 - RNA, 32 nt, Human
gaggcagagagggagagaaacagaggagacag

SEQ ID NO: 159976 - RNA, 32 nt, Human
gaggcagagagggagagaggcagagagacaga

SEQ ID NO: 159977 - RNA, 32 nt, Human
gaggcagagagggagagagggagagugacagc

SEQ ID NO: 159978 - RNA, 32 nt, Human
gaggcagagaugggcggaucacgaggucagga

SEQ ID NO: 159979 - RNA, 32 nt, Human
gaggcagagauggggugguggcugagagagau

SEQ ID NO: 159980 - RNA, 24 nt, Human
gaggcagagauugcacugagccga

SEQ ID NO: 159981 - RNA, 19 nt, Human
gaggcagagauugcaguga

SEQ ID NO: 159982 - RNA, 21 nt, Human
gaggcagagauugcagugagc

SEQ ID NO: 159983 - RNA, 32 nt, Human
gaggcagagcccaggguaggggacagagcugc

SEQ ID NO: 159984 - RNA, 32 nt, Human
gaggcagagcgggagcgcgcagccagguggaa

SEQ ID NO: 159985 - RNA, 19 nt, Human
gaggcagagcugccuggag

SEQ ID NO: 159986 - RNA, 32 nt, Human
gaggcagagcugccuggagccugcugggcugg

SEQ ID NO: 159987 - RNA, 19 nt, Human
gaggcagagcuugcaguga

SEQ ID NO: 159988 - RNA, 21 nt, Human
gaggcagagcuugcagugagc

SEQ ID NO: 159989 - RNA, 32 nt, Human
gaggcagagcuuggcagccacugaugguggua

SEQ ID NO: 159990 - RNA, 22 nt, Human
gaggcagaggcaggcggaucac

SEQ ID NO: 159991 - RNA, 32 nt, Human
gaggcagaggcagguggaucaccugaggucgg

SEQ ID NO: 159992 - RNA, 23 nt, Human
gaggcagaggcuacagugagcug

SEQ ID NO: 159993 - RNA, 21 nt, Human
gaggcagaggcuacagugagu

SEQ ID NO: 159994 - RNA, 32 nt, Human
gaggcagaggcugaagugagccaagauuacgu

SEQ ID NO: 159995 - RNA, 32 nt, Human
gaggcagaggcugcacucuagccugggcaaca

SEQ ID NO: 159996 - RNA, 19 nt, Human
gaggcagaggcugcaguga

SEQ ID NO: 159997 - RNA, 21 nt, Human
gaggcagaggcugcagugagc

SEQ ID NO: 159998 - RNA, 23 nt, Human
gaggcagaggcugcagugagcug

SEQ ID NO: 159999 - RNA, 21 nt, Human
gaggcagaggcuguggugagc

SEQ ID NO: 160000 - RNA, 32 nt, Human
gaggcagagggcagcgcagggugccggggaag

SEQ ID NO: 160001 - RNA, 24 nt, Human
gaggcagaggucgcagugagcugu

SEQ ID NO: 160002 - RNA, 32 nt, Human
gaggcagaggugugggaggcagaaggcuacaa

SEQ ID NO: 160003 - RNA, 32 nt, Human
gaggcagagguuacagguuacagugagcaaag

SEQ ID NO: 160004 - RNA, 21 nt, Human
gaggcagagguuacagugagc

SEQ ID NO: 160005 - RNA, 21 nt, Human
gaggcagagguuccagugagc

SEQ ID NO: 160006 - RNA, 21 nt, Human
gaggcagagguugcaaugagc

SEQ ID NO: 160007 - RNA, 24 nt, Human
gaggcagagguugcacugagcuga

SEQ ID NO: 160008 - RNA, 21 nt, Human
gaggcagagguugcaguaagc

SEQ ID NO: 160009 - RNA, 23 nt, Human
gaggcagagguugcaguaagcua

SEQ ID NO: 160010 - RNA, 19 nt, Human
gaggcagagguugcaguga

SEQ ID NO: 160011 - RNA, 21 nt, Human
gaggcagagguugcagugagc

SEQ ID NO: 160012 - RNA, 32 nt, Human
gaggcagagguugcagugagccaaggucacgu

SEQ ID NO: 160013 - RNA, 32 nt, Human
gaggcagagguugcagugagccaaggucauac

SEQ ID NO: 160014 - RNA, 22 nt, Human
gaggcagagguugcagugagcu

SEQ ID NO: 160015 - RNA, 23 nt, Human
gaggcagagguugcagugagcua

SEQ ID NO: 160016 - RNA, 19 nt, Human
gaggcagagguugcgguga

SEQ ID NO: 160017 - RNA, 21 nt, Human
gaggcagagguugcggugagc

SEQ ID NO: 160018 - RNA, 19 nt, Human
gaggcagagguugcuguga

SEQ ID NO: 160019 - RNA, 19 nt, Human
gaggcagagguuguaguga

SEQ ID NO: 160020 - RNA, 21 nt, Human
gaggcagagguuguagugagc

SEQ ID NO: 160021 - RNA, 23 nt, Human
gaggcagagguuguggugagcua

SEQ ID NO: 160022 - RNA, 19 nt, Human
gaggcagagguuucaguga

SEQ ID NO: 160023 - RNA, 21 nt, Human
gaggcagagguuucagugagc

SEQ ID NO: 160024 - RNA, 19 nt, Human
gaggcagaguuugcaguga

SEQ ID NO: 160025 - RNA, 21 nt, Human
gaggcagaguuugcagugagc

SEQ ID NO: 160026 - RNA, 32 nt, Human
gaggcagaguuuugcucuuguugcccaggcug

SEQ ID NO: 160027 - RNA, 32 nt, Human
gaggcagauagcacugggugugagaaugauca

SEQ ID NO: 160028 - RNA, 22 nt, Human
gaggcagauggaucacgagguc

SEQ ID NO: 160029 - RNA, 32 nt, Human
gaggcagauggucagacccaggaggaggcauu

SEQ ID NO: 160030 - RNA, 32 nt, Human
gaggcagcaaacccugcaaagggcugggacug

SEQ ID NO: 160031 - RNA, 32 nt, Human
gaggcagcagaacuaagucugaaccgccaaga

SEQ ID NO: 160032 - RNA, 21 nt, Human
gaggcagcagaaucacuugaa

SEQ ID NO: 160033 - RNA, 32 nt, Human
gaggcagcagagacuaugauagaggcuaugau

SEQ ID NO: 160034 - RNA, 32 nt, Human
gaggcagcagagccgaggagagcagguccaca

SEQ ID NO: 160035 - RNA, 32 nt, Human
gaggcagcagcccagacgcggcacagagaggg

SEQ ID NO: 160036 - RNA, 32 nt, Human
gaggcagcagggagaggaaggaggugggggag

SEQ ID NO: 160037 - RNA, 32 nt, Human
gaggcagcagugagccgagauugcgccacuuc

SEQ ID NO: 160038 - RNA, 18 nt, Human
gaggcagccaccccagag

SEQ ID NO: 160039 - RNA, 19 nt, Human
gaggcagccaccccagaga

SEQ ID NO: 160040 - RNA, 23 nt, Human
gaggcagccagccccuggcaggg

SEQ ID NO: 160041 - RNA, 32 nt, Human
gaggcagcccaucuuggcccuggaugaagaag

SEQ ID NO: 160042 - RNA, 32 nt, Human
gaggcagcccuugaguguuaauuugucuucua

SEQ ID NO: 160043 - RNA, 19 nt, Human
gaggcagccgaggccuggc

SEQ ID NO: 160044 - RNA, 32 nt, Human
gaggcagccguggucugccaggcccucgcucc

SEQ ID NO: 160045 - RNA, 32 nt, Human
gaggcagccuccagggcaggaaggacccugug

SEQ ID NO: 160046 - RNA, 32 nt, Human
gaggcagccucuuccaggaagaaagugguguc

SEQ ID NO: 160047 - RNA, 32 nt, Human
gaggcagcgagggacacggaguagaagaggcu

SEQ ID NO: 160048 - RNA, 19 nt, Human
gaggcagcggccgcgcgga

SEQ ID NO: 160049 - RNA, 19 nt, Human
gaggcagcgguugcaguaa

SEQ ID NO: 160050 - RNA, 32 nt, Human
gaggcagcguggacuggugacugugaaggaag

SEQ ID NO: 160051 - RNA, 19 nt, Human
gaggcagcuaaggggcagg

SEQ ID NO: 160052 - RNA, 32 nt, Human
gaggcagcuaccucgggaggaaggucucacau

SEQ ID NO: 160053 - RNA, 32 nt, Human
gaggcagcuagggagagugggagguaggcaga

SEQ ID NO: 160054 - RNA, 22 nt, Human
gaggcagcuaguagccggaggg

SEQ ID NO: 160055 - RNA, 32 nt, Human
gaggcagcuauugguugcuuucuuggagguaa

SEQ ID NO: 160056 - RNA, 24 nt, Human
gaggcagcugaagggcagggaggg

SEQ ID NO: 160057 - RNA, 22 nt, Human
gaggcagcugagaucagaaggg

SEQ ID NO: 160058 - RNA, 26 nt, Human
gaggcagcugaggaaggaugcugggg

SEQ ID NO: 160059 - RNA, 32 nt, Human
gaggcagcugccagccggccugggcagucuug

SEQ ID NO: 160060 - RNA, 25 nt, Human
gaggcagcugccuucccucuccucc

SEQ ID NO: 160061 - RNA, 32 nt, Human
gaggcagcugcugacccagcuguggacugugc

SEQ ID NO: 160062 - RNA, 32 nt, Human
gaggcagcugggccuuugucuccugggcaccg

SEQ ID NO: 160063 - RNA, 32 nt, Human
gaggcagcuguccuccccagcccuguggaaag

SEQ ID NO: 160064 - RNA, 32 nt, Human
gaggcagcugugucccccagacauagccugga

SEQ ID NO: 160065 - RNA, 21 nt, Human
gaggcaggaaaaucacuugaa

SEQ ID NO: 160066 - RNA, 22 nt, Human
gaggcaggaaaaucacuugaac

SEQ ID NO: 160067 - RNA, 32 nt, Human
gaggcaggaaaaucacuugaacucgggaggca

SEQ ID NO: 160068 - RNA, 21 nt, Human
gaggcaggaaaaucgcuugaa

SEQ ID NO: 160069 - RNA, 22 nt, Human
gaggcaggaaaaucgcuugaac

SEQ ID NO: 160070 - RNA, 21 nt, Human
gaggcaggaaaauugcuugaa

SEQ ID NO: 160071 - RNA, 32 nt, Human
gaggcaggaacccuggagguugagguugcagu

SEQ ID NO: 160072 - RNA, 22 nt, Human
gaggcaggaagaaucgcuugaa

SEQ ID NO: 160073 - RNA, 22 nt, Human
gaggcaggaagaauugcuugaa

SEQ ID NO: 160074 - RNA, 23 nt, Human
gaggcaggaagaggggccugagg

SEQ ID NO: 160075 - RNA, 21 nt, Human
gaggcaggaagauagcuugag

SEQ ID NO: 160076 - RNA, 21 nt, Human
gaggcaggaagaucacuugaa

SEQ ID NO: 160077 - RNA, 21 nt, Human
gaggcaggaagauugcuugaa

SEQ ID NO: 160078 - RNA, 32 nt, Human
gaggcaggaagggagagaagcaaugccucgac

SEQ ID NO: 160079 - RNA, 32 nt, Human
gaggcaggaagggagagucagagagagaaugg

SEQ ID NO: 160080 - RNA, 22 nt, Human
gaggcaggagaaaucacuugaa

SEQ ID NO: 160081 - RNA, 21 nt, Human
gaggcaggagaaaugcuugaa

SEQ ID NO: 160082 - RNA, 22 nt, Human
gaggcaggagaaccgcuuaaac

SEQ ID NO: 160083 - RNA, 21 nt, Human
gaggcaggagaaccgcuugaa

SEQ ID NO: 160084 - RNA, 22 nt, Human
gaggcaggagaaccgcuugaac

SEQ ID NO: 160085 - RNA, 21 nt, Human
gaggcaggagaacuacuugaa

SEQ ID NO: 160086 - RNA, 22 nt, Human
gaggcaggagaacuacuugaac

SEQ ID NO: 160087 - RNA, 21 nt, Human
gaggcaggagaacugcuugaa

SEQ ID NO: 160088 - RNA, 22 nt, Human
gaggcaggagaacugcuugaac

SEQ ID NO: 160089 - RNA, 21 nt, Human
gaggcaggagaauaacuggaa

SEQ ID NO: 160090 - RNA, 21 nt, Human
gaggcaggagaauagccugaa

SEQ ID NO: 160091 - RNA, 22 nt, Human
gaggcaggagaauagccugaac

SEQ ID NO: 160092 - RNA, 21 nt, Human
gaggcaggagaauagcgugaa

SEQ ID NO: 160093 - RNA, 21 nt, Human
gaggcaggagaauagcuggaa

SEQ ID NO: 160094 - RNA, 21 nt, Human
gaggcaggagaauagcuugaa

SEQ ID NO: 160095 - RNA, 22 nt, Human
gaggcaggagaauagcuugaac

SEQ ID NO: 160096 - RNA, 21 nt, Human
gaggcaggagaauaucuugaa

SEQ ID NO: 160097 - RNA, 22 nt, Human
gaggcaggagaaucaauugaac

SEQ ID NO: 160098 - RNA, 22 nt, Human
gaggcaggagaaucaccugaac

SEQ ID NO: 160099 - RNA, 22 nt, Human
gaggcaggagaaucacuagaac

SEQ ID NO: 160100 - RNA, 22 nt, Human
gaggcaggagaaucacucgaac

SEQ ID NO: 160101 - RNA, 22 nt, Human
gaggcaggagaaucacucggac

SEQ ID NO: 160102 - RNA, 22 nt, Human
gaggcaggagaaucacuuaaac

SEQ ID NO: 160103 - RNA, 21 nt, Human
gaggcaggagaaucacuugaa

SEQ ID NO: 160104 - RNA, 22 nt, Human
gaggcaggagaaucacuugaac

SEQ ID NO: 160105 - RNA, 32 nt, Human
gaggcaggagaaucacuugaacucaggaggcg

SEQ ID NO: 160106 - RNA, 32 nt, Human
gaggcaggagaaucacuugaacucaggaggug

SEQ ID NO: 160107 - RNA, 32 nt, Human
gaggcaggagaaucacuugaacucagguggca

SEQ ID NO: 160108 - RNA, 32 nt, Human
gaggcaggagaaucacuugaacucgggaggcg

SEQ ID NO: 160109 - RNA, 32 nt, Human
gaggcaggagaaucacuugaacucgggaggug

SEQ ID NO: 160110 - RNA, 22 nt, Human
gaggcaggagaaucacuugaau

SEQ ID NO: 160111 - RNA, 22 nt, Human
gaggcaggagaaucacuugcac

SEQ ID NO: 160112 - RNA, 32 nt, Human
gaggcaggagaaucacuugcacuccggaggua

SEQ ID NO: 160113 - RNA, 22 nt, Human
gaggcaggagaaucacuuggac

SEQ ID NO: 160114 - RNA, 22 nt, Human
gaggcaggagaaucacuuguac

SEQ ID NO: 160115 - RNA, 32 nt, Human
gaggcaggagaaucacuuucacuuaaacccag

SEQ ID NO: 160116 - RNA, 32 nt, Human
gaggcaggagaaucagagguugcagugaaccg

SEQ ID NO: 160117 - RNA, 22 nt, Human
gaggcaggagaaucaguugaac

SEQ ID NO: 160118 - RNA, 22 nt, Human
gaggcaggagaaucaucugaac

SEQ ID NO: 160119 - RNA, 22 nt, Human
gaggcaggagaaucauuugaac

SEQ ID NO: 160120 - RNA, 22 nt, Human
gaggcaggagaaucgccugaac

SEQ ID NO: 160121 - RNA, 22 nt, Human
gaggcaggagaaucgcuagaac

SEQ ID NO: 160122 - RNA, 22 nt, Human
gaggcaggagaaucgcuggaac

SEQ ID NO: 160123 - RNA, 22 nt, Human
gaggcaggagaaucgcuuaaac

SEQ ID NO: 160124 - RNA, 21 nt, Human
gaggcaggagaaucgcuugaa

SEQ ID NO: 160125 - RNA, 22 nt, Human
gaggcaggagaaucgcuugaac

SEQ ID NO: 160126 - RNA, 22 nt, Human
gaggcaggagaaucgcuugaau

SEQ ID NO: 160127 - RNA, 22 nt, Human
gaggcaggagaaucgcuugagc

SEQ ID NO: 160128 - RNA, 22 nt, Human
gaggcaggagaaucgcuuggac

SEQ ID NO: 160129 - RNA, 22 nt, Human
gaggcaggagaaucguuugaac

SEQ ID NO: 160130 - RNA, 22 nt, Human
gaggcaggagaaucucuugaac

SEQ ID NO: 160131 - RNA, 21 nt, Human
gaggcaggagaauggccugaa

SEQ ID NO: 160132 - RNA, 22 nt, Human
gaggcaggagaauggccugaac

SEQ ID NO: 160133 - RNA, 21 nt, Human
gaggcaggagaauggcucgaa

SEQ ID NO: 160134 - RNA, 22 nt, Human
gaggcaggagaauggcucgaac

SEQ ID NO: 160135 - RNA, 22 nt, Human
gaggcaggagaauggcuuaaac

SEQ ID NO: 160136 - RNA, 21 nt, Human
gaggcaggagaauggcuugaa

SEQ ID NO: 160137 - RNA, 22 nt, Human
gaggcaggagaauggcuugaac

SEQ ID NO: 160138 - RNA, 19 nt, Human
gaggcaggagaauggggag

SEQ ID NO: 160139 - RNA, 21 nt, Human
gaggcaggagaauuacuugaa

SEQ ID NO: 160140 - RNA, 22 nt, Human
gaggcaggagaauuacuugaac

SEQ ID NO: 160141 - RNA, 22 nt, Human
gaggcaggagaauugcucaaac

SEQ ID NO: 160142 - RNA, 22 nt, Human
gaggcaggagaauugcuggaac

SEQ ID NO: 160143 - RNA, 21 nt, Human
gaggcaggagaauugcuugaa

SEQ ID NO: 160144 - RNA, 22 nt, Human
gaggcaggagaauugcuugaac

SEQ ID NO: 160145 - RNA, 22 nt, Human
gaggcaggagacucgcuugaac

SEQ ID NO: 160146 - RNA, 32 nt, Human
gaggcaggagagaagaauugggcagauucuuu

SEQ ID NO: 160147 - RNA, 23 nt, Human
gaggcaggagagaaucgcuugaa

SEQ ID NO: 160148 - RNA, 22 nt, Human
gaggcaggagagucacuugaac

SEQ ID NO: 160149 - RNA, 22 nt, Human
gaggcaggagauucgccugaac

SEQ ID NO: 160150 - RNA, 22 nt, Human
gaggcaggagauucgcuugaac

SEQ ID NO: 160151 - RNA, 21 nt, Human
gaggcaggagcauugcuugaa

SEQ ID NO: 160152 - RNA, 18 nt, Human
gaggcaggagcccugggg

SEQ ID NO: 160153 - RNA, 21 nt, Human
gaggcaggaggauagcuugag

SEQ ID NO: 160154 - RNA, 21 nt, Human
gaggcaggaggaucacuugaa

SEQ ID NO: 160155 - RNA, 32 nt, Human
gaggcaggaggaucacuugaguccagaaguuu

SEQ ID NO: 160156 - RNA, 32 nt, Human
gaggcaggaggaucacuugaguccaggaguuu

SEQ ID NO: 160157 - RNA, 21 nt, Human
gaggcaggaggaucgcuugaa

SEQ ID NO: 160158 - RNA, 21 nt, Human
gaggcaggaggauugcuugaa

SEQ ID NO: 160159 - RNA, 32 nt, Human
gaggcaggaggauuguuugaggccagaaauuu

SEQ ID NO: 160160 - RNA, 19 nt, Human
gaggcaggaggguccccca

SEQ ID NO: 160161 - RNA, 32 nt, Human
gaggcaggagggucccccacacccucaggcuc

SEQ ID NO: 160162 - RNA, 21 nt, Human
gaggcaggauaaucacuugaa

SEQ ID NO: 160163 - RNA, 22 nt, Human
gaggcaggauaaucacuugaac

SEQ ID NO: 160164 - RNA, 32 nt, Human
gaggcaggcagaccugggccucccaggaugga

SEQ ID NO: 160165 - RNA, 21 nt, Human
gaggcaggcagauaacuugag

SEQ ID NO: 160166 - RNA, 22 nt, Human
gaggcaggcagaucacaagguc

SEQ ID NO: 160167 - RNA, 32 nt, Human
gaggcaggcagaucacaugaggucaggaguuu

SEQ ID NO: 160168 - RNA, 22 nt, Human
gaggcaggcagaucacgggguc

SEQ ID NO: 160169 - RNA, 21 nt, Human
gaggcaggcagaucacuugaa

SEQ ID NO: 160170 - RNA, 32 nt, Human
gaggcaggcagaucacuugaacucaggaguuu

SEQ ID NO: 160171 - RNA, 21 nt, Human
gaggcaggcauguauauucca

SEQ ID NO: 160172 - RNA, 32 nt, Human
gaggcaggcccaguccuccuccagaaaauaag

SEQ ID NO: 160173 - RNA, 32 nt, Human
gaggcaggccgaaguccgcagccccggcucgg

SEQ ID NO: 160174 - RNA, 21 nt, Human
gaggcaggccugggccaggca

SEQ ID NO: 160175 - RNA, 22 nt, Human
gaggcaggcgaaucacgagguc

SEQ ID NO: 160176 - RNA, 21 nt, Human
gaggcaggcgaauugcuugaa

SEQ ID NO: 160177 - RNA, 32 nt, Human
gaggcaggcgaggucccugauucacucacuca

SEQ ID NO: 160178 - RNA, 32 nt, Human
gaggcaggcggacacuugagcccagggguuca

SEQ ID NO: 160179 - RNA, 22 nt, Human
gaggcaggcggaccacgagguc

SEQ ID NO: 160180 - RNA, 32 nt, Human
gaggcaggcggauagccugagcacaggaguug

SEQ ID NO: 160181 - RNA, 22 nt, Human
gaggcaggcggaucacaagguc

SEQ ID NO: 160182 - RNA, 32 nt, Human
gaggcaggcggaucacaugaggucaggaguuc

SEQ ID NO: 160183 - RNA, 22 nt, Human
gaggcaggcggaucacgagguc

SEQ ID NO: 160184 - RNA, 21 nt, Human
gaggcaggcggaucacuugaa

SEQ ID NO: 160185 - RNA, 22 nt, Human
gaggcaggcggaucaugagguc

SEQ ID NO: 160186 - RNA, 22 nt, Human
gaggcaggcggcucacgagguc

SEQ ID NO: 160187 - RNA, 32 nt, Human
gaggcaggcgggaggccaggggugcagaauug

SEQ ID NO: 160188 - RNA, 32 nt, Human
gaggcaggcuguggccaggcucaggcccugac

SEQ ID NO: 160189 - RNA, 32 nt, Human
gaggcaggcuuccuauggauguuggaguaccu

SEQ ID NO: 160190 - RNA, 22 nt, Human
gaggcagggagaaucgcuugaa

SEQ ID NO: 160191 - RNA, 22 nt, Human
gaggcagggagaauugcuugaa

SEQ ID NO: 160192 - RNA, 32 nt, Human
gaggcagggagccaccuccucagcuucccuga

SEQ ID NO: 160193 - RNA, 32 nt, Human
gaggcagggagcggggugcugaaggaauccua

SEQ ID NO: 160194 - RNA, 32 nt, Human
gaggcagggaggauccauugagcccaggaguc

SEQ ID NO: 160195 - RNA, 32 nt, Human
gaggcagggaggcagggaggcagggaggaacg

SEQ ID NO: 160196 - RNA, 22 nt, Human
gaggcagggcaggggcuccagg

SEQ ID NO: 160197 - RNA, 32 nt, Human
gaggcagggccugcuugucaugagcugcacuc

SEQ ID NO: 160198 - RNA, 21 nt, Human
gaggcaggggaacacaagguc

SEQ ID NO: 160199 - RNA, 21 nt, Human
gaggcaggggaaucacuugaa

SEQ ID NO: 160200 - RNA, 21 nt, Human
gaggcaggggaaucgcuugaa

SEQ ID NO: 160201 - RNA, 21 nt, Human
gaggcaggggaauggcuugaa

SEQ ID NO: 160202 - RNA, 21 nt, Human
gaggcaggggaauugcuugaa

SEQ ID NO: 160203 - RNA, 32 nt, Human
gaggcaggggagagagaauggcaucucgcgug

SEQ ID NO: 160204 - RNA, 32 nt, Human
gaggcaggggcagaggugacgacagugccccu

SEQ ID NO: 160205 - RNA, 32 nt, Human
gaggcaggggcggguggaucaccugaggucag

SEQ ID NO: 160206 - RNA, 32 nt, Human
gaggcagggggagggggaggaggaggagcccg

SEQ ID NO: 160207 - RNA, 32 nt, Human
gaggcaggggugcugagaaggcggcugcuggg

SEQ ID NO: 160208 - RNA, 32 nt, Human
gaggcagggguugaagccagggaguggucagc

SEQ ID NO: 160209 - RNA, 19 nt, Human
gaggcagggguugcaguga

SEQ ID NO: 160210 - RNA, 21 nt, Human
gaggcagggguugcagugagc

SEQ ID NO: 160211 - RNA, 32 nt, Human
gaggcagggucucacucugguugcccaggcug

SEQ ID NO: 160212 - RNA, 20 nt, Human
gaggcagggucucacucugu

SEQ ID NO: 160213 - RNA, 32 nt, Human
gaggcagggucugagccuugccuggggccccg

SEQ ID NO: 160214 - RNA, 32 nt, Human
gaggcagggucugugcuccacucugagggccc

SEQ ID NO: 160215 - RNA, 21 nt, Human
gaggcaggguuucaccauguu

SEQ ID NO: 160216 - RNA, 22 nt, Human
gaggcaggguuucaccauguua

SEQ ID NO: 160217 - RNA, 22 nt, Human
gaggcaggguuucaccauguug

SEQ ID NO: 160218 - RNA, 23 nt, Human
gaggcaggguuucaccauguugg

SEQ ID NO: 160219 - RNA, 21 nt, Human
gaggcagguacaucaccugag

SEQ ID NO: 160220 - RNA, 22 nt, Human
gaggcagguagaucaugagguc

SEQ ID NO: 160221 - RNA, 32 nt, Human
gaggcaggucgggcugccagcccagcuggccg

SEQ ID NO: 160222 - RNA, 32 nt, Human
gaggcaggucucccagcucagaccccgccccg

SEQ ID NO: 160223 - RNA, 21 nt, Human
gaggcaggugaaucacuugaa

SEQ ID NO: 160224 - RNA, 22 nt, Human
gaggcaggugaaucacuugaac

SEQ ID NO: 160225 - RNA, 21 nt, Human
gaggcaggugaaucgcuugaa

SEQ ID NO: 160226 - RNA, 22 nt, Human
gaggcaggugaaucgcuugaac

SEQ ID NO: 160227 - RNA, 19 nt, Human
gaggcagguggaucacaag

SEQ ID NO: 160228 - RNA, 22 nt, Human
gaggcagguggaucacaagguc

SEQ ID NO: 160229 - RNA, 22 nt, Human
gaggcagguggaucacaagguu

SEQ ID NO: 160230 - RNA, 22 nt, Human
gaggcagguggaucacgagguc

SEQ ID NO: 160231 - RNA, 22 nt, Human
gaggcagguggaucacgauguc

SEQ ID NO: 160232 - RNA, 24 nt, Human
gaggcagguggaucacgugagguc

SEQ ID NO: 160233 - RNA, 24 nt, Human
gaggcagguggaucacucaagguc

SEQ ID NO: 160234 - RNA, 22 nt, Human
gaggcagguggaucacugaggu

SEQ ID NO: 160235 - RNA, 32 nt, Human
gaggcagguggaucacuugagcucaggagcuu

SEQ ID NO: 160236 - RNA, 32 nt, Human
gaggcagguggaucacuugagcucaggaguuc

SEQ ID NO: 160237 - RNA, 32 nt, Human
gaggcagguggaucacuugagcucaggaguuu

SEQ ID NO: 160238 - RNA, 21 nt, Human
gaggcagguggaucauagguc

SEQ ID NO: 160239 - RNA, 22 nt, Human
gaggcagguggaucaugagguc

SEQ ID NO: 160240 - RNA, 32 nt, Human
gaggcagguggaucgcuugagcucaggaguuc

SEQ ID NO: 160241 - RNA, 22 nt, Human
gaggcagguggaucgugagguc

SEQ ID NO: 160242 - RNA, 21 nt, Human
gaggcagguggaugacaaggu

SEQ ID NO: 160243 - RNA, 21 nt, Human
gaggcagguggauugcuugaa

SEQ ID NO: 160244 - RNA, 32 nt, Human
gaggcagguggguggagggggaugcugggaau

SEQ ID NO: 160245 - RNA, 32 nt, Human
gaggcagguggguggagggggaugcugggagu

SEQ ID NO: 160246 - RNA, 32 nt, Human
gaggcagguugaaggauucacaggguaagauc

SEQ ID NO: 160247 - RNA, 21 nt, Human
gaggcaguagaaucacuugaa

SEQ ID NO: 160248 - RNA, 21 nt, Human
gaggcaguagaaucauuugaa

SEQ ID NO: 160249 - RNA, 21 nt, Human
gaggcaguagaaucgcuugaa

SEQ ID NO: 160250 - RNA, 32 nt, Human
gaggcaguauaggagagagagcaaggauugag

SEQ ID NO: 160251 - RNA, 21 nt, Human
gaggcaguauccugcccugga

SEQ ID NO: 160252 - RNA, 32 nt, Human
gaggcagucugggcacuuuucugcaaguccac

SEQ ID NO: 160253 - RNA, 32 nt, Human
gaggcagucuguccuugagacuaacaaaguca

SEQ ID NO: 160254 - RNA, 32 nt, Human
gaggcagugcagccacagcucccccggccuuc

SEQ ID NO: 160255 - RNA, 32 nt, Human
gaggcagugcaggaggccugugggagcagccu

SEQ ID NO: 160256 - RNA, 32 nt, Human
gaggcagugcugcugcucccgcccgaggcuca

SEQ ID NO: 160257 - RNA, 32 nt, Human
gaggcaguggguggagagagaauggggagacg

SEQ ID NO: 160258 - RNA, 32 nt, Human
gaggcaguugaagaguugaggaaagguuuuuc

SEQ ID NO: 160259 - RNA, 32 nt, Human
gaggcaguuugcaaucccaugacaacuggauu

SEQ ID NO: 160260 - RNA, 32 nt, Human
gaggcauaaauacuucaaaguccccauuggcc

SEQ ID NO: 160261 - RNA, 32 nt, Human
gaggcauaagccaccaugcccagccacgugaa

SEQ ID NO: 160262 - RNA, 32 nt, Human
gaggcauaccggaagaggaugcaucagcuccu

SEQ ID NO: 160263 - RNA, 22 nt, Human
gaggcauagaauacacauuuuu

SEQ ID NO: 160264 - RNA, 32 nt, Human
gaggcauagguuaccacccccaccccggcccg

SEQ ID NO: 160265 - RNA, 32 nt, Human
gaggcauagucgcccccagcuggguugugcuc

SEQ ID NO: 160266 - RNA, 32 nt, Human
gaggcaucagccacugugucuuucauuuauuc

SEQ ID NO: 160267 - RNA, 32 nt, Human
gaggcauccugaagcauuagaaugauuccaac

SEQ ID NO: 160268 - RNA, 32 nt, Human
gaggcaugaacacacauggaugcacacacaca

SEQ ID NO: 160269 - RNA, 32 nt, Human
gaggcaugagccaccgugcccagccucaaagc

SEQ ID NO: 160270 - RNA, 32 nt, Human
gaggcaugcaguugggagguccuggcucgguu

SEQ ID NO: 160271 - RNA, 32 nt, Human
gaggcauggagaacaagaaaguugaguucgaa

SEQ ID NO: 160272 - RNA, 22 nt, Human
gaggcauggagaaucgcuugaa

SEQ ID NO: 160273 - RNA, 32 nt, Human
gaggcauggaggagggaggcgugggaugggaa

SEQ ID NO: 160274 - RNA, 32 nt, Human
gaggcaugggucucacuguguugcccaggcug

SEQ ID NO: 160275 - RNA, 32 nt, Human
gaggcauuagcagcagcaccucugggucaaca

SEQ ID NO: 160276 - RNA, 32 nt, Human
gaggcauucaaggaugcacagcucaaguauuu

SEQ ID NO: 160277 - RNA, 32 nt, Human
gaggcauucagccaucaugauguggccuuuac

SEQ ID NO: 160278 - RNA, 18 nt, Human
gaggcauuccagaaggac

SEQ ID NO: 160279 - RNA, 32 nt, Human
gaggcauuuaauuaaggcucuacuuccagguu

SEQ ID NO: 160280 - RNA, 32 nt, Human
gaggcauuuuuaucuucugucacuacuacuua

SEQ ID NO: 160281 - RNA, 32 nt, Human
gaggccaaaaguuugagaccagccugggcaac

SEQ ID NO: 160282 - RNA, 27 nt, Human
gaggccaaagcaggagaauugcuugaa

SEQ ID NO: 160283 - RNA, 22 nt, Human
gaggccaaagcaggaggaucac

SEQ ID NO: 160284 - RNA, 27 nt, Human
gaggccaaagcaggaggaucgcuugag

SEQ ID NO: 160285 - RNA, 22 nt, Human
gaggccaaagcaggcggaucac

SEQ ID NO: 160286 - RNA, 22 nt, Human
gaggccaaagcagguggauuac

SEQ ID NO: 160287 - RNA, 32 nt, Human
gaggccaaaggccaacuguacucccaaaggca

SEQ ID NO: 160288 - RNA, 32 nt, Human
gaggccaaagugggaggauugcuuggcucaag

SEQ ID NO: 160289 - RNA, 32 nt, Human
gaggccaaagugggccgaucaccugagcucag

SEQ ID NO: 160290 - RNA, 32 nt, Human
gaggccaaagugggcggaucaccugaggccag

SEQ ID NO: 160291 - RNA, 32 nt, Human
gaggccaaaguggguggaucaccugaggucag

SEQ ID NO: 160292 - RNA, 26 nt, Human
gaggccaaaugggagaauugcuugaa

SEQ ID NO: 160293 - RNA, 32 nt, Human
gaggccaacacaggaggaucacuugagacugg

SEQ ID NO: 160294 - RNA, 32 nt, Human
gaggccaacagcacgcagcugaagagcagggc

SEQ ID NO: 160295 - RNA, 32 nt, Human
gaggccaaccccuuuccaaggcugcuuggaaa

SEQ ID NO: 160296 - RNA, 32 nt, Human
gaggccaacguggauggaucaccugaggucag

SEQ ID NO: 160297 - RNA, 32 nt, Human
gaggccaagaagaggaagauugcuugagccca

SEQ ID NO: 160298 - RNA, 32 nt, Human
gaggccaagaagcagaagcuaagggagggggu

SEQ ID NO: 160299 - RNA, 22 nt, Human
gaggccaagacagaaggaucac

SEQ ID NO: 160300 - RNA, 22 nt, Human
gaggccaagacaggaggaucac

SEQ ID NO: 160301 - RNA, 22 nt, Human
gaggccaagacaggcagaucac

SEQ ID NO: 160302 - RNA, 22 nt, Human
gaggccaagacagguagaucac

SEQ ID NO: 160303 - RNA, 22 nt, Human
gaggccaagacagguggaucac

SEQ ID NO: 160304 - RNA, 32 nt, Human
gaggccaagacagguggaucaccugagguuag

SEQ ID NO: 160305 - RNA, 22 nt, Human
gaggccaagacgggcggaucac

SEQ ID NO: 160306 - RNA, 32 nt, Human
gaggccaagacgggcggaucaccugaggugag

SEQ ID NO: 160307 - RNA, 22 nt, Human
gaggccaagacgggugaaucac

SEQ ID NO: 160308 - RNA, 32 nt, Human
gaggccaagagucugagaccagccuggcuaac

SEQ ID NO: 160309 - RNA, 32 nt, Human
gaggccaagaguuaaagaccagccuggucaau

SEQ ID NO: 160310 - RNA, 32 nt, Human
gaggccaagaguucaagaccagccugggcaac

SEQ ID NO: 160311 - RNA, 32 nt, Human
gaggccaagaguuucagaccagccugggcaac

SEQ ID NO: 160312 - RNA, 32 nt, Human
gaggccaagauggcugcugccugcucauggcc

SEQ ID NO: 160313 - RNA, 32 nt, Human
gaggccaagaugggcggaucaccugaggucag

SEQ ID NO: 160314 - RNA, 32 nt, Human
gaggccaagauggguggaucaccugaggucag

SEQ ID NO: 160315 - RNA, 32 nt, Human
gaggccaagcagccucgcccagaagcugaugu

SEQ ID NO: 160316 - RNA, 24 nt, Human
gaggccaagccugggggcuggggg

SEQ ID NO: 160317 - RNA, 32 nt, Human
gaggccaagcuaugugcuagagcccaggccag

SEQ ID NO: 160318 - RNA, 19 nt, Human
gaggccaagcuggaucuga

SEQ ID NO: 160319 - RNA, 22 nt, Human
gaggccaaggaaggcagaucac

SEQ ID NO: 160320 - RNA, 32 nt, Human
gaggccaaggacaguggaucaccugaggucag

SEQ ID NO: 160321 - RNA, 32 nt, Human
gaggccaaggagaguggaucaccugaggucgg

SEQ ID NO: 160322 - RNA, 24 nt, Human
gaggccaaggagggaggaucgcuu

SEQ ID NO: 160323 - RNA, 32 nt, Human
gaggccaaggagggcaaaucaccugagaucag

SEQ ID NO: 160324 - RNA, 32 nt, Human
gaggccaaggagggcagaucaccugaggucag

SEQ ID NO: 160325 - RNA, 32 nt, Human
gaggccaaggaggguggaucaccugaggucag

SEQ ID NO: 160326 - RNA, 20 nt, Human
gaggccaaggagguggauca

SEQ ID NO: 160327 - RNA, 27 nt, Human
gaggccaaggcaaaaggauugcuugag

SEQ ID NO: 160328 - RNA, 22 nt, Human
gaggccaaggcaagaggaucac

SEQ ID NO: 160329 - RNA, 22 nt, Human
gaggccaaggcaagcagaucac

SEQ ID NO: 160330 - RNA, 22 nt, Human
gaggccaaggcaaggggaucac

SEQ ID NO: 160331 - RNA, 27 nt, Human
gaggccaaggcacaagaaucgcuugaa

SEQ ID NO: 160332 - RNA, 32 nt, Human
gaggccaaggcacauaggucacuugaggucaa

SEQ ID NO: 160333 - RNA, 32 nt, Human
gaggccaaggcacauaggucacuugaggucag

SEQ ID NO: 160334 - RNA, 27 nt, Human
gaggccaaggcacgagaauugcuugaa

SEQ ID NO: 160335 - RNA, 24 nt, Human
gaggccaaggcagaaggauauuga

SEQ ID NO: 160336 - RNA, 22 nt, Human
gaggccaaggcagaaggaucac

SEQ ID NO: 160337 - RNA, 22 nt, Human
gaggccaaggcagauggaacac

SEQ ID NO: 160338 - RNA, 22 nt, Human
gaggccaaggcagauggaucau

SEQ ID NO: 160339 - RNA, 24 nt, Human
gaggccaaggcagcauugcuugaa

SEQ ID NO: 160340 - RNA, 22 nt, Human
gaggccaaggcaggaagaucac

SEQ ID NO: 160341 - RNA, 27 nt, Human
gaggccaaggcaggagaagcgcuugag

SEQ ID NO: 160342 - RNA, 22 nt, Human
gaggccaaggcaggagaaucac

SEQ ID NO: 160343 - RNA, 27 nt, Human
gaggccaaggcaggagaaucgcucgaa

SEQ ID NO: 160344 - RNA, 27 nt, Human
gaggccaaggcaggagaaucgcuugaa

SEQ ID NO: 160345 - RNA, 27 nt, Human
gaggccaaggcaggagaauugcucgaa

SEQ ID NO: 160346 - RNA, 22 nt, Human
gaggccaaggcaggaggaucac

SEQ ID NO: 160347 - RNA, 27 nt, Human
gaggccaaggcaggaggaucgcuugag

SEQ ID NO: 160348 - RNA, 22 nt, Human
gaggccaaggcaggcagaccac

SEQ ID NO: 160349 - RNA, 22 nt, Human
gaggccaaggcaggcagaucac

SEQ ID NO: 160350 - RNA, 22 nt, Human
gaggccaaggcaggcagaucau

SEQ ID NO: 160351 - RNA, 22 nt, Human
gaggccaaggcaggcagaucgc

SEQ ID NO: 160352 - RNA, 27 nt, Human
gaggccaaggcaggcagaucgcuugag

SEQ ID NO: 160353 - RNA, 25 nt, Human
gaggccaaggcaggcagguggauca

SEQ ID NO: 160354 - RNA, 32 nt, Human
gaggccaaggcaggcagguggaucaccugagg

SEQ ID NO: 160355 - RNA, 22 nt, Human
gaggccaaggcaggcauaucac

SEQ ID NO: 160356 - RNA, 22 nt, Human
gaggccaaggcaggcggaccac

SEQ ID NO: 160357 - RNA, 22 nt, Human
gaggccaaggcaggcggaucac

SEQ ID NO: 160358 - RNA, 22 nt, Human
gaggccaaggcagggggaucac

SEQ ID NO: 160359 - RNA, 22 nt, Human
gaggccaaggcagguagaucac

SEQ ID NO: 160360 - RNA, 21 nt, Human
gaggccaaggcagguggauca

SEQ ID NO: 160361 - RNA, 22 nt, Human
gaggccaaggcagguggaucac

SEQ ID NO: 160362 - RNA, 32 nt, Human
gaggccaaggcagguggaucacuugggucggg

SEQ ID NO: 160363 - RNA, 22 nt, Human
gaggccaaggcagguggaucau

SEQ ID NO: 160364 - RNA, 22 nt, Human
gaggccaaggcagguggaucgc

SEQ ID NO: 160365 - RNA, 27 nt, Human
gaggccaaggcagguggaucgcuugag

SEQ ID NO: 160366 - RNA, 23 nt, Human
gaggccaaggcaugagaaucgcu

SEQ ID NO: 160367 - RNA, 27 nt, Human
gaggccaaggcaugagaaucgcuugaa

SEQ ID NO: 160368 - RNA, 22 nt, Human
gaggccaaggccagcggaucac

SEQ ID NO: 160369 - RNA, 22 nt, Human
gaggccaaggcggacggaucac

SEQ ID NO: 160370 - RNA, 22 nt, Human
gaggccaaggcggauggaucac

SEQ ID NO: 160371 - RNA, 22 nt, Human
gaggccaaggcgggcaaaucac

SEQ ID NO: 160372 - RNA, 22 nt, Human
gaggccaaggcgggcagaucac

SEQ ID NO: 160373 - RNA, 22 nt, Human
gaggccaaggcgggcggaucac

SEQ ID NO: 160374 - RNA, 32 nt, Human
gaggccaaggcgggcguaucaccugaggucag

SEQ ID NO: 160375 - RNA, 32 nt, Human
gaggccaaggcgggucaaucaccugaggucag

SEQ ID NO: 160376 - RNA, 22 nt, Human
gaggccaaggcgggugaaucac

SEQ ID NO: 160377 - RNA, 32 nt, Human
gaggccaaggcgggugaaucaccugaggucag

SEQ ID NO: 160378 - RNA, 32 nt, Human
gaggccaaggcgggugcaucaccugaggucgg

SEQ ID NO: 160379 - RNA, 22 nt, Human
gaggccaaggcggguggaucac

SEQ ID NO: 160380 - RNA, 32 nt, Human
gaggccaaggcggguggaucaccugagaucag

SEQ ID NO: 160381 - RNA, 32 nt, Human
gaggccaaggcggguggaucaccugaggccag

SEQ ID NO: 160382 - RNA, 32 nt, Human
gaggccaaggcggguggaucaccugaggucac

SEQ ID NO: 160383 - RNA, 32 nt, Human
gaggccaaggcggguggaucaccugaggucag

SEQ ID NO: 160384 - RNA, 32 nt, Human
gaggccaaggcguguggaucaccugaggucag

SEQ ID NO: 160385 - RNA, 32 nt, Human
gaggccaaggcguguggauugcuuggcccagg

SEQ ID NO: 160386 - RNA, 22 nt, Human
gaggccaaggcuggcagaucac

SEQ ID NO: 160387 - RNA, 22 nt, Human
gaggccaaggcugguggaucac

SEQ ID NO: 160388 - RNA, 32 nt, Human
gaggccaagggaggcggaucaccugaggucag

SEQ ID NO: 160389 - RNA, 22 nt, Human
gaggccaagguaggcagaucac

SEQ ID NO: 160390 - RNA, 32 nt, Human
gaggccaaggugaguggaucaccugaggucag

SEQ ID NO: 160391 - RNA, 32 nt, Human
gaggccaaggugggaggaucaccugaggucag

SEQ ID NO: 160392 - RNA, 32 nt, Human
gaggccaaggugggcaaaucaccugaggucag

SEQ ID NO: 160393 - RNA, 32 nt, Human
gaggccaaggugggcagaucaccugaggucag

SEQ ID NO: 160394 - RNA, 32 nt, Human
gaggccaaggugggcggaucaccugagaucga

SEQ ID NO: 160395 - RNA, 32 nt, Human
gaggccaaggugggcggaucaccugagcucag

SEQ ID NO: 160396 - RNA, 32 nt, Human
gaggccaaggugggcggaucaccugaggucag

SEQ ID NO: 160397 - RNA, 32 nt, Human
gaggccaaggugggcggaucaccugaggucgg

SEQ ID NO: 160398 - RNA, 32 nt, Human
gaggccaaggugggcggaucaccugagguuag

SEQ ID NO: 160399 - RNA, 21 nt, Human
gaggccaagguggguggauca

SEQ ID NO: 160400 - RNA, 32 nt, Human
gaggccaagguggguggaucaccugagggcag

SEQ ID NO: 160401 - RNA, 32 nt, Human
gaggccaagguggguggaucaccugaggucag

SEQ ID NO: 160402 - RNA, 32 nt, Human
gaggccaagguggguggaucaccuguggucaa

SEQ ID NO: 160403 - RNA, 24 nt, Human
gaggccaagucugcagugagcuau

SEQ ID NO: 160404 - RNA, 20 nt, Human
gaggccaagugagggacugc

SEQ ID NO: 160405 - RNA, 18 nt, Human
gaggccaaguuggcugcu

SEQ ID NO: 160406 - RNA, 32 nt, Human
gaggccaaugcauguggaucaccugaggucag

SEQ ID NO: 160407 - RNA, 32 nt, Human
gaggccaauguggguggaucaccugaggucag

SEQ ID NO: 160408 - RNA, 32 nt, Human
gaggccacaaguuugagaccagccugggcaac

SEQ ID NO: 160409 - RNA, 32 nt, Human
gaggccacacaggcuggugggccccgaaugcc

SEQ ID NO: 160410 - RNA, 32 nt, Human
gaggccacagcaucuucuacaaaggacucaca

SEQ ID NO: 160411 - RNA, 32 nt, Human
gaggccacagccccagccuuaggccaggcccu

SEQ ID NO: 160412 - RNA, 18 nt, Human
gaggccacagcccuggga

SEQ ID NO: 160413 - RNA, 32 nt, Human
gaggccacagugagcuaugacuaugccacugu

SEQ ID NO: 160414 - RNA, 32 nt, Human
gaggccacaguucugugagcagaggaagagcu

SEQ ID NO: 160415 - RNA, 32 nt, Human
gaggccacaugcugaccagccugaugaggcaa

SEQ ID NO: 160416 - RNA, 32 nt, Human
gaggccacaugguggaggcagcgaugagaccu

SEQ ID NO: 160417 - RNA, 32 nt, Human
gaggccacauguagcugauuucagagauuugc

SEQ ID NO: 160418 - RNA, 23 nt, Human
gaggccaccaaccaaagucaguu

SEQ ID NO: 160419 - RNA, 32 nt, Human
gaggccaccagcugacucaccgccuaggaagg

SEQ ID NO: 160420 - RNA, 18 nt, Human
gaggccacccagauggac

SEQ ID NO: 160421 - RNA, 32 nt, Human
gaggccacccuccagcuuucucuuaucccagu

SEQ ID NO: 160422 - RNA, 22 nt, Human
gaggccacccugcugggccacu

SEQ ID NO: 160423 - RNA, 32 nt, Human
gaggccaccugcagccuccacccggcucucac

SEQ ID NO: 160424 - RNA, 18 nt, Human
gaggccacgaguauuuca

SEQ ID NO: 160425 - RNA, 32 nt, Human
gaggccacgccuggacccagagcugauguuug

SEQ ID NO: 160426 - RNA, 32 nt, Human
gaggccacgguggguggaucaccugaggucag

SEQ ID NO: 160427 - RNA, 32 nt, Human
gaggccacgugaggacacagugagaagguggc

SEQ ID NO: 160428 - RNA, 22 nt, Human
gaggccacgugcaguggcucac

SEQ ID NO: 160429 - RNA, 32 nt, Human
gaggccacucauuucagggaagcgaagggaag

SEQ ID NO: 160430 - RNA, 32 nt, Human
gaggccacugaagaggaggaggagggucuaga

SEQ ID NO: 160431 - RNA, 32 nt, Human
gaggccacugagccacccuuccagccccagcc

SEQ ID NO: 160432 - RNA, 20 nt, Human
gaggccacugcaacauuuua

SEQ ID NO: 160433 - RNA, 32 nt, Human
gaggccacugcacccuuucucggggaagauga

SEQ ID NO: 160434 - RNA, 32 nt, Human
gaggccacugcacugcucacuuguggcccagc

SEQ ID NO: 160435 - RNA, 32 nt, Human
gaggccacugggcuuucccccucccaggccuc

SEQ ID NO: 160436 - RNA, 32 nt, Human
gaggccacuguaggagccuccagggaguucuc

SEQ ID NO: 160437 - RNA, 24 nt, Human
gaggccagaaaagcugcccaguga

SEQ ID NO: 160438 - RNA, 24 nt, Human
gaggccagaaaagugaacugaguu

SEQ ID NO: 160439 - RNA, 32 nt, Human
gaggccagaaauuugagaccagccugggcaac

SEQ ID NO: 160440 - RNA, 32 nt, Human
gaggccagaaguucaagaucagccuggccaac

SEQ ID NO: 160441 - RNA, 32 nt, Human
gaggccagaaguuugagacuagccugggcaau

SEQ ID NO: 160442 - RNA, 21 nt, Human
gaggccagaccaggccagacu

SEQ ID NO: 160443 - RNA, 32 nt, Human
gaggccagacugcacaacacagugagaccucg

SEQ ID NO: 160444 - RNA, 21 nt, Human
gaggccagacugggcaggaga

SEQ ID NO: 160445 - RNA, 21 nt, Human
gaggccagagaaucgcuugaa

SEQ ID NO: 160446 - RNA, 32 nt, Human
gaggccagagacaaagcugugggagccaagaa

SEQ ID NO: 160447 - RNA, 22 nt, Human
gaggccagaggucgggccagcu

SEQ ID NO: 160448 - RNA, 32 nt, Human
gaggccagagguucaagaccagccugggcaac

SEQ ID NO: 160449 - RNA, 32 nt, Human
gaggccagagugagugacuuggagcuggaaaa

SEQ ID NO: 160450 - RNA, 32 nt, Human
gaggccagaguuuggugggggcagauggcagg

SEQ ID NO: 160451 - RNA, 24 nt, Human
gaggccagauuuuuaaagccagcu

SEQ ID NO: 160452 - RNA, 21 nt, Human
gaggccagcagccacccgaga

SEQ ID NO: 160453 - RNA, 32 nt, Human
gaggccagcaguuugagaccagccuggccaac

SEQ ID NO: 160454 - RNA, 32 nt, Human
gaggccagccagggcaacacagcaagacccca

SEQ ID NO: 160455 - RNA, 20 nt, Human
gaggccagccccgagccagc

SEQ ID NO: 160456 - RNA, 30 nt, Human
gaggccagccucuccaccuucugagccugc

SEQ ID NO: 160457 - RNA, 32 nt, Human
gaggccagccucuggcuuuucugccguggauu

SEQ ID NO: 160458 - RNA, 32 nt, Human
gaggccagccugaccaacguggagaaaugcca

SEQ ID NO: 160459 - RNA, 32 nt, Human
gaggccagccuggaucugucucucccuucccc

SEQ ID NO: 160460 - RNA, 21 nt, Human
gaggccagccuggccaacaug

SEQ ID NO: 160461 - RNA, 32 nt, Human
gaggccagccugggaaauauagugagacccug

SEQ ID NO: 160462 - RNA, 32 nt, Human
gaggccagccugggcaacacagcaagacccca

SEQ ID NO: 160463 - RNA, 21 nt, Human
gaggccagccugggcaacaua

SEQ ID NO: 160464 - RNA, 32 nt, Human
gaggccagccugggcaacauagagagacccca

SEQ ID NO: 160465 - RNA, 32 nt, Human
gaggccagccugggcaacauagugagaccccc

SEQ ID NO: 160466 - RNA, 32 nt, Human
gaggccagccugggggacuugacuaccuggac

SEQ ID NO: 160467 - RNA, 32 nt, Human
gaggccagcugcacuccugcacgggguuccua

SEQ ID NO: 160468 - RNA, 19 nt, Human
gaggccagcugggggccag

SEQ ID NO: 160469 - RNA, 32 nt, Human
gaggccagcugguaggcagccuggugaggggg

SEQ ID NO: 160470 - RNA, 32 nt, Human
gaggccagcugguugcuacgcagcaacaggaa

SEQ ID NO: 160471 - RNA, 23 nt, Human
gaggccagcugguuuugugagga

SEQ ID NO: 160472 - RNA, 21 nt, Human
gaggccaggaaagggucagcu

SEQ ID NO: 160473 - RNA, 17 nt, Human
gaggccaggaacauucc

SEQ ID NO: 160474 - RNA, 32 nt, Human
gaggccaggaauucgagaccagccuggcaaca

SEQ ID NO: 160475 - RNA, 32 nt, Human
gaggccaggaauucgagaccagccuggccaac

SEQ ID NO: 160476 - RNA, 32 nt, Human
gaggccaggaauucgagaccagccugggcagc

SEQ ID NO: 160477 - RNA, 32 nt, Human
gaggccaggaauuugaaaccagccugggcaaa

SEQ ID NO: 160478 - RNA, 23 nt, Human
gaggccaggaauuuuagaccagc

SEQ ID NO: 160479 - RNA, 32 nt, Human
gaggccaggacagaucacuugaggucaggagu

SEQ ID NO: 160480 - RNA, 32 nt, Human
gaggccaggagagaguauaaggggauagcagc

SEQ ID NO: 160481 - RNA, 24 nt, Human
gaggccaggagccagccacuggcu

SEQ ID NO: 160482 - RNA, 32 nt, Human
gaggccaggagccuccaugcaggagggagaga

SEQ ID NO: 160483 - RNA, 23 nt, Human
gaggccaggagcucgaaaccagu

SEQ ID NO: 160484 - RNA, 32 nt, Human
gaggccaggaggagcaguaugugcacagccga

SEQ ID NO: 160485 - RNA, 24 nt, Human
gaggccaggaggcccggaccaguu

SEQ ID NO: 160486 - RNA, 32 nt, Human
gaggccaggaggcggagcuugcagugagccga

SEQ ID NO: 160487 - RNA, 22 nt, Human
gaggccaggagggcagugagcu

SEQ ID NO: 160488 - RNA, 22 nt, Human
gaggccaggagggcugcugggg

SEQ ID NO: 160489 - RNA, 21 nt, Human
gaggccaggaggggagcugcu

SEQ ID NO: 160490 - RNA, 23 nt, Human
gaggccaggagggguccuggaga

SEQ ID NO: 160491 - RNA, 32 nt, Human
gaggccaggagguccaggccgcaaugagaugu

SEQ ID NO: 160492 - RNA, 32 nt, Human
gaggccaggagguggagucuagccugggaaac

SEQ ID NO: 160493 - RNA, 32 nt, Human
gaggccaggagguugaggcugcagugagcugu

SEQ ID NO: 160494 - RNA, 32 nt, Human
gaggccaggaguauaagagcagccugggcaaa

SEQ ID NO: 160495 - RNA, 32 nt, Human
gaggccaggagucccagagcagccugggcaac

SEQ ID NO: 160496 - RNA, 23 nt, Human
gaggccaggagugggauucagcu

SEQ ID NO: 160497 - RNA, 32 nt, Human
gaggccaggaguuaaagagcagccuggcuaac

SEQ ID NO: 160498 - RNA, 32 nt, Human
gaggccaggaguuagagaccagccuggccaac

SEQ ID NO: 160499 - RNA, 32 nt, Human
gaggccaggaguuagagacugcagugagcuau

SEQ ID NO: 160500 - RNA, 23 nt, Human
gaggccaggaguucaagaccagc

SEQ ID NO: 160501 - RNA, 32 nt, Human
gaggccaggaguucaagaccagccuggccaac

SEQ ID NO: 160502 - RNA, 32 nt, Human
gaggccaggaguucaagaccagccuggcuaac

SEQ ID NO: 160503 - RNA, 32 nt, Human
gaggccaggaguucaagaccagccugggcaac

SEQ ID NO: 160504 - RNA, 24 nt, Human
gaggccaggaguucaagaccagcu

SEQ ID NO: 160505 - RNA, 23 nt, Human
gaggccaggaguucaagaccagu

SEQ ID NO: 160506 - RNA, 23 nt, Human
gaggccaggaguucaagacuagc

SEQ ID NO: 160507 - RNA, 23 nt, Human
gaggccaggaguucaagaucagc

SEQ ID NO: 160508 - RNA, 32 nt, Human
gaggccaggaguucaagaucagccuggccaac

SEQ ID NO: 160509 - RNA, 32 nt, Human
gaggccaggaguucaagaucagccugggcaau

SEQ ID NO: 160510 - RNA, 23 nt, Human
gaggccaggaguucaaggccagc

SEQ ID NO: 160511 - RNA, 32 nt, Human
gaggccaggaguucaaggccagccuggacaac

SEQ ID NO: 160512 - RNA, 23 nt, Human
gaggccaggaguucaauaccagc

SEQ ID NO: 160513 - RNA, 23 nt, Human
gaggccaggaguucacaaccagc

SEQ ID NO: 160514 - RNA, 23 nt, Human
gaggccaggaguucaggaccagc

SEQ ID NO: 160515 - RNA, 23 nt, Human
gaggccaggaguuccagaccagc

SEQ ID NO: 160516 - RNA, 32 nt, Human
gaggccaggaguuccagaccagccuggccaac

SEQ ID NO: 160517 - RNA, 32 nt, Human
gaggccaggaguuccagaccagccugggcaac

SEQ ID NO: 160518 - RNA, 32 nt, Human
gaggccaggaguuccagaccagccuggguaau

SEQ ID NO: 160519 - RNA, 32 nt, Human
gaggccaggaguuccagagcagccugggcaac

SEQ ID NO: 160520 - RNA, 23 nt, Human
gaggccaggaguuccagaucagc

SEQ ID NO: 160521 - RNA, 20 nt, Human
gaggccaggaguucgagacc

SEQ ID NO: 160522 - RNA, 23 nt, Human
gaggccaggaguucgagaccagc

SEQ ID NO: 160523 - RNA, 32 nt, Human
gaggccaggaguucgagaccagccuggacaac

SEQ ID NO: 160524 - RNA, 32 nt, Human
gaggccaggaguucgagaccagccuggccaac

SEQ ID NO: 160525 - RNA, 32 nt, Human
gaggccaggaguucgagaccagccuggccagc

SEQ ID NO: 160526 - RNA, 32 nt, Human
gaggccaggaguucgagaccagccuggcuaac

SEQ ID NO: 160527 - RNA, 32 nt, Human
gaggccaggaguucgagaccagccuggcuggc

SEQ ID NO: 160528 - RNA, 32 nt, Human
gaggccaggaguucgagaccagccugggcaac

SEQ ID NO: 160529 - RNA, 32 nt, Human
gaggccaggaguucgagaccagccuggucaag

SEQ ID NO: 160530 - RNA, 32 nt, Human
gaggccaggaguucgagaccagccugguccac

SEQ ID NO: 160531 - RNA, 32 nt, Human
gaggccaggaguucgagaucagccuggccaac

SEQ ID NO: 160532 - RNA, 32 nt, Human
gaggccaggaguucgauaccagccuggccaau

SEQ ID NO: 160533 - RNA, 23 nt, Human
gaggccaggaguucggguccggc

SEQ ID NO: 160534 - RNA, 23 nt, Human
gaggccaggaguucuagaccagc

SEQ ID NO: 160535 - RNA, 32 nt, Human
gaggccaggaguucuagaccagccuggccagc

SEQ ID NO: 160536 - RNA, 24 nt, Human
gaggccaggaguucugagaccagc

SEQ ID NO: 160537 - RNA, 32 nt, Human
gaggccaggaguugcagaccagccuggguaac

SEQ ID NO: 160538 - RNA, 23 nt, Human
gaggccaggaguuggagaccagc

SEQ ID NO: 160539 - RNA, 32 nt, Human
gaggccaggaguuggagaccagccuggccaac

SEQ ID NO: 160540 - RNA, 32 nt, Human
gaggccaggaguuggagaccagccugggcaac

SEQ ID NO: 160541 - RNA, 23 nt, Human
gaggccaggaguuggagaucagc

SEQ ID NO: 160542 - RNA, 32 nt, Human
gaggccaggaguuggagaucagccugggcaac

SEQ ID NO: 160543 - RNA, 32 nt, Human
gaggccaggaguuuaagaccagccugggcaac

SEQ ID NO: 160544 - RNA, 32 nt, Human
gaggccaggaguuuaaggccagccugggcaac

SEQ ID NO: 160545 - RNA, 23 nt, Human
gaggccaggaguuuaaggcuagc

SEQ ID NO: 160546 - RNA, 23 nt, Human
gaggccaggaguuucagaucagc

SEQ ID NO: 160547 - RNA, 23 nt, Human
gaggccaggaguuugaaaccagc

SEQ ID NO: 160548 - RNA, 32 nt, Human
gaggccaggaguuugaaaccagccuggccaac

SEQ ID NO: 160549 - RNA, 32 nt, Human
gaggccaggaguuugaaacuagucuggucaac

SEQ ID NO: 160550 - RNA, 22 nt, Human
gaggccaggaguuugacacagc

SEQ ID NO: 160551 - RNA, 32 nt, Human
gaggccaggaguuugacaccagccugggcaac

SEQ ID NO: 160552 - RNA, 20 nt, Human
gaggccaggaguuugagacc

SEQ ID NO: 160553 - RNA, 25 nt, Human
gaggccaggaguuugagaccagacu

SEQ ID NO: 160554 - RNA, 23 nt, Human
gaggccaggaguuugagaccagc

SEQ ID NO: 160555 - RNA, 32 nt, Human
gaggccaggaguuugagaccagccuggcaaac

SEQ ID NO: 160556 - RNA, 32 nt, Human
gaggccaggaguuugagaccagccuggccaac

SEQ ID NO: 160557 - RNA, 32 nt, Human
gaggccaggaguuugagaccagccugggcaac

SEQ ID NO: 160558 - RNA, 32 nt, Human
gaggccaggaguuugagaccagccugggcagc

SEQ ID NO: 160559 - RNA, 25 nt, Human
gaggccaggaguuugagacuagacu

SEQ ID NO: 160560 - RNA, 23 nt, Human
gaggccaggaguuugagacuagc

SEQ ID NO: 160561 - RNA, 23 nt, Human
gaggccaggaguuugagaucagc

SEQ ID NO: 160562 - RNA, 24 nt, Human
gaggccaggaguuugaggccagcu

SEQ ID NO: 160563 - RNA, 32 nt, Human
gaggccaggaguuugaggcugcagugagcuau

SEQ ID NO: 160564 - RNA, 32 nt, Human
gaggccaggaguuugaggcugcagugaguuau

SEQ ID NO: 160565 - RNA, 23 nt, Human
gaggccaggaguuuguuaccagc

SEQ ID NO: 160566 - RNA, 32 nt, Human
gaggccaggaguuuguuaccagccugggcaac

SEQ ID NO: 160567 - RNA, 24 nt, Human
gaggccaggaguuuugagaccagc

SEQ ID NO: 160568 - RNA, 21 nt, Human
gaggccaggcagcgcugcgga

SEQ ID NO: 160569 - RNA, 22 nt, Human
gaggccaggcaggaggauugcu

SEQ ID NO: 160570 - RNA, 24 nt, Human
gaggccaggccacuucugcugagg

SEQ ID NO: 160571 - RNA, 19 nt, Human
gaggccaggccagggcugg

SEQ ID NO: 160572 - RNA, 23 nt, Human
gaggccaggcccagcccgggcgg

SEQ ID NO: 160573 - RNA, 20 nt, Human
gaggccaggcccccagcggg

SEQ ID NO: 160574 - RNA, 19 nt, Human
gaggccaggcccgcgcccg

SEQ ID NO: 160575 - RNA, 22 nt, Human
gaggccaggccgcagcccagga

SEQ ID NO: 160576 - RNA, 24 nt, Human
gaggccaggccuccccggacugcu

SEQ ID NO: 160577 - RNA, 19 nt, Human
gaggccaggccucuccugg

SEQ ID NO: 160578 - RNA, 32 nt, Human
gaggccaggcugacuuggacauggcaagaggg

SEQ ID NO: 160579 - RNA, 24 nt, Human
gaggccaggcugaugcaccaggga

SEQ ID NO: 160580 - RNA, 32 nt, Human
gaggccaggcuggggugggguguggcaggagg

SEQ ID NO: 160581 - RNA, 18 nt, Human
gaggccagggauugcggg

SEQ ID NO: 160582 - RNA, 24 nt, Human
gaggccagggcaggcagaucaucu

SEQ ID NO: 160583 - RNA, 32 nt, Human
gaggccagggcugaacgcucacagcuaaggag

SEQ ID NO: 160584 - RNA, 23 nt, Human
gaggccagggggagagccaggcu

SEQ ID NO: 160585 - RNA, 21 nt, Human
gaggccaggggucacuagggg

SEQ ID NO: 160586 - RNA, 23 nt, Human
gaggccagggguuugagaccagc

SEQ ID NO: 160587 - RNA, 32 nt, Human
gaggccagggguuugagaccagccuggccaac

SEQ ID NO: 160588 - RNA, 24 nt, Human
gaggccagguguauuucgagccag

SEQ ID NO: 160589 - RNA, 32 nt, Human
gaggccagguguucaagagcagccuggucaac

SEQ ID NO: 160590 - RNA, 32 nt, Human
gaggccagguguucgagaccagccugggcaac

SEQ ID NO: 160591 - RNA, 32 nt, Human
gaggccagguguuggugcauggagaggccagg

SEQ ID NO: 160592 - RNA, 32 nt, Human
gaggccagguguuugagaucagccuggccagc

SEQ ID NO: 160593 - RNA, 32 nt, Human
gaggccagguucccaagagcucagggaacggg

SEQ ID NO: 160594 - RNA, 32 nt, Human
gaggccaguagggagagaagauggugguucuc

SEQ ID NO: 160595 - RNA, 32 nt, Human
gaggccaguaguuggagaccagccuggccaac

SEQ ID NO: 160596 - RNA, 32 nt, Human
gaggccaguccccaggagcagccccaggagca

SEQ ID NO: 160597 - RNA, 32 nt, Human
gaggccagugccugucccccaggcccacuugu

SEQ ID NO: 160598 - RNA, 23 nt, Human
gaggccagugcgcucaagccagc

SEQ ID NO: 160599 - RNA, 32 nt, Human
gaggccagugcucuccugccucuucgucuuuc

SEQ ID NO: 160600 - RNA, 32 nt, Human
gaggccagugcuuguuuagcugcuggagaaaa

SEQ ID NO: 160601 - RNA, 21 nt, Human
gaggccaguggacucugagga

SEQ ID NO: 160602 - RNA, 32 nt, Human
gaggccaguggccccuucacaugccccaacaa

SEQ ID NO: 160603 - RNA, 17 nt, Human
gaggccaguggugcugg

SEQ ID NO: 160604 - RNA, 32 nt, Human
gaggccaguucugcagggugucagcuccagga

SEQ ID NO: 160605 - RNA, 32 nt, Human
gaggccaguuuucuagugaagacagagugcac

SEQ ID NO: 160606 - RNA, 22 nt, Human
gaggccauaaggccagccaguu

SEQ ID NO: 160607 - RNA, 22 nt, Human
gaggccauauauagggcuacau

SEQ ID NO: 160608 - RNA, 32 nt, Human
gaggccaucacagcggugcacgcccagcucac

SEQ ID NO: 160609 - RNA, 32 nt, Human
gaggccauccuccucuucuuggaccuccuugg

SEQ ID NO: 160610 - RNA, 32 nt, Human
gaggccaugagcucauuggcugccuuuguagc

SEQ ID NO: 160611 - RNA, 32 nt, Human
gaggccaugaucucugcucuucccucucccag

SEQ ID NO: 160612 - RNA, 19 nt, Human
gaggccaugauuucacaaa

SEQ ID NO: 160613 - RNA, 32 nt, Human
gaggccaugccaccucccuuccaguccacaug

SEQ ID NO: 160614 - RNA, 32 nt, Human
gaggccaugccagagcccagaacucacgccgg

SEQ ID NO: 160615 - RNA, 22 nt, Human
gaggccauggcagguggaucac

SEQ ID NO: 160616 - RNA, 26 nt, Human
gaggccauguauggcugugucuucac

SEQ ID NO: 160617 - RNA, 32 nt, Human
gaggccauuaacaaaucguccuuguccugagg

SEQ ID NO: 160618 - RNA, 32 nt, Human
gaggccauucugagccacacugaaaaggaaaa

SEQ ID NO: 160619 - RNA, 32 nt, Human
gaggccauucuuucccaacaccucuuggggag

SEQ ID NO: 160620 - RNA, 32 nt, Human
gaggccauugaaucccaguccuaacagaagua

SEQ ID NO: 160621 - RNA, 21 nt, Human
gaggccauuggcucccagagg

SEQ ID NO: 160622 - RNA, 20 nt, Human
gaggcccaacugaaaccaag

SEQ ID NO: 160623 - RNA, 21 nt, Human
gaggcccaagauucuacagca

SEQ ID NO: 160624 - RNA, 20 nt, Human
gaggcccaagcccagggcag

SEQ ID NO: 160625 - RNA, 22 nt, Human
gaggcccaaggccaccuccgca

SEQ ID NO: 160626 - RNA, 23 nt, Human
gaggcccaaguucccugcacgca

SEQ ID NO: 160627 - RNA, 23 nt, Human
gaggcccacaggaagauccagca

SEQ ID NO: 160628 - RNA, 17 nt, Human
gaggcccaccccagagg

SEQ ID NO: 160629 - RNA, 32 nt, Human
gaggcccacgugcugccuccugcuccagauuu

SEQ ID NO: 160630 - RNA, 32 nt, Human
gaggcccacuuccuucuuugggcacaggaaac

SEQ ID NO: 160631 - RNA, 32 nt, Human
gaggcccagacuggcggaucaccugaggucag

SEQ ID NO: 160632 - RNA, 32 nt, Human
gaggcccagagucuaagacugcagugagcucu

SEQ ID NO: 160633 - RNA, 32 nt, Human
gaggcccagcaccagggaugaauugguuaucu

SEQ ID NO: 160634 - RNA, 32 nt, Human
gaggcccagcagagggaggcagggcacugccu

SEQ ID NO: 160635 - RNA, 24 nt, Human
gaggcccagccaggcccccaggaa

SEQ ID NO: 160636 - RNA, 32 nt, Human
gaggcccagccccagaacucagagaauggggc

SEQ ID NO: 160637 - RNA, 32 nt, Human
gaggcccagcccucagaaacccuucagugcua

SEQ ID NO: 160638 - RNA, 32 nt, Human
gaggcccagccuugucccuccugccacguccu

SEQ ID NO: 160639 - RNA, 32 nt, Human
gaggcccagcucaguguggaggcugcuggccc

SEQ ID NO: 160640 - RNA, 32 nt, Human
gaggcccaggcagaacccugcauggacccuga

SEQ ID NO: 160641 - RNA, 22 nt, Human
gaggcccaggcaggcagaucac

SEQ ID NO: 160642 - RNA, 22 nt, Human
gaggcccaggcaggcggaucac

SEQ ID NO: 160643 - RNA, 32 nt, Human
gaggcccaggcaggugaagaggaaguggcuuu

SEQ ID NO: 160644 - RNA, 32 nt, Human
gaggcccagggaggggccaggugucaggagcu

SEQ ID NO: 160645 - RNA, 32 nt, Human
gaggcccagggguggagguuagggguggagcu

SEQ ID NO: 160646 - RNA, 32 nt, Human
gaggcccaggugagcagaucaccugaggucag

SEQ ID NO: 160647 - RNA, 32 nt, Human
gaggcccagguggggcgaucaccugagguuag

SEQ ID NO: 160648 - RNA, 32 nt, Human
gaggcccagguucgcccuuccacacacggaau

SEQ ID NO: 160649 - RNA, 32 nt, Human
gaggcccaugacccagaacccaggaaggauag

SEQ ID NO: 160650 - RNA, 22 nt, Human
gaggcccaugugucgcugggga

SEQ ID NO: 160651 - RNA, 21 nt, Human
gaggccccaaagagacugcuu

SEQ ID NO: 160652 - RNA, 32 nt, Human
gaggccccacuccccgagguugccuagacaac

SEQ ID NO: 160653 - RNA, 32 nt, Human
gaggccccagaggcggcggggagguggcccgc

SEQ ID NO: 160654 - RNA, 32 nt, Human
gaggccccagcugccccuuccuccaggcaccu

SEQ ID NO: 160655 - RNA, 32 nt, Human
gaggccccaggagcaaagguccuggcccucgu

SEQ ID NO: 160656 - RNA, 18 nt, Human
gaggccccagggagccag

SEQ ID NO: 160657 - RNA, 32 nt, Human
gaggccccaucucucggggacugagggggugg

SEQ ID NO: 160658 - RNA, 32 nt, Human
gaggcccccaaagcccugugaacugccugcug

SEQ ID NO: 160659 - RNA, 32 nt, Human
gaggcccccgggauguccuggggacagggagu

SEQ ID NO: 160660 - RNA, 32 nt, Human
gaggcccccugauccaauucugugccaauaac

SEQ ID NO: 160661 - RNA, 32 nt, Human
gaggcccccuggccugggcacccagcugcagg

SEQ ID NO: 160662 - RNA, 25 nt, Human
gaggccccgcugccccccuccuccu

SEQ ID NO: 160663 - RNA, 32 nt, Human
gaggccccgugcuccccaccucucaaggaguc

SEQ ID NO: 160664 - RNA, 32 nt, Human
gaggccccuagccuguggcccaggcucucucc

SEQ ID NO: 160665 - RNA, 32 nt, Human
gaggccccuccagagagagcacuggagcugga

SEQ ID NO: 160666 - RNA, 32 nt, Human
gaggccccugcacccugcgcaucaggacugcu

SEQ ID NO: 160667 - RNA, 22 nt, Human
gaggccccugugagcugggaga

SEQ ID NO: 160668 - RNA, 32 nt, Human
gaggccccuugucuguucccacggacgggggc

SEQ ID NO: 160669 - RNA, 32 nt, Human
gaggcccgagaggacaccccacccuccagcgu

SEQ ID NO: 160670 - RNA, 32 nt, Human
gaggcccgcaaacugugucuggggaccugugg

SEQ ID NO: 160671 - RNA, 19 nt, Human
gaggcccgccugcccuggg

SEQ ID NO: 160672 - RNA, 32 nt, Human
gaggcccgggggcaggagugcagggcucugag

SEQ ID NO: 160673 - RNA, 32 nt, Human
gaggcccggugugguuccgccucggcgaggcg

SEQ ID NO: 160674 - RNA, 32 nt, Human
gaggcccgugugaggacugacccuggauuccu

SEQ ID NO: 160675 - RNA, 32 nt, Human
gaggcccucacagaugucuaggcaggccucau

SEQ ID NO: 160676 - RNA, 32 nt, Human
gaggcccucaugggcaauggcugagggggccg

SEQ ID NO: 160677 - RNA, 20 nt, Human
gaggcccucggcugcugggg

SEQ ID NO: 160678 - RNA, 32 nt, Human
gaggcccucucccccacuccuccaaagaaaca

SEQ ID NO: 160679 - RNA, 32 nt, Human
gaggcccucucgggggugaccugggcgucagc

SEQ ID NO: 160680 - RNA, 22 nt, Human
gaggcccucuggcccccaggaa

SEQ ID NO: 160681 - RNA, 32 nt, Human
gaggcccugcagcagcucuucuccuccaugcc

SEQ ID NO: 160682 - RNA, 32 nt, Human
gaggcccugccugaacccacagugccaggcaa

SEQ ID NO: 160683 - RNA, 32 nt, Human
gaggcccugccuggucucgucugggaccuggg

SEQ ID NO: 160684 - RNA, 32 nt, Human
gaggcccugcgaggggacaaggacaggcccug

SEQ ID NO: 160685 - RNA, 31 nt, Human
gaggcccugcuggcugggccugguuuucaag

SEQ ID NO: 160686 - RNA, 32 nt, Human
gaggcccuggacaaccucuugcggcccuggcu

SEQ ID NO: 160687 - RNA, 32 nt, Human
gaggcccuggacagcgacagcaggcccagcuc

SEQ ID NO: 160688 - RNA, 32 nt, Human
gaggcccuggagccucacgccgucgaggcugc

SEQ ID NO: 160689 - RNA, 32 nt, Human
gaggcccuggcagaggugaaggacauggagca

SEQ ID NO: 160690 - RNA, 32 nt, Human
gaggcccuggcucugaucccaggcuggaugga

SEQ ID NO: 160691 - RNA, 32 nt, Human
gaggcccugggccgaggugcagugacccugca

SEQ ID NO: 160692 - RNA, 23 nt, Human
gaggcccugggcugggugcuggg

SEQ ID NO: 160693 - RNA, 32 nt, Human
gaggcccuggguugucgcggcagcaguggucu

SEQ ID NO: 160694 - RNA, 32 nt, Human
gaggcccuguccaucuucuccccaccaccgcc

SEQ ID NO: 160695 - RNA, 23 nt, Human
gaggcccuucagacucuggcggg

SEQ ID NO: 160696 - RNA, 32 nt, Human
gaggcccuucccuucagaggcuccugggggau

SEQ ID NO: 160697 - RNA, 20 nt, Human
gaggccgaacgcggacucgc

SEQ ID NO: 160698 - RNA, 22 nt, Human
gaggccgaagcaggcagaucac

SEQ ID NO: 160699 - RNA, 22 nt, Human
gaggccgaagcaggcggaucac

SEQ ID NO: 160700 - RNA, 21 nt, Human
gaggccgaagcgaguggauca

SEQ ID NO: 160701 - RNA, 32 nt, Human
gaggccgaagcgaguggaucaccugaggucag

SEQ ID NO: 160702 - RNA, 32 nt, Human
gaggccgaagcgggcggaucaccugaggucgg

SEQ ID NO: 160703 - RNA, 32 nt, Human
gaggccgaagcggguggaucaccugaggucag

SEQ ID NO: 160704 - RNA, 32 nt, Human
gaggccgaaguggguggaucaccugagguccg

SEQ ID NO: 160705 - RNA, 22 nt, Human
gaggccgagacaggcggaucac

SEQ ID NO: 160706 - RNA, 32 nt, Human
gaggccgagacaggcggaucaccugaggucgg

SEQ ID NO: 160707 - RNA, 22 nt, Human
gaggccgagacagguggaucac

SEQ ID NO: 160708 - RNA, 22 nt, Human
gaggccgagacccugcagguga

SEQ ID NO: 160709 - RNA, 24 nt, Human
gaggccgagaccugaaacccucua

SEQ ID NO: 160710 - RNA, 32 nt, Human
gaggccgagacgggcggaucaccugaggucag

SEQ ID NO: 160711 - RNA, 32 nt, Human
gaggccgagacggguggaucaccugaggucag

SEQ ID NO: 160712 - RNA, 32 nt, Human
gaggccgagacggguguauaacgaggucagga

SEQ ID NO: 160713 - RNA, 23 nt, Human
gaggccgagacucagaccugcua

SEQ ID NO: 160714 - RNA, 32 nt, Human
gaggccgagauagguggaucaccugaagucag

SEQ ID NO: 160715 - RNA, 24 nt, Human
gaggccgagaucaggagggagcug

SEQ ID NO: 160716 - RNA, 32 nt, Human
gaggccgagaugggaggaucgcuugagcccag

SEQ ID NO: 160717 - RNA, 32 nt, Human
gaggccgagaugggcagagcacuugaggccag

SEQ ID NO: 160718 - RNA, 32 nt, Human
gaggccgagaugggcggaucacgaggucagga

SEQ ID NO: 160719 - RNA, 32 nt, Human
gaggccgagaugggugaaucaugaggucagga

SEQ ID NO: 160720 - RNA, 32 nt, Human
gaggccgagauggguggaucaccugaggucag

SEQ ID NO: 160721 - RNA, 32 nt, Human
gaggccgagauggguggaucaucugaggucag

SEQ ID NO: 160722 - RNA, 32 nt, Human
gaggccgagauggguggaucaugaggucagca

SEQ ID NO: 160723 - RNA, 32 nt, Human
gaggccgagccaccccucuguaaccuccauaa

SEQ ID NO: 160724 - RNA, 32 nt, Human
gaggccgagcgagcccccagcccagccuggcg

SEQ ID NO: 160725 - RNA, 20 nt, Human
gaggccgaggagaacccagc

SEQ ID NO: 160726 - RNA, 24 nt, Human
gaggccgaggagggaggacugcuu

SEQ ID NO: 160727 - RNA, 32 nt, Human
gaggccgaggagggaggaucaccugaggucag

SEQ ID NO: 160728 - RNA, 32 nt, Human
gaggccgaggagggccgaucaccugaggucag

SEQ ID NO: 160729 - RNA, 23 nt, Human
gaggccgaggcaagaggauugcu

SEQ ID NO: 160730 - RNA, 22 nt, Human
gaggccgaggcaagcagaucac

SEQ ID NO: 160731 - RNA, 22 nt, Human
gaggccgaggcaaguggaucac

SEQ ID NO: 160732 - RNA, 23 nt, Human
gaggccgaggcacgagaaucgcu

SEQ ID NO: 160733 - RNA, 23 nt, Human
gaggccgaggcacgagaauugcu

SEQ ID NO: 160734 - RNA, 22 nt, Human
gaggccgaggcagacagaucac

SEQ ID NO: 160735 - RNA, 22 nt, Human
gaggccgaggcagacggaucac

SEQ ID NO: 160736 - RNA, 22 nt, Human
gaggccgaggcagauggaucac

SEQ ID NO: 160737 - RNA, 32 nt, Human
gaggccgaggcaggaggaucaccugaggucag

SEQ ID NO: 160738 - RNA, 22 nt, Human
gaggccgaggcaggcagaucac

SEQ ID NO: 160739 - RNA, 32 nt, Human
gaggccgaggcaggcagaucaccugaggucaa

SEQ ID NO: 160740 - RNA, 32 nt, Human
gaggccgaggcaggcagaucaccugaggucag

SEQ ID NO: 160741 - RNA, 32 nt, Human
gaggccgaggcaggcagaucaccugaggucgg

SEQ ID NO: 160742 - RNA, 32 nt, Human
gaggccgaggcaggcagaucaccugagguugg

SEQ ID NO: 160743 - RNA, 22 nt, Human
gaggccgaggcaggcgaaucac

SEQ ID NO: 160744 - RNA, 22 nt, Human
gaggccgaggcaggcggaccac

SEQ ID NO: 160745 - RNA, 21 nt, Human
gaggccgaggcaggcggauca

SEQ ID NO: 160746 - RNA, 22 nt, Human
gaggccgaggcaggcggaucac

SEQ ID NO: 160747 - RNA, 32 nt, Human
gaggccgaggcaggcggaucaccugagauugg

SEQ ID NO: 160748 - RNA, 32 nt, Human
gaggccgaggcaggcggaucaccugaggucag

SEQ ID NO: 160749 - RNA, 32 nt, Human
gaggccgaggcaggcggaucaccugaggucgg

SEQ ID NO: 160750 - RNA, 32 nt, Human
gaggccgaggcaggcggaucaccugaggugag

SEQ ID NO: 160751 - RNA, 32 nt, Human
gaggccgaggcaggcggaucaccugagguugg

SEQ ID NO: 160752 - RNA, 32 nt, Human
gaggccgaggcagggggaucaccugaggucuc

SEQ ID NO: 160753 - RNA, 32 nt, Human
gaggccgaggcagguacaucaccugaggucaa

SEQ ID NO: 160754 - RNA, 21 nt, Human
gaggccgaggcagguggauca

SEQ ID NO: 160755 - RNA, 22 nt, Human
gaggccgaggcagguggaucac

SEQ ID NO: 160756 - RNA, 32 nt, Human
gaggccgaggcagguggaucaccugagaucag

SEQ ID NO: 160757 - RNA, 32 nt, Human
gaggccgaggcagguggaucaccugaggucag

SEQ ID NO: 160758 - RNA, 32 nt, Human
gaggccgaggcagguggaucaccugagguccg

SEQ ID NO: 160759 - RNA, 32 nt, Human
gaggccgaggcagguugaucaccugaggucag

SEQ ID NO: 160760 - RNA, 32 nt, Human
gaggccgaggcaguuggaucaccugagguuag

SEQ ID NO: 160761 - RNA, 23 nt, Human
gaggccgaggcaugagaaucacu

SEQ ID NO: 160762 - RNA, 32 nt, Human
gaggccgaggcauguggaucaccugaggucag

SEQ ID NO: 160763 - RNA, 20 nt, Human
gaggccgaggccgcucccgc

SEQ ID NO: 160764 - RNA, 32 nt, Human
gaggccgaggccggcagaucaccugagaucag

SEQ ID NO: 160765 - RNA, 17 nt, Human
gaggccgaggccugggc

SEQ ID NO: 160766 - RNA, 32 nt, Human
gaggccgaggcggauggaucaccugaggucgg

SEQ ID NO: 160767 - RNA, 32 nt, Human
gaggccgaggcgggaggaucaccugagguuag

SEQ ID NO: 160768 - RNA, 21 nt, Human
gaggccgaggcgggcagauca

SEQ ID NO: 160769 - RNA, 32 nt, Human
gaggccgaggcgggcagaucaccugaggucac

SEQ ID NO: 160770 - RNA, 32 nt, Human
gaggccgaggcgggcagaucaccugaggucag

SEQ ID NO: 160771 - RNA, 32 nt, Human
gaggccgaggcgggcagaucaccugaggucgg

SEQ ID NO: 160772 - RNA, 32 nt, Human
gaggccgaggcgggcggaucaccugagaucag

SEQ ID NO: 160773 - RNA, 32 nt, Human
gaggccgaggcgggcggaucaccugagaucug

SEQ ID NO: 160774 - RNA, 32 nt, Human
gaggccgaggcgggcggaucaccugaggucag

SEQ ID NO: 160775 - RNA, 32 nt, Human
gaggccgaggcgggcggaucaccugagguggg

SEQ ID NO: 160776 - RNA, 32 nt, Human
gaggccgaggcgggcggaucaccugagguugg

SEQ ID NO: 160777 - RNA, 32 nt, Human
gaggccgaggcgggcggaucaccugaguucag

SEQ ID NO: 160778 - RNA, 32 nt, Human
gaggccgaggcggggagaucaccugaggucag

SEQ ID NO: 160779 - RNA, 32 nt, Human
gaggccgaggcggguagaucaccugagguuag

SEQ ID NO: 160780 - RNA, 32 nt, Human
gaggccgaggcggguggaccaccugaggucag

SEQ ID NO: 160781 - RNA, 32 nt, Human
gaggccgaggcggguggaucaccugaggacag

SEQ ID NO: 160782 - RNA, 32 nt, Human
gaggccgaggcggguggaucaccugaggccag

SEQ ID NO: 160783 - RNA, 32 nt, Human
gaggccgaggcggguggaucaccugaggucag

SEQ ID NO: 160784 - RNA, 32 nt, Human
gaggccgaggcggguggaucaccugagguuag

SEQ ID NO: 160785 - RNA, 21 nt, Human
gaggccgaggcggguggguca

SEQ ID NO: 160786 - RNA, 32 nt, Human
gaggccgaggcgggugggucaccugaggucag

SEQ ID NO: 160787 - RNA, 32 nt, Human
gaggccgaggcggguguaucaccugaggucag

SEQ ID NO: 160788 - RNA, 32 nt, Human
gaggccgaggcggguguaucaccugaggucgg

SEQ ID NO: 160789 - RNA, 32 nt, Human
gaggccgaggcguguggaucaccugagaucgg

SEQ ID NO: 160790 - RNA, 21 nt, Human
gaggccgaggcucuguggcug

SEQ ID NO: 160791 - RNA, 32 nt, Human
gaggccgaggggaccauguccgggaggcgcuu

SEQ ID NO: 160792 - RNA, 32 nt, Human
gaggccgaggggaguggaucaccugaguucga

SEQ ID NO: 160793 - RNA, 32 nt, Human
gaggccgaggggcagcaagggcagccagggca

SEQ ID NO: 160794 - RNA, 32 nt, Human
gaggccgagguaggcggaucaccugaggucgg

SEQ ID NO: 160795 - RNA, 32 nt, Human
gaggccgagguaggcggaucaccugagguuag

SEQ ID NO: 160796 - RNA, 32 nt, Human
gaggccgaggugagcagaucaccugagguuag

SEQ ID NO: 160797 - RNA, 32 nt, Human
gaggccgaggugagcggaucaccugaggucag

SEQ ID NO: 160798 - RNA, 32 nt, Human
gaggccgaggugaguggaucaccugaggucag

SEQ ID NO: 160799 - RNA, 32 nt, Human
gaggccgagguggauggaucaccugaggucag

SEQ ID NO: 160800 - RNA, 32 nt, Human
gaggccgagguggccagaucaccugaggucag

SEQ ID NO: 160801 - RNA, 32 nt, Human
gaggccgaggugggaggaucaccugaggucag

SEQ ID NO: 160802 - RNA, 32 nt, Human
gaggccgaggugggcagaucaccugaggucag

SEQ ID NO: 160803 - RNA, 32 nt, Human
gaggccgaggugggcagaucaccugaggucgg

SEQ ID NO: 160804 - RNA, 32 nt, Human
gaggccgaggugggcggaucaccugaagucag

SEQ ID NO: 160805 - RNA, 32 nt, Human
gaggccgaggugggcggaucaccugaggucag

SEQ ID NO: 160806 - RNA, 32 nt, Human
gaggccgaggugggcggaucaccugaggucgg

SEQ ID NO: 160807 - RNA, 32 nt, Human
gaggccgaggugggugaaucaccugaggucag

SEQ ID NO: 160808 - RNA, 32 nt, Human
gaggccgagguggguggaccaccugagguuag

SEQ ID NO: 160809 - RNA, 32 nt, Human
gaggccgagguggguggaucaccugaagucag

SEQ ID NO: 160810 - RNA, 32 nt, Human
gaggccgagguggguggaucaccugagaucag

SEQ ID NO: 160811 - RNA, 32 nt, Human
gaggccgagguggguggaucaccugaggucag

SEQ ID NO: 160812 - RNA, 19 nt, Human
gaggccgagguugcaguga

SEQ ID NO: 160813 - RNA, 21 nt, Human
gaggccgagguugcagugagc

SEQ ID NO: 160814 - RNA, 32 nt, Human
gaggccgagucagguggaucaccugaggucag

SEQ ID NO: 160815 - RNA, 32 nt, Human
gaggccgaguggacaggauuggucagggagcc

SEQ ID NO: 160816 - RNA, 32 nt, Human
gaggccgaguuggguggauugcuugggccagg

SEQ ID NO: 160817 - RNA, 32 nt, Human
gaggccgaugcgggcugaucacuugagugauu

SEQ ID NO: 160818 - RNA, 32 nt, Human
gaggccgauguggguggaucaccugagguuag

SEQ ID NO: 160819 - RNA, 32 nt, Human
gaggccgcaccacugcacuccagccuggguga

SEQ ID NO: 160820 - RNA, 32 nt, Human
gaggccgcagccgcccggccaguaaggcggcg

SEQ ID NO: 160821 - RNA, 21 nt, Human
gaggccgcaggacacugaagg

SEQ ID NO: 160822 - RNA, 32 nt, Human
gaggccgcaggggccuacagaccucauccccc

SEQ ID NO: 160823 - RNA, 32 nt, Human
gaggccgcagugagcugugaucaugccacugc

SEQ ID NO: 160824 - RNA, 32 nt, Human
gaggccgccgccgccucuccuugcugcagcca

SEQ ID NO: 160825 - RNA, 19 nt, Human
gaggccgcgcccccgcccg

SEQ ID NO: 160826 - RNA, 32 nt, Human
gaggccgcggcgacaagguagccacccccgca

SEQ ID NO: 160827 - RNA, 21 nt, Human
gaggccgcggucugaacugcu

SEQ ID NO: 160828 - RNA, 32 nt, Human
gaggccgcgguggguggaucaccugaggucag

SEQ ID NO: 160829 - RNA, 22 nt, Human
gaggccgcugccccugaguucu

SEQ ID NO: 160830 - RNA, 32 nt, Human
gaggccgcugcgcccccgccuccucgcgggag

SEQ ID NO: 160831 - RNA, 32 nt, Human
gaggccgcuggaagccaccgggccaagggagc

SEQ ID NO: 160832 - RNA, 22 nt, Human
gaggccggaacccuagauagcu

SEQ ID NO: 160833 - RNA, 32 nt, Human
gaggccggacacaggcuucuuugccuacacgu

SEQ ID NO: 160834 - RNA, 19 nt, Human
gaggccggacccgcggcgg

SEQ ID NO: 160835 - RNA, 21 nt, Human
gaggccggagaaucgcuugaa

SEQ ID NO: 160836 - RNA, 26 nt, Human
gaggccggagaccuccuggacuaguu

SEQ ID NO: 160837 - RNA, 32 nt, Human
gaggccggagaggaguucaggaacccuucucc

SEQ ID NO: 160838 - RNA, 21 nt, Human
gaggccggagcaccacaucca

SEQ ID NO: 160839 - RNA, 32 nt, Human
gaggccggcagaucaccugagaucagaaguuc

SEQ ID NO: 160840 - RNA, 26 nt, Human
gaggccggccgagggcugggguucca

SEQ ID NO: 160841 - RNA, 32 nt, Human
gaggccggccucaugccagggugaagggacag

SEQ ID NO: 160842 - RNA, 22 nt, Human
gaggccggcgccgagccggacu

SEQ ID NO: 160843 - RNA, 21 nt, Human
gaggccggcggccggccggcu

SEQ ID NO: 160844 - RNA, 23 nt, Human
gaggccggcgugggugagcucca

SEQ ID NO: 160845 - RNA, 21 nt, Human
gaggccgggacacacuuagcu

SEQ ID NO: 160846 - RNA, 32 nt, Human
gaggccgggacagguggaucaccugaggucug

SEQ ID NO: 160847 - RNA, 20 nt, Human
gaggccgggacugggccggc

SEQ ID NO: 160848 - RNA, 32 nt, Human
gaggccgggaggcgaggaaaccguggaaauug

SEQ ID NO: 160849 - RNA, 32 nt, Human
gaggccgggaggcggcugcaaggggcggggaa

SEQ ID NO: 160850 - RNA, 23 nt, Human
gaggccgggaguucaagaccagc

SEQ ID NO: 160851 - RNA, 23 nt, Human
gaggccgggaguucgggaccagc

SEQ ID NO: 160852 - RNA, 23 nt, Human
gaggccgggaguuggagaccagc

SEQ ID NO: 160853 - RNA, 23 nt, Human
gaggccgggaguuugagaccagc

SEQ ID NO: 160854 - RNA, 32 nt, Human
gaggccgggaguuugagaccagccugggcaac

SEQ ID NO: 160855 - RNA, 21 nt, Human
gaggccgggcacgguggcuca

SEQ ID NO: 160856 - RNA, 32 nt, Human
gaggccgggcaugguggcagagcgagacuccg

SEQ ID NO: 160857 - RNA, 32 nt, Human
gaggccgggccacgcucagacacuucgaucgu

SEQ ID NO: 160858 - RNA, 32 nt, Human
gaggccgggcccugcgccucaggccugagaac

SEQ ID NO: 160859 - RNA, 21 nt, Human
gaggccgggcgcaguggcuca

SEQ ID NO: 160860 - RNA, 32 nt, Human
gaggccgggcugggucgcugcgcgucugcucc

SEQ ID NO: 160861 - RNA, 22 nt, Human
gaggccggggggaccgacugcu

SEQ ID NO: 160862 - RNA, 22 nt, Human
gaggccggggguccugccaacu

SEQ ID NO: 160863 - RNA, 32 nt, Human
gaggccggguaccugggcugggauccggagca

SEQ ID NO: 160864 - RNA, 21 nt, Human
gaggccgggugcgguggcuca

SEQ ID NO: 160865 - RNA, 19 nt, Human
gaggccgguccgggugcca

SEQ ID NO: 160866 - RNA, 22 nt, Human
gaggccggugauucacaagguc

SEQ ID NO: 160867 - RNA, 32 nt, Human
gaggccggugggcagaucaugaggucaggagu

SEQ ID NO: 160868 - RNA, 32 nt, Human
gaggccgguggguugcuuuagcucaggaguug

SEQ ID NO: 160869 - RNA, 22 nt, Human
gaggccguaucacccucuucac

SEQ ID NO: 160870 - RNA, 32 nt, Human
gaggccguggugagaggauagcuuaagcccag

SEQ ID NO: 160871 - RNA, 32 nt, Human
gaggccguggugggcggaucaccugaggucag

SEQ ID NO: 160872 - RNA, 32 nt, Human
gaggccguuauucugcccaccgcacccuccgu

SEQ ID NO: 160873 - RNA, 32 nt, Human
gaggccuaaccaggaucaggcaggagggcagg

SEQ ID NO: 160874 - RNA, 24 nt, Human
gaggccuaagcuggccugguccag

SEQ ID NO: 160875 - RNA, 32 nt, Human
gaggccuaaguccugcauuaacucaguccaac

SEQ ID NO: 160876 - RNA, 32 nt, Human
gaggccuaccugcuggagcacagccacaaugg

SEQ ID NO: 160877 - RNA, 32 nt, Human
gaggccuagauggguggaucacuugagcucag

SEQ ID NO: 160878 - RNA, 22 nt, Human
gaggccuaggcaggcagaucac

SEQ ID NO: 160879 - RNA, 32 nt, Human
gaggccuaguuaauuacugaccagagaacggc

SEQ ID NO: 160880 - RNA, 32 nt, Human
gaggccuauauuacuuauacuggaccaccugg

SEQ ID NO: 160881 - RNA, 32 nt, Human
gaggccucaguggaagugacggcuacugugga

SEQ ID NO: 160882 - RNA, 32 nt, Human
gaggccucaguguggcugugcguggcccgugu

SEQ ID NO: 160883 - RNA, 32 nt, Human
gaggccuccacucagcaguaauaaaagcuguu

SEQ ID NO: 160884 - RNA, 21 nt, Human
gaggccuccccucuccugccu

SEQ ID NO: 160885 - RNA, 32 nt, Human
gaggccuccuagugaaaggcugggcccuugcc

SEQ ID NO: 160886 - RNA, 32 nt, Human
gaggccuccucauuaggugauccaggaguauu

SEQ ID NO: 160887 - RNA, 24 nt, Human
gaggccucgaggcagguggaucac

SEQ ID NO: 160888 - RNA, 32 nt, Human
gaggccucggccuccuccucuggggcggcggu

SEQ ID NO: 160889 - RNA, 32 nt, Human
gaggccucuaacgcaggagcugccuguauggg

SEQ ID NO: 160890 - RNA, 32 nt, Human
gaggccucucaggggaagucucaaggucucca

SEQ ID NO: 160891 - RNA, 32 nt, Human
gaggccucugcggguggaucaccugaggucag

SEQ ID NO: 160892 - RNA, 32 nt, Human
gaggccucugcucucugggauguggcccucuc

SEQ ID NO: 160893 - RNA, 32 nt, Human
gaggccugaaaccucugucggccagagaacag

SEQ ID NO: 160894 - RNA, 32 nt, Human
gaggccugaaggaaccgcugaagaaccagagg

SEQ ID NO: 160895 - RNA, 31 nt, Human
gaggccugacuucucugggcugaggcugguc

SEQ ID NO: 160896 - RNA, 32 nt, Human
gaggccugagcccucucagaagcagggacagc

SEQ ID NO: 160897 - RNA, 32 nt, Human
gaggccugagggagggaggcgcauggaagccg

SEQ ID NO: 160898 - RNA, 32 nt, Human
gaggccugccuucugccugcucuccugcacug

SEQ ID NO: 160899 - RNA, 32 nt, Human
gaggccugcuccaguacuucccagaggcuggc

SEQ ID NO: 160900 - RNA, 32 nt, Human
gaggccuggaccaccuggggcucccugaggau

SEQ ID NO: 160901 - RNA, 32 nt, Human
gaggccuggcuuagaucuuucauuccaccuca

SEQ ID NO: 160902 - RNA, 32 nt, Human
gaggccuggcuucaggagggagcggagcagcc

SEQ ID NO: 160903 - RNA, 32 nt, Human
gaggccugggagaaggcccaggcugcucgcaa

SEQ ID NO: 160904 - RNA, 32 nt, Human
gaggccugggccgaccucacaccucagcccuu

SEQ ID NO: 160905 - RNA, 32 nt, Human
gaggccugggccugcacugccugcagccgaca

SEQ ID NO: 160906 - RNA, 32 nt, Human
gaggccuggggguggcagacgagcccacggcg

SEQ ID NO: 160907 - RNA, 32 nt, Human
gaggccuggggugggacagggagggccggcgg

SEQ ID NO: 160908 - RNA, 32 nt, Human
gaggccugguggcuuagccugggcaggucgug

SEQ ID NO: 160909 - RNA, 32 nt, Human
gaggccuguaaucccagcuacuugggaggcug

SEQ ID NO: 160910 - RNA, 32 nt, Human
gaggccugugagagcugccucugccucagugg

SEQ ID NO: 160911 - RNA, 32 nt, Human
gaggccuuauuucuuaacugugcugggauugc

SEQ ID NO: 160912 - RNA, 32 nt, Human
gaggccuuccaaggggguuucagucuggacuu

SEQ ID NO: 160913 - RNA, 32 nt, Human
gaggccuuccuugaccucccuccuccauuccu

SEQ ID NO: 160914 - RNA, 20 nt, Human
gaggccuucugcaaauguca

SEQ ID NO: 160915 - RNA, 19 nt, Human
gaggccuugaaaguccuug

SEQ ID NO: 160916 - RNA, 32 nt, Human
gaggccuugcccaguggguagacagcuacuac

SEQ ID NO: 160917 - RNA, 18 nt, Human
gaggccuugugcauuuca

SEQ ID NO: 160918 - RNA, 32 nt, Human
gaggccuuugcuggacaggugaagagugacuu

SEQ ID NO: 160919 - RNA, 32 nt, Human
gaggcgaacagaggaaaaauauggcggagaca

SEQ ID NO: 160920 - RNA, 32 nt, Human
gaggcgaacagcuccaggugccccucuggagc

SEQ ID NO: 160921 - RNA, 32 nt, Human
gaggcgaacgcaggcagaucacuugaggucag

SEQ ID NO: 160922 - RNA, 32 nt, Human
gaggcgaaggcgucugucucuuggcuauuuua

SEQ ID NO: 160923 - RNA, 32 nt, Human
gaggcgaagggugggagcauagcauaggaacg

SEQ ID NO: 160924 - RNA, 32 nt, Human
gaggcgacuggguaaauuaggaagagguggau

SEQ ID NO: 160925 - RNA, 32 nt, Human
gaggcgagaaguguaacauucucuccacccag

SEQ ID NO: 160926 - RNA, 32 nt, Human
gaggcgagaggaggaggaggaggaggagaagg

SEQ ID NO: 160927 - RNA, 32 nt, Human
gaggcgagaggaucacuugagcacaggaguuc

SEQ ID NO: 160928 - RNA, 22 nt, Human
gaggcgagcagaucacgagguc

SEQ ID NO: 160929 - RNA, 18 nt, Human
gaggcgagcagggaccag

SEQ ID NO: 160930 - RNA, 32 nt, Human
gaggcgagccgaugccgagcugcuccacgucc

SEQ ID NO: 160931 - RNA, 32 nt, Human
gaggcgaggaagaguaauauuuagcauucagg

SEQ ID NO: 160932 - RNA, 32 nt, Human
gaggcgaggaaggcuucuccaucgucgccacc

SEQ ID NO: 160933 - RNA, 32 nt, Human
gaggcgagggagcagguuagagggacaaagag

SEQ ID NO: 160934 - RNA, 22 nt, Human
gaggcgaguggaucacgagguc

SEQ ID NO: 160935 - RNA, 32 nt, Human
gaggcgauggcagagagcagcugcaggcaugg

SEQ ID NO: 160936 - RNA, 32 nt, Human
gaggcgauuuaauuaaauggcugugaugcauu

SEQ ID NO: 160937 - RNA, 32 nt, Human
gaggcgcaagggcaucgaccuccgcaccaauc

SEQ ID NO: 160938 - RNA, 32 nt, Human
gaggcgcagacaccaggcccguucugugcucu

SEQ ID NO: 160939 - RNA, 32 nt, Human
gaggcgcagccugggcagagcucagcuugguc

SEQ ID NO: 160940 - RNA, 32 nt, Human
gaggcgcaggcuccagcccggccugcaggccg

SEQ ID NO: 160941 - RNA, 22 nt, Human
gaggcgcaggcugcagugagcu

SEQ ID NO: 160942 - RNA, 32 nt, Human
gaggcgcagggaggggaccccggagcugggcu

SEQ ID NO: 160943 - RNA, 22 nt, Human
gaggcgcaguuucaccguguua

SEQ ID NO: 160944 - RNA, 32 nt, Human
gaggcgcaugagcgagagcagaggaggaggag

SEQ ID NO: 160945 - RNA, 32 nt, Human
gaggcgccagccuggucaggggaggugacugu

SEQ ID NO: 160946 - RNA, 19 nt, Human
gaggcgcccaccacuucac

SEQ ID NO: 160947 - RNA, 32 nt, Human
gaggcgcccgggcuggagcgccccggccgugu

SEQ ID NO: 160948 - RNA, 32 nt, Human
gaggcgcccucagacagcaguggcaucaacuu

SEQ ID NO: 160949 - RNA, 32 nt, Human
gaggcgcccugggugguggaaggcagccgccc

SEQ ID NO: 160950 - RNA, 21 nt, Human
gaggcgccgccgccaucgguc

SEQ ID NO: 160951 - RNA, 32 nt, Human
gaggcgccgggauguggagcggcccaccccag

SEQ ID NO: 160952 - RNA, 32 nt, Human
gaggcgccucuagucugugccuuugccguugg

SEQ ID NO: 160953 - RNA, 32 nt, Human
gaggcgccuggccuccgcagagcugcaaaggc

SEQ ID NO: 160954 - RNA, 32 nt, Human
gaggcgccugggaagggcucccuaccggcccc

SEQ ID NO: 160955 - RNA, 32 nt, Human
gaggcgcgagaggaggggaugggcggggcgcg

SEQ ID NO: 160956 - RNA, 32 nt, Human
gaggcgcggaggggcuggcugggcaggagggg

SEQ ID NO: 160957 - RNA, 32 nt, Human
gaggcgcggcagggucaggagcucgguggcau

SEQ ID NO: 160958 - RNA, 18 nt, Human
gaggcgcgggacauucca

SEQ ID NO: 160959 - RNA, 32 nt, Human
gaggcgcggugaggagucaggcuuaaaacuug

SEQ ID NO: 160960 - RNA, 32 nt, Human
gaggcgcguggagagccaggguccgggccuga

SEQ ID NO: 160961 - RNA, 32 nt, Human
gaggcgcucgacuuucucaggauacugucccu

SEQ ID NO: 160962 - RNA, 32 nt, Human
gaggcgcucugguaaggugcucaggccaguug

SEQ ID NO: 160963 - RNA, 32 nt, Human
gaggcgcugcuugucgacagcuagaggcuggc

SEQ ID NO: 160964 - RNA, 32 nt, Human
gaggcgcugguggccuucaggcuggacggcgc

SEQ ID NO: 160965 - RNA, 32 nt, Human
gaggcgcuucaggucaugacagugaugccccu

SEQ ID NO: 160966 - RNA, 32 nt, Human
gaggcggaagugagcccucauccugccacucc

SEQ ID NO: 160967 - RNA, 32 nt, Human
gaggcggacacacagcgacccccaucccugca

SEQ ID NO: 160968 - RNA, 22 nt, Human
gaggcggacagaucacgagguc

SEQ ID NO: 160969 - RNA, 22 nt, Human
gaggcggacggaucacgagguc

SEQ ID NO: 160970 - RNA, 32 nt, Human
gaggcggacuggcagcccugagcgucgcaguc

SEQ ID NO: 160971 - RNA, 21 nt, Human
gaggcggagacugcagugagc

SEQ ID NO: 160972 - RNA, 32 nt, Human
gaggcggagagggaccgcgcccgcaggagaga

SEQ ID NO: 160973 - RNA, 19 nt, Human
gaggcggagcuugcaguga

SEQ ID NO: 160974 - RNA, 20 nt, Human
gaggcggagcuugcagugag

SEQ ID NO: 160975 - RNA, 32 nt, Human
gaggcggaggcagaggcugcagugacccaaga

SEQ ID NO: 160976 - RNA, 32 nt, Human
gaggcggaggcagagguggaggcgcuuugaaa

SEQ ID NO: 160977 - RNA, 32 nt, Human
gaggcggaggcagcggcuggaggagcgcgagc

SEQ ID NO: 160978 - RNA, 32 nt, Human
gaggcggaggcaggcggguugcuugagcuccg

SEQ ID NO: 160979 - RNA, 22 nt, Human
gaggcggaggcagguggaucac

SEQ ID NO: 160980 - RNA, 32 nt, Human
gaggcggaggcggagguugcagugagccaaga

SEQ ID NO: 160981 - RNA, 32 nt, Human
gaggcggaggcggguguaucacgaggucagga

SEQ ID NO: 160982 - RNA, 32 nt, Human
gaggcggaggcugcagugagcugggauuacac

SEQ ID NO: 160983 - RNA, 32 nt, Human
gaggcggaggcugcagugagcugugauugugc

SEQ ID NO: 160984 - RNA, 32 nt, Human
gaggcggaggugagcagaucaccugaggucag

SEQ ID NO: 160985 - RNA, 32 nt, Human
gaggcggagguggaggcgaccgagugcugaga

SEQ ID NO: 160986 - RNA, 19 nt, Human
gaggcggagguggcaguga

SEQ ID NO: 160987 - RNA, 32 nt, Human
gaggcggagguggggguggggguaguuuaagc

SEQ ID NO: 160988 - RNA, 20 nt, Human
gaggcggagguugcacugag

SEQ ID NO: 160989 - RNA, 24 nt, Human
gaggcggagguugcacugagccga

SEQ ID NO: 160990 - RNA, 19 nt, Human
gaggcggagguugcaguaa

SEQ ID NO: 160991 - RNA, 19 nt, Human
gaggcggagguugcaguga

SEQ ID NO: 160992 - RNA, 32 nt, Human
gaggcggagguugcagugagccuggaucaugc

SEQ ID NO: 160993 - RNA, 19 nt, Human
gaggcggagguugcauuga

SEQ ID NO: 160994 - RNA, 19 nt, Human
gaggcggagguuguaguga

SEQ ID NO: 160995 - RNA, 32 nt, Human
gaggcggagucugaggagcuggggaaggaaca

SEQ ID NO: 160996 - RNA, 19 nt, Human
gaggcggaguuugcaguga

SEQ ID NO: 160997 - RNA, 20 nt, Human
gaggcggaguuugcagugag

SEQ ID NO: 160998 - RNA, 18 nt, Human
gaggcggaucacgagguc

SEQ ID NO: 160999 - RNA, 18 nt, Human
gaggcggaucauaagguc

SEQ ID NO: 161000 - RNA, 32 nt, Human
gaggcggcaggaucacuaggaggcagagguug

SEQ ID NO: 161001 - RNA, 32 nt, Human
gaggcggcagugagucaugaguaugccgcugc

SEQ ID NO: 161002 - RNA, 32 nt, Human
gaggcggcccgaaugcagcccugguucaggcc

SEQ ID NO: 161003 - RNA, 32 nt, Human
gaggcggcgcugugugugugaagcguaccuag

SEQ ID NO: 161004 - RNA, 32 nt, Human
gaggcggcggagcacaaggcaagugaguuugc

SEQ ID NO: 161005 - RNA, 32 nt, Human
gaggcggcggcggcaggagcugaggggaguug

SEQ ID NO: 161006 - RNA, 22 nt, Human
gaggcggcggcggcagugucca

SEQ ID NO: 161007 - RNA, 32 nt, Human
gaggcggcggcggcccccagcccagcccggcg

SEQ ID NO: 161008 - RNA, 25 nt, Human
gaggcggcggcggggagagccgaga

SEQ ID NO: 161009 - RNA, 32 nt, Human
gaggcggcggcggguggaucaccugagaucag

SEQ ID NO: 161010 - RNA, 32 nt, Human
gaggcggcgggcggaggcggcgggagcggugg

SEQ ID NO: 161011 - RNA, 32 nt, Human
gaggcggcgggcuggggagggagcggcgccag

SEQ ID NO: 161012 - RNA, 32 nt, Human
gaggcggcggggaaggaggaggagggggagag

SEQ ID NO: 161013 - RNA, 21 nt, Human
gaggcggcggggacaccggcg

SEQ ID NO: 161014 - RNA, 32 nt, Human
gaggcggcuccagccccagacaacagcccagg

SEQ ID NO: 161015 - RNA, 32 nt, Human
gaggcggcuccccagccuggguuuccauguga

SEQ ID NO: 161016 - RNA, 21 nt, Human
gaggcgggagaacugcuugaa

SEQ ID NO: 161017 - RNA, 21 nt, Human
gaggcgggagaaucgcuugaa

SEQ ID NO: 161018 - RNA, 21 nt, Human
gaggcgggagaauugcuugaa

SEQ ID NO: 161019 - RNA, 21 nt, Human
gaggcgggagacucgcuugaa

SEQ ID NO: 161020 - RNA, 22 nt, Human
gaggcgggaggaucacaaaguc

SEQ ID NO: 161021 - RNA, 32 nt, Human
gaggcgggaggaucacaugagcccaggagguu

SEQ ID NO: 161022 - RNA, 32 nt, Human
gaggcgggaggcggaggcgggagggcgggcgc

SEQ ID NO: 161023 - RNA, 32 nt, Human
gaggcgggaggucccauggaauuuguucuggu

SEQ ID NO: 161024 - RNA, 32 nt, Human
gaggcgggaguggaggugcgcggagucaggca

SEQ ID NO: 161025 - RNA, 32 nt, Human
gaggcgggaucacggcccaggcugcugacacc

SEQ ID NO: 161026 - RNA, 32 nt, Human
gaggcgggauccgagcgcgccggcggggcgca

SEQ ID NO: 161027 - RNA, 32 nt, Human
gaggcgggauugcuugaguccagccugggcag

SEQ ID NO: 161028 - RNA, 22 nt, Human
gaggcgggcagaucacaagguc

SEQ ID NO: 161029 - RNA, 32 nt, Human
gaggcgggcagaucaccugagaucgggaguuu

SEQ ID NO: 161030 - RNA, 22 nt, Human
gaggcgggcagaucacgagguc

SEQ ID NO: 161031 - RNA, 32 nt, Human
gaggcgggcagaucacuugagaucaggaguuc

SEQ ID NO: 161032 - RNA, 32 nt, Human
gaggcgggcccagugcaggaggcugcaucccu

SEQ ID NO: 161033 - RNA, 32 nt, Human
gaggcgggccugccgacugacuguguggcaug

SEQ ID NO: 161034 - RNA, 22 nt, Human
gaggcgggcgaaucacgagguc

SEQ ID NO: 161035 - RNA, 32 nt, Human
gaggcgggcggaucaacugaggucgggaguuc

SEQ ID NO: 161036 - RNA, 22 nt, Human
gaggcgggcggaucacaaaguc

SEQ ID NO: 161037 - RNA, 20 nt, Human
gaggcgggcggaucacaagg

SEQ ID NO: 161038 - RNA, 22 nt, Human
gaggcgggcggaucacaagguc

SEQ ID NO: 161039 - RNA, 22 nt, Human
gaggcgggcggaucacacgguc

SEQ ID NO: 161040 - RNA, 32 nt, Human
gaggcgggcggaucaccugagaucaggaguuc

SEQ ID NO: 161041 - RNA, 22 nt, Human
gaggcgggcggaucacgagguc

SEQ ID NO: 161042 - RNA, 32 nt, Human
gaggcgggcuguagcaaaguccuguuucucag

SEQ ID NO: 161043 - RNA, 32 nt, Human
gaggcggggagaggagaggagagaagagccgc

SEQ ID NO: 161044 - RNA, 32 nt, Human
gaggcggggaggauccauugagcccagcaguc

SEQ ID NO: 161045 - RNA, 32 nt, Human
gaggcggggccugggccgggagcccaggggaa

SEQ ID NO: 161046 - RNA, 32 nt, Human
gaggcggggcgaggcaggcggcgcggggaccc

SEQ ID NO: 161047 - RNA, 22 nt, Human
gaggcggggggaucacaagguc

SEQ ID NO: 161048 - RNA, 32 nt, Human
gaggcggggguuucaccaugccauccaggcug

SEQ ID NO: 161049 - RNA, 19 nt, Human
gaggcgggguuucaccaug

SEQ ID NO: 161050 - RNA, 23 nt, Human
gaggcgggguuucaccaugcugg

SEQ ID NO: 161051 - RNA, 21 nt, Human
gaggcgggguuucaccauguu

SEQ ID NO: 161052 - RNA, 22 nt, Human
gaggcgggguuucaccauguua

SEQ ID NO: 161053 - RNA, 22 nt, Human
gaggcgggguuucaccauguug

SEQ ID NO: 161054 - RNA, 23 nt, Human
gaggcgggguuucaccauguugg

SEQ ID NO: 161055 - RNA, 22 nt, Human
gaggcgggguuucgccauguua

SEQ ID NO: 161056 - RNA, 32 nt, Human
gaggcgggucgggcugggccagcugggguaga

SEQ ID NO: 161057 - RNA, 32 nt, Human
gaggcgggugaaagcuccgucuucugaauuca

SEQ ID NO: 161058 - RNA, 32 nt, Human
gaggcggguggaggagcagcagaggaagggga

SEQ ID NO: 161059 - RNA, 22 nt, Human
gaggcggguggaucacaagguc

SEQ ID NO: 161060 - RNA, 19 nt, Human
gaggcggguggaucacgag

SEQ ID NO: 161061 - RNA, 22 nt, Human
gaggcggguggaucacgagguc

SEQ ID NO: 161062 - RNA, 22 nt, Human
gaggcggguggaucagaagguc

SEQ ID NO: 161063 - RNA, 32 nt, Human
gaggcggguggaucgcuugagcacaggcguuc

SEQ ID NO: 161064 - RNA, 22 nt, Human
gaggcggucaggcugcugagga

SEQ ID NO: 161065 - RNA, 32 nt, Human
gaggcggugaagcucucggaaaugcugccacc

SEQ ID NO: 161066 - RNA, 22 nt, Human
gaggcgguuggaucacgagguc

SEQ ID NO: 161067 - RNA, 32 nt, Human
gaggcgguuucugcucuuagggaguggcaguc

SEQ ID NO: 161068 - RNA, 32 nt, Human
gaggcgucaagucuucucaagucuuaggauug

SEQ ID NO: 161069 - RNA, 32 nt, Human
gaggcguccuccggcucugggcuccggucggu

SEQ ID NO: 161070 - RNA, 32 nt, Human
gaggcgucggaauggaccugugccacccagag

SEQ ID NO: 161071 - RNA, 32 nt, Human
gaggcgucucucaacagccauauggcggacac

SEQ ID NO: 161072 - RNA, 21 nt, Human
gaggcgugagaaucgcuugaa

SEQ ID NO: 161073 - RNA, 32 nt, Human
gaggcgugagccacagugguuaucuccaagcu

SEQ ID NO: 161074 - RNA, 32 nt, Human
gaggcgugagccaccgcgccuguccaggaauc

SEQ ID NO: 161075 - RNA, 32 nt, Human
gaggcgugagccacugcaccugaccuaagagg

SEQ ID NO: 161076 - RNA, 32 nt, Human
gaggcgugcaaagacuccagaauuggaggcau

SEQ ID NO: 161077 - RNA, 32 nt, Human
gaggcguggaaggcugcggaaaagaaagcccg

SEQ ID NO: 161078 - RNA, 32 nt, Human
gaggcguggaggagaggagacuguuugaugug

SEQ ID NO: 161079 - RNA, 32 nt, Human
gaggcguggccacgaucucccucccagguggu

SEQ ID NO: 161080 - RNA, 32 nt, Human
gaggcgugggguuucggcugagcccacagggc

SEQ ID NO: 161081 - RNA, 32 nt, Human
gaggcguguggucccaguuggccaacauggag

SEQ ID NO: 161082 - RNA, 32 nt, Human
gaggcguuccaggaaagacuuguuuuugccug

SEQ ID NO: 161083 - RNA, 32 nt, Human
gaggcguuucaggcaugagucacaggccgggu

SEQ ID NO: 161084 - RNA, 25 nt, Human
gaggcuaaaaguuuuuaaauuagcu

SEQ ID NO: 161085 - RNA, 27 nt, Human
gaggcuaaagcaggagaauugcuugaa

SEQ ID NO: 161086 - RNA, 32 nt, Human
gaggcuaaagcaggcuagagcaguggaggggu

SEQ ID NO: 161087 - RNA, 27 nt, Human
gaggcuaagacaggagaaucgcuugaa

SEQ ID NO: 161088 - RNA, 24 nt, Human
gaggcuaagacgggaggauugcuu

SEQ ID NO: 161089 - RNA, 27 nt, Human
gaggcuaaggcaagagaauugcuugaa

SEQ ID NO: 161090 - RNA, 22 nt, Human
gaggcuaaggcaagaggaucac

SEQ ID NO: 161091 - RNA, 24 nt, Human
gaggcuaaggcagaaggaucgcuu

SEQ ID NO: 161092 - RNA, 27 nt, Human
gaggcuaaggcaggaaaaucgcuugaa

SEQ ID NO: 161093 - RNA, 22 nt, Human
gaggcuaaggcaggagaaucac

SEQ ID NO: 161094 - RNA, 27 nt, Human
gaggcuaaggcaggagaaucgcuugaa

SEQ ID NO: 161095 - RNA, 27 nt, Human
gaggcuaaggcaggagaauugcuugaa

SEQ ID NO: 161096 - RNA, 22 nt, Human
gaggcuaaggcaggcagaucac

SEQ ID NO: 161097 - RNA, 22 nt, Human
gaggcuaaggcaggcggaccac

SEQ ID NO: 161098 - RNA, 22 nt, Human
gaggcuaaggcaggcggaucac

SEQ ID NO: 161099 - RNA, 28 nt, Human
gaggcuaaggcagggagaaucgcuugaa

SEQ ID NO: 161100 - RNA, 32 nt, Human
gaggcuaaggcagggagaaucgcuugaaguag

SEQ ID NO: 161101 - RNA, 25 nt, Human
gaggcuaaggcagggagaauugcuu

SEQ ID NO: 161102 - RNA, 27 nt, Human
gaggcuaaggcaggggaaucgcuugaa

SEQ ID NO: 161103 - RNA, 22 nt, Human
gaggcuaaggcagguggaucac

SEQ ID NO: 161104 - RNA, 22 nt, Human
gaggcuaaggcagguggaucgc

SEQ ID NO: 161105 - RNA, 24 nt, Human
gaggcuaaggcagguggaucgcuu

SEQ ID NO: 161106 - RNA, 23 nt, Human
gaggcuaagguaggaucacuuga

SEQ ID NO: 161107 - RNA, 27 nt, Human
gaggcuaaggugggagaauugcuugaa

SEQ ID NO: 161108 - RNA, 24 nt, Human
gaggcuaaggugggaggaucacuu

SEQ ID NO: 161109 - RNA, 32 nt, Human
gaggcuaagguggguggaucaccugaggucaa

SEQ ID NO: 161110 - RNA, 32 nt, Human
gaggcuaaguuaaugccguguugcccagaaca

SEQ ID NO: 161111 - RNA, 27 nt, Human
gaggcuaaugcaggagaaucgcuugaa

SEQ ID NO: 161112 - RNA, 24 nt, Human
gaggcuacaaccacauuuguucac

SEQ ID NO: 161113 - RNA, 32 nt, Human
gaggcuacacuuuccuuuccagaagacuucaa

SEQ ID NO: 161114 - RNA, 32 nt, Human
gaggcuacagcaggagaauugcuugaacucgg

SEQ ID NO: 161115 - RNA, 32 nt, Human
gaggcuacagcaucuacuaccccucggcugcu

SEQ ID NO: 161116 - RNA, 32 nt, Human
gaggcuacagugagcaaagaucacgccacugc

SEQ ID NO: 161117 - RNA, 32 nt, Human
gaggcuacagugagccaugauccuaccacugc

SEQ ID NO: 161118 - RNA, 32 nt, Human
gaggcuacagugagccuugauugugucacugc

SEQ ID NO: 161119 - RNA, 32 nt, Human
gaggcuacagugagcuaugaucacaccauugc

SEQ ID NO: 161120 - RNA, 32 nt, Human
gaggcuacagugagcuaugauuacaccacugc

SEQ ID NO: 161121 - RNA, 32 nt, Human
gaggcuacagugagcugagaucgugccauugc

SEQ ID NO: 161122 - RNA, 32 nt, Human
gaggcuacagugagcugugauugcaccacugu

SEQ ID NO: 161123 - RNA, 32 nt, Human
gaggcuacagugagcugugcuugugccacugu

SEQ ID NO: 161124 - RNA, 32 nt, Human
gaggcuaccagggccagagacagggaaugggg

SEQ ID NO: 161125 - RNA, 32 nt, Human
gaggcuacgauggguggaucaccugaggucag

SEQ ID NO: 161126 - RNA, 32 nt, Human
gaggcuacucggcuuggcccgcagguccuccg

SEQ ID NO: 161127 - RNA, 25 nt, Human
gaggcuacuuaugucuugguuuuau

SEQ ID NO: 161128 - RNA, 32 nt, Human
gaggcuagagagagacagaaugacagagagag

SEQ ID NO: 161129 - RNA, 32 nt, Human
gaggcuagaguggacaaaugagggccagggag

SEQ ID NO: 161130 - RNA, 23 nt, Human
gaggcuaggacccuggccgcgcu

SEQ ID NO: 161131 - RNA, 20 nt, Human
gaggcuaggacguggccggc

SEQ ID NO: 161132 - RNA, 23 nt, Human
gaggcuaggaguucaagaccagc

SEQ ID NO: 161133 - RNA, 23 nt, Human
gaggcuaggaguucaagacuagc

SEQ ID NO: 161134 - RNA, 23 nt, Human
gaggcuaggaguucgaggucagc

SEQ ID NO: 161135 - RNA, 32 nt, Human
gaggcuaggaguugcagaccagccuggccaac

SEQ ID NO: 161136 - RNA, 24 nt, Human
gaggcuaggaguuugagaccagcu

SEQ ID NO: 161137 - RNA, 32 nt, Human
gaggcuaggauuuugagaccagccuggggaaa

SEQ ID NO: 161138 - RNA, 20 nt, Human
gaggcuagggggccacaguu

SEQ ID NO: 161139 - RNA, 32 nt, Human
gaggcuaguguuugcauuccugguuauaugua

SEQ ID NO: 161140 - RNA, 32 nt, Human
gaggcuauaugaaauuccaucuuaggugcaac

SEQ ID NO: 161141 - RNA, 32 nt, Human
gaggcuaucugucccuuccgggggcacccugc

SEQ ID NO: 161142 - RNA, 32 nt, Human
gaggcucaaacuugugaagguuaauaccauaa

SEQ ID NO: 161143 - RNA, 32 nt, Human
gaggcucaaaggacugugagccgggagaucug

SEQ ID NO: 161144 - RNA, 32 nt, Human
gaggcucaagccuucacagugagcugaugguc

SEQ ID NO: 161145 - RNA, 31 nt, Human
gaggcucacagcuuggcaaaugcuagggcuu

SEQ ID NO: 161146 - RNA, 32 nt, Human
gaggcucaccccucucugagggcuguuguucu

SEQ ID NO: 161147 - RNA, 32 nt, Human
gaggcucaccuggcagcugccgucucugcccc

SEQ ID NO: 161148 - RNA, 32 nt, Human
gaggcucaccuuagagcuucugaguuuccaag

SEQ ID NO: 161149 - RNA, 22 nt, Human
gaggcucacgccuguaauccca

SEQ ID NO: 161150 - RNA, 18 nt, Human
gaggcucacggggugcca

SEQ ID NO: 161151 - RNA, 32 nt, Human
gaggcucagagagguuuagucauuugcccaaa

SEQ ID NO: 161152 - RNA, 32 nt, Human
gaggcucagagggagaaaggggcuugccaagg

SEQ ID NO: 161153 - RNA, 32 nt, Human
gaggcucagaucuugcuuaugugaggauaggc

SEQ ID NO: 161154 - RNA, 24 nt, Human
gaggcucagccuguccuguuucau

SEQ ID NO: 161155 - RNA, 32 nt, Human
gaggcucagcugaggcaagaagagcaccauca

SEQ ID NO: 161156 - RNA, 32 nt, Human
gaggcucaggaguucaagaccagccuggccaa

SEQ ID NO: 161157 - RNA, 32 nt, Human
gaggcucaggcagagcagguguggacuaaguc

SEQ ID NO: 161158 - RNA, 32 nt, Human
gaggcucaggcagaggauugcuugaggccagg

SEQ ID NO: 161159 - RNA, 32 nt, Human
gaggcucaggccgggacugagauggacagacc

SEQ ID NO: 161160 - RNA, 32 nt, Human
gaggcucagggugggagagggccccgggcugc

SEQ ID NO: 161161 - RNA, 32 nt, Human
gaggcucaucccucaguggcaacagaaacagg

SEQ ID NO: 161162 - RNA, 22 nt, Human
gaggcucaugccuguaauccca

SEQ ID NO: 161163 - RNA, 32 nt, Human
gaggcuccagaagaaaagcugcgcauuuaccc

SEQ ID NO: 161164 - RNA, 32 nt, Human
gaggcuccagcgagggcaccagugccugcagc

SEQ ID NO: 161165 - RNA, 32 nt, Human
gaggcuccagugagcugugauugugccauugc

SEQ ID NO: 161166 - RNA, 32 nt, Human
gaggcuccaguucucaucugcucagguguccc

SEQ ID NO: 161167 - RNA, 32 nt, Human
gaggcucccaucugccuuucucuguaauaaug

SEQ ID NO: 161168 - RNA, 32 nt, Human
gaggcuccccugcccuccuucuccuuaggagu

SEQ ID NO: 161169 - RNA, 32 nt, Human
gaggcuccccugggaacuagagccaggaacag

SEQ ID NO: 161170 - RNA, 32 nt, Human
gaggcucccucggggcucgggaucugcagcau

SEQ ID NO: 161171 - RNA, 32 nt, Human
gaggcucccugagaugugcuguccacuaagca

SEQ ID NO: 161172 - RNA, 32 nt, Human
gaggcucccugagccgccuccccaccaucacc

SEQ ID NO: 161173 - RNA, 32 nt, Human
gaggcucccuggggcucggcuuggaccgcgau

SEQ ID NO: 161174 - RNA, 23 nt, Human
gaggcuccggcauaggccugaga

SEQ ID NO: 161175 - RNA, 32 nt, Human
gaggcuccuccucuguggauggucacugcccc

SEQ ID NO: 161176 - RNA, 32 nt, Human
gaggcuccugcucucccauccaccugucuguc

SEQ ID NO: 161177 - RNA, 32 nt, Human
gaggcuccugcucuccugugccuccgaggccc

SEQ ID NO: 161178 - RNA, 32 nt, Human
gaggcuccugugguaguccucccaagcugugc

SEQ ID NO: 161179 - RNA, 31 nt, Human
gaggcucgccucucuggccgggugcagugaa

SEQ ID NO: 161180 - RNA, 32 nt, Human
gaggcucgcuucuugauguuguguacaaacuc

SEQ ID NO: 161181 - RNA, 32 nt, Human
gaggcucggagagagaagacguggagggaggg

SEQ ID NO: 161182 - RNA, 32 nt, Human
gaggcucggagaggaacccugccccuccgaug

SEQ ID NO: 161183 - RNA, 32 nt, Human
gaggcucggggguggaggagccuuaguguguc

SEQ ID NO: 161184 - RNA, 18 nt, Human
gaggcucggguugugcca

SEQ ID NO: 161185 - RNA, 32 nt, Human
gaggcucuaggccagauguuuacauaauuuua

SEQ ID NO: 161186 - RNA, 32 nt, Human
gaggcucucaaacuuugagggucauaagacuu

SEQ ID NO: 161187 - RNA, 32 nt, Human
gaggcucucauauccuggaauugcccuccagg

SEQ ID NO: 161188 - RNA, 32 nt, Human
gaggcucucuaagaaaagagaggaucuaggau

SEQ ID NO: 161189 - RNA, 32 nt, Human
gaggcucugagcggaugcacaggucacccaug

SEQ ID NO: 161190 - RNA, 32 nt, Human
gaggcucugagcuggagcccuagaagguaacc

SEQ ID NO: 161191 - RNA, 21 nt, Human
gaggcucugaugaacauucca

SEQ ID NO: 161192 - RNA, 32 nt, Human
gaggcucugcccugagguucugcuccggagaa

SEQ ID NO: 161193 - RNA, 22 nt, Human
gaggcucugccuccccucugcc

SEQ ID NO: 161194 - RNA, 32 nt, Human
gaggcucuggccagagggagagaggacucugg

SEQ ID NO: 161195 - RNA, 32 nt, Human
gaggcucugggcggaggugcagugaccccgca

SEQ ID NO: 161196 - RNA, 21 nt, Human
gaggcucuggggcagccccca

SEQ ID NO: 161197 - RNA, 32 nt, Human
gaggcucugguuccucacuccuccugccucca

SEQ ID NO: 161198 - RNA, 32 nt, Human
gaggcucugugagggccagagcugaggggguc

SEQ ID NO: 161199 - RNA, 32 nt, Human
gaggcucuguucugccucuuaucagccagguc

SEQ ID NO: 161200 - RNA, 32 nt, Human
gaggcucuuucuacccaauauuuccuucucuu

SEQ ID NO: 161201 - RNA, 24 nt, Human
gaggcugaaaacgagggcccagga

SEQ ID NO: 161202 - RNA, 18 nt, Human
gaggcugaagacaggugc

SEQ ID NO: 161203 - RNA, 32 nt, Human
gaggcugaagcaggcgggucaccugaggucaa

SEQ ID NO: 161204 - RNA, 17 nt, Human
gaggcugaagcugggag

SEQ ID NO: 161205 - RNA, 18 nt, Human
gaggcugaagcugggagg

SEQ ID NO: 161206 - RNA, 32 nt, Human
gaggcugaagugagccaagaucgcgccacugc

SEQ ID NO: 161207 - RNA, 32 nt, Human
gaggcugaagugagccaagauuacgucacugc

SEQ ID NO: 161208 - RNA, 32 nt, Human
gaggcugaauucuuggagcugaagggaaaacu

SEQ ID NO: 161209 - RNA, 32 nt, Human
gaggcugacagaggcaggaugggugcaaggca

SEQ ID NO: 161210 - RNA, 32 nt, Human
gaggcugacauuaagcagggaucugucguggg

SEQ ID NO: 161211 - RNA, 22 nt, Human
gaggcugacggaggaggcgcug

SEQ ID NO: 161212 - RNA, 32 nt, Human
gaggcugacggcagagguggagaacgacaagc

SEQ ID NO: 161213 - RNA, 32 nt, Human
gaggcugacugacgucuuggaggcagaagucc

SEQ ID NO: 161214 - RNA, 32 nt, Human
gaggcugagaaauaagcucagauggaagagau

SEQ ID NO: 161215 - RNA, 22 nt, Human
gaggcugagacagguggaucac

SEQ ID NO: 161216 - RNA, 32 nt, Human
gaggcugagacagguggaucaccugaggccgg

SEQ ID NO: 161217 - RNA, 32 nt, Human
gaggcugagacgcaaggaucacuugagcccag

SEQ ID NO: 161218 - RNA, 32 nt, Human
gaggcugagacgggcagaucaccugagaucag

SEQ ID NO: 161219 - RNA, 32 nt, Human
gaggcugagagagaaggggaaaagaggauauu

SEQ ID NO: 161220 - RNA, 32 nt, Human
gaggcugagagauugagccugcagugagcuau

SEQ ID NO: 161221 - RNA, 32 nt, Human
gaggcugagaggucaagguugcagugagccau

SEQ ID NO: 161222 - RNA, 32 nt, Human
gaggcugagauggaucaucugagccucaggag

SEQ ID NO: 161223 - RNA, 32 nt, Human
gaggcugagaugggaggaccauuugagccugg

SEQ ID NO: 161224 - RNA, 32 nt, Human
gaggcugagaugggaggagcacuugagccuag

SEQ ID NO: 161225 - RNA, 32 nt, Human
gaggcugagaugggaggaucacuugaggccaa

SEQ ID NO: 161226 - RNA, 32 nt, Human
gaggcugagaugggaggaucaucugagccugg

SEQ ID NO: 161227 - RNA, 32 nt, Human
gaggcugagaugggaggaucgcuugagcccag

SEQ ID NO: 161228 - RNA, 32 nt, Human
gaggcugagaugggaggaucucuugagaccag

SEQ ID NO: 161229 - RNA, 32 nt, Human
gaggcugagaugggaggauugccugagcccag

SEQ ID NO: 161230 - RNA, 32 nt, Human
gaggcugagaugggaggauugcuugagcccag

SEQ ID NO: 161231 - RNA, 32 nt, Human
gaggcugagaugggaggauugcuugagccugu

SEQ ID NO: 161232 - RNA, 32 nt, Human
gaggcugagaugggaggguggcuugagcccag

SEQ ID NO: 161233 - RNA, 32 nt, Human
gaggcugagaugggcagaucacuugaggucag

SEQ ID NO: 161234 - RNA, 32 nt, Human
gaggcugagaugggcggaucacgaggucagga

SEQ ID NO: 161235 - RNA, 32 nt, Human
gaggcugagauggguggauugcuugagcccag

SEQ ID NO: 161236 - RNA, 25 nt, Human
gaggcugagccaggccuuggguuuc

SEQ ID NO: 161237 - RNA, 32 nt, Human
gaggcugagccccuggacugggagucaggguu

SEQ ID NO: 161238 - RNA, 32 nt, Human
gaggcugagcgcucuggcugggacagcuagag

SEQ ID NO: 161239 - RNA, 32 nt, Human
gaggcugagcugggcagaucaccugaggucag

SEQ ID NO: 161240 - RNA, 32 nt, Human
gaggcugaggaaggagaggaugacagagacag

SEQ ID NO: 161241 - RNA, 32 nt, Human
gaggcugaggagaaggaggagcgggccgugga

SEQ ID NO: 161242 - RNA, 32 nt, Human
gaggcugaggaguucaagaccagccuggccaa

SEQ ID NO: 161243 - RNA, 32 nt, Human
gaggcugaggcaacaagaaucgcuugaaccug

SEQ ID NO: 161244 - RNA, 22 nt, Human
gaggcugaggcaaguggaucac

SEQ ID NO: 161245 - RNA, 32 nt, Human
gaggcugaggcagaaggaucccuugagcccag

SEQ ID NO: 161246 - RNA, 32 nt, Human
gaggcugaggcaggaagaaucgcuugaacccg

SEQ ID NO: 161247 - RNA, 25 nt, Human
gaggcugaggcaggaaucgcuugaa

SEQ ID NO: 161248 - RNA, 32 nt, Human
gaggcugaggcaggagaauuugcuugauccug

SEQ ID NO: 161249 - RNA, 24 nt, Human
gaggcugaggcaggaggacugcuu

SEQ ID NO: 161250 - RNA, 24 nt, Human
gaggcugaggcaggaggauugcuu

SEQ ID NO: 161251 - RNA, 32 nt, Human
gaggcugaggcaggcagaucaccugaggccag

SEQ ID NO: 161252 - RNA, 32 nt, Human
gaggcugaggcaggcagaucaccugaggcuag

SEQ ID NO: 161253 - RNA, 32 nt, Human
gaggcugaggcaggcagaucaccugaggucag

SEQ ID NO: 161254 - RNA, 32 nt, Human
gaggcugaggcaggcagaucaccugaggucgg

SEQ ID NO: 161255 - RNA, 32 nt, Human
gaggcugaggcaggccaaucaccugaggucgg

SEQ ID NO: 161256 - RNA, 22 nt, Human
gaggcugaggcaggcggaucac

SEQ ID NO: 161257 - RNA, 32 nt, Human
gaggcugaggcaggcggaucaccugaggucag

SEQ ID NO: 161258 - RNA, 32 nt, Human
gaggcugaggcaggcggaucaccugaggucgg

SEQ ID NO: 161259 - RNA, 32 nt, Human
gaggcugaggcagggagaaucgcuugaaccug

SEQ ID NO: 161260 - RNA, 32 nt, Human
gaggcugaggcagguagcucaccugagucagg

SEQ ID NO: 161261 - RNA, 22 nt, Human
gaggcugaggcaggugaaucac

SEQ ID NO: 161262 - RNA, 22 nt, Human
gaggcugaggcagguggaucac

SEQ ID NO: 161263 - RNA, 32 nt, Human
gaggcugaggcagguggaucaccugaggucag

SEQ ID NO: 161264 - RNA, 32 nt, Human
gaggcugaggcagguggaucaccugaggucgg

SEQ ID NO: 161265 - RNA, 32 nt, Human
gaggcugaggcagguggaucaccugagguuag

SEQ ID NO: 161266 - RNA, 32 nt, Human
gaggcugaggcauggagaaucgcuugaaccca

SEQ ID NO: 161267 - RNA, 32 nt, Human
gaggcugaggcgcguggaucaccugaggucag

SEQ ID NO: 161268 - RNA, 32 nt, Human
gaggcugaggcggauggaucaccugaggucag

SEQ ID NO: 161269 - RNA, 32 nt, Human
gaggcugaggcgggagaaucaccugagccugg

SEQ ID NO: 161270 - RNA, 24 nt, Human
gaggcugaggcgggaggaucgcuu

SEQ ID NO: 161271 - RNA, 32 nt, Human
gaggcugaggcgggaugaucaccugaggucag

SEQ ID NO: 161272 - RNA, 32 nt, Human
gaggcugaggcgggcagaucaccugagaucgg

SEQ ID NO: 161273 - RNA, 32 nt, Human
gaggcugaggcgggcagaucaccugaggccag

SEQ ID NO: 161274 - RNA, 32 nt, Human
gaggcugaggcgggcagaucaccugaggucaa

SEQ ID NO: 161275 - RNA, 32 nt, Human
gaggcugaggcgggcagaucaccugaggucag

SEQ ID NO: 161276 - RNA, 21 nt, Human
gaggcugaggcgggcggauca

SEQ ID NO: 161277 - RNA, 32 nt, Human
gaggcugaggcgggcggaucaccugaggucgg

SEQ ID NO: 161278 - RNA, 32 nt, Human
gaggcugaggcgggcggaucaccugagguugg

SEQ ID NO: 161279 - RNA, 32 nt, Human
gaggcugaggcgggcggaucaccugagucagg

SEQ ID NO: 161280 - RNA, 21 nt, Human
gaggcugaggcggguggauca

SEQ ID NO: 161281 - RNA, 32 nt, Human
gaggcugaggcggguggaucaccugaggccag

SEQ ID NO: 161282 - RNA, 32 nt, Human
gaggcugaggcggguggaucaccugaggucag

SEQ ID NO: 161283 - RNA, 32 nt, Human
gaggcugaggcggguggaucaccugaggucgg

SEQ ID NO: 161284 - RNA, 32 nt, Human
gaggcugaggcggguggaucaccugagguuag

SEQ ID NO: 161285 - RNA, 32 nt, Human
gaggcugaggcgggugggucaccugagguugg

SEQ ID NO: 161286 - RNA, 32 nt, Human
gaggcugaggcggguugaucaccugaggucag

SEQ ID NO: 161287 - RNA, 32 nt, Human
gaggcugaggcugaggggcagucaccagcacc

SEQ ID NO: 161288 - RNA, 22 nt, Human
gaggcugaggcugcagccagcu

SEQ ID NO: 161289 - RNA, 32 nt, Human
gaggcugaggcuggcguaucaccugagguugg

SEQ ID NO: 161290 - RNA, 32 nt, Human
gaggcugaggcugggggaucaccugaggucag

SEQ ID NO: 161291 - RNA, 32 nt, Human
gaggcugagggaggaaagagcaguuaacaaac

SEQ ID NO: 161292 - RNA, 32 nt, Human
gaggcugagggcaggagaauugcuugaaccug

SEQ ID NO: 161293 - RNA, 32 nt, Human
gaggcugagggcaggagaauugcuugaaucca

SEQ ID NO: 161294 - RNA, 32 nt, Human
gaggcugagggcccucggaacagagccccugu

SEQ ID NO: 161295 - RNA, 32 nt, Human
gaggcugagggugagggaacagccuggaugug

SEQ ID NO: 161296 - RNA, 32 nt, Human
gaggcugagguaggagaaucaccugagccugg

SEQ ID NO: 161297 - RNA, 32 nt, Human
gaggcugagguaggagaauucgcuugagccug

SEQ ID NO: 161298 - RNA, 32 nt, Human
gaggcugagguaggagcaucaccuggggcugg

SEQ ID NO: 161299 - RNA, 32 nt, Human
gaggcugagguaggaggaucaccugagacugg

SEQ ID NO: 161300 - RNA, 32 nt, Human
gaggcugagguaggaggaucaccugagccugg

SEQ ID NO: 161301 - RNA, 32 nt, Human
gaggcugaggugagaggagcaagugagcccag

SEQ ID NO: 161302 - RNA, 32 nt, Human
gaggcugaggugagaggauaccuugagccagg

SEQ ID NO: 161303 - RNA, 32 nt, Human
gaggcugaggugagaggaucgcuugagcucag

SEQ ID NO: 161304 - RNA, 32 nt, Human
gaggcugaggugagagggucacuugagcccag

SEQ ID NO: 161305 - RNA, 31 nt, Human
gaggcugagguggaaagauggcccaggaauu

SEQ ID NO: 161306 - RNA, 32 nt, Human
gaggcugagguggauggaucaccugagccugg

SEQ ID NO: 161307 - RNA, 32 nt, Human
gaggcugaggugggagaaucaccugagcccag

SEQ ID NO: 161308 - RNA, 24 nt, Human
gaggcugaggugggagaaucgcuu

SEQ ID NO: 161309 - RNA, 32 nt, Human
gaggcugaggugggaggaucaccugaggucgg

SEQ ID NO: 161310 - RNA, 32 nt, Human
gaggcugaggugggaggaucaccugagugagc

SEQ ID NO: 161311 - RNA, 24 nt, Human
gaggcugaggugggaggaucgcuu

SEQ ID NO: 161312 - RNA, 24 nt, Human
gaggcugaggugggaggauugcuu

SEQ ID NO: 161313 - RNA, 32 nt, Human
gaggcugaggugggcaaaucaccugaggucag

SEQ ID NO: 161314 - RNA, 32 nt, Human
gaggcugaggugggcagaucaccugagaucgg

SEQ ID NO: 161315 - RNA, 32 nt, Human
gaggcugaggugggcagaucaccugaggucag

SEQ ID NO: 161316 - RNA, 32 nt, Human
gaggcugaggugggcagaucaccugagguugg

SEQ ID NO: 161317 - RNA, 32 nt, Human
gaggcugaggugggcauaucaccugaggucag

SEQ ID NO: 161318 - RNA, 32 nt, Human
gaggcugaggugggcgcaucaccugaggucag

SEQ ID NO: 161319 - RNA, 32 nt, Human
gaggcugaggugggcggaucaccugaggucag

SEQ ID NO: 161320 - RNA, 32 nt, Human
gaggcugaggugggcggaucaccugaguucag

SEQ ID NO: 161321 - RNA, 32 nt, Human
gaggcugagguggguggaucaccugagaagaa

SEQ ID NO: 161322 - RNA, 32 nt, Human
gaggcugagguggguggaucaccugaggucag

SEQ ID NO: 161323 - RNA, 32 nt, Human
gaggcugagguggguguaucaccugaggucgg

SEQ ID NO: 161324 - RNA, 32 nt, Human
gaggcugagguggguguaucacuugaggucag

SEQ ID NO: 161325 - RNA, 32 nt, Human
gaggcugaggugguaggaucaccugaggucag

SEQ ID NO: 161326 - RNA, 32 nt, Human
gaggcugaguagccucagaaggguuuaggcga

SEQ ID NO: 161327 - RNA, 32 nt, Human
gaggcugagugguguggaggcagcugcugggc

SEQ ID NO: 161328 - RNA, 32 nt, Human
gaggcugaguugggcagaucaccugagaucag

SEQ ID NO: 161329 - RNA, 32 nt, Human
gaggcugaguuuccagaagaccuguucaacca

SEQ ID NO: 161330 - RNA, 32 nt, Human
gaggcugauuucuccccucuccugggccaggg

SEQ ID NO: 161331 - RNA, 32 nt, Human
gaggcugcaauauuccauccugggugucuggg

SEQ ID NO: 161332 - RNA, 32 nt, Human
gaggcugcaaugagcuguguucaugccacugc

SEQ ID NO: 161333 - RNA, 32 nt, Human
gaggcugcaccaggagaggacagggaggguuc

SEQ ID NO: 161334 - RNA, 32 nt, Human
gaggcugcacuguggcagucuaggugagagac

SEQ ID NO: 161335 - RNA, 32 nt, Human
gaggcugcagcaaaaacaaagcaaagaagaua

SEQ ID NO: 161336 - RNA, 32 nt, Human
gaggcugcagcgagcuaugaucgcgccacuac

SEQ ID NO: 161337 - RNA, 19 nt, Human
gaggcugcaggaaacagca

SEQ ID NO: 161338 - RNA, 32 nt, Human
gaggcugcaggaacaggagaggcugcuggaca

SEQ ID NO: 161339 - RNA, 18 nt, Human
gaggcugcagggaugcca

SEQ ID NO: 161340 - RNA, 32 nt, Human
gaggcugcaguaagcuaugaucaugccacugc

SEQ ID NO: 161341 - RNA, 32 nt, Human
gaggcugcagugaaccaagaucaugccacugc

SEQ ID NO: 161342 - RNA, 32 nt, Human
gaggcugcagugaacuaagaagaugccauugc

SEQ ID NO: 161343 - RNA, 32 nt, Human
gaggcugcagugaacuaagaucaugccacugc

SEQ ID NO: 161344 - RNA, 32 nt, Human
gaggcugcagugaacuaugaucaaaccacugu

SEQ ID NO: 161345 - RNA, 32 nt, Human
gaggcugcagugaacuaugauuuuaccacugc

SEQ ID NO: 161346 - RNA, 32 nt, Human
gaggcugcagugaacugagaucacgucacuga

SEQ ID NO: 161347 - RNA, 32 nt, Human
gaggcugcagugaauuaugauuguggcauugc

SEQ ID NO: 161348 - RNA, 32 nt, Human
gaggcugcagugacccaagauugugccacugc

SEQ ID NO: 161349 - RNA, 32 nt, Human
gaggcugcagugaccgaugaucaugccacugc

SEQ ID NO: 161350 - RNA, 32 nt, Human
gaggcugcagugaccuaugauggcaccacugu

SEQ ID NO: 161351 - RNA, 32 nt, Human
gaggcugcagugagacgagaucgcgccacugc

SEQ ID NO: 161352 - RNA, 32 nt, Human
gaggcugcagugagcaaugaucguaccacugc

SEQ ID NO: 161353 - RNA, 32 nt, Human
gaggcugcagugagcagagcgugccgcuacac

SEQ ID NO: 161354 - RNA, 32 nt, Human
gaggcugcagugagcagggaucgcaccacugc

SEQ ID NO: 161355 - RNA, 32 nt, Human
gaggcugcagugagcaugaucgcgacacugca

SEQ ID NO: 161356 - RNA, 32 nt, Human
gaggcugcagugagccaagaucacggcacugc

SEQ ID NO: 161357 - RNA, 32 nt, Human
gaggcugcagugagccaagaucaugcuacugc

SEQ ID NO: 161358 - RNA, 32 nt, Human
gaggcugcagugagccaagaucgcaccauugc

SEQ ID NO: 161359 - RNA, 32 nt, Human
gaggcugcagugagccaagaucgcacuacugc

SEQ ID NO: 161360 - RNA, 32 nt, Human
gaggcugcagugagccaagauggcgccacugc

SEQ ID NO: 161361 - RNA, 32 nt, Human
gaggcugcagugagccaagauugugccacugc

SEQ ID NO: 161362 - RNA, 32 nt, Human
gaggcugcagugagccacagucacgccacugc

SEQ ID NO: 161363 - RNA, 32 nt, Human
gaggcugcagugagccaugacggugccacugc

SEQ ID NO: 161364 - RNA, 32 nt, Human
gaggcugcagugagccaugacugugccacugc

SEQ ID NO: 161365 - RNA, 32 nt, Human
gaggcugcagugagccaugaucacaucacugc

SEQ ID NO: 161366 - RNA, 32 nt, Human
gaggcugcagugagccaugaucaugccacugc

SEQ ID NO: 161367 - RNA, 32 nt, Human
gaggcugcagugagccaugaucauuccacugc

SEQ ID NO: 161368 - RNA, 32 nt, Human
gaggcugcagugagccaugaucuugccacugc

SEQ ID NO: 161369 - RNA, 32 nt, Human
gaggcugcagugagccaugauuaugccauuac

SEQ ID NO: 161370 - RNA, 32 nt, Human
gaggcugcagugagccaugauuaugcugcugc

SEQ ID NO: 161371 - RNA, 32 nt, Human
gaggcugcagugagccaugauugagccaccac

SEQ ID NO: 161372 - RNA, 32 nt, Human
gaggcugcagugagccaugauugcaccacugc

SEQ ID NO: 161373 - RNA, 32 nt, Human
gaggcugcagugagccaugauugugcuacugc

SEQ ID NO: 161374 - RNA, 32 nt, Human
gaggcugcagugagccaugcucacaccacugc

SEQ ID NO: 161375 - RNA, 32 nt, Human
gaguaggaauggugccuggcaccccugaacca

SEQ ID NO: 161376 - RNA, 32 nt, Human
gaguaggagagagggagcgagagccaggcagg

SEQ ID NO: 161377 - RNA, 32 nt, Human
gaguaggagcauuuggugcuccugguugcuga

SEQ ID NO: 161378 - RNA, 32 nt, Human
gaguaggagccggucucccagaaggcggaguc

SEQ ID NO: 161379 - RNA, 32 nt, Human
gaguaggaggcgaaucugcaaagggaauaaag

SEQ ID NO: 161380 - RNA, 32 nt, Human
gaguaggagggaggugcaguccccagccccca

SEQ ID NO: 161381 - RNA, 32 nt, Human
gaguaggaguagcugggacuacaagcaugcac

SEQ ID NO: 161382 - RNA, 32 nt, Human
gaguaggaugucucuuggaaauguuaagaaag

SEQ ID NO: 161383 - RNA, 32 nt, Human
gaguaggcaaagggcuguagcaugcaugauca

SEQ ID NO: 161384 - RNA, 32 nt, Human
gaguaggccauggacaccuucagcaccaagag

SEQ ID NO: 161385 - RNA, 32 nt, Human
gaguagggcgaguuugccugaagcucugcugc

SEQ ID NO: 161386 - RNA, 32 nt, Human
gaguagggggagaggcaccaccuggggaagac

SEQ ID NO: 161387 - RNA, 32 nt, Human
gaguagguccccauggcuggcaggccagagcc

SEQ ID NO: 161388 - RNA, 32 nt, Human
gaguaggugagcugucggggcuagugauggag

SEQ ID NO: 161389 - RNA, 21 nt, Human
gaguaggugggacuacaggug

SEQ ID NO: 161390 - RNA, 32 nt, Human
gaguaguagcugaagagcaagaggaggacaug

SEQ ID NO: 161391 - RNA, 32 nt, Human
gaguagucacacugaagaaauguccacucagu

SEQ ID NO: 161392 - RNA, 32 nt, Human
gaguagucuggaaaauuagacuucugagccuu

SEQ ID NO: 161393 - RNA, 32 nt, Human
gaguagugcuuccaggguccaagggauucuca

SEQ ID NO: 161394 - RNA, 32 nt, Human
gaguagugcuuugguguucacagucuguuuuu

SEQ ID NO: 161395 - RNA, 21 nt, Human
gaguaguggaaauuacaggug

SEQ ID NO: 161396 - RNA, 19 nt, Human
gaguaguugggauuacagg

SEQ ID NO: 161397 - RNA, 21 nt, Human
gaguaguugggauuacaggug

SEQ ID NO: 161398 - RNA, 32 nt, Human
gaguaguuguagcagacaccacaugcccuuga

SEQ ID NO: 161399 - RNA, 32 nt, Human
gaguaguuuagaagccucuccuccccaugacu

SEQ ID NO: 161400 - RNA, 32 nt, Human
gaguaguuuccucugcugacauuccaaauccc

SEQ ID NO: 161401 - RNA, 32 nt, Human
gaguaguuugcagcugugugguagugguuuaa

SEQ ID NO: 161402 - RNA, 32 nt, Human
gaguaguuugccaugagauaacacaguguaaa

SEQ ID NO: 161403 - RNA, 32 nt, Human
gaguauaaguugagcauagcauacuuccagag

SEQ ID NO: 161404 - RNA, 32 nt, Human
gaguauauggugugugccaguuaugaguugac

SEQ ID NO: 161405 - RNA, 32 nt, Human
gaguaucagagccugaaggugaagagcgcgag

SEQ ID NO: 161406 - RNA, 23 nt, Human
gaguauccaaauccaaaaaucca

SEQ ID NO: 161407 - RNA, 32 nt, Human
gaguaucgguucuccccuucccggcuuucggu

SEQ ID NO: 161408 - RNA, 32 nt, Human
gaguaucuaggacuacaggcccgcacaacaau

SEQ ID NO: 161409 - RNA, 23 nt, Human
gaguaucucucgagaaccuggag

SEQ ID NO: 161410 - RNA, 32 nt, Human
gaguaucucugccucccuuguccuguuguuuc

SEQ ID NO: 161411 - RNA, 20 nt, Human
gaguaucuggaccucagaga

SEQ ID NO: 161412 - RNA, 32 nt, Human
gaguaucuggaugucuuggauuuucuucccau

SEQ ID NO: 161413 - RNA, 32 nt, Human
gaguaucuggauuacccaggaagguugagcug

SEQ ID NO: 161414 - RNA, 32 nt, Human
gaguaucuuuuuccuuuuauuuucuuucuuuu

SEQ ID NO: 161415 - RNA, 32 nt, Human
gaguaugagagacagagcuccaggcauguccc

SEQ ID NO: 161416 - RNA, 32 nt, Human
gaguaugagcugcccccgcccgcuccugagaa

SEQ ID NO: 161417 - RNA, 32 nt, Human
gaguaugauuacacauuuaaauacugcacuca

SEQ ID NO: 161418 - RNA, 32 nt, Human
gaguaugccgcugcacuccagccugggggaca

SEQ ID NO: 161419 - RNA, 32 nt, Human
gaguaugcucuggaccuuauccuugaaagaug

SEQ ID NO: 161420 - RNA, 32 nt, Human
gaguaugcugcuaccucucuccuugaagggag

SEQ ID NO: 161421 - RNA, 32 nt, Human
gaguaugcuggaggcagagggcaagggagggg

SEQ ID NO: 161422 - RNA, 32 nt, Human
gaguaugcuguaaucuuaaggcauagguuauu

SEQ ID NO: 161423 - RNA, 32 nt, Human
gaguauggcugugauaagucucuccuuaaaug

SEQ ID NO: 161424 - RNA, 32 nt, Human
gaguaugggaagaaggaggaauggagggucag

SEQ ID NO: 161425 - RNA, 32 nt, Human
gaguaugggaggaggagguggccuagaacucu

SEQ ID NO: 161426 - RNA, 32 nt, Human
gaguaugucuagcucuuuacugguccaucuuc

SEQ ID NO: 161427 - RNA, 32 nt, Human
gaguaugucuguuccacagacagaugaggcag

SEQ ID NO: 161428 - RNA, 32 nt, Human
gaguauuaggaagaagauggauaaaaaccuau

SEQ ID NO: 161429 - RNA, 32 nt, Human
gaguauucauuuccuggguuuuccucuucccu

SEQ ID NO: 161430 - RNA, 32 nt, Human
gaguauucauuuugcaacuuggagauuuugcu

SEQ ID NO: 161431 - RNA, 32 nt, Human
gaguauugaggugcuagguagaaaguuaggaa

SEQ ID NO: 161432 - RNA, 32 nt, Human
gaguauugggauuacagacaugagccacugca

SEQ ID NO: 161433 - RNA, 32 nt, Human
gaguauugugcacaacuuccuccaccuuuccc

SEQ ID NO: 161434 - RNA, 32 nt, Human
gaguauuuauuugagccuaaauuguagguagc

SEQ ID NO: 161435 - RNA, 32 nt, Human
gaguauuugaguaaguuuuacaugacaguggg

SEQ ID NO: 161436 - RNA, 32 nt, Human
gaguauuugcaaagagcaacaacugaauguga

SEQ ID NO: 161437 - RNA, 32 nt, Human
gaguauuuuaaaaggaaaacauucuuuacuuu

SEQ ID NO: 161438 - RNA, 32 nt, Human
gaguauuuuugacagaauauguuucaaacuuu

SEQ ID NO: 161439 - RNA, 32 nt, Human
gaguauuuuuggcuuuauauaaaacaagguuu

SEQ ID NO: 161440 - RNA, 23 nt, Human
gagucaaaagcugcagugagcua

SEQ ID NO: 161441 - RNA, 32 nt, Human
gagucaaaagugguucauaggccggucauggu

SEQ ID NO: 161442 - RNA, 32 nt, Human
gagucaaaccacugcaauccagccugggcaac

SEQ ID NO: 161443 - RNA, 24 nt, Human
gagucaaaggcuguagugagcuau

SEQ ID NO: 161444 - RNA, 32 nt, Human
gagucaacacagacugauguacccacagacac

SEQ ID NO: 161445 - RNA, 32 nt, Human
gagucaacgagaaaaucucaguccaagccuau

SEQ ID NO: 161446 - RNA, 32 nt, Human
gagucaagacagcaccacugcacuccagccug

SEQ ID NO: 161447 - RNA, 24 nt, Human
gagucaagaucacgccacugcacu

SEQ ID NO: 161448 - RNA, 24 nt, Human
gagucaagaucgcgccacugcacu

SEQ ID NO: 161449 - RNA, 24 nt, Human
gagucaagauugcaccacugcacu

SEQ ID NO: 161450 - RNA, 32 nt, Human
gagucaaggaggagacagggacgcaggagggu

SEQ ID NO: 161451 - RNA, 32 nt, Human
gagucaaggauaaccugacagacucaggccac

SEQ ID NO: 161452 - RNA, 32 nt, Human
gagucaagggcucgggacuggagaagcagcca

SEQ ID NO: 161453 - RNA, 32 nt, Human
gagucaagggcucggugcggggaccagcuggg

SEQ ID NO: 161454 - RNA, 32 nt, Human
gagucaagucagcuaggaaggaagcaggacau

SEQ ID NO: 161455 - RNA, 32 nt, Human
gagucaauucuaccccugacuuuuggccaaaa

SEQ ID NO: 161456 - RNA, 32 nt, Human
gagucacacaggaaguuggcagcucugcucca

SEQ ID NO: 161457 - RNA, 32 nt, Human
gagucacaccacuggcugccagucagggccug

SEQ ID NO: 161458 - RNA, 32 nt, Human
gagucacaccuauagucccagcauuuugggaa

SEQ ID NO: 161459 - RNA, 32 nt, Human
gagucacagacacacucugccaugucuuagcu

SEQ ID NO: 161460 - RNA, 32 nt, Human
gagucacagagcaggcugggcacgguggcuca

SEQ ID NO: 161461 - RNA, 32 nt, Human
gagucacagaugggaagacagaagcgccccug

SEQ ID NO: 161462 - RNA, 32 nt, Human
gagucacagcacaagggcacucacaugcccca

SEQ ID NO: 161463 - RNA, 32 nt, Human
gagucacaguagaggccccacaaggaccugcu

SEQ ID NO: 161464 - RNA, 32 nt, Human
gagucacagugaauguggcaugcaugccugug

SEQ ID NO: 161465 - RNA, 32 nt, Human
gagucaccacgggggcucgagauagcuuccug

SEQ ID NO: 161466 - RNA, 32 nt, Human
gagucacccaggcuggagugcaguggugagau

SEQ ID NO: 161467 - RNA, 22 nt, Human
gagucaccccucugucuaacca

SEQ ID NO: 161468 - RNA, 32 nt, Human
gagucaccgugccuggccgaacuucuuuuauu

SEQ ID NO: 161469 - RNA, 32 nt, Human
gagucaccuccacauuugggcauggcaucuuc

SEQ ID NO: 161470 - RNA, 32 nt, Human
gagucacgccacugcacuccagccugggugac

SEQ ID NO: 161471 - RNA, 32 nt, Human
gagucacgcugccuccguuccuaggagagaag

SEQ ID NO: 161472 - RNA, 32 nt, Human
gagucacgcuggggcucucugagacucuuuag

SEQ ID NO: 161473 - RNA, 32 nt, Human
gagucacgugccuguggucacucgauagaaaa

SEQ ID NO: 161474 - RNA, 32 nt, Human
gagucacuauuggaggcagagaggcaugcagg

SEQ ID NO: 161475 - RNA, 32 nt, Human
gagucacucuacugcuguuuccuguguccaca

SEQ ID NO: 161476 - RNA, 32 nt, Human
gagucacucuguuccuugacugucuuuguguu

SEQ ID NO: 161477 - RNA, 32 nt, Human
gagucacugaugcugccucugccuucugaugc

SEQ ID NO: 161478 - RNA, 32 nt, Human
gagucacugcagccugugucuccuggguucaa

SEQ ID NO: 161479 - RNA, 32 nt, Human
gagucacugcgccuggcuuccucuuccucuug

SEQ ID NO: 161480 - RNA, 32 nt, Human
gagucacugcucccugcugcaaauuucuuauu

SEQ ID NO: 161481 - RNA, 32 nt, Human
gagucacugcuugugugguuccugggacacuu

SEQ ID NO: 161482 - RNA, 32 nt, Human
gagucacuggagaaaggggcugugcuggggcc

SEQ ID NO: 161483 - RNA, 32 nt, Human
gagucacugucugcccugggccucaguuuccc

SEQ ID NO: 161484 - RNA, 20 nt, Human
gagucacugugaggauucua

SEQ ID NO: 161485 - RNA, 32 nt, Human
gagucacugugccuggcucuuuuaaucuugaa

SEQ ID NO: 161486 - RNA, 32 nt, Human
gagucagaaaaauguuguuuuucaacuugcuu

SEQ ID NO: 161487 - RNA, 32 nt, Human
gagucagaacucggauucccagccucacuccc

SEQ ID NO: 161488 - RNA, 32 nt, Human
gagucagagaacacagaggugauguuugggac

SEQ ID NO: 161489 - RNA, 32 nt, Human
gagucagagaucuggccaaccuuggccgacau

SEQ ID NO: 161490 - RNA, 32 nt, Human
gagucagagaucugugcacacuuuuuaaacag

SEQ ID NO: 161491 - RNA, 32 nt, Human
gagucagagaucuugguaugggcuguucuguu

SEQ ID NO: 161492 - RNA, 32 nt, Human
gagucagagcaguucuugagguucaaggaggc

SEQ ID NO: 161493 - RNA, 32 nt, Human
gagucagagcucagcauuuaaucuccucucca

SEQ ID NO: 161494 - RNA, 32 nt, Human
gagucagagcucugcaugucugcaccaugucc

SEQ ID NO: 161495 - RNA, 32 nt, Human
gagucagcaccacccucacugugagucgucag

SEQ ID NO: 161496 - RNA, 31 nt, Human
gagucagcaggugaggagaaagacugaaaac

SEQ ID NO: 161497 - RNA, 32 nt, Human
gagucagcaggugaggagaaagacugaaaacu

SEQ ID NO: 161498 - RNA, 21 nt, Human
gagucagcagugagguccuca

SEQ ID NO: 161499 - RNA, 32 nt, Human
gagucagcaguuucagauucuuacacuccaua

SEQ ID NO: 161500 - RNA, 32 nt, Human
gagucagccaggagcugucaccaaggaaacgc

SEQ ID NO: 161501 - RNA, 32 nt, Human
gagucagccaggcguuccuccuuguccgguag

SEQ ID NO: 161502 - RNA, 21 nt, Human
gagucagcccugcaggcucag

SEQ ID NO: 161503 - RNA, 20 nt, Human
gagucagccugagacucuca

SEQ ID NO: 161504 - RNA, 32 nt, Human
gagucagcuccaggaaccaucaugaauggaca

SEQ ID NO: 161505 - RNA, 32 nt, Human
gagucagcuccgagacaccugaagagcccucc

SEQ ID NO: 161506 - RNA, 32 nt, Human
gagucagcugauuucagugcugcugaacuaau

SEQ ID NO: 161507 - RNA, 32 nt, Human
gagucagcuucaccaccucacugggucuggaa

SEQ ID NO: 161508 - RNA, 32 nt, Human
gagucaggacauugcugccucugccugggcug

SEQ ID NO: 161509 - RNA, 32 nt, Human
gagucaggacccucuccacucucccucuccac

SEQ ID NO: 161510 - RNA, 32 nt, Human
gagucaggagaaucacuugagcucaggaguuc

SEQ ID NO: 161511 - RNA, 21 nt, Human
gagucaggagaaucgcuugaa

SEQ ID NO: 161512 - RNA, 32 nt, Human
gagucaggagguugaggcugcagugagcuaug

SEQ ID NO: 161513 - RNA, 32 nt, Human
gagucaggaugcaccagcucagcaccaggaag

SEQ ID NO: 161514 - RNA, 32 nt, Human
gagucaggauuuggggccggcucucuuggguc

SEQ ID NO: 161515 - RNA, 24 nt, Human
gagucaggcauuuccgcucaggga

SEQ ID NO: 161516 - RNA, 32 nt, Human
gagucaggccagggccuuccagcugcucuugg

SEQ ID NO: 161517 - RNA, 32 nt, Human
gagucaggcugguggagggggagggagcacaa

SEQ ID NO: 161518 - RNA, 32 nt, Human
gagucaggcuguugcgcucccaccucagcccc

SEQ ID NO: 161519 - RNA, 32 nt, Human
gagucagggucugaguccucgucccaggaggc

SEQ ID NO: 161520 - RNA, 32 nt, Human
gagucaguccuaggcuggaugggaggguggcc

SEQ ID NO: 161521 - RNA, 31 nt, Human
gagucagugaacagggaaugggugaaugaca

SEQ ID NO: 161522 - RNA, 32 nt, Human
gagucagugggacucccagacacugccaccac

SEQ ID NO: 161523 - RNA, 32 nt, Human
gagucaguucucucaucagcucuccuccuagg

SEQ ID NO: 161524 - RNA, 31 nt, Human
gagucauagccaguuuggcaugcagaggucu

SEQ ID NO: 161525 - RNA, 32 nt, Human
gagucauagccuugggcaaccacacauagagg

SEQ ID NO: 161526 - RNA, 32 nt, Human
gagucauaugccacucaucagcuugggaauga

SEQ ID NO: 161527 - RNA, 32 nt, Human
gagucaucaccacucccuaaucucaaguaccc

SEQ ID NO: 161528 - RNA, 32 nt, Human
gagucaucagcaaacuguccaaguagcuaggc

SEQ ID NO: 161529 - RNA, 32 nt, Human
gagucaucagcaaacuguccaaguaggcuagg

SEQ ID NO: 161530 - RNA, 32 nt, Human
gagucaucaggagaggagaaugaggaugaggc

SEQ ID NO: 161531 - RNA, 32 nt, Human
gagucaucaucaucaucaucaucauugucguc

SEQ ID NO: 161532 - RNA, 32 nt, Human
gagucaucauuuuucuuccuguggaauaaaau

SEQ ID NO: 161533 - RNA, 32 nt, Human
gagucauccacaggaccccgugggugugcuga

SEQ ID NO: 161534 - RNA, 32 nt, Human
gagucauccagaauguauagacaggaaaagca

SEQ ID NO: 161535 - RNA, 32 nt, Human
gagucaucucauuccccuccguggaucagagg

SEQ ID NO: 161536 - RNA, 32 nt, Human
gagucaucucuaguuccccaccucaaucccgg

SEQ ID NO: 161537 - RNA, 32 nt, Human
gagucaucucugagagcaaauguauguuccug

SEQ ID NO: 161538 - RNA, 32 nt, Human
gagucaugagcgccaaguuucccacuggcgcg

SEQ ID NO: 161539 - RNA, 24 nt, Human
gagucaugauagcaccacugcacu

SEQ ID NO: 161540 - RNA, 24 nt, Human
gagucaugaucacgccacugcgcu

SEQ ID NO: 161541 - RNA, 24 nt, Human
gagucaugauugcgccacugcacu

SEQ ID NO: 161542 - RNA, 32 nt, Human
gagucauggcugcaggccagggagaugccuga

SEQ ID NO: 161543 - RNA, 30 nt, Human
gagucauguucccagccgccccuucuccgc

SEQ ID NO: 161544 - RNA, 25 nt, Human
gagucauuaccuucuuggugaccuc

SEQ ID NO: 161545 - RNA, 32 nt, Human
gagucauucacaggcaggagggagacugauca

SEQ ID NO: 161546 - RNA, 32 nt, Human
gagucauucuuuccucauuccugugaccaucu

SEQ ID NO: 161547 - RNA, 20 nt, Human
gagucauuguguauauucca

SEQ ID NO: 161548 - RNA, 32 nt, Human
gagucauuuuuaccacacaguccaguuugcau

SEQ ID NO: 161549 - RNA, 32 nt, Human
gaguccaaaccaacggcucuuuucagggccac

SEQ ID NO: 161550 - RNA, 22 nt, Human
gaguccaaggcgggcggaucac

SEQ ID NO: 161551 - RNA, 32 nt, Human
gaguccaaggugggcggaucaccugaggucgg

SEQ ID NO: 161552 - RNA, 32 nt, Human
gaguccaagguggguggaucaccugaggucag

SEQ ID NO: 161553 - RNA, 19 nt, Human
gaguccaagguuacaguga

SEQ ID NO: 161554 - RNA, 32 nt, Human
gaguccaauaaaaucgcugccucccagcuguu

SEQ ID NO: 161555 - RNA, 32 nt, Human
gaguccaccagccugccccauggccccggcuc

SEQ ID NO: 161556 - RNA, 18 nt, Human
gaguccacccuuugugca

SEQ ID NO: 161557 - RNA, 32 nt, Human
gaguccacgaguuuaagaccagccugggcaac

SEQ ID NO: 161558 - RNA, 32 nt, Human
gaguccacgcugacauacagaaugacgaaaag

SEQ ID NO: 161559 - RNA, 32 nt, Human
gaguccacggaggauccucagagccagcgggg

SEQ ID NO: 161560 - RNA, 32 nt, Human
gaguccacgggccaaugcugagcugcucaggc

SEQ ID NO: 161561 - RNA, 32 nt, Human
gaguccacuauugacauggaaaccccagugga

SEQ ID NO: 161562 - RNA, 32 nt, Human
gaguccagaaaguggcaguugcagugagugga

SEQ ID NO: 161563 - RNA, 31 nt, Human
gaguccagaagacugccucaguggcucauac

SEQ ID NO: 161564 - RNA, 32 nt, Human
gaguccagaaguuugagaucagccugggcaau

SEQ ID NO: 161565 - RNA, 32 nt, Human
gaguccagagcccaccuccucaguuccugugg

SEQ ID NO: 161566 - RNA, 32 nt, Human
gaguccagaugcagcuugucaccaucugcauu

SEQ ID NO: 161567 - RNA, 32 nt, Human
gaguccagccaucuugguucugaaucauaacc

SEQ ID NO: 161568 - RNA, 32 nt, Human
gaguccagccuggacgauauagccagacccug

SEQ ID NO: 161569 - RNA, 32 nt, Human
gaguccagccugggcaaaauagcgagagaccc

SEQ ID NO: 161570 - RNA, 32 nt, Human
gaguccagccugggcagcauagugugagaccc

SEQ ID NO: 161571 - RNA, 32 nt, Human
gaguccagccugggcaguauagcaagacccuc

SEQ ID NO: 161572 - RNA, 32 nt, Human
gaguccagccugggugacagagugagacccua

SEQ ID NO: 161573 - RNA, 32 nt, Human
gaguccagccugggugacauagcaagacccug

SEQ ID NO: 161574 - RNA, 20 nt, Human
gaguccagcugcagcaucca

SEQ ID NO: 161575 - RNA, 32 nt, Human
gaguccagcuuaaugcaggcagccuggcuuuu

SEQ ID NO: 161576 - RNA, 32 nt, Human
gaguccagcuuuccuucugcccuuccuccagg

SEQ ID NO: 161577 - RNA, 23 nt, Human
gaguccaggaaggggcggggaga

SEQ ID NO: 161578 - RNA, 32 nt, Human
gaguccaggaauuagagguugcagugagguau

SEQ ID NO: 161579 - RNA, 32 nt, Human
gaguccaggaauuugagaccagccuggacaac

SEQ ID NO: 161580 - RNA, 32 nt, Human
gaguccaggaauuugagaccagccuggccaau

SEQ ID NO: 161581 - RNA, 32 nt, Human
gaguccaggacauaugguaauacuagaccaaa

SEQ ID NO: 161582 - RNA, 32 nt, Human
gaguccaggaccuuagacccaggaugagcaaa

SEQ ID NO: 161583 - RNA, 32 nt, Human
gaguccaggagaaggugcugcucuccuugcuu

SEQ ID NO: 161584 - RNA, 32 nt, Human
gaguccaggagaccagccugggcaacauagca

SEQ ID NO: 161585 - RNA, 32 nt, Human
gaguccaggaggcggaggcugcagugagcugu

SEQ ID NO: 161586 - RNA, 32 nt, Human
gaguccaggaggucgaggcugcagugagccaa

SEQ ID NO: 161587 - RNA, 32 nt, Human
gaguccaggagguugaggcugcagugagcugu

SEQ ID NO: 161588 - RNA, 32 nt, Human
gaguccaggaguucaaggccagccugggcaac

SEQ ID NO: 161589 - RNA, 32 nt, Human
gaguccaggaguucaaggcugcagugaguugu

SEQ ID NO: 161590 - RNA, 32 nt, Human
gaguccaggaguuuaagaccagccuggacaac

SEQ ID NO: 161591 - RNA, 32 nt, Human
gaguccaggaguuugagaccagccuggacaac

SEQ ID NO: 161592 - RNA, 32 nt, Human
gaguccaggaguuugagaccagccugggcaac

SEQ ID NO: 161593 - RNA, 32 nt, Human
gaguccaggauucagaucugguuucagaaucg

SEQ ID NO: 161594 - RNA, 32 nt, Human
gaguccagggagaggcaagauugagcaauagu

SEQ ID NO: 161595 - RNA, 32 nt, Human
gaguccagggagaucccaaaaauaaggcaaag

SEQ ID NO: 161596 - RNA, 32 nt, Human
gaguccauacagccaagacaauccucagcaga

SEQ ID NO: 161597 - RNA, 32 nt, Human
gaguccauccuucccagguucuccccugggag

SEQ ID NO: 161598 - RNA, 32 nt, Human
gaguccauggugcuaggaggaggaguugcauc

SEQ ID NO: 161599 - RNA, 32 nt, Human
gaguccauguguuuagaagcaggccacacagc

SEQ ID NO: 161600 - RNA, 32 nt, Human
gaguccauuacuuccuuucuuccuucauauuu

SEQ ID NO: 161601 - RNA, 32 nt, Human
gagucccaaaacugaagaacugggaguccgau

SEQ ID NO: 161602 - RNA, 32 nt, Human
gagucccaaccaccgaaacaccaccauccugu

SEQ ID NO: 161603 - RNA, 32 nt, Human
gagucccagaauuugaggccagccugggcaac

SEQ ID NO: 161604 - RNA, 32 nt, Human
gagucccagcaccuccugaugucuggcuccau

SEQ ID NO: 161605 - RNA, 32 nt, Human
gagucccagcgacuugggaggcugagguggga

SEQ ID NO: 161606 - RNA, 32 nt, Human
gagucccagcuacucaggaggcugagguggga

SEQ ID NO: 161607 - RNA, 32 nt, Human
gagucccagcuacuccggaggcugagggagga

SEQ ID NO: 161608 - RNA, 32 nt, Human
gagucccagcuacucgggaggcugaggcacaa

SEQ ID NO: 161609 - RNA, 32 nt, Human
gagucccagcuacucgggaggcugaggcagga

SEQ ID NO: 161610 - RNA, 32 nt, Human
gagucccaggaacucggagacuggcacagcug

SEQ ID NO: 161611 - RNA, 32 nt, Human
gagucccaggauccagauuuagccucagaucu

SEQ ID NO: 161612 - RNA, 32 nt, Human
gagucccagguaagcugcguucccugggcuga

SEQ ID NO: 161613 - RNA, 32 nt, Human
gagucccaguuacaucaaacagugacuuccag

SEQ ID NO: 161614 - RNA, 32 nt, Human
gagucccauauguaaucaagagaccuggaggg

SEQ ID NO: 161615 - RNA, 32 nt, Human
gagucccaucccauccucugcccucuguuggc

SEQ ID NO: 161616 - RNA, 32 nt, Human
gagucccaugacuguuucucuuccucucuuuc

SEQ ID NO: 161617 - RNA, 32 nt, Human
gaguccccagaaccagcugcagauggagguuu

SEQ ID NO: 161618 - RNA, 32 nt, Human
gaguccccagcaccugcuacagugagcugcca

SEQ ID NO: 161619 - RNA, 32 nt, Human
gaguccccagcaggaaggucucaccugaggug

SEQ ID NO: 161620 - RNA, 22 nt, Human
gaguccccgcacccuaaccacu

SEQ ID NO: 161621 - RNA, 20 nt, Human
gaguccccgcgucccugccc

SEQ ID NO: 161622 - RNA, 32 nt, Human
gaguccccguucacacugaggaacggagaccu

SEQ ID NO: 161623 - RNA, 32 nt, Human
gaguccccuccagaccuggcuggccccugcag

SEQ ID NO: 161624 - RNA, 25 nt, Human
gagucccggggcggugccugucuca

SEQ ID NO: 161625 - RNA, 25 nt, Human
gagucccucccugcuucccaaaagc

SEQ ID NO: 161626 - RNA, 32 nt, Human
gagucccugagcccaccucccagcccucuccu

SEQ ID NO: 161627 - RNA, 32 nt, Human
gagucccugcagccacucaugcgggcccagag

SEQ ID NO: 161628 - RNA, 32 nt, Human
gagucccugcagcucagcacccccagccuggu

SEQ ID NO: 161629 - RNA, 32 nt, Human
gagucccugccaucauguuuacagaggacagu

SEQ ID NO: 161630 - RNA, 32 nt, Human
gagucccugcuguaacuggcccuguccaggga

SEQ ID NO: 161631 - RNA, 32 nt, Human
gagucccuggagcagggguuuggggcugcgcc

SEQ ID NO: 161632 - RNA, 20 nt, Human
gagucccuggagggaacauu

SEQ ID NO: 161633 - RNA, 32 nt, Human
gagucccugggcuggggaagacagauccacca

SEQ ID NO: 161634 - RNA, 32 nt, Human
gagucccuuuccacauuguggaagcuuuguuc

SEQ ID NO: 161635 - RNA, 32 nt, Human
gagucccuuuuguggagaaagggagaugaaaa

SEQ ID NO: 161636 - RNA, 32 nt, Human
gaguccgagcccugcuccuugugggcgcucac

SEQ ID NO: 161637 - RNA, 22 nt, Human
gaguccgaggcagguggaucac

SEQ ID NO: 161638 - RNA, 32 nt, Human
gaguccgaggcagguggaucaccugaggucag

SEQ ID NO: 161639 - RNA, 32 nt, Human
gaguccgaggcaugcggaucacuugaggucag

SEQ ID NO: 161640 - RNA, 32 nt, Human
gaguccgagguggguggaucaccugaggccag

SEQ ID NO: 161641 - RNA, 32 nt, Human
gaguccgagguggguggaucaccugagguugg

SEQ ID NO: 161642 - RNA, 32 nt, Human
gaguccgcagaggccguaucacccucuucacc

SEQ ID NO: 161643 - RNA, 32 nt, Human
gaguccgcgauggagaaaacuuuagaaacugu

SEQ ID NO: 161644 - RNA, 32 nt, Human
gaguccgcugguagugggcugcauggugugac

SEQ ID NO: 161645 - RNA, 32 nt, Human
gaguccggagcaugguccugggucaccguugg

SEQ ID NO: 161646 - RNA, 32 nt, Human
gaguccggauuucuaacagucccugcuuuggg

SEQ ID NO: 161647 - RNA, 32 nt, Human
gaguccggccccaggccagggacuaaggagca

SEQ ID NO: 161648 - RNA, 32 nt, Human
gaguccgggaagggagacgagcgucugaagac

SEQ ID NO: 161649 - RNA, 32 nt, Human
gaguccgggaguucagaaccagccuggacaac

SEQ ID NO: 161650 - RNA, 32 nt, Human
gaguccgggaguuugagucugcagugagcuau

SEQ ID NO: 161651 - RNA, 32 nt, Human
gaguccgguggcccaaucgcuguuacuacuuc

SEQ ID NO: 161652 - RNA, 32 nt, Human
gaguccguccccggugcugccugcgcguucac

SEQ ID NO: 161653 - RNA, 32 nt, Human
gaguccgucucauucuggcuggucgagugacc

SEQ ID NO: 161654 - RNA, 32 nt, Human
gaguccgucuguccuauccagcacuacccuuc

SEQ ID NO: 161655 - RNA, 32 nt, Human
gaguccguucaugucaugugguuugggaugaa

SEQ ID NO: 161656 - RNA, 32 nt, Human
gaguccuagagaggcagacaauguugaugagc

SEQ ID NO: 161657 - RNA, 32 nt, Human
gaguccuagccccaaaugugacuuuauuugga

SEQ ID NO: 161658 - RNA, 32 nt, Human
gaguccuaggcucccauuccugcuccauuacc

SEQ ID NO: 161659 - RNA, 26 nt, Human
gaguccucaucaucccccuccugccc

SEQ ID NO: 161660 - RNA, 21 nt, Human
gaguccuccgacuccugccca

SEQ ID NO: 161661 - RNA, 22 nt, Human
gaguccuccggaccccugccca

SEQ ID NO: 161662 - RNA, 23 nt, Human
gaguccucgagucgcccugccca

SEQ ID NO: 161663 - RNA, 22 nt, Human
gaguccucgcugcucaugccca

SEQ ID NO: 161664 - RNA, 20 nt, Human
gaguccucgcuguccccgcc

SEQ ID NO: 161665 - RNA, 27 nt, Human
gaguccucggccagcccugccugccca

SEQ ID NO: 161666 - RNA, 32 nt, Human
gaguccucuccucugcaauguguuauucuuuc

SEQ ID NO: 161667 - RNA, 32 nt, Human
gaguccucucugucacacaugaagccagguga

SEQ ID NO: 161668 - RNA, 22 nt, Human
gaguccucugacguccugccca

SEQ ID NO: 161669 - RNA, 22 nt, Human
gaguccucugacuuccugccca

SEQ ID NO: 161670 - RNA, 32 nt, Human
gaguccucugauggaaauguagucccuggauu

SEQ ID NO: 161671 - RNA, 32 nt, Human
gaguccucugcucuccagaggaccaagaaaua

SEQ ID NO: 161672 - RNA, 32 nt, Human
gaguccucuguggucccugcugccaccauggc

SEQ ID NO: 161673 - RNA, 32 nt, Human
gaguccugaacaucccuccuuucaggcugcag

SEQ ID NO: 161674 - RNA, 32 nt, Human
gaguccugagacacuuagcuucccucucccuc

SEQ ID NO: 161675 - RNA, 32 nt, Human
gaguccugagagcagcgcagaggcuuuggagg

SEQ ID NO: 161676 - RNA, 32 nt, Human
gaguccugauugccugauucagucccaaaaau

SEQ ID NO: 161677 - RNA, 32 nt, Human
gaguccugcagaguccuuccagccuaggccug

SEQ ID NO: 161678 - RNA, 32 nt, Human
gaguccuggaagagagagaugagccagggcag

SEQ ID NO: 161679 - RNA, 23 nt, Human
gaguccuggaccuccuaaccacu

SEQ ID NO: 161680 - RNA, 32 nt, Human
gaguccuggaguuaagggaugaaggcaaggcu

SEQ ID NO: 161681 - RNA, 32 nt, Human
gaguccuggaguuugagaucagccugggcaac

SEQ ID NO: 161682 - RNA, 32 nt, Human
gaguccuggcucccucacuccuggguuccagg

SEQ ID NO: 161683 - RNA, 32 nt, Human
gaguccuggcuugggagggaaggucugaguuc

SEQ ID NO: 161684 - RNA, 32 nt, Human
gaguccugggaggccggugguaaucauguagg

SEQ ID NO: 161685 - RNA, 32 nt, Human
gaguccuggggucuccgcaaggccucagugcc

SEQ ID NO: 161686 - RNA, 32 nt, Human
gaguccuggguggagaaagaagagaagcagaa

SEQ ID NO: 161687 - RNA, 32 nt, Human
gaguccugguuucccuguucaccagcuggaug

SEQ ID NO: 161688 - RNA, 32 nt, Human
gaguccuguaguaguuucaguguuagauacag

SEQ ID NO: 161689 - RNA, 32 nt, Human
gaguccugucccucaccuccuucaccaguguc

SEQ ID NO: 161690 - RNA, 24 nt, Human
gaguccuuaccgccucccuaccca

SEQ ID NO: 161691 - RNA, 32 nt, Human
gaguccuuccgccuggggcccugccgaccccc

SEQ ID NO: 161692 - RNA, 21 nt, Human
gaguccuuccuccuccaccca

SEQ ID NO: 161693 - RNA, 32 nt, Human
gaguccuuccuccuccacccagaccucacugc

SEQ ID NO: 161694 - RNA, 32 nt, Human
gaguccuugaaaccagcccuccgaacauaaau

SEQ ID NO: 161695 - RNA, 19 nt, Human
gaguccuugcaggaccuca

SEQ ID NO: 161696 - RNA, 32 nt, Human
gaguccuugcccaggcuggagugcaguggcgc

SEQ ID NO: 161697 - RNA, 32 nt, Human
gaguccuuggacucccccugggucucccuccg

SEQ ID NO: 161698 - RNA, 32 nt, Human
gagucgaccagaggcaucgcgccagccagcuc

SEQ ID NO: 161699 - RNA, 32 nt, Human
gagucgagaucauugcacuccagccugggcaa

SEQ ID NO: 161700 - RNA, 32 nt, Human
gagucgagauugcaccacuacacuccagccug

SEQ ID NO: 161701 - RNA, 22 nt, Human
gagucgauacugugaguuucca

SEQ ID NO: 161702 - RNA, 32 nt, Human
gagucgaugccuuucuaaggguuggagcugcu

SEQ ID NO: 161703 - RNA, 32 nt, Human
gagucgcaggccgaggagacagugagugcgcg

SEQ ID NO: 161704 - RNA, 32 nt, Human
gagucgcccaggcuggagagcgguggcgcgau

SEQ ID NO: 161705 - RNA, 32 nt, Human
gagucgcccgggagcaggugcugcagccagag

SEQ ID NO: 161706 - RNA, 32 nt, Human
gagucgcgaggccggacgcagcgcggcgccgc

SEQ ID NO: 161707 - RNA, 32 nt, Human
gagucgcugcuggccucaggcauuugaauuag

SEQ ID NO: 161708 - RNA, 32 nt, Human
gagucggaaagagaagcuaaaguucuacagug

SEQ ID NO: 161709 - RNA, 32 nt, Human
gagucggauucccuccugccugcacgccuuca

SEQ ID NO: 161710 - RNA, 32 nt, Human
gagucggcacaaugaggaccaggcuugcugug

SEQ ID NO: 161711 - RNA, 32 nt, Human
gagucggcagccgccuacaccaaggcaacagc

SEQ ID NO: 161712 - RNA, 32 nt, Human
gagucgggaggccugaguguuccuuccagcau

SEQ ID NO: 161713 - RNA, 32 nt, Human
gagucgggguggcggccaggaggaaaggcaga

SEQ ID NO: 161714 - RNA, 22 nt, Human
gagucgggguuucaccauguug

SEQ ID NO: 161715 - RNA, 32 nt, Human
gagucggucccugcuccugugaggcucucacc

SEQ ID NO: 161716 - RNA, 32 nt, Human
gagucguauucaaccacugucugccaucacug

SEQ ID NO: 161717 - RNA, 32 nt, Human
gagucgucacccuuggauuuuauggaucacgg

SEQ ID NO: 161718 - RNA, 24 nt, Human
gagucgugauugugccacugcacu

SEQ ID NO: 161719 - RNA, 22 nt, Human
gagucgugauuuuuacuuugaa

SEQ ID NO: 161720 - RNA, 22 nt, Human
gagucgugguuucuugccuuga

SEQ ID NO: 161721 - RNA, 32 nt, Human
gagucgugugcgugccuuggucgcuucuguag

SEQ ID NO: 161722 - RNA, 32 nt, Human
gagucguucccucuguuucuguccucagauga

SEQ ID NO: 161723 - RNA, 32 nt, Human
gagucuaaauccaaggaacugucugucucaaa

SEQ ID NO: 161724 - RNA, 32 nt, Human
gagucuaagaguuugagaccagccugggcaac

SEQ ID NO: 161725 - RNA, 32 nt, Human
gagucuaaggagaccuggcagccugagauacc

SEQ ID NO: 161726 - RNA, 32 nt, Human
gagucuaauagacuguuuugcaauaauuagaa

SEQ ID NO: 161727 - RNA, 32 nt, Human
gagucuacagcaguaucucugccugguguccc

SEQ ID NO: 161728 - RNA, 32 nt, Human
gagucuacaggcacaacugcugccucacaaca

SEQ ID NO: 161729 - RNA, 32 nt, Human
gagucuagagcugacaggccuuagagagggaa

SEQ ID NO: 161730 - RNA, 32 nt, Human
gagucuagccugggaaacauagcaagacccug

SEQ ID NO: 161731 - RNA, 32 nt, Human
gagucuagcuuuccuguacuagaugguguucu

SEQ ID NO: 161732 - RNA, 32 nt, Human
gagucuaggcuguuuuccucagcacugacugc

SEQ ID NO: 161733 - RNA, 32 nt, Human
gagucuagggcuggggcuacauuuggcuucug

SEQ ID NO: 161734 - RNA, 32 nt, Human
gagucuaggugcagcagcuccaagcaugggac

SEQ ID NO: 161735 - RNA, 22 nt, Human
gagucuagugcagacccgugau

SEQ ID NO: 161736 - RNA, 32 nt, Human
gagucucaacucacucuagccugggugacaga

SEQ ID NO: 161737 - RNA, 32 nt, Human
gagucucacucucgucgcccaggcuggaaugc

SEQ ID NO: 161738 - RNA, 32 nt, Human
gagucucacucugucacccagacuggagugca

SEQ ID NO: 161739 - RNA, 32 nt, Human
gagucucacucugucucccaggcuggagugca

SEQ ID NO: 161740 - RNA, 32 nt, Human
gagucucacucugucucccaggcuggagugug

SEQ ID NO: 161741 - RNA, 32 nt, Human
gagucucacucugucucccaggcuggaguugc

SEQ ID NO: 161742 - RNA, 32 nt, Human
gagucucacugggcugguugugcugcaggcuc

SEQ ID NO: 161743 - RNA, 32 nt, Human
gagucucacuuuccuccucugugaaauggggg

SEQ ID NO: 161744 - RNA, 32 nt, Human
gagucucagaagaccugugcaggcuggcguga

SEQ ID NO: 161745 - RNA, 32 nt, Human
gagucucagccgcgcaccccuuccucgcguua

SEQ ID NO: 161746 - RNA, 32 nt, Human
gagucucaggucagcuggaugaugccacaagg

SEQ ID NO: 161747 - RNA, 32 nt, Human
gagucucagucgcccaggcuggagugcagcag

SEQ ID NO: 161748 - RNA, 32 nt, Human
gagucuccagccugugcagaaggggcaggacu

SEQ ID NO: 161749 - RNA, 32 nt, Human
gagucucccguugagccugcagaaggagcaug

SEQ ID NO: 161750 - RNA, 32 nt, Human
gagucucccucucagcccuggagguucacggc

SEQ ID NO: 161751 - RNA, 32 nt, Human
gagucucccuuggaauucauccugcuccuucu

SEQ ID NO: 161752 - RNA, 32 nt, Human
gagucuccucuugccucuaccuacuccgccuu

SEQ ID NO: 161753 - RNA, 32 nt, Human
gagucuccugcacugugucucccacacugaga

SEQ ID NO: 161754 - RNA, 32 nt, Human
gagucucgcucucuggagugcaauggcgcaau

SEQ ID NO: 161755 - RNA, 32 nt, Human
gagucucgcucugcacuccagccuggcgacug

SEQ ID NO: 161756 - RNA, 32 nt, Human
gagucucgcucugucucccaggcuagaguacc

SEQ ID NO: 161757 - RNA, 20 nt, Human
gagucucggcauagucccca

SEQ ID NO: 161758 - RNA, 32 nt, Human
gagucucggcuggagugcaguggugcaguggu

SEQ ID NO: 161759 - RNA, 32 nt, Human
gagucucucccaguagaaugcagccucccuuc

SEQ ID NO: 161760 - RNA, 32 nt, Human
gagucucuccuuuucagacauccugggaugaa

SEQ ID NO: 161761 - RNA, 21 nt, Human
gagucucucucuuccugccca

SEQ ID NO: 161762 - RNA, 32 nt, Human
gagucucucugcacuccagccugggugacaga

SEQ ID NO: 161763 - RNA, 20 nt, Human
gagucucucugccucaacca

SEQ ID NO: 161764 - RNA, 32 nt, Human
gagucucucuuccuccucagcgaaccacuagg

SEQ ID NO: 161765 - RNA, 32 nt, Human
gagucucucuuuccuuccuccucgaucuuuag

SEQ ID NO: 161766 - RNA, 32 nt, Human
gagucucugcauagauacaaaauauuauuaaa

SEQ ID NO: 161767 - RNA, 32 nt, Human
gagucucuggcgucccaaauugccuguuuuuc

SEQ ID NO: 161768 - RNA, 32 nt, Human
gagucucugguagccugcagaaguaagccuca

SEQ ID NO: 161769 - RNA, 32 nt, Human
gagucucugucacccaggcuggagugcaaugg

SEQ ID NO: 161770 - RNA, 32 nt, Human
gagucucuguugcccaggcugcagugcagugg

SEQ ID NO: 161771 - RNA, 32 nt, Human
gagucucuguugcccaggcuggagugcagugg

SEQ ID NO: 161772 - RNA, 32 nt, Human
gagucugaaaccauuccauuucauuuugguga

SEQ ID NO: 161773 - RNA, 32 nt, Human
gagucugaaauccuguuuaguccucugugcau

SEQ ID NO: 161774 - RNA, 32 nt, Human
gagucugagacaggcagaucaccugaggucac

SEQ ID NO: 161775 - RNA, 32 nt, Human
gagucugagcuaugaguggccccuguggagag

SEQ ID NO: 161776 - RNA, 32 nt, Human
gagucugaggcaccagggugugcucaaaggcu

SEQ ID NO: 161777 - RNA, 32 nt, Human
gagucugaggcagaggauggcaugugccagga

SEQ ID NO: 161778 - RNA, 32 nt, Human
gagucugaggcugauuccaguagaauuagcag

SEQ ID NO: 161779 - RNA, 32 nt, Human
gagucugaggcugcgguaagcuguguucgcac

SEQ ID NO: 161780 - RNA, 32 nt, Human
gagucugagggaggggagugggagucucagca

SEQ ID NO: 161781 - RNA, 32 nt, Human
gagucugagucccagcccugagcacuuaggag

SEQ ID NO: 161782 - RNA, 32 nt, Human
gagucugauguccaagggcaggaagcauccag

SEQ ID NO: 161783 - RNA, 32 nt, Human
gagucugcagugagccaagaucgcggcauugc

SEQ ID NO: 161784 - RNA, 32 nt, Human
gagucugcagugagccgagaucaugccacugc

SEQ ID NO: 161785 - RNA, 32 nt, Human
gagucugcagugagcuaugaucaugccacugc

SEQ ID NO: 161786 - RNA, 32 nt, Human
gagucugcagugagcuaugaucgcaccacugc

SEQ ID NO: 161787 - RNA, 32 nt, Human
gagucugccacauugcuuuaaggagcgcagaa

SEQ ID NO: 161788 - RNA, 32 nt, Human
gagucugccacccaggcuggaguccaguggcg

SEQ ID NO: 161789 - RNA, 32 nt, Human
gagucugccccagggagaaagaauccugcuuc

SEQ ID NO: 161790 - RNA, 32 nt, Human
gagucugcguaacagucucccacuggcuggcu

SEQ ID NO: 161791 - RNA, 32 nt, Human
gagucugcguguguuagcaugccuguauguga

SEQ ID NO: 161792 - RNA, 32 nt, Human
gagucugcucucauccuaucagaaagaggcuu

SEQ ID NO: 161793 - RNA, 32 nt, Human
gagucugcugggauuccacugucauggacaac

SEQ ID NO: 161794 - RNA, 32 nt, Human
gagucuggaaugucugccugugccucagcugu

SEQ ID NO: 161795 - RNA, 32 nt, Human
gagucuggacucaggucagcagagggaagcgu

SEQ ID NO: 161796 - RNA, 32 nt, Human
gagucuggagugaaccacggguugaggaaguc

SEQ ID NO: 161797 - RNA, 22 nt, Human
gagucuggccuuuccaaucccc

SEQ ID NO: 161798 - RNA, 22 nt, Human
gagucuggcucagcagcccccu

SEQ ID NO: 161799 - RNA, 32 nt, Human
gagucuggcucugucucccaggcuggagugca

SEQ ID NO: 161800 - RNA, 21 nt, Human
gagucugggaaauacuaguuu

SEQ ID NO: 161801 - RNA, 32 nt, Human
gagucugggaacaaagagaggagccagccucc

SEQ ID NO: 161802 - RNA, 32 nt, Human
gagucugggaccccuccugggauccccagcac

SEQ ID NO: 161803 - RNA, 32 nt, Human
gagucugggacugcccuggccuaagaugggcc

SEQ ID NO: 161804 - RNA, 32 nt, Human
gagucugggaggcagguuuccaagagcaggga

SEQ ID NO: 161805 - RNA, 32 nt, Human
gagucugggaggcggagguugcagugagcuga

SEQ ID NO: 161806 - RNA, 32 nt, Human
gagucugggagguggaggcugcagugagccgu

SEQ ID NO: 161807 - RNA, 32 nt, Human
gagucugggcugagaccaguccuggccagggc

SEQ ID NO: 161808 - RNA, 32 nt, Human
gagucugggcugagaccaguccuggccagggu

SEQ ID NO: 161809 - RNA, 32 nt, Human
gagucugggugaagccagagguggcucuggga

SEQ ID NO: 161810 - RNA, 32 nt, Human
gagucugguaccuccccuccauuauagcucuc

SEQ ID NO: 161811 - RNA, 32 nt, Human
gagucugguccugccuagcucagauuucaugg

SEQ ID NO: 161812 - RNA, 32 nt, Human
gagucugguggaggagcugagggagggagcca

SEQ ID NO: 161813 - RNA, 32 nt, Human
gagucuguacucugcacuccaaugaggcuuca

SEQ ID NO: 161814 - RNA, 32 nt, Human
gagucugucccaaacaauauugagauauuugc

SEQ ID NO: 161815 - RNA, 32 nt, Human
gagucugucugagaguacaguaaauguuuuua

SEQ ID NO: 161816 - RNA, 32 nt, Human
gagucugugacuacaggcaaaucacgccaccu

SEQ ID NO: 161817 - RNA, 31 nt, Human
gagucugugguuuuaagacaugcaugauuuc

SEQ ID NO: 161818 - RNA, 32 nt, Human
gagucuguuaguaaaaauggcacuuugauucc

SEQ ID NO: 161819 - RNA, 32 nt, Human
gagucuguucacagccaaaauucuucccacug

SEQ ID NO: 161820 - RNA, 20 nt, Human
gagucuguuguguggaugug

SEQ ID NO: 161821 - RNA, 32 nt, Human
gagucuguuuuccucucuggaccucagucuuc

SEQ ID NO: 161822 - RNA, 32 nt, Human
gagucuguuuugcuccgauggaagcaucugua

SEQ ID NO: 161823 - RNA, 32 nt, Human
gagucuuaaccuuguacucagggaauuuugag

SEQ ID NO: 161824 - RNA, 32 nt, Human
gagucuuagggacuugaaaauguaucaugaua

SEQ ID NO: 161825 - RNA, 32 nt, Human
gagucuucaaagccagccugagccacauagug

SEQ ID NO: 161826 - RNA, 32 nt, Human
gagucuucaggcguggaugcagccugggggaa

SEQ ID NO: 161827 - RNA, 32 nt, Human
gagucuucagggacuccccauggccuagagua

SEQ ID NO: 161828 - RNA, 32 nt, Human
gagucuucagggacuccccauggccuggagua

SEQ ID NO: 161829 - RNA, 32 nt, Human
gagucuucuagucccaagggauugggagauga

SEQ ID NO: 161830 - RNA, 32 nt, Human
gagucuucuccucucucugaucucugugcugu

SEQ ID NO: 161831 - RNA, 32 nt, Human
gagucuugaacggggaacaugaccucggagcc

SEQ ID NO: 161832 - RNA, 32 nt, Human
gagucuugaggcccauugagugcagugugaga

SEQ ID NO: 161833 - RNA, 32 nt, Human
gagucuugcucugucucccaggcuagagugca

SEQ ID NO: 161834 - RNA, 32 nt, Human
gagucuugggauacugcuggcuuuacucuacc

SEQ ID NO: 161835 - RNA, 32 nt, Human
gagucuugggguacuggcagagcuguggcucg

SEQ ID NO: 161836 - RNA, 32 nt, Human
gagucuuuaaagaggaaggggaguggagggaa

SEQ ID NO: 161837 - RNA, 32 nt, Human
gagucuuucagcugaaaacuuuugccaugaag

SEQ ID NO: 161838 - RNA, 32 nt, Human
gagucuuucuccagcauuuccaguacaucuau

SEQ ID NO: 161839 - RNA, 32 nt, Human
gagucuuugcacauccugcucuuuccgccugg

SEQ ID NO: 161840 - RNA, 32 nt, Human
gagucuuuuaggacagauucucagaugggaug

SEQ ID NO: 161841 - RNA, 32 nt, Human
gagugaaaaugccacucuccugugccuaccaa

SEQ ID NO: 161842 - RNA, 32 nt, Human
gagugaaacagcaaaccccaaaucuucaaagu

SEQ ID NO: 161843 - RNA, 32 nt, Human
gagugaaagaggaugucuaaaaggggacagcc

SEQ ID NO: 161844 - RNA, 32 nt, Human
gagugaaaguggcgcaaccucugccucccagg

SEQ ID NO: 161845 - RNA, 32 nt, Human
gagugaacccagaggcacguaugaaugaaagu

SEQ ID NO: 161846 - RNA, 32 nt, Human
gagugaaccugaccugauagccucaggauuca

SEQ ID NO: 161847 - RNA, 32 nt, Human
gagugaagaaccuagauauaaagcuuuacaga

SEQ ID NO: 161848 - RNA, 32 nt, Human
gagugaagaagaggaggagacgccaagcagag

SEQ ID NO: 161849 - RNA, 32 nt, Human
gagugaagacaacauggggcauuuagaaaaua

SEQ ID NO: 161850 - RNA, 23 nt, Human
gagugaagaccaccuggaucucc

SEQ ID NO: 161851 - RNA, 32 nt, Human
gagugaagagaauccaggcuggcagagcugga

SEQ ID NO: 161852 - RNA, 32 nt, Human
gagugaagaggaggaggcagccuggacuccag

SEQ ID NO: 161853 - RNA, 21 nt, Human
gagugaagauaaucucuccua

SEQ ID NO: 161854 - RNA, 32 nt, Human
gagugaagcccaggccuugugcaggcagggag

SEQ ID NO: 161855 - RNA, 32 nt, Human
gagugaaggaagagagacagaggaucaagggc

SEQ ID NO: 161856 - RNA, 32 nt, Human
gagugaaggagguggcguugcugagagcaguc

SEQ ID NO: 161857 - RNA, 32 nt, Human
gagugaaggccuugaaggaugggugagaggug

SEQ ID NO: 161858 - RNA, 32 nt, Human
gagugaaguacggagccagggagggaggugag

SEQ ID NO: 161859 - RNA, 32 nt, Human
gagugaagucaugaccuccagggagccuagaa

SEQ ID NO: 161860 - RNA, 20 nt, Human
gagugaaucacuugagguca

SEQ ID NO: 161861 - RNA, 32 nt, Human
gagugaauguaguugcaccagguuaugaaaac

SEQ ID NO: 161862 - RNA, 32 nt, Human
gagugaauuaaaaugucugccucuccagacau

SEQ ID NO: 161863 - RNA, 32 nt, Human
gagugacaauccagcaagaaaucccucgcuag

SEQ ID NO: 161864 - RNA, 32 nt, Human
gagugacacugcaccuaguaggcacucaaaua

SEQ ID NO: 161865 - RNA, 32 nt, Human
gagugacagcaaccccagagaugaggcaccag

SEQ ID NO: 161866 - RNA, 32 nt, Human
gagugacagccuuuuuaugguugguguuacua

SEQ ID NO: 161867 - RNA, 32 nt, Human
gagugacaguaaccccagauggagagauaggg

SEQ ID NO: 161868 - RNA, 32 nt, Human
gagugacaguuacaguuguaacaagccuacuu

SEQ ID NO: 161869 - RNA, 32 nt, Human
gagugacauuuuaaaagacaucaaagaacucu

SEQ ID NO: 161870 - RNA, 32 nt, Human
gagugacccaucccuaagggcuucugggccaa

SEQ ID NO: 161871 - RNA, 17 nt, Human
gagugaccccugcucca

SEQ ID NO: 161872 - RNA, 32 nt, Human
gagugacccugcagagucacucagccaaaucu

SEQ ID NO: 161873 - RNA, 19 nt, Human
gagugaccucccuuugccu

SEQ ID NO: 161874 - RNA, 22 nt, Human
gagugaccuggaagaccuggag

SEQ ID NO: 161875 - RNA, 32 nt, Human
gagugaccuucuagaaaggaacugugagcucu

SEQ ID NO: 161876 - RNA, 23 nt, Human
gagugacgcgccugcacccgcug

SEQ ID NO: 161877 - RNA, 32 nt, Human
gagugacgcggcggagguguaguuugacgcgg

SEQ ID NO: 161878 - RNA, 32 nt, Human
gagugacgucucccugcugggagugcugguuc

SEQ ID NO: 161879 - RNA, 32 nt, Human
gagugacucccgcggucccaaggcuuuccaga

SEQ ID NO: 161880 - RNA, 32 nt, Human
gagugacucccguugucccaaggcuucccaga

SEQ ID NO: 161881 - RNA, 15 nt, Human
gagugacugacucca

SEQ ID NO: 161882 - RNA, 32 nt, Human
gagugacugccuggcccugcugcaacacuuag

SEQ ID NO: 161883 - RNA, 17 nt, Human
gagugacugcugcucca

SEQ ID NO: 161884 - RNA, 16 nt, Human
gagugacuggcuucca

SEQ ID NO: 161885 - RNA, 32 nt, Human
gagugacuguccaggggaaccagcagagggcg

SEQ ID NO: 161886 - RNA, 32 nt, Human
gagugacuuccucgggggauucccaggacaca

SEQ ID NO: 161887 - RNA, 32 nt, Human
gagugagaaaaggagagcaggaaaggcaaugg

SEQ ID NO: 161888 - RNA, 22 nt, Human
gagugagaaagacauggaggga

SEQ ID NO: 161889 - RNA, 32 nt, Human
gagugagaacagcauuuagugaaguugugcaa

SEQ ID NO: 161890 - RNA, 32 nt, Human
gagugagaaccuuggcggcuguggaggcugcc

SEQ ID NO: 161891 - RNA, 32 nt, Human
gagugagaagaaaagagcaccuccucauuuua

SEQ ID NO: 161892 - RNA, 32 nt, Human
gagugagaagcugaggauaaggaaagagcaag

SEQ ID NO: 161893 - RNA, 32 nt, Human
gagugagaaggugggaucuggugggaaggaaa

SEQ ID NO: 161894 - RNA, 32 nt, Human
gagugagacccugcggcagagacgacggaggc

SEQ ID NO: 161895 - RNA, 18 nt, Human
gagugagacccuguucca

SEQ ID NO: 161896 - RNA, 18 nt, Human
gagugagacucugcuuca

SEQ ID NO: 161897 - RNA, 32 nt, Human
gagugagagaagagaagaaaauuaguaaaagc

SEQ ID NO: 161898 - RNA, 32 nt, Human
gagugagagacaccagccuccacugccaggaa

SEQ ID NO: 161899 - RNA, 32 nt, Human
gagugagaggcagagcgaggacgccccucugc

SEQ ID NO: 161900 - RNA, 32 nt, Human
gagugagauuccaucugaaaaacaaaaacaaa

SEQ ID NO: 161901 - RNA, 32 nt, Human
gagugagcaagcagcacccccaccugcuggcu

SEQ ID NO: 161902 - RNA, 32 nt, Human
gagugagcaagcucuggugucucuuccucuuc

SEQ ID NO: 161903 - RNA, 32 nt, Human
gagugagcagaagaagccuggagaagagagaa

SEQ ID NO: 161904 - RNA, 31 nt, Human
gagugagcaggugaggagaaagacugaaaac

SEQ ID NO: 161905 - RNA, 32 nt, Human
gagugagcaggugaggagaaagacugaaaacu

SEQ ID NO: 161906 - RNA, 32 nt, Human
gagugagcagugaggcugucuccugcccucuu

SEQ ID NO: 161907 - RNA, 32 nt, Human
gagugagcaugcuggagaaugagagaccacau

SEQ ID NO: 161908 - RNA, 32 nt, Human
gagugagccagugccacccccugggccugagc

SEQ ID NO: 161909 - RNA, 32 nt, Human
gagugagcccauggugggcagugggcaaggcg

SEQ ID NO: 161910 - RNA, 32 nt, Human
gagugagcccuccgacccuggaggaguucaag

SEQ ID NO: 161911 - RNA, 32 nt, Human
gagugagcccugugcaugcacacacacuuacg

SEQ ID NO: 161912 - RNA, 32 nt, Human
gagugagccugggaguucgaggcugcagugag

SEQ ID NO: 161913 - RNA, 32 nt, Human
gagugagcgaugagccggcuucugucccuggc

SEQ ID NO: 161914 - RNA, 32 nt, Human
gagugagcucugcugccucuucugcugcccgc

SEQ ID NO: 161915 - RNA, 32 nt, Human
gagugagcugaccgaggcagagcgacuccaag

SEQ ID NO: 161916 - RNA, 32 nt, Human
gagugagcugccggaggauguccaccgccacg

SEQ ID NO: 161917 - RNA, 32 nt, Human
gagugagcugccugagaaaagaggguagggaa

SEQ ID NO: 161918 - RNA, 32 nt, Human
gagugagcuguugccgcagaaugggcugcugg

SEQ ID NO: 161919 - RNA, 32 nt, Human
gagugagcuuugccaaggacaucgcaucaggg

SEQ ID NO: 161920 - RNA, 32 nt, Human
gagugaggaagagcagaguauguggauacccg

SEQ ID NO: 161921 - RNA, 32 nt, Human
gagugaggaagugggauggggccugaccggaa

SEQ ID NO: 161922 - RNA, 32 nt, Human
gagugaggaaugugggagagaggcagaaaaag

SEQ ID NO: 161923 - RNA, 32 nt, Human
gagugaggacgcagggguaugaggcagggaga

SEQ ID NO: 161924 - RNA, 32 nt, Human
gagugaggacuucugcagcuuaucuucuggug

SEQ ID NO: 161925 - RNA, 32 nt, Human
gagugaggagaggaggagagaggcuugucaaa

SEQ ID NO: 161926 - RNA, 22 nt, Human
gagugaggaggaggagcuggaa

SEQ ID NO: 161927 - RNA, 23 nt, Human
gagugaggagggagaacuuggaa

SEQ ID NO: 161928 - RNA, 32 nt, Human
gagugaggcagugggagaagaggugguggucg

SEQ ID NO: 161929 - RNA, 32 nt, Human
gagugaggccaggagugggauucagcugcagc

SEQ ID NO: 161930 - RNA, 32 nt, Human
gagugaggccgaggccgggaggccgugcccgg

SEQ ID NO: 161931 - RNA, 32 nt, Human
gagugaggcggcggaggagccaggugaggagg

SEQ ID NO: 161932 - RNA, 32 nt, Human
gagugaggcugacagcggggaaccugggagac

SEQ ID NO: 161933 - RNA, 32 nt, Human
gagugaggcugcugccugcgcccugcucccac

SEQ ID NO: 161934 - RNA, 32 nt, Human
gagugaggcuggggcguccagguccgagaggu

SEQ ID NO: 161935 - RNA, 32 nt, Human
gagugagggaagggacagggaggggaagcccu

SEQ ID NO: 161936 - RNA, 32 nt, Human
gagugagggaguagauaaaacagcugcaauau

SEQ ID NO: 161937 - RNA, 32 nt, Human
gagugagggcuguggcccugccucacacaacc

SEQ ID NO: 161938 - RNA, 32 nt, Human
gagugaggguaagggaaagaauaucuuauuuc

SEQ ID NO: 161939 - RNA, 22 nt, Human
gagugaggguuucaccauguug

SEQ ID NO: 161940 - RNA, 23 nt, Human
gagugaggguuucaccauguugg

SEQ ID NO: 161941 - RNA, 32 nt, Human
gagugaguccauccuucccagguucuccccug

SEQ ID NO: 161942 - RNA, 32 nt, Human
gagugagugagagggcagaggaaauacucaau

SEQ ID NO: 161943 - RNA, 32 nt, Human
gagugaguggagagaggagaggcaacgaaguc

SEQ ID NO: 161944 - RNA, 32 nt, Human
gagugagugugugccuggcaggaaagcaggga

SEQ ID NO: 161945 - RNA, 32 nt, Human
gagugaguuauggugcuggcuauauuuugcua

SEQ ID NO: 161946 - RNA, 32 nt, Human
gagugaguuggaguccuuucugucugucucca

SEQ ID NO: 161947 - RNA, 32 nt, Human
gagugaguuuuuagaagagaacuuuacgagcg

SEQ ID NO: 161948 - RNA, 32 nt, Human
gagugauaacaaggcuccacagagcgcaguuu

SEQ ID NO: 161949 - RNA, 32 nt, Human
gagugauaagaaguuuggcuucucccacccac

SEQ ID NO: 161950 - RNA, 32 nt, Human
gagugauagccaaacuccuuggucaccugcuc

SEQ ID NO: 161951 - RNA, 18 nt, Human
gagugauaggacauucua

SEQ ID NO: 161952 - RNA, 32 nt, Human
gagugauccugccucuggucccagcauccagc

SEQ ID NO: 161953 - RNA, 32 nt, Human
gagugaucucagcucacugcaaccucugucuc

SEQ ID NO: 161954 - RNA, 32 nt, Human
gagugaugcaauugcuggaggaagagccauga

SEQ ID NO: 161955 - RNA, 24 nt, Human
gagugaugcaccuucccgcugcug

SEQ ID NO: 161956 - RNA, 32 nt, Human
gagugauggagagagaccucucuaagaaggug

SEQ ID NO: 161957 - RNA, 29 nt, Human
gagugaugucuguguguuccuugccugcc

SEQ ID NO: 161958 - RNA, 32 nt, Human
gagugauuccaagugggaugguuguggcauua

SEQ ID NO: 161959 - RNA, 32 nt, Human
gagugauucuucagaugcccuucccaacuggu

SEQ ID NO: 161960 - RNA, 32 nt, Human
gagugauuucagcguugaacacaguauacuau

SEQ ID NO: 161961 - RNA, 32 nt, Human
gagugauuuccgauuucucuccuuucaguugu

SEQ ID NO: 161962 - RNA, 32 nt, Human
gagugauuugcaccuugcaaaaaugguccugg

SEQ ID NO: 161963 - RNA, 32 nt, Human
gagugcaaaucugccagccuaggcaacauagc

SEQ ID NO: 161964 - RNA, 32 nt, Human
gagugcaacaucacacuuggccguggcugagg

SEQ ID NO: 161965 - RNA, 19 nt, Human
gagugcaagcccugcucca

SEQ ID NO: 161966 - RNA, 32 nt, Human
gagugcaaucauggcucacugcagccuugaac

SEQ ID NO: 161967 - RNA, 32 nt, Human
gagugcaauguagucaacuccucacuuagggu

SEQ ID NO: 161968 - RNA, 32 nt, Human
gagugcacagagaccaacucccugggcuucau

SEQ ID NO: 161969 - RNA, 32 nt, Human
gagugcaccacugcacuccagccugggcaaca

SEQ ID NO: 161970 - RNA, 32 nt, Human
gagugcaccauugcacuccagccugggcaaaa

SEQ ID NO: 161971 - RNA, 32 nt, Human
gagugcaccucucuacuugggagguacaauug

SEQ ID NO: 161972 - RNA, 32 nt, Human
gagugcaccuguaaucccagcuacucuggagg

SEQ ID NO: 161973 - RNA, 32 nt, Human
gagugcacgccuguaaucccagcuucuuggga

SEQ ID NO: 161974 - RNA, 32 nt, Human
gagugcacuacuguacuccagccagggcaaga

SEQ ID NO: 161975 - RNA, 32 nt, Human
gagugcacuggcaggaagcagagauaagacuu

SEQ ID NO: 161976 - RNA, 32 nt, Human
gagugcagacugaagccagcagagaggaagga

SEQ ID NO: 161977 - RNA, 32 nt, Human
gagugcagacuucacaggugggggaagaauua

SEQ ID NO: 161978 - RNA, 18 nt, Human
gagugcagauugcucccc

SEQ ID NO: 161979 - RNA, 32 nt, Human
gagugcagcaggaaggaacaaagacaggcaaa

SEQ ID NO: 161980 - RNA, 32 nt, Human
gagugcagcgagcaaggggagagccaguugcg

SEQ ID NO: 161981 - RNA, 32 nt, Human
gagugcagcucgagagagauucagagauggaa

SEQ ID NO: 161982 - RNA, 16 nt, Human
gagugcagcucuggga

SEQ ID NO: 161983 - RNA, 32 nt, Human
gagugcaggaguuugagaccagccugggcaac

SEQ ID NO: 161984 - RNA, 32 nt, Human
gagugcagggauuacaggcgugagccacugcu

SEQ ID NO: 161985 - RNA, 32 nt, Human
gagugcaggggagggggcaaugguggaggugg

SEQ ID NO: 161986 - RNA, 32 nt, Human
gagugcagggugggggcaagacugggcuguag

SEQ ID NO: 161987 - RNA, 32 nt, Human
gagugcaggugggcauaggugcagugagugca

SEQ ID NO: 161988 - RNA, 32 nt, Human
gagugcaguccuugcucauauuuccuucaucu

SEQ ID NO: 161989 - RNA, 32 nt, Human
gagugcaguggcacagucucggcucacugcaa

SEQ ID NO: 161990 - RNA, 32 nt, Human
gagugcaguggcccaaucucggcucacugcaa

SEQ ID NO: 161991 - RNA, 32 nt, Human
gagugcaguggcgcgaucucagcugcugcaac

SEQ ID NO: 161992 - RNA, 32 nt, Human
gagugcaguggugccaucaccacggcucacug

SEQ ID NO: 161993 - RNA, 32 nt, Human
gagugcaguggugccaucauagcucacuguag

SEQ ID NO: 161994 - RNA, 32 nt, Human
gagugcaguggugccaucucggcucacugcaa

SEQ ID NO: 161995 - RNA, 32 nt, Human
gagugcaguggugccaucucggcucacugcag

SEQ ID NO: 161996 - RNA, 32 nt, Human
gagugcaguuugaacuugagauacagucaacu

SEQ ID NO: 161997 - RNA, 32 nt, Human
gagugcauauagaauuccuguacccacaugau

SEQ ID NO: 161998 - RNA, 32 nt, Human
gagugcaucugucaagucuuuguguuuucuuc

SEQ ID NO: 161999 - RNA, 32 nt, Human
gagugccacaucuggcagguuuggaaauuucc

SEQ ID NO: 162000 - RNA, 32 nt, Human
gagugccacugcaugagacaccugugaccauu

SEQ ID NO: 162001 - RNA, 32 nt, Human
gagugccagggaggaggaggcacacggagacc

SEQ ID NO: 162002 - RNA, 32 nt, Human
gagugccagguggcgggcaagcggugggcuuu

SEQ ID NO: 162003 - RNA, 32 nt, Human
gagugcccacuccccucuacuugcugcucugg

SEQ ID NO: 162004 - RNA, 32 nt, Human
gagugcccaucaaccucugcccaacacagagc

SEQ ID NO: 162005 - RNA, 32 nt, Human
gagugccccacugcacuccagccugggugaca

SEQ ID NO: 162006 - RNA, 32 nt, Human
gagugcccccucaggccagagggcagggccaa

SEQ ID NO: 162007 - RNA, 32 nt, Human
gagugcccugagcuacguggagcugcugcccc

SEQ ID NO: 162008 - RNA, 32 nt, Human
gagugcccugccccaaaacacccuaggcaaga

SEQ ID NO: 162009 - RNA, 32 nt, Human
gagugcccuuggggacacuuuuggcccaagau

SEQ ID NO: 162010 - RNA, 32 nt, Human
gagugcccuugugugcugacagccuggcugcu

SEQ ID NO: 162011 - RNA, 32 nt, Human
gagugcccuuuccuggaagguguuuuuaucug

SEQ ID NO: 162012 - RNA, 32 nt, Human
gagugcccuuucuccccgccucuucccccucc

SEQ ID NO: 162013 - RNA, 32 nt, Human
gagugccgccagaccuacugcugugcuguuuc

SEQ ID NO: 162014 - RNA, 32 nt, Human
gagugccgcccaaggucacaggcacagaaccu

SEQ ID NO: 162015 - RNA, 32 nt, Human
gagugccgucauagguguggucaucauccucu

SEQ ID NO: 162016 - RNA, 32 nt, Human
gagugccuacccucgccugccugggccucagu

SEQ ID NO: 162017 - RNA, 32 nt, Human
gagugccuacucuggcuugagcacuucuauau

SEQ ID NO: 162018 - RNA, 32 nt, Human
gagugccuccacccugauuuuugccucugcac

SEQ ID NO: 162019 - RNA, 32 nt, Human
gagugccucugagcagcucacagugugugccc

SEQ ID NO: 162020 - RNA, 19 nt, Human
gagugccugacccagguca

SEQ ID NO: 162021 - RNA, 32 nt, Human
gagugccugaggccaccaugccacagucaaag

SEQ ID NO: 162022 - RNA, 32 nt, Human
gagugccugcagucccagcuacucgggaagcu

SEQ ID NO: 162023 - RNA, 32 nt, Human
gagugccugcugcagaccgaggcugggccaag

SEQ ID NO: 162024 - RNA, 32 nt, Human
gagugccugcuguugucuuugcccauguuguu

SEQ ID NO: 162025 - RNA, 32 nt, Human
gagugccuggauuacaggcaugagccacugca

SEQ ID NO: 162026 - RNA, 32 nt, Human
gagugccuggccaggucgguccugacucuccu

SEQ ID NO: 162027 - RNA, 32 nt, Human
gagugccuggcccggagugccugcuggugugu

SEQ ID NO: 162028 - RNA, 32 nt, Human
gagugccuguaaucacagcuacuugggaggcu

SEQ ID NO: 162029 - RNA, 32 nt, Human
gagugccuguaaucccagcuacucgggaggcu

SEQ ID NO: 162030 - RNA, 32 nt, Human
gagugccuguaaucccagcuacuugggaggcu

SEQ ID NO: 162031 - RNA, 32 nt, Human
gagugccuguaaucccagcuauucgggagccu

SEQ ID NO: 162032 - RNA, 32 nt, Human
gagugccuguaaucucaguuacucaggaggcu

SEQ ID NO: 162033 - RNA, 32 nt, Human
gagugccuguaguccaagcuacucaagaggcu

SEQ ID NO: 162034 - RNA, 32 nt, Human
gagugccuguagucccagcuacucaggaggcu

SEQ ID NO: 162035 - RNA, 32 nt, Human
gagugccuguccucccugucuacccaucucug

SEQ ID NO: 162036 - RNA, 32 nt, Human
gagugccuguguagcuggggauggggauuccu

SEQ ID NO: 162037 - RNA, 32 nt, Human
gagugccuuccagagaagcaucugcagccggc

SEQ ID NO: 162038 - RNA, 32 nt, Human
gagugcgccacuucacuccagccugggcaaca

SEQ ID NO: 162039 - RNA, 32 nt, Human
gagugcgcgggcugccccgggcuccucccugc

SEQ ID NO: 162040 - RNA, 32 nt, Human
gagugcggagagaaggggcaggauggggcugg

SEQ ID NO: 162041 - RNA, 32 nt, Human
gagugcggcaggcaguaccugccugacccuuc

SEQ ID NO: 162042 - RNA, 32 nt, Human
gagugcggcaucugcaggugcaccacauugcu

SEQ ID NO: 162043 - RNA, 32 nt, Human
gagugcggcucaagccuguaaucccagcacuu

SEQ ID NO: 162044 - RNA, 32 nt, Human
gagugcggcugcugagagccgagcccagcaau

SEQ ID NO: 162045 - RNA, 32 nt, Human
gagugcggggaggaguuugagaugggaggcgc

SEQ ID NO: 162046 - RNA, 32 nt, Human
gagugcggggcccuuccuccuggggacagaaa

SEQ ID NO: 162047 - RNA, 32 nt, Human
gagugcgggggagcuguggaugguggcaggag

SEQ ID NO: 162048 - RNA, 32 nt, Human
gagugcgggggcggaggcuggcagggggcgcu

SEQ ID NO: 162049 - RNA, 32 nt, Human
gagugcguguggggaccucagaacacugugac

SEQ ID NO: 162050 - RNA, 32 nt, Human
gagugcuaaucagcucaauggacccucugccu

SEQ ID NO: 162051 - RNA, 32 nt, Human
gagugcuagaagcaaagaaccaucaagucuag

SEQ ID NO: 162052 - RNA, 15 nt, Human
gagugcuagaagcca

SEQ ID NO: 162053 - RNA, 32 nt, Human
gagugcuaggaaaugaguccccugggaaaggg

SEQ ID NO: 162054 - RNA, 32 nt, Human
gagugcuaggauuacaggcaugagccacugca

SEQ ID NO: 162055 - RNA, 32 nt, Human
gagugcucagauagcccgcagaacaaaucaug

SEQ ID NO: 162056 - RNA, 32 nt, Human
gagugcucagucccuuggcacacugcuugcuc

SEQ ID NO: 162057 - RNA, 32 nt, Human
gagugcucugcacccuugggcuuuucaacucu

SEQ ID NO: 162058 - RNA, 32 nt, Human
gagugcucuguggacccacagccucagcugag

SEQ ID NO: 162059 - RNA, 32 nt, Human
gagugcucuguucaacagucugaggccucuga

SEQ ID NO: 162060 - RNA, 32 nt, Human
gagugcucuuucuucauacuuccuuuaaaaua

SEQ ID NO: 162061 - RNA, 32 nt, Human
gagugcugagagaaaggcucucugaguaggug

SEQ ID NO: 162062 - RNA, 32 nt, Human
gagugcugagauuacaggcgugagccuccgcg

SEQ ID NO: 162063 - RNA, 32 nt, Human
gagugcugagauuuacaggcgugagccaccgc

SEQ ID NO: 162064 - RNA, 32 nt, Human
gagugcugcacaucaugggcucugucugugag

SEQ ID NO: 162065 - RNA, 32 nt, Human
gagugcugcucuuuccaccugccuugcaaauu

SEQ ID NO: 162066 - RNA, 32 nt, Human
gagugcuggcucugcuauaugguacaacuaau

SEQ ID NO: 162067 - RNA, 32 nt, Human
gagugcugggaucacaggcgugagccaccgca

SEQ ID NO: 162068 - RNA, 32 nt, Human
gagugcugggauuacagacaugagccacugcg

SEQ ID NO: 162069 - RNA, 18 nt, Human
gagugcugggauuacagg

SEQ ID NO: 162070 - RNA, 32 nt, Human
gagugcugggauuacaggcaugagccacugca

SEQ ID NO: 162071 - RNA, 32 nt, Human
gagugcugggauuacaggcaugagccacugcg

SEQ ID NO: 162072 - RNA, 32 nt, Human
gagugcugggauuacaggcgucagccaccgug

SEQ ID NO: 162073 - RNA, 32 nt, Human
gagugcugggauuacaggcgugagccaccaca

SEQ ID NO: 162074 - RNA, 32 nt, Human
gagugcugggauuacaggcgugagccaccgca

SEQ ID NO: 162075 - RNA, 32 nt, Human
gagugcugggauuacaggcgugagccaccgcg

SEQ ID NO: 162076 - RNA, 32 nt, Human
gagugcugggauuacaggcgugagccacugca

SEQ ID NO: 162077 - RNA, 32 nt, Human
gagugcugggauuacaggcgugagccacugug

SEQ ID NO: 162078 - RNA, 32 nt, Human
gagugcugggauuacagggggagccacugugc

SEQ ID NO: 162079 - RNA, 20 nt, Human
gagugcugggauuacaggug

SEQ ID NO: 162080 - RNA, 32 nt, Human
gagugcugggauuacaggugugaaucaccaua

SEQ ID NO: 162081 - RNA, 32 nt, Human
gagugcugggauuacaggugugagccaccaug

SEQ ID NO: 162082 - RNA, 32 nt, Human
gagugcugggauuacaggugugagccacugcg

SEQ ID NO: 162083 - RNA, 32 nt, Human
gagugcugggauuacaggugugagccacugug

SEQ ID NO: 162084 - RNA, 32 nt, Human
gagugcugggauuacaggugugagcuacugcg

SEQ ID NO: 162085 - RNA, 20 nt, Human
gagugcugggauuacaguug

SEQ ID NO: 162086 - RNA, 32 nt, Human
gagugcugggauuacaguugugagccacugug

SEQ ID NO: 162087 - RNA, 32 nt, Human
gagugcuguaaggagagguuggaagugaagau

SEQ ID NO: 162088 - RNA, 32 nt, Human
gagugcugugggcucugguggggagggggcuc

SEQ ID NO: 162089 - RNA, 32 nt, Human
gagugcuguuuccuggcuggagugcaguggca

SEQ ID NO: 162090 - RNA, 32 nt, Human
gagugcuugcuaucccacuucauaaagcuuuu

SEQ ID NO: 162091 - RNA, 32 nt, Human
gaguggaaacuauucuaucauaacuacccaag

SEQ ID NO: 162092 - RNA, 32 nt, Human
gaguggaaagcagagggugaucuuugaaaaga

SEQ ID NO: 162093 - RNA, 32 nt, Human
gaguggaacccuggucaucgggguuuuuagcc

SEQ ID NO: 162094 - RNA, 32 nt, Human
gaguggaagaggggaaagagaggcagagaggg

SEQ ID NO: 162095 - RNA, 32 nt, Human
gaguggaaucaaguucuugucuuuaggaugac

SEQ ID NO: 162096 - RNA, 31 nt, Human
gaguggacaaugucuucccagcaggccagac

SEQ ID NO: 162097 - RNA, 32 nt, Human
gaguggacaguaagugguggcucugcagaugg

SEQ ID NO: 162098 - RNA, 32 nt, Human
gaguggacauagugucuugaggcuugcagggu

SEQ ID NO: 162099 - RNA, 32 nt, Human
gaguggaccaaaacacugcacacagugaagug

SEQ ID NO: 162100 - RNA, 32 nt, Human
gaguggaccgaggaaggaaggaaggcaaggcu

SEQ ID NO: 162101 - RNA, 32 nt, Human
gaguggaccucucugucccuugcccaccuuaa

SEQ ID NO: 162102 - RNA, 32 nt, Human
gaguggacggcauucagggcugggggacacgg

SEQ ID NO: 162103 - RNA, 32 nt, Human
gaguggacucuuccccucacccccaacugaaa

SEQ ID NO: 162104 - RNA, 32 nt, Human
gaguggagaaagggaaaggcaggucuggggug

SEQ ID NO: 162105 - RNA, 32 nt, Human
gaguggagagcagagccaggagcucuggcagc

SEQ ID NO: 162106 - RNA, 28 nt, Human
gaguggagaggagagagagcaaauauug

SEQ ID NO: 162107 - RNA, 32 nt, Human
gaguggagagguguuuaguugcuuagccaagc

SEQ ID NO: 162108 - RNA, 32 nt, Human
gaguggagagguuucucuagagguguagggga

SEQ ID NO: 162109 - RNA, 32 nt, Human
gaguggagagucuaccuucgucucacaugugc

SEQ ID NO: 162110 - RNA, 32 nt, Human
gaguggagagugaaucuagggagacucaagag

SEQ ID NO: 162111 - RNA, 32 nt, Human
gaguggagagugagugcgggaccugaggcugu

SEQ ID NO: 162112 - RNA, 32 nt, Human
gaguggagccaaaggaaaagaucguuagagac

SEQ ID NO: 162113 - RNA, 30 nt, Human
gaguggagcuugcaaugagccaagauugcg

SEQ ID NO: 162114 - RNA, 32 nt, Human
gaguggaggaagcacgggacuggagggaccaa

SEQ ID NO: 162115 - RNA, 32 nt, Human
gaguggaggagaggagacaaggcucuggacag

SEQ ID NO: 162116 - RNA, 32 nt, Human
gaguggaggguguaggauaugaggguuaggcc

SEQ ID NO: 162117 - RNA, 32 nt, Human
gaguggagucucucacugcaugugacguggaa

SEQ ID NO: 162118 - RNA, 19 nt, Human
gaguggagucuugcucugu

SEQ ID NO: 162119 - RNA, 32 nt, Human
gaguggaguggggcgagaguccuccgaguagu

SEQ ID NO: 162120 - RNA, 32 nt, Human
gaguggaguuacugcagggaagcuaccggacc

SEQ ID NO: 162121 - RNA, 32 nt, Human
gaguggaguucgagucucucccugcggcgcuu

SEQ ID NO: 162122 - RNA, 32 nt, Human
gaguggauaaacaccccaagguggugacaaug

SEQ ID NO: 162123 - RNA, 21 nt, Human
gaguggauaacucagaaguca

SEQ ID NO: 162124 - RNA, 20 nt, Human
gaguggaucaccugagguca

SEQ ID NO: 162125 - RNA, 20 nt, Human
gaguggaucacuugagguca

SEQ ID NO: 162126 - RNA, 32 nt, Human
gaguggaucaucucuuggaaaugcagaacuuc

SEQ ID NO: 162127 - RNA, 32 nt, Human
gaguggaugauagaugcaaaauaauaccuguc

SEQ ID NO: 162128 - RNA, 31 nt, Human
gaguggauguacccaacaggugcucucaucg

SEQ ID NO: 162129 - RNA, 32 nt, Human
gaguggcaagggauuuggucuucagcaguaga

SEQ ID NO: 162130 - RNA, 32 nt, Human
gaguggcacaaguacaaauccagccugccuug

SEQ ID NO: 162131 - RNA, 32 nt, Human
gaguggcagagggagcagucccaucagccaug

SEQ ID NO: 162132 - RNA, 32 nt, Human
gaguggcagcaacuggacuaugcucagaggac

SEQ ID NO: 162133 - RNA, 19 nt, Human
gaguggcaggggagcucug

SEQ ID NO: 162134 - RNA, 32 nt, Human
gaguggcagugugccugugcucccucaucaaa

SEQ ID NO: 162135 - RNA, 32 nt, Human
gaguggcaguuuacagaagaggucgcggggug

SEQ ID NO: 162136 - RNA, 32 nt, Human
gaguggcaucacaucuucaugccugcacagua

SEQ ID NO: 162137 - RNA, 32 nt, Human
gaguggcauggccaccaccacgguggucacug

SEQ ID NO: 162138 - RNA, 32 nt, Human
gaguggccacuggcacuugccugcugcuugga

SEQ ID NO: 162139 - RNA, 32 nt, Human
gaguggccauuuccuuaccuuugaucccugua

SEQ ID NO: 162140 - RNA, 32 nt, Human
gaguggcccagugagaagggaggccgggcacc

SEQ ID NO: 162141 - RNA, 32 nt, Human
gaguggccccagguucuucaucugggccuccu

SEQ ID NO: 162142 - RNA, 32 nt, Human
gaguggccggcugcaaccacggcuccucucca

SEQ ID NO: 162143 - RNA, 32 nt, Human
gaguggccgugccauaaaauagucccuuucca

SEQ ID NO: 162144 - RNA, 32 nt, Human
gaguggccguggcugugggcagcauccacacg

SEQ ID NO: 162145 - RNA, 32 nt, Human
gaguggccugauuacauauuccucccacagca

SEQ ID NO: 162146 - RNA, 32 nt, Human
gaguggccugcucucaccauggacccauucug

SEQ ID NO: 162147 - RNA, 32 nt, Human
gaguggccuuucuuuuccccucccucccgguu

SEQ ID NO: 162148 - RNA, 32 nt, Human
gaguggcgagguggugaccugaggccagugug

SEQ ID NO: 162149 - RNA, 32 nt, Human
gaguggcggccgcggcgguggcggagacugug

SEQ ID NO: 162150 - RNA, 32 nt, Human
gaguggcgugagcugcccggcgccugcccugc

SEQ ID NO: 162151 - RNA, 32 nt, Human
gaguggcucauaccuguaaucccagcacuuug

SEQ ID NO: 162152 - RNA, 32 nt, Human
gaguggcuccaauagccuccugccacccacac

SEQ ID NO: 162153 - RNA, 32 nt, Human
gaguggcuccacccuucccaccucagagccau

SEQ ID NO: 162154 - RNA, 32 nt, Human
gaguggcugacugccaucuccaugccugagag

SEQ ID NO: 162155 - RNA, 32 nt, Human
gaguggcugaguaaacugguacauccgggcug

SEQ ID NO: 162156 - RNA, 17 nt, Human
gaguggcugcugcccca

SEQ ID NO: 162157 - RNA, 21 nt, Human
gaguggcugggaccgcaggug

SEQ ID NO: 162158 - RNA, 32 nt, Human
gaguggcugggaugugggagcagcaucucuag

SEQ ID NO: 162159 - RNA, 19 nt, Human
gaguggcugggauuacagg

SEQ ID NO: 162160 - RNA, 19 nt, Human
gaguggcugggauuauagg

SEQ ID NO: 162161 - RNA, 24 nt, Human
gaguggcuuacaccuauaauccca

SEQ ID NO: 162162 - RNA, 32 nt, Human
gaguggcuucccaggggaaauucaagggcacc

SEQ ID NO: 162163 - RNA, 32 nt, Human
gaguggcuugugggguggcaggaugcaggaga

SEQ ID NO: 162164 - RNA, 32 nt, Human
gaguggcuuuguccaagaucccucaggugugg

SEQ ID NO: 162165 - RNA, 21 nt, Human
gagugggaagcaaacgggcag

SEQ ID NO: 162166 - RNA, 18 nt, Human
gagugggaaggccuggga

SEQ ID NO: 162167 - RNA, 32 nt, Human
gagugggaccggcuuccagccuguggcggugc

SEQ ID NO: 162168 - RNA, 32 nt, Human
gagugggagaccuuaaaaccgucugaucuggc

SEQ ID NO: 162169 - RNA, 32 nt, Human
gagugggagaucaucuuggaauggcaguggcc

SEQ ID NO: 162170 - RNA, 32 nt, Human
gagugggagcaagggagccagggagagcucac

SEQ ID NO: 162171 - RNA, 31 nt, Human
gagugggaggaggagagaugggugaagacaa

SEQ ID NO: 162172 - RNA, 32 nt, Human
gagugggaggcagagagagaagugugcucaga

SEQ ID NO: 162173 - RNA, 21 nt, Human
gagugggaggcagcagggcag

SEQ ID NO: 162174 - RNA, 32 nt, Human
gagugggaggcagggugcgguggcucaugccu

SEQ ID NO: 162175 - RNA, 32 nt, Human
gagugggagggguaugggacagguuuggguuu

SEQ ID NO: 162176 - RNA, 32 nt, Human
gagugggaggguagcgagccagcuggauuccg

SEQ ID NO: 162177 - RNA, 22 nt, Human
gagugggaguggggaccaggaa

SEQ ID NO: 162178 - RNA, 32 nt, Human
gagugggaguucugaggcagggugagggggca

SEQ ID NO: 162179 - RNA, 23 nt, Human
gagugggauuaacaacccuggaa

SEQ ID NO: 162180 - RNA, 32 nt, Human
gagugggcaauggugcuucugugcuuuucccc

SEQ ID NO: 162181 - RNA, 32 nt, Human
gagugggcagccccucuaccuccuggacugaa

SEQ ID NO: 162182 - RNA, 32 nt, Human
gagugggcaggcgguuccagggagacaagcag

SEQ ID NO: 162183 - RNA, 32 nt, Human
gagugggccacagcaggaucucaacgggaaag

SEQ ID NO: 162184 - RNA, 32 nt, Human
gagugggccaggaguucaagaucagccuggcc

SEQ ID NO: 162185 - RNA, 32 nt, Human
gagugggccaggaguuuaagaucagccuggcc

SEQ ID NO: 162186 - RNA, 23 nt, Human
gagugggcgccgccgccaccgcc

SEQ ID NO: 162187 - RNA, 32 nt, Human
gagugggcucuacugccuuguuccauauuauu

SEQ ID NO: 162188 - RNA, 32 nt, Human
gagugggcugggugggguggggugucucuggu

SEQ ID NO: 162189 - RNA, 32 nt, Human
gagugggcuucuggcuccuagaacaaaugucc

SEQ ID NO: 162190 - RNA, 32 nt, Human
gagugggcuuugcgagucugaacguuggcggg

SEQ ID NO: 162191 - RNA, 32 nt, Human
gaguggggaaacacugagucuuguugggucuu

SEQ ID NO: 162192 - RNA, 32 nt, Human
gaguggggacagagggagagcuugugacuggg

SEQ ID NO: 162193 - RNA, 32 nt, Human
gaguggggagagagaaggggaggaguagggug

SEQ ID NO: 162194 - RNA, 32 nt, Human
gaguggggagccugggcucagcuccucccccu

SEQ ID NO: 162195 - RNA, 32 nt, Human
gaguggggagcgcauuaagauccagggaugga

SEQ ID NO: 162196 - RNA, 32 nt, Human
gaguggggaggugcuucagcagcagcgggauc

SEQ ID NO: 162197 - RNA, 32 nt, Human
gaguggggaugaguccgucaagcacaacuguu

SEQ ID NO: 162198 - RNA, 32 nt, Human
gaguggggauggggacacagucuccaagugug

SEQ ID NO: 162199 - RNA, 19 nt, Human
gaguggggcagaggcccag

SEQ ID NO: 162200 - RNA, 21 nt, Human
gaguggggcagaggcccagaa

SEQ ID NO: 162201 - RNA, 32 nt, Human
gaguggggcaggcagugguugguggguggugu

SEQ ID NO: 162202 - RNA, 32 nt, Human
gaguggggcucccacaggcuggagugcaaugg

SEQ ID NO: 162203 - RNA, 32 nt, Human
gaguggggcugcauauuuggagaucaacuuug

SEQ ID NO: 162204 - RNA, 32 nt, Human
gaguggggcuggcuaguaggggaacauguagu

SEQ ID NO: 162205 - RNA, 32 nt, Human
gagugggggcaggcagaagggagaaccagcuc

SEQ ID NO: 162206 - RNA, 32 nt, Human
gagugggggcaguuucuggcccaggggucuga

SEQ ID NO: 162207 - RNA, 32 nt, Human
gagugggggcuccagcccuccccacuaugccc

SEQ ID NO: 162208 - RNA, 18 nt, Human
gaguggggggcguggcag

SEQ ID NO: 162209 - RNA, 16 nt, Human
gaguggggguggggug

SEQ ID NO: 162210 - RNA, 32 nt, Human
gagugggguuacuauguguaaauggagugcug

SEQ ID NO: 162211 - RNA, 20 nt, Human
gaguggguacccagagacca

SEQ ID NO: 162212 - RNA, 32 nt, Human
gagugggucauccugggggagcaaggccugag

SEQ ID NO: 162213 - RNA, 32 nt, Human
gagugggugacguccaggucacaggcugcagc

SEQ ID NO: 162214 - RNA, 32 nt, Human
gagugggugcgccagguggaccacgugaucga

SEQ ID NO: 162215 - RNA, 32 nt, Human
gagugguagggaggaucaggcugcagaagggc

SEQ ID NO: 162216 - RNA, 32 nt, Human
gagugguccguucucaccacccuucagcuugg

SEQ ID NO: 162217 - RNA, 32 nt, Human
gaguggucucugaggcggcggcggcggcgggg

SEQ ID NO: 162218 - RNA, 32 nt, Human
gaguggucuucuucagccuguuuccccagcca

SEQ ID NO: 162219 - RNA, 32 nt, Human
gaguggugaccaccccuuccagcaggcagguu

SEQ ID NO: 162220 - RNA, 32 nt, Human
gaguggugagggugaaccagaucugggccuuu

SEQ ID NO: 162221 - RNA, 32 nt, Human
gaguggugagguaccgucuacauuucacauua

SEQ ID NO: 162222 - RNA, 18 nt, Human
gaguggugagugcaucaa

SEQ ID NO: 162223 - RNA, 32 nt, Human
gaguggugaguggaagggaggagcagcaagaa

SEQ ID NO: 162224 - RNA, 32 nt, Human
gaguggugaguggccucccugcucuggggcca

SEQ ID NO: 162225 - RNA, 24 nt, Human
gaguggugauugcaccacugcacu

SEQ ID NO: 162226 - RNA, 32 nt, Human
gaguggugcuuccccaaaacagacucauggac

SEQ ID NO: 162227 - RNA, 32 nt, Human
gagugguguggaggcagcugcugggcaggacc

SEQ ID NO: 162228 - RNA, 32 nt, Human
gaguggugugggcacacugcuuaggagucaac

SEQ ID NO: 162229 - RNA, 32 nt, Human
gagugguuaacugggcaaaccuuaagcucaca

SEQ ID NO: 162230 - RNA, 32 nt, Human
gagugguuccacugccuggauaacccuugagg

SEQ ID NO: 162231 - RNA, 32 nt, Human
gagugguugcccaggccuaguuucaguggcag

SEQ ID NO: 162232 - RNA, 32 nt, Human
gagugguuuccagauuggagcgagguuauucu

SEQ ID NO: 162233 - RNA, 31 nt, Human
gaguguaaaccuuuucccaugcccagucuuc

SEQ ID NO: 162234 - RNA, 32 nt, Human
gaguguagcaagaaaaggcucggugaugccug

SEQ ID NO: 162235 - RNA, 32 nt, Human
gaguguaggauucccucugugaaggaaucauc

SEQ ID NO: 162236 - RNA, 32 nt, Human
gaguguaggucccacuucaccccauucuccuc

SEQ ID NO: 162237 - RNA, 32 nt, Human
gaguguaguggugccaucucagcucacugcaa

SEQ ID NO: 162238 - RNA, 32 nt, Human
gagugucaaugauugcuggaacaggugggggu

SEQ ID NO: 162239 - RNA, 32 nt, Human
gagugucacaaacuguaugacauguuauuucu

SEQ ID NO: 162240 - RNA, 32 nt, Human
gagugucacguggggagggaaggggccagugg

SEQ ID NO: 162241 - RNA, 32 nt, Human
gagugucagauuuuugaguaccaaugaucaug

SEQ ID NO: 162242 - RNA, 32 nt, Human
gagugucagcaguguguaagacagcguggggc

SEQ ID NO: 162243 - RNA, 32 nt, Human
gagugucagcugggaggaagccagucucuguc

SEQ ID NO: 162244 - RNA, 32 nt, Human
gagugucagcuuuuagaaggaucauggucaug

SEQ ID NO: 162245 - RNA, 32 nt, Human
gagugucaugacucacccaaccccuuguccaa

SEQ ID NO: 162246 - RNA, 32 nt, Human
gagugucauucaugcugcuguccccuggugaa

SEQ ID NO: 162247 - RNA, 32 nt, Human
gagugucccucuuguugcccaggcuggagugc

SEQ ID NO: 162248 - RNA, 32 nt, Human
gagugucccuggcaacgccacgcuuccgccuu

SEQ ID NO: 162249 - RNA, 32 nt, Human
gagugucccuucuucacaccuacucacuuuac

SEQ ID NO: 162250 - RNA, 32 nt, Human
gaguguccuaaaggcugugcugcuggggccuc

SEQ ID NO: 162251 - RNA, 32 nt, Human
gaguguccucaagggccuguuggugacaccga

SEQ ID NO: 162252 - RNA, 32 nt, Human
gaguguccugaagcucugccucuggcuuuccg

SEQ ID NO: 162253 - RNA, 32 nt, Human
gagugucgguaguucuugcaguaggcacuuua

SEQ ID NO: 162254 - RNA, 32 nt, Human
gagugucucaaagggcugauggcuuccugguc

SEQ ID NO: 162255 - RNA, 32 nt, Human
gagugucucaacacuuauuagugacaguauug

SEQ ID NO: 162256 - RNA, 32 nt, Human
gagugucucugcuggugcuucucccaagacua

SEQ ID NO: 162257 - RNA, 32 nt, Human
gagugucugcagcuggggacacaacugcccgg

SEQ ID NO: 162258 - RNA, 32 nt, Human
gagugucugcugucacccucuacucuccagcu

SEQ ID NO: 162259 - RNA, 32 nt, Human
gagugucuggagcggcuucaguucagcuuuaa

SEQ ID NO: 162260 - RNA, 32 nt, Human
gagugucuggaggccauugcugccucccucaa

SEQ ID NO: 162261 - RNA, 32 nt, Human
gagugucuggucuccggccugccugugcuguc

SEQ ID NO: 162262 - RNA, 32 nt, Human
gagugucuguaaucccagcuacucaggaggcu

SEQ ID NO: 162263 - RNA, 32 nt, Human
gagugucuuggggacagcucuuuccaccccug

SEQ ID NO: 162264 - RNA, 32 nt, Human
gagugucuuuuagugucacagggaacaguuau

SEQ ID NO: 162265 - RNA, 32 nt, Human
gagugugagagggaagcgccgcggccuguauu

SEQ ID NO: 162266 - RNA, 32 nt, Human
gagugugagccaccacacccagccagcaauau

SEQ ID NO: 162267 - RNA, 20 nt, Human
gagugugaguaucccugcca

SEQ ID NO: 162268 - RNA, 32 nt, Human
gagugugagucccaggggucccgccagcucca

SEQ ID NO: 162269 - RNA, 23 nt, Human
gagugugagugccggguccugcc

SEQ ID NO: 162270 - RNA, 32 nt, Human
gagugugauagggaagaaguagcacugcuguc

SEQ ID NO: 162271 - RNA, 24 nt, Human
gagugugauugcugccccuugcua

SEQ ID NO: 162272 - RNA, 32 nt, Human
gagugugcaaauaggugugggucacagacauc

SEQ ID NO: 162273 - RNA, 32 nt, Human
gagugugcagggauggaguuuugcauuucuag

SEQ ID NO: 162274 - RNA, 32 nt, Human
gagugugccaggaagccaggccaccgaagccc

SEQ ID NO: 162275 - RNA, 32 nt, Human
gagugugccaugcucaugaagccacagguccu

SEQ ID NO: 162276 - RNA, 32 nt, Human
gagugugccuguaaucucagcacuuugagggg

SEQ ID NO: 162277 - RNA, 32 nt, Human
gagugugcgccagcccgcggcccagccgaagc

SEQ ID NO: 162278 - RNA, 32 nt, Human
gagugugcgggaggggguagaguuggcagguu

SEQ ID NO: 162279 - RNA, 32 nt, Human
gagugugcugggacguugugugcaauagagag

SEQ ID NO: 162280 - RNA, 32 nt, Human
gaguguggaaacaccaaacccugagucaccac

SEQ ID NO: 162281 - RNA, 32 nt, Human
gaguguggaagagacggcgcuggaacccaugg

SEQ ID NO: 162282 - RNA, 32 nt, Human
gaguguggaaggaacccagcugccagcugcag

SEQ ID NO: 162283 - RNA, 32 nt, Human
gaguguggacauaaggcccucugugaucaugc

SEQ ID NO: 162284 - RNA, 24 nt, Human
gaguguggagaggaaggaggcaga

SEQ ID NO: 162285 - RNA, 32 nt, Human
gaguguggagcgagagaaaggccagcgugcug

SEQ ID NO: 162286 - RNA, 32 nt, Human
gaguguggcaaaaccuuccaucacaauucagu

SEQ ID NO: 162287 - RNA, 31 nt, Human
gaguguggcaaagccuuuggcaagcagucaa

SEQ ID NO: 162288 - RNA, 32 nt, Human
gaguguggcugcagugcgccgggacaccaggg

SEQ ID NO: 162289 - RNA, 32 nt, Human
gaguguggcuucaccagucagagggagcaguc

SEQ ID NO: 162290 - RNA, 32 nt, Human
gaguguggcuucccacuuuuccugcauugugg

SEQ ID NO: 162291 - RNA, 32 nt, Human
gagugugggagguggaugcgggagggugcacc

SEQ ID NO: 162292 - RNA, 32 nt, Human
gagugugggccaggcugagugcauaggugaca

SEQ ID NO: 162293 - RNA, 32 nt, Human
gagugugggccuuccagcugagcccaugcaag

SEQ ID NO: 162294 - RNA, 26 nt, Human
gagugugggggccacgccccuugcca

SEQ ID NO: 162295 - RNA, 32 nt, Human
gagugugggugagggucgaaaugccaaagguc

SEQ ID NO: 162296 - RNA, 32 nt, Human
gaguguggguuuuggagucugagccucaggcu

SEQ ID NO: 162297 - RNA, 32 nt, Human
gaguguggugcuaauaaaugcauuacuuuuuc

SEQ ID NO: 162298 - RNA, 32 nt, Human
gaguguggugcuggggaaggcaugugcuugga

SEQ ID NO: 162299 - RNA, 32 nt, Human
gagugugguguucaggaugcaccagcaccacc

SEQ ID NO: 162300 - RNA, 32 nt, Human
gaguguguaggccagccccggucacagagugc

SEQ ID NO: 162301 - RNA, 32 nt, Human
gagugugucccucaguggacaccagcuagagu

SEQ ID NO: 162302 - RNA, 32 nt, Human
gagugugugaguucaaggcugcagugagguau

SEQ ID NO: 162303 - RNA, 32 nt, Human
gagugugugcugccguucauuaccacggagau

SEQ ID NO: 162304 - RNA, 32 nt, Human
gaguguguggccccucccccucuccuuuugcu

SEQ ID NO: 162305 - RNA, 20 nt, Human
gagugugugggaguggggug

SEQ ID NO: 162306 - RNA, 32 nt, Human
gaguguguguggagcagcuggagcagcuggac

SEQ ID NO: 162307 - RNA, 32 nt, Human
gaguguguuggggugggauggggcaggccgug

SEQ ID NO: 162308 - RNA, 32 nt, Human
gaguguuaagaucuaggaucccuucccacugg

SEQ ID NO: 162309 - RNA, 32 nt, Human
gaguguuacaggcucuaaagugcaauggagaa

SEQ ID NO: 162310 - RNA, 32 nt, Human
gaguguuaccauuuacccaucgguugccaucu

SEQ ID NO: 162311 - RNA, 32 nt, Human
gaguguuaggauuacaggcgugagccaccaca

SEQ ID NO: 162312 - RNA, 32 nt, Human
gaguguuaggugcucccugucucucuacagac

SEQ ID NO: 162313 - RNA, 32 nt, Human
gaguguuauuuuugggaugugagggugaucug

SEQ ID NO: 162314 - RNA, 32 nt, Human
gaguguucagccacagucccacaagccucagc

SEQ ID NO: 162315 - RNA, 32 nt, Human
gaguguucagcccugugugcucuccagcuccu

SEQ ID NO: 162316 - RNA, 32 nt, Human
gaguguucauuucacaccuuaucaggcaaugu

SEQ ID NO: 162317 - RNA, 32 nt, Human
gaguguuccaacucaacucaaaggacacccag

SEQ ID NO: 162318 - RNA, 32 nt, Human
gaguguuccagaaaugagaguggcaucuuuau

SEQ ID NO: 162319 - RNA, 32 nt, Human
gaguguucuguggagaaacugcagccccacuu

SEQ ID NO: 162320 - RNA, 32 nt, Human
gaguguucuguuccggcauauccuggccguaa

SEQ ID NO: 162321 - RNA, 25 nt, Human
gaguguucuucucuaagaccuggaa

SEQ ID NO: 162322 - RNA, 32 nt, Human
gaguguugccgcaaccucgccuucagccuggc

SEQ ID NO: 162323 - RNA, 32 nt, Human
gaguguugggacugacuccuggaagacagccu

SEQ ID NO: 162324 - RNA, 32 nt, Human
gaguguugggauuacagccaugagccaccaug

SEQ ID NO: 162325 - RNA, 32 nt, Human
gaguguuggggcaaagaccgaggucccucucc

SEQ ID NO: 162326 - RNA, 22 nt, Human
gaguguugguggcccaagcaaa

SEQ ID NO: 162327 - RNA, 32 nt, Human
gaguguuuacagccacucagcccugcucugcu

SEQ ID NO: 162328 - RNA, 32 nt, Human
gaguguuuccagcauugcaaaguucuguugga

SEQ ID NO: 162329 - RNA, 32 nt, Human
gaguuaaaaauuacauacuaaaaguuuauugg

SEQ ID NO: 162330 - RNA, 32 nt, Human
gaguuaaaaccagcuuccuggcccagagaggu

SEQ ID NO: 162331 - RNA, 32 nt, Human
gaguuaaaccuaccuaaguagauuuuaggugg

SEQ ID NO: 162332 - RNA, 32 nt, Human
gaguuaaaccuccucagguucaaccugugaua

SEQ ID NO: 162333 - RNA, 32 nt, Human
gaguuaaccccaaaggugauaugguuuuauuu

SEQ ID NO: 162334 - RNA, 32 nt, Human
gaguuaacucaggcucguucuagggacucauu

SEQ ID NO: 162335 - RNA, 32 nt, Human
gaguuaagcauacauggcaaugcugaaaauaa

SEQ ID NO: 162336 - RNA, 20 nt, Human
gaguuaaggcaaggguugaa

SEQ ID NO: 162337 - RNA, 32 nt, Human
gaguuaagggagagaauaagaacggcgguaac

SEQ ID NO: 162338 - RNA, 32 nt, Human
gaguuaaucaaguauaauuuagccaggcuaug

SEQ ID NO: 162339 - RNA, 32 nt, Human
gaguuaauccauacagaaaccaguguguccau

SEQ ID NO: 162340 - RNA, 31 nt, Human
gaguuaauguaugcuggagcugcucuaaagg

SEQ ID NO: 162341 - RNA, 32 nt, Human
gaguuaauuccagugaagcaaaacuugggaag

SEQ ID NO: 162342 - RNA, 32 nt, Human
gaguuaauuuggggacaacagggaccucuuag

SEQ ID NO: 162343 - RNA, 32 nt, Human
gaguuacaaggcagccaacaaugauuauacac

SEQ ID NO: 162344 - RNA, 32 nt, Human
gaguuacacaugccaucauagacgucauacug

SEQ ID NO: 162345 - RNA, 32 nt, Human
gaguuacagcacuugcuccuuaugaggaugag

SEQ ID NO: 162346 - RNA, 32 nt, Human
gaguuaccauagcaaccagcaacuccagggua

SEQ ID NO: 162347 - RNA, 32 nt, Human
gaguuaccauggugaccgcagccccuuggacu

SEQ ID NO: 162348 - RNA, 32 nt, Human
gaguuaccgaaaacaaauggaacagagucgua

SEQ ID NO: 162349 - RNA, 19 nt, Human
gaguuaccucccgcagccg

SEQ ID NO: 162350 - RNA, 32 nt, Human
gaguuacgggccaggagacaagcacagaacga

SEQ ID NO: 162351 - RNA, 32 nt, Human
gaguuacguacccaguaucacacucacaguua

SEQ ID NO: 162352 - RNA, 32 nt, Human
gaguuacuauuuuuccuuuuccccauuuuauu

SEQ ID NO: 162353 - RNA, 32 nt, Human
gaguuacucacucugauucuuccuucagugac

SEQ ID NO: 162354 - RNA, 32 nt, Human
gaguuacugcacuccagccugggugacaagag

SEQ ID NO: 162355 - RNA, 32 nt, Human
gaguuagagacacuauccacuuccaucaguca

SEQ ID NO: 162356 - RNA, 32 nt, Human
gaguuagagagagacaaagagagagaguuaga

SEQ ID NO: 162357 - RNA, 32 nt, Human
gaguuagagaugagucaccgcugagagcagcu

SEQ ID NO: 162358 - RNA, 32 nt, Human
gaguuagaggaggaggaggaggaggaagaggu

SEQ ID NO: 162359 - RNA, 32 nt, Human
gaguuagcaagacccugcugugauuacuaugu

SEQ ID NO: 162360 - RNA, 32 nt, Human
gaguuagcuggguauagagguggcucaaagga

SEQ ID NO: 162361 - RNA, 32 nt, Human
gaguuaggaaggauaugucuuucuccaggugc

SEQ ID NO: 162362 - RNA, 21 nt, Human
gaguuaggagaagaaaaggac

SEQ ID NO: 162363 - RNA, 32 nt, Human
gaguuaggccaggcacuguauuggacauggau

SEQ ID NO: 162364 - RNA, 32 nt, Human
gaguuaggcccagagcugggcaguggucacuc

SEQ ID NO: 162365 - RNA, 32 nt, Human
gaguuaggcgggccucacaggucacccagcca

SEQ ID NO: 162366 - RNA, 32 nt, Human
gaguuagggcagcagaguggagcgauuuagaa

SEQ ID NO: 162367 - RNA, 32 nt, Human
gaguuaggggaacuccugcugccugaacacaa

SEQ ID NO: 162368 - RNA, 32 nt, Human
gaguuagggugaaagagaaaauguuuguugaa

SEQ ID NO: 162369 - RNA, 23 nt, Human
gaguuagucuaucucucuuugcc

SEQ ID NO: 162370 - RNA, 32 nt, Human
gaguuauacccuggagcagcucagggcucagg

SEQ ID NO: 162371 - RNA, 32 nt, Human
gaguuaucacaguucaugaaucuaagaggcgg

SEQ ID NO: 162372 - RNA, 32 nt, Human
gaguuaucauuuguagaaaagauuugauuuga

SEQ ID NO: 162373 - RNA, 32 nt, Human
gaguuauccuucuucccugccuuggaagcccu

SEQ ID NO: 162374 - RNA, 20 nt, Human
gaguuaucugugacauucca

SEQ ID NO: 162375 - RNA, 32 nt, Human
gaguuaugcccauuucuaaaagccuggcauau

SEQ ID NO: 162376 - RNA, 32 nt, Human
gaguuauggccucugcacuccagccuggguga

SEQ ID NO: 162377 - RNA, 32 nt, Human
gaguucaaagaguuaugaguugaagucuugaa

SEQ ID NO: 162378 - RNA, 32 nt, Human
gaguucaaccugcuggaccccaaagagaccgc

SEQ ID NO: 162379 - RNA, 32 nt, Human
gaguucaagaccagccucaacauggagaaacc

SEQ ID NO: 162380 - RNA, 32 nt, Human
gaguucaagaucaggaccaacauggugaaacc

SEQ ID NO: 162381 - RNA, 19 nt, Human
gaguucaaggcugcaguga

SEQ ID NO: 162382 - RNA, 24 nt, Human
gaguucaagucugcagugagcuau

SEQ ID NO: 162383 - RNA, 32 nt, Human
gaguucaagugaaggaaggaggagguuccugg

SEQ ID NO: 162384 - RNA, 31 nt, Human
gaguucaaucaguauuuauguugaaauuucu

SEQ ID NO: 162385 - RNA, 32 nt, Human
gaguucacagcccagucuggggacagcugggu

SEQ ID NO: 162386 - RNA, 32 nt, Human
gaguucaccaguguucagcauggcagucgugc

SEQ ID NO: 162387 - RNA, 32 nt, Human
gaguucaccaguguucagcauggcaguugugc

SEQ ID NO: 162388 - RNA, 32 nt, Human
gaguucacugcacugagcugugaucacaccac

SEQ ID NO: 162389 - RNA, 32 nt, Human
gaguucacuucuucagaaccuuccugaaauga

SEQ ID NO: 162390 - RNA, 32 nt, Human
gaguucagaggaagaggaaguguagccggcgg

SEQ ID NO: 162391 - RNA, 32 nt, Human
gaguucagcagaaaggaggaauccuggcccuc

SEQ ID NO: 162392 - RNA, 32 nt, Human
gaguucagccuggguagcauaugggaacuuca

SEQ ID NO: 162393 - RNA, 32 nt, Human
gaguucaggaguuugagaccagccugggcaac

SEQ ID NO: 162394 - RNA, 32 nt, Human
gaguucaggcccugggaggcucagccaccucc

SEQ ID NO: 162395 - RNA, 32 nt, Human
gaguucagggagcaacugugggcagaugaaau

SEQ ID NO: 162396 - RNA, 32 nt, Human
gaguucagucugcaguccugugcucacagaca

SEQ ID NO: 162397 - RNA, 31 nt, Human
gaguucagugagagagaaaaugauuuagauc

SEQ ID NO: 162398 - RNA, 32 nt, Human
gaguucaguggugccaucucuguccacugcaa

SEQ ID NO: 162399 - RNA, 32 nt, Human
gaguucaguucagaaggcaggaaagacaguca

SEQ ID NO: 162400 - RNA, 23 nt, Human
gaguucauacuggagaaaggcau

SEQ ID NO: 162401 - RNA, 24 nt, Human
gaguucauaguuggaaaacuugug

SEQ ID NO: 162402 - RNA, 20 nt, Human
gaguucauaguugggcggug

SEQ ID NO: 162403 - RNA, 22 nt, Human
gaguucauccugaaaagcugug

SEQ ID NO: 162404 - RNA, 32 nt, Human
gaguucaucugaagaaauucaggccccaccuc

SEQ ID NO: 162405 - RNA, 32 nt, Human
gaguucaucuguggguguugggggcaaguggg

SEQ ID NO: 162406 - RNA, 32 nt, Human
gaguucaugcaauugcacuccagccugggcaa

SEQ ID NO: 162407 - RNA, 32 nt, Human
gaguucauuucaggcagccagcucuuccucac

SEQ ID NO: 162408 - RNA, 32 nt, Human
gaguuccacagcaaaacaggugugcccaggac

SEQ ID NO: 162409 - RNA, 32 nt, Human
gaguuccacaguugauuagcaguugaggccag

SEQ ID NO: 162410 - RNA, 32 nt, Human
gaguuccagcuacucaggaggcugaggcagga

SEQ ID NO: 162411 - RNA, 32 nt, Human
gaguuccccagccuggaggcucugguggagaa

SEQ ID NO: 162412 - RNA, 32 nt, Human
gaguuccccugcccaccgccucccagccacug

SEQ ID NO: 162413 - RNA, 32 nt, Human
gaguuccccuuagagcuucucaaggaaauccu

SEQ ID NO: 162414 - RNA, 32 nt, Human
gaguuccccuuuagguuccuagugauguggag

SEQ ID NO: 162415 - RNA, 32 nt, Human
gaguucccucauucuuauuaccagaaagagcu

SEQ ID NO: 162416 - RNA, 32 nt, Human
gaguucccugcagccugcggggccaagaagaa

SEQ ID NO: 162417 - RNA, 32 nt, Human
gaguucccuugcacuccccucugccuuugcaa

SEQ ID NO: 162418 - RNA, 32 nt, Human
gaguuccggaggcugggcugcagcccacucag

SEQ ID NO: 162419 - RNA, 32 nt, Human
gaguuccggccaggcagacaaaaguuugggag

SEQ ID NO: 162420 - RNA, 22 nt, Human
gaguuccggcuggcaucuggca

SEQ ID NO: 162421 - RNA, 32 nt, Human
gaguuccuagagcuuggcugggucuaggcugu

SEQ ID NO: 162422 - RNA, 32 nt, Human
gaguuccuccugcaccugugcuggggaguagg

SEQ ID NO: 162423 - RNA, 32 nt, Human
gaguuccugcaacaagaauacugcuguugaca

SEQ ID NO: 162424 - RNA, 18 nt, Human
gaguuccugcugcugcug

SEQ ID NO: 162425 - RNA, 22 nt, Human
gaguuccugucaccugcucccc

SEQ ID NO: 162426 - RNA, 32 nt, Human
gaguuccuuguagguacaagcuucuggcucaa

SEQ ID NO: 162427 - RNA, 32 nt, Human
gaguucgacgggaaaguacucuccccacccca

SEQ ID NO: 162428 - RNA, 32 nt, Human
gaguucgagaacuaagcaaauuagcugagacc

SEQ ID NO: 162429 - RNA, 32 nt, Human
gaguucgagaccagccucaacauggagaaacc

SEQ ID NO: 162430 - RNA, 32 nt, Human
gaguucgagaccagccugcccaaaaaggugaa

SEQ ID NO: 162431 - RNA, 19 nt, Human
gaguucgaggcugcaguga

SEQ ID NO: 162432 - RNA, 32 nt, Human
gaguucgaggcugcagugagcuaugacugugc

SEQ ID NO: 162433 - RNA, 32 nt, Human
gaguucgaggcugcagugagcuaugaucucac

SEQ ID NO: 162434 - RNA, 32 nt, Human
gaguucgcucacuggauccuuccucucugaug

SEQ ID NO: 162435 - RNA, 32 nt, Human
gaguucggaagacacucgaggagcggcagcug

SEQ ID NO: 162436 - RNA, 32 nt, Human
gaguucgucuuuaagccucccuugccucagca

SEQ ID NO: 162437 - RNA, 32 nt, Human
gaguucgugccauuacacuccagccuggguga

SEQ ID NO: 162438 - RNA, 32 nt, Human
gaguucguggucacugcacuccagccuggcua

SEQ ID NO: 162439 - RNA, 24 nt, Human
gaguucuaauugcgccacugcacu

SEQ ID NO: 162440 - RNA, 32 nt, Human
gaguucucaaccuagagacuaugugagaaaag

SEQ ID NO: 162441 - RNA, 32 nt, Human
gaguucucacauauggaaaggauacacacuuu

SEQ ID NO: 162442 - RNA, 32 nt, Human
gaguucucagaccccaccccacccucaggugg

SEQ ID NO: 162443 - RNA, 32 nt, Human
gaguucucauuuccuacccaucccugcgugaa

SEQ ID NO: 162444 - RNA, 32 nt, Human
gaguucuccaaaccagccucccaggaaugcca

SEQ ID NO: 162445 - RNA, 32 nt, Human
gaguucuccaaguggaguuccacccgccggac

SEQ ID NO: 162446 - RNA, 20 nt, Human
gaguucucccaccaccucac

SEQ ID NO: 162447 - RNA, 32 nt, Human
gaguucuccccaaaacccuagcucuuuacccu

SEQ ID NO: 162448 - RNA, 32 nt, Human
gaguucuccuggaggcaggggcugcugccuug

SEQ ID NO: 162449 - RNA, 32 nt, Human
gaguucucuccuaggcaaguggccaguugccu

SEQ ID NO: 162450 - RNA, 32 nt, Human
gaguucucucuuccuuccccugcauagagaau

SEQ ID NO: 162451 - RNA, 32 nt, Human
gaguucucuuugaggcuggaaugcaguagcgu

SEQ ID NO: 162452 - RNA, 32 nt, Human
gaguucugaaucucaaaacacucuacucuggc

SEQ ID NO: 162453 - RNA, 32 nt, Human
gaguucugagccuguuugcuagggagagugag

SEQ ID NO: 162454 - RNA, 29 nt, Human
gaguucugccugugugugcuggguuuugg

SEQ ID NO: 162455 - RNA, 32 nt, Human
gaguucugcuuugguaaagucugacccuaguc

SEQ ID NO: 162456 - RNA, 32 nt, Human
gaguucugggagguguggcggaccagcugggc

SEQ ID NO: 162457 - RNA, 32 nt, Human
gaguucugguaccagaugaagggggaacggau

SEQ ID NO: 162458 - RNA, 32 nt, Human
gaguucuggugagggcccucuucugggaugca

SEQ ID NO: 162459 - RNA, 32 nt, Human
gaguucuguacuucaaccagccuacaagcugg

SEQ ID NO: 162460 - RNA, 21 nt, Human
gaguucuguccuccagguuca

SEQ ID NO: 162461 - RNA, 32 nt, Human
gaguucuguguauuuucagucaaaacuuuaaa

SEQ ID NO: 162462 - RNA, 19 nt, Human
gaguucuucacgggcagca

SEQ ID NO: 162463 - RNA, 20 nt, Human
gaguucuugcccucugucca

SEQ ID NO: 162464 - RNA, 32 nt, Human
gaguucuugccucuguguccuguccuuccugg

SEQ ID NO: 162465 - RNA, 32 nt, Human
gaguucuugucaccgauggaacagucugucuu

SEQ ID NO: 162466 - RNA, 32 nt, Human
gaguucuuuaugagccucgauguucccuggua

SEQ ID NO: 162467 - RNA, 32 nt, Human
gaguucuuuguugugcguggggcucaaaggac

SEQ ID NO: 162468 - RNA, 32 nt, Human
gaguucuuuuuauguugaggcaccaugcuagg

SEQ ID NO: 162469 - RNA, 21 nt, Human
gaguugaaaaagaauaacaga

SEQ ID NO: 162470 - RNA, 32 nt, Human
gaguugaaaaagaguuucauuguggagagaaa

SEQ ID NO: 162471 - RNA, 32 nt, Human
gaguugaaaaugcagaagaggagaggcagguu

SEQ ID NO: 162472 - RNA, 19 nt, Human
gaguugaaaccggcaguua

SEQ ID NO: 162473 - RNA, 32 nt, Human
gaguugaacagugguggcugggcucacagcuc

SEQ ID NO: 162474 - RNA, 20 nt, Human
gaguugaaggagaagcugga

SEQ ID NO: 162475 - RNA, 32 nt, Human
gaguugaagugugagugagagugaagaggaac

SEQ ID NO: 162476 - RNA, 32 nt, Human
gaguugaauaguugggacagggacaguauagc

SEQ ID NO: 162477 - RNA, 32 nt, Human
gaguugaaugauugcuguuuuccucucacucu

SEQ ID NO: 162478 - RNA, 32 nt, Human
gaguugaauuuggggugggaggauggaugcaa

SEQ ID NO: 162479 - RNA, 32 nt, Human
gaguugacugcucauacccaggaagagcugac

SEQ ID NO: 162480 - RNA, 32 nt, Human
gaguugacuugacagaacacugucuugaagac

SEQ ID NO: 162481 - RNA, 32 nt, Human
gaguugagaaggacaggagguauggggugggg

SEQ ID NO: 162482 - RNA, 32 nt, Human
gaguugagauuggagagcagcgccgucuguac

SEQ ID NO: 162483 - RNA, 32 nt, Human
gaguugagcacagagggacagaggcacggaac

SEQ ID NO: 162484 - RNA, 32 nt, Human
gaguugaugugauacuucuagaacaaaauuau

SEQ ID NO: 162485 - RNA, 31 nt, Human
gaguugcacaggagagaaagaagaaguuguc

SEQ ID NO: 162486 - RNA, 20 nt, Human
gaguugcagaauccaaggac

SEQ ID NO: 162487 - RNA, 32 nt, Human
gaguugcagccagggcuguggggaaggggcag

SEQ ID NO: 162488 - RNA, 32 nt, Human
gaguugcagcccaugaccucaccugguuccag

SEQ ID NO: 162489 - RNA, 32 nt, Human
gaguugcaggcagaggagauugggucuugacu

SEQ ID NO: 162490 - RNA, 32 nt, Human
gaguugcaggucaccuccccuaccugcuucuc

SEQ ID NO: 162491 - RNA, 32 nt, Human
gaguugcccaaaaccauuacuuuuaaacgcug

SEQ ID NO: 162492 - RNA, 32 nt, Human
gaguugcccagaggaaucccuguucccacuga

SEQ ID NO: 162493 - RNA, 32 nt, Human
gaguugcccaggcuggagugcagcgcaugguc

SEQ ID NO: 162494 - RNA, 32 nt, Human
gaguugccuccacccugucccaacagcugaca

SEQ ID NO: 162495 - RNA, 32 nt, Human
gaguugccucugaguuagcucuuuggaaucgu

SEQ ID NO: 162496 - RNA, 32 nt, Human
gaguugccuggcggcaggcuagcagcuggcca

SEQ ID NO: 162497 - RNA, 32 nt, Human
gaguugcgggagagagaaggagcaggcacgcu

SEQ ID NO: 162498 - RNA, 32 nt, Human
gaguugcggugagccgagaucgcgccauugca

SEQ ID NO: 162499 - RNA, 32 nt, Human
gaguugcuaccugucuucuccuggggccuugc

SEQ ID NO: 162500 - RNA, 32 nt, Human
gaguugcucuuggaucucuacagugccgcgua

SEQ ID NO: 162501 - RNA, 32 nt, Human
gaguugcugccaguacccgcucccucugcuca

SEQ ID NO: 162502 - RNA, 32 nt, Human
gaguugcugccuguucuucacacuuagcucca

SEQ ID NO: 162503 - RNA, 21 nt, Human
gaguugcugggacuauaggug

SEQ ID NO: 162504 - RNA, 32 nt, Human
gaguugcugggcucagcgcagcucccauucau

SEQ ID NO: 162505 - RNA, 32 nt, Human
gaguuggaaagaaacaacuauagguagcuaca

SEQ ID NO: 162506 - RNA, 32 nt, Human
gaguuggaacaaaugucuguucccuggaggcc

SEQ ID NO: 162507 - RNA, 32 nt, Human
gaguuggacacauugugcccagggcagcccug

SEQ ID NO: 162508 - RNA, 32 nt, Human
gaguuggacacuauuccugcucccucuuguuu

SEQ ID NO: 162509 - RNA, 32 nt, Human
gaguuggagacagaacaacagagucucaggga

SEQ ID NO: 162510 - RNA, 32 nt, Human
gaguuggagccugggacuaggagcagccuuau

SEQ ID NO: 162511 - RNA, 32 nt, Human
gaguuggagcucuccagcaacaugccugagca

SEQ ID NO: 162512 - RNA, 32 nt, Human
gaguuggagcugaaggaggaauggcaggauga

SEQ ID NO: 162513 - RNA, 32 nt, Human
gaguuggaggaggaggaggaggaggcgagggc

SEQ ID NO: 162514 - RNA, 32 nt, Human
gaguuggaggggcggggugcuggcgguguggc

SEQ ID NO: 162515 - RNA, 19 nt, Human
gaguuggagguugcaguga

SEQ ID NO: 162516 - RNA, 32 nt, Human
gaguuggcaaagccugucccccagcucagcgc

SEQ ID NO: 162517 - RNA, 32 nt, Human
gaguuggcagccuguggcauggggaggugugg

SEQ ID NO: 162518 - RNA, 32 nt, Human
gaguuggcggauauucggaacugugaauguac

SEQ ID NO: 162519 - RNA, 32 nt, Human
gaguuggcgggccaggagggcaguugagagcu

SEQ ID NO: 162520 - RNA, 32 nt, Human
gaguugggaaacagguggagaauaaugcaaga

SEQ ID NO: 162521 - RNA, 32 nt, Human
gaguugggagagaaaggcccucagcuuuuaga

SEQ ID NO: 162522 - RNA, 21 nt, Human
gaguugggagagauggaggga

SEQ ID NO: 162523 - RNA, 32 nt, Human
gaguugggagccugccugguggaguugaguga

SEQ ID NO: 162524 - RNA, 32 nt, Human
gaguugggcagaucaccugagaucaggaguuc

SEQ ID NO: 162525 - RNA, 22 nt, Human
gaguugggcggaucacaagguc

SEQ ID NO: 162526 - RNA, 32 nt, Human
gaguuggggaaaggaacgaacccuggcuggag

SEQ ID NO: 162527 - RNA, 32 nt, Human
gaguuggggcccugucuguccuaggccuggag

SEQ ID NO: 162528 - RNA, 32 nt, Human
gaguugggggauggcggcagauguuagccagg

SEQ ID NO: 162529 - RNA, 32 nt, Human
gaguugggggccccuucauuucccaggucugg

SEQ ID NO: 162530 - RNA, 24 nt, Human
gaguugggggcucugcuuuuuccc

SEQ ID NO: 162531 - RNA, 32 nt, Human
gaguuggggguuucacuauguuggccaggcug

SEQ ID NO: 162532 - RNA, 32 nt, Human
gaguuggggugaggccugggcagccggagggc

SEQ ID NO: 162533 - RNA, 32 nt, Human
gaguuggggugagggccagagcuggcagugga

SEQ ID NO: 162534 - RNA, 32 nt, Human
gaguugggugggcccugacuccccugcccucc

SEQ ID NO: 162535 - RNA, 32 nt, Human
gaguuggugaacagcaggauggaugggauguc

SEQ ID NO: 162536 - RNA, 32 nt, Human
gaguugguuccuucuggaggcucuaaggaaga

SEQ ID NO: 162537 - RNA, 32 nt, Human
gaguugguuucaucuucuggugcccacggcca

SEQ ID NO: 162538 - RNA, 32 nt, Human
gaguugguuuugaacuccuggccucccaaggu

SEQ ID NO: 162539 - RNA, 32 nt, Human
gaguuguacacauuuccaucagagaagauuuu

SEQ ID NO: 162540 - RNA, 32 nt, Human
gaguuguacauuuuugaagugugcagggcagc

SEQ ID NO: 162541 - RNA, 32 nt, Human
gaguuguagugagccgagaucaugacacugca

SEQ ID NO: 162542 - RNA, 32 nt, Human
gaguuguauuaaaaauaaacaagcauuucaaa

SEQ ID NO: 162543 - RNA, 32 nt, Human
gaguugucagcccuuaaaagagcuaggaauuu

SEQ ID NO: 162544 - RNA, 32 nt, Human
gaguugucaggggugucuucugccuggucuau

SEQ ID NO: 162545 - RNA, 32 nt, Human
gaguugucuauauucaugcacccaguccccua

SEQ ID NO: 162546 - RNA, 32 nt, Human
gaguugucucaggaccccgucacugcgacguu

SEQ ID NO: 162547 - RNA, 32 nt, Human
gaguugugagccaccgcugccagcccagaguu

SEQ ID NO: 162548 - RNA, 24 nt, Human
gaguugugaucgcaccacugcauu

SEQ ID NO: 162549 - RNA, 32 nt, Human
gaguugugccauucacagcacaguggugagga

SEQ ID NO: 162550 - RNA, 32 nt, Human
gaguuguggccaaacuucagcuggcuuggccc

SEQ ID NO: 162551 - RNA, 32 nt, Human
gaguugugucucgucuucugucuccauguggu

SEQ ID NO: 162552 - RNA, 29 nt, Human
gaguugugucugugugaccugagagugau

SEQ ID NO: 162553 - RNA, 32 nt, Human
gaguugugucuugucuucugucuccauguggu

SEQ ID NO: 162554 - RNA, 32 nt, Human
gaguuguuaauuucuugucaucuuuaaauaua

SEQ ID NO: 162555 - RNA, 32 nt, Human
gaguuguucccuuugaaauuaaagcuauuuug

SEQ ID NO: 162556 - RNA, 32 nt, Human
gaguuguucucagcccaguggaggguguucag

SEQ ID NO: 162557 - RNA, 32 nt, Human
gaguuguuucagugcuagaucuugccagcuaa

SEQ ID NO: 162558 - RNA, 32 nt, Human
gaguuguuucccaaucacccuacucacugauc

SEQ ID NO: 162559 - RNA, 32 nt, Human
gaguuguuucuccaacucuucgagcagcucag

SEQ ID NO: 162560 - RNA, 32 nt, Human
gaguuuaaagagagucuggcucugucgcccag

SEQ ID NO: 162561 - RNA, 32 nt, Human
gaguuuaagaacagaaugccuaguuguuagua

SEQ ID NO: 162562 - RNA, 32 nt, Human
gaguuuaagggcuaauaauuuaauuuguuguu

SEQ ID NO: 162563 - RNA, 32 nt, Human
gaguuuaauuacuucaggggaagagaagacaa

SEQ ID NO: 162564 - RNA, 32 nt, Human
gaguuuacagugagccgagauccugccacugc

SEQ ID NO: 162565 - RNA, 32 nt, Human
gaguuuaccaacaaauauugacugcagugauu

SEQ ID NO: 162566 - RNA, 32 nt, Human
gaguuuacucagagcucucugaagauguggca

SEQ ID NO: 162567 - RNA, 32 nt, Human
gaguuuacugacuucuagagccauucucuuua

SEQ ID NO: 162568 - RNA, 32 nt, Human
gaguuuaucccaaugacuucucuguuugaguu

SEQ ID NO: 162569 - RNA, 32 nt, Human
gaguuuaucugauuccuuaucaaccaugaucu

SEQ ID NO: 162570 - RNA, 32 nt, Human
gaguuuaucuugccauccuccccuucugguuc

SEQ ID NO: 162571 - RNA, 32 nt, Human
gaguuuaucuugccauccuccccuuuugguuc

SEQ ID NO: 162572 - RNA, 32 nt, Human
gaguuuaugccaagaaaacuuucugcugaaag

SEQ ID NO: 162573 - RNA, 32 nt, Human
gaguuuauugagugggagacaggcggcaggug

SEQ ID NO: 162574 - RNA, 32 nt, Human
gaguuucaauucuucuuugcaagcuccauucu

SEQ ID NO: 162575 - RNA, 32 nt, Human
gaguuucacuccuguuacccaggcuggaggac

SEQ ID NO: 162576 - RNA, 32 nt, Human
gaguuucacucucguugcccaggcuggagugc

SEQ ID NO: 162577 - RNA, 32 nt, Human
gaguuucacucugucucccaggcuggagugca

SEQ ID NO: 162578 - RNA, 32 nt, Human
gaguuucaggaggagagaaggaaggagaggug

SEQ ID NO: 162579 - RNA, 32 nt, Human
gaguuucagucaccuaaguacacccacaaaac

SEQ ID NO: 162580 - RNA, 32 nt, Human
gaguuucaucccugacagguggaugggugaaa

SEQ ID NO: 162581 - RNA, 32 nt, Human
gaguuucauucuguaauucagcaguucugggu

SEQ ID NO: 162582 - RNA, 32 nt, Human
gaguuuccaagcucugagucaccuccacauuu

SEQ ID NO: 162583 - RNA, 32 nt, Human
gaguuuccagcagcagagcuuuagguaugauu

SEQ ID NO: 162584 - RNA, 32 nt, Human
gaguuuccagggagaaugggaaagccaggggg

SEQ ID NO: 162585 - RNA, 32 nt, Human
gaguuuccagugcaagucaucuggauuugcau

SEQ ID NO: 162586 - RNA, 32 nt, Human
gaguuucccaaggcaauagagcagggggaaaa

SEQ ID NO: 162587 - RNA, 18 nt, Human
gaguuuccccagccguug

SEQ ID NO: 162588 - RNA, 32 nt, Human
gaguuucccucuuguugcccaggcuggaaaug

SEQ ID NO: 162589 - RNA, 32 nt, Human
gaguuucccucuuguugcccaggcuggagugc

SEQ ID NO: 162590 - RNA, 32 nt, Human
gaguuuccuagcuggugccuguccucucuuga

SEQ ID NO: 162591 - RNA, 32 nt, Human
gaguuuccuuuccugauuccaggcugggcucg

SEQ ID NO: 162592 - RNA, 32 nt, Human
gaguuucgcucuuguugcccagccuggccaac

SEQ ID NO: 162593 - RNA, 32 nt, Human
gaguuucgcuguuccagucuggaccucuuugg

SEQ ID NO: 162594 - RNA, 32 nt, Human
gaguuucgcuguuguugcccaggcuggagugc

SEQ ID NO: 162595 - RNA, 32 nt, Human
gaguuucucacaccaauucauuggguccaccc

SEQ ID NO: 162596 - RNA, 32 nt, Human
gaguuucucaucaagaugaaagcccuaauaug

SEQ ID NO: 162597 - RNA, 32 nt, Human
gaguuucuccaccucugccgaauggcuacuuc

SEQ ID NO: 162598 - RNA, 32 nt, Human
gaguuucucucuugucgcccaggcuggagugc

SEQ ID NO: 162599 - RNA, 32 nt, Human
gaguuucucucuugucucccaggcuggagugc

SEQ ID NO: 162600 - RNA, 32 nt, Human
gaguuucucucuuguuacccaggcuggagugc

SEQ ID NO: 162601 - RNA, 32 nt, Human
gaguuucucucuuguugcccaggcuggagugc

SEQ ID NO: 162602 - RNA, 32 nt, Human
gaguuucucuucccucuccauuggaaauccug

SEQ ID NO: 162603 - RNA, 32 nt, Human
gaguuucucuuuucuuuuccuugcucacaccc

SEQ ID NO: 162604 - RNA, 32 nt, Human
gaguuucugauucuguuucucaguaguccuuu

SEQ ID NO: 162605 - RNA, 32 nt, Human
gaguuucugcuuuugaaaauugcuuguaauuc

SEQ ID NO: 162606 - RNA, 32 nt, Human
gaguuucuuaucuuuuuccuggaccugaagcu

SEQ ID NO: 162607 - RNA, 32 nt, Human
gaguuucuucccagagagucugucccagaagg

SEQ ID NO: 162608 - RNA, 21 nt, Human
gaguuucuuugugaaaagguc

SEQ ID NO: 162609 - RNA, 32 nt, Human
gaguuugaaauacaugucucuuuuaguuucuu

SEQ ID NO: 162610 - RNA, 32 nt, Human
gaguuugacgaauuuacagaaggaggcuucag

SEQ ID NO: 162611 - RNA, 32 nt, Human
gaguuugagaagcaaggaccuaggcuggggau

SEQ ID NO: 162612 - RNA, 31 nt, Human
gaguuugagaccagcuuagccaacauaguaa

SEQ ID NO: 162613 - RNA, 31 nt, Human
gaguuugagaccaguccagccaacacggcaa

SEQ ID NO: 162614 - RNA, 32 nt, Human
gaguuugagaggagggaggugcuggggccaaa

SEQ ID NO: 162615 - RNA, 32 nt, Human
gaguuugagcuuccccacugccugacccugcu

SEQ ID NO: 162616 - RNA, 19 nt, Human
gaguuugaggcugcaguga

SEQ ID NO: 162617 - RNA, 32 nt, Human
gaguuugaggcugcagugaccuaugaccacau

SEQ ID NO: 162618 - RNA, 32 nt, Human
gaguuugaggcugcagugagcuaugaucgcac

SEQ ID NO: 162619 - RNA, 32 nt, Human
gaguuugaggcugcagugagcuaugauuaugc

SEQ ID NO: 162620 - RNA, 32 nt, Human
gaguuugaggcugcagugagcuaugauuccac

SEQ ID NO: 162621 - RNA, 32 nt, Human
gaguuugaggcugcagugagcuaugauugcac

SEQ ID NO: 162622 - RNA, 32 nt, Human
gaguuugaggcugcagugagcuaugauugugc

SEQ ID NO: 162623 - RNA, 32 nt, Human
gaguuugaggcugcagugcacuaugcuugcac

SEQ ID NO: 162624 - RNA, 32 nt, Human
gaguuugaguccuuguuauggucaucauaagg

SEQ ID NO: 162625 - RNA, 24 nt, Human
gaguuugagucugcagugagcuau

SEQ ID NO: 162626 - RNA, 32 nt, Human
gaguuugaucugcaggggcaggcucaucuuuu

SEQ ID NO: 162627 - RNA, 32 nt, Human
gaguuugcagucagccaagaucacgccacugu

SEQ ID NO: 162628 - RNA, 32 nt, Human
gaguuugcagugaaccaagaucacgccacugc

SEQ ID NO: 162629 - RNA, 32 nt, Human
gaguuugcagugagccaagauagugccaucgc

SEQ ID NO: 162630 - RNA, 32 nt, Human
gaguuugcagugagccaagaucgagccauugc

SEQ ID NO: 162631 - RNA, 32 nt, Human
gaguuugcagugagccaagaucucgccacugc

SEQ ID NO: 162632 - RNA, 32 nt, Human
gaguuugcagugagccgagauagugccauugu

SEQ ID NO: 162633 - RNA, 32 nt, Human
gaguuugcagugagccgagaucgugucacugc

SEQ ID NO: 162634 - RNA, 32 nt, Human
gaguuugcagugagcggagaugaugccacugu

SEQ ID NO: 162635 - RNA, 32 nt, Human
gaguuugcagugagcuaagaucgugccacugc

SEQ ID NO: 162636 - RNA, 32 nt, Human
gaguuugcagugagcugagaucacaccaucgc

SEQ ID NO: 162637 - RNA, 32 nt, Human
gaguuugcagugagcugagaucacaccauugc

SEQ ID NO: 162638 - RNA, 32 nt, Human
gaguuugcagugagcugagaucaugccacugc

SEQ ID NO: 162639 - RNA, 32 nt, Human
gaguuugcagugagcugagaucgugccacugc

SEQ ID NO: 162640 - RNA, 32 nt, Human
gaguuugcagugagcugagauggugccacugc

SEQ ID NO: 162641 - RNA, 32 nt, Human
gaguuugcagugagcugaggucacaccgcugc

SEQ ID NO: 162642 - RNA, 32 nt, Human
gaguuugcaucacugcacuccagccugggcaa

SEQ ID NO: 162643 - RNA, 32 nt, Human
gaguuugccguguuagcaaccacagucaccuu

SEQ ID NO: 162644 - RNA, 32 nt, Human
gaguuugccuagaggagacuaauucucuuucu

SEQ ID NO: 162645 - RNA, 32 nt, Human
gaguuugccucaguagauacuaaagcaaauug

SEQ ID NO: 162646 - RNA, 32 nt, Human
gaguuugcucuuguugaugaggcuggagugca

SEQ ID NO: 162647 - RNA, 32 nt, Human
gaguuugcugaacgaggacucacagcugcaac

SEQ ID NO: 162648 - RNA, 32 nt, Human
gaguuugcugacugggcccagccaacugaaga

SEQ ID NO: 162649 - RNA, 32 nt, Human
gaguuugcuggcagcacaagagaagccugugc

SEQ ID NO: 162650 - RNA, 32 nt, Human
gaguuugcuggcagcacaagggaagccugcgc

SEQ ID NO: 162651 - RNA, 32 nt, Human
gaguuugcuggcagcauaagagaagccugugc

SEQ ID NO: 162652 - RNA, 25 nt, Human
gaguuugcuguuugcaauuuuucca

SEQ ID NO: 162653 - RNA, 32 nt, Human
gaguuugcuucugauagggucagcuuucccau

SEQ ID NO: 162654 - RNA, 32 nt, Human
gaguuuggacaagcuccucuccagcuccucua

SEQ ID NO: 162655 - RNA, 32 nt, Human
gaguuuggcaaguccucugcuccuggaugccc

SEQ ID NO: 162656 - RNA, 32 nt, Human
gaguuugggagagaggagagaagugggugugg

SEQ ID NO: 162657 - RNA, 32 nt, Human
gaguuugggaguuggagguuucuuugaauauu

SEQ ID NO: 162658 - RNA, 32 nt, Human
gaguuugggccacugcacucuagccuggcaac

SEQ ID NO: 162659 - RNA, 32 nt, Human
gaguuugggccccagaggcugggugacaugug

SEQ ID NO: 162660 - RNA, 32 nt, Human
gaguuugggcugcaagugcucacagcucuugu

SEQ ID NO: 162661 - RNA, 32 nt, Human
gaguuuggggucaucagauguggcuuuaggcu

SEQ ID NO: 162662 - RNA, 32 nt, Human
gaguuugucuggaaagccucuugagauggggu

SEQ ID NO: 162663 - RNA, 32 nt, Human
gaguuugugcagaaugagcuugcugacacaca

SEQ ID NO: 162664 - RNA, 32 nt, Human
gaguuuguggugaguugagaucgcgccacugc

SEQ ID NO: 162665 - RNA, 32 nt, Human
gaguuuguguccuggaagucccagacucggcu

SEQ ID NO: 162666 - RNA, 32 nt, Human
gaguuugugugggcgggcgcaugugcaccaca

SEQ ID NO: 162667 - RNA, 32 nt, Human
gaguuuguugcccaggcuggagugaguggcac

SEQ ID NO: 162668 - RNA, 32 nt, Human
gaguuuuaaauuauuuaugugccuguugcuuc

SEQ ID NO: 162669 - RNA, 32 nt, Human
gaguuuuaacuguaaggugcuacaaugccccu

SEQ ID NO: 162670 - RNA, 31 nt, Human
gaguuuuaggaagucaguugucagagacagg

SEQ ID NO: 162671 - RNA, 32 nt, Human
gaguuuuagguuucaggggcaagagcaguuuu

SEQ ID NO: 162672 - RNA, 32 nt, Human
gaguuuucaaagcuuaggcuccaaacuccacg

SEQ ID NO: 162673 - RNA, 32 nt, Human
gaguuuucacuggccucacucagaccaauuuc

SEQ ID NO: 162674 - RNA, 32 nt, Human
gaguuuucagaaccugacauuguuaaacauac

SEQ ID NO: 162675 - RNA, 32 nt, Human
gaguuuucagaaccugacauuguuaaagauac

SEQ ID NO: 162676 - RNA, 32 nt, Human
gaguuuucagcuuuauaaauuguuaaacauuu

SEQ ID NO: 162677 - RNA, 32 nt, Human
gaguuuucagugagccaagaucaugccacugg

SEQ ID NO: 162678 - RNA, 23 nt, Human
gaguuuucccaaagcagugucca

SEQ ID NO: 162679 - RNA, 32 nt, Human
gaguuuucccgcaguucaguuccugacugugc

SEQ ID NO: 162680 - RNA, 32 nt, Human
gaguuuuccuuuaaccuggacuguguuucuca

SEQ ID NO: 162681 - RNA, 32 nt, Human
gaguuuucgaggugacugugcugugcucggug

SEQ ID NO: 162682 - RNA, 32 nt, Human
gaguuuucuuagugaagggcuaccuuucugug

SEQ ID NO: 162683 - RNA, 32 nt, Human
gaguuuugaagugccuaagaugaccuauuugu

SEQ ID NO: 162684 - RNA, 32 nt, Human
gaguuuugauaaggagagggaucugcuuguua

SEQ ID NO: 162685 - RNA, 32 nt, Human
gaguuuugaugucaaauauauuucucuuucag

SEQ ID NO: 162686 - RNA, 32 nt, Human
gaguuuugcauuaagcauauccuugaagacaa

SEQ ID NO: 162687 - RNA, 32 nt, Human
gaguuuugcccaggccugcugucuugaguaca

SEQ ID NO: 162688 - RNA, 32 nt, Human
gaguuuugcccuucuugcccaggcuggagugc

SEQ ID NO: 162689 - RNA, 32 nt, Human
gaguuuugccuaggccuuuccugggccuuaaa

SEQ ID NO: 162690 - RNA, 32 nt, Human
gaguuuugcuaaaaucauccuauuacuuauga

SEQ ID NO: 162691 - RNA, 32 nt, Human
gaguuuugcucuugcacuccauccuggacaac

SEQ ID NO: 162692 - RNA, 32 nt, Human
gaguuuugggagagagcagagguaaacaugau

SEQ ID NO: 162693 - RNA, 24 nt, Human
gaguuuuggguggagacacagcca

SEQ ID NO: 162694 - RNA, 32 nt, Human
gaguuuuggugacuuuugucaccuggacacac

SEQ ID NO: 162695 - RNA, 32 nt, Human
gaguuuuguaauggaagaaccaggcacagaaa

SEQ ID NO: 162696 - RNA, 32 nt, Human
gaguuuuguguguacacacacagaaacaugua

SEQ ID NO: 162697 - RNA, 32 nt, Human
gaguuuuucagccuguggcccagcacugguca

SEQ ID NO: 162698 - RNA, 32 nt, Human
gaguuuuuguggaauuaaagugcugcugcugc

SEQ ID NO: 162699 - RNA, 32 nt, Human
gauaaaaacacccagcugggugcaguggcucg

SEQ ID NO: 162700 - RNA, 20 nt, Human
gauaaaaaccugguuucaaa

SEQ ID NO: 162701 - RNA, 32 nt, Human
gauaaaaagccuuggugcuucccaggagccga

SEQ ID NO: 162702 - RNA, 32 nt, Human
gauaaaaaguggaauuucuuguuucuccagau

SEQ ID NO: 162703 - RNA, 32 nt, Human
gauaaaaauggagccugaagggaaucaggcaa

SEQ ID NO: 162704 - RNA, 32 nt, Human
gauaaaacaaauuuccuuacaaaagggcacuu

SEQ ID NO: 162705 - RNA, 32 nt, Human
gauaaaagaggccuaguaauguucuuuugagg

SEQ ID NO: 162706 - RNA, 32 nt, Human
gauaaaagccacugcagugugcagugagaaac

SEQ ID NO: 162707 - RNA, 32 nt, Human
gauaaaaggagcgaccgcucagcagcgagagg

SEQ ID NO: 162708 - RNA, 32 nt, Human
gauaaaaggcuugcagucccagcugggaaaaa

SEQ ID NO: 162709 - RNA, 32 nt, Human
gauaaaagggagcauggguguuggggagacac

SEQ ID NO: 162710 - RNA, 32 nt, Human
gauaaaaguagaaggcacaggagagguagcaa

SEQ ID NO: 162711 - RNA, 32 nt, Human
gauaaaagugaguguguuuugucgggagggaa

SEQ ID NO: 162712 - RNA, 32 nt, Human
gauaaaauacugccuucugccuuugggaccau

SEQ ID NO: 162713 - RNA, 32 nt, Human
gauaaaaucaugggagagggcaguaggauguu

SEQ ID NO: 162714 - RNA, 22 nt, Human
gauaaaauuuaaugacaguuua

SEQ ID NO: 162715 - RNA, 32 nt, Human
gauaaacaaaacugaucaacccaaugugauuu

SEQ ID NO: 162716 - RNA, 32 nt, Human
gauaaacaagauaaacacuaggugcuuuugaa

SEQ ID NO: 162717 - RNA, 32 nt, Human
gauaaacacagcuguuuucuuuacucaugaga

SEQ ID NO: 162718 - RNA, 32 nt, Human
gauaaacaccuuaaaugucuugucaacuggau

SEQ ID NO: 162719 - RNA, 32 nt, Human
gauaaaccaaaacugggaaggccaaguacagu

SEQ ID NO: 162720 - RNA, 32 nt, Human
gauaaaccaaagauuuagaagucauuccauug

SEQ ID NO: 162721 - RNA, 32 nt, Human
gauaaaccaaguuuuuggaaaugguccuguua

SEQ ID NO: 162722 - RNA, 32 nt, Human
gauaaaccuaucucaguggucagccccugggg

SEQ ID NO: 162723 - RNA, 32 nt, Human
gauaaacgucaucugcugggggugucacuuca

SEQ ID NO: 162724 - RNA, 31 nt, Human
gauaaacuaggaauuuugucacuggaguuuu

SEQ ID NO: 162725 - RNA, 32 nt, Human
gauaaacuauaugguccucccagcuucaguac

SEQ ID NO: 162726 - RNA, 32 nt, Human
gauaaacuccaaacggaucaggagucuaaaug

SEQ ID NO: 162727 - RNA, 32 nt, Human
gauaaacucuguggugcuguuggaucagguau

SEQ ID NO: 162728 - RNA, 32 nt, Human
gauaaacugccucgucugaucuuguggccccc

SEQ ID NO: 162729 - RNA, 32 nt, Human
gauaaacugcugccuggggcugugggaugaau

SEQ ID NO: 162730 - RNA, 32 nt, Human
gauaaacugucauucauucacuucucccaugu

SEQ ID NO: 162731 - RNA, 32 nt, Human
gauaaacuuacaccacauacuuggugggugaa

SEQ ID NO: 162732 - RNA, 32 nt, Human
gauaaagaaaaauagacaaccaguucgcauuu

SEQ ID NO: 162733 - RNA, 32 nt, Human
gauaaagaaaaaugaaaacugaaucggugccu

SEQ ID NO: 162734 - RNA, 32 nt, Human
gauaaagaccuuauuaauacggggaucuguga

SEQ ID NO: 162735 - RNA, 32 nt, Human
gauaaagacugggcugccaaggaggacuccuc

SEQ ID NO: 162736 - RNA, 32 nt, Human
gauaaagaguuaggaugcucaaaagugaacua

SEQ ID NO: 162737 - RNA, 32 nt, Human
gauaaagaugcugaguuuagagucugcaaggc

SEQ ID NO: 162738 - RNA, 32 nt, Human
gauaaagcaacaaaagauuugucccaagcugc

SEQ ID NO: 162739 - RNA, 32 nt, Human
gauaaagcauuugaaugguacaguagauguaa

SEQ ID NO: 162740 - RNA, 32 nt, Human
gauaaagccacugcacucaaacguggggaaca

SEQ ID NO: 162741 - RNA, 32 nt, Human
gauaaagccccuaccagugcugauaaagucuu

SEQ ID NO: 162742 - RNA, 32 nt, Human
gauaaagcccgugaaacauuaguagaaaauac

SEQ ID NO: 162743 - RNA, 32 nt, Human
gauaaagcugaggaggaggcugugugugaugg

SEQ ID NO: 162744 - RNA, 32 nt, Human
gauaaaggaaagagauguggcuuuugugauau

SEQ ID NO: 162745 - RNA, 32 nt, Human
gauaaaggaagugcuggucacccuggaggugc

SEQ ID NO: 162746 - RNA, 32 nt, Human
gauaaaggaagugcuggucacccuggaggugu

SEQ ID NO: 162747 - RNA, 20 nt, Human
gauaaaggacugugcuuuaa

SEQ ID NO: 162748 - RNA, 32 nt, Human
gauaaaggaucucauugaucagcugggugagg

SEQ ID NO: 162749 - RNA, 32 nt, Human
gauaaaggcaaaacucaacagccccuggagcu

SEQ ID NO: 162750 - RNA, 32 nt, Human
gauaaaggggaagauagaaacacacacauaug

SEQ ID NO: 162751 - RNA, 32 nt, Human
gauaaaggggaagugaggagaauuucuuucaa

SEQ ID NO: 162752 - RNA, 32 nt, Human
gauaaaguaugagugaaaaagagacugaaggu

SEQ ID NO: 162753 - RNA, 32 nt, Human
gauaaagucuugggcugggugcaguggcucau

SEQ ID NO: 162754 - RNA, 32 nt, Human
gauaaauaaagugguacugaaacacagccaca

SEQ ID NO: 162755 - RNA, 32 nt, Human
gauaaauaaauaaauaaauuagccuggcgugg

SEQ ID NO: 162756 - RNA, 32 nt, Human
gauaaauaauggagcaugcagugagcacaucu

SEQ ID NO: 162757 - RNA, 32 nt, Human
gauaaauacaucugguauggcagaaacuccgu

SEQ ID NO: 162758 - RNA, 32 nt, Human
gauaaauaccauuaucccucugggcacacaga

SEQ ID NO: 162759 - RNA, 32 nt, Human
gauaaauacuucaugaaaacuaaagucugaaa

SEQ ID NO: 162760 - RNA, 32 nt, Human
gauaaauagaauacacagaauagugaugaaau

SEQ ID NO: 162761 - RNA, 32 nt, Human
gauaaaucaagaguccucagcacuccacauuc

SEQ ID NO: 162762 - RNA, 32 nt, Human
gauaaauccgauaacauauauguccucaaucu

SEQ ID NO: 162763 - RNA, 32 nt, Human
gauaaaucuaauucuuaacucuauuucuccag

SEQ ID NO: 162764 - RNA, 32 nt, Human
gauaaaugccuguagucccagccacugaagcc

SEQ ID NO: 162765 - RNA, 32 nt, Human
gauaaaugggcuagagaggcagaggaaggcua

SEQ ID NO: 162766 - RNA, 21 nt, Human
gauaaauggguuucaagcaca

SEQ ID NO: 162767 - RNA, 32 nt, Human
gauaaauguugauguuuucuguguacaaacac

SEQ ID NO: 162768 - RNA, 32 nt, Human
gauaaauuauuuccucagcuaucuuuggauga

SEQ ID NO: 162769 - RNA, 32 nt, Human
gauaaauuccucucccuccucuccuuuccucu

SEQ ID NO: 162770 - RNA, 32 nt, Human
gauaaauuuaauccuucuuuguaauacuuucu

SEQ ID NO: 162771 - RNA, 32 nt, Human
gauaaauuucucagcuuguccagaccuggaac

SEQ ID NO: 162772 - RNA, 32 nt, Human
gauaaauuuguuguauuccaaaacuugaaaug

SEQ ID NO: 162773 - RNA, 32 nt, Human
gauaacaaaauacuucuccucuuuccauuuuc

SEQ ID NO: 162774 - RNA, 32 nt, Human
gauaacaacugcacuccagccuggaugacaga

SEQ ID NO: 162775 - RNA, 32 nt, Human
gauaacaagccugaaaccacacaguacgacag

SEQ ID NO: 162776 - RNA, 32 nt, Human
gauaacacauuugauucuguguguuuuccaua

SEQ ID NO: 162777 - RNA, 23 nt, Human
gauaacaccacugcacuccugcu

SEQ ID NO: 162778 - RNA, 32 nt, Human
gauaacacgcaaaaucacaaaguagcauaaau

SEQ ID NO: 162779 - RNA, 32 nt, Human
gauaacacuacugcauuccagccugggugaca

SEQ ID NO: 162780 - RNA, 32 nt, Human
gauaacacuuaccaaaagaucacugcaaaccu

SEQ ID NO: 162781 - RNA, 32 nt, Human
gauaacagccaaagauagaauuccaaguuaua

SEQ ID NO: 162782 - RNA, 32 nt, Human
gauaacagcuccaagggguuauuuucuugcau

SEQ ID NO: 162783 - RNA, 32 nt, Human
gauaacagcuugcacccuccucagaauguuuu

SEQ ID NO: 162784 - RNA, 32 nt, Human
gauaacaguaccuagagagagaguguguguga

SEQ ID NO: 162785 - RNA, 21 nt, Human
gauaacaguaugguacugcuu

SEQ ID NO: 162786 - RNA, 32 nt, Human
gauaacaguguaacacauuugagaucuuuucc

SEQ ID NO: 162787 - RNA, 32 nt, Human
gauaacagugugccugguuaauauuaauauuc

SEQ ID NO: 162788 - RNA, 32 nt, Human
gauaacauacaaaaucuuuuuguaacguaaaa

SEQ ID NO: 162789 - RNA, 32 nt, Human
gauaacauaguuuauuuuuacacugucuuauu

SEQ ID NO: 162790 - RNA, 32 nt, Human
gauaacauuucaguaccugaauagaugucauu

SEQ ID NO: 162791 - RNA, 32 nt, Human
gauaaccaaauucugucacucaagacacagac

SEQ ID NO: 162792 - RNA, 32 nt, Human
gauaaccagugucaccuacaacauggaaugga

SEQ ID NO: 162793 - RNA, 32 nt, Human
gauaacccaagugucccacaggccaagguaca

SEQ ID NO: 162794 - RNA, 32 nt, Human
gauaaccccuuucuccccuuuggaccaucugc

SEQ ID NO: 162795 - RNA, 32 nt, Human
gauaacccuaugucuccucccccagaauccuu

SEQ ID NO: 162796 - RNA, 32 nt, Human
gauaaccgaacagagguauggaacagaaaggg

SEQ ID NO: 162797 - RNA, 32 nt, Human
gauaaccugggacugaccguucccuggggauc

SEQ ID NO: 162798 - RNA, 32 nt, Human
gauaaccugugggguuagaacauaucacauug

SEQ ID NO: 162799 - RNA, 32 nt, Human
gauaaccuuccagauaaagaguugcugcuacc

SEQ ID NO: 162800 - RNA, 32 nt, Human
gauaaccuuugaaccuugaauuuuggagaugu

SEQ ID NO: 162801 - RNA, 32 nt, Human
gauaacgacugcacuccagccuggaugacaga

SEQ ID NO: 162802 - RNA, 32 nt, Human
gauaacgcagggcggucuucugcuccaugcuc

SEQ ID NO: 162803 - RNA, 32 nt, Human
gauaacgccacugcacuccaguguaggcaaca

SEQ ID NO: 162804 - RNA, 32 nt, Human
gauaacgggucauaaagaaccugcugauaaaa

SEQ ID NO: 162805 - RNA, 32 nt, Human
gauaacguaggucuagagcuucuuuuauauuc

SEQ ID NO: 162806 - RNA, 32 nt, Human
gauaacuauacagcucaacaacuagaaaaaua

SEQ ID NO: 162807 - RNA, 32 nt, Human
gauaacucaagaaaucaaaagauaguugauuc

SEQ ID NO: 162808 - RNA, 32 nt, Human
gauaacucacaacccuaccaaugcuacucuca

SEQ ID NO: 162809 - RNA, 32 nt, Human
gauaacugaauuauauccauuucuaaaguaug

SEQ ID NO: 162810 - RNA, 32 nt, Human
gauaacugcauccuucauuccaggaaagcccu

SEQ ID NO: 162811 - RNA, 32 nt, Human
gauaacugcuuauccagguuugguguccugug

SEQ ID NO: 162812 - RNA, 32 nt, Human
gauaacugggauuacaggugcccaccaccaug

SEQ ID NO: 162813 - RNA, 32 nt, Human
gauaacuguguacuucuggugacuguacaguu

SEQ ID NO: 162814 - RNA, 32 nt, Human
gauaacuguugaaucuggaugagggcaugugg

SEQ ID NO: 162815 - RNA, 32 nt, Human
gauaacuucaagaucauaccacuggacuaaga

SEQ ID NO: 162816 - RNA, 32 nt, Human
gauaacuuggggaggcaagagacugggagcca

SEQ ID NO: 162817 - RNA, 32 nt, Human
gauaacuuuguaagaugggagacaucugaaau

SEQ ID NO: 162818 - RNA, 32 nt, Human
gauaagaaaauguaaugaauuuuaucagauau

SEQ ID NO: 162819 - RNA, 32 nt, Human
gauaagaaacuaagggccacagaccaaaugac

SEQ ID NO: 162820 - RNA, 32 nt, Human
gauaagaaauacauuuguuuuauacuucuaug

SEQ ID NO: 162821 - RNA, 32 nt, Human
gauaagaacucuaacaaacacaagguauuuug

SEQ ID NO: 162822 - RNA, 32 nt, Human
gauaagaaugauaauguacuuauuuacaaggu

SEQ ID NO: 162823 - RNA, 32 nt, Human
gauaagaaugugccucucaagccuugacuccc

SEQ ID NO: 162824 - RNA, 16 nt, Human
gauaagagacacagca

SEQ ID NO: 162825 - RNA, 32 nt, Human
gauaagagcuaaaccaccugccacuggggacu

SEQ ID NO: 162826 - RNA, 32 nt, Human
gauaagaggagacuugagagcuugcuucuucu

SEQ ID NO: 162827 - RNA, 32 nt, Human
gauaagaggaggcucacuugagcccaggaggu

SEQ ID NO: 162828 - RNA, 32 nt, Human
gauaagaggauugggccaggugcaguggauca

SEQ ID NO: 162829 - RNA, 32 nt, Human
gauaagaguaucuugcacagcaggugcagguu

SEQ ID NO: 162830 - RNA, 32 nt, Human
gauaagaugauggcuacauuccauuccuaucc

SEQ ID NO: 162831 - RNA, 32 nt, Human
gauaagcaaaagaaauaguuagaugaagaagu

SEQ ID NO: 162832 - RNA, 32 nt, Human
gauaagcaaagccacacacaauauuguugguu

SEQ ID NO: 162833 - RNA, 32 nt, Human
gauaagccaccacacccagccuagagaccucu

SEQ ID NO: 162834 - RNA, 32 nt, Human
gauaagccuccccucaugaaaugccacucacc

SEQ ID NO: 162835 - RNA, 32 nt, Human
gauaagccugcaaccucuugaccuucagcucc

SEQ ID NO: 162836 - RNA, 32 nt, Human
gauaagcggccuguccugccuccugggagaag

SEQ ID NO: 162837 - RNA, 32 nt, Human
gauaagcuauugcagcacuuucugaggcuuuc

SEQ ID NO: 162838 - RNA, 21 nt, Human
gauaagcucugugaaagagaa

SEQ ID NO: 162839 - RNA, 32 nt, Human
gauaagcucugugcuguguccauggcccguca

SEQ ID NO: 162840 - RNA, 32 nt, Human
gauaaggaaagaaaaugucguuguuguuguuu

SEQ ID NO: 162841 - RNA, 32 nt, Human
gauaaggaagcaccuagacuccacucugacca

SEQ ID NO: 162842 - RNA, 32 nt, Human
gauaaggagcaggugcuuugcugcagucuccc

SEQ ID NO: 162843 - RNA, 32 nt, Human
gauaaggaugauacagucuccauaaggcagug

SEQ ID NO: 162844 - RNA, 32 nt, Human
gauaaggauuccagauggcacuugagugaaga

SEQ ID NO: 162845 - RNA, 32 nt, Human
gauaaggcccuggaguccaccuccaggcuggg

SEQ ID NO: 162846 - RNA, 32 nt, Human
gauaaggcccuucagccccaagguuguccucg

SEQ ID NO: 162847 - RNA, 32 nt, Human
gauaaggcucacagcccugagcucuuuacggg

SEQ ID NO: 162848 - RNA, 30 nt, Human
gauaagggaagccacaaggagacgaucgag

SEQ ID NO: 162849 - RNA, 32 nt, Human
gauaagggaggcggagugugcggagaggaggc

SEQ ID NO: 162850 - RNA, 32 nt, Human
gauaagggauuggccaaggcugugugcauccu

SEQ ID NO: 162851 - RNA, 32 nt, Human
gauaaggggcagagauggaggccccacucccc

SEQ ID NO: 162852 - RNA, 32 nt, Human
gauaaggugaagggauuaaaaauguacguaaa

SEQ ID NO: 162853 - RNA, 32 nt, Human
gauaaguaaacaaugcauaaacuaguagacuu

SEQ ID NO: 162854 - RNA, 32 nt, Human
gauaaguacuggucaguggcccagggguuggg

SEQ ID NO: 162855 - RNA, 32 nt, Human
gauaaguaggauucagagucucuucuccuagc

SEQ ID NO: 162856 - RNA, 32 nt, Human
gauaaguccccaaggcugcauguauuagcagg

SEQ ID NO: 162857 - RNA, 32 nt, Human
gauaagucuguggcccaauccccuuccucucc

SEQ ID NO: 162858 - RNA, 32 nt, Human
gauaaguggggacuggggacaugugaaaugau

SEQ ID NO: 162859 - RNA, 31 nt, Human
gauaagugggugggaggcacggggaagguuu

SEQ ID NO: 162860 - RNA, 32 nt, Human
gauaaguucccuuuucucauuuuguugagagu

SEQ ID NO: 162861 - RNA, 32 nt, Human
gauaauaagccacauaugaauguuguauacaa

SEQ ID NO: 162862 - RNA, 17 nt, Human
gauaauaauaugggguc

SEQ ID NO: 162863 - RNA, 32 nt, Human
gauaauaaucuuggcucaguuuguauaaacug

SEQ ID NO: 162864 - RNA, 32 nt, Human
gauaauacauggccaguaaucccaggcuggcc

SEQ ID NO: 162865 - RNA, 32 nt, Human
gauaauacccuugaaaucagagaaugaggugc

SEQ ID NO: 162866 - RNA, 32 nt, Human
gauaauacccuuucauacuuccuugacuuugu

SEQ ID NO: 162867 - RNA, 32 nt, Human
gauaauaccuaagaggaacacuguaaaaugcc

SEQ ID NO: 162868 - RNA, 32 nt, Human
gauaauacuguacuucaucuuacuugccacaa

SEQ ID NO: 162869 - RNA, 32 nt, Human
gauaauacuguacuucaucuuacuugccacua

SEQ ID NO: 162870 - RNA, 32 nt, Human
gauaauacuguacuucaucuuauuugccacaa

SEQ ID NO: 162871 - RNA, 32 nt, Human
gauaauagagggcuggaauuuaaaccuguauu

SEQ ID NO: 162872 - RNA, 32 nt, Human
gauaauaggguuuucagaugaaaagaaaacuu

SEQ ID NO: 162873 - RNA, 22 nt, Human
gauaauaucaugaacugauaaa

SEQ ID NO: 162874 - RNA, 32 nt, Human
gauaauaugccccugcacuugagaccuuacuu

SEQ ID NO: 162875 - RNA, 32 nt, Human
gauaauauggcggcuggagcugccugggcauc

SEQ ID NO: 162876 - RNA, 31 nt, Human
gauaaucacagcuggcuuaucaauauugcug

SEQ ID NO: 162877 - RNA, 32 nt, Human
gauaaucagagcuugaggcuggcacucugacu

SEQ ID NO: 162878 - RNA, 32 nt, Human
gauaaucaggagaagaaaaggagauccagaau

SEQ ID NO: 162879 - RNA, 32 nt, Human
gauaaucaggagaagaaaaggagauccagacu

SEQ ID NO: 162880 - RNA, 32 nt, Human
gauaaucaguugaacccaggagguggagguug

SEQ ID NO: 162881 - RNA, 32 nt, Human
gauaauccacaugcucccuccccagcuccacu

SEQ ID NO: 162882 - RNA, 32 nt, Human
gauaauccaccucccuaucccccaggcaaggg

SEQ ID NO: 162883 - RNA, 31 nt, Human
gauaauccacugucucccaucccaggaggug

SEQ ID NO: 162884 - RNA, 32 nt, Human
gauaauccauuuucucacccugacaaacucaa

SEQ ID NO: 162885 - RNA, 32 nt, Human
gauaaucccaccguuucuggcaugucagauau

SEQ ID NO: 162886 - RNA, 32 nt, Human
gauaaucccacugcauuccagccugggcaaca

SEQ ID NO: 162887 - RNA, 32 nt, Human
gauaauccccugucccccuccuccuccccacu

SEQ ID NO: 162888 - RNA, 32 nt, Human
gauaaucggcggccggggcugaagggagaggc

SEQ ID NO: 162889 - RNA, 32 nt, Human
gauaaucgggcuuccuacuggcccaggguauu

SEQ ID NO: 162890 - RNA, 32 nt, Human
gauaaucuaagucuuccaaugccugcaucaaa

SEQ ID NO: 162891 - RNA, 32 nt, Human
gauaaucuagcuucuccaccucuuguuucaca

SEQ ID NO: 162892 - RNA, 32 nt, Human
gauaaucucagugcuuuccuccuucacuguuu

SEQ ID NO: 162893 - RNA, 32 nt, Human
gauaaucucauuaauccuccacucaaccuuca

SEQ ID NO: 162894 - RNA, 32 nt, Human
gauaaucugaugcugaagaucaaauaaccaau

SEQ ID NO: 162895 - RNA, 32 nt, Human
gauaaucuuuguaauauguccaagagagugug

SEQ ID NO: 162896 - RNA, 32 nt, Human
gauaaugaaagccaggaguuucugggguuucc

SEQ ID NO: 162897 - RNA, 32 nt, Human
gauaaugauaaagauaccucagcaagaacaua

SEQ ID NO: 162898 - RNA, 32 nt, Human
gauaaugauucccagcccaggagcugaggggu

SEQ ID NO: 162899 - RNA, 32 nt, Human
gauaaugcauuacauguuuuucuguugcaugu

SEQ ID NO: 162900 - RNA, 32 nt, Human
gauaaugccacugcacuccagccugccuggau

SEQ ID NO: 162901 - RNA, 32 nt, Human
gauaaugcuggaugccuugcagacaucauuca

SEQ ID NO: 162902 - RNA, 32 nt, Human
gauaauggagccagggccuuguagaagcacag

SEQ ID NO: 162903 - RNA, 32 nt, Human
gauaaugggcaggcacccggcagggaggacaa

SEQ ID NO: 162904 - RNA, 32 nt, Human
gauaauggggagcacagaaggccaguugcuga

SEQ ID NO: 162905 - RNA, 32 nt, Human
gauaaugggugagagagcagguaagagccaaa

SEQ ID NO: 162906 - RNA, 32 nt, Human
gauaaugguuguacugaagaugacaccuccuc

SEQ ID NO: 162907 - RNA, 32 nt, Human
gauaaugugagauucuuuagccacuuugggga

SEQ ID NO: 162908 - RNA, 32 nt, Human
gauaaugugucuaaaaauauugcugaaguuau

SEQ ID NO: 162909 - RNA, 32 nt, Human
gauaauguugccaaacuuuggaaauguuaaug

SEQ ID NO: 162910 - RNA, 32 nt, Human
gauaauuacaaaaggcagauagaguaauuauu

SEQ ID NO: 162911 - RNA, 32 nt, Human
gauaauuacuggcaccugccucccaggccauu

SEQ ID NO: 162912 - RNA, 32 nt, Human
gauaauuauugcaccacugaacuccagccugg

SEQ ID NO: 162913 - RNA, 32 nt, Human
gauaauucauucuucaccugguucaaaaauca

SEQ ID NO: 162914 - RNA, 32 nt, Human
gauaauucucacguucacaccugguggcaggc

SEQ ID NO: 162915 - RNA, 32 nt, Human
gauaauuggaaaccuucaucacugagguuggc

SEQ ID NO: 162916 - RNA, 32 nt, Human
gauaauuggugacugaggaagauggugaagau

SEQ ID NO: 162917 - RNA, 32 nt, Human
gauaauugugcacaccugaguucacagcuuca

SEQ ID NO: 162918 - RNA, 32 nt, Human
gauaauuuauuuuuaccuucacugugaccuug

SEQ ID NO: 162919 - RNA, 32 nt, Human
gauaauuucuuaaauauugaugaacuuuggag

SEQ ID NO: 162920 - RNA, 32 nt, Human
gauaauuugugucgauggauguucugugaagg

SEQ ID NO: 162921 - RNA, 32 nt, Human
gauaauuuucagcuaauuaucugggugaccca

SEQ ID NO: 162922 - RNA, 32 nt, Human
gauaauuuuguaucuugguugcaguggugcuu

SEQ ID NO: 162923 - RNA, 32 nt, Human
gauacaaaauuagccaggcaugguggugcaug

SEQ ID NO: 162924 - RNA, 32 nt, Human
gauacaaaauuagccgggcaugguggcacacg

SEQ ID NO: 162925 - RNA, 32 nt, Human
gauacaaacuacuaaacuaaaaagcaaacaca

SEQ ID NO: 162926 - RNA, 32 nt, Human
gauacaaagaauugaaaaguguggaggaucug

SEQ ID NO: 162927 - RNA, 32 nt, Human
gauacaaccugacagcacagccugagaucuug

SEQ ID NO: 162928 - RNA, 32 nt, Human
gauacaagagucagcaucauuaaaggaaacgu

SEQ ID NO: 162929 - RNA, 32 nt, Human
gauacaaugcacgauucucugcgcgcaaggac

SEQ ID NO: 162930 - RNA, 31 nt, Human
gauacaauguauaagcuacucacuuaucuga

SEQ ID NO: 162931 - RNA, 21 nt, Human
gauacacaaauaagucaguua

SEQ ID NO: 162932 - RNA, 16 nt, Human
gauacacaaaugguca

SEQ ID NO: 162933 - RNA, 32 nt, Human
gauacacaaugccaucacaguacacaugaaca

SEQ ID NO: 162934 - RNA, 19 nt, Human
gauacacaauuuguaguua

SEQ ID NO: 162935 - RNA, 32 nt, Human
gauacacacaacaaugagaacucagugacuuu

SEQ ID NO: 162936 - RNA, 16 nt, Human
gauacacagcauguug

SEQ ID NO: 162937 - RNA, 22 nt, Human
gauacacuuuauaacauuuuau

SEQ ID NO: 162938 - RNA, 22 nt, Human
gauacacuuuugucuuugcuau

SEQ ID NO: 162939 - RNA, 32 nt, Human
gauacagaaaugcaaaagauacggcccaugca

SEQ ID NO: 162940 - RNA, 32 nt, Human
gauacagaaguauugcagcccagauccccuau

SEQ ID NO: 162941 - RNA, 32 nt, Human
gauacagacaguuccaagauugacaacagaga

SEQ ID NO: 162942 - RNA, 32 nt, Human
gauacagcaaacaugucugacaaagagcuaaa

SEQ ID NO: 162943 - RNA, 32 nt, Human
gauacagccagccaggccugucgucugggacc

SEQ ID NO: 162944 - RNA, 32 nt, Human
gauacagccauggcuaggaaggacaagaaguu

SEQ ID NO: 162945 - RNA, 32 nt, Human
gauacagcuuuccauguggcucagggaacagu

SEQ ID NO: 162946 - RNA, 32 nt, Human
gauacagggugaucuguuuggccccgccccca

SEQ ID NO: 162947 - RNA, 32 nt, Human
gauacaggguuucaccacguugcucaggcugg

SEQ ID NO: 162948 - RNA, 32 nt, Human
gauacagucauaggggguugcagugagguuuu

SEQ ID NO: 162949 - RNA, 32 nt, Human
gauacagucauuuugccucuacuugaggauca

SEQ ID NO: 162950 - RNA, 32 nt, Human
gauacagucugcacuuucacccguuucagggu

SEQ ID NO: 162951 - RNA, 32 nt, Human
gauacauaguuguauauagaaaaugcuaaaga

SEQ ID NO: 162952 - RNA, 32 nt, Human
gauacauauaaauauauuacaagaucauaauu

SEQ ID NO: 162953 - RNA, 32 nt, Human
gauacaucacaaggaggaagaaggagaaguug

SEQ ID NO: 162954 - RNA, 32 nt, Human
gauacaucacacuugagucaaauccuggauac

SEQ ID NO: 162955 - RNA, 31 nt, Human
gauacaucagaggugaauaccagcaccuauu

SEQ ID NO: 162956 - RNA, 32 nt, Human
gauacaucauuucuauauuccuugcuuaauuu

SEQ ID NO: 162957 - RNA, 32 nt, Human
gauacaucguaaacuccgccuccacggaacgu

SEQ ID NO: 162958 - RNA, 32 nt, Human
gauacaucucucuuaaaaaggcagagcacagg

SEQ ID NO: 162959 - RNA, 32 nt, Human
gauacaugccuguaauccuggcuacuugggag

SEQ ID NO: 162960 - RNA, 32 nt, Human
gauacaugccuguggucucagcuacucgggag

SEQ ID NO: 162961 - RNA, 32 nt, Human
gauacaugccuguggucucagcuacuugggag

SEQ ID NO: 162962 - RNA, 32 nt, Human
gauacauggaaggaaguggaaccagaugcaga

SEQ ID NO: 162963 - RNA, 32 nt, Human
gauacauuucacucacccuccaccccugcuau

SEQ ID NO: 162964 - RNA, 25 nt, Human
gauacauuuuaagcuugauuaucau

SEQ ID NO: 162965 - RNA, 32 nt, Human
gauaccaaaaucaggagcaucuugggauuuau

SEQ ID NO: 162966 - RNA, 32 nt, Human
gauaccaaccucuuuccuuuggaaguaggaaa

SEQ ID NO: 162967 - RNA, 32 nt, Human
gauaccaauaaaacaugucacuaguuuccaaa

SEQ ID NO: 162968 - RNA, 32 nt, Human
gauaccacaagucuuuugacaugcugaggucu

SEQ ID NO: 162969 - RNA, 32 nt, Human
gauaccacucagucucuuuccccagccacccc

SEQ ID NO: 162970 - RNA, 32 nt, Human
gauaccacuugcuguaggcuguggaccaagau

SEQ ID NO: 162971 - RNA, 32 nt, Human
gauaccagcaccccacuccagccucgaggaag

SEQ ID NO: 162972 - RNA, 32 nt, Human
gauaccagcacuuuugggaggcugaggcgggu

SEQ ID NO: 162973 - RNA, 32 nt, Human
gauaccagccugggcaacauagugggauccug

SEQ ID NO: 162974 - RNA, 32 nt, Human
gauaccagcuacuugggaggcugaggcagaag

SEQ ID NO: 162975 - RNA, 32 nt, Human
gauaccagcugagucugaauucugcucuaaau

SEQ ID NO: 162976 - RNA, 32 nt, Human
gauaccagggcccagacagaggcagagagucc

SEQ ID NO: 162977 - RNA, 32 nt, Human
gauaccaucccccagacccgauccauucaguc

SEQ ID NO: 162978 - RNA, 32 nt, Human
gauacccacugcccugaccccugggcaggccc

SEQ ID NO: 162979 - RNA, 32 nt, Human
gauacccacugcuuagaguuauugugagaauu

SEQ ID NO: 162980 - RNA, 32 nt, Human
gauacccagaacaacauuaaaucaaugaguga

SEQ ID NO: 162981 - RNA, 32 nt, Human
gauacccaggggccgcgcccaucccccgcccc

SEQ ID NO: 162982 - RNA, 32 nt, Human
gauacccagucccagaaccacacuguugaguu

SEQ ID NO: 162983 - RNA, 32 nt, Human
gauaccccagcuguuuaucaucagcuccucug

SEQ ID NO: 162984 - RNA, 32 nt, Human
gauacccuggacugaccugcccuggcuggcuc

SEQ ID NO: 162985 - RNA, 32 nt, Human
gauaccgcaucaccaccagcagcucuugccca

SEQ ID NO: 162986 - RNA, 32 nt, Human
gauaccggacacaccucugcuccaaaggaaau

SEQ ID NO: 162987 - RNA, 32 nt, Human
gauaccgguuucagaguccugggcagcgugcg

SEQ ID NO: 162988 - RNA, 32 nt, Human
gauaccguagcccaugggcaccagcuuggagg

SEQ ID NO: 162989 - RNA, 23 nt, Human
gauaccgucugggaggauugcug

SEQ ID NO: 162990 - RNA, 25 nt, Human
gauaccgugcuguuguguuuuucug

SEQ ID NO: 162991 - RNA, 32 nt, Human
gauaccuagaagccaggaaaccgcgagcugca

SEQ ID NO: 162992 - RNA, 32 nt, Human
gauaccucauugaaucccuaaauuuaaaagca

SEQ ID NO: 162993 - RNA, 32 nt, Human
gauaccuccagccaggccucuguggccucugu

SEQ ID NO: 162994 - RNA, 32 nt, Human
gauaccuccugagaccuccguccucugcuuuc

SEQ ID NO: 162995 - RNA, 32 nt, Human
gauaccuccuugugccuccacugaugcaggag

SEQ ID NO: 162996 - RNA, 32 nt, Human
gauaccugagccugcaauagagcccugaaauc

SEQ ID NO: 162997 - RNA, 32 nt, Human
gauaccugcacuccggcuuccuagacucuggc

SEQ ID NO: 162998 - RNA, 32 nt, Human
gauaccugcuucuucuauaugauacaauauuu

SEQ ID NO: 162999 - RNA, 32 nt, Human
gauaccugcuuuuaaaauggagcuagaaugcu

SEQ ID NO: 163000 - RNA, 32 nt, Human
gauaccuggagaccaugaagagcugcggccgc

SEQ ID NO: 163001 - RNA, 32 nt, Human
gauaccuguaaucccagcuacgugggaggcug

SEQ ID NO: 163002 - RNA, 32 nt, Human
gauaccuguggagcugucuguagguugggaag

SEQ ID NO: 163003 - RNA, 32 nt, Human
gauaccuuauuuuccuccuccuccuuggccua

SEQ ID NO: 163004 - RNA, 32 nt, Human
gauaccuucccucccaggcuccuuaccuuggu

SEQ ID NO: 163005 - RNA, 32 nt, Human
gauaccuuugggcugccugggacaggcuccug

SEQ ID NO: 163006 - RNA, 32 nt, Human
gauaccuuuguucuguccccugccccaucccc

SEQ ID NO: 163007 - RNA, 19 nt, Human
gauacgaagcaaaccuggg

SEQ ID NO: 163008 - RNA, 32 nt, Human
gauacgaggacagguuggagcugcagggacug

SEQ ID NO: 163009 - RNA, 32 nt, Human
gauacgcaaacacaccgaugcacacgcacaua

SEQ ID NO: 163010 - RNA, 32 nt, Human
gauacgcacuuuugcaggaugaccucagggcu

SEQ ID NO: 163011 - RNA, 19 nt, Human
gauacggagauuucagggu

SEQ ID NO: 163012 - RNA, 32 nt, Human
gauacgggaagaagaaauggcuggugaucuuu

SEQ ID NO: 163013 - RNA, 32 nt, Human
gauacgggagagaaagaacgugccaggcagga

SEQ ID NO: 163014 - RNA, 32 nt, Human
gauacggggagagagagcuuagugaaggcagu

SEQ ID NO: 163015 - RNA, 23 nt, Human
gauacgggguuucaccauguugg

SEQ ID NO: 163016 - RNA, 32 nt, Human
gauacggucuggcucugucacuuaggcuggag

SEQ ID NO: 163017 - RNA, 32 nt, Human
gauacguggcuggccuuuggcuugccuuugac

SEQ ID NO: 163018 - RNA, 32 nt, Human
gauacguguuaguccuguuauuuggaggcuuu

SEQ ID NO: 163019 - RNA, 32 nt, Human
gauacguugaagcaaacucuuacugccuuucu

SEQ ID NO: 163020 - RNA, 32 nt, Human
gauacuaacccauggacuuuccaagggaggga

SEQ ID NO: 163021 - RNA, 32 nt, Human
gauacuaacucccuccccaaccccuguuguug

SEQ ID NO: 163022 - RNA, 32 nt, Human
gauacuacacaaaaauagaacaauuagucuga

SEQ ID NO: 163023 - RNA, 32 nt, Human
gauacuagacuagacaucacaagaaaacuaua

SEQ ID NO: 163024 - RNA, 32 nt, Human
gauacuaguuugagccaagggcagcaggggcu

SEQ ID NO: 163025 - RNA, 31 nt, Human
gauacucacagcuuuucagagcagaaacugu

SEQ ID NO: 163026 - RNA, 32 nt, Human
gauacucagaccuucagacucuggcugaauua

SEQ ID NO: 163027 - RNA, 32 nt, Human
gauacucagcugucauguuuauaauucaaaca

SEQ ID NO: 163028 - RNA, 32 nt, Human
gauacuccagcccuguggcaccccagacccuc

SEQ ID NO: 163029 - RNA, 30 nt, Human
gauacucgaagccacaggaucaauguggug

SEQ ID NO: 163030 - RNA, 32 nt, Human
gauacucucaagccuguaucccugcccacugg

SEQ ID NO: 163031 - RNA, 32 nt, Human
gauacucucaagccuguaucccugccccacug

SEQ ID NO: 163032 - RNA, 32 nt, Human
gauacucuguuccuaagaccucagguuaccca

SEQ ID NO: 163033 - RNA, 32 nt, Human
gauacucuucucccaucucccuucacaggaug

SEQ ID NO: 163034 - RNA, 32 nt, Human
gauacugaaagaaauaguuaaugaguuugcau

SEQ ID NO: 163035 - RNA, 32 nt, Human
gauacugaacagcuucaguacuacgaugucau

SEQ ID NO: 163036 - RNA, 32 nt, Human
gauacugacuaccugggguaggcacauugugu

SEQ ID NO: 163037 - RNA, 32 nt, Human
gauacugaggcauagcuguacuguguguuuuc

SEQ ID NO: 163038 - RNA, 32 nt, Human
gauacugaggcugagucgggggucacaagcca

SEQ ID NO: 163039 - RNA, 32 nt, Human
gauacugauggaccuacccugccuuguucugu

SEQ ID NO: 163040 - RNA, 32 nt, Human
gauacugcagugagcuaggaucauaccaacau

SEQ ID NO: 163041 - RNA, 32 nt, Human
gauacugcuaaccucuuuguuauuugagcagc

SEQ ID NO: 163042 - RNA, 32 nt, Human
gauacuggcaauacuccagccuggugacagag

SEQ ID NO: 163043 - RNA, 32 nt, Human
gauacugguacuacgggguggggaagaggaac

SEQ ID NO: 163044 - RNA, 32 nt, Human
gauacugguccuuagccccaucugccacgugu

SEQ ID NO: 163045 - RNA, 32 nt, Human
gauacuguaaaauguggaggcagggcaaacgu

SEQ ID NO: 163046 - RNA, 32 nt, Human
gauacuguccaaggcagggguacggcugacca

SEQ ID NO: 163047 - RNA, 32 nt, Human
gauacugugauucucucaccguucucuggaaa

SEQ ID NO: 163048 - RNA, 32 nt, Human
gauacugugccauugcacuccaagccugggca

SEQ ID NO: 163049 - RNA, 32 nt, Human
gauacugugguuugauggaaugaaucaccugg

SEQ ID NO: 163050 - RNA, 22 nt, Human
gauacuguucuguuuuucuuca

SEQ ID NO: 163051 - RNA, 32 nt, Human
gauacuguugguaaccaggaguauaaggcagu

SEQ ID NO: 163052 - RNA, 32 nt, Human
gauacuguuuuauaucaaacaauguuuauaau

SEQ ID NO: 163053 - RNA, 32 nt, Human
gauacuuacagauguugagauggcugcccugc

SEQ ID NO: 163054 - RNA, 32 nt, Human
gauacuuacuuagauguucccugagaggagug

SEQ ID NO: 163055 - RNA, 32 nt, Human
gauacuuaggaaauccuaaaagaggcggcaag

SEQ ID NO: 163056 - RNA, 32 nt, Human
gauacuuauagacagacuuauuggacaauuau

SEQ ID NO: 163057 - RNA, 32 nt, Human
gauacuucagugacacagccucugcugccccu

SEQ ID NO: 163058 - RNA, 32 nt, Human
gauacuucauuuucuuagcguuucuggagauu

SEQ ID NO: 163059 - RNA, 32 nt, Human
gauacuuccacaugcuaucauaaucaacugua

SEQ ID NO: 163060 - RNA, 32 nt, Human
gauacuuccagcuucuuggcucagccuggcuu

SEQ ID NO: 163061 - RNA, 32 nt, Human
gauacuuccauuuucaggcucagacuuugaau

SEQ ID NO: 163062 - RNA, 32 nt, Human
gauacuucccuguacaugcauaaauaugcaug

SEQ ID NO: 163063 - RNA, 32 nt, Human
gauacuucugauguuucggaacagucauuuca

SEQ ID NO: 163064 - RNA, 32 nt, Human
gauacuucuugguuuuaagcugucuaccuaau

SEQ ID NO: 163065 - RNA, 32 nt, Human
gauacuugagaaaguuguugugguguuguaug

SEQ ID NO: 163066 - RNA, 32 nt, Human
gauacuugggagguaggaagaaaaugggagua

SEQ ID NO: 163067 - RNA, 32 nt, Human
gauacuuggucuuacugguuuuauucccugcu

SEQ ID NO: 163068 - RNA, 32 nt, Human
gauacuuuccagagcuacaacaugccaucuau

SEQ ID NO: 163069 - RNA, 32 nt, Human
gauacuuugagaugcauuaugagaacuuucag

SEQ ID NO: 163070 - RNA, 32 nt, Human
gauagaaaaacuucauccagccacuuuaauga

SEQ ID NO: 163071 - RNA, 32 nt, Human
gauagaaaccaucccuucccuuucucccuugg

SEQ ID NO: 163072 - RNA, 32 nt, Human
gauagaaauucagcuacaacccaaagagagaa

SEQ ID NO: 163073 - RNA, 32 nt, Human
gauagaaccccuggcaguguugucagcucaac

SEQ ID NO: 163074 - RNA, 32 nt, Human
gauagaacuguacuguuuucugggccagugag

SEQ ID NO: 163075 - RNA, 32 nt, Human
gauagaaggauaaaggaugcauguguaguauu

SEQ ID NO: 163076 - RNA, 32 nt, Human
gauagaaggggaggggaggagagaugcauacc

SEQ ID NO: 163077 - RNA, 32 nt, Human
gauagaaggugaccucuccucauaaggacuug

SEQ ID NO: 163078 - RNA, 32 nt, Human
gauagaagugcucgggaaagaaagcaaagcgg

SEQ ID NO: 163079 - RNA, 32 nt, Human
gauagaauaagugcuaaugaugccauugccac

SEQ ID NO: 163080 - RNA, 32 nt, Human
gauagaauccacccugccucugacagcaucca

SEQ ID NO: 163081 - RNA, 18 nt, Human
gauagaaucuugcucugu

SEQ ID NO: 163082 - RNA, 32 nt, Human
gauagacaaacaaugaugaaacucagauggag

SEQ ID NO: 163083 - RNA, 32 nt, Human
gauagacaauccgcucuucauccagaaaacca

SEQ ID NO: 163084 - RNA, 32 nt, Human
gauagacagcauaggagguuugaagcagaaau

SEQ ID NO: 163085 - RNA, 32 nt, Human
gauagacaugaagagagcuuagcagugauuga

SEQ ID NO: 163086 - RNA, 32 nt, Human
gauagacccugugaauguaagcacuugguaaa

SEQ ID NO: 163087 - RNA, 32 nt, Human
gauagacggauccaucccaguuucugaccugu

SEQ ID NO: 163088 - RNA, 32 nt, Human
gauagagagcuauuuaauggccggcuggaaau

SEQ ID NO: 163089 - RNA, 32 nt, Human
gauagagagggcccugaacaccaggcucaggg

SEQ ID NO: 163090 - RNA, 32 nt, Human
gauagagauacuuugcgcgcacacacauacau

SEQ ID NO: 163091 - RNA, 32 nt, Human
gauagagcauacaauugaucucacuuuaggau

SEQ ID NO: 163092 - RNA, 20 nt, Human
gauagagcgagacucugucu

SEQ ID NO: 163093 - RNA, 32 nt, Human
gauagagcuaguuucaggaacagugaggcaag

SEQ ID NO: 163094 - RNA, 32 nt, Human
gauagaggguucaauuaugagacaccuaguac

SEQ ID NO: 163095 - RNA, 32 nt, Human
gauagagucccacucuugcccaggcuggagcg

SEQ ID NO: 163096 - RNA, 20 nt, Human
gauagagugagacccugucu

SEQ ID NO: 163097 - RNA, 32 nt, Human
gauagauauuugaguuguuugcagugaauggu

SEQ ID NO: 163098 - RNA, 24 nt, Human
gauagauccagcugaagaguucua

SEQ ID NO: 163099 - RNA, 32 nt, Human
gauagaugaaguauugcugaagccaaccagag

SEQ ID NO: 163100 - RNA, 23 nt, Human
gauagaugauuucagaacuucag

SEQ ID NO: 163101 - RNA, 19 nt, Human
gauagaugcuucaggugac

SEQ ID NO: 163102 - RNA, 32 nt, Human
gauagauggaaucucugucaggggacaaacag

SEQ ID NO: 163103 - RNA, 32 nt, Human
gauagauggagagagacagaaagagagaugga

SEQ ID NO: 163104 - RNA, 32 nt, Human
gauagauuucuguugggcaagggagacuucga

SEQ ID NO: 163105 - RNA, 32 nt, Human
gauagcaaacaacacaguagugacagaauuua

SEQ ID NO: 163106 - RNA, 32 nt, Human
gauagcaacaggccgggccacugaggcggugc

SEQ ID NO: 163107 - RNA, 32 nt, Human
gauagcacaauccaggcugcuuccuguuggcu

SEQ ID NO: 163108 - RNA, 32 nt, Human
gauagcacaguucuguccagagaaggaaggcg

SEQ ID NO: 163109 - RNA, 32 nt, Human
gauagcaccacugcacuccagccugggagaca

SEQ ID NO: 163110 - RNA, 32 nt, Human
gauagcaccacugcacuccagccugggcaaca

SEQ ID NO: 163111 - RNA, 32 nt, Human
gauagcaccacugcacuccagccugggugaca

SEQ ID NO: 163112 - RNA, 32 nt, Human
gauagcaccacugcacuccaggcugggugaca

SEQ ID NO: 163113 - RNA, 32 nt, Human
gauagcaccacugcacuuuagccugggcgaca

SEQ ID NO: 163114 - RNA, 32 nt, Human
gauagcaccacugcaguccagccugggcgaca

SEQ ID NO: 163115 - RNA, 32 nt, Human
gauagcaccacugcaugcaagccugggcaaua

SEQ ID NO: 163116 - RNA, 32 nt, Human
gauagcaccacugcgcuccagccugggugagg

SEQ ID NO: 163117 - RNA, 32 nt, Human
gauagcaccauugcacuccagccugggcgacu

SEQ ID NO: 163118 - RNA, 32 nt, Human
gauagcacugggugugagaaugaucaaggauc

SEQ ID NO: 163119 - RNA, 32 nt, Human
gauagcagaaugcauaacacugaguguuaauu

SEQ ID NO: 163120 - RNA, 32 nt, Human
gauagcagcagccucagccucugccuguccag

SEQ ID NO: 163121 - RNA, 32 nt, Human
gauagcaggaacaggaucaagucuuccauacc

SEQ ID NO: 163122 - RNA, 32 nt, Human
gauagcaggaaggcagaaagaaaacauaaaga

SEQ ID NO: 163123 - RNA, 32 nt, Human
gauagcagguuaauauugucucaggcgagacu

SEQ ID NO: 163124 - RNA, 32 nt, Human
gauagcaguuccuuguauaaaaugacuggaug

SEQ ID NO: 163125 - RNA, 32 nt, Human
gauagcauucuuacguguuacauauaguggac

SEQ ID NO: 163126 - RNA, 18 nt, Human
gauagccaaggaacagga

SEQ ID NO: 163127 - RNA, 32 nt, Human
gauagccaauagccccagcccacugaaagccu

SEQ ID NO: 163128 - RNA, 32 nt, Human
gauagccacugccuuuuccucaagggagcaac

SEQ ID NO: 163129 - RNA, 32 nt, Human
gauagccagcaguggauguuacuccaggaaaa

SEQ ID NO: 163130 - RNA, 32 nt, Human
gauagcccaggauaugaccuaucuugggauau

SEQ ID NO: 163131 - RNA, 32 nt, Human
gauagccccacugcacuccagccugggugaca

SEQ ID NO: 163132 - RNA, 32 nt, Human
gauagccuagagaacccaaagcaaacaguugc

SEQ ID NO: 163133 - RNA, 32 nt, Human
gauagccuagggugagggugacagagggacag

SEQ ID NO: 163134 - RNA, 32 nt, Human
gauagcgaucccuagugaauggcauagauguu

SEQ ID NO: 163135 - RNA, 32 nt, Human
gauagcgauuuuccugugcuggaaugugccca

SEQ ID NO: 163136 - RNA, 32 nt, Human
gauagcgccacugcacugcacgccagccuagg

SEQ ID NO: 163137 - RNA, 32 nt, Human
gauagcgccacugcaguccggccugggugaaa

SEQ ID NO: 163138 - RNA, 32 nt, Human
gauagcgccauugcacuccagccugagcgaca

SEQ ID NO: 163139 - RNA, 32 nt, Human
gauagcgccauugcacuccagccugggcaaca

SEQ ID NO: 163140 - RNA, 32 nt, Human
gauagcgccauugcacuccagccugggcgacu

SEQ ID NO: 163141 - RNA, 32 nt, Human
gauagcggcacugcacuccagccugggugaca

SEQ ID NO: 163142 - RNA, 32 nt, Human
gauagcggcaggcaccgcaguggagcggcucc

SEQ ID NO: 163143 - RNA, 32 nt, Human
gauagcggcauugcacuccagccugggcaaca

SEQ ID NO: 163144 - RNA, 32 nt, Human
gauagcgggagggaggaaguacgacuaauguu

SEQ ID NO: 163145 - RNA, 32 nt, Human
gauagcuaauaaauugggaaugggagaaggga

SEQ ID NO: 163146 - RNA, 32 nt, Human
gauagcuagucacucaggcugcagagagagac

SEQ ID NO: 163147 - RNA, 32 nt, Human
gauagcuauuuacauagccuucuaaguaaagg

SEQ ID NO: 163148 - RNA, 32 nt, Human
gauagcucacugccagagcagccuggguuccc

SEQ ID NO: 163149 - RNA, 32 nt, Human
gauagcucucucuugaaaacaaaaaggaaaca

SEQ ID NO: 163150 - RNA, 32 nt, Human
gauagcucugcagccagaaauggucuucucac

SEQ ID NO: 163151 - RNA, 32 nt, Human
gauagcugaaaccaaggcugaagacuguuuua

SEQ ID NO: 163152 - RNA, 21 nt, Human
gauagcugaggcuaggggaga

SEQ ID NO: 163153 - RNA, 32 nt, Human
gauagcugcauucauuuaucaccagcauauug

SEQ ID NO: 163154 - RNA, 32 nt, Human
gauagcuguaguuucuuucauagaaaguagcu

SEQ ID NO: 163155 - RNA, 22 nt, Human
gauagcugugcagaaagugaga

SEQ ID NO: 163156 - RNA, 32 nt, Human
gauagcuguguacuucuggugacuguacaguu

SEQ ID NO: 163157 - RNA, 32 nt, Human
gauagcuucagaaaucagaaaaacauuuggga

SEQ ID NO: 163158 - RNA, 32 nt, Human
gauagcuucaugcacacuaugcauuuuauugg

SEQ ID NO: 163159 - RNA, 32 nt, Human
gauagcuugacaaggagugcugucuguccuua

SEQ ID NO: 163160 - RNA, 32 nt, Human
gauagcuuuuuauuugccaauauugugcaacc

SEQ ID NO: 163161 - RNA, 32 nt, Human
gauaggaaaauguuggauauuugaggccaugc

SEQ ID NO: 163162 - RNA, 32 nt, Human
gauaggaaagaaugucugcugcaagaguguau

SEQ ID NO: 163163 - RNA, 32 nt, Human
gauaggacauuguagccagccucagcacucag

SEQ ID NO: 163164 - RNA, 32 nt, Human
gauaggacggcugcucuccaccucgcagacug

SEQ ID NO: 163165 - RNA, 31 nt, Human
gauaggagaaaacugccuuagggcuggaaau

SEQ ID NO: 163166 - RNA, 32 nt, Human
gauaggagaaagugccagcccugaagcuggag

SEQ ID NO: 163167 - RNA, 32 nt, Human
gauaggagaagaggaggaggaggagcgggguc

SEQ ID NO: 163168 - RNA, 32 nt, Human
gauaggagagacuaauuccaaccuucuaaauu

SEQ ID NO: 163169 - RNA, 32 nt, Human
gauaggagccaccuuggcuuccuguggagaua

SEQ ID NO: 163170 - RNA, 32 nt, Human
gauaggaggaggcagaggggugccuggaguuu

SEQ ID NO: 163171 - RNA, 32 nt, Human
gauaggagggagagagggaaggggcugaggaa

SEQ ID NO: 163172 - RNA, 32 nt, Human
gauaggaugaaucugaacaucucuccaucuag

SEQ ID NO: 163173 - RNA, 32 nt, Human
gauaggauggucagaaaggaccucuuuguaga

SEQ ID NO: 163174 - RNA, 32 nt, Human
gauaggcagcugccauggcaacuggaggcugu

SEQ ID NO: 163175 - RNA, 32 nt, Human
gauaggcauucaauaaauacuccaaugcuguc

SEQ ID NO: 163176 - RNA, 32 nt, Human
gauaggccaaagguucucagagugugguuccu

SEQ ID NO: 163177 - RNA, 32 nt, Human
gauaggccaggggaguggagguaacggggccc

SEQ ID NO: 163178 - RNA, 22 nt, Human
gauaggccuucacaccuucaca

SEQ ID NO: 163179 - RNA, 32 nt, Human
gauaggcgugagccaccacacccggccaagca

SEQ ID NO: 163180 - RNA, 32 nt, Human
gauaggcgugugacccugguugaguggcacuu

SEQ ID NO: 163181 - RNA, 32 nt, Human
gauaggcucuuucgugcuguguuaucuuuaua

SEQ ID NO: 163182 - RNA, 32 nt, Human
gauaggcuggaucccuggggcaggccucuccu

SEQ ID NO: 163183 - RNA, 32 nt, Human
gauagggacagcugcccccagaacucccuuca

SEQ ID NO: 163184 - RNA, 32 nt, Human
gauagggagagggagcgaggcuggugccgcuu

SEQ ID NO: 163185 - RNA, 32 nt, Human
gauagggagggaggggacauaaagggaaugca

SEQ ID NO: 163186 - RNA, 32 nt, Human
gauagggaggugaguccucucuaucuccucug

SEQ ID NO: 163187 - RNA, 32 nt, Human
gauagggccaaggagaaaacaaccaagaacuc

SEQ ID NO: 163188 - RNA, 32 nt, Human
gauagggcccaccacacaacacggccucaucg

SEQ ID NO: 163189 - RNA, 32 nt, Human
gauagggccuuggaggagaagguccaguuuua

SEQ ID NO: 163190 - RNA, 32 nt, Human
gauagggcggaaggggacaggcuugaggcuug

SEQ ID NO: 163191 - RNA, 32 nt, Human
gauagggcggacuuaccuggcccagcccugcc

SEQ ID NO: 163192 - RNA, 32 nt, Human
gauaggggaagggaggagggagagggaggaca

SEQ ID NO: 163193 - RNA, 32 nt, Human
gauagggggcugugguccuuccuuucuccuga

SEQ ID NO: 163194 - RNA, 32 nt, Human
gauagggguaggaggagaggaggcaggcugcu

SEQ ID NO: 163195 - RNA, 18 nt, Human
gauagggucucgcucugu

SEQ ID NO: 163196 - RNA, 32 nt, Human
gauaggguucccaggcugccuggaguuacaua

SEQ ID NO: 163197 - RNA, 32 nt, Human
gauaggguugacguucguggauagacucauau

SEQ ID NO: 163198 - RNA, 32 nt, Human
gauagguagauaagagaaaaacaguugcauuc

SEQ ID NO: 163199 - RNA, 32 nt, Human
gauagguagcagagaccaaggcgcagggugcu

SEQ ID NO: 163200 - RNA, 32 nt, Human
gauaggucucaaacuccugacuucaggugauc

SEQ ID NO: 163201 - RNA, 32 nt, Human
gauaggugagugccuuucagguagcuuugcau

SEQ ID NO: 163202 - RNA, 32 nt, Human
gauaguaagagaggugacaacccacccagacu

SEQ ID NO: 163203 - RNA, 32 nt, Human
gauaguacauaaacgucccaaaauuagaagau

SEQ ID NO: 163204 - RNA, 32 nt, Human
gauaguaccacugcacuccagccugggcaaca

SEQ ID NO: 163205 - RNA, 32 nt, Human
gauaguaccacugcacuccagccugggcgaca

SEQ ID NO: 163206 - RNA, 32 nt, Human
gauaguacuugcagcuagauggaugcuuuuag

SEQ ID NO: 163207 - RNA, 31 nt, Human
gauaguaggaaacagucuggaugcuggugcc

SEQ ID NO: 163208 - RNA, 32 nt, Human
gauaguaguauuaucucauuuuacugaugaag

SEQ ID NO: 163209 - RNA, 32 nt, Human
gauaguagucacauacacuacacacacugugc

SEQ ID NO: 163210 - RNA, 32 nt, Human
gauagucaagcauuuagaagugcagugaacuu

SEQ ID NO: 163211 - RNA, 32 nt, Human
gauagucaccugcugguuguugccagguugca

SEQ ID NO: 163212 - RNA, 32 nt, Human
gauagucagagccuguggcacaccugggaugg

SEQ ID NO: 163213 - RNA, 32 nt, Human
gauagucauaaguggaagaaaaagccaagcau

SEQ ID NO: 163214 - RNA, 32 nt, Human
gauagucauauauaaucauaucuaagaucuau

SEQ ID NO: 163215 - RNA, 32 nt, Human
gauagucauggacucacuaggcugcugaggaa

SEQ ID NO: 163216 - RNA, 32 nt, Human
gauaguccacacucaagagaacgggaugauac

SEQ ID NO: 163217 - RNA, 32 nt, Human
gauagucguacaacaacccaggggauccagau

SEQ ID NO: 163218 - RNA, 32 nt, Human
gauagucuccaucucuugaccucgugaucugc

SEQ ID NO: 163219 - RNA, 32 nt, Human
gauagucucccaggcccagaagaugcuccuau

SEQ ID NO: 163220 - RNA, 32 nt, Human
gauagucugccuggucaaugcugagcuguacc

SEQ ID NO: 163221 - RNA, 32 nt, Human
gauagucuucuuuuuguccuuucuggccucug

SEQ ID NO: 163222 - RNA, 32 nt, Human
gauagugaggcuaagagagggaaagugacuua

SEQ ID NO: 163223 - RNA, 32 nt, Human
gauagugccacagcucuccagccugggcgaca

SEQ ID NO: 163224 - RNA, 32 nt, Human
gauagugccacugcaauucagccugggugaca

SEQ ID NO: 163225 - RNA, 32 nt, Human
gauagugccacugcacuacagcccgggcgaca

SEQ ID NO: 163226 - RNA, 32 nt, Human
gauagugccacugcacuccagccugggcaaca

SEQ ID NO: 163227 - RNA, 32 nt, Human
gauagugccacugcacuccagccugggugaca

SEQ ID NO: 163228 - RNA, 32 nt, Human
gauagugccacugcacuucagccugggugaca

SEQ ID NO: 163229 - RNA, 32 nt, Human
gauagugccacugcacuucagcuugggcaaca

SEQ ID NO: 163230 - RNA, 32 nt, Human
gauagugccacugcauuccggccugggcgaca

SEQ ID NO: 163231 - RNA, 32 nt, Human
gauagugccauugcacuccggccugggcaaca

SEQ ID NO: 163232 - RNA, 32 nt, Human
gauagugccauuguacuccagcuugggcaaca

SEQ ID NO: 163233 - RNA, 32 nt, Human
gauagugccgcugcacuccauucugggcaaga

SEQ ID NO: 163234 - RNA, 32 nt, Human
gauaguggagugagaaagggaggguggagggu

SEQ ID NO: 163235 - RNA, 32 nt, Human
gauaguggauuucagaggaaggugagauauuu

SEQ ID NO: 163236 - RNA, 32 nt, Human
gauaguggccuccagcuccauucauguuccug

SEQ ID NO: 163237 - RNA, 32 nt, Human
gauagugggggaacagacaauuuuguccuuau

SEQ ID NO: 163238 - RNA, 32 nt, Human
gauagugucugguucaagggcaaccaaucucu

SEQ ID NO: 163239 - RNA, 32 nt, Human
gauaguuccucuuucucauuuugcaaacuacc

SEQ ID NO: 163240 - RNA, 31 nt, Human
gauaguugccaaagauaccuguggaauacaa

SEQ ID NO: 163241 - RNA, 32 nt, Human
gauaguugcuauuuuuguaaaguuuccgugcg

SEQ ID NO: 163242 - RNA, 32 nt, Human
gauaguuuaccugaauaaaugguaguaaucac

SEQ ID NO: 163243 - RNA, 32 nt, Human
gauaguuucaauccucccuuuuggguuuuacc

SEQ ID NO: 163244 - RNA, 32 nt, Human
gauaguuuccgaguaagaccuuaaggacacag

SEQ ID NO: 163245 - RNA, 32 nt, Human
gauaguuucugccucacucaucccuccuguac

SEQ ID NO: 163246 - RNA, 32 nt, Human
gauaguuuguagaacugaagauuuccauugau

SEQ ID NO: 163247 - RNA, 32 nt, Human
gauauaaacuauuaagccaugaaaucuaauuu

SEQ ID NO: 163248 - RNA, 32 nt, Human
gauauaaagggaagagaaggaggcucaccgga

SEQ ID NO: 163249 - RNA, 32 nt, Human
gauauaaauguucuuaaacuaugaguuuaagc

SEQ ID NO: 163250 - RNA, 32 nt, Human
gauauaacacagaaaaaugccuugagggcaaa

SEQ ID NO: 163251 - RNA, 32 nt, Human
gauauaacaguuaacaggaugcagacauggca

SEQ ID NO: 163252 - RNA, 20 nt, Human
gauauaaccaucacccugga

SEQ ID NO: 163253 - RNA, 32 nt, Human
gauauaacugauuuuauagaaucugucuguuc

SEQ ID NO: 163254 - RNA, 32 nt, Human
gauauaacugucuuguuucagugagagacgcc

SEQ ID NO: 163255 - RNA, 32 nt, Human
gauauaagggaaaaugauaugaauguguauuu

SEQ ID NO: 163256 - RNA, 25 nt, Human
gauauaaugaugguugcuggauuag

SEQ ID NO: 163257 - RNA, 32 nt, Human
gauauaauucacauaccauaaaagccacucuu

SEQ ID NO: 163258 - RNA, 32 nt, Human
gauauaauugguggaaaggguggguggauaca

SEQ ID NO: 163259 - RNA, 32 nt, Human
gauauacaucuucuuccuuuugguuucuugau

SEQ ID NO: 163260 - RNA, 22 nt, Human
gauauacaugaaaauuuuaaaa

SEQ ID NO: 163261 - RNA, 20 nt, Human
gauauacauguuguguaaaa

SEQ ID NO: 163262 - RNA, 32 nt, Human
gauauacccacauccccggaacuaggugaucg

SEQ ID NO: 163263 - RNA, 21 nt, Human
gauauacuacuauugcuugua

SEQ ID NO: 163264 - RNA, 22 nt, Human
gauauacugaucuucauuacca

SEQ ID NO: 163265 - RNA, 32 nt, Human
gauauagaaaaauugugccggacuuaccuuuc

SEQ ID NO: 163266 - RNA, 32 nt, Human
gauauagaaggugguuucgaaggaggagacuc

SEQ ID NO: 163267 - RNA, 32 nt, Human
gauauagacacuaaccuugauagugauacguu

SEQ ID NO: 163268 - RNA, 32 nt, Human
gauauagagaaaucuggcuggcuacaguguag

SEQ ID NO: 163269 - RNA, 32 nt, Human
gauauagcaauagaagucugaagacgguaaac

SEQ ID NO: 163270 - RNA, 32 nt, Human
gauauagcucaaggggcaaccaggcagucgca

SEQ ID NO: 163271 - RNA, 32 nt, Human
gauauagcugagauugggaugucaacacucag

SEQ ID NO: 163272 - RNA, 32 nt, Human
gauauaguuuuuaaaaauaacuauuuuguuau

SEQ ID NO: 163273 - RNA, 32 nt, Human
gauauauaccucuuccuuuugucuuuugcugu

SEQ ID NO: 163274 - RNA, 32 nt, Human
gauauaucaagaaaucugaggaggaugcaggu

SEQ ID NO: 163275 - RNA, 32 nt, Human
gauauaucagugggagaugauucauaggggag

SEQ ID NO: 163276 - RNA, 32 nt, Human
gauauaugaguauuuaaacuaaggcauuaaga

SEQ ID NO: 163277 - RNA, 32 nt, Human
gauauaugccuguagucccaacuacuuggaag

SEQ ID NO: 163278 - RNA, 32 nt, Human
gauauauguaguucaucaucgacaaaaauauc

SEQ ID NO: 163279 - RNA, 32 nt, Human
gauauauucaaacuuucaaaaaggacaguguu

SEQ ID NO: 163280 - RNA, 32 nt, Human
gauauauucuuuggauccugcaaagaagagau

SEQ ID NO: 163281 - RNA, 32 nt, Human
gauauauugccuuacagaccuaccucaaacac

SEQ ID NO: 163282 - RNA, 23 nt, Human
gauauauuucaauccauugccau

SEQ ID NO: 163283 - RNA, 24 nt, Human
gauauauuuuaguuccauuacuau

SEQ ID NO: 163284 - RNA, 32 nt, Human
gauauauuuucuuucucuuccuccuuccucuu

SEQ ID NO: 163285 - RNA, 32 nt, Human
gauaucaacagcuucccuauuuugaaugcaga

SEQ ID NO: 163286 - RNA, 32 nt, Human
gauaucaagaggaguaugcaccaaauaaauuu

SEQ ID NO: 163287 - RNA, 32 nt, Human
gauaucaagaguuugaggccagccuggccaac

SEQ ID NO: 163288 - RNA, 32 nt, Human
gauaucaagcccagagccccagccucucccca

SEQ ID NO: 163289 - RNA, 32 nt, Human
gauaucacacagucaggagucaacugaguugg

SEQ ID NO: 163290 - RNA, 32 nt, Human
gauaucacaccuaacagaggcagcagcagucc

SEQ ID NO: 163291 - RNA, 32 nt, Human
gauaucacccaggcuggagugcaguggcgcga

SEQ ID NO: 163292 - RNA, 32 nt, Human
gauaucaccgcaaugcccuagaacagcuauga

SEQ ID NO: 163293 - RNA, 32 nt, Human
gauaucagcuaauucaggacugugagccggcu

SEQ ID NO: 163294 - RNA, 32 nt, Human
gauaucaucuuuucucagauauuuugugugau

SEQ ID NO: 163295 - RNA, 32 nt, Human
gauaucaugcagaugcagucugaauuccuugc

SEQ ID NO: 163296 - RNA, 32 nt, Human
gauaucaugccccuguacuccagccuggguga

SEQ ID NO: 163297 - RNA, 32 nt, Human
gauaucauuucgaggcccagcugagaaggauc

SEQ ID NO: 163298 - RNA, 32 nt, Human
gauauccagauacuugagauccugguaauugg

SEQ ID NO: 163299 - RNA, 32 nt, Human
gauauccaggaauugaacucagcucugcacca

SEQ ID NO: 163300 - RNA, 32 nt, Human
gauaucccaagugacacagaaacacagcuccu

SEQ ID NO: 163301 - RNA, 32 nt, Human
gauaucccagaagaagaggcaagggcauccac

SEQ ID NO: 163302 - RNA, 28 nt, Human
gauauccccaaggcugccucucccacca

SEQ ID NO: 163303 - RNA, 32 nt, Human
gauauccccugcccuccacaaauucuucuuuc

SEQ ID NO: 163304 - RNA, 32 nt, Human
gauaucccuccagguggggcuggcugcccuua

SEQ ID NO: 163305 - RNA, 20 nt, Human
gauauccgacauucaccuga

SEQ ID NO: 163306 - RNA, 32 nt, Human
gauauccgggaauugaacucagcucugcacca

SEQ ID NO: 163307 - RNA, 32 nt, Human
gauauccugaccacugcugcccuaggcuuaug

SEQ ID NO: 163308 - RNA, 32 nt, Human
gauauccugaucuugccccuccagagacagga

SEQ ID NO: 163309 - RNA, 32 nt, Human
gauauccugcaggagaccagggccaggagggu

SEQ ID NO: 163310 - RNA, 32 nt, Human
gauauccugccuggaugggguugcugugauuu

SEQ ID NO: 163311 - RNA, 32 nt, Human
gauaucgcaccacagcgcuccagccuggucga

SEQ ID NO: 163312 - RNA, 32 nt, Human
gauaucgcaccauuguacuccagccuguguga

SEQ ID NO: 163313 - RNA, 32 nt, Human
gauaucgccacugcacuccagccugggugaca

SEQ ID NO: 163314 - RNA, 32 nt, Human
gauaucgucuuucuguguuguccacacugguc

SEQ ID NO: 163315 - RNA, 32 nt, Human
gauaucgugccacugcacuccagccuggagga

SEQ ID NO: 163316 - RNA, 32 nt, Human
gauaucguuaccaagcaauggcaugcuacgau

SEQ ID NO: 163317 - RNA, 32 nt, Human
gauaucuacaauuauagaaucauacagaauag

SEQ ID NO: 163318 - RNA, 32 nt, Human
gauaucuagaugauguacauuucuugacuuac

SEQ ID NO: 163319 - RNA, 32 nt, Human
gauaucuauacuguucuuuucugcuacagaga

SEQ ID NO: 163320 - RNA, 32 nt, Human
gauaucuauuaccaaaccacauggagagaaau

SEQ ID NO: 163321 - RNA, 32 nt, Human
gauaucucauugugguuuugauuugcauuucu

SEQ ID NO: 163322 - RNA, 32 nt, Human
gauaucucugagggccugcaaggaggcaaagu

SEQ ID NO: 163323 - RNA, 32 nt, Human
gauaucugaaaccagguaaaggaagccuagau

SEQ ID NO: 163324 - RNA, 32 nt, Human
gauaucugagaaauccuccucauuauucugcu

SEQ ID NO: 163325 - RNA, 32 nt, Human
gauaucuggucucagggauugcuccuauguau

SEQ ID NO: 163326 - RNA, 32 nt, Human
gauaucuucuccacccuccuugcaccagacua

SEQ ID NO: 163327 - RNA, 32 nt, Human
gauaugaaagugucauuuauaucaauuugucc

SEQ ID NO: 163328 - RNA, 32 nt, Human
gauaugaagagccugguuacaguuucuacugu

SEQ ID NO: 163329 - RNA, 32 nt, Human
gauaugacgguguacuuacugccuuguagcaa

SEQ ID NO: 163330 - RNA, 32 nt, Human
gauaugacuccaggacccuugaguguaaugca

SEQ ID NO: 163331 - RNA, 32 nt, Human
gauaugagcauguugaacaucuugggagcugc

SEQ ID NO: 163332 - RNA, 32 nt, Human
gauaugaggcagcaggucucagaucugcuguc

SEQ ID NO: 163333 - RNA, 32 nt, Human
gauaugauggcauuuauaagguggugaaauac

SEQ ID NO: 163334 - RNA, 32 nt, Human
gauaugauggcuuagcuugggcucagaggccu

SEQ ID NO: 163335 - RNA, 32 nt, Human
gauaugauuugcaaaugaggagagagaagaug

SEQ ID NO: 163336 - RNA, 32 nt, Human
gauaugcaacacacuaaaccacucucaugucu

SEQ ID NO: 163337 - RNA, 22 nt, Human
gauaugcacacuuccauuacca

SEQ ID NO: 163338 - RNA, 32 nt, Human
gauaugcauauccugugaucugaggcauucgc

SEQ ID NO: 163339 - RNA, 32 nt, Human
gauaugccuccgcaacucacacaccugccugc

SEQ ID NO: 163340 - RNA, 32 nt, Human
gauaugccugcucuuuggccugaugaccaauu

SEQ ID NO: 163341 - RNA, 32 nt, Human
gauaugccuuugggguucgaaguggcccugga

SEQ ID NO: 163342 - RNA, 32 nt, Human
gauaugcugaagauuuccaggcaguuuuugug

SEQ ID NO: 163343 - RNA, 32 nt, Human
gauaugcugucuggacaggcacacacaugcag

SEQ ID NO: 163344 - RNA, 32 nt, Human
gauaugcuguuuagucacuacagugcccucaa

SEQ ID NO: 163345 - RNA, 32 nt, Human
gauaugcuugauaugcuuuuccuuccacaugu

SEQ ID NO: 163346 - RNA, 32 nt, Human
gauauggagaugggucugauuauagcguuguu

SEQ ID NO: 163347 - RNA, 32 nt, Human
gauauggagugaagcagcgggaacuauucuac

SEQ ID NO: 163348 - RNA, 32 nt, Human
gauauggaguuuugcucuuguugcccaggcug

SEQ ID NO: 163349 - RNA, 28 nt, Human
gauauggcaaugguaguuagcagcuggc

SEQ ID NO: 163350 - RNA, 32 nt, Human
gauauggucaucugugugucuaugggacaugg

SEQ ID NO: 163351 - RNA, 32 nt, Human
gauauggugguggagggagcccugggucgagu

SEQ ID NO: 163352 - RNA, 28 nt, Human
gauaugguugcagaagaaucagguccug

SEQ ID NO: 163353 - RNA, 32 nt, Human
gauauguagggaggaaggagguugauagcaua

SEQ ID NO: 163354 - RNA, 32 nt, Human
gauauguccucagccuuugggggccuggauaa

SEQ ID NO: 163355 - RNA, 32 nt, Human
gauaugucgaagaacuguuucauuagaagaca

SEQ ID NO: 163356 - RNA, 32 nt, Human
gauaugucuaacuacgaugaagaaggagcuug

SEQ ID NO: 163357 - RNA, 32 nt, Human
gauaugugaacauuucuucuccuucauaggua

SEQ ID NO: 163358 - RNA, 32 nt, Human
gauauguggggaaagcucuggugacccugggc

SEQ ID NO: 163359 - RNA, 32 nt, Human
gauauguguauguguauuagauccuagugguu

SEQ ID NO: 163360 - RNA, 32 nt, Human
gauauguguucuguuucuaagcgacauuugug

SEQ ID NO: 163361 - RNA, 32 nt, Human
gauauguuacacaguaaacaccugccaacccc

SEQ ID NO: 163362 - RNA, 32 nt, Human
gauauguuacaggauguuuuacauucucuugg

SEQ ID NO: 163363 - RNA, 32 nt, Human
gauauguuucaauucuuaaugaaaauuucuaa

SEQ ID NO: 163364 - RNA, 32 nt, Human
gauauguuuccaguucacaagucuuguauuca

SEQ ID NO: 163365 - RNA, 32 nt, Human
gauauuaaaaguaagaaaaauguguggguuuu

SEQ ID NO: 163366 - RNA, 32 nt, Human
gauauuaaaguuaggggaaagaaaagaucauu

SEQ ID NO: 163367 - RNA, 32 nt, Human
gauauuacucacugcacaucauaaaucuccau

SEQ ID NO: 163368 - RNA, 23 nt, Human
gauauuaguaagaaaggaucaug

SEQ ID NO: 163369 - RNA, 24 nt, Human
gauauuauacugucugccuugcug

SEQ ID NO: 163370 - RNA, 32 nt, Human
gauauuauagcagaacuucgauaugaccugcc

SEQ ID NO: 163371 - RNA, 31 nt, Human
gauauuauggcagcaacuuacagacuugugg

SEQ ID NO: 163372 - RNA, 32 nt, Human
gauauucaaacaucauaugccggaaauuuuca

SEQ ID NO: 163373 - RNA, 32 nt, Human
gauauuccaaauggauuguggaagagaaaccu

SEQ ID NO: 163374 - RNA, 32 nt, Human
gauauuccaccuguaauagcacuuuggaacug

SEQ ID NO: 163375 - RNA, 32 nt, Human
gauauucccagcuucaggauguguuuuaauag

SEQ ID NO: 163376 - RNA, 32 nt, Human
gauauucccucaaggcccugagcuagagacca

SEQ ID NO: 163377 - RNA, 32 nt, Human
gauauucgguuacuacacgugcaccuguagca

SEQ ID NO: 163378 - RNA, 32 nt, Human
gauauucucaacagaaaggguuaaaggcugau

SEQ ID NO: 163379 - RNA, 32 nt, Human
gauauucugaguccccacccccaaucacugac

SEQ ID NO: 163380 - RNA, 32 nt, Human
gauauucugaguucaagaacccuguccagugc

SEQ ID NO: 163381 - RNA, 32 nt, Human
gauauucuggcccagggaauccagccaugacc

SEQ ID NO: 163382 - RNA, 32 nt, Human
gauauucuuacagguugguuugcaguguuaac

SEQ ID NO: 163383 - RNA, 32 nt, Human
gauauucuugacaaucaucagcaacaaagauc

SEQ ID NO: 163384 - RNA, 32 nt, Human
gauauucuuggccaauaguuucagagaaaguc

SEQ ID NO: 163385 - RNA, 32 nt, Human
gauauugaagaaaagacugaagugaaagaaga

SEQ ID NO: 163386 - RNA, 32 nt, Human
gauauugauguuggucguuuccaaacacuaau

SEQ ID NO: 163387 - RNA, 32 nt, Human
gauauugcauuuucauauucuuuauuuauaaa

SEQ ID NO: 163388 - RNA, 32 nt, Human
gauauugcuaucuucuuaguacccguaccuua

SEQ ID NO: 163389 - RNA, 32 nt, Human
gauauugcuauguuggccaggcuggucucaaa

SEQ ID NO: 163390 - RNA, 32 nt, Human
gauauugcugggauauugaggguuguggauga

SEQ ID NO: 163391 - RNA, 32 nt, Human
gauauugcuucagcauuucaaauauguugcaa

SEQ ID NO: 163392 - RNA, 32 nt, Human
gauauuggcacaaauguuuuauacaaagaguu

SEQ ID NO: 163393 - RNA, 32 nt, Human
gauauuggggcugaggggaguuugagguguua

SEQ ID NO: 163394 - RNA, 32 nt, Human
gauauuggugaguugccaaagaagcaauacag

SEQ ID NO: 163395 - RNA, 32 nt, Human
gauauugucuucaugcgaacuugguauccugu

SEQ ID NO: 163396 - RNA, 32 nt, Human
gauauugucuucaugugaacuugguauccugu

SEQ ID NO: 163397 - RNA, 32 nt, Human
gauauugugccacugcacuccagccugggcga

SEQ ID NO: 163398 - RNA, 32 nt, Human
gauauuguuuuucuaaaaacaaaugcuguuua

SEQ ID NO: 163399 - RNA, 32 nt, Human
gauauuuaugauacauguaugacuugucuaag

SEQ ID NO: 163400 - RNA, 32 nt, Human
gauauuuauggaggggacuaugagagguuugg

SEQ ID NO: 163401 - RNA, 32 nt, Human
gauauuuauuuauuuucccugagccuauaucu

SEQ ID NO: 163402 - RNA, 32 nt, Human
gauauuucaagaacuggaccagcuccaaaagg

SEQ ID NO: 163403 - RNA, 32 nt, Human
gauauuucacauugaaaugaaaagccuuucuc

SEQ ID NO: 163404 - RNA, 32 nt, Human
gauauuucagcccuuuccuguggccugguccu

SEQ ID NO: 163405 - RNA, 19 nt, Human
gauauuucagcuccaggaa

SEQ ID NO: 163406 - RNA, 32 nt, Human
gauauuucugcacuugggcccuccucugggag

SEQ ID NO: 163407 - RNA, 32 nt, Human
gauauuucuggaccacucaagcucuucgauac

SEQ ID NO: 163408 - RNA, 32 nt, Human
gauauuucuguaacucauucucuuggugcuca

SEQ ID NO: 163409 - RNA, 32 nt, Human
gauauuucuuaacccagaccuuaugccucugu

SEQ ID NO: 163410 - RNA, 32 nt, Human
gauauuucuugcccuguucccccuggaaugug

SEQ ID NO: 163411 - RNA, 32 nt, Human
gauauuugauuuuacaaaaaugguuauuaaag

SEQ ID NO: 163412 - RNA, 32 nt, Human
gauauuuggaguucuuacaacauggcagacau

SEQ ID NO: 163413 - RNA, 32 nt, Human
gauauuugggaaucaaggcaacagauggauua

SEQ ID NO: 163414 - RNA, 32 nt, Human
gauauuuguaaucuuuuaccacuuugggguug

SEQ ID NO: 163415 - RNA, 32 nt, Human
gauauuuuagaguuggaaguuaugcaguaaaa

SEQ ID NO: 163416 - RNA, 32 nt, Human
gauauuuuccagauuuguuggaucuauuuggu

SEQ ID NO: 163417 - RNA, 32 nt, Human
gauauuuugccucauucacuuguacuguaaca

SEQ ID NO: 163418 - RNA, 32 nt, Human
gauauuuugcggggagcagggaagaucuuuga

SEQ ID NO: 163419 - RNA, 32 nt, Human
gauauuuuuacugugaagguguuuucaguugu

SEQ ID NO: 163420 - RNA, 32 nt, Human
gauauuuuuccgcuuggcaauuuccuuuccug

SEQ ID NO: 163421 - RNA, 32 nt, Human
gaucaaaacauagaaaccccaucucuacuaaa

SEQ ID NO: 163422 - RNA, 32 nt, Human
gaucaaaaccagccuggccaacauggugaaac

SEQ ID NO: 163423 - RNA, 32 nt, Human
gaucaaaaccuacaagauucaacugaaaaguu

SEQ ID NO: 163424 - RNA, 32 nt, Human
gaucaaaagacuaauaguuaaaaaccucagca

SEQ ID NO: 163425 - RNA, 31 nt, Human
gaucaaaagagacuugccuuuuaaggaucga

SEQ ID NO: 163426 - RNA, 32 nt, Human
gaucaaacaacugccugagaacugaauuagga

SEQ ID NO: 163427 - RNA, 32 nt, Human
gaucaaacaagugucuuuuacuuaagaagaaa

SEQ ID NO: 163428 - RNA, 32 nt, Human
gaucaaaccacuguaguccagccugagugaca

SEQ ID NO: 163429 - RNA, 32 nt, Human
gaucaaagacacacuuuucaugaccucaaaug

SEQ ID NO: 163430 - RNA, 32 nt, Human
gaucaaaggcgcagcccaggaggcgggagccc

SEQ ID NO: 163431 - RNA, 32 nt, Human
gaucaaaguucugcuuucuccccaaugagacu

SEQ ID NO: 163432 - RNA, 32 nt, Human
gaucaaauacuccuggcccauggauccauucc

SEQ ID NO: 163433 - RNA, 32 nt, Human
gaucaaauauagaaaguugauauucaaccuca

SEQ ID NO: 163434 - RNA, 32 nt, Human
gaucaaauggcagaaaagcaguuagacuacaa

SEQ ID NO: 163435 - RNA, 32 nt, Human
gaucaaauuaucuguaugacaauuguaucuuc

SEQ ID NO: 163436 - RNA, 32 nt, Human
gaucaacacaaauagcugcagccuggguuaaa

SEQ ID NO: 163437 - RNA, 32 nt, Human
gaucaacauauguuaagaacaugcaguucagu

SEQ ID NO: 163438 - RNA, 32 nt, Human
gaucaacauggugaaaccccgucucuacuaaa

SEQ ID NO: 163439 - RNA, 32 nt, Human
gaucaacauggugaaaccccgucuuuacuaaa

SEQ ID NO: 163440 - RNA, 32 nt, Human
gaucaaccaaguuugggaacccuuccccacau

SEQ ID NO: 163441 - RNA, 32 nt, Human
gaucaacccaggaagggaugaucaggagaggc

SEQ ID NO: 163442 - RNA, 32 nt, Human
gaucaaccuccaggagcuagcagcgggcgcgg

SEQ ID NO: 163443 - RNA, 32 nt, Human
gaucaacguggugaaaccucuacuaaaaauac

SEQ ID NO: 163444 - RNA, 32 nt, Human
gaucaacuggaagaaaggguaucagcaauggc

SEQ ID NO: 163445 - RNA, 32 nt, Human
gaucaacuucuuucuugugucucccagcacac

SEQ ID NO: 163446 - RNA, 32 nt, Human
gaucaagaaaauuucuuucuucaugacccugc

SEQ ID NO: 163447 - RNA, 32 nt, Human
gaucaagaacauccuggcuaacacggugaaac

SEQ ID NO: 163448 - RNA, 18 nt, Human
gaucaagaaccugguggg

SEQ ID NO: 163449 - RNA, 32 nt, Human
gaucaagaccagccuggccaacauagugaaac

SEQ ID NO: 163450 - RNA, 32 nt, Human
gaucaagagcuuaaaaccagcccaggcaacau

SEQ ID NO: 163451 - RNA, 32 nt, Human
gaucaagagguugaagcugcagugagcuguga

SEQ ID NO: 163452 - RNA, 32 nt, Human
gaucaagaugaugaagccagaguucaguauga

SEQ ID NO: 163453 - RNA, 32 nt, Human
gaucaagcaagaaagaaaaagacagaaaacaa

SEQ ID NO: 163454 - RNA, 32 nt, Human
gaucaagcacauauucuucuaguccagaucua

SEQ ID NO: 163455 - RNA, 32 nt, Human
gaucaagcacuggccucugccccuccuccuuc

SEQ ID NO: 163456 - RNA, 32 nt, Human
gaucaagccaaagaauucucauguacucuacc

SEQ ID NO: 163457 - RNA, 32 nt, Human
gaucaagccacugcacuccagccugggcgaca

SEQ ID NO: 163458 - RNA, 32 nt, Human
gaucaagccauugcacuccagccugggcaaca

SEQ ID NO: 163459 - RNA, 32 nt, Human
gaucaagccauuguacuccagccuggacaaca

SEQ ID NO: 163460 - RNA, 32 nt, Human
gaucaagcuccggaagaugguggagggucaug

SEQ ID NO: 163461 - RNA, 32 nt, Human
gaucaaggaguaaaccagaagaagaagaaaaa

SEQ ID NO: 163462 - RNA, 32 nt, Human
gaucaagggaaacuacucuaagaggcuacacu

SEQ ID NO: 163463 - RNA, 32 nt, Human
gaucaaggguuccacugugggaacggcuuggc

SEQ ID NO: 163464 - RNA, 19 nt, Human
gaucaaguccucugguagg

SEQ ID NO: 163465 - RNA, 32 nt, Human
gaucaagugaaaaagcugcaucaagacccauu

SEQ ID NO: 163466 - RNA, 32 nt, Human
gaucaaguucgggggaauaaagacagaccaca

SEQ ID NO: 163467 - RNA, 18 nt, Human
gaucaaguugaugauggg

SEQ ID NO: 163468 - RNA, 19 nt, Human
gaucaaguugucugaagga

SEQ ID NO: 163469 - RNA, 32 nt, Human
gaucaauaugaccacacuccagccaaggacaa

SEQ ID NO: 163470 - RNA, 32 nt, Human
gaucaauaugaugaaaccccugucucuacuaa

SEQ ID NO: 163471 - RNA, 32 nt, Human
gaucaaucagugugauuagcuuucucagcaga

SEQ ID NO: 163472 - RNA, 30 nt, Human
gaucaauggaaaggaauagugaguccagaa

SEQ ID NO: 163473 - RNA, 32 nt, Human
gaucaauguguguguccucugacgcaguuucc

SEQ ID NO: 163474 - RNA, 32 nt, Human
gaucaauuucccauugaacugaacaugcaaca

SEQ ID NO: 163475 - RNA, 32 nt, Human
gaucacaaauccaaacccuucagaagaaggua

SEQ ID NO: 163476 - RNA, 32 nt, Human
gaucacaaggcagacucagugggauccuccua

SEQ ID NO: 163477 - RNA, 24 nt, Human
gaucacaagguccagaguucaaga

SEQ ID NO: 163478 - RNA, 32 nt, Human
gaucacaauggcaggggacagaaugugcaugg

SEQ ID NO: 163479 - RNA, 32 nt, Human
gaucacacaacugcacuccagccugggcaaca

SEQ ID NO: 163480 - RNA, 32 nt, Human
gaucacacaauugcaguccagccugggcagca

SEQ ID NO: 163481 - RNA, 32 nt, Human
gaucacacaucuguauuccagccugggcaaua

SEQ ID NO: 163482 - RNA, 32 nt, Human
gaucacaccacaguacuccagccuaggugaca

SEQ ID NO: 163483 - RNA, 32 nt, Human
gaucacaccaccacacuccagccugagcagca

SEQ ID NO: 163484 - RNA, 32 nt, Human
gaucacaccaccacuccagccugggcgagagc

SEQ ID NO: 163485 - RNA, 32 nt, Human
gaucacaccaccgcacuccacccugggaagca

SEQ ID NO: 163486 - RNA, 32 nt, Human
gaucacaccaccucacuccagccugggcaaca

SEQ ID NO: 163487 - RNA, 32 nt, Human
gaucacaccacuacacuccagccuaggcaaca

SEQ ID NO: 163488 - RNA, 32 nt, Human
gaucacaccacuacacuccagccuggacaaca

SEQ ID NO: 163489 - RNA, 32 nt, Human
gaucacaccacuacacuccagccugggcgaca

SEQ ID NO: 163490 - RNA, 32 nt, Human
gaucacaccacuacacuccagccugggcgaga

SEQ ID NO: 163491 - RNA, 32 nt, Human
gaucacaccacuccacuccagucuggacaaca

SEQ ID NO: 163492 - RNA, 32 nt, Human
gaucacaccacugaccucuagccugguggcag

SEQ ID NO: 163493 - RNA, 32 nt, Human
gaucacaccacugcaauccagccucgguaaca

SEQ ID NO: 163494 - RNA, 32 nt, Human
gaucacaccacugcaauccagccugggcgaca

SEQ ID NO: 163495 - RNA, 32 nt, Human
gaucacaccacugcaccccagccugggugaca

SEQ ID NO: 163496 - RNA, 32 nt, Human
gaucacaccacugcacuacagccucggcaaua

SEQ ID NO: 163497 - RNA, 32 nt, Human
gaucacaccacugcacucagccugggugacag

SEQ ID NO: 163498 - RNA, 32 nt, Human
gaucacaccacugcacuccaaccuggacaaca

SEQ ID NO: 163499 - RNA, 32 nt, Human
gaucacaccacugcacuccaaccugggaaacg

SEQ ID NO: 163500 - RNA, 32 nt, Human
gaucacaccacugcacuccagccagggcaaca

SEQ ID NO: 163501 - RNA, 32 nt, Human
gaucacaccacugcacuccagcccaggugaca

SEQ ID NO: 163502 - RNA, 32 nt, Human
gaucacaccacugcacuccagccuaggcaaca

SEQ ID NO: 163503 - RNA, 32 nt, Human
gaucacaccacugcacuccagccuggacaaca

SEQ ID NO: 163504 - RNA, 32 nt, Human
gaucacaccacugcacuccagccuggacgaca

SEQ ID NO: 163505 - RNA, 32 nt, Human
gaucacaccacugcacuccagccuggcaacag

SEQ ID NO: 163506 - RNA, 32 nt, Human
gaucacaccacugcacuccagccuggcgacag

SEQ ID NO: 163507 - RNA, 32 nt, Human
gaucacaccacugcacuccagccugggagaga

SEQ ID NO: 163508 - RNA, 32 nt, Human
gaucacaccacugcacuccagccugggcaaca

SEQ ID NO: 163509 - RNA, 32 nt, Human
gaucacaccacugcacuccagccugggcaaua

SEQ ID NO: 163510 - RNA, 32 nt, Human
gaucacaccacugcacuccagccugggcgaca

SEQ ID NO: 163511 - RNA, 32 nt, Human
gaucacaccacugcacuccagccugggcggca

SEQ ID NO: 163512 - RNA, 32 nt, Human
gaucacaccacugcacuccagccugggggaca

SEQ ID NO: 163513 - RNA, 32 nt, Human
gaucacaccacugcacuccagccuggggugau

SEQ ID NO: 163514 - RNA, 32 nt, Human
gaucacaccacugcacuccagccuggguaaaa

SEQ ID NO: 163515 - RNA, 32 nt, Human
gaucacaccacugcacuccagccugggugaca

SEQ ID NO: 163516 - RNA, 32 nt, Human
gaucacaccacugcacuccagccugggugaua

SEQ ID NO: 163517 - RNA, 32 nt, Human
gaucacaccacugcacuccagccuggguggca

SEQ ID NO: 163518 - RNA, 32 nt, Human
gaucacaccacugcacuccagccuggguguca

SEQ ID NO: 163519 - RNA, 32 nt, Human
gaucacaccacugcacuccagccuggucaaca

SEQ ID NO: 163520 - RNA, 32 nt, Human
gaucacaccacugcacuccagccuggugacag

SEQ ID NO: 163521 - RNA, 32 nt, Human
gaucacaccacugcacuccagccugugcgaca

SEQ ID NO: 163522 - RNA, 32 nt, Human
gaucacaccacugcacuccagccuuggcgaca

SEQ ID NO: 163523 - RNA, 32 nt, Human
gaucacaccacugcacuccagucugggcacca

SEQ ID NO: 163524 - RNA, 32 nt, Human
gaucacaccacugcacuccagugugagcaaca

SEQ ID NO: 163525 - RNA, 32 nt, Human
gaucacaccacugcacuccauccagccugggu

SEQ ID NO: 163526 - RNA, 32 nt, Human
gaucacaccacugcacuccggccugggcgaca

SEQ ID NO: 163527 - RNA, 32 nt, Human
gaucacaccacugcacucuagccugggcaaca

SEQ ID NO: 163528 - RNA, 32 nt, Human
gaucacaccacugcacucuagccugggugaca

SEQ ID NO: 163529 - RNA, 32 nt, Human
gaucacaccacugcacucuggccugcaugcac

SEQ ID NO: 163530 - RNA, 32 nt, Human
gaucacaccacugcacuucagccugggcaaca

SEQ ID NO: 163531 - RNA, 32 nt, Human
gaucacaccacugcacuucauccuaggcaaca

SEQ ID NO: 163532 - RNA, 32 nt, Human
gaucacaccacugcauuccagccugggcacua

SEQ ID NO: 163533 - RNA, 32 nt, Human
gaucacaccacugcauuccagccugggugaca

SEQ ID NO: 163534 - RNA, 32 nt, Human
gaucacaccacugcauucccgccugggcagca

SEQ ID NO: 163535 - RNA, 32 nt, Human
gaucacaccacugcauucuggccugggugaca

SEQ ID NO: 163536 - RNA, 32 nt, Human
gaucacaccacugcgcucuagccuggacaaca

SEQ ID NO: 163537 - RNA, 32 nt, Human
gaucacaccacugcgcucuagccugggcaaca

SEQ ID NO: 163538 - RNA, 32 nt, Human
gaucacaccacuggcacuccagccugggcaac

SEQ ID NO: 163539 - RNA, 32 nt, Human
gaucacaccacuguaccacagccugagcaacg

SEQ ID NO: 163540 - RNA, 32 nt, Human
gaucacaccacuguacuccagcccggcacucc

SEQ ID NO: 163541 - RNA, 32 nt, Human
gaucacaccacuguacuccagccugagugaca

SEQ ID NO: 163542 - RNA, 32 nt, Human
gaucacaccacuguacuccagccuggaugaca

SEQ ID NO: 163543 - RNA, 32 nt, Human
gaucacaccacuguacuccagccugggcaaca

SEQ ID NO: 163544 - RNA, 32 nt, Human
gaucacaccacuguacuccagccugggugaca

SEQ ID NO: 163545 - RNA, 32 nt, Human
gaucacaccacuguauuccagccugggugacu

SEQ ID NO: 163546 - RNA, 32 nt, Human
gaucacaccacugugcucuagccuggacaaca

SEQ ID NO: 163547 - RNA, 32 nt, Human
gaucacaccagccuaaccaacaugaugaaacu

SEQ ID NO: 163548 - RNA, 32 nt, Human
gaucacaccagugcacuccagccugggcgaca

SEQ ID NO: 163549 - RNA, 32 nt, Human
gaucacaccaucgcacuccagccuaggcaaca

SEQ ID NO: 163550 - RNA, 32 nt, Human
gaucacaccauugcacuccaaccugggcaaca

SEQ ID NO: 163551 - RNA, 32 nt, Human
gaucacaccauugcacuccagccuagauaaca

SEQ ID NO: 163552 - RNA, 32 nt, Human
gaucacaccauugcacuccagccuaggcaaca

SEQ ID NO: 163553 - RNA, 32 nt, Human
gaucacaccauugcacuccagccuaggcaugg

SEQ ID NO: 163554 - RNA, 32 nt, Human
gaucacaccauugcacuccagccugagcaaca

SEQ ID NO: 163555 - RNA, 32 nt, Human
gaucacaccauugcacuccagccugggaaaca

SEQ ID NO: 163556 - RNA, 32 nt, Human
gaucacaccauugcacuccagccugggcaaaa

SEQ ID NO: 163557 - RNA, 32 nt, Human
gaucacaccauugcacuccagccugggcaaca

SEQ ID NO: 163558 - RNA, 32 nt, Human
gaucacaccauugcacuccagccugggcgaca

SEQ ID NO: 163559 - RNA, 32 nt, Human
gaucacaccauugcacugcagccugggugaag

SEQ ID NO: 163560 - RNA, 32 nt, Human
gaucacaccauugcacuucagccugggcgaca

SEQ ID NO: 163561 - RNA, 32 nt, Human
gaucacaccauugcccuccagccugggugaca

SEQ ID NO: 163562 - RNA, 24 nt, Human
gaucacaccauugcgcuucagccu

SEQ ID NO: 163563 - RNA, 32 nt, Human
gaucacaccauugcgcuucagccugggcaaca

SEQ ID NO: 163564 - RNA, 32 nt, Human
gaucacaccauugcuguccagccugggugaca

SEQ ID NO: 163565 - RNA, 32 nt, Human
gaucacaccgcugcacucaagccugggugaca

SEQ ID NO: 163566 - RNA, 32 nt, Human
gaucacaccugacugcacuccagccugggugg

SEQ ID NO: 163567 - RNA, 32 nt, Human
gaucacaccugcaaucccagcacuuugggagg

SEQ ID NO: 163568 - RNA, 32 nt, Human
gaucacaccuguaaucccagcacuuugggagg

SEQ ID NO: 163569 - RNA, 32 nt, Human
gaucacacgacugcauucuagccugggugaca

SEQ ID NO: 163570 - RNA, 32 nt, Human
gaucacacgccacugcacuccagccuggguga

SEQ ID NO: 163571 - RNA, 32 nt, Human
gaucacacuacugcacuccagccugggcaaca

SEQ ID NO: 163572 - RNA, 32 nt, Human
gaucacacuacugcacuccagccugggcgaca

SEQ ID NO: 163573 - RNA, 32 nt, Human
gaucacacuacugcacuccugcaugggcgacu

SEQ ID NO: 163574 - RNA, 32 nt, Human
gaucacacuacugcauuccagccugagcaaca

SEQ ID NO: 163575 - RNA, 32 nt, Human
gaucacacuauugcacuccagccugggcgaca

SEQ ID NO: 163576 - RNA, 32 nt, Human
gaucacacugcugcacuccagccugugcaaca

SEQ ID NO: 163577 - RNA, 32 nt, Human
gaucacacuuauuugugcaaaauugauuuuca

SEQ ID NO: 163578 - RNA, 32 nt, Human
gaucacagaggcuucuucagaucaaugcuuga

SEQ ID NO: 163579 - RNA, 32 nt, Human
gaucacagauggagagacauuuugccacacga

SEQ ID NO: 163580 - RNA, 32 nt, Human
gaucacagcacacacauacauacacccuccac

SEQ ID NO: 163581 - RNA, 32 nt, Human
gaucacagcacugcacugcugccugggcgaca

SEQ ID NO: 163582 - RNA, 24 nt, Human
gaucacagcauugcacuucagccu

SEQ ID NO: 163583 - RNA, 25 nt, Human
gaucacagccccccuaccuuuugcc

SEQ ID NO: 163584 - RNA, 23 nt, Human
gaucacagcccuuggcccugcuu

SEQ ID NO: 163585 - RNA, 31 nt, Human
gaucacagccucucuugggccguacuguguu

SEQ ID NO: 163586 - RNA, 31 nt, Human
gaucacagccucucuugggcuguacuguguu

SEQ ID NO: 163587 - RNA, 32 nt, Human
gaucacagcuacucgggaggcugaggcacgag

SEQ ID NO: 163588 - RNA, 21 nt, Human
gaucacagcucacugcagcuu

SEQ ID NO: 163589 - RNA, 32 nt, Human
gaucacagcuuacugcagccuugaccucccag

SEQ ID NO: 163590 - RNA, 32 nt, Human
gaucacaggcugagggacagagcaaagacccc

SEQ ID NO: 163591 - RNA, 32 nt, Human
gaucacaggcuucuuuuguuuuguuucuugcu

SEQ ID NO: 163592 - RNA, 32 nt, Human
gaucacaguauuuaaguguuuugcguuuuaua

SEQ ID NO: 163593 - RNA, 21 nt, Human
gaucacagucgcuuccugucu

SEQ ID NO: 163594 - RNA, 32 nt, Human
gaucacagugcugggaaaugggagcacaguaa

SEQ ID NO: 163595 - RNA, 24 nt, Human
gaucacaguucuguguucuggccu

SEQ ID NO: 163596 - RNA, 32 nt, Human
gaucacaguucuguguucuggccuguggcagg

SEQ ID NO: 163597 - RNA, 32 nt, Human
gaucacaucaccucucugccucaguuucccca

SEQ ID NO: 163598 - RNA, 32 nt, Human
gaucacaucacugcacuccagccuggguaaca

SEQ ID NO: 163599 - RNA, 32 nt, Human
gaucacaucacugcacuccauccugggugaca

SEQ ID NO: 163600 - RNA, 32 nt, Human
gaucacaucacugcaguccagccugggugaca

SEQ ID NO: 163601 - RNA, 32 nt, Human
gaucacauccagcccccagugccugcacggcu

SEQ ID NO: 163602 - RNA, 32 nt, Human
gaucacauucuuuaacaaggaccuguccaaca

SEQ ID NO: 163603 - RNA, 20 nt, Human
gaucacauugcaaagcuuuc

SEQ ID NO: 163604 - RNA, 32 nt, Human
gaucacauuuuucugccuguguacuuuugcuu

SEQ ID NO: 163605 - RNA, 32 nt, Human
gaucaccaaacagacaagccgguccuucauuc

SEQ ID NO: 163606 - RNA, 32 nt, Human
gaucaccaaaggacugagaaucugggagggca

SEQ ID NO: 163607 - RNA, 32 nt, Human
gaucaccaaaggccaggaguuugaggcugcag

SEQ ID NO: 163608 - RNA, 32 nt, Human
gaucaccaagaguaugaggcuccugcucugau

SEQ ID NO: 163609 - RNA, 32 nt, Human
gaucaccaagccccacccagacuuccgccugu

SEQ ID NO: 163610 - RNA, 32 nt, Human
gaucaccaauccagaugguauugcucccucag

SEQ ID NO: 163611 - RNA, 32 nt, Human
gaucaccacagcccuccucuuccgugagccuu

SEQ ID NO: 163612 - RNA, 32 nt, Human
gaucaccagcucacuccgcugcagccgcccca

SEQ ID NO: 163613 - RNA, 32 nt, Human
gaucacccagcuguguucagaauuuucuuacu

SEQ ID NO: 163614 - RNA, 32 nt, Human
gaucaccccacugcauuccagccugggugaca

SEQ ID NO: 163615 - RNA, 32 nt, Human
gaucaccccacuguccuccagccugggcaaca

SEQ ID NO: 163616 - RNA, 32 nt, Human
gaucaccccacugugcuguagccugggugaca

SEQ ID NO: 163617 - RNA, 32 nt, Human
gaucaccccaggaauuagucacuaagaauucc

SEQ ID NO: 163618 - RNA, 32 nt, Human
gaucaccccauugcacuccagccuggacaaca

SEQ ID NO: 163619 - RNA, 32 nt, Human
gaucaccccauuucacuccagccugggcgaca

SEQ ID NO: 163620 - RNA, 32 nt, Human
gaucacccuccacaggcuugagcccaguccca

SEQ ID NO: 163621 - RNA, 32 nt, Human
gaucaccucacugcacgcuagccugggcaaca

SEQ ID NO: 163622 - RNA, 32 nt, Human
gaucaccugagguccggagaccagccuggcca

SEQ ID NO: 163623 - RNA, 32 nt, Human
gaucaccugagguuaagaguucaagaccagcc

SEQ ID NO: 163624 - RNA, 32 nt, Human
gaucaccugcagcuggccacaccacaggcccc

SEQ ID NO: 163625 - RNA, 32 nt, Human
gaucaccuuuaucuaaagugggagaagauaca

SEQ ID NO: 163626 - RNA, 32 nt, Human
gaucacgacacugcacuccagccugggcaacg

SEQ ID NO: 163627 - RNA, 32 nt, Human
gaucacgagggcagauuucucccuugcuguuc

SEQ ID NO: 163628 - RNA, 24 nt, Human
gaucacgauccugcacuccagccu

SEQ ID NO: 163629 - RNA, 32 nt, Human
gaucacgauccugcacuccagccugggcaaca

SEQ ID NO: 163630 - RNA, 19 nt, Human
gaucacgcagucaauggca

SEQ ID NO: 163631 - RNA, 32 nt, Human
gaucacgccacagcacuccagccugggcgaca

SEQ ID NO: 163632 - RNA, 32 nt, Human
gaucacgccacuacacuccagccugggcgaca

SEQ ID NO: 163633 - RNA, 32 nt, Human
gaucacgccacugaacuccagccugggagaca

SEQ ID NO: 163634 - RNA, 32 nt, Human
gaucacgccacugaacuccagccugggugaca

SEQ ID NO: 163635 - RNA, 32 nt, Human
gaucacgccacugcaacuccagcuugggugac

SEQ ID NO: 163636 - RNA, 32 nt, Human
gaucacgccacugcaccccagccugggugaca

SEQ ID NO: 163637 - RNA, 32 nt, Human
gaucacgccacugcacuacagccuggacgaca

SEQ ID NO: 163638 - RNA, 32 nt, Human
gaucacgccacugcacuauagccuaggugaca

SEQ ID NO: 163639 - RNA, 32 nt, Human
gaucacgccacugcacucaagccugggcgaca

SEQ ID NO: 163640 - RNA, 32 nt, Human
gaucacgccacugcacuccaaccugggugaca

SEQ ID NO: 163641 - RNA, 32 nt, Human
gaucacgccacugcacuccaacuugggcaaca

SEQ ID NO: 163642 - RNA, 32 nt, Human
gaucacgccacugcacuccaccugggcaacaa

SEQ ID NO: 163643 - RNA, 32 nt, Human
gaucacgccacugcacuccagcacccugggcg

SEQ ID NO: 163644 - RNA, 32 nt, Human
gaucacgccacugcacuccagcccgggcgaca

SEQ ID NO: 163645 - RNA, 32 nt, Human
gaucacgccacugcacuccagcccgggcggca

SEQ ID NO: 163646 - RNA, 32 nt, Human
gaucacgccacugcacuccagcccggggacag

SEQ ID NO: 163647 - RNA, 32 nt, Human
gaucacgccacugcacuccagccuaggcgaca

SEQ ID NO: 163648 - RNA, 32 nt, Human
gaucacgccacugcacuccagccucggugaca

SEQ ID NO: 163649 - RNA, 32 nt, Human
gaucacgccacugcacuccagccugagugaca

SEQ ID NO: 163650 - RNA, 32 nt, Human
gaucacgccacugcacuccagccugcggacag

SEQ ID NO: 163651 - RNA, 32 nt, Human
gaucacgccacugcacuccagccuggacaaca

SEQ ID NO: 163652 - RNA, 32 nt, Human
gaucacgccacugcacuccagccuggaugaca

SEQ ID NO: 163653 - RNA, 32 nt, Human
gaucacgccacugcacuccagccuggcgacag

SEQ ID NO: 163654 - RNA, 32 nt, Human
gaucacgccacugcacuccagccugggagaca

SEQ ID NO: 163655 - RNA, 32 nt, Human
gaucacgccacugcacuccagccugggcaaca

SEQ ID NO: 163656 - RNA, 32 nt, Human
gaucacgccacugcacuccagccugggcaacg

SEQ ID NO: 163657 - RNA, 32 nt, Human
gaucacgccacugcacuccagccugggccaca

SEQ ID NO: 163658 - RNA, 32 nt, Human
gaucacgccacugcacuccagccugggcgaca

SEQ ID NO: 163659 - RNA, 32 nt, Human
gaucacgccacugcacuccagccugggcgaug

SEQ ID NO: 163660 - RNA, 32 nt, Human
gaucacgccacugcacuccagccuggguaaca

SEQ ID NO: 163661 - RNA, 32 nt, Human
gaucacgccacugcacuccagccugggugaca

SEQ ID NO: 163662 - RNA, 32 nt, Human
gaucacgccacugcacuccagccuggucaaca

SEQ ID NO: 163663 - RNA, 32 nt, Human
gaucacgccacugcacuccagccuggugacag

SEQ ID NO: 163664 - RNA, 32 nt, Human
gaucacgccacugcacuccagccuguugacaa

SEQ ID NO: 163665 - RNA, 32 nt, Human
gaucacgccacugcacuccagcuggagugaca

SEQ ID NO: 163666 - RNA, 32 nt, Human
gaucacgccacugcacuccagcuugggugaca

SEQ ID NO: 163667 - RNA, 32 nt, Human
gaucacgccacugcacuccagucugggugaca

SEQ ID NO: 163668 - RNA, 32 nt, Human
gaucacgccacugcacuccauccagccugggu

SEQ ID NO: 163669 - RNA, 32 nt, Human
gaucacgccacugcacucuagccuaggcgaca

SEQ ID NO: 163670 - RNA, 32 nt, Human
gaucacgccacugcacucuagccugggauaca

SEQ ID NO: 163671 - RNA, 32 nt, Human
gaucacgccacugcacucuagccugggcaaca

SEQ ID NO: 163672 - RNA, 32 nt, Human
gaucacgccacugcacucuagccugggcaaua

SEQ ID NO: 163673 - RNA, 32 nt, Human
gaucacgccacugcacuugagccugggcgaca

SEQ ID NO: 163674 - RNA, 32 nt, Human
gaucacgccacugcauuacagccuggugcaga

SEQ ID NO: 163675 - RNA, 32 nt, Human
gaucacgccacugcauuccagacugggcgaca

SEQ ID NO: 163676 - RNA, 32 nt, Human
gaucacgccacugcauuccagccugggcgaca

SEQ ID NO: 163677 - RNA, 32 nt, Human
gaucacgccacugcauuccagccuggugacag

SEQ ID NO: 163678 - RNA, 32 nt, Human
gaucacgccacugcauuccagccugugcgaca

SEQ ID NO: 163679 - RNA, 32 nt, Human
gaucacgccacugcccuccagccuggggagac

SEQ ID NO: 163680 - RNA, 32 nt, Human
gaucacgccacugcgcuacagccugggcgaca

SEQ ID NO: 163681 - RNA, 32 nt, Human
gaucacgccacugcgcuccagccugggcgaaa

SEQ ID NO: 163682 - RNA, 32 nt, Human
gaucacgccacuguacuccagccuggaugaca

SEQ ID NO: 163683 - RNA, 32 nt, Human
gaucacgccacuguacuccagccugggagaca

SEQ ID NO: 163684 - RNA, 24 nt, Human
gaucacgccacuguacuucagccu

SEQ ID NO: 163685 - RNA, 32 nt, Human
gaucacgccacugugcuccagccugggcaaca

SEQ ID NO: 163686 - RNA, 32 nt, Human
gaucacgccagugcacuccagccugagagaca

SEQ ID NO: 163687 - RNA, 32 nt, Human
gaucacgccauuacacuccagccuggcugaca

SEQ ID NO: 163688 - RNA, 32 nt, Human
gaucacgccauuacacuccagccugggcaaca

SEQ ID NO: 163689 - RNA, 32 nt, Human
gaucacgccauugcacuacagccugggugaca

SEQ ID NO: 163690 - RNA, 32 nt, Human
gaucacgccauugcacuccaaccugggugaca

SEQ ID NO: 163691 - RNA, 32 nt, Human
gaucacgccauugcacuccagccuaggcaacg

SEQ ID NO: 163692 - RNA, 32 nt, Human
gaucacgccauugcacuccagccuaggcgaca

SEQ ID NO: 163693 - RNA, 32 nt, Human
gaucacgccauugcacuccagccugggcaaca

SEQ ID NO: 163694 - RNA, 32 nt, Human
gaucacgccauugcacuccagccugggcaacg

SEQ ID NO: 163695 - RNA, 32 nt, Human
gaucacgccauugcacuccagccugggcaaua

SEQ ID NO: 163696 - RNA, 32 nt, Human
gaucacgccauugcacuccagccugggcgaca

SEQ ID NO: 163697 - RNA, 32 nt, Human
gaucacgccauugcacuccagccugggggaca

SEQ ID NO: 163698 - RNA, 32 nt, Human
gaucacgccauugcacuccagccugggugaca

SEQ ID NO: 163699 - RNA, 32 nt, Human
gaucacgccauugcacuccagccugugcgaca

SEQ ID NO: 163700 - RNA, 32 nt, Human
gaucacgccauugcacuccagucugagcaaca

SEQ ID NO: 163701 - RNA, 32 nt, Human
gaucacgccauugcacuccagucugguugaca

SEQ ID NO: 163702 - RNA, 32 nt, Human
gaucacgccauuguacuccagccuggcaacag

SEQ ID NO: 163703 - RNA, 32 nt, Human
gaucacgccauuguacuccagccugggcaaca

SEQ ID NO: 163704 - RNA, 32 nt, Human
gaucacgccauuguacuccagccugggcgaca

SEQ ID NO: 163705 - RNA, 32 nt, Human
gaucacgccgcugcacuccagccugagcacag

SEQ ID NO: 163706 - RNA, 32 nt, Human
gaucacgccguugcacuccagccugggcaaca

SEQ ID NO: 163707 - RNA, 32 nt, Human
gaucacgccucugcacuccagccugggcaaca

SEQ ID NO: 163708 - RNA, 32 nt, Human
gaucacgccuguaaucccagcacauugggagg

SEQ ID NO: 163709 - RNA, 32 nt, Human
gaucacgccuguaaucccagcacuuagggagg

SEQ ID NO: 163710 - RNA, 32 nt, Human
gaucacgccuguaaucccagcgcuuugggagg

SEQ ID NO: 163711 - RNA, 32 nt, Human
gaucacgcuacugcgcuccagccugagugaua

SEQ ID NO: 163712 - RNA, 32 nt, Human
gaucacggcacugcgcugcagccugggcaaca

SEQ ID NO: 163713 - RNA, 21 nt, Human
gaucacggcucacucuagccu

SEQ ID NO: 163714 - RNA, 32 nt, Human
gaucacgucacugcacuccagcuugggcaaca

SEQ ID NO: 163715 - RNA, 32 nt, Human
gaucacgucacugcacuccggccugggugaca

SEQ ID NO: 163716 - RNA, 32 nt, Human
gaucacgucacugcauuccagccuggauaaua

SEQ ID NO: 163717 - RNA, 24 nt, Human
gaucacgucacugcauuucagccu

SEQ ID NO: 163718 - RNA, 32 nt, Human
gaucacgucacuguacuccagccugggugaca

SEQ ID NO: 163719 - RNA, 32 nt, Human
gaucacgucauugcacuccagccuggucaaca

SEQ ID NO: 163720 - RNA, 32 nt, Human
gaucacgucauugcucuccagccugggcaaca

SEQ ID NO: 163721 - RNA, 32 nt, Human
gaucacuacaaccuccaccucccggguucaag

SEQ ID NO: 163722 - RNA, 32 nt, Human
gaucacuaggaggcagagguugcagugagcag

SEQ ID NO: 163723 - RNA, 32 nt, Human
gaucacuccacugcacuccagccugggcaaca

SEQ ID NO: 163724 - RNA, 32 nt, Human
gaucacuccacugcacuccagccugggcgaca

SEQ ID NO: 163725 - RNA, 32 nt, Human
gaucacuccacugcacuccagccugggugaca

SEQ ID NO: 163726 - RNA, 32 nt, Human
gaucacuccagugcacucgagccugggugaca

SEQ ID NO: 163727 - RNA, 32 nt, Human
gaucacucuacagccugccuccuggguuuucc

SEQ ID NO: 163728 - RNA, 32 nt, Human
gaucacugaaguccaagaguucgagaccggcc

SEQ ID NO: 163729 - RNA, 32 nt, Human
gaucacugacccagggcucagagcagaggcca

SEQ ID NO: 163730 - RNA, 32 nt, Human
gaucacugcaaccuccaccucccagguucaag

SEQ ID NO: 163731 - RNA, 32 nt, Human
gaucacugcaaccuccaccuccuagguucaag

SEQ ID NO: 163732 - RNA, 32 nt, Human
gaucacugcaaccuccgccuccuggguucaag

SEQ ID NO: 163733 - RNA, 32 nt, Human
gaucacugcaaccucugccuccuggguucaag

SEQ ID NO: 163734 - RNA, 32 nt, Human
gaucacugcagccucaaacuccugggcucaag

SEQ ID NO: 163735 - RNA, 32 nt, Human
gaucacugcagccuccaacuccugggcucaag

SEQ ID NO: 163736 - RNA, 32 nt, Human
gaucacugcccuuuuugaaaucaccugguauu

SEQ ID NO: 163737 - RNA, 32 nt, Human
gaucacuggaacggagugaccacugagaugcu

SEQ ID NO: 163738 - RNA, 32 nt, Human
gaucacuggagaaagagaaacuauccaccagg

SEQ ID NO: 163739 - RNA, 32 nt, Human
gaucacuggaguucgaggcugcagugagcuau

SEQ ID NO: 163740 - RNA, 32 nt, Human
gaucacuggcacaaaccaccaugcccagcuaa

SEQ ID NO: 163741 - RNA, 32 nt, Human
gaucacugggcugacauggagaaggcuggcaa

SEQ ID NO: 163742 - RNA, 32 nt, Human
gaucacugucugcagucaccaccggcuuggag

SEQ ID NO: 163743 - RNA, 32 nt, Human
gaucacuuaagccugggaggcaauggcugcag

SEQ ID NO: 163744 - RNA, 31 nt, Human
gaucacuugagcccaggaguuggagaccaga

SEQ ID NO: 163745 - RNA, 31 nt, Human
gaucacuugagcccaggaguuggagaccagc

SEQ ID NO: 163746 - RNA, 31 nt, Human
gaucacuugagccugggaguuggagaccagc

SEQ ID NO: 163747 - RNA, 32 nt, Human
gaucacuugagccugggggacugaggcugcag

SEQ ID NO: 163748 - RNA, 32 nt, Human
gaucacuugaggucaggagaccagccgggcca

SEQ ID NO: 163749 - RNA, 31 nt, Human
gaucacuugaguucaggaguuggagaccagg

SEQ ID NO: 163750 - RNA, 32 nt, Human
gaucacuuuagcagguugcagcuuggagcgug

SEQ ID NO: 163751 - RNA, 32 nt, Human
gaucacuuugagaaacaaacuuuuauuaaaug

SEQ ID NO: 163752 - RNA, 32 nt, Human
gaucacuuuggaggcaggguggugggggugua

SEQ ID NO: 163753 - RNA, 32 nt, Human
gaucagaaagcuaccaaacacacugcucagaa

SEQ ID NO: 163754 - RNA, 32 nt, Human
gaucagaacugauuauuugguuuucuguguga

SEQ ID NO: 163755 - RNA, 32 nt, Human
gaucagaagaaagaaagacaacuuuccucugc

SEQ ID NO: 163756 - RNA, 32 nt, Human
gaucagaagcauuucuuuacuaauuuagauuc

SEQ ID NO: 163757 - RNA, 32 nt, Human
gaucagaaggcaagggauaggcaguggucacc

SEQ ID NO: 163758 - RNA, 32 nt, Human
gaucagaaguuugagaccauccuggccaacau

SEQ ID NO: 163759 - RNA, 32 nt, Human
gaucagaaugcaagcuguagguggguggguga

SEQ ID NO: 163760 - RNA, 32 nt, Human
gaucagacacaccugucuucaguggcuugcag

SEQ ID NO: 163761 - RNA, 18 nt, Human
gaucagaccacacccuca

SEQ ID NO: 163762 - RNA, 32 nt, Human
gaucagaccacugcccuccagccugggcaaua

SEQ ID NO: 163763 - RNA, 32 nt, Human
gaucagacucuccuucaggguuuauuuagguu

SEQ ID NO: 163764 - RNA, 32 nt, Human
gaucagacuugaccauucaccuccaguaccug

SEQ ID NO: 163765 - RNA, 32 nt, Human
gaucagacuuuaauuucucugcaucaggugua

SEQ ID NO: 163766 - RNA, 32 nt, Human
gaucagagcaguuacucucagcagaacaccua

SEQ ID NO: 163767 - RNA, 32 nt, Human
gaucagagugggaagaccucagccuugggugg

SEQ ID NO: 163768 - RNA, 32 nt, Human
gaucagaguucaggacucugagugcccacaca

SEQ ID NO: 163769 - RNA, 32 nt, Human
gaucagaucaaauaucuauguaaugaaaagag

SEQ ID NO: 163770 - RNA, 32 nt, Human
gaucagaugguuuuacuauuguggcagaagcg

SEQ ID NO: 163771 - RNA, 32 nt, Human
gaucagauucaucaaaugguacguaguccaau

SEQ ID NO: 163772 - RNA, 32 nt, Human
gaucagauuugcuaacaggaagcauucuuuac

SEQ ID NO: 163773 - RNA, 32 nt, Human
gaucagcaacccuuccugcugcugcuacugcu

SEQ ID NO: 163774 - RNA, 32 nt, Human
gaucagcaccuuguauaggaauucccaugaau

SEQ ID NO: 163775 - RNA, 32 nt, Human
gaucagcacugcacuguuagcugagagugcgg

SEQ ID NO: 163776 - RNA, 32 nt, Human
gaucagcagacugggagguggggagaaguccg

SEQ ID NO: 163777 - RNA, 32 nt, Human
gaucagcagcaucuccaccugccaucucaccc

SEQ ID NO: 163778 - RNA, 32 nt, Human
gaucagcaguuccagccccucgcugcuggggg

SEQ ID NO: 163779 - RNA, 32 nt, Human
gaucagcauggagcuccuuauggagaaagagc

SEQ ID NO: 163780 - RNA, 32 nt, Human
gaucagccauggagcagccacaggaggaagcc

SEQ ID NO: 163781 - RNA, 32 nt, Human
gaucagccccuccugguggccagccuuucccc

SEQ ID NO: 163782 - RNA, 32 nt, Human
gaucagccccuuaaaaugaguucuagagcagg

SEQ ID NO: 163783 - RNA, 32 nt, Human
gaucagccggaagagaaaaugagaccccagag

SEQ ID NO: 163784 - RNA, 32 nt, Human
gaucagcgauaggugaggggacacaguguagg

SEQ ID NO: 163785 - RNA, 32 nt, Human
gaucagcgcagaccugcagucucuccaggugg

SEQ ID NO: 163786 - RNA, 32 nt, Human
gaucagcgugggguggaggagaaguggaguuu

SEQ ID NO: 163787 - RNA, 32 nt, Human
gaucagcucagcggcccagcugcuuaucuguc

SEQ ID NO: 163788 - RNA, 32 nt, Human
gaucagcuccacccucgagcacuuugccagca

SEQ ID NO: 163789 - RNA, 32 nt, Human
gaucagcuggguuuuggccaggaaguugucuu

SEQ ID NO: 163790 - RNA, 32 nt, Human
gaucagcugguuuaaaggucuugauuccuagg

SEQ ID NO: 163791 - RNA, 32 nt, Human
gaucagcuuaccggaagaaaugaagaauuaag

SEQ ID NO: 163792 - RNA, 32 nt, Human
gaucagcuugauacaagaacuacugauuucaa

SEQ ID NO: 163793 - RNA, 32 nt, Human
gaucaggaagagaaggagcagagcagagcuga

SEQ ID NO: 163794 - RNA, 32 nt, Human
gaucaggaaggaugagucugaucuggaguaaa

SEQ ID NO: 163795 - RNA, 32 nt, Human
gaucaggaaugcugggcuggaguucagguccu

SEQ ID NO: 163796 - RNA, 32 nt, Human
gaucaggacaggcagagguggucagggagaag

SEQ ID NO: 163797 - RNA, 32 nt, Human
gaucaggaccaacauggugaaaccccaucucu

SEQ ID NO: 163798 - RNA, 32 nt, Human
gaucaggaccauccacugugcacgguuaaaag

SEQ ID NO: 163799 - RNA, 32 nt, Human
gaucaggagacugagauucagagcagggaggg

SEQ ID NO: 163800 - RNA, 32 nt, Human
gaucaggagaggcuucccugaggacauaaugu

SEQ ID NO: 163801 - RNA, 32 nt, Human
gaucaggagagggagcagaggcagguguuccc

SEQ ID NO: 163802 - RNA, 32 nt, Human
gaucaggaggcugaucccaaaguugucagaug

SEQ ID NO: 163803 - RNA, 32 nt, Human
gaucaggaguuugagaccauccuggccaacau

SEQ ID NO: 163804 - RNA, 32 nt, Human
gaucaggauccagcaggaaccagaggauaauu

SEQ ID NO: 163805 - RNA, 32 nt, Human
gaucaggcaacccucucaccucagccucccaa

SEQ ID NO: 163806 - RNA, 32 nt, Human
gaucaggcacagaaagcugaaggugcuggaga

SEQ ID NO: 163807 - RNA, 32 nt, Human
gaucaggccacugcacuccagccugaacaaca

SEQ ID NO: 163808 - RNA, 32 nt, Human
gaucaggccacugcacuccagccugggcaaca

SEQ ID NO: 163809 - RNA, 32 nt, Human
gaucaggccacugcacuccagccuggguaaca

SEQ ID NO: 163810 - RNA, 32 nt, Human
gaucaggccauugcacuccagccugggcaaua

SEQ ID NO: 163811 - RNA, 24 nt, Human
gaucaggccauugcacuucagccu

SEQ ID NO: 163812 - RNA, 32 nt, Human
gaucaggccauugcacuucagccugggugaca

SEQ ID NO: 163813 - RNA, 32 nt, Human
gaucaggccccucuccugggccugcugugcag

SEQ ID NO: 163814 - RNA, 32 nt, Human
gaucaggcucugccucaccuuggggcuugacu

SEQ ID NO: 163815 - RNA, 32 nt, Human
gaucaggcugucuugggugcacuggacuugga

SEQ ID NO: 163816 - RNA, 32 nt, Human
gaucagggaaaaagaugggaugacagaugggg

SEQ ID NO: 163817 - RNA, 32 nt, Human
gaucagggagagaaggcccuuggucagagugg

SEQ ID NO: 163818 - RNA, 32 nt, Human
gaucagggaggcauagcagugagagccauagg

SEQ ID NO: 163819 - RNA, 22 nt, Human
gaucagggcugaggguaaggaa

SEQ ID NO: 163820 - RNA, 32 nt, Human
gaucaggggaagccucuggccuggaggguaug

SEQ ID NO: 163821 - RNA, 32 nt, Human
gaucaggggugaggcugagagacucuggguuu

SEQ ID NO: 163822 - RNA, 32 nt, Human
gaucaggucacucugccccagugcucucuugc

SEQ ID NO: 163823 - RNA, 32 nt, Human
gaucaggucucugcucuucugcagccucaucu

SEQ ID NO: 163824 - RNA, 32 nt, Human
gaucaggucugcuuuuaguuucauuuuuguuu

SEQ ID NO: 163825 - RNA, 32 nt, Human
gaucaggucuguuccuguuacuguugggucuu

SEQ ID NO: 163826 - RNA, 32 nt, Human
gaucaggugcugguagggcugcaggagacccc

SEQ ID NO: 163827 - RNA, 32 nt, Human
gaucaggugucuggagguugcugagcagcgca

SEQ ID NO: 163828 - RNA, 32 nt, Human
gaucaguaacacaucaaggagucuuguuucuu

SEQ ID NO: 163829 - RNA, 32 nt, Human
gaucaguacugacuuucugauuacuguccagc

SEQ ID NO: 163830 - RNA, 32 nt, Human
gaucaguagucucucuggagagauaaaggaaa

SEQ ID NO: 163831 - RNA, 32 nt, Human
gaucaguauuagggguagagugagguagacac

SEQ ID NO: 163832 - RNA, 32 nt, Human
gaucagucuugcaaauggagaaccugcucucu

SEQ ID NO: 163833 - RNA, 32 nt, Human
gaucagugaaggaagagaaggccagcagauca

SEQ ID NO: 163834 - RNA, 32 nt, Human
gaucagugacacaccucuccccucaaccuuga

SEQ ID NO: 163835 - RNA, 32 nt, Human
gaucagugagccuuuuguagucuuccaggaga

SEQ ID NO: 163836 - RNA, 32 nt, Human
gaucaguggaagucucaggucagucccguggc

SEQ ID NO: 163837 - RNA, 32 nt, Human
gaucaguggagugccuggcaugcugaacccau

SEQ ID NO: 163838 - RNA, 32 nt, Human
gaucaguuccuauauuucuaggaguuugguga

SEQ ID NO: 163839 - RNA, 32 nt, Human
gaucaguuuccugguggccuguaggguggaga

SEQ ID NO: 163840 - RNA, 32 nt, Human
gaucauaaauuuaugugugaucuuugacuuuc

SEQ ID NO: 163841 - RNA, 23 nt, Human
gaucauaacccgcacauucaucu

SEQ ID NO: 163842 - RNA, 25 nt, Human
gaucauaauagcagucuucuugcuu

SEQ ID NO: 163843 - RNA, 32 nt, Human
gaucauaaucacugccuuaccucccucacggu

SEQ ID NO: 163844 - RNA, 32 nt, Human
gaucauaccacggcacuccagccugggugaca

SEQ ID NO: 163845 - RNA, 32 nt, Human
gaucauaccacugcacuccagccuggcgacag

SEQ ID NO: 163846 - RNA, 32 nt, Human
gaugguccuccauuucaacuccagaagugggg

SEQ ID NO: 163847 - RNA, 32 nt, Human
gaugguccucucccaggagcagccccuggaug

SEQ ID NO: 163848 - RNA, 32 nt, Human
gaugguccugccaugaggaggcugcaacgcua

SEQ ID NO: 163849 - RNA, 32 nt, Human
gauggucggaggcagagguguuuccagugauc

SEQ ID NO: 163850 - RNA, 32 nt, Human
gauggucggcggcgccggaugggcagcugagg

SEQ ID NO: 163851 - RNA, 31 nt, Human
gauggucuauaaguugccuguugaggaugug

SEQ ID NO: 163852 - RNA, 32 nt, Human
gauggucuccacccaucuuucuauuuccagua

SEQ ID NO: 163853 - RNA, 32 nt, Human
gauggucuccaucuccugaccucaugauccgc

SEQ ID NO: 163854 - RNA, 32 nt, Human
gauggucuccaucuccugaccucaugaugugc

SEQ ID NO: 163855 - RNA, 32 nt, Human
gauggucuccaucuccugaccuugugauccac

SEQ ID NO: 163856 - RNA, 32 nt, Human
gauggucuccaucucuugaccucaugaucugc

SEQ ID NO: 163857 - RNA, 32 nt, Human
gauggucucugccuaucuccaccuuucugaau

SEQ ID NO: 163858 - RNA, 32 nt, Human
gauggucuuguucugucaaccaggcuagaaug

SEQ ID NO: 163859 - RNA, 32 nt, Human
gauggugaccugccauggaaaaugcugggucc

SEQ ID NO: 163860 - RNA, 32 nt, Human
gauggugacuccugaaaccucuuccuaggcca

SEQ ID NO: 163861 - RNA, 32 nt, Human
gauggugagggagggcuggugaggggcucaga

SEQ ID NO: 163862 - RNA, 32 nt, Human
gauggugagggagggcuggugaggggcugaga

SEQ ID NO: 163863 - RNA, 32 nt, Human
gauggugcaagaggcaggauggucuccagaca

SEQ ID NO: 163864 - RNA, 32 nt, Human
gauggugcagaagcagcaggaggcacuugagg

SEQ ID NO: 163865 - RNA, 32 nt, Human
gauggugccacuacacuccagccuggguaaaa

SEQ ID NO: 163866 - RNA, 23 nt, Human
gauggugccacugcacuccagcc

SEQ ID NO: 163867 - RNA, 32 nt, Human
gauggugccacugcacuccagccuaggugaca

SEQ ID NO: 163868 - RNA, 32 nt, Human
gauggugccacugcacuccagccuggcgacag

SEQ ID NO: 163869 - RNA, 32 nt, Human
gauggugccacugcacuccagccugggcaaca

SEQ ID NO: 163870 - RNA, 32 nt, Human
gauggugccacugcacuccagccugggcgaaa

SEQ ID NO: 163871 - RNA, 32 nt, Human
gauggugccacugcacuccagccugggggaca

SEQ ID NO: 163872 - RNA, 32 nt, Human
gauggugccacugcacuccagccugggugaca

SEQ ID NO: 163873 - RNA, 32 nt, Human
gauggugccacugcacuccagccuggguggca

SEQ ID NO: 163874 - RNA, 32 nt, Human
gauggugccacugcacuccagcuuaggugaca

SEQ ID NO: 163875 - RNA, 32 nt, Human
gauggugccacugcacucuaaccugggcgaca

SEQ ID NO: 163876 - RNA, 32 nt, Human
gauggugccacugcacuucagccugggcaaca

SEQ ID NO: 163877 - RNA, 32 nt, Human
gauggugccacugcauuccagccugggcaaca

SEQ ID NO: 163878 - RNA, 32 nt, Human
gauggugccacugcauuccagccugggugaca

SEQ ID NO: 163879 - RNA, 32 nt, Human
gauggugccacuguacuccagccugggugaua

SEQ ID NO: 163880 - RNA, 32 nt, Human
gauggugccaucgcacucuagccuggggaaua

SEQ ID NO: 163881 - RNA, 32 nt, Human
gauggugccauugcccuccagccugggcaaga

SEQ ID NO: 163882 - RNA, 32 nt, Human
gauggugcccauauaggugagcaucccuuuag

SEQ ID NO: 163883 - RNA, 32 nt, Human
gauggugcccuugagccucccuucaucacuca

SEQ ID NO: 163884 - RNA, 32 nt, Human
gauggugccguugcacuccagccgggcaacaa

SEQ ID NO: 163885 - RNA, 32 nt, Human
gauggugccucaaagcaguaacuuuuugcuua

SEQ ID NO: 163886 - RNA, 32 nt, Human
gauggugccugagaccccugccuuagaaacag

SEQ ID NO: 163887 - RNA, 32 nt, Human
gauggugcuacucuuggucucccacaggaaaa

SEQ ID NO: 163888 - RNA, 32 nt, Human
gauggugcucugagagagggcagaguggaugc

SEQ ID NO: 163889 - RNA, 32 nt, Human
gaugguggaaacaguggggaacuacugcugga

SEQ ID NO: 163890 - RNA, 32 nt, Human
gaugguggaagagauaaaggcuuaggaagggg

SEQ ID NO: 163891 - RNA, 32 nt, Human
gaugguggaggccaauacuuugccaaaccaug

SEQ ID NO: 163892 - RNA, 32 nt, Human
gaugguggagguuucucaaggagcuggagacu

SEQ ID NO: 163893 - RNA, 32 nt, Human
gaugguggcacacaccuguagucccagcuacu

SEQ ID NO: 163894 - RNA, 32 nt, Human
gaugguggcacgaggccuagcacacaaggaau

SEQ ID NO: 163895 - RNA, 32 nt, Human
gaugguggcggaagggcggagcaggggcgggg

SEQ ID NO: 163896 - RNA, 32 nt, Human
gaugguggcucacaccugaaaucccagcacuu

SEQ ID NO: 163897 - RNA, 32 nt, Human
gaugguggcucacaccugugaucccaacauuu

SEQ ID NO: 163898 - RNA, 32 nt, Human
gaugguggcucacgcuuguaaucccaguacuu

SEQ ID NO: 163899 - RNA, 32 nt, Human
gaugguggcucacguccauaaucccaggacuu

SEQ ID NO: 163900 - RNA, 32 nt, Human
gaugguggcucagaccuauaaucccagcacuu

SEQ ID NO: 163901 - RNA, 32 nt, Human
gauggugggcagaucacuugaggucaggaguu

SEQ ID NO: 163902 - RNA, 32 nt, Human
gauggugggcaggaggccggcugcgggggagg

SEQ ID NO: 163903 - RNA, 32 nt, Human
gaugguggggaggggaggauggggaagcuuuu

SEQ ID NO: 163904 - RNA, 31 nt, Human
gaugguggucuucuccccuugccaggccuug

SEQ ID NO: 163905 - RNA, 32 nt, Human
gaugguggugccacuggcagagcugggaaguc

SEQ ID NO: 163906 - RNA, 32 nt, Human
gauggugguucccagagguggugacugagauc

SEQ ID NO: 163907 - RNA, 32 nt, Human
gaugguguagcccacuacacaccuaagcuaug

SEQ ID NO: 163908 - RNA, 32 nt, Human
gaugguguauuagcaugagcagcguggcccug

SEQ ID NO: 163909 - RNA, 32 nt, Human
gauggugucauuuaguaaggauuuuauuaguu

SEQ ID NO: 163910 - RNA, 32 nt, Human
gaugguguccccagcacagccgagagaccuga

SEQ ID NO: 163911 - RNA, 32 nt, Human
gaugguguccccagggcugagcaccaccccac

SEQ ID NO: 163912 - RNA, 32 nt, Human
gauggugucuuccucuccucagccgagaauga

SEQ ID NO: 163913 - RNA, 32 nt, Human
gauggugugaaaagcuugcagaaccagacaga

SEQ ID NO: 163914 - RNA, 32 nt, Human
gaugguguggcuuccucgccccucucuggggu

SEQ ID NO: 163915 - RNA, 32 nt, Human
gauggugugguguccugccugucugccccagc

SEQ ID NO: 163916 - RNA, 32 nt, Human
gaugguguuggggcaugauguguggaggaacu

SEQ ID NO: 163917 - RNA, 32 nt, Human
gaugguguuuaugaagugagccuggacaacaa

SEQ ID NO: 163918 - RNA, 32 nt, Human
gaugguuaaaggcaacuuaugaaggcaaaaca

SEQ ID NO: 163919 - RNA, 32 nt, Human
gaugguuaaaucuaggagguuggguguuuggg

SEQ ID NO: 163920 - RNA, 32 nt, Human
gaugguuacaggucaguacaaccucaguccuu

SEQ ID NO: 163921 - RNA, 32 nt, Human
gaugguuaguacaguuguucugucgucugcag

SEQ ID NO: 163922 - RNA, 32 nt, Human
gaugguuauuuauacguccagaagaacauccc

SEQ ID NO: 163923 - RNA, 32 nt, Human
gaugguucauaucaugaagauguugguuaugg

SEQ ID NO: 163924 - RNA, 32 nt, Human
gaugguucccagcauguguccagugcuucaug

SEQ ID NO: 163925 - RNA, 32 nt, Human
gaugguucuacccuuucugccuucuguuuggg

SEQ ID NO: 163926 - RNA, 32 nt, Human
gaugguucucuccugggcucaggcgcuucucc

SEQ ID NO: 163927 - RNA, 32 nt, Human
gaugguucugggaggcgagggcucaggaacag

SEQ ID NO: 163928 - RNA, 32 nt, Human
gaugguucugggaggugagggcucaggaacag

SEQ ID NO: 163929 - RNA, 32 nt, Human
gaugguucuuaggggacugugaaaguguuggg

SEQ ID NO: 163930 - RNA, 32 nt, Human
gaugguucuucaacuauaaauggagauaaugg

SEQ ID NO: 163931 - RNA, 32 nt, Human
gaugguuggaggcagagcuuggaaaggaagca

SEQ ID NO: 163932 - RNA, 32 nt, Human
gaugguuggggauacuucccaaaacuuuuucc

SEQ ID NO: 163933 - RNA, 32 nt, Human
gaugguuguggggguuucuaggaagcagcugc

SEQ ID NO: 163934 - RNA, 32 nt, Human
gaugguuucaugagucacaagcaagcguuccc

SEQ ID NO: 163935 - RNA, 32 nt, Human
gaugguuucuuagcucuccauuugccaugauu

SEQ ID NO: 163936 - RNA, 32 nt, Human
gaugguuugcauccuuccuccuuugucccaau

SEQ ID NO: 163937 - RNA, 32 nt, Human
gaugguuugcuauuuuucucuccuggggguuu

SEQ ID NO: 163938 - RNA, 32 nt, Human
gaugguuuucccaggcuaaaggaaagucaccu

SEQ ID NO: 163939 - RNA, 32 nt, Human
gauguaaaaagcuuccugaagggguguuuugg

SEQ ID NO: 163940 - RNA, 32 nt, Human
gauguaaaacacaucaaguagaaaauuucuua

SEQ ID NO: 163941 - RNA, 31 nt, Human
gauguaaaacgucuccccugccaaaggaggg

SEQ ID NO: 163942 - RNA, 32 nt, Human
gauguaaaacucaagcaaaggucaguacacaa

SEQ ID NO: 163943 - RNA, 32 nt, Human
gauguaaaagauguggccaucuagccucguaa

SEQ ID NO: 163944 - RNA, 32 nt, Human
gauguaaacagcaagugggggcugaggcagag

SEQ ID NO: 163945 - RNA, 21 nt, Human
gauguaaacuagcuuugugga

SEQ ID NO: 163946 - RNA, 32 nt, Human
gauguaaacugagacucaguucaaacaaucug

SEQ ID NO: 163947 - RNA, 32 nt, Human
gauguaaagaauuuucugcaauaaaagaaacu

SEQ ID NO: 163948 - RNA, 32 nt, Human
gauguaaccaacaaccacagaacuacagaacu

SEQ ID NO: 163949 - RNA, 32 nt, Human
gauguaaccugcuauaguuuacauuuuuaaau

SEQ ID NO: 163950 - RNA, 20 nt, Human
gauguaacucucaaggcugg

SEQ ID NO: 163951 - RNA, 32 nt, Human
gauguaagcgaucugguucccaccucagccuc

SEQ ID NO: 163952 - RNA, 32 nt, Human
gauguaaggccuuagccaugaucugcaggggu

SEQ ID NO: 163953 - RNA, 32 nt, Human
gauguaaguuuaccuauguaacaaaccugcac

SEQ ID NO: 163954 - RNA, 24 nt, Human
gauguaauaaauacauuuuggugu

SEQ ID NO: 163955 - RNA, 23 nt, Human
gauguaauaaauguaauggaugu

SEQ ID NO: 163956 - RNA, 23 nt, Human
gauguaauaaaugucuuuuagug

SEQ ID NO: 163957 - RNA, 32 nt, Human
gauguaaucacuucugaaauuuuugugcccuc

SEQ ID NO: 163958 - RNA, 32 nt, Human
gauguaauccuugccaucguaagcaagcuggu

SEQ ID NO: 163959 - RNA, 32 nt, Human
gauguaaugaguugacaugcaccagaacagau

SEQ ID NO: 163960 - RNA, 23 nt, Human
gauguaaugcacauuauuggcgu

SEQ ID NO: 163961 - RNA, 32 nt, Human
gauguaauguuuucuuuuucuuucucuugcug

SEQ ID NO: 163962 - RNA, 32 nt, Human
gauguacaagacauuuauuacacuuuuuacca

SEQ ID NO: 163963 - RNA, 32 nt, Human
gauguacacacagcauacucccagcuaacggc

SEQ ID NO: 163964 - RNA, 32 nt, Human
gauguacacaugcuccagccccagcucugcau

SEQ ID NO: 163965 - RNA, 32 nt, Human
gauguacagguggguuuuugguguguggaugu

SEQ ID NO: 163966 - RNA, 32 nt, Human
gauguacaugauuuuagaaauuguuaugaaug

SEQ ID NO: 163967 - RNA, 32 nt, Human
gauguaccauguuaaagaggcgucuuguauuu

SEQ ID NO: 163968 - RNA, 32 nt, Human
gauguaccccuaucgauucuuuuaaaguagcu

SEQ ID NO: 163969 - RNA, 32 nt, Human
gauguacccugaggugcccucucacuuccucc

SEQ ID NO: 163970 - RNA, 32 nt, Human
gauguaccucuguuacucucagccuggaaucc

SEQ ID NO: 163971 - RNA, 32 nt, Human
gauguaccugaacaagaggauuuccucacauc

SEQ ID NO: 163972 - RNA, 32 nt, Human
gauguacuaagcugcugacaucauccacugcc

SEQ ID NO: 163973 - RNA, 32 nt, Human
gauguacugaaggccccucucacuuuucacag

SEQ ID NO: 163974 - RNA, 32 nt, Human
gauguagacaaauguuacaaggcugcauguaa

SEQ ID NO: 163975 - RNA, 32 nt, Human
gauguagaggcugaagugagcugucaucaugc

SEQ ID NO: 163976 - RNA, 32 nt, Human
gauguagaggcugcaaugagcuguguucaugc

SEQ ID NO: 163977 - RNA, 32 nt, Human
gauguagcaaacuggacuuuaagaacuggaaa

SEQ ID NO: 163978 - RNA, 32 nt, Human
gauguagcacaauuuccacacugugaaggcag

SEQ ID NO: 163979 - RNA, 32 nt, Human
gauguagcaguggaugauauuuccuuccaaga

SEQ ID NO: 163980 - RNA, 32 nt, Human
gauguagccuccaggcacuucugcucucuggc

SEQ ID NO: 163981 - RNA, 32 nt, Human
gauguagcucauucucuuuucuaccucuaugg

SEQ ID NO: 163982 - RNA, 32 nt, Human
gauguagcugggauugaguccauguuaucggc

SEQ ID NO: 163983 - RNA, 32 nt, Human
gauguaggaggacauuacaaaguuaccugcaa

SEQ ID NO: 163984 - RNA, 32 nt, Human
gauguaggccugaccuccagagcccagcguuc

SEQ ID NO: 163985 - RNA, 32 nt, Human
gauguaggggcuuggagguguucuggacagug

SEQ ID NO: 163986 - RNA, 32 nt, Human
gauguaguaaauuaaauagaagaaauauauuu

SEQ ID NO: 163987 - RNA, 32 nt, Human
gauguagugccacccaccuccugagcuguuuu

SEQ ID NO: 163988 - RNA, 32 nt, Human
gauguauccaacaagccagaaucagcacagau

SEQ ID NO: 163989 - RNA, 32 nt, Human
gauguaucuaauucuccugacuguucuuccca

SEQ ID NO: 163990 - RNA, 32 nt, Human
gauguaucucggcacagcaucuuggacacuca

SEQ ID NO: 163991 - RNA, 32 nt, Human
gauguaucuggggagagaaugagcuggaggag

SEQ ID NO: 163992 - RNA, 32 nt, Human
gauguaugaaggaguuggaguuguugaaacca

SEQ ID NO: 163993 - RNA, 32 nt, Human
gauguaugaggauuugaaauuaagagacaaaa

SEQ ID NO: 163994 - RNA, 32 nt, Human
gauguauggcaaugaguggcccaugggaaaca

SEQ ID NO: 163995 - RNA, 30 nt, Human
gauguauguuuggaaagaugugugaauacu

SEQ ID NO: 163996 - RNA, 31 nt, Human
gauguauguuuggaaagaugugugaauacuu

SEQ ID NO: 163997 - RNA, 26 nt, Human
gauguauucguccccgcucugccuca

SEQ ID NO: 163998 - RNA, 26 nt, Human
gauguauucuuuacaugguggaggac

SEQ ID NO: 163999 - RNA, 32 nt, Human
gauguauugugccguggaaguacuguguguga

SEQ ID NO: 164000 - RNA, 32 nt, Human
gauguauuuaauuuuacuaugcuccaacauua

SEQ ID NO: 164001 - RNA, 32 nt, Human
gaugucaaaggugugcagcuuccaaauggcau

SEQ ID NO: 164002 - RNA, 22 nt, Human
gaugucaacgcugccauugcug

SEQ ID NO: 164003 - RNA, 32 nt, Human
gaugucaaugcaaguaucugaccaacaggggg

SEQ ID NO: 164004 - RNA, 32 nt, Human
gaugucacagccggauaguacgcuuccuaggc

SEQ ID NO: 164005 - RNA, 32 nt, Human
gaugucacagcuugaggcuguggugugaaagg

SEQ ID NO: 164006 - RNA, 32 nt, Human
gaugucaccacccuuugccacuguccuugcag

SEQ ID NO: 164007 - RNA, 32 nt, Human
gaugucaccacugcccuccagccugggugaca

SEQ ID NO: 164008 - RNA, 32 nt, Human
gaugucacccaugucagcugacuuuaaguaaa

SEQ ID NO: 164009 - RNA, 32 nt, Human
gaugucacguauuuugaaaugauagaacuaca

SEQ ID NO: 164010 - RNA, 21 nt, Human
gaugucacucugagugugggu

SEQ ID NO: 164011 - RNA, 32 nt, Human
gaugucacuuucucccccucugccuuuuagug

SEQ ID NO: 164012 - RNA, 32 nt, Human
gaugucagacuggcuggcugcagugacgugca

SEQ ID NO: 164013 - RNA, 32 nt, Human
gaugucagagcuaccagugugcugcugggaga

SEQ ID NO: 164014 - RNA, 32 nt, Human
gaugucagcacagcagugucagcagcuucguc

SEQ ID NO: 164015 - RNA, 32 nt, Human
gaugucagccgaggugacagugaagauaucaa

SEQ ID NO: 164016 - RNA, 32 nt, Human
gaugucaggagaucgaaaucagccuggccaag

SEQ ID NO: 164017 - RNA, 32 nt, Human
gaugucaggaguuugagaccagccuggccaac

SEQ ID NO: 164018 - RNA, 32 nt, Human
gaugucaggauaaaaauauacacaccauuggg

SEQ ID NO: 164019 - RNA, 32 nt, Human
gaugucaggccagggccauggccacacuggcc

SEQ ID NO: 164020 - RNA, 32 nt, Human
gaugucaggccuggaccuccugggcaggaaag

SEQ ID NO: 164021 - RNA, 32 nt, Human
gaugucagggacaggcuugaagauuccugaug

SEQ ID NO: 164022 - RNA, 32 nt, Human
gaugucagggguuugagaccagccuggucaac

SEQ ID NO: 164023 - RNA, 32 nt, Human
gaugucaguacugcagagaguaugaauggagg

SEQ ID NO: 164024 - RNA, 32 nt, Human
gaugucagugccuguacauaccuccaaaggca

SEQ ID NO: 164025 - RNA, 32 nt, Human
gaugucaucauucaggggcagccuggggacuu

SEQ ID NO: 164026 - RNA, 32 nt, Human
gaugucauccagggucacgggaggcuucugag

SEQ ID NO: 164027 - RNA, 32 nt, Human
gaugucaucccauugucuucugaccucuauaa

SEQ ID NO: 164028 - RNA, 32 nt, Human
gaugucaucccccgaccccacccuguuuucca

SEQ ID NO: 164029 - RNA, 22 nt, Human
gaugucaucuagagcagugggu

SEQ ID NO: 164030 - RNA, 21 nt, Human
gaugucaucucuggucagagu

SEQ ID NO: 164031 - RNA, 23 nt, Human
gaugucaugaggaaacuacugaa

SEQ ID NO: 164032 - RNA, 32 nt, Human
gaugucauugaggaggaaaggcgguugggcag

SEQ ID NO: 164033 - RNA, 32 nt, Human
gauguccaaaagcaccagaaggagggugucuu

SEQ ID NO: 164034 - RNA, 32 nt, Human
gauguccaagggcaggaagcauccagaacaga

SEQ ID NO: 164035 - RNA, 32 nt, Human
gauguccagcccaggcccaggugcaggugccc

SEQ ID NO: 164036 - RNA, 32 nt, Human
gauguccauaguuccuucccccuagauuguuu

SEQ ID NO: 164037 - RNA, 32 nt, Human
gauguccaugaagagguuugccgucugggcag

SEQ ID NO: 164038 - RNA, 32 nt, Human
gauguccaugagguucugccacaugcccuuga

SEQ ID NO: 164039 - RNA, 32 nt, Human
gauguccaugauccagguggcucugagaagcu

SEQ ID NO: 164040 - RNA, 32 nt, Human
gaugucccaucuuaccaugugcaauuuguccu

SEQ ID NO: 164041 - RNA, 32 nt, Human
gauguccccagaagcugcugugccucacagcg

SEQ ID NO: 164042 - RNA, 26 nt, Human
gauguccccuuccaucucugacccuu

SEQ ID NO: 164043 - RNA, 32 nt, Human
gaugucccgaccguugccacguauagggcacu

SEQ ID NO: 164044 - RNA, 32 nt, Human
gaugucccucccccuaccuguaaccuuucuuu

SEQ ID NO: 164045 - RNA, 32 nt, Human
gaugucccugcagggagcagaguuuggccagg

SEQ ID NO: 164046 - RNA, 32 nt, Human
gaugucccuggaacaggaacucgccugacccu

SEQ ID NO: 164047 - RNA, 32 nt, Human
gaugucccuguagagcagccccagggaagggg

SEQ ID NO: 164048 - RNA, 32 nt, Human
gaugucccuucaccccuccccuuucaccacca

SEQ ID NO: 164049 - RNA, 32 nt, Human
gauguccuauaauaaaggggcuucugggaggu

SEQ ID NO: 164050 - RNA, 32 nt, Human
gauguccugaugcucaauggguagaugccuuc

SEQ ID NO: 164051 - RNA, 32 nt, Human
gauguccugcagccccucagcccuacccccaa

SEQ ID NO: 164052 - RNA, 32 nt, Human
gauguccuggggacagggaguccuugggacug

SEQ ID NO: 164053 - RNA, 32 nt, Human
gauguccuguuuucaccagaggcacagcgcga

SEQ ID NO: 164054 - RNA, 32 nt, Human
gaugucgcugggacucggaagugccgaaagag

SEQ ID NO: 164055 - RNA, 32 nt, Human
gaugucggcaggcauagagaaaggaguaagaa

SEQ ID NO: 164056 - RNA, 32 nt, Human
gaugucgguccaugagcgcacacacaagacug

SEQ ID NO: 164057 - RNA, 32 nt, Human
gaugucuagagaugaacuagaaauaagggguc

SEQ ID NO: 164058 - RNA, 31 nt, Human
gaugucucaucuucuuuauauguuaagcagc

SEQ ID NO: 164059 - RNA, 32 nt, Human
gaugucuccacgcacagcuauggcaguaccug

SEQ ID NO: 164060 - RNA, 32 nt, Human
gaugucuccauccuugaucuucaucaacaauu

SEQ ID NO: 164061 - RNA, 32 nt, Human
gaugucucccaggacaagccagucugccucuu

SEQ ID NO: 164062 - RNA, 32 nt, Human
gaugucucuacucaaacugugccugcaggagg

SEQ ID NO: 164063 - RNA, 32 nt, Human
gaugucucugugugccaaacagccuggaaaug

SEQ ID NO: 164064 - RNA, 26 nt, Human
gaugucucuuucuaagaaguugacuu

SEQ ID NO: 164065 - RNA, 32 nt, Human
gaugucugagcacggacucucccaggccugcc

SEQ ID NO: 164066 - RNA, 32 nt, Human
gaugucugagccacucagaacucaccaaaaug

SEQ ID NO: 164067 - RNA, 32 nt, Human
gaugucugcaaggagcuuagcacaugguaggc

SEQ ID NO: 164068 - RNA, 32 nt, Human
gaugucugcacuccuggcugcagcuggacaac

SEQ ID NO: 164069 - RNA, 21 nt, Human
gaugucugccaaacccagguu

SEQ ID NO: 164070 - RNA, 32 nt, Human
gaugucugccaaggaugggggugcagaggcca

SEQ ID NO: 164071 - RNA, 17 nt, Human
gaugucugccuccaguu

SEQ ID NO: 164072 - RNA, 32 nt, Human
gaugucugccuggucccuucucacugugagga

SEQ ID NO: 164073 - RNA, 21 nt, Human
gaugucuggcugcaccuggca

SEQ ID NO: 164074 - RNA, 32 nt, Human
gaugucugugcugcugucaccaggcaccuuug

SEQ ID NO: 164075 - RNA, 32 nt, Human
gaugucuguggacagugcagcugggggcuuua

SEQ ID NO: 164076 - RNA, 32 nt, Human
gaugucuguugugaaauauuccaguauaacaa

SEQ ID NO: 164077 - RNA, 32 nt, Human
gaugucuguuucccagggcucagaccuaaucc

SEQ ID NO: 164078 - RNA, 32 nt, Human
gaugucuucacugagggcuauggauuuggcuu

SEQ ID NO: 164079 - RNA, 32 nt, Human
gaugucuucugcagguugcagauccugaccau

SEQ ID NO: 164080 - RNA, 32 nt, Human
gaugucuugagaguauuacagguagacuuggu

SEQ ID NO: 164081 - RNA, 32 nt, Human
gaugucuugagcucugcaaagaucagagcagg

SEQ ID NO: 164082 - RNA, 31 nt, Human
gaugucuuguuuccugagccugugucaaauu

SEQ ID NO: 164083 - RNA, 22 nt, Human
gaugucuuuacacugacuucag

SEQ ID NO: 164084 - RNA, 23 nt, Human
gaugucuuucaaacuagcuucag

SEQ ID NO: 164085 - RNA, 32 nt, Human
gaugucuuuccuuauguugcuuuuucaacaua

SEQ ID NO: 164086 - RNA, 24 nt, Human
gaugugaaaauugaggcucagaga

SEQ ID NO: 164087 - RNA, 32 nt, Human
gaugugaaaccagagaugcccgccaaccugga

SEQ ID NO: 164088 - RNA, 32 nt, Human
gaugugaaagugguggagggcaauggaaggga

SEQ ID NO: 164089 - RNA, 32 nt, Human
gaugugaagggggacaagucacucggcaucag

SEQ ID NO: 164090 - RNA, 32 nt, Human
gaugugaauagggacauaggcacagauaguua

SEQ ID NO: 164091 - RNA, 31 nt, Human
gaugugaaucucucuggggugugucucagag

SEQ ID NO: 164092 - RNA, 32 nt, Human
gaugugaauuccugccuguuccauggaggggu

SEQ ID NO: 164093 - RNA, 32 nt, Human
gaugugacacauacuauaaaaauuaugucacc

SEQ ID NO: 164094 - RNA, 32 nt, Human
gaugugacaugguucuuggauuuccucuguag

SEQ ID NO: 164095 - RNA, 32 nt, Human
gaugugaccagccacgccuaccagguggcaga

SEQ ID NO: 164096 - RNA, 32 nt, Human
gaugugacugauuuuaacaaauccuauuagau

SEQ ID NO: 164097 - RNA, 32 nt, Human
gaugugagaaaacuuugugaccagguugucac

SEQ ID NO: 164098 - RNA, 32 nt, Human
gaugugagagugaaauggacguaagauuuuau

SEQ ID NO: 164099 - RNA, 32 nt, Human
gaugugagccaccacacacaccaucugauuaa

SEQ ID NO: 164100 - RNA, 32 nt, Human
gaugugaggaggaggaggaagaaaaugagagu

SEQ ID NO: 164101 - RNA, 32 nt, Human
gaugugaggccagacagcuccuugguggccgc

SEQ ID NO: 164102 - RNA, 32 nt, Human
gaugugaggcgcucagccagggccaaggggag

SEQ ID NO: 164103 - RNA, 32 nt, Human
gaugugauaacaccaaggcagggaccuucuga

SEQ ID NO: 164104 - RNA, 32 nt, Human
gaugugauaggagcagcuuaacaggcagggag

SEQ ID NO: 164105 - RNA, 32 nt, Human
gaugugauauguuauggaugugauguguuagu

SEQ ID NO: 164106 - RNA, 32 nt, Human
gaugugaugggagcagcuuaacaggcagggag

SEQ ID NO: 164107 - RNA, 32 nt, Human
gaugugcaaagucacagaauguaauggaaguc

SEQ ID NO: 164108 - RNA, 32 nt, Human
gaugugcaaccagcaucucugucuaguuccaa

SEQ ID NO: 164109 - RNA, 32 nt, Human
gaugugcaccaccacacuggcucauuguuuuc

SEQ ID NO: 164110 - RNA, 32 nt, Human
gaugugcagcagcaaauugcucuggcuccggg

SEQ ID NO: 164111 - RNA, 15 nt, Human
gaugugcagcagcuu

SEQ ID NO: 164112 - RNA, 32 nt, Human
gaugugcagggcuuccucucagagccgcccaa

SEQ ID NO: 164113 - RNA, 32 nt, Human
gaugugcaguucuacacagaagugggagagac

SEQ ID NO: 164114 - RNA, 32 nt, Human
gaugugcauccuagggaagauaaaaucguaua

SEQ ID NO: 164115 - RNA, 32 nt, Human
gaugugccaaggcuggagcgugaacuggcucu

SEQ ID NO: 164116 - RNA, 32 nt, Human
gaugugccagaugugggcaacauggugucaga

SEQ ID NO: 164117 - RNA, 32 nt, Human
gaugugccaggaaggugacgcacuccagcuuu

SEQ ID NO: 164118 - RNA, 32 nt, Human
gaugugcccagccugugcccgccaugccgccc

SEQ ID NO: 164119 - RNA, 32 nt, Human
gaugugccgaugauggggcugacaguaugggc

SEQ ID NO: 164120 - RNA, 32 nt, Human
gaugugcgcacacacagauaugcacacacaug

SEQ ID NO: 164121 - RNA, 31 nt, Human
gaugugcgcgugucucccugccaguuaccca

SEQ ID NO: 164122 - RNA, 29 nt, Human
gaugugcguauguguguguaugccuggag

SEQ ID NO: 164123 - RNA, 32 nt, Human
gaugugcuccagcuuuccagugacaugugacg

SEQ ID NO: 164124 - RNA, 32 nt, Human
gaugugcuccuuggagcuggugugcagugucc

SEQ ID NO: 164125 - RNA, 32 nt, Human
gaugugcucuguaugcagaacacacuuggcag

SEQ ID NO: 164126 - RNA, 32 nt, Human
gaugugcuggagcuacacgacuggaugugcac

SEQ ID NO: 164127 - RNA, 32 nt, Human
gauguggaaaucaagccugucuuccagugggg

SEQ ID NO: 164128 - RNA, 32 nt, Human
gauguggaagccagacccacagaggcacuuag

SEQ ID NO: 164129 - RNA, 32 nt, Human
gauguggaaggaggggaagcacugugaccucc

SEQ ID NO: 164130 - RNA, 32 nt, Human
gauguggaaggaggggaaggcacugggccgag

SEQ ID NO: 164131 - RNA, 32 nt, Human
gauguggaaggcaccuucuagaagagagcgug

SEQ ID NO: 164132 - RNA, 32 nt, Human
gauguggacaagaacuuagaccugccaaaugg

SEQ ID NO: 164133 - RNA, 32 nt, Human
gauguggacaugcacccgcauguacaaaaaca

SEQ ID NO: 164134 - RNA, 32 nt, Human
gauguggaggaauacacauacacacacaaaca

SEQ ID NO: 164135 - RNA, 32 nt, Human
gauguggaggcccagggaauagacccucaaga

SEQ ID NO: 164136 - RNA, 20 nt, Human
gauguggagggcguagggug

SEQ ID NO: 164137 - RNA, 32 nt, Human
gauguggaggggcggggcagagggguccagcc

SEQ ID NO: 164138 - RNA, 32 nt, Human
gauguggaguuccuacaugcagugaguggaaa

SEQ ID NO: 164139 - RNA, 32 nt, Human
gauguggauaccuuucggagcuauuauuuagu

SEQ ID NO: 164140 - RNA, 32 nt, Human
gauguggaugaaagcugauccaacugucgcca

SEQ ID NO: 164141 - RNA, 32 nt, Human
gauguggcaggcaggggagacucacagaaaaa

SEQ ID NO: 164142 - RNA, 32 nt, Human
gauguggccauccugucaccagguaguuuuuc

SEQ ID NO: 164143 - RNA, 32 nt, Human
gauguggccuuggccagcagggcucagaacaa

SEQ ID NO: 164144 - RNA, 32 nt, Human
gauguggcugcagcagcgguggccucuuuuca

SEQ ID NO: 164145 - RNA, 32 nt, Human
gauguggcugggacacaaucaaaggaggaauu

SEQ ID NO: 164146 - RNA, 32 nt, Human
gaugugggcacgccucagagccagaaguuuau

SEQ ID NO: 164147 - RNA, 32 nt, Human
gaugugggcagagcaccagccugggcaucagg

SEQ ID NO: 164148 - RNA, 32 nt, Human
gaugugggccuuagccuccagguccagacuac

SEQ ID NO: 164149 - RNA, 32 nt, Human
gauguggggaauggaccuugugaggucacggu

SEQ ID NO: 164150 - RNA, 32 nt, Human
gauguggggaucugguaaauuucaguuucuug

SEQ ID NO: 164151 - RNA, 32 nt, Human
gauguggggccugggacuucuccagaagcuua

SEQ ID NO: 164152 - RNA, 32 nt, Human
gauguggggcugggaguccucuccccauccua

SEQ ID NO: 164153 - RNA, 32 nt, Human
gaugugggggaaaaguaacaucaacacugucc

SEQ ID NO: 164154 - RNA, 32 nt, Human
gaugugggguggggcuggcauccucccaggaa

SEQ ID NO: 164155 - RNA, 32 nt, Human
gauguggggugggggugagaaaaugcuucugc

SEQ ID NO: 164156 - RNA, 22 nt, Human
gauguggguggaucacaagguc

SEQ ID NO: 164157 - RNA, 32 nt, Human
gaugugguagggagugcuuagcagaaugugug

SEQ ID NO: 164158 - RNA, 32 nt, Human
gauguggucaccaagaucuaaguuacuuguug

SEQ ID NO: 164159 - RNA, 32 nt, Human
gaugugguggagcugggcugggaccuccgggc

SEQ ID NO: 164160 - RNA, 32 nt, Human
gaugugguggccgaguccaggcacaggcuggu

SEQ ID NO: 164161 - RNA, 32 nt, Human
gauguggugggaugauccgcaccaucuucacu

SEQ ID NO: 164162 - RNA, 32 nt, Human
gaugugguggugcuggaggugagcagcucgcu

SEQ ID NO: 164163 - RNA, 32 nt, Human
gauguggugguguuugccugcgguccuagcua

SEQ ID NO: 164164 - RNA, 32 nt, Human
gaugugguuuacaauagugugacaacgaugaa

SEQ ID NO: 164165 - RNA, 32 nt, Human
gaugugguuuccagccuggugccuggggugcu

SEQ ID NO: 164166 - RNA, 32 nt, Human
gaugugguuucugccuucuagagagagaucag

SEQ ID NO: 164167 - RNA, 32 nt, Human
gauguguaaagcacaggaaaccaggcagagga

SEQ ID NO: 164168 - RNA, 32 nt, Human
gauguguaacaaguugauuuggaacacuggac

SEQ ID NO: 164169 - RNA, 32 nt, Human
gauguguaaggagaaugagaggaaugaguuaa

SEQ ID NO: 164170 - RNA, 32 nt, Human
gauguguaccugcuuaguuaauuggcucagaa

SEQ ID NO: 164171 - RNA, 32 nt, Human
gauguguacugagggggcuggaggcgaagggu

SEQ ID NO: 164172 - RNA, 32 nt, Human
gauguguagagagagaaaggaagggaaggaag

SEQ ID NO: 164173 - RNA, 32 nt, Human
gauguguaguuggugacugccucuccagaugc

SEQ ID NO: 164174 - RNA, 18 nt, Human
gauguguauggcaacaca

SEQ ID NO: 164175 - RNA, 32 nt, Human
gaugugucaguuacaccuuauccacauagccu

SEQ ID NO: 164176 - RNA, 32 nt, Human
gaugugucauuggucaugauauuugaaaaggg

SEQ ID NO: 164177 - RNA, 32 nt, Human
gauguguccaagucuguaucacuucuggccau

SEQ ID NO: 164178 - RNA, 32 nt, Human
gauguguccccauccacacaucauggagcaga

SEQ ID NO: 164179 - RNA, 32 nt, Human
gaugugucggcucagcagccuccaacuucucc

SEQ ID NO: 164180 - RNA, 32 nt, Human
gaugugucuauggugcggcaucuugcuguugu

SEQ ID NO: 164181 - RNA, 32 nt, Human
gaugugucuauggugcugcaucuugcuguugu

SEQ ID NO: 164182 - RNA, 32 nt, Human
gaugugucuguauucugggguuggucauuugg

SEQ ID NO: 164183 - RNA, 32 nt, Human
gaugugugcaauaucacccacacucucagagg

SEQ ID NO: 164184 - RNA, 32 nt, Human
gaugugugcaccacuccagugggaacugaagc

SEQ ID NO: 164185 - RNA, 32 nt, Human
gaugugugcauaaaugaugucacugcagugau

SEQ ID NO: 164186 - RNA, 32 nt, Human
gaugugugcauauuuagcaucccuggaaauca

SEQ ID NO: 164187 - RNA, 32 nt, Human
gaugugugccuguaaucccaccuacuugggag

SEQ ID NO: 164188 - RNA, 32 nt, Human
gaugugugcuagagugugggacccuggccaag

SEQ ID NO: 164189 - RNA, 32 nt, Human
gaugugugcuccuggagggaaaaagaaauaca

SEQ ID NO: 164190 - RNA, 32 nt, Human
gauguguguguaugccuauuuaauauguacac

SEQ ID NO: 164191 - RNA, 32 nt, Human
gauguguuggccacagggagaggcggaccggc

SEQ ID NO: 164192 - RNA, 32 nt, Human
gauguguuugggcccuaccuggcacagagucc

SEQ ID NO: 164193 - RNA, 32 nt, Human
gauguguuuuuccauguugcccaagcuggucu

SEQ ID NO: 164194 - RNA, 32 nt, Human
gauguuaagucaaaucacuaaaacaggguucu

SEQ ID NO: 164195 - RNA, 32 nt, Human
gauguuacagaggccacacagggccacuuuuu

SEQ ID NO: 164196 - RNA, 18 nt, Human
gauguuagagacaaacac

SEQ ID NO: 164197 - RNA, 32 nt, Human
gauguuauagaauuauuuuugagcaggagcag

SEQ ID NO: 164198 - RNA, 32 nt, Human
gauguuauagauguugcugggauccugcccuc

SEQ ID NO: 164199 - RNA, 32 nt, Human
gauguuaucugugacagucaccagcuuuaagc

SEQ ID NO: 164200 - RNA, 32 nt, Human
gauguuauguacccacuguggggccaggcugg

SEQ ID NO: 164201 - RNA, 20 nt, Human
gauguucaaauauuguaaaa

SEQ ID NO: 164202 - RNA, 32 nt, Human
gauguucaacaucacuaauaacuagaagaaau

SEQ ID NO: 164203 - RNA, 32 nt, Human
gauguucaacaucaguuuacuugcagcuggaa

SEQ ID NO: 164204 - RNA, 32 nt, Human
gauguucaggcauagguuguuuacaggugaau

SEQ ID NO: 164205 - RNA, 32 nt, Human
gauguucaguucucuuggccccucucuacccc

SEQ ID NO: 164206 - RNA, 32 nt, Human
gauguucauauuguguaaaauaacucauuuaa

SEQ ID NO: 164207 - RNA, 23 nt, Human
gauguucaugguacauuguaaaa

SEQ ID NO: 164208 - RNA, 32 nt, Human
gauguucaugucuaucucaaccaggaccagac

SEQ ID NO: 164209 - RNA, 32 nt, Human
gauguuccaaaaacccaaguagucagucccuu

SEQ ID NO: 164210 - RNA, 32 nt, Human
gauguucccucuuuccuucaagugccuguugc

SEQ ID NO: 164211 - RNA, 32 nt, Human
gauguuccucagagaagugaggugggaaauau

SEQ ID NO: 164212 - RNA, 32 nt, Human
gauguuccucuggccuucuugccuggggcugc

SEQ ID NO: 164213 - RNA, 32 nt, Human
gauguucucguguugcuucuccacuuugagag

SEQ ID NO: 164214 - RNA, 32 nt, Human
gauguucucuaauccucccucuccuuaccacg

SEQ ID NO: 164215 - RNA, 32 nt, Human
gauguucucugcgcucccaggccggcaucgag

SEQ ID NO: 164216 - RNA, 32 nt, Human
gauguucugcccaccagcaccagaggucacuc

SEQ ID NO: 164217 - RNA, 32 nt, Human
gauguucugggaaaccccaaggaagcuaaagu

SEQ ID NO: 164218 - RNA, 32 nt, Human
gauguucuguaucuauguaaacaugauuccuu

SEQ ID NO: 164219 - RNA, 32 nt, Human
gauguucuuaguuaacucugggaaagauguua

SEQ ID NO: 164220 - RNA, 32 nt, Human
gauguucuugugggcauguuauucuuggugcu

SEQ ID NO: 164221 - RNA, 32 nt, Human
gauguugaaacugcuugagcaucaggauacuc

SEQ ID NO: 164222 - RNA, 32 nt, Human
gauguugaaagggagaggcagaguuccagaua

SEQ ID NO: 164223 - RNA, 32 nt, Human
gauguugacagacagacagaggggcggaugca

SEQ ID NO: 164224 - RNA, 32 nt, Human
gauguugagauggcugcccugcauuuccagcu

SEQ ID NO: 164225 - RNA, 32 nt, Human
gauguugagggaacagacaggagaaaugcauc

SEQ ID NO: 164226 - RNA, 32 nt, Human
gauguugaucagcuccaccagagggagcucug

SEQ ID NO: 164227 - RNA, 32 nt, Human
gauguugaucugugcuuccuggauuugacuuu

SEQ ID NO: 164228 - RNA, 32 nt, Human
gauguugcaccagaagagagugcaguguugga

SEQ ID NO: 164229 - RNA, 32 nt, Human
gauguugcagccugcagcaagugcuuccgucu

SEQ ID NO: 164230 - RNA, 32 nt, Human
gauguugcagugagcugagaccaugccauugg

SEQ ID NO: 164231 - RNA, 32 nt, Human
gauguugcagugagcugagauugugccacugu

SEQ ID NO: 164232 - RNA, 32 nt, Human
gauguugccacuuugcugaagauguuucuagg

SEQ ID NO: 164233 - RNA, 32 nt, Human
gauguugcgaaaccugucucucugccucucuu

SEQ ID NO: 164234 - RNA, 32 nt, Human
gauguugcggugagccgaaaucgcgccacugc

SEQ ID NO: 164235 - RNA, 22 nt, Human
gauguugcguuccggugugggu

SEQ ID NO: 164236 - RNA, 32 nt, Human
gauguugcugggugguugagugagugaauuuu

SEQ ID NO: 164237 - RNA, 32 nt, Human
gauguugcuugcacuccagccugggugacaga

SEQ ID NO: 164238 - RNA, 32 nt, Human
gauguuggaagacauucuggaagggguggggu

SEQ ID NO: 164239 - RNA, 32 nt, Human
gauguuggacaacuggaaggaggacucaggua

SEQ ID NO: 164240 - RNA, 32 nt, Human
gauguuggacucccauugaagaggguaaacug

SEQ ID NO: 164241 - RNA, 32 nt, Human
gauguuggagaauucuucuaauuuucagaacu

SEQ ID NO: 164242 - RNA, 32 nt, Human
gauguuggauaccuagggagaaugagauuuga

SEQ ID NO: 164243 - RNA, 32 nt, Human
gauguuggaugccauggaaugccauauccucc

SEQ ID NO: 164244 - RNA, 32 nt, Human
gauguuggcuguaggugucucuuagauguuua

SEQ ID NO: 164245 - RNA, 32 nt, Human
gauguugggaacacagugggcaaacucacaaa

SEQ ID NO: 164246 - RNA, 31 nt, Human
gauguugguaggguagaaaaagagggaguca

SEQ ID NO: 164247 - RNA, 32 nt, Human
gauguugguguuuugugauuuggugaacagaa

SEQ ID NO: 164248 - RNA, 32 nt, Human
gauguuguaagccugcacuacagcagccccag

SEQ ID NO: 164249 - RNA, 32 nt, Human
gauguuguacauaccuacaaguaccauuuuug

SEQ ID NO: 164250 - RNA, 32 nt, Human
gauguuguacccuuucuccuugaucccacucu

SEQ ID NO: 164251 - RNA, 32 nt, Human
gauguuguccguggccagcucuccccagggag

SEQ ID NO: 164252 - RNA, 32 nt, Human
gauguugugaagauaaugagauggugugugua

SEQ ID NO: 164253 - RNA, 32 nt, Human
gauguugugaggacauguggaagcacuuuaag

SEQ ID NO: 164254 - RNA, 32 nt, Human
gauguugugauggagggcuggaggagcagcga

SEQ ID NO: 164255 - RNA, 18 nt, Human
gauguugugcugggagug

SEQ ID NO: 164256 - RNA, 32 nt, Human
gauguuguggugagccgagaucaagccauugc

SEQ ID NO: 164257 - RNA, 32 nt, Human
gauguuguuaucucccuccuggccuuuguagc

SEQ ID NO: 164258 - RNA, 32 nt, Human
gauguuguucucuacugccuccagaaagacag

SEQ ID NO: 164259 - RNA, 32 nt, Human
gauguuguuugaucuucucaaacaucuaguuc

SEQ ID NO: 164260 - RNA, 32 nt, Human
gauguuuagcaguggcuggugcccaugaagag

SEQ ID NO: 164261 - RNA, 32 nt, Human
gauguuucagcagccccugagaaggaagagga

SEQ ID NO: 164262 - RNA, 32 nt, Human
gauguuucaggagguuugggggacuugguuuu

SEQ ID NO: 164263 - RNA, 32 nt, Human
gauguuucagucagugacagaccucauauaug

SEQ ID NO: 164264 - RNA, 32 nt, Human
gauguuuccaauaaagauuuacuuggguggcc

SEQ ID NO: 164265 - RNA, 32 nt, Human
gauguuuccagauuacacuccagccugaguca

SEQ ID NO: 164266 - RNA, 32 nt, Human
gauguuuccucuuccucccuuaugucuaccuc

SEQ ID NO: 164267 - RNA, 32 nt, Human
gauguuucucuagcccccuuagcuagagcgag

SEQ ID NO: 164268 - RNA, 32 nt, Human
gauguuucuggucacagugaaaagccaugcua

SEQ ID NO: 164269 - RNA, 32 nt, Human
gauguuucugucagcaaggacauggcauggaa

SEQ ID NO: 164270 - RNA, 32 nt, Human
gauguuucuucucuuuuacaaguaagaccuac

SEQ ID NO: 164271 - RNA, 32 nt, Human
gauguuugacaguagagcugugugagagggag

SEQ ID NO: 164272 - RNA, 23 nt, Human
gauguuugacuugcucaaaguca

SEQ ID NO: 164273 - RNA, 32 nt, Human
gauguuugaggugacgguaggaaugugagcag

SEQ ID NO: 164274 - RNA, 32 nt, Human
gauguuugcacaguuuauccagaucugugcag

SEQ ID NO: 164275 - RNA, 32 nt, Human
gauguuuggcugaggacauuucuaugcaaugu

SEQ ID NO: 164276 - RNA, 32 nt, Human
gauguuuggucucaggaaguggggcccaccca

SEQ ID NO: 164277 - RNA, 32 nt, Human
gauguuuguacuuuuguguuacugcagugacc

SEQ ID NO: 164278 - RNA, 32 nt, Human
gauguuuuaucuuuacaagucucucucguuaa

SEQ ID NO: 164279 - RNA, 32 nt, Human
gauguuuucaaacuuuuagaacucacauuuua

SEQ ID NO: 164280 - RNA, 32 nt, Human
gauguuuucccuuaacuuuuccuuguauguuc

SEQ ID NO: 164281 - RNA, 32 nt, Human
gauuaaaaacaacauuuugaaucuucaggaaa

SEQ ID NO: 164282 - RNA, 32 nt, Human
gauuaaaauggggagguugcagggagcagagc

SEQ ID NO: 164283 - RNA, 32 nt, Human
gauuaaacagaucucuacagacuugcaugagg

SEQ ID NO: 164284 - RNA, 32 nt, Human
gauuaaaccaaggcacuccagccugggugaca

SEQ ID NO: 164285 - RNA, 32 nt, Human
gauuaaaccaccacaaacaaauaaagcacugc

SEQ ID NO: 164286 - RNA, 32 nt, Human
gauuaaaccauccuuuauuauagccagagucu

SEQ ID NO: 164287 - RNA, 32 nt, Human
gauuaaaccauggauggacacaauucuaagac

SEQ ID NO: 164288 - RNA, 32 nt, Human
gauuaaacugucaaaucugucauugcauaugc

SEQ ID NO: 164289 - RNA, 32 nt, Human
gauuaaagaacugccugaauugcugcaaugaa

SEQ ID NO: 164290 - RNA, 32 nt, Human
gauuaaagagcucuugguuugucaucaggauu

SEQ ID NO: 164291 - RNA, 32 nt, Human
gauuaaagugaagaaacaauggccagcaauca

SEQ ID NO: 164292 - RNA, 32 nt, Human
gauuaacaagucagagucugugguguaugugg

SEQ ID NO: 164293 - RNA, 32 nt, Human
gauuaacacacugggcuagggccacacaauga

SEQ ID NO: 164294 - RNA, 32 nt, Human
gauuaacacuagcagauucuguuccaucuuug

SEQ ID NO: 164295 - RNA, 32 nt, Human
gauuaacaggaaacuuccaagauggaaacuuu

SEQ ID NO: 164296 - RNA, 32 nt, Human
gauuaacaggcacuauacauggugcugugcaa

SEQ ID NO: 164297 - RNA, 32 nt, Human
gauuaacguccacauggagauauggaagagga

SEQ ID NO: 164298 - RNA, 32 nt, Human
gauuaacugcguuuguucugcuucuguaagcu

SEQ ID NO: 164299 - RNA, 32 nt, Human
gauuaacuuucauuuaacugugguuauuguua

SEQ ID NO: 164300 - RNA, 32 nt, Human
gauuaagaagcuuucagaaugauucuauggau

SEQ ID NO: 164301 - RNA, 32 nt, Human
gauuaagccacagccucuaauuggaacggcau

SEQ ID NO: 164302 - RNA, 32 nt, Human
gauuaagccaccgcacuccagccugggcgaca

SEQ ID NO: 164303 - RNA, 32 nt, Human
gauuaaggcgugagccacugcgcccggcccaa

SEQ ID NO: 164304 - RNA, 32 nt, Human
gauuaaggguggccucacccuuaaucuccucu

SEQ ID NO: 164305 - RNA, 32 nt, Human
gauuaagguguugacuugccucuuucagagau

SEQ ID NO: 164306 - RNA, 32 nt, Human
gauuaauaauguucccuuuucuucuuuucuau

SEQ ID NO: 164307 - RNA, 32 nt, Human
gauuaaugaaagugggaaaauacacaugaaga

SEQ ID NO: 164308 - RNA, 32 nt, Human
gauuaaugaauccauuccaguugccucaacug

SEQ ID NO: 164309 - RNA, 32 nt, Human
gauuaaugcccuuuuaaaagcagucaccagag

SEQ ID NO: 164310 - RNA, 21 nt, Human
gauuaaugcugcucuuuaggg

SEQ ID NO: 164311 - RNA, 25 nt, Human
gauuaauguacccugcguuuugucu

SEQ ID NO: 164312 - RNA, 32 nt, Human
gauuaauuaagaacacuggggccaggcgcagu

SEQ ID NO: 164313 - RNA, 32 nt, Human
gauuaauugaagaugcuugccauacaguaggg

SEQ ID NO: 164314 - RNA, 32 nt, Human
gauuaauuucuaauaccucuuucaacuccacu

SEQ ID NO: 164315 - RNA, 32 nt, Human
gauuacaaaauauacaaaaguuuccugaguau

SEQ ID NO: 164316 - RNA, 26 nt, Human
gauuacaacauccugcgguuccguuu

SEQ ID NO: 164317 - RNA, 32 nt, Human
gauuacaaguuugagccacugcaccuggcuaa

SEQ ID NO: 164318 - RNA, 32 nt, Human
gauuacaauucaacaacaaauuuuggagcaua

SEQ ID NO: 164319 - RNA, 32 nt, Human
gauuacacauauuucagaaagacuuuacccaa

SEQ ID NO: 164320 - RNA, 24 nt, Human
gauuacaccacugcacuucagucu

SEQ ID NO: 164321 - RNA, 32 nt, Human
gauuacaccacugcacuucagucugugugacu

SEQ ID NO: 164322 - RNA, 32 nt, Human
gauuacaccacugcacuugagccugggcagca

SEQ ID NO: 164323 - RNA, 32 nt, Human
gauuacaccauugcauuccagccuaggcaaca

SEQ ID NO: 164324 - RNA, 32 nt, Human
gauuacaccauugcauuccagccugggcaaca

SEQ ID NO: 164325 - RNA, 32 nt, Human
gauuacaccccugcacuccagccugggcggca

SEQ ID NO: 164326 - RNA, 32 nt, Human
gauuacaccccuggacuccagcuugggugaca

SEQ ID NO: 164327 - RNA, 32 nt, Human
gauuacacugcucucccugaaguaguggauuc

SEQ ID NO: 164328 - RNA, 32 nt, Human
gauuacagaagaguguccaccuaacaagaugg

SEQ ID NO: 164329 - RNA, 32 nt, Human
gauuacagagaaggcuuuuucucaggucaggc

SEQ ID NO: 164330 - RNA, 32 nt, Human
gauuacagauguaagucacuaccccagccaga

SEQ ID NO: 164331 - RNA, 32 nt, Human
gauuacagccugauaagaggagacuugagagc

SEQ ID NO: 164332 - RNA, 32 nt, Human
gauuacaggaugagccacugagcccagcugac

SEQ ID NO: 164333 - RNA, 18 nt, Human
gauuacaggcaugagcca

SEQ ID NO: 164334 - RNA, 32 nt, Human
gauuacaggcaugagccaccacggccagccca

SEQ ID NO: 164335 - RNA, 32 nt, Human
gauuacaggcauggccaccacgcccagccauc

SEQ ID NO: 164336 - RNA, 18 nt, Human
gauuacaggcgugagcca

SEQ ID NO: 164337 - RNA, 32 nt, Human
gauuacaggcgugagccaccaggccuggcucc

SEQ ID NO: 164338 - RNA, 32 nt, Human
gauuacagggaaggaaaauagcuggcauuucu

SEQ ID NO: 164339 - RNA, 18 nt, Human
gauuacagguaugagcca

SEQ ID NO: 164340 - RNA, 32 nt, Human
gauuacaggugugagcuacugugcccagccug

SEQ ID NO: 164341 - RNA, 32 nt, Human
gauuacaggugugugccaaccaugcucagcua

SEQ ID NO: 164342 - RNA, 32 nt, Human
gauuacagucuuucucagauuuuuaguaaaug

SEQ ID NO: 164343 - RNA, 22 nt, Human
gauuacaucauguauuuugccu

SEQ ID NO: 164344 - RNA, 32 nt, Human
gauuacaugagacuggggaguccuucccugcc

SEQ ID NO: 164345 - RNA, 25 nt, Human
gauuaccaacuaauuugugauuuca

SEQ ID NO: 164346 - RNA, 32 nt, Human
gauuaccaggacuccuacacacucucugaaac

SEQ ID NO: 164347 - RNA, 32 nt, Human
gauuaccagguaauuccugucccaagacagcc

SEQ ID NO: 164348 - RNA, 32 nt, Human
gauuaccagugauauaacuaggaauagucaga

SEQ ID NO: 164349 - RNA, 32 nt, Human
gauuacccaagaguucaaggcugcagugaacu

SEQ ID NO: 164350 - RNA, 28 nt, Human
gauuacccacgugcugccguccuggucu

SEQ ID NO: 164351 - RNA, 32 nt, Human
gauuaccccagccugugagcggcagugggcac

SEQ ID NO: 164352 - RNA, 32 nt, Human
gauuaccgacagugacuagggcagcauguuua

SEQ ID NO: 164353 - RNA, 32 nt, Human
gauuaccuacagacaauaaugagacuucagaa

SEQ ID NO: 164354 - RNA, 32 nt, Human
gauuaccucacugcauuccagccugggcaaca

SEQ ID NO: 164355 - RNA, 32 nt, Human
gauuaccucuuguuugugacaagacuaagcau

SEQ ID NO: 164356 - RNA, 32 nt, Human
gauuaccugugcagugcagagcacuuuaaugc

SEQ ID NO: 164357 - RNA, 32 nt, Human
gauuacgccacugcaccccaaccugggcgaca

SEQ ID NO: 164358 - RNA, 32 nt, Human
gauuacgccacugcacuaaugucuggugacag

SEQ ID NO: 164359 - RNA, 32 nt, Human
gauuacgccacugcacuccagccugggcaaca

SEQ ID NO: 164360 - RNA, 32 nt, Human
gauuacgccacugcacuccagccugggugacg

SEQ ID NO: 164361 - RNA, 32 nt, Human
gauuacgccacugcauuguagccugggcaaca

SEQ ID NO: 164362 - RNA, 32 nt, Human
gauuacgccuguaaucccagcacuuugggagg

SEQ ID NO: 164363 - RNA, 32 nt, Human
gauuacgcugaggcccagccugggggagaauu

SEQ ID NO: 164364 - RNA, 32 nt, Human
gauuacgcuugcaugucaaaccccugucuuug

SEQ ID NO: 164365 - RNA, 32 nt, Human
gauuacggcucacuccuguaaucccagcacuu

SEQ ID NO: 164366 - RNA, 32 nt, Human
gauuacgucacugcauuccagccugggugaca

SEQ ID NO: 164367 - RNA, 32 nt, Human
gauuacuaauuauuccucuuugcccaaaauac

SEQ ID NO: 164368 - RNA, 32 nt, Human
gauuacuccacugcacuccagccugggcaaca

SEQ ID NO: 164369 - RNA, 32 nt, Human
gauuacugagcuuuuugacauuuccuuagacu

SEQ ID NO: 164370 - RNA, 32 nt, Human
gauuacugauguccauggcaagugaucuguuc

SEQ ID NO: 164371 - RNA, 32 nt, Human
gauuacugcaggaacuucuggaggaaagcacu

SEQ ID NO: 164372 - RNA, 32 nt, Human
gauuacuggcuugagccacugcacccaccccu

SEQ ID NO: 164373 - RNA, 32 nt, Human
gauuacugguaguuguugacauuucugaagca

SEQ ID NO: 164374 - RNA, 32 nt, Human
gauuacuggugugagccaccacggccagcugc

SEQ ID NO: 164375 - RNA, 32 nt, Human
gauuacuucauuggagggaaaaugaaucguuc

SEQ ID NO: 164376 - RNA, 32 nt, Human
gauuacuucuuuguuuccuuguggcuucuugu

SEQ ID NO: 164377 - RNA, 32 nt, Human
gauuacuuuaugcagcagucagguacauaguu

SEQ ID NO: 164378 - RNA, 32 nt, Human
gauuagaaaauagcaucccaccucuggguauc

SEQ ID NO: 164379 - RNA, 25 nt, Human
gauuagaauaaagucauuuucuucc

SEQ ID NO: 164380 - RNA, 32 nt, Human
gauuagaauuuguccagcgguaauccugaugc

SEQ ID NO: 164381 - RNA, 32 nt, Human
gauuagagaccacguuggucugcugagaacca

SEQ ID NO: 164382 - RNA, 32 nt, Human
gauuagagagugaguagaagugagccagacaa

SEQ ID NO: 164383 - RNA, 25 nt, Human
gauuagagggagcaacacccuucca

SEQ ID NO: 164384 - RNA, 28 nt, Human
gauuagccagucgccggagcgcuucgag

SEQ ID NO: 164385 - RNA, 32 nt, Human
gauuagccauuuuaaaccaacgaggaauaaaa

SEQ ID NO: 164386 - RNA, 32 nt, Human
gauuagcccaccugucccuccugggcugcugc

SEQ ID NO: 164387 - RNA, 32 nt, Human
gauuagcuacuaagagguaaagagaugucuaa

SEQ ID NO: 164388 - RNA, 32 nt, Human
gauuagcucaccuuucuccuaggcaauuauaa

SEQ ID NO: 164389 - RNA, 32 nt, Human
gauuagcugcaaucucuacuuucgaugaggaa

SEQ ID NO: 164390 - RNA, 21 nt, Human
gauuagcugggaucacaggug

SEQ ID NO: 164391 - RNA, 32 nt, Human
gauuagcugggcgugguugcacaugccuauag

SEQ ID NO: 164392 - RNA, 32 nt, Human
gauuagcuuccugccugcugucagugcuggac

SEQ ID NO: 164393 - RNA, 32 nt, Human
gauuaggagccuugcuucauuucagaaucucc

SEQ ID NO: 164394 - RNA, 32 nt, Human
gauuaggcaggcagaggcaguuaugggcuucu

SEQ ID NO: 164395 - RNA, 32 nt, Human
gauuaggcauugaaggaacauaccucaaaaua

SEQ ID NO: 164396 - RNA, 32 nt, Human
gauuaggccaaagucugggaguaaggagagga

SEQ ID NO: 164397 - RNA, 32 nt, Human
gauuagggagagaagauagcagggcauggcug

SEQ ID NO: 164398 - RNA, 32 nt, Human
gauuagggccuccccaugaccuaauuuaaaua

SEQ ID NO: 164399 - RNA, 31 nt, Human
gauuaggggagacuggagcacguuuguaauc

SEQ ID NO: 164400 - RNA, 32 nt, Human
gauuaggugguccucacagggguggggccauc

SEQ ID NO: 164401 - RNA, 32 nt, Human
gauuaguccaccugucccuccugggcugcugg

SEQ ID NO: 164402 - RNA, 32 nt, Human
gauuagugccuucugcccucccuggagccucc

SEQ ID NO: 164403 - RNA, 32 nt, Human
gauuaguggguuaucuuuuccaaggaacaggu

SEQ ID NO: 164404 - RNA, 32 nt, Human
gauuaguugaaaggccucaagaacaaacacug

SEQ ID NO: 164405 - RNA, 32 nt, Human
gauuaguuguuauaccuuaaugccuaguguuu

SEQ ID NO: 164406 - RNA, 32 nt, Human
gauuaguuugccuaauucauguuuucacuuaa

SEQ ID NO: 164407 - RNA, 32 nt, Human
gauuauaaacaacagaaacuucucaguuuugg

SEQ ID NO: 164408 - RNA, 32 nt, Human
gauuauaacagcuguauuucauauuugccucc

SEQ ID NO: 164409 - RNA, 26 nt, Human
gauuauaacauccuguauuucaguuu

SEQ ID NO: 164410 - RNA, 32 nt, Human
gauuauaauggcacuauucuggucauuauccu

SEQ ID NO: 164411 - RNA, 32 nt, Human
gauuauaccacugcacuccagccugggugaca

SEQ ID NO: 164412 - RNA, 32 nt, Human
gauuauacuucaugagucuuagcaauauggga

SEQ ID NO: 164413 - RNA, 32 nt, Human
gauuauagagcacagaaagaauucucaaacua

SEQ ID NO: 164414 - RNA, 32 nt, Human
gauuauagagguuugacuggcaaauucacuuu

SEQ ID NO: 164415 - RNA, 32 nt, Human
gauuauagcaccuccucuccagccucaggacc

SEQ ID NO: 164416 - RNA, 21 nt, Human
gauuauagcuagcuagccuca

SEQ ID NO: 164417 - RNA, 32 nt, Human
gauuauaggcuugagcuacugugcccggccca

SEQ ID NO: 164418 - RNA, 32 nt, Human
gauuauaggcuuuggucuuuucaucugcaaag

SEQ ID NO: 164419 - RNA, 32 nt, Human
gauuauaguggaacuucaccuucaccugcuau

SEQ ID NO: 164420 - RNA, 18 nt, Human
gauuauauacuucagggu

SEQ ID NO: 164421 - RNA, 32 nt, Human
gauuaucaacuguguguucgacagugaauauu

SEQ ID NO: 164422 - RNA, 32 nt, Human
gauuaucaauaugagccaccaugccagauuug

SEQ ID NO: 164423 - RNA, 32 nt, Human
gauuaucaauggcaaaugcaggcuccuccugu

SEQ ID NO: 164424 - RNA, 32 nt, Human
gauuaucacaacuguuuggugaccuacuucac

SEQ ID NO: 164425 - RNA, 22 nt, Human
gauuaucagacacuaaaacuac

SEQ ID NO: 164426 - RNA, 24 nt, Human
gauuaucauuaugugauacuggca

SEQ ID NO: 164427 - RNA, 32 nt, Human
gauuaucauuggguuucuucuuugucaugggu

SEQ ID NO: 164428 - RNA, 32 nt, Human
gauuaucccuccaguccccauggauuggaaau

SEQ ID NO: 164429 - RNA, 32 nt, Human
gauuaucgggagggcagcagaggcagagaacg

SEQ ID NO: 164430 - RNA, 32 nt, Human
gauuaucuauuuuucucccaugauaacuaauc

SEQ ID NO: 164431 - RNA, 32 nt, Human
gauuaucuguaagccuuuguggggagggaggc

SEQ ID NO: 164432 - RNA, 32 nt, Human
gauuaucuucagcccaggcuuuugcuagaugg

SEQ ID NO: 164433 - RNA, 32 nt, Human
gauuaucuuggaggggacaggaggauggcaga

SEQ ID NO: 164434 - RNA, 32 nt, Human
gauuaucuuugaacccccuuguguggaucauu

SEQ ID NO: 164435 - RNA, 32 nt, Human
gauuaucuuuuccuugcuuucuuguuucuguu

SEQ ID NO: 164436 - RNA, 32 nt, Human
gauuaugaagccuuugauuccuagccacagca

SEQ ID NO: 164437 - RNA, 32 nt, Human
gauuaugauuaugauuaauuacucugaccuga

SEQ ID NO: 164438 - RNA, 32 nt, Human
gauuaugccacugcacuccagccugggugaca

SEQ ID NO: 164439 - RNA, 32 nt, Human
gauuaugccacugcacuccagccuggugacag

SEQ ID NO: 164440 - RNA, 24 nt, Human
gauuaugccacugcacuucagccu

SEQ ID NO: 164441 - RNA, 32 nt, Human
gauuaugccacugcacuucagccugggugaca

SEQ ID NO: 164442 - RNA, 32 nt, Human
gauuaugccacugcuuuccagccugggcaaca

SEQ ID NO: 164443 - RNA, 32 nt, Human
gauuaugccacuguacuccagccugggugaca

SEQ ID NO: 164444 - RNA, 32 nt, Human
gauuaugccacuguacuccagcgugggugaca

SEQ ID NO: 164445 - RNA, 32 nt, Human
gauuaugccauuacacuccagccugggcaaca

SEQ ID NO: 164446 - RNA, 32 nt, Human
gauuaugccauugcacuccagccugggugaca

SEQ ID NO: 164447 - RNA, 32 nt, Human
gauuaugccccugcacaucagccugggugaua

SEQ ID NO: 164448 - RNA, 30 nt, Human
gauuaugcccuccuggggcuccugugaggu

SEQ ID NO: 164449 - RNA, 32 nt, Human
gauuaugcugcugcacuccagccuggacaaca

SEQ ID NO: 164450 - RNA, 29 nt, Human
gauuauggaaacaagucaugcucaugaaa

SEQ ID NO: 164451 - RNA, 32 nt, Human
gauuauggaaacucaauugucagaggacccaa

SEQ ID NO: 164452 - RNA, 32 nt, Human
gauuauggaggcugagaagucucaagaucaca

SEQ ID NO: 164453 - RNA, 32 nt, Human
gauuaugggcugggcuccauuucuuggacuua

SEQ ID NO: 164454 - RNA, 32 nt, Human
gauuauggggccuccuuagccauggggacugu

SEQ ID NO: 164455 - RNA, 32 nt, Human
gauuaugucacuccagccugggcaacagagug

SEQ ID NO: 164456 - RNA, 32 nt, Human
gauuaugucacugcacuccauccugggugaca

SEQ ID NO: 164457 - RNA, 32 nt, Human
gauuauguccccaucaaaaagaaucuccauuu

SEQ ID NO: 164458 - RNA, 32 nt, Human
gauuauguuagcauuuacacugaggagaaaau

SEQ ID NO: 164459 - RNA, 32 nt, Human
gauuauuacauacauuugaacauucccaaaug

SEQ ID NO: 164460 - RNA, 32 nt, Human
gauuauuaggccuucagggccagugucuccau

SEQ ID NO: 164461 - RNA, 32 nt, Human
gauuauuauacugcuauuuuucccugaauucu

SEQ ID NO: 164462 - RNA, 32 nt, Human
gauuauuauauacuguauuuucuucuaaauua

SEQ ID NO: 164463 - RNA, 32 nt, Human
gauuauucauucuaucucagaguuaccggcaa

SEQ ID NO: 164464 - RNA, 32 nt, Human
gauuauucuauuuccccucccucucucccgcc

SEQ ID NO: 164465 - RNA, 32 nt, Human
gauuauucucaccaacccgcugccuucaugcu

SEQ ID NO: 164466 - RNA, 32 nt, Human
gauuauucucaccaauugauucaguuacaaau

SEQ ID NO: 164467 - RNA, 32 nt, Human
gauuauucucuagccaagccccaccuuuguua

SEQ ID NO: 164468 - RNA, 32 nt, Human
gauuauugagagcccuagaaagcugcugugau

SEQ ID NO: 164469 - RNA, 32 nt, Human
gauuauugcuuuccucucuagugaaguccuug

SEQ ID NO: 164470 - RNA, 32 nt, Human
gauuauuggcugcuuugccucuaccaguuggc

SEQ ID NO: 164471 - RNA, 32 nt, Human
gauuauugggaugaagcuaaauccccagaaug

SEQ ID NO: 164472 - RNA, 32 nt, Human
gauuauugugaguaugaaaaagguuuuaauca

SEQ ID NO: 164473 - RNA, 21 nt, Human
gauuauugugcugcuugcuca

SEQ ID NO: 164474 - RNA, 32 nt, Human
gauuauuuagagccauuagagcacagcuucuu

SEQ ID NO: 164475 - RNA, 32 nt, Human
gauuauuuccucugugcuuucucagcuucuuu

SEQ ID NO: 164476 - RNA, 32 nt, Human
gauuauuucuccuuggauacagauauauuuug

SEQ ID NO: 164477 - RNA, 32 nt, Human
gauuauuugcacgaacuggacugugugcaacg

SEQ ID NO: 164478 - RNA, 32 nt, Human
gauuauuuggcccaggcugagggugcaaacag

SEQ ID NO: 164479 - RNA, 32 nt, Human
gauuauuuuaugcacaccuaagcccaaauaua

SEQ ID NO: 164480 - RNA, 32 nt, Human
gauucaaacagcuuuaaacacuuccaaugaga

SEQ ID NO: 164481 - RNA, 32 nt, Human
gauucaaacauguagagaaguuguagauucaa

SEQ ID NO: 164482 - RNA, 32 nt, Human
gauucaaacucauaaacucaguauuuuaacuc

SEQ ID NO: 164483 - RNA, 32 nt, Human
gauucaaacugcugccuuugccuccagugcau

SEQ ID NO: 164484 - RNA, 32 nt, Human
gauucaaagcaacaccaccaccacugaaguau

SEQ ID NO: 164485 - RNA, 24 nt, Human
gauucaaaucacaaucauauuuca

SEQ ID NO: 164486 - RNA, 32 nt, Human
gauucaacaaauaccauauguccuuaucauuu

SEQ ID NO: 164487 - RNA, 32 nt, Human
gauucaaccagcucuucaccacugccuggggc

SEQ ID NO: 164488 - RNA, 32 nt, Human
gauucaaccaugggagccaacacuucaagaaa

SEQ ID NO: 164489 - RNA, 32 nt, Human
gauucaagugagccaggaaagcagcaaaggaa

SEQ ID NO: 164490 - RNA, 32 nt, Human
gauucaagugcaauccauguaucuguaugggu

SEQ ID NO: 164491 - RNA, 32 nt, Human
gauucaaucugcaugccagccuggaggaggaa

SEQ ID NO: 164492 - RNA, 32 nt, Human
gauucaaugggaauauuaauugcugcucuugu

SEQ ID NO: 164493 - RNA, 32 nt, Human
gauucacacaugccuauauuaucauaagaauu

SEQ ID NO: 164494 - RNA, 32 nt, Human
gauucacacguacacacauaaacacacccacc

SEQ ID NO: 164495 - RNA, 22 nt, Human
gauucacagagacgacaagaaa

SEQ ID NO: 164496 - RNA, 32 nt, Human
gauucacagcacaaaagaccucaccaccacac

SEQ ID NO: 164497 - RNA, 32 nt, Human
gauucacagcacugcacugcagccugggugac

SEQ ID NO: 164498 - RNA, 19 nt, Human
gauucacagcagaauucua

SEQ ID NO: 164499 - RNA, 32 nt, Human
gauucacaucccaggcaggacagagcaggaga

SEQ ID NO: 164500 - RNA, 22 nt, Human
gauucacccaggaggucacaga

SEQ ID NO: 164501 - RNA, 32 nt, Human
gauucaccccaaagugcugggauuacaggcgu

SEQ ID NO: 164502 - RNA, 21 nt, Human
gauucaccccgucuccaccca

SEQ ID NO: 164503 - RNA, 32 nt, Human
gauucacccugauuuuacacacauuaaaaugu

SEQ ID NO: 164504 - RNA, 32 nt, Human
gauucacgccuguaaucccagcacuuugagag

SEQ ID NO: 164505 - RNA, 32 nt, Human
gauucacgccuguaaucccagcacuuugggag

SEQ ID NO: 164506 - RNA, 32 nt, Human
gauucacuagcccccagcccgccaaaccccac

SEQ ID NO: 164507 - RNA, 32 nt, Human
gauucacuucuuuagggagacaagguguggcg

SEQ ID NO: 164508 - RNA, 32 nt, Human
gauucagaacacaagaggagaaugagcuggag

SEQ ID NO: 164509 - RNA, 32 nt, Human
gauucagaaguuaaauaggagcuuuggaauca

SEQ ID NO: 164510 - RNA, 32 nt, Human
gauucagaaguuagggguagcggggguaggau

SEQ ID NO: 164511 - RNA, 32 nt, Human
gauucagagacgccaaaagagaagauacagag

SEQ ID NO: 164512 - RNA, 32 nt, Human
gauucagagacuuagaagcaucagaguugaua

SEQ ID NO: 164513 - RNA, 32 nt, Human
gauucagagggaaaggaggaagcugcguggca

SEQ ID NO: 164514 - RNA, 32 nt, Human
gauucagcaacagguuuccacagggaaggccc

SEQ ID NO: 164515 - RNA, 32 nt, Human
gauucagcaacagguuuucacagggaaggccc

SEQ ID NO: 164516 - RNA, 32 nt, Human
gauucagcaaugguggaauggaagacagaacu

SEQ ID NO: 164517 - RNA, 32 nt, Human
gauucagccacagccucugccucccguugcuc

SEQ ID NO: 164518 - RNA, 32 nt, Human
gauucagccuggagaugguggaagagauaaag

SEQ ID NO: 164519 - RNA, 32 nt, Human
gauucagcucaaggauucagugucuucauuuu

SEQ ID NO: 164520 - RNA, 32 nt, Human
gauucagcucacugcaaucuccgccucccggg

SEQ ID NO: 164521 - RNA, 32 nt, Human
gauucaggaaggagcccaggagcagaggaagu

SEQ ID NO: 164522 - RNA, 32 nt, Human
gauucaggcccaaauuauggcagacaucuuga

SEQ ID NO: 164523 - RNA, 32 nt, Human
gauucagggaaagacuaacugugaaaaggaag

SEQ ID NO: 164524 - RNA, 32 nt, Human
gauucagggaugcuugcucuccacuuuucaag

SEQ ID NO: 164525 - RNA, 32 nt, Human
gauucagggccagcagguuucacucagcucuc

SEQ ID NO: 164526 - RNA, 23 nt, Human
gauucaggggaccuguauuucca

SEQ ID NO: 164527 - RNA, 32 nt, Human
gauucaggggcacuaugcccacugccuccucu

SEQ ID NO: 164528 - RNA, 32 nt, Human
gauucaggugugagccacugugcccagcaggg

SEQ ID NO: 164529 - RNA, 32 nt, Human
gauucaguggcugggaauugagaauuuauuug

SEQ ID NO: 164530 - RNA, 32 nt, Human
gauucagugggccuggguggggccaagaaauc

SEQ ID NO: 164531 - RNA, 32 nt, Human
gauucagugggugagagggaagaaggggaggu

SEQ ID NO: 164532 - RNA, 32 nt, Human
gauucaguguguucacuccuugcagcugcugu

SEQ ID NO: 164533 - RNA, 32 nt, Human
gauucaguucucuuacccacagacacagaacc

SEQ ID NO: 164534 - RNA, 32 nt, Human
gauucauacuccugaugcuacugacaacgugg

SEQ ID NO: 164535 - RNA, 32 nt, Human
gauucauagaagaaagccagagguucugcuug

SEQ ID NO: 164536 - RNA, 32 nt, Human
gauucauauuccuguaaggaaaauccgggcag

SEQ ID NO: 164537 - RNA, 32 nt, Human
gauucauccccaggcuggagucaggcucagcu

SEQ ID NO: 164538 - RNA, 22 nt, Human
gauucaucuccaugagugcaca

SEQ ID NO: 164539 - RNA, 32 nt, Human
gauucaucugccucagccucuggaguagcugg

SEQ ID NO: 164540 - RNA, 32 nt, Human
gauucaucugugaccuccaggcagcagucucu

SEQ ID NO: 164541 - RNA, 32 nt, Human
gauucaugagaggagaucaaaauaucaacaua

SEQ ID NO: 164542 - RNA, 32 nt, Human
gauucaugcacuguagggcugggcgcagcauc

SEQ ID NO: 164543 - RNA, 32 nt, Human
gauucauggagaccagucccaguagcaaccgc

SEQ ID NO: 164544 - RNA, 32 nt, Human
gauucaugucgaggcuagaggcauuuggaaca

SEQ ID NO: 164545 - RNA, 32 nt, Human
gauucauguggacauucaggaagcuuauucuc

SEQ ID NO: 164546 - RNA, 32 nt, Human
gauucaugugguuucuaagauuuggacauguc

SEQ ID NO: 164547 - RNA, 32 nt, Human
gauucauuccuuccucacucaaaucccuugaa

SEQ ID NO: 164548 - RNA, 32 nt, Human
gauucauucuucuugcucuuucucagcagaac

SEQ ID NO: 164549 - RNA, 32 nt, Human
gauucauuuaaguaggagauggucaaauauau

SEQ ID NO: 164550 - RNA, 24 nt, Human
gauucauuuuauuuucaucaccau

SEQ ID NO: 164551 - RNA, 32 nt, Human
gauuccaagaagcaagagucagaagugggaag

SEQ ID NO: 164552 - RNA, 32 nt, Human
gauuccaagccaggcuuacucccaggcccagg

SEQ ID NO: 164553 - RNA, 32 nt, Human
gauuccaagguaaacagucuccaugagaaagu

SEQ ID NO: 164554 - RNA, 24 nt, Human
gauuccaaggugaggcccaacuga

SEQ ID NO: 164555 - RNA, 32 nt, Human
gauuccaauuuaaaagcagaaaagcaaaaacc

SEQ ID NO: 164556 - RNA, 32 nt, Human
gauuccacaaagccucucuccccucccucguc

SEQ ID NO: 164557 - RNA, 32 nt, Human
gauuccacaacaaaauucuuaucuuccaugga

SEQ ID NO: 164558 - RNA, 32 nt, Human
gauuccacagaguugaccucucugauuuucua

SEQ ID NO: 164559 - RNA, 32 nt, Human
gauuccaccauugcacuccagucugggcaaca

SEQ ID NO: 164560 - RNA, 32 nt, Human
gauuccacgcugcuggaucugccuccugugcc

SEQ ID NO: 164561 - RNA, 32 nt, Human
gauuccacuccgggaaccucggcgaugcugag

SEQ ID NO: 164562 - RNA, 32 nt, Human
gauuccacugguguccccuuguggguuuuccu

SEQ ID NO: 164563 - RNA, 32 nt, Human
gauuccagaagaagccaagaucugccagcccu

SEQ ID NO: 164564 - RNA, 32 nt, Human
gauuccagcaauucuccugccucggcuuccca

SEQ ID NO: 164565 - RNA, 32 nt, Human
gauuccagccucccagccccucucuccgcccc

SEQ ID NO: 164566 - RNA, 32 nt, Human
gauuccagccuucagaagguucuugggauaug

SEQ ID NO: 164567 - RNA, 32 nt, Human
gauuccagcgccugacagccaggaccccaggc

SEQ ID NO: 164568 - RNA, 32 nt, Human
gauuccagcuacuugggagguugaggcaggag

SEQ ID NO: 164569 - RNA, 32 nt, Human
gauuccaggaaggaaggagccucugacaaagc

SEQ ID NO: 164570 - RNA, 32 nt, Human
gauuccaggcagcagguuggagugacuggugg

SEQ ID NO: 164571 - RNA, 32 nt, Human
gauuccaggccuggugucacaugacaccagca

SEQ ID NO: 164572 - RNA, 32 nt, Human
gauuccagguaccaaaucaucuguaaaaucac

SEQ ID NO: 164573 - RNA, 32 nt, Human
gauuccagguggacuggaccaagagcaggcaa

SEQ ID NO: 164574 - RNA, 32 nt, Human
gauuccaggugugagcuacugugcccagcuaa

SEQ ID NO: 164575 - RNA, 31 nt, Human
gauuccaguaaguaccaacuaccucacaggc

SEQ ID NO: 164576 - RNA, 32 nt, Human
gauuccaguagccuaguuuccacagcacgaua

SEQ ID NO: 164577 - RNA, 32 nt, Human
gauuccagucucugguuccuuuccugagucag

SEQ ID NO: 164578 - RNA, 32 nt, Human
gauuccagugagggagaaagugaucugcaggg

SEQ ID NO: 164579 - RNA, 21 nt, Human
gauuccaguuuggacagggug

SEQ ID NO: 164580 - RNA, 32 nt, Human
gauuccaugcccaccugcccucugucugccuc

SEQ ID NO: 164581 - RNA, 32 nt, Human
gauuccaugguuuugcacacacgauggggagg

SEQ ID NO: 164582 - RNA, 32 nt, Human
gauuccauguguuugcagcaggacuacaucga

SEQ ID NO: 164583 - RNA, 32 nt, Human
gauuccauuacccuuucuuccucauagguagu

SEQ ID NO: 164584 - RNA, 32 nt, Human
gauucccacagccagcucuuggcuccaagaug

SEQ ID NO: 164585 - RNA, 32 nt, Human
gauucccagagacaggaaaauccucuggcugg

SEQ ID NO: 164586 - RNA, 32 nt, Human
gauucccagcauccaucuaaaaagcaauacuc

SEQ ID NO: 164587 - RNA, 32 nt, Human
gauucccaggcugggugcaguggcucacgccu

SEQ ID NO: 164588 - RNA, 21 nt, Human
gauucccauggaagauggaug

SEQ ID NO: 164589 - RNA, 32 nt, Human
gauuccccacccaacccuuccccaccggacug

SEQ ID NO: 164590 - RNA, 32 nt, Human
gauuccccagcgacgugguguugcagccccgu

SEQ ID NO: 164591 - RNA, 32 nt, Human
gauuccccaggagguccccugccccucccccu

SEQ ID NO: 164592 - RNA, 32 nt, Human
gauuccccaucucaggccagagccaaggggcu

SEQ ID NO: 164593 - RNA, 32 nt, Human
gauucccccauagggaguaaugaggacagcau

SEQ ID NO: 164594 - RNA, 32 nt, Human
gauucccccugcccugugccgcacucuggcgg

SEQ ID NO: 164595 - RNA, 32 nt, Human
gauucccccuggcaagugcucccugguuguga

SEQ ID NO: 164596 - RNA, 32 nt, Human
gauucccccuugcccaucagagaggagcauuu

SEQ ID NO: 164597 - RNA, 32 nt, Human
gauuccccuggguaugccucugugccacagga

SEQ ID NO: 164598 - RNA, 22 nt, Human
gauucccgaccucaggugaucc

SEQ ID NO: 164599 - RNA, 32 nt, Human
gauucccgggacuagguugcgggagaaagccu

SEQ ID NO: 164600 - RNA, 32 nt, Human
gauucccucagauggggaggcagcaguaugag

SEQ ID NO: 164601 - RNA, 32 nt, Human
gauucccucaucccugggggcagcccugccgc

SEQ ID NO: 164602 - RNA, 32 nt, Human
gauucccucugauaagcuguucugguggcagu

SEQ ID NO: 164603 - RNA, 32 nt, Human
gauucccucugccucugucuccccacaucguc

SEQ ID NO: 164604 - RNA, 32 nt, Human
gauucccugcagccccuccuuagcccauguca

SEQ ID NO: 164605 - RNA, 32 nt, Human
gauucccugcccuugugaccucccaggaaaca

SEQ ID NO: 164606 - RNA, 32 nt, Human
gauucccugcgccucugcucugcggcaaauac

SEQ ID NO: 164607 - RNA, 32 nt, Human
gauucccuucaagcaucucccucauccuggac

SEQ ID NO: 164608 - RNA, 32 nt, Human
gauuccgaggaaaaggagauaggagacgaaaa

SEQ ID NO: 164609 - RNA, 32 nt, Human
gauuccgaggugcagaaguugucugagugcgu

SEQ ID NO: 164610 - RNA, 32 nt, Human
gauuccgccacacauccuuuuagcuacagggc

SEQ ID NO: 164611 - RNA, 32 nt, Human
gauuccggauccuaagcaucuaaguuauaaga

SEQ ID NO: 164612 - RNA, 32 nt, Human
gauuccggaucucuccguucucaggccagacc

SEQ ID NO: 164613 - RNA, 32 nt, Human
gauuccggauuaggggaugacaucccaaacag

SEQ ID NO: 164614 - RNA, 32 nt, Human
gauuccggggaaguggaggcagagggagcggg

SEQ ID NO: 164615 - RNA, 32 nt, Human
gauuccggguagcagaggcagcgccgcaggag

SEQ ID NO: 164616 - RNA, 19 nt, Human
gauuccuagauuuagcaca

SEQ ID NO: 164617 - RNA, 32 nt, Human
gauuccucaacccuaucaugggcugcucugag

SEQ ID NO: 164618 - RNA, 32 nt, Human
gauuccuccuccugccggacgccgaggcccag

SEQ ID NO: 164619 - RNA, 32 nt, Human
gauuccucucccauccuuuucugcuccaaccu

SEQ ID NO: 164620 - RNA, 32 nt, Human
gauuccucuuccuuuuacuuccuuccuauuuc

SEQ ID NO: 164621 - RNA, 23 nt, Human
gauuccugaccucaagugaccca

SEQ ID NO: 164622 - RNA, 32 nt, Human
gauuccugagacaaauacucacugaagggcuu

SEQ ID NO: 164623 - RNA, 32 nt, Human
gauuccugaggcaugauuauuccugaggguuu

SEQ ID NO: 164624 - RNA, 32 nt, Human
gauuccugauccagagacaacggccccaaugg

SEQ ID NO: 164625 - RNA, 32 nt, Human
gauuccugaugggcuuucucuugaaguccaaa

SEQ ID NO: 164626 - RNA, 32 nt, Human
gauuccugccaaguaggguuuagccgggcccc

SEQ ID NO: 164627 - RNA, 32 nt, Human
gauuccugcccaggggagagaggcgcugggaa

SEQ ID NO: 164628 - RNA, 32 nt, Human
gauuccugcucuggugagauccaagacccaca

SEQ ID NO: 164629 - RNA, 32 nt, Human
gauuccuggcaaccuccccuccccugacacau

SEQ ID NO: 164630 - RNA, 32 nt, Human
gauuccuggcagcugcccagaacccugcugau

SEQ ID NO: 164631 - RNA, 32 nt, Human
gauuccuggcgcagggcauccaggccgcccgc

SEQ ID NO: 164632 - RNA, 32 nt, Human
gauuccugggcaagaaccuaaaguagcaggac

SEQ ID NO: 164633 - RNA, 32 nt, Human
gauuccugguaucacuugcucgcuacuuucua

SEQ ID NO: 164634 - RNA, 32 nt, Human
gauuccugguucccugaaggaggagagggaug

SEQ ID NO: 164635 - RNA, 32 nt, Human
gauuccuuacuguagcuaauucuagaugcccu

SEQ ID NO: 164636 - RNA, 32 nt, Human
gauuccuuccaagucaguuacaggugguuuua

SEQ ID NO: 164637 - RNA, 32 nt, Human
gauuccuugcugcugcuuauguucuguuguuu

SEQ ID NO: 164638 - RNA, 32 nt, Human
gauuccuugcuugguacuuucuggaccugaag

SEQ ID NO: 164639 - RNA, 32 nt, Human
gauuccuugguauuucuggugggguaaggggc

SEQ ID NO: 164640 - RNA, 32 nt, Human
gauuccuuggugagccuggacaagccccuccc

SEQ ID NO: 164641 - RNA, 32 nt, Human
gauuccuugugucugggaguuuggacagcuuc

SEQ ID NO: 164642 - RNA, 32 nt, Human
gauuccuuuuacacaagagcugccucccaaag

SEQ ID NO: 164643 - RNA, 32 nt, Human
gauuccuuuuuccuccugaacccuccaguggg

SEQ ID NO: 164644 - RNA, 32 nt, Human
gauucgaguccuggcccugcugcuugccagcu

SEQ ID NO: 164645 - RNA, 32 nt, Human
gauucgcaaaccacagauaguaccaaacucca

SEQ ID NO: 164646 - RNA, 28 nt, Human
gauucgcucaauaaacauguuugaaucc

SEQ ID NO: 164647 - RNA, 32 nt, Human
gauucgcucacugacccucaauuguccucuuu

SEQ ID NO: 164648 - RNA, 32 nt, Human
gauucgggagggcugagggcgcggccgagaga

SEQ ID NO: 164649 - RNA, 32 nt, Human
gauucgguuuuuaagaagaugcaugccuaaug

SEQ ID NO: 164650 - RNA, 31 nt, Human
gauucguguagcuacccuugccacaguugug

SEQ ID NO: 164651 - RNA, 32 nt, Human
gauucuaaccaccaugccuacuuguuugcuug

SEQ ID NO: 164652 - RNA, 32 nt, Human
gauucuaagacaaugcaauugagugguaggca

SEQ ID NO: 164653 - RNA, 32 nt, Human
gauucuacagcaaauccacccucucagcucag

SEQ ID NO: 164654 - RNA, 32 nt, Human
gauucuaccaauccaauuucaccaggaaaauu

SEQ ID NO: 164655 - RNA, 32 nt, Human
gauucuaccauguugcccaggcuggucucaaa

SEQ ID NO: 164656 - RNA, 32 nt, Human
gauucuacucugcuuuuauccuuuggagccug

SEQ ID NO: 164657 - RNA, 32 nt, Human
gauucuagaacaggagaaauaaaacagcuauc

SEQ ID NO: 164658 - RNA, 32 nt, Human
gauucuagauuugugcaguaggauugugggac

SEQ ID NO: 164659 - RNA, 32 nt, Human
gauucuaguggcccaccaccucccucuccugc

SEQ ID NO: 164660 - RNA, 32 nt, Human
gauucuaucucggcucagacuuuugguuggaa

SEQ ID NO: 164661 - RNA, 32 nt, Human
gauucuaugccuguauuuccaacaaacuuacu

SEQ ID NO: 164662 - RNA, 32 nt, Human
gauucucaaaauaccaguuuuuauuccaaaaa

SEQ ID NO: 164663 - RNA, 32 nt, Human
gauucucacccaguugcuguguucgguggggc

SEQ ID NO: 164664 - RNA, 32 nt, Human
gauucucaccccaggccucugccugcuuucuc

SEQ ID NO: 164665 - RNA, 32 nt, Human
gauucucacucugucucccaggcuagagugca

SEQ ID NO: 164666 - RNA, 32 nt, Human
gauucucagcacuugggggaucuguuguguac

SEQ ID NO: 164667 - RNA, 32 nt, Human
gauucucagcgccaaacuuuuugcuaguucag

SEQ ID NO: 164668 - RNA, 32 nt, Human
gauucucauccccaaagucccaaaagagggug

SEQ ID NO: 164669 - RNA, 17 nt, Human
gauucucauucaagucc

SEQ ID NO: 164670 - RNA, 32 nt, Human
gauucucauuugugucucugguguuuaguaua

SEQ ID NO: 164671 - RNA, 32 nt, Human
gauucuccaacaggcugggugcauguaucccc

SEQ ID NO: 164672 - RNA, 32 nt, Human
gauucuccagccucagccuccccaguagcugg

SEQ ID NO: 164673 - RNA, 32 nt, Human
gauucuccagccucagcuuccugaguagaugg

SEQ ID NO: 164674 - RNA, 32 nt, Human
gauucuccagccugggcaacggagugagacuc

SEQ ID NO: 164675 - RNA, 32 nt, Human
gauucucccaacaaugcauaucagcuauucau

SEQ ID NO: 164676 - RNA, 32 nt, Human
gauucucccagagauugccuggaacaccagcu

SEQ ID NO: 164677 - RNA, 32 nt, Human
gauucucccuaaaauaacuaaauuuaaaccaa

SEQ ID NO: 164678 - RNA, 32 nt, Human
gauucucccuauuuauacucagacugaccaag

SEQ ID NO: 164679 - RNA, 32 nt, Human
gauucucccucuggguaaccagucccagguga

SEQ ID NO: 164680 - RNA, 32 nt, Human
gauucucccuuagagccucuggaaggagcaug

SEQ ID NO: 164681 - RNA, 32 nt, Human
gauucuccuaccucagcuuccuaaguagcugg

SEQ ID NO: 164682 - RNA, 32 nt, Human
gauucuccucccucagccuccugaguagcugg

SEQ ID NO: 164683 - RNA, 32 nt, Human
gauucuccugaagaugccuggaaagguugcaa

SEQ ID NO: 164684 - RNA, 23 nt, Human
gauucuccugccucagccuucca

SEQ ID NO: 164685 - RNA, 32 nt, Human
gauucuccugccucagcuacucgggaggcuga

SEQ ID NO: 164686 - RNA, 32 nt, Human
gauucuccugccucagcuucccagguggugcg

SEQ ID NO: 164687 - RNA, 32 nt, Human
gauucuccugccucagcuucccgaguagcugg

SEQ ID NO: 164688 - RNA, 32 nt, Human
gauucuccugccucagcuuccuaaguagcugg

SEQ ID NO: 164689 - RNA, 32 nt, Human
gauucuccugccucagcuuccugaguagcugg

SEQ ID NO: 164690 - RNA, 18 nt, Human
gauucuccugccuccgcc

SEQ ID NO: 164691 - RNA, 32 nt, Human
gauucuccuggcucacccuccugagcugggau

SEQ ID NO: 164692 - RNA, 32 nt, Human
gauucuccugucucagcuuccugaguagcugg

SEQ ID NO: 164693 - RNA, 32 nt, Human
gauucuccuucaaguggcaacauggcauauau

SEQ ID NO: 164694 - RNA, 32 nt, Human
gauucuccuucaccaucuacgcgcagcccaca

SEQ ID NO: 164695 - RNA, 32 nt, Human
gauucuccuucaccaucuacgugcagcccaca

SEQ ID NO: 164696 - RNA, 32 nt, Human
gauucuccuucaccaucuaugugcagcccaca

SEQ ID NO: 164697 - RNA, 21 nt, Human
gauucucgcuccuucauuuca

SEQ ID NO: 164698 - RNA, 32 nt, Human
gauucucgugccucagccucuggaguagcugg

SEQ ID NO: 164699 - RNA, 32 nt, Human
gauucucgugccucagcuucccaaguggcugg

SEQ ID NO: 164700 - RNA, 32 nt, Human
gauucucguguaacacuuguugcuuggcaaca

SEQ ID NO: 164701 - RNA, 32 nt, Human
gauucucuaccucccucuuccaucucauuccc

SEQ ID NO: 164702 - RNA, 32 nt, Human
gauucucuagggucucuacuucugcucaagag

SEQ ID NO: 164703 - RNA, 32 nt, Human
gauucucuaguuuucucccuagggaugggaag

SEQ ID NO: 164704 - RNA, 32 nt, Human
gauucucuccgcccugcacuuuugccagcuga

SEQ ID NO: 164705 - RNA, 32 nt, Human
gauucucucucccucuccgcguccagugcugg

SEQ ID NO: 164706 - RNA, 32 nt, Human
gauucucucucccucuuugcccagagcuuccc

SEQ ID NO: 164707 - RNA, 32 nt, Human
gauucucugaaaaagaaaucaucucugauuuc

SEQ ID NO: 164708 - RNA, 32 nt, Human
gauucucuggccagagaaaggaguagcugacu

SEQ ID NO: 164709 - RNA, 32 nt, Human
gauucucuggcuuauuguggcauucaugauau

SEQ ID NO: 164710 - RNA, 32 nt, Human
gauucucugggggagguuguuucuugagagua

SEQ ID NO: 164711 - RNA, 32 nt, Human
gauucucuuaccucagcuuccugaguagcugg

SEQ ID NO: 164712 - RNA, 32 nt, Human
gauucucuucacuauaacugagugguaauuua

SEQ ID NO: 164713 - RNA, 22 nt, Human
gauucucuuuaaaaaucaauga

SEQ ID NO: 164714 - RNA, 15 nt, Human
gauucugaaccccgg

SEQ ID NO: 164715 - RNA, 32 nt, Human
gauucugaagacaguguggagucaauaugcua

SEQ ID NO: 164716 - RNA, 32 nt, Human
gauucugaagccgagcaacuugcccaaguccu

SEQ ID NO: 164717 - RNA, 32 nt, Human
gauucugagaccuacuggaggcugaggaggag

SEQ ID NO: 164718 - RNA, 32 nt, Human
gauucugaggcaggaaggaauuugggucugga

SEQ ID NO: 164719 - RNA, 32 nt, Human
gauucugaggccucccuagccauggggaccug

SEQ ID NO: 164720 - RNA, 32 nt, Human
gauucugaugcaaguggucucuccagccuguc

SEQ ID NO: 164721 - RNA, 32 nt, Human
gauucugcaagggacagggggccugacuaccc

SEQ ID NO: 164722 - RNA, 32 nt, Human
gauucugccccaggagagguaaugcaccccug

SEQ ID NO: 164723 - RNA, 32 nt, Human
gauucugccucagcuccugucuugcugagccc

SEQ ID NO: 164724 - RNA, 32 nt, Human
gauucugccuguaaucccagaauuuugggagg

SEQ ID NO: 164725 - RNA, 32 nt, Human
gauucugcuaaagcuucucugucuuucccugu

SEQ ID NO: 164726 - RNA, 24 nt, Human
gauucugcuaccaucuuucucuua

SEQ ID NO: 164727 - RNA, 32 nt, Human
gauucuggaagcuuccugaaggauuugagugg

SEQ ID NO: 164728 - RNA, 32 nt, Human
gauucuggaaugcagaaggaggggucugggca

SEQ ID NO: 164729 - RNA, 32 nt, Human
gauucuggaccagaccaugcagccugaccugu

SEQ ID NO: 164730 - RNA, 32 nt, Human
gauucuggagccacagaagauagacagaugga

SEQ ID NO: 164731 - RNA, 32 nt, Human
gauucuggagccagagggagagaccccagaaa

SEQ ID NO: 164732 - RNA, 32 nt, Human
gauucugggaacagaugaaacuuuuugcaucg

SEQ ID NO: 164733 - RNA, 32 nt, Human
gauucugggaggcaauggggagugacugcuaa

SEQ ID NO: 164734 - RNA, 32 nt, Human
gauucugggguuucuguguugaacgguucuug

SEQ ID NO: 164735 - RNA, 32 nt, Human
gauucugguagcuccuucuccuugugacaugg

SEQ ID NO: 164736 - RNA, 32 nt, Human
gauucuguaauauugggucuauugggcucugu

SEQ ID NO: 164737 - RNA, 32 nt, Human
gauucugucuauuggaacaaaaagccagugag

SEQ ID NO: 164738 - RNA, 32 nt, Human
gauucugugaguccuucuuucuaccuuugcuu

SEQ ID NO: 164739 - RNA, 32 nt, Human
gauucuguggauguuacuuaaagagaaaagca

SEQ ID NO: 164740 - RNA, 32 nt, Human
gauucuguguagguucugcaggcccaguguag

SEQ ID NO: 164741 - RNA, 32 nt, Human
gauucuguguguguccucagaugcucagccac

SEQ ID NO: 164742 - RNA, 32 nt, Human
gauucuguuaucuaaagaagcuuuuugcuggg

SEQ ID NO: 164743 - RNA, 32 nt, Human
gauucuguucugcccucggcugcagcagccuu

SEQ ID NO: 164744 - RNA, 32 nt, Human
gauucuguugucuugcauauguuauucucuca

SEQ ID NO: 164745 - RNA, 32 nt, Human
gauucuuauauucagcugccuuuuggauaucu

SEQ ID NO: 164746 - RNA, 32 nt, Human
gauucuucaaagaggcacagagccaaauuggu

SEQ ID NO: 164747 - RNA, 32 nt, Human
gauucuucaaagaguguguccacgauccuuug

SEQ ID NO: 164748 - RNA, 32 nt, Human
gauucuucaagcaaucacuaugucaacagaca

SEQ ID NO: 164749 - RNA, 32 nt, Human
gauucuucacgcccagccucugccucacagug

SEQ ID NO: 164750 - RNA, 32 nt, Human
gauucuucaucuuuaucacucucuaugagaag

SEQ ID NO: 164751 - RNA, 32 nt, Human
gauucuucauuaucuucaugguguuuuguugu

SEQ ID NO: 164752 - RNA, 32 nt, Human
gauucuucauuucuucuuccuacugccuccac

SEQ ID NO: 164753 - RNA, 32 nt, Human
gauucuucccgagauagccaccuggaaacacu

SEQ ID NO: 164754 - RNA, 32 nt, Human
gauucuuccucacagcccucagaaggauccag

SEQ ID NO: 164755 - RNA, 32 nt, Human
gauucuuccucucccuucgucagcuuuuccuc

SEQ ID NO: 164756 - RNA, 32 nt, Human
gauucuucucucucauuuuaucccucaccugu

SEQ ID NO: 164757 - RNA, 32 nt, Human
gauucuugaaauugucuaacauguggguacug

SEQ ID NO: 164758 - RNA, 32 nt, Human
gauucuugcaucccuggcugggauccacgacg

SEQ ID NO: 164759 - RNA, 32 nt, Human
gauucuugcccgagugggcagcugagcagagg

SEQ ID NO: 164760 - RNA, 32 nt, Human
gauucuuguugggagcuuaagaauagauuccu

SEQ ID NO: 164761 - RNA, 32 nt, Human
gauucuuuaaggcugcaauacaagcauucagu

SEQ ID NO: 164762 - RNA, 32 nt, Human
gauucuuuugggugucuuuuguuuuccuacac

SEQ ID NO: 164763 - RNA, 32 nt, Human
gauucuuuugguucccuccuggagguucauac

SEQ ID NO: 164764 - RNA, 32 nt, Human
gauucuuuuguuuguuguugugguguuguucu

SEQ ID NO: 164765 - RNA, 32 nt, Human
gauucuuuuugucgucauugcuggugacucau

SEQ ID NO: 164766 - RNA, 32 nt, Human
gauugaaaacaugcuuaaccacuagcaaucaa

SEQ ID NO: 164767 - RNA, 32 nt, Human
gauugaaagcgugugcuuuacccaucugcugu

SEQ ID NO: 164768 - RNA, 32 nt, Human
gauugaaaugcagauuuaacaaucuuauaauc

SEQ ID NO: 164769 - RNA, 32 nt, Human
gauugaacaagaaaucccagccuuucuaggug

SEQ ID NO: 164770 - RNA, 32 nt, Human
gauugaaccccaauucagccauggugacuccu

SEQ ID NO: 164771 - RNA, 32 nt, Human
gauugaacuagacacagacacaugagcaggac

SEQ ID NO: 164772 - RNA, 32 nt, Human
gauugaagcccagccacccaaaguuucugagg

SEQ ID NO: 164773 - RNA, 32 nt, Human
gauugaaggaagcauggucauaguugcccugg

SEQ ID NO: 164774 - RNA, 32 nt, Human
gauugaaggacccgguggaccuugggguuggu

SEQ ID NO: 164775 - RNA, 32 nt, Human
gauugacacuggaggcagauaguugcaaaguu

SEQ ID NO: 164776 - RNA, 32 nt, Human
gauugacacuggcugucaaacucauccuucaa

SEQ ID NO: 164777 - RNA, 32 nt, Human
gauugacauuacagcacagaaaacuguuagug

SEQ ID NO: 164778 - RNA, 32 nt, Human
gauugacugucaggcauggcuuuguuucuagu

SEQ ID NO: 164779 - RNA, 32 nt, Human
gauugacuucagaaacuuuuucuaaauuauaa

SEQ ID NO: 164780 - RNA, 32 nt, Human
gauugacuuggagguggacaauggaccugcgc

SEQ ID NO: 164781 - RNA, 32 nt, Human
gauugagaaacuaugguucaagaagagaggac

SEQ ID NO: 164782 - RNA, 32 nt, Human
gauugagaacacacuggcaguugaaucuugag

SEQ ID NO: 164783 - RNA, 32 nt, Human
gauugagaacucaacuguauuuugccauaaau

SEQ ID NO: 164784 - RNA, 32 nt, Human
gauugagaccagccuggccaacauggugaaac

SEQ ID NO: 164785 - RNA, 32 nt, Human
gauugagaccagccugggcaacauaguaagac

SEQ ID NO: 164786 - RNA, 32 nt, Human
gauugagaccuacaggcugacguuccgggcaa

SEQ ID NO: 164787 - RNA, 32 nt, Human
gauugagacuccugccucagucacauuugguu

SEQ ID NO: 164788 - RNA, 32 nt, Human
gauugagaggaguuccagaccaaccugggcaa

SEQ ID NO: 164789 - RNA, 32 nt, Human
gauugagcaacuguacuccagcuuggcgacag

SEQ ID NO: 164790 - RNA, 32 nt, Human
gauugagcauuggaagggguaucagagaccau

SEQ ID NO: 164791 - RNA, 32 nt, Human
gauugagccaauauacaaauaccucaucuguu

SEQ ID NO: 164792 - RNA, 32 nt, Human
gauugagccacugcacuccaaucugggugaca

SEQ ID NO: 164793 - RNA, 32 nt, Human
gauugagccacugcacuccagccucggccaca

SEQ ID NO: 164794 - RNA, 32 nt, Human
gauugagccacugcacuccagccugggugaca

SEQ ID NO: 164795 - RNA, 32 nt, Human
gauugagccacugcacuccagccugggugacu

SEQ ID NO: 164796 - RNA, 32 nt, Human
gauugagccagugagguccaggcugcacuaag

SEQ ID NO: 164797 - RNA, 32 nt, Human
gauugagccauugcucuccagccugggugaca

SEQ ID NO: 164798 - RNA, 32 nt, Human
gauugagccugcgaggccaaggcugcagcagg

SEQ ID NO: 164799 - RNA, 32 nt, Human
gauugagcuuagauugccucucuagacaacua

SEQ ID NO: 164800 - RNA, 32 nt, Human
gauugaggagagaauuauucuuggugggaaca

SEQ ID NO: 164801 - RNA, 32 nt, Human
gauugaggagugaggaaggcaggaagagagca

SEQ ID NO: 164802 - RNA, 32 nt, Human
gauugaggcaugaguaagacccaaugagggga

SEQ ID NO: 164803 - RNA, 32 nt, Human
gauugaggcuaggaaagguugaagcaagagaa

SEQ ID NO: 164804 - RNA, 32 nt, Human
gauugagggaggaggaggaggaagagguaugg

SEQ ID NO: 164805 - RNA, 32 nt, Human
gauugagggcuuaagacuggauccugacagug

SEQ ID NO: 164806 - RNA, 32 nt, Human
gauugagggugggucugccucucccagcccac

SEQ ID NO: 164807 - RNA, 32 nt, Human
gauugaggguucaccucugccuuggggaggcu

SEQ ID NO: 164808 - RNA, 32 nt, Human
gauugagguuagggcugguggugagggaucau

SEQ ID NO: 164809 - RNA, 32 nt, Human
gauugaguaugaaccacagcuguguuuucaaa

SEQ ID NO: 164810 - RNA, 32 nt, Human
gauugagucaucgacauucaggauuuaagucu

SEQ ID NO: 164811 - RNA, 32 nt, Human
gauugagucuauuuuucacugaucucagcaac

SEQ ID NO: 164812 - RNA, 32 nt, Human
gauugagucuugcucuuguuucccaggcugga

SEQ ID NO: 164813 - RNA, 32 nt, Human
gauugagugcugcuguuaguuuagagaaggag

SEQ ID NO: 164814 - RNA, 32 nt, Human
gauugaguuucacuuccucacugacauuuugu

SEQ ID NO: 164815 - RNA, 32 nt, Human
gauugauacugaugcacugcaucccaaaccau

SEQ ID NO: 164816 - RNA, 32 nt, Human
gauugauaggcacuuccucuugcucagugcaa

SEQ ID NO: 164817 - RNA, 32 nt, Human
gauugaucuauucuugcacgauuuccucugaa

SEQ ID NO: 164818 - RNA, 32 nt, Human
gauugaucuguaauuauugggauuauuuauuc

SEQ ID NO: 164819 - RNA, 32 nt, Human
gauugaugccagccccuccaaaggcucuuucc

SEQ ID NO: 164820 - RNA, 32 nt, Human
gauugaugcugauagaagagccuggacagaug

SEQ ID NO: 164821 - RNA, 32 nt, Human
gauugaugggcuggggaacccuggagagccuc

SEQ ID NO: 164822 - RNA, 32 nt, Human
gauugaugguaguuuggccuguuaguuccugu

SEQ ID NO: 164823 - RNA, 32 nt, Human
gauugauuuuuauuuuauucuauuauuuucuc

SEQ ID NO: 164824 - RNA, 32 nt, Human
gauugcaaacacacaaacaguuggaacagagc

SEQ ID NO: 164825 - RNA, 32 nt, Human
gauugcaacacugccacuccagccugggugac

SEQ ID NO: 164826 - RNA, 32 nt, Human
gauugcaaccuugacaggccacugccucuuaa

SEQ ID NO: 164827 - RNA, 32 nt, Human
gauugcaacuccuggauuucucuuacacuaga

SEQ ID NO: 164828 - RNA, 32 nt, Human
gauugcaaucacagcaaacuuuguuauuuuua

SEQ ID NO: 164829 - RNA, 32 nt, Human
gauugcacaauugcacuccagccuggcgacag

SEQ ID NO: 164830 - RNA, 32 nt, Human
gauugcacacugcacuccagccugggugacua

SEQ ID NO: 164831 - RNA, 32 nt, Human
gauugcacagcugcacuccagccugugcugag

SEQ ID NO: 164832 - RNA, 32 nt, Human
gauugcaccacagcacucaagccugggugaca

SEQ ID NO: 164833 - RNA, 32 nt, Human
gauugcaccacagcacuccaaccugggugaca

SEQ ID NO: 164834 - RNA, 32 nt, Human
gauugcaccaccacacuccagccugcgcgaca

SEQ ID NO: 164835 - RNA, 32 nt, Human
gauugcaccaccacacuccagccugggugaca

SEQ ID NO: 164836 - RNA, 32 nt, Human
gauugcaccaccgcacuccagccugggugaca

SEQ ID NO: 164837 - RNA, 32 nt, Human
gauugcaccacggcacgcuagccugggugaca

SEQ ID NO: 164838 - RNA, 32 nt, Human
gauugcaccacggcacuccagccugggugaca

SEQ ID NO: 164839 - RNA, 32 nt, Human
gauugcaccacuacacuccagccuggaugaca

SEQ ID NO: 164840 - RNA, 32 nt, Human
gauugcaccacuacacuccagccugggcaaca

SEQ ID NO: 164841 - RNA, 32 nt, Human
gauugcaccacuacacuccagccugggugaca

SEQ ID NO: 164842 - RNA, 32 nt, Human
gauugcaccacugcacgccagccugggugaaa

SEQ ID NO: 164843 - RNA, 32 nt, Human
gauugcaccacugcacuacagcuugggugaca

SEQ ID NO: 164844 - RNA, 32 nt, Human
gauugcaccacugcacucaagccugggcaaca

SEQ ID NO: 164845 - RNA, 32 nt, Human
gauugcaccacugcacuccaaccugggcaaca

SEQ ID NO: 164846 - RNA, 32 nt, Human
gauugcaccacugcacuccaaccugggugaca

SEQ ID NO: 164847 - RNA, 32 nt, Human
gauugcaccacugcacuccagcccaggcaaca

SEQ ID NO: 164848 - RNA, 32 nt, Human
gauugcaccacugcacuccagccggggugaca

SEQ ID NO: 164849 - RNA, 32 nt, Human
gauugcaccacugcacuccagccuaggcgaca

SEQ ID NO: 164850 - RNA, 32 nt, Human
gauugcaccacugcacuccagccugagugaca

SEQ ID NO: 164851 - RNA, 32 nt, Human
gauugcaccacugcacuccagccugagugagg

SEQ ID NO: 164852 - RNA, 32 nt, Human
gauugcaccacugcacuccagccuggaaaacg

SEQ ID NO: 164853 - RNA, 32 nt, Human
gauugcaccacugcacuccagccuggcgacaa

SEQ ID NO: 164854 - RNA, 32 nt, Human
gauugcaccacugcacuccagccugggcaaca

SEQ ID NO: 164855 - RNA, 32 nt, Human
gauugcaccacugcacuccagccugggcaaua

SEQ ID NO: 164856 - RNA, 32 nt, Human
gauugcaccacugcacuccagccugggcgaca

SEQ ID NO: 164857 - RNA, 32 nt, Human
gauugcaccacugcacuccagccugggcgacu

SEQ ID NO: 164858 - RNA, 32 nt, Human
gauugcaccacugcacuccagccugggcggca

SEQ ID NO: 164859 - RNA, 32 nt, Human
gauugcaccacugcacuccagccugggcuaca

SEQ ID NO: 164860 - RNA, 32 nt, Human
gauugcaccacugcacuccagccuggggacag

SEQ ID NO: 164861 - RNA, 32 nt, Human
gauugcaccacugcacuccagccuggguaaca

SEQ ID NO: 164862 - RNA, 32 nt, Human
gauugcaccacugcacuccagccugggugaca

SEQ ID NO: 164863 - RNA, 32 nt, Human
gauugcaccacugcacuccagccugggugaua

SEQ ID NO: 164864 - RNA, 32 nt, Human
gauugcaccacugcacuccagccuggguggca

SEQ ID NO: 164865 - RNA, 32 nt, Human
gauugcaccacugcacuccagccuggguguca

SEQ ID NO: 164866 - RNA, 32 nt, Human
gauugcaccacugcacuccagccuggugacag

SEQ ID NO: 164867 - RNA, 32 nt, Human
gauugcaccacugcacuccaggcuggguaaca

SEQ ID NO: 164868 - RNA, 32 nt, Human
gauugcaccacugcacuccagucugggcaaca

SEQ ID NO: 164869 - RNA, 32 nt, Human
gauugcaccacugcacuccagucugggugaga

SEQ ID NO: 164870 - RNA, 32 nt, Human
gauugcaccacugcacuccagucugguugaga

SEQ ID NO: 164871 - RNA, 32 nt, Human
gauugcaccacugcacucccuuccaggugaaa

SEQ ID NO: 164872 - RNA, 32 nt, Human
gauugcaccacugcacucuaacuugggcaaca

SEQ ID NO: 164873 - RNA, 32 nt, Human
gauugcaccacugcacucuacucugggugaca

SEQ ID NO: 164874 - RNA, 32 nt, Human
gauugcaccacugcacucuagccugcgugaca

SEQ ID NO: 164875 - RNA, 32 nt, Human
gauugcaccacugcacucuagccuggggaaca

SEQ ID NO: 164876 - RNA, 32 nt, Human
gauugcaccacugcacucuagccuggguaaca

SEQ ID NO: 164877 - RNA, 24 nt, Human
gauugcaccacugcacuucagccu

SEQ ID NO: 164878 - RNA, 32 nt, Human
gauugcaccacugcacuucagccuggugacag

SEQ ID NO: 164879 - RNA, 24 nt, Human
gauugcaccacugcacuucagcuu

SEQ ID NO: 164880 - RNA, 32 nt, Human
gauugcaccacugcacuucagcuugggcaaca

SEQ ID NO: 164881 - RNA, 24 nt, Human
gauugcaccacugcacuuuagucu

SEQ ID NO: 164882 - RNA, 32 nt, Human
gauugcaccacugcacuuuagucugggugaca

SEQ ID NO: 164883 - RNA, 32 nt, Human
gauugcaccacugcaguucagccuggaugaug

SEQ ID NO: 164884 - RNA, 32 nt, Human
gauugcaccacugcauuccaaccugggcggca

SEQ ID NO: 164885 - RNA, 32 nt, Human
gauugcaccacugcauuccagcauggccacaa

SEQ ID NO: 164886 - RNA, 32 nt, Human
gauugcaccacugcauuccagccuggaugaca

SEQ ID NO: 164887 - RNA, 32 nt, Human
gauugcaccacugcauuccagccuggcgacag

SEQ ID NO: 164888 - RNA, 32 nt, Human
gauugcaccacugcucuccagccuggggaaca

SEQ ID NO: 164889 - RNA, 32 nt, Human
gauugcaccacugcucucuagccugggcaaaa

SEQ ID NO: 164890 - RNA, 32 nt, Human
gauugcaccacuggacgccagccuaggcaaca

SEQ ID NO: 164891 - RNA, 32 nt, Human
gauugcaccacuguacuccaaccugggcgaca

SEQ ID NO: 164892 - RNA, 32 nt, Human
gauugcaccacuguacuccagacuggauaaca

SEQ ID NO: 164893 - RNA, 32 nt, Human
gauugcaccacuguacuccagccugggcaaca

SEQ ID NO: 164894 - RNA, 32 nt, Human
gauugcaccacuguacuccagccugggugaca

SEQ ID NO: 164895 - RNA, 32 nt, Human
gauugcaccacuuacuccagccugggcaacag

SEQ ID NO: 164896 - RNA, 32 nt, Human
gauugcaccacuucacuccagccugggugacg

SEQ ID NO: 164897 - RNA, 32 nt, Human
gauugcaccacuucaucccagccugggagaca

SEQ ID NO: 164898 - RNA, 32 nt, Human
gauugcaccacuuguaacuccagccugggcaa

SEQ ID NO: 164899 - RNA, 32 nt, Human
gauugcaccagugcacuccagcugggcgacag

SEQ ID NO: 164900 - RNA, 32 nt, Human
gauugcaccauugaacuccagccugggcaaca

SEQ ID NO: 164901 - RNA, 32 nt, Human
gauugcaccauugcaccuccagccugggcaac

SEQ ID NO: 164902 - RNA, 32 nt, Human
gauugcaccauugcacuccagccugcgcaaca

SEQ ID NO: 164903 - RNA, 32 nt, Human
gauugcaccauugcacuccagccuggcgacag

SEQ ID NO: 164904 - RNA, 32 nt, Human
gauugcaccauugcacuccagccugggcaaca

SEQ ID NO: 164905 - RNA, 32 nt, Human
gauugcaccauugcacuccagccugggcgaca

SEQ ID NO: 164906 - RNA, 32 nt, Human
gauugcaccauugcacuccagccugggugaca

SEQ ID NO: 164907 - RNA, 32 nt, Human
gauugcaccauugcacuccagccugugcaaca

SEQ ID NO: 164908 - RNA, 32 nt, Human
gauugcaccauugcacuccagcuugggugaca

SEQ ID NO: 164909 - RNA, 32 nt, Human
gauugcaccauugcauuccagccugggcaaca

SEQ ID NO: 164910 - RNA, 32 nt, Human
gauugcaccauugcauuccagccugggugaca

SEQ ID NO: 164911 - RNA, 32 nt, Human
gauugcaccauugcccuccagccugagcaaca

SEQ ID NO: 164912 - RNA, 32 nt, Human
gauugcaccauugcgcucuagccugggcaaca

SEQ ID NO: 164913 - RNA, 32 nt, Human
gauugcaccauuguacuccagccugggcaaua

SEQ ID NO: 164914 - RNA, 32 nt, Human
gauugcaccauuucauuccagccugggcaaca

SEQ ID NO: 164915 - RNA, 32 nt, Human
gauugcaccccugcacuccagccugggugaca

SEQ ID NO: 164916 - RNA, 32 nt, Human
gauugcaccccugcacuccaggcugggcaaca

SEQ ID NO: 164917 - RNA, 32 nt, Human
gauugcacccugcacucuagccugggcaacaa

SEQ ID NO: 164918 - RNA, 32 nt, Human
gauugcaccgcugcacuccagccuggcgacag

SEQ ID NO: 164919 - RNA, 32 nt, Human
gauugcaccgugacacuccagccugggcaaca

SEQ ID NO: 164920 - RNA, 32 nt, Human
gauugcaccuuuguacuccagccugggcaacg

SEQ ID NO: 164921 - RNA, 32 nt, Human
gauugcacgacugcacuccagccugggcaaug

SEQ ID NO: 164922 - RNA, 32 nt, Human
gauugcacuacuacacuccagccuggugacag

SEQ ID NO: 164923 - RNA, 32 nt, Human
gauugcacuacugcacuccagacuggugacgg

SEQ ID NO: 164924 - RNA, 32 nt, Human
gauugcacuacugcacuccagccugggugaca

SEQ ID NO: 164925 - RNA, 32 nt, Human
gauugcacuauugcacuccagccugggcaaca

SEQ ID NO: 164926 - RNA, 32 nt, Human
gauugcacuguucugauuauguaagcauuugu

SEQ ID NO: 164927 - RNA, 32 nt, Human
gauugcagacuggagggguaaccuccgcugag

SEQ ID NO: 164928 - RNA, 32 nt, Human
gauugcagagggcgcagcuccaccgugguaac

SEQ ID NO: 164929 - RNA, 32 nt, Human
gauugcagcaauguuggcuacauguauuauua

SEQ ID NO: 164930 - RNA, 32 nt, Human
gauugcagcugaucauagcucacugcagcuuc

SEQ ID NO: 164931 - RNA, 25 nt, Human
gauugcagcuuggcuauuugguuga

SEQ ID NO: 164932 - RNA, 18 nt, Human
gauugcaggcaugagcca

SEQ ID NO: 164933 - RNA, 32 nt, Human
gauugcauagucagugcuuccagcucugcucc

SEQ ID NO: 164934 - RNA, 32 nt, Human
gauugcaucacugcacuccagccugggcgaug

SEQ ID NO: 164935 - RNA, 32 nt, Human
gauugcaucacugcacuccagccugggugaca

SEQ ID NO: 164936 - RNA, 32 nt, Human
gauugcaucacugcacuccagcuugggugaca

SEQ ID NO: 164937 - RNA, 32 nt, Human
gauugcaucacugcacugcagccugggcaaca

SEQ ID NO: 164938 - RNA, 32 nt, Human
gauugcaucauugcacuccagccugggcaaca

SEQ ID NO: 164939 - RNA, 32 nt, Human
gauugcaugagacucguucaggagacaucugc

SEQ ID NO: 164940 - RNA, 32 nt, Human
gauugcauggcugcacucuagccugggugaca

SEQ ID NO: 164941 - RNA, 32 nt, Human
gauugcauuuaauagauaaaacguuuaggcaa

SEQ ID NO: 164942 - RNA, 32 nt, Human
gauugcauuuauggacuuuucacacacucauu

SEQ ID NO: 164943 - RNA, 32 nt, Human
gauugccaaauugacauguugucacauucuca

SEQ ID NO: 164944 - RNA, 32 nt, Human
gauugccaacgccucuggagugcuggcuggga

SEQ ID NO: 164945 - RNA, 32 nt, Human
gauugccacugcacuccagccugggcaacaag

SEQ ID NO: 164946 - RNA, 32 nt, Human
gauugccagaagcugcuggcuacaguggcuuu

SEQ ID NO: 164947 - RNA, 32 nt, Human
gauugcccacugcacuccagccugggcaacag

SEQ ID NO: 164948 - RNA, 32 nt, Human
gauugccccacugcacuccacccugggcaaug

SEQ ID NO: 164949 - RNA, 32 nt, Human
gauugccccacugcacuccagccuaggcaaca

SEQ ID NO: 164950 - RNA, 32 nt, Human
gauugcccccgcuacacuccagccuggucgac

SEQ ID NO: 164951 - RNA, 32 nt, Human
gauugccccuaucuugugcucuucugucugca

SEQ ID NO: 164952 - RNA, 32 nt, Human
gauugcccucauuaacaaucugaccagcucgu

SEQ ID NO: 164953 - RNA, 32 nt, Human
gauugcccugcuggcccuaccucacagcugaa

SEQ ID NO: 164954 - RNA, 32 nt, Human
gauugcccuguauugauguagaaaugucugua

SEQ ID NO: 164955 - RNA, 32 nt, Human
gauugccucaucaucccccauuuggucauuca

SEQ ID NO: 164956 - RNA, 32 nt, Human
gauugccucugcugacccucagucuccucccc

SEQ ID NO: 164957 - RNA, 32 nt, Human
gauugccugccucugcugcgucuuugcccacu

SEQ ID NO: 164958 - RNA, 22 nt, Human
gauugccuuuacuguguucuca

SEQ ID NO: 164959 - RNA, 32 nt, Human
gauugccuuuccccaggaucugugucggccau

SEQ ID NO: 164960 - RNA, 32 nt, Human
gauugcgagagcucggcaacccugccgacuca

SEQ ID NO: 164961 - RNA, 32 nt, Human
gauugcgccacagcauuccagccugggcgaug

SEQ ID NO: 164962 - RNA, 32 nt, Human
gauugcgccaccacacuccagccugggcaaca

SEQ ID NO: 164963 - RNA, 32 nt, Human
gauugcgccaccacugcacuccagccugggca

SEQ ID NO: 164964 - RNA, 32 nt, Human
gauugcgccaccgcacuccagccugggcaaca

SEQ ID NO: 164965 - RNA, 32 nt, Human
gauugcgccaccgcacuccagccugggcgaca

SEQ ID NO: 164966 - RNA, 32 nt, Human
gauugcgccacuacacucuagccugggcaacg

SEQ ID NO: 164967 - RNA, 32 nt, Human
gauugcgccacugcacaccagucuggagacag

SEQ ID NO: 164968 - RNA, 32 nt, Human
gauugcgccacugcacacuagcuugggugaca

SEQ ID NO: 164969 - RNA, 32 nt, Human
gauugcgccacugcaccccagcccgggugaca

SEQ ID NO: 164970 - RNA, 32 nt, Human
gauugcgccacugcaccccagccuggacaaca

SEQ ID NO: 164971 - RNA, 32 nt, Human
gauugcgccacugcaccccagccugggcgaca

SEQ ID NO: 164972 - RNA, 32 nt, Human
gauugcgccacugcaccccagccugggugaca

SEQ ID NO: 164973 - RNA, 32 nt, Human
gauugcgccacugcacucaagucugggcgaca

SEQ ID NO: 164974 - RNA, 32 nt, Human
gauugcgccacugcacuccaaccugggcaaua

SEQ ID NO: 164975 - RNA, 32 nt, Human
gauugcgccacugcacuccacccugggugaca

SEQ ID NO: 164976 - RNA, 32 nt, Human
gauugcgccacugcacuccagccagggcgaag

SEQ ID NO: 164977 - RNA, 32 nt, Human
gauugcgccacugcacuccagcccuggcgaca

SEQ ID NO: 164978 - RNA, 32 nt, Human
gauugcgccacugcacuccagccuaggugaua

SEQ ID NO: 164979 - RNA, 32 nt, Human
gauugcgccacugcacuccagccugacgacaa

SEQ ID NO: 164980 - RNA, 32 nt, Human
gauugcgccacugcacuccagccuggcgacag

SEQ ID NO: 164981 - RNA, 32 nt, Human
gauugcgccacugcacuccagccugggagaca

SEQ ID NO: 164982 - RNA, 32 nt, Human
gauugcgccacugcacuccagccugggcaaca

SEQ ID NO: 164983 - RNA, 32 nt, Human
gauugcgccacugcacuccagccugggcaaua

SEQ ID NO: 164984 - RNA, 32 nt, Human
gauugcgccacugcacuccagccugggcagca

SEQ ID NO: 164985 - RNA, 32 nt, Human
gauugcgccacugcacuccagccugggcgaca

SEQ ID NO: 164986 - RNA, 32 nt, Human
gauugcgccacugcacuccagccugggcgacg

SEQ ID NO: 164987 - RNA, 32 nt, Human
gauugcgccacugcacuccagccugggcuaca

SEQ ID NO: 164988 - RNA, 32 nt, Human
gauugcgccacugcacuccagccugggggaca

SEQ ID NO: 164989 - RNA, 32 nt, Human
gauugcgccacugcacuccagccuggguaaca

SEQ ID NO: 164990 - RNA, 32 nt, Human
gauugcgccacugcacuccagccugggugaca

SEQ ID NO: 164991 - RNA, 32 nt, Human
gauugcgccacugcacuccagccugggugacu

SEQ ID NO: 164992 - RNA, 32 nt, Human
gauugcgccacugcacuccagccugguugaca

SEQ ID NO: 164993 - RNA, 32 nt, Human
gauugcgccacugcacuccagcgugggcuaca

SEQ ID NO: 164994 - RNA, 32 nt, Human
gauugcgccacugcacuccagucugggcgaca

SEQ ID NO: 164995 - RNA, 32 nt, Human
gauugcgccacugcacuccagucuggucggca

SEQ ID NO: 164996 - RNA, 32 nt, Human
gauugcgccacugcacucuagccuaagcaaug

SEQ ID NO: 164997 - RNA, 32 nt, Human
gauugcgccacugcacuucagccuggaugaca

SEQ ID NO: 164998 - RNA, 32 nt, Human
gauugcgccacugcacuucagccugggcaaca

SEQ ID NO: 164999 - RNA, 32 nt, Human
gauugcgccacugcaguccgcagcccagccug

SEQ ID NO: 165000 - RNA, 32 nt, Human
gauugcgccacugcaguccgcaguccagccug

SEQ ID NO: 165001 - RNA, 32 nt, Human
gauugcgccacugcaguccgcaguccggccug

SEQ ID NO: 165002 - RNA, 32 nt, Human
gauugcgccacugcaguccgcagucuggccug

SEQ ID NO: 165003 - RNA, 32 nt, Human
gauugcgccacugcauuccagccugggugacu

SEQ ID NO: 165004 - RNA, 32 nt, Human
gauugcgccacugcauuccagcuugggcgaca

SEQ ID NO: 165005 - RNA, 32 nt, Human
gauugcgccacugcauucuagccuggaugaca

SEQ ID NO: 165006 - RNA, 32 nt, Human
gauugcgccacugcgcuccagccugggcaaca

SEQ ID NO: 165007 - RNA, 32 nt, Human
gauugcgccacuggacuccagccugcgugaca

SEQ ID NO: 165008 - RNA, 32 nt, Human
gauugcgccacuguacuccagccuggcaacag

SEQ ID NO: 165009 - RNA, 32 nt, Human
gauugcgccacuguacuccagccugggugacg

SEQ ID NO: 165010 - RNA, 32 nt, Human
gauugcgccacuguacuccagcuugggcaaca

SEQ ID NO: 165011 - RNA, 32 nt, Human
gauugcgccacuucacuccagccugggugaca

SEQ ID NO: 165012 - RNA, 32 nt, Human
gauugcgccagugcacuccagcugggcgacag

SEQ ID NO: 165013 - RNA, 32 nt, Human
gauugcgccauugcacuccagccuagguaaca

SEQ ID NO: 165014 - RNA, 32 nt, Human
gauugcgccauugcacuccagccugggcaaaa

SEQ ID NO: 165015 - RNA, 32 nt, Human
gauugcgccauugcacuccagccugggcaaca

SEQ ID NO: 165016 - RNA, 32 nt, Human
gauugcgccauugcacuccagccugggcaacg

SEQ ID NO: 165017 - RNA, 32 nt, Human
gauugcgccauugcacuccagccuggggacaa

SEQ ID NO: 165018 - RNA, 32 nt, Human
gauugcgccauugcagcacagccugguuacag

SEQ ID NO: 165019 - RNA, 32 nt, Human
gauugcgccauugcagggcagccugguuacag

SEQ ID NO: 165020 - RNA, 32 nt, Human
gauugcgccauugcauuccagccugggcaaca

SEQ ID NO: 165021 - RNA, 32 nt, Human
gauugcgccauugcauuccagccugggugaca

SEQ ID NO: 165022 - RNA, 32 nt, Human
gauugcgccauuguacuccagccugggcaaca

SEQ ID NO: 165023 - RNA, 32 nt, Human
gauugcgccauuguacuccagccugggggaca

SEQ ID NO: 165024 - RNA, 32 nt, Human
gauugcgccauugugcuccagccugggugaca

SEQ ID NO: 165025 - RNA, 32 nt, Human
gauugcgcccccugcacuccagccugggcuuc

SEQ ID NO: 165026 - RNA, 32 nt, Human
gauugcgccccugcacuccaaccuggacaaca

SEQ ID NO: 165027 - RNA, 32 nt, Human
gauugcgccgcuacauuccagccugggcaaca

SEQ ID NO: 165028 - RNA, 32 nt, Human
gauugcgccgcugcacuccagccugggcaaca

SEQ ID NO: 165029 - RNA, 32 nt, Human
gauugcgccgcugcacuccagccugggcgaca

SEQ ID NO: 165030 - RNA, 32 nt, Human
gauugcgccguuguacuccagccugggcaaca

SEQ ID NO: 165031 - RNA, 32 nt, Human
gauugcgccugagauacaaggcccagaagccu

SEQ ID NO: 165032 - RNA, 32 nt, Human
gauugcgcuacuacgcuacagccugggugaca

SEQ ID NO: 165033 - RNA, 32 nt, Human
gauugcgcuacugaacuccagccuggguuaca

SEQ ID NO: 165034 - RNA, 32 nt, Human
gauugcgcuacugcacuccagccuaggcaaca

SEQ ID NO: 165035 - RNA, 32 nt, Human
gauugcgcuacugcacuccagccugggcgaca

SEQ ID NO: 165036 - RNA, 32 nt, Human
gauugcgcuacugcacuccagccugggugaca

SEQ ID NO: 165037 - RNA, 32 nt, Human
gauugcgcugcugcacuccaaccugggcgaca

SEQ ID NO: 165038 - RNA, 32 nt, Human
gauugcgucacugcacuccaaccugggugaca

SEQ ID NO: 165039 - RNA, 32 nt, Human
gauugcgucacugcacuccagccugagcaaca

SEQ ID NO: 165040 - RNA, 32 nt, Human
gauugcgucacugcacuccagccugggcgaca

SEQ ID NO: 165041 - RNA, 32 nt, Human
gauugcgucacugcacugcagccugggugaca

SEQ ID NO: 165042 - RNA, 32 nt, Human
gauugcuagacuccucuuccuccuggacccca

SEQ ID NO: 165043 - RNA, 32 nt, Human
gauugcuaugugagcuggagagagaaaaggug

SEQ ID NO: 165044 - RNA, 32 nt, Human
gauugcucaaauacugauaucagcucaauguc

SEQ ID NO: 165045 - RNA, 32 nt, Human
gauugcucagcagcucugguggggcggguggg

SEQ ID NO: 165046 - RNA, 32 nt, Human
gauugcucagccacucaugccucaggcuccuc

SEQ ID NO: 165047 - RNA, 32 nt, Human
gauugcucaggucagcugcuuggggcucccag

SEQ ID NO: 165048 - RNA, 32 nt, Human
gauugcuccauugcacuccagccugggcaacg

SEQ ID NO: 165049 - RNA, 32 nt, Human
gauugcuccauugcacuccagccugggcgaua

SEQ ID NO: 165050 - RNA, 32 nt, Human
gauugcucuccucccgcuucaggccuaggaug

SEQ ID NO: 165051 - RNA, 32 nt, Human
gauugcucugcagccagugagggagguccccg

SEQ ID NO: 165052 - RNA, 32 nt, Human
gauugcucuuucuccuucuucccugagucucu

SEQ ID NO: 165053 - RNA, 32 nt, Human
gauugcugccaggcacuguucaucucaguuuu

SEQ ID NO: 165054 - RNA, 32 nt, Human
gauugcugcccuaaaggagaaugcucuuuccu

SEQ ID NO: 165055 - RNA, 21 nt, Human
gauugcuggaagugugacgga

SEQ ID NO: 165056 - RNA, 32 nt, Human
gauugcuguguguugccugggacacagaucaa

SEQ ID NO: 165057 - RNA, 32 nt, Human
gauugcuuaagagaucaagagguugaagcugc

SEQ ID NO: 165058 - RNA, 32 nt, Human
gauugcuucucuucucuccuccaaggucuagu

SEQ ID NO: 165059 - RNA, 32 nt, Human
gauugcuugagaccagccugggugacacagca

SEQ ID NO: 165060 - RNA, 32 nt, Human
gauugcuugaggccagccugggcaacauagug

SEQ ID NO: 165061 - RNA, 32 nt, Human
gauugcuugaguccagccugggcaguauagca

SEQ ID NO: 165062 - RNA, 32 nt, Human
gauugcuugaguccaggagaccagccugggca

SEQ ID NO: 165063 - RNA, 32 nt, Human
gauugcuuggcucaagacaagugugggcaaca

SEQ ID NO: 165064 - RNA, 32 nt, Human
gauugcuuugccugcugagguuaguuuuggga

SEQ ID NO: 165065 - RNA, 32 nt, Human
gauuggaaaauguuaggauggaccaagguggg

SEQ ID NO: 165066 - RNA, 32 nt, Human
gauuggaagccagccugcugucgcucuguggg

SEQ ID NO: 165067 - RNA, 32 nt, Human
gauuggaauucuuugaacccucgaagugcucc

SEQ ID NO: 165068 - RNA, 32 nt, Human
gauuggacaagcuucagcccacucuugaagcc

SEQ ID NO: 165069 - RNA, 32 nt, Human
gauuggacaguuucagaggccuuauuuuguca

SEQ ID NO: 165070 - RNA, 32 nt, Human
gauuggaccacuauacuccagccuggcaacag

SEQ ID NO: 165071 - RNA, 32 nt, Human
gauuggaccacugcucuccagccugggcaaca

SEQ ID NO: 165072 - RNA, 32 nt, Human
gauuggaccuggaagaagugagucuccucuca

SEQ ID NO: 165073 - RNA, 32 nt, Human
gauuggaggauagagccagcugucugacacac

SEQ ID NO: 165074 - RNA, 32 nt, Human
gauuggaguuggggagaaagaagacagauuag

SEQ ID NO: 165075 - RNA, 32 nt, Human
gauuggauaugagacagaagauauaagaauca

SEQ ID NO: 165076 - RNA, 32 nt, Human
gauuggcaaaggcccuugaggggcuuggggau

SEQ ID NO: 165077 - RNA, 32 nt, Human
gauuggcaacaggaacugaagcuuaaaguauu

SEQ ID NO: 165078 - RNA, 32 nt, Human
gauuggcaccagacuguauacccuucucuucu

SEQ ID NO: 165079 - RNA, 32 nt, Human
gauuggcacccaggcugggagcuugccaggaa

SEQ ID NO: 165080 - RNA, 32 nt, Human
gauuggcagcugcauccaaccuccaggucaaa

SEQ ID NO: 165081 - RNA, 18 nt, Human
gauuggcagcuucucucg

SEQ ID NO: 165082 - RNA, 32 nt, Human
gauuggcauaaagagcuucuguuuucuuuggc

SEQ ID NO: 165083 - RNA, 32 nt, Human
gauuggcauacguguucacaggcagaguaguu

SEQ ID NO: 165084 - RNA, 32 nt, Human
gauuggcauuguuuuugauucagcuuuuugga

SEQ ID NO: 165085 - RNA, 32 nt, Human
gauuggccaccaccccuccucacucucacccc

SEQ ID NO: 165086 - RNA, 32 nt, Human
gauuggccauugcacuccagccugggugacag

SEQ ID NO: 165087 - RNA, 32 nt, Human
gauuggcccagcuuggagugcuuguguggucc

SEQ ID NO: 165088 - RNA, 32 nt, Human
gauuggcccuccagagaaggggcggccccuuc

SEQ ID NO: 165089 - RNA, 32 nt, Human
gauuggcccuggcugcugccacacacauaucc

SEQ ID NO: 165090 - RNA, 32 nt, Human
gauuggccgggaauuugaggcugcaaggauag

SEQ ID NO: 165091 - RNA, 32 nt, Human
gauuggcucauuuugugcagaccuuagagcaa

SEQ ID NO: 165092 - RNA, 32 nt, Human
gauuggcuccaucccuccaggcucucauugug

SEQ ID NO: 165093 - RNA, 32 nt, Human
gauuggcugcccggaaggaggcggagacagcc

SEQ ID NO: 165094 - RNA, 32 nt, Human
gauugggaacuggaacccugaggucuuugagg

SEQ ID NO: 165095 - RNA, 32 nt, Human
gauugggaagaaguucaaagagcugaaccuca

SEQ ID NO: 165096 - RNA, 32 nt, Human
gauugggaaggcaccugcucccacagaagggg

SEQ ID NO: 165097 - RNA, 32 nt, Human
gauugggaauuuaucugccuaaucagacuuau

SEQ ID NO: 165098 - RNA, 32 nt, Human
gauugggacacacuuucuggacacugcuggcc

SEQ ID NO: 165099 - RNA, 32 nt, Human
gauugggacccacuuucugggcacugcuggcc

SEQ ID NO: 165100 - RNA, 32 nt, Human
gauugggagaggguaaggcaaacagcgacugc

SEQ ID NO: 165101 - RNA, 32 nt, Human
gauugggaggacuuuacugugguucugccuuc

SEQ ID NO: 165102 - RNA, 32 nt, Human
gauugggaggugcguguucagcagaaccugca

SEQ ID NO: 165103 - RNA, 32 nt, Human
gauugggcaaaagagagccagugaagauacaa

SEQ ID NO: 165104 - RNA, 32 nt, Human
gauugggccacugcacuccacccugggcgaca

SEQ ID NO: 165105 - RNA, 32 nt, Human
gauugggcuucuaaaucaaaagccugauguuc

SEQ ID NO: 165106 - RNA, 32 nt, Human
gauuggggaggcagcuuaucuccuaaaaggag

SEQ ID NO: 165107 - RNA, 32 nt, Human
gauuggggcucccugaggauggggcugugucu

SEQ ID NO: 165108 - RNA, 32 nt, Human
gauugggggaauggggagaugaugaugauggu

SEQ ID NO: 165109 - RNA, 32 nt, Human
gauugggggccuugcccggaagcuggaccuca

SEQ ID NO: 165110 - RNA, 32 nt, Human
gauuggggugagagaggaaggaagcacgccaa

SEQ ID NO: 165111 - RNA, 32 nt, Human
gauuggggugcacgaugacgucagaacacgug

SEQ ID NO: 165112 - RNA, 32 nt, Human
gauuggguaggugaaggggucaggggacuggu

SEQ ID NO: 165113 - RNA, 32 nt, Human
gauugggucuuggaacaaaaacaggacauuag

SEQ ID NO: 165114 - RNA, 32 nt, Human
gauugggugcaguggcucacaccugucauucc

SEQ ID NO: 165115 - RNA, 32 nt, Human
gauugggugccauguggaguggacauucaaaa

SEQ ID NO: 165116 - RNA, 32 nt, Human
gauuggguuuucaggcccucugcuccaccccu

SEQ ID NO: 165117 - RNA, 32 nt, Human
gauugguaaagugccacaguauuccagauaac

SEQ ID NO: 165118 - RNA, 32 nt, Human
gauugguaauuugccagcagaccucccaacuc

SEQ ID NO: 165119 - RNA, 32 nt, Human
gauuggucccaccgcacuccagccugggcaac

SEQ ID NO: 165120 - RNA, 32 nt, Human
gauuggucucaaacuccuggacucaagugauc

SEQ ID NO: 165121 - RNA, 32 nt, Human
gauuggucuggguggaugugagcagaagacua

SEQ ID NO: 165122 - RNA, 32 nt, Human
gauugguggguuguuuccuccuuuuugcuuuu

SEQ ID NO: 165123 - RNA, 32 nt, Human
gauugguguaaaccucuuguugugcauccuca

SEQ ID NO: 165124 - RNA, 32 nt, Human
gauugguguggaggcagaaagaggaaggagac

SEQ ID NO: 165125 - RNA, 32 nt, Human
gauugguguguauuggccaaguuuugcuuguu

SEQ ID NO: 165126 - RNA, 32 nt, Human
gauugguuagugaaggucagugugagaagaag

SEQ ID NO: 165127 - RNA, 32 nt, Human
gauugguuugcacuucuuggcuggguuccccc

SEQ ID NO: 165128 - RNA, 32 nt, Human
gauugguuuuauaguucauugaaaauccucaa

SEQ ID NO: 165129 - RNA, 32 nt, Human
gauuguaaauauaaacauuaacuuuccuauaa

SEQ ID NO: 165130 - RNA, 19 nt, Human
gauuguaaaugaguucuga

SEQ ID NO: 165131 - RNA, 32 nt, Human
gauuguaacuuaaauuaacgaggggaaacgac

SEQ ID NO: 165132 - RNA, 32 nt, Human
gauuguaaguuaccugaaagcugcaguucaca

SEQ ID NO: 165133 - RNA, 32 nt, Human
gauuguaauaauguuacaugaucaugggugug

SEQ ID NO: 165134 - RNA, 32 nt, Human
gauuguaccacugcacuccaaccuggguuaca

SEQ ID NO: 165135 - RNA, 32 nt, Human
gauuguaccacugcacuccagccugggcaaca

SEQ ID NO: 165136 - RNA, 32 nt, Human
gauuguaccacugcacuccagccugggcgaca

SEQ ID NO: 165137 - RNA, 32 nt, Human
gauuguaccacugcacuccagccugggugaca

SEQ ID NO: 165138 - RNA, 32 nt, Human
gauuguaccacugcacuccagccuggucaaug

SEQ ID NO: 165139 - RNA, 32 nt, Human
gauuguaccacugcacuccagcucggggaaca

SEQ ID NO: 165140 - RNA, 32 nt, Human
gauuguaccacugcacuccagucugggcaaca

SEQ ID NO: 165141 - RNA, 32 nt, Human
gauuguaccacugcacuccaguuuggcaacag

SEQ ID NO: 165142 - RNA, 32 nt, Human
gauuguaccacugcgcuccaaacugggugaca

SEQ ID NO: 165143 - RNA, 32 nt, Human
gauuguaccacuguacuccagccugggcugga

SEQ ID NO: 165144 - RNA, 32 nt, Human
gauuguaccacuguauuccagccuggacgacu

SEQ ID NO: 165145 - RNA, 32 nt, Human
gauuguaccaugcacuccagccuggguaacag

SEQ ID NO: 165146 - RNA, 32 nt, Human
gauuguaccauggcacuccagccuggacaaca

SEQ ID NO: 165147 - RNA, 32 nt, Human
gauuguaccauugcacuccagccugggcaaca

SEQ ID NO: 165148 - RNA, 32 nt, Human
gauuguagauuuuugcuuuuucuuuuuguuuu

SEQ ID NO: 165149 - RNA, 32 nt, Human
gauuguagcucugaagaaagcaaauggugaug

SEQ ID NO: 165150 - RNA, 32 nt, Human
gauuguaggcaagagggugaggaagagaugcu

SEQ ID NO: 165151 - RNA, 32 nt, Human
gauuguauaccuucuugguuucuuuuaagaau

SEQ ID NO: 165152 - RNA, 32 nt, Human
gauuguauccagaagcuucauccccaagauaa

SEQ ID NO: 165153 - RNA, 32 nt, Human
gauuguaugacugcacuccagccugggugaca

SEQ ID NO: 165154 - RNA, 32 nt, Human
gauuguaugcaguugguauucucuccaguaua

SEQ ID NO: 165155 - RNA, 32 nt, Human
gauuguauuuaccuucuaccucuuggcugccu

SEQ ID NO: 165156 - RNA, 32 nt, Human
gauuguauuuaugagugcaaguuuacaaauca

SEQ ID NO: 165157 - RNA, 32 nt, Human
gauugucacugcuguuccaagggcacacgcag

SEQ ID NO: 165158 - RNA, 32 nt, Human
gauugucauccuggcagguauugcugagggcc

SEQ ID NO: 165159 - RNA, 22 nt, Human
gauugucaucuccuuuggggug

SEQ ID NO: 165160 - RNA, 32 nt, Human
gauugucauuccacuccagguccuggcaaaug

SEQ ID NO: 165161 - RNA, 32 nt, Human
gauugucauuggcuuuuuccauaaaguuuaga

SEQ ID NO: 165162 - RNA, 32 nt, Human
gauuguccauguccagaaacaacagugucuuu

SEQ ID NO: 165163 - RNA, 32 nt, Human
gauugucccagccccucuucccuuccccucac

SEQ ID NO: 165164 - RNA, 32 nt, Human
gauuguccucagccuccacuuccccagaguaa

SEQ ID NO: 165165 - RNA, 32 nt, Human
gauuguccucaucaaucucuuuacaucuuuau

SEQ ID NO: 165166 - RNA, 32 nt, Human
gauugucuagacacagaugaugagacagaguu

SEQ ID NO: 165167 - RNA, 32 nt, Human
gauugucuccaucucuugaccuugugauccac

SEQ ID NO: 165168 - RNA, 32 nt, Human
gauugugacacugcacuccagccugggcaaca

SEQ ID NO: 165169 - RNA, 32 nt, Human
gauugugacacugcccuccagccugggugaca

SEQ ID NO: 165170 - RNA, 32 nt, Human
gauugugacuccccagccccugcccucaaagc

SEQ ID NO: 165171 - RNA, 32 nt, Human
gauugugaggcuuccccagccauguggaacua

SEQ ID NO: 165172 - RNA, 32 nt, Human
gauugugaggguucccucacagccagcacgac

SEQ ID NO: 165173 - RNA, 32 nt, Human
gauugugcaagagagaaggaagaacgaagcuu

SEQ ID NO: 165174 - RNA, 32 nt, Human
gauugugcacugcacucuagccugggggaaga

SEQ ID NO: 165175 - RNA, 32 nt, Human
gauugugccaauguacuccagccuaggugaca

SEQ ID NO: 165176 - RNA, 32 nt, Human
gauugugccacacacuccagccuggguggcaa

SEQ ID NO: 165177 - RNA, 32 nt, Human
gauugugccaccacacuccagccugggcgaca

SEQ ID NO: 165178 - RNA, 32 nt, Human
gauugugccaccgcacuccagcaugggugaca

SEQ ID NO: 165179 - RNA, 32 nt, Human
gauugugccacggcacuccagccugggcagca

SEQ ID NO: 165180 - RNA, 32 nt, Human
gauugugccacuacacuccagccuggccacag

SEQ ID NO: 165181 - RNA, 32 nt, Human
gauugugccacuacacuccagccuggccgaca

SEQ ID NO: 165182 - RNA, 32 nt, Human
gauugugccacuacacuccagccugggagaca

SEQ ID NO: 165183 - RNA, 32 nt, Human
gauugugccacuacacuccagccugggcaaca

SEQ ID NO: 165184 - RNA, 32 nt, Human
gauugugccacuacacuccagccugggugaca

SEQ ID NO: 165185 - RNA, 32 nt, Human
gauugugccacuccccuccagccugggcgaca

SEQ ID NO: 165186 - RNA, 32 nt, Human
gauugugccacugaacucuagccuggguaaca

SEQ ID NO: 165187 - RNA, 32 nt, Human
gauugugccacugcacaccagccuggacaaca

SEQ ID NO: 165188 - RNA, 32 nt, Human
gauugugccacugcacaccggccugggugaca

SEQ ID NO: 165189 - RNA, 32 nt, Human
gauugugccacugcacacuccaaucuggguga

SEQ ID NO: 165190 - RNA, 32 nt, Human
gauugugccacugcacgcacuccagccugggc

SEQ ID NO: 165191 - RNA, 32 nt, Human
gauugugccacugcacucaagccugggugacg

SEQ ID NO: 165192 - RNA, 32 nt, Human
gauugugccacugcacuccaaccugggugaca

SEQ ID NO: 165193 - RNA, 32 nt, Human
gauugugccacugcacuccacccugggcaaca

SEQ ID NO: 165194 - RNA, 32 nt, Human
gauugugccacugcacuccagccggggugaca

SEQ ID NO: 165195 - RNA, 32 nt, Human
gauugugccacugcacuccagccuaggcaaca

SEQ ID NO: 165196 - RNA, 32 nt, Human
gauugugccacugcacuccagccuaggcgaca

SEQ ID NO: 165197 - RNA, 32 nt, Human
gauugugccacugcacuccagccugagcaaca

SEQ ID NO: 165198 - RNA, 32 nt, Human
gauugugccacugcacuccagccuggacgaca

SEQ ID NO: 165199 - RNA, 32 nt, Human
gauugugccacugcacuccagccuggcaacag

SEQ ID NO: 165200 - RNA, 32 nt, Human
gauugugccacugcacuccagccugggagaca

SEQ ID NO: 165201 - RNA, 32 nt, Human
gauugugccacugcacuccagccugggcaaca

SEQ ID NO: 165202 - RNA, 32 nt, Human
gauugugccacugcacuccagccugggcaacu

SEQ ID NO: 165203 - RNA, 32 nt, Human
gauugugccacugcacuccagccugggcaaua

SEQ ID NO: 165204 - RNA, 32 nt, Human
gauugugccacugcacuccagccugggcacca

SEQ ID NO: 165205 - RNA, 32 nt, Human
gauugugccacugcacuccagccugggccaca

SEQ ID NO: 165206 - RNA, 32 nt, Human
gauugugccacugcacuccagccugggcgaca

SEQ ID NO: 165207 - RNA, 32 nt, Human
gauugugccacugcacuccagccugggcgaua

SEQ ID NO: 165208 - RNA, 32 nt, Human
gauugugccacugcacuccagccuggguaaca

SEQ ID NO: 165209 - RNA, 32 nt, Human
gauugugccacugcacuccagccugggugaaa

SEQ ID NO: 165210 - RNA, 32 nt, Human
gauugugccacugcacuccagccugggugaca

SEQ ID NO: 165211 - RNA, 32 nt, Human
gauugugccacugcacuccagccugggugacu

SEQ ID NO: 165212 - RNA, 32 nt, Human
gauugugccacugcacuccagccuggguggca

SEQ ID NO: 165213 - RNA, 32 nt, Human
gauugugccacugcacuccagccuggguuaca

SEQ ID NO: 165214 - RNA, 32 nt, Human
gauugugccacugcacuccagcgugggcaacg

SEQ ID NO: 165215 - RNA, 32 nt, Human
gauugugccacugcacuccagcuggguggcag

SEQ ID NO: 165216 - RNA, 32 nt, Human
gauugugccacugcacuccagcuuggugacag

SEQ ID NO: 165217 - RNA, 32 nt, Human
gauugugccacugcacuccagucuggacaaca

SEQ ID NO: 165218 - RNA, 32 nt, Human
gauugugccacugcacucccgccugggcgaca

SEQ ID NO: 165219 - RNA, 32 nt, Human
gauugugccacugcacucgagccugggugaca

SEQ ID NO: 165220 - RNA, 32 nt, Human
gauugugccacugcacucuagccuagguggcu

SEQ ID NO: 165221 - RNA, 32 nt, Human
gauugugccacugcacucuagccucggugaca

SEQ ID NO: 165222 - RNA, 32 nt, Human
gauugugccacugcacucuagccuggacagca

SEQ ID NO: 165223 - RNA, 32 nt, Human
gauugugccacugcacucuagccugggcaaua

SEQ ID NO: 165224 - RNA, 32 nt, Human
gauugugccacugcacucuagccugggugaca

SEQ ID NO: 165225 - RNA, 32 nt, Human
gauugugccacugcacugcaggcugggugaca

SEQ ID NO: 165226 - RNA, 32 nt, Human
gauugugccacugcacuucagccugggcgaca

SEQ ID NO: 165227 - RNA, 32 nt, Human
gauugugccacugcacuucagcuugggugaca

SEQ ID NO: 165228 - RNA, 32 nt, Human
gauugugccacugcauaccagccuaggugaca

SEQ ID NO: 165229 - RNA, 32 nt, Human
gauugugccacugcauucuagccugggcgaua

SEQ ID NO: 165230 - RNA, 32 nt, Human
gauugugccacugcccuccagccugggugaca

SEQ ID NO: 165231 - RNA, 32 nt, Human
gauugugccacugcgcuccagccugggcgaca

SEQ ID NO: 165232 - RNA, 32 nt, Human
gauugugccacugcucuccagccugggaggca

SEQ ID NO: 165233 - RNA, 32 nt, Human
gauugugccacuguacaccagccugggugaca

SEQ ID NO: 165234 - RNA, 32 nt, Human
gauugugccacuguacuccagccuggaagaca

SEQ ID NO: 165235 - RNA, 32 nt, Human
gauugugccacuguacuccagccugggagaua

SEQ ID NO: 165236 - RNA, 32 nt, Human
gauugugccacuguacuccagccugggcgaca

SEQ ID NO: 165237 - RNA, 32 nt, Human
gauugugccacuguacuccagccugggugaca

SEQ ID NO: 165238 - RNA, 32 nt, Human
gauugugccacuguacuccagccuggugacag

SEQ ID NO: 165239 - RNA, 32 nt, Human
gauugugccacuguacugcagccugggugaca

SEQ ID NO: 165240 - RNA, 32 nt, Human
gauugugccacuguuuuccagccugggcaaua

SEQ ID NO: 165241 - RNA, 32 nt, Human
gauugugccacuucacuccagccugggugaca

SEQ ID NO: 165242 - RNA, 32 nt, Human
gauugugccacuucauuccagccugggcgaca

SEQ ID NO: 165243 - RNA, 32 nt, Human
gauugugccacuucccuccagccugggcaaua

SEQ ID NO: 165244 - RNA, 32 nt, Human
gauugugccagugcacuccggccugggugaca

SEQ ID NO: 165245 - RNA, 32 nt, Human
gauugugccauugcacuccaaccugggcaaca

SEQ ID NO: 165246 - RNA, 32 nt, Human
gauugugccauugcacuccagccuggacaaca

SEQ ID NO: 165247 - RNA, 32 nt, Human
gauugugccauugcacuccagccugggcaaca

SEQ ID NO: 165248 - RNA, 32 nt, Human
gauugugccauugcacuccagccugggcaacg

SEQ ID NO: 165249 - RNA, 32 nt, Human
gauugugccauugcacuccagccugggcgaca

SEQ ID NO: 165250 - RNA, 32 nt, Human
gauugugccauugcacuccagccugggcuaca

SEQ ID NO: 165251 - RNA, 32 nt, Human
gauugugccauugcacuccagccugggugaca

SEQ ID NO: 165252 - RNA, 32 nt, Human
gauugugccauugcacuccagccugggugaua

SEQ ID NO: 165253 - RNA, 32 nt, Human
gauugugccauugcacucuagccugggcaaca

SEQ ID NO: 165254 - RNA, 32 nt, Human
gauugugccauuguacuccagccugggcgaca

SEQ ID NO: 165255 - RNA, 32 nt, Human
gauugugccccugcauucuagccugggugaca

SEQ ID NO: 165256 - RNA, 32 nt, Human
gauugugccgcaaccaccucagccuggaugac

SEQ ID NO: 165257 - RNA, 32 nt, Human
gauugugccgcugcacuccagccuggcgacaa

SEQ ID NO: 165258 - RNA, 32 nt, Human
gauugugcuacugcacucuagauugggugaca

SEQ ID NO: 165259 - RNA, 32 nt, Human
gauugugcugcugcacuccagccugggagaca

SEQ ID NO: 165260 - RNA, 32 nt, Human
gauugugcugcugcacuccagccugggugaaa

SEQ ID NO: 165261 - RNA, 32 nt, Human
gauuguggcacugcacuccagucugggugaca

SEQ ID NO: 165262 - RNA, 32 nt, Human
gauuguggcauugcacuccagccuggguggua

SEQ ID NO: 165263 - RNA, 32 nt, Human
gauuguggccacugugacucucaccagcagug

SEQ ID NO: 165264 - RNA, 32 nt, Human
gauuguggccaugugacugaacuuuagacagu

SEQ ID NO: 165265 - RNA, 32 nt, Human
gauuguggccucuggcugccucaggcauuuuc

SEQ ID NO: 165266 - RNA, 32 nt, Human
gauugugggcagccuccugcccucucuggguc

SEQ ID NO: 165267 - RNA, 32 nt, Human
gauugugggguggucaggaggccggcugccuu

SEQ ID NO: 165268 - RNA, 32 nt, Human
gauugugguaauucgagccaucuggagaaugc

SEQ ID NO: 165269 - RNA, 32 nt, Human
gauugugguauagggauaucuugucuuauuuu

SEQ ID NO: 165270 - RNA, 32 nt, Human
gauuguggugggcccugaguccugguuuccug

SEQ ID NO: 165271 - RNA, 32 nt, Human
gauugugucaaaugauuccuggaauccuuuac

SEQ ID NO: 165272 - RNA, 32 nt, Human
gauugugucacugcacuccagccugggcaaca

SEQ ID NO: 165273 - RNA, 32 nt, Human
gauugugucacugcacuccagcuugggugaca

SEQ ID NO: 165274 - RNA, 32 nt, Human
gauugugucauugcacuccagccugggcaaca

SEQ ID NO: 165275 - RNA, 32 nt, Human
gauuguguccuaggaagacuuuucuuuuccuc

SEQ ID NO: 165276 - RNA, 32 nt, Human
gauuguguggguugugggaugagaugcagcaa

SEQ ID NO: 165277 - RNA, 32 nt, Human
gauuguguuaguugaucaagaucaaggguaaa

SEQ ID NO: 165278 - RNA, 32 nt, Human
gauuguguuccuucccuaugggauccaucugu

SEQ ID NO: 165279 - RNA, 32 nt, Human
gauuguguucuuccucucucaggggugauaac

SEQ ID NO: 165280 - RNA, 32 nt, Human
gauuguguuuauggacuuuucacacacuaauu

SEQ ID NO: 165281 - RNA, 32 nt, Human
gauuguuaaacauuuggggaaauaugaacugu

SEQ ID NO: 165282 - RNA, 32 nt, Human
gauuguuacugugucuguguagaaagaaguag

SEQ ID NO: 165283 - RNA, 32 nt, Human
gauuguucaccuuugcugcauuugggaguuau

SEQ ID NO: 165284 - RNA, 32 nt, Human
gauuguucaucuucccucucugggucuccaga

SEQ ID NO: 165285 - RNA, 32 nt, Human
gauuguuccacugucuggaagcaccauccccu

SEQ ID NO: 165286 - RNA, 32 nt, Human
gauuguucuguucaacuaauagagaaccuaca

SEQ ID NO: 165287 - RNA, 32 nt, Human
gauuguugcaccauuagaagcuagguugaucc

SEQ ID NO: 165288 - RNA, 32 nt, Human
gauuguuggagaaugccagcugcuagaaaccu

SEQ ID NO: 165289 - RNA, 32 nt, Human
gauuguuggcaggccagccugcagugacagug

SEQ ID NO: 165290 - RNA, 32 nt, Human
gauuguuggcauggggacagagcggacuaacu

SEQ ID NO: 165291 - RNA, 32 nt, Human
gauuguuguaucaguggugauccuguuaauau

SEQ ID NO: 165292 - RNA, 32 nt, Human
gauuguugucauugcuaccgugguagucaccu

SEQ ID NO: 165293 - RNA, 32 nt, Human
gauuguuucugagcuugagaagcuucuggagg

SEQ ID NO: 165294 - RNA, 32 nt, Human
gauuguuugccucuuuggaaacuguuauccuu

SEQ ID NO: 165295 - RNA, 32 nt, Human
gauuguuugguuuuuggguuuuucccuaagcc

SEQ ID NO: 165296 - RNA, 32 nt, Human
gauuguuuucagguuugccaccagagaugcaa

SEQ ID NO: 165297 - RNA, 32 nt, Human
gauuuaaaaaggauucuccuucaaugugccuu

SEQ ID NO: 165298 - RNA, 32 nt, Human
gauuuaaaaccagcucaggagacgccaaggaa

SEQ ID NO: 165299 - RNA, 32 nt, Human
gauuuaacccaaguaaugcagcuuugauugau

SEQ ID NO: 165300 - RNA, 32 nt, Human
gauuuaacuccccacaggcaauggguuuauag

SEQ ID NO: 165301 - RNA, 32 nt, Human
gauuuaaggaagcacagaaaacuguaauuccu

SEQ ID NO: 165302 - RNA, 32 nt, Human
gauuuaaggcugguuguaagggaucagucagu

SEQ ID NO: 165303 - RNA, 32 nt, Human
gauuuaagggaagaccuucacacagauuuuuc

SEQ ID NO: 165304 - RNA, 32 nt, Human
gauuuaaggggcuguaaaaggcaaguucaggg

SEQ ID NO: 165305 - RNA, 32 nt, Human
gauuuaauaacuacagguuucucuccaauggc

SEQ ID NO: 165306 - RNA, 32 nt, Human
gauuuacaaauauuucauauuccaaugcuucg

SEQ ID NO: 165307 - RNA, 32 nt, Human
gauuuacaacugggggagggugaagugaagac

SEQ ID NO: 165308 - RNA, 32 nt, Human
gauuuacacacgucuucaguuuuucagcacag

SEQ ID NO: 165309 - RNA, 32 nt, Human
gauuuacacuaauugugagcagucuucuuaug

SEQ ID NO: 165310 - RNA, 19 nt, Human
gauuuacagcugaauucua

SEQ ID NO: 165311 - RNA, 32 nt, Human
gauuuacaucuuaggaaauaacauguauacuc

SEQ ID NO: 165312 - RNA, 32 nt, Human
gauuuacauucaacucugaucccugggccuua

SEQ ID NO: 165313 - RNA, 32 nt, Human
gauuuaccaagugcuucaaugagagcaguccu

SEQ ID NO: 165314 - RNA, 32 nt, Human
gauuuaccaguguuuuuaacuuccugcugggc

SEQ ID NO: 165315 - RNA, 20 nt, Human
gauuuacccugcccuugaac

SEQ ID NO: 165316 - RNA, 32 nt, Human
gauuuacccuggcacgugugccacuugcccag

SEQ ID NO: 165317 - RNA, 32 nt, Human
gauuuacuaaacaaaagaaacucuccaccuag

SEQ ID NO: 165318 - RNA, 31 nt, Human
gauuuacuauauaaggaggucagagauggac

SEQ ID NO: 165319 - RNA, 32 nt, Human
gauuuacuggaaucuauuggugcugcugcaug

SEQ ID NO: 165320 - RNA, 32 nt, Human
gauuuacuuccaccaucaaaucuucaacuguu

SEQ ID NO: 165321 - RNA, 32 nt, Human
gauuuacuugagauggaguuugguucuguccc

SEQ ID NO: 165322 - RNA, 32 nt, Human
gauuuagaaaaugcuagagcugaugcauauac

SEQ ID NO: 165323 - RNA, 32 nt, Human
gauuuagaaacugccuugaaaucuuuuaaauu

SEQ ID NO: 165324 - RNA, 32 nt, Human
gauuuagaaguacucagucacuuuaaguggau

SEQ ID NO: 165325 - RNA, 32 nt, Human
gauuuagagugaaggcaccaacuuggaaaugu

SEQ ID NO: 165326 - RNA, 32 nt, Human
gauuuagaucucaagaaauagaaagaacuaca

SEQ ID NO: 165327 - RNA, 32 nt, Human
gauuuagcagagagaggaggcagaggcuggga

SEQ ID NO: 165328 - RNA, 32 nt, Human
gauuuaggaaaugagugugugcaccaaagaca

SEQ ID NO: 165329 - RNA, 32 nt, Human
gauuuaggagaucuuguuaccuccucaucuac

SEQ ID NO: 165330 - RNA, 32 nt, Human
gauuuaggucaugucugcacauucugguggca

SEQ ID NO: 165331 - RNA, 32 nt, Human
gauuuaggugcugcucugcugcucuggauggc

SEQ ID NO: 165332 - RNA, 32 nt, Human
gauuuagguugcaaauguuucaagcaugugca

SEQ ID NO: 165333 - RNA, 32 nt, Human
gauuuagguuuuaaaaugccuccuaauaucau

SEQ ID NO: 165334 - RNA, 32 nt, Human
gauuuagugggacaagcaaaugacagaauacc

SEQ ID NO: 165335 - RNA, 32 nt, Human
gauuuagugggugggaagaggcccugaugcug

SEQ ID NO: 165336 - RNA, 32 nt, Human
gauuuauacuccugacgugucucauucacagc

SEQ ID NO: 165337 - RNA, 32 nt, Human
gauuuaucaccacugccuaaagaaaagcagag

SEQ ID NO: 165338 - RNA, 32 nt, Human
gauuuauccauuaucucauaaacaucugaaca

SEQ ID NO: 165339 - RNA, 18 nt, Human
gauuuaucccauaugcua

SEQ ID NO: 165340 - RNA, 32 nt, Human
gauuuauccugaacucauggaccucagaucuc

SEQ ID NO: 165341 - RNA, 32 nt, Human
gauuuauccuguaauuucaugcagcuuugugg

SEQ ID NO: 165342 - RNA, 32 nt, Human
gauuuaucuggucccuucccaucccagagcuu

SEQ ID NO: 165343 - RNA, 30 nt, Human
gauuuaugacccuuuccccaucacugagag

SEQ ID NO: 165344 - RNA, 25 nt, Human
gauuuaugaucuucauuuauuuuaa

SEQ ID NO: 165345 - RNA, 32 nt, Human
gauuuaugcuucuguaacacuuuuacagaaau

SEQ ID NO: 165346 - RNA, 32 nt, Human
gauuuauggaaauacacuaaaugaguaauuca

SEQ ID NO: 165347 - RNA, 32 nt, Human
gauuuaugguaucagaugcacauuuuuaacac

SEQ ID NO: 165348 - RNA, 32 nt, Human
gauuuauguaguaauuucuucucagguaugga

SEQ ID NO: 165349 - RNA, 30 nt, Human
gauuuaugucacugcacuucucuacucuca

SEQ ID NO: 165350 - RNA, 32 nt, Human
gauuuauucauagcuuaccuaagaauuucaaa

SEQ ID NO: 165351 - RNA, 32 nt, Human
gauuuauuugaagauggagcacugcugauuua

SEQ ID NO: 165352 - RNA, 32 nt, Human
gauuuauuuuccccugcaugugagaagcaguu

SEQ ID NO: 165353 - RNA, 32 nt, Human
gauuucaaacauuuucguuuuguggaguggug

SEQ ID NO: 165354 - RNA, 32 nt, Human
gauuucaaaccuggagaccucaucuucgccaa

SEQ ID NO: 165355 - RNA, 32 nt, Human
gauuucaaagaaaggaaggaaggaaggacaac

SEQ ID NO: 165356 - RNA, 32 nt, Human
gauuucaacacugagggccuggagaccucggc

SEQ ID NO: 165357 - RNA, 32 nt, Human
gauuucaagguacaaacgucucaccuuuuuac

SEQ ID NO: 165358 - RNA, 32 nt, Human
gauuucaagguacaaacuucucaccuuuauau

SEQ ID NO: 165359 - RNA, 32 nt, Human
gauuucaagguacaaacuucucaccuuuuuac

SEQ ID NO: 165360 - RNA, 32 nt, Human
gauuucaauguagcugucuccucuucaaauaa

SEQ ID NO: 165361 - RNA, 32 nt, Human
gauuucaccaccacuccagccugggugagaaa

SEQ ID NO: 165362 - RNA, 32 nt, Human
gauuucaccacugcauucuagccugggcaaca

SEQ ID NO: 165363 - RNA, 32 nt, Human
gauuucaccagugcacuccagccugggugaca

SEQ ID NO: 165364 - RNA, 32 nt, Human
gauuucaccauguugcccaggcuggucucgaa

SEQ ID NO: 165365 - RNA, 32 nt, Human
gauuucaccauguuggccaggcuggucucaaa

SEQ ID NO: 165366 - RNA, 32 nt, Human
gauuucaccauguuggccaggcuggucucgaa

SEQ ID NO: 165367 - RNA, 32 nt, Human
gauuucaccauguuggccaggcuggucuugaa

SEQ ID NO: 165368 - RNA, 32 nt, Human
gauuucaccauguuggccgggcuggucucaaa

SEQ ID NO: 165369 - RNA, 32 nt, Human
gauuucaccauguuggcuaggcuggucuugaa

SEQ ID NO: 165370 - RNA, 32 nt, Human
gauuucacccccgcgacuaucuccccaaaacg

SEQ ID NO: 165371 - RNA, 32 nt, Human
gauuucacuuugaauuguuugcuuaagaucac

SEQ ID NO: 165372 - RNA, 32 nt, Human
gauuucagacacauucuguuucuucauaaaaa

SEQ ID NO: 165373 - RNA, 32 nt, Human
gauuucagaugccccugcccucuugucugcca

SEQ ID NO: 165374 - RNA, 32 nt, Human
gauuucagauucccuuucaaucaugcccguuu

SEQ ID NO: 165375 - RNA, 32 nt, Human
gauuucagcucacuacaaccuccugcuccugg

SEQ ID NO: 165376 - RNA, 32 nt, Human
gauuucagcuggagccgccaggccaggccgcc

SEQ ID NO: 165377 - RNA, 32 nt, Human
gauuucaggaucagucaggaccugccaauguc

SEQ ID NO: 165378 - RNA, 32 nt, Human
gauuucaggcagcaggggcugcugugaugccg

SEQ ID NO: 165379 - RNA, 20 nt, Human
gauuucagggagcuggcuga

SEQ ID NO: 165380 - RNA, 24 nt, Human
gauuucagggugucuuccaacuga

SEQ ID NO: 165381 - RNA, 24 nt, Human
gauuucaggguguuuucuaacuga

SEQ ID NO: 165382 - RNA, 32 nt, Human
gauuucauaaauguaaaaugcacagaaaugca

SEQ ID NO: 165383 - RNA, 32 nt, Human
gauuucauacucgauagugucauuucaggauc

SEQ ID NO: 165384 - RNA, 32 nt, Human
gauuucauaugcaugaaacccaagcaaauuau

SEQ ID NO: 165385 - RNA, 32 nt, Human
gauuucaucacacuacucagaaaggcaugcag

SEQ ID NO: 165386 - RNA, 32 nt, Human
gauuucaucauguugcccaggcuggucuugaa

SEQ ID NO: 165387 - RNA, 32 nt, Human
gauuucaucauguuggccaggcuggucucgaa

SEQ ID NO: 165388 - RNA, 32 nt, Human
gauuucaucauguuggcuaggcuggucuugaa

SEQ ID NO: 165389 - RNA, 32 nt, Human
gauuucaucuuccuaaacuggaaaugucaaug

SEQ ID NO: 165390 - RNA, 32 nt, Human
gauuucauguacacaguauucacuugucuccc

SEQ ID NO: 165391 - RNA, 23 nt, Human
gauuucauguguuuccauuauuu

SEQ ID NO: 165392 - RNA, 24 nt, Human
gauuucauugauuuuacuaacugg

SEQ ID NO: 165393 - RNA, 32 nt, Human
gauuucauuuucaauaaauguagguuuguuac

SEQ ID NO: 165394 - RNA, 32 nt, Human
gauuuccacagcugccuccugucucagaaauc

SEQ ID NO: 165395 - RNA, 32 nt, Human
gauuuccagaggaaagcuagaggaucuaguuc

SEQ ID NO: 165396 - RNA, 32 nt, Human
gauuuccagccaaagccuccuccagccgccau

SEQ ID NO: 165397 - RNA, 32 nt, Human
gauuuccaggacugcccucuccagaaaaacag

SEQ ID NO: 165398 - RNA, 32 nt, Human
gauuuccaggagcugcaagggcagugagagga

SEQ ID NO: 165399 - RNA, 32 nt, Human
gauuucccaagugcauccucagaagcucuggg

SEQ ID NO: 165400 - RNA, 28 nt, Human
gauuucccaagugcccacucuccuuugu

SEQ ID NO: 165401 - RNA, 28 nt, Human
gauuucccaagugcuuuaccuuaucugu

SEQ ID NO: 165402 - RNA, 32 nt, Human
gauuucccacugcacuccagccugagugacag

SEQ ID NO: 165403 - RNA, 32 nt, Human
gauuucccauuuuaaagaagaaguggaucuaa

SEQ ID NO: 165404 - RNA, 24 nt, Human
gauuucccuaauuaguggugugug

SEQ ID NO: 165405 - RNA, 22 nt, Human
gauuucccuaguaaccuugcag

SEQ ID NO: 165406 - RNA, 32 nt, Human
gauuucccuucauuuaaacuaaauuacuguuu

SEQ ID NO: 165407 - RNA, 32 nt, Human
gauuuccucaaagacaacaacuaccugcccua

SEQ ID NO: 165408 - RNA, 32 nt, Human
gauuuccucugccucucucuuugcugagcuuu

SEQ ID NO: 165409 - RNA, 32 nt, Human
gauuuccuguuucauguagaauaguguuuguc

SEQ ID NO: 165410 - RNA, 32 nt, Human
gauuuccuuccccugcuccaucagccagacaa

SEQ ID NO: 165411 - RNA, 32 nt, Human
gauuuccuuguuauuauucaugauauuuagaa

SEQ ID NO: 165412 - RNA, 32 nt, Human
gauuucgccauguugcccaggcuggucucgaa

SEQ ID NO: 165413 - RNA, 32 nt, Human
gauuucgccauguuggccaggcuggucucgaa

SEQ ID NO: 165414 - RNA, 32 nt, Human
gauuucgccguguuggccaggcuggucucgaa

SEQ ID NO: 165415 - RNA, 32 nt, Human
gauuucgcuaccguacaacucugacaagggaa

SEQ ID NO: 165416 - RNA, 32 nt, Human
gauuucgcuucauaccauugccaagcaagaga

SEQ ID NO: 165417 - RNA, 32 nt, Human
gauuucguacuacugcuggggcugccaccucc

SEQ ID NO: 165418 - RNA, 32 nt, Human
gauuucuacuacccucucagucaccauguugc

SEQ ID NO: 165419 - RNA, 32 nt, Human
gauuucuauaaucacucgaugugauacaguau

SEQ ID NO: 165420 - RNA, 32 nt, Human
gauuucucaaugcuaacuaaucaagagaagua

SEQ ID NO: 165421 - RNA, 32 nt, Human
gauuucucaggaagacagcagagcagaggaau

SEQ ID NO: 165422 - RNA, 32 nt, Human
gauuucuccauguugaucaggcuggucaugaa

SEQ ID NO: 165423 - RNA, 32 nt, Human
gauuucucuccucgguccugaucaagguguua

SEQ ID NO: 165424 - RNA, 32 nt, Human
gauuucucugugagaaauguaaugcugacuuu

SEQ ID NO: 165425 - RNA, 32 nt, Human
gauuucucuucucuccacaccagaccucguuc

SEQ ID NO: 165426 - RNA, 32 nt, Human
gauuucugauaccuugucauuugggggauuuu

SEQ ID NO: 165427 - RNA, 32 nt, Human
gauuucugcacuaucuuuuucucaguuaccug

SEQ ID NO: 165428 - RNA, 21 nt, Human
gauuucugcauuuccaacuga

SEQ ID NO: 165429 - RNA, 32 nt, Human
gauuucugcuuuaaggaaaacugugaacuuuc

SEQ ID NO: 165430 - RNA, 32 nt, Human
gauuucuggaaggagaaaaaguguagguauuu

SEQ ID NO: 165431 - RNA, 31 nt, Human
gauuucuggacaaucucggcugcagacaucu

SEQ ID NO: 165432 - RNA, 29 nt, Human
gauuucuggcugcugucaccuccuugcuc

SEQ ID NO: 165433 - RNA, 32 nt, Human
gauuucugugcagaaccaaggacucagugcuu

SEQ ID NO: 165434 - RNA, 32 nt, Human
gauuucugugccagucaucugaccugauucuu

SEQ ID NO: 165435 - RNA, 32 nt, Human
gauuucuuagaaaugcugcucucucuauuuaa

SEQ ID NO: 165436 - RNA, 32 nt, Human
gauuucuuaguucucacagaacuucuaucauu

SEQ ID NO: 165437 - RNA, 32 nt, Human
gauuucuuauuuaaaaucagaauggaguuugc

SEQ ID NO: 165438 - RNA, 32 nt, Human
gauuucuucucagcuuucuccaccuuucaguu

SEQ ID NO: 165439 - RNA, 32 nt, Human
gauuucuucuccccugcuguuuccugcccauc

SEQ ID NO: 165440 - RNA, 32 nt, Human
gauuucuuggacuagugcaucucccuguauau

SEQ ID NO: 165441 - RNA, 32 nt, Human
gauuucuuugccaaguuaaugcacugaugacc

SEQ ID NO: 165442 - RNA, 19 nt, Human
gauuucuuuuccuggugga

SEQ ID NO: 165443 - RNA, 32 nt, Human
gauuugaacagcacauaugcucugguuugcuc

SEQ ID NO: 165444 - RNA, 32 nt, Human
gauuugaagaagagaagagagccucacaucuc

SEQ ID NO: 165445 - RNA, 32 nt, Human
gauuugaagaagaugacaggagauggagaagc

SEQ ID NO: 165446 - RNA, 32 nt, Human
gauuugaagccagucaucucagcacugucuga

SEQ ID NO: 165447 - RNA, 32 nt, Human
gauuugaauuuauaaagaaccugccuuccuuc

SEQ ID NO: 165448 - RNA, 32 nt, Human
gauuugaccucauuugcauugccaccaaggcc

SEQ ID NO: 165449 - RNA, 32 nt, Human
gauuugaccugcaccugucagucagguaagcg

SEQ ID NO: 165450 - RNA, 32 nt, Human
gauuugacuaaaucugccccgaggagggugaa

SEQ ID NO: 165451 - RNA, 32 nt, Human
gauuugacucaaagaggaaggauggaaaacau

SEQ ID NO: 165452 - RNA, 32 nt, Human
gauuugacuggaccuuuuacaggaagcuagag

SEQ ID NO: 165453 - RNA, 32 nt, Human
gauuugaggaacagcagaaaaaugauguggaa

SEQ ID NO: 165454 - RNA, 32 nt, Human
gauuugaggaacaguaaccaggaugugaauga

SEQ ID NO: 165455 - RNA, 32 nt, Human
gauuugaggccaggcguggaggcucacaccua

SEQ ID NO: 165456 - RNA, 32 nt, Human
gauuugagguuucccccugucuccuuauucgg

SEQ ID NO: 165457 - RNA, 32 nt, Human
gauuugaugaggaacuuaggagagaggaguuu

SEQ ID NO: 165458 - RNA, 32 nt, Human
gauuugaugccauggcaaaccucacugacuua

SEQ ID NO: 165459 - RNA, 32 nt, Human
gauuugauggacacugcaccagcuuccuucag

SEQ ID NO: 165460 - RNA, 32 nt, Human
gauuugauucgcccuccucccugucauagagc

SEQ ID NO: 165461 - RNA, 32 nt, Human
gauuugauugagucaccuugaaugacauaaca

SEQ ID NO: 165462 - RNA, 32 nt, Human
gauuugcacagucggcugggcggugcaauggc

SEQ ID NO: 165463 - RNA, 32 nt, Human
gauuugcacccacugcauuugcagccuugagg

SEQ ID NO: 165464 - RNA, 32 nt, Human
gauuugcaccgcuguacuccagccugggcaac

SEQ ID NO: 165465 - RNA, 22 nt, Human
gauuugcacuuuucuauccuca

SEQ ID NO: 165466 - RNA, 32 nt, Human
gauuugcagaguccaugaaacaggaacacucc

SEQ ID NO: 165467 - RNA, 32 nt, Human
gauuugcagggcaguggcauggagccccucuu

SEQ ID NO: 165468 - RNA, 32 nt, Human
gauuugcaggggauggggccuuuuccagggaa

SEQ ID NO: 165469 - RNA, 32 nt, Human
gauuugcauacauucuucaagaucccauuuga

SEQ ID NO: 165470 - RNA, 32 nt, Human
gauuugcaugugugaagccuuaaaccaaaacu

SEQ ID NO: 165471 - RNA, 31 nt, Human
gauuugccaguaggaacugagauucaacguc

SEQ ID NO: 165472 - RNA, 32 nt, Human
gauuugcccaaagcagccugacagcaaggggc

SEQ ID NO: 165473 - RNA, 32 nt, Human
gauuugcccccucugguagauaccagaacuau

SEQ ID NO: 165474 - RNA, 32 nt, Human
gauuugccgacagccuugcaggcugggcucag

SEQ ID NO: 165475 - RNA, 32 nt, Human
gauuugccucaaggccucuucaguauaaggaa

SEQ ID NO: 165476 - RNA, 32 nt, Human
gauuugccugugggagguaugggcaggagagg

SEQ ID NO: 165477 - RNA, 32 nt, Human
gauuugcuauucuguuccauuggucuacauga

SEQ ID NO: 165478 - RNA, 32 nt, Human
gauuugcuccacccucgagggcagccagacag

SEQ ID NO: 165479 - RNA, 18 nt, Human
gauuugcuccucugcaca

SEQ ID NO: 165480 - RNA, 32 nt, Human
gauuugcugcagcugugaagccauggccgugu

SEQ ID NO: 165481 - RNA, 32 nt, Human
gauuugcugccuccacacugucagcuccuugg

SEQ ID NO: 165482 - RNA, 32 nt, Human
gauuugcugcuggcucaguuuguugugauucu

SEQ ID NO: 165483 - RNA, 32 nt, Human
gauuugcugcuuauuaaaccuccuucuggacc

SEQ ID NO: 165484 - RNA, 32 nt, Human
gauuugcugggagugguagguggacauaucua

SEQ ID NO: 165485 - RNA, 32 nt, Human
gauuugcuuucuccauuagagcauuaagcuaa

SEQ ID NO: 165486 - RNA, 32 nt, Human
gauuugcuuuggugaaggacacgugucuucua

SEQ ID NO: 165487 - RNA, 32 nt, Human
gauuuggaacuccauuccaccugacccugugu

SEQ ID NO: 165488 - RNA, 32 nt, Human
gauuuggaagacaaagaaggagagauucaagc

SEQ ID NO: 165489 - RNA, 32 nt, Human
gauuuggaagccauuuggggaggcaggcuggg

SEQ ID NO: 165490 - RNA, 32 nt, Human
gauuuggagacaggagucaggccaggucugaa

SEQ ID NO: 165491 - RNA, 32 nt, Human
gauuuggagaccugggcuugaguuccagcuga

SEQ ID NO: 165492 - RNA, 32 nt, Human
gauuuggauaccuucaagacaccugaaccuua

SEQ ID NO: 165493 - RNA, 32 nt, Human
gauuuggcaugcuggaggcucuagggaaagcc

SEQ ID NO: 165494 - RNA, 32 nt, Human
gauuuggccauguugcccaggcuggucucgaa

SEQ ID NO: 165495 - RNA, 32 nt, Human
gauuuggcccugggaagcagcccagcguaccc

SEQ ID NO: 165496 - RNA, 32 nt, Human
gauuuggccuccccucucccccaugcuaauua

SEQ ID NO: 165497 - RNA, 32 nt, Human
gauuuggcuagaaggcugggccggcagcgguu

SEQ ID NO: 165498 - RNA, 32 nt, Human
gauuugggaagaacaaagaggccaggccccuc

SEQ ID NO: 165499 - RNA, 32 nt, Human
gauuugggaccuucauaucagcacuuuggacc

SEQ ID NO: 165500 - RNA, 32 nt, Human
gauuugggcaccugacuguccaguuuaccuua

SEQ ID NO: 165501 - RNA, 32 nt, Human
gauuuggggagcuguggagggugcaggaggaa

SEQ ID NO: 165502 - RNA, 32 nt, Human
gauuuggggagugguuaauugaaauagucaau

SEQ ID NO: 165503 - RNA, 32 nt, Human
gauuuggggcucagaaggcccugcucucuccc

SEQ ID NO: 165504 - RNA, 32 nt, Human
gauuugggugagacacuuuuccuugcugacuc

SEQ ID NO: 165505 - RNA, 32 nt, Human
gauuugggugagcuugaugcccagggaacaac

SEQ ID NO: 165506 - RNA, 32 nt, Human
gauuuggguguguugggaugaggcggagugcc

SEQ ID NO: 165507 - RNA, 32 nt, Human
gauuuggguucugccuguggcuauuugcuaca

SEQ ID NO: 165508 - RNA, 32 nt, Human
gauuugguagcccugggcaagagccuggaagc

SEQ ID NO: 165509 - RNA, 32 nt, Human
gauuuggucagaauuugaggccaguuuccuag

SEQ ID NO: 165510 - RNA, 32 nt, Human
gauuuggucagccuggcuuuugucgugguggc

SEQ ID NO: 165511 - RNA, 32 nt, Human
gauuuggugugugaaagguuccaagaaucagu

SEQ ID NO: 165512 - RNA, 32 nt, Human
gauuugguuucugagucuguggaggcaccgac

SEQ ID NO: 165513 - RNA, 32 nt, Human
gauuuguagguguggagggcuucaucaccggc

SEQ ID NO: 165514 - RNA, 32 nt, Human
gauuuguaguaucagcuuguugagcaaugacu

SEQ ID NO: 165515 - RNA, 32 nt, Human
gauuuguauauuuucgcuuucuccucaaguaa

SEQ ID NO: 165516 - RNA, 32 nt, Human
gauuuguaucucugugcuugaacuugaauggc

SEQ ID NO: 165517 - RNA, 32 nt, Human
gauuuguauucaaaauaaacauaguuuucaca

SEQ ID NO: 165518 - RNA, 32 nt, Human
gauuugucaaggauagaguacaguuguagggg

SEQ ID NO: 165519 - RNA, 32 nt, Human
gauuugucuuuuccucaccaccuucccuccaa

SEQ ID NO: 165520 - RNA, 32 nt, Human
gauuugugaauaucaucaucuuugccagacaa

SEQ ID NO: 165521 - RNA, 32 nt, Human
gauuuguggcccuuccccagaggaauugugga

SEQ ID NO: 165522 - RNA, 32 nt, Human
gauuugugugcaaaggaaaaucgugguugagu

SEQ ID NO: 165523 - RNA, 32 nt, Human
gauuugugugugguccaagaucauugcaguuu

SEQ ID NO: 165524 - RNA, 32 nt, Human
gauuugugugugugaaggacauaccacguuua

SEQ ID NO: 165525 - RNA, 32 nt, Human
gauuuguguuaugaaagauugagaaacuaaau

SEQ ID NO: 165526 - RNA, 32 nt, Human
gauuuguuaauuuccaugggaagccaugaugg

SEQ ID NO: 165527 - RNA, 32 nt, Human
gauuuguuagauugucaguuggaagggguuua

SEQ ID NO: 165528 - RNA, 19 nt, Human
gauuuguucuccuggugga

SEQ ID NO: 165529 - RNA, 22 nt, Human
gauuuguugauuuugcauuuga

SEQ ID NO: 165530 - RNA, 32 nt, Human
gauuuguuuaagaagaaaaaugaaaccagacc

SEQ ID NO: 165531 - RNA, 32 nt, Human
gauuuguuuugguagcuauuucacugaaggaa

SEQ ID NO: 165532 - RNA, 32 nt, Human
gauuuguuuuucuguucucuucuguccugucu

SEQ ID NO: 165533 - RNA, 32 nt, Human
gauuuuaaauagauuuccuuuuguaaaucaau

SEQ ID NO: 165534 - RNA, 32 nt, Human
gauuuuaacaaaagcaagacuguugcucaaau

SEQ ID NO: 165535 - RNA, 32 nt, Human
gauuuuaacacaugcuaauaaaagccaagaaa

SEQ ID NO: 165536 - RNA, 32 nt, Human
gauuuuaacauguuuuucugaaugaccagaug

SEQ ID NO: 165537 - RNA, 32 nt, Human
gauuuuaagauagaacaggcugguucugaguu

SEQ ID NO: 165538 - RNA, 32 nt, Human
gauuuuaagcuaccaacugugaugucacugaa

SEQ ID NO: 165539 - RNA, 32 nt, Human
gauuuuaagcucaaaaaggcaacagugguguc

SEQ ID NO: 165540 - RNA, 32 nt, Human
gauuuuaaguuggaacaguauuuucccauuga

SEQ ID NO: 165541 - RNA, 32 nt, Human
gauuuuaaugauucugagcacaugguuucugc

SEQ ID NO: 165542 - RNA, 32 nt, Human
gauuuuaaugcuuggcauagguggugaggggu

SEQ ID NO: 165543 - RNA, 18 nt, Human
gauuuuacagucaucuua

SEQ ID NO: 165544 - RNA, 32 nt, Human
gauuuuaccacugcacuccagcuugggcgacg

SEQ ID NO: 165545 - RNA, 32 nt, Human
gauuuuaccaugggauauuccauuuuagaaca

SEQ ID NO: 165546 - RNA, 32 nt, Human
gauuuuaccauguuggccaggcuggucucgaa

SEQ ID NO: 165547 - RNA, 32 nt, Human
gauuuuacuaugucgcccagacuggucucaaa

SEQ ID NO: 165548 - RNA, 32 nt, Human
gauuuuagcaggaagagacaggcaaggaaagg

SEQ ID NO: 165549 - RNA, 32 nt, Human
gauuuuaguuacagcugugauuuggaagggaa

SEQ ID NO: 165550 - RNA, 32 nt, Human
gauuuuauauccaccuaccuauucaucuaccu

SEQ ID NO: 165551 - RNA, 32 nt, Human
gauuuuauauuugacaauaaaguguuagacuc

SEQ ID NO: 165552 - RNA, 32 nt, Human
gauuuuaucauguuggccaggcuggucucgaa

SEQ ID NO: 165553 - RNA, 32 nt, Human
gauuuuaugcugcuguuuacaaaagcccaaug

SEQ ID NO: 165554 - RNA, 32 nt, Human
gauuuuaugugagagaaaaguuggaugcucac

SEQ ID NO: 165555 - RNA, 32 nt, Human
gauuuucacuucccacugagguugucauaaca

SEQ ID NO: 165556 - RNA, 32 nt, Human
gauuuucagauggggaaaugggggcucagaga

SEQ ID NO: 165557 - RNA, 32 nt, Human
gauuuucaguccagcacauacagucccagugc

SEQ ID NO: 165558 - RNA, 32 nt, Human
gauuuucaucccucgcacaaggacuacggguu

SEQ ID NO: 165559 - RNA, 32 nt, Human
gauuuucauggaggccaggacagagaguggua

SEQ ID NO: 165560 - RNA, 32 nt, Human
gauuuucauuuggggagaaugagggagaaaag

SEQ ID NO: 165561 - RNA, 32 nt, Human
gauuuuccaaaggaggugaccugugucucuca

SEQ ID NO: 165562 - RNA, 32 nt, Human
gauuuuccaauaaacugcuaucacaaugucaa

SEQ ID NO: 165563 - RNA, 19 nt, Human
gauuuucccuagaggccaa

SEQ ID NO: 165564 - RNA, 32 nt, Human
gauuuucccuuauggcuuucagaaggaaccaa

SEQ ID NO: 165565 - RNA, 32 nt, Human
gauuuuccucuacgugcuucagucuucucuac

SEQ ID NO: 165566 - RNA, 32 nt, Human
gauuuuccugguggugguauccaaaaucuuca

SEQ ID NO: 165567 - RNA, 32 nt, Human
gauuuuccuuuaauuucucuggaguaauacug

SEQ ID NO: 165568 - RNA, 32 nt, Human
gauuuucgggcugagaaggcaguaguuuucaa

SEQ ID NO: 165569 - RNA, 32 nt, Human
gauuuucuaaguggcuggcaccagagauaacu

SEQ ID NO: 165570 - RNA, 32 nt, Human
gauuuucuaggugaauuccugaugaauaccag

SEQ ID NO: 165571 - RNA, 32 nt, Human
gauuuucucaagauguagggugugugaauucu

SEQ ID NO: 165572 - RNA, 32 nt, Human
gauuuucucccaggagaggcuggaguguccaa

SEQ ID NO: 165573 - RNA, 32 nt, Human
gauuuucucuaauguaacuuccucuuaggaug

SEQ ID NO: 165574 - RNA, 32 nt, Human
gauuuucugggagcaaacuggucugccuuuac

SEQ ID NO: 165575 - RNA, 32 nt, Human
gauuuucugggagcuaucuugucuaccuugag

SEQ ID NO: 165576 - RNA, 32 nt, Human
gauuuucugugauaccaaaaucucagcuucac

SEQ ID NO: 165577 - RNA, 32 nt, Human
gauuuucuucuuuuucccccuguaggacugac

SEQ ID NO: 165578 - RNA, 32 nt, Human
gauuuugaaaaaugucuuuuccagcuuuuagu

SEQ ID NO: 165579 - RNA, 32 nt, Human
gauuuugaaaguacauaauauuuuauacuuug

SEQ ID NO: 165580 - RNA, 32 nt, Human
gauuuugaacagcuccgcaggugaaugaaagg

SEQ ID NO: 165581 - RNA, 32 nt, Human
gauuuugaauuuaggcugggugcaguggcuca

SEQ ID NO: 165582 - RNA, 32 nt, Human
gauuuugagauggggagauuaucugggagagc

SEQ ID NO: 165583 - RNA, 25 nt, Human
gauuuugagccucauauuucuuuga

SEQ ID NO: 165584 - RNA, 32 nt, Human
gauuuugaggaaaaggaggaucagaaguucaa

SEQ ID NO: 165585 - RNA, 32 nt, Human
gauuuugaugauagccacaaagcaagcagggu

SEQ ID NO: 165586 - RNA, 32 nt, Human
gauuuugcaacugcacuccagccugggcuaca

SEQ ID NO: 165587 - RNA, 32 nt, Human
gauuuugcagcgcuucaguguacguguuagag

SEQ ID NO: 165588 - RNA, 32 nt, Human
gauuuugcagggaaaguucuguuucuucuuug

SEQ ID NO: 165589 - RNA, 32 nt, Human
gauuuugccacugcacuccugccugggugaca

SEQ ID NO: 165590 - RNA, 32 nt, Human
gauuuugccagccuggugggugugaaguggau

SEQ ID NO: 165591 - RNA, 32 nt, Human
gauuuugccauguugcccaggcuggucucgaa

SEQ ID NO: 165592 - RNA, 32 nt, Human
gauuuugccauguuggccaggcuggucucgaa

SEQ ID NO: 165593 - RNA, 32 nt, Human
gauuuugccuuucuuuuggaaggaaggaggcg

SEQ ID NO: 165594 - RNA, 32 nt, Human
gauuuugcuguacuggguacuuccuuucccau

SEQ ID NO: 165595 - RNA, 32 nt, Human
gauuuugcuucucccuagugcugguauacuau

SEQ ID NO: 165596 - RNA, 32 nt, Human
gauuuuggauaaacugaccugauuuucuguua

SEQ ID NO: 165597 - RNA, 22 nt, Human
gauuuuggccaaauuacuuuaa

SEQ ID NO: 165598 - RNA, 32 nt, Human
gauuuuggcgucucacccucccuccucccgua

SEQ ID NO: 165599 - RNA, 32 nt, Human
gauuuugggaauugggaggcaaguuugauuau

SEQ ID NO: 165600 - RNA, 32 nt, Human
gauuuugggacuguucugucucauguuuaucu

SEQ ID NO: 165601 - RNA, 32 nt, Human
gauuuuggggagaagagaaucaccagcuuuau

SEQ ID NO: 165602 - RNA, 32 nt, Human
gauuuugggggagagagcagggaguggcucag

SEQ ID NO: 165603 - RNA, 32 nt, Human
gauuuuggugggaggaggagaaaacaauuguu

SEQ ID NO: 165604 - RNA, 32 nt, Human
gauuuugguuucuuuuggcuuucccuugccuu

SEQ ID NO: 165605 - RNA, 32 nt, Human
gauuuuguacauaguccucuggucuaucucau

SEQ ID NO: 165606 - RNA, 32 nt, Human
gauuuuguaguguugaaaucauagcuacuuac

SEQ ID NO: 165607 - RNA, 32 nt, Human
gauuuuguggccuggguuuuguugcauaccac

SEQ ID NO: 165608 - RNA, 32 nt, Human
gauuuuguuuggagccucagcaugccggggcc

SEQ ID NO: 165609 - RNA, 32 nt, Human
gauuuuguuuuagcuguaacagguaaugguuu

SEQ ID NO: 165610 - RNA, 32 nt, Human
gauuuuuaaaaaguaagagaguuucagagaag

SEQ ID NO: 165611 - RNA, 32 nt, Human
gauuuuuaccaucuggauacagccugguguaa

SEQ ID NO: 165612 - RNA, 32 nt, Human
gauuuuuacccaggccagugcagagagguguu

SEQ ID NO: 165613 - RNA, 32 nt, Human
gauuuuuacugauuguccuggaugaauagacu

SEQ ID NO: 165614 - RNA, 32 nt, Human
gauuuuuagccccugaucuacaaauguacauu

SEQ ID NO: 165615 - RNA, 32 nt, Human
gauuuuuagcugaaccaacaaggaggcuuuga

SEQ ID NO: 165616 - RNA, 32 nt, Human
gauuuuuauaaacccucuccagccucucccaa

SEQ ID NO: 165617 - RNA, 32 nt, Human
gauuuuuaucucucucaacuuccugcacuuaa

SEQ ID NO: 165618 - RNA, 32 nt, Human
gauuuuuaucuguuuacaaucaugucacacug

SEQ ID NO: 165619 - RNA, 32 nt, Human
gauuuuuaucuucucaccauuuuaccucuuuu

SEQ ID NO: 165620 - RNA, 32 nt, Human
gauuuuucaaagaauucuugcuggugagaaac

SEQ ID NO: 165621 - RNA, 32 nt, Human
gauuuuucaaauaucacugucauuucuauuuu

SEQ ID NO: 165622 - RNA, 32 nt, Human
gauuuuucaggaguucaagcgacaauggcagc

SEQ ID NO: 165623 - RNA, 32 nt, Human
gauuuuucauucugccacuccaucuucaaacc

SEQ ID NO: 165624 - RNA, 32 nt, Human
gauuuuucccagagaaagcuggucaggcccuc

SEQ ID NO: 165625 - RNA, 32 nt, Human
gauuuuuccucuucuguuccagcccucucuug

SEQ ID NO: 165626 - RNA, 32 nt, Human
gauuuuucuccucugucccgaggucgucgucu

SEQ ID NO: 165627 - RNA, 32 nt, Human
gauuuuugacaaacaguggcugcucugcugac

SEQ ID NO: 165628 - RNA, 32 nt, Human
gauuuuugagaacugauagugcaucagccgac

SEQ ID NO: 165629 - RNA, 32 nt, Human
gauuuuugagcagcaccugaagagccugaagc

SEQ ID NO: 165630 - RNA, 32 nt, Human
gauuuuuggacaaauucaauguuuuaauugaa

SEQ ID NO: 165631 - RNA, 32 nt, Human
gauuuuugggcccugaacgcgggcaugcuggu

SEQ ID NO: 165632 - RNA, 32 nt, Human
gauuuuugugcacucugcucuaaaacagauau

SEQ ID NO: 165633 - RNA, 32 nt, Human
gauuuuuguggucaacaaccaggaggagcuug

SEQ ID NO: 165634 - RNA, 32 nt, Human
gauuuuuguuauucuagcucaacuuacugaag

SEQ ID NO: 165635 - RNA, 32 nt, Human
gcaaaaacacagcagaaucaaugaguaaauuu

SEQ ID NO: 165636 - RNA, 17 nt, Human
gcaaaaacagaagcaaa

SEQ ID NO: 165637 - RNA, 21 nt, Human
gcaaaaacagucaaaaaaccc

SEQ ID NO: 165638 - RNA, 32 nt, Human
gcaaaaacauaaaacaaauaaaacuuccccca

SEQ ID NO: 165639 - RNA, 32 nt, Human
gcaaaaaccaccucauacacacacaauucagu

SEQ ID NO: 165640 - RNA, 32 nt, Human
gcaaaaagaaaugacuccuuuccuucaccucc

SEQ ID NO: 165641 - RNA, 32 nt, Human
gcaaaaagaaauucacugucuuuuaauaguga

SEQ ID NO: 165642 - RNA, 19 nt, Human
gcaaaaagaacaugcuucc

SEQ ID NO: 165643 - RNA, 22 nt, Human
gcaaaaagaagagugagaguga

SEQ ID NO: 165644 - RNA, 32 nt, Human
gcaaaaagaggaggaggaagaggagcucaggg

SEQ ID NO: 165645 - RNA, 32 nt, Human
gcaaaaagccagguuuuggggaugugucuuac

SEQ ID NO: 165646 - RNA, 32 nt, Human
gcaaaaagcugcagagaggauucggcccaaac

SEQ ID NO: 165647 - RNA, 22 nt, Human
gcaaaaaggaagagugggagga

SEQ ID NO: 165648 - RNA, 32 nt, Human
gcaaaaagucuacauacuuucauccugacucu

SEQ ID NO: 165649 - RNA, 32 nt, Human
gcaaaaagucugcaaaccccagggucaagccu

SEQ ID NO: 165650 - RNA, 32 nt, Human
gcaaaaagucugccaagugggaauguuuaaua

SEQ ID NO: 165651 - RNA, 32 nt, Human
gcaaaaaucagugguugcuaggggcuggaaug

SEQ ID NO: 165652 - RNA, 32 nt, Human
gcaaaaaugcagcauuccgcuuuuaacuaucu

SEQ ID NO: 165653 - RNA, 32 nt, Human
gcaaaaauguuuaaaaugcuuaucucuaagau

SEQ ID NO: 165654 - RNA, 20 nt, Human
gcaaaaauucugacguucuc

SEQ ID NO: 165655 - RNA, 32 nt, Human
gcaaaacaauuaagcacacaacuucuucuaua

SEQ ID NO: 165656 - RNA, 32 nt, Human
gcaaaacaccuaaaaugucaacagucaaaaug

SEQ ID NO: 165657 - RNA, 32 nt, Human
gcaaaacaggaaaguuuccagauagguauugu

SEQ ID NO: 165658 - RNA, 32 nt, Human
gcaaaacauccuuccuugaagccuagcacuga

SEQ ID NO: 165659 - RNA, 32 nt, Human
gcaaaacaucuccaaagaagucuuuuggaaca

SEQ ID NO: 165660 - RNA, 32 nt, Human
gcaaaaccauacuuagucaucaccaacaagcu

SEQ ID NO: 165661 - RNA, 32 nt, Human
gcaaaacccugaauccagccagucgugcacag

SEQ ID NO: 165662 - RNA, 32 nt, Human
gcaaaaccuuccagccuugccugcuugguguc

SEQ ID NO: 165663 - RNA, 32 nt, Human
gcaaaacuacacagucuugacuguguaguuuu

SEQ ID NO: 165664 - RNA, 32 nt, Human
gcaaaacuagaacguagccacuuuaaauauac

SEQ ID NO: 165665 - RNA, 20 nt, Human
gcaaaacuauugagccagug

SEQ ID NO: 165666 - RNA, 32 nt, Human
gcaaaacucaucuugaccccuguugcaggcaa

SEQ ID NO: 165667 - RNA, 32 nt, Human
gcaaaacucccagccgccucauggcaaaugcc

SEQ ID NO: 165668 - RNA, 32 nt, Human
gcaaaacucccaucgauguugccaucagucau

SEQ ID NO: 165669 - RNA, 32 nt, Human
gcaaaacugaaagcuucagggauuugcuguag

SEQ ID NO: 165670 - RNA, 32 nt, Human
gcaaaacuggaagcacagccucggggaugggg

SEQ ID NO: 165671 - RNA, 32 nt, Human
gcaaaacuuuccaacugaguggagucugauua

SEQ ID NO: 165672 - RNA, 32 nt, Human
gcaaaagaaacgugagaaggagggucucuugc

SEQ ID NO: 165673 - RNA, 32 nt, Human
gcaaaagaacagagguuucucaaaugccucag

SEQ ID NO: 165674 - RNA, 32 nt, Human
gcaaaagaaguggccaugugagagggacacuc

SEQ ID NO: 165675 - RNA, 32 nt, Human
gcaaaagagaaaaggagccaggcugggcuucc

SEQ ID NO: 165676 - RNA, 32 nt, Human
gcaaaagagcuuggcccugcugucuuucuucu

SEQ ID NO: 165677 - RNA, 32 nt, Human
gcaaaagaguucgagccccacuucaaacaacu

SEQ ID NO: 165678 - RNA, 19 nt, Human
gcaaaagcaacaaaacacc

SEQ ID NO: 165679 - RNA, 32 nt, Human
gcaaaagcagccugagcaacauagugagaccc

SEQ ID NO: 165680 - RNA, 32 nt, Human
gcaaaagccaaguaugcaaccaggaagcuuuu

SEQ ID NO: 165681 - RNA, 32 nt, Human
gcaaaagccuccaagcucuccaaaaagaaagc

SEQ ID NO: 165682 - RNA, 32 nt, Human
gcaaaagccuccgagcucuccaaaaagaaagc

SEQ ID NO: 165683 - RNA, 20 nt, Human
gcaaaagcgcagcgugcuug

SEQ ID NO: 165684 - RNA, 32 nt, Human
gcaaaagcuucaaauuaaaacagcugcauuag

SEQ ID NO: 165685 - RNA, 32 nt, Human
gcaaaaggacaguaaacuguggaccuugaagu

SEQ ID NO: 165686 - RNA, 32 nt, Human
gcaaaaggacugagcccaggagagcggggaca

SEQ ID NO: 165687 - RNA, 32 nt, Human
gcaaaaggagagaagagagaaauagccugcgc

SEQ ID NO: 165688 - RNA, 32 nt, Human
gcaaaaggcuagauaacuaacaacaccugggu

SEQ ID NO: 165689 - RNA, 32 nt, Human
gcaaaaggcugacgguauggaauauguuucca

SEQ ID NO: 165690 - RNA, 32 nt, Human
gcaaaagggccucucccuuuguguucuauaca

SEQ ID NO: 165691 - RNA, 32 nt, Human
gcaaaagggcuugccuaaggccagccauuuuu

SEQ ID NO: 165692 - RNA, 32 nt, Human
gcaaaaggggaagggaagaggcagucagagga

SEQ ID NO: 165693 - RNA, 32 nt, Human
gcaaaaggucagaacaguuaaacacugccuuu

SEQ ID NO: 165694 - RNA, 32 nt, Human
gcaaaagucagagaggcugacaaggaccaaug

SEQ ID NO: 165695 - RNA, 24 nt, Human
gcaaaagugcaagauggggaguga

SEQ ID NO: 165696 - RNA, 32 nt, Human
gcaaaagugggagcaggagcuuggaggugagc

SEQ ID NO: 165697 - RNA, 32 nt, Human
gcaaaaguuuuuaauaaaaggcauuuuuauag

SEQ ID NO: 165698 - RNA, 32 nt, Human
gcaaaauaagcauggauuaagugagaagggag

SEQ ID NO: 165699 - RNA, 32 nt, Human
gcaaaauaaguucugccugggcauuuuguaga

SEQ ID NO: 165700 - RNA, 21 nt, Human
gcaaaauacugagugucauug

SEQ ID NO: 165701 - RNA, 32 nt, Human
gcaaaauaguaagcuagcaucuuacugccguc

SEQ ID NO: 165702 - RNA, 32 nt, Human
gcaaaauauacauauaaacagaguaagccuuu

SEQ ID NO: 165703 - RNA, 32 nt, Human
gcaaaaucauggcucacugcagccuggagcuc

SEQ ID NO: 165704 - RNA, 32 nt, Human
gcaaaaucauguuccccacccccggggcagaa

SEQ ID NO: 165705 - RNA, 32 nt, Human
gcaaaauccauaccaaaacaacgacaacaacg

SEQ ID NO: 165706 - RNA, 18 nt, Human
gcaaaauccaucuucaga

SEQ ID NO: 165707 - RNA, 32 nt, Human
gcaaaaucucaaggccuggggcucagaguagu

SEQ ID NO: 165708 - RNA, 32 nt, Human
gcaaaaugaauccagauugcugucauuuucuu

SEQ ID NO: 165709 - RNA, 32 nt, Human
gcaaaaugagacauauuuacacuguuuauacu

SEQ ID NO: 165710 - RNA, 32 nt, Human
gcaaaaugaucuuccaaaccuguuaucuuuug

SEQ ID NO: 165711 - RNA, 17 nt, Human
gcaaaaugaugcuuucc

SEQ ID NO: 165712 - RNA, 32 nt, Human
gcaaaaugcacaauuccuacagaagaggcaag

SEQ ID NO: 165713 - RNA, 32 nt, Human
gcaaaauggaaagagaugaagauguuccaagg

SEQ ID NO: 165714 - RNA, 32 nt, Human
gcaaaauggcugcuugagcuacucugugucgu

SEQ ID NO: 165715 - RNA, 32 nt, Human
gcaaaaugggaaacauaauaccugccaucagg

SEQ ID NO: 165716 - RNA, 32 nt, Human
gcaaaauggggagggggaggaagcagugacuu

SEQ ID NO: 165717 - RNA, 32 nt, Human
gcaaaaugugugucagcacuuuucccuccuuu

SEQ ID NO: 165718 - RNA, 32 nt, Human
gcaaaauguuauuaucaggaaugaucgagaga

SEQ ID NO: 165719 - RNA, 32 nt, Human
gcaaaauuauauuguaacuuccccucacccca

SEQ ID NO: 165720 - RNA, 24 nt, Human
gcaaaauucauccuugcaacccca

SEQ ID NO: 165721 - RNA, 18 nt, Human
gcaaaauuccacccagaa

SEQ ID NO: 165722 - RNA, 32 nt, Human
gcaaaauuccaucuaaaacaaacaaacaaaca

SEQ ID NO: 165723 - RNA, 32 nt, Human
gcaaaauucccccuugucacagaaaccaggga

SEQ ID NO: 165724 - RNA, 32 nt, Human
gcaaaauugcauucaaaaauguguaaaaauga

SEQ ID NO: 165725 - RNA, 32 nt, Human
gcaaaauuugccuguccagcucccucucccca

SEQ ID NO: 165726 - RNA, 32 nt, Human
gcaaacaaccucgaccuccugcucaauuccgg

SEQ ID NO: 165727 - RNA, 32 nt, Human
gcaaacaacuccaggacaaggcaggacaugau

SEQ ID NO: 165728 - RNA, 32 nt, Human
gcaaacaagagggcaugggagcacacagagag

SEQ ID NO: 165729 - RNA, 32 nt, Human
gcaaacaauuggaaggaaguugcuugaauguu

SEQ ID NO: 165730 - RNA, 32 nt, Human
gcaaacacagcaucgugaucacugagccauca

SEQ ID NO: 165731 - RNA, 32 nt, Human
gcaaacacaugcuuuuguaucuugucauaguu

SEQ ID NO: 165732 - RNA, 32 nt, Human
gcaaacacauuaagccuuccacacucaccucu

SEQ ID NO: 165733 - RNA, 32 nt, Human
gcaaacaccaagcagaaugccuggccuguauu

SEQ ID NO: 165734 - RNA, 32 nt, Human
gcaaacaccacugccugcaggagccugggcug

SEQ ID NO: 165735 - RNA, 32 nt, Human
gcaaacaccugacauggcagccucgagggaga

SEQ ID NO: 165736 - RNA, 32 nt, Human
gcaaacacucuuuaacaugaguuggggccuga

SEQ ID NO: 165737 - RNA, 32 nt, Human
gcaaacacugaggucaacuacaagccacaggc

SEQ ID NO: 165738 - RNA, 32 nt, Human
gcaaacagaccguucaccaccaucuccagcug

SEQ ID NO: 165739 - RNA, 32 nt, Human
gcaaacagcagcaggaggagccgcuagagcag

SEQ ID NO: 165740 - RNA, 32 nt, Human
gcaaacagcuccucuuccagaggggaguugug

SEQ ID NO: 165741 - RNA, 30 nt, Human
gcaaacagcucuuaaguagaaagacugaaa

SEQ ID NO: 165742 - RNA, 30 nt, Human
gcaaacagcuugccaagaggaaguggcagu

SEQ ID NO: 165743 - RNA, 32 nt, Human
gcaaacaggcugaaagagucccuggugcgcag

SEQ ID NO: 165744 - RNA, 32 nt, Human
gcaaacaggcuguucaccaccaucuccagcug

SEQ ID NO: 165745 - RNA, 32 nt, Human
gcaaacaucaguguccuucuagcuuuagccga

SEQ ID NO: 165746 - RNA, 32 nt, Human
gcaaacaucggccuuguccuccuuguguucau

SEQ ID NO: 165747 - RNA, 32 nt, Human
gcaaacaugcccacaggaaauucaagggcuga

SEQ ID NO: 165748 - RNA, 32 nt, Human
gcaaaccaccuaucuggccccaacacaccuga

SEQ ID NO: 165749 - RNA, 32 nt, Human
gcaaaccacuuugacugaaagcagaaagagug

SEQ ID NO: 165750 - RNA, 31 nt, Human
gcaaaccagagagauagggagggggaaugca

SEQ ID NO: 165751 - RNA, 32 nt, Human
gcaaaccagcacuggagcaacucugaaagaag

SEQ ID NO: 165752 - RNA, 32 nt, Human
gcaaaccagccuuuucuaauaggcuaauauug

SEQ ID NO: 165753 - RNA, 32 nt, Human
gcaaaccaucaucaguuauauuagguuaauau

SEQ ID NO: 165754 - RNA, 32 nt, Human
gcaaacccaacaagaugagacacuuaaaccca

SEQ ID NO: 165755 - RNA, 32 nt, Human
gcaaacccacagaacccgccugccugucccug

SEQ ID NO: 165756 - RNA, 32 nt, Human
gcaaacccagccucccuccacccccagaaaau

SEQ ID NO: 165757 - RNA, 22 nt, Human
gcaaacccaugaaccucaagaa

SEQ ID NO: 165758 - RNA, 32 nt, Human
gcaaaccccagcagugaacuucccucucuguc

SEQ ID NO: 165759 - RNA, 32 nt, Human
gcaaacccucauuuaaauugguccagcauuug

SEQ ID NO: 165760 - RNA, 32 nt, Human
gcaaacccugcagugaucccaaucugucugug

SEQ ID NO: 165761 - RNA, 32 nt, Human
gcaaaccgugaaggagaaugggacacuggguc

SEQ ID NO: 165762 - RNA, 32 nt, Human
gcaaaccuacacacaaagacacagagcacacu

SEQ ID NO: 165763 - RNA, 32 nt, Human
gcaaaccucacaggguccccacacaacagugc

SEQ ID NO: 165764 - RNA, 32 nt, Human
gcaaaccuccaagccugugcgggccaaucuuu

SEQ ID NO: 165765 - RNA, 32 nt, Human
gcaaaccucccccagccccuaccauccaaugu

SEQ ID NO: 165766 - RNA, 32 nt, Human
gcaaaccuccuugucucucauccaggacagaa

SEQ ID NO: 165767 - RNA, 24 nt, Human
gcaaaccugaauuucuaaagagaa

SEQ ID NO: 165768 - RNA, 22 nt, Human
gcaaaccugaggccucccggca

SEQ ID NO: 165769 - RNA, 21 nt, Human
gcaaaccugagggcccaaaga

SEQ ID NO: 165770 - RNA, 32 nt, Human
gcaaaccugagggcccaaagagggacaggggc

SEQ ID NO: 165771 - RNA, 32 nt, Human
gcaaaccugcccccucugccucccagugcacc

SEQ ID NO: 165772 - RNA, 32 nt, Human
gcaaaccuguagucccagcuaccugggaggcu

SEQ ID NO: 165773 - RNA, 32 nt, Human
gcaaaccuucccccggccuccuggucggcugu

SEQ ID NO: 165774 - RNA, 32 nt, Human
gcaaaccuucugcuguguuaauucuggucagu

SEQ ID NO: 165775 - RNA, 32 nt, Human
gcaaaccuugcuuugaacucugccaguauuuc

SEQ ID NO: 165776 - RNA, 32 nt, Human
gcaaacgagcaaguuuaaaacggagugggcuu

SEQ ID NO: 165777 - RNA, 32 nt, Human
gcaaacgauccuggccucucccgccagcugac

SEQ ID NO: 165778 - RNA, 32 nt, Human
gcaaacgaugcacacaggcuugacgagggccu

SEQ ID NO: 165779 - RNA, 32 nt, Human
gcaaacgcagcggguggcugggguaggggcuc

SEQ ID NO: 165780 - RNA, 22 nt, Human
gcaaacgccccuccccccacca

SEQ ID NO: 165781 - RNA, 19 nt, Human
gcaaacgccuguaauccca

SEQ ID NO: 165782 - RNA, 32 nt, Human
gcaaacggacaugcuggaauccucauccccaa

SEQ ID NO: 165783 - RNA, 32 nt, Human
gcaaacggcaggagguugcagacccgacagcg

SEQ ID NO: 165784 - RNA, 32 nt, Human
gcaaacggggaccccaggaugagucugccggc

SEQ ID NO: 165785 - RNA, 20 nt, Human
gcaaacguacuagaccagug

SEQ ID NO: 165786 - RNA, 32 nt, Human
gcaaacgugaguagagaaugaaauacacaguu

SEQ ID NO: 165787 - RNA, 32 nt, Human
gcaaacuauuuuucucuuuucuuauuuauuuc

SEQ ID NO: 165788 - RNA, 32 nt, Human
gcaaacucaaauggugcuucaaagggagagac

SEQ ID NO: 165789 - RNA, 32 nt, Human
gcaaacucacacacacgagcaugcacaggcag

SEQ ID NO: 165790 - RNA, 32 nt, Human
gcaaacucacauauugcuggugcuaaccuuau

SEQ ID NO: 165791 - RNA, 32 nt, Human
gcaaacucccuuucaaagcugugugaccggcu

SEQ ID NO: 165792 - RNA, 32 nt, Human
gcaaacucgacccccguuccugcccagauaau

SEQ ID NO: 165793 - RNA, 32 nt, Human
gcaaacucugcaggugucuuucuuauccuagu

SEQ ID NO: 165794 - RNA, 32 nt, Human
gcaaacucugcugucuaaccugugaccagucu

SEQ ID NO: 165795 - RNA, 32 nt, Human
gcaaacucuuacugccuuucuccugguuucau

SEQ ID NO: 165796 - RNA, 32 nt, Human
gcaaacucuucuccauagcaguccaguagugg

SEQ ID NO: 165797 - RNA, 32 nt, Human
gcaaacugaggcaagagaaucgcuugaggcca

SEQ ID NO: 165798 - RNA, 32 nt, Human
gcaaacugcgcagcaggcaccuccagaaaggu

SEQ ID NO: 165799 - RNA, 32 nt, Human
gcaaacugcuuuccagccugaagccugcuuaa

SEQ ID NO: 165800 - RNA, 21 nt, Human
gcaaacuggccuugaucagug

SEQ ID NO: 165801 - RNA, 32 nt, Human
gcaaacuggcugagucuguggaaaaggccguu

SEQ ID NO: 165802 - RNA, 32 nt, Human
gcaaacuguccaaguagcuaggcuccagauuu

SEQ ID NO: 165803 - RNA, 32 nt, Human
gcaaacuucucccucccugggguaauucaaca

SEQ ID NO: 165804 - RNA, 32 nt, Human
gcaaagaacaaauuucauccauuuuucugucu

SEQ ID NO: 165805 - RNA, 24 nt, Human
gcaaagaaccuugcccaaggugac

SEQ ID NO: 165806 - RNA, 32 nt, Human
gcaaagaagagaggcagcaccucccauuggca

SEQ ID NO: 165807 - RNA, 32 nt, Human
gcaaagaagggcccgagcuuaguuuccccagg

SEQ ID NO: 165808 - RNA, 32 nt, Human
gcaaagaagguaacaaagaagcauaagaauuc

SEQ ID NO: 165809 - RNA, 32 nt, Human
gcaaagacagcuaagaaaaaggaaaagaaaug

SEQ ID NO: 165810 - RNA, 32 nt, Human
gcaaagacagcuuuacuacucccuuuucccuu

SEQ ID NO: 165811 - RNA, 32 nt, Human
gcaaagacauggagcauaucuuggguccaggu

SEQ ID NO: 165812 - RNA, 32 nt, Human
gcaaagacuggcucuagguauuugaggagcac

SEQ ID NO: 165813 - RNA, 32 nt, Human
gcaaagagaaccugggcugagacauggccgcu

SEQ ID NO: 165814 - RNA, 32 nt, Human
gcaaagagaagaucagggcagcuuaagugguc

SEQ ID NO: 165815 - RNA, 18 nt, Human
gcaaagagaauccuguac

SEQ ID NO: 165816 - RNA, 32 nt, Human
gcaaagagcgacccucacaaggcccaaguccu

SEQ ID NO: 165817 - RNA, 32 nt, Human
gcaaagaggaauaggagggacauggaaccauu

SEQ ID NO: 165818 - RNA, 32 nt, Human
gcaaagaggauauaucacuggcuaucuaaucc

SEQ ID NO: 165819 - RNA, 32 nt, Human
gcaaagaggcagggcagcgagcacagcuguuc

SEQ ID NO: 165820 - RNA, 32 nt, Human
gcaaagagggcgcaggcccugcagugacgguu

SEQ ID NO: 165821 - RNA, 32 nt, Human
gcaaagaguacaccacuguaagauauucugag

SEQ ID NO: 165822 - RNA, 32 nt, Human
gcaaagaucugccagccccaggccucuaccua

SEQ ID NO: 165823 - RNA, 32 nt, Human
gcaaagaugcccugaacaaagcaggacacacg

SEQ ID NO: 165824 - RNA, 32 nt, Human
gcaaagauucgucaacuuucuuagcucaagag

SEQ ID NO: 165825 - RNA, 32 nt, Human
gcaaagauuguccccucugcuguucucugggg

SEQ ID NO: 165826 - RNA, 32 nt, Human
gcaaagauugugccacuacacuccagccuggg

SEQ ID NO: 165827 - RNA, 32 nt, Human
gcaaagcaaagucagugaaagacaaucuuuau

SEQ ID NO: 165828 - RNA, 25 nt, Human
gcaaagcaacauggcagagcaguca

SEQ ID NO: 165829 - RNA, 32 nt, Human
gcaaagcacagccuggccaacauggugaaauc

SEQ ID NO: 165830 - RNA, 32 nt, Human
gcaaagcacauagagccagcuguccugucagu

SEQ ID NO: 165831 - RNA, 32 nt, Human
gcaaagcacugacccguguccuccguugcucg

SEQ ID NO: 165832 - RNA, 32 nt, Human
gcaaagcacugucaccggccucagggaguuua

SEQ ID NO: 165833 - RNA, 32 nt, Human
gcaaagcagaggaacggugucagcauuuugaa

SEQ ID NO: 165834 - RNA, 32 nt, Human
gcaaagcaggccauuucucccaccugaaagua

SEQ ID NO: 165835 - RNA, 32 nt, Human
gcaaagcaggccuuucacauuuacaggccucu

SEQ ID NO: 165836 - RNA, 18 nt, Human
gcaaagcaguaugcuccc

SEQ ID NO: 165837 - RNA, 32 nt, Human
gcaaagccaccuguagucuauucuaaccucac

SEQ ID NO: 165838 - RNA, 26 nt, Human
gcaaagccagaaacuucucucaagaa

SEQ ID NO: 165839 - RNA, 22 nt, Human
gcaaagccagaaaugcucucuc

SEQ ID NO: 165840 - RNA, 32 nt, Human
gcaaagccagccuggggcuugcauguugaucc

SEQ ID NO: 165841 - RNA, 32 nt, Human
gcaaagccaucuuagcaacuuucucacugaga

SEQ ID NO: 165842 - RNA, 32 nt, Human
gcaaagccuagccugcauaucauucacccaaa

SEQ ID NO: 165843 - RNA, 18 nt, Human
gcaaagccuccugcuccu

SEQ ID NO: 165844 - RNA, 18 nt, Human
gcaaagccucugaccagu

SEQ ID NO: 165845 - RNA, 32 nt, Human
gcaaagccucugaggcacgucgcuugaucugc

SEQ ID NO: 165846 - RNA, 32 nt, Human
gcaaagcgugagcccccaaauccacaccuggg

SEQ ID NO: 165847 - RNA, 24 nt, Human
gcaaagcuacaacgauggacucuu

SEQ ID NO: 165848 - RNA, 21 nt, Human
gcaaagcugaagaggcagcuu

SEQ ID NO: 165849 - RNA, 22 nt, Human
gcaaagcugaccccagccccca

SEQ ID NO: 165850 - RNA, 32 nt, Human
gcaaagcugaugcagagagaugagccaauuga

SEQ ID NO: 165851 - RNA, 32 nt, Human
gcaaagcugcacaacauaacaagacccuaucu

SEQ ID NO: 165852 - RNA, 32 nt, Human
gcaaagcugccuuccaagugccugucugugcc

SEQ ID NO: 165853 - RNA, 20 nt, Human
gcaaagcugcugggccagug

SEQ ID NO: 165854 - RNA, 22 nt, Human
gcaaagcuuguccgauguccuc

SEQ ID NO: 165855 - RNA, 20 nt, Human
gcaaagcuuuuaacguccuc

SEQ ID NO: 165856 - RNA, 32 nt, Human
gcaaaggaaagaauaaggcagcauaugacauc

SEQ ID NO: 165857 - RNA, 32 nt, Human
gcaaaggaaaggggaaaaagaaaaacgacuaa

SEQ ID NO: 165858 - RNA, 32 nt, Human
gcaaaggaagagcagagaaaucuuagacggug

SEQ ID NO: 165859 - RNA, 23 nt, Human
gcaaaggaagcuugaaaaauaug

SEQ ID NO: 165860 - RNA, 32 nt, Human
gcaaaggaaguccucagcuguaccggccuuuc

SEQ ID NO: 165861 - RNA, 32 nt, Human
gcaaaggaauccugccugccuucagcagagaa

SEQ ID NO: 165862 - RNA, 32 nt, Human
gcaaaggacacaucucuccagcaaaggacacc

SEQ ID NO: 165863 - RNA, 32 nt, Human
gcaaaggacaccucucuccagcaaaggacacc

SEQ ID NO: 165864 - RNA, 32 nt, Human
gcaaaggacugggaguuccugaggaaggggga

SEQ ID NO: 165865 - RNA, 32 nt, Human
gcaaaggagaacagagccaggagccaggauau

SEQ ID NO: 165866 - RNA, 32 nt, Human
gcaaaggagaagcacagcuccugccaggguga

SEQ ID NO: 165867 - RNA, 32 nt, Human
gcaaaggagaggagggagaugaggucauuguu

SEQ ID NO: 165868 - RNA, 32 nt, Human
gcaaaggagagggaaagcucggauccauugcc

SEQ ID NO: 165869 - RNA, 32 nt, Human
gcaaaggagagguggggagaaaagagggugaa

SEQ ID NO: 165870 - RNA, 32 nt, Human
gcaaaggagaugcagagaugcccaugccgaga

SEQ ID NO: 165871 - RNA, 32 nt, Human
gcaaaggagcagccaugagggccgggcccagu

SEQ ID NO: 165872 - RNA, 32 nt, Human
gcaaaggaggaggaaaagggaggacuugguag

SEQ ID NO: 165873 - RNA, 32 nt, Human
gcaaaggaggcugggcacaguggcucaugccu

SEQ ID NO: 165874 - RNA, 32 nt, Human
gcaaaggaggggaaacaaugaaaacaaauaaa

SEQ ID NO: 165875 - RNA, 32 nt, Human
gcaaaggagguggggagcaggagagagagggu

SEQ ID NO: 165876 - RNA, 32 nt, Human
gcaaaggagugugagagaggaguggaugguca

SEQ ID NO: 165877 - RNA, 32 nt, Human
gcaaaggcaggggaaaguccugccuuggggag

SEQ ID NO: 165878 - RNA, 32 nt, Human
gcaaaggccagugaggcagcugugaguuggac

SEQ ID NO: 165879 - RNA, 32 nt, Human
gcaaaggccccgagacuggaguguguuccuga

SEQ ID NO: 165880 - RNA, 20 nt, Human
gcaaaggcccgucacccccg

SEQ ID NO: 165881 - RNA, 32 nt, Human
gcaaaggccugauaauagcuuaauaccaugac

SEQ ID NO: 165882 - RNA, 32 nt, Human
gcaaaggcugaagaccaguucuccccagugaa

SEQ ID NO: 165883 - RNA, 32 nt, Human
gcaaagggaaagaggaaaagagccuucaggga

SEQ ID NO: 165884 - RNA, 32 nt, Human
gcaaagggaacccagcaguucugagugaguuc

SEQ ID NO: 165885 - RNA, 32 nt, Human
gcaaagggaggaagacugguagcggggagggg

SEQ ID NO: 165886 - RNA, 32 nt, Human
gcaaagggcaggcaguucgugcgcggacacaa

SEQ ID NO: 165887 - RNA, 32 nt, Human
gcaaagggcugccuugcuguucuugaagcugg

SEQ ID NO: 165888 - RNA, 32 nt, Human
gcaaagggcuguagcaugcaugaucacuugug

SEQ ID NO: 165889 - RNA, 32 nt, Human
gcaaaggggugggggcugggugcaguggcuca

SEQ ID NO: 165890 - RNA, 32 nt, Human
gcaaaggucaacuagcugcuuccccagggaau

SEQ ID NO: 165891 - RNA, 32 nt, Human
gcaaaggugcaaucauagcucacugcagccuc

SEQ ID NO: 165892 - RNA, 32 nt, Human
gcaaagguggaggguuuuagacucucaugcuu

SEQ ID NO: 165893 - RNA, 32 nt, Human
gcaaaggugguggugcuuucaucuucaggcag

SEQ ID NO: 165894 - RNA, 19 nt, Human
gcaaagguguaugcuuuaa

SEQ ID NO: 165895 - RNA, 32 nt, Human
gcaaagguuugcugaaaagcccagugaacaag

SEQ ID NO: 165896 - RNA, 32 nt, Human
gcaaaguaaucaucguucaggcccaacccuua

SEQ ID NO: 165897 - RNA, 32 nt, Human
gcaaaguacugagcagaagcuuugaauguagc

SEQ ID NO: 165898 - RNA, 32 nt, Human
gcaaaguaggagagaggcccagaggaaagccc

SEQ ID NO: 165899 - RNA, 32 nt, Human
gcaaaguaguacuucuucuguaauauuuacaa

SEQ ID NO: 165900 - RNA, 32 nt, Human
gcaaaguaugcacacauaucuugaauggcuuu

SEQ ID NO: 165901 - RNA, 32 nt, Human
gcaaagucccacgcggcgaagaguuuuggagc

SEQ ID NO: 165902 - RNA, 32 nt, Human
gcaaagucucugcuuacaucauuuugguuguc

SEQ ID NO: 165903 - RNA, 22 nt, Human
gcaaagugcuagccacuggaaa

SEQ ID NO: 165904 - RNA, 32 nt, Human
gcaaaguggaaaguuagaccagcugggaccag

SEQ ID NO: 165905 - RNA, 32 nt, Human
gcaaaguggaagcaaggaacaaggcagaauaa

SEQ ID NO: 165906 - RNA, 32 nt, Human
gcaaaguggacucugcugcaaaauggugcuuc

SEQ ID NO: 165907 - RNA, 24 nt, Human
gcaaaguggcucaugcccguaauc

SEQ ID NO: 165908 - RNA, 32 nt, Human
gcaaagugggguccccagccagcggcaccagc

SEQ ID NO: 165909 - RNA, 21 nt, Human
gcaaagugggguggggagcga

SEQ ID NO: 165910 - RNA, 31 nt, Human
gcaaagugugagagaaggguuaagacuggcu

SEQ ID NO: 165911 - RNA, 32 nt, Human
gcaaagugugagccaaaggauccuuccuuauu

SEQ ID NO: 165912 - RNA, 32 nt, Human
gcaaagugugcgugaaaacuuuugaaacugaa

SEQ ID NO: 165913 - RNA, 20 nt, Human
gcaaaguuaagcagaccagu

SEQ ID NO: 165914 - RNA, 32 nt, Human
gcaaaguuaaggcuugauaccaaucgagcuaa

SEQ ID NO: 165915 - RNA, 21 nt, Human
gcaaaguuacaacugaccgug

SEQ ID NO: 165916 - RNA, 18 nt, Human
gcaaaguuacaggccagu

SEQ ID NO: 165917 - RNA, 19 nt, Human
gcaaaguuauuuaccaugu

SEQ ID NO: 165918 - RNA, 31 nt, Human
gcaaaguuccaaagacagcagaaaacuuuug

SEQ ID NO: 165919 - RNA, 32 nt, Human
gcaaaguucguguccagcucuaugacccugac

SEQ ID NO: 165920 - RNA, 18 nt, Human
gcaaaguuggagcgagug

SEQ ID NO: 165921 - RNA, 19 nt, Human
gcaaaguuguuauucagug

SEQ ID NO: 165922 - RNA, 21 nt, Human
gcaaaguuuuucaaccaagug

SEQ ID NO: 165923 - RNA, 32 nt, Human
gcaaauaaaauuauugaaaauaauuuuaaagu

SEQ ID NO: 165924 - RNA, 32 nt, Human
gcaaauaagaggagugagugaaauagagaaag

SEQ ID NO: 165925 - RNA, 32 nt, Human
gcaaauaauuucugugcuucaaggagcuucag

SEQ ID NO: 165926 - RNA, 32 nt, Human
gcaaauacaugcagaaggagggcugcgcuggg

SEQ ID NO: 165927 - RNA, 32 nt, Human
gcaaauacucaggguuugaagggagaccuggc

SEQ ID NO: 165928 - RNA, 32 nt, Human
gcaaauacugguuugcuucuguuuuccagaga

SEQ ID NO: 165929 - RNA, 32 nt, Human
gcaaauacuugauugauuugauauuuagcuua

SEQ ID NO: 165930 - RNA, 32 nt, Human
gcaaauagaagagagagguugaaaaacaaaau

SEQ ID NO: 165931 - RNA, 32 nt, Human
gcaaauaggcaauauaccauacaaucaauucc

SEQ ID NO: 165932 - RNA, 32 nt, Human
gcaaauauggcuuaaauauuucauggcaguuu

SEQ ID NO: 165933 - RNA, 32 nt, Human
gcaaaucagaaagaaaauggaugcagacucca

SEQ ID NO: 165934 - RNA, 32 nt, Human
gcaaaucagaagacacagcuuuuggugcgggc

SEQ ID NO: 165935 - RNA, 32 nt, Human
gcaaaucaucuccugugccacuggccuugggc

SEQ ID NO: 165936 - RNA, 32 nt, Human
gcaaaucauucaacgacccccgacccuccgac

SEQ ID NO: 165937 - RNA, 20 nt, Human
gcaaauccaaaagucugggg

SEQ ID NO: 165938 - RNA, 32 nt, Human
gcaaaucccagccacggcaucuucccgaccac

SEQ ID NO: 165939 - RNA, 32 nt, Human
gcaaauccccuccccaaacccacccauaccag

SEQ ID NO: 165940 - RNA, 32 nt, Human
gcaaaucccucagaggacagagcuaaggugga

SEQ ID NO: 165941 - RNA, 32 nt, Human
gcaaauccuguucacccaggaggucaacaaug

SEQ ID NO: 165942 - RNA, 32 nt, Human
gcaaauccuuuaauacuaucucucauuguuuu

SEQ ID NO: 165943 - RNA, 32 nt, Human
gcaaaucgccuuucugacucuugaguaggaug

SEQ ID NO: 165944 - RNA, 32 nt, Human
gcaaaucuacaguucuguuuuugcuacucuau

SEQ ID NO: 165945 - RNA, 32 nt, Human
gcaaaucucagccucuggaaaugcagcuucuu

SEQ ID NO: 165946 - RNA, 32 nt, Human
gcaaaucugcuggcaucuuucuucccaaaggc

SEQ ID NO: 165947 - RNA, 31 nt, Human
gcaaaugaaaacaguagccuaaagugucagu

SEQ ID NO: 165948 - RNA, 32 nt, Human
gcaaaugaaaacaguagccuaaagugucaguu

SEQ ID NO: 165949 - RNA, 19 nt, Human
gcaaaugaaaacucucucc

SEQ ID NO: 165950 - RNA, 20 nt, Human
gcaaaugaaaacucucucca

SEQ ID NO: 165951 - RNA, 32 nt, Human
gcaaaugaaagccaucugacaguuggcucaca

SEQ ID NO: 165952 - RNA, 32 nt, Human
gcaaaugagagccugggcuuggugucgaggga

SEQ ID NO: 165953 - RNA, 31 nt, Human
gcaaaugaggagagagaagaugagguuggac

SEQ ID NO: 165954 - RNA, 32 nt, Human
gcaaaugaggggugcaggagaggaaugcagac

SEQ ID NO: 165955 - RNA, 32 nt, Human
gcaaaugaucacuguaaacuggcucugucuca

SEQ ID NO: 165956 - RNA, 20 nt, Human
gcaaaugcaaacaucucugc

SEQ ID NO: 165957 - RNA, 20 nt, Human
gcaaaugcaauaaugcccuc

SEQ ID NO: 165958 - RNA, 32 nt, Human
gcaaaugcacacaaacccaugcauacacaagc

SEQ ID NO: 165959 - RNA, 19 nt, Human
gcaaaugcaugauuucucu

SEQ ID NO: 165960 - RNA, 20 nt, Human
gcaaaugccaagugcucugc

SEQ ID NO: 165961 - RNA, 32 nt, Human
gcaaaugccgacccuguggccugcugcccgcc

SEQ ID NO: 165962 - RNA, 32 nt, Human
gcaaaugccuguaaucccagcacuuugggagg

SEQ ID NO: 165963 - RNA, 18 nt, Human
gcaaaugcucagcucucc

SEQ ID NO: 165964 - RNA, 32 nt, Human
gcaaaugcuucuacacacuccaccuccagcac

SEQ ID NO: 165965 - RNA, 32 nt, Human
gcaaaugcuuggugguucgacuucucccucug

SEQ ID NO: 165966 - RNA, 32 nt, Human
gcaaauggagaaugaaaucgggugcaugugac

SEQ ID NO: 165967 - RNA, 32 nt, Human
gcaaauggccacugaguagccccagaggucgc

SEQ ID NO: 165968 - RNA, 31 nt, Human
gcaaauggcccagcucugccuguguuuuucu

SEQ ID NO: 165969 - RNA, 32 nt, Human
gcaaauggcuaauugagguucugaaguucuuc

SEQ ID NO: 165970 - RNA, 29 nt, Human
gcaaauggcugaagucccggaggauuaug

SEQ ID NO: 165971 - RNA, 32 nt, Human
gcaaaugguaacacccucauggagaucucagg

SEQ ID NO: 165972 - RNA, 32 nt, Human
gcaaauggugcuguucccgaugacccuucucc

SEQ ID NO: 165973 - RNA, 25 nt, Human
gcaaaugguuuguaagcacuggaaa

SEQ ID NO: 165974 - RNA, 18 nt, Human
gcaaauguauacauguua

SEQ ID NO: 165975 - RNA, 32 nt, Human
gcaaaugucucuuggaacacacugccuuaaac

SEQ ID NO: 165976 - RNA, 20 nt, Human
gcaaaugugcagauucaaug

SEQ ID NO: 165977 - RNA, 29 nt, Human
gcaaauguuccagguauuuaagccacaug

SEQ ID NO: 165978 - RNA, 18 nt, Human
gcaaauguugaugccucc

SEQ ID NO: 165979 - RNA, 32 nt, Human
gcaaauuaaagaaugaaagaaguacuucuuuu

SEQ ID NO: 165980 - RNA, 32 nt, Human
gcaaauuagaacuucagaaucuaaugauaguu

SEQ ID NO: 165981 - RNA, 32 nt, Human
gcaaauucaaguguuuuccugggugaagacuu

SEQ ID NO: 165982 - RNA, 32 nt, Human
gcaaauucaggaaagucugggauacaaaauca

SEQ ID NO: 165983 - RNA, 32 nt, Human
gcaaauucaguuugccuuccuggauuuguaaa

SEQ ID NO: 165984 - RNA, 32 nt, Human
gcaaauucuagauagacacuguauuuauuggu

SEQ ID NO: 165985 - RNA, 18 nt, Human
gcaaauugaaugcucucu

SEQ ID NO: 165986 - RNA, 32 nt, Human
gcaaauugagaucaaugaggccaaaaggaaac

SEQ ID NO: 165987 - RNA, 32 nt, Human
gcaaauuggggaggggaggguguaucuagcuc

SEQ ID NO: 165988 - RNA, 32 nt, Human
gcaaauuguggacacaccaccgcaugugccag

SEQ ID NO: 165989 - RNA, 32 nt, Human
gcaaauuuggcaaagacuaccugcuggagaug

SEQ ID NO: 165990 - RNA, 32 nt, Human
gcaaauuugggaggggagagguccagaagcug

SEQ ID NO: 165991 - RNA, 32 nt, Human
gcaaauuuguuuuccuuuuugcaccugccaaa

SEQ ID NO: 165992 - RNA, 32 nt, Human
gcaaauuuuucagacaucguccauaccuugca

SEQ ID NO: 165993 - RNA, 32 nt, Human
gcaaauuuuucagacauuguucauaccuugca

SEQ ID NO: 165994 - RNA, 32 nt, Human
gcaacaaaacuucuggcaaggccaggcuguga

SEQ ID NO: 165995 - RNA, 32 nt, Human
gcaacaaaaugucuuuauugaaagaaguggaa

SEQ ID NO: 165996 - RNA, 32 nt, Human
gcaacaaacaccugcaguuaaaggaauaccuu

SEQ ID NO: 165997 - RNA, 32 nt, Human
gcaacaaagaauccaacccacacagcuuuaua

SEQ ID NO: 165998 - RNA, 32 nt, Human
gcaacaaagagauacuuucucaguccugcagg

SEQ ID NO: 165999 - RNA, 21 nt, Human
gcaacaaagccccaaaggcuc

SEQ ID NO: 166000 - RNA, 32 nt, Human
gcaacaaaggagaaaaggaagugauuggagaa

SEQ ID NO: 166001 - RNA, 32 nt, Human
gcaacaaaggcagagggggcggggcgggggag

SEQ ID NO: 166002 - RNA, 32 nt, Human
gcaacaacaaaggcggccuccuuguccacuuu

SEQ ID NO: 166003 - RNA, 32 nt, Human
gcaacaacaacacacacgcacacacgcacaca

SEQ ID NO: 166004 - RNA, 32 nt, Human
gcaacaaccaucacccucccuccuuaagcuuc

SEQ ID NO: 166005 - RNA, 32 nt, Human
gcaacaacccagaaaucguuacaguuggagag

SEQ ID NO: 166006 - RNA, 32 nt, Human
gcaacaaccuuaaaggccgucauuucauuagu

SEQ ID NO: 166007 - RNA, 32 nt, Human
gcaacaacugauuucauacaacugaguuacuc

SEQ ID NO: 166008 - RNA, 32 nt, Human
gcaacaacuuagaagaaaucauuuagugacuu

SEQ ID NO: 166009 - RNA, 32 nt, Human
gcaacaagaccaccacuucgaaaccugggauu

SEQ ID NO: 166010 - RNA, 32 nt, Human
gcaacaagcaagagagaaagaaacacagaaag

SEQ ID NO: 166011 - RNA, 32 nt, Human
gcaacaaggaaacuauccuguggccugagagc

SEQ ID NO: 166012 - RNA, 32 nt, Human
gcaacaaggacaguaacacacauguaugaccc

SEQ ID NO: 166013 - RNA, 32 nt, Human
gcaacaaggaggcagugaccagcaugggagga

SEQ ID NO: 166014 - RNA, 32 nt, Human
gcaacaaggcccuagcuggagacucuggggau

SEQ ID NO: 166015 - RNA, 32 nt, Human
gcaacaagggcugagcugcgcuugcguggcug

SEQ ID NO: 166016 - RNA, 32 nt, Human
gcaacaaguccuaggagcacacaaagcaaccc

SEQ ID NO: 166017 - RNA, 32 nt, Human
gcaacaagugccggagguagcagagccaagcc

SEQ ID NO: 166018 - RNA, 32 nt, Human
gcaacaaguucaugcugauccuggccagcugc

SEQ ID NO: 166019 - RNA, 32 nt, Human
gcaacaaugccuuugcaggcagccugcucccc

SEQ ID NO: 166020 - RNA, 32 nt, Human
gcaacacagacuuguaccuguaucagcaaugu

SEQ ID NO: 166021 - RNA, 32 nt, Human
gcaacacagcaagacccuaucucuaccaaaaa

SEQ ID NO: 166022 - RNA, 23 nt, Human
gcaacacagucuuccucggucug

SEQ ID NO: 166023 - RNA, 32 nt, Human
gcaacacagugaggcccccuacccacauccuc

SEQ ID NO: 166024 - RNA, 19 nt, Human
gcaacaccagggcugaccu

SEQ ID NO: 166025 - RNA, 32 nt, Human
gcaacaccagugccaggaaaaggccaaaagaa

SEQ ID NO: 166026 - RNA, 32 nt, Human
gcaacaccaucaugacaucacaaccuguuccc

SEQ ID NO: 166027 - RNA, 32 nt, Human
gcaacaccaucccagggagaucugccacaauu

SEQ ID NO: 166028 - RNA, 32 nt, Human
gcaacacccacuugggcucuagggaaugcaag

SEQ ID NO: 166029 - RNA, 32 nt, Human
gcaacacccagccucuugaaacgagcugcugc

SEQ ID NO: 166030 - RNA, 23 nt, Human
gcaacacccauuugggguuacca

SEQ ID NO: 166031 - RNA, 32 nt, Human
gcaacacgaagcuuccagaaccauaaaauauc

SEQ ID NO: 166032 - RNA, 32 nt, Human
gcaacacgccccugcuggaccacucggcgccc

SEQ ID NO: 166033 - RNA, 32 nt, Human
gcaacacgccgcugccccaggccaucccgccg

SEQ ID NO: 166034 - RNA, 32 nt, Human
gcaacacuacaaaggagaaguuacucauuuca

SEQ ID NO: 166035 - RNA, 32 nt, Human
gcaacacuacacuccagccugggcgacagagc

SEQ ID NO: 166036 - RNA, 32 nt, Human
gcaacacuccucuuucccagccagcaaaggcu

SEQ ID NO: 166037 - RNA, 32 nt, Human
gcaacacugcacuccagccugggcgacagagc

SEQ ID NO: 166038 - RNA, 32 nt, Human
gcaacacugcacuccagccugggugacagagu

SEQ ID NO: 166039 - RNA, 32 nt, Human
gcaacacugccacuccagccugggugacagag

SEQ ID NO: 166040 - RNA, 32 nt, Human
gcaacacugcccuccagccugggcaacagagc

SEQ ID NO: 166041 - RNA, 32 nt, Human
gcaacacugcgcuccagccuggcagacagagg

SEQ ID NO: 166042 - RNA, 32 nt, Human
gcaacacuggaagaauugcacacaguuuccag

SEQ ID NO: 166043 - RNA, 32 nt, Human
gcaacacuggggagagccuggagcagccggac

SEQ ID NO: 166044 - RNA, 32 nt, Human
gcaacacuguacuccagccugggcaacagagg

SEQ ID NO: 166045 - RNA, 32 nt, Human
gcaacacuugacuucaucuuaauguacauuca

SEQ ID NO: 166046 - RNA, 32 nt, Human
gcaacagaaagccugccaauguagcugaaaua

SEQ ID NO: 166047 - RNA, 32 nt, Human
gcaacagaaauguucauuucugucagaaaacu

SEQ ID NO: 166048 - RNA, 32 nt, Human
gcaacagaaggugaguuuggggccugcagagc

SEQ ID NO: 166049 - RNA, 32 nt, Human
gcaacagacaggcuuggcaacugugaauaccu

SEQ ID NO: 166050 - RNA, 32 nt, Human
gcaacagacauccuccacauugugcacacugg

SEQ ID NO: 166051 - RNA, 32 nt, Human
gcaacagaggcuugggaugaagggugggugaa

SEQ ID NO: 166052 - RNA, 32 nt, Human
gcaacagagucagugccccaggaagaggaagu

SEQ ID NO: 166053 - RNA, 32 nt, Human
gcaacagcagcucuguaccucaucuguugauc

SEQ ID NO: 166054 - RNA, 32 nt, Human
gcaacagcaguuucauggaaccucucuuagcu

SEQ ID NO: 166055 - RNA, 32 nt, Human
gcaacagccagagguguuccuggggagauggc

SEQ ID NO: 166056 - RNA, 22 nt, Human
gcaacagccuuggggggcacuu

SEQ ID NO: 166057 - RNA, 32 nt, Human
gcaacagcugauagaagagaacagagacgcac

SEQ ID NO: 166058 - RNA, 32 nt, Human
gcaacagcuggguuucugagucagaaagacuu

SEQ ID NO: 166059 - RNA, 32 nt, Human
gcaacaggaacuuggaguggagaggaaaagca

SEQ ID NO: 166060 - RNA, 32 nt, Human
gcaacaggaagggagagcgcacgagggagagg

SEQ ID NO: 166061 - RNA, 32 nt, Human
gcaacaggagaaagaugacaugggcauggagc

SEQ ID NO: 166062 - RNA, 32 nt, Human
gcaacaggauacaaauggccacuagaggucau

SEQ ID NO: 166063 - RNA, 32 nt, Human
gcaacaggcaaaggagaaacagcucugacaua

SEQ ID NO: 166064 - RNA, 32 nt, Human
gcaacaggcaaaggccagagucagaguggugg

SEQ ID NO: 166065 - RNA, 32 nt, Human
gcaacagggaaagagggugggcacggggaggg

SEQ ID NO: 166066 - RNA, 32 nt, Human
gcaacagggcacuugcucccugggcaacuccu

SEQ ID NO: 166067 - RNA, 32 nt, Human
gcaacagggcugggacaggaaggcucucuucu

SEQ ID NO: 166068 - RNA, 32 nt, Human
gcaacagggugaccagcuguccugguuuccca

SEQ ID NO: 166069 - RNA, 32 nt, Human
gcaacagguccacuuugcucuccagucucuuu

SEQ ID NO: 166070 - RNA, 32 nt, Human
gcaacagguucaagcuggagaauccuucaaaa

SEQ ID NO: 166071 - RNA, 24 nt, Human
gcaacagguuuucuuuaaauccaa

SEQ ID NO: 166072 - RNA, 32 nt, Human
gcaacaguaacagcagcagcaaacuuuuccuc

SEQ ID NO: 166073 - RNA, 32 nt, Human
gcaacaguacacacaaacauacauaaagagag

SEQ ID NO: 166074 - RNA, 32 nt, Human
gcaacaguaguaggauauauuucuccuagaac

SEQ ID NO: 166075 - RNA, 22 nt, Human
gcaacaguggccuacacugccu

SEQ ID NO: 166076 - RNA, 32 nt, Human
gcaacagugggggccuguggggugggguggga

SEQ ID NO: 166077 - RNA, 32 nt, Human
gcaacaguuuuuaaaauauauugcugcauuuu

SEQ ID NO: 166078 - RNA, 32 nt, Human
gcaacauagugagacucggucucuaccaaaaa

SEQ ID NO: 166079 - RNA, 32 nt, Human
gcaacauagugaggccccaucucuagaaaaag

SEQ ID NO: 166080 - RNA, 32 nt, Human
gcaacauauaauaaaugcaugcuauucaauga

SEQ ID NO: 166081 - RNA, 32 nt, Human
gcaacaucccugguacuccagcuuugaggucc

SEQ ID NO: 166082 - RNA, 24 nt, Human
gcaacauccuacaugcagcuguga

SEQ ID NO: 166083 - RNA, 32 nt, Human
gcaacaucuugaaaaccagucuagucauugaa

SEQ ID NO: 166084 - RNA, 25 nt, Human
gcaacaugaaaagagcauaucaaug

SEQ ID NO: 166085 - RNA, 32 nt, Human
gcaacaugaugugaaaacccaucucuacaaaa

SEQ ID NO: 166086 - RNA, 32 nt, Human
gcaacaugcagagucccugagcccaccuccca

SEQ ID NO: 166087 - RNA, 32 nt, Human
gcaacaugcuagaaaauccucacugcacucca

SEQ ID NO: 166088 - RNA, 32 nt, Human
gcaacaugcucaaggaagaugcagccccuucc

SEQ ID NO: 166089 - RNA, 32 nt, Human
gcaacauggagaaaccccgucucuaucagaaa

SEQ ID NO: 166090 - RNA, 32 nt, Human
gcaacauggaguucauuguccuguugcuuacu

SEQ ID NO: 166091 - RNA, 32 nt, Human
gcaacauggugaaacugucucuaucaaaaaua

SEQ ID NO: 166092 - RNA, 32 nt, Human
gcaacauguggccuguucacagcuacauaauu

SEQ ID NO: 166093 - RNA, 32 nt, Human
gcaacauguuccaagcaaaaucuccccgccug

SEQ ID NO: 166094 - RNA, 32 nt, Human
gcaacauuacauugaagaccacuguggccaug

SEQ ID NO: 166095 - RNA, 32 nt, Human
gcaacauugcacuccaggcugggcagcaagag

SEQ ID NO: 166096 - RNA, 32 nt, Human
gcaacauugccucaccgcugagcuugaaaucc

SEQ ID NO: 166097 - RNA, 32 nt, Human
gcaacauuuaaaggaauaagaccuguucacua

SEQ ID NO: 166098 - RNA, 32 nt, Human
gcaacauuucuucaauuagcagucuagacauu

SEQ ID NO: 166099 - RNA, 27 nt, Human
gcaaccaaaacaaucagacucuucguu

SEQ ID NO: 166100 - RNA, 32 nt, Human
gcaaccaacugcugcugugcacauuuaugaau

SEQ ID NO: 166101 - RNA, 21 nt, Human
gcaaccaagaagauggaucaa

SEQ ID NO: 166102 - RNA, 31 nt, Human
gcaaccaagagugucaguuguacccgaggcg

SEQ ID NO: 166103 - RNA, 32 nt, Human
gcaaccaagcccugcugcuccaggacauauaa

SEQ ID NO: 166104 - RNA, 32 nt, Human
gcaaccaccauucugcuucaugacauugauuu

SEQ ID NO: 166105 - RNA, 32 nt, Human
gcaaccacccuuguugaagucucugcccgagg

SEQ ID NO: 166106 - RNA, 32 nt, Human
gcaaccacugacuggucuuaagcuguucuugc

SEQ ID NO: 166107 - RNA, 32 nt, Human
gcaaccacugacuggucuuagcuguucuugca

SEQ ID NO: 166108 - RNA, 32 nt, Human
gcaaccacugguguuuucugucccucuuguuc

SEQ ID NO: 166109 - RNA, 32 nt, Human
gcaaccagaauagcacuuuaccuuuugguugg

SEQ ID NO: 166110 - RNA, 32 nt, Human
gcaaccagcauaugugagugacagcauguguc

SEQ ID NO: 166111 - RNA, 32 nt, Human
gcaaccagcauaugugagugacagcauguguu

SEQ ID NO: 166112 - RNA, 32 nt, Human
gcaaccagccagagaaggagggccgggcgcac

SEQ ID NO: 166113 - RNA, 32 nt, Human
gcaaccagccugagucgcggugaggggaugag

SEQ ID NO: 166114 - RNA, 32 nt, Human
gcaaccagccuggccaauauggugagacccca

SEQ ID NO: 166115 - RNA, 32 nt, Human
gcaaccagccugggagucagggaggacucuuc

SEQ ID NO: 166116 - RNA, 32 nt, Human
gcaaccaggccugaggucagaauuugaacaua

SEQ ID NO: 166117 - RNA, 32 nt, Human
gcaaccaggccuggccuccuggugucugcggu

SEQ ID NO: 166118 - RNA, 21 nt, Human
gcaaccagggagcugcagggg

SEQ ID NO: 166119 - RNA, 32 nt, Human
gcaaccaggggcccugaucaggggacugagcc

SEQ ID NO: 166120 - RNA, 32 nt, Human
gcaaccaguuggcuaggggagcagggggccca

SEQ ID NO: 166121 - RNA, 32 nt, Human
gcaaccaucuuucagccccacuggucuuuuca

SEQ ID NO: 166122 - RNA, 32 nt, Human
gcaaccaucuuuccuccagcacuuuuggggua

SEQ ID NO: 166123 - RNA, 32 nt, Human
gcaaccaucuuucuguuugucgucuuguugau

SEQ ID NO: 166124 - RNA, 32 nt, Human
gcaaccauggaucaaaaguauuuggagcaucc

SEQ ID NO: 166125 - RNA, 20 nt, Human
gcaaccaugugguuccagcu

SEQ ID NO: 166126 - RNA, 32 nt, Human
gcaacccaaaugguggccauugugcuuggggc

SEQ ID NO: 166127 - RNA, 32 nt, Human
gcaacccaguagcuggagucugaagauggaga

SEQ ID NO: 166128 - RNA, 22 nt, Human
gcaacccaguucccaaauccag

SEQ ID NO: 166129 - RNA, 32 nt, Human
gcaacccaugcuguguucaugugacauaauac

SEQ ID NO: 166130 - RNA, 21 nt, Human
gcaaccccacacccuugacau

SEQ ID NO: 166131 - RNA, 32 nt, Human
gcaaccccagacccuggugacaaaauaagcaa

SEQ ID NO: 166132 - RNA, 32 nt, Human
gcaaccccagagaugaggcaccagagagugcc

SEQ ID NO: 166133 - RNA, 18 nt, Human
gcaaccccagaucagggu

SEQ ID NO: 166134 - RNA, 32 nt, Human
gcaaccccagcuccacuccagccuggcgucca

SEQ ID NO: 166135 - RNA, 32 nt, Human
gcaaccccagcucuccccagagaggggccggc

SEQ ID NO: 166136 - RNA, 32 nt, Human
gcaaccccaguucugcuccucuccaggcaccc

SEQ ID NO: 166137 - RNA, 23 nt, Human
gcaaccccuacccccgcccacca

SEQ ID NO: 166138 - RNA, 20 nt, Human
gcaaccccucccucgccccu

SEQ ID NO: 166139 - RNA, 32 nt, Human
gcaaccccugcagcuccucugccuuugugcuc

SEQ ID NO: 166140 - RNA, 32 nt, Human
gcaaccccugcucucagguucaagugguucuc

SEQ ID NO: 166141 - RNA, 32 nt, Human
gcaaccccugugccccuccccuccaggcuacc

SEQ ID NO: 166142 - RNA, 32 nt, Human
gcaacccugagucccuaaggcagcagcucaag

SEQ ID NO: 166143 - RNA, 32 nt, Human
gcaacccugcaaccucugccuaccggguucaa

SEQ ID NO: 166144 - RNA, 32 nt, Human
gcaacccugugacaauggcagguagugugcau

SEQ ID NO: 166145 - RNA, 32 nt, Human
gcaacccuucauuugcucucugugccaccaau

SEQ ID NO: 166146 - RNA, 32 nt, Human
gcaacccuuccaggaaggaguuggggagagag

SEQ ID NO: 166147 - RNA, 32 nt, Human
gcaaccgacaggccauucccacccccacacac

SEQ ID NO: 166148 - RNA, 24 nt, Human
gcaaccgcagcccagccccagucc

SEQ ID NO: 166149 - RNA, 32 nt, Human
gcaaccgcugcucuccgccucuccccucgcgg

SEQ ID NO: 166150 - RNA, 32 nt, Human
gcaaccggaccccgcccgcacccauggcgccc

SEQ ID NO: 166151 - RNA, 31 nt, Human
gcaaccuaaauguccaucaacagaugaaugg

SEQ ID NO: 166152 - RNA, 31 nt, Human
gcaaccuaaguguccaucaacagaugaaugg

SEQ ID NO: 166153 - RNA, 32 nt, Human
gcaaccuagaaacacacauuucuuugaauuua

SEQ ID NO: 166154 - RNA, 32 nt, Human
gcaaccuauucaucugacaaagggcuaauauc

SEQ ID NO: 166155 - RNA, 32 nt, Human
gcaaccucagcacacuuagccucccagugauu

SEQ ID NO: 166156 - RNA, 32 nt, Human
gcaaccucauacacuaaugauaugacuauaaa

SEQ ID NO: 166157 - RNA, 23 nt, Human
gcaaccuccaccucccggguuca

SEQ ID NO: 166158 - RNA, 22 nt, Human
gcaaccuccaccuccugaguuc

SEQ ID NO: 166159 - RNA, 23 nt, Human
gcaaccuccaccuccuggguuca

SEQ ID NO: 166160 - RNA, 23 nt, Human
gcaaccuccaccuuccugguuca

SEQ ID NO: 166161 - RNA, 32 nt, Human
gcaaccucccacugcuggagugcgagugggaa

SEQ ID NO: 166162 - RNA, 23 nt, Human
gcaaccuccgcccccuggguuca

SEQ ID NO: 166163 - RNA, 23 nt, Human
gcaaccuccgccucccagguuca

SEQ ID NO: 166164 - RNA, 23 nt, Human
gcaaccuccgccucccggauuca

SEQ ID NO: 166165 - RNA, 23 nt, Human
gcaaccuccgccucccggguuca

SEQ ID NO: 166166 - RNA, 23 nt, Human
gcaaccuccgccuccuaggucca

SEQ ID NO: 166167 - RNA, 23 nt, Human
gcaaccuccgucuccuggguuca

SEQ ID NO: 166168 - RNA, 23 nt, Human
gcaaccuccgucuuccggguuca

SEQ ID NO: 166169 - RNA, 32 nt, Human
gcaaccuccuacugcucuuccucucucccucu

SEQ ID NO: 166170 - RNA, 32 nt, Human
gcaaccucgacuucucagccuccugggguucc

SEQ ID NO: 166171 - RNA, 32 nt, Human
gcaaccucgcgguuccuggggugcuugugccc

SEQ ID NO: 166172 - RNA, 23 nt, Human
gcaaccucugccucccggguuca

SEQ ID NO: 166173 - RNA, 23 nt, Human
gcaaccucugccuccuggguuca

SEQ ID NO: 166174 - RNA, 32 nt, Human
gcaaccucugcuuacuugcccaacacacccua

SEQ ID NO: 166175 - RNA, 32 nt, Human
gcaaccucuucauuccagagcuagcccaggga

SEQ ID NO: 166176 - RNA, 32 nt, Human
gcaaccucuuccaucgcccugccuacacccgc

SEQ ID NO: 166177 - RNA, 32 nt, Human
gcaaccugaagcuugcaucucagccagcagau

SEQ ID NO: 166178 - RNA, 32 nt, Human
gcaaccugaggaugagauacaccagcuggcug

SEQ ID NO: 166179 - RNA, 32 nt, Human
gcaaccugcacuccagccugggugacagagcg

SEQ ID NO: 166180 - RNA, 32 nt, Human
gcaaccugcggcacacaguccccagcugccgg

SEQ ID NO: 166181 - RNA, 32 nt, Human
gcaaccuggaagagagccucaccagaaccuaa

SEQ ID NO: 166182 - RNA, 29 nt, Human
gcaaccuggcugcuccuggcccuuggcug

SEQ ID NO: 166183 - RNA, 32 nt, Human
gcaaccuggggaagccacaucccacuggaucc

SEQ ID NO: 166184 - RNA, 23 nt, Human
gcaaccugggugacagagcgaga

SEQ ID NO: 166185 - RNA, 32 nt, Human
gcaaccuggugcccagcgugcccagcugcccu

SEQ ID NO: 166186 - RNA, 19 nt, Human
gcaaccugugcaggucuug

SEQ ID NO: 166187 - RNA, 24 nt, Human
gcaaccugugggaaaucugugaga

SEQ ID NO: 166188 - RNA, 32 nt, Human
gcaaccugugugacugggggcaaggagcucaa

SEQ ID NO: 166189 - RNA, 32 nt, Human
gcaaccuugcccugagugaaucauguuaaagc

SEQ ID NO: 166190 - RNA, 32 nt, Human
gcaaccuugccuuccugaccucagcggcccuu

SEQ ID NO: 166191 - RNA, 32 nt, Human
gcaaccuuguaugucugugucugcacugcucc

SEQ ID NO: 166192 - RNA, 32 nt, Human
gcaaccuuguggauugaagguggagaguccuu

SEQ ID NO: 166193 - RNA, 32 nt, Human
gcaaccuuugcacuccacugugcaaugcuggc

SEQ ID NO: 166194 - RNA, 32 nt, Human
gcaaccuuuuacuugauacgauuugcaccuuu

SEQ ID NO: 166195 - RNA, 32 nt, Human
gcaacgaacacucgccuggccugggaaacugc

SEQ ID NO: 166196 - RNA, 32 nt, Human
gcaacgcaccugugccaaacccugccagaagc

SEQ ID NO: 166197 - RNA, 32 nt, Human
gcaacgcagaccaacagaacuucacagugaca

SEQ ID NO: 166198 - RNA, 32 nt, Human
gcaacgcagcagacuccugggccugaugugcu

SEQ ID NO: 166199 - RNA, 28 nt, Human
gcaacgcagugagagaccccaucucuac

SEQ ID NO: 166200 - RNA, 32 nt, Human
gcaacgcagugagagaccccaucucuacaaaa

SEQ ID NO: 166201 - RNA, 32 nt, Human
gcaacgccaguggcaaugggggagaugggaag

SEQ ID NO: 166202 - RNA, 32 nt, Human
gcaacgcgagaggccaagaccauggcugcuac

SEQ ID NO: 166203 - RNA, 32 nt, Human
gcaacgcggaggaaacgggagugaacggagag

SEQ ID NO: 166204 - RNA, 32 nt, Human
gcaacgcuaguggcucaugccuguaauccagc

SEQ ID NO: 166205 - RNA, 32 nt, Human
gcaacggaaagccauagcuaaguucaaggagc

SEQ ID NO: 166206 - RNA, 32 nt, Human
gcaacggaaauuucauugcuccuggguggaaa

SEQ ID NO: 166207 - RNA, 32 nt, Human
gcaacggaacagcucuagaugggggaugcccc

SEQ ID NO: 166208 - RNA, 32 nt, Human
gcaacggcccaggagcucagagcuccacaucu

SEQ ID NO: 166209 - RNA, 32 nt, Human
gcaacggcccuccaaaauugcccccacauugg

SEQ ID NO: 166210 - RNA, 32 nt, Human
gcaacggccguuagaggagcugagggagggaa

SEQ ID NO: 166211 - RNA, 32 nt, Human
gcaacggcggccuccaggccucaggcccccuc

SEQ ID NO: 166212 - RNA, 32 nt, Human
gcaacgggcacugcuaccgccuggugguggag

SEQ ID NO: 166213 - RNA, 32 nt, Human
gcaacgggggccucacagcacagagugaccgc

SEQ ID NO: 166214 - RNA, 32 nt, Human
gcaacgguggccuggauucguggccuggauuc

SEQ ID NO: 166215 - RNA, 32 nt, Human
gcaacguagccugggcucacugugcuggggca

SEQ ID NO: 166216 - RNA, 32 nt, Human
gcaacguggaggcgcugacacgcacggcugcg

SEQ ID NO: 166217 - RNA, 32 nt, Human
gcaacguggcugcugcccugcccaacacucgg

SEQ ID NO: 166218 - RNA, 32 nt, Human
gcaacgugggagaaagaaguugcuggaccagg

SEQ ID NO: 166219 - RNA, 32 nt, Human
gcaacguggggcucaucugccucucucugagc

SEQ ID NO: 166220 - RNA, 32 nt, Human
gcaacuaaacucagccaacaaccugaauaagu

SEQ ID NO: 166221 - RNA, 32 nt, Human
gcaacuacucuacauagccaaauguuuguaaa

SEQ ID NO: 166222 - RNA, 32 nt, Human
gcaacuaguugauguucaucagaaagaggauc

SEQ ID NO: 166223 - RNA, 32 nt, Human
gcaacuaucagggcagcucugccuccuccucc

SEQ ID NO: 166224 - RNA, 32 nt, Human
gcaacuauucuguuucucuccugggcuccccc

SEQ ID NO: 166225 - RNA, 32 nt, Human
gcaacuauuggugcgcuccagccgggcagguu

SEQ ID NO: 166226 - RNA, 32 nt, Human
gcaacucaacacucauggucaagugugauuag

SEQ ID NO: 166227 - RNA, 32 nt, Human
gcaacucaacauccucuucacccugcccugcc

SEQ ID NO: 166228 - RNA, 32 nt, Human
gcaacucacccagcuaauuuuguauuuuuagu

SEQ ID NO: 166229 - RNA, 32 nt, Human
gcaacucagccaagacccagugccuuggauug

SEQ ID NO: 166230 - RNA, 32 nt, Human
gcaacucagggcagaaaacucucuccauuugu

SEQ ID NO: 166231 - RNA, 32 nt, Human
gcaacucaggguggugucugaagagcagagag

SEQ ID NO: 166232 - RNA, 32 nt, Human
gcaacucagguccccagacugcagugagcuga

SEQ ID NO: 166233 - RNA, 32 nt, Human
gcaacucauacuuggcuaaugauauggagcag

SEQ ID NO: 166234 - RNA, 19 nt, Human
gcaacuccacuccuaggua

SEQ ID NO: 166235 - RNA, 32 nt, Human
gcaacucccgcauccuuugcucugccugucgg

SEQ ID NO: 166236 - RNA, 32 nt, Human
gcaacuccuaggcucagucaucagccucauuu

SEQ ID NO: 166237 - RNA, 32 nt, Human
gcaacuccugccucccuuccucacccugucuc

SEQ ID NO: 166238 - RNA, 32 nt, Human
gcaacucggaccugggcuuuucucccagcuuu

SEQ ID NO: 166239 - RNA, 32 nt, Human
gcaacucuacaaaaauacaaaaauuagccagg

SEQ ID NO: 166240 - RNA, 32 nt, Human
gcaacucucaccacaaucaauuuuggaacauu

SEQ ID NO: 166241 - RNA, 32 nt, Human
gcaacucucccacuccccuuucuuggaucaac

SEQ ID NO: 166242 - RNA, 32 nt, Human
gcaacucuccgaggaggaggaggaggagggag

SEQ ID NO: 166243 - RNA, 32 nt, Human
gcaacucucuccuuuuguuaucuugcuuuuau

SEQ ID NO: 166244 - RNA, 32 nt, Human
gcaacucucuuugacagugguaccccaugauc

SEQ ID NO: 166245 - RNA, 32 nt, Human
gcaacucugcaagcucaccugcuggacgugag

SEQ ID NO: 166246 - RNA, 32 nt, Human
gcaacucugcagaaaauguccauccuuguggc

SEQ ID NO: 166247 - RNA, 32 nt, Human
gcaacucugccucuguucucuugcauucuguu

SEQ ID NO: 166248 - RNA, 32 nt, Human
gcaacucugccuuuguguguauuggcgaucau

SEQ ID NO: 166249 - RNA, 32 nt, Human
gcaacucugucucaaaaacaaacaaacaaaca

SEQ ID NO: 166250 - RNA, 32 nt, Human
gcaacucuguucucccccuuccccuagacuuu

SEQ ID NO: 166251 - RNA, 32 nt, Human
gcaacugaaccugaaacucuuccacugugagu

SEQ ID NO: 166252 - RNA, 32 nt, Human
gcaacugagccagcugcuggagauauguaaag

SEQ ID NO: 166253 - RNA, 32 nt, Human
gcaacugagcuuccccaucccuccccagagcu

SEQ ID NO: 166254 - RNA, 32 nt, Human
gcaacugaugaaaggaggaagaagaaagggac

SEQ ID NO: 166255 - RNA, 32 nt, Human
gcaacugaugccacuauauuugccuagcaacu

SEQ ID NO: 166256 - RNA, 32 nt, Human
gcaacugauuucagccagguuuugccacuacc

SEQ ID NO: 166257 - RNA, 32 nt, Human
gcaacugcaacaacacccucgccugcccgcuc

SEQ ID NO: 166258 - RNA, 22 nt, Human
gcaacugcacagccccacaggc

SEQ ID NO: 166259 - RNA, 32 nt, Human
gcaacugcaccggugccagcugucuugggggc

SEQ ID NO: 166260 - RNA, 32 nt, Human
gcaacugccuggggccgggguuucccuuccug

SEQ ID NO: 166261 - RNA, 17 nt, Human
gcaacugcuuccaugcc

SEQ ID NO: 166262 - RNA, 18 nt, Human
gcaacugcuugaccacug

SEQ ID NO: 166263 - RNA, 32 nt, Human
gcaacugcuuuuauguucugucuccuuccaua

SEQ ID NO: 166264 - RNA, 32 nt, Human
gcaacuggaaccacgggugcaccccaccacgc

SEQ ID NO: 166265 - RNA, 32 nt, Human
gcaacuggaagguagaauagucuuauucaagg

SEQ ID NO: 166266 - RNA, 19 nt, Human
gcaacuggaauggcagcaa

SEQ ID NO: 166267 - RNA, 32 nt, Human
gcaacuggcugcagaucacagacacagugagg

SEQ ID NO: 166268 - RNA, 32 nt, Human
gcaacugggaaggcuuggagcggcacugauau

SEQ ID NO: 166269 - RNA, 32 nt, Human
gcaacuguaccuucuccaacauaggccacuca

SEQ ID NO: 166270 - RNA, 32 nt, Human
gcaacuguaugaggaggaggaggaggaggaug

SEQ ID NO: 166271 - RNA, 22 nt, Human
gcaacuguauucauacauguca

SEQ ID NO: 166272 - RNA, 32 nt, Human
gcaacuguccccucaguuccguggucgcgugg

SEQ ID NO: 166273 - RNA, 18 nt, Human
gcaacuguguacauguca

SEQ ID NO: 166274 - RNA, 32 nt, Human
gcaacuguugauuuccucaacauggcucacaa

SEQ ID NO: 166275 - RNA, 32 nt, Human
gcaacuguuggauuuucucauguuuggaacaa

SEQ ID NO: 166276 - RNA, 32 nt, Human
gcaacuuagcugauguggaggaaugguucuca

SEQ ID NO: 166277 - RNA, 32 nt, Human
gcaacuucagaccauuaugauagagccugcuc

SEQ ID NO: 166278 - RNA, 31 nt, Human
gcaacuuccuguagugagcacuuuguaugaa

SEQ ID NO: 166279 - RNA, 32 nt, Human
gcaacuucuagcagucaucugagaugagcacc

SEQ ID NO: 166280 - RNA, 32 nt, Human
gcaacuucuucgcaggacuccagccuggccgc

SEQ ID NO: 166281 - RNA, 32 nt, Human
gcaacuugccgcggacugccugggcuuagcca

SEQ ID NO: 166282 - RNA, 32 nt, Human
gcaacuuggcaaaacaaagcccaaguuuucaa

SEQ ID NO: 166283 - RNA, 32 nt, Human
gcaacuuggcuucacaggaucugccugguuga

SEQ ID NO: 166284 - RNA, 31 nt, Human
gcaacuuuaguguaauuccuaccucauuugg

SEQ ID NO: 166285 - RNA, 32 nt, Human
gcaacuuucccaacuacccaaccccaccaugg

SEQ ID NO: 166286 - RNA, 32 nt, Human
gcaacuuugaaugcuuucuuacuuguuuugug

SEQ ID NO: 166287 - RNA, 32 nt, Human
gcaacuuuggcagugagccucuguggcacagc

SEQ ID NO: 166288 - RNA, 32 nt, Human
gcaacuuuucuuggugucucaaaggaguaacu

SEQ ID NO: 166289 - RNA, 32 nt, Human
gcaagaaaaggagccugugagcagggguucca

SEQ ID NO: 166290 - RNA, 32 nt, Human
gcaagaaagcuccaagagagucaguguagcug

SEQ ID NO: 166291 - RNA, 32 nt, Human
gcaagaaaggaaaggauccuguggaagggucu

SEQ ID NO: 166292 - RNA, 18 nt, Human
gcaagaaaucaccugcug

SEQ ID NO: 166293 - RNA, 32 nt, Human
gcaagaacagcucagcaggaauacucauaaag

SEQ ID NO: 166294 - RNA, 32 nt, Human
gcaagaacaggcagagguaaaaagaugaugga

SEQ ID NO: 166295 - RNA, 32 nt, Human
gcaagaacaggggcacuagcugccuuauuagc

SEQ ID NO: 166296 - RNA, 32 nt, Human
gcaagaacaguucuauccuggugccuuacgaa

SEQ ID NO: 166297 - RNA, 32 nt, Human
gcaagaacauuaauaaacuaaaaacuucaugu

SEQ ID NO: 166298 - RNA, 32 nt, Human
gcaagaacauucauguaggagcccgaggacca

SEQ ID NO: 166299 - RNA, 32 nt, Human
gcaagaacucugcagcuuccugccuucugggu

SEQ ID NO: 166300 - RNA, 32 nt, Human
gcaagaacugcaacaggcucuccuggguccug

SEQ ID NO: 166301 - RNA, 32 nt, Human
gcaagaagaaaagcacaugaacaggugucuua

SEQ ID NO: 166302 - RNA, 32 nt, Human
gcaagaagaaaauucucguccuuuuucauuac

SEQ ID NO: 166303 - RNA, 32 nt, Human
gcaagaagaaaccaggcucuuccuucaacauu

SEQ ID NO: 166304 - RNA, 32 nt, Human
gcaagaagaugggucuucauccuaacccacgg

SEQ ID NO: 166305 - RNA, 32 nt, Human
gcaagaagauguuucuguggcuguuucugauu

SEQ ID NO: 166306 - RNA, 32 nt, Human
gcaagaagcugggaucgcugcagccauguuuu

SEQ ID NO: 166307 - RNA, 32 nt, Human
gcaagaaggagagaagcgaaggaguggggacu

SEQ ID NO: 166308 - RNA, 19 nt, Human
gcaagaaggcggggagcag

SEQ ID NO: 166309 - RNA, 25 nt, Human
gcaagaagggaaagacagagaguga

SEQ ID NO: 166310 - RNA, 32 nt, Human
gcaagaaguccuuggggaagcugcuggucugg

SEQ ID NO: 166311 - RNA, 32 nt, Human
gcaagaagucuggaugaugccuuaaacuuaau

SEQ ID NO: 166312 - RNA, 32 nt, Human
gcaagaagugugcuuugcugguuuaguccuau

SEQ ID NO: 166313 - RNA, 32 nt, Human
gcaagaauagagcaggccugagggccauaggc

SEQ ID NO: 166314 - RNA, 24 nt, Human
gcacuccagccuggccuauaagag

SEQ ID NO: 166315 - RNA, 23 nt, Human
gcacuccagccuggcgacaagag

SEQ ID NO: 166316 - RNA, 22 nt, Human
gcacuccagccuggcgacagag

SEQ ID NO: 166317 - RNA, 32 nt, Human
gcacuccagccuggcgacagagcaagacucca

SEQ ID NO: 166318 - RNA, 32 nt, Human
gcacuccagccuggcgacagagcaagacucug

SEQ ID NO: 166319 - RNA, 32 nt, Human
gcacuccagccuggcgacagagcaagacuucg

SEQ ID NO: 166320 - RNA, 32 nt, Human
gcacuccagccuggcgacagagcgagacaccg

SEQ ID NO: 166321 - RNA, 32 nt, Human
gcacuccagccuggcgacagagcgagacuccc

SEQ ID NO: 166322 - RNA, 32 nt, Human
gcacuccagccuggcgacagagcgagacuccg

SEQ ID NO: 166323 - RNA, 32 nt, Human
gcacuccagccuggcgacagagcgagacucgu

SEQ ID NO: 166324 - RNA, 32 nt, Human
gcacuccagccuggcgacagagcgagacucug

SEQ ID NO: 166325 - RNA, 22 nt, Human
gcacuccagccuggcuacagag

SEQ ID NO: 166326 - RNA, 23 nt, Human
gcacuccagccuggcugacagag

SEQ ID NO: 166327 - RNA, 24 nt, Human
gcacuccagccugggaaacaagag

SEQ ID NO: 166328 - RNA, 23 nt, Human
gcacuccagccugggaaauagag

SEQ ID NO: 166329 - RNA, 23 nt, Human
gcacuccagccugggaagcagag

SEQ ID NO: 166330 - RNA, 20 nt, Human
gcacuccagccugggagaca

SEQ ID NO: 166331 - RNA, 23 nt, Human
gcacuccagccugggagacagag

SEQ ID NO: 166332 - RNA, 32 nt, Human
gcacuccagccugggagacagagcaagacuca

SEQ ID NO: 166333 - RNA, 32 nt, Human
gcacuccagccugggagacagagcaagacucc

SEQ ID NO: 166334 - RNA, 32 nt, Human
gcacuccagccugggagacagagcaagacucu

SEQ ID NO: 166335 - RNA, 20 nt, Human
gcacuccagccugggagaua

SEQ ID NO: 166336 - RNA, 18 nt, Human
gcacuccagccugggcaa

SEQ ID NO: 166337 - RNA, 24 nt, Human
gcacuccagccugggcaaaaagag

SEQ ID NO: 166338 - RNA, 32 nt, Human
gcacuccagccugggcaaaaagagugagacuc

SEQ ID NO: 166339 - RNA, 23 nt, Human
gcacuccagccugggcaaaagag

SEQ ID NO: 166340 - RNA, 19 nt, Human
gcacuccagccugggcaac

SEQ ID NO: 166341 - RNA, 20 nt, Human
gcacuccagccugggcaaca

SEQ ID NO: 166342 - RNA, 21 nt, Human
gcacuccagccugggcaacaa

SEQ ID NO: 166343 - RNA, 22 nt, Human
gcacuccagccugggcaacaag

SEQ ID NO: 166344 - RNA, 24 nt, Human
gcacuccagccugggcaacaagaa

SEQ ID NO: 166345 - RNA, 24 nt, Human
gcacuccagccugggcaacaagag

SEQ ID NO: 166346 - RNA, 23 nt, Human
gcacuccagccugggcaacaagg

SEQ ID NO: 166347 - RNA, 24 nt, Human
gcacuccagccugggcaacacaga

SEQ ID NO: 166348 - RNA, 21 nt, Human
gcacuccagccugggcaacag

SEQ ID NO: 166349 - RNA, 22 nt, Human
gcacuccagccugggcaacaga

SEQ ID NO: 166350 - RNA, 23 nt, Human
gcacuccagccugggcaacagaa

SEQ ID NO: 166351 - RNA, 23 nt, Human
gcacuccagccugggcaacagag

SEQ ID NO: 166352 - RNA, 32 nt, Human
gcacuccagccugggcaacagagcaagacccc

SEQ ID NO: 166353 - RNA, 32 nt, Human
gcacuccagccugggcaacagagcaagaccuu

SEQ ID NO: 166354 - RNA, 32 nt, Human
gcacuccagccugggcaacagagcaagacucc

SEQ ID NO: 166355 - RNA, 32 nt, Human
gcacuccagccugggcaacagagcaagacucg

SEQ ID NO: 166356 - RNA, 32 nt, Human
gcacuccagccugggcaacagagcaagacucu

SEQ ID NO: 166357 - RNA, 32 nt, Human
gcacuccagccugggcaacagagcaagacugc

SEQ ID NO: 166358 - RNA, 32 nt, Human
gcacuccagccugggcaacagagcaagacugu

SEQ ID NO: 166359 - RNA, 32 nt, Human
gcacuccagccugggcaacagagcaagagucc

SEQ ID NO: 166360 - RNA, 32 nt, Human
gcacuccagccugggcaacagagcaagauccu

SEQ ID NO: 166361 - RNA, 32 nt, Human
gcacuccagccugggcaacagagcaaggcucu

SEQ ID NO: 166362 - RNA, 32 nt, Human
gcacuccagccugggcaacagagcaaggcugu

SEQ ID NO: 166363 - RNA, 32 nt, Human
gcacuccagccugggcaacagagccaggcccu

SEQ ID NO: 166364 - RNA, 32 nt, Human
gcacuccagccugggcaacagagcgaggcucu

SEQ ID NO: 166365 - RNA, 22 nt, Human
gcacuccagccugggcaacagg

SEQ ID NO: 166366 - RNA, 24 nt, Human
gcacuccagccugggcaacaggag

SEQ ID NO: 166367 - RNA, 23 nt, Human
gcacuccagccugggcaacaggg

SEQ ID NO: 166368 - RNA, 25 nt, Human
gcacuccagccugggcaacagugag

SEQ ID NO: 166369 - RNA, 21 nt, Human
gcacuccagccugggcaacga

SEQ ID NO: 166370 - RNA, 22 nt, Human
gcacuccagccugggcaacgag

SEQ ID NO: 166371 - RNA, 24 nt, Human
gcacuccagccugggcaacgagag

SEQ ID NO: 166372 - RNA, 22 nt, Human
gcacuccagccugggcaacgga

SEQ ID NO: 166373 - RNA, 24 nt, Human
gcacuccagccugggcaacggaga

SEQ ID NO: 166374 - RNA, 22 nt, Human
gcacuccagccugggcaacggg

SEQ ID NO: 166375 - RNA, 23 nt, Human
gcacuccagccugggcaacugag

SEQ ID NO: 166376 - RNA, 24 nt, Human
gcacuccagccugggcaauaagag

SEQ ID NO: 166377 - RNA, 23 nt, Human
gcacuccagccugggcaauagag

SEQ ID NO: 166378 - RNA, 21 nt, Human
gcacuccagccugggcaaugg

SEQ ID NO: 166379 - RNA, 24 nt, Human
gcacuccagccugggcaauggaga

SEQ ID NO: 166380 - RNA, 21 nt, Human
gcacuccagccugggcaccaa

SEQ ID NO: 166381 - RNA, 23 nt, Human
gcacuccagccugggcaccagag

SEQ ID NO: 166382 - RNA, 24 nt, Human
gcacuccagccugggcagcaagag

SEQ ID NO: 166383 - RNA, 23 nt, Human
gcacuccagccugggcagcagag

SEQ ID NO: 166384 - RNA, 23 nt, Human
gcacuccagccugggcagcugaa

SEQ ID NO: 166385 - RNA, 22 nt, Human
gcacuccagccugggcauagag

SEQ ID NO: 166386 - RNA, 22 nt, Human
gcacuccagccugggcaugaga

SEQ ID NO: 166387 - RNA, 20 nt, Human
gcacuccagccugggccaca

SEQ ID NO: 166388 - RNA, 23 nt, Human
gcacuccagccugggccacagaa

SEQ ID NO: 166389 - RNA, 23 nt, Human
gcacuccagccugggccacagag

SEQ ID NO: 166390 - RNA, 18 nt, Human
gcacuccagccugggcga

SEQ ID NO: 166391 - RNA, 23 nt, Human
gcacuccagccugggcgaaagag

SEQ ID NO: 166392 - RNA, 20 nt, Human
gcacuccagccugggcgaca

SEQ ID NO: 166393 - RNA, 21 nt, Human
gcacuccagccugggcgacaa

SEQ ID NO: 166394 - RNA, 24 nt, Human
gcacuccagccugggcgacaagag

SEQ ID NO: 166395 - RNA, 21 nt, Human
gcacuccagccugggcgacag

SEQ ID NO: 166396 - RNA, 23 nt, Human
gcacuccagccugggcgacagaa

SEQ ID NO: 166397 - RNA, 23 nt, Human
gcacuccagccugggcgacagag

SEQ ID NO: 166398 - RNA, 32 nt, Human
gcacuccagccugggcgacagagggugacucc

SEQ ID NO: 166399 - RNA, 24 nt, Human
gcacuccagccugggcgacaguga

SEQ ID NO: 166400 - RNA, 32 nt, Human
gcacuccagccugggcgacagugcaagacucu

SEQ ID NO: 166401 - RNA, 22 nt, Human
gcacuccagccugggcgacgag

SEQ ID NO: 166402 - RNA, 23 nt, Human
gcacuccagccugggcgacggag

SEQ ID NO: 166403 - RNA, 23 nt, Human
gcacuccagccugggcgacugaa

SEQ ID NO: 166404 - RNA, 24 nt, Human
gcacuccagccugggcgacuguga

SEQ ID NO: 166405 - RNA, 23 nt, Human
gcacuccagccugggcgauagag

SEQ ID NO: 166406 - RNA, 21 nt, Human
gcacuccagccugggcgaugg

SEQ ID NO: 166407 - RNA, 23 nt, Human
gcacuccagccugggcggcagag

SEQ ID NO: 166408 - RNA, 23 nt, Human
gcacuccagccugggcgucagag

SEQ ID NO: 166409 - RNA, 21 nt, Human
gcacuccagccugggcuacaa

SEQ ID NO: 166410 - RNA, 24 nt, Human
gcacuccagccugggcuacaagag

SEQ ID NO: 166411 - RNA, 22 nt, Human
gcacuccagccugggcuacaga

SEQ ID NO: 166412 - RNA, 23 nt, Human
gcacuccagccugggcuacagag

SEQ ID NO: 166413 - RNA, 24 nt, Human
gcacuccagccugggcuauaagag

SEQ ID NO: 166414 - RNA, 20 nt, Human
gcacuccagccugggcucaa

SEQ ID NO: 166415 - RNA, 23 nt, Human
gcacuccagccuggggaacagag

SEQ ID NO: 166416 - RNA, 32 nt, Human
gcacuccagccuggggaacagagcaagauucu

SEQ ID NO: 166417 - RNA, 32 nt, Human
gcacuccagccuggggaacagagcgagacucc

SEQ ID NO: 166418 - RNA, 22 nt, Human
gcacuccagccuggggacagag

SEQ ID NO: 166419 - RNA, 32 nt, Human
gcacuccagccuggggacagagcaagacucuu

SEQ ID NO: 166420 - RNA, 23 nt, Human
gcacuccagccuggggcugacag

SEQ ID NO: 166421 - RNA, 24 nt, Human
gcacuccagccugggggacaagag

SEQ ID NO: 166422 - RNA, 23 nt, Human
gcacuccagccugggggacagaa

SEQ ID NO: 166423 - RNA, 23 nt, Human
gcacuccagccugggggacagag

SEQ ID NO: 166424 - RNA, 32 nt, Human
gcacuccagccugggggacagagcaagacccu

SEQ ID NO: 166425 - RNA, 32 nt, Human
gcacuccagccugggggacagagcaagacucu

SEQ ID NO: 166426 - RNA, 32 nt, Human
gcacuccagccugggggacagagcaagacugu

SEQ ID NO: 166427 - RNA, 32 nt, Human
gcacuccagccugggggacagagcaaggcucc

SEQ ID NO: 166428 - RNA, 24 nt, Human
gcacuccagccuggggugacagag

SEQ ID NO: 166429 - RNA, 24 nt, Human
gcacuccagccuggggugauagaa

SEQ ID NO: 166430 - RNA, 24 nt, Human
gcacuccagccuggguaacaagag

SEQ ID NO: 166431 - RNA, 21 nt, Human
gcacuccagccuggguaacag

SEQ ID NO: 166432 - RNA, 23 nt, Human
gcacuccagccuggguaacagag

SEQ ID NO: 166433 - RNA, 32 nt, Human
gcacuccagccuggguaacagagcaagaccau

SEQ ID NO: 166434 - RNA, 32 nt, Human
gcacuccagccuggguaacagagcaagacucc

SEQ ID NO: 166435 - RNA, 32 nt, Human
gcacuccagccuggguaacagagcaagacucu

SEQ ID NO: 166436 - RNA, 32 nt, Human
gcacuccagccuggguaacagagcaagagucu

SEQ ID NO: 166437 - RNA, 23 nt, Human
gcacuccagccugggugaaagag

SEQ ID NO: 166438 - RNA, 20 nt, Human
gcacuccagccugggugaca

SEQ ID NO: 166439 - RNA, 21 nt, Human
gcacuccagccugggugacaa

SEQ ID NO: 166440 - RNA, 22 nt, Human
gcacuccagccugggugacaag

SEQ ID NO: 166441 - RNA, 24 nt, Human
gcacuccagccugggugacaagag

SEQ ID NO: 166442 - RNA, 21 nt, Human
gcacuccagccugggugacag

SEQ ID NO: 166443 - RNA, 22 nt, Human
gcacuccagccugggugacaga

SEQ ID NO: 166444 - RNA, 23 nt, Human
gcacuccagccugggugacagaa

SEQ ID NO: 166445 - RNA, 23 nt, Human
gcacuccagccugggugacagag

SEQ ID NO: 166446 - RNA, 24 nt, Human
gcacuccagccugggugacagaga

SEQ ID NO: 166447 - RNA, 22 nt, Human
gcacuccagccugggugacgag

SEQ ID NO: 166448 - RNA, 23 nt, Human
gcacuccagccugggugacggaa

SEQ ID NO: 166449 - RNA, 23 nt, Human
gcacuccagccugggugacugag

SEQ ID NO: 166450 - RNA, 24 nt, Human
gcacuccagccugggugagaagag

SEQ ID NO: 166451 - RNA, 23 nt, Human
gcacuccagccugggugagagag

SEQ ID NO: 166452 - RNA, 24 nt, Human
gcacuccagccugggugauaagag

SEQ ID NO: 166453 - RNA, 23 nt, Human
gcacuccagccugggugauagag

SEQ ID NO: 166454 - RNA, 24 nt, Human
gcacuccagccugggugauggaga

SEQ ID NO: 166455 - RNA, 23 nt, Human
gcacuccagccugggugauggga

SEQ ID NO: 166456 - RNA, 23 nt, Human
gcacuccagccuggguggcagag

SEQ ID NO: 166457 - RNA, 23 nt, Human
gcacuccagccugggugucagag

SEQ ID NO: 166458 - RNA, 22 nt, Human
gcacuccagccuggguuacaga

SEQ ID NO: 166459 - RNA, 21 nt, Human
gcacuccagccuggucaacaa

SEQ ID NO: 166460 - RNA, 32 nt, Human
gcacuccagccuggucaacagagcaagacucc

SEQ ID NO: 166461 - RNA, 24 nt, Human
gcacuccagccuggucgacaagag

SEQ ID NO: 166462 - RNA, 23 nt, Human
gcacuccagccuggucgacagag

SEQ ID NO: 166463 - RNA, 22 nt, Human
gcacuccagccuggugacagaa

SEQ ID NO: 166464 - RNA, 22 nt, Human
gcacuccagccuggugacagag

SEQ ID NO: 166465 - RNA, 32 nt, Human
gcacuccagccuggugacagagcaagacucca

SEQ ID NO: 166466 - RNA, 32 nt, Human
gcacuccagccuggugacagagcaagacuccg

SEQ ID NO: 166467 - RNA, 32 nt, Human
gcacuccagccuggugacagagcaagacucug

SEQ ID NO: 166468 - RNA, 32 nt, Human
gcacuccagccuggugacagagcgagacucca

SEQ ID NO: 166469 - RNA, 32 nt, Human
gcacuccagccuggugacagagcgagacuccg

SEQ ID NO: 166470 - RNA, 32 nt, Human
gcacuccagccuggugacagagcuagauucca

SEQ ID NO: 166471 - RNA, 32 nt, Human
gcacuccagccuggugacagagugagacuccg

SEQ ID NO: 166472 - RNA, 32 nt, Human
gcacuccagccuggugacagagugagacucug

SEQ ID NO: 166473 - RNA, 32 nt, Human
gcacuccagccuggugacagcgugagacucuu

SEQ ID NO: 166474 - RNA, 32 nt, Human
gcacuccagccuggugacagggcgagacuccg

SEQ ID NO: 166475 - RNA, 22 nt, Human
gcacuccagccugguuacagag

SEQ ID NO: 166476 - RNA, 23 nt, Human
gcacuccagccugguugacagag

SEQ ID NO: 166477 - RNA, 32 nt, Human
gcacuccagccugguugacagagcaagacucc

SEQ ID NO: 166478 - RNA, 32 nt, Human
gcacuccagccugguugacagagcaagacucu

SEQ ID NO: 166479 - RNA, 32 nt, Human
gcacuccagccugucgcugugcagaccuggcu

SEQ ID NO: 166480 - RNA, 21 nt, Human
gcacuccagccugugcaacaa

SEQ ID NO: 166481 - RNA, 24 nt, Human
gcacuccagccugugcgacaagag

SEQ ID NO: 166482 - RNA, 23 nt, Human
gcacuccagccugugugaaagag

SEQ ID NO: 166483 - RNA, 23 nt, Human
gcacuccagccugugugacagaa

SEQ ID NO: 166484 - RNA, 20 nt, Human
gcacuccagccuguugacaa

SEQ ID NO: 166485 - RNA, 32 nt, Human
gcacuccagccuugagacagagcgagacccug

SEQ ID NO: 166486 - RNA, 21 nt, Human
gcacuccagccuuggcaacaa

SEQ ID NO: 166487 - RNA, 22 nt, Human
gcacuccagccuugggcgacaa

SEQ ID NO: 166488 - RNA, 24 nt, Human
gcacuccagcucaggcaacaagag

SEQ ID NO: 166489 - RNA, 32 nt, Human
gcacuccagcucggggaacagagcgagaccuu

SEQ ID NO: 166490 - RNA, 32 nt, Human
gcacuccagcugggcgacagagcgagacucca

SEQ ID NO: 166491 - RNA, 32 nt, Human
gcacuccagcugggcgacagagcgagauucca

SEQ ID NO: 166492 - RNA, 32 nt, Human
gcacuccagcuuggugacagagugagauccug

SEQ ID NO: 166493 - RNA, 32 nt, Human
gcacuccaggcgggugacagagcaagacugcg

SEQ ID NO: 166494 - RNA, 32 nt, Human
gcacuccaggcuggacgacagagcaagacccu

SEQ ID NO: 166495 - RNA, 32 nt, Human
gcacuccaguaggagagcaggagaagauaucu

SEQ ID NO: 166496 - RNA, 32 nt, Human
gcacuccagucggguuaacagagcaagacacu

SEQ ID NO: 166497 - RNA, 32 nt, Human
gcacuccagucuggacaacagagcaagacucu

SEQ ID NO: 166498 - RNA, 32 nt, Human
gcacuccagucugggcaacagagcaagacccu

SEQ ID NO: 166499 - RNA, 32 nt, Human
gcacuccagucugggcaacagagcaagacucu

SEQ ID NO: 166500 - RNA, 32 nt, Human
gcacuccaguuuccuuucccugccucuugucc

SEQ ID NO: 166501 - RNA, 24 nt, Human
gcacuccaguuugggcaacaagag

SEQ ID NO: 166502 - RNA, 23 nt, Human
gcacuccaguuugggcaacagaa

SEQ ID NO: 166503 - RNA, 32 nt, Human
gcacuccauccagccugggugacagggcgaga

SEQ ID NO: 166504 - RNA, 32 nt, Human
gcacuccauccagccugggugacagggugaga

SEQ ID NO: 166505 - RNA, 32 nt, Human
gcacuccauccagcuacaggagagauagaagc

SEQ ID NO: 166506 - RNA, 24 nt, Human
gcacuccauccugggcaacaagaa

SEQ ID NO: 166507 - RNA, 32 nt, Human
gcacuccauccugggugacagagcaagacuuc

SEQ ID NO: 166508 - RNA, 32 nt, Human
gcacuccaugcuuagucacugccugcagaggu

SEQ ID NO: 166509 - RNA, 32 nt, Human
gcacuccauuccggaaccuccuggacccucua

SEQ ID NO: 166510 - RNA, 32 nt, Human
gcacucccaccugacacaccaggcgcuaauuc

SEQ ID NO: 166511 - RNA, 32 nt, Human
gcacucccagccaccagugccugucaccucuu

SEQ ID NO: 166512 - RNA, 32 nt, Human
gcacucccagccugggcaacggagugagacuc

SEQ ID NO: 166513 - RNA, 32 nt, Human
gcacuccccaaaacaucccauuuugcaggugu

SEQ ID NO: 166514 - RNA, 32 nt, Human
gcacucccccugggugucgcucuccccuccug

SEQ ID NO: 166515 - RNA, 32 nt, Human
gcacuccccuauugaagaccugcuggagcuca

SEQ ID NO: 166516 - RNA, 32 nt, Human
gcacucccgcccuauuucugcaaguagaacuc

SEQ ID NO: 166517 - RNA, 32 nt, Human
gcacucccuccagccuacccacaaacaggacc

SEQ ID NO: 166518 - RNA, 32 nt, Human
gcacucccuccagcuggccccugcugcugccu

SEQ ID NO: 166519 - RNA, 32 nt, Human
gcacucccugcaggagccaucaucugugaaaa

SEQ ID NO: 166520 - RNA, 32 nt, Human
gcacuccgcagccuuuaagguucgcgcggggg

SEQ ID NO: 166521 - RNA, 21 nt, Human
gcacuccgcugguccaggcgg

SEQ ID NO: 166522 - RNA, 32 nt, Human
gcacuccggagguagagguuguggugagccga

SEQ ID NO: 166523 - RNA, 32 nt, Human
gcacuccggccugaugacagagcgagauuccg

SEQ ID NO: 166524 - RNA, 24 nt, Human
gcacuccggccugggcaacaagag

SEQ ID NO: 166525 - RNA, 32 nt, Human
gcacuccgugagccauguccagucccuuuuau

SEQ ID NO: 166526 - RNA, 32 nt, Human
gcacuccucaagcugucuuuugugcuuagauc

SEQ ID NO: 166527 - RNA, 23 nt, Human
gcacuccucccggguuucugcuc

SEQ ID NO: 166528 - RNA, 20 nt, Human
gcacuccucugucucugcuc

SEQ ID NO: 166529 - RNA, 24 nt, Human
gcacuccugccugggcaacaagag

SEQ ID NO: 166530 - RNA, 32 nt, Human
gcacuccugcugucaaugccuucucauccucc

SEQ ID NO: 166531 - RNA, 32 nt, Human
gcacuccuggacaaccuggacccagaugcaag

SEQ ID NO: 166532 - RNA, 32 nt, Human
gcacuccugggcaacagagcaagacuucgucu

SEQ ID NO: 166533 - RNA, 32 nt, Human
gcacuccuguaacccugggacuuugggaagcu

SEQ ID NO: 166534 - RNA, 32 nt, Human
gcacuccuguaaucccagcuacucagaaggcu

SEQ ID NO: 166535 - RNA, 32 nt, Human
gcacuccuguagucccagcuaaucaggaggcu

SEQ ID NO: 166536 - RNA, 32 nt, Human
gcacuccuguagucccagcuacuaggaaggcu

SEQ ID NO: 166537 - RNA, 21 nt, Human
gcacuccugucccuggccugc

SEQ ID NO: 166538 - RNA, 31 nt, Human
gcacuccuuuggcuggagcacuuguguccau

SEQ ID NO: 166539 - RNA, 32 nt, Human
gcacucgcuggcgaccugcuccagucuccaaa

SEQ ID NO: 166540 - RNA, 32 nt, Human
gcacucggaugucaaguugcucuggcuguuug

SEQ ID NO: 166541 - RNA, 32 nt, Human
gcacucggccaauccgcaucucagcccucuca

SEQ ID NO: 166542 - RNA, 32 nt, Human
gcacucggccccggagagugcagcagacaggg

SEQ ID NO: 166543 - RNA, 32 nt, Human
gcacucggccucccccucaucaccauuccuuc

SEQ ID NO: 166544 - RNA, 32 nt, Human
gcacucgggaguugcucaguggcucugcaccg

SEQ ID NO: 166545 - RNA, 32 nt, Human
gcacucuaagaugaguucaucaacauuguaaa

SEQ ID NO: 166546 - RNA, 32 nt, Human
gcacucuacccaccuauugcuggacuucuguu

SEQ ID NO: 166547 - RNA, 32 nt, Human
gcacucuagccuaggcuacagagcaggacccc

SEQ ID NO: 166548 - RNA, 32 nt, Human
gcacucuagccugagugacagagcagacuccu

SEQ ID NO: 166549 - RNA, 32 nt, Human
gcacucuagccuggcaacagagcgagauucca

SEQ ID NO: 166550 - RNA, 24 nt, Human
gcacucuagccugggcaacaagag

SEQ ID NO: 166551 - RNA, 32 nt, Human
gcacucuagccugggcaacagagcaaggcucu

SEQ ID NO: 166552 - RNA, 32 nt, Human
gcacucuaggagaaggaggggaaccagauguu

SEQ ID NO: 166553 - RNA, 32 nt, Human
gcacucuauuaagcugagggcagagaacuugg

SEQ ID NO: 166554 - RNA, 32 nt, Human
gcacucucaugcuugccgcaucaugccucccu

SEQ ID NO: 166555 - RNA, 32 nt, Human
gcacucuccagccuuuuccuggcugaggaggg

SEQ ID NO: 166556 - RNA, 32 nt, Human
gcacucucugcucugcuguuacucagccccug

SEQ ID NO: 166557 - RNA, 32 nt, Human
gcacucugccuugccagagauuggcuccagaa

SEQ ID NO: 166558 - RNA, 32 nt, Human
gcacucugcucgggggaggcaaggucauuccc

SEQ ID NO: 166559 - RNA, 32 nt, Human
gcacucugcuugcuuuccuaccaguccucccc

SEQ ID NO: 166560 - RNA, 32 nt, Human
gcacucuggaaccucuggccucaggggaccug

SEQ ID NO: 166561 - RNA, 32 nt, Human
gcacucugggaggcggaggcgguggaucacuu

SEQ ID NO: 166562 - RNA, 32 nt, Human
gcacucuggggcuucuccucuccuggagccca

SEQ ID NO: 166563 - RNA, 21 nt, Human
gcacucuggggggccaaggca

SEQ ID NO: 166564 - RNA, 32 nt, Human
gcacucuggggucagcagaguucaaaacgacc

SEQ ID NO: 166565 - RNA, 32 nt, Human
gcacucuggggugggagggucugcagggaauu

SEQ ID NO: 166566 - RNA, 32 nt, Human
gcacucugucuccuccccuccugccugggucc

SEQ ID NO: 166567 - RNA, 31 nt, Human
gcacucugucuucacagcaggagugcugucu

SEQ ID NO: 166568 - RNA, 32 nt, Human
gcacucugugagccauguccagucccuuuuau

SEQ ID NO: 166569 - RNA, 32 nt, Human
gcacucugugucuuguuuaucagcuuugccuc

SEQ ID NO: 166570 - RNA, 31 nt, Human
gcacucuucaugcucauucauuuaaagcauu

SEQ ID NO: 166571 - RNA, 32 nt, Human
gcacucuucauguaaucacauaugugcauaga

SEQ ID NO: 166572 - RNA, 32 nt, Human
gcacucuuccucuucuccuuuuuccgcacuuc

SEQ ID NO: 166573 - RNA, 32 nt, Human
gcacucuucucccacacauacacacacgugca

SEQ ID NO: 166574 - RNA, 32 nt, Human
gcacucuucucucuccaucucuccuuccuccc

SEQ ID NO: 166575 - RNA, 32 nt, Human
gcacucuuguagucccagcuauuugggaggcu

SEQ ID NO: 166576 - RNA, 32 nt, Human
gcacucuuguuugcuuucugcuucacuaucuu

SEQ ID NO: 166577 - RNA, 32 nt, Human
gcacugaaaaccucuccaccugggccaggguu

SEQ ID NO: 166578 - RNA, 24 nt, Human
gcacugaaauagcuuauggcccug

SEQ ID NO: 166579 - RNA, 32 nt, Human
gcacugaacaccaauucuuuacauuccuugaa

SEQ ID NO: 166580 - RNA, 32 nt, Human
gcacugaaccuaccucauccuccuggagggug

SEQ ID NO: 166581 - RNA, 21 nt, Human
gcacugaaccugggaaagaga

SEQ ID NO: 166582 - RNA, 32 nt, Human
gcacugaaccuuaaggcuuuguaugacaguga

SEQ ID NO: 166583 - RNA, 32 nt, Human
gcacugaaccuuaggcuuuguaugacagugaa

SEQ ID NO: 166584 - RNA, 32 nt, Human
gcacugaagguggaacaguugaaggcugagcu

SEQ ID NO: 166585 - RNA, 24 nt, Human
gcacugaaguauaauaaguaaccu

SEQ ID NO: 166586 - RNA, 22 nt, Human
gcacugaaguauuacauaaccu

SEQ ID NO: 166587 - RNA, 32 nt, Human
gcacugacagccaagcugcagcugcagacucg

SEQ ID NO: 166588 - RNA, 18 nt, Human
gcacugacaggaaaccuu

SEQ ID NO: 166589 - RNA, 32 nt, Human
gcacugaccacaccuguauagaccaugcacag

SEQ ID NO: 166590 - RNA, 32 nt, Human
gcacugaccaugagccucaacuccucccucag

SEQ ID NO: 166591 - RNA, 32 nt, Human
gcacugaccccugccccugccugggcccuccc

SEQ ID NO: 166592 - RNA, 32 nt, Human
gcacugaccugccuucugauuggaggcugguu

SEQ ID NO: 166593 - RNA, 32 nt, Human
gcacugagaaaagaauguaaggaugaauagac

SEQ ID NO: 166594 - RNA, 23 nt, Human
gcacugagaaacuccagaggcuu

SEQ ID NO: 166595 - RNA, 32 nt, Human
gcacugagaggagacacaaggagcagcccgca

SEQ ID NO: 166596 - RNA, 32 nt, Human
gcacugagcgcuuugcuucuucaagaguugcg

SEQ ID NO: 166597 - RNA, 32 nt, Human
gcacugagcuaggcagaggagccacagcugag

SEQ ID NO: 166598 - RNA, 32 nt, Human
gcacugagcuugcaaccagauccagagacacu

SEQ ID NO: 166599 - RNA, 20 nt, Human
gcacugaggacccccggaga

SEQ ID NO: 166600 - RNA, 32 nt, Human
gcacugaggagaaugguagagaggagaggaga

SEQ ID NO: 166601 - RNA, 32 nt, Human
gcacugaggcccuggagacagcuguuccacuu

SEQ ID NO: 166602 - RNA, 32 nt, Human
gcacugaggccggccaggucucggggcugccu

SEQ ID NO: 166603 - RNA, 32 nt, Human
gcacugagggaucugaguaggucugggaugga

SEQ ID NO: 166604 - RNA, 32 nt, Human
gcacugagggaugccaguucugccuguucauc

SEQ ID NO: 166605 - RNA, 20 nt, Human
gcacugagggcagaggcccc

SEQ ID NO: 166606 - RNA, 21 nt, Human
gcacugagggccuggcugccc

SEQ ID NO: 166607 - RNA, 32 nt, Human
gcacugaguuugaaugguauaaaaaguauaac

SEQ ID NO: 166608 - RNA, 32 nt, Human
gcacugauacaacauuaccauucuucuaugga

SEQ ID NO: 166609 - RNA, 19 nt, Human
gcacugaucacugugcuug

SEQ ID NO: 166610 - RNA, 32 nt, Human
gcacugaucuuugcaaaggagacuuaauuuca

SEQ ID NO: 166611 - RNA, 32 nt, Human
gcacugaugaggugcuggggaugacaggaagg

SEQ ID NO: 166612 - RNA, 32 nt, Human
gcacugauugcuaaaagaauaacugaauaagg

SEQ ID NO: 166613 - RNA, 21 nt, Human
gcacugauuguuuuagagacu

SEQ ID NO: 166614 - RNA, 32 nt, Human
gcacugcaacacaugcaggcagcuauuugggg

SEQ ID NO: 166615 - RNA, 32 nt, Human
gcacugcaagggcagucaugcccauuauacag

SEQ ID NO: 166616 - RNA, 31 nt, Human
gcacugcaaguguccccaggaggagcacaug

SEQ ID NO: 166617 - RNA, 32 nt, Human
gcacugcacaugcaucgugccguggagaguuu

SEQ ID NO: 166618 - RNA, 18 nt, Human
gcacugcaccugccucca

SEQ ID NO: 166619 - RNA, 32 nt, Human
gcacugcacugaggacccggugccggaggccg

SEQ ID NO: 166620 - RNA, 32 nt, Human
gcacugcagaucagcaaccucagccccaccug

SEQ ID NO: 166621 - RNA, 32 nt, Human
gcacugcagccuagacaacagagcaagacccu

SEQ ID NO: 166622 - RNA, 23 nt, Human
gcacugcagccugggcaacagaa

SEQ ID NO: 166623 - RNA, 25 nt, Human
gcacugcagccuugacccccucccu

SEQ ID NO: 166624 - RNA, 31 nt, Human
gcacugcaggggugucacacagcaggcacac

SEQ ID NO: 166625 - RNA, 32 nt, Human
gcacugcagucuccagccugagccaugggccg

SEQ ID NO: 166626 - RNA, 32 nt, Human
gcacugcaguggcaaaaauggaaacacugacc

SEQ ID NO: 166627 - RNA, 25 nt, Human
gcacugccacgguccuccaggaccu

SEQ ID NO: 166628 - RNA, 32 nt, Human
gcacugccacguauagcacugcagccuuggga

SEQ ID NO: 166629 - RNA, 32 nt, Human
gcacugccacugccuuuggccaccugagguga

SEQ ID NO: 166630 - RNA, 32 nt, Human
gcacugccagguagcugggggaguggcauggg

SEQ ID NO: 166631 - RNA, 32 nt, Human
gcacugccaguggagaugggcgucacuacugc

SEQ ID NO: 166632 - RNA, 32 nt, Human
gcacugccaucuuugagcagagcccagcucug

SEQ ID NO: 166633 - RNA, 32 nt, Human
gcacugccauuuugaggggagaagaaucaauu

SEQ ID NO: 166634 - RNA, 32 nt, Human
gcacugcccagcaacccggucacugcccagga

SEQ ID NO: 166635 - RNA, 21 nt, Human
gcacugcccagccggcugcgg

SEQ ID NO: 166636 - RNA, 32 nt, Human
gcacugccccaucccuggugcuacuggucuuu

SEQ ID NO: 166637 - RNA, 17 nt, Human
gcacugccccgccgcca

SEQ ID NO: 166638 - RNA, 32 nt, Human
gcacugccccuucagcuagccugccuccgucc

SEQ ID NO: 166639 - RNA, 32 nt, Human
gcacugcccgcugugccugccugcaagucuga

SEQ ID NO: 166640 - RNA, 32 nt, Human
gcacugcccugagcgugugcacaccuggccag

SEQ ID NO: 166641 - RNA, 32 nt, Human
gcacugcccugaggcagccucugccuaccuag

SEQ ID NO: 166642 - RNA, 32 nt, Human
gcacugcccuggcucuggguaaggacgagaag

SEQ ID NO: 166643 - RNA, 32 nt, Human
gcacugccgccacacuccccuccugggauggg

SEQ ID NO: 166644 - RNA, 32 nt, Human
gcacugccucuggcaccuggggcagccgcgcc

SEQ ID NO: 166645 - RNA, 32 nt, Human
gcacugccuuucucuguccccaugacuguccc

SEQ ID NO: 166646 - RNA, 32 nt, Human
gcacugccuuuggggcuggagggagacguggg

SEQ ID NO: 166647 - RNA, 32 nt, Human
gcacugcgcagguugcagcccaggcugcagga

SEQ ID NO: 166648 - RNA, 17 nt, Human
gcacugcggccgcgcgg

SEQ ID NO: 166649 - RNA, 32 nt, Human
gcacugcggccugguggcaguguggggaguca

SEQ ID NO: 166650 - RNA, 32 nt, Human
gcacugcuaccgccuggugguggagaaggcgg

SEQ ID NO: 166651 - RNA, 32 nt, Human
gcacugcucacuguggcccguguauucauucc

SEQ ID NO: 166652 - RNA, 32 nt, Human
gcacugcucaucugggcagaggaagcuucaga

SEQ ID NO: 166653 - RNA, 32 nt, Human
gcacugcuccccacucaccugugcucagggcg

SEQ ID NO: 166654 - RNA, 32 nt, Human
gcacugcucugccaagcccugucgaccaauua

SEQ ID NO: 166655 - RNA, 32 nt, Human
gcacugcugcacuccagccugcgggacagagu

SEQ ID NO: 166656 - RNA, 32 nt, Human
gcacugcugccuggucuccacaguagccuccc

SEQ ID NO: 166657 - RNA, 32 nt, Human
gcacugcugcucauagguaccuuuccgcugcc

SEQ ID NO: 166658 - RNA, 32 nt, Human
gcacugcuggggaaguuuguuggucuuuauua

SEQ ID NO: 166659 - RNA, 32 nt, Human
gcacugcuggggucagacaaggcuccauccaa

SEQ ID NO: 166660 - RNA, 32 nt, Human
gcacugcuguacccagccugggccacagugca

SEQ ID NO: 166661 - RNA, 32 nt, Human
gcacugcuuccucccuucuucaacggcaucuc

SEQ ID NO: 166662 - RNA, 32 nt, Human
gcacugcuucucggugucauugcagugugcug

SEQ ID NO: 166663 - RNA, 32 nt, Human
gcacuggaaauugcugcuggagccuggugaag

SEQ ID NO: 166664 - RNA, 19 nt, Human
gcacuggaaccaccuggac

SEQ ID NO: 166665 - RNA, 32 nt, Human
gcacuggaaggcccucccuuuggccugaguac

SEQ ID NO: 166666 - RNA, 19 nt, Human
gcacuggaaucaaaggcuc

SEQ ID NO: 166667 - RNA, 32 nt, Human
gcacuggacacugcucaucccugggugucagg

SEQ ID NO: 166668 - RNA, 32 nt, Human
gcacuggacagagaauguuacugugaauagag

SEQ ID NO: 166669 - RNA, 32 nt, Human
gcacuggacuuaguaucaggagcacugagcuc

SEQ ID NO: 166670 - RNA, 32 nt, Human
gcacuggagagggcggucgcaggagccugcga

SEQ ID NO: 166671 - RNA, 32 nt, Human
gcacuggagccaggcuggaagucaaguggcuu

SEQ ID NO: 166672 - RNA, 32 nt, Human
gcacuggaggauuucucagacacaugcaccag

SEQ ID NO: 166673 - RNA, 32 nt, Human
gcacuggaguuggugagcaugugcucucucuu

SEQ ID NO: 166674 - RNA, 32 nt, Human
gcacuggaugggcugcagcagaggcacugggg

SEQ ID NO: 166675 - RNA, 19 nt, Human
gcacuggcaccuaccacca

SEQ ID NO: 166676 - RNA, 32 nt, Human
gcacuggcagccucugggggaagccugcuccc

SEQ ID NO: 166677 - RNA, 32 nt, Human
gcacuggcagugaccaauuauuauuuuagaga

SEQ ID NO: 166678 - RNA, 32 nt, Human
gcacuggcaugcugggucauggggacagcacg

SEQ ID NO: 166679 - RNA, 32 nt, Human
gcacuggccagacccagccagggauccucgua

SEQ ID NO: 166680 - RNA, 19 nt, Human
gcacuggcccccaagguca

SEQ ID NO: 166681 - RNA, 32 nt, Human
gcacuggccugcccuauugucucccauccuag

SEQ ID NO: 166682 - RNA, 32 nt, Human
gcacuggccuuggacgguauugccugucagug

SEQ ID NO: 166683 - RNA, 19 nt, Human
gcacuggcgccagaggcuu

SEQ ID NO: 166684 - RNA, 22 nt, Human
gcacuggcucacgccuguaauc

SEQ ID NO: 166685 - RNA, 32 nt, Human
gcacuggcucauuuuaugugcaaagaaaagau

SEQ ID NO: 166686 - RNA, 32 nt, Human
gcacuggcuccgaguuccccuccugggauuug

SEQ ID NO: 166687 - RNA, 32 nt, Human
gcacuggcucucaggggccagcuccccauggg

SEQ ID NO: 166688 - RNA, 32 nt, Human
gcacuggcugccuggcugccuccuggaguggg

SEQ ID NO: 166689 - RNA, 32 nt, Human
gcacuggcugggaccauggugggcaggggcuu

SEQ ID NO: 166690 - RNA, 32 nt, Human
gcacuggcuucucuucucuguguccuuagcau

SEQ ID NO: 166691 - RNA, 32 nt, Human
gcacuggcuucuggacagcaaugagugcccgg

SEQ ID NO: 166692 - RNA, 16 nt, Human
gcacugggagaagccu

SEQ ID NO: 166693 - RNA, 32 nt, Human
gcacugggagcacagccagguucccccagacc

SEQ ID NO: 166694 - RNA, 32 nt, Human
gcacugggauucuucacucugccccucacuuc

SEQ ID NO: 166695 - RNA, 32 nt, Human
gcacugggcagccccuuggacugaggcaguuu

SEQ ID NO: 166696 - RNA, 32 nt, Human
gcacugggcguggugcaugccuguaaucccag

SEQ ID NO: 166697 - RNA, 32 nt, Human
gcacugggcugcaggugcagggcacgagcagg

SEQ ID NO: 166698 - RNA, 32 nt, Human
gcacugggcuuccugaccuaagcaguaugacu

SEQ ID NO: 166699 - RNA, 24 nt, Human
gcacugggcuucugcuuucugcuc

SEQ ID NO: 166700 - RNA, 32 nt, Human
gcacugggcuucugcuuucugcucuggcccac

SEQ ID NO: 166701 - RNA, 22 nt, Human
gcacuggggagcgcacugguga

SEQ ID NO: 166702 - RNA, 32 nt, Human
gcacuggggagucuuuguggauucugaggccc

SEQ ID NO: 166703 - RNA, 32 nt, Human
gcacuggggcaggggccgggggcagucugaga

SEQ ID NO: 166704 - RNA, 32 nt, Human
gcacuggggcuggggccugugccuuaucggcu

SEQ ID NO: 166705 - RNA, 32 nt, Human
gcacugggggcugggugcuggggaggggcugg

SEQ ID NO: 166706 - RNA, 20 nt, Human
gcacugggggcuucucccca

SEQ ID NO: 166707 - RNA, 32 nt, Human
gcacuggggugagggaugcaaugcggguuuau

SEQ ID NO: 166708 - RNA, 32 nt, Human
gcacuggggugcccugaauggcacggacaacc

SEQ ID NO: 166709 - RNA, 32 nt, Human
gcacuggggugggggagcaggagaaagccaga

SEQ ID NO: 166710 - RNA, 32 nt, Human
gcacuggguggaagaaggguaggagggcuauu

SEQ ID NO: 166711 - RNA, 23 nt, Human
gcacugguaaucccagguacuca

SEQ ID NO: 166712 - RNA, 32 nt, Human
gcacuggugaagcugccguggggucaggagga

SEQ ID NO: 166713 - RNA, 32 nt, Human
gcacuggugcaggagauuucagagugagagug

SEQ ID NO: 166714 - RNA, 32 nt, Human
gcacuggugcucaccucuaccuccuguccuca

SEQ ID NO: 166715 - RNA, 32 nt, Human
gcacuggugggauguggagucaggagcaacca

SEQ ID NO: 166716 - RNA, 32 nt, Human
gcacuggugguccuccuccuccucacucuucu

SEQ ID NO: 166717 - RNA, 32 nt, Human
gcacugguguggggcccaggagaggaccacgg

SEQ ID NO: 166718 - RNA, 32 nt, Human
gcacugguucucaaacuuuuuggucucagacc

SEQ ID NO: 166719 - RNA, 32 nt, Human
gcacugguuuagggacuuagagagguaggcac

SEQ ID NO: 166720 - RNA, 32 nt, Human
gcacuguaaaugcagccuucuuuucaaaacug

SEQ ID NO: 166721 - RNA, 32 nt, Human
gcacuguacuaaccuacagagaugcuaagaga

SEQ ID NO: 166722 - RNA, 32 nt, Human
gcacuguacuggguagagaagugccuauacuu

SEQ ID NO: 166723 - RNA, 18 nt, Human
gcacuguagcaaaagcca

SEQ ID NO: 166724 - RNA, 32 nt, Human
gcacuguagccucgccgucugugaauuggacc

SEQ ID NO: 166725 - RNA, 32 nt, Human
gcacuguaggcauguaccaccaugcccagcua

SEQ ID NO: 166726 - RNA, 32 nt, Human
gcacuguaggcggccgaggugggugaaucaca

SEQ ID NO: 166727 - RNA, 32 nt, Human
gcacugucacccaggcugcuggaguacagugg

SEQ ID NO: 166728 - RNA, 32 nt, Human
gcacugucacccaggcuggagugcaguggcau

SEQ ID NO: 166729 - RNA, 32 nt, Human
gcacugucacccaggcuggagugcaguggcgc

SEQ ID NO: 166730 - RNA, 32 nt, Human
gcacugucacccgggcuggagugcaauggcuc

SEQ ID NO: 166731 - RNA, 32 nt, Human
gcacugucacugcaaguccagcccccuuugcc

SEQ ID NO: 166732 - RNA, 32 nt, Human
gcacugucacugcccaccuccuugggccuccu

SEQ ID NO: 166733 - RNA, 32 nt, Human
gcacugucaugucuauuuccaugccuaacuca

SEQ ID NO: 166734 - RNA, 32 nt, Human
gcacuguccacccagggagaguccauuaagcc

SEQ ID NO: 166735 - RNA, 32 nt, Human
gcacugucccccaaggucgcggcagaggagau

SEQ ID NO: 166736 - RNA, 32 nt, Human
gcacugucccccaggcuggagugcaguggcau

SEQ ID NO: 166737 - RNA, 32 nt, Human
gcacugucgccuaggcuggagugcaacagugu

SEQ ID NO: 166738 - RNA, 32 nt, Human
gcacugucucccaggcuggacugcagcagcgc

SEQ ID NO: 166739 - RNA, 22 nt, Human
gcacugucucggcucacugcag

SEQ ID NO: 166740 - RNA, 32 nt, Human
gcacugucuuucccaucucuaucucuccucua

SEQ ID NO: 166741 - RNA, 32 nt, Human
gcacugugacggugcccaccucguggggugug

SEQ ID NO: 166742 - RNA, 32 nt, Human
gcacugugaggcggggcgauggggaagggccg

SEQ ID NO: 166743 - RNA, 32 nt, Human
gcacugugaugggaguccacggcuagggagga

SEQ ID NO: 166744 - RNA, 32 nt, Human
gcacugugaugggggcccucuccucugcugac

SEQ ID NO: 166745 - RNA, 32 nt, Human
gcacugugcaagacacuggggauaagaaauga

SEQ ID NO: 166746 - RNA, 32 nt, Human
gcacugugcugggagccagggggccugggagg

SEQ ID NO: 166747 - RNA, 20 nt, Human
gcacuguggcacugccacca

SEQ ID NO: 166748 - RNA, 32 nt, Human
gcacuguggccgaggcccaccugcugacaucu

SEQ ID NO: 166749 - RNA, 32 nt, Human
gcacuguggccuuggucuaacuuuugugugaa

SEQ ID NO: 166750 - RNA, 24 nt, Human
gcacuguggcucacgccuguaauc

SEQ ID NO: 166751 - RNA, 24 nt, Human
gcacuguggcucacuccuguaauc

SEQ ID NO: 166752 - RNA, 24 nt, Human
gcacuguggcuuacaccuauaauc

SEQ ID NO: 166753 - RNA, 32 nt, Human
gcacugugggaacagacacagagauggagaag

SEQ ID NO: 166754 - RNA, 32 nt, Human
gcacugugggaggccaagggggcagaucacuu

SEQ ID NO: 166755 - RNA, 32 nt, Human
gcacugugggaggcugaggugguuguauugcu

SEQ ID NO: 166756 - RNA, 21 nt, Human
gcacuguggggagucaaggca

SEQ ID NO: 166757 - RNA, 32 nt, Human
gcacugugggucccuggcaagugucuugugau

SEQ ID NO: 166758 - RNA, 24 nt, Human
gcacugugguucaugccuauaauc

SEQ ID NO: 166759 - RNA, 32 nt, Human
gcacuguguaccuaccagucuccagggacuau

SEQ ID NO: 166760 - RNA, 32 nt, Human
gcacugugucuugccuuucagaucuuaacaga

SEQ ID NO: 166761 - RNA, 32 nt, Human
gcacugugugagugugcacguguaugcacaca

SEQ ID NO: 166762 - RNA, 32 nt, Human
gcacuguguuccagaccgugucugacuuagug

SEQ ID NO: 166763 - RNA, 32 nt, Human
gcacuguuaucugagcaugaaagaacuggaaa

SEQ ID NO: 166764 - RNA, 32 nt, Human
gcacuguucaaccuccugaguggucgcuuuaa

SEQ ID NO: 166765 - RNA, 32 nt, Human
gcacuguugcccaggcuggacugcaguggcgu

SEQ ID NO: 166766 - RNA, 32 nt, Human
gcacuguugcccaggcuggagagcaguggcgc

SEQ ID NO: 166767 - RNA, 32 nt, Human
gcacuguugcccaggcuggagugcaguggcgu

SEQ ID NO: 166768 - RNA, 32 nt, Human
gcacuguugcccagugugggaguugguuuaaa

SEQ ID NO: 166769 - RNA, 32 nt, Human
gcacuguugcugacuacuacucugccaaucgg

SEQ ID NO: 166770 - RNA, 32 nt, Human
gcacuguuggggcucccauggcagggagaaua

SEQ ID NO: 166771 - RNA, 18 nt, Human
gcacuguuuucaaaguua

SEQ ID NO: 166772 - RNA, 32 nt, Human
gcacuuaaagcuuucagaauaugucagugcug

SEQ ID NO: 166773 - RNA, 32 nt, Human
gcacuuaaaugauguaauauuccaggaugcug

SEQ ID NO: 166774 - RNA, 32 nt, Human
gcacuuaaccacccagcaacuacuccuggaug

SEQ ID NO: 166775 - RNA, 32 nt, Human
gcacuuaaccauuucucuuucuucuuauggau

SEQ ID NO: 166776 - RNA, 20 nt, Human
gcacuuaaggggccaaggca

SEQ ID NO: 166777 - RNA, 32 nt, Human
gcacuuaauaccugcaauguuugcuacuguac

SEQ ID NO: 166778 - RNA, 32 nt, Human
gcacuuacagaagagucucuaaugaaaacacu

SEQ ID NO: 166779 - RNA, 32 nt, Human
gcacuuaccacacucugaggaagccugacucu

SEQ ID NO: 166780 - RNA, 32 nt, Human
gcacuuacggauucuggugggguguguuccaa

SEQ ID NO: 166781 - RNA, 32 nt, Human
gcacuuacugaaaucgcugguacucugaauaa

SEQ ID NO: 166782 - RNA, 32 nt, Human
gcacuuagaagaggacaggagauaguaaaagg

SEQ ID NO: 166783 - RNA, 20 nt, Human
gcacuuagaccugccagcca

SEQ ID NO: 166784 - RNA, 32 nt, Human
gcacuuagauauggaaaauggaagccaaauuu

SEQ ID NO: 166785 - RNA, 32 nt, Human
gcacuuagccucucccuuccuaauuucuagcc

SEQ ID NO: 166786 - RNA, 32 nt, Human
gcacuuagcucucccuggggacuuaaauuuug

SEQ ID NO: 166787 - RNA, 32 nt, Human
gcacuuaggagagagaggagggggaauaauag

SEQ ID NO: 166788 - RNA, 32 nt, Human
gcacuuaguaagucuucaucuaugcauguuuu

SEQ ID NO: 166789 - RNA, 32 nt, Human
gcacuuauguuacugguguccagcugaguuuc

SEQ ID NO: 166790 - RNA, 32 nt, Human
gcacuuauugcuuucugacagaauuauagaug

SEQ ID NO: 166791 - RNA, 23 nt, Human
gcacuuauuuauuguuguuggag

SEQ ID NO: 166792 - RNA, 32 nt, Human
gcacuucaaccuggucaacagagcgagacucc

SEQ ID NO: 166793 - RNA, 32 nt, Human
gcacuucagaggaggagccaggaucgaaugga

SEQ ID NO: 166794 - RNA, 32 nt, Human
gcacuucagaugagaauggagagguagggagc

SEQ ID NO: 166795 - RNA, 24 nt, Human
gcacuucagcccgggcaacaagag

SEQ ID NO: 166796 - RNA, 24 nt, Human
gcacuucagccugggcaacaagag

SEQ ID NO: 166797 - RNA, 32 nt, Human
gcacuucagccuggugacagagcgagacucgu

SEQ ID NO: 166798 - RNA, 32 nt, Human
gcacuucaggggcagagaguuucuaugaugug

SEQ ID NO: 166799 - RNA, 32 nt, Human
gcacuucaguccuauucaacauaguacuggaa

SEQ ID NO: 166800 - RNA, 32 nt, Human
gcacuucauccuaggcaacagagcgagacucu

SEQ ID NO: 166801 - RNA, 32 nt, Human
gcacuuccaacauuauuaaauaauaagaaagc

SEQ ID NO: 166802 - RNA, 32 nt, Human
gcacuuccaacuucuuguuugacaguguuauu

SEQ ID NO: 166803 - RNA, 32 nt, Human
gcacuuccagaaacuugacacacacgugcaca

SEQ ID NO: 166804 - RNA, 32 nt, Human
gcacuuccagcacuuugagaacgaguugaaua

SEQ ID NO: 166805 - RNA, 32 nt, Human
gcacuuccagccugggugacacagugagaccc

SEQ ID NO: 166806 - RNA, 32 nt, Human
gcacuuccagccugggugacagagugagaccc

SEQ ID NO: 166807 - RNA, 32 nt, Human
gcacuucccaggaucugcuccaacagaauauu

SEQ ID NO: 166808 - RNA, 32 nt, Human
gcacuucccugcuggggcagaggccaagccag

SEQ ID NO: 166809 - RNA, 27 nt, Human
gcacuuccgaaaaacacagcccugaca

SEQ ID NO: 166810 - RNA, 32 nt, Human
gcacuuccguucagauucauuuugcuaaucuc

SEQ ID NO: 166811 - RNA, 32 nt, Human
gcacuuccuccacagucccccacccaccuccu

SEQ ID NO: 166812 - RNA, 17 nt, Human
gcacuuccucuugcccu

SEQ ID NO: 166813 - RNA, 32 nt, Human
gcacuuccugucugauguccaggaugucacau

SEQ ID NO: 166814 - RNA, 32 nt, Human
gcacuuccuucucggcuagauuaucugaaacu

SEQ ID NO: 166815 - RNA, 32 nt, Human
gcacuuccuuuguuuucuuucugccauagggu

SEQ ID NO: 166816 - RNA, 18 nt, Human
gcacuuccuuuugcugcc

SEQ ID NO: 166817 - RNA, 32 nt, Human
gcacuucgcauuuuggcauugacauuuaauuu

SEQ ID NO: 166818 - RNA, 32 nt, Human
gcacuucgccacugucuccaucagugcuguug

SEQ ID NO: 166819 - RNA, 32 nt, Human
gcacuucgggaggcugaagugggaagauccag

SEQ ID NO: 166820 - RNA, 32 nt, Human
gcacuucuccaccccucccacauuuacagcca

SEQ ID NO: 166821 - RNA, 31 nt, Human
gcacuucuccucucugggccuuggcuuggga

SEQ ID NO: 166822 - RNA, 32 nt, Human
gcacuucucgcacauccucacguggcccuuau

SEQ ID NO: 166823 - RNA, 32 nt, Human
gcacuucucuccccaucgcuccacaaccugaa

SEQ ID NO: 166824 - RNA, 32 nt, Human
gcacuucugauagucagcauucucccugacac

SEQ ID NO: 166825 - RNA, 32 nt, Human
gcacuucugcccaggcagcagggugggugggu

SEQ ID NO: 166826 - RNA, 32 nt, Human
gcacuucugcccgggcugccucucccccgcua

SEQ ID NO: 166827 - RNA, 32 nt, Human
gcacuucugcucuccucuaccagaaucacuca

SEQ ID NO: 166828 - RNA, 19 nt, Human
gcacuucugcucucuggca

SEQ ID NO: 166829 - RNA, 32 nt, Human
gcacuucugucaagccucccccgccccaauug

SEQ ID NO: 166830 - RNA, 32 nt, Human
gcacuucugucuccccggagcagcuccuccag

SEQ ID NO: 166831 - RNA, 32 nt, Human
gcacuucuugcccaggcuggaguacaauggug

SEQ ID NO: 166832 - RNA, 32 nt, Human
gcacuugaacccaggaggcagugguugcaaug

SEQ ID NO: 166833 - RNA, 32 nt, Human
gcacuugacagcucucccucugugcugggcug

SEQ ID NO: 166834 - RNA, 32 nt, Human
gcacuugacccuauuugaauucugagcauuau

SEQ ID NO: 166835 - RNA, 32 nt, Human
gcacuugaguuuacaccuuagauguguagguc

SEQ ID NO: 166836 - RNA, 32 nt, Human
gcacuugccccgggacacccugugcuggcuuu

SEQ ID NO: 166837 - RNA, 32 nt, Human
gcacuugccuguagucucagcuacuuaggagg

SEQ ID NO: 166838 - RNA, 20 nt, Human
gcacuugcuucccuauggcc

SEQ ID NO: 166839 - RNA, 32 nt, Human
gcacuuggaagagaguuuauguucuguugaaa

SEQ ID NO: 166840 - RNA, 32 nt, Human
gcacuuggagcagcaaaauagggcacugacag

SEQ ID NO: 166841 - RNA, 32 nt, Human
gcacuuggagccaaggguucagagacucaggg

SEQ ID NO: 166842 - RNA, 32 nt, Human
gcacuuggagcugggggacccacccaccgucu

SEQ ID NO: 166843 - RNA, 32 nt, Human
gcacuuggagggcugggaagacccaugcugua

SEQ ID NO: 166844 - RNA, 30 nt, Human
gcacuuggccucuccauaagccuuggaggg

SEQ ID NO: 166845 - RNA, 32 nt, Human
gcacuuggcuccagucaccaguguggagagaa

SEQ ID NO: 166846 - RNA, 32 nt, Human
gcacuuggcuccuggcagagggagaggacagg

SEQ ID NO: 166847 - RNA, 32 nt, Human
gcacuugggaagcccaggcgggcggaucacuu

SEQ ID NO: 166848 - RNA, 32 nt, Human
gcacuugggguccagaggcagggccuuccuug

SEQ ID NO: 166849 - RNA, 32 nt, Human
gcacuugguggagguaguaggggcagggaaag

SEQ ID NO: 166850 - RNA, 32 nt, Human
gcacuuguaaacaucuuuugaaugaagcccua

SEQ ID NO: 166851 - RNA, 22 nt, Human
gcacuuguaaucccagcuacuc

SEQ ID NO: 166852 - RNA, 23 nt, Human
gcacuuguagucccagcuacuca

SEQ ID NO: 166853 - RNA, 32 nt, Human
gcacuugucacccaggcuggagugcaauggug

SEQ ID NO: 166854 - RNA, 32 nt, Human
gcacuugugaugccuccaugccccgagggccu

SEQ ID NO: 166855 - RNA, 32 nt, Human
gcacuuguuccuucugcuucucccuagcugac

SEQ ID NO: 166856 - RNA, 32 nt, Human
gcacuuguucucucuggcucaguuccuucucc

SEQ ID NO: 166857 - RNA, 32 nt, Human
gcacuuguugcccaggcuggagugcaauggua

SEQ ID NO: 166858 - RNA, 32 nt, Human
gcacuuguuuucaugcaggagcggggcaagua

SEQ ID NO: 166859 - RNA, 32 nt, Human
gcacuuuacuuccugacuccuuuccuuuuucc

SEQ ID NO: 166860 - RNA, 32 nt, Human
gcacuuuagggauuguagauggcuacaagcag

SEQ ID NO: 166861 - RNA, 32 nt, Human
gcacuuucacccagaaccaaugcgguguuucu

SEQ ID NO: 166862 - RNA, 32 nt, Human
gcacuuucagggauguggucagauucgagguu

SEQ ID NO: 166863 - RNA, 32 nt, Human
gcacuuucccuggaguggaagcugcuggaagg

SEQ ID NO: 166864 - RNA, 32 nt, Human
gcacuuucuauccucuguaaacuuuuugugcu

SEQ ID NO: 166865 - RNA, 32 nt, Human
gcacuuucuccucccuugucaguuugcaaagu

SEQ ID NO: 166866 - RNA, 32 nt, Human
gcacuuucugagaaaccuuuguccucacuuga

SEQ ID NO: 166867 - RNA, 32 nt, Human
gcacuuucugguuugaccuccuaauaccacaa

SEQ ID NO: 166868 - RNA, 32 nt, Human
gcacuuugcaaaagccucugcccuuccaucuc

SEQ ID NO: 166869 - RNA, 32 nt, Human
gcacuuugcucagcacgucuucccaggccucc

SEQ ID NO: 166870 - RNA, 32 nt, Human
gcacuuuggaacaggcccagguucucccacca

SEQ ID NO: 166871 - RNA, 32 nt, Human
gcacuuuggaaugccaaggcagguggaucacc

SEQ ID NO: 166872 - RNA, 32 nt, Human
gcacuuuggaggccgaggcggguagaucaccu

SEQ ID NO: 166873 - RNA, 32 nt, Human
gcacuuuggcaggccaagguggaaggaucacu

SEQ ID NO: 166874 - RNA, 32 nt, Human
gcacuuuggcaggccgaggcagguggaucacc

SEQ ID NO: 166875 - RNA, 32 nt, Human
gcacuuugggagacugaggugggagcaucacu

SEQ ID NO: 166876 - RNA, 21 nt, Human
gcacuuugggagccccaggug

SEQ ID NO: 166877 - RNA, 32 nt, Human
gcacuuugggaggcagaggccgguggguugcu

SEQ ID NO: 166878 - RNA, 32 nt, Human
gcacuuugggaggccaaagugggagaucaucu

SEQ ID NO: 166879 - RNA, 32 nt, Human
gcacuuugggaggccaagauggguggaucacc

SEQ ID NO: 166880 - RNA, 32 nt, Human
gcacuuugggaggccaagggaggcggaucacc

SEQ ID NO: 166881 - RNA, 32 nt, Human
gcacuuugggaggccaaggugaguggaucacc

SEQ ID NO: 166882 - RNA, 32 nt, Human
gcacuuugggaggccaaggugggugaaucacc

SEQ ID NO: 166883 - RNA, 32 nt, Human
gcacuuugggaggccgaagugggcagaucacu

SEQ ID NO: 166884 - RNA, 32 nt, Human
gcacuuugggaggccgaaguggguggaucacc

SEQ ID NO: 166885 - RNA, 32 nt, Human
gcacuuugggaggccgaaguggguggaucacu

SEQ ID NO: 166886 - RNA, 32 nt, Human
gcacuuugggaggccgagaugggugaaucaug

SEQ ID NO: 166887 - RNA, 32 nt, Human
gcacuuugggaggccgagauggguggaucacc

SEQ ID NO: 166888 - RNA, 32 nt, Human
gcacuuugggaggccgagauggguggaucaug

SEQ ID NO: 166889 - RNA, 32 nt, Human
gcacuuugggaggccgaggccaguggaucacc

SEQ ID NO: 166890 - RNA, 32 nt, Human
gcacuuugggaggccgaggccggugauucaca

SEQ ID NO: 166891 - RNA, 32 nt, Human
gcacuuugggaggccgaggccgguggaucacu

SEQ ID NO: 166892 - RNA, 32 nt, Human
gcacuuugggaggccgaggcgaguggaucacg

SEQ ID NO: 166893 - RNA, 32 nt, Human
gcacuuugggaggccgaggcgaguggauuucc

SEQ ID NO: 166894 - RNA, 32 nt, Human
gcacuuugggaggccgaggcgggcagaugacc

SEQ ID NO: 166895 - RNA, 32 nt, Human
gcacuuugggaggccgaggggaguggaucacc

SEQ ID NO: 166896 - RNA, 32 nt, Human
gcacuuugggaggccgaggggaguggaucacu

SEQ ID NO: 166897 - RNA, 32 nt, Human
gcacuuugggaggccgaggugaguggaucacc

SEQ ID NO: 166898 - RNA, 32 nt, Human
gcacuuugggaggccgaggugcauggaucacu

SEQ ID NO: 166899 - RNA, 32 nt, Human
gcacuuugggaggccgaggugggugaaucacc

SEQ ID NO: 166900 - RNA, 32 nt, Human
gcacuuugggaggccgagguggguggaucagu

SEQ ID NO: 166901 - RNA, 32 nt, Human
gcacuuugggaggcggaggagggcgcauugcu

SEQ ID NO: 166902 - RNA, 32 nt, Human
gcacuuugggaggcuaggugggcagaucacga

SEQ ID NO: 166903 - RNA, 32 nt, Human
gcacuuugggaggcugaagugggcagaucacg

SEQ ID NO: 166904 - RNA, 32 nt, Human
gcacuuugggaggcugaaguggguggaucaca

SEQ ID NO: 166905 - RNA, 32 nt, Human
gcacuuugggaggcugaaguggguggaucacc

SEQ ID NO: 166906 - RNA, 32 nt, Human
gcacuuugggaggcugaggagagcagaucacu

SEQ ID NO: 166907 - RNA, 32 nt, Human
gcacuuugggaggcugaggcaaguggaucacu

SEQ ID NO: 166908 - RNA, 32 nt, Human
gcacuuugggaggcugaggccgguggaucacc

SEQ ID NO: 166909 - RNA, 32 nt, Human
gcacuuugggaggcugaggcgaguggaucaca

SEQ ID NO: 166910 - RNA, 32 nt, Human
gcacuuugggaggcugagggaggcggaucacu

SEQ ID NO: 166911 - RNA, 32 nt, Human
gcacuuugggaggcugaggugaguggauuaca

SEQ ID NO: 166912 - RNA, 32 nt, Human
gcacuuuggggaggggugggacaaacugcaag

SEQ ID NO: 166913 - RNA, 23 nt, Human
gcacuuugggggaggcccaggug

SEQ ID NO: 166914 - RNA, 20 nt, Human
gcacuuuguccuugccacca

SEQ ID NO: 166915 - RNA, 32 nt, Human
gcacuuuguuagcaaugcauuuuccugcauuu

SEQ ID NO: 166916 - RNA, 32 nt, Human
gcacuuuguugacgugguggugagagcacacg

SEQ ID NO: 166917 - RNA, 32 nt, Human
gcacuuuguuuuaaauguggagaagauaacac

SEQ ID NO: 166918 - RNA, 32 nt, Human
gcacuuuuaaaaauagagaaaugagugaaugu

SEQ ID NO: 166919 - RNA, 32 nt, Human
gcacuuuuagguaaucugcacuguuuguuuga

SEQ ID NO: 166920 - RNA, 32 nt, Human
gcacuuuucaugccucagccuccugaguagcu

SEQ ID NO: 166921 - RNA, 32 nt, Human
gcacuuuuccaaugggcaagcccaguggaggc

SEQ ID NO: 166922 - RNA, 32 nt, Human
gcacuuuuccccaaguucuuguuuuuauuuuu

SEQ ID NO: 166923 - RNA, 22 nt, Human
gcacuuuucuguguguauguua

SEQ ID NO: 166924 - RNA, 32 nt, Human
gcacuuuugaacuugacaucaaacuuucugau

SEQ ID NO: 166925 - RNA, 32 nt, Human
gcacuuuugaggcugaggcgggcggauuaccu

SEQ ID NO: 166926 - RNA, 32 nt, Human
gcacuuuugcacuaccaaccacuuuaaaccaa

SEQ ID NO: 166927 - RNA, 32 nt, Human
gcacuuuugggaggcagagaugggaggauacu

SEQ ID NO: 166928 - RNA, 32 nt, Human
gcacuuuuguuaaacucaaacaugcucuuugu

SEQ ID NO: 166929 - RNA, 32 nt, Human
gcacuuuuuaacaacaugaaacuauaaaccau

SEQ ID NO: 166930 - RNA, 32 nt, Human
gcacuuuuucccugcuugauuccaagaguagg

SEQ ID NO: 166931 - RNA, 32 nt, Human
gcacuuuuuguaguuuccgaaaauuaccaucu

SEQ ID NO: 166932 - RNA, 32 nt, Human
gcagaaaaacacaaaaagagaacacugguuca

SEQ ID NO: 166933 - RNA, 32 nt, Human
gcagaaaaacauuuguaauaauuaauggcuuu

SEQ ID NO: 166934 - RNA, 32 nt, Human
gcagaaaaagugggggagguggagggggaggc

SEQ ID NO: 166935 - RNA, 32 nt, Human
gcagaaaacagaaacgcgcacauaccgaccaa

SEQ ID NO: 166936 - RNA, 32 nt, Human
gcagaaaacagaaauagcuaaaugugacucag

SEQ ID NO: 166937 - RNA, 32 nt, Human
gcagaaaacagcuucacuccucaggaaguacc

SEQ ID NO: 166938 - RNA, 32 nt, Human
gcagaaaaccaccaaaaggccagugccucaac

SEQ ID NO: 166939 - RNA, 18 nt, Human
gcagaaaagcucccacca

SEQ ID NO: 166940 - RNA, 32 nt, Human
gcagaaaaggcaguugaaggaggcagagaagg

SEQ ID NO: 166941 - RNA, 32 nt, Human
gcagaaaagggccugccuccugaggggugugu

SEQ ID NO: 166942 - RNA, 32 nt, Human
gcagaaaauugacaaugccugccuguguaaau

SEQ ID NO: 166943 - RNA, 32 nt, Human
gcagaaacacagaaagcugucuucugagucuc

SEQ ID NO: 166944 - RNA, 32 nt, Human
gcagaaacaguggauuaagacuuccugagcga

SEQ ID NO: 166945 - RNA, 17 nt, Human
gcagaaacaugcuuucc

SEQ ID NO: 166946 - RNA, 26 nt, Human
gcagaaacauggaaugccagacgcug

SEQ ID NO: 166947 - RNA, 32 nt, Human
gcagaaacauggucaguauaagaauacugaga

SEQ ID NO: 166948 - RNA, 32 nt, Human
gcagaaacauguucauuuucccaugaaggaac

SEQ ID NO: 166949 - RNA, 23 nt, Human
gcagaaaccaugugcagaggcug

SEQ ID NO: 166950 - RNA, 32 nt, Human
gcagaaaccuaucucagggagggaaggggaug

SEQ ID NO: 166951 - RNA, 32 nt, Human
gcagaaagagaugguuaguacaguuguucugu

SEQ ID NO: 166952 - RNA, 32 nt, Human
gcagaaagagggacuccucucucccuccgugu

SEQ ID NO: 166953 - RNA, 17 nt, Human
gcagaaagaugcucucc

SEQ ID NO: 166954 - RNA, 32 nt, Human
gcagaaagcaaaggggaugcagaggugaaggu

SEQ ID NO: 166955 - RNA, 32 nt, Human
gcagaaagcaugaucggagaagagauauuuua

SEQ ID NO: 166956 - RNA, 32 nt, Human
gcagaaagcugugaaaugucuugugucuuaug

SEQ ID NO: 166957 - RNA, 32 nt, Human
gcagaaaggaaacugcacaguguccccaggag

SEQ ID NO: 166958 - RNA, 32 nt, Human
gcagaaaggaagcgggugcaggagccagugcu

SEQ ID NO: 166959 - RNA, 32 nt, Human
gcagaaaggaccugcauuuuccuacauugagg

SEQ ID NO: 166960 - RNA, 32 nt, Human
gcagaaaggagagagagggaucugauggcaaa

SEQ ID NO: 166961 - RNA, 32 nt, Human
gcagaaaggagagaugugugcagagugagacc

SEQ ID NO: 166962 - RNA, 22 nt, Human
gcagaaaggagugccugcacag

SEQ ID NO: 166963 - RNA, 32 nt, Human
gcagaaagggcugcggaggcagugagugguuu

SEQ ID NO: 166964 - RNA, 32 nt, Human
gcagaaaggggucugugcugccucuaaaggau

SEQ ID NO: 166965 - RNA, 32 nt, Human
gcagaaagguugcaaugccucacuuugccuua

SEQ ID NO: 166966 - RNA, 21 nt, Human
gcagaaaguccuggaaaagua

SEQ ID NO: 166967 - RNA, 32 nt, Human
gcagaaagugccugugcaucagcauuccccgu

SEQ ID NO: 166968 - RNA, 32 nt, Human
gcagaaauaaugguuggcaaagcaguggaaca

SEQ ID NO: 166969 - RNA, 32 nt, Human
gcagaaauacauaggaugaaaaauaccaagau

SEQ ID NO: 166970 - RNA, 32 nt, Human
gcagaaauaguugucugugcuuccuugguuca

SEQ ID NO: 166971 - RNA, 22 nt, Human
gcagaaaugguaaugagaguga

SEQ ID NO: 166972 - RNA, 32 nt, Human
gcagaaauuaacucucugucauggccucucuu

SEQ ID NO: 166973 - RNA, 32 nt, Human
gcagaaauucagaacccccuguccugaaggug

SEQ ID NO: 166974 - RNA, 32 nt, Human
gcagaacaagggcaagaaacucggugcccgcc

SEQ ID NO: 166975 - RNA, 32 nt, Human
gcagaacacacguuucuaagugcacagggaac

SEQ ID NO: 166976 - RNA, 32 nt, Human
gcagaacacaugcacaaacucaugccauaccc

SEQ ID NO: 166977 - RNA, 32 nt, Human
gcagaacacugcacuccaauuuccucgggcag

SEQ ID NO: 166978 - RNA, 21 nt, Human
gcagaacagaacacuuucuca

SEQ ID NO: 166979 - RNA, 32 nt, Human
gcagaacagccugucuguucugcuccuagaca

SEQ ID NO: 166980 - RNA, 32 nt, Human
gcagaacagcgaaaagaauaaagggaaagggg

SEQ ID NO: 166981 - RNA, 32 nt, Human
gcagaacaggcagaagggauggaauuuggcuu

SEQ ID NO: 166982 - RNA, 32 nt, Human
gcagaacaggcagagaugcuacgcaaugauuc

SEQ ID NO: 166983 - RNA, 32 nt, Human
gcagaacagggugggcggcucgcaggggcgcu

SEQ ID NO: 166984 - RNA, 32 nt, Human
gcagaacagugagagcuucauuuugugauucu

SEQ ID NO: 166985 - RNA, 32 nt, Human
gcagaacagugaucuugggggaggaagaggau

SEQ ID NO: 166986 - RNA, 32 nt, Human
gcagaacauacuagggagaugcacccagagcc

SEQ ID NO: 166987 - RNA, 32 nt, Human
gcagaacaucaacuccuccuucaaggggaaca

SEQ ID NO: 166988 - RNA, 32 nt, Human
gcagaacauugucaccuccugaggcugugggc

SEQ ID NO: 166989 - RNA, 32 nt, Human
gcagaaccaaaucaguuugcccugccauauuu

SEQ ID NO: 166990 - RNA, 20 nt, Human
gcagaaccacuccucaggga

SEQ ID NO: 166991 - RNA, 32 nt, Human
gcagaaccagaguagagauugacagugagcug

SEQ ID NO: 166992 - RNA, 32 nt, Human
gcagaaccauacagauuuuguucuccauuuca

SEQ ID NO: 166993 - RNA, 32 nt, Human
gcagaaccaucaggaacagccugccuggcucc

SEQ ID NO: 166994 - RNA, 32 nt, Human
gcagaaccaugagggugcaccagcacggaccc

SEQ ID NO: 166995 - RNA, 32 nt, Human
gcagaacccagccucugcucacacccgcccca

SEQ ID NO: 166996 - RNA, 22 nt, Human
gcagaacccagugcacguccuc

SEQ ID NO: 166997 - RNA, 18 nt, Human
gcagaaccccauguccuc

SEQ ID NO: 166998 - RNA, 32 nt, Human
gcagaacccugagagguguccaucuucuugcu

SEQ ID NO: 166999 - RNA, 32 nt, Human
gcagaaccucaccuuuaggucucccucauccc

SEQ ID NO: 167000 - RNA, 32 nt, Human
gcagaaccuccaggagcacccaggcuugggca

SEQ ID NO: 167001 - RNA, 20 nt, Human
gcagaaccuccugaacgucu

SEQ ID NO: 167002 - RNA, 19 nt, Human
gcagaacuacaaagaugag

SEQ ID NO: 167003 - RNA, 32 nt, Human
gcagaacuagggccucuccccuggugaagacc

SEQ ID NO: 167004 - RNA, 32 nt, Human
gcagaacucuguucccaggcaccacaagaaua

SEQ ID NO: 167005 - RNA, 32 nt, Human
gcagaacucuucucuccccaucaugggccaca

SEQ ID NO: 167006 - RNA, 32 nt, Human
gcagaacugauucuccagcccugguagcauuu

SEQ ID NO: 167007 - RNA, 32 nt, Human
gcagaacugcaaccuuuuguaccuuucuuugg

SEQ ID NO: 167008 - RNA, 32 nt, Human
gcagaacugcucaugcuagcaaggcccaccuu

SEQ ID NO: 167009 - RNA, 24 nt, Human
gcagaacuggaccccagggguguc

SEQ ID NO: 167010 - RNA, 32 nt, Human
gcagaacugggauguggagcuggaagugccuc

SEQ ID NO: 167011 - RNA, 32 nt, Human
gcagaacuuccagaggaaaucgacaucuccac

SEQ ID NO: 167012 - RNA, 32 nt, Human
gcagaacuucuccaugucaagcagcagguguc

SEQ ID NO: 167013 - RNA, 20 nt, Human
gcagaagaaccagcuucggg

SEQ ID NO: 167014 - RNA, 32 nt, Human
gcagaagaauacagccuugcacaaucauuuuu

SEQ ID NO: 167015 - RNA, 32 nt, Human
gcagaagaauaugacagaugucagcuucuccc

SEQ ID NO: 167016 - RNA, 32 nt, Human
gcagaagaauuggaguuggaagguugcauagg

SEQ ID NO: 167017 - RNA, 32 nt, Human
gcagaagacaaaauuaacauauacaaguuaau

SEQ ID NO: 167018 - RNA, 32 nt, Human
gcagaagaccuccaggaguucauucuucuuau

SEQ ID NO: 167019 - RNA, 32 nt, Human
gcagaagacuggagaggagcuaagggggucgg

SEQ ID NO: 167020 - RNA, 32 nt, Human
gcagaagagaaaagcuggaggaaggccguggg

SEQ ID NO: 167021 - RNA, 32 nt, Human
gcagaagagaaacugagucaccagcuuaggag

SEQ ID NO: 167022 - RNA, 32 nt, Human
gcagaagagauggaaccaaaauagcgggcagg

SEQ ID NO: 167023 - RNA, 32 nt, Human
gcagaagagauggaugaauggaaggacacaca

SEQ ID NO: 167024 - RNA, 32 nt, Human
gcagaagaggccuggaugcacaccuggcacgc

SEQ ID NO: 167025 - RNA, 32 nt, Human
gcagaagaguaccgugagggaggcggggacca

SEQ ID NO: 167026 - RNA, 21 nt, Human
gcagaagaucuuggagagugg

SEQ ID NO: 167027 - RNA, 22 nt, Human
gcagaagauggcccugaugucc

SEQ ID NO: 167028 - RNA, 32 nt, Human
gcagaagcagagccacugugaaguaagacacu

SEQ ID NO: 167029 - RNA, 24 nt, Human
gcagaagcaggaggaucauuugag

SEQ ID NO: 167030 - RNA, 32 nt, Human
gcagaagcaggcagcggcagagagggaauggu

SEQ ID NO: 167031 - RNA, 32 nt, Human
gcagaagccacagcagccucuguccagccugc

SEQ ID NO: 167032 - RNA, 32 nt, Human
gcagaagccagcccccaaccccagcccuuccg

SEQ ID NO: 167033 - RNA, 32 nt, Human
gcagaagccccacugcaugaaggccugagugc

SEQ ID NO: 167034 - RNA, 18 nt, Human
gcagaagcgcgugcguug

SEQ ID NO: 167035 - RNA, 32 nt, Human
gcagaagcgggagcugccccagagagucugug

SEQ ID NO: 167036 - RNA, 32 nt, Human
gcagaagcucggcgaccucccaccccgagucu

SEQ ID NO: 167037 - RNA, 32 nt, Human
gcagaagcucuaucuuugauugcugccaucca

SEQ ID NO: 167038 - RNA, 32 nt, Human
gcagaagcugcagagaauuuucugccugacga

SEQ ID NO: 167039 - RNA, 17 nt, Human
gcagaagcugccuguga

SEQ ID NO: 167040 - RNA, 32 nt, Human
gcagaagcugcugaagcacggggugaacuugc

SEQ ID NO: 167041 - RNA, 19 nt, Human
gcagaagcugucugaggca

SEQ ID NO: 167042 - RNA, 32 nt, Human
gcagaagcuuacaaccugggacaagguguuag

SEQ ID NO: 167043 - RNA, 23 nt, Human
gcagaaggaaagggcgauggugg

SEQ ID NO: 167044 - RNA, 23 nt, Human
gcagaaggaaauacuuggcagca

SEQ ID NO: 167045 - RNA, 22 nt, Human
gcagaaggaaccugagcaggac

SEQ ID NO: 167046 - RNA, 24 nt, Human
gcagaaggaacuucaaggagauga

SEQ ID NO: 167047 - RNA, 32 nt, Human
gcagaaggaaggcagggaggaggcagagaaga

SEQ ID NO: 167048 - RNA, 23 nt, Human
gcagaaggaauggaaugcuacag

SEQ ID NO: 167049 - RNA, 32 nt, Human
gcagaaggacaagcucuucaugaugcacugcg

SEQ ID NO: 167050 - RNA, 32 nt, Human
gcagaaggacagaagagaaaagacuugaguaa

SEQ ID NO: 167051 - RNA, 24 nt, Human
gcagaaggaggagaagcugaggcu

SEQ ID NO: 167052 - RNA, 21 nt, Human
gcagaaggaggcacugcuaca

SEQ ID NO: 167053 - RNA, 24 nt, Human
gcagaaggaucaccugaagucagg

SEQ ID NO: 167054 - RNA, 24 nt, Human
gcagaaggaucacuugagaccagg

SEQ ID NO: 167055 - RNA, 32 nt, Human
gcagaaggaucucuggagcccaggaguucgag

SEQ ID NO: 167056 - RNA, 32 nt, Human
gcagaaggaucucuugagccaggaguuugaga

SEQ ID NO: 167057 - RNA, 23 nt, Human
gcagaaggauggcagaugaguga

SEQ ID NO: 167058 - RNA, 32 nt, Human
gcagaaggcacaggagcugggccugguggagc

SEQ ID NO: 167059 - RNA, 32 nt, Human
gcagaaggccuuggugcacacccaggggccau

SEQ ID NO: 167060 - RNA, 23 nt, Human
gcagaaggcgcugccugccacag

SEQ ID NO: 167061 - RNA, 23 nt, Human
gcagaagggaauuggagcaguga

SEQ ID NO: 167062 - RNA, 21 nt, Human
gcagaagggcaggaacaguga

SEQ ID NO: 167063 - RNA, 32 nt, Human
gcagaagggccuuccccuggacccucagagca

SEQ ID NO: 167064 - RNA, 32 nt, Human
gcagaagggcgguugcugcagcuuuggccgag

SEQ ID NO: 167065 - RNA, 32 nt, Human
gcagaaggggcacggcccgcaugcauucucaa

SEQ ID NO: 167066 - RNA, 18 nt, Human
gcagaaggggcagagagu

SEQ ID NO: 167067 - RNA, 22 nt, Human
gcagaaggggcucggaaagugg

SEQ ID NO: 167068 - RNA, 17 nt, Human
gcagaagguccguggcc

SEQ ID NO: 167069 - RNA, 32 nt, Human
gcagaagguccugguucucugggaucugcggu

SEQ ID NO: 167070 - RNA, 32 nt, Human
gcagaagguggaaggugggaacagagguuuag

SEQ ID NO: 167071 - RNA, 20 nt, Human
gcagaagguucccugagguc

SEQ ID NO: 167072 - RNA, 32 nt, Human
gcagaaguaaaggaaucucacguugugagggu

SEQ ID NO: 167073 - RNA, 32 nt, Human
gcagaaguaggauugugaacccagggaaucuc

SEQ ID NO: 167074 - RNA, 32 nt, Human
gcagaagugaagccccgcaggggaggccacag

SEQ ID NO: 167075 - RNA, 32 nt, Human
gcagaagugcaucgugaucuuugcccuggugu

SEQ ID NO: 167076 - RNA, 18 nt, Human
gcagaaguggcugggcca

SEQ ID NO: 167077 - RNA, 32 nt, Human
gcagaagugggagcuucucccuuccuuccauc

SEQ ID NO: 167078 - RNA, 32 nt, Human
gcagaaguguggcaaaugcaucaggaaccggu

SEQ ID NO: 167079 - RNA, 32 nt, Human
gcagaaguugaugugcugagcagcagccuuau

SEQ ID NO: 167080 - RNA, 32 nt, Human
gcagaauaauacaucacucugcuccaggagca

SEQ ID NO: 167081 - RNA, 32 nt, Human
gcagaauaaucgcuugaacccaggaggcagag

SEQ ID NO: 167082 - RNA, 19 nt, Human
gcagaauaauuggugcuug

SEQ ID NO: 167083 - RNA, 18 nt, Human
gcagaauacaacgcauug

SEQ ID NO: 167084 - RNA, 15 nt, Human
gcagaauaccaggca

SEQ ID NO: 167085 - RNA, 32 nt, Human
gcagaauagauaaaacacagguuuccacuaau

SEQ ID NO: 167086 - RNA, 32 nt, Human
gcagaauaggugcagagaugaagugagcuuag

SEQ ID NO: 167087 - RNA, 17 nt, Human
gcagaauaucaaaguca

SEQ ID NO: 167088 - RNA, 18 nt, Human
gcagaauaugcaugcauu

SEQ ID NO: 167089 - RNA, 32 nt, Human
gcagaaucaauccagucuccugcccugggcuc

SEQ ID NO: 167090 - RNA, 32 nt, Human
gcagaaucagccagugggcagguggacgcucu

SEQ ID NO: 167091 - RNA, 18 nt, Human
gcagaaucaggagucacc

SEQ ID NO: 167092 - RNA, 24 nt, Human
gcagaaucaggagucaccagauga

SEQ ID NO: 167093 - RNA, 32 nt, Human
gcagaaucauaauggacccgcacaaaaucuca

SEQ ID NO: 167094 - RNA, 32 nt, Human
gcagaaucaucaaggcuuuccuuuguaacugc

SEQ ID NO: 167095 - RNA, 32 nt, Human
gcagaaucucacaugggcaccauggaggaacc

SEQ ID NO: 167096 - RNA, 32 nt, Human
gcagaaucucccaccgagugugguaagaagga

SEQ ID NO: 167097 - RNA, 32 nt, Human
gcagaaucuguuguccuuaauuauauuugcaa

SEQ ID NO: 167098 - RNA, 32 nt, Human
gcagaaucuugacccagggaaagggaagcagg

SEQ ID NO: 167099 - RNA, 32 nt, Human
gcagaaugaacauuuucuccagccucugagac

SEQ ID NO: 167100 - RNA, 32 nt, Human
gcagaaugaacccacaccuggagugaggaagg

SEQ ID NO: 167101 - RNA, 32 nt, Human
gcagaaugaacccauagggagcugaucguaau

SEQ ID NO: 167102 - RNA, 32 nt, Human
gcagaaugaccagcgaaaucggaaaagaaaag

SEQ ID NO: 167103 - RNA, 32 nt, Human
gcagaaugagaggagagagggaaggcagguca

SEQ ID NO: 167104 - RNA, 32 nt, Human
gcagaaugagcucuuccugaacgugggcacca

SEQ ID NO: 167105 - RNA, 30 nt, Human
gcagaaugcagccagaggagggcacaggcu

SEQ ID NO: 167106 - RNA, 18 nt, Human
gcagaaugcauugcauug

SEQ ID NO: 167107 - RNA, 31 nt, Human
gcagaaugccucucagccucauguguugguc

SEQ ID NO: 167108 - RNA, 32 nt, Human
gcagaauggaggagggaaguugaaggagccac

SEQ ID NO: 167109 - RNA, 32 nt, Human
gcagaaugggcuccaggguagcucucagaaca

SEQ ID NO: 167110 - RNA, 32 nt, Human
gcagaauguuucacccugaucuuaugggagga

SEQ ID NO: 167111 - RNA, 32 nt, Human
gcagaauuccccgcagccaccaugagggucag

SEQ ID NO: 167112 - RNA, 32 nt, Human
gcagaauucugaagucgacuucccucuggcuc

SEQ ID NO: 167113 - RNA, 32 nt, Human
gcagaauugacaguugaacagagcuagaggcc

SEQ ID NO: 167114 - RNA, 32 nt, Human
gcagaauugauugccuucagcacagcauccuc

SEQ ID NO: 167115 - RNA, 32 nt, Human
gcagaauuuuccaaagucaaugggcuuagcau

SEQ ID NO: 167116 - RNA, 32 nt, Human
gcagacaacagcuucugagcuuuggacuaauc

SEQ ID NO: 167117 - RNA, 32 nt, Human
gcagacaauggcccuccuggugccucaccaca

SEQ ID NO: 167118 - RNA, 32 nt, Human
gcagacaauggcuugaaccugggaggcagagg

SEQ ID NO: 167119 - RNA, 32 nt, Human
gcagacacacuuagaacacucacugcacuggu

SEQ ID NO: 167120 - RNA, 32 nt, Human
gcagacacagaacauaucaucacugcagauag

SEQ ID NO: 167121 - RNA, 32 nt, Human
gcagacacagaauuacaaagagcugcaaugga

SEQ ID NO: 167122 - RNA, 32 nt, Human
gcagacacagccccucaagacaagaaacugcu

SEQ ID NO: 167123 - RNA, 32 nt, Human
gcagacacagcccuuccaggaccagaggccaa

SEQ ID NO: 167124 - RNA, 32 nt, Human
gcagacacagcuguucucucccucucuccuuc

SEQ ID NO: 167125 - RNA, 32 nt, Human
gcagacacaggacagaacguccccugcaaagc

SEQ ID NO: 167126 - RNA, 18 nt, Human
gcagacacaggugccuca

SEQ ID NO: 167127 - RNA, 32 nt, Human
gcagacaccagauaggugaguccuuaaccaaa

SEQ ID NO: 167128 - RNA, 32 nt, Human
gcagacaccagccugguguccuccuucauccc

SEQ ID NO: 167129 - RNA, 32 nt, Human
gcagacaccccagcuuuugagggugcuggggg

SEQ ID NO: 167130 - RNA, 32 nt, Human
gcagacaccuccggcccacacagccguucacc

SEQ ID NO: 167131 - RNA, 19 nt, Human
gcagacaccuguaguccca

SEQ ID NO: 167132 - RNA, 32 nt, Human
gcagacacucaaugccagcccacgaaagcagc

SEQ ID NO: 167133 - RNA, 32 nt, Human
gcagacacuccaccccaaagccugcagaaggg

SEQ ID NO: 167134 - RNA, 32 nt, Human
gcagacacugaguggaaugacaucuuaacgca

SEQ ID NO: 167135 - RNA, 32 nt, Human
gcagacacugcaacagaugccuccuagaaaau

SEQ ID NO: 167136 - RNA, 32 nt, Human
gcagacacugcaguuaauagugaaucaggcuc

SEQ ID NO: 167137 - RNA, 32 nt, Human
gcagacacuguggagcaacaucugcaggucua

SEQ ID NO: 167138 - RNA, 32 nt, Human
gcagacacuguggagcgacaucugcaggucua

SEQ ID NO: 167139 - RNA, 32 nt, Human
gcagacacuuucuggguacaacaggguaggac

SEQ ID NO: 167140 - RNA, 22 nt, Human
gcagacagaaaaauacugggga

SEQ ID NO: 167141 - RNA, 32 nt, Human
gcagacagacagguggaggaugggaccuugaa

SEQ ID NO: 167142 - RNA, 32 nt, Human
gcagacagaccugaaaauuuucaucugaagca

SEQ ID NO: 167143 - RNA, 24 nt, Human
gcagacagaucaccugaggucagg

SEQ ID NO: 167144 - RNA, 32 nt, Human
gcagacagcaguccucuagcauggccccagca

SEQ ID NO: 167145 - RNA, 30 nt, Human
gcagacagccucagcaagcuccuguagccc

SEQ ID NO: 167146 - RNA, 32 nt, Human
gcagacagccucuucuccucuggggccucaag

SEQ ID NO: 167147 - RNA, 32 nt, Human
gcagacagcugcauaguuugguaaaaugacug

SEQ ID NO: 167148 - RNA, 32 nt, Human
gcagacaggaauagugaacaacagagcuggga

SEQ ID NO: 167149 - RNA, 32 nt, Human
gcagacaggcuggcagggcaggugcugcgugg

SEQ ID NO: 167150 - RNA, 32 nt, Human
gcagacagggaagggaaacauuuucagggaaa

SEQ ID NO: 167151 - RNA, 32 nt, Human
gcagacagggaagggaauuucacuuaaaagga

SEQ ID NO: 167152 - RNA, 32 nt, Human
gcagacaggguuucaccauguuggccaggcuc

SEQ ID NO: 167153 - RNA, 23 nt, Human
gcagacagucaccccaaggcagg

SEQ ID NO: 167154 - RNA, 32 nt, Human
gcagacagugauguucauguucuuaaaaugcc

SEQ ID NO: 167155 - RNA, 32 nt, Human
gcagacaguuaagagaaaugagcuugacauuu

SEQ ID NO: 167156 - RNA, 32 nt, Human
gcagacaucuggaggagagagucggagagcag

SEQ ID NO: 167157 - RNA, 19 nt, Human
gcagacaucuguaauccca

SEQ ID NO: 167158 - RNA, 32 nt, Human
gcagacaugagcuguacuacucaguaugcacc

SEQ ID NO: 167159 - RNA, 32 nt, Human
gcagacaugaggcagcauuuccuccacacuag

SEQ ID NO: 167160 - RNA, 32 nt, Human
gcagacaugccuggagccuggugagggcagga

SEQ ID NO: 167161 - RNA, 32 nt, Human
gcagacauguguuucuggagcaucacagaagg

SEQ ID NO: 167162 - RNA, 32 nt, Human
gcagaccaaacagcccagcagcccagcagccc

SEQ ID NO: 167163 - RNA, 32 nt, Human
gcagaccaagaagaaaggagccaaggcaaaga

SEQ ID NO: 167164 - RNA, 32 nt, Human
gcagaccaccuccaggagccgcuuucuugacc

SEQ ID NO: 167165 - RNA, 32 nt, Human
gcagaccacgagcgcggagcuuggggaggcgc

SEQ ID NO: 167166 - RNA, 32 nt, Human
gcagaccagagagcucaaguuucagagucaga

SEQ ID NO: 167167 - RNA, 32 nt, Human
gcagaccagagccuugcagagccagacagagg

SEQ ID NO: 167168 - RNA, 32 nt, Human
gcagaccaggaaggaagagcaagcuguacaaa

SEQ ID NO: 167169 - RNA, 32 nt, Human
gcagaccaugaauuacguggggcaguuagccg

SEQ ID NO: 167170 - RNA, 32 nt, Human
gcagaccaugaggaggugaaucagggugggca

SEQ ID NO: 167171 - RNA, 18 nt, Human
gcagaccaugaggucagg

SEQ ID NO: 167172 - RNA, 32 nt, Human
gcagaccaugcacagugccuggggcggaagga

SEQ ID NO: 167173 - RNA, 32 nt, Human
gcagaccccaagacagagauucuggugcaagu

SEQ ID NO: 167174 - RNA, 32 nt, Human
gcagaccccaaucugcggcuucucccaccuca

SEQ ID NO: 167175 - RNA, 32 nt, Human
gcagacccccgugcuauuucucucacggaagg

SEQ ID NO: 167176 - RNA, 21 nt, Human
gcagacccucacugguugggg

SEQ ID NO: 167177 - RNA, 32 nt, Human
gcagacccuccaccaugagcccgggucagcgc

SEQ ID NO: 167178 - RNA, 22 nt, Human
gcagacccuccaggcuggagga

SEQ ID NO: 167179 - RNA, 32 nt, Human
gcagacccuccaggggcccugaggucuguucc

SEQ ID NO: 167180 - RNA, 32 nt, Human
gcagacccucuacccaggcuuguucugcagga

SEQ ID NO: 167181 - RNA, 19 nt, Human
gcagacccucuagcugggg

SEQ ID NO: 167182 - RNA, 22 nt, Human
gcagacccucuaggacuggggg

SEQ ID NO: 167183 - RNA, 32 nt, Human
gcagacccucuggcuaagcuucucccaaauuu

SEQ ID NO: 167184 - RNA, 22 nt, Human
gcagacccugagcacugaguca

SEQ ID NO: 167185 - RNA, 32 nt, Human
gcagacccugcagcuggugaaagccagccccu

SEQ ID NO: 167186 - RNA, 32 nt, Human
gcagacccugcaggacuugcucacugaucuuc

SEQ ID NO: 167187 - RNA, 32 nt, Human
gcagacccuucacaagcaaaaucagccagcac

SEQ ID NO: 167188 - RNA, 22 nt, Human
gcagacccuugacuccagggga

SEQ ID NO: 167189 - RNA, 32 nt, Human
gcagaccggagcuguuccuauuugcccauccu

SEQ ID NO: 167190 - RNA, 32 nt, Human
gcagaccgguuugcagcaccugccgcaacagc

SEQ ID NO: 167191 - RNA, 32 nt, Human
gcagaccuaggcagacaccuugagacuaaaag

SEQ ID NO: 167192 - RNA, 32 nt, Human
gcagaccuauccuacaagaaaugcuaaaggaa

SEQ ID NO: 167193 - RNA, 32 nt, Human
gcagaccuccacccuucuuuccuccaccccuc

SEQ ID NO: 167194 - RNA, 22 nt, Human
gcagaccuccgccaucuggggg

SEQ ID NO: 167195 - RNA, 32 nt, Human
gcagaccugccuggagguucucccuggggugg

SEQ ID NO: 167196 - RNA, 32 nt, Human
gcagaccugcggcugaggaugcagggcucccg

SEQ ID NO: 167197 - RNA, 21 nt, Human
gcagaccugcucauuccagga

SEQ ID NO: 167198 - RNA, 32 nt, Human
gcagaccuggacucacagccuggcugugaugc

SEQ ID NO: 167199 - RNA, 32 nt, Human
gcagaccuuagaguggauguccggucuccugu

SEQ ID NO: 167200 - RNA, 32 nt, Human
gcagacgaagcauguaagaaauauuuaguguc

SEQ ID NO: 167201 - RNA, 32 nt, Human
gcagacgaagccauugcagaggcagaauaugc

SEQ ID NO: 167202 - RNA, 32 nt, Human
gcagacgacacacacggccucagucuauggga

SEQ ID NO: 167203 - RNA, 32 nt, Human
gcagacgacuccgucugaggaagagcagccca

SEQ ID NO: 167204 - RNA, 32 nt, Human
gcagacgaugaaacucagcugacauucuacac

SEQ ID NO: 167205 - RNA, 32 nt, Human
gcagacgccgaccacucagacggaggggcccc

SEQ ID NO: 167206 - RNA, 19 nt, Human
gcagacgccuugucuccau

SEQ ID NO: 167207 - RNA, 24 nt, Human
gcagacggaucacuugaggucagg

SEQ ID NO: 167208 - RNA, 20 nt, Human
gcagacggcggcagcagcag

SEQ ID NO: 167209 - RNA, 32 nt, Human
gcagacggcugcugcccuucucugggcauguu

SEQ ID NO: 167210 - RNA, 32 nt, Human
gcagacguaggccucaggucucgggccucagg

SEQ ID NO: 167211 - RNA, 32 nt, Human
gcagacgucauccuuuggcucaaagccagaug

SEQ ID NO: 167212 - RNA, 32 nt, Human
gcagacguucccgugcaccacugugugccugg

SEQ ID NO: 167213 - RNA, 32 nt, Human
gcagacucagcuuuuuaaagaugggaggucag

SEQ ID NO: 167214 - RNA, 32 nt, Human
gcagacuccagccccuggaccccugggguggc

SEQ ID NO: 167215 - RNA, 26 nt, Human
gcagacucuaacagaugccagcugaa

SEQ ID NO: 167216 - RNA, 32 nt, Human
gcagacucuggcagagcugagaagggcaggga

SEQ ID NO: 167217 - RNA, 32 nt, Human
gcagacugacacacccucccccaccccgggua

SEQ ID NO: 167218 - RNA, 32 nt, Human
gcagacugacugaaccugccucccacuacuga

SEQ ID NO: 167219 - RNA, 32 nt, Human
gcagacugaucuccuccacuuccuucagcgcc

SEQ ID NO: 167220 - RNA, 22 nt, Human
gcagacuggagggaaagaguga

SEQ ID NO: 167221 - RNA, 32 nt, Human
gcagacuggcccacccugccuacuucccuacu

SEQ ID NO: 167222 - RNA, 32 nt, Human
gcagacuggcuaaggaccagcccagggcaauu

SEQ ID NO: 167223 - RNA, 32 nt, Human
gcagacugggcaacauagcgagaccucaucuc

SEQ ID NO: 167224 - RNA, 32 nt, Human
gcagacugguuccuaacucucucccuccuccu

SEQ ID NO: 167225 - RNA, 32 nt, Human
gcagacugucauggguggggaauguucucuga

SEQ ID NO: 167226 - RNA, 32 nt, Human
gcagacuguccaaugugcucagccaggcugga

SEQ ID NO: 167227 - RNA, 32 nt, Human
gcagacugucuggaggaggagccggcacugag

SEQ ID NO: 167228 - RNA, 32 nt, Human
gcagacugugaccacacuaaaagugaugcuuc

SEQ ID NO: 167229 - RNA, 32 nt, Human
gcagacuguggcuagaacggugggaucagagc

SEQ ID NO: 167230 - RNA, 26 nt, Human
gcagacuuaaaucaagaggcugggga

SEQ ID NO: 167231 - RNA, 32 nt, Human
gcagacuuagccccagcagagccugggaggaa

SEQ ID NO: 167232 - RNA, 20 nt, Human
gcagacuuagccgugcauug

SEQ ID NO: 167233 - RNA, 32 nt, Human
gcagacuucugugcuuucuuuccuguucccua

SEQ ID NO: 167234 - RNA, 23 nt, Human
gcagacuugggguugggagaaca

SEQ ID NO: 167235 - RNA, 32 nt, Human
gcagacuuuccaggccuagcguuugcugcuuu

SEQ ID NO: 167236 - RNA, 32 nt, Human
gcagagaaaaacaugccuaaggcuuuucucca

SEQ ID NO: 167237 - RNA, 32 nt, Human
gcagagaaaggaaguccucucccuggaggccu

SEQ ID NO: 167238 - RNA, 32 nt, Human
gcagagaaaggcagaaaacccagucuucagug

SEQ ID NO: 167239 - RNA, 20 nt, Human
gcagagaaaugccagcugca

SEQ ID NO: 167240 - RNA, 32 nt, Human
gcagagaacagcucauugggucacuggugauc

SEQ ID NO: 167241 - RNA, 32 nt, Human
gcagagaacaguuccucagcuggucaugcuga

SEQ ID NO: 167242 - RNA, 30 nt, Human
gcagagaaccugcuuuacuuugcccaggga

SEQ ID NO: 167243 - RNA, 32 nt, Human
gcagagaagccaugcguuccagccuuccacgg

SEQ ID NO: 167244 - RNA, 20 nt, Human
gcagagaagccuccaugguc

SEQ ID NO: 167245 - RNA, 32 nt, Human
gcagagaagccuguggcuaaaguuuccacauc

SEQ ID NO: 167246 - RNA, 32 nt, Human
gcagagaaggagagaggcagagagggagagag

SEQ ID NO: 167247 - RNA, 18 nt, Human
gcagagaaggcagcagca

SEQ ID NO: 167248 - RNA, 32 nt, Human
gcagagaaggggccagcucccuccuggggacc

SEQ ID NO: 167249 - RNA, 32 nt, Human
gcagagacaacugccacccagccugggccuuc

SEQ ID NO: 167250 - RNA, 32 nt, Human
gcagagacagaaacagcaauagccaggacucc

SEQ ID NO: 167251 - RNA, 32 nt, Human
gcagagacagagagacagagagacagagagag

SEQ ID NO: 167252 - RNA, 32 nt, Human
gcagagacaggaguggcccugcagugauguug

SEQ ID NO: 167253 - RNA, 32 nt, Human
gcagagaccacugcacuccagccugggcaaca

SEQ ID NO: 167254 - RNA, 32 nt, Human
gcagagaccagaggcauaucgcggcuugagcu

SEQ ID NO: 167255 - RNA, 32 nt, Human
gcagagaccagccuggagccuagaucuggugc

SEQ ID NO: 167256 - RNA, 32 nt, Human
gcagagaccaugggaacccucucagccccucc

SEQ ID NO: 167257 - RNA, 32 nt, Human
gcagagaccccaacucugccuuccuggaacua

SEQ ID NO: 167258 - RNA, 32 nt, Human
gcagagaccgaggcugcaccggcagaggcugc

SEQ ID NO: 167259 - RNA, 32 nt, Human
gcagagacgagaugaaccuguggcugcgguug

SEQ ID NO: 167260 - RNA, 32 nt, Human
gcagagacgagauggcuguuugucaggaggcg

SEQ ID NO: 167261 - RNA, 32 nt, Human
gcagagacgugaaaggaggccaccugggguag

SEQ ID NO: 167262 - RNA, 32 nt, Human
gcagagacucaggccuguuugagggcucacga

SEQ ID NO: 167263 - RNA, 17 nt, Human
gcagagacuucccagga

SEQ ID NO: 167264 - RNA, 32 nt, Human
gcagagagaacagcgauguugugcgcccauuu

SEQ ID NO: 167265 - RNA, 32 nt, Human
gcagagagaagcuauaggaaacccaguaccac

SEQ ID NO: 167266 - RNA, 32 nt, Human
gcagagagacagagagggagagagggacagag

SEQ ID NO: 167267 - RNA, 32 nt, Human
gcagagagacagauucccaggcuauaaagcag

SEQ ID NO: 167268 - RNA, 32 nt, Human
gcagagagacccacagagcaggagggaggcag

SEQ ID NO: 167269 - RNA, 32 nt, Human
gcagagagagaugcccuggaccaucuugcucu

SEQ ID NO: 167270 - RNA, 20 nt, Human
gcagagagagaugcugggga

SEQ ID NO: 167271 - RNA, 32 nt, Human
gcagagagccccggacaggaaucaagagaaaa

SEQ ID NO: 167272 - RNA, 32 nt, Human
gcagagagccgggccaaggcagcccuggagaa

SEQ ID NO: 167273 - RNA, 32 nt, Human
gcagagagcugaggcauccaagaaauguucca

SEQ ID NO: 167274 - RNA, 32 nt, Human
gcagagagcuggaaagguaagacugaggucag

SEQ ID NO: 167275 - RNA, 32 nt, Human
gcagagaggaaagaggggcagaaagccuggca

SEQ ID NO: 167276 - RNA, 32 nt, Human
gcagagaggaagagggcagcaguugaggaugg

SEQ ID NO: 167277 - RNA, 32 nt, Human
gcagagaggaaggcugccuacaagcaucacag

SEQ ID NO: 167278 - RNA, 32 nt, Human
gcagagaggacaggggugggcuuuuguucaaa

SEQ ID NO: 167279 - RNA, 32 nt, Human
gcagagaggagaacugaaaauaaaacuggaaa

SEQ ID NO: 167280 - RNA, 20 nt, Human
gcagagaggaggauguccuc

SEQ ID NO: 167281 - RNA, 32 nt, Human
gcagagaggcagacgugagcugagggcgcaga

SEQ ID NO: 167282 - RNA, 32 nt, Human
gcagagaggcauuccuuucuccuccucucauc

SEQ ID NO: 167283 - RNA, 32 nt, Human
gcagagaggcugagaccaacccagaaaccacc

SEQ ID NO: 167284 - RNA, 32 nt, Human
gcagagaggcugggcuugcaggcgcaguagcu

SEQ ID NO: 167285 - RNA, 25 nt, Human
gcagagagggaaaaacggagaguga

SEQ ID NO: 167286 - RNA, 32 nt, Human
gcagagagggccugggagcacaaugcugagcc

SEQ ID NO: 167287 - RNA, 32 nt, Human
gcagagaggggacaagcaggacuggggaacug

SEQ ID NO: 167288 - RNA, 32 nt, Human
gcagagagguugagaacaacccagaaaccuuc

SEQ ID NO: 167289 - RNA, 32 nt, Human
gcagagaguaacuauccucaacuucgauuggu

SEQ ID NO: 167290 - RNA, 21 nt, Human
gcagagaguggccuggcccug

SEQ ID NO: 167291 - RNA, 32 nt, Human
gcagagaguugcugcucucuccaacucaccca

SEQ ID NO: 167292 - RNA, 17 nt, Human
gcagagaucacauggug

SEQ ID NO: 167293 - RNA, 32 nt, Human
gcagagaucagggguuaccucugcuucugagc

SEQ ID NO: 167294 - RNA, 32 nt, Human
gcagagauccagccccuccaaccucccucugu

SEQ ID NO: 167295 - RNA, 32 nt, Human
gcagagaugccucuggagucccuguggccacg

SEQ ID NO: 167296 - RNA, 18 nt, Human
gcagagaugcgugcaucc

SEQ ID NO: 167297 - RNA, 32 nt, Human
gcagagauggcuucucagauauggcuugcaaa

SEQ ID NO: 167298 - RNA, 32 nt, Human
gcagagauugugccacugcacuccagccuggc

SEQ ID NO: 167299 - RNA, 19 nt, Human
gcagagauuucaucaugga

SEQ ID NO: 167300 - RNA, 32 nt, Human
gcagagcaagggcagcaggaccccaacaaaaa

SEQ ID NO: 167301 - RNA, 32 nt, Human
gcagagcacagcccacggggaucacagcguuu

SEQ ID NO: 167302 - RNA, 32 nt, Human
gcagagcacagcccacugccucccucuccuuc

SEQ ID NO: 167303 - RNA, 19 nt, Human
gcagagcaccaccauggcc

SEQ ID NO: 167304 - RNA, 32 nt, Human
gcagagcaccacugugauuuguucuccuggug

SEQ ID NO: 167305 - RNA, 32 nt, Human
gcagagcaccggggccagaggcucaaagcacc

SEQ ID NO: 167306 - RNA, 32 nt, Human
gcagagcaccuaagccugucucugccucccug

SEQ ID NO: 167307 - RNA, 32 nt, Human
gcagagcacuauggagcaauacuggcuaaugc

SEQ ID NO: 167308 - RNA, 32 nt, Human
gcagagcagacacagcagcaauggagugugca

SEQ ID NO: 167309 - RNA, 27 nt, Human
gcagagcagagggaaggcagcggaaga

SEQ ID NO: 167310 - RNA, 32 nt, Human
gcagagcagauggcagaugcacauguuggagg

SEQ ID NO: 167311 - RNA, 32 nt, Human
gcagagcagcacaaagaaacagccuuacacug

SEQ ID NO: 167312 - RNA, 32 nt, Human
gcagagcagcgcccuggccgggccaagcagga

SEQ ID NO: 167313 - RNA, 32 nt, Human
gcagagcagcuccuccccaacuucugucccag

SEQ ID NO: 167314 - RNA, 32 nt, Human
gcagagcaggaaugcguggcaggaaggaaucu

SEQ ID NO: 167315 - RNA, 20 nt, Human
gcagagcaggcuacguccuc

SEQ ID NO: 167316 - RNA, 32 nt, Human
gcagagcaggcugggcgggaaaacuuaaaugc

SEQ ID NO: 167317 - RNA, 32 nt, Human
gcagagcagggugguccgggcacacugggccu

SEQ ID NO: 167318 - RNA, 32 nt, Human
gcagagcaggguuccuggggcagcccugguau

SEQ ID NO: 167319 - RNA, 32 nt, Human
gcagagccagaggcacgcagccgcacaggggc

SEQ ID NO: 167320 - RNA, 32 nt, Human
gcagagccaggccagccuccuccacaugcaga

SEQ ID NO: 167321 - RNA, 32 nt, Human
gcagagccaggggugagaggcagcagugaugg

SEQ ID NO: 167322 - RNA, 32 nt, Human
gcagagccauggggccuucacaggcugcagug

SEQ ID NO: 167323 - RNA, 32 nt, Human
gcagagcccaagaaaucacuggugaugagaug

SEQ ID NO: 167324 - RNA, 32 nt, Human
gcagagcccaggagaugugggcaggagcuuuc

SEQ ID NO: 167325 - RNA, 32 nt, Human
gcagagcccaggaggcagcaucuccagagcug

SEQ ID NO: 167326 - RNA, 32 nt, Human
gcagagcccaggauggggucagggucaggccc

SEQ ID NO: 167327 - RNA, 32 nt, Human
gcagagcccaggcuggagcaggaggcauuuca

SEQ ID NO: 167328 - RNA, 17 nt, Human
gcagagcccagggaaga

SEQ ID NO: 167329 - RNA, 32 nt, Human
gcagagcccagggagcuggaggucggcgcuuc

SEQ ID NO: 167330 - RNA, 17 nt, Human
gcagagcccccauggcc

SEQ ID NO: 167331 - RNA, 32 nt, Human
gcagagccccgguacaaacagacaaggcugca

SEQ ID NO: 167332 - RNA, 20 nt, Human
gcagagccccucguguccuc

SEQ ID NO: 167333 - RNA, 32 nt, Human
gcagagccgagaggagggaagccagggguccc

SEQ ID NO: 167334 - RNA, 19 nt, Human
gcagagccgcccaagauga

SEQ ID NO: 167335 - RNA, 32 nt, Human
gcagagccgcccugcaccaccaugugcaucau

SEQ ID NO: 167336 - RNA, 17 nt, Human
gcagagccgggcagcuu

SEQ ID NO: 167337 - RNA, 32 nt, Human
gcagagccuagacuuccacucggaucuauuua

SEQ ID NO: 167338 - RNA, 32 nt, Human
gcagagccuagagagaaggcgaggacgcugaa

SEQ ID NO: 167339 - RNA, 20 nt, Human
gcagagccuccugcacccuc

SEQ ID NO: 167340 - RNA, 21 nt, Human
gcagagccuccugcgggacuu

SEQ ID NO: 167341 - RNA, 32 nt, Human
gcagagccucugccuaggcccugggccccacg

SEQ ID NO: 167342 - RNA, 32 nt, Human
gcagagccugcacucuggcacucgcugaagaa

SEQ ID NO: 167343 - RNA, 32 nt, Human
gcagagccugcgaaccccuccugugcuaccac

SEQ ID NO: 167344 - RNA, 32 nt, Human
gcagagccuggaauugcacugaggcuugaguc

SEQ ID NO: 167345 - RNA, 32 nt, Human
gcagagccuggaggagcuuuuagguguugaga

SEQ ID NO: 167346 - RNA, 32 nt, Human
gcagagccuuucuccccuucccggaucauuau

SEQ ID NO: 167347 - RNA, 32 nt, Human
gcagagcgaguagagagcagcccucauucacc

SEQ ID NO: 167348 - RNA, 32 nt, Human
gcagagcgaugcucuuugaccucccagaagag

SEQ ID NO: 167349 - RNA, 32 nt, Human
gcagagcgcagggagagccggagcggcgagcu

SEQ ID NO: 167350 - RNA, 32 nt, Human
gcagagcggcggcuucucucgcgaggacggac

SEQ ID NO: 167351 - RNA, 32 nt, Human
gcagagcggggaggugccugagcuggggccug

SEQ ID NO: 167352 - RNA, 17 nt, Human
gcagagcgggggagcuu

SEQ ID NO: 167353 - RNA, 17 nt, Human
gcagagcgggggcaguu

SEQ ID NO: 167354 - RNA, 32 nt, Human
gcagagcguccugcaaccccagcccucaccag

SEQ ID NO: 167355 - RNA, 32 nt, Human
gcagagcgugagccaccagggaagccacucgc

SEQ ID NO: 167356 - RNA, 32 nt, Human
gcagagcuagagccaugaaacccacagacuug

SEQ ID NO: 167357 - RNA, 32 nt, Human
gcagagcuaggauuugaccccagacaaucuga

SEQ ID NO: 167358 - RNA, 21 nt, Human
gcagagcucacagucucaugg

SEQ ID NO: 167359 - RNA, 21 nt, Human
gcagagcucacucaccgggac

SEQ ID NO: 167360 - RNA, 19 nt, Human
gcagagcucagacuaagug

SEQ ID NO: 167361 - RNA, 32 nt, Human
gcagagcucagcucuugcccucucacauccuu

SEQ ID NO: 167362 - RNA, 32 nt, Human
gcagagcucauuuuuauuccugucugcaaucg

SEQ ID NO: 167363 - RNA, 32 nt, Human
gcagagcuccaggcuggcaccaugguaggccu

SEQ ID NO: 167364 - RNA, 19 nt, Human
gcagagcuccagggagcuu

SEQ ID NO: 167365 - RNA, 32 nt, Human
gcagagcuccgaagcaggcaggacggagcgga

SEQ ID NO: 167366 - RNA, 23 nt, Human
gcagagcuccugacaaaggcggc

SEQ ID NO: 167367 - RNA, 32 nt, Human
gcagagcuccuuccugucuguggacucggagc

SEQ ID NO: 167368 - RNA, 19 nt, Human
gcagagcugaccugccugg

SEQ ID NO: 167369 - RNA, 32 nt, Human
gcagagcugagccagccagaagaaaaagcgau

SEQ ID NO: 167370 - RNA, 32 nt, Human
gcagagcugaggggacagggaggagcagaagc

SEQ ID NO: 167371 - RNA, 32 nt, Human
gcagagcugccagcagggagcucacagaaggg

SEQ ID NO: 167372 - RNA, 32 nt, Human
gcagagcugccuggagccugcugggcuggugg

SEQ ID NO: 167373 - RNA, 32 nt, Human
gcagagcugccugucuugugucugcugaugag

SEQ ID NO: 167374 - RNA, 32 nt, Human
gcagagcuggaaagcauggcuguuauaaauga

SEQ ID NO: 167375 - RNA, 21 nt, Human
gcagagcuggaacuagagcuu

SEQ ID NO: 167376 - RNA, 32 nt, Human
gcagagcuggaaggucugugcaagcuggcucc

SEQ ID NO: 167377 - RNA, 18 nt, Human
gcagagcuggacuggggc

SEQ ID NO: 167378 - RNA, 32 nt, Human
gcagagcuggacuggggcaggcugggcuucca

SEQ ID NO: 167379 - RNA, 20 nt, Human
gcagagcuggagguucuguc

SEQ ID NO: 167380 - RNA, 21 nt, Human
gcagagcuggagguuggggug

SEQ ID NO: 167381 - RNA, 32 nt, Human
gcagagcugggauguggugcaugccuuugugu

SEQ ID NO: 167382 - RNA, 32 nt, Human
gcagagcugggauguguagcauccagguaggu

SEQ ID NO: 167383 - RNA, 32 nt, Human
gcagagcugggauugaaggaccccuauagaga

SEQ ID NO: 167384 - RNA, 32 nt, Human
gcagagcugggggagcgaggcugacaaugacu

SEQ ID NO: 167385 - RNA, 32 nt, Human
gcagagcuggggucuagccaggagccccagca

SEQ ID NO: 167386 - RNA, 32 nt, Human
gcagagcugguuuccuggaauguuccuuuggc

SEQ ID NO: 167387 - RNA, 20 nt, Human
gcagagcuguuuggcagacu

SEQ ID NO: 167388 - RNA, 32 nt, Human
gcagagcuugaacacagucucacccagacucc

SEQ ID NO: 167389 - RNA, 32 nt, Human
gcagagcuugaggcaaagacuuacgugugauu

SEQ ID NO: 167390 - RNA, 32 nt, Human
gcagaggaaaggacagggaaaaagaaaaagac

SEQ ID NO: 167391 - RNA, 32 nt, Human
gcagaggacacgcugcaugggccccgcuugcg

SEQ ID NO: 167392 - RNA, 32 nt, Human
gcagaggacgaagaggaggaggaugaggagga

SEQ ID NO: 167393 - RNA, 32 nt, Human
gcagaggacugcaggccaucagcgugcacugu

SEQ ID NO: 167394 - RNA, 32 nt, Human
gcagaggagaagacccagacugugcauaguuc

SEQ ID NO: 167395 - RNA, 32 nt, Human
gcagaggagaaugacccuguggccaccaccau

SEQ ID NO: 167396 - RNA, 32 nt, Human
gcagaggagauggagacaggaaacgggagaac

SEQ ID NO: 167397 - RNA, 32 nt, Human
gcagaggagccccaagucuuggggaccacaga

SEQ ID NO: 167398 - RNA, 32 nt, Human
gcagaggaggagggcagcagcugagaggccag

SEQ ID NO: 167399 - RNA, 32 nt, Human
gcagaggaggaguuugguggguuucauacacc

SEQ ID NO: 167400 - RNA, 17 nt, Human
gcagaggaggcugcacc

SEQ ID NO: 167401 - RNA, 32 nt, Human
gcagaggaggggcugccuggagcuucccaccc

SEQ ID NO: 167402 - RNA, 32 nt, Human
gcagaggagggugggggagcuggugagaccaa

SEQ ID NO: 167403 - RNA, 32 nt, Human
gcagaggaguuucuucaggaagaaccagggca

SEQ ID NO: 167404 - RNA, 32 nt, Human
gcagaggaugugagaggcagaggcaggcuccu

SEQ ID NO: 167405 - RNA, 32 nt, Human
gcagaggauuaaaggugacugggaggaccagc

SEQ ID NO: 167406 - RNA, 32 nt, Human
gcagaggauugaggcuuaauucugagcuggcc

SEQ ID NO: 167407 - RNA, 32 nt, Human
gcagaggcaaagugcauagcuuagaggaagga

SEQ ID NO: 167408 - RNA, 32 nt, Human
gcagaggcaaaucaccgggcagagggagggga

SEQ ID NO: 167409 - RNA, 32 nt, Human
gcagaggcaacaguguuuaggauuuggguuau

SEQ ID NO: 167410 - RNA, 32 nt, Human
gcagaggcacaugcagacccugccuggagccu

SEQ ID NO: 167411 - RNA, 32 nt, Human
gcagaggcacgggaugagucugggugaccucu

SEQ ID NO: 167412 - RNA, 32 nt, Human
gcagaggcagaauaugcugagugucuggaguc

SEQ ID NO: 167413 - RNA, 32 nt, Human
gcagaggcagaggcagccacacagccccuccc

SEQ ID NO: 167414 - RNA, 32 nt, Human
gcagaggcagcccgcucacuucccgcggaggc

SEQ ID NO: 167415 - RNA, 32 nt, Human
gcagaggcagcgccgcaggaggcgggugcccg

SEQ ID NO: 167416 - RNA, 18 nt, Human
gcagaggcaggccagagg

SEQ ID NO: 167417 - RNA, 32 nt, Human
gcagaggcagggcuagggugauuuuuggccgu

SEQ ID NO: 167418 - RNA, 32 nt, Human
gcagaggcaguuaacacugggaagcccugccc

SEQ ID NO: 167419 - RNA, 32 nt, Human
gcagaggcauccagaccuucugcugacuaaga

SEQ ID NO: 167420 - RNA, 32 nt, Human
gcagaggcauggaggagggaggcgugggaugg

SEQ ID NO: 167421 - RNA, 22 nt, Human
gcagaggcaugggacccggggc

SEQ ID NO: 167422 - RNA, 26 nt, Human
gcagaggccaacagcacgcagcugaa

SEQ ID NO: 167423 - RNA, 32 nt, Human
gcagaggccaacggaucccccugccugucgca

SEQ ID NO: 167424 - RNA, 32 nt, Human
gcagaggccagccugcacuggagucugaggcc

SEQ ID NO: 167425 - RNA, 32 nt, Human
gcagaggccauugcaggaugaaucacuuguca

SEQ ID NO: 167426 - RNA, 32 nt, Human
gcagaggcccuaggcagcuuguugacugcugu

SEQ ID NO: 167427 - RNA, 32 nt, Human
gcagaggccggcagauggagauucagaaacau

SEQ ID NO: 167428 - RNA, 32 nt, Human
gcagaggccucagccuuagaggcuggaucaga

SEQ ID NO: 167429 - RNA, 32 nt, Human
gcagaggccucccaggaggagagcaaggaccu

SEQ ID NO: 167430 - RNA, 32 nt, Human
gcagaggccuguaaucccagcuacuugggagg

SEQ ID NO: 167431 - RNA, 32 nt, Human
gcagaggccuguaaucccaguuccuugggagg

SEQ ID NO: 167432 - RNA, 32 nt, Human
gcagaggcgggcagcuccuccuccagggccca

SEQ ID NO: 167433 - RNA, 22 nt, Human
gcagaggcucacgccuguaauc

SEQ ID NO: 167434 - RNA, 32 nt, Human
gcagaggcucaguguucacagucagagcugag

SEQ ID NO: 167435 - RNA, 32 nt, Human
gcagaggcuccucugauggcugacaucaguca

SEQ ID NO: 167436 - RNA, 32 nt, Human
gcagaggcucuuccuguucauccgccgggaag

SEQ ID NO: 167437 - RNA, 32 nt, Human
gcagaggcugaggcacggggagccagccccac

SEQ ID NO: 167438 - RNA, 32 nt, Human
gcagaggcugaggcugauuccaccccagccug

SEQ ID NO: 167439 - RNA, 32 nt, Human
gcagaggcugcacucuagccugggcaacagag

SEQ ID NO: 167440 - RNA, 19 nt, Human
gcagaggcugcccgggcgg

SEQ ID NO: 167441 - RNA, 32 nt, Human
gcagaggcugggacacaaggggcuggcgaggg

SEQ ID NO: 167442 - RNA, 32 nt, Human
gcagaggcugggaggcggcagaaugcagccag

SEQ ID NO: 167443 - RNA, 32 nt, Human
gcagaggcugggccugaggucucaguguggag

SEQ ID NO: 167444 - RNA, 32 nt, Human
gcagaggcugggggagggaugcagugacuuuu

SEQ ID NO: 167445 - RNA, 19 nt, Human
gcagaggcuguggcugcag

SEQ ID NO: 167446 - RNA, 32 nt, Human
gcagaggcuuaaggagcuacacugggggaagg

SEQ ID NO: 167447 - RNA, 32 nt, Human
gcagaggcuuucucugggugccaagccauaua

SEQ ID NO: 167448 - RNA, 32 nt, Human
gcagagggaaagggguacacugagggagaaag

SEQ ID NO: 167449 - RNA, 32 nt, Human
gcagagggaaggcaugggggcaggaagagagc

SEQ ID NO: 167450 - RNA, 32 nt, Human
gcagagggacuugguccuccuugucugguacu

SEQ ID NO: 167451 - RNA, 32 nt, Human
gcagagggagaaauggaucagaggggucaggg

SEQ ID NO: 167452 - RNA, 32 nt, Human
gcagagggagagagaaggugacacggauggaa

SEQ ID NO: 167453 - RNA, 32 nt, Human
gcagagggagaggagacaggaaggaaagauga

SEQ ID NO: 167454 - RNA, 32 nt, Human
gcagagggagcgagcgggcggccggcuagggu

SEQ ID NO: 167455 - RNA, 32 nt, Human
gcagagggaggagaggugagggcagauaaggg

SEQ ID NO: 167456 - RNA, 32 nt, Human
gcagagggaggcacuuucacccggccagcaac

SEQ ID NO: 167457 - RNA, 32 nt, Human
gcagagggagggagccaaggucacuccaauaa

SEQ ID NO: 167458 - RNA, 32 nt, Human
gcagagggagggcagaggcuuaaaggcuguga

SEQ ID NO: 167459 - RNA, 32 nt, Human
gcagagggagggcuuuguggauuccaaaggcc

SEQ ID NO: 167460 - RNA, 32 nt, Human
gcagagggaggggaagcagcccagggacaccc

SEQ ID NO: 167461 - RNA, 32 nt, Human
gcagagggcaagacgggcacucacagacagag

SEQ ID NO: 167462 - RNA, 32 nt, Human
gcagagggcaggacaccaugagcucaggaucu

SEQ ID NO: 167463 - RNA, 32 nt, Human
gcagagggcagguauaacacagcacuacauau

SEQ ID NO: 167464 - RNA, 32 nt, Human
gcagagggcaguuccccagcuugaugguuucu

SEQ ID NO: 167465 - RNA, 32 nt, Human
gcagagggcccaacccugacccaugcucuuuc

SEQ ID NO: 167466 - RNA, 32 nt, Human
gcagagggccuggguccuccugagccccugca

SEQ ID NO: 167467 - RNA, 32 nt, Human
gcagaggggaggaggaagcacaagaaguggga

SEQ ID NO: 167468 - RNA, 32 nt, Human
gcagaggggauagaagucugguggagguggag

SEQ ID NO: 167469 - RNA, 32 nt, Human
gcagaggggaugucuggcuugccugaagggag

SEQ ID NO: 167470 - RNA, 15 nt, Human
gcagaggggcagcuu

SEQ ID NO: 167471 - RNA, 32 nt, Human
gcagaggggccaggucugcccagcguuuacca

SEQ ID NO: 167472 - RNA, 32 nt, Human
gcagaggggccuggggcugggcccagagucca

SEQ ID NO: 167473 - RNA, 32 nt, Human
gcagaggggcuacgaaccaggugcaggguccc

SEQ ID NO: 167474 - RNA, 32 nt, Human
gcagaggggcugcaccuggccuuauggggauc

SEQ ID NO: 167475 - RNA, 32 nt, Human
gcagagggggcugcggacacagcaggcccccu

SEQ ID NO: 167476 - RNA, 20 nt, Human
gcagaggggugcggcagcuu

SEQ ID NO: 167477 - RNA, 32 nt, Human
gcagaggguccccaccaugcagcugaagugcc

SEQ ID NO: 167478 - RNA, 32 nt, Human
gcagaggguccucagagcaggagugacaaggg

SEQ ID NO: 167479 - RNA, 31 nt, Human
gcagagggucuugggcggcagcgacgaagga

SEQ ID NO: 167480 - RNA, 32 nt, Human
gcagagggugaaguuucucucaguucucuccc

SEQ ID NO: 167481 - RNA, 32 nt, Human
gcagagggugaguggggaccuacgagguucaa

SEQ ID NO: 167482 - RNA, 16 nt, Human
gcagaggguggggcag

SEQ ID NO: 167483 - RNA, 32 nt, Human
gcagagguaccacuguuagccuggugggaaaa

SEQ ID NO: 167484 - RNA, 32 nt, Human
gcagagguagcugcacaugcagcuggucagag

SEQ ID NO: 167485 - RNA, 32 nt, Human
gcagaggucaccagagccaaggcagcaaggca

SEQ ID NO: 167486 - RNA, 32 nt, Human
gcagaggucccucggccuccugacugacugac

SEQ ID NO: 167487 - RNA, 32 nt, Human
gcagaggucucucacuguguugcccagacaag

SEQ ID NO: 167488 - RNA, 32 nt, Human
gcagaggucucucauuguguugcccagacaag

SEQ ID NO: 167489 - RNA, 20 nt, Human
gcagaggucuucucuuccca

SEQ ID NO: 167490 - RNA, 32 nt, Human
gcagaggugaagccaagaaaauccagaugccu

SEQ ID NO: 167491 - RNA, 27 nt, Human
gcagaggugacuucaaagugcugggga

SEQ ID NO: 167492 - RNA, 32 nt, Human
gcagaggugagcugagugcagugagccaagac

SEQ ID NO: 167493 - RNA, 32 nt, Human
gcagaggugcagguccuggugcuugauggucg

SEQ ID NO: 167494 - RNA, 32 nt, Human
gcagagguggccacugcccucguccccagccu

SEQ ID NO: 167495 - RNA, 32 nt, Human
gcagagguucucuccccugccgcugagagggc

SEQ ID NO: 167496 - RNA, 32 nt, Human
gcagagguugcaaacuggcaaccugugguugg

SEQ ID NO: 167497 - RNA, 32 nt, Human
gcagaguacagaagggugaagaagugagcaga

SEQ ID NO: 167498 - RNA, 32 nt, Human
gcagaguauugaacccugccucccaguuaaag

SEQ ID NO: 167499 - RNA, 32 nt, Human
gcagagucaaagcugcaaccagaauugccuga

SEQ ID NO: 167500 - RNA, 32 nt, Human
gcagagucaagggacuugcaugugcaaguugg

SEQ ID NO: 167501 - RNA, 18 nt, Human
gcagagucacaagaugaa

SEQ ID NO: 167502 - RNA, 32 nt, Human
gcagagucagcagaacugggguggauuugguu

SEQ ID NO: 167503 - RNA, 25 nt, Human
gcagagucaucuucuaugcaggcug

SEQ ID NO: 167504 - RNA, 32 nt, Human
gcagaguccugcaccaggccugggugagugga

SEQ ID NO: 167505 - RNA, 32 nt, Human
gcagagucgugagaaagguguugucaagggac

SEQ ID NO: 167506 - RNA, 32 nt, Human
gcagagucuagaggaauuuuuguuuccuugau

SEQ ID NO: 167507 - RNA, 32 nt, Human
gcagagucuagccugugaaaggccucuugcaa

SEQ ID NO: 167508 - RNA, 32 nt, Human
gcagagucuaggccucacccuauaccucccga

SEQ ID NO: 167509 - RNA, 32 nt, Human
gcagagucuccauccagcagcuggggguucug

SEQ ID NO: 167510 - RNA, 32 nt, Human
gcagagucucccgcugcaaucugggugguaac

SEQ ID NO: 167511 - RNA, 32 nt, Human
gcagagucucuccugcccucccuccuuccugc

SEQ ID NO: 167512 - RNA, 32 nt, Human
gcagagucuugcucugcuggagugcgguggug

SEQ ID NO: 167513 - RNA, 32 nt, Human
gcagagugacccagacugcaggcaguaacuga

SEQ ID NO: 167514 - RNA, 22 nt, Human
gcagagugagagggacauggug

SEQ ID NO: 167515 - RNA, 22 nt, Human
gcagagugcgaguggagagaga

SEQ ID NO: 167516 - RNA, 32 nt, Human
gcagaguggagagggugugugaaaugccggug

SEQ ID NO: 167517 - RNA, 24 nt, Human
gcagaguggcuuacaccuauaauc

SEQ ID NO: 167518 - RNA, 32 nt, Human
gcagaguggggcugagaaacaggcugcgguga

SEQ ID NO: 167519 - RNA, 20 nt, Human
gcagagugguaaccaugcuu

SEQ ID NO: 167520 - RNA, 32 nt, Human
gcagaguguguauucuuggauggcugaugcau

SEQ ID NO: 167521 - RNA, 32 nt, Human
gcagaguuaccaggaaucuuuccuuccagcau

SEQ ID NO: 167522 - RNA, 22 nt, Human
gcagaguugagcuggcagggga

SEQ ID NO: 167523 - RNA, 32 nt, Human
gcagaguugaguaguuguagcagacaccacau

SEQ ID NO: 167524 - RNA, 17 nt, Human
gcagaguuggggcagcu

SEQ ID NO: 167525 - RNA, 32 nt, Human
gcagauaacccuggcccuacagccugcuugcu

SEQ ID NO: 167526 - RNA, 20 nt, Human
gcagauaaccugaggucagg

SEQ ID NO: 167527 - RNA, 20 nt, Human
gcagauaaccugcggucagg

SEQ ID NO: 167528 - RNA, 32 nt, Human
gcagauaagacuguucuucagaaucauguuaa

SEQ ID NO: 167529 - RNA, 32 nt, Human
gcagauaauuuccagagacuguuuauaugcac

SEQ ID NO: 167530 - RNA, 32 nt, Human
gcagauacaggcugguauagaggaugcagaaa

SEQ ID NO: 167531 - RNA, 23 nt, Human
gcagauaccacccggaggcagug

SEQ ID NO: 167532 - RNA, 32 nt, Human
gcagauacucuccauuccuuccuuccuccagc

SEQ ID NO: 167533 - RNA, 32 nt, Human
gcagauagacuugaggacagaaaacaaaaaca

SEQ ID NO: 167534 - RNA, 32 nt, Human
gcagauagggagaagggaaaaggggccucacu

SEQ ID NO: 167535 - RNA, 32 nt, Human
gcagauaggguagaggaaagggucuagaauau

SEQ ID NO: 167536 - RNA, 19 nt, Human
gcagauaguauacacauca

SEQ ID NO: 167537 - RNA, 32 nt, Human
gcagauaguggaguuucacguggcaguccggu

SEQ ID NO: 167538 - RNA, 32 nt, Human
gcagauaguucugcaauuuagucuguagccuc

SEQ ID NO: 167539 - RNA, 32 nt, Human
gcagauaucuggacucaccacauucaguaacu

SEQ ID NO: 167540 - RNA, 32 nt, Human
gcagauauggcuccuggcugcgucagccuccc

SEQ ID NO: 167541 - RNA, 32 nt, Human
gcagauauucuagcuucauuguaagcaaucua

SEQ ID NO: 167542 - RNA, 32 nt, Human
gcagauauuuggcaaugaggguucagaagagg

SEQ ID NO: 167543 - RNA, 32 nt, Human
gcagaucacaaccuuaacucaggcaaucggac

SEQ ID NO: 167544 - RNA, 32 nt, Human
gcagaucacacaagauuucaucacaguacuca

SEQ ID NO: 167545 - RNA, 32 nt, Human
gcagaucacagugccuugcaaggaaccccuga

SEQ ID NO: 167546 - RNA, 32 nt, Human
gcagaucacaucaacauccuggcauugggcug

SEQ ID NO: 167547 - RNA, 20 nt, Human
gcagaucaccagaggucagg

SEQ ID NO: 167548 - RNA, 20 nt, Human
gcagaucaccgaaggucagg

SEQ ID NO: 167549 - RNA, 20 nt, Human
gcagaucaccggaggucagg

SEQ ID NO: 167550 - RNA, 18 nt, Human
gcagaucaccugagguca

SEQ ID NO: 167551 - RNA, 20 nt, Human
gcagaucaccugaggucagg

SEQ ID NO: 167552 - RNA, 20 nt, Human
gcagaucaccugagguccgg

SEQ ID NO: 167553 - RNA, 20 nt, Human
gcagaucaccugaggucggg

SEQ ID NO: 167554 - RNA, 20 nt, Human
gcagaucaccugagguuagg

SEQ ID NO: 167555 - RNA, 32 nt, Human
gcagaucacgaaugcaccugcuuccaggcagu

SEQ ID NO: 167556 - RNA, 32 nt, Human
gcagaucagcaaccucagccccaccugggaau

SEQ ID NO: 167557 - RNA, 20 nt, Human
gcagaucagcugaggucagg

SEQ ID NO: 167558 - RNA, 32 nt, Human
gcagaucaggccacuacuuacugugacuugga

SEQ ID NO: 167559 - RNA, 32 nt, Human
gcagaucauccccagcucuucguccagaggga

SEQ ID NO: 167560 - RNA, 20 nt, Human
gcagaucaucugaggccagg

SEQ ID NO: 167561 - RNA, 20 nt, Human
gcagaucaucugaggucagg

SEQ ID NO: 167562 - RNA, 32 nt, Human
gcagaucaugaggucagaagauaaagaccacc

SEQ ID NO: 167563 - RNA, 32 nt, Human
gcagaucaugaggucagaagaucgagaccauc

SEQ ID NO: 167564 - RNA, 22 nt, Human
gcagauccacguguuguuggag

SEQ ID NO: 167565 - RNA, 32 nt, Human
gcagauccagaagauaggagggugacagcacg

SEQ ID NO: 167566 - RNA, 32 nt, Human
gcagauccagcaccuauugaauuaccauagag

SEQ ID NO: 167567 - RNA, 32 nt, Human
gcagauccagccuuccugucaacagcgacagg

SEQ ID NO: 167568 - RNA, 32 nt, Human
gcagauccaucuccaccaacacagacaacacc

SEQ ID NO: 167569 - RNA, 32 nt, Human
gcagaucccagaccuucucuaccuucaggaau

SEQ ID NO: 167570 - RNA, 17 nt, Human
gcagaucccagcuguga

SEQ ID NO: 167571 - RNA, 32 nt, Human
gcagaucccaggagagaagagcucaggagaug

SEQ ID NO: 167572 - RNA, 25 nt, Human
gcagaucccaggcugggcauggggg

SEQ ID NO: 167573 - RNA, 24 nt, Human
gcagaucccauggacauuugggga

SEQ ID NO: 167574 - RNA, 23 nt, Human
gcagauccccaggggcugcuggg

SEQ ID NO: 167575 - RNA, 32 nt, Human
gcagaucccuaugggggagcugccucacguuc

SEQ ID NO: 167576 - RNA, 20 nt, Human
gcagaucccuggagaggggg

SEQ ID NO: 167577 - RNA, 32 nt, Human
gcagaucccuuucuuagcuuauaucuucuucu

SEQ ID NO: 167578 - RNA, 32 nt, Human
gcagauccucaagcagaccuacagcaaguuug

SEQ ID NO: 167579 - RNA, 19 nt, Human
gcagauccugaacacuccu

SEQ ID NO: 167580 - RNA, 32 nt, Human
gcagauccugaagccagaacuccaccccggcg

SEQ ID NO: 167581 - RNA, 32 nt, Human
gcagauccuggcugcgaguccauccgagggag

SEQ ID NO: 167582 - RNA, 21 nt, Human
gcagauccuuauccucaggga

SEQ ID NO: 167583 - RNA, 20 nt, Human
gcagaucguuuuacauguca

SEQ ID NO: 167584 - RNA, 20 nt, Human
gcagaucuccgaggcccuga

SEQ ID NO: 167585 - RNA, 23 nt, Human
gcagaucuccgaggcccugagga

SEQ ID NO: 167586 - RNA, 32 nt, Human
gcagaucugaugcugauuugaugcuguaugau

SEQ ID NO: 167587 - RNA, 32 nt, Human
gcagaucugcucccuucugggacccaggcuuc

SEQ ID NO: 167588 - RNA, 21 nt, Human
gcagaucugggaacugugaga

SEQ ID NO: 167589 - RNA, 32 nt, Human
gcagaucuguccagcacugauauugcucuaua

SEQ ID NO: 167590 - RNA, 32 nt, Human
gcagaucuguuucaaaaacaaauacaaaaaug

SEQ ID NO: 167591 - RNA, 24 nt, Human
gcagaucuucgggcggcuagggga

SEQ ID NO: 167592 - RNA, 32 nt, Human
gcagaucuugaaguaaggaagccagacacagc

SEQ ID NO: 167593 - RNA, 32 nt, Human
gcagaucuuggggccggaggccaguccaaccc

SEQ ID NO: 167594 - RNA, 25 nt, Human
gcagaugaaaccaggucacugggga

SEQ ID NO: 167595 - RNA, 32 nt, Human
gcagaugaagaaaaugaggugcagagaggauu

SEQ ID NO: 167596 - RNA, 29 nt, Human
gcagaugaagcuugcccgcgcccaguggc

SEQ ID NO: 167597 - RNA, 32 nt, Human
gcagaugaaggaguuuucaggagcuuuugaca

SEQ ID NO: 167598 - RNA, 32 nt, Human
gcagaugacaacacaucuccuggacuggagca

SEQ ID NO: 167599 - RNA, 32 nt, Human
gcagaugacacuuuuucccacccuuuuaaagc

SEQ ID NO: 167600 - RNA, 32 nt, Human
gcagaugacagagaaggacaaggugaucgaga

SEQ ID NO: 167601 - RNA, 20 nt, Human
gcagaugacuugaggucagg

SEQ ID NO: 167602 - RNA, 32 nt, Human
gcagaugagaaaaccaagaaugacagaaguuu

SEQ ID NO: 167603 - RNA, 32 nt, Human
gcagaugagaucuucuggcucaccuugaucuu

SEQ ID NO: 167604 - RNA, 32 nt, Human
gcagaugagcagcaugguaaucauguccagcc

SEQ ID NO: 167605 - RNA, 20 nt, Human
gcagaugaggaaacugaggc

SEQ ID NO: 167606 - RNA, 21 nt, Human
gcagaugaggaaacugaggcu

SEQ ID NO: 167607 - RNA, 32 nt, Human
gcagaugagggagcccguacacucccugccac

SEQ ID NO: 167608 - RNA, 20 nt, Human
gcagaugauagacacugggg

SEQ ID NO: 167609 - RNA, 32 nt, Human
gcagaugaugaaacuggguucaucccaguucc

SEQ ID NO: 167610 - RNA, 32 nt, Human
gcagaugaugggcucccugaaacugcugccgc

SEQ ID NO: 167611 - RNA, 32 nt, Human
gcagaugcacaccggaccuggucaaggccagg

SEQ ID NO: 167612 - RNA, 32 nt, Human
gcagaugcagaaggagagaauguguggaggau

SEQ ID NO: 167613 - RNA, 32 nt, Human
gcagaugcaggugccggcugcugcagugcagu

SEQ ID NO: 167614 - RNA, 32 nt, Human
gcagaugccagcagugccugcccgugucccca

SEQ ID NO: 167615 - RNA, 32 nt, Human
gcagaugccagugucugcucucuuuaccaccg

SEQ ID NO: 167616 - RNA, 32 nt, Human
gcagaugcccugaccucugcccccagguagca

SEQ ID NO: 167617 - RNA, 29 nt, Human
gcagaugccgguggccgugggucccuacg

SEQ ID NO: 167618 - RNA, 32 nt, Human
gcagaugccugcacaagccaagugugucuuau

SEQ ID NO: 167619 - RNA, 32 nt, Human
gcagaugcgagggcccagaguuguuuguaguu

SEQ ID NO: 167620 - RNA, 32 nt, Human
gcagaugcguagcauuugcugcauggguuaau

SEQ ID NO: 167621 - RNA, 32 nt, Human
gcagaugcuaagucuguaaacugugaauuaac

SEQ ID NO: 167622 - RNA, 19 nt, Human
gcagaugcuccuccccugg

SEQ ID NO: 167623 - RNA, 32 nt, Human
gcagaugcuccugcccuggccuccaggaaguc

SEQ ID NO: 167624 - RNA, 32 nt, Human
gcagaugcugauuuccuagaugaccugcucuc

SEQ ID NO: 167625 - RNA, 23 nt, Human
gcagaugcuuagauuuuguguca

SEQ ID NO: 167626 - RNA, 22 nt, Human
gcagaugcuuguaaucccagcu

SEQ ID NO: 167627 - RNA, 20 nt, Human
gcagauggaaaagcugaggc

SEQ ID NO: 167628 - RNA, 32 nt, Human
gcagauggaaaggagccuaggccaggugcaac

SEQ ID NO: 167629 - RNA, 24 nt, Human
gcagauggaacacuugaggucagg

SEQ ID NO: 167630 - RNA, 32 nt, Human
gcagauggacucugccaccuccucccagcugg

SEQ ID NO: 167631 - RNA, 32 nt, Human
gcagauggagguuuagagucucagggauuaag

SEQ ID NO: 167632 - RNA, 32 nt, Human
gcagauggcagcgggccucuccccagcccuga

SEQ ID NO: 167633 - RNA, 29 nt, Human
gcagauggcccaggcagugcggggcgacg

SEQ ID NO: 167634 - RNA, 25 nt, Human
gcagauggcccaguacacagcugag

SEQ ID NO: 167635 - RNA, 32 nt, Human
gcagauggccgggugccuggagcacugcacgc

SEQ ID NO: 167636 - RNA, 32 nt, Human
gcagauggcugcagagcuucguugauggucuu

SEQ ID NO: 167637 - RNA, 32 nt, Human
gcagauggcuugccuuggcacauacauucagc

SEQ ID NO: 167638 - RNA, 32 nt, Human
gcagaugggaaagagaaagcagaaaguaugaa

SEQ ID NO: 167639 - RNA, 32 nt, Human
gcagaugggagcaggcaccagcuauggagagg

SEQ ID NO: 167640 - RNA, 32 nt, Human
gcagaugggaggaccccgaggccagacgcaca

SEQ ID NO: 167641 - RNA, 32 nt, Human
gcagauggggguggcaagggggagacgggugg

SEQ ID NO: 167642 - RNA, 32 nt, Human
gcagaugguacagauguuccugccuuagaguc

SEQ ID NO: 167643 - RNA, 32 nt, Human
gcagaugguacagugaguguucagagacgugg

SEQ ID NO: 167644 - RNA, 32 nt, Human
gcagaugguccuccauuucaacuccagaagug

SEQ ID NO: 167645 - RNA, 32 nt, Human
gcagaugguggagucaagggugggcagcguac

SEQ ID NO: 167646 - RNA, 32 nt, Human
gcagaugguguuuucuucuucuagaaaggguc

SEQ ID NO: 167647 - RNA, 32 nt, Human
gcagauguaagccuguccaugcagucagccga

SEQ ID NO: 167648 - RNA, 32 nt, Human
gcagauguuggagaauucuucuaauuuucaga

SEQ ID NO: 167649 - RNA, 19 nt, Human
gcagauguuucaaauucuc

SEQ ID NO: 167650 - RNA, 32 nt, Human
gcagauguuucagcccaaaagcucuucuacag

SEQ ID NO: 167651 - RNA, 32 nt, Human
gcagauguuucgcuuucccuccuuccucgcug

SEQ ID NO: 167652 - RNA, 32 nt, Human
gcagauuaggagccaacguuguuugcacaugu

SEQ ID NO: 167653 - RNA, 32 nt, Human
gcagauucaaagugauccugugucuaaaccuu

SEQ ID NO: 167654 - RNA, 32 nt, Human
gcagauuccagaaaaaggagguuggggcacca

SEQ ID NO: 167655 - RNA, 32 nt, Human
gcagauuccagccuuugggcugggggccucuc

SEQ ID NO: 167656 - RNA, 22 nt, Human
gcagauucccaagcaaggguga

SEQ ID NO: 167657 - RNA, 32 nt, Human
gcagauuccguccgggcacaggaagcuuuccc

SEQ ID NO: 167658 - RNA, 32 nt, Human
gcagauucuauuaagcacucucauuucaggag

SEQ ID NO: 167659 - RNA, 32 nt, Human
gcagauucuauuuccccucuucugcuaauacc

SEQ ID NO: 167660 - RNA, 32 nt, Human
gcagauucugcagcuggugugggguucagguc

SEQ ID NO: 167661 - RNA, 32 nt, Human
gcagauucuucccagccaauccuucugaugac

SEQ ID NO: 167662 - RNA, 22 nt, Human
gcagauugaaggagcugaggcu

SEQ ID NO: 167663 - RNA, 32 nt, Human
gcagauugaugaacagcaaaagaugcuagaga

SEQ ID NO: 167664 - RNA, 32 nt, Human
gcagauugcaugaacugaaagcuccuucuaau

SEQ ID NO: 167665 - RNA, 32 nt, Human
gcagauuggauagccagaaagccagucacucg

SEQ ID NO: 167666 - RNA, 19 nt, Human
gcagauuguccacacagua

SEQ ID NO: 167667 - RNA, 32 nt, Human
gcagauuguggggacccagggaagggaggaau

SEQ ID NO: 167668 - RNA, 32 nt, Human
gcagauuguucuguugccgggcaacgcgacuu

SEQ ID NO: 167669 - RNA, 32 nt, Human
gcagauuuaugacauccauauaagcuaucugg

SEQ ID NO: 167670 - RNA, 32 nt, Human
gcagauuugcucucccucccgcuuccucccuc

SEQ ID NO: 167671 - RNA, 32 nt, Human
gcagauuuguaaccucugguucucugcaggga

SEQ ID NO: 167672 - RNA, 32 nt, Human
gcagauuuugacuauguuuacaggacgguuua

SEQ ID NO: 167673 - RNA, 32 nt, Human
gcagauuuuucagacauuguucauaccuugca

SEQ ID NO: 167674 - RNA, 32 nt, Human
gcagcaaacacuccacccuccaccuuccauuu

SEQ ID NO: 167675 - RNA, 32 nt, Human
gcagcaaaccaccauggcacacauuuaccuau

SEQ ID NO: 167676 - RNA, 32 nt, Human
gcagcaaaccaccauggcacacauuuuccuau

SEQ ID NO: 167677 - RNA, 32 nt, Human
gcagcaaaccaccauggcacacguuuaccugu

SEQ ID NO: 167678 - RNA, 32 nt, Human
gcagcaaaccaccauggcacauguauaccuau

SEQ ID NO: 167679 - RNA, 32 nt, Human
gcagcaaaccaccauggcacauguguaccuau

SEQ ID NO: 167680 - RNA, 32 nt, Human
gcagcaaaccaccauggcacauguuuaccuau

SEQ ID NO: 167681 - RNA, 32 nt, Human
gcagcaaaccaccauggcaugucuauaccuau

SEQ ID NO: 167682 - RNA, 32 nt, Human
gcagcaaacuuggugaaacuacaucuccaaug

SEQ ID NO: 167683 - RNA, 32 nt, Human
gcagcaaagagggagaagaggaacagcgcuug

SEQ ID NO: 167684 - RNA, 32 nt, Human
gcagcaaagccuugcaaucccaggcugggguc

SEQ ID NO: 167685 - RNA, 32 nt, Human
gcagcaaaggggccugcugagcucugguuagg

SEQ ID NO: 167686 - RNA, 32 nt, Human
gcagcaaaugccacucugggcagucuuuugug

SEQ ID NO: 167687 - RNA, 18 nt, Human
gcagcaacaagaacagca

SEQ ID NO: 167688 - RNA, 32 nt, Human
gcagcaacaagagggcuggaagggggagcugc

SEQ ID NO: 167689 - RNA, 32 nt, Human
gcagcaacauaguaagaccccaucucuauaaa

SEQ ID NO: 167690 - RNA, 32 nt, Human
gcagcaacaucacuaaccacaucccagacaua

SEQ ID NO: 167691 - RNA, 32 nt, Human
gcagcaacgcccuaggauuugcagugaauguc

SEQ ID NO: 167692 - RNA, 32 nt, Human
gcagcaacgcccuaggguuugcagugaauguc

SEQ ID NO: 167693 - RNA, 32 nt, Human
gcagcaacuccuugauucuuggaugacugaac

SEQ ID NO: 167694 - RNA, 32 nt, Human
gcagcaacucgacugguucucccaggagcagg

SEQ ID NO: 167695 - RNA, 32 nt, Human
gcagcaagaagcggggagagagagggauagaa

SEQ ID NO: 167696 - RNA, 24 nt, Human
gcagcaagaaugaccuccugcagc

SEQ ID NO: 167697 - RNA, 32 nt, Human
gcagcaagagauacaugacauucuuucuuccu

SEQ ID NO: 167698 - RNA, 20 nt, Human
gcagcaagaggcucucucca

SEQ ID NO: 167699 - RNA, 18 nt, Human
gcagcaagaucaugugca

SEQ ID NO: 167700 - RNA, 21 nt, Human
gcagcaagcacuaagcuguga

SEQ ID NO: 167701 - RNA, 19 nt, Human
gcagcaagcagacauuuca

SEQ ID NO: 167702 - RNA, 32 nt, Human
gcagcaagcagcguuuauggugcuuccuucuc

SEQ ID NO: 167703 - RNA, 32 nt, Human
gcagcaagccagcugcgggccuugggggcuca

SEQ ID NO: 167704 - RNA, 32 nt, Human
gcagcaagccaggcacagugaguggcagagca

SEQ ID NO: 167705 - RNA, 32 nt, Human
gcagcaagcccaggcggcgguggaaaggcuaa

SEQ ID NO: 167706 - RNA, 32 nt, Human
gcagcaagcccaggcggcgguggaaaggcugg

SEQ ID NO: 167707 - RNA, 32 nt, Human
gcagcaagcuaaauaagcaucuucccacugcg

SEQ ID NO: 167708 - RNA, 18 nt, Human
gcagcaagcuauacuguc

SEQ ID NO: 167709 - RNA, 24 nt, Human
gcagcaagcucccagcccagagca

SEQ ID NO: 167710 - RNA, 18 nt, Human
gcagcaagcugcuacugc

SEQ ID NO: 167711 - RNA, 19 nt, Human
gcagcaagcugcuacugca

SEQ ID NO: 167712 - RNA, 19 nt, Human
gcagcaagcugcucuguua

SEQ ID NO: 167713 - RNA, 19 nt, Human
gcagcaagcugcugguguc

SEQ ID NO: 167714 - RNA, 18 nt, Human
gcagcaaggagaugugca

SEQ ID NO: 167715 - RNA, 32 nt, Human
gcagcaaggauguagagagaaauaggacuuaa

SEQ ID NO: 167716 - RNA, 32 nt, Human
gcagcaaggcacugcgggugccccagagacac

SEQ ID NO: 167717 - RNA, 19 nt, Human
gcagcaagggaccugcuca

SEQ ID NO: 167718 - RNA, 32 nt, Human
gcagcaagggggagacugcgguauggccccgg

SEQ ID NO: 167719 - RNA, 19 nt, Human
gcagcaaggucccugcggc

SEQ ID NO: 167720 - RNA, 23 nt, Human
gcagcaagguggcuccuguggca

SEQ ID NO: 167721 - RNA, 19 nt, Human
gcagcaaguaagaauuuca

SEQ ID NO: 167722 - RNA, 18 nt, Human
gcagcaagucagaggcuc

SEQ ID NO: 167723 - RNA, 19 nt, Human
gcagcaagugcuccgugca

SEQ ID NO: 167724 - RNA, 19 nt, Human
gcagcaaguuuauuaauca

SEQ ID NO: 167725 - RNA, 18 nt, Human
gcagcaaguuuuuaugca

SEQ ID NO: 167726 - RNA, 32 nt, Human
gcagcaaucuccacagccuccugggucucacc

SEQ ID NO: 167727 - RNA, 31 nt, Human
gcagcaauggccaagaucaaggcuccagauc

SEQ ID NO: 167728 - RNA, 21 nt, Human
gcagcaauugcuacucuauac

SEQ ID NO: 167729 - RNA, 20 nt, Human
gcagcaauuuguaaaggcuc

SEQ ID NO: 167730 - RNA, 32 nt, Human
gcagcacaaccuugccagagcuuggguccuac

SEQ ID NO: 167731 - RNA, 32 nt, Human
gcagcacaagugcucaccggggccagagccag

SEQ ID NO: 167732 - RNA, 32 nt, Human
gcagcacacacauuuacuacacacacaguguu

SEQ ID NO: 167733 - RNA, 32 nt, Human
gcagcacacgcaaggcucacccugccacgagc

SEQ ID NO: 167734 - RNA, 20 nt, Human
gcagcacagaggagcuguga

SEQ ID NO: 167735 - RNA, 32 nt, Human
gcagcacagaugugcaggaggagaccauuucc

SEQ ID NO: 167736 - RNA, 32 nt, Human
gcagcacagcagaguucaggcagggcacagcc

SEQ ID NO: 167737 - RNA, 32 nt, Human
gcagcacagcugagugcugagaaucuggcugg

SEQ ID NO: 167738 - RNA, 32 nt, Human
gcagcacagcuuagaugcccugguuugucccu

SEQ ID NO: 167739 - RNA, 24 nt, Human
gcagcacaggaaaaguaauucaga

SEQ ID NO: 167740 - RNA, 32 nt, Human
gcagcacaggcgccccaccaccacccaguuug

SEQ ID NO: 167741 - RNA, 32 nt, Human
gcagcacaggcuagucaggaacaucggaugcc

SEQ ID NO: 167742 - RNA, 32 nt, Human
gcagcacaguacucaggcagugcaauacucag

SEQ ID NO: 167743 - RNA, 23 nt, Human
gcagcacaguauuaauauuuaga

SEQ ID NO: 167744 - RNA, 32 nt, Human
gcagcacaucacaguggaccuucugccuccuc

SEQ ID NO: 167745 - RNA, 32 nt, Human
gcagcacaucucaggacccaggcaauagacug

SEQ ID NO: 167746 - RNA, 32 nt, Human
gcagcacaucuuccuccucgcaggagggacca

SEQ ID NO: 167747 - RNA, 32 nt, Human
gcagcaccaaagguuuuugucuugggaaggca

SEQ ID NO: 167748 - RNA, 22 nt, Human
gcagcaccaccccagggcagag

SEQ ID NO: 167749 - RNA, 32 nt, Human
gcagcaccacugccugcucccuggaagguaga

SEQ ID NO: 167750 - RNA, 24 nt, Human
gcagcaccagcuuugggggcagag

SEQ ID NO: 167751 - RNA, 26 nt, Human
gcagcaccaggccaucauggugcugg

SEQ ID NO: 167752 - RNA, 21 nt, Human
gcagcaccaggugcugggcuc

SEQ ID NO: 167753 - RNA, 32 nt, Human
gcagcacccaggacacagccagcaugaacugg

SEQ ID NO: 167754 - RNA, 32 nt, Human
gcagcaccccucaguuccugugccucagccca

SEQ ID NO: 167755 - RNA, 32 nt, Human
gcagcacccuccacuucucuccuaggcaauga

SEQ ID NO: 167756 - RNA, 32 nt, Human
gcagcacccuggcaaagcagcucacacacugc

SEQ ID NO: 167757 - RNA, 32 nt, Human
gcagcacccugggccacgccgaugacuacugc

SEQ ID NO: 167758 - RNA, 32 nt, Human
gcagcacccuuccugcugaagcagccaauaga

SEQ ID NO: 167759 - RNA, 32 nt, Human
gcagcaccggcagagggaagauacggggcaaa

SEQ ID NO: 167760 - RNA, 18 nt, Human
gcagcaccggccgucaca

SEQ ID NO: 167761 - RNA, 27 nt, Human
gcagcaccggcggcagcaccagcgcga

SEQ ID NO: 167762 - RNA, 23 nt, Human
gcagcaccggguauagggcagag

SEQ ID NO: 167763 - RNA, 32 nt, Human
gcagcaccuagagagagcaucugagcugaagg

SEQ ID NO: 167764 - RNA, 32 nt, Human
gcagcaccuggaucuugccuuuauaagaacau

SEQ ID NO: 167765 - RNA, 32 nt, Human
gcagcaccugggaggccugucugaagcaugca

SEQ ID NO: 167766 - RNA, 32 nt, Human
gcagcacgcugaggcccugcaggcccugaggc

SEQ ID NO: 167767 - RNA, 32 nt, Human
gcagcacggcacuucagccuaggugacagagu

SEQ ID NO: 167768 - RNA, 32 nt, Human
gcagcacgucgccauccgucaccagaauuagu

SEQ ID NO: 167769 - RNA, 25 nt, Human
gcagcacuaagacaaaggaacaggg

SEQ ID NO: 167770 - RNA, 25 nt, Human
gcagcacuagcaacagcagagcagg

SEQ ID NO: 167771 - RNA, 16 nt, Human
gcagcacugacugcuu

SEQ ID NO: 167772 - RNA, 22 nt, Human
gcagcacugagacacgagcccc

SEQ ID NO: 167773 - RNA, 19 nt, Human
gcagcacugaguaaaguuc

SEQ ID NO: 167774 - RNA, 17 nt, Human
gcagcacugaucuggcu

SEQ ID NO: 167775 - RNA, 32 nt, Human
gcagcacugcagccacaagccauggcagucgu

SEQ ID NO: 167776 - RNA, 32 nt, Human
gcagcacugccacugccuuuggccaccugagg

SEQ ID NO: 167777 - RNA, 32 nt, Human
gcagcacugccucucuguuuggggagauguaa

SEQ ID NO: 167778 - RNA, 32 nt, Human
gcagcacugccucugcccaccugccuuuaaga

SEQ ID NO: 167779 - RNA, 19 nt, Human
gcagcacuggaagcaguuc

SEQ ID NO: 167780 - RNA, 32 nt, Human
gcagcacuggagccugguaaaugcagauaaaa

SEQ ID NO: 167781 - RNA, 32 nt, Human
gcagcacuggagcgggggauggggaagcgcgc

SEQ ID NO: 167782 - RNA, 18 nt, Human
gcagcacuggcaggagcu

SEQ ID NO: 167783 - RNA, 20 nt, Human
gcagcacuggcccagggugc

SEQ ID NO: 167784 - RNA, 17 nt, Human
gcagcacuggcgggggc

SEQ ID NO: 167785 - RNA, 20 nt, Human
gcagcacugggcucaggcuu

SEQ ID NO: 167786 - RNA, 16 nt, Human
gcagcacuggggaggc

SEQ ID NO: 167787 - RNA, 21 nt, Human
gcagcacuggguuggagagag

SEQ ID NO: 167788 - RNA, 22 nt, Human
gcagcacuggucccaagcagag

SEQ ID NO: 167789 - RNA, 32 nt, Human
gcagcacuguacuccagccugggcgauggagc

SEQ ID NO: 167790 - RNA, 20 nt, Human
gcagcacuguguccaggcuc

SEQ ID NO: 167791 - RNA, 19 nt, Human
gcagcacuuccacaagccc

SEQ ID NO: 167792 - RNA, 22 nt, Human
gcagcacuucccugccacuccu

SEQ ID NO: 167793 - RNA, 32 nt, Human
gcagcacuuuguuauguggaagacagguuuuu

SEQ ID NO: 167794 - RNA, 32 nt, Human
gcagcagaaacagauucucaguucauuuuuac

SEQ ID NO: 167795 - RNA, 32 nt, Human
gcagcagaaagccaaaaugacaggcaagcaca

SEQ ID NO: 167796 - RNA, 32 nt, Human
gcagcagaaagccagaggcaggcaguggugcc

SEQ ID NO: 167797 - RNA, 21 nt, Human
gcagcagaacgcccugcggca

SEQ ID NO: 167798 - RNA, 32 nt, Human
gcagcagaagcaggcacuuccaaaccugcgaa

SEQ ID NO: 167799 - RNA, 32 nt, Human
gcagcagaaguugcaaaaugaccuacugcaga

SEQ ID NO: 167800 - RNA, 19 nt, Human
gcagcagaaucgcuugaac

SEQ ID NO: 167801 - RNA, 32 nt, Human
gcagcagacaagcuggacuggggaagauucuu

SEQ ID NO: 167802 - RNA, 26 nt, Human
gcagcagacauccugaagaaauggua

SEQ ID NO: 167803 - RNA, 19 nt, Human
gcagcagacccggcagcgc

SEQ ID NO: 167804 - RNA, 32 nt, Human
gcagcagacucccucagccaugagaaccagcu

SEQ ID NO: 167805 - RNA, 32 nt, Human
gcagcagagaaaagcugaugggagugagagaa

SEQ ID NO: 167806 - RNA, 32 nt, Human
gcagcagagcgcgauccagucuggggccgggc

SEQ ID NO: 167807 - RNA, 32 nt, Human
gcagcagaggcagagaacgaggacaggacccu

SEQ ID NO: 167808 - RNA, 32 nt, Human
gcagcagaggcagaggcggcggcggcagcggc

SEQ ID NO: 167809 - RNA, 32 nt, Human
gcagcagaggcagccagccagcaaagaggggc

SEQ ID NO: 167810 - RNA, 32 nt, Human
gcagcagaggcagggaccacucggggucuggu

SEQ ID NO: 167811 - RNA, 32 nt, Human
gcagcagagggacauugggaaggguccaugga

SEQ ID NO: 167812 - RNA, 32 nt, Human
gcagcagagggaggugggggagagggaaauaa

SEQ ID NO: 167813 - RNA, 20 nt, Human
gcagcagagggcuuugccca

SEQ ID NO: 167814 - RNA, 20 nt, Human
gcagcagaucagagcuguga

SEQ ID NO: 167815 - RNA, 32 nt, Human
gcagcagaucagugggaugagggagacuguuc

SEQ ID NO: 167816 - RNA, 32 nt, Human
gcagcagauggacaaggcgucuccuggggugg

SEQ ID NO: 167817 - RNA, 32 nt, Human
gcagcagauggaccaugcccuugcuggguuuu

SEQ ID NO: 167818 - RNA, 32 nt, Human
gcagcagauugguggcuccagaugcugugugu

SEQ ID NO: 167819 - RNA, 32 nt, Human
gcagcagcaaacauuugcuagucagacaagug

SEQ ID NO: 167820 - RNA, 27 nt, Human
gcagcagcaaaggcaccauaagucaaa

SEQ ID NO: 167821 - RNA, 32 nt, Human
gcagcagcacagagccaccaagcagugcugca

SEQ ID NO: 167822 - RNA, 32 nt, Human
gcagcagcaccaugggcacggugcugucccug

SEQ ID NO: 167823 - RNA, 32 nt, Human
gcagcagcacccugcaagccagccuggccagc

SEQ ID NO: 167824 - RNA, 32 nt, Human
gcagcagcaccuucaaauucucagccaaagca

SEQ ID NO: 167825 - RNA, 32 nt, Human
gcagcagcagagagcagagagcagaaagcagu

SEQ ID NO: 167826 - RNA, 32 nt, Human
gcagcagcagaggcccccgcccucaccccagc

SEQ ID NO: 167827 - RNA, 32 nt, Human
gcagcagcagaggcggaggcuccagcgcgucu

SEQ ID NO: 167828 - RNA, 32 nt, Human
gcagcagcagaggcggcggcggcccccagccc

SEQ ID NO: 167829 - RNA, 32 nt, Human
gcagcagcagaguaagccuccaaaaagaagca

SEQ ID NO: 167830 - RNA, 32 nt, Human
gcagcagcagauuuuacguguaugaauccaaa

SEQ ID NO: 167831 - RNA, 32 nt, Human
gcagcagcagcagcagcagcaaccuuugauca

SEQ ID NO: 167832 - RNA, 32 nt, Human
gcagcagcagcagcagcagcacuugaauauga

SEQ ID NO: 167833 - RNA, 26 nt, Human
gcagcagcagcagcagcagcaggcgg

SEQ ID NO: 167834 - RNA, 26 nt, Human
gcagcagcagcagcagcaguuuguga

SEQ ID NO: 167835 - RNA, 21 nt, Human
gcagcagcagcagcagcgaga

SEQ ID NO: 167836 - RNA, 20 nt, Human
gcagcagcagcagcagcgga

SEQ ID NO: 167837 - RNA, 32 nt, Human
gcagcagcagcagcaggcgguggccaggccgg

SEQ ID NO: 167838 - RNA, 32 nt, Human
gcagcagcagcagcaggugccugugacauacc

SEQ ID NO: 167839 - RNA, 27 nt, Human
gcagcagcagcagccagggcagcgcgg

SEQ ID NO: 167840 - RNA, 32 nt, Human
gcagcagcagcaguacucagugauagggggcu

SEQ ID NO: 167841 - RNA, 32 nt, Human
gcagcagcagcaguuugugaucuguccuucca

SEQ ID NO: 167842 - RNA, 32 nt, Human
gcagcagcagcaucuggugcagcugaccccuc

SEQ ID NO: 167843 - RNA, 32 nt, Human
gcagcagcagccacacucccaccauccucaca

SEQ ID NO: 167844 - RNA, 32 nt, Human
gcagcagcagccacagcagcagccaggagaag

SEQ ID NO: 167845 - RNA, 32 nt, Human
gcagcagcagccgccgccgccgccgccaguaa

SEQ ID NO: 167846 - RNA, 32 nt, Human
gcagcagcagccucuucccauggauccaccac

SEQ ID NO: 167847 - RNA, 24 nt, Human
gcagcagcagcggcagcaguucgg

SEQ ID NO: 167848 - RNA, 23 nt, Human
gcagcagcagcggcggcagcagc

SEQ ID NO: 167849 - RNA, 20 nt, Human
gcagcagcagcggcggccga

SEQ ID NO: 167850 - RNA, 23 nt, Human
gcagcagcagcggcggccggggc

SEQ ID NO: 167851 - RNA, 22 nt, Human
gcagcagcaggcagggcagcgc

SEQ ID NO: 167852 - RNA, 32 nt, Human
gcagcagcauugaaagauaacaauuccauguc

SEQ ID NO: 167853 - RNA, 32 nt, Human
gcagcagcauugaaagcuaacaauuccauguc

SEQ ID NO: 167854 - RNA, 32 nt, Human
gcagcagcauugaaagcuaacaguuccauguc

SEQ ID NO: 167855 - RNA, 32 nt, Human
gcagcagccaacgcucccguggcuccaagguc

SEQ ID NO: 167856 - RNA, 18 nt, Human
gcagcagccacagccaca

SEQ ID NO: 167857 - RNA, 32 nt, Human
gcagcagccaccgccgcgucccucucuccacg

SEQ ID NO: 167858 - RNA, 32 nt, Human
gcagcagccagaaagcauaaccccuacuguag

SEQ ID NO: 167859 - RNA, 32 nt, Human
gcagcagccagccagcagccucucccaggcgg

SEQ ID NO: 167860 - RNA, 32 nt, Human
gcagcagccagccuuaaaguaguccauucuug

SEQ ID NO: 167861 - RNA, 21 nt, Human
gcagcagccgcagcggcgcga

SEQ ID NO: 167862 - RNA, 32 nt, Human
gcagcagccucagccucugccuguccagcgcc

SEQ ID NO: 167863 - RNA, 32 nt, Human
gcagcagccugaguguucucacuaggggucac

SEQ ID NO: 167864 - RNA, 22 nt, Human
gcagcagccuggggcagggacu

SEQ ID NO: 167865 - RNA, 32 nt, Human
gcagcagccuuggucuuucuccagaaggaugu

SEQ ID NO: 167866 - RNA, 32 nt, Human
gcagcagcgacagccuggacgaggccagaucg

SEQ ID NO: 167867 - RNA, 20 nt, Human
gcagcagcgaggguggugca

SEQ ID NO: 167868 - RNA, 32 nt, Human
gcagcagcgauagcagccgcagaagagccagc

SEQ ID NO: 167869 - RNA, 21 nt, Human
gcagcagcggcggcagcccga

SEQ ID NO: 167870 - RNA, 20 nt, Human
gcagcagcggcggcgcggcg

SEQ ID NO: 167871 - RNA, 20 nt, Human
gcagcagcggcggcggcagc

SEQ ID NO: 167872 - RNA, 25 nt, Human
gcagcagcggcggcggcggcagcgg

SEQ ID NO: 167873 - RNA, 25 nt, Human
gcagcagcggcggcggcggcggcgg

SEQ ID NO: 167874 - RNA, 23 nt, Human
gcagcagcggcggcggcggcugc

SEQ ID NO: 167875 - RNA, 25 nt, Human
gcagcagcggcggcggcggcugcgg

SEQ ID NO: 167876 - RNA, 23 nt, Human
gcagcagcggcggcggcgggcgg

SEQ ID NO: 167877 - RNA, 20 nt, Human
gcagcagcggcgguggcagc

SEQ ID NO: 167878 - RNA, 32 nt, Human
gcagcagcuagugccgacucccgccuagcucu

SEQ ID NO: 167879 - RNA, 19 nt, Human
gcagcagcuauagcuguga

SEQ ID NO: 167880 - RNA, 24 nt, Human
gcagcagcucaaggauggcacuca

SEQ ID NO: 167881 - RNA, 32 nt, Human
gcagcagcucacacccuaccuuccccagacuu

SEQ ID NO: 167882 - RNA, 25 nt, Human
gcagcagcuccaccagcagccccag

SEQ ID NO: 167883 - RNA, 25 nt, Human
gcagcagcuccgucagcagcaccag

SEQ ID NO: 167884 - RNA, 18 nt, Human
gcagcagcucuuugccca

SEQ ID NO: 167885 - RNA, 32 nt, Human
gcagcagcugacacuuuuucccagaagggaga

SEQ ID NO: 167886 - RNA, 32 nt, Human
gcagcagcugaggagacagguuugagcuggcu

SEQ ID NO: 167887 - RNA, 32 nt, Human
gcagcagcugccugcucuccagccucuggagg

SEQ ID NO: 167888 - RNA, 32 nt, Human
gcagcagcugcuggagagauccggagagcugg

SEQ ID NO: 167889 - RNA, 21 nt, Human
gcagcagcuguggcagcacgc

SEQ ID NO: 167890 - RNA, 32 nt, Human
gcagcagcuucugcuucuuugggcuugcaagu

SEQ ID NO: 167891 - RNA, 32 nt, Human
gcagcagcuuggggagagggauuucccugcag

SEQ ID NO: 167892 - RNA, 32 nt, Human
gcagcagcuuuuccagaauuuggcuggcaggc

SEQ ID NO: 167893 - RNA, 30 nt, Human
gcagcaggaagccauacugcccaguguccc

SEQ ID NO: 167894 - RNA, 32 nt, Human
gcagcaggaauggggcugggcccgugggccag

SEQ ID NO: 167895 - RNA, 32 nt, Human
gcagcaggacaguggagguguguggaaggcac

SEQ ID NO: 167896 - RNA, 19 nt, Human
gcagcaggacccugggcca

SEQ ID NO: 167897 - RNA, 32 nt, Human
gcagcaggacuuccuacccagaggagguucga

SEQ ID NO: 167898 - RNA, 32 nt, Human
gcagcaggagaagcaguggccagaggggagau

SEQ ID NO: 167899 - RNA, 32 nt, Human
gcagcaggagcagaggaaggcagacacccaca

SEQ ID NO: 167900 - RNA, 32 nt, Human
gcagcaggaggcacgcacccagagaaugcugg

SEQ ID NO: 167901 - RNA, 32 nt, Human
gcagcaggaggcagaaggaagccccagcuucc

SEQ ID NO: 167902 - RNA, 32 nt, Human
gcagcaggaggcagagcugugggaugaaugag

SEQ ID NO: 167903 - RNA, 32 nt, Human
gcagcaggaguggggagggaagggagccaagg

SEQ ID NO: 167904 - RNA, 32 nt, Human
gcagcaggcaaggagccugggucuaggcuaag

SEQ ID NO: 167905 - RNA, 23 nt, Human
gcagcaggcaggugaucaugcug

SEQ ID NO: 167906 - RNA, 22 nt, Human
gcagcaggccaacaccaaccug

SEQ ID NO: 167907 - RNA, 32 nt, Human
gcagcaggccaagggggaggugcgagcgugga

SEQ ID NO: 167908 - RNA, 19 nt, Human
gcagcaggcccagggccgg

SEQ ID NO: 167909 - RNA, 32 nt, Human
gcagcaggccgaggaggaagaagaggggcagu

SEQ ID NO: 167910 - RNA, 18 nt, Human
gcagcaggccuguggggc

SEQ ID NO: 167911 - RNA, 21 nt, Human
gcagcaggccuugucucugaa

SEQ ID NO: 167912 - RNA, 32 nt, Human
gcagcaggcggcgggccagggccgggcugcgc

SEQ ID NO: 167913 - RNA, 21 nt, Human
gcagcaggcucuggguggggc

SEQ ID NO: 167914 - RNA, 32 nt, Human
gcagcaggcugaagggaucauggugcaguacg

SEQ ID NO: 167915 - RNA, 32 nt, Human
gcagcaggcuugggccuggggugcagcagaga

SEQ ID NO: 167916 - RNA, 32 nt, Human
gcagcagggaauggcuuugccugacaacaccc

SEQ ID NO: 167917 - RNA, 17 nt, Human
gcagcagggaucagccu

SEQ ID NO: 167918 - RNA, 32 nt, Human
gcagcagggaucccuccuccuccaggggaucu

SEQ ID NO: 167919 - RNA, 32 nt, Human
gcagcagggauugccggcuccgggaggcgcuc

SEQ ID NO: 167920 - RNA, 32 nt, Human
gcagcagggcaggcacguggccagccacgagg

SEQ ID NO: 167921 - RNA, 32 nt, Human
gcagcagggccugcuguauuugguuuguuagu

SEQ ID NO: 167922 - RNA, 32 nt, Human
gcagcagggcucaguggaggucuggaaugacg

SEQ ID NO: 167923 - RNA, 23 nt, Human
gcagcagggggagcucccgggca

SEQ ID NO: 167924 - RNA, 32 nt, Human
gcagcagggugagggagcagcacagacaaaag

SEQ ID NO: 167925 - RNA, 21 nt, Human
gcagcaggguggcagggcaga

SEQ ID NO: 167926 - RNA, 32 nt, Human
gcagcagguacccccuccacaucccuagggcu

SEQ ID NO: 167927 - RNA, 18 nt, Human
gcagcaggugcauaguca

SEQ ID NO: 167928 - RNA, 32 nt, Human
gcagcaggugccugugacauaccucagacgcc

SEQ ID NO: 167929 - RNA, 32 nt, Human
gcagcagguggaaaacagagagguuguuagac

SEQ ID NO: 167930 - RNA, 18 nt, Human
gcagcagguggacaugca

SEQ ID NO: 167931 - RNA, 32 nt, Human
gcagcaggugucugcugaaguccuccacacuc

SEQ ID NO: 167932 - RNA, 32 nt, Human
gcagcagguucccagccccguucagcuggugg

SEQ ID NO: 167933 - RNA, 32 nt, Human
gcagcaguagcaauucuggagcuguugccggc

SEQ ID NO: 167934 - RNA, 19 nt, Human
gcagcaguagcagcagcgu

SEQ ID NO: 167935 - RNA, 17 nt, Human
gcagcaguagcggcagc

SEQ ID NO: 167936 - RNA, 32 nt, Human
gcagcagucccagauaaccaagcaagcucagc

SEQ ID NO: 167937 - RNA, 32 nt, Human
gcagcagugaccacagccuuaccaaagcagac

SEQ ID NO: 167938 - RNA, 32 nt, Human
gcagcagugcacuggccuccagccucaaucug

SEQ ID NO: 167939 - RNA, 21 nt, Human
gcagcagugcaugggcgcugg

SEQ ID NO: 167940 - RNA, 21 nt, Human
gcagcagugcccucaccuaca

SEQ ID NO: 167941 - RNA, 32 nt, Human
gcagcaguggacaguggccaggagggcgccgc

SEQ ID NO: 167942 - RNA, 32 nt, Human
gcagcaguggacaguggccaggagggcgcugc

SEQ ID NO: 167943 - RNA, 16 nt, Human
gcagcaguggcagcuu

SEQ ID NO: 167944 - RNA, 20 nt, Human
gcagcaguggcaguggcagc

SEQ ID NO: 167945 - RNA, 20 nt, Human
gcagcaguggcccucaucac

SEQ ID NO: 167946 - RNA, 22 nt, Human
gcagcaguggcugaucaucacu

SEQ ID NO: 167947 - RNA, 32 nt, Human
gcagcagugggauccacuggggagaggcugga

SEQ ID NO: 167948 - RNA, 21 nt, Human
gcagcaguuccaggagcugag

SEQ ID NO: 167949 - RNA, 19 nt, Human
gcagcaguucucaaaggcu

SEQ ID NO: 167950 - RNA, 32 nt, Human
gcagcaguugaucagacugaaaaacgguuuuu

SEQ ID NO: 167951 - RNA, 21 nt, Human
gcagcaucacugagcaggaag

SEQ ID NO: 167952 - RNA, 32 nt, Human
gcagcaucaggcacagucugucugggugcaac

SEQ ID NO: 167953 - RNA, 32 nt, Human
gcagcaucauuuccuuacaauacuguccggug

SEQ ID NO: 167954 - RNA, 20 nt, Human
gcagcauccaccagcccgcu

SEQ ID NO: 167955 - RNA, 32 nt, Human
gcagcauccacuguccuuucagcuccaaauuu

SEQ ID NO: 167956 - RNA, 32 nt, Human
gcagcauccauagcccacaagccagcgugggu

SEQ ID NO: 167957 - RNA, 32 nt, Human
gcagcauccucugaggccccggggccuguugg

SEQ ID NO: 167958 - RNA, 32 nt, Human
gcagcaucuagagagaaaagaggaagauucug

SEQ ID NO: 167959 - RNA, 32 nt, Human
gcagcaucucaucuacccuccuugacaccucc

SEQ ID NO: 167960 - RNA, 20 nt, Human
gcagcaucucccagaggcuc

SEQ ID NO: 167961 - RNA, 32 nt, Human
gcagcaucucuaccuucuccccagcucccagg

SEQ ID NO: 167962 - RNA, 23 nt, Human
gcagcaucuugucauacguguca

SEQ ID NO: 167963 - RNA, 21 nt, Human
gcagcaugaaugccaugaaug

SEQ ID NO: 167964 - RNA, 32 nt, Human
gcagcaugacagcugcuugccaugacugaugc

SEQ ID NO: 167965 - RNA, 18 nt, Human
gcagcaugacucagacug

SEQ ID NO: 167966 - RNA, 20 nt, Human
gcagcaugagaaggcuguga

SEQ ID NO: 167967 - RNA, 22 nt, Human
gcagcaugagaaggcugugaga

SEQ ID NO: 167968 - RNA, 22 nt, Human
gcagcaugagcaucaucuguga

SEQ ID NO: 167969 - RNA, 18 nt, Human
gcagcaugaggcugggcc

SEQ ID NO: 167970 - RNA, 20 nt, Human
gcagcaugagguggugcugg

SEQ ID NO: 167971 - RNA, 21 nt, Human
gcagcaugaucuauuuggcug

SEQ ID NO: 167972 - RNA, 32 nt, Human
gcagcaugaucuucaaaaugcaucauugauuu

SEQ ID NO: 167973 - RNA, 23 nt, Human
gcagcaugaugcuuuguuuaaug

SEQ ID NO: 167974 - RNA, 32 nt, Human
gcagcaugauuugcacaaagucgaccaacaaa

SEQ ID NO: 167975 - RNA, 32 nt, Human
gcagcaugcacaccccucuggcagcccuuugu

SEQ ID NO: 167976 - RNA, 22 nt, Human
gcagcaugcagaccagcugugg

SEQ ID NO: 167977 - RNA, 32 nt, Human
gcagcaugcccugacuguuccaacaccaccug

SEQ ID NO: 167978 - RNA, 32 nt, Human
gcagcaugcuacaggccagccuucaaagaaag

SEQ ID NO: 167979 - RNA, 22 nt, Human
gcagcauggacaagaaggcugg

SEQ ID NO: 167980 - RNA, 23 nt, Human
gcagcauggaccacgguugcugg

SEQ ID NO: 167981 - RNA, 23 nt, Human
gcagcauggaguagggcagggcu

SEQ ID NO: 167982 - RNA, 32 nt, Human
gcagcauggccaggcuggccagggcgugggca

SEQ ID NO: 167983 - RNA, 21 nt, Human
gcagcauggggcaguggcugg

SEQ ID NO: 167984 - RNA, 30 nt, Human
gcagcaugguucacuccagcaugggggcuc

SEQ ID NO: 167985 - RNA, 30 nt, Human
gcagcaugucuagacugggagcccugggug

SEQ ID NO: 167986 - RNA, 32 nt, Human
gcagcaugugcucgcugcugggcauagguggc

SEQ ID NO: 167987 - RNA, 20 nt, Human
gcagcauguucagcucuuga

SEQ ID NO: 167988 - RNA, 21 nt, Human
gcagcauguuccagcucuuga

SEQ ID NO: 167989 - RNA, 32 nt, Human
gcagcauuauaauuaauuuucaggguuuugag

SEQ ID NO: 167990 - RNA, 19 nt, Human
gcagcauuaucaaaggauc

SEQ ID NO: 167991 - RNA, 21 nt, Human
gcagcauuauuggcaauagcu

SEQ ID NO: 167992 - RNA, 19 nt, Human
gcagcauucacaaagacuu

SEQ ID NO: 167993 - RNA, 22 nt, Human
gcagcauucagugaaacuggcu

SEQ ID NO: 167994 - RNA, 23 nt, Human
gcagcauucuucugucaaaggcu

SEQ ID NO: 167995 - RNA, 32 nt, Human
gcagcauugcacuccagccugggugacagaac

SEQ ID NO: 167996 - RNA, 32 nt, Human
gcagcauuggccgagugcaguggcucacgccu

SEQ ID NO: 167997 - RNA, 32 nt, Human
gcagcauuuacaucugcccuaaucagaggggc

SEQ ID NO: 167998 - RNA, 32 nt, Human
gcagcauuucugagagcauucaauggaaguua

SEQ ID NO: 167999 - RNA, 21 nt, Human
gcagccaaauaccgagugcua

SEQ ID NO: 168000 - RNA, 19 nt, Human
gcagccaacaccugugugg

SEQ ID NO: 168001 - RNA, 32 nt, Human
gcagccaacauuucucugcucuccuuagaaau

SEQ ID NO: 168002 - RNA, 32 nt, Human
gcagccaacccuggcucaucucaucugccgcu

SEQ ID NO: 168003 - RNA, 32 nt, Human
gcagccaacucccagcccuguucacacaaauu

SEQ ID NO: 168004 - RNA, 21 nt, Human
gcagccaagaacagcauguca

SEQ ID NO: 168005 - RNA, 22 nt, Human
gcagccaagcgcagcugucagg

SEQ ID NO: 168006 - RNA, 32 nt, Human
gcagccaaggcccuguccuuucuugaauggug

SEQ ID NO: 168007 - RNA, 25 nt, Human
gcagccaaggggcuggggcaggaga

SEQ ID NO: 168008 - RNA, 23 nt, Human
gcagccaaugccuuuguguggua

SEQ ID NO: 168009 - RNA, 32 nt, Human
gcagccacaaauucuagguacacuggcugcug

SEQ ID NO: 168010 - RNA, 21 nt, Human
gcagccacaaccucaccacca

SEQ ID NO: 168011 - RNA, 32 nt, Human
gcagccacacagccccucccagccacaaucac

SEQ ID NO: 168012 - RNA, 32 nt, Human
gcagccacagcaguaccuccucugaguccuuu

SEQ ID NO: 168013 - RNA, 32 nt, Human
gcagccacagccgcaacgccacccgcagccac

SEQ ID NO: 168014 - RNA, 32 nt, Human
gcagccacagccgcugcagccggggcagccuc

SEQ ID NO: 168015 - RNA, 32 nt, Human
gcagccacaggcagaggacgaggacgacuggg

SEQ ID NO: 168016 - RNA, 32 nt, Human
gcagccacaugcccuggcugccaugggccaga

SEQ ID NO: 168017 - RNA, 32 nt, Human
gcagccaccagcaaacaccacugccugcagga

SEQ ID NO: 168018 - RNA, 17 nt, Human
gcagccaccagcuggcc

SEQ ID NO: 168019 - RNA, 32 nt, Human
gcagccaccagcuggccugguuggcucuggau

SEQ ID NO: 168020 - RNA, 32 nt, Human
gcagccaccaguggaccuagccuggauggccc

SEQ ID NO: 168021 - RNA, 32 nt, Human
gcagccacccagcagugaccuggauuucccug

SEQ ID NO: 168022 - RNA, 32 nt, Human
gcagccaccccacauccagccuacacagaacu

SEQ ID NO: 168023 - RNA, 32 nt, Human
gcagccaccgccgcagcccccaugcuccccgc

SEQ ID NO: 168024 - RNA, 32 nt, Human
gcagccaccgccgcgucccucucuccacgagg

SEQ ID NO: 168025 - RNA, 32 nt, Human
gcagccaccuaaaagaaaaacgaacgaaggac

SEQ ID NO: 168026 - RNA, 32 nt, Human
gcagccaccugccuccaccccgucugucaucc

SEQ ID NO: 168027 - RNA, 20 nt, Human
gcagccaccugcucccggcc

SEQ ID NO: 168028 - RNA, 19 nt, Human
gcagccaccugcugggagg

SEQ ID NO: 168029 - RNA, 32 nt, Human
gcagccaccugugucuguguucuugccacugu

SEQ ID NO: 168030 - RNA, 21 nt, Human
gcagccaccuuccucaccagc

SEQ ID NO: 168031 - RNA, 32 nt, Human
gcagccacugccuccuggguucaggugauucu

SEQ ID NO: 168032 - RNA, 32 nt, Human
gcagccacuggguggauccaggggagaugcau

SEQ ID NO: 168033 - RNA, 32 nt, Human
gcagccagaagaggugggaaaagcggaggagg

SEQ ID NO: 168034 - RNA, 32 nt, Human
gcagccagaaggcagagaaagugaagaccaag

SEQ ID NO: 168035 - RNA, 32 nt, Human
gcagccagagcccagaucggaagagccgaguc

SEQ ID NO: 168036 - RNA, 32 nt, Human
gcagccagagccuacugcugccaucugaagac

SEQ ID NO: 168037 - RNA, 32 nt, Human
gcagccagagccucaggcagagcccgguacag

SEQ ID NO: 168038 - RNA, 32 nt, Human
gcagccagagggcuggagccugcucagaggug

SEQ ID NO: 168039 - RNA, 32 nt, Human
gcagccagcacccugggcucucagggacugag

SEQ ID NO: 168040 - RNA, 17 nt, Human
gcagccagcaccuggcc

SEQ ID NO: 168041 - RNA, 32 nt, Human
gcagccagcagcccugcccugccagguggugg

SEQ ID NO: 168042 - RNA, 17 nt, Human
gcagccagcagcuggcc

SEQ ID NO: 168043 - RNA, 32 nt, Human
gcagccagcaugccuggcugugugcaguggcc

SEQ ID NO: 168044 - RNA, 32 nt, Human
gcagccagccaagaucgggccgcugcacucca

SEQ ID NO: 168045 - RNA, 32 nt, Human
gcagccagccacagguacagagcccaggaccc

SEQ ID NO: 168046 - RNA, 22 nt, Human
gcagccagccagaugccuggcc

SEQ ID NO: 168047 - RNA, 18 nt, Human
gcagccagccaucaugcc

SEQ ID NO: 168048 - RNA, 15 nt, Human
gcagccagccaugcu

SEQ ID NO: 168049 - RNA, 15 nt, Human
gcagccagcccagcc

SEQ ID NO: 168050 - RNA, 15 nt, Human
gcagccagcccaggc

SEQ ID NO: 168051 - RNA, 16 nt, Human
gcagccagcccaggcc

SEQ ID NO: 168052 - RNA, 18 nt, Human
gcagccagccccgugucc

SEQ ID NO: 168053 - RNA, 21 nt, Human
gcagccagccccuguccggcu

SEQ ID NO: 168054 - RNA, 17 nt, Human
gcagccagcccgacgcu

SEQ ID NO: 168055 - RNA, 17 nt, Human
gcagccagcccgugggc

SEQ ID NO: 168056 - RNA, 22 nt, Human
gcagccagcccucgcuguccag

SEQ ID NO: 168057 - RNA, 16 nt, Human
gcagccagcccugguu

SEQ ID NO: 168058 - RNA, 32 nt, Human
gcagccagcccuucccccuccggcucccgcac

SEQ ID NO: 168059 - RNA, 18 nt, Human
gcagccagccuccaagcu

SEQ ID NO: 168060 - RNA, 32 nt, Human
gcagccagccucccgccuucguccccuccccg

SEQ ID NO: 168061 - RNA, 18 nt, Human
gcagccagccucgugaag

SEQ ID NO: 168062 - RNA, 32 nt, Human
gcagccagccugccggcaggacuugccugccu

SEQ ID NO: 168063 - RNA, 17 nt, Human
gcagccagccugggacc

SEQ ID NO: 168064 - RNA, 16 nt, Human
gcagccagccuuuggc

SEQ ID NO: 168065 - RNA, 32 nt, Human
gcagccagcggcagcucagagcagggcacugu

SEQ ID NO: 168066 - RNA, 20 nt, Human
gcagccagcgggagcaggaa

SEQ ID NO: 168067 - RNA, 16 nt, Human
gcagccagcguccggc

SEQ ID NO: 168068 - RNA, 16 nt, Human
gcagccagcuaguggc

SEQ ID NO: 168069 - RNA, 17 nt, Human
gcagccagcucucagcc

SEQ ID NO: 168070 - RNA, 32 nt, Human
gcagccagcugcacucugcugcgggcacgggc

SEQ ID NO: 168071 - RNA, 17 nt, Human
gcagccagcugccagcc

SEQ ID NO: 168072 - RNA, 15 nt, Human
gcagccagcuguggc

SEQ ID NO: 168073 - RNA, 32 nt, Human
gcagccagcuuucaggaaaggcugagacucag

SEQ ID NO: 168074 - RNA, 19 nt, Human
gcagccagcuuugcggggc

SEQ ID NO: 168075 - RNA, 32 nt, Human
gcagccaggagaaugggucaucacccaggcuc

SEQ ID NO: 168076 - RNA, 32 nt, Human
gcagccaggagccgcuguugccucccagcccc

SEQ ID NO: 168077 - RNA, 32 nt, Human
gcagccaggagcuuccugucaguaaccauguu

SEQ ID NO: 168078 - RNA, 32 nt, Human
gcagccaggagugcucgagaacagauggggcc

SEQ ID NO: 168079 - RNA, 21 nt, Human
gcagccaggaguggcugggga

SEQ ID NO: 168080 - RNA, 18 nt, Human
gcagccaggauucuggcu

SEQ ID NO: 168081 - RNA, 32 nt, Human
gcagccaggauuugaacccugguagccuggug

SEQ ID NO: 168082 - RNA, 21 nt, Human
gcagccaggccccucaccagc

SEQ ID NO: 168083 - RNA, 19 nt, Human
gcagccaggccccuccgga

SEQ ID NO: 168084 - RNA, 32 nt, Human
gcagccaggccugggguuuugcacugagauga

SEQ ID NO: 168085 - RNA, 32 nt, Human
gcagccaggcgcgcacugcacagcucucuucu

SEQ ID NO: 168086 - RNA, 16 nt, Human
gcagccaggcuuggcc

SEQ ID NO: 168087 - RNA, 32 nt, Human
gcagccagggcuggggaacacugugaaaguua

SEQ ID NO: 168088 - RNA, 30 nt, Human
gcagccagggucacccugcuccugugagga

SEQ ID NO: 168089 - RNA, 32 nt, Human
gcagccagguaucucagguugcaauggucaga

SEQ ID NO: 168090 - RNA, 18 nt, Human
gcagccagguggaaacua

SEQ ID NO: 168091 - RNA, 19 nt, Human
gcagccagucacccuggcc

SEQ ID NO: 168092 - RNA, 32 nt, Human
gcagccagucauggggacccuccagggaaauu

SEQ ID NO: 168093 - RNA, 20 nt, Human
gcagccagugacagaggaga

SEQ ID NO: 168094 - RNA, 32 nt, Human
gcagccaguggagaggaagcagugcauggcca

SEQ ID NO: 168095 - RNA, 22 nt, Human
gcagccauaccccucaccauca

SEQ ID NO: 168096 - RNA, 32 nt, Human
gcagccauagacaacacauacaugaacgaacg

SEQ ID NO: 168097 - RNA, 32 nt, Human
gcagccaucccucgccgcugucccuuagcuga

SEQ ID NO: 168098 - RNA, 32 nt, Human
gcagccauccuuucucuuucuucucucucauu

SEQ ID NO: 168099 - RNA, 21 nt, Human
gcagccaucugagcaagggcu

SEQ ID NO: 168100 - RNA, 32 nt, Human
gcagccaucugcaaggagaggggcaaccuggg

SEQ ID NO: 168101 - RNA, 32 nt, Human
gcagccaucuuucucuugccgcgugcuggugu

SEQ ID NO: 168102 - RNA, 31 nt, Human
gcagccaugcagcccccgcccccgggcccgc

SEQ ID NO: 168103 - RNA, 31 nt, Human
gcagccaugccuggccgucugcugcggggcc

SEQ ID NO: 168104 - RNA, 32 nt, Human
gcagccauggacuggcucauggggaaguccaa

SEQ ID NO: 168105 - RNA, 32 nt, Human
gcagccauggccacugccuuccucucugauga

SEQ ID NO: 168106 - RNA, 31 nt, Human
gcagccauggcucugcggaggcugggggccg

SEQ ID NO: 168107 - RNA, 32 nt, Human
gcagccauguagaaugaaccguccagagagcc

SEQ ID NO: 168108 - RNA, 31 nt, Human
gcagccaugucgggccgcucagugccacaug

SEQ ID NO: 168109 - RNA, 32 nt, Human
gcagccauuccccggguucccuucccaggccc

SEQ ID NO: 168110 - RNA, 18 nt, Human
gcagccauucuccaggcc

SEQ ID NO: 168111 - RNA, 32 nt, Human
gcagcccaaccaggaggcccugcuccaagccc

SEQ ID NO: 168112 - RNA, 18 nt, Human
gcagcccaacuacucggg

SEQ ID NO: 168113 - RNA, 32 nt, Human
gcagcccaaggaggggagaggaaagcugccca

SEQ ID NO: 168114 - RNA, 32 nt, Human
gcagcccaaucagcccagggcaagugccacau

SEQ ID NO: 168115 - RNA, 32 nt, Human
gcagcccacagcucucuuucggaccucugaag

SEQ ID NO: 168116 - RNA, 21 nt, Human
gcagcccacccugaccgggac

SEQ ID NO: 168117 - RNA, 32 nt, Human
gcagcccaccucugagucucagcuuugcuucg

SEQ ID NO: 168118 - RNA, 32 nt, Human
gcagcccacggaaggcaagcagaagcagggug

SEQ ID NO: 168119 - RNA, 32 nt, Human
gcagcccacggaagggcucuuucacagcuggc

SEQ ID NO: 168120 - RNA, 32 nt, Human
gcagcccacuccccagccccagccccuuccau

SEQ ID NO: 168121 - RNA, 32 nt, Human
gcagcccacucccucacuuuuacuccuuccuc

SEQ ID NO: 168122 - RNA, 18 nt, Human
gcagcccacugccugggg

SEQ ID NO: 168123 - RNA, 23 nt, Human
gcagcccacuguugacccggccc

SEQ ID NO: 168124 - RNA, 32 nt, Human
gcagcccagaaacacuccccaaggcccugucu

SEQ ID NO: 168125 - RNA, 32 nt, Human
gcagcccagaggggagccgggaagggacccuc

SEQ ID NO: 168126 - RNA, 21 nt, Human
gcagcccagauccuccccugg

SEQ ID NO: 168127 - RNA, 32 nt, Human
gcagcccagcacaacccccaggaaacacaaau

SEQ ID NO: 168128 - RNA, 32 nt, Human
gcagcccagcagagggcucuaugcacggguuu

SEQ ID NO: 168129 - RNA, 32 nt, Human
gcagcccagccaagcacugucaggaauccugu

SEQ ID NO: 168130 - RNA, 22 nt, Human
gcagcccagccccggccuccca

SEQ ID NO: 168131 - RNA, 32 nt, Human
gcagcccagccucugucccucuuugccugugu

SEQ ID NO: 168132 - RNA, 32 nt, Human
gcagcccaggagaagagagauggggguucccu

SEQ ID NO: 168133 - RNA, 32 nt, Human
gcagcccaggagaugggccuaaaauguucugg

SEQ ID NO: 168134 - RNA, 32 nt, Human
gcagcccaggagccucucugaaggaccagucu

SEQ ID NO: 168135 - RNA, 32 nt, Human
gcagcccaggcccugccccuuuacagucuagg

SEQ ID NO: 168136 - RNA, 21 nt, Human
gcagcccaggcuccugggcca

SEQ ID NO: 168137 - RNA, 32 nt, Human
gcagcccagggcgaugcacaggaugccagauc

SEQ ID NO: 168138 - RNA, 32 nt, Human
gcagcccagggcgggucuguucugccaaugcc

SEQ ID NO: 168139 - RNA, 32 nt, Human
gcagcccaguccccacagucacggccaagcca

SEQ ID NO: 168140 - RNA, 32 nt, Human
gcagcccauccaccccaguggaguucccacgg

SEQ ID NO: 168141 - RNA, 32 nt, Human
gcagcccaugggggaggagauggggaagugga

SEQ ID NO: 168142 - RNA, 32 nt, Human
gcagcccauuccagcacacaggcuucugcagc

SEQ ID NO: 168143 - RNA, 32 nt, Human
gcagcccauucccagcccugaggcccacccca

SEQ ID NO: 168144 - RNA, 32 nt, Human
gcagccccaacaagaacagguaccugaacgug

SEQ ID NO: 168145 - RNA, 32 nt, Human
gcagccccaaccacagcauucccuaacaugga

SEQ ID NO: 168146 - RNA, 32 nt, Human
gcagccccaaccuucagggcucaggugauccu

SEQ ID NO: 168147 - RNA, 32 nt, Human
gcagccccaccccauccagccugggcuccccg

SEQ ID NO: 168148 - RNA, 21 nt, Human
gcagccccaccccgucccugg

SEQ ID NO: 168149 - RNA, 32 nt, Human
gcagccccaccccuccuccacccccacggcag

SEQ ID NO: 168150 - RNA, 17 nt, Human
gcagccccaccugcccc

SEQ ID NO: 168151 - RNA, 32 nt, Human
gcagccccagaacugggaccaccggggguggu

SEQ ID NO: 168152 - RNA, 32 nt, Human
gcagccccagcccagcccgccgggagcaagga

SEQ ID NO: 168153 - RNA, 32 nt, Human
gcagccccaggcauagcaucccuucuccuggg

SEQ ID NO: 168154 - RNA, 32 nt, Human
gcagccccaggccaaaggggaccuggaaggga

SEQ ID NO: 168155 - RNA, 32 nt, Human
gcagccccaggugggagcugggagggucccca

SEQ ID NO: 168156 - RNA, 32 nt, Human
gcagccccagucaggggccuauagauaaaacu

SEQ ID NO: 168157 - RNA, 32 nt, Human
gcagccccaucucaguguggcuuuguuuuugc

SEQ ID NO: 168158 - RNA, 32 nt, Human
gcagccccaucuuacccgucugguuuuugagu

SEQ ID NO: 168159 - RNA, 32 nt, Human
gcagccccaucuuuguccggccuccgcgcuuu

SEQ ID NO: 168160 - RNA, 32 nt, Human
gcagcccccacccacucuguucucguagccuc

SEQ ID NO: 168161 - RNA, 32 nt, Human
gcagcccccacccucccacucagggugggauu

SEQ ID NO: 168162 - RNA, 18 nt, Human
gcagcccccaccuacccc

SEQ ID NO: 168163 - RNA, 20 nt, Human
gcagcccccagcccuccccu

SEQ ID NO: 168164 - RNA, 23 nt, Human
gcagcccccagcucccaccuccc

SEQ ID NO: 168165 - RNA, 18 nt, Human
gcagccccccagcuucca

SEQ ID NO: 168166 - RNA, 20 nt, Human
gcagccccccagcuuccaag

SEQ ID NO: 168167 - RNA, 23 nt, Human
gcagccccccagcuuccaaggcc

SEQ ID NO: 168168 - RNA, 18 nt, Human
gcagccccccugggcuca

SEQ ID NO: 168169 - RNA, 17 nt, Human
gcagcccccgccgcccc

SEQ ID NO: 168170 - RNA, 32 nt, Human
gcagcccccgcgcuggugcagccacccucgcu

SEQ ID NO: 168171 - RNA, 32 nt, Human
gcagcccccggcauugaccuccuggguguccc

SEQ ID NO: 168172 - RNA, 32 nt, Human
gcagcccccucggggacgcccccaccagcuca

SEQ ID NO: 168173 - RNA, 32 nt, Human
gcagcccccuuccccuggguguguucugggga

SEQ ID NO: 168174 - RNA, 22 nt, Human
gcagcccccuuccuccaucccu

SEQ ID NO: 168175 - RNA, 23 nt, Human
gcagccccggccgcgcccagccc

SEQ ID NO: 168176 - RNA, 20 nt, Human
gcagccccggcggccagcag

SEQ ID NO: 168177 - RNA, 32 nt, Human
gcagccccggcugcacucuagccgccugggug

SEQ ID NO: 168178 - RNA, 23 nt, Human
gcagccccgggacacccuacccc

SEQ ID NO: 168179 - RNA, 32 nt, Human
gcagccccgggcagcaucucccagaggcuccg

SEQ ID NO: 168180 - RNA, 22 nt, Human
gcagccccuccacaggcgcccc

SEQ ID NO: 168181 - RNA, 32 nt, Human
gcagccccuccaccauggcagggagcuggccu

SEQ ID NO: 168182 - RNA, 32 nt, Human
gcagccccucccagccucucccgcuaggagag

SEQ ID NO: 168183 - RNA, 22 nt, Human
gcagccccuccccaccaucccu

SEQ ID NO: 168184 - RNA, 32 nt, Human
gcagccccuccuucgcuccuuccagagcucag

SEQ ID NO: 168185 - RNA, 21 nt, Human
gcagccccucgcggcagcccc

SEQ ID NO: 168186 - RNA, 21 nt, Human
gcagccccugcauuccugcca

SEQ ID NO: 168187 - RNA, 19 nt, Human
gcagccccugcccacaccc

SEQ ID NO: 168188 - RNA, 18 nt, Human
gcagccccugcccacucc

SEQ ID NO: 168189 - RNA, 19 nt, Human
gcagccccugcccccaccc

SEQ ID NO: 168190 - RNA, 20 nt, Human
gcagccccugccccccgggg

SEQ ID NO: 168191 - RNA, 32 nt, Human
gcagccccugcucaucuuccuggaggaaccuc

SEQ ID NO: 168192 - RNA, 32 nt, Human
gcagccccugcucccuccuggagacccuuguc

SEQ ID NO: 168193 - RNA, 32 nt, Human
gcagccccuuuccuugaagugggcuuggcagg

SEQ ID NO: 168194 - RNA, 17 nt, Human
gcagcccgaccccggcc

SEQ ID NO: 168195 - RNA, 32 nt, Human
gcagcccgagcggcggggugaccauggaggaa

SEQ ID NO: 168196 - RNA, 19 nt, Human
gcagcccgccgcacugggg

SEQ ID NO: 168197 - RNA, 25 nt, Human
gcagcccgccgcugcccgcaccugc

SEQ ID NO: 168198 - RNA, 32 nt, Human
gcagcccgccuuccucugccuccugagcgcgg

SEQ ID NO: 168199 - RNA, 32 nt, Human
gcagcccggcagcagcccccagaggaacugcu

SEQ ID NO: 168200 - RNA, 32 nt, Human
gcagcccggcuccuccccuccuccgccccuuc

SEQ ID NO: 168201 - RNA, 21 nt, Human
gcagcccggcuggcccaggcc

SEQ ID NO: 168202 - RNA, 32 nt, Human
gcagcccggggacagaggccagcugggaucug

SEQ ID NO: 168203 - RNA, 23 nt, Human
gcagcccgggugcacgcccugca

SEQ ID NO: 168204 - RNA, 19 nt, Human
gcagcccggugccguggcc

SEQ ID NO: 168205 - RNA, 32 nt, Human
gcagcccgguuccuaacagaccacagacccca

SEQ ID NO: 168206 - RNA, 24 nt, Human
gcagcccguccuggacauccugca

SEQ ID NO: 168207 - RNA, 32 nt, Human
gcagcccgugaauucaagaccagccuggccaa

SEQ ID NO: 168208 - RNA, 32 nt, Human
gcagcccuagcccuaggccuuagucagguauc

SEQ ID NO: 168209 - RNA, 32 nt, Human
gcagcccucacacccaugcucccuccuuuagg

SEQ ID NO: 168210 - RNA, 32 nt, Human
gcagcccuccacagcguacuacccagcaggca

SEQ ID NO: 168211 - RNA, 32 nt, Human
gcagcccucccagcgccccauggggucgccca

SEQ ID NO: 168212 - RNA, 32 nt, Human
gcagcccuccccucccuccccuuaugaggucu

SEQ ID NO: 168213 - RNA, 32 nt, Human
gcagcccucccugaguggcucucccucccacu

SEQ ID NO: 168214 - RNA, 32 nt, Human
gcagcccuccgcaucuaucagcagguugcccc

SEQ ID NO: 168215 - RNA, 32 nt, Human
gcagcccucgacaacaaauacagggucuguug

SEQ ID NO: 168216 - RNA, 32 nt, Human
gcagcccucggggcaucucagugccucacucc

SEQ ID NO: 168217 - RNA, 32 nt, Human
gcagcccucuccacccagaggucucccuauac

SEQ ID NO: 168218 - RNA, 24 nt, Human
gcagcccugacucccaccuccaca

SEQ ID NO: 168219 - RNA, 32 nt, Human
gcagcccugagcugcaacagaagacugaaugg

SEQ ID NO: 168220 - RNA, 32 nt, Human
gcagcccugaggaggaagaggaggcgagggaa

SEQ ID NO: 168221 - RNA, 32 nt, Human
gcagcccugcagacaugguuaaaacucgggcc

SEQ ID NO: 168222 - RNA, 18 nt, Human
gcagcccugcccugccag

SEQ ID NO: 168223 - RNA, 32 nt, Human
gcagcccugccugcugcucuucccccaccauu

SEQ ID NO: 168224 - RNA, 32 nt, Human
gcagcccugccuggacuccacuuggcaugaua

SEQ ID NO: 168225 - RNA, 16 nt, Human
gcagcccugccuguga

SEQ ID NO: 168226 - RNA, 32 nt, Human
gcagcccuggacagacauaagacucuuggagc

SEQ ID NO: 168227 - RNA, 32 nt, Human
gcagcccuggcuccuuuccuuuggcagguugg

SEQ ID NO: 168228 - RNA, 32 nt, Human
gcagcccugggaaagucuugggagugaggggu

SEQ ID NO: 168229 - RNA, 32 nt, Human
gcagcccugggauuccacauauccaaugccuc

SEQ ID NO: 168230 - RNA, 32 nt, Human
gcagcccugggguggcggcgggcagagaaacc

SEQ ID NO: 168231 - RNA, 32 nt, Human
gcagcccugggucuucccuuagggaggaaggg

SEQ ID NO: 168232 - RNA, 32 nt, Human
gcagcccugugguccugcccuccuggggcuca

SEQ ID NO: 168233 - RNA, 32 nt, Human
gcagcccuucccagacacagaguucucauucu

SEQ ID NO: 168234 - RNA, 16 nt, Human
gcagcccuucguggcc

SEQ ID NO: 168235 - RNA, 32 nt, Human
gcagccgagcggagcccaggagagcagagagc

SEQ ID NO: 168236 - RNA, 23 nt, Human
gcagccgagggagcugaguaggg

SEQ ID NO: 168237 - RNA, 32 nt, Human
gcagccgauggcaggagaguucagagaagcgc

SEQ ID NO: 168238 - RNA, 32 nt, Human
gcagccgcagccgccgcuacaguccgggccgg

SEQ ID NO: 168239 - RNA, 32 nt, Human
gcagccgcagccgccucgcgcccggucccgcg

SEQ ID NO: 168240 - RNA, 22 nt, Human
gcagccgcagccgggcggcggg

SEQ ID NO: 168241 - RNA, 32 nt, Human
gcagccgcaggaggaggaggaggucgucgggg

SEQ ID NO: 168242 - RNA, 32 nt, Human
gcagccgcagggaggcagggauggcaaggcgu

SEQ ID NO: 168243 - RNA, 19 nt, Human
gcagccgcauucucaugca

SEQ ID NO: 168244 - RNA, 32 nt, Human
gcagccgccacauucaacaggcagcagcgcag

SEQ ID NO: 168245 - RNA, 31 nt, Human
gcagccgccagcugggagcacuggugugaac

SEQ ID NO: 168246 - RNA, 22 nt, Human
gcagccgcccgagcccccagcc

SEQ ID NO: 168247 - RNA, 18 nt, Human
gcagccgccgccgcagcg

SEQ ID NO: 168248 - RNA, 21 nt, Human
gcagccgccgccgccaccgcc

SEQ ID NO: 168249 - RNA, 23 nt, Human
gcagccgccgccgccacugccac

SEQ ID NO: 168250 - RNA, 20 nt, Human
gcagccgccgccgccgccgc

SEQ ID NO: 168251 - RNA, 21 nt, Human
gcagccgccgccgccgccgcc

SEQ ID NO: 168252 - RNA, 32 nt, Human
gcagccgccgccgccucagucagucagucagu

SEQ ID NO: 168253 - RNA, 32 nt, Human
gcagccgcgagguggacggggcgguggggccu

SEQ ID NO: 168254 - RNA, 32 nt, Human
gcagccgcgccucggccccauggacgcccugu

SEQ ID NO: 168255 - RNA, 32 nt, Human
gcagccgcucagagacaggaauagaaauuuca

SEQ ID NO: 168256 - RNA, 32 nt, Human
gcagccgcugacagcaugcagagcaaguuagg

SEQ ID NO: 168257 - RNA, 19 nt, Human
gcagccgcugaccauagcc

SEQ ID NO: 168258 - RNA, 32 nt, Human
gcagccggaccagccuugggcaacagcgugcg

SEQ ID NO: 168259 - RNA, 32 nt, Human
gcagccggacugccugcccaccaguuacccgc

SEQ ID NO: 168260 - RNA, 26 nt, Human
gcagccggagaccccgccgagccccu

SEQ ID NO: 168261 - RNA, 32 nt, Human
gcagccggagcagcaugguccagcugaggaag

SEQ ID NO: 168262 - RNA, 32 nt, Human
gcagccggcaccugacggcgugaccgacccga

SEQ ID NO: 168263 - RNA, 24 nt, Human
gcagccggccuggggaccuggggg

SEQ ID NO: 168264 - RNA, 32 nt, Human
gcagccggcuccacagaggcccucucuccucc

SEQ ID NO: 168265 - RNA, 17 nt, Human
gcagccggcuccaugcc

SEQ ID NO: 168266 - RNA, 32 nt, Human
gcagccgggaccauuggcaaugccauggagcc

SEQ ID NO: 168267 - RNA, 32 nt, Human
gcagccgggagaggccuugccgccaccgcugu

SEQ ID NO: 168268 - RNA, 32 nt, Human
gcagccgggaggugaacagcagagagaagaau

SEQ ID NO: 168269 - RNA, 19 nt, Human
gcagccggggagcugcagg

SEQ ID NO: 168270 - RNA, 32 nt, Human
gcagccggggccugacauuugaggcccaggac

SEQ ID NO: 168271 - RNA, 32 nt, Human
gcagccgggguacccucuagauucagggaugc

SEQ ID NO: 168272 - RNA, 32 nt, Human
gcagccggucaucugcuguccucucugucagg

SEQ ID NO: 168273 - RNA, 32 nt, Human
gcagccggucccacuuguauuggacguagaag

SEQ ID NO: 168274 - RNA, 18 nt, Human
gcagccguuccccagggg

SEQ ID NO: 168275 - RNA, 32 nt, Human
gcagccguugcucagagagaagguggaggaag

SEQ ID NO: 168276 - RNA, 32 nt, Human
gcagccguugggagcccaggaggcggggcgcc

SEQ ID NO: 168277 - RNA, 32 nt, Human
gcagccuacaucuccccucagccucuccucac

SEQ ID NO: 168278 - RNA, 23 nt, Human
gcagccuacuagggaccugggga

SEQ ID NO: 168279 - RNA, 32 nt, Human
gcagccuagacagaaccugcagcucuguggaa

SEQ ID NO: 168280 - RNA, 30 nt, Human
gcagccuagauaugaagaaucugcucugaa

SEQ ID NO: 168281 - RNA, 32 nt, Human
gcagccuagauaugaagaaucugcucugaaaa

SEQ ID NO: 168282 - RNA, 32 nt, Human
gcagccuagccucaccccuccuguccggucac

SEQ ID NO: 168283 - RNA, 25 nt, Human
gcagccuagcuccucacagcugccu

SEQ ID NO: 168284 - RNA, 19 nt, Human
gcagccuauaccaaaggcu

SEQ ID NO: 168285 - RNA, 32 nt, Human
gcagccuaucaucuguuucacaucuguucuga

SEQ ID NO: 168286 - RNA, 32 nt, Human
gcagccucaaacuccugggcucaggccauccu

SEQ ID NO: 168287 - RNA, 32 nt, Human
gcagccucaaccuccugggcucaggugauucu

SEQ ID NO: 168288 - RNA, 20 nt, Human
gcagccucaaucuccugguc

SEQ ID NO: 168289 - RNA, 19 nt, Human
gcagccucaccagcuguga

SEQ ID NO: 168290 - RNA, 32 nt, Human
gcagccucaccccucuggaaguguggcugaga

SEQ ID NO: 168291 - RNA, 32 nt, Human
gcagccucagagaaaagucaccaggggcuggc

SEQ ID NO: 168292 - RNA, 32 nt, Human
gcagccucagcagcugucuugguaaaggagag

SEQ ID NO: 168293 - RNA, 32 nt, Human
gcagccucagcuucugaagugcaugaaaagag

SEQ ID NO: 168294 - RNA, 32 nt, Human
gcagccucagcuuggcaagguguggagaugac

SEQ ID NO: 168295 - RNA, 32 nt, Human
gcagccucagcuuuacaaaugccuugguaugu

SEQ ID NO: 168296 - RNA, 32 nt, Human
gcagccucaggcacgcccuugccuuguuuugg

SEQ ID NO: 168297 - RNA, 32 nt, Human
gcagccucauaagggcuggagugcuguggugc

SEQ ID NO: 168298 - RNA, 32 nt, Human
gcagccucaucauuucccaucuggaccuggua

SEQ ID NO: 168299 - RNA, 19 nt, Human
gcagccuccaaugugcuca

SEQ ID NO: 168300 - RNA, 32 nt, Human
gcagccuccaccuugcucuucuuucugagagu

SEQ ID NO: 168301 - RNA, 19 nt, Human
gcagccuccacgcggccca

SEQ ID NO: 168302 - RNA, 32 nt, Human
gcagccuccagccucgaccucccgaggcucag

SEQ ID NO: 168303 - RNA, 32 nt, Human
gcagccucccaagaagcugggauuacaggcau

SEQ ID NO: 168304 - RNA, 21 nt, Human
gcagccucccccuugagcccc

SEQ ID NO: 168305 - RNA, 32 nt, Human
gcagccucccgaguagcugggauuacaggcgc

SEQ ID NO: 168306 - RNA, 23 nt, Human
gcagccuccgccuccugggguca

SEQ ID NO: 168307 - RNA, 32 nt, Human
gcagccuccgcggccgagagugcagcgagcaa

SEQ ID NO: 168308 - RNA, 32 nt, Human
gcagccuccucccuggauccuuagaucccaga

SEQ ID NO: 168309 - RNA, 32 nt, Human
gcagccuccugggaauccagucuacccucaga

SEQ ID NO: 168310 - RNA, 32 nt, Human
gcagccucgaccucccuggcuugagugauccu

SEQ ID NO: 168311 - RNA, 19 nt, Human
gcagccucggccuagguca

SEQ ID NO: 168312 - RNA, 32 nt, Human
gcagccucgggcccuccugccugcaggaucau

SEQ ID NO: 168313 - RNA, 32 nt, Human
gcagccucuaccugacccccuggaccacagag

SEQ ID NO: 168314 - RNA, 32 nt, Human
gcagccucuacggggccagcuccugccuugca

SEQ ID NO: 168315 - RNA, 32 nt, Human
gcagccucuagucucuguuucuucuggaauag

SEQ ID NO: 168316 - RNA, 32 nt, Human
gcagccucugacugcccuuacccaugaggauc

SEQ ID NO: 168317 - RNA, 32 nt, Human
gcagccucugccuccagcccggcagcucuggg

SEQ ID NO: 168318 - RNA, 21 nt, Human
gcagccucuggcggcagcgcg

SEQ ID NO: 168319 - RNA, 32 nt, Human
gcagccucuguccccuccaccucugaggagcg

SEQ ID NO: 168320 - RNA, 32 nt, Human
gcagccucuguuuauagaagcuucugaaugua

SEQ ID NO: 168321 - RNA, 32 nt, Human
gcagccucuucgcauaggcagugauuugcgau

SEQ ID NO: 168322 - RNA, 32 nt, Human
gcagccucuucugccagcaccuugcuccccgc

SEQ ID NO: 168323 - RNA, 24 nt, Human
gcagccugaaguaacucccacaga

SEQ ID NO: 168324 - RNA, 32 nt, Human
gcagccugagauacccuuggguguucagggag

SEQ ID NO: 168325 - RNA, 32 nt, Human
gcagccugagcaacauagugagaccccauccc

SEQ ID NO: 168326 - RNA, 23 nt, Human
gcagccugagcccaggagcagag

SEQ ID NO: 168327 - RNA, 32 nt, Human
gcagccugagcuccacccuccccucuucuugc

SEQ ID NO: 168328 - RNA, 23 nt, Human
gcagccugaggagacaucucaga

SEQ ID NO: 168329 - RNA, 32 nt, Human
gcagccugagucucuugguuucugagcuggcu

SEQ ID NO: 168330 - RNA, 20 nt, Human
gcagccugagugacacagua

SEQ ID NO: 168331 - RNA, 32 nt, Human
gcagccugaugacccacccaccaaggaagaaa

SEQ ID NO: 168332 - RNA, 19 nt, Human
gcagccugauggggcaguu

SEQ ID NO: 168333 - RNA, 21 nt, Human
gcagccugcaaccaccucaga

SEQ ID NO: 168334 - RNA, 32 nt, Human
gcagccugcaaucccagcuacuugagaggcug

SEQ ID NO: 168335 - RNA, 32 nt, Human
gcagccugcaccaccacaccuggcuaaauuuu

SEQ ID NO: 168336 - RNA, 32 nt, Human
gcagccugcaccuggugggugguguccugaag

SEQ ID NO: 168337 - RNA, 32 nt, Human
gcagccugcagccugcagcccgcagcccgcag

SEQ ID NO: 168338 - RNA, 32 nt, Human
gcagccugcaucauccucccauugggcugaca

SEQ ID NO: 168339 - RNA, 32 nt, Human
gcagccugcauucugcacacagcaucugcucc

SEQ ID NO: 168340 - RNA, 32 nt, Human
gcagccugccagagcagagagccacccgcugg

SEQ ID NO: 168341 - RNA, 32 nt, Human
gcagccugcccagcugaaucuuggcuucugga

SEQ ID NO: 168342 - RNA, 32 nt, Human
gcagccugcccuggcccuggcucuggcccugg

SEQ ID NO: 168343 - RNA, 32 nt, Human
gcagccugcugugcugagcccugcugcagucc

SEQ ID NO: 168344 - RNA, 21 nt, Human
gcagccuggagcuccugggca

SEQ ID NO: 168345 - RNA, 32 nt, Human
gcagccuggcagggcacaguuucuaagggccc

SEQ ID NO: 168346 - RNA, 32 nt, Human
gcagccuggccaacaugaugaaaccccaucuc

SEQ ID NO: 168347 - RNA, 32 nt, Human
gcagccuggccaacauggugaaaccucauuuc

SEQ ID NO: 168348 - RNA, 32 nt, Human
gcagccuggccaauaugaugaaaccccaucuc

SEQ ID NO: 168349 - RNA, 32 nt, Human
gcagccuggcccugcccgccuccgccuucugg

SEQ ID NO: 168350 - RNA, 32 nt, Human
gcagccuggccuugccuucacagggcucacca

SEQ ID NO: 168351 - RNA, 32 nt, Human
gcagccugggcaaaauagugagacaccgucuu

SEQ ID NO: 168352 - RNA, 30 nt, Human
gcagccugggcaacacagugagacccuguc

SEQ ID NO: 168353 - RNA, 32 nt, Human
gcagccugggcaacagaaugagacugugucuu

SEQ ID NO: 168354 - RNA, 32 nt, Human
gcagccugggcaacauagcaagaacucauccc

SEQ ID NO: 168355 - RNA, 31 nt, Human
gcagccugggcaacauagcgagacucugucu

SEQ ID NO: 168356 - RNA, 32 nt, Human
gcagccugggcaacauggcaaaaccccaucuc

SEQ ID NO: 168357 - RNA, 32 nt, Human
gcagccugggcaacauggugaaacccgucucu

SEQ ID NO: 168358 - RNA, 32 nt, Human
gcagccugggcaacauggugaaagcccgucuc

SEQ ID NO: 168359 - RNA, 32 nt, Human
gcagccugggcaacgcagugagagaccccauc

SEQ ID NO: 168360 - RNA, 32 nt, Human
gcagccugggcaacguagagauccccaucucu

SEQ ID NO: 168361 - RNA, 32 nt, Human
gcagccugggcaacguggugaacccugucucu

SEQ ID NO: 168362 - RNA, 32 nt, Human
gcagccugggcaauacagcaagaccucaucuc

SEQ ID NO: 168363 - RNA, 32 nt, Human
gcagccugggcaauauagaaagaccucuuccc

SEQ ID NO: 168364 - RNA, 32 nt, Human
gcagccugggccaggacugcucugagauuuga

SEQ ID NO: 168365 - RNA, 32 nt, Human
gcagccugggccugggcuuggcccagggaacc

SEQ ID NO: 168366 - RNA, 32 nt, Human
gcagccugggcugcuggcagggaagaggaaga

SEQ ID NO: 168367 - RNA, 32 nt, Human
gcagccuggggcaaggggaggggccagccugg

SEQ ID NO: 168368 - RNA, 32 nt, Human
gcagccugggugacacuccagccugggugaca

SEQ ID NO: 168369 - RNA, 23 nt, Human
gcagccugggugacagaaugaga

SEQ ID NO: 168370 - RNA, 23 nt, Human
gcagccugggugacagagcaaga

SEQ ID NO: 168371 - RNA, 22 nt, Human
gcagccuggugacagagugaga

SEQ ID NO: 168372 - RNA, 32 nt, Human
gcagccuguccguggaugucucugccuuaagg

SEQ ID NO: 168373 - RNA, 32 nt, Human
gcagccugugggcucuuaagacaggggccgcu

SEQ ID NO: 168374 - RNA, 31 nt, Human
gcagccuguguggaaagacaggagugagauc

SEQ ID NO: 168375 - RNA, 32 nt, Human
gcagccugugugugugcuggcacaagcccaug

SEQ ID NO: 168376 - RNA, 24 nt, Human
gcagccuguuucagagccuccaca

SEQ ID NO: 168377 - RNA, 21 nt, Human
gcagccuucggaguaagggcu

SEQ ID NO: 168378 - RNA, 19 nt, Human
gcagccuucuccccugggg

SEQ ID NO: 168379 - RNA, 32 nt, Human
gcagccuugaccuccagggcucaaggauccuc

SEQ ID NO: 168380 - RNA, 32 nt, Human
gcagccuugcagccucuccagauguuugggga

SEQ ID NO: 168381 - RNA, 25 nt, Human
gcagccuugcccgucucccuccgca

SEQ ID NO: 168382 - RNA, 32 nt, Human
gcagccuugccuggcgaucgugcugagcagca

SEQ ID NO: 168383 - RNA, 32 nt, Human
gcagccuugcuacgugacccaggcuggagugu

SEQ ID NO: 168384 - RNA, 32 nt, Human
gcagccuuggcuuuuccucuccugggugcucu

SEQ ID NO: 168385 - RNA, 23 nt, Human
gcagccuugguguuugaucuaca

SEQ ID NO: 168386 - RNA, 32 nt, Human
gcagccuugguuuccugcugagcuccaguauu

SEQ ID NO: 168387 - RNA, 32 nt, Human
gcagccuuguguccugggauccccagccccug

SEQ ID NO: 168388 - RNA, 32 nt, Human
gcagccuuuauguucaucaccagcuagaaccu

SEQ ID NO: 168389 - RNA, 32 nt, Human
gcagccuuucaggaaagaugcagccacuccug

SEQ ID NO: 168390 - RNA, 32 nt, Human
gcagccuuuccaggccuagcguuugcugcuuu

SEQ ID NO: 168391 - RNA, 32 nt, Human
gcagccuuucccguccccuccucgacccguac

SEQ ID NO: 168392 - RNA, 32 nt, Human
gcagccuuuccuggcccagcuuuugccuguug

SEQ ID NO: 168393 - RNA, 32 nt, Human
gcagccuuuuccagagaggcugugguccauag

SEQ ID NO: 168394 - RNA, 32 nt, Human
gcagccuuuucucuccccuccugauagcauuu

SEQ ID NO: 168395 - RNA, 32 nt, Human
gcagcgacagaggcggcagcugcggcggcggc

SEQ ID NO: 168396 - RNA, 32 nt, Human
gcagcgacugugaggccacagcuccucagauu

SEQ ID NO: 168397 - RNA, 32 nt, Human
gcagcgagagcgagaccugggagccagggcag

SEQ ID NO: 168398 - RNA, 32 nt, Human
gcagcgagaguggaccuggugccuucagaagc

SEQ ID NO: 168399 - RNA, 32 nt, Human
gcagcgagcagcaccuggaucuugccuuuaua

SEQ ID NO: 168400 - RNA, 32 nt, Human
gcagcgagcagcccugcccugccagguggugg

SEQ ID NO: 168401 - RNA, 32 nt, Human
gcagcgaggaggagccacagggcugagcucgg

SEQ ID NO: 168402 - RNA, 32 nt, Human
gcagcgaggagggaccccucucucaugguugu

SEQ ID NO: 168403 - RNA, 32 nt, Human
gcagcgagggcaccuugugaucauguuguuaa

SEQ ID NO: 168404 - RNA, 32 nt, Human
gcagcgagggccacuacacuccagccugggug

SEQ ID NO: 168405 - RNA, 32 nt, Human
gcagcgaguccuugccucccggcggcucagga

SEQ ID NO: 168406 - RNA, 32 nt, Human
gcagcgaguuggcagagcagggcugcauuucc

SEQ ID NO: 168407 - RNA, 32 nt, Human
gcagcgauauggucauagcucacugcagccuc

SEQ ID NO: 168408 - RNA, 31 nt, Human
gcagcgaugccuggcggagccugcgugcugg

SEQ ID NO: 168409 - RNA, 24 nt, Human
gcagcgcaaggcccgccggcccca

SEQ ID NO: 168410 - RNA, 24 nt, Human
gcagcgcaagggcuccggcgacca

SEQ ID NO: 168411 - RNA, 18 nt, Human
gcagcgcaaucccggcgc

SEQ ID NO: 168412 - RNA, 17 nt, Human
gcagcgcaccugccacc

SEQ ID NO: 168413 - RNA, 24 nt, Human
gcagcgcacgcccaggcgaugcca

SEQ ID NO: 168414 - RNA, 32 nt, Human
gcagcgcacguguccgcucagcagguggcgau

SEQ ID NO: 168415 - RNA, 32 nt, Human
gcagcgcagaggccuggggcucaggugagucc

SEQ ID NO: 168416 - RNA, 32 nt, Human
gcagcgcagauuaaaaaucaagaaauauaaac

SEQ ID NO: 168417 - RNA, 20 nt, Human
gcagcgcaggcagagccgcc

SEQ ID NO: 168418 - RNA, 32 nt, Human
gcagcgcagggagccaggcgggcugccggcgg

SEQ ID NO: 168419 - RNA, 18 nt, Human
gcagcgcaguccagggcc

SEQ ID NO: 168420 - RNA, 23 nt, Human
gcagcgcauacaggccaauucca

SEQ ID NO: 168421 - RNA, 32 nt, Human
gcagcgccaccuggaagccgcgcggccgcuuu

SEQ ID NO: 168422 - RNA, 32 nt, Human
gcagcgccacuguccgcugucucccuccugau

SEQ ID NO: 168423 - RNA, 32 nt, Human
gcagcgcccacacaggcucuggcccauggcuu

SEQ ID NO: 168424 - RNA, 32 nt, Human
gcagcgcccagccaugugggccaggugcauuc

SEQ ID NO: 168425 - RNA, 32 nt, Human
gcagcgcccauaccuggugagucuggaauggu

SEQ ID NO: 168426 - RNA, 22 nt, Human
gcagcgccccagccugcagcag

SEQ ID NO: 168427 - RNA, 19 nt, Human
gcagcgccccgccccggcc

SEQ ID NO: 168428 - RNA, 20 nt, Human
gcagcgcccgcagcgggcca

SEQ ID NO: 168429 - RNA, 32 nt, Human
gcagcgcccguuuauuugaggcuucuaaugug

SEQ ID NO: 168430 - RNA, 32 nt, Human
gcagcgcccucggggagccggccggccugcgg

SEQ ID NO: 168431 - RNA, 32 nt, Human
gcagcgcccugagccugucccgcgcccgcggg

SEQ ID NO: 168432 - RNA, 20 nt, Human
gcagcgcccuggccgggcca

SEQ ID NO: 168433 - RNA, 32 nt, Human
gcagcgccgcagccugcaccacugcagcaugc

SEQ ID NO: 168434 - RNA, 17 nt, Human
gcagcgccgccgugguc

SEQ ID NO: 168435 - RNA, 32 nt, Human
gcagcgccgccuggcccgccggcugggcaggg

SEQ ID NO: 168436 - RNA, 17 nt, Human
gcagcgccgcgagcucc

SEQ ID NO: 168437 - RNA, 32 nt, Human
gcagcgccgcggucucuccagccucugguccc

SEQ ID NO: 168438 - RNA, 27 nt, Human
gcagcgccgugagcgccagcagcgcga

SEQ ID NO: 168439 - RNA, 24 nt, Human
gcagcgccuaugugaaguuagcua

SEQ ID NO: 168440 - RNA, 32 nt, Human
gcagcgccucuccaccaugcggacccugagca

SEQ ID NO: 168441 - RNA, 20 nt, Human
gcagcgcgagcagcagcgcg

SEQ ID NO: 168442 - RNA, 32 nt, Human
gcagcgcgcacacgcacgcacacacacauaca

SEQ ID NO: 168443 - RNA, 32 nt, Human
gcagcgcgccgcgauucaccagccuggucccu

SEQ ID NO: 168444 - RNA, 21 nt, Human
gcagcgcgccggccgcuacca

SEQ ID NO: 168445 - RNA, 21 nt, Human
gcagcgcgcggacccacgcca

SEQ ID NO: 168446 - RNA, 32 nt, Human
gcagcgcgggauuuccuuucucucucacucuc

SEQ ID NO: 168447 - RNA, 21 nt, Human
gcagcgcgggcagccggcgcc

SEQ ID NO: 168448 - RNA, 32 nt, Human
gcagcgcucagguggauccugggaagcagccu

SEQ ID NO: 168449 - RNA, 26 nt, Human
gcagcgcuccucgcggccacacgggg

SEQ ID NO: 168450 - RNA, 32 nt, Human
gcagcgcucugagcgccuuucuaucuguccgu

SEQ ID NO: 168451 - RNA, 32 nt, Human
gcagcgcugcauggcccuggcccagcuccucg

SEQ ID NO: 168452 - RNA, 32 nt, Human
gcagcgcugccuccugcccacauuccugccac

SEQ ID NO: 168453 - RNA, 22 nt, Human
gcagcgcugcggacggugcugg

SEQ ID NO: 168454 - RNA, 32 nt, Human
gcagcgcuggccuucuccagggauggcccaag

SEQ ID NO: 168455 - RNA, 32 nt, Human
gcagcgcuuccucuggcagggccgaggcucgc

SEQ ID NO: 168456 - RNA, 32 nt, Human
gcagcgcuugcgggccagagugaguuccgggu

SEQ ID NO: 168457 - RNA, 32 nt, Human
gcagcggaacccagagaagcugagggggcggu

SEQ ID NO: 168458 - RNA, 23 nt, Human
gcagcggaaggggcugacugggu

SEQ ID NO: 168459 - RNA, 32 nt, Human
gcagcggacuugcuccagccugggugaggagg

SEQ ID NO: 168460 - RNA, 32 nt, Human
gcagcggagccgcggagcgggcggcggggccc

SEQ ID NO: 168461 - RNA, 32 nt, Human
gcagcggaggagaaggaggaggaggcgaaccc

SEQ ID NO: 168462 - RNA, 32 nt, Human
gcagcggaggaggaagcugagcagggcggcgg

SEQ ID NO: 168463 - RNA, 32 nt, Human
gcagcggaggaguaggaggagacggaggagga

SEQ ID NO: 168464 - RNA, 32 nt, Human
gcagcggaugcugaagcaccagagcucaaggc

SEQ ID NO: 168465 - RNA, 32 nt, Human
gcagcggauuccaggaugacggaggccuggga

SEQ ID NO: 168466 - RNA, 32 nt, Human
gcagcggcaaaggcuucucgcucacugcgcuc

SEQ ID NO: 168467 - RNA, 32 nt, Human
gcagcggcacccauuucugggcccagccacag

SEQ ID NO: 168468 - RNA, 32 nt, Human
gcagcggcaugacugcagccuugaacuccugg

SEQ ID NO: 168469 - RNA, 18 nt, Human
gcagcggccaccauggcc

SEQ ID NO: 168470 - RNA, 18 nt, Human
gcagcggcccuccccugg

SEQ ID NO: 168471 - RNA, 32 nt, Human
gcagcggccggggaagaugguggaggacggcg

SEQ ID NO: 168472 - RNA, 21 nt, Human
gcagcggccuguaacacagua

SEQ ID NO: 168473 - RNA, 32 nt, Human
gcagcggcggagugcacagagcagggaaaggc

SEQ ID NO: 168474 - RNA, 17 nt, Human
gcagcggcggccagcag

SEQ ID NO: 168475 - RNA, 32 nt, Human
gcagcggcggcccagugguggaaaaggugcca

SEQ ID NO: 168476 - RNA, 20 nt, Human
gcagcggcggggccacaggg

SEQ ID NO: 168477 - RNA, 32 nt, Human
gcagcggcgugaggcccgucccggagcgagcc

SEQ ID NO: 168478 - RNA, 22 nt, Human
gcagcggcucacgccugcaauc

SEQ ID NO: 168479 - RNA, 22 nt, Human
gcagcggcucacgccuguaauc

SEQ ID NO: 168480 - RNA, 20 nt, Human
gcagcggcucaugccuguaa

SEQ ID NO: 168481 - RNA, 22 nt, Human
gcagcggcucaugccuguaauc

SEQ ID NO: 168482 - RNA, 32 nt, Human
gcagcgggaagagacccggagagaugcaucuu

SEQ ID NO: 168483 - RNA, 32 nt, Human
gcagcgggaggcagaggaaggcggcagaagau

SEQ ID NO: 168484 - RNA, 32 nt, Human
gcagcgggccuccagccacagccugcuggcau

SEQ ID NO: 168485 - RNA, 32 nt, Human
gcagcgggccugcucccagcucugccuccugc

SEQ ID NO: 168486 - RNA, 32 nt, Human
gcagcgggcggcggaggcagcgugcggcgguc

SEQ ID NO: 168487 - RNA, 32 nt, Human
gcagcgggcugagauuguuguccucugucacc

SEQ ID NO: 168488 - RNA, 32 nt, Human
gcagcggggcagggacagggagccgagugccc

SEQ ID NO: 168489 - RNA, 32 nt, Human
gcagcggggccaccuccacaaccaccaccaca

SEQ ID NO: 168490 - RNA, 18 nt, Human
gcagcggggccgccugca

SEQ ID NO: 168491 - RNA, 32 nt, Human
gcagcgggggcugauggaagugcagugggggc

SEQ ID NO: 168492 - RNA, 21 nt, Human
gcagcgggggcuucuguggga

SEQ ID NO: 168493 - RNA, 32 nt, Human
gcagcggguauucuccucccaccuaagucucu

SEQ ID NO: 168494 - RNA, 32 nt, Human
gcagcggugaagccccucggcucggccgagac

SEQ ID NO: 168495 - RNA, 32 nt, Human
gcagcgguggagacucucuccugugugugucc

SEQ ID NO: 168496 - RNA, 32 nt, Human
gcagcggugggagcagcagcaaguuugaaaau

SEQ ID NO: 168497 - RNA, 32 nt, Human
gcagcgguggggagggagggccuggacauggc

SEQ ID NO: 168498 - RNA, 19 nt, Human
gcagcgguguaagauucug

SEQ ID NO: 168499 - RNA, 32 nt, Human
gcagcggugugaggaccagcagagagaagaga

SEQ ID NO: 168500 - RNA, 32 nt, Human
gcagcguaaggacgaacuccuccagcaagcuc

SEQ ID NO: 168501 - RNA, 32 nt, Human
gcagcguauagcaguaacuccccagcucgguu

SEQ ID NO: 168502 - RNA, 32 nt, Human
gcagcguauguaagcaccgacacccacucaaa

SEQ ID NO: 168503 - RNA, 32 nt, Human
gcagcguccagugcccugccaguagcuccuag

SEQ ID NO: 168504 - RNA, 32 nt, Human
gcagcgucccgaggagcugggauuacaggcac

SEQ ID NO: 168505 - RNA, 20 nt, Human
gcagcgucccuuacauguca

SEQ ID NO: 168506 - RNA, 32 nt, Human
gcagcgucgcgggcugauuagguuucacccaa

SEQ ID NO: 168507 - RNA, 24 nt, Human
gcagcgucggagccgcgcagggga

SEQ ID NO: 168508 - RNA, 32 nt, Human
gcagcgucggggcuggagcgauggcggcgacc

SEQ ID NO: 168509 - RNA, 32 nt, Human
gcagcgucuuccugaacagccugaagcagaag

SEQ ID NO: 168510 - RNA, 32 nt, Human
gcagcgugaaagcagaugagcuguggacuagc

SEQ ID NO: 168511 - RNA, 32 nt, Human
gcagcgugagggugugucuucccuggauagca

SEQ ID NO: 168512 - RNA, 32 nt, Human
gcagcgugcacaucugcuguggucugaagugg

SEQ ID NO: 168513 - RNA, 32 nt, Human
gcagcguucagggauccucucagucccagagc

SEQ ID NO: 168514 - RNA, 21 nt, Human
gcagcuaacaaugucugguua

SEQ ID NO: 168515 - RNA, 18 nt, Human
gcagcuaaccacaaggca

SEQ ID NO: 168516 - RNA, 32 nt, Human
gcagcuaagaagcagugaccaggauguggauu

SEQ ID NO: 168517 - RNA, 20 nt, Human
gcagcuaagcaggucugacc

SEQ ID NO: 168518 - RNA, 32 nt, Human
gcagcuaagcagucuucucuucugccuuuaug

SEQ ID NO: 168519 - RNA, 32 nt, Human
gcagcuaagugguccuggggcauggagucuuc

SEQ ID NO: 168520 - RNA, 22 nt, Human
gcagcuaaugcuuucuugguca

SEQ ID NO: 168521 - RNA, 32 nt, Human
gcagcuacagccaggccggcugccucaucuca

SEQ ID NO: 168522 - RNA, 32 nt, Human
gcagcuaccauguucaagguaaggagacagga

SEQ ID NO: 168523 - RNA, 32 nt, Human
gcagcuacuugguagucacuguggcaugucgg

SEQ ID NO: 168524 - RNA, 32 nt, Human
gcagcuagaauuuccaggggaaaguacuggag

SEQ ID NO: 168525 - RNA, 19 nt, Human
gcagcuagacuccaggacc

SEQ ID NO: 168526 - RNA, 32 nt, Human
gcagcuagcccgugaucucugccgucaccgau

SEQ ID NO: 168527 - RNA, 32 nt, Human
gcagcuagcugcagcgacuaccgcaucaucac

SEQ ID NO: 168528 - RNA, 32 nt, Human
gcagcuagcugcaugacaguccaugacaaguu

SEQ ID NO: 168529 - RNA, 32 nt, Human
gcagcuagcuuggaaacaaugcuuacaacgug

SEQ ID NO: 168530 - RNA, 32 nt, Human
gcagcuagcuuggaaagaaugcuuacaacgug

SEQ ID NO: 168531 - RNA, 32 nt, Human
gcagcuagucuuucuucuuucuuaggcuauug

SEQ ID NO: 168532 - RNA, 32 nt, Human
gcagcuaucacaggugaauugcagugagcgcu

SEQ ID NO: 168533 - RNA, 32 nt, Human
gcagcuaugaggaugcagcagccuucuguuaa

SEQ ID NO: 168534 - RNA, 23 nt, Human
gcagcuauucaauuguuauugca

SEQ ID NO: 168535 - RNA, 24 nt, Human
gcagcuauuggcuucuucauugca

SEQ ID NO: 168536 - RNA, 32 nt, Human
gcagcuauuucagagaaggccugaccuucagc

SEQ ID NO: 168537 - RNA, 20 nt, Human
gcagcuauuuccuucugcca

SEQ ID NO: 168538 - RNA, 25 nt, Human
gcagcuauuuuguuuugcaaugaga

SEQ ID NO: 168539 - RNA, 32 nt, Human
gcagcucaagccacagaguccaggccaccuca

SEQ ID NO: 168540 - RNA, 24 nt, Human
gcagcucaaggcccugcuggaccc

SEQ ID NO: 168541 - RNA, 32 nt, Human
gcagcucaaguggccaaggcaagaugggucaa

SEQ ID NO: 168542 - RNA, 31 nt, Human
gcagcucaaugagugccuacagcagaaagcc

SEQ ID NO: 168543 - RNA, 19 nt, Human
gcagcucacaccuguaauc

SEQ ID NO: 168544 - RNA, 19 nt, Human
gcagcucacacuuguaauc

SEQ ID NO: 168545 - RNA, 32 nt, Human
gcagcucacagaauuuugaguauuccaugagc

SEQ ID NO: 168546 - RNA, 32 nt, Human
gcagcucacagauggcaagcugcgcuucgugg

SEQ ID NO: 168547 - RNA, 32 nt, Human
gcagcucacagcccugggggcagcucaggcua

SEQ ID NO: 168548 - RNA, 31 nt, Human
gcagcucacagcuguaaucccagcacuuagg

SEQ ID NO: 168549 - RNA, 32 nt, Human
gcagcucacaggcugggggugaggagucccug

SEQ ID NO: 168550 - RNA, 32 nt, Human
gcagcucacaucugaggcccugggaggucuug

SEQ ID NO: 168551 - RNA, 32 nt, Human
gcagcucacaugcucagggccaccugagacug

SEQ ID NO: 168552 - RNA, 32 nt, Human
gcagcucaccccucagcuccccuuggggccca

SEQ ID NO: 168553 - RNA, 20 nt, Human
gcagcucaccugaggucagg

SEQ ID NO: 168554 - RNA, 32 nt, Human
gcagcucacuguagcuuugaccucucaggcuc

SEQ ID NO: 168555 - RNA, 15 nt, Human
gcagcucagaggcuc

SEQ ID NO: 168556 - RNA, 32 nt, Human
gcagcucagcaacccuugcugugcucaaguuc

SEQ ID NO: 168557 - RNA, 32 nt, Human
gcagcucagcaacuauuacagcaucauugaga

SEQ ID NO: 168558 - RNA, 22 nt, Human
gcagcucagcauucucccccgg

SEQ ID NO: 168559 - RNA, 23 nt, Human
gcagcucagcccucuuccugcca

SEQ ID NO: 168560 - RNA, 32 nt, Human
gcagcucaggaggcaggugaaauggcguggca

SEQ ID NO: 168561 - RNA, 32 nt, Human
gcagcucaggcagucccuaugauggugguuau

SEQ ID NO: 168562 - RNA, 32 nt, Human
gcagcucagggcaacggcaggccaggucgugg

SEQ ID NO: 168563 - RNA, 18 nt, Human
gcagcucagucacaggca

SEQ ID NO: 168564 - RNA, 32 nt, Human
gcagcucagucacaggcagaagaaggaaacug

SEQ ID NO: 168565 - RNA, 32 nt, Human
gcagcucauccagcuggugcucaaugaugguc

SEQ ID NO: 168566 - RNA, 32 nt, Human
gcagcucaucugcagagcagggaaacauuuuu

SEQ ID NO: 168567 - RNA, 19 nt, Human
gcagcucaugccuguaauc

SEQ ID NO: 168568 - RNA, 32 nt, Human
gcagcucauggaauuuugaguauuccaugagc

SEQ ID NO: 168569 - RNA, 32 nt, Human
gcagcuccaaaacuggaccaccagagaaugga

SEQ ID NO: 168570 - RNA, 32 nt, Human
gcagcuccacaaccaccuccagccugggagau

SEQ ID NO: 168571 - RNA, 20 nt, Human
gcagcuccacucaccuccug

SEQ ID NO: 168572 - RNA, 32 nt, Human
gcagcuccagagagacagcgaccagcgagaag

SEQ ID NO: 168573 - RNA, 18 nt, Human
gcagcuccagagcccugg

SEQ ID NO: 168574 - RNA, 32 nt, Human
gcagcuccagcagcuucaccuggagggagggg

SEQ ID NO: 168575 - RNA, 32 nt, Human
gcagcuccagccgccuccuccgcgcagccgcc

SEQ ID NO: 168576 - RNA, 32 nt, Human
gcagcuccagccugggggacaggugaccccag

SEQ ID NO: 168577 - RNA, 20 nt, Human
gcagcuccaggaccucggcc

SEQ ID NO: 168578 - RNA, 18 nt, Human
gcagcucccaccuccugg

SEQ ID NO: 168579 - RNA, 32 nt, Human
gcagcucccacugugaccuggcccacggcugc

SEQ ID NO: 168580 - RNA, 32 nt, Human
gcagcucccagccuuuucaggcacggagauug

SEQ ID NO: 168581 - RNA, 19 nt, Human
gcagcucccagcgugauug

SEQ ID NO: 168582 - RNA, 32 nt, Human
gcagcucccaggaugaacugguugcaguggcu

SEQ ID NO: 168583 - RNA, 20 nt, Human
gcagcucccaggcccuuggg

SEQ ID NO: 168584 - RNA, 22 nt, Human
gcagcuccccaaggcccugccc

SEQ ID NO: 168585 - RNA, 23 nt, Human
gcagcucccgcccagcccagccc

SEQ ID NO: 168586 - RNA, 32 nt, Human
gcagcucccugcggaaggugggguaggguggg

SEQ ID NO: 168587 - RNA, 32 nt, Human
gcagcucccuguccaagugccuuggagaacuc

SEQ ID NO: 168588 - RNA, 32 nt, Human
gcagcucccuuucucaggagcuugggcagugc

SEQ ID NO: 168589 - RNA, 32 nt, Human
gcagcuccgggugacacgaggggacugaagau

SEQ ID NO: 168590 - RNA, 32 nt, Human
gcagcuccuaggugcuuuccucaggcugggua

SEQ ID NO: 168591 - RNA, 32 nt, Human
gcagcuccucaucucucuucuaauccaccacu

SEQ ID NO: 168592 - RNA, 18 nt, Human
gcagcuccuccacacaca

SEQ ID NO: 168593 - RNA, 32 nt, Human
gcagcuccuccaccuuguccagcagccucucc

SEQ ID NO: 168594 - RNA, 25 nt, Human
gcagcuccugcaacugacccagucc

SEQ ID NO: 168595 - RNA, 32 nt, Human
gcagcuccuggaguccaauggcugcuuagagu

SEQ ID NO: 168596 - RNA, 21 nt, Human
gcagcuccuguuuucuugguu

SEQ ID NO: 168597 - RNA, 32 nt, Human
gcagcuccuucucauggccccugggccuucac

SEQ ID NO: 168598 - RNA, 32 nt, Human
gcagcucgcuacgugaccaucaugcuuuuuac

SEQ ID NO: 168599 - RNA, 20 nt, Human
gcagcucgggggccacaagg

SEQ ID NO: 168600 - RNA, 32 nt, Human
gcagcucguagaggagagaaaacaagagugga

SEQ ID NO: 168601 - RNA, 21 nt, Human
gcagcucgucgaguuuccugg

SEQ ID NO: 168602 - RNA, 19 nt, Human
gcagcucuauauccugcug

SEQ ID NO: 168603 - RNA, 32 nt, Human
gcagcucucaugccaagaccugcgccuaacgg

SEQ ID NO: 168604 - RNA, 32 nt, Human
gcagcucucccaauguuucuccucuccuuccc

SEQ ID NO: 168605 - RNA, 32 nt, Human
gcagcucucccagagaagauccaagggagagg

SEQ ID NO: 168606 - RNA, 32 nt, Human
gcagcucuccccucagagugcaagccccugcu

SEQ ID NO: 168607 - RNA, 32 nt, Human
gcagcucuccccuuagcugacucuggugcucu

SEQ ID NO: 168608 - RNA, 32 nt, Human
gcagcucucuaaauugacucagcuccaggcua

SEQ ID NO: 168609 - RNA, 32 nt, Human
gcagcucucugccucucugcccuuuggucuau

SEQ ID NO: 168610 - RNA, 32 nt, Human
gcagcucucugccugcucaccacagccuggag

SEQ ID NO: 168611 - RNA, 23 nt, Human
gcagcucucugggucccccggug

SEQ ID NO: 168612 - RNA, 32 nt, Human
gcagcucugacuggaaugcacacaacuuccca

SEQ ID NO: 168613 - RNA, 21 nt, Human
gcagcucugcaccaggagcag

SEQ ID NO: 168614 - RNA, 32 nt, Human
gcagcucugccugguuggccugcagugccgug

SEQ ID NO: 168615 - RNA, 32 nt, Human
gcagcucugcuccccuagcaacgcucgccaca

SEQ ID NO: 168616 - RNA, 32 nt, Human
gcagcucuggaaggcagccuuggggcuggccc

SEQ ID NO: 168617 - RNA, 32 nt, Human
gcagcucuggaaggcagugcucagccccauca

SEQ ID NO: 168618 - RNA, 21 nt, Human
gcagcucuggacaccauggcc

SEQ ID NO: 168619 - RNA, 32 nt, Human
gcagcucuggagggagccgcugccucagcagu

SEQ ID NO: 168620 - RNA, 32 nt, Human
gcagcucuggagguacgaaaagaggggaagag

SEQ ID NO: 168621 - RNA, 32 nt, Human
gcagcucuggcuccuugucucccaggcugauc

SEQ ID NO: 168622 - RNA, 32 nt, Human
gcagcucugggagagaaaggaggccagccugc

SEQ ID NO: 168623 - RNA, 32 nt, Human
gcagcucuguuagcucguacauguggguucuu

SEQ ID NO: 168624 - RNA, 32 nt, Human
gcagcucuguugugcccugccugaagcuuauc

SEQ ID NO: 168625 - RNA, 32 nt, Human
gcagcucuucaucagccugcugucuacucaga

SEQ ID NO: 168626 - RNA, 32 nt, Human
gcagcucuuccugccacugaaugcguucugca

SEQ ID NO: 168627 - RNA, 32 nt, Human
gcagcucuucucggacuccccugggccaauga

SEQ ID NO: 168628 - RNA, 32 nt, Human
gcagcucuugcccagagcugugcagugcagug

SEQ ID NO: 168629 - RNA, 32 nt, Human
gcagcucuuugcccaucucuuuggacaguggc

SEQ ID NO: 168630 - RNA, 32 nt, Human
gcagcugaagaaacaaacuggucuccaggcug

SEQ ID NO: 168631 - RNA, 32 nt, Human
gcagcugacugaaaaucagcacugccugagua

SEQ ID NO: 168632 - RNA, 32 nt, Human
gcagcugacugaggagacuuggggucuuccug

SEQ ID NO: 168633 - RNA, 23 nt, Human
gcagcugagagcaggagcaggaa

SEQ ID NO: 168634 - RNA, 32 nt, Human
gcagcugagcagcuacggcagaaggaucugag

SEQ ID NO: 168635 - RNA, 32 nt, Human
gcagcugagccgggucccuuaggggaggugac

SEQ ID NO: 168636 - RNA, 32 nt, Human
gcagcugaggaggaggcaggagagagggaaaa

SEQ ID NO: 168637 - RNA, 32 nt, Human
gcagcugaggagggagugaaccucaagccuaa

SEQ ID NO: 168638 - RNA, 32 nt, Human
gcagcugaggcgaguggaucaccugaggucag

SEQ ID NO: 168639 - RNA, 24 nt, Human
gcagcugagggagcugagcuggga

SEQ ID NO: 168640 - RNA, 32 nt, Human
gcagcugagugagagacacagagagaaggaga

SEQ ID NO: 168641 - RNA, 22 nt, Human
gcagcugaucagaccucaauaa

SEQ ID NO: 168642 - RNA, 32 nt, Human
gcagcugaucauagcucacugcagcuucaaac

SEQ ID NO: 168643 - RNA, 32 nt, Human
gcagcugaugggauaagguggggaaggacggu

SEQ ID NO: 168644 - RNA, 32 nt, Human
gcagcugauugacaccguccugccuuccuuau

SEQ ID NO: 168645 - RNA, 32 nt, Human
gcagcugcaacaacugcugcaagcaggaucgg

SEQ ID NO: 168646 - RNA, 23 nt, Human
gcagcugcacagccucugcuaca

SEQ ID NO: 168647 - RNA, 32 nt, Human
gcagcugcaccacuuuguguuacucucugaug

SEQ ID NO: 168648 - RNA, 32 nt, Human
gcagcugcacuccccucccaggaaaggggcag

SEQ ID NO: 168649 - RNA, 24 nt, Human
gcagcugcagaccgccccucacca

SEQ ID NO: 168650 - RNA, 19 nt, Human
gcagcugcagauccacuua

SEQ ID NO: 168651 - RNA, 22 nt, Human
gcagcugcagccgagcgggaag

SEQ ID NO: 168652 - RNA, 32 nt, Human
gcagcugcagccgccgccgcgcagauccacgc

SEQ ID NO: 168653 - RNA, 32 nt, Human
gcagcugcagcuccggcgcgagggcucccuug

SEQ ID NO: 168654 - RNA, 22 nt, Human
gcagcugcagguacccccagca

SEQ ID NO: 168655 - RNA, 20 nt, Human
gcagcugcaggucccaggag

SEQ ID NO: 168656 - RNA, 21 nt, Human
gcagcugcauggcuuuggccu

SEQ ID NO: 168657 - RNA, 32 nt, Human
gcagcugccaccgcagcugccuccucaggauc

SEQ ID NO: 168658 - RNA, 32 nt, Human
gcagcugccagcuuauagauggggcggauggc

SEQ ID NO: 168659 - RNA, 21 nt, Human
gcagcugccaucggcccgcuu

SEQ ID NO: 168660 - RNA, 32 nt, Human
gcagcugccaugaugccuugggaugcccuggu

SEQ ID NO: 168661 - RNA, 32 nt, Human
gcagcugcccagaacccugcugaugagccugc

SEQ ID NO: 168662 - RNA, 20 nt, Human
gcagcugcccagcugucaag

SEQ ID NO: 168663 - RNA, 18 nt, Human
gcagcugccccaccccaa

SEQ ID NO: 168664 - RNA, 32 nt, Human
gcagcugccccagggacaugggaagaccacgg

SEQ ID NO: 168665 - RNA, 26 nt, Human
gcagcugccccuccuggagcagaaag

SEQ ID NO: 168666 - RNA, 21 nt, Human
gcagcugccgccucgccgcgg

SEQ ID NO: 168667 - RNA, 31 nt, Human
gcagcugccguacuccaggcuugugucggcc

SEQ ID NO: 168668 - RNA, 20 nt, Human
gcagcugccucagucggcua

SEQ ID NO: 168669 - RNA, 22 nt, Human
gcagcugccuggcagccggcca

SEQ ID NO: 168670 - RNA, 32 nt, Human
gcagcugccugggaaggccguguuucagcccu

SEQ ID NO: 168671 - RNA, 32 nt, Human
gcagcugccugggacucaauuugccccaucca

SEQ ID NO: 168672 - RNA, 20 nt, Human
gcagcugcgagacuccucca

SEQ ID NO: 168673 - RNA, 28 nt, Human
gcagcugcgccuaggcuggagcuggaag

SEQ ID NO: 168674 - RNA, 18 nt, Human
gcagcugcgccucagggg

SEQ ID NO: 168675 - RNA, 32 nt, Human
gcagcugcgcggagaacuggggcucaccguca

SEQ ID NO: 168676 - RNA, 21 nt, Human
gcagcugcggcggcggcagcg

SEQ ID NO: 168677 - RNA, 32 nt, Human
gcagcugcguuccucuggaggaggagaggcgc

SEQ ID NO: 168678 - RNA, 32 nt, Human
gcagcugcuauagauagcacugccuucuuguu

SEQ ID NO: 168679 - RNA, 32 nt, Human
gcagcugcuaucugcagcuccuaggugcuuuc

SEQ ID NO: 168680 - RNA, 16 nt, Human
gcagcugcucaaaggc

SEQ ID NO: 168681 - RNA, 22 nt, Human
gcagcugcucaccugagcucag

SEQ ID NO: 168682 - RNA, 21 nt, Human
gcagcugcucugcucaccagc

SEQ ID NO: 168683 - RNA, 23 nt, Human
gcagcugcugaaaaaucuaauga

SEQ ID NO: 168684 - RNA, 32 nt, Human
gcagcugcugaacuccagccaucaacacggug

SEQ ID NO: 168685 - RNA, 32 nt, Human
gcagcugcugaaucugucuguucaguuuguca

SEQ ID NO: 168686 - RNA, 32 nt, Human
gcagcugcugccacucugcugccuguacagaa

SEQ ID NO: 168687 - RNA, 21 nt, Human
gcagcugcugccucacccaca

SEQ ID NO: 168688 - RNA, 32 nt, Human
gcagcugcuggcacaaauagccugcuucuauu

SEQ ID NO: 168689 - RNA, 32 nt, Human
gcagcugcugggacucagggacuggugcaggu

SEQ ID NO: 168690 - RNA, 32 nt, Human
gcagcugcugggaguugaggguaggguggugu

SEQ ID NO: 168691 - RNA, 32 nt, Human
gcagcugcugugccaggcucugcugaauagaa

SEQ ID NO: 168692 - RNA, 32 nt, Human
gcagcugcuguggaggcuggguggccacacag

SEQ ID NO: 168693 - RNA, 32 nt, Human
gcagcugcuguugccaccaccacuaguucaag

SEQ ID NO: 168694 - RNA, 32 nt, Human
gcagcugcuucaccccucucucugcagccaug

SEQ ID NO: 168695 - RNA, 21 nt, Human
gcagcuggaaggcacaagggg

SEQ ID NO: 168696 - RNA, 22 nt, Human
gcagcuggaaggcacaagggga

SEQ ID NO: 168697 - RNA, 32 nt, Human
gcagcuggaauguuaaccuuagaaaguuucca

SEQ ID NO: 168698 - RNA, 22 nt, Human
gcagcuggaccagucuggcggg

SEQ ID NO: 168699 - RNA, 32 nt, Human
gcagcuggacccaagcccagcuccccuugggu

SEQ ID NO: 168700 - RNA, 25 nt, Human
gcagcuggacuuccuggagcagaag

SEQ ID NO: 168701 - RNA, 32 nt, Human
gcagcuggagaaugaagagcagcucagaggaa

SEQ ID NO: 168702 - RNA, 32 nt, Human
gcagcuggagagaagagaaggcagcagcagag

SEQ ID NO: 168703 - RNA, 32 nt, Human
gcagcuggagagaaguuaggcagguccuaggg

SEQ ID NO: 168704 - RNA, 18 nt, Human
gcagcuggagaggagcgu

SEQ ID NO: 168705 - RNA, 32 nt, Human
gcagcuggagccaaaaaggcaagguagaaaga

SEQ ID NO: 168706 - RNA, 32 nt, Human
gcagcuggagccacugcacacucagaacaccc

SEQ ID NO: 168707 - RNA, 22 nt, Human
gcagcuggaggagcugggacgg

SEQ ID NO: 168708 - RNA, 21 nt, Human
gcagcuggaggaggagcaggg

SEQ ID NO: 168709 - RNA, 23 nt, Human
gcagcuggaggaggagcagggag

SEQ ID NO: 168710 - RNA, 24 nt, Human
gcagcuggaggaggaggaggagga

SEQ ID NO: 168711 - RNA, 32 nt, Human
gcagcuggagggaaggaagcgauggcggagga

SEQ ID NO: 168712 - RNA, 32 nt, Human
gcagcuggagugagaggcagguggcggccggg

SEQ ID NO: 168713 - RNA, 20 nt, Human
gcagcuggauguggcagagg

SEQ ID NO: 168714 - RNA, 23 nt, Human
gcagcuggauuuggagcuggugg

SEQ ID NO: 168715 - RNA, 32 nt, Human
gcagcuggccccuucccugccugcugucacca

SEQ ID NO: 168716 - RNA, 19 nt, Human
gcagcuggccuccauggcc

SEQ ID NO: 168717 - RNA, 24 nt, Human
gcagcuggcggagcggcccagccc

SEQ ID NO: 168718 - RNA, 32 nt, Human
gcagcuggcucuguuuccaagccuggggaggg

SEQ ID NO: 168719 - RNA, 21 nt, Human
gcagcuggcuggaccagaaag

SEQ ID NO: 168720 - RNA, 32 nt, Human
gcagcuggcuuccuggggugaagaggcaggca

SEQ ID NO: 168721 - RNA, 32 nt, Human
gcagcugggaggacccucccgccccaggcaga

SEQ ID NO: 168722 - RNA, 32 nt, Human
gcagcugggaggagguggugacgguggcaacg

SEQ ID NO: 168723 - RNA, 32 nt, Human
gcagcugggauuacaggcgcuggccacacacc

SEQ ID NO: 168724 - RNA, 32 nt, Human
gcagcugggauuacagguaugcgccaccaugc

SEQ ID NO: 168725 - RNA, 32 nt, Human
gcagcugggauuacaggugcccgccaccacgc

SEQ ID NO: 168726 - RNA, 32 nt, Human
gcagcugggauuacaggugcgugccaccacac

SEQ ID NO: 168727 - RNA, 32 nt, Human
gcagcugggauuugaaccaggccuucugauuu

SEQ ID NO: 168728 - RNA, 32 nt, Human
gcagcugggcagcagggguagggguagggagc

SEQ ID NO: 168729 - RNA, 32 nt, Human
gcagcugggcaggucuccucugggaggucuug

SEQ ID NO: 168730 - RNA, 27 nt, Human
gcagcugggccgggccaaggcaggaag

SEQ ID NO: 168731 - RNA, 32 nt, Human
gcagcuggggcagaggagcuggggucaggggc

SEQ ID NO: 168732 - RNA, 32 nt, Human
gcagcuggggccugaggaggagggguucacuu

SEQ ID NO: 168733 - RNA, 32 nt, Human
gcagcuggggcugaggaugucucaagaggcca

SEQ ID NO: 168734 - RNA, 23 nt, Human
gcagcugggggagaaccauggga

SEQ ID NO: 168735 - RNA, 22 nt, Human
gcagcugggggaggguucaggg

SEQ ID NO: 168736 - RNA, 32 nt, Human
gcagcugggggcucuuuuccuggucauugggu

SEQ ID NO: 168737 - RNA, 23 nt, Human
gcagcugggguucugaacggaga

SEQ ID NO: 168738 - RNA, 32 nt, Human
gcagcuggguuggcuucugagaacaggacuua

SEQ ID NO: 168739 - RNA, 32 nt, Human
gcagcugguucucaaugugccagcagggacuc

SEQ ID NO: 168740 - RNA, 32 nt, Human
gcagcugguuggacgaggggagcuggugggca

SEQ ID NO: 168741 - RNA, 32 nt, Human
gcagcuguaccaggcuggcaggucacugagag

SEQ ID NO: 168742 - RNA, 32 nt, Human
gcagcuguacuaggacugggaacggagcugaa

SEQ ID NO: 168743 - RNA, 32 nt, Human
gcagcugucacucacugagcacuggccauagc

SEQ ID NO: 168744 - RNA, 22 nt, Human
gcagcugucaggccugaggaag

SEQ ID NO: 168745 - RNA, 32 nt, Human
gcagcugucauccuccugggaagccgagcagu

SEQ ID NO: 168746 - RNA, 32 nt, Human
gcagcugucaucucgcugguguccgcagcgag

SEQ ID NO: 168747 - RNA, 32 nt, Human
gcagcuguccagccaacugucucuccacccuu

SEQ ID NO: 168748 - RNA, 32 nt, Human
gcagcuguccccaucaggccaagagcgagcga

SEQ ID NO: 168749 - RNA, 16 nt, Human
gcagcuguccguggcc

SEQ ID NO: 168750 - RNA, 32 nt, Human
gcagcuguccuaguucucuccaacaagaaguu

SEQ ID NO: 168751 - RNA, 21 nt, Human
gcagcuguccuguguguggua

SEQ ID NO: 168752 - RNA, 32 nt, Human
gcagcugucgcugaagccacgucaaucugagc

SEQ ID NO: 168753 - RNA, 32 nt, Human
gcagcugucugggagucaaggcugcaguagcg

SEQ ID NO: 168754 - RNA, 32 nt, Human
gcagcugugaugguaccugggagggagggaag

SEQ ID NO: 168755 - RNA, 32 nt, Human
gcagcugugaugguuucagagcucagacugau

SEQ ID NO: 168756 - RNA, 18 nt, Human
gcagcugugcccgggcgg

SEQ ID NO: 168757 - RNA, 18 nt, Human
gcagcugugccuggaggc

SEQ ID NO: 168758 - RNA, 32 nt, Human
gcagcugugcuccugcucccuccuggaaugug

SEQ ID NO: 168759 - RNA, 20 nt, Human
gcagcugugcugagcugagg

SEQ ID NO: 168760 - RNA, 20 nt, Human
gcagcugugcuggcucccgg

SEQ ID NO: 168761 - RNA, 32 nt, Human
gcagcuguggacccaggaaucucuguacucuu

SEQ ID NO: 168762 - RNA, 20 nt, Human
gcagcugugggggccggugg

SEQ ID NO: 168763 - RNA, 32 nt, Human
gcagcugugucgcaucagcugcauggguggca

SEQ ID NO: 168764 - RNA, 24 nt, Human
gcagcuguuuuggggucugugaga

SEQ ID NO: 168765 - RNA, 32 nt, Human
gcagcuuaauuuuucuguauugcaguguuuau

SEQ ID NO: 168766 - RNA, 32 nt, Human
gcagcuucaacuuuucucuuuaguguucuguu

SEQ ID NO: 168767 - RNA, 32 nt, Human
gcagcuucauagacaccccucccugucccugg

SEQ ID NO: 168768 - RNA, 32 nt, Human
gcagcuucaucauugucaugugaggauguguc

SEQ ID NO: 168769 - RNA, 32 nt, Human
gcagcuucauuucuaaggacaggaagccaaau

SEQ ID NO: 168770 - RNA, 32 nt, Human
gcagcuuccauggccuggggcugugagaggcc

SEQ ID NO: 168771 - RNA, 32 nt, Human
gcagcuuccaugguuggaaugcugagccauug

SEQ ID NO: 168772 - RNA, 32 nt, Human
gcagcuucgccuccacccuccguccagcgccc

SEQ ID NO: 168773 - RNA, 18 nt, Human
gcagcuucucugcuccuu

SEQ ID NO: 168774 - RNA, 32 nt, Human
gcagcuucugugguucagcuugugacaugaua

SEQ ID NO: 168775 - RNA, 32 nt, Human
gcagcuucuucacagagacugguuacaaccag

SEQ ID NO: 168776 - RNA, 32 nt, Human
gcagcuugaaacugagaugugaacacaucagc

SEQ ID NO: 168777 - RNA, 17 nt, Human
gcagcuugacccuggaa

SEQ ID NO: 168778 - RNA, 31 nt, Human
gcagcuugagcuacaaucaggagggaaauug

SEQ ID NO: 168779 - RNA, 32 nt, Human
gcagcuugcacacccaucaucuuuaaccccaa

SEQ ID NO: 168780 - RNA, 32 nt, Human
gcagcuugccacuccugggcuggguaaacagg

SEQ ID NO: 168781 - RNA, 32 nt, Human
gcagcuugcccagcucuugaguacaguggugg

SEQ ID NO: 168782 - RNA, 32 nt, Human
gcagcuugcccgaggcugcggcuaagacuggg

SEQ ID NO: 168783 - RNA, 19 nt, Human
gcagcuugcccucaaaggc

SEQ ID NO: 168784 - RNA, 32 nt, Human
gcagcuugcugaaugucagcugccugagagag

SEQ ID NO: 168785 - RNA, 32 nt, Human
gcagcuuggccccuccagccagucccauucgg

SEQ ID NO: 168786 - RNA, 32 nt, Human
gcagcuugggaggccaaggugggugaauugcu

SEQ ID NO: 168787 - RNA, 32 nt, Human
gcagcuugggaggcggcucuccccaggcggcg

SEQ ID NO: 168788 - RNA, 32 nt, Human
gcagcuugguucuccccucuggccccuggaga

SEQ ID NO: 168789 - RNA, 32 nt, Human
gcagcuuguacuauuaaaauaauagagaaugu

SEQ ID NO: 168790 - RNA, 32 nt, Human
gcagcuuuaagcucugcuucucucuuccucau

SEQ ID NO: 168791 - RNA, 32 nt, Human
gcagcuuuccagcaaagccaaaguugacugug

SEQ ID NO: 168792 - RNA, 32 nt, Human
gcagcuuuccagccuugguggggaagaaagug

SEQ ID NO: 168793 - RNA, 32 nt, Human
gcagcuuuccuuucuuuuguguguuuucugug

SEQ ID NO: 168794 - RNA, 32 nt, Human
gcagcuuucgcccucugcuuugauggcugagg

SEQ ID NO: 168795 - RNA, 25 nt, Human
gcagcuuucuccaaggacgcggggg

SEQ ID NO: 168796 - RNA, 32 nt, Human
gcagcuuucuuuggggcuucagugagaacucu

SEQ ID NO: 168797 - RNA, 32 nt, Human
gcagcuuugaacuagggcugggguugugggug

SEQ ID NO: 168798 - RNA, 17 nt, Human
gcagcuuugagucugga

SEQ ID NO: 168799 - RNA, 32 nt, Human
gcagcuuugcccuguccaccuguugggugggc

SEQ ID NO: 168800 - RNA, 32 nt, Human
gcagcuuugccgccucuccaucgucuugggcc

SEQ ID NO: 168801 - RNA, 32 nt, Human
gcagcuuuggagcacagcgaggaggacggcuc

SEQ ID NO: 168802 - RNA, 32 nt, Human
gcagcuuuguccccacugugcaugccggcuug

SEQ ID NO: 168803 - RNA, 24 nt, Human
gcagcuuugugaaacuucuucaca

SEQ ID NO: 168804 - RNA, 32 nt, Human
gcagcuuuuagagugagugcugcuguggguuc

SEQ ID NO: 168805 - RNA, 32 nt, Human
gcagcuuuuccuccucuucccugcacuuccca

SEQ ID NO: 168806 - RNA, 32 nt, Human
gcagcuuuugacuguuucccggacacaaccgc

SEQ ID NO: 168807 - RNA, 22 nt, Human
gcaggaaaaaagacagauguug

SEQ ID NO: 168808 - RNA, 32 nt, Human
gcaggaaaaaccaguguccugcacucucuagc

SEQ ID NO: 168809 - RNA, 21 nt, Human
gcaggaaaagugcagacucug

SEQ ID NO: 168810 - RNA, 32 nt, Human
gcaggaaaaucacuugaacccaggaggcagag

SEQ ID NO: 168811 - RNA, 32 nt, Human
gcaggaaaauuguuugaacccaggagguggag

SEQ ID NO: 168812 - RNA, 21 nt, Human
gcaggaaacauggugaugcug

SEQ ID NO: 168813 - RNA, 23 nt, Human
gcaggaaaccauccagaaugcug

SEQ ID NO: 168814 - RNA, 32 nt, Human
gcaggaaacgugaacauaugugcugccugccc

SEQ ID NO: 168815 - RNA, 32 nt, Human
gcaggaaaggaaagguuggcugaacagggaag

SEQ ID NO: 168816 - RNA, 32 nt, Human
gcaggaaaggcggggccuuucuugucauagcu

SEQ ID NO: 168817 - RNA, 25 nt, Human
gcaggaaagggaaaaggagaguagu

SEQ ID NO: 168818 - RNA, 18 nt, Human
gcaggaaaguacagaugc

SEQ ID NO: 168819 - RNA, 22 nt, Human
gcaggaaauaaagagacagcug

SEQ ID NO: 168820 - RNA, 32 nt, Human
gcaggaaaugaccaagcucacacaugcuggcu

SEQ ID NO: 168821 - RNA, 32 nt, Human
gcaggaacaauauuccuguagccauggaagag

SEQ ID NO: 168822 - RNA, 18 nt, Human
gcaggaacacucucccca

SEQ ID NO: 168823 - RNA, 32 nt, Human
gcaggaacagagagacagagccugaguaauug

SEQ ID NO: 168824 - RNA, 32 nt, Human
gcaggaacagcacagacccagacgaggggaug

SEQ ID NO: 168825 - RNA, 32 nt, Human
gcaggaaccaacagacauacagcuucagccua

SEQ ID NO: 168826 - RNA, 32 nt, Human
gcaggaacccccagucuaggacuugggcauuu

SEQ ID NO: 168827 - RNA, 32 nt, Human
gcaggaacgcuaggcagucucuuuccaccaga

SEQ ID NO: 168828 - RNA, 32 nt, Human
gcaggaacugagcgaggaaggaagggagggaa

SEQ ID NO: 168829 - RNA, 32 nt, Human
gcaggaagaaagaccugcauccugcaucugua

SEQ ID NO: 168830 - RNA, 32 nt, Human
gcaggaagaaggcaggcuucuggcuuccagag

SEQ ID NO: 168831 - RNA, 20 nt, Human
gcaggaagaaucgcuugaac

SEQ ID NO: 168832 - RNA, 20 nt, Human
gcaggaagaauugcuugaac

SEQ ID NO: 168833 - RNA, 20 nt, Human
gcaggaagagaguccuccuu

SEQ ID NO: 168834 - RNA, 32 nt, Human
gcaggaagaggcgagggcacuugggggucauu

SEQ ID NO: 168835 - RNA, 32 nt, Human
gcaggaagaggggaguggaggcagcccauuca

SEQ ID NO: 168836 - RNA, 24 nt, Human
gcaggaagaucacuugagaucagg

SEQ ID NO: 168837 - RNA, 32 nt, Human
gcaggaagcagagagagcagggcuguucgacu

SEQ ID NO: 168838 - RNA, 32 nt, Human
gcaggaagccaagguacagagagcagccuggc

SEQ ID NO: 168839 - RNA, 32 nt, Human
gcaggaagccagcugucauauucggagggaau

SEQ ID NO: 168840 - RNA, 20 nt, Human
gcaggaagccauagaugcug

SEQ ID NO: 168841 - RNA, 32 nt, Human
gcaggaagcggaggaggaaaggagcagaaggu

SEQ ID NO: 168842 - RNA, 20 nt, Human
gcaggaagcucaggcagcuc

SEQ ID NO: 168843 - RNA, 32 nt, Human
gcaggaagcucgcuugagcucaggaguucaag

SEQ ID NO: 168844 - RNA, 32 nt, Human
gcaggaagcugcaggccggcgguggauggggc

SEQ ID NO: 168845 - RNA, 32 nt, Human
gcaggaagcuguuccaggccucaauacagaaa

SEQ ID NO: 168846 - RNA, 32 nt, Human
gcaggaaggagaaaggagggaagguaaaagac

SEQ ID NO: 168847 - RNA, 32 nt, Human
gcaggaaggagacagacagcuggcaguuccuc

SEQ ID NO: 168848 - RNA, 32 nt, Human
gcaggaaggagagcagaaaaggggaugggcug

SEQ ID NO: 168849 - RNA, 20 nt, Human
gcaggaaggaggcagagcug

SEQ ID NO: 168850 - RNA, 32 nt, Human
gcaggaaggaggcagagcuguccgugggaggu

SEQ ID NO: 168851 - RNA, 32 nt, Human
gcaggaaggccagagguucugguggaguugau

SEQ ID NO: 168852 - RNA, 32 nt, Human
gcaggaagggcugaggccaaccacaaaggggc

SEQ ID NO: 168853 - RNA, 25 nt, Human
gcaggaaggggaagccagcagggga

SEQ ID NO: 168854 - RNA, 32 nt, Human
gcaggaaggggaggggcagugagguuggcucc

SEQ ID NO: 168855 - RNA, 32 nt, Human
gcaggaaggggaguucgcaggagcuccagucc

SEQ ID NO: 168856 - RNA, 32 nt, Human
gcaggaaggggcccugcacgccgggacgccac

SEQ ID NO: 168857 - RNA, 20 nt, Human
gcaggaagggggccgacucc

SEQ ID NO: 168858 - RNA, 32 nt, Human
gcaggaagguaaaggggagaccaucugagcag

SEQ ID NO: 168859 - RNA, 32 nt, Human
gcaggaagucaaaaggagagugauggagccac

SEQ ID NO: 168860 - RNA, 32 nt, Human
gcaggaauaaguaaucuuauauacaagcuucg

SEQ ID NO: 168861 - RNA, 32 nt, Human
gcaggaauaaguaaucuuauauacaagcuuug

SEQ ID NO: 168862 - RNA, 32 nt, Human
gcaggaaucaacaaagggucagagcgaaguga

SEQ ID NO: 168863 - RNA, 20 nt, Human
gcaggaaucauuacacagug

SEQ ID NO: 168864 - RNA, 32 nt, Human
gcaggaauccuccaacaaccacaaacacaucg

SEQ ID NO: 168865 - RNA, 23 nt, Human
gcaggaaugcuuuacagauguug

SEQ ID NO: 168866 - RNA, 32 nt, Human
gcaggaauguggccacagggagcagagguuug

SEQ ID NO: 168867 - RNA, 32 nt, Human
gcaggacaaacauccucucaagcagucaacgu

SEQ ID NO: 168868 - RNA, 32 nt, Human
gcaggacaaacaucuucucaagcagucaacgu

SEQ ID NO: 168869 - RNA, 32 nt, Human
gcaggacaacuaagggcaucuagcagcaguag

SEQ ID NO: 168870 - RNA, 32 nt, Human
gcaggacaaggcaggaggaucacuugaaccua

SEQ ID NO: 168871 - RNA, 32 nt, Human
gcaggacacagcaaacaggacacauuugccug

SEQ ID NO: 168872 - RNA, 32 nt, Human
gcaggacacaggcagagauacgagggaaccgu

SEQ ID NO: 168873 - RNA, 32 nt, Human
gcaggacacgcuggucugagaugagggggagc

SEQ ID NO: 168874 - RNA, 32 nt, Human
gcaggacacugggcuccggcggccagaguggg

SEQ ID NO: 168875 - RNA, 18 nt, Human
gcaggacagaaaaaccaa

SEQ ID NO: 168876 - RNA, 32 nt, Human
gcaggacagaaagagagagagugaagggggaa

SEQ ID NO: 168877 - RNA, 32 nt, Human
gcaggacagagaugugaucuugcucagaagug

SEQ ID NO: 168878 - RNA, 32 nt, Human
gcaggacagcagaggacgugcugggauuaaac

SEQ ID NO: 168879 - RNA, 32 nt, Human
gcaggacagcagaggaugugcugggauuaaac

SEQ ID NO: 168880 - RNA, 20 nt, Human
gcaggacagcagggccccuc

SEQ ID NO: 168881 - RNA, 22 nt, Human
gcaggaccacggcccgcucccc

SEQ ID NO: 168882 - RNA, 32 nt, Human
gcaggaccacugcaauaaacgccuucuccugc

SEQ ID NO: 168883 - RNA, 16 nt, Human
gcaggaccagcuggga

SEQ ID NO: 168884 - RNA, 24 nt, Human
gcaggacccuggagaagcugaagc

SEQ ID NO: 168885 - RNA, 21 nt, Human
gcaggaccgccauggugcugg

SEQ ID NO: 168886 - RNA, 20 nt, Human
gcaggaccuacuaggagagg

SEQ ID NO: 168887 - RNA, 32 nt, Human
gcaggaccuccaccuucgcccucaccaucauc

SEQ ID NO: 168888 - RNA, 32 nt, Human
gcaggaccugaccuuuugcaaagcaaacauag

SEQ ID NO: 168889 - RNA, 18 nt, Human
gcaggaccuguccuggga

SEQ ID NO: 168890 - RNA, 24 nt, Human
gcaggacgagcauaugcagcugaa

SEQ ID NO: 168891 - RNA, 32 nt, Human
gcaggacgcucagccucagggcucagaaggug

SEQ ID NO: 168892 - RNA, 21 nt, Human
gcaggacgggaggcugagucc

SEQ ID NO: 168893 - RNA, 18 nt, Human
gcaggacgggcugaggga

SEQ ID NO: 168894 - RNA, 20 nt, Human
gcaggacgguggcugggagg

SEQ ID NO: 168895 - RNA, 32 nt, Human
gcaggacguggaccagcuggagcugcugccca

SEQ ID NO: 168896 - RNA, 32 nt, Human
gcaggacguuugagguugcacagaccuggaau

SEQ ID NO: 168897 - RNA, 24 nt, Human
gcaggacuaaccuuugagaaaucc

SEQ ID NO: 168898 - RNA, 32 nt, Human
gcaggacuaaugcuuuuaaaaugaggucuaaa

SEQ ID NO: 168899 - RNA, 23 nt, Human
gcaggacuaucaaaauggacucc

SEQ ID NO: 168900 - RNA, 21 nt, Human
gcaggacuaugcugaaucucc

SEQ ID NO: 168901 - RNA, 32 nt, Human
gcaggacucaugcacacguucaaugcccacau

SEQ ID NO: 168902 - RNA, 32 nt, Human
gcaggacuccggaggcagccugggugggugag

SEQ ID NO: 168903 - RNA, 32 nt, Human
gcaugcuguggucggaucugcccagccgugga

SEQ ID NO: 168904 - RNA, 32 nt, Human
gcaugcuuauaaucccagcuacuugggaggcu

SEQ ID NO: 168905 - RNA, 32 nt, Human
gcaugcuucacaccacugccagaagagcugcc

SEQ ID NO: 168906 - RNA, 32 nt, Human
gcaugcuucauugaggcccaggaagaggcccu

SEQ ID NO: 168907 - RNA, 32 nt, Human
gcaugcuucuuaagaauaaauccacacuuuag

SEQ ID NO: 168908 - RNA, 32 nt, Human
gcaugcuugagcccacgggcccaacuccugag

SEQ ID NO: 168909 - RNA, 32 nt, Human
gcaugcuugguuauuuccaguacuugugaguc

SEQ ID NO: 168910 - RNA, 32 nt, Human
gcaugcuuguaaucccagcuacucagaaggcu

SEQ ID NO: 168911 - RNA, 32 nt, Human
gcaugcuuguaaucccagcuacucgggaggcu

SEQ ID NO: 168912 - RNA, 32 nt, Human
gcaugcuuguaaucccagcuacuugggaggcu

SEQ ID NO: 168913 - RNA, 32 nt, Human
gcaugcuuguaauccuagcuacucaagaggcu

SEQ ID NO: 168914 - RNA, 32 nt, Human
gcaugcuuguagauccagcuacucgggaggcu

SEQ ID NO: 168915 - RNA, 32 nt, Human
gcaugcuuguagucccagcuacucaugaggcu

SEQ ID NO: 168916 - RNA, 32 nt, Human
gcaugcuuguagucccagcuacucgggaggcu

SEQ ID NO: 168917 - RNA, 32 nt, Human
gcaugcuuguagucccagcuacuugggaggcu

SEQ ID NO: 168918 - RNA, 32 nt, Human
gcaugcuuguggucccagcuacuuugggaggu

SEQ ID NO: 168919 - RNA, 32 nt, Human
gcaugcuuuccaucugcacuccagacggcuuu

SEQ ID NO: 168920 - RNA, 32 nt, Human
gcaugcuuuggaaauuuggaagaugguuuuau

SEQ ID NO: 168921 - RNA, 32 nt, Human
gcauggaaaugagaaugugcuguggcugucuu

SEQ ID NO: 168922 - RNA, 32 nt, Human
gcauggaacagcaucuccccugggcuugcucc

SEQ ID NO: 168923 - RNA, 32 nt, Human
gcauggaacuacgaggcaccacagacccuguu

SEQ ID NO: 168924 - RNA, 32 nt, Human
gcauggaacucacaccucuagccccagcuacu

SEQ ID NO: 168925 - RNA, 32 nt, Human
gcauggaacuccugggcucuuguggggacguu

SEQ ID NO: 168926 - RNA, 32 nt, Human
gcauggaaggcagaggcugggugggguggggg

SEQ ID NO: 168927 - RNA, 32 nt, Human
gcauggaaucagauccuaagccauaacaggcu

SEQ ID NO: 168928 - RNA, 32 nt, Human
gcauggaauuauagcaccaccuugugguuaac

SEQ ID NO: 168929 - RNA, 32 nt, Human
gcauggacaggaggagggaaaagggaccugug

SEQ ID NO: 168930 - RNA, 32 nt, Human
gcauggaccucuguggaccacagcguaccugc

SEQ ID NO: 168931 - RNA, 32 nt, Human
gcauggacggggcccagcuaggcgccaggacu

SEQ ID NO: 168932 - RNA, 32 nt, Human
gcauggagaaagauccuagaaaaggucagacc

SEQ ID NO: 168933 - RNA, 32 nt, Human
gcauggagaaguccuuccgaagcugccgauga

SEQ ID NO: 168934 - RNA, 32 nt, Human
gcauggagaaugcagaggugagccugucgugg

SEQ ID NO: 168935 - RNA, 32 nt, Human
gcauggagcucccagcugguggguacagcuug

SEQ ID NO: 168936 - RNA, 32 nt, Human
gcauggagcucuggcauccccaccucaguauc

SEQ ID NO: 168937 - RNA, 32 nt, Human
gcauggagcugcacucuaggagaaggagggga

SEQ ID NO: 168938 - RNA, 32 nt, Human
gcauggaggaaaggaagagggcacggaguugc

SEQ ID NO: 168939 - RNA, 32 nt, Human
gcauggaggaggcggaggccgcggcgagccgg

SEQ ID NO: 168940 - RNA, 32 nt, Human
gcauggagggcgugccuggugaagggaacagu

SEQ ID NO: 168941 - RNA, 32 nt, Human
gcauggagggcuccugcccuucugcugagcca

SEQ ID NO: 168942 - RNA, 32 nt, Human
gcauggagggguccccagagcccccaaccagu

SEQ ID NO: 168943 - RNA, 20 nt, Human
gcauggaguuugagaucuaa

SEQ ID NO: 168944 - RNA, 32 nt, Human
gcauggaugggcagaggcucucucccugccca

SEQ ID NO: 168945 - RNA, 32 nt, Human
gcauggauggggcuuuggguccucgagguugg

SEQ ID NO: 168946 - RNA, 24 nt, Human
gcauggauguacucaacuguguuu

SEQ ID NO: 168947 - RNA, 32 nt, Human
gcauggauguccugcucagacacuccacuuag

SEQ ID NO: 168948 - RNA, 32 nt, Human
gcauggaugugugguuggaggagacgggggug

SEQ ID NO: 168949 - RNA, 32 nt, Human
gcauggauuucaucuuugaggaguucaaaacc

SEQ ID NO: 168950 - RNA, 32 nt, Human
gcauggcaaaaauuuagaauagccagggucug

SEQ ID NO: 168951 - RNA, 32 nt, Human
gcauggcaaacagcaggcugugugcacggauu

SEQ ID NO: 168952 - RNA, 32 nt, Human
gcauggcaaauuuugaccauugcccagaaccc

SEQ ID NO: 168953 - RNA, 32 nt, Human
gcauggcaccugucgcccagugcccuggggcu

SEQ ID NO: 168954 - RNA, 32 nt, Human
gcauggcagaaggaggccagcacgcagccccu

SEQ ID NO: 168955 - RNA, 32 nt, Human
gcauggcagcacuuaugcucugugacaguauu

SEQ ID NO: 168956 - RNA, 32 nt, Human
gcauggcaggcagagauacagcaagggcaaag

SEQ ID NO: 168957 - RNA, 32 nt, Human
gcauggcaggcagaggcccagggacacugacg

SEQ ID NO: 168958 - RNA, 32 nt, Human
gcauggcagggacaauggugggcaguugcucu

SEQ ID NO: 168959 - RNA, 32 nt, Human
gcauggcagugccacucaagaaaaugaaucuc

SEQ ID NO: 168960 - RNA, 32 nt, Human
gcauggcaucaccuccaccauacuccaucagu

SEQ ID NO: 168961 - RNA, 32 nt, Human
gcauggccaccaaggagcuggaccuuggaugc

SEQ ID NO: 168962 - RNA, 19 nt, Human
gcauggccagacucaggca

SEQ ID NO: 168963 - RNA, 32 nt, Human
gcauggccaucguggcuacaucagucccggcu

SEQ ID NO: 168964 - RNA, 32 nt, Human
gcauggcccaggagaagagacacuagccauaa

SEQ ID NO: 168965 - RNA, 32 nt, Human
gcauggccccuccaggaacauucccacauaau

SEQ ID NO: 168966 - RNA, 32 nt, Human
gcauggccccuccagguaaccuugcacucucc

SEQ ID NO: 168967 - RNA, 27 nt, Human
gcauggcccugagaggcgucuccgugc

SEQ ID NO: 168968 - RNA, 32 nt, Human
gcauggcccugcugccccucccugccuccacc

SEQ ID NO: 168969 - RNA, 32 nt, Human
gcauggcccuguuuccuguugauauggugaua

SEQ ID NO: 168970 - RNA, 19 nt, Human
gcauggccgagcugggagg

SEQ ID NO: 168971 - RNA, 32 nt, Human
gcauggccuaacucaggcagaguaguuggcga

SEQ ID NO: 168972 - RNA, 32 nt, Human
gcauggccuccagaggaggggugguguccuuc

SEQ ID NO: 168973 - RNA, 25 nt, Human
gcauggccugagcccccugcugcca

SEQ ID NO: 168974 - RNA, 32 nt, Human
gcauggccugccugucuugagcuagauacugu

SEQ ID NO: 168975 - RNA, 18 nt, Human
gcauggcgccugccacca

SEQ ID NO: 168976 - RNA, 27 nt, Human
gcauggcggcccugggacaucuugcug

SEQ ID NO: 168977 - RNA, 32 nt, Human
gcauggcuauuagugggugcuuccaugucuua

SEQ ID NO: 168978 - RNA, 32 nt, Human
gcauggcucaccagccagccucuguggucuuu

SEQ ID NO: 168979 - RNA, 21 nt, Human
gcauggcucacgccuguaauc

SEQ ID NO: 168980 - RNA, 32 nt, Human
gcauggcucuugcccacccagaagaaggugca

SEQ ID NO: 168981 - RNA, 32 nt, Human
gcauggcugagcuccuggagacgagggcgggc

SEQ ID NO: 168982 - RNA, 32 nt, Human
gcauggcugcacucuagccugggugacagugu

SEQ ID NO: 168983 - RNA, 32 nt, Human
gcauggcugccuguaaucccagcacuuuggga

SEQ ID NO: 168984 - RNA, 32 nt, Human
gcauggcugcgugugugccugugcgugcgucu

SEQ ID NO: 168985 - RNA, 32 nt, Human
gcauggcugcuuguuuacaaagcaucucauuc

SEQ ID NO: 168986 - RNA, 32 nt, Human
gcauggcugggaggacacagaaacagggcucu

SEQ ID NO: 168987 - RNA, 32 nt, Human
gcauggcuggugccugaagaccccagauguga

SEQ ID NO: 168988 - RNA, 32 nt, Human
gcauggcuguaauccuggcuacucaggaggcc

SEQ ID NO: 168989 - RNA, 32 nt, Human
gcauggcugucaggagggcuuccugggaggug

SEQ ID NO: 168990 - RNA, 32 nt, Human
gcauggcuuccuauaacuucuuccugcuggac

SEQ ID NO: 168991 - RNA, 32 nt, Human
gcauggcuucuaaagggcaugacagugaccug

SEQ ID NO: 168992 - RNA, 32 nt, Human
gcauggcuuuauccucccucucaucccaaagc

SEQ ID NO: 168993 - RNA, 32 nt, Human
gcauggcuuuugacaguaaaucccggagagga

SEQ ID NO: 168994 - RNA, 32 nt, Human
gcaugggaagcagccuucagugccuucaugaa

SEQ ID NO: 168995 - RNA, 19 nt, Human
gcaugggaagggaggcauc

SEQ ID NO: 168996 - RNA, 32 nt, Human
gcaugggacagaagcaggcccagcaaguaaug

SEQ ID NO: 168997 - RNA, 32 nt, Human
gcaugggagaugucugugcuuggagguaccuc

SEQ ID NO: 168998 - RNA, 32 nt, Human
gcaugggaggcagagguugcagugagccaaga

SEQ ID NO: 168999 - RNA, 32 nt, Human
gcaugggaggugggcguuggaaaggcugagua

SEQ ID NO: 169000 - RNA, 32 nt, Human
gcaugggaugggcucaguugggcaguucuucu

SEQ ID NO: 169001 - RNA, 30 nt, Human
gcaugggauugggcucugggcacugacuca

SEQ ID NO: 169002 - RNA, 30 nt, Human
gcaugggauugggcucugggcacugacuua

SEQ ID NO: 169003 - RNA, 17 nt, Human
gcaugggcaccaaaguc

SEQ ID NO: 169004 - RNA, 32 nt, Human
gcaugggcaggcauuuguucccuaccugggug

SEQ ID NO: 169005 - RNA, 32 nt, Human
gcaugggcaucacaccccucacagaugaacaa

SEQ ID NO: 169006 - RNA, 32 nt, Human
gcaugggccagccccuccaucuguacuugguc

SEQ ID NO: 169007 - RNA, 32 nt, Human
gcaugggcucagcucauccucccucuggcccc

SEQ ID NO: 169008 - RNA, 32 nt, Human
gcaugggcucgccgugucucagccucugccag

SEQ ID NO: 169009 - RNA, 32 nt, Human
gcauggggaauaagaaucaguguuaauuuaaa

SEQ ID NO: 169010 - RNA, 32 nt, Human
gcauggggagcagcuaaacaaugcagauucau

SEQ ID NO: 169011 - RNA, 32 nt, Human
gcauggggaggcggcggcagcggguggacccc

SEQ ID NO: 169012 - RNA, 32 nt, Human
gcauggggaggguaggcagggagcagcauguc

SEQ ID NO: 169013 - RNA, 32 nt, Human
gcauggggcaaagaucugaggggccagaucuu

SEQ ID NO: 169014 - RNA, 21 nt, Human
gcauggggcauguccuuucca

SEQ ID NO: 169015 - RNA, 32 nt, Human
gcauggggcccagcugcagcugugcuuguucu

SEQ ID NO: 169016 - RNA, 32 nt, Human
gcauggggccccucccuucuuccacacccacc

SEQ ID NO: 169017 - RNA, 30 nt, Human
gcauggggccucuccuugccccuggagcua

SEQ ID NO: 169018 - RNA, 32 nt, Human
gcauggggcggguccuagcuguuagggacauu

SEQ ID NO: 169019 - RNA, 21 nt, Human
gcauggggcugggaggucuca

SEQ ID NO: 169020 - RNA, 22 nt, Human
gcauggggcuguggagugggug

SEQ ID NO: 169021 - RNA, 32 nt, Human
gcaugggggaaagcagugguccuagcauccau

SEQ ID NO: 169022 - RNA, 32 nt, Human
gcaugggggaaugcccauccuggagaagaauu

SEQ ID NO: 169023 - RNA, 32 nt, Human
gcaugggggaggcacagaaugcuggagagaug

SEQ ID NO: 169024 - RNA, 32 nt, Human
gcaugggggcaggaagagagcugagcauugau

SEQ ID NO: 169025 - RNA, 32 nt, Human
gcaugggggcauggugccagaggcucuggcug

SEQ ID NO: 169026 - RNA, 32 nt, Human
gcaugggggccaggcugucaacugugcauaga

SEQ ID NO: 169027 - RNA, 17 nt, Human
gcauggggggcuggacc

SEQ ID NO: 169028 - RNA, 32 nt, Human
gcaugggguggguggaggccagggacgcugcu

SEQ ID NO: 169029 - RNA, 32 nt, Human
gcauggggugugugcuuuuggggauggggagg

SEQ ID NO: 169030 - RNA, 32 nt, Human
gcaugggguugugggguggaggcuggcagcug

SEQ ID NO: 169031 - RNA, 32 nt, Human
gcaugggguuuucugccccacacccuuuagga

SEQ ID NO: 169032 - RNA, 32 nt, Human
gcauggguccccaccaagaggauucccuggcc

SEQ ID NO: 169033 - RNA, 22 nt, Human
gcaugggugcaccaaucaucuu

SEQ ID NO: 169034 - RNA, 32 nt, Human
gcauggguggagggucccuaauucucuucgcu

SEQ ID NO: 169035 - RNA, 32 nt, Human
gcaugggugggacuugugacccuacccuguca

SEQ ID NO: 169036 - RNA, 32 nt, Human
gcaugguaaacccacaguagaagggaaaaagu

SEQ ID NO: 169037 - RNA, 24 nt, Human
gcaugguaacucacgccuguaauc

SEQ ID NO: 169038 - RNA, 23 nt, Human
gcaugguacaucucacacuagga

SEQ ID NO: 169039 - RNA, 32 nt, Human
gcaugguacucaugccuguaaucccagcacuu

SEQ ID NO: 169040 - RNA, 32 nt, Human
gcaugguacugacugagcugaggagucaaacu

SEQ ID NO: 169041 - RNA, 32 nt, Human
gcaugguagccugagcgcgcccccaggguagu

SEQ ID NO: 169042 - RNA, 24 nt, Human
gcaugguagcucacgccuguaauc

SEQ ID NO: 169043 - RNA, 32 nt, Human
gcaugguagggagagacacaaaagaugggaaa

SEQ ID NO: 169044 - RNA, 32 nt, Human
gcaugguaucacagcaagucugucaaaucagu

SEQ ID NO: 169045 - RNA, 16 nt, Human
gcauggucaaaggcuc

SEQ ID NO: 169046 - RNA, 32 nt, Human
gcaugguccugccccagcaucuugcuggguug

SEQ ID NO: 169047 - RNA, 32 nt, Human
gcauggucgucacgccuguaaucccagcacuu

SEQ ID NO: 169048 - RNA, 32 nt, Human
gcauggucuagagguugugggcagcauggaca

SEQ ID NO: 169049 - RNA, 20 nt, Human
gcauggucugacaccugggc

SEQ ID NO: 169050 - RNA, 32 nt, Human
gcauggucugugaaauggagagaaggaaacau

SEQ ID NO: 169051 - RNA, 32 nt, Human
gcauggucuuucuccuuuauggccuccccacu

SEQ ID NO: 169052 - RNA, 32 nt, Human
gcauggugaaaccucaucccucuaacaauaua

SEQ ID NO: 169053 - RNA, 30 nt, Human
gcauggugaaaugaaaccccaucucaacua

SEQ ID NO: 169054 - RNA, 24 nt, Human
gcauggugacacacaccuguaauc

SEQ ID NO: 169055 - RNA, 24 nt, Human
gcauggugacccacaccuguaauc

SEQ ID NO: 169056 - RNA, 24 nt, Human
gcauggugacucacaucuguaauc

SEQ ID NO: 169057 - RNA, 24 nt, Human
gcauggugacucauaccuguaauc

SEQ ID NO: 169058 - RNA, 32 nt, Human
gcauggugagacuccuaaaaugacaggaguuu

SEQ ID NO: 169059 - RNA, 32 nt, Human
gcauggugcacacgccuguaaucccagcuacu

SEQ ID NO: 169060 - RNA, 32 nt, Human
gcauggugcauggucugugcugccuucugccu

SEQ ID NO: 169061 - RNA, 32 nt, Human
gcauggugcgggcaccuguaguccuagcuauc

SEQ ID NO: 169062 - RNA, 32 nt, Human
gcaugguggagcugggcuguggucuggggcag

SEQ ID NO: 169063 - RNA, 32 nt, Human
gcaugguggaguagaggagaaaucuuggcuca

SEQ ID NO: 169064 - RNA, 24 nt, Human
gcaugguggcacacaccuguaauc

SEQ ID NO: 169065 - RNA, 32 nt, Human
gcaugguggcacgcucuguaaucccaaauacg

SEQ ID NO: 169066 - RNA, 24 nt, Human
gcaugguggcccacgccuguaauc

SEQ ID NO: 169067 - RNA, 32 nt, Human
gcaugguggccuugacuaaguuuauggcgaca

SEQ ID NO: 169068 - RNA, 24 nt, Human
gcaugguggcgcacaccuauaauc

SEQ ID NO: 169069 - RNA, 24 nt, Human
gcaugguggcgcacaccuguaauc

SEQ ID NO: 169070 - RNA, 24 nt, Human
gcaugguggcucacaccgguaauc

SEQ ID NO: 169071 - RNA, 24 nt, Human
gcaugguggcucacaccuauaauc

SEQ ID NO: 169072 - RNA, 24 nt, Human
gcaugguggcucacaccuguaauc

SEQ ID NO: 169073 - RNA, 24 nt, Human
gcaugguggcucacaccuguaauu

SEQ ID NO: 169074 - RNA, 24 nt, Human
gcaugguggcucacaccugugauc

SEQ ID NO: 169075 - RNA, 24 nt, Human
gcaugguggcucacacguguaauc

SEQ ID NO: 169076 - RNA, 24 nt, Human
gcaugguggcucacacuuauaauc

SEQ ID NO: 169077 - RNA, 22 nt, Human
gcaugguggcucaccccuguaa

SEQ ID NO: 169078 - RNA, 24 nt, Human
gcaugguggcucacgcccguaauc

SEQ ID NO: 169079 - RNA, 22 nt, Human
gcaugguggcucacgccuguaa

SEQ ID NO: 169080 - RNA, 32 nt, Human
gcaugguggcucacgccuguaaccucagcacu

SEQ ID NO: 169081 - RNA, 24 nt, Human
gcaugguggcucacgccuguaauc

SEQ ID NO: 169082 - RNA, 24 nt, Human
gcaugguggcucauaccuguaauc

SEQ ID NO: 169083 - RNA, 32 nt, Human
gcaugguggcucaugcacaccuguaaucccaa

SEQ ID NO: 169084 - RNA, 32 nt, Human
gcaugguggugcauccuguaaucauagcuacu

SEQ ID NO: 169085 - RNA, 32 nt, Human
gcaugguguccaccugccugcugaccacugga

SEQ ID NO: 169086 - RNA, 29 nt, Human
gcauggugucugugugauguugguguguu

SEQ ID NO: 169087 - RNA, 32 nt, Human
gcaugguguuggcuggcaugcccaucagcuga

SEQ ID NO: 169088 - RNA, 32 nt, Human
gcaugguuaaacagugcuccauucucucucca

SEQ ID NO: 169089 - RNA, 32 nt, Human
gcaugguucuccuggcaggccugcugugugcc

SEQ ID NO: 169090 - RNA, 32 nt, Human
gcaugguugccuggcuaccugcucaugaggga

SEQ ID NO: 169091 - RNA, 32 nt, Human
gcaugguuuaaucccuucuuuacacuugugua

SEQ ID NO: 169092 - RNA, 32 nt, Human
gcauguaaaucaggaacaacuuucuccuuauu

SEQ ID NO: 169093 - RNA, 32 nt, Human
gcauguaauuccagugacuuacuaugugagau

SEQ ID NO: 169094 - RNA, 32 nt, Human
gcauguacagugguuugccauuaggguauucg

SEQ ID NO: 169095 - RNA, 32 nt, Human
gcauguaccaccgcgccuggccugugucuauu

SEQ ID NO: 169096 - RNA, 32 nt, Human
gcauguaccugauuucagcugugucaccaccc

SEQ ID NO: 169097 - RNA, 32 nt, Human
gcauguacuccccucauccgauuccccucuau

SEQ ID NO: 169098 - RNA, 32 nt, Human
gcauguacucugguuucaacagacacaaauuu

SEQ ID NO: 169099 - RNA, 32 nt, Human
gcauguacuuguauacauacaacaguaugucu

SEQ ID NO: 169100 - RNA, 32 nt, Human
gcauguagagcaauugucccaaugccacuugc

SEQ ID NO: 169101 - RNA, 32 nt, Human
gcauguagcucauucugcucagccucuggcgc

SEQ ID NO: 169102 - RNA, 32 nt, Human
gcauguaguaagccagaaaauauucaaagaga

SEQ ID NO: 169103 - RNA, 23 nt, Human
gcauguagucccaacuacucagg

SEQ ID NO: 169104 - RNA, 32 nt, Human
gcauguauaauagauuucuccucuuccugccc

SEQ ID NO: 169105 - RNA, 32 nt, Human
gcauguauaauagguuucuccucuuccugccc

SEQ ID NO: 169106 - RNA, 32 nt, Human
gcauguaugaacacacaugcuugucggaacgc

SEQ ID NO: 169107 - RNA, 32 nt, Human
gcauguaugcacacacacagggguuaaccacc

SEQ ID NO: 169108 - RNA, 32 nt, Human
gcauguauuggucagaaagaaaaagaaagaaa

SEQ ID NO: 169109 - RNA, 18 nt, Human
gcauguauuuccauggcc

SEQ ID NO: 169110 - RNA, 32 nt, Human
gcaugucacagcaaggacugccgcauugguga

SEQ ID NO: 169111 - RNA, 22 nt, Human
gcaugucacaugugaccauguu

SEQ ID NO: 169112 - RNA, 32 nt, Human
gcaugucaccacugcccucacagucgaggccu

SEQ ID NO: 169113 - RNA, 32 nt, Human
gcaugucaugucugauagcucuuuggauuuac

SEQ ID NO: 169114 - RNA, 32 nt, Human
gcauguccaguaugcuuugcaggguguguuug

SEQ ID NO: 169115 - RNA, 32 nt, Human
gcauguccccugcuugaacacugaagggcagg

SEQ ID NO: 169116 - RNA, 32 nt, Human
gcaugucccuucccuuccccagcccugccagg

SEQ ID NO: 169117 - RNA, 32 nt, Human
gcauguccucccucugucccucuuguggugcu

SEQ ID NO: 169118 - RNA, 32 nt, Human
gcaugucucucaugccaagaaccaagaucgga

SEQ ID NO: 169119 - RNA, 32 nt, Human
gcaugucugcaaacccagcuacucgggaggcu

SEQ ID NO: 169120 - RNA, 32 nt, Human
gcaugucugccuggagugcugugcuguguuua

SEQ ID NO: 169121 - RNA, 24 nt, Human
gcaugucuggagggaccugaggca

SEQ ID NO: 169122 - RNA, 32 nt, Human
gcaugucuguaaucccagcuacucgggaggcu

SEQ ID NO: 169123 - RNA, 32 nt, Human
gcaugucuguaaucccagcuacuggggaagcu

SEQ ID NO: 169124 - RNA, 32 nt, Human
gcaugucuguaaucccagcuacuggggaggcu

SEQ ID NO: 169125 - RNA, 32 nt, Human
gcaugucuguagucacagcuacucagggaggu

SEQ ID NO: 169126 - RNA, 19 nt, Human
gcaugucuuugccaugggc

SEQ ID NO: 169127 - RNA, 32 nt, Human
gcaugugaacaggguuucuguuuaccauguca

SEQ ID NO: 169128 - RNA, 32 nt, Human
gcaugugaaccaaaugauuguauuccauuaua

SEQ ID NO: 169129 - RNA, 32 nt, Human
gcaugugaagugagugggugagcacggacucc

SEQ ID NO: 169130 - RNA, 32 nt, Human
gcaugugagcaucugcccagcaaccuguggag

SEQ ID NO: 169131 - RNA, 32 nt, Human
gcaugugaucccucccuccuucugaccucuua

SEQ ID NO: 169132 - RNA, 32 nt, Human
gcaugugcacacacaaaccuccaggcuaucac

SEQ ID NO: 169133 - RNA, 32 nt, Human
gcaugugcacacacacucaaacauguacacac

SEQ ID NO: 169134 - RNA, 18 nt, Human
gcaugugcaccaaagcca

SEQ ID NO: 169135 - RNA, 32 nt, Human
gcaugugcacuucgggaagcaggccugcaucu

SEQ ID NO: 169136 - RNA, 32 nt, Human
gcaugugcaggaaaugacaaauuuguauguca

SEQ ID NO: 169137 - RNA, 23 nt, Human
gcaugugcagucccagcuacuca

SEQ ID NO: 169138 - RNA, 32 nt, Human
gcaugugccagccuccacaacgucugcguccc

SEQ ID NO: 169139 - RNA, 32 nt, Human
gcaugugccaggaguuugaggcugcagugcac

SEQ ID NO: 169140 - RNA, 32 nt, Human
gcaugugcccagccccuccaccaccaggggca

SEQ ID NO: 169141 - RNA, 32 nt, Human
gcaugugccgucuggacuuccaccuccagugc

SEQ ID NO: 169142 - RNA, 32 nt, Human
gcaugugccuaugugggugacccuguggaagu

SEQ ID NO: 169143 - RNA, 32 nt, Human
gcaugugccugaccagguagaaacugaaagca

SEQ ID NO: 169144 - RNA, 22 nt, Human
gcaugugccuguaaucccagcu

SEQ ID NO: 169145 - RNA, 32 nt, Human
gcaugugccuguaaucccagcuauuuggcagg

SEQ ID NO: 169146 - RNA, 32 nt, Human
gcaugugccuguaaucccagcuucuugggaag

SEQ ID NO: 169147 - RNA, 32 nt, Human
gcaugugccuguaaucccaguuacuggggagg

SEQ ID NO: 169148 - RNA, 22 nt, Human
gcaugugccuguaauuccagcu

SEQ ID NO: 169149 - RNA, 32 nt, Human
gcaugugccuguaauuccagcuacucgggagg

SEQ ID NO: 169150 - RNA, 32 nt, Human
gcaugugccuguagucccagcuacucuggagu

SEQ ID NO: 169151 - RNA, 32 nt, Human
gcaugugccuguagucccagcuacuugggagg

SEQ ID NO: 169152 - RNA, 32 nt, Human
gcaugugcguuuuccugagaagugaaugaguc

SEQ ID NO: 169153 - RNA, 32 nt, Human
gcaugugcugugggcccugccggcgccugagu

SEQ ID NO: 169154 - RNA, 32 nt, Human
gcauguggacacucagucacauuaacaacuug

SEQ ID NO: 169155 - RNA, 24 nt, Human
gcauguggaucaccugaggucagg

SEQ ID NO: 169156 - RNA, 32 nt, Human
gcauguggcucacgccuauaaucccaacaguu

SEQ ID NO: 169157 - RNA, 32 nt, Human
gcauguggcucaugccugcaaucccagcacuu

SEQ ID NO: 169158 - RNA, 32 nt, Human
gcauguggcuucauuauacugagccauguguc

SEQ ID NO: 169159 - RNA, 32 nt, Human
gcaugugggaagggagcaggagggccuggcug

SEQ ID NO: 169160 - RNA, 32 nt, Human
gcaugugggaggcugaggauggagcugggaac

SEQ ID NO: 169161 - RNA, 17 nt, Human
gcaugugggcaggggga

SEQ ID NO: 169162 - RNA, 32 nt, Human
gcauguggugauccugccagggccaggugggg

SEQ ID NO: 169163 - RNA, 32 nt, Human
gcauguguauauguucgugugugaaauguagg

SEQ ID NO: 169164 - RNA, 32 nt, Human
gcaugugucaaugucauaacugucuuuauacg

SEQ ID NO: 169165 - RNA, 19 nt, Human
gcaugugugaaaggggguu

SEQ ID NO: 169166 - RNA, 32 nt, Human
gcaugugugagcacccagcuacuggggacggg

SEQ ID NO: 169167 - RNA, 32 nt, Human
gcaugugugauggggaaggagcagucucccag

SEQ ID NO: 169168 - RNA, 32 nt, Human
gcaugugugcccaggaccggggcagucaccca

SEQ ID NO: 169169 - RNA, 32 nt, Human
gcaugugugccuguaguccaagcuacuugaag

SEQ ID NO: 169170 - RNA, 32 nt, Human
gcauguguguauaagugcacacagaaauauau

SEQ ID NO: 169171 - RNA, 32 nt, Human
gcaugugugugcacucggaccgagcaucuccc

SEQ ID NO: 169172 - RNA, 32 nt, Human
gcauguguguggguguggauguuuauaaacaa

SEQ ID NO: 169173 - RNA, 32 nt, Human
gcaugugugugugaguguguuuguguguuccc

SEQ ID NO: 169174 - RNA, 32 nt, Human
gcauguguguucaugcacacuugcacccaugu

SEQ ID NO: 169175 - RNA, 32 nt, Human
gcauguucagggaugcucauuccaugacucug

SEQ ID NO: 169176 - RNA, 32 nt, Human
gcauguucauguccagaccucggcaguggcgu

SEQ ID NO: 169177 - RNA, 32 nt, Human
gcauguuccuggcaaggagcacauaccaucaa

SEQ ID NO: 169178 - RNA, 32 nt, Human
gcauguuccuguuucagccucugccuuuccac

SEQ ID NO: 169179 - RNA, 32 nt, Human
gcauguucggcaccugucugugccucuggcac

SEQ ID NO: 169180 - RNA, 32 nt, Human
gcauguucucauaagugggagcuaaaucauga

SEQ ID NO: 169181 - RNA, 32 nt, Human
gcauguucuccaggaggccaggccgggguugc

SEQ ID NO: 169182 - RNA, 23 nt, Human
gcauguucucucuguuguuggag

SEQ ID NO: 169183 - RNA, 32 nt, Human
gcauguugagccaggccugggucugugucucu

SEQ ID NO: 169184 - RNA, 27 nt, Human
gcauguugcaguguccaucaguagaag

SEQ ID NO: 169185 - RNA, 32 nt, Human
gcauguugcauccugaauucacagaaguuuag

SEQ ID NO: 169186 - RNA, 32 nt, Human
gcauguugcccuguugcugccugcccuauucu

SEQ ID NO: 169187 - RNA, 32 nt, Human
gcauguugccuagcauuuuauagauauuuauu

SEQ ID NO: 169188 - RNA, 32 nt, Human
gcauguugcuguacugaauacucuaagcaauu

SEQ ID NO: 169189 - RNA, 32 nt, Human
gcauguuggagacugagcugggugcacuggcc

SEQ ID NO: 169190 - RNA, 19 nt, Human
gcauguuggggaccaggag

SEQ ID NO: 169191 - RNA, 32 nt, Human
gcauguuggucuuuuaagucuguuuugcucua

SEQ ID NO: 169192 - RNA, 32 nt, Human
gcauguuguuguugaaguguggaguuguaacu

SEQ ID NO: 169193 - RNA, 32 nt, Human
gcauguuuacugccacuggccuagaggagaca

SEQ ID NO: 169194 - RNA, 32 nt, Human
gcauguuuccagcagaagacaaaaagacaaac

SEQ ID NO: 169195 - RNA, 32 nt, Human
gcauguuuggggucagucaguguuggagagcc

SEQ ID NO: 169196 - RNA, 32 nt, Human
gcauguuuucucccucaauccaaggcacuggg

SEQ ID NO: 169197 - RNA, 32 nt, Human
gcauuaaaagaaugugcuuucucagauuaagg

SEQ ID NO: 169198 - RNA, 32 nt, Human
gcauuaaaggugccaugaaagguagacucuga

SEQ ID NO: 169199 - RNA, 32 nt, Human
gcauuaaauaauugagaacuguuucuucaaaa

SEQ ID NO: 169200 - RNA, 32 nt, Human
gcauuaaauauauguuguguaugaaguaucuc

SEQ ID NO: 169201 - RNA, 32 nt, Human
gcauuaaaucagauacaacucagcauuaaaaa

SEQ ID NO: 169202 - RNA, 32 nt, Human
gcauuaacaaaacauuuuccuccuucauauau

SEQ ID NO: 169203 - RNA, 32 nt, Human
gcauuaacauguaagaacaugugccucagaca

SEQ ID NO: 169204 - RNA, 18 nt, Human
gcauuaagaagcccagug

SEQ ID NO: 169205 - RNA, 32 nt, Human
gcauuaaguggggcuuaucuuugguuuggagu

SEQ ID NO: 169206 - RNA, 32 nt, Human
gcauuaauagcucuugaguagacuggauggaa

SEQ ID NO: 169207 - RNA, 32 nt, Human
gcauuaaucuaugccuuuuauucucaaacuaa

SEQ ID NO: 169208 - RNA, 32 nt, Human
gcauuaauucaccaaugcauuuggacaacuug

SEQ ID NO: 169209 - RNA, 32 nt, Human
gcauuacaaagauggauguucuucaguuccua

SEQ ID NO: 169210 - RNA, 32 nt, Human
gcauuacaaugagcuaaugcuccagaucccag

SEQ ID NO: 169211 - RNA, 32 nt, Human
gcauuacaggcaugugucaccaugcccggcua

SEQ ID NO: 169212 - RNA, 32 nt, Human
gcauuacaggcgcccaccaccacgcucggcua

SEQ ID NO: 169213 - RNA, 32 nt, Human
gcauuacaggcgccugccaccaccccuggcua

SEQ ID NO: 169214 - RNA, 32 nt, Human
gcauuacauguauuucagaguagguccuaggc

SEQ ID NO: 169215 - RNA, 32 nt, Human
gcauuacauuccauccagccugggcgacaaga

SEQ ID NO: 169216 - RNA, 32 nt, Human
gcauuaccacuguuagcaaauauuucaugaua

SEQ ID NO: 169217 - RNA, 22 nt, Human
gcauuacccaccauuguagcca

SEQ ID NO: 169218 - RNA, 32 nt, Human
gcauuacccacuguucucugucacaagcauca

SEQ ID NO: 169219 - RNA, 32 nt, Human
gcauuacccgccauuuucaucuuugccagucc

SEQ ID NO: 169220 - RNA, 32 nt, Human
gcauuaccuagguccaucaucauguaccaagc

SEQ ID NO: 169221 - RNA, 32 nt, Human
gcauuaccucugugauacagcucucaacagac

SEQ ID NO: 169222 - RNA, 32 nt, Human
gcauuaccugggcaguggacccugccgaggcu

SEQ ID NO: 169223 - RNA, 32 nt, Human
gcauuacucugccuaaccacuguguguaccau

SEQ ID NO: 169224 - RNA, 32 nt, Human
gcauuacugcacuccagccuggguaacagagu

SEQ ID NO: 169225 - RNA, 32 nt, Human
gcauuacugcugcuucugcauugcuccgcgcu

SEQ ID NO: 169226 - RNA, 32 nt, Human
gcauuagaaaaauugaaacuccuguguggaga

SEQ ID NO: 169227 - RNA, 32 nt, Human
gcauuagaaauguuuagcuuuguaugaacuga

SEQ ID NO: 169228 - RNA, 19 nt, Human
gcauuagaagcugccacca

SEQ ID NO: 169229 - RNA, 32 nt, Human
gcauuagagauccagcacauucucaguacugu

SEQ ID NO: 169230 - RNA, 32 nt, Human
gcauuagaggaguccucacccacccaccuccu

SEQ ID NO: 169231 - RNA, 32 nt, Human
gcauuagaguaugaauuuagcauugggaaaag

SEQ ID NO: 169232 - RNA, 32 nt, Human
gcauuagagucaguucuggcucugccuagcug

SEQ ID NO: 169233 - RNA, 32 nt, Human
gcauuagaucacacccuuuaguccaucacauu

SEQ ID NO: 169234 - RNA, 32 nt, Human
gcauuagauuccuuuccugugugaagaaagcc

SEQ ID NO: 169235 - RNA, 32 nt, Human
gcauuagcaggaaugcaaaaagaaauggaaca

SEQ ID NO: 169236 - RNA, 32 nt, Human
gcauuagcauuagcagcaccuaaguccucauu

SEQ ID NO: 169237 - RNA, 32 nt, Human
gcauuagcucacugcagucuccaccuccugag

SEQ ID NO: 169238 - RNA, 32 nt, Human
gcauuagcugcuuccuccccuccuggcaccca

SEQ ID NO: 169239 - RNA, 32 nt, Human
gcauuaggaagaaaggagcuccccguaaucgu

SEQ ID NO: 169240 - RNA, 32 nt, Human
gcauuagggccaccuccauggccccagacaga

SEQ ID NO: 169241 - RNA, 32 nt, Human
gcauuaguuuagaucaacucaaggaguauuua

SEQ ID NO: 169242 - RNA, 32 nt, Human
gcauuauaagugaccuuauuucugcuuuucug

SEQ ID NO: 169243 - RNA, 32 nt, Human
gcauuauacaauacaauuuguuucuauuuuga

SEQ ID NO: 169244 - RNA, 32 nt, Human
gcauuauacuccauaccugcuuuucccauggc

SEQ ID NO: 169245 - RNA, 32 nt, Human
gcauuauaggugcccaccaccaugccuggcug

SEQ ID NO: 169246 - RNA, 19 nt, Human
gcauuauccucucuuacaa

SEQ ID NO: 169247 - RNA, 32 nt, Human
gcauuaucugcagaagagaaacucaugucaug

SEQ ID NO: 169248 - RNA, 32 nt, Human
gcauuaugaaagucaacagcucuuuccccuca

SEQ ID NO: 169249 - RNA, 32 nt, Human
gcauuaugucuguugcucacagaugcagagac

SEQ ID NO: 169250 - RNA, 32 nt, Human
gcauuauguguauggccugaaguguuggacuu

SEQ ID NO: 169251 - RNA, 32 nt, Human
gcauuauucuccagccuuaagaucuuaggacg

SEQ ID NO: 169252 - RNA, 32 nt, Human
gcauucaaaaauguguaaaaaugaguaaauac

SEQ ID NO: 169253 - RNA, 32 nt, Human
gcauucaaaccucacauccucccuucaguuua

SEQ ID NO: 169254 - RNA, 22 nt, Human
gcauucacccccagucacaaug

SEQ ID NO: 169255 - RNA, 32 nt, Human
gcauucacccuugggcugcagauaguaauaua

SEQ ID NO: 169256 - RNA, 32 nt, Human
gcauucaccuugccaucugucuugucauugua

SEQ ID NO: 169257 - RNA, 32 nt, Human
gcauucacuuaauaaagacacuguuaagcacu

SEQ ID NO: 169258 - RNA, 32 nt, Human
gcauucagagaagagucaggaaaacaauugua

SEQ ID NO: 169259 - RNA, 32 nt, Human
gcauucagagcaucagagcaaguaccauggca

SEQ ID NO: 169260 - RNA, 32 nt, Human
gcauucagaucccugccucucugccuuaaaaa

SEQ ID NO: 169261 - RNA, 32 nt, Human
gcauucagaugugagcucaucaacauugaacc

SEQ ID NO: 169262 - RNA, 32 nt, Human
gcauucaggcuucucagguguuucuagacccc

SEQ ID NO: 169263 - RNA, 32 nt, Human
gcauucagguggccaaguauuugcauuuccuu

SEQ ID NO: 169264 - RNA, 32 nt, Human
gcauucagguucuaaauggcuucuaagaaguu

SEQ ID NO: 169265 - RNA, 22 nt, Human
gcauucaguugacuuucagggu

SEQ ID NO: 169266 - RNA, 32 nt, Human
gcauucaucucacagccacuugcccacagagu

SEQ ID NO: 169267 - RNA, 31 nt, Human
gcauucauggcugaaguggaggaucaggcag

SEQ ID NO: 169268 - RNA, 32 nt, Human
gcauucauguuucuccccaccuuauccccauc

SEQ ID NO: 169269 - RNA, 32 nt, Human
gcauucauucucuccaccaggccuccaggucc

SEQ ID NO: 169270 - RNA, 32 nt, Human
gcauucauuuuuaucugccccuuuaucagacc

SEQ ID NO: 169271 - RNA, 32 nt, Human
gcauucauuuuuccucacuuuaagucucuccc

SEQ ID NO: 169272 - RNA, 32 nt, Human
gcauuccaccuucccccuuucucccccacugc

SEQ ID NO: 169273 - RNA, 32 nt, Human
gcauuccacugugccagcacucuacauucagu

SEQ ID NO: 169274 - RNA, 32 nt, Human
gcauuccagacugggcgacagagcaagacucu

SEQ ID NO: 169275 - RNA, 32 nt, Human
gcauuccagagaugcacuccgcucuggaacuc

SEQ ID NO: 169276 - RNA, 32 nt, Human
gcauuccagccagcagggcagucucagugugg

SEQ ID NO: 169277 - RNA, 32 nt, Human
gcauuccagccaggaugacagagcaagacugc

SEQ ID NO: 169278 - RNA, 32 nt, Human
gcauuccagccuggcgacagagcaagacucca

SEQ ID NO: 169279 - RNA, 24 nt, Human
gcauuccagccugggcaacaagag

SEQ ID NO: 169280 - RNA, 32 nt, Human
gcauuccagccuggugacagagcgagacucag

SEQ ID NO: 169281 - RNA, 32 nt, Human
gcauucccagggggaccagcagcuacccaagg

SEQ ID NO: 169282 - RNA, 32 nt, Human
gcauucccagugccuggccgaaacugaggcug

SEQ ID NO: 169283 - RNA, 32 nt, Human
gcauucccaugaacauccagggccaggugugg

SEQ ID NO: 169284 - RNA, 32 nt, Human
gcauuccccacacaacacccacacucagccac

SEQ ID NO: 169285 - RNA, 32 nt, Human
gcauucccgacaccuggugcccuauaccagcc

SEQ ID NO: 169286 - RNA, 32 nt, Human
gcauucccucaccucuaccuuuuuauccuucc

SEQ ID NO: 169287 - RNA, 32 nt, Human
gcauucccugcaggaccucccgggucaggcag

SEQ ID NO: 169288 - RNA, 23 nt, Human
gcauuccgcagcccccaccccca

SEQ ID NO: 169289 - RNA, 32 nt, Human
gcauuccucccacccuggccucccagagugcu

SEQ ID NO: 169290 - RNA, 32 nt, Human
gcauuccucccaggacaccauuugucacgcuu

SEQ ID NO: 169291 - RNA, 23 nt, Human
gcauuccugacccaagaaagacu

SEQ ID NO: 169292 - RNA, 32 nt, Human
gcauuccugagaaagagggccacucuaccucu

SEQ ID NO: 169293 - RNA, 32 nt, Human
gcauuccugccuguaagucuucccaagacaga

SEQ ID NO: 169294 - RNA, 32 nt, Human
gcauuccugcugcuacagccuauuugcugagu

SEQ ID NO: 169295 - RNA, 32 nt, Human
gcauuccuggcuuguugguccacauuuaugau

SEQ ID NO: 169296 - RNA, 22 nt, Human
gcauucgaggaggccagaggug

SEQ ID NO: 169297 - RNA, 32 nt, Human
gcauucgcugccgaaaugagcaacuccauuca

SEQ ID NO: 169298 - RNA, 32 nt, Human
gcauucggagugagcugguggagccagacaga

SEQ ID NO: 169299 - RNA, 32 nt, Human
gcauucggcuguggcccuagagcagagcauug

SEQ ID NO: 169300 - RNA, 32 nt, Human
gcauucggcuuccuuggagcagccucuucugg

SEQ ID NO: 169301 - RNA, 19 nt, Human
gcauucgguggacaccaug

SEQ ID NO: 169302 - RNA, 32 nt, Human
gcauucguggggaauggacgccagcagaguug

SEQ ID NO: 169303 - RNA, 32 nt, Human
gcauucuagguagaggagacagccuggacaaa

SEQ ID NO: 169304 - RNA, 32 nt, Human
gcauucucagugccagggcuucaucccuguga

SEQ ID NO: 169305 - RNA, 32 nt, Human
gcauucucauacaaccgaaucucaauguacau

SEQ ID NO: 169306 - RNA, 32 nt, Human
gcauucuccagacucugugcuuuccuaagaua

SEQ ID NO: 169307 - RNA, 32 nt, Human
gcauucuccccagcaugucucuuccagcuuaa

SEQ ID NO: 169308 - RNA, 32 nt, Human
gcauucuccugccucagccuccagagcaacug

SEQ ID NO: 169309 - RNA, 32 nt, Human
gcauucucgcagccccugcccccgaggcuucu

SEQ ID NO: 169310 - RNA, 32 nt, Human
gcauucucucauucccuuuuccucuauggagc

SEQ ID NO: 169311 - RNA, 32 nt, Human
gcauucucuccucuuugccuuuauguuuuguu

SEQ ID NO: 169312 - RNA, 32 nt, Human
gcauucucugcaggaagaaaguuugaugguau

SEQ ID NO: 169313 - RNA, 32 nt, Human
gcauucucuggagcuuccugagcccaguggga

SEQ ID NO: 169314 - RNA, 32 nt, Human
gcauucucugggaggcaaaggcuggcacugga

SEQ ID NO: 169315 - RNA, 32 nt, Human
gcauucucuuucucaaggauguuccuugcuga

SEQ ID NO: 169316 - RNA, 32 nt, Human
gcauucucuuucucagggguguuccuugcuga

SEQ ID NO: 169317 - RNA, 32 nt, Human
gcauucucuuugcaccuggcgagagggucuga

SEQ ID NO: 169318 - RNA, 32 nt, Human
gcauucugaacaaauaaccauggcuuccaaag

SEQ ID NO: 169319 - RNA, 32 nt, Human
gcauucugaguccucuuugucugccuuuaauu

SEQ ID NO: 169320 - RNA, 32 nt, Human
gcauucugauuaugcugccuucacaaaacacu

SEQ ID NO: 169321 - RNA, 32 nt, Human
gcauucugcccaggcuacguggguucaggcag

SEQ ID NO: 169322 - RNA, 32 nt, Human
gcauucugccccacuuacuaacugccaguucu

SEQ ID NO: 169323 - RNA, 32 nt, Human
gcauucugcccuccugggccccucucucccug

SEQ ID NO: 169324 - RNA, 31 nt, Human
gcauucugccucucuaggaccaugguuaaga

SEQ ID NO: 169325 - RNA, 32 nt, Human
gcauucugcucuucugaugaugcgcugugacc

SEQ ID NO: 169326 - RNA, 32 nt, Human
gcauucugcucuucuuuagauggcuguaaauc

SEQ ID NO: 169327 - RNA, 25 nt, Human
gcauucuggaguccgucugucuugg

SEQ ID NO: 169328 - RNA, 32 nt, Human
gcauucugggcagaggagacagcaaaggucaa

SEQ ID NO: 169329 - RNA, 32 nt, Human
gcauucugucuguccuuuuccuccuuggagcc

SEQ ID NO: 169330 - RNA, 32 nt, Human
gcauucuucaaaaccauuccugauagaguagc

SEQ ID NO: 169331 - RNA, 32 nt, Human
gcauucuugacagacuccuggcugucaguuuc

SEQ ID NO: 169332 - RNA, 32 nt, Human
gcauucuugucccauuccucacuuuacugcaa

SEQ ID NO: 169333 - RNA, 32 nt, Human
gcauucuuuccagcauugugcuuuuucccugg

SEQ ID NO: 169334 - RNA, 32 nt, Human
gcauugaccacgacuaauuucaaaaugcuuuu

SEQ ID NO: 169335 - RNA, 32 nt, Human
gcauugaccauggggcuccaucuaggcucuga

SEQ ID NO: 169336 - RNA, 32 nt, Human
gcauugacuccaggacuccaggcgagggaaga

SEQ ID NO: 169337 - RNA, 32 nt, Human
gcauugacuuccucuuccuagacuugaggccu

SEQ ID NO: 169338 - RNA, 32 nt, Human
gcauugagaacaggacagaucuugacaccaau

SEQ ID NO: 169339 - RNA, 32 nt, Human
gcauugagagaagaggaggagauaccccgugc

SEQ ID NO: 169340 - RNA, 32 nt, Human
gcauugagcacuuuaucucccacgacucagug

SEQ ID NO: 169341 - RNA, 32 nt, Human
gcauugagcugccuccagccugguggcccagc

SEQ ID NO: 169342 - RNA, 32 nt, Human
gcauugagggagcagagauacccauacacaga

SEQ ID NO: 169343 - RNA, 32 nt, Human
gcauugaugucugacugccacuccuuucuuuc

SEQ ID NO: 169344 - RNA, 32 nt, Human
gcauugcacauccgugcagaaaucuuucugac

SEQ ID NO: 169345 - RNA, 32 nt, Human
gcauugcacccagggagcuggaguugagcugu

SEQ ID NO: 169346 - RNA, 32 nt, Human
gcauugcagcccaaaucaggaacgugguaaga

SEQ ID NO: 169347 - RNA, 32 nt, Human
gcauugcagccuggugacagagugagacucca

SEQ ID NO: 169348 - RNA, 32 nt, Human
gcauugcaggcagaaaaggguggccgacguga

SEQ ID NO: 169349 - RNA, 32 nt, Human
gcauugccaaaauugcccaguguauuuuuauu

SEQ ID NO: 169350 - RNA, 32 nt, Human
gcauugccaagugccauaaccaugagcacuac

SEQ ID NO: 169351 - RNA, 32 nt, Human
gcauugccagccggcuguaggcauucagggca

SEQ ID NO: 169352 - RNA, 32 nt, Human
gcauugcccagccugggaaucuuuucuuugug

SEQ ID NO: 169353 - RNA, 32 nt, Human
gcauugcccaggauagcagccuugccuggcuc

SEQ ID NO: 169354 - RNA, 32 nt, Human
gcauugcccgggcuagucucgaacuccugacc

SEQ ID NO: 169355 - RNA, 32 nt, Human
gcauugcccuucgggcuggagaugcuuugccg

SEQ ID NO: 169356 - RNA, 32 nt, Human
gcauugccuccuaccagaacuagacagugaau

SEQ ID NO: 169357 - RNA, 32 nt, Human
gcauugccuuaaaucuuauccaguuagaacau

SEQ ID NO: 169358 - RNA, 19 nt, Human
gcauugccuucucugccca

SEQ ID NO: 169359 - RNA, 32 nt, Human
gcauugcuauaaaugaauaccugaggcugagu

SEQ ID NO: 169360 - RNA, 32 nt, Human
gcauugcugccaccccagguccaccugucucc

SEQ ID NO: 169361 - RNA, 32 nt, Human
gcauugcuucuguaaaugcaggcgcaguuugu

SEQ ID NO: 169362 - RNA, 20 nt, Human
gcauugcuugagguugccca

SEQ ID NO: 169363 - RNA, 32 nt, Human
gcauugcuugggcacugucugugugcagguca

SEQ ID NO: 169364 - RNA, 32 nt, Human
gcauugcuuuccucugagcuuuaguggguccu

SEQ ID NO: 169365 - RNA, 32 nt, Human
gcauuggaaauuucaaacuuuggaggaaucuu

SEQ ID NO: 169366 - RNA, 32 nt, Human
gcauuggacccgaaaugagggagcccagcugg

SEQ ID NO: 169367 - RNA, 16 nt, Human
gcauuggagagaagcc

SEQ ID NO: 169368 - RNA, 32 nt, Human
gcauuggagcagcagucccucacuuugaaacc

SEQ ID NO: 169369 - RNA, 32 nt, Human
gcauuggcacuuccugagcaagcaucauuuua

SEQ ID NO: 169370 - RNA, 32 nt, Human
gcauuggcaggcugggugaaaaugagaaagau

SEQ ID NO: 169371 - RNA, 32 nt, Human
gcauuggcucagaaguagagggagaagaggaa

SEQ ID NO: 169372 - RNA, 22 nt, Human
gcauuggcucaugucuguaauc

SEQ ID NO: 169373 - RNA, 32 nt, Human
gcauuggcuugucugccgcaggcacagaaggg

SEQ ID NO: 169374 - RNA, 32 nt, Human
gcauugggcuaaacucuugacaagcaccaucu

SEQ ID NO: 169375 - RNA, 32 nt, Human
gcauuggggguguggaggccgagccagggccc

SEQ ID NO: 169376 - RNA, 32 nt, Human
gcauugggguuccucagauguccucuuugcac

SEQ ID NO: 169377 - RNA, 32 nt, Human
gcauugggguuccucuguacagcaagauguuu

SEQ ID NO: 169378 - RNA, 32 nt, Human
gcauugguauauacgugccauggugguuugcu

SEQ ID NO: 169379 - RNA, 31 nt, Human
gcauuggucacagaagucuucuucuguguug

SEQ ID NO: 169380 - RNA, 32 nt, Human
gcauuggugaauucauacaggagagaaaccuu

SEQ ID NO: 169381 - RNA, 32 nt, Human
gcauuggugcaaucuuggcucacuacaaccuc

SEQ ID NO: 169382 - RNA, 32 nt, Human
gcauugguguuuuucagaugaaagagaaaucc

SEQ ID NO: 169383 - RNA, 32 nt, Human
gcauugguucugacauucauuguaaaucagug

SEQ ID NO: 169384 - RNA, 32 nt, Human
gcauugguucugcuguagccucggugaccauu

SEQ ID NO: 169385 - RNA, 32 nt, Human
gcauugguuuuccaguccuguuaaaaguuuag

SEQ ID NO: 169386 - RNA, 32 nt, Human
gcauuguacaaccuugaaucacuugagcaugu

SEQ ID NO: 169387 - RNA, 32 nt, Human
gcauuguagccaguagggcuucugagcaggcu

SEQ ID NO: 169388 - RNA, 32 nt, Human
gcauuguagccugggcaacagagcaagacccu

SEQ ID NO: 169389 - RNA, 32 nt, Human
gcauuguauuccaaacguguuuacagguucuc

SEQ ID NO: 169390 - RNA, 32 nt, Human
gcauugucagcccuauacuguggucuuaauaa

SEQ ID NO: 169391 - RNA, 32 nt, Human
gcauugucgcugcagccaacuuugccauuaaa

SEQ ID NO: 169392 - RNA, 32 nt, Human
gcauugucuuccaguaucuacagcuucagaac

SEQ ID NO: 169393 - RNA, 23 nt, Human
gcauugugauggaaauacucuua

SEQ ID NO: 169394 - RNA, 32 nt, Human
gcauugugcccaggcuagggggcuauagaaac

SEQ ID NO: 169395 - RNA, 22 nt, Human
gcauugugcucagccgaagaga

SEQ ID NO: 169396 - RNA, 32 nt, Human
gcauuguggaacauuucuuuaccuucaaaguu

SEQ ID NO: 169397 - RNA, 32 nt, Human
gcauuguucagaaacugucgaccagaguuaga

SEQ ID NO: 169398 - RNA, 32 nt, Human
gcauuguuccagccuuggcugccugcauccag

SEQ ID NO: 169399 - RNA, 32 nt, Human
gcauuguugguaucaagguggucugguugagu

SEQ ID NO: 169400 - RNA, 32 nt, Human
gcauuuaacuucuuguuaggauucagggaagg

SEQ ID NO: 169401 - RNA, 32 nt, Human
gcauuuaagccuuuggaaaaauguuugucauu

SEQ ID NO: 169402 - RNA, 32 nt, Human
gcauuuaaggagcauuuaaaaauauguauaua

SEQ ID NO: 169403 - RNA, 32 nt, Human
gcauuuacaaaagcacacagguguuuagaaaa

SEQ ID NO: 169404 - RNA, 32 nt, Human
gcauuuacacacagcacacuccagcucugcca

SEQ ID NO: 169405 - RNA, 32 nt, Human
gcauuuacccccagcuccuugagggggugagg

SEQ ID NO: 169406 - RNA, 32 nt, Human
gcauuuacucucaucaaacgccugcagucuga

SEQ ID NO: 169407 - RNA, 32 nt, Human
gcauuuagagaguguguugucuuccagaguca

SEQ ID NO: 169408 - RNA, 32 nt, Human
gcauuuagccugggcgacagagcgagaccuug

SEQ ID NO: 169409 - RNA, 32 nt, Human
gcauuuagcugaucucuuaccccugguauuuc

SEQ ID NO: 169410 - RNA, 32 nt, Human
gcauuuaggccaugcugugcucuacuucauug

SEQ ID NO: 169411 - RNA, 32 nt, Human
gcauuuaggggcuuucaggaauuuaguaaaag

SEQ ID NO: 169412 - RNA, 32 nt, Human
gcauuuaggucuggaugcaguggcucaugcuu

SEQ ID NO: 169413 - RNA, 32 nt, Human
gcauuuaguagcuucaguuucuuuugaauaca

SEQ ID NO: 169414 - RNA, 32 nt, Human
gcauuuaguggugguagaaaugauucaccagg

SEQ ID NO: 169415 - RNA, 31 nt, Human
gcauuuaucaauaaaagccuuugaaaauacu

SEQ ID NO: 169416 - RNA, 32 nt, Human
gcauuuaucagcugccgcuuauucauugccuu

SEQ ID NO: 169417 - RNA, 32 nt, Human
gcauuuauccugcugaucaguucuuagcuaag

SEQ ID NO: 169418 - RNA, 32 nt, Human
gcauuuaucuuucuggcuccuaauuccuuuaa

SEQ ID NO: 169419 - RNA, 17 nt, Human
gcauuucacaaucccuu

SEQ ID NO: 169420 - RNA, 17 nt, Human
gcauuucacccugcucc

SEQ ID NO: 169421 - RNA, 17 nt, Human
gcauuucagcaaaguca

SEQ ID NO: 169422 - RNA, 32 nt, Human
gcauuucagcagcuccacugggaugcucuaac

SEQ ID NO: 169423 - RNA, 32 nt, Human
gcauuucaucacucuugacauguucuucaauc

SEQ ID NO: 169424 - RNA, 32 nt, Human
gcauuucaugaaacaacacauucuuccagcug

SEQ ID NO: 169425 - RNA, 32 nt, Human
gcauuuccagggacuguggccauaccuuaugu

SEQ ID NO: 169426 - RNA, 32 nt, Human
gcauuucccgaaggccgacaccacuccugcca

SEQ ID NO: 169427 - RNA, 32 nt, Human
gcauuuccugugacccaggaggucugguguag

SEQ ID NO: 169428 - RNA, 32 nt, Human
gcauuuccuuaucuauggauaaggagaucuga

SEQ ID NO: 169429 - RNA, 32 nt, Human
gcauuuccuuuccaauugaauuaaaguguggc

SEQ ID NO: 169430 - RNA, 32 nt, Human
gcauuucggugcuucccuuucacugaagugaa

SEQ ID NO: 169431 - RNA, 32 nt, Human
gcauuucuaccccauccagaacauucuuggaa

SEQ ID NO: 169432 - RNA, 22 nt, Human
gcauuucucaaaauggagccuc

SEQ ID NO: 169433 - RNA, 32 nt, Human
gcauuucucagcugggcaguaaucaauuuaau

SEQ ID NO: 169434 - RNA, 32 nt, Human
gcauuucucccaggacuuggggguggggugaa

SEQ ID NO: 169435 - RNA, 32 nt, Human
gcauuucuccgugcguccucccugcacugaaa

SEQ ID NO: 169436 - RNA, 32 nt, Human
gcauuucucugccucucucuccugccaugucg

SEQ ID NO: 169437 - RNA, 32 nt, Human
gcauuucucugugcugcccuccuggagaaccg

SEQ ID NO: 169438 - RNA, 32 nt, Human
gcauuucugcaaccucuguucuuucugauuuu

SEQ ID NO: 169439 - RNA, 32 nt, Human
gcauuucugcauucgaagaagaaucugagaga

SEQ ID NO: 169440 - RNA, 32 nt, Human
gcauuucugccuggcaacagagcgagacuccg

SEQ ID NO: 169441 - RNA, 32 nt, Human
gcauuucuguucugugcugugcuaagcuauac

SEQ ID NO: 169442 - RNA, 32 nt, Human
gcauuucuucacugcaauugccauuugccuuu

SEQ ID NO: 169443 - RNA, 32 nt, Human
gcauuucuucacuugcaaggggacagagugug

SEQ ID NO: 169444 - RNA, 32 nt, Human
gcauuucuugucucccuguggcuuguuccacu

SEQ ID NO: 169445 - RNA, 32 nt, Human
gcauuugaaagauaccaaccgcacagggaaag

SEQ ID NO: 169446 - RNA, 32 nt, Human
gcauuugaaagcuucuggcugauaaaucucca

SEQ ID NO: 169447 - RNA, 32 nt, Human
gcauuugaaaucuguaugauaaaagauguggc

SEQ ID NO: 169448 - RNA, 32 nt, Human
gcauuugaacuauauuuacugcuccaauaucc

SEQ ID NO: 169449 - RNA, 32 nt, Human
gcauuugaagaaauaguacgacaacuuauuuu

SEQ ID NO: 169450 - RNA, 32 nt, Human
gcauuugaagcagcugcauacuucagaguaaa

SEQ ID NO: 169451 - RNA, 32 nt, Human
gcauuugaauuggaaagagaagagugaagauc

SEQ ID NO: 169452 - RNA, 32 nt, Human
gcauuugacacuuugccaaucugacaagcugc

SEQ ID NO: 169453 - RNA, 32 nt, Human
gcauuugaguccuuauuuggcacagagacgga

SEQ ID NO: 169454 - RNA, 32 nt, Human
gcauuugauuuccaagucagguagaucauugg

SEQ ID NO: 169455 - RNA, 32 nt, Human
gcauuugcaaucagcuaccauucaaaauugcu

SEQ ID NO: 169456 - RNA, 32 nt, Human
gcauuugcagcucggcugaaggccuugagcuu

SEQ ID NO: 169457 - RNA, 25 nt, Human
gcauuugccaacuuacaugcucucc

SEQ ID NO: 169458 - RNA, 32 nt, Human
gcauuugccaagggaggcggauuucccuggua

SEQ ID NO: 169459 - RNA, 32 nt, Human
gcauuugcccagagacagggaaaagaaugccu

SEQ ID NO: 169460 - RNA, 32 nt, Human
gcauuugcccuuucuugccucuugagaccuuc

SEQ ID NO: 169461 - RNA, 32 nt, Human
gcauuugcuuggcugcagccuccuuccgaccu

SEQ ID NO: 169462 - RNA, 32 nt, Human
gcauuuggccacagauaggcaggaggagcuca

SEQ ID NO: 169463 - RNA, 25 nt, Human
gcauuugggagaucauacacagaga

SEQ ID NO: 169464 - RNA, 32 nt, Human
gcauuugggaggaggccucuggacucagugcu

SEQ ID NO: 169465 - RNA, 32 nt, Human
gcauuugggcaaugaggaaggaaagguuucaa

SEQ ID NO: 169466 - RNA, 32 nt, Human
gcauuugggucugagaucggcccagcucugac

SEQ ID NO: 169467 - RNA, 32 nt, Human
gcauuugguaacucaaagaaggcuguacagau

SEQ ID NO: 169468 - RNA, 32 nt, Human
gcauuugguaggaagccugaggcaaaaacugc

SEQ ID NO: 169469 - RNA, 32 nt, Human
gcauuuggugccaguucaguggggucuacuca

SEQ ID NO: 169470 - RNA, 32 nt, Human
gcauuugguggggacagcugcagagaagaggc

SEQ ID NO: 169471 - RNA, 32 nt, Human
gcauuuguauuaccuaugaacaaaauuaccug

SEQ ID NO: 169472 - RNA, 19 nt, Human
gcauuugucaacaaaguca

SEQ ID NO: 169473 - RNA, 32 nt, Human
gcauuugugucuagcuacacaccgcuaacaaa

SEQ ID NO: 169474 - RNA, 32 nt, Human
gcauuugugugugauguuggauagucauccac

SEQ ID NO: 169475 - RNA, 32 nt, Human
gcauuugugugugauguuggauagucauccau

SEQ ID NO: 169476 - RNA, 32 nt, Human
gcauuuguucacgugccucacagcaggccuuu

SEQ ID NO: 169477 - RNA, 32 nt, Human
gcauuuguuccaggucacacagcuggaaagag

SEQ ID NO: 169478 - RNA, 32 nt, Human
gcauuuguugguuuaucagacucggaaucuau

SEQ ID NO: 169479 - RNA, 32 nt, Human
gcauuuguuucaucuuacaguuggaguucaau

SEQ ID NO: 169480 - RNA, 32 nt, Human
gcauuuuaccauagauuggagugcauccuuag

SEQ ID NO: 169481 - RNA, 32 nt, Human
gcauuuuagugaauuguacaguggguggaaag

SEQ ID NO: 169482 - RNA, 32 nt, Human
gcauuuucacaaagcagcccucuuucaagaag

SEQ ID NO: 169483 - RNA, 32 nt, Human
gcauuuucacauguaccuucaggggguuaucu

SEQ ID NO: 169484 - RNA, 32 nt, Human
gcauuuucagggaccagccccaucacuggcuc

SEQ ID NO: 169485 - RNA, 32 nt, Human
gcauuuucauggcaaguaccccucugccccca

SEQ ID NO: 169486 - RNA, 32 nt, Human
gcauuuucauucucuuagaaauucaaguauuu

SEQ ID NO: 169487 - RNA, 32 nt, Human
gcauuuucccccaagguugaaggugagugguc

SEQ ID NO: 169488 - RNA, 18 nt, Human
gcauuuuccucuucccuu

SEQ ID NO: 169489 - RNA, 18 nt, Human
gcauuuucucaccuggau

SEQ ID NO: 169490 - RNA, 32 nt, Human
gcauuuucuccccucucccucccuccuucucu

SEQ ID NO: 169491 - RNA, 32 nt, Human
gcauuuucuccugugcugaccaaccaaauaau

SEQ ID NO: 169492 - RNA, 32 nt, Human
gcauuuucuggggaauaugacaucccaucuga

SEQ ID NO: 169493 - RNA, 32 nt, Human
gcauuuugaucuguaacugcacaacccugggg

SEQ ID NO: 169494 - RNA, 32 nt, Human
gcauuuugaugaagaagaggauggcuuugagg

SEQ ID NO: 169495 - RNA, 32 nt, Human
gcauuuugggaggcccagaugggagcccagga

SEQ ID NO: 169496 - RNA, 32 nt, Human
gcauuuugggaggcugaggcaaguggauaacu

SEQ ID NO: 169497 - RNA, 32 nt, Human
gcauuuugggagguugaaguggguggaucacc

SEQ ID NO: 169498 - RNA, 32 nt, Human
gcauuuuggucccugcuccuugcccauaguaa

SEQ ID NO: 169499 - RNA, 32 nt, Human
gcauuuuggucuucagcacaaagccuuguucc

SEQ ID NO: 169500 - RNA, 32 nt, Human
gcauuuuguaaaaaugaaaaugugacucacau

SEQ ID NO: 169501 - RNA, 32 nt, Human
gcauuuuguaccaucugcuccccaauggccaa

SEQ ID NO: 169502 - RNA, 32 nt, Human
gcauuuugugggguguuagugccaaacuugaa

SEQ ID NO: 169503 - RNA, 32 nt, Human
gcauuuuguuccuguguuuaauagugaucugu

SEQ ID NO: 169504 - RNA, 22 nt, Human
gcauuuuuaacccuacagugaa

SEQ ID NO: 169505 - RNA, 32 nt, Human
gcauuuuucacucuuaacccgaggguguguuu

SEQ ID NO: 169506 - RNA, 32 nt, Human
gcauuuuucccuuuauugccucauuucuugug

SEQ ID NO: 169507 - RNA, 32 nt, Human
gcauuuuucucuucaauuuccaggguuuccua

SEQ ID NO: 169508 - RNA, 32 nt, Human
gcauuuuucuuuuaaaagacaaguguaauaga

SEQ ID NO: 169509 - RNA, 20 nt, Human
gcauuuuugcaggagcagua

SEQ ID NO: 169510 - RNA, 32 nt, Human
gcauuuuugugaaaugaaaacauguaauaaaa

SEQ ID NO: 169511 - RNA, 20 nt, Human
gccaaaaaauuuggcacuga

SEQ ID NO: 169512 - RNA, 32 nt, Human
gccaaaaagcugcaggcagaggcguugaggac

SEQ ID NO: 169513 - RNA, 32 nt, Human
gccaaaaaucugagucagcuuagaagaguacu

SEQ ID NO: 169514 - RNA, 32 nt, Human
gccaaaaauuacaccagagagacagaguccuc

SEQ ID NO: 169515 - RNA, 32 nt, Human
gccaaaacagaauuuggggcacagcaucuuuu

SEQ ID NO: 169516 - RNA, 32 nt, Human
gccaaaacaugagcuucaacuccaccuccagc

SEQ ID NO: 169517 - RNA, 32 nt, Human
gccaaaacaugaguuucaacuccaccuccagc

SEQ ID NO: 169518 - RNA, 32 nt, Human
gccaaaacccgccgucaucuaaggcugugggu

SEQ ID NO: 169519 - RNA, 32 nt, Human
gccaaaaccuuugaccagagucuccuugccag

SEQ ID NO: 169520 - RNA, 32 nt, Human
gccaaaacuguccucaggucagccucuccagg

SEQ ID NO: 169521 - RNA, 32 nt, Human
gccaaaagucagggaaaggggcacugaccugu

SEQ ID NO: 169522 - RNA, 21 nt, Human
gccaaaauaauguccacuucu

SEQ ID NO: 169523 - RNA, 32 nt, Human
gccaaaaucucuucucccuucucccuccauca

SEQ ID NO: 169524 - RNA, 20 nt, Human
gccaaaaugaaaccuagcaa

SEQ ID NO: 169525 - RNA, 24 nt, Human
gccaaaaugagacucuccgucggc

SEQ ID NO: 169526 - RNA, 20 nt, Human
gccaaaaugagaucugaagc

SEQ ID NO: 169527 - RNA, 31 nt, Human
gccaaaaugucugucaaugucaaccgcagcg

SEQ ID NO: 169528 - RNA, 32 nt, Human
gccaaaauuaagcugugguuucccucugagua

SEQ ID NO: 169529 - RNA, 32 nt, Human
gccaaaauuguccucaggucagccucuccagg

SEQ ID NO: 169530 - RNA, 20 nt, Human
gccaaacaaauccccuuccu

SEQ ID NO: 169531 - RNA, 23 nt, Human
gccaaacacaccgcccccacccc

SEQ ID NO: 169532 - RNA, 20 nt, Human
gccaaacacauuuacccuuu

SEQ ID NO: 169533 - RNA, 19 nt, Human
gccaaacaccuacccagaa

SEQ ID NO: 169534 - RNA, 32 nt, Human
gccaaacaccucagggcaagggccaggcacag

SEQ ID NO: 169535 - RNA, 32 nt, Human
gccaaacacgugcucacccucacacucgcccc

SEQ ID NO: 169536 - RNA, 18 nt, Human
gccaaacacuccaccucu

SEQ ID NO: 169537 - RNA, 26 nt, Human
gccaaacagaauguaacaccccuccc

SEQ ID NO: 169538 - RNA, 21 nt, Human
gccaaacagaccccccacccc

SEQ ID NO: 169539 - RNA, 32 nt, Human
gccaaacagcacaugacacacgacagccacuu

SEQ ID NO: 169540 - RNA, 32 nt, Human
gccaaacagcagaguggagcugagcuguggac

SEQ ID NO: 169541 - RNA, 24 nt, Human
gccaaacaggcccuccucccuccc

SEQ ID NO: 169542 - RNA, 17 nt, Human
gccaaacauccaccuuu

SEQ ID NO: 169543 - RNA, 18 nt, Human
gccaaacaucucaccuuu

SEQ ID NO: 169544 - RNA, 32 nt, Human
gccaaacauggugaaacccugucuacaaaaau

SEQ ID NO: 169545 - RNA, 17 nt, Human
gccaaacauuucacucu

SEQ ID NO: 169546 - RNA, 32 nt, Human
gccaaacccagcccuucucuaaccacccuacu

SEQ ID NO: 169547 - RNA, 32 nt, Human
gccaaaccucuuuuucugcucauaaaggaggu

SEQ ID NO: 169548 - RNA, 32 nt, Human
gccaaaccuggcugucagcugugugggagcca

SEQ ID NO: 169549 - RNA, 32 nt, Human
gccaaaccuugauccauuuugacauuuguuau

SEQ ID NO: 169550 - RNA, 24 nt, Human
gccaaacgaaguggcucccaugug

SEQ ID NO: 169551 - RNA, 32 nt, Human
gccaaacggauuggagacucaccccgcauucu

SEQ ID NO: 169552 - RNA, 20 nt, Human
gccaaacuagacuacaugga

SEQ ID NO: 169553 - RNA, 32 nt, Human
gccaaacuauuggcugaccaagguuuuuaaau

SEQ ID NO: 169554 - RNA, 32 nt, Human
gccaaacucaugcacacacacgcagacacaca

SEQ ID NO: 169555 - RNA, 32 nt, Human
gccaaacuccaaagaccguugcugaugucuuu

SEQ ID NO: 169556 - RNA, 32 nt, Human
gccaaacucuucugucacuaucaguguccauc

SEQ ID NO: 169557 - RNA, 32 nt, Human
gccaaacugcaaaggcugugguggcugugagg

SEQ ID NO: 169558 - RNA, 32 nt, Human
gccaaacuuaaccuuggugggguuuggauuug

SEQ ID NO: 169559 - RNA, 32 nt, Human
gccaaacuucugccacucacacacugcugagu

SEQ ID NO: 169560 - RNA, 32 nt, Human
gccaaagaccacucagaucauggcagugucug

SEQ ID NO: 169561 - RNA, 32 nt, Human
gccaaagagacugggccuaggccaggaguucc

SEQ ID NO: 169562 - RNA, 32 nt, Human
gccaaagagcaucuaccuuaccuccuaagaag

SEQ ID NO: 169563 - RNA, 32 nt, Human
gccaaagagcccagagggacucuaagaaccua

SEQ ID NO: 169564 - RNA, 32 nt, Human
gccaaagagccucccaccagagccgggaggaa

SEQ ID NO: 169565 - RNA, 32 nt, Human
gccaaagaggaagaagaaaguguuaaaaggaa

SEQ ID NO: 169566 - RNA, 32 nt, Human
gccaaagaggggcaguggguugggguuguuuu

SEQ ID NO: 169567 - RNA, 32 nt, Human
gccaaagaugcugcugcuccuaccucacugcc

SEQ ID NO: 169568 - RNA, 23 nt, Human
gccaaagcagcgcacagggugcg

SEQ ID NO: 169569 - RNA, 24 nt, Human
gccaaagcaggacgaucacuugag

SEQ ID NO: 169570 - RNA, 23 nt, Human
gccaaagcaggagaauugcuuga

SEQ ID NO: 169571 - RNA, 24 nt, Human
gccaaagcaggaggauagcuugag

SEQ ID NO: 169572 - RNA, 24 nt, Human
gccaaagcaggaggaucacuugag

SEQ ID NO: 169573 - RNA, 24 nt, Human
gccaaagcaggaggaucgcuugag

SEQ ID NO: 169574 - RNA, 32 nt, Human
gccaaagcagggaaacagggagguguggacaa

SEQ ID NO: 169575 - RNA, 32 nt, Human
gccaaagcaguucacccaauggacaaacucuu

SEQ ID NO: 169576 - RNA, 32 nt, Human
gccaaagccaagccagccccacccuuaagcuu

SEQ ID NO: 169577 - RNA, 32 nt, Human
gccaaagccagccugugcacagauuccaggau

SEQ ID NO: 169578 - RNA, 32 nt, Human
gccaaagccccagccacucuccuuuacugcag

SEQ ID NO: 169579 - RNA, 22 nt, Human
gccaaagcccccaaggguggca

SEQ ID NO: 169580 - RNA, 32 nt, Human
gccaaagccugcagccuggccugggccuggcc

SEQ ID NO: 169581 - RNA, 32 nt, Human
gccaaagccugcccugagcccagacacaccug

SEQ ID NO: 169582 - RNA, 32 nt, Human
gccaaagcuagcccaaggcuggggaaggggag

SEQ ID NO: 169583 - RNA, 32 nt, Human
gccaaagcugcagccaucagcaccagccaagu

SEQ ID NO: 169584 - RNA, 32 nt, Human
gccaaagcuguuacagagaugacaucuuuugu

SEQ ID NO: 169585 - RNA, 32 nt, Human
gccaaagcuguucacgucugugcucaaccauc

SEQ ID NO: 169586 - RNA, 20 nt, Human
gccaaaggaggcagagccag

SEQ ID NO: 169587 - RNA, 32 nt, Human
gccaaaggagggcugcggcuuccuucccucac

SEQ ID NO: 169588 - RNA, 32 nt, Human
gccaaaggauaugcccugucaugguuucuguu

SEQ ID NO: 169589 - RNA, 32 nt, Human
gccaaaggcaagguacuaggugaccuccuggu

SEQ ID NO: 169590 - RNA, 20 nt, Human
gccaaaggcgguuccacccu

SEQ ID NO: 169591 - RNA, 32 nt, Human
gccaaagggaaagaagaagaacggaaggaaca

SEQ ID NO: 169592 - RNA, 32 nt, Human
gccaaagggaggacacaguagcuuaaaaucac

SEQ ID NO: 169593 - RNA, 32 nt, Human
gccaaagggaugcccuaucugaaggaaagggg

SEQ ID NO: 169594 - RNA, 21 nt, Human
gccaaaggguccgcggcgugg

SEQ ID NO: 169595 - RNA, 32 nt, Human
gccaaagguacaccacuacacuccagccuggg

SEQ ID NO: 169596 - RNA, 32 nt, Human
gccaaagguacgccgggugggguggggugggg

SEQ ID NO: 169597 - RNA, 32 nt, Human
gccaaaggugccaggccuuagagcagacaagg

SEQ ID NO: 169598 - RNA, 32 nt, Human
gccaaaguccucuucaugacauauagagacug

SEQ ID NO: 169599 - RNA, 32 nt, Human
gccaaagugcugcugauucccacucccuuggu

SEQ ID NO: 169600 - RNA, 30 nt, Human
gccaaagugcugggauuacuuuacaggcgu

SEQ ID NO: 169601 - RNA, 32 nt, Human
gccaaagugggagcccaggcagaggaggcacc

SEQ ID NO: 169602 - RNA, 32 nt, Human
gccaaagugggagcccaggcagaggaggcgcc

SEQ ID NO: 169603 - RNA, 24 nt, Human
gccaaagugggaggauugcuugag

SEQ ID NO: 169604 - RNA, 32 nt, Human
gccaaaguguggagaucugauuccuagauuuc

SEQ ID NO: 169605 - RNA, 32 nt, Human
gccaaauaaugucucugugagacucgagaacu

SEQ ID NO: 169606 - RNA, 31 nt, Human
gccaaauacauuuucugacauuguaagauug

SEQ ID NO: 169607 - RNA, 32 nt, Human
gccaaauagugugcuagccauugaggauggag

SEQ ID NO: 169608 - RNA, 18 nt, Human
gccaaauauuccagcccu

SEQ ID NO: 169609 - RNA, 32 nt, Human
gccaaaucacccaagaaagaaaguauaugacg

SEQ ID NO: 169610 - RNA, 22 nt, Human
gccaaaucacuuuuccaucucu

SEQ ID NO: 169611 - RNA, 20 nt, Human
gccaaaucauuucaacugaa

SEQ ID NO: 169612 - RNA, 32 nt, Human
gccaaauccagccugcugccuguuuuuauaua

SEQ ID NO: 169613 - RNA, 32 nt, Human
gccaaaucccuaacugaacacagaugucucag

SEQ ID NO: 169614 - RNA, 32 nt, Human
gccaaauccucuuccucugagaaccagugaaa

SEQ ID NO: 169615 - RNA, 21 nt, Human
gccaaaucgugacaccaugaa

SEQ ID NO: 169616 - RNA, 32 nt, Human
gccaaaucuguagaaucaguuuuugauuaaag

SEQ ID NO: 169617 - RNA, 32 nt, Human
gccaaaucugucucccuucaugggccucccag

SEQ ID NO: 169618 - RNA, 32 nt, Human
gccaaaucugucugcugcucccucuccucagc

SEQ ID NO: 169619 - RNA, 32 nt, Human
gccaaaugaggccuacugauuacuugaggugu

SEQ ID NO: 169620 - RNA, 30 nt, Human
gccaaaugcugggcucaggccugggugcug

SEQ ID NO: 169621 - RNA, 20 nt, Human
gccaaaugcuucccaccucu

SEQ ID NO: 169622 - RNA, 30 nt, Human
gccaaauggaggccacugagccacaggaua

SEQ ID NO: 169623 - RNA, 20 nt, Human
gccaaauggcaacaccacgu

SEQ ID NO: 169624 - RNA, 32 nt, Human
gccaaaugugagagcauugaauaaauaucuua

SEQ ID NO: 169625 - RNA, 32 nt, Human
gccaaauucaaggagcuugcgggaacauuuga

SEQ ID NO: 169626 - RNA, 18 nt, Human
gccaaauucccaguaaca

SEQ ID NO: 169627 - RNA, 32 nt, Human
gccaaauucccugccugugccugcugggacca

SEQ ID NO: 169628 - RNA, 32 nt, Human
gccaaauuguguuugcuuugguuauaguuacu

SEQ ID NO: 169629 - RNA, 32 nt, Human
gccaacaaaagagagcaucucuucucaugaag

SEQ ID NO: 169630 - RNA, 31 nt, Human
gccaacaacaacagaacaggguggagugagu

SEQ ID NO: 169631 - RNA, 32 nt, Human
gccaacaagaaucaguagaagugcugggagca

SEQ ID NO: 169632 - RNA, 20 nt, Human
gccaacaagaccauccagaa

SEQ ID NO: 169633 - RNA, 32 nt, Human
gccaacaagaugaccuauuuugccaauauuca

SEQ ID NO: 169634 - RNA, 32 nt, Human
gccaacaagcaacguuugcaucauguuaucuc

SEQ ID NO: 169635 - RNA, 32 nt, Human
gccaacaagguggagagaaaaauguucuuuug

SEQ ID NO: 169636 - RNA, 21 nt, Human
gccaacacagugaaacccugu

SEQ ID NO: 169637 - RNA, 32 nt, Human
gccaacaccaagcagacauuucagaggauuca

SEQ ID NO: 169638 - RNA, 32 nt, Human
gccaacaccauguacuacccacaaacucccca

SEQ ID NO: 169639 - RNA, 19 nt, Human
gccaacaccuguaauccca

SEQ ID NO: 169640 - RNA, 32 nt, Human
gccaacaccuguaaucccagcaccuugcgagg

SEQ ID NO: 169641 - RNA, 28 nt, Human
gccaacacggcaaaacuccaccucuacu

SEQ ID NO: 169642 - RNA, 32 nt, Human
gccaacacuuguuucugaaacuuuuuacagca

SEQ ID NO: 169643 - RNA, 32 nt, Human
gccaacagaagcacauuugucuuccagaacac

SEQ ID NO: 169644 - RNA, 32 nt, Human
gccaacagaagcuuccauuccaagccugacca

SEQ ID NO: 169645 - RNA, 32 nt, Human
gccaacagaccagcuccucuuccuccggaucc

SEQ ID NO: 169646 - RNA, 32 nt, Human
gccaacagagcugugcccugaggacccggccu

SEQ ID NO: 169647 - RNA, 32 nt, Human
gccaacagccugggagaugagacaggguuaga

SEQ ID NO: 169648 - RNA, 32 nt, Human
gccaacagcuacucuugaacuaugguauuuga

SEQ ID NO: 169649 - RNA, 32 nt, Human
gccaacagcugaagccgagcacagaccucccu

SEQ ID NO: 169650 - RNA, 32 nt, Human
gccaacagcuucuuucuaauguucugugaaaa

SEQ ID NO: 169651 - RNA, 32 nt, Human
gccaacaggagagagacagugagugaaaggag

SEQ ID NO: 169652 - RNA, 32 nt, Human
gccaacaguccaggccaugacaagcuggcacc

SEQ ID NO: 169653 - RNA, 32 nt, Human
gccaacaguuugaaugguaagacaacauaaua

SEQ ID NO: 169654 - RNA, 21 nt, Human
gccaacauagugaaacccugu

SEQ ID NO: 169655 - RNA, 32 nt, Human
gccaacauccaccuggccuaugcccccaccag

SEQ ID NO: 169656 - RNA, 32 nt, Human
gccaacaugaggcucucugcugccuuuuguuu

SEQ ID NO: 169657 - RNA, 21 nt, Human
gccaacaugauaaaaccccgu

SEQ ID NO: 169658 - RNA, 24 nt, Human
gccaacaugaugaaaccccaugug

SEQ ID NO: 169659 - RNA, 32 nt, Human
gccaacaugaugaaacccuguucucuacuaaa

SEQ ID NO: 169660 - RNA, 32 nt, Human
gccaacaugcugagcaugcucacaaagaaggc

SEQ ID NO: 169661 - RNA, 32 nt, Human
gccaacauggcagaaaccccaucucuacuaaa

SEQ ID NO: 169662 - RNA, 19 nt, Human
gccaacauggugaaacccc

SEQ ID NO: 169663 - RNA, 32 nt, Human
gccaacauggugaaacccccaucucuacuaaa

SEQ ID NO: 169664 - RNA, 32 nt, Human
gccaacauggugaaacccccaucucuccuggg

SEQ ID NO: 169665 - RNA, 21 nt, Human
gccaacauggugaaaccccgu

SEQ ID NO: 169666 - RNA, 32 nt, Human
gccaacauggugugagaccccgucucuacuaa

SEQ ID NO: 169667 - RNA, 21 nt, Human
gccaacaugugucugaaccug

SEQ ID NO: 169668 - RNA, 32 nt, Human
gccaacauuugcuucaaguuccugggccugcu

SEQ ID NO: 169669 - RNA, 32 nt, Human
gccaaccaacuugcuguauacaccuuggacaa

SEQ ID NO: 169670 - RNA, 32 nt, Human
gccaaccacaucucccugcuguguccccuggg

SEQ ID NO: 169671 - RNA, 32 nt, Human
gccaaccaccacucucccgccugguguagcuu

SEQ ID NO: 169672 - RNA, 32 nt, Human
gccaaccacugaccuuguaucuucaucaucag

SEQ ID NO: 169673 - RNA, 20 nt, Human
gccaaccaucaguauuuucc

SEQ ID NO: 169674 - RNA, 32 nt, Human
gccaaccaugaccgccgccaguaugggccccg

SEQ ID NO: 169675 - RNA, 32 nt, Human
gccaaccaugccagugccugggaugagggcac

SEQ ID NO: 169676 - RNA, 32 nt, Human
gccaacccagccuggucaacauggugaaaccc

SEQ ID NO: 169677 - RNA, 19 nt, Human
gccaacccaguagcccccu

SEQ ID NO: 169678 - RNA, 32 nt, Human
gccaacccaugagcuucacccaggaagagggc

SEQ ID NO: 169679 - RNA, 32 nt, Human
gccaaccccacaccccuccacuuccagucgcu

SEQ ID NO: 169680 - RNA, 21 nt, Human
gccaaccccagcguccccccu

SEQ ID NO: 169681 - RNA, 32 nt, Human
gccaaccccugccccuugccccacacagacca

SEQ ID NO: 169682 - RNA, 32 nt, Human
gccaacccuaaaggauuguccucuuggccagc

SEQ ID NO: 169683 - RNA, 32 nt, Human
gccaacccugagcgagccuguccucuguggca

SEQ ID NO: 169684 - RNA, 32 nt, Human
gccaacccugcaggaaagugguuuauaggcca

SEQ ID NO: 169685 - RNA, 25 nt, Human
gccaacccuucaaugccugcuccug

SEQ ID NO: 169686 - RNA, 32 nt, Human
gccaacccuucaaugccugcuccuggaagucu

SEQ ID NO: 169687 - RNA, 32 nt, Human
gccaacccuucccauaacugguugccucggag

SEQ ID NO: 169688 - RNA, 18 nt, Human
gccaaccgccacccagag

SEQ ID NO: 169689 - RNA, 32 nt, Human
gccaaccuacaauacuacgccuaggcacacag

SEQ ID NO: 169690 - RNA, 32 nt, Human
gccaaccuacagccaugaucuuuagcacagug

SEQ ID NO: 169691 - RNA, 32 nt, Human
gccaaccucacacugcuaugauugccaacucc

SEQ ID NO: 169692 - RNA, 32 nt, Human
gccaaccucuucagcauaaagcuccugcccaa

SEQ ID NO: 169693 - RNA, 32 nt, Human
gccaaccugaccccuucccuccaggagccagg

SEQ ID NO: 169694 - RNA, 18 nt, Human
gccaaccugccccucccu

SEQ ID NO: 169695 - RNA, 32 nt, Human
gccaaccuggggagccagggcuaugggagcag

SEQ ID NO: 169696 - RNA, 32 nt, Human
gccaaccugggucacauagcaagacucuguuu

SEQ ID NO: 169697 - RNA, 32 nt, Human
gccaacgauuuucuuuacuaccaugcuccuuc

SEQ ID NO: 169698 - RNA, 32 nt, Human
gccaacgccaggcugcuauuuaucucccuauc

SEQ ID NO: 169699 - RNA, 16 nt, Human
gccaacggacccgggg

SEQ ID NO: 169700 - RNA, 32 nt, Human
gccaacggggacacccuccgugucuucaagau

SEQ ID NO: 169701 - RNA, 32 nt, Human
gccaacuaugagaauccagcugccuucuauua

SEQ ID NO: 169702 - RNA, 32 nt, Human
gccaacucauccucugcccccaccucgaaacc

SEQ ID NO: 169703 - RNA, 32 nt, Human
gccaacucauugcuuucugcugugcugugauc

SEQ ID NO: 169704 - RNA, 32 nt, Human
gccaacuccaucaagguggagauguacagcga

SEQ ID NO: 169705 - RNA, 22 nt, Human
gccaacuccaucuucaauaaag

SEQ ID NO: 169706 - RNA, 32 nt, Human
gccaacuccugccucgugccaccucaugcuua

SEQ ID NO: 169707 - RNA, 18 nt, Human
gccaacuccugggcucaa

SEQ ID NO: 169708 - RNA, 32 nt, Human
gccaacucuccccucaaaaucauugucaaaga

SEQ ID NO: 169709 - RNA, 32 nt, Human
gccaacugcacucuggaggcggcggcagccag

SEQ ID NO: 169710 - RNA, 32 nt, Human
gccaacugccuagucagucccaaugagagaac

SEQ ID NO: 169711 - RNA, 32 nt, Human
gccaacugcgagcugcuccacuucucagcucu

SEQ ID NO: 169712 - RNA, 32 nt, Human
gccaacugcucacucgcucaccucccuccuug

SEQ ID NO: 169713 - RNA, 32 nt, Human
gccaacuggagcugauauucgggaagcuaagc

SEQ ID NO: 169714 - RNA, 32 nt, Human
gccaacuggcugcggccaucacagcugcgugc

SEQ ID NO: 169715 - RNA, 17 nt, Human
gccaacuguccaccucu

SEQ ID NO: 169716 - RNA, 32 nt, Human
gccaacugugacuuccccagaaaggagccagc

SEQ ID NO: 169717 - RNA, 32 nt, Human
gccaacuguguggcagaacgugcagugagggu

SEQ ID NO: 169718 - RNA, 32 nt, Human
gccaacugugugugcagguacuguguguaccu

SEQ ID NO: 169719 - RNA, 32 nt, Human
gccaacuucaacaaaaagaaacuugacuaaga

SEQ ID NO: 169720 - RNA, 32 nt, Human
gccaacuucagagccugucaccaggaaaggua

SEQ ID NO: 169721 - RNA, 32 nt, Human
gccaacuucucccaccccuuggccccucacau

SEQ ID NO: 169722 - RNA, 32 nt, Human
gccaagaaaaaugaaggcccugcauguuuuuc

SEQ ID NO: 169723 - RNA, 32 nt, Human
gccaagaaacaacacugaguuccagauuucgg

SEQ ID NO: 169724 - RNA, 32 nt, Human
gccaagaaagagagaagaugagagggaauggu

SEQ ID NO: 169725 - RNA, 19 nt, Human
gccaagaaaggugggccuc

SEQ ID NO: 169726 - RNA, 32 nt, Human
gccaagaaaugagacgaauguuugggguuuau

SEQ ID NO: 169727 - RNA, 32 nt, Human
gccaagaaccuucuggcucugagggagcaaga

SEQ ID NO: 169728 - RNA, 32 nt, Human
gccaagaacucaaguguaacugugauaaaaua

SEQ ID NO: 169729 - RNA, 32 nt, Human
gccaagaagaaagugugagaaguugaugggca

SEQ ID NO: 169730 - RNA, 32 nt, Human
gccaagaagagaggccucaccagacaccaaac

SEQ ID NO: 169731 - RNA, 32 nt, Human
gccaagaagagcugaaauagaaaacagccuag

SEQ ID NO: 169732 - RNA, 32 nt, Human
gccaagaagggagaguuucgugcacugugguu

SEQ ID NO: 169733 - RNA, 32 nt, Human
gccaagaagggccagggugaggguggggcugg

SEQ ID NO: 169734 - RNA, 22 nt, Human
gccaagaaguaguggcuccaag

SEQ ID NO: 169735 - RNA, 32 nt, Human
gccaagaaguaguggcuccaagaacugaaugc

SEQ ID NO: 169736 - RNA, 32 nt, Human
gccaagacaccagaugccaaagcugcccccac

SEQ ID NO: 169737 - RNA, 25 nt, Human
gccaagacaccauugucucccuuua

SEQ ID NO: 169738 - RNA, 22 nt, Human
gccaagacaggaggaucacuuu

SEQ ID NO: 169739 - RNA, 25 nt, Human
gccaagacagguagaucacuugaga

SEQ ID NO: 169740 - RNA, 32 nt, Human
gccaagaccagucugcaaacuccaucccgccg

SEQ ID NO: 169741 - RNA, 32 nt, Human
gccaagaccaucucucccuccuggugaagugu

SEQ ID NO: 169742 - RNA, 30 nt, Human
gccaagaccccuggccacccagacccccca

SEQ ID NO: 169743 - RNA, 32 nt, Human
gccaagacccuccauccaagcagggcuggauc

SEQ ID NO: 169744 - RNA, 32 nt, Human
gccaagacccucccauugcaggggaggcgggg

SEQ ID NO: 169745 - RNA, 32 nt, Human
gccaagacccuccccuggugggacguugaagc

SEQ ID NO: 169746 - RNA, 32 nt, Human
gccaagacccuggcccucuccucugcccagcc

SEQ ID NO: 169747 - RNA, 32 nt, Human
gccaagaccuucgcuugugaugacuuuugaag

SEQ ID NO: 169748 - RNA, 32 nt, Human
gccaagacgccauugcaccccagccugggcaa

SEQ ID NO: 169749 - RNA, 32 nt, Human
gccaagacucuguucugaaucuaccuccucua

SEQ ID NO: 169750 - RNA, 32 nt, Human
gccaagacugugccacugcacuccagccuggg

SEQ ID NO: 169751 - RNA, 32 nt, Human
gccaagagaagaucgaauggcuuuuugcagcu

SEQ ID NO: 169752 - RNA, 22 nt, Human
gccaagagacagagcuguccug

SEQ ID NO: 169753 - RNA, 17 nt, Human
gccaagagacuggcaua

SEQ ID NO: 169754 - RNA, 32 nt, Human
gccaagagcccaugaauggaggcugcaggagg

SEQ ID NO: 169755 - RNA, 32 nt, Human
gccaagagccugagugacagagcaagacccca

SEQ ID NO: 169756 - RNA, 21 nt, Human
gccaagagcucugucucccuc

SEQ ID NO: 169757 - RNA, 21 nt, Human
gccaagaggcacccccuuccc

SEQ ID NO: 169758 - RNA, 32 nt, Human
gccaagagucucaucccuacccuggggcaccu

SEQ ID NO: 169759 - RNA, 32 nt, Human
gccaagagugaagggaagagacagcccaggau

SEQ ID NO: 169760 - RNA, 32 nt, Human
gccaagagugucccucugagacccuugggaag

SEQ ID NO: 169761 - RNA, 17 nt, Human
gccaagaucccaucucu

SEQ ID NO: 169762 - RNA, 32 nt, Human
gccaagaucccucccagcguccacaucguccu

SEQ ID NO: 169763 - RNA, 32 nt, Human
gccaagaucgacaucaugccacccugggcaaa

SEQ ID NO: 169764 - RNA, 22 nt, Human
gccaagaucgcaccacugcacu

SEQ ID NO: 169765 - RNA, 21 nt, Human
gccaagaucgcaccacugcuc

SEQ ID NO: 169766 - RNA, 22 nt, Human
gccaagaucgccccacugcacu

SEQ ID NO: 169767 - RNA, 32 nt, Human
gccaagaugcacugcaccccagccugggcgac

SEQ ID NO: 169768 - RNA, 32 nt, Human
gccaagaugccacccaaauccacucugcaguc

SEQ ID NO: 169769 - RNA, 32 nt, Human
gccaagauggcagaggauggaggcuccuucau

SEQ ID NO: 169770 - RNA, 32 nt, Human
gccaagauugugccacugcacuccagccugag

SEQ ID NO: 169771 - RNA, 32 nt, Human
gccaagauugugccacugcacuccagccuggg

SEQ ID NO: 169772 - RNA, 32 nt, Human
gccaagauugugccacuguacuccagccuggg

SEQ ID NO: 169773 - RNA, 32 nt, Human
gccaagauugugccacuguauuccaacuuggg

SEQ ID NO: 169774 - RNA, 32 nt, Human
gccaagauugugccacuguauuccagacuggg

SEQ ID NO: 169775 - RNA, 32 nt, Human
gccaagcacaaucagguggaggcugcauggcu

SEQ ID NO: 169776 - RNA, 32 nt, Human
gccaagcacacagcaggaccagggacaucagc

SEQ ID NO: 169777 - RNA, 18 nt, Human
gccaagcacauguuuccu

SEQ ID NO: 169778 - RNA, 21 nt, Human
gccaagcacgcagaucccaug

SEQ ID NO: 169779 - RNA, 32 nt, Human
gccaagcacgccagcucucagcagguuuucug

SEQ ID NO: 169780 - RNA, 32 nt, Human
gccaagcacuuauggaccagaguggcccaggc

SEQ ID NO: 169781 - RNA, 22 nt, Human
gccaagcagagcccccucuccc

SEQ ID NO: 169782 - RNA, 32 nt, Human
gccaagcagcagagcuaguagaaggggaugca

SEQ ID NO: 169783 - RNA, 18 nt, Human
gccaagcagcaugcucag

SEQ ID NO: 169784 - RNA, 32 nt, Human
gccaagcagccagcagccuagcagccagucag

SEQ ID NO: 169785 - RNA, 32 nt, Human
gccaagcaggggagaggaaugaggggagcagc

SEQ ID NO: 169786 - RNA, 32 nt, Human
gccaagcaggguggggaauggaggauagacau

SEQ ID NO: 169787 - RNA, 18 nt, Human
gccaagcauauccaucuc

SEQ ID NO: 169788 - RNA, 32 nt, Human
gccaagcauggcagggggaaggucagugggug

SEQ ID NO: 169789 - RNA, 18 nt, Human
gccaagccaaggugggca

SEQ ID NO: 169790 - RNA, 32 nt, Human
gccaagccaccugcaucccccgccccagaucu

SEQ ID NO: 169791 - RNA, 20 nt, Human
gccaagccagggacuaagca

SEQ ID NO: 169792 - RNA, 32 nt, Human
gccaagccagugugggggagccuggaaaauga

SEQ ID NO: 169793 - RNA, 32 nt, Human
gccaagccauaucuaacagaacuaucuucaac

SEQ ID NO: 169794 - RNA, 32 nt, Human
gccaagcccaccacuuccaccugggcccuaca

SEQ ID NO: 169795 - RNA, 22 nt, Human
gccaagcccacccggggugcag

SEQ ID NO: 169796 - RNA, 18 nt, Human
gccaagcccacggccaug

SEQ ID NO: 169797 - RNA, 32 nt, Human
gccaagcccagccugagccagcaccugccuuu

SEQ ID NO: 169798 - RNA, 32 nt, Human
gccaagcccagccugagccagcacuugccuuu

SEQ ID NO: 169799 - RNA, 32 nt, Human
gccaagcccagcgcaacaaaggaaaacuacga

SEQ ID NO: 169800 - RNA, 32 nt, Human
gccaagcccaggcaucaggaggcuguuaugau

SEQ ID NO: 169801 - RNA, 16 nt, Human
gccaagcccaugccca

SEQ ID NO: 169802 - RNA, 19 nt, Human
gccaagccccaguacuugg

SEQ ID NO: 169803 - RNA, 23 nt, Human
gccaagcccuccccaucccaugu

SEQ ID NO: 169804 - RNA, 32 nt, Human
gccaagcccugaguggccacugccaagcugcg

SEQ ID NO: 169805 - RNA, 20 nt, Human
gccaagcccuguucucggug

SEQ ID NO: 169806 - RNA, 20 nt, Human
gccaagccggaggcccgagg

SEQ ID NO: 169807 - RNA, 21 nt, Human
gccaagccgguccuccuuccc

SEQ ID NO: 169808 - RNA, 32 nt, Human
gccaagccuccuccaucucccaucagugcugu

SEQ ID NO: 169809 - RNA, 32 nt, Human
gccaagccucuccacuccuuccacuuuuucug

SEQ ID NO: 169810 - RNA, 22 nt, Human
gccaagccugacacauuugaca

SEQ ID NO: 169811 - RNA, 32 nt, Human
gccaagccuggggcugggucuuggggaccugu

SEQ ID NO: 169812 - RNA, 32 nt, Human
gccaagcgcaucgggagcacaccagaaaccgg

SEQ ID NO: 169813 - RNA, 32 nt, Human
gccaagcgcaugaaccuucagaccauggugga

SEQ ID NO: 169814 - RNA, 32 nt, Human
gccaagcgccagccaccacggcccuccggaca

SEQ ID NO: 169815 - RNA, 21 nt, Human
gccaagcgcgcccccaccucu

SEQ ID NO: 169816 - RNA, 32 nt, Human
gccaagcggaggcugcagcccgggccgcgaug

SEQ ID NO: 169817 - RNA, 32 nt, Human
gccaagcuaccugaaauuggaauaagggggug

SEQ ID NO: 169818 - RNA, 32 nt, Human
gccaagcuagugggcuucaggugcaaggguac

SEQ ID NO: 169819 - RNA, 32 nt, Human
gccaagcucccuggagcccuguuggcagcucu

SEQ ID NO: 169820 - RNA, 32 nt, Human
gccaagcucugagcucugcucccagggagcac

SEQ ID NO: 169821 - RNA, 32 nt, Human
gccaagcugagccuggccaagcuagguggaca

SEQ ID NO: 169822 - RNA, 32 nt, Human
gccaagcugcagcugcagacucggcggcccuc

SEQ ID NO: 169823 - RNA, 32 nt, Human
gccaagcuggccgagguugcaguccaugagcu

SEQ ID NO: 169824 - RNA, 32 nt, Human
gccaagcuuaucaguugacucucuccagaaua

SEQ ID NO: 169825 - RNA, 21 nt, Human
gccaagcuucugguucccaug

SEQ ID NO: 169826 - RNA, 32 nt, Human
gccaaggacuccuuccgcugggccacagggga

SEQ ID NO: 169827 - RNA, 23 nt, Human
gccaaggacuggccugugcacug

SEQ ID NO: 169828 - RNA, 32 nt, Human
gccaaggagagaggcuccugaagaaaccggcc

SEQ ID NO: 169829 - RNA, 32 nt, Human
gccaaggagcggagcgcgcucagcugcgccca

SEQ ID NO: 169830 - RNA, 32 nt, Human
gccaaggagcggagggaguugaacuugucaaa

SEQ ID NO: 169831 - RNA, 32 nt, Human
gccaaggaggcagcaggggccagcaaggcccu

SEQ ID NO: 169832 - RNA, 32 nt, Human
gccaaggaggcugugcagcccgaggcucucaa

SEQ ID NO: 169833 - RNA, 32 nt, Human
gccaaggaggggccugaggcucucccuacucc

SEQ ID NO: 169834 - RNA, 24 nt, Human
gccaaggcaaaaggaucgcuugag

SEQ ID NO: 169835 - RNA, 24 nt, Human
gccaaggcaaaaggauugcuugag

SEQ ID NO: 169836 - RNA, 32 nt, Human
gccaaggcacugauguuugaacuggaaacuuc

SEQ ID NO: 169837 - RNA, 21 nt, Human
gccaaggcagccaccccgggg

SEQ ID NO: 169838 - RNA, 22 nt, Human
gccaaggcagcucuucuggagu

SEQ ID NO: 169839 - RNA, 24 nt, Human
gccaaggcaggagaagcgcuugag

SEQ ID NO: 169840 - RNA, 23 nt, Human
gccaaggcaggagaaucgcuuga

SEQ ID NO: 169841 - RNA, 24 nt, Human
gccaaggcaggagaaucgcuuuag

SEQ ID NO: 169842 - RNA, 24 nt, Human
gccaaggcaggagaauugcuugag

SEQ ID NO: 169843 - RNA, 24 nt, Human
gccaaggcaggaggaccgcuugag

SEQ ID NO: 169844 - RNA, 24 nt, Human
gccaaggcaggaggacugcuugag

SEQ ID NO: 169845 - RNA, 24 nt, Human
gccaaggcaggaggaucacuugag

SEQ ID NO: 169846 - RNA, 24 nt, Human
gccaaggcaggaggaucgcuggag

SEQ ID NO: 169847 - RNA, 24 nt, Human
gccaaggcaggaggaucgcuugag

SEQ ID NO: 169848 - RNA, 24 nt, Human
gccaaggcaggaggaucguuugag

SEQ ID NO: 169849 - RNA, 24 nt, Human
gccaaggcaggaggaucucuugag

SEQ ID NO: 169850 - RNA, 24 nt, Human
gccaaggcaggaggauggcuugag

SEQ ID NO: 169851 - RNA, 24 nt, Human
gccaaggcaggaggauugcuugag

SEQ ID NO: 169852 - RNA, 25 nt, Human
gccaaggcaggcagaucacuugagg

SEQ ID NO: 169853 - RNA, 24 nt, Human
gccaaggcaggcagaucgcuugag

SEQ ID NO: 169854 - RNA, 19 nt, Human
gccaaggcaggcggaucac

SEQ ID NO: 169855 - RNA, 32 nt, Human
gccaaggcaggcggaucacgaagucaggagau

SEQ ID NO: 169856 - RNA, 32 nt, Human
gccaaggcaggcggaucacgaggucaggagau

SEQ ID NO: 169857 - RNA, 32 nt, Human
gccaaggcaggcggaucacgaggucaggaguu

SEQ ID NO: 169858 - RNA, 20 nt, Human
gccaaggcaggcuggaucac

SEQ ID NO: 169859 - RNA, 19 nt, Human
gccaaggcagguggaucgc

SEQ ID NO: 169860 - RNA, 24 nt, Human
gccaaggcagguggaucgcuugag

SEQ ID NO: 169861 - RNA, 32 nt, Human
gccaaggcagugaaauagaguggaugguacuu

SEQ ID NO: 169862 - RNA, 32 nt, Human
gccaaggccacaucugggaagaguggagaaau

SEQ ID NO: 169863 - RNA, 32 nt, Human
gccaaggccagaggauugcuugagucuagcag

SEQ ID NO: 169864 - RNA, 32 nt, Human
gccaaggccccaggcucagagcacucacacgc

SEQ ID NO: 169865 - RNA, 23 nt, Human
gccaaggccuggccggggcucgg

SEQ ID NO: 169866 - RNA, 32 nt, Human
gccaaggcgcuuuggggguggaggggguggug

SEQ ID NO: 169867 - RNA, 24 nt, Human
gccaaggcgggaggaucacuugag

SEQ ID NO: 169868 - RNA, 24 nt, Human
gccaaggcgggaggaucgcuugag

SEQ ID NO: 169869 - RNA, 24 nt, Human
gccaaggcgggaggauggcuugag

SEQ ID NO: 169870 - RNA, 24 nt, Human
gccaaggcgggaggauugcuugag

SEQ ID NO: 169871 - RNA, 25 nt, Human
gccaaggcgggcagaucacuugaga

SEQ ID NO: 169872 - RNA, 24 nt, Human
gccaaggcgggcagaucgcuugag

SEQ ID NO: 169873 - RNA, 31 nt, Human
gccaaggcgguggguuccaugccacaggcag

SEQ ID NO: 169874 - RNA, 23 nt, Human
gccaaggcugcagggagcaccac

SEQ ID NO: 169875 - RNA, 21 nt, Human
gccaaggcuggaaugcagugg

SEQ ID NO: 169876 - RNA, 19 nt, Human
gccaaggcuggagugcagu

SEQ ID NO: 169877 - RNA, 20 nt, Human
gccaaggcuggagugcagug

SEQ ID NO: 169878 - RNA, 21 nt, Human
gccaaggcuggagugcagugg

SEQ ID NO: 169879 - RNA, 23 nt, Human
gccaaggcuggagugcaguggug

SEQ ID NO: 169880 - RNA, 24 nt, Human
gccaaggcuggagugcaguggugu

SEQ ID NO: 169881 - RNA, 32 nt, Human
gccaaggcuuacugaggcugguggagggagcc

SEQ ID NO: 169882 - RNA, 32 nt, Human
gccaaggcuuccagggucuggugcagggacga

SEQ ID NO: 169883 - RNA, 32 nt, Human
gccaaggcuuggggcuuccacucugaagccac

SEQ ID NO: 169884 - RNA, 32 nt, Human
gccaagggaagagagacaggcuaggaguugac

SEQ ID NO: 169885 - RNA, 32 nt, Human
gccaagggacugaugguggacacuccagaugu

SEQ ID NO: 169886 - RNA, 32 nt, Human
gccaagggagccaaacacacuagauuucuguu

SEQ ID NO: 169887 - RNA, 32 nt, Human
gccaagggagcuuguugaugugggucacacgg

SEQ ID NO: 169888 - RNA, 32 nt, Human
gccaagggcaagugcuagaguugcagugaauu

SEQ ID NO: 169889 - RNA, 32 nt, Human
gccaagggccacgggaacuuggagagggagcu

SEQ ID NO: 169890 - RNA, 32 nt, Human
gccaagggcuuuuccccucugagcucugggag

SEQ ID NO: 169891 - RNA, 21 nt, Human
gccaaggggccgcgggcucag

SEQ ID NO: 169892 - RNA, 32 nt, Human
gccaagggggacccccagaaaaagguauggag

SEQ ID NO: 169893 - RNA, 32 nt, Human
gccaagggggcagagggcuuucagcgccccca

SEQ ID NO: 169894 - RNA, 32 nt, Human
gccaaggguccaggcugcuuuaggccaucugu

SEQ ID NO: 169895 - RNA, 18 nt, Human
gccaagggugaaggcccc

SEQ ID NO: 169896 - RNA, 32 nt, Human
gccaaggguuguucgccaggguaggauguguc

SEQ ID NO: 169897 - RNA, 24 nt, Human
gccaagguaagaggaucgcuugag

SEQ ID NO: 169898 - RNA, 24 nt, Human
gccaagguaagaggauugcuugag

SEQ ID NO: 169899 - RNA, 22 nt, Human
gccaagguagacuaggaagagu

SEQ ID NO: 169900 - RNA, 24 nt, Human
gccaagguaggaggaucacuugag

SEQ ID NO: 169901 - RNA, 24 nt, Human
gccaagguaggaggaucgcuugag

SEQ ID NO: 169902 - RNA, 24 nt, Human
gccaagguaggaggauggcuugag

SEQ ID NO: 169903 - RNA, 23 nt, Human
gccaagguaggaggauugcuuga

SEQ ID NO: 169904 - RNA, 24 nt, Human
gccaagguaggaggauugcuugag

SEQ ID NO: 169905 - RNA, 32 nt, Human
gccaagguagguggauaccugaggucaggagu

SEQ ID NO: 169906 - RNA, 32 nt, Human
gccaagguaugacaauuaaugguucugcauga

SEQ ID NO: 169907 - RNA, 32 nt, Human
gccaaggucauaccagugcacuccaggcgggu

SEQ ID NO: 169908 - RNA, 16 nt, Human
gccaaggucccucagg

SEQ ID NO: 169909 - RNA, 32 nt, Human
gccaagguccugcaugggccugggugaccccu

SEQ ID NO: 169910 - RNA, 32 nt, Human
gccaaggucucggaggccaggaugccugcccu

SEQ ID NO: 169911 - RNA, 19 nt, Human
gccaaggugaccuuggagg

SEQ ID NO: 169912 - RNA, 32 nt, Human
gccaaggugagcccaaggugggaggaucacuu

SEQ ID NO: 169913 - RNA, 19 nt, Human
gccaagguggcagagcuag

SEQ ID NO: 169914 - RNA, 21 nt, Human
gccaagguggccaaggcccuc

SEQ ID NO: 169915 - RNA, 24 nt, Human
gccaaggugggaggaucgcuugag

SEQ ID NO: 169916 - RNA, 24 nt, Human
gccaaggugggaggauugcuugag

SEQ ID NO: 169917 - RNA, 24 nt, Human
gccaaggugggaguaucgcuugag

SEQ ID NO: 169918 - RNA, 32 nt, Human
gccaaggugggcaaucauuugaggucaggagu

SEQ ID NO: 169919 - RNA, 32 nt, Human
gccaaggugggucgaucacugaggucaggagu

SEQ ID NO: 169920 - RNA, 25 nt, Human
gccaagguggguggaccacaugagg

SEQ ID NO: 169921 - RNA, 32 nt, Human
gccaagguguacaugcagcuacucgggaggcu

SEQ ID NO: 169922 - RNA, 32 nt, Human
gccaaggugugggcgcaucuagggcaggucuu

SEQ ID NO: 169923 - RNA, 19 nt, Human
gccaaggugugucccggga

SEQ ID NO: 169924 - RNA, 19 nt, Human
gccaagguugauccacuua

SEQ ID NO: 169925 - RNA, 32 nt, Human
gccaagguugcgccacugcacuccagccuggg

SEQ ID NO: 169926 - RNA, 32 nt, Human
gccaaguacaucucuguaacccagcuggcccc

SEQ ID NO: 169927 - RNA, 19 nt, Human
gccaaguaccugcucacca

SEQ ID NO: 169928 - RNA, 32 nt, Human
gccaaguaccuuuucagcuuuuuaacugcccc

SEQ ID NO: 169929 - RNA, 32 nt, Human
gccaaguauagagagaauagugaaaaauuaau

SEQ ID NO: 169930 - RNA, 32 nt, Human
gccaaguauauacucuucuuuacauggugaug

SEQ ID NO: 169931 - RNA, 24 nt, Human
gccaaguaucagauugagggcuua

SEQ ID NO: 169932 - RNA, 18 nt, Human
gccaagucacuucaccuc

SEQ ID NO: 169933 - RNA, 19 nt, Human
gccaagucagagaagaaac

SEQ ID NO: 169934 - RNA, 22 nt, Human
gccaagucauccucccaccuca

SEQ ID NO: 169935 - RNA, 19 nt, Human
gccaaguccccacugacca

SEQ ID NO: 169936 - RNA, 18 nt, Human
gccaaguccccuccccaa

SEQ ID NO: 169937 - RNA, 32 nt, Human
gccaaguccgcagaagcccugauguguccuca

SEQ ID NO: 169938 - RNA, 20 nt, Human
gccaaguccucaguuuccaa

SEQ ID NO: 169939 - RNA, 32 nt, Human
gccaaguccugcggcucccuggggcugagauc

SEQ ID NO: 169940 - RNA, 18 nt, Human
gccaagucuacaaugucc

SEQ ID NO: 169941 - RNA, 21 nt, Human
gccaagucucccaauauccaa

SEQ ID NO: 169942 - RNA, 19 nt, Human
gccaagucucggcccucca

SEQ ID NO: 169943 - RNA, 20 nt, Human
gccaagucugugccccccaa

SEQ ID NO: 169944 - RNA, 22 nt, Human
gccaagugaaggacccccuccc

SEQ ID NO: 169945 - RNA, 32 nt, Human
gccaagugauuguaagucaggagacuuuccuu

SEQ ID NO: 169946 - RNA, 32 nt, Human
gccaagugcaggaggcccaguguggagaaggg

SEQ ID NO: 169947 - RNA, 32 nt, Human
gccaagugccauuuggggucagcauccucguu

SEQ ID NO: 169948 - RNA, 32 nt, Human
gccaagugccugcuuaguagcuuuggaaaggu

SEQ ID NO: 169949 - RNA, 24 nt, Human
gccaagugcucacacacaaccuca

SEQ ID NO: 169950 - RNA, 32 nt, Human
gccaagugcuucugaauaaagaucccucucug

SEQ ID NO: 169951 - RNA, 32 nt, Human
gccaaguggaaagagaaagguagaagagaaga

SEQ ID NO: 169952 - RNA, 32 nt, Human
gccaaguggaggaagcgggagaagugcugggg

SEQ ID NO: 169953 - RNA, 18 nt, Human
gccaaguggcauauccag

SEQ ID NO: 169954 - RNA, 32 nt, Human
gccaagugggcaagcuuccagcagcagucugg

SEQ ID NO: 169955 - RNA, 32 nt, Human
gccaagugggcccagcccuggcuccugcgccc

SEQ ID NO: 169956 - RNA, 22 nt, Human
gccaaguggggccagggccaag

SEQ ID NO: 169957 - RNA, 32 nt, Human
gccaaguguccugcuugguuuagcugugcaga

SEQ ID NO: 169958 - RNA, 32 nt, Human
gccaagugugacugagcagugugcagagagug

SEQ ID NO: 169959 - RNA, 32 nt, Human
gccaaguguuagagucaggaaacccauugagg

SEQ ID NO: 169960 - RNA, 32 nt, Human
gccaaguuccaggugucuguguucccaggaac

SEQ ID NO: 169961 - RNA, 32 nt, Human
gccaaguucgcuccuggugaucacucgaaugc

SEQ ID NO: 169962 - RNA, 32 nt, Human
gccaaguugcaaccucuuucauucuagaaacu

SEQ ID NO: 169963 - RNA, 32 nt, Human
gccaaguugccuuacagagccaggacagcuuc

SEQ ID NO: 169964 - RNA, 19 nt, Human
gccaaguuggagugcaaug

SEQ ID NO: 169965 - RNA, 32 nt, Human
gccaaguuucaaggacugucuuugagucuguc

SEQ ID NO: 169966 - RNA, 32 nt, Human
gccaauaacaugacaggagcugggacugguuu

SEQ ID NO: 169967 - RNA, 32 nt, Human
gccaauaaccacaaaaugaucaguaaugagaa

SEQ ID NO: 169968 - RNA, 32 nt, Human
gccaauaacccacauaugcccaaaaggagcuu

SEQ ID NO: 169969 - RNA, 18 nt, Human
gccaauaccuggcugcug

SEQ ID NO: 169970 - RNA, 32 nt, Human
gccaauaccuggcugcugucuuaacucguagu

SEQ ID NO: 169971 - RNA, 32 nt, Human
gccaauaccuugauugcaaccuggugagagau

SEQ ID NO: 169972 - RNA, 32 nt, Human
gccaauacguucuaccgagagcacuuuggaau

SEQ ID NO: 169973 - RNA, 24 nt, Human
gccaauacugugaacccccuuccc

SEQ ID NO: 169974 - RNA, 32 nt, Human
gccaauagaagagacaggagacaggaagccuu

SEQ ID NO: 169975 - RNA, 32 nt, Human
gccaauagcacccauuaaaagaaauaccuaaa

SEQ ID NO: 169976 - RNA, 32 nt, Human
gccaauagggcucagacugagaaacauugagu

SEQ ID NO: 169977 - RNA, 20 nt, Human
gccaauagugccgaggucag

SEQ ID NO: 169978 - RNA, 19 nt, Human
gccaauauaaagaggaaac

SEQ ID NO: 169979 - RNA, 32 nt, Human
gccaauauagugggacccccaucucuacaaaa

SEQ ID NO: 169980 - RNA, 32 nt, Human
gccaauaucccaccaucaccucaaacccaauc

SEQ ID NO: 169981 - RNA, 32 nt, Human
gccaauaugcugcugucuccaauuucaauaga

SEQ ID NO: 169982 - RNA, 32 nt, Human
gccaauauuccaugcaguccugggcuuagcuu

SEQ ID NO: 169983 - RNA, 19 nt, Human
gccaaucaaagccuucccu

SEQ ID NO: 169984 - RNA, 32 nt, Human
gccaaucaagggcaaaaagucuacauacuuuc

SEQ ID NO: 169985 - RNA, 32 nt, Human
gccaaucacaagacccaggguugugcuuuuga

SEQ ID NO: 169986 - RNA, 32 nt, Human
gccaaucacagcugcucagcucuggcuucugu

SEQ ID NO: 169987 - RNA, 32 nt, Human
gccaaucacaggacagguguccuggccuuucu

SEQ ID NO: 169988 - RNA, 32 nt, Human
gccaaucacaggcaggaagaugaagguucugu

SEQ ID NO: 169989 - RNA, 32 nt, Human
gccaaucaccacugcccuccaagaccgguaca

SEQ ID NO: 169990 - RNA, 19 nt, Human
gccaaucacugcccaucug

SEQ ID NO: 169991 - RNA, 19 nt, Human
gccaaucagacaaacuuug

SEQ ID NO: 169992 - RNA, 32 nt, Human
gccaaucagagagagcucgcccccguuuucuu

SEQ ID NO: 169993 - RNA, 32 nt, Human
gccaaucagugcacauccugugucaucaaugu

SEQ ID NO: 169994 - RNA, 21 nt, Human
gccaaucaugcgcccaccucu

SEQ ID NO: 169995 - RNA, 19 nt, Human
gccaauccacuccuuccuu

SEQ ID NO: 169996 - RNA, 32 nt, Human
gccaauccaugcucucuuucuuuucucugucu

SEQ ID NO: 169997 - RNA, 32 nt, Human
gccaaucccagccccagacuccaaagcauccc

SEQ ID NO: 169998 - RNA, 20 nt, Human
gccaaucccauuccuguccc

SEQ ID NO: 169999 - RNA, 19 nt, Human
gccaauccuuuccuugccu

SEQ ID NO: 170000 - RNA, 32 nt, Human
gccaaucggugcuuccauccaacugucagacu

SEQ ID NO: 170001 - RNA, 32 nt, Human
gccaaucuaaaugcaucuccauuuucucaagc

SEQ ID NO: 170002 - RNA, 32 nt, Human
gccaaucuaagccagucucacugugaaccaca

SEQ ID NO: 170003 - RNA, 18 nt, Human
gccaaucuacucuucccu

SEQ ID NO: 170004 - RNA, 32 nt, Human
gccaaucucagaacuaaaugauaaaaaugaaa

SEQ ID NO: 170005 - RNA, 23 nt, Human
gccaaucuccaggcucccucccu

SEQ ID NO: 170006 - RNA, 32 nt, Human
gccaaucuggacacuucuuuauacucucuucc

SEQ ID NO: 170007 - RNA, 32 nt, Human
gccaaucuguucugggcccugauuuugccaca

SEQ ID NO: 170008 - RNA, 23 nt, Human
gccaaucuuuccagcccuccccu

SEQ ID NO: 170009 - RNA, 32 nt, Human
gccaaugagcccccaacagagcucuucaucuu

SEQ ID NO: 170010 - RNA, 32 nt, Human
gccaaugaggcagggcucaugggauugcuuuu

SEQ ID NO: 170011 - RNA, 32 nt, Human
gccaaugagggagggcacguggagccgcgucu

SEQ ID NO: 170012 - RNA, 32 nt, Human
gccaaugaguuggaggcugcagugagcuauaa

SEQ ID NO: 170013 - RNA, 32 nt, Human
gccaaugauccccagauucggggucugaguuu

SEQ ID NO: 170014 - RNA, 21 nt, Human
gccaaugaugcaaaggucccc

SEQ ID NO: 170015 - RNA, 32 nt, Human
gccaaugcacacaaagcacucaauaaauauug

SEQ ID NO: 170016 - RNA, 32 nt, Human
gccaaugcacccccaaccuccaucgcguugca

SEQ ID NO: 170017 - RNA, 32 nt, Human
gccaaugcagccgccauccacgcacaagcaaa

SEQ ID NO: 170018 - RNA, 17 nt, Human
gccaaugccacucagaa

SEQ ID NO: 170019 - RNA, 32 nt, Human
gccaaugccagugacaucaaccaacuuacuuu

SEQ ID NO: 170020 - RNA, 21 nt, Human
gccaauggagacaauuccuga

SEQ ID NO: 170021 - RNA, 20 nt, Human
gccaauggauguccuucccu

SEQ ID NO: 170022 - RNA, 32 nt, Human
gccaauggcaacugccauuugaguccggugag

SEQ ID NO: 170023 - RNA, 32 nt, Human
gccaauggccacuccccuuucagaggaaacca

SEQ ID NO: 170024 - RNA, 32 nt, Human
gccaauggccuggauuaaggguuaggauuauu

SEQ ID NO: 170025 - RNA, 32 nt, Human
gccaaugggaagacacagcaggaagcuagagg

SEQ ID NO: 170026 - RNA, 32 nt, Human
gccaaugggcagaaucuucacuccaggcacau

SEQ ID NO: 170027 - RNA, 32 nt, Human
gccaauggggaaaggacacagaaacaggaacu

SEQ ID NO: 170028 - RNA, 29 nt, Human
gccaauggggagcagccaggaggagggac

SEQ ID NO: 170029 - RNA, 32 nt, Human
gccaaugguaccacccaguuuccugagcuaag

SEQ ID NO: 170030 - RNA, 32 nt, Human
gccaaugguggaguguugguugguaggagagg

SEQ ID NO: 170031 - RNA, 32 nt, Human
gccaauguacuccagccuaggugacagaguga

SEQ ID NO: 170032 - RNA, 32 nt, Human
gccaauguauuccagucugggugacagaguga

SEQ ID NO: 170033 - RNA, 22 nt, Human
gccaauguccacgcggcugcca

SEQ ID NO: 170034 - RNA, 32 nt, Human
gccaauguggcccagggggcuguggggacagu

SEQ ID NO: 170035 - RNA, 32 nt, Human
gccaauguuucuucuguauagauugcuucucg

SEQ ID NO: 170036 - RNA, 32 nt, Human
gccaauguuugaggagaaggccagcaguccuu

SEQ ID NO: 170037 - RNA, 32 nt, Human
gccaauuaggagagugggaagaaaggagcaga

SEQ ID NO: 170038 - RNA, 32 nt, Human
gccaauuauugaccuuccuuccuuccuuccuu

SEQ ID NO: 170039 - RNA, 32 nt, Human
gccaauuccuucuccccgccuuggccacgugu

SEQ ID NO: 170040 - RNA, 32 nt, Human
gccaauugcuuccccucugugaucucauuuca

SEQ ID NO: 170041 - RNA, 32 nt, Human
gccaauuuccacccucucucuggaaacuguca

SEQ ID NO: 170042 - RNA, 32 nt, Human
gccaauuuccacugcuucuuuuuccugugccu

SEQ ID NO: 170043 - RNA, 32 nt, Human
gccaauuucucccauuuggaauggguguauuu

SEQ ID NO: 170044 - RNA, 32 nt, Human
gccaauuuugaguuugguuuguuccugcuuau

SEQ ID NO: 170045 - RNA, 20 nt, Human
gccacaaacaccggcuccgg

SEQ ID NO: 170046 - RNA, 32 nt, Human
gccacaaaucucuacaagugccugcuaucccu

SEQ ID NO: 170047 - RNA, 32 nt, Human
gccacaaauuguauggugauaaaagucacgug

SEQ ID NO: 170048 - RNA, 32 nt, Human
gccacaaauuuccacugguaaccaaagaguac

SEQ ID NO: 170049 - RNA, 32 nt, Human
gccacaacacuuggauuccuguugauuaacuu

SEQ ID NO: 170050 - RNA, 17 nt, Human
gccacaaccacauacaa

SEQ ID NO: 170051 - RNA, 32 nt, Human
gccacaacccaccccgcuuucguaguuuucau

SEQ ID NO: 170052 - RNA, 32 nt, Human
gccacaacccagugaguuuccccagaucucac

SEQ ID NO: 170053 - RNA, 32 nt, Human
gccacaaccgcgcguccucagagccagcccgg

SEQ ID NO: 170054 - RNA, 18 nt, Human
gccacaacuugcuagcug

SEQ ID NO: 170055 - RNA, 19 nt, Human
gccacaagcagccaucacc

SEQ ID NO: 170056 - RNA, 21 nt, Human
gccacaagccugccuccuccc

SEQ ID NO: 170057 - RNA, 32 nt, Human
gccacaaggaagcacaaccagcucgcccuccc

SEQ ID NO: 170058 - RNA, 32 nt, Human
gccacaaggacugcaauuccugggcaaguuca

SEQ ID NO: 170059 - RNA, 32 nt, Human
gccacaaggauagaugcuggcccagggccaga

SEQ ID NO: 170060 - RNA, 19 nt, Human
gccacaaggcgugcgccag

SEQ ID NO: 170061 - RNA, 21 nt, Human
gccacaaguccuccucaggga

SEQ ID NO: 170062 - RNA, 20 nt, Human
gccacaaguuagggcugcug

SEQ ID NO: 170063 - RNA, 18 nt, Human
gccacaaguugcgcugcu

SEQ ID NO: 170064 - RNA, 18 nt, Human
gccacaauacccaccucu

SEQ ID NO: 170065 - RNA, 21 nt, Human
gccacacaaauggucuccaug

SEQ ID NO: 170066 - RNA, 31 nt, Human
gccacacacagcuagaaguccucucccagcu

SEQ ID NO: 170067 - RNA, 32 nt, Human
gccacacacaugcacacauaucuagcauucuu

SEQ ID NO: 170068 - RNA, 32 nt, Human
gccacacacucugcauccgacacccacccccu

SEQ ID NO: 170069 - RNA, 32 nt, Human
gccacacacugcacaucuuuuggugaucgggg

SEQ ID NO: 170070 - RNA, 20 nt, Human
gccacacacuucucccccca

SEQ ID NO: 170071 - RNA, 32 nt, Human
gccacacagcaaguuccgagaccauggauucg

SEQ ID NO: 170072 - RNA, 17 nt, Human
gccacacagccaggguc

SEQ ID NO: 170073 - RNA, 32 nt, Human
gccacacagccccagacccguuuaggaccggg

SEQ ID NO: 170074 - RNA, 23 nt, Human
gccacacagcgugcgcuugcgug

SEQ ID NO: 170075 - RNA, 32 nt, Human
gccacacagcuggucugagauuaggccaggag

SEQ ID NO: 170076 - RNA, 32 nt, Human
gccacacagcuuguaaguggccaaccagaugu

SEQ ID NO: 170077 - RNA, 32 nt, Human
gccacacaggagagaauauacagccugcagag

SEQ ID NO: 170078 - RNA, 18 nt, Human
gccacacaggcacaugca

SEQ ID NO: 170079 - RNA, 22 nt, Human
gccacacaggccacgcacccca

SEQ ID NO: 170080 - RNA, 24 nt, Human
gccacacauuagcugcacugcgug

SEQ ID NO: 170081 - RNA, 32 nt, Human
gccacacauuauacuccaagucccugccgggc

SEQ ID NO: 170082 - RNA, 32 nt, Human
gccacaccaaaccaggaauucuugucgugauu

SEQ ID NO: 170083 - RNA, 28 nt, Human
gccacaccaagugcagcccucguccugg

SEQ ID NO: 170084 - RNA, 20 nt, Human
gccacaccacaucccaggga

SEQ ID NO: 170085 - RNA, 32 nt, Human
gccacaccaccugagcaugugugagggguugg

SEQ ID NO: 170086 - RNA, 32 nt, Human
gccacaccaccugugacuccagcucugacuuc

SEQ ID NO: 170087 - RNA, 18 nt, Human
gccacaccagacucugga

SEQ ID NO: 170088 - RNA, 32 nt, Human
gccacaccagcagaggaugcgaggacgaugac

SEQ ID NO: 170089 - RNA, 32 nt, Human
gccacaccagcuguuucccaccugcugugcag

SEQ ID NO: 170090 - RNA, 22 nt, Human
gccacaccaguccucccaggga

SEQ ID NO: 170091 - RNA, 32 nt, Human
gccacaccauguuucaggcuuggggcuggggc

SEQ ID NO: 170092 - RNA, 32 nt, Human
gccacacccaagggcccagcugucuugccugc

SEQ ID NO: 170093 - RNA, 21 nt, Human
gccacaccccaagaucagggg

SEQ ID NO: 170094 - RNA, 23 nt, Human
gccacaccccaugcaccucaggg

SEQ ID NO: 170095 - RNA, 18 nt, Human
gccacaccccucacaggg

SEQ ID NO: 170096 - RNA, 19 nt, Human
gccacaccccucccuggga

SEQ ID NO: 170097 - RNA, 32 nt, Human
gccacaccccuuaaccuguucugacaaaauag

SEQ ID NO: 170098 - RNA, 32 nt, Human
gccacacccucccuuuuccucacuggaaugga

SEQ ID NO: 170099 - RNA, 32 nt, Human
gccacaccguacuccagccugggcgacaucua

SEQ ID NO: 170100 - RNA, 32 nt, Human
gccacaccgucccucugggccugcuggcuccu

SEQ ID NO: 170101 - RNA, 19 nt, Human
gccacaccgucucgaggga

SEQ ID NO: 170102 - RNA, 32 nt, Human
gccacaccgugccugguggaagaggccgcggu

SEQ ID NO: 170103 - RNA, 20 nt, Human
gccacaccgugucccaggga

SEQ ID NO: 170104 - RNA, 21 nt, Human
gccacaccucucuccccaggg

SEQ ID NO: 170105 - RNA, 32 nt, Human
gccacaccugauauauagaaaaguuuauugug

SEQ ID NO: 170106 - RNA, 19 nt, Human
gccacaccugcaggcgcug

SEQ ID NO: 170107 - RNA, 18 nt, Human
gccacaccugccccugcu

SEQ ID NO: 170108 - RNA, 20 nt, Human
gccacaccuggccuuaaaga

SEQ ID NO: 170109 - RNA, 32 nt, Human
gccacaccugggagcgcauguggaugcacgug

SEQ ID NO: 170110 - RNA, 18 nt, Human
gccacaccugguguucug

SEQ ID NO: 170111 - RNA, 32 nt, Human
gccacaccuugaaaaaggugacuuuggucagc

SEQ ID NO: 170112 - RNA, 19 nt, Human
gccacaccuuucuuuuggg

SEQ ID NO: 170113 - RNA, 32 nt, Human
gccacacgcagcucagccugggcggcacagcc

SEQ ID NO: 170114 - RNA, 22 nt, Human
gccacacgcgguggcaugcaug

SEQ ID NO: 170115 - RNA, 23 nt, Human
gccacacggacucagaggggcca

SEQ ID NO: 170116 - RNA, 32 nt, Human
gccacacuaagcucuguacaagcaugcaccaa

SEQ ID NO: 170117 - RNA, 32 nt, Human
gccacacucagcaacaccaaccccaguuuugu

SEQ ID NO: 170118 - RNA, 22 nt, Human
gccacacucagcuccucaaggg

SEQ ID NO: 170119 - RNA, 32 nt, Human
gccacacucccaccauccucacagaauuccug

SEQ ID NO: 170120 - RNA, 18 nt, Human
gccacacuccgaguccug

SEQ ID NO: 170121 - RNA, 18 nt, Human
gccacacuccgccuugcu

SEQ ID NO: 170122 - RNA, 18 nt, Human
gccacacuccugucagcu

SEQ ID NO: 170123 - RNA, 19 nt, Human
gccacacuccugucagcuu

SEQ ID NO: 170124 - RNA, 18 nt, Human
gccacacucggguaccug

SEQ ID NO: 170125 - RNA, 18 nt, Human
gccacacucucgccgcug

SEQ ID NO: 170126 - RNA, 18 nt, Human
gccacacucucugaacug

SEQ ID NO: 170127 - RNA, 32 nt, Human
gccacacucugccuuccugagucccuuccagu

SEQ ID NO: 170128 - RNA, 18 nt, Human
gccacacucuuucuccug

SEQ ID NO: 170129 - RNA, 23 nt, Human
gccacacucuuuucucccaggga

SEQ ID NO: 170130 - RNA, 32 nt, Human
gccacacugcaaccucagcuuaacaugaauaa

SEQ ID NO: 170131 - RNA, 32 nt, Human
gccacacugcagccuccgccgacucccuccuu

SEQ ID NO: 170132 - RNA, 18 nt, Human
gccacacugccgcugcug

SEQ ID NO: 170133 - RNA, 22 nt, Human
gccacacugcggccccacgccc

SEQ ID NO: 170134 - RNA, 20 nt, Human
gccacacugcugccaccucu

SEQ ID NO: 170135 - RNA, 32 nt, Human
gccacacugcuucucagaaaugagcugcuugc

SEQ ID NO: 170136 - RNA, 32 nt, Human
gccacacuggacuggcgagccuugccgccgcc

SEQ ID NO: 170137 - RNA, 20 nt, Human
gccacacuggcuacccagaa

SEQ ID NO: 170138 - RNA, 32 nt, Human
gccacacuggcuacccagaaaauuucaggcag

SEQ ID NO: 170139 - RNA, 32 nt, Human
gccacacugugacacacuacaccacacacaac

SEQ ID NO: 170140 - RNA, 32 nt, Human
gccacacuuaggcugagcugcagguuuucgca

SEQ ID NO: 170141 - RNA, 32 nt, Human
gccacacuucaaacuacuuugcugcuaauauu

SEQ ID NO: 170142 - RNA, 18 nt, Human
gccacacuucccuuccug

SEQ ID NO: 170143 - RNA, 32 nt, Human
gccacacuucugcccaugccaggagccagcug

SEQ ID NO: 170144 - RNA, 18 nt, Human
gccacacuucugccugcu

SEQ ID NO: 170145 - RNA, 32 nt, Human
gccacagaaagccggacccgcaggagcugugu

SEQ ID NO: 170146 - RNA, 32 nt, Human
gccacagaacaucuuagaugucagccuugacc

SEQ ID NO: 170147 - RNA, 32 nt, Human
gccacagaaccagcucaaguacaugccaaugu

SEQ ID NO: 170148 - RNA, 32 nt, Human
gccacagaagcuggaaaagacaaggaccagau

SEQ ID NO: 170149 - RNA, 32 nt, Human
gccacagacacacacugcuaaaugugaagaug

SEQ ID NO: 170150 - RNA, 32 nt, Human
gccacagacagaaagcauaacauacacucgcc

SEQ ID NO: 170151 - RNA, 17 nt, Human
gccacagaccccucagg

SEQ ID NO: 170152 - RNA, 19 nt, Human
gccacagaccccucagggg

SEQ ID NO: 170153 - RNA, 32 nt, Human
gccacagaccuucagccccacacagcuguagc

SEQ ID NO: 170154 - RNA, 32 nt, Human
gccacagacuccaggagggaggcugcugugug

SEQ ID NO: 170155 - RNA, 32 nt, Human
gccacagacuucuuaagguaaagcuuuucagg

SEQ ID NO: 170156 - RNA, 18 nt, Human
gccacagagcccacccca

SEQ ID NO: 170157 - RNA, 20 nt, Human
gccacagagcccacucccag

SEQ ID NO: 170158 - RNA, 22 nt, Human
gccacagaggagcggaggggcc

SEQ ID NO: 170159 - RNA, 32 nt, Human
gccacagagggcucucgugugggguggugucc

SEQ ID NO: 170160 - RNA, 21 nt, Human
gccacagaguuggggggccau

SEQ ID NO: 170161 - RNA, 19 nt, Human
gccacagauucacccagga

SEQ ID NO: 170162 - RNA, 21 nt, Human
gccacagcaaaggccugcaug

SEQ ID NO: 170163 - RNA, 19 nt, Human
gccacagcaaggagcccga

SEQ ID NO: 170164 - RNA, 32 nt, Human
gccacagcaauggcacacacgugcuccuggag

SEQ ID NO: 170165 - RNA, 32 nt, Human
gccacagcacgcaagagauugccugugauggg

SEQ ID NO: 170166 - RNA, 32 nt, Human
gccacagcacuccagccugggugacagagcaa

SEQ ID NO: 170167 - RNA, 32 nt, Human
gccacagcagccagggcuccagggcgaggaca

SEQ ID NO: 170168 - RNA, 32 nt, Human
gccacagcaggcggugggggcugcguggggac

SEQ ID NO: 170169 - RNA, 32 nt, Human
gccacagcauuuuauuaccuagcuucauauga

SEQ ID NO: 170170 - RNA, 21 nt, Human
gccacagccacagccccugcc

SEQ ID NO: 170171 - RNA, 32 nt, Human
gccacagccagccagcccauccacuucuucca

SEQ ID NO: 170172 - RNA, 32 nt, Human
gccacagccagccugccauaggauccaacugg

SEQ ID NO: 170173 - RNA, 32 nt, Human
gccacagccagccugucguguccagccugacg

SEQ ID NO: 170174 - RNA, 32 nt, Human
gccacagcccauugcagcacugugcuggccag

SEQ ID NO: 170175 - RNA, 32 nt, Human
gccacagcccccuugcccuccgccugggaucu

SEQ ID NO: 170176 - RNA, 32 nt, Human
gccacagcccugccccuccaguuccuuggcag

SEQ ID NO: 170177 - RNA, 31 nt, Human
gccacagcccugccugggccugucucucaag

SEQ ID NO: 170178 - RNA, 32 nt, Human
gccacagccgccgccuccacccccggccccac

SEQ ID NO: 170179 - RNA, 20 nt, Human
gccacagccgccucuccagg

SEQ ID NO: 170180 - RNA, 32 nt, Human
gccacagccggacucaguggagcugcucuucc

SEQ ID NO: 170181 - RNA, 21 nt, Human
gccacagccggcgacccggag

SEQ ID NO: 170182 - RNA, 32 nt, Human
gccacagccuccacaccagaucuccacauugu

SEQ ID NO: 170183 - RNA, 32 nt, Human
gccacagccuccucgccuccccaaacucccag

SEQ ID NO: 170184 - RNA, 32 nt, Human
gccacagccugagugaauccuacaaauauuac

SEQ ID NO: 170185 - RNA, 32 nt, Human
gccacagccugcccaggcagcccugcucaggg

SEQ ID NO: 170186 - RNA, 32 nt, Human
gccacagccuucucaaguccuuccugcagagg

SEQ ID NO: 170187 - RNA, 21 nt, Human
gccacagcggaggacuggcug

SEQ ID NO: 170188 - RNA, 32 nt, Human
gccacagcuaugccccugauaacugcaaaaug

SEQ ID NO: 170189 - RNA, 32 nt, Human
gccacagcucacugugaccuugaccuucugga

SEQ ID NO: 170190 - RNA, 32 nt, Human
gccacagcucagagacugggaaacaugguucc

SEQ ID NO: 170191 - RNA, 22 nt, Human
gccacagcucagggucaaugca

SEQ ID NO: 170192 - RNA, 23 nt, Human
gccacagcucucaccuccuccau

SEQ ID NO: 170193 - RNA, 19 nt, Human
gccacagcucuggcuccug

SEQ ID NO: 170194 - RNA, 32 nt, Human
gccacagcugaggcccuggaccagcucucucc

SEQ ID NO: 170195 - RNA, 32 nt, Human
gccacagcuggggcuuugcaccagccuggcuu

SEQ ID NO: 170196 - RNA, 32 nt, Human
gccacaggaacagcagagcagcucccccaucc

SEQ ID NO: 170197 - RNA, 20 nt, Human
gccacaggaacaggccccgu

SEQ ID NO: 170198 - RNA, 23 nt, Human
gccacaggaaggggccucaggca

SEQ ID NO: 170199 - RNA, 32 nt, Human
gccacaggacugcccauucagucuuguuaaga

SEQ ID NO: 170200 - RNA, 32 nt, Human
gccacaggaggaggaggaggacaugggguuug

SEQ ID NO: 170201 - RNA, 32 nt, Human
gccacaggcaaggggguugcaguggccgccug

SEQ ID NO: 170202 - RNA, 32 nt, Human
gccacaggcccuccgggagcucaggggaacgc

SEQ ID NO: 170203 - RNA, 19 nt, Human
gccacaggcuccagcucug

SEQ ID NO: 170204 - RNA, 32 nt, Human
gccacaggcugcagaagcugcagagaauuuuc

SEQ ID NO: 170205 - RNA, 19 nt, Human
gccacaggcuguggcugcu

SEQ ID NO: 170206 - RNA, 32 nt, Human
gccacagggaaccaugagcucaguggucuugg

SEQ ID NO: 170207 - RNA, 23 nt, Human
gccacagggagcuccgucagcuu

SEQ ID NO: 170208 - RNA, 20 nt, Human
gccacagggcagccuucccu

SEQ ID NO: 170209 - RNA, 32 nt, Human
gccacaggggccccuccucuaaugaguggucg

SEQ ID NO: 170210 - RNA, 32 nt, Human
gccacaggggccugagagcugaagagcaccag

SEQ ID NO: 170211 - RNA, 32 nt, Human
gccacagggguauucugccuucaggacucugc

SEQ ID NO: 170212 - RNA, 19 nt, Human
gccacaggucccucgagug

SEQ ID NO: 170213 - RNA, 32 nt, Human
gccacaggugccacugccuccucaaaucacau

SEQ ID NO: 170214 - RNA, 32 nt, Human
gccacaggugcccacuccccacccugcaggac

SEQ ID NO: 170215 - RNA, 32 nt, Human
gccacaggugccguuaggcugcagccuaauga

SEQ ID NO: 170216 - RNA, 32 nt, Human
gccacaguaaagcaucugcacuugacucaaug

SEQ ID NO: 170217 - RNA, 19 nt, Human
gccacaguaggaggggcca

SEQ ID NO: 170218 - RNA, 23 nt, Human
gccacaguauucccuccuugagg

SEQ ID NO: 170219 - RNA, 32 nt, Human
gccacagucaguccuuuaagcaucaccaugua

SEQ ID NO: 170220 - RNA, 21 nt, Human
gccacaguccagagaaggcca

SEQ ID NO: 170221 - RNA, 32 nt, Human
gccacaguccauggcacuccccauggaggcuu

SEQ ID NO: 170222 - RNA, 20 nt, Human
gccacagucccaugagggcc

SEQ ID NO: 170223 - RNA, 20 nt, Human
gccacaguccuucccagucu

SEQ ID NO: 170224 - RNA, 20 nt, Human
gccacaguccuuccuggggc

SEQ ID NO: 170225 - RNA, 20 nt, Human
gccacagucugggagagcca

SEQ ID NO: 170226 - RNA, 32 nt, Human
gccacagugagcugaugugcccaccaccgugu

SEQ ID NO: 170227 - RNA, 32 nt, Human
gccacagugccacccuccugacccugccgagg

SEQ ID NO: 170228 - RNA, 23 nt, Human
gccacagugcccccacccagugg

SEQ ID NO: 170229 - RNA, 19 nt, Human
gccacagugcucacugcug

SEQ ID NO: 170230 - RNA, 20 nt, Human
gccacagugcugcggcugcu

SEQ ID NO: 170231 - RNA, 26 nt, Human
gccacaguugagaagcggaggggcca

SEQ ID NO: 170232 - RNA, 32 nt, Human
gccacaguugagaagcggaggggccagcugug

SEQ ID NO: 170233 - RNA, 32 nt, Human
gccacaguugauggugagaagcuccuuugacg

SEQ ID NO: 170234 - RNA, 32 nt, Human
gccacaguugcuggauguuuauauagagagua

SEQ ID NO: 170235 - RNA, 21 nt, Human
gccacaguuucagcagaccau

SEQ ID NO: 170236 - RNA, 23 nt, Human
gccacauaagcuguccaccagug

SEQ ID NO: 170237 - RNA, 32 nt, Human
gccacauacuccugcaaagcuuuuaugcugcu

SEQ ID NO: 170238 - RNA, 32 nt, Human
gccacauaggagacacauggugaacagugagc

SEQ ID NO: 170239 - RNA, 32 nt, Human
gccacauauacauacauauauguguauguaug

SEQ ID NO: 170240 - RNA, 32 nt, Human
gccacauaucuagauuuuucugugaaagcucu

SEQ ID NO: 170241 - RNA, 32 nt, Human
gccacauaugagagcucuaguauuuccacaaa

SEQ ID NO: 170242 - RNA, 20 nt, Human
gccacaucaacagaaguaac

SEQ ID NO: 170243 - RNA, 19 nt, Human
gccacaucacuacaguaca

SEQ ID NO: 170244 - RNA, 32 nt, Human
gccacaucacugggacagcuguggauguggau

SEQ ID NO: 170245 - RNA, 32 nt, Human
gccacaucagaaagcagaagaaaacaguauuu

SEQ ID NO: 170246 - RNA, 32 nt, Human
gccacaucagaauaaggccuuggccccauccu

SEQ ID NO: 170247 - RNA, 32 nt, Human
gccacaucagagcugguugggaacccuuugcu

SEQ ID NO: 170248 - RNA, 25 nt, Human
gccacauccacaaauucaaccaacu

SEQ ID NO: 170249 - RNA, 32 nt, Human
gccacauccaccauucacuugcacuugaguga

SEQ ID NO: 170250 - RNA, 32 nt, Human
gccacaucccaaagggggcacaugucccugga

SEQ ID NO: 170251 - RNA, 32 nt, Human
gccacaucccacuggauccacacccgccccca

SEQ ID NO: 170252 - RNA, 32 nt, Human
gccacaucccagggcuuauggugcagcaggug

SEQ ID NO: 170253 - RNA, 32 nt, Human
gccacaucccccaauccaucagugccaaacua

SEQ ID NO: 170254 - RNA, 32 nt, Human
gccacaucccuaagcugccaucucagaccaga

SEQ ID NO: 170255 - RNA, 19 nt, Human
gccacaucccuauagacca

SEQ ID NO: 170256 - RNA, 18 nt, Human
gccacauccuccaccucu

SEQ ID NO: 170257 - RNA, 32 nt, Human
gccacaucuccugccuaguggagaagccuugg

SEQ ID NO: 170258 - RNA, 16 nt, Human
gccacaucugccacca

SEQ ID NO: 170259 - RNA, 32 nt, Human
gccacaucugccucuggcugccugcguccucu

SEQ ID NO: 170260 - RNA, 32 nt, Human
gccacaucugggcugcucugcacccacgggag

SEQ ID NO: 170261 - RNA, 32 nt, Human
gccacaugacaggcacggugggcaccgaucca

SEQ ID NO: 170262 - RNA, 21 nt, Human
gccacaugaggggacagugca

SEQ ID NO: 170263 - RNA, 32 nt, Human
gccacaugauggacaaacgcuugggggaaaaa

SEQ ID NO: 170264 - RNA, 21 nt, Human
gccacaugauuaauccagucu

SEQ ID NO: 170265 - RNA, 32 nt, Human
gccacaugccaacccucaccuccccgaggacu

SEQ ID NO: 170266 - RNA, 18 nt, Human
gccacaugcccuggcugc

SEQ ID NO: 170267 - RNA, 32 nt, Human
gccacaugccuguaauuccagcuacuugggag

SEQ ID NO: 170268 - RNA, 32 nt, Human
gccacaugccuguagucccagcuacuugggaa

SEQ ID NO: 170269 - RNA, 24 nt, Human
gccacauggacuggggugcaaugg

SEQ ID NO: 170270 - RNA, 32 nt, Human
gccacauggauagucccuggauauccuugcug

SEQ ID NO: 170271 - RNA, 21 nt, Human
gccacauggcagggacaaugc

SEQ ID NO: 170272 - RNA, 29 nt, Human
gccacauggcugcuaaaaucaucuuuccc

SEQ ID NO: 170273 - RNA, 19 nt, Human
gccacaugggcacaugcua

SEQ ID NO: 170274 - RNA, 32 nt, Human
gccacaugggguuucaguugcgaaacaggucu

SEQ ID NO: 170275 - RNA, 15 nt, Human
gccacauggguccag

SEQ ID NO: 170276 - RNA, 22 nt, Human
gccacauggguguggucugcau

SEQ ID NO: 170277 - RNA, 17 nt, Human
gccacaugugcacaaug

SEQ ID NO: 170278 - RNA, 32 nt, Human
gccacauguggacccucagccuggguggguuc

SEQ ID NO: 170279 - RNA, 18 nt, Human
gccacauuagugaaccua

SEQ ID NO: 170280 - RNA, 21 nt, Human
gccacauuaucugauccaguc

SEQ ID NO: 170281 - RNA, 22 nt, Human
gccacauucugagguacugggg

SEQ ID NO: 170282 - RNA, 18 nt, Human
gccacauuggugcuguug

SEQ ID NO: 170283 - RNA, 24 nt, Human
gccacauugguucucauccagucu

SEQ ID NO: 170284 - RNA, 23 nt, Human
gccacauugucuuuauccagucu

SEQ ID NO: 170285 - RNA, 32 nt, Human
gccacauuucucaggauuccaugagagaguug

SEQ ID NO: 170286 - RNA, 18 nt, Human
gccacauuuuccucaggu

SEQ ID NO: 170287 - RNA, 32 nt, Human
gccacauuuuguuagcuacugccuguaggcau

SEQ ID NO: 170288 - RNA, 32 nt, Human
gccacauuuuucaugcagaaaagaaccacagg

SEQ ID NO: 170289 - RNA, 21 nt, Human
gccaccaaacccagcccagaa

SEQ ID NO: 170290 - RNA, 32 nt, Human
gccaccaaaggccagggucacugaaggccugg

SEQ ID NO: 170291 - RNA, 23 nt, Human
gccaccaaagggcagccaaggca

SEQ ID NO: 170292 - RNA, 21 nt, Human
gccaccaacagccacucagaa

SEQ ID NO: 170293 - RNA, 32 nt, Human
gccaccaaccaccacugagccuucgaccacug

SEQ ID NO: 170294 - RNA, 18 nt, Human
gccaccaaccccagggaa

SEQ ID NO: 170295 - RNA, 32 nt, Human
gccaccaagaagcuccucgacaacagccacuu

SEQ ID NO: 170296 - RNA, 32 nt, Human
gccaccaagacacagcccugccccacacccac

SEQ ID NO: 170297 - RNA, 32 nt, Human
gccaccaagcacugcaugugggacagggcaca

SEQ ID NO: 170298 - RNA, 25 nt, Human
gccaccaagcugguggcucugugug

SEQ ID NO: 170299 - RNA, 32 nt, Human
gccaccaagggcucugcuccagccucucagag

SEQ ID NO: 170300 - RNA, 32 nt, Human
gccaccaaguauacugaauucuaaggcuagcu

SEQ ID NO: 170301 - RNA, 18 nt, Human
gccaccaauccacccaga

SEQ ID NO: 170302 - RNA, 32 nt, Human
gccaccaaucuaugaagaccucaggccagggg

SEQ ID NO: 170303 - RNA, 19 nt, Human
gccaccacacacaccaucu

SEQ ID NO: 170304 - RNA, 23 nt, Human
gccaccacacaccucugcugccc

SEQ ID NO: 170305 - RNA, 20 nt, Human
gccaccacacccggccgugg

SEQ ID NO: 170306 - RNA, 32 nt, Human
gccaccacacucccacacuccagccuggguaa

SEQ ID NO: 170307 - RNA, 32 nt, Human
gccaccacaucaccccagagaaauuucuggaa

SEQ ID NO: 170308 - RNA, 32 nt, Human
gccaccaccagaucccccucccaggccuuccu

SEQ ID NO: 170309 - RNA, 32 nt, Human
gccaccaccaggagagaggcagaggggcugug

SEQ ID NO: 170310 - RNA, 32 nt, Human
gccaccaccaggagcuagaaagaggcaaggaa

SEQ ID NO: 170311 - RNA, 23 nt, Human
gccaccaccaguucccaucagca

SEQ ID NO: 170312 - RNA, 19 nt, Human
gccaccacccagcauccca

SEQ ID NO: 170313 - RNA, 32 nt, Human
gccaccacccagccuucucuuuauuuucagug

SEQ ID NO: 170314 - RNA, 17 nt, Human
gccaccacccucaggug

SEQ ID NO: 170315 - RNA, 17 nt, Human
gccaccacccucccaga

SEQ ID NO: 170316 - RNA, 20 nt, Human
gccaccaccgccgccgccac

SEQ ID NO: 170317 - RNA, 20 nt, Human
gccaccaccgccgccgccgc

SEQ ID NO: 170318 - RNA, 21 nt, Human
gccaccaccgcgugggucuga

SEQ ID NO: 170319 - RNA, 32 nt, Human
gccaccaccgcuaccucacacagccggggcgc

SEQ ID NO: 170320 - RNA, 32 nt, Human
gccaccaccgcugccgcagccuggcuggggag

SEQ ID NO: 170321 - RNA, 23 nt, Human
gccaccaccggggcacuggcugc

SEQ ID NO: 170322 - RNA, 32 nt, Human
gccaccaccucccacaucccugagguuggcga

SEQ ID NO: 170323 - RNA, 32 nt, Human
gccaccaccuccuccuccuccuggcccugcug

SEQ ID NO: 170324 - RNA, 32 nt, Human
gccaccaccugcugggguccugccucagccca

SEQ ID NO: 170325 - RNA, 16 nt, Human
gccaccacgcccagga

SEQ ID NO: 170326 - RNA, 19 nt, Human
gccaccacgccuggccugc

SEQ ID NO: 170327 - RNA, 32 nt, Human
gccaccacgccuggccuugauuuccuucuuaa

SEQ ID NO: 170328 - RNA, 23 nt, Human
gccaccacugaugccacccagga

SEQ ID NO: 170329 - RNA, 32 nt, Human
gccaccacugcaacuuuuguauucacaggcau

SEQ ID NO: 170330 - RNA, 32 nt, Human
gccaccacugcacuccagccugggcaacagag

SEQ ID NO: 170331 - RNA, 19 nt, Human
gccaccacugccaccacgg

SEQ ID NO: 170332 - RNA, 20 nt, Human
gccaccacugccacucggga

SEQ ID NO: 170333 - RNA, 32 nt, Human
gccaccacugcggccaccgccaaugaaacgcc

SEQ ID NO: 170334 - RNA, 19 nt, Human
gccaccacugcucccagga

SEQ ID NO: 170335 - RNA, 17 nt, Human
gccaccacuguuuagaa

SEQ ID NO: 170336 - RNA, 32 nt, Human
gccaccacuuuauuugguguagcuccucgcuc

SEQ ID NO: 170337 - RNA, 32 nt, Human
gccaccagaaggcuguugucugccuggccuuc

SEQ ID NO: 170338 - RNA, 32 nt, Human
gccaccagacugcuuccugccagccugugcuu

SEQ ID NO: 170339 - RNA, 32 nt, Human
gccaccagagggcgcgcgaucccgccccaacc

SEQ ID NO: 170340 - RNA, 19 nt, Human
gccaccagcaccacccaga

SEQ ID NO: 170341 - RNA, 32 nt, Human
gccaccagcacucacuccagccacuaaagcca

SEQ ID NO: 170342 - RNA, 22 nt, Human
gccaccagcagagccauccuga

SEQ ID NO: 170343 - RNA, 23 nt, Human
gccaccagcagugaguguccuga

SEQ ID NO: 170344 - RNA, 32 nt, Human
gccaccagccaagggcccuggccacgugugcg

SEQ ID NO: 170345 - RNA, 32 nt, Human
gccaccagccaggaagcggaaggugcagaaau

SEQ ID NO: 170346 - RNA, 32 nt, Human
gccaccagccauucagaaaacuucuuauagcu

SEQ ID NO: 170347 - RNA, 32 nt, Human
gccaccagcccagcaugcaccagcucuuucag

SEQ ID NO: 170348 - RNA, 32 nt, Human
gccaccagcccagcuaauuuuuguauuuuuag

SEQ ID NO: 170349 - RNA, 19 nt, Human
gccaccagccccuuaggug

SEQ ID NO: 170350 - RNA, 25 nt, Human
gccaccagccuccauccacagggag

SEQ ID NO: 170351 - RNA, 22 nt, Human
gccaccagccugacacccagaa

SEQ ID NO: 170352 - RNA, 32 nt, Human
gccaccagcucuccacccuccugguuccgcug

SEQ ID NO: 170353 - RNA, 24 nt, Human
gccaccagcugccagccaccagca

SEQ ID NO: 170354 - RNA, 32 nt, Human
gccaccagcugcucgcagcccaugccuggggg

SEQ ID NO: 170355 - RNA, 32 nt, Human
gccaccagcugcuggaugucaccaagaagggg

SEQ ID NO: 170356 - RNA, 30 nt, Human
gccaccagcuugcgguaguagcaagaugcu

SEQ ID NO: 170357 - RNA, 32 nt, Human
gccaccaggaccugaugggccaggaagggcgu

SEQ ID NO: 170358 - RNA, 32 nt, Human
gccaccaggacuccuuguucugcucuggcaag

SEQ ID NO: 170359 - RNA, 32 nt, Human
gccaccaggcacgacuuccuaaacacccacag

SEQ ID NO: 170360 - RNA, 32 nt, Human
gccaccaggccugcugguguuuggcuucucua

SEQ ID NO: 170361 - RNA, 32 nt, Human
gccaccaggccuggcuccuuuuccacuuucau

SEQ ID NO: 170362 - RNA, 32 nt, Human
gccaccaggcucccugugucccuuccauggga

SEQ ID NO: 170363 - RNA, 32 nt, Human
gccaccaggcuggacugggugcagcuuacgga

SEQ ID NO: 170364 - RNA, 21 nt, Human
gccaccaggcugggugcaaug

SEQ ID NO: 170365 - RNA, 32 nt, Human
gccaccagggaccaggggguugaguggaacag

SEQ ID NO: 170366 - RNA, 32 nt, Human
gccaccagggcugaagaugcgagcccguccuc

SEQ ID NO: 170367 - RNA, 32 nt, Human
gccaccagggggagugggcugaagggagagua

SEQ ID NO: 170368 - RNA, 32 nt, Human
gccaccaggguugggcccuguuuagguaauuc

SEQ ID NO: 170369 - RNA, 18 nt, Human
gccaccagucauccagaa

SEQ ID NO: 170370 - RNA, 24 nt, Human
gccaccaucaucaucaucaucauc

SEQ ID NO: 170371 - RNA, 32 nt, Human
gccaccaucccaggacuuugggcaagucaccc

SEQ ID NO: 170372 - RNA, 32 nt, Human
gccaccaucccgcgggggccugggugaggcac

SEQ ID NO: 170373 - RNA, 32 nt, Human
gccaccauccuugucugugcuacugucugcug

SEQ ID NO: 170374 - RNA, 32 nt, Human
gccaccaucugaagauuuaggccagucccuug

SEQ ID NO: 170375 - RNA, 32 nt, Human
gccaccaugagacuugaaggcuucuagcuguc

SEQ ID NO: 170376 - RNA, 31 nt, Human
gccaccaugccacugcacuccagccugggug

SEQ ID NO: 170377 - RNA, 20 nt, Human
gccaccaugccuggcaacau

SEQ ID NO: 170378 - RNA, 32 nt, Human
gccaccaugccuggcuaaucuuuugcagcgau

SEQ ID NO: 170379 - RNA, 32 nt, Human
gccaccaugccuggcuaauuuugguauuuuua

SEQ ID NO: 170380 - RNA, 32 nt, Human
gccaccaugccuggcuaauuuuguauuuuuag

SEQ ID NO: 170381 - RNA, 32 nt, Human
gccaccaugccuggcuaauuuuuguacuuuug

SEQ ID NO: 170382 - RNA, 32 nt, Human
gccaccaugccuggcuaauuuuuguauuuuua

SEQ ID NO: 170383 - RNA, 32 nt, Human
gccaccaugccuggguaauucuguauuuuuag

SEQ ID NO: 170384 - RNA, 32 nt, Human
gccaccaugccuguggccucagccacuuugug

SEQ ID NO: 170385 - RNA, 31 nt, Human
gccaccaugcuggccucagggcugcuucugg

SEQ ID NO: 170386 - RNA, 31 nt, Human
gccaccauggagcuggaggacgguguggugu

SEQ ID NO: 170387 - RNA, 32 nt, Human
gccaccauggccagcuaauuuuuguauuuuua

SEQ ID NO: 170388 - RNA, 32 nt, Human
gccaccauggccugagugguuuucugcugaag

SEQ ID NO: 170389 - RNA, 31 nt, Human
gccaccauggggaaggggguuggacgugaua

SEQ ID NO: 170390 - RNA, 32 nt, Human
gccaccauggggaccugagagggaaggggaca

SEQ ID NO: 170391 - RNA, 22 nt, Human
gccaccaugguuccccauccca

SEQ ID NO: 170392 - RNA, 32 nt, Human
gccaccauguuacacuggacucuaagccacuu

SEQ ID NO: 170393 - RNA, 32 nt, Human
gccaccauuaaugccagcgcauugagggagau

SEQ ID NO: 170394 - RNA, 28 nt, Human
gccaccauuggugcugccuucucuuccc

SEQ ID NO: 170395 - RNA, 32 nt, Human
gccacccaaacagacccuugacucucaagugg

SEQ ID NO: 170396 - RNA, 32 nt, Human
gccacccaaggcaagacacagagcaggaggcu

SEQ ID NO: 170397 - RNA, 32 nt, Human
gccacccaagugccaagacacagcagggccaa

SEQ ID NO: 170398 - RNA, 32 nt, Human
gccacccaauaugcccaccuauuccccggugu

SEQ ID NO: 170399 - RNA, 25 nt, Human
gccacccacaggggcgcuguggcuc

SEQ ID NO: 170400 - RNA, 32 nt, Human
gccacccacaugcagacagcacuuaucccaag

SEQ ID NO: 170401 - RNA, 16 nt, Human
gccacccaccagaguc

SEQ ID NO: 170402 - RNA, 19 nt, Human
gccacccaccagggcucag

SEQ ID NO: 170403 - RNA, 23 nt, Human
gccacccacccaccacucaggug

SEQ ID NO: 170404 - RNA, 18 nt, Human
gccacccacccacccaca

SEQ ID NO: 170405 - RNA, 17 nt, Human
gccacccacccaccucu

SEQ ID NO: 170406 - RNA, 18 nt, Human
gccacccacccagguguc

SEQ ID NO: 170407 - RNA, 20 nt, Human
gccacccacucagcccagaa

SEQ ID NO: 170408 - RNA, 32 nt, Human
gccacccacugcacuggggccagcugggaagc

SEQ ID NO: 170409 - RNA, 18 nt, Human
gccacccagccaggaggg

SEQ ID NO: 170410 - RNA, 18 nt, Human
gccacccagcccagcuuc

SEQ ID NO: 170411 - RNA, 32 nt, Human
gccacccagccccagccagggcucaaucucug

SEQ ID NO: 170412 - RNA, 32 nt, Human
gccacccagccugugugcccucccuggggcug

SEQ ID NO: 170413 - RNA, 19 nt, Human
gccacccagccuugguguc

SEQ ID NO: 170414 - RNA, 19 nt, Human
gccacccagcgucucaggg

SEQ ID NO: 170415 - RNA, 32 nt, Human
gccacccagcuaaucagcagugggaaaagaau

SEQ ID NO: 170416 - RNA, 17 nt, Human
gccacccagcugagguc

SEQ ID NO: 170417 - RNA, 19 nt, Human
gccacccagcugugucccu

SEQ ID NO: 170418 - RNA, 18 nt, Human
gccacccaggacugacug

SEQ ID NO: 170419 - RNA, 32 nt, Human
gccacccaucucccauucacauggcccaccuc

SEQ ID NO: 170420 - RNA, 32 nt, Human
gccacccauucaacaauccccuaagccaggaa

SEQ ID NO: 170421 - RNA, 32 nt, Human
gccaccccaagcucugcucuccuccucuguga

SEQ ID NO: 170422 - RNA, 28 nt, Human
gccaccccaagugugguuaugccuccuc

SEQ ID NO: 170423 - RNA, 32 nt, Human
gccaccccacaaugaauccacccugcuccacu

SEQ ID NO: 170424 - RNA, 27 nt, Human
gccaccccagcccucugguccaucccu

SEQ ID NO: 170425 - RNA, 32 nt, Human
gccaccccagccucauccugcugugccaggcg

SEQ ID NO: 170426 - RNA, 30 nt, Human
gccaccccaggcccugccagagcaggggga

SEQ ID NO: 170427 - RNA, 32 nt, Human
gccaccccaucuuuauaaaauagccucucucu

SEQ ID NO: 170428 - RNA, 15 nt, Human
gccacccccacccca

SEQ ID NO: 170429 - RNA, 32 nt, Human
gccacccccaggaaggaguuugagguucauug

SEQ ID NO: 170430 - RNA, 18 nt, Human
gccacccccaggggccuc

SEQ ID NO: 170431 - RNA, 19 nt, Human
gccacccccauggcgacuc

SEQ ID NO: 170432 - RNA, 16 nt, Human
gccaccccccacccca

SEQ ID NO: 170433 - RNA, 20 nt, Human
gccacccccgggcucgggug

SEQ ID NO: 170434 - RNA, 32 nt, Human
gccacccccucagccuccacagccugccccgc

SEQ ID NO: 170435 - RNA, 18 nt, Human
gccaccccuaauuucuga

SEQ ID NO: 170436 - RNA, 32 nt, Human
gccaccccuccacccccacccccaagugccuu

SEQ ID NO: 170437 - RNA, 32 nt, Human
gccaccccuccaggacagucccucucugugga

SEQ ID NO: 170438 - RNA, 32 nt, Human
gccaccccuccccagucaccaguucuccucug

SEQ ID NO: 170439 - RNA, 32 nt, Human
gccaccccuccuguuccugcagccucuccucc

SEQ ID NO: 170440 - RNA, 20 nt, Human
gccaccccugccacucaccc

SEQ ID NO: 170441 - RNA, 32 nt, Human
gccaccccuucccaguuaccccuuuacccuua

SEQ ID NO: 170442 - RNA, 32 nt, Human
gccacccgaagcucgcucccucucacaguagc

SEQ ID NO: 170443 - RNA, 32 nt, Human
gccacccgcuguucggguucacuggcuuaggg

SEQ ID NO: 170444 - RNA, 25 nt, Human
gccacccgcuuucagcccugugcuc

SEQ ID NO: 170445 - RNA, 32 nt, Human
gccacccggacgccgcugugcagugcguggcc

SEQ ID NO: 170446 - RNA, 17 nt, Human
gccacccgggaacagcu

SEQ ID NO: 170447 - RNA, 23 nt, Human
gccacccguaggcagccucucug

SEQ ID NO: 170448 - RNA, 31 nt, Human
gccacccucaauaaauguugcuuggagugga

SEQ ID NO: 170449 - RNA, 23 nt, Human
gccacccucagaagcugcugguc

SEQ ID NO: 170450 - RNA, 32 nt, Human
gccacccucauacccuguaauuuugucccaaa

SEQ ID NO: 170451 - RNA, 32 nt, Human
gccacccuccacccuucuccccagcgugcugu

SEQ ID NO: 170452 - RNA, 32 nt, Human
gccacccuccauucuaaggcagucucccccuu

SEQ ID NO: 170453 - RNA, 19 nt, Human
gccacccucccucuucaga

SEQ ID NO: 170454 - RNA, 21 nt, Human
gccacccucccucuucagaga

SEQ ID NO: 170455 - RNA, 26 nt, Human
gccacccuccucaugcccacccagca

SEQ ID NO: 170456 - RNA, 32 nt, Human
gccacccucuacugacccucccagggcauucc

SEQ ID NO: 170457 - RNA, 32 nt, Human
gccacccucuccccucccuccugcaaacacca

SEQ ID NO: 170458 - RNA, 17 nt, Human
gccacccucucuccagg

SEQ ID NO: 170459 - RNA, 20 nt, Human
gccacccucugggccuccua

SEQ ID NO: 170460 - RNA, 19 nt, Human
gccacccugaagaaugugc

SEQ ID NO: 170461 - RNA, 32 nt, Human
gccacccugacuuaaaaccacucagagcuaaa

SEQ ID NO: 170462 - RNA, 32 nt, Human
gccacccugaggcagcaagaccagccccuccu

SEQ ID NO: 170463 - RNA, 32 nt, Human
gccacccugcaacccacccucccagccaagga

SEQ ID NO: 170464 - RNA, 16 nt, Human
gccacccugcccaggg

SEQ ID NO: 170465 - RNA, 19 nt, Human
gccacccugccuccucccg

SEQ ID NO: 170466 - RNA, 32 nt, Human
gccacccugccucucaggggucuguguuggga

SEQ ID NO: 170467 - RNA, 32 nt, Human
gccacccugccuggacgccagcuguucuucuc

SEQ ID NO: 170468 - RNA, 32 nt, Human
gccacccugcugcacagcacacugacugagca

SEQ ID NO: 170469 - RNA, 32 nt, Human
gccacccugcuuguugguuauaugaggaugua

SEQ ID NO: 170470 - RNA, 32 nt, Human
gccacccuggacacauguuggcccccucaaag

SEQ ID NO: 170471 - RNA, 32 nt, Human
gccacccuggacaucguggauggcauggcuca

SEQ ID NO: 170472 - RNA, 30 nt, Human
gccacccuggaggacagggcacaacaaccg

SEQ ID NO: 170473 - RNA, 32 nt, Human
gccacccuggaggucauggaggccccagcuga

SEQ ID NO: 170474 - RNA, 32 nt, Human
gccacccugggaaccucacuguucucucuuuc

SEQ ID NO: 170475 - RNA, 32 nt, Human
gccacccugggugccagucucuccuucuguag

SEQ ID NO: 170476 - RNA, 32 nt, Human
gccacccuguucuuccgugucucccucugccu

SEQ ID NO: 170477 - RNA, 18 nt, Human
gccacccuucccacccca

SEQ ID NO: 170478 - RNA, 18 nt, Human
gccacccuucuugcugcc

SEQ ID NO: 170479 - RNA, 29 nt, Human
gccacccuugcaacaaauacaggcgccug

SEQ ID NO: 170480 - RNA, 32 nt, Human
gccacccuugccauuucugcucccagagucuc

SEQ ID NO: 170481 - RNA, 32 nt, Human
gccacccuuggcuccugucccugcugcuccuc

SEQ ID NO: 170482 - RNA, 32 nt, Human
gccacccuuucaggaacccuguaugguuuuua

SEQ ID NO: 170483 - RNA, 32 nt, Human
gccaccgaagccacccugcccuggugaaaggg

SEQ ID NO: 170484 - RNA, 20 nt, Human
gccaccgacgccgguugcug

SEQ ID NO: 170485 - RNA, 32 nt, Human
gccaccgacuuaagguccccagcuucuacagc

SEQ ID NO: 170486 - RNA, 23 nt, Human
gccaccgagccgccgcugugcuc

SEQ ID NO: 170487 - RNA, 20 nt, Human
gccaccgagugcacccagga

SEQ ID NO: 170488 - RNA, 32 nt, Human
gccaccgaugauuuuuguucucccuucuugaa

SEQ ID NO: 170489 - RNA, 32 nt, Human
gccaccgauugcaggacacaagcacaguuuua

SEQ ID NO: 170490 - RNA, 32 nt, Human
gccaccgcacuccagcaugggugacagaguga

SEQ ID NO: 170491 - RNA, 32 nt, Human
gccaccgcacuucagccugggugacagagaag

SEQ ID NO: 170492 - RNA, 32 nt, Human
gccaccgcacuuccagccugggugacagagug

SEQ ID NO: 170493 - RNA, 32 nt, Human
gccaccgcagagcccaggaggcagcaucucca

SEQ ID NO: 170494 - RNA, 18 nt, Human
gccaccgccaacugcagc

SEQ ID NO: 170495 - RNA, 32 nt, Human
gccaccgccaccaccaccuccaccgccgccuc

SEQ ID NO: 170496 - RNA, 23 nt, Human
gccaccgccaccgccaccgccgc

SEQ ID NO: 170497 - RNA, 32 nt, Human
gccaccgccccuccgaauccuccggggccgca

SEQ ID NO: 170498 - RNA, 18 nt, Human
gccaccgcccgccgccac

SEQ ID NO: 170499 - RNA, 22 nt, Human
gccaccgcccgccgccaccagc

SEQ ID NO: 170500 - RNA, 23 nt, Human
gccaccgccgccaccgccgccgc

SEQ ID NO: 170501 - RNA, 20 nt, Human
gccaccgccgccgcccgccg

SEQ ID NO: 170502 - RNA, 20 nt, Human
gccaccgccgccgccgccac

SEQ ID NO: 170503 - RNA, 20 nt, Human
gccaccgccgccgccgccgc

SEQ ID NO: 170504 - RNA, 23 nt, Human
gccaccgccgccgccgccgccac

SEQ ID NO: 170505 - RNA, 23 nt, Human
gccaccgccgccgccgccgccgc

SEQ ID NO: 170506 - RNA, 24 nt, Human
gccaccgccgccguccgccgucac

SEQ ID NO: 170507 - RNA, 23 nt, Human
gccaccgccgccuccgccgccgc

SEQ ID NO: 170508 - RNA, 23 nt, Human
gccaccgccgggaggcugcugua

SEQ ID NO: 170509 - RNA, 32 nt, Human
gccaccgccuccaauccugggccaggagcuuc

SEQ ID NO: 170510 - RNA, 32 nt, Human
gccaccgccugccacaccacuccugccuggug

SEQ ID NO: 170511 - RNA, 32 nt, Human
gccaccgcgaccggcccugcuguugcuucuga

SEQ ID NO: 170512 - RNA, 32 nt, Human
gccaccgcgccuggccugaugccuguguguca

SEQ ID NO: 170513 - RNA, 32 nt, Human
gccaccgcgcuccagccugggugacagagcga

SEQ ID NO: 170514 - RNA, 25 nt, Human
gccaccgcuacgcggccuaccagca

SEQ ID NO: 170515 - RNA, 32 nt, Human
gccaccgcucacugcaagcacugccucccucc

SEQ ID NO: 170516 - RNA, 32 nt, Human
gccaccgcugaggaagagucuccucugagggg

SEQ ID NO: 170517 - RNA, 32 nt, Human
gccaccgcugccucuuuccggcugugacccuc

SEQ ID NO: 170518 - RNA, 32 nt, Human
gccaccgcugugcagugucauguuccagaaau

SEQ ID NO: 170519 - RNA, 32 nt, Human
gccaccggcuccacuuuccccuuuuauuaaua

SEQ ID NO: 170520 - RNA, 32 nt, Human
gccaccgggauccagaggucagcguggggccc

SEQ ID NO: 170521 - RNA, 32 nt, Human
gccaccgggccuggccugcauuuucuuaacug

SEQ ID NO: 170522 - RNA, 32 nt, Human
gccaccgggggaggaggaggaggagaaggugg

SEQ ID NO: 170523 - RNA, 32 nt, Human
gccaccgggugagcucaccgcccagcccaaac

SEQ ID NO: 170524 - RNA, 32 nt, Human
gccaccgugagggggaccauccauccaggaga

SEQ ID NO: 170525 - RNA, 32 nt, Human
gccaccgugccuggccaaugcacacugucauu

SEQ ID NO: 170526 - RNA, 32 nt, Human
gccaccgugccuggccccuaaucugcugaaga

SEQ ID NO: 170527 - RNA, 32 nt, Human
gccaccgugccuugcuauuaaugccaucuauu

SEQ ID NO: 170528 - RNA, 32 nt, Human
gccaccgugggagaggagaggcugcugucacu

SEQ ID NO: 170529 - RNA, 21 nt, Human
gccaccguuagccggggcuca

SEQ ID NO: 170530 - RNA, 32 nt, Human
gccaccuacaaacaccagggaagagcaagauu

SEQ ID NO: 170531 - RNA, 32 nt, Human
gccaccuacacuccagccugggugacagagca

SEQ ID NO: 170532 - RNA, 32 nt, Human
gccaccuacuauauuaaucaugcuaguaacau

SEQ ID NO: 170533 - RNA, 32 nt, Human
gccaccuaugccacagugccuaagggcuaggc

SEQ ID NO: 170534 - RNA, 32 nt, Human
gccaccucacucagccuccucugacagcuccg

SEQ ID NO: 170535 - RNA, 19 nt, Human
gccaccucaucacccagag

SEQ ID NO: 170536 - RNA, 32 nt, Human
gccaccucauuucauccucacagccaccucag

SEQ ID NO: 170537 - RNA, 32 nt, Human
gccaccucauuuccaaacaucucacucaggaa

SEQ ID NO: 170538 - RNA, 32 nt, Human
gccaccuccaaggacucuaaaagggggcuauu

SEQ ID NO: 170539 - RNA, 32 nt, Human
gccaccuccaggcuggcuucagucucccaucc

SEQ ID NO: 170540 - RNA, 32 nt, Human
gccaccuccaugacucuacucucccaaagguu

SEQ ID NO: 170541 - RNA, 32 nt, Human
gccaccucccacuccugcugcacaggcccugg

SEQ ID NO: 170542 - RNA, 19 nt, Human
gccaccucccagaggggcc

SEQ ID NO: 170543 - RNA, 25 nt, Human
gccaccuccccugccagcccaccca

SEQ ID NO: 170544 - RNA, 32 nt, Human
gccaccucccgaugccuccagagucaguggga

SEQ ID NO: 170545 - RNA, 18 nt, Human
gccaccucccgggacaga

SEQ ID NO: 170546 - RNA, 32 nt, Human
gccaccucccuuccucccucccucucuccacu

SEQ ID NO: 170547 - RNA, 32 nt, Human
gccaccuccuaaaaggcccagagagaagagcc

SEQ ID NO: 170548 - RNA, 32 nt, Human
gccaccuccucguccagcccccaaaccucccc

SEQ ID NO: 170549 - RNA, 32 nt, Human
gccaccuccucucuccucugugcucagugagg

SEQ ID NO: 170550 - RNA, 32 nt, Human
gccaccuccugcaugcugugcauguuauuggg

SEQ ID NO: 170551 - RNA, 17 nt, Human
gccaccuccugccacca

SEQ ID NO: 170552 - RNA, 19 nt, Human
gccaccuccugccaccaca

SEQ ID NO: 170553 - RNA, 32 nt, Human
gccaccuccugccucagguguccgcuauccac

SEQ ID NO: 170554 - RNA, 32 nt, Human
gccaccucgccuggccagaugcuagcauuuua

SEQ ID NO: 170555 - RNA, 32 nt, Human
gccaccucggggaacuccagaccaagggugag

SEQ ID NO: 170556 - RNA, 19 nt, Human
gccaccucuccacccagga

SEQ ID NO: 170557 - RNA, 32 nt, Human
gccaccucugagcacuugggcagccacuccuc

SEQ ID NO: 170558 - RNA, 32 nt, Human
gccaccucugcaacugcagcccucagucaccc

SEQ ID NO: 170559 - RNA, 32 nt, Human
gccaccucugcagggguuuccucuucagccug

SEQ ID NO: 170560 - RNA, 17 nt, Human
gccaccucugccugaga

SEQ ID NO: 170561 - RNA, 18 nt, Human
gccaccucugcggcugcu

SEQ ID NO: 170562 - RNA, 32 nt, Human
gccaccucuguccucaccuuguggccagaaua

SEQ ID NO: 170563 - RNA, 32 nt, Human
gccaccugaagcagccacugcccagggggugc

SEQ ID NO: 170564 - RNA, 20 nt, Human
gccaccugacucucaccucu

SEQ ID NO: 170565 - RNA, 32 nt, Human
gccaccugagccaccaccgagccauggcagga

SEQ ID NO: 170566 - RNA, 32 nt, Human
gccaccugagcgccgcucccucucaggaugaa

SEQ ID NO: 170567 - RNA, 32 nt, Human
gccaccugagcuccagccgcccacaaacugcu

SEQ ID NO: 170568 - RNA, 32 nt, Human
gccaccugagcuccugaggccaugucucacca

SEQ ID NO: 170569 - RNA, 32 nt, Human
gccaccugaggcacauccucucugaaacggcu

SEQ ID NO: 170570 - RNA, 21 nt, Human
gccaccugcaauagucuccug

SEQ ID NO: 170571 - RNA, 32 nt, Human
gccaccugcaccugggccuuuuccccaagcaa

SEQ ID NO: 170572 - RNA, 32 nt, Human
gccaccugcagggccucuuuagugcagagaaa

SEQ ID NO: 170573 - RNA, 15 nt, Human
gccaccugcccacca

SEQ ID NO: 170574 - RNA, 32 nt, Human
gccaccugcccagccauguuuggggcuuuauu

SEQ ID NO: 170575 - RNA, 21 nt, Human
gccaccugcccccuucuccca

SEQ ID NO: 170576 - RNA, 32 nt, Human
gccaccugccugacacccagggaugagcagug

SEQ ID NO: 170577 - RNA, 32 nt, Human
gccaccugcuaacucccugccuguguggucau

SEQ ID NO: 170578 - RNA, 32 nt, Human
gccaccugcucaccccacugccuguucuucuc

SEQ ID NO: 170579 - RNA, 32 nt, Human
gccaccugcuguagccacugggcucagcccug

SEQ ID NO: 170580 - RNA, 32 nt, Human
gccaccugcuuuguaaguggauugauuaauaa

SEQ ID NO: 170581 - RNA, 32 nt, Human
gccaccuggacuuccagucuggcuccaaaccu

SEQ ID NO: 170582 - RNA, 32 nt, Human
gccaccuggagggagagcagaccugcggcuga

SEQ ID NO: 170583 - RNA, 32 nt, Human
gccaccuggaggggcgaugaggcuccacgccc

SEQ ID NO: 170584 - RNA, 18 nt, Human
gccaccuggcaccuagaa

SEQ ID NO: 170585 - RNA, 32 nt, Human
gccaccugggcccaccuccucucacugucucu

SEQ ID NO: 170586 - RNA, 32 nt, Human
gccaccugggcccugaguguccacauauguuc

SEQ ID NO: 170587 - RNA, 32 nt, Human
gccaccugggcugcggcggcgacagcgacuuc

SEQ ID NO: 170588 - RNA, 32 nt, Human
gccaccuggugauuuugucucuagugaaacug

SEQ ID NO: 170589 - RNA, 32 nt, Human
gccaccuguagccaucugcacacaccuccgag

SEQ ID NO: 170590 - RNA, 32 nt, Human
gccaccuguccugcagugggccuguguggguu

SEQ ID NO: 170591 - RNA, 32 nt, Human
gccaccugugcccaugggcaccccagagcacc

SEQ ID NO: 170592 - RNA, 32 nt, Human
gccaccugugcuucaccaugcuccauccuccc

SEQ ID NO: 170593 - RNA, 25 nt, Human
gccaccuuacccugcccugacucua

SEQ ID NO: 170594 - RNA, 32 nt, Human
gccaccuuccaggggguaugggagacagguuu

SEQ ID NO: 170595 - RNA, 23 nt, Human
gccaccuucgggagccgccugca

SEQ ID NO: 170596 - RNA, 32 nt, Human
gccaccuucuccccgagcacugcccggccggc

SEQ ID NO: 170597 - RNA, 32 nt, Human
gccaccuucucccuuuccuggaccccagaguc

SEQ ID NO: 170598 - RNA, 21 nt, Human
gccaccuucugagccccaccc

SEQ ID NO: 170599 - RNA, 32 nt, Human
gccaccuucugcugccccggaguccccucccu

SEQ ID NO: 170600 - RNA, 32 nt, Human
gccaccuugccucaccaggccagccccacugg

SEQ ID NO: 170601 - RNA, 32 nt, Human
gccaccuuggaacucugaauagagacuugaag

SEQ ID NO: 170602 - RNA, 32 nt, Human
gccaccuuggccaggcuggcugugggaggguc

SEQ ID NO: 170603 - RNA, 32 nt, Human
gccaccuuggccugcuccucugggccaccucu

SEQ ID NO: 170604 - RNA, 32 nt, Human
gccaccuuggugacauaacagaaacaaaauca

SEQ ID NO: 170605 - RNA, 32 nt, Human
gccaccuuguacagaaccagcacucccagggc

SEQ ID NO: 170606 - RNA, 32 nt, Human
gccaccuuguucagcugccucuuccagagcac

SEQ ID NO: 170607 - RNA, 31 nt, Human
gccaccuuguuucucccugcucaugaggucg

SEQ ID NO: 170608 - RNA, 32 nt, Human
gccaccuuugcugucuugucuccugggacgag

SEQ ID NO: 170609 - RNA, 32 nt, Human
gccaccuuugugcagcuucgaggacaggaaag

SEQ ID NO: 170610 - RNA, 32 nt, Human
gccaccuuuuucucccccgcuggccaggggcu

SEQ ID NO: 170611 - RNA, 32 nt, Human
gccacgaagagagugaacaaucuuaagagcuu

SEQ ID NO: 170612 - RNA, 32 nt, Human
gccacgacagugccaaaaaguugugggucuuc

SEQ ID NO: 170613 - RNA, 32 nt, Human
gccacgacuacaccauggauaccagcuccagc

SEQ ID NO: 170614 - RNA, 32 nt, Human
gccacgagaggcaggcuggcugggacaugagg

SEQ ID NO: 170615 - RNA, 32 nt, Human
gccacgagcuaagaucuggacagggaaccuga

SEQ ID NO: 170616 - RNA, 32 nt, Human
gccacgauggguuuguuucuguuuucuugggu

SEQ ID NO: 170617 - RNA, 32 nt, Human
gccacgcacagacguaacacacaggugccagg

SEQ ID NO: 170618 - RNA, 21 nt, Human
gccacgcacaggcccugcaug

SEQ ID NO: 170619 - RNA, 32 nt, Human
gccacgcacccuacucuugcugguaaaaucac

SEQ ID NO: 170620 - RNA, 32 nt, Human
gccacgcacuccucuguagaugugugcccagu

SEQ ID NO: 170621 - RNA, 19 nt, Human
gccacgcagaguccugccu

SEQ ID NO: 170622 - RNA, 19 nt, Human
gccacgcagccccgccucu

SEQ ID NO: 170623 - RNA, 32 nt, Human
gccacgcaggccugaagccaggagugcggggu

SEQ ID NO: 170624 - RNA, 32 nt, Human
gccacgccacagccacagccgccgccaucacu

SEQ ID NO: 170625 - RNA, 15 nt, Human
gccacgccacgcacu

SEQ ID NO: 170626 - RNA, 32 nt, Human
gccacgcccuuagauuucugcaugagaaucag

SEQ ID NO: 170627 - RNA, 32 nt, Human
gccacgccgaagcucaccuggucagcgcacag

SEQ ID NO: 170628 - RNA, 21 nt, Human
gccacgccgcgugcgcuccgg

SEQ ID NO: 170629 - RNA, 23 nt, Human
gccacgccguguguaggcuuagc

SEQ ID NO: 170630 - RNA, 32 nt, Human
gccacgccuaucuucucucucugcuccuccuu

SEQ ID NO: 170631 - RNA, 32 nt, Human
gccacgccuggacccagagcugauguuuggcu

SEQ ID NO: 170632 - RNA, 32 nt, Human
gccacgccugggaggggcccagcugggguuac

SEQ ID NO: 170633 - RNA, 19 nt, Human
gccacgccuucuucgcaga

SEQ ID NO: 170634 - RNA, 32 nt, Human
gccacgcucagcccugguccggcaggggcucc

SEQ ID NO: 170635 - RNA, 21 nt, Human
gccacgcuccacagccgccgc

SEQ ID NO: 170636 - RNA, 32 nt, Human
gccacgcucuggggcaacuggcaccaggagcu

SEQ ID NO: 170637 - RNA, 32 nt, Human
gccacgcugaccuccugccucuccuaaccuca

SEQ ID NO: 170638 - RNA, 32 nt, Human
gccacgcugcagcagcucacaccucucugcgg

SEQ ID NO: 170639 - RNA, 32 nt, Human
gccacgcugccucucggccuaagcauguagca

SEQ ID NO: 170640 - RNA, 32 nt, Human
gccacgcugccuuccgcuccuccuggucuuuc

SEQ ID NO: 170641 - RNA, 32 nt, Human
gccacgcuuggugcacaggcaagacuugcuuc

SEQ ID NO: 170642 - RNA, 32 nt, Human
gccacggaacaggaagagggugaggcugucca

SEQ ID NO: 170643 - RNA, 32 nt, Human
gccacggaagucucccccuuugccaagccucg

SEQ ID NO: 170644 - RNA, 32 nt, Human
gccacggaauccuauguggagcagaguucuuu

SEQ ID NO: 170645 - RNA, 20 nt, Human
gccacggaauccuucaggug

SEQ ID NO: 170646 - RNA, 32 nt, Human
gccacggagcaguucagaguggaggcgggcuu

SEQ ID NO: 170647 - RNA, 32 nt, Human
gccacggagccccaccuggacacucaccauug

SEQ ID NO: 170648 - RNA, 32 nt, Human
gccacggaggggccaggagucucacaguggag

SEQ ID NO: 170649 - RNA, 32 nt, Human
gccacggcacuccagccugggugacagaguga

SEQ ID NO: 170650 - RNA, 21 nt, Human
gccacggcaggcagcgagcag

SEQ ID NO: 170651 - RNA, 26 nt, Human
gccacggccauggccaugggcagagg

SEQ ID NO: 170652 - RNA, 32 nt, Human
gccacggccauggggccgaaacccagaccucg

SEQ ID NO: 170653 - RNA, 19 nt, Human
gccacggcccccaccagca

SEQ ID NO: 170654 - RNA, 32 nt, Human
gccacggcucugcacagggccuagaugacucu

SEQ ID NO: 170655 - RNA, 32 nt, Human
gccacggcuuacagaccacuacaugaccuaua

SEQ ID NO: 170656 - RNA, 32 nt, Human
gccacgggaacuuggagagggagcuuggagaa

SEQ ID NO: 170657 - RNA, 20 nt, Human
gccacgggacaccucaggug

SEQ ID NO: 170658 - RNA, 32 nt, Human
gccacgggagcuacagcagucgcagccauggg

SEQ ID NO: 170659 - RNA, 32 nt, Human
gccacgggcagggauggaaggagcagugugau

SEQ ID NO: 170660 - RNA, 32 nt, Human
gccacgggccugauuccagaggagccgaacug

SEQ ID NO: 170661 - RNA, 32 nt, Human
gccacgggcucucagggugcuggggcagcccc

SEQ ID NO: 170662 - RNA, 32 nt, Human
gccacgggcucugccagcagacagccuuggca

SEQ ID NO: 170663 - RNA, 32 nt, Human
gccacggggaauggggcugagagccgguuccc

SEQ ID NO: 170664 - RNA, 32 nt, Human
gccacggggaaugguugcaauggcggaggcag

SEQ ID NO: 170665 - RNA, 31 nt, Human
gccacgggugagagagcaggagguaugaauu

SEQ ID NO: 170666 - RNA, 32 nt, Human
gccacggucagagggccccacugugaggcgug

SEQ ID NO: 170667 - RNA, 32 nt, Human
gccacggucggcgggggcugggcgcggccggg

SEQ ID NO: 170668 - RNA, 32 nt, Human
gccacggugcccugugcaccuuugggcugccc

SEQ ID NO: 170669 - RNA, 31 nt, Human
gccacguaccucucuggccuugugcagccag

SEQ ID NO: 170670 - RNA, 21 nt, Human
gccacgucccaccccaccucu

SEQ ID NO: 170671 - RNA, 32 nt, Human
gccacguccucccaaggggccuucugcccgcc

SEQ ID NO: 170672 - RNA, 32 nt, Human
gccacgucugcugaagccaugacuguagcaau

SEQ ID NO: 170673 - RNA, 32 nt, Human
gccacgugcagcugugcucaccccaggucauc

SEQ ID NO: 170674 - RNA, 32 nt, Human
gccacgugcccucuccccucuugaauguacuc

SEQ ID NO: 170675 - RNA, 31 nt, Human
gccacgugugagagagaagaaaaugguggcc

SEQ ID NO: 170676 - RNA, 32 nt, Human
gccacguucccuuuccuccucucccuccugug

SEQ ID NO: 170677 - RNA, 24 nt, Human
gccacguugccuaggcuggucuca

SEQ ID NO: 170678 - RNA, 32 nt, Human
gccacguuuccucugcggaguguagcagcccu

SEQ ID NO: 170679 - RNA, 22 nt, Human
gccacuaaggggaaaaugcaga

SEQ ID NO: 170680 - RNA, 32 nt, Human
gccacuacacuccaaccugggugacagagcga

SEQ ID NO: 170681 - RNA, 32 nt, Human
gccacuacacuccagccugggugacagagaga

SEQ ID NO: 170682 - RNA, 32 nt, Human
gccacuacacuccagccugggugacagaguga

SEQ ID NO: 170683 - RNA, 32 nt, Human
gccacuacaguacagugguuuucuuuucuuug

SEQ ID NO: 170684 - RNA, 32 nt, Human
gccacuaccauccugucaccagugggaccucu

SEQ ID NO: 170685 - RNA, 32 nt, Human
gccacuacuguacucuagccugggcagcagag

SEQ ID NO: 170686 - RNA, 32 nt, Human
gccacuagguauucuugcucccagaggcugaa

SEQ ID NO: 170687 - RNA, 32 nt, Human
gccacuaguacuccagccugggugacagagca

SEQ ID NO: 170688 - RNA, 32 nt, Human
gccacuaguauccuccugcuucccccugccau

SEQ ID NO: 170689 - RNA, 32 nt, Human
gccacuagucuggcagccuccaccucuugacc

SEQ ID NO: 170690 - RNA, 32 nt, Human
gccacuagugaaguuagucaauaaaagacuug

SEQ ID NO: 170691 - RNA, 32 nt, Human
gccacuaucagauuugcacaucaggagaaaag

SEQ ID NO: 170692 - RNA, 22 nt, Human
gccacuauccgcagcagccucg

SEQ ID NO: 170693 - RNA, 32 nt, Human
gccacuaugacuagucccauccuguacaugga

SEQ ID NO: 170694 - RNA, 22 nt, Human
gccacuaugcuuccuccucagg

SEQ ID NO: 170695 - RNA, 32 nt, Human
gccacucaaaagugcugggauuacuggcguca

SEQ ID NO: 170696 - RNA, 32 nt, Human
gccacucacauccucacuuugcugccccacca

SEQ ID NO: 170697 - RNA, 32 nt, Human
gccacucaccacugcugccaccucucuggcca

SEQ ID NO: 170698 - RNA, 32 nt, Human
gccacucacccucucugugcugucuccuccug

SEQ ID NO: 170699 - RNA, 21 nt, Human
gccacucacccuucugcuggc

SEQ ID NO: 170700 - RNA, 32 nt, Human
gccacucacugccuccuuccuccugguguugc

SEQ ID NO: 170701 - RNA, 32 nt, Human
gccacucagaggcucccagcuggguugguggg

SEQ ID NO: 170702 - RNA, 20 nt, Human
gccacucagcuuccuaccca

SEQ ID NO: 170703 - RNA, 24 nt, Human
gccacucaggugaggugcugguca

SEQ ID NO: 170704 - RNA, 32 nt, Human
gccacucaguucuuccuccaccuccacccagu

SEQ ID NO: 170705 - RNA, 32 nt, Human
gccacucauccccuugucucccucucugaacc

SEQ ID NO: 170706 - RNA, 32 nt, Human
gccacuccacaaaccacuaaaauuuuaguuuu

SEQ ID NO: 170707 - RNA, 32 nt, Human
gccacuccacaaccccagcgccagucagcaag

SEQ ID NO: 170708 - RNA, 19 nt, Human
gccacuccaccggcuccua

SEQ ID NO: 170709 - RNA, 32 nt, Human
gccacuccagcagcccugagugggaggagcca

SEQ ID NO: 170710 - RNA, 32 nt, Human
gccacuccagccagcccgccuccggggcggac

SEQ ID NO: 170711 - RNA, 32 nt, Human
gccacuccagggucuccguucugcuagaagcu

SEQ ID NO: 170712 - RNA, 32 nt, Human
gccacucccaccacccugacccugucuuucuc

SEQ ID NO: 170713 - RNA, 32 nt, Human
gccacucccacugucaucagcuuucaccuugg

SEQ ID NO: 170714 - RNA, 32 nt, Human
gccacucccccucccuuucccgcucuucuugc

SEQ ID NO: 170715 - RNA, 32 nt, Human
gccacucccggcacuccaugcuuagucacugc

SEQ ID NO: 170716 - RNA, 22 nt, Human
gccacucccuccagcagccugg

SEQ ID NO: 170717 - RNA, 32 nt, Human
gccacucccugccucucacuccagaccuguuc

SEQ ID NO: 170718 - RNA, 32 nt, Human
gccacuccucccagcucuucugugcuguccac

SEQ ID NO: 170719 - RNA, 20 nt, Human
gccacuccugcauaaagcuc

SEQ ID NO: 170720 - RNA, 21 nt, Human
gccacuccugcugcccuagaa

SEQ ID NO: 170721 - RNA, 32 nt, Human
gccacuccugcuggagggugaacuggggaccc

SEQ ID NO: 170722 - RNA, 22 nt, Human
gccacucgcagcacccuucccu

SEQ ID NO: 170723 - RNA, 32 nt, Human
gccacucgcuguuuggggcccggccuucaaau

SEQ ID NO: 170724 - RNA, 32 nt, Human
gccacucgcuucccugccaucuggcccuuccc

SEQ ID NO: 170725 - RNA, 17 nt, Human
gccacucggccucaggu

SEQ ID NO: 170726 - RNA, 32 nt, Human
gccacucgugucuuucgauggcucccuucccg

SEQ ID NO: 170727 - RNA, 32 nt, Human
gccacucuaagcugggcagacggagcacgagc

SEQ ID NO: 170728 - RNA, 32 nt, Human
gccacucuaccugaaccugcacaccuacgugc

SEQ ID NO: 170729 - RNA, 32 nt, Human
gccacucucaaugacaucugcuguaauuuugg

SEQ ID NO: 170730 - RNA, 32 nt, Human
gccacucucccaggaaggcguggggcugcggc

SEQ ID NO: 170731 - RNA, 22 nt, Human
gccacucuccugaggagcagcc

SEQ ID NO: 170732 - RNA, 32 nt, Human
gccacucucuccagggcucccaacaggauggg

SEQ ID NO: 170733 - RNA, 32 nt, Human
gccacucugagccagagaaggaaggggcaucu

SEQ ID NO: 170734 - RNA, 15 nt, Human
gccacucugccacca

SEQ ID NO: 170735 - RNA, 32 nt, Human
gccacucugccucugccugcauucugccgugu

SEQ ID NO: 170736 - RNA, 32 nt, Human
gccacucuugagccacaauaccugucaccagc

SEQ ID NO: 170737 - RNA, 32 nt, Human
gccacugaaaguccccacacacaaagccuuua

SEQ ID NO: 170738 - RNA, 32 nt, Human
gccacugaacuccagccugggugacagagcaa

SEQ ID NO: 170739 - RNA, 32 nt, Human
gccacugaacuccagccugggugacagaguga

SEQ ID NO: 170740 - RNA, 32 nt, Human
gccacugaagaggaggaggagggucuagaggc

SEQ ID NO: 170741 - RNA, 22 nt, Human
gccacugaaggggguaggggca

SEQ ID NO: 170742 - RNA, 32 nt, Human
gccacugaauacuguuaagaaggagguuuaua

SEQ ID NO: 170743 - RNA, 32 nt, Human
gccacugacccaccgccaccuccgcggagaga

SEQ ID NO: 170744 - RNA, 32 nt, Human
gccacugacccugacagcccacggcggguaca

SEQ ID NO: 170745 - RNA, 32 nt, Human
gccacugacucuuccugcuuccucacuuuccc

SEQ ID NO: 170746 - RNA, 32 nt, Human
gccacugagaacagccaaauucacaaacccuc

SEQ ID NO: 170747 - RNA, 32 nt, Human
gccacugagaagcaggcggguugggugggagg

SEQ ID NO: 170748 - RNA, 32 nt, Human
gccacugagacagcauagccuggguaacggaa

SEQ ID NO: 170749 - RNA, 32 nt, Human
gccacugagaccacgaacccaccagaaggaag

SEQ ID NO: 170750 - RNA, 32 nt, Human
gccacugagcccggccacagugcaguauuucu

SEQ ID NO: 170751 - RNA, 32 nt, Human
gccacugaggagaagguaagggaguacuuugg

SEQ ID NO: 170752 - RNA, 32 nt, Human
gccacugagguggaggaguccucggagacuaa

SEQ ID NO: 170753 - RNA, 32 nt, Human
gccacugaguugcugguugacugaggccaguc

SEQ ID NO: 170754 - RNA, 32 nt, Human
gccacugaucauaccacugcacuccagucugg

SEQ ID NO: 170755 - RNA, 22 nt, Human
gccacugauccugcaacuugcu

SEQ ID NO: 170756 - RNA, 16 nt, Human
gccacugaugcccagg

SEQ ID NO: 170757 - RNA, 32 nt, Human
gccacugcaaagauuccagccuggguccagga

SEQ ID NO: 170758 - RNA, 32 nt, Human
gccacugcaaaugacuugcaguuuccccuaca

SEQ ID NO: 170759 - RNA, 32 nt, Human
gccacugcaacccagccugggugacagagcga

SEQ ID NO: 170760 - RNA, 32 nt, Human
gccacugcaacuccagcuugggugacagagug

SEQ ID NO: 170761 - RNA, 32 nt, Human
gccacugcaaucuagccugggugacagagcaa

SEQ ID NO: 170762 - RNA, 32 nt, Human
gccacugcacaccagccugggugacagagcga

SEQ ID NO: 170763 - RNA, 32 nt, Human
gccacugcacaccagccugggugacaguguga

SEQ ID NO: 170764 - RNA, 32 nt, Human
gccacugcacaccggccugggugacagcauga

SEQ ID NO: 170765 - RNA, 32 nt, Human
gccacugcacacuagcuugggugacagaggaa

SEQ ID NO: 170766 - RNA, 32 nt, Human
gccacugcaccacuccagccugggcaacaaga

SEQ ID NO: 170767 - RNA, 19 nt, Human
gccacugcaccacugcacu

SEQ ID NO: 170768 - RNA, 32 nt, Human
gccacugcaccccagcccgggugacagagcga

SEQ ID NO: 170769 - RNA, 32 nt, Human
gccacugcaccccagccugggugacagagcga

SEQ ID NO: 170770 - RNA, 19 nt, Human
gccacugcacccggccgug

SEQ ID NO: 170771 - RNA, 32 nt, Human
gccacugcaccucuagucugggugacagagca

SEQ ID NO: 170772 - RNA, 32 nt, Human
gccacugcacgcacuccagccugggcgacaga

SEQ ID NO: 170773 - RNA, 32 nt, Human
gccacugcacuauagccuaggugacagaguga

SEQ ID NO: 170774 - RNA, 32 nt, Human
gccacugcacucaagccugggugacagagcga

SEQ ID NO: 170775 - RNA, 32 nt, Human
gccacugcacuccaaccugggugacagacucu

SEQ ID NO: 170776 - RNA, 32 nt, Human
gccacugcacuccaaccugggugacagagcga

SEQ ID NO: 170777 - RNA, 32 nt, Human
gccacugcacuccaaccugggugacagaguga

SEQ ID NO: 170778 - RNA, 32 nt, Human
gccacugcacuccaaucugggugacagaauaa

SEQ ID NO: 170779 - RNA, 32 nt, Human
gccacugcacuccacccugggugacagaguga

SEQ ID NO: 170780 - RNA, 32 nt, Human
gccacugcacuccagacuuggugacagagcaa

SEQ ID NO: 170781 - RNA, 32 nt, Human
gccacugcacuccagcacccugggcgacagag

SEQ ID NO: 170782 - RNA, 32 nt, Human
gccacugcacuccagcagucugggcgacagag

SEQ ID NO: 170783 - RNA, 32 nt, Human
gccacugcacuccagcccaggugacagagcga

SEQ ID NO: 170784 - RNA, 32 nt, Human
gccacugcacuccagcccaggugacagaggga

SEQ ID NO: 170785 - RNA, 32 nt, Human
gccacugcacuccagcccaggugacagaguga

SEQ ID NO: 170786 - RNA, 32 nt, Human
gccacugcacuccagcccgggugacagagcaa

SEQ ID NO: 170787 - RNA, 32 nt, Human
gccacugcacuccagcccgggugacagagcga

SEQ ID NO: 170788 - RNA, 32 nt, Human
gccacugcacuccagccggggugacagaagag

SEQ ID NO: 170789 - RNA, 32 nt, Human
gccacugcacuccagccuaggugacagagcaa

SEQ ID NO: 170790 - RNA, 32 nt, Human
gccacugcacuccagccuaggugacagaggga

SEQ ID NO: 170791 - RNA, 32 nt, Human
gccacugcacuccagccucggugacagagcaa

SEQ ID NO: 170792 - RNA, 32 nt, Human
gccacugcacuccagccugggugacagaacaa

SEQ ID NO: 170793 - RNA, 32 nt, Human
gccacugcacuccagccugggugacagaacga

SEQ ID NO: 170794 - RNA, 32 nt, Human
gccacugcacuccagccugggugacagaauga

SEQ ID NO: 170795 - RNA, 32 nt, Human
gccacugcacuccagccugggugacagagaca

SEQ ID NO: 170796 - RNA, 32 nt, Human
gccacugcacuccagccugggugacagagaga

SEQ ID NO: 170797 - RNA, 32 nt, Human
gccacugcacuccagccugggugacagagcaa

SEQ ID NO: 170798 - RNA, 32 nt, Human
gccacugcacuccagccugggugacagagcag

SEQ ID NO: 170799 - RNA, 32 nt, Human
gccacugcacuccagccugggugacagagcca

SEQ ID NO: 170800 - RNA, 32 nt, Human
gccacugcacuccagccugggugacagagcga

SEQ ID NO: 170801 - RNA, 32 nt, Human
gccacugcacuccagccugggugacagagcgu

SEQ ID NO: 170802 - RNA, 32 nt, Human
gccacugcacuccagccugggugacagaggga

SEQ ID NO: 170803 - RNA, 32 nt, Human
gccacugcacuccagccugggugacagaguaa

SEQ ID NO: 170804 - RNA, 32 nt, Human
gccacugcacuccagccugggugacagaguca

SEQ ID NO: 170805 - RNA, 32 nt, Human
gccacugcacuccagccugggugacagaguga

SEQ ID NO: 170806 - RNA, 32 nt, Human
gccacugcacuccagccugggugacagcgaga

SEQ ID NO: 170807 - RNA, 32 nt, Human
gccacugcacuccagccugggugacagcgcga

SEQ ID NO: 170808 - RNA, 32 nt, Human
gccacugcacuccagccugggugacagggcaa

SEQ ID NO: 170809 - RNA, 32 nt, Human
gccacugcacuccagccugggugacagugaga

SEQ ID NO: 170810 - RNA, 32 nt, Human
gccacugcacuccagccuuggugacagagcaa

SEQ ID NO: 170811 - RNA, 32 nt, Human
gccacugcacuccagcuggagugacagagcca

SEQ ID NO: 170812 - RNA, 32 nt, Human
gccacugcacuccagcuuaggugacagaguga

SEQ ID NO: 170813 - RNA, 32 nt, Human
gccacugcacuccagcuugggugacagagcaa

SEQ ID NO: 170814 - RNA, 32 nt, Human
gccacugcacuccagcuugggugacagaguga

SEQ ID NO: 170815 - RNA, 32 nt, Human
gccacugcacuccaggccugggugacagugcg

SEQ ID NO: 170816 - RNA, 32 nt, Human
gccacugcacuccaggcugggugacagagcga

SEQ ID NO: 170817 - RNA, 32 nt, Human
gccacugcacuccagucugggugacagagaga

SEQ ID NO: 170818 - RNA, 32 nt, Human
gccacugcacuccagucugggugacagaguga

SEQ ID NO: 170819 - RNA, 32 nt, Human
gccacugcacuccagucugggugacagcaaga

SEQ ID NO: 170820 - RNA, 32 nt, Human
gccacugcacuccauccagccugggugacagg

SEQ ID NO: 170821 - RNA, 32 nt, Human
gccacugcacuccauccugggugacagcaaga

SEQ ID NO: 170822 - RNA, 32 nt, Human
gccacugcacucccagccugggcaacggagug

SEQ ID NO: 170823 - RNA, 32 nt, Human
gccacugcacuccggccuaggugacagaggga

SEQ ID NO: 170824 - RNA, 32 nt, Human
gccacugcacuccugccugggugacagaagag

SEQ ID NO: 170825 - RNA, 32 nt, Human
gccacugcacucgagccugggugacagaguga

SEQ ID NO: 170826 - RNA, 32 nt, Human
gccacugcacucuagccucggugacagaguaa

SEQ ID NO: 170827 - RNA, 32 nt, Human
gccacugcacucuagccugggugacagagaga

SEQ ID NO: 170828 - RNA, 32 nt, Human
gccacugcacucuagccugggugacagagcaa

SEQ ID NO: 170829 - RNA, 32 nt, Human
gccacugcacucuagccugggugacagagcga

SEQ ID NO: 170830 - RNA, 32 nt, Human
gccacugcacucuagccugggugacagaguga

SEQ ID NO: 170831 - RNA, 32 nt, Human
gccacugcacucuagccugggugacagauaaa

SEQ ID NO: 170832 - RNA, 32 nt, Human
gccacugcacugcacgccagccuaggcgacag

SEQ ID NO: 170833 - RNA, 32 nt, Human
gccacugcacugcacuccagccugggugacaa

SEQ ID NO: 170834 - RNA, 32 nt, Human
gccacugcacugcaggcugggugacagaguga

SEQ ID NO: 170835 - RNA, 32 nt, Human
gccacugcacuucagccugggugacagaaaga

SEQ ID NO: 170836 - RNA, 32 nt, Human
gccacugcacuucagccugggugacagagcaa

SEQ ID NO: 170837 - RNA, 32 nt, Human
gccacugcacuucagccugggugacagagcua

SEQ ID NO: 170838 - RNA, 32 nt, Human
gccacugcacuucagccugggugacagaguga

SEQ ID NO: 170839 - RNA, 32 nt, Human
gccacugcacuucagcuugggugacagagcca

SEQ ID NO: 170840 - RNA, 32 nt, Human
gccacugcacuuccagccugggugacacagug

SEQ ID NO: 170841 - RNA, 32 nt, Human
gccacugcacuuccagccugggugacagagug

SEQ ID NO: 170842 - RNA, 32 nt, Human
gccacugcacuuuagccugggugacagagcga

SEQ ID NO: 170843 - RNA, 32 nt, Human
gccacugcaggauuugggggcgguggggaaga

SEQ ID NO: 170844 - RNA, 32 nt, Human
gccacugcaguccagccugggugacagagcca

SEQ ID NO: 170845 - RNA, 32 nt, Human
gccacugcaguccgcagcccagccugggcgac

SEQ ID NO: 170846 - RNA, 32 nt, Human
gccacugcaguccgcaguccagccugggcgac

SEQ ID NO: 170847 - RNA, 32 nt, Human
gccacugcauaccagccuaggugacagaauga

SEQ ID NO: 170848 - RNA, 32 nt, Human
gccacugcauuccagccugggcaacagagcaa

SEQ ID NO: 170849 - RNA, 32 nt, Human
gccacugcauuccagccugggcaacagagcga

SEQ ID NO: 170850 - RNA, 32 nt, Human
gccacugcauuccagccugggugacagaauga

SEQ ID NO: 170851 - RNA, 32 nt, Human
gccacugcauuccggccugggcgacagagcga

SEQ ID NO: 170852 - RNA, 22 nt, Human
gccacugccaccgccgccgccu

SEQ ID NO: 170853 - RNA, 32 nt, Human
gccacugccccagggcaugucucuacucacca

SEQ ID NO: 170854 - RNA, 17 nt, Human
gccacugccccaggguc

SEQ ID NO: 170855 - RNA, 32 nt, Human
gccacugcccuccagccugggugacagaguga

SEQ ID NO: 170856 - RNA, 32 nt, Human
gccacugccucccagguucaagugauucuccu

SEQ ID NO: 170857 - RNA, 32 nt, Human
gccacugccuccuggguucaggugauucuccu

SEQ ID NO: 170858 - RNA, 32 nt, Human
gccacugccucuuccucccucauuccaccuuc

SEQ ID NO: 170859 - RNA, 32 nt, Human
gccacugccucuucuuuucccugcugccacuu

SEQ ID NO: 170860 - RNA, 20 nt, Human
gccacugccuucaugcugcc

SEQ ID NO: 170861 - RNA, 19 nt, Human
gccacugccuucugcugcc

SEQ ID NO: 170862 - RNA, 32 nt, Human
gccacugcgacccggcgaagagaaaaaggaac

SEQ ID NO: 170863 - RNA, 32 nt, Human
gccacugcgccuggccuguugcuuauuuuaaa

SEQ ID NO: 170864 - RNA, 32 nt, Human
gccacugcgcuccagccugggugacagaguga

SEQ ID NO: 170865 - RNA, 32 nt, Human
gccacugcguccgguccaucugacuucucaaa

SEQ ID NO: 170866 - RNA, 32 nt, Human
gccacugcucaacuucccccuccugcagggga

SEQ ID NO: 170867 - RNA, 32 nt, Human
gccacugcucuccagccugggugacagaggaa

SEQ ID NO: 170868 - RNA, 32 nt, Human
gccacugcucucuggaugaccuugccaccucc

SEQ ID NO: 170869 - RNA, 32 nt, Human
gccacugcuggcacggugugagcgccaggcau

SEQ ID NO: 170870 - RNA, 32 nt, Human
gccacugcuguuccugucacacauuccugcaa

SEQ ID NO: 170871 - RNA, 32 nt, Human
gccacuggaaaaucccacagggguauaucgag

SEQ ID NO: 170872 - RNA, 16 nt, Human
gccacuggaccacagg

SEQ ID NO: 170873 - RNA, 16 nt, Human
gccacuggacccaggu

SEQ ID NO: 170874 - RNA, 32 nt, Human
gccacuggacucccagccugggugacagagcg

SEQ ID NO: 170875 - RNA, 18 nt, Human
gccacuggagaccucagg

SEQ ID NO: 170876 - RNA, 20 nt, Human
gccacuggaggguccgggug

SEQ ID NO: 170877 - RNA, 18 nt, Human
gccacuggauccagccag

SEQ ID NO: 170878 - RNA, 16 nt, Human
gccacuggaucccagg

SEQ ID NO: 170879 - RNA, 16 nt, Human
gccacuggauccuggu

SEQ ID NO: 170880 - RNA, 32 nt, Human
gccacuggaucggccucacagacucagagcgu

SEQ ID NO: 170881 - RNA, 18 nt, Human
gccacuggaucuucaugg

SEQ ID NO: 170882 - RNA, 17 nt, Human
gccacuggaucuuuggg

SEQ ID NO: 170883 - RNA, 32 nt, Human
gccacuggauuggugguagggcggggcgggcc

SEQ ID NO: 170884 - RNA, 32 nt, Human
gccacuggcaaauguaacugugccaguucuuu

SEQ ID NO: 170885 - RNA, 32 nt, Human
gccacuggcauugccaagaacgugugggcugu

SEQ ID NO: 170886 - RNA, 23 nt, Human
gccacuggcccuugcccaaggca

SEQ ID NO: 170887 - RNA, 17 nt, Human
gccacuggccuuucagg

SEQ ID NO: 170888 - RNA, 32 nt, Human
gccacuggcuaugcaaggccacaaguugugcu

SEQ ID NO: 170889 - RNA, 16 nt, Human
gccacuggcucccagg

SEQ ID NO: 170890 - RNA, 18 nt, Human
gccacuggcucucacgug

SEQ ID NO: 170891 - RNA, 32 nt, Human
gccacuggcugcagaaauggcucgacggggug

SEQ ID NO: 170892 - RNA, 19 nt, Human
gccacuggcuuagcccagg

SEQ ID NO: 170893 - RNA, 22 nt, Human
gccacugggaaauaccaccagu

SEQ ID NO: 170894 - RNA, 32 nt, Human
gccacugggaccccacgcucagcuccgacugg

SEQ ID NO: 170895 - RNA, 32 nt, Human
gccacugggaccccuccccuacaugcaccaau

SEQ ID NO: 170896 - RNA, 32 nt, Human
gccacugggacccgucucagcacauccuggcc

SEQ ID NO: 170897 - RNA, 32 nt, Human
gccacugggagaggggccagaggagcggcuau

SEQ ID NO: 170898 - RNA, 18 nt, Human
gccacugggcacaagcca

SEQ ID NO: 170899 - RNA, 18 nt, Human
gccacugggcgacagagu

SEQ ID NO: 170900 - RNA, 32 nt, Human
gccacugggcuggucugugucugggccugucc

SEQ ID NO: 170901 - RNA, 16 nt, Human
gccacuggggcucagg

SEQ ID NO: 170902 - RNA, 32 nt, Human
gccacuggggucagcauuugagcucagcuaug

SEQ ID NO: 170903 - RNA, 32 nt, Human
gccacugggugaggacacagcaagaagccgcc

SEQ ID NO: 170904 - RNA, 32 nt, Human
gccacugguaccgcggcccagccuggggccug

SEQ ID NO: 170905 - RNA, 18 nt, Human
gccacugguaccugaggu

SEQ ID NO: 170906 - RNA, 17 nt, Human
gccacuggucaaucagg

SEQ ID NO: 170907 - RNA, 19 nt, Human
gccacugguccugcugcug

SEQ ID NO: 170908 - RNA, 32 nt, Human
gccacuggucucaaagcugggcagcccauugc

SEQ ID NO: 170909 - RNA, 18 nt, Human
gccacuggugccucgagu

SEQ ID NO: 170910 - RNA, 32 nt, Human
gccacuggugccuucucuuaguaacagggaac

SEQ ID NO: 170911 - RNA, 32 nt, Human
gccacugguggaggugcacuggaaggucaggg

SEQ ID NO: 170912 - RNA, 32 nt, Human
gccacugguguuuucccugccagugcagguga

SEQ ID NO: 170913 - RNA, 24 nt, Human
gccacugguuucucagaauccaaa

SEQ ID NO: 170914 - RNA, 32 nt, Human
gccacuguacaccagccugggugacagagcaa

SEQ ID NO: 170915 - RNA, 32 nt, Human
gccacuguacaucaccagccugggcgacagag

SEQ ID NO: 170916 - RNA, 32 nt, Human
gccacuguacuccagccuaggugacagagcaa

SEQ ID NO: 170917 - RNA, 32 nt, Human
gccacuguacuccagccugggugacagagcga

SEQ ID NO: 170918 - RNA, 32 nt, Human
gccacuguacuccagccugggugacagaguga

SEQ ID NO: 170919 - RNA, 32 nt, Human
gccacuguacuccagcgugggugacagaguga

SEQ ID NO: 170920 - RNA, 32 nt, Human
gccacuguacugcagccugggugacagaauga

SEQ ID NO: 170921 - RNA, 32 nt, Human
gccacuguauuccaacuugggugacagagcac

SEQ ID NO: 170922 - RNA, 32 nt, Human
gccacuguauuccagacugggugacagaguga

SEQ ID NO: 170923 - RNA, 32 nt, Human
gccacuguccccaccaugaugaugacacagcc

SEQ ID NO: 170924 - RNA, 32 nt, Human
gccacugugaagccucaggaaggggcucggau

SEQ ID NO: 170925 - RNA, 32 nt, Human
gccacugugcaggaguagggaggaaaaggagu

SEQ ID NO: 170926 - RNA, 32 nt, Human
gccacugugccacccccagcccccacccagcc

SEQ ID NO: 170927 - RNA, 19 nt, Human
gccacugugccaggcucag

SEQ ID NO: 170928 - RNA, 32 nt, Human
gccacugugcccagccucacagcugcaucuua

SEQ ID NO: 170929 - RNA, 32 nt, Human
gccacugugccuggccucaacuguugcuucuu

SEQ ID NO: 170930 - RNA, 32 nt, Human
gccacuguucugcgcuuuaauugugggagaag

SEQ ID NO: 170931 - RNA, 32 nt, Human
gccacuuaagguguuggaaucccugggcaaag

SEQ ID NO: 170932 - RNA, 32 nt, Human
gccacuuaauagcucugugaucuugggcaagu

SEQ ID NO: 170933 - RNA, 32 nt, Human
gccacuuagucgggauagaacaugguucgcaa

SEQ ID NO: 170934 - RNA, 32 nt, Human
gccacuucacuccagccugggugacagagacc

SEQ ID NO: 170935 - RNA, 20 nt, Human
gccacuucccaggcugccuc

SEQ ID NO: 170936 - RNA, 18 nt, Human
gccacuuccggggacaga

SEQ ID NO: 170937 - RNA, 22 nt, Human
gccacuuccuagugcacaccuc

SEQ ID NO: 170938 - RNA, 32 nt, Human
gccacuuccuuuccauaaaccauaaugauggg

SEQ ID NO: 170939 - RNA, 32 nt, Human
gccacuucucuuccaggcagggcucucaucgg

SEQ ID NO: 170940 - RNA, 32 nt, Human
gccacuucucuucccuucauucuucgccaggc

SEQ ID NO: 170941 - RNA, 32 nt, Human
gccacuucuuccuacauugauuuaggaugggg

SEQ ID NO: 170942 - RNA, 32 nt, Human
gccacuugaauccuccagggccuguguccuca

SEQ ID NO: 170943 - RNA, 32 nt, Human
gccacuugauuagagaccuagcacaggaggaa

SEQ ID NO: 170944 - RNA, 32 nt, Human
gccacuugcgccucuccagccuccgcaggccc

SEQ ID NO: 170945 - RNA, 32 nt, Human
gccacuuggcugaccagguuguggcagaggau

SEQ ID NO: 170946 - RNA, 32 nt, Human
gccacuugggccaagacugcgccaggugacac

SEQ ID NO: 170947 - RNA, 21 nt, Human
gccacuuggugacagagccag

SEQ ID NO: 170948 - RNA, 32 nt, Human
gccacuuguaucaacuuuacugccuuugucgg

SEQ ID NO: 170949 - RNA, 32 nt, Human
gccacuugucuacaaccaucugaucuuugaca

SEQ ID NO: 170950 - RNA, 31 nt, Human
gccacuuucaauaaagaccugacuuggagac

SEQ ID NO: 170951 - RNA, 32 nt, Human
gccacuuucauggcagcucaucaggcgcaggg

SEQ ID NO: 170952 - RNA, 32 nt, Human
gccacuuucucagggaauuggacagaggaaag

SEQ ID NO: 170953 - RNA, 32 nt, Human
gccacuuucugcauggcucccaccgcagcuga

SEQ ID NO: 170954 - RNA, 32 nt, Human
gccacuuugcaaaggagcucacuguggugucu

SEQ ID NO: 170955 - RNA, 32 nt, Human
gccacuuugccacagaggccucaggcuucucc

SEQ ID NO: 170956 - RNA, 32 nt, Human
gccacuuugguacauggccagugugaucccaa

SEQ ID NO: 170957 - RNA, 32 nt, Human
gccacuuuucuuuccccuuccuuccuuccuuu

SEQ ID NO: 170958 - RNA, 32 nt, Human
gccacuuuuuacucucccuccugaccagucca

SEQ ID NO: 170959 - RNA, 20 nt, Human
gccagaaaacacccaccucu

SEQ ID NO: 170960 - RNA, 32 nt, Human
gccagaaaacaugccuacuacuaccagcagaa

SEQ ID NO: 170961 - RNA, 25 nt, Human
gccagaaaagggccccgccuugcca

SEQ ID NO: 170962 - RNA, 32 nt, Human
gccagaaacagcuucauauggacacugggacu

SEQ ID NO: 170963 - RNA, 23 nt, Human
gccagaaacagugggagcccuga

SEQ ID NO: 170964 - RNA, 32 nt, Human
gccagaaacuuccagaaagaaggagaaacucu

SEQ ID NO: 170965 - RNA, 32 nt, Human
gccagaaagagcugcugcaggagcagccggau

SEQ ID NO: 170966 - RNA, 23 nt, Human
gccagaaagcagaguggcaucac

SEQ ID NO: 170967 - RNA, 32 nt, Human
gccagaaagcccggaagcaaggaaggaaagug

SEQ ID NO: 170968 - RNA, 20 nt, Human
gccagaaauccaggcucuga

SEQ ID NO: 170969 - RNA, 21 nt, Human
gccagaaaugcaaggaacuga

SEQ ID NO: 170970 - RNA, 32 nt, Human
gccagaacacccugagggucucggggcucugg

SEQ ID NO: 170971 - RNA, 32 nt, Human
gccagaaccagcuucuggacucccugcaugga

SEQ ID NO: 170972 - RNA, 32 nt, Human
gccagaaccaggcaccaugguggagaagggau

SEQ ID NO: 170973 - RNA, 32 nt, Human
gccagaaccccuggcagccacagagcucaggc

SEQ ID NO: 170974 - RNA, 32 nt, Human
gccagaacgcaccuggccucugcuccaccuca

SEQ ID NO: 170975 - RNA, 20 nt, Human
gccagaacgccggggcccgg

SEQ ID NO: 170976 - RNA, 32 nt, Human
gccagaacuaugaggguccucucuggcacuag

SEQ ID NO: 170977 - RNA, 21 nt, Human
gccagaacugacuugaaccua

SEQ ID NO: 170978 - RNA, 32 nt, Human
gccagaacugugcccaggcccaaaggagacaa

SEQ ID NO: 170979 - RNA, 23 nt, Human
gccagaagacccaagcuaagcua

SEQ ID NO: 170980 - RNA, 32 nt, Human
gccagaagagaaacugugucacccuaaagaag

SEQ ID NO: 170981 - RNA, 19 nt, Human
gccagaagagaagcacugg

SEQ ID NO: 170982 - RNA, 32 nt, Human
gccagaagcaggugaagagcaaccacaaguuu

SEQ ID NO: 170983 - RNA, 26 nt, Human
gccagaagcaguaagaagacauguug

SEQ ID NO: 170984 - RNA, 32 nt, Human
gccagaagccaggggguggggaagagagacgu

SEQ ID NO: 170985 - RNA, 21 nt, Human
gccagaagcccaggggcucag

SEQ ID NO: 170986 - RNA, 20 nt, Human
gccagaagcccauucccgcc

SEQ ID NO: 170987 - RNA, 32 nt, Human
gccagaagcugauguugaguccguuuugggug

SEQ ID NO: 170988 - RNA, 27 nt, Human
gccagaaggaaugaaggccugcaguga

SEQ ID NO: 170989 - RNA, 32 nt, Human
gccagaaggaaugaaggccugcagugaggaug

SEQ ID NO: 170990 - RNA, 21 nt, Human
gccagaaggccgggugcccag

SEQ ID NO: 170991 - RNA, 25 nt, Human
gccagaaggccgggugcccaggagc

SEQ ID NO: 170992 - RNA, 32 nt, Human
gccagaaggccugcugagggcuguugggagug

SEQ ID NO: 170993 - RNA, 32 nt, Human
gccagaaggccuggcuggcugugacuuaccau

SEQ ID NO: 170994 - RNA, 32 nt, Human
gccagaagggagccagaaguggggcagacaug

SEQ ID NO: 170995 - RNA, 21 nt, Human
gccagaagggagggaaacuga

SEQ ID NO: 170996 - RNA, 32 nt, Human
gccagaaggguccucagacagcccaauaaggg

SEQ ID NO: 170997 - RNA, 32 nt, Human
gccagaagggugccugggaggccagguucugg

SEQ ID NO: 170998 - RNA, 32 nt, Human
gccagaagguucucucugcacagcugccuccc

SEQ ID NO: 170999 - RNA, 22 nt, Human
gccagaagguuguccagcagug

SEQ ID NO: 171000 - RNA, 31 nt, Human
gccagaaguagaccugucuaggcacuaaggg

SEQ ID NO: 171001 - RNA, 32 nt, Human
gccagaagugcaacauguaugugcaaaagcua

SEQ ID NO: 171002 - RNA, 32 nt, Human
gccagaaucgucugauuccuguuucugauuuc

SEQ ID NO: 171003 - RNA, 21 nt, Human
gccagaaucugcuucaccucu

SEQ ID NO: 171004 - RNA, 32 nt, Human
gccagaaugcagauggagcuggcuuggcuguu

SEQ ID NO: 171005 - RNA, 32 nt, Human
gccagaaugguggcucaugccuguaaucccag

SEQ ID NO: 171006 - RNA, 32 nt, Human
gccagacaaagaauucagaaggucaaguauua

SEQ ID NO: 171007 - RNA, 32 nt, Human
gccagacaagauggcaaagugugcagaugguu

SEQ ID NO: 171008 - RNA, 32 nt, Human
gccagacaaucccuccuuuagccagggauuug

SEQ ID NO: 171009 - RNA, 32 nt, Human
gccagacacacccacaccacccacugucugca

SEQ ID NO: 171010 - RNA, 18 nt, Human
gccagacacacuuccucu

SEQ ID NO: 171011 - RNA, 20 nt, Human
gccagacacaggcccucccu

SEQ ID NO: 171012 - RNA, 18 nt, Human
gccagacacaggugccuc

SEQ ID NO: 171013 - RNA, 19 nt, Human
gccagacacaggugccuca

SEQ ID NO: 171014 - RNA, 20 nt, Human
gccagacacauccugccccu

SEQ ID NO: 171015 - RNA, 24 nt, Human
gccagacacaugaugugggcucag

SEQ ID NO: 171016 - RNA, 32 nt, Human
gccagacacaugcacacacaucacacccucaa

SEQ ID NO: 171017 - RNA, 20 nt, Human
gccagacacauggcuauccu

SEQ ID NO: 171018 - RNA, 20 nt, Human
gccagacacauuccaccucu

SEQ ID NO: 171019 - RNA, 21 nt, Human
gccagacaccaccuguucuca

SEQ ID NO: 171020 - RNA, 17 nt, Human
gccagacacccucaccu

SEQ ID NO: 171021 - RNA, 17 nt, Human
gccagacaccuccccuc

SEQ ID NO: 171022 - RNA, 19 nt, Human
gccagacaccugcaucccu

SEQ ID NO: 171023 - RNA, 18 nt, Human
gccagacaccugcgcccu

SEQ ID NO: 171024 - RNA, 32 nt, Human
gccagacacucucuuucagccucuuuugcagg

SEQ ID NO: 171025 - RNA, 17 nt, Human
gccagacacugcacccu

SEQ ID NO: 171026 - RNA, 32 nt, Human
gccagacacugcacccugacuggggauccugu

SEQ ID NO: 171027 - RNA, 32 nt, Human
gccagacacugcacucaugcagcggaaaggac

SEQ ID NO: 171028 - RNA, 17 nt, Human
gccagacacuggccuuu

SEQ ID NO: 171029 - RNA, 32 nt, Human
gccagacagacccugaaaagaaggacggguug

SEQ ID NO: 171030 - RNA, 19 nt, Human
gccagacagacuucaccuc

SEQ ID NO: 171031 - RNA, 19 nt, Human
gccagacagaggccccucu

SEQ ID NO: 171032 - RNA, 32 nt, Human
gccagacaggcagacugggaggauggaggacg

SEQ ID NO: 171033 - RNA, 31 nt, Human
gccagaccaauaaaauaccugguugaaauac

SEQ ID NO: 171034 - RNA, 32 nt, Human
gccagaccagcaaccagauuaucuagugccac

SEQ ID NO: 171035 - RNA, 20 nt, Human
gccagaccagcagagcaggg

SEQ ID NO: 171036 - RNA, 22 nt, Human
gccagaccaggaaccugagcca

SEQ ID NO: 171037 - RNA, 23 nt, Human
gccagaccaggaggccuaggggu

SEQ ID NO: 171038 - RNA, 26 nt, Human
gccagaccaggccagacugaggguca

SEQ ID NO: 171039 - RNA, 32 nt, Human
gccagaccaggccagacugagggucaggggac

SEQ ID NO: 171040 - RNA, 32 nt, Human
gccagaccagugcaauggauagaaugggcugu

SEQ ID NO: 171041 - RNA, 30 nt, Human
gccagacccacuccugccucccacccgggu

SEQ ID NO: 171042 - RNA, 32 nt, Human
gccagacccacugucgccauucccacuucugg

SEQ ID NO: 171043 - RNA, 32 nt, Human
gccagacccaggaccuggacuuccagcagcug

SEQ ID NO: 171044 - RNA, 32 nt, Human
gccagacccaggagccaagagaaggcugaagc

SEQ ID NO: 171045 - RNA, 21 nt, Human
gccagacccagggaccuggag

SEQ ID NO: 171046 - RNA, 32 nt, Human
gccagacccaggugccccagugccuuugucua

SEQ ID NO: 171047 - RNA, 20 nt, Human
gccagacccggagccggagc

SEQ ID NO: 171048 - RNA, 32 nt, Human
gccagacccgggcccugagcucccagcuggag

SEQ ID NO: 171049 - RNA, 32 nt, Human
gccagacccugccuccccucccgccggccaac

SEQ ID NO: 171050 - RNA, 32 nt, Human
gccagacccugggcccucucuccucacugcac

SEQ ID NO: 171051 - RNA, 32 nt, Human
gccagaccgacaccucgcugccagguuguuuc

SEQ ID NO: 171052 - RNA, 19 nt, Human
gccagaccgccuccaccuc

SEQ ID NO: 171053 - RNA, 32 nt, Human
gccagaccuacugcugugcuguuucuuuuucu

SEQ ID NO: 171054 - RNA, 31 nt, Human
gccagaccuagaguguccacagcaggccugu

SEQ ID NO: 171055 - RNA, 32 nt, Human
gccagacgccucaccuucucuccauucuaugg

SEQ ID NO: 171056 - RNA, 17 nt, Human
gccagacgcgccaccuu

SEQ ID NO: 171057 - RNA, 18 nt, Human
gccagacggacagccagc

SEQ ID NO: 171058 - RNA, 20 nt, Human
gccagacggagagccaccuc

SEQ ID NO: 171059 - RNA, 20 nt, Human
gccagacgggcccacccaca

SEQ ID NO: 171060 - RNA, 19 nt, Human
gccagacggggaugcucag

SEQ ID NO: 171061 - RNA, 32 nt, Human
gccagacuccagccuguuuccccagcccugca

SEQ ID NO: 171062 - RNA, 22 nt, Human
gccagacucguaugaggcuccc

SEQ ID NO: 171063 - RNA, 20 nt, Human
gccagacugagaaggcuccc

SEQ ID NO: 171064 - RNA, 32 nt, Human
gccagacugcaacuuaagcuaucuggaaucuu

SEQ ID NO: 171065 - RNA, 32 nt, Human
gccagacugcagcagagugaggagugagggca

SEQ ID NO: 171066 - RNA, 32 nt, Human
gccagacugccuggccuugaaaaucucagcuu

SEQ ID NO: 171067 - RNA, 32 nt, Human
gccagacugccuggcugugcaacuagccuugu

SEQ ID NO: 171068 - RNA, 32 nt, Human
gccagacugccugggccugcccagauggccac

SEQ ID NO: 171069 - RNA, 32 nt, Human
gccagacugccuggguccuggcgccuggcggu

SEQ ID NO: 171070 - RNA, 32 nt, Human
gccagacuggucucaaacuccugggcugaaac

SEQ ID NO: 171071 - RNA, 32 nt, Human
gccagacuguucuguagguuaaguccauugau

SEQ ID NO: 171072 - RNA, 32 nt, Human
gccagacuucucuccagcagcaaagccagccu

SEQ ID NO: 171073 - RNA, 32 nt, Human
gccagacuuggcugauguuuucuuguuucugu

SEQ ID NO: 171074 - RNA, 32 nt, Human
gccagagaaccagcuauaaguccugagaagac

SEQ ID NO: 171075 - RNA, 32 nt, Human
gccagagaaccagcucugaguccugaggagac

SEQ ID NO: 171076 - RNA, 32 nt, Human
gccagagaagaguccuuucuucucuacaucca

SEQ ID NO: 171077 - RNA, 32 nt, Human
gccagagaagccaggugaccagggacccgcgg

SEQ ID NO: 171078 - RNA, 32 nt, Human
gccagagacagcaggagaaggguuggcugugg

SEQ ID NO: 171079 - RNA, 32 nt, Human
gccagagacugauccuggcucugacggcugaa

SEQ ID NO: 171080 - RNA, 21 nt, Human
gccagagagaggcggcagcaa

SEQ ID NO: 171081 - RNA, 18 nt, Human
gccagagagcaccaggga

SEQ ID NO: 171082 - RNA, 32 nt, Human
gccagagagcagagaagagaccuagaggaucu

SEQ ID NO: 171083 - RNA, 32 nt, Human
gccagagagcaucuuuccccugugcuuggaaa

SEQ ID NO: 171084 - RNA, 32 nt, Human
gccagagagcggggcuuagggagacuggccuu

SEQ ID NO: 171085 - RNA, 32 nt, Human
gccagagagcucuucugcaguggugcggccuu

SEQ ID NO: 171086 - RNA, 32 nt, Human
gccagagaggagccaggagccaugaggguggc

SEQ ID NO: 171087 - RNA, 32 nt, Human
gccagagagguagaggcugcagugagcuauga

SEQ ID NO: 171088 - RNA, 32 nt, Human
gccagagaguauuaugagggaggccgaggacu

SEQ ID NO: 171089 - RNA, 20 nt, Human
gccagagauauuccaacucu

SEQ ID NO: 171090 - RNA, 32 nt, Human
gccagagaugcugaagauacagaccuuggaca

SEQ ID NO: 171091 - RNA, 32 nt, Human
gccagagauggacuggacgccgccgggcgcug

SEQ ID NO: 171092 - RNA, 32 nt, Human
gccagagaugucucacagcacauauguacuuu

SEQ ID NO: 171093 - RNA, 32 nt, Human
gccagagcagcacagcaucacacuccacguag

SEQ ID NO: 171094 - RNA, 32 nt, Human
gccagagcaggguggcgcaggagcuggcaaga

SEQ ID NO: 171095 - RNA, 32 nt, Human
gccagagcaguuagccaguuaguccccaggcc

SEQ ID NO: 171096 - RNA, 22 nt, Human
gccagagcaucccccuccucca

SEQ ID NO: 171097 - RNA, 19 nt, Human
gccagagcaucuccaggga

SEQ ID NO: 171098 - RNA, 20 nt, Human
gccagagccaaagccagcua

SEQ ID NO: 171099 - RNA, 21 nt, Human
gccagagccacuuggaacaag

SEQ ID NO: 171100 - RNA, 32 nt, Human
gccagagccagccagcauggccacccucaaga

SEQ ID NO: 171101 - RNA, 32 nt, Human
gccagagccagccuauaguagaguccccugac

SEQ ID NO: 171102 - RNA, 19 nt, Human
gccagagccauuccaccuc

SEQ ID NO: 171103 - RNA, 32 nt, Human
gccagagccauuccaccuccccucccccagca

SEQ ID NO: 171104 - RNA, 21 nt, Human
gccagagcccaagagccagag

SEQ ID NO: 171105 - RNA, 22 nt, Human
gccagagcccaggcuggccuca

SEQ ID NO: 171106 - RNA, 19 nt, Human
gccagagccccuccaccuc

SEQ ID NO: 171107 - RNA, 32 nt, Human
gccagagcccugcugaguuccugcuuucugac

SEQ ID NO: 171108 - RNA, 32 nt, Human
gccagagccgaggcgggcgggggugagaacau

SEQ ID NO: 171109 - RNA, 32 nt, Human
gccagagccugcucuuaacaccuguguuuccu

SEQ ID NO: 171110 - RNA, 32 nt, Human
gccagagccuggggccuccagccugggacugc

SEQ ID NO: 171111 - RNA, 32 nt, Human
gccagagccuugaucccucccuaggcccugcc

SEQ ID NO: 171112 - RNA, 32 nt, Human
gccagagcgaggucuucccacgucacucccgg

SEQ ID NO: 171113 - RNA, 32 nt, Human
gccagagcgccuccucucagauuccuucucga

SEQ ID NO: 171114 - RNA, 32 nt, Human
gccagagcguggaggcggacugugcaugacau

SEQ ID NO: 171115 - RNA, 32 nt, Human
gccagagcuagccaccacccacacugcaaguc

SEQ ID NO: 171116 - RNA, 18 nt, Human
gccagagcugcccccucu

SEQ ID NO: 171117 - RNA, 18 nt, Human
gccagagcugccuccucu

SEQ ID NO: 171118 - RNA, 32 nt, Human
gccagagcuggagcccccacaggguaaggaag

SEQ ID NO: 171119 - RNA, 21 nt, Human
gccagagcugggcccaagggc

SEQ ID NO: 171120 - RNA, 32 nt, Human
gccagagcuguucucccuccccuuaaacuaug

SEQ ID NO: 171121 - RNA, 32 nt, Human
gccagagcuuggaaagaggcagcucugagauu

SEQ ID NO: 171122 - RNA, 32 nt, Human
gccagaggaagaaaggagcuaccugcccuuuc

SEQ ID NO: 171123 - RNA, 21 nt, Human
gccagaggacaaggggccuga

SEQ ID NO: 171124 - RNA, 24 nt, Human
gccagaggacacggcugaugugga

SEQ ID NO: 171125 - RNA, 32 nt, Human
gccagaggacagucaguaaaaaugugaugagu

SEQ ID NO: 171126 - RNA, 22 nt, Human
gccagaggacccagcuaagcca

SEQ ID NO: 171127 - RNA, 32 nt, Human
gccagaggaggcagcgggauuguaguggcgcg

SEQ ID NO: 171128 - RNA, 32 nt, Human
gccagaggaggccacagaccccucaggggagu

SEQ ID NO: 171129 - RNA, 32 nt, Human
gccagaggaggcgguccugguagggagugcgu

SEQ ID NO: 171130 - RNA, 32 nt, Human
gccagaggagggaagagagcgccagacgaagg

SEQ ID NO: 171131 - RNA, 32 nt, Human
gccagaggaggugggagcagagggagcugccc

SEQ ID NO: 171132 - RNA, 32 nt, Human
gccagaggauagaaaucaggaaaucugaaaac

SEQ ID NO: 171133 - RNA, 20 nt, Human
gccagaggcagagacacuga

SEQ ID NO: 171134 - RNA, 32 nt, Human
gccagaggcauggaagucaguguuugugggaa

SEQ ID NO: 171135 - RNA, 32 nt, Human
gccagaggcccaggcugaggagcuuggcggcg

SEQ ID NO: 171136 - RNA, 22 nt, Human
gccagaggccugcggucuccca

SEQ ID NO: 171137 - RNA, 32 nt, Human
gccagaggccuugccuuucagaagaacccuga

SEQ ID NO: 171138 - RNA, 32 nt, Human
gccagaggcuuccuggagguggcagcuuucuu

SEQ ID NO: 171139 - RNA, 32 nt, Human
gccagagggaacaguaacagcccaggggccuu

SEQ ID NO: 171140 - RNA, 32 nt, Human
gccagagggacaccuugguggcacugguggac

SEQ ID NO: 171141 - RNA, 32 nt, Human
gccagagggaguggggacagugcaggcaguau

SEQ ID NO: 171142 - RNA, 32 nt, Human
gccagagggcagcagggagaucagcgaagagg

SEQ ID NO: 171143 - RNA, 32 nt, Human
gccagagggcccagcagccacuguggaccugg

SEQ ID NO: 171144 - RNA, 32 nt, Human
gccagagggcucaggaugggaaaggaagaagg

SEQ ID NO: 171145 - RNA, 32 nt, Human
gccagaggggccugggcuuggcggugccaggc

SEQ ID NO: 171146 - RNA, 32 nt, Human
gccagaggggugggucagagcaguggagggga

SEQ ID NO: 171147 - RNA, 32 nt, Human
gccagaggguccacauccugcccaaaccacuc

SEQ ID NO: 171148 - RNA, 32 nt, Human
gccagaggguuuuaccaaguguucuuugaagc

SEQ ID NO: 171149 - RNA, 21 nt, Human
gccagaggucccaccuuguca

SEQ ID NO: 171150 - RNA, 32 nt, Human
gccagagguggaaggaaggaggaaaggagagg

SEQ ID NO: 171151 - RNA, 32 nt, Human
gccagagguucugcuuguucuugucugccagc

SEQ ID NO: 171152 - RNA, 18 nt, Human
gccagaguauguuccacc

SEQ ID NO: 171153 - RNA, 32 nt, Human
gccagagucaggggacagggagagagcuccac

SEQ ID NO: 171154 - RNA, 32 nt, Human
gccagagucaggggacagggagggagcuccac

SEQ ID NO: 171155 - RNA, 32 nt, Human
gccagaguccugggggccccagaggagcagga

SEQ ID NO: 171156 - RNA, 32 nt, Human
gccagaguccuugagcugucaguucccacagu

SEQ ID NO: 171157 - RNA, 32 nt, Human
gccagagugcgggggccccagcagguucucac

SEQ ID NO: 171158 - RNA, 32 nt, Human
gccagagugguuuaccccauucacaaaauuuc

SEQ ID NO: 171159 - RNA, 32 nt, Human
gccagaguguguucucuggaaacccauccaua

SEQ ID NO: 171160 - RNA, 32 nt, Human
gccagaguuuaaggagggaauggggaaagggg

SEQ ID NO: 171161 - RNA, 20 nt, Human
gccagaguuugucuaccucu

SEQ ID NO: 171162 - RNA, 32 nt, Human
gccagauaaaguggguagguuugcaagcagac

SEQ ID NO: 171163 - RNA, 32 nt, Human
gccagauaccccaugcccaccuggugaagaga

SEQ ID NO: 171164 - RNA, 32 nt, Human
gccagauagccucugucugccuagugagacau

SEQ ID NO: 171165 - RNA, 19 nt, Human
gccagauauaagggcacug

SEQ ID NO: 171166 - RNA, 21 nt, Human
gccagaucaauccacaguucu

SEQ ID NO: 171167 - RNA, 32 nt, Human
gccagauccaggagacaaauuggaccuacagg

SEQ ID NO: 171168 - RNA, 32 nt, Human
gccagauccauggcaauggucuccccacagac

SEQ ID NO: 171169 - RNA, 32 nt, Human
gccagaucccaggcacugcagcaauaucucug

SEQ ID NO: 171170 - RNA, 32 nt, Human
gccagauccucaccuuugaucaucaaggcuga

SEQ ID NO: 171171 - RNA, 32 nt, Human
gccagauccucccagggaaucacuacaggcug

SEQ ID NO: 171172 - RNA, 32 nt, Human
gccagauccucccccuacuucuccccaagggc

SEQ ID NO: 171173 - RNA, 32 nt, Human
gccagauccugagacgcuuccccucccugccc

SEQ ID NO: 171174 - RNA, 32 nt, Human
gccagauccuuucaaagauugccuuuuuauaa

SEQ ID NO: 171175 - RNA, 32 nt, Human
gccagaucggcugcuucucucucuucaagacg

SEQ ID NO: 171176 - RNA, 18 nt, Human
gccagaucuuccacgucu

SEQ ID NO: 171177 - RNA, 32 nt, Human
gccagaugacacuuaagaccuacuugugauau

SEQ ID NO: 171178 - RNA, 18 nt, Human
gccagaugcaccagcccu

SEQ ID NO: 171179 - RNA, 21 nt, Human
gccagaugccugcccaccucu

SEQ ID NO: 171180 - RNA, 32 nt, Human
gccagaugcucaucucugccuggugagcgccc

SEQ ID NO: 171181 - RNA, 32 nt, Human
gccagauggacuccagccugccuggcaggcug

SEQ ID NO: 171182 - RNA, 32 nt, Human
gccagauggaggugguggugccaggaagaaau

SEQ ID NO: 171183 - RNA, 32 nt, Human
gccagauggcaacuauuuugagcuuuaugggc

SEQ ID NO: 171184 - RNA, 21 nt, Human
gccagauggcaggugccuggg

SEQ ID NO: 171185 - RNA, 32 nt, Human
gccagaugugcaccugagaccugaugucuauc

SEQ ID NO: 171186 - RNA, 32 nt, Human
gccagauguggagucugugucugcccccgucu

SEQ ID NO: 171187 - RNA, 22 nt, Human
gccagauguuggcaccaccucu

SEQ ID NO: 171188 - RNA, 32 nt, Human
gccagauguuuuccuuucuuccuucuuuacug

SEQ ID NO: 171189 - RNA, 24 nt, Human
gccagauugacuggggauguccgg

SEQ ID NO: 171190 - RNA, 32 nt, Human
gccagauugcagcccgcgaccuucccggauua

SEQ ID NO: 171191 - RNA, 32 nt, Human
gccagauuggagaagauccaagccaggaagau

SEQ ID NO: 171192 - RNA, 32 nt, Human
gccagcaaagccuccagcaucuuuuccauccu

SEQ ID NO: 171193 - RNA, 16 nt, Human
gccagcaaaucuggga

SEQ ID NO: 171194 - RNA, 32 nt, Human
gccagcaacagcuuccuucuuugagcuuaggu

SEQ ID NO: 171195 - RNA, 32 nt, Human
gccagcaacauucugaggguucuaggaauggc

SEQ ID NO: 171196 - RNA, 21 nt, Human
gccagcaaccaaaucccaugu

SEQ ID NO: 171197 - RNA, 32 nt, Human
gccagcaagauagcaaaagcaggaagagagcc

SEQ ID NO: 171198 - RNA, 25 nt, Human
gccagcaagcagggaaguggagcaa

SEQ ID NO: 171199 - RNA, 19 nt, Human
gccagcaagcccagaggca

SEQ ID NO: 171200 - RNA, 32 nt, Human
gccagcaagcuaaagcauggcggccauccccu

SEQ ID NO: 171201 - RNA, 20 nt, Human
gccagcaagcugcccccucc

SEQ ID NO: 171202 - RNA, 32 nt, Human
gccagcaauccaaaggcucuuuucagagccac

SEQ ID NO: 171203 - RNA, 32 nt, Human
gccagcaauugcugaagguggcgaugaacacc

SEQ ID NO: 171204 - RNA, 32 nt, Human
gccagcacaagagcacacaggaggccggcaua

SEQ ID NO: 171205 - RNA, 32 nt, Human
gccagcacagcagcucaugccuguaauccuag

SEQ ID NO: 171206 - RNA, 32 nt, Human
gccagcacagugccugaugccucccuaggcau

SEQ ID NO: 171207 - RNA, 32 nt, Human
gccagcacauccugccugcuguugcagccugg

SEQ ID NO: 171208 - RNA, 20 nt, Human
gccagcaccacaugcagcag

SEQ ID NO: 171209 - RNA, 22 nt, Human
gccagcacccagaaacccagca

SEQ ID NO: 171210 - RNA, 17 nt, Human
gccagcacccccacccu

SEQ ID NO: 171211 - RNA, 32 nt, Human
gccagcaccccuggcuggaguggguuaaaggg

SEQ ID NO: 171212 - RNA, 19 nt, Human
gccagcacccucugcugcu

SEQ ID NO: 171213 - RNA, 19 nt, Human
gccagcaccgcucuagcug

SEQ ID NO: 171214 - RNA, 19 nt, Human
gccagcaccugcucaggga

SEQ ID NO: 171215 - RNA, 20 nt, Human
gccagcaccuggagcaccaa

SEQ ID NO: 171216 - RNA, 23 nt, Human
gccagcaccuugacuuggcagca

SEQ ID NO: 171217 - RNA, 32 nt, Human
gccagcaccuugacuuuagccuggugagaucc

SEQ ID NO: 171218 - RNA, 32 nt, Human
gccagcacggcugcuaacagacugccacuuga

SEQ ID NO: 171219 - RNA, 32 nt, Human
gccagcacuaaacaccagaaaggaggagggaa

SEQ ID NO: 171220 - RNA, 21 nt, Human
gccagcacuaacuccaccucu

SEQ ID NO: 171221 - RNA, 32 nt, Human
gccagcacucagggcucucugccuucuaugug

SEQ ID NO: 171222 - RNA, 22 nt, Human
gccagcacuccucaccccggua

SEQ ID NO: 171223 - RNA, 32 nt, Human
gccagcacuccugccaucacagggccccucaa

SEQ ID NO: 171224 - RNA, 32 nt, Human
gccagcacucugaagcuuguucccucuccucc

SEQ ID NO: 171225 - RNA, 32 nt, Human
gccagcacucuggaggcugcugcuaaguggau

SEQ ID NO: 171226 - RNA, 32 nt, Human
gccagcacucuggaggcugcugcugaguggac

SEQ ID NO: 171227 - RNA, 32 nt, Human
gccagcacugccgcuuccaccugggccaccca

SEQ ID NO: 171228 - RNA, 32 nt, Human
gccagcacugggugagaguggggagggggcau

SEQ ID NO: 171229 - RNA, 32 nt, Human
gccagcacugucccccuuccucuucuucugcc

SEQ ID NO: 171230 - RNA, 32 nt, Human
gccagcagaaacauuugucugcccucacccuu

SEQ ID NO: 171231 - RNA, 32 nt, Human
gccagcagaaaggagccagggaguacgcaccc

SEQ ID NO: 171232 - RNA, 32 nt, Human
gccagcagaacagcacuccugggcggcuccug

SEQ ID NO: 171233 - RNA, 32 nt, Human
gccagcagacuggccagcgccucuguguaggg

SEQ ID NO: 171234 - RNA, 32 nt, Human
gccagcagaggagccagcuuacaggaugggag

SEQ ID NO: 171235 - RNA, 32 nt, Human
gccagcagaggggucuggggucagccuuugga

SEQ ID NO: 171236 - RNA, 23 nt, Human
gccagcagaugaggcagcagcaa

SEQ ID NO: 171237 - RNA, 32 nt, Human
gccagcagccccagacugcccaaaaacuugcc

SEQ ID NO: 171238 - RNA, 18 nt, Human
gccagcagccccgccucu

SEQ ID NO: 171239 - RNA, 17 nt, Human
gccagcagccccugccc

SEQ ID NO: 171240 - RNA, 18 nt, Human
gccagcagcccggggcuc

SEQ ID NO: 171241 - RNA, 32 nt, Human
gccagcagcccugcacuccacgcuggccaaga

SEQ ID NO: 171242 - RNA, 24 nt, Human
gccagcagccuguccguccggcuc

SEQ ID NO: 171243 - RNA, 21 nt, Human
gccagcagcgccggggcccgg

SEQ ID NO: 171244 - RNA, 32 nt, Human
gccagcagcucugugguucaaguuuccucaag

SEQ ID NO: 171245 - RNA, 32 nt, Human
gccagcagcugaugccuccuuggccaccagac

SEQ ID NO: 171246 - RNA, 32 nt, Human
gccagcagcugcagaggaugugccgguccccu

SEQ ID NO: 171247 - RNA, 21 nt, Human
gccagcagcugccagggccuc

SEQ ID NO: 171248 - RNA, 18 nt, Human
gccagcagcugcuccugg

SEQ ID NO: 171249 - RNA, 32 nt, Human
gccagcagcuuggguugagaugaaugaugugu

SEQ ID NO: 171250 - RNA, 32 nt, Human
gccagcaggaagcacagccgccaccgccgccg

SEQ ID NO: 171251 - RNA, 18 nt, Human
gccagcaggccgccugca

SEQ ID NO: 171252 - RNA, 17 nt, Human
gccagcaggcucacgca

SEQ ID NO: 171253 - RNA, 32 nt, Human
gccagcaggcugggggagcagugagggcaggg

SEQ ID NO: 171254 - RNA, 20 nt, Human
gccagcagggccccaucucu

SEQ ID NO: 171255 - RNA, 32 nt, Human
gccagcaggggaagaaaaagaugcugcugcuc

SEQ ID NO: 171256 - RNA, 32 nt, Human
gccagcagguggagcuugacgugacgucuuaa

SEQ ID NO: 171257 - RNA, 32 nt, Human
gccagcagucugcgaggcuggggaggauggag

SEQ ID NO: 171258 - RNA, 21 nt, Human
gccagcagugaccacaguucu

SEQ ID NO: 171259 - RNA, 19 nt, Human
gccagcagugaccuugggg

SEQ ID NO: 171260 - RNA, 32 nt, Human
gccagcagugcacagugccuggcagguugacu

SEQ ID NO: 171261 - RNA, 32 nt, Human
gccagcaguuuccugccagauauugcccagcg

SEQ ID NO: 171262 - RNA, 32 nt, Human
gccagcaucaugcuugcugugcagccugcaga

SEQ ID NO: 171263 - RNA, 32 nt, Human
gccagcauccugagccuccucaugcccuggac

SEQ ID NO: 171264 - RNA, 32 nt, Human
gccagcauccuugagccaggaucucaucuguu

SEQ ID NO: 171265 - RNA, 32 nt, Human
gccagcauccuuggaucaguacugaacucagu

SEQ ID NO: 171266 - RNA, 17 nt, Human
gccagcaucuccaccuu

SEQ ID NO: 171267 - RNA, 32 nt, Human
gccagcaugccugccugacccaccucagagcc

SEQ ID NO: 171268 - RNA, 32 nt, Human
gccagcaugccugucuaauuuuuguauuuuag

SEQ ID NO: 171269 - RNA, 32 nt, Human
gccagcaugcuacccugggaggcacauccagg

SEQ ID NO: 171270 - RNA, 32 nt, Human
gccagcauggacaacauagugaggccuugucu

SEQ ID NO: 171271 - RNA, 23 nt, Human
gccagcauggcagacagaagaaa

SEQ ID NO: 171272 - RNA, 32 nt, Human
gccagcaugguggcucaugccuguaaucccag

SEQ ID NO: 171273 - RNA, 32 nt, Human
gccagcaugucacugguuuugaagggaugagc

SEQ ID NO: 171274 - RNA, 20 nt, Human
gccagcauuggagaagaagc

SEQ ID NO: 171275 - RNA, 32 nt, Human
gccagcauugugcccaggcuagggggcuauag

SEQ ID NO: 171276 - RNA, 22 nt, Human
gccagcauuuugccacguucua

SEQ ID NO: 171277 - RNA, 32 nt, Human
gccagccaaggccaguggagugcugugggguc

SEQ ID NO: 171278 - RNA, 32 nt, Human
gccagccaagucaguuccuggugaggguucuc

SEQ ID NO: 171279 - RNA, 32 nt, Human
gccagccaaucagcaggacuccugccuuccuu

SEQ ID NO: 171280 - RNA, 32 nt, Human
gccagccacucgccccuggccucgcgggccgu

SEQ ID NO: 171281 - RNA, 32 nt, Human
gccagccacucuaccagugcaggcuggccagc

SEQ ID NO: 171282 - RNA, 32 nt, Human
gccagccacuguguugucacugggcgaguaau

SEQ ID NO: 171283 - RNA, 32 nt, Human
gccagccagacaucauucucuggacuacuuug

SEQ ID NO: 171284 - RNA, 32 nt, Human
gccagccagaccaugaacccaccagaaggaaa

SEQ ID NO: 171285 - RNA, 32 nt, Human
gccagccagcacucaggcccggagcucgggga

SEQ ID NO: 171286 - RNA, 32 nt, Human
gccagccagcacucuggccuccugccgccgca

SEQ ID NO: 171287 - RNA, 32 nt, Human
gccagccagcuccaucucgcugccuauuggac

SEQ ID NO: 171288 - RNA, 20 nt, Human
gccagccagcugcuguucua

SEQ ID NO: 171289 - RNA, 32 nt, Human
gccagccaggagcugaaagaagcaguuagguc

SEQ ID NO: 171290 - RNA, 32 nt, Human
gccagccaggcagcuucucugccugggagggg

SEQ ID NO: 171291 - RNA, 24 nt, Human
gccagccaggcuggagugcagugg

SEQ ID NO: 171292 - RNA, 32 nt, Human
gccagccagggacauagccagggaggggccac

SEQ ID NO: 171293 - RNA, 26 nt, Human
gccagcccaaguucgcucucugcaca

SEQ ID NO: 171294 - RNA, 32 nt, Human
gccagcccacaggguucccccaccucagaguu

SEQ ID NO: 171295 - RNA, 32 nt, Human
gccagcccacuacccacccccacuacagcauu

SEQ ID NO: 171296 - RNA, 32 nt, Human
gccagcccagaacagagaaucagcuggagccc

SEQ ID NO: 171297 - RNA, 32 nt, Human
gccagcccagacaacagagugagacccccauc

SEQ ID NO: 171298 - RNA, 21 nt, Human
gccagcccagacccuccccca

SEQ ID NO: 171299 - RNA, 32 nt, Human
gccagcccagaucaacugggaaccacugaugg

SEQ ID NO: 171300 - RNA, 32 nt, Human
gccagcccagaugagcaacuuucucauaacaa

SEQ ID NO: 171301 - RNA, 19 nt, Human
gccagcccagcccagcucc

SEQ ID NO: 171302 - RNA, 19 nt, Human
gccagcccagcgcccgcuc

SEQ ID NO: 171303 - RNA, 20 nt, Human
gccagcccagcuccagcucc

SEQ ID NO: 171304 - RNA, 32 nt, Human
gccagcccagcuccaguguccaaaaagcgguu

SEQ ID NO: 171305 - RNA, 32 nt, Human
gccagcccagcucuccccucugcacccuuggc

SEQ ID NO: 171306 - RNA, 32 nt, Human
gccagcccaggagaucaucaugcaaucgucuu

SEQ ID NO: 171307 - RNA, 19 nt, Human
gccagcccaggcacccucc

SEQ ID NO: 171308 - RNA, 22 nt, Human
gccagcccaggcgccccuuccc

SEQ ID NO: 171309 - RNA, 32 nt, Human
gccagcccaucaggaagccuuccuggcuucuc

SEQ ID NO: 171310 - RNA, 17 nt, Human
gccagccccacccagga

SEQ ID NO: 171311 - RNA, 32 nt, Human
gccagccccacccaggagggagggggcuauag

SEQ ID NO: 171312 - RNA, 32 nt, Human
gccagccccacuccugacaccugggcccuuga

SEQ ID NO: 171313 - RNA, 18 nt, Human
gccagccccaggcugcug

SEQ ID NO: 171314 - RNA, 32 nt, Human
gccagccccauccccuccaccccacaccugag

SEQ ID NO: 171315 - RNA, 20 nt, Human
gccagcccccaccuaggguc

SEQ ID NO: 171316 - RNA, 32 nt, Human
gccagcccccaggagcaagaccaagaccgcag

SEQ ID NO: 171317 - RNA, 16 nt, Human
gccagcccccaggguc

SEQ ID NO: 171318 - RNA, 32 nt, Human
gccagcccccgacuggccuggccacacugcuc

SEQ ID NO: 171319 - RNA, 32 nt, Human
gccagcccccgcccagcucaucagucugaaug

SEQ ID NO: 171320 - RNA, 32 nt, Human
gccagcccccuuccauuuagucuccugccguu

SEQ ID NO: 171321 - RNA, 32 nt, Human
gccagccccuccacacaucucccuaagucaga

SEQ ID NO: 171322 - RNA, 32 nt, Human
gccagccccuccaccccagccugccugcugcc

SEQ ID NO: 171323 - RNA, 32 nt, Human
gccagccccuucuccucuccccagggccuggc

SEQ ID NO: 171324 - RNA, 19 nt, Human
gccagcccggccaccagcc

SEQ ID NO: 171325 - RNA, 32 nt, Human
gccagcccggccuggccacaggugaggucugu

SEQ ID NO: 171326 - RNA, 32 nt, Human
gccagcccggugcgccccuccaccuccugcuc

SEQ ID NO: 171327 - RNA, 18 nt, Human
gccagcccguccuccucu

SEQ ID NO: 171328 - RNA, 32 nt, Human
gccagcccguccuccucuaccucucuccucuc

SEQ ID NO: 171329 - RNA, 32 nt, Human
gccagcccucagccauccuagccagacccccu

SEQ ID NO: 171330 - RNA, 32 nt, Human
gccagcccucgucguucuuucuccccugccuc

SEQ ID NO: 171331 - RNA, 28 nt, Human
gccagcccucgugcugccucuggucccu

SEQ ID NO: 171332 - RNA, 32 nt, Human
gccagcccucuacuccuccaaccuuuuccaag

SEQ ID NO: 171333 - RNA, 17 nt, Human
gccagcccucuccaguc

SEQ ID NO: 171334 - RNA, 22 nt, Human
gccagcccugcagugugaguga

SEQ ID NO: 171335 - RNA, 32 nt, Human
gccagcccugcuaaugugcuguguggccuucu

SEQ ID NO: 171336 - RNA, 32 nt, Human
gccagcccugcuccucccgccaugacccugca

SEQ ID NO: 171337 - RNA, 32 nt, Human
gccagcccugcucucagcacuucccaugugga

SEQ ID NO: 171338 - RNA, 32 nt, Human
gccagcccugcucucucccucuucccuccagg

SEQ ID NO: 171339 - RNA, 32 nt, Human
gccagcccugcucugccuaaguguacuccaga

SEQ ID NO: 171340 - RNA, 32 nt, Human
gccagcccuucaggaagcagguguccuuuccc

SEQ ID NO: 171341 - RNA, 22 nt, Human
gccagcccuucccuggccccgc

SEQ ID NO: 171342 - RNA, 32 nt, Human
gccagcccuugaccaagaacaaguucagaguc

SEQ ID NO: 171343 - RNA, 32 nt, Human
gccagcccuugcucuaccuggccgguaggcug

SEQ ID NO: 171344 - RNA, 32 nt, Human
gccagccgcccuggcccuggucacugcaugau

SEQ ID NO: 171345 - RNA, 32 nt, Human
gccagccgcgcagaggaugccgagcacuuucc

SEQ ID NO: 171346 - RNA, 22 nt, Human
gccagccggcgccggggcccag

SEQ ID NO: 171347 - RNA, 32 nt, Human
gccagccggcgccggggcccagugcgccgcgc

SEQ ID NO: 171348 - RNA, 32 nt, Human
gccagccguggacagcugagguuggggucaau

SEQ ID NO: 171349 - RNA, 32 nt, Human
gccagccguuccugccagaagccagggcauga

SEQ ID NO: 171350 - RNA, 32 nt, Human
gccagccguuucucccuacggugccgccgcuc

SEQ ID NO: 171351 - RNA, 32 nt, Human
gccagccucaaggagacaucugguuuaggccc

SEQ ID NO: 171352 - RNA, 32 nt, Human
gccagccucaggccagggguucagagagcaag

SEQ ID NO: 171353 - RNA, 32 nt, Human
gccagccuccacccucacgccauuuccaggga

SEQ ID NO: 171354 - RNA, 23 nt, Human
gccagccuccccgccacccgcgc

SEQ ID NO: 171355 - RNA, 20 nt, Human
gccagccuccccgcccgcuc

SEQ ID NO: 171356 - RNA, 32 nt, Human
gccagccugcaugccuggucaucaggagguug

SEQ ID NO: 171357 - RNA, 32 nt, Human
gccagccugcccggccccagcaugcgggaggc

SEQ ID NO: 171358 - RNA, 32 nt, Human
gccagccugccugccugccugccugcccgccc

SEQ ID NO: 171359 - RNA, 32 nt, Human
gccagccugccuggcugucuuccaccggcccu

SEQ ID NO: 171360 - RNA, 32 nt, Human
gccagccugcuggccucagcuccggguugggc

SEQ ID NO: 171361 - RNA, 32 nt, Human
gccagccuggacaacauaguaagacccuaucu

SEQ ID NO: 171362 - RNA, 32 nt, Human
gccagccugggaaauauagugagacccugucu

SEQ ID NO: 171363 - RNA, 32 nt, Human
gccagccugggagcugggccauguuggccgca

SEQ ID NO: 171364 - RNA, 20 nt, Human
gccagccugggcaacagagc

SEQ ID NO: 171365 - RNA, 32 nt, Human
gccagccugggcaacagagcaagacucugucu

SEQ ID NO: 171366 - RNA, 22 nt, Human
gccagccugggcaacagagcga

SEQ ID NO: 171367 - RNA, 18 nt, Human
gccagccugggcaacaua

SEQ ID NO: 171368 - RNA, 32 nt, Human
gccagccugggcaacauaacaagauccugucu

SEQ ID NO: 171369 - RNA, 32 nt, Human
gccagccugggcaacauagugagacccccauc

SEQ ID NO: 171370 - RNA, 32 nt, Human
gccagccugggcgacagagcgagacuccgucu

SEQ ID NO: 171371 - RNA, 32 nt, Human
gccagccugggugaaagagugagacccugucu

SEQ ID NO: 171372 - RNA, 32 nt, Human
gccagccugggugacaaagcgagacuccgucu

SEQ ID NO: 171373 - RNA, 32 nt, Human
gccagccugggugacagagcaagaccuugucu

SEQ ID NO: 171374 - RNA, 32 nt, Human
gccagccuguggugaucccagcagcuuuggag

SEQ ID NO: 171375 - RNA, 32 nt, Human
gccagccuguucucugacuaacgccauccagg

SEQ ID NO: 171376 - RNA, 32 nt, Human
gccagccuguucucugacuacgccauccaggc

SEQ ID NO: 171377 - RNA, 32 nt, Human
gccagccuguuuccuucauucucugacguauu

SEQ ID NO: 171378 - RNA, 32 nt, Human
gccagccuucauuccucccaguguccaagccc

SEQ ID NO: 171379 - RNA, 32 nt, Human
gccagccuuccagggagcagccaugccuuacc

SEQ ID NO: 171380 - RNA, 32 nt, Human
gccagccuuuaugcuucucucaacccuucaag

SEQ ID NO: 171381 - RNA, 32 nt, Human
gccagccuuugcagccacuuuugaagaguagg

SEQ ID NO: 171382 - RNA, 24 nt, Human
gccagccuuuggccacagcaccac

SEQ ID NO: 171383 - RNA, 26 nt, Human
gccagcgaagguggcgaaggcuccca

SEQ ID NO: 171384 - RNA, 20 nt, Human
gccagcgacacacaguucua

SEQ ID NO: 171385 - RNA, 22 nt, Human
gccagcgacagcagccccgccc

SEQ ID NO: 171386 - RNA, 21 nt, Human
gccagcgacagcagcccgccc

SEQ ID NO: 171387 - RNA, 32 nt, Human
gccagcgacagcgggcgcuaccagugcucggg

SEQ ID NO: 171388 - RNA, 32 nt, Human
gccagcgagaccacgaacucaccagaaggaag

SEQ ID NO: 171389 - RNA, 32 nt, Human
gccagcgagagggaccagggcaccacucucua

SEQ ID NO: 171390 - RNA, 23 nt, Human
gccagcgagcaggcugccugccc

SEQ ID NO: 171391 - RNA, 32 nt, Human
gccagcgagucaggagcaggggagacagggcu

SEQ ID NO: 171392 - RNA, 32 nt, Human
gccagcgaugggcaggcgagaccccuccagaa

SEQ ID NO: 171393 - RNA, 23 nt, Human
gccagcgcagcgccagggcucag

SEQ ID NO: 171394 - RNA, 32 nt, Human
gccagcgcaguggcucacaccuguaaucccag

SEQ ID NO: 171395 - RNA, 32 nt, Human
gccagcgccagcugcagccccggcugcccacu

SEQ ID NO: 171396 - RNA, 32 nt, Human
gccagcgccauggcuuaccacccguuccacgc

SEQ ID NO: 171397 - RNA, 32 nt, Human
gccagcgcccagccagggagccggccgggaag

SEQ ID NO: 171398 - RNA, 32 nt, Human
gccagcgcccugaagcuccgugcucaacugau

SEQ ID NO: 171399 - RNA, 17 nt, Human
gccagcgccuccaccuu

SEQ ID NO: 171400 - RNA, 19 nt, Human
gccagcgcuagcgccagca

SEQ ID NO: 171401 - RNA, 18 nt, Human
gccagcgcucucaccucu

SEQ ID NO: 171402 - RNA, 32 nt, Human
gccagcgcuuucuggacuggcugugcugcagg

SEQ ID NO: 171403 - RNA, 32 nt, Human
gccagcggagaggacaggcagggccuuccaca

SEQ ID NO: 171404 - RNA, 20 nt, Human
gccagcggagccggggccag

SEQ ID NO: 171405 - RNA, 21 nt, Human
gccagcggagccggggccaga

SEQ ID NO: 171406 - RNA, 21 nt, Human
gccagcggagcgaacccgaga

SEQ ID NO: 171407 - RNA, 32 nt, Human
gccagcggcaggggacuccagccugcuggaca

SEQ ID NO: 171408 - RNA, 23 nt, Human
gccagcggccgggcgcccagcgg

SEQ ID NO: 171409 - RNA, 32 nt, Human
gccagcggccugccgggaguugcagugaaccc

SEQ ID NO: 171410 - RNA, 32 nt, Human
gccagcggcggcaacggcggcagcggcggcag

SEQ ID NO: 171411 - RNA, 32 nt, Human
gccagcggcugaugcugcaggugggccugauc

SEQ ID NO: 171412 - RNA, 32 nt, Human
gccagcgggaccugggcaggggcgcccggagc

SEQ ID NO: 171413 - RNA, 24 nt, Human
gccagcgggagcggcggggcucag

SEQ ID NO: 171414 - RNA, 32 nt, Human
gccagcgggcgccgucggcggcuggcccuguc

SEQ ID NO: 171415 - RNA, 32 nt, Human
gccagcggugaagcagguggccagcagccagu

SEQ ID NO: 171416 - RNA, 32 nt, Human
gccagcgguggaggcugagucgcaggacacau

SEQ ID NO: 171417 - RNA, 21 nt, Human
gccagcggugggcuggcgguu

SEQ ID NO: 171418 - RNA, 17 nt, Human
gccagcgguuccugcgg

SEQ ID NO: 171419 - RNA, 16 nt, Human
gccagcgguuccuggg

SEQ ID NO: 171420 - RNA, 32 nt, Human
gccagcguccagcuucucccccaaaccacagc

SEQ ID NO: 171421 - RNA, 32 nt, Human
gccagcgugggccugggcuugaucuccauucu

SEQ ID NO: 171422 - RNA, 32 nt, Human
gccagcguggggcucccugccuucuggacucc

SEQ ID NO: 171423 - RNA, 32 nt, Human
gccagcuacccaggcugaacagcaucaggagc

SEQ ID NO: 171424 - RNA, 17 nt, Human
gccagcuacuccacccu

SEQ ID NO: 171425 - RNA, 32 nt, Human
gccagcuacugcucuggguuugaggagaaagg

SEQ ID NO: 171426 - RNA, 32 nt, Human
gccagcuagaaaaagaaagaaaggggagggga

SEQ ID NO: 171427 - RNA, 32 nt, Human
gccagcuagcuccauagggaagccugugucuc

SEQ ID NO: 171428 - RNA, 32 nt, Human
gccagcuagggugggggcgauagggucagcgg

SEQ ID NO: 171429 - RNA, 23 nt, Human
gccagcucacacucugcugcaca

SEQ ID NO: 171430 - RNA, 32 nt, Human
gccagcucacagagaagaaaauaacuugcagu

SEQ ID NO: 171431 - RNA, 32 nt, Human
gccagcucacauuuauuuggaaauuacccucc

SEQ ID NO: 171432 - RNA, 22 nt, Human
gccagcucagcacagaagacac

SEQ ID NO: 171433 - RNA, 32 nt, Human
gccagcucaugcugcugaccacugacucagcu

SEQ ID NO: 171434 - RNA, 32 nt, Human
gccagcucauuucacuuuacacgcucauggac

SEQ ID NO: 171435 - RNA, 32 nt, Human
gccagcuccagccuggccccggggcagcgggu

SEQ ID NO: 171436 - RNA, 32 nt, Human
gccagcucccacccaucuuuucuugaaucucu

SEQ ID NO: 171437 - RNA, 18 nt, Human
gccagcucccagcucucc

SEQ ID NO: 171438 - RNA, 32 nt, Human
gccagcuccguggguguccucccagggagcuu

SEQ ID NO: 171439 - RNA, 32 nt, Human
gccagcuccugccucccggugcccucugcagg

SEQ ID NO: 171440 - RNA, 32 nt, Human
gccagcucggcugaggccugaggagaaaugau

SEQ ID NO: 171441 - RNA, 24 nt, Human
gccagcucucccgcuucucgcaca

SEQ ID NO: 171442 - RNA, 21 nt, Human
gccagcucuccuccucgcaca

SEQ ID NO: 171443 - RNA, 32 nt, Human
gccagcucugcguuuaagacaggaagcugccg

SEQ ID NO: 171444 - RNA, 19 nt, Human
gccagcucugcugcaggug

SEQ ID NO: 171445 - RNA, 21 nt, Human
gccagcucugcugccaccucu

SEQ ID NO: 171446 - RNA, 32 nt, Human
gccagcucugcuguucacuggcccuacccgag

SEQ ID NO: 171447 - RNA, 32 nt, Human
gccagcucugcuuccuggccucgguggcgcug

SEQ ID NO: 171448 - RNA, 32 nt, Human
gccagcucuuccaaucuccaucaccuuugggc

SEQ ID NO: 171449 - RNA, 32 nt, Human
gccagcucuugccucccggcggccucugcagg

SEQ ID NO: 171450 - RNA, 32 nt, Human
gccagcugaaugugugucucccaacuuucucu

SEQ ID NO: 171451 - RNA, 32 nt, Human
gccagcugaccuucaaacccugcauuugaacc

SEQ ID NO: 171452 - RNA, 26 nt, Human
gccagcugagcaaggcgaaagccaag

SEQ ID NO: 171453 - RNA, 32 nt, Human
gccagcugaggggaaguugcuggugaguuucc

SEQ ID NO: 171454 - RNA, 32 nt, Human
gccagcugagucucuaucauagcugaacccug

SEQ ID NO: 171455 - RNA, 32 nt, Human
gccagcugauucaucagaaucaggugagugug

SEQ ID NO: 171456 - RNA, 21 nt, Human
gccagcugcaccagggcucag

SEQ ID NO: 171457 - RNA, 25 nt, Human
gccagcugcaccccgccuggcucgc

SEQ ID NO: 171458 - RNA, 32 nt, Human
gccagcugcaggguccuuccacacgcaggucc

SEQ ID NO: 171459 - RNA, 23 nt, Human
gccagcugcccaccccagugcca

SEQ ID NO: 171460 - RNA, 32 nt, Human
gccagcugcucccaaugugccgauguccgugg

SEQ ID NO: 171461 - RNA, 32 nt, Human
gccagcugcugccccagaguccugcccccugc

SEQ ID NO: 171462 - RNA, 32 nt, Human
gccagcugcuggugauccucagccggagggca

SEQ ID NO: 171463 - RNA, 32 nt, Human
gccagcugcuucuccucuccauggaaggagga

SEQ ID NO: 171464 - RNA, 32 nt, Human
gccagcuggaaagaggacauggacaggccuau

SEQ ID NO: 171465 - RNA, 32 nt, Human
gccagcuggaacccagcccauccucucaggca

SEQ ID NO: 171466 - RNA, 32 nt, Human
gccagcuggaaccugaguugucagcucagaaa

SEQ ID NO: 171467 - RNA, 32 nt, Human
gccagcuggaccaggcccugccuaggcccugc

SEQ ID NO: 171468 - RNA, 32 nt, Human
gccagcuggagcuggccuaccuuggaggacug

SEQ ID NO: 171469 - RNA, 32 nt, Human
gccagcuggaggaaggaagggcaggcugggcc

SEQ ID NO: 171470 - RNA, 32 nt, Human
gccagcuggaggaaggaagggcgggcugggcc

SEQ ID NO: 171471 - RNA, 18 nt, Human
gccagcuggagugcagug

SEQ ID NO: 171472 - RNA, 32 nt, Human
gccagcuggauuggccagugcaccuuguauuc

SEQ ID NO: 171473 - RNA, 32 nt, Human
gccagcugggaaggcagcgcccagcugcacuu

SEQ ID NO: 171474 - RNA, 32 nt, Human
gccagcugggacagcgaccgagcccagagaga

SEQ ID NO: 171475 - RNA, 32 nt, Human
gccagcugggaggggagggggccgugggggcg

SEQ ID NO: 171476 - RNA, 32 nt, Human
gccagcugggcaaggaguuggggagcggggag

SEQ ID NO: 171477 - RNA, 32 nt, Human
gccagcugggggaguggguagaggccggguga

SEQ ID NO: 171478 - RNA, 32 nt, Human
gccagcugggucuagcaucacagggaaggggg

SEQ ID NO: 171479 - RNA, 32 nt, Human
gccagcuggguguuauuucucaaacucugagg

SEQ ID NO: 171480 - RNA, 17 nt, Human
gccagcugucccgaguc

SEQ ID NO: 171481 - RNA, 31 nt, Human
gccagcugucucucugggaugagucaggagg

SEQ ID NO: 171482 - RNA, 32 nt, Human
gccagcugugcagccaggugugacuguuacug

SEQ ID NO: 171483 - RNA, 32 nt, Human
gccagcugugugaauuuggucaagggaccuaa

SEQ ID NO: 171484 - RNA, 32 nt, Human
gccagcugugugaccauccagggguggagggg

SEQ ID NO: 171485 - RNA, 32 nt, Human
gccagcuucauacuugagugugcacaucuuga

SEQ ID NO: 171486 - RNA, 32 nt, Human
gcccaugcugugugugugccucuguuggugag

SEQ ID NO: 171487 - RNA, 32 nt, Human
gcccauggagccagaccccacucugucccugu

SEQ ID NO: 171488 - RNA, 32 nt, Human
gcccauggaggagacaggaagccucaaguucc

SEQ ID NO: 171489 - RNA, 26 nt, Human
gcccauggagugcucucccacuggca

SEQ ID NO: 171490 - RNA, 29 nt, Human
gcccauggcccucaccuccaucaaugcca

SEQ ID NO: 171491 - RNA, 21 nt, Human
gcccauggcugggcgcagugg

SEQ ID NO: 171492 - RNA, 29 nt, Human
gcccaugggaggagugggaguggcagagg

SEQ ID NO: 171493 - RNA, 32 nt, Human
gcccaugggaggcuggaguuggggcagaggag

SEQ ID NO: 171494 - RNA, 32 nt, Human
gcccauggggacagggacaggugaggggcuuc

SEQ ID NO: 171495 - RNA, 32 nt, Human
gcccauggggccugaagggaaaugggcagcug

SEQ ID NO: 171496 - RNA, 32 nt, Human
gcccauggugccugucagcccgcagagcccau

SEQ ID NO: 171497 - RNA, 29 nt, Human
gcccauggugcugcccaccugccccaugg

SEQ ID NO: 171498 - RNA, 32 nt, Human
gcccauggugggagcgagcaugugacaguccc

SEQ ID NO: 171499 - RNA, 32 nt, Human
gcccauguaggagcugaguucuuaaagacuga

SEQ ID NO: 171500 - RNA, 32 nt, Human
gcccaugucaaaugcuugguuuugaaaacuga

SEQ ID NO: 171501 - RNA, 32 nt, Human
gcccaugucaugccaagagucagugccaucug

SEQ ID NO: 171502 - RNA, 19 nt, Human
gcccauguccuccuuggug

SEQ ID NO: 171503 - RNA, 32 nt, Human
gcccauguccugcagcagagcugggcaggcug

SEQ ID NO: 171504 - RNA, 21 nt, Human
gcccaugucucccccaccuca

SEQ ID NO: 171505 - RNA, 32 nt, Human
gcccaugugccaccucccuuccucccucccuc

SEQ ID NO: 171506 - RNA, 32 nt, Human
gcccaugugggagcugaguucuuaaagacuga

SEQ ID NO: 171507 - RNA, 32 nt, Human
gcccaugugugaucuugugggguggagggaag

SEQ ID NO: 171508 - RNA, 32 nt, Human
gcccauguguuuuggaacauuuauguaagauu

SEQ ID NO: 171509 - RNA, 32 nt, Human
gcccauuaaccaggagcuuggcacaggccaca

SEQ ID NO: 171510 - RNA, 21 nt, Human
gcccauuauccugccuugagg

SEQ ID NO: 171511 - RNA, 21 nt, Human
gcccauucaaguuucuggcca

SEQ ID NO: 171512 - RNA, 32 nt, Human
gcccauucagccucgucucuuuacagaaguag

SEQ ID NO: 171513 - RNA, 22 nt, Human
gcccauucagggcugccugagc

SEQ ID NO: 171514 - RNA, 32 nt, Human
gcccauucaguggugcuggagggagacuucag

SEQ ID NO: 171515 - RNA, 32 nt, Human
gcccauuccucccauucaagauucccacuccc

SEQ ID NO: 171516 - RNA, 32 nt, Human
gcccauuccucugucccugcagacucagugca

SEQ ID NO: 171517 - RNA, 32 nt, Human
gcccauuccucuuucuccaccgucacccaaca

SEQ ID NO: 171518 - RNA, 32 nt, Human
gcccauucuacuuuugaauuuagcuuuuacua

SEQ ID NO: 171519 - RNA, 24 nt, Human
gcccauucuggagugcaguggugu

SEQ ID NO: 171520 - RNA, 32 nt, Human
gcccauucuucgcucuguguuugaagagagca

SEQ ID NO: 171521 - RNA, 19 nt, Human
gcccauugcccugcugcug

SEQ ID NO: 171522 - RNA, 24 nt, Human
gcccauuguggggggcaaaggcau

SEQ ID NO: 171523 - RNA, 32 nt, Human
gcccauuucaggaaucugcagccuggaagcca

SEQ ID NO: 171524 - RNA, 21 nt, Human
gcccauuucccuccugucucc

SEQ ID NO: 171525 - RNA, 32 nt, Human
gcccauuucucaucucuucauacuagcucaca

SEQ ID NO: 171526 - RNA, 32 nt, Human
gcccauuugaaaggagugggaggaauacagca

SEQ ID NO: 171527 - RNA, 18 nt, Human
gcccauuugagaucuuug

SEQ ID NO: 171528 - RNA, 32 nt, Human
gcccauuugcucgcaguuuccucucucuguuu

SEQ ID NO: 171529 - RNA, 32 nt, Human
gcccauuuggagggaggaaguaagggaagagg

SEQ ID NO: 171530 - RNA, 21 nt, Human
gcccauuuggcuacucugcug

SEQ ID NO: 171531 - RNA, 32 nt, Human
gcccauuugucggcuuacagcucuuccggagu

SEQ ID NO: 171532 - RNA, 32 nt, Human
gcccauuuuaugggcuggaguuaaauggaagu

SEQ ID NO: 171533 - RNA, 21 nt, Human
gcccauuuucuuuccuucaca

SEQ ID NO: 171534 - RNA, 32 nt, Human
gcccauuuugaggggcgaugcagccacucacu

SEQ ID NO: 171535 - RNA, 32 nt, Human
gccccaaaacuuccaccucccucccuggccac

SEQ ID NO: 171536 - RNA, 24 nt, Human
gccccaaaccagcccagagcaggg

SEQ ID NO: 171537 - RNA, 18 nt, Human
gccccaaauuccacuucu

SEQ ID NO: 171538 - RNA, 32 nt, Human
gccccaacacacgguccacagcucaucaugau

SEQ ID NO: 171539 - RNA, 32 nt, Human
gccccaacacaugcacauguguguacacaacu

SEQ ID NO: 171540 - RNA, 21 nt, Human
gccccaacaugccugcaccug

SEQ ID NO: 171541 - RNA, 32 nt, Human
gccccaacauuccucacuacuacuuuuucuuc

SEQ ID NO: 171542 - RNA, 32 nt, Human
gccccaaccagagacucagcaacagcuccucc

SEQ ID NO: 171543 - RNA, 21 nt, Human
gccccaaccccacuccacucc

SEQ ID NO: 171544 - RNA, 19 nt, Human
gccccaaccccgccagcgc

SEQ ID NO: 171545 - RNA, 32 nt, Human
gccccaacccuguggucacucuccccauuuug

SEQ ID NO: 171546 - RNA, 32 nt, Human
gccccaacuacacacccccaagccacagggaa

SEQ ID NO: 171547 - RNA, 18 nt, Human
gccccaacucuccccuga

SEQ ID NO: 171548 - RNA, 32 nt, Human
gccccaagaaacacauugcaccugccaauagc

SEQ ID NO: 171549 - RNA, 32 nt, Human
gccccaagacacacccuagccccuccuuauuc

SEQ ID NO: 171550 - RNA, 32 nt, Human
gccccaagcagcuggccaacauguguagagac

SEQ ID NO: 171551 - RNA, 23 nt, Human
gccccaagcccuggccucuagug

SEQ ID NO: 171552 - RNA, 22 nt, Human
gccccaagcuuuacacuggaug

SEQ ID NO: 171553 - RNA, 32 nt, Human
gccccaaggaagcaggcagcaugggaagcagg

SEQ ID NO: 171554 - RNA, 32 nt, Human
gccccaaggagccacugucacuucagguccgu

SEQ ID NO: 171555 - RNA, 32 nt, Human
gccccaaggagccgcugucacuucagguccgu

SEQ ID NO: 171556 - RNA, 25 nt, Human
gccccaaggcugccucugggccaug

SEQ ID NO: 171557 - RNA, 21 nt, Human
gccccaagggcaaaauuccca

SEQ ID NO: 171558 - RNA, 32 nt, Human
gccccaagucaggaguagggaggcagacggca

SEQ ID NO: 171559 - RNA, 32 nt, Human
gccccaaguccuggugucuccagccuggcucu

SEQ ID NO: 171560 - RNA, 23 nt, Human
gccccaagugauccucccaccuc

SEQ ID NO: 171561 - RNA, 32 nt, Human
gccccaaucaucucgcuggaugccauugccca

SEQ ID NO: 171562 - RNA, 32 nt, Human
gccccaauccuggcuccaacccucucuggaaa

SEQ ID NO: 171563 - RNA, 32 nt, Human
gccccaaucuaucuaguacuucccaggcaaau

SEQ ID NO: 171564 - RNA, 32 nt, Human
gccccaaugccagguaggaggaagggcugggg

SEQ ID NO: 171565 - RNA, 32 nt, Human
gccccaauuucuaacagccugccugucccccg

SEQ ID NO: 171566 - RNA, 32 nt, Human
gccccacacacaacaggguaaauuccuacucc

SEQ ID NO: 171567 - RNA, 32 nt, Human
gccccacacaccuggaacacacagugccccac

SEQ ID NO: 171568 - RNA, 32 nt, Human
gccccacacagcagaaaaugcccacgaugcaa

SEQ ID NO: 171569 - RNA, 31 nt, Human
gccccacacagcuagagcggccaggagagcg

SEQ ID NO: 171570 - RNA, 32 nt, Human
gccccacaccacugcaggcagguggauagaag

SEQ ID NO: 171571 - RNA, 22 nt, Human
gccccacaccagccccaaucca

SEQ ID NO: 171572 - RNA, 32 nt, Human
gccccacacccaggcugugggggacgggaugg

SEQ ID NO: 171573 - RNA, 21 nt, Human
gccccacacugcagaagcccu

SEQ ID NO: 171574 - RNA, 32 nt, Human
gccccacacugccucuguggccuggacuuuga

SEQ ID NO: 171575 - RNA, 32 nt, Human
gccccacagacaaaagcgcuuuuccuuggcau

SEQ ID NO: 171576 - RNA, 32 nt, Human
gccccacagaccccucccuggggcagagggac

SEQ ID NO: 171577 - RNA, 24 nt, Human
gccccacagcccugagagauggug

SEQ ID NO: 171578 - RNA, 24 nt, Human
gccccacagcccuguggccuggug

SEQ ID NO: 171579 - RNA, 19 nt, Human
gccccacagccuccaguga

SEQ ID NO: 171580 - RNA, 32 nt, Human
gccccacagccuucuacaagggguggccuccu

SEQ ID NO: 171581 - RNA, 32 nt, Human
gccccacagcuucagacugaggaucuagggcu

SEQ ID NO: 171582 - RNA, 32 nt, Human
gccccacagggaccccagccuggguggucacu

SEQ ID NO: 171583 - RNA, 32 nt, Human
gccccacagggagaucccgaagagccuguuuc

SEQ ID NO: 171584 - RNA, 21 nt, Human
gccccacagucggugugcuug

SEQ ID NO: 171585 - RNA, 22 nt, Human
gccccacauaccucacugucuc

SEQ ID NO: 171586 - RNA, 21 nt, Human
gccccacaucucccaccacca

SEQ ID NO: 171587 - RNA, 32 nt, Human
gccccacauggguuguuucuguuucuuuggcu

SEQ ID NO: 171588 - RNA, 21 nt, Human
gccccaccaaaugcccagggg

SEQ ID NO: 171589 - RNA, 29 nt, Human
gccccaccaacauccugcagggauggggu

SEQ ID NO: 171590 - RNA, 32 nt, Human
gccccaccaauuccucccuccugguaauccug

SEQ ID NO: 171591 - RNA, 32 nt, Human
gccccaccacccuucugaucuuagggguugga

SEQ ID NO: 171592 - RNA, 32 nt, Human
gccccaccagcaggucaagucagcuucaaagg

SEQ ID NO: 171593 - RNA, 25 nt, Human
gccccaccaggccugccccaaggug

SEQ ID NO: 171594 - RNA, 23 nt, Human
gccccaccagucagagcccugaa

SEQ ID NO: 171595 - RNA, 32 nt, Human
gccccaccagugagcuggcuacucggggauaa

SEQ ID NO: 171596 - RNA, 32 nt, Human
gccccaccaugauccagccucugccucacacu

SEQ ID NO: 171597 - RNA, 32 nt, Human
gccccaccaugccccaggcugcagccucuguc

SEQ ID NO: 171598 - RNA, 25 nt, Human
gccccacccacagauccccugcucc

SEQ ID NO: 171599 - RNA, 18 nt, Human
gccccacccaccccuccu

SEQ ID NO: 171600 - RNA, 19 nt, Human
gccccacccaccccuuccu

SEQ ID NO: 171601 - RNA, 32 nt, Human
gccccacccaccuuccuuccucuucccucuuc

SEQ ID NO: 171602 - RNA, 21 nt, Human
gccccacccagcagacugagg

SEQ ID NO: 171603 - RNA, 21 nt, Human
gccccaccccacccccacucc

SEQ ID NO: 171604 - RNA, 21 nt, Human
gccccaccccaccuccacucc

SEQ ID NO: 171605 - RNA, 21 nt, Human
gccccacccccacucccgccc

SEQ ID NO: 171606 - RNA, 32 nt, Human
gccccacccccuuauagcaucucccuccagga

SEQ ID NO: 171607 - RNA, 22 nt, Human
gccccaccccgcaacuccugaa

SEQ ID NO: 171608 - RNA, 20 nt, Human
gccccaccccgccccgcccc

SEQ ID NO: 171609 - RNA, 32 nt, Human
gccccaccccuccagaacacggcucacgcuua

SEQ ID NO: 171610 - RNA, 21 nt, Human
gccccaccccugaccccgcuc

SEQ ID NO: 171611 - RNA, 32 nt, Human
gccccacccuccaaucugcacuuugauuugcu

SEQ ID NO: 171612 - RNA, 18 nt, Human
gccccacccucuacccca

SEQ ID NO: 171613 - RNA, 21 nt, Human
gccccacccuggccccgcccc

SEQ ID NO: 171614 - RNA, 32 nt, Human
gccccacccugggccacugccugcuccagaga

SEQ ID NO: 171615 - RNA, 32 nt, Human
gccccacccuguggcuucugcagcugcaccuc

SEQ ID NO: 171616 - RNA, 32 nt, Human
gccccacccuguguaguuguugaggagaagaa

SEQ ID NO: 171617 - RNA, 32 nt, Human
gccccacccuuaagcuuccucugacgguuacc

SEQ ID NO: 171618 - RNA, 32 nt, Human
gccccacccuugucccucagcaacaucccauc

SEQ ID NO: 171619 - RNA, 32 nt, Human
gccccaccgagagccaggcagcuuugaguggc

SEQ ID NO: 171620 - RNA, 32 nt, Human
gccccaccgccaccccuacucccuucaacccu

SEQ ID NO: 171621 - RNA, 22 nt, Human
gccccaccgccacgccccaggg

SEQ ID NO: 171622 - RNA, 21 nt, Human
gccccaccgccccuccacucc

SEQ ID NO: 171623 - RNA, 23 nt, Human
gccccaccgcccucgccccgccc

SEQ ID NO: 171624 - RNA, 32 nt, Human
gccccaccgccggccgcgaccugcugcugccc

SEQ ID NO: 171625 - RNA, 32 nt, Human
gccccaccggccugcagccccugcugcccaau

SEQ ID NO: 171626 - RNA, 32 nt, Human
gccccaccggcggcggagggagcuguggcgau

SEQ ID NO: 171627 - RNA, 32 nt, Human
gccccaccuccaccuuagucucgauccgaaaa

SEQ ID NO: 171628 - RNA, 27 nt, Human
gccccaccucuucacucccugccaagg

SEQ ID NO: 171629 - RNA, 16 nt, Human
gccccaccugccagca

SEQ ID NO: 171630 - RNA, 32 nt, Human
gccccaccugccagcucuacugggcuuggagc

SEQ ID NO: 171631 - RNA, 16 nt, Human
gccccaccugccccca

SEQ ID NO: 171632 - RNA, 22 nt, Human
gccccaccuggagcccccgccc

SEQ ID NO: 171633 - RNA, 32 nt, Human
gccccaccuucugcuacuauuauguucuucag

SEQ ID NO: 171634 - RNA, 32 nt, Human
gccccaccuuggugauguugcaaccuuuccuu

SEQ ID NO: 171635 - RNA, 32 nt, Human
gccccaccuuugcuuccucccucucuccuccc

SEQ ID NO: 171636 - RNA, 21 nt, Human
gccccacgcaggagcgaggac

SEQ ID NO: 171637 - RNA, 32 nt, Human
gccccacgcuuuucucucuuccuuccccucuc

SEQ ID NO: 171638 - RNA, 20 nt, Human
gccccacggaccccacgccc

SEQ ID NO: 171639 - RNA, 18 nt, Human
gccccacgggccaugccc

SEQ ID NO: 171640 - RNA, 32 nt, Human
gccccacguuucaagucaaaucaagcugcuga

SEQ ID NO: 171641 - RNA, 32 nt, Human
gccccacuacacuccagccuggucaacagagu

SEQ ID NO: 171642 - RNA, 32 nt, Human
gccccacuacuuccuucccugccucccagcuc

SEQ ID NO: 171643 - RNA, 32 nt, Human
gccccacucagacgccaaggugccucccgccu

SEQ ID NO: 171644 - RNA, 20 nt, Human
gccccacucauuuguuuacc

SEQ ID NO: 171645 - RNA, 32 nt, Human
gccccacuccacucacuaaaggccagcgcacc

SEQ ID NO: 171646 - RNA, 19 nt, Human
gccccacuccagccccagc

SEQ ID NO: 171647 - RNA, 32 nt, Human
gccccacucccaccauccugugaaccccacuc

SEQ ID NO: 171648 - RNA, 21 nt, Human
gccccacucccaccccgcccc

SEQ ID NO: 171649 - RNA, 32 nt, Human
gccccacucccaguccuccugggauccugcug

SEQ ID NO: 171650 - RNA, 22 nt, Human
gccccacuccccuccugacagg

SEQ ID NO: 171651 - RNA, 32 nt, Human
gccccacuccucugcugaccugcugaccugug

SEQ ID NO: 171652 - RNA, 32 nt, Human
gccccacuccugaaugcaccacaugccucugu

SEQ ID NO: 171653 - RNA, 17 nt, Human
gccccacuccuguugcc

SEQ ID NO: 171654 - RNA, 32 nt, Human
gccccacucugagccugcccugggcagccucg

SEQ ID NO: 171655 - RNA, 32 nt, Human
gccccacucugccucuugcuccuccagggcag

SEQ ID NO: 171656 - RNA, 22 nt, Human
gccccacucugccugccugcug

SEQ ID NO: 171657 - RNA, 32 nt, Human
gccccacugacaccaccuacuugcuaaggcca

SEQ ID NO: 171658 - RNA, 32 nt, Human
gccccacugaggccaguagggggccaggccuc

SEQ ID NO: 171659 - RNA, 32 nt, Human
gccccacugcacccucucccccuuaucuaucu

SEQ ID NO: 171660 - RNA, 32 nt, Human
gccccacugcacuccacccugggcaauggagu

SEQ ID NO: 171661 - RNA, 32 nt, Human
gccccacugcacuccagccuaggcaacagagu

SEQ ID NO: 171662 - RNA, 32 nt, Human
gccccacugcacuccagccuggcaauagaccg

SEQ ID NO: 171663 - RNA, 32 nt, Human
gccccacugcacuccagccugggcgacagaac

SEQ ID NO: 171664 - RNA, 32 nt, Human
gccccacugcacuccagccugggugacagagc

SEQ ID NO: 171665 - RNA, 32 nt, Human
gccccacugcacuccagccugggugacagagg

SEQ ID NO: 171666 - RNA, 32 nt, Human
gccccacugcacuccagccuggugacuccguc

SEQ ID NO: 171667 - RNA, 32 nt, Human
gccccacugccagcugccccuccugggagggc

SEQ ID NO: 171668 - RNA, 32 nt, Human
gccccacugccauggagcagccuguguuccug

SEQ ID NO: 171669 - RNA, 32 nt, Human
gccccacugccucaccuccccuguaucugcag

SEQ ID NO: 171670 - RNA, 32 nt, Human
gccccacugccucucacugcccgugagucccu

SEQ ID NO: 171671 - RNA, 21 nt, Human
gccccacugcgcccgcgcucu

SEQ ID NO: 171672 - RNA, 22 nt, Human
gccccacugcugcuaccugggg

SEQ ID NO: 171673 - RNA, 20 nt, Human
gccccacugguauaaauaca

SEQ ID NO: 171674 - RNA, 17 nt, Human
gccccacuguccccuca

SEQ ID NO: 171675 - RNA, 32 nt, Human
gccccacugucucuaaccacuccugggcuaag

SEQ ID NO: 171676 - RNA, 20 nt, Human
gccccacuguuccccaacuu

SEQ ID NO: 171677 - RNA, 32 nt, Human
gccccacuguuuagaaucuuagauggaaaugu

SEQ ID NO: 171678 - RNA, 23 nt, Human
gccccacuucccaccccgucucc

SEQ ID NO: 171679 - RNA, 32 nt, Human
gccccacuucccucagcccccagggcuuccuu

SEQ ID NO: 171680 - RNA, 32 nt, Human
gccccacuucugcuuugugucucccucugucu

SEQ ID NO: 171681 - RNA, 32 nt, Human
gccccagaaagccucccuucuucuccaggucc

SEQ ID NO: 171682 - RNA, 32 nt, Human
gccccagaacaacaguuucacuuuguggcuuu

SEQ ID NO: 171683 - RNA, 23 nt, Human
gccccagaacaccagagaccuca

SEQ ID NO: 171684 - RNA, 20 nt, Human
gccccagaagcgccccagga

SEQ ID NO: 171685 - RNA, 22 nt, Human
gccccagacaccgcacucaggg

SEQ ID NO: 171686 - RNA, 22 nt, Human
gccccagacaccuucccugagg

SEQ ID NO: 171687 - RNA, 21 nt, Human
gccccagacagccccagccca

SEQ ID NO: 171688 - RNA, 32 nt, Human
gccccagacccuccccuguccaaacaggagau

SEQ ID NO: 171689 - RNA, 23 nt, Human
gccccagaccggcagccuggcca

SEQ ID NO: 171690 - RNA, 32 nt, Human
gccccagacugugcccuuacgagcucaucucu

SEQ ID NO: 171691 - RNA, 32 nt, Human
gccccagagaccagaacugauccagagcugga

SEQ ID NO: 171692 - RNA, 21 nt, Human
gccccagagagaggagcuggg

SEQ ID NO: 171693 - RNA, 32 nt, Human
gccccagagagaggauguggaaagcacuuuuu

SEQ ID NO: 171694 - RNA, 32 nt, Human
gccccagagagggacccccacagcggcagcug

SEQ ID NO: 171695 - RNA, 32 nt, Human
gccccagagcccaagggugcaaagcaguaauu

SEQ ID NO: 171696 - RNA, 32 nt, Human
gccccagagccccagccccucaugucuugccg

SEQ ID NO: 171697 - RNA, 32 nt, Human
gccccagagcccugcccgaggcugaggcuggg

SEQ ID NO: 171698 - RNA, 32 nt, Human
gccccagaggacuuaucucagcuguacaugcu

SEQ ID NO: 171699 - RNA, 32 nt, Human
gccccagaggcaccagcuccuggcgggggagg

SEQ ID NO: 171700 - RNA, 32 nt, Human
gccccagaggcagagguuguggugagccgaga

SEQ ID NO: 171701 - RNA, 32 nt, Human
gccccagaggguguucagcuuguugccaacag

SEQ ID NO: 171702 - RNA, 32 nt, Human
gccccagaggucaaggcugcagugagcuguga

SEQ ID NO: 171703 - RNA, 32 nt, Human
gccccagagguccccugcaucccccuucuuug

SEQ ID NO: 171704 - RNA, 32 nt, Human
gccccagaggugucacaggaaggcaccagcaa

SEQ ID NO: 171705 - RNA, 32 nt, Human
gccccagaguagcuggaauuacaggcacacac

SEQ ID NO: 171706 - RNA, 16 nt, Human
gccccagaguggcuca

SEQ ID NO: 171707 - RNA, 32 nt, Human
gccccagaguugucccccucugcuggggcaag

SEQ ID NO: 171708 - RNA, 21 nt, Human
gccccagaguuugcaaacuca

SEQ ID NO: 171709 - RNA, 23 nt, Human
gccccagaguuugccuguuucca

SEQ ID NO: 171710 - RNA, 32 nt, Human
gccccagauggcacugaguuuuucauucauug

SEQ ID NO: 171711 - RNA, 32 nt, Human
gccccagauugcuucauuugcuggguguggaa

SEQ ID NO: 171712 - RNA, 32 nt, Human
gccccagauuugcugcacauccuggccagcac

SEQ ID NO: 171713 - RNA, 32 nt, Human
gccccagcacagaagaggccccugccacccua

SEQ ID NO: 171714 - RNA, 32 nt, Human
gccccagcacagacccaaacuggggcugggcc

SEQ ID NO: 171715 - RNA, 32 nt, Human
gccccagcacgucugccucuggcuucacccag

SEQ ID NO: 171716 - RNA, 32 nt, Human
gccccagcagagccugggaggaaggcggccgc

SEQ ID NO: 171717 - RNA, 32 nt, Human
gccccagcagcaucugaacugaggcuucuuca

SEQ ID NO: 171718 - RNA, 32 nt, Human
gccccagcagcuggauucucaggcugggcccc

SEQ ID NO: 171719 - RNA, 32 nt, Human
gccccagcaggcaaaccacuucacagugcuag

SEQ ID NO: 171720 - RNA, 19 nt, Human
gccccagcaggcccaggca

SEQ ID NO: 171721 - RNA, 21 nt, Human
gccccagcagucagccagccg

SEQ ID NO: 171722 - RNA, 20 nt, Human
gccccagcaugcccuuggca

SEQ ID NO: 171723 - RNA, 17 nt, Human
gccccagcauuugcuca

SEQ ID NO: 171724 - RNA, 32 nt, Human
gccccagcauuuugccccgggcuccagcauca

SEQ ID NO: 171725 - RNA, 32 nt, Human
gccccagccaaaacaaaagagcugaagaauaa

SEQ ID NO: 171726 - RNA, 22 nt, Human
gccccagccaacgagauugcug

SEQ ID NO: 171727 - RNA, 21 nt, Human
gccccagccacaccaggugca

SEQ ID NO: 171728 - RNA, 23 nt, Human
gccccagccacacugugaccugg

SEQ ID NO: 171729 - RNA, 32 nt, Human
gccccagccacccccacugccugggccuucau

SEQ ID NO: 171730 - RNA, 32 nt, Human
gccccagccacucugaacgcugagaugggaag

SEQ ID NO: 171731 - RNA, 21 nt, Human
gccccagccagccagccagcc

SEQ ID NO: 171732 - RNA, 25 nt, Human
gccccagccaggacagccccuggcc

SEQ ID NO: 171733 - RNA, 23 nt, Human
gccccagccaggcccugcagggc

SEQ ID NO: 171734 - RNA, 32 nt, Human
gccccagccaggucacaccuggccucacacuu

SEQ ID NO: 171735 - RNA, 32 nt, Human
gccccagccauccugaccccucucauuauuuu

SEQ ID NO: 171736 - RNA, 23 nt, Human
gccccagcccaccugcgacccgg

SEQ ID NO: 171737 - RNA, 28 nt, Human
gccccagcccagccugccucaucccacc

SEQ ID NO: 171738 - RNA, 32 nt, Human
gccccagcccagccuggggugcacugacggag

SEQ ID NO: 171739 - RNA, 32 nt, Human
gccccagcccaggaguagucuuaccucugagg

SEQ ID NO: 171740 - RNA, 32 nt, Human
gccccagccccacagaccagcccagcauucag

SEQ ID NO: 171741 - RNA, 22 nt, Human
gccccagccccagccccagugg

SEQ ID NO: 171742 - RNA, 32 nt, Human
gccccagccccauccccagccccagccccagc

SEQ ID NO: 171743 - RNA, 17 nt, Human
gccccagccccauggcc

SEQ ID NO: 171744 - RNA, 32 nt, Human
gccccagccccgccaccuuccugggcccugug

SEQ ID NO: 171745 - RNA, 26 nt, Human
gccccagcccgacgacgagcccgccg

SEQ ID NO: 171746 - RNA, 32 nt, Human
gccccagcccuaguccccuugugaccucagag

SEQ ID NO: 171747 - RNA, 32 nt, Human
gccccagccgagaucacagcgcgacaggagug

SEQ ID NO: 171748 - RNA, 21 nt, Human
gccccagccgccacccgaccc

SEQ ID NO: 171749 - RNA, 32 nt, Human
gccccagccgcugcagcagcggagacagucgc

SEQ ID NO: 171750 - RNA, 32 nt, Human
gccccagccuccaaggaugcggcuccucgaga

SEQ ID NO: 171751 - RNA, 32 nt, Human
gccccagccuccaucuucgucucucaggaugg

SEQ ID NO: 171752 - RNA, 32 nt, Human
gccccagccugaggaggagggagagggaggaa

SEQ ID NO: 171753 - RNA, 32 nt, Human
gccccagccuuucuccccagcauacagugagc

SEQ ID NO: 171754 - RNA, 32 nt, Human
gccccagcuacccuucuucuccagcugggcuc

SEQ ID NO: 171755 - RNA, 23 nt, Human
gccccagcuacuagggaggcuga

SEQ ID NO: 171756 - RNA, 23 nt, Human
gccccagcuacucaggaggcuga

SEQ ID NO: 171757 - RNA, 32 nt, Human
gccccagcuacucaggcuggggugggaggaug

SEQ ID NO: 171758 - RNA, 23 nt, Human
gccccagcuacucgggaggcuga

SEQ ID NO: 171759 - RNA, 23 nt, Human
gccccagcuacuugggaggcuga

SEQ ID NO: 171760 - RNA, 32 nt, Human
gccccagcuaggaagcaagaucgcugugcuag

SEQ ID NO: 171761 - RNA, 23 nt, Human
gccccagcuauucaggagacuga

SEQ ID NO: 171762 - RNA, 32 nt, Human
gccccagcuauucaggagacugaggcaggaga

SEQ ID NO: 171763 - RNA, 32 nt, Human
gccccagcucacacccucccaaugcuuauaug

SEQ ID NO: 171764 - RNA, 32 nt, Human
gccccagcucacucugaccacuucucugccug

SEQ ID NO: 171765 - RNA, 32 nt, Human
gccccagcuccucuuccugccucucucauggc

SEQ ID NO: 171766 - RNA, 16 nt, Human
gccccagcucugcugc

SEQ ID NO: 171767 - RNA, 22 nt, Human
gccccagcugaccagccccgcc

SEQ ID NO: 171768 - RNA, 19 nt, Human
gccccagcuggcccagccc

SEQ ID NO: 171769 - RNA, 19 nt, Human
gccccagcuucgcgcaggg

SEQ ID NO: 171770 - RNA, 21 nt, Human
gccccagcuugagugcagugg

SEQ ID NO: 171771 - RNA, 32 nt, Human
gccccagcuuuccuaggccagaauuguguuug

SEQ ID NO: 171772 - RNA, 32 nt, Human
gccccaggaaacaacagagcagcuuggcaucu

SEQ ID NO: 171773 - RNA, 24 nt, Human
gccccaggaaagggagcgaggaca

SEQ ID NO: 171774 - RNA, 20 nt, Human
gccccaggaacagcagaucu

SEQ ID NO: 171775 - RNA, 32 nt, Human
gccccaggaacagcagaucuaacagcugaugu

SEQ ID NO: 171776 - RNA, 23 nt, Human
gccccaggaagccaaggcugggg

SEQ ID NO: 171777 - RNA, 32 nt, Human
gccccaggaaggcucggaagcugugugggaag

SEQ ID NO: 171778 - RNA, 32 nt, Human
gccccaggaagggcaaggcaagaugguggaca

SEQ ID NO: 171779 - RNA, 32 nt, Human
gccccaggaccccucuucaagagccacugcgu

SEQ ID NO: 171780 - RNA, 26 nt, Human
gccccaggacccuucaaagggcuggg

SEQ ID NO: 171781 - RNA, 32 nt, Human
gccccaggacccuucaaagggcugggacaucc

SEQ ID NO: 171782 - RNA, 32 nt, Human
gccccaggagcauuggguuuguuugcacgggg

SEQ ID NO: 171783 - RNA, 22 nt, Human
gccccaggagcccccugccgga

SEQ ID NO: 171784 - RNA, 32 nt, Human
gccccaggagccucucaggagucuacauccca

SEQ ID NO: 171785 - RNA, 32 nt, Human
gccccaggagcuggagacaagaccuuguggcu

SEQ ID NO: 171786 - RNA, 32 nt, Human
gccccaggaggucgaggcugcagugagccaug

SEQ ID NO: 171787 - RNA, 25 nt, Human
gccccaggauccagguccaccagcc

SEQ ID NO: 171788 - RNA, 32 nt, Human
gccccaggcaagcuggaacuuggguggggagg

SEQ ID NO: 171789 - RNA, 17 nt, Human
gccccaggcacaguggc

SEQ ID NO: 171790 - RNA, 32 nt, Human
gccccaggcauccucagccucuggugggugcc

SEQ ID NO: 171791 - RNA, 32 nt, Human
gccccaggccacagcgugggaacucacuuucc

SEQ ID NO: 171792 - RNA, 32 nt, Human
gccccaggcccagcuucucuccugccuuccaa

SEQ ID NO: 171793 - RNA, 17 nt, Human
gccccaggccgcagggg

SEQ ID NO: 171794 - RNA, 32 nt, Human
gccccaggccugaguccuuagcaaggguuggg

SEQ ID NO: 171795 - RNA, 32 nt, Human
gccccaggcugcagcccauucgcaggcacccg

SEQ ID NO: 171796 - RNA, 32 nt, Human
gccccaggcugcaggugaggcuucaggggaug

SEQ ID NO: 171797 - RNA, 32 nt, Human
gccccaggcugcuggggugaccgcggagagag

SEQ ID NO: 171798 - RNA, 22 nt, Human
gccccaggcuggagugcagugg

SEQ ID NO: 171799 - RNA, 28 nt, Human
gccccaggcuuuagagcccucagcaggu

SEQ ID NO: 171800 - RNA, 24 nt, Human
gccccaggcuuugcagaaaccaca

SEQ ID NO: 171801 - RNA, 32 nt, Human
gccccaggcuuugcagaaaccacacacacugu

SEQ ID NO: 171802 - RNA, 32 nt, Human
gccccagggaaaggacaaggcugagagaauuc

SEQ ID NO: 171803 - RNA, 32 nt, Human
gccccagggaauggacccuuggagacucccau

SEQ ID NO: 171804 - RNA, 19 nt, Human
gccccagggagccaccuga

SEQ ID NO: 171805 - RNA, 32 nt, Human
gccccagggccaauccaagauccagagguagc

SEQ ID NO: 171806 - RNA, 32 nt, Human
gccccagggccagaggaguuggggucaucugu

SEQ ID NO: 171807 - RNA, 32 nt, Human
gccccagggccagauggagccaaaggucagcu

SEQ ID NO: 171808 - RNA, 23 nt, Human
gccccagggccagcaggcugggg

SEQ ID NO: 171809 - RNA, 32 nt, Human
gccccagggcccauccugaggucugcuagcca

SEQ ID NO: 171810 - RNA, 32 nt, Human
gccccagggcccuaccuccuggaaugcuuucc

SEQ ID NO: 171811 - RNA, 32 nt, Human
gccccagggcggagcucccagccagcaugguc

SEQ ID NO: 171812 - RNA, 21 nt, Human
gccccagggcucagagcuggg

SEQ ID NO: 171813 - RNA, 20 nt, Human
gccccaggggagcucagcag

SEQ ID NO: 171814 - RNA, 24 nt, Human
gccccaggggagcuggggcagcau

SEQ ID NO: 171815 - RNA, 22 nt, Human
gccccaggggccuccugggcca

SEQ ID NO: 171816 - RNA, 27 nt, Human
gccccagguagugccagcagaguaggg

SEQ ID NO: 171817 - RNA, 22 nt, Human
gccccaggucucaggaggggug

SEQ ID NO: 171818 - RNA, 32 nt, Human
gccccaggucuuccuccgccugcuccacacca

SEQ ID NO: 171819 - RNA, 28 nt, Human
gccccaggugaugcugccuuugcugucc

SEQ ID NO: 171820 - RNA, 32 nt, Human
gccccagguuaggaauaguggugggaggaagg

SEQ ID NO: 171821 - RNA, 32 nt, Human
gccccagguuauuacuggauuuauaggggccu

SEQ ID NO: 171822 - RNA, 32 nt, Human
gccccaguauaaguguugggaacucucugcca

SEQ ID NO: 171823 - RNA, 32 nt, Human
gccccagucaucuaccaguauccagcaugggg

SEQ ID NO: 171824 - RNA, 32 nt, Human
gccccagucccagagacccccaccuggugccc

SEQ ID NO: 171825 - RNA, 21 nt, Human
gccccagucuauaaauacagu

SEQ ID NO: 171826 - RNA, 20 nt, Human
gccccagugacccucaguga

SEQ ID NO: 171827 - RNA, 32 nt, Human
gccccagugcccggauguccaucaggauuagc

SEQ ID NO: 171828 - RNA, 32 nt, Human
gccccagugcgugcugucuguggagugugucu

SEQ ID NO: 171829 - RNA, 22 nt, Human
gccccaguggcucgccccaggg

SEQ ID NO: 171830 - RNA, 32 nt, Human
gccccagugggcgccucacacucagaaccuca

SEQ ID NO: 171831 - RNA, 32 nt, Human
gccccaguuguuucuacuacauggaagaccuc

SEQ ID NO: 171832 - RNA, 21 nt, Human
gccccaguuucucuucaggga

SEQ ID NO: 171833 - RNA, 32 nt, Human
gccccaguuuuccagagcacuggggauauauc

SEQ ID NO: 171834 - RNA, 32 nt, Human
gccccauacacaccuuagaugaugcauauggc

SEQ ID NO: 171835 - RNA, 20 nt, Human
gccccauacuuugggggucu

SEQ ID NO: 171836 - RNA, 32 nt, Human
gccccauagaagcagcaaagcagcaagcgacg

SEQ ID NO: 171837 - RNA, 32 nt, Human
gccccauagcccauaagggaggcugcugugca

SEQ ID NO: 171838 - RNA, 32 nt, Human
gccccauagccccugccggccgcacguguaaa

SEQ ID NO: 171839 - RNA, 25 nt, Human
gccccauaggcagagccccagggca

SEQ ID NO: 171840 - RNA, 32 nt, Human
gccccauauuaaaagaacucauucauaggaag

SEQ ID NO: 171841 - RNA, 32 nt, Human
gccccaucacucuggccucugccuucaucuca

SEQ ID NO: 171842 - RNA, 32 nt, Human
gccccaucacugccaacugcagggggccccuc

SEQ ID NO: 171843 - RNA, 28 nt, Human
gccccaucagaggcugccuccuccuucu

SEQ ID NO: 171844 - RNA, 32 nt, Human
gccccauccaaggagccagggcccugggucua

SEQ ID NO: 171845 - RNA, 18 nt, Human
gccccauccacccugccu

SEQ ID NO: 171846 - RNA, 32 nt, Human
gccccauccaccgccagcuucccuucacuccc

SEQ ID NO: 171847 - RNA, 32 nt, Human
gccccauccaucccaccugccacuaccuuggg

SEQ ID NO: 171848 - RNA, 32 nt, Human
gccccauccauguuccugcaaaggacaugauc

SEQ ID NO: 171849 - RNA, 32 nt, Human
gccccauccccagccccagccccagcccaguc

SEQ ID NO: 171850 - RNA, 21 nt, Human
gccccaucccccacagccagg

SEQ ID NO: 171851 - RNA, 18 nt, Human
gccccaucccggcuguug

SEQ ID NO: 171852 - RNA, 32 nt, Human
gccccaucccuucucucucugccaccauuucg

SEQ ID NO: 171853 - RNA, 32 nt, Human
gccccauccgcccucuggaccuguguagggcc

SEQ ID NO: 171854 - RNA, 25 nt, Human
gccccauccucucucugaagccagg

SEQ ID NO: 171855 - RNA, 18 nt, Human
gccccauccuggcugcug

SEQ ID NO: 171856 - RNA, 32 nt, Human
gccccauccuucucccccuguuagagaggggc

SEQ ID NO: 171857 - RNA, 32 nt, Human
gccccauccuuugcuuccuuccuuccuuccuu

SEQ ID NO: 171858 - RNA, 23 nt, Human
gccccaucgcuucccuucaugca

SEQ ID NO: 171859 - RNA, 19 nt, Human
gccccaucuccccagcggg

SEQ ID NO: 171860 - RNA, 32 nt, Human
gccccaucugcgggggcagugcucacccacac

SEQ ID NO: 171861 - RNA, 32 nt, Human
gccccaucugugcauucuccuggaugcuuaga

SEQ ID NO: 171862 - RNA, 32 nt, Human
gccccaucuuagagucaaaggcagaggggcuu

SEQ ID NO: 171863 - RNA, 32 nt, Human
gccccaucuucuggcccuuagcuggugccacu

SEQ ID NO: 171864 - RNA, 32 nt, Human
gccccaucuuuguccggccuccgcgcuuuguu

SEQ ID NO: 171865 - RNA, 30 nt, Human
gccccaugaagugcuggaaggcagcccugg

SEQ ID NO: 171866 - RNA, 18 nt, Human
gccccaugagaacagcuu

SEQ ID NO: 171867 - RNA, 32 nt, Human
gccccaugcacggggagccaggugggcugggc

SEQ ID NO: 171868 - RNA, 32 nt, Human
gccccaugcacucccuguaucuugcacuaaau

SEQ ID NO: 171869 - RNA, 20 nt, Human
gccccaugcaugcugcugcc

SEQ ID NO: 171870 - RNA, 21 nt, Human
gccccaugcccagcccugccu

SEQ ID NO: 171871 - RNA, 32 nt, Human
gccccaugcccagcccugccuuggucccccaa

SEQ ID NO: 171872 - RNA, 23 nt, Human
gccccaugccccgaggaggggug

SEQ ID NO: 171873 - RNA, 32 nt, Human
gccccaugccuguccagccugggcagccaggc

SEQ ID NO: 171874 - RNA, 32 nt, Human
gccccaugcuaggugcaccaucuuccuccauu

SEQ ID NO: 171875 - RNA, 24 nt, Human
gccccaugcuguccuccuacccca

SEQ ID NO: 171876 - RNA, 30 nt, Human
gccccauggagguggcggugcccgugaagc

SEQ ID NO: 171877 - RNA, 32 nt, Human
gccccauggcucccagacucugucugugccga

SEQ ID NO: 171878 - RNA, 32 nt, Human
gccccaugggcuguguuacauagagacagcag

SEQ ID NO: 171879 - RNA, 32 nt, Human
gccccaugguacgcccugcccaguuuccaguu

SEQ ID NO: 171880 - RNA, 32 nt, Human
gccccauguaacagaggagaaagggaagcuca

SEQ ID NO: 171881 - RNA, 31 nt, Human
gccccauguccaucugggccacugucaggac

SEQ ID NO: 171882 - RNA, 32 nt, Human
gccccauguuaaccccuccacucuuucuuuca

SEQ ID NO: 171883 - RNA, 32 nt, Human
gccccauuaguggguuagcgggucugaccuca

SEQ ID NO: 171884 - RNA, 32 nt, Human
gccccauuccccagaucauccauuucguccuc

SEQ ID NO: 171885 - RNA, 20 nt, Human
gccccauuccugcugagcag

SEQ ID NO: 171886 - RNA, 32 nt, Human
gccccauugcuggccuugcaucugaauaggcc

SEQ ID NO: 171887 - RNA, 32 nt, Human
gccccauuguacuccagccuggggaacaagaa

SEQ ID NO: 171888 - RNA, 32 nt, Human
gccccauugucagccccaggcccagccccagg

SEQ ID NO: 171889 - RNA, 20 nt, Human
gccccauuguccucaccagu

SEQ ID NO: 171890 - RNA, 32 nt, Human
gccccauuuccucacacuaagagggcagacug

SEQ ID NO: 171891 - RNA, 32 nt, Human
gccccauuuccuuuacaaacccccgcacaauu

SEQ ID NO: 171892 - RNA, 32 nt, Human
gccccauuugcuuuuaccuguacuguauucuu

SEQ ID NO: 171893 - RNA, 29 nt, Human
gccccauuugucugugugccugccaggau

SEQ ID NO: 171894 - RNA, 32 nt, Human
gcccccaaaacagccugagcaaaaagaccagc

SEQ ID NO: 171895 - RNA, 32 nt, Human
gcccccaaaccuggaaacuuccucugcaccuc

SEQ ID NO: 171896 - RNA, 18 nt, Human
gcccccaaagagcaaagg

SEQ ID NO: 171897 - RNA, 32 nt, Human
gcccccaaagugcugggauuacaggcaugagc

SEQ ID NO: 171898 - RNA, 19 nt, Human
gcccccaaccccuccuucc

SEQ ID NO: 171899 - RNA, 22 nt, Human
gcccccaaccuccaacccacca

SEQ ID NO: 171900 - RNA, 17 nt, Human
gcccccaacuacccucc

SEQ ID NO: 171901 - RNA, 23 nt, Human
gcccccaagaaaggcucuggugg

SEQ ID NO: 171902 - RNA, 22 nt, Human
gcccccaagacugcucuggugg

SEQ ID NO: 171903 - RNA, 18 nt, Human
gcccccaagccggugggc

SEQ ID NO: 171904 - RNA, 19 nt, Human
gcccccaaggcggaggcug

SEQ ID NO: 171905 - RNA, 32 nt, Human
gcccccaaggcucuccucugagagccaccaag

SEQ ID NO: 171906 - RNA, 19 nt, Human
gcccccaagguccagggca

SEQ ID NO: 171907 - RNA, 23 nt, Human
gcccccaaucacccgccccgccc

SEQ ID NO: 171908 - RNA, 32 nt, Human
gcccccaauccugcuugcucccagcuugguaa

SEQ ID NO: 171909 - RNA, 32 nt, Human
gcccccaaugcccaccaccugggccccgguca

SEQ ID NO: 171910 - RNA, 32 nt, Human
gcccccaaugugccuuggaccaguuccugugu

SEQ ID NO: 171911 - RNA, 17 nt, Human
gcccccaauuccacucu

SEQ ID NO: 171912 - RNA, 32 nt, Human
gcccccacaagccuggucaucagccaggcagc

SEQ ID NO: 171913 - RNA, 18 nt, Human
gcccccacacccaccucu

SEQ ID NO: 171914 - RNA, 20 nt, Human
gcccccacaccccugcugcc

SEQ ID NO: 171915 - RNA, 17 nt, Human
gcccccacacugcgccu

SEQ ID NO: 171916 - RNA, 19 nt, Human
gcccccacacugugccuga

SEQ ID NO: 171917 - RNA, 32 nt, Human
gcccccacagaggcacaguccccagccaccuc

SEQ ID NO: 171918 - RNA, 24 nt, Human
gcccccacagauccuauccuccaa

SEQ ID NO: 171919 - RNA, 20 nt, Human
gcccccacagcccuccaggu

SEQ ID NO: 171920 - RNA, 32 nt, Human
gcccccacagcccucuggggagccucacccug

SEQ ID NO: 171921 - RNA, 32 nt, Human
gcccccacagccggauccccucagccuuccag

SEQ ID NO: 171922 - RNA, 32 nt, Human
gcccccacaugccagccccacccuccagucgg

SEQ ID NO: 171923 - RNA, 18 nt, Human
gcccccaccacagcagaa

SEQ ID NO: 171924 - RNA, 32 nt, Human
gcccccaccauccuuucucuggcuucuuuuag

SEQ ID NO: 171925 - RNA, 21 nt, Human
gcccccacccacgcugccucc

SEQ ID NO: 171926 - RNA, 25 nt, Human
gcccccacccacugcccauccccca

SEQ ID NO: 171927 - RNA, 23 nt, Human
gcccccacccacuucccugggca

SEQ ID NO: 171928 - RNA, 21 nt, Human
gcccccacccaggucccccga

SEQ ID NO: 171929 - RNA, 32 nt, Human
gcccccacccaggucccccgacugccugucuc

SEQ ID NO: 171930 - RNA, 32 nt, Human
gcccccacccaguggaccuugauguccugagg

SEQ ID NO: 171931 - RNA, 24 nt, Human
gcccccacccaucucaugccccag

SEQ ID NO: 171932 - RNA, 32 nt, Human
gcccccaccccacgggaggguggggaugggag

SEQ ID NO: 171933 - RNA, 32 nt, Human
gcccccacccccaaaggcucagccucuaaauc

SEQ ID NO: 171934 - RNA, 24 nt, Human
gcccccacccccaagguucuccaa

SEQ ID NO: 171935 - RNA, 32 nt, Human
gcccccacccccacccuccaccugccccucuu

SEQ ID NO: 171936 - RNA, 32 nt, Human
gcccccacccccagcucugccugccuguccua

SEQ ID NO: 171937 - RNA, 25 nt, Human
gcccccacccccugucggcgucugg

SEQ ID NO: 171938 - RNA, 25 nt, Human
gcccccaccccgccccccgcccuga

SEQ ID NO: 171939 - RNA, 18 nt, Human
gcccccacccggugggua

SEQ ID NO: 171940 - RNA, 19 nt, Human
gcccccacccucagccguu

SEQ ID NO: 171941 - RNA, 19 nt, Human
gcccccacccugccuggug

SEQ ID NO: 171942 - RNA, 32 nt, Human
gcccccacccugcuucugcugccuguuugggg

SEQ ID NO: 171943 - RNA, 32 nt, Human
gcccccacccuugaccucaacaggguccugga

SEQ ID NO: 171944 - RNA, 32 nt, Human
gcccccaccgcuguggccggcacuccauuccg

SEQ ID NO: 171945 - RNA, 32 nt, Human
gcccccaccucugcccuccaccagcgucgaga

SEQ ID NO: 171946 - RNA, 22 nt, Human
gcccccaccucugccuccaggu

SEQ ID NO: 171947 - RNA, 21 nt, Human
gcccccaccucuggccugcag

SEQ ID NO: 171948 - RNA, 21 nt, Human
gcccccaccugcccucccggg

SEQ ID NO: 171949 - RNA, 22 nt, Human
gcccccacguggaacauucugg

SEQ ID NO: 171950 - RNA, 32 nt, Human
gcccccacucaggcccccgggccccgcuggaa

SEQ ID NO: 171951 - RNA, 32 nt, Human
gcccccacucccguguuuucugaccuccugcc

SEQ ID NO: 171952 - RNA, 32 nt, Human
gcccccacuccuccuccuuucuuugcuguuug

SEQ ID NO: 171953 - RNA, 32 nt, Human
gcccccacucuuuuugucuugcucugaggaug

SEQ ID NO: 171954 - RNA, 32 nt, Human
gcccccacugagcaggccaacaugcuguugug

SEQ ID NO: 171955 - RNA, 24 nt, Human
gcccccacugcaccagcaaugcua

SEQ ID NO: 171956 - RNA, 32 nt, Human
gcccccacugucccuccuccaggcauccuggu

SEQ ID NO: 171957 - RNA, 32 nt, Human
gcccccacuuccuuugagaccugcacucucau

SEQ ID NO: 171958 - RNA, 21 nt, Human
gcccccagaaccaggccccca

SEQ ID NO: 171959 - RNA, 24 nt, Human
gcccccagaacccuggccugugug

SEQ ID NO: 171960 - RNA, 32 nt, Human
gcccccagaaccuggcuccagccagggggcca

SEQ ID NO: 171961 - RNA, 32 nt, Human
gcccccagaagaagcuggagugcauagugcgg

SEQ ID NO: 171962 - RNA, 32 nt, Human
gcccccagaagcagagcuuuguuuuggagguu

SEQ ID NO: 171963 - RNA, 32 nt, Human
gcccccagaaggucauacucugccauuuuguc

SEQ ID NO: 171964 - RNA, 32 nt, Human
gcccccagaccccugaaaacccacgcaagccc

SEQ ID NO: 171965 - RNA, 21 nt, Human
gcccccagaccucccaguggg

SEQ ID NO: 171966 - RNA, 32 nt, Human
gcccccagagacugacuuguggggcccagcug

SEQ ID NO: 171967 - RNA, 18 nt, Human
gcccccagagcuccuccc

SEQ ID NO: 171968 - RNA, 20 nt, Human
gcccccagagcugggccaca

SEQ ID NO: 171969 - RNA, 32 nt, Human
gcccccagagggcagaagcagcguggaggggc

SEQ ID NO: 171970 - RNA, 32 nt, Human
gcccccagagugugcagcugugauucagaauc

SEQ ID NO: 171971 - RNA, 19 nt, Human
gcccccagcaccccugccu

SEQ ID NO: 171972 - RNA, 32 nt, Human
gcccccagcaccuugcacauaggugucugaua

SEQ ID NO: 171973 - RNA, 32 nt, Human
gcccccagcauccucuugcacuggcuggcaca

SEQ ID NO: 171974 - RNA, 32 nt, Human
gcccccagccaagcauuggggccgccauccug

SEQ ID NO: 171975 - RNA, 22 nt, Human
gcccccagccagaguccuggcu

SEQ ID NO: 171976 - RNA, 32 nt, Human
gcccccagccauggcccugucccugccucugg

SEQ ID NO: 171977 - RNA, 21 nt, Human
gcccccagcccaccccugccc

SEQ ID NO: 171978 - RNA, 32 nt, Human
gcccccagccccagcagucagcgcgguggacg

SEQ ID NO: 171979 - RNA, 32 nt, Human
gcccccagccccucgucgcggguucagguccg

SEQ ID NO: 171980 - RNA, 32 nt, Human
gcccccagccgaucccuccacccucuaccgag

SEQ ID NO: 171981 - RNA, 32 nt, Human
gcccccagccgcggcaucgcuucuguggcccc

SEQ ID NO: 171982 - RNA, 32 nt, Human
gcccccagccuaugggggaucuggccucugcc

SEQ ID NO: 171983 - RNA, 32 nt, Human
gcccccagccucccacucgacuuuccucuuag

SEQ ID NO: 171984 - RNA, 32 nt, Human
gcccccagccucccccucggccgccuccacga

SEQ ID NO: 171985 - RNA, 32 nt, Human
gcccccagccuccuagccauaacccucccugc

SEQ ID NO: 171986 - RNA, 32 nt, Human
gcccccagccucuggccucccuccaguagccc

SEQ ID NO: 171987 - RNA, 21 nt, Human
gcccccagccugugccuugcu

SEQ ID NO: 171988 - RNA, 32 nt, Human
gcccccagccuugccuacagggaggguagaug

SEQ ID NO: 171989 - RNA, 18 nt, Human
gcccccagcgucgccccu

SEQ ID NO: 171990 - RNA, 32 nt, Human
gcccccagcugccccaugcucugcaccugcua

SEQ ID NO: 171991 - RNA, 19 nt, Human
gcccccagcuuccagcagg

SEQ ID NO: 171992 - RNA, 32 nt, Human
gcccccagcuucccucccuccaugaagccacu

SEQ ID NO: 171993 - RNA, 30 nt, Human
gcccccagcuugcauugaaaggcucuaguu

SEQ ID NO: 171994 - RNA, 32 nt, Human
gcccccaggaaagacgggccugggggaggcgg

SEQ ID NO: 171995 - RNA, 32 nt, Human
gcccccaggaaucccuuccucccauguccugg

SEQ ID NO: 171996 - RNA, 32 nt, Human
gcccccaggaccacuaccccacggccagccag

SEQ ID NO: 171997 - RNA, 32 nt, Human
gcccccaggacuaguggagguucucugcccac

SEQ ID NO: 171998 - RNA, 32 nt, Human
gcccccaggauacuaacuagaccuuuggccug

SEQ ID NO: 171999 - RNA, 32 nt, Human
gcccccaggcccucccgcaucucagguugggg

SEQ ID NO: 172000 - RNA, 18 nt, Human
gcccccagggccuucccu

SEQ ID NO: 172001 - RNA, 32 nt, Human
gcccccagggcugagcuguguggugcaggcca

SEQ ID NO: 172002 - RNA, 32 nt, Human
gcccccagggcuggucugagugcagguggggg

SEQ ID NO: 172003 - RNA, 32 nt, Human
gcccccaggguagccauagaaaagcaacucca

SEQ ID NO: 172004 - RNA, 32 nt, Human
gcccccagguaacugggacuacaggcaugcac

SEQ ID NO: 172005 - RNA, 23 nt, Human
gcccccagucucuccccuugccu

SEQ ID NO: 172006 - RNA, 32 nt, Human
gcccccagugccucaccuuccaacacuccauu

SEQ ID NO: 172007 - RNA, 32 nt, Human
gcccccaguguuuuccccacugguuagcauuc

SEQ ID NO: 172008 - RNA, 32 nt, Human
gcccccaguuccacaagauccaaccaagaauu

SEQ ID NO: 172009 - RNA, 32 nt, Human
gcccccaguuuuggaggaaggaggaaauggga

SEQ ID NO: 172010 - RNA, 32 nt, Human
gcccccauaccaggcccuagcucccagacaac

SEQ ID NO: 172011 - RNA, 32 nt, Human
gcccccauauugcguggcaaaggggcuaggua

SEQ ID NO: 172012 - RNA, 23 nt, Human
gcccccaucaagcagagcuaggg

SEQ ID NO: 172013 - RNA, 24 nt, Human
gcccccaucaauacaaccagcucc

SEQ ID NO: 172014 - RNA, 21 nt, Human
gcccccaucacccucguuucc

SEQ ID NO: 172015 - RNA, 23 nt, Human
gcccccaucaccucaggcuucuc

SEQ ID NO: 172016 - RNA, 24 nt, Human
gcccccaucaccucuacugucucc

SEQ ID NO: 172017 - RNA, 32 nt, Human
gcccccaucaucacgauggagucagcuucagg

SEQ ID NO: 172018 - RNA, 32 nt, Human
gcccccauccaccuccucgcugcgacccucuc

SEQ ID NO: 172019 - RNA, 22 nt, Human
gcccccaucccagucccgggag

SEQ ID NO: 172020 - RNA, 27 nt, Human
gcccccauccccagcacuguguguugg

SEQ ID NO: 172021 - RNA, 23 nt, Human
gcccccauccccuuguuuucugg

SEQ ID NO: 172022 - RNA, 23 nt, Human
gcccccaucccucccagugcugg

SEQ ID NO: 172023 - RNA, 19 nt, Human
gcccccauccucgcauggc

SEQ ID NO: 172024 - RNA, 16 nt, Human
gcccccaucugcugcc

SEQ ID NO: 172025 - RNA, 19 nt, Human
gcccccaucuuggggguca

SEQ ID NO: 172026 - RNA, 32 nt, Human
gcccccaucuuuccuccaaacuccugccugug

SEQ ID NO: 172027 - RNA, 32 nt, Human
gcccccaugauucaauuaccuaccacaacacc

SEQ ID NO: 172028 - RNA, 20 nt, Human
gcccccaugcagccgccaca

SEQ ID NO: 172029 - RNA, 32 nt, Human
gcccccaugccaccuccaugacucuacucucc

SEQ ID NO: 172030 - RNA, 20 nt, Human
gcccccaugcccccacccca

SEQ ID NO: 172031 - RNA, 32 nt, Human
gcccccaugccccugcccaacaugcugggggu

SEQ ID NO: 172032 - RNA, 31 nt, Human
gcccccaugccggcggccaacaugauggaga

SEQ ID NO: 172033 - RNA, 32 nt, Human
gcccccaugccuggcccugccugagccaggug

SEQ ID NO: 172034 - RNA, 32 nt, Human
gcccccauguucugcuuuccuccacugugccu

SEQ ID NO: 172035 - RNA, 32 nt, Human
gcccccauucacguugguccucagggaaacca

SEQ ID NO: 172036 - RNA, 32 nt, Human
gcccccauuccacagacacuggagucuucacu

SEQ ID NO: 172037 - RNA, 19 nt, Human
gcccccauugcagccccca

SEQ ID NO: 172038 - RNA, 17 nt, Human
gcccccauuucugcugc

SEQ ID NO: 172039 - RNA, 22 nt, Human
gcccccauuugagaaccacugg

SEQ ID NO: 172040 - RNA, 32 nt, Human
gcccccauuuucacccgauccugggcucuccc

SEQ ID NO: 172041 - RNA, 23 nt, Human
gccccccaacccccgaccugggg

SEQ ID NO: 172042 - RNA, 17 nt, Human
gccccccacacuucccu

SEQ ID NO: 172043 - RNA, 18 nt, Human
gccccccaccaaccacca

SEQ ID NO: 172044 - RNA, 21 nt, Human
gccccccagcccaggcccagc

SEQ ID NO: 172045 - RNA, 23 nt, Human
gccccccagcccaguuacugcag

SEQ ID NO: 172046 - RNA, 24 nt, Human
gccccccagccccacagccugagc

SEQ ID NO: 172047 - RNA, 20 nt, Human
gccccccagccccgcgcagc

SEQ ID NO: 172048 - RNA, 24 nt, Human
gccccccagcccuggcuccccagc

SEQ ID NO: 172049 - RNA, 20 nt, Human
gccccccagccuccauggcu

SEQ ID NO: 172050 - RNA, 24 nt, Human
gccccccaggagagcugggcacau

SEQ ID NO: 172051 - RNA, 16 nt, Human
gccccccaggcugccu

SEQ ID NO: 172052 - RNA, 17 nt, Human
gccccccauccugcuca

SEQ ID NO: 172053 - RNA, 18 nt, Human
gccccccgcucccacccc

SEQ ID NO: 172054 - RNA, 22 nt, Human
gccccccggccgccccgacggg

SEQ ID NO: 172055 - RNA, 22 nt, Human
gccccccucagccccugccucc

SEQ ID NO: 172056 - RNA, 22 nt, Human
gccccccucaucuccacccucc

SEQ ID NO: 172057 - RNA, 20 nt, Human
gccccccucgcccugagcca

SEQ ID NO: 172058 - RNA, 18 nt, Human
gccccccucgccgcgcgu

SEQ ID NO: 172059 - RNA, 20 nt, Human
gccccccucuauccuugaua

SEQ ID NO: 172060 - RNA, 17 nt, Human
gccccccugcugcugcc

SEQ ID NO: 172061 - RNA, 17 nt, Human
gccccccuggcuccagg

SEQ ID NO: 172062 - RNA, 21 nt, Human
gccccccuugugcagagccag

SEQ ID NO: 172063 - RNA, 18 nt, Human
gcccccgacauccugccu

SEQ ID NO: 172064 - RNA, 32 nt, Human
gcccccgaccacacaaacccagccuggggagg

SEQ ID NO: 172065 - RNA, 32 nt, Human
gcccccgaccuggaggcccucagucugggcug

SEQ ID NO: 172066 - RNA, 32 nt, Human
gcccccgagacaccuugaggaggccgcuccuu

SEQ ID NO: 172067 - RNA, 32 nt, Human
gcccccgagcccugacuccuggacuccggagg

SEQ ID NO: 172068 - RNA, 32 nt, Human
gcccccgagcugcucccuuuccugcaccuccc

SEQ ID NO: 172069 - RNA, 32 nt, Human
gcccccgaggaggaggaggaggaggaggacgc

SEQ ID NO: 172070 - RNA, 32 nt, Human
gcccccgcagaacuggcugcugcgugugaacu

SEQ ID NO: 172071 - RNA, 32 nt, Human
gcccccgcaggcuucugugugcugcuaacugu

SEQ ID NO: 172072 - RNA, 21 nt, Human
gcccccgcauccccugccucc

SEQ ID NO: 172073 - RNA, 19 nt, Human
gcccccgccccuccucccg

SEQ ID NO: 172074 - RNA, 19 nt, Human
gcccccgcccgcgcccccu

SEQ ID NO: 172075 - RNA, 21 nt, Human
gcccccgcccugccccaggga

SEQ ID NO: 172076 - RNA, 20 nt, Human
gcccccgcccugucccaagg

SEQ ID NO: 172077 - RNA, 19 nt, Human
gcccccgccgccgcugcca

SEQ ID NO: 172078 - RNA, 32 nt, Human
gcccccgccgcugcucagaccuccaggaggga

SEQ ID NO: 172079 - RNA, 21 nt, Human
gcccccgccggccgaggcugg

SEQ ID NO: 172080 - RNA, 32 nt, Human
gcccccgccggccuggccaggacugagugcag

SEQ ID NO: 172081 - RNA, 32 nt, Human
gcccccgccguggagccgugugguguaugugu

SEQ ID NO: 172082 - RNA, 32 nt, Human
gcccccgccuccuuccccuccucggccauggc

SEQ ID NO: 172083 - RNA, 22 nt, Human
gcccccgccuggccccaaccuc

SEQ ID NO: 172084 - RNA, 20 nt, Human
gcccccgcgaugcccugggg

SEQ ID NO: 172085 - RNA, 27 nt, Human
gcccccgcgcaggcgcgccccacgccc

SEQ ID NO: 172086 - RNA, 17 nt, Human
gcccccgcgccgcgccc

SEQ ID NO: 172087 - RNA, 23 nt, Human
gcccccgcgcuggacuggggcag

SEQ ID NO: 172088 - RNA, 32 nt, Human
gcccccgcggccacuccucacccuccgaccac

SEQ ID NO: 172089 - RNA, 22 nt, Human
gcccccgcggcucccugccagg

SEQ ID NO: 172090 - RNA, 32 nt, Human
gcccccgcuacacuccagccuggucgacagag

SEQ ID NO: 172091 - RNA, 24 nt, Human
gcccccgcugaccuccccaccuca

SEQ ID NO: 172092 - RNA, 32 nt, Human
gcccccgcugacucccacagaaacccaccuac

SEQ ID NO: 172093 - RNA, 19 nt, Human
gcccccggagcccccgcgg

SEQ ID NO: 172094 - RNA, 32 nt, Human
gcccccggauacugcagucguaucuccggaaa

SEQ ID NO: 172095 - RNA, 32 nt, Human
gcccccggcaggcaagguucugcugggagacg

SEQ ID NO: 172096 - RNA, 25 nt, Human
gcccccggcagucucuggggcgcau

SEQ ID NO: 172097 - RNA, 32 nt, Human
gcccccggcccaggcccuugggguggacaagu

SEQ ID NO: 172098 - RNA, 32 nt, Human
gcccccggcccggccacugcaggaugcccacc

SEQ ID NO: 172099 - RNA, 32 nt, Human
gcccccggcugcagcccaggccauggacaugu

SEQ ID NO: 172100 - RNA, 21 nt, Human
gcccccggcuuggggcgccuu

SEQ ID NO: 172101 - RNA, 32 nt, Human
gcccccgggaccccaccucuggccccaccucc

SEQ ID NO: 172102 - RNA, 32 nt, Human
gcccccgggcaguucuggugaggcuaagcaag

SEQ ID NO: 172103 - RNA, 20 nt, Human
gcccccgggggcggggcacg

SEQ ID NO: 172104 - RNA, 32 nt, Human
gcccccguaagaacccacgaagcaggcgaagu

SEQ ID NO: 172105 - RNA, 26 nt, Human
gcccccguagucccagcuacucagga

SEQ ID NO: 172106 - RNA, 16 nt, Human
gcccccgucugcugcu

SEQ ID NO: 172107 - RNA, 32 nt, Human
gcccccguggagucugcagagaggccuuggcc

SEQ ID NO: 172108 - RNA, 17 nt, Human
gcccccguguccaggug

SEQ ID NO: 172109 - RNA, 20 nt, Human
gcccccguucccguccaggu

SEQ ID NO: 172110 - RNA, 32 nt, Human
gcccccguugugcccagcauugcccgggugag

SEQ ID NO: 172111 - RNA, 32 nt, Human
gcccccuaauccccuucuccccugcacuguaa

SEQ ID NO: 172112 - RNA, 18 nt, Human
gcccccuaccacuccacg

SEQ ID NO: 172113 - RNA, 32 nt, Human
gcccccuagagugcagagaugccugggucugc

SEQ ID NO: 172114 - RNA, 21 nt, Human
gcccccuaggaagcaccagcc

SEQ ID NO: 172115 - RNA, 32 nt, Human
gcccccuaguagcuggcauuacaggcacaugc

SEQ ID NO: 172116 - RNA, 32 nt, Human
gcccccucacccuccucccucucccuccuccu

SEQ ID NO: 172117 - RNA, 32 nt, Human
gcccccucaccuuuuuggguagguaaaagacu

SEQ ID NO: 172118 - RNA, 32 nt, Human
gcccccucacgccugccuuccugggccagcuu

SEQ ID NO: 172119 - RNA, 32 nt, Human
gcccccucacuaauagcggccaccccggcagc

SEQ ID NO: 172120 - RNA, 32 nt, Human
gcccccucaggcaccuuuccuccccuggacac

SEQ ID NO: 172121 - RNA, 32 nt, Human
gcccccucaguaacacgggcucugcugacggc

SEQ ID NO: 172122 - RNA, 32 nt, Human
gcccccucaguguugucaccagaucugauuug

SEQ ID NO: 172123 - RNA, 32 nt, Human
gcccccuccaccgcgccugccucccaggccug

SEQ ID NO: 172124 - RNA, 31 nt, Human
gcccccuccacuccggggccugugccgccag

SEQ ID NO: 172125 - RNA, 22 nt, Human
gcccccuccacuggaggggucu

SEQ ID NO: 172126 - RNA, 32 nt, Human
gcccccuccagcccccggcucccggcagcaga

SEQ ID NO: 172127 - RNA, 32 nt, Human
gcccccuccagcucaugacacuguuuggccuu

SEQ ID NO: 172128 - RNA, 32 nt, Human
gcccccucccaaacugugacugguauuuauug

SEQ ID NO: 172129 - RNA, 32 nt, Human
gcccccucccauccauagugcauggugugugg

SEQ ID NO: 172130 - RNA, 22 nt, Human
gcccccucccccagcacggcuu

SEQ ID NO: 172131 - RNA, 19 nt, Human
gcccccuccccuugcccuu

SEQ ID NO: 172132 - RNA, 32 nt, Human
gcccccucccucucccuugagaagcugagucu

SEQ ID NO: 172133 - RNA, 32 nt, Human
gcccccucccuggaugacauuaaagaaggguu

SEQ ID NO: 172134 - RNA, 18 nt, Human
gcccccucccuguccagg

SEQ ID NO: 172135 - RNA, 32 nt, Human
gcccccuccucagcugccuccuccaggcaucu

SEQ ID NO: 172136 - RNA, 19 nt, Human
gcccccuccucagucucca

SEQ ID NO: 172137 - RNA, 32 nt, Human
gcccccuccuccaggaaggcaaccccugugcc

SEQ ID NO: 172138 - RNA, 19 nt, Human
gcccccuccucccccggga

SEQ ID NO: 172139 - RNA, 32 nt, Human
gcccccuccuccccucucuccugggcccucau

SEQ ID NO: 172140 - RNA, 32 nt, Human
gcccccuccuucaagcccugagaucuucagga

SEQ ID NO: 172141 - RNA, 32 nt, Human
gcccccuccuucaggcucucucacugucuaaa

SEQ ID NO: 172142 - RNA, 32 nt, Human
gcccccuccuucaguugcccuuucugaggcaa

SEQ ID NO: 172143 - RNA, 24 nt, Human
gcccccucgccuucccuguuccca

SEQ ID NO: 172144 - RNA, 32 nt, Human
gcccccucggcccucugguccggccagcuccg

SEQ ID NO: 172145 - RNA, 32 nt, Human
gcccccucuccuccuuggcacuggcggccucc

SEQ ID NO: 172146 - RNA, 32 nt, Human
gcccccucuccucgcguaguccggcccgagcc

SEQ ID NO: 172147 - RNA, 25 nt, Human
gcccccucuccuucuccuagcucug

SEQ ID NO: 172148 - RNA, 32 nt, Human
gcccccucucuccuggcugcaguccuuggcgc

SEQ ID NO: 172149 - RNA, 32 nt, Human
gcccccucugacagccauccuccugggagccc

SEQ ID NO: 172150 - RNA, 32 nt, Human
gcccccucugcaggcucucugucugcccuggg

SEQ ID NO: 172151 - RNA, 22 nt, Human
gcccccucugccacacgcuuug

SEQ ID NO: 172152 - RNA, 19 nt, Human
gcccccucuguccuucccu

SEQ ID NO: 172153 - RNA, 32 nt, Human
gcccccucuucaacuccucucacuuuuuaaag

SEQ ID NO: 172154 - RNA, 32 nt, Human
gcccccucuuccuaugcagcuuuaaugucccc

SEQ ID NO: 172155 - RNA, 28 nt, Human
gcccccugaccuuccaaaccucaauaaa

SEQ ID NO: 172156 - RNA, 32 nt, Human
gcccccugacgcugcugauucgggcuguggcc

SEQ ID NO: 172157 - RNA, 31 nt, Human
gcccccugacuucuggcuggccagaggcugc

SEQ ID NO: 172158 - RNA, 32 nt, Human
gcccccugagagugaauucaaaguuaacuuca

SEQ ID NO: 172159 - RNA, 32 nt, Human
gcccccugaggguuugcucuccucucaagguu

SEQ ID NO: 172160 - RNA, 32 nt, Human
gcccccugcacccugcucucucccgggccuug

SEQ ID NO: 172161 - RNA, 32 nt, Human
gcccccugcccaggcuggguaagagaugggcu

SEQ ID NO: 172162 - RNA, 32 nt, Human
gcccccugccccagggcucuucagaaagcauc

SEQ ID NO: 172163 - RNA, 18 nt, Human
gcccccugcccccacccc

SEQ ID NO: 172164 - RNA, 32 nt, Human
gcccccugcccgaggggcggggcugacggcuc

SEQ ID NO: 172165 - RNA, 32 nt, Human
gcccccugcccuccucucccucccagauggac

SEQ ID NO: 172166 - RNA, 32 nt, Human
gcccccugcccugagaacaggaaagggcccgg

SEQ ID NO: 172167 - RNA, 22 nt, Human
gcccccugcccugcccaccuca

SEQ ID NO: 172168 - RNA, 32 nt, Human
gcccccugccuucucugcuccccaucauguag

SEQ ID NO: 172169 - RNA, 32 nt, Human
gcccccugcuaccacacacugcugcaucuugg

SEQ ID NO: 172170 - RNA, 32 nt, Human
gcccccugcucugcugcucugccuguccgccu

SEQ ID NO: 172171 - RNA, 16 nt, Human
gcccccugcugcugcc

SEQ ID NO: 172172 - RNA, 32 nt, Human
gcccccugcuggacucaggugcccagaacucu

SEQ ID NO: 172173 - RNA, 32 nt, Human
gcccccuggacucgcaggcgagcccaggacuc

SEQ ID NO: 172174 - RNA, 32 nt, Human
gcccccuggagcuccuccuagagcagagucug

SEQ ID NO: 172175 - RNA, 32 nt, Human
gcccccuggaggcagagcacugagcuggaccc

SEQ ID NO: 172176 - RNA, 32 nt, Human
gcccccuggggaaacguggcagcagguggccc

SEQ ID NO: 172177 - RNA, 32 nt, Human
gcccccuggggcccugccccacagcaucauga

SEQ ID NO: 172178 - RNA, 32 nt, Human
gcccccuggggccugggcugcugcugguucuu

SEQ ID NO: 172179 - RNA, 32 nt, Human
gcccccugggucccaagcaaccucagccaaug

SEQ ID NO: 172180 - RNA, 32 nt, Human
gcccccugggucccaagcaaccucagccagug

SEQ ID NO: 172181 - RNA, 24 nt, Human
gcccccugguccugaccugugaug

SEQ ID NO: 172182 - RNA, 32 nt, Human
gcccccugugcuguuugaggcgugaaacucac

SEQ ID NO: 172183 - RNA, 32 nt, Human
gcccccuguuccuggguuuaugcaguuuucuu

SEQ ID NO: 172184 - RNA, 32 nt, Human
gcccccuucauugcaccuaucucccccaucuc

SEQ ID NO: 172185 - RNA, 32 nt, Human
gcccccuuccucaccucuuccaccccucagac

SEQ ID NO: 172186 - RNA, 32 nt, Human
gcccccuuccuccaaagucccugccacaggag

SEQ ID NO: 172187 - RNA, 17 nt, Human
gcccccuuccugccaga

SEQ ID NO: 172188 - RNA, 32 nt, Human
gcccccuuccuugcucuggaccccuuagguau

SEQ ID NO: 172189 - RNA, 22 nt, Human
gcccccuucuaggacaacccca

SEQ ID NO: 172190 - RNA, 32 nt, Human
gcccccuucuaucuccccuucuguccagggcc

SEQ ID NO: 172191 - RNA, 32 nt, Human
gcccccuucucccacacugcuaggugggccag

SEQ ID NO: 172192 - RNA, 32 nt, Human
gcccccuucuccuccuuucccuucccuuacuu

SEQ ID NO: 172193 - RNA, 32 nt, Human
gcccccuucucuuuucacauacagucacauug

SEQ ID NO: 172194 - RNA, 18 nt, Human
gcccccuucuuccagaug

SEQ ID NO: 172195 - RNA, 32 nt, Human
gcccccuugccuguaaaacaccugggaaguuc

SEQ ID NO: 172196 - RNA, 16 nt, Human
gcccccuuucugcucc

SEQ ID NO: 172197 - RNA, 32 nt, Human
gcccccuuugggcccagggacaccagccaggc

SEQ ID NO: 172198 - RNA, 32 nt, Human
gccccgaagagggagacagagaugugccagag

SEQ ID NO: 172199 - RNA, 32 nt, Human
gccccgaagccagcucaguaccugaggggcug

SEQ ID NO: 172200 - RNA, 21 nt, Human
gccccgaaggcugagagcugg

SEQ ID NO: 172201 - RNA, 18 nt, Human
gccccgaagguccugccu

SEQ ID NO: 172202 - RNA, 32 nt, Human
gccccgacagccagggcuaacaagacgguuaa

SEQ ID NO: 172203 - RNA, 32 nt, Human
gccccgacauuccagucucgaccccgagcccc

SEQ ID NO: 172204 - RNA, 23 nt, Human
gccccgaccacacaugagcuggg

SEQ ID NO: 172205 - RNA, 22 nt, Human
gccccgaccccagcucuggugg

SEQ ID NO: 172206 - RNA, 23 nt, Human
gccccgacccugcuccgcgaucg

SEQ ID NO: 172207 - RNA, 32 nt, Human
gccccgacucacaaauccaaguucuuaaaaca

SEQ ID NO: 172208 - RNA, 32 nt, Human
gccccgagacaacauggccuccuugauccaac

SEQ ID NO: 172209 - RNA, 22 nt, Human
gccccgagacgacagcccggcg

SEQ ID NO: 172210 - RNA, 18 nt, Human
gccccgagccccgcgccc

SEQ ID NO: 172211 - RNA, 19 nt, Human
gccccgagcgccuucuccc

SEQ ID NO: 172212 - RNA, 32 nt, Human
gccccgaggaggaggaggaggaggaggaagag

SEQ ID NO: 172213 - RNA, 23 nt, Human
gccccgaggccgcgugcgugaga

SEQ ID NO: 172214 - RNA, 32 nt, Human
gccccgagggccuggaucggagcugcuagauc

SEQ ID NO: 172215 - RNA, 19 nt, Human
gccccgaguggcaggccag

SEQ ID NO: 172216 - RNA, 32 nt, Human
gccccgauuaggcugcuagcaaaggaaaggac

SEQ ID NO: 172217 - RNA, 32 nt, Human
gccccgcagagcccuggacucuggcauuggag

SEQ ID NO: 172218 - RNA, 32 nt, Human
gccccgcagccugggccugugcucggcgccau

SEQ ID NO: 172219 - RNA, 32 nt, Human
gccccgcagcugcccccacuuccuuugagacc

SEQ ID NO: 172220 - RNA, 32 nt, Human
gccccgcaggaggcagaugcagucccaggcau

SEQ ID NO: 172221 - RNA, 32 nt, Human
gccccgcaggcagacguggcugugggccgagc

SEQ ID NO: 172222 - RNA, 32 nt, Human
gccccgccacugcccauggccaggaggcccca

SEQ ID NO: 172223 - RNA, 32 nt, Human
gccccgccagccccagcccugcagccuugggc

SEQ ID NO: 172224 - RNA, 18 nt, Human
gccccgccagccugggca

SEQ ID NO: 172225 - RNA, 24 nt, Human
gccccgcccacagugcccggcucc

SEQ ID NO: 172226 - RNA, 32 nt, Human
gccccgcccacccucgucgacgugauucccgc

SEQ ID NO: 172227 - RNA, 23 nt, Human
gccccgcccaccgagccccgccc

SEQ ID NO: 172228 - RNA, 23 nt, Human
gccccgcccacucucccaccccu

SEQ ID NO: 172229 - RNA, 21 nt, Human
gccccgcccacuuccagggug

SEQ ID NO: 172230 - RNA, 23 nt, Human
gccccgcccacuuucccaccucc

SEQ ID NO: 172231 - RNA, 32 nt, Human
gccccgcccagcugcaccugccagccuggcuu

SEQ ID NO: 172232 - RNA, 22 nt, Human
gccccgcccccaggcccagcgg

SEQ ID NO: 172233 - RNA, 21 nt, Human
gccccgccccccagagccagg

SEQ ID NO: 172234 - RNA, 22 nt, Human
gccccgcccccgcccccgcucc

SEQ ID NO: 172235 - RNA, 25 nt, Human
gccccgcccccgccccuccccgccc

SEQ ID NO: 172236 - RNA, 19 nt, Human
gccccgcccccgccuugca

SEQ ID NO: 172237 - RNA, 23 nt, Human
gccccgcccccggcgcccgcucc

SEQ ID NO: 172238 - RNA, 32 nt, Human
gccccgcccccuacucauggcuggcagauucg

SEQ ID NO: 172239 - RNA, 21 nt, Human
gccccgcccccucccugcucc

SEQ ID NO: 172240 - RNA, 22 nt, Human
gccccgcccccuccucugcucc

SEQ ID NO: 172241 - RNA, 32 nt, Human
gccccgccccgauucaccgcucaggcccaagc

SEQ ID NO: 172242 - RNA, 20 nt, Human
gccccgccccgccccgcccc

SEQ ID NO: 172243 - RNA, 21 nt, Human
gccccgccccgccccgcccgc

SEQ ID NO: 172244 - RNA, 21 nt, Human
gccccgccccggccccgcccc

SEQ ID NO: 172245 - RNA, 32 nt, Human
gccccgccccuccacaggacccuggaccaggg

SEQ ID NO: 172246 - RNA, 20 nt, Human
gccccgccccugcugagcca

SEQ ID NO: 172247 - RNA, 22 nt, Human
gccccgcccgaccaggaggccc

SEQ ID NO: 172248 - RNA, 21 nt, Human
gccccgcccgcagcucccucc

SEQ ID NO: 172249 - RNA, 32 nt, Human
gccccgcccgucgccucaggugccauuuggau

SEQ ID NO: 172250 - RNA, 23 nt, Human
gccccgcccgucggccucgcucc

SEQ ID NO: 172251 - RNA, 22 nt, Human
gccccgcccuccccccaccucc

SEQ ID NO: 172252 - RNA, 21 nt, Human
gccccgcccucgccccgcccc

SEQ ID NO: 172253 - RNA, 32 nt, Human
gccccgcccucuuuuguccucuucccagguuc

SEQ ID NO: 172254 - RNA, 32 nt, Human
gccccgccgaaccgaggccacccggagccgug

SEQ ID NO: 172255 - RNA, 20 nt, Human
gccccgccgcccccacccca

SEQ ID NO: 172256 - RNA, 19 nt, Human
gccccgccgccgccgccgc

SEQ ID NO: 172257 - RNA, 24 nt, Human
gccccgccgcgcgccccuccgccc

SEQ ID NO: 172258 - RNA, 32 nt, Human
gccccgccgcugcggaagagguuucuagagag

SEQ ID NO: 172259 - RNA, 23 nt, Human
gccccgccgucucccugccgcag

SEQ ID NO: 172260 - RNA, 32 nt, Human
gccccgccucaccccggcuccugggccccagc

SEQ ID NO: 172261 - RNA, 32 nt, Human
gccccgccuccaggccacauggggcugggcag

SEQ ID NO: 172262 - RNA, 22 nt, Human
gccccgccucccacccccaccc

SEQ ID NO: 172263 - RNA, 32 nt, Human
gccccgccuccgccccagaggggcgaggaucc

SEQ ID NO: 172264 - RNA, 21 nt, Human
gccccgccuccgccggcucug

SEQ ID NO: 172265 - RNA, 32 nt, Human
gccccgccucuccaaaaagcuacaccgacgcg

SEQ ID NO: 172266 - RNA, 25 nt, Human
gccccgccugccugccacccugccc

SEQ ID NO: 172267 - RNA, 32 nt, Human
gccccgccugcucuuuccucccauggggccgc

SEQ ID NO: 172268 - RNA, 32 nt, Human
gccccgccugggagccgcgggcaggcgagacu

SEQ ID NO: 172269 - RNA, 32 nt, Human
gccccgccuuugccuacucccugcugccccca

SEQ ID NO: 172270 - RNA, 32 nt, Human
gccccgcgagcuaggaugaggggccaggccgc

SEQ ID NO: 172271 - RNA, 22 nt, Human
gccccgcgcccgugcgcgcgcu

SEQ ID NO: 172272 - RNA, 23 nt, Human
gccccgcgcccucccugccgggg

SEQ ID NO: 172273 - RNA, 21 nt, Human
gccccgcgccgccgccgccgc

SEQ ID NO: 172274 - RNA, 23 nt, Human
gccccgcgccgccgccgccgccg

SEQ ID NO: 172275 - RNA, 32 nt, Human
gccccgcgcucugccgccccucaggcccgcac

SEQ ID NO: 172276 - RNA, 20 nt, Human
gccccgcggagcccccgccc

SEQ ID NO: 172277 - RNA, 24 nt, Human
gccccgcguccggccccuccgccc

SEQ ID NO: 172278 - RNA, 24 nt, Human
gccccgcucagccuugcagccccg

SEQ ID NO: 172279 - RNA, 18 nt, Human
gccccgcucagcgcgggg

SEQ ID NO: 172280 - RNA, 32 nt, Human
gccccgcucccagaucucuauccuuuugggac

SEQ ID NO: 172281 - RNA, 20 nt, Human
gccccgcuccccccaccagg

SEQ ID NO: 172282 - RNA, 22 nt, Human
gccccgcuccgcgccccgggca

SEQ ID NO: 172283 - RNA, 19 nt, Human
gccccgcucgcccgugccg

SEQ ID NO: 172284 - RNA, 32 nt, Human
gccccgcucucuuccccucuuucuguccccca

SEQ ID NO: 172285 - RNA, 32 nt, Human
gccccgcucugccugcuccgaucuuucacuuc

SEQ ID NO: 172286 - RNA, 32 nt, Human
gccccgcucuucccuggcugggcuggcggagg

SEQ ID NO: 172287 - RNA, 32 nt, Human
gccccgcugaagaacucgccuccugggaccca

SEQ ID NO: 172288 - RNA, 32 nt, Human
gccccgcugcagcuguguguccuucuccaucu

SEQ ID NO: 172289 - RNA, 32 nt, Human
gccccgcugcccucucuggcucaggggaaagu

SEQ ID NO: 172290 - RNA, 32 nt, Human
gccccgcugccugcccugcuccaggcuccacc

SEQ ID NO: 172291 - RNA, 32 nt, Human
gccccgcugccuggcacugguccuuugcagcc

SEQ ID NO: 172292 - RNA, 32 nt, Human
gccccgcugccuguccccuuggacucaacuua

SEQ ID NO: 172293 - RNA, 32 nt, Human
gccccgcuggagaggcaccaugggcguggagg

SEQ ID NO: 172294 - RNA, 32 nt, Human
gccccgcuggaggcgaccgaggagaacuucuu

SEQ ID NO: 172295 - RNA, 32 nt, Human
gccccgcuggugcacugagagccacccugugg

SEQ ID NO: 172296 - RNA, 32 nt, Human
gccccgcuguccccaucuagccucuuccuggg

SEQ ID NO: 172297 - RNA, 23 nt, Human
gccccgcugugccugccccaggg

SEQ ID NO: 172298 - RNA, 32 nt, Human
gccccgcuuccucuggaucucucuaggagcug

SEQ ID NO: 172299 - RNA, 32 nt, Human
gccccgcuuugggcccccuccugugaccucag

SEQ ID NO: 172300 - RNA, 19 nt, Human
gccccggaacccgagcugg

SEQ ID NO: 172301 - RNA, 22 nt, Human
gccccggacaccagagaguuuc

SEQ ID NO: 172302 - RNA, 32 nt, Human
gccccggacccagccacacuaggagagaaacc

SEQ ID NO: 172303 - RNA, 32 nt, Human
gccccggacccccaguuccuggguugaacgac

SEQ ID NO: 172304 - RNA, 32 nt, Human
gccccggagaaacugagguauggccaugcccu

SEQ ID NO: 172305 - RNA, 32 nt, Human
gccccggagaagcaggcagcgcagugacagcu

SEQ ID NO: 172306 - RNA, 23 nt, Human
gccccggagagggagaggcgggg

SEQ ID NO: 172307 - RNA, 32 nt, Human
gccccggagagggagaggcggggucggcugua

SEQ ID NO: 172308 - RNA, 32 nt, Human
gccccggagcccggucgcaggagcgcgggccc

SEQ ID NO: 172309 - RNA, 22 nt, Human
gccccggagccgcggcgggaga

SEQ ID NO: 172310 - RNA, 32 nt, Human
gccccggagccugugcagcuugcccauggccc

SEQ ID NO: 172311 - RNA, 32 nt, Human
gccccggagggugggaggagguugcaguauuc

SEQ ID NO: 172312 - RNA, 32 nt, Human
gccccggagguagagguugcagugagcugaga

SEQ ID NO: 172313 - RNA, 32 nt, Human
gccccggauggaucucagagaugaggaucgga

SEQ ID NO: 172314 - RNA, 24 nt, Human
gccccggccaacguccacgccgcc

SEQ ID NO: 172315 - RNA, 18 nt, Human
gccccggccacccaggga

SEQ ID NO: 172316 - RNA, 26 nt, Human
gccccggccacuccaucaggcacuga

SEQ ID NO: 172317 - RNA, 32 nt, Human
gccccggcccagguccccuugugguguugcca

SEQ ID NO: 172318 - RNA, 22 nt, Human
gccccggcccccgcccgcagug

SEQ ID NO: 172319 - RNA, 18 nt, Human
gccccggccgccccagcg

SEQ ID NO: 172320 - RNA, 23 nt, Human
gccccggccggccacccccgggg

SEQ ID NO: 172321 - RNA, 22 nt, Human
gccccggccggccgggcgggga

SEQ ID NO: 172322 - RNA, 32 nt, Human
gccccggccuagaagcucucucuccccgcucc

SEQ ID NO: 172323 - RNA, 32 nt, Human
gccccggccucauccuccucagcggcaggcca

SEQ ID NO: 172324 - RNA, 21 nt, Human
gccccggccuccaccgccgca

SEQ ID NO: 172325 - RNA, 25 nt, Human
gccccggccuccugaguaccuggga

SEQ ID NO: 172326 - RNA, 19 nt, Human
gccccggcgcgcccgcgcg

SEQ ID NO: 172327 - RNA, 23 nt, Human
gccccggcggggaggagcgggug

SEQ ID NO: 172328 - RNA, 32 nt, Human
gccccggcucuauucugggcugcgggccuggg

SEQ ID NO: 172329 - RNA, 32 nt, Human
gccccggcugcacucuagccgccugggugugu

SEQ ID NO: 172330 - RNA, 32 nt, Human
gccccggcugugucuacuccaggccaagccug

SEQ ID NO: 172331 - RNA, 32 nt, Human
gccccgggaacagcagaggcggcggcacuggc

SEQ ID NO: 172332 - RNA, 23 nt, Human
gccccgggaagaaaaggcugagg

SEQ ID NO: 172333 - RNA, 32 nt, Human
gccccgggaaggcgaccccugcccucagugcu

SEQ ID NO: 172334 - RNA, 25 nt, Human
gccccgggacccagcagagcugggg

SEQ ID NO: 172335 - RNA, 32 nt, Human
gccccgggacccugccugccucccucuggagc

SEQ ID NO: 172336 - RNA, 32 nt, Human
gccccgggaccugggcugggaacccgcggugg

SEQ ID NO: 172337 - RNA, 21 nt, Human
gccccgggacgcaagcgcugg

SEQ ID NO: 172338 - RNA, 22 nt, Human
gccccgggacggggaggugggg

SEQ ID NO: 172339 - RNA, 19 nt, Human
gccccgggacugcaccugg

SEQ ID NO: 172340 - RNA, 32 nt, Human
gccccgggacuugccugucguugcugguggcg

SEQ ID NO: 172341 - RNA, 20 nt, Human
gccccgggagaaaaguuggg

SEQ ID NO: 172342 - RNA, 32 nt, Human
gccccgggagagaggagcgaagauccggaacu

SEQ ID NO: 172343 - RNA, 23 nt, Human
gccccgggagcggagagcgaggg

SEQ ID NO: 172344 - RNA, 32 nt, Human
gccccgggagggcuggccaggccacucccugc

SEQ ID NO: 172345 - RNA, 32 nt, Human
gccccgggcaaccggccagggucgggcacagg

SEQ ID NO: 172346 - RNA, 32 nt, Human
gccccgggcacugccucacagccaaggcugga

SEQ ID NO: 172347 - RNA, 21 nt, Human
gccccgggccaggccccagca

SEQ ID NO: 172348 - RNA, 21 nt, Human
gccccgggccgggccgggcca

SEQ ID NO: 172349 - RNA, 32 nt, Human
gccccgggccugcagaacaucuguccccaagc

SEQ ID NO: 172350 - RNA, 18 nt, Human
gccccgggcgcccgcugg

SEQ ID NO: 172351 - RNA, 32 nt, Human
gccccgggcgcugaagccgggcgggcgaugcc

SEQ ID NO: 172352 - RNA, 32 nt, Human
gccccgggcggcggucgccaggucucagggcc

SEQ ID NO: 172353 - RNA, 23 nt, Human
gccccggggaagaagagacaggg

SEQ ID NO: 172354 - RNA, 32 nt, Human
gccccggggagcuccaggagagaggggagccc

SEQ ID NO: 172355 - RNA, 32 nt, Human
gccccggggaggcaggcuggcagguggacagg

SEQ ID NO: 172356 - RNA, 21 nt, Human
gccccggggagggcaaguaca

SEQ ID NO: 172357 - RNA, 18 nt, Human
gccccggggcgcucgcuc

SEQ ID NO: 172358 - RNA, 32 nt, Human
gccccggggcugggaacgccugugccuuccug

SEQ ID NO: 172359 - RNA, 32 nt, Human
gccccggggcuggggugcaacagacucuuaac

SEQ ID NO: 172360 - RNA, 32 nt, Human
gccccgggggcugagguugcugugagccgaga

SEQ ID NO: 172361 - RNA, 32 nt, Human
gccccggguccgccccagaggaguccacacag

SEQ ID NO: 172362 - RNA, 32 nt, Human
gccccgggucuccagcccccuccaucuccccu

SEQ ID NO: 172363 - RNA, 24 nt, Human
gccccgggucuggcagaacucggg

SEQ ID NO: 172364 - RNA, 32 nt, Human
gccccgggugccaaggaaaucccuuuuagccu

SEQ ID NO: 172365 - RNA, 32 nt, Human
gccccggguggugggagugaucagaagaaccu

SEQ ID NO: 172366 - RNA, 32 nt, Human
gccccggguucccaggccaccuccucuguucu

SEQ ID NO: 172367 - RNA, 32 nt, Human
gccccgguaggacacccagcugugcaucccgc

SEQ ID NO: 172368 - RNA, 18 nt, Human
gccccgguccccacgccu

SEQ ID NO: 172369 - RNA, 32 nt, Human
gccccgguccggcgcaggcagcgcggcgggca

SEQ ID NO: 172370 - RNA, 23 nt, Human
gccccggucucagaacagagcug

SEQ ID NO: 172371 - RNA, 32 nt, Human
gccccggugcagcccuggcgggaccgcagcaa

SEQ ID NO: 172372 - RNA, 22 nt, Human
gccccggugcauugugccacca

SEQ ID NO: 172373 - RNA, 23 nt, Human
gccccggugcccggcucccagca

SEQ ID NO: 172374 - RNA, 22 nt, Human
gccccggugcggccgagcuggg

SEQ ID NO: 172375 - RNA, 22 nt, Human
gccccggugcuggagccaggca

SEQ ID NO: 172376 - RNA, 20 nt, Human
gccccgguggcuccaccgca

SEQ ID NO: 172377 - RNA, 20 nt, Human
gccccggugucggacacaca

SEQ ID NO: 172378 - RNA, 32 nt, Human
gccccgguugcccucgcccccugggccggccu

SEQ ID NO: 172379 - RNA, 32 nt, Human
gccccguagcacaggcggagugcagcggaggc

SEQ ID NO: 172380 - RNA, 32 nt, Human
gccccgucaccucccugcccucccgucauuug

SEQ ID NO: 172381 - RNA, 20 nt, Human
gccccgucagcgugugcugg

SEQ ID NO: 172382 - RNA, 32 nt, Human
gccccgucccagguugcacugcaaccaagugu

SEQ ID NO: 172383 - RNA, 32 nt, Human
gccccguccccaccauccuccucccaagccaa

SEQ ID NO: 172384 - RNA, 32 nt, Human
gccccguccucuuccuuucugcuagccuggcu

SEQ ID NO: 172385 - RNA, 32 nt, Human
gccccguccugccuccgccccgcccccgcuug

SEQ ID NO: 172386 - RNA, 32 nt, Human
gccccguccuugagcagauugaccucaucuuu

SEQ ID NO: 172387 - RNA, 32 nt, Human
gccccgucucaagugcuccucuuccuuccaag

SEQ ID NO: 172388 - RNA, 32 nt, Human
gccccgucuccuccucuugcucccucggccgg

SEQ ID NO: 172389 - RNA, 32 nt, Human
gccccgucucuuuugguccuggcuccagaaaa

SEQ ID NO: 172390 - RNA, 32 nt, Human
gccccgugaaggaggcagugaggagcuuuuga

SEQ ID NO: 172391 - RNA, 20 nt, Human
gccccgugcacccgcggccg

SEQ ID NO: 172392 - RNA, 32 nt, Human
gccccgugcgagggcccugcuuguagcuggac

SEQ ID NO: 172393 - RNA, 18 nt, Human
gccccgugcucccguggc

SEQ ID NO: 172394 - RNA, 21 nt, Human
gccccguggacugaagcucuu

SEQ ID NO: 172395 - RNA, 32 nt, Human
gccccgugggucccacccuuuaaggaugcuga

SEQ ID NO: 172396 - RNA, 31 nt, Human
gccccgugggugggggcagggcaugaguucc

SEQ ID NO: 172397 - RNA, 32 nt, Human
gccccguguccacaggaggccaccucggugug

SEQ ID NO: 172398 - RNA, 32 nt, Human
gccccgugucuugcacucucauggccccucca

SEQ ID NO: 172399 - RNA, 22 nt, Human
gccccgugugggccgcggcccg

SEQ ID NO: 172400 - RNA, 22 nt, Human
gccccguguucccuggccugug

SEQ ID NO: 172401 - RNA, 21 nt, Human
gccccguucugcuccgggcca

SEQ ID NO: 172402 - RNA, 32 nt, Human
gccccuaaagccuaccccuugugcacccgcag

SEQ ID NO: 172403 - RNA, 22 nt, Human
gccccuaacggagauuuguuca

SEQ ID NO: 172404 - RNA, 32 nt, Human
gccccuaacucauaaagcaaucaaagaaccau

SEQ ID NO: 172405 - RNA, 21 nt, Human
gccccuacagcccucacugug

SEQ ID NO: 172406 - RNA, 32 nt, Human
gccccuacaggcuggcccugcaauggggcccu

SEQ ID NO: 172407 - RNA, 32 nt, Human
gccccuacaguugcccuggccuuggggccccc

SEQ ID NO: 172408 - RNA, 23 nt, Human
gccccuacauuaugccucugugg

SEQ ID NO: 172409 - RNA, 32 nt, Human
gccccuaccagcuggcugagcccccuggccuc

SEQ ID NO: 172410 - RNA, 32 nt, Human
gccccuaccaugagcauuaaugccauguaaag

SEQ ID NO: 172411 - RNA, 32 nt, Human
gccccuacccaccccuuuuccuucagcugugu

SEQ ID NO: 172412 - RNA, 21 nt, Human
gccccuacccgggcucggcgg

SEQ ID NO: 172413 - RNA, 32 nt, Human
gccccuacccucagaguaucuggaccucagag

SEQ ID NO: 172414 - RNA, 18 nt, Human
gccccuaccggccccccu

SEQ ID NO: 172415 - RNA, 17 nt, Human
gccccuaccugccacca

SEQ ID NO: 172416 - RNA, 21 nt, Human
gccccuacgccugccccggug

SEQ ID NO: 172417 - RNA, 32 nt, Human
gccccuacuguggcugaacauaccuucccccg

SEQ ID NO: 172418 - RNA, 32 nt, Human
gccccuacuugcuuucugcuuccuucugguga

SEQ ID NO: 172419 - RNA, 32 nt, Human
gccccuagagcugaggcuggagaagacaccag

SEQ ID NO: 172420 - RNA, 32 nt, Human
gccccuagagggcugacaacauuuggccucug

SEQ ID NO: 172421 - RNA, 32 nt, Human
gccccuagcacgcgccccagccccagagcagg

SEQ ID NO: 172422 - RNA, 32 nt, Human
gccccuagcccuccgcccagaaacccagcccu

SEQ ID NO: 172423 - RNA, 20 nt, Human
gccccuagccugggccccca

SEQ ID NO: 172424 - RNA, 24 nt, Human
gccccuagcuggccccgucuccca

SEQ ID NO: 172425 - RNA, 31 nt, Human
gccccuaggaucccuguuucuacgggccugg

SEQ ID NO: 172426 - RNA, 32 nt, Human
gccccuagggggagaagccaggacagcagcuu

SEQ ID NO: 172427 - RNA, 25 nt, Human
gccccuaucaugcccuggccugugg

SEQ ID NO: 172428 - RNA, 32 nt, Human
gccccucaacccgguggcauucugggggagga

SEQ ID NO: 172429 - RNA, 32 nt, Human
gccccucacacacuugcuccccaaucccuuca

SEQ ID NO: 172430 - RNA, 28 nt, Human
gccccucacagccucugaccccuccuca

SEQ ID NO: 172431 - RNA, 32 nt, Human
gccccucacccaggccuggcugggcccuggag

SEQ ID NO: 172432 - RNA, 32 nt, Human
gccccucacccugcaucacugaagagcggcgc

SEQ ID NO: 172433 - RNA, 21 nt, Human
gccccucaccuuguccacgua

SEQ ID NO: 172434 - RNA, 32 nt, Human
gccccucacugaucuugcuuuucccuggucuc

SEQ ID NO: 172435 - RNA, 32 nt, Human
gccccucacugcagcugccagcacuuggucag

SEQ ID NO: 172436 - RNA, 32 nt, Human
gccccucacugcaguggauccaguggggcaga

SEQ ID NO: 172437 - RNA, 32 nt, Human
gccccucacuucaggaggggccuggagcaggg

SEQ ID NO: 172438 - RNA, 32 nt, Human
gccccucagagcccugcccugcacccuuguac

SEQ ID NO: 172439 - RNA, 19 nt, Human
gccccucagcccccgcugg

SEQ ID NO: 172440 - RNA, 32 nt, Human
gccccucagccuggccugcucucaccaccucc

SEQ ID NO: 172441 - RNA, 19 nt, Human
gccccucagcugucagcug

SEQ ID NO: 172442 - RNA, 32 nt, Human
gccccucaggacugcuggaaaauaaauccuuu

SEQ ID NO: 172443 - RNA, 32 nt, Human
gccccucaggcagagauggaccaggcggugga

SEQ ID NO: 172444 - RNA, 32 nt, Human
gccccucagggggccagcuggggagauggggg

SEQ ID NO: 172445 - RNA, 23 nt, Human
gccccucagucuccgcacuugca

SEQ ID NO: 172446 - RNA, 32 nt, Human
gccccucaucagccuuuucagcagguuccagu

SEQ ID NO: 172447 - RNA, 18 nt, Human
gccccucaucuccaggug

SEQ ID NO: 172448 - RNA, 32 nt, Human
gccccucaucugcaggcgcucacaaccuaguu

SEQ ID NO: 172449 - RNA, 32 nt, Human
gccccucaugcacagcugagggagaggaagug

SEQ ID NO: 172450 - RNA, 29 nt, Human
gccccucaugccacagugguacucugugu

SEQ ID NO: 172451 - RNA, 32 nt, Human
gccccucaugcugacucagggugggcccugca

SEQ ID NO: 172452 - RNA, 32 nt, Human
gccccuccaacuucaucgacugcccagcccag

SEQ ID NO: 172453 - RNA, 19 nt, Human
gccccuccacaccugugga

SEQ ID NO: 172454 - RNA, 32 nt, Human
gccccuccaccaccucuccaucccagggagcc

SEQ ID NO: 172455 - RNA, 32 nt, Human
gccccuccaccccagccugccugcugccucgg

SEQ ID NO: 172456 - RNA, 32 nt, Human
gccccuccaccgucaacucagguucggccggu

SEQ ID NO: 172457 - RNA, 16 nt, Human
gccccuccacgccugc

SEQ ID NO: 172458 - RNA, 20 nt, Human
gccccuccacucugcccagg

SEQ ID NO: 172459 - RNA, 32 nt, Human
gccccuccacugugcccucugugucagugugu

SEQ ID NO: 172460 - RNA, 32 nt, Human
gccccuccagacagcuuacuuaccucauacgc

SEQ ID NO: 172461 - RNA, 32 nt, Human
gccccuccagcugagcccuugugugagccccg

SEQ ID NO: 172462 - RNA, 19 nt, Human
gccccuccagcuuccuggg

SEQ ID NO: 172463 - RNA, 32 nt, Human
gccccuccagcuuguggagccccacacugggg

SEQ ID NO: 172464 - RNA, 32 nt, Human
gccccuccagugccaggggcacgugcugugag

SEQ ID NO: 172465 - RNA, 32 nt, Human
gccccuccaucuuugucagcccccuguuucuc

SEQ ID NO: 172466 - RNA, 32 nt, Human
gccccuccaugccugcuuggugcagugcucuc

SEQ ID NO: 172467 - RNA, 32 nt, Human
gccccucccaacacccccagccccacgaccau

SEQ ID NO: 172468 - RNA, 32 nt, Human
gccccucccaccacccuccaccuagagcucac

SEQ ID NO: 172469 - RNA, 23 nt, Human
gccccucccagccacaccugccc

SEQ ID NO: 172470 - RNA, 24 nt, Human
gccccucccagccaccuccuccca

SEQ ID NO: 172471 - RNA, 17 nt, Human
gccccucccagccucuc

SEQ ID NO: 172472 - RNA, 23 nt, Human
gccccuccccacgucgcccccuc

SEQ ID NO: 172473 - RNA, 25 nt, Human
gccccuccccagccagcccuucccu

SEQ ID NO: 172474 - RNA, 21 nt, Human
gccccuccccagcuccacucc

SEQ ID NO: 172475 - RNA, 32 nt, Human
gccccuccccauccuggaugggcuguugagcc

SEQ ID NO: 172476 - RNA, 20 nt, Human
gccccuccccaucuuccucu

SEQ ID NO: 172477 - RNA, 32 nt, Human
gccccucccccaacccccaccccacacuuguu

SEQ ID NO: 172478 - RNA, 17 nt, Human
gccccucccccaaggaa

SEQ ID NO: 172479 - RNA, 21 nt, Human
gccccucccccagccuugagg

SEQ ID NO: 172480 - RNA, 19 nt, Human
gccccuccccgcccccacc

SEQ ID NO: 172481 - RNA, 32 nt, Human
gccccuccccgccccucuccccacuccgcauc

SEQ ID NO: 172482 - RNA, 17 nt, Human
gccccuccccgccucuc

SEQ ID NO: 172483 - RNA, 32 nt, Human
gccccuccccgggagcccugggugcaggugca

SEQ ID NO: 172484 - RNA, 32 nt, Human
gccccuccccggggaauccucucugccaaucc

SEQ ID NO: 172485 - RNA, 32 nt, Human
gccccuccccuccaggcuaccucugcacuuug

SEQ ID NO: 172486 - RNA, 32 nt, Human
gccccuccccucgccuccucuccuaggugccg

SEQ ID NO: 172487 - RNA, 18 nt, Human
gccccuccccuuccucca

SEQ ID NO: 172488 - RNA, 32 nt, Human
gccccucccgcuagacucccagccugggcccu

SEQ ID NO: 172489 - RNA, 32 nt, Human
gccccucccucguccuccucucccacuuccuc

SEQ ID NO: 172490 - RNA, 16 nt, Human
gccccucccugcuguc

SEQ ID NO: 172491 - RNA, 32 nt, Human
gccccucccugcuucccuguguggaagaggaa

SEQ ID NO: 172492 - RNA, 20 nt, Human
gccccucccuuccuggggug

SEQ ID NO: 172493 - RNA, 32 nt, Human
gccccuccggacggcuuacuuaccucauacgc

SEQ ID NO: 172494 - RNA, 32 nt, Human
gccccuccguucugucucccucgacuccaagu

SEQ ID NO: 172495 - RNA, 18 nt, Human
gccccuccuacccccucc

SEQ ID NO: 172496 - RNA, 32 nt, Human
gccccuccuaccuucucuuccccaccagccua

SEQ ID NO: 172497 - RNA, 19 nt, Human
gccccuccuagagcuugcu

SEQ ID NO: 172498 - RNA, 32 nt, Human
gccccuccucaccccuucuuugccuccuaccc

SEQ ID NO: 172499 - RNA, 32 nt, Human
gccccuccucagacuccgccuuugggagcaca

SEQ ID NO: 172500 - RNA, 32 nt, Human
gccccuccucaucaugaacagaggcuucuccc

SEQ ID NO: 172501 - RNA, 21 nt, Human
gccccuccuccucagccacuc

SEQ ID NO: 172502 - RNA, 16 nt, Human
gccccuccuccucccu

SEQ ID NO: 172503 - RNA, 32 nt, Human
gccccuccucucccccuccacaccucuagacc

SEQ ID NO: 172504 - RNA, 19 nt, Human
gccccuccucugccaccuc

SEQ ID NO: 172505 - RNA, 19 nt, Human
gccccuccugagggacaga

SEQ ID NO: 172506 - RNA, 18 nt, Human
gccccuccugcagcccuc

SEQ ID NO: 172507 - RNA, 18 nt, Human
gccccuccugcccaagug

SEQ ID NO: 172508 - RNA, 22 nt, Human
gccccuccugccccuccugcca

SEQ ID NO: 172509 - RNA, 32 nt, Human
gccccuccugcucucccaggagcagugaguug

SEQ ID NO: 172510 - RNA, 21 nt, Human
gccccuccugcugccuggcca

SEQ ID NO: 172511 - RNA, 32 nt, Human
gccccuccuggaugccugcagacucagaggau

SEQ ID NO: 172512 - RNA, 23 nt, Human
gccccuccuggcaccaacugcuc

SEQ ID NO: 172513 - RNA, 32 nt, Human
gccccuccuggcccauacgccuugccagggcg

SEQ ID NO: 172514 - RNA, 20 nt, Human
gccccuccuguccucaggga

SEQ ID NO: 172515 - RNA, 32 nt, Human
gccccuccuucuccccuccagaccccuacccu

SEQ ID NO: 172516 - RNA, 21 nt, Human
gccccuccuuucucccugcuc

SEQ ID NO: 172517 - RNA, 19 nt, Human
gccccucgcagccaacuca

SEQ ID NO: 172518 - RNA, 32 nt, Human
gccccucgccgccucugccuggccacaucgau

SEQ ID NO: 172519 - RNA, 19 nt, Human
gccccucgccucccugcuc

SEQ ID NO: 172520 - RNA, 32 nt, Human
gccccucggcacagcccuccugugucuccggg

SEQ ID NO: 172521 - RNA, 32 nt, Human
gccccucggcucuggaggcaaucaagcagaca

SEQ ID NO: 172522 - RNA, 32 nt, Human
gccccucgguggugccuucucaaggcaguguu

SEQ ID NO: 172523 - RNA, 32 nt, Human
gccccucguccacccaccccuggcuggcagcc

SEQ ID NO: 172524 - RNA, 32 nt, Human
gccccucguguagaugugcugcagccuugggc

SEQ ID NO: 172525 - RNA, 32 nt, Human
gccccucuacucccugagcuuccccaccccaa

SEQ ID NO: 172526 - RNA, 32 nt, Human
gccccucuagccuuuccgguccuuccugggca

SEQ ID NO: 172527 - RNA, 32 nt, Human
gccccucucagcuuuccauccccagcuaggaa

SEQ ID NO: 172528 - RNA, 32 nt, Human
gccccucuccaauggcucaguuuugcugaaua

SEQ ID NO: 172529 - RNA, 32 nt, Human
gccccucuccacaccucaaaacuccugcccca

SEQ ID NO: 172530 - RNA, 32 nt, Human
gccccucuccaccucaccccauguugaugccc

SEQ ID NO: 172531 - RNA, 21 nt, Human
gccccucuccccugcccaagu

SEQ ID NO: 172532 - RNA, 32 nt, Human
gccccucucccgcuucccaugaugggguggcu

SEQ ID NO: 172533 - RNA, 18 nt, Human
gccccucuccgccugcuc

SEQ ID NO: 172534 - RNA, 32 nt, Human
gccccucuccuccucacuauucucaccaggcc

SEQ ID NO: 172535 - RNA, 20 nt, Human
gccccucuccucucuguccc

SEQ ID NO: 172536 - RNA, 22 nt, Human
gccccucuccucucuguccccu

SEQ ID NO: 172537 - RNA, 32 nt, Human
gccccucucucccucugccccucucuccucuc

SEQ ID NO: 172538 - RNA, 32 nt, Human
gccccucucucgggggaaccggacagcagcuu

SEQ ID NO: 172539 - RNA, 32 nt, Human
gccccucucuggguggagaagcucccggccgc

SEQ ID NO: 172540 - RNA, 21 nt, Human
gccccucucuuucaccuguuc

SEQ ID NO: 172541 - RNA, 32 nt, Human
gccccucugcagaucuccucuggccacugcag

SEQ ID NO: 172542 - RNA, 32 nt, Human
gccccucugcagauggaaucagcuccaggcug

SEQ ID NO: 172543 - RNA, 18 nt, Human
gccccucugccacuccac

SEQ ID NO: 172544 - RNA, 32 nt, Human
gccccucugccuggcccuggggacuguuggcu

SEQ ID NO: 172545 - RNA, 32 nt, Human
gccccucugcugcagcggcuccugagcucaug

SEQ ID NO: 172546 - RNA, 32 nt, Human
gccccucugcuggcacagccugggcaagggga

SEQ ID NO: 172547 - RNA, 20 nt, Human
gccccucuguaccauccccu

SEQ ID NO: 172548 - RNA, 32 nt, Human
gccccucuguggccugagagugagcaggaggg

SEQ ID NO: 172549 - RNA, 17 nt, Human
gccccucuguguccagg

SEQ ID NO: 172550 - RNA, 32 nt, Human
gccccucuguucugcauggaagcugucaccug

SEQ ID NO: 172551 - RNA, 19 nt, Human
gccccucuucacucugcuc

SEQ ID NO: 172552 - RNA, 32 nt, Human
gccccucuucucccucuccaaacagagggaac

SEQ ID NO: 172553 - RNA, 18 nt, Human
gccccucuucucuuccuc

SEQ ID NO: 172554 - RNA, 17 nt, Human
gccccucuucugcuguc

SEQ ID NO: 172555 - RNA, 32 nt, Human
gccccucuucuggagcucagcagcagcagcug

SEQ ID NO: 172556 - RNA, 16 nt, Human
gccccucuucugugcc

SEQ ID NO: 172557 - RNA, 29 nt, Human
gccccucuucugugugcgucuggaagguc

SEQ ID NO: 172558 - RNA, 32 nt, Human
gccccucuucuuuccagcccuucuccugugug

SEQ ID NO: 172559 - RNA, 32 nt, Human
gccccugaacagcauggaguugcugugaguuu

SEQ ID NO: 172560 - RNA, 32 nt, Human
gccccugaagcugccggguucuggucuccgcg

SEQ ID NO: 172561 - RNA, 32 nt, Human
gccccugacacauacaggccagaggcagagag

SEQ ID NO: 172562 - RNA, 32 nt, Human
gccccugaccccuggaagccggccugccuguc

SEQ ID NO: 172563 - RNA, 32 nt, Human
gccccugacucugguaagggcagccugcagca

SEQ ID NO: 172564 - RNA, 16 nt, Human
gccccugagaacuuug

SEQ ID NO: 172565 - RNA, 18 nt, Human
gccccugagacccagcca

SEQ ID NO: 172566 - RNA, 32 nt, Human
gccccugagccccauuccauucauacagacac

SEQ ID NO: 172567 - RNA, 18 nt, Human
gccccugagcccccagcc

SEQ ID NO: 172568 - RNA, 21 nt, Human
gccccugagggacuccgggca

SEQ ID NO: 172569 - RNA, 32 nt, Human
gccccugaguagcugggauuacaggcacguac

SEQ ID NO: 172570 - RNA, 32 nt, Human
gccccugaucacucccagcacuccccuugccu

SEQ ID NO: 172571 - RNA, 32 nt, Human
gccccugaugcccaggcugggugcaggcucuc

SEQ ID NO: 172572 - RNA, 32 nt, Human
gccccugauguguagugagcacucgauaaaua

SEQ ID NO: 172573 - RNA, 32 nt, Human
gccccugcacaggcacacagggcccggccaca

SEQ ID NO: 172574 - RNA, 20 nt, Human
gccccugcacaugccaggug

SEQ ID NO: 172575 - RNA, 32 nt, Human
gccccugcacuccagccugggugacagagcca

SEQ ID NO: 172576 - RNA, 32 nt, Human
gccccugcagagccugggagcugcaggaacug

SEQ ID NO: 172577 - RNA, 32 nt, Human
gccccugcagaggaaugaaacuacuuacaaca

SEQ ID NO: 172578 - RNA, 32 nt, Human
gccccugcagcaggaagcccccagucccagcc

SEQ ID NO: 172579 - RNA, 32 nt, Human
gccccugcagccgccggucggcgcccgggcuc

SEQ ID NO: 172580 - RNA, 32 nt, Human
gccccugcaggacccuccccugcuccauguga

SEQ ID NO: 172581 - RNA, 17 nt, Human
gccccugcagggagcgg

SEQ ID NO: 172582 - RNA, 32 nt, Human
gccccugcaggggcccaggcugccucucaucu

SEQ ID NO: 172583 - RNA, 19 nt, Human
gccccugcagguccaggug

SEQ ID NO: 172584 - RNA, 32 nt, Human
gccccugcaguggcgggacucaagcuccugac

SEQ ID NO: 172585 - RNA, 17 nt, Human
gccccugcaugcccagg

SEQ ID NO: 172586 - RNA, 17 nt, Human
gccccugcauucaggug

SEQ ID NO: 172587 - RNA, 32 nt, Human
gccccugcauuccagccuaggcgacagaguga

SEQ ID NO: 172588 - RNA, 32 nt, Human
gccccugcauucuagccugggugacagugaga

SEQ ID NO: 172589 - RNA, 21 nt, Human
gccccugccacaccuggggca

SEQ ID NO: 172590 - RNA, 32 nt, Human
gccccugccacccaguggccaggaugacaagg

SEQ ID NO: 172591 - RNA, 32 nt, Human
gccccugccacuccgagauaaccaguggaugc

SEQ ID NO: 172592 - RNA, 18 nt, Human
gccccugccacuuucaau

SEQ ID NO: 172593 - RNA, 32 nt, Human
gccccugccagaccuccugcuaccgucccaga

SEQ ID NO: 172594 - RNA, 18 nt, Human
gccccugccagcucaggu

SEQ ID NO: 172595 - RNA, 17 nt, Human
gccccugccaucgcagg

SEQ ID NO: 172596 - RNA, 32 nt, Human
gccccugccaugaggucaauggcagccuggau

SEQ ID NO: 172597 - RNA, 16 nt, Human
gccccugccaugcagg

SEQ ID NO: 172598 - RNA, 32 nt, Human
gccccugccauggagccgugugguguaugugu

SEQ ID NO: 172599 - RNA, 17 nt, Human
gccccugccauugcagg

SEQ ID NO: 172600 - RNA, 32 nt, Human
gccccugccauuuccacccuccagucauuucu

SEQ ID NO: 172601 - RNA, 21 nt, Human
gccccugcccacaaaacccca

SEQ ID NO: 172602 - RNA, 18 nt, Human
gccccugcccaccaggua

SEQ ID NO: 172603 - RNA, 20 nt, Human
gccccugcccagaaccaagu

SEQ ID NO: 172604 - RNA, 24 nt, Human
gccccugcccagcacaaaacccca

SEQ ID NO: 172605 - RNA, 19 nt, Human
gccccugcccagugaacag

SEQ ID NO: 172606 - RNA, 18 nt, Human
gccccugcccauguacag

SEQ ID NO: 172607 - RNA, 32 nt, Human
gccccugccccaacugauucugcccagauaau

SEQ ID NO: 172608 - RNA, 19 nt, Human
gccccugccccacacaggu

SEQ ID NO: 172609 - RNA, 20 nt, Human
gccccugccccagcccaagu

SEQ ID NO: 172610 - RNA, 32 nt, Human
gccccugccccaggaacauggcagaagcacag

SEQ ID NO: 172611 - RNA, 16 nt, Human
gccccugccccaggug

SEQ ID NO: 172612 - RNA, 20 nt, Human
gccccugccccaucuccuca

SEQ ID NO: 172613 - RNA, 23 nt, Human
gccccugccccauuuccuccuca

SEQ ID NO: 172614 - RNA, 19 nt, Human
gccccugcccccaaaggug

SEQ ID NO: 172615 - RNA, 21 nt, Human
gccccugcccccacccgcacc

SEQ ID NO: 172616 - RNA, 21 nt, Human
gccccugcccccacccucacc

SEQ ID NO: 172617 - RNA, 15 nt, Human
gccccugcccccagg

SEQ ID NO: 172618 - RNA, 16 nt, Human
gccccugccccccggg

SEQ ID NO: 172619 - RNA, 15 nt, Human
gccccugcccccggg

SEQ ID NO: 172620 - RNA, 18 nt, Human
gccccugccccgugaagg

SEQ ID NO: 172621 - RNA, 32 nt, Human
gccccugccccuccucucccucaucaaggaca

SEQ ID NO: 172622 - RNA, 18 nt, Human
gccccugccccugcccag

SEQ ID NO: 172623 - RNA, 19 nt, Human
gccccugccccugcugcgg

SEQ ID NO: 172624 - RNA, 16 nt, Human
gccccugcccgaggug

SEQ ID NO: 172625 - RNA, 20 nt, Human
gccccugcccgggcgcgcuc

SEQ ID NO: 172626 - RNA, 18 nt, Human
gccccugcccuaccccag

SEQ ID NO: 172627 - RNA, 17 nt, Human
gccccugcccuaccugg

SEQ ID NO: 172628 - RNA, 18 nt, Human
gccccugcccuaggggug

SEQ ID NO: 172629 - RNA, 15 nt, Human
gccccugcccucagg

SEQ ID NO: 172630 - RNA, 32 nt, Human
gccccugcccuccccuuccucccauccuuguc

SEQ ID NO: 172631 - RNA, 16 nt, Human
gccccugcccucggug

SEQ ID NO: 172632 - RNA, 32 nt, Human
gccccugcccucucuccuuugccccucagucu

SEQ ID NO: 172633 - RNA, 17 nt, Human
gccccugcccucugugg

SEQ ID NO: 172634 - RNA, 15 nt, Human
gccccugcccugagg

SEQ ID NO: 172635 - RNA, 18 nt, Human
gccccugcccugccuggg

SEQ ID NO: 172636 - RNA, 17 nt, Human
gccccugcccuggcagg

SEQ ID NO: 172637 - RNA, 15 nt, Human
gccccugcccugggg

SEQ ID NO: 172638 - RNA, 16 nt, Human
gccccugcccuguggg

SEQ ID NO: 172639 - RNA, 17 nt, Human
gccccugcccuuuuagg

SEQ ID NO: 172640 - RNA, 19 nt, Human
gccccugccgacuccaggu

SEQ ID NO: 172641 - RNA, 20 nt, Human
gccccugccgcagcccggua

SEQ ID NO: 172642 - RNA, 17 nt, Human
gccccugccgugcaggu

SEQ ID NO: 172643 - RNA, 17 nt, Human
gccccugccguggcagg

SEQ ID NO: 172644 - RNA, 21 nt, Human
gccccugccucaugggcuccc

SEQ ID NO: 172645 - RNA, 32 nt, Human
gccccugccuccagggcuagguagagagggcc

SEQ ID NO: 172646 - RNA, 32 nt, Human
gccccugccuccauuucucgcucucuguccac

SEQ ID NO: 172647 - RNA, 16 nt, Human
gccccugccucccagg

SEQ ID NO: 172648 - RNA, 32 nt, Human
gccccugccucuaccuguccccaaauuuuuau

SEQ ID NO: 172649 - RNA, 21 nt, Human
gccccugccucugcccaagug

SEQ ID NO: 172650 - RNA, 17 nt, Human
gccccugccucuucagg

SEQ ID NO: 172651 - RNA, 19 nt, Human
gccccugccugaaagugua

SEQ ID NO: 172652 - RNA, 20 nt, Human
gccccugccugaugcaugua

SEQ ID NO: 172653 - RNA, 17 nt, Human
gccccugccugccacca

SEQ ID NO: 172654 - RNA, 32 nt, Human
gccccugccugggcccgcagccucccccgcgg

SEQ ID NO: 172655 - RNA, 32 nt, Human
gccccugccugggggcuugucaccucccccac

SEQ ID NO: 172656 - RNA, 32 nt, Human
gccccugccuggguucugucccagcucccugg

SEQ ID NO: 172657 - RNA, 19 nt, Human
gccccugccuguaauaggu

SEQ ID NO: 172658 - RNA, 17 nt, Human
gccccugccuucccagg

SEQ ID NO: 172659 - RNA, 32 nt, Human
gccccugccuuucucuuccuccaucaggcccu

SEQ ID NO: 172660 - RNA, 21 nt, Human
gccccugcgaagaaaaggcau

SEQ ID NO: 172661 - RNA, 32 nt, Human
gccccugcgaggaguugaggggccaguucggc

SEQ ID NO: 172662 - RNA, 19 nt, Human
gccccugcgccuccgcccg

SEQ ID NO: 172663 - RNA, 32 nt, Human
gccccugcggccgccucucgcggcucccgggg

SEQ ID NO: 172664 - RNA, 19 nt, Human
gccccugcggguccccagg

SEQ ID NO: 172665 - RNA, 24 nt, Human
gccccugcgguuccuguccgagua

SEQ ID NO: 172666 - RNA, 32 nt, Human
gccccugcucacugggcccgagccugaacuga

SEQ ID NO: 172667 - RNA, 32 nt, Human
gccccugcucaggugcuucugaaaguuccuuu

SEQ ID NO: 172668 - RNA, 17 nt, Human
gccccugcuccaccagg

SEQ ID NO: 172669 - RNA, 19 nt, Human
gccccugcuccugcccagg

SEQ ID NO: 172670 - RNA, 21 nt, Human
gccccugcucugguccuccag

SEQ ID NO: 172671 - RNA, 32 nt, Human
gccccugcucuguagccaccuccuuggcaccg

SEQ ID NO: 172672 - RNA, 22 nt, Human
gccccugcugcacguccggugg

SEQ ID NO: 172673 - RNA, 17 nt, Human
gccccugcugcugcagg

SEQ ID NO: 172674 - RNA, 32 nt, Human
gccccugcugcugcugcugcacaugccacagc

SEQ ID NO: 172675 - RNA, 32 nt, Human
gccccugcuggcugagcuccagccugugccca

SEQ ID NO: 172676 - RNA, 23 nt, Human
gccccugcugggcccagccacca

SEQ ID NO: 172677 - RNA, 17 nt, Human
gccccugcugucccagg

SEQ ID NO: 172678 - RNA, 19 nt, Human
gccccugcugugccuggua

SEQ ID NO: 172679 - RNA, 32 nt, Human
gccccugcuuccauuucuccccaccucacucu

SEQ ID NO: 172680 - RNA, 32 nt, Human
gccccugcuucuccagccuggacccccagcuu

SEQ ID NO: 172681 - RNA, 17 nt, Human
gccccugcuucuccagg

SEQ ID NO: 172682 - RNA, 32 nt, Human
gccccugcuucuccaggccucuugccuuugag

SEQ ID NO: 172683 - RNA, 17 nt, Human
gccccugcuucuggaua

SEQ ID NO: 172684 - RNA, 20 nt, Human
gccccugcuuucugcccagg

SEQ ID NO: 172685 - RNA, 16 nt, Human
gccccuggaaacuuug

SEQ ID NO: 172686 - RNA, 32 nt, Human
gccccuggaacaugccagcacacacugccaug

SEQ ID NO: 172687 - RNA, 32 nt, Human
gccccuggaaccuuucccuuguguguaccaca

SEQ ID NO: 172688 - RNA, 32 nt, Human
gccccuggaaggcagaaaaguugggagcaugg

SEQ ID NO: 172689 - RNA, 31 nt, Human
gccccuggaauagcuuucaugccaaguuuag

SEQ ID NO: 172690 - RNA, 32 nt, Human
gccccuggacccuucucuccggaccagggagg

SEQ ID NO: 172691 - RNA, 19 nt, Human
gccccuggagcgcccgccg

SEQ ID NO: 172692 - RNA, 32 nt, Human
gccccuggcagaguccacgcugccucagguau

SEQ ID NO: 172693 - RNA, 32 nt, Human
gccccuggcagccccuguucuggcagaguuga

SEQ ID NO: 172694 - RNA, 32 nt, Human
gccccuggccacucuaagcugggcagacggag

SEQ ID NO: 172695 - RNA, 32 nt, Human
gccccuggccagaggccuugcuggguggagcc

SEQ ID NO: 172696 - RNA, 16 nt, Human
gccccuggccugaggc

SEQ ID NO: 172697 - RNA, 16 nt, Human
gccccuggcuccaggu

SEQ ID NO: 172698 - RNA, 32 nt, Human
gccccuggcucccaucuuggucucaccuuuuc

SEQ ID NO: 172699 - RNA, 32 nt, Human
gccccuggcugcagaugacuggaaacaaggaa

SEQ ID NO: 172700 - RNA, 32 nt, Human
gccccuggcugcuguuucccagccuuuccaca

SEQ ID NO: 172701 - RNA, 32 nt, Human
gccccugggaagggcguggcaggggcucugca

SEQ ID NO: 172702 - RNA, 32 nt, Human
gccccugggagcugccagggaagaaccgacuc

SEQ ID NO: 172703 - RNA, 32 nt, Human
gccccugggagggagagagauaaggcgcuauc

SEQ ID NO: 172704 - RNA, 32 nt, Human
gccccugggaguggacacagggugcagggagc

SEQ ID NO: 172705 - RNA, 32 nt, Human
gccccugggcugggacagcccacuguuccaug

SEQ ID NO: 172706 - RNA, 18 nt, Human
gccccuggggggcagcuu

SEQ ID NO: 172707 - RNA, 31 nt, Human
gccccugggguggaagugggguaggggaaga

SEQ ID NO: 172708 - RNA, 32 nt, Human
gccccugguauccaaagggcccagggacccug

SEQ ID NO: 172709 - RNA, 32 nt, Human
gccccuggucccacuccugcccccgcccuacc

SEQ ID NO: 172710 - RNA, 32 nt, Human
gccccuggugccucuuccccagcccuaaagcc

SEQ ID NO: 172711 - RNA, 32 nt, Human
gccccuggugugagcauuagaccagccacagu

SEQ ID NO: 172712 - RNA, 32 nt, Human
gccccuguacuccagccugggugacagagcaa

SEQ ID NO: 172713 - RNA, 32 nt, Human
gccccuguacuuggguugccucuugucccuga

SEQ ID NO: 172714 - RNA, 32 nt, Human
gccccuguagccucagcacccagcacaggccu

SEQ ID NO: 172715 - RNA, 32 nt, Human
gccccuguccagccccuccaccugugucugaa

SEQ ID NO: 172716 - RNA, 32 nt, Human
gccccuguccccaccucuggagaauccacccc

SEQ ID NO: 172717 - RNA, 32 nt, Human
gccccugucucaggauugucucuucacgccca

SEQ ID NO: 172718 - RNA, 32 nt, Human
gccccugucucugccaggugccuccucucagu

SEQ ID NO: 172719 - RNA, 16 nt, Human
gccccugucugcugcu

SEQ ID NO: 172720 - RNA, 32 nt, Human
gccccugucuguucuuacccuuuggaacaguu

SEQ ID NO: 172721 - RNA, 17 nt, Human
gccccugugauccaggu

SEQ ID NO: 172722 - RNA, 32 nt, Human
gccccugugauugggccacgguugccaaggua

SEQ ID NO: 172723 - RNA, 23 nt, Human
gccccugugccaggcccuggugg

SEQ ID NO: 172724 - RNA, 17 nt, Human
gccccugugcccgggau

SEQ ID NO: 172725 - RNA, 32 nt, Human
gccccuguggcaaaccaggaaggccaaggcug

SEQ ID NO: 172726 - RNA, 32 nt, Human
gccccuguggcucgacuggaguguucguucac

SEQ ID NO: 172727 - RNA, 18 nt, Human
gccccugugggucccagg

SEQ ID NO: 172728 - RNA, 32 nt, Human
gccccugugggugggguggagggugaaauucu

SEQ ID NO: 172729 - RNA, 24 nt, Human
gccccugugucauagccccaagua

SEQ ID NO: 172730 - RNA, 32 nt, Human
gccccuguguuaccugggcagcuccagaucac

SEQ ID NO: 172731 - RNA, 18 nt, Human
gccccuguucauccaagu

SEQ ID NO: 172732 - RNA, 19 nt, Human
gccccuguuccuccaagug

SEQ ID NO: 172733 - RNA, 32 nt, Human
gccccuguuucguggcagacagcaggugccug

SEQ ID NO: 172734 - RNA, 19 nt, Human
gccccuuaaggccaccagc

SEQ ID NO: 172735 - RNA, 21 nt, Human
gccccuuaaggccaccagcaa

SEQ ID NO: 172736 - RNA, 32 nt, Human
gccccuuacaccacuuuccaccuuccuguccg

SEQ ID NO: 172737 - RNA, 32 nt, Human
gccccuuaccgagcucccagacuggucauaug

SEQ ID NO: 172738 - RNA, 32 nt, Human
gccccuuacgccugucauucagccuggcaggu

SEQ ID NO: 172739 - RNA, 32 nt, Human
gccccuuaguaagccgaggacccgaacccuua

SEQ ID NO: 172740 - RNA, 32 nt, Human
gccccuuauuugguggcggaaguggccuccac

SEQ ID NO: 172741 - RNA, 20 nt, Human
gccccuucaccaccccgccc

SEQ ID NO: 172742 - RNA, 32 nt, Human
gccccuucaucaccaucuccaucauucagcug

SEQ ID NO: 172743 - RNA, 32 nt, Human
gccccuucauggggcucaccugguggauucac

SEQ ID NO: 172744 - RNA, 17 nt, Human
gccccuucccccugccu

SEQ ID NO: 172745 - RNA, 22 nt, Human
gccccuuccccugcccagggug

SEQ ID NO: 172746 - RNA, 18 nt, Human
gccccuucccguccaggu

SEQ ID NO: 172747 - RNA, 31 nt, Human
gccccuucccucucugggacuugucuucugg

SEQ ID NO: 172748 - RNA, 32 nt, Human
gccccuucccuucccuucccuucccuuccuuu

SEQ ID NO: 172749 - RNA, 19 nt, Human
gccccuucccuuugcugcc

SEQ ID NO: 172750 - RNA, 18 nt, Human
gccccuuccuccuccucu

SEQ ID NO: 172751 - RNA, 32 nt, Human
gccccuuccucgguccuaucauccuacccucu

SEQ ID NO: 172752 - RNA, 32 nt, Human
gccccuuccucugccaggugcuuggcucucug

SEQ ID NO: 172753 - RNA, 32 nt, Human
gccccuuccucuuucuccuccuaccucugccc

SEQ ID NO: 172754 - RNA, 16 nt, Human
gccccuuccugcugcc

SEQ ID NO: 172755 - RNA, 32 nt, Human
gccccuuccugggagaggcuguuaacacgggg

SEQ ID NO: 172756 - RNA, 31 nt, Human
gccccuuccuuccucccuugcccaaagaucc

SEQ ID NO: 172757 - RNA, 32 nt, Human
gccccuuccuuuccaaaccaugcaauggaaga

SEQ ID NO: 172758 - RNA, 32 nt, Human
gccccuuccuuucuaaauuaaaaauguuuuca

SEQ ID NO: 172759 - RNA, 22 nt, Human
gccccuucgcccaccuccgccc

SEQ ID NO: 172760 - RNA, 21 nt, Human
gccccuucuacgcuccaggug

SEQ ID NO: 172761 - RNA, 22 nt, Human
gccccuucuacgcuccaggugg

SEQ ID NO: 172762 - RNA, 32 nt, Human
gccccuucucauaggaccccuaugacccacag

SEQ ID NO: 172763 - RNA, 32 nt, Human
gccccuucuccucaccaugucucccccacccu

SEQ ID NO: 172764 - RNA, 32 nt, Human
gccccuucuccuccuccuaccugggccucugc

SEQ ID NO: 172765 - RNA, 32 nt, Human
gccccuucuccucuccccagggccuggcccua

SEQ ID NO: 172766 - RNA, 32 nt, Human
gccccuucuccugccccagccccagccccacc

SEQ ID NO: 172767 - RNA, 22 nt, Human
gccccuucucucccugccagag

SEQ ID NO: 172768 - RNA, 32 nt, Human
gccccuucucucgccaccccugcccaaggucg

SEQ ID NO: 172769 - RNA, 32 nt, Human
gccccuucuggggugaggaguaccaagugcac

SEQ ID NO: 172770 - RNA, 32 nt, Human
gccccuucuuuaugcagaggugcagaaccagg

SEQ ID NO: 172771 - RNA, 32 nt, Human
gccccuucuuucuccacagcucuggaccuuuc

SEQ ID NO: 172772 - RNA, 32 nt, Human
gccccuugagauggguuucccuaugcagcccc

SEQ ID NO: 172773 - RNA, 32 nt, Human
gccccuugcauauccccacugucaggggcagc

SEQ ID NO: 172774 - RNA, 32 nt, Human
gccccuugccagcauccccacacccaccucuc

SEQ ID NO: 172775 - RNA, 32 nt, Human
gccccuugcccagggccagugccauggggaag

SEQ ID NO: 172776 - RNA, 19 nt, Human
gccccuugcccccagucac

SEQ ID NO: 172777 - RNA, 32 nt, Human
gccccuugcccugagcucuguucuccauggug

SEQ ID NO: 172778 - RNA, 18 nt, Human
gccccuugccucccagaa

SEQ ID NO: 172779 - RNA, 21 nt, Human
gccccuugccugcgugccccu

SEQ ID NO: 172780 - RNA, 32 nt, Human
gccccuugcuccaugaggaguugcaggguguu

SEQ ID NO: 172781 - RNA, 32 nt, Human
gccccuugcucuccccugcccugcugccgccu

SEQ ID NO: 172782 - RNA, 32 nt, Human
gccccuugcugccgugugcuccugccuuccug

SEQ ID NO: 172783 - RNA, 32 nt, Human
gccccuuggaaccuggccaugcaaagcaaggg

SEQ ID NO: 172784 - RNA, 32 nt, Human
gccccuuggcaaaccucaccacucacagaggc

SEQ ID NO: 172785 - RNA, 29 nt, Human
gccccuuggcugcucucggacucccuacc

SEQ ID NO: 172786 - RNA, 32 nt, Human
gccccuuggcugcugcugcugcuuacuccuga

SEQ ID NO: 172787 - RNA, 32 nt, Human
gccccuuggcuggcagauguguuaacaugccc

SEQ ID NO: 172788 - RNA, 32 nt, Human
gccccuuggcuugccauucuuucagcagcaca

SEQ ID NO: 172789 - RNA, 32 nt, Human
gccccuuggucuucaguguuuuucucuucccc

SEQ ID NO: 172790 - RNA, 32 nt, Human
gccccuuguccaccccucuccacaccccuucc

SEQ ID NO: 172791 - RNA, 32 nt, Human
gccccuuguccaccuucucuugaggccacaga

SEQ ID NO: 172792 - RNA, 26 nt, Human
gccccuugucuugcgccugccuuccu

SEQ ID NO: 172793 - RNA, 32 nt, Human
gccccuuguuucucccuccuuccaggguuuag

SEQ ID NO: 172794 - RNA, 23 nt, Human
gccccuuuauugccacuacccca

SEQ ID NO: 172795 - RNA, 32 nt, Human
gccccuuucagccauggcuggaguggcuggga

SEQ ID NO: 172796 - RNA, 32 nt, Human
gccccuuucauuuugggccucugacaaugcuu

SEQ ID NO: 172797 - RNA, 23 nt, Human
gccccuuuccacacgccgcugcc

SEQ ID NO: 172798 - RNA, 32 nt, Human
gccccuuuccaucuucaagagagauggaauua

SEQ ID NO: 172799 - RNA, 32 nt, Human
gccccuuuccccuuuguuuuccuuccuuucuu

SEQ ID NO: 172800 - RNA, 24 nt, Human
gccccuuuccuugccgaaugggac

SEQ ID NO: 172801 - RNA, 32 nt, Human
gccccuuucucuuccgguucuaggcgcuucgg

SEQ ID NO: 172802 - RNA, 22 nt, Human
gccccuuugcaaggggcagagg

SEQ ID NO: 172803 - RNA, 32 nt, Human
gccccuuugccuuugcauccuuagccaguguc

SEQ ID NO: 172804 - RNA, 32 nt, Human
gccccuuuguguccuccgggggcggaggcagc

SEQ ID NO: 172805 - RNA, 32 nt, Human
gccccuuuguguccugauggcuggaggacgcu

SEQ ID NO: 172806 - RNA, 32 nt, Human
gcccgaaagccgccucccccucccagacccga

SEQ ID NO: 172807 - RNA, 32 nt, Human
gcccgaacccaggagucaaaagcugcagugag

SEQ ID NO: 172808 - RNA, 18 nt, Human
gcccgaacucccaccucu

SEQ ID NO: 172809 - RNA, 32 nt, Human
gcccgaacugcagcuccagccccagccgugcg

SEQ ID NO: 172810 - RNA, 32 nt, Human
gcccgaagccucugucccuccuguucuugucc

SEQ ID NO: 172811 - RNA, 32 nt, Human
gcccgaaguugugagacugaaaccagaaguug

SEQ ID NO: 172812 - RNA, 32 nt, Human
gcccgacagaagaaagagagugaggcuaugga

SEQ ID NO: 172813 - RNA, 32 nt, Human
gcccgacagccacgugggccgagagcugaccc

SEQ ID NO: 172814 - RNA, 32 nt, Human
gcccgaccaagcuguccccuuccccugugcca

SEQ ID NO: 172815 - RNA, 32 nt, Human
gcccgacccacugucucagcccagaggucaag

SEQ ID NO: 172816 - RNA, 32 nt, Human
gcccgacccaugucuaugcucuaccccagggu

SEQ ID NO: 172817 - RNA, 32 nt, Human
gcccgacccugccgccucccucacggagccag

SEQ ID NO: 172818 - RNA, 32 nt, Human
gcccgaccucugcaccugguccgcauggggga

SEQ ID NO: 172819 - RNA, 32 nt, Human
gcccgaccuggagggcccccggggcacugggc

SEQ ID NO: 172820 - RNA, 16 nt, Human
gcccgacgcagagcag

SEQ ID NO: 172821 - RNA, 32 nt, Human
gcccgacggagcagaagagagagcauggagcu

SEQ ID NO: 172822 - RNA, 32 nt, Human
gcccgacggcaacccagcuugggaagagaagc

SEQ ID NO: 172823 - RNA, 32 nt, Human
gcccgacucucaagccucagcucccaggcuag

SEQ ID NO: 172824 - RNA, 19 nt, Human
gcccgacugcccuccuccc

SEQ ID NO: 172825 - RNA, 19 nt, Human
gcccgacuucagccccagc

SEQ ID NO: 172826 - RNA, 32 nt, Human
gcccgagacaggcuacauccaggcacagucgu

SEQ ID NO: 172827 - RNA, 23 nt, Human
gcccgagacccagcgcccaggcg

SEQ ID NO: 172828 - RNA, 19 nt, Human
gcccgagacccccaccucu

SEQ ID NO: 172829 - RNA, 32 nt, Human
gcccgagagacagagguugcagugagccgaga

SEQ ID NO: 172830 - RNA, 32 nt, Human
gcccgagagcgagcucuggccucccaggcgcc

SEQ ID NO: 172831 - RNA, 32 nt, Human
gcccgagagguggagacugcaguaagccaaga

SEQ ID NO: 172832 - RNA, 32 nt, Human
gcccgagagguggagguugcagugagccgaga

SEQ ID NO: 172833 - RNA, 18 nt, Human
gcccgagaguaccaggga

SEQ ID NO: 172834 - RNA, 22 nt, Human
gcccgagauggaccaggggcug

SEQ ID NO: 172835 - RNA, 32 nt, Human
gcccgagcagaggcccuacacccaccgaggca

SEQ ID NO: 172836 - RNA, 32 nt, Human
gcccgagcagagggucaugcgggccccacagg

SEQ ID NO: 172837 - RNA, 32 nt, Human
gcccgagcagcacaggccgcugccucagcauc

SEQ ID NO: 172838 - RNA, 32 nt, Human
gcccgagcagccgccgccgccucagucaguca

SEQ ID NO: 172839 - RNA, 32 nt, Human
gcccgagcccaggaccuguuggcagaguugcc

SEQ ID NO: 172840 - RNA, 22 nt, Human
gcccgagccgcagccgccgccu

SEQ ID NO: 172841 - RNA, 23 nt, Human
gcccgagccgccgccgccgccgc

SEQ ID NO: 172842 - RNA, 18 nt, Human
gcccgagcggcgcauccc

SEQ ID NO: 172843 - RNA, 32 nt, Human
gcccgagcucuucuccguaauucaaagaucau

SEQ ID NO: 172844 - RNA, 23 nt, Human
gcccgagcugggguccgcccuca

SEQ ID NO: 172845 - RNA, 21 nt, Human
gcccgaggacagccccagggg

SEQ ID NO: 172846 - RNA, 32 nt, Human
gcccgaggacugggacauuaaaccugaccucc

SEQ ID NO: 172847 - RNA, 18 nt, Human
gcccgaggagaccaggga

SEQ ID NO: 172848 - RNA, 24 nt, Human
gcccgaggcccccaccagcaguug

SEQ ID NO: 172849 - RNA, 22 nt, Human
gcccgaggcccugcgggcgcug

SEQ ID NO: 172850 - RNA, 22 nt, Human
gcccgaggccucauccauagcu

SEQ ID NO: 172851 - RNA, 21 nt, Human
gcccgaggccuccggggacug

SEQ ID NO: 172852 - RNA, 23 nt, Human
gcccgaggcugcggcuaagacug

SEQ ID NO: 172853 - RNA, 32 nt, Human
gcccgagggaagcacaggccucggccucccag

SEQ ID NO: 172854 - RNA, 32 nt, Human
gcccgagggaggaagagagggagggaggaacu

SEQ ID NO: 172855 - RNA, 32 nt, Human
gcccgagggcaggcuugaguuaggcagacuga

SEQ ID NO: 172856 - RNA, 20 nt, Human
gcccgagggccgggcugcug

SEQ ID NO: 172857 - RNA, 20 nt, Human
gcccgagggcguccagcgcg

SEQ ID NO: 172858 - RNA, 32 nt, Human
gcccgagggcugggcccuugagucucuccucu

SEQ ID NO: 172859 - RNA, 32 nt, Human
gcccgagggcuggugcaggcuuggagcugggg

SEQ ID NO: 172860 - RNA, 24 nt, Human
gcccgaggucuccaagccgggcug

SEQ ID NO: 172861 - RNA, 22 nt, Human
gcccgaggugcucccaggugcu

SEQ ID NO: 172862 - RNA, 32 nt, Human
gcccgagguggcagaggaagggggcugccugg

SEQ ID NO: 172863 - RNA, 31 nt, Human
gcccgaguccaggaauuagagguugcaguga

SEQ ID NO: 172864 - RNA, 32 nt, Human
gcccgaguggagccgggcugagauucuucuca

SEQ ID NO: 172865 - RNA, 32 nt, Human
gcccgaguuagaaaucuccuugcuaggagcau

SEQ ID NO: 172866 - RNA, 32 nt, Human
gcccgaucugggcugccuccagcccgggccug

SEQ ID NO: 172867 - RNA, 32 nt, Human
gcccgauggaggagggaggagacucccugaac

SEQ ID NO: 172868 - RNA, 32 nt, Human
gcccgauuugccugguucugauucuccaggcu

SEQ ID NO: 172869 - RNA, 32 nt, Human
gcccgauuugguaguugaggaaagcacagagg

SEQ ID NO: 172870 - RNA, 32 nt, Human
gcccgcaaaccugugaacuuucgccagugccu

SEQ ID NO: 172871 - RNA, 21 nt, Human
gcccgcaagaggccucagcgg

SEQ ID NO: 172872 - RNA, 32 nt, Human
gcccgcacaagcgccucacgcucagcggcauc

SEQ ID NO: 172873 - RNA, 32 nt, Human
gcccgcacaggcaggcuguguuguggggucca

SEQ ID NO: 172874 - RNA, 32 nt, Human
gcccgcacccggccaaagcccaggaagcucgg

SEQ ID NO: 172875 - RNA, 18 nt, Human
gcccgcacucccgcccug

SEQ ID NO: 172876 - RNA, 32 nt, Human
gcccgcagaagcaagggaugacuugguucuug

SEQ ID NO: 172877 - RNA, 32 nt, Human
gcccgcagaaucccagcgccauguaugcccag

SEQ ID NO: 172878 - RNA, 32 nt, Human
gcccgcagauaaccagcccgagucaugcaguc

SEQ ID NO: 172879 - RNA, 32 nt, Human
gcccgcagcccacaugcccucugugaugagug

SEQ ID NO: 172880 - RNA, 17 nt, Human
gcccgcagcccaccucu

SEQ ID NO: 172881 - RNA, 20 nt, Human
gcccgcagccgccagccucc

SEQ ID NO: 172882 - RNA, 32 nt, Human
gcccgcagccggcgcagccaggagaccgaggu

SEQ ID NO: 172883 - RNA, 32 nt, Human
gcccgcagcugcagagagucccgcugcgucuc

SEQ ID NO: 172884 - RNA, 32 nt, Human
gcccgcaggcaaggucucccacugcagggcuu

SEQ ID NO: 172885 - RNA, 19 nt, Human
gcccgcaggcacgccugca

SEQ ID NO: 172886 - RNA, 32 nt, Human
gcccgcaggugggaggugugguugcaggugcg

SEQ ID NO: 172887 - RNA, 32 nt, Human
gcccgcaguaucuguggugcucugggcccucc

SEQ ID NO: 172888 - RNA, 32 nt, Human
gcccgcagugcucugcaagauccugcucugca

SEQ ID NO: 172889 - RNA, 32 nt, Human
gcccgcagugcugggaccagagccagaugcag

SEQ ID NO: 172890 - RNA, 20 nt, Human
gcccgccaagcgcggccgca

SEQ ID NO: 172891 - RNA, 17 nt, Human
gcccgccaaggcugcag

SEQ ID NO: 172892 - RNA, 32 nt, Human
gcccgccacaucugcagugccgcacacagaca

SEQ ID NO: 172893 - RNA, 21 nt, Human
gcccgccaccgugcaagcucu

SEQ ID NO: 172894 - RNA, 32 nt, Human
gcccgccaccuugcccagcuaauuuuuguauu

SEQ ID NO: 172895 - RNA, 19 nt, Human
gcccgccacgcgccgccac

SEQ ID NO: 172896 - RNA, 16 nt, Human
gcccgccacggagcug

SEQ ID NO: 172897 - RNA, 32 nt, Human
gcccgccacuggcuucucucuuuuucuccguu

SEQ ID NO: 172898 - RNA, 32 nt, Human
gcccgccagacccucuggagaagccccugccc

SEQ ID NO: 172899 - RNA, 32 nt, Human
gcccgccagcuuccucccaggacagugcugcu

SEQ ID NO: 172900 - RNA, 32 nt, Human
gcccgccaugccacaaggugggggaggcccug

SEQ ID NO: 172901 - RNA, 20 nt, Human
gcccgcccaacucccagcgg

SEQ ID NO: 172902 - RNA, 18 nt, Human
gcccgcccaccccugccu

SEQ ID NO: 172903 - RNA, 32 nt, Human
gcccgcccagcacccugagaccacacuguugc

SEQ ID NO: 172904 - RNA, 32 nt, Human
gcccgcccaguucucugagcgugcggcggacg

SEQ ID NO: 172905 - RNA, 32 nt, Human
gcccgcccccagaaccccugaugcugguuagg

SEQ ID NO: 172906 - RNA, 32 nt, Human
gcccgcccccuucucauggugcuacuuccucu

SEQ ID NO: 172907 - RNA, 20 nt, Human
gcccgccccggcgcaggcag

SEQ ID NO: 172908 - RNA, 32 nt, Human
gcccgccccugccuuucucuuccuccaucagg

SEQ ID NO: 172909 - RNA, 32 nt, Human
gcccgccccuuuccucuggccccuccucucca

SEQ ID NO: 172910 - RNA, 19 nt, Human
gcccgcccgcgcccagggg

SEQ ID NO: 172911 - RNA, 32 nt, Human
gcccgcccggcccagccgcuccugcugggcgc

SEQ ID NO: 172912 - RNA, 32 nt, Human
gcccgcccucacugcuguucuugccuuacagc

SEQ ID NO: 172913 - RNA, 32 nt, Human
gcccgcccuccaccuucuccaccacccagcag

SEQ ID NO: 172914 - RNA, 32 nt, Human
gcccgcccucucugguccucccaaaccccaaa

SEQ ID NO: 172915 - RNA, 32 nt, Human
gcccgcccucucuuccugcagccugggaacuu

SEQ ID NO: 172916 - RNA, 32 nt, Human
gcccgcccugcacuaucagccucgagagggac

SEQ ID NO: 172917 - RNA, 16 nt, Human
gcccgccgaguccugc

SEQ ID NO: 172918 - RNA, 22 nt, Human
gcccgccgauuauuccuuggua

SEQ ID NO: 172919 - RNA, 20 nt, Human
gcccgccgccagccccacgg

SEQ ID NO: 172920 - RNA, 18 nt, Human
gcccgccgccgccccccu

SEQ ID NO: 172921 - RNA, 17 nt, Human
gcccgccgcgcagcccg

SEQ ID NO: 172922 - RNA, 32 nt, Human
gcccgccgcggucccgucuccugggccugucc

SEQ ID NO: 172923 - RNA, 20 nt, Human
gcccgccgcuccacuccccg

SEQ ID NO: 172924 - RNA, 20 nt, Human
gcccgccgcucccggccccg

SEQ ID NO: 172925 - RNA, 22 nt, Human
gcccgccgggcucgcagccccg

SEQ ID NO: 172926 - RNA, 32 nt, Human
gcccgccggucccucugggauguccguaggac

SEQ ID NO: 172927 - RNA, 26 nt, Human
gcccgccucagcgcccccacuccgcg

SEQ ID NO: 172928 - RNA, 32 nt, Human
gcccgccucaucugcaugcgcauuccucgcgc

SEQ ID NO: 172929 - RNA, 15 nt, Human
gcccgccuccucccu

SEQ ID NO: 172930 - RNA, 32 nt, Human
gcccgccucugcaccacacaaggagcucuuug

SEQ ID NO: 172931 - RNA, 32 nt, Human
gcccgccucugccuccccaaagugcugggauu

SEQ ID NO: 172932 - RNA, 32 nt, Human
gcccgccucugucagucuuccugaccccuucc

SEQ ID NO: 172933 - RNA, 32 nt, Human
gcccgccugaggacgggggugccuucaugcgg

SEQ ID NO: 172934 - RNA, 32 nt, Human
gcccgccugcagcgcccggcacccgcccagga

SEQ ID NO: 172935 - RNA, 20 nt, Human
gcccgccugccaaugugagg

SEQ ID NO: 172936 - RNA, 32 nt, Human
gcccgccugcccccauccccuccaggccacgu

SEQ ID NO: 172937 - RNA, 32 nt, Human
gcccgccugccugccugcccgcccgcucgcuc

SEQ ID NO: 172938 - RNA, 32 nt, Human
gcccgccugccuggcugcccaaccagcuccaa

SEQ ID NO: 172939 - RNA, 32 nt, Human
gcccgccugccugggcccaccugcugcugcug

SEQ ID NO: 172940 - RNA, 32 nt, Human
gcccgcgaggcugagggggcucagaggucccc

SEQ ID NO: 172941 - RNA, 19 nt, Human
gcccgcgccagccccgcgg

SEQ ID NO: 172942 - RNA, 20 nt, Human
gcccgcgccgccgccgccgc

SEQ ID NO: 172943 - RNA, 32 nt, Human
gcccgcgcgguuuggggcaggcguggccgucg

SEQ ID NO: 172944 - RNA, 17 nt, Human
gcccgcgcuguccuccc

SEQ ID NO: 172945 - RNA, 32 nt, Human
gcccgcggaccacccugugugugucauccuga

SEQ ID NO: 172946 - RNA, 32 nt, Human
gcccgcggagcgcagcugagacugggggagcg

SEQ ID NO: 172947 - RNA, 32 nt, Human
gcccgcggaggagcccgcgccgccccgaugcc

SEQ ID NO: 172948 - RNA, 32 nt, Human
gcccgcggaggcaccgaugcccgcagagcccg

SEQ ID NO: 172949 - RNA, 32 nt, Human
gcccgcggcaggcggcggccaugaacuucucc

SEQ ID NO: 172950 - RNA, 24 nt, Human
gcccgcggcccagccgaagcucuu

SEQ ID NO: 172951 - RNA, 32 nt, Human
gcccgcggcucccagggugaucccgagcacag

SEQ ID NO: 172952 - RNA, 32 nt, Human
gcccgcgggaggcccggggcagcggcugggau

SEQ ID NO: 172953 - RNA, 32 nt, Human
gcccgcggucaggagcagcaaugucugugcag

SEQ ID NO: 172954 - RNA, 32 nt, Human
gcccgcggugcagcuccagccccgggaagccc

SEQ ID NO: 172955 - RNA, 20 nt, Human
gcccgcgucacccggcagca

SEQ ID NO: 172956 - RNA, 22 nt, Human
gcccgcgucuagcuuaguuuca

SEQ ID NO: 172957 - RNA, 24 nt, Human
gcccgcgucuuugcaguaguugca

SEQ ID NO: 172958 - RNA, 32 nt, Human
gcccgcucacgauuccggccacggugaugacg

SEQ ID NO: 172959 - RNA, 32 nt, Human
gcccgcucagcagccugcugaggaguggggac

SEQ ID NO: 172960 - RNA, 32 nt, Human
gcccgcucuacaucuucugccuuagucucagu

SEQ ID NO: 172961 - RNA, 32 nt, Human
gcccgcucuaggccuuauccucccucuagguc

SEQ ID NO: 172962 - RNA, 32 nt, Human
gcccgcucucccucaucucucucugauaaucu

SEQ ID NO: 172963 - RNA, 32 nt, Human
gcccgcucugagcuggaagcagcaugugggac

SEQ ID NO: 172964 - RNA, 32 nt, Human
gcccgcucuggccgcuugcuuuuugcugagaa

SEQ ID NO: 172965 - RNA, 32 nt, Human
gcccgcugccaagagcuagagaggaggaucca

SEQ ID NO: 172966 - RNA, 32 nt, Human
gcccgcugcccaggcuggccgccgccgugccg

SEQ ID NO: 172967 - RNA, 23 nt, Human
gcccgcugccccgcgagcccgcg

SEQ ID NO: 172968 - RNA, 32 nt, Human
gcccgcugcccucugucaucccauucaagauu

SEQ ID NO: 172969 - RNA, 31 nt, Human
gcccgcugccucuuggcuucucagccccuuu

SEQ ID NO: 172970 - RNA, 20 nt, Human
gcccgcugcuccccgcugcg

SEQ ID NO: 172971 - RNA, 32 nt, Human
gcccgcuggagcgguugagugcagaagggugc

SEQ ID NO: 172972 - RNA, 32 nt, Human
gcccgcuggcaccugcagccuccugggcgccc

SEQ ID NO: 172973 - RNA, 29 nt, Human
gcccgcuggcugcagagcaucccugggag

SEQ ID NO: 172974 - RNA, 32 nt, Human
gcccgcuggggagggguccgggaagaagggga

SEQ ID NO: 172975 - RNA, 24 nt, Human
gcccgcugucccagcuccuugaga

SEQ ID NO: 172976 - RNA, 32 nt, Human
gcccgcuuaauauuaucagagccgagccugga

SEQ ID NO: 172977 - RNA, 21 nt, Human
gcccgcuucccaagccagcca

SEQ ID NO: 172978 - RNA, 32 nt, Human
gcccgcuucccugucuaaccggauucuuccag

SEQ ID NO: 172979 - RNA, 23 nt, Human
gcccgcuuucugggaaagacaga

SEQ ID NO: 172980 - RNA, 23 nt, Human
gcccggaaagacgccagagccag

SEQ ID NO: 172981 - RNA, 32 nt, Human
gcccggaacagcccggggauuguuccucucuc

SEQ ID NO: 172982 - RNA, 32 nt, Human
gcccggaagccagucccucccccuagaccccg

SEQ ID NO: 172983 - RNA, 32 nt, Human
gcccggaaggcagagguugcagugagcugaga

SEQ ID NO: 172984 - RNA, 32 nt, Human
gcccggaaggcggagguugcagugagcugaga

SEQ ID NO: 172985 - RNA, 32 nt, Human
gcccggaauccuccaaggaggcuugcacuugu

SEQ ID NO: 172986 - RNA, 32 nt, Human
gcccggacaccucauuccccucccacuacagg

SEQ ID NO: 172987 - RNA, 32 nt, Human
gcccggacauccuggaagcugggaaaugguga

SEQ ID NO: 172988 - RNA, 32 nt, Human
gcccggaccacaggcuccagauggacccuggg

SEQ ID NO: 172989 - RNA, 32 nt, Human
gcccggacccuccuaucccgggaggagccuca

SEQ ID NO: 172990 - RNA, 32 nt, Human
gcccggaccgaggaagaagaugcaagccagcc

SEQ ID NO: 172991 - RNA, 20 nt, Human
gcccggaccucggccucccc

SEQ ID NO: 172992 - RNA, 32 nt, Human
gcccggaccuuggcugucuccucuuugugccg

SEQ ID NO: 172993 - RNA, 32 nt, Human
gcccggacgccucauucccccucugggcccug

SEQ ID NO: 172994 - RNA, 32 nt, Human
gcccggagacuugccuugcaaugccauguuug

SEQ ID NO: 172995 - RNA, 32 nt, Human
gcccggagaugcaggagguccugcuagaggug

SEQ ID NO: 172996 - RNA, 32 nt, Human
gcccggagcagccuguuccugcacuccacccu

SEQ ID NO: 172997 - RNA, 22 nt, Human
gcccggagcccgccgccccagg

SEQ ID NO: 172998 - RNA, 32 nt, Human
gcccggagcccuugccccugcccgcgccgccg

SEQ ID NO: 172999 - RNA, 32 nt, Human
gcccggagcugagcuccccaccugccgguagc

SEQ ID NO: 173000 - RNA, 32 nt, Human
gcccggagcugccucuuagacucgucuggccc

SEQ ID NO: 173001 - RNA, 23 nt, Human
gcccggagcuggguacccaagcg

SEQ ID NO: 173002 - RNA, 32 nt, Human
gcccggaggacacucuuggccuagggagugga

SEQ ID NO: 173003 - RNA, 21 nt, Human
gcccggaggagcucccaggcg

SEQ ID NO: 173004 - RNA, 32 nt, Human
gcccggaggaggaggaggaggaggaggaggag

SEQ ID NO: 173005 - RNA, 21 nt, Human
gcccggaggcccuaggagcug

SEQ ID NO: 173006 - RNA, 21 nt, Human
gcccggaggccgguacccagg

SEQ ID NO: 173007 - RNA, 31 nt, Human
gcccggagggugucuccccaagccaggcaca

SEQ ID NO: 173008 - RNA, 32 nt, Human
gcccggauccaggauucugggaggcuucaguu

SEQ ID NO: 173009 - RNA, 16 nt, Human
gcccggaucccucagg

SEQ ID NO: 173010 - RNA, 23 nt, Human
gcccggaucgccgccgccgccgc

SEQ ID NO: 173011 - RNA, 32 nt, Human
gcccggauguacugaggaugcguuacaguuuc

SEQ ID NO: 173012 - RNA, 29 nt, Human
gcccggcaaaguuggagcccuugcgguac

SEQ ID NO: 173013 - RNA, 32 nt, Human
gcccggcacagccaugaucaaggcgauccuaa

SEQ ID NO: 173014 - RNA, 18 nt, Human
gcccggcaccccacuucu

SEQ ID NO: 173015 - RNA, 21 nt, Human
gcccggcaccuccaacaacau

SEQ ID NO: 173016 - RNA, 32 nt, Human
gcccggcagccagcucugcagagccauuuguc

SEQ ID NO: 173017 - RNA, 32 nt, Human
gcccggcaggccuccagccaggagugcaucaa

SEQ ID NO: 173018 - RNA, 32 nt, Human
gcccggcagugucuucucagugucuucaccug

SEQ ID NO: 173019 - RNA, 32 nt, Human
gcccggcaucugaaugagagcucucuuuguaa

SEQ ID NO: 173020 - RNA, 32 nt, Human
gcccggccaauacauuauuauuaacuuaaggc

SEQ ID NO: 173021 - RNA, 32 nt, Human
gcccggccaccacugcuggcuucagccccuug

SEQ ID NO: 173022 - RNA, 19 nt, Human
gcccggccacccugcccca

SEQ ID NO: 173023 - RNA, 32 nt, Human
gcccggccagcccgagaaagacaggacggagu

SEQ ID NO: 173024 - RNA, 18 nt, Human
gcccggccagcgcugcgg

SEQ ID NO: 173025 - RNA, 26 nt, Human
gcccggccaggauggagggggcucag

SEQ ID NO: 173026 - RNA, 32 nt, Human
gcccggcccaagcucuacuuguguacagugua

SEQ ID NO: 173027 - RNA, 32 nt, Human
gcccggcccagaggggacaggaagccaggaca

SEQ ID NO: 173028 - RNA, 32 nt, Human
gcccggcccagcugcagccacccuucucaucu

SEQ ID NO: 173029 - RNA, 32 nt, Human
gcccggcccgagguaucgcaugugcgggggag

SEQ ID NO: 173030 - RNA, 32 nt, Human
gcccggcccgcacauggucgagcgggggucuc

SEQ ID NO: 173031 - RNA, 32 nt, Human
gcccggcccgggaggagcaggacgcgccgggg

SEQ ID NO: 173032 - RNA, 32 nt, Human
gcccggcccgggcccgcgguucuccacccgua

SEQ ID NO: 173033 - RNA, 32 nt, Human
gcccggcccugagccuccucugcugagccagc

SEQ ID NO: 173034 - RNA, 32 nt, Human
gcccggcccugccucauagcaggcugccaugu

SEQ ID NO: 173035 - RNA, 19 nt, Human
gcccggccgugguaacugu

SEQ ID NO: 173036 - RNA, 32 nt, Human
gcccggccguuuucucuucuuccucuugcguc

SEQ ID NO: 173037 - RNA, 32 nt, Human
gcccggccuccagggcccgcuggccccacagc

SEQ ID NO: 173038 - RNA, 32 nt, Human
gcccggccucccucccccugcagccaucccaa

SEQ ID NO: 173039 - RNA, 24 nt, Human
gcccggccucgccgccgccgccgc

SEQ ID NO: 173040 - RNA, 32 nt, Human
gcccggccucgccugcccuccugggccaguca

SEQ ID NO: 173041 - RNA, 32 nt, Human
gcccggcgacacugcacccaucccggcugcuu

SEQ ID NO: 173042 - RNA, 20 nt, Human
gcccggcgccaugggcucag

SEQ ID NO: 173043 - RNA, 32 nt, Human
gcccggcgcguguggcccugcccggcguggac

SEQ ID NO: 173044 - RNA, 22 nt, Human
gcccggcgcuucggcccgggcc

SEQ ID NO: 173045 - RNA, 32 nt, Human
gcccggcggcagcugagccagcgcggcggguc

SEQ ID NO: 173046 - RNA, 32 nt, Human
gcccggcuaauuuuuguuuuuguauuuuuagu

SEQ ID NO: 173047 - RNA, 32 nt, Human
gcccggcucacugcagccugguuacgacggga

SEQ ID NO: 173048 - RNA, 32 nt, Human
gcccggcuccacuucuaggccauguuuugacu

SEQ ID NO: 173049 - RNA, 21 nt, Human
gcccggcuccuaagucuaccc

SEQ ID NO: 173050 - RNA, 32 nt, Human
gcccggcuccucccagaaccagucccagccug

SEQ ID NO: 173051 - RNA, 32 nt, Human
gcccggcucuggaaggcuuuggagaguccagc

SEQ ID NO: 173052 - RNA, 32 nt, Human
gcccggcugcggaaugaaccacaucuugcucu

SEQ ID NO: 173053 - RNA, 32 nt, Human
gcccggcugcuaccucugcagacauggccugg

SEQ ID NO: 173054 - RNA, 32 nt, Human
gcccggcuggaaggcagagcuccgaagcaggc

SEQ ID NO: 173055 - RNA, 32 nt, Human
gcccggcuucacuaggccugggugucuggguu

SEQ ID NO: 173056 - RNA, 23 nt, Human
gcccggcuugcucagccuggcca

SEQ ID NO: 173057 - RNA, 32 nt, Human
  misc_feature (31)..(31): n is a, c, g, or u
gcccgggaagcagagguugcagugaacugang

SEQ ID NO: 173058 - RNA, 32 nt, Human
gcccgggaagcucaagggcugagagggagccg

SEQ ID NO: 173059 - RNA, 17 nt, Human
gcccgggaagcugggug

SEQ ID NO: 173060 - RNA, 32 nt, Human
gcccgggaaguggagguugcacugagcugaga

SEQ ID NO: 173061 - RNA, 32 nt, Human
gcccgggacagaacagacaugcacaggaccug

SEQ ID NO: 173062 - RNA, 32 nt, Human
gcccgggacauggccaaggcgggccgugcagg

SEQ ID NO: 173063 - RNA, 32 nt, Human
gcccgggacgaggaggaggaggaggaagaggg

SEQ ID NO: 173064 - RNA, 19 nt, Human
gcccgggacucgcucgcuc

SEQ ID NO: 173065 - RNA, 23 nt, Human
gcccgggagacagcaagauucug

SEQ ID NO: 173066 - RNA, 32 nt, Human
gcccgggagacccaggaggagcccgcagauaa

SEQ ID NO: 173067 - RNA, 32 nt, Human
gcccgggagagaacccaggagcgccgccgccc

SEQ ID NO: 173068 - RNA, 32 nt, Human
gcccgggagagggaacggggacaggagcagag

SEQ ID NO: 173069 - RNA, 32 nt, Human
gcccgggagagggaggcccgagcugccaccgg

SEQ ID NO: 173070 - RNA, 22 nt, Human
gcccgggagaggggggugcagg

SEQ ID NO: 173071 - RNA, 32 nt, Human
gcccgggagcaggugugcaggagcgcagcgcg

SEQ ID NO: 173072 - RNA, 32 nt, Human
gcccgggagcccagggcucugaugaggcauga

SEQ ID NO: 173073 - RNA, 32 nt, Human
gcccgggagccgcggcgauggcggugcaggcg

SEQ ID NO: 173074 - RNA, 32 nt, Human
gcccgggagcgggccagcugccgggagcccug

SEQ ID NO: 173075 - RNA, 32 nt, Human
gcccgggagcgugggagcaggaggguggcgcg

SEQ ID NO: 173076 - RNA, 31 nt, Human
gcccgggaggaggaggaggagguugcaguga

SEQ ID NO: 173077 - RNA, 32 nt, Human
gcccgggaggcagaaccugcagugagccaaaa

SEQ ID NO: 173078 - RNA, 32 nt, Human
gcccgggaggcagaggcugcagugaaccaaga

SEQ ID NO: 173079 - RNA, 32 nt, Human
gcccgggaggcagaggcugcaguggcugagau

SEQ ID NO: 173080 - RNA, 22 nt, Human
gcccgggaggcagagguugcag

SEQ ID NO: 173081 - RNA, 24 nt, Human
gcccgggaggcagagguugcagug

SEQ ID NO: 173082 - RNA, 32 nt, Human
gcccgggaggcagagguugcagugagccauga

SEQ ID NO: 173083 - RNA, 32 nt, Human
gcccgggaggcagagguugcagugagccgaga

SEQ ID NO: 173084 - RNA, 32 nt, Human
gcccgggaggcagagguugcagugagccguga

SEQ ID NO: 173085 - RNA, 24 nt, Human
gcccgggaggcggagauugcggug

SEQ ID NO: 173086 - RNA, 24 nt, Human
gcccgggaggcggagcuuacagug

SEQ ID NO: 173087 - RNA, 32 nt, Human
gcccgggaggcggagcuuacagugagcugaga

SEQ ID NO: 173088 - RNA, 32 nt, Human
gcccgggaggcggagcuugcagugagcugaga

SEQ ID NO: 173089 - RNA, 21 nt, Human
gcccgggaggcggaggcgcgg

SEQ ID NO: 173090 - RNA, 24 nt, Human
gcccgggaggcggagguugcagug

SEQ ID NO: 173091 - RNA, 32 nt, Human
gcccgggaggcggagguugcagugagcugaga

SEQ ID NO: 173092 - RNA, 32 nt, Human
gcccgggaggcggagguugccgagccgagaua

SEQ ID NO: 173093 - RNA, 19 nt, Human
gcccgggaggcgggggcgg

SEQ ID NO: 173094 - RNA, 32 nt, Human
gcccgggagggaggggugugcaggagccgcag

SEQ ID NO: 173095 - RNA, 32 nt, Human
gcccgggaggucaagguugcagugagcuguca

SEQ ID NO: 173096 - RNA, 32 nt, Human
gcccgggaggucaagguugcagugagucauga

SEQ ID NO: 173097 - RNA, 25 nt, Human
gcccgggagguggagcuugcagugg

SEQ ID NO: 173098 - RNA, 24 nt, Human
gcccgggagguggagguugcagug

SEQ ID NO: 173099 - RNA, 25 nt, Human
gcccgggagguggagguugcaguga

SEQ ID NO: 173100 - RNA, 32 nt, Human
gcccgggagguggagguugcagugagccaaga

SEQ ID NO: 173101 - RNA, 32 nt, Human
gcccgggagguggagguugcagugagcccaga

SEQ ID NO: 173102 - RNA, 32 nt, Human
gcccgggagguggagguugcagugagcugagg

SEQ ID NO: 173103 - RNA, 32 nt, Human
gcccgggagguggagguugcagugagucaaga

SEQ ID NO: 173104 - RNA, 24 nt, Human
gcccgggagguugaggcugcagug

SEQ ID NO: 173105 - RNA, 32 nt, Human
gcccgggagugccccaccacguggcuuucacc

SEQ ID NO: 173106 - RNA, 32 nt, Human
gcccgggaguuugaaguugcagugagcuauga

SEQ ID NO: 173107 - RNA, 32 nt, Human
gcccgggaucccggcggcggcgggggaaggag

SEQ ID NO: 173108 - RNA, 23 nt, Human
gcccgggaugcgccagggaacag

SEQ ID NO: 173109 - RNA, 32 nt, Human
gcccgggcaacauagcaagaccccuaucucua

SEQ ID NO: 173110 - RNA, 20 nt, Human
gcccgggcagccccacgccc

SEQ ID NO: 173111 - RNA, 32 nt, Human
gcccgggcaggugguugcagcauugcagaaga

SEQ ID NO: 173112 - RNA, 23 nt, Human
gcccgggcaucuccugaagcuca

SEQ ID NO: 173113 - RNA, 21 nt, Human
gcccgggccagcaccuaggcg

SEQ ID NO: 173114 - RNA, 32 nt, Human
gcccgggcccaggagugccugguguagcaguc

SEQ ID NO: 173115 - RNA, 19 nt, Human
gcccgggccccugcugcug

SEQ ID NO: 173116 - RNA, 18 nt, Human
gcccgggcccggcugccu

SEQ ID NO: 173117 - RNA, 21 nt, Human
gcccgggccgaacggcugcgg

SEQ ID NO: 173118 - RNA, 18 nt, Human
gcccgggccgcucaggug

SEQ ID NO: 173119 - RNA, 20 nt, Human
gcccgggcgccuggguccuc

SEQ ID NO: 173120 - RNA, 32 nt, Human
gcccgggcgcuccuacagcagugccugcacgc

SEQ ID NO: 173121 - RNA, 32 nt, Human
gcccgggcucgccccauaccacgagccagccc

SEQ ID NO: 173122 - RNA, 21 nt, Human
gcccgggcuggaaugcaaugg

SEQ ID NO: 173123 - RNA, 21 nt, Human
gcccgggcuggagugcaaugg

SEQ ID NO: 173124 - RNA, 21 nt, Human
gcccgggcuggagugcagcgg

SEQ ID NO: 173125 - RNA, 24 nt, Human
gcccgggcuggagugcagcggcgu

SEQ ID NO: 173126 - RNA, 32 nt, Human
gcccgggcuggucuagaacuccuggguucaag

SEQ ID NO: 173127 - RNA, 32 nt, Human
gcccgggcuggucucaaacuccuggguucaag

SEQ ID NO: 173128 - RNA, 18 nt, Human
gcccgggcuuggaggccu

SEQ ID NO: 173129 - RNA, 32 nt, Human
gcccggggaaggcggagcucaguggccacagg

SEQ ID NO: 173130 - RNA, 18 nt, Human
gcccggggauccagcacg

SEQ ID NO: 173131 - RNA, 32 nt, Human
gcccggggcaggcaggacgcagaggaggaggc

SEQ ID NO: 173132 - RNA, 32 nt, Human
gcccggggcccaggcagaaugcgagaacacca

SEQ ID NO: 173133 - RNA, 32 nt, Human
gcccggggccgccgccuggccugggagucccu

SEQ ID NO: 173134 - RNA, 32 nt, Human
gcccggggccuggggcgucagcugggauauau

SEQ ID NO: 173135 - RNA, 20 nt, Human
gcccggggcgagugggccuc

SEQ ID NO: 173136 - RNA, 32 nt, Human
gcccggggcgcacggcccgcacgacgccuucc

SEQ ID NO: 173137 - RNA, 21 nt, Human
gcccggggcugcagccugacc

SEQ ID NO: 173138 - RNA, 22 nt, Human
gcccggggcuggagcgcagcgg

SEQ ID NO: 173139 - RNA, 32 nt, Human
gcccgggggaccccgccccgacccaggggcug

SEQ ID NO: 173140 - RNA, 32 nt, Human
gcccgggggacgccugcccugcccagguggcc

SEQ ID NO: 173141 - RNA, 32 nt, Human
gcccgggggaggacgcagacccgggcaggcgg

SEQ ID NO: 173142 - RNA, 32 nt, Human
gcccgggggaggcgacggcagcggcggcggcu

SEQ ID NO: 173143 - RNA, 32 nt, Human
gcccgggggaggcggccgaggcggcggcggcg

SEQ ID NO: 173144 - RNA, 20 nt, Human
gcccgggggucuggggccuc

SEQ ID NO: 173145 - RNA, 32 nt, Human
gcccggggucuaagauguaaagagguaaacag

SEQ ID NO: 173146 - RNA, 32 nt, Human
gcccgggguggaggagggagccaggcuucgcu

SEQ ID NO: 173147 - RNA, 32 nt, Human
gcccgggguggccacaccacagcaagccggcc

SEQ ID NO: 173148 - RNA, 32 nt, Human
gcccgggucaccaugcacaauccucuggccug

SEQ ID NO: 173149 - RNA, 32 nt, Human
gcccgggucaccccagcccugggguggaggcc

SEQ ID NO: 173150 - RNA, 20 nt, Human
gcccgggucccgccucgggg

SEQ ID NO: 173151 - RNA, 32 nt, Human
gcccgggucuucgugcagaaccauugggcaca

SEQ ID NO: 173152 - RNA, 32 nt, Human
gcccgggucuugcuccccauuggccgccaccu

SEQ ID NO: 173153 - RNA, 32 nt, Human
gcccgggugacggcgguaggggaccagcaacu

SEQ ID NO: 173154 - RNA, 19 nt, Human
gcccgggugccggggccca

SEQ ID NO: 173155 - RNA, 19 nt, Human
gcccgggugggucugcgca

SEQ ID NO: 173156 - RNA, 20 nt, Human
gcccggguucuccugcugcc

SEQ ID NO: 173157 - RNA, 32 nt, Human
gcccggguuugccccuagcugcggaggcuguu

SEQ ID NO: 173158 - RNA, 32 nt, Human
gcccgguaggaaagagagaggaggagggggaa

SEQ ID NO: 173159 - RNA, 32 nt, Human
gcccgguaugccaguguccugggaggauggac

SEQ ID NO: 173160 - RNA, 32 nt, Human
gcccggucacugacuccuccgcgcuuuccucg

SEQ ID NO: 173161 - RNA, 32 nt, Human
gcccggucagugcugcaugcacugcauaugaa

SEQ ID NO: 173162 - RNA, 22 nt, Human
gcccggucccaauggccaaugg

SEQ ID NO: 173163 - RNA, 23 nt, Human
gcccggucccuggccaucagcga

SEQ ID NO: 173164 - RNA, 32 nt, Human
gcccggucucggagaagaggggagaguggagg

SEQ ID NO: 173165 - RNA, 32 nt, Human
gcccggugagcagcacccgcagcucagagccc

SEQ ID NO: 173166 - RNA, 32 nt, Human
gcccggugcagccucuaacuccugggcucaag

SEQ ID NO: 173167 - RNA, 20 nt, Human
gcccggugcccacccugcug

SEQ ID NO: 173168 - RNA, 32 nt, Human
gcccggugcccaggcuggggccgccaagcagc

SEQ ID NO: 173169 - RNA, 32 nt, Human
gcccggugccgccuuccggcuccaguccccgg

SEQ ID NO: 173170 - RNA, 32 nt, Human
gcccggugcgccccuccaccuccugcucgggg

SEQ ID NO: 173171 - RNA, 32 nt, Human
gcccgguggccagcuccucuccuccuugccca

SEQ ID NO: 173172 - RNA, 32 nt, Human
gcccgguggcccagagggaagcggggcacggc

SEQ ID NO: 173173 - RNA, 21 nt, Human
gcccgguggcggcagggccag

SEQ ID NO: 173174 - RNA, 20 nt, Human
gcccgguuccuuuccugagg

SEQ ID NO: 173175 - RNA, 32 nt, Human
gcccgguucuccgcuucuccccauccccuacu

SEQ ID NO: 173176 - RNA, 18 nt, Human
gcccgguuucccucggug

SEQ ID NO: 173177 - RNA, 32 nt, Human
gcccgguuucccucguggcuggagcaggggug

SEQ ID NO: 173178 - RNA, 23 nt, Human
gcccguaaucccagcuacuaagg

SEQ ID NO: 173179 - RNA, 23 nt, Human
gcccguaaucccagcuacucagg

SEQ ID NO: 173180 - RNA, 24 nt, Human
gcccguaaucccagcuacucagga

SEQ ID NO: 173181 - RNA, 23 nt, Human
gcccguaaucccagcuacucggg

SEQ ID NO: 173182 - RNA, 24 nt, Human
gcccguaaucccagcuacucggga

SEQ ID NO: 173183 - RNA, 32 nt, Human
gcccguaaucccagcuagucaggaggcugagg

SEQ ID NO: 173184 - RNA, 32 nt, Human
gcccguacugcccguggcaugagggagccgga

SEQ ID NO: 173185 - RNA, 32 nt, Human
gcccguagaucugggaggccaggcuggcauga

SEQ ID NO: 173186 - RNA, 32 nt, Human
gcccguagcugcguggccgccuggugggacau

SEQ ID NO: 173187 - RNA, 24 nt, Human
gcccguagucccagcuacucagga

SEQ ID NO: 173188 - RNA, 32 nt, Human
gcccgucaagugcugccccugccugugucugg

SEQ ID NO: 173189 - RNA, 32 nt, Human
gcccgucaauaaucccagcuacucgggaggcu

SEQ ID NO: 173190 - RNA, 32 nt, Human
gcccgucacaugcccucugggugacaucggag

SEQ ID NO: 173191 - RNA, 32 nt, Human
gcccguccccagagaaccauggagucuggcag

SEQ ID NO: 173192 - RNA, 21 nt, Human
gcccguccccgcucugcucgc

SEQ ID NO: 173193 - RNA, 32 nt, Human
gcccgucuccccuuaccuccucggcccagcgc

SEQ ID NO: 173194 - RNA, 32 nt, Human
gcccgucucccuggcccaccauguggcugcag

SEQ ID NO: 173195 - RNA, 19 nt, Human
gcccgucuccucuucccuu

SEQ ID NO: 173196 - RNA, 32 nt, Human
gcccgucucuaggagacaggcggggagcguga

SEQ ID NO: 173197 - RNA, 22 nt, Human
gcccgucucuugucuuuccugg

SEQ ID NO: 173198 - RNA, 32 nt, Human
gcccgucugcccaccaugaggaagauccgcgc

SEQ ID NO: 173199 - RNA, 32 nt, Human
gcccgucugccggcucugccugugcugcaagu

SEQ ID NO: 173200 - RNA, 32 nt, Human
gcccgucugccucugagacugcgguaguguuu

SEQ ID NO: 173201 - RNA, 32 nt, Human
gcccgugaagucgaggcugcagugagcccaga

SEQ ID NO: 173202 - RNA, 32 nt, Human
gcccgugaauagugacaaaacaugguuugcag

SEQ ID NO: 173203 - RNA, 32 nt, Human
gcccgugcacggcagagagucugguggggugg

SEQ ID NO: 173204 - RNA, 32 nt, Human
gcccgugcagagcagaggacagugagugucug

SEQ ID NO: 173205 - RNA, 18 nt, Human
gcccgugcccgccugcgg

SEQ ID NO: 173206 - RNA, 32 nt, Human
gcccgugccuuuccucuuccuccuccuccucc

SEQ ID NO: 173207 - RNA, 21 nt, Human
gcccgugcugccugcuggagc

SEQ ID NO: 173208 - RNA, 32 nt, Human
gcccguggagcccugggccuguugacccacca

SEQ ID NO: 173209 - RNA, 32 nt, Human
gcccgugggaggauguacuuaucucagaugcu

SEQ ID NO: 173210 - RNA, 21 nt, Human
gcccguguccugccuugauga

SEQ ID NO: 173211 - RNA, 32 nt, Human
gcccgugucugcccucaucccucucuccuacu

SEQ ID NO: 173212 - RNA, 32 nt, Human
gcccguguggguggcacccugaggucagggga

SEQ ID NO: 173213 - RNA, 32 nt, Human
gcccguguucuccuggcauuaugggcccugga

SEQ ID NO: 173214 - RNA, 32 nt, Human
gcccguuaccucucugcagcagucccccaucc

SEQ ID NO: 173215 - RNA, 32 nt, Human
gcccguuagcuguaacuuggagcuccacucug

SEQ ID NO: 173216 - RNA, 32 nt, Human
gcccguugaaguuccagggagcuugcccgggu

SEQ ID NO: 173217 - RNA, 32 nt, Human
gcccguugcuucugugcuaugcacauuuucua

SEQ ID NO: 173218 - RNA, 23 nt, Human
gcccguuuguuccgcccgugucg

SEQ ID NO: 173219 - RNA, 32 nt, Human
gcccguuuguugucgggggagaagacuuagac

SEQ ID NO: 173220 - RNA, 32 nt, Human
gcccuaaaaagaugauuggcccaauggauggu

SEQ ID NO: 173221 - RNA, 32 nt, Human
gcccuaaaucugcugaggccacugcugguuau

SEQ ID NO: 173222 - RNA, 21 nt, Human
gcccuaacccgccagccuccu

SEQ ID NO: 173223 - RNA, 23 nt, Human
gcccuaagaagucucccuccuca

SEQ ID NO: 173224 - RNA, 32 nt, Human
gcccuaagcuaccugaggguuuaggaggucug

SEQ ID NO: 173225 - RNA, 32 nt, Human
gcccuaaggccuucccucugcagcgcaugcug

SEQ ID NO: 173226 - RNA, 32 nt, Human
gcccuaauaaaccugcuuuugucuucugcaaa

SEQ ID NO: 173227 - RNA, 32 nt, Human
gcccuaaucuggacucauugcaauggcucagc

SEQ ID NO: 173228 - RNA, 32 nt, Human
gcccuaaucuggacucauugcaauggcucagg

SEQ ID NO: 173229 - RNA, 23 nt, Human
gcccuacacuccacgaccugggg

SEQ ID NO: 173230 - RNA, 32 nt, Human
gcccuacacucccuacaccacacccauacuca

SEQ ID NO: 173231 - RNA, 32 nt, Human
gcccuacagugaauccuuaccaguguucaguc

SEQ ID NO: 173232 - RNA, 32 nt, Human
gcccuacaugugggguuggaggagaacuauaa

SEQ ID NO: 173233 - RNA, 22 nt, Human
gcccuacccaaggccaccagcc

SEQ ID NO: 173234 - RNA, 32 nt, Human
gcccuacccuccacucuuucauuccuugaaag

SEQ ID NO: 173235 - RNA, 24 nt, Human
gcccuacccucuugcagcccggga

SEQ ID NO: 173236 - RNA, 19 nt, Human
gcccuaccgaauccugccu

SEQ ID NO: 173237 - RNA, 32 nt, Human
gcccuaccucggggcugaccaggcuggggguc

SEQ ID NO: 173238 - RNA, 32 nt, Human
gcccuaccugacuuggguucucagucaacccu

SEQ ID NO: 173239 - RNA, 32 nt, Human
gcccuaccugcaaccaccgcuugccaugguuu

SEQ ID NO: 173240 - RNA, 32 nt, Human
gcccuaccuugaucaucguccuuuuuagcaug

SEQ ID NO: 173241 - RNA, 32 nt, Human
gcccuacuccacccugucccugcacucccuug

SEQ ID NO: 173242 - RNA, 23 nt, Human
gcccuacuccacugcccuggcag

SEQ ID NO: 173243 - RNA, 32 nt, Human
gcccuacuccagccuggagcucccugagggag

SEQ ID NO: 173244 - RNA, 32 nt, Human
gcccuacuccccaguuuccuggcgaugagcca

SEQ ID NO: 173245 - RNA, 16 nt, Human
gcccuacuuccaccuc

SEQ ID NO: 173246 - RNA, 23 nt, Human
gcccuagaauaugggagugggug

SEQ ID NO: 173247 - RNA, 32 nt, Human
gcccuagacaucuucucccucccuugccucag

SEQ ID NO: 173248 - RNA, 32 nt, Human
gcccuagacccaagcaagaaaccaccacaucu

SEQ ID NO: 173249 - RNA, 32 nt, Human
gcccuagagcacuucuagcagagauuaguugu

SEQ ID NO: 173250 - RNA, 32 nt, Human
gcccuagagcacuucuagcagagauuauuugu

SEQ ID NO: 173251 - RNA, 32 nt, Human
gcccuagaggucgaggcugcagugagcuaugu

SEQ ID NO: 173252 - RNA, 32 nt, Human
gcccuagagguugaggcugcagugagcuaugu

SEQ ID NO: 173253 - RNA, 32 nt, Human
gcccuagauaguuuugccaucuuagaccccuu

SEQ ID NO: 173254 - RNA, 32 nt, Human
gcccuagcauugaucaugauauugcacauauc

SEQ ID NO: 173255 - RNA, 32 nt, Human
gcccuagccggagccguucacagggaggcggc

SEQ ID NO: 173256 - RNA, 32 nt, Human
gcccuaggaaauucacaggguucucaucggag

SEQ ID NO: 173257 - RNA, 22 nt, Human
gcccuaggcccuggccgcagug

SEQ ID NO: 173258 - RNA, 20 nt, Human
gcccuaggcugccugcuccu

SEQ ID NO: 173259 - RNA, 24 nt, Human
gcccuagggaaggaggcuguccca

SEQ ID NO: 173260 - RNA, 20 nt, Human
gcccuagggccgcugcugcc

SEQ ID NO: 173261 - RNA, 32 nt, Human
gcccuagggccugcuucuauguauuuaucaac

SEQ ID NO: 173262 - RNA, 22 nt, Human
gcccuaggggugucugucucca

SEQ ID NO: 173263 - RNA, 32 nt, Human
gcccuagguagcuaaagguugcaugaaggccc

SEQ ID NO: 173264 - RNA, 32 nt, Human
gcccuagguagcuugcucaucuguaaaguggg

SEQ ID NO: 173265 - RNA, 32 nt, Human
gcccuagucaccagcaccagagcccagcugcc

SEQ ID NO: 173266 - RNA, 32 nt, Human
gcccuauaaggagaaagccaacuauguuaagu

SEQ ID NO: 173267 - RNA, 32 nt, Human
gcccuaucaagaccaacaaagcugagaguucu

SEQ ID NO: 173268 - RNA, 21 nt, Human
gcccuauccccacugauacca

SEQ ID NO: 173269 - RNA, 32 nt, Human
gcccuauccuggaagaugggggccaccacacg

SEQ ID NO: 173270 - RNA, 18 nt, Human
gcccuauccuucucugcc

SEQ ID NO: 173271 - RNA, 32 nt, Human
gcccuaucgccucccauuuucccuucaaagua

SEQ ID NO: 173272 - RNA, 32 nt, Human
gcccuaucucccauccuguggaacccgcccca

SEQ ID NO: 173273 - RNA, 32 nt, Human
gcccuaucuccugcaaccucagugccucagcc

SEQ ID NO: 173274 - RNA, 32 nt, Human
gcccuaugcucuggugagaaggugcaacccug

SEQ ID NO: 173275 - RNA, 32 nt, Human
gcccuauuccagcccccuugcuucacucuacc

SEQ ID NO: 173276 - RNA, 20 nt, Human
gcccucaaagacgaggguca

SEQ ID NO: 173277 - RNA, 32 nt, Human
gcccucaacuauucuguuccacacccaaugcu

SEQ ID NO: 173278 - RNA, 32 nt, Human
gcccucaagaacugaagacaauggagcucucu

SEQ ID NO: 173279 - RNA, 32 nt, Human
gcccucaagccacccaggcucccaccacucuc

SEQ ID NO: 173280 - RNA, 32 nt, Human
gcccucaaguagguguuggagagaggggugau

SEQ ID NO: 173281 - RNA, 32 nt, Human
gcccucaaguuucccagaacagucuccccacc

SEQ ID NO: 173282 - RNA, 21 nt, Human
gcccucaaucccagcuacuca

SEQ ID NO: 173283 - RNA, 32 nt, Human
gcccucacaauguaauugaccaaccaaaggaa

SEQ ID NO: 173284 - RNA, 32 nt, Human
gcccucacaccucuaggccucuguuuagauag

SEQ ID NO: 173285 - RNA, 32 nt, Human
gcccucacagcccagacccucacugggaggug

SEQ ID NO: 173286 - RNA, 32 nt, Human
gcccucacauccccuggccuggacccaggaga

SEQ ID NO: 173287 - RNA, 21 nt, Human
gcccucacauucagagccacu

SEQ ID NO: 173288 - RNA, 20 nt, Human
gcccucaccagcccccgcgg

SEQ ID NO: 173289 - RNA, 32 nt, Human
gcccucacccacccucuguguuuccccuucuu

SEQ ID NO: 173290 - RNA, 32 nt, Human
gcccucacccaccuuccuggcccagcagccca

SEQ ID NO: 173291 - RNA, 32 nt, Human
gcccucaccccagagcagcugcagccucagcc

SEQ ID NO: 173292 - RNA, 20 nt, Human
gcccucaccccgccaggagc

SEQ ID NO: 173293 - RNA, 18 nt, Human
gcccucacccuucuuguc

SEQ ID NO: 173294 - RNA, 21 nt, Human
gcccucacccuuuccccaggg

SEQ ID NO: 173295 - RNA, 32 nt, Human
gcccucaccgaggaaccaaauuggccaguauc

SEQ ID NO: 173296 - RNA, 32 nt, Human
gcccucaccgcaggaagcaguuuggguuuuga

SEQ ID NO: 173297 - RNA, 19 nt, Human
gcccucaccuccucugccu

SEQ ID NO: 173298 - RNA, 32 nt, Human
gcccucacgcuggccuccauggagacuccagg

SEQ ID NO: 173299 - RNA, 32 nt, Human
gcccucacggagaggaagggaaggaaggagag

SEQ ID NO: 173300 - RNA, 21 nt, Human
gcccucacuccacagcccucc

SEQ ID NO: 173301 - RNA, 32 nt, Human
gcccucacucccgagccccacacccacaucac

SEQ ID NO: 173302 - RNA, 32 nt, Human
gcccucacugaggagauucagccugggcucca

SEQ ID NO: 173303 - RNA, 32 nt, Human
gcccucacugcacccaccaagucaagcagagc

SEQ ID NO: 173304 - RNA, 24 nt, Human
gcccucacuucauccggcgacuag

SEQ ID NO: 173305 - RNA, 32 nt, Human
gcccucagacacaacuaucccugcccccaccu

SEQ ID NO: 173306 - RNA, 32 nt, Human
gcccucagaccccuuccuuccaaaggagccuc

SEQ ID NO: 173307 - RNA, 18 nt, Human
gcccucagacuccucccu

SEQ ID NO: 173308 - RNA, 32 nt, Human
gcccucagacuggaucuucugccuccaaauua

SEQ ID NO: 173309 - RNA, 18 nt, Human
gcccucagagaccugcug

SEQ ID NO: 173310 - RNA, 32 nt, Human
gcccucagagagaagagagacuccagagaagg

SEQ ID NO: 173311 - RNA, 31 nt, Human
gcccucagagucaaggaggcaggaugaauuu

SEQ ID NO: 173312 - RNA, 32 nt, Human
gcccucagaucccugcucuuccugccuuuccu

SEQ ID NO: 173313 - RNA, 32 nt, Human
gcccucagauguguugacagcugcucuucuga

SEQ ID NO: 173314 - RNA, 32 nt, Human
gcccucagcacacacaucugcacacacgcagc

SEQ ID NO: 173315 - RNA, 20 nt, Human
gcccucagcacccccucccu

SEQ ID NO: 173316 - RNA, 18 nt, Human
gcccucagcauuccugcc

SEQ ID NO: 173317 - RNA, 32 nt, Human
gcccucagcauugucagccugaagaucagagc

SEQ ID NO: 173318 - RNA, 19 nt, Human
gcccucagccagcccagaa

SEQ ID NO: 173319 - RNA, 32 nt, Human
gcccucagccagcuucccagcaagacaaaggg

SEQ ID NO: 173320 - RNA, 21 nt, Human
gcccucagccagcuuuucccu

SEQ ID NO: 173321 - RNA, 19 nt, Human
gcccucagccauccuagcc

SEQ ID NO: 173322 - RNA, 17 nt, Human
gcccucagccccaggcc

SEQ ID NO: 173323 - RNA, 23 nt, Human
gcccucagcccugccagaccucc

SEQ ID NO: 173324 - RNA, 32 nt, Human
gcccucagccuaggggguguaguguaagggaa

SEQ ID NO: 173325 - RNA, 32 nt, Human
gcccucagccuccuccugcuccuucuccuccu

SEQ ID NO: 173326 - RNA, 32 nt, Human
gcccucagccugccucacugcugggccagggu

SEQ ID NO: 173327 - RNA, 20 nt, Human
gcccucagccugggcugccu

SEQ ID NO: 173328 - RNA, 18 nt, Human
gcccucagcgucugcucc

SEQ ID NO: 173329 - RNA, 32 nt, Human
gcccucagcuauuaacugugcuguguauuuau

SEQ ID NO: 173330 - RNA, 32 nt, Human
gcccucagcucaguuuuuggcucuguuaugga

SEQ ID NO: 173331 - RNA, 32 nt, Human
gcccucagcugcaacuccaauggcuacaccag

SEQ ID NO: 173332 - RNA, 19 nt, Human
gcccucagcugcaccuccu

SEQ ID NO: 173333 - RNA, 32 nt, Human
gcccucagcugcagggaaaccgcacucaaacc

SEQ ID NO: 173334 - RNA, 17 nt, Human
gcccucagcuggcugcc

SEQ ID NO: 173335 - RNA, 20 nt, Human
gcccucagcugguccauccu

SEQ ID NO: 173336 - RNA, 32 nt, Human
gcccucaggaacccuucucugaucaucaggau

SEQ ID NO: 173337 - RNA, 32 nt, Human
gcccucaggaaggcggccuuccccugcagucc

SEQ ID NO: 173338 - RNA, 32 nt, Human
gcccucaggaccagcaccagccaagggaaugc

SEQ ID NO: 173339 - RNA, 32 nt, Human
gcccucaggaccugggcgugaauucagggaca

SEQ ID NO: 173340 - RNA, 32 nt, Human
gcccucaggagagaccaggaggacugacagcg

SEQ ID NO: 173341 - RNA, 32 nt, Human
gcccucaggagccugggcugcgaggcuccaua

SEQ ID NO: 173342 - RNA, 24 nt, Human
gcccucaggagcgucaggaucauu

SEQ ID NO: 173343 - RNA, 32 nt, Human
gcccucaggagcgucaggaucauuuucaacuc

SEQ ID NO: 173344 - RNA, 32 nt, Human
gcccucaggcaccugcacuuacaggccuugcu

SEQ ID NO: 173345 - RNA, 32 nt, Human
gcccucaggcccacagguuuaaggcugaggcu

SEQ ID NO: 173346 - RNA, 20 nt, Human
gcccucaggcccucccugcc

SEQ ID NO: 173347 - RNA, 32 nt, Human
gcccucaggccgcggcgacuggguuagagaug

SEQ ID NO: 173348 - RNA, 32 nt, Human
gcccucaggcuugccuguaggauuuaauauuu

SEQ ID NO: 173349 - RNA, 18 nt, Human
gcccucagucacuugccu

SEQ ID NO: 173350 - RNA, 19 nt, Human
gcccucaguccccacccca

SEQ ID NO: 173351 - RNA, 32 nt, Human
gcccucagucuagggaucuggccacagacucc

SEQ ID NO: 173352 - RNA, 32 nt, Human
gcccucagugggcucccuggcccagccagcca

SEQ ID NO: 173353 - RNA, 25 nt, Human
gcccucaguguccaagacccaggca

SEQ ID NO: 173354 - RNA, 19 nt, Human
gcccucauacccccucccu

SEQ ID NO: 173355 - RNA, 24 nt, Human
gcccucauagcccugcuccaggaa

SEQ ID NO: 173356 - RNA, 32 nt, Human
gcccucaucagagucaucagcaaacuguccaa

SEQ ID NO: 173357 - RNA, 32 nt, Human
gcccucauccacccucccaagcugugcgagca

SEQ ID NO: 173358 - RNA, 32 nt, Human
gcccucauccccacagucuugggaucucaggg

SEQ ID NO: 173359 - RNA, 22 nt, Human
gcccucauccccagucucggga

SEQ ID NO: 173360 - RNA, 18 nt, Human
gcccucauccccucuccc

SEQ ID NO: 173361 - RNA, 19 nt, Human
gcccucaucccugcccacg

SEQ ID NO: 173362 - RNA, 16 nt, Human
gcccucauccucagcc

SEQ ID NO: 173363 - RNA, 19 nt, Human
gcccucauccucccuugcu

SEQ ID NO: 173364 - RNA, 18 nt, Human
gcccucauccucucuacc

SEQ ID NO: 173365 - RNA, 32 nt, Human
gcccucaucucuccucaccccugccuucuggc

SEQ ID NO: 173366 - RNA, 19 nt, Human
gcccucaucugucagcucc

SEQ ID NO: 173367 - RNA, 32 nt, Human
gcccucauggugcuggugcuguuguguguagg

SEQ ID NO: 173368 - RNA, 21 nt, Human
gcccucauuuugccugcugcc

SEQ ID NO: 173369 - RNA, 32 nt, Human
gcccuccaacuuugcagauauuacaaaaagag

SEQ ID NO: 173370 - RNA, 32 nt, Human
gcccuccaagugguagaagaagauugcaaagu

SEQ ID NO: 173371 - RNA, 32 nt, Human
gcccuccacagccuccccuucugguuucuggc

SEQ ID NO: 173372 - RNA, 32 nt, Human
gcccuccacaggcugcuuagugagggagacac

SEQ ID NO: 173373 - RNA, 32 nt, Human
gcccuccaccugccaacccuugggcucggagc

SEQ ID NO: 173374 - RNA, 19 nt, Human
gcccuccaccugcccacca

SEQ ID NO: 173375 - RNA, 18 nt, Human
gcccuccaccugccucca

SEQ ID NO: 173376 - RNA, 32 nt, Human
gcccuccacgcuaucccucugcagccugggcc

SEQ ID NO: 173377 - RNA, 32 nt, Human
gcccuccagaacuucaggcucucagugacccu

SEQ ID NO: 173378 - RNA, 32 nt, Human
gcccuccagaauguagcugcugaccccgcgcc

SEQ ID NO: 173379 - RNA, 32 nt, Human
gcccuccagccacuuccccaugcuggcuggca

SEQ ID NO: 173380 - RNA, 32 nt, Human
gcccuccagccccuucgaaccacagcaucuca

SEQ ID NO: 173381 - RNA, 19 nt, Human
gcccuccagccucacccca

SEQ ID NO: 173382 - RNA, 24 nt, Human
gcccuccagccugggcaacaagag

SEQ ID NO: 173383 - RNA, 32 nt, Human
gcccuccagccugugcgcucaccccgcccucc

SEQ ID NO: 173384 - RNA, 32 nt, Human
gcccuccagcuacuuccugccugccaugcccc

SEQ ID NO: 173385 - RNA, 32 nt, Human
gcccuccaggugggcaguugauuauuuccacc

SEQ ID NO: 173386 - RNA, 21 nt, Human
gcccuccagucugggcaacaa

SEQ ID NO: 173387 - RNA, 19 nt, Human
gcccuccaugguccugucu

SEQ ID NO: 173388 - RNA, 32 nt, Human
gcccucccaaagugcugggauuacaggcguaa

SEQ ID NO: 173389 - RNA, 32 nt, Human
gcccucccaaaguguugggauuacaggcauaa

SEQ ID NO: 173390 - RNA, 32 nt, Human
gcccucccaaaguguugggauuauaggcauga

SEQ ID NO: 173391 - RNA, 32 nt, Human
gcccucccaagugcagcugcagccacccaagc

SEQ ID NO: 173392 - RNA, 32 nt, Human
gcccucccaauccagucuacccucaaaggagc

SEQ ID NO: 173393 - RNA, 32 nt, Human
gcccucccaccaacugagcugugugauccugg

SEQ ID NO: 173394 - RNA, 32 nt, Human
gcccucccacuuuccccugccugcuccuccau

SEQ ID NO: 173395 - RNA, 32 nt, Human
gcccucccagaguaucccgaaggggcuggagg

SEQ ID NO: 173396 - RNA, 32 nt, Human
gcccucccagagugcugggauuacaggcguca

SEQ ID NO: 173397 - RNA, 32 nt, Human
gcccucccagcaguggcuugcuuucuucuccu

SEQ ID NO: 173398 - RNA, 32 nt, Human
gcccucccagcuggugucacucugccucuaag

SEQ ID NO: 173399 - RNA, 32 nt, Human
gcccucccaucacuggaagucugcaguggggg

SEQ ID NO: 173400 - RNA, 22 nt, Human
gcccuccccaccaugccuccuu

SEQ ID NO: 173401 - RNA, 21 nt, Human
gcccuccccaccugcucacca

SEQ ID NO: 173402 - RNA, 18 nt, Human
gcccuccccagcugccca

SEQ ID NO: 173403 - RNA, 32 nt, Human
gcccuccccaggagccaggucugcccacgccu

SEQ ID NO: 173404 - RNA, 32 nt, Human
gcccuccccaguuaaaguggggaagacagacu

SEQ ID NO: 173405 - RNA, 17 nt, Human
gcccucccccugcugcu

SEQ ID NO: 173406 - RNA, 32 nt, Human
gcccucccccuucacucuccccacaagugggc

SEQ ID NO: 173407 - RNA, 32 nt, Human
gcccuccccucggcgggcacgguauuuuuauc

SEQ ID NO: 173408 - RNA, 32 nt, Human
gcccuccccugccgcauucccucacuggcugu

SEQ ID NO: 173409 - RNA, 32 nt, Human
gcccuccccugggcucgcguucaucggucccc

SEQ ID NO: 173410 - RNA, 32 nt, Human
gcccucccgugggccgcacccuugccacugcc

SEQ ID NO: 173411 - RNA, 32 nt, Human
gcccucccuaguagcugggacuacagcaccca

SEQ ID NO: 173412 - RNA, 32 nt, Human
gcccucccuccaggaccgaggggcucccaagg

SEQ ID NO: 173413 - RNA, 19 nt, Human
gcccucccucccagcccca

SEQ ID NO: 173414 - RNA, 32 nt, Human
gcccucccuccccagguccuuccuacccuccc

SEQ ID NO: 173415 - RNA, 32 nt, Human
gcccucccuccccugcugggucucuccaaccc

SEQ ID NO: 173416 - RNA, 16 nt, Human
gcccucccuccgcucc

SEQ ID NO: 173417 - RNA, 32 nt, Human
gcccucccucgcccgcgccucuccuuaguccu

SEQ ID NO: 173418 - RNA, 23 nt, Human
gcccucccucuaaauaccuaccc

SEQ ID NO: 173419 - RNA, 32 nt, Human
gcccucccucucauucccauccuuccugguac

SEQ ID NO: 173420 - RNA, 32 nt, Human
gcccucccugagggcccugcaugcuugugccu

SEQ ID NO: 173421 - RNA, 32 nt, Human
gcccucccugcaauugggcagcuccccuggaa

SEQ ID NO: 173422 - RNA, 32 nt, Human
gcccucccugcuccccauaacagaccccuccc

SEQ ID NO: 173423 - RNA, 32 nt, Human
gcccucccuggcucccugucccugggcucagc

SEQ ID NO: 173424 - RNA, 32 nt, Human
gcccucccugucucccccacuuccuggccagg

SEQ ID NO: 173425 - RNA, 32 nt, Human
gcccucccuugaccaucuccuagcauuccuua

SEQ ID NO: 173426 - RNA, 22 nt, Human
gcccucccuuggaaaccugccc

SEQ ID NO: 173427 - RNA, 32 nt, Human
gcccucccuugguuccagucucucuucucucu

SEQ ID NO: 173428 - RNA, 32 nt, Human
gcccuccgaccccucacuuugugccuuuagua

SEQ ID NO: 173429 - RNA, 23 nt, Human
gcccuccgagucgagccucugcc

SEQ ID NO: 173430 - RNA, 32 nt, Human
gcccuccgcacccucugcccucugccuggcag

SEQ ID NO: 173431 - RNA, 32 nt, Human
gcccuccgcaggccgggccuccugggcgcccc

SEQ ID NO: 173432 - RNA, 32 nt, Human
gcccuccgcaucuuacccucccuuucucuuuc

SEQ ID NO: 173433 - RNA, 32 nt, Human
gcccuccgcucccuccgggguggcgcgcccgg

SEQ ID NO: 173434 - RNA, 32 nt, Human
gcccuccggcucccccucccccuccucccugc

SEQ ID NO: 173435 - RNA, 32 nt, Human
gcccuccguggccucuugccccuuggacuccu

SEQ ID NO: 173436 - RNA, 32 nt, Human
gcccuccguucccugucagcauuauccccugg

SEQ ID NO: 173437 - RNA, 20 nt, Human
gcccuccuaaaugucagcug

SEQ ID NO: 173438 - RNA, 32 nt, Human
gcccuccuacucuccccucccugcuccuucgc

SEQ ID NO: 173439 - RNA, 18 nt, Human
gcccuccuaucccuucca

SEQ ID NO: 173440 - RNA, 22 nt, Human
gcccuccuaugggcuccaguga

SEQ ID NO: 173441 - RNA, 20 nt, Human
gcccuccucacccucaggga

SEQ ID NO: 173442 - RNA, 32 nt, Human
gcccuccuccacccccucucccaucacccucc

SEQ ID NO: 173443 - RNA, 32 nt, Human
gcccuccuccacucccuuuuuguaacucccuu

SEQ ID NO: 173444 - RNA, 32 nt, Human
gcccuccuccagggcccucugggguuggggug

SEQ ID NO: 173445 - RNA, 32 nt, Human
gcccuccuccauggcccugcuggggugcagga

SEQ ID NO: 173446 - RNA, 32 nt, Human
gcccuccucccugaggaauguugcaggugcug

SEQ ID NO: 173447 - RNA, 31 nt, Human
gcccuccuccucccugggccuucaccgcacc

SEQ ID NO: 173448 - RNA, 22 nt, Human
gcccuccuccucuuccuccucu

SEQ ID NO: 173449 - RNA, 32 nt, Human
gcccuccucucagaccuaaggccgggcuccac

SEQ ID NO: 173450 - RNA, 32 nt, Human
gcccuccucucccacuuccucuuccauacccc

SEQ ID NO: 173451 - RNA, 32 nt, Human
gcccuccucucccauugucccucugccccauc

SEQ ID NO: 173452 - RNA, 32 nt, Human
gcccuccucuguguggagucucucgccggacc

SEQ ID NO: 173453 - RNA, 32 nt, Human
gcccuccucuucacugccuccaccugcucccg

SEQ ID NO: 173454 - RNA, 20 nt, Human
gcccuccugaccccugguag

SEQ ID NO: 173455 - RNA, 32 nt, Human
gcccuccugagccuccgccuucccagcagcgg

SEQ ID NO: 173456 - RNA, 32 nt, Human
gcccuccugauccuccugucauuccucacauc

SEQ ID NO: 173457 - RNA, 32 nt, Human
gcccuccugauucuuggcuggcccagggauga

SEQ ID NO: 173458 - RNA, 24 nt, Human
gcccuccugcaccgccuccuccac

SEQ ID NO: 173459 - RNA, 32 nt, Human
gcccuccugccacccuuccccuuguagauacu

SEQ ID NO: 173460 - RNA, 21 nt, Human
gcccuccugcccagcugcucu

SEQ ID NO: 173461 - RNA, 24 nt, Human
gcccuccugcccgcccucccuccu

SEQ ID NO: 173462 - RNA, 19 nt, Human
gcccuccugccucucccuu

SEQ ID NO: 173463 - RNA, 32 nt, Human
gcccuccuggaaucugcugcaguggcuaccuc

SEQ ID NO: 173464 - RNA, 32 nt, Human
gcccuccuggaaucuugaggcacugugaaauu

SEQ ID NO: 173465 - RNA, 22 nt, Human
gcccuccuggagaaccgggaca

SEQ ID NO: 173466 - RNA, 32 nt, Human
gcccuccuggagcucaggaggccgaggcugcc

SEQ ID NO: 173467 - RNA, 24 nt, Human
gcccuccuggccagcagagugggg

SEQ ID NO: 173468 - RNA, 32 nt, Human
gcccuccuggggacuuggaaucagucggcagu

SEQ ID NO: 173469 - RNA, 32 nt, Human
gcccuccuggguggacguggaggcuucagaaa

SEQ ID NO: 173470 - RNA, 32 nt, Human
gcccuccugguaccagcccucaguguggaggc

SEQ ID NO: 173471 - RNA, 21 nt, Human
gcccuccuggugcagggccga

SEQ ID NO: 173472 - RNA, 32 nt, Human
gcccuccugguucacaaagagcauuaagaaag

SEQ ID NO: 173473 - RNA, 32 nt, Human
gcccuccuguccagcuggaggaggcuucaagg

SEQ ID NO: 173474 - RNA, 32 nt, Human
gcccuccugugucucaggcccguuuuccccca

SEQ ID NO: 173475 - RNA, 31 nt, Human
gcccuccuguuucucccuugccuggaaguca

SEQ ID NO: 173476 - RNA, 27 nt, Human
gcccuccuuagccucccaauccucucu

SEQ ID NO: 173477 - RNA, 32 nt, Human
gcccuccuucuccuggcagcaggcccagcuga

SEQ ID NO: 173478 - RNA, 30 nt, Human
gcccucgacaagaccacacuuugggacuug

SEQ ID NO: 173479 - RNA, 18 nt, Human
gcccucgaggagcggcug

SEQ ID NO: 173480 - RNA, 32 nt, Human
gcccucgauuccuuucccaccaccccacaggc

SEQ ID NO: 173481 - RNA, 32 nt, Human
gcccucgcacagaucccagcugggucacccgc

SEQ ID NO: 173482 - RNA, 32 nt, Human
gcccucgccccgccaugcuccugcugcugggg

SEQ ID NO: 173483 - RNA, 32 nt, Human
gcccucgccgccgccucucguccgguccuggc

SEQ ID NO: 173484 - RNA, 32 nt, Human
gcccucgcugugcaggccaggaugccucuccc

SEQ ID NO: 173485 - RNA, 24 nt, Human
gcccucggaaccagagccuggagu

SEQ ID NO: 173486 - RNA, 32 nt, Human
gcccucggacuucaucucauugcucagcgcgg

SEQ ID NO: 173487 - RNA, 32 nt, Human
gcccucggccauugaacacugcacccuccaca

SEQ ID NO: 173488 - RNA, 19 nt, Human
gcccucggcgccccgcuga

SEQ ID NO: 173489 - RNA, 19 nt, Human
gcccucggcgccgccgccu

SEQ ID NO: 173490 - RNA, 32 nt, Human
gcccucggcugccucuuaacuuuggguugacu

SEQ ID NO: 173491 - RNA, 32 nt, Human
gcccucgggaccccuccccaccuaacugcacu

SEQ ID NO: 173492 - RNA, 32 nt, Human
gcccucgggaguccgcaucucagcccccagga

SEQ ID NO: 173493 - RNA, 32 nt, Human
gcccucggggugcgaggcggcagcagggccgu

SEQ ID NO: 173494 - RNA, 18 nt, Human
gcccucggguggaagcug

SEQ ID NO: 173495 - RNA, 16 nt, Human
gcccucguccccugcc

SEQ ID NO: 173496 - RNA, 32 nt, Human
gcccucguccuggggacguggaggguggcacg

SEQ ID NO: 173497 - RNA, 32 nt, Human
gcccucgucugccucuccaggauuguauguuu

SEQ ID NO: 173498 - RNA, 32 nt, Human
gcccucuaagggguggcggggaagggaggagg

SEQ ID NO: 173499 - RNA, 32 nt, Human
gcccucuacacugcaagcugcauuccagccac

SEQ ID NO: 173500 - RNA, 32 nt, Human
gcccucuacagccugacuuucucuccagcggu

SEQ ID NO: 173501 - RNA, 32 nt, Human
gcccucuacccuugggccaccugcugcccaag

SEQ ID NO: 173502 - RNA, 31 nt, Human
gcccucuauaaagacuuccuguugaggugaa

SEQ ID NO: 173503 - RNA, 32 nt, Human
gcccucucaccugguucccccuugccagccua

SEQ ID NO: 173504 - RNA, 32 nt, Human
gcccucucaggagcagucuuccaucaugcuga

SEQ ID NO: 173505 - RNA, 32 nt, Human
gcccucucauuuccucccuccuuggggcuucu

SEQ ID NO: 173506 - RNA, 32 nt, Human
gcccucuccaaacuggcuggggcugcugggag

SEQ ID NO: 173507 - RNA, 23 nt, Human
gcccucuccaaaucaaggaucuu

SEQ ID NO: 173508 - RNA, 32 nt, Human
gcccucuccacacccaugacugccccuugcuu

SEQ ID NO: 173509 - RNA, 32 nt, Human
gcccucuccaccacugcguucccucggcuaag

SEQ ID NO: 173510 - RNA, 21 nt, Human
gcccucuccacccagaggucu

SEQ ID NO: 173511 - RNA, 21 nt, Human
gcccucuccaccugugggucu

SEQ ID NO: 173512 - RNA, 32 nt, Human
gcccucuccagccucagggccucuucuggaaa

SEQ ID NO: 173513 - RNA, 32 nt, Human
gcccucuccagccuccggcucagccggcucau

SEQ ID NO: 173514 - RNA, 32 nt, Human
gcccucuccagggaagaacccagagggagagc

SEQ ID NO: 173515 - RNA, 32 nt, Human
gcccucuccaucuucaaagccaguaagagcau

SEQ ID NO: 173516 - RNA, 32 nt, Human
gcccucucccacccucuuccuacuggucucuc

SEQ ID NO: 173517 - RNA, 20 nt, Human
gcccucucccagccuugccu

SEQ ID NO: 173518 - RNA, 32 nt, Human
gcccucuccccugccucucucucccauuagaa

SEQ ID NO: 173519 - RNA, 21 nt, Human
gcccucucccugaggagguuu

SEQ ID NO: 173520 - RNA, 32 nt, Human
gcccucuccuacuuugaucaccauuucucucc

SEQ ID NO: 173521 - RNA, 32 nt, Human
gcccucuccuccaaccuccccuuucauagaag

SEQ ID NO: 173522 - RNA, 32 nt, Human
gcccucuccugccucaugcuuguugcuguccu

SEQ ID NO: 173523 - RNA, 32 nt, Human
gcccucuccuuccccgaacacagcacacgguc

SEQ ID NO: 173524 - RNA, 32 nt, Human
gcccucucgccaggcuggaguguaguggcaca

SEQ ID NO: 173525 - RNA, 23 nt, Human
gcccucucgcgcugcacugucuc

SEQ ID NO: 173526 - RNA, 32 nt, Human
gcccucucgcuccugcucacacagucacccuc

SEQ ID NO: 173527 - RNA, 32 nt, Human
gcccucucuaacucuccuuuacacugcaauga

SEQ ID NO: 173528 - RNA, 32 nt, Human
gcccucucuccucccugccuccugacccucag

SEQ ID NO: 173529 - RNA, 32 nt, Human
gcccucucuccuccugaacucucucaucugca

SEQ ID NO: 173530 - RNA, 32 nt, Human
gcccucucugcucgcccugccuagcuugagga

SEQ ID NO: 173531 - RNA, 15 nt, Human
gcccucucugcugcc

SEQ ID NO: 173532 - RNA, 32 nt, Human
gcccucucuguggcgccggcugcuucuggagc

SEQ ID NO: 173533 - RNA, 18 nt, Human
gcccucucuguuugaacc

SEQ ID NO: 173534 - RNA, 32 nt, Human
gcccucucuugacuccagccuagggaaugguu

SEQ ID NO: 173535 - RNA, 32 nt, Human
gcccucugacuuccuuucuuccccaucaacug

SEQ ID NO: 173536 - RNA, 32 nt, Human
gcccucugacuucuugcccuuuggaaauggug

SEQ ID NO: 173537 - RNA, 32 nt, Human
gcccucugagauacugauuauuuuagguucuu

SEQ ID NO: 173538 - RNA, 32 nt, Human
gcccucugagccuuuugagucugggcccuggu

SEQ ID NO: 173539 - RNA, 32 nt, Human
gcccucugauagaagugggagaacaaggguuu

SEQ ID NO: 173540 - RNA, 32 nt, Human
gcccucugcagaccccucccagccgcagcacc

SEQ ID NO: 173541 - RNA, 16 nt, Human
gcccucugcccaggug

SEQ ID NO: 173542 - RNA, 22 nt, Human
gcccucugccccccucagaggg

SEQ ID NO: 173543 - RNA, 21 nt, Human
gcccucugcccccucagcccc

SEQ ID NO: 173544 - RNA, 22 nt, Human
gcccucugccccugugucccca

SEQ ID NO: 173545 - RNA, 22 nt, Human
gcccucugcuaaagcccgggca

SEQ ID NO: 173546 - RNA, 21 nt, Human
gcccucugcugcccugccaga

SEQ ID NO: 173547 - RNA, 32 nt, Human
gcccucugcugucugcugagaugccaggcuag

SEQ ID NO: 173548 - RNA, 32 nt, Human
gcccucuggaaagaaaaggacagacccugugc

SEQ ID NO: 173549 - RNA, 32 nt, Human
gcccucuggacuccuuucuccuuuucuuuccu

SEQ ID NO: 173550 - RNA, 32 nt, Human
gcccucuggccuuuugcagcugauccagagga

SEQ ID NO: 173551 - RNA, 32 nt, Human
gcccucuggcgccaugucgcagaacggagcgc

SEQ ID NO: 173552 - RNA, 32 nt, Human
gcccucugggcccuggcuguaccgaggccgca

SEQ ID NO: 173553 - RNA, 32 nt, Human
gcccucugggcuuggguaggggccuuggacua

SEQ ID NO: 173554 - RNA, 32 nt, Human
gcccucuggggaccccagaguccuguucugcu

SEQ ID NO: 173555 - RNA, 32 nt, Human
gcccucuggucugccgugcaucucccugugcc

SEQ ID NO: 173556 - RNA, 17 nt, Human
gcccucuguccuccagg

SEQ ID NO: 173557 - RNA, 32 nt, Human
gcccucugugccaccagggagugccuauacau

SEQ ID NO: 173558 - RNA, 32 nt, Human
gcccucugugggcuucuggguaugggugagug

SEQ ID NO: 173559 - RNA, 31 nt, Human
gcccucuguguuuguccuugccacagucacg

SEQ ID NO: 173560 - RNA, 20 nt, Human
gcccucuuccuccuuccucu

SEQ ID NO: 173561 - RNA, 22 nt, Human
gcccucuucugcccugcgugcc

SEQ ID NO: 173562 - RNA, 32 nt, Human
gcccucuugauguggugaggcaggcuuuguuu

SEQ ID NO: 173563 - RNA, 32 nt, Human
gcccucuugcacccucugugcccugugggacc

SEQ ID NO: 173564 - RNA, 32 nt, Human
gcccucuugccugagcaaucugacgcagaggc

SEQ ID NO: 173565 - RNA, 32 nt, Human
gcccucuugccugggcucuguggaagugaggu

SEQ ID NO: 173566 - RNA, 32 nt, Human
gcccucuugucucugcugacuucagccugguc

SEQ ID NO: 173567 - RNA, 32 nt, Human
gcccucuuuccaccaccccuugcucagcaugu

SEQ ID NO: 173568 - RNA, 23 nt, Human
gcccucuuuccccacugggcguc

SEQ ID NO: 173569 - RNA, 21 nt, Human
gcccucuuucucugugggucu

SEQ ID NO: 173570 - RNA, 18 nt, Human
gcccucuuugguccuccu

SEQ ID NO: 173571 - RNA, 32 nt, Human
gcccugaaagucgagguugcagugagccuuga

SEQ ID NO: 173572 - RNA, 32 nt, Human
gcccugaaauaacauuagugcuuacucauugc

SEQ ID NO: 173573 - RNA, 32 nt, Human
gcccugaaaugaggggacccugacuggagagg

SEQ ID NO: 173574 - RNA, 32 nt, Human
gcccugaaauuacuggguucucagggagaugc

SEQ ID NO: 173575 - RNA, 32 nt, Human
gcccugaaccagcucugacccaggaagaagac

SEQ ID NO: 173576 - RNA, 32 nt, Human
gcccugaacuccuggccucaagcaauccuccc

SEQ ID NO: 173577 - RNA, 32 nt, Human
gcccugaacucuugagacaacucucuccagca

SEQ ID NO: 173578 - RNA, 32 nt, Human
gcccugaagaccaacaccagcccgugggcugc

SEQ ID NO: 173579 - RNA, 32 nt, Human
gcccugaagacgguuccagccuuguccuuccu

SEQ ID NO: 173580 - RNA, 32 nt, Human
gcccugaagcagcuguaguggaggagaggccu

SEQ ID NO: 173581 - RNA, 32 nt, Human
gcccugaaggaagaccugggcccagugcccuc

SEQ ID NO: 173582 - RNA, 32 nt, Human
gcccugaaggcagaguccagggaccuugaccc

SEQ ID NO: 173583 - RNA, 32 nt, Human
gcccugaagggcccggaccucggcgagcccac

SEQ ID NO: 173584 - RNA, 22 nt, Human
gcccugaagggggcuggauggg

SEQ ID NO: 173585 - RNA, 21 nt, Human
gcccugaagugccggccgcgg

SEQ ID NO: 173586 - RNA, 32 nt, Human
gcccugacaaagcaguuggauuuggcaugugu

SEQ ID NO: 173587 - RNA, 32 nt, Human
gcccugacacugauugcugugaguuccugcau

SEQ ID NO: 173588 - RNA, 27 nt, Human
gcccugaccaccagagugcccaaaaca

SEQ ID NO: 173589 - RNA, 16 nt, Human
gcccugaccaccagcu

SEQ ID NO: 173590 - RNA, 32 nt, Human
gcccugaccacuucugugccaguugucuaagc

SEQ ID NO: 173591 - RNA, 32 nt, Human
gcccugaccauaauaaagaagacuucaucauu

SEQ ID NO: 173592 - RNA, 20 nt, Human
gcccugacccaauaaaggcu

SEQ ID NO: 173593 - RNA, 32 nt, Human
gcccugaccccugccauucugccuuguuguga

SEQ ID NO: 173594 - RNA, 17 nt, Human
gcccugacgcccaccuc

SEQ ID NO: 173595 - RNA, 23 nt, Human
gcccugacuggaguucaguggug

SEQ ID NO: 173596 - RNA, 24 nt, Human
gcccugacuuagaagaagugggug

SEQ ID NO: 173597 - RNA, 32 nt, Human
gcccugagaaaagccauuguggagccaacucc

SEQ ID NO: 173598 - RNA, 32 nt, Human
gcccugagaaagaacuuaaagagcuaggagga

SEQ ID NO: 173599 - RNA, 32 nt, Human
gcccugagaacugcaccucauuuucuuuaucc

SEQ ID NO: 173600 - RNA, 32 nt, Human
gcccugagacuguggaugagggggcuaggcuc

SEQ ID NO: 173601 - RNA, 32 nt, Human
gcccugagacuucuuucucuccuugccuccac

SEQ ID NO: 173602 - RNA, 32 nt, Human
gcccugagagaggagcgugccacccaccaggg

SEQ ID NO: 173603 - RNA, 32 nt, Human
gcccugagagugaggucaagaucaagaggcgg

SEQ ID NO: 173604 - RNA, 32 nt, Human
gcccugagauguuacaguugaagagcuugguu

SEQ ID NO: 173605 - RNA, 19 nt, Human
gcccugagcagagcagcca

SEQ ID NO: 173606 - RNA, 32 nt, Human
gcccugagccucgagcugcucucugucacugu

SEQ ID NO: 173607 - RNA, 32 nt, Human
gcccugagccuuggugugcuguauccauccau

SEQ ID NO: 173608 - RNA, 32 nt, Human
gcccugagcuugguagaggaguccccugccuc

SEQ ID NO: 173609 - RNA, 32 nt, Human
gcccugaggaagaagaaaauccucagcaaagu

SEQ ID NO: 173610 - RNA, 32 nt, Human
gcccugaggagaaggcugaagacugaggaauc

SEQ ID NO: 173611 - RNA, 32 nt, Human
gcccugaggcagccucugccuaccuagaucug

SEQ ID NO: 173612 - RNA, 32 nt, Human
gcccugaggccccuccugccuggcccugcucc

SEQ ID NO: 173613 - RNA, 22 nt, Human
gcccugaggcugggcacagugg

SEQ ID NO: 173614 - RNA, 32 nt, Human
gcccugaggcuguaggcauggcccagaccugc

SEQ ID NO: 173615 - RNA, 32 nt, Human
gcccugaggggugugcccugaagaggagggug

SEQ ID NO: 173616 - RNA, 32 nt, Human
gcccugagggugggaaagcaagggaugacuga

SEQ ID NO: 173617 - RNA, 32 nt, Human
gcccugaggucagcucccaggucggucgugcu

SEQ ID NO: 173618 - RNA, 32 nt, Human
gcccugagucacccugagauagagauucccag

SEQ ID NO: 173619 - RNA, 32 nt, Human
gcccugagucuaagcaaaagcccauggguugg

SEQ ID NO: 173620 - RNA, 24 nt, Human
gcccugagucugcuggggaguggg

SEQ ID NO: 173621 - RNA, 32 nt, Human
gcccugaguguccagaucuggccaaggugucu

SEQ ID NO: 173622 - RNA, 32 nt, Human
gcccugaguguggcuaggaagggggugcuggg

SEQ ID NO: 173623 - RNA, 20 nt, Human
gcccugauaccauucuguaa

SEQ ID NO: 173624 - RNA, 23 nt, Human
gcccugaucacaaacaccugccu

SEQ ID NO: 173625 - RNA, 32 nt, Human
gcccugauccaaauguuagcacuugcuaguga

SEQ ID NO: 173626 - RNA, 20 nt, Human
gcccugaucuagugcaguaa

SEQ ID NO: 173627 - RNA, 32 nt, Human
gcccugaucugacuuccagccuccagaacuau

SEQ ID NO: 173628 - RNA, 21 nt, Human
gcccugaugacccacccgccc

SEQ ID NO: 173629 - RNA, 31 nt, Human
gcccugaugauuugggguucaacugaaaagg

SEQ ID NO: 173630 - RNA, 20 nt, Human
gcccugaugcagacauccag

SEQ ID NO: 173631 - RNA, 17 nt, Human
gcccugaugcugcugcc

SEQ ID NO: 173632 - RNA, 20 nt, Human
gcccugcaaagcaaaggcuc

SEQ ID NO: 173633 - RNA, 21 nt, Human
gcccugcaaagcaaaguccca

SEQ ID NO: 173634 - RNA, 18 nt, Human
gcccugcaaccccagcgg

SEQ ID NO: 173635 - RNA, 32 nt, Human
gcccugcaagcagaauaagcugacccucccca

SEQ ID NO: 173636 - RNA, 32 nt, Human
gcccugcaaguuggcugucuaugagcauuuag

SEQ ID NO: 173637 - RNA, 32 nt, Human
gcccugcaaucggugggccacagugccggcca

SEQ ID NO: 173638 - RNA, 32 nt, Human
gcccugcacaaaccacaacagaaguugcacac

SEQ ID NO: 173639 - RNA, 32 nt, Human
gcccugcacaaccccauuaagccugggcaauc

SEQ ID NO: 173640 - RNA, 32 nt, Human
gcccugcacccacucagagccucagcccuuca

SEQ ID NO: 173641 - RNA, 19 nt, Human
gcccugcaccccagagcuc

SEQ ID NO: 173642 - RNA, 32 nt, Human
gcccugcaccgacuccagcccagccccugcuc

SEQ ID NO: 173643 - RNA, 32 nt, Human
gcccugcaccucagggcuuuggauccaggucu

SEQ ID NO: 173644 - RNA, 32 nt, Human
gcccugcaccugcagccagcuggccucgggcu

SEQ ID NO: 173645 - RNA, 19 nt, Human
gcccugcaccugccuagcu

SEQ ID NO: 173646 - RNA, 19 nt, Human
gcccugcacuccaaggcuc

SEQ ID NO: 173647 - RNA, 32 nt, Human
gcccugcacucugcccucuuugcccaggauac

SEQ ID NO: 173648 - RNA, 32 nt, Human
gcccugcagagggagauggcagagaggaaggc

SEQ ID NO: 173649 - RNA, 32 nt, Human
gcccugcagaucugcugcuuuuccugauucuc

SEQ ID NO: 173650 - RNA, 32 nt, Human
gcccugcagcaaggaggaagaggacucaaaag

SEQ ID NO: 173651 - RNA, 32 nt, Human
gcccugcagccccaccauccacacuacaugau

SEQ ID NO: 173652 - RNA, 32 nt, Human
gcccugcagcuauuucuaggcauuucagaggg

SEQ ID NO: 173653 - RNA, 32 nt, Human
gcccugcagcuggcgggagaggugucuggugg

SEQ ID NO: 173654 - RNA, 31 nt, Human
gcccugcagcuucagcaccugccccacccag

SEQ ID NO: 173655 - RNA, 32 nt, Human
gcccugcagcuucagcaccugccccacccaga

SEQ ID NO: 173656 - RNA, 32 nt, Human
gcccugcagcuuuaacagagugaaccaugugu

SEQ ID NO: 173657 - RNA, 23 nt, Human
gcccugcaggccaagacccggag

SEQ ID NO: 173658 - RNA, 32 nt, Human
gcccugcagggacggugcaggcugguuggguu

SEQ ID NO: 173659 - RNA, 32 nt, Human
gcccugcagggugagccggcacaacagccccu

SEQ ID NO: 173660 - RNA, 32 nt, Human
gcccugcaggucccacacucucccaggcccua

SEQ ID NO: 173661 - RNA, 32 nt, Human
gcccugcagugucugcucacugcugccaucuu

SEQ ID NO: 173662 - RNA, 32 nt, Human
gcccugcaguuucagacuggagggcgguggac

SEQ ID NO: 173663 - RNA, 32 nt, Human
gcccugcauggauuuuccuccuuccuaugcua

SEQ ID NO: 173664 - RNA, 32 nt, Human
gcccugccaauaccuugauugcaaccugguga

SEQ ID NO: 173665 - RNA, 18 nt, Human
gcccugccacagccccca

SEQ ID NO: 173666 - RNA, 18 nt, Human
gcccugccacagcccucc

SEQ ID NO: 173667 - RNA, 21 nt, Human
gcccugccacccucugcuguc

SEQ ID NO: 173668 - RNA, 32 nt, Human
gcccugccaccuggcaggaggcccacucacug

SEQ ID NO: 173669 - RNA, 32 nt, Human
gcccugccaccugggcccaccuccucucacug

SEQ ID NO: 173670 - RNA, 32 nt, Human
gcccugccaccugggucccagccugcuccucg

SEQ ID NO: 173671 - RNA, 32 nt, Human
gcccugccacugacccuccugucccucucaua

SEQ ID NO: 173672 - RNA, 22 nt, Human
gcccugccacugccccggcgug

SEQ ID NO: 173673 - RNA, 32 nt, Human
gcccugccagcugcagccugguuggcagcauc

SEQ ID NO: 173674 - RNA, 32 nt, Human
gcccugccaggggugcuguuucaggcugggca

SEQ ID NO: 173675 - RNA, 32 nt, Human
gcccugccaucccgucugccugccaugggacg

SEQ ID NO: 173676 - RNA, 32 nt, Human
gcccugccaucuuugucacagccucuguccag

SEQ ID NO: 173677 - RNA, 32 nt, Human
gcccugccaugguggucuguuucccccagacu

SEQ ID NO: 173678 - RNA, 24 nt, Human
gcccugccauguccccacucaccc

SEQ ID NO: 173679 - RNA, 17 nt, Human
gcccugcccaccccucc

SEQ ID NO: 173680 - RNA, 32 nt, Human
gcccugcccagccccggaacucugcgcgauau

SEQ ID NO: 173681 - RNA, 23 nt, Human
gcccugcccagcucaggccccuu

SEQ ID NO: 173682 - RNA, 18 nt, Human
gcccugcccaucgcauca

SEQ ID NO: 173683 - RNA, 32 nt, Human
gcccugcccauggcugugcagcucccuccgug

SEQ ID NO: 173684 - RNA, 32 nt, Human
gcccugccccacacccaccuccuguguuucug

SEQ ID NO: 173685 - RNA, 23 nt, Human
gcccugccccacccaacuccaca

SEQ ID NO: 173686 - RNA, 24 nt, Human
gcccugccccacuugucccuggga

SEQ ID NO: 173687 - RNA, 15 nt, Human
gcccugccccaggga

SEQ ID NO: 173688 - RNA, 32 nt, Human
gcccugccccaggucggccaucuaucaaaagc

SEQ ID NO: 173689 - RNA, 15 nt, Human
gcccugccccgggau

SEQ ID NO: 173690 - RNA, 18 nt, Human
gcccugccccucucccca

SEQ ID NO: 173691 - RNA, 32 nt, Human
gcccugccccuuggcccugccccuguccccgg

SEQ ID NO: 173692 - RNA, 32 nt, Human
gcccugcccuacccucuccucugaccuccacu

SEQ ID NO: 173693 - RNA, 21 nt, Human
gcccugcccuccagccacagc

SEQ ID NO: 173694 - RNA, 32 nt, Human
gcccugcccucccaggaguccagccaggggcu

SEQ ID NO: 173695 - RNA, 32 nt, Human
gcccugcccugagcugaguccuuucccuggga

SEQ ID NO: 173696 - RNA, 32 nt, Human
gcccugcccugccuagccucugcuacucccac

SEQ ID NO: 173697 - RNA, 32 nt, Human
gcccugcccugcuggcuuccugacuggagaga

SEQ ID NO: 173698 - RNA, 32 nt, Human
gcccugcccuggaagacuggagggaggcccca

SEQ ID NO: 173699 - RNA, 32 nt, Human
gcccugcccuucuccguuccagccuggacaga

SEQ ID NO: 173700 - RNA, 32 nt, Human
gcccugcccuuggauuugagaucauguccauc

SEQ ID NO: 173701 - RNA, 32 nt, Human
gcccugccgcccaggcuagagugcaguggcac

SEQ ID NO: 173702 - RNA, 20 nt, Human
gcccugccgccgccccgcag

SEQ ID NO: 173703 - RNA, 19 nt, Human
gcccugccgccgccgccgc

SEQ ID NO: 173704 - RNA, 32 nt, Human
gcccugccgggcuauuuuuacgcgcggacacc

SEQ ID NO: 173705 - RNA, 32 nt, Human
gcccugccuagagaagggccucucccccaacc

SEQ ID NO: 173706 - RNA, 32 nt, Human
gcccugccucagccaggcccugagauggggga

SEQ ID NO: 173707 - RNA, 32 nt, Human
gcccugccucagcugcugccugccagaggcgu

SEQ ID NO: 173708 - RNA, 32 nt, Human
gcccugccuccaccccuccagcccauccagca

SEQ ID NO: 173709 - RNA, 32 nt, Human
gcccugccuccagcccucaccucucucacccc

SEQ ID NO: 173710 - RNA, 32 nt, Human
gcccugccuccagggcuccugggcugccaggg

SEQ ID NO: 173711 - RNA, 32 nt, Human
gcccugccucccaagaggcugcuguggauggc

SEQ ID NO: 173712 - RNA, 32 nt, Human
gcccugccuccccuuucaccauguuuccucug

SEQ ID NO: 173713 - RNA, 32 nt, Human
gcccugccuccuuaggccaggacgccugagcu

SEQ ID NO: 173714 - RNA, 32 nt, Human
gcccugccucuaggaagccucagcucuggaca

SEQ ID NO: 173715 - RNA, 32 nt, Human
gcccugccucuucucccucuauugggacuggu

SEQ ID NO: 173716 - RNA, 32 nt, Human
gcccugccugccacccuaggcagggaaagcug

SEQ ID NO: 173717 - RNA, 21 nt, Human
gcccugccugccaggucccuu

SEQ ID NO: 173718 - RNA, 32 nt, Human
gcccugccugccugcugccccucccagccugc

SEQ ID NO: 173719 - RNA, 32 nt, Human
gcccugccugcucugagggccacagccugugc

SEQ ID NO: 173720 - RNA, 32 nt, Human
gcccugccuggccucauccuuguauuuaauua

SEQ ID NO: 173721 - RNA, 32 nt, Human
gcccugccugucucacaggccugcugugaagg

SEQ ID NO: 173722 - RNA, 32 nt, Human
gcccugccuguucccuguccauccaggccagc

SEQ ID NO: 173723 - RNA, 32 nt, Human
gcccugcgccaccauuccgauggcucugucag

SEQ ID NO: 173724 - RNA, 18 nt, Human
gcccugcgcgcucaggga

SEQ ID NO: 173725 - RNA, 32 nt, Human
gcccugcgcuccuccacagccugggccgggcc

SEQ ID NO: 173726 - RNA, 32 nt, Human
gcccugcggaaccagagccucaggcugggaug

SEQ ID NO: 173727 - RNA, 32 nt, Human
gcccugcggccaggccuggugccaugagccgg

SEQ ID NO: 173728 - RNA, 32 nt, Human
gcccugcgggaggaccauucacugugagaaaa

SEQ ID NO: 173729 - RNA, 32 nt, Human
gcccugcguccucagggaaggcagaagggcag

SEQ ID NO: 173730 - RNA, 32 nt, Human
gcccugcgugccugcugcuggccgggcacccc

SEQ ID NO: 173731 - RNA, 32 nt, Human
gcccugcguuuaaaggaauugucuuuucuugc

SEQ ID NO: 173732 - RNA, 32 nt, Human
gcccugcuaccacauucacuguuugaaucuuu

SEQ ID NO: 173733 - RNA, 32 nt, Human
gcccugcuauuccucugcgugccuguaguguc

SEQ ID NO: 173734 - RNA, 32 nt, Human
gcccugcucaccuuucuuaccucucuggcccc

SEQ ID NO: 173735 - RNA, 32 nt, Human
gcccugcucacucucauugucuggccucagga

SEQ ID NO: 173736 - RNA, 32 nt, Human
gcccugcucaggggaggguggugcucguggcu

SEQ ID NO: 173737 - RNA, 32 nt, Human
gcccugcucaggggaugggaggcugcagggga

SEQ ID NO: 173738 - RNA, 32 nt, Human
gcccugcucauucccacucaccagcugagguc

SEQ ID NO: 173739 - RNA, 32 nt, Human
gcccugcucauuccucacgcccuucaaugcug

SEQ ID NO: 173740 - RNA, 32 nt, Human
gcccugcucauuucuuuacugccuuccugccu

SEQ ID NO: 173741 - RNA, 32 nt, Human
gcccugcuccacccccucuccccauuccuccg

SEQ ID NO: 173742 - RNA, 32 nt, Human
gcccugcuccaccccgccaugcccccuacuug

SEQ ID NO: 173743 - RNA, 32 nt, Human
gcccugcucccacucccuagaggcaggaaugg

SEQ ID NO: 173744 - RNA, 32 nt, Human
gcccugcucccaucuggcaccuucaagucagc

SEQ ID NO: 173745 - RNA, 32 nt, Human
gcccugcuccccacagggccaggcuggcaggg

SEQ ID NO: 173746 - RNA, 32 nt, Human
gcccugcucccccaaugaaaggccagcuucga

SEQ ID NO: 173747 - RNA, 22 nt, Human
gcccugcuccucucuguccucu

SEQ ID NO: 173748 - RNA, 32 nt, Human
gcccugcuccugggagcuggaagagcacuugg

SEQ ID NO: 173749 - RNA, 32 nt, Human
gcccugcuccuguuccgcgcagccucuccggc

SEQ ID NO: 173750 - RNA, 17 nt, Human
gcccugcucugcccagg

SEQ ID NO: 173751 - RNA, 19 nt, Human
gcccugcucugccuaagug

SEQ ID NO: 173752 - RNA, 32 nt, Human
gcccugcucuggggaugcacggcggcagggug

SEQ ID NO: 173753 - RNA, 32 nt, Human
gcccugcucuguccagggaggagcugccucag

SEQ ID NO: 173754 - RNA, 32 nt, Human
gcccugcucugugacagagccuggagacuugg

SEQ ID NO: 173755 - RNA, 32 nt, Human
gcccugcucuuccucaagcuccagaaccucuc

SEQ ID NO: 173756 - RNA, 32 nt, Human
gcccugcugagaguccucccuccugggcuccc

SEQ ID NO: 173757 - RNA, 18 nt, Human
gcccugcugcacagggug

SEQ ID NO: 173758 - RNA, 32 nt, Human
gcccugcugcacuccagccugggcaacagagg

SEQ ID NO: 173759 - RNA, 32 nt, Human
gcccugcugcacuccagccugggugacagagg

SEQ ID NO: 173760 - RNA, 20 nt, Human
gcccugcugcagcgcaacgg

SEQ ID NO: 173761 - RNA, 32 nt, Human
gcccugcugcagcuugaggcggcucggugccu

SEQ ID NO: 173762 - RNA, 32 nt, Human
gcccugcugcccaaucuccaucugucaacagg

SEQ ID NO: 173763 - RNA, 32 nt, Human
gcccugcugcccucccccuccucuccaccauc

SEQ ID NO: 173764 - RNA, 23 nt, Human
gcccugcugccgaccaggagcug

SEQ ID NO: 173765 - RNA, 32 nt, Human
gcccugcugccugucuggggauguguggccug

SEQ ID NO: 173766 - RNA, 32 nt, Human
gcccugcugcgagucacuccauuuaucuuaaa

SEQ ID NO: 173767 - RNA, 18 nt, Human
gcccugcugcucagagug

SEQ ID NO: 173768 - RNA, 16 nt, Human
gcccugcugcuccagg

SEQ ID NO: 173769 - RNA, 28 nt, Human
gcccugcugcucccauccccaccccaga

SEQ ID NO: 173770 - RNA, 24 nt, Human
gcccugcuggauccaccuccuaga

SEQ ID NO: 173771 - RNA, 21 nt, Human
gcccugcuggcagccccgaga

SEQ ID NO: 173772 - RNA, 32 nt, Human
gcccugcuguaaccucugucuuggcagggcug

SEQ ID NO: 173773 - RNA, 32 nt, Human
gcccugcuguaccccagccuucccaggacgug

SEQ ID NO: 173774 - RNA, 32 nt, Human
gcccugcugucaaccucuccuccaggcccugc

SEQ ID NO: 173775 - RNA, 32 nt, Human
gcccugcuguccugagcgucuccugggccaga

SEQ ID NO: 173776 - RNA, 32 nt, Human
gcccugcuuccuccuccacuccuggccgccuu

SEQ ID NO: 173777 - RNA, 32 nt, Human
gcccugcuucucugcuccccugggugaugggu

SEQ ID NO: 173778 - RNA, 32 nt, Human
gcccugcuugaaugucaugaacaggugugcug

SEQ ID NO: 173779 - RNA, 20 nt, Human
gcccugcuuugccccgggcu

SEQ ID NO: 173780 - RNA, 32 nt, Human
gcccugcuuuucucccuccccuuccuuccugc

SEQ ID NO: 173781 - RNA, 23 nt, Human
gcccuggaaaacggagcauggug

SEQ ID NO: 173782 - RNA, 32 nt, Human
gcccuggaagacuggagggaggccccaagcca

SEQ ID NO: 173783 - RNA, 19 nt, Human
gcccuggaaggaggggugg

SEQ ID NO: 173784 - RNA, 32 nt, Human
gcccuggaagugaaucagugaaucacacacca

SEQ ID NO: 173785 - RNA, 32 nt, Human
gcccuggaauggggcuccauggagaggugcau

SEQ ID NO: 173786 - RNA, 32 nt, Human
gcccuggacagaagccacauccugacuuccaa

SEQ ID NO: 173787 - RNA, 32 nt, Human
gcccuggaccgagggaaccuuaagucagaauu

SEQ ID NO: 173788 - RNA, 32 nt, Human
gcccuggaccuuucugagccaggcuggccaca

SEQ ID NO: 173789 - RNA, 32 nt, Human
gcccuggacuauucacccccuagucucaauuu

SEQ ID NO: 173790 - RNA, 32 nt, Human
gcccuggacuggccucacaggacaggaggcag

SEQ ID NO: 173791 - RNA, 24 nt, Human
gcccuggagaaggacagagcggug

SEQ ID NO: 173792 - RNA, 23 nt, Human
gcccuggagacagccguugggug

SEQ ID NO: 173793 - RNA, 18 nt, Human
gcccuggagacuuguggg

SEQ ID NO: 173794 - RNA, 23 nt, Human
gcccuggagagaaacaucaguca

SEQ ID NO: 173795 - RNA, 32 nt, Human
gcccuggagagggaaagcacuggucaacauca

SEQ ID NO: 173796 - RNA, 32 nt, Human
gcccuggagagucgcugggaugcacggugggc

SEQ ID NO: 173797 - RNA, 21 nt, Human
gcccuggagauggagugggcg

SEQ ID NO: 173798 - RNA, 19 nt, Human
gcccuggagcagggagugg

SEQ ID NO: 173799 - RNA, 20 nt, Human
gcccuggagccagcacaaga

SEQ ID NO: 173800 - RNA, 23 nt, Human
gcccuggagccgagcuucagcca

SEQ ID NO: 173801 - RNA, 21 nt, Human
gcccuggagcuggaggagugg

SEQ ID NO: 173802 - RNA, 20 nt, Human
gcccuggaggagaggaaggg

SEQ ID NO: 173803 - RNA, 19 nt, Human
gcccuggaggaggcagugg

SEQ ID NO: 173804 - RNA, 21 nt, Human
gcccuggaggaugagaaggug

SEQ ID NO: 173805 - RNA, 32 nt, Human
gcccuggaggcacggaaggcugugggguucca

SEQ ID NO: 173806 - RNA, 32 nt, Human
gcccuggaggcccagccacagagcaguagcca

SEQ ID NO: 173807 - RNA, 20 nt, Human
gcccuggaggcugagcuggg

SEQ ID NO: 173808 - RNA, 21 nt, Human
gcccuggaggcuuuugcuggg

SEQ ID NO: 173809 - RNA, 32 nt, Human
gcccuggagggaggggcagagcgguguggacu

SEQ ID NO: 173810 - RNA, 32 nt, Human
gcccuggagggcuccguaggucucagcaacag

SEQ ID NO: 173811 - RNA, 32 nt, Human
gcccuggagggcugcuaggugguucugagcag

SEQ ID NO: 173812 - RNA, 31 nt, Human
gcccuggaggggacuuccacaccuccugccu

SEQ ID NO: 173813 - RNA, 32 nt, Human
gcccuggaggggccugacaguggguuccuucc

SEQ ID NO: 173814 - RNA, 32 nt, Human
gcccuggaggucaaggcugcagugagccauga

SEQ ID NO: 173815 - RNA, 32 nt, Human
gcccuggaggucaaggcugcagugagucaaga

SEQ ID NO: 173816 - RNA, 32 nt, Human
gcccuggaggucgaggcuacagugagcuauga

SEQ ID NO: 173817 - RNA, 22 nt, Human
gcccuggagguuccagaguagg

SEQ ID NO: 173818 - RNA, 32 nt, Human
gcccuggagguugaggcugcagugagcuggga

SEQ ID NO: 173819 - RNA, 32 nt, Human
gcccuggaguaguggcccggggagaccugggc

SEQ ID NO: 173820 - RNA, 32 nt, Human
gcccuggagugaggaggaccgggagcuggcuc

SEQ ID NO: 173821 - RNA, 32 nt, Human
gcccuggagugggguuucuccuuguugaagaa

SEQ ID NO: 173822 - RNA, 32 nt, Human
gcccuggaguucaaggcugcagugagcuguga

SEQ ID NO: 173823 - RNA, 32 nt, Human
gcccuggaguucgauacugcagugagcuagga

SEQ ID NO: 173824 - RNA, 32 nt, Human
gcccuggaguuggagguugcagugagcagaga

SEQ ID NO: 173825 - RNA, 32 nt, Human
gcccuggaguuugaguccagccugggugacau

SEQ ID NO: 173826 - RNA, 32 nt, Human
gcccuggaguuugugagcuuggcucuaguccc

SEQ ID NO: 173827 - RNA, 20 nt, Human
gcccuggauacugccucaga

SEQ ID NO: 173828 - RNA, 32 nt, Human
gcccuggauccagucggcugcaccaggcgagc

SEQ ID NO: 173829 - RNA, 32 nt, Human
gcccuggaugaggaauccuacuccuaugaccc

SEQ ID NO: 173830 - RNA, 32 nt, Human
gcccuggaugaugacugucagggagguuaaac

SEQ ID NO: 173831 - RNA, 22 nt, Human
gcccuggaugccacccagugca

SEQ ID NO: 173832 - RNA, 24 nt, Human
gcccuggaugccugcaaccucaga

SEQ ID NO: 173833 - RNA, 32 nt, Human
gcccuggauggaggaggaaagaguuggaagcc

SEQ ID NO: 173834 - RNA, 28 nt, Human
gcccuggauggccccugagccagcccca

SEQ ID NO: 173835 - RNA, 21 nt, Human
gcccuggaugguagggcagca

SEQ ID NO: 173836 - RNA, 22 nt, Human
gcccuggauuggguagugggug

SEQ ID NO: 173837 - RNA, 20 nt, Human
gcccuggauuuccugcugcc

SEQ ID NO: 173838 - RNA, 22 nt, Human
gcccuggcacccucuguuccca

SEQ ID NO: 173839 - RNA, 23 nt, Human
gcccuggcaccuccaaccccaga

SEQ ID NO: 173840 - RNA, 23 nt, Human
gcccuggcaccucuaaccccaga

SEQ ID NO: 173841 - RNA, 18 nt, Human
gcccuggcagaagcucuu

SEQ ID NO: 173842 - RNA, 21 nt, Human
gcccuggcagccagcagggga

SEQ ID NO: 173843 - RNA, 24 nt, Human
gcccuggcagcccauggcaacuca

SEQ ID NO: 173844 - RNA, 32 nt, Human
gcccuggcaggcaggggcccugcagcucucau

SEQ ID NO: 173845 - RNA, 32 nt, Human
gcccuggccaaggaggaggcugaaagagccug

SEQ ID NO: 173846 - RNA, 22 nt, Human
gcccuggccacacggacucaga

SEQ ID NO: 173847 - RNA, 32 nt, Human
gcccuggccagacauguccacaggguucuccu

SEQ ID NO: 173848 - RNA, 19 nt, Human
gcccuggccagcccuuccu

SEQ ID NO: 173849 - RNA, 32 nt, Human
gcccuggccagcucccuguggccuuggaggac

SEQ ID NO: 173850 - RNA, 32 nt, Human
gcccuggcccagccccgauccagccugcgccu

SEQ ID NO: 173851 - RNA, 32 nt, Human
gcccuggcccagcucuggagugcaugugugug

SEQ ID NO: 173852 - RNA, 20 nt, Human
gcccuggcccuccagcaagg

SEQ ID NO: 173853 - RNA, 32 nt, Human
gcccuggcccuggccuugcuugcccauggugu

SEQ ID NO: 173854 - RNA, 17 nt, Human
gcccuggccuccacccc

SEQ ID NO: 173855 - RNA, 18 nt, Human
gcccuggccucugcucaa

SEQ ID NO: 173856 - RNA, 32 nt, Human
gcccuggccugggaggaggucauaccccaccg

SEQ ID NO: 173857 - RNA, 32 nt, Human
gcccuggccuuucacuccaguucugggugagg

SEQ ID NO: 173858 - RNA, 23 nt, Human
gcccuggcgccuucaaacccaga

SEQ ID NO: 173859 - RNA, 32 nt, Human
gcccuggcggcagagguugcagugagccaaga

SEQ ID NO: 173860 - RNA, 21 nt, Human
gcccuggcuaaugucucucag

SEQ ID NO: 173861 - RNA, 22 nt, Human
gcccuggcucacaccuguaauc

SEQ ID NO: 173862 - RNA, 32 nt, Human
gcccuggcucaggagcucauagauggaggagg

SEQ ID NO: 173863 - RNA, 32 nt, Human
gcccuggcuccuggucgggaagggagguggcc

SEQ ID NO: 173864 - RNA, 32 nt, Human
gcccuggcucugcuccuggguccucccgccau

SEQ ID NO: 173865 - RNA, 32 nt, Human
gcccuggcugaggccaaugcugugaagcucca

SEQ ID NO: 173866 - RNA, 20 nt, Human
gcccuggcuggagugcaaug

SEQ ID NO: 173867 - RNA, 21 nt, Human
gcccuggcuggagugcaaugg

SEQ ID NO: 173868 - RNA, 24 nt, Human
gcccuggcuggagugcaauggugu

SEQ ID NO: 173869 - RNA, 20 nt, Human
gcccuggcuggaguggaaug

SEQ ID NO: 173870 - RNA, 20 nt, Human
gcccuggcuggaguucagug

SEQ ID NO: 173871 - RNA, 21 nt, Human
gcccuggcuggaguucagugg

SEQ ID NO: 173872 - RNA, 24 nt, Human
gcccuggcuggaguucaguggugu

SEQ ID NO: 173873 - RNA, 32 nt, Human
gcccuggcuguccccucucccucaguccuucc

SEQ ID NO: 173874 - RNA, 32 nt, Human
gcccuggcuuucucccugucugguuucagugg

SEQ ID NO: 173875 - RNA, 22 nt, Human
gcccugggaaccaguccaaggg

SEQ ID NO: 173876 - RNA, 22 nt, Human
gcccugggaacgucccggagag

SEQ ID NO: 173877 - RNA, 30 nt, Human
gcccugggaagauucucccaccuccucccu

SEQ ID NO: 173878 - RNA, 21 nt, Human
gcccugggaagcccgcaagag

SEQ ID NO: 173879 - RNA, 32 nt, Human
gcccugggaaggagggguggggaacgacaugc

SEQ ID NO: 173880 - RNA, 21 nt, Human
gcccugggaaucaauuccuca

SEQ ID NO: 173881 - RNA, 22 nt, Human
gcccugggaaucagcaugggag

SEQ ID NO: 173882 - RNA, 30 nt, Human
gcccugggacaucucacuccacuccuaccu

SEQ ID NO: 173883 - RNA, 32 nt, Human
gcccugggacucaggucgccuggagcguggca

SEQ ID NO: 173884 - RNA, 32 nt, Human
gcccugggacuccuaucaggaagcuugacagg

SEQ ID NO: 173885 - RNA, 16 nt, Human
gcccugggacugggag

SEQ ID NO: 173886 - RNA, 32 nt, Human
gcccugggagacauccuugucuuugcaacucc

SEQ ID NO: 173887 - RNA, 22 nt, Human
gcccugggagauaccaaccuca

SEQ ID NO: 173888 - RNA, 32 nt, Human
gcccugggagcaccgcucugcagcgcggccgg

SEQ ID NO: 173889 - RNA, 32 nt, Human
gcccugggagcaccggcucugcuuaccugucc

SEQ ID NO: 173890 - RNA, 32 nt, Human
gcccugggagcaccggcucugcuuaccugucu

SEQ ID NO: 173891 - RNA, 32 nt, Human
gcccugggagcagagguggagcgaccccauua

SEQ ID NO: 173892 - RNA, 23 nt, Human
gcccugggagccaccagguggga

SEQ ID NO: 173893 - RNA, 32 nt, Human
gcccugggagccucuggaaggccuugcuagug

SEQ ID NO: 173894 - RNA, 32 nt, Human
gcccugggaggucaaggcugcagugagcugca

SEQ ID NO: 173895 - RNA, 24 nt, Human
gcccugggaguugccaucugagag

SEQ ID NO: 173896 - RNA, 32 nt, Human
gcccugggauccagcacccauggaagcuucug

SEQ ID NO: 173897 - RNA, 32 nt, Human
gcccugggaugugccgcauucccacuggggug

SEQ ID NO: 173898 - RNA, 32 nt, Human
gcccugggcacauagcauaggcuggggacaca

SEQ ID NO: 173899 - RNA, 18 nt, Human
gcccugggcacccaccuc

SEQ ID NO: 173900 - RNA, 32 nt, Human
gcccugggcaugaggccacagagcagggccga

SEQ ID NO: 173901 - RNA, 23 nt, Human
gcccugggccagcacuccgagag

SEQ ID NO: 173902 - RNA, 19 nt, Human
gcccugggcccccaccucu

SEQ ID NO: 173903 - RNA, 32 nt, Human
gcccugggccugcagcccuggagcuugggccc

SEQ ID NO: 173904 - RNA, 32 nt, Human
gcccugggccugggccuguggcucggggcgcu

SEQ ID NO: 173905 - RNA, 20 nt, Human
gcccugggccugugccgcug

SEQ ID NO: 173906 - RNA, 32 nt, Human
gcccugggcugaggccaggcugcuccaggggc

SEQ ID NO: 173907 - RNA, 32 nt, Human
gcccugggcugcaggagguugcggcggccgcg

SEQ ID NO: 173908 - RNA, 19 nt, Human
gcccugggcugccaccaga

SEQ ID NO: 173909 - RNA, 32 nt, Human
gcccugggcuggcgucgugccuagccaaggag

SEQ ID NO: 173910 - RNA, 18 nt, Human
gcccugggcuggugcagg

SEQ ID NO: 173911 - RNA, 32 nt, Human
gcccugggcuugucuguucccuccugagccug

SEQ ID NO: 173912 - RNA, 32 nt, Human
gcccuggggaaggggagccaggucagcugggu

SEQ ID NO: 173913 - RNA, 32 nt, Human
gcccuggggaccccugacccaucccaaaacac

SEQ ID NO: 173914 - RNA, 32 nt, Human
gcccuggggacuagacaaagugcugaugauga

SEQ ID NO: 173915 - RNA, 32 nt, Human
gcccuggggaggcagggguuggugcccugacu

SEQ ID NO: 173916 - RNA, 32 nt, Human
gcccuggggaggggcccugcucgcuguccccc

SEQ ID NO: 173917 - RNA, 32 nt, Human
gcccuggggccaggacugcugcugucacugcc

SEQ ID NO: 173918 - RNA, 32 nt, Human
gcccuggggcccuggccucccuggaggggcug

SEQ ID NO: 173919 - RNA, 32 nt, Human
gcccuggggcccuucaccuuguggggcuggcc

SEQ ID NO: 173920 - RNA, 22 nt, Human
gcccuggggccggaggaugagu

SEQ ID NO: 173921 - RNA, 21 nt, Human
gcccuggggcucggccuccuc

SEQ ID NO: 173922 - RNA, 22 nt, Human
gcccugggggacccccagggca

SEQ ID NO: 173923 - RNA, 32 nt, Human
gcccugggggagagaaguguuuugaagaugac

SEQ ID NO: 173924 - RNA, 32 nt, Human
gcccugggggcagacuuccagccaggaaguag

SEQ ID NO: 173925 - RNA, 32 nt, Human
gcccugggggcagagcuccuggccagucccga

SEQ ID NO: 173926 - RNA, 32 nt, Human
gcccugggguagugucagagcgggagugaggc

SEQ ID NO: 173927 - RNA, 24 nt, Human
gcccugggguggagugacaaaccg

SEQ ID NO: 173928 - RNA, 22 nt, Human
gcccugggguucugggccccca

SEQ ID NO: 173929 - RNA, 22 nt, Human
gcccuggguaccccucuucuca

SEQ ID NO: 173930 - RNA, 32 nt, Human
gcccuggguagccucagacuuuggguauugau

SEQ ID NO: 173931 - RNA, 32 nt, Human
gcccugggucaauucuccuuccugacucaagg

SEQ ID NO: 173932 - RNA, 32 nt, Human
gcccugggucaccugaugacaggugugguggu

SEQ ID NO: 173933 - RNA, 23 nt, Human
gcccugggucugcagaaggcuga

SEQ ID NO: 173934 - RNA, 31 nt, Human
gcccugggucuuuggcugccuguguccucag

SEQ ID NO: 173935 - RNA, 21 nt, Human
gcccugggugccuggcugcug

SEQ ID NO: 173936 - RNA, 32 nt, Human
gcccuggguucugccauauacccagaggagcc

SEQ ID NO: 173937 - RNA, 32 nt, Human
gcccuggucagcuccacuugggucggggcuga

SEQ ID NO: 173938 - RNA, 32 nt, Human
gcccugguccaaugcugcuguugucugaggaa

SEQ ID NO: 173939 - RNA, 32 nt, Human
gcccugguccacccuuccccugugcaccuccg

SEQ ID NO: 173940 - RNA, 31 nt, Human
gcccuggugaaacugcuuuaagaugccucuu

SEQ ID NO: 173941 - RNA, 24 nt, Human
gcccuggugaccaccagccuccuu

SEQ ID NO: 173942 - RNA, 19 nt, Human
gcccugguggcagcgccag

SEQ ID NO: 173943 - RNA, 32 nt, Human
gcccugguggcagcugggcugguuagccagua

SEQ ID NO: 173944 - RNA, 22 nt, Human
gcccugguggcugccugugcuc

SEQ ID NO: 173945 - RNA, 32 nt, Human
gcccuggugugggcguuuuuauaaagcucuuc

SEQ ID NO: 173946 - RNA, 18 nt, Human
gcccugguucccagggug

SEQ ID NO: 173947 - RNA, 32 nt, Human
gcccugguuccugcucuuccaugaucagugug

SEQ ID NO: 173948 - RNA, 32 nt, Human
gcccugguuggaggagcuccuagucuguguuc

SEQ ID NO: 173949 - RNA, 32 nt, Human
gcccugguuuauuaacacuugaacugggaugg

SEQ ID NO: 173950 - RNA, 20 nt, Human
gcccugguuuccaucuggga

SEQ ID NO: 173951 - RNA, 32 nt, Human
gcccugguuuuucaauccccagggucggguag

SEQ ID NO: 173952 - RNA, 20 nt, Human
gcccuguaagauggacucuu

SEQ ID NO: 173953 - RNA, 32 nt, Human
gcccuguacagugacccugccugcucgcucuu

SEQ ID NO: 173954 - RNA, 20 nt, Human
gcccuguacgcugcccggga

SEQ ID NO: 173955 - RNA, 32 nt, Human
gcccuguagcgcccucugggccccgguucaug

SEQ ID NO: 173956 - RNA, 32 nt, Human
gcccuguauucaccuccacugcccccaggggc

SEQ ID NO: 173957 - RNA, 32 nt, Human
gcccuguauuuaggcuuugccugcuuggugug

SEQ ID NO: 173958 - RNA, 32 nt, Human
gcccugucaacaccacacugugcucagcucuc

SEQ ID NO: 173959 - RNA, 32 nt, Human
gcccugucacagugagaaguaguuccuguccu

SEQ ID NO: 173960 - RNA, 32 nt, Human
gcccugucacccaggcuggagugcaauggugc

SEQ ID NO: 173961 - RNA, 32 nt, Human
gcccugucacccaggcuggagugcaguggcac

SEQ ID NO: 173962 - RNA, 32 nt, Human
gcccugucacccaggcuggagugcaguggugu

SEQ ID NO: 173963 - RNA, 32 nt, Human
gcccugucacccaggcugggguacgguggcau

SEQ ID NO: 173964 - RNA, 32 nt, Human
gcccugucacucaggauggaguucaauggucc

SEQ ID NO: 173965 - RNA, 32 nt, Human
gcccugucacucaggauggaguucaguggucc

SEQ ID NO: 173966 - RNA, 17 nt, Human
gcccugucacugcugcc

SEQ ID NO: 173967 - RNA, 32 nt, Human
gcccugucagccacccucucucagucugaaac

SEQ ID NO: 173968 - RNA, 32 nt, Human
gcccugucagccgccucggcgcccccaggacc

SEQ ID NO: 173969 - RNA, 24 nt, Human
gcccugucagugcagcccgugugg

SEQ ID NO: 173970 - RNA, 32 nt, Human
gcccugucagugcugcucagaccuucauagcc

SEQ ID NO: 173971 - RNA, 32 nt, Human
gcccugucauuuaggauggaguucaguggucc

SEQ ID NO: 173972 - RNA, 32 nt, Human
gcccuguccaggcacuagaggcucccuugacg

SEQ ID NO: 173973 - RNA, 32 nt, Human
gcccugucccccaggcucuggguccgguugag

SEQ ID NO: 173974 - RNA, 17 nt, Human
gcccuguccccucuuca

SEQ ID NO: 173975 - RNA, 32 nt, Human
gcccugucccguguccuguccucuacugucgg

SEQ ID NO: 173976 - RNA, 32 nt, Human
gcccugucccugcuugguucuugaaguuuuua

SEQ ID NO: 173977 - RNA, 32 nt, Human
gcccuguccuccucacaggcugguguggccgu

SEQ ID NO: 173978 - RNA, 32 nt, Human
gcccuguccugucauguguccucaccggggua

SEQ ID NO: 173979 - RNA, 32 nt, Human
gcccuguccuguccuugcacagucuccuaugu

SEQ ID NO: 173980 - RNA, 32 nt, Human
gcccugucgccaggcuggaguguaguggcaug

SEQ ID NO: 173981 - RNA, 32 nt, Human
gcccugucgcccaggcuggagugccauggcgc

SEQ ID NO: 173982 - RNA, 32 nt, Human
gcccugucgccuggcuggaguggaguggcaca

SEQ ID NO: 173983 - RNA, 32 nt, Human
gcccugucucaaaucucacuugacaaaugguc

SEQ ID NO: 173984 - RNA, 32 nt, Human
gcccugucucagagcugaugaccucaccguug

SEQ ID NO: 173985 - RNA, 32 nt, Human
gcccugucucggcuggcccauaacuccugagc

SEQ ID NO: 173986 - RNA, 19 nt, Human
gcccugucuggccagggag

SEQ ID NO: 173987 - RNA, 32 nt, Human
gcccugucugggagguugaggccacaguguau

SEQ ID NO: 173988 - RNA, 17 nt, Human
gcccugucugugccaug

SEQ ID NO: 173989 - RNA, 32 nt, Human
gcccugucuguucauucaaggcugguucaggu

SEQ ID NO: 173990 - RNA, 32 nt, Human
gcccugucuucugaagucucaggcuuagaagu

SEQ ID NO: 173991 - RNA, 32 nt, Human
gcccugugaaagauaggaugugaggugagcau

SEQ ID NO: 173992 - RNA, 32 nt, Human
gcccugugaaccaccugcugcccugugaggcc

SEQ ID NO: 173993 - RNA, 19 nt, Human
gcccugugaagccagagga

SEQ ID NO: 173994 - RNA, 32 nt, Human
gcccugugacucaggaccagcucuggagucuc

SEQ ID NO: 173995 - RNA, 25 nt, Human
gcccugugagagcuuccugugccca

SEQ ID NO: 173996 - RNA, 32 nt, Human
gcccugugagcugugcccuuguggcccugaug

SEQ ID NO: 173997 - RNA, 32 nt, Human
gcccugugcagcugccuggcaguggcugggac

SEQ ID NO: 173998 - RNA, 32 nt, Human
gcccugugcaucuugcacaaagccugguccug

SEQ ID NO: 173999 - RNA, 32 nt, Human
gcccugugccauaggacagaagaggcacuggc

SEQ ID NO: 174000 - RNA, 32 nt, Human
gcccugugcccuggcccuguugcggagagacg

SEQ ID NO: 174001 - RNA, 32 nt, Human
gcccugugccugagugggucugaaaaagcuuu

SEQ ID NO: 174002 - RNA, 32 nt, Human
gcccugugcggauccugaaccugcgcugucug

SEQ ID NO: 174003 - RNA, 32 nt, Human
gcccugugcguggggcucugcaggcccagcca

SEQ ID NO: 174004 - RNA, 32 nt, Human
gcccuguggaaagaagagacagacagagugug

SEQ ID NO: 174005 - RNA, 32 nt, Human
gcccuguggaagggacuaggagcacuguagua

SEQ ID NO: 174006 - RNA, 32 nt, Human
gcccuguggccugagaacugagcccagacuuu

SEQ ID NO: 174007 - RNA, 32 nt, Human
gcccuguggcucacugucuuacaaucacugcu

SEQ ID NO: 174008 - RNA, 32 nt, Human
gcccuguggcucuggaggccacuugugguuca

SEQ ID NO: 174009 - RNA, 32 nt, Human
gcccuguggcugggcuggagugcaauggcgcg

SEQ ID NO: 174010 - RNA, 32 nt, Human
gcccuguggcuucauggcagcagaucagagcu

SEQ ID NO: 174011 - RNA, 32 nt, Human
gcccuguggggaggggcgcggacacugaaggg

SEQ ID NO: 174012 - RNA, 32 nt, Human
gcccugugggucuugcucaauacuguucauac

SEQ ID NO: 174013 - RNA, 32 nt, Human
gcccugugucuacugccaggauagcauucuua

SEQ ID NO: 174014 - RNA, 32 nt, Human
gcccuguguuaguucaugcauucaguugaguc

SEQ ID NO: 174015 - RNA, 20 nt, Human
gcccuguguucuccagcacc

SEQ ID NO: 174016 - RNA, 32 nt, Human
gcccuguucccccuggaaugugcagugggcca

SEQ ID NO: 174017 - RNA, 32 nt, Human
gcccuguucccuccaccuagacugccugcuga

SEQ ID NO: 174018 - RNA, 32 nt, Human
gcccuguuccuuccuguccuuugcuggucuuu

SEQ ID NO: 174019 - RNA, 32 nt, Human
gcccuguucugugccagacgcuaacacacuuu

SEQ ID NO: 174020 - RNA, 32 nt, Human
gcccuguugccaggcuggaaugcaguggcgug

SEQ ID NO: 174021 - RNA, 32 nt, Human
gcccuguugcccaggcugaagugcaguggugc

SEQ ID NO: 174022 - RNA, 32 nt, Human
gcccuguugcccaggcuggagagcaguggugc

SEQ ID NO: 174023 - RNA, 32 nt, Human
gcccuguugcccaggcuggaguauaguagugc

SEQ ID NO: 174024 - RNA, 32 nt, Human
gcccuguugcccaggcuggagugcaguggcac

SEQ ID NO: 174025 - RNA, 32 nt, Human
gcccuguugcccaugcuggagugcaauggcac

SEQ ID NO: 174026 - RNA, 32 nt, Human
gcccuguugccuuuuaagcauguaccgcuccc

SEQ ID NO: 174027 - RNA, 21 nt, Human
gcccuguugugccacagagug

SEQ ID NO: 174028 - RNA, 32 nt, Human
gcccuguuuccccucaguccuccuuugcuccu

SEQ ID NO: 174029 - RNA, 32 nt, Human
gcccuguuuuguuaaauugcagucuccagggu

SEQ ID NO: 174030 - RNA, 32 nt, Human
gcccuuaacugcuguauaaauaacaacuugaa

SEQ ID NO: 174031 - RNA, 32 nt, Human
gcccuuaacuggaaaggcagaggggaacucag

SEQ ID NO: 174032 - RNA, 32 nt, Human
gcccuuaauaaauauaaaauaucauuauuugu

SEQ ID NO: 174033 - RNA, 32 nt, Human
gcccuuacaguuucacucaugaagcaccuuga

SEQ ID NO: 174034 - RNA, 18 nt, Human
gcccuuacccuccucagg

SEQ ID NO: 174035 - RNA, 32 nt, Human
gcccuuagaguauggaggcugagccaggccuu

SEQ ID NO: 174036 - RNA, 32 nt, Human
gcccuuagcugaaggggguggggagaagcgug

SEQ ID NO: 174037 - RNA, 32 nt, Human
gcccuuaggcuucuguacucaguucuuucccc

SEQ ID NO: 174038 - RNA, 32 nt, Human
gcccuuaguuucuggcccacgugaagcagggg

SEQ ID NO: 174039 - RNA, 32 nt, Human
gcccuuaucucagagacugagauuucuguggu

SEQ ID NO: 174040 - RNA, 32 nt, Human
gcccuucaaagacauaggagaauucauacugg

SEQ ID NO: 174041 - RNA, 32 nt, Human
gcccuucacaggauaggauccgucucuguccu

SEQ ID NO: 174042 - RNA, 32 nt, Human
gcccuucaccaugagagggugcagugagaaga

SEQ ID NO: 174043 - RNA, 32 nt, Human
gcccuucagaagacucguuuuuaagguggaaa

SEQ ID NO: 174044 - RNA, 32 nt, Human
gcccuucagagcagaguccacaggcggguggu

SEQ ID NO: 174045 - RNA, 32 nt, Human
gcccuucagcaacucuucugagaaggucuuug

SEQ ID NO: 174046 - RNA, 21 nt, Human
gcccuucagccccugugcucg

SEQ ID NO: 174047 - RNA, 32 nt, Human
gcccuucagccucagcuggguucuacaaaacc

SEQ ID NO: 174048 - RNA, 23 nt, Human
gcccuucaggccugagaucagag

SEQ ID NO: 174049 - RNA, 32 nt, Human
gcccuucagucaccugguggcuaauuagaccc

SEQ ID NO: 174050 - RNA, 32 nt, Human
gcccuucaguuuccucacuguccccaggugcu

SEQ ID NO: 174051 - RNA, 32 nt, Human
gcccuucauccagcaaaucagaaggacucagu

SEQ ID NO: 174052 - RNA, 32 nt, Human
gcccuucauccagccagaccugcggcgagagg

SEQ ID NO: 174053 - RNA, 20 nt, Human
gcccuucauccuccagcgcc

SEQ ID NO: 174054 - RNA, 32 nt, Human
gcccuucauccugaacgugaccaguggggccc

SEQ ID NO: 174055 - RNA, 32 nt, Human
gcccuucauggaggucagagaggaagaaacaa

SEQ ID NO: 174056 - RNA, 32 nt, Human
gcccuuccaccagaaaagcuagucuaggugug

SEQ ID NO: 174057 - RNA, 22 nt, Human
gcccuuccacccaccuuugccc

SEQ ID NO: 174058 - RNA, 32 nt, Human
gcccuuccacgauguggcuccgugccuuuauc

SEQ ID NO: 174059 - RNA, 32 nt, Human
gcccuuccagcagccaugagggaaggacagga

SEQ ID NO: 174060 - RNA, 25 nt, Human
gcccuuccagcuguaaacacugccc

SEQ ID NO: 174061 - RNA, 32 nt, Human
gcccuuccagggccuuaucauaaaacucugga

SEQ ID NO: 174062 - RNA, 32 nt, Human
gcccuucccagacagacccucagucuggagcc

SEQ ID NO: 174063 - RNA, 32 nt, Human
gcccuucccagugagggguggaagggaucucu

SEQ ID NO: 174064 - RNA, 32 nt, Human
gcccuuccccacccucccgucccugccacugg

SEQ ID NO: 174065 - RNA, 16 nt, Human
gcccuuccccaggggc

SEQ ID NO: 174066 - RNA, 32 nt, Human
gcccuuccccucccgacagcccaucaccucua

SEQ ID NO: 174067 - RNA, 32 nt, Human
gcccuuccccuucaagcauuuuccucuucccu

SEQ ID NO: 174068 - RNA, 32 nt, Human
gcccuuccccuucacgaaaccccuuuugucca

SEQ ID NO: 174069 - RNA, 32 nt, Human
gcccuucccuccauccuguaggauuuuguaga

SEQ ID NO: 174070 - RNA, 32 nt, Human
gcccuucccuccccaucuccccuacuucccug

SEQ ID NO: 174071 - RNA, 19 nt, Human
gcccuucccucccucugca

SEQ ID NO: 174072 - RNA, 32 nt, Human
gcccuucccugacccaauaaauccugaagagg

SEQ ID NO: 174073 - RNA, 32 nt, Human
gcccuucccuggggaguaccugauggcugccc

SEQ ID NO: 174074 - RNA, 17 nt, Human
gcccuucccuugcccuu

SEQ ID NO: 174075 - RNA, 32 nt, Human
gcccuuccuaaggucccugccuggcauccgag

SEQ ID NO: 174076 - RNA, 32 nt, Human
gcccuuccuagaagagucaggaagggaaagcc

SEQ ID NO: 174077 - RNA, 32 nt, Human
gcccuuccucacccuuccccuccccgcaccgc

SEQ ID NO: 174078 - RNA, 32 nt, Human
gcccuuccucaucuccaugcucuuucacccug

SEQ ID NO: 174079 - RNA, 32 nt, Human
gcccuuccucaucucucccugccugugcagac

SEQ ID NO: 174080 - RNA, 32 nt, Human
gcccuuccuccacucccaccagacuugcucau

SEQ ID NO: 174081 - RNA, 32 nt, Human
gcccuuccuccaggcuucucaaaggaauugcu

SEQ ID NO: 174082 - RNA, 20 nt, Human
gcccuuccuccccaggggug

SEQ ID NO: 174083 - RNA, 32 nt, Human
gcccuuccucuagccucuugucacauguggug

SEQ ID NO: 174084 - RNA, 32 nt, Human
gcccuuccucucccagugggcccucggcgccc

SEQ ID NO: 174085 - RNA, 32 nt, Human
gcccuuccugcccuuuguuucucucuucaugu

SEQ ID NO: 174086 - RNA, 32 nt, Human
gcccuuccuggagacagcuuggaagagaggga

SEQ ID NO: 174087 - RNA, 32 nt, Human
gcccuuccugguggaggcucagugugaaccgg

SEQ ID NO: 174088 - RNA, 30 nt, Human
gcccuucgccucuccaugaacccgugagcc

SEQ ID NO: 174089 - RNA, 32 nt, Human
gcccuucgcuccccgaccuccugcugcagcuc

SEQ ID NO: 174090 - RNA, 32 nt, Human
gcccuucuaaaccaaucuuucaucauuuuacu

SEQ ID NO: 174091 - RNA, 32 nt, Human
gcccuucuccacccaucccaaccccauugcua

SEQ ID NO: 174092 - RNA, 32 nt, Human
gcccuucuccaucucuuccuccuuguucauuu

SEQ ID NO: 174093 - RNA, 32 nt, Human
gcccuucucccccaucuccguguccucguucc

SEQ ID NO: 174094 - RNA, 32 nt, Human
gcccuucucccucccucccuuccucccucucc

SEQ ID NO: 174095 - RNA, 32 nt, Human
gcccuucucccuccugcuucugaggucaagcu

SEQ ID NO: 174096 - RNA, 32 nt, Human
gcccuucucccugacccugggcugcuuccugg

SEQ ID NO: 174097 - RNA, 32 nt, Human
gcccuucucccugguuucacacauucccaugc

SEQ ID NO: 174098 - RNA, 17 nt, Human
gcccuucuccugcugcu

SEQ ID NO: 174099 - RNA, 32 nt, Human
gcccuucuccuggaccucagggaggaaugacc

SEQ ID NO: 174100 - RNA, 32 nt, Human
gcccuucucuaugccuuagucucuccagcaca

SEQ ID NO: 174101 - RNA, 32 nt, Human
gcccuucucuccccaucuucccucaguuccca

SEQ ID NO: 174102 - RNA, 32 nt, Human
gcccuucucugccucccuaaguugcugggauu

SEQ ID NO: 174103 - RNA, 32 nt, Human
gcccuucucuggaagaagaggcugggaccaaa

SEQ ID NO: 174104 - RNA, 18 nt, Human
gcccuucugaaaacuuug

SEQ ID NO: 174105 - RNA, 23 nt, Human
gcccuucugagcaucaguggugu

SEQ ID NO: 174106 - RNA, 32 nt, Human
gcccuucugcaggucugcggggccaagugucc

SEQ ID NO: 174107 - RNA, 21 nt, Human
gcccuucugcccucuccccuc

SEQ ID NO: 174108 - RNA, 32 nt, Human
gcccuucuugcccaggcuggagugcaagggcg

SEQ ID NO: 174109 - RNA, 32 nt, Human
gcccuugaaguaaaauggagccagcaggagua

SEQ ID NO: 174110 - RNA, 32 nt, Human
gcccuugaccaacaucggcuuccccaguccag

SEQ ID NO: 174111 - RNA, 22 nt, Human
gcccuugaccacuauagacuca

SEQ ID NO: 174112 - RNA, 32 nt, Human
gcccuugacucugcccugagcuugcagcugga

SEQ ID NO: 174113 - RNA, 32 nt, Human
gcccuugagccuggcuggaguagguggaauau

SEQ ID NO: 174114 - RNA, 32 nt, Human
gcccuugaggcagaggugccgagugacugcca

SEQ ID NO: 174115 - RNA, 32 nt, Human
gcccuugaugucccucaauaggaucaggaguu

SEQ ID NO: 174116 - RNA, 21 nt, Human
gcccuugauuucccugcugcc

SEQ ID NO: 174117 - RNA, 32 nt, Human
gcccuugcacacuggagacacucaucaauccc

SEQ ID NO: 174118 - RNA, 32 nt, Human
gcccuugccagcugacgucacagucuaagaug

SEQ ID NO: 174119 - RNA, 32 nt, Human
gcccuugccccacugcaggcugccugggacgc

SEQ ID NO: 174120 - RNA, 21 nt, Human
gcccuugccccugcugcugcc

SEQ ID NO: 174121 - RNA, 32 nt, Human
gcccuugccuccagauggggucgaggauuugg

SEQ ID NO: 174122 - RNA, 32 nt, Human
gccuccuucucccucccacccaccucaagcag

SEQ ID NO: 174123 - RNA, 32 nt, Human
gccuccuucuccuggguccaagcaauuauugu

SEQ ID NO: 174124 - RNA, 32 nt, Human
gccuccuucuucugccgcuccuggugcugcuu

SEQ ID NO: 174125 - RNA, 32 nt, Human
gccuccuugcagacuggugcucuguguucugu

SEQ ID NO: 174126 - RNA, 32 nt, Human
gccuccuugcagggaucugagccacccucccc

SEQ ID NO: 174127 - RNA, 32 nt, Human
gccuccuugcccagcccaguccaggcugcugu

SEQ ID NO: 174128 - RNA, 32 nt, Human
gccuccuugcccauccuucaccggugccuuug

SEQ ID NO: 174129 - RNA, 32 nt, Human
gccuccuugcccaugccucucucacucuucau

SEQ ID NO: 174130 - RNA, 32 nt, Human
gccuccuugccgcugccuccaggaagcccacc

SEQ ID NO: 174131 - RNA, 32 nt, Human
gccuccuugcuccccucccuuacuccucccuc

SEQ ID NO: 174132 - RNA, 32 nt, Human
gccuccuugcuuguuacauaccuggguaugug

SEQ ID NO: 174133 - RNA, 32 nt, Human
gccuccuugucuggaaagagggugggucaucu

SEQ ID NO: 174134 - RNA, 32 nt, Human
gccuccuugugcaaacugggcccccaugccac

SEQ ID NO: 174135 - RNA, 32 nt, Human
gccuccuuguguuuuugccucauuccuacugu

SEQ ID NO: 174136 - RNA, 32 nt, Human
gccuccuuuaguaggugggauuacaggugcau

SEQ ID NO: 174137 - RNA, 32 nt, Human
gccuccuuucaaggaguucacagugaacaaga

SEQ ID NO: 174138 - RNA, 32 nt, Human
gccuccuuucccagugucuccccaugggguua

SEQ ID NO: 174139 - RNA, 32 nt, Human
gccuccuuuccuccuccugugcuuccuuucuc

SEQ ID NO: 174140 - RNA, 19 nt, Human
gccuccuuucuccuccagg

SEQ ID NO: 174141 - RNA, 17 nt, Human
gccuccuuuucuagaug

SEQ ID NO: 174142 - RNA, 32 nt, Human
gccuccuuuucuugagcugguggagagccacu

SEQ ID NO: 174143 - RNA, 32 nt, Human
gccuccuuuuucuauuacuagagaacuccagg

SEQ ID NO: 174144 - RNA, 32 nt, Human
gccuccuuuuugguucuucauuccugagcucu

SEQ ID NO: 174145 - RNA, 32 nt, Human
gccucgaacuccugggcucaagcaauccuccu

SEQ ID NO: 174146 - RNA, 32 nt, Human
gccucgaccucccaggcucaagcaauucuccu

SEQ ID NO: 174147 - RNA, 32 nt, Human
gccucgaccucccaggugauccucccaccuca

SEQ ID NO: 174148 - RNA, 32 nt, Human
gccucgaccuccugggcucaagcaauccucac

SEQ ID NO: 174149 - RNA, 32 nt, Human
gccucgaccuccugggcucaagcaauccuccc

SEQ ID NO: 174150 - RNA, 32 nt, Human
gccucgaccuccugggcucaagcaauccuccu

SEQ ID NO: 174151 - RNA, 32 nt, Human
gccucgacuccuggcccagcguggggcuggcu

SEQ ID NO: 174152 - RNA, 32 nt, Human
gccucgacuuccugggauccagcgauccuccc

SEQ ID NO: 174153 - RNA, 32 nt, Human
gccucgagaugcgccaccucccagaaagccag

SEQ ID NO: 174154 - RNA, 32 nt, Human
gccucgagcacagccugugcccaggggagccg

SEQ ID NO: 174155 - RNA, 32 nt, Human
gccucgagccauccuccugccugggccuccca

SEQ ID NO: 174156 - RNA, 32 nt, Human
gccucgagcuguagccacccucaggccuggga

SEQ ID NO: 174157 - RNA, 32 nt, Human
gccucgagggcuuaagauccagcugggacucc

SEQ ID NO: 174158 - RNA, 21 nt, Human
gccucgauggugccucugcca

SEQ ID NO: 174159 - RNA, 24 nt, Human
gccucgauguccuccucugugaaa

SEQ ID NO: 174160 - RNA, 32 nt, Human
gccucgauuaaccaggaggagguggcugcugu

SEQ ID NO: 174161 - RNA, 32 nt, Human
gccucgauuuaaagagacagaagcugucgggg

SEQ ID NO: 174162 - RNA, 32 nt, Human
gccucgcaagcccacggcccgcugggggugcc

SEQ ID NO: 174163 - RNA, 19 nt, Human
gccucgcacccccaccucu

SEQ ID NO: 174164 - RNA, 20 nt, Human
gccucgcacccgcagccucg

SEQ ID NO: 174165 - RNA, 31 nt, Human
gccucgcagaagaaagcucucacuuauaaac

SEQ ID NO: 174166 - RNA, 32 nt, Human
gccucgcagccaccccuccugcgucuccacaa

SEQ ID NO: 174167 - RNA, 32 nt, Human
gccucgcagcccaccugggaagccacagugac

SEQ ID NO: 174168 - RNA, 32 nt, Human
gccucgcaggcagaugaaaacagaggucaugc

SEQ ID NO: 174169 - RNA, 32 nt, Human
gccucgccaccagcgggggcucagaggaggag

SEQ ID NO: 174170 - RNA, 32 nt, Human
gccucgccaccuggcgacccugaccccaccac

SEQ ID NO: 174171 - RNA, 32 nt, Human
gccucgccgcgauggaccuggcaccuggcgcg

SEQ ID NO: 174172 - RNA, 21 nt, Human
gccucgccgggguucugcgga

SEQ ID NO: 174173 - RNA, 32 nt, Human
gccucgccuccccucaccuugccucaccucgc

SEQ ID NO: 174174 - RNA, 32 nt, Human
gccucgccugaagccuuccucuggcuucacag

SEQ ID NO: 174175 - RNA, 32 nt, Human
gccucgccuggguucuggaggcugcggggcca

SEQ ID NO: 174176 - RNA, 32 nt, Human
gccucgcgcuagcagcaagcugcucuguuaaa

SEQ ID NO: 174177 - RNA, 32 nt, Human
gccucgcgcugcacauucucuccuggcggcgg

SEQ ID NO: 174178 - RNA, 32 nt, Human
gccucgcggagaugcccagcugcggugcuugu

SEQ ID NO: 174179 - RNA, 32 nt, Human
gccucgcgggugcagcagcacagcagggagug

SEQ ID NO: 174180 - RNA, 32 nt, Human
gccucgcgucucucacccaugcgacucgggcc

SEQ ID NO: 174181 - RNA, 19 nt, Human
gccucgcuccccgcccgga

SEQ ID NO: 174182 - RNA, 32 nt, Human
gccucgcucccucccuucaccuuuccucuccu

SEQ ID NO: 174183 - RNA, 20 nt, Human
gccucgcuccucuucaggga

SEQ ID NO: 174184 - RNA, 32 nt, Human
gccucgcugccucuguuucuugcucuguaaaa

SEQ ID NO: 174185 - RNA, 21 nt, Human
gccucgcugcgccccaucccg

SEQ ID NO: 174186 - RNA, 32 nt, Human
gccucgcugcuggggcucugcaggggcagcac

SEQ ID NO: 174187 - RNA, 32 nt, Human
gccucgcugcuucauguggcucagggaggcuc

SEQ ID NO: 174188 - RNA, 32 nt, Human
gccucgcuggaagaagucuggaagaagaggaa

SEQ ID NO: 174189 - RNA, 32 nt, Human
gccucgcuggccagagguggaaggaaggagga

SEQ ID NO: 174190 - RNA, 32 nt, Human
gccucgcugugucuugcuguucccaggcacca

SEQ ID NO: 174191 - RNA, 32 nt, Human
gccucgcuguucccauggacauggcccaggag

SEQ ID NO: 174192 - RNA, 21 nt, Human
gccucgcuugucccucugcca

SEQ ID NO: 174193 - RNA, 32 nt, Human
gccucggacaggcagaggcugugaaauacgug

SEQ ID NO: 174194 - RNA, 32 nt, Human
gccucggaccuacagcccaggauacuuuggga

SEQ ID NO: 174195 - RNA, 22 nt, Human
gccucggaggcggagguugcag

SEQ ID NO: 174196 - RNA, 24 nt, Human
gccucggaggcggagguugcagug

SEQ ID NO: 174197 - RNA, 25 nt, Human
gccucggaggcggagguugcaguga

SEQ ID NO: 174198 - RNA, 32 nt, Human
gccucggaggcggagguugcagugagcugaga

SEQ ID NO: 174199 - RNA, 32 nt, Human
gccucggagggagggauuagaagccgcuagac

SEQ ID NO: 174200 - RNA, 32 nt, Human
gccucggaggggcagaggcugaaccgccccug

SEQ ID NO: 174201 - RNA, 32 nt, Human
gccucggcaguggcggcugccgggaggaugug

SEQ ID NO: 174202 - RNA, 32 nt, Human
gccucggccacccggcccugagucccuggggg

SEQ ID NO: 174203 - RNA, 32 nt, Human
gccucggccaucucucccuccugcccucugcu

SEQ ID NO: 174204 - RNA, 32 nt, Human
gccucggccccgcugcacuccaccuccgcccc

SEQ ID NO: 174205 - RNA, 18 nt, Human
gccucggcccuccgcgcg

SEQ ID NO: 174206 - RNA, 32 nt, Human
gccucggccuccaggagugggaguuggaguug

SEQ ID NO: 174207 - RNA, 32 nt, Human
gccucggccuccuuuaguaggugggauuacag

SEQ ID NO: 174208 - RNA, 21 nt, Human
gccucggccucucaaaaugcu

SEQ ID NO: 174209 - RNA, 20 nt, Human
gccucggcgagcccucugca

SEQ ID NO: 174210 - RNA, 23 nt, Human
gccucggcgcucacccaagccgc

SEQ ID NO: 174211 - RNA, 23 nt, Human
gccucggcugagcagaugcacag

SEQ ID NO: 174212 - RNA, 21 nt, Human
gccucggcuucccucuuucca

SEQ ID NO: 174213 - RNA, 32 nt, Human
gccucggcuuccugggcucaggugauucuucc

SEQ ID NO: 174214 - RNA, 32 nt, Human
gccucgggacacaccaaccccuauacucacac

SEQ ID NO: 174215 - RNA, 32 nt, Human
gccucgggacaccugcccugcccccacgaggg

SEQ ID NO: 174216 - RNA, 32 nt, Human
gccucgggaggugguggagugaccuggcccca

SEQ ID NO: 174217 - RNA, 32 nt, Human
gccucggggaaagggaagcggacgggcaucug

SEQ ID NO: 174218 - RNA, 32 nt, Human
gccucggggaggacgaggaggaaaggcggccu

SEQ ID NO: 174219 - RNA, 32 nt, Human
gccucggggcugcgaggcuggggaagggguug

SEQ ID NO: 174220 - RNA, 32 nt, Human
gccucgggggcagaggugauagauguggggug

SEQ ID NO: 174221 - RNA, 32 nt, Human
gccucggugccaccccaguggauguccccuga

SEQ ID NO: 174222 - RNA, 32 nt, Human
gccucggugcccaccgaagcccccucuggcug

SEQ ID NO: 174223 - RNA, 23 nt, Human
gccucgguguucucauuugugaa

SEQ ID NO: 174224 - RNA, 23 nt, Human
gccucgguuuccucaucugugaa

SEQ ID NO: 174225 - RNA, 24 nt, Human
gccucgguuuccucaucugugaaa

SEQ ID NO: 174226 - RNA, 17 nt, Human
gccucgucaucugugga

SEQ ID NO: 174227 - RNA, 22 nt, Human
gccucgugccacacuggcuuug

SEQ ID NO: 174228 - RNA, 32 nt, Human
gccucgugccagcugcuggugcagccucuccu

SEQ ID NO: 174229 - RNA, 32 nt, Human
gccucgugccugugaucccagcacuuugggag

SEQ ID NO: 174230 - RNA, 32 nt, Human
gccucgugcugggcucugcccugggcagacag

SEQ ID NO: 174231 - RNA, 21 nt, Human
gccucguggaaaauuaccuug

SEQ ID NO: 174232 - RNA, 32 nt, Human
gccucguucucuuucuucucaagaggcucucu

SEQ ID NO: 174233 - RNA, 24 nt, Human
gccucguuuuacucaucugugaaa

SEQ ID NO: 174234 - RNA, 32 nt, Human
gccucuaaaagccucagucuccuuaucugcaa

SEQ ID NO: 174235 - RNA, 32 nt, Human
gccucuaacuccugggcucaagcaauccaagu

SEQ ID NO: 174236 - RNA, 27 nt, Human
gccucuaagacaucucccuuccccaug

SEQ ID NO: 174237 - RNA, 18 nt, Human
gccucuaauaccuucaca

SEQ ID NO: 174238 - RNA, 21 nt, Human
gccucuaaucccagcuacuca

SEQ ID NO: 174239 - RNA, 24 nt, Human
gccucuaaucccagcuacucagga

SEQ ID NO: 174240 - RNA, 24 nt, Human
gccucuaaucccagcuacucggga

SEQ ID NO: 174241 - RNA, 32 nt, Human
gccucuacaggcccagcuccugccucacaguu

SEQ ID NO: 174242 - RNA, 32 nt, Human
gccucuacaggccuagcugcugccucccaaug

SEQ ID NO: 174243 - RNA, 32 nt, Human
gccucuacagucccaacaucugccucauagca

SEQ ID NO: 174244 - RNA, 32 nt, Human
gccucuaccuggaccuuuugucucacacagca

SEQ ID NO: 174245 - RNA, 32 nt, Human
gccucuacuccccacaccccagugccacugug

SEQ ID NO: 174246 - RNA, 32 nt, Human
gccucuagccccaccauugcucucucugucuu

SEQ ID NO: 174247 - RNA, 32 nt, Human
gccucuagccucuccuggaaaggccuggauau

SEQ ID NO: 174248 - RNA, 32 nt, Human
gccucuagcugugggcccagacuacagccugg

SEQ ID NO: 174249 - RNA, 20 nt, Human
gccucuaggaaaacuuaaaa

SEQ ID NO: 174250 - RNA, 32 nt, Human
gccucuaguagcaaaccauucuuuugcacacc

SEQ ID NO: 174251 - RNA, 24 nt, Human
gccucuagucccagcuacuuggga

SEQ ID NO: 174252 - RNA, 32 nt, Human
gccucuauagcucucccagaacauggaucaga

SEQ ID NO: 174253 - RNA, 23 nt, Human
gccucuaucccagaacgugcugg

SEQ ID NO: 174254 - RNA, 32 nt, Human
gccucuauccuaaugacucaaaacuugguucu

SEQ ID NO: 174255 - RNA, 32 nt, Human
gccucuauccugucccuccaccccacccucca

SEQ ID NO: 174256 - RNA, 22 nt, Human
gccucuaugccaacugguuccu

SEQ ID NO: 174257 - RNA, 32 nt, Human
gccucuauguuauuucuagaaugcugaaaagc

SEQ ID NO: 174258 - RNA, 32 nt, Human
gccucuauuguaccccagccucguuggagagc

SEQ ID NO: 174259 - RNA, 32 nt, Human
gccucucaaccucagacuucucagccugccua

SEQ ID NO: 174260 - RNA, 32 nt, Human
gccucucaacugcauuaaccagucacaggcuc

SEQ ID NO: 174261 - RNA, 32 nt, Human
gccucucaauaugacauguucaauguuguauu

SEQ ID NO: 174262 - RNA, 32 nt, Human
gccucucaauucuucaggcucagucuggacuc

SEQ ID NO: 174263 - RNA, 19 nt, Human
gccucucacaucuugcaca

SEQ ID NO: 174264 - RNA, 19 nt, Human
gccucucaccacugccaca

SEQ ID NO: 174265 - RNA, 32 nt, Human
gccucucaccagcucugugaccuugggcaagg

SEQ ID NO: 174266 - RNA, 20 nt, Human
gccucucacccgccccggcc

SEQ ID NO: 174267 - RNA, 32 nt, Human
gccucucaccucagagcugcggaggagccgcu

SEQ ID NO: 174268 - RNA, 28 nt, Human
gccucucacugccgaggccagccuuccu

SEQ ID NO: 174269 - RNA, 32 nt, Human
gccucucacugccuccccaaggcccccugccu

SEQ ID NO: 174270 - RNA, 32 nt, Human
gccucucagauugcuuuuuggccaggucucag

SEQ ID NO: 174271 - RNA, 32 nt, Human
gccucucagcccucucuccauaaaggccacua

SEQ ID NO: 174272 - RNA, 32 nt, Human
gccucucaggaagcaugugcaggguuuauggu

SEQ ID NO: 174273 - RNA, 21 nt, Human
gccucucaggcuccccuuccc

SEQ ID NO: 174274 - RNA, 32 nt, Human
gccucucagucuuaggggacauggcagagaug

SEQ ID NO: 174275 - RNA, 32 nt, Human
gccucucagugcccuccagccccgcgaccaug

SEQ ID NO: 174276 - RNA, 32 nt, Human
gccucucaucucccacaaucucuggccuccag

SEQ ID NO: 174277 - RNA, 32 nt, Human
gccucuccaaccacugugccacugacuugcug

SEQ ID NO: 174278 - RNA, 21 nt, Human
gccucuccaaggacccaggcg

SEQ ID NO: 174279 - RNA, 32 nt, Human
gccucuccaauccaaaagcugccuccugcccu

SEQ ID NO: 174280 - RNA, 32 nt, Human
gccucuccacggucacagcagccucgugauga

SEQ ID NO: 174281 - RNA, 32 nt, Human
gccucuccacugaauuccugaauuaugcauug

SEQ ID NO: 174282 - RNA, 25 nt, Human
gccucuccagacuuccauuucuuca

SEQ ID NO: 174283 - RNA, 32 nt, Human
gccucuccagagaaguuugguuucuuugcugc

SEQ ID NO: 174284 - RNA, 32 nt, Human
gccucuccagccacugggcucccuucacccug

SEQ ID NO: 174285 - RNA, 32 nt, Human
gccucuccagccuguuugagugcuccacccgg

SEQ ID NO: 174286 - RNA, 32 nt, Human
gccucuccaggcaccaucucccuuccuguggg

SEQ ID NO: 174287 - RNA, 32 nt, Human
gccucuccaucaccaucucucuccacuucccc

SEQ ID NO: 174288 - RNA, 24 nt, Human
gccucuccauccagcaucuucucu

SEQ ID NO: 174289 - RNA, 32 nt, Human
gccucuccauuuggaacccaguggaguuggga

SEQ ID NO: 174290 - RNA, 19 nt, Human
gccucucccacuuuccucu

SEQ ID NO: 174291 - RNA, 32 nt, Human
gccucucccagaggagccgggcugccggugcg

SEQ ID NO: 174292 - RNA, 32 nt, Human
gccucucccagcuccacuucuaaugcuagaga

SEQ ID NO: 174293 - RNA, 32 nt, Human
gccucucccaggucucagcucuggguggggag

SEQ ID NO: 174294 - RNA, 19 nt, Human
gccucucccaguuuccucu

SEQ ID NO: 174295 - RNA, 32 nt, Human
gccucuccccaccuucuuuggagcaaggagau

SEQ ID NO: 174296 - RNA, 32 nt, Human
gccucuccccgcucuggauccugcacucuaac

SEQ ID NO: 174297 - RNA, 32 nt, Human
gccucucccgagagcuggagccaugggagggg

SEQ ID NO: 174298 - RNA, 32 nt, Human
gccucucccugcacucccuccuggagcucugu

SEQ ID NO: 174299 - RNA, 32 nt, Human
gccucuccgaaucucucucuucuccuggcgcu

SEQ ID NO: 174300 - RNA, 32 nt, Human
gccucuccuaacucagcuccugccucaugucg

SEQ ID NO: 174301 - RNA, 32 nt, Human
gccucuccuaccacugugccacugacuugcua

SEQ ID NO: 174302 - RNA, 18 nt, Human
gccucuccuauucaggua

SEQ ID NO: 174303 - RNA, 32 nt, Human
gccucuccuccacagccccaaccucccacccc

SEQ ID NO: 174304 - RNA, 32 nt, Human
gccucuccuccaccucucccuucucaaaauac

SEQ ID NO: 174305 - RNA, 32 nt, Human
gccucuccuccaccuucaccccaagacuaggg

SEQ ID NO: 174306 - RNA, 32 nt, Human
gccucuccucccaagaggccugagagauucac

SEQ ID NO: 174307 - RNA, 32 nt, Human
gccucuccuccccuccccucccucaguccucc

SEQ ID NO: 174308 - RNA, 32 nt, Human
gccucuccugcccaccucuacuucucugugaa

SEQ ID NO: 174309 - RNA, 32 nt, Human
gccucuccuguugccaucagugcccagcaccu

SEQ ID NO: 174310 - RNA, 32 nt, Human
gccucuccuucucuuccuucacuuugcagagg

SEQ ID NO: 174311 - RNA, 32 nt, Human
gccucuccuuuaaaacaaaucaagcauuuucu

SEQ ID NO: 174312 - RNA, 32 nt, Human
gccucuccuuucuccgcccgcccgccugcuuu

SEQ ID NO: 174313 - RNA, 32 nt, Human
gccucuccuuucucucuguccugucgucucuu

SEQ ID NO: 174314 - RNA, 24 nt, Human
gccucucgaccgccugaggcccuu

SEQ ID NO: 174315 - RNA, 32 nt, Human
gccucucgaugggcagcucgcacuugcucaac

SEQ ID NO: 174316 - RNA, 32 nt, Human
gccucucgcuaccacuuccucuuccaacuaca

SEQ ID NO: 174317 - RNA, 32 nt, Human
gccucucggugcugcugacggcggccacagug

SEQ ID NO: 174318 - RNA, 32 nt, Human
gccucucgucuccagccagcaccaagaggaug

SEQ ID NO: 174319 - RNA, 21 nt, Human
gccucucuauccucucuccuc

SEQ ID NO: 174320 - RNA, 32 nt, Human
gccucucucacuuuccuccuucccucuuuguu

SEQ ID NO: 174321 - RNA, 32 nt, Human
gccucucucagcccaggucuccugggcaucug

SEQ ID NO: 174322 - RNA, 17 nt, Human
gccucucucaucugcca

SEQ ID NO: 174323 - RNA, 32 nt, Human
gccucucuccaccgccuccucuggcuccccgg

SEQ ID NO: 174324 - RNA, 32 nt, Human
gccucucuccccuuggcgucugaugaccacag

SEQ ID NO: 174325 - RNA, 19 nt, Human
gccucucucccgcccagcc

SEQ ID NO: 174326 - RNA, 32 nt, Human
gccucucucccuccuuucagcccucuccaggu

SEQ ID NO: 174327 - RNA, 32 nt, Human
gccucucuccugcugcuccuccagcuguaucu

SEQ ID NO: 174328 - RNA, 32 nt, Human
gccucucuccuggagugagggggcugaaguca

SEQ ID NO: 174329 - RNA, 32 nt, Human
gccucucucucccauuagaaugccaucaccuc

SEQ ID NO: 174330 - RNA, 20 nt, Human
gccucucucucccauucaga

SEQ ID NO: 174331 - RNA, 20 nt, Human
gccucucucucccucccucu

SEQ ID NO: 174332 - RNA, 21 nt, Human
gccucucucuccuccucuucu

SEQ ID NO: 174333 - RNA, 32 nt, Human
gccucucucugccucuuuucuccugucccucc

SEQ ID NO: 174334 - RNA, 24 nt, Human
gccucucugaaauguccauccacu

SEQ ID NO: 174335 - RNA, 32 nt, Human
gccucucugaaggaugugcguggucauccacu

SEQ ID NO: 174336 - RNA, 20 nt, Human
gccucucugagcugguuucc

SEQ ID NO: 174337 - RNA, 32 nt, Human
gccucucugaggaggagguggccaagaagcgg

SEQ ID NO: 174338 - RNA, 32 nt, Human
gccucucugaggcggaggaugcgggagcgcau

SEQ ID NO: 174339 - RNA, 27 nt, Human
gccucucugaugcacucucuuccaucu

SEQ ID NO: 174340 - RNA, 24 nt, Human
gccucucugauucucucucccucu

SEQ ID NO: 174341 - RNA, 32 nt, Human
gccucucugcagcugcuagcucagacaccaaa

SEQ ID NO: 174342 - RNA, 27 nt, Human
gccucucugcccaccucugcuuccucu

SEQ ID NO: 174343 - RNA, 32 nt, Human
gccucucugcccaccucugcuuccucuaggaa

SEQ ID NO: 174344 - RNA, 23 nt, Human
gccucucugcccaggcucuccuc

SEQ ID NO: 174345 - RNA, 32 nt, Human
gccucucugccugaaucugccucucucugccu

SEQ ID NO: 174346 - RNA, 18 nt, Human
gccucucugcugcugcgu

SEQ ID NO: 174347 - RNA, 21 nt, Human
gccucucuggccucuucccuu

SEQ ID NO: 174348 - RNA, 23 nt, Human
gccucucugggaagcucuuccuc

SEQ ID NO: 174349 - RNA, 32 nt, Human
gccucucugggcuggaggugggggugggggca

SEQ ID NO: 174350 - RNA, 24 nt, Human
gccucucuguacaguaacgccacu

SEQ ID NO: 174351 - RNA, 22 nt, Human
gccucucugucaucuccccuuc

SEQ ID NO: 174352 - RNA, 18 nt, Human
gccucucuguccuucccu

SEQ ID NO: 174353 - RNA, 32 nt, Human
gccucucugugaagcuccucaagugccacccu

SEQ ID NO: 174354 - RNA, 19 nt, Human
gccucucugugccagggag

SEQ ID NO: 174355 - RNA, 25 nt, Human
gccucucugugggccucucuccagg

SEQ ID NO: 174356 - RNA, 22 nt, Human
gccucucuguuucccuccuucu

SEQ ID NO: 174357 - RNA, 32 nt, Human
gccucucuucacacacuuggcggugaggaucg

SEQ ID NO: 174358 - RNA, 32 nt, Human
gccucucuucauuuucuuucaucuacauggcu

SEQ ID NO: 174359 - RNA, 32 nt, Human
gccucucuucucuucucuuccuccuccacuuc

SEQ ID NO: 174360 - RNA, 21 nt, Human
gccucucuugguuccuuccuu

SEQ ID NO: 174361 - RNA, 22 nt, Human
gccucugaacccccuuucccca

SEQ ID NO: 174362 - RNA, 32 nt, Human
gccucugaacucagcuggcuugagaagcccag

SEQ ID NO: 174363 - RNA, 32 nt, Human
gccucugaagggauuccucacugugggcagcu

SEQ ID NO: 174364 - RNA, 32 nt, Human
gccucugaauauacacagauugccaaagucac

SEQ ID NO: 174365 - RNA, 32 nt, Human
gccucugacacacagcucuguccugggaguga

SEQ ID NO: 174366 - RNA, 18 nt, Human
gccucugacuccacuucu

SEQ ID NO: 174367 - RNA, 32 nt, Human
gccucugacucuguccccaugggcuggucucc

SEQ ID NO: 174368 - RNA, 21 nt, Human
gccucugagccagccucccca

SEQ ID NO: 174369 - RNA, 32 nt, Human
gccucugagccccaggcccggcccagcccgcc

SEQ ID NO: 174370 - RNA, 32 nt, Human
gccucugagccccggccucggaccgcccacuc

SEQ ID NO: 174371 - RNA, 32 nt, Human
gccucugagccccugaucugaagccagaaggg

SEQ ID NO: 174372 - RNA, 32 nt, Human
gccucugaguagcugggacuacaagugcaugc

SEQ ID NO: 174373 - RNA, 32 nt, Human
gccucugaguagcugggauuacaggcacacac

SEQ ID NO: 174374 - RNA, 32 nt, Human
gccucugagugaggacagcaggcagggacugu

SEQ ID NO: 174375 - RNA, 25 nt, Human
gccucugaguuagguacccaagcca

SEQ ID NO: 174376 - RNA, 32 nt, Human
gccucugaucagugaugaccuugguaugcugg

SEQ ID NO: 174377 - RNA, 32 nt, Human
gccucugauuuacacugguucaauuuacaaau

SEQ ID NO: 174378 - RNA, 32 nt, Human
gccucugcaacagcucugccuccucuccagug

SEQ ID NO: 174379 - RNA, 32 nt, Human
gccucugcaacuugagccuggcugcgaccccu

SEQ ID NO: 174380 - RNA, 32 nt, Human
gccucugcacacacauuggcggguggggugca

SEQ ID NO: 174381 - RNA, 32 nt, Human
gccucugcacuccagccugggugacagaguga

SEQ ID NO: 174382 - RNA, 21 nt, Human
gccucugcagagccaccagcc

SEQ ID NO: 174383 - RNA, 32 nt, Human
gccucugcagagccaccagccaugcccgggau

SEQ ID NO: 174384 - RNA, 32 nt, Human
gccucugcagaggggaccucagccugucacug

SEQ ID NO: 174385 - RNA, 32 nt, Human
gccucugcagcccaagacucaggcuggggcca

SEQ ID NO: 174386 - RNA, 32 nt, Human
gccucugcagcucgaggcaaggccuggggugc

SEQ ID NO: 174387 - RNA, 21 nt, Human
gccucugcagggcaaggcagg

SEQ ID NO: 174388 - RNA, 32 nt, Human
gccucugcagggugguccagccuaggugacag

SEQ ID NO: 174389 - RNA, 32 nt, Human
gccucugcaggugaccguaacaacaugcaaau

SEQ ID NO: 174390 - RNA, 32 nt, Human
gccucugcauuccagccuuggugacagagcaa

SEQ ID NO: 174391 - RNA, 32 nt, Human
gccucugccacaccugguggcugaacaucucu

SEQ ID NO: 174392 - RNA, 16 nt, Human
gccucugccacccaga

SEQ ID NO: 174393 - RNA, 32 nt, Human
gccucugccacccuccaccuccucggucagcc

SEQ ID NO: 174394 - RNA, 21 nt, Human
gccucugccagcagccgcucg

SEQ ID NO: 174395 - RNA, 32 nt, Human
gccucugccaugggacaccaccucucaggcag

SEQ ID NO: 174396 - RNA, 32 nt, Human
gccucugcccacccuuccccaggccucugcca

SEQ ID NO: 174397 - RNA, 20 nt, Human
gccucugcccaccucuucuc

SEQ ID NO: 174398 - RNA, 19 nt, Human
gccucugcccagccaagcc

SEQ ID NO: 174399 - RNA, 32 nt, Human
gccucugccccacugccagccugagugggcaa

SEQ ID NO: 174400 - RNA, 16 nt, Human
gccucugccccagccc

SEQ ID NO: 174401 - RNA, 32 nt, Human
gccucugccccagcccacuggcaugccaccca

SEQ ID NO: 174402 - RNA, 18 nt, Human
gccucugcccccagggug

SEQ ID NO: 174403 - RNA, 18 nt, Human
gccucugccccucagggg

SEQ ID NO: 174404 - RNA, 32 nt, Human
gccucugcccuccuccagcccggauggcucuc

SEQ ID NO: 174405 - RNA, 32 nt, Human
gccucugcccuccuucugucuccugggugguc

SEQ ID NO: 174406 - RNA, 20 nt, Human
gccucugccgccgccgccgc

SEQ ID NO: 174407 - RNA, 17 nt, Human
gccucugccuccagccc

SEQ ID NO: 174408 - RNA, 18 nt, Human
gccucugccucccaagua

SEQ ID NO: 174409 - RNA, 32 nt, Human
gccucugccucccggguucaagcaauucuccu

SEQ ID NO: 174410 - RNA, 32 nt, Human
gccucugccuccuggguucaagcgauucuccu

SEQ ID NO: 174411 - RNA, 32 nt, Human
gccucugccuccuggguuccaagcgauucucc

SEQ ID NO: 174412 - RNA, 17 nt, Human
gccucugccucgggcca

SEQ ID NO: 174413 - RNA, 32 nt, Human
gccucugccucucucagccgcaucacccuguu

SEQ ID NO: 174414 - RNA, 32 nt, Human
gccucugccugccucccgccugugcacucugg

SEQ ID NO: 174415 - RNA, 32 nt, Human
gccucugccuugccugcauacaugcaauguau

SEQ ID NO: 174416 - RNA, 21 nt, Human
gccucugcgccugucccuccc

SEQ ID NO: 174417 - RNA, 32 nt, Human
gccucugcuacagcguggagugggauggcucu

SEQ ID NO: 174418 - RNA, 32 nt, Human
gccucugcuccugcccauagacauuuucuuac

SEQ ID NO: 174419 - RNA, 32 nt, Human
gccucugcuccugcuccugccugcauguucuc

SEQ ID NO: 174420 - RNA, 32 nt, Human
gccucugcucugauuacugcucugccuuccau

SEQ ID NO: 174421 - RNA, 32 nt, Human
gccucugcugaguguaccugacaguaagucua

SEQ ID NO: 174422 - RNA, 32 nt, Human
gccucugcuggagccccugccugaccagcuuc

SEQ ID NO: 174423 - RNA, 32 nt, Human
gccucugcugggacagggaacagagggaugcg

SEQ ID NO: 174424 - RNA, 32 nt, Human
gccucugcugggacagggaauagagggaugug

SEQ ID NO: 174425 - RNA, 19 nt, Human
gccucugcuguccuuccca

SEQ ID NO: 174426 - RNA, 32 nt, Human
gccucugcuguuccugucuuugcucacacccu

SEQ ID NO: 174427 - RNA, 32 nt, Human
gccucuggaccugcuacagaucaaagacuccu

SEQ ID NO: 174428 - RNA, 32 nt, Human
gccucuggaccugcuggucugcacugacagcc

SEQ ID NO: 174429 - RNA, 32 nt, Human
gccucuggagaugcuuaggaugcugaauuuua

SEQ ID NO: 174430 - RNA, 32 nt, Human
gccucuggauccuccguggaccgaaccguccc

SEQ ID NO: 174431 - RNA, 32 nt, Human
gccucuggauccuggggaagguuccagucccu

SEQ ID NO: 174432 - RNA, 32 nt, Human
gccucuggauggcccugcccugacuggggcug

SEQ ID NO: 174433 - RNA, 32 nt, Human
gccucuggauucucuucauggccagguggcug

SEQ ID NO: 174434 - RNA, 32 nt, Human
gccucuggcagcguucucaggcuagcccuccc

SEQ ID NO: 174435 - RNA, 19 nt, Human
gccucuggccauugccaua

SEQ ID NO: 174436 - RNA, 32 nt, Human
gccucuggcccaggccccuccccaccagggcu

SEQ ID NO: 174437 - RNA, 17 nt, Human
gccucuggccucugaug

SEQ ID NO: 174438 - RNA, 23 nt, Human
gccucuggcgcccccacucaaga

SEQ ID NO: 174439 - RNA, 32 nt, Human
gccucuggcugaggcaguagcauagaggaucc

SEQ ID NO: 174440 - RNA, 32 nt, Human
gccucuggcugcagaagagcaggaccacaauc

SEQ ID NO: 174441 - RNA, 32 nt, Human
gccucuggcugcagaauacaaagucccgggcu

SEQ ID NO: 174442 - RNA, 32 nt, Human
gccucuggcuuccauucugggccuggcaaggc

SEQ ID NO: 174443 - RNA, 32 nt, Human
gccucuggcuucccuuggagaggggcagaguc

SEQ ID NO: 174444 - RNA, 32 nt, Human
gccucugggaagcacaggccagcaccucccca

SEQ ID NO: 174445 - RNA, 32 nt, Human
gccucugggaccccgccucgccucugagacac

SEQ ID NO: 174446 - RNA, 32 nt, Human
gccucugggaccucggggucccagggaaccca

SEQ ID NO: 174447 - RNA, 32 nt, Human
gccucugggagagaggaagaagaaaggggccc

SEQ ID NO: 174448 - RNA, 32 nt, Human
gccucugggagcccccuaggaagcaccagccu

SEQ ID NO: 174449 - RNA, 32 nt, Human
gccucugggaggcgcagaugcccacacagcca

SEQ ID NO: 174450 - RNA, 32 nt, Human
gccucugggagguguaacugaggcaggcaucg

SEQ ID NO: 174451 - RNA, 32 nt, Human
gccucugggauuauacucugaagaacccgcag

SEQ ID NO: 174452 - RNA, 32 nt, Human
gccucugggauuccaccuugcuaucucugcuc

SEQ ID NO: 174453 - RNA, 32 nt, Human
gccucugggcaggcuugcuuuuaugggggagg

SEQ ID NO: 174454 - RNA, 22 nt, Human
gccucugggccaugccaggcca

SEQ ID NO: 174455 - RNA, 32 nt, Human
gccucugggcccugaaccccugcuggggcucc

SEQ ID NO: 174456 - RNA, 32 nt, Human
gccucugggccugugugucugugagcucaacc

SEQ ID NO: 174457 - RNA, 32 nt, Human
gccucuggggccuuggcacacacacauucgug

SEQ ID NO: 174458 - RNA, 32 nt, Human
gccucugguagccuuaagcccaaagggcagug

SEQ ID NO: 174459 - RNA, 32 nt, Human
gccucuggugagccaacggggcccaguccccu

SEQ ID NO: 174460 - RNA, 32 nt, Human
gccucugguggaccucuggugggcaggagcuu

SEQ ID NO: 174461 - RNA, 32 nt, Human
gccucugguguuuucccugcccaggcuggagc

SEQ ID NO: 174462 - RNA, 32 nt, Human
gccucugguguuuuccgugcccaggcuggagc

SEQ ID NO: 174463 - RNA, 32 nt, Human
gccucuguaaccuuccacccccucugcggaag

SEQ ID NO: 174464 - RNA, 32 nt, Human
gccucuguaagccuguguauguuaucaauacu

SEQ ID NO: 174465 - RNA, 32 nt, Human
gccucuguaccauuuuuccuugagugugcuuu

SEQ ID NO: 174466 - RNA, 31 nt, Human
gccucuguaugcccuaggccugugccaaagu

SEQ ID NO: 174467 - RNA, 32 nt, Human
gccucugucagagguguuuaaaccagauugac

SEQ ID NO: 174468 - RNA, 19 nt, Human
gccucugucccauauccaa

SEQ ID NO: 174469 - RNA, 21 nt, Human
gccucuguccccuccaccucu

SEQ ID NO: 174470 - RNA, 32 nt, Human
gccucugucgcccaggcuggagugcaguggcg

SEQ ID NO: 174471 - RNA, 18 nt, Human
gccucugucucuuccgcu

SEQ ID NO: 174472 - RNA, 24 nt, Human
gccucugucuuccuuggggcaccu

SEQ ID NO: 174473 - RNA, 32 nt, Human
gccucugugaccaccugcuagagggagauucu

SEQ ID NO: 174474 - RNA, 32 nt, Human
gccucuguggaggaugcaggauugggcuuggg

SEQ ID NO: 174475 - RNA, 32 nt, Human
gccucuguggcacagcugcuugccauugccug

SEQ ID NO: 174476 - RNA, 32 nt, Human
gccucuguggggagucugccucccagacuggc

SEQ ID NO: 174477 - RNA, 32 nt, Human
gccucuguuggcacaggucuggagaagugcag

SEQ ID NO: 174478 - RNA, 32 nt, Human
gccucuguuuaucucugaccucaucgcuuacu

SEQ ID NO: 174479 - RNA, 32 nt, Human
gccucuguuuccuguaccagauuuuuguauuc

SEQ ID NO: 174480 - RNA, 24 nt, Human
gccucuguuuucucaucugugaaa

SEQ ID NO: 174481 - RNA, 25 nt, Human
gccucuuaagucuguucucugggga

SEQ ID NO: 174482 - RNA, 22 nt, Human
gccucuuacucccugggcaccu

SEQ ID NO: 174483 - RNA, 32 nt, Human
gccucuuacuugggcugaccugacccccgaaa

SEQ ID NO: 174484 - RNA, 32 nt, Human
gccucuuagcagagccaaaagccagcagagag

SEQ ID NO: 174485 - RNA, 22 nt, Human
gccucuuagcagccucuucccu

SEQ ID NO: 174486 - RNA, 32 nt, Human
gccucuuauuugauguggaucagagcuaagau

SEQ ID NO: 174487 - RNA, 32 nt, Human
gccucuucacuuccccuaaaccccugucccau

SEQ ID NO: 174488 - RNA, 19 nt, Human
gccucuucagccuuucuca

SEQ ID NO: 174489 - RNA, 19 nt, Human
gccucuucagucugucuca

SEQ ID NO: 174490 - RNA, 18 nt, Human
gccucuucauccguccag

SEQ ID NO: 174491 - RNA, 32 nt, Human
gccucuuccacucuggagugaaguuaaugaaa

SEQ ID NO: 174492 - RNA, 32 nt, Human
gccucuuccacugugaucuccuccagggcuuu

SEQ ID NO: 174493 - RNA, 32 nt, Human
gccucuuccaucuuuugccacugaucuugugu

SEQ ID NO: 174494 - RNA, 32 nt, Human
gccucuuccauugaccagcugugugaccuugg

SEQ ID NO: 174495 - RNA, 22 nt, Human
gccucuuccccaagccgagcca

SEQ ID NO: 174496 - RNA, 32 nt, Human
gccucuuccccgcaggcucuggcuggccgcag

SEQ ID NO: 174497 - RNA, 32 nt, Human
gccucuucccucuuccuucccugcugugaaag

SEQ ID NO: 174498 - RNA, 32 nt, Human
gccucuucccuggggcugaaucaggcccugcu

SEQ ID NO: 174499 - RNA, 32 nt, Human
gccucuuccucccucccugcaggguagggcgc

SEQ ID NO: 174500 - RNA, 19 nt, Human
gccucuuccuccucaggga

SEQ ID NO: 174501 - RNA, 32 nt, Human
gccucuuccuuggggguggcuaccuccaaaaa

SEQ ID NO: 174502 - RNA, 32 nt, Human
gccucuucggacccucucucacucccugucuu

SEQ ID NO: 174503 - RNA, 21 nt, Human
gccucuucggccuccucgccc

SEQ ID NO: 174504 - RNA, 19 nt, Human
gccucuucuccaucugaga

SEQ ID NO: 174505 - RNA, 15 nt, Human
gccucuucucucaga

SEQ ID NO: 174506 - RNA, 32 nt, Human
gccucuucucuucagcucccuuagcuuggcuc

SEQ ID NO: 174507 - RNA, 18 nt, Human
gccucuucugcccaggug

SEQ ID NO: 174508 - RNA, 32 nt, Human
gccucuucugcgcgcacaaccuaggcaguaau

SEQ ID NO: 174509 - RNA, 32 nt, Human
gccucuucuggaccaggaaacucuccacauau

SEQ ID NO: 174510 - RNA, 32 nt, Human
gccucuucuggccuggugucuccucaugcccc

SEQ ID NO: 174511 - RNA, 32 nt, Human
gccucuucugggagaccccucuccccacguag

SEQ ID NO: 174512 - RNA, 32 nt, Human
gccucuucugggcuacugccacugugugccuu

SEQ ID NO: 174513 - RNA, 32 nt, Human
gccucuucuucgcccuguucugugccagacgc

SEQ ID NO: 174514 - RNA, 17 nt, Human
gccucuucuucuucaga

SEQ ID NO: 174515 - RNA, 32 nt, Human
gccucuugaaugcuuaaaugaucaaggaggga

SEQ ID NO: 174516 - RNA, 32 nt, Human
gccucuugagcaguggcugguccagggcuagu

SEQ ID NO: 174517 - RNA, 24 nt, Human
gccucuugccugcucuggccuccu

SEQ ID NO: 174518 - RNA, 32 nt, Human
gccucuugcucgcucuagcugcugggaggaaa

SEQ ID NO: 174519 - RNA, 32 nt, Human
gccucuugcugccauucuuucucuccucugcu

SEQ ID NO: 174520 - RNA, 32 nt, Human
gccucuuggagacagaugaugacuggcaagga

SEQ ID NO: 174521 - RNA, 32 nt, Human
gccucuuggaugcacacuuuguguguacauag

SEQ ID NO: 174522 - RNA, 29 nt, Human
gccucuuggcugcuuccaguucccgccau

SEQ ID NO: 174523 - RNA, 32 nt, Human
gccucuuggcugcuuccaguucccgccauuac

SEQ ID NO: 174524 - RNA, 32 nt, Human
gccucuugggccaggcugugcccagccagccc

SEQ ID NO: 174525 - RNA, 32 nt, Human
gccucuugguacugcugaccccagccaggcua

SEQ ID NO: 174526 - RNA, 32 nt, Human
gccucuuggugcugccuuggccguauuuggca

SEQ ID NO: 174527 - RNA, 32 nt, Human
gccucuugguuucuuuucuugccuuccccuac

SEQ ID NO: 174528 - RNA, 20 nt, Human
gccucuuguccuccugccuc

SEQ ID NO: 174529 - RNA, 32 nt, Human
gccucuuguccucuccccaguggcuccaggcc

SEQ ID NO: 174530 - RNA, 32 nt, Human
gccucuuguuuuccaucuucauggccuuuucu

SEQ ID NO: 174531 - RNA, 32 nt, Human
gccucuuucacacccacuacagaccucagccc

SEQ ID NO: 174532 - RNA, 32 nt, Human
gccucuuucacucagaagcucaggucgccucc

SEQ ID NO: 174533 - RNA, 32 nt, Human
gccucuuuccagggaagccucauucuacugcu

SEQ ID NO: 174534 - RNA, 32 nt, Human
gccucuuucccagcuuucuugcuugccuucug

SEQ ID NO: 174535 - RNA, 32 nt, Human
gccucuuuccucagccuuaagaaccaucugcc

SEQ ID NO: 174536 - RNA, 18 nt, Human
gccucuuuccuccuccuc

SEQ ID NO: 174537 - RNA, 32 nt, Human
gccucuuucucagguccugcaggcuggucucu

SEQ ID NO: 174538 - RNA, 24 nt, Human
gccucuuucuccucucugcccccu

SEQ ID NO: 174539 - RNA, 32 nt, Human
gccucuuucugcucuaucuccaccuccuuuuc

SEQ ID NO: 174540 - RNA, 32 nt, Human
gccucuuucuuucugcucccucauucucuccc

SEQ ID NO: 174541 - RNA, 32 nt, Human
gccucuuugccucugcuuugucaugccauuaa

SEQ ID NO: 174542 - RNA, 32 nt, Human
gccucuuugcuacuuugugagggaggcaggaa

SEQ ID NO: 174543 - RNA, 32 nt, Human
gccucuuugcucuccccucuugccucaggaaa

SEQ ID NO: 174544 - RNA, 32 nt, Human
gccucuuugcugcaaaagggaauuggaaaguc

SEQ ID NO: 174545 - RNA, 32 nt, Human
gccucuuugcugcuuuguuuuccuccugauuc

SEQ ID NO: 174546 - RNA, 32 nt, Human
gccucuuuguccauuauucauuuuguggcaaa

SEQ ID NO: 174547 - RNA, 32 nt, Human
gccucuuugugagccuccuggcugggugcuca

SEQ ID NO: 174548 - RNA, 32 nt, Human
gccucuuugugccaggcaugugggugucuuag

SEQ ID NO: 174549 - RNA, 32 nt, Human
gccucuuuucaugugggaugaagacaucugug

SEQ ID NO: 174550 - RNA, 32 nt, Human
gccucuuuuccccuuaacaaggauuucuuaug

SEQ ID NO: 174551 - RNA, 32 nt, Human
gccucuuuucuccugucccuccaggagucucu

SEQ ID NO: 174552 - RNA, 32 nt, Human
gccucuuuugccgguauucagugaagaaagca

SEQ ID NO: 174553 - RNA, 32 nt, Human
gccucuuuuguaugugggagaccaugguguug

SEQ ID NO: 174554 - RNA, 21 nt, Human
gccugaaaaggagcagccucg

SEQ ID NO: 174555 - RNA, 32 nt, Human
gccugaaaaguggcauggugcguggggccugg

SEQ ID NO: 174556 - RNA, 32 nt, Human
gccugaaacaacaccucugccugugcucccac

SEQ ID NO: 174557 - RNA, 32 nt, Human
gccugaaacagccuggaucuuauuccuguacu

SEQ ID NO: 174558 - RNA, 24 nt, Human
gccugaaaccccagcuacuuggga

SEQ ID NO: 174559 - RNA, 32 nt, Human
gccugaaacgcccaugugccacugacuaggag

SEQ ID NO: 174560 - RNA, 32 nt, Human
gccugaaagagacacagucacauggccagaug

SEQ ID NO: 174561 - RNA, 32 nt, Human
gccugaaagagagcaagaacauguggaucuuu

SEQ ID NO: 174562 - RNA, 32 nt, Human
gccugaaagugcuaggauuacaggcgugagcc

SEQ ID NO: 174563 - RNA, 21 nt, Human
gccugaaauccaagucuuccu

SEQ ID NO: 174564 - RNA, 21 nt, Human
gccugaaaucccagcuacuca

SEQ ID NO: 174565 - RNA, 24 nt, Human
gccugaaaucccagcuacucaaga

SEQ ID NO: 174566 - RNA, 24 nt, Human
gccugaaaucccagcuacuuggga

SEQ ID NO: 174567 - RNA, 32 nt, Human
gccugaacagccccuucucucccuccaccccc

SEQ ID NO: 174568 - RNA, 32 nt, Human
gccugaacccagaagcggagguugcagugagc

SEQ ID NO: 174569 - RNA, 32 nt, Human
gccugaacccagaggcggagguuguagugagc

SEQ ID NO: 174570 - RNA, 32 nt, Human
gccugaacccaggaagcagauguuguaccgag

SEQ ID NO: 174571 - RNA, 32 nt, Human
gccugaacccaggaggcagagguugcaguaag

SEQ ID NO: 174572 - RNA, 32 nt, Human
gccugaacccaggaggcagagguugcggugag

SEQ ID NO: 174573 - RNA, 32 nt, Human
gccugaacccaggaggcggagcuugcagugag

SEQ ID NO: 174574 - RNA, 32 nt, Human
gccugaacccaggaggcggagguugcagggag

SEQ ID NO: 174575 - RNA, 32 nt, Human
gccugaacccaggaggcggagguugcagugag

SEQ ID NO: 174576 - RNA, 32 nt, Human
gccugaacccaggagguggagguugcagugag

SEQ ID NO: 174577 - RNA, 32 nt, Human
gccugaaccccagggcuguaacugccaggcuc

SEQ ID NO: 174578 - RNA, 32 nt, Human
gccugaaccccggccuccacccugggggaggc

SEQ ID NO: 174579 - RNA, 32 nt, Human
gccugaacccgggaggcagaggcugcagugag

SEQ ID NO: 174580 - RNA, 32 nt, Human
gccugaaccuaggagguggaggcugcagcgag

SEQ ID NO: 174581 - RNA, 32 nt, Human
gccugaacgugccuucagaggaggaggucuac

SEQ ID NO: 174582 - RNA, 32 nt, Human
gccugaacucaggcagcccuucaguggcuucu

SEQ ID NO: 174583 - RNA, 32 nt, Human
gccugaacugugcccccacccuccaggaaggg

SEQ ID NO: 174584 - RNA, 32 nt, Human
gccugaacuuuccuuccugucacugugaauac

SEQ ID NO: 174585 - RNA, 32 nt, Human
gccugaagacgaagagaaagagcaagguuauu

SEQ ID NO: 174586 - RNA, 32 nt, Human
gccugaagagccccaaagcaggaagaagcucc

SEQ ID NO: 174587 - RNA, 32 nt, Human
gccugaagauccaggaggacuucuuggaggag

SEQ ID NO: 174588 - RNA, 24 nt, Human
gccugaagcaauccgcccaccuca

SEQ ID NO: 174589 - RNA, 32 nt, Human
gccugaagcagaagguggugacccuggcaagc

SEQ ID NO: 174590 - RNA, 32 nt, Human
gccugaagccugggcaauaagugagaguuaga

SEQ ID NO: 174591 - RNA, 32 nt, Human
gccugaagcuacucgaugggcgagguccgccc

SEQ ID NO: 174592 - RNA, 32 nt, Human
gccugaaggagaaggguggagugagaugggaa

SEQ ID NO: 174593 - RNA, 32 nt, Human
gccugaaguacacucucgcugugcugucauuc

SEQ ID NO: 174594 - RNA, 21 nt, Human
gccugaagucccagcuacuca

SEQ ID NO: 174595 - RNA, 24 nt, Human
gccugaagucccagcuacucagga

SEQ ID NO: 174596 - RNA, 32 nt, Human
gccugaagugguagccccgccugcugcuucuc

SEQ ID NO: 174597 - RNA, 32 nt, Human
gccugaauacuggcccuggacucccuuuucca

SEQ ID NO: 174598 - RNA, 32 nt, Human
gccugaauccaucaggacuugggaaacagaga

SEQ ID NO: 174599 - RNA, 32 nt, Human
gccugaaucuucaguuccccagucucgggggc

SEQ ID NO: 174600 - RNA, 32 nt, Human
gccugaauggcagaagaagaagaggaaaacuc

SEQ ID NO: 174601 - RNA, 18 nt, Human
gccugaauuccugacaca

SEQ ID NO: 174602 - RNA, 32 nt, Human
gccugaauucuuucuuuucgccgacacgaugg

SEQ ID NO: 174603 - RNA, 32 nt, Human
gccugaauuucaguggccucagccugagccug

SEQ ID NO: 174604 - RNA, 32 nt, Human
gccugaauuuggauugccugcucucuuuaaag

SEQ ID NO: 174605 - RNA, 32 nt, Human
gccugacacaggacaggagcugcacgaguuug

SEQ ID NO: 174606 - RNA, 32 nt, Human
gccugacacccaaggcuggauguuugugcucc

SEQ ID NO: 174607 - RNA, 32 nt, Human
gccugacacccagggaugagcaguguccagug

SEQ ID NO: 174608 - RNA, 24 nt, Human
gccugacacucauggcuuccuagg

SEQ ID NO: 174609 - RNA, 23 nt, Human
gccugacagagacccccagggca

SEQ ID NO: 174610 - RNA, 32 nt, Human
gccugacagccuggcuagcacaggaggacaug

SEQ ID NO: 174611 - RNA, 17 nt, Human
gccugacaguccaccuc

SEQ ID NO: 174612 - RNA, 32 nt, Human
gccugacagugaugggacagggaggcuucagu

SEQ ID NO: 174613 - RNA, 32 nt, Human
gccugacaucuucugcccugguccccuuucuc

SEQ ID NO: 174614 - RNA, 32 nt, Human
gccugacauggugaaaccccaucucuacgaaa

SEQ ID NO: 174615 - RNA, 32 nt, Human
gccugaccacagauucccagagggccaggugu

SEQ ID NO: 174616 - RNA, 32 nt, Human
gccugaccaccaccccugcacccccagacaaa

SEQ ID NO: 174617 - RNA, 32 nt, Human
gccugaccaccauccugccaccaccuucucuu

SEQ ID NO: 174618 - RNA, 32 nt, Human
gccugaccaggaguucgaggcugcagugagcc

SEQ ID NO: 174619 - RNA, 32 nt, Human
gccugacccacugcccuagccccacgcuaugc

SEQ ID NO: 174620 - RNA, 18 nt, Human
gccugacccagcugcccg

SEQ ID NO: 174621 - RNA, 32 nt, Human
gccugacccaggccggccagcauggcagagag

SEQ ID NO: 174622 - RNA, 32 nt, Human
gccugacccaggcugcuaagagggcaaggaga

SEQ ID NO: 174623 - RNA, 32 nt, Human
gccugacccauacaaaagucugggacaggggc

SEQ ID NO: 174624 - RNA, 32 nt, Human
gccugaccccacugcagccucugcccagccag

SEQ ID NO: 174625 - RNA, 32 nt, Human
gccugacccuagaauggggacagggaaaguga

SEQ ID NO: 174626 - RNA, 32 nt, Human
gccugacccuggucuggucucagaaucacuuu

SEQ ID NO: 174627 - RNA, 32 nt, Human
gccugaccggcuccauggcagcuccccaucuu

SEQ ID NO: 174628 - RNA, 32 nt, Human
gccugaccucaagugauccguccgccucggcc

SEQ ID NO: 174629 - RNA, 32 nt, Human
gccugaccuccaccguaccuccacaucacuau

SEQ ID NO: 174630 - RNA, 32 nt, Human
gccugaccucgaccuccgccgugcgggcccga

SEQ ID NO: 174631 - RNA, 21 nt, Human
gccugaccuggcugcugcucu

SEQ ID NO: 174632 - RNA, 32 nt, Human
gccugaccugguguauugcuggauucuuggcc

SEQ ID NO: 174633 - RNA, 32 nt, Human
gccugaccuguguuuuggcaaggugauccuuc

SEQ ID NO: 174634 - RNA, 32 nt, Human
gccugaccuugaggagucuugugugcauugcu

SEQ ID NO: 174635 - RNA, 32 nt, Human
gccugacgaaauggaaacacacacagacacac

SEQ ID NO: 174636 - RNA, 21 nt, Human
gccugacgcuggagugcggug

SEQ ID NO: 174637 - RNA, 32 nt, Human
gccugacggagccggaggcugggagccgcggc

SEQ ID NO: 174638 - RNA, 32 nt, Human
gccugacggcuucucggcucuacccucacccu

SEQ ID NO: 174639 - RNA, 32 nt, Human
gccugacucagaugucucucuuugccauuuuu

SEQ ID NO: 174640 - RNA, 32 nt, Human
gccugacucaggaagccaggugagaaaaccau

SEQ ID NO: 174641 - RNA, 32 nt, Human
gccugacucagggcagcucagaguguggggca

SEQ ID NO: 174642 - RNA, 17 nt, Human
gccugacuccaaaguca

SEQ ID NO: 174643 - RNA, 32 nt, Human
gccugacucuagacacuaacuuaguuccaggu

SEQ ID NO: 174644 - RNA, 22 nt, Human
gccugacucucucccucccucu

SEQ ID NO: 174645 - RNA, 32 nt, Human
gccugacucugguuccccaacucccuguucug

SEQ ID NO: 174646 - RNA, 32 nt, Human
gccugacugcaacucaccucgaaggcggacca

SEQ ID NO: 174647 - RNA, 32 nt, Human
gccugacugccaggaccccaggucaggggcuc

SEQ ID NO: 174648 - RNA, 32 nt, Human
gccugacuggaagacggacacacguuguggaa

SEQ ID NO: 174649 - RNA, 32 nt, Human
gccugacuggggacaccugagaguaguauagu

SEQ ID NO: 174650 - RNA, 32 nt, Human
gccugacuguauuuuucauccaucuuuucuga

SEQ ID NO: 174651 - RNA, 19 nt, Human
gccugacugugccagggag

SEQ ID NO: 174652 - RNA, 32 nt, Human
gccugacuugcuggagucacacaggaaguugg

SEQ ID NO: 174653 - RNA, 32 nt, Human
gccugacuugggaggccggcggaucagcaauu

SEQ ID NO: 174654 - RNA, 23 nt, Human
gccugacuuucauggaaggagac

SEQ ID NO: 174655 - RNA, 32 nt, Human
gccugagaaauccuggcauuuguagcccaggg

SEQ ID NO: 174656 - RNA, 32 nt, Human
gccugagaacugggaggaagcuggagaaaaga

SEQ ID NO: 174657 - RNA, 19 nt, Human
gccugagacacucaccucu

SEQ ID NO: 174658 - RNA, 32 nt, Human
gccugagacaucugcugcuuggcucaaacugu

SEQ ID NO: 174659 - RNA, 32 nt, Human
gccugagaccaggagguugaggcugcagugag

SEQ ID NO: 174660 - RNA, 32 nt, Human
gccugagaccugggaggaagcuggagaaaaga

SEQ ID NO: 174661 - RNA, 32 nt, Human
gccugagagacauggcuuucagaaaacgggaa

SEQ ID NO: 174662 - RNA, 32 nt, Human
gccugagagaugaagguugcagugagccguga

SEQ ID NO: 174663 - RNA, 32 nt, Human
gccugagaucagcuuaguguuugaaauugcuc

SEQ ID NO: 174664 - RNA, 22 nt, Human
gccugagaucaggaguucaaga

SEQ ID NO: 174665 - RNA, 22 nt, Human
gccugagaucaggaguucgaga

SEQ ID NO: 174666 - RNA, 32 nt, Human
gccugagauggaaagucucuucccugcccugg

SEQ ID NO: 174667 - RNA, 32 nt, Human
gccugagauggcugugccagagguucgacucc

SEQ ID NO: 174668 - RNA, 32 nt, Human
gccugagauucugcauuuuucccaagucccua

SEQ ID NO: 174669 - RNA, 32 nt, Human
gccugagcaacaaaagcaaaacucuaucuuua

SEQ ID NO: 174670 - RNA, 32 nt, Human
gccugagcacaggaguuggaggcugcaguaag

SEQ ID NO: 174671 - RNA, 32 nt, Human
gccugagcagaggugggggaguccacccucuc

SEQ ID NO: 174672 - RNA, 32 nt, Human
gccugagcaguuucguggaggggaagaaacag

SEQ ID NO: 174673 - RNA, 32 nt, Human
gccugagcauaagaacugggauugcaggcgug

SEQ ID NO: 174674 - RNA, 32 nt, Human
gccugagcaugcagccuggagaguguucuugu

SEQ ID NO: 174675 - RNA, 32 nt, Human
gccugagcauggaccugagcucuggcucaugg

SEQ ID NO: 174676 - RNA, 32 nt, Human
gccugagccacgcuggacucuguccguucugc

SEQ ID NO: 174677 - RNA, 32 nt, Human
gccugagcccaggaaggggcugcguggcucac

SEQ ID NO: 174678 - RNA, 32 nt, Human
gccugagcccaggaggucaaggcuacagugag

SEQ ID NO: 174679 - RNA, 32 nt, Human
gccugagcccaggagguggaaacugcagagag

SEQ ID NO: 174680 - RNA, 32 nt, Human
gccugagcccaggagguggagguugcagugag

SEQ ID NO: 174681 - RNA, 32 nt, Human
gccugagcccaggaguucaagaccagcuugug

SEQ ID NO: 174682 - RNA, 32 nt, Human
gccugagcccaggaguuugaggcuccagugag

SEQ ID NO: 174683 - RNA, 32 nt, Human
gccugagcccagggaggucaaggcugcaguga

SEQ ID NO: 174684 - RNA, 32 nt, Human
gccugagcccgcugccccagcaggaggucuac

SEQ ID NO: 174685 - RNA, 32 nt, Human
gccugagcccggcgaggguggggagggcaggc

SEQ ID NO: 174686 - RNA, 32 nt, Human
gccugagccgagagaagagaccugggaaauua

SEQ ID NO: 174687 - RNA, 32 nt, Human
gccugagccgcaaaccaaaauuacaacaguac

SEQ ID NO: 174688 - RNA, 32 nt, Human
gccugagccgggaagcaguugcugugguaccu

SEQ ID NO: 174689 - RNA, 32 nt, Human
gccugagccuagggacaguccccagccuggcc

SEQ ID NO: 174690 - RNA, 32 nt, Human
gccugagccugagagcucagaggauuccugcc

SEQ ID NO: 174691 - RNA, 32 nt, Human
gccugagccugcccugaacccaggacccaagg

SEQ ID NO: 174692 - RNA, 32 nt, Human
gccugagccuucaaaggguaaauuuaaucaug

SEQ ID NO: 174693 - RNA, 32 nt, Human
gccugagcuaggagaguaucuagagggcgugg

SEQ ID NO: 174694 - RNA, 32 nt, Human
gccugagcucaagagguugaggcugcagugag

SEQ ID NO: 174695 - RNA, 22 nt, Human
gccugagcucaggaguuugaga

SEQ ID NO: 174696 - RNA, 32 nt, Human
gccugagcucuaucaccugagcuccccugccc

SEQ ID NO: 174697 - RNA, 32 nt, Human
gccugagcugcuuuuuccugccuggauuucug

SEQ ID NO: 174698 - RNA, 20 nt, Human
gccugagcuuuccucaggga

SEQ ID NO: 174699 - RNA, 32 nt, Human
gccugaggaacccccagaugucaccugugccc

SEQ ID NO: 174700 - RNA, 32 nt, Human
gccugaggaaggagagcgccagcucugggcug

SEQ ID NO: 174701 - RNA, 32 nt, Human
gccugaggagcccuccuggagcucaggaggcc

SEQ ID NO: 174702 - RNA, 32 nt, Human
gccugaggagcuggaggaaggggaagccccca

SEQ ID NO: 174703 - RNA, 32 nt, Human
gccugaggaggaggaggagaagcggaugagau

SEQ ID NO: 174704 - RNA, 32 nt, Human
gccugaggagggagcgugagccucccagagcc

SEQ ID NO: 174705 - RNA, 32 nt, Human
gccugaggauucagugccuggugaggacccau

SEQ ID NO: 174706 - RNA, 32 nt, Human
gccugaggcaggcggaucaugaggucaggaga

SEQ ID NO: 174707 - RNA, 19 nt, Human
gccugaggcaucagcguca

SEQ ID NO: 174708 - RNA, 32 nt, Human
gccugaggccaucccacuaacaggagccaggg

SEQ ID NO: 174709 - RNA, 32 nt, Human
gccugaggcucaggcugugcuggcauaagugc

SEQ ID NO: 174710 - RNA, 32 nt, Human
gccugaggcugaagcagugagagaggcccgug

SEQ ID NO: 174711 - RNA, 32 nt, Human
gccugaggcugcaggcaggggaugaccgggac

SEQ ID NO: 174712 - RNA, 32 nt, Human
gccugaggcuuaggagagcugccuucgcugca

SEQ ID NO: 174713 - RNA, 32 nt, Human
gccugagggaagggaggaaggggcggggagag

SEQ ID NO: 174714 - RNA, 22 nt, Human
gccugagggagaggaaaggaca

SEQ ID NO: 174715 - RNA, 32 nt, Human
gccugagggcaggccagagcugaggggcugcu

SEQ ID NO: 174716 - RNA, 32 nt, Human
gccugagggcuguccagaacugcucacccugc

SEQ ID NO: 174717 - RNA, 32 nt, Human
gccugaggggccugggcucagaguccacgucc

SEQ ID NO: 174718 - RNA, 32 nt, Human
gccugagggugggcaugagucuugccagaaug

SEQ ID NO: 174719 - RNA, 32 nt, Human
gccugaggucagaauuugaacauaucagggac

SEQ ID NO: 174720 - RNA, 22 nt, Human
gccugaggucaggaguucaaga

SEQ ID NO: 174721 - RNA, 22 nt, Human
gccugaggucaggaguucgaga

SEQ ID NO: 174722 - RNA, 32 nt, Human
gccugaggucccaucccucccucagacccaug

SEQ ID NO: 174723 - RNA, 23 nt, Human
gccugagguccucaccuuccucu

SEQ ID NO: 174724 - RNA, 32 nt, Human
gccugaggugugauucaaacucagcucagguc

SEQ ID NO: 174725 - RNA, 32 nt, Human
gccugagucccaggaccuggaagcggcugaaa

SEQ ID NO: 174726 - RNA, 32 nt, Human
gccugagucccaggaggccuccuggaagccca

SEQ ID NO: 174727 - RNA, 32 nt, Human
gccugagucccucagcccugaggugccccuga

SEQ ID NO: 174728 - RNA, 21 nt, Human
gccugaguccuuucuuccucu

SEQ ID NO: 174729 - RNA, 24 nt, Human
gccugagugaaggacaaggacaga

SEQ ID NO: 174730 - RNA, 32 nt, Human
gccugagugaggagaggaaggccagcucccag

SEQ ID NO: 174731 - RNA, 32 nt, Human
gccugagugagggcuucccauugcagacaagc

SEQ ID NO: 174732 - RNA, 32 nt, Human
gccugagugggcccuggggacacugucaccag

SEQ ID NO: 174733 - RNA, 32 nt, Human
gccugaguuccagcuacucaggaggcugaggc

SEQ ID NO: 174734 - RNA, 32 nt, Human
gccugaguucuaguucgugcucugucaacugg

SEQ ID NO: 174735 - RNA, 32 nt, Human
gccugaguugacccauggcaggggagaaagcu

SEQ ID NO: 174736 - RNA, 32 nt, Human
gccugauaaaucuauugaacuuaaacauagaa

SEQ ID NO: 174737 - RNA, 32 nt, Human
gccugauaagcuucaaagcugcuuuauucaau

SEQ ID NO: 174738 - RNA, 32 nt, Human
gccugauagggaggggcaggaggcgugcacga

SEQ ID NO: 174739 - RNA, 32 nt, Human
gccugaucaaggcaccuccucugcccacucgg

SEQ ID NO: 174740 - RNA, 32 nt, Human
gccugaucuggagcuugucccagaucuggagc

SEQ ID NO: 174741 - RNA, 17 nt, Human
gccugaugaaagcuuug

SEQ ID NO: 174742 - RNA, 32 nt, Human
gccugaugacagccagaucuguucacaguuag

SEQ ID NO: 174743 - RNA, 32 nt, Human
gccugaugcccaccccugccagucauuccucc

SEQ ID NO: 174744 - RNA, 32 nt, Human
gccugaugccgccucggucucugggugccggg

SEQ ID NO: 174745 - RNA, 17 nt, Human
gccugaugccucaggug

SEQ ID NO: 174746 - RNA, 32 nt, Human
gccugaugcucucugauagcugugccauaagu

SEQ ID NO: 174747 - RNA, 32 nt, Human
gccugauggaccucuccagcucuggcuuccug

SEQ ID NO: 174748 - RNA, 32 nt, Human
gccugaugucaccucaugauuugcuguuacuu

SEQ ID NO: 174749 - RNA, 32 nt, Human
gccugaugucuuucaaaugggagaggaguaaa

SEQ ID NO: 174750 - RNA, 32 nt, Human
gccugaugugggaacagcucuucucccagaug

SEQ ID NO: 174751 - RNA, 32 nt, Human
gccugauucccaagucuguccucucaauuuca

SEQ ID NO: 174752 - RNA, 32 nt, Human
gccugauugcugacccagucucaggccugugg

SEQ ID NO: 174753 - RNA, 24 nt, Human
gccugauuuuagaauucaccagcu

SEQ ID NO: 174754 - RNA, 31 nt, Human
gccugcaaagguggagucaccaaagcucauu

SEQ ID NO: 174755 - RNA, 32 nt, Human
gccugcaacaggcuggccaacaaggcggugca

SEQ ID NO: 174756 - RNA, 32 nt, Human
gccugcaaccauccugccuuuccccagggguc

SEQ ID NO: 174757 - RNA, 32 nt, Human
gccugcaagauggagguugcagugagcucaga

SEQ ID NO: 174758 - RNA, 32 nt, Human
gccugcaagcacuuaaccagccacccagaguu

SEQ ID NO: 174759 - RNA, 20 nt, Human
gccugcaaucccagcacuuu

SEQ ID NO: 174760 - RNA, 23 nt, Human
gccugcaaucccagcuacucagg

SEQ ID NO: 174761 - RNA, 24 nt, Human
gccugcaaucccagcuacucagga

SEQ ID NO: 174762 - RNA, 23 nt, Human
gccugcaaucccagcuacucggg

SEQ ID NO: 174763 - RNA, 24 nt, Human
gccugcaaucccagcuacucggga

SEQ ID NO: 174764 - RNA, 21 nt, Human
gccugcaaucccagcuacuug

SEQ ID NO: 174765 - RNA, 24 nt, Human
gccugcaaucccagcuacuugaga

SEQ ID NO: 174766 - RNA, 22 nt, Human
gccugcaaucccagcuacuugg

SEQ ID NO: 174767 - RNA, 23 nt, Human
gccugcaaucccagcuacuugga

SEQ ID NO: 174768 - RNA, 32 nt, Human
gccugcaauggggaacaggcccuccccaucag

SEQ ID NO: 174769 - RNA, 32 nt, Human
gccugcaauguagaugagccuuuuaguagagc

SEQ ID NO: 174770 - RNA, 32 nt, Human
gccugcacacagcugcucagcaccauuucauu

SEQ ID NO: 174771 - RNA, 32 nt, Human
gccugcacagcaucgugaauuaacugaagugu

SEQ ID NO: 174772 - RNA, 32 nt, Human
gccugcacagcaucuguuccuucugagaccag

SEQ ID NO: 174773 - RNA, 32 nt, Human
gccugcacagcccaagcccagggaaguguccu

SEQ ID NO: 174774 - RNA, 32 nt, Human
gccugcacagcgacuccagcagcagcacacag

SEQ ID NO: 174775 - RNA, 32 nt, Human
gccugcacaggcccagccucugccucacagca

SEQ ID NO: 174776 - RNA, 32 nt, Human
gccugcacaggcccagccucugccucacagcg

SEQ ID NO: 174777 - RNA, 32 nt, Human
gccugcacaggcucgggggcaggagcaauugc

SEQ ID NO: 174778 - RNA, 32 nt, Human
gccugcacaggcuggggaguccucaggaccuu

SEQ ID NO: 174779 - RNA, 18 nt, Human
gccugcaccagcauguca

SEQ ID NO: 174780 - RNA, 19 nt, Human
gccugcaccaguccugccu

SEQ ID NO: 174781 - RNA, 32 nt, Human
gccugcacccacucccuucauacaaucuaguc

SEQ ID NO: 174782 - RNA, 32 nt, Human
gccugcaccccucccuugucucauagaugcuc

SEQ ID NO: 174783 - RNA, 18 nt, Human
gccugcacccucaccucu

SEQ ID NO: 174784 - RNA, 32 nt, Human
gccugcacccucuuucuguuggcuccaccucc

SEQ ID NO: 174785 - RNA, 32 nt, Human
gccugcaccucggccagcaucuccuaugcucc

SEQ ID NO: 174786 - RNA, 32 nt, Human
gccugcacuagcaacagcauccaacuaguucg

SEQ ID NO: 174787 - RNA, 22 nt, Human
gccugcacugagagggcaagga

SEQ ID NO: 174788 - RNA, 32 nt, Human
gccugcacuguagcuucccugguuugggggau

SEQ ID NO: 174789 - RNA, 32 nt, Human
gccugcacuuggaccugaccucaagccucagc

SEQ ID NO: 174790 - RNA, 32 nt, Human
gccugcagaauuuggguucugccugccagcug

SEQ ID NO: 174791 - RNA, 32 nt, Human
gccugcagacugggcuggugccuccuccgcuu

SEQ ID NO: 174792 - RNA, 32 nt, Human
gccugcagagggccuggcacuaucaccaccuc

SEQ ID NO: 174793 - RNA, 32 nt, Human
gccugcagcaacuggaacaaggccccaccgua

SEQ ID NO: 174794 - RNA, 32 nt, Human
gccugcagcaaugcucaugucuugaggagaag

SEQ ID NO: 174795 - RNA, 32 nt, Human
gccugcagcagacucaaggcuccgagugcccu

SEQ ID NO: 174796 - RNA, 32 nt, Human
gccugcagcaucugaguggggccucuaggaug

SEQ ID NO: 174797 - RNA, 32 nt, Human
gccugcagcccuggagaauuugcucaccgagg

SEQ ID NO: 174798 - RNA, 32 nt, Human
gccugcagccuccucugaggcuccccugcugc

SEQ ID NO: 174799 - RNA, 32 nt, Human
gccugcagcuccaaggaacauugccucucugg

SEQ ID NO: 174800 - RNA, 32 nt, Human
gccugcagcucuccacaggagcuguaaaaguc

SEQ ID NO: 174801 - RNA, 32 nt, Human
gccugcagcucuucccagccccgagagagcuu

SEQ ID NO: 174802 - RNA, 19 nt, Human
gccugcagcugcccaaggc

SEQ ID NO: 174803 - RNA, 32 nt, Human
gccugcagcuuucucccuacuggaccagagac

SEQ ID NO: 174804 - RNA, 32 nt, Human
gccugcaggaacacgccccuucacccggcgcg

SEQ ID NO: 174805 - RNA, 32 nt, Human
gccugcaggaagaucuggcucagucuacuaug

SEQ ID NO: 174806 - RNA, 19 nt, Human
gccugcaggacccuugcug

SEQ ID NO: 174807 - RNA, 32 nt, Human
gccugcaggagaaacacacuccccuccugggu

SEQ ID NO: 174808 - RNA, 32 nt, Human
gccugcaggagagacacccaggaggaguuuuu

SEQ ID NO: 174809 - RNA, 32 nt, Human
gccugcaggaggagaggcuggggaggguucuc

SEQ ID NO: 174810 - RNA, 32 nt, Human
gccugcaggaggaggaacagagaagccugggc

SEQ ID NO: 174811 - RNA, 32 nt, Human
gccugcaggaugggccgcgccgccguggcccg

SEQ ID NO: 174812 - RNA, 32 nt, Human
gccugcaggcauucacugaccaggccuuuccu

SEQ ID NO: 174813 - RNA, 20 nt, Human
gccugcaggccacccaggga

SEQ ID NO: 174814 - RNA, 32 nt, Human
gccugcaggcuggggacccugggugcaggugc

SEQ ID NO: 174815 - RNA, 32 nt, Human
gccugcagggugaccugcuuccccaaaggcca

SEQ ID NO: 174816 - RNA, 32 nt, Human
gccugcaggucucgcucagagcugugucccug

SEQ ID NO: 174817 - RNA, 32 nt, Human
gccugcagguuagaaagaggcgagcguggauu

SEQ ID NO: 174818 - RNA, 32 nt, Human
gccugcaguaggagggagaggaaggggugcca

SEQ ID NO: 174819 - RNA, 23 nt, Human
gccugcagucccagcacuuuggg

SEQ ID NO: 174820 - RNA, 24 nt, Human
gccugcagucccagcacuuuggga

SEQ ID NO: 174821 - RNA, 23 nt, Human
gccugcagucccagcuaccuggg

SEQ ID NO: 174822 - RNA, 24 nt, Human
gccugcagucccagcuaccuggga

SEQ ID NO: 174823 - RNA, 23 nt, Human
gccugcagucccagcuacucagg

SEQ ID NO: 174824 - RNA, 24 nt, Human
gccugcagucccagcuacucagga

SEQ ID NO: 174825 - RNA, 23 nt, Human
gccugcagucccagcuacuuggg

SEQ ID NO: 174826 - RNA, 24 nt, Human
gccugcagucccagcuacuuggga

SEQ ID NO: 174827 - RNA, 24 nt, Human
gccugcagucccagcuauucagga

SEQ ID NO: 174828 - RNA, 23 nt, Human
gccugcagucccagcugcuccgg

SEQ ID NO: 174829 - RNA, 24 nt, Human
gccugcagucccagcugcuccgga

SEQ ID NO: 174830 - RNA, 23 nt, Human
gccugcagucccaguuacuuggg

SEQ ID NO: 174831 - RNA, 24 nt, Human
gccugcagucccaguuacuuggga

SEQ ID NO: 174832 - RNA, 32 nt, Human
gccugcagucucauccugcccuugccauccuc

SEQ ID NO: 174833 - RNA, 21 nt, Human
gccugcagugcccggcccugg

SEQ ID NO: 174834 - RNA, 20 nt, Human
gccugcagugcugguccugc

SEQ ID NO: 174835 - RNA, 32 nt, Human
gccugcagugcuguacauguuuacagaagcug

SEQ ID NO: 174836 - RNA, 32 nt, Human
gccugcaguggccgggaccgugacuguuucug

SEQ ID NO: 174837 - RNA, 32 nt, Human
gccugcaguucugggaauccuguccagacaug

SEQ ID NO: 174838 - RNA, 25 nt, Human
gccugcaguugggggccugcccuga

SEQ ID NO: 174839 - RNA, 32 nt, Human
gccugcaucccucccuuccuuucucuuacugc

SEQ ID NO: 174840 - RNA, 32 nt, Human
gccugcaucuccuggcgccggcugcuucuggg

SEQ ID NO: 174841 - RNA, 32 nt, Human
gccugcaugcauucaggcuucucagguguuuc

SEQ ID NO: 174842 - RNA, 23 nt, Human
gccugcauguaaacacgccugca

SEQ ID NO: 174843 - RNA, 32 nt, Human
gccugcauuugcaauggaauaacugacaaauc

SEQ ID NO: 174844 - RNA, 32 nt, Human
gccugccaaguagcuggauuacaggcacgugc

SEQ ID NO: 174845 - RNA, 32 nt, Human
gccugccaaguugaguucagcuucaguuggau

SEQ ID NO: 174846 - RNA, 32 nt, Human
gccugccaaugccacagccaagcccacccugg

SEQ ID NO: 174847 - RNA, 32 nt, Human
gccugccacacacccucugccuaggaggcugu

SEQ ID NO: 174848 - RNA, 20 nt, Human
gccugccacaccaagcauua

SEQ ID NO: 174849 - RNA, 32 nt, Human
gccugccacaccacuccugccuggugcucggc

SEQ ID NO: 174850 - RNA, 32 nt, Human
gccugccacauuuuuacuggaucuguguuugc

SEQ ID NO: 174851 - RNA, 32 nt, Human
gccugccaccacagcacgcggccuccugaucc

SEQ ID NO: 174852 - RNA, 19 nt, Human
gccugccacccccuagggg

SEQ ID NO: 174853 - RNA, 32 nt, Human
gccugccaccuccuccucaucuccggugguuc

SEQ ID NO: 174854 - RNA, 32 nt, Human
gccugccaccucucggacuccagcuugaugga

SEQ ID NO: 174855 - RNA, 32 nt, Human
gccugccaccucucuugucucucccucugaag

SEQ ID NO: 174856 - RNA, 32 nt, Human
gccugccacugaggguucccagcaccaugagg

SEQ ID NO: 174857 - RNA, 32 nt, Human
gccugccagaagcuggaggggugcuggagacc

SEQ ID NO: 174858 - RNA, 32 nt, Human
gccugccagcccaccccagccuggggagaggu

SEQ ID NO: 174859 - RNA, 32 nt, Human
gccugccagcccugagguuaaauguuccugaa

SEQ ID NO: 174860 - RNA, 32 nt, Human
gccugccagcccugcgguuaaauguuccugaa

SEQ ID NO: 174861 - RNA, 32 nt, Human
gccugccagccgcggggacuccgggcccgggu

SEQ ID NO: 174862 - RNA, 32 nt, Human
gccugccagcuccguccucccugccgagggcu

SEQ ID NO: 174863 - RNA, 32 nt, Human
gccugccagcugucuccacuguggaguuacua

SEQ ID NO: 174864 - RNA, 31 nt, Human
gccugccaggucucugggccuucagcgcggg

SEQ ID NO: 174865 - RNA, 32 nt, Human
gccugccaucuucuccccgaggcugccccagg

SEQ ID NO: 174866 - RNA, 32 nt, Human
gccugccauucccagaccccagcccuuugugc

SEQ ID NO: 174867 - RNA, 32 nt, Human
gccugcccaaccagacugguaguccugcaguc

SEQ ID NO: 174868 - RNA, 32 nt, Human
gccugcccacagcuaugcuuuggccucuccag

SEQ ID NO: 174869 - RNA, 32 nt, Human
gccugcccacuacauccagccuguggcuuugc

SEQ ID NO: 174870 - RNA, 32 nt, Human
gccugcccacuugagcaacucuguccuugagc

SEQ ID NO: 174871 - RNA, 23 nt, Human
gccugcccagcccuccgcccuga

SEQ ID NO: 174872 - RNA, 32 nt, Human
gccugcccagccuccuggaacugcgcccugga

SEQ ID NO: 174873 - RNA, 32 nt, Human
gccugcccagccugcaccacccugcccgcccu

SEQ ID NO: 174874 - RNA, 32 nt, Human
gccugcccagggccugcagccuucucuacuug

SEQ ID NO: 174875 - RNA, 32 nt, Human
gccugccccacagacacagcugugaggccugg

SEQ ID NO: 174876 - RNA, 18 nt, Human
gccugccccacuuuugua

SEQ ID NO: 174877 - RNA, 18 nt, Human
gccugccccagccccagc

SEQ ID NO: 174878 - RNA, 32 nt, Human
gccugccccagccucugcuucaccccacuggu

SEQ ID NO: 174879 - RNA, 32 nt, Human
gccugccccaggagggcccugcugaggugaag

SEQ ID NO: 174880 - RNA, 32 nt, Human
gccugccccaugcuuccagccugcagaacaca

SEQ ID NO: 174881 - RNA, 32 nt, Human
gccugcccccagcacucuagguggugguuagu

SEQ ID NO: 174882 - RNA, 24 nt, Human
gccugcccccgagggcacuggagg

SEQ ID NO: 174883 - RNA, 18 nt, Human
gccugcccccgccuugag

SEQ ID NO: 174884 - RNA, 15 nt, Human
gccugcccccugaug

SEQ ID NO: 174885 - RNA, 16 nt, Human
gccugcccccuucaug

SEQ ID NO: 174886 - RNA, 21 nt, Human
gccugcccccuuccauuccca

SEQ ID NO: 174887 - RNA, 32 nt, Human
gccugcccccuucccuggacagggcuguggag

SEQ ID NO: 174888 - RNA, 32 nt, Human
gccugccccgagggacagagacuggagcucaa

SEQ ID NO: 174889 - RNA, 32 nt, Human
gccugccccgccuuccccaacaccucgcucca

SEQ ID NO: 174890 - RNA, 32 nt, Human
gccugccccggcuuaagccgagcugcuggugc

SEQ ID NO: 174891 - RNA, 32 nt, Human
gccugccccucccagaacacacuccaucagcu

SEQ ID NO: 174892 - RNA, 22 nt, Human
gccugccccuccgcugucccca

SEQ ID NO: 174893 - RNA, 32 nt, Human
gccugccccucgucccuuccuccgcccccucu

SEQ ID NO: 174894 - RNA, 18 nt, Human
gccugccccucuucagau

SEQ ID NO: 174895 - RNA, 32 nt, Human
gccugccccugccugcugcccaccaucccugc

SEQ ID NO: 174896 - RNA, 32 nt, Human
gccugccccugccuuggccaaugcgagguccu

SEQ ID NO: 174897 - RNA, 22 nt, Human
gccugccccuguguauucacca

SEQ ID NO: 174898 - RNA, 16 nt, Human
gccugccccuuuggug

SEQ ID NO: 174899 - RNA, 22 nt, Human
gccugcccgcccccugcugcug

SEQ ID NO: 174900 - RNA, 32 nt, Human
gccugcccggagccccagccccaggggaccau

SEQ ID NO: 174901 - RNA, 15 nt, Human
gccugcccggcauca

SEQ ID NO: 174902 - RNA, 18 nt, Human
gccugcccgucagugaug

SEQ ID NO: 174903 - RNA, 32 nt, Human
gccugcccuaggaaucuguucuugaagacaac

SEQ ID NO: 174904 - RNA, 32 nt, Human
gccugcccuauggauuucggacuugccagcca

SEQ ID NO: 174905 - RNA, 32 nt, Human
gccugcccucaggagccugggcugcgaggcuc

SEQ ID NO: 174906 - RNA, 18 nt, Human
gccugcccuccaccuuga

SEQ ID NO: 174907 - RNA, 32 nt, Human
gccugcccuccaggauggcugguuuagucugg

SEQ ID NO: 174908 - RNA, 32 nt, Human
gccugcccuccagggcuggggccucgccuggc

SEQ ID NO: 174909 - RNA, 17 nt, Human
gccugcccuccccggug

SEQ ID NO: 174910 - RNA, 18 nt, Human
gccugcccucccuggggu

SEQ ID NO: 174911 - RNA, 21 nt, Human
gccugcccucccuugggacca

SEQ ID NO: 174912 - RNA, 16 nt, Human
gccugcccuccuggua

SEQ ID NO: 174913 - RNA, 18 nt, Human
gccugcccuccugugaug

SEQ ID NO: 174914 - RNA, 32 nt, Human
gccugcccucuagccucuacucuuccaguugc

SEQ ID NO: 174915 - RNA, 18 nt, Human
gccugcccucugccgaug

SEQ ID NO: 174916 - RNA, 17 nt, Human
gccugcccucugcugcc

SEQ ID NO: 174917 - RNA, 32 nt, Human
gccugcccugagccacuguucccagcucacca

SEQ ID NO: 174918 - RNA, 32 nt, Human
gccugcccugcagcugucuuggcuaaccuggc

SEQ ID NO: 174919 - RNA, 20 nt, Human
gccugcccugcccuccgaug

SEQ ID NO: 174920 - RNA, 32 nt, Human
gccugcccugcuccaggcuccaccugcgccgc

SEQ ID NO: 174921 - RNA, 32 nt, Human
gccugcccugcucgccccuccacagccucggu

SEQ ID NO: 174922 - RNA, 32 nt, Human
gccugcccugcucugcggcuguggccccuacc

SEQ ID NO: 174923 - RNA, 18 nt, Human
gccugcccugggcggggg

SEQ ID NO: 174924 - RNA, 32 nt, Human
gccugcccuucccacaugucucccuaaccuuu

SEQ ID NO: 174925 - RNA, 22 nt, Human
gccugcccuuccuagacggcca

SEQ ID NO: 174926 - RNA, 24 nt, Human
gccugcccuuccuccauuguugcc

SEQ ID NO: 174927 - RNA, 32 nt, Human
gccugcccuuccuccauuguugcccuggaaug

SEQ ID NO: 174928 - RNA, 18 nt, Human
gccugcccuuccucugug

SEQ ID NO: 174929 - RNA, 22 nt, Human
gccugcccuuccucuguguggc

SEQ ID NO: 174930 - RNA, 17 nt, Human
gccugcccuuccugaug

SEQ ID NO: 174931 - RNA, 20 nt, Human
gccugcccuucuccacugcc

SEQ ID NO: 174932 - RNA, 32 nt, Human
gccugcccuugucugagaugcugguaauggcc

SEQ ID NO: 174933 - RNA, 32 nt, Human
gccugcccuuucucagcugccuccccugcccu

SEQ ID NO: 174934 - RNA, 32 nt, Human
gccugcccuuucucuccgcuccagccucuccc

SEQ ID NO: 174935 - RNA, 32 nt, Human
gccugccgcagggauggggcagcugugcuggc

SEQ ID NO: 174936 - RNA, 32 nt, Human
gccugccgcugccugcccaaccccugcacauu

SEQ ID NO: 174937 - RNA, 30 nt, Human
gccugccgguuccacaggguacaguuagga

SEQ ID NO: 174938 - RNA, 32 nt, Human
gccugccguugcccugagcugcagccucggcc

SEQ ID NO: 174939 - RNA, 32 nt, Human
gccugccuaagacccuuugcucccucugggau

SEQ ID NO: 174940 - RNA, 32 nt, Human
gccugccuagugcuggaguaggggacaauggg

SEQ ID NO: 174941 - RNA, 32 nt, Human
gccugccucaaaaccccuucugccucaggugg

SEQ ID NO: 174942 - RNA, 32 nt, Human
gccugccucaccuccagcaccuguaggaacuc

SEQ ID NO: 174943 - RNA, 32 nt, Human
gccugccucauuuccuccucuccugccuguga

SEQ ID NO: 174944 - RNA, 32 nt, Human
gccugccuccaauccccacaacguccagggug

SEQ ID NO: 174945 - RNA, 32 nt, Human
gccugccuccacccguccucccucagccuccc

SEQ ID NO: 174946 - RNA, 32 nt, Human
gccugccuccacccucccgaauggugcuccuc

SEQ ID NO: 174947 - RNA, 32 nt, Human
gccugccuccacccugcucuccaucucccgcu

SEQ ID NO: 174948 - RNA, 32 nt, Human
gccugccucccaucccgcuccgcugggguuca

SEQ ID NO: 174949 - RNA, 32 nt, Human
gccugccucccucccugucugccuccugcccc

SEQ ID NO: 174950 - RNA, 21 nt, Human
gccugccucccuuccccgcca

SEQ ID NO: 174951 - RNA, 32 nt, Human
gccugccuccuaggcuggaagccauggucccg

SEQ ID NO: 174952 - RNA, 25 nt, Human
gccugccuccuggaagacuuucugg

SEQ ID NO: 174953 - RNA, 26 nt, Human
gccugccuccugggcugguuccuggg

SEQ ID NO: 174954 - RNA, 24 nt, Human
gccugccuccuggguuuuccuggg

SEQ ID NO: 174955 - RNA, 21 nt, Human
gccugccucggagaggacaga

SEQ ID NO: 174956 - RNA, 23 nt, Human
gccugccucggccucccaaaggg

SEQ ID NO: 174957 - RNA, 32 nt, Human
gccugccucuccccgucucugagcucuggacg

SEQ ID NO: 174958 - RNA, 32 nt, Human
gccugccucucuggcugucugcuuuugcaggg

SEQ ID NO: 174959 - RNA, 20 nt, Human
gccugccucuguuucccugg

SEQ ID NO: 174960 - RNA, 32 nt, Human
gccugccucuuuguugccaugagagcugccua

SEQ ID NO: 174961 - RNA, 32 nt, Human
gccugccugccacccugccccuugccauccau

SEQ ID NO: 174962 - RNA, 32 nt, Human
gccugccugcccaccucucucucugguccugu

SEQ ID NO: 174963 - RNA, 32 nt, Human
gccugccugcccagcgaggcccccagguucaa

SEQ ID NO: 174964 - RNA, 32 nt, Human
gccugccugcccaggccaccuccugggagugc

SEQ ID NO: 174965 - RNA, 32 nt, Human
gccugccugcccggcccugcacaacaugcagc

SEQ ID NO: 174966 - RNA, 32 nt, Human
gccugccugcccuagccagcucccaggugaag

SEQ ID NO: 174967 - RNA, 32 nt, Human
gccugccugccucaguuuauuucccagucuua

SEQ ID NO: 174968 - RNA, 32 nt, Human
gccugccugccugagguccccgcugccagucc

SEQ ID NO: 174969 - RNA, 32 nt, Human
gccugccugccugcccgcccgcucgcucgccc

SEQ ID NO: 174970 - RNA, 32 nt, Human
gccugccugccugccucuccaccacaugcuuu

SEQ ID NO: 174971 - RNA, 32 nt, Human
gccugccugccugccugagguccccgcugcca

SEQ ID NO: 174972 - RNA, 32 nt, Human
gccugccugccugccugcccgcccagagcugu

SEQ ID NO: 174973 - RNA, 32 nt, Human
gccugccugccugccugccucaguuuauuucc

SEQ ID NO: 174974 - RNA, 32 nt, Human
gccugccugccugccugccugagguccccgcu

SEQ ID NO: 174975 - RNA, 32 nt, Human
gccugccugccugccugccugcccgcccagag

SEQ ID NO: 174976 - RNA, 32 nt, Human
gccugccugccugccugccugccucuccacca

SEQ ID NO: 174977 - RNA, 32 nt, Human
gccugccugccugccugccugccugccugccu

SEQ ID NO: 174978 - RNA, 32 nt, Human
gccugccugccugccugccugccugccugucu

SEQ ID NO: 174979 - RNA, 32 nt, Human
gccugccugccugccugccugccugucugccu

SEQ ID NO: 174980 - RNA, 32 nt, Human
gccugccugccugccugccugucugccuaugu

SEQ ID NO: 174981 - RNA, 32 nt, Human
gccugccugccugccugcuacggcucagcagc

SEQ ID NO: 174982 - RNA, 32 nt, Human
gccugccugccugccugcuacggugagugugg

SEQ ID NO: 174983 - RNA, 32 nt, Human
gccugccugccugccugucugccuaugugaug

SEQ ID NO: 174984 - RNA, 32 nt, Human
gccugccugccugcgcuuccauccauccaucc

SEQ ID NO: 174985 - RNA, 32 nt, Human
gccugccugccugucugccuaugugaugauga

SEQ ID NO: 174986 - RNA, 32 nt, Human
gccugccugccuguguggucugccucucaaag

SEQ ID NO: 174987 - RNA, 32 nt, Human
gccugccugcggccugucuguguuugucuuac

SEQ ID NO: 174988 - RNA, 32 nt, Human
gccugccugcugccccucccagccugccaaga

SEQ ID NO: 174989 - RNA, 32 nt, Human
gccugccugcuuguuagaaaggccugaggagc

SEQ ID NO: 174990 - RNA, 32 nt, Human
gccugccuggaugacagagcgagacuccaucu

SEQ ID NO: 174991 - RNA, 17 nt, Human
gccugccuggccuggua

SEQ ID NO: 174992 - RNA, 31 nt, Human
gccugccuggcguccccuugccucagcacac

SEQ ID NO: 174993 - RNA, 32 nt, Human
gccugccugggaacgggguggacgagggagug

SEQ ID NO: 174994 - RNA, 31 nt, Human
gccugccuggucucuggggguguugagugag

SEQ ID NO: 174995 - RNA, 32 nt, Human
gccugccuguaauccagcuacucaggaggcug

SEQ ID NO: 174996 - RNA, 32 nt, Human
gccugccuguaaucccagcacugugggaggcc

SEQ ID NO: 174997 - RNA, 32 nt, Human
gccugccuguaaucccagcuacuaaggaggcu

SEQ ID NO: 174998 - RNA, 32 nt, Human
gccugccuguagucccagcuacucgggaggcu

SEQ ID NO: 174999 - RNA, 21 nt, Human
gccugccuguccuccagcagg

SEQ ID NO: 175000 - RNA, 32 nt, Human
gccugccuguccuccagcugucugacuaucca

SEQ ID NO: 175001 - RNA, 32 nt, Human
gccugccugucucccuccucugucaccaccag

SEQ ID NO: 175002 - RNA, 32 nt, Human
gccugccugucucuaguuucucucacaucccu

SEQ ID NO: 175003 - RNA, 32 nt, Human
gccugccuguggucucagcuacucggcauucu

SEQ ID NO: 175004 - RNA, 32 nt, Human
gccugccuucugaccaaccucuccccaucguu

SEQ ID NO: 175005 - RNA, 16 nt, Human
gccugccuucugcgcc

SEQ ID NO: 175006 - RNA, 32 nt, Human
gccugccuucuuucuuuucuuuaccuacucuc

SEQ ID NO: 175007 - RNA, 21 nt, Human
gccugccuugcuguuccuggg

SEQ ID NO: 175008 - RNA, 18 nt, Human
gccugccuuggccugaug

SEQ ID NO: 175009 - RNA, 32 nt, Human
gccugcgagagccacagcaaggagcucagcca

SEQ ID NO: 175010 - RNA, 20 nt, Human
gccugcgagccggagagaca

SEQ ID NO: 175011 - RNA, 29 nt, Human
gccugcgcaaacagcaagacccugucuac

SEQ ID NO: 175012 - RNA, 32 nt, Human
gccugcgcagagugcccggggugcagggcagc

SEQ ID NO: 175013 - RNA, 32 nt, Human
gccugcgcagccgccauguucgguugcuaugc

SEQ ID NO: 175014 - RNA, 32 nt, Human
gccugcgccaagagacagacagagaaggcugc

SEQ ID NO: 175015 - RNA, 19 nt, Human
gccugcgccccacccagca

SEQ ID NO: 175016 - RNA, 32 nt, Human
gccugcgccuccauccaucuguccguccagag

SEQ ID NO: 175017 - RNA, 20 nt, Human
gccugcgccugagcugcaug

SEQ ID NO: 175018 - RNA, 32 nt, Human
gccugcgccuguaaucccagcacuuugggagg

SEQ ID NO: 175019 - RNA, 32 nt, Human
gccugcgcucagcugcucuggcaccccgcugc

SEQ ID NO: 175020 - RNA, 32 nt, Human
gccugcgcuugccucccugccucaucucuauu

SEQ ID NO: 175021 - RNA, 32 nt, Human
gccugcggaaccugaggcagcuggggagggcc

SEQ ID NO: 175022 - RNA, 32 nt, Human
gccugcggccugucuguguuugucuuacucau

SEQ ID NO: 175023 - RNA, 16 nt, Human
gccugcggcgggggga

SEQ ID NO: 175024 - RNA, 32 nt, Human
gccugcggcucaagcggaccagcuccauggau

SEQ ID NO: 175025 - RNA, 32 nt, Human
gccugcggcugccugggcuggggcucgcucca

SEQ ID NO: 175026 - RNA, 32 nt, Human
gccugcggcuggaguaaggcuugcugugggac

SEQ ID NO: 175027 - RNA, 32 nt, Human
gccugcgggacggugaggcccugcugaggacu

SEQ ID NO: 175028 - RNA, 32 nt, Human
gccugcgggagagguccuucacuguguguaca

SEQ ID NO: 175029 - RNA, 32 nt, Human
gccugcggggaggcgcggggcccugcucugua

SEQ ID NO: 175030 - RNA, 32 nt, Human
gccugcggguccuugugucccugccgcugaag

SEQ ID NO: 175031 - RNA, 24 nt, Human
gccugcggucccagcuacuuggga

SEQ ID NO: 175032 - RNA, 32 nt, Human
gccugcgguccuagcuacacaggaaguugagg

SEQ ID NO: 175033 - RNA, 32 nt, Human
gccugcguccagggaaguugcuuggaauucca

SEQ ID NO: 175034 - RNA, 32 nt, Human
gccugcgucucucugcuguaccagcucuguuc

SEQ ID NO: 175035 - RNA, 32 nt, Human
gccugcgucuggucugugucacacacagcagc

SEQ ID NO: 175036 - RNA, 32 nt, Human
gccugcgucuuccucagugcucagcuggaggu

SEQ ID NO: 175037 - RNA, 20 nt, Human
gccugcgugccgccacgccc

SEQ ID NO: 175038 - RNA, 32 nt, Human
gccugcguggucaacuccugucuucaggccac

SEQ ID NO: 175039 - RNA, 32 nt, Human
gccugcuaacauggaggagcugaccgaaguca

SEQ ID NO: 175040 - RNA, 32 nt, Human
gccugcuaacuuugaaaaggagcacugugucc

SEQ ID NO: 175041 - RNA, 32 nt, Human
gccugcuaauuccuucaggauccaucacaaca

SEQ ID NO: 175042 - RNA, 32 nt, Human
gccugcuacagccuugaacucaugggcucaag

SEQ ID NO: 175043 - RNA, 22 nt, Human
gccugcuaccugccugcugacc

SEQ ID NO: 175044 - RNA, 32 nt, Human
gccugcuacuggacauccagaaccacagcaag

SEQ ID NO: 175045 - RNA, 21 nt, Human
gccugcuaggagccucuacca

SEQ ID NO: 175046 - RNA, 32 nt, Human
gccugcuagugauagcucacacaucacauccc

SEQ ID NO: 175047 - RNA, 32 nt, Human
gccugcucaccugaaaguucccacccaagccg

SEQ ID NO: 175048 - RNA, 32 nt, Human
gccugcucagaggcgcccuagggaagggccau

SEQ ID NO: 175049 - RNA, 32 nt, Human
gccugcucagcccuccuggaggcccuccuuuc

SEQ ID NO: 175050 - RNA, 32 nt, Human
gccugcucagcucucccuggccccuaacaauu

SEQ ID NO: 175051 - RNA, 32 nt, Human
gccugcucaggaaaccucuuugcuccacacag

SEQ ID NO: 175052 - RNA, 32 nt, Human
gccugcucagggacuguuccugucucagcaac

SEQ ID NO: 175053 - RNA, 32 nt, Human
gccugcucauuucccagcccucuucuucucaa

SEQ ID NO: 175054 - RNA, 32 nt, Human
gccugcuccagacauuuuguucuugaaucugu

SEQ ID NO: 175055 - RNA, 32 nt, Human
gccugcuccaggccuugcuucucccucugcag

SEQ ID NO: 175056 - RNA, 32 nt, Human
gccugcucccacccuccucccagcagcagaca

SEQ ID NO: 175057 - RNA, 32 nt, Human
gccugcucccucucucugcagaacgggcucau

SEQ ID NO: 175058 - RNA, 32 nt, Human
gccugcuccuccugggcauuggcuccagcgga

SEQ ID NO: 175059 - RNA, 19 nt, Human
gccugcuccuccuuccucu

SEQ ID NO: 175060 - RNA, 32 nt, Human
gccugcuccugccucucucccaacauguuucc

SEQ ID NO: 175061 - RNA, 18 nt, Human
gccugcuccuucucgaua

SEQ ID NO: 175062 - RNA, 32 nt, Human
gccugcucuccuccucuguccugcagaccggg

SEQ ID NO: 175063 - RNA, 32 nt, Human
gccugcucucugggcuggagcagguggauucg

SEQ ID NO: 175064 - RNA, 32 nt, Human
gccugcucucuuucccuacaacuaggucagcc

SEQ ID NO: 175065 - RNA, 32 nt, Human
gccugcucuggccuaauggaucuuacuguaug

SEQ ID NO: 175066 - RNA, 32 nt, Human
gccugcucugguugaagguggggugggggcgg

SEQ ID NO: 175067 - RNA, 32 nt, Human
gccugcucugugucuguguugugaagcuugag

SEQ ID NO: 175068 - RNA, 32 nt, Human
gccugcucuuccuguuucuuucccaaggguca

SEQ ID NO: 175069 - RNA, 32 nt, Human
gccugcugaaggacuuccugaagaagcacaac

SEQ ID NO: 175070 - RNA, 32 nt, Human
gccugcugagcggggucugugggagcuagcuu

SEQ ID NO: 175071 - RNA, 18 nt, Human
gccugcugcaaagcuuug

SEQ ID NO: 175072 - RNA, 32 nt, Human
gccugcugcaucccuucccccgagcauggcag

SEQ ID NO: 175073 - RNA, 32 nt, Human
gccugcugccaagggcagcggaggaggaaaug

SEQ ID NO: 175074 - RNA, 32 nt, Human
gccugcugcccaggcugugcagcgcagcugga

SEQ ID NO: 175075 - RNA, 18 nt, Human
gccugcugccucagcaca

SEQ ID NO: 175076 - RNA, 21 nt, Human
gccugcugcgcgcccccuccc

SEQ ID NO: 175077 - RNA, 21 nt, Human
gccugcugcucccuccuaggg

SEQ ID NO: 175078 - RNA, 32 nt, Human
gccugcugcugaacauccagaacgacagcaag

SEQ ID NO: 175079 - RNA, 32 nt, Human
gccugcugcuucucacagacaccucacauccu

SEQ ID NO: 175080 - RNA, 32 nt, Human
gccugcugcuucucugucuccgagaccggagu

SEQ ID NO: 175081 - RNA, 23 nt, Human
gccugcugcuuggccccaucuca

SEQ ID NO: 175082 - RNA, 32 nt, Human
gccugcugcuuuccuaaaucacaauauggccu

SEQ ID NO: 175083 - RNA, 32 nt, Human
gccugcugcuuuggcagugccaugggugagcc

SEQ ID NO: 175084 - RNA, 32 nt, Human
gccugcuggacagauggcuggccaagugggag

SEQ ID NO: 175085 - RNA, 20 nt, Human
gccugcuggagccgccugca

SEQ ID NO: 175086 - RNA, 32 nt, Human
gccugcuggauccagaacaugacaacagagag

SEQ ID NO: 175087 - RNA, 32 nt, Human
gccugcuggccggcuuccugcgauguggcuca

SEQ ID NO: 175088 - RNA, 32 nt, Human
gccugcugggagaggaugaggaggaggcccug

SEQ ID NO: 175089 - RNA, 32 nt, Human
gccugcugggcugagggaagucagagccccag

SEQ ID NO: 175090 - RNA, 21 nt, Human
gccugcugguggcagagccag

SEQ ID NO: 175091 - RNA, 32 nt, Human
gccugcuguccugggcauggugcaguaccugu

SEQ ID NO: 175092 - RNA, 32 nt, Human
gccugcugugaagccaguagcuauuuuaaaag

SEQ ID NO: 175093 - RNA, 32 nt, Human
gccugcugugaaguuaacauugccaggacgau

SEQ ID NO: 175094 - RNA, 32 nt, Human
gccugcugugagagccagaaugaagcauguac

SEQ ID NO: 175095 - RNA, 24 nt, Human
gccugcugugcccacccaccccac

SEQ ID NO: 175096 - RNA, 32 nt, Human
gccugcuguggcacagagcugggaaggccuua

SEQ ID NO: 175097 - RNA, 32 nt, Human
gccugcugugggaggcaugagcuggagauggg

SEQ ID NO: 175098 - RNA, 32 nt, Human
gccugcugugugccaggcauugugcuaaguau

SEQ ID NO: 175099 - RNA, 32 nt, Human
gccugcuguucccaacugugcccagcugcacu

SEQ ID NO: 175100 - RNA, 19 nt, Human
gccugcuuacuuucugcca

SEQ ID NO: 175101 - RNA, 32 nt, Human
gccugcuuaguccagaaugcaggauagagaaa

SEQ ID NO: 175102 - RNA, 32 nt, Human
gccugcuuauugccucuuucucagaauccucu

SEQ ID NO: 175103 - RNA, 32 nt, Human
gccugcuucacuguggaugggaagaggugaca

SEQ ID NO: 175104 - RNA, 32 nt, Human
gccugcuuccaucuuuugcucuguaaaguugu

SEQ ID NO: 175105 - RNA, 32 nt, Human
gccugcuucccaacugcaucccccacccagcu

SEQ ID NO: 175106 - RNA, 32 nt, Human
gccugcuuccccuccagcuccugggcucugcc

SEQ ID NO: 175107 - RNA, 32 nt, Human
gccugcuucucccaucccugccuucuggccga

SEQ ID NO: 175108 - RNA, 32 nt, Human
gccugcuucuuccccucugcggcuuucacugc

SEQ ID NO: 175109 - RNA, 31 nt, Human
gccugcuugcucucuggcugugcuccugcuu

SEQ ID NO: 175110 - RNA, 32 nt, Human
gccugcuugcucuuuacagccucucucuguga

SEQ ID NO: 175111 - RNA, 32 nt, Human
gccugcuugguggcgggggugauguaugugga

SEQ ID NO: 175112 - RNA, 32 nt, Human
gccugcuuguaauuccagcuacuugggaggcu

SEQ ID NO: 175113 - RNA, 32 nt, Human
gccugcuuucgagggccuccuggacucagacu

SEQ ID NO: 175114 - RNA, 17 nt, Human
gccugcuuucucagaua

SEQ ID NO: 175115 - RNA, 32 nt, Human
gccugcuuuuucucaggcugcccugaggaucu

SEQ ID NO: 175116 - RNA, 32 nt, Human
gccuggaaacaugcuuggcucacccagcaggg

SEQ ID NO: 175117 - RNA, 32 nt, Human
gccuggaaaccagcuuccuccucagcuccagc

SEQ ID NO: 175118 - RNA, 32 nt, Human
gccuggaagacauagguugcaguguaauggga

SEQ ID NO: 175119 - RNA, 32 nt, Human
gccuggaagggccugugccagcaccaggcaga

SEQ ID NO: 175120 - RNA, 32 nt, Human
gccuggaaggucaagacugcagugagcuguga

SEQ ID NO: 175121 - RNA, 32 nt, Human
gccuggaagguggaaguugcagugagucgaga

SEQ ID NO: 175122 - RNA, 21 nt, Human
gccuggaaucccagcuacuug

SEQ ID NO: 175123 - RNA, 24 nt, Human
gccuggaaucccagcuacuugaga

SEQ ID NO: 175124 - RNA, 23 nt, Human
gccuggaauuaggaccccaugga

SEQ ID NO: 175125 - RNA, 32 nt, Human
gccuggacaacaaacaugcugaucccauuuuc

SEQ ID NO: 175126 - RNA, 18 nt, Human
gccuggacaacagaguga

SEQ ID NO: 175127 - RNA, 18 nt, Human
gccuggacaacagagugg

SEQ ID NO: 175128 - RNA, 18 nt, Human
gccuggacaacggaguga

SEQ ID NO: 175129 - RNA, 32 nt, Human
gccuggacacagacagagacagagccaggccc

SEQ ID NO: 175130 - RNA, 32 nt, Human
gccuggacaccaccaucuacccuauucugagu

SEQ ID NO: 175131 - RNA, 21 nt, Human
gccuggacaccuuuggcccug

SEQ ID NO: 175132 - RNA, 19 nt, Human
gccuggacagcaggagcga

SEQ ID NO: 175133 - RNA, 19 nt, Human
gccuggacagcgcccgcuc

SEQ ID NO: 175134 - RNA, 16 nt, Human
gccuggacagcggugg

SEQ ID NO: 175135 - RNA, 18 nt, Human
gccuggacagcuuaguga

SEQ ID NO: 175136 - RNA, 32 nt, Human
gccuggacagggccaccagagggcuuggucua

SEQ ID NO: 175137 - RNA, 18 nt, Human
gccuggacaguagagcga

SEQ ID NO: 175138 - RNA, 32 nt, Human
gccuggacauucucuggcagcaccuccaggau

SEQ ID NO: 175139 - RNA, 22 nt, Human
gccuggaccacaagcccagugg

SEQ ID NO: 175140 - RNA, 21 nt, Human
gccuggaccaccgccgaguga

SEQ ID NO: 175141 - RNA, 32 nt, Human
gccuggaccagaagacagagggcaagaggagc

SEQ ID NO: 175142 - RNA, 32 nt, Human
gccuggaccagccucuccacucaugugacucu

SEQ ID NO: 175143 - RNA, 32 nt, Human
gccuggacccagggagaggagccagugacaca

SEQ ID NO: 175144 - RNA, 22 nt, Human
gccuggaccccccucuuucucc

SEQ ID NO: 175145 - RNA, 22 nt, Human
gccuggaccucccuccuuccuc

SEQ ID NO: 175146 - RNA, 24 nt, Human
gccuggaccucccugcgauuuccc

SEQ ID NO: 175147 - RNA, 18 nt, Human
gccuggacgacagaguga

SEQ ID NO: 175148 - RNA, 32 nt, Human
gccuggacgagcccucacacaccuggucucca

SEQ ID NO: 175149 - RNA, 32 nt, Human
gccuggacgcugcauccugggcccagauccac

SEQ ID NO: 175150 - RNA, 19 nt, Human
gccuggacggcucugcugg

SEQ ID NO: 175151 - RNA, 32 nt, Human
gccuggacuacaccacucacccucccagugug

SEQ ID NO: 175152 - RNA, 32 nt, Human
gccuggacuagggugagcacaagccuugagcg

SEQ ID NO: 175153 - RNA, 32 nt, Human
gccuggacugcacucacagaggcaaguguugu

SEQ ID NO: 175154 - RNA, 32 nt, Human
gccuggacugccucucggcugugcuccgugga

SEQ ID NO: 175155 - RNA, 32 nt, Human
gccuggacuggaucccagcuguucuaggcagg

SEQ ID NO: 175156 - RNA, 32 nt, Human
gccuggacugggacuguuagagcugcuuccuc

SEQ ID NO: 175157 - RNA, 32 nt, Human
gccuggacuugcaaucccuuccugggucccau

SEQ ID NO: 175158 - RNA, 32 nt, Human
gccuggagaccacccagcccugaccugggacc

SEQ ID NO: 175159 - RNA, 32 nt, Human
gccuggagagaguggcuggucucugagaaagg

SEQ ID NO: 175160 - RNA, 32 nt, Human
gccuggagauauccucaggaagcacaucugua

SEQ ID NO: 175161 - RNA, 32 nt, Human
gccuggagauguagaggcugcagugagcugug

SEQ ID NO: 175162 - RNA, 21 nt, Human
gccuggagcaagcccugguca

SEQ ID NO: 175163 - RNA, 32 nt, Human
gccuggagcaccauggggguccugguuuaguc

SEQ ID NO: 175164 - RNA, 22 nt, Human
gccuggagcauccugaagcauc

SEQ ID NO: 175165 - RNA, 32 nt, Human
gccuggagccccacuccagcccugggacaacu

SEQ ID NO: 175166 - RNA, 32 nt, Human
gccuggaggaaggaugucccugcacugauaca

SEQ ID NO: 175167 - RNA, 32 nt, Human
gccuggaggaggaccugaaggaaggggcuucc

SEQ ID NO: 175168 - RNA, 32 nt, Human
gccuggaggcagcaaugggguugccgggaggg

SEQ ID NO: 175169 - RNA, 18 nt, Human
gccuggaggccagaguga

SEQ ID NO: 175170 - RNA, 32 nt, Human
gccuggaggccuggaggaaggggccaggccuc

SEQ ID NO: 175171 - RNA, 32 nt, Human
gccuggaggccuucguccauucugcuaccgcg

SEQ ID NO: 175172 - RNA, 32 nt, Human
gccuggaggcggaggcugcacugagcugaggu

SEQ ID NO: 175173 - RNA, 32 nt, Human
gccuggagggaagggaaggcugaggucuccuc

SEQ ID NO: 175174 - RNA, 32 nt, Human
gccuggagggcaggggcacagagcagagagga

SEQ ID NO: 175175 - RNA, 32 nt, Human
gccuggaggggccgugaacacagaacccucaa

SEQ ID NO: 175176 - RNA, 32 nt, Human
gccuggaggggcggagggcagggugggcccgc

SEQ ID NO: 175177 - RNA, 32 nt, Human
gccuggaggugugggagggaagaugaguuauu

SEQ ID NO: 175178 - RNA, 32 nt, Human
gccuggagucagcaaccagccucuacagcugc

SEQ ID NO: 175179 - RNA, 21 nt, Human
gccuggagucccagcuacuca

SEQ ID NO: 175180 - RNA, 24 nt, Human
gccuggagucccagcuacucagga

SEQ ID NO: 175181 - RNA, 24 nt, Human
gccuggagucccagcuacucggga

SEQ ID NO: 175182 - RNA, 21 nt, Human
gccuggagugccguggcccag

SEQ ID NO: 175183 - RNA, 32 nt, Human
gccuggaguggccggcccugcuugugccaugu

SEQ ID NO: 175184 - RNA, 32 nt, Human
gccuggaguuccucccccugccugaccuagaa

SEQ ID NO: 175185 - RNA, 32 nt, Human
gccuggauaaauuggagauugugaugacuucu

SEQ ID NO: 175186 - RNA, 18 nt, Human
gccuggauaauagaguga

SEQ ID NO: 175187 - RNA, 32 nt, Human
gccuggauacaaaaucacacuguguaccaaag

SEQ ID NO: 175188 - RNA, 32 nt, Human
gccuggauagggaaguuguuuuccuuuuaaag

SEQ ID NO: 175189 - RNA, 22 nt, Human
gccuggaucaccugaggucagg

SEQ ID NO: 175190 - RNA, 32 nt, Human
gccuggauccccagaguuugucuggaaagccu

SEQ ID NO: 175191 - RNA, 32 nt, Human
gccuggaucucccugcuucaccccuguggccc

SEQ ID NO: 175192 - RNA, 18 nt, Human
gccuggaugacagaguga

SEQ ID NO: 175193 - RNA, 19 nt, Human
gccuggaugacggagccag

SEQ ID NO: 175194 - RNA, 18 nt, Human
gccuggaugcccaccccu

SEQ ID NO: 175195 - RNA, 32 nt, Human
gccuggauggccaucccacauuccuuuaacgg

SEQ ID NO: 175196 - RNA, 19 nt, Human
gccuggauggcccagagug

SEQ ID NO: 175197 - RNA, 32 nt, Human
gccuggaugucugccaagaucucagucuucuu

SEQ ID NO: 175198 - RNA, 32 nt, Human
gccuggauugcaacauccucccagagaaggaa

SEQ ID NO: 175199 - RNA, 32 nt, Human
gccuggauuuggaggcagaguugucaggcuuu

SEQ ID NO: 175200 - RNA, 23 nt, Human
gccuggcaacaaugcaguggugu

SEQ ID NO: 175201 - RNA, 32 nt, Human
gccuggcaacacagcaagacccuaucucuacc

SEQ ID NO: 175202 - RNA, 32 nt, Human
gccuggcaacagagcaagacccugucuuuaag

SEQ ID NO: 175203 - RNA, 32 nt, Human
gccuggcaacagagcaagacucugucuaaaaa

SEQ ID NO: 175204 - RNA, 17 nt, Human
gccuggcaacagaguga

SEQ ID NO: 175205 - RNA, 32 nt, Human
gccuggcaacauggcaagacccugccucuuug

SEQ ID NO: 175206 - RNA, 32 nt, Human
gccuggcaaucagggacccccagcugccgcag

SEQ ID NO: 175207 - RNA, 32 nt, Human
gccuggcacaaaacaaaugcucaguggaugga

SEQ ID NO: 175208 - RNA, 32 nt, Human
gccuggcacacagcaaacacucaauagaauau

SEQ ID NO: 175209 - RNA, 19 nt, Human
gccuggcacgaaggccccg

SEQ ID NO: 175210 - RNA, 32 nt, Human
gccuggcacuccucgaugcccagugaaaccag

SEQ ID NO: 175211 - RNA, 32 nt, Human
gccuggcacucugccggugccuugggaagguc

SEQ ID NO: 175212 - RNA, 32 nt, Human
gccuggcacugagccagcccccagauucuuug

SEQ ID NO: 175213 - RNA, 32 nt, Human
gccuggcacugcuuccuccaccguuuucacag

SEQ ID NO: 175214 - RNA, 32 nt, Human
gccuggcacuggcuguacaucagcucuuacaa

SEQ ID NO: 175215 - RNA, 32 nt, Human
gccuggcacuuaugugaaagaaaugaaugaug

SEQ ID NO: 175216 - RNA, 32 nt, Human
gccuggcacuuccccacaaccagcacaggcuu

SEQ ID NO: 175217 - RNA, 32 nt, Human
gccuggcagaagaaauagacuauuuggaucac

SEQ ID NO: 175218 - RNA, 32 nt, Human
gccuggcagagcuguguuaccgucuuggccuc

SEQ ID NO: 175219 - RNA, 32 nt, Human
gccuggcagcagcauugugauuagaaugaagg

SEQ ID NO: 175220 - RNA, 32 nt, Human
gccuggcagccaaggguguuggucgcgaagcu

SEQ ID NO: 175221 - RNA, 32 nt, Human
gccuggcagccccuggcacagagcagacccgg

SEQ ID NO: 175222 - RNA, 32 nt, Human
gccuggcagccuggcccuccuggugcccacuc

SEQ ID NO: 175223 - RNA, 32 nt, Human
gccuggcagcuccccauguuuagccuguucca

SEQ ID NO: 175224 - RNA, 32 nt, Human
gccuggcagcuccugagcccuugggaaguucu

SEQ ID NO: 175225 - RNA, 32 nt, Human
gccuggcaggcagaagcagcuguggucccugg

SEQ ID NO: 175226 - RNA, 32 nt, Human
gccuggcagguggugggccugggaucuagccg

SEQ ID NO: 175227 - RNA, 32 nt, Human
gccuggcaguucccagcgcccugggcccuuca

SEQ ID NO: 175228 - RNA, 32 nt, Human
gccuggcauguucacagauuccacagaaacuc

SEQ ID NO: 175229 - RNA, 32 nt, Human
gccuggcauucccagccaugcauagucugggc

SEQ ID NO: 175230 - RNA, 23 nt, Human
gccuggccaaaauuuuuauugcc

SEQ ID NO: 175231 - RNA, 32 nt, Human
gccuggccaacauuuucuccagauaucuuacu

SEQ ID NO: 175232 - RNA, 32 nt, Human
gccuggccaaccuccgccuccuggguucaagu

SEQ ID NO: 175233 - RNA, 32 nt, Human
gccuggccaauacaaaaauuagccgggcaugg

SEQ ID NO: 175234 - RNA, 32 nt, Human
gccuggccaccacucgccccaggcugggaaac

SEQ ID NO: 175235 - RNA, 32 nt, Human
gccuggccaccucugugcuucuugugaagucu

SEQ ID NO: 175236 - RNA, 32 nt, Human
gccuggccacgcccucccucucccaggcccga

SEQ ID NO: 175237 - RNA, 32 nt, Human
gccuggccacugagcacuggccgaggugaugc

SEQ ID NO: 175238 - RNA, 32 nt, Human
gccuggccagcauccccagccuaggagaagga

SEQ ID NO: 175239 - RNA, 18 nt, Human
gccuggccaucagccccg

SEQ ID NO: 175240 - RNA, 24 nt, Human
gccuggccaucaguauuuauugcc

SEQ ID NO: 175241 - RNA, 32 nt, Human
gccuggccauguccaagaggcuguagaaaggg

SEQ ID NO: 175242 - RNA, 32 nt, Human
gccuggccauuuccuaaccugccaccguugga

SEQ ID NO: 175243 - RNA, 21 nt, Human
gccuggcccaacggugcggug

SEQ ID NO: 175244 - RNA, 20 nt, Human
gccuggcccaagccaguaca

SEQ ID NO: 175245 - RNA, 32 nt, Human
gccuggcccagccccaccucagucuccaggac

SEQ ID NO: 175246 - RNA, 32 nt, Human
gccuggcccagccucagcacccagggccagug

SEQ ID NO: 175247 - RNA, 32 nt, Human
gccuggcccaggacuugggacaguggccuugu

SEQ ID NO: 175248 - RNA, 16 nt, Human
gccuggcccaggguga

SEQ ID NO: 175249 - RNA, 32 nt, Human
gccuggcccccacccucugccacccaguccuc

SEQ ID NO: 175250 - RNA, 16 nt, Human
gccuggcccccucucc

SEQ ID NO: 175251 - RNA, 17 nt, Human
gccuggccccgcucgcc

SEQ ID NO: 175252 - RNA, 18 nt, Human
gccuggccccggcucucu

SEQ ID NO: 175253 - RNA, 19 nt, Human
gccuggccccucccuggug

SEQ ID NO: 175254 - RNA, 32 nt, Human
gccuggccccugggauugcaguugagaguuau

SEQ ID NO: 175255 - RNA, 18 nt, Human
gccuggccccuucuguac

SEQ ID NO: 175256 - RNA, 32 nt, Human
gccuggcccgggagcugcggucgcagaggccg

SEQ ID NO: 175257 - RNA, 21 nt, Human
gccuggcccgugagugccuca

SEQ ID NO: 175258 - RNA, 32 nt, Human
gccuggcccuccgaggagacagaagggagugu

SEQ ID NO: 175259 - RNA, 32 nt, Human
gccuggcccugagagcggcucugcugucaucu

SEQ ID NO: 175260 - RNA, 32 nt, Human
gccuggcccugagcugucaccaccgacacucu

SEQ ID NO: 175261 - RNA, 32 nt, Human
gccuggcccugcaggccccaaccuucccucau

SEQ ID NO: 175262 - RNA, 32 nt, Human
gccuggcccugccucgaugccucucuggcgca

SEQ ID NO: 175263 - RNA, 32 nt, Human
gccuggcccuggagggagcuggguggccuggc

SEQ ID NO: 175264 - RNA, 32 nt, Human
gccuggcccuggaggguggucacggccccucc

SEQ ID NO: 175265 - RNA, 32 nt, Human
gccuggcccuggggacuguuggcugcucuccc

SEQ ID NO: 175266 - RNA, 20 nt, Human
gccuggcccuguggcucuuc

SEQ ID NO: 175267 - RNA, 32 nt, Human
gccuggccgcgccuuggguuccugccuugcag

SEQ ID NO: 175268 - RNA, 19 nt, Human
gccuggccgggcgcagugg

SEQ ID NO: 175269 - RNA, 32 nt, Human
gccuggccguagauuacuagucuucuagaugu

SEQ ID NO: 175270 - RNA, 32 nt, Human
gccuggccgugugcauggccucccgggcugug

SEQ ID NO: 175271 - RNA, 19 nt, Human
gccuggccuaagcaccugg

SEQ ID NO: 175272 - RNA, 32 nt, Human
gccuggccucaaacuuuaccuuuagacagugg

SEQ ID NO: 175273 - RNA, 32 nt, Human
gccuggccucccagcccugcccggcugcucug

SEQ ID NO: 175274 - RNA, 32 nt, Human
gccuggccuccccgucgaccucagugccuuuu

SEQ ID NO: 175275 - RNA, 32 nt, Human
gccuggccucuucuccccucucuucccagcag

SEQ ID NO: 175276 - RNA, 16 nt, Human
gccuggccucuugaua

SEQ ID NO: 175277 - RNA, 32 nt, Human
gccuggccugcagaagagcccagauccaugag

SEQ ID NO: 175278 - RNA, 32 nt, Human
gccuggccugccagccauuggagguguuuaag

SEQ ID NO: 175279 - RNA, 32 nt, Human
gccuggccugcucuugugggcugugguugcug

SEQ ID NO: 175280 - RNA, 32 nt, Human
gccuggccugggcagcccuggaagcucggagg

SEQ ID NO: 175281 - RNA, 32 nt, Human
gccuggccuguccuacuguguguggguugucu

SEQ ID NO: 175282 - RNA, 32 nt, Human
gccuggccuguucuguccuuagcuuccccaag

SEQ ID NO: 175283 - RNA, 32 nt, Human
gccuggcgacagagcaagacuccaucccaaaa

SEQ ID NO: 175284 - RNA, 32 nt, Human
gccuggcgacagagcaagacucugucucaaaa

SEQ ID NO: 175285 - RNA, 32 nt, Human
gccuggcgacagagcaagacucugucucucaa

SEQ ID NO: 175286 - RNA, 32 nt, Human
gccuggcgacagagcaagucuccgucuaaaag

SEQ ID NO: 175287 - RNA, 32 nt, Human
gccuggcgagguuuuggccaggaggacgugaa

SEQ ID NO: 175288 - RNA, 32 nt, Human
gccuggcgccagaauaagaccucuuaucauga

SEQ ID NO: 175289 - RNA, 16 nt, Human
gccuggcgccggggcu

SEQ ID NO: 175290 - RNA, 32 nt, Human
gccuggcggagggugcgcgccgagccccgguc

SEQ ID NO: 175291 - RNA, 32 nt, Human
gccuggcgucugaucuggggccgcccuuacgg

SEQ ID NO: 175292 - RNA, 32 nt, Human
gccuggcgugcacuccgcaccucggggacauu

SEQ ID NO: 175293 - RNA, 32 nt, Human
gccuggcgugggaacaauguggccucuauccc

SEQ ID NO: 175294 - RNA, 32 nt, Human
gccuggcuaaccccugucccuccuggagggcu

SEQ ID NO: 175295 - RNA, 23 nt, Human
gccuggcucagcugggcugcagg

SEQ ID NO: 175296 - RNA, 21 nt, Human
gccuggcucaggagugcugga

SEQ ID NO: 175297 - RNA, 32 nt, Human
gccuggcucaggagugcuggaaaagcucacgc

SEQ ID NO: 175298 - RNA, 17 nt, Human
gccuggcuccaacauca

SEQ ID NO: 175299 - RNA, 32 nt, Human
gccuggcucccaggacaggaggccugcccugg

SEQ ID NO: 175300 - RNA, 17 nt, Human
gccuggcucccucaggu

SEQ ID NO: 175301 - RNA, 32 nt, Human
gccuggcucccucucgcugagacacacauaca

SEQ ID NO: 175302 - RNA, 20 nt, Human
gccuggcuccuagaagcccc

SEQ ID NO: 175303 - RNA, 32 nt, Human
gccuggcuccuggaugguccuggaggggccug

SEQ ID NO: 175304 - RNA, 32 nt, Human
gccuggcucugccccucccccaugggcugugu

SEQ ID NO: 175305 - RNA, 23 nt, Human
gccuggcugaacgacccagggca

SEQ ID NO: 175306 - RNA, 32 nt, Human
gccuggcugcaagcuagaaaugcuggguccau

SEQ ID NO: 175307 - RNA, 32 nt, Human
gccuggcugcccagagguggcagaugacauga

SEQ ID NO: 175308 - RNA, 18 nt, Human
gccuggcugcucuccuca

SEQ ID NO: 175309 - RNA, 32 nt, Human
gccuggcugcugcaggagcugggagccaccau

SEQ ID NO: 175310 - RNA, 32 nt, Human
gccuggcugcugccgcugccuccuccugggua

SEQ ID NO: 175311 - RNA, 19 nt, Human
gccuggcuggagugcagug

SEQ ID NO: 175312 - RNA, 20 nt, Human
gccuggcuggagugcagugg

SEQ ID NO: 175313 - RNA, 23 nt, Human
gccuggcuggagugcaguggugu

SEQ ID NO: 175314 - RNA, 20 nt, Human
gccuggcuggaguggagugg

SEQ ID NO: 175315 - RNA, 32 nt, Human
gccuggcuggcuuuucuucuucuucuggugaa

SEQ ID NO: 175316 - RNA, 32 nt, Human
gccuggcugggaaaggggguguggaaagagca

SEQ ID NO: 175317 - RNA, 19 nt, Human
gccuggcugggugcagugg

SEQ ID NO: 175318 - RNA, 22 nt, Human
gccuggcuguaguagugaguga

SEQ ID NO: 175319 - RNA, 32 nt, Human
gccuggcuuccaccucuccacuccugugucua

SEQ ID NO: 175320 - RNA, 32 nt, Human
gccuggcuucucugccuccagccuuuggggua

SEQ ID NO: 175321 - RNA, 32 nt, Human
gccuggcuuggcuucccuuccccauggcuggg

SEQ ID NO: 175322 - RNA, 32 nt, Human
gccuggcuuucuuauuuuaccaaggcauaagc

SEQ ID NO: 175323 - RNA, 32 nt, Human
gccuggcuuugaauuuugaggaauucugguua

SEQ ID NO: 175324 - RNA, 32 nt, Human
gccugggaaaacacugcagcggugcucggacu

SEQ ID NO: 175325 - RNA, 32 nt, Human
gccugggaaaacagcaagccacagagcggaac

SEQ ID NO: 175326 - RNA, 20 nt, Human
gccugggaaaacagcuucug

SEQ ID NO: 175327 - RNA, 24 nt, Human
gccugggaaaucuucaacauguua

SEQ ID NO: 175328 - RNA, 32 nt, Human
gccugggaaaugcucccuuggcauaaauagca

SEQ ID NO: 175329 - RNA, 32 nt, Human
gccugggaacaacagucauucuuccucuuugu

SEQ ID NO: 175330 - RNA, 32 nt, Human
gccugggaacacagcgagacccucucauuaaa

SEQ ID NO: 175331 - RNA, 24 nt, Human
gccugggaacgaggccaucagcug

SEQ ID NO: 175332 - RNA, 24 nt, Human
gccugggaacucaaggcugcagug

SEQ ID NO: 175333 - RNA, 32 nt, Human
gccugggaacuggcaaugggggagacauauua

SEQ ID NO: 175334 - RNA, 32 nt, Human
gccugggaagaggacaccuccuugggggagug

SEQ ID NO: 175335 - RNA, 18 nt, Human
gccugggaagcagaguga

SEQ ID NO: 175336 - RNA, 25 nt, Human
gccugggaagccugggaggacggug

SEQ ID NO: 175337 - RNA, 32 nt, Human
gccugggaagccugguacaaccugccacgggc

SEQ ID NO: 175338 - RNA, 22 nt, Human
gccugggaaggagggugcugug

SEQ ID NO: 175339 - RNA, 32 nt, Human
gccugggaagucaagccugcagugagccauga

SEQ ID NO: 175340 - RNA, 24 nt, Human
gccugggaaguggaaguugcagug

SEQ ID NO: 175341 - RNA, 32 nt, Human
gccugggaaguggaaguugcagugagccaaga

SEQ ID NO: 175342 - RNA, 32 nt, Human
gccugggaaguggaggcugcagugagccuagg

SEQ ID NO: 175343 - RNA, 32 nt, Human
gccugggaaguggagguugcaguaggcugaag

SEQ ID NO: 175344 - RNA, 32 nt, Human
gccugggaagugguagagagaccccagagagg

SEQ ID NO: 175345 - RNA, 24 nt, Human
gccugggaaguugaggcugcagug

SEQ ID NO: 175346 - RNA, 32 nt, Human
gccugggaaguugaggcugcagugagccguga

SEQ ID NO: 175347 - RNA, 21 nt, Human
gccugggaaugggggugagug

SEQ ID NO: 175348 - RNA, 32 nt, Human
gccugggacagcccuggggacacagucaccca

SEQ ID NO: 175349 - RNA, 32 nt, Human
gccugggacagggcuuaccaccugccaccaag

SEQ ID NO: 175350 - RNA, 24 nt, Human
gccugggacauugaggcugcagug

SEQ ID NO: 175351 - RNA, 23 nt, Human
gccugggacccaccagggugcag

SEQ ID NO: 175352 - RNA, 19 nt, Human
gccugggacccagguucug

SEQ ID NO: 175353 - RNA, 32 nt, Human
gccugggacgggagguggagaguuugcagagc

SEQ ID NO: 175354 - RNA, 18 nt, Human
gccugggagacagaguga

SEQ ID NO: 175355 - RNA, 21 nt, Human
gccugggagacgcggugcugu

SEQ ID NO: 175356 - RNA, 32 nt, Human
gccugggagaucgaggcugcagugagccaaga

SEQ ID NO: 175357 - RNA, 32 nt, Human
gccugggagaugagacaggguuagaggaaaca

SEQ ID NO: 175358 - RNA, 24 nt, Human
gccugggagauggagguugcagug

SEQ ID NO: 175359 - RNA, 32 nt, Human
gccugggagauggagguugcagugagcugaga

SEQ ID NO: 175360 - RNA, 32 nt, Human
gccugggagaugggguaagaagagcuuucauu

SEQ ID NO: 175361 - RNA, 24 nt, Human
gccugggagauugaggcugcagug

SEQ ID NO: 175362 - RNA, 32 nt, Human
gccugggagcaugauuguggacaagcugcugg

SEQ ID NO: 175363 - RNA, 32 nt, Human
gccugggagcccagaggguggcaagaacagug

SEQ ID NO: 175364 - RNA, 23 nt, Human
gccugggagccgagagaggcggu

SEQ ID NO: 175365 - RNA, 21 nt, Human
gccugggagcggcuggcgcgg

SEQ ID NO: 175366 - RNA, 24 nt, Human
gccugggaggaagagguugcagug

SEQ ID NO: 175367 - RNA, 32 nt, Human
gccugggaggaagagguugcagugagccgaga

SEQ ID NO: 175368 - RNA, 24 nt, Human
gccugggaggcaaagguugcagug

SEQ ID NO: 175369 - RNA, 32 nt, Human
gccugggaggcagagauugcacugagccgaga

SEQ ID NO: 175370 - RNA, 32 nt, Human
gccugggaggcagaggcugcagugagccgaga

SEQ ID NO: 175371 - RNA, 24 nt, Human
gccugggaggcagagguugcagug

SEQ ID NO: 175372 - RNA, 32 nt, Human
gccugggaggcagagguugcagugagccaaga

SEQ ID NO: 175373 - RNA, 32 nt, Human
gccugggaggcagagguugcagugagccgaga

SEQ ID NO: 175374 - RNA, 32 nt, Human
gccugggaggcagagguugcagugagcugaga

SEQ ID NO: 175375 - RNA, 24 nt, Human
gccugggaggcagagguugcugug

SEQ ID NO: 175376 - RNA, 32 nt, Human
gccugggaggcagagguugcugugagccgaga

SEQ ID NO: 175377 - RNA, 32 nt, Human
gccugggaggcagggccugggcagggcuucug

SEQ ID NO: 175378 - RNA, 32 nt, Human
gccugggaggcauagguugcagugagccgaga

SEQ ID NO: 175379 - RNA, 23 nt, Human
gccugggaggccagaaugaagug

SEQ ID NO: 175380 - RNA, 20 nt, Human
gccugggaggccagguucug

SEQ ID NO: 175381 - RNA, 23 nt, Human
gccugggaggcccagguguagcg

SEQ ID NO: 175382 - RNA, 20 nt, Human
gccugggaggcggagguugc

SEQ ID NO: 175383 - RNA, 24 nt, Human
gccugggaggcggagguugcagug

SEQ ID NO: 175384 - RNA, 25 nt, Human
gccugggaggcggagguugcaguga

SEQ ID NO: 175385 - RNA, 32 nt, Human
gccugggaggcggagguugcagugagccgaga

SEQ ID NO: 175386 - RNA, 32 nt, Human
gccugggaggcggagguugcagugagccgagg

SEQ ID NO: 175387 - RNA, 26 nt, Human
gccugggaggcggcccggaggugggg

SEQ ID NO: 175388 - RNA, 22 nt, Human
gccugggaggcgggggccggcg

SEQ ID NO: 175389 - RNA, 32 nt, Human
gccugggaggcugaggcgggagaaucaccuga

SEQ ID NO: 175390 - RNA, 32 nt, Human
gccugggaggcugccaggggguggggcuucug

SEQ ID NO: 175391 - RNA, 25 nt, Human
gccugggaggcuuccugguguggug

SEQ ID NO: 175392 - RNA, 22 nt, Human
gccugggaggguccaucagcug

SEQ ID NO: 175393 - RNA, 32 nt, Human
gccugggagggugaggaugcaugagccaugau

SEQ ID NO: 175394 - RNA, 32 nt, Human
gccugggaggucaagccuacagugagccauga

SEQ ID NO: 175395 - RNA, 32 nt, Human
gccugggaggucaaggcaucagugagcgaugg

SEQ ID NO: 175396 - RNA, 24 nt, Human
gccugggaggucaaggcugcagug

SEQ ID NO: 175397 - RNA, 32 nt, Human
gccugggaggucaaggcugcagugagccauga

SEQ ID NO: 175398 - RNA, 32 nt, Human
gccugggaggucaaggcugcagugagccgaga

SEQ ID NO: 175399 - RNA, 32 nt, Human
gccugggaggucaaggcugcagugagccguga

SEQ ID NO: 175400 - RNA, 32 nt, Human
gccugggaggucaaggcugcagugagcuguga

SEQ ID NO: 175401 - RNA, 24 nt, Human
gccugggaggucgaggcugcagug

SEQ ID NO: 175402 - RNA, 32 nt, Human
gccugggaggucgaggcugcagugagcuguga

SEQ ID NO: 175403 - RNA, 32 nt, Human
gccugggagguggaggcuacugugagccauga

SEQ ID NO: 175404 - RNA, 32 nt, Human
gccugggagguggagguugcacugaguagaga

SEQ ID NO: 175405 - RNA, 24 nt, Human
gccugggagguggagguugcagug

SEQ ID NO: 175406 - RNA, 32 nt, Human
gccugggagguggagguugcagugagcuaaga

SEQ ID NO: 175407 - RNA, 32 nt, Human
gccugggagguggagguugcagugaguggaga

SEQ ID NO: 175408 - RNA, 25 nt, Human
gccugggagguggagguugcagugg

SEQ ID NO: 175409 - RNA, 32 nt, Human
gccugggagguggagguugccagugagucgag

SEQ ID NO: 175410 - RNA, 32 nt, Human
gccugggagguggagguuucagugagcuggga

SEQ ID NO: 175411 - RNA, 32 nt, Human
gccugggagguggaguuugcagugagcuaaga

SEQ ID NO: 175412 - RNA, 32 nt, Human
gccugggaggugggugugggggugguggguga

SEQ ID NO: 175413 - RNA, 24 nt, Human
gccugggagguugaggcugcagug

SEQ ID NO: 175414 - RNA, 32 nt, Human
gccugggagguugaggcugcagugagccauga

SEQ ID NO: 175415 - RNA, 24 nt, Human
gccugggagguugugguugcagug

SEQ ID NO: 175416 - RNA, 32 nt, Human
gccugggagguugugguugcagugagcuauga

SEQ ID NO: 175417 - RNA, 21 nt, Human
gccugggagugggggugcagg

SEQ ID NO: 175418 - RNA, 24 nt, Human
gccugggaguucgaggcugcagug

SEQ ID NO: 175419 - RNA, 32 nt, Human
gccugggaguucgaggcugcagugagcaauga

SEQ ID NO: 175420 - RNA, 24 nt, Human
gccugggaguuugaggcugcagug

SEQ ID NO: 175421 - RNA, 32 nt, Human
gccugggaguuugaggcugcagugagcuauga

SEQ ID NO: 175422 - RNA, 32 nt, Human
gccugggauagccgcugguaacuguuaggaac

SEQ ID NO: 175423 - RNA, 32 nt, Human
gccugggauccaggaaccagugggauuggaug

SEQ ID NO: 175424 - RNA, 32 nt, Human
gccugggauggccacagaaggggcaggccagg

SEQ ID NO: 175425 - RNA, 32 nt, Human
gccugggaugucaaggcugcagugagcuguga

SEQ ID NO: 175426 - RNA, 32 nt, Human
gccugggaugucagggcuacagugagccauaa

SEQ ID NO: 175427 - RNA, 32 nt, Human
gccugggauugugcacuguccaggguccugaa

SEQ ID NO: 175428 - RNA, 32 nt, Human
gccugggcaaaaagagccagacuccgucucaa

SEQ ID NO: 175429 - RNA, 32 nt, Human
gccugggcaaaaaugcuucaacacgccacugg

SEQ ID NO: 175430 - RNA, 32 nt, Human
gccugggcaacacagugagugagacccugucu

SEQ ID NO: 175431 - RNA, 18 nt, Human
gccugggcaacagaguga

SEQ ID NO: 175432 - RNA, 32 nt, Human
gccugggcaacagagugacacucugucucaaa

SEQ ID NO: 175433 - RNA, 18 nt, Human
gccugggcaacagagugg

SEQ ID NO: 175434 - RNA, 21 nt, Human
gccugggcaacauggcaaaug

SEQ ID NO: 175435 - RNA, 20 nt, Human
gccugggcaacauggcgaaa

SEQ ID NO: 175436 - RNA, 20 nt, Human
gccugggcaacauggugaaa

SEQ ID NO: 175437 - RNA, 32 nt, Human
gccugggcaacgagcaagacccagucucuacu

SEQ ID NO: 175438 - RNA, 18 nt, Human
gccugggcaacggaguga

SEQ ID NO: 175439 - RNA, 32 nt, Human
gccugggcacacacaggcaucgggcaccugca

SEQ ID NO: 175440 - RNA, 32 nt, Human
gccugggcacacaccacaugcagauuucagug

SEQ ID NO: 175441 - RNA, 18 nt, Human
gccugggcacuagaguga

SEQ ID NO: 175442 - RNA, 19 nt, Human
gccugggcagcaagaguga

SEQ ID NO: 175443 - RNA, 18 nt, Human
gccugggcagcagagcga

SEQ ID NO: 175444 - RNA, 17 nt, Human
gccugggcagcagagga

SEQ ID NO: 175445 - RNA, 18 nt, Human
gccugggcagcagaguga

SEQ ID NO: 175446 - RNA, 32 nt, Human
gccugggcagcccucacacccaugcucccucc

SEQ ID NO: 175447 - RNA, 15 nt, Human
gccugggcaggggga

SEQ ID NO: 175448 - RNA, 32 nt, Human
gccugggcaguucuagggcuggagggcagggg

SEQ ID NO: 175449 - RNA, 21 nt, Human
gccugggcaucugaccucccc

SEQ ID NO: 175450 - RNA, 18 nt, Human
gccugggccacagaguga

SEQ ID NO: 175451 - RNA, 32 nt, Human
gccugggccacccuuccugccugggccucccc

SEQ ID NO: 175452 - RNA, 32 nt, Human
gccugggccagccugccuccuggccucaggau

SEQ ID NO: 175453 - RNA, 32 nt, Human
gccugggccagcucaaggugggcacgggggcc

SEQ ID NO: 175454 - RNA, 32 nt, Human
gccugggccaggugugacagaguagagguagc

SEQ ID NO: 175455 - RNA, 32 nt, Human
gccugggcccaggauuggagggcuucacacca

SEQ ID NO: 175456 - RNA, 19 nt, Human
gccugggcccccucaggga

SEQ ID NO: 175457 - RNA, 32 nt, Human
gccugggcccccuccuuccccugggccugguc

SEQ ID NO: 175458 - RNA, 17 nt, Human
gccugggccccuuccag

SEQ ID NO: 175459 - RNA, 32 nt, Human
gccugggcccgccucaaccaaaaguuugaccu

SEQ ID NO: 175460 - RNA, 32 nt, Human
gccugggcccugccaggcagaggcgcucuugc

SEQ ID NO: 175461 - RNA, 28 nt, Human
gccugggccgacacaaccuugagcacag

SEQ ID NO: 175462 - RNA, 28 nt, Human
gccugggccgacccaggaugcaacacag

SEQ ID NO: 175463 - RNA, 23 nt, Human
gccugggccgcugggacgcggug

SEQ ID NO: 175464 - RNA, 32 nt, Human
gccugggccgugaggucacugccaccaugagu

SEQ ID NO: 175465 - RNA, 22 nt, Human
gccugggccuccccaggagcug

SEQ ID NO: 175466 - RNA, 22 nt, Human
gccugggccugcuggacuccaa

SEQ ID NO: 175467 - RNA, 32 nt, Human
gccugggccugucaggcgguuccguccggguc

SEQ ID NO: 175468 - RNA, 32 nt, Human
gccugggccuguugcuuuugagcccagcgguu

SEQ ID NO: 175469 - RNA, 32 nt, Human
gccugggcgacaaagcaauaccccuaucucua

SEQ ID NO: 175470 - RNA, 18 nt, Human
gccugggcgacagaguga

SEQ ID NO: 175471 - RNA, 19 nt, Human
gccugggcggcagagccag

SEQ ID NO: 175472 - RNA, 18 nt, Human
gccugggcggcagaguga

SEQ ID NO: 175473 - RNA, 18 nt, Human
gccugggcgucagaguga

SEQ ID NO: 175474 - RNA, 32 nt, Human
gccugggcguggcagccucacagggaacacgg

SEQ ID NO: 175475 - RNA, 32 nt, Human
gccugggcuaagccuggcuaggagccgcgcag

SEQ ID NO: 175476 - RNA, 18 nt, Human
gccugggcuacagaguga

SEQ ID NO: 175477 - RNA, 32 nt, Human
gccugggcuaggcugcagccugccuccugggg

SEQ ID NO: 175478 - RNA, 32 nt, Human
gccugggcuaucucuuuaaaguuaucuugauu

SEQ ID NO: 175479 - RNA, 32 nt, Human
gccugggcucaagcaacccucccgccucccug

SEQ ID NO: 175480 - RNA, 32 nt, Human
gccugggcucaagcgauccucccaccucagcc

SEQ ID NO: 175481 - RNA, 32 nt, Human
gccugggcucaagugaucuuacuccagccucc

SEQ ID NO: 175482 - RNA, 32 nt, Human
gccugggcucccaggauucgggucugagacuu

SEQ ID NO: 175483 - RNA, 32 nt, Human
gccugggcucccuggcccugccccacccaccu

SEQ ID NO: 175484 - RNA, 32 nt, Human
gccugggcucugaaugcccacccugcgacggu

SEQ ID NO: 175485 - RNA, 32 nt, Human
gccugggcucugagccucagcugagcccugga

SEQ ID NO: 175486 - RNA, 32 nt, Human
gccugggcugccucuucgcggggugucccgag

SEQ ID NO: 175487 - RNA, 21 nt, Human
gccugggcuggaaugcagugg

SEQ ID NO: 175488 - RNA, 23 nt, Human
gccugggcuggaaugcaguggug

SEQ ID NO: 175489 - RNA, 21 nt, Human
gccugggcuggaguacagugg

SEQ ID NO: 175490 - RNA, 23 nt, Human
gccugggcuggaguacaguggug

SEQ ID NO: 175491 - RNA, 20 nt, Human
gccugggcuggagugcagug

SEQ ID NO: 175492 - RNA, 21 nt, Human
gccugggcuggagugcagugg

SEQ ID NO: 175493 - RNA, 24 nt, Human
gccugggcuggagugcaguggcgu

SEQ ID NO: 175494 - RNA, 32 nt, Human
gccugggcuggcuggcaucccugggucgaugg

SEQ ID NO: 175495 - RNA, 32 nt, Human
gccugggcuggcuguggcccagugcucaggac

SEQ ID NO: 175496 - RNA, 32 nt, Human
gccugggcuggggcucgcuccagggcuuugca

SEQ ID NO: 175497 - RNA, 32 nt, Human
gccugggcugggugucuggugccuggaacaga

SEQ ID NO: 175498 - RNA, 32 nt, Human
gccugggcuggucucaaacuccuggguucaag

SEQ ID NO: 175499 - RNA, 32 nt, Human
gccuggggaaggggagucagugcuggagguga

SEQ ID NO: 175500 - RNA, 32 nt, Human
gccuggggaccuugaagaaugcccuucagugg

SEQ ID NO: 175501 - RNA, 32 nt, Human
gccuggggacgcccacccacacccacugcuuc

SEQ ID NO: 175502 - RNA, 32 nt, Human
gccuggggagagaagcaagagcaggcuggagu

SEQ ID NO: 175503 - RNA, 32 nt, Human
gccuggggagaguggucccugcccuuccgcgc

SEQ ID NO: 175504 - RNA, 32 nt, Human
gccuggggagcuuguuaaaaguguagauucca

SEQ ID NO: 175505 - RNA, 32 nt, Human
gccuggggagggcugugcuggggaugagcgcc

SEQ ID NO: 175506 - RNA, 21 nt, Human
gccuggggaggucgagggugc

SEQ ID NO: 175507 - RNA, 32 nt, Human
gccuggggaucuuguuaaaaugcagauccuga

SEQ ID NO: 175508 - RNA, 32 nt, Human
gccuggggauuccagcugucuugucuuuuucc

SEQ ID NO: 175509 - RNA, 32 nt, Human
gccuggggcagccuccugauggggauguuugg

SEQ ID NO: 175510 - RNA, 32 nt, Human
gccuggggcaggaaguggagugacaggggaca

SEQ ID NO: 175511 - RNA, 32 nt, Human
gccuggggcaggcauggcggauuccagcgaag

SEQ ID NO: 175512 - RNA, 32 nt, Human
gccuggggcauuuaguguuuucccuggugaua

SEQ ID NO: 175513 - RNA, 18 nt, Human
gccuggggccagcggcgc

SEQ ID NO: 175514 - RNA, 32 nt, Human
gccuggggcccaggacugcagcggcuucggaa

SEQ ID NO: 175515 - RNA, 32 nt, Human
gccuggggcccucacuccugcccacgccuccc

SEQ ID NO: 175516 - RNA, 32 nt, Human
gccuggggccugggccucuccugggcugugcc

SEQ ID NO: 175517 - RNA, 32 nt, Human
gccuggggccuggggaaagggcuuggacugug

SEQ ID NO: 175518 - RNA, 32 nt, Human
gccuggggcugcaggauccuaguugguuccug

SEQ ID NO: 175519 - RNA, 32 nt, Human
gccuggggcugccucugcucuccaagacccaa

SEQ ID NO: 175520 - RNA, 32 nt, Human
gccuggggcugggcgggggccauggcgcugcc

SEQ ID NO: 175521 - RNA, 32 nt, Human
gccuggggcuggggccucccucccaggcccug

SEQ ID NO: 175522 - RNA, 32 nt, Human
gccugggggacugaggcugcagugagccauga

SEQ ID NO: 175523 - RNA, 32 nt, Human
gccugggggcaggcgggcuagaggagcaggua

SEQ ID NO: 175524 - RNA, 32 nt, Human
gccugggggcccccaccuccacucucuggguu

SEQ ID NO: 175525 - RNA, 32 nt, Human
gccugggggcccugccuuccgggcgcuccugg

SEQ ID NO: 175526 - RNA, 32 nt, Human
gccugggggcucccccgacccucucucuauuc

SEQ ID NO: 175527 - RNA, 32 nt, Human
gccugggguagagagacagaaacuugagagaa

SEQ ID NO: 175528 - RNA, 26 nt, Human
gccuggggucacucagaccaccagcc

SEQ ID NO: 175529 - RNA, 32 nt, Human
gccuggggugagagcacagaggagugggccgg

SEQ ID NO: 175530 - RNA, 32 nt, Human
gccugggguuacugcugaccuuucagugcugu

SEQ ID NO: 175531 - RNA, 32 nt, Human
gccugggguugugguugaggccgggucuccgc

SEQ ID NO: 175532 - RNA, 19 nt, Human
gccuggguaacagagcuag

SEQ ID NO: 175533 - RNA, 15 nt, Human
gccugggucaggggg

SEQ ID NO: 175534 - RNA, 32 nt, Human
gccugggucaugcaccuggaguugggagauca

SEQ ID NO: 175535 - RNA, 32 nt, Human
gccugggucccugaaucaucauguggaaggcu

SEQ ID NO: 175536 - RNA, 32 nt, Human
gccuggguccuacccugucuggucaugacccc

SEQ ID NO: 175537 - RNA, 32 nt, Human
gccuggguccugacuuuuccauugacuaagcu

SEQ ID NO: 175538 - RNA, 32 nt, Human
gccugggucggccucuggaguauggucuggcg

SEQ ID NO: 175539 - RNA, 32 nt, Human
gccugggucuccaggagaagcugagggcacag

SEQ ID NO: 175540 - RNA, 32 nt, Human
gccugggucuguccuccaagagaacccugaga

SEQ ID NO: 175541 - RNA, 32 nt, Human
gccugggugaagcaucugcuggacaagucgga

SEQ ID NO: 175542 - RNA, 18 nt, Human
gccugggugacaaaguaa

SEQ ID NO: 175543 - RNA, 29 nt, Human
gccugggugacaagggaagacucucucuu

SEQ ID NO: 175544 - RNA, 32 nt, Human
gccugggugacacuccagccugggugacaaag

SEQ ID NO: 175545 - RNA, 18 nt, Human
gccugggugacagagcca

SEQ ID NO: 175546 - RNA, 19 nt, Human
gccugggugacagagccag

SEQ ID NO: 175547 - RNA, 19 nt, Human
gccugggugacagagcuag

SEQ ID NO: 175548 - RNA, 19 nt, Human
gccugggugacagagucag

SEQ ID NO: 175549 - RNA, 32 nt, Human
gccugggugacagauccagacucugucucaaa

SEQ ID NO: 175550 - RNA, 32 nt, Human
gccugggugagucaggaguccgggggcuuucu

SEQ ID NO: 175551 - RNA, 32 nt, Human
gccugggugaugaggcugcuggaagcuuugaa

SEQ ID NO: 175552 - RNA, 32 nt, Human
gccugggugccuggagcugagcugcggcaagg

SEQ ID NO: 175553 - RNA, 32 nt, Human
gccugggugcuggccugcccucuccggccgcu

SEQ ID NO: 175554 - RNA, 21 nt, Human
gccuggguggcaagggugaga

SEQ ID NO: 175555 - RNA, 32 nt, Human
gccuggguggcaccaggcaaugcaggugaagu

SEQ ID NO: 175556 - RNA, 18 nt, Human
gccuggguggcagaguga

SEQ ID NO: 175557 - RNA, 20 nt, Human
gccuggguggcggggcccag

SEQ ID NO: 175558 - RNA, 32 nt, Human
gccuggguggggagcaggucucaggccucuug

SEQ ID NO: 175559 - RNA, 32 nt, Human
gccugggugggugccuggcugugugcagugag

SEQ ID NO: 175560 - RNA, 32 nt, Human
gccuggguugcaggcccugcuugugguggcgc

SEQ ID NO: 175561 - RNA, 32 nt, Human
gccuggguugggagggaagugggaggagggaa

SEQ ID NO: 175562 - RNA, 32 nt, Human
gccuggguuggguuuagaaagaucucaggaaa

SEQ ID NO: 175563 - RNA, 17 nt, Human
gccuggguuucugugga

SEQ ID NO: 175564 - RNA, 32 nt, Human
gccuggguuugcagccuggcucugccccuugc

SEQ ID NO: 175565 - RNA, 32 nt, Human
gccugguaggagagagacaggacagacccgcu

SEQ ID NO: 175566 - RNA, 32 nt, Human
gccugguaggcugaggcugcagugagccaaga

SEQ ID NO: 175567 - RNA, 23 nt, Human
gccugguaucagggaaauugaga

SEQ ID NO: 175568 - RNA, 32 nt, Human
gccuggucaguaggggaagcaaggugaccgca

SEQ ID NO: 175569 - RNA, 21 nt, Human
gccugguccagacauugcaga

SEQ ID NO: 175570 - RNA, 24 nt, Human
gccuggucccacgagggugccgug

SEQ ID NO: 175571 - RNA, 20 nt, Human
gccuggucccaucuucugcc

SEQ ID NO: 175572 - RNA, 20 nt, Human
gccugguccucacacucacc

SEQ ID NO: 175573 - RNA, 20 nt, Human
gccugguccugcccaccuca

SEQ ID NO: 175574 - RNA, 32 nt, Human
gccugguccugccccuuccugguucuuaucuc

SEQ ID NO: 175575 - RNA, 19 nt, Human
gccugguccuucccugaug

SEQ ID NO: 175576 - RNA, 32 nt, Human
gccuggucucacuccuuggacuugucaccuug

SEQ ID NO: 175577 - RNA, 20 nt, Human
gccuggucucccgagcauca

SEQ ID NO: 175578 - RNA, 32 nt, Human
gccuggucucgaacuccugaccucaggugauc

SEQ ID NO: 175579 - RNA, 32 nt, Human
gccuggucuuaaacuccuaaccucaggugauc

SEQ ID NO: 175580 - RNA, 18 nt, Human
gccuggucuucucuccca

SEQ ID NO: 175581 - RNA, 32 nt, Human
gccuggucuugaacuccugaccucaggugauc

SEQ ID NO: 175582 - RNA, 32 nt, Human
gccuggugaauuggcuggccagcuggggugga

SEQ ID NO: 175583 - RNA, 32 nt, Human
gccuggugacacugcugccgcugcuaaacaug

SEQ ID NO: 175584 - RNA, 32 nt, Human
gccuggugacaucaaccagcaggaugagcgcu

SEQ ID NO: 175585 - RNA, 31 nt, Human
gccuggugacuucucccuccccggccucagg

SEQ ID NO: 175586 - RNA, 32 nt, Human
gccuggugagccaccuacccucuugggcauuu

SEQ ID NO: 175587 - RNA, 32 nt, Human
gccuggugagcgcccgccggcccacacaagcc

SEQ ID NO: 175588 - RNA, 17 nt, Human
gccuggugaggaggggg

SEQ ID NO: 175589 - RNA, 32 nt, Human
gccuggugcacugugucuguggugccagaggc

SEQ ID NO: 175590 - RNA, 32 nt, Human
gccuggugcagggagcaguagcagggacagca

SEQ ID NO: 175591 - RNA, 32 nt, Human
gccuggugcccuggcccagccuguggccucag

SEQ ID NO: 175592 - RNA, 32 nt, Human
gccuggugccuguaaucccagcuacucgggag

SEQ ID NO: 175593 - RNA, 32 nt, Human
gccuggugcgggcagagagguuucaguugauc

SEQ ID NO: 175594 - RNA, 32 nt, Human
gccuggugcucaauaaaugaacagugagugaa

SEQ ID NO: 175595 - RNA, 32 nt, Human
gccuggugcuucuccccacaccccuguaggcc

SEQ ID NO: 175596 - RNA, 17 nt, Human
gccugguggcagaguga

SEQ ID NO: 175597 - RNA, 21 nt, Human
gccugguggcagaugaaugca

SEQ ID NO: 175598 - RNA, 32 nt, Human
gccugguggcugcuugauuaugucaccagacu

SEQ ID NO: 175599 - RNA, 32 nt, Human
gccugguggggagcuugggugagucuguuuuc

SEQ ID NO: 175600 - RNA, 32 nt, Human
gccugguggggaggggagagcucagcccccga

SEQ ID NO: 175601 - RNA, 18 nt, Human
gccugguggguucugggg

SEQ ID NO: 175602 - RNA, 20 nt, Human
gccuggugucucuagacuca

SEQ ID NO: 175603 - RNA, 32 nt, Human
gccugguguggaggggaguccgggagggccug

SEQ ID NO: 175604 - RNA, 32 nt, Human
gccuggugugugcgugcugugugugcaugugu

SEQ ID NO: 175605 - RNA, 18 nt, Human
gccugguguuucuugaua

SEQ ID NO: 175606 - RNA, 19 nt, Human
gccugguuacucugcgaga

SEQ ID NO: 175607 - RNA, 21 nt, Human
gccugguuacugaccuuuccc

SEQ ID NO: 175608 - RNA, 32 nt, Human
gccugguucauccccagcuuccuggcaaaguu

SEQ ID NO: 175609 - RNA, 32 nt, Human
gccugguucucuucccugcucaggcugccaga

SEQ ID NO: 175610 - RNA, 29 nt, Human
gccugguugcugcuauugcucccaagggc

SEQ ID NO: 175611 - RNA, 32 nt, Human
gccugguuggguccuuggggcgggcagggcca

SEQ ID NO: 175612 - RNA, 32 nt, Human
gccugguugguagaauguuggcauucgguuga

SEQ ID NO: 175613 - RNA, 32 nt, Human
gccugguuguuccccucuuuggcccucucagg

SEQ ID NO: 175614 - RNA, 32 nt, Human
gccugguuuucuaaugcugucaucucaguucg

SEQ ID NO: 175615 - RNA, 32 nt, Human
gccugguuuugcucagcaccuaccccaguuua

SEQ ID NO: 175616 - RNA, 23 nt, Human
gccuguaaacccaacuacuuggg

SEQ ID NO: 175617 - RNA, 24 nt, Human
gccuguaaacccaacuacuuggga

SEQ ID NO: 175618 - RNA, 21 nt, Human
gccuguaaacccagcuacuca

SEQ ID NO: 175619 - RNA, 24 nt, Human
gccuguaaacccagcuacucagga

SEQ ID NO: 175620 - RNA, 25 nt, Human
gccuguaaaccucagcuacccagga

SEQ ID NO: 175621 - RNA, 32 nt, Human
gccuguaacccagcuacucaggaggcugaggc

SEQ ID NO: 175622 - RNA, 32 nt, Human
gccuguaacccagcuacucgggaggcugaagc

SEQ ID NO: 175623 - RNA, 23 nt, Human
gccuguaacccagcuacucguga

SEQ ID NO: 175624 - RNA, 21 nt, Human
gccuguaaccccagcuacuca

SEQ ID NO: 175625 - RNA, 23 nt, Human
gccuguaaccccagcuacucagg

SEQ ID NO: 175626 - RNA, 24 nt, Human
gccuguaaccccagcuacucagga

SEQ ID NO: 175627 - RNA, 23 nt, Human
gccuguaaccccagcuacucggg

SEQ ID NO: 175628 - RNA, 24 nt, Human
gccuguaaccccagcuacucggga

SEQ ID NO: 175629 - RNA, 32 nt, Human
gccuguaaccccaucacuuugggaggccagag

SEQ ID NO: 175630 - RNA, 24 nt, Human
gccuguaacuccagcuacuuggga

SEQ ID NO: 175631 - RNA, 23 nt, Human
gccuguaauaccagcuacucagg

SEQ ID NO: 175632 - RNA, 24 nt, Human
gccuguaauaccagcuacucagga

SEQ ID NO: 175633 - RNA, 32 nt, Human
gccuguaauaccaugucuucccaugagggguc

SEQ ID NO: 175634 - RNA, 24 nt, Human
gccuguaauagcagcuacucggga

SEQ ID NO: 175635 - RNA, 24 nt, Human
gccuguaauaucagcuacucagga

SEQ ID NO: 175636 - RNA, 24 nt, Human
gccuguaaucacagcuacucggga

SEQ ID NO: 175637 - RNA, 23 nt, Human
gccuguaaucacagcuacuuggg

SEQ ID NO: 175638 - RNA, 24 nt, Human
gccuguaaucacagcuacuuggga

SEQ ID NO: 175639 - RNA, 32 nt, Human
gccuguaaucacugcacccagccucaaauucc

SEQ ID NO: 175640 - RNA, 22 nt, Human
gccuguaaucagcuacucggga

SEQ ID NO: 175641 - RNA, 22 nt, Human
gccuguaauccaagcuacucgg

SEQ ID NO: 175642 - RNA, 22 nt, Human
gccuguaauccagcuacucagg

SEQ ID NO: 175643 - RNA, 23 nt, Human
gccuguaauccagcuacucagga

SEQ ID NO: 175644 - RNA, 32 nt, Human
gccuguaauccagcuacucaggaggcugaggc

SEQ ID NO: 175645 - RNA, 22 nt, Human
gccuguaauccagcuacucggg

SEQ ID NO: 175646 - RNA, 23 nt, Human
gccuguaauccagcuacucggga

SEQ ID NO: 175647 - RNA, 32 nt, Human
gccuguaauccagcuacucgggaggcugaggc

SEQ ID NO: 175648 - RNA, 32 nt, Human
gccuguaauccagcuacuugggaggcugaggc

SEQ ID NO: 175649 - RNA, 22 nt, Human
gccuguaaucccaacacuuagg

SEQ ID NO: 175650 - RNA, 20 nt, Human
gccuguaaucccaacacuuu

SEQ ID NO: 175651 - RNA, 22 nt, Human
gccuguaaucccaacuaccugg

SEQ ID NO: 175652 - RNA, 21 nt, Human
gccuguaaucccaacuacuca

SEQ ID NO: 175653 - RNA, 23 nt, Human
gccuguaaucccaacuacucagg

SEQ ID NO: 175654 - RNA, 23 nt, Human
gccuguaaucccaacuacucggg

SEQ ID NO: 175655 - RNA, 23 nt, Human
gccuguaaucccaacuacuuggg

SEQ ID NO: 175656 - RNA, 24 nt, Human
gccuguaaucccaacuacuuggga

SEQ ID NO: 175657 - RNA, 24 nt, Human
gccuguaaucccagauacuuggga

SEQ ID NO: 175658 - RNA, 24 nt, Human
gccuguaaucccagcaauuuggga

SEQ ID NO: 175659 - RNA, 24 nt, Human
gccuguaaucccagcacauuggga

SEQ ID NO: 175660 - RNA, 18 nt, Human
gccuguaaucccagcacu

SEQ ID NO: 175661 - RNA, 22 nt, Human
gccuguaaucccagcacugaga

SEQ ID NO: 175662 - RNA, 22 nt, Human
gccuguaaucccagcacuuagg

SEQ ID NO: 175663 - RNA, 32 nt, Human
gccuguaaucccagcacuucacuuugggaggc

SEQ ID NO: 175664 - RNA, 21 nt, Human
gccuguaaucccagcacuugg

SEQ ID NO: 175665 - RNA, 22 nt, Human
gccuguaaucccagcacuuggg

SEQ ID NO: 175666 - RNA, 23 nt, Human
gccuguaaucccagcacuuggga

SEQ ID NO: 175667 - RNA, 20 nt, Human
gccuguaaucccagcacuuu

SEQ ID NO: 175668 - RNA, 23 nt, Human
gccuguaaucccagcacuuuaga

SEQ ID NO: 175669 - RNA, 24 nt, Human
gccuguaaucccagcaguuuggga

SEQ ID NO: 175670 - RNA, 23 nt, Human
gccuguaaucccagcauuuggga

SEQ ID NO: 175671 - RNA, 24 nt, Human
gccuguaaucccagcauuuuggga

SEQ ID NO: 175672 - RNA, 21 nt, Human
gccuguaaucccagccacuca

SEQ ID NO: 175673 - RNA, 23 nt, Human
gccuguaaucccagccacucagg

SEQ ID NO: 175674 - RNA, 32 nt, Human
gccuguaaucccagccacucaggaagcugagg

SEQ ID NO: 175675 - RNA, 23 nt, Human
gccuguaaucccagccacuuggg

SEQ ID NO: 175676 - RNA, 24 nt, Human
gccuguaaucccagccacuuggga

SEQ ID NO: 175677 - RNA, 23 nt, Human
gccuguaaucccagcuaaucagg

SEQ ID NO: 175678 - RNA, 24 nt, Human
gccuguaaucccagcuaaucagga

SEQ ID NO: 175679 - RNA, 24 nt, Human
gccuguaaucccagcuacauggga

SEQ ID NO: 175680 - RNA, 21 nt, Human
gccuguaaucccagcuaccca

SEQ ID NO: 175681 - RNA, 23 nt, Human
gccuguaaucccagcuacccagg

SEQ ID NO: 175682 - RNA, 24 nt, Human
gccuguaaucccagcuacccagga

SEQ ID NO: 175683 - RNA, 23 nt, Human
gccuguaaucccagcuacccggg

SEQ ID NO: 175684 - RNA, 24 nt, Human
gccuguaaucccagcuacccgggg

SEQ ID NO: 175685 - RNA, 24 nt, Human
gccuguaaucccagcuacgcagga

SEQ ID NO: 175686 - RNA, 24 nt, Human
gccuguaaucccagcuacgucagg

SEQ ID NO: 175687 - RNA, 24 nt, Human
gccuguaaucccagcuacguggga

SEQ ID NO: 175688 - RNA, 19 nt, Human
gccuguaaucccagcuacu

SEQ ID NO: 175689 - RNA, 23 nt, Human
gccuguaaucccagcuacuaagg

SEQ ID NO: 175690 - RNA, 24 nt, Human
gccuguaaucccagcuacuaagga

SEQ ID NO: 175691 - RNA, 24 nt, Human
gccuguaaucccagcuacuagaga

SEQ ID NO: 175692 - RNA, 22 nt, Human
gccuguaaucccagcuacuagg

SEQ ID NO: 175693 - RNA, 23 nt, Human
gccuguaaucccagcuacuaggg

SEQ ID NO: 175694 - RNA, 24 nt, Human
gccuguaaucccagcuacuaggga

SEQ ID NO: 175695 - RNA, 24 nt, Human
gccuguaaucccagcuacuagggg

SEQ ID NO: 175696 - RNA, 21 nt, Human
gccuguaaucccagcuacuca

SEQ ID NO: 175697 - RNA, 24 nt, Human
gccuguaaucccagcuacucaaga

SEQ ID NO: 175698 - RNA, 23 nt, Human
gccuguaaucccagcuacucaga

SEQ ID NO: 175699 - RNA, 23 nt, Human
gccuguaaucccagcuacucagg

SEQ ID NO: 175700 - RNA, 24 nt, Human
gccuguaaucccagcuacucagga

SEQ ID NO: 175701 - RNA, 23 nt, Human
gccuguaaucccagcuacuccgg

SEQ ID NO: 175702 - RNA, 24 nt, Human
gccuguaaucccagcuacuccgga

SEQ ID NO: 175703 - RNA, 24 nt, Human
gccuguaaucccagcuacuccggg

SEQ ID NO: 175704 - RNA, 22 nt, Human
gccuguaaucccagcuacucgg

SEQ ID NO: 175705 - RNA, 23 nt, Human
gccuguaaucccagcuacucgga

SEQ ID NO: 175706 - RNA, 24 nt, Human
gccuguaaucccagcuacucggag

SEQ ID NO: 175707 - RNA, 23 nt, Human
gccuguaaucccagcuacucggg

SEQ ID NO: 175708 - RNA, 24 nt, Human
gccuguaaucccagcuacucggga

SEQ ID NO: 175709 - RNA, 24 nt, Human
gccuguaaucccagcuacucgggg

SEQ ID NO: 175710 - RNA, 24 nt, Human
gccuguaaucccagcuacucugga

SEQ ID NO: 175711 - RNA, 23 nt, Human
gccuguaaucccagcuacugagg

SEQ ID NO: 175712 - RNA, 22 nt, Human
gccuguaaucccagcuacuggg

SEQ ID NO: 175713 - RNA, 23 nt, Human
gccuguaaucccagcuacuggga

SEQ ID NO: 175714 - RNA, 24 nt, Human
gccuguaaucccagcuacugggga

SEQ ID NO: 175715 - RNA, 23 nt, Human
gccuguaaucccagcuacuuagg

SEQ ID NO: 175716 - RNA, 24 nt, Human
gccuguaaucccagcuacuuagga

SEQ ID NO: 175717 - RNA, 23 nt, Human
gccuguaaucccagcuacuucgg

SEQ ID NO: 175718 - RNA, 24 nt, Human
gccuguaaucccagcuacuucgga

SEQ ID NO: 175719 - RNA, 21 nt, Human
gccuguaaucccagcuacuug

SEQ ID NO: 175720 - RNA, 24 nt, Human
gccuguaaucccagcuacuugaga

SEQ ID NO: 175721 - RNA, 22 nt, Human
gccuguaaucccagcuacuugg

SEQ ID NO: 175722 - RNA, 23 nt, Human
gccuguaaucccagcuacuugga

SEQ ID NO: 175723 - RNA, 23 nt, Human
gccuguaaucccagcuacuuggg

SEQ ID NO: 175724 - RNA, 24 nt, Human
gccuguaaucccagcuacuuggga

SEQ ID NO: 175725 - RNA, 24 nt, Human
gccuguaaucccagcuacuugggg

SEQ ID NO: 175726 - RNA, 24 nt, Human
gccuguaaucccagcuacuuugga

SEQ ID NO: 175727 - RNA, 20 nt, Human
gccuguaaucccagcuagga

SEQ ID NO: 175728 - RNA, 22 nt, Human
gccuguaaucccagcuaggagg

SEQ ID NO: 175729 - RNA, 24 nt, Human
gccuguaaucccagcuauauagga

SEQ ID NO: 175730 - RNA, 23 nt, Human
gccuguaaucccagcuauucagg

SEQ ID NO: 175731 - RNA, 24 nt, Human
gccuguaaucccagcuauucagga

SEQ ID NO: 175732 - RNA, 22 nt, Human
gccuguaaucccagcuauucgg

SEQ ID NO: 175733 - RNA, 23 nt, Human
gccuguaaucccagcuauucgga

SEQ ID NO: 175734 - RNA, 23 nt, Human
gccuguaaucccagcuauucggg

SEQ ID NO: 175735 - RNA, 24 nt, Human
gccuguaaucccagcuauucggga

SEQ ID NO: 175736 - RNA, 23 nt, Human
gccuguaaucccagcuauuuggg

SEQ ID NO: 175737 - RNA, 24 nt, Human
gccuguaaucccagcuauuuggga

SEQ ID NO: 175738 - RNA, 23 nt, Human
gccuguaaucccagcuccuuggg

SEQ ID NO: 175739 - RNA, 24 nt, Human
gccuguaaucccagcuccuuggga

SEQ ID NO: 175740 - RNA, 21 nt, Human
gccuguaaucccagcucugga

SEQ ID NO: 175741 - RNA, 21 nt, Human
gccuguaaucccagcucuuug

SEQ ID NO: 175742 - RNA, 23 nt, Human
gccuguaaucccagcucuuuggg

SEQ ID NO: 175743 - RNA, 24 nt, Human
gccuguaaucccagcucuuuggga

SEQ ID NO: 175744 - RNA, 23 nt, Human
gccuguaaucccagcugcucagg

SEQ ID NO: 175745 - RNA, 24 nt, Human
gccuguaaucccagcugcucagga

SEQ ID NO: 175746 - RNA, 23 nt, Human
gccuguaaucccagcugcucggg

SEQ ID NO: 175747 - RNA, 24 nt, Human
gccuguaaucccagcugcucggga

SEQ ID NO: 175748 - RNA, 23 nt, Human
gccuguaaucccagcugcuuggg

SEQ ID NO: 175749 - RNA, 24 nt, Human
gccuguaaucccagcugcuuggga

SEQ ID NO: 175750 - RNA, 24 nt, Human
gccuguaaucccagcuguucggga

SEQ ID NO: 175751 - RNA, 21 nt, Human
gccuguaaucccagcuguuug

SEQ ID NO: 175752 - RNA, 24 nt, Human
gccuguaaucccagcuucuggagg

SEQ ID NO: 175753 - RNA, 24 nt, Human
gccuguaaucccagcuucuuggga

SEQ ID NO: 175754 - RNA, 24 nt, Human
gccuguaaucccagcuuugggaga

SEQ ID NO: 175755 - RNA, 20 nt, Human
gccuguaaucccaggacuuu

SEQ ID NO: 175756 - RNA, 24 nt, Human
gccuguaaucccagguacuugaga

SEQ ID NO: 175757 - RNA, 23 nt, Human
gccuguaaucccagguacuugga

SEQ ID NO: 175758 - RNA, 22 nt, Human
gccuguaaucccaguacuuggg

SEQ ID NO: 175759 - RNA, 23 nt, Human
gccuguaaucccaguacuuggga

SEQ ID NO: 175760 - RNA, 20 nt, Human
gccuguaaucccaguacuuu

SEQ ID NO: 175761 - RNA, 24 nt, Human
gccuguaaucccaguaguuuggga

SEQ ID NO: 175762 - RNA, 24 nt, Human
gccuguaaucccagugacuuggga

SEQ ID NO: 175763 - RNA, 24 nt, Human
gccuguaaucccaguuacucagga

SEQ ID NO: 175764 - RNA, 24 nt, Human
gccuguaaucccaguuacuccaga

SEQ ID NO: 175765 - RNA, 24 nt, Human
gccuguaaucccaguuacucgaga

SEQ ID NO: 175766 - RNA, 23 nt, Human
gccuguaaucccaguuacucggg

SEQ ID NO: 175767 - RNA, 24 nt, Human
gccuguaaucccaguuacucggga

SEQ ID NO: 175768 - RNA, 23 nt, Human
gccuguaaucccaguuacuuagg

SEQ ID NO: 175769 - RNA, 24 nt, Human
gccuguaaucccaguuacuuagga

SEQ ID NO: 175770 - RNA, 23 nt, Human
gccuguaaucccaguuacuuggg

SEQ ID NO: 175771 - RNA, 24 nt, Human
gccuguaaucccaguuacuuggga

SEQ ID NO: 175772 - RNA, 24 nt, Human
gccuguaaucccaguuagucggga

SEQ ID NO: 175773 - RNA, 24 nt, Human
gccuguaaucccaguuccuuggga

SEQ ID NO: 175774 - RNA, 23 nt, Human
gccuguaaucccaucuacucagg

SEQ ID NO: 175775 - RNA, 24 nt, Human
gccuguaaucccggcuacucagga

SEQ ID NO: 175776 - RNA, 23 nt, Human
gccuguaaucccggcuacucggg

SEQ ID NO: 175777 - RNA, 24 nt, Human
gccuguaaucccggcuacucggga

SEQ ID NO: 175778 - RNA, 24 nt, Human
gccuguaaucccugcuacuuggga

SEQ ID NO: 175779 - RNA, 26 nt, Human
gccuguaaucccuuagcuacucagga

SEQ ID NO: 175780 - RNA, 23 nt, Human
gccuguaauccuagcacuuggga

SEQ ID NO: 175781 - RNA, 23 nt, Human
gccuguaauccuagcuacucagg

SEQ ID NO: 175782 - RNA, 24 nt, Human
gccuguaauccuagcuacucagga

SEQ ID NO: 175783 - RNA, 23 nt, Human
gccuguaauccuagcuacuuggg

SEQ ID NO: 175784 - RNA, 24 nt, Human
gccuguaauccuagcuacuuggga

SEQ ID NO: 175785 - RNA, 24 nt, Human
gccuguaauccuggcuacuuggga

SEQ ID NO: 175786 - RNA, 24 nt, Human
gccuguaaucgcagcuacucagga

SEQ ID NO: 175787 - RNA, 24 nt, Human
gccuguaaucuaagcuacuuggga

SEQ ID NO: 175788 - RNA, 24 nt, Human
gccuguaaucucaacuacuuggga

SEQ ID NO: 175789 - RNA, 20 nt, Human
gccuguaaucucagcacuuu

SEQ ID NO: 175790 - RNA, 24 nt, Human
gccuguaaucucagcuacuagaga

SEQ ID NO: 175791 - RNA, 23 nt, Human
gccuguaaucucagcuacucagg

SEQ ID NO: 175792 - RNA, 24 nt, Human
gccuguaaucucagcuacucagga

SEQ ID NO: 175793 - RNA, 24 nt, Human
gccuguaaucucagcuacucggga

SEQ ID NO: 175794 - RNA, 23 nt, Human
gccuguaaucucagcuacuuggg

SEQ ID NO: 175795 - RNA, 24 nt, Human
gccuguaaucucagcuacuuggga

SEQ ID NO: 175796 - RNA, 23 nt, Human
gccuguaaugccagcuacucagg

SEQ ID NO: 175797 - RNA, 24 nt, Human
gccuguaaugccagcuacucagga

SEQ ID NO: 175798 - RNA, 23 nt, Human
gccuguaaugccagcuacucggg

SEQ ID NO: 175799 - RNA, 24 nt, Human
gccuguaaugccagcuacucggga

SEQ ID NO: 175800 - RNA, 32 nt, Human
gccuguaauucagccugccugccuugccuugg

SEQ ID NO: 175801 - RNA, 32 nt, Human
gccuguaauuccagcggcuuggaaggcugagg

SEQ ID NO: 175802 - RNA, 23 nt, Human
gccuguaauuccagcuacccagg

SEQ ID NO: 175803 - RNA, 24 nt, Human
gccuguaauuccagcuacccagga

SEQ ID NO: 175804 - RNA, 23 nt, Human
gccuguaauuccagcuacucagg

SEQ ID NO: 175805 - RNA, 24 nt, Human
gccuguaauuccagcuacucagga

SEQ ID NO: 175806 - RNA, 32 nt, Human
gccuguaauuccagcuacucaggagucugagg

SEQ ID NO: 175807 - RNA, 23 nt, Human
gccuguaauuccagcuacucggg

SEQ ID NO: 175808 - RNA, 24 nt, Human
gccuguaauuccagcuacucggga

SEQ ID NO: 175809 - RNA, 23 nt, Human
gccuguaauuccagcuacuuggg

SEQ ID NO: 175810 - RNA, 24 nt, Human
gccuguaauuccagcuacuuggga

SEQ ID NO: 175811 - RNA, 32 nt, Human
gccuguaauuccagcugcuugggagccugagg

SEQ ID NO: 175812 - RNA, 24 nt, Human
gccuguaauuucagcuacuuggga

SEQ ID NO: 175813 - RNA, 32 nt, Human
gccuguacaagcugauguuuuguauuuugugu

SEQ ID NO: 175814 - RNA, 32 nt, Human
gccuguaccccugcaccuccagccuccacccu

SEQ ID NO: 175815 - RNA, 32 nt, Human
gccuguaccucaccaggcagaguaaauaucua

SEQ ID NO: 175816 - RNA, 32 nt, Human
gccuguacgaggcuuuguuuaagaacuguuua

SEQ ID NO: 175817 - RNA, 32 nt, Human
gccuguacuguacuccagccugggaaacaaug

SEQ ID NO: 175818 - RNA, 32 nt, Human
gccuguacuucucugcugguuugcugcccuau

SEQ ID NO: 175819 - RNA, 32 nt, Human
gccuguagcaaaaaucacagccagcugcaucu

SEQ ID NO: 175820 - RNA, 23 nt, Human
gccuguagcccaagcuacucaga

SEQ ID NO: 175821 - RNA, 22 nt, Human
gccuguagcccacucugcucgc

SEQ ID NO: 175822 - RNA, 24 nt, Human
gccuguagccccagcuacucagga

SEQ ID NO: 175823 - RNA, 23 nt, Human
gccuguagccccagcuacucggg

SEQ ID NO: 175824 - RNA, 24 nt, Human
gccuguagccccagcuacucggga

SEQ ID NO: 175825 - RNA, 23 nt, Human
gccuguagccccagcuacuuggg

SEQ ID NO: 175826 - RNA, 24 nt, Human
gccuguagccccagcuacuuggga

SEQ ID NO: 175827 - RNA, 32 nt, Human
gccuguaggaggugagguagcaggaggugagg

SEQ ID NO: 175828 - RNA, 24 nt, Human
gccuguaggccuagcuacuuagga

SEQ ID NO: 175829 - RNA, 32 nt, Human
gccuguaguaaucccagcacuuuuggaggcca

SEQ ID NO: 175830 - RNA, 24 nt, Human
gccuguaguccaagcuacucaaga

SEQ ID NO: 175831 - RNA, 22 nt, Human
gccuguaguccaagcuacuuga

SEQ ID NO: 175832 - RNA, 20 nt, Human
gccuguaguccagcuacuug

SEQ ID NO: 175833 - RNA, 23 nt, Human
gccuguaguccagcuacuugagg

SEQ ID NO: 175834 - RNA, 32 nt, Human
gccuguaguccagcuacuugaggcugagaugg

SEQ ID NO: 175835 - RNA, 23 nt, Human
gccuguaguccaggccacucgag

SEQ ID NO: 175836 - RNA, 23 nt, Human
gccuguagucccaacacuuaggg

SEQ ID NO: 175837 - RNA, 24 nt, Human
gccuguagucccaacacuuaggga

SEQ ID NO: 175838 - RNA, 23 nt, Human
gccuguagucccaacacuuuggg

SEQ ID NO: 175839 - RNA, 24 nt, Human
gccuguagucccaacacuuuggga

SEQ ID NO: 175840 - RNA, 24 nt, Human
gccuguagucccaacuacuaggga

SEQ ID NO: 175841 - RNA, 23 nt, Human
gccuguagucccaacuacucagg

SEQ ID NO: 175842 - RNA, 24 nt, Human
gccuguagucccaacuacucagga

SEQ ID NO: 175843 - RNA, 24 nt, Human
gccuguagucccaccuacuuggga

SEQ ID NO: 175844 - RNA, 21 nt, Human
gccuguagucccaccuuugag

SEQ ID NO: 175845 - RNA, 24 nt, Human
gccuguagucccacuuacuuggga

SEQ ID NO: 175846 - RNA, 23 nt, Human
gccuguagucccagagcuuuggg

SEQ ID NO: 175847 - RNA, 24 nt, Human
gccuguagucccagagcuuuggga

SEQ ID NO: 175848 - RNA, 23 nt, Human
gccuguagucccagauacucagg

SEQ ID NO: 175849 - RNA, 24 nt, Human
gccuguagucccagauacucagga

SEQ ID NO: 175850 - RNA, 24 nt, Human
gccuguagucccagauacuuggga

SEQ ID NO: 175851 - RNA, 24 nt, Human
gccuguagucccagcaacucagga

SEQ ID NO: 175852 - RNA, 23 nt, Human
gccuguagucccagcacucggga

SEQ ID NO: 175853 - RNA, 22 nt, Human
gccuguagucccagcacuuuga

SEQ ID NO: 175854 - RNA, 24 nt, Human
gccuguagucccagcacuuugaga

SEQ ID NO: 175855 - RNA, 23 nt, Human
gccuguagucccagcacuuuggg

SEQ ID NO: 175856 - RNA, 24 nt, Human
gccuguagucccagcacuuuggga

SEQ ID NO: 175857 - RNA, 23 nt, Human
gccuguagucccagcagcuuggg

SEQ ID NO: 175858 - RNA, 24 nt, Human
gccuguagucccagcagcuuggga

SEQ ID NO: 175859 - RNA, 23 nt, Human
gccuguagucccagcauuuuggg

SEQ ID NO: 175860 - RNA, 24 nt, Human
gccuguagucccagcauuuuggga

SEQ ID NO: 175861 - RNA, 23 nt, Human
gccuguagucccagccacuaggg

SEQ ID NO: 175862 - RNA, 23 nt, Human
gccuguagucccagccacucaga

SEQ ID NO: 175863 - RNA, 23 nt, Human
gccuguagucccagccacucggg

SEQ ID NO: 175864 - RNA, 24 nt, Human
gccuguagucccagccacucggga

SEQ ID NO: 175865 - RNA, 23 nt, Human
gccuguagucccagccacugaag

SEQ ID NO: 175866 - RNA, 23 nt, Human
gccuguagucccagccacuuggg

SEQ ID NO: 175867 - RNA, 24 nt, Human
gccuguagucccagccacuuggga

SEQ ID NO: 175868 - RNA, 24 nt, Human
gccuguagucccagcuaacuggga

SEQ ID NO: 175869 - RNA, 24 nt, Human
gccuguagucccagcuaaucagga

SEQ ID NO: 175870 - RNA, 23 nt, Human
gccuguagucccagcuaaucggg

SEQ ID NO: 175871 - RNA, 24 nt, Human
gccuguagucccagcuaaucggga

SEQ ID NO: 175872 - RNA, 18 nt, Human
gccuguagucccagcuac

SEQ ID NO: 175873 - RNA, 24 nt, Human
gccuguagucccagcuacacggga

SEQ ID NO: 175874 - RNA, 24 nt, Human
gccuguagucccagcuacauggga

SEQ ID NO: 175875 - RNA, 23 nt, Human
gccuguagucccagcuacccagg

SEQ ID NO: 175876 - RNA, 24 nt, Human
gccuguagucccagcuacccagga

SEQ ID NO: 175877 - RNA, 23 nt, Human
gccuguagucccagcuaccuagg

SEQ ID NO: 175878 - RNA, 24 nt, Human
gccuguagucccagcuaccuagga

SEQ ID NO: 175879 - RNA, 23 nt, Human
gccuguagucccagcuaccuggg

SEQ ID NO: 175880 - RNA, 24 nt, Human
gccuguagucccagcuaccuggga

SEQ ID NO: 175881 - RNA, 24 nt, Human
gccuguagucccagcuacguggga

SEQ ID NO: 175882 - RNA, 19 nt, Human
gccuguagucccagcuacu

SEQ ID NO: 175883 - RNA, 24 nt, Human
gccuguagucccagcuacuaugga

SEQ ID NO: 175884 - RNA, 24 nt, Human
gccuguagucccagcuacucaaga

SEQ ID NO: 175885 - RNA, 23 nt, Human
gccuguagucccagcuacucaga

SEQ ID NO: 175886 - RNA, 23 nt, Human
gccuguagucccagcuacucagg

SEQ ID NO: 175887 - RNA, 24 nt, Human
gccuguagucccagcuacucagga

SEQ ID NO: 175888 - RNA, 24 nt, Human
gccuguagucccagcuacucaggg

SEQ ID NO: 175889 - RNA, 24 nt, Human
gccuguagucccagcuacuccaga

SEQ ID NO: 175890 - RNA, 24 nt, Human
gccuguagucccagcuacuccgga

SEQ ID NO: 175891 - RNA, 24 nt, Human
gccuguagucccagcuacucgaga

SEQ ID NO: 175892 - RNA, 24 nt, Human
gccuguagucccagcuacucgagg

SEQ ID NO: 175893 - RNA, 22 nt, Human
gccuguagucccagcuacucgg

SEQ ID NO: 175894 - RNA, 23 nt, Human
gccuguagucccagcuacucgga

SEQ ID NO: 175895 - RNA, 24 nt, Human
gccuguagucccagcuacucggag

SEQ ID NO: 175896 - RNA, 23 nt, Human
gccuguagucccagcuacucggg

SEQ ID NO: 175897 - RNA, 24 nt, Human
gccuguagucccagcuacucggga

SEQ ID NO: 175898 - RNA, 23 nt, Human
gccuguagucccagcuacucuga

SEQ ID NO: 175899 - RNA, 23 nt, Human
gccuguagucccagcuacucugg

SEQ ID NO: 175900 - RNA, 24 nt, Human
gccuguagucccagcuacucugga

SEQ ID NO: 175901 - RNA, 22 nt, Human
gccuguagucccagcuacuggg

SEQ ID NO: 175902 - RNA, 24 nt, Human
gccuguagucccagcuacugggga

SEQ ID NO: 175903 - RNA, 24 nt, Human
gccuguagucccagcuacugguga

SEQ ID NO: 175904 - RNA, 23 nt, Human
gccuguagucccagcuacuuagg

SEQ ID NO: 175905 - RNA, 24 nt, Human
gccuguagucccagcuacuuagga

SEQ ID NO: 175906 - RNA, 24 nt, Human
gccuguagucccagcuacuucggg

SEQ ID NO: 175907 - RNA, 21 nt, Human
gccuguagucccagcuacuug

SEQ ID NO: 175908 - RNA, 24 nt, Human
gccuguagucccagcuacuugaga

SEQ ID NO: 175909 - RNA, 22 nt, Human
gccuguagucccagcuacuugg

SEQ ID NO: 175910 - RNA, 23 nt, Human
gccuguagucccagcuacuugga

SEQ ID NO: 175911 - RNA, 23 nt, Human
gccuguagucccagcuacuuggg

SEQ ID NO: 175912 - RNA, 24 nt, Human
gccuguagucccagcuacuuggga

SEQ ID NO: 175913 - RNA, 32 nt, Human
gccuguagucccagcuagucgggaggcugagg

SEQ ID NO: 175914 - RNA, 24 nt, Human
gccuguagucccagcuagucugga

SEQ ID NO: 175915 - RNA, 24 nt, Human
gccuguagucccagcuaucuggga

SEQ ID NO: 175916 - RNA, 22 nt, Human
gccuguagucccagcuaugcga

SEQ ID NO: 175917 - RNA, 24 nt, Human
gccuguagucccagcuaugcgaga

SEQ ID NO: 175918 - RNA, 24 nt, Human
gccuguagucccagcuauucagga

SEQ ID NO: 175919 - RNA, 23 nt, Human
gccuguagucccagcuauucggg

SEQ ID NO: 175920 - RNA, 24 nt, Human
gccuguagucccagcuauucggga

SEQ ID NO: 175921 - RNA, 24 nt, Human
gccuguagucccagcuauucugga

SEQ ID NO: 175922 - RNA, 23 nt, Human
gccuguagucccagcuauuuggg

SEQ ID NO: 175923 - RNA, 24 nt, Human
gccuguagucccagcuauuuggga

SEQ ID NO: 175924 - RNA, 23 nt, Human
gccuguagucccagcuccucagg

SEQ ID NO: 175925 - RNA, 24 nt, Human
gccuguagucccagcuccucagga

SEQ ID NO: 175926 - RNA, 24 nt, Human
gccuguagucccagcuccuuggga

SEQ ID NO: 175927 - RNA, 23 nt, Human
gccuguagucccagcugcucagg

SEQ ID NO: 175928 - RNA, 24 nt, Human
gccuguagucccagcugcucagga

SEQ ID NO: 175929 - RNA, 24 nt, Human
gccuguagucccagcugcuuggga

SEQ ID NO: 175930 - RNA, 24 nt, Human
gccuguagucccagcuguucgaga

SEQ ID NO: 175931 - RNA, 24 nt, Human
gccuguagucccagguacucagga

SEQ ID NO: 175932 - RNA, 24 nt, Human
gccuguagucccagguacuugcga

SEQ ID NO: 175933 - RNA, 23 nt, Human
gccuguagucccagguacuuggg

SEQ ID NO: 175934 - RNA, 24 nt, Human
gccuguagucccagguacuuggga

SEQ ID NO: 175935 - RNA, 23 nt, Human
gccuguagucccaguacucagga

SEQ ID NO: 175936 - RNA, 32 nt, Human
gccuguagucccaguacucaggaggcugaggc

SEQ ID NO: 175937 - RNA, 24 nt, Human
gccuguagucccaguuacucagga

SEQ ID NO: 175938 - RNA, 23 nt, Human
gccuguagucccaguuacuuggg

SEQ ID NO: 175939 - RNA, 24 nt, Human
gccuguagucccaguuacuuggga

SEQ ID NO: 175940 - RNA, 23 nt, Human
gccuguagucccaucuacuuggg

SEQ ID NO: 175941 - RNA, 24 nt, Human
gccuguagucccaucuacuuggga

SEQ ID NO: 175942 - RNA, 24 nt, Human
gccuguagucccauguacuuggga

SEQ ID NO: 175943 - RNA, 24 nt, Human
gccuguagucccgguuacucggga

SEQ ID NO: 175944 - RNA, 23 nt, Human
gccuguagucccugcuacuugga

SEQ ID NO: 175945 - RNA, 24 nt, Human
gccuguagucccugcuacuuggga

SEQ ID NO: 175946 - RNA, 24 nt, Human
gccuguagucccugcuagucaaga

SEQ ID NO: 175947 - RNA, 23 nt, Human
gccuguaguccuagccacucagg

SEQ ID NO: 175948 - RNA, 24 nt, Human
gccuguaguccuagccacucagga

SEQ ID NO: 175949 - RNA, 24 nt, Human
gccuguaguccuagcuacucgagg

SEQ ID NO: 175950 - RNA, 24 nt, Human
gccuguaguccuagcuacucggga

SEQ ID NO: 175951 - RNA, 24 nt, Human
gccuguaguccuagcuacuuggga

SEQ ID NO: 175952 - RNA, 24 nt, Human
gccuguaguccuaguuacuuggga

SEQ ID NO: 175953 - RNA, 32 nt, Human
gccuguaguccuucuuugccuccuggggcggc

SEQ ID NO: 175954 - RNA, 23 nt, Human
gccuguagucgcagcuacucaga

SEQ ID NO: 175955 - RNA, 24 nt, Human
gccuguagucgcagcuacucgcga

SEQ ID NO: 175956 - RNA, 32 nt, Human
gccuguagucuacuugggaggcugagguggga

SEQ ID NO: 175957 - RNA, 23 nt, Human
gccuguagucucagccacucggg

SEQ ID NO: 175958 - RNA, 24 nt, Human
gccuguagucucagccacucggga

SEQ ID NO: 175959 - RNA, 23 nt, Human
gccuguagucucagcuacucagg

SEQ ID NO: 175960 - RNA, 24 nt, Human
gccuguagucucagcuacucagga

SEQ ID NO: 175961 - RNA, 23 nt, Human
gccuguagucucagcuacucggg

SEQ ID NO: 175962 - RNA, 24 nt, Human
gccuguagucucagcuacucggga

SEQ ID NO: 175963 - RNA, 23 nt, Human
gccuguagucucagcuacuuagg

SEQ ID NO: 175964 - RNA, 24 nt, Human
gccuguagucucagcuacuuagga

SEQ ID NO: 175965 - RNA, 24 nt, Human
gccuguagucucagcuacuuggga

SEQ ID NO: 175966 - RNA, 24 nt, Human
gccuguagugccagcuacucagga

SEQ ID NO: 175967 - RNA, 23 nt, Human
gccuguagugcuagcuacucaga

SEQ ID NO: 175968 - RNA, 32 nt, Human
gccuguaguucagcuacucagggggcugaggu

SEQ ID NO: 175969 - RNA, 24 nt, Human
gccuguaguuccagcuaccuggga

SEQ ID NO: 175970 - RNA, 24 nt, Human
gccuguaguuccagcuacucagga

SEQ ID NO: 175971 - RNA, 24 nt, Human
gccuguaguuccagcuacucggga

SEQ ID NO: 175972 - RNA, 24 nt, Human
gccuguaguuccagcuacuuggga

SEQ ID NO: 175973 - RNA, 24 nt, Human
gccuguaguuccagcuacuuguga

SEQ ID NO: 175974 - RNA, 23 nt, Human
gccuguaguucuagcuacuuggg

SEQ ID NO: 175975 - RNA, 24 nt, Human
gccuguaguucuagcuacuuggga

SEQ ID NO: 175976 - RNA, 24 nt, Human
gccuguaguugcagcuacucagga

SEQ ID NO: 175977 - RNA, 20 nt, Human
gccuguaucccagcuacuca

SEQ ID NO: 175978 - RNA, 22 nt, Human
gccuguaucccagcuacucagg

SEQ ID NO: 175979 - RNA, 23 nt, Human
gccuguaucccagcuacucagga

SEQ ID NO: 175980 - RNA, 32 nt, Human
gccuguaucccagcuacucaggaagcugagac

SEQ ID NO: 175981 - RNA, 32 nt, Human
gccuguaucccagcuacucgggaggcugaggc

SEQ ID NO: 175982 - RNA, 22 nt, Human
gccuguaucccagcuacuuggg

SEQ ID NO: 175983 - RNA, 23 nt, Human
gccuguaucccagcuacuuggga

SEQ ID NO: 175984 - RNA, 32 nt, Human
gccuguaucccagcuacuugggaggcagaggc

SEQ ID NO: 175985 - RNA, 32 nt, Human
gccuguaucccagcuacuugggaggcugaagc

SEQ ID NO: 175986 - RNA, 32 nt, Human
gccuguaugagcacauccaggauuagauaagg

SEQ ID NO: 175987 - RNA, 32 nt, Human
gccuguauggaacacauuugucccagaucuga

SEQ ID NO: 175988 - RNA, 32 nt, Human
gccuguauuccaggugcucaggaggcugaggc

SEQ ID NO: 175989 - RNA, 23 nt, Human
gccuguauucccagcuacucagg

SEQ ID NO: 175990 - RNA, 24 nt, Human
gccuguauucccagcuacucagga

SEQ ID NO: 175991 - RNA, 24 nt, Human
gccuguauucccagcuacucauga

SEQ ID NO: 175992 - RNA, 23 nt, Human
gccuguauucccagcuacucggg

SEQ ID NO: 175993 - RNA, 24 nt, Human
gccuguauucccagcuacucggga

SEQ ID NO: 175994 - RNA, 32 nt, Human
gccuguauuggccuauaggucugcacuuuagu

SEQ ID NO: 175995 - RNA, 32 nt, Human
gccuguauuuuuagcuaauuaccaaggucucu

SEQ ID NO: 175996 - RNA, 32 nt, Human
gccugucacaacacaaauaccccucuugaaag

SEQ ID NO: 175997 - RNA, 32 nt, Human
gccugucacagaaacccgauccagcguaccaa

SEQ ID NO: 175998 - RNA, 32 nt, Human
gccugucaccacugccauauuccugccugcug

SEQ ID NO: 175999 - RNA, 32 nt, Human
gccugucacccacacaguaggugcugagaguu

SEQ ID NO: 176000 - RNA, 32 nt, Human
gccugucaccucagggcaucacugaacaaaca

SEQ ID NO: 176001 - RNA, 32 nt, Human
gccugucaccugucuucacugccuccuuuucc

SEQ ID NO: 176002 - RNA, 32 nt, Human
gccugucacucgagcaagccuggguguuccuu

SEQ ID NO: 176003 - RNA, 32 nt, Human
gccugucacugaguaagaugcaggagaaguug

SEQ ID NO: 176004 - RNA, 32 nt, Human
gccugucagcagcugcaccccucagcauauug

SEQ ID NO: 176005 - RNA, 32 nt, Human
gccugucagccaacauugccuugcauuuguac

SEQ ID NO: 176006 - RNA, 32 nt, Human
gccugucagcguucuccaucacuggcauaugg

SEQ ID NO: 176007 - RNA, 32 nt, Human
gccugucauaugcaucaacaaccauguauuuu

SEQ ID NO: 176008 - RNA, 32 nt, Human
gccugucaucccaucacuuugagaggccagga

SEQ ID NO: 176009 - RNA, 32 nt, Human
gccuguccaccaucucccuauuacccuuuggu

SEQ ID NO: 176010 - RNA, 32 nt, Human
gccuguccacccugccaagacuccucaggcag

SEQ ID NO: 176011 - RNA, 32 nt, Human
gccuguccauagaccuccaggcagagaucaca

SEQ ID NO: 176012 - RNA, 32 nt, Human
gccugucccacagauagaaauggggcaggccc

SEQ ID NO: 176013 - RNA, 32 nt, Human
gccugucccagcccuggcugcgaggacagguu

SEQ ID NO: 176014 - RNA, 32 nt, Human
gccugucccauggacacuccagugccagcaau

SEQ ID NO: 176015 - RNA, 32 nt, Human
gccugucccauggcuggggcagugagggggcc

SEQ ID NO: 176016 - RNA, 32 nt, Human
gccugucccggaggcugcagagcugcuacugc

SEQ ID NO: 176017 - RNA, 32 nt, Human
gccugucccucucaggcaugccugugugacau

SEQ ID NO: 176018 - RNA, 17 nt, Human
gccugucccuucuggua

SEQ ID NO: 176019 - RNA, 18 nt, Human
gccugucccuuguuuccu

SEQ ID NO: 176020 - RNA, 32 nt, Human
gccuguccggagcagaacaccccugauuagcc

SEQ ID NO: 176021 - RNA, 32 nt, Human
gccuguccuccaggcuggggcagguucuuagu

SEQ ID NO: 176022 - RNA, 21 nt, Human
gccuguccucccuggcugcug

SEQ ID NO: 176023 - RNA, 20 nt, Human
gccuguccuccgugagcucc

SEQ ID NO: 176024 - RNA, 32 nt, Human
gccuguccucuccguggaagacccugggcccu

SEQ ID NO: 176025 - RNA, 32 nt, Human
gccuguccucuccguggaggacccugggcccu

SEQ ID NO: 176026 - RNA, 32 nt, Human
gccuguccugaugcccuccccaccucaaccgc

SEQ ID NO: 176027 - RNA, 32 nt, Human
gccuguccugccucuggccuguguccugggug

SEQ ID NO: 176028 - RNA, 32 nt, Human
gccuguccuuucucccacucuacugaaacccg

SEQ ID NO: 176029 - RNA, 18 nt, Human
gccuguccuuucugugga

SEQ ID NO: 176030 - RNA, 16 nt, Human
gccugucgauacuuug

SEQ ID NO: 176031 - RNA, 32 nt, Human
gccugucggacaauuuugcagcaacagcagcg

SEQ ID NO: 176032 - RNA, 24 nt, Human
gccugucgucccagcuacucagga

SEQ ID NO: 176033 - RNA, 32 nt, Human
gccugucgucuguggccaugcccaucaugggc

SEQ ID NO: 176034 - RNA, 32 nt, Human
gccugucgugcaggccaggucauuggccccuu

SEQ ID NO: 176035 - RNA, 32 nt, Human
gccugucguuagggcauggcuuaugcuugaca

SEQ ID NO: 176036 - RNA, 19 nt, Human
gccugucuaaacuuucgga

SEQ ID NO: 176037 - RNA, 18 nt, Human
gccugucuaggccugaua

SEQ ID NO: 176038 - RNA, 32 nt, Human
gccugucucauuucccucccucccucugacac

SEQ ID NO: 176039 - RNA, 32 nt, Human
gccugucuccaacccaggucugagaugguguc

SEQ ID NO: 176040 - RNA, 32 nt, Human
gccugucucccccuucccuccccaccggcccg

SEQ ID NO: 176041 - RNA, 32 nt, Human
gccugucucccuccagcacugccgagguucuc

SEQ ID NO: 176042 - RNA, 32 nt, Human
gccugucuccgcacguguugggccacagcaag

SEQ ID NO: 176043 - RNA, 19 nt, Human
gccugucuccuagucugcc

SEQ ID NO: 176044 - RNA, 32 nt, Human
gccugucuccucggcggagccugcugcccguc

SEQ ID NO: 176045 - RNA, 20 nt, Human
gccugucucgagcuccccgg

SEQ ID NO: 176046 - RNA, 21 nt, Human
gccugucucuagcuguucugg

SEQ ID NO: 176047 - RNA, 32 nt, Human
gccugucucucccuacccucuucucagcucca

SEQ ID NO: 176048 - RNA, 20 nt, Human
gccugucucucggggccugg

SEQ ID NO: 176049 - RNA, 32 nt, Human
gccugucucugccucccugucuaccggacugg

SEQ ID NO: 176050 - RNA, 32 nt, Human
gccugucucuggcuaaccacacaggccauucc

SEQ ID NO: 176051 - RNA, 24 nt, Human
gccugucucuuguagcuuccuggg

SEQ ID NO: 176052 - RNA, 20 nt, Human
gccugucucuuuucccuggg

SEQ ID NO: 176053 - RNA, 32 nt, Human
gccugucugcagcugguggaugccugugggca

SEQ ID NO: 176054 - RNA, 32 nt, Human
gccugucugccucuguccugcuuucugucugc

SEQ ID NO: 176055 - RNA, 32 nt, Human
gccugucugcugucccuguacuccaggcaccu

SEQ ID NO: 176056 - RNA, 20 nt, Human
gccugucuggcugcuggacc

SEQ ID NO: 176057 - RNA, 21 nt, Human
gccugucugggaauuccuggg

SEQ ID NO: 176058 - RNA, 21 nt, Human
gccugucugggggaaaggaca

SEQ ID NO: 176059 - RNA, 32 nt, Human
gccugucuguacagugcuuugccccuaccagc

SEQ ID NO: 176060 - RNA, 32 nt, Human
gccugucuucacucuucuccccagaaucacca

SEQ ID NO: 176061 - RNA, 32 nt, Human
gccugucuucccucgcgcguagagagugacuc

SEQ ID NO: 176062 - RNA, 32 nt, Human
gccugucuuccuauucaccgugggcagcagag

SEQ ID NO: 176063 - RNA, 32 nt, Human
gccugucuuccuccaaccucccccuuuuucgu

SEQ ID NO: 176064 - RNA, 23 nt, Human
gccugucuuguggacuccacggg

SEQ ID NO: 176065 - RNA, 32 nt, Human
gccugucuuuaaggcuggugugagagcaggcc

SEQ ID NO: 176066 - RNA, 20 nt, Human
gccugucuuucccagcguca

SEQ ID NO: 176067 - RNA, 32 nt, Human
gccugucuuucccccuuccuucucaccugaca

SEQ ID NO: 176068 - RNA, 32 nt, Human
gccugucuuugggugcugcaguucaguaggaa

SEQ ID NO: 176069 - RNA, 32 nt, Human
gccugugaacuaggcccugccucugucaccuc

SEQ ID NO: 176070 - RNA, 32 nt, Human
gccugugaagcucucccucuugucgcucuggg

SEQ ID NO: 176071 - RNA, 32 nt, Human
gccugugacacacacagcccuccagaccuucc

SEQ ID NO: 176072 - RNA, 17 nt, Human
gccugugaccagggggg

SEQ ID NO: 176073 - RNA, 32 nt, Human
gccugugacuccaagcugggcccaagcccaga

SEQ ID NO: 176074 - RNA, 32 nt, Human
gccugugagacuggggcaggaggaucacuuga

SEQ ID NO: 176075 - RNA, 32 nt, Human
gccugugagaucgagauuacagugagcuaugg

SEQ ID NO: 176076 - RNA, 18 nt, Human
gccugugagccccuuggg

SEQ ID NO: 176077 - RNA, 19 nt, Human
gccugugagccucugcaca

SEQ ID NO: 176078 - RNA, 32 nt, Human
gccugugagcgaguccagcagaaagcugcagu

SEQ ID NO: 176079 - RNA, 32 nt, Human
gccugugagcggcagugggcacugacacuaag

SEQ ID NO: 176080 - RNA, 32 nt, Human
gccugugagggagugcagaacaccuggccggg

SEQ ID NO: 176081 - RNA, 32 nt, Human
gccugugaggucaugguugcaaugagucauga

SEQ ID NO: 176082 - RNA, 32 nt, Human
gccugugaggucgaggcuacagugagcaaaga

SEQ ID NO: 176083 - RNA, 32 nt, Human
gccugugaggucgaggcugcagugagccgaga

SEQ ID NO: 176084 - RNA, 21 nt, Human
gccugugagugccccuugaug

SEQ ID NO: 176085 - RNA, 32 nt, Human
gccugugauacagcccucaggagauucuggga

SEQ ID NO: 176086 - RNA, 32 nt, Human
gccugugauacuugggcugugauccucuagag

SEQ ID NO: 176087 - RNA, 24 nt, Human
gccugugaucacagcuacucggga

SEQ ID NO: 176088 - RNA, 21 nt, Human
gccugugaucccagcuacuca

SEQ ID NO: 176089 - RNA, 24 nt, Human
gccugugaucccagcuacucagga

SEQ ID NO: 176090 - RNA, 24 nt, Human
gccugugaucccagcuacucggga

SEQ ID NO: 176091 - RNA, 24 nt, Human
gccugugaucccagcuacuugaga

SEQ ID NO: 176092 - RNA, 23 nt, Human
gccugugaucccagcuacuugga

SEQ ID NO: 176093 - RNA, 24 nt, Human
gccugugaucccagcuacuuggga

SEQ ID NO: 176094 - RNA, 24 nt, Human
gccugugaucgcagcuacucggga

SEQ ID NO: 176095 - RNA, 32 nt, Human
gccugugaucgucugaugaggcucccucccaa

SEQ ID NO: 176096 - RNA, 24 nt, Human
gccugugaucucagcuacccagga

SEQ ID NO: 176097 - RNA, 32 nt, Human
gccugugaugaagacucacucucaggccuuug

SEQ ID NO: 176098 - RNA, 32 nt, Human
gccugugaugucguggcagcaaacaagaugga

SEQ ID NO: 176099 - RNA, 24 nt, Human
gccugugauuccagcuacuuggga

SEQ ID NO: 176100 - RNA, 32 nt, Human
gccugugcacacaccagcccacccugagagac

SEQ ID NO: 176101 - RNA, 32 nt, Human
gccugugcaggcuggggaucucaggcugauca

SEQ ID NO: 176102 - RNA, 32 nt, Human
gccugugcauuuccuuccucuccucuucccca

SEQ ID NO: 176103 - RNA, 32 nt, Human
gccugugccaagagacagacagagaaggcugc

SEQ ID NO: 176104 - RNA, 32 nt, Human
gccugugccaccccuuccucagccugggguuu

SEQ ID NO: 176105 - RNA, 32 nt, Human
gccugugccaccugucuaggcaagcuggcuuc

SEQ ID NO: 176106 - RNA, 32 nt, Human
gccugugccacugagcauguuagguggagcag

SEQ ID NO: 176107 - RNA, 32 nt, Human
gccugugccacuggugccagccuggaugcagg

SEQ ID NO: 176108 - RNA, 32 nt, Human
gccugugcccaugacaucucccugaaagagga

SEQ ID NO: 176109 - RNA, 22 nt, Human
gccugugccccacaaggagcug

SEQ ID NO: 176110 - RNA, 32 nt, Human
gccugugccccaggcaucugcauccagggcug

SEQ ID NO: 176111 - RNA, 21 nt, Human
gccugugccugcacccugggg

SEQ ID NO: 176112 - RNA, 32 nt, Human
gccugugccugcugggaaguugcagugcucug

SEQ ID NO: 176113 - RNA, 32 nt, Human
gccugugccuggggccuuauguugcucuuucu

SEQ ID NO: 176114 - RNA, 32 nt, Human
gccugugcguggugccugggucuagggaagcu

SEQ ID NO: 176115 - RNA, 32 nt, Human
gccugugcuaggcccugggcuuggggagggag

SEQ ID NO: 176116 - RNA, 32 nt, Human
gccugugcuccccucagaagcucugcucuucc

SEQ ID NO: 176117 - RNA, 32 nt, Human
gccugugcuccugcugggcugugggaggugug

SEQ ID NO: 176118 - RNA, 32 nt, Human
gccugugcuccugcuggggaaggcugggggcu

SEQ ID NO: 176119 - RNA, 32 nt, Human
gccugugcuccuugacugucucuccccaccgg

SEQ ID NO: 176120 - RNA, 21 nt, Human
gccugugcuucucacucacca

SEQ ID NO: 176121 - RNA, 32 nt, Human
gccuguggaccuugauuucuagauuucagugu

SEQ ID NO: 176122 - RNA, 22 nt, Human
gccuguggagagcagcgcggug

SEQ ID NO: 176123 - RNA, 32 nt, Human
gccuguggagcucagcccugagcuguccccgu

SEQ ID NO: 176124 - RNA, 32 nt, Human
gccuguggauccuggggcaucuggaagggcgc

SEQ ID NO: 176125 - RNA, 20 nt, Human
gccuguggcccucucugcca

SEQ ID NO: 176126 - RNA, 19 nt, Human
gccuguggccuccacaucc

SEQ ID NO: 176127 - RNA, 23 nt, Human
gccuguggcgcuggagugcgugg

SEQ ID NO: 176128 - RNA, 32 nt, Human
gccuguggcucucaccugccaguuguuugcuu

SEQ ID NO: 176129 - RNA, 32 nt, Human
gccuguggcugcaaguuccugccugugcuugg

SEQ ID NO: 176130 - RNA, 32 nt, Human
gccuguggcugcagacucccagagaaccagca

SEQ ID NO: 176131 - RNA, 32 nt, Human
gccuguggcugcagcuacaagaggaccugggg

SEQ ID NO: 176132 - RNA, 32 nt, Human
gccuguggcugcaguccaggcauguaggccuc

SEQ ID NO: 176133 - RNA, 32 nt, Human
gccuguggcugcaguucagaggagaagaaggu

SEQ ID NO: 176134 - RNA, 19 nt, Human
gccuguggcugucccucaa

SEQ ID NO: 176135 - RNA, 32 nt, Human
gccuguggcuuccuuugugcauuugagcaugc

SEQ ID NO: 176136 - RNA, 22 nt, Human
gccugugggacagcccagggca

SEQ ID NO: 176137 - RNA, 32 nt, Human
gccugugggacccagagggcuugaggacaucu

SEQ ID NO: 176138 - RNA, 32 nt, Human
gccugugggagacucgcacgcccacacucacc

SEQ ID NO: 176139 - RNA, 32 nt, Human
gccugugggaggugguuaggucaugagggugg

SEQ ID NO: 176140 - RNA, 19 nt, Human
gccugugggcauccaccuc

SEQ ID NO: 176141 - RNA, 32 nt, Human
gccugugggcugcuucacauccaccccggcuc

SEQ ID NO: 176142 - RNA, 32 nt, Human
gccugugggcugggucacgugggucucgcugg

SEQ ID NO: 176143 - RNA, 32 nt, Human
gccuguggggcuggggacagcgccaaggagcu

SEQ ID NO: 176144 - RNA, 32 nt, Human
gccugugggggcccuggacagucacaccccag

SEQ ID NO: 176145 - RNA, 22 nt, Human
gccuguggguccccacucaccc

SEQ ID NO: 176146 - RNA, 32 nt, Human
gccugugggugagggaagccagaaugacacaa

SEQ ID NO: 176147 - RNA, 32 nt, Human
gccugugggugaggggaacggagcaggcucag

SEQ ID NO: 176148 - RNA, 32 nt, Human
gccuguggucaccaccaucaaaugagcugcaa

SEQ ID NO: 176149 - RNA, 32 nt, Human
gccuguggucaggauuggcugcagugaggucc

SEQ ID NO: 176150 - RNA, 32 nt, Human
gccuguggucccagcuacacaggaggcuaagg

SEQ ID NO: 176151 - RNA, 24 nt, Human
gccuguggucccagcuacucaaga

SEQ ID NO: 176152 - RNA, 23 nt, Human
gccuguggucccagcuacucaga

SEQ ID NO: 176153 - RNA, 24 nt, Human
gccuguggucccagcuacucagga

SEQ ID NO: 176154 - RNA, 24 nt, Human
gccuguggucccagcuacucgaga

SEQ ID NO: 176155 - RNA, 24 nt, Human
gccuguggucccagcuacucggga

SEQ ID NO: 176156 - RNA, 24 nt, Human
gccuguggucccagcuacuugaga

SEQ ID NO: 176157 - RNA, 23 nt, Human
gccuguggucccagcuacuugga

SEQ ID NO: 176158 - RNA, 24 nt, Human
gccuguggucccagcuacuuggga

SEQ ID NO: 176159 - RNA, 24 nt, Human
gccuguggucucaacuacucagga

SEQ ID NO: 176160 - RNA, 24 nt, Human
gccuguggucucagcuacucagga

SEQ ID NO: 176161 - RNA, 24 nt, Human
gccuguggucucagcuacucggga

SEQ ID NO: 176162 - RNA, 24 nt, Human
gccuguggucucagcuacuuggga

SEQ ID NO: 176163 - RNA, 32 nt, Human
gccugugguggacacagaugugugcaggacuu

SEQ ID NO: 176164 - RNA, 25 nt, Human
gccugugguggccagcuacucagga

SEQ ID NO: 176165 - RNA, 32 nt, Human
gccugugguggggucacuugaguugagccgga

SEQ ID NO: 176166 - RNA, 24 nt, Human
gccugugguuccagccacucagga

SEQ ID NO: 176167 - RNA, 32 nt, Human
gccugugguugauggaaauucacaaagugagg

SEQ ID NO: 176168 - RNA, 32 nt, Human
gccuguguacacggcuauuugggaaacuuaag

SEQ ID NO: 176169 - RNA, 32 nt, Human
gccuguguccacccuggccugcaggaacaagg

SEQ ID NO: 176170 - RNA, 32 nt, Human
gccugugucccagugagaacugaccugagucc

SEQ ID NO: 176171 - RNA, 18 nt, Human
gccuguguccuccaggua

SEQ ID NO: 176172 - RNA, 24 nt, Human
gccuguguccugauggcccaaaug

SEQ ID NO: 176173 - RNA, 32 nt, Human
gccugugucuccuggguucaagcgauucuccu

SEQ ID NO: 176174 - RNA, 32 nt, Human
gccugugucuucacccaccugccaucauuggc

SEQ ID NO: 176175 - RNA, 32 nt, Human
gccugugugacugucaugcaggccugucugug

SEQ ID NO: 176176 - RNA, 32 nt, Human
gccugugugccuggccuuggggauggcugugg

SEQ ID NO: 176177 - RNA, 32 nt, Human
gccuguguggagccgcccugcccguauggagu

SEQ ID NO: 176178 - RNA, 22 nt, Human
gccuguguggagcggccacuga

SEQ ID NO: 176179 - RNA, 22 nt, Human
gccugugugguggcaaagccgg

SEQ ID NO: 176180 - RNA, 32 nt, Human
gccugugugucucugugccuauguggcugugc

SEQ ID NO: 176181 - RNA, 32 nt, Human
gccugugugugccugggagugaccucacagcu

SEQ ID NO: 176182 - RNA, 20 nt, Human
gccuguguuacaaagucucc

SEQ ID NO: 176183 - RNA, 24 nt, Human
gccuguguuacagcagcuccauga

SEQ ID NO: 176184 - RNA, 32 nt, Human
gccuguguucaccaccaccaucagacucacca

SEQ ID NO: 176185 - RNA, 24 nt, Human
gccuguguucccagcuacucagga

SEQ ID NO: 176186 - RNA, 24 nt, Human
gccuguguucccagcuacuuggga

SEQ ID NO: 176187 - RNA, 32 nt, Human
gccuguguucucuccuaggcaggccucucaac

SEQ ID NO: 176188 - RNA, 32 nt, Human
gccuguguucucuccuagguaggccuaucaac

SEQ ID NO: 176189 - RNA, 19 nt, Human
gccuguguugaaagcucug

SEQ ID NO: 176190 - RNA, 22 nt, Human
gccuguguuuccagcuacauga

SEQ ID NO: 176191 - RNA, 24 nt, Human
gccuguguuuccagcuacaugaga

SEQ ID NO: 176192 - RNA, 32 nt, Human
gccuguguuuuucucaacacuacuuuucugau

SEQ ID NO: 176193 - RNA, 32 nt, Human
gccuguuaagucugagaaggcuaaagaagaca

SEQ ID NO: 176194 - RNA, 24 nt, Human
gccuguuaucacagcuacuuggga

SEQ ID NO: 176195 - RNA, 20 nt, Human
gccuguuaucccagcacuuu

SEQ ID NO: 176196 - RNA, 24 nt, Human
gccuguuaucccagcuacuuggga

SEQ ID NO: 176197 - RNA, 24 nt, Human
gccuguuaucucagcuacuuggga

SEQ ID NO: 176198 - RNA, 32 nt, Human
gccuguucaagugcccuugcuaccaguuccga

SEQ ID NO: 176199 - RNA, 32 nt, Human
gccuguucacacacuggccuuucaguugaaga

SEQ ID NO: 176200 - RNA, 32 nt, Human
gccuguucacauguccuuacauuuguaaagau

SEQ ID NO: 176201 - RNA, 32 nt, Human
gccuguuccacuuguaccuguccagcccugcc

SEQ ID NO: 176202 - RNA, 24 nt, Human
gccuguuccagcacccuucuccca

SEQ ID NO: 176203 - RNA, 32 nt, Human
gccuguucccccaggcucucagugccaccacc

SEQ ID NO: 176204 - RNA, 32 nt, Human
gccuguuccccuacaucugugccugcacaucc

SEQ ID NO: 176205 - RNA, 32 nt, Human
gccuguuccugcacuccacccugcuggcccca

SEQ ID NO: 176206 - RNA, 16 nt, Human
gccuguucuccagaug

SEQ ID NO: 176207 - RNA, 32 nt, Human
gccuguucuccuccuccagaccuaguauucua

SEQ ID NO: 176208 - RNA, 19 nt, Human
gccuguucuccugauccug

SEQ ID NO: 176209 - RNA, 32 nt, Human
gccuguucugcuccuaggagaccugagcccgu

SEQ ID NO: 176210 - RNA, 32 nt, Human
gccuguucugcuccucuccaugcaccccagcc

SEQ ID NO: 176211 - RNA, 32 nt, Human
gccuguucuguauuccccauauccaguauggu

SEQ ID NO: 176212 - RNA, 21 nt, Human
gccuguucuugcugcugguaa

SEQ ID NO: 176213 - RNA, 32 nt, Human
gccuguucuuuucuccccugugcugccgccgc

SEQ ID NO: 176214 - RNA, 32 nt, Human
gccuguugccuaucuuuguccucucucuuccg

SEQ ID NO: 176215 - RNA, 32 nt, Human
gccuguugccucugcugcccuuugaaccagug

SEQ ID NO: 176216 - RNA, 32 nt, Human
gccuguuggagcucccuguccuuguccuguuc

SEQ ID NO: 176217 - RNA, 19 nt, Human
gccuguuggcgacaaggug

SEQ ID NO: 176218 - RNA, 32 nt, Human
gccuguuggcugcuccuggcuuacccacuuag

SEQ ID NO: 176219 - RNA, 32 nt, Human
gccuguuggguugguaucagaucaggggauua

SEQ ID NO: 176220 - RNA, 32 nt, Human
gccuguuguauuuaacuucacagugccuugca

SEQ ID NO: 176221 - RNA, 32 nt, Human
gccuguugugugugucugcaccacauacaugg

SEQ ID NO: 176222 - RNA, 32 nt, Human
gccuguuguugaggaggacugagcacagugcu

SEQ ID NO: 176223 - RNA, 32 nt, Human
gccuguuucaucacguaugugcugcuaccugu

SEQ ID NO: 176224 - RNA, 32 nt, Human
gccuguuucccuuuuucucccuucccugaaag

SEQ ID NO: 176225 - RNA, 16 nt, Human
gccuguuuccuuaaua

SEQ ID NO: 176226 - RNA, 32 nt, Human
gccuguuucguuccccaguggagggagccggu

SEQ ID NO: 176227 - RNA, 32 nt, Human
gccuguuucuucucucuuucuccuucaaacuu

SEQ ID NO: 176228 - RNA, 32 nt, Human
gccuguuuguuucucucuaccugauuucucca

SEQ ID NO: 176229 - RNA, 32 nt, Human
gccuguuuugcaccugggaagugcccuggucu

SEQ ID NO: 176230 - RNA, 18 nt, Human
gccuguuuuuucuugaua

SEQ ID NO: 176231 - RNA, 32 nt, Human
gccuuaaagaguugauugugaagaaccaguaa

SEQ ID NO: 176232 - RNA, 32 nt, Human
gccuuaaagguggugagggagauacugggggc

SEQ ID NO: 176233 - RNA, 32 nt, Human
gccuuaacauucucuuccccugcuccuccuau

SEQ ID NO: 176234 - RNA, 32 nt, Human
gccuuaaccccagcaccucagugugggacugg

SEQ ID NO: 176235 - RNA, 32 nt, Human
gccuuaacccugggaaaugccugcugccccca

SEQ ID NO: 176236 - RNA, 32 nt, Human
gccuuaaccuucugggggagggggauuagcua

SEQ ID NO: 176237 - RNA, 32 nt, Human
gccuuaaccuuucaaggaccagaaggauucca

SEQ ID NO: 176238 - RNA, 32 nt, Human
gccuuaacuauacuuggcucuuuacucuuuca

SEQ ID NO: 176239 - RNA, 32 nt, Human
gccuuaacuggcccucgggcccucucuccgcc

SEQ ID NO: 176240 - RNA, 32 nt, Human
gccuuaagaacaugcuccugcugcaguuaacu

SEQ ID NO: 176241 - RNA, 32 nt, Human
gccuuaagccauccuccuaucucggccucaca

SEQ ID NO: 176242 - RNA, 32 nt, Human
gccuuaagcuaguggcaacugcuggggcccca

SEQ ID NO: 176243 - RNA, 32 nt, Human
gccuuaagucuuuccucuguugcugaccagau

SEQ ID NO: 176244 - RNA, 24 nt, Human
gccuuaagugauccucccaccuca

SEQ ID NO: 176245 - RNA, 32 nt, Human
gccuuaauagcagcagaaggcuuuuuggauuc

SEQ ID NO: 176246 - RNA, 32 nt, Human
gccuuaaucucaucagcccuguauuuacagau

SEQ ID NO: 176247 - RNA, 32 nt, Human
gccuuaaucugaggcagagacacagcagaacc

SEQ ID NO: 176248 - RNA, 32 nt, Human
gccuuacaaguggcgagggaaagcacacaaac

SEQ ID NO: 176249 - RNA, 32 nt, Human
gccuuacaaucugaaaacccacugccuuucga

SEQ ID NO: 176250 - RNA, 32 nt, Human
gccuuacacaaggggugcaggauuugaauucu

SEQ ID NO: 176251 - RNA, 32 nt, Human
gccuuacaccugcccggccgucugucucuugg

SEQ ID NO: 176252 - RNA, 32 nt, Human
gccuuacagcacggggaugaguucaccaaacu

SEQ ID NO: 176253 - RNA, 32 nt, Human
gccuuacagcagcagaggcuggaagagaagcu

SEQ ID NO: 176254 - RNA, 32 nt, Human
gccuuacagccccuguuccuccaagugcacau

SEQ ID NO: 176255 - RNA, 32 nt, Human
gccuuacaggcaggcaggggugguugguguca

SEQ ID NO: 176256 - RNA, 32 nt, Human
gccuuacagguguggcugacucugagcccagg

SEQ ID NO: 176257 - RNA, 32 nt, Human
gccuuaccccagauucucuauaucucaugguu

SEQ ID NO: 176258 - RNA, 32 nt, Human
gccuuacccugccuuccugccuccagagucug

SEQ ID NO: 176259 - RNA, 32 nt, Human
gccuuaccucauuuuuccugcaaagggcugac

SEQ ID NO: 176260 - RNA, 32 nt, Human
gccuuacguccagcucguuccugggccccgag

SEQ ID NO: 176261 - RNA, 18 nt, Human
gccuuacuggaaacuuug

SEQ ID NO: 176262 - RNA, 32 nt, Human
gccuuagagaggaggaggaaagggggagagga

SEQ ID NO: 176263 - RNA, 32 nt, Human
gccuuagagagggaaacaggaaagcuucugaa

SEQ ID NO: 176264 - RNA, 32 nt, Human
gccuuagagcaagggaaacagcucucauucaa

SEQ ID NO: 176265 - RNA, 32 nt, Human
gccuuagauggaauugagugugccaguccuag

SEQ ID NO: 176266 - RNA, 32 nt, Human
gccuuagcagacucuggcuuuccuuugaauuu

SEQ ID NO: 176267 - RNA, 19 nt, Human
gccuuagcagagcuggggu

SEQ ID NO: 176268 - RNA, 32 nt, Human
gccuuagccaguguaccuccuaccucagucua

SEQ ID NO: 176269 - RNA, 26 nt, Human
gccuuagccugggcgacagagcgaga

SEQ ID NO: 176270 - RNA, 17 nt, Human
gccuuagcgacccagaa

SEQ ID NO: 176271 - RNA, 32 nt, Human
gccuuagcucaguuuccaggugguuccucugc

SEQ ID NO: 176272 - RNA, 32 nt, Human
gccuuagcuucaggaaccucgaguacuguggg

SEQ ID NO: 176273 - RNA, 32 nt, Human
gccuuagcuucuccauccuccaccuccucccc

SEQ ID NO: 176274 - RNA, 32 nt, Human
gccuuaggaaagcaaaagagcacuuuuuauug

SEQ ID NO: 176275 - RNA, 32 nt, Human
gccuuaggaggcggccggagcggugggcacag

SEQ ID NO: 176276 - RNA, 32 nt, Human
gccuuaggauaaaaggaauacagacuuuaucc

SEQ ID NO: 176277 - RNA, 21 nt, Human
gccuuaggcuauuccaccucu

SEQ ID NO: 176278 - RNA, 32 nt, Human
gccuuagguauucacacauuuaaggaacucua

SEQ ID NO: 176279 - RNA, 32 nt, Human
gccuuagguauuccugucugggaaaauggagg

SEQ ID NO: 176280 - RNA, 32 nt, Human
gccuuaguaguacuuuggcuucuugaagagga

SEQ ID NO: 176281 - RNA, 23 nt, Human
gccuuagucccagcuacuuggga

SEQ ID NO: 176282 - RNA, 32 nt, Human
gccuuagucccagcuacuugggaggcugaggc

SEQ ID NO: 176283 - RNA, 32 nt, Human
gccuuaguguccuucuuaacagacucaaacca

SEQ ID NO: 176284 - RNA, 32 nt, Human
gccuuauagaagaaccaaggaggcagagccac

SEQ ID NO: 176285 - RNA, 32 nt, Human
gccuuaucagaagacauuggaaagagggauuc

SEQ ID NO: 176286 - RNA, 32 nt, Human
gccuuaucauaccauccccucugugauggguu

SEQ ID NO: 176287 - RNA, 32 nt, Human
gccuuaucccagggcugucaccuagagaggcu

SEQ ID NO: 176288 - RNA, 32 nt, Human
gccuuauccucuuccuccuuauuccucagucc

SEQ ID NO: 176289 - RNA, 32 nt, Human
gccuuaucgcucuucacaccugccuuaggucu

SEQ ID NO: 176290 - RNA, 22 nt, Human
gccuuaucuccuaacauuuuga

SEQ ID NO: 176291 - RNA, 32 nt, Human
gccuuaucuugccccucuaccuggcucuguca

SEQ ID NO: 176292 - RNA, 29 nt, Human
gccuuauggcugcugcuuuuccuuuuuac

SEQ ID NO: 176293 - RNA, 32 nt, Human
gccuuauuggagcuuuucuucuaaucugaauu

SEQ ID NO: 176294 - RNA, 19 nt, Human
gccuuauuggaucaaagua

SEQ ID NO: 176295 - RNA, 32 nt, Human
gccuuauuuaccuagugcaaaaacuguaaaag

SEQ ID NO: 176296 - RNA, 32 nt, Human
gccuuauuuccucuuuaugaacauggauugga

SEQ ID NO: 176297 - RNA, 32 nt, Human
gccuucaagugagaagcuaagcaccagccucu

SEQ ID NO: 176298 - RNA, 22 nt, Human
gccuucacaccaucuacccuua

SEQ ID NO: 176299 - RNA, 32 nt, Human
gccuucacccagccaaccacaggaguagccac

SEQ ID NO: 176300 - RNA, 32 nt, Human
gccuucaccucccggguucaagugauucuucu

SEQ ID NO: 176301 - RNA, 23 nt, Human
gccuucaccuucaccuucaucca

SEQ ID NO: 176302 - RNA, 32 nt, Human
gccuucaccuucucucugggaucaguguccgg

SEQ ID NO: 176303 - RNA, 17 nt, Human
gccuucacuccaccuuu

SEQ ID NO: 176304 - RNA, 32 nt, Human
gccuucacuucccuaggcugggcugagggcaa

SEQ ID NO: 176305 - RNA, 32 nt, Human
gccuucacuuccucaucugucaaaugaagacc

SEQ ID NO: 176306 - RNA, 32 nt, Human
gccuucacuucucuguauucuuccucauacuu

SEQ ID NO: 176307 - RNA, 32 nt, Human
gccuucagaacugcaauucuuacucccuuuca

SEQ ID NO: 176308 - RNA, 32 nt, Human
gccuucagacaaacaggaaacuucugcaguca

SEQ ID NO: 176309 - RNA, 32 nt, Human
gccuucagagagcugaaaagggucccucgguc

SEQ ID NO: 176310 - RNA, 32 nt, Human
gccuucagagcacaccuguuggacggugcaaa

SEQ ID NO: 176311 - RNA, 32 nt, Human
gccuucagagcugcgagagaagaaaugucugu

SEQ ID NO: 176312 - RNA, 32 nt, Human
gccuucagagggcaguugauuccaguccaguu

SEQ ID NO: 176313 - RNA, 32 nt, Human
gccuucagagguuucuccaggacgucaccugu

SEQ ID NO: 176314 - RNA, 32 nt, Human
gccuucagaugacugcagcucuagccuacauc

SEQ ID NO: 176315 - RNA, 32 nt, Human
gccuucagauuugauggcuugggaaacugagg

SEQ ID NO: 176316 - RNA, 32 nt, Human
gccuucagcagcucccccucccgggccccucg

SEQ ID NO: 176317 - RNA, 32 nt, Human
gccuucagccacggagcagacaaggaccagcg

SEQ ID NO: 176318 - RNA, 20 nt, Human
gccuucagcugagggggcag

SEQ ID NO: 176319 - RNA, 32 nt, Human
gccuucaggaacagguuucccaucacauagcu

SEQ ID NO: 176320 - RNA, 32 nt, Human
gccuucaggaacagguuuuccaccacgucgcu

SEQ ID NO: 176321 - RNA, 32 nt, Human
gccuucagggccugauggcugggguggugaca

SEQ ID NO: 176322 - RNA, 32 nt, Human
gccuucagucacuggggaaagcagggaagcag

SEQ ID NO: 176323 - RNA, 32 nt, Human
gccuucagugccuucaugaauucaccuuccag

SEQ ID NO: 176324 - RNA, 32 nt, Human
gccuucagugcuaucagcagggauucauguga

SEQ ID NO: 176325 - RNA, 32 nt, Human
gccuucagugcuguauuuagugcagugcccgg

SEQ ID NO: 176326 - RNA, 20 nt, Human
gccuucaguggccgcaucaa

SEQ ID NO: 176327 - RNA, 21 nt, Human
gccuucaguuccucccaccuc

SEQ ID NO: 176328 - RNA, 32 nt, Human
gccuucaguugcaaaugggaagggcucggaua

SEQ ID NO: 176329 - RNA, 23 nt, Human
gccuucauaaauauucaccauca

SEQ ID NO: 176330 - RNA, 32 nt, Human
gccuucauacugaguucugggcccuucugcaa

SEQ ID NO: 176331 - RNA, 32 nt, Human
gccuucaucaagaagcccauguuuugagauuu

SEQ ID NO: 176332 - RNA, 20 nt, Human
gccuucaucauuucaccucu

SEQ ID NO: 176333 - RNA, 32 nt, Human
gccuucaucccgccucgacuccuggcccagcg

SEQ ID NO: 176334 - RNA, 32 nt, Human
gccuucaugccuguaauccgagugcuuuagga

SEQ ID NO: 176335 - RNA, 32 nt, Human
gccuucauggaguugggaacaggcugggaagg

SEQ ID NO: 176336 - RNA, 32 nt, Human
gccuucauuaaccauuauuguauguuggaaau

SEQ ID NO: 176337 - RNA, 32 nt, Human
gccuucauuucaaccaccugucuucauacccu

SEQ ID NO: 176338 - RNA, 32 nt, Human
gccuuccaaaagugcugggauuacaggcguga

SEQ ID NO: 176339 - RNA, 28 nt, Human
gccuuccaaagugcugggauaucaggca

SEQ ID NO: 176340 - RNA, 32 nt, Human
gccuuccaacuugcugugugcacauuaacaac

SEQ ID NO: 176341 - RNA, 19 nt, Human
gccuuccacacucaccucu

SEQ ID NO: 176342 - RNA, 32 nt, Human
gccuuccacagcccggguucuccugcugccuc

SEQ ID NO: 176343 - RNA, 32 nt, Human
gccuuccacaguugaaacuugagaagcagagc

SEQ ID NO: 176344 - RNA, 32 nt, Human
gccuuccaccccuuguaccucagucuaaacau

SEQ ID NO: 176345 - RNA, 32 nt, Human
gccuuccaccugugcuagcagccuggggccuc

SEQ ID NO: 176346 - RNA, 32 nt, Human
gccuuccacgguggccagcccugcugccauca

SEQ ID NO: 176347 - RNA, 32 nt, Human
gccuuccacuuccuuccaucucauuucuaaac

SEQ ID NO: 176348 - RNA, 32 nt, Human
gccuuccagacccacuccccacccuucucccc

SEQ ID NO: 176349 - RNA, 32 nt, Human
gccuuccagcagacuucaguagcucauuuuac

SEQ ID NO: 176350 - RNA, 32 nt, Human
gccuuccagcaggcgcugacagcugcugaccu

SEQ ID NO: 176351 - RNA, 32 nt, Human
gccuuccagcuguuccugcuuccacucuugcu

SEQ ID NO: 176352 - RNA, 20 nt, Human
gccuuccaggaaccugugga

SEQ ID NO: 176353 - RNA, 32 nt, Human
gccuuccaggcagcaggcuggcauggggacuu

SEQ ID NO: 176354 - RNA, 32 nt, Human
gccuuccagugaucuggaccaggaagacggau

SEQ ID NO: 176355 - RNA, 20 nt, Human
gccuuccaguuugcuugaua

SEQ ID NO: 176356 - RNA, 32 nt, Human
gccuuccaugaaaauugcucucugccaaagag

SEQ ID NO: 176357 - RNA, 32 nt, Human
gccuucccaacaccuccuucccaaaccccucu

SEQ ID NO: 176358 - RNA, 32 nt, Human
gccuucccaacaccuccuucccaaaccccuuu

SEQ ID NO: 176359 - RNA, 32 nt, Human
gccuuccccaagcauccagccuggggaugggc

SEQ ID NO: 176360 - RNA, 32 nt, Human
gccuuccccacaaccguuuucucccccguuuu

SEQ ID NO: 176361 - RNA, 21 nt, Human
gccuuccccacucccaccuca

SEQ ID NO: 176362 - RNA, 32 nt, Human
gccuuccccagccucuucuagagccgugaugc

SEQ ID NO: 176363 - RNA, 32 nt, Human
gccuuccccagcugccucaacucugucucugg

SEQ ID NO: 176364 - RNA, 32 nt, Human
gccuuccccauccucacccuggcuccauccag

SEQ ID NO: 176365 - RNA, 32 nt, Human
gccuuccccauccugguccacagggagaucca

SEQ ID NO: 176366 - RNA, 32 nt, Human
gccuucccccaccacagcagcccugccuguga

SEQ ID NO: 176367 - RNA, 32 nt, Human
gccuucccccucagacuacccaugucuccacg

SEQ ID NO: 176368 - RNA, 17 nt, Human
gccuucccccugcugcc

SEQ ID NO: 176369 - RNA, 18 nt, Human
gccuucccccuucuggca

SEQ ID NO: 176370 - RNA, 32 nt, Human
gccuuccccuacucuguucuguaucacaggga

SEQ ID NO: 176371 - RNA, 32 nt, Human
gccuuccccucagccucuccccacaccaccca

SEQ ID NO: 176372 - RNA, 32 nt, Human
gccuuccccucuggucccuuguguggaggccc

SEQ ID NO: 176373 - RNA, 32 nt, Human
gccuuccccuggcacuggcaaacagggccucu

SEQ ID NO: 176374 - RNA, 32 nt, Human
gccuucccgggccuuucucuccugggcugucu

SEQ ID NO: 176375 - RNA, 27 nt, Human
gccuucccuccacccaggccagcagcc

SEQ ID NO: 176376 - RNA, 32 nt, Human
gccuucccuccaggugcccaguguagguccag

SEQ ID NO: 176377 - RNA, 32 nt, Human
gccuucccuccugccccacuccuggcugugcc

SEQ ID NO: 176378 - RNA, 32 nt, Human
gccuucccuguucuccagccuaggugguucac

SEQ ID NO: 176379 - RNA, 32 nt, Human
gccuucccuucccauuuccuccccugccuccu

SEQ ID NO: 176380 - RNA, 32 nt, Human
gccuucccuuucuccccuuuggggucuguccg

SEQ ID NO: 176381 - RNA, 19 nt, Human
gccuuccgccagccgcgcc

SEQ ID NO: 176382 - RNA, 32 nt, Human
gccuuccgccgagucccugggcuccgaggcca

SEQ ID NO: 176383 - RNA, 20 nt, Human
gccuuccgcggguccugccu

SEQ ID NO: 176384 - RNA, 22 nt, Human
gccuuccgcugcgccuccuccc

SEQ ID NO: 176385 - RNA, 18 nt, Human
gccuuccggagcugcgcc

SEQ ID NO: 176386 - RNA, 32 nt, Human
gccuuccgggcacuggucgagcuguuugaggc

SEQ ID NO: 176387 - RNA, 22 nt, Human
gccuuccuaguugguuuuucua

SEQ ID NO: 176388 - RNA, 32 nt, Human
gccuuccuccacuggcuaugcauuggacuuga

SEQ ID NO: 176389 - RNA, 32 nt, Human
gccuuccucccaggcccccacguugcuggccg

SEQ ID NO: 176390 - RNA, 17 nt, Human
gccuuccuccugacccc

SEQ ID NO: 176391 - RNA, 32 nt, Human
gccuuccuccuggccuucucguccgacuuccu

SEQ ID NO: 176392 - RNA, 32 nt, Human
gccuuccucuacuucucacaguucaggccugu

SEQ ID NO: 176393 - RNA, 32 nt, Human
gccuuccucuccccugccucuuucuuccucau

SEQ ID NO: 176394 - RNA, 32 nt, Human
gccuuccucugcagcugaccucuguuguccuc

SEQ ID NO: 176395 - RNA, 20 nt, Human
gccuuccucugugaaccccu

SEQ ID NO: 176396 - RNA, 32 nt, Human
gccuuccucuucuuccugcucuguguggaagg

SEQ ID NO: 176397 - RNA, 32 nt, Human
gccuuccugaacaccuuaggcugguggggcug

SEQ ID NO: 176398 - RNA, 32 nt, Human
gccuuccugaguagcugggauuacaggcagcc

SEQ ID NO: 176399 - RNA, 32 nt, Human
gccuuccugaguaguugggaauacaggcaugc

SEQ ID NO: 176400 - RNA, 32 nt, Human
gccuuccugcagccacacacccacccggggug

SEQ ID NO: 176401 - RNA, 32 nt, Human
gccuuccugcagccuccacuaagguaacaacc

SEQ ID NO: 176402 - RNA, 32 nt, Human
gccuuccugcagccucuuccgcucgccggcug

SEQ ID NO: 176403 - RNA, 32 nt, Human
gccuuccugccgccuccacugaucugaggaga

SEQ ID NO: 176404 - RNA, 32 nt, Human
gccuuccugccuccagccuggcuucuagcugg

SEQ ID NO: 176405 - RNA, 32 nt, Human
gccuuccugccugcccuuuuugugcaggugga

SEQ ID NO: 176406 - RNA, 32 nt, Human
gccuuccuggaaggagugcugagcagcaaagc

SEQ ID NO: 176407 - RNA, 32 nt, Human
gccuuccuggcuuagcucagauggcagaugag

SEQ ID NO: 176408 - RNA, 32 nt, Human
gccuuccuggcuucuccacaaccuucugacug

SEQ ID NO: 176409 - RNA, 32 nt, Human
gccuuccugugcccagaaaggaaggggcuauu

SEQ ID NO: 176410 - RNA, 32 nt, Human
gccuuccugugcccagcuucugggcccacucc

SEQ ID NO: 176411 - RNA, 32 nt, Human
gccuuccuuccagugagagaaaaauagaaugg

SEQ ID NO: 176412 - RNA, 16 nt, Human
gccuuccuucugcucc

SEQ ID NO: 176413 - RNA, 32 nt, Human
gccuuccuucuuccuuuccuuugcacuauccc

SEQ ID NO: 176414 - RNA, 21 nt, Human
gccuuccuugcaccucggagc

SEQ ID NO: 176415 - RNA, 32 nt, Human
gccuuccuuuauuacaaaucaguauuaaaacu

SEQ ID NO: 176416 - RNA, 32 nt, Human
gccuuccuuugucccugugguauucauaaagu

SEQ ID NO: 176417 - RNA, 32 nt, Human
gccuucgacagcugagagacaaaaagaagccc

SEQ ID NO: 176418 - RNA, 32 nt, Human
gccuucgaggucagaggagagauagccugugg

SEQ ID NO: 176419 - RNA, 32 nt, Human
gccuucgcagaagucacauguaucgaagcaga

SEQ ID NO: 176420 - RNA, 32 nt, Human
gccuucgcagaggcggccugugccauccugca

SEQ ID NO: 176421 - RNA, 32 nt, Human
gccuucgccucccggguucaagugauucuccu

SEQ ID NO: 176422 - RNA, 32 nt, Human
gccuucgcuacgccugaccccaaaaagacaac

SEQ ID NO: 176423 - RNA, 32 nt, Human
gccuucggcacuguagcuuuggguggugggcu

SEQ ID NO: 176424 - RNA, 25 nt, Human
gccuucggcgagucuuuuuguuugg

SEQ ID NO: 176425 - RNA, 32 nt, Human
gccuucgggaggaggaggcggaggaggcggag

SEQ ID NO: 176426 - RNA, 32 nt, Human
gccuucgggaggcgagcaggcagcaguuggcc

SEQ ID NO: 176427 - RNA, 32 nt, Human
gccuucggggccugagacccugagagccacgc

SEQ ID NO: 176428 - RNA, 21 nt, Human
gccuucuaacuuauagacuca

SEQ ID NO: 176429 - RNA, 32 nt, Human
gccuucuacucccagugccaaagccagaccac

SEQ ID NO: 176430 - RNA, 32 nt, Human
gccuucuacugcucuccuccaccucaacuccg

SEQ ID NO: 176431 - RNA, 32 nt, Human
gccuucuagacacugaaggcaaaucuccuuug

SEQ ID NO: 176432 - RNA, 32 nt, Human
gccuucuaggaaguuaggagguugaggcacag

SEQ ID NO: 176433 - RNA, 32 nt, Human
gccuucuaggugagacacuuuuaagguacacu

SEQ ID NO: 176434 - RNA, 32 nt, Human
gccuucuaguucaugguacgcaucccugccuc

SEQ ID NO: 176435 - RNA, 32 nt, Human
gccuucuauaugcaaacacugcaguuuuaacu

SEQ ID NO: 176436 - RNA, 23 nt, Human
gccuucucaguccucucucccuc

SEQ ID NO: 176437 - RNA, 32 nt, Human
gccuucucaucuugggagaugacuccucuuca

SEQ ID NO: 176438 - RNA, 25 nt, Human
gccuucucaugcgcauugucacuug

SEQ ID NO: 176439 - RNA, 32 nt, Human
gccuucuccaaccugaguuuggaaaucgggaa

SEQ ID NO: 176440 - RNA, 32 nt, Human
gccuucuccaccuuccccuccuuuggcucugu

SEQ ID NO: 176441 - RNA, 32 nt, Human
gccuucuccacugucucauuuccuuuucccac

SEQ ID NO: 176442 - RNA, 20 nt, Human
gccuucuccagccgcugcca

SEQ ID NO: 176443 - RNA, 32 nt, Human
gccuucuccaggugccucucccucaccagcuc

SEQ ID NO: 176444 - RNA, 32 nt, Human
gccuucuccaguggcaguccaaaagcagaaau

SEQ ID NO: 176445 - RNA, 32 nt, Human
gccuucuccauaccccucuccccagcaucaug

SEQ ID NO: 176446 - RNA, 32 nt, Human
gccuucuccuccucccccuccuuccuuccgcc

SEQ ID NO: 176447 - RNA, 32 nt, Human
gccuucuccuccuucucuccccagagcccccu

SEQ ID NO: 176448 - RNA, 32 nt, Human
gccuucuccuuccugcuucauccggcuuagcu

SEQ ID NO: 176449 - RNA, 32 nt, Human
gccuucucuagaaucugaaggccaggcuuacc

SEQ ID NO: 176450 - RNA, 32 nt, Human
gccuucucuccuggucccuggugcuguuuggg

SEQ ID NO: 176451 - RNA, 32 nt, Human
gccuucucugcagucccuucugcccugccggg

SEQ ID NO: 176452 - RNA, 32 nt, Human
gccuucucuuucuccuucacugccucaaguua

SEQ ID NO: 176453 - RNA, 32 nt, Human
gccuucugaaaauaauaaacucucauuaaccc

SEQ ID NO: 176454 - RNA, 32 nt, Human
gccuucugaaacuuccucuuuaggguaaccau

SEQ ID NO: 176455 - RNA, 32 nt, Human
gccuucugagccuugaaauugaggagguuaaa

SEQ ID NO: 176456 - RNA, 32 nt, Human
gccuucugagcuggccucucacugccucccca

SEQ ID NO: 176457 - RNA, 24 nt, Human
gccuucugaugccacuucuucuca

SEQ ID NO: 176458 - RNA, 32 nt, Human
gccuucugccaacgccuccuguccccaccuaa

SEQ ID NO: 176459 - RNA, 32 nt, Human
gccuucugccagcucccuccccagucaccaga

SEQ ID NO: 176460 - RNA, 19 nt, Human
gccuucugcccgacccagg

SEQ ID NO: 176461 - RNA, 32 nt, Human
gccuucugccuagaaagaucuaugacuggguu

SEQ ID NO: 176462 - RNA, 32 nt, Human
gccuucugccuccucgccucuccuggacuggc

SEQ ID NO: 176463 - RNA, 18 nt, Human
gccuucuggaagacuuca

SEQ ID NO: 176464 - RNA, 23 nt, Human
gccuucuggcaccugugcuccaa

SEQ ID NO: 176465 - RNA, 19 nt, Human
gccuucuggccacccagag

SEQ ID NO: 176466 - RNA, 32 nt, Human
gccuucugggcuggggaugggugagcaaaggg

SEQ ID NO: 176467 - RNA, 32 nt, Human
gccuucuggucugaggcgcagcucccucugcc

SEQ ID NO: 176468 - RNA, 32 nt, Human
gccuucuguaucugugccuggccaguggcagc

SEQ ID NO: 176469 - RNA, 32 nt, Human
gccuucuguccuucauccgccugcugcugaau

SEQ ID NO: 176470 - RNA, 32 nt, Human
gccuucuguuaagccaggcuuuaaggaucugc

SEQ ID NO: 176471 - RNA, 32 nt, Human
gccuucuuauuguccuccuccuccuggcucgg

SEQ ID NO: 176472 - RNA, 32 nt, Human
gccuucuucaccuguguccucugccucugagu

SEQ ID NO: 176473 - RNA, 32 nt, Human
gccuucuuccccaggcuggaagugggcgacac

SEQ ID NO: 176474 - RNA, 32 nt, Human
gccuucuuccccaggcugggagugggugagac

SEQ ID NO: 176475 - RNA, 32 nt, Human
gccuucuuccuucacaauuagcucuugccccu

SEQ ID NO: 176476 - RNA, 32 nt, Human
gccuucuucucccccuuccccugugcucccuu

SEQ ID NO: 176477 - RNA, 19 nt, Human
gccuucuugaagcaguucc

SEQ ID NO: 176478 - RNA, 29 nt, Human
gccuucuugcugcuaucaacucccaagag

SEQ ID NO: 176479 - RNA, 32 nt, Human
gccuucuugcugcugucacguuccaagagaac

SEQ ID NO: 176480 - RNA, 32 nt, Human
gccuucuuuccugugugucuguuaacauuucc

SEQ ID NO: 176481 - RNA, 32 nt, Human
gccuucuuugagauggagucuugcucuguugc

SEQ ID NO: 176482 - RNA, 32 nt, Human
gccuucuuugggcagacgugcagagaagaaca

SEQ ID NO: 176483 - RNA, 16 nt, Human
gccuugaaacccggga

SEQ ID NO: 176484 - RNA, 32 nt, Human
gccuugaaaugugaggaggaggaagauagcug

SEQ ID NO: 176485 - RNA, 32 nt, Human
gccuugaacaaccagauggugacccagaacag

SEQ ID NO: 176486 - RNA, 32 nt, Human
gccuugaacuccugggcucaagcaauccuccu

SEQ ID NO: 176487 - RNA, 32 nt, Human
gccuugaagaacuaccagaaggccaaugaccu

SEQ ID NO: 176488 - RNA, 32 nt, Human
gccuugaagauggggaaacugaggcucaagga

SEQ ID NO: 176489 - RNA, 32 nt, Human
gccuugaaggaugggugagaggugagaaggga

SEQ ID NO: 176490 - RNA, 32 nt, Human
gccuugaagggaagacaaaacuggauguucuu

SEQ ID NO: 176491 - RNA, 32 nt, Human
gccuugaauccaagaaugagagaggacaaauc

SEQ ID NO: 176492 - RNA, 32 nt, Human
gccuugaauuccugggcccaagcaauucuccc

SEQ ID NO: 176493 - RNA, 32 nt, Human
gccuugaauuccugggcucgagcgguucuccu

SEQ ID NO: 176494 - RNA, 18 nt, Human
gccuugaauuccuuggua

SEQ ID NO: 176495 - RNA, 32 nt, Human
gccuugaccacagcucccucucucacacagcu

SEQ ID NO: 176496 - RNA, 32 nt, Human
gccuugacccagccuuuaacaaucuuuaaaau

SEQ ID NO: 176497 - RNA, 32 nt, Human
gccuugaccuccagggcucaaggauccuccug

SEQ ID NO: 176498 - RNA, 32 nt, Human
gccuugaccuccuggguuccggugauucucau

SEQ ID NO: 176499 - RNA, 32 nt, Human
gccuugacuuccugggcucaagugaucauccc

SEQ ID NO: 176500 - RNA, 32 nt, Human
gccuugagaaaggcauuggccauugguugcca

SEQ ID NO: 176501 - RNA, 32 nt, Human
gccuugagaagagagcccgcucuccguggggc

SEQ ID NO: 176502 - RNA, 28 nt, Human
gccuugagcaguguugccucauccagaa

SEQ ID NO: 176503 - RNA, 21 nt, Human
gccuugagccucuccucaggg

SEQ ID NO: 176504 - RNA, 32 nt, Human
gccuugagcuccugggcucaagcaauccuccc

SEQ ID NO: 176505 - RNA, 32 nt, Human
gccuugagcucuucucugagcuggcagaagac

SEQ ID NO: 176506 - RNA, 32 nt, Human
gccuugagcuucaaaaugagauaugcaauaaa

SEQ ID NO: 176507 - RNA, 32 nt, Human
gccuugaggccaggagggcagugagcugugau

SEQ ID NO: 176508 - RNA, 32 nt, Human
gccuugagggucggucuguggcauuuuaaaug

SEQ ID NO: 176509 - RNA, 32 nt, Human
gccuugagucuccgggccgccuugccauggcu

SEQ ID NO: 176510 - RNA, 32 nt, Human
gccuugauaccaaaauugggaaagaacaugug

SEQ ID NO: 176511 - RNA, 18 nt, Human
gccuugauccccuugaua

SEQ ID NO: 176512 - RNA, 32 nt, Human
gccuugaucguccugguguccucugcaagaca

SEQ ID NO: 176513 - RNA, 32 nt, Human
gccuugaugacugccuugccuccucaguaugu

SEQ ID NO: 176514 - RNA, 32 nt, Human
gccuugauggaugaggagagacuucccuuccc

SEQ ID NO: 176515 - RNA, 32 nt, Human
gccuugauguacuggagcaaucagaucacacg

SEQ ID NO: 176516 - RNA, 32 nt, Human
gccuugaugucuccaccaccaaagucguccuu

SEQ ID NO: 176517 - RNA, 32 nt, Human
gccuugauuaaaccagaaaacugucaucguuu

SEQ ID NO: 176518 - RNA, 32 nt, Human
gccuugcacacucaccuccaccuucacaggcc

SEQ ID NO: 176519 - RNA, 32 nt, Human
gccuugcacgggacagaccacacccaccgcaa

SEQ ID NO: 176520 - RNA, 32 nt, Human
gccuugcagagaugcacgugugcauuucagcu

SEQ ID NO: 176521 - RNA, 22 nt, Human
gccuugcagcuccuccagaggg

SEQ ID NO: 176522 - RNA, 23 nt, Human
gccuugcagucaguuguguuugg

SEQ ID NO: 176523 - RNA, 22 nt, Human
gccuugcauccuuggaaccaau

SEQ ID NO: 176524 - RNA, 32 nt, Human
gccuugccaacuuggcagcccagaaacagucc

SEQ ID NO: 176525 - RNA, 32 nt, Human
gccuugccagccucaucgagaucuggcagccc

SEQ ID NO: 176526 - RNA, 32 nt, Human
gccuugcccagaguccagcuguguggcuuuua

SEQ ID NO: 176527 - RNA, 32 nt, Human
gccuugcccagggccucaaaggcaccaaacgu

SEQ ID NO: 176528 - RNA, 20 nt, Human
gccuugcccggauucuggga

SEQ ID NO: 176529 - RNA, 32 nt, Human
gccuugcccuccauccuuccucuguuccuucu

SEQ ID NO: 176530 - RNA, 32 nt, Human
gccuugcccuuugggcuggagaugcuuugcca

SEQ ID NO: 176531 - RNA, 32 nt, Human
gccuugcccuuuucugaggcucagggaagugg

SEQ ID NO: 176532 - RNA, 32 nt, Human
gccuugccgagacugugggcagccugguugug

SEQ ID NO: 176533 - RNA, 19 nt, Human
gccuugccuaagggggcau

SEQ ID NO: 176534 - RNA, 32 nt, Human
gccuugccuaggggcccgggcacugccaucac

SEQ ID NO: 176535 - RNA, 32 nt, Human
gccuugccuagugggccuuccuucccaggucg

SEQ ID NO: 176536 - RNA, 20 nt, Human
gccuugccucacuuccacca

SEQ ID NO: 176537 - RNA, 32 nt, Human
gccuugccucagacuacuuugccaacccacuu

SEQ ID NO: 176538 - RNA, 32 nt, Human
gccuugccucaggaguugcugguuagccuaug

SEQ ID NO: 176539 - RNA, 32 nt, Human
gccuugccuccccugccuccccuccuuuuucc

SEQ ID NO: 176540 - RNA, 17 nt, Human
gccuugccucucaggug

SEQ ID NO: 176541 - RNA, 32 nt, Human
gccuugccugugagcuaugucacuccccuccc

SEQ ID NO: 176542 - RNA, 32 nt, Human
gccuugccuuauaaggucugucuuccauccag

SEQ ID NO: 176543 - RNA, 32 nt, Human
gccuugccuuuccccucugccuguuuccuuuu

SEQ ID NO: 176544 - RNA, 32 nt, Human
gccuugcggacgaugcacucacaugccacagc

SEQ ID NO: 176545 - RNA, 32 nt, Human
gccuugcgguagccauggcagcaggcuccgag

SEQ ID NO: 176546 - RNA, 20 nt, Human
gccuugcgucuuuccuccca

SEQ ID NO: 176547 - RNA, 20 nt, Human
gccuugcucaccuguccccu

SEQ ID NO: 176548 - RNA, 32 nt, Human
gccuugcucagucccuuccaccaaagucaucu

SEQ ID NO: 176549 - RNA, 32 nt, Human
gccuugcuccucuuccuccuuucuuggcgggu

SEQ ID NO: 176550 - RNA, 32 nt, Human
gccuugcucugccccuucugcucacugugaag

SEQ ID NO: 176551 - RNA, 32 nt, Human
gccuugcugacaccugggccuugccuccaugu

SEQ ID NO: 176552 - RNA, 32 nt, Human
gccuugcugagcuccugggaaggaggcgugcc

SEQ ID NO: 176553 - RNA, 32 nt, Human
gccuugcugcagccccagcccagauggcacuc

SEQ ID NO: 176554 - RNA, 32 nt, Human
gccuugcugcugcugcacccaacuacugagcu

SEQ ID NO: 176555 - RNA, 32 nt, Human
gccuugcuuacugccugcaaauuuugagaaau

SEQ ID NO: 176556 - RNA, 32 nt, Human
gccuugcuucauuucagaaucucccuucaacc

SEQ ID NO: 176557 - RNA, 32 nt, Human
gccuugcuuuucucucuucuucauucauauuc

SEQ ID NO: 176558 - RNA, 22 nt, Human
gccuuggaaaaaccccaaaaca

SEQ ID NO: 176559 - RNA, 32 nt, Human
gccuuggaaggcucucccuuguggaaccaagu

SEQ ID NO: 176560 - RNA, 32 nt, Human
gccuuggaagggaagucaggcucacuuggaca

SEQ ID NO: 176561 - RNA, 31 nt, Human
gccuuggaccuucucccuugcuuagaagugc

SEQ ID NO: 176562 - RNA, 32 nt, Human
gccuuggacgcugcagcccccuccucaacggc

SEQ ID NO: 176563 - RNA, 32 nt, Human
gccuuggagacaggggagacccuaugucaaaa

SEQ ID NO: 176564 - RNA, 32 nt, Human
gccuuggagaccuccaggucugaaaaguuagc

SEQ ID NO: 176565 - RNA, 32 nt, Human
gccuuggagagggaaacaggaaauacguugcu

SEQ ID NO: 176566 - RNA, 32 nt, Human
gccuuggagauggagaauucucaguuguguaa

SEQ ID NO: 176567 - RNA, 32 nt, Human
gccuuggaggcagaagcugugaguuucagaac

SEQ ID NO: 176568 - RNA, 32 nt, Human
gccuuggaggcggagguugcagugagcugaga

SEQ ID NO: 176569 - RNA, 32 nt, Human
gccuuggaggcugcagugcacugugauugugc

SEQ ID NO: 176570 - RNA, 32 nt, Human
gccuuggaggguacaagauccacugagggugg

SEQ ID NO: 176571 - RNA, 32 nt, Human
gccuuggaggucaaaacugcagugagccaugg

SEQ ID NO: 176572 - RNA, 32 nt, Human
gccuuggaugaggcggggcaguguguauaugg

SEQ ID NO: 176573 - RNA, 32 nt, Human
gccuuggauuuauauugcacuucauagacccc

SEQ ID NO: 176574 - RNA, 31 nt, Human
gccuuggcagugucucccacagacccaggag

SEQ ID NO: 176575 - RNA, 32 nt, Human
gccuuggccaagcagagccuggucauggaugc

SEQ ID NO: 176576 - RNA, 32 nt, Human
gccuuggccagccuggccagccgccgagcagc

SEQ ID NO: 176577 - RNA, 20 nt, Human
gccuuggccuggcccagccc

SEQ ID NO: 176578 - RNA, 32 nt, Human
gccuuggcguccggcccggccugggcccuuag

SEQ ID NO: 176579 - RNA, 32 nt, Human
gccuuggcuagaaaaugcuuuuaaugucucaa

SEQ ID NO: 176580 - RNA, 32 nt, Human
gccuuggcuccugguauaggccgcuuuccuuc

SEQ ID NO: 176581 - RNA, 32 nt, Human
gccuuggcucuuuggcucccuuuugcuuaauu

SEQ ID NO: 176582 - RNA, 32 nt, Human
gccuuggcuguacugcuauucuuacugcugcu

SEQ ID NO: 176583 - RNA, 32 nt, Human
gccuuggcuugaguuuuuguccuugccuccuu

SEQ ID NO: 176584 - RNA, 32 nt, Human
gccuugggaaauuuaucuaacucucugggccc

SEQ ID NO: 176585 - RNA, 32 nt, Human
gccuugggaaucaggagcuggagccaggaugc

SEQ ID NO: 176586 - RNA, 32 nt, Human
gccuugggacagcugggaacuuaacuugaaau

SEQ ID NO: 176587 - RNA, 18 nt, Human
gccuugggacccguccuc

SEQ ID NO: 176588 - RNA, 32 nt, Human
gccuugggagagaugccuuccaggcagacaca

SEQ ID NO: 176589 - RNA, 32 nt, Human
gccuugggagcagcagugcuaccacgguaaug

SEQ ID NO: 176590 - RNA, 32 nt, Human
gccuugggagccacugccacuccaguccugcc

SEQ ID NO: 176591 - RNA, 32 nt, Human
gccuugggagcucuuuggccuccuggcuggcc

SEQ ID NO: 176592 - RNA, 24 nt, Human
gccuugggauuagccucuuccuca

SEQ ID NO: 176593 - RNA, 32 nt, Human
gccuugggcagugccuccuccugggccugggu

SEQ ID NO: 176594 - RNA, 18 nt, Human
gccuugggcccacccuca

SEQ ID NO: 176595 - RNA, 32 nt, Human
gccuugggccugggaaucuaagugggagacaa

SEQ ID NO: 176596 - RNA, 22 nt, Human
gccuugggccuucgaccugggg

SEQ ID NO: 176597 - RNA, 32 nt, Human
gccuugggcuguacauaguguucccucucauc

SEQ ID NO: 176598 - RNA, 32 nt, Human
gccuuggggagaagaaacauggugaaaacagg

SEQ ID NO: 176599 - RNA, 32 nt, Human
gccuuggggaggcccaguguucccagggugga

SEQ ID NO: 176600 - RNA, 21 nt, Human
gccuuggggcuccgagucccu

SEQ ID NO: 176601 - RNA, 19 nt, Human
gccuuggggcucuggcucc

SEQ ID NO: 176602 - RNA, 30 nt, Human
gccuugggguauaguuuuaucuuucugcuu

SEQ ID NO: 176603 - RNA, 32 nt, Human
gccuuggguccccauccucuggaaccaggggg

SEQ ID NO: 176604 - RNA, 32 nt, Human
gccuuggguguauguaacuauguauguauaua

SEQ ID NO: 176605 - RNA, 32 nt, Human
gccuuggucuucaugguaaccaccgcgucugu

SEQ ID NO: 176606 - RNA, 32 nt, Human
gccuuggucuuggacaacuguaaggaacaaca

SEQ ID NO: 176607 - RNA, 32 nt, Human
gccuuggugagcucccgugguggguucccagc

SEQ ID NO: 176608 - RNA, 32 nt, Human
gccuuggugccuguagcucuggacuucccugg

SEQ ID NO: 176609 - RNA, 32 nt, Human
gccuugguuaauugacucacaccagcugugcg

SEQ ID NO: 176610 - RNA, 32 nt, Human
gccuugguuugggagcagggagggggaagucc

SEQ ID NO: 176611 - RNA, 32 nt, Human
gccuuguaagaggcaagaaacacuugccgaau

SEQ ID NO: 176612 - RNA, 32 nt, Human
gccuugucacccaggcuggaguccaguggcac

SEQ ID NO: 176613 - RNA, 32 nt, Human
gccuuguccacacuccccucugagcuuuacug

SEQ ID NO: 176614 - RNA, 32 nt, Human
gccuuguccagccugaccaacauggugaaacc

SEQ ID NO: 176615 - RNA, 32 nt, Human
gccuugucgcccaggaaguggggcucggcacc

SEQ ID NO: 176616 - RNA, 32 nt, Human
gccuugucucugcugcuccucuccuuggaaac

SEQ ID NO: 176617 - RNA, 22 nt, Human
gccuugucuuccucuuuccucu

SEQ ID NO: 176618 - RNA, 32 nt, Human
gccuugucuuuuccucucucugccucaguuuc

SEQ ID NO: 176619 - RNA, 32 nt, Human
gccuugugccuccaaaagccucacgcugcaac

SEQ ID NO: 176620 - RNA, 32 nt, Human
gccuugugccugcaguggagguuccaguugug

SEQ ID NO: 176621 - RNA, 32 nt, Human
gccuuguggccaccccucacccugacaccgac

SEQ ID NO: 176622 - RNA, 32 nt, Human
gccuugugggauggcagaugaucagggcugua

SEQ ID NO: 176623 - RNA, 32 nt, Human
gccuugugggggcuccagaaaagaggcuagga

SEQ ID NO: 176624 - RNA, 32 nt, Human
gccuugugggugaagccagggagggagacagg

SEQ ID NO: 176625 - RNA, 19 nt, Human
gccuuguggugugugcgca

SEQ ID NO: 176626 - RNA, 32 nt, Human
gccuugugucagagcugggaguagcauggacu

SEQ ID NO: 176627 - RNA, 32 nt, Human
gccuuguguguaguuguuuggagcacacugca

SEQ ID NO: 176628 - RNA, 32 nt, Human
gccuuguucuuucucacaguaucuaucccacu

SEQ ID NO: 176629 - RNA, 32 nt, Human
gccuuguugccuuaucuucuuccaaauguacu

SEQ ID NO: 176630 - RNA, 32 nt, Human
gccuuguuuacuuuucagagcugacagauugc

SEQ ID NO: 176631 - RNA, 32 nt, Human
gccuuguuuaugcuucuugucugagaacagua

SEQ ID NO: 176632 - RNA, 32 nt, Human
gccuuguuugcagaauaaacagggcauuuagc

SEQ ID NO: 176633 - RNA, 32 nt, Human
gccuuguuugccucagcucuggaagcugacuu

SEQ ID NO: 176634 - RNA, 32 nt, Human
gccuuguuugcugagggcacacacaguggaga

SEQ ID NO: 176635 - RNA, 23 nt, Human
gccuuguuuuguuuguuuguuug

SEQ ID NO: 176636 - RNA, 32 nt, Human
gccuuuaaagugaagaagaggagccaguugug

SEQ ID NO: 176637 - RNA, 32 nt, Human
gccuuuaacagagagacaagagagcuuguucu

SEQ ID NO: 176638 - RNA, 32 nt, Human
gccuuuaauaaaagaaaguggccauaagaagg

SEQ ID NO: 176639 - RNA, 24 nt, Human
gccuuuaaucccagcuacucggga

SEQ ID NO: 176640 - RNA, 32 nt, Human
gccuuuacaaaaguuaauuuacauucucuguu

SEQ ID NO: 176641 - RNA, 32 nt, Human
gccuuuacacucucgugacugggaaauagaga

SEQ ID NO: 176642 - RNA, 18 nt, Human
gccuuuaccacagcaagg

SEQ ID NO: 176643 - RNA, 32 nt, Human
gccuuuacuaccucuaccugcagaagacgaug

SEQ ID NO: 176644 - RNA, 32 nt, Human
gccuuuacugacaccuugugcucaggccugug

SEQ ID NO: 176645 - RNA, 24 nt, Human
gccuuuagucccagcuacucagga

SEQ ID NO: 176646 - RNA, 32 nt, Human
gccuuuauccugggagauggggaggaagcccc

SEQ ID NO: 176647 - RNA, 20 nt, Human
gccuuuaucuagaugaggua

SEQ ID NO: 176648 - RNA, 22 nt, Human
gccuuuaugccacacucugugg

SEQ ID NO: 176649 - RNA, 17 nt, Human
gccuuuauuccaucucu

SEQ ID NO: 176650 - RNA, 32 nt, Human
gccuuuauucugucuucucuuguccuaucuca

SEQ ID NO: 176651 - RNA, 32 nt, Human
gccuuuauuuuucugucccagaaggauucugu

SEQ ID NO: 176652 - RNA, 32 nt, Human
gccuuucaaccagcaaccaggcacaggcagaa

SEQ ID NO: 176653 - RNA, 32 nt, Human
gccuuucaccacccccacacccugccaugacu

SEQ ID NO: 176654 - RNA, 32 nt, Human
gccuuucaccagggcuccaucugugaagaguc

SEQ ID NO: 176655 - RNA, 22 nt, Human
gccuuucacccaggcucucagc

SEQ ID NO: 176656 - RNA, 32 nt, Human
gccuuucacgccuuccaccuccugcgugucca

SEQ ID NO: 176657 - RNA, 32 nt, Human
gccuuucacggcugcugacuucucagggcugc

SEQ ID NO: 176658 - RNA, 32 nt, Human
gccuuucacuauccgccauucuugucaccuca

SEQ ID NO: 176659 - RNA, 19 nt, Human
gccuuucacugccacaguu

SEQ ID NO: 176660 - RNA, 32 nt, Human
gccuuucacuugcauccaacuccuggggcugg

SEQ ID NO: 176661 - RNA, 32 nt, Human
gccuuucagaaggagaaggcagcucuguuucu

SEQ ID NO: 176662 - RNA, 32 nt, Human
gccuuucagaaggagucuccugguuuucuuac

SEQ ID NO: 176663 - RNA, 32 nt, Human
gccuuucagagcccaagucuguggguuggcuu

SEQ ID NO: 176664 - RNA, 19 nt, Human
gccuuucagaucuuugaua

SEQ ID NO: 176665 - RNA, 32 nt, Human
gccuuucagauucagguguauggaauuuuuga

SEQ ID NO: 176666 - RNA, 32 nt, Human
gccuuucaugaugcaggagagcagggaucccg

SEQ ID NO: 176667 - RNA, 32 nt, Human
gccuuuccaccugcuuucuccugggcccgcuu

SEQ ID NO: 176668 - RNA, 32 nt, Human
gccuuuccacgcccuccagccccgggggagau

SEQ ID NO: 176669 - RNA, 32 nt, Human
gccuuuccauuuucccugcuccccucugcaga

SEQ ID NO: 176670 - RNA, 32 nt, Human
gccuuucccacugguccaucugguuuucucuc

SEQ ID NO: 176671 - RNA, 24 nt, Human
gccuuucccaugugccaaaccaga

SEQ ID NO: 176672 - RNA, 32 nt, Human
gccuuucccccuuaccugcccugcugccugca

SEQ ID NO: 176673 - RNA, 32 nt, Human
gccuuucccgaggccugugagugccucaggaa

SEQ ID NO: 176674 - RNA, 32 nt, Human
gccuuucccuuuccucuuugccugcuauauaa

SEQ ID NO: 176675 - RNA, 32 nt, Human
gccuuuccucccccuuccucucccccuuccuc

SEQ ID NO: 176676 - RNA, 32 nt, Human
gccuuuccuggugguuuccaacaucaaggaca

SEQ ID NO: 176677 - RNA, 18 nt, Human
gccuuuccuucugcugcu

SEQ ID NO: 176678 - RNA, 32 nt, Human
gccuuuccuucuugugggcaucugggaccguc

SEQ ID NO: 176679 - RNA, 32 nt, Human
gccuuuccuuucuccagcuucugcucugcccc

SEQ ID NO: 176680 - RNA, 32 nt, Human
gccuuucuacuuccuggaccccugacccggcu

SEQ ID NO: 176681 - RNA, 32 nt, Human
gccuuucuauacaaagcuacuauuaucgacau

SEQ ID NO: 176682 - RNA, 32 nt, Human
gccuuucuccaccaggccccucaucugaauac

SEQ ID NO: 176683 - RNA, 32 nt, Human
gccuuucuccaucuauugucucuuucaccccu

SEQ ID NO: 176684 - RNA, 32 nt, Human
gccuuucucugccucuuccuccccugucuugg

SEQ ID NO: 176685 - RNA, 32 nt, Human
gccuuucucugccugcccugcccuuggggcca

SEQ ID NO: 176686 - RNA, 32 nt, Human
gccuuucucuuaaucaguccugccucaaacau

SEQ ID NO: 176687 - RNA, 32 nt, Human
gccuuucugauuuugccuccaaaggagagcgc

SEQ ID NO: 176688 - RNA, 32 nt, Human
gccuuucugcaccccuucucuccuggggagcu

SEQ ID NO: 176689 - RNA, 32 nt, Human
gccuuucugccucacaucagcccuguguauaa

SEQ ID NO: 176690 - RNA, 32 nt, Human
gccuuucuggacccaauuuuuccccagugaaa

SEQ ID NO: 176691 - RNA, 22 nt, Human
gccuuucuggccccuucccuca

SEQ ID NO: 176692 - RNA, 32 nt, Human
gccuuucuggccugcuaugucuucccaauguu

SEQ ID NO: 176693 - RNA, 32 nt, Human
gccuuucuggugaaggaagguugcuaugaaac

SEQ ID NO: 176694 - RNA, 22 nt, Human
gccuuucuggugcuguucucca

SEQ ID NO: 176695 - RNA, 32 nt, Human
gccuuucuguaucuuggggaaauaagaccgau

SEQ ID NO: 176696 - RNA, 32 nt, Human
gccuuucugucugccugaugucaagggcuucu

SEQ ID NO: 176697 - RNA, 32 nt, Human
gccuuucuucaugugugcgugcauaucagccc

SEQ ID NO: 176698 - RNA, 32 nt, Human
gccuuucuugcccucugaccucaaaggcuagc

SEQ ID NO: 176699 - RNA, 32 nt, Human
gccuuucuugcuuucaaauaugcuauggagcc

SEQ ID NO: 176700 - RNA, 32 nt, Human
gccuuucuuucacagagccuucagagggaaac

SEQ ID NO: 176701 - RNA, 32 nt, Human
gccuuugaaaaguggaggaaagaaaagcccuu

SEQ ID NO: 176702 - RNA, 32 nt, Human
gccuuugaaauggauacaugaaaauuagugaa

SEQ ID NO: 176703 - RNA, 32 nt, Human
gccuuugaacaaguaagugagccacccucgga

SEQ ID NO: 176704 - RNA, 32 nt, Human
gccuuugacuccaggcugggcgauuccgaugc

SEQ ID NO: 176705 - RNA, 32 nt, Human
gccuuugagaugaaguaggcugcucuguuugg

SEQ ID NO: 176706 - RNA, 32 nt, Human
gccuuugagcugcugacuuucagcuggaacuu

SEQ ID NO: 176707 - RNA, 32 nt, Human
gccuuugaggaugaggaggaggaagaccugcg

SEQ ID NO: 176708 - RNA, 23 nt, Human
gccuuugaggccgggugcagugg

SEQ ID NO: 176709 - RNA, 32 nt, Human
gccuuugaggccgggugcaguggcucacgccu

SEQ ID NO: 176710 - RNA, 32 nt, Human
gccuuugaguguuaucucucaguggcuagagg

SEQ ID NO: 176711 - RNA, 32 nt, Human
gccuuugauucuggaaaaaugcuuaacaaaaa

SEQ ID NO: 176712 - RNA, 19 nt, Human
gccuuugauuugaguggga

SEQ ID NO: 176713 - RNA, 32 nt, Human
gccuuugcaaaccugccuguuggcauauugaa

SEQ ID NO: 176714 - RNA, 32 nt, Human
gccuuugcaauaccugcauccccagcacuggu

SEQ ID NO: 176715 - RNA, 32 nt, Human
gccuuugcauucucuauagccucugcagagag

SEQ ID NO: 176716 - RNA, 32 nt, Human
gccuuugccacaaggucaaaagcacaaagggg

SEQ ID NO: 176717 - RNA, 22 nt, Human
gccuuugccagcagagccaggg

SEQ ID NO: 176718 - RNA, 32 nt, Human
gccuuugcccacucggggagcagaucaugcau

SEQ ID NO: 176719 - RNA, 32 nt, Human
gccuuugcccugauccaaauguuagcacuugc

SEQ ID NO: 176720 - RNA, 32 nt, Human
gccuuugccugggaacugguccuuguuugccg

SEQ ID NO: 176721 - RNA, 32 nt, Human
gccuuugccuggggaucacuccccaaccacca

SEQ ID NO: 176722 - RNA, 32 nt, Human
gccuuugcuaucucgccgucgcccgcccacgc

SEQ ID NO: 176723 - RNA, 32 nt, Human
gccuuugcucagagaggagcugccuuaggagu

SEQ ID NO: 176724 - RNA, 32 nt, Human
gccuuugcucuucuuccuucuuccugccacac

SEQ ID NO: 176725 - RNA, 32 nt, Human
gccuuugcuuguucacugcagucuuaagaaag

SEQ ID NO: 176726 - RNA, 32 nt, Human
gccuuuggaacauguuccugcccagcuuucca

SEQ ID NO: 176727 - RNA, 32 nt, Human
gccuuuggaugaccagaacaagguucccucug

SEQ ID NO: 176728 - RNA, 32 nt, Human
gccuuuggcacgcgcuacacccuuuugcuuug

SEQ ID NO: 176729 - RNA, 32 nt, Human
gcgggccucugggcagaggaugcaauggcacg

SEQ ID NO: 176730 - RNA, 32 nt, Human
gcgggccugcucccagcucugccuccugcccg

SEQ ID NO: 176731 - RNA, 32 nt, Human
gcgggccuggagacccagagcgagacggccua

SEQ ID NO: 176732 - RNA, 19 nt, Human
gcgggccuggcucaggcgg

SEQ ID NO: 176733 - RNA, 32 nt, Human
gcgggccuguggucccagcugcucgggagguu

SEQ ID NO: 176734 - RNA, 32 nt, Human
gcgggccuuuggugggugagcgggacugugug

SEQ ID NO: 176735 - RNA, 32 nt, Human
gcgggcgagggcccuguguggaccaccuccac

SEQ ID NO: 176736 - RNA, 32 nt, Human
gcgggcgaggugcguuccccagccugguuugc

SEQ ID NO: 176737 - RNA, 32 nt, Human
gcgggcgcaagggggcgggcgcugccguacuc

SEQ ID NO: 176738 - RNA, 32 nt, Human
gcgggcgcacacuguauguaccuauaauaaac

SEQ ID NO: 176739 - RNA, 32 nt, Human
gcgggcgccacagcggaaucagcgguuccgug

SEQ ID NO: 176740 - RNA, 32 nt, Human
gcgggcgccauggaggagggcuccagcucgcc

SEQ ID NO: 176741 - RNA, 18 nt, Human
gcgggcgccccgcagccg

SEQ ID NO: 176742 - RNA, 32 nt, Human
gcgggcgccgagcucccgccauggcccggaac

SEQ ID NO: 176743 - RNA, 21 nt, Human
gcgggcgccgcgucggcgcgg

SEQ ID NO: 176744 - RNA, 32 nt, Human
gcgggcgccggggcuucugggcuccgggcacu

SEQ ID NO: 176745 - RNA, 32 nt, Human
gcgggcgccuguaauaucagcuacuugggaga

SEQ ID NO: 176746 - RNA, 32 nt, Human
gcgggcgccuguaaucacagcuacuugggagg

SEQ ID NO: 176747 - RNA, 32 nt, Human
gcgggcgccuguaauccaagcuacuggggagg

SEQ ID NO: 176748 - RNA, 32 nt, Human
gcgggcgccuguaaucccagcuacucgggaag

SEQ ID NO: 176749 - RNA, 32 nt, Human
gcgggcgccuguaaucccagcuacucgggagg

SEQ ID NO: 176750 - RNA, 32 nt, Human
gcgggcgccuguaaucccagcuacuugggaag

SEQ ID NO: 176751 - RNA, 32 nt, Human
gcgggcgccuguaaucccagcuacuugggagg

SEQ ID NO: 176752 - RNA, 32 nt, Human
gcgggcgccuguaaucccagcuacuugggugg

SEQ ID NO: 176753 - RNA, 32 nt, Human
gcgggcgccuguaaucccagcugcuggggaag

SEQ ID NO: 176754 - RNA, 32 nt, Human
gcgggcgcgagggggaggcacguggccccgcu

SEQ ID NO: 176755 - RNA, 32 nt, Human
gcgggcgcugguaaucccagcuacucaggugg

SEQ ID NO: 176756 - RNA, 32 nt, Human
gcgggcggacggcacagagggagggagcgagc

SEQ ID NO: 176757 - RNA, 32 nt, Human
gcgggcggaggaacuacaauucccagcgugac

SEQ ID NO: 176758 - RNA, 22 nt, Human
gcgggcggaggggacccggggc

SEQ ID NO: 176759 - RNA, 32 nt, Human
gcgggcggaggugcuuguuccaccggcacucc

SEQ ID NO: 176760 - RNA, 32 nt, Human
gcgggcggcagcaugucgguggcggggcugaa

SEQ ID NO: 176761 - RNA, 32 nt, Human
gcgggcggccagcgaagguggcgaaggcuccc

SEQ ID NO: 176762 - RNA, 32 nt, Human
gcgggcggcccugaagccucaggagcagcccc

SEQ ID NO: 176763 - RNA, 32 nt, Human
gcgggcggccgaguuuuccaagagauaacuuc

SEQ ID NO: 176764 - RNA, 32 nt, Human
gcgggcggcgacauggaggacggcgugcucaa

SEQ ID NO: 176765 - RNA, 32 nt, Human
gcgggcggcggcggaggaggagacugaggagc

SEQ ID NO: 176766 - RNA, 32 nt, Human
gcgggcggcggcggaggcugcgggagucgcug

SEQ ID NO: 176767 - RNA, 32 nt, Human
gcgggcggcggcggcccggaggagaacgggcg

SEQ ID NO: 176768 - RNA, 32 nt, Human
gcgggcggcgggaugagagggagccaucgggc

SEQ ID NO: 176769 - RNA, 32 nt, Human
gcgggcggcgggcggcaaaggagcagccauga

SEQ ID NO: 176770 - RNA, 32 nt, Human
gcgggcggcugggucugugcauuucugguugc

SEQ ID NO: 176771 - RNA, 32 nt, Human
gcgggcgggagagaggaagagaggggagcgcg

SEQ ID NO: 176772 - RNA, 32 nt, Human
gcgggcgggaggcuagcuguugucgugguugc

SEQ ID NO: 176773 - RNA, 32 nt, Human
gcgggcgggcagcagcugcaggaaggcucuga

SEQ ID NO: 176774 - RNA, 32 nt, Human
gcgggcgggccuggggcacuccgucgccuuug

SEQ ID NO: 176775 - RNA, 32 nt, Human
gcgggcggggcgcagagccaggcagcgcaggu

SEQ ID NO: 176776 - RNA, 32 nt, Human
gcgggcggggcggagcggagggccagcgggcc

SEQ ID NO: 176777 - RNA, 32 nt, Human
gcgggcggggcggccgcugccuccccgggacg

SEQ ID NO: 176778 - RNA, 32 nt, Human
gcgggcgggggugggagggccauuuugucacu

SEQ ID NO: 176779 - RNA, 32 nt, Human
gcgggcgugcaggacgccagagcugggucaga

SEQ ID NO: 176780 - RNA, 32 nt, Human
gcgggcguggguggaacagagcggccaggagu

SEQ ID NO: 176781 - RNA, 32 nt, Human
gcgggcucacgcaauccuccugccacagcuuc

SEQ ID NO: 176782 - RNA, 21 nt, Human
gcgggcucagggucugugagg

SEQ ID NO: 176783 - RNA, 32 nt, Human
gcgggcuccagggagaccugggugggcagcgu

SEQ ID NO: 176784 - RNA, 32 nt, Human
gcgggcucccacccucugcuccuggccuuggg

SEQ ID NO: 176785 - RNA, 21 nt, Human
gcgggcucccgcugcuggggg

SEQ ID NO: 176786 - RNA, 18 nt, Human
gcgggcuccgcgcagccg

SEQ ID NO: 176787 - RNA, 32 nt, Human
gcgggcuccguggaagcguggccggcagcguc

SEQ ID NO: 176788 - RNA, 20 nt, Human
gcgggcuccucagcuggggg

SEQ ID NO: 176789 - RNA, 23 nt, Human
gcgggcuccuggagccuggagga

SEQ ID NO: 176790 - RNA, 32 nt, Human
gcgggcuccuggcaaggcauucgcuccugagc

SEQ ID NO: 176791 - RNA, 32 nt, Human
gcgggcugaugucuucuugggggcagaccaga

SEQ ID NO: 176792 - RNA, 32 nt, Human
gcgggcugcccaggcagugcagagcggagaga

SEQ ID NO: 176793 - RNA, 32 nt, Human
gcgggcuggcaggcgggggaggcugcaggcuc

SEQ ID NO: 176794 - RNA, 32 nt, Human
gcgggcugggaaggucuccuccccucaccaca

SEQ ID NO: 176795 - RNA, 32 nt, Human
gcgggcugggaggcgcuguggauggcagcggg

SEQ ID NO: 176796 - RNA, 32 nt, Human
gcgggcugggcugggcccgggauggcgguggc

SEQ ID NO: 176797 - RNA, 32 nt, Human
gcgggcuguggcugcggagguugaggggcguc

SEQ ID NO: 176798 - RNA, 32 nt, Human
gcgggcuucauggccuucuccuccaggaagcu

SEQ ID NO: 176799 - RNA, 32 nt, Human
gcgggcuugcagcugcggcaagugcuggcggc

SEQ ID NO: 176800 - RNA, 32 nt, Human
gcgggcuuggaacccggugcucccucugucau

SEQ ID NO: 176801 - RNA, 32 nt, Human
gcgggcuuguuggcucgugccuguaaucccag

SEQ ID NO: 176802 - RNA, 32 nt, Human
gcggggaagauggcggaugacaaggauucucu

SEQ ID NO: 176803 - RNA, 32 nt, Human
gcggggaagcaaagcacaggagcgcuguggug

SEQ ID NO: 176804 - RNA, 32 nt, Human
gcggggacaacaaagaguucuucucugggaaa

SEQ ID NO: 176805 - RNA, 32 nt, Human
gcggggacaaguccguugaggcugccaggcga

SEQ ID NO: 176806 - RNA, 32 nt, Human
gcggggacacaccuguguccuccucaccccac

SEQ ID NO: 176807 - RNA, 32 nt, Human
gcggggacagggaaggaggaagaagcuucgag

SEQ ID NO: 176808 - RNA, 32 nt, Human
gcggggaccaugcugccuucucugggcucacg

SEQ ID NO: 176809 - RNA, 18 nt, Human
gcggggacgagcucgggu

SEQ ID NO: 176810 - RNA, 22 nt, Human
gcggggacuuccaggcacuccc

SEQ ID NO: 176811 - RNA, 32 nt, Human
gcggggagagagaaucugaacuuucagcugua

SEQ ID NO: 176812 - RNA, 32 nt, Human
gcggggagagagagggauagaaaacaagcgca

SEQ ID NO: 176813 - RNA, 21 nt, Human
gcggggagagauuggcugcgg

SEQ ID NO: 176814 - RNA, 18 nt, Human
gcggggagcauggcucag

SEQ ID NO: 176815 - RNA, 32 nt, Human
gcggggagccuaggaccuggagcgagagccgc

SEQ ID NO: 176816 - RNA, 32 nt, Human
gcggggagccugggaccaggagcgagagccgc

SEQ ID NO: 176817 - RNA, 19 nt, Human
gcggggagcucgggccccg

SEQ ID NO: 176818 - RNA, 32 nt, Human
gcggggaggaagcaugcucaagcagcccagcg

SEQ ID NO: 176819 - RNA, 32 nt, Human
gcggggaggagcgugcagggaggaggcagccg

SEQ ID NO: 176820 - RNA, 32 nt, Human
gcggggaggaggaggagaaggcggcggcggac

SEQ ID NO: 176821 - RNA, 21 nt, Human
gcggggaggcagagggugcgg

SEQ ID NO: 176822 - RNA, 32 nt, Human
gcggggaggccaugcugcaaagcugccgugau

SEQ ID NO: 176823 - RNA, 32 nt, Human
gcggggaggcggggcgcagggauccggaaaca

SEQ ID NO: 176824 - RNA, 18 nt, Human
gcggggaggcuggggccc

SEQ ID NO: 176825 - RNA, 32 nt, Human
gcggggagggcagaggggucagggcugaggag

SEQ ID NO: 176826 - RNA, 32 nt, Human
gcggggagggcgcggcccuggcucugccaccu

SEQ ID NO: 176827 - RNA, 32 nt, Human
gcggggagggggcgccgcgccgcgggggccau

SEQ ID NO: 176828 - RNA, 32 nt, Human
gcggggaguaugguggggguccuggccauggc

SEQ ID NO: 176829 - RNA, 23 nt, Human
gcggggaguuguugauuugugag

SEQ ID NO: 176830 - RNA, 20 nt, Human
gcggggaucaaauccuggaa

SEQ ID NO: 176831 - RNA, 19 nt, Human
gcggggauugaggcugcgg

SEQ ID NO: 176832 - RNA, 31 nt, Human
gcggggcaagggucucccagcgcgacaggac

SEQ ID NO: 176833 - RNA, 32 nt, Human
gcggggcacagagacagagagcaaggcuguga

SEQ ID NO: 176834 - RNA, 32 nt, Human
gcggggcagacccugagagaugguuggugcca

SEQ ID NO: 176835 - RNA, 18 nt, Human
gcggggcagcggcugcgg

SEQ ID NO: 176836 - RNA, 30 nt, Human
gcggggcagcugcugagggcacagucgccu

SEQ ID NO: 176837 - RNA, 32 nt, Human
gcggggcaggacacacugcugaccucaccacu

SEQ ID NO: 176838 - RNA, 32 nt, Human
gcggggcaggauuccaggcaggagccuugccu

SEQ ID NO: 176839 - RNA, 32 nt, Human
gcggggcaggcagagcgggcgaaggcgcggag

SEQ ID NO: 176840 - RNA, 15 nt, Human
gcggggcaggcgcug

SEQ ID NO: 176841 - RNA, 32 nt, Human
gcggggcagggaggggcaggguguucuagagg

SEQ ID NO: 176842 - RNA, 32 nt, Human
gcggggcagggggcagggagaggagggcggcg

SEQ ID NO: 176843 - RNA, 32 nt, Human
gcggggccaccaugcuccugcccaggccugga

SEQ ID NO: 176844 - RNA, 32 nt, Human
gcggggccacccucuccggcccuucccccagc

SEQ ID NO: 176845 - RNA, 32 nt, Human
gcggggccacugccccgcuugggggaagccga

SEQ ID NO: 176846 - RNA, 32 nt, Human
gcggggccagcaggcugucccagcccucaccc

SEQ ID NO: 176847 - RNA, 32 nt, Human
gcggggccaggggaggggcgggcagguaggug

SEQ ID NO: 176848 - RNA, 32 nt, Human
gcggggccauggcgcggagaccccgggcgccg

SEQ ID NO: 176849 - RNA, 32 nt, Human
gcggggcccacaguaccugccccaccaggaca

SEQ ID NO: 176850 - RNA, 32 nt, Human
gcggggcccagccaccuucgggaguccggguu

SEQ ID NO: 176851 - RNA, 32 nt, Human
gcggggcccaggagcccaccuggccucccuca

SEQ ID NO: 176852 - RNA, 32 nt, Human
gcggggcccaggucccuuugggcccgcggagg

SEQ ID NO: 176853 - RNA, 32 nt, Human
gcggggccccagcccccugagcacccccucac

SEQ ID NO: 176854 - RNA, 32 nt, Human
gcggggcccggcccuggcggcgcggcgcggcg

SEQ ID NO: 176855 - RNA, 19 nt, Human
gcggggcccggcggcgcgg

SEQ ID NO: 176856 - RNA, 32 nt, Human
gcggggcccuccuggcaggguagggaaggagg

SEQ ID NO: 176857 - RNA, 32 nt, Human
gcggggcccucgggagcccaggugcagagcga

SEQ ID NO: 176858 - RNA, 32 nt, Human
gcggggcccugagccucccccugugccagcag

SEQ ID NO: 176859 - RNA, 22 nt, Human
gcggggccgccgccggcugcag

SEQ ID NO: 176860 - RNA, 32 nt, Human
gcggggccggggccggggaggggccaggcccg

SEQ ID NO: 176861 - RNA, 18 nt, Human
gcggggccucugacaccc

SEQ ID NO: 176862 - RNA, 32 nt, Human
gcggggccuggcucugcacacccaggaaaagu

SEQ ID NO: 176863 - RNA, 32 nt, Human
gcggggccuggggcucagaggggugggcuuug

SEQ ID NO: 176864 - RNA, 32 nt, Human
gcggggccuuccugcaaccuuugcggcuccaa

SEQ ID NO: 176865 - RNA, 17 nt, Human
gcggggccuuggcugca

SEQ ID NO: 176866 - RNA, 21 nt, Human
gcggggcgacgcuggcugcag

SEQ ID NO: 176867 - RNA, 19 nt, Human
gcggggcgcgcccgcuccc

SEQ ID NO: 176868 - RNA, 32 nt, Human
gcggggcgggccacagucuccagccugaagcg

SEQ ID NO: 176869 - RNA, 32 nt, Human
gcggggcggggaggggccaggcgggagcgcag

SEQ ID NO: 176870 - RNA, 17 nt, Human
gcggggcggggcagggg

SEQ ID NO: 176871 - RNA, 21 nt, Human
gcggggcgggggcccagggca

SEQ ID NO: 176872 - RNA, 32 nt, Human
gcggggcggggguggaggacgagagagcgguc

SEQ ID NO: 176873 - RNA, 32 nt, Human
gcggggcgucuccagcccccugcccucuccuc

SEQ ID NO: 176874 - RNA, 32 nt, Human
gcggggcucacugccacccucccacaccagac

SEQ ID NO: 176875 - RNA, 32 nt, Human
gcggggcucggaucugaaaggcggccagaucc

SEQ ID NO: 176876 - RNA, 32 nt, Human
gcggggcucugccgauguccucagggcugggc

SEQ ID NO: 176877 - RNA, 32 nt, Human
gcggggcugcagcuuccugcaugaugcugggg

SEQ ID NO: 176878 - RNA, 32 nt, Human
gcggggcugccagagaaccccagaccugcccu

SEQ ID NO: 176879 - RNA, 32 nt, Human
gcggggcuggagaaggccagggccaggagccu

SEQ ID NO: 176880 - RNA, 32 nt, Human
gcggggcugggugggagaugggagggccaacu

SEQ ID NO: 176881 - RNA, 32 nt, Human
gcggggcugucgggguugggaagcacagucug

SEQ ID NO: 176882 - RNA, 16 nt, Human
gcggggcuuccaggcc

SEQ ID NO: 176883 - RNA, 21 nt, Human
gcgggggaacugcccugugga

SEQ ID NO: 176884 - RNA, 32 nt, Human
gcgggggaaggaggagcugcagcuggacugug

SEQ ID NO: 176885 - RNA, 32 nt, Human
gcgggggaaggcgaaaaagaaaaagaaagaag

SEQ ID NO: 176886 - RNA, 24 nt, Human
gcgggggagagaaggagguggccc

SEQ ID NO: 176887 - RNA, 32 nt, Human
gcgggggagaggggagaauggaguagaguccc

SEQ ID NO: 176888 - RNA, 32 nt, Human
gcgggggagaggguaaacuggggcgcgcgggu

SEQ ID NO: 176889 - RNA, 32 nt, Human
gcgggggagauggaguuugcaguuccacuugc

SEQ ID NO: 176890 - RNA, 21 nt, Human
gcgggggagcugcgacgcgca

SEQ ID NO: 176891 - RNA, 32 nt, Human
gcgggggaggcagaggcggaggcggagucaag

SEQ ID NO: 176892 - RNA, 32 nt, Human
gcgggggaggcggcggagagaccccgccagcg

SEQ ID NO: 176893 - RNA, 32 nt, Human
gcgggggaggcucccgcccuccccagucccac

SEQ ID NO: 176894 - RNA, 32 nt, Human
gcgggggagguggaggugcgaguauaaaugau

SEQ ID NO: 176895 - RNA, 32 nt, Human
gcgggggauaggauuuugcaacaaaaagcuga

SEQ ID NO: 176896 - RNA, 20 nt, Human
gcgggggcaccgggccgcgg

SEQ ID NO: 176897 - RNA, 20 nt, Human
gcgggggcacucgcugugga

SEQ ID NO: 176898 - RNA, 17 nt, Human
gcgggggcagcgggcug

SEQ ID NO: 176899 - RNA, 19 nt, Human
gcgggggcaggaggcgcag

SEQ ID NO: 176900 - RNA, 32 nt, Human
gcgggggcagggaccauggcagagcgagaguu

SEQ ID NO: 176901 - RNA, 32 nt, Human
gcgggggcaggggcaggggcagcucuccuuua

SEQ ID NO: 176902 - RNA, 18 nt, Human
gcgggggcaguggaggca

SEQ ID NO: 176903 - RNA, 17 nt, Human
gcgggggccagggcuca

SEQ ID NO: 176904 - RNA, 21 nt, Human
gcgggggccagugaagcucag

SEQ ID NO: 176905 - RNA, 21 nt, Human
gcgggggccaugugggcccag

SEQ ID NO: 176906 - RNA, 17 nt, Human
gcgggggccccagcugc

SEQ ID NO: 176907 - RNA, 32 nt, Human
gcgggggccgauccggcggagagcagagcccg

SEQ ID NO: 176908 - RNA, 19 nt, Human
gcgggggccgaugguggag

SEQ ID NO: 176909 - RNA, 19 nt, Human
gcgggggccgccagccgca

SEQ ID NO: 176910 - RNA, 19 nt, Human
gcgggggccgccgccgcag

SEQ ID NO: 176911 - RNA, 17 nt, Human
gcgggggccgccggcgc

SEQ ID NO: 176912 - RNA, 20 nt, Human
gcgggggccgcggaagcugc

SEQ ID NO: 176913 - RNA, 17 nt, Human
gcgggggccgcggccgc

SEQ ID NO: 176914 - RNA, 18 nt, Human
gcgggggccgcgggacug

SEQ ID NO: 176915 - RNA, 18 nt, Human
gcgggggccgcgugggcg

SEQ ID NO: 176916 - RNA, 17 nt, Human
gcgggggccgcugacag

SEQ ID NO: 176917 - RNA, 19 nt, Human
gcgggggccggcggcgcgg

SEQ ID NO: 176918 - RNA, 18 nt, Human
gcgggggccgggccgcgg

SEQ ID NO: 176919 - RNA, 20 nt, Human
gcgggggccggggaggagcg

SEQ ID NO: 176920 - RNA, 32 nt, Human
gcgggggccguaggaagccaaccuucccugcu

SEQ ID NO: 176921 - RNA, 32 nt, Human
gcgggggccuccugccggcuccacgggcacuu

SEQ ID NO: 176922 - RNA, 19 nt, Human
gcgggggcgacagcggcag

SEQ ID NO: 176923 - RNA, 21 nt, Human
gcgggggcgcgggcacagcag

SEQ ID NO: 176924 - RNA, 17 nt, Human
gcgggggcgcgggcggc

SEQ ID NO: 176925 - RNA, 32 nt, Human
gcgggggcgcugaccucggccuaggaggccca

SEQ ID NO: 176926 - RNA, 20 nt, Human
gcgggggcggcagcugacag

SEQ ID NO: 176927 - RNA, 17 nt, Human
gcgggggcggcggccgc

SEQ ID NO: 176928 - RNA, 19 nt, Human
gcgggggcggcggggccag

SEQ ID NO: 176929 - RNA, 32 nt, Human
gcgggggcgggacuuccgccguccuccuggug

SEQ ID NO: 176930 - RNA, 18 nt, Human
gcgggggcggggcggcag

SEQ ID NO: 176931 - RNA, 17 nt, Human
gcgggggcggggcugca

SEQ ID NO: 176932 - RNA, 20 nt, Human
gcgggggcgugccggcccag

SEQ ID NO: 176933 - RNA, 32 nt, Human
gcgggggcuacaccaaccggaccuucgaguuu

SEQ ID NO: 176934 - RNA, 19 nt, Human
gcgggggcucacgccugua

SEQ ID NO: 176935 - RNA, 22 nt, Human
gcgggggcucacgccuguaauc

SEQ ID NO: 176936 - RNA, 32 nt, Human
gcgggggcucccggggucaguguucaagaagg

SEQ ID NO: 176937 - RNA, 19 nt, Human
gcgggggcucucggcccag

SEQ ID NO: 176938 - RNA, 18 nt, Human
gcgggggcucuggcucag

SEQ ID NO: 176939 - RNA, 21 nt, Human
gcgggggcugcacggcgccag

SEQ ID NO: 176940 - RNA, 21 nt, Human
gcgggggcugcacgugcgcag

SEQ ID NO: 176941 - RNA, 19 nt, Human
gcgggggcugccgcugcag

SEQ ID NO: 176942 - RNA, 21 nt, Human
gcgggggcugcuacacuacag

SEQ ID NO: 176943 - RNA, 20 nt, Human
gcgggggcuggaggcagcag

SEQ ID NO: 176944 - RNA, 18 nt, Human
gcgggggcuggggcgcgg

SEQ ID NO: 176945 - RNA, 32 nt, Human
gcgggggcuuucucauggcuguccuucagggu

SEQ ID NO: 176946 - RNA, 20 nt, Human
gcggggggccgcggcugcgg

SEQ ID NO: 176947 - RNA, 20 nt, Human
gcggggggcuggggaugcag

SEQ ID NO: 176948 - RNA, 20 nt, Human
gcggggguccuacagcgcag

SEQ ID NO: 176949 - RNA, 32 nt, Human
gcgggggucugcagaggccucaguguggcugu

SEQ ID NO: 176950 - RNA, 18 nt, Human
gcgggggugagauggcug

SEQ ID NO: 176951 - RNA, 32 nt, Human
gcgggggugaggacugaccacagauucccugg

SEQ ID NO: 176952 - RNA, 19 nt, Human
gcggggguggcagcagcag

SEQ ID NO: 176953 - RNA, 32 nt, Human
gcggggguggcugccauuuccagcaugcaggu

SEQ ID NO: 176954 - RNA, 17 nt, Human
gcggggguggggcugca

SEQ ID NO: 176955 - RNA, 22 nt, Human
gcggggguggggucagugguga

SEQ ID NO: 176956 - RNA, 21 nt, Human
gcggggguggugcuggcucag

SEQ ID NO: 176957 - RNA, 21 nt, Human
gcggggguggugucacugcag

SEQ ID NO: 176958 - RNA, 32 nt, Human
gcgggggugucugaggccgcacugucagcugg

SEQ ID NO: 176959 - RNA, 32 nt, Human
gcgggggugugcaggccaggguucgcgcgggc

SEQ ID NO: 176960 - RNA, 21 nt, Human
gcggggguucgcuggcugcgg

SEQ ID NO: 176961 - RNA, 20 nt, Human
gcggggguuugccaugguga

SEQ ID NO: 176962 - RNA, 32 nt, Human
gcgggguaggagaccuggagcuggagaacccg

SEQ ID NO: 176963 - RNA, 32 nt, Human
gcgggguaggagaggguucugagaggaggcag

SEQ ID NO: 176964 - RNA, 32 nt, Human
gcgggguccagcugcuccaaucccuccuccuc

SEQ ID NO: 176965 - RNA, 32 nt, Human
gcggggugaugaucucuagcagcuguuggaua

SEQ ID NO: 176966 - RNA, 23 nt, Human
gcggggugcucacgccuguaauc

SEQ ID NO: 176967 - RNA, 32 nt, Human
gcggggugcucacgccuguaauccuagcacuu

SEQ ID NO: 176968 - RNA, 32 nt, Human
gcgggguggaguucagccuacucuuucuuaga

SEQ ID NO: 176969 - RNA, 32 nt, Human
gcgggguggaucacuugaggucagggguuuga

SEQ ID NO: 176970 - RNA, 24 nt, Human
gcgggguggcucacgccuguaauc

SEQ ID NO: 176971 - RNA, 24 nt, Human
gcgggguggcucaugccuguaauu

SEQ ID NO: 176972 - RNA, 32 nt, Human
gcgggguggggaccccaaggcuuucuggggca

SEQ ID NO: 176973 - RNA, 32 nt, Human
gcgggguuuagccuguggugggcgcugcgggu

SEQ ID NO: 176974 - RNA, 32 nt, Human
gcggguaccguaauccuagcuacucgggagac

SEQ ID NO: 176975 - RNA, 31 nt, Human
gcggguagcagugcugggccugugucuugag

SEQ ID NO: 176976 - RNA, 32 nt, Human
gcggguaugggugggauuccugguggacaggg

SEQ ID NO: 176977 - RNA, 21 nt, Human
gcgggucaagugacccagccc

SEQ ID NO: 176978 - RNA, 32 nt, Human
gcgggucacucaauccuggccugggggagaau

SEQ ID NO: 176979 - RNA, 32 nt, Human
gcgggucccagaggcauggguguccaguccaa

SEQ ID NO: 176980 - RNA, 32 nt, Human
gcggguccccuucggcccuggagccgggguca

SEQ ID NO: 176981 - RNA, 32 nt, Human
gcgggucccuggcugcuguggccuccccugac

SEQ ID NO: 176982 - RNA, 32 nt, Human
gcggguccucagcugcucccacacuugugcca

SEQ ID NO: 176983 - RNA, 22 nt, Human
gcgggucgcccccgccccgacc

SEQ ID NO: 176984 - RNA, 32 nt, Human
gcgggucgggcuucgaggucagcugguccgca

SEQ ID NO: 176985 - RNA, 32 nt, Human
gcgggucuccugguccuucugccaucaugccg

SEQ ID NO: 176986 - RNA, 32 nt, Human
gcgggucucggaagguuccgaccucaguaaag

SEQ ID NO: 176987 - RNA, 20 nt, Human
gcgggucugagaccuccggg

SEQ ID NO: 176988 - RNA, 24 nt, Human
gcgggucugagggaugaggagggg

SEQ ID NO: 176989 - RNA, 32 nt, Human
gcgggucuugucgggccuccagccuggacuuc

SEQ ID NO: 176990 - RNA, 32 nt, Human
gcgggugaagugagagguaacggggcuccggg

SEQ ID NO: 176991 - RNA, 32 nt, Human
gcgggugacucaggcagguaaucccagaacuu

SEQ ID NO: 176992 - RNA, 32 nt, Human
gcgggugagaagcaggaaggaggcugaugaua

SEQ ID NO: 176993 - RNA, 32 nt, Human
gcgggugagccccaggcuggcagcuagcaaga

SEQ ID NO: 176994 - RNA, 21 nt, Human
gcgggugagccgcggcugcag

SEQ ID NO: 176995 - RNA, 32 nt, Human
gcgggugagccgcggcugcagaggccugagcg

SEQ ID NO: 176996 - RNA, 32 nt, Human
gcgggugcaccguggagucauuccaagacucc

SEQ ID NO: 176997 - RNA, 32 nt, Human
gcgggugccagggacuuggagguggaggggac

SEQ ID NO: 176998 - RNA, 32 nt, Human
gcgggugccccagagacacagacaggcugcgu

SEQ ID NO: 176999 - RNA, 32 nt, Human
gcgggugccuguaaucagcuacucgggaggcu

SEQ ID NO: 177000 - RNA, 32 nt, Human
gcgggugccuguaaucccagcuacucgggaga

SEQ ID NO: 177001 - RNA, 32 nt, Human
gcgggugccuguaaucccagcuacucgggagg

SEQ ID NO: 177002 - RNA, 32 nt, Human
gcgggugccuguaaucccagcuacuggggagg

SEQ ID NO: 177003 - RNA, 32 nt, Human
gcgggugccuguaaucccagcuacuugggagg

SEQ ID NO: 177004 - RNA, 32 nt, Human
gcgggugccuguaaucucagcuacucaggaga

SEQ ID NO: 177005 - RNA, 32 nt, Human
gcgggugccuguaaucucagcuacuugagagg

SEQ ID NO: 177006 - RNA, 32 nt, Human
gcgggugccuguagucccagccacuugggagu

SEQ ID NO: 177007 - RNA, 32 nt, Human
gcgggugccuguagucccagcuacucgggagg

SEQ ID NO: 177008 - RNA, 32 nt, Human
gcgggugccuguagucccagcuauuugggagg

SEQ ID NO: 177009 - RNA, 32 nt, Human
gcgggugccuguagucccagcugcucgggagg

SEQ ID NO: 177010 - RNA, 32 nt, Human
gcgggugcgagggcgcgagggaagggaggcgg

SEQ ID NO: 177011 - RNA, 22 nt, Human
gcgggugcggcggggccgagcc

SEQ ID NO: 177012 - RNA, 32 nt, Human
gcgggugcguggucgugcggcaagugagcgau

SEQ ID NO: 177013 - RNA, 32 nt, Human
gcggguggacguggagccacaguuccuccuuu

SEQ ID NO: 177014 - RNA, 32 nt, Human
gcggguggagcagcgcgagcccgccucgcuga

SEQ ID NO: 177015 - RNA, 32 nt, Human
gcggguggaucacaaggucaagagauagagac

SEQ ID NO: 177016 - RNA, 32 nt, Human
gcgggugggaagggaugggacacagcuucugg

SEQ ID NO: 177017 - RNA, 32 nt, Human
gcgggugggaggcggggaggagcagcgggaag

SEQ ID NO: 177018 - RNA, 32 nt, Human
gcgggugggaggugggaguggcugcagggacc

SEQ ID NO: 177019 - RNA, 32 nt, Human
gcgggugggcagggaaugggagaggggaaguc

SEQ ID NO: 177020 - RNA, 32 nt, Human
gcggguggggccccuccuccuccugagcugua

SEQ ID NO: 177021 - RNA, 32 nt, Human
gcggguggggugcuugcugugugaccuugggu

SEQ ID NO: 177022 - RNA, 31 nt, Human
gcgggugggucacaugagguugggaauucga

SEQ ID NO: 177023 - RNA, 32 nt, Human
gcggguguagaaggagcuaaagagaucugguu

SEQ ID NO: 177024 - RNA, 32 nt, Human
gcggguuacuuucacauacagcccucccccag

SEQ ID NO: 177025 - RNA, 32 nt, Human
gcggguuauggcggcggcggcagugagagcug

SEQ ID NO: 177026 - RNA, 32 nt, Human
gcggguucacgucccaccucaggccgcaucuu

SEQ ID NO: 177027 - RNA, 32 nt, Human
gcggguucugcacucaugagguuuuggcagua

SEQ ID NO: 177028 - RNA, 32 nt, Human
gcggguugauuuucucacuuuggacugguuuu

SEQ ID NO: 177029 - RNA, 32 nt, Human
gcggguuuguuuuggaaagggcugcuauuguc

SEQ ID NO: 177030 - RNA, 32 nt, Human
gcgguaaaaccucuaccaccccaaaccugguc

SEQ ID NO: 177031 - RNA, 32 nt, Human
gcgguaaagaggaggccugaggagcugggcgg

SEQ ID NO: 177032 - RNA, 32 nt, Human
gcgguaccuuuccuacugucuuuucuuugacu

SEQ ID NO: 177033 - RNA, 32 nt, Human
gcgguacucacguggcggaagggaaacugcau

SEQ ID NO: 177034 - RNA, 19 nt, Human
gcgguacuucucugcaucu

SEQ ID NO: 177035 - RNA, 32 nt, Human
gcgguacuuggacagcgguucuugagcucucg

SEQ ID NO: 177036 - RNA, 32 nt, Human
gcgguacuuucucuugguuuccgccuuccagg

SEQ ID NO: 177037 - RNA, 32 nt, Human
gcgguagcagcggucgaaggggaccaagcucc

SEQ ID NO: 177038 - RNA, 31 nt, Human
gcgguagcuacuuguuuacaugcagauuuuu

SEQ ID NO: 177039 - RNA, 22 nt, Human
gcgguagcucacgccuguaauc

SEQ ID NO: 177040 - RNA, 32 nt, Human
gcgguaggaagggagagggggagcuguuuguc

SEQ ID NO: 177041 - RNA, 32 nt, Human
gcgguaggcagcagcaggcugaagggaucaug

SEQ ID NO: 177042 - RNA, 21 nt, Human
gcgguaggcucugucugcgug

SEQ ID NO: 177043 - RNA, 32 nt, Human
gcgguagguagaauaaugcccccaggccccag

SEQ ID NO: 177044 - RNA, 21 nt, Human
gcgguagucacgccuguaauc

SEQ ID NO: 177045 - RNA, 19 nt, Human
gcggucaccgccgccgugg

SEQ ID NO: 177046 - RNA, 32 nt, Human
gcggucacucaggccucugcagaagccaaggg

SEQ ID NO: 177047 - RNA, 32 nt, Human
gcggucaguggaggcccuuccacccucgccgc

SEQ ID NO: 177048 - RNA, 32 nt, Human
gcggucaugccacugcacuccagccuggguga

SEQ ID NO: 177049 - RNA, 32 nt, Human
gcgguccagaagcuugcggugagugugugcca

SEQ ID NO: 177050 - RNA, 32 nt, Human
gcgguccaggagaaucaggcagucuguggccu

SEQ ID NO: 177051 - RNA, 32 nt, Human
gcgguccccagcugccagggugcuuggggagg

SEQ ID NO: 177052 - RNA, 23 nt, Human
gcgguccccgcgcacagcgcccg

SEQ ID NO: 177053 - RNA, 32 nt, Human
gcgguccccuuugccgggauguuuccauugcu

SEQ ID NO: 177054 - RNA, 21 nt, Human
gcggucccgcgcacugagccc

SEQ ID NO: 177055 - RNA, 32 nt, Human
gcggucccggcccagccggcucuccuggccuc

SEQ ID NO: 177056 - RNA, 32 nt, Human
gcggucccuccagaggauuugagggacagggu

SEQ ID NO: 177057 - RNA, 32 nt, Human
gcggucccucccccucacguucucucuuccuc

SEQ ID NO: 177058 - RNA, 32 nt, Human
gcgguccgaacgugcccccaccccugaccuca

SEQ ID NO: 177059 - RNA, 32 nt, Human
gcgguccgcgagccaccgaggcccagcucagu

SEQ ID NO: 177060 - RNA, 32 nt, Human
gcgguccgcggcggagguucaugugggggugc

SEQ ID NO: 177061 - RNA, 32 nt, Human
gcgguccugcagcagccaucuuggcugccaac

SEQ ID NO: 177062 - RNA, 32 nt, Human
gcgguccuggcaggaaggccggccagugugca

SEQ ID NO: 177063 - RNA, 32 nt, Human
gcggucgcaccucuucuguccaggccucggcc

SEQ ID NO: 177064 - RNA, 32 nt, Human
gcggucgccgccuugcagacccucucucgagg

SEQ ID NO: 177065 - RNA, 32 nt, Human
gcggucggagcggggugacgaggaccucaugc

SEQ ID NO: 177066 - RNA, 32 nt, Human
gcggucgggugaggcgggacggaguuggggcc

SEQ ID NO: 177067 - RNA, 32 nt, Human
gcggucggugggcuccggcgggcucagcgguc

SEQ ID NO: 177068 - RNA, 21 nt, Human
gcggucgucacgccuguaauc

SEQ ID NO: 177069 - RNA, 32 nt, Human
gcggucuagaggagucccaggagcagccagga

SEQ ID NO: 177070 - RNA, 32 nt, Human
gcggucuagcgggcuguuaggcucccucgccc

SEQ ID NO: 177071 - RNA, 19 nt, Human
gcggucuccccagccugcc

SEQ ID NO: 177072 - RNA, 32 nt, Human
gcggucuccuaccugcggaugcagcagaagcu

SEQ ID NO: 177073 - RNA, 32 nt, Human
gcggucucuccuccccuuucccuccaggccca

SEQ ID NO: 177074 - RNA, 32 nt, Human
gcggucucuccuccuuucagccuccucuuucc

SEQ ID NO: 177075 - RNA, 32 nt, Human
gcggucucuggccagcacgcuggacugcgaga

SEQ ID NO: 177076 - RNA, 32 nt, Human
gcggucugcccuuuugaagcaggacuggcuca

SEQ ID NO: 177077 - RNA, 32 nt, Human
gcggucuucccgcauccucuucugccgucucc

SEQ ID NO: 177078 - RNA, 32 nt, Human
gcggucuugccuucccccuccccacaggcucu

SEQ ID NO: 177079 - RNA, 32 nt, Human
gcggugaagguccugggugagguaggggugga

SEQ ID NO: 177080 - RNA, 19 nt, Human
gcggugacaccugcucccc

SEQ ID NO: 177081 - RNA, 32 nt, Human
gcggugaccagcuguggucaggagagccucag

SEQ ID NO: 177082 - RNA, 32 nt, Human
gcggugacccuugagccggucuugccccucag

SEQ ID NO: 177083 - RNA, 16 nt, Human
gcggugaccucucgaa

SEQ ID NO: 177084 - RNA, 22 nt, Human
gcggugacucacaccuguaauc

SEQ ID NO: 177085 - RNA, 22 nt, Human
gcggugacucacgccuauaauc

SEQ ID NO: 177086 - RNA, 22 nt, Human
gcggugacucaugccuguaauc

SEQ ID NO: 177087 - RNA, 22 nt, Human
gcggugacucgcaccuguaauc

SEQ ID NO: 177088 - RNA, 32 nt, Human
gcggugacugcacuuucccuggaguggaagcu

SEQ ID NO: 177089 - RNA, 32 nt, Human
gcggugagcauuccgggaaccaucucugggcu

SEQ ID NO: 177090 - RNA, 32 nt, Human
gcggugaggccuggucuccggcugccagacca

SEQ ID NO: 177091 - RNA, 22 nt, Human
gcggugauucacgccuguaauc

SEQ ID NO: 177092 - RNA, 32 nt, Human
gcggugauugugccacugcacuccagccuggg

SEQ ID NO: 177093 - RNA, 32 nt, Human
gcggugcaaugcagcacccacccugcgagccu

SEQ ID NO: 177094 - RNA, 32 nt, Human
gcggugcagauuggaggggugacauuggaagc

SEQ ID NO: 177095 - RNA, 32 nt, Human
gcggugccaggcccagugucccccaggccguc

SEQ ID NO: 177096 - RNA, 19 nt, Human
gcggugcccaccagcuucc

SEQ ID NO: 177097 - RNA, 32 nt, Human
gcggugcccgcuauuucuaccucuuguccaaa

SEQ ID NO: 177098 - RNA, 32 nt, Human
gcggugcccgcuggcccgggguugagacaggc

SEQ ID NO: 177099 - RNA, 32 nt, Human
gcggugccuccuccuccucgccccggcgccgg

SEQ ID NO: 177100 - RNA, 32 nt, Human
gcggugcgacaguccucuucucaggcccucug

SEQ ID NO: 177101 - RNA, 32 nt, Human
gcggugcgacgaaggaguagguggugggaucu

SEQ ID NO: 177102 - RNA, 32 nt, Human
gcggugcgacggggaagcaggagguguggggu

SEQ ID NO: 177103 - RNA, 20 nt, Human
gcggugcgaggggccgagcc

SEQ ID NO: 177104 - RNA, 32 nt, Human
gcggugcgcccacagcugccuggguaaggccc

SEQ ID NO: 177105 - RNA, 32 nt, Human
gcggugcgccugggaggaagggggaggucgga

SEQ ID NO: 177106 - RNA, 32 nt, Human
gcggugcgcugcaggccaucugccggcgcccu

SEQ ID NO: 177107 - RNA, 32 nt, Human
gcggugcggcuguuucacaacacuccuggcca

SEQ ID NO: 177108 - RNA, 20 nt, Human
gcggugcgggcgcgcguggg

SEQ ID NO: 177109 - RNA, 21 nt, Human
gcggugcucacgccuguaauc

SEQ ID NO: 177110 - RNA, 32 nt, Human
gcggugcugcaggaccuggccugguggcauag

SEQ ID NO: 177111 - RNA, 32 nt, Human
gcggugcugccuccacccuccugagccuggag

SEQ ID NO: 177112 - RNA, 32 nt, Human
gcgguggaaguuaagggagucaggggcuaucg

SEQ ID NO: 177113 - RNA, 32 nt, Human
gcgguggagaaaaggcagaaccagaguagaga

SEQ ID NO: 177114 - RNA, 32 nt, Human
gcgguggagaaacugaggcucuccuccagcug

SEQ ID NO: 177115 - RNA, 32 nt, Human
gcgguggagccgcacagcccacccgcaccaaa

SEQ ID NO: 177116 - RNA, 32 nt, Human
gcgguggaggcugagucgcaggacacaugccg

SEQ ID NO: 177117 - RNA, 32 nt, Human
gcgguggaggcuggcgcuaggcggccucagcc

SEQ ID NO: 177118 - RNA, 22 nt, Human
gcgguggaucacgccuguaauc

SEQ ID NO: 177119 - RNA, 32 nt, Human
gcgguggaugccugacuggaagcccgaguggg

SEQ ID NO: 177120 - RNA, 32 nt, Human
gcgguggcaagguuugguuuggugaaaacgaa

SEQ ID NO: 177121 - RNA, 22 nt, Human
gcgguggcacacaccuauaauc

SEQ ID NO: 177122 - RNA, 32 nt, Human
gcgguggcagcagagguggcaggggcggggcg

SEQ ID NO: 177123 - RNA, 22 nt, Human
gcgguggcccacaucuguaauc

SEQ ID NO: 177124 - RNA, 19 nt, Human
gcgguggcggcggcagcgc

SEQ ID NO: 177125 - RNA, 32 nt, Human
gcgguggcgggcggaggcggcgggcgagggcg

SEQ ID NO: 177126 - RNA, 32 nt, Human
gcgguggcgguggcugggcagggcugggcagg

SEQ ID NO: 177127 - RNA, 32 nt, Human
gcgguggcuauaauccuagcacuuugggaggc

SEQ ID NO: 177128 - RNA, 22 nt, Human
gcgguggcucaagcccauaauc

SEQ ID NO: 177129 - RNA, 22 nt, Human
gcgguggcucaagccuguaauc

SEQ ID NO: 177130 - RNA, 22 nt, Human
gcgguggcucacacccguaauc

SEQ ID NO: 177131 - RNA, 22 nt, Human
gcgguggcucacaccuauaauc

SEQ ID NO: 177132 - RNA, 22 nt, Human
gcgguggcucacaccuguaauc

SEQ ID NO: 177133 - RNA, 32 nt, Human
gcgguggcucacaccuguaauuccagcacuuu

SEQ ID NO: 177134 - RNA, 22 nt, Human
gcgguggcucacaccugucauc

SEQ ID NO: 177135 - RNA, 32 nt, Human
gcgguggcucacaccugucaucccagcacuuu

SEQ ID NO: 177136 - RNA, 32 nt, Human
gcgguggcucacaccugucaucccagcaguuu

SEQ ID NO: 177137 - RNA, 22 nt, Human
gcgguggcucacaccugugauc

SEQ ID NO: 177138 - RNA, 21 nt, Human
gcgguggcucacaccuuaauc

SEQ ID NO: 177139 - RNA, 22 nt, Human
gcgguggcucacacuuguaauc

SEQ ID NO: 177140 - RNA, 22 nt, Human
gcgguggcucacaucuguaauc

SEQ ID NO: 177141 - RNA, 22 nt, Human
gcgguggcucaccccuguaauc

SEQ ID NO: 177142 - RNA, 22 nt, Human
gcgguggcucacgccuauaauc

SEQ ID NO: 177143 - RNA, 22 nt, Human
gcgguggcucacgccugcaauc

SEQ ID NO: 177144 - RNA, 22 nt, Human
gcgguggcucacgccugcaguc

SEQ ID NO: 177145 - RNA, 22 nt, Human
gcgguggcucacgccuggaauc

SEQ ID NO: 177146 - RNA, 20 nt, Human
gcgguggcucacgccuguaa

SEQ ID NO: 177147 - RNA, 22 nt, Human
gcgguggcucacgccuguaauc

SEQ ID NO: 177148 - RNA, 32 nt, Human
gcgguggcucacgccuguaauccuagcauuuu

SEQ ID NO: 177149 - RNA, 22 nt, Human
gcgguggcucacgccuguaauu

SEQ ID NO: 177150 - RNA, 22 nt, Human
gcgguggcucacgccuguaguc

SEQ ID NO: 177151 - RNA, 22 nt, Human
gcgguggcucacgucuauaauc

SEQ ID NO: 177152 - RNA, 22 nt, Human
gcgguggcucacgucuguaauc

SEQ ID NO: 177153 - RNA, 22 nt, Human
gcgguggcucacuccuguaauc

SEQ ID NO: 177154 - RNA, 22 nt, Human
gcgguggcucaggccuguaauc

SEQ ID NO: 177155 - RNA, 22 nt, Human
gcgguggcucauaccuauaauc

SEQ ID NO: 177156 - RNA, 22 nt, Human
gcgguggcucauaccuguaauc

SEQ ID NO: 177157 - RNA, 21 nt, Human
gcgguggcucaugccugaauc

SEQ ID NO: 177158 - RNA, 20 nt, Human
gcgguggcucaugccuguaa

SEQ ID NO: 177159 - RNA, 22 nt, Human
gcgguggcucaugccuguaauc

SEQ ID NO: 177160 - RNA, 32 nt, Human
gcgguggcucaugccuguaaucccagcauuuu

SEQ ID NO: 177161 - RNA, 32 nt, Human
gcgguggcucaugccuguaauccuagcauuuu

SEQ ID NO: 177162 - RNA, 22 nt, Human
gcgguggcucaugccuguaauu

SEQ ID NO: 177163 - RNA, 22 nt, Human
gcgguggcugaugccuguaauc

SEQ ID NO: 177164 - RNA, 23 nt, Human
gcgguggcuguccgguuucugcg

SEQ ID NO: 177165 - RNA, 22 nt, Human
gcgguggcuuacaccuguaauc

SEQ ID NO: 177166 - RNA, 32 nt, Human
gcgguggcuuacaccuguaauuccagcacuuu

SEQ ID NO: 177167 - RNA, 22 nt, Human
gcgguggcuuacgccuauaauc

SEQ ID NO: 177168 - RNA, 22 nt, Human
gcgguggcuuacgccuguaauc

SEQ ID NO: 177169 - RNA, 22 nt, Human
gcgguggcuuaugccuguaauc

SEQ ID NO: 177170 - RNA, 32 nt, Human
gcggugggaaaaguugggggagcgcggaggug

SEQ ID NO: 177171 - RNA, 32 nt, Human
gcggugggauuccagcugucugauuaaugaga

SEQ ID NO: 177172 - RNA, 32 nt, Human
gcgguggggagguggcugcgcgguggggaggu

SEQ ID NO: 177173 - RNA, 32 nt, Human
gcgguggggcaguggagguugaggagaaugua

SEQ ID NO: 177174 - RNA, 32 nt, Human
gcgguggggcugccuguccucgggcuacagga

SEQ ID NO: 177175 - RNA, 32 nt, Human
gcgguggggcugggggauuccuuaagugacuu

SEQ ID NO: 177176 - RNA, 32 nt, Human
gcggugggucuccaccacagccacuuugaguc

SEQ ID NO: 177177 - RNA, 32 nt, Human
gcggugggucugcaccuggauuuuggaguccc

SEQ ID NO: 177178 - RNA, 32 nt, Human
gcgguggguugcccaauaaacggcuguggagu

SEQ ID NO: 177179 - RNA, 31 nt, Human
gcggugguagagagagauaaaagguggaguu

SEQ ID NO: 177180 - RNA, 32 nt, Human
gcgguggucuccauucagcaaaaucucaugua

SEQ ID NO: 177181 - RNA, 32 nt, Human
gcgguggugcaaucucagcucacugcaaccuc

SEQ ID NO: 177182 - RNA, 32 nt, Human
gcggugguggaggaggcaaaggccuuggacga

SEQ ID NO: 177183 - RNA, 32 nt, Human
gcggugguggugagccaacacgcccagcacca

SEQ ID NO: 177184 - RNA, 22 nt, Human
gcggugguucacaccuguaauc

SEQ ID NO: 177185 - RNA, 22 nt, Human
gcggugguucacgccuguaauc

SEQ ID NO: 177186 - RNA, 22 nt, Human
gcggugguucaugccuauaauc

SEQ ID NO: 177187 - RNA, 22 nt, Human
gcggugguucaugccuguaauc

SEQ ID NO: 177188 - RNA, 32 nt, Human
gcggugguucccaggcccgcccccucucgcag

SEQ ID NO: 177189 - RNA, 32 nt, Human
gcgguguaaaauguuuacugugguguacacug

SEQ ID NO: 177190 - RNA, 32 nt, Human
gcgguguccucggggugcgagcugcacgugga

SEQ ID NO: 177191 - RNA, 22 nt, Human
gcggugucucacaccuguaauc

SEQ ID NO: 177192 - RNA, 32 nt, Human
gcggugucuggugcgucagccugcugcuucgu

SEQ ID NO: 177193 - RNA, 32 nt, Human
gcggugugagagggagggcacacguuguacgu

SEQ ID NO: 177194 - RNA, 32 nt, Human
gcgguguggagcggagagaauacucgaagggc

SEQ ID NO: 177195 - RNA, 32 nt, Human
gcgguguuucugagaggaaugcgcagcugaag

SEQ ID NO: 177196 - RNA, 32 nt, Human
gcgguuccagcagcagcaguagcuauggcagu

SEQ ID NO: 177197 - RNA, 32 nt, Human
gcgguuccgccuguaaucccagcacuuuggga

SEQ ID NO: 177198 - RNA, 32 nt, Human
gcgguuccuccaccgccuccgccgccgcaucc

SEQ ID NO: 177199 - RNA, 32 nt, Human
gcgguuccuccuggccccaaggcaccgcugca

SEQ ID NO: 177200 - RNA, 32 nt, Human
gcgguuccuccuggcccuguuaaugucggggc

SEQ ID NO: 177201 - RNA, 32 nt, Human
gcgguuccuggacuaguccggcucguucaaga

SEQ ID NO: 177202 - RNA, 21 nt, Human
gcgguuccugugcagaugcug

SEQ ID NO: 177203 - RNA, 32 nt, Human
gcgguucuacugccucagccuccugaguagcu

SEQ ID NO: 177204 - RNA, 32 nt, Human
gcgguugaaggguggggaauacgacuaaaaac

SEQ ID NO: 177205 - RNA, 32 nt, Human
gcgguugaauugccauggcaaugcggugggcg

SEQ ID NO: 177206 - RNA, 32 nt, Human
gcgguugcagugagcacagaucaugccacugc

SEQ ID NO: 177207 - RNA, 32 nt, Human
gcgguugcagugagccaagaucgccccacugc

SEQ ID NO: 177208 - RNA, 22 nt, Human
gcgguugcucacgccuguaauc

SEQ ID NO: 177209 - RNA, 32 nt, Human
gcgguugcucucugucaccgcuggcagucugc

SEQ ID NO: 177210 - RNA, 32 nt, Human
gcgguuggagcggcugucgccauguugucggu

SEQ ID NO: 177211 - RNA, 32 nt, Human
gcgguugggaccgcggcugagcuuuuuccggg

SEQ ID NO: 177212 - RNA, 32 nt, Human
gcgguugggagcggguucuggagcucacgccu

SEQ ID NO: 177213 - RNA, 32 nt, Human
gcgguuguggugagcugugauugugccauugc

SEQ ID NO: 177214 - RNA, 32 nt, Human
gcgguuuccgggagucaaggacagguugaugu

SEQ ID NO: 177215 - RNA, 32 nt, Human
gcgguuuccuugcccggggccgcgggaaggcc

SEQ ID NO: 177216 - RNA, 32 nt, Human
gcgguuucuccucucugaaacggggaugcuga

SEQ ID NO: 177217 - RNA, 32 nt, Human
gcgguuucuuucuuuccgcgccgauagcgcuc

SEQ ID NO: 177218 - RNA, 32 nt, Human
gcgguuugccugugccuggacaaugaggcgga

SEQ ID NO: 177219 - RNA, 32 nt, Human
gcguaaaagccagggagagauccagagaguuu

SEQ ID NO: 177220 - RNA, 32 nt, Human
gcguaaggacgaacuccuccagcaagcucgca

SEQ ID NO: 177221 - RNA, 22 nt, Human
gcguaauagugacuggcugggg

SEQ ID NO: 177222 - RNA, 32 nt, Human
gcguaaugcucagcuuuuuguaaagaaauauu

SEQ ID NO: 177223 - RNA, 32 nt, Human
gcguacaaacgcuguagacaccuucaccucca

SEQ ID NO: 177224 - RNA, 32 nt, Human
gcguacacugacuuuggggccuggguguuggg

SEQ ID NO: 177225 - RNA, 32 nt, Human
gcguacacuugcauccugaaguggguucggga

SEQ ID NO: 177226 - RNA, 32 nt, Human
gcguaccacacuccagccugggugacagagcg

SEQ ID NO: 177227 - RNA, 32 nt, Human
gcguaccacgccugguucuguacauguggaaa

SEQ ID NO: 177228 - RNA, 32 nt, Human
gcguaccgguagucccagcuacucaggaggcu

SEQ ID NO: 177229 - RNA, 32 nt, Human
gcguacgcugguuggcauuugcucugagcauc

SEQ ID NO: 177230 - RNA, 32 nt, Human
gcguagaaaccucaaaugaaaaaccuaacauc

SEQ ID NO: 177231 - RNA, 32 nt, Human
gcguagacuugagcuagacuacccagguugaa

SEQ ID NO: 177232 - RNA, 32 nt, Human
gcguagcaggagcaugcgcuuccuuccucacu

SEQ ID NO: 177233 - RNA, 32 nt, Human
gcguagcgugugccaccaugccuggcuaauuu

SEQ ID NO: 177234 - RNA, 32 nt, Human
gcguagcugaggaaggggaagagaaguccagc

SEQ ID NO: 177235 - RNA, 32 nt, Human
gcguagcuggacugggcucuugggccagccag

SEQ ID NO: 177236 - RNA, 32 nt, Human
gcguaggacuuagggguuauaagcccagaucc

SEQ ID NO: 177237 - RNA, 22 nt, Human
gcguaggagagggagaugaucc

SEQ ID NO: 177238 - RNA, 32 nt, Human
gcguaggcuaucucccaucuucccacucaagu

SEQ ID NO: 177239 - RNA, 32 nt, Human
gcguaggugugggcguggcaagguuccuggaa

SEQ ID NO: 177240 - RNA, 32 nt, Human
gcguagugcgcuccccgcccagccugcagagc

SEQ ID NO: 177241 - RNA, 32 nt, Human
gcguaguggagacccacggcaggccugaagaa

SEQ ID NO: 177242 - RNA, 24 nt, Human
gcguaguggcucacaccuguaauc

SEQ ID NO: 177243 - RNA, 32 nt, Human
gcguauacauuuguuuugggauuuuugugugu

SEQ ID NO: 177244 - RNA, 32 nt, Human
gcguauacugauuccuccaacucuccacccca

SEQ ID NO: 177245 - RNA, 32 nt, Human
gcguauauguacaaauguacaauuuuuacaug

SEQ ID NO: 177246 - RNA, 20 nt, Human
gcguaucaccugaggucagg

SEQ ID NO: 177247 - RNA, 32 nt, Human
gcguauccaagaggauggacuuagugaugggg

SEQ ID NO: 177248 - RNA, 32 nt, Human
gcguaucgagucuccgcccccuucccgccucc

SEQ ID NO: 177249 - RNA, 32 nt, Human
gcguaucugaaccaucaucccugcucucaucu

SEQ ID NO: 177250 - RNA, 32 nt, Human
gcguaugacauggugaauaaacacaacucucu

SEQ ID NO: 177251 - RNA, 32 nt, Human
gcguaugcaguuaagagcaagugccuuggccg

SEQ ID NO: 177252 - RNA, 32 nt, Human
gcguaugccuguaaucccagcuacuuaggagg

SEQ ID NO: 177253 - RNA, 32 nt, Human
gcguauguauuagccggcagccuguugguucc

SEQ ID NO: 177254 - RNA, 32 nt, Human
gcguauguuuguguccuucauuaggaacauug

SEQ ID NO: 177255 - RNA, 32 nt, Human
gcguauuauaccaaaauguugcugaaaaaugg

SEQ ID NO: 177256 - RNA, 32 nt, Human
gcguauuucugaguuaugccuguauuuaagaa

SEQ ID NO: 177257 - RNA, 32 nt, Human
gcgucaacgcaaccucagcgucugccggaacc

SEQ ID NO: 177258 - RNA, 21 nt, Human
gcgucaagacugcccuuggca

SEQ ID NO: 177259 - RNA, 32 nt, Human
gcgucacaagcugugcagcuguguaggccucu

SEQ ID NO: 177260 - RNA, 32 nt, Human
gcgucacaccuauaaucccagcacuuugggag

SEQ ID NO: 177261 - RNA, 32 nt, Human
gcgucacagcacaaccugcaaaaacggagcug

SEQ ID NO: 177262 - RNA, 32 nt, Human
gcgucacauaagccagcccacaggguccugca

SEQ ID NO: 177263 - RNA, 32 nt, Human
gcgucaccaaaaacagacaggaucagugauca

SEQ ID NO: 177264 - RNA, 32 nt, Human
gcgucacccugacucugcucagagccagcauu

SEQ ID NO: 177265 - RNA, 22 nt, Human
gcgucaccgucacauucaacca

SEQ ID NO: 177266 - RNA, 20 nt, Human
gcgucaccuagacgucagcc

SEQ ID NO: 177267 - RNA, 32 nt, Human
gcgucaccuccucccaggcuccugggaagcac

SEQ ID NO: 177268 - RNA, 31 nt, Human
gcgucaccugucucuuacccugugucuccac

SEQ ID NO: 177269 - RNA, 32 nt, Human
gcgucacgccuguaaucccagcacuuugggag

SEQ ID NO: 177270 - RNA, 32 nt, Human
gcgucacggguggggcugcagcuucuggaccu

SEQ ID NO: 177271 - RNA, 32 nt, Human
gcgucacuccagugcucagcuguggcuggagg

SEQ ID NO: 177272 - RNA, 32 nt, Human
gcgucacugcacccuccgccaggcuccgcggg

SEQ ID NO: 177273 - RNA, 32 nt, Human
gcgucacugcacuccaaccugggugacagagc

SEQ ID NO: 177274 - RNA, 32 nt, Human
gcgucacugcacuccagccugagcaacagagu

SEQ ID NO: 177275 - RNA, 32 nt, Human
gcgucacugcacuccagccugagugacagagc

SEQ ID NO: 177276 - RNA, 32 nt, Human
gcgucacugcacuccagccuggacaacagagc

SEQ ID NO: 177277 - RNA, 32 nt, Human
gcgucacugcacuccagccugggagacagagu

SEQ ID NO: 177278 - RNA, 32 nt, Human
gcgucacugcacuccagccugggcgacagagu

SEQ ID NO: 177279 - RNA, 32 nt, Human
gcgucacugcacuccagcgugggcgacagagc

SEQ ID NO: 177280 - RNA, 32 nt, Human
gcgucacugcacuccagucuagcaacagagcg

SEQ ID NO: 177281 - RNA, 32 nt, Human
gcgucacugcacugcagccugggugacagaau

SEQ ID NO: 177282 - RNA, 32 nt, Human
gcgucacugcagccuccaccucccgggcucca

SEQ ID NO: 177283 - RNA, 32 nt, Human
gcgucacuguauguaguucauggcuacuguac

SEQ ID NO: 177284 - RNA, 24 nt, Human
gcgucacuuaauccaaaucaacca

SEQ ID NO: 177285 - RNA, 32 nt, Human
gcgucagagggaagggaacacaucccagccac

SEQ ID NO: 177286 - RNA, 32 nt, Human
gcgucagcugggauauaugggggcagggaguc

SEQ ID NO: 177287 - RNA, 32 nt, Human
gcgucaggccuucuggggaaaguuuccucauu

SEQ ID NO: 177288 - RNA, 18 nt, Human
gcgucaggcugggggcag

SEQ ID NO: 177289 - RNA, 32 nt, Human
gcgucaguacacuccagccugggcaacaaugc

SEQ ID NO: 177290 - RNA, 32 nt, Human
gcgucagugucgcgcuggagcuggcagaggug

SEQ ID NO: 177291 - RNA, 32 nt, Human
gcgucaguguucuccagccugggcaacagagu

SEQ ID NO: 177292 - RNA, 32 nt, Human
gcgucauauuuuaugaccccuacuugcaggau

SEQ ID NO: 177293 - RNA, 32 nt, Human
gcgucauccugcgagucccucugacgggaggg

SEQ ID NO: 177294 - RNA, 32 nt, Human
gcgucaucuccccagccugcuguucccgcuuu

SEQ ID NO: 177295 - RNA, 21 nt, Human
gcgucaucugcaaagcagcca

SEQ ID NO: 177296 - RNA, 32 nt, Human
gcgucaugccagaaugcacagggcagcccagg

SEQ ID NO: 177297 - RNA, 32 nt, Human
gcgucauggcgcuccuccgcagccugggguac

SEQ ID NO: 177298 - RNA, 24 nt, Human
gcgucauggcucacaccuguaauc

SEQ ID NO: 177299 - RNA, 32 nt, Human
gcgucaugucaccccuuccuuuacagguccug

SEQ ID NO: 177300 - RNA, 32 nt, Human
gcgucauugcacuccagccugggcaacaagag

SEQ ID NO: 177301 - RNA, 20 nt, Human
gcgucauuuguucccugcca

SEQ ID NO: 177302 - RNA, 32 nt, Human
gcguccacaauguuuaaaauauuucauaggcg

SEQ ID NO: 177303 - RNA, 32 nt, Human
gcguccacacccagacggguccaguccagccc

SEQ ID NO: 177304 - RNA, 32 nt, Human
gcguccaccacaaccucugcuguaucagaggg

SEQ ID NO: 177305 - RNA, 32 nt, Human
gcguccacgccgcucacuccagccgaggcccc

SEQ ID NO: 177306 - RNA, 32 nt, Human
gcguccagaacugccgccaccuucccugcccc

SEQ ID NO: 177307 - RNA, 32 nt, Human
gcguccagccccaggcccuggagcuugucguu

SEQ ID NO: 177308 - RNA, 32 nt, Human
gcguccagccuagagcccccggugggagccag

SEQ ID NO: 177309 - RNA, 32 nt, Human
gcguccagcugggggaugccugccuggauauc

SEQ ID NO: 177310 - RNA, 32 nt, Human
gcguccaugcuguagcuuccuaccucagucca

SEQ ID NO: 177311 - RNA, 32 nt, Human
gcguccauuccucuggagucucuccuuguuug

SEQ ID NO: 177312 - RNA, 32 nt, Human
gcgucccacgucuccuccucgaagccaugugc

SEQ ID NO: 177313 - RNA, 32 nt, Human
gcgucccacuggcucugaucuugcuuccugcu

SEQ ID NO: 177314 - RNA, 32 nt, Human
gcgucccagccccagccagggggccggccuug

SEQ ID NO: 177315 - RNA, 32 nt, Human
gcgucccagccccuccagcagcacagcauguc

SEQ ID NO: 177316 - RNA, 32 nt, Human
gcgucccaggaggcaggcaguggcuaugacag

SEQ ID NO: 177317 - RNA, 32 nt, Human
gcgucccaggccuccuucccucccucugccac

SEQ ID NO: 177318 - RNA, 32 nt, Human
gcgucccauuuucuccccuggccucuuacuug

SEQ ID NO: 177319 - RNA, 32 nt, Human
gcguccccagaacccaagggaacgucauggag

SEQ ID NO: 177320 - RNA, 32 nt, Human
gcguccccaucuccacagaggcaggguggcug

SEQ ID NO: 177321 - RNA, 32 nt, Human
gcgucccccacccccgucgugguguagucaua

SEQ ID NO: 177322 - RNA, 32 nt, Human
gcgucccccucacccgcugauguggccuacga

SEQ ID NO: 177323 - RNA, 32 nt, Human
gcgucccccugccggccggggcugagacuccg

SEQ ID NO: 177324 - RNA, 19 nt, Human
gcguccccgaagcucuccc

SEQ ID NO: 177325 - RNA, 32 nt, Human
gcguccccugcagcagaugcugucucagucau

SEQ ID NO: 177326 - RNA, 32 nt, Human
gcguccccugcuugaguuuugcacuuggaaga

SEQ ID NO: 177327 - RNA, 32 nt, Human
gcgucccgagagccccagaagucggcggggaa

SEQ ID NO: 177328 - RNA, 32 nt, Human
gcgucccgcacugggguguccucgcugucugg

SEQ ID NO: 177329 - RNA, 32 nt, Human
gcgucccggcugaguccucuugcacaugggag

SEQ ID NO: 177330 - RNA, 32 nt, Human
gcgucccuccagaagcugugugcucaauggaa

SEQ ID NO: 177331 - RNA, 32 nt, Human
gcgucccuccaggccuugccuccugcgggagg

SEQ ID NO: 177332 - RNA, 32 nt, Human
gcgucccugcagcagccacucugcuuuccagg

SEQ ID NO: 177333 - RNA, 32 nt, Human
gcgucccugcugcagcaaccggagcuggaguc

SEQ ID NO: 177334 - RNA, 32 nt, Human
gcgucccuuugguuuggcccagaggggcgaac

SEQ ID NO: 177335 - RNA, 32 nt, Human
gcguccgagggugggagucgggguguggcagg

SEQ ID NO: 177336 - RNA, 23 nt, Human
gcguccgggaggccgggccccgg

SEQ ID NO: 177337 - RNA, 32 nt, Human
gcguccgggggaggggaaggaagggccgcugu

SEQ ID NO: 177338 - RNA, 32 nt, Human
gcguccggucagggaagcgugcagcccaaaug

SEQ ID NO: 177339 - RNA, 32 nt, Human
gcguccguguguggucugucaccacggggccu

SEQ ID NO: 177340 - RNA, 32 nt, Human
gcguccuaagagagucucacucugucucccag

SEQ ID NO: 177341 - RNA, 32 nt, Human
gcguccucauuuccccucccaauccucucucc

SEQ ID NO: 177342 - RNA, 32 nt, Human
gcguccuccagccccgggcggccggcggcugu

SEQ ID NO: 177343 - RNA, 32 nt, Human
gcguccucccaaagugcugggauuacaggccu

SEQ ID NO: 177344 - RNA, 32 nt, Human
gcguccucuucccaccagcgugggauucgguu

SEQ ID NO: 177345 - RNA, 32 nt, Human
gcguccugagcaggagaccugaguggcgggga

SEQ ID NO: 177346 - RNA, 32 nt, Human
gcguccugaguagcuggggauuacaggcgccc

SEQ ID NO: 177347 - RNA, 32 nt, Human
gcguccugagucuuuggcagccuggucccucu

SEQ ID NO: 177348 - RNA, 32 nt, Human
gcguccugaugcccccaagcucccucuccuga

SEQ ID NO: 177349 - RNA, 32 nt, Human
gcguccugccugacaaacugaaggugagcugg

SEQ ID NO: 177350 - RNA, 32 nt, Human
gcguccugcugagcucuguucucuccagcacc

SEQ ID NO: 177351 - RNA, 32 nt, Human
gcguccuggagcugcuccugcccauccgcuac

SEQ ID NO: 177352 - RNA, 32 nt, Human
gcguccuggggucugggaggaaggcagacaga

SEQ ID NO: 177353 - RNA, 32 nt, Human
gcguccuguccaccaugcccucagacucagaa

SEQ ID NO: 177354 - RNA, 32 nt, Human
gcguccuuccccagggcaggagagaggagaug

SEQ ID NO: 177355 - RNA, 32 nt, Human
gcgucgcccgggaucuggguuuuggaagaagg

SEQ ID NO: 177356 - RNA, 19 nt, Human
gcgucgccgccgccgccgc

SEQ ID NO: 177357 - RNA, 32 nt, Human
gcgucgcugcaggagcuccaggggcagcacaa

SEQ ID NO: 177358 - RNA, 32 nt, Human
gcgucgcuggacuccagcccgggcgacagagu

SEQ ID NO: 177359 - RNA, 32 nt, Human
gcgucggagauggaguuaggagagggcgccaa

SEQ ID NO: 177360 - RNA, 32 nt, Human
gcgucggcaccugaacgcgaggcgcuccauug

SEQ ID NO: 177361 - RNA, 32 nt, Human
gcgucggcagcagaggaugccccaggcccugg

SEQ ID NO: 177362 - RNA, 32 nt, Human
gcgucgggagagagcgcggagguagcgggcgc

SEQ ID NO: 177363 - RNA, 32 nt, Human
gcgucggugaagcaagagcucagaggggagag

SEQ ID NO: 177364 - RNA, 32 nt, Human
gcgucguccauccucagugagaacaccagaga

SEQ ID NO: 177365 - RNA, 24 nt, Human
gcgucgugcgcccgcaacagagcc

SEQ ID NO: 177366 - RNA, 32 nt, Human
gcgucgugggugggggacgcugucuuucacgg

SEQ ID NO: 177367 - RNA, 32 nt, Human
gcgucuaagaugagggggccaggcgguggcuu

SEQ ID NO: 177368 - RNA, 32 nt, Human
gcgucuacaggcccgucuccugccucacaaca

SEQ ID NO: 177369 - RNA, 32 nt, Human
gcgucuacaggcccgucuccugccucacaacc

SEQ ID NO: 177370 - RNA, 32 nt, Human
gcgucuacccacccucccuucuagcagauucu

SEQ ID NO: 177371 - RNA, 32 nt, Human
gcgucuagguuuuccuugucccuuccuggggc

SEQ ID NO: 177372 - RNA, 32 nt, Human
gcgucuaugcgggccugcagacugccuccgug

SEQ ID NO: 177373 - RNA, 32 nt, Human
gcgucuccaacagggcaggagugaguggagua

SEQ ID NO: 177374 - RNA, 32 nt, Human
gcgucuccacaaccccagcgcagaggggcccg

SEQ ID NO: 177375 - RNA, 31 nt, Human
gcgucucccucucugcagccuguguaagcua

SEQ ID NO: 177376 - RNA, 32 nt, Human
gcgucuccgccuucccugggccgcacugcugc

SEQ ID NO: 177377 - RNA, 32 nt, Human
gcgucucgcccagaugcugaaggaucacuugg

SEQ ID NO: 177378 - RNA, 32 nt, Human
gcgucucucuaggagccgcgcgggaaggaugc

SEQ ID NO: 177379 - RNA, 32 nt, Human
gcgucucucuccucccccucagccugagccgg

SEQ ID NO: 177380 - RNA, 32 nt, Human
gcgucucugccuggcagaggcugcaaucucug

SEQ ID NO: 177381 - RNA, 32 nt, Human
gcgucucuguguauauccuugcuuuauuuucu

SEQ ID NO: 177382 - RNA, 32 nt, Human
gcgucugaggagaaggaggaaagguuucaggg

SEQ ID NO: 177383 - RNA, 32 nt, Human
gcgucugcacccacccuuccacccucagggcc

SEQ ID NO: 177384 - RNA, 32 nt, Human
gcgucugcaggcgccaccgcugccucuuuccg

SEQ ID NO: 177385 - RNA, 32 nt, Human
gcgucugccagccuggcuggcaguccgucugu

SEQ ID NO: 177386 - RNA, 32 nt, Human
gcgucugcucacuggcucuggggccucgaggu

SEQ ID NO: 177387 - RNA, 32 nt, Human
gcgucugcucauaggaccugcauccuuccugg

SEQ ID NO: 177388 - RNA, 32 nt, Human
gcgucuggacaagccucauggggacuggggau

SEQ ID NO: 177389 - RNA, 32 nt, Human
gcgucuggcgcgaucucugccugcuuacucgg

SEQ ID NO: 177390 - RNA, 32 nt, Human
gcgucuggcuagcuaauuuuuguauuuuuagu

SEQ ID NO: 177391 - RNA, 18 nt, Human
gcgucuggcuggcugcag

SEQ ID NO: 177392 - RNA, 32 nt, Human
gcgucuguacgggaagaggcagagggaggcag

SEQ ID NO: 177393 - RNA, 32 nt, Human
gcgucuguagugcuuccuguuugcugaauaaa

SEQ ID NO: 177394 - RNA, 32 nt, Human
gcgucuguauaauuauaauguugcccagugug

SEQ ID NO: 177395 - RNA, 17 nt, Human
gcgucuguccugcgcca

SEQ ID NO: 177396 - RNA, 32 nt, Human
gcgucugugaugggucucuuuagggacaaaug

SEQ ID NO: 177397 - RNA, 32 nt, Human
gcgucuguggaagaagaagaagaagaggagga

SEQ ID NO: 177398 - RNA, 27 nt, Human
gcgucugugguccuaugguaucaacca

SEQ ID NO: 177399 - RNA, 32 nt, Human
gcgucugugucuuugugccuguaucucgcugg

SEQ ID NO: 177400 - RNA, 32 nt, Human
gcgucuuccccgaacccuucccaaaccucccc

SEQ ID NO: 177401 - RNA, 32 nt, Human
gcgucuucucuucuccaggccuaugguccugc

SEQ ID NO: 177402 - RNA, 32 nt, Human
gcgugaacacccucuggcuaccuagggaccug

SEQ ID NO: 177403 - RNA, 32 nt, Human
gcgugaaccacugcacccagccuaucuuuugc

SEQ ID NO: 177404 - RNA, 32 nt, Human
gcgugaaccacugcacccagccugcugauccu

SEQ ID NO: 177405 - RNA, 32 nt, Human
gcgugaacccagcgggaagagguugcagugag

SEQ ID NO: 177406 - RNA, 32 nt, Human
gcgugaacccaggagacggagcuugcagugag

SEQ ID NO: 177407 - RNA, 32 nt, Human
gcgugaacccaggaggaggagcuugcagugag

SEQ ID NO: 177408 - RNA, 32 nt, Human
gcgugaacccaggaggcagagguugcagugag

SEQ ID NO: 177409 - RNA, 32 nt, Human
gcgugaacccaggaggcggaccuuguagugag

SEQ ID NO: 177410 - RNA, 32 nt, Human
gcgugaacccaggaggcggagcuggcagugag

SEQ ID NO: 177411 - RNA, 32 nt, Human
gcgugaacccaggaggcggagcuugcagugag

SEQ ID NO: 177412 - RNA, 32 nt, Human
gcgugaacccaggaggcggaggcugcagugag

SEQ ID NO: 177413 - RNA, 32 nt, Human
gcgugaacccaggaggcggagguugcagugag

SEQ ID NO: 177414 - RNA, 32 nt, Human
gcgugaacccaggaggcggcgguugcagugag

SEQ ID NO: 177415 - RNA, 32 nt, Human
gcgugaacccaggagguggagcuugcaaugag

SEQ ID NO: 177416 - RNA, 32 nt, Human
gcgugaacccaggagguggagcuugcagugag

SEQ ID NO: 177417 - RNA, 32 nt, Human
gcgugaaccucuuagaggaggaauggcugggc

SEQ ID NO: 177418 - RNA, 32 nt, Human
gcgugaagggauuuuagucacacguggucuuu

SEQ ID NO: 177419 - RNA, 32 nt, Human
gcgugaauacacacaugcacacacauauacac

SEQ ID NO: 177420 - RNA, 32 nt, Human
gcgugacagagggcucaccucuugccuucuag

SEQ ID NO: 177421 - RNA, 32 nt, Human
gcgugacaggaaaucccaagacugcuuccgcc

SEQ ID NO: 177422 - RNA, 32 nt, Human
gcgugaccaccuccuucgcagcuccugguggc

SEQ ID NO: 177423 - RNA, 32 nt, Human
gcgugaccgguaacugcccucugccccgcccc

SEQ ID NO: 177424 - RNA, 32 nt, Human
gcgugaccuccaggcagccacagccuggaaaa

SEQ ID NO: 177425 - RNA, 32 nt, Human
gcgugacgccugaugcaagaugggcaucggca

SEQ ID NO: 177426 - RNA, 32 nt, Human
gcgugagagccggagagcagggggcgggggcg

SEQ ID NO: 177427 - RNA, 32 nt, Human
gcgugagaucacugugaccucaaauucuaggc

SEQ ID NO: 177428 - RNA, 32 nt, Human
gcgugagccacugcacccagccugggagaggg

SEQ ID NO: 177429 - RNA, 32 nt, Human
gcgugagccacugcacccagccuguaaaauau

SEQ ID NO: 177430 - RNA, 32 nt, Human
gcgugagcccaggaggcggagcuugcagugag

SEQ ID NO: 177431 - RNA, 32 nt, Human
gcgugagcccaggaguuccagaccaggcuggg

SEQ ID NO: 177432 - RNA, 32 nt, Human
gcgugagcccuaggauccagguccucucucac

SEQ ID NO: 177433 - RNA, 32 nt, Human
gcgugagcucacuacaaucucuggcuucuggu

SEQ ID NO: 177434 - RNA, 32 nt, Human
gcgugaggaaaguaccaaacagcagcggaguu

SEQ ID NO: 177435 - RNA, 32 nt, Human
gcgugaggccgggcccgcgccgccaugaaccu

SEQ ID NO: 177436 - RNA, 32 nt, Human
gcgugaggcugcauagaaguguguacggcuug

SEQ ID NO: 177437 - RNA, 32 nt, Human
gcgugaggggccugaggcgagcgguuagagcg

SEQ ID NO: 177438 - RNA, 32 nt, Human
gcgugagggggcagaggcgagguggaggcguu

SEQ ID NO: 177439 - RNA, 22 nt, Human
gcgugagucaccaugcccugcu

SEQ ID NO: 177440 - RNA, 32 nt, Human
gcgugauaccuggaggggucugugaagggaca

SEQ ID NO: 177441 - RNA, 32 nt, Human
gcgugaucacacuuaccgagcuuacuuugauc

SEQ ID NO: 177442 - RNA, 32 nt, Human
gcgugaucucagcucaccacaaccuccgccuc

SEQ ID NO: 177443 - RNA, 21 nt, Human
gcgugaucucagcucacugca

SEQ ID NO: 177444 - RNA, 32 nt, Human
gcgugaucucagcucacugcaaccuccgccuc

SEQ ID NO: 177445 - RNA, 21 nt, Human
gcgugaucucggcucacugca

SEQ ID NO: 177446 - RNA, 22 nt, Human
gcgugaucucuacucacugcag

SEQ ID NO: 177447 - RNA, 32 nt, Human
gcgugauggagaaggugaccgugugggcucca

SEQ ID NO: 177448 - RNA, 32 nt, Human
gcgugcacagccggcgcucguuccagcggccu

SEQ ID NO: 177449 - RNA, 32 nt, Human
gcgugcacauggcauaggcccaguaacuuaca

SEQ ID NO: 177450 - RNA, 32 nt, Human
gcgugcacccgcguuccaucugucuucugaga

SEQ ID NO: 177451 - RNA, 32 nt, Human
gcgugcaccuguaaucucagcuacucgggagg

SEQ ID NO: 177452 - RNA, 32 nt, Human
gcgugcacuucccagagcaucuugcauccaaa

SEQ ID NO: 177453 - RNA, 32 nt, Human
gcgugcagagcccacugggcacgguggucggc

SEQ ID NO: 177454 - RNA, 32 nt, Human
gcgugcagccggcccaguacccagaccacggc

SEQ ID NO: 177455 - RNA, 32 nt, Human
gcgugcagggcuguuuuucuggaacauccuuu

SEQ ID NO: 177456 - RNA, 32 nt, Human
gcgugcagugccaggaccuggccgcacuguac

SEQ ID NO: 177457 - RNA, 32 nt, Human
gcgugcaguggcacagucucggcucacugcaa

SEQ ID NO: 177458 - RNA, 32 nt, Human
gcgugcaguggcacuaucuuggcucauugcaa

SEQ ID NO: 177459 - RNA, 32 nt, Human
gcgugcagugggccgucucaguucacugcagc

SEQ ID NO: 177460 - RNA, 32 nt, Human
gcgugcagugugacgcucuguccugaaucccu

SEQ ID NO: 177461 - RNA, 32 nt, Human
gcgugcauagcccagacacagaagaggcuggu

SEQ ID NO: 177462 - RNA, 32 nt, Human
gcgugcaucccucugugaccucagcccagaug

SEQ ID NO: 177463 - RNA, 31 nt, Human
gcgugccaaguguccagagccuuggaagcag

SEQ ID NO: 177464 - RNA, 32 nt, Human
gcgugccaggguggugacaguugaacaaagug

SEQ ID NO: 177465 - RNA, 32 nt, Human
gcgugccauccagagucaucucagcccugccu

SEQ ID NO: 177466 - RNA, 32 nt, Human
gcgugccauuucacuccagccuggacaacaag

SEQ ID NO: 177467 - RNA, 32 nt, Human
gcgugcccaggccgaggaaagcgcggcggcgg

SEQ ID NO: 177468 - RNA, 32 nt, Human
gcgugcccaggucuggcauccugcacuugcug

SEQ ID NO: 177469 - RNA, 32 nt, Human
gcgugcccuccucuggcugguaccaugcagcu

SEQ ID NO: 177470 - RNA, 32 nt, Human
gcgugccgagcaggcuugguggggaagggacu

SEQ ID NO: 177471 - RNA, 32 nt, Human
gcgugccgauagucccagcuacuugagaggcu

SEQ ID NO: 177472 - RNA, 32 nt, Human
gcgugccgcuacacuccagccugaugacagac

SEQ ID NO: 177473 - RNA, 32 nt, Human
gcgugccgcucuucuccuccaggccggcugcu

SEQ ID NO: 177474 - RNA, 32 nt, Human
gcgugccgggaaccccagaggaggucgcaguu

SEQ ID NO: 177475 - RNA, 18 nt, Human
gcgugccgugugcacgga

SEQ ID NO: 177476 - RNA, 32 nt, Human
gcgugccuauaaucccagcuacucgggaggcu

SEQ ID NO: 177477 - RNA, 32 nt, Human
gcgugccuauagucccagcuacaugggaggcu

SEQ ID NO: 177478 - RNA, 32 nt, Human
gcgugccuccgucugccugugugcuggcuguc

SEQ ID NO: 177479 - RNA, 32 nt, Human
gcgugccucuagucccagcuacuugggaggcu

SEQ ID NO: 177480 - RNA, 32 nt, Human
gcgugccucuaguuccagcuacucgggagucu

SEQ ID NO: 177481 - RNA, 32 nt, Human
gcgugccugaaaccccagcuacuugggaggcu

SEQ ID NO: 177482 - RNA, 32 nt, Human
gcgugccugccugcacggcccuugccucucuu

SEQ ID NO: 177483 - RNA, 32 nt, Human
gcgugccugccugcucacagaagcugccuaug

SEQ ID NO: 177484 - RNA, 32 nt, Human
gcgugccugccuggcggccgucggcguacucu

SEQ ID NO: 177485 - RNA, 32 nt, Human
gcgugccuguaaucccaacuacuugggaggcu

SEQ ID NO: 177486 - RNA, 32 nt, Human
gcgugccuguaaucccagcuacucaggaggcu

SEQ ID NO: 177487 - RNA, 32 nt, Human
gcgugccuguaaucccagcuacucgggaagcu

SEQ ID NO: 177488 - RNA, 32 nt, Human
gcgugccuguaaucccagcuacucgggaggcu

SEQ ID NO: 177489 - RNA, 32 nt, Human
gcgugccuguaaucccagcuacuugggaggcu

SEQ ID NO: 177490 - RNA, 32 nt, Human
gcgugccuguaaucccagcuacuugggagucu

SEQ ID NO: 177491 - RNA, 32 nt, Human
gcgugccuguaaucccagcuauucaggaggcu

SEQ ID NO: 177492 - RNA, 32 nt, Human
gcgugccuguaauccuagcuacucaggaggcu

SEQ ID NO: 177493 - RNA, 32 nt, Human
gcgugccuguagccucagcuacucggguggca

SEQ ID NO: 177494 - RNA, 32 nt, Human
gcgugccuguagucccagcuacucagggcuga

SEQ ID NO: 177495 - RNA, 32 nt, Human
gcgugccuguagucccagcuacucgagaggcu

SEQ ID NO: 177496 - RNA, 32 nt, Human
gcgugccuguagucccagcuacucgggaggcu

SEQ ID NO: 177497 - RNA, 32 nt, Human
gcgugccuguagucccagcuacuuaggaggcu

SEQ ID NO: 177498 - RNA, 32 nt, Human
gcgugccuguagucccagcuacuugggaggcu

SEQ ID NO: 177499 - RNA, 32 nt, Human
gcgugccuguagucucagcuacucaggaggcu

SEQ ID NO: 177500 - RNA, 32 nt, Human
gcgugccuguagugccagcuacucaggaggcc

SEQ ID NO: 177501 - RNA, 32 nt, Human
gcgugccuguaguuccagcuaccugggaggcu

SEQ ID NO: 177502 - RNA, 32 nt, Human
gcgugccuguaguuccagcuacuugggaggcu

SEQ ID NO: 177503 - RNA, 32 nt, Human
gcgugccugugaucccagcuacuugggaggcu

SEQ ID NO: 177504 - RNA, 32 nt, Human
gcgugccugugaucccagcugcucaggaggcu

SEQ ID NO: 177505 - RNA, 32 nt, Human
gcgugccuguggucccagcuacuggggaggcu

SEQ ID NO: 177506 - RNA, 32 nt, Human
gcgugccuguggucccagcuacuuggaaggcu

SEQ ID NO: 177507 - RNA, 32 nt, Human
gcgugccuguugucccagcuacuaggaagucu

SEQ ID NO: 177508 - RNA, 21 nt, Human
gcgugcgagcccugcaccccc

SEQ ID NO: 177509 - RNA, 32 nt, Human
gcgugcgcaccgcgccuacacgcccaacgacg

SEQ ID NO: 177510 - RNA, 32 nt, Human
gcgugcgccuguaaucccagcuacucgggagg

SEQ ID NO: 177511 - RNA, 32 nt, Human
gcgugcgccuguaaucccagcuacuugggagg

SEQ ID NO: 177512 - RNA, 32 nt, Human
gcgugcgccuguaaucucagcuacuugggagc

SEQ ID NO: 177513 - RNA, 32 nt, Human
gcgugcggccugaacccacaguggcggcggaa

SEQ ID NO: 177514 - RNA, 32 nt, Human
gcgugcgucugugugugccugugugcgagucu

SEQ ID NO: 177515 - RNA, 32 nt, Human
gcgugcgugcgcagaugugggccccgcgggag

SEQ ID NO: 177516 - RNA, 32 nt, Human
gcgugcguguccgcgcaugcaggugugccaga

SEQ ID NO: 177517 - RNA, 32 nt, Human
gcgugcguucugggcagggccuguaaugggca

SEQ ID NO: 177518 - RNA, 23 nt, Human
gcgugcuccuguagagcuugaca

SEQ ID NO: 177519 - RNA, 32 nt, Human
gcgugcuccuuaugagaaccuaaugccugaug

SEQ ID NO: 177520 - RNA, 32 nt, Human
gcgugcuccuuuugaccuguuugaaaacagaa

SEQ ID NO: 177521 - RNA, 32 nt, Human
gcgugcugacuggccuagggccccugccccuc

SEQ ID NO: 177522 - RNA, 31 nt, Human
gcgugcugccucucuucugugucguuuuguu

SEQ ID NO: 177523 - RNA, 32 nt, Human
gcgugcuggaaccugucggaacuccaugccuu

SEQ ID NO: 177524 - RNA, 32 nt, Human
gcgugcuggacucugcggacauagaggucaca

SEQ ID NO: 177525 - RNA, 32 nt, Human
gcgugcugggaauagaaagcagcucugggacc

SEQ ID NO: 177526 - RNA, 32 nt, Human
gcgugcugggacaugucuggccuccaaggacc

SEQ ID NO: 177527 - RNA, 32 nt, Human
gcgugcugucugucugcaggggccuggcuuga

SEQ ID NO: 177528 - RNA, 32 nt, Human
gcgugcugugugugcaugugugcgagagggug

SEQ ID NO: 177529 - RNA, 32 nt, Human
gcgugcuuguaaucccagcuacucaggaggcu

SEQ ID NO: 177530 - RNA, 32 nt, Human
gcguggaagcccugucaccccaccccaggcca

SEQ ID NO: 177531 - RNA, 32 nt, Human
gcguggaaggacagcaucaacaccuggcaugg

SEQ ID NO: 177532 - RNA, 32 nt, Human
gcguggacaagcuucaucugcagucagagaca

SEQ ID NO: 177533 - RNA, 32 nt, Human
gcguggaccagccgggccagggcgaugcugcg

SEQ ID NO: 177534 - RNA, 32 nt, Human
gcguggaccgagggucccagccugcaggcucc

SEQ ID NO: 177535 - RNA, 32 nt, Human
gcguggaccgggcaucucccuccaucaagcaa

SEQ ID NO: 177536 - RNA, 32 nt, Human
gcguggacuaugggcccgggaggucccuuacu

SEQ ID NO: 177537 - RNA, 32 nt, Human
gcguggacucccuuugugugggugggguuugu

SEQ ID NO: 177538 - RNA, 32 nt, Human
gcguggagaagagggagggagcgagagcgaga

SEQ ID NO: 177539 - RNA, 32 nt, Human
gcguggagcacaggagccgcagugaguccugc

SEQ ID NO: 177540 - RNA, 32 nt, Human
gcguggagccggcuuggaacagagccaagaca

SEQ ID NO: 177541 - RNA, 32 nt, Human
gcguggaggaaggaacaggaagaggcugauga

SEQ ID NO: 177542 - RNA, 32 nt, Human
gcguggaggaggaggaaaaggagggaaagggg

SEQ ID NO: 177543 - RNA, 32 nt, Human
gcguggaguguaugcgcagaguagcugucugu

SEQ ID NO: 177544 - RNA, 32 nt, Human
gcguggauuuuguggacagagccccagucacu

SEQ ID NO: 177545 - RNA, 32 nt, Human
gcguggcaagugugccccgacaugguggccuu

SEQ ID NO: 177546 - RNA, 32 nt, Human
gcguggcacauauugaagcauuucucaguguc

SEQ ID NO: 177547 - RNA, 32 nt, Human
gcguggcacugcugauccucucuggcugggaa

SEQ ID NO: 177548 - RNA, 32 nt, Human
gcguggcacuuccuuccuuccugggcccgcag

SEQ ID NO: 177549 - RNA, 32 nt, Human
gcguggccaccugaaugcugccuuaucacaag

SEQ ID NO: 177550 - RNA, 21 nt, Human
gcguggcccggaccucggccu

SEQ ID NO: 177551 - RNA, 32 nt, Human
gcguggccuucggccccaaggcugucgccugc

SEQ ID NO: 177552 - RNA, 32 nt, Human
gcguggcgcagcgucuggcuccgccaucucuu

SEQ ID NO: 177553 - RNA, 18 nt, Human
gcguggcggagauggaag

SEQ ID NO: 177554 - RNA, 32 nt, Human
gcguggcugaagccucgaggucaccaggcgga

SEQ ID NO: 177555 - RNA, 32 nt, Human
gcguggcugcaguucuggacgggcuggccgag

SEQ ID NO: 177556 - RNA, 32 nt, Human
gcguggcuggaacugacguuucccuggaggug

SEQ ID NO: 177557 - RNA, 32 nt, Human
gcguggcugggcuguguggugacuuugaugga

SEQ ID NO: 177558 - RNA, 32 nt, Human
gcgugggacagggcaguggcccaaggguaaag

SEQ ID NO: 177559 - RNA, 32 nt, Human
gcgugggagagucacaagccacuggcaagcaa

SEQ ID NO: 177560 - RNA, 32 nt, Human
gcgugggagcagugugaaggagaagaggcaag

SEQ ID NO: 177561 - RNA, 32 nt, Human
gcgugggaggaggcacgggcuugccacgccac

SEQ ID NO: 177562 - RNA, 32 nt, Human
gcgugggaggagggguggucugagggacgugg

SEQ ID NO: 177563 - RNA, 32 nt, Human
gcgugggaucagauuuggugauggaaaaagcg

SEQ ID NO: 177564 - RNA, 32 nt, Human
gcgugggaugcacacggaugacagaaucaagg

SEQ ID NO: 177565 - RNA, 32 nt, Human
gcgugggcaaggcuggccaaggauggcgacgc

SEQ ID NO: 177566 - RNA, 32 nt, Human
gcgugggcacauaggugcauguaaccuguuug

SEQ ID NO: 177567 - RNA, 32 nt, Human
gcgugggcagggccagggcgggaggagcuggg

SEQ ID NO: 177568 - RNA, 18 nt, Human
gcgugggcagggcugcag

SEQ ID NO: 177569 - RNA, 32 nt, Human
gcgugggcuaggauggugcagacacugacgug

SEQ ID NO: 177570 - RNA, 32 nt, Human
gcguggggccacucugagcuggaggcggguca

SEQ ID NO: 177571 - RNA, 19 nt, Human
gcguggggcccagcacaaa

SEQ ID NO: 177572 - RNA, 32 nt, Human
gcguggggcgcuaugggacugcgcagugacga

SEQ ID NO: 177573 - RNA, 23 nt, Human
gcguggggcucacaccuguaauc

SEQ ID NO: 177574 - RNA, 32 nt, Human
gcguggggcucacaccuguaaucccagcacuu

SEQ ID NO: 177575 - RNA, 32 nt, Human
gcguggggcucacgccugcaaucccagagcuu

SEQ ID NO: 177576 - RNA, 32 nt, Human
gcguggggcucacgccugcaaucccagcacca

SEQ ID NO: 177577 - RNA, 32 nt, Human
gcgugggggaggcggcccugcaggugcguacc

SEQ ID NO: 177578 - RNA, 32 nt, Human
gcgugggggccagucaggcugcagaggcaccu

SEQ ID NO: 177579 - RNA, 32 nt, Human
gcgugggggugaggggaucagucugguggaaa

SEQ ID NO: 177580 - RNA, 27 nt, Human
gcgugggucugggcaguaaccaugcuu

SEQ ID NO: 177581 - RNA, 32 nt, Human
gcguggguucuuggaagagguggaguuuggag

SEQ ID NO: 177582 - RNA, 32 nt, Human
gcguggucacggggagcuuccugggcaagcaa

SEQ ID NO: 177583 - RNA, 32 nt, Human
gcgugguccauagcacaguacaugcagcaucu

SEQ ID NO: 177584 - RNA, 32 nt, Human
gcgugguccaugcugaugauuuugccaaaaug

SEQ ID NO: 177585 - RNA, 32 nt, Human
gcguggugccacccuuccuguccgcagcggca

SEQ ID NO: 177586 - RNA, 32 nt, Human
gcgugguggaguuuuccuguguuuucggcccc

SEQ ID NO: 177587 - RNA, 32 nt, Human
gcgugguggcaagcaccuuaaucccagcuacu

SEQ ID NO: 177588 - RNA, 32 nt, Human
gcgugguggcucacaccugucauuccggccuc

SEQ ID NO: 177589 - RNA, 32 nt, Human
gcguggugggaccugggcuacgagguccggcc

SEQ ID NO: 177590 - RNA, 32 nt, Human
gcgugguggggaggggagcgggacaggcgaca

SEQ ID NO: 177591 - RNA, 32 nt, Human
gcguggugggggaacugcuggggaaggcgauu

SEQ ID NO: 177592 - RNA, 32 nt, Human
gcgugguuccagaacccagggugguggcgagg

SEQ ID NO: 177593 - RNA, 32 nt, Human
gcgugguuggacuuugaaggggaucggcgcca

SEQ ID NO: 177594 - RNA, 32 nt, Human
gcgugguuguucgugauccuugcaucuguuac

SEQ ID NO: 177595 - RNA, 32 nt, Human
gcgugguuuccagaccugcagcuuguuuugcu

SEQ ID NO: 177596 - RNA, 32 nt, Human
gcgugguuuuuauguguauuaggauuggggga

SEQ ID NO: 177597 - RNA, 32 nt, Human
gcguguaccugacuucagcugugucaccaccc

SEQ ID NO: 177598 - RNA, 32 nt, Human
gcguguacgggggaggugagugagugcggccg

SEQ ID NO: 177599 - RNA, 32 nt, Human
gcguguaggaaacccagugaccagagacccua

SEQ ID NO: 177600 - RNA, 32 nt, Human
gcguguaggggguggagguucuaagacaggcu

SEQ ID NO: 177601 - RNA, 32 nt, Human
gcgugucaucccuugugccgcaggcugggcgg

SEQ ID NO: 177602 - RNA, 22 nt, Human
gcgugucauuugcuggcuugaa

SEQ ID NO: 177603 - RNA, 32 nt, Human
gcguguccccuucugucagacagcuucacaga

SEQ ID NO: 177604 - RNA, 32 nt, Human
gcgugucugcagcugcuccggguagcccgcua

SEQ ID NO: 177605 - RNA, 32 nt, Human
gcgugucugcuccgggucucuaccuggucucc

SEQ ID NO: 177606 - RNA, 24 nt, Human
gcgugugaaaaccgcaacaaagcc

SEQ ID NO: 177607 - RNA, 32 nt, Human
gcgugugaacagcuccaccaccaagcgccugc

SEQ ID NO: 177608 - RNA, 32 nt, Human
gcgugugacaguguauggggcugcaguugguc

SEQ ID NO: 177609 - RNA, 32 nt, Human
gcgugugagcggccaccacaggcccuuccucu

SEQ ID NO: 177610 - RNA, 32 nt, Human
gcgugugcacaagcacacacaugcaaggcaua

SEQ ID NO: 177611 - RNA, 32 nt, Human
gcgugugccugggcccccuccuuccccugggc

SEQ ID NO: 177612 - RNA, 32 nt, Human
gcgugugccuguaaucccagcuacuugggagg

SEQ ID NO: 177613 - RNA, 32 nt, Human
gcgugugccuguaaucccagcuauuugggagg

SEQ ID NO: 177614 - RNA, 32 nt, Human
gcgugugccuguaaucucagcuacucaggagg

SEQ ID NO: 177615 - RNA, 32 nt, Human
gcgugugccuguaaugccagcuacucgggagg

SEQ ID NO: 177616 - RNA, 32 nt, Human
gcgugugccuguagucccagcuacuugggagg

SEQ ID NO: 177617 - RNA, 32 nt, Human
gcgugugcugggacaugugaugggggcacuag

SEQ ID NO: 177618 - RNA, 32 nt, Human
gcguguggccaaacagcgugaaaccuuggcac

SEQ ID NO: 177619 - RNA, 32 nt, Human
gcguguggcccagggcagcggcccagugcagc

SEQ ID NO: 177620 - RNA, 32 nt, Human
gcguguggcucacgccuauaaucccagcacuu

SEQ ID NO: 177621 - RNA, 32 nt, Human
gcgugugggacccgccgcggccucaacccggg

SEQ ID NO: 177622 - RNA, 32 nt, Human
gcgugugggacgcggcccugagccugugcaau

SEQ ID NO: 177623 - RNA, 32 nt, Human
gcguguggggaccccaucugaggucuuggcug

SEQ ID NO: 177624 - RNA, 32 nt, Human
gcguguggggcugcaaaaggagaggacgacgc

SEQ ID NO: 177625 - RNA, 32 nt, Human
gcguguggguucuaagugcgagcugcugugug

SEQ ID NO: 177626 - RNA, 32 nt, Human
gcgugugguggaggacaagguggggacagacu

SEQ ID NO: 177627 - RNA, 32 nt, Human
gcgugugguucuuccugcccucccuccccuuu

SEQ ID NO: 177628 - RNA, 32 nt, Human
gcguguguagugcugcaucuuaugacaagggg

SEQ ID NO: 177629 - RNA, 20 nt, Human
gcguguguaucacugugaca

SEQ ID NO: 177630 - RNA, 32 nt, Human
gcgugugucagccugcccuaggacuucauguc

SEQ ID NO: 177631 - RNA, 32 nt, Human
gcgugugucuguaaucccagcuacucgggagg

SEQ ID NO: 177632 - RNA, 32 nt, Human
gcgugugucugugucuuauugaaaccuuaaac

SEQ ID NO: 177633 - RNA, 32 nt, Human
gcgugugugaccuaggcuggacaucagaccug

SEQ ID NO: 177634 - RNA, 24 nt, Human
gcgugugugcgccuaaucucaggu

SEQ ID NO: 177635 - RNA, 32 nt, Human
gcguguguggguggccucgggaugggggaaua

SEQ ID NO: 177636 - RNA, 32 nt, Human
gcguguguguaaauguguacacacagacauaa

SEQ ID NO: 177637 - RNA, 32 nt, Human
gcguguucccugggcauggccggcuccguucc

SEQ ID NO: 177638 - RNA, 32 nt, Human
gcguguuggaagcaagaauuggauaagacuuc

SEQ ID NO: 177639 - RNA, 32 nt, Human
gcguguuguggauucuuuccaucaacugcuga

SEQ ID NO: 177640 - RNA, 32 nt, Human
gcguguuguugucuuaccuuuuuaaccuuacc

SEQ ID NO: 177641 - RNA, 32 nt, Human
gcguguuucucauccagccacgucucggaagg

SEQ ID NO: 177642 - RNA, 32 nt, Human
gcguguuucugcccugugacuccuggaaccug

SEQ ID NO: 177643 - RNA, 32 nt, Human
gcguguuucuucuucauaugcuuuguuuuagg

SEQ ID NO: 177644 - RNA, 32 nt, Human
gcguguuuugagggcaggaggucauuuucaag

SEQ ID NO: 177645 - RNA, 32 nt, Human
gcguuaacacaaaauccaugggcagcaugaug

SEQ ID NO: 177646 - RNA, 32 nt, Human
gcguuaaccugacaaaaccucagcagcagaag

SEQ ID NO: 177647 - RNA, 32 nt, Human
gcguuacacacgugggaagcugcagagagcaa

SEQ ID NO: 177648 - RNA, 32 nt, Human
gcguuaccccaagggcccucccgcuuccccuc

SEQ ID NO: 177649 - RNA, 32 nt, Human
gcguuacucuacuuuuaaauguaagacaagcu

SEQ ID NO: 177650 - RNA, 32 nt, Human
gcguuagagacaggguuucaacguguuagcca

SEQ ID NO: 177651 - RNA, 32 nt, Human
gcguuaggucuggggagauggagaagcugaaa

SEQ ID NO: 177652 - RNA, 32 nt, Human
gcguuagugccuggcugugcucucuuuuaugc

SEQ ID NO: 177653 - RNA, 32 nt, Human
gcguuagugcggcggagggucuugccaaaggc

SEQ ID NO: 177654 - RNA, 32 nt, Human
gcguuauaucuucucagcaacuggccgcaguc

SEQ ID NO: 177655 - RNA, 32 nt, Human
gcguuaucagggacugugcucgugagcgccga

SEQ ID NO: 177656 - RNA, 32 nt, Human
gcguuaucagggacugugcucgugagcgcgga

SEQ ID NO: 177657 - RNA, 32 nt, Human
gcguuaucccaaaggugggauuacgccuguaa

SEQ ID NO: 177658 - RNA, 26 nt, Human
gcguuauguuuuugguaaguuaacua

SEQ ID NO: 177659 - RNA, 23 nt, Human
gcguucaggguuugucuguuuga

SEQ ID NO: 177660 - RNA, 32 nt, Human
gcguucauccacccacuccccucggaccucag

SEQ ID NO: 177661 - RNA, 31 nt, Human
gcguucaugcaacgccugguggccugggacc

SEQ ID NO: 177662 - RNA, 32 nt, Human
gcguucauuuuacaggcuaguauuuuaaaagu

SEQ ID NO: 177663 - RNA, 32 nt, Human
gcguuccacaaacagauugaggcucuuuuuag

SEQ ID NO: 177664 - RNA, 32 nt, Human
gcguuccagaggagucucucccugugcccaca

SEQ ID NO: 177665 - RNA, 26 nt, Human
gcguuccccugccucucgugucgugg

SEQ ID NO: 177666 - RNA, 32 nt, Human
gcguuccucccaggacacccuugcugcgcucu

SEQ ID NO: 177667 - RNA, 21 nt, Human
gcguuccugccaggcucuccc

SEQ ID NO: 177668 - RNA, 32 nt, Human
gcguuccugcugucuggacuuuuucuguccca

SEQ ID NO: 177669 - RNA, 32 nt, Human
gcguuccuggccucugcagccaacacaguaga

SEQ ID NO: 177670 - RNA, 32 nt, Human
gcguuccuuguauucagcaagggcgguauauc

SEQ ID NO: 177671 - RNA, 32 nt, Human
gcguucgcagccgccgucaucccgcggaggag

SEQ ID NO: 177672 - RNA, 32 nt, Human
gcguucggucaccucguaggccagccuaguuu

SEQ ID NO: 177673 - RNA, 32 nt, Human
gcguucuacugcaccugccugcucuggguggc

SEQ ID NO: 177674 - RNA, 32 nt, Human
gcguucucacuguuucuuuucccuucaguucc

SEQ ID NO: 177675 - RNA, 32 nt, Human
gcguucucaucccauaggagguuugugagaac

SEQ ID NO: 177676 - RNA, 32 nt, Human
gcguucucccuaggacagauggagccucccuu

SEQ ID NO: 177677 - RNA, 32 nt, Human
gcguucucuccaccagcucccggcucacccac

SEQ ID NO: 177678 - RNA, 32 nt, Human
gcguucucuccccugaacgucaagguuuaagc

SEQ ID NO: 177679 - RNA, 32 nt, Human
gcguucucuuucccucucccaacaugccagcc

SEQ ID NO: 177680 - RNA, 22 nt, Human
gcguucuucacccccaccccca

SEQ ID NO: 177681 - RNA, 18 nt, Human
gcguugaaagcuccccca

SEQ ID NO: 177682 - RNA, 32 nt, Human
gcguugacugacugcagcagcuugccucaugg

SEQ ID NO: 177683 - RNA, 32 nt, Human
gcguugcacacacacauccaccgguggaagag

SEQ ID NO: 177684 - RNA, 32 nt, Human
gcguugccaagacugcagaucagcaccucucu

SEQ ID NO: 177685 - RNA, 32 nt, Human
gcguugcccagccuggacugcacccuuauucu

SEQ ID NO: 177686 - RNA, 32 nt, Human
gcguugccuccugagaucgaggcugcaggaua

SEQ ID NO: 177687 - RNA, 32 nt, Human
gcguugccuggaugcgguggugcauugugggc

SEQ ID NO: 177688 - RNA, 32 nt, Human
gcguuggaucuaaaacuacuagaucucauccc

SEQ ID NO: 177689 - RNA, 19 nt, Human
gcguuggcuccguccccag

SEQ ID NO: 177690 - RNA, 32 nt, Human
gcguugggagcuccucgaugucagcuuuuugu

SEQ ID NO: 177691 - RNA, 32 nt, Human
gcguugggcaaaacuccuguccccagcacuga

SEQ ID NO: 177692 - RNA, 32 nt, Human
gcguugggugggugcugagggagcgccagagu

SEQ ID NO: 177693 - RNA, 32 nt, Human
gcguugguguggugggcggagcucccagucgc

SEQ ID NO: 177694 - RNA, 32 nt, Human
gcguuguagccaguagggcuucugagcaggcu

SEQ ID NO: 177695 - RNA, 32 nt, Human
gcguugucccucagggacucaggcugaagagg

SEQ ID NO: 177696 - RNA, 24 nt, Human
gcguuguggcucaugccuguaauc

SEQ ID NO: 177697 - RNA, 32 nt, Human
gcguuguuugucggcugagcagcugguucccg

SEQ ID NO: 177698 - RNA, 32 nt, Human
gcguuguuuucugccauuuaucccaaacuuuu

SEQ ID NO: 177699 - RNA, 31 nt, Human
gcguuguuuuuacuggaggagcuugugugcg

SEQ ID NO: 177700 - RNA, 32 nt, Human
gcguuuagugagggcuggacugagggagagcc

SEQ ID NO: 177701 - RNA, 32 nt, Human
gcguuuaucugagaguucguguuccugaacgg

SEQ ID NO: 177702 - RNA, 31 nt, Human
gcguuucacagcuaaagacgccgaggcuuag

SEQ ID NO: 177703 - RNA, 32 nt, Human
gcguuucauucuauuggucaauuccauguggc

SEQ ID NO: 177704 - RNA, 32 nt, Human
gcguuuccacagccuucagccuguucuagaac

SEQ ID NO: 177705 - RNA, 32 nt, Human
gcguuucgcuuuccuucuucuuggcuuccucu

SEQ ID NO: 177706 - RNA, 32 nt, Human
gcguuucuaggugagggcaugagagcuggcau

SEQ ID NO: 177707 - RNA, 32 nt, Human
gcguuucugcagcugcugcagucgccgcagcg

SEQ ID NO: 177708 - RNA, 22 nt, Human
gcguuugaagccuggccuccca

SEQ ID NO: 177709 - RNA, 32 nt, Human
gcguuugcaaacuucucgccugggcaggaggc

SEQ ID NO: 177710 - RNA, 32 nt, Human
gcguuugccguagggguugaaaagaauugggg

SEQ ID NO: 177711 - RNA, 32 nt, Human
gcguuuggaccugucugugcguucuccugcgu

SEQ ID NO: 177712 - RNA, 32 nt, Human
gcguuuggagagcugcugaggagccaggggcu

SEQ ID NO: 177713 - RNA, 32 nt, Human
gcguuuggggaggaacagggagagagcuucgg

SEQ ID NO: 177714 - RNA, 32 nt, Human
gcguuugucccaggcucgggggcucaguggga

SEQ ID NO: 177715 - RNA, 32 nt, Human
gcguuuucucuccugggaaccccacugcuuag

SEQ ID NO: 177716 - RNA, 32 nt, Human
gcguuuuguaggcucuccagggguugagauga

SEQ ID NO: 177717 - RNA, 18 nt, Human
gcguuuuuacaccgggua

SEQ ID NO: 177718 - RNA, 32 nt, Human
gcguuuuucucaucccccucccuucccuuccc

SEQ ID NO: 177719 - RNA, 32 nt, Human
gcguuuuucucgucccccucccugcccaaacu

SEQ ID NO: 177720 - RNA, 32 nt, Human
gcuaaaaacccagagcagaagcagggagaagg

SEQ ID NO: 177721 - RNA, 32 nt, Human
gcuaaaaauacaaaauuagcugggcguggugg

SEQ ID NO: 177722 - RNA, 32 nt, Human
gcuaaaacaguccugaaucuuccaugaacagu

SEQ ID NO: 177723 - RNA, 32 nt, Human
gcuaaaacucagcugcagccuggacaguagag

SEQ ID NO: 177724 - RNA, 32 nt, Human
gcuaaaacuuuggcugggcaugguggcucacg

SEQ ID NO: 177725 - RNA, 32 nt, Human
gcuaaaaggccugagggccucggacgcgggug

SEQ ID NO: 177726 - RNA, 32 nt, Human
gcuaaaaggucuugcaguggcuuuucauggcc

SEQ ID NO: 177727 - RNA, 32 nt, Human
gcuaaaauguggagcuugggagaagaugaucg

SEQ ID NO: 177728 - RNA, 32 nt, Human
gcuaaaauguucaugaguaucaagcagaacag

SEQ ID NO: 177729 - RNA, 32 nt, Human
gcuaaaauuucagaacagucucuguaaggcuc

SEQ ID NO: 177730 - RNA, 32 nt, Human
gcuaaacaccaaaccauuuccaaaaauacccc

SEQ ID NO: 177731 - RNA, 32 nt, Human
gcuaaacagccaagacuggagcagucucucac

SEQ ID NO: 177732 - RNA, 32 nt, Human
gcuaaacaucaaaaacagaucugguaggggcg

SEQ ID NO: 177733 - RNA, 32 nt, Human
gcuaaaccugccucugugccaguggcucucaa

SEQ ID NO: 177734 - RNA, 32 nt, Human
gcuaaacguuuguuccccaucucugugccucc

SEQ ID NO: 177735 - RNA, 32 nt, Human
gcuaaagaaagccacagaaagccggacccgca

SEQ ID NO: 177736 - RNA, 32 nt, Human
gcuaaagaaugucaguaaauaaaagagcuuuc

SEQ ID NO: 177737 - RNA, 32 nt, Human
gcuaaagaguaugaaaaauguuuugauggaag

SEQ ID NO: 177738 - RNA, 32 nt, Human
gcuaaagcaaaaaguacuaggcuacuaagugc

SEQ ID NO: 177739 - RNA, 32 nt, Human
gcuaaagcaauguuguuaaaauuagcucaaua

SEQ ID NO: 177740 - RNA, 23 nt, Human
gcuaaagcaggagaauugcuuga

SEQ ID NO: 177741 - RNA, 24 nt, Human
gcuaaagcaggaggauggcuuuag

SEQ ID NO: 177742 - RNA, 32 nt, Human
gcuaaagcaguggcuggggcuuuguuuuuaaa

SEQ ID NO: 177743 - RNA, 32 nt, Human
gcuaaagccagcccucccuguccuuuccagag

SEQ ID NO: 177744 - RNA, 32 nt, Human
gcuaaagccuguaaucccagcacuuugggagg

SEQ ID NO: 177745 - RNA, 32 nt, Human
gcuaaagcugggucugaaauuuggucaguggg

SEQ ID NO: 177746 - RNA, 32 nt, Human
gcuaaaggacaguggaugcugcugggccucug

SEQ ID NO: 177747 - RNA, 32 nt, Human
gcuaaaggaggcugagguugcagugagcugag

SEQ ID NO: 177748 - RNA, 32 nt, Human
gcuaaaggccuuccuuccuuccagucagccug

SEQ ID NO: 177749 - RNA, 32 nt, Human
gcuaaaggcggccagguuugcagugcgggaag

SEQ ID NO: 177750 - RNA, 22 nt, Human
gcuaaagggugcacacuccaag

SEQ ID NO: 177751 - RNA, 32 nt, Human
gcuaaagguggaagcugaccuggagaaagaga

SEQ ID NO: 177752 - RNA, 32 nt, Human
gcuaaagugacucucuggguugccugcuucca

SEQ ID NO: 177753 - RNA, 24 nt, Human
gcuaaagugggaggauuacuugag

SEQ ID NO: 177754 - RNA, 32 nt, Human
gcuaaauaaccagcuagagcuagcugccagcc

SEQ ID NO: 177755 - RNA, 32 nt, Human
gcuaaauacucauguguaguuuuuauacuaca

SEQ ID NO: 177756 - RNA, 24 nt, Human
gcuaaauaucaaucaagccaugua

SEQ ID NO: 177757 - RNA, 24 nt, Human
gcuaaauauucuagcagugaugua

SEQ ID NO: 177758 - RNA, 22 nt, Human
gcuaaauauuuauggccaugua

SEQ ID NO: 177759 - RNA, 32 nt, Human
gcuaaaucagaagaaaaugccaaggaagaaaa

SEQ ID NO: 177760 - RNA, 32 nt, Human
gcuaaauccacaucuagcccugagcagcauuu

SEQ ID NO: 177761 - RNA, 32 nt, Human
gcuaaaucgguucagacucccaccucaccguu

SEQ ID NO: 177762 - RNA, 32 nt, Human
gcuaaaucuccaaaccauucccaaaccuuucc

SEQ ID NO: 177763 - RNA, 32 nt, Human
gcuaaaucuugcuuugcuuucaauaaaguguc

SEQ ID NO: 177764 - RNA, 32 nt, Human
gcuaaaucuuucaacucuccccaguccccuca

SEQ ID NO: 177765 - RNA, 32 nt, Human
gcuaaaugagauguuucuaaucugggcuucca

SEQ ID NO: 177766 - RNA, 32 nt, Human
gcuaaaugcuggguguguaugugugcauuuuc

SEQ ID NO: 177767 - RNA, 32 nt, Human
gcuaaaugcuuugcagaaagugaugaccuuac

SEQ ID NO: 177768 - RNA, 32 nt, Human
gcuaaauggacaucauguuuucuggugaugcc

SEQ ID NO: 177769 - RNA, 32 nt, Human
gcuaaauuaaaccaaacccuauugaagaauug

SEQ ID NO: 177770 - RNA, 32 nt, Human
gcuaaauucccccagccauuaucucacacuga

SEQ ID NO: 177771 - RNA, 32 nt, Human
gcuaaauucucagguggcucaaaggaaaacau

SEQ ID NO: 177772 - RNA, 32 nt, Human
gcuaaauuuaacuguugguuuugugguagagu

SEQ ID NO: 177773 - RNA, 32 nt, Human
gcuaacaaaagcuucucagcugaggacacuca

SEQ ID NO: 177774 - RNA, 32 nt, Human
gcuaacaaggacacuguacacaacaucgcuaa

SEQ ID NO: 177775 - RNA, 32 nt, Human
gcuaacaaggaugcuguacacaacaucgcuaa

SEQ ID NO: 177776 - RNA, 32 nt, Human
gcuaacaccacggcacuucagccugggugaca

SEQ ID NO: 177777 - RNA, 32 nt, Human
gcuaacaccuauaauucccagcacuuugggag

SEQ ID NO: 177778 - RNA, 32 nt, Human
gcuaacaccuggaucuccagaaaccuagccca

SEQ ID NO: 177779 - RNA, 32 nt, Human
gcuaacaccuguaaucccagcacuuugggagg

SEQ ID NO: 177780 - RNA, 32 nt, Human
gcuaacacgggugaaaccccgucucuauuaaa

SEQ ID NO: 177781 - RNA, 24 nt, Human
gcuaacacucguuugcugcugcug

SEQ ID NO: 177782 - RNA, 18 nt, Human
gcuaacacugccaccucu

SEQ ID NO: 177783 - RNA, 20 nt, Human
gcuaacagcaguuucaggua

SEQ ID NO: 177784 - RNA, 32 nt, Human
gcuaacagcauugccugugcucuccucucagg

SEQ ID NO: 177785 - RNA, 32 nt, Human
gcuaacaggauaugggcuaccaggaagaagga

SEQ ID NO: 177786 - RNA, 32 nt, Human
gcuaacagucucuuaggcuuccuucucauuuc

SEQ ID NO: 177787 - RNA, 32 nt, Human
gcuaacauggugaaauccuaucucuaccaaaa

SEQ ID NO: 177788 - RNA, 32 nt, Human
gcuaaccaccgugcgucucucucagcugcuga

SEQ ID NO: 177789 - RNA, 32 nt, Human
gcuaaccagggagagucagguuaauuuucugu

SEQ ID NO: 177790 - RNA, 32 nt, Human
gcuaaccaggugaagaucugagcccagaaaug

SEQ ID NO: 177791 - RNA, 32 nt, Human
gcuaaccaucaccaccagcucuccuuaauaca

SEQ ID NO: 177792 - RNA, 32 nt, Human
gcuaaccaucaucugguccuucaucaagucgu

SEQ ID NO: 177793 - RNA, 32 nt, Human
gcuaaccaucuauuucauccucucuucuggca

SEQ ID NO: 177794 - RNA, 32 nt, Human
gcuaacccagaaaauucgaaggaacacauuaa

SEQ ID NO: 177795 - RNA, 32 nt, Human
gcuaaccccacugugcuuccacaugccuggcc

SEQ ID NO: 177796 - RNA, 32 nt, Human
gcuaaccccuggcaaccacuaaucuguucccc

SEQ ID NO: 177797 - RNA, 20 nt, Human
gcuaaccccugucuucuucc

SEQ ID NO: 177798 - RNA, 32 nt, Human
gcuaaccuagugccuauagcuaaggcagguac

SEQ ID NO: 177799 - RNA, 32 nt, Human
gcuaaccucuguuucaagaaugcaguuauuaa

SEQ ID NO: 177800 - RNA, 32 nt, Human
gcuaaccugcauuugugugcuguguccaccuu

SEQ ID NO: 177801 - RNA, 32 nt, Human
gcuaaccuguaaucccagcuacuugggaggcu

SEQ ID NO: 177802 - RNA, 32 nt, Human
gcuaaccuuacauuucuuagaagcaaaauauu

SEQ ID NO: 177803 - RNA, 32 nt, Human
gcuaacgaggacgcuguacacaacaucgcuaa

SEQ ID NO: 177804 - RNA, 32 nt, Human
gcuaacgccuguaaucccagaacuuugggaag

SEQ ID NO: 177805 - RNA, 32 nt, Human
gcuaacgccuguaaucccagcacuugggaggc

SEQ ID NO: 177806 - RNA, 32 nt, Human
gcuaacgccuguaaucccagcacuuugagaug

SEQ ID NO: 177807 - RNA, 22 nt, Human
gcuaacgcugcugcugcugcug

SEQ ID NO: 177808 - RNA, 32 nt, Human
gcuaacgggaggcagugugauguggaggggaa

SEQ ID NO: 177809 - RNA, 32 nt, Human
gcuaacucacuggccagcucucaccagcggug

SEQ ID NO: 177810 - RNA, 32 nt, Human
gcuaacuccagaaauuccugcagacauccuac

SEQ ID NO: 177811 - RNA, 32 nt, Human
gcuaacucucccaaaaaggaccauggguagca

SEQ ID NO: 177812 - RNA, 32 nt, Human
gcuaacugcaaccuccagcuccuggguucagg

SEQ ID NO: 177813 - RNA, 32 nt, Human
gcuaacugcaacuuccaccuccuggguucaag

SEQ ID NO: 177814 - RNA, 32 nt, Human
gcuaacugcagccucaaccugcagugcucaag

SEQ ID NO: 177815 - RNA, 21 nt, Human
gcuaacugugcguuucucccu

SEQ ID NO: 177816 - RNA, 22 nt, Human
gcuaacuuccacuaauccauua

SEQ ID NO: 177817 - RNA, 32 nt, Human
gcuaagaacacagcuggcuggaagaagacagg

SEQ ID NO: 177818 - RNA, 32 nt, Human
gcuaagaacucauggccacuguggaaaucuug

SEQ ID NO: 177819 - RNA, 32 nt, Human
gcuaagaacuuuguauacaucaucucauuuaa

SEQ ID NO: 177820 - RNA, 32 nt, Human
gcuaagaaggagagauuggaagagaagcaagg

SEQ ID NO: 177821 - RNA, 32 nt, Human
gcuaagaaggcagaggccagcugguauauuca

SEQ ID NO: 177822 - RNA, 19 nt, Human
gcuaagaaggcucagggca

SEQ ID NO: 177823 - RNA, 32 nt, Human
gcuaagaagugagucagagaguagagggguag

SEQ ID NO: 177824 - RNA, 32 nt, Human
gcuaagacaacaguaacagccauuuacuccac

SEQ ID NO: 177825 - RNA, 21 nt, Human
gcuaagacaggaagaucaccu

SEQ ID NO: 177826 - RNA, 23 nt, Human
gcuaagacaggagaaucgcuuga

SEQ ID NO: 177827 - RNA, 32 nt, Human
gcuaagacauaaaaggugugaaagcacuagcc

SEQ ID NO: 177828 - RNA, 23 nt, Human
gcuaagacgggaggauugcuuga

SEQ ID NO: 177829 - RNA, 32 nt, Human
gcuaagacuccaggacccccuggaagccuaga

SEQ ID NO: 177830 - RNA, 32 nt, Human
gcuaagacugugccacugcacuccagccuggg

SEQ ID NO: 177831 - RNA, 21 nt, Human
gcuaagagacaaaggaggcgg

SEQ ID NO: 177832 - RNA, 32 nt, Human
gcuaagagauucccgcugauugggcucagugc

SEQ ID NO: 177833 - RNA, 32 nt, Human
gcuaagagggcaggacugugggccagugccag

SEQ ID NO: 177834 - RNA, 32 nt, Human
gcuaagcaagaggccucugcaucuugacaccu

SEQ ID NO: 177835 - RNA, 20 nt, Human
gcuaagcagugaccagaacc

SEQ ID NO: 177836 - RNA, 32 nt, Human
gcuaagcaugacagauaucaacagggcgggcu

SEQ ID NO: 177837 - RNA, 32 nt, Human
gcuaagcccaggaugccgcccaagccucgggg

SEQ ID NO: 177838 - RNA, 32 nt, Human
gcuaagcccaguucaaggcugcagugaacuau

SEQ ID NO: 177839 - RNA, 32 nt, Human
gcuaagccccuggaugauggagcgagaaggga

SEQ ID NO: 177840 - RNA, 32 nt, Human
gcuaagccugcaguaggaucucagccacaagg

SEQ ID NO: 177841 - RNA, 32 nt, Human
gcuaagcucuuugccagcucucauuuggaguu

SEQ ID NO: 177842 - RNA, 19 nt, Human
gcuaagcugggugcagugg

SEQ ID NO: 177843 - RNA, 32 nt, Human
gcuaaggaaaaaggacaccaaaaugaagaaga

SEQ ID NO: 177844 - RNA, 22 nt, Human
gcuaaggaaaagggacccaagg

SEQ ID NO: 177845 - RNA, 22 nt, Human
gcuaaggaaaagggacccaggg

SEQ ID NO: 177846 - RNA, 23 nt, Human
gcuaaggaaauaugcaggggguu

SEQ ID NO: 177847 - RNA, 32 nt, Human
gcuaaggaagcccugacaugcugcagucggaa

SEQ ID NO: 177848 - RNA, 25 nt, Human
gcuaaggacacuuguuuggggccac

SEQ ID NO: 177849 - RNA, 20 nt, Human
gcuaaggacauguccuuucc

SEQ ID NO: 177850 - RNA, 32 nt, Human
gcuaaggacccugaugaagucacugcacccuc

SEQ ID NO: 177851 - RNA, 32 nt, Human
gcuaaggagggaguugacaucccccuucuggc

SEQ ID NO: 177852 - RNA, 32 nt, Human
gcuaaggcaaagcaccuggcuaggcagcugga

SEQ ID NO: 177853 - RNA, 23 nt, Human
gcuaaggcaggaaaaucgcuuga

SEQ ID NO: 177854 - RNA, 23 nt, Human
gcuaaggcaggagaaucacuuga

SEQ ID NO: 177855 - RNA, 23 nt, Human
gcuaaggcaggagaaucgcuuga

SEQ ID NO: 177856 - RNA, 23 nt, Human
gcuaaggcaggagaaucucuuga

SEQ ID NO: 177857 - RNA, 23 nt, Human
gcuaaggcaggagaauugcuuga

SEQ ID NO: 177858 - RNA, 24 nt, Human
gcuaaggcaggaggauugcuugag

SEQ ID NO: 177859 - RNA, 24 nt, Human
gcuaaggcagggagaaucgcuuga

SEQ ID NO: 177860 - RNA, 23 nt, Human
gcuaaggcaggggaaucgcuuga

SEQ ID NO: 177861 - RNA, 19 nt, Human
gcuaaggcagguggaucac

SEQ ID NO: 177862 - RNA, 32 nt, Human
gcuaaggccguggagcugcugugugacugugu

SEQ ID NO: 177863 - RNA, 32 nt, Human
gcuaaggccugagaguuuuugcagaaaugggg

SEQ ID NO: 177864 - RNA, 24 nt, Human
gcuaaggcgggaggaucccuugag

SEQ ID NO: 177865 - RNA, 24 nt, Human
gcuaaggcgggaggaugacuugag

SEQ ID NO: 177866 - RNA, 32 nt, Human
gcuaaggcuuguguccaucaacagaugaaugg

SEQ ID NO: 177867 - RNA, 32 nt, Human
gcuaaggggagucaucacagggcuucagggcu

SEQ ID NO: 177868 - RNA, 32 nt, Human
gcuaaggggagugaguccagagagggacuuaa

SEQ ID NO: 177869 - RNA, 32 nt, Human
gcuaaggggguauguugugcagaugcuacugc

SEQ ID NO: 177870 - RNA, 32 nt, Human
gcuaagggguaguggcuggcagagguugccca

SEQ ID NO: 177871 - RNA, 32 nt, Human
gcuaaggucuccaggcugcugaugaagugagg

SEQ ID NO: 177872 - RNA, 24 nt, Human
gcuaaggugggagaauugcuugag

SEQ ID NO: 177873 - RNA, 24 nt, Human
gcuaaggugggaggaucacuugag

SEQ ID NO: 177874 - RNA, 24 nt, Human
gcuaaggugggaggaucccuugag

SEQ ID NO: 177875 - RNA, 32 nt, Human
gcuaaguauuauccugcuuccagaccuauguc

SEQ ID NO: 177876 - RNA, 32 nt, Human
gcuaagucagccaggcaggcugucaggcccua

SEQ ID NO: 177877 - RNA, 32 nt, Human
gcuaaguccagguguuuguauucgggcuagaa

SEQ ID NO: 177878 - RNA, 32 nt, Human
gcuaagucuaacacuccugggagcucaggagg

SEQ ID NO: 177879 - RNA, 32 nt, Human
gcuaagucuccucugugacucuagcaaaugcc

SEQ ID NO: 177880 - RNA, 29 nt, Human
gcuaagugucuguguggcuguggagcucg

SEQ ID NO: 177881 - RNA, 32 nt, Human
gcuaaguguguaugauaaugaaacucaucauu

SEQ ID NO: 177882 - RNA, 32 nt, Human
gcuaaguucacuugggaggauggcaguaggag

SEQ ID NO: 177883 - RNA, 32 nt, Human
gcuaauaauaagcuaaccuuugugcacaaaua

SEQ ID NO: 177884 - RNA, 32 nt, Human
gcuaauagagaaggagaaaggaaauaaaauaa

SEQ ID NO: 177885 - RNA, 32 nt, Human
gcuaauaugugaagugaauucuaccuuugacc

SEQ ID NO: 177886 - RNA, 32 nt, Human
gcuaauaugugcuccaucguucaugcccuggg

SEQ ID NO: 177887 - RNA, 32 nt, Human
gcuaaucaacuacccuuucuuuuaucaaguaa

SEQ ID NO: 177888 - RNA, 32 nt, Human
gcuaaucacaguuacaugcuucagaggacuua

SEQ ID NO: 177889 - RNA, 32 nt, Human
gcuaaucagcaucuggccaacauaguggagag

SEQ ID NO: 177890 - RNA, 32 nt, Human
gcuaaucauuuauccaaaggcuuuccauucuu

SEQ ID NO: 177891 - RNA, 32 nt, Human
gcuaaucauuuuaauuaaaaacaaauaagcau

SEQ ID NO: 177892 - RNA, 32 nt, Human
gcuaauccaguggaaaucaggaaaggugugau

SEQ ID NO: 177893 - RNA, 32 nt, Human
gcuaauccggagaacccaggccagagccugaa

SEQ ID NO: 177894 - RNA, 32 nt, Human
gcuaauccucaucugucauauccagaaaucac

SEQ ID NO: 177895 - RNA, 32 nt, Human
gcuaauccuccugagugcuggaccucauuaaa

SEQ ID NO: 177896 - RNA, 32 nt, Human
gcuaauccuuuccugccugugcucucuccccu

SEQ ID NO: 177897 - RNA, 32 nt, Human
gcuaaucucaaggagcuuccagugcagaggga

SEQ ID NO: 177898 - RNA, 32 nt, Human
gcuaaucugccuugguuccauuuccuuauucu

SEQ ID NO: 177899 - RNA, 32 nt, Human
gcuaaucuuggcuuuucuccaagucuacgacg

SEQ ID NO: 177900 - RNA, 32 nt, Human
gcuaaugaggagucaaaugcaggccugccugu

SEQ ID NO: 177901 - RNA, 21 nt, Human
gcuaaugaggugacucagggu

SEQ ID NO: 177902 - RNA, 23 nt, Human
gcuaaugcaggagaaucgcuuga

SEQ ID NO: 177903 - RNA, 32 nt, Human
gcuaauggaguguuugaaaacugacaucagau

SEQ ID NO: 177904 - RNA, 32 nt, Human
gcuaauggcugguagagauuguacugacuauu

SEQ ID NO: 177905 - RNA, 32 nt, Human
gcuaaugggugcugcacugggccagaugggca

SEQ ID NO: 177906 - RNA, 32 nt, Human
gcuaauuaucuuucccaccaaccuccuccauc

SEQ ID NO: 177907 - RNA, 32 nt, Human
gcuaauuccaaagccacuuuugaagucuauag

SEQ ID NO: 177908 - RNA, 32 nt, Human
gcuaauucgggagauagccauaugaaaacuuu

SEQ ID NO: 177909 - RNA, 32 nt, Human
gcuaauucucagaaaggcaaguagaugauaaa

SEQ ID NO: 177910 - RNA, 32 nt, Human
gcuaauucuuuuccuuucauuuugcuuucuga

SEQ ID NO: 177911 - RNA, 32 nt, Human
gcuaauuuagagagaccuauccauuucaaaau

SEQ ID NO: 177912 - RNA, 23 nt, Human
gcuaauuuauaauuacuauuauu

SEQ ID NO: 177913 - RNA, 32 nt, Human
gcuaauuucuguauuuuuaguagagacagggu

SEQ ID NO: 177914 - RNA, 32 nt, Human
gcuaauuucuguauuuuuaguagagauggggu

SEQ ID NO: 177915 - RNA, 32 nt, Human
gcuaauuucuugaacuccuggccucaagcagu

SEQ ID NO: 177916 - RNA, 32 nt, Human
gcuaauuuguauuuguauucccuucccccuac

SEQ ID NO: 177917 - RNA, 32 nt, Human
gcuaauuuuaauaaaaauaagaaaaauuaaua

SEQ ID NO: 177918 - RNA, 32 nt, Human
gcuacaaaagaaaucacagcugcuagaaguau

SEQ ID NO: 177919 - RNA, 32 nt, Human
gcuacaaaggaaagacaacuggggaaagaaga

SEQ ID NO: 177920 - RNA, 32 nt, Human
gcuacaagaggaccuggggcuuuggagugaag

SEQ ID NO: 177921 - RNA, 32 nt, Human
gcuacaagagguuaggaagcccaagaaaauga

SEQ ID NO: 177922 - RNA, 24 nt, Human
gcuacaauaauuccaacuaaguga

SEQ ID NO: 177923 - RNA, 32 nt, Human
gcuacaauccagguucuccucagucugacucc

SEQ ID NO: 177924 - RNA, 32 nt, Human
gcuacaauccaucuggucuccuccagcuccuu

SEQ ID NO: 177925 - RNA, 19 nt, Human
gcuacaaugcuguuaaauc

SEQ ID NO: 177926 - RNA, 32 nt, Human
gcuacaauggcccaccacccaccuacccacug

SEQ ID NO: 177927 - RNA, 20 nt, Human
gcuacaaugucucgugaauc

SEQ ID NO: 177928 - RNA, 25 nt, Human
gcuacacaaagucgugguuugcaug

SEQ ID NO: 177929 - RNA, 32 nt, Human
gcuacacaaucccaagacagagcuagagcaag

SEQ ID NO: 177930 - RNA, 23 nt, Human
gcuacacacgcugcgccuccaua

SEQ ID NO: 177931 - RNA, 32 nt, Human
gcuacacagaggccuuuguucuuuccuggcau

SEQ ID NO: 177932 - RNA, 32 nt, Human
gcuacacagcugcccacuccuccuggggaggc

SEQ ID NO: 177933 - RNA, 32 nt, Human
gcuacacaggaggcugaagugggaggaguguu

SEQ ID NO: 177934 - RNA, 32 nt, Human
gcuacacaguaggagauucuuuuucuucucuu

SEQ ID NO: 177935 - RNA, 21 nt, Human
gcuacacagucuccuauuauc

SEQ ID NO: 177936 - RNA, 32 nt, Human
gcuacacagugcagaggcucuugaugguggac

SEQ ID NO: 177937 - RNA, 32 nt, Human
gcuacacaucuccuucuggcucaggugaaauc

SEQ ID NO: 177938 - RNA, 32 nt, Human
gcuacacaugugcacacaugcacaguugcaca

SEQ ID NO: 177939 - RNA, 32 nt, Human
gcuacaccaccuagguuuguguaaguauacgc

SEQ ID NO: 177940 - RNA, 32 nt, Human
gcuacacccugccuggccacaugggguucccu

SEQ ID NO: 177941 - RNA, 32 nt, Human
gcuacacuagcccccauucucugggcgccugg

SEQ ID NO: 177942 - RNA, 32 nt, Human
gcuacacuccagccugggugacagagugagac

SEQ ID NO: 177943 - RNA, 32 nt, Human
gcuacacucccaucagcgccaugacaguuuac

SEQ ID NO: 177944 - RNA, 32 nt, Human
gcuacacugacacugguauuccugccuccaua

SEQ ID NO: 177945 - RNA, 32 nt, Human
gcuacacugcaacuuccguccagugcugugau

SEQ ID NO: 177946 - RNA, 32 nt, Human
gcuacacugcuggugugugcauucugagaccu

SEQ ID NO: 177947 - RNA, 32 nt, Human
gcuacacugggcagaguuggcagggugcuggu

SEQ ID NO: 177948 - RNA, 32 nt, Human
gcuacagaaaccaggucauuugugcacagccc

SEQ ID NO: 177949 - RNA, 32 nt, Human
gcuacagacagcuuugaugacuacccaccuag

SEQ ID NO: 177950 - RNA, 32 nt, Human
gcuacagacuucuccccaccccguaggagcug

SEQ ID NO: 177951 - RNA, 32 nt, Human
gcuacagagagggaagggaaagccugaggccg

SEQ ID NO: 177952 - RNA, 32 nt, Human
gcuacagaggcccagugguguaagcugcuucc

SEQ ID NO: 177953 - RNA, 32 nt, Human
gcuacagaucucucugcucaucaugcccuuuc

SEQ ID NO: 177954 - RNA, 20 nt, Human
gcuacagaugggacccaagg

SEQ ID NO: 177955 - RNA, 32 nt, Human
gcuacagcacaaaaucuucaagcugagugcau

SEQ ID NO: 177956 - RNA, 32 nt, Human
gcuacagcagcaagcagacaaaguaagcuguu

SEQ ID NO: 177957 - RNA, 23 nt, Human
gcuacagcaggagaauugcuuga

SEQ ID NO: 177958 - RNA, 20 nt, Human
gcuacagcccagaagccaga

SEQ ID NO: 177959 - RNA, 21 nt, Human
gcuacagcccagaccaaggca

SEQ ID NO: 177960 - RNA, 32 nt, Human
gcuacagccgccgaaauguugaugccuaagaa

SEQ ID NO: 177961 - RNA, 32 nt, Human
gcuacagcuccaggagcccagcgccgggcugu

SEQ ID NO: 177962 - RNA, 32 nt, Human
gcuacagcuucuuccuccuccuuggagcugcu

SEQ ID NO: 177963 - RNA, 32 nt, Human
gcuacaggacaugggagcugcugcuuguggga

SEQ ID NO: 177964 - RNA, 32 nt, Human
gcuacaggaggggucucauguccugcuggcuu

SEQ ID NO: 177965 - RNA, 20 nt, Human
gcuacaggagguucggggca

SEQ ID NO: 177966 - RNA, 32 nt, Human
gcuacaggccaucaacuuguggaagguggggc

SEQ ID NO: 177967 - RNA, 32 nt, Human
gcuacaggcuccauuucucugccuucccauug

SEQ ID NO: 177968 - RNA, 32 nt, Human
gcuacaggcugcaggcacgcagggcagcgggu

SEQ ID NO: 177969 - RNA, 23 nt, Human
gcuacaggcugcaggcacugcag

SEQ ID NO: 177970 - RNA, 32 nt, Human
gcuacagggaaugauuggucauggggaagucu

SEQ ID NO: 177971 - RNA, 32 nt, Human
gcuacaggucucuguguaaugugaagcucucc

SEQ ID NO: 177972 - RNA, 32 nt, Human
gcuacaggucugucacuaugcucucuugccuu

SEQ ID NO: 177973 - RNA, 32 nt, Human
gcuacaggugucuuuauuuccacugcacgcug

SEQ ID NO: 177974 - RNA, 32 nt, Human
gcuacagucaaaaauuccaaaguuccuacacc

SEQ ID NO: 177975 - RNA, 32 nt, Human
gcuacagugagcuccaggaguggagggggcuc

SEQ ID NO: 177976 - RNA, 32 nt, Human
gcuacagugagcugugauugcaccacuguacu

SEQ ID NO: 177977 - RNA, 32 nt, Human
gcuacaguguguacaaaagacuugcuguuuua

SEQ ID NO: 177978 - RNA, 32 nt, Human
gcuacaguuggguuuauaauaaacccugaauc

SEQ ID NO: 177979 - RNA, 32 nt, Human
gcuacauaucuagccauucacagauguggaua

SEQ ID NO: 177980 - RNA, 32 nt, Human
gcuacaucacaaaucaguuucaagagggccuu

SEQ ID NO: 177981 - RNA, 32 nt, Human
gcuacaucacccaaaguagauguuagaaaacc

SEQ ID NO: 177982 - RNA, 22 nt, Human
gcuacaugcuggggucaaggca

SEQ ID NO: 177983 - RNA, 32 nt, Human
gcuacaugcuuaguggcaacuucugccuuuuu

SEQ ID NO: 177984 - RNA, 21 nt, Human
gcuacaugggagccugaggca

SEQ ID NO: 177985 - RNA, 24 nt, Human
gcuacauugcccaggcuggucuca

SEQ ID NO: 177986 - RNA, 32 nt, Human
gcuacauuuaaaacaaaaucucacagcucggu

SEQ ID NO: 177987 - RNA, 32 nt, Human
gcuaccaaccacagccuggcagccuggucucc

SEQ ID NO: 177988 - RNA, 16 nt, Human
gcuaccaaccaggguc

SEQ ID NO: 177989 - RNA, 32 nt, Human
gcuaccaagauccugaaugucagagauguacu

SEQ ID NO: 177990 - RNA, 32 nt, Human
gcuaccaaguagcugggacuucagagauggcu

SEQ ID NO: 177991 - RNA, 32 nt, Human
gcuaccaaugagcuacccacagccugggcaac

SEQ ID NO: 177992 - RNA, 32 nt, Human
gcuaccacaagaaccugcgucuuggaccauug

SEQ ID NO: 177993 - RNA, 21 nt, Human
gcuaccacauggccucgcugu

SEQ ID NO: 177994 - RNA, 32 nt, Human
gcuaccacauucaauuaacuuugcuauuaauu

SEQ ID NO: 177995 - RNA, 19 nt, Human
gcuaccacauucuauuauu

SEQ ID NO: 177996 - RNA, 32 nt, Human
gcuaccacgccuggcccguguugcuguuuuaa

SEQ ID NO: 177997 - RNA, 32 nt, Human
gcuaccacuaaauuauggugacuguuccuaau

SEQ ID NO: 177998 - RNA, 32 nt, Human
gcuaccacuguccggcccggaggggaacuguu

SEQ ID NO: 177999 - RNA, 32 nt, Human
gcuaccagaagugaaugucaaccagcuggaac

SEQ ID NO: 178000 - RNA, 32 nt, Human
gcuaccagaucagguuagcacaguauagagca

SEQ ID NO: 178001 - RNA, 32 nt, Human
gcuaccaggaaaccuuugccuccuggggcugu

SEQ ID NO: 178002 - RNA, 32 nt, Human
gcuaccaugccuggcuaauuuuuguauuuuua

SEQ ID NO: 178003 - RNA, 32 nt, Human
gcuacccaaauuuucauuucuccacauuuugg

SEQ ID NO: 178004 - RNA, 32 nt, Human
gcuacccaagagaccauggacuguggacucuu

SEQ ID NO: 178005 - RNA, 32 nt, Human
gcuacccaagaguuggaaacuuccuguguugc

SEQ ID NO: 178006 - RNA, 32 nt, Human
gcuacccaaggcuaaggguggggaagaacccc

SEQ ID NO: 178007 - RNA, 32 nt, Human
gcuacccacagcaaccaaagagacuuccucuu

SEQ ID NO: 178008 - RNA, 20 nt, Human
gcuacccacuagcccucacu

SEQ ID NO: 178009 - RNA, 22 nt, Human
gcuacccagaggacccaucaga

SEQ ID NO: 178010 - RNA, 24 nt, Human
gcuacccaucuauguauguaguca

SEQ ID NO: 178011 - RNA, 23 nt, Human
gcuacccaucucuucccacuaga

SEQ ID NO: 178012 - RNA, 32 nt, Human
gcuaccccagccgguuuggauuacaggccugu

SEQ ID NO: 178013 - RNA, 20 nt, Human
gcuaccccaggagugggcca

SEQ ID NO: 178014 - RNA, 22 nt, Human
gcuaccccaggugaaacuggaa

SEQ ID NO: 178015 - RNA, 21 nt, Human
gcuacccccggccccagggca

SEQ ID NO: 178016 - RNA, 32 nt, Human
gcuaccccggcaccaucugcccagcuccaagg

SEQ ID NO: 178017 - RNA, 22 nt, Human
gcuaccccucuaccugcugcug

SEQ ID NO: 178018 - RNA, 21 nt, Human
gcuaccccugcccagcugcug

SEQ ID NO: 178019 - RNA, 32 nt, Human
gcuaccccugucagacagaggcugcggccugg

SEQ ID NO: 178020 - RNA, 32 nt, Human
gcuaccccuguccuggccucugauguuaucca

SEQ ID NO: 178021 - RNA, 32 nt, Human
gcuaccccuuacuccccucugcaacccccauu

SEQ ID NO: 178022 - RNA, 32 nt, Human
gcuacccgagacuggggugggaggauccauug

SEQ ID NO: 178023 - RNA, 32 nt, Human
gcuacccgagguuugcaaauccuucaugucuu

SEQ ID NO: 178024 - RNA, 32 nt, Human
gcuacccgaguuuaguaacagugcagauucca

SEQ ID NO: 178025 - RNA, 18 nt, Human
gcuacccgccagcguguc

SEQ ID NO: 178026 - RNA, 32 nt, Human
gcuacccgggaggcaguggcugcagugagcug

SEQ ID NO: 178027 - RNA, 32 nt, Human
gcuacccuaaagggagaaggaagggcagagaa

SEQ ID NO: 178028 - RNA, 32 nt, Human
gcuacccuccgagccgcgccccugucucaggc

SEQ ID NO: 178029 - RNA, 32 nt, Human
gcuacccugagauguugguggacuggaucucu

SEQ ID NO: 178030 - RNA, 32 nt, Human
gcuacccugaucagagucaucaugccucgagc

SEQ ID NO: 178031 - RNA, 23 nt, Human
gcuaccgccaccgccaccgccac

SEQ ID NO: 178032 - RNA, 27 nt, Human
gcuaccgcccggccucgccgccgccgc

SEQ ID NO: 178033 - RNA, 23 nt, Human
gcuaccgccgccgccgccgccgc

SEQ ID NO: 178034 - RNA, 23 nt, Human
gcuaccgccgucgccgccgccgc

SEQ ID NO: 178035 - RNA, 32 nt, Human
gcuaccguccuggccagcuaccgucagagaga

SEQ ID NO: 178036 - RNA, 32 nt, Human
gcuaccgugucuucacucuccagccugaggug

SEQ ID NO: 178037 - RNA, 32 nt, Human
gcuaccuaccucuuggggacauggcccuguuu

SEQ ID NO: 178038 - RNA, 32 nt, Human
gcuaccuaccuugcccagugcugacccggacc

SEQ ID NO: 178039 - RNA, 32 nt, Human
gcuaccuagugcuuuuucaaucaugccugauu

SEQ ID NO: 178040 - RNA, 32 nt, Human
gcuaccuaucucauguaugaaaauauuguuca

SEQ ID NO: 178041 - RNA, 32 nt, Human
gcuaccuauucuugagagagugagugagugua

SEQ ID NO: 178042 - RNA, 24 nt, Human
gcuaccucagggggacucauggca

SEQ ID NO: 178043 - RNA, 32 nt, Human
gcuaccucagugggagaugagguuggaggaac

SEQ ID NO: 178044 - RNA, 18 nt, Human
gcuaccuccagggacaga

SEQ ID NO: 178045 - RNA, 32 nt, Human
gcuaccucccaggacagaccccugucugacca

SEQ ID NO: 178046 - RNA, 22 nt, Human
gcuaccuccgccagccucgcca

SEQ ID NO: 178047 - RNA, 32 nt, Human
gcuaccucgggauuaugugcaagcugcuuugu

SEQ ID NO: 178048 - RNA, 32 nt, Human
gcuaccucuaccaacccucucucuccagcuag

SEQ ID NO: 178049 - RNA, 32 nt, Human
gcuaccucugcccugcccuccagccugggaca

SEQ ID NO: 178050 - RNA, 23 nt, Human
gcuaccucugggauggacugcgu

SEQ ID NO: 178051 - RNA, 32 nt, Human
gcuaccucuuauuuaccugaaaggaggacacg

SEQ ID NO: 178052 - RNA, 25 nt, Human
gcuaccugccugcugacccaccuga

SEQ ID NO: 178053 - RNA, 32 nt, Human
gcuaccuggcucuggugacacugugccgguug

SEQ ID NO: 178054 - RNA, 32 nt, Human
gcuaccugggcguggcgggugggcaggcggcc

SEQ ID NO: 178055 - RNA, 32 nt, Human
gcuaccuguuuguauccagcaguguuccucau

SEQ ID NO: 178056 - RNA, 32 nt, Human
gcuaccuugcuuguugggggacuggguacagu

SEQ ID NO: 178057 - RNA, 24 nt, Human
gcuaccuugucauguauacaguca

SEQ ID NO: 178058 - RNA, 32 nt, Human
gcuacgagaagcacagucucugccugaggcuc

SEQ ID NO: 178059 - RNA, 32 nt, Human
gcuacgaggcugcaucuggcuccagggaagcg

SEQ ID NO: 178060 - RNA, 23 nt, Human
gcuacgcaggaggauugcuugag

SEQ ID NO: 178061 - RNA, 32 nt, Human
gcuacgcaggguggaggcugggcugaggauua

SEQ ID NO: 178062 - RNA, 19 nt, Human
gcuacgccaaggucaucac

SEQ ID NO: 178063 - RNA, 18 nt, Human
gcuacgccgcugugcucc

SEQ ID NO: 178064 - RNA, 32 nt, Human
gcuacgcucacugcaggcuccgccuccugggu

SEQ ID NO: 178065 - RNA, 19 nt, Human
gcuacggaagggccagggc

SEQ ID NO: 178066 - RNA, 32 nt, Human
gcuacggagagggguggacggcucugcacggg

SEQ ID NO: 178067 - RNA, 32 nt, Human
gcuacggcuguugccaugaggcgaggcuaggg

SEQ ID NO: 178068 - RNA, 19 nt, Human
gcuacgggaggcccggggc

SEQ ID NO: 178069 - RNA, 32 nt, Human
gcuacggggaggacugagaggacagggcugga

SEQ ID NO: 178070 - RNA, 32 nt, Human
gcuacgggguggugauguuccucuuccagcug

SEQ ID NO: 178071 - RNA, 20 nt, Human
gcuacggugcaagcgggggg

SEQ ID NO: 178072 - RNA, 32 nt, Human
gcuacgucacccaaaguagauguuagaaaacc

SEQ ID NO: 178073 - RNA, 32 nt, Human
gcuacgucuuacccgccuccugccucaacagc

SEQ ID NO: 178074 - RNA, 32 nt, Human
gcuacgugacccaggcuggaguguaguagcua

SEQ ID NO: 178075 - RNA, 32 nt, Human
gcuacgugccaaggaggagaagguggaggagg

SEQ ID NO: 178076 - RNA, 32 nt, Human
gcuacgugcuuaaugggcacuggguggucagc

SEQ ID NO: 178077 - RNA, 32 nt, Human
gcuacguuuuauuaaauauuaccaggucagua

SEQ ID NO: 178078 - RNA, 32 nt, Human
gcuacuacacuuugcuccucuggcccaaggca

SEQ ID NO: 178079 - RNA, 32 nt, Human
gcuacuacagggaagaguguucucugcugucu

SEQ ID NO: 178080 - RNA, 32 nt, Human
gcuacuacgcuacagccugggugacagccaga

SEQ ID NO: 178081 - RNA, 32 nt, Human
gcuacuacuaugugcaggaacccuuggucaca

SEQ ID NO: 178082 - RNA, 32 nt, Human
gcuacuacugacuguauugccacuagagaauu

SEQ ID NO: 178083 - RNA, 32 nt, Human
gcuacuaggcaaaggccucuguuucucauuuc

SEQ ID NO: 178084 - RNA, 21 nt, Human
gcuacuaggggggcugaggca

SEQ ID NO: 178085 - RNA, 21 nt, Human
gcuacuaucauucacgauggc

SEQ ID NO: 178086 - RNA, 32 nt, Human
gcuacuauuaucgacauugaccuauuuccaga

SEQ ID NO: 178087 - RNA, 21 nt, Human
gcuacucaagaggcucaggca

SEQ ID NO: 178088 - RNA, 32 nt, Human
gcuacucaaggcugaggcaggagaaucacuug

SEQ ID NO: 178089 - RNA, 21 nt, Human
gcuacucacaaggccgaggua

SEQ ID NO: 178090 - RNA, 32 nt, Human
gcuacucagaguugcaaccucagccucgcuau

SEQ ID NO: 178091 - RNA, 32 nt, Human
gcuacucagcaaacuucuaaaaagcaacaaac

SEQ ID NO: 178092 - RNA, 32 nt, Human
gcuacucagccuuggaaauggagagcacugca

SEQ ID NO: 178093 - RNA, 21 nt, Human
gcuacucaggagccugaggca

SEQ ID NO: 178094 - RNA, 32 nt, Human
gcuacucaggagcugaggcaggagaauugcuu

SEQ ID NO: 178095 - RNA, 21 nt, Human
gcuacucaggaggcucaggca

SEQ ID NO: 178096 - RNA, 32 nt, Human
gcuacucaggaggcugaggcaggugaaucacu

SEQ ID NO: 178097 - RNA, 32 nt, Human
gcuacucaggaggcugaggugggaggaugacu

SEQ ID NO: 178098 - RNA, 32 nt, Human
gcuacucaggaggcugggcaggagaaucccuu

SEQ ID NO: 178099 - RNA, 32 nt, Human
gcuacucaggaggcugggcaggagaauggcgu

SEQ ID NO: 178100 - RNA, 19 nt, Human
gcuacucagggcugaggca

SEQ ID NO: 178101 - RNA, 32 nt, Human
gcuacucaguaggcugaggcagaaggauugcu

SEQ ID NO: 178102 - RNA, 21 nt, Human
gcuacucagugacccagguca

SEQ ID NO: 178103 - RNA, 32 nt, Human
gcuacucaguugauaagaauguuaacauacua

SEQ ID NO: 178104 - RNA, 32 nt, Human
gcuacuccaccccacucuggcuguagugugac

SEQ ID NO: 178105 - RNA, 32 nt, Human
gcuacuccacugaccuggaagagcuggguacc

SEQ ID NO: 178106 - RNA, 19 nt, Human
gcuacuccgagccaaggca

SEQ ID NO: 178107 - RNA, 32 nt, Human
gcuacuccucuccugggcaauauuggcugcuu

SEQ ID NO: 178108 - RNA, 21 nt, Human
gcuacucgagagccugaggca

SEQ ID NO: 178109 - RNA, 21 nt, Human
gcuacucgggaaccugaggca

SEQ ID NO: 178110 - RNA, 21 nt, Human
gcuacucgggagccugaggca

SEQ ID NO: 178111 - RNA, 32 nt, Human
gcuacucgggagguggagguugcagugagcca

SEQ ID NO: 178112 - RNA, 32 nt, Human
gcuacucgggggcugagccaggcggauagcuu

SEQ ID NO: 178113 - RNA, 21 nt, Human
gcuacucggggggccggggca

SEQ ID NO: 178114 - RNA, 32 nt, Human
gcuacucucaggcugcaaguaaguaugaagga

SEQ ID NO: 178115 - RNA, 21 nt, Human
gcuacucugaagacugaggca

SEQ ID NO: 178116 - RNA, 21 nt, Human
gcuacucugaagccugaggca

SEQ ID NO: 178117 - RNA, 32 nt, Human
gcuacucugcaccugggcuggccucaguugaa

SEQ ID NO: 178118 - RNA, 21 nt, Human
gcuacucugggggccaaggca

SEQ ID NO: 178119 - RNA, 32 nt, Human
gcuacucugguuacacagguguccccggcagg

SEQ ID NO: 178120 - RNA, 32 nt, Human
gcuacucuuaggcugcauaguuuaugagaaaa

SEQ ID NO: 178121 - RNA, 32 nt, Human
gcuacucuuccccucacaccuucuacaggcaa

SEQ ID NO: 178122 - RNA, 21 nt, Human
gcuacugaaauaucaauggca

SEQ ID NO: 178123 - RNA, 18 nt, Human
gcuacugaacuacagggu

SEQ ID NO: 178124 - RNA, 20 nt, Human
gcuacugaagaggcugaggu

SEQ ID NO: 178125 - RNA, 26 nt, Human
gcuacugaaguugaggcuuuagggua

SEQ ID NO: 178126 - RNA, 19 nt, Human
gcuacugacaaacucaggc

SEQ ID NO: 178127 - RNA, 20 nt, Human
gcuacugacaagccagggua

SEQ ID NO: 178128 - RNA, 32 nt, Human
gcuacugacacaugacaggaaacaaauggaau

SEQ ID NO: 178129 - RNA, 19 nt, Human
gcuacugaccucucaaggc

SEQ ID NO: 178130 - RNA, 32 nt, Human
gcuacugagacacggcggacacacacaaacac

SEQ ID NO: 178131 - RNA, 21 nt, Human
gcuacugaggaagcugaggca

SEQ ID NO: 178132 - RNA, 21 nt, Human
gcuacugaggaggcugaggca

SEQ ID NO: 178133 - RNA, 21 nt, Human
gcuacugagggggcugaggca

SEQ ID NO: 178134 - RNA, 32 nt, Human
gcuacugaggugucaggagugcagcugggccg

SEQ ID NO: 178135 - RNA, 20 nt, Human
gcuacugagugcuccaggca

SEQ ID NO: 178136 - RNA, 32 nt, Human
gcuacugaugauacaucacccuggggaauuca

SEQ ID NO: 178137 - RNA, 32 nt, Human
gcuacugcaaucaaagcuuauaugagugaaua

SEQ ID NO: 178138 - RNA, 32 nt, Human
gcuacugcacacgugcacccagaagaccgccc

SEQ ID NO: 178139 - RNA, 23 nt, Human
gcuacugcacuccagccagggca

SEQ ID NO: 178140 - RNA, 32 nt, Human
gcuacugcacuccagccuaggugacagaguga

SEQ ID NO: 178141 - RNA, 32 nt, Human
gcuacugcacuccagccugggugacagagcga

SEQ ID NO: 178142 - RNA, 32 nt, Human
gcuacugcacuccagccugggugacagaguga

SEQ ID NO: 178143 - RNA, 32 nt, Human
gcuacugcacuccagccugggugacaguguga

SEQ ID NO: 178144 - RNA, 32 nt, Human
gcuacugcacuccagucugggugacagaguga

SEQ ID NO: 178145 - RNA, 32 nt, Human
gcuacugcacucccgccugggugacagaguga

SEQ ID NO: 178146 - RNA, 32 nt, Human
gcuacugcacucuagauugggugacagagccu

SEQ ID NO: 178147 - RNA, 22 nt, Human
gcuacugcagggaccugagcca

SEQ ID NO: 178148 - RNA, 32 nt, Human
gcuacugcauuccugcuugggcgacagaguga

SEQ ID NO: 178149 - RNA, 32 nt, Human
gcuacugccauccagaaguuacaguuggauug

SEQ ID NO: 178150 - RNA, 32 nt, Human
gcuacugcuacugcugcugcugccaccgccac

SEQ ID NO: 178151 - RNA, 32 nt, Human
gcuacugcuccugcagggcauguggugauccu

SEQ ID NO: 178152 - RNA, 32 nt, Human
gcuacugcucugagcccacuuguugaaaccuc

SEQ ID NO: 178153 - RNA, 23 nt, Human
gcuacugcugcugcuacugcugc

SEQ ID NO: 178154 - RNA, 32 nt, Human
gcuacugcuuuccucccagugucugcugugaa

SEQ ID NO: 178155 - RNA, 32 nt, Human
gcuacugcuuuugcugugccuccaguuugcuc

SEQ ID NO: 178156 - RNA, 21 nt, Human
gcuacuggaagccccagagca

SEQ ID NO: 178157 - RNA, 20 nt, Human
gcuacuggagaggagagaca

SEQ ID NO: 178158 - RNA, 21 nt, Human
gcuacuggagaggcugaggca

SEQ ID NO: 178159 - RNA, 17 nt, Human
gcuacuggagggcgagg

SEQ ID NO: 178160 - RNA, 32 nt, Human
gcuacuggccgguagacuggagcccagcagca

SEQ ID NO: 178161 - RNA, 32 nt, Human
gcuacugggagcugauguggugcuucaccuac

SEQ ID NO: 178162 - RNA, 32 nt, Human
gcuacugggaggagucacugagagcuucguua

SEQ ID NO: 178163 - RNA, 22 nt, Human
gcuacuggggaaagcugaggca

SEQ ID NO: 178164 - RNA, 21 nt, Human
gcuacuggggaagcugaggca

SEQ ID NO: 178165 - RNA, 18 nt, Human
gcuacuggggacgggggc

SEQ ID NO: 178166 - RNA, 21 nt, Human
gcuacuggggaggcugaggca

SEQ ID NO: 178167 - RNA, 32 nt, Human
gcuacuggggcagggagccagguacagagcag

SEQ ID NO: 178168 - RNA, 32 nt, Human
gcuacugggguagcaacugacagcucagaaag

SEQ ID NO: 178169 - RNA, 21 nt, Human
gcuacuggguggaccggaggc

SEQ ID NO: 178170 - RNA, 20 nt, Human
gcuacugguaggccgaggca

SEQ ID NO: 178171 - RNA, 32 nt, Human
gcuacugguaggccgaggcaggagaaucacuu

SEQ ID NO: 178172 - RNA, 20 nt, Human
gcuacuggucaugccaggca

SEQ ID NO: 178173 - RNA, 22 nt, Human
gcuacuguaaguguucugagca

SEQ ID NO: 178174 - RNA, 32 nt, Human
gcuacugucacacccauacuaaccuagggagc

SEQ ID NO: 178175 - RNA, 32 nt, Human
gcuacuguuaaaaggcugcgguucauuucuga

SEQ ID NO: 178176 - RNA, 24 nt, Human
gcuacuuaaaaagagacccaggca

SEQ ID NO: 178177 - RNA, 32 nt, Human
gcuacuuaaauacaaaacuggacaggccaggc

SEQ ID NO: 178178 - RNA, 32 nt, Human
gcuacuuacuucuguggccucuggaaccuuau

SEQ ID NO: 178179 - RNA, 32 nt, Human
gcuacuuagggaggcuaagauaggaggaucac

SEQ ID NO: 178180 - RNA, 32 nt, Human
gcuacuucuccccuccucuugccucccuccug

SEQ ID NO: 178181 - RNA, 32 nt, Human
gcuacuugaaaccuacagaaccgacaaaaauu

SEQ ID NO: 178182 - RNA, 32 nt, Human
gcuacuugcccagguagugaucagugagaguu

SEQ ID NO: 178183 - RNA, 32 nt, Human
gcuacuugcuaguuagaaauucuuaucaauuu

SEQ ID NO: 178184 - RNA, 21 nt, Human
gcuacuugggacaccgaggca

SEQ ID NO: 178185 - RNA, 20 nt, Human
gcuacuugggagagcacugg

SEQ ID NO: 178186 - RNA, 32 nt, Human
gcuacuugggaggcagaggugggaagaugguu

SEQ ID NO: 178187 - RNA, 32 nt, Human
gcuacuugggaggcugaggcaagugaaucacu

SEQ ID NO: 178188 - RNA, 32 nt, Human
gcuacuugggaggcugaggcgggagaguggcg

SEQ ID NO: 178189 - RNA, 32 nt, Human
gcuacuugggaggcugaggugggagccuggga

SEQ ID NO: 178190 - RNA, 21 nt, Human
gcuacuugggagucugaggca

SEQ ID NO: 178191 - RNA, 21 nt, Human
gcuacuugggaugccgaggca

SEQ ID NO: 178192 - RNA, 21 nt, Human
gcuacuugggggccugaggca

SEQ ID NO: 178193 - RNA, 21 nt, Human
gcuacuuggggggcucaggca

SEQ ID NO: 178194 - RNA, 32 nt, Human
gcuacuuggggugggaggaucacaugaaccca

SEQ ID NO: 178195 - RNA, 32 nt, Human
gcuacuuuucacugaggaggugguggaaggug

SEQ ID NO: 178196 - RNA, 32 nt, Human
gcuagaaaaauuucaagacagaaacagucucc

SEQ ID NO: 178197 - RNA, 32 nt, Human
gcuagaaaaccaccacuuuuguccucaagcuu

SEQ ID NO: 178198 - RNA, 32 nt, Human
gcuagaaaauacugcuuucugccaucgauugg

SEQ ID NO: 178199 - RNA, 32 nt, Human
gcuagaaaccagaagacuacgggagggaauau

SEQ ID NO: 178200 - RNA, 32 nt, Human
gcuagaaauagaaagaaaagaaaauugaacau

SEQ ID NO: 178201 - RNA, 32 nt, Human
gcuagaacauaaugugagcaguguuugccuuc

SEQ ID NO: 178202 - RNA, 32 nt, Human
gcuagaaccauggucgccacuguuuucccucu

SEQ ID NO: 178203 - RNA, 32 nt, Human
gcuagaacccaggagacggagguugcagugag

SEQ ID NO: 178204 - RNA, 32 nt, Human
gcuagaaccugcugcaagucacugccuuccaa

SEQ ID NO: 178205 - RNA, 32 nt, Human
gcuagaaccuggagaacuagaaccuggagggc

SEQ ID NO: 178206 - RNA, 18 nt, Human
gcuagaagagaccagaga

SEQ ID NO: 178207 - RNA, 32 nt, Human
gcuagaaggaggaaucagauacccuuuaauau

SEQ ID NO: 178208 - RNA, 32 nt, Human
gcuagaauacagccugaagauccaggaggacu

SEQ ID NO: 178209 - RNA, 32 nt, Human
gcuagaaucuggguuuuauuuuucauagaugg

SEQ ID NO: 178210 - RNA, 32 nt, Human
gcuagaaucuuccuuuucccucucucccuugg

SEQ ID NO: 178211 - RNA, 32 nt, Human
gcuagaaugucacauggauggcugucauaggg

SEQ ID NO: 178212 - RNA, 32 nt, Human
gcuagacaagaagcguuccuggagcugcuuua

SEQ ID NO: 178213 - RNA, 32 nt, Human
gcuagacaaggcauggaagagagaguggccaa

SEQ ID NO: 178214 - RNA, 20 nt, Human
gcuagacacaggcuucucgu

SEQ ID NO: 178215 - RNA, 32 nt, Human
gcuagacagccgcggcggcugcggcgccgaua

SEQ ID NO: 178216 - RNA, 32 nt, Human
gcuagacaggcagguagggaaaucgugaggug

SEQ ID NO: 178217 - RNA, 32 nt, Human
gcuagacagugcuggagacauaguugggggug

SEQ ID NO: 178218 - RNA, 23 nt, Human
gcuagacagugucugccuuucca

SEQ ID NO: 178219 - RNA, 32 nt, Human
gcuagaccaucuuuauaacacugggcuccguc

SEQ ID NO: 178220 - RNA, 32 nt, Human
gcuagacccgugguaccccacagggagggaau

SEQ ID NO: 178221 - RNA, 32 nt, Human
gcuagacuccuaucuucugaauucuauagugc

SEQ ID NO: 178222 - RNA, 32 nt, Human
gcuagacuuauuguauuuacagccuggccacu

SEQ ID NO: 178223 - RNA, 32 nt, Human
gcuagacuucacugcacguuuucucaaguauc

SEQ ID NO: 178224 - RNA, 32 nt, Human
gcuagagaacagcaggucugugcagugucuga

SEQ ID NO: 178225 - RNA, 32 nt, Human
gcuagagaaguuugucucugaagaagcacaaa

SEQ ID NO: 178226 - RNA, 32 nt, Human
gcuagagacaagggggucuaugagcauuuacu

SEQ ID NO: 178227 - RNA, 32 nt, Human
gcuagagaccagccuggucaacauggugaaac

SEQ ID NO: 178228 - RNA, 32 nt, Human
gcuagagacgcugaaggaccuuuacaaucagg

SEQ ID NO: 178229 - RNA, 21 nt, Human
gcuagagacggcugggcccug

SEQ ID NO: 178230 - RNA, 18 nt, Human
gcuagagagcaccugaca

SEQ ID NO: 178231 - RNA, 32 nt, Human
gcuagagagugcucuuggaauauuguugaggc

SEQ ID NO: 178232 - RNA, 32 nt, Human
gcuagagaucauggaagggaagugguugcugu

SEQ ID NO: 178233 - RNA, 32 nt, Human
gcuagagaugugaguuaaaaagacuugccaaa

SEQ ID NO: 178234 - RNA, 32 nt, Human
gcuagagcacagaaaauaggugagcugcaugg

SEQ ID NO: 178235 - RNA, 32 nt, Human
gcuagagcaccagggucagggugcaaggaaga

SEQ ID NO: 178236 - RNA, 22 nt, Human
gcuagagcagcgccucccgccg

SEQ ID NO: 178237 - RNA, 32 nt, Human
gcuagagccagaggaggagggcaaaggggcag

SEQ ID NO: 178238 - RNA, 32 nt, Human
gcuagagccagccugcauccugcccaccgggc

SEQ ID NO: 178239 - RNA, 32 nt, Human
gcuagagcccaggaguucaaagcugcaacgac

SEQ ID NO: 178240 - RNA, 32 nt, Human
gcuagagccuccaggcccuaugaugcucccug

SEQ ID NO: 178241 - RNA, 32 nt, Human
gcuagaggacagugcuccuggccacccagccu

SEQ ID NO: 178242 - RNA, 18 nt, Human
gcuagaggcaugucuccu

SEQ ID NO: 178243 - RNA, 22 nt, Human
gcuagaggcggcucccugggug

SEQ ID NO: 178244 - RNA, 32 nt, Human
gcuagagguugaggacgcccagugagugugca

SEQ ID NO: 178245 - RNA, 32 nt, Human
gcuagagguuuucauuaaaacuuaucagauga

SEQ ID NO: 178246 - RNA, 32 nt, Human
gcuagagucaggaaggugggaguuggcugcug

SEQ ID NO: 178247 - RNA, 32 nt, Human
gcuagagugaacuugggccacugugaagagaa

SEQ ID NO: 178248 - RNA, 32 nt, Human
gcuagagugcaauggcacaaucucgguucacu

SEQ ID NO: 178249 - RNA, 32 nt, Human
gcuagaguucagagacaggaagugauuggucu

SEQ ID NO: 178250 - RNA, 32 nt, Human
gcuagaucaggugccccacuguguuuccugaa

SEQ ID NO: 178251 - RNA, 32 nt, Human
gcuagauccagcccaaaccugggaaggccagc

SEQ ID NO: 178252 - RNA, 32 nt, Human
gcuagaucccuccuuucauugcuguugucucu

SEQ ID NO: 178253 - RNA, 32 nt, Human
gcuagaucuucauuaguuacauucaugaaauu

SEQ ID NO: 178254 - RNA, 32 nt, Human
gcuagaugccacugcccauagacuuauaaguc

SEQ ID NO: 178255 - RNA, 32 nt, Human
gcuagauggucucaaucuccugaucucguggu

SEQ ID NO: 178256 - RNA, 32 nt, Human
gcuagaugugcaaaugcaagcuaguggcuuca

SEQ ID NO: 178257 - RNA, 32 nt, Human
gcuagauguucaauaaauauuuguugaaugag

SEQ ID NO: 178258 - RNA, 32 nt, Human
gcuagauugcagcucccacucagagcaguaug

SEQ ID NO: 178259 - RNA, 32 nt, Human
gcuagauugcuagccuuggcugcuccauuggc

SEQ ID NO: 178260 - RNA, 32 nt, Human
gcuagauuuggucauuccacaauguauaugua

SEQ ID NO: 178261 - RNA, 32 nt, Human
gcuagcaacaacugucucccguccucugcaag

SEQ ID NO: 178262 - RNA, 22 nt, Human
gcuagcaaccaugugccuccca

SEQ ID NO: 178263 - RNA, 32 nt, Human
gcuagcaagaacagaguccacccuccucugga

SEQ ID NO: 178264 - RNA, 32 nt, Human
gcuagcaauagagagacaagugagggaauuag

SEQ ID NO: 178265 - RNA, 32 nt, Human
gcuagcagaaaguuuauuuaaaccacuucuug

SEQ ID NO: 178266 - RNA, 32 nt, Human
gcuagcagagaguugcugcucucuccaacuca

SEQ ID NO: 178267 - RNA, 21 nt, Human
gcuagcagcaucccugcagca

SEQ ID NO: 178268 - RNA, 32 nt, Human
gcuagcagccccgggcccugagcucccgccga

SEQ ID NO: 178269 - RNA, 19 nt, Human
gcuagcagccuggggccuc

SEQ ID NO: 178270 - RNA, 24 nt, Human
gcuagcagcucagcagggccucua

SEQ ID NO: 178271 - RNA, 32 nt, Human
gcuagcaggaaucugauuuaauuucuugcugc

SEQ ID NO: 178272 - RNA, 32 nt, Human
gcuagcagggguugagacugcagccuggccug

SEQ ID NO: 178273 - RNA, 22 nt, Human
gcuagcaguucccauucaggca

SEQ ID NO: 178274 - RNA, 32 nt, Human
gcuagcaucucugucucucaaacauagggagg

SEQ ID NO: 178275 - RNA, 19 nt, Human
gcuagccaagaguucgagg

SEQ ID NO: 178276 - RNA, 32 nt, Human
gcuagccacugugcuccagccugggcaacacc

SEQ ID NO: 178277 - RNA, 32 nt, Human
gcuagccaggaggcccgggggcuccggcugag

SEQ ID NO: 178278 - RNA, 32 nt, Human
gcuagccauggucaucugacagucucuacgcu

SEQ ID NO: 178279 - RNA, 32 nt, Human
gcuagcccaccgcagcagccucccucccucuc

SEQ ID NO: 178280 - RNA, 32 nt, Human
gcuagcccacugacauuggaaaaagcugugaa

SEQ ID NO: 178281 - RNA, 32 nt, Human
gcuagcccccuuccccacuucuuacacuccaa

SEQ ID NO: 178282 - RNA, 32 nt, Human
gcuagccccugccccaauccugcccuggccug

SEQ ID NO: 178283 - RNA, 32 nt, Human
gcuagcccggaaggaggagcaagagccagggg

SEQ ID NO: 178284 - RNA, 32 nt, Human
gcuagcccuccuccugaagcagucuaggagcu

SEQ ID NO: 178285 - RNA, 32 nt, Human
gcuagcccucgccucugccauccgauacuaaa

SEQ ID NO: 178286 - RNA, 32 nt, Human
gcuagccggccuggccauggcugaccgcgggu

SEQ ID NO: 178287 - RNA, 24 nt, Human
gcuagccucaaacuccugggcuca

SEQ ID NO: 178288 - RNA, 32 nt, Human
gcuagccucccugagcuuucuggcuucaggcu

SEQ ID NO: 178289 - RNA, 32 nt, Human
gcuagccugagugcacccagaugcgcuucugu

SEQ ID NO: 178290 - RNA, 32 nt, Human
gcuagccugggcaacacgcugagacccuaucc

SEQ ID NO: 178291 - RNA, 32 nt, Human
gcuagccugggcaacagagugagaccccguuu

SEQ ID NO: 178292 - RNA, 32 nt, Human
gcuagccugggugacacaggaagacuccaucu

SEQ ID NO: 178293 - RNA, 32 nt, Human
gcuagcgagggcccuggccucaccuccuggug

SEQ ID NO: 178294 - RNA, 32 nt, Human
gcuagcgggaaagagauggggauggaguccca

SEQ ID NO: 178295 - RNA, 32 nt, Human
gcuagcggggacugaaggccgggagcccacuc

SEQ ID NO: 178296 - RNA, 32 nt, Human
gcuagcgucguggcucaugccuguaaucccag

SEQ ID NO: 178297 - RNA, 32 nt, Human
gcuagcgugugccaggcagauccucuggacac

SEQ ID NO: 178298 - RNA, 32 nt, Human
gcuagcuacacacacgcccucacgcccggcga

SEQ ID NO: 178299 - RNA, 32 nt, Human
gcuagcuaucauuaccaguuagaauuaacauu

SEQ ID NO: 178300 - RNA, 32 nt, Human
gcuagcuccauggcuuagcggaggaggcggca

SEQ ID NO: 178301 - RNA, 32 nt, Human
gcuagcucccucacccuuccaccuucucacuc

SEQ ID NO: 178302 - RNA, 32 nt, Human
gcuagcuccugaccccagcccagcaggcuguc

SEQ ID NO: 178303 - RNA, 32 nt, Human
gcuagcucgugcuacauugaaacuugaguuug

SEQ ID NO: 178304 - RNA, 32 nt, Human
gcuagcucuccucccuuccgcuccugcuucuc

SEQ ID NO: 178305 - RNA, 32 nt, Human
gcuagcucuuugagcuagagagcuguaggaag

SEQ ID NO: 178306 - RNA, 32 nt, Human
gcuagcugcugccuccuuacuccuggcccucu

SEQ ID NO: 178307 - RNA, 32 nt, Human
gcuagcuggauccucuaggcaggauggugaug

SEQ ID NO: 178308 - RNA, 16 nt, Human
gcuagcuggccaggug

SEQ ID NO: 178309 - RNA, 32 nt, Human
gcuagcugggcaagaaagcagcaguggaccug

SEQ ID NO: 178310 - RNA, 32 nt, Human
gcuagcugugagaaccucaucaugcuccuuga

SEQ ID NO: 178311 - RNA, 32 nt, Human
gcuaggaaaggaaaaggcuaggugcucccuga

SEQ ID NO: 178312 - RNA, 32 nt, Human
gcuaggaaaggcagaaacacaaccacucacca

SEQ ID NO: 178313 - RNA, 32 nt, Human
gcuaggaaaugagagcacaguuuugggaaaug

SEQ ID NO: 178314 - RNA, 32 nt, Human
gcuaggaagcaaaucuuccuucugcugcauaa

SEQ ID NO: 178315 - RNA, 32 nt, Human
gcuaggaagcucuauucuguucaccauagaaa

SEQ ID NO: 178316 - RNA, 32 nt, Human
gcuaggaaguguuggagccagaaauggaaccu

SEQ ID NO: 178317 - RNA, 23 nt, Human
gcuaggacagaaacuguaaaaag

SEQ ID NO: 178318 - RNA, 32 nt, Human
gcuaggaccagccucgccugugggguugagcu

SEQ ID NO: 178319 - RNA, 32 nt, Human
gcuaggacguuggccucagggccaggaaggac

SEQ ID NO: 178320 - RNA, 32 nt, Human
gcuaggacuacaggcagugugccaccacaucc

SEQ ID NO: 178321 - RNA, 32 nt, Human
gcuaggacuagggugagagggaguggggaggg

SEQ ID NO: 178322 - RNA, 19 nt, Human
gcuaggagaggcugggccc

SEQ ID NO: 178323 - RNA, 32 nt, Human
gcuaggagauacucuucugccuccuagaccug

SEQ ID NO: 178324 - RNA, 32 nt, Human
gcuaggagccagccuggguggcgcugcuccca

SEQ ID NO: 178325 - RNA, 32 nt, Human
gcuaggagccauguggaccugcuuuucugcca

SEQ ID NO: 178326 - RNA, 32 nt, Human
gcuaggaggacagccuggucagcagggcugca

SEQ ID NO: 178327 - RNA, 32 nt, Human
gcuaggaggcccuguuccucacugcggauggu

SEQ ID NO: 178328 - RNA, 32 nt, Human
gcuaggaggcugagacaggagaauggugugaa

SEQ ID NO: 178329 - RNA, 32 nt, Human
gcuaggaucccaaaggacuccuuguccccuag

SEQ ID NO: 178330 - RNA, 32 nt, Human
gcuaggaucgugccacugcacuccaaccuggg

SEQ ID NO: 178331 - RNA, 32 nt, Human
gcuaggaugcgcucuguccacccauggcccug

SEQ ID NO: 178332 - RNA, 32 nt, Human
gcuaggaugugagagacacagucaccugcagc

SEQ ID NO: 178333 - RNA, 32 nt, Human
gcuaggauugguucacccuugcucugaguugg

SEQ ID NO: 178334 - RNA, 32 nt, Human
gcuaggauuuggagaauaaguguguacagauc

SEQ ID NO: 178335 - RNA, 32 nt, Human
gcuaggcagacaguggggacugugcauauuug

SEQ ID NO: 178336 - RNA, 32 nt, Human
gcuaggcagcucccugcccuccgugugugucu

SEQ ID NO: 178337 - RNA, 32 nt, Human
gcuaggcaggagagacaagggguaggugggag

SEQ ID NO: 178338 - RNA, 32 nt, Human
gcuaggcaugccugggaauccugcugccagag

SEQ ID NO: 178339 - RNA, 32 nt, Human
gcuaggcaugguggacucgccuguaaucucac

SEQ ID NO: 178340 - RNA, 32 nt, Human
gcuaggcauucaagaccagccuaggcaggaua

SEQ ID NO: 178341 - RNA, 32 nt, Human
gcuaggccagagcuggaagcagacaguaaggg

SEQ ID NO: 178342 - RNA, 32 nt, Human
gcuaggcccagaaagaaaagaggcucucagca

SEQ ID NO: 178343 - RNA, 32 nt, Human
gcuaggcccgggaggcgcaggcgcaggcgcag

SEQ ID NO: 178344 - RNA, 16 nt, Human
gcuaggccggguccag

SEQ ID NO: 178345 - RNA, 32 nt, Human
gcuaggccucgaggccuagccgagugggagug

SEQ ID NO: 178346 - RNA, 32 nt, Human
gcuaggccugcugggagaggaugaggaggagg

SEQ ID NO: 178347 - RNA, 22 nt, Human
gcuaggccugggccaggccccg

SEQ ID NO: 178348 - RNA, 32 nt, Human
gcuaggccuuuccugccgagugcucugaugca

SEQ ID NO: 178349 - RNA, 16 nt, Human
gcuaggcgcucacaga

SEQ ID NO: 178350 - RNA, 23 nt, Human
gcuaggcucaaguguggggccac

SEQ ID NO: 178351 - RNA, 32 nt, Human
gcuaggcuccaggcgccucggaggcuuuggca

SEQ ID NO: 178352 - RNA, 20 nt, Human
gcuaggcugaaguguagugg

SEQ ID NO: 178353 - RNA, 32 nt, Human
gcuaggcugugaggugccuuagggcaggucuc

SEQ ID NO: 178354 - RNA, 32 nt, Human
gcuaggcuuuucucuuuuguccuuccuguugg

SEQ ID NO: 178355 - RNA, 32 nt, Human
gcuagggaaagagauuuagaagccuucagcag

SEQ ID NO: 178356 - RNA, 24 nt, Human
gcuagggaaggcagaacugggccc

SEQ ID NO: 178357 - RNA, 20 nt, Human
gcuagggagagugggggaag

SEQ ID NO: 178358 - RNA, 21 nt, Human
gcuagggccucgccgccagga

SEQ ID NO: 178359 - RNA, 32 nt, Human
gcuagggcuucccccuucuccccaucccgguc

SEQ ID NO: 178360 - RNA, 32 nt, Human
gcuaggggacgaugauguggcagauggcucgg

SEQ ID NO: 178361 - RNA, 17 nt, Human
gcuaggggagcaggggg

SEQ ID NO: 178362 - RNA, 32 nt, Human
gcuaggggaggaaggaaggaaggaagggcggc

SEQ ID NO: 178363 - RNA, 32 nt, Human
gcuaggggaggaaguucuccagccccuugugc

SEQ ID NO: 178364 - RNA, 32 nt, Human
gcuaggggagugcugugcugauucuccagcca

SEQ ID NO: 178365 - RNA, 32 nt, Human
gcuaggggccgaguccaggagccccagccagc

SEQ ID NO: 178366 - RNA, 23 nt, Human
gcuaggggcugggcaaggccccg

SEQ ID NO: 178367 - RNA, 32 nt, Human
gcuaggggguguuucucagcacacugcagaag

SEQ ID NO: 178368 - RNA, 32 nt, Human
gcuaggggguguuugcugagugagugagugaa

SEQ ID NO: 178369 - RNA, 32 nt, Human
gcuaggggucaggccagauggggcaggaaggc

SEQ ID NO: 178370 - RNA, 32 nt, Human
gcuagggguuuuccuguggaaggucugagcuc

SEQ ID NO: 178371 - RNA, 32 nt, Human
gcuagggucccaaacucucuugcauuuguuca

SEQ ID NO: 178372 - RNA, 32 nt, Human
gcuagggugcaggaggcuuccagaagcaguug

SEQ ID NO: 178373 - RNA, 32 nt, Human
gcuaggucaaagacgcccgggccaggugcccc

SEQ ID NO: 178374 - RNA, 32 nt, Human
gcuaggugcucagucacuaauggucucgcgaa

SEQ ID NO: 178375 - RNA, 32 nt, Human
gcuagguggguugaaagccaaggagucacuga

SEQ ID NO: 178376 - RNA, 31 nt, Human
gcuagguuaggcaaggaggugguuggccaga

SEQ ID NO: 178377 - RNA, 32 nt, Human
gcuaguaaaggacuggcuucauucuaauuaug

SEQ ID NO: 178378 - RNA, 32 nt, Human
gcuaguaaaggcuagcaagugaggcuuugucu

SEQ ID NO: 178379 - RNA, 32 nt, Human
gcuaguaccaagcugcuaucaucagcugaugc

SEQ ID NO: 178380 - RNA, 23 nt, Human
gcuaguaggacucuuccuugaca

SEQ ID NO: 178381 - RNA, 32 nt, Human
gcuaguaucaaagaagaacggggagaugaagu

SEQ ID NO: 178382 - RNA, 32 nt, Human
gcuagucccgagagugucagacaaggaagaaa

SEQ ID NO: 178383 - RNA, 32 nt, Human
gcuaguccuuucucgucgcugcucggcucgcg

SEQ ID NO: 178384 - RNA, 32 nt, Human
gcuagucggaggaucauaagcaagcucagacc

SEQ ID NO: 178385 - RNA, 32 nt, Human
gcuagucucuucucuucugugaucucaguagg

SEQ ID NO: 178386 - RNA, 24 nt, Human
gcuagucuggaacuccugagcuca

SEQ ID NO: 178387 - RNA, 24 nt, Human
gcuagucuugaacuccugggccca

SEQ ID NO: 178388 - RNA, 24 nt, Human
gcuagucuugaacuccugggcuca

SEQ ID NO: 178389 - RNA, 32 nt, Human
gcuagugaccugcgguucacauagagggguca

SEQ ID NO: 178390 - RNA, 32 nt, Human
gcuagugagaggaggaggaggugggcagagga

SEQ ID NO: 178391 - RNA, 32 nt, Human
gcuagugaucacaccagggguuagaguucacu

SEQ ID NO: 178392 - RNA, 32 nt, Human
gcuagugcagcugugacuuucaguuaaagcca

SEQ ID NO: 178393 - RNA, 32 nt, Human
gcuagugcccucucucugggcccagggcugug

SEQ ID NO: 178394 - RNA, 32 nt, Human
gcuagugcgauguuucaggaggcuggaggaag

SEQ ID NO: 178395 - RNA, 20 nt, Human
gcuagugcucccaccccgcc

SEQ ID NO: 178396 - RNA, 32 nt, Human
gcuagugcuggcugcagggucccaggugcagg

SEQ ID NO: 178397 - RNA, 32 nt, Human
gcuagugcuguccucccaucuccugugggcag

SEQ ID NO: 178398 - RNA, 23 nt, Human
gcuaguggcucaugccuguaauc

SEQ ID NO: 178399 - RNA, 32 nt, Human
gcuagugggcuucaggugcaaggguaccugug

SEQ ID NO: 178400 - RNA, 20 nt, Human
gcuagugggggacucgaggc

SEQ ID NO: 178401 - RNA, 32 nt, Human
gcuaguggugguggccagcgugcagugagcug

SEQ ID NO: 178402 - RNA, 32 nt, Human
gcuagugucacccaggcuggagugcagugauc

SEQ ID NO: 178403 - RNA, 32 nt, Human
gcuagugugguguuuccugggcacugcuucca

SEQ ID NO: 178404 - RNA, 31 nt, Human
gcuaguguugcccaggcuggagugcaguggc

SEQ ID NO: 178405 - RNA, 32 nt, Human
gcuaguuacuggggguguugggggagacagga

SEQ ID NO: 178406 - RNA, 32 nt, Human
gcuaguuagaucauuugcaucucuccaccauu

SEQ ID NO: 178407 - RNA, 32 nt, Human
gcuaguuaguacucaauaaacaaugcauugaa

SEQ ID NO: 178408 - RNA, 32 nt, Human
gcuaguuccgagcuagguaugacagggacagg

SEQ ID NO: 178409 - RNA, 32 nt, Human
gcuaguucucucucuauauaauuuauaaaaac

SEQ ID NO: 178410 - RNA, 32 nt, Human
gcuaguuguaguuucacucacucauucauuca

SEQ ID NO: 178411 - RNA, 32 nt, Human
gcuaguuucuguauuuuuaguagagacggcgu

SEQ ID NO: 178412 - RNA, 32 nt, Human
gcuaguuuggccugacacuaccaguaaccuac

SEQ ID NO: 178413 - RNA, 32 nt, Human
gcuaguuuguguggcccugccccuggugccca

SEQ ID NO: 178414 - RNA, 32 nt, Human
gcuaguuuuauuuuucuuguuuugcauuaugu

SEQ ID NO: 178415 - RNA, 32 nt, Human
gcuaguuuucuacugagugaagccauuacguc

SEQ ID NO: 178416 - RNA, 32 nt, Human
gcuauaaaaucagacaaacauuagcugggccu

SEQ ID NO: 178417 - RNA, 32 nt, Human
gcuauaaagguaauuguaaaaauaaauacagu

SEQ ID NO: 178418 - RNA, 32 nt, Human
gcuauaacauuugcugaauaugcaauuuguua

SEQ ID NO: 178419 - RNA, 32 nt, Human
gcuauaacuuugaaucccuucacuuucuuccu

SEQ ID NO: 178420 - RNA, 32 nt, Human
gcuauaaggggcuccaggugggugcugcuguu

SEQ ID NO: 178421 - RNA, 32 nt, Human
gcuauaauaauagcuaaugacacugugcuaag

SEQ ID NO: 178422 - RNA, 32 nt, Human
gcuauaaugcagacuugagcaaaaagaggagg

SEQ ID NO: 178423 - RNA, 32 nt, Human
gcuauaauguacugaaaccaccauauuacaga

SEQ ID NO: 178424 - RNA, 32 nt, Human
gcuauacauauacaacauuacagucugucugu

SEQ ID NO: 178425 - RNA, 32 nt, Human
gcuauacaucuucaucccuccccaccauccug

SEQ ID NO: 178426 - RNA, 32 nt, Human
gcuauacauucuauguaugaggugcuacauuu

SEQ ID NO: 178427 - RNA, 32 nt, Human
gcuauaccacagucuuucguuuccagccuuug

SEQ ID NO: 178428 - RNA, 32 nt, Human
gcuauacccaggagggagcaagcagccugaug

SEQ ID NO: 178429 - RNA, 32 nt, Human
gcuauaccccucuccccaucccuguuauagaa

SEQ ID NO: 178430 - RNA, 32 nt, Human
gcuauagaaaguugguacaaaugaucuguacu

SEQ ID NO: 178431 - RNA, 32 nt, Human
gcuauagacagaaauaauaagccacccugggu

SEQ ID NO: 178432 - RNA, 32 nt, Human
gcuauagacuccaagcaaggcuugggguccuu

SEQ ID NO: 178433 - RNA, 32 nt, Human
gcuauagagccgggugagagagcgagcgcccg

SEQ ID NO: 178434 - RNA, 32 nt, Human
gcuauagcauuuuuauagcauucaaaugcuug

SEQ ID NO: 178435 - RNA, 32 nt, Human
gcuauagccccagggacccagggcagagcaca

SEQ ID NO: 178436 - RNA, 32 nt, Human
gcuauagcggauucuguucugccugcugcuca

SEQ ID NO: 178437 - RNA, 32 nt, Human
gcuauaggaaggccucuggcucugccuuggac

SEQ ID NO: 178438 - RNA, 32 nt, Human
gcuauaggcgcauggaagguucccuggaacgg

SEQ ID NO: 178439 - RNA, 32 nt, Human
gcuauagggccgucugucucgagucagcuguc

SEQ ID NO: 178440 - RNA, 32 nt, Human
gcuauagguggagcaucagcagugagugaggc

SEQ ID NO: 178441 - RNA, 32 nt, Human
gcuauagucugagcuacucaggaggcugaugu

SEQ ID NO: 178442 - RNA, 32 nt, Human
gcuauauagguauuuuaccaacccauuuuaag

SEQ ID NO: 178443 - RNA, 32 nt, Human
gcuauauccauccuuuaauccaacacacaccu

SEQ ID NO: 178444 - RNA, 32 nt, Human
gcuauaugacucuucugcuuccugauaagaaa

SEQ ID NO: 178445 - RNA, 32 nt, Human
gcuauaugcauuugccuucauccacccauguu

SEQ ID NO: 178446 - RNA, 32 nt, Human
gcuauaugcugguacaugcuuuaaacauggag

SEQ ID NO: 178447 - RNA, 32 nt, Human
gcuauauggaaauguuccaucagcaaagagaa

SEQ ID NO: 178448 - RNA, 32 nt, Human
gcuauauugcccaggcuggucuugaaguccug

SEQ ID NO: 178449 - RNA, 32 nt, Human
gcuauauuugguaccugucucucuccuacugu

SEQ ID NO: 178450 - RNA, 32 nt, Human
gcuaucaaaccauuuacccuugcccccacaac

SEQ ID NO: 178451 - RNA, 31 nt, Human
gcuaucaacaauccuguacucacuugaagaa

SEQ ID NO: 178452 - RNA, 32 nt, Human
gcuaucaauccaaaacugaugcagcuugugga

SEQ ID NO: 178453 - RNA, 20 nt, Human
gcuaucacaccuggccccag

SEQ ID NO: 178454 - RNA, 32 nt, Human
gcuaucaccaguaccucucagcuuacucuuca

SEQ ID NO: 178455 - RNA, 32 nt, Human
gcuaucagaagaucuuguggauuccagcggga

SEQ ID NO: 178456 - RNA, 32 nt, Human
gcuaucaguucuguccuggcccuuucaguuuu

SEQ ID NO: 178457 - RNA, 32 nt, Human
gcuaucaugauuggcugggccugcugcuguuc

SEQ ID NO: 178458 - RNA, 32 nt, Human
gcuaucauuccaaaggaggauggcauauaaua

SEQ ID NO: 178459 - RNA, 32 nt, Human
gcuauccaauacaguaaccacaugcggcuguu

SEQ ID NO: 178460 - RNA, 32 nt, Human
gcuauccacaaacugcccagguaacugccaua

SEQ ID NO: 178461 - RNA, 32 nt, Human
gcuaucccagaggucgaggcugcagugagcug

SEQ ID NO: 178462 - RNA, 32 nt, Human
gcuaucccagcagccuucagggugggaggcac

SEQ ID NO: 178463 - RNA, 32 nt, Human
gcuaucccaguuccccacugccagggaacccc

SEQ ID NO: 178464 - RNA, 32 nt, Human
gcuaucccaucugcccccaucuggagcucggc

SEQ ID NO: 178465 - RNA, 32 nt, Human
gcuauccccaucucccugccuggcccccaacc

SEQ ID NO: 178466 - RNA, 32 nt, Human
gcuaucccccuuccuuuccucccucccucugc

SEQ ID NO: 178467 - RNA, 32 nt, Human
gcuauccucacacucauggcuaccagugggcc

SEQ ID NO: 178468 - RNA, 32 nt, Human
gcuauccuccaucccccuugaggcuuccacuu

SEQ ID NO: 178469 - RNA, 32 nt, Human
gcuauccucugccuucccaagucccucuuggg

SEQ ID NO: 178470 - RNA, 32 nt, Human
gcuauccuuccccucaccccucagcccaggag

SEQ ID NO: 178471 - RNA, 23 nt, Human
gcuauccuugcaccucagccucc

SEQ ID NO: 178472 - RNA, 32 nt, Human
gcuaucgagcccuggugcuauguggccccgga

SEQ ID NO: 178473 - RNA, 32 nt, Human
gcuaucgaggagacccagugagaauguagcau

SEQ ID NO: 178474 - RNA, 32 nt, Human
gcuaucuagcauggcauugucaccaacucccu

SEQ ID NO: 178475 - RNA, 32 nt, Human
gcuaucucaacuacaagcuacaagcuccucua

SEQ ID NO: 178476 - RNA, 32 nt, Human
gcuaucucagccacauuguuggcaauuuaauu

SEQ ID NO: 178477 - RNA, 32 nt, Human
gcuaucucaguucuguagcagaucccugguuc

SEQ ID NO: 178478 - RNA, 32 nt, Human
gcuaucucauuucacucuacugucucaaaauu

SEQ ID NO: 178479 - RNA, 24 nt, Human
gcuaucuccauacaugaacaaucu

SEQ ID NO: 178480 - RNA, 32 nt, Human
gcuaucugagucuuuccaagagcaauugccaa

SEQ ID NO: 178481 - RNA, 32 nt, Human
gcuaucuggccagauuuaaguagauucuauuu

SEQ ID NO: 178482 - RNA, 32 nt, Human
gcuaucuggggagggggagaggaggccgagca

SEQ ID NO: 178483 - RNA, 32 nt, Human
gcuaucuugcccaggcuugcaauuuauagagc

SEQ ID NO: 178484 - RNA, 32 nt, Human
gcuaucuuuccucugcucauggcauauaaagc

SEQ ID NO: 178485 - RNA, 32 nt, Human
gcuaucuuugaucucuuccuccagaucagagu

SEQ ID NO: 178486 - RNA, 32 nt, Human
gcuaugaaacaugcacuaaggucuaauaggga

SEQ ID NO: 178487 - RNA, 32 nt, Human
gcuaugaaaucaggaaacugucuccuuuuccu

SEQ ID NO: 178488 - RNA, 32 nt, Human
gcuaugaacaccacugcacuccaccuguccac

SEQ ID NO: 178489 - RNA, 32 nt, Human
gcuaugaagaagcucaagaccagccuguauca

SEQ ID NO: 178490 - RNA, 28 nt, Human
gcuaugaagucuuacacuccauauuuca

SEQ ID NO: 178491 - RNA, 32 nt, Human
gcuaugacgagcuccagaugcugcagucacgg

SEQ ID NO: 178492 - RNA, 32 nt, Human
gcuaugacugcaggaucagucuaacuauacua

SEQ ID NO: 178493 - RNA, 32 nt, Human
gcuaugagccuguaaaaucaaaagcaaguuag

SEQ ID NO: 178494 - RNA, 32 nt, Human
gcuaugagucccggggauggugaggaacgcca

SEQ ID NO: 178495 - RNA, 32 nt, Human
gcuaugaucacaccacuacacuccagccugga

SEQ ID NO: 178496 - RNA, 32 nt, Human
gcuaugauugugccacugcacuccagccuggg

SEQ ID NO: 178497 - RNA, 32 nt, Human
gcuaugauugugccacuguacuccagccuggg

SEQ ID NO: 178498 - RNA, 32 nt, Human
gcuaugcaaauguguucacaggcaaugggggu

SEQ ID NO: 178499 - RNA, 24 nt, Human
gcuaugcacuugauugccuuugug

SEQ ID NO: 178500 - RNA, 32 nt, Human
gcuaugcagggggagagcacaggacuggcccu

SEQ ID NO: 178501 - RNA, 32 nt, Human
gcuaugcagguggucugagcucggccuauggg

SEQ ID NO: 178502 - RNA, 32 nt, Human
gcuaugcaggugugugggcuggagggacuuug

SEQ ID NO: 178503 - RNA, 32 nt, Human
gcuaugccacuggccucaaugccagcuccuga

SEQ ID NO: 178504 - RNA, 18 nt, Human
gcuaugccagcugggcca

SEQ ID NO: 178505 - RNA, 32 nt, Human
gcuaugccagugagcagugauuuuaacuauuc

SEQ ID NO: 178506 - RNA, 32 nt, Human
gcuaugccaugaggccgggaauuuguguccgg

SEQ ID NO: 178507 - RNA, 32 nt, Human
gcuaugccugcacugcagcccagccccggaca

SEQ ID NO: 178508 - RNA, 32 nt, Human
gcuaugccugggaaaaugguuugucuuccagg

SEQ ID NO: 178509 - RNA, 32 nt, Human
gcuaugccuggugugacccccagggucuuggu

SEQ ID NO: 178510 - RNA, 32 nt, Human
gcuaugcguucgaggccaaccuaggcaaaauu

SEQ ID NO: 178511 - RNA, 24 nt, Human
gcuaugcugcccaggcugaucuca

SEQ ID NO: 178512 - RNA, 32 nt, Human
gcuaugcuuccugaacagcccacagaacuaug

SEQ ID NO: 178513 - RNA, 32 nt, Human
gcuauggaaaaccaggccagagggucacuguc

SEQ ID NO: 178514 - RNA, 32 nt, Human
gcuauggaaccaacacacccagcuccacccuc

SEQ ID NO: 178515 - RNA, 32 nt, Human
gcuauggaauacaaaauguacugacauuuugu

SEQ ID NO: 178516 - RNA, 32 nt, Human
gcuauggacaguucccggaaacgguugcccac

SEQ ID NO: 178517 - RNA, 32 nt, Human
gcuauggaggcagagaccagggugugcaaccu

SEQ ID NO: 178518 - RNA, 32 nt, Human
gcuauggaguuucuguaguauucacuacucca

SEQ ID NO: 178519 - RNA, 20 nt, Human
gcuauggauggggcccaggg

SEQ ID NO: 178520 - RNA, 32 nt, Human
gcuauggcaguggcagauuuuaauuaggaaac

SEQ ID NO: 178521 - RNA, 20 nt, Human
gcuauggcauaauuugcaga

SEQ ID NO: 178522 - RNA, 32 nt, Human
gcuauggccucccuaugcuuucacuucccacc

SEQ ID NO: 178523 - RNA, 32 nt, Human
gcuauggccuucgucugugccggcuuauccga

SEQ ID NO: 178524 - RNA, 20 nt, Human
gcuauggcggcggcagccga

SEQ ID NO: 178525 - RNA, 32 nt, Human
gcuauggcucagggaucuguguugacucuggc

SEQ ID NO: 178526 - RNA, 32 nt, Human
gcuauggcuuuauuucccucuaccuucguaac

SEQ ID NO: 178527 - RNA, 32 nt, Human
gcuaugggaagugccaucaggguggccgcagc

SEQ ID NO: 178528 - RNA, 32 nt, Human
gcuaugggggauggcaccucucagcccuccca

SEQ ID NO: 178529 - RNA, 32 nt, Human
gcuaugggucacguccugcagcuuugaccccc

SEQ ID NO: 178530 - RNA, 32 nt, Human
gcuaugguagugcagauuaugauuauggugaa

SEQ ID NO: 178531 - RNA, 28 nt, Human
gcuauggugccaggggaggagccagcgc

SEQ ID NO: 178532 - RNA, 32 nt, Human
gcuaugguuggggguaguuagggagagacuac

SEQ ID NO: 178533 - RNA, 32 nt, Human
gcuauguaaggaugagaugcaaaguggaguuu

SEQ ID NO: 178534 - RNA, 32 nt, Human
gcuaugucacucaggcuggagugcaguggcac

SEQ ID NO: 178535 - RNA, 32 nt, Human
gcuaugucucccaggcuggagugcaguggcac

SEQ ID NO: 178536 - RNA, 22 nt, Human
gcuaugucucuagcagugagua

SEQ ID NO: 178537 - RNA, 32 nt, Human
gcuaugugaccaggaaucuagccgggaguagc

SEQ ID NO: 178538 - RNA, 23 nt, Human
gcuaugugaugccugagcacaaa

SEQ ID NO: 178539 - RNA, 32 nt, Human
gcuaugugccagcuguugcacacucaccucca

SEQ ID NO: 178540 - RNA, 32 nt, Human
gcuaugugguauagccuguugcuucuaggcua

SEQ ID NO: 178541 - RNA, 32 nt, Human
gcuauguggucaccagcaggagaaagcuuuga

SEQ ID NO: 178542 - RNA, 32 nt, Human
gcuaugugugccagggcucaucuacuccugua

SEQ ID NO: 178543 - RNA, 32 nt, Human
gcuauguguuaagugccaggacauuucuagcu

SEQ ID NO: 178544 - RNA, 32 nt, Human
gcuauguucacagccuacuuuaucucuccuug

SEQ ID NO: 178545 - RNA, 32 nt, Human
gcuauguuccacccuccccuucaacugccccu

SEQ ID NO: 178546 - RNA, 32 nt, Human
gcuauguucuucauucugugcaauaucaaaac

SEQ ID NO: 178547 - RNA, 24 nt, Human
gcuauguugcccaggccagucuca

SEQ ID NO: 178548 - RNA, 32 nt, Human
gcuauguugcccaggcuagagugcaguggcua

SEQ ID NO: 178549 - RNA, 24 nt, Human
gcuauguugcccaggcuggucuca

SEQ ID NO: 178550 - RNA, 32 nt, Human
gcuauguugcccaggcuggucuuuaauuccug

SEQ ID NO: 178551 - RNA, 32 nt, Human
gcuauguugcccaggcugguugcaaacuucug

SEQ ID NO: 178552 - RNA, 32 nt, Human
gcuauuaacugugguugugcuggaauggagga

SEQ ID NO: 178553 - RNA, 32 nt, Human
gcuauuacuauauuuacuugcauaugucagaa

SEQ ID NO: 178554 - RNA, 32 nt, Human
gcuauuagcaugaaggauaguaaccacaaagu

SEQ ID NO: 178555 - RNA, 32 nt, Human
gcuauuaggaaaacuaaacaagaaaugaggcu

SEQ ID NO: 178556 - RNA, 32 nt, Human
gcuauuauaguuaauugaaauggaauuggcaa

SEQ ID NO: 178557 - RNA, 32 nt, Human
gcuauuaucuguguuaucuuuacagucacggg

SEQ ID NO: 178558 - RNA, 32 nt, Human
gcuauuaugacaacaucaccaauguuguggua

SEQ ID NO: 178559 - RNA, 32 nt, Human
gcuauuauuaagagaacaagcacacaguggaa

SEQ ID NO: 178560 - RNA, 32 nt, Human
gcuauuauucauggacuauccagucuaacagc

SEQ ID NO: 178561 - RNA, 32 nt, Human
gcuauucaccucaguagaaaagaaucuaaggg

SEQ ID NO: 178562 - RNA, 32 nt, Human
gcuauucaccucaguagaaaaggaucuaaggg

SEQ ID NO: 178563 - RNA, 21 nt, Human
gcuauucagggggcugaggca

SEQ ID NO: 178564 - RNA, 32 nt, Human
gcuauuccagaacccagccuccuggguuuccc

SEQ ID NO: 178565 - RNA, 32 nt, Human
gcuauuccccugcuccuccaccuuucaauccc

SEQ ID NO: 178566 - RNA, 20 nt, Human
gcuauucccuccagcaucug

SEQ ID NO: 178567 - RNA, 32 nt, Human
gcuauucccugaggacaccucuaccuuucgug

SEQ ID NO: 178568 - RNA, 32 nt, Human
gcuauucccuggggcugcugugcgcucccccu

SEQ ID NO: 178569 - RNA, 32 nt, Human
gcuauucccuucugaucuuggaaagagguucu

SEQ ID NO: 178570 - RNA, 32 nt, Human
gcuauuccuccaccuuauucccagccccugga

SEQ ID NO: 178571 - RNA, 32 nt, Human
gcuauucgagaugacccacagauggcagcugu

SEQ ID NO: 178572 - RNA, 32 nt, Human
gcuauucuaaggcuuuugcagaaaaauaagug

SEQ ID NO: 178573 - RNA, 32 nt, Human
gcuauucucuggagaaaaauaaaauggaaauu

SEQ ID NO: 178574 - RNA, 32 nt, Human
gcuauucuggaauguguccauugaaaagaaaa

SEQ ID NO: 178575 - RNA, 32 nt, Human
gcuauucugggaaaccuucuugagugcuaugc

SEQ ID NO: 178576 - RNA, 32 nt, Human
gcuauugaauuauaagaaagcaaaggcccagg

SEQ ID NO: 178577 - RNA, 32 nt, Human
gcuauugacuaaucuuugcugaagcugagcua

SEQ ID NO: 178578 - RNA, 21 nt, Human
gcuauugacuggccuaagaca

SEQ ID NO: 178579 - RNA, 21 nt, Human
gcuauugaggaggcugaggca

SEQ ID NO: 178580 - RNA, 32 nt, Human
gcuauugcacuccagccugggugacagacuaa

SEQ ID NO: 178581 - RNA, 32 nt, Human
gcuauugcacuccagccugggugacagagcaa

SEQ ID NO: 178582 - RNA, 32 nt, Human
gcuauugccagacccuuggcugauaggagaau

SEQ ID NO: 178583 - RNA, 32 nt, Human
gcuauugccccgcugcccucucuggcucaggg

SEQ ID NO: 178584 - RNA, 32 nt, Human
gcuauugcggccguggguggucgcgggcgaug

SEQ ID NO: 178585 - RNA, 20 nt, Human
gcuauugcgguuccgaggca

SEQ ID NO: 178586 - RNA, 32 nt, Human
gcuauuggaaacagcaaaaaucccagauaaaa

SEQ ID NO: 178587 - RNA, 32 nt, Human
gcuauuggugguuugucuucuuuguuaggcug

SEQ ID NO: 178588 - RNA, 32 nt, Human
gcuauuguccccacacugcaaaaucauaagag

SEQ ID NO: 178589 - RNA, 32 nt, Human
gcuauuguccccugccuccuuggucacugccu

SEQ ID NO: 178590 - RNA, 32 nt, Human
gcuauugugcuggcuggacacuuuggucacuu

SEQ ID NO: 178591 - RNA, 32 nt, Human
gcuauuguggugggaaagggagggugguuggu

SEQ ID NO: 178592 - RNA, 32 nt, Human
gcuauuguuguacaugagaaauucagcauuaa

SEQ ID NO: 178593 - RNA, 23 nt, Human
gcuauuuaaauucccacaaugca

SEQ ID NO: 178594 - RNA, 23 nt, Human
gcuauuuauuauguaaauaguca

SEQ ID NO: 178595 - RNA, 32 nt, Human
gcuauuucagagaaggccugaccuucagcaaa

SEQ ID NO: 178596 - RNA, 32 nt, Human
gcuauuucauucuuuuccaaugcucuuaauga

SEQ ID NO: 178597 - RNA, 32 nt, Human
gcuauuuccauccuccccauaggggcucucuc

SEQ ID NO: 178598 - RNA, 32 nt, Human
gcuauuucuccuuccuugucugccuuuacaga

SEQ ID NO: 178599 - RNA, 32 nt, Human
gcuauuucuuucauucuugcugguuuauaccu

SEQ ID NO: 178600 - RNA, 32 nt, Human
gcuauuugcacucuagccugggugacagagcg

SEQ ID NO: 178601 - RNA, 20 nt, Human
gcuauuugcugaccuuucca

SEQ ID NO: 178602 - RNA, 32 nt, Human
gcuauuuguucuaucacccagaauuuugagaa

SEQ ID NO: 178603 - RNA, 21 nt, Human
gcuauuuuaaaggcuaaggca

SEQ ID NO: 178604 - RNA, 32 nt, Human
gcuauuuucacuuaaaguaagcauuuuuaaag

SEQ ID NO: 178605 - RNA, 32 nt, Human
gcuauuuucagaguccccuccuaggccugcag

SEQ ID NO: 178606 - RNA, 32 nt, Human
gcuauuuucgguggcugcugagcccaggugcu

SEQ ID NO: 178607 - RNA, 32 nt, Human
gcuauuuuggggguagaaggcagugagagcgu

SEQ ID NO: 178608 - RNA, 32 nt, Human
gcuauuuuuaggcuagggauguuaacaucagg

SEQ ID NO: 178609 - RNA, 22 nt, Human
gcuauuuuuaugucaguuucca

SEQ ID NO: 178610 - RNA, 32 nt, Human
gcuauuuuucugccaugagacuagagguugcu

SEQ ID NO: 178611 - RNA, 32 nt, Human
gcucaaaaaggccauucaucugaagaagcuca

SEQ ID NO: 178612 - RNA, 32 nt, Human
gcucaaaagcuccuaggugcgcggguggauau

SEQ ID NO: 178613 - RNA, 32 nt, Human
gcucaaaaggaagucggccuucauggcgccgg

SEQ ID NO: 178614 - RNA, 32 nt, Human
gcucaaaauuacuauuuuuauuucucauuuuu

SEQ ID NO: 178615 - RNA, 32 nt, Human
gcucaaaccacauaaccaaaugugccaagaua

SEQ ID NO: 178616 - RNA, 19 nt, Human
gcucaaaccuauaauccca

SEQ ID NO: 178617 - RNA, 32 nt, Human
gcucaaaccuauaaucccagcacuuugggagg

SEQ ID NO: 178618 - RNA, 32 nt, Human
gcucaaaccugaccagacagcagaggggcggc

SEQ ID NO: 178619 - RNA, 32 nt, Human
gcucaaaccuguaaucccagcacuuugggaga

SEQ ID NO: 178620 - RNA, 32 nt, Human
gcucaaaccuguaaucccagcacuuugggagg

SEQ ID NO: 178621 - RNA, 32 nt, Human
gcucaaacucaggcugucuaacuccacauucu

SEQ ID NO: 178622 - RNA, 32 nt, Human
gcucaaacuguaaaccaggacaacaaguggau

SEQ ID NO: 178623 - RNA, 32 nt, Human
gcucaaacuugcuugaccuccacuuuucagga

SEQ ID NO: 178624 - RNA, 32 nt, Human
gcucaaagaugggagucucccuauguugccca

SEQ ID NO: 178625 - RNA, 32 nt, Human
gcucaaagccaacuguaugugcugacugggug

SEQ ID NO: 178626 - RNA, 32 nt, Human
gcucaaagcugucgccgcuagucuuaugagcu

SEQ ID NO: 178627 - RNA, 32 nt, Human
gcucaaaggagggcaccucugucugguuuccu

SEQ ID NO: 178628 - RNA, 32 nt, Human
gcucaaaggaucucugcaucaucuugaggugg

SEQ ID NO: 178629 - RNA, 32 nt, Human
gcucaaaguucagcuaaccuuugacacugcua

SEQ ID NO: 178630 - RNA, 32 nt, Human
gcucaaauccuccaucuccucacuuuucagac

SEQ ID NO: 178631 - RNA, 32 nt, Human
gcucaaaucucuucccucccucccucucccag

SEQ ID NO: 178632 - RNA, 32 nt, Human
gcucaaaugccaccuccaguaccagcuuuccu

SEQ ID NO: 178633 - RNA, 32 nt, Human
gcucaaaugccuguaaucccaguacuuuggga

SEQ ID NO: 178634 - RNA, 32 nt, Human
gcucaaauucuuugggaugguuuuuacuuaag

SEQ ID NO: 178635 - RNA, 32 nt, Human
gcucaacaaagccugaaagaagaaagggauga

SEQ ID NO: 178636 - RNA, 32 nt, Human
gcucaacacugccuccgaccagucccucugag

SEQ ID NO: 178637 - RNA, 18 nt, Human
gcucaacauggccaggug

SEQ ID NO: 178638 - RNA, 32 nt, Human
gcucaaccacuggaaaugccuccugggauaag

SEQ ID NO: 178639 - RNA, 21 nt, Human
gcucaaccauggcugaaggaa

SEQ ID NO: 178640 - RNA, 20 nt, Human
gcucaacccaaccaacagga

SEQ ID NO: 178641 - RNA, 20 nt, Human
gcucaaccugguggguucag

SEQ ID NO: 178642 - RNA, 32 nt, Human
gcucaacgucauuaaagaggcagaggcgcagc

SEQ ID NO: 178643 - RNA, 32 nt, Human
gcucaacugcaacaacacacuucccugacagc

SEQ ID NO: 178644 - RNA, 32 nt, Human
gcucaacugcagccccuccuccucgggcacag

SEQ ID NO: 178645 - RNA, 21 nt, Human
gcucaacuucaucacugagua

SEQ ID NO: 178646 - RNA, 20 nt, Human
gcucaacuuuuaaacaaacu

SEQ ID NO: 178647 - RNA, 32 nt, Human
gcucaagaaauccucccaccucagccuccuga

SEQ ID NO: 178648 - RNA, 32 nt, Human
gcucaagaacacugcucugucugccucccugg

SEQ ID NO: 178649 - RNA, 32 nt, Human
gcucaagaacagauuugaggccaggugcggug

SEQ ID NO: 178650 - RNA, 32 nt, Human
gcucaagaagcuggaaggaggaagggagggua

SEQ ID NO: 178651 - RNA, 32 nt, Human
gcucaagaccagccugaccaacauggugaaau

SEQ ID NO: 178652 - RNA, 32 nt, Human
gcucaagaccagccuggacaacauggcaagac

SEQ ID NO: 178653 - RNA, 32 nt, Human
gcucaagaccagccuggcuaacauggugaaac

SEQ ID NO: 178654 - RNA, 32 nt, Human
gcucaagaccagccuggucaacauggugaaac

SEQ ID NO: 178655 - RNA, 32 nt, Human
gcucaagacuuagugggccuccaugggacuug

SEQ ID NO: 178656 - RNA, 32 nt, Human
gcucaagagaaacccugagaaaccccaguagg

SEQ ID NO: 178657 - RNA, 32 nt, Human
gcucaagagaaggaggagaugugguuagcagu

SEQ ID NO: 178658 - RNA, 24 nt, Human
gcucaagaggcccagggagcaaug

SEQ ID NO: 178659 - RNA, 32 nt, Human
gcucaagaggccgagguugcagugagccguga

SEQ ID NO: 178660 - RNA, 32 nt, Human
gcucaagagguugaggcucccuccucagccuc

SEQ ID NO: 178661 - RNA, 32 nt, Human
gcucaagagguugaggcugcagugagcccuga

SEQ ID NO: 178662 - RNA, 32 nt, Human
gcucaagaucagccugggcaacauggugaaac

SEQ ID NO: 178663 - RNA, 32 nt, Human
gcucaagcaaaccucucaccucagccugcuga

SEQ ID NO: 178664 - RNA, 32 nt, Human
gcucaagcaaccaaccuccucuaucccauaua

SEQ ID NO: 178665 - RNA, 23 nt, Human
gcucaagcaauccucccaccuca

SEQ ID NO: 178666 - RNA, 22 nt, Human
gcucaagcaauccucccaucuc

SEQ ID NO: 178667 - RNA, 32 nt, Human
gcucaagcaauccucccaucucagccucuuaa

SEQ ID NO: 178668 - RNA, 23 nt, Human
gcucaagcaauccuccugccuca

SEQ ID NO: 178669 - RNA, 32 nt, Human
gcucaagcaauccuccugccucagcuuccuga

SEQ ID NO: 178670 - RNA, 32 nt, Human
gcucaagcaauccuccugccucggcuuccuaa

SEQ ID NO: 178671 - RNA, 32 nt, Human
gcucaagcaauccuccugccucugccucccaa

SEQ ID NO: 178672 - RNA, 32 nt, Human
gcucaagcaauucuccugccucagcuuccuga

SEQ ID NO: 178673 - RNA, 32 nt, Human
gcucaagcagcaaaauccuuacuuccagcaaa

SEQ ID NO: 178674 - RNA, 32 nt, Human
gcucaagcauuuucacuuuguuucuuacaugu

SEQ ID NO: 178675 - RNA, 32 nt, Human
gcucaagccauccauccuccuaccucagccuc

SEQ ID NO: 178676 - RNA, 32 nt, Human
gcucaagccauccucccaccucagccuccaga

SEQ ID NO: 178677 - RNA, 32 nt, Human
gcucaagccauccuccugccucagccucccca

SEQ ID NO: 178678 - RNA, 32 nt, Human
gcucaagccauccuccugccucagccuccuga

SEQ ID NO: 178679 - RNA, 32 nt, Human
gcucaagccaucuuuccaccucagccugccag

SEQ ID NO: 178680 - RNA, 32 nt, Human
gcucaagccauuuuucugccucagcuuuucga

SEQ ID NO: 178681 - RNA, 32 nt, Human
gcucaagcccaggaguuugaaguugcaaugag

SEQ ID NO: 178682 - RNA, 32 nt, Human
gcucaagcccauaaucccagcacuuugggagg

SEQ ID NO: 178683 - RNA, 32 nt, Human
gcucaagcccgugacuguacagaaggauccug

SEQ ID NO: 178684 - RNA, 19 nt, Human
gcucaagccuauaauccca

SEQ ID NO: 178685 - RNA, 32 nt, Human
gcucaagccucuaaucucaacgcuuugggagg

SEQ ID NO: 178686 - RNA, 19 nt, Human
gcucaagccuguaauccca

SEQ ID NO: 178687 - RNA, 21 nt, Human
gcucaagccuguaaucccagc

SEQ ID NO: 178688 - RNA, 32 nt, Human
gcucaagccuguaaucccagcacguugggagg

SEQ ID NO: 178689 - RNA, 32 nt, Human
gcucaagccuguaaucccagcacuuuaggugg

SEQ ID NO: 178690 - RNA, 32 nt, Human
gcucaagccuguaaucccagcacuuugggagg

SEQ ID NO: 178691 - RNA, 32 nt, Human
gcucaagccuguaaucccagcacuuugggugg

SEQ ID NO: 178692 - RNA, 32 nt, Human
gcucaagccuguaaucccagcauuuugggagg

SEQ ID NO: 178693 - RNA, 32 nt, Human
gcucaagccuguaaugucagcacuuuaaaagg

SEQ ID NO: 178694 - RNA, 32 nt, Human
gcucaagccuguacucccagcacuuuuggagg

SEQ ID NO: 178695 - RNA, 32 nt, Human
gcucaagcgauccucccaucucagccucccag

SEQ ID NO: 178696 - RNA, 32 nt, Human
gcucaagcgauccucccaucucagccucccug

SEQ ID NO: 178697 - RNA, 32 nt, Human
gcucaagcgauucuccugccucagcuuccuga

SEQ ID NO: 178698 - RNA, 32 nt, Human
gcucaagcuacacccuggcccuccacgcauga

SEQ ID NO: 178699 - RNA, 32 nt, Human
gcucaagcuauccucccaccucagccucucaa

SEQ ID NO: 178700 - RNA, 32 nt, Human
gcucaagcuauccuugcaccucagccucccaa

SEQ ID NO: 178701 - RNA, 21 nt, Human
gcucaagcuggaguggagugg

SEQ ID NO: 178702 - RNA, 32 nt, Human
gcucaagcuggucucaagcuccugggcucaag

SEQ ID NO: 178703 - RNA, 32 nt, Human
gcucaagcuuccuggacucaggaggcuuuuug

SEQ ID NO: 178704 - RNA, 32 nt, Human
gcucaagcuuguauuaccagcacuuuaggagg

SEQ ID NO: 178705 - RNA, 32 nt, Human
gcucaaggacccucagcaacuggggccagggg

SEQ ID NO: 178706 - RNA, 32 nt, Human
gcucaaggaggaacuggcaaaugcugaauauu

SEQ ID NO: 178707 - RNA, 32 nt, Human
gcucaagggaaagacugccccagaagagcaag

SEQ ID NO: 178708 - RNA, 32 nt, Human
gcucaagggaagagauugcccaggcacuacca

SEQ ID NO: 178709 - RNA, 32 nt, Human
gcucaagggccagagaucucaagugucaaccu

SEQ ID NO: 178710 - RNA, 32 nt, Human
gcucaagguacaaaugagagauuugcuauacc

SEQ ID NO: 178711 - RNA, 32 nt, Human
gcucaaggucccagccagugagcccagugugc

SEQ ID NO: 178712 - RNA, 23 nt, Human
gcucaaguaaucuucccgccuca

SEQ ID NO: 178713 - RNA, 32 nt, Human
gcucaagucuguaaucccagcgcuuugggagg

SEQ ID NO: 178714 - RNA, 23 nt, Human
gcucaagugacccucccaccuca

SEQ ID NO: 178715 - RNA, 23 nt, Human
gcucaagugauccacccaccuca

SEQ ID NO: 178716 - RNA, 23 nt, Human
gcucaagugauccucccaccuca

SEQ ID NO: 178717 - RNA, 23 nt, Human
gcucaagugauccuccuaccuca

SEQ ID NO: 178718 - RNA, 32 nt, Human
gcucaagugauccuccuaucucagccucccaa

SEQ ID NO: 178719 - RNA, 23 nt, Human
gcucaagugauccuccugacuca

SEQ ID NO: 178720 - RNA, 23 nt, Human
gcucaagugauccuccugccuca

SEQ ID NO: 178721 - RNA, 23 nt, Human
gcucaagugauccucuggacuca

SEQ ID NO: 178722 - RNA, 32 nt, Human
gcucaagugauccuuccaucucagccucccga

SEQ ID NO: 178723 - RNA, 23 nt, Human
gcucaagugaucugcccaucuca

SEQ ID NO: 178724 - RNA, 32 nt, Human
gcucaagugaucugcccaucucagccucccaa

SEQ ID NO: 178725 - RNA, 23 nt, Human
gcucaagugauucucccaucuca

SEQ ID NO: 178726 - RNA, 32 nt, Human
gcucaagugcugcucuggcaaagcuccggagc

SEQ ID NO: 178727 - RNA, 23 nt, Human
gcucaaguggacgucccccuuca

SEQ ID NO: 178728 - RNA, 32 nt, Human
gcucaagugggacaauggcacaguauuaaggu

SEQ ID NO: 178729 - RNA, 32 nt, Human
gcucaagugguccuccugccucagcuuacuga

SEQ ID NO: 178730 - RNA, 32 nt, Human
gcucaaguucuuggggauucagagcuaaguuc

SEQ ID NO: 178731 - RNA, 32 nt, Human
gcucaaguugaggcagguugaaggauucacag

SEQ ID NO: 178732 - RNA, 19 nt, Human
gcucaauaguacacagaua

SEQ ID NO: 178733 - RNA, 32 nt, Human
gcucaauccccacucccucaugcuuuggguua

SEQ ID NO: 178734 - RNA, 32 nt, Human
gcucaaugauuaucacauuugagacccugugu

SEQ ID NO: 178735 - RNA, 32 nt, Human
gcucaaugcaaccuccaccucccagguucaag

SEQ ID NO: 178736 - RNA, 32 nt, Human
gcucaauguugcugggggaccuacaaaaguca

SEQ ID NO: 178737 - RNA, 32 nt, Human
gcucaauuuaauuuugcuagauauuuaacaaa

SEQ ID NO: 178738 - RNA, 32 nt, Human
gcucaauuucuuaggcuggagugcaguggcac

SEQ ID NO: 178739 - RNA, 32 nt, Human
gcucacaaaaccaguugaggugcacuaaaggg

SEQ ID NO: 178740 - RNA, 32 nt, Human
gcucacaaaggcaggcacagacugcaacccug

SEQ ID NO: 178741 - RNA, 32 nt, Human
gcucacaacugcaaccuccgucucccggguuc

SEQ ID NO: 178742 - RNA, 32 nt, Human
gcucacaacuguaauccucgcacuuugggagg

SEQ ID NO: 178743 - RNA, 32 nt, Human
gcucacacaaccgguccacuccugccuuuuca

SEQ ID NO: 178744 - RNA, 32 nt, Human
gcucacacaauugcacuccauucuuccgccuu

SEQ ID NO: 178745 - RNA, 18 nt, Human
gcucacacacccaacacc

SEQ ID NO: 178746 - RNA, 32 nt, Human
gcucacacaggucacugcucucuaggcggaca

SEQ ID NO: 178747 - RNA, 20 nt, Human
gcucacacauaggcaugacc

SEQ ID NO: 178748 - RNA, 32 nt, Human
gcucacacauguuaauuccagcacuuugggag

SEQ ID NO: 178749 - RNA, 32 nt, Human
gcucacacauugucuggcagccuguguccaca

SEQ ID NO: 178750 - RNA, 32 nt, Human
gcucacaccacugcacuccagccugggugaca

SEQ ID NO: 178751 - RNA, 32 nt, Human
gcucacaccacugcacuccauccugggcaaca

SEQ ID NO: 178752 - RNA, 32 nt, Human
gcucacaccaggaugcuggagcagagcugaca

SEQ ID NO: 178753 - RNA, 32 nt, Human
gcucacacccauaaucccagcacuuugggagg

SEQ ID NO: 178754 - RNA, 32 nt, Human
gcucacacccauggcugaaucucugcagggca

SEQ ID NO: 178755 - RNA, 32 nt, Human
gcucacacccguaaucccagcacuuugcgggg

SEQ ID NO: 178756 - RNA, 31 nt, Human
gcucacacccguaaucccagcacuuugggag

SEQ ID NO: 178757 - RNA, 20 nt, Human
gcucacacccuguaauccca

SEQ ID NO: 178758 - RNA, 32 nt, Human
gcucacacccuguaaucccagcacuuugggag

SEQ ID NO: 178759 - RNA, 32 nt, Human
gcucacaccgguaaucccagcacuuugggagg

SEQ ID NO: 178760 - RNA, 32 nt, Human
gcucacaccuaaucccagcacuuugggaggcu

SEQ ID NO: 178761 - RNA, 19 nt, Human
gcucacaccuauaauccca

SEQ ID NO: 178762 - RNA, 27 nt, Human
gcucacaccuauaaucccagcacuuug

SEQ ID NO: 178763 - RNA, 32 nt, Human
gcucacaccuauaaucccagcacuuugggaag

SEQ ID NO: 178764 - RNA, 32 nt, Human
gcucacaccuauaaucccagcacuuugggagg

SEQ ID NO: 178765 - RNA, 32 nt, Human
gcucacaccuauaaucgagcacuuugggaggc

SEQ ID NO: 178766 - RNA, 32 nt, Human
gcucacaccuauaaucucagcacuuugggagg

SEQ ID NO: 178767 - RNA, 32 nt, Human
gcucacaccuaugaucucagcaccuugggagg

SEQ ID NO: 178768 - RNA, 32 nt, Human
gcucacaccucuaaucccagcacuuugggagg

SEQ ID NO: 178769 - RNA, 32 nt, Human
gcucacaccugaaaucccagcacuuugggagg

SEQ ID NO: 178770 - RNA, 32 nt, Human
gcucacaccugcaaucccagcacuuuggaagg

SEQ ID NO: 178771 - RNA, 32 nt, Human
gcucacaccugcaaucccagcacuuugggaga

SEQ ID NO: 178772 - RNA, 32 nt, Human
gcucacaccugcaaucccagcacuuugggagg

SEQ ID NO: 178773 - RNA, 19 nt, Human
gcucacaccuguaaaccca

SEQ ID NO: 178774 - RNA, 32 nt, Human
gcucacaccuguaaacccagcacuuugggaga

SEQ ID NO: 178775 - RNA, 32 nt, Human
gcucacaccuguaaccccagcacuuugggacg

SEQ ID NO: 178776 - RNA, 32 nt, Human
gcucacaccuguaaccccagcacuuugggagg

SEQ ID NO: 178777 - RNA, 32 nt, Human
gcucacaccuguaacccccagcacuuugggag

SEQ ID NO: 178778 - RNA, 32 nt, Human
gcucacaccuguaacccuagcacuuugggagg

SEQ ID NO: 178779 - RNA, 32 nt, Human
gcucacaccuguaauaaucccagcacuuuggg

SEQ ID NO: 178780 - RNA, 32 nt, Human
gcucacaccuguaauaccagcacuuugggaag

SEQ ID NO: 178781 - RNA, 32 nt, Human
gcucacaccuguaauaccagcaguuugagaag

SEQ ID NO: 178782 - RNA, 32 nt, Human
gcucacaccuguaaucaaaacacuuugggagg

SEQ ID NO: 178783 - RNA, 32 nt, Human
gcucacaccuguaaucacagcacuuugggagg

SEQ ID NO: 178784 - RNA, 32 nt, Human
gcucacaccuguaaucacugcacuccaaccug

SEQ ID NO: 178785 - RNA, 32 nt, Human
gcucacaccuguaauccaagcacuuugggagg

SEQ ID NO: 178786 - RNA, 19 nt, Human
gcucacaccuguaauccca

SEQ ID NO: 178787 - RNA, 32 nt, Human
gcucacaccuguaaucccaacacucugggaag

SEQ ID NO: 178788 - RNA, 32 nt, Human
gcucacaccuguaaucccaacacuuugagagg

SEQ ID NO: 178789 - RNA, 32 nt, Human
gcucacaccuguaaucccaacacuuugagcgg

SEQ ID NO: 178790 - RNA, 32 nt, Human
gcucacaccuguaaucccaacacuuuggaagg

SEQ ID NO: 178791 - RNA, 32 nt, Human
gcucacaccuguaaucccaacacuuugggaag

SEQ ID NO: 178792 - RNA, 32 nt, Human
gcucacaccuguaaucccaacacuuugggaau

SEQ ID NO: 178793 - RNA, 32 nt, Human
gcucacaccuguaaucccaacacuuugggacg

SEQ ID NO: 178794 - RNA, 32 nt, Human
gcucacaccuguaaucccaacacuuugggagc

SEQ ID NO: 178795 - RNA, 32 nt, Human
gcucacaccuguaaucccaacacuuugggagg

SEQ ID NO: 178796 - RNA, 32 nt, Human
gcucacaccuguaaucccaacacuuugggaug

SEQ ID NO: 178797 - RNA, 32 nt, Human
gcucacaccuguaaucccaacauuuugggaac

SEQ ID NO: 178798 - RNA, 32 nt, Human
gcucacaccuguaaucccaacauuuugggagg

SEQ ID NO: 178799 - RNA, 32 nt, Human
gcucacaccuguaaucccaauacuuugggugg

SEQ ID NO: 178800 - RNA, 32 nt, Human
gcucacaccuguaaucccagaacuuugggagg

SEQ ID NO: 178801 - RNA, 32 nt, Human
gcucacaccuguaaucccagcaauuugggaga

SEQ ID NO: 178802 - RNA, 32 nt, Human
gcucacaccuguaaucccagcaccuugggagg

SEQ ID NO: 178803 - RNA, 32 nt, Human
gcucacaccuguaaucccagcacuaugggagg

SEQ ID NO: 178804 - RNA, 32 nt, Human
gcucacaccuguaaucccagcacucugggagg

SEQ ID NO: 178805 - RNA, 32 nt, Human
gcucacaccuguaaucccagcacuguggaaag

SEQ ID NO: 178806 - RNA, 25 nt, Human
gcucacaccuguaaucccagcacuu

SEQ ID NO: 178807 - RNA, 32 nt, Human
gcucacaccuguaaucccagcacuucgggaag

SEQ ID NO: 178808 - RNA, 32 nt, Human
gcucacaccuguaaucccagcacuucgggagg

SEQ ID NO: 178809 - RNA, 32 nt, Human
gcucacaccuguaaucccagcacuuuaggagg

SEQ ID NO: 178810 - RNA, 32 nt, Human
gcucacaccuguaaucccagcacuuugagagg

SEQ ID NO: 178811 - RNA, 32 nt, Human
gcucacaccuguaaucccagcacuuugcgggg

SEQ ID NO: 178812 - RNA, 32 nt, Human
gcucacaccuguaaucccagcacuuuggcagg

SEQ ID NO: 178813 - RNA, 32 nt, Human
gcucacaccuguaaucccagcacuuugggaag

SEQ ID NO: 178814 - RNA, 32 nt, Human
gcucacaccuguaaucccagcacuuugggaca

SEQ ID NO: 178815 - RNA, 32 nt, Human
gcucacaccuguaaucccagcacuuugggaga

SEQ ID NO: 178816 - RNA, 32 nt, Human
gcucacaccuguaaucccagcacuuugggagc

SEQ ID NO: 178817 - RNA, 32 nt, Human
gcucacaccuguaaucccagcacuuugggagg

SEQ ID NO: 178818 - RNA, 32 nt, Human
gcucacaccuguaaucccagcacuuugggagu

SEQ ID NO: 178819 - RNA, 32 nt, Human
gcucacaccuguaaucccagcacuuugggauu

SEQ ID NO: 178820 - RNA, 32 nt, Human
gcucacaccuguaaucccagcacuuuggggag

SEQ ID NO: 178821 - RNA, 32 nt, Human
gcucacaccuguaaucccagcacuuugguagg

SEQ ID NO: 178822 - RNA, 32 nt, Human
gcucacaccuguaaucccagcacuuuuggagg

SEQ ID NO: 178823 - RNA, 32 nt, Human
gcucacaccuguaaucccagcaguuuggaagg

SEQ ID NO: 178824 - RNA, 32 nt, Human
gcucacaccuguaaucccagcaguuugggagg

SEQ ID NO: 178825 - RNA, 32 nt, Human
gcucacaccuguaaucccagcauuuugggaag

SEQ ID NO: 178826 - RNA, 32 nt, Human
gcucacaccuguaaucccagcauuuugggagg

SEQ ID NO: 178827 - RNA, 32 nt, Human
gcucacaccuguaaucccagcccuuugggagg

SEQ ID NO: 178828 - RNA, 32 nt, Human
gcucacaccuguaaucccagcgcuuugggagg

SEQ ID NO: 178829 - RNA, 32 nt, Human
gcucacaccuguaaucccagcucuuuggaggc

SEQ ID NO: 178830 - RNA, 32 nt, Human
gcucacaccuguaaucccagcucuuugggagg

SEQ ID NO: 178831 - RNA, 32 nt, Human
gcucacaccuguaaucccagcuguuugggagg

SEQ ID NO: 178832 - RNA, 32 nt, Human
gcucacaccuguaaucccaggacuuugggagg

SEQ ID NO: 178833 - RNA, 32 nt, Human
gcucacaccuguaaucccaguaccuugggagg

SEQ ID NO: 178834 - RNA, 32 nt, Human
gcucacaccuguaaucccaguacuuugagacg

SEQ ID NO: 178835 - RNA, 32 nt, Human
gcucacaccuguaaucccaguacuuugggagg

SEQ ID NO: 178836 - RNA, 32 nt, Human
gcucacaccuguaaucccagugcuuugggagg

SEQ ID NO: 178837 - RNA, 32 nt, Human
gcucacaccuguaauccccagcacuuugggag

SEQ ID NO: 178838 - RNA, 32 nt, Human
gcucacaccuguaaucccugcacuuugggagg

SEQ ID NO: 178839 - RNA, 19 nt, Human
gcucacaccuguaauccua

SEQ ID NO: 178840 - RNA, 32 nt, Human
gcucacaccuguaauccuaacacuuugggagg

SEQ ID NO: 178841 - RNA, 32 nt, Human
gcucacaccuguaauccuagcacauugggagg

SEQ ID NO: 178842 - RNA, 32 nt, Human
gcucacaccuguaauccuagcacuuugggagg

SEQ ID NO: 178843 - RNA, 32 nt, Human
gcucacaccuguaauccuagcaucuugggagg

SEQ ID NO: 178844 - RNA, 32 nt, Human
gcucacaccuguaauccuagcgcuuugggagg

SEQ ID NO: 178845 - RNA, 32 nt, Human
gcucacaccuguaauccugcacuuugggaguc

SEQ ID NO: 178846 - RNA, 32 nt, Human
gcucacaccuguaauccuugcauuuuggaagg

SEQ ID NO: 178847 - RNA, 19 nt, Human
gcucacaccuguaaucuca

SEQ ID NO: 178848 - RNA, 32 nt, Human
gcucacaccuguaaucucaacacuuugggagg

SEQ ID NO: 178849 - RNA, 32 nt, Human
gcucacaccuguaaucucaacgcuuugggagg

SEQ ID NO: 178850 - RNA, 32 nt, Human
gcucacaccuguaaucucagcaaccugggagu

SEQ ID NO: 178851 - RNA, 32 nt, Human
gcucacaccuguaaucucagcacucugggagg

SEQ ID NO: 178852 - RNA, 32 nt, Human
gcucacaccuguaaucucagcacuuugggaag

SEQ ID NO: 178853 - RNA, 32 nt, Human
gcucacaccuguaaucucagcacuuugggagg

SEQ ID NO: 178854 - RNA, 32 nt, Human
gcucacaccuguaaucucagcauuuugggagg

SEQ ID NO: 178855 - RNA, 32 nt, Human
gcucacaccuguaaucugaacacuuugggagg

SEQ ID NO: 178856 - RNA, 32 nt, Human
gcucacaccuguaaucugagcacauugggagg

SEQ ID NO: 178857 - RNA, 32 nt, Human
gcucacaccuguaaucugagcauucugggagg

SEQ ID NO: 178858 - RNA, 32 nt, Human
gcucacaccuguaaucuuaacacugugggagg

SEQ ID NO: 178859 - RNA, 32 nt, Human
gcucacaccuguaaugccagcacuuugggcag

SEQ ID NO: 178860 - RNA, 32 nt, Human
gcucacaccuguaaugccagcccuuugggagg

SEQ ID NO: 178861 - RNA, 32 nt, Human
gcucacaccuguaauuccaacacuuugggagg

SEQ ID NO: 178862 - RNA, 32 nt, Human
gcucacaccuguaauuccagcacuuugggagg

SEQ ID NO: 178863 - RNA, 32 nt, Human
gcucacaccuguaauuccagcacuuugugagg

SEQ ID NO: 178864 - RNA, 32 nt, Human
gcucacaccuguaauucccagcgcuuugggaa

SEQ ID NO: 178865 - RNA, 32 nt, Human
gcucacaccuguaauucuagcacuuugggagg

SEQ ID NO: 178866 - RNA, 32 nt, Human
gcucacaccuguaauugcagcacucugggagg

SEQ ID NO: 178867 - RNA, 32 nt, Human
gcucacaccuguaauuucagcaccuugggagg

SEQ ID NO: 178868 - RNA, 32 nt, Human
gcucacaccuguaauuucagcacucuggggag

SEQ ID NO: 178869 - RNA, 32 nt, Human
gcucacaccuguaucccaacacuuugggaggc

SEQ ID NO: 178870 - RNA, 32 nt, Human
gcucacaccuguaucccagcacuuugggagac

SEQ ID NO: 178871 - RNA, 32 nt, Human
gcucacaccuguaucccagcacuuugggaggc

SEQ ID NO: 178872 - RNA, 32 nt, Human
gcucacaccuguauucccagcacuuugggagg

SEQ ID NO: 178873 - RNA, 32 nt, Human
gcucacaccugucaucccagcacuuugggagg

SEQ ID NO: 178874 - RNA, 32 nt, Human
gcucacaccugucauuccagcacuuugagagg

SEQ ID NO: 178875 - RNA, 32 nt, Human
gcucacaccugugaucccagcacuuugggagg

SEQ ID NO: 178876 - RNA, 32 nt, Human
gcucacaccugugaucucagcacauugggagg

SEQ ID NO: 178877 - RNA, 32 nt, Human
gcucacaccugugaucucagcaccuugggagg

SEQ ID NO: 178878 - RNA, 32 nt, Human
gcucacaccugugcucccagcacuuugggagg

SEQ ID NO: 178879 - RNA, 32 nt, Human
gcucacaccuguguucucagcaccuugggagg

SEQ ID NO: 178880 - RNA, 32 nt, Human
gcucacaccuuuaaucccagcacuuugggaag

SEQ ID NO: 178881 - RNA, 32 nt, Human
gcucacaccuuuaaucccagcacuuugggaga

SEQ ID NO: 178882 - RNA, 32 nt, Human
gcucacacgccuguaaucccagcacuuuggga

SEQ ID NO: 178883 - RNA, 32 nt, Human
gcucacacuguaaucccagcacuuugggaggc

SEQ ID NO: 178884 - RNA, 32 nt, Human
gcucacacuguaaugccagcacuuugggaggc

SEQ ID NO: 178885 - RNA, 32 nt, Human
gcucacacuuauaaucacagcacuuugggagg

SEQ ID NO: 178886 - RNA, 32 nt, Human
gcucacacuuauaaucccagcacuuugggagg

SEQ ID NO: 178887 - RNA, 32 nt, Human
gcucacacuuguaaucacugcacuuugggaag

SEQ ID NO: 178888 - RNA, 32 nt, Human
gcucacacuuguaaucauagcacuuugggagg

SEQ ID NO: 178889 - RNA, 32 nt, Human
gcucacacuuguaaucccagcacuuugaggug

SEQ ID NO: 178890 - RNA, 32 nt, Human
gcucacacuuguaaucccagcacuuugggaag

SEQ ID NO: 178891 - RNA, 32 nt, Human
gcucacacuuguaaucccagcacuuugggagg

SEQ ID NO: 178892 - RNA, 32 nt, Human
gcucacacuuguaaucccagcacuuugggaug

SEQ ID NO: 178893 - RNA, 32 nt, Human
gcucacagaagcagugaggaugaugccaggau

SEQ ID NO: 178894 - RNA, 32 nt, Human
gcucacagaagucuaaccugcccgggacgccc

SEQ ID NO: 178895 - RNA, 32 nt, Human
gcucacagaccaccccacccuacccuguccuu

SEQ ID NO: 178896 - RNA, 32 nt, Human
gcucacagacuagacagagcuucagaaagccc

SEQ ID NO: 178897 - RNA, 32 nt, Human
gcucacagagcccagacugcuggaacagccaa

SEQ ID NO: 178898 - RNA, 32 nt, Human
gcucacagcaaccacucucuccuggguucaag

SEQ ID NO: 178899 - RNA, 32 nt, Human
gcucacagcaaccucuaccuccuggguucaag

SEQ ID NO: 178900 - RNA, 23 nt, Human
gcucacagcaaccucugccuccu

SEQ ID NO: 178901 - RNA, 32 nt, Human
gcucacagcaaccucugccuccuggguucaag

SEQ ID NO: 178902 - RNA, 32 nt, Human
gcucacagcacugggaaaugggaacauaguac

SEQ ID NO: 178903 - RNA, 32 nt, Human
gcucacagcccaggcaggguguguggcuccug

SEQ ID NO: 178904 - RNA, 19 nt, Human
gcucacagcccccacccca

SEQ ID NO: 178905 - RNA, 32 nt, Human
gcucacagccuggcacagacugggagcaaaau

SEQ ID NO: 178906 - RNA, 32 nt, Human
gcucacagcuauaaucucagcacuuugggagg

SEQ ID NO: 178907 - RNA, 19 nt, Human
gcucacagcuguaauccca

SEQ ID NO: 178908 - RNA, 32 nt, Human
gcucacagcuguaaucccagcacuuugagguu

SEQ ID NO: 178909 - RNA, 32 nt, Human
gcucacagcuuugaaccugccaaaggaccccu

SEQ ID NO: 178910 - RNA, 32 nt, Human
gcucacagggcucucauuucguccauccccuu

SEQ ID NO: 178911 - RNA, 32 nt, Human
gcucacagugaugucaggagugguuacccuuc

SEQ ID NO: 178912 - RNA, 32 nt, Human
gcucacagugcaaccucugcuucccagguuca

SEQ ID NO: 178913 - RNA, 32 nt, Human
gcucacagugccuguucucugcuccaggaaca

SEQ ID NO: 178914 - RNA, 19 nt, Human
gcucacaucaccugggaca

SEQ ID NO: 178915 - RNA, 32 nt, Human
gcucacaucagagcaccucacagagcaauagc

SEQ ID NO: 178916 - RNA, 32 nt, Human
gcucacauccacgauugugaccccuuaaggga

SEQ ID NO: 178917 - RNA, 17 nt, Human
gcucacaucccaucucu

SEQ ID NO: 178918 - RNA, 32 nt, Human
gcucacaucuggaagaaacaggaagauuggaa

SEQ ID NO: 178919 - RNA, 32 nt, Human
gcucacaucuguaaccccagcacuuugggagg

SEQ ID NO: 178920 - RNA, 32 nt, Human
gcucacaucuguaauaccagcucucugggagg

SEQ ID NO: 178921 - RNA, 32 nt, Human
gcucacaucuguaaucccagcacuuuggaagg

SEQ ID NO: 178922 - RNA, 32 nt, Human
gcucacaucuguaaucccagcacuuugggaga

SEQ ID NO: 178923 - RNA, 32 nt, Human
gcucacaucuguaaucccagcacuuugggagg

SEQ ID NO: 178924 - RNA, 32 nt, Human
gcucacaucuguaaucccagcacuuugggagu

SEQ ID NO: 178925 - RNA, 32 nt, Human
gcucacaucuguaaucucaacacuuugggagg

SEQ ID NO: 178926 - RNA, 32 nt, Human
gcucacaucuguaaucucagcauuuugggagg

SEQ ID NO: 178927 - RNA, 32 nt, Human
gcucacaucuguaaugccagcacuuugggagg

SEQ ID NO: 178928 - RNA, 32 nt, Human
gcucacauguacaaaucacuucuaggccucag

SEQ ID NO: 178929 - RNA, 20 nt, Human
gcucacaugucaccaccacc

SEQ ID NO: 178930 - RNA, 32 nt, Human
gcucacauguucacagugcagcuccuggcaga

SEQ ID NO: 178931 - RNA, 32 nt, Human
gcucacauucaccaaaguuuguuuucaugauc

SEQ ID NO: 178932 - RNA, 32 nt, Human
gcucacauuuucccuucucugccuugcuucaa

SEQ ID NO: 178933 - RNA, 32 nt, Human
gcucaccaaugagugaaagggaucguggguca

SEQ ID NO: 178934 - RNA, 32 nt, Human
gcucaccaaugccacauuuguucauucuguuc

SEQ ID NO: 178935 - RNA, 32 nt, Human
gcucaccacaacauccgccuccuggguucaag

SEQ ID NO: 178936 - RNA, 32 nt, Human
gcucaccacaaccuccaccuccuggguuuaag

SEQ ID NO: 178937 - RNA, 32 nt, Human
gcucaccacaaccuccgccuccuggguucaug

SEQ ID NO: 178938 - RNA, 32 nt, Human
gcucaccacaaccucugccuccuggguucaag

SEQ ID NO: 178939 - RNA, 32 nt, Human
gcucaccacaaccuugaacucccaggcucaag

SEQ ID NO: 178940 - RNA, 32 nt, Human
gcucaccacagccuccaacuccugggcucaag

SEQ ID NO: 178941 - RNA, 19 nt, Human
gcucaccaccacagccccu

SEQ ID NO: 178942 - RNA, 32 nt, Human
gcucaccagcaucuacuugcccccucguuccu

SEQ ID NO: 178943 - RNA, 32 nt, Human
gcucaccagcuuucauuucagcuccuguaggc

SEQ ID NO: 178944 - RNA, 32 nt, Human
gcucaccaucacccuuccugcccgacggagcu

SEQ ID NO: 178945 - RNA, 32 nt, Human
gcucaccaucuccacccugccugcuguggaau

SEQ ID NO: 178946 - RNA, 32 nt, Human
gcucaccauuggagaaucagcucacugcucuc

SEQ ID NO: 178947 - RNA, 28 nt, Human
gcucacccaagugcuagcucugcacuuc

SEQ ID NO: 178948 - RNA, 32 nt, Human
gcucacccaccccucccucucuuccaaggaga

SEQ ID NO: 178949 - RNA, 32 nt, Human
gcucacccagcucugcuccaaggccuuccucu

SEQ ID NO: 178950 - RNA, 26 nt, Human
gcucacccaggucuccagcaaacgga

SEQ ID NO: 178951 - RNA, 32 nt, Human
gcucacccauggcugcugugacuccuaccagg

SEQ ID NO: 178952 - RNA, 32 nt, Human
gcucacccauucuacacuugcucuuuugcucc

SEQ ID NO: 178953 - RNA, 32 nt, Human
gcucaccccaaccuccgccuccuggguucagg

SEQ ID NO: 178954 - RNA, 32 nt, Human
gcucaccccaucaucccuuucccuuggugccc

SEQ ID NO: 178955 - RNA, 32 nt, Human
gcucacccccuguaaucccagcacuuugggaa

SEQ ID NO: 178956 - RNA, 32 nt, Human
gcucaccccuagcuggcuucucaccagccugg

SEQ ID NO: 178957 - RNA, 32 nt, Human
gcucaccccucaggcucaggaaagccaauaac

SEQ ID NO: 178958 - RNA, 32 nt, Human
gcucaccccuccugccggcugccagaggcccc

SEQ ID NO: 178959 - RNA, 32 nt, Human
gcucaccccugcccucuugcacucucccugcc

SEQ ID NO: 178960 - RNA, 32 nt, Human
gcucaccccuggaaucccagcacuuugggagg

SEQ ID NO: 178961 - RNA, 19 nt, Human
gcucaccccuguaauccca

SEQ ID NO: 178962 - RNA, 32 nt, Human
gcucaccccuguaaucccagcacuuugggagg

SEQ ID NO: 178963 - RNA, 32 nt, Human
gcucaccccuguaaucccagcacuuugugagg

SEQ ID NO: 178964 - RNA, 32 nt, Human
gcucaccccuguaaucccaguacuuugggagg

SEQ ID NO: 178965 - RNA, 32 nt, Human
gcucaccccuguaauccuagcacuuugggagg

SEQ ID NO: 178966 - RNA, 32 nt, Human
gcucaccccuguaaucgcagcacuuugggagg

SEQ ID NO: 178967 - RNA, 32 nt, Human
gcucaccccuguaaucucagcacuuugggugg

SEQ ID NO: 178968 - RNA, 32 nt, Human
gcucaccccuguaaucucagcauuuugggagg

SEQ ID NO: 178969 - RNA, 32 nt, Human
gcucaccccuuuaaucccagcacuuuggaagg

SEQ ID NO: 178970 - RNA, 32 nt, Human
gcucacccuagauuguggcccagaucucagga

SEQ ID NO: 178971 - RNA, 23 nt, Human
gcucacccucaccccagccucuu

SEQ ID NO: 178972 - RNA, 19 nt, Human
gcucacccuccacagugac

SEQ ID NO: 178973 - RNA, 32 nt, Human
gcucacccuccaccugcauccccaccccacuc

SEQ ID NO: 178974 - RNA, 32 nt, Human
gcucacccuguucccugaucugcuccagauga

SEQ ID NO: 178975 - RNA, 24 nt, Human
gcucacccuguuuauuuccuggua

SEQ ID NO: 178976 - RNA, 19 nt, Human
gcucacccuuguaauccca

SEQ ID NO: 178977 - RNA, 32 nt, Human
gcucacccuuguaaucccagcacuuugggagg

SEQ ID NO: 178978 - RNA, 32 nt, Human
gcucacccuugugaucucagcacuuugagagg

SEQ ID NO: 178979 - RNA, 22 nt, Human
gcucaccgcaaccuccaccucc

SEQ ID NO: 178980 - RNA, 32 nt, Human
gcucaccgcaaccuccaccuccaggguugacg

SEQ ID NO: 178981 - RNA, 32 nt, Human
gcucaccgcaaccuccaccucccggguucaag

SEQ ID NO: 178982 - RNA, 23 nt, Human
gcucaccgcaaccuccaccuccu

SEQ ID NO: 178983 - RNA, 32 nt, Human
gcucaccgcaaccuccaccuccugaguuccag

SEQ ID NO: 178984 - RNA, 32 nt, Human
gcucaccgcaaccuccaccuccuggguucaag

SEQ ID NO: 178985 - RNA, 22 nt, Human
gcucaccgcaaccuccgccucc

SEQ ID NO: 178986 - RNA, 32 nt, Human
gcucaccgcaaccuccgccuccuggguucaag

SEQ ID NO: 178987 - RNA, 32 nt, Human
gcucaccgcaaccucugccuccuggguucaag

SEQ ID NO: 178988 - RNA, 22 nt, Human
gcucaccgcaaucuccgccucc

SEQ ID NO: 178989 - RNA, 32 nt, Human
gcucaccgcagccuccaccuccaggguucaag

SEQ ID NO: 178990 - RNA, 32 nt, Human
gcucaccgcagucuccaccucccggguucaag

SEQ ID NO: 178991 - RNA, 21 nt, Human
gcucaccgugcccagccuccu

SEQ ID NO: 178992 - RNA, 18 nt, Human
gcucaccuaccugccacc

SEQ ID NO: 178993 - RNA, 32 nt, Human
gcucaccucagacaaggggugcaucagggacc

SEQ ID NO: 178994 - RNA, 32 nt, Human
gcucaccuccacugcaucuuuuuacuggccau

SEQ ID NO: 178995 - RNA, 32 nt, Human
gcucaccuccaggacccagagucugcccuucu

SEQ ID NO: 178996 - RNA, 32 nt, Human
gcucaccuccgccaccuccucaggguucugcg

SEQ ID NO: 178997 - RNA, 32 nt, Human
gcucaccucucagcugcugggcucagcaccgg

SEQ ID NO: 178998 - RNA, 32 nt, Human
gcucaccucuguaaucccagcacuuugggagg

SEQ ID NO: 178999 - RNA, 32 nt, Human
gcucaccugagcccucccagggccagguuccu

SEQ ID NO: 179000 - RNA, 32 nt, Human
gcucaccugccuggacccugggcugccagaug

SEQ ID NO: 179001 - RNA, 32 nt, Human
gcucaccugcuguugagccuugugcugucaau

SEQ ID NO: 179002 - RNA, 32 nt, Human
gcucaccuggcaccuaccuggagcucaccugg

SEQ ID NO: 179003 - RNA, 32 nt, Human
gcucaccuggcuugcuugggcccagugugggg

SEQ ID NO: 179004 - RNA, 20 nt, Human
gcucaccugggcccaaggca

SEQ ID NO: 179005 - RNA, 32 nt, Human
gcucaccuggggauuuggggguggggugguca

SEQ ID NO: 179006 - RNA, 32 nt, Human
gcucaccuggggccuccaucccagaagcgcag

SEQ ID NO: 179007 - RNA, 16 nt, Human
gcucaccuguaauccc

SEQ ID NO: 179008 - RNA, 17 nt, Human
gcucaccuguaauccca

SEQ ID NO: 179009 - RNA, 32 nt, Human
gcucaccuguaaucccaacacuuugggaggcu

SEQ ID NO: 179010 - RNA, 32 nt, Human
gcucaccuguaaucccaccauuuugggaggcu

SEQ ID NO: 179011 - RNA, 32 nt, Human
gcucaccuguaaucccagcacuuugggaggcc

SEQ ID NO: 179012 - RNA, 20 nt, Human
gcucaccuguaaucccagcu

SEQ ID NO: 179013 - RNA, 32 nt, Human
gcucaccuguaaucccagcuacccaggaggcu

SEQ ID NO: 179014 - RNA, 20 nt, Human
gcucaccuguaaucccggcu

SEQ ID NO: 179015 - RNA, 32 nt, Human
gcucaccuguaaucccggcuacucgggaggcu

SEQ ID NO: 179016 - RNA, 32 nt, Human
gcucaccuuccucaccccuccucugacccacc

SEQ ID NO: 179017 - RNA, 23 nt, Human
gcucaccuucugaccuccuggca

SEQ ID NO: 179018 - RNA, 18 nt, Human
gcucaccuuggccucuca

SEQ ID NO: 179019 - RNA, 32 nt, Human
gcucacgaggagaucaagaccauccuggcuaa

SEQ ID NO: 179020 - RNA, 32 nt, Human
gcucacgcauguaaucccagcacuuugggagg

SEQ ID NO: 179021 - RNA, 32 nt, Human
gcucacgcauguaaucccugcacuuugggagg

SEQ ID NO: 179022 - RNA, 32 nt, Human
gcucacgccaggaaucccagcacuuugggagg

SEQ ID NO: 179023 - RNA, 32 nt, Human
gcucacgccaguaaucccagcacuuuggaggg

SEQ ID NO: 179024 - RNA, 32 nt, Human
gcucacgccaguaaucccagcacuuugggagg

SEQ ID NO: 179025 - RNA, 32 nt, Human
gcucacgccauucuuccaccucagccucccga

SEQ ID NO: 179026 - RNA, 32 nt, Human
gcucacgcccauaauccagcacuuugggaagc

SEQ ID NO: 179027 - RNA, 32 nt, Human
gcucacgcccauaaucccagcacuuugggagg

SEQ ID NO: 179028 - RNA, 32 nt, Human
gcucacgcccucccacccccacccuacagccc

SEQ ID NO: 179029 - RNA, 32 nt, Human
gcucacgccgguaaucccagcacuuugggagg

SEQ ID NO: 179030 - RNA, 32 nt, Human
gcucacgccguaaugccaacacuuugguagac

SEQ ID NO: 179031 - RNA, 32 nt, Human
gcucacgccuacaaucucagcacguugggagg

SEQ ID NO: 179032 - RNA, 32 nt, Human
gcucacgccuauaauccaagcacuuugggagg

SEQ ID NO: 179033 - RNA, 32 nt, Human
gcucacgccuauaaucccagcacuuccagagu

SEQ ID NO: 179034 - RNA, 32 nt, Human
gcucacgccuauaaucccagcacuuuaggagg

SEQ ID NO: 179035 - RNA, 32 nt, Human
gcucacgccuauaaucccagcacuuugcgagg

SEQ ID NO: 179036 - RNA, 32 nt, Human
gcucacgccuauaaucccagcacuuugggagg

SEQ ID NO: 179037 - RNA, 32 nt, Human
gcucacgccuauaaucucagcacucugggagg

SEQ ID NO: 179038 - RNA, 32 nt, Human
gcucacgccuauacacccagcacuuuggaagg

SEQ ID NO: 179039 - RNA, 32 nt, Human
gcucacgccuauaucccagcacuuugggaggc

SEQ ID NO: 179040 - RNA, 32 nt, Human
gcucacgccuaugaucccagcacuuugggagg

SEQ ID NO: 179041 - RNA, 32 nt, Human
gcucacgccuauuaucuuagcacuuugggagg

SEQ ID NO: 179042 - RNA, 32 nt, Human
gcucacgccucuaaucccagcacuuugggagg

SEQ ID NO: 179043 - RNA, 32 nt, Human
gcucacgccucuaaucgcagcacuuugggagg

SEQ ID NO: 179044 - RNA, 32 nt, Human
gcucacgccucuaaucucagcacuuugggagg

SEQ ID NO: 179045 - RNA, 32 nt, Human
gcucacgccugaaaucccagcacuuugggaga

SEQ ID NO: 179046 - RNA, 32 nt, Human
gcucacgccugaaaucccagcacuuugggagg

SEQ ID NO: 179047 - RNA, 32 nt, Human
gcucacgccugaaaucucagcacuuugguagg

SEQ ID NO: 179048 - RNA, 32 nt, Human
gcucacgccugcaaucccagcacuuugggaga

SEQ ID NO: 179049 - RNA, 32 nt, Human
gcucacgccugcaaucccagcacuuugggagg

SEQ ID NO: 179050 - RNA, 32 nt, Human
gcucacgccugcaaugccagcacuuugagagg

SEQ ID NO: 179051 - RNA, 32 nt, Human
gcucacgccugcagucccagcacuuugggagg

SEQ ID NO: 179052 - RNA, 32 nt, Human
gcucacgccuggaaucccagcacuuugggaag

SEQ ID NO: 179053 - RNA, 32 nt, Human
gcucacgccuggaaucccagcacuuugggagg

SEQ ID NO: 179054 - RNA, 32 nt, Human
gcucacgccuguaaacccagcacuuuaggagc

SEQ ID NO: 179055 - RNA, 32 nt, Human
gcucacgccuguaaccccaacacuuugggagg

SEQ ID NO: 179056 - RNA, 32 nt, Human
gcucacgccuguaaccccagcacauugggagg

SEQ ID NO: 179057 - RNA, 32 nt, Human
gcucacgccuguaaccccagcacuuugggagg

SEQ ID NO: 179058 - RNA, 32 nt, Human
gcucacgccuguaaccccaucacuuugggagg

SEQ ID NO: 179059 - RNA, 32 nt, Human
gcucacgccuguaacccuagcacuuugggagu

SEQ ID NO: 179060 - RNA, 32 nt, Human
gcucacgccuguaaccucagcacugugggagg

SEQ ID NO: 179061 - RNA, 32 nt, Human
gcucacgccuguaaccucagcacuuugggagg

SEQ ID NO: 179062 - RNA, 32 nt, Human
gcucacgccuguaacuccagcacuuugggagg

SEQ ID NO: 179063 - RNA, 32 nt, Human
gcucacgccuguaauaccagcacuuugggagg

SEQ ID NO: 179064 - RNA, 32 nt, Human
gcucacgccuguaauaucaacacuuugggacg

SEQ ID NO: 179065 - RNA, 32 nt, Human
gcucacgccuguaaucacaacacuuugggagg

SEQ ID NO: 179066 - RNA, 32 nt, Human
gcucacgccuguaaucacagcacuuugggagg

SEQ ID NO: 179067 - RNA, 32 nt, Human
gcucacgccuguaauccaacacuuugagaggc

SEQ ID NO: 179068 - RNA, 32 nt, Human
gcucacgccuguaauccaagcacuuggggagg

SEQ ID NO: 179069 - RNA, 32 nt, Human
gcucacgccuguaauccagcaauuugggaggc

SEQ ID NO: 179070 - RNA, 32 nt, Human
gcucacgccuguaauccagcacuuugggaggc

SEQ ID NO: 179071 - RNA, 19 nt, Human
gcucacgccuguaauccca

SEQ ID NO: 179072 - RNA, 32 nt, Human
gcucacgccuguaaucccaacaacacuuuggg

SEQ ID NO: 179073 - RNA, 32 nt, Human
gcucacgccuguaaucccaacaccuugggagg

SEQ ID NO: 179074 - RNA, 32 nt, Human
gcucacgccuguaaucccaacacucugggagg

SEQ ID NO: 179075 - RNA, 32 nt, Human
gcucacgccuguaaucccaacacuuuaggaga

SEQ ID NO: 179076 - RNA, 32 nt, Human
gcucacgccuguaaucccaacacuuuaggagu

SEQ ID NO: 179077 - RNA, 32 nt, Human
gcucacgccuguaaucccaacacuuugggagc

SEQ ID NO: 179078 - RNA, 32 nt, Human
gcucacgccuguaaucccaacacuuugggagg

SEQ ID NO: 179079 - RNA, 32 nt, Human
gcucacgccuguaaucccaacacuuuucgagg

SEQ ID NO: 179080 - RNA, 32 nt, Human
gcucacgccuguaaucccaacauuuugggagg

SEQ ID NO: 179081 - RNA, 32 nt, Human
gcucacgccuguaaucccaccacuuuggaaag

SEQ ID NO: 179082 - RNA, 32 nt, Human
gcucacgccuguaaucccaccacuuugggaga

SEQ ID NO: 179083 - RNA, 32 nt, Human
gcucacgccuguaaucccaccacuuugggagg

SEQ ID NO: 179084 - RNA, 32 nt, Human
gcucacgccuguaaucccagaacuaugugagg

SEQ ID NO: 179085 - RNA, 32 nt, Human
gcucacgccuguaaucccagaacuuuaggagg

SEQ ID NO: 179086 - RNA, 32 nt, Human
gcucacgccuguaaucccagaacuuugagagg

SEQ ID NO: 179087 - RNA, 32 nt, Human
gcucacgccuguaaucccagaacuuugggaag

SEQ ID NO: 179088 - RNA, 32 nt, Human
gcucacgccuguaaucccagaacuuugggagg

SEQ ID NO: 179089 - RNA, 32 nt, Human
gcucacgccuguaaucccagacuuugggaggc

SEQ ID NO: 179090 - RNA, 21 nt, Human
gcucacgccuguaaucccagc

SEQ ID NO: 179091 - RNA, 32 nt, Human
gcucacgccuguaaucccagcaaguugggagg

SEQ ID NO: 179092 - RNA, 32 nt, Human
gcucacgccuguaaucccagcaauugggaagg

SEQ ID NO: 179093 - RNA, 32 nt, Human
gcucacgccuguaaucccagcaauuugggagg

SEQ ID NO: 179094 - RNA, 32 nt, Human
gcucacgccuguaaucccagcaauuugggagu

SEQ ID NO: 179095 - RNA, 32 nt, Human
gcucacgccuguaaucccagcaccuugggagg

SEQ ID NO: 179096 - RNA, 32 nt, Human
gcucacgccuguaaucccagcacgcugggagg

SEQ ID NO: 179097 - RNA, 32 nt, Human
gcucacgccuguaaucccagcacucugggagg

SEQ ID NO: 179098 - RNA, 32 nt, Human
gcucacgccuguaaucccagcacugggaggcc

SEQ ID NO: 179099 - RNA, 32 nt, Human
gcucacgccuguaaucccagcacugugagagg

SEQ ID NO: 179100 - RNA, 32 nt, Human
gcucacgccuguaaucccagcacugugggagg

SEQ ID NO: 179101 - RNA, 32 nt, Human
gcucacgccuguaaucccagcacuuagggugg

SEQ ID NO: 179102 - RNA, 32 nt, Human
gcucacgccuguaaucccagcacuucgggagg

SEQ ID NO: 179103 - RNA, 32 nt, Human
gcucacgccuguaaucccagcacuugggaggc

SEQ ID NO: 179104 - RNA, 32 nt, Human
gcucacgccuguaaucccagcacuuggggagg

SEQ ID NO: 179105 - RNA, 32 nt, Human
gcucacgccuguaaucccagcacuuuaagagg

SEQ ID NO: 179106 - RNA, 32 nt, Human
gcucacgccuguaaucccagcacuuuaggagg

SEQ ID NO: 179107 - RNA, 32 nt, Human
gcucacgccuguaaucccagcacuuucggagg

SEQ ID NO: 179108 - RNA, 32 nt, Human
gcucacgccuguaaucccagcacuuugagaag

SEQ ID NO: 179109 - RNA, 32 nt, Human
gcucacgccuguaaucccagcacuuugagaga

SEQ ID NO: 179110 - RNA, 32 nt, Human
gcucacgccuguaaucccagcacuuugagagg

SEQ ID NO: 179111 - RNA, 32 nt, Human
gcucacgccuguaaucccagcacuuugagaug

SEQ ID NO: 179112 - RNA, 32 nt, Human
gcucacgccuguaaucccagcacuuugcgaua

SEQ ID NO: 179113 - RNA, 32 nt, Human
gcucacgccuguaaucccagcacuuugcgggg

SEQ ID NO: 179114 - RNA, 32 nt, Human
gcucacgccuguaaucccagcacuuuggaagg

SEQ ID NO: 179115 - RNA, 32 nt, Human
gcucacgccuguaaucccagcacuuuggaggc

SEQ ID NO: 179116 - RNA, 32 nt, Human
gcucacgccuguaaucccagcacuuuggcagg

SEQ ID NO: 179117 - RNA, 32 nt, Human
gcucacgccuguaaucccagcacuuugggaag

SEQ ID NO: 179118 - RNA, 32 nt, Human
gcucacgccuguaaucccagcacuuugggaca

SEQ ID NO: 179119 - RNA, 32 nt, Human
gcucacgccuguaaucccagcacuuugggaga

SEQ ID NO: 179120 - RNA, 32 nt, Human
gcucacgccuguaaucccagcacuuugggagc

SEQ ID NO: 179121 - RNA, 32 nt, Human
gcucacgccuguaaucccagcacuuugggagg

SEQ ID NO: 179122 - RNA, 32 nt, Human
gcucacgccuguaaucccagcacuuugggagu

SEQ ID NO: 179123 - RNA, 32 nt, Human
gcucacgccuguaaucccagcacuuuggggag

SEQ ID NO: 179124 - RNA, 32 nt, Human
gcucacgccuguaaucccagcacuuugguagg

SEQ ID NO: 179125 - RNA, 32 nt, Human
gcucacgccuguaaucccagcacuuugguugg

SEQ ID NO: 179126 - RNA, 32 nt, Human
gcucacgccuguaaucccagcacuuugugggg

SEQ ID NO: 179127 - RNA, 32 nt, Human
gcucacgccuguaaucccagcacuuuucagag

SEQ ID NO: 179128 - RNA, 32 nt, Human
gcucacgccuguaaucccagcacuuuuggagg

SEQ ID NO: 179129 - RNA, 32 nt, Human
gcucacgccuguaaucccagcacuuuugggag

SEQ ID NO: 179130 - RNA, 32 nt, Human
gcucacgccuguaaucccagcaguuugggaag

SEQ ID NO: 179131 - RNA, 32 nt, Human
gcucacgccuguaaucccagcaguuugggagg

SEQ ID NO: 179132 - RNA, 32 nt, Human
gcucacgccuguaaucccagcauuugggaggc

SEQ ID NO: 179133 - RNA, 32 nt, Human
gcucacgccuguaaucccagcauuuugggagc

SEQ ID NO: 179134 - RNA, 32 nt, Human
gcucacgccuguaaucccagcauuuugggagg

SEQ ID NO: 179135 - RNA, 32 nt, Human
gcucacgccuguaaucccagcccuuugggagg

SEQ ID NO: 179136 - RNA, 32 nt, Human
gcucacgccuguaaucccagcgcuuugggaga

SEQ ID NO: 179137 - RNA, 32 nt, Human
gcucacgccuguaaucccagcgcuuugggagg

SEQ ID NO: 179138 - RNA, 32 nt, Human
gcucacgccuguaaucccagcucuuugggagg

SEQ ID NO: 179139 - RNA, 32 nt, Human
gcucacgccuguaaucccagcucuuugugggg

SEQ ID NO: 179140 - RNA, 32 nt, Human
gcucacgccuguaaucccaggacuuuaggagg

SEQ ID NO: 179141 - RNA, 32 nt, Human
gcucacgccuguaaucccaggacuuugggagg

SEQ ID NO: 179142 - RNA, 32 nt, Human
gcucacgccuguaaucccaguacugugggagg

SEQ ID NO: 179143 - RNA, 32 nt, Human
gcucacgccuguaaucccaguacuugggaggc

SEQ ID NO: 179144 - RNA, 32 nt, Human
gcucacgccuguaaucccaguacuuugggagc

SEQ ID NO: 179145 - RNA, 32 nt, Human
gcucacgccuguaaucccaguacuuugggagg

SEQ ID NO: 179146 - RNA, 32 nt, Human
gcucacgccuguaaucccaguaguuugggagg

SEQ ID NO: 179147 - RNA, 32 nt, Human
gcucacgccuguaaucccaguauuuugggagu

SEQ ID NO: 179148 - RNA, 32 nt, Human
gcucacgccuguaaucccaucacuuugggagg

SEQ ID NO: 179149 - RNA, 32 nt, Human
gcucacgccuguaauccccgcacuuugggagg

SEQ ID NO: 179150 - RNA, 32 nt, Human
gcucacgccuguaaucccggcacugugggagg

SEQ ID NO: 179151 - RNA, 32 nt, Human
gcucacgccuguaaucccggcacuuugggagg

SEQ ID NO: 179152 - RNA, 32 nt, Human
gcucacgccuguaaucccggcaguuugggagg

SEQ ID NO: 179153 - RNA, 32 nt, Human
gcucacgccuguaaucccgguauuuugggagg

SEQ ID NO: 179154 - RNA, 32 nt, Human
gcucacgccuguaaucccuacacuuugggagg

SEQ ID NO: 179155 - RNA, 32 nt, Human
gcucacgccuguaauccuaacacuuugggagg

SEQ ID NO: 179156 - RNA, 32 nt, Human
gcucacgccuguaauccuagcaauuugggagg

SEQ ID NO: 179157 - RNA, 32 nt, Human
gcucacgccuguaauccuagcaccuugggagg

SEQ ID NO: 179158 - RNA, 32 nt, Human
gcucacgccuguaauccuagcaccuugggggu

SEQ ID NO: 179159 - RNA, 32 nt, Human
gcucacgccuguaauccuagcacuugggaggc

SEQ ID NO: 179160 - RNA, 32 nt, Human
gcucacgccuguaauccuagcacuuuggaagg

SEQ ID NO: 179161 - RNA, 32 nt, Human
gcucacgccuguaauccuagcacuuugggagg

SEQ ID NO: 179162 - RNA, 32 nt, Human
gcucacgccuguaauccuagcacuuuguaagg

SEQ ID NO: 179163 - RNA, 32 nt, Human
gcucacgccuguaauccuagcacuuuugggag

SEQ ID NO: 179164 - RNA, 32 nt, Human
gcucacgccuguaauccuagcaguuugggagg

SEQ ID NO: 179165 - RNA, 32 nt, Human
gcucacgccuguaauccuagcauuuugggagg

SEQ ID NO: 179166 - RNA, 32 nt, Human
gcucacgccuguaauccuagcauuuuggguga

SEQ ID NO: 179167 - RNA, 32 nt, Human
gcucacgccuguaauccuagcauuuuuggagg

SEQ ID NO: 179168 - RNA, 32 nt, Human
gcucacgccuguaauccuagcccuuuggaagg

SEQ ID NO: 179169 - RNA, 32 nt, Human
gcucacgccuguaauccugacacuuugggagg

SEQ ID NO: 179170 - RNA, 32 nt, Human
gcucacgccuguaauccuggcacuuugggagg

SEQ ID NO: 179171 - RNA, 32 nt, Human
gcucacgccuguaaucgcagcacuuugggagg

SEQ ID NO: 179172 - RNA, 32 nt, Human
gcucacgccuguaaucgcggcacuuugggagg

SEQ ID NO: 179173 - RNA, 32 nt, Human
gcucacgccuguaaucucaacacuuugggagg

SEQ ID NO: 179174 - RNA, 32 nt, Human
gcucacgccuguaaucucagcacauugggagg

SEQ ID NO: 179175 - RNA, 32 nt, Human
gcucacgccuguaaucucagcacuuuaagagg

SEQ ID NO: 179176 - RNA, 32 nt, Human
gcucacgccuguaaucucagcacuuugggagg

SEQ ID NO: 179177 - RNA, 32 nt, Human
gcucacgccuguaaucucagcacuuugggugg

SEQ ID NO: 179178 - RNA, 32 nt, Human
gcucacgccuguaaucucagcauuuugggagg

SEQ ID NO: 179179 - RNA, 32 nt, Human
gcucacgccuguaaucucggcacuuugggaga

SEQ ID NO: 179180 - RNA, 32 nt, Human
gcucacgccuguaaugccagcacucugggagg

SEQ ID NO: 179181 - RNA, 32 nt, Human
gcucacgccuguaaugccagcacuuugggagg

SEQ ID NO: 179182 - RNA, 19 nt, Human
gcucacgccuguaauucca

SEQ ID NO: 179183 - RNA, 20 nt, Human
gcucacgccuguaauuccag

SEQ ID NO: 179184 - RNA, 21 nt, Human
gcucacgccuguaauuccagc

SEQ ID NO: 179185 - RNA, 32 nt, Human
gcucacgccuguaauuccagcacuuugggaga

SEQ ID NO: 179186 - RNA, 32 nt, Human
gcucacgccuguaauuccagcacuuugggagg

SEQ ID NO: 179187 - RNA, 32 nt, Human
gcucacgccuguaauuccagcauguugggagg

SEQ ID NO: 179188 - RNA, 32 nt, Human
gcucacgccuguaauuccagugcuuugggagg

SEQ ID NO: 179189 - RNA, 32 nt, Human
gcucacgccuguaauuccaucauuuugggagg

SEQ ID NO: 179190 - RNA, 32 nt, Human
gcucacgccuguaauucuagcacuuugggaga

SEQ ID NO: 179191 - RNA, 32 nt, Human
gcucacgccuguaauucuagcacuuugggagg

SEQ ID NO: 179192 - RNA, 32 nt, Human
gcucacgccuguagucccagcacuuugagagg

SEQ ID NO: 179193 - RNA, 32 nt, Human
gcucacgccuguagucccagcacuuugggagg

SEQ ID NO: 179194 - RNA, 32 nt, Human
gcucacgccuguaguguccgcacuuugggagg

SEQ ID NO: 179195 - RNA, 32 nt, Human
gcucacgccugucaucccagcacuuugggagg

SEQ ID NO: 179196 - RNA, 32 nt, Human
gcucacgccugucaucucagcacuuugggagg

SEQ ID NO: 179197 - RNA, 32 nt, Human
gcucacgccugugauaccagcacuuuugggag

SEQ ID NO: 179198 - RNA, 32 nt, Human
gcucacgccugugaucccagcacuuugggagg

SEQ ID NO: 179199 - RNA, 32 nt, Human
gcucacgccugugauccuagcacuuugggagg

SEQ ID NO: 179200 - RNA, 32 nt, Human
gcucacgccugugaucucagcacuuugagggg

SEQ ID NO: 179201 - RNA, 32 nt, Human
gcucacgccugugauuccagcacuuugggagg

SEQ ID NO: 179202 - RNA, 32 nt, Human
gcucacgccuguggucccagcacuuuggcagg

SEQ ID NO: 179203 - RNA, 32 nt, Human
gcucacgccuguggucccagcacuuugggagg

SEQ ID NO: 179204 - RNA, 32 nt, Human
gcucacgccuguggucucagcacuuugggagg

SEQ ID NO: 179205 - RNA, 32 nt, Human
gcucacgccuguuaaguccagcacuuugggag

SEQ ID NO: 179206 - RNA, 32 nt, Human
gcucacgccuguuaucccagcacuuugggagg

SEQ ID NO: 179207 - RNA, 32 nt, Human
gcucacgccuuguaaucccagcacuuugggag

SEQ ID NO: 179208 - RNA, 32 nt, Human
gcucacgcuuauaaucccagcacuuugggagg

SEQ ID NO: 179209 - RNA, 32 nt, Human
gcucacgcuuguaaucccagcacuuugggaag

SEQ ID NO: 179210 - RNA, 32 nt, Human
gcucacgcuuguaaucccagcacuuugggagg

SEQ ID NO: 179211 - RNA, 32 nt, Human
gcucacgcuuguaaucgcagcacuuugggagg

SEQ ID NO: 179212 - RNA, 32 nt, Human
gcucacgcuuguaaucucagcacuuugggagg

SEQ ID NO: 179213 - RNA, 32 nt, Human
gcucacgcuuguaauuccagcacuuugggagg

SEQ ID NO: 179214 - RNA, 21 nt, Human
gcucacggagccucagccccg

SEQ ID NO: 179215 - RNA, 32 nt, Human
gcucacggcaaccuccaccucccggguucaag

SEQ ID NO: 179216 - RNA, 32 nt, Human
gcucacggcaacuucagccuucccagguucaa

SEQ ID NO: 179217 - RNA, 22 nt, Human
gcucacggcagccucaaccucc

SEQ ID NO: 179218 - RNA, 32 nt, Human
gcucacggcccgggcugggcugggcagggcaa

SEQ ID NO: 179219 - RNA, 32 nt, Human
gcucacggcuguaaucccagcacuuugggagg

SEQ ID NO: 179220 - RNA, 32 nt, Human
gcucacgggccuggggccauggcuuucuucuc

SEQ ID NO: 179221 - RNA, 32 nt, Human
gcucacguauguaaucccagcacuuugggaag

SEQ ID NO: 179222 - RNA, 32 nt, Human
gcucacgucgcgauccuggcuugaguggccca

SEQ ID NO: 179223 - RNA, 32 nt, Human
gcucacgucuguaaucccagcaauuugggagg

SEQ ID NO: 179224 - RNA, 32 nt, Human
gcucacgucuguaaucccagcaccuugggagg

SEQ ID NO: 179225 - RNA, 32 nt, Human
gcucacgucuguaaucccagcacuuuggaagg

SEQ ID NO: 179226 - RNA, 32 nt, Human
gcucacgucuguaaucccagcacuuugggagc

SEQ ID NO: 179227 - RNA, 32 nt, Human
gcucacgucuguaaucccagcacuuugggagg

SEQ ID NO: 179228 - RNA, 32 nt, Human
gcucacgucuguaaucccagcaguuugggagg

SEQ ID NO: 179229 - RNA, 32 nt, Human
gcucacgucuguaaucccagcgcuuugggagg

SEQ ID NO: 179230 - RNA, 32 nt, Human
gcucacgucuguaaucccaggacuuugggagg

SEQ ID NO: 179231 - RNA, 32 nt, Human
gcucacgucuguaaucucagcacuuagggagg

SEQ ID NO: 179232 - RNA, 32 nt, Human
gcucacgucuguaaucuuugggagcacuuugg

SEQ ID NO: 179233 - RNA, 32 nt, Human
gcucacgucuguaaugccagcacuucgggaga

SEQ ID NO: 179234 - RNA, 32 nt, Human
gcucacguuuguaaucccagcacuuugggagg

SEQ ID NO: 179235 - RNA, 32 nt, Human
gcucacguuuuuaaucccagcacuuugggagg

SEQ ID NO: 179236 - RNA, 32 nt, Human
gcucacuacaaccaccaccuccuggguccaaa

SEQ ID NO: 179237 - RNA, 32 nt, Human
gcucacuacaaccuccaccucccagguucaag

SEQ ID NO: 179238 - RNA, 32 nt, Human
gcucacuacaaccuccaccucccggguucagg

SEQ ID NO: 179239 - RNA, 23 nt, Human
gcucacuacaaccuccaccuccu

SEQ ID NO: 179240 - RNA, 32 nt, Human
gcucacuacaaccuccaccuccuggguuccag

SEQ ID NO: 179241 - RNA, 32 nt, Human
gcucacuacaaccuccgccuccuggguucaag

SEQ ID NO: 179242 - RNA, 32 nt, Human
gcucacuacaaccuccugcuccuggguucgag

SEQ ID NO: 179243 - RNA, 23 nt, Human
gcucacuacaaccucgaccuccu

SEQ ID NO: 179244 - RNA, 32 nt, Human
gcucacuacaaccucgaccuccuggguucaag

SEQ ID NO: 179245 - RNA, 32 nt, Human
gcucacuacagccucccaacucccaggcucaa

SEQ ID NO: 179246 - RNA, 32 nt, Human
gcucacuacagccuccgccuccuggguucaag

SEQ ID NO: 179247 - RNA, 32 nt, Human
gcucacuacagccuugaacuccugggcucaag

SEQ ID NO: 179248 - RNA, 20 nt, Human
gcucacuaccuccucaggga

SEQ ID NO: 179249 - RNA, 32 nt, Human
gcucacuacuguaauuccagcacuuugggagg

SEQ ID NO: 179250 - RNA, 32 nt, Human
gcucacuauaaccuccaccucccagguucaag

SEQ ID NO: 179251 - RNA, 32 nt, Human
gcucacuauaaccuugaacuccugggcucaag

SEQ ID NO: 179252 - RNA, 32 nt, Human
gcucacucaccucccuccucagcaccaugagc

SEQ ID NO: 179253 - RNA, 32 nt, Human
gcucugggagagagcgagagagaaauccgguu

SEQ ID NO: 179254 - RNA, 32 nt, Human
gcucugggagagaggagugucagacagcuguu

SEQ ID NO: 179255 - RNA, 32 nt, Human
gcucugggagcaccgcgggugggagcccuccc

SEQ ID NO: 179256 - RNA, 32 nt, Human
gcucugggagccucuggguuccugggcgcacc

SEQ ID NO: 179257 - RNA, 32 nt, Human
gcucugggaugcaggcaugcuucucaccgugc

SEQ ID NO: 179258 - RNA, 17 nt, Human
gcucugggccucagggg

SEQ ID NO: 179259 - RNA, 30 nt, Human
gcucugggccucuccaugcuguggcccugg

SEQ ID NO: 179260 - RNA, 22 nt, Human
gcucugggccugaugggacagg

SEQ ID NO: 179261 - RNA, 22 nt, Human
gcucugggccuucuuccugcca

SEQ ID NO: 179262 - RNA, 21 nt, Human
gcucugggcgcccguucccag

SEQ ID NO: 179263 - RNA, 21 nt, Human
gcucugggcugauucagaggu

SEQ ID NO: 179264 - RNA, 23 nt, Human
gcucugggcugcacccacaggua

SEQ ID NO: 179265 - RNA, 32 nt, Human
gcucugggcugcagcuuccagcacugaaucag

SEQ ID NO: 179266 - RNA, 20 nt, Human
gcucugggcugcuccaggga

SEQ ID NO: 179267 - RNA, 32 nt, Human
gcucugggcugggucuccgccuccaggguucu

SEQ ID NO: 179268 - RNA, 30 nt, Human
gcucugggcuuugauuccaucuccuugucu

SEQ ID NO: 179269 - RNA, 32 nt, Human
gcucuggggaaaaaggagaaagugagaggaga

SEQ ID NO: 179270 - RNA, 32 nt, Human
gcucuggggaugccagggcaggaggacgaggg

SEQ ID NO: 179271 - RNA, 32 nt, Human
gcucuggggccaggugccaccggccauugucc

SEQ ID NO: 179272 - RNA, 32 nt, Human
gcucuggggccugcugagccggcugcccuggg

SEQ ID NO: 179273 - RNA, 32 nt, Human
gcucuggggcuccaaggacucacaaagaggag

SEQ ID NO: 179274 - RNA, 18 nt, Human
gcucugggggacucaggc

SEQ ID NO: 179275 - RNA, 32 nt, Human
gcucugggggcagagguggcaggaauggugcu

SEQ ID NO: 179276 - RNA, 17 nt, Human
gcucugggggcaggggg

SEQ ID NO: 179277 - RNA, 32 nt, Human
gcucugggggcuguggcagggcaggggcggcu

SEQ ID NO: 179278 - RNA, 32 nt, Human
gcucuggguaugaccugccucuggcccugguc

SEQ ID NO: 179279 - RNA, 32 nt, Human
gcucuggguccugccccugccugauggccaag

SEQ ID NO: 179280 - RNA, 32 nt, Human
gcucuggguggcagaggguacaggguccugag

SEQ ID NO: 179281 - RNA, 32 nt, Human
gcucuggguuggaaacuagaagacuuaacugg

SEQ ID NO: 179282 - RNA, 32 nt, Human
gcucugguauugcucugccuuuauaaaagucu

SEQ ID NO: 179283 - RNA, 31 nt, Human
gcucuggucaccaaggaggcaaaggggagag

SEQ ID NO: 179284 - RNA, 32 nt, Human
gcucuggucagggcuggcaggcugggggcucu

SEQ ID NO: 179285 - RNA, 32 nt, Human
gcucuggucgcccgaccagccaugucucucgg

SEQ ID NO: 179286 - RNA, 32 nt, Human
gcucuggucuguucugaaacugugccaacuga

SEQ ID NO: 179287 - RNA, 32 nt, Human
gcucuggugaagcccucugagcccaggaggaa

SEQ ID NO: 179288 - RNA, 32 nt, Human
gcucuggugggaccacaggucaccugauacuu

SEQ ID NO: 179289 - RNA, 32 nt, Human
gcucugguggucuuggaugaggccccaugagc

SEQ ID NO: 179290 - RNA, 23 nt, Human
gcucugguucccgccugguccuc

SEQ ID NO: 179291 - RNA, 32 nt, Human
gcucugguugcccaggcugggguacaguggug

SEQ ID NO: 179292 - RNA, 32 nt, Human
gcucugguugcuggaucguguacaugaggacc

SEQ ID NO: 179293 - RNA, 32 nt, Human
gcucuguaacagaaccuuaccuccaggugcug

SEQ ID NO: 179294 - RNA, 32 nt, Human
gcucuguaaccugcacugugaccuacacuagu

SEQ ID NO: 179295 - RNA, 32 nt, Human
gcucuguaacucaggcuggagugcaguggcgc

SEQ ID NO: 179296 - RNA, 23 nt, Human
gcucuguaagaaagaaaagguca

SEQ ID NO: 179297 - RNA, 32 nt, Human
gcucuguacacaugauaugcaacaaagggcag

SEQ ID NO: 179298 - RNA, 32 nt, Human
gcucuguagaccagcagcaacuucuuaguauu

SEQ ID NO: 179299 - RNA, 32 nt, Human
gcucuguagaccaggcuggagcgcaguggcag

SEQ ID NO: 179300 - RNA, 32 nt, Human
gcucuguagcccaggccagagugcaguggcgc

SEQ ID NO: 179301 - RNA, 25 nt, Human
gcucuguagcccaggcuggagugca

SEQ ID NO: 179302 - RNA, 32 nt, Human
gcucuguagcccaggcuggagugcaguguggc

SEQ ID NO: 179303 - RNA, 32 nt, Human
gcucuguauugaagaacugagaucagugaaau

SEQ ID NO: 179304 - RNA, 32 nt, Human
gcucugucacacaggcuggagugcaguggugu

SEQ ID NO: 179305 - RNA, 32 nt, Human
gcucugucaccaaggcuggagugcagcggugu

SEQ ID NO: 179306 - RNA, 32 nt, Human
gcucugucaccaaggcuggagugcaggggcac

SEQ ID NO: 179307 - RNA, 32 nt, Human
gcucugucaccaggccggagugcagugguguc

SEQ ID NO: 179308 - RNA, 32 nt, Human
gcucugucaccaggcuggagggcaguggcgcc

SEQ ID NO: 179309 - RNA, 32 nt, Human
gcucugucaccaggcuggagggcaguggugcg

SEQ ID NO: 179310 - RNA, 32 nt, Human
gcucugucaccaggcuggaguacagugaugac

SEQ ID NO: 179311 - RNA, 32 nt, Human
gcucugucaccaggcuggagugcagcggcgca

SEQ ID NO: 179312 - RNA, 32 nt, Human
gcucugucaccaggcuggagugcagugacacg

SEQ ID NO: 179313 - RNA, 32 nt, Human
gcucugucaccaggcuggagugcaguggaggc

SEQ ID NO: 179314 - RNA, 32 nt, Human
gcucugucaccaggcuggagugcaguggcaug

SEQ ID NO: 179315 - RNA, 32 nt, Human
gcucugucaccaggcuggagugcaguggcgcg

SEQ ID NO: 179316 - RNA, 32 nt, Human
gcucugucaccaggcuggagugcaguggugca

SEQ ID NO: 179317 - RNA, 32 nt, Human
gcucugucaccaggcuggagugcaguggugug

SEQ ID NO: 179318 - RNA, 32 nt, Human
gcucugucaccaggcuggagugcgguggcaua

SEQ ID NO: 179319 - RNA, 32 nt, Human
gcucugucaccaggcuguacagugccguggcc

SEQ ID NO: 179320 - RNA, 32 nt, Human
gcucugucaccaggcuugagugcaguggugug

SEQ ID NO: 179321 - RNA, 32 nt, Human
gcucugucacccaaauuggagggcggugaugu

SEQ ID NO: 179322 - RNA, 32 nt, Human
gcucugucacccaagcaggauugcagugagcc

SEQ ID NO: 179323 - RNA, 32 nt, Human
gcucugucacccaagcuggaauacaguggcau

SEQ ID NO: 179324 - RNA, 32 nt, Human
gcucugucacccaagcuggagugcaguggcac

SEQ ID NO: 179325 - RNA, 32 nt, Human
gcucugucacccaagcuggagugcaguggugc

SEQ ID NO: 179326 - RNA, 32 nt, Human
gcucugucacccaagcuggugugcaguggugu

SEQ ID NO: 179327 - RNA, 32 nt, Human
gcucugucacccagacuagagugcaguggcac

SEQ ID NO: 179328 - RNA, 32 nt, Human
gcucugucacccagacuggaacacaguggcac

SEQ ID NO: 179329 - RNA, 32 nt, Human
gcucugucacccagacuggaguacaaugacac

SEQ ID NO: 179330 - RNA, 32 nt, Human
gcucugucacccagacuggagugcaauggcuu

SEQ ID NO: 179331 - RNA, 32 nt, Human
gcucugucacccagacuggagugcaguggcac

SEQ ID NO: 179332 - RNA, 32 nt, Human
gcucugucacccagacuggagugcaguggcau

SEQ ID NO: 179333 - RNA, 32 nt, Human
gcucugucacccagacuggagugcaguggugc

SEQ ID NO: 179334 - RNA, 32 nt, Human
gcucugucacccagacuggagugcaguggugu

SEQ ID NO: 179335 - RNA, 32 nt, Human
gcucugucacccagccuggaauguaguggcau

SEQ ID NO: 179336 - RNA, 32 nt, Human
gcucugucacccaggcaggagugcaguggcac

SEQ ID NO: 179337 - RNA, 32 nt, Human
gcucugucacccaggccggagugcaguggugc

SEQ ID NO: 179338 - RNA, 32 nt, Human
gcucugucacccaggcuagagugcaauggcac

SEQ ID NO: 179339 - RNA, 32 nt, Human
gcucugucacccaggcuagagugcaauggcau

SEQ ID NO: 179340 - RNA, 32 nt, Human
gcucugucacccaggcuagagugcaguagcac

SEQ ID NO: 179341 - RNA, 32 nt, Human
gcucugucacccaggcugaagugcaguggagc

SEQ ID NO: 179342 - RNA, 32 nt, Human
gcucugucacccaggcuggaaugcagugcagu

SEQ ID NO: 179343 - RNA, 32 nt, Human
gcucugucacccaggcuggaaugcaguggcac

SEQ ID NO: 179344 - RNA, 32 nt, Human
gcucugucacccaggcuggaaugcaguggcau

SEQ ID NO: 179345 - RNA, 32 nt, Human
gcucugucacccaggcuggagcacacuggugc

SEQ ID NO: 179346 - RNA, 32 nt, Human
gcucugucacccaggcuggagcguaauggcac

SEQ ID NO: 179347 - RNA, 32 nt, Human
gcucugucacccaggcuggaguacaauagcgu

SEQ ID NO: 179348 - RNA, 32 nt, Human
gcucugucacccaggcuggaguacacuggcac

SEQ ID NO: 179349 - RNA, 32 nt, Human
gcucugucacccaggcuggaguacaguggcau

SEQ ID NO: 179350 - RNA, 32 nt, Human
gcucugucacccaggcuggaguacaguggcgu

SEQ ID NO: 179351 - RNA, 32 nt, Human
gcucugucacccaggcuggaguaccgguggug

SEQ ID NO: 179352 - RNA, 32 nt, Human
gcucugucacccaggcuggaguauaguggugu

SEQ ID NO: 179353 - RNA, 32 nt, Human
gcucugucacccaggcuggagucuagugucgu

SEQ ID NO: 179354 - RNA, 32 nt, Human
gcucugucacccaggcuggagugaggugguac

SEQ ID NO: 179355 - RNA, 32 nt, Human
gcucugucacccaggcuggagugcaaugacgc

SEQ ID NO: 179356 - RNA, 32 nt, Human
gcucugucacccaggcuggagugcaauggcau

SEQ ID NO: 179357 - RNA, 32 nt, Human
gcucugucacccaggcuggagugcaauggcgu

SEQ ID NO: 179358 - RNA, 32 nt, Human
gcucugucacccaggcuggagugcaaugggca

SEQ ID NO: 179359 - RNA, 32 nt, Human
gcucugucacccaggcuggagugcaaugguga

SEQ ID NO: 179360 - RNA, 32 nt, Human
gcucugucacccaggcuggagugcaauggugc

SEQ ID NO: 179361 - RNA, 32 nt, Human
gcucugucacccaggcuggagugcacuggcuu

SEQ ID NO: 179362 - RNA, 32 nt, Human
gcucugucacccaggcuggagugcaguagcau

SEQ ID NO: 179363 - RNA, 28 nt, Human
gcucugucacccaggcuggagugcagug

SEQ ID NO: 179364 - RNA, 32 nt, Human
gcucugucacccaggcuggagugcagugacau

SEQ ID NO: 179365 - RNA, 32 nt, Human
gcucugucacccaggcuggagugcagugcugu

SEQ ID NO: 179366 - RNA, 32 nt, Human
gcucugucacccaggcuggagugcaguggagc

SEQ ID NO: 179367 - RNA, 32 nt, Human
gcucugucacccaggcuggagugcaguggcac

SEQ ID NO: 179368 - RNA, 32 nt, Human
gcucugucacccaggcuggagugcaguggcau

SEQ ID NO: 179369 - RNA, 32 nt, Human
gcucugucacccaggcuggagugcaguggccc

SEQ ID NO: 179370 - RNA, 32 nt, Human
gcucugucacccaggcuggagugcaguggcgc

SEQ ID NO: 179371 - RNA, 32 nt, Human
gcucugucacccaggcuggagugcaguggcgu

SEQ ID NO: 179372 - RNA, 32 nt, Human
gcucugucacccaggcuggagugcaguggcuu

SEQ ID NO: 179373 - RNA, 32 nt, Human
gcucugucacccaggcuggagugcagugguac

SEQ ID NO: 179374 - RNA, 32 nt, Human
gcucugucacccaggcuggagugcagugguau

SEQ ID NO: 179375 - RNA, 32 nt, Human
gcucugucacccaggcuggagugcaguggugc

SEQ ID NO: 179376 - RNA, 32 nt, Human
gcucugucacccaggcuggagugcaguggugu

SEQ ID NO: 179377 - RNA, 32 nt, Human
gcucugucacccaggcuggagugccauagugu

SEQ ID NO: 179378 - RNA, 32 nt, Human
gcucugucacccaggcuggagugccauggcau

SEQ ID NO: 179379 - RNA, 32 nt, Human
gcucugucacccaggcuggagugccguggcac

SEQ ID NO: 179380 - RNA, 32 nt, Human
gcucugucacccaggcuggagugcgauggcgc

SEQ ID NO: 179381 - RNA, 32 nt, Human
gcucugucacccaggcuggagugcgguggcgc

SEQ ID NO: 179382 - RNA, 32 nt, Human
gcucugucacccaggcuggagugcuauggcuc

SEQ ID NO: 179383 - RNA, 32 nt, Human
gcucugucacccaggcuggagugcuguggugc

SEQ ID NO: 179384 - RNA, 32 nt, Human
gcucugucacccaggcuggaguguaguggugc

SEQ ID NO: 179385 - RNA, 32 nt, Human
gcucugucacccaggcuggagugugcaguggc

SEQ ID NO: 179386 - RNA, 32 nt, Human
gcucugucacccaggcuggaguuauagugacg

SEQ ID NO: 179387 - RNA, 32 nt, Human
gcucugucacccaggcuggaguucaguggugc

SEQ ID NO: 179388 - RNA, 32 nt, Human
gcucugucacccaggcuggggcgcaauggcac

SEQ ID NO: 179389 - RNA, 32 nt, Human
gcucugucacccaggcuggggugcaguggcgc

SEQ ID NO: 179390 - RNA, 32 nt, Human
gcucugucacccaggcuguaguacaguggugc

SEQ ID NO: 179391 - RNA, 32 nt, Human
gcucugucacccaggcuguaguggaguggugu

SEQ ID NO: 179392 - RNA, 32 nt, Human
gcucugucacccaggcugucguaaguggcaau

SEQ ID NO: 179393 - RNA, 32 nt, Human
gcucugucacccaggcuugagugcaguggugc

SEQ ID NO: 179394 - RNA, 32 nt, Human
gcucugucacccagguggcuggaguacagugg

SEQ ID NO: 179395 - RNA, 32 nt, Human
gcucugucacccagguuggagcacaguggugc

SEQ ID NO: 179396 - RNA, 32 nt, Human
gcucugucacccagguuggagugcaguggugu

SEQ ID NO: 179397 - RNA, 32 nt, Human
gcucugucacccagguuggagugcauuggugu

SEQ ID NO: 179398 - RNA, 32 nt, Human
gcucugucacccagguuggagugccauggcau

SEQ ID NO: 179399 - RNA, 32 nt, Human
gcucugucacccagucuggagugcaguggcaa

SEQ ID NO: 179400 - RNA, 32 nt, Human
gcucugucacccagucuggagugcaguggugu

SEQ ID NO: 179401 - RNA, 32 nt, Human
gcucugucacccaguuuggagugcaguggugc

SEQ ID NO: 179402 - RNA, 32 nt, Human
gcucugucacccauccuggagugcaguagugu

SEQ ID NO: 179403 - RNA, 32 nt, Human
gcucugucacccaugcuugagugcaaccucug

SEQ ID NO: 179404 - RNA, 32 nt, Human
gcucugucacccgggcuggagugcaguggcgc

SEQ ID NO: 179405 - RNA, 32 nt, Human
gcucugucacccgggcuggagugcaguggugc

SEQ ID NO: 179406 - RNA, 32 nt, Human
gcucugucacccgggcuggagugcuguggcuu

SEQ ID NO: 179407 - RNA, 32 nt, Human
gcucugucacccgggcuggaguguaacguggc

SEQ ID NO: 179408 - RNA, 32 nt, Human
gcucugucaccgaggcuggagugcaguggcgc

SEQ ID NO: 179409 - RNA, 32 nt, Human
gcucugucaccuagacuggaauguguggcaua

SEQ ID NO: 179410 - RNA, 32 nt, Human
gcucugucaccuaggcuagagugcaguggugc

SEQ ID NO: 179411 - RNA, 32 nt, Human
gcucugucaccuaggcuagaguggaguggcau

SEQ ID NO: 179412 - RNA, 32 nt, Human
gcucugucaccuaggcugcagugcaguggcac

SEQ ID NO: 179413 - RNA, 32 nt, Human
gcucugucaccuaggcuggagugcaguggcau

SEQ ID NO: 179414 - RNA, 32 nt, Human
gcucugucaccuaggcuggagugcaguggcgc

SEQ ID NO: 179415 - RNA, 32 nt, Human
gcucugucaccuaggcuggagugcaguggggc

SEQ ID NO: 179416 - RNA, 32 nt, Human
gcucugucaccugagcucuagugcaguagugc

SEQ ID NO: 179417 - RNA, 32 nt, Human
gcucugucacgaggcuggagugcaguggcccc

SEQ ID NO: 179418 - RNA, 31 nt, Human
gcucugucacucaaugguugggaaauuugug

SEQ ID NO: 179419 - RNA, 32 nt, Human
gcucugucacucaggcugcagugcaguggcau

SEQ ID NO: 179420 - RNA, 32 nt, Human
gcucugucacucaggcuggaaugcaguggcgc

SEQ ID NO: 179421 - RNA, 32 nt, Human
gcucugucacucaggcuggaguacaguggcac

SEQ ID NO: 179422 - RNA, 32 nt, Human
gcucugucacucaggcuggagugcagugguau

SEQ ID NO: 179423 - RNA, 32 nt, Human
gcucugucacucaugcuggagugcaguggcgu

SEQ ID NO: 179424 - RNA, 32 nt, Human
gcucugucacugaggcuggagugcaguggcgc

SEQ ID NO: 179425 - RNA, 32 nt, Human
gcucugucacuuaggcuggagugcaguggcgu

SEQ ID NO: 179426 - RNA, 32 nt, Human
gcucugucacuuggguuggagugcaguugcag

SEQ ID NO: 179427 - RNA, 32 nt, Human
gcucugucacuuuaaaaagaccuguugaaauu

SEQ ID NO: 179428 - RNA, 32 nt, Human
gcucugucaucaggcuggagugcaguggcgca

SEQ ID NO: 179429 - RNA, 32 nt, Human
gcucugucaucaggcuggagugcaguggcuca

SEQ ID NO: 179430 - RNA, 32 nt, Human
gcucugucauccaaacuggagugcaguggcac

SEQ ID NO: 179431 - RNA, 32 nt, Human
gcucugucauccaggcuggaggguaguggcgu

SEQ ID NO: 179432 - RNA, 32 nt, Human
gcucugucauccaggcuggagugcagugaugc

SEQ ID NO: 179433 - RNA, 32 nt, Human
gcucugucauccaggcuggagugcaguggcau

SEQ ID NO: 179434 - RNA, 32 nt, Human
gcucugucauccaggcuggagugcaguggcgc

SEQ ID NO: 179435 - RNA, 32 nt, Human
gcucugucauccagguuggagugcaguggcau

SEQ ID NO: 179436 - RNA, 32 nt, Human
gcucugucaucuaggcuggagugcaguggugu

SEQ ID NO: 179437 - RNA, 32 nt, Human
gcucugucaugcaggcuggagugcgguggugc

SEQ ID NO: 179438 - RNA, 32 nt, Human
gcucugucauucaggcaagagugcaguagugu

SEQ ID NO: 179439 - RNA, 32 nt, Human
gcucugucauucaggcuggagugcaguggugc

SEQ ID NO: 179440 - RNA, 32 nt, Human
gcucugucccccaggcuggagugcaguggcau

SEQ ID NO: 179441 - RNA, 32 nt, Human
gcucugucccccaggcuggagugcaguggcuc

SEQ ID NO: 179442 - RNA, 32 nt, Human
gcucugucccccaggcuggcgugcaguagcau

SEQ ID NO: 179443 - RNA, 32 nt, Human
gcucugucccccaugcuggagugcaguggcau

SEQ ID NO: 179444 - RNA, 20 nt, Human
gcucuguccccucugcugcc

SEQ ID NO: 179445 - RNA, 32 nt, Human
gcucuguccccugggcuggagugcaauggugc

SEQ ID NO: 179446 - RNA, 32 nt, Human
gcucugucccucaggcuggagugcaguagcgu

SEQ ID NO: 179447 - RNA, 32 nt, Human
gcucugucccugcgggaagagcagggagagga

SEQ ID NO: 179448 - RNA, 32 nt, Human
gcucugucccuuuucagagccaaaggaaauaa

SEQ ID NO: 179449 - RNA, 32 nt, Human
gcucuguccgccaggcuggagugcaguggcgc

SEQ ID NO: 179450 - RNA, 32 nt, Human
gcucugucgaccaggcuggagugcaggggcac

SEQ ID NO: 179451 - RNA, 32 nt, Human
gcucugucgccaagccagagugcaguggugug

SEQ ID NO: 179452 - RNA, 32 nt, Human
gcucugucgccaaggcuggagggcaauggcau

SEQ ID NO: 179453 - RNA, 32 nt, Human
gcucugucgccaaggcuggagugcaguggugu

SEQ ID NO: 179454 - RNA, 32 nt, Human
gcucugucgccaaguuggagugcaauggugcg

SEQ ID NO: 179455 - RNA, 32 nt, Human
gcucugucgccagacuggagugcaguggcgca

SEQ ID NO: 179456 - RNA, 32 nt, Human
gcucugucgccaggacuggagugcagugacac

SEQ ID NO: 179457 - RNA, 32 nt, Human
gcucugucgccaggcuagagugcgguggcgcg

SEQ ID NO: 179458 - RNA, 32 nt, Human
gcucugucgccaggcugaagugcaguggcgca

SEQ ID NO: 179459 - RNA, 32 nt, Human
gcucugucgccaggcuggaguacaguggugug

SEQ ID NO: 179460 - RNA, 32 nt, Human
gcucugucgccaggcuggagugcaauggcgcg

SEQ ID NO: 179461 - RNA, 32 nt, Human
gcucugucgccaggcuggagugcaauggcgug

SEQ ID NO: 179462 - RNA, 32 nt, Human
gcucugucgccaggcuggagugcaguggcgca

SEQ ID NO: 179463 - RNA, 32 nt, Human
gcucugucgccaggcuggagugcaguggcgcg

SEQ ID NO: 179464 - RNA, 32 nt, Human
gcucugucgccaggcuggagugcaguggcgug

SEQ ID NO: 179465 - RNA, 32 nt, Human
gcucugucgccaggcuggagugcaguggugcg

SEQ ID NO: 179466 - RNA, 32 nt, Human
gcucugucgccagguuggagugcaguggcgug

SEQ ID NO: 179467 - RNA, 32 nt, Human
gcucugucgcccaagcugaagugcaguggugc

SEQ ID NO: 179468 - RNA, 32 nt, Human
gcucugucgcccaagcuggaguacaguggugc

SEQ ID NO: 179469 - RNA, 32 nt, Human
gcucugucgcccacccaggcuggaguacagug

SEQ ID NO: 179470 - RNA, 32 nt, Human
gcucugucgcccacguuggagugcagugaugu

SEQ ID NO: 179471 - RNA, 32 nt, Human
gcucugucgcccagacuagaaugcaguggugc

SEQ ID NO: 179472 - RNA, 32 nt, Human
gcucugucgcccagacuggagugcaauggugc

SEQ ID NO: 179473 - RNA, 32 nt, Human
gcucugucgcccagccuggagugcaguggcac

SEQ ID NO: 179474 - RNA, 32 nt, Human
gcucugucgcccaggauggagugcaguggcgc

SEQ ID NO: 179475 - RNA, 32 nt, Human
gcucugucgcccaggcgggaaugcaguggcgc

SEQ ID NO: 179476 - RNA, 32 nt, Human
gcucugucgcccaggcuagagugcagugguau

SEQ ID NO: 179477 - RNA, 32 nt, Human
gcucugucgcccaggcucgagugcaguggcau

SEQ ID NO: 179478 - RNA, 32 nt, Human
gcucugucgcccaggcugaaguguagagugca

SEQ ID NO: 179479 - RNA, 32 nt, Human
gcucugucgcccaggcugcagugcgguggugc

SEQ ID NO: 179480 - RNA, 32 nt, Human
gcucugucgcccaggcuggaaugcaguggcgc

SEQ ID NO: 179481 - RNA, 32 nt, Human
gcucugucgcccaggcuggaaugcaguggugc

SEQ ID NO: 179482 - RNA, 32 nt, Human
gcucugucgcccaggcuggaaugcaguuguga

SEQ ID NO: 179483 - RNA, 32 nt, Human
gcucugucgcccaggcuggaaugcuguagcaa

SEQ ID NO: 179484 - RNA, 32 nt, Human
gcucugucgcccaggcuggagcgcaauggcau

SEQ ID NO: 179485 - RNA, 32 nt, Human
gcucugucgcccaggcuggagggcaguggcac

SEQ ID NO: 179486 - RNA, 32 nt, Human
gcucugucgcccaggcuggaguacaguggugu

SEQ ID NO: 179487 - RNA, 32 nt, Human
gcucugucgcccaggcuggagugagugcagug

SEQ ID NO: 179488 - RNA, 32 nt, Human
gcucugucgcccaggcuggagugcaauggcac

SEQ ID NO: 179489 - RNA, 32 nt, Human
gcucugucgcccaggcuggagugcacuggcgc

SEQ ID NO: 179490 - RNA, 32 nt, Human
gcucugucgcccaggcuggagugcagaggugc

SEQ ID NO: 179491 - RNA, 32 nt, Human
gcucugucgcccaggcuggagugcaggggcgc

SEQ ID NO: 179492 - RNA, 32 nt, Human
gcucugucgcccaggcuggagugcagucgugc

SEQ ID NO: 179493 - RNA, 32 nt, Human
gcucugucgcccaggcuggagugcagugacau

SEQ ID NO: 179494 - RNA, 32 nt, Human
gcucugucgcccaggcuggagugcagugaugc

SEQ ID NO: 179495 - RNA, 32 nt, Human
gcucugucgcccaggcuggagugcagugccgc

SEQ ID NO: 179496 - RNA, 32 nt, Human
gcucugucgcccaggcuggagugcaguggagc

SEQ ID NO: 179497 - RNA, 32 nt, Human
gcucugucgcccaggcuggagugcaguggcac

SEQ ID NO: 179498 - RNA, 32 nt, Human
gcucugucgcccaggcuggagugcaguggcag

SEQ ID NO: 179499 - RNA, 32 nt, Human
gcucugucgcccaggcuggagugcaguggcau

SEQ ID NO: 179500 - RNA, 32 nt, Human
gcucugucgcccaggcuggagugcaguggccu

SEQ ID NO: 179501 - RNA, 32 nt, Human
gcucugucgcccaggcuggagugcaguggcgc

SEQ ID NO: 179502 - RNA, 32 nt, Human
gcucugucgcccaggcuggagugcaguggcgg

SEQ ID NO: 179503 - RNA, 32 nt, Human
gcucugucgcccaggcuggagugcaguggcgu

SEQ ID NO: 179504 - RNA, 32 nt, Human
gcucugucgcccaggcuggagugcagugguac

SEQ ID NO: 179505 - RNA, 32 nt, Human
gcucugucgcccaggcuggagugcagugguga

SEQ ID NO: 179506 - RNA, 32 nt, Human
gcucugucgcccaggcuggagugcaguggugc

SEQ ID NO: 179507 - RNA, 32 nt, Human
gcucugucgcccaggcuggagugcaguggugg

SEQ ID NO: 179508 - RNA, 32 nt, Human
gcucugucgcccaggcuggagugcaguggugu

SEQ ID NO: 179509 - RNA, 32 nt, Human
gcucugucgcccaggcuggagugcgguggcgc

SEQ ID NO: 179510 - RNA, 32 nt, Human
gcucugucgcccaggcuggaguucaguggcgc

SEQ ID NO: 179511 - RNA, 32 nt, Human
gcucugucgcccaggcuguagugcaauggcgc

SEQ ID NO: 179512 - RNA, 32 nt, Human
gcucugucgcccagggcuggagugcaguggcg

SEQ ID NO: 179513 - RNA, 32 nt, Human
gcucugucgcccaggguggagugcaguggcgu

SEQ ID NO: 179514 - RNA, 32 nt, Human
gcucugucgcccagguuggagugcaguggcac

SEQ ID NO: 179515 - RNA, 32 nt, Human
gcucugucgcccagguuggagugcaguggcgc

SEQ ID NO: 179516 - RNA, 32 nt, Human
gcucugucgcccagguuggagugcaguggcgu

SEQ ID NO: 179517 - RNA, 32 nt, Human
gcucugucgcccagguuggagugcaguggugc

SEQ ID NO: 179518 - RNA, 32 nt, Human
gcucugucgcccagguuguaaugcaguggcgc

SEQ ID NO: 179519 - RNA, 32 nt, Human
gcucugucgcccagguuugagugcaauggcac

SEQ ID NO: 179520 - RNA, 32 nt, Human
gcucugucgcccaugcuggagugcaguggcgc

SEQ ID NO: 179521 - RNA, 32 nt, Human
gcucugucgccgaggcugcagugcagcggugc

SEQ ID NO: 179522 - RNA, 32 nt, Human
gcucugucgccuaagcuggagugugguggcac

SEQ ID NO: 179523 - RNA, 32 nt, Human
gcucugucgccuaggcugcagugcaguggcgg

SEQ ID NO: 179524 - RNA, 32 nt, Human
gcucugucgccuggcuggagugcaguggugug

SEQ ID NO: 179525 - RNA, 32 nt, Human
gcucugucgcgcaggguggagugcgguggcac

SEQ ID NO: 179526 - RNA, 32 nt, Human
gcucugucgcucaggcuggagagcgguggugc

SEQ ID NO: 179527 - RNA, 32 nt, Human
gcucugucgcucaggcuggagugcaguggcgc

SEQ ID NO: 179528 - RNA, 32 nt, Human
gcucugucgcucaggcuggagugcaguggcgu

SEQ ID NO: 179529 - RNA, 32 nt, Human
gcucugucgcucgcgcuggagugcaguggcau

SEQ ID NO: 179530 - RNA, 32 nt, Human
gcucugucggccaggcuggagugcaguggcau

SEQ ID NO: 179531 - RNA, 32 nt, Human
gcucugucggccagguuggagugcaguggugc

SEQ ID NO: 179532 - RNA, 32 nt, Human
gcucugucguccaggcuggagugcagugacuc

SEQ ID NO: 179533 - RNA, 32 nt, Human
gcucugucguccaggcuggagugcagugcugc

SEQ ID NO: 179534 - RNA, 32 nt, Human
gcucugucguccaggcuggagugcaguggcgc

SEQ ID NO: 179535 - RNA, 32 nt, Human
gcucugucguccaggcuggagugccguggcgu

SEQ ID NO: 179536 - RNA, 32 nt, Human
gcucugucgucgaggcuggaguguaguggugc

SEQ ID NO: 179537 - RNA, 32 nt, Human
gcucugucuccaggcuggaguacaguggugcg

SEQ ID NO: 179538 - RNA, 32 nt, Human
gcucugucuccaggcuggagugcaguggcguc

SEQ ID NO: 179539 - RNA, 32 nt, Human
gcucugucucccaggccggagugcaguggcac

SEQ ID NO: 179540 - RNA, 32 nt, Human
gcucugucucccaggcuagaguaccguggcac

SEQ ID NO: 179541 - RNA, 32 nt, Human
gcucugucucccaggcuagagugcaauggcac

SEQ ID NO: 179542 - RNA, 32 nt, Human
gcucugucucccaggcugaagugcaguggcac

SEQ ID NO: 179543 - RNA, 32 nt, Human
gcucugucucccaggcuggagcguaguaaugc

SEQ ID NO: 179544 - RNA, 32 nt, Human
gcucugucucccaggcuggaggucaguggcac

SEQ ID NO: 179545 - RNA, 32 nt, Human
gcucugucucccaggcuggagugcaggcuugg

SEQ ID NO: 179546 - RNA, 32 nt, Human
gcucugucucccaggcuggagugcagugacac

SEQ ID NO: 179547 - RNA, 32 nt, Human
gcucugucucccaggcuggagugcaguggcac

SEQ ID NO: 179548 - RNA, 32 nt, Human
gcucugucucccaggcuggagugcaguggcau

SEQ ID NO: 179549 - RNA, 32 nt, Human
gcucugucucccaggcuggagugcaguggcgu

SEQ ID NO: 179550 - RNA, 32 nt, Human
gcucugucucccaggcuggagugcgguggcac

SEQ ID NO: 179551 - RNA, 32 nt, Human
gcucugucucccagguuggagugcaguggcac

SEQ ID NO: 179552 - RNA, 32 nt, Human
gcucugucucccgggcuggagugcaguggcgc

SEQ ID NO: 179553 - RNA, 32 nt, Human
gcucugucuccuaggcuggagcgcaguggugc

SEQ ID NO: 179554 - RNA, 32 nt, Human
gcucugucucucaggcuagagcagugugcgau

SEQ ID NO: 179555 - RNA, 22 nt, Human
gcucugucugccccggcccgug

SEQ ID NO: 179556 - RNA, 32 nt, Human
gcucugucuggggagcacccacaggcugccuu

SEQ ID NO: 179557 - RNA, 32 nt, Human
gcucugucuuccugccuucgucucgcuccauc

SEQ ID NO: 179558 - RNA, 18 nt, Human
gcucugucuuccugguca

SEQ ID NO: 179559 - RNA, 32 nt, Human
gcucugugauacaugacauucuuugggaauuu

SEQ ID NO: 179560 - RNA, 32 nt, Human
gcucugugauauguaagugaaaugcuagcugu

SEQ ID NO: 179561 - RNA, 32 nt, Human
gcucugugauuaccuaaucuggcuucccaauc

SEQ ID NO: 179562 - RNA, 32 nt, Human
gcucugugcaugccccagccuccugggccugc

SEQ ID NO: 179563 - RNA, 32 nt, Human
gcucugugcucacaccucggcugcaugcaccc

SEQ ID NO: 179564 - RNA, 32 nt, Human
gcucugugcucuucugugugcugcguuguggc

SEQ ID NO: 179565 - RNA, 32 nt, Human
gcucugugcugaaggguggaaggcuacccuga

SEQ ID NO: 179566 - RNA, 32 nt, Human
gcucuguggaaugagaaaaaugcgcucugcag

SEQ ID NO: 179567 - RNA, 32 nt, Human
gcucuguggaugagaggaaccaucgcaggaug

SEQ ID NO: 179568 - RNA, 32 nt, Human
gcucuguggccacccggcucccauggcgggag

SEQ ID NO: 179569 - RNA, 32 nt, Human
gcucuguggcccaggcugagagcagcagggua

SEQ ID NO: 179570 - RNA, 32 nt, Human
gcucuguggcccaggcuggagugcaguggcac

SEQ ID NO: 179571 - RNA, 32 nt, Human
gcucuguggcccaggcuggaguguaguggcgu

SEQ ID NO: 179572 - RNA, 32 nt, Human
gcucuguggcccaggcuggcgugcagugggcc

SEQ ID NO: 179573 - RNA, 32 nt, Human
gcucuguggcuaucugacaaccagucccagcc

SEQ ID NO: 179574 - RNA, 32 nt, Human
gcucugugggagggaggucggagccagcuguu

SEQ ID NO: 179575 - RNA, 32 nt, Human
gcucugugggaugagagcugggugcagacugu

SEQ ID NO: 179576 - RNA, 31 nt, Human
gcucugugggugggagugagacaaaacacag

SEQ ID NO: 179577 - RNA, 32 nt, Human
gcucugugugagccucuggggcucccucgcuc

SEQ ID NO: 179578 - RNA, 32 nt, Human
gcucuguguggguggucacgggagggugugag

SEQ ID NO: 179579 - RNA, 32 nt, Human
gcucuguguguguggguggucacaggagagug

SEQ ID NO: 179580 - RNA, 32 nt, Human
gcucuguguguguggguggucacaggagggug

SEQ ID NO: 179581 - RNA, 32 nt, Human
gcucuguuacccagacuggaguacagggaugc

SEQ ID NO: 179582 - RNA, 32 nt, Human
gcucuguuacccagauuggagugcaguggcgc

SEQ ID NO: 179583 - RNA, 32 nt, Human
gcucuguuacccaggcuggagugcagugggug

SEQ ID NO: 179584 - RNA, 32 nt, Human
gcucuguuacccaggcuggagugcaguggugu

SEQ ID NO: 179585 - RNA, 32 nt, Human
gcucuguuacccaggcuggaguguaguggugc

SEQ ID NO: 179586 - RNA, 32 nt, Human
gcucuguuacccaugcuggaguacgguggcga

SEQ ID NO: 179587 - RNA, 32 nt, Human
gcucuguuauccaggcuggugugcagugauac

SEQ ID NO: 179588 - RNA, 24 nt, Human
gcucuguucccacucagaaggcug

SEQ ID NO: 179589 - RNA, 20 nt, Human
gcucuguucccucccugcug

SEQ ID NO: 179590 - RNA, 20 nt, Human
gcucuguucuuccucagcca

SEQ ID NO: 179591 - RNA, 32 nt, Human
gcucuguugccaaggcuggagugcaguggaac

SEQ ID NO: 179592 - RNA, 32 nt, Human
gcucuguugccacugcacucuggccugggcaa

SEQ ID NO: 179593 - RNA, 32 nt, Human
gcucuguugccaggcuggagggcaguggcacg

SEQ ID NO: 179594 - RNA, 32 nt, Human
gcucuguugccaggcuggagugcacuggggcu

SEQ ID NO: 179595 - RNA, 32 nt, Human
gcucuguugccaggcuggagugcaguggugcg

SEQ ID NO: 179596 - RNA, 32 nt, Human
gcucuguugcccaagcuggagugaagugguac

SEQ ID NO: 179597 - RNA, 32 nt, Human
gcucuguugcccacauuggagugcaguggcac

SEQ ID NO: 179598 - RNA, 32 nt, Human
gcucuguugcccacgcaggagugcaguggcau

SEQ ID NO: 179599 - RNA, 32 nt, Human
gcucuguugcccagacuggagugcaguggcgu

SEQ ID NO: 179600 - RNA, 32 nt, Human
gcucuguugcccagacuggagugcaguggugu

SEQ ID NO: 179601 - RNA, 32 nt, Human
gcucuguugcccagccuggagugcaauggcac

SEQ ID NO: 179602 - RNA, 32 nt, Human
gcucuguugcccagcuggagugcaguggugug

SEQ ID NO: 179603 - RNA, 32 nt, Human
gcucuguugcccaggcaggaguacaguggcau

SEQ ID NO: 179604 - RNA, 32 nt, Human
gcucuguugcccaggcaguagugcaguggcgc

SEQ ID NO: 179605 - RNA, 32 nt, Human
gcucuguugcccaggcuagagugcaguggcau

SEQ ID NO: 179606 - RNA, 32 nt, Human
gcucuguugcccaggcuagagugcaguggugc

SEQ ID NO: 179607 - RNA, 32 nt, Human
gcucuguugcccaggcuccagugcaguggugu

SEQ ID NO: 179608 - RNA, 32 nt, Human
gcucuguugcccaggcugaagugcaguggggc

SEQ ID NO: 179609 - RNA, 32 nt, Human
gcucuguugcccaggcugaaguguaguggcac

SEQ ID NO: 179610 - RNA, 32 nt, Human
gcucuguugcccaggcuggaaugcaguggcac

SEQ ID NO: 179611 - RNA, 32 nt, Human
gcucuguugcccaggcuggaaugcaguggcgu

SEQ ID NO: 179612 - RNA, 32 nt, Human
gcucuguugcccaggcuggaguacagugguca

SEQ ID NO: 179613 - RNA, 32 nt, Human
gcucuguugcccaggcuggaguacauuggugu

SEQ ID NO: 179614 - RNA, 32 nt, Human
gcucuguugcccaggcuggaguacauuugccu

SEQ ID NO: 179615 - RNA, 32 nt, Human
gcucuguugcccaggcuggaguccaguggcau

SEQ ID NO: 179616 - RNA, 32 nt, Human
gcucuguugcccaggcuggagugcaaugacac

SEQ ID NO: 179617 - RNA, 32 nt, Human
gcucuguugcccaggcuggagugcaauggcac

SEQ ID NO: 179618 - RNA, 32 nt, Human
gcucuguugcccaggcuggagugcaauggcau

SEQ ID NO: 179619 - RNA, 32 nt, Human
gcucuguugcccaggcuggagugcacuggcuu

SEQ ID NO: 179620 - RNA, 32 nt, Human
gcucuguugcccaggcuggagugcagcggcau

SEQ ID NO: 179621 - RNA, 32 nt, Human
gcucuguugcccaggcuggagugcagggacac

SEQ ID NO: 179622 - RNA, 32 nt, Human
gcucuguugcccaggcuggagugcaguagcac

SEQ ID NO: 179623 - RNA, 32 nt, Human
gcucuguugcccaggcuggagugcagucgcac

SEQ ID NO: 179624 - RNA, 32 nt, Human
gcucuguugcccaggcuggagugcagugacgu

SEQ ID NO: 179625 - RNA, 32 nt, Human
gcucuguugcccaggcuggagugcaguggcac

SEQ ID NO: 179626 - RNA, 32 nt, Human
gcucuguugcccaggcuggagugcaguggcau

SEQ ID NO: 179627 - RNA, 32 nt, Human
gcucuguugcccaggcuggagugcaguggcga

SEQ ID NO: 179628 - RNA, 32 nt, Human
gcucuguugcccaggcuggagugcaguggcgc

SEQ ID NO: 179629 - RNA, 32 nt, Human
gcucuguugcccaggcuggagugcaguggcgu

SEQ ID NO: 179630 - RNA, 32 nt, Human
gcucuguugcccaggcuggagugcagugguau

SEQ ID NO: 179631 - RNA, 32 nt, Human
gcucuguugcccaggcuggagugcagugguga

SEQ ID NO: 179632 - RNA, 32 nt, Human
gcucuguugcccaggcuggagugcaguggugc

SEQ ID NO: 179633 - RNA, 32 nt, Human
gcucuguugcccaggcuggagugcaguggugu

SEQ ID NO: 179634 - RNA, 32 nt, Human
gcucuguugcccaggcuggagugcgguggacu

SEQ ID NO: 179635 - RNA, 32 nt, Human
gcucuguugcccaggcuggagugcgguggcau

SEQ ID NO: 179636 - RNA, 32 nt, Human
gcucuguugcccaggcuggagugcgguggugc

SEQ ID NO: 179637 - RNA, 32 nt, Human
gcucuguugcccaggcuggaguguaauggugc

SEQ ID NO: 179638 - RNA, 32 nt, Human
gcucuguugcccaggcuggaguguagagacac

SEQ ID NO: 179639 - RNA, 32 nt, Human
gcucuguugcccaggcuggaguguagugguau

SEQ ID NO: 179640 - RNA, 32 nt, Human
gcucuguugcccaggcuggaguguaguggugu

SEQ ID NO: 179641 - RNA, 32 nt, Human
gcucuguugcccaggcugggugcagcggugcg

SEQ ID NO: 179642 - RNA, 32 nt, Human
gcucuguugcccaggcugguguguagugaucu

SEQ ID NO: 179643 - RNA, 32 nt, Human
gcucuguugcccaggguggagugcagcggugc

SEQ ID NO: 179644 - RNA, 32 nt, Human
gcucuguugcccagguuagagugcaguggcuu

SEQ ID NO: 179645 - RNA, 32 nt, Human
gcucuguugcccagguuggagugcaguggcac

SEQ ID NO: 179646 - RNA, 32 nt, Human
gcucuguugcccaugcuggagugcauuggcac

SEQ ID NO: 179647 - RNA, 32 nt, Human
gcucuguugcccauucuggagugcaguggugu

SEQ ID NO: 179648 - RNA, 32 nt, Human
gcucuguugccccagcuugagugcaguggcgu

SEQ ID NO: 179649 - RNA, 32 nt, Human
gcucuguugccccaggcuggagugcaguggcg

SEQ ID NO: 179650 - RNA, 32 nt, Human
gcucuguugcccgggcuggaguacaauggcau

SEQ ID NO: 179651 - RNA, 32 nt, Human
gcucuguugcccgggcuggagugcaguggugu

SEQ ID NO: 179652 - RNA, 32 nt, Human
gcucuguugcccuggcuggaguacaguggcau

SEQ ID NO: 179653 - RNA, 32 nt, Human
gcucuguugcccuggcuggaguucagugacau

SEQ ID NO: 179654 - RNA, 32 nt, Human
gcucuguugccuaggcuagggugcaguggcac

SEQ ID NO: 179655 - RNA, 32 nt, Human
gcucuguugccuaggcuggaguacaguggccu

SEQ ID NO: 179656 - RNA, 32 nt, Human
gcucuguugccuaggcuggaguacaguggugc

SEQ ID NO: 179657 - RNA, 32 nt, Human
gcucuguugccuaggcuggagugcagugaggc

SEQ ID NO: 179658 - RNA, 32 nt, Human
gcucuguugccuaggcuggagugcaguggcgc

SEQ ID NO: 179659 - RNA, 32 nt, Human
gcucuguugccugggcuggagaacaguggcac

SEQ ID NO: 179660 - RNA, 32 nt, Human
gcucuguugccugggcuggagugcagugccac

SEQ ID NO: 179661 - RNA, 32 nt, Human
gcucuguugcucaggcuggauugcaguggcgu

SEQ ID NO: 179662 - RNA, 32 nt, Human
gcucuguugcucccccucucuagcucccucac

SEQ ID NO: 179663 - RNA, 32 nt, Human
gcucuguugcugaggcuggagugcagugaugu

SEQ ID NO: 179664 - RNA, 32 nt, Human
gcucuguugcugugccuagucuaguguccccc

SEQ ID NO: 179665 - RNA, 32 nt, Human
gcucuguuggccaggcuggaaugcaguggcac

SEQ ID NO: 179666 - RNA, 32 nt, Human
gcucuguuggccaggcuggagugcaguguucg

SEQ ID NO: 179667 - RNA, 32 nt, Human
gcucuguuguccaggcuagagugcaguggugu

SEQ ID NO: 179668 - RNA, 32 nt, Human
gcucuguuguccaggcuggagggcagugacau

SEQ ID NO: 179669 - RNA, 32 nt, Human
gcucuguuguccaggcuggagugcaauggcag

SEQ ID NO: 179670 - RNA, 32 nt, Human
gcucuguuguccaggcuggagugcaguggcac

SEQ ID NO: 179671 - RNA, 32 nt, Human
gcucuguuguguuuauucaccaauuuguacau

SEQ ID NO: 179672 - RNA, 32 nt, Human
gcucuguuguucugggauucaggcuggccggu

SEQ ID NO: 179673 - RNA, 32 nt, Human
gcucuguuucccaggcuggagugcaguggcgc

SEQ ID NO: 179674 - RNA, 32 nt, Human
gcucuguuucccagucucuccccgccucgccu

SEQ ID NO: 179675 - RNA, 32 nt, Human
gcucuguuucccccucuccccaaagccuucag

SEQ ID NO: 179676 - RNA, 17 nt, Human
gcucuguuucugacgca

SEQ ID NO: 179677 - RNA, 32 nt, Human
gcucuguuucugccuggucauccugagccccu

SEQ ID NO: 179678 - RNA, 17 nt, Human
gcucuguuugcuugaua

SEQ ID NO: 179679 - RNA, 32 nt, Human
gcucuguuuuaucagagauuauggagcaagaa

SEQ ID NO: 179680 - RNA, 32 nt, Human
gcucuuaaaugcugcauuauaacugagucuau

SEQ ID NO: 179681 - RNA, 32 nt, Human
gcucuuaacugcuaugcugcacugccucauuc

SEQ ID NO: 179682 - RNA, 32 nt, Human
gcucuuaacuuccuccccucugaauuuaguuu

SEQ ID NO: 179683 - RNA, 32 nt, Human
gcucuuaaguguugauuccauggaacugacgg

SEQ ID NO: 179684 - RNA, 21 nt, Human
gcucuuacagaaugccauaaa

SEQ ID NO: 179685 - RNA, 32 nt, Human
gcucuuacaggcccugcacagaguagcacuca

SEQ ID NO: 179686 - RNA, 32 nt, Human
gcucuuacccuugugaagcuuuuccuuuagcc

SEQ ID NO: 179687 - RNA, 32 nt, Human
gcucuuaccugucagugucucauugagugucg

SEQ ID NO: 179688 - RNA, 32 nt, Human
gcucuuacgcccaggcuggaaugaaguggcau

SEQ ID NO: 179689 - RNA, 32 nt, Human
gcucuuagccagaucauauguaauacuaaauu

SEQ ID NO: 179690 - RNA, 32 nt, Human
gcucuuagccagugacugcagagcagggauac

SEQ ID NO: 179691 - RNA, 32 nt, Human
gcucuuaguauucuuccuugaggcucacauca

SEQ ID NO: 179692 - RNA, 32 nt, Human
gcucuuaucuaugaagacaucuucccagagug

SEQ ID NO: 179693 - RNA, 32 nt, Human
gcucuuauugcccaggcuggagugcaauggca

SEQ ID NO: 179694 - RNA, 32 nt, Human
gcucuuauugcccaggcuggagugcagugacg

SEQ ID NO: 179695 - RNA, 32 nt, Human
gcucuuauugcccaggcuggagugcaguggca

SEQ ID NO: 179696 - RNA, 32 nt, Human
gcucuuauugcccaggcuggagugcaguggcg

SEQ ID NO: 179697 - RNA, 32 nt, Human
gcucuucacaccagauuucacuuuugauccuu

SEQ ID NO: 179698 - RNA, 32 nt, Human
gcucuucacaguccuggacuccugccaccagc

SEQ ID NO: 179699 - RNA, 32 nt, Human
gcucuucaccuuccucaccucacaucugaccc

SEQ ID NO: 179700 - RNA, 32 nt, Human
gcucuucacuguuccacggccucccagugccu

SEQ ID NO: 179701 - RNA, 32 nt, Human
gcucuucagaaagcaucugcaugugaacacca

SEQ ID NO: 179702 - RNA, 32 nt, Human
gcucuucagagccacagaccucaggguggagu

SEQ ID NO: 179703 - RNA, 24 nt, Human
gcucuucagccugcucuucggggu

SEQ ID NO: 179704 - RNA, 32 nt, Human
gcucuucaggaggcugagaaaagagaauuguu

SEQ ID NO: 179705 - RNA, 31 nt, Human
gcucuucauacuucuauuuugagguaacugu

SEQ ID NO: 179706 - RNA, 32 nt, Human
gcucuucaucuagacccaagccccaggucgug

SEQ ID NO: 179707 - RNA, 32 nt, Human
gcucuucauguugccaaagcaccaagacacac

SEQ ID NO: 179708 - RNA, 32 nt, Human
gcucuucauuauuuucagcuggaggacagagc

SEQ ID NO: 179709 - RNA, 22 nt, Human
gcucuuccacccaggagggccc

SEQ ID NO: 179710 - RNA, 32 nt, Human
gcucuuccaccuuguccacaaggcuuaucuag

SEQ ID NO: 179711 - RNA, 32 nt, Human
gcucuuccagaaguucaagcagcagaaggagc

SEQ ID NO: 179712 - RNA, 32 nt, Human
gcucuuccagccugaacccauggaguacuaac

SEQ ID NO: 179713 - RNA, 21 nt, Human
gcucuucccccuucccgaggu

SEQ ID NO: 179714 - RNA, 32 nt, Human
gcucuucccuccccucuccagcuacauacucu

SEQ ID NO: 179715 - RNA, 32 nt, Human
gcucuucccucccucacuuuuacuuucccuuc

SEQ ID NO: 179716 - RNA, 32 nt, Human
gcucuucccuccugggcccacaacagcgugua

SEQ ID NO: 179717 - RNA, 32 nt, Human
gcucuuccuaucccucuccuaacugccagccc

SEQ ID NO: 179718 - RNA, 32 nt, Human
gcucuuccucaccuuccugucuaguuugaauu

SEQ ID NO: 179719 - RNA, 32 nt, Human
gcucuuccuccaaggcuggagugcagugacgc

SEQ ID NO: 179720 - RNA, 32 nt, Human
gcucuuccuccccucacuaagaagacccaaac

SEQ ID NO: 179721 - RNA, 32 nt, Human
gcucuuccugaaaacuugucucucccucuccu

SEQ ID NO: 179722 - RNA, 32 nt, Human
gcucuuccugcacugcccucacccucagccgu

SEQ ID NO: 179723 - RNA, 32 nt, Human
gcucuuccugccccguucagcuucacucccac

SEQ ID NO: 179724 - RNA, 23 nt, Human
gcucuuccuggacacaccugccc

SEQ ID NO: 179725 - RNA, 32 nt, Human
gcucuuccuggaccaagggaggagccgcucau

SEQ ID NO: 179726 - RNA, 32 nt, Human
gcucuuccuggacuccugagcagaguugucga

SEQ ID NO: 179727 - RNA, 32 nt, Human
gcucuuccuucaccucuagucacuuucuauug

SEQ ID NO: 179728 - RNA, 32 nt, Human
gcucuucggcagcugcaccuucugccucaaca

SEQ ID NO: 179729 - RNA, 32 nt, Human
gcucuucggggcccggguggucuggaacaaug

SEQ ID NO: 179730 - RNA, 22 nt, Human
gcucuucguggcgcucucgggg

SEQ ID NO: 179731 - RNA, 32 nt, Human
gcucuucguguuucccaccugcccucggcacg

SEQ ID NO: 179732 - RNA, 32 nt, Human
gcucuucuaacacccauaucagugucuguuuc

SEQ ID NO: 179733 - RNA, 32 nt, Human
gcucuucucccgcaccuccauggaugcacugc

SEQ ID NO: 179734 - RNA, 32 nt, Human
gcucuucucggccaccugccauggcccggggg

SEQ ID NO: 179735 - RNA, 22 nt, Human
gcucuucucucccauccuacuc

SEQ ID NO: 179736 - RNA, 32 nt, Human
gcucuucucuccccuuugccucccucugcagg

SEQ ID NO: 179737 - RNA, 32 nt, Human
gcucuucucuccuucucucuucucuucuucuu

SEQ ID NO: 179738 - RNA, 32 nt, Human
gcucuucucucugguggcuccaccccaacccc

SEQ ID NO: 179739 - RNA, 32 nt, Human
gcucuucucugagaaaugaagccacaccacga

SEQ ID NO: 179740 - RNA, 32 nt, Human
gcucuucugccuggcauugcccacuucggccc

SEQ ID NO: 179741 - RNA, 32 nt, Human
gcucuucugucuguccugcuucuucaggugag

SEQ ID NO: 179742 - RNA, 32 nt, Human
gcucuucuucaaagcugaccuugcuuuagaaa

SEQ ID NO: 179743 - RNA, 32 nt, Human
gcucuucuucauuaugcucuucugccuggggc

SEQ ID NO: 179744 - RNA, 32 nt, Human
gcucuucuucauucucacccugaucccugggg

SEQ ID NO: 179745 - RNA, 32 nt, Human
gcucuucuucccaugcuggagugcaauggcgc

SEQ ID NO: 179746 - RNA, 32 nt, Human
gcucuucuuccccaccuucccucucucgucgc

SEQ ID NO: 179747 - RNA, 32 nt, Human
gcucuucuuccugcuuggcuuccaccuuuaac

SEQ ID NO: 179748 - RNA, 23 nt, Human
gcucuucuuccuucuuccugcca

SEQ ID NO: 179749 - RNA, 32 nt, Human
gcucuucuucuuuucuugaucuuccugucugg

SEQ ID NO: 179750 - RNA, 32 nt, Human
gcucuugaccuguccccucuggcugccucuga

SEQ ID NO: 179751 - RNA, 20 nt, Human
gcucuugagagugcaugcca

SEQ ID NO: 179752 - RNA, 32 nt, Human
gcucuugagauauuuaaaguuuuggcaguaaa

SEQ ID NO: 179753 - RNA, 32 nt, Human
gcucuugagauggguccuucagcuugcagugg

SEQ ID NO: 179754 - RNA, 32 nt, Human
gcucuugagcggaggagggacaugcucuccug

SEQ ID NO: 179755 - RNA, 32 nt, Human
gcucuugagcuggucuuuuaacauacugacga

SEQ ID NO: 179756 - RNA, 24 nt, Human
gcucuugaggaugucaccaauuaa

SEQ ID NO: 179757 - RNA, 32 nt, Human
gcucuugaggccagcugcagagcuuguggagg

SEQ ID NO: 179758 - RNA, 32 nt, Human
gcucuugagguuggggagaagcauuaggauua

SEQ ID NO: 179759 - RNA, 19 nt, Human
gcucuugaugaaauuugag

SEQ ID NO: 179760 - RNA, 21 nt, Human
gcucuugauguuccugauaca

SEQ ID NO: 179761 - RNA, 32 nt, Human
gcucuugauuccuugugucuccagucaugaca

SEQ ID NO: 179762 - RNA, 32 nt, Human
gcucuugcagacagaaaaauucgcugcaagua

SEQ ID NO: 179763 - RNA, 32 nt, Human
gcucuugcccugccgccgccucccgggucuca

SEQ ID NO: 179764 - RNA, 32 nt, Human
gcucuugccguccaggcuggagugcaauggcg

SEQ ID NO: 179765 - RNA, 32 nt, Human
gcucuugccucccaggggcuuuuccaagccca

SEQ ID NO: 179766 - RNA, 32 nt, Human
gcucuugccucgacccuuccuccuccuuugcc

SEQ ID NO: 179767 - RNA, 18 nt, Human
gcucuugccugcccuccu

SEQ ID NO: 179768 - RNA, 32 nt, Human
gcucuugccuguaaucccagcacuuugauagg

SEQ ID NO: 179769 - RNA, 32 nt, Human
gcucuugccuguaaucccagcacuuugggagg

SEQ ID NO: 179770 - RNA, 32 nt, Human
gcucuugccuguaaucccagcacuuuggggag

SEQ ID NO: 179771 - RNA, 32 nt, Human
gcucuugccuguaaucccagcauucugggagg

SEQ ID NO: 179772 - RNA, 32 nt, Human
gcucuugccuguaaucuuagcacuuugggagg

SEQ ID NO: 179773 - RNA, 32 nt, Human
gcucuugccuguaauuccagcuacuugggagg

SEQ ID NO: 179774 - RNA, 32 nt, Human
gcucuugccuguagucccggcacuuugggagg

SEQ ID NO: 179775 - RNA, 32 nt, Human
gcucuugcugucugcccugccucacccugccc

SEQ ID NO: 179776 - RNA, 32 nt, Human
gcucuuggaaccugggaggcagcaucuggggg

SEQ ID NO: 179777 - RNA, 32 nt, Human
gcucuuggagaaagcgugagcagggggccacc

SEQ ID NO: 179778 - RNA, 32 nt, Human
gcucuuggcaggcagacuuuccaggaagaggc

SEQ ID NO: 179779 - RNA, 32 nt, Human
gcucuuggccgggaggaggcugugcugcacca

SEQ ID NO: 179780 - RNA, 31 nt, Human
gcucuuggcguucucccuccaggggacacag

SEQ ID NO: 179781 - RNA, 32 nt, Human
gcucuuggcuaagaccaggaggcugcaagucu

SEQ ID NO: 179782 - RNA, 32 nt, Human
gcucuuggcuucagccagcccccagccagagu

SEQ ID NO: 179783 - RNA, 32 nt, Human
gcucuugggcaaacguccuuccucacggggcg

SEQ ID NO: 179784 - RNA, 32 nt, Human
gcucuugggcaacuacagcagagaagccuccc

SEQ ID NO: 179785 - RNA, 32 nt, Human
gcucuugggcccuggcauccugggugaccggu

SEQ ID NO: 179786 - RNA, 22 nt, Human
gcucuuggggccaaccccagga

SEQ ID NO: 179787 - RNA, 21 nt, Human
gcucuuggguggcgaagccag

SEQ ID NO: 179788 - RNA, 32 nt, Human
gcucuuggucaaagcacuguugcuauaagcua

SEQ ID NO: 179789 - RNA, 32 nt, Human
gcucuuggugcccaggcuagagugcaauggcg

SEQ ID NO: 179790 - RNA, 32 nt, Human
gcucuuguagcccaggcuggagugcaauggca

SEQ ID NO: 179791 - RNA, 32 nt, Human
gcucuuguagcccaggcugggaugcaauggca

SEQ ID NO: 179792 - RNA, 32 nt, Human
gcucuugucaacuggcugcaaaauacacuagu

SEQ ID NO: 179793 - RNA, 32 nt, Human
gcucuugucacccacgcuggagugcaauggug

SEQ ID NO: 179794 - RNA, 32 nt, Human
gcucuugucacccaggcaggagugcaguggcg

SEQ ID NO: 179795 - RNA, 32 nt, Human
gcucuugucacccaggcuggaguacaaugaug

SEQ ID NO: 179796 - RNA, 32 nt, Human
gcucuugucacccaggcuggagugcaauggcg

SEQ ID NO: 179797 - RNA, 32 nt, Human
gcucuugucacccaggcuggagugcaguggca

SEQ ID NO: 179798 - RNA, 32 nt, Human
gcucuugucacccaggcuggagugcaguggcg

SEQ ID NO: 179799 - RNA, 32 nt, Human
gcucuugucacccaggcuggagugcaguggug

SEQ ID NO: 179800 - RNA, 32 nt, Human
gcucuugucaccccagcuggagugcaguagca

SEQ ID NO: 179801 - RNA, 32 nt, Human
gcucuugucacguuccuuccuuccucacucuc

SEQ ID NO: 179802 - RNA, 32 nt, Human
gcucuugucauccuggcuggagugugauggug

SEQ ID NO: 179803 - RNA, 32 nt, Human
gcucuugucccccagacuggagugcaauggca

SEQ ID NO: 179804 - RNA, 32 nt, Human
gcucuugucgcccaggcuggagugcaacggua

SEQ ID NO: 179805 - RNA, 32 nt, Human
gcucuugucgcccaggcuggagugcaauggcg

SEQ ID NO: 179806 - RNA, 32 nt, Human
gcucuugucgcccaggcuggagugcaguggca

SEQ ID NO: 179807 - RNA, 32 nt, Human
gcucuugucgcccaggcuggagugcaguggcg

SEQ ID NO: 179808 - RNA, 32 nt, Human
gcucuugucgcccaggcuguagugcaguggua

SEQ ID NO: 179809 - RNA, 32 nt, Human
gcucuugucgcucagccuggagugcagugagc

SEQ ID NO: 179810 - RNA, 32 nt, Human
gcucuugucucccaggcuggagugcagugaca

SEQ ID NO: 179811 - RNA, 32 nt, Human
gcucuugucucccaguuccugguagggucugc

SEQ ID NO: 179812 - RNA, 32 nt, Human
gcucuugucuccccggcuggagugcaguggca

SEQ ID NO: 179813 - RNA, 32 nt, Human
gcucuugucuguaaucccagcgcucugggagg

SEQ ID NO: 179814 - RNA, 32 nt, Human
gcucuugugauuuuucucaggcuguuuuguca

SEQ ID NO: 179815 - RNA, 32 nt, Human
gcucuugugguuuuauguucuugaccuuucaa

SEQ ID NO: 179816 - RNA, 32 nt, Human
gcucuuguuacccaggcaggagugcaguggcg

SEQ ID NO: 179817 - RNA, 32 nt, Human
gcucuuguuacccaggcuggagugcaguggcg

SEQ ID NO: 179818 - RNA, 32 nt, Human
gcucuuguuccccaggcuggagugcaauggca

SEQ ID NO: 179819 - RNA, 20 nt, Human
gcucuuguucuccagaaacu

SEQ ID NO: 179820 - RNA, 32 nt, Human
gcucuuguugaugaggcuggagugcaguggcg

SEQ ID NO: 179821 - RNA, 32 nt, Human
gcucuuguugcccaagcuggagugcaauggca

SEQ ID NO: 179822 - RNA, 32 nt, Human
gcucuuguugcccaagcuggagugcaguggcg

SEQ ID NO: 179823 - RNA, 32 nt, Human
gcucuuguugcccagacuggagugcaauggca

SEQ ID NO: 179824 - RNA, 32 nt, Human
gcucuuguugcccagccuggagugcaauagcg

SEQ ID NO: 179825 - RNA, 32 nt, Human
gcucuuguugcccaggcggaguacaauggugg

SEQ ID NO: 179826 - RNA, 32 nt, Human
gcucuuguugcccaggcuagagugcaauggca

SEQ ID NO: 179827 - RNA, 32 nt, Human
gcucuuguugcccaggcuagagugcaauggcg

SEQ ID NO: 179828 - RNA, 32 nt, Human
gcucuuguugcccaggcuagcaugcaauggug

SEQ ID NO: 179829 - RNA, 32 nt, Human
gcucuuguugcccaggcuggagggcaauggug

SEQ ID NO: 179830 - RNA, 32 nt, Human
gcucuuguugcccaggcuggaguacaauggcg

SEQ ID NO: 179831 - RNA, 32 nt, Human
gcucuuguugcccaggcuggaguacaauggug

SEQ ID NO: 179832 - RNA, 32 nt, Human
gcucuuguugcccaggcuggaguacaguggua

SEQ ID NO: 179833 - RNA, 32 nt, Human
gcucuuguugcccaggcuggagugcaacggca

SEQ ID NO: 179834 - RNA, 32 nt, Human
gcucuuguugcccaggcuggagugcaauagcg

SEQ ID NO: 179835 - RNA, 32 nt, Human
gcucuuguugcccaggcuggagugcaaugaca

SEQ ID NO: 179836 - RNA, 32 nt, Human
gcucuuguugcccaggcuggagugcaauggag

SEQ ID NO: 179837 - RNA, 32 nt, Human
gcucuuguugcccaggcuggagugcaauggca

SEQ ID NO: 179838 - RNA, 32 nt, Human
gcucuuguugcccaggcuggagugcaauggcg

SEQ ID NO: 179839 - RNA, 32 nt, Human
gcucuuguugcccaggcuggagugcaauggua

SEQ ID NO: 179840 - RNA, 32 nt, Human
gcucuuguugcccaggcuggagugcaauggug

SEQ ID NO: 179841 - RNA, 32 nt, Human
gcucuuguugcccaggcuggagugcagugaca

SEQ ID NO: 179842 - RNA, 32 nt, Human
gcucuuguugcccaggcuggagugcaguggug

SEQ ID NO: 179843 - RNA, 32 nt, Human
gcucuuguugcccaggcuggagugugaugggc

SEQ ID NO: 179844 - RNA, 32 nt, Human
gcucuuguugcccaggcugggagggcaauggc

SEQ ID NO: 179845 - RNA, 32 nt, Human
gcucuuguugcccaggcuggugugcaauggcg

SEQ ID NO: 179846 - RNA, 32 nt, Human
gcucuuguugcccaggcuugagugcagugaug

SEQ ID NO: 179847 - RNA, 32 nt, Human
gcucuuguugcccgggcuggagugcaauggug

SEQ ID NO: 179848 - RNA, 32 nt, Human
gcucuuguugccuaggcuggagugcaguggcg

SEQ ID NO: 179849 - RNA, 32 nt, Human
gcucuuguugcugaggcuggagugcaguggca

SEQ ID NO: 179850 - RNA, 32 nt, Human
gcucuuguuguccaggcuagagugcaauggca

SEQ ID NO: 179851 - RNA, 32 nt, Human
gcucuuguuguccaggcuggagugcaauggca

SEQ ID NO: 179852 - RNA, 32 nt, Human
gcucuuguuguccaggcuggagugcaauggcg

SEQ ID NO: 179853 - RNA, 32 nt, Human
gcucuuguuguccaggcuggagugcaguggcg

SEQ ID NO: 179854 - RNA, 32 nt, Human
gcucuuguuucccaggcuggagugcaaugggu

SEQ ID NO: 179855 - RNA, 32 nt, Human
gcucuuuagcuggugaagugggagccacagcu

SEQ ID NO: 179856 - RNA, 32 nt, Human
gcucuuucacccaggccggacugcagcggcgc

SEQ ID NO: 179857 - RNA, 32 nt, Human
gcucuuucacccaggcuggagugcaguggcac

SEQ ID NO: 179858 - RNA, 32 nt, Human
gcucuuucauuucuuucugcccuucuccuuug

SEQ ID NO: 179859 - RNA, 32 nt, Human
gcucuuuccuaccugugugagucagagcccuc

SEQ ID NO: 179860 - RNA, 32 nt, Human
gcucuuuccuuuggcagcguguuuccuuuucc

SEQ ID NO: 179861 - RNA, 32 nt, Human
gcucuuucgccaaggcuggagugcaguggcac

SEQ ID NO: 179862 - RNA, 32 nt, Human
gcucuuucgcccaggauggagugcaguggugc

SEQ ID NO: 179863 - RNA, 32 nt, Human
gcucuuucgcccaggccggacugcaguggcag

SEQ ID NO: 179864 - RNA, 32 nt, Human
gcucuuucgcccaggccggacugcaguggcgc

SEQ ID NO: 179865 - RNA, 32 nt, Human
gcucuuucgcccaggcuggagugcaauggugu

SEQ ID NO: 179866 - RNA, 32 nt, Human
gcucuuucgcccaggcuggagugcaguggcgc

SEQ ID NO: 179867 - RNA, 32 nt, Human
gcucuuucgcccaggcuggcgugcaguggcac

SEQ ID NO: 179868 - RNA, 24 nt, Human
gcucuuucgcccaggcuggucuca

SEQ ID NO: 179869 - RNA, 23 nt, Human
gcucuuucuccauugccuggaga

SEQ ID NO: 179870 - RNA, 32 nt, Human
gcucuuucuccucacuguauccagguucccuc

SEQ ID NO: 179871 - RNA, 24 nt, Human
gcucuuucucuggcccugcaguca

SEQ ID NO: 179872 - RNA, 32 nt, Human
gcucuuucugccucugggcucauguaucugcg

SEQ ID NO: 179873 - RNA, 32 nt, Human
gcucuuucugcugccaccugcugggucucuug

SEQ ID NO: 179874 - RNA, 32 nt, Human
gcucuuucuggcucugccucuccuuugcuuuc

SEQ ID NO: 179875 - RNA, 32 nt, Human
gcucuuucugugcccugggagcugagaugcac

SEQ ID NO: 179876 - RNA, 32 nt, Human
gcucuuugagcaggacgugagcgcagagcaga

SEQ ID NO: 179877 - RNA, 32 nt, Human
gcucuuugcaaccucugccuccugggcucaag

SEQ ID NO: 179878 - RNA, 32 nt, Human
gcucuuugcccagcuccuggggugggaguggu

SEQ ID NO: 179879 - RNA, 32 nt, Human
gcucuuugcucauucuagggccaguggaggaa

SEQ ID NO: 179880 - RNA, 32 nt, Human
gcucuuuggagcuagaguuuugggagaacagu

SEQ ID NO: 179881 - RNA, 32 nt, Human
gcucuuugggaggcugaagugggugaaucacu

SEQ ID NO: 179882 - RNA, 32 nt, Human
gcucuuugguaaaaaugccugcuuuccaauac

SEQ ID NO: 179883 - RNA, 32 nt, Human
gcucuuuguauuuccuccccuuggugguguga

SEQ ID NO: 179884 - RNA, 32 nt, Human
gcucuuugucauuccaccuccucuggucaggc

SEQ ID NO: 179885 - RNA, 23 nt, Human
gcucuuuguuuaggccuaaucuu

SEQ ID NO: 179886 - RNA, 21 nt, Human
gcucuuuguuuuggggugcag

SEQ ID NO: 179887 - RNA, 32 nt, Human
gcucuuuuagagcccagaaauggcagucaccu

SEQ ID NO: 179888 - RNA, 32 nt, Human
gcucuuuuccuugaugcaguuucccagugugg

SEQ ID NO: 179889 - RNA, 23 nt, Human
gcucuuuugagaauucauaauuu

SEQ ID NO: 179890 - RNA, 22 nt, Human
gcucuuuugagaggaggccuaa

SEQ ID NO: 179891 - RNA, 32 nt, Human
gcucuuuugcccagacuggagugaaguagcau

SEQ ID NO: 179892 - RNA, 32 nt, Human
gcucuuuugcccaggcuggauggagugcagug

SEQ ID NO: 179893 - RNA, 32 nt, Human
gcucuuuuugcacaggcugagugcaaugccgu

SEQ ID NO: 179894 - RNA, 32 nt, Human
gcucuuuuugcccaggccggagugcaauggca

SEQ ID NO: 179895 - RNA, 32 nt, Human
gcugaaaaacacagcacgagaccuucgugaag

SEQ ID NO: 179896 - RNA, 32 nt, Human
gcugaaaaccuuugaaccucacgguguccuga

SEQ ID NO: 179897 - RNA, 32 nt, Human
gcugaaaagcuuugccuucgagaggccagaag

SEQ ID NO: 179898 - RNA, 32 nt, Human
gcugaaaauccuuuugccagcuaauugugaga

SEQ ID NO: 179899 - RNA, 32 nt, Human
gcugaaaaugcacugcauucauuuuucuaaag

SEQ ID NO: 179900 - RNA, 32 nt, Human
gcugaaaauguuacacaggaagacauaccaug

SEQ ID NO: 179901 - RNA, 32 nt, Human
gcugaaacaaauucggggcuaugaaguguuuu

SEQ ID NO: 179902 - RNA, 32 nt, Human
gcugaaacacacaagagaagagguugugucuc

SEQ ID NO: 179903 - RNA, 32 nt, Human
gcugaaacagcagcaucaccaucagcagcaac

SEQ ID NO: 179904 - RNA, 23 nt, Human
gcugaaacaggagaauugcuuga

SEQ ID NO: 179905 - RNA, 32 nt, Human
gcugaaacaucuucccuccucaaccuggaaaa

SEQ ID NO: 179906 - RNA, 32 nt, Human
gcugaaacccacccacccgcugugcugaccau

SEQ ID NO: 179907 - RNA, 32 nt, Human
gcugaaacccgggagucagaggcugcagagag

SEQ ID NO: 179908 - RNA, 25 nt, Human
gcugaaaccgugaggcccggaccac

SEQ ID NO: 179909 - RNA, 16 nt, Human
gcugaaaccuaaggca

SEQ ID NO: 179910 - RNA, 32 nt, Human
gcugaaacgcaucucacugucauucuauuguu

SEQ ID NO: 179911 - RNA, 20 nt, Human
gcugaaacuagguccuuucc

SEQ ID NO: 179912 - RNA, 32 nt, Human
gcugaaacugcuuccuagaacugugaagagag

SEQ ID NO: 179913 - RNA, 21 nt, Human
gcugaaagagggaccagggua

SEQ ID NO: 179914 - RNA, 32 nt, Human
gcugaaagagugagagaagauggaagggaagg

SEQ ID NO: 179915 - RNA, 32 nt, Human
gcugaaagcugaaauuugaggcgcccaggccc

SEQ ID NO: 179916 - RNA, 32 nt, Human
gcugaaagugccugucaguaaaccuuaugacc

SEQ ID NO: 179917 - RNA, 21 nt, Human
gcugaaaucauacagcuguga

SEQ ID NO: 179918 - RNA, 21 nt, Human
gcugaaaucaucaucuuucca

SEQ ID NO: 179919 - RNA, 32 nt, Human
gcugaaauguuauggcaucuuggauuugcuuu

SEQ ID NO: 179920 - RNA, 32 nt, Human
gcugaaauuaugucaguggugaaaugucacuc

SEQ ID NO: 179921 - RNA, 25 nt, Human
gcugaaauuggaaauaaaucuggaa

SEQ ID NO: 179922 - RNA, 32 nt, Human
gcugaacaacugagcucaugucaugggcaugu

SEQ ID NO: 179923 - RNA, 32 nt, Human
gcugaacacaccccaggcucuucugaccggca

SEQ ID NO: 179924 - RNA, 32 nt, Human
gcugaacacaccccaggcucuucugacuggca

SEQ ID NO: 179925 - RNA, 20 nt, Human
gcugaacagaggugggcccc

SEQ ID NO: 179926 - RNA, 32 nt, Human
gcugaacagcuuuucuucccugaucucucgga

SEQ ID NO: 179927 - RNA, 22 nt, Human
gcugaacaggagaaucgcuuga

SEQ ID NO: 179928 - RNA, 32 nt, Human
gcugaacagucaccccuccucuccuuggcaaa

SEQ ID NO: 179929 - RNA, 32 nt, Human
gcugaacagugaccuccaccaccuuggggugg

SEQ ID NO: 179930 - RNA, 19 nt, Human
gcugaacauuucuauuauc

SEQ ID NO: 179931 - RNA, 32 nt, Human
gcugaacauuugcuucaggaugccauuaagaa

SEQ ID NO: 179932 - RNA, 32 nt, Human
gcugaaccaccugagcaccauccugacgaggc

SEQ ID NO: 179933 - RNA, 23 nt, Human
gcugaaccaggagaauugcuuga

SEQ ID NO: 179934 - RNA, 19 nt, Human
gcugaacccaggcucaggu

SEQ ID NO: 179935 - RNA, 32 nt, Human
gcugaacccuggaagcaggaaggauugccaga

SEQ ID NO: 179936 - RNA, 32 nt, Human
gcugaaccgucagcuggcuguggugugggcuc

SEQ ID NO: 179937 - RNA, 22 nt, Human
gcugaaccucccgcugcugcug

SEQ ID NO: 179938 - RNA, 32 nt, Human
gcugaaccugccacugcuggagccauuucaac

SEQ ID NO: 179939 - RNA, 32 nt, Human
gcugaaccugccucuucaccuccaggcacuac

SEQ ID NO: 179940 - RNA, 32 nt, Human
gcugaaccuuccuauguccugccuuuaauuau

SEQ ID NO: 179941 - RNA, 18 nt, Human
gcugaacgacccagggca

SEQ ID NO: 179942 - RNA, 32 nt, Human
gcugaacgcauugguaacugugcucaagaaga

SEQ ID NO: 179943 - RNA, 32 nt, Human
gcugaacucagucuauggguuggggcucagau

SEQ ID NO: 179944 - RNA, 24 nt, Human
gcugaacuccaacuccugggcuca

SEQ ID NO: 179945 - RNA, 32 nt, Human
gcugaacucuuccuacccaggcucugaacaca

SEQ ID NO: 179946 - RNA, 22 nt, Human
gcugaacuggcugugaaaucua

SEQ ID NO: 179947 - RNA, 32 nt, Human
gcugaacuucaaggcccugcaccuccugcugc

SEQ ID NO: 179948 - RNA, 32 nt, Human
gcugaagaaaagagcaagggaagaggugagga

SEQ ID NO: 179949 - RNA, 32 nt, Human
gcugaagaaaccagaaucuucucgaaauguau

SEQ ID NO: 179950 - RNA, 32 nt, Human
gcugaagaauaugagagacaccaccuuuuaaa

SEQ ID NO: 179951 - RNA, 32 nt, Human
gcugaagacaaggggccggcauucagugggca

SEQ ID NO: 179952 - RNA, 32 nt, Human
gcugaagacagagaugauauguuagcuuggau

SEQ ID NO: 179953 - RNA, 19 nt, Human
gcugaagaccaaggguccc

SEQ ID NO: 179954 - RNA, 32 nt, Human
gcugaagaccaagggucccccuuguuaccugc

SEQ ID NO: 179955 - RNA, 32 nt, Human
gcugaagaccacaaccuuuugggucaacuguu

SEQ ID NO: 179956 - RNA, 32 nt, Human
gcugaagacggcacuaggacccagggaagucc

SEQ ID NO: 179957 - RNA, 32 nt, Human
gcugaagacguugauggagaagcucuaaguac

SEQ ID NO: 179958 - RNA, 18 nt, Human
gcugaagacuggaggaag

SEQ ID NO: 179959 - RNA, 32 nt, Human
gcugaagagaaaagaccagucugaaaucuaca

SEQ ID NO: 179960 - RNA, 32 nt, Human
gcugaagagacagaaaccagccccagaggugu

SEQ ID NO: 179961 - RNA, 21 nt, Human
gcugaagagacaggcauuguu

SEQ ID NO: 179962 - RNA, 21 nt, Human
gcugaagagaguccccauuuc

SEQ ID NO: 179963 - RNA, 32 nt, Human
gcugaagagauuuucuucugaagaugaucuag

SEQ ID NO: 179964 - RNA, 32 nt, Human
gcugaagaggaugcuguagucaugcccaggcu

SEQ ID NO: 179965 - RNA, 32 nt, Human
gcugaagaggcaagagacagaaugauauccag

SEQ ID NO: 179966 - RNA, 32 nt, Human
gcugaagaguguggagguauagaggagcuggu

SEQ ID NO: 179967 - RNA, 32 nt, Human
gcugaagauacuugaggcuucaagagguuaua

SEQ ID NO: 179968 - RNA, 32 nt, Human
gcugaagaucugauuaugucucugugcauauu

SEQ ID NO: 179969 - RNA, 32 nt, Human
gcugaagaugcugggagaauggcagaaauaua

SEQ ID NO: 179970 - RNA, 23 nt, Human
gcugaagcaagagaaucgcuuga

SEQ ID NO: 179971 - RNA, 24 nt, Human
gcugaagcaagcagaucacuugag

SEQ ID NO: 179972 - RNA, 24 nt, Human
gcugaagcagaaagauugcuugag

SEQ ID NO: 179973 - RNA, 23 nt, Human
gcugaagcagaagaacugcuuga

SEQ ID NO: 179974 - RNA, 23 nt, Human
gcugaagcagaagaaucacuuga

SEQ ID NO: 179975 - RNA, 23 nt, Human
gcugaagcagaagaaucgcuuga

SEQ ID NO: 179976 - RNA, 20 nt, Human
gcugaagcagaauagcuuga

SEQ ID NO: 179977 - RNA, 32 nt, Human
gcugaagcagaauuauuugaggccaggaguuc

SEQ ID NO: 179978 - RNA, 32 nt, Human
gcugaagcagaucgcugcagguuggagagugg

SEQ ID NO: 179979 - RNA, 24 nt, Human
gcugaagcagcaagaucacuugag

SEQ ID NO: 179980 - RNA, 23 nt, Human
gcugaagcaggagaacugccuga

SEQ ID NO: 179981 - RNA, 21 nt, Human
gcugaagcaggagaaucacuu

SEQ ID NO: 179982 - RNA, 23 nt, Human
gcugaagcaggagaaucacuuga

SEQ ID NO: 179983 - RNA, 23 nt, Human
gcugaagcaggagaaucccuuga

SEQ ID NO: 179984 - RNA, 23 nt, Human
gcugaagcaggagaaucgcugga

SEQ ID NO: 179985 - RNA, 21 nt, Human
gcugaagcaggagaaucgcuu

SEQ ID NO: 179986 - RNA, 23 nt, Human
gcugaagcaggagaaucgcuuga

SEQ ID NO: 179987 - RNA, 24 nt, Human
gcugaagcaggagaaucgcuugag

SEQ ID NO: 179988 - RNA, 23 nt, Human
gcugaagcaggagaauggcauga

SEQ ID NO: 179989 - RNA, 23 nt, Human
gcugaagcaggagaauugccuga

SEQ ID NO: 179990 - RNA, 20 nt, Human
gcugaagcaggagaauugcu

SEQ ID NO: 179991 - RNA, 23 nt, Human
gcugaagcaggagaauugcucga

SEQ ID NO: 179992 - RNA, 23 nt, Human
gcugaagcaggagaauugcuuga

SEQ ID NO: 179993 - RNA, 23 nt, Human
gcugaagcaggagauuugcuuga

SEQ ID NO: 179994 - RNA, 24 nt, Human
gcugaagcaggaggaccacucgag

SEQ ID NO: 179995 - RNA, 24 nt, Human
gcugaagcaggaggacugcuugag

SEQ ID NO: 179996 - RNA, 24 nt, Human
gcugaagcaggaggauagcuagag

SEQ ID NO: 179997 - RNA, 24 nt, Human
gcugaagcaggaggauagcuugag

SEQ ID NO: 179998 - RNA, 24 nt, Human
gcugaagcaggaggaucacuugag

SEQ ID NO: 179999 - RNA, 22 nt, Human
gcugaagcaggaggauugagga

SEQ ID NO: 180000 - RNA, 24 nt, Human
gcugaagcaggaggauugauugag

SEQ ID NO: 180001 - RNA, 24 nt, Human
gcugaagcaggaggauugcuugag

SEQ ID NO: 180002 - RNA, 23 nt, Human
gcugaagcaggauaaucgcuuga

SEQ ID NO: 180003 - RNA, 24 nt, Human
gcugaagcaggcagaucaccugag

SEQ ID NO: 180004 - RNA, 24 nt, Human
gcugaagcaggcagauugcuugag

SEQ ID NO: 180005 - RNA, 23 nt, Human
gcugaagcagguggaugcucaag

SEQ ID NO: 180006 - RNA, 32 nt, Human
gcugaagcauccccuuggagugccauguauaa

SEQ ID NO: 180007 - RNA, 23 nt, Human
gcugaagcaugagaaucacuuga

SEQ ID NO: 180008 - RNA, 32 nt, Human
gcugaagccaauaaucccagcacuuugagagg

SEQ ID NO: 180009 - RNA, 32 nt, Human
gcugaagccagcccacuacccacccccacuac

SEQ ID NO: 180010 - RNA, 32 nt, Human
gcugaagcccaugcuuucccaccagcauguca

SEQ ID NO: 180011 - RNA, 32 nt, Human
gcugaagccccacagcugugggcugcugaagu

SEQ ID NO: 180012 - RNA, 24 nt, Human
gcugaagcgggaggaucgcuugag

SEQ ID NO: 180013 - RNA, 24 nt, Human
gcugaagcgggaggaucgcuuggg

SEQ ID NO: 180014 - RNA, 32 nt, Human
gcugaagcgggguaauuccucuccugcaauua

SEQ ID NO: 180015 - RNA, 24 nt, Human
gcugaagcggguagaucacuugag

SEQ ID NO: 180016 - RNA, 24 nt, Human
gcugaagcggguggaucaccugag

SEQ ID NO: 180017 - RNA, 32 nt, Human
gcugaagcuccugcagcuucuguggccaagcc

SEQ ID NO: 180018 - RNA, 24 nt, Human
gcugaagcuggcggaucgcuugag

SEQ ID NO: 180019 - RNA, 32 nt, Human
gcugaagcuguaggaagcgccauucuucccug

SEQ ID NO: 180020 - RNA, 23 nt, Human
gcugaaggacccgcagggccccg

SEQ ID NO: 180021 - RNA, 32 nt, Human
gcugaaggaccuuuacaaucaggaugacaauc

SEQ ID NO: 180022 - RNA, 32 nt, Human
gcugaaggagaaacaucgagaggcagaaaagu

SEQ ID NO: 180023 - RNA, 17 nt, Human
gcugaaggagcccaagg

SEQ ID NO: 180024 - RNA, 32 nt, Human
gcugaaggaggcagaggacguggagcgggagg

SEQ ID NO: 180025 - RNA, 32 nt, Human
gcugaaggaucacuugagcucaggaguuggag

SEQ ID NO: 180026 - RNA, 32 nt, Human
gcugaaggcagaaagagaugcagagaaagugg

SEQ ID NO: 180027 - RNA, 32 nt, Human
gcugaaggcauuccagcugacacagaggaaua

SEQ ID NO: 180028 - RNA, 21 nt, Human
gcugaaggccauggccccuca

SEQ ID NO: 180029 - RNA, 32 nt, Human
gcugaaggcgcugccugaggccugugggccag

SEQ ID NO: 180030 - RNA, 32 nt, Human
gcugaaggcggacguuguuuccuaaccauagg

SEQ ID NO: 180031 - RNA, 32 nt, Human
gcugaaggcugaggcaggagaaucacucgaac

SEQ ID NO: 180032 - RNA, 32 nt, Human
gcugaaggcugaggcaggaguggagaggcaug

SEQ ID NO: 180033 - RNA, 32 nt, Human
gcugaaggcugcagcaggugcuagguagcagc

SEQ ID NO: 180034 - RNA, 32 nt, Human
gcugaagggaagagagguugcagcugagcaag

SEQ ID NO: 180035 - RNA, 17 nt, Human
gcugaagggaccaaggu

SEQ ID NO: 180036 - RNA, 31 nt, Human
gcugaagggacugagccucagauggcuggau

SEQ ID NO: 180037 - RNA, 32 nt, Human
gcugaaggggcagccagucaccagagcgccca

SEQ ID NO: 180038 - RNA, 32 nt, Human
gcugaaggggcugaaccauacacuccuuuuuc

SEQ ID NO: 180039 - RNA, 21 nt, Human
gcugaaguaggagggucacuu

SEQ ID NO: 180040 - RNA, 32 nt, Human
gcugaagucauugucgcucagcaauagggugc

SEQ ID NO: 180041 - RNA, 31 nt, Human
gcugaagucugcaaggagguugcuggcuugg

SEQ ID NO: 180042 - RNA, 32 nt, Human
gcugaagucuguaauccuagcacuuugggagg

SEQ ID NO: 180043 - RNA, 32 nt, Human
gcugaagucuguuaauucuacuuuuugaguac

SEQ ID NO: 180044 - RNA, 32 nt, Human
gcugaagugaacugcugccccucuggagucug

SEQ ID NO: 180045 - RNA, 32 nt, Human
gcugaagugagcuguguuugcaucacugcacu

SEQ ID NO: 180046 - RNA, 32 nt, Human
gcugaagugaguagcugagcagcuggagccau

SEQ ID NO: 180047 - RNA, 32 nt, Human
gcugaagugcaguagugcaaucucagcucacu

SEQ ID NO: 180048 - RNA, 24 nt, Human
gcugaagugggaagaucacuugag

SEQ ID NO: 180049 - RNA, 24 nt, Human
gcugaagugggaggacugcuugag

SEQ ID NO: 180050 - RNA, 24 nt, Human
gcugaagugggaggaucaccugag

SEQ ID NO: 180051 - RNA, 24 nt, Human
gcugaagugggaggaucccuugag

SEQ ID NO: 180052 - RNA, 24 nt, Human
gcugaagugggaggaucgcuugag

SEQ ID NO: 180053 - RNA, 24 nt, Human
gcugaagugggaggauggccugag

SEQ ID NO: 180054 - RNA, 24 nt, Human
gcugaagugggaggauugcuugag

SEQ ID NO: 180055 - RNA, 24 nt, Human
gcugaagugggaggguggcuugag

SEQ ID NO: 180056 - RNA, 32 nt, Human
gcugaagugggccagccuugcaccagccaggc

SEQ ID NO: 180057 - RNA, 25 nt, Human
gcugaaguggggaggaucguuugag

SEQ ID NO: 180058 - RNA, 32 nt, Human
gcugaagugugaagacagggcagacacuaaug

SEQ ID NO: 180059 - RNA, 24 nt, Human
gcugaaguuggaggauggcuugag

SEQ ID NO: 180060 - RNA, 30 nt, Human
gcugaauaaaaccauauucaccugccaagg

SEQ ID NO: 180061 - RNA, 32 nt, Human
gcugaauaaaguggguuugugucagcucguuu

SEQ ID NO: 180062 - RNA, 32 nt, Human
gcugaaucauuuccugccaucucuuuuaacac

SEQ ID NO: 180063 - RNA, 32 nt, Human
gcugaaucuuucuccucuaagcagucugguca

SEQ ID NO: 180064 - RNA, 32 nt, Human
gcugaaugaaugcagaaaucagcgguacugac

SEQ ID NO: 180065 - RNA, 32 nt, Human
gcugaaugagccaccacuccguagcuuuauau

SEQ ID NO: 180066 - RNA, 22 nt, Human
gcugaaugccaaggaccaaaga

SEQ ID NO: 180067 - RNA, 32 nt, Human
gcugaaugcccacgaggagcucugcugagacu

SEQ ID NO: 180068 - RNA, 32 nt, Human
gcugaauggaccuugacagauggccaagucaa

SEQ ID NO: 180069 - RNA, 32 nt, Human
gcugaauggacuccgugaaaauggcagacacg

SEQ ID NO: 180070 - RNA, 22 nt, Human
gcugaauggggccucagcaggu

SEQ ID NO: 180071 - RNA, 32 nt, Human
gcugaaugguaaacucuuccacaagcgaaaac

SEQ ID NO: 180072 - RNA, 32 nt, Human
gcugaaugucugagagaaccagaguuguucuc

SEQ ID NO: 180073 - RNA, 21 nt, Human
gcugaauuccaagcccagggu

SEQ ID NO: 180074 - RNA, 32 nt, Human
gcugaauucuuuugaacgaugaucuuaaaggc

SEQ ID NO: 180075 - RNA, 32 nt, Human
gcugaauuugacguuaaugauaugacuaggag

SEQ ID NO: 180076 - RNA, 32 nt, Human
gcugaauuuucacaugaacauacuggcuggug

SEQ ID NO: 180077 - RNA, 24 nt, Human
gcugacaaagaugaccugcugcug

SEQ ID NO: 180078 - RNA, 32 nt, Human
gcugacaaagugagcugagauccggccaacag

SEQ ID NO: 180079 - RNA, 32 nt, Human
gcugacaaauaacauuuaacaaguauugcagu

SEQ ID NO: 180080 - RNA, 32 nt, Human
gcugacaaauguguccuugauccacacugcuc

SEQ ID NO: 180081 - RNA, 32 nt, Human
gcugacaagggacuguaauuuaaugaugcguu

SEQ ID NO: 180082 - RNA, 32 nt, Human
gcugacaagggcagugugaaucugccaagggu

SEQ ID NO: 180083 - RNA, 32 nt, Human
gcugacacaagaauccauucucacagaaacug

SEQ ID NO: 180084 - RNA, 23 nt, Human
gcugacacaggagaauugcuuga

SEQ ID NO: 180085 - RNA, 32 nt, Human
gcugacacaggcugcagagaaaagugguugau

SEQ ID NO: 180086 - RNA, 32 nt, Human
gcugacaccagcagggcagggaggugaacuga

SEQ ID NO: 180087 - RNA, 19 nt, Human
gcugacacccacguccaaa

SEQ ID NO: 180088 - RNA, 32 nt, Human
gcugacaccgcgccccggguucccaggccacc

SEQ ID NO: 180089 - RNA, 32 nt, Human
gcugacaccuauaaucucagcacuuugggagg

SEQ ID NO: 180090 - RNA, 32 nt, Human
gcugacaccuggucugugcaccuguguugcuc

SEQ ID NO: 180091 - RNA, 32 nt, Human
gcugacaccuguaaucccagcacuuugggagg

SEQ ID NO: 180092 - RNA, 32 nt, Human
gcugacaccuguaaucccagcauuuugggaga

SEQ ID NO: 180093 - RNA, 32 nt, Human
gcugacacuacccuaaucuuccaggacccauu

SEQ ID NO: 180094 - RNA, 32 nt, Human
gcugacacucuggugagcugagcucuagaagg

SEQ ID NO: 180095 - RNA, 32 nt, Human
gcugacacugcaaaccugcaugggugggcuuu

SEQ ID NO: 180096 - RNA, 32 nt, Human
gcugacacugccaaccuccaguauccucaccc

SEQ ID NO: 180097 - RNA, 32 nt, Human
gcugacacuggcagagagguaaaggguggggc

SEQ ID NO: 180098 - RNA, 32 nt, Human
gcugacacuucaaggugacagaaggaccagcc

SEQ ID NO: 180099 - RNA, 32 nt, Human
gcugacacuuccucuacagagauggaccaaaa

SEQ ID NO: 180100 - RNA, 32 nt, Human
gcugacagaacugcuggauuugguucucauug

SEQ ID NO: 180101 - RNA, 32 nt, Human
gcugacagagagccucacccccgaccacacag

SEQ ID NO: 180102 - RNA, 32 nt, Human
gcugacagaggcaccguucaccagagggcuca

SEQ ID NO: 180103 - RNA, 32 nt, Human
gcugacagcacaucugcaggaagcaugagggu

SEQ ID NO: 180104 - RNA, 32 nt, Human
gcugacaggacuuccacacccaugcuccucuc

SEQ ID NO: 180105 - RNA, 32 nt, Human
gcugacaggagagaugagugugagagcuggga

SEQ ID NO: 180106 - RNA, 32 nt, Human
gcugacagggacgcuggccaacagggugguau

SEQ ID NO: 180107 - RNA, 32 nt, Human
gcugacagggggcuuaguggagauugggguua

SEQ ID NO: 180108 - RNA, 32 nt, Human
gcugacaguacugaaagcuuuccucuuuaacu

SEQ ID NO: 180109 - RNA, 22 nt, Human
gcugacaucacaaccugugaca

SEQ ID NO: 180110 - RNA, 32 nt, Human
gcugacaucccuaccccugccucacugccuau

SEQ ID NO: 180111 - RNA, 32 nt, Human
gcugacaucuaugugcuagcugccucaucacg

SEQ ID NO: 180112 - RNA, 32 nt, Human
gcugacaucugaggcccuucccaggaagacau

SEQ ID NO: 180113 - RNA, 32 nt, Human
gcugacaucuguaauccccgcacuuugugagg

SEQ ID NO: 180114 - RNA, 32 nt, Human
gcugacaucuuggagcucaguacccucauagu

SEQ ID NO: 180115 - RNA, 32 nt, Human
gcugacaugcaacugccuuaacuuugccuacc

SEQ ID NO: 180116 - RNA, 32 nt, Human
gcugacauucuagccuauuuuaaugguuugca

SEQ ID NO: 180117 - RNA, 28 nt, Human
gcugaccaacauggugaaaugaaacccc

SEQ ID NO: 180118 - RNA, 30 nt, Human
gcugaccaacauggugaaaugaaaccccau

SEQ ID NO: 180119 - RNA, 22 nt, Human
gcugaccacacagaugacccag

SEQ ID NO: 180120 - RNA, 26 nt, Human
gcugaccacacuaagcucuucucucu

SEQ ID NO: 180121 - RNA, 32 nt, Human
gcugaccacaggggaacgauguucuuuucuuu

SEQ ID NO: 180122 - RNA, 32 nt, Human
gcugaccaccaccaccuggccucuccgagacg

SEQ ID NO: 180123 - RNA, 19 nt, Human
gcugaccaccccucugagc

SEQ ID NO: 180124 - RNA, 32 nt, Human
gcugaccaccuauguuagaggaaguacagaag

SEQ ID NO: 180125 - RNA, 32 nt, Human
gcugaccacgcucuccuuucuggcaggagacg

SEQ ID NO: 180126 - RNA, 22 nt, Human
gcugaccagaagcaugcugcug

SEQ ID NO: 180127 - RNA, 32 nt, Human
gcugaccagcagaggugagagagcgagacagg

SEQ ID NO: 180128 - RNA, 32 nt, Human
gcugaccagcucgcgcccuccugaggcccuga

SEQ ID NO: 180129 - RNA, 20 nt, Human
gcugaccauccuguuuucca

SEQ ID NO: 180130 - RNA, 22 nt, Human
gcugaccaucugcuuuccucca

SEQ ID NO: 180131 - RNA, 32 nt, Human
gcugacccagcauggagcccaagagcagcucg

SEQ ID NO: 180132 - RNA, 21 nt, Human
gcugacccagcccugcugcug

SEQ ID NO: 180133 - RNA, 32 nt, Human
gcugaccccaaaacccuuccacacuuuauuag

SEQ ID NO: 180134 - RNA, 32 nt, Human
gcugaccccacacccaggaccacuguccggcu

SEQ ID NO: 180135 - RNA, 32 nt, Human
gcugaccccagccaggcuacagggaucgauug

SEQ ID NO: 180136 - RNA, 32 nt, Human
gcugaccccagccggcgccgagggcuuggaau

SEQ ID NO: 180137 - RNA, 32 nt, Human
gcugaccccaggccuggugauucugggccccu

SEQ ID NO: 180138 - RNA, 32 nt, Human
gcugaccccucggagcaagcgccgcacaggug

SEQ ID NO: 180139 - RNA, 32 nt, Human
gcugaccccuggggcaacguuggcugcagcgg

SEQ ID NO: 180140 - RNA, 32 nt, Human
gcugacccgaggucuuccuaucuggaaugacu

SEQ ID NO: 180141 - RNA, 26 nt, Human
gcugacccgccucccugcccggccgg

SEQ ID NO: 180142 - RNA, 32 nt, Human
gcugacccucgagucgcuucgcuagcugugcg

SEQ ID NO: 180143 - RNA, 32 nt, Human
gcugacccucuaaucacaaggcugguuccuca

SEQ ID NO: 180144 - RNA, 32 nt, Human
gcugaccgugccagagcuuguuuguaccucuc

SEQ ID NO: 180145 - RNA, 32 nt, Human
gcugaccucacagaucaacguauuaacaagac

SEQ ID NO: 180146 - RNA, 32 nt, Human
gcugaccuccaggggcacuuccucggcucauc

SEQ ID NO: 180147 - RNA, 32 nt, Human
gcugaccucccagugaccccugaccucacugu

SEQ ID NO: 180148 - RNA, 22 nt, Human
gcugaccuccugcagcucgcug

SEQ ID NO: 180149 - RNA, 20 nt, Human
gcugaccucuccaguugcug

SEQ ID NO: 180150 - RNA, 24 nt, Human
gcugaccucuccuggcugugccug

SEQ ID NO: 180151 - RNA, 32 nt, Human
gcugaccucugacuucuugguagugagaagaa

SEQ ID NO: 180152 - RNA, 32 nt, Human
gcugaccucuggauaggaacagcuucuccgcc

SEQ ID NO: 180153 - RNA, 21 nt, Human
gcugaccugaaccuggugcug

SEQ ID NO: 180154 - RNA, 32 nt, Human
gcugaccugaaccugguucaucccuuucugac

SEQ ID NO: 180155 - RNA, 32 nt, Human
gcugaccugacaaguacuaugugugugcaugu

SEQ ID NO: 180156 - RNA, 32 nt, Human
gcugaccugaguauccaccaugugccaggcac

SEQ ID NO: 180157 - RNA, 32 nt, Human
gcugaccugcugcugagcuggcugggcuggac

SEQ ID NO: 180158 - RNA, 32 nt, Human
gcugaccugugcuugguccaccccagguaggg

SEQ ID NO: 180159 - RNA, 22 nt, Human
gcugaccuguguuuccucccca

SEQ ID NO: 180160 - RNA, 32 nt, Human
gcugaccuuaguuucaaagcuuauucuuaauu

SEQ ID NO: 180161 - RNA, 32 nt, Human
gcugaccuucuuacugugaaagccacuugaug

SEQ ID NO: 180162 - RNA, 24 nt, Human
gcugaccuugaacuccugggcuca

SEQ ID NO: 180163 - RNA, 32 nt, Human
gcugacgaaauguuagccguggauucaaggac

SEQ ID NO: 180164 - RNA, 20 nt, Human
gcugacgaagcuggccuccc

SEQ ID NO: 180165 - RNA, 32 nt, Human
gcugacgacugagcccugcuucugcuggggcu

SEQ ID NO: 180166 - RNA, 24 nt, Human
gcugacgcaggaggauugcuugag

SEQ ID NO: 180167 - RNA, 32 nt, Human
gcugacgccugccagguuucugcugcagauaa

SEQ ID NO: 180168 - RNA, 32 nt, Human
gcugacgccuguaaucccagcacuuugggagg

SEQ ID NO: 180169 - RNA, 32 nt, Human
gcugacgcuacaccuuggucuuuccggguccu

SEQ ID NO: 180170 - RNA, 32 nt, Human
gcugacggcccagaacuggcagagagaagguu

SEQ ID NO: 180171 - RNA, 32 nt, Human
gcugacggggagggggacaggcagggaguuag

SEQ ID NO: 180172 - RNA, 32 nt, Human
gcugacgguucaguccugccucuacugucucu

SEQ ID NO: 180173 - RNA, 32 nt, Human
gcugacuaaucuucaucaccacuguagauuuu

SEQ ID NO: 180174 - RNA, 21 nt, Human
gcugacuacucacuucuccuu

SEQ ID NO: 180175 - RNA, 32 nt, Human
gcugacuagauguuguugauagucaucuuuaa

SEQ ID NO: 180176 - RNA, 32 nt, Human
gcugacuagcagcugcccagcugucaagguca

SEQ ID NO: 180177 - RNA, 32 nt, Human
gcugacucaaccucacagagucagggggugac

SEQ ID NO: 180178 - RNA, 32 nt, Human
gcugacucagugaccuuugaggauguggcugu

SEQ ID NO: 180179 - RNA, 32 nt, Human
gcugacuccagccuugggcucagcagcacccg

SEQ ID NO: 180180 - RNA, 32 nt, Human
gcugacucgaccucccugccucucacacucug

SEQ ID NO: 180181 - RNA, 32 nt, Human
gcugacucgguuuccccucagagccauuguug

SEQ ID NO: 180182 - RNA, 31 nt, Human
gcugacucuaucucugggccugcuuccuggg

SEQ ID NO: 180183 - RNA, 32 nt, Human
gcugacucugcagcuccucaugcuggccuauc

SEQ ID NO: 180184 - RNA, 32 nt, Human
gcugacucuguggacuuugacuucaucauuaa

SEQ ID NO: 180185 - RNA, 24 nt, Human
gcugacugaggccugcuucccccu

SEQ ID NO: 180186 - RNA, 32 nt, Human
gcugacugcaaccuccaccucccgggugcaag

SEQ ID NO: 180187 - RNA, 32 nt, Human
gcugacugcaaccuccaccuccuggguucaag

SEQ ID NO: 180188 - RNA, 32 nt, Human
gcugacugcaacuucugccuccuggguucaag

SEQ ID NO: 180189 - RNA, 32 nt, Human
gcugacugcaaucugugccuccugggcucaag

SEQ ID NO: 180190 - RNA, 19 nt, Human
gcugacugcacaccugagc

SEQ ID NO: 180191 - RNA, 20 nt, Human
gcugacugcacggcuucccc

SEQ ID NO: 180192 - RNA, 32 nt, Human
gcugacugcagccucaaccuuccaggcugaag

SEQ ID NO: 180193 - RNA, 32 nt, Human
gcugacugcagccucaaccuucugggcucaaa

SEQ ID NO: 180194 - RNA, 32 nt, Human
gcugacugcagucugugccuccugggcucaag

SEQ ID NO: 180195 - RNA, 32 nt, Human
gcugacugcccuggaucccucucccaggcucu

SEQ ID NO: 180196 - RNA, 24 nt, Human
gcugacugcccuucucuccucccu

SEQ ID NO: 180197 - RNA, 21 nt, Human
gcugacugccuuggccuccca

SEQ ID NO: 180198 - RNA, 32 nt, Human
gcugacugcgacucgggagcuccgggagcggc

SEQ ID NO: 180199 - RNA, 24 nt, Human
gcugacugcgccugucuucucccu

SEQ ID NO: 180200 - RNA, 21 nt, Human
gcugacugcguucugcccccu

SEQ ID NO: 180201 - RNA, 32 nt, Human
gcugacugcuguguccccacagaucugggccu

SEQ ID NO: 180202 - RNA, 32 nt, Human
gcugacuggaaguuccaugaggggaggaaauu

SEQ ID NO: 180203 - RNA, 21 nt, Human
gcugacuggagcacccccauu

SEQ ID NO: 180204 - RNA, 32 nt, Human
gcugacuggcagaggaagauugcagugacagc

SEQ ID NO: 180205 - RNA, 32 nt, Human
gcugacuggcaucugugccugccuuucuggcc

SEQ ID NO: 180206 - RNA, 22 nt, Human
gcugacuggccuaccugcuccc

SEQ ID NO: 180207 - RNA, 32 nt, Human
gcugacuggccuggcccggccccgccgcgcuc

SEQ ID NO: 180208 - RNA, 32 nt, Human
gcugacugggcuggcagaggagaacauguuga

SEQ ID NO: 180209 - RNA, 32 nt, Human
gcugacugggggccucugccuccaggagggca

SEQ ID NO: 180210 - RNA, 24 nt, Human
gcugacuggggugucugccccccu

SEQ ID NO: 180211 - RNA, 32 nt, Human
gcugacugggugugccuucuaguguccugugu

SEQ ID NO: 180212 - RNA, 32 nt, Human
gcugacugugauauacuguauuggagaaacca

SEQ ID NO: 180213 - RNA, 32 nt, Human
gcugacugugccagaugcagaucuuaccuguc

SEQ ID NO: 180214 - RNA, 22 nt, Human
gcugacugugccgucccuuccc

SEQ ID NO: 180215 - RNA, 19 nt, Human
gcugacuguggcccccucc

SEQ ID NO: 180216 - RNA, 32 nt, Human
gcugacuguguguacauauguauauaauaugu

SEQ ID NO: 180217 - RNA, 32 nt, Human
gcugacuuaggauuauuaaugaaaguguugca

SEQ ID NO: 180218 - RNA, 32 nt, Human
gcugacuucccaagcccuggugaccagaccaa

SEQ ID NO: 180219 - RNA, 32 nt, Human
gcugacuuccucacuaaccucuucacguguaa

SEQ ID NO: 180220 - RNA, 32 nt, Human
gcugacuuccucacuauccucuucacauguaa

SEQ ID NO: 180221 - RNA, 32 nt, Human
gcugacuuccugugcuccucuggccacaggua

SEQ ID NO: 180222 - RNA, 32 nt, Human
gcugacuucucaccugcgcguucacacuggcg

SEQ ID NO: 180223 - RNA, 32 nt, Human
gcugacuucucccuggccgccugcugaggagc

SEQ ID NO: 180224 - RNA, 32 nt, Human
gcugacuucugugguuuagcaagagguuuauu

SEQ ID NO: 180225 - RNA, 32 nt, Human
gcugacuugagaagcugugauggccaagcuuu

SEQ ID NO: 180226 - RNA, 32 nt, Human
gcugacuugcucggaaacccauuggagguauc

SEQ ID NO: 180227 - RNA, 32 nt, Human
gcugacuugcuuaugucuguuuggaagcugcu

SEQ ID NO: 180228 - RNA, 32 nt, Human
gcugagaaaacccuggaguggagggaggcuca

SEQ ID NO: 180229 - RNA, 32 nt, Human
gcugagaaaccagcaacccaugugaggauucc

SEQ ID NO: 180230 - RNA, 32 nt, Human
gcugagaaaggaagcagacaauaagggccucu

SEQ ID NO: 180231 - RNA, 18 nt, Human
gcugagaaaggcugcuca

SEQ ID NO: 180232 - RNA, 32 nt, Human
gcugagaaaugauacccaggagcagcaggcuu

SEQ ID NO: 180233 - RNA, 18 nt, Human
gcugagaaccccucagag

SEQ ID NO: 180234 - RNA, 23 nt, Human
gcugagaacuccugacuguaaca

SEQ ID NO: 180235 - RNA, 32 nt, Human
gcugagaacugguucuggccuaggugggcucu

SEQ ID NO: 180236 - RNA, 32 nt, Human
gcugagaagagcagagaugaagggugggaccu

SEQ ID NO: 180237 - RNA, 32 nt, Human
gcugagaagaggaggaggugggggcuggaggu

SEQ ID NO: 180238 - RNA, 32 nt, Human
gcugagaagagugugcuggagaugcucuagga

SEQ ID NO: 180239 - RNA, 32 nt, Human
gcugagaagggagggacagaaaagagaagaca

SEQ ID NO: 180240 - RNA, 20 nt, Human
gcugagaaggggcugaggca

SEQ ID NO: 180241 - RNA, 32 nt, Human
gcugagaaugagaagagguucaagugauucuu

SEQ ID NO: 180242 - RNA, 32 nt, Human
gcugagacaccuccuguuucccuuccccuuga

SEQ ID NO: 180243 - RNA, 32 nt, Human
gcugagacagauggaagccaggacaggggagc

SEQ ID NO: 180244 - RNA, 32 nt, Human
gcugagacagccugagauauggccucauggga

SEQ ID NO: 180245 - RNA, 23 nt, Human
gcugagacaggagaaucgcuuga

SEQ ID NO: 180246 - RNA, 23 nt, Human
gcugagacaggagaauugcuuga

SEQ ID NO: 180247 - RNA, 32 nt, Human
gcugagacaggagaguacagaaugacaacauu

SEQ ID NO: 180248 - RNA, 23 nt, Human
gcugagacaggagagucgcuuga

SEQ ID NO: 180249 - RNA, 23 nt, Human
gcugagacaggaggaucgcuuga

SEQ ID NO: 180250 - RNA, 18 nt, Human
gcugagacaggcucggca

SEQ ID NO: 180251 - RNA, 21 nt, Human
gcugagaccacaggcacccgc

SEQ ID NO: 180252 - RNA, 24 nt, Human
gcugagaccacaggcgugugccac

SEQ ID NO: 180253 - RNA, 24 nt, Human
gcugagaccacagggacacaccau

SEQ ID NO: 180254 - RNA, 32 nt, Human
gcugagaccagcuggucacugcugggccugcu

SEQ ID NO: 180255 - RNA, 20 nt, Human
gcugagaccaucauuuucca

SEQ ID NO: 180256 - RNA, 32 nt, Human
gcugagaccauccugauuucaaacacccaguc

SEQ ID NO: 180257 - RNA, 21 nt, Human
gcugagacgccauggggccgc

SEQ ID NO: 180258 - RNA, 32 nt, Human
gcugagacggagaagaggagaggcagagaggg

SEQ ID NO: 180259 - RNA, 24 nt, Human
gcugagacuacaggcacacaccac

SEQ ID NO: 180260 - RNA, 24 nt, Human
gcugagacuacaggcacgcaccac

SEQ ID NO: 180261 - RNA, 32 nt, Human
gcugagacugaaacagaggggcugggacaugg

SEQ ID NO: 180262 - RNA, 32 nt, Human
gcugagacugcacuagggucuggggacacaga

SEQ ID NO: 180263 - RNA, 32 nt, Human
gcugagacugccucacugaguugucaacacuu

SEQ ID NO: 180264 - RNA, 32 nt, Human
gcugagacugugccacugcacuccagccuggg

SEQ ID NO: 180265 - RNA, 32 nt, Human
gcugagacugugccacugcaguccagccuggg

SEQ ID NO: 180266 - RNA, 32 nt, Human
gcugagacuucucugcaaagaggggaggggga

SEQ ID NO: 180267 - RNA, 32 nt, Human
gcugagagacacgugaggaagaugaugggagg

SEQ ID NO: 180268 - RNA, 20 nt, Human
gcugagagacuaguugugau

SEQ ID NO: 180269 - RNA, 32 nt, Human
gcugagagccagaggaaaagauaauuagacuu

SEQ ID NO: 180270 - RNA, 21 nt, Human
gcugagagcccaaucgcauca

SEQ ID NO: 180271 - RNA, 32 nt, Human
gcugagagccucuagucgccuccugccaucug

SEQ ID NO: 180272 - RNA, 23 nt, Human
gcugagaggacuuucacaccaua

SEQ ID NO: 180273 - RNA, 32 nt, Human
gcugagaggagaaggagggagacaugagcaug

SEQ ID NO: 180274 - RNA, 32 nt, Human
gcugagaggagagagacuccagcuggguugga

SEQ ID NO: 180275 - RNA, 32 nt, Human
gcugagagggagacgcuccaagaggcuccuca

SEQ ID NO: 180276 - RNA, 32 nt, Human
gcugagagggccuggcccuggggugggcucca

SEQ ID NO: 180277 - RNA, 22 nt, Human
gcugagaggggacugggcgccg

SEQ ID NO: 180278 - RNA, 32 nt, Human
gcugagagggucugguccuggcccaggcuccc

SEQ ID NO: 180279 - RNA, 32 nt, Human
gcugagaggugguagagcaggaagcugccuga

SEQ ID NO: 180280 - RNA, 21 nt, Human
gcugagagugccuggggccac

SEQ ID NO: 180281 - RNA, 32 nt, Human
gcugagagugcuuccuucuugaagacgagugu

SEQ ID NO: 180282 - RNA, 32 nt, Human
gcugagaguguccugccugguccucugugccu

SEQ ID NO: 180283 - RNA, 32 nt, Human
gcugagaguucaagaccaaccugggcaacaua

SEQ ID NO: 180284 - RNA, 19 nt, Human
gcugagaguugaauugugg

SEQ ID NO: 180285 - RNA, 32 nt, Human
gcugagauauuuugguauugcauugguuuuua

SEQ ID NO: 180286 - RNA, 19 nt, Human
gcugagauccagcccaggg

SEQ ID NO: 180287 - RNA, 32 nt, Human
gcugagaucgcugcacuccagccugggcgaca

SEQ ID NO: 180288 - RNA, 32 nt, Human
gcugagaugagccccacguggagcucgggacg

SEQ ID NO: 180289 - RNA, 32 nt, Human
gcugagaugagguaggggcagccggggugaga

SEQ ID NO: 180290 - RNA, 32 nt, Human
gcugagaugccauggagugcccaucuggucac

SEQ ID NO: 180291 - RNA, 32 nt, Human
gcugagauggcagacaggagagaugggcccca

SEQ ID NO: 180292 - RNA, 32 nt, Human
gcugagaugggaaucacuugaaccugggaggc

SEQ ID NO: 180293 - RNA, 24 nt, Human
gcugagaugggaggaucgcuugag

SEQ ID NO: 180294 - RNA, 24 nt, Human
gcugagaugggaggauugcuugag

SEQ ID NO: 180295 - RNA, 24 nt, Human
gcugagauuacaggcgcacaccac

SEQ ID NO: 180296 - RNA, 32 nt, Human
gcugagauugagcagaagaucaaggaguacaa

SEQ ID NO: 180297 - RNA, 32 nt, Human
gcugagauugagccagggaagggugagcaggc

SEQ ID NO: 180298 - RNA, 32 nt, Human
gcugagauugcacuccagccugggcgacaggc

SEQ ID NO: 180299 - RNA, 32 nt, Human
gcugagauugugccacuacacuccagccuggg

SEQ ID NO: 180300 - RNA, 21 nt, Human
gcugagauugugccacugcac

SEQ ID NO: 180301 - RNA, 32 nt, Human
gcugagauugugccacugcacaccagccugga

SEQ ID NO: 180302 - RNA, 32 nt, Human
gcugagauugugccacugcacuccagccuggg

SEQ ID NO: 180303 - RNA, 32 nt, Human
gcugagauugugccacugcacuucagcuuggg

SEQ ID NO: 180304 - RNA, 32 nt, Human
gcugagauugugccacuguacuccauccuggg

SEQ ID NO: 180305 - RNA, 32 nt, Human
gcugagauugugccacuguauuccauccuggg

SEQ ID NO: 180306 - RNA, 32 nt, Human
gcugagauuguuguccucugucaccagggcgg

SEQ ID NO: 180307 - RNA, 32 nt, Human
gcugagcaaagcccugggcucacagcacccca

SEQ ID NO: 180308 - RNA, 32 nt, Human
gcugagcaaggcagaugaccuaaucaccucac

SEQ ID NO: 180309 - RNA, 32 nt, Human
gcugagcacaagacaaugcacauguguucucu

SEQ ID NO: 180310 - RNA, 32 nt, Human
gcugagcacgagggagcugcuuggggaagcca

SEQ ID NO: 180311 - RNA, 32 nt, Human
gcugagcagcucccaggcagacugccuucuuu

SEQ ID NO: 180312 - RNA, 16 nt, Human
gcugagcagcugugau

SEQ ID NO: 180313 - RNA, 19 nt, Human
gcugagcaggacagccagc

SEQ ID NO: 180314 - RNA, 22 nt, Human
gcugagcaggagaaccgcugga

SEQ ID NO: 180315 - RNA, 32 nt, Human
gcugagcaggaggcagaggugagaguccaaga

SEQ ID NO: 180316 - RNA, 32 nt, Human
gcugagcaggauaugugauacugugugguugg

SEQ ID NO: 180317 - RNA, 32 nt, Human
gcugagcaggccacuucccuggagcugacccc

SEQ ID NO: 180318 - RNA, 32 nt, Human
gcugagcaguagugccucucggguggcggguu

SEQ ID NO: 180319 - RNA, 32 nt, Human
gcugagcaguggcagcagagaggcagacguga

SEQ ID NO: 180320 - RNA, 32 nt, Human
gcugagcaucuucucccaggaguaccagaaac

SEQ ID NO: 180321 - RNA, 32 nt, Human
gcugagccagaagcaucacugcagugaaaguc

SEQ ID NO: 180322 - RNA, 32 nt, Human
gcugagccaggagcuaaaaccuuagauaucug

SEQ ID NO: 180323 - RNA, 24 nt, Human
gcugagccaggaggaucgcuugag

SEQ ID NO: 180324 - RNA, 32 nt, Human
gcugagccaggaguccucucccagaaguuggg

SEQ ID NO: 180325 - RNA, 32 nt, Human
gcugagccaggcuggcagcagcgcggucgcug

SEQ ID NO: 180326 - RNA, 32 nt, Human
gcugagccaugcagggcagccugguggcggcu

SEQ ID NO: 180327 - RNA, 19 nt, Human
gcugagccaugcccggugg

SEQ ID NO: 180328 - RNA, 32 nt, Human
gcugagccaugcucgcgaacugugggucuguc

SEQ ID NO: 180329 - RNA, 32 nt, Human
gcugagcccacccagagguuguuggaguucag

SEQ ID NO: 180330 - RNA, 21 nt, Human
gcugagcccacggcucagugg

SEQ ID NO: 180331 - RNA, 19 nt, Human
gcugagcccagcacugcgg

SEQ ID NO: 180332 - RNA, 20 nt, Human
gcugagcccaggagccggga

SEQ ID NO: 180333 - RNA, 32 nt, Human
gcugagcccaggagccgggaggccugcgggcu

SEQ ID NO: 180334 - RNA, 32 nt, Human
gcugagcccaggagccugccaggcugacgugc

SEQ ID NO: 180335 - RNA, 18 nt, Human
gcugagcccaggcacuug

SEQ ID NO: 180336 - RNA, 22 nt, Human
gcugagcccaggcugcguagug

SEQ ID NO: 180337 - RNA, 19 nt, Human
gcugagcccagggugggga

SEQ ID NO: 180338 - RNA, 32 nt, Human
gcugagcccccaccccugccccagcuccagga

SEQ ID NO: 180339 - RNA, 32 nt, Human
gcugagccccgccccuggcccugcugccaugu

SEQ ID NO: 180340 - RNA, 22 nt, Human
gcugagcccgcgggagcccagg

SEQ ID NO: 180341 - RNA, 22 nt, Human
gcugagccgggaccucgcguga

SEQ ID NO: 180342 - RNA, 32 nt, Human
gcugagccgggggagggcuccgggagggagug

SEQ ID NO: 180343 - RNA, 24 nt, Human
gcugagccuacugucuccuuccca

SEQ ID NO: 180344 - RNA, 32 nt, Human
gcugagccuagaggugaauuucauuggggaag

SEQ ID NO: 180345 - RNA, 32 nt, Human
gcugagccuagaggugaauuucguuggggaag

SEQ ID NO: 180346 - RNA, 20 nt, Human
gcugagccuagccccggcga

SEQ ID NO: 180347 - RNA, 32 nt, Human
gcugagccucagucucccucccuuggggccua

SEQ ID NO: 180348 - RNA, 32 nt, Human
gcugagccuccagcgcgugccagccugggccg

SEQ ID NO: 180349 - RNA, 32 nt, Human
gcugagccuccaggagcugccagaggacagga

SEQ ID NO: 180350 - RNA, 32 nt, Human
gcugagccucgcucgcugcuucuucagggacc

SEQ ID NO: 180351 - RNA, 32 nt, Human
gcugagccugcagggaagccccacauguccag

SEQ ID NO: 180352 - RNA, 32 nt, Human
gcugagccugcaucugugccucccagcccccu

SEQ ID NO: 180353 - RNA, 20 nt, Human
gcugagccuggcccgcacca

SEQ ID NO: 180354 - RNA, 19 nt, Human
gcugagccuggcucaggga

SEQ ID NO: 180355 - RNA, 32 nt, Human
gcugagccugggguuccccuggcauuggcccc

SEQ ID NO: 180356 - RNA, 32 nt, Human
gcugagccugucucugaauuguucccuccccc

SEQ ID NO: 180357 - RNA, 32 nt, Human
gcugagccuuccaugaaaauugcucucugcca

SEQ ID NO: 180358 - RNA, 32 nt, Human
gcugagcgcaugagugacagaggcagagaugc

SEQ ID NO: 180359 - RNA, 32 nt, Human
gcugagcggacaggcucuccagcuggagucca

SEQ ID NO: 180360 - RNA, 32 nt, Human
gcugagcgggaggugaaggcagagguggagga

SEQ ID NO: 180361 - RNA, 32 nt, Human
gcugagcguccaggcugcgcgauggcacacac

SEQ ID NO: 180362 - RNA, 32 nt, Human
gcugagcuaacaccacggcacuucagccuggg

SEQ ID NO: 180363 - RNA, 32 nt, Human
gcugagcucaccugaccucccaugccugugca

SEQ ID NO: 180364 - RNA, 32 nt, Human
gcugagcucagcugcccggaugaccuuuccag

SEQ ID NO: 180365 - RNA, 21 nt, Human
gcugagcucauggcccgcacc

SEQ ID NO: 180366 - RNA, 32 nt, Human
gcugagcuccacuguuggcaaagucuuggcag

SEQ ID NO: 180367 - RNA, 32 nt, Human
gcugagcuccucaccuggacagucuccuggac

SEQ ID NO: 180368 - RNA, 21 nt, Human
gcugagcucucaccucaguga

SEQ ID NO: 180369 - RNA, 32 nt, Human
gcugagcugaauguagugauguuuacauuguu

SEQ ID NO: 180370 - RNA, 32 nt, Human
gcugagcugagacaccuccuguuucccuuccc

SEQ ID NO: 180371 - RNA, 32 nt, Human
gcugagcugagcugagcaacgcugggggcuau

SEQ ID NO: 180372 - RNA, 32 nt, Human
gcugagcugcaagacauccuggaauugggagc

SEQ ID NO: 180373 - RNA, 32 nt, Human
gcugagcugcccaggcuucacggagcgguguu

SEQ ID NO: 180374 - RNA, 20 nt, Human
gcugagcugcugccugguga

SEQ ID NO: 180375 - RNA, 32 nt, Human
gcugagcugcuuccuguuuucuucugauugcu

SEQ ID NO: 180376 - RNA, 32 nt, Human
gcugagcugcuugcaggguucgcugagccaaa

SEQ ID NO: 180377 - RNA, 32 nt, Human
gcugagcuggacuuggcggugggagccggagc

SEQ ID NO: 180378 - RNA, 18 nt, Human
gcugagcuggaggccucc

SEQ ID NO: 180379 - RNA, 32 nt, Human
gcugagcugggagaguuggaggagguggcggc

SEQ ID NO: 180380 - RNA, 19 nt, Human
gcugagcugggccccggga

SEQ ID NO: 180381 - RNA, 32 nt, Human
gcugagcuguuucacugccucucgcaggcccc

SEQ ID NO: 180382 - RNA, 32 nt, Human
gcugagcuugagcuccccuggagccagcaggg

SEQ ID NO: 180383 - RNA, 32 nt, Human
gcugagcuugcccugagggugaggcugggucu

SEQ ID NO: 180384 - RNA, 32 nt, Human
gcugagcuugcucuggugcuagggucagcuag

SEQ ID NO: 180385 - RNA, 32 nt, Human
gcugagcuuggggccuggagccccaggaauga

SEQ ID NO: 180386 - RNA, 32 nt, Human
gcugagcuuggugggagccaaggcugagucgg

SEQ ID NO: 180387 - RNA, 21 nt, Human
gcugagcuugugccuugguga

SEQ ID NO: 180388 - RNA, 32 nt, Human
gcugaggaaacuuggcuguaacuucaaaagaa

SEQ ID NO: 180389 - RNA, 32 nt, Human
gcugaggaacaugcucccucccucccucccau

SEQ ID NO: 180390 - RNA, 21 nt, Human
gcugaggaacccgcagccccg

SEQ ID NO: 180391 - RNA, 32 nt, Human
gcugaggaaccucuaaucaucucccauggauu

SEQ ID NO: 180392 - RNA, 23 nt, Human
gcugaggaaggagaaucgcuuga

SEQ ID NO: 180393 - RNA, 24 nt, Human
gcugaggaaggagaaucgcuugag

SEQ ID NO: 180394 - RNA, 23 nt, Human
gcugaggaaggagaauugcuuga

SEQ ID NO: 180395 - RNA, 32 nt, Human
gcugaggaaggagaggaugacagagacagcgc

SEQ ID NO: 180396 - RNA, 24 nt, Human
gcugaggaaggaggaucgcuugag

SEQ ID NO: 180397 - RNA, 32 nt, Human
gcugaggaaguuauugugcuucugcuggaagg

SEQ ID NO: 180398 - RNA, 32 nt, Human
gcugaggaauccaagaaaauggccaguaagau

SEQ ID NO: 180399 - RNA, 32 nt, Human
gcugaggacagcacggcagcagacaagucagg

SEQ ID NO: 180400 - RNA, 32 nt, Human
gcugaggacaggcuggcgccuccacccacccu

SEQ ID NO: 180401 - RNA, 32 nt, Human
gcugaggacagggcuguggcuggagaaccugc

SEQ ID NO: 180402 - RNA, 32 nt, Human
gcugaggacauggagccaguugcccaaugaca

SEQ ID NO: 180403 - RNA, 25 nt, Human
gcugaggaccaaggcguguccccug

SEQ ID NO: 180404 - RNA, 32 nt, Human
gcugaggaccccuccaggccccucucuccugg

SEQ ID NO: 180405 - RNA, 31 nt, Human
gcugaggacguacuggucagccuggcugugu

SEQ ID NO: 180406 - RNA, 32 nt, Human
gcugaggacugcacgccgcugugcggaagccc

SEQ ID NO: 180407 - RNA, 32 nt, Human
gcugaggagaugggugcgguccucagugagcc

SEQ ID NO: 180408 - RNA, 32 nt, Human
gcugaggagccauccugucuucugcuugagug

SEQ ID NO: 180409 - RNA, 22 nt, Human
gcugaggagcccgccccaggcc

SEQ ID NO: 180410 - RNA, 26 nt, Human
gcugaggagcgccuggcugggcccug

SEQ ID NO: 180411 - RNA, 32 nt, Human
gcugaggagcuggccaagugacuugugccagc

SEQ ID NO: 180412 - RNA, 32 nt, Human
gcugaggaggacaaggugaaccaccugaccaa

SEQ ID NO: 180413 - RNA, 32 nt, Human
gcugaggaggcugaagguagugagggcaagug

SEQ ID NO: 180414 - RNA, 20 nt, Human
gcugaggaggggccugggca

SEQ ID NO: 180415 - RNA, 32 nt, Human
gcugaggaggguggaucacuugaggccaggaa

SEQ ID NO: 180416 - RNA, 32 nt, Human
gcugaggaggguggaucauuugaggccaggag

SEQ ID NO: 180417 - RNA, 23 nt, Human
gcugaggaguccuguguuccccc

SEQ ID NO: 180418 - RNA, 32 nt, Human
gcugaggaguguuaaaguagaagauugagaug

SEQ ID NO: 180419 - RNA, 23 nt, Human
gcugaggcaaaagaauugcuuga

SEQ ID NO: 180420 - RNA, 24 nt, Human
gcugaggcaacaagaaucgcuuga

SEQ ID NO: 180421 - RNA, 23 nt, Human
gcugaggcaagaaaaucgcuuga

SEQ ID NO: 180422 - RNA, 24 nt, Human
gcugaggcaagaagaucacuugag

SEQ ID NO: 180423 - RNA, 23 nt, Human
gcugaggcaagagaaucacuuga

SEQ ID NO: 180424 - RNA, 23 nt, Human
gcugaggcaagagaaucgcuuga

SEQ ID NO: 180425 - RNA, 23 nt, Human
gcugaggcaagagaaucucuuga

SEQ ID NO: 180426 - RNA, 24 nt, Human
gcugaggcaagagaauuacuugag

SEQ ID NO: 180427 - RNA, 23 nt, Human
gcugaggcaagagaauugcuuga

SEQ ID NO: 180428 - RNA, 23 nt, Human
gcugaggcaagagaguugcuuga

SEQ ID NO: 180429 - RNA, 24 nt, Human
gcugaggcaagaggaucacuugag

SEQ ID NO: 180430 - RNA, 23 nt, Human
gcugaggcaagaggauccuugag

SEQ ID NO: 180431 - RNA, 24 nt, Human
gcugaggcaagaggaucgcuugag

SEQ ID NO: 180432 - RNA, 32 nt, Human
gcugaggcaagucgacauagcucacagggaac

SEQ ID NO: 180433 - RNA, 24 nt, Human
gcugaggcaaguggaucacuugag

SEQ ID NO: 180434 - RNA, 23 nt, Human
gcugaggcacaagaaucgcuuga

SEQ ID NO: 180435 - RNA, 24 nt, Human
gcugaggcacaagaaucgcuugag

SEQ ID NO: 180436 - RNA, 23 nt, Human
gcugaggcacaagaauugcuuga

SEQ ID NO: 180437 - RNA, 23 nt, Human
gcugaggcacgagaaucacuuga

SEQ ID NO: 180438 - RNA, 24 nt, Human
gcugaggcacgagaaucacuugag

SEQ ID NO: 180439 - RNA, 23 nt, Human
gcugaggcacgagaaucgcuuga

SEQ ID NO: 180440 - RNA, 24 nt, Human
gcugaggcacgagaaucgcuugag

SEQ ID NO: 180441 - RNA, 24 nt, Human
gcugaggcacgagaaucgcuuggg

SEQ ID NO: 180442 - RNA, 23 nt, Human
gcugaggcacgagaauugcuuga

SEQ ID NO: 180443 - RNA, 23 nt, Human
gcugaggcacgagauucacuuga

SEQ ID NO: 180444 - RNA, 24 nt, Human
gcugaggcacuagaaucgcuugag

SEQ ID NO: 180445 - RNA, 32 nt, Human
gcugaggcacuucuuuuucagaugccaauaaa

SEQ ID NO: 180446 - RNA, 32 nt, Human
gcugaggcagaacucacugggggugggcaguu

SEQ ID NO: 180447 - RNA, 20 nt, Human
gcugaggcagaacugcuuga

SEQ ID NO: 180448 - RNA, 24 nt, Human
gcugaggcagaagaauagcuugag

SEQ ID NO: 180449 - RNA, 23 nt, Human
gcugaggcagaagaaucacuuga

SEQ ID NO: 180450 - RNA, 23 nt, Human
gcugaggcagaagaaucgcuuga

SEQ ID NO: 180451 - RNA, 24 nt, Human
gcugaggcagaagaaucgcuugag

SEQ ID NO: 180452 - RNA, 23 nt, Human
gcugaggcagaagaaucguuuga

SEQ ID NO: 180453 - RNA, 23 nt, Human
gcugaggcagaagaauggcuuga

SEQ ID NO: 180454 - RNA, 24 nt, Human
gcugaggcagaaggaucacuggag

SEQ ID NO: 180455 - RNA, 24 nt, Human
gcugaggcagaaggaucacuugag

SEQ ID NO: 180456 - RNA, 24 nt, Human
gcugaggcagaaggaucccuugag

SEQ ID NO: 180457 - RNA, 23 nt, Human
gcugaggcagaauaaucgcuuga

SEQ ID NO: 180458 - RNA, 20 nt, Human
gcugaggcagaauugcuuga

SEQ ID NO: 180459 - RNA, 22 nt, Human
gcugaggcagagaaucacuuga

SEQ ID NO: 180460 - RNA, 22 nt, Human
gcugaggcagagaauugcuuga

SEQ ID NO: 180461 - RNA, 32 nt, Human
gcugaggcagagaauugcuugaacccuggagg

SEQ ID NO: 180462 - RNA, 23 nt, Human
gcugaggcagcagaaucacuuga

SEQ ID NO: 180463 - RNA, 23 nt, Human
gcugaggcaggaaaaucacuuga

SEQ ID NO: 180464 - RNA, 23 nt, Human
gcugaggcaggaaaaucgcuuga

SEQ ID NO: 180465 - RNA, 23 nt, Human
gcugaggcaggaaaauugcuuga

SEQ ID NO: 180466 - RNA, 24 nt, Human
gcugaggcaggaagaaucgcuuga

SEQ ID NO: 180467 - RNA, 24 nt, Human
gcugaggcaggaagauagcuugag

SEQ ID NO: 180468 - RNA, 23 nt, Human
gcugaggcaggaagaucacuuga

SEQ ID NO: 180469 - RNA, 21 nt, Human
gcugaggcaggaagaucgcuu

SEQ ID NO: 180470 - RNA, 21 nt, Human
gcugaggcaggaaucgcuuga

SEQ ID NO: 180471 - RNA, 24 nt, Human
gcugaggcaggagaaacaccugag

SEQ ID NO: 180472 - RNA, 21 nt, Human
gcugaggcaggagaaccgcuu

SEQ ID NO: 180473 - RNA, 23 nt, Human
gcugaggcaggagaaccgcuuga

SEQ ID NO: 180474 - RNA, 23 nt, Human
gcugaggcaggagaacuacuuga

SEQ ID NO: 180475 - RNA, 23 nt, Human
gcugaggcaggagaacugcuuga

SEQ ID NO: 180476 - RNA, 23 nt, Human
gcugaggcaggagaauagccuga

SEQ ID NO: 180477 - RNA, 23 nt, Human
gcugaggcaggagaauagcuuga

SEQ ID NO: 180478 - RNA, 23 nt, Human
gcugaggcaggagaaucaauuga

SEQ ID NO: 180479 - RNA, 23 nt, Human
gcugaggcaggagaaucacuaga

SEQ ID NO: 180480 - RNA, 23 nt, Human
gcugaggcaggagaaucacucga

SEQ ID NO: 180481 - RNA, 24 nt, Human
gcugaggcaggagaaucacuucag

SEQ ID NO: 180482 - RNA, 22 nt, Human
gcugaggcaggagaaucacuug

SEQ ID NO: 180483 - RNA, 23 nt, Human
gcugaggcaggagaaucacuuga

SEQ ID NO: 180484 - RNA, 24 nt, Human
gcugaggcaggagaaucacuugag

SEQ ID NO: 180485 - RNA, 23 nt, Human
gcugaggcaggagaaucacuugg

SEQ ID NO: 180486 - RNA, 23 nt, Human
gcugaggcaggagaaucaguuga

SEQ ID NO: 180487 - RNA, 23 nt, Human
gcugaggcaggagaaucauuuga

SEQ ID NO: 180488 - RNA, 23 nt, Human
gcugaggcaggagaaucccuuga

SEQ ID NO: 180489 - RNA, 23 nt, Human
gcugaggcaggagaaucgccuga

SEQ ID NO: 180490 - RNA, 23 nt, Human
gcugaggcaggagaaucgcguga

SEQ ID NO: 180491 - RNA, 23 nt, Human
gcugaggcaggagaaucgcuaga

SEQ ID NO: 180492 - RNA, 23 nt, Human
gcugaggcaggagaaucgcugga

SEQ ID NO: 180493 - RNA, 21 nt, Human
gcugaggcaggagaaucgcuu

SEQ ID NO: 180494 - RNA, 23 nt, Human
gcugaggcaggagaaucgcuuga

SEQ ID NO: 180495 - RNA, 24 nt, Human
gcugaggcaggagaaucgcuugag

SEQ ID NO: 180496 - RNA, 23 nt, Human
gcugaggcaggagaaucgcuugg

SEQ ID NO: 180497 - RNA, 23 nt, Human
gcugaggcaggagaaucguuuga

SEQ ID NO: 180498 - RNA, 23 nt, Human
gcugaggcaggagaaucucuuga

SEQ ID NO: 180499 - RNA, 23 nt, Human
gcugaggcaggagaauggccuga

SEQ ID NO: 180500 - RNA, 23 nt, Human
gcugaggcaggagaauggcuuga

SEQ ID NO: 180501 - RNA, 23 nt, Human
gcugaggcaggagaauuacuuga

SEQ ID NO: 180502 - RNA, 23 nt, Human
gcugaggcaggagaauugcuuga

SEQ ID NO: 180503 - RNA, 24 nt, Human
gcugaggcaggagaauugcuugag

SEQ ID NO: 180504 - RNA, 23 nt, Human
gcugaggcaggagacucgcuuga

SEQ ID NO: 180505 - RNA, 25 nt, Human
gcugaggcaggagagaaucgcuuga

SEQ ID NO: 180506 - RNA, 23 nt, Human
gcugaggcaggagagucacuuga

SEQ ID NO: 180507 - RNA, 22 nt, Human
gcugaggcaggagagugcuuga

SEQ ID NO: 180508 - RNA, 23 nt, Human
gcugaggcaggagauucgccuga

SEQ ID NO: 180509 - RNA, 23 nt, Human
gcugaggcaggagauucgcuuga

SEQ ID NO: 180510 - RNA, 24 nt, Human
gcugaggcaggaggaccgcuugag

SEQ ID NO: 180511 - RNA, 24 nt, Human
gcugaggcaggaggacugcuugag

SEQ ID NO: 180512 - RNA, 24 nt, Human
gcugaggcaggaggauagcuugag

SEQ ID NO: 180513 - RNA, 24 nt, Human
gcugaggcaggaggaucaccugag

SEQ ID NO: 180514 - RNA, 24 nt, Human
gcugaggcaggaggaucacucaag

SEQ ID NO: 180515 - RNA, 24 nt, Human
gcugaggcaggaggaucacucgag

SEQ ID NO: 180516 - RNA, 21 nt, Human
gcugaggcaggaggaucacuu

SEQ ID NO: 180517 - RNA, 23 nt, Human
gcugaggcaggaggaucacuuga

SEQ ID NO: 180518 - RNA, 24 nt, Human
gcugaggcaggaggaucacuugag

SEQ ID NO: 180519 - RNA, 23 nt, Human
gcugaggcaggaggaucaguuga

SEQ ID NO: 180520 - RNA, 24 nt, Human
gcugaggcaggaggaucauuugag

SEQ ID NO: 180521 - RNA, 24 nt, Human
gcugaggcaggaggaucccuugag

SEQ ID NO: 180522 - RNA, 24 nt, Human
gcugaggcaggaggaucgccugag

SEQ ID NO: 180523 - RNA, 21 nt, Human
gcugaggcaggaggaucgcuu

SEQ ID NO: 180524 - RNA, 23 nt, Human
gcugaggcaggaggaucgcuuga

SEQ ID NO: 180525 - RNA, 24 nt, Human
gcugaggcaggaggaucgcuugag

SEQ ID NO: 180526 - RNA, 24 nt, Human
gcugaggcaggaggaucucuugag

SEQ ID NO: 180527 - RNA, 24 nt, Human
gcugaggcaggaggauuacuugag

SEQ ID NO: 180528 - RNA, 24 nt, Human
gcugaggcaggaggauugccugag

SEQ ID NO: 180529 - RNA, 23 nt, Human
gcugaggcaggaggauugcucga

SEQ ID NO: 180530 - RNA, 23 nt, Human
gcugaggcaggaggauugcuuga

SEQ ID NO: 180531 - RNA, 24 nt, Human
gcugaggcaggaggauugcuugag

SEQ ID NO: 180532 - RNA, 24 nt, Human
gcugaggcaggaggcucacuugag

SEQ ID NO: 180533 - RNA, 32 nt, Human
gcugaggcaggaguuugggaccagccugggcu

SEQ ID NO: 180534 - RNA, 23 nt, Human
gcugaggcaggauaaucacuuga

SEQ ID NO: 180535 - RNA, 24 nt, Human
gcugaggcaggcagaucaccugag

SEQ ID NO: 180536 - RNA, 24 nt, Human
gcugaggcaggcagaucacuugag

SEQ ID NO: 180537 - RNA, 24 nt, Human
gcugaggcaggcagaucgcuugag

SEQ ID NO: 180538 - RNA, 24 nt, Human
gcugaggcaggcggaucaccugag

SEQ ID NO: 180539 - RNA, 32 nt, Human
gcugaggcaggcggaucacgaggucaggagau

SEQ ID NO: 180540 - RNA, 24 nt, Human
gcugaggcaggcggaucacuugag

SEQ ID NO: 180541 - RNA, 32 nt, Human
gcugaggcaggcggaucaugaggucaggagau

SEQ ID NO: 180542 - RNA, 24 nt, Human
gcugaggcaggcggaucgcuugag

SEQ ID NO: 180543 - RNA, 32 nt, Human
gcugaggcaggcggcaggcguggugcacagga

SEQ ID NO: 180544 - RNA, 24 nt, Human
gcugaggcaggcgggucaccugag

SEQ ID NO: 180545 - RNA, 24 nt, Human
gcugaggcagggagaaucgcuuga

SEQ ID NO: 180546 - RNA, 24 nt, Human
gcugaggcagggagaauugcuuga

SEQ ID NO: 180547 - RNA, 23 nt, Human
gcugaggcaggggaaucacuuga

SEQ ID NO: 180548 - RNA, 23 nt, Human
gcugaggcaggggaaucgcuuga

SEQ ID NO: 180549 - RNA, 24 nt, Human
gcugaggcagggggaucgcuugag

SEQ ID NO: 180550 - RNA, 23 nt, Human
gcugaggcaggugaaucacuuga

SEQ ID NO: 180551 - RNA, 23 nt, Human
gcugaggcaggugaaucgcuuga

SEQ ID NO: 180552 - RNA, 24 nt, Human
gcugaggcagguggaucaccugag

SEQ ID NO: 180553 - RNA, 24 nt, Human
gcugaggcagguggaucacuugag

SEQ ID NO: 180554 - RNA, 24 nt, Human
gcugaggcagguggaucgccugag

SEQ ID NO: 180555 - RNA, 23 nt, Human
gcugaggcaguagaaucacuuga

SEQ ID NO: 180556 - RNA, 23 nt, Human
gcugaggcaguagaaucgcuuga

SEQ ID NO: 180557 - RNA, 32 nt, Human
gcugaggcagugugguuauguucccagcagug

SEQ ID NO: 180558 - RNA, 24 nt, Human
gcugaggcauaagaauugcuugag

SEQ ID NO: 180559 - RNA, 32 nt, Human
gcugaggcauccuuccucacaccaggcuugcc

SEQ ID NO: 180560 - RNA, 23 nt, Human
gcugaggcaugagaaucacuuga

SEQ ID NO: 180561 - RNA, 23 nt, Human
gcugaggcaugagaaucgcuuga

SEQ ID NO: 180562 - RNA, 24 nt, Human
gcugaggcaugagaaucgcuugag

SEQ ID NO: 180563 - RNA, 24 nt, Human
gcugaggcaugagaaucgcuuggg

SEQ ID NO: 180564 - RNA, 23 nt, Human
gcugaggcaugagaauugcuuga

SEQ ID NO: 180565 - RNA, 24 nt, Human
gcugaggcaugagaauugcuugag

SEQ ID NO: 180566 - RNA, 23 nt, Human
gcugaggcaugaggaucucuuga

SEQ ID NO: 180567 - RNA, 24 nt, Human
gcugaggcauggagaaucgcuuga

SEQ ID NO: 180568 - RNA, 32 nt, Human
gcugaggccacagcuggugaacagcucagcag

SEQ ID NO: 180569 - RNA, 18 nt, Human
gcugaggccagcugccca

SEQ ID NO: 180570 - RNA, 32 nt, Human
gcugaggccagcugcccacugagucuccuguc

SEQ ID NO: 180571 - RNA, 32 nt, Human
gcugaggccccgaggaucggggcggcaggucg

SEQ ID NO: 180572 - RNA, 24 nt, Human
gcugaggcccgagaaucgcuugag

SEQ ID NO: 180573 - RNA, 32 nt, Human
gcugaggccggccauggucauggaagugggca

SEQ ID NO: 180574 - RNA, 32 nt, Human
gcugaggccugagacucgcuugaacccagggg

SEQ ID NO: 180575 - RNA, 32 nt, Human
gcugaggccugcugugcugcagucccaggagg

SEQ ID NO: 180576 - RNA, 23 nt, Human
gcugaggcgagagaaucgcuuga

SEQ ID NO: 180577 - RNA, 24 nt, Human
gcugaggcgagagaaucgcuugag

SEQ ID NO: 180578 - RNA, 23 nt, Human
gcugaggcgagaggauugcuuga

SEQ ID NO: 180579 - RNA, 23 nt, Human
gcugaggcgagauaaucgcuuga

SEQ ID NO: 180580 - RNA, 24 nt, Human
gcugaggcgaguggaucacuugag

SEQ ID NO: 180581 - RNA, 21 nt, Human
gcugaggcgcacugagcaucc

SEQ ID NO: 180582 - RNA, 24 nt, Human
gcugaggcggaagauucgcuugag

SEQ ID NO: 180583 - RNA, 22 nt, Human
gcugaggcggagaauugcuuga

SEQ ID NO: 180584 - RNA, 23 nt, Human
gcugaggcggaggaccgccugag

SEQ ID NO: 180585 - RNA, 23 nt, Human
gcugaggcggcaggaucacuuga

SEQ ID NO: 180586 - RNA, 32 nt, Human
gcugaggcggcugaggcggcugaggggcugag

SEQ ID NO: 180587 - RNA, 24 nt, Human
gcugaggcgggagaaucaccugag

SEQ ID NO: 180588 - RNA, 23 nt, Human
gcugaggcgggagaaucacuuga

SEQ ID NO: 180589 - RNA, 23 nt, Human
gcugaggcgggagaaucccuuga

SEQ ID NO: 180590 - RNA, 23 nt, Human
gcugaggcgggagaaucgcuuga

SEQ ID NO: 180591 - RNA, 23 nt, Human
gcugaggcgggagaauugcuuga

SEQ ID NO: 180592 - RNA, 23 nt, Human
gcugaggcgggagacucgcuuga

SEQ ID NO: 180593 - RNA, 24 nt, Human
gcugaggcgggaggaucacaugag

SEQ ID NO: 180594 - RNA, 24 nt, Human
gcugaggcgggaggaucacuugag

SEQ ID NO: 180595 - RNA, 24 nt, Human
gcugaggcgggaggaucgccagag

SEQ ID NO: 180596 - RNA, 24 nt, Human
gcugaggcgggaggaucgcuugag

SEQ ID NO: 180597 - RNA, 24 nt, Human
gcugaggcgggaggauuacuugag

SEQ ID NO: 180598 - RNA, 24 nt, Human
gcugaggcgggaggauugcuugag

SEQ ID NO: 180599 - RNA, 24 nt, Human
gcugaggcgggcagaucaccugag

SEQ ID NO: 180600 - RNA, 24 nt, Human
gcugaggcgggcagaucacuugag

SEQ ID NO: 180601 - RNA, 24 nt, Human
gcugaggcgggcggaucaccugag

SEQ ID NO: 180602 - RNA, 24 nt, Human
gcugaggcgggcggaucacuugag

SEQ ID NO: 180603 - RNA, 32 nt, Human
gcugaggcgggugaggugaggagcagccccuc

SEQ ID NO: 180604 - RNA, 24 nt, Human
gcugaggcggguggaucaccugag

SEQ ID NO: 180605 - RNA, 23 nt, Human
gcugaggcggguggaucacuuga

SEQ ID NO: 180606 - RNA, 24 nt, Human
gcugaggcggguggaucacuugag

SEQ ID NO: 180607 - RNA, 23 nt, Human
gcugaggcgugagaaucgcuuga

SEQ ID NO: 180608 - RNA, 32 nt, Human
gcugaggcugcugguggccauguuccuaccag

SEQ ID NO: 180609 - RNA, 21 nt, Human
gcugaggcugcugucccggcg

SEQ ID NO: 180610 - RNA, 20 nt, Human
gcugaggcuggagugcagug

SEQ ID NO: 180611 - RNA, 24 nt, Human
gcugaggcuggagugcagugaugu

SEQ ID NO: 180612 - RNA, 21 nt, Human
gcugaggcuggagugcagugg

SEQ ID NO: 180613 - RNA, 32 nt, Human
gcugaggcuggcugccuggugggauggccuga

SEQ ID NO: 180614 - RNA, 32 nt, Human
gcugaggcugggagggagggccauugggcgug

SEQ ID NO: 180615 - RNA, 32 nt, Human
gcugaggcugggcagaggugggugagaagagg

SEQ ID NO: 180616 - RNA, 32 nt, Human
gcugagggacagacugccugcucaaguggguc

SEQ ID NO: 180617 - RNA, 32 nt, Human
gcugagggacuugggaaucaggcaggugcuuu

SEQ ID NO: 180618 - RNA, 32 nt, Human
gcugagggagaaucacuugggcucaggagcuu

SEQ ID NO: 180619 - RNA, 32 nt, Human
gcugagggagagacugaggugcagcagauggc

SEQ ID NO: 180620 - RNA, 32 nt, Human
gcugagggagagaggugggaggucagaggaga

SEQ ID NO: 180621 - RNA, 21 nt, Human
gcugagggagcuggcagagga

SEQ ID NO: 180622 - RNA, 32 nt, Human
gcugagggaggagaggaugcagagggaaggga

SEQ ID NO: 180623 - RNA, 32 nt, Human
gcugagggauuuucacagugugcuccagaugg

SEQ ID NO: 180624 - RNA, 24 nt, Human
gcugagggcaggagaauugcuuga

SEQ ID NO: 180625 - RNA, 32 nt, Human
gcugagggcaggcaaagccugugugacugugg

SEQ ID NO: 180626 - RNA, 31 nt, Human
gcugagggccaggaaagaugugaaaaacucu

SEQ ID NO: 180627 - RNA, 31 nt, Human
gcugagggccgaccacccaugccaagggaau

SEQ ID NO: 180628 - RNA, 19 nt, Human
gcugagggccuccuuucca

SEQ ID NO: 180629 - RNA, 32 nt, Human
gcugagggcucagaaaauaccugcuccgggug

SEQ ID NO: 180630 - RNA, 21 nt, Human
gcugagggcugcagcccgugg

SEQ ID NO: 180631 - RNA, 32 nt, Human
gcugaggggagaaaggacauggccuuccccgc

SEQ ID NO: 180632 - RNA, 32 nt, Human
gcugaggggaggaucacuggagcccaggaguu

SEQ ID NO: 180633 - RNA, 32 nt, Human
gcugaggggcaggauuuucagcagagcgucgg

SEQ ID NO: 180634 - RNA, 32 nt, Human
gcugaggggcaggcacaggaguccuggcugag

SEQ ID NO: 180635 - RNA, 32 nt, Human
gcugaggggcaggcggcugcaggcuaggggcg

SEQ ID NO: 180636 - RNA, 32 nt, Human
gcugaggggcuguucaccaccauccucguucu

SEQ ID NO: 180637 - RNA, 32 nt, Human
gcugaggggguggaucaccugaggucgggagu

SEQ ID NO: 180638 - RNA, 32 nt, Human
gcugagggguaagagguuguuguaguuguccu

SEQ ID NO: 180639 - RNA, 26 nt, Human
gcugagggguuggaaauugggccccg

SEQ ID NO: 180640 - RNA, 31 nt, Human
gcugaggguaacaaggaacucacuuggcagu

SEQ ID NO: 180641 - RNA, 32 nt, Human
gcugagggucugagagcaggacaggaaaaccc

SEQ ID NO: 180642 - RNA, 32 nt, Human
gcugagggucuggcuguuuguguccuugggcg

SEQ ID NO: 180643 - RNA, 20 nt, Human
gcugagggugaugacuguga

SEQ ID NO: 180644 - RNA, 23 nt, Human
gcugaggguggagaaucgcuuga

SEQ ID NO: 180645 - RNA, 32 nt, Human
gcugaggguuacuguaucuagcaggugaugga

SEQ ID NO: 180646 - RNA, 32 nt, Human
gcugagguacaagaaaggcaccugcaaggacu

SEQ ID NO: 180647 - RNA, 23 nt, Human
gcugagguaggagaaucacuuga

SEQ ID NO: 180648 - RNA, 23 nt, Human
gcugagguaggagaaucgcuuga

SEQ ID NO: 180649 - RNA, 23 nt, Human
gcugagguaggagaaucguuuga

SEQ ID NO: 180650 - RNA, 25 nt, Human
gcugagguaggagaauucgcuugag

SEQ ID NO: 180651 - RNA, 23 nt, Human
gcugagguaggagaauugcuuga

SEQ ID NO: 180652 - RNA, 24 nt, Human
gcugagguaggaggacugcuugag

SEQ ID NO: 180653 - RNA, 24 nt, Human
gcugagguaggaggaucaccugag

SEQ ID NO: 180654 - RNA, 24 nt, Human
gcugagguaggaggaucacgugag

SEQ ID NO: 180655 - RNA, 21 nt, Human
gcugagguaggaggaucgcuu

SEQ ID NO: 180656 - RNA, 24 nt, Human
gcugagguaggaggaucgcuugag

SEQ ID NO: 180657 - RNA, 24 nt, Human
gcugagguaggaggauugcuugag

SEQ ID NO: 180658 - RNA, 24 nt, Human
gcugagguaggcagaucacuugag

SEQ ID NO: 180659 - RNA, 32 nt, Human
gcugagguaguuucaguccaucacaguucauc

SEQ ID NO: 180660 - RNA, 32 nt, Human
gcugagguauaagcccugggccccagaucccu

SEQ ID NO: 180661 - RNA, 23 nt, Human
gcugagguaugagaaucgcuuga

SEQ ID NO: 180662 - RNA, 24 nt, Human
gcugagguaugaggauugcuugag

SEQ ID NO: 180663 - RNA, 24 nt, Human
gcugaggucagaggauggcuugag

SEQ ID NO: 180664 - RNA, 32 nt, Human
gcugaggucaguuucaggagggugaagcugau

SEQ ID NO: 180665 - RNA, 32 nt, Human
gcugagguccagggauggacacagguccgcug

SEQ ID NO: 180666 - RNA, 24 nt, Human
gcugaggucggucggaccaacgga

SEQ ID NO: 180667 - RNA, 24 nt, Human
gcugaggugaaaggaucacuugag

SEQ ID NO: 180668 - RNA, 24 nt, Human
gcugaggugaaaggauugcuugag

SEQ ID NO: 180669 - RNA, 24 nt, Human
gcugaggugagaggaucacuugag

SEQ ID NO: 180670 - RNA, 24 nt, Human
gcugaggugagagggucacuugag

SEQ ID NO: 180671 - RNA, 32 nt, Human
gcugaggugagccuguggcucagucacaguuu

SEQ ID NO: 180672 - RNA, 22 nt, Human
gcugaggugaggaucacuugag

SEQ ID NO: 180673 - RNA, 32 nt, Human
gcugaggugaggaucacuugagcccaggaguu

SEQ ID NO: 180674 - RNA, 21 nt, Human
gcugaggugcuggccggccgg

SEQ ID NO: 180675 - RNA, 24 nt, Human
gcugagguggaaggaucacuugag

SEQ ID NO: 180676 - RNA, 24 nt, Human
gcugagguggaaggaucgcuugag

SEQ ID NO: 180677 - RNA, 22 nt, Human
gcugagguggagaauugcuuga

SEQ ID NO: 180678 - RNA, 32 nt, Human
gcugagguggaggcggagggaggcggcggcgg

SEQ ID NO: 180679 - RNA, 24 nt, Human
gcugaggugggaaaaucacuugag

SEQ ID NO: 180680 - RNA, 24 nt, Human
gcugaggugggaaaaugacuugag

SEQ ID NO: 180681 - RNA, 24 nt, Human
gcugaggugggaagaucacuugag

SEQ ID NO: 180682 - RNA, 24 nt, Human
gcugaggugggaagaucucuugag

SEQ ID NO: 180683 - RNA, 23 nt, Human
gcugaggugggaagauugcuuga

SEQ ID NO: 180684 - RNA, 22 nt, Human
gcugaggugggacugggcccug

SEQ ID NO: 180685 - RNA, 24 nt, Human
gcugaggugggagaaucacuugag

SEQ ID NO: 180686 - RNA, 23 nt, Human
gcugaggugggagaaucgcuuga

SEQ ID NO: 180687 - RNA, 24 nt, Human
gcugaggugggagaaucgcuugag

SEQ ID NO: 180688 - RNA, 24 nt, Human
gcugaggugggagaauugccugag

SEQ ID NO: 180689 - RNA, 23 nt, Human
gcugaggugggagaauugcuuga

SEQ ID NO: 180690 - RNA, 24 nt, Human
gcugaggugggagaauugcuugag

SEQ ID NO: 180691 - RNA, 24 nt, Human
gcugaggugggaggauaacuugag

SEQ ID NO: 180692 - RNA, 24 nt, Human
gcugaggugggaggaucacaugag

SEQ ID NO: 180693 - RNA, 24 nt, Human
gcugaggugggaggaucaccugag

SEQ ID NO: 180694 - RNA, 24 nt, Human
gcugaggugggaggaucacuucag

SEQ ID NO: 180695 - RNA, 23 nt, Human
gcugaggugggaggaucacuuga

SEQ ID NO: 180696 - RNA, 24 nt, Human
gcugaggugggaggaucacuugag

SEQ ID NO: 180697 - RNA, 24 nt, Human
gcugaggugggaggaucacuuggg

SEQ ID NO: 180698 - RNA, 24 nt, Human
gcugaggugggaggaucauuugag

SEQ ID NO: 180699 - RNA, 24 nt, Human
gcugaggugggaggaucccuugag

SEQ ID NO: 180700 - RNA, 23 nt, Human
gcugaggugggaggaucgccuga

SEQ ID NO: 180701 - RNA, 24 nt, Human
gcugaggugggaggaucgccugag

SEQ ID NO: 180702 - RNA, 24 nt, Human
gcugaggugggaggaucgcuggag

SEQ ID NO: 180703 - RNA, 22 nt, Human
gcugaggugggaggaucgcuug

SEQ ID NO: 180704 - RNA, 23 nt, Human
gcugaggugggaggaucgcuuga

SEQ ID NO: 180705 - RNA, 24 nt, Human
gcugaggugggaggaucgcuugag

SEQ ID NO: 180706 - RNA, 24 nt, Human
gcugaggugggaggaucgguugag

SEQ ID NO: 180707 - RNA, 24 nt, Human
gcugaggugggaggaucucuugag

SEQ ID NO: 180708 - RNA, 23 nt, Human
gcugaggugggaggaugacuuga

SEQ ID NO: 180709 - RNA, 23 nt, Human
gcugaggugggaggauggcuuga

SEQ ID NO: 180710 - RNA, 24 nt, Human
gcugaggugggaggauggcuugag

SEQ ID NO: 180711 - RNA, 24 nt, Human
gcugaggugggaggauugccugag

SEQ ID NO: 180712 - RNA, 23 nt, Human
gcugaggugggaggauugcuuga

SEQ ID NO: 180713 - RNA, 24 nt, Human
gcugaggugggaggauugcuugag

SEQ ID NO: 180714 - RNA, 24 nt, Human
gcugaggugggagggucgcuugag

SEQ ID NO: 180715 - RNA, 24 nt, Human
gcugaggugggaggguugcuugag

SEQ ID NO: 180716 - RNA, 24 nt, Human
gcugaggugggaugaucacuugag

SEQ ID NO: 180717 - RNA, 32 nt, Human
gcugaggugggcagaucacgagcucaggagau

SEQ ID NO: 180718 - RNA, 24 nt, Human
gcugaggugggcagaucacuugag

SEQ ID NO: 180719 - RNA, 24 nt, Human
gcugaggugggcggaucacuugag

SEQ ID NO: 180720 - RNA, 24 nt, Human
gcugaggugggcggaucgcucgag

SEQ ID NO: 180721 - RNA, 24 nt, Human
gcugagguggggagaauugcuuga

SEQ ID NO: 180722 - RNA, 24 nt, Human
gcugaggugggggaaucacuugag

SEQ ID NO: 180723 - RNA, 32 nt, Human
gcugaggugggggugcagaaaagggguccucg

SEQ ID NO: 180724 - RNA, 24 nt, Human
gcugagguggguagaucacuugag

SEQ ID NO: 180725 - RNA, 24 nt, Human
gcugagguggguggaucacuugag

SEQ ID NO: 180726 - RNA, 24 nt, Human
gcugagguggguggaucgccugag

SEQ ID NO: 180727 - RNA, 32 nt, Human
gcugagguggguggaugccgaggugaguggau

SEQ ID NO: 180728 - RNA, 19 nt, Human
gcugaggugguggagggag

SEQ ID NO: 180729 - RNA, 32 nt, Human
gcugagguguccauguugucugccuuuguaua

SEQ ID NO: 180730 - RNA, 24 nt, Human
gcugagguugcaggaucgcuugag

SEQ ID NO: 180731 - RNA, 24 nt, Human
gcugagguuggaggauggcuugag

SEQ ID NO: 180732 - RNA, 24 nt, Human
gcugagguuggaggauugcuugag

SEQ ID NO: 180733 - RNA, 32 nt, Human
gcugagguuggcauuuuagugauuauuaagca

SEQ ID NO: 180734 - RNA, 32 nt, Human
gcugagguuuacuuccuugagaucacagacag

SEQ ID NO: 180735 - RNA, 21 nt, Human
gcugaguaaaaccaccaaaga

SEQ ID NO: 180736 - RNA, 21 nt, Human
gcugaguaacaggccaccaag

SEQ ID NO: 180737 - RNA, 21 nt, Human
gcugaguaauggucccccaag

SEQ ID NO: 180738 - RNA, 32 nt, Human
gcugaguauccagcaagagugaccggggugaa

SEQ ID NO: 180739 - RNA, 23 nt, Human
gcugagucaggagaaucgcuuga

SEQ ID NO: 180740 - RNA, 24 nt, Human
gcugagucaggagaauugcuugag

SEQ ID NO: 180741 - RNA, 32 nt, Human
gcugagucaucaucaucaucaucaucauuguc

SEQ ID NO: 180742 - RNA, 21 nt, Human
gcugagucccuucuccccgcc

SEQ ID NO: 180743 - RNA, 21 nt, Human
gcugaguccuagcccuaguga

SEQ ID NO: 180744 - RNA, 32 nt, Human
gcugaguccuugcugugggaugugccaguguc

SEQ ID NO: 180745 - RNA, 20 nt, Human
gcugagucuccucuugguga

SEQ ID NO: 180746 - RNA, 31 nt, Human
gcugagucuucccuggagguugaagagagca

SEQ ID NO: 180747 - RNA, 18 nt, Human
gcugagugaacccagggu

SEQ ID NO: 180748 - RNA, 32 nt, Human
gcugagugagaaggcaguuuguggaaauggaa

SEQ ID NO: 180749 - RNA, 16 nt, Human
gcugagugagcagggg

SEQ ID NO: 180750 - RNA, 32 nt, Human
gcugagugaggaggggacacgggcccugggcc

SEQ ID NO: 180751 - RNA, 19 nt, Human
gcugagugaggggcuguga

SEQ ID NO: 180752 - RNA, 18 nt, Human
gcugagugcaccugggau

SEQ ID NO: 180753 - RNA, 20 nt, Human
gcugagugcacuggcaggau

SEQ ID NO: 180754 - RNA, 32 nt, Human
gcugagugccaggcuuccucuccugggaagag

SEQ ID NO: 180755 - RNA, 32 nt, Human
gcugagugccuccuggguuuccugagacuugu

SEQ ID NO: 180756 - RNA, 19 nt, Human
gcugagugcugaguguaac

SEQ ID NO: 180757 - RNA, 24 nt, Human
gcugagugcugccgccccuuccca

SEQ ID NO: 180758 - RNA, 32 nt, Human
gcugaguggagaggacuuuuccccuggccucu

SEQ ID NO: 180759 - RNA, 20 nt, Human
gcugaguggcccgugugaca

SEQ ID NO: 180760 - RNA, 23 nt, Human
gcugagugggaugaccgcuugag

SEQ ID NO: 180761 - RNA, 32 nt, Human
gcugaguggggucugggcucugccccugcgcc

SEQ ID NO: 180762 - RNA, 20 nt, Human
gcugaguggucugacaccaa

SEQ ID NO: 180763 - RNA, 32 nt, Human
gcugaguguaccugacaguaagucuaaagaug

SEQ ID NO: 180764 - RNA, 19 nt, Human
gcugaguguggauuccaag

SEQ ID NO: 180765 - RNA, 32 nt, Human
gcugagugugggccaccaugagugggcccagc

SEQ ID NO: 180766 - RNA, 32 nt, Human
gcugaguguggugcucacgccuguaaucccag

SEQ ID NO: 180767 - RNA, 32 nt, Human
gcugaguuaaauuccagggucucagaugguua

SEQ ID NO: 180768 - RNA, 32 nt, Human
gcugaguuauggacacagcaugaacaagaugg

SEQ ID NO: 180769 - RNA, 32 nt, Human
gcugaguucagugaggacgauggagacccuug

SEQ ID NO: 180770 - RNA, 32 nt, Human
gcugaguuccagcggggguguugagaaaaagc

SEQ ID NO: 180771 - RNA, 32 nt, Human
gcugaguuccuucuuucccuuggacgcccagu

SEQ ID NO: 180772 - RNA, 32 nt, Human
gcugaguuggguggaaggugcugagagugugg

SEQ ID NO: 180773 - RNA, 21 nt, Human
gcugaguuguggcauuuucca

SEQ ID NO: 180774 - RNA, 23 nt, Human
gcugaguuuccucuucugaggca

SEQ ID NO: 180775 - RNA, 32 nt, Human
gcugaguuuugguaggagugcucaugguucug

SEQ ID NO: 180776 - RNA, 32 nt, Human
gcugauaaaagcugccuuccaggcucuuggac

SEQ ID NO: 180777 - RNA, 32 nt, Human
gcugauaagagcagccauuaccugccacuggg

SEQ ID NO: 180778 - RNA, 32 nt, Human
gcugauacaagaggcagaaacucacucaccua

SEQ ID NO: 180779 - RNA, 32 nt, Human
gcugauacacagaaaaggcugggaaacgggag

SEQ ID NO: 180780 - RNA, 32 nt, Human
gcugauacaccagcucccaaaggucccggagg

SEQ ID NO: 180781 - RNA, 32 nt, Human
gcugauagagugaguccucucccucauucauu

SEQ ID NO: 180782 - RNA, 32 nt, Human
gcugauagcuagggcuugaccaggaagucccg

SEQ ID NO: 180783 - RNA, 32 nt, Human
gcugauagugcagccaggacucuugggguggc

SEQ ID NO: 180784 - RNA, 32 nt, Human
gcugauaguugugguuuuguuuacaaauguuc

SEQ ID NO: 180785 - RNA, 32 nt, Human
gcugauaucacccaggcuggagugcaguggcg

SEQ ID NO: 180786 - RNA, 32 nt, Human
gcugauauggaagacauacauguaugcaaucc

SEQ ID NO: 180787 - RNA, 32 nt, Human
gcugauauggucuucuuuuucucccaacuucg

SEQ ID NO: 180788 - RNA, 32 nt, Human
gcugaucaacagcacuucugccacuugaaaac

SEQ ID NO: 180789 - RNA, 32 nt, Human
gcugaucacaucaccucucugccucaguuucc

SEQ ID NO: 180790 - RNA, 32 nt, Human
gcugaucaccaccaccugcuugcuccaguugu

SEQ ID NO: 180791 - RNA, 32 nt, Human
gcugaucaccucagcaaugaaugauuucaaua

SEQ ID NO: 180792 - RNA, 21 nt, Human
gcugaucauagcucacugcag

SEQ ID NO: 180793 - RNA, 32 nt, Human
gcugaucaucuuccucuucuucuucgugguag

SEQ ID NO: 180794 - RNA, 32 nt, Human
gcugaucaugccacugcacucuagccuaggcu

SEQ ID NO: 180795 - RNA, 32 nt, Human
gcugauccagcuguacuucagaaaaauaauau

SEQ ID NO: 180796 - RNA, 32 nt, Human
gcugaucccacauguguacaucaugcgagcca

SEQ ID NO: 180797 - RNA, 32 nt, Human
gcugauccucaaguaccccaguuucacacaua

SEQ ID NO: 180798 - RNA, 32 nt, Human
gcugauccucuuuuaaaaacccaagauacaau

SEQ ID NO: 180799 - RNA, 32 nt, Human
gcugauccugccucagcuguguggccaugugg

SEQ ID NO: 180800 - RNA, 24 nt, Human
gcugaucucaaacuccuggacuca

SEQ ID NO: 180801 - RNA, 32 nt, Human
gcugaucucacugcacacagccuagggcccca

SEQ ID NO: 180802 - RNA, 32 nt, Human
gcugaucucaggagaacaccugggcuagggaa

SEQ ID NO: 180803 - RNA, 24 nt, Human
gcugaucucgagcuccugggcuca

SEQ ID NO: 180804 - RNA, 32 nt, Human
gcugaucucucccugcuuugcuuuugaacugu

SEQ ID NO: 180805 - RNA, 24 nt, Human
gcugaucucuuccacgugcugcug

SEQ ID NO: 180806 - RNA, 32 nt, Human
gcugaucugagagggucucccuuuguuccuuu

SEQ ID NO: 180807 - RNA, 24 nt, Human
gcugaucuggaacuucugaccuca

SEQ ID NO: 180808 - RNA, 20 nt, Human
gcugaucuguguucccuccc

SEQ ID NO: 180809 - RNA, 24 nt, Human
gcugaucuugaacuccugggcuca

SEQ ID NO: 180810 - RNA, 32 nt, Human
gcugaucuugcacucccagccucaggugaucc

SEQ ID NO: 180811 - RNA, 20 nt, Human
gcugaugaagacccgagaca

SEQ ID NO: 180812 - RNA, 32 nt, Human
gcugaugagcaccuccaggagccucaguuucg

SEQ ID NO: 180813 - RNA, 32 nt, Human
gcugaugaggaggcggccgccccagugcugau

SEQ ID NO: 180814 - RNA, 32 nt, Human
gcugaugaggaucagagcguuuguucccccau

SEQ ID NO: 180815 - RNA, 32 nt, Human
gcugaugaggccgagugucaggaagcacuccc

SEQ ID NO: 180816 - RNA, 32 nt, Human
gcugaugaguuugccaaacuucaggauuauug

SEQ ID NO: 180817 - RNA, 32 nt, Human
gcugaugcaaagaaauuugccagucacuggaa

SEQ ID NO: 180818 - RNA, 24 nt, Human
gcugaugcaagaggaucgcuugag

SEQ ID NO: 180819 - RNA, 29 nt, Human
gcugaugcaccuccacagaggucuccuuc

SEQ ID NO: 180820 - RNA, 32 nt, Human
gcugaugcagcagaacucuugggaaaugucuu

SEQ ID NO: 180821 - RNA, 23 nt, Human
gcugaugcaugagaauugcuuga

SEQ ID NO: 180822 - RNA, 32 nt, Human
gcugaugccaggguuggcacauggaggguaca

SEQ ID NO: 180823 - RNA, 32 nt, Human
gcugaugcccugaggcugggcacaguggaaau

SEQ ID NO: 180824 - RNA, 32 nt, Human
gcugaugccuguaaucccagcacuuugggagg

SEQ ID NO: 180825 - RNA, 32 nt, Human
gcugaugcgguggcuaacaccuguaaucccag

SEQ ID NO: 180826 - RNA, 32 nt, Human
gcugaugcuaccugcuguggccgauuggggca

SEQ ID NO: 180827 - RNA, 32 nt, Human
gcugaugcuccuggcccugccccuggcggccc

SEQ ID NO: 180828 - RNA, 32 nt, Human
gcugaugcuccugguccacaaugugagaacca

SEQ ID NO: 180829 - RNA, 22 nt, Human
gcugauggacaggugucugaga

SEQ ID NO: 180830 - RNA, 32 nt, Human
gcugauggagaaagggcucccgcagaaggaac

SEQ ID NO: 180831 - RNA, 31 nt, Human
gcugauggcucaucugggccuggcuguuuua

SEQ ID NO: 180832 - RNA, 32 nt, Human
gcugauggggacggagagaggagccagucucc

SEQ ID NO: 180833 - RNA, 32 nt, Human
gcugauggggaguaaacccuggaguccgaggc

SEQ ID NO: 180834 - RNA, 32 nt, Human
gcugauggggguuugcucagcacugugccagu

SEQ ID NO: 180835 - RNA, 32 nt, Human
gcugaugggugccagcccugcauugcugaguc

SEQ ID NO: 180836 - RNA, 32 nt, Human
gcugauggguuggagugccuaauggcucauua

SEQ ID NO: 180837 - RNA, 32 nt, Human
gcugaugguaaucaccguguguuugcaguaag

SEQ ID NO: 180838 - RNA, 29 nt, Human
gcugaugguacuggaggaggaggacgucc

SEQ ID NO: 180839 - RNA, 32 nt, Human
gcugauggugucaaggaaggaggacuuggccu

SEQ ID NO: 180840 - RNA, 32 nt, Human
gcugaugguucccagccugcugugaagaaaua

SEQ ID NO: 180841 - RNA, 32 nt, Human
gcugauguacaauaaccuugaggucccccaua

SEQ ID NO: 180842 - RNA, 32 nt, Human
gcugauguccugaccauggacuucugagccuu

SEQ ID NO: 180843 - RNA, 32 nt, Human
gcugauguccuguuucucuuucccucugugac

SEQ ID NO: 180844 - RNA, 32 nt, Human
gcugaugugcaucuucccuuucuugguuuuag

SEQ ID NO: 180845 - RNA, 32 nt, Human
gcugauguggaggaaugguucucagcauacac

SEQ ID NO: 180846 - RNA, 32 nt, Human
gcugauguggccugaagaucugugagugggac

SEQ ID NO: 180847 - RNA, 32 nt, Human
gcugauguguuuccuguuagucugauuuugcu

SEQ ID NO: 180848 - RNA, 29 nt, Human
gcugauguucugccaagucucuggguguu

SEQ ID NO: 180849 - RNA, 32 nt, Human
gcugauguugcagccugcagcaagugcuuccg

SEQ ID NO: 180850 - RNA, 32 nt, Human
gcugauuagggaacuguguccuacccacacug

SEQ ID NO: 180851 - RNA, 32 nt, Human
gcugauuaucacagcccucuuuucuccugaau

SEQ ID NO: 180852 - RNA, 32 nt, Human
gcugauuccaccccagccugccuggacaaccc

SEQ ID NO: 180853 - RNA, 32 nt, Human
gcugauuccagccaggaggauugaggccugug

SEQ ID NO: 180854 - RNA, 32 nt, Human
gcugauucccagcgacccaucccuuagugccc

SEQ ID NO: 180855 - RNA, 32 nt, Human
gcugauuccuguccuggugagcucacugcccc

SEQ ID NO: 180856 - RNA, 32 nt, Human
gcugauucuacuccugcuauugcucacaaccc

SEQ ID NO: 180857 - RNA, 32 nt, Human
gcugauucugaacaauuguggucucucuuaac

SEQ ID NO: 180858 - RNA, 32 nt, Human
gcugauucuguagcaaaaccuggguggggguu

SEQ ID NO: 180859 - RNA, 32 nt, Human
gcugauucuuuuucccuccagcauccuaggaa

SEQ ID NO: 180860 - RNA, 32 nt, Human
gcugauugcagccuugaccuucccagcucaag

SEQ ID NO: 180861 - RNA, 32 nt, Human
gcugauugggcagcacccauaguagaauuguc

SEQ ID NO: 180862 - RNA, 32 nt, Human
gcugauuguguuguggggauguuggcagagaa

SEQ ID NO: 180863 - RNA, 22 nt, Human
gcugauuguucuccuucucccu

SEQ ID NO: 180864 - RNA, 32 nt, Human
gcugauuuccagauuucgauguuucuuaaguc

SEQ ID NO: 180865 - RNA, 32 nt, Human
gcugauuugcugucucugucuuugucucuaau

SEQ ID NO: 180866 - RNA, 32 nt, Human
gcugauuuggucaccuuccucugccuuuguuc

SEQ ID NO: 180867 - RNA, 32 nt, Human
gcugauuuuauuggucaugagaacaaauggau

SEQ ID NO: 180868 - RNA, 24 nt, Human
gcugcaaaagaaguuucuggagca

SEQ ID NO: 180869 - RNA, 32 nt, Human
gcugcaaacacauucaccuaagcagagcacag

SEQ ID NO: 180870 - RNA, 32 nt, Human
gcugcaaagaagaagaaaaagcuccuggaguc

SEQ ID NO: 180871 - RNA, 32 nt, Human
gcugcaaagacagaagcagaacaacuaguuug

SEQ ID NO: 180872 - RNA, 22 nt, Human
gcugcaaaggaggcaacggagg

SEQ ID NO: 180873 - RNA, 32 nt, Human
gcugcaaccaacagcuacagacucaguggcuu

SEQ ID NO: 180874 - RNA, 32 nt, Human
gcugcaacugaaaucagagcugggacacagcg

SEQ ID NO: 180875 - RNA, 32 nt, Human
gcugcaacuucugcuuucaucccaugccucau

SEQ ID NO: 180876 - RNA, 21 nt, Human
gcugcaagaagucucugggca

SEQ ID NO: 180877 - RNA, 32 nt, Human
gcugcaagagaaaaggggcuggaggaagaucc

SEQ ID NO: 180878 - RNA, 20 nt, Human
gcugcaagcccguggccugg

SEQ ID NO: 180879 - RNA, 32 nt, Human
gcugcaagcuuacuucaccucaucucaccuca

SEQ ID NO: 180880 - RNA, 32 nt, Human
gcugcaaggaggcaggggccagcgggaaggag

SEQ ID NO: 180881 - RNA, 19 nt, Human
gcugcaaggcaguggccag

SEQ ID NO: 180882 - RNA, 18 nt, Human
gcugcaaggggcagccag

SEQ ID NO: 180883 - RNA, 32 nt, Human
gcugcaagggguggaggcugagcuggaagggg

SEQ ID NO: 180884 - RNA, 28 nt, Human
gcugcaagggugcaaagggccugugcca

SEQ ID NO: 180885 - RNA, 22 nt, Human
gcugcaagguggcugcgcucag

SEQ ID NO: 180886 - RNA, 32 nt, Human
gcugcaagguuguuuccagcacuuugggaacu

SEQ ID NO: 180887 - RNA, 32 nt, Human
gcugcaaguccuccugggcuuccuucagagaa

SEQ ID NO: 180888 - RNA, 32 nt, Human
gcugcaagugcugaggcgcgguggaggaaagc

SEQ ID NO: 180889 - RNA, 32 nt, Human
gcugcaaucugagcucagccaccuacacacca

SEQ ID NO: 180890 - RNA, 23 nt, Human
gcugcaaucuucccgccccagcc

SEQ ID NO: 180891 - RNA, 32 nt, Human
gcugcaaugagccaugauuucccacugcacuc

SEQ ID NO: 180892 - RNA, 32 nt, Human
gcugcaaugugaguuaucacuucauuuaucuu

SEQ ID NO: 180893 - RNA, 18 nt, Human
gcugcacaaaauguguga

SEQ ID NO: 180894 - RNA, 32 nt, Human
gcugcacacagcacagagacccugggcccagc

SEQ ID NO: 180895 - RNA, 32 nt, Human
gcugcacacagcaggggguucugggcccacaa

SEQ ID NO: 180896 - RNA, 32 nt, Human
gcugcacacuuguaaucacagcacuuugggag

SEQ ID NO: 180897 - RNA, 32 nt, Human
gcugcacagaauaucaccauugcaguucaaaa

SEQ ID NO: 180898 - RNA, 18 nt, Human
gcugcacagagcaggggg

SEQ ID NO: 180899 - RNA, 32 nt, Human
gcugcacagcaaggcccugccacccaccuuca

SEQ ID NO: 180900 - RNA, 32 nt, Human
gcugcacaggaaaguucccuuugguccacagg

SEQ ID NO: 180901 - RNA, 32 nt, Human
gcugcacaggcuaaagcuaaauguauucuaag

SEQ ID NO: 180902 - RNA, 25 nt, Human
gcugcacaucagccugcagcacaaa

SEQ ID NO: 180903 - RNA, 32 nt, Human
gcugcacauucugauucagcaggccugagauu

SEQ ID NO: 180904 - RNA, 32 nt, Human
gcugcaccaccaccaucccccucucccaucca

SEQ ID NO: 180905 - RNA, 32 nt, Human
gcugcaccaccagcaggaggaggaggagaaga

SEQ ID NO: 180906 - RNA, 18 nt, Human
gcugcaccagcagccagc

SEQ ID NO: 180907 - RNA, 19 nt, Human
gcugcaccagcgccuggca

SEQ ID NO: 180908 - RNA, 32 nt, Human
gcugcaccaucccggcguucgcgugugccgcc

SEQ ID NO: 180909 - RNA, 32 nt, Human
gcugcaccauuuuacauucacaccagcagugu

SEQ ID NO: 180910 - RNA, 32 nt, Human
gcugcacccagagggagcagugaggcaggaca

SEQ ID NO: 180911 - RNA, 32 nt, Human
gcugcaccccacucccuguuugacggcccagc

SEQ ID NO: 180912 - RNA, 32 nt, Human
gcugcacccuagcucccugcuccagggaugug

SEQ ID NO: 180913 - RNA, 32 nt, Human
gcugcacccuccaaccucccauuggcucgcuc

SEQ ID NO: 180914 - RNA, 22 nt, Human
gcugcacccugccccaguacaa

SEQ ID NO: 180915 - RNA, 32 nt, Human
gcugcaccgaguggucaggacauugaggccgg

SEQ ID NO: 180916 - RNA, 32 nt, Human
gcugcaccggagagccugccuccgggagccag

SEQ ID NO: 180917 - RNA, 32 nt, Human
gcugcaccugggaggcaggcaggcaugcaugu

SEQ ID NO: 180918 - RNA, 32 nt, Human
gcugcaccuuccccacccccuccugggaagug

SEQ ID NO: 180919 - RNA, 32 nt, Human
gcugcacgcacaccccugcuccggcucacaca

SEQ ID NO: 180920 - RNA, 32 nt, Human
gcugcacgcccaggcugcggagcaccuggagg

SEQ ID NO: 180921 - RNA, 32 nt, Human
gcugcacggguacugaaucuucuacgacugaa

SEQ ID NO: 180922 - RNA, 32 nt, Human
gcugcacgucagguguccuccaccucaguacu

SEQ ID NO: 180923 - RNA, 21 nt, Human
gcugcacgucucccuccucca

SEQ ID NO: 180924 - RNA, 23 nt, Human
gcugcacuaacaguacaaugcuu

SEQ ID NO: 180925 - RNA, 32 nt, Human
gcugcacuacagcccuggccuccacccccacc

SEQ ID NO: 180926 - RNA, 32 nt, Human
gcugcacuagccccagucuggcccggcacggg

SEQ ID NO: 180927 - RNA, 20 nt, Human
gcugcacuaggagcagagcc

SEQ ID NO: 180928 - RNA, 32 nt, Human
gcugcacucacaugaggauacagacuuuguga

SEQ ID NO: 180929 - RNA, 32 nt, Human
gcugcacuccagccuaggcaacauagugagac

SEQ ID NO: 180930 - RNA, 32 nt, Human
gcugcacuccagccugggcaacagagugagac

SEQ ID NO: 180931 - RNA, 32 nt, Human
gcugcacuccagccugggcaauagagugagau

SEQ ID NO: 180932 - RNA, 32 nt, Human
gcugcacuccagccugggcgacagagugagac

SEQ ID NO: 180933 - RNA, 32 nt, Human
gcugcacuccagccugggugacagagugagac

SEQ ID NO: 180934 - RNA, 32 nt, Human
gcugcacuccagccugggugacagagugagag

SEQ ID NO: 180935 - RNA, 20 nt, Human
gcugcacucccgggcuccug

SEQ ID NO: 180936 - RNA, 23 nt, Human
gcugcacucccuccacagacagc

SEQ ID NO: 180937 - RNA, 32 nt, Human
gcugcacucuaaacagcccucuugccugagca

SEQ ID NO: 180938 - RNA, 20 nt, Human
gcugcacugaccaaucagcu

SEQ ID NO: 180939 - RNA, 32 nt, Human
gcugcacugcauuccagccugggugacagagu

SEQ ID NO: 180940 - RNA, 21 nt, Human
gcugcacugcgugcagaugcc

SEQ ID NO: 180941 - RNA, 20 nt, Human
gcugcacuggacaccaugcc

SEQ ID NO: 180942 - RNA, 23 nt, Human
gcugcacugggaggccaauggcu

SEQ ID NO: 180943 - RNA, 16 nt, Human
gcugcacugugaaccu

SEQ ID NO: 180944 - RNA, 32 nt, Human
gcugcacugugccagugaguccaggcuccuuc

SEQ ID NO: 180945 - RNA, 23 nt, Human
gcugcacugugugcggcaggccu

SEQ ID NO: 180946 - RNA, 32 nt, Human
gcugcacuucaccgcugaccuugccucaccuu

SEQ ID NO: 180947 - RNA, 20 nt, Human
gcugcacuucaccugcugcu

SEQ ID NO: 180948 - RNA, 32 nt, Human
gcugcacuugccugcccugccuugcuuggcac

SEQ ID NO: 180949 - RNA, 32 nt, Human
gcugcacuuggguucccgcccaggaaggccuu

SEQ ID NO: 180950 - RNA, 32 nt, Human
gcugcagaaaaaugauuggccccaguccccuu

SEQ ID NO: 180951 - RNA, 32 nt, Human
gcugcagaaaugcagcaguccggcgccuggcc

SEQ ID NO: 180952 - RNA, 32 nt, Human
gcugcagaacacagcgggguccuguccaggcc

SEQ ID NO: 180953 - RNA, 20 nt, Human
gcugcagaacuagacacccu

SEQ ID NO: 180954 - RNA, 21 nt, Human
gcugcagaacucucagucccu

SEQ ID NO: 180955 - RNA, 19 nt, Human
gcugcagaagacacaggca

SEQ ID NO: 180956 - RNA, 19 nt, Human
gcugcagaagacagagaca

SEQ ID NO: 180957 - RNA, 22 nt, Human
gcugcagaagacuccgacggca

SEQ ID NO: 180958 - RNA, 20 nt, Human
gcugcagaagcagggggcug

SEQ ID NO: 180959 - RNA, 20 nt, Human
gcugcagaagccagggugca

SEQ ID NO: 180960 - RNA, 18 nt, Human
gcugcagaagcucagggc

SEQ ID NO: 180961 - RNA, 32 nt, Human
gcugcagaagcugccgccaccuccaaugcaca

SEQ ID NO: 180962 - RNA, 20 nt, Human
gcugcagaagcuugaaugca

SEQ ID NO: 180963 - RNA, 19 nt, Human
gcugcagaaggaagaguca

SEQ ID NO: 180964 - RNA, 19 nt, Human
gcugcagaagggagaggca

SEQ ID NO: 180965 - RNA, 21 nt, Human
gcugcagaagggccaaccccu

SEQ ID NO: 180966 - RNA, 21 nt, Human
gcugcagaagguggugggaca

SEQ ID NO: 180967 - RNA, 22 nt, Human
gcugcagaaguaggcuaaggca

SEQ ID NO: 180968 - RNA, 19 nt, Human
gcugcagaaguccugcuga

SEQ ID NO: 180969 - RNA, 21 nt, Human
gcugcagaccuggaacucccu

SEQ ID NO: 180970 - RNA, 32 nt, Human
gcugcagagacagcuccccacgcccagccugc

SEQ ID NO: 180971 - RNA, 20 nt, Human
gcugcagagagcacagcccu

SEQ ID NO: 180972 - RNA, 32 nt, Human
gcugcagagaucaacccagggcagaggccugg

SEQ ID NO: 180973 - RNA, 25 nt, Human
gcugcagagcaaggaugaagccuca

SEQ ID NO: 180974 - RNA, 32 nt, Human
gcugcagagcagugggccuggccagcaggucc

SEQ ID NO: 180975 - RNA, 22 nt, Human
gcugcagagccgggccacaccu

SEQ ID NO: 180976 - RNA, 23 nt, Human
gcugcagagccugcucccucccu

SEQ ID NO: 180977 - RNA, 32 nt, Human
gcugcagagccugcucccucccugcccugguu

SEQ ID NO: 180978 - RNA, 32 nt, Human
gcugcagaggacagcagcuuauccugauuuca

SEQ ID NO: 180979 - RNA, 21 nt, Human
gcugcagaggagucugagaca

SEQ ID NO: 180980 - RNA, 19 nt, Human
gcugcagaggcuccgaggc

SEQ ID NO: 180981 - RNA, 18 nt, Human
gcugcagagggcugaagg

SEQ ID NO: 180982 - RNA, 23 nt, Human
gcugcagaguccugaacaucccu

SEQ ID NO: 180983 - RNA, 23 nt, Human
gcugcagagugaaggcgcugcag

SEQ ID NO: 180984 - RNA, 32 nt, Human
gcugcagagugcacagggagggucagaagugc

SEQ ID NO: 180985 - RNA, 31 nt, Human
gcugcagaguucacuaagcuguugaauauuu

SEQ ID NO: 180986 - RNA, 32 nt, Human
gcugcagaguugcagaggucccuguagagaua

SEQ ID NO: 180987 - RNA, 23 nt, Human
gcugcagaucggaccucagggua

SEQ ID NO: 180988 - RNA, 20 nt, Human
gcugcagaucuccuggagca

SEQ ID NO: 180989 - RNA, 22 nt, Human
gcugcagaugccaagcagugcu

SEQ ID NO: 180990 - RNA, 32 nt, Human
gcugcagauggcggaaauggauccgguagccg

SEQ ID NO: 180991 - RNA, 32 nt, Human
gcugcagauugauccaguggguacauaggcua

SEQ ID NO: 180992 - RNA, 32 nt, Human
gcugcagauugugccaucacccuucauucuuc

SEQ ID NO: 180993 - RNA, 32 nt, Human
gcugcagauuuuacuuuaugugagaaaaucua

SEQ ID NO: 180994 - RNA, 32 nt, Human
gcugcagcacagaggccugugacugcguucca

SEQ ID NO: 180995 - RNA, 32 nt, Human
gcugcagcacauaugaaugagguguccagcug

SEQ ID NO: 180996 - RNA, 32 nt, Human
gcugcagcacuggcccccugaggcccacagcc

SEQ ID NO: 180997 - RNA, 32 nt, Human
gcugcagcacuuguaaaccacacacacagccu

SEQ ID NO: 180998 - RNA, 32 nt, Human
gcugcagcagggagguggggugggcgguaaac

SEQ ID NO: 180999 - RNA, 32 nt, Human
gcugcagcagggccugaggagaaggugcugcu

SEQ ID NO: 181000 - RNA, 32 nt, Human
gcugcagccaguccucuugcagccugguguuc

SEQ ID NO: 181001 - RNA, 32 nt, Human
gcugcagccaugggaccugcuccaggcaaggc

SEQ ID NO: 181002 - RNA, 32 nt, Human
gcugcagccauucagaccucaggagcuggaaa

SEQ ID NO: 181003 - RNA, 23 nt, Human
gcugcagcccaaggagcagcagg

SEQ ID NO: 181004 - RNA, 32 nt, Human
gcugcagcccaggaguucgagacuagccuggg

SEQ ID NO: 181005 - RNA, 22 nt, Human
gcugcagcccaggccauggaca

SEQ ID NO: 181006 - RNA, 32 nt, Human
gcugcagcccccguagagaagauccuagagca

SEQ ID NO: 181007 - RNA, 19 nt, Human
gcugcagcccuucugaggc

SEQ ID NO: 181008 - RNA, 32 nt, Human
gcugcagccgcaccugcagcuccagggaguua

SEQ ID NO: 181009 - RNA, 32 nt, Human
gcugcagccgucgcugucuccucccagaccgg

SEQ ID NO: 181010 - RNA, 32 nt, Human
gcugcagccucaaccuccugggcucacgugau

SEQ ID NO: 181011 - RNA, 21 nt, Human
gcugcagccuccaacaggaag

SEQ ID NO: 181012 - RNA, 24 nt, Human
gcugcagccucccugcuuccagga

SEQ ID NO: 181013 - RNA, 32 nt, Human
gcugcagccugcuguugagugagaaaacaaaa

SEQ ID NO: 181014 - RNA, 32 nt, Human
gcugcagccugggaccaggcacccccagaaug

SEQ ID NO: 181015 - RNA, 32 nt, Human
gcugcagccugggagcucggccucccucgggg

SEQ ID NO: 181016 - RNA, 32 nt, Human
gcugcagcgcugggcuggugugcaguggugcg

SEQ ID NO: 181017 - RNA, 32 nt, Human
gcugcagcggagauccgagagcagggggaugg

SEQ ID NO: 181018 - RNA, 23 nt, Human
gcugcagcucaagaaacugaagg

SEQ ID NO: 181019 - RNA, 17 nt, Human
gcugcagcucaggaggc

SEQ ID NO: 181020 - RNA, 24 nt, Human
gcugcagcucagggggaugcgagg

SEQ ID NO: 181021 - RNA, 32 nt, Human
gcugcagcucuccaccagcuggguggacuuug

SEQ ID NO: 181022 - RNA, 32 nt, Human
gcugcagcucugaagagccacagcgggaacau

SEQ ID NO: 181023 - RNA, 22 nt, Human
gcugcagcugacaacaggcagg

SEQ ID NO: 181024 - RNA, 32 nt, Human
gcugcagcugcaggaggagcccagggaacacc

SEQ ID NO: 181025 - RNA, 32 nt, Human
gcugcagcugccggacucuucugcuugucacu

SEQ ID NO: 181026 - RNA, 32 nt, Human
gcugcagcugccgggagacucacgccuuagug

SEQ ID NO: 181027 - RNA, 32 nt, Human
gcugcagcuugggaggcggcucuccccaggcg

SEQ ID NO: 181028 - RNA, 21 nt, Human
gcugcaggaaaagcaaucagu

SEQ ID NO: 181029 - RNA, 19 nt, Human
gcugcaggaaacagcagca

SEQ ID NO: 181030 - RNA, 21 nt, Human
gcugcaggaagcccugcccag

SEQ ID NO: 181031 - RNA, 32 nt, Human
gcugcaggacaguaagcccucaccugggcaaa

SEQ ID NO: 181032 - RNA, 20 nt, Human
gcugcaggacuccggaggca

SEQ ID NO: 181033 - RNA, 32 nt, Human
gcugcaggagaugcagcucccgcugauccugg

SEQ ID NO: 181034 - RNA, 20 nt, Human
gcugcaggagcuccgaggca

SEQ ID NO: 181035 - RNA, 17 nt, Human
gcugcaggagcucugag

SEQ ID NO: 181036 - RNA, 32 nt, Human
gcugcaggagcugaggccagaguccuggcacg

SEQ ID NO: 181037 - RNA, 20 nt, Human
gcugcaggaggagcccaggg

SEQ ID NO: 181038 - RNA, 21 nt, Human
gcugcaggccacccucaggca

SEQ ID NO: 181039 - RNA, 32 nt, Human
gcugcaggcccagcuggaggagcagcugcggg

SEQ ID NO: 181040 - RNA, 32 nt, Human
gcugcaggcccagugacugguagcucagugac

SEQ ID NO: 181041 - RNA, 21 nt, Human
gcugcaggccggcaacggcag

SEQ ID NO: 181042 - RNA, 30 nt, Human
gcugcaggccuccugcugcuccuguuugug

SEQ ID NO: 181043 - RNA, 32 nt, Human
gcugcaggcgggcggagguuccaggagauggg

SEQ ID NO: 181044 - RNA, 32 nt, Human
gcugcaggcuccaagcccuuguuccuggaaga

SEQ ID NO: 181045 - RNA, 32 nt, Human
gcugcaggcugcugccccaaguguacagauga

SEQ ID NO: 181046 - RNA, 21 nt, Human
gcugcaggcuggagugcagug

SEQ ID NO: 181047 - RNA, 22 nt, Human
gcugcaggcuggagugcagugg

SEQ ID NO: 181048 - RNA, 32 nt, Human
gcugcaggcuggugcuaugacagcagauugca

SEQ ID NO: 181049 - RNA, 20 nt, Human
gcugcagggaaaacccagcu

SEQ ID NO: 181050 - RNA, 32 nt, Human
gcugcagggaacacguaaugagcagacagugu

SEQ ID NO: 181051 - RNA, 32 nt, Human
gcugcagggaaggcagcuuucauuuguuuaaa

SEQ ID NO: 181052 - RNA, 32 nt, Human
gcugcagggacacugagcuggcuaucucggcg

SEQ ID NO: 181053 - RNA, 22 nt, Human
gcugcagggagaaccgcgagcu

SEQ ID NO: 181054 - RNA, 21 nt, Human
gcugcagggagacaacgggug

SEQ ID NO: 181055 - RNA, 32 nt, Human
gcugcagggaggugggggaagcccuggcugca

SEQ ID NO: 181056 - RNA, 22 nt, Human
gcugcagggucuggcaucagcu

SEQ ID NO: 181057 - RNA, 32 nt, Human
gcugcagggugaggccaggcaggccuggguag

SEQ ID NO: 181058 - RNA, 32 nt, Human
gcugcaggguuugccaaacuauggcuuguggg

SEQ ID NO: 181059 - RNA, 32 nt, Human
gcugcaggucccaggagggccugaggucaaag

SEQ ID NO: 181060 - RNA, 21 nt, Human
gcugcaggugcagugacucca

SEQ ID NO: 181061 - RNA, 23 nt, Human
gcugcaggugccagcacggcagg

SEQ ID NO: 181062 - RNA, 32 nt, Human
gcugcaggugugaggggcgugcccagggcucg

SEQ ID NO: 181063 - RNA, 21 nt, Human
gcugcagguuacuuugagaca

SEQ ID NO: 181064 - RNA, 20 nt, Human
gcugcagguucuccgaggua

SEQ ID NO: 181065 - RNA, 32 nt, Human
gcugcagguucucucucacugccaucaaacug

SEQ ID NO: 181066 - RNA, 32 nt, Human
gcugcagguugcacacccucagccugagaaug

SEQ ID NO: 181067 - RNA, 32 nt, Human
gcugcagguuuagaggaccagugaguugggag

SEQ ID NO: 181068 - RNA, 32 nt, Human
gcugcaguagacgggucgccuuuugcccauac

SEQ ID NO: 181069 - RNA, 32 nt, Human
gcugcaguaucugauaccagacauccacauau

SEQ ID NO: 181070 - RNA, 32 nt, Human
gcugcaguauuauagcccccaggccuggcagg

SEQ ID NO: 181071 - RNA, 32 nt, Human
gcugcagucaaauacugcuacugucacuuuga

SEQ ID NO: 181072 - RNA, 32 nt, Human
gcugcagucagcccugauugugccagugcacu

SEQ ID NO: 181073 - RNA, 32 nt, Human
gcugcagucccccagugccguguuucgggggu

SEQ ID NO: 181074 - RNA, 23 nt, Human
gcugcagucgccgccgccgccgc

SEQ ID NO: 181075 - RNA, 21 nt, Human
gcugcagucucccagccucca

SEQ ID NO: 181076 - RNA, 26 nt, Human
gcugcagucuggggggcccaagggca

SEQ ID NO: 181077 - RNA, 32 nt, Human
gcugcagugagcuaugauugcaccacugcacu

SEQ ID NO: 181078 - RNA, 32 nt, Human
gcugcagugagcuaugauugugccacacacuc

SEQ ID NO: 181079 - RNA, 32 nt, Human
gcugcagugagcuaugauugugccacuucccu

SEQ ID NO: 181080 - RNA, 32 nt, Human
gcugcagugagcuaugguugcaccacuguacu

SEQ ID NO: 181081 - RNA, 32 nt, Human
gcugcagugagcucaugaucauaccacugcac

SEQ ID NO: 181082 - RNA, 32 nt, Human
gcugcagugagcugagaucgugccacugcucu

SEQ ID NO: 181083 - RNA, 32 nt, Human
gcugcagugagcugagauugugccacuucacu

SEQ ID NO: 181084 - RNA, 32 nt, Human
gcugcagugagcugugauggcgccacugcacu

SEQ ID NO: 181085 - RNA, 32 nt, Human
gcugcagugagcugugaugugcccuuaugcua

SEQ ID NO: 181086 - RNA, 32 nt, Human
gcugcagugagcugugauugcaccacugcacu

SEQ ID NO: 181087 - RNA, 32 nt, Human
gcugcagugagcugugauugugccaccacacu

SEQ ID NO: 181088 - RNA, 32 nt, Human
gcugcagugagcuguguuguaccacugcacuc

SEQ ID NO: 181089 - RNA, 32 nt, Human
gcugcagugagugguuccacugccuggauaac

SEQ ID NO: 181090 - RNA, 32 nt, Human
gcugcaguggcagaagacggcucacaagugag

SEQ ID NO: 181091 - RNA, 32 nt, Human
gcugcaguggccaggugacauuccuguggaga

SEQ ID NO: 181092 - RNA, 32 nt, Human
gcugcagugggcauuguguggaaggaugccgc

SEQ ID NO: 181093 - RNA, 32 nt, Human
gcugcaguguuucugauccaaugauucaguaa

SEQ ID NO: 181094 - RNA, 32 nt, Human
gcugcaguguuugaaaugaacaugcaucaugg

SEQ ID NO: 181095 - RNA, 25 nt, Human
gcugcauauauggauggcacugcag

SEQ ID NO: 181096 - RNA, 32 nt, Human
gcugcauauguuuuagaaaaccuguguuuaac

SEQ ID NO: 181097 - RNA, 32 nt, Human
gcugcauccagccugagcaacagagugagauc

SEQ ID NO: 181098 - RNA, 32 nt, Human
gcugcaucccccucagcaucugugcugcgagg

SEQ ID NO: 181099 - RNA, 32 nt, Human
gcugcaucuagcucuaaaccaccugcaucuag

SEQ ID NO: 181100 - RNA, 32 nt, Human
gcugcaucucaggcugaccacagggcaggugc

SEQ ID NO: 181101 - RNA, 32 nt, Human
gcugcaucugaggcggacgccgcaguguaggg

SEQ ID NO: 181102 - RNA, 32 nt, Human
gcugcaucuucagcaucucccauguucaagcc

SEQ ID NO: 181103 - RNA, 32 nt, Human
gcugcaucuuccagucucuccuccgucuucca

SEQ ID NO: 181104 - RNA, 32 nt, Human
gcugcaugaccuaucaguauggugcuaaugug

SEQ ID NO: 181105 - RNA, 32 nt, Human
gcugcaugacuauucagagaagggaggagcca

SEQ ID NO: 181106 - RNA, 32 nt, Human
gcugcaugcccagggcagggugugguacuggc

SEQ ID NO: 181107 - RNA, 32 nt, Human
gcugcaugcugcauacacaagucauacaggag

SEQ ID NO: 181108 - RNA, 32 nt, Human
gcugcauggaagagagcggcuagcaacuguuc

SEQ ID NO: 181109 - RNA, 32 nt, Human
gcugcaugggaaaggugagcgggcuggaaaug

SEQ ID NO: 181110 - RNA, 32 nt, Human
gcugcauggguggugaggagggcaguugccca

SEQ ID NO: 181111 - RNA, 32 nt, Human
gcugcauggugcuggggaggccacagccagcc

SEQ ID NO: 181112 - RNA, 32 nt, Human
gcugcaugucuucacacauauacaggucacuc

SEQ ID NO: 181113 - RNA, 32 nt, Human
gcugcaugugccaacuacgucuuaucucccca

SEQ ID NO: 181114 - RNA, 32 nt, Human
gcugcaugugugcauacuugcuguucuuucag

SEQ ID NO: 181115 - RNA, 32 nt, Human
gcugcauuaccagcuuaaaacacuucuuaggg

SEQ ID NO: 181116 - RNA, 32 nt, Human
gcugcauucagaaggucucucaguugaagaaa

SEQ ID NO: 181117 - RNA, 32 nt, Human
gcugcauuccacugugccagcacucuacauuc

SEQ ID NO: 181118 - RNA, 32 nt, Human
gcugcauucuccuuuggcaaacaucaggguca

SEQ ID NO: 181119 - RNA, 32 nt, Human
gcugcauugacaggcagcccuaggcagccaga

SEQ ID NO: 181120 - RNA, 32 nt, Human
gcugcauugagaagaaaauggcugucauuuaa

SEQ ID NO: 181121 - RNA, 32 nt, Human
gcugcauugcagccccugagcuccugcugcac

SEQ ID NO: 181122 - RNA, 24 nt, Human
gcugcauuguuggaugacaacucu

SEQ ID NO: 181123 - RNA, 32 nt, Human
gcugcauuucuggccuucacuccuuuuggguu

SEQ ID NO: 181124 - RNA, 32 nt, Human
gcugcauuugacuugcucugaaucaaucaaca

SEQ ID NO: 181125 - RNA, 32 nt, Human
gcugccaaacauguuuauuuagcagauacugu

SEQ ID NO: 181126 - RNA, 32 nt, Human
gcugccaaagagacugggcgcaguggcucaug

SEQ ID NO: 181127 - RNA, 32 nt, Human
gcugccaaaggggcagagggugguggagagga

SEQ ID NO: 181128 - RNA, 32 nt, Human
gcugccaacacccugcacuccugcuugcgccg

SEQ ID NO: 181129 - RNA, 32 nt, Human
gcugccaaccugauccugccugggcaacccuu

SEQ ID NO: 181130 - RNA, 32 nt, Human
gcugccaacugcacucggguacuggugugaca

SEQ ID NO: 181131 - RNA, 18 nt, Human
gcugccaagggcccgggc

SEQ ID NO: 181132 - RNA, 32 nt, Human
gcugccaaugagccauugacacuggagaauga

SEQ ID NO: 181133 - RNA, 22 nt, Human
gcugccacaacuggccaugccc

SEQ ID NO: 181134 - RNA, 32 nt, Human
gcugccacaacuggccaugcccugccauugaa

SEQ ID NO: 181135 - RNA, 32 nt, Human
gcugccacaagccuggaacaguccugcagagg

SEQ ID NO: 181136 - RNA, 22 nt, Human
gcugccacacagccucacgcuc

SEQ ID NO: 181137 - RNA, 32 nt, Human
gcugccacagcaccaugccagacuggauggcu

SEQ ID NO: 181138 - RNA, 18 nt, Human
gcugccacauguacuauu

SEQ ID NO: 181139 - RNA, 32 nt, Human
gcugccaccaagagacagcaaugacauguaca

SEQ ID NO: 181140 - RNA, 23 nt, Human
gcugccaccaccaccgccaccac

SEQ ID NO: 181141 - RNA, 32 nt, Human
gcugccaccagggacucggguccuggugcaac

SEQ ID NO: 181142 - RNA, 32 nt, Human
gcugccaccauggccaaagguggagaagcccu

SEQ ID NO: 181143 - RNA, 32 nt, Human
gcugccacccacccaccuccucccucugcucu

SEQ ID NO: 181144 - RNA, 32 nt, Human
gcugccacccaccccauuccucgcuccuuccg

SEQ ID NO: 181145 - RNA, 32 nt, Human
gcugccacccaccuccuccaucacuggaccag

SEQ ID NO: 181146 - RNA, 32 nt, Human
gcugccacccucuucugacccugcugcuguug

SEQ ID NO: 181147 - RNA, 18 nt, Human
gcugccaccgcuaccauc

SEQ ID NO: 181148 - RNA, 32 nt, Human
gcugccaccucguguucugucucccauguccc

SEQ ID NO: 181149 - RNA, 31 nt, Human
gcugccaccucuccugggccuguguccuuuc

SEQ ID NO: 181150 - RNA, 32 nt, Human
gcugccaccuuuucuucuuucucagagaacuc

SEQ ID NO: 181151 - RNA, 32 nt, Human
gcugccacggaggggguccgccagcagcugga

SEQ ID NO: 181152 - RNA, 18 nt, Human
gcugccacguggaggaag

SEQ ID NO: 181153 - RNA, 32 nt, Human
gcugccacguuguaugccccagaagguaccuu

SEQ ID NO: 181154 - RNA, 32 nt, Human
gcugccacucaaacuccagucguggcuaaaag

SEQ ID NO: 181155 - RNA, 32 nt, Human
gcugccacugacagucauccuaccgcacugcu

SEQ ID NO: 181156 - RNA, 32 nt, Human
gcugccacuggcuuaucaggagcaccugaauc

SEQ ID NO: 181157 - RNA, 32 nt, Human
gcugccacuguacuccaaccuggguaacagag

SEQ ID NO: 181158 - RNA, 32 nt, Human
gcugccacuguaguugccaagcucagguuggg

SEQ ID NO: 181159 - RNA, 32 nt, Human
gcugccacuugcuugggaaggaauucuccaga

SEQ ID NO: 181160 - RNA, 32 nt, Human
gcugccacuuucuccuccccuuccugagccgc

SEQ ID NO: 181161 - RNA, 17 nt, Human
gcugccagaagaggcag

SEQ ID NO: 181162 - RNA, 32 nt, Human
gcugccagacacacccuccccaggggccucuc

SEQ ID NO: 181163 - RNA, 32 nt, Human
gcugccagagagaccugcugccggagagaagg

SEQ ID NO: 181164 - RNA, 32 nt, Human
gcugccagagagccugcuuccugcugccugcc

SEQ ID NO: 181165 - RNA, 32 nt, Human
gcugccagaggaccugccccagcaagauuuuu

SEQ ID NO: 181166 - RNA, 32 nt, Human
gcugccagcacauucaugcagaaaagucuuuu

SEQ ID NO: 181167 - RNA, 22 nt, Human
gcugccagcaucgccgccgcca

SEQ ID NO: 181168 - RNA, 18 nt, Human
gcugccagccacagggaa

SEQ ID NO: 181169 - RNA, 23 nt, Human
gcugccagccccuggcugggcag

SEQ ID NO: 181170 - RNA, 32 nt, Human
gcugccagcccuggcccaucauguagcugcag

SEQ ID NO: 181171 - RNA, 32 nt, Human
gcugccagccucacccuccacaccuuagaaug

SEQ ID NO: 181172 - RNA, 32 nt, Human
gcugccagccuuccugcaguaucucuagcagc

SEQ ID NO: 181173 - RNA, 25 nt, Human
gcugccagcgagagggaccagggca

SEQ ID NO: 181174 - RNA, 21 nt, Human
gcugccagcggccgggacucu

SEQ ID NO: 181175 - RNA, 18 nt, Human
gcugccagcuccgcggcc

SEQ ID NO: 181176 - RNA, 18 nt, Human
gcugccagcugcugcgcc

SEQ ID NO: 181177 - RNA, 32 nt, Human
gcugccagcuuaguggaagcucugcucugggu

SEQ ID NO: 181178 - RNA, 32 nt, Human
gcugccaggagaagcaagggucucucucagug

SEQ ID NO: 181179 - RNA, 32 nt, Human
gcugccaggauggaaacuaacuaccugaagag

SEQ ID NO: 181180 - RNA, 32 nt, Human
gcugccaggcacuguucaucucaguuuuucug

SEQ ID NO: 181181 - RNA, 32 nt, Human
gcugccaggcuggaguggaguggcaugaucuc

SEQ ID NO: 181182 - RNA, 32 nt, Human
gcugccaggcuggcguacaguggcgcaaucuc

SEQ ID NO: 181183 - RNA, 32 nt, Human
gcugccagggaagacagagcaggcuuugugag

SEQ ID NO: 181184 - RNA, 32 nt, Human
gcugccagggacgugcugggaaagcccaagcc

SEQ ID NO: 181185 - RNA, 32 nt, Human
gcugccagggagcugcaaagggcugcugagga

SEQ ID NO: 181186 - RNA, 32 nt, Human
gcugccagggccuggggccacugggccagcgc

SEQ ID NO: 181187 - RNA, 32 nt, Human
gcugccagggccuguggaggacaggccagaga

SEQ ID NO: 181188 - RNA, 32 nt, Human
gcugccaggugagccccgggccaagggugguu

SEQ ID NO: 181189 - RNA, 23 nt, Human
gcugccagguugucuucaucuca

SEQ ID NO: 181190 - RNA, 32 nt, Human
gcugccaguaggggcgggaggaaaggcggagg

SEQ ID NO: 181191 - RNA, 32 nt, Human
gcugccagucccgggcccuggagagcagaugc

SEQ ID NO: 181192 - RNA, 32 nt, Human
gcugccagucccucguugcaggacagggucau

SEQ ID NO: 181193 - RNA, 32 nt, Human
gcugccagucuguggagaguccugcugcccuc

SEQ ID NO: 181194 - RNA, 25 nt, Human
gcugccagugugcucgccaugagcu

SEQ ID NO: 181195 - RNA, 32 nt, Human
gcugccauaaugaacuugaaaggacgggaauc

SEQ ID NO: 181196 - RNA, 32 nt, Human
gcugccauagcauggacccccaaaaagccacu

SEQ ID NO: 181197 - RNA, 32 nt, Human
gcugccauaucuuuuucccucuguaaagucau

SEQ ID NO: 181198 - RNA, 32 nt, Human
gcugccaucacuggaggcugcagggaccaaga

SEQ ID NO: 181199 - RNA, 32 nt, Human
gcugccaucacugggaggcucagaggacccuu

SEQ ID NO: 181200 - RNA, 18 nt, Human
gcugccaucaucacuuuu

SEQ ID NO: 181201 - RNA, 24 nt, Human
gcugccaucauuccuugguuugug

SEQ ID NO: 181202 - RNA, 18 nt, Human
gcugccauccacuucuca

SEQ ID NO: 181203 - RNA, 32 nt, Human
gcugccauccagccaagugcgguaccagcccu

SEQ ID NO: 181204 - RNA, 32 nt, Human
gcugccauccccaccccuccaccgcuugccuu

SEQ ID NO: 181205 - RNA, 32 nt, Human
gcugccaucuccagugccccagaaugguacag

SEQ ID NO: 181206 - RNA, 32 nt, Human
gcugccaucugaagaccucaucugagcccacu

SEQ ID NO: 181207 - RNA, 31 nt, Human
gcugccaugaaggugaagauuaagugcugga

SEQ ID NO: 181208 - RNA, 31 nt, Human
gcugccaugaaugccuuccugcucuccgcac

SEQ ID NO: 181209 - RNA, 32 nt, Human
gcugccaugcaagaagugccuuucggcuuccg

SEQ ID NO: 181210 - RNA, 32 nt, Human
gcugccaugcugucagcuggggagaggcccau

SEQ ID NO: 181211 - RNA, 23 nt, Human
gcugccaugcuucagccaugccu

SEQ ID NO: 181212 - RNA, 32 nt, Human
gcugccaugcuuuuccccuugaccugcaccuc

SEQ ID NO: 181213 - RNA, 31 nt, Human
gcugccauggcccagacacugcagauggaga

SEQ ID NO: 181214 - RNA, 32 nt, Human
gcugccauggucuccuugccugcuccaaggca

SEQ ID NO: 181215 - RNA, 32 nt, Human
gcugccauguaagaagugccuuuugccuccca

SEQ ID NO: 181216 - RNA, 32 nt, Human
gcugccaugucucagaugaggagggagagaag

SEQ ID NO: 181217 - RNA, 32 nt, Human
gcugccauuauggugacagagaggaagguacg

SEQ ID NO: 181218 - RNA, 32 nt, Human
gcugcccaaacaggacccuggcagccucccug

SEQ ID NO: 181219 - RNA, 32 nt, Human
gcugcccaaaugcacgcacacgcacagagaca

SEQ ID NO: 181220 - RNA, 31 nt, Human
gcugcccaacggggccuacucacuuauucuu

SEQ ID NO: 181221 - RNA, 32 nt, Human
gcugcccaagggucgccuuccccagcuugugc

SEQ ID NO: 181222 - RNA, 18 nt, Human
gcugcccaaucauuugca

SEQ ID NO: 181223 - RNA, 32 nt, Human
gcugcccaaucucucagacccaccccaccugc

SEQ ID NO: 181224 - RNA, 32 nt, Human
gcugcccacacagcaguuuggcgucagucugc

SEQ ID NO: 181225 - RNA, 32 nt, Human
gcugcccacaguucugcagccacucgguacgg

SEQ ID NO: 181226 - RNA, 22 nt, Human
gcugcccagagccucugaggca

SEQ ID NO: 181227 - RNA, 32 nt, Human
gcugcccagaggccuaaggcugccucagcacc

SEQ ID NO: 181228 - RNA, 18 nt, Human
gcugcccagauggggcug

SEQ ID NO: 181229 - RNA, 32 nt, Human
gcugcccagcagagaguggacgagcagcugag

SEQ ID NO: 181230 - RNA, 32 nt, Human
gcugcccagccgccuagacacagccaaccccg

SEQ ID NO: 181231 - RNA, 32 nt, Human
gcugcccagccuguccuugugucgucuuuuua

SEQ ID NO: 181232 - RNA, 32 nt, Human
gcugcccagcgcuggggugaggcugccguugu

SEQ ID NO: 181233 - RNA, 32 nt, Human
gcugcccagcuccuggccaucuguagagucag

SEQ ID NO: 181234 - RNA, 32 nt, Human
gcugcccaggcagaggagaauggggucuccac

SEQ ID NO: 181235 - RNA, 32 nt, Human
gcugcccaggccagucucaaacuccuggccuc

SEQ ID NO: 181236 - RNA, 32 nt, Human
gcugcccaggggcuuccaguccugucugugug

SEQ ID NO: 181237 - RNA, 23 nt, Human
gcugcccagugcccauggcucuu

SEQ ID NO: 181238 - RNA, 32 nt, Human
gcugccccaagaaacacauugcaccugccaau

SEQ ID NO: 181239 - RNA, 29 nt, Human
gcugccccacaucugcuuuuuggcuuugu

SEQ ID NO: 181240 - RNA, 16 nt, Human
gcugccccacuccacg

SEQ ID NO: 181241 - RNA, 32 nt, Human
gcugccccagaacauaggucuuggaauaaaau

SEQ ID NO: 181242 - RNA, 32 nt, Human
gcugccccagagagucugugugagaugaagac

SEQ ID NO: 181243 - RNA, 32 nt, Human
gcugccccagaggacaguggguggagugguac

SEQ ID NO: 181244 - RNA, 26 nt, Human
gcugccccagcacaucguccugagcc

SEQ ID NO: 181245 - RNA, 25 nt, Human
gcugccccagccuuuccgccuugca

SEQ ID NO: 181246 - RNA, 20 nt, Human
gcugccccaucccugaggca

SEQ ID NO: 181247 - RNA, 26 nt, Human
gcugccccauccucagccccgaguca

SEQ ID NO: 181248 - RNA, 32 nt, Human
gcugccccaucuugccugcuguuccaguucug

SEQ ID NO: 181249 - RNA, 32 nt, Human
gcugcccccaacaugagucggcugucuaggac

SEQ ID NO: 181250 - RNA, 21 nt, Human
gcugcccccagcacugacucu

SEQ ID NO: 181251 - RNA, 19 nt, Human
gcugcccccagccccggcc

SEQ ID NO: 181252 - RNA, 20 nt, Human
gcugcccccgccuggcguca

SEQ ID NO: 181253 - RNA, 20 nt, Human
gcugcccccggacccgggca

SEQ ID NO: 181254 - RNA, 32 nt, Human
gcugcccccuacacgccacccuaggcaccucu

SEQ ID NO: 181255 - RNA, 32 nt, Human
gcugcccccugcccucucucuggggcuauuug

SEQ ID NO: 181256 - RNA, 32 nt, Human
gcugcccccugccuccccacccuccccauggc

SEQ ID NO: 181257 - RNA, 21 nt, Human
gcugccccgcgcccgcugcug

SEQ ID NO: 181258 - RNA, 24 nt, Human
gcugccccgcuuccugguggccag

SEQ ID NO: 181259 - RNA, 32 nt, Human
gcugccccggggaggguggaaggccaggcgug

SEQ ID NO: 181260 - RNA, 32 nt, Human
gcugccccgucugccauucaccaggaaaaauu

SEQ ID NO: 181261 - RNA, 23 nt, Human
gcugccccgugcccuccuuccca

SEQ ID NO: 181262 - RNA, 21 nt, Human
gcugccccgugggcugugcca

SEQ ID NO: 181263 - RNA, 32 nt, Human
gcugccccuaguccugggcaugguggcaaaca

SEQ ID NO: 181264 - RNA, 32 nt, Human
gcugccccucaagggaccuguuaccuucagcg

SEQ ID NO: 181265 - RNA, 32 nt, Human
gcugccccucauuuaucacucugaccuucaca

SEQ ID NO: 181266 - RNA, 32 nt, Human
gcugccccuccccaucuccaugcccucuccuu

SEQ ID NO: 181267 - RNA, 32 nt, Human
gcugccccuccccuccggcccucuccacugcu

SEQ ID NO: 181268 - RNA, 19 nt, Human
gcugccccucccucaggga

SEQ ID NO: 181269 - RNA, 32 nt, Human
gcugccccucccucucucucccucucucuccc

SEQ ID NO: 181270 - RNA, 32 nt, Human
gcugccccucgaggcccuuucccugaccuagg

SEQ ID NO: 181271 - RNA, 32 nt, Human
gcugccccucuccucacuacuuccucucugau

SEQ ID NO: 181272 - RNA, 24 nt, Human
gcugccccucucuggccuggccgg

SEQ ID NO: 181273 - RNA, 17 nt, Human
gcugccccugaguucug

SEQ ID NO: 181274 - RNA, 32 nt, Human
gcugccccugccacuccaggcacagcggcacg

SEQ ID NO: 181275 - RNA, 32 nt, Human
gcugccccugcucugucccgggacccccuggc

SEQ ID NO: 181276 - RNA, 32 nt, Human
gcugccccuggaggagcagcagcucugggccg

SEQ ID NO: 181277 - RNA, 32 nt, Human
gcugccccuuccacaccccaucuugcucuaau

SEQ ID NO: 181278 - RNA, 32 nt, Human
gcugccccuucccugccuaacccuuuccuguc

SEQ ID NO: 181279 - RNA, 18 nt, Human
gcugccccuucccuggua

SEQ ID NO: 181280 - RNA, 32 nt, Human
gcugcccgacacugcccuuuagcugcagagcu

SEQ ID NO: 181281 - RNA, 31 nt, Human
gcugcccgacuuuucugaccaugugcggagc

SEQ ID NO: 181282 - RNA, 32 nt, Human
gcugcccgagagguuaagguggcuucuguggc

SEQ ID NO: 181283 - RNA, 32 nt, Human
gcugcccgcagaagcggcacugugcuggcggg

SEQ ID NO: 181284 - RNA, 32 nt, Human
gcugcccgccaccaugugaauucaucagcucu

SEQ ID NO: 181285 - RNA, 23 nt, Human
gcugcccgccagcuguuugugcu

SEQ ID NO: 181286 - RNA, 32 nt, Human
gcugcccgccauggccaccgcccagccgucgc

SEQ ID NO: 181287 - RNA, 31 nt, Human
gcugcccgcccaccugggccugguccuagcc

SEQ ID NO: 181288 - RNA, 19 nt, Human
gcugcccgccgcgcugccu

SEQ ID NO: 181289 - RNA, 18 nt, Human
gcugcccgcgcggucgcc

SEQ ID NO: 181290 - RNA, 24 nt, Human
gcugcccgcgcugcgcuguugcuc

SEQ ID NO: 181291 - RNA, 32 nt, Human
gcugcccgcucacuccaguagucagcaagucc

SEQ ID NO: 181292 - RNA, 32 nt, Human
gcugcccggaaagaaccauuugggagagccca

SEQ ID NO: 181293 - RNA, 19 nt, Human
gcugcccggacuggcgcca

SEQ ID NO: 181294 - RNA, 32 nt, Human
gcugcccggcagccuccccucgcucgcucucc

SEQ ID NO: 181295 - RNA, 18 nt, Human
gcugcccggccggagcca

SEQ ID NO: 181296 - RNA, 19 nt, Human
gcugcccggccuugcguca

SEQ ID NO: 181297 - RNA, 32 nt, Human
gcugcccggcggacaggcgugaagagcaaggg

SEQ ID NO: 181298 - RNA, 32 nt, Human
gcugcccggcuggaacugggggugcucggcag

SEQ ID NO: 181299 - RNA, 32 nt, Human
gcugcccgggagggcuuccuggacacgcuggu

SEQ ID NO: 181300 - RNA, 32 nt, Human
gcugcccggggugggagggagggugacgggcc

SEQ ID NO: 181301 - RNA, 32 nt, Human
gcugcccgucaauaaucccagcuacucgggag

SEQ ID NO: 181302 - RNA, 32 nt, Human
gcugcccguugcccaggccacccuccaccccc

SEQ ID NO: 181303 - RNA, 19 nt, Human
gcugcccuaagcugcacca

SEQ ID NO: 181304 - RNA, 32 nt, Human
gcugcccuaagcugcaccagcgcuuugccaag

SEQ ID NO: 181305 - RNA, 21 nt, Human
gcugcccuacuggacagccca

SEQ ID NO: 181306 - RNA, 20 nt, Human
gcugcccuagugaggcccca

SEQ ID NO: 181307 - RNA, 28 nt, Human
gcugcccucagcuccgccucaucagcua

SEQ ID NO: 181308 - RNA, 32 nt, Human
gcugcccuccaaccuccugggauucaugcaga

SEQ ID NO: 181309 - RNA, 32 nt, Human
gcugcccuccacccucacccuccacccuuugc

SEQ ID NO: 181310 - RNA, 20 nt, Human
gcugcccuccccuacuucuc

SEQ ID NO: 181311 - RNA, 32 nt, Human
gcugcccuccuggaacugcuguacugggucca

SEQ ID NO: 181312 - RNA, 32 nt, Human
gcugcccucuccccagccuggcguggcugggg

SEQ ID NO: 181313 - RNA, 19 nt, Human
gcugcccucugcuggcgcc

SEQ ID NO: 181314 - RNA, 22 nt, Human
gcugcccugaagaauggcgcca

SEQ ID NO: 181315 - RNA, 21 nt, Human
gcugcccugaagaccacccca

SEQ ID NO: 181316 - RNA, 22 nt, Human
gcugcccugaagugguucucca

SEQ ID NO: 181317 - RNA, 32 nt, Human
gcugcccugacucaaccccagccuggggcuuu

SEQ ID NO: 181318 - RNA, 19 nt, Human
gcugcccugagccaacgcc

SEQ ID NO: 181319 - RNA, 20 nt, Human
gcugcccugagggaaacgcc

SEQ ID NO: 181320 - RNA, 21 nt, Human
gcugcccugaggggaaacgcc

SEQ ID NO: 181321 - RNA, 20 nt, Human
gcugcccugagugaaacgcc

SEQ ID NO: 181322 - RNA, 32 nt, Human
gcugcccugagugcccgggaaaggcuucgcag

SEQ ID NO: 181323 - RNA, 32 nt, Human
gcugcccugcacuccugccucccagcccacag

SEQ ID NO: 181324 - RNA, 20 nt, Human
gcugcccugccaaaggagac

SEQ ID NO: 181325 - RNA, 21 nt, Human
gcugcccugcccuggcaucca

SEQ ID NO: 181326 - RNA, 17 nt, Human
gcugcccugcuccuggu

SEQ ID NO: 181327 - RNA, 20 nt, Human
gcugcccugcugcggcacca

SEQ ID NO: 181328 - RNA, 32 nt, Human
gcugcccugcugucacuucccgucgugaugau

SEQ ID NO: 181329 - RNA, 32 nt, Human
gcugcccuggacaagacuugaggcccgagccc

SEQ ID NO: 181330 - RNA, 24 nt, Human
gcugcccuggaccccgcaagccca

SEQ ID NO: 181331 - RNA, 32 nt, Human
gcugcccuggaccccucuauuuauuucccuuc

SEQ ID NO: 181332 - RNA, 32 nt, Human
gcugcccuggagcagauccaaacagcaaagac

SEQ ID NO: 181333 - RNA, 23 nt, Human
gcugcccuggccuugagcaucca

SEQ ID NO: 181334 - RNA, 19 nt, Human
gcugcccuggcgggggcca

SEQ ID NO: 181335 - RNA, 19 nt, Human
gcugcccuggcugggcgcc

SEQ ID NO: 181336 - RNA, 22 nt, Human
gcugcccugggcaccuggcacc

SEQ ID NO: 181337 - RNA, 32 nt, Human
gcugcccuggggacaggaaggagcaggagcua

SEQ ID NO: 181338 - RNA, 16 nt, Human
gcugcccuggguccag

SEQ ID NO: 181339 - RNA, 32 nt, Human
gcugcccugggucuuuggcugccuguguccuc

SEQ ID NO: 181340 - RNA, 32 nt, Human
gcugcccugguaaccagucucuagcuagugcc

SEQ ID NO: 181341 - RNA, 23 nt, Human
gcugcccuguccuggugguacca

SEQ ID NO: 181342 - RNA, 19 nt, Human
gcugcccugugccugguga

SEQ ID NO: 181343 - RNA, 32 nt, Human
gcugcccugugcuagcgccugccugugugaau

SEQ ID NO: 181344 - RNA, 32 nt, Human
gcugcccuuccaaggagcuucugcugcugcuc

SEQ ID NO: 181345 - RNA, 19 nt, Human
gcugcccuugaguccccug

SEQ ID NO: 181346 - RNA, 32 nt, Human
gcugcccuuuccucuucugucaucucaccgcc

SEQ ID NO: 181347 - RNA, 32 nt, Human
gcugccgacaggacagggcuggggagcggccu

SEQ ID NO: 181348 - RNA, 32 nt, Human
gcugccgacaugcccacccagcucgagauggc

SEQ ID NO: 181349 - RNA, 32 nt, Human
gcugccgacgcugggccagcacccucuccacc

SEQ ID NO: 181350 - RNA, 20 nt, Human
gcugccgacggcgggggcug

SEQ ID NO: 181351 - RNA, 32 nt, Human
gcugccgacugugcaugacugcucugaacguc

SEQ ID NO: 181352 - RNA, 32 nt, Human
gcugccgauuccuuccaagcuuuuggaguuuc

SEQ ID NO: 181353 - RNA, 32 nt, Human
gcugccgcagccgccgcgagccuccggacaga

SEQ ID NO: 181354 - RNA, 32 nt, Human
gcugccgcagggcacugaaagcccaggaccag

SEQ ID NO: 181355 - RNA, 20 nt, Human
gcugccgcauguacaagccc

SEQ ID NO: 181356 - RNA, 25 nt, Human
gcugccgccaccgccgugccgccgc

SEQ ID NO: 181357 - RNA, 21 nt, Human
gcugccgccagcccuauugcu

SEQ ID NO: 181358 - RNA, 32 nt, Human
gcugccgccaggaccagagcaguggugacgug

SEQ ID NO: 181359 - RNA, 32 nt, Human
gcugccgccaggagcugucaccaugacggggg

SEQ ID NO: 181360 - RNA, 25 nt, Human
gcugccgcccgccucgccgccccac

SEQ ID NO: 181361 - RNA, 20 nt, Human
gcugccgccgacugcagccc

SEQ ID NO: 181362 - RNA, 27 nt, Human
gcugccgccgccaccgcccucggccgc

SEQ ID NO: 181363 - RNA, 23 nt, Human
gcugccgccgccaccgccgccgc

SEQ ID NO: 181364 - RNA, 23 nt, Human
gcugccgccgccauggcugccau

SEQ ID NO: 181365 - RNA, 25 nt, Human
gcugccgccgcccaggagccgccgc

SEQ ID NO: 181366 - RNA, 27 nt, Human
gcugccgccgccgagcuccgccgccgc

SEQ ID NO: 181367 - RNA, 23 nt, Human
gcugccgccgccgccaccaccau

SEQ ID NO: 181368 - RNA, 23 nt, Human
gcugccgccgccgccgacgccgc

SEQ ID NO: 181369 - RNA, 18 nt, Human
gcugccgccgccgccgcc

SEQ ID NO: 181370 - RNA, 23 nt, Human
gcugccgccgccgccgcccccuc

SEQ ID NO: 181371 - RNA, 19 nt, Human
gcugccgccgccgccgccg

SEQ ID NO: 181372 - RNA, 28 nt, Human
gcugccgccgccgccgccgaggucccgc

SEQ ID NO: 181373 - RNA, 23 nt, Human
gcugccgccgccgccgccgccac

SEQ ID NO: 181374 - RNA, 24 nt, Human
gcugccgccgccgccgccgcccgc

SEQ ID NO: 181375 - RNA, 22 nt, Human
gcugccgccgccgccgccgccg

SEQ ID NO: 181376 - RNA, 23 nt, Human
gcugccgccgccgccgccgccgc

SEQ ID NO: 181377 - RNA, 23 nt, Human
gcugccgccgccgccgccgcgac

SEQ ID NO: 181378 - RNA, 22 nt, Human
gcugccgccgccgccgccucgc

SEQ ID NO: 181379 - RNA, 21 nt, Human
gcugccgccgccgccgcggcc

SEQ ID NO: 181380 - RNA, 23 nt, Human
gcugccgccgccgcgggagccgc

SEQ ID NO: 181381 - RNA, 23 nt, Human
gcugccgccgccgcuaccgccac

SEQ ID NO: 181382 - RNA, 20 nt, Human
gcugccgccgccgcugcuac

SEQ ID NO: 181383 - RNA, 23 nt, Human
gcugccgccgccgcugcugccgc

SEQ ID NO: 181384 - RNA, 20 nt, Human
gcugccgccgccggauccca

SEQ ID NO: 181385 - RNA, 23 nt, Human
gcugccgccgccgucgccgccac

SEQ ID NO: 181386 - RNA, 22 nt, Human
gcugccgccgcugccgccgccg

SEQ ID NO: 181387 - RNA, 21 nt, Human
gcugccgccggccucagccca

SEQ ID NO: 181388 - RNA, 23 nt, Human
gcugccgcggcccccaccgccac

SEQ ID NO: 181389 - RNA, 32 nt, Human
gcugccgcguucccuggcugguuccagcuguc

SEQ ID NO: 181390 - RNA, 32 nt, Human
gcugccgcugaggagagguaggguggagcggg

SEQ ID NO: 181391 - RNA, 20 nt, Human
gcugccgcugccgccgccgc

SEQ ID NO: 181392 - RNA, 32 nt, Human
gcugccgcugcucucccaggugaaauccacac

SEQ ID NO: 181393 - RNA, 32 nt, Human
gcugccgcuggcugagagaccaugaagaaagu

SEQ ID NO: 181394 - RNA, 32 nt, Human
gcugccgcugucaucuugagguuccagguagu

SEQ ID NO: 181395 - RNA, 23 nt, Human
gcugccgcuguugccgccgccgc

SEQ ID NO: 181396 - RNA, 32 nt, Human
gcugccggagagaaggggaggaggacuccagc

SEQ ID NO: 181397 - RNA, 32 nt, Human
gcugccggaggugguggcugcacagaggacgc

SEQ ID NO: 181398 - RNA, 18 nt, Human
gcugccggccgcugcgcc

SEQ ID NO: 181399 - RNA, 22 nt, Human
gcugccggccgggacucgggca

SEQ ID NO: 181400 - RNA, 23 nt, Human
gcugccggcggcccacgagccca

SEQ ID NO: 181401 - RNA, 32 nt, Human
gcugccggcugcccagccuggcuggcaccaug

SEQ ID NO: 181402 - RNA, 32 nt, Human
gcugccggcuggcugcuacccgcccgcgccag

SEQ ID NO: 181403 - RNA, 32 nt, Human
gcugccggcuucauuuauuccugcugauggcu

SEQ ID NO: 181404 - RNA, 32 nt, Human
gcugccgggaaggccaagaagcagguguucua

SEQ ID NO: 181405 - RNA, 32 nt, Human
gcugccgggagcccugaaucaccgccuggccc

SEQ ID NO: 181406 - RNA, 32 nt, Human
gcugccgggaggcgggagggagugcccugaaa

SEQ ID NO: 181407 - RNA, 32 nt, Human
gcugccgucauccaggcuggacaguucaguga

SEQ ID NO: 181408 - RNA, 32 nt, Human
gcugccguccccgcgugugaggcacagaaggg

SEQ ID NO: 181409 - RNA, 32 nt, Human
gcugccguccuucucuugcacugccuucugcg

SEQ ID NO: 181410 - RNA, 20 nt, Human
gcugccgucgccgccgccac

SEQ ID NO: 181411 - RNA, 20 nt, Human
gcugccgucgccgccgccau

SEQ ID NO: 181412 - RNA, 32 nt, Human
gcugccgugcaguucuugccucccucacgggg

SEQ ID NO: 181413 - RNA, 25 nt, Human
gcugccgugucgccgccgccgccgc

SEQ ID NO: 181414 - RNA, 32 nt, Human
gcugccgugugcgugugcgucagggcucuccg

SEQ ID NO: 181415 - RNA, 32 nt, Human
gcugccuaaaguuaaaggacuuggggaaaguc

SEQ ID NO: 181416 - RNA, 32 nt, Human
gcugccuaaggaaggccagcaugccuccaagg

SEQ ID NO: 181417 - RNA, 32 nt, Human
gcugccuacuuucugcccggaucucuggcucc

SEQ ID NO: 181418 - RNA, 32 nt, Human
gcugccuaggccuggagggaagcccaaggcua

SEQ ID NO: 181419 - RNA, 32 nt, Human
gcugccuaggcugagugcaguggugugaucga

SEQ ID NO: 181420 - RNA, 32 nt, Human
gcugccuaguacuauacaagaagcucuacuuu

SEQ ID NO: 181421 - RNA, 32 nt, Human
gcugccuaucucugucuaccucaggucugacu

SEQ ID NO: 181422 - RNA, 32 nt, Human
gcugccuaugcguccccagccugggcugacag

SEQ ID NO: 181423 - RNA, 32 nt, Human
gcugccucacauugggccucagcagcucccca

SEQ ID NO: 181424 - RNA, 32 nt, Human
gcugccucacccaggugaguggaauuggccuu

SEQ ID NO: 181425 - RNA, 32 nt, Human
gcugccucagcaggucauuuggcuucugagau

SEQ ID NO: 181426 - RNA, 32 nt, Human
gcugccucagccaagcugagccucucaacugg

SEQ ID NO: 181427 - RNA, 32 nt, Human
gcugccucagccaguggcacaggagacuccaa

SEQ ID NO: 181428 - RNA, 32 nt, Human
gcugccucagcgugcuaaucaauggcugcaga

SEQ ID NO: 181429 - RNA, 32 nt, Human
gcugccuccacagacugcugucuccuuguccu

SEQ ID NO: 181430 - RNA, 32 nt, Human
gcugccuccaccucacuguccccagccugccu

SEQ ID NO: 181431 - RNA, 20 nt, Human
gcugccuccacuccugccuc

SEQ ID NO: 181432 - RNA, 32 nt, Human
gcugccuccagccccagcaacccggccgcccu

SEQ ID NO: 181433 - RNA, 17 nt, Human
gcugccuccagccucug

SEQ ID NO: 181434 - RNA, 18 nt, Human
gcugccuccagcugccca

SEQ ID NO: 181435 - RNA, 32 nt, Human
gcugccuccagcugcccaccacaggccugccc

SEQ ID NO: 181436 - RNA, 25 nt, Human
gcugccuccagggggcaccaaggca

SEQ ID NO: 181437 - RNA, 32 nt, Human
gcugccucccaccuugccugggugauggugaa

SEQ ID NO: 181438 - RNA, 32 nt, Human
gcugccucccaggcugcugggacugggcuggu

SEQ ID NO: 181439 - RNA, 19 nt, Human
gcugccuccccauuuccuc

SEQ ID NO: 181440 - RNA, 20 nt, Human
gcugccuccccgcccccgcc

SEQ ID NO: 181441 - RNA, 22 nt, Human
gcugccuccccuaaauugacuc

SEQ ID NO: 181442 - RNA, 21 nt, Human
gcugccuccccugugacucug

SEQ ID NO: 181443 - RNA, 32 nt, Human
gcugccuccguggucccugccuggcugaggug

SEQ ID NO: 181444 - RNA, 32 nt, Human
gcugccuccuccacucagcauuccauggacca

SEQ ID NO: 181445 - RNA, 32 nt, Human
gcugccuccuccuccuccuccucugaggacag

SEQ ID NO: 181446 - RNA, 32 nt, Human
gcugccuccucugggcccucuccuucgucugg

SEQ ID NO: 181447 - RNA, 32 nt, Human
gcugccuccugccuuuucuuuuguaaagacaa

SEQ ID NO: 181448 - RNA, 32 nt, Human
gcugccuccuuuuaccuucugauaccuggaaa

SEQ ID NO: 181449 - RNA, 18 nt, Human
gcugccucgacacagcac

SEQ ID NO: 181450 - RNA, 32 nt, Human
gcugccucggugucccugucgggcuucccagc

SEQ ID NO: 181451 - RNA, 32 nt, Human
gcugccucuaccacagccuccugcccaccagc

SEQ ID NO: 181452 - RNA, 32 nt, Human
gcugccucucaaagcugauucacuggaggaag

SEQ ID NO: 181453 - RNA, 32 nt, Human
gcugccucucaucuccacccacugacugcaga

SEQ ID NO: 181454 - RNA, 24 nt, Human
gcugccucucccaccacaagccca

SEQ ID NO: 181455 - RNA, 25 nt, Human
gcugccucuccuauuaucuauuauc

SEQ ID NO: 181456 - RNA, 32 nt, Human
gcugccucuccuccugcugucucugcuggugg

SEQ ID NO: 181457 - RNA, 32 nt, Human
gcugccucuccucgaaaagucaucuucucgcg

SEQ ID NO: 181458 - RNA, 32 nt, Human
gcugccucuccucucuguguugucugggcccu

SEQ ID NO: 181459 - RNA, 32 nt, Human
gcugccucuccucuggauuggucucaggcucu

SEQ ID NO: 181460 - RNA, 32 nt, Human
gcugccucucucucugaagcauggcucaggug

SEQ ID NO: 181461 - RNA, 17 nt, Human
gcugccucucuuguccu

SEQ ID NO: 181462 - RNA, 20 nt, Human
gcugccucugaaauagcgcc

SEQ ID NO: 181463 - RNA, 19 nt, Human
gcugccucugaaggcacca

SEQ ID NO: 181464 - RNA, 19 nt, Human
gcugccucugccacugacu

SEQ ID NO: 181465 - RNA, 32 nt, Human
gcugccucugcuccuugccauuggaguucagc

SEQ ID NO: 181466 - RNA, 32 nt, Human
gcugccucuggcuuuauucuuuuugcuuagga

SEQ ID NO: 181467 - RNA, 32 nt, Human
gcugccucugggaaggaagaaacaggagcuag

SEQ ID NO: 181468 - RNA, 32 nt, Human
gcugccucuucaaguugacugcaguccaucac

SEQ ID NO: 181469 - RNA, 32 nt, Human
gcugccucuucaggaaccggagcucauuacug

SEQ ID NO: 181470 - RNA, 32 nt, Human
gcugccucuucccagccucaucacugcagugc

SEQ ID NO: 181471 - RNA, 19 nt, Human
gcugccucuuccugaggca

SEQ ID NO: 181472 - RNA, 32 nt, Human
gcugccucuuccuuccccuccucccuguugcc

SEQ ID NO: 181473 - RNA, 22 nt, Human
gcugccugaaacagccaugucc

SEQ ID NO: 181474 - RNA, 21 nt, Human
gcugccugacccccagcacaa

SEQ ID NO: 181475 - RNA, 32 nt, Human
gcugccugacuugccguccaccucucagcccc

SEQ ID NO: 181476 - RNA, 32 nt, Human
gcugccugauuucucauuucucgaagcacaca

SEQ ID NO: 181477 - RNA, 32 nt, Human
gcugccugccaggggagaccugggaccuggac

SEQ ID NO: 181478 - RNA, 32 nt, Human
gcugccugcccgaggcugguccugaaggccug

SEQ ID NO: 181479 - RNA, 18 nt, Human
gcugccugcccugcucca

SEQ ID NO: 181480 - RNA, 24 nt, Human
gcugccugccgccgccgccuccac

SEQ ID NO: 181481 - RNA, 32 nt, Human
gcugccugccugucugucucuccaucuguuug

SEQ ID NO: 181482 - RNA, 22 nt, Human
gcugccugcgcgccccggggcg

SEQ ID NO: 181483 - RNA, 32 nt, Human
gcugccugcuccagacauuuuguucuugaauc

SEQ ID NO: 181484 - RNA, 32 nt, Human
gcugccugcuccaugugucuuaugagagcccg

SEQ ID NO: 181485 - RNA, 32 nt, Human
gcugccugcucuaugcccugagaccccacugc

SEQ ID NO: 181486 - RNA, 18 nt, Human
gcugccugcuguccuccc

SEQ ID NO: 181487 - RNA, 32 nt, Human
gcugccuggagaaaggauggcagccucagggc

SEQ ID NO: 181488 - RNA, 32 nt, Human
gcugccuggcugccucaguuugcagaugugac

SEQ ID NO: 181489 - RNA, 32 nt, Human
gcugccugggacaggcuccugaggaggauuga

SEQ ID NO: 181490 - RNA, 25 nt, Human
gcugccugggcaccucucugaggca

SEQ ID NO: 181491 - RNA, 32 nt, Human
gcugccugggccccgauuccagcauggggcau

SEQ ID NO: 181492 - RNA, 20 nt, Human
gcugccuggggagcuggcca

SEQ ID NO: 181493 - RNA, 32 nt, Human
gcugccuggggcccaaguugcagugagcaggg

SEQ ID NO: 181494 - RNA, 32 nt, Human
gcugccuggggcuggcccugcucagacaaauc

SEQ ID NO: 181495 - RNA, 32 nt, Human
gcugccugguccucagcagugcagccccggcg

SEQ ID NO: 181496 - RNA, 27 nt, Human
gcugccugguguucccccucagcagca

SEQ ID NO: 181497 - RNA, 18 nt, Human
gcugccuguagcugcgcc

SEQ ID NO: 181498 - RNA, 32 nt, Human
gcugccuguagucccagcuacucagaaggccg

SEQ ID NO: 181499 - RNA, 32 nt, Human
gcugccugucaccacuguggccucuccaagcg

SEQ ID NO: 181500 - RNA, 32 nt, Human
gcugccuguccccaugcuuaacauacccgccu

SEQ ID NO: 181501 - RNA, 32 nt, Human
gcugccugucugucugucacucucuaucugcc

SEQ ID NO: 181502 - RNA, 32 nt, Human
gcugccugugugacuuuggggcucccucugcc

SEQ ID NO: 181503 - RNA, 32 nt, Human
gcugccuguugugaaugucccugcugcaaagu

SEQ ID NO: 181504 - RNA, 32 nt, Human
gcugccuucaaggacuguuucagugugaguca

SEQ ID NO: 181505 - RNA, 32 nt, Human
gcugccuucacuccuuucugaccaagcaacgc

SEQ ID NO: 181506 - RNA, 32 nt, Human
gcugccuuccacugccaucgggucuccucucc

SEQ ID NO: 181507 - RNA, 32 nt, Human
gcugccuuccccaagcauccagccuggggaug

SEQ ID NO: 181508 - RNA, 21 nt, Human
gcugccuuccuggccagccag

SEQ ID NO: 181509 - RNA, 32 nt, Human
gcugccuucucaaggaguccacagucuggagg

SEQ ID NO: 181510 - RNA, 32 nt, Human
gcugccuucucccuguccuccuccuggauugu

SEQ ID NO: 181511 - RNA, 32 nt, Human
gcugccuuggauggccucaggccagguaaccc

SEQ ID NO: 181512 - RNA, 26 nt, Human
gcugccuuggccguauuuggcaccca

SEQ ID NO: 181513 - RNA, 32 nt, Human
gcugccuugggaacugcaucuccugggcuggu

SEQ ID NO: 181514 - RNA, 32 nt, Human
gcugccuuuaagaauaccaugaauguaagaaa

SEQ ID NO: 181515 - RNA, 32 nt, Human
gcugccuuuccccagggaauccucuccagauc

SEQ ID NO: 181516 - RNA, 32 nt, Human
gcugccuuucugguuccaucuccuugggugug

SEQ ID NO: 181517 - RNA, 32 nt, Human
gcugccuuugcaaggacuacugggcuucccaa

SEQ ID NO: 181518 - RNA, 32 nt, Human
gcugccuuugccccacugccuccccuguucug

SEQ ID NO: 181519 - RNA, 32 nt, Human
gcugccuuuggacauaacuaagccaggaaacu

SEQ ID NO: 181520 - RNA, 32 nt, Human
gcugccuuuguaacugcauggaaacuuuucac

SEQ ID NO: 181521 - RNA, 32 nt, Human
gcugccuuuucaggaacccgaauuugggaagu

SEQ ID NO: 181522 - RNA, 22 nt, Human
gcugcgaauccugccugcucug

SEQ ID NO: 181523 - RNA, 32 nt, Human
gcugcgaaugucccugagucaacaccaauaga

SEQ ID NO: 181524 - RNA, 32 nt, Human
gcugcgagagccugugcuuaaguaagaaucag

SEQ ID NO: 181525 - RNA, 32 nt, Human
gcugcgagcacaugauggcgauacgggagcuc

SEQ ID NO: 181526 - RNA, 32 nt, Human
gcugcgagccugacagacaugggaggcucugc

SEQ ID NO: 181527 - RNA, 32 nt, Human
gcugcgagcucucuguggugcuggcagcgaca

SEQ ID NO: 181528 - RNA, 32 nt, Human
gcugcgaggagcccuccagacgucgccgagcg

SEQ ID NO: 181529 - RNA, 31 nt, Human
gcugcgagggcaugggagugaucucaccaac

SEQ ID NO: 181530 - RNA, 32 nt, Human
gcugcgaggucaggcuguaaccgggucaaugu

SEQ ID NO: 181531 - RNA, 25 nt, Human
gcugcgaggugggggacccugggca

SEQ ID NO: 181532 - RNA, 32 nt, Human
gcugcgaggugggggacccugggcaggaagcu

SEQ ID NO: 181533 - RNA, 19 nt, Human
gcugcgcaauuacuacuau

SEQ ID NO: 181534 - RNA, 32 nt, Human
gcugcgcaccugcugggugacuuggccaggau

SEQ ID NO: 181535 - RNA, 32 nt, Human
gcugcgcagcgcuccacucggccggcagcgga

SEQ ID NO: 181536 - RNA, 32 nt, Human
gcugcgcccacaggaaguccagucccgacagu

SEQ ID NO: 181537 - RNA, 32 nt, Human
gcugcgcccccagcuucucucucccugucaca

SEQ ID NO: 181538 - RNA, 32 nt, Human
gcugcgcccggcuccuccccucccaggccccg

SEQ ID NO: 181539 - RNA, 19 nt, Human
gcugcgccgccaggcccca

SEQ ID NO: 181540 - RNA, 21 nt, Human
gcugcgccgccggccgcugca

SEQ ID NO: 181541 - RNA, 22 nt, Human
gcugcgccgccuccgaccccag

SEQ ID NO: 181542 - RNA, 24 nt, Human
gcugcgccgcggggccggccccag

SEQ ID NO: 181543 - RNA, 22 nt, Human
gcugcgccgcuucccgccgcag

SEQ ID NO: 181544 - RNA, 32 nt, Human
gcugcgccguagugggaggccacggcgauuac

SEQ ID NO: 181545 - RNA, 32 nt, Human
gcugcgccuaggcuggagcuggaagggugggu

SEQ ID NO: 181546 - RNA, 32 nt, Human
gcugcgccuccaggcuggaccagcaguuccag

SEQ ID NO: 181547 - RNA, 32 nt, Human
gcugcgccugcucaacuucauccugcauguac

SEQ ID NO: 181548 - RNA, 32 nt, Human
gcugcgccuuccucacgugugugaaagguuuu

SEQ ID NO: 181549 - RNA, 32 nt, Human
gcugcgcgcacaccuucagcuccaugucgccc

SEQ ID NO: 181550 - RNA, 32 nt, Human
gcugcgcgcaggcugggcugcaggcucucggc

SEQ ID NO: 181551 - RNA, 32 nt, Human
gcugcgcgcuccucaugacaaucuaaugccug

SEQ ID NO: 181552 - RNA, 32 nt, Human
gcugcgcggagguugcccagccccaguuucuu

SEQ ID NO: 181553 - RNA, 18 nt, Human
gcugcgcgggccccgcca

SEQ ID NO: 181554 - RNA, 32 nt, Human
gcugcgcgguccuauacggucccugcuuagcc

SEQ ID NO: 181555 - RNA, 18 nt, Human
gcugcgcggugcugcgcc

SEQ ID NO: 181556 - RNA, 32 nt, Human
gcugcgcgucguuacuggccacaaguuugcuc

SEQ ID NO: 181557 - RNA, 32 nt, Human
gcugcgcgugugggucucugggcacagugggc

SEQ ID NO: 181558 - RNA, 32 nt, Human
gcugcgcucaguugauaacauaguugauaaua

SEQ ID NO: 181559 - RNA, 32 nt, Human
gcugcgcucuccgccgcgcucuaccuccauua

SEQ ID NO: 181560 - RNA, 32 nt, Human
gcugcgcuggcccccaucaucugcuccaaagc

SEQ ID NO: 181561 - RNA, 32 nt, Human
gcugcgcuugucuccagcuuccagcccuccuc

SEQ ID NO: 181562 - RNA, 32 nt, Human
gcugcggaagaaaaguaggagacuaggagagg

SEQ ID NO: 181563 - RNA, 32 nt, Human
gcugcggaagaacugaagguugcgaugccuua

SEQ ID NO: 181564 - RNA, 32 nt, Human
gcugcggacuacuucagccuaugugaaguagc

SEQ ID NO: 181565 - RNA, 32 nt, Human
gcugcggagagggggagagcaggcagcgggcg

SEQ ID NO: 181566 - RNA, 32 nt, Human
gcugcggaggcaggcugagggcgcaggggcug

SEQ ID NO: 181567 - RNA, 32 nt, Human
gcugcggaggcugcggcccccagaucuuucuc

SEQ ID NO: 181568 - RNA, 32 nt, Human
gcugcggagggcccugcgcgccgcaccacgcg

SEQ ID NO: 181569 - RNA, 23 nt, Human
gcugcggauccagcuggagcucu

SEQ ID NO: 181570 - RNA, 24 nt, Human
gcugcggcagcuucagcuggcaga

SEQ ID NO: 181571 - RNA, 23 nt, Human
gcugcggcaggagaauugcuuga

SEQ ID NO: 181572 - RNA, 21 nt, Human
gcugcggcaggcaacagaagg

SEQ ID NO: 181573 - RNA, 26 nt, Human
gcugcggccaaagaacauggaaaagc

SEQ ID NO: 181574 - RNA, 19 nt, Human
gcugcggccacugcagcag

SEQ ID NO: 181575 - RNA, 32 nt, Human
gcugcggccagggaggugcggagcagcuucgg

SEQ ID NO: 181576 - RNA, 32 nt, Human
gcugcggcccaggagcggcggccgcggagccc

SEQ ID NO: 181577 - RNA, 32 nt, Human
gcugcggcccaggcagccaguccugguggugu

SEQ ID NO: 181578 - RNA, 32 nt, Human
gcugcggccgggagcugcaugggggagcgccg

SEQ ID NO: 181579 - RNA, 19 nt, Human
gcugcggccuugaccuccu

SEQ ID NO: 181580 - RNA, 32 nt, Human
gcugcggcgacaccuacaagaaaaugaagggg

SEQ ID NO: 181581 - RNA, 23 nt, Human
gcugcggcgggagaaucgcuuga

SEQ ID NO: 181582 - RNA, 32 nt, Human
gcugcggcgggagaugcugucgggccgcggcg

SEQ ID NO: 181583 - RNA, 32 nt, Human
gcugcggcuccauccucggcuccugggcaccg

SEQ ID NO: 181584 - RNA, 22 nt, Human
gcugcggcucgaggccacgccc

SEQ ID NO: 181585 - RNA, 32 nt, Human
gcugcggcucuggccucccaggcccauccuca

SEQ ID NO: 181586 - RNA, 32 nt, Human
gcugcggcugcuagcccgaggucuccaagccg

SEQ ID NO: 181587 - RNA, 32 nt, Human
gcugcggcuucuggcugcgcggccugcgcgcg

SEQ ID NO: 181588 - RNA, 32 nt, Human
gcugcgggagcgacgaggcgggcgcggagggc

SEQ ID NO: 181589 - RNA, 32 nt, Human
gcugcgggaggaagugaagccgggaggggcug

SEQ ID NO: 181590 - RNA, 32 nt, Human
gcugcgggaggcagacagccaggacuugaagc

SEQ ID NO: 181591 - RNA, 32 nt, Human
gcugcgggaggcggcggcgguaggaagccgga

SEQ ID NO: 181592 - RNA, 32 nt, Human
gcugcgggaggcggggguuggcgugccugagg

SEQ ID NO: 181593 - RNA, 32 nt, Human
gcugcgggagguagguaccauggccauucagc

SEQ ID NO: 181594 - RNA, 32 nt, Human
gcugcgggccaccaacaugcugggcagcgccu

SEQ ID NO: 181595 - RNA, 32 nt, Human
gcugcggggagaaggggcagaggcucaccucc

SEQ ID NO: 181596 - RNA, 32 nt, Human
gcugcggggcagguguugcagcuugugggcga

SEQ ID NO: 181597 - RNA, 32 nt, Human
gcugcggggcugggacagcacuggcaucucca

SEQ ID NO: 181598 - RNA, 32 nt, Human
gcugcgggggcaggccgggccugcugucaccu

SEQ ID NO: 181599 - RNA, 32 nt, Human
gcugcgggucaucgugggaagggaggcugacu

SEQ ID NO: 181600 - RNA, 32 nt, Human
gcugcggguuccggcgaggccugagcugugcu

SEQ ID NO: 181601 - RNA, 32 nt, Human
gcugcggucugaggccccugcccagcuggaaa

SEQ ID NO: 181602 - RNA, 32 nt, Human
gcugcggugugacaacaugcaccaccaguggc

SEQ ID NO: 181603 - RNA, 32 nt, Human
gcugcgguuggcaccuccuuccucacucccuc

SEQ ID NO: 181604 - RNA, 32 nt, Human
gcugcguaacauccauccugcuacaacucuuc

SEQ ID NO: 181605 - RNA, 32 nt, Human
gcugcguacacggcgaguacaccgcaccugcc

SEQ ID NO: 181606 - RNA, 22 nt, Human
gcugcgucgcuuuaagcacaaa

SEQ ID NO: 181607 - RNA, 32 nt, Human
gcugcgucucugcuguggugucaguuccggau

SEQ ID NO: 181608 - RNA, 32 nt, Human
gcugcgugaccugaacacgucacuuuaccucu

SEQ ID NO: 181609 - RNA, 32 nt, Human
gcugcgugacugucugucucugccaugucucu

SEQ ID NO: 181610 - RNA, 32 nt, Human
gcugcgugcagagcccacugggcacggugguc

SEQ ID NO: 181611 - RNA, 32 nt, Human
gcugcgugcccuuuaagugaucaccucuuagu

SEQ ID NO: 181612 - RNA, 31 nt, Human
gcugcgugccuccgucugccugugugcuggc

SEQ ID NO: 181613 - RNA, 32 nt, Human
gcugcgugcgcugccugcucccgccugaggaa

SEQ ID NO: 181614 - RNA, 32 nt, Human
gcugcgugggaguccccacuucccaggcuauc

SEQ ID NO: 181615 - RNA, 18 nt, Human
gcugcgugggcagggcug

SEQ ID NO: 181616 - RNA, 32 nt, Human
gcugcguggucaccaaccgauucgaccaguua

SEQ ID NO: 181617 - RNA, 28 nt, Human
gcugcguguugauuuggaggcacugcag

SEQ ID NO: 181618 - RNA, 32 nt, Human
gcugcguguuggaugggagugggagggggcug

SEQ ID NO: 181619 - RNA, 32 nt, Human
gcugcguguuuuucauuuuaaacacacaagau

SEQ ID NO: 181620 - RNA, 32 nt, Human
gcugcguuggagcugcagaggcugcggaguga

SEQ ID NO: 181621 - RNA, 32 nt, Human
gcugcguuggggccaccagaaggaaccagccc

SEQ ID NO: 181622 - RNA, 32 nt, Human
gcugcguuuccucugccugcgccgggcaucac

SEQ ID NO: 181623 - RNA, 32 nt, Human
gcugcguuuuucucccaugcacuugcacgucc

SEQ ID NO: 181624 - RNA, 32 nt, Human
gcugcuaaaauagauguuucauuuuucugacu

SEQ ID NO: 181625 - RNA, 32 nt, Human
gcugcuaaauucacacuuucuacuuucauacc

SEQ ID NO: 181626 - RNA, 18 nt, Human
gcugcuaaccuggcacca

SEQ ID NO: 181627 - RNA, 32 nt, Human
gcugcuaaguacuccgguucccagcuucugca

SEQ ID NO: 181628 - RNA, 22 nt, Human
gcugcuaaguagggcuagggca

SEQ ID NO: 181629 - RNA, 21 nt, Human
gcugcuaaguggcugaaggca

SEQ ID NO: 181630 - RNA, 32 nt, Human
gcugcuacaccguguucaucaggaaaggucuu

SEQ ID NO: 181631 - RNA, 20 nt, Human
gcugcuaccccaguuccauc

SEQ ID NO: 181632 - RNA, 20 nt, Human
gcugcuacccgcccgcgcca

SEQ ID NO: 181633 - RNA, 32 nt, Human
gcugcuacccucaggccagggugugcggugga

SEQ ID NO: 181634 - RNA, 32 nt, Human
gcugcuaccgccgccccauccccagggaccac

SEQ ID NO: 181635 - RNA, 21 nt, Human
gcugcuaccucauaauaaauc

SEQ ID NO: 181636 - RNA, 19 nt, Human
gcugcuaccuucuguuauc

SEQ ID NO: 181637 - RNA, 18 nt, Human
gcugcuaccuugcuuuca

SEQ ID NO: 181638 - RNA, 20 nt, Human
gcugcuaccuuucggcagca

SEQ ID NO: 181639 - RNA, 31 nt, Human
gcugcuacucaaaauguccuguugaagaggg

SEQ ID NO: 181640 - RNA, 32 nt, Human
gcugcuagagcuggagcauuugccggucagua

SEQ ID NO: 181641 - RNA, 32 nt, Human
gcugcuagaguccucaauuuuauucuaaucau

SEQ ID NO: 181642 - RNA, 32 nt, Human
gcugcuaugcuguucauugaugacaugggauu

SEQ ID NO: 181643 - RNA, 32 nt, Human
gcugcuauggugcugaguuuccugguagagcc

SEQ ID NO: 181644 - RNA, 32 nt, Human
gcugcuaugguuuucuccaagagcuacauaau

SEQ ID NO: 181645 - RNA, 32 nt, Human
gcugcuauguuaggaguaauuaguuauuuagg

SEQ ID NO: 181646 - RNA, 32 nt, Human
gcugcucaaagcagguuucugagauagcugac

SEQ ID NO: 181647 - RNA, 32 nt, Human
gcugcucacagaacagagaguuucuacauaca

SEQ ID NO: 181648 - RNA, 32 nt, Human
gcugcucaccgcaaccuccgccuuccagguuc

SEQ ID NO: 181649 - RNA, 32 nt, Human
gcugcucaccggauccucagucuuccacaaug

SEQ ID NO: 181650 - RNA, 20 nt, Human
gcugcucaccugagcacaaa

SEQ ID NO: 181651 - RNA, 32 nt, Human
gcugcucacgcccaccaucucccuucuaccca

SEQ ID NO: 181652 - RNA, 32 nt, Human
gcugcucagacccuccagaugagguccagccc

SEQ ID NO: 181653 - RNA, 32 nt, Human
gcugcucagacuccuggguggcuuccagacgg

SEQ ID NO: 181654 - RNA, 32 nt, Human
gcugcucagcagaggauaugggugggagcgaa

SEQ ID NO: 181655 - RNA, 32 nt, Human
gcugcucagccuguuuucucucucauggucug

SEQ ID NO: 181656 - RNA, 32 nt, Human
gcugcucagcuuucucagggaagcaacuccag

SEQ ID NO: 181657 - RNA, 32 nt, Human
gcugcucaggaggugcagacugccccgugcuc

SEQ ID NO: 181658 - RNA, 32 nt, Human
gcugcucagggcccuccuccugaaggugagcc

SEQ ID NO: 181659 - RNA, 18 nt, Human
gcugcucagggcucaggc

SEQ ID NO: 181660 - RNA, 32 nt, Human
gcugcucaggggcuuaauucugccuuuugaug

SEQ ID NO: 181661 - RNA, 32 nt, Human
gcugcucaguugguggagacuggggcugggac

SEQ ID NO: 181662 - RNA, 32 nt, Human
gcugcucauuuucccaugagccuguguauuuu

SEQ ID NO: 181663 - RNA, 22 nt, Human
gcugcuccaaggggcccauggu

SEQ ID NO: 181664 - RNA, 32 nt, Human
gcugcuccaaucaaaacugaaaaugcuuuuaa

SEQ ID NO: 181665 - RNA, 32 nt, Human
gcugcuccagaaggaaccuggguggggagggc

SEQ ID NO: 181666 - RNA, 32 nt, Human
gcugcuccagcccgcgaugaggaaaaguccag

SEQ ID NO: 181667 - RNA, 32 nt, Human
gcugcuccagcugccaacuuugcugcagagcc

SEQ ID NO: 181668 - RNA, 32 nt, Human
gcugcuccaggaacagaggugccaugcagccc

SEQ ID NO: 181669 - RNA, 32 nt, Human
gcugcuccagucucagccugggcagcuucccc

SEQ ID NO: 181670 - RNA, 19 nt, Human
gcugcuccauccuccccug

SEQ ID NO: 181671 - RNA, 32 nt, Human
gcugcuccaugaggucaagacugggucuccuc

SEQ ID NO: 181672 - RNA, 32 nt, Human
gcugcuccauguguaccaagagcagcagggca

SEQ ID NO: 181673 - RNA, 32 nt, Human
gcugcuccauucuacacaggacagcauuucca

SEQ ID NO: 181674 - RNA, 21 nt, Human
gcugcucccacaccugcgcca

SEQ ID NO: 181675 - RNA, 16 nt, Human
gcugcucccagaugac

SEQ ID NO: 181676 - RNA, 32 nt, Human
gcugcucccaggacacugaggccaagagaaau

SEQ ID NO: 181677 - RNA, 32 nt, Human
gcugcucccaggcuggggcugugcugcaggcu

SEQ ID NO: 181678 - RNA, 19 nt, Human
gcugcuccccaaaagccac

SEQ ID NO: 181679 - RNA, 32 nt, Human
gcugcuccccaggacuaugaggccguggcucg

SEQ ID NO: 181680 - RNA, 32 nt, Human
gcugcuccccgagggccacaugcuggacgaca

SEQ ID NO: 181681 - RNA, 32 nt, Human
gcugcuccccuccccagacaccucuccacguc

SEQ ID NO: 181682 - RNA, 32 nt, Human
gcugcuccccuuuuagaauuuaccucuuauga

SEQ ID NO: 181683 - RNA, 32 nt, Human
gcugcucccggccgaagguggggacaggcagu

SEQ ID NO: 181684 - RNA, 32 nt, Human
gcugcucccuccugccugcuauccaaguaucc

SEQ ID NO: 181685 - RNA, 32 nt, Human
gcugcucccuuucucccucucuuccucccucu

SEQ ID NO: 181686 - RNA, 32 nt, Human
gcugcuccgaggacccaggaaaggcaggauug

SEQ ID NO: 181687 - RNA, 22 nt, Human
gcugcuccggguuucugaggca

SEQ ID NO: 181688 - RNA, 32 nt, Human
gcugcuccucagcaggcgccucaccagccucc

SEQ ID NO: 181689 - RNA, 32 nt, Human
gcugcuccuccagggccacgugccaggcccgg

SEQ ID NO: 181690 - RNA, 32 nt, Human
gcugcuccugccguuuucuuccugccaagccu

SEQ ID NO: 181691 - RNA, 32 nt, Human
gcugcuccugcucucugaucuuauugcuuaua

SEQ ID NO: 181692 - RNA, 24 nt, Human
gcugcuccugggaggggcucaggc

SEQ ID NO: 181693 - RNA, 32 nt, Human
gcugcuccuugggaugaugggagaagggggaa

SEQ ID NO: 181694 - RNA, 24 nt, Human
gcugcucggaccgcggccacagcc

SEQ ID NO: 181695 - RNA, 26 nt, Human
gcugcucggggcgccgccgccgccgc

SEQ ID NO: 181696 - RNA, 20 nt, Human
gcugcucggguucugaggca

SEQ ID NO: 181697 - RNA, 32 nt, Human
gcugcucuaagcaccgucccugcccagcccca

SEQ ID NO: 181698 - RNA, 32 nt, Human
gcugcucuaaugggagaagggagcuuugcaaa

SEQ ID NO: 181699 - RNA, 32 nt, Human
gcugcucuacgcgcuggcgcggauggggcacg

SEQ ID NO: 181700 - RNA, 32 nt, Human
gcugcucuaggagcagauacaggcugguauag

SEQ ID NO: 181701 - RNA, 32 nt, Human
gcugcucucagaacuccugagcucaggcaguc

SEQ ID NO: 181702 - RNA, 32 nt, Human
gcugcucucaugccaggaagggagcuuccauu

SEQ ID NO: 181703 - RNA, 32 nt, Human
gcugcucucccagaaaacugguggagccggug

SEQ ID NO: 181704 - RNA, 32 nt, Human
gcugcucucccagggccugggugugcuucgug

SEQ ID NO: 181705 - RNA, 32 nt, Human
gcugcucucucaccugagggucguucucaugu

SEQ ID NO: 181706 - RNA, 32 nt, Human
gcugcucucuccccaucuccuaccccacaucc

SEQ ID NO: 181707 - RNA, 32 nt, Human
gcugcucucugccuccuuuaaauucuugauac

SEQ ID NO: 181708 - RNA, 32 nt, Human
gcugcucucugccugccccaggucuuugggua

SEQ ID NO: 181709 - RNA, 32 nt, Human
gcugcucugacaccauggggagcugcugcagc

SEQ ID NO: 181710 - RNA, 18 nt, Human
gcugcucugagaagugua

SEQ ID NO: 181711 - RNA, 32 nt, Human
gcugcucugagggagagacagugagcugcaag

SEQ ID NO: 181712 - RNA, 32 nt, Human
gcugcucugcagccccaaauggcuccugggcc

SEQ ID NO: 181713 - RNA, 32 nt, Human
gcugcucugccggggucaucuccugggucauc

SEQ ID NO: 181714 - RNA, 32 nt, Human
gcugcucugggaggcuaaggcucaucucucua

SEQ ID NO: 181715 - RNA, 32 nt, Human
gcugcucugggccaggaaaucucucuauggau

SEQ ID NO: 181716 - RNA, 32 nt, Human
gcugcucugggccuccccaccuuuccuggggu

SEQ ID NO: 181717 - RNA, 32 nt, Human
gcugcucuguccacauuccauccaccaaagca

SEQ ID NO: 181718 - RNA, 32 nt, Human
gcugcucugucucgucagggcaaccaaggaga

SEQ ID NO: 181719 - RNA, 21 nt, Human
gcugcucuguggcccagggca

SEQ ID NO: 181720 - RNA, 32 nt, Human
gcugcucuuccagaagggacagugaugccacc

SEQ ID NO: 181721 - RNA, 32 nt, Human
gcugcucuuccagacuggcugugccugccugu

SEQ ID NO: 181722 - RNA, 32 nt, Human
gcugcucuucccucagcucugccggggcucua

SEQ ID NO: 181723 - RNA, 32 nt, Human
gcugcucuugcucucccucccagggcuugagg

SEQ ID NO: 181724 - RNA, 32 nt, Human
gcugcucuugcucuccucgugucugcuguuuu

SEQ ID NO: 181725 - RNA, 32 nt, Human
gcugcucuuggaggagagcagcucccacugug

SEQ ID NO: 181726 - RNA, 32 nt, Human
gcugcucuuggugaugggagaauggggacucu

SEQ ID NO: 181727 - RNA, 32 nt, Human
gcugcucuuucacuucucaggcaucaccgaga

SEQ ID NO: 181728 - RNA, 32 nt, Human
gcugcucuuucacuucucaggcgucaccgaga

SEQ ID NO: 181729 - RNA, 18 nt, Human
gcugcucuuuccacuugc

SEQ ID NO: 181730 - RNA, 32 nt, Human
gcugcucuuugucccacagagcagaaacagcu

SEQ ID NO: 181731 - RNA, 22 nt, Human
gcugcugaaaaugguccaggua

SEQ ID NO: 181732 - RNA, 32 nt, Human
gcugcugaaccagcucaagaaaaccuuccagc

SEQ ID NO: 181733 - RNA, 21 nt, Human
gcugcugaagaaauacaaggu

SEQ ID NO: 181734 - RNA, 32 nt, Human
gcugcugaagaaccagaccaaaaaccugcuuc

SEQ ID NO: 181735 - RNA, 19 nt, Human
gcugcugaaggaggaggca

SEQ ID NO: 181736 - RNA, 22 nt, Human
gcugcugaaggcauggaggaca

SEQ ID NO: 181737 - RNA, 19 nt, Human
gcugcugaaggccgcgagg

SEQ ID NO: 181738 - RNA, 20 nt, Human
gcugcugaaggcgucgaggu

SEQ ID NO: 181739 - RNA, 21 nt, Human
gcugcugaagggacuuguagg

SEQ ID NO: 181740 - RNA, 19 nt, Human
gcugcugaagggagcaugg

SEQ ID NO: 181741 - RNA, 20 nt, Human
gcugcugaagggagcauggu

SEQ ID NO: 181742 - RNA, 19 nt, Human
gcugcugaagggagggggc

SEQ ID NO: 181743 - RNA, 32 nt, Human
gcugcugaagggcgggagaaguugcggcgugg

SEQ ID NO: 181744 - RNA, 23 nt, Human
gcugcugaagguggggccuaggg

SEQ ID NO: 181745 - RNA, 24 nt, Human
gcugcugacagauuaacccaacaa

SEQ ID NO: 181746 - RNA, 32 nt, Human
gcugcugacaugacucuucacugacaguggug

SEQ ID NO: 181747 - RNA, 32 nt, Human
gcugcugaccaacacagcugcucacaguuccu

SEQ ID NO: 181748 - RNA, 21 nt, Human
gcugcugacgagccccaggca

SEQ ID NO: 181749 - RNA, 32 nt, Human
gcugcugacugacuccagccaaggugcaaaga

SEQ ID NO: 181750 - RNA, 32 nt, Human
gcugcugacugauguugagggaacagacagga

SEQ ID NO: 181751 - RNA, 32 nt, Human
gcugcugagaaagagaaugagaagaggcugcu

SEQ ID NO: 181752 - RNA, 18 nt, Human
gcugcugagaacagggca

SEQ ID NO: 181753 - RNA, 25 nt, Human
gcugcugagacugaacauguucaca

SEQ ID NO: 181754 - RNA, 19 nt, Human
gcugcugagagccaacagc

SEQ ID NO: 181755 - RNA, 24 nt, Human
gcugcugagagccuaguccagcag

SEQ ID NO: 181756 - RNA, 32 nt, Human
gcugcugagagcuuccuauagagccccugaca

SEQ ID NO: 181757 - RNA, 32 nt, Human
gcugcugagaggaggaggaggaugaagaguug

SEQ ID NO: 181758 - RNA, 32 nt, Human
gcugcugagccccacgccaagcuggagagcgg

SEQ ID NO: 181759 - RNA, 32 nt, Human
gcugcugagccccaggccaugguccccucucg

SEQ ID NO: 181760 - RNA, 32 nt, Human
gcugcugagccuguccuggcugggccucgggc

SEQ ID NO: 181761 - RNA, 32 nt, Human
gcugcugagcggaccugcugugugcucccucc

SEQ ID NO: 181762 - RNA, 21 nt, Human
gcugcugagcuuccccaagca

SEQ ID NO: 181763 - RNA, 20 nt, Human
gcugcugaggaaggauaggc

SEQ ID NO: 181764 - RNA, 21 nt, Human
gcugcugaggacagcacggca

SEQ ID NO: 181765 - RNA, 22 nt, Human
gcugcugaggagaccuggugca

SEQ ID NO: 181766 - RNA, 18 nt, Human
gcugcugaggagccaggg

SEQ ID NO: 181767 - RNA, 22 nt, Human
gcugcugaggaggcugaaggua

SEQ ID NO: 181768 - RNA, 26 nt, Human
gcugcugaggccacggcuucagggca

SEQ ID NO: 181769 - RNA, 24 nt, Human
gcugcugaggcggaggcugaggca

SEQ ID NO: 181770 - RNA, 20 nt, Human
gcugcugaggggcuagugca

SEQ ID NO: 181771 - RNA, 18 nt, Human
gcugcugagggggugggc

SEQ ID NO: 181772 - RNA, 20 nt, Human
gcugcugaggggucugaggc

SEQ ID NO: 181773 - RNA, 20 nt, Human
gcugcugaggggugagugca

SEQ ID NO: 181774 - RNA, 19 nt, Human
gcugcugagguaucaggca

SEQ ID NO: 181775 - RNA, 32 nt, Human
gcugcugagucacccacccagccuuggagcug

SEQ ID NO: 181776 - RNA, 32 nt, Human
gcugcugagucuccucuucugcuccuagccac

SEQ ID NO: 181777 - RNA, 32 nt, Human
gcugcugaguguccugcagcagcauuucaucc

SEQ ID NO: 181778 - RNA, 32 nt, Human
gcugcugaguguccugcagcagccuuucaucc

SEQ ID NO: 181779 - RNA, 32 nt, Human
gcugcugauagguucaaggaauucuuuaaacc

SEQ ID NO: 181780 - RNA, 19 nt, Human
gcugcugaucacgagggca

SEQ ID NO: 181781 - RNA, 19 nt, Human
gcugcugauccgccaggca

SEQ ID NO: 181782 - RNA, 32 nt, Human
gcugcugaucugaauauggaaaccccaugguu

SEQ ID NO: 181783 - RNA, 32 nt, Human
gcugcugauugugaucaccucucccgaucacc

SEQ ID NO: 181784 - RNA, 32 nt, Human
gcugcugcaagccagagggaggaagggggaga

SEQ ID NO: 181785 - RNA, 32 nt, Human
gcugcugcaaguccuccugggcuuccuucaga

SEQ ID NO: 181786 - RNA, 24 nt, Human
gcugcugcaccgcggggcccaggc

SEQ ID NO: 181787 - RNA, 32 nt, Human
gcugcugcacuccagccugggugacagaguga

SEQ ID NO: 181788 - RNA, 32 nt, Human
gcugcugcacuccccaaccucucccccacccc

SEQ ID NO: 181789 - RNA, 32 nt, Human
gcugcugcagagcuagaaggcccugcagcuac

SEQ ID NO: 181790 - RNA, 32 nt, Human
gcugcugcagcucucgggaaagcugcccagau

SEQ ID NO: 181791 - RNA, 32 nt, Human
gcugcugcagugagugguuccacugccuggau

SEQ ID NO: 181792 - RNA, 32 nt, Human
gcugcugccacucaaacuccagucguggcuaa

SEQ ID NO: 181793 - RNA, 32 nt, Human
gcugcugccaugaggcaccuuggggccuuccu

SEQ ID NO: 181794 - RNA, 32 nt, Human
gcugcugcccacccuccgccgcccgggccccc

SEQ ID NO: 181795 - RNA, 32 nt, Human
gcugcugccccacuacaggccccacaccugcc

SEQ ID NO: 181796 - RNA, 32 nt, Human
gcugcugcccugcuggccccuugugcacggca

SEQ ID NO: 181797 - RNA, 18 nt, Human
gcugcugccgcccagggc

SEQ ID NO: 181798 - RNA, 20 nt, Human
gcugcugccgcugccggguc

SEQ ID NO: 181799 - RNA, 32 nt, Human
gcugcugccugggauccacucauccccuucuu

SEQ ID NO: 181800 - RNA, 32 nt, Human
gcugcugccuggggaaguuuuuccuccccaag

SEQ ID NO: 181801 - RNA, 18 nt, Human
gcugcugcgggccagggc

SEQ ID NO: 181802 - RNA, 32 nt, Human
gcugcugcgggcuccccucaggcucugcuucg

SEQ ID NO: 181803 - RNA, 32 nt, Human
gcugcugcggggccaccaugcuccugcccagg

SEQ ID NO: 181804 - RNA, 20 nt, Human
gcugcugcuacuccaaggca

SEQ ID NO: 181805 - RNA, 32 nt, Human
gcugcugcuagccugcucacgcaugcagcccg

SEQ ID NO: 181806 - RNA, 32 nt, Human
gcugcugcucagaagaacuaagaaggaugggu

SEQ ID NO: 181807 - RNA, 32 nt, Human
gcugcugcucaggcaccugcccaugucgcggc

SEQ ID NO: 181808 - RNA, 32 nt, Human
gcugcugcuccaggaacucgcggucggccggg

SEQ ID NO: 181809 - RNA, 32 nt, Human
gcugcugcuccugcucagcuccugggaccaau

SEQ ID NO: 181810 - RNA, 32 nt, Human
gcugcugcucugcaccuuccucccgucuugcc

SEQ ID NO: 181811 - RNA, 32 nt, Human
gcugcugcugcacucacgcggcugggcuuucu

SEQ ID NO: 181812 - RNA, 32 nt, Human
gcugcugcugcacuccccaaccucucccccac

SEQ ID NO: 181813 - RNA, 32 nt, Human
gcugcugcugccgccagccuagagccgcccgc

SEQ ID NO: 181814 - RNA, 32 nt, Human
gcugcugcugccucuccgaagagcucgcggag

SEQ ID NO: 181815 - RNA, 32 nt, Human
gcugcugcugcugcuacuccugccaacacccc

SEQ ID NO: 181816 - RNA, 32 nt, Human
gcugcugcugcugcugcugccugcggcccggg

SEQ ID NO: 181817 - RNA, 18 nt, Human
gcugcugcuggccaaggc

SEQ ID NO: 181818 - RNA, 32 nt, Human
gcugcugcugucacuccuccaccgagggaggc

SEQ ID NO: 181819 - RNA, 32 nt, Human
gcugcugcugucgccugcgccugcugccccaa

SEQ ID NO: 181820 - RNA, 32 nt, Human
gcugcugcuguuauucaaagaucaaaggagua

SEQ ID NO: 181821 - RNA, 32 nt, Human
gcugcugcuguugcuacuguuugccucaaacg

SEQ ID NO: 181822 - RNA, 31 nt, Human
gcugcugcuguuugauggccugugcucuggg

SEQ ID NO: 181823 - RNA, 32 nt, Human
gcugcugcuucgagauccucccuuuuuaaagc

SEQ ID NO: 181824 - RNA, 32 nt, Human
gcugcugcuuuuccuuuuuacuuccuauuuuc

SEQ ID NO: 181825 - RNA, 23 nt, Human
gcugcuggaacccugccagggca

SEQ ID NO: 181826 - RNA, 32 nt, Human
gcugcuggaacccugcucucagccuggaggcu

SEQ ID NO: 181827 - RNA, 32 nt, Human
gcugcuggaagaaauagaagaaaacaacccac

SEQ ID NO: 181828 - RNA, 30 nt, Human
gcugcuggaagccagccagggcacugcccg

SEQ ID NO: 181829 - RNA, 32 nt, Human
gcugcuggaagucaccuuuggcaagcuguaug

SEQ ID NO: 181830 - RNA, 32 nt, Human
gcugcuggacaagggguaggagcugcuggaac

SEQ ID NO: 181831 - RNA, 32 nt, Human
gcugcuggaccccagaggccacugugaccgcc

SEQ ID NO: 181832 - RNA, 21 nt, Human
gcugcuggagaaauuaaggca

SEQ ID NO: 181833 - RNA, 32 nt, Human
gcugcuggagacagagucagagcagucaaggg

SEQ ID NO: 181834 - RNA, 18 nt, Human
gcugcuggagaggaaggu

SEQ ID NO: 181835 - RNA, 24 nt, Human
gcugcuggagagggagaucaaggc

SEQ ID NO: 181836 - RNA, 32 nt, Human
gcuuccagugccugggccgugccuaggugaug

SEQ ID NO: 181837 - RNA, 18 nt, Human
gcuuccaguuccauggcc

SEQ ID NO: 181838 - RNA, 32 nt, Human
gcuuccaguucccagguguucuuuguuugccu

SEQ ID NO: 181839 - RNA, 32 nt, Human
gcuuccauauucccuggggccagcacaugcaa

SEQ ID NO: 181840 - RNA, 32 nt, Human
gcuuccaucagaaccacugacuuccacaaucc

SEQ ID NO: 181841 - RNA, 32 nt, Human
gcuuccauccacggaaccucaccauggauacg

SEQ ID NO: 181842 - RNA, 32 nt, Human
gcuuccaucccuccuuccuucuuuccuccuac

SEQ ID NO: 181843 - RNA, 32 nt, Human
gcuuccaucucacuaaccacccaccccuaccu

SEQ ID NO: 181844 - RNA, 32 nt, Human
gcuuccaucucccggcugggcacgguggcuca

SEQ ID NO: 181845 - RNA, 32 nt, Human
gcuuccaucuguggugacuggaaugggaccca

SEQ ID NO: 181846 - RNA, 32 nt, Human
gcuuccauucuggauguuuggaacccuuuagc

SEQ ID NO: 181847 - RNA, 32 nt, Human
gcuuccauugcaagagaugaaaaagaaacaca

SEQ ID NO: 181848 - RNA, 32 nt, Human
gcuuccauuuuccuacaggcagucucucucuu

SEQ ID NO: 181849 - RNA, 32 nt, Human
gcuucccaaacaguaacucacuccaggccaag

SEQ ID NO: 181850 - RNA, 32 nt, Human
gcuucccaaagugcucaggauuacaggcguga

SEQ ID NO: 181851 - RNA, 22 nt, Human
gcuucccaacccaccacacagc

SEQ ID NO: 181852 - RNA, 32 nt, Human
gcuucccaagaguagccucaaccugugcuucu

SEQ ID NO: 181853 - RNA, 32 nt, Human
gcuucccaagccgcgcgacuccaugcuggggg

SEQ ID NO: 181854 - RNA, 24 nt, Human
gcuucccaaugagcacucagcagc

SEQ ID NO: 181855 - RNA, 21 nt, Human
gcuucccacagcccugccagc

SEQ ID NO: 181856 - RNA, 32 nt, Human
gcuucccaccagcagcuugacacccacagugu

SEQ ID NO: 181857 - RNA, 32 nt, Human
gcuucccaccugucuggggaggcugugggcuc

SEQ ID NO: 181858 - RNA, 32 nt, Human
gcuucccacugcagcagcaccagucuggggag

SEQ ID NO: 181859 - RNA, 32 nt, Human
gcuucccagaaagccuuucuccaucaucccag

SEQ ID NO: 181860 - RNA, 32 nt, Human
gcuucccagaacggaucuccccagccucgacu

SEQ ID NO: 181861 - RNA, 23 nt, Human
gcuucccagagaccccucugagc

SEQ ID NO: 181862 - RNA, 32 nt, Human
gcuucccagaugggaaacugaggcucagagaa

SEQ ID NO: 181863 - RNA, 22 nt, Human
gcuucccagcaacaccugcagu

SEQ ID NO: 181864 - RNA, 32 nt, Human
gcuucccagcagcugcccagugccucugucca

SEQ ID NO: 181865 - RNA, 15 nt, Human
gcuucccagcaggca

SEQ ID NO: 181866 - RNA, 20 nt, Human
gcuucccagccaugcccagg

SEQ ID NO: 181867 - RNA, 21 nt, Human
gcuucccagcccagcuggggc

SEQ ID NO: 181868 - RNA, 23 nt, Human
gcuucccagcccccagcauucca

SEQ ID NO: 181869 - RNA, 21 nt, Human
gcuucccagccgucuuggcgu

SEQ ID NO: 181870 - RNA, 22 nt, Human
gcuucccagccugucuacugua

SEQ ID NO: 181871 - RNA, 21 nt, Human
gcuucccagcugccgucugca

SEQ ID NO: 181872 - RNA, 32 nt, Human
gcuucccagggcugcccccgacaggcuggcuc

SEQ ID NO: 181873 - RNA, 32 nt, Human
gcuucccagguggucugaagucagguacucuc

SEQ ID NO: 181874 - RNA, 21 nt, Human
gcuucccauccaguccuucaa

SEQ ID NO: 181875 - RNA, 32 nt, Human
gcuucccaucccucccuuccucuucucuccuu

SEQ ID NO: 181876 - RNA, 32 nt, Human
gcuucccaucggaggugguuggugcagaugga

SEQ ID NO: 181877 - RNA, 32 nt, Human
gcuuccccaacauuggcagcuuaugaacgugu

SEQ ID NO: 181878 - RNA, 32 nt, Human
gcuuccccagaacugucaugagagcaucaccu

SEQ ID NO: 181879 - RNA, 32 nt, Human
gcuuccccagccagccucuccucacugugacc

SEQ ID NO: 181880 - RNA, 32 nt, Human
gcuuccccagcccagggaggguaucaguauca

SEQ ID NO: 181881 - RNA, 32 nt, Human
gcuuccccaucuuuaguuuuccacucugcccc

SEQ ID NO: 181882 - RNA, 32 nt, Human
gcuucccccaccccacuggcucuucuuaauua

SEQ ID NO: 181883 - RNA, 32 nt, Human
gcuucccccaguagaagagagccaggucugua

SEQ ID NO: 181884 - RNA, 17 nt, Human
gcuuccccccuuguaua

SEQ ID NO: 181885 - RNA, 32 nt, Human
gcuucccccucagcaccaggguaccaggagcu

SEQ ID NO: 181886 - RNA, 32 nt, Human
gcuucccccugccauucuccagggcuggacug

SEQ ID NO: 181887 - RNA, 32 nt, Human
gcuucccccuucuccccaucccggucuccaga

SEQ ID NO: 181888 - RNA, 28 nt, Human
gcuuccccgagugcugccuccuggucaa

SEQ ID NO: 181889 - RNA, 32 nt, Human
gcuuccccgccaggaacuuacuggggcugcau

SEQ ID NO: 181890 - RNA, 32 nt, Human
gcuuccccucacuccucgggccuugcucuucc

SEQ ID NO: 181891 - RNA, 24 nt, Human
gcuuccccuccaagacgcuggggg

SEQ ID NO: 181892 - RNA, 32 nt, Human
gcuuccccuccagccagaugcuggagaacaca

SEQ ID NO: 181893 - RNA, 32 nt, Human
gcuuccccugcccucacuccccucuggcuggg

SEQ ID NO: 181894 - RNA, 32 nt, Human
gcuuccccugcucaccacugaggccuaauaca

SEQ ID NO: 181895 - RNA, 32 nt, Human
gcuuccccuucccggcucucaccuccguguga

SEQ ID NO: 181896 - RNA, 32 nt, Human
gcuuccccuuucucccuccucaguuggccgag

SEQ ID NO: 181897 - RNA, 32 nt, Human
gcuucccgaggcccggccuccccacugggucc

SEQ ID NO: 181898 - RNA, 24 nt, Human
gcuucccgaguuagcucuuugggu

SEQ ID NO: 181899 - RNA, 32 nt, Human
gcuucccgcagagugcagagacaggaagcugg

SEQ ID NO: 181900 - RNA, 32 nt, Human
gcuucccgccacacuccagagcgggugugagg

SEQ ID NO: 181901 - RNA, 17 nt, Human
gcuucccgccacccgaa

SEQ ID NO: 181902 - RNA, 32 nt, Human
gcuucccggaccauggccaaccuggagcgcac

SEQ ID NO: 181903 - RNA, 32 nt, Human
gcuucccggccuggguuuuuagucuuccuugg

SEQ ID NO: 181904 - RNA, 21 nt, Human
gcuucccggcgaccucagcgu

SEQ ID NO: 181905 - RNA, 32 nt, Human
gcuucccgggcagacacucucucccucaggaa

SEQ ID NO: 181906 - RNA, 32 nt, Human
gcuucccgugcggcugaggacgauccgccagu

SEQ ID NO: 181907 - RNA, 32 nt, Human
gcuucccucccaggaucccuuuggugagugug

SEQ ID NO: 181908 - RNA, 20 nt, Human
gcuucccuccccuuccucca

SEQ ID NO: 181909 - RNA, 32 nt, Human
gcuucccucccucguuuccagcuccugggcga

SEQ ID NO: 181910 - RNA, 25 nt, Human
gcuucccugccccuccuggucugug

SEQ ID NO: 181911 - RNA, 32 nt, Human
gcuucccugccuccuccuaccuuucucuucca

SEQ ID NO: 181912 - RNA, 32 nt, Human
gcuucccugccugcugcugccccauuugauca

SEQ ID NO: 181913 - RNA, 32 nt, Human
gcuucccugccuggcccuggagggagcugggu

SEQ ID NO: 181914 - RNA, 32 nt, Human
gcuucccugcucucagugaagcauuuuauuaa

SEQ ID NO: 181915 - RNA, 32 nt, Human
gcuucccugggcaacauuggaaggaggaaaau

SEQ ID NO: 181916 - RNA, 32 nt, Human
gcuucccugggccacaucggaagaagaauugu

SEQ ID NO: 181917 - RNA, 32 nt, Human
gcuucccugggccacauuggaagaagaagaau

SEQ ID NO: 181918 - RNA, 32 nt, Human
gcuucccugggccacauuugaagaagaauuuu

SEQ ID NO: 181919 - RNA, 32 nt, Human
gcuucccugggcuacauuggaaggagaaaaau

SEQ ID NO: 181920 - RNA, 32 nt, Human
gcuucccuguggcugcuguuucuauccuccag

SEQ ID NO: 181921 - RNA, 25 nt, Human
gcuucccuguguccucucucccucu

SEQ ID NO: 181922 - RNA, 32 nt, Human
gcuucccuugggcuccucagagcuagugggga

SEQ ID NO: 181923 - RNA, 32 nt, Human
gcuucccuuucccuucccagcuacaggcaccc

SEQ ID NO: 181924 - RNA, 32 nt, Human
gcuuccgaagaaagagacaucccccuacuguu

SEQ ID NO: 181925 - RNA, 19 nt, Human
gcuuccgacaccagagugg

SEQ ID NO: 181926 - RNA, 32 nt, Human
gcuuccgacgggagaggguagaccgggggagg

SEQ ID NO: 181927 - RNA, 32 nt, Human
gcuuccgcccuacuuccuccuccuguuggcgg

SEQ ID NO: 181928 - RNA, 19 nt, Human
gcuuccgcguccgccccgg

SEQ ID NO: 181929 - RNA, 32 nt, Human
gcuuccgcugggacuaggaucaggauguggac

SEQ ID NO: 181930 - RNA, 32 nt, Human
gcuuccgcugggacuaggaucaggguguggac

SEQ ID NO: 181931 - RNA, 30 nt, Human
gcuuccggaagccacaggaaccacaaguca

SEQ ID NO: 181932 - RNA, 32 nt, Human
gcuuccggacuggccgcaccccggaggagcca

SEQ ID NO: 181933 - RNA, 32 nt, Human
gcuuccggaggaggggaugggagaaaguaggg

SEQ ID NO: 181934 - RNA, 32 nt, Human
gcuuccggaucgucagccaccuugccuuugcc

SEQ ID NO: 181935 - RNA, 32 nt, Human
gcuuccggcacgggauguuuucgguuguuuga

SEQ ID NO: 181936 - RNA, 32 nt, Human
gcuuccggcuccaggaaauaaccauucaugug

SEQ ID NO: 181937 - RNA, 32 nt, Human
gcuuccgggaggucuaggcggcugccgugagc

SEQ ID NO: 181938 - RNA, 32 nt, Human
gcuuccggggaguugcgagggagcgaggggga

SEQ ID NO: 181939 - RNA, 32 nt, Human
gcuuccggguaacaagcaaaagucaggccaag

SEQ ID NO: 181940 - RNA, 32 nt, Human
gcuuccgggugaggccaaggagugugagguca

SEQ ID NO: 181941 - RNA, 32 nt, Human
gcuuccgucgaagaggagggggcugcgguggc

SEQ ID NO: 181942 - RNA, 32 nt, Human
gcuuccuacacugggccaugcagaggacaggc

SEQ ID NO: 181943 - RNA, 32 nt, Human
gcuuccuaccugcagcuucacuuugcucuagu

SEQ ID NO: 181944 - RNA, 23 nt, Human
gcuuccuagagcgcucagcaggu

SEQ ID NO: 181945 - RNA, 32 nt, Human
gcuuccuagaggcgcugaaggaggaugccgcc

SEQ ID NO: 181946 - RNA, 32 nt, Human
gcuuccuagcacauuccauucuuuguggccca

SEQ ID NO: 181947 - RNA, 32 nt, Human
gcuuccuaguagcugggauugcaggcacucac

SEQ ID NO: 181948 - RNA, 32 nt, Human
gcuuccuaguuaacaacccccaugcugccucc

SEQ ID NO: 181949 - RNA, 32 nt, Human
gcuuccuaugccucugaaucuguccuuaucag

SEQ ID NO: 181950 - RNA, 18 nt, Human
gcuuccucaaccucuccu

SEQ ID NO: 181951 - RNA, 32 nt, Human
gcuuccucaccacccccacuguugggccuaua

SEQ ID NO: 181952 - RNA, 32 nt, Human
gcuuccucagcaacaggagccggaccuacaac

SEQ ID NO: 181953 - RNA, 32 nt, Human
gcuuccucagcccucugucauauggcuguuuu

SEQ ID NO: 181954 - RNA, 32 nt, Human
gcuuccucagccuacuaucauaggcuuccuca

SEQ ID NO: 181955 - RNA, 32 nt, Human
gcuuccucagcuccucacagaugguccacacg

SEQ ID NO: 181956 - RNA, 32 nt, Human
gcuuccucccacagcagcugugaauggcacag

SEQ ID NO: 181957 - RNA, 32 nt, Human
gcuuccucccagacuugccuuacccugggcug

SEQ ID NO: 181958 - RNA, 32 nt, Human
gcuuccucccagcugcucugcuggcuugcuga

SEQ ID NO: 181959 - RNA, 32 nt, Human
gcuuccucccauccucccaucucagugguucc

SEQ ID NO: 181960 - RNA, 32 nt, Human
gcuuccuccccgcucguccuccccgggcccag

SEQ ID NO: 181961 - RNA, 32 nt, Human
gcuuccucccucucuccucccucccagacacc

SEQ ID NO: 181962 - RNA, 32 nt, Human
gcuuccucccucuguugucugccugugugaca

SEQ ID NO: 181963 - RNA, 32 nt, Human
gcuuccucccuuccuuucccccuuccucccuc

SEQ ID NO: 181964 - RNA, 32 nt, Human
gcuuccuccgccuccccaucucuuuuaagcag

SEQ ID NO: 181965 - RNA, 32 nt, Human
gcuuccuccgcugcccaccucuugccacagau

SEQ ID NO: 181966 - RNA, 32 nt, Human
gcuuccuccggagucuccgcaggcuggaggug

SEQ ID NO: 181967 - RNA, 16 nt, Human
gcuuccuccugcugcc

SEQ ID NO: 181968 - RNA, 32 nt, Human
gcuuccuccuugugguuccguugcaaacauuu

SEQ ID NO: 181969 - RNA, 32 nt, Human
gcuuccucggcagccuugggaagcacgggcga

SEQ ID NO: 181970 - RNA, 32 nt, Human
gcuuccucuccuccccuguacgugccccagca

SEQ ID NO: 181971 - RNA, 32 nt, Human
gcuuccucucucucccuuccucucucucccuu

SEQ ID NO: 181972 - RNA, 32 nt, Human
gcuuccucugccaaaaaggaacugguggccuu

SEQ ID NO: 181973 - RNA, 18 nt, Human
gcuuccucuggccaggua

SEQ ID NO: 181974 - RNA, 32 nt, Human
gcuuccucugggcucagacucaggcugaugcu

SEQ ID NO: 181975 - RNA, 32 nt, Human
gcuuccucuguagagcucugaaaagguugacu

SEQ ID NO: 181976 - RNA, 32 nt, Human
gcuuccucuguggaaaucugucucagccuacu

SEQ ID NO: 181977 - RNA, 32 nt, Human
gcuuccucuuucuccagaagccuucuggcuga

SEQ ID NO: 181978 - RNA, 32 nt, Human
gcuuccugagccuggcccugcauccucauaga

SEQ ID NO: 181979 - RNA, 24 nt, Human
gcuuccugaggaaacgcgggcgga

SEQ ID NO: 181980 - RNA, 32 nt, Human
gcuuccugagggcagggaggcagaugggacag

SEQ ID NO: 181981 - RNA, 32 nt, Human
gcuuccugaugccucauucaccaggaugggua

SEQ ID NO: 181982 - RNA, 32 nt, Human
gcuuccugcaggaggcgggauuacuaugacga

SEQ ID NO: 181983 - RNA, 32 nt, Human
gcuuccugccaagaauuauggcagcugaggau

SEQ ID NO: 181984 - RNA, 32 nt, Human
gcuuccugccaagcaccugccugccugcauca

SEQ ID NO: 181985 - RNA, 32 nt, Human
gcuuccugccgucccccgacugccucauucuu

SEQ ID NO: 181986 - RNA, 23 nt, Human
gcuuccugccugguuuuucucuu

SEQ ID NO: 181987 - RNA, 32 nt, Human
gcuuccugcuccauggaguccugaguugcucu

SEQ ID NO: 181988 - RNA, 32 nt, Human
gcuuccugcuccuggguuuucucuccaugaug

SEQ ID NO: 181989 - RNA, 32 nt, Human
gcuuccugcugccgcucugcagccuggaccug

SEQ ID NO: 181990 - RNA, 32 nt, Human
gcuuccuggaaacccucauuuuccuugucugu

SEQ ID NO: 181991 - RNA, 32 nt, Human
gcuuccuggaaaugucacccucaccagagccu

SEQ ID NO: 181992 - RNA, 32 nt, Human
gcuuccuggaaaugucacucucaauggcgccu

SEQ ID NO: 181993 - RNA, 32 nt, Human
gcuuccuggaaguccugaagcucucgcagugc

SEQ ID NO: 181994 - RNA, 23 nt, Human
gcuuccuggacgggacccggggc

SEQ ID NO: 181995 - RNA, 32 nt, Human
gcuuccuggaggagguggagcugcagcuggga

SEQ ID NO: 181996 - RNA, 32 nt, Human
gcuuccuggaguucaggagaccccggacaccu

SEQ ID NO: 181997 - RNA, 21 nt, Human
gcuuccuggcacugcuggacc

SEQ ID NO: 181998 - RNA, 32 nt, Human
gcuuccuggcagugccauuuggagcaucaaaa

SEQ ID NO: 181999 - RNA, 32 nt, Human
gcuuccuggcagugccauuuggagcaucaaag

SEQ ID NO: 182000 - RNA, 29 nt, Human
gcuuccuggcugccaucuuuccuuuugac

SEQ ID NO: 182001 - RNA, 32 nt, Human
gcuuccugggaggugucucuggggguggggug

SEQ ID NO: 182002 - RNA, 32 nt, Human
gcuuccugggcagccacuggccaggccguugu

SEQ ID NO: 182003 - RNA, 32 nt, Human
gcuuccugggccccaucugaggccgugggcuc

SEQ ID NO: 182004 - RNA, 32 nt, Human
gcuuccugggcugaggacauggggauccaagg

SEQ ID NO: 182005 - RNA, 32 nt, Human
gcuuccuggugagagaggaagcaacucuccuu

SEQ ID NO: 182006 - RNA, 32 nt, Human
gcuuccuggugagccagguggggagggccucu

SEQ ID NO: 182007 - RNA, 32 nt, Human
gcuuccuguaccaucuacuggaccgugagcca

SEQ ID NO: 182008 - RNA, 32 nt, Human
gcuuccuguccccagagggcagggauagaaaa

SEQ ID NO: 182009 - RNA, 26 nt, Human
gcuuccugugaacauuuguaaccacu

SEQ ID NO: 182010 - RNA, 32 nt, Human
gcuuccugugccaccaggggccuguccaccuc

SEQ ID NO: 182011 - RNA, 32 nt, Human
gcuuccugugccucccuccaaccuucuccuac

SEQ ID NO: 182012 - RNA, 32 nt, Human
gcuuccuguggcugucacuccugggcccaggc

SEQ ID NO: 182013 - RNA, 32 nt, Human
gcuuccugugggcugcagccuaaugcccacgu

SEQ ID NO: 182014 - RNA, 32 nt, Human
gcuuccuguucuaauaaaugcacggcuuuacc

SEQ ID NO: 182015 - RNA, 32 nt, Human
gcuuccuguuucuaaguggccugcaggggcca

SEQ ID NO: 182016 - RNA, 32 nt, Human
gcuuccuuagcaugugggucaguggcuccuga

SEQ ID NO: 182017 - RNA, 18 nt, Human
gcuuccuuccacccagaa

SEQ ID NO: 182018 - RNA, 32 nt, Human
gcuuccuuccucacuuccucuccaggagggag

SEQ ID NO: 182019 - RNA, 32 nt, Human
gcuuccuuccuugccccaucuuccucccaacu

SEQ ID NO: 182020 - RNA, 32 nt, Human
gcuuccuucucaaaguccuguggaagaacaaa

SEQ ID NO: 182021 - RNA, 32 nt, Human
gcuuccuucucccuccucugucucaaacugcg

SEQ ID NO: 182022 - RNA, 32 nt, Human
gcuuccuugacgcgagaggcucugagggucug

SEQ ID NO: 182023 - RNA, 32 nt, Human
gcuuccuugccugagaucaccuagaaaggaac

SEQ ID NO: 182024 - RNA, 32 nt, Human
gcuuccuuuaaagggagggggagaagccaggg

SEQ ID NO: 182025 - RNA, 32 nt, Human
gcuuccuuucucaccugccucuacuugucagu

SEQ ID NO: 182026 - RNA, 32 nt, Human
gcuuccuuucucuccuggcucgggguaaaaag

SEQ ID NO: 182027 - RNA, 22 nt, Human
gcuuccuuuucucggucuuccu

SEQ ID NO: 182028 - RNA, 32 nt, Human
gcuucgaccacaguuuacugagggugauaucu

SEQ ID NO: 182029 - RNA, 25 nt, Human
gcuucgaccccgccgccgccgccgc

SEQ ID NO: 182030 - RNA, 32 nt, Human
gcuucgacugucaagguggcuguuauaaauuu

SEQ ID NO: 182031 - RNA, 32 nt, Human
gcuucgacugucucgcccaacaugugcacccc

SEQ ID NO: 182032 - RNA, 32 nt, Human
gcuucgagccacugccccagggucugcugcuc

SEQ ID NO: 182033 - RNA, 32 nt, Human
gcuucgaggugaucugcuaccuagccacauuc

SEQ ID NO: 182034 - RNA, 20 nt, Human
gcuucgaugagccagaguga

SEQ ID NO: 182035 - RNA, 32 nt, Human
gcuucgcacacagcuggcuccaggaaaauaca

SEQ ID NO: 182036 - RNA, 32 nt, Human
gcuucgcacagcccuuccuaggguguggagag

SEQ ID NO: 182037 - RNA, 19 nt, Human
gcuucgcacugagcacauc

SEQ ID NO: 182038 - RNA, 32 nt, Human
gcuucgcaggcagcaccgccucccgggccgcg

SEQ ID NO: 182039 - RNA, 32 nt, Human
gcuucgcagggacagcgcuggggaggugacgg

SEQ ID NO: 182040 - RNA, 32 nt, Human
gcuucgcaggguggcugugagaggauuccauu

SEQ ID NO: 182041 - RNA, 22 nt, Human
gcuucgccccacccggcccgug

SEQ ID NO: 182042 - RNA, 32 nt, Human
gcuucgccccacccggcccgugggggaguauc

SEQ ID NO: 182043 - RNA, 32 nt, Human
gcuucgcccggggagggggaaagagcagcgag

SEQ ID NO: 182044 - RNA, 32 nt, Human
gcuucgccggugggagaggauccucgccgccc

SEQ ID NO: 182045 - RNA, 32 nt, Human
gcuucgccugccuccuuccuccgcgcaccccc

SEQ ID NO: 182046 - RNA, 32 nt, Human
gcuucgccuugcccgccuccucccaggaagga

SEQ ID NO: 182047 - RNA, 32 nt, Human
gcuucgcgagggcccagagaggcgguggggug

SEQ ID NO: 182048 - RNA, 32 nt, Human
gcuucgcgguucaguccuccuaacugacagcc

SEQ ID NO: 182049 - RNA, 32 nt, Human
gcuucgcucagccuggccacgacaucacugug

SEQ ID NO: 182050 - RNA, 20 nt, Human
gcuucgcucccgcagcauca

SEQ ID NO: 182051 - RNA, 32 nt, Human
gcuucgcuucaaggcggccucuaccuuuucuc

SEQ ID NO: 182052 - RNA, 32 nt, Human
gcuucggaagagaagaaugaugugcagagugu

SEQ ID NO: 182053 - RNA, 32 nt, Human
gcuucggagcugccuggcucauggcccaaccc

SEQ ID NO: 182054 - RNA, 21 nt, Human
gcuucggcucauugacuuaga

SEQ ID NO: 182055 - RNA, 32 nt, Human
gcuucgggacagaccuuggcucagggacugcc

SEQ ID NO: 182056 - RNA, 32 nt, Human
gcuucgggagcaugagugcugcagugacugca

SEQ ID NO: 182057 - RNA, 32 nt, Human
gcuucggggcuugccaagagacgguguuuaga

SEQ ID NO: 182058 - RNA, 32 nt, Human
gcuucggguaucagaggaggcugaccuggccc

SEQ ID NO: 182059 - RNA, 32 nt, Human
gcuucgguucauuucaaccucuuuuccuccaa

SEQ ID NO: 182060 - RNA, 32 nt, Human
gcuucguccagccuguggauggagccugacug

SEQ ID NO: 182061 - RNA, 32 nt, Human
gcuucgucccacugcaccgccuggcugagggc

SEQ ID NO: 182062 - RNA, 32 nt, Human
gcuucgugagcagccucagcucggguggaggg

SEQ ID NO: 182063 - RNA, 32 nt, Human
gcuucgugccaucaugauccuugccuucauau

SEQ ID NO: 182064 - RNA, 32 nt, Human
gcuucgugccuggggcccucugcucuggggcc

SEQ ID NO: 182065 - RNA, 22 nt, Human
gcuucguggaaugagcaguacc

SEQ ID NO: 182066 - RNA, 32 nt, Human
gcuucguggucuucuccauccugggcuucaug

SEQ ID NO: 182067 - RNA, 32 nt, Human
gcuucguuggguucugcuuccuucccuucuua

SEQ ID NO: 182068 - RNA, 32 nt, Human
gcuucuaagacaccuccauuccaguuucugca

SEQ ID NO: 182069 - RNA, 32 nt, Human
gcuucuaagcaccaaucucccucugccaucag

SEQ ID NO: 182070 - RNA, 25 nt, Human
gcuucuaagcagcugucuucccccu

SEQ ID NO: 182071 - RNA, 32 nt, Human
gcuucuaagccaaaaggauuccucuuuguuua

SEQ ID NO: 182072 - RNA, 32 nt, Human
gcuucuaccagcugacugccccggcccggccu

SEQ ID NO: 182073 - RNA, 32 nt, Human
gcuucuacccagacuucuuuugcaauuugucc

SEQ ID NO: 182074 - RNA, 32 nt, Human
gcuucuaccgagucuucccccaccucaauccc

SEQ ID NO: 182075 - RNA, 32 nt, Human
gcuucuagaagacugccuagcacacaguaggc

SEQ ID NO: 182076 - RNA, 32 nt, Human
gcuucuagccccgcaucuggaaaaaggccccu

SEQ ID NO: 182077 - RNA, 32 nt, Human
gcuucuagggcuucacaucccuuccccucccc

SEQ ID NO: 182078 - RNA, 18 nt, Human
gcuucuaggggcccaggc

SEQ ID NO: 182079 - RNA, 32 nt, Human
gcuucuagguagggcugcgccacccaccuacu

SEQ ID NO: 182080 - RNA, 32 nt, Human
gcuucuaucaccaacagaaauuauaccauaua

SEQ ID NO: 182081 - RNA, 32 nt, Human
gcuucuaugaggagaccaugugccgaggucgu

SEQ ID NO: 182082 - RNA, 32 nt, Human
gcuucuauggggcucucucuucugccuucuca

SEQ ID NO: 182083 - RNA, 20 nt, Human
gcuucuauucccagccugcc

SEQ ID NO: 182084 - RNA, 32 nt, Human
gcuucuauuuugcuggacccucgcucugccaa

SEQ ID NO: 182085 - RNA, 32 nt, Human
gcuucucacccuauguggguggggccacagac

SEQ ID NO: 182086 - RNA, 32 nt, Human
gcuucucacuccccaaguuugccuccuuucuu

SEQ ID NO: 182087 - RNA, 32 nt, Human
gcuucucagacagcauuggauuuccuaaaggu

SEQ ID NO: 182088 - RNA, 21 nt, Human
gcuucucagccaccaaagggu

SEQ ID NO: 182089 - RNA, 22 nt, Human
gcuucucagcccccucuggggu

SEQ ID NO: 182090 - RNA, 23 nt, Human
gcuucucagugcucucuuuccaa

SEQ ID NO: 182091 - RNA, 32 nt, Human
gcuucucagugggcacagucucuuacucccau

SEQ ID NO: 182092 - RNA, 32 nt, Human
gcuucucauagcccugguacaugguacacaca

SEQ ID NO: 182093 - RNA, 32 nt, Human
gcuucucaucccugcauagaugcaguauucuu

SEQ ID NO: 182094 - RNA, 32 nt, Human
gcuucucauccugcugucaccaacuagcucug

SEQ ID NO: 182095 - RNA, 32 nt, Human
gcuucucauguggcucauucuuuaaucuauuc

SEQ ID NO: 182096 - RNA, 32 nt, Human
gcuucucauuugcacugaucacugugaguguc

SEQ ID NO: 182097 - RNA, 32 nt, Human
gcuucuccaaagggagggugacaugcuggcuu

SEQ ID NO: 182098 - RNA, 32 nt, Human
gcuucuccaagauauuuccuggcaucaccccu

SEQ ID NO: 182099 - RNA, 32 nt, Human
gcuucuccaccuauagccagagcccaccggac

SEQ ID NO: 182100 - RNA, 21 nt, Human
gcuucuccaccucggcccgug

SEQ ID NO: 182101 - RNA, 32 nt, Human
gcuucuccagaacuucccuuccucguagacac

SEQ ID NO: 182102 - RNA, 32 nt, Human
gcuucuccagaauagggguuuggggcuugcua

SEQ ID NO: 182103 - RNA, 19 nt, Human
gcuucuccagacuuucugu

SEQ ID NO: 182104 - RNA, 32 nt, Human
gcuucuccaggcccagaaauuccucaguucgg

SEQ ID NO: 182105 - RNA, 32 nt, Human
gcuucuccaugaccuccugcauggcccggugg

SEQ ID NO: 182106 - RNA, 32 nt, Human
gcuucucccaggcacagguguugcaccaggga

SEQ ID NO: 182107 - RNA, 32 nt, Human
gcuucucccauaacugcugccaccaccaucag

SEQ ID NO: 182108 - RNA, 32 nt, Human
gcuucucccgcaggagcuucgggcuucuccug

SEQ ID NO: 182109 - RNA, 32 nt, Human
gcuucucccucacuucuuuccucaaagaagca

SEQ ID NO: 182110 - RNA, 32 nt, Human
gcuucucccugcagcccugccuuugcugauac

SEQ ID NO: 182111 - RNA, 32 nt, Human
gcuucucccugcucugcccaucaugacucauu

SEQ ID NO: 182112 - RNA, 32 nt, Human
gcuucucccuuuccuucuguuccgguuucugg

SEQ ID NO: 182113 - RNA, 32 nt, Human
gcuucucccuuuccuugagcucucuggacacu

SEQ ID NO: 182114 - RNA, 32 nt, Human
gcuucuccggcggaacccaggcuggaccgcgg

SEQ ID NO: 182115 - RNA, 32 nt, Human
gcuucuccucacagggccuggccauauagcca

SEQ ID NO: 182116 - RNA, 23 nt, Human
gcuucuccucagcgcucauccgc

SEQ ID NO: 182117 - RNA, 32 nt, Human
gcuucuccuccucauccucccagccccacccu

SEQ ID NO: 182118 - RNA, 32 nt, Human
gcuucuccuccuccuccuccacaguugccugc

SEQ ID NO: 182119 - RNA, 32 nt, Human
gcuucuccuccuccucuugcuccuccagcucc

SEQ ID NO: 182120 - RNA, 32 nt, Human
gcuucuccucggcgcccugccugcugggcucc

SEQ ID NO: 182121 - RNA, 22 nt, Human
gcuucuccucugccucauccac

SEQ ID NO: 182122 - RNA, 32 nt, Human
gcuucuccugcaauuccaccuaaugccauccc

SEQ ID NO: 182123 - RNA, 20 nt, Human
gcuucuccuguagggcaccu

SEQ ID NO: 182124 - RNA, 23 nt, Human
gcuucuccuucagcccauccacu

SEQ ID NO: 182125 - RNA, 32 nt, Human
gcuucuccuugcaccuucauuuuaacccccau

SEQ ID NO: 182126 - RNA, 32 nt, Human
gcuucuccuuucucuccaccuccccugccacu

SEQ ID NO: 182127 - RNA, 21 nt, Human
gcuucucuacacagccucuac

SEQ ID NO: 182128 - RNA, 18 nt, Human
gcuucucuauuuuuuccu

SEQ ID NO: 182129 - RNA, 20 nt, Human
gcuucucucagccuccccac

SEQ ID NO: 182130 - RNA, 32 nt, Human
gcuucucuccacuguccaucccuccuaucauc

SEQ ID NO: 182131 - RNA, 32 nt, Human
gcuucucuccccuucuucuccucucucugucc

SEQ ID NO: 182132 - RNA, 19 nt, Human
gcuucucucccugccacca

SEQ ID NO: 182133 - RNA, 32 nt, Human
gcuucucuccuccugcuggagugccagucccu

SEQ ID NO: 182134 - RNA, 32 nt, Human
gcuucucucuacugcccuggcccguucauccu

SEQ ID NO: 182135 - RNA, 32 nt, Human
gcuucucucucaacaucucucuaccagacaga

SEQ ID NO: 182136 - RNA, 31 nt, Human
gcuucucucuucacggggccuguucgccaug

SEQ ID NO: 182137 - RNA, 32 nt, Human
gcuucucucuuccucaucucccaauaccucuu

SEQ ID NO: 182138 - RNA, 22 nt, Human
gcuucucucuugccugcuccug

SEQ ID NO: 182139 - RNA, 32 nt, Human
gcuucucugcccacucauuucuaguccagccg

SEQ ID NO: 182140 - RNA, 32 nt, Human
gcuucucugccgguggggccagcgcugaacag

SEQ ID NO: 182141 - RNA, 32 nt, Human
gcuucucugccuccagccuuugggguagccac

SEQ ID NO: 182142 - RNA, 32 nt, Human
gcuucucugccucucagaauucuuuuuaauug

SEQ ID NO: 182143 - RNA, 32 nt, Human
gcuucucugggagcuuggccuucaguuagccc

SEQ ID NO: 182144 - RNA, 32 nt, Human
gcuucucugggcaaaugggaaguucagcgggg

SEQ ID NO: 182145 - RNA, 17 nt, Human
gcuucucugggcuccca

SEQ ID NO: 182146 - RNA, 32 nt, Human
gcuucucugggcugugauggggaugugcaggg

SEQ ID NO: 182147 - RNA, 32 nt, Human
gcuucucuggggcugggcucuacucccugcag

SEQ ID NO: 182148 - RNA, 32 nt, Human
gcuucucugugccuguuucuucaugcaugcag

SEQ ID NO: 182149 - RNA, 32 nt, Human
gcuucucuguucaaugucuagggcugucuaua

SEQ ID NO: 182150 - RNA, 32 nt, Human
gcuucucuuccucccuacagaggggagaucuc

SEQ ID NO: 182151 - RNA, 32 nt, Human
gcuucucuucuuuccauucuucuugcuacacc

SEQ ID NO: 182152 - RNA, 32 nt, Human
gcuucucuugcaucuucuuccacugggcucug

SEQ ID NO: 182153 - RNA, 32 nt, Human
gcuucucuugugugugccucagcucugaagaa

SEQ ID NO: 182154 - RNA, 32 nt, Human
gcuucugaacagccuggcgggaaauguagucc

SEQ ID NO: 182155 - RNA, 32 nt, Human
gcuucugaagguaaagggacacuggauccaga

SEQ ID NO: 182156 - RNA, 32 nt, Human
gcuucugaauugaagaacaaggccauguccac

SEQ ID NO: 182157 - RNA, 32 nt, Human
gcuucugacagcagaaaucucugugauuuuca

SEQ ID NO: 182158 - RNA, 32 nt, Human
gcuucugacuccagacagacagugccucccca

SEQ ID NO: 182159 - RNA, 32 nt, Human
gcuucugagcaucuauuuuugggcucugaaau

SEQ ID NO: 182160 - RNA, 19 nt, Human
gcuucugaggacuuaggua

SEQ ID NO: 182161 - RNA, 32 nt, Human
gcuucugaggcccagaggagcaggugggaugg

SEQ ID NO: 182162 - RNA, 32 nt, Human
gcuucugaguagcgugggaguggagucagcac

SEQ ID NO: 182163 - RNA, 32 nt, Human
gcuucugaguagcuaggacuauggguacauuc

SEQ ID NO: 182164 - RNA, 32 nt, Human
gcuucugaguagcugggauuauaggugcgcac

SEQ ID NO: 182165 - RNA, 32 nt, Human
gcuucugagucuaucucaucccuaccuaauau

SEQ ID NO: 182166 - RNA, 32 nt, Human
gcuucugauuuuaaagaggcaucuagggaauu

SEQ ID NO: 182167 - RNA, 32 nt, Human
gcuucugcaacaaaagccuccacccagccaca

SEQ ID NO: 182168 - RNA, 32 nt, Human
gcuucugcaaugugauccuggugaaggaggag

SEQ ID NO: 182169 - RNA, 18 nt, Human
gcuucugcauccaccucu

SEQ ID NO: 182170 - RNA, 32 nt, Human
gcuucugcauuuccuucccugcuccuaacaaa

SEQ ID NO: 182171 - RNA, 18 nt, Human
gcuucugccacccugcug

SEQ ID NO: 182172 - RNA, 32 nt, Human
gcuucugccaggaccacaccgagggugcccac

SEQ ID NO: 182173 - RNA, 19 nt, Human
gcuucugccgcggcugcgg

SEQ ID NO: 182174 - RNA, 22 nt, Human
gcuucugcgaugccggccuucc

SEQ ID NO: 182175 - RNA, 32 nt, Human
gcuucugcuacuuggagaagagauuuagaauu

SEQ ID NO: 182176 - RNA, 32 nt, Human
gcuucugcuccuccucagccagcggcagaagc

SEQ ID NO: 182177 - RNA, 20 nt, Human
gcuucugcuccuugcuacca

SEQ ID NO: 182178 - RNA, 32 nt, Human
gcuucugcucuucucaccagaaagaacauuug

SEQ ID NO: 182179 - RNA, 32 nt, Human
gcuucugcugcaucugcagccaugucgggccg

SEQ ID NO: 182180 - RNA, 32 nt, Human
gcuucugcugucccugccucaaguacaggccg

SEQ ID NO: 182181 - RNA, 32 nt, Human
gcuucuggaaccugaggcuuggccccgguugg

SEQ ID NO: 182182 - RNA, 32 nt, Human
gcuucuggaagagaaaagaguuguucauuacu

SEQ ID NO: 182183 - RNA, 32 nt, Human
gcuucuggaaguuucugccucacucagaaugg

SEQ ID NO: 182184 - RNA, 32 nt, Human
gcuucuggaauagaaacagugguuugaagacc

SEQ ID NO: 182185 - RNA, 31 nt, Human
gcuucuggacucaaggaggaggagagagauu

SEQ ID NO: 182186 - RNA, 32 nt, Human
gcuucuggagcaggguggucuccggcuccucc

SEQ ID NO: 182187 - RNA, 32 nt, Human
gcuucuggagccaccggccgggccacgaugcu

SEQ ID NO: 182188 - RNA, 32 nt, Human
gcuucuggagccuugggacagagcaggcccac

SEQ ID NO: 182189 - RNA, 32 nt, Human
gcuucuggagggccagcucccagagcugagcu

SEQ ID NO: 182190 - RNA, 32 nt, Human
gcuucuggcccaaaccccaagcagaaaagaaa

SEQ ID NO: 182191 - RNA, 32 nt, Human
gcuucuggccugggugagcuagaagggagaag

SEQ ID NO: 182192 - RNA, 32 nt, Human
gcuucugggaagggagagaggggaggucugca

SEQ ID NO: 182193 - RNA, 32 nt, Human
gcuucugggagagagcaagagaggaccuuggg

SEQ ID NO: 182194 - RNA, 32 nt, Human
gcuucugggcccaggaagaggcuguggcuccc

SEQ ID NO: 182195 - RNA, 32 nt, Human
gcuucuggggaaagcauccaucacagaaccuc

SEQ ID NO: 182196 - RNA, 19 nt, Human
gcuucuggggacccagggc

SEQ ID NO: 182197 - RNA, 32 nt, Human
gcuucuggggagguaggaaggaccaggggcau

SEQ ID NO: 182198 - RNA, 32 nt, Human
gcuucugggguugcuccggggccagguucucc

SEQ ID NO: 182199 - RNA, 32 nt, Human
gcuucuggguccaccugagcacuggacggugc

SEQ ID NO: 182200 - RNA, 32 nt, Human
gcuucuggucggcugugaugugcuccagcuuu

SEQ ID NO: 182201 - RNA, 32 nt, Human
gcuucuggugaacuugucuggccggcauucau

SEQ ID NO: 182202 - RNA, 32 nt, Human
gcuucugguucaccgcccugauuccacagaug

SEQ ID NO: 182203 - RNA, 32 nt, Human
gcuucugguuucagcacacauggagauauaga

SEQ ID NO: 182204 - RNA, 32 nt, Human
gcuucugucauugacuaggccagguauggagc

SEQ ID NO: 182205 - RNA, 19 nt, Human
gcuucuguccagcugcacc

SEQ ID NO: 182206 - RNA, 32 nt, Human
gcuucugucccuucaucgguucaugucacagg

SEQ ID NO: 182207 - RNA, 32 nt, Human
gcuucugucggugccucagugccaagucagga

SEQ ID NO: 182208 - RNA, 32 nt, Human
gcuucugucuguucuuaauuuuuggguuugac

SEQ ID NO: 182209 - RNA, 32 nt, Human
gcuucuguggcccaggcuggagugcaguggcu

SEQ ID NO: 182210 - RNA, 32 nt, Human
gcuucuguguaagccaggcuuaagucaaucag

SEQ ID NO: 182211 - RNA, 32 nt, Human
gcuucuguuagguucccaucucuccuucugcc

SEQ ID NO: 182212 - RNA, 32 nt, Human
gcuucuguucucugcugagggccaauacccua

SEQ ID NO: 182213 - RNA, 32 nt, Human
gcuucuguugcugccucaugcuaagacucagu

SEQ ID NO: 182214 - RNA, 32 nt, Human
gcuucuguugucccuugccugccuguaaggaa

SEQ ID NO: 182215 - RNA, 32 nt, Human
gcuucuuacacagcagccuuacuucaucggcc

SEQ ID NO: 182216 - RNA, 32 nt, Human
gcuucuuacagacgcagccccuugucuguagc

SEQ ID NO: 182217 - RNA, 32 nt, Human
gcuucuuacccucccucccuuccucccucccu

SEQ ID NO: 182218 - RNA, 32 nt, Human
gcuucuuagcuuuucugaauucugcaguauuu

SEQ ID NO: 182219 - RNA, 32 nt, Human
gcuucuuauccugaacacuugacaccuugagg

SEQ ID NO: 182220 - RNA, 32 nt, Human
gcuucuucaagcaaaccaccucaccacacuau

SEQ ID NO: 182221 - RNA, 18 nt, Human
gcuucuucaaggcaucuc

SEQ ID NO: 182222 - RNA, 18 nt, Human
gcuucuucagcccccuca

SEQ ID NO: 182223 - RNA, 32 nt, Human
gcuucuucauccugccagaguuuccaaaugga

SEQ ID NO: 182224 - RNA, 22 nt, Human
gcuucuuccacggggcuugaca

SEQ ID NO: 182225 - RNA, 32 nt, Human
gcuucuuccagguaugggcaccagagagggag

SEQ ID NO: 182226 - RNA, 32 nt, Human
gcuucuuccccugcccagaaagaucuuucuag

SEQ ID NO: 182227 - RNA, 32 nt, Human
gcuucuuccuccaagagcccauugaagaagcc

SEQ ID NO: 182228 - RNA, 32 nt, Human
gcuucuuccugccucuuugcauacucagcaua

SEQ ID NO: 182229 - RNA, 32 nt, Human
gcuucuucgcagucuucggcccucuccugucg

SEQ ID NO: 182230 - RNA, 32 nt, Human
gcuucuucgguugcaguccucuugcuucuugc

SEQ ID NO: 182231 - RNA, 32 nt, Human
gcuucuucuacaccuuucauucuuuuuguuuu

SEQ ID NO: 182232 - RNA, 32 nt, Human
gcuucuucucagaucuauccuguucguuggag

SEQ ID NO: 182233 - RNA, 32 nt, Human
gcuucuucucagggaggcccuggcgcgggguc

SEQ ID NO: 182234 - RNA, 32 nt, Human
gcuucuucuccucacccaguuuggccaacagc

SEQ ID NO: 182235 - RNA, 32 nt, Human
gcuucuucucuuccugugguuccauccgaagg

SEQ ID NO: 182236 - RNA, 32 nt, Human
gcuucuucuguggagccuguuccucacuggaa

SEQ ID NO: 182237 - RNA, 32 nt, Human
gcuucuucuucugguggcgucuuuggauuguc

SEQ ID NO: 182238 - RNA, 18 nt, Human
gcuucuucuuuugagcaa

SEQ ID NO: 182239 - RNA, 32 nt, Human
gcuucuucuuuugagcaacuuucuuacacuga

SEQ ID NO: 182240 - RNA, 32 nt, Human
gcuucuugaguagagccaccaccaccauagcc

SEQ ID NO: 182241 - RNA, 32 nt, Human
gcuucuugcccagguuucaaagcugaaguaca

SEQ ID NO: 182242 - RNA, 23 nt, Human
gcuucuugccccuugggccuccc

SEQ ID NO: 182243 - RNA, 21 nt, Human
gcuucuugccucaguucuucc

SEQ ID NO: 182244 - RNA, 23 nt, Human
gcuucuugccuccacacccuccu

SEQ ID NO: 182245 - RNA, 32 nt, Human
gcuucuugcuccaggaaaugucuaucaauuua

SEQ ID NO: 182246 - RNA, 32 nt, Human
gcuucuugcuuugcagagugccauggucaugu

SEQ ID NO: 182247 - RNA, 22 nt, Human
gcuucuuggccucagcuccccu

SEQ ID NO: 182248 - RNA, 32 nt, Human
gcuucuuguccaccucuucuccccugcccacc

SEQ ID NO: 182249 - RNA, 32 nt, Human
gcuucuuguguuugugucauucuguccugaga

SEQ ID NO: 182250 - RNA, 32 nt, Human
gcuucuuucuucucccccaaaacuauuuaaug

SEQ ID NO: 182251 - RNA, 24 nt, Human
gcuucuuuggcggugacaggggug

SEQ ID NO: 182252 - RNA, 32 nt, Human
gcuucuuuggguuuguggcacccuggccaccc

SEQ ID NO: 182253 - RNA, 32 nt, Human
gcuucuuuuguaggugggaauccagccucugu

SEQ ID NO: 182254 - RNA, 32 nt, Human
gcuucuuuuuaaguaugaggguuuguugguca

SEQ ID NO: 182255 - RNA, 22 nt, Human
gcuucuuuuuccugugccuuuu

SEQ ID NO: 182256 - RNA, 32 nt, Human
gcuucuuuuuccugugccuuuuuaacacucaa

SEQ ID NO: 182257 - RNA, 32 nt, Human
gcuugaaaauguucauucucugggcuuguggc

SEQ ID NO: 182258 - RNA, 32 nt, Human
gcuugaaaccagccuggccaacguggugagac

SEQ ID NO: 182259 - RNA, 32 nt, Human
gcuugaaaccuacaauauuauuuuaaccugca

SEQ ID NO: 182260 - RNA, 32 nt, Human
gcuugaaacguuugccccaugggaaacguaug

SEQ ID NO: 182261 - RNA, 32 nt, Human
gcuugaaacuauuuuuguaauccaagaaugga

SEQ ID NO: 182262 - RNA, 32 nt, Human
gcuugaaauccagcaggauggaggacuuggcc

SEQ ID NO: 182263 - RNA, 32 nt, Human
gcuugaaaucuguguccccugccugcacuggc

SEQ ID NO: 182264 - RNA, 32 nt, Human
gcuugaacacugaagggcagguggugggccau

SEQ ID NO: 182265 - RNA, 32 nt, Human
gcuugaacagggaagcagagguugcggugaac

SEQ ID NO: 182266 - RNA, 32 nt, Human
gcuugaacagggaggcagagguugcagugagc

SEQ ID NO: 182267 - RNA, 32 nt, Human
gcuugaaccaggagacggagguugcagugagc

SEQ ID NO: 182268 - RNA, 32 nt, Human
gcuugaacccaagaggcagaggaugcaaugag

SEQ ID NO: 182269 - RNA, 32 nt, Human
gcuugaacccaagaggcagagguugcagugaa

SEQ ID NO: 182270 - RNA, 32 nt, Human
gcuugaacccaagaggcggagguugcagugag

SEQ ID NO: 182271 - RNA, 32 nt, Human
gcuugaacccaagaggcggagguuguggugag

SEQ ID NO: 182272 - RNA, 32 nt, Human
gcuugaacccaagagguccaaggcugcaguga

SEQ ID NO: 182273 - RNA, 32 nt, Human
gcuugaacccaagaggucgaggcugcagugag

SEQ ID NO: 182274 - RNA, 32 nt, Human
gcuugaacccaagagguggaggcugaagugag

SEQ ID NO: 182275 - RNA, 32 nt, Human
gcuugaacccaagagguggagguugcggugag

SEQ ID NO: 182276 - RNA, 32 nt, Human
gcuugaacccagcagauggagguugcagugag

SEQ ID NO: 182277 - RNA, 32 nt, Human
gcuugaacccaggaagcggagguuguggugag

SEQ ID NO: 182278 - RNA, 32 nt, Human
gcuugaacccaggagacagagguugcagugag

SEQ ID NO: 182279 - RNA, 32 nt, Human
gcuugaacccaggagacagagguuguagugag

SEQ ID NO: 182280 - RNA, 32 nt, Human
gcuugaacccaggagacagagguugugguggg

SEQ ID NO: 182281 - RNA, 32 nt, Human
gcuugaacccaggagacagggguugcagugag

SEQ ID NO: 182282 - RNA, 32 nt, Human
gcuugaacccaggagacauggguugcagugag

SEQ ID NO: 182283 - RNA, 32 nt, Human
gcuugaacccaggagacgagguugcagugagc

SEQ ID NO: 182284 - RNA, 32 nt, Human
gcuugaacccaggagacggagguugcagugag

SEQ ID NO: 182285 - RNA, 32 nt, Human
gcuugaacccaggagacggugguugcagugag

SEQ ID NO: 182286 - RNA, 32 nt, Human
gcuugaacccaggagauagagguugcaaugag

SEQ ID NO: 182287 - RNA, 32 nt, Human
gcuugaacccaggagauggaaguugcagugag

SEQ ID NO: 182288 - RNA, 32 nt, Human
gcuugaacccaggagauggagauugcaguagg

SEQ ID NO: 182289 - RNA, 32 nt, Human
gcuugaacccaggagauggagguugcagugag

SEQ ID NO: 182290 - RNA, 32 nt, Human
gcuugaacccaggagauggagguugcggugag

SEQ ID NO: 182291 - RNA, 32 nt, Human
gcuugaacccaggagauugagguuguagugag

SEQ ID NO: 182292 - RNA, 32 nt, Human
gcuugaacccaggaggaagagguugcagugag

SEQ ID NO: 182293 - RNA, 32 nt, Human
gcuugaacccaggaggcagaaguugcagugag

SEQ ID NO: 182294 - RNA, 32 nt, Human
gcuugaacccaggaggcagaggguugcaguga

SEQ ID NO: 182295 - RNA, 32 nt, Human
gcuugaacccaggaggcagagguuacaguaaa

SEQ ID NO: 182296 - RNA, 32 nt, Human
gcuugaacccaggaggcagagguuacagugag

SEQ ID NO: 182297 - RNA, 32 nt, Human
gcuugaacccaggaggcagagguugcaguaag

SEQ ID NO: 182298 - RNA, 32 nt, Human
gcuugaacccaggaggcagagguugcagugag

SEQ ID NO: 182299 - RNA, 32 nt, Human
gcuugaacccaggaggcagagguugcagugca

SEQ ID NO: 182300 - RNA, 32 nt, Human
gcuugaacccaggaggcagagguugcagugcg

SEQ ID NO: 182301 - RNA, 32 nt, Human
gcuugaacccaggaggcagagguuguagugag

SEQ ID NO: 182302 - RNA, 32 nt, Human
gcuugaacccaggaggcagugauugcagugag

SEQ ID NO: 182303 - RNA, 32 nt, Human
gcuugaacccaggaggcgaagguugcaguaaa

SEQ ID NO: 182304 - RNA, 32 nt, Human
gcuugaacccaggaggcggagauugcagugag

SEQ ID NO: 182305 - RNA, 32 nt, Human
gcuugaacccaggaggcggagcuugcagugag

SEQ ID NO: 182306 - RNA, 32 nt, Human
gcuugaacccaggaggcggaggcugcagugag

SEQ ID NO: 182307 - RNA, 32 nt, Human
gcuugaacccaggaggcggagguagcagugag

SEQ ID NO: 182308 - RNA, 32 nt, Human
gcuugaacccaggaggcggagguaguggugag

SEQ ID NO: 182309 - RNA, 32 nt, Human
gcuugaacccaggaggcggagguuacagugag

SEQ ID NO: 182310 - RNA, 32 nt, Human
gcuugaacccaggaggcggagguugcacugag

SEQ ID NO: 182311 - RNA, 32 nt, Human
gcuugaacccaggaggcggagguugcaguaag

SEQ ID NO: 182312 - RNA, 32 nt, Human
gcuugaacccaggaggcggagguugcagugag

SEQ ID NO: 182313 - RNA, 32 nt, Human
gcuugaacccaggaggcggagguugcagugau

SEQ ID NO: 182314 - RNA, 32 nt, Human
gcuugaacccaggaggcggagguugccgugag

SEQ ID NO: 182315 - RNA, 32 nt, Human
gcuugaacccaggaggcggagguugcggugag

SEQ ID NO: 182316 - RNA, 32 nt, Human
gcuugaacccaggaggcggagguuguagugag

SEQ ID NO: 182317 - RNA, 32 nt, Human
gcuugaacccaggaggcggagguuguggugag

SEQ ID NO: 182318 - RNA, 32 nt, Human
gcuugaacccaggaggcggaguuugcagugag

SEQ ID NO: 182319 - RNA, 32 nt, Human
gcuugaacccaggaggcggggguugcagugag

SEQ ID NO: 182320 - RNA, 32 nt, Human
gcuugaacccaggaggcugagguugcagugag

SEQ ID NO: 182321 - RNA, 32 nt, Human
gcuugaacccaggagguagaagcugcagugag

SEQ ID NO: 182322 - RNA, 32 nt, Human
gcuugaacccaggagguagaaguugcagugag

SEQ ID NO: 182323 - RNA, 32 nt, Human
gcuugaacccaggagguagaggcugcagugag

SEQ ID NO: 182324 - RNA, 32 nt, Human
gcuugaacccaggagguagagguugcagugag

SEQ ID NO: 182325 - RNA, 32 nt, Human
gcuugaacccaggaggugaagguugcagugac

SEQ ID NO: 182326 - RNA, 32 nt, Human
gcuugaacccaggaggugcagguugcagugag

SEQ ID NO: 182327 - RNA, 32 nt, Human
gcuugaacccaggagguggaaguugcuuugag

SEQ ID NO: 182328 - RNA, 32 nt, Human
gcuugaacccaggagguggagguagcagugag

SEQ ID NO: 182329 - RNA, 32 nt, Human
gcuugaacccaggagguggagguuacagugag

SEQ ID NO: 182330 - RNA, 32 nt, Human
gcuugaacccaggagguggagguuccagugag

SEQ ID NO: 182331 - RNA, 32 nt, Human
gcuugaacccaggagguggagguugcaaguga

SEQ ID NO: 182332 - RNA, 32 nt, Human
gcuugaacccaggagguggagguugcaguaag

SEQ ID NO: 182333 - RNA, 32 nt, Human
gcuugaacccaggagguggagguugcagugaa

SEQ ID NO: 182334 - RNA, 32 nt, Human
gcuugaacccaggagguggagguugcagugag

SEQ ID NO: 182335 - RNA, 32 nt, Human
gcuugaacccaggagguggagguugcaguggg

SEQ ID NO: 182336 - RNA, 32 nt, Human
gcuugaacccaggagguggagguugcaguuag

SEQ ID NO: 182337 - RNA, 32 nt, Human
gcuugaacccaggagguggagguugcggugag

SEQ ID NO: 182338 - RNA, 32 nt, Human
gcuugaacccaggagguggagguugcugugag

SEQ ID NO: 182339 - RNA, 32 nt, Human
gcuugaacccaggagguggagguuguggugag

SEQ ID NO: 182340 - RNA, 32 nt, Human
gcuugaacccaggagguggaguuugcagugag

SEQ ID NO: 182341 - RNA, 32 nt, Human
gcuugaacccaggagguggggguugcaccgag

SEQ ID NO: 182342 - RNA, 32 nt, Human
gcuugaacccaggagucagagguuucagugag

SEQ ID NO: 182343 - RNA, 32 nt, Human
gcuugaacccaggagucggagguugcagugag

SEQ ID NO: 182344 - RNA, 32 nt, Human
gcuugaacccaggaguucaagucugcagugag

SEQ ID NO: 182345 - RNA, 32 nt, Human
gcuugaacccaguggcggaggcugcagugagc

SEQ ID NO: 182346 - RNA, 32 nt, Human
gcuugaacccggaagguggagguuguugcggu

SEQ ID NO: 182347 - RNA, 32 nt, Human
gcuugaacccggaggcagagguugcagugagc

SEQ ID NO: 182348 - RNA, 32 nt, Human
gcuugaacccgggaggcagaggcugcacucua

SEQ ID NO: 182349 - RNA, 32 nt, Human
gcuugaacccgggaggcagaggcugcagugag

SEQ ID NO: 182350 - RNA, 32 nt, Human
gcuugaacccgggagguagaggcugcaauggg

SEQ ID NO: 182351 - RNA, 32 nt, Human
gcuugaacccgggagguggaggcugcaaugag

SEQ ID NO: 182352 - RNA, 32 nt, Human
gcuugaacccgggagguggaggcugcagcgag

SEQ ID NO: 182353 - RNA, 32 nt, Human
gcuugaacccgggagguggaggcugcagugag

SEQ ID NO: 182354 - RNA, 32 nt, Human
gcuugaacccgggagguggaggcugcggugag

SEQ ID NO: 182355 - RNA, 32 nt, Human
gcuugaacccggggacggagguugcagugaac

SEQ ID NO: 182356 - RNA, 32 nt, Human
gcuugaacccgggggcagaggcugcagugagc

SEQ ID NO: 182357 - RNA, 32 nt, Human
gcuugaaccgggaggcagaaguugcagugagc

SEQ ID NO: 182358 - RNA, 32 nt, Human
gcuugaaccgggaggcggagguugcagugagc

SEQ ID NO: 182359 - RNA, 32 nt, Human
gcuugaaccggggagguggaggcugcagugag

SEQ ID NO: 182360 - RNA, 32 nt, Human
gcuugaaccugagaggugagguugcagugagc

SEQ ID NO: 182361 - RNA, 32 nt, Human
gcuugaaccuggaggcagagauugcagugagc

SEQ ID NO: 182362 - RNA, 32 nt, Human
gcuugaaccuggagguggagguugcagugagc

SEQ ID NO: 182363 - RNA, 32 nt, Human
gcuugaaccugggaagucgaggcugcaaguga

SEQ ID NO: 182364 - RNA, 32 nt, Human
gcuugaaccugggaaguggaggcugcagugag

SEQ ID NO: 182365 - RNA, 32 nt, Human
gcuugaaccugggagauggaggcugcaguaag

SEQ ID NO: 182366 - RNA, 32 nt, Human
gcuugaaccugggaggcugagcuugcagugag

SEQ ID NO: 182367 - RNA, 32 nt, Human
gcuugaaccugggaguuggagguugcagugaa

SEQ ID NO: 182368 - RNA, 18 nt, Human
gcuugaaccugguaggug

SEQ ID NO: 182369 - RNA, 32 nt, Human
gcuugaacucacugcccgcgccucaucucucc

SEQ ID NO: 182370 - RNA, 32 nt, Human
gcuugaacucagaaggcggaggcugcagugag

SEQ ID NO: 182371 - RNA, 32 nt, Human
gcuugaacucaggagguggagguugcggugag

SEQ ID NO: 182372 - RNA, 32 nt, Human
gcuugaacugaggagaugaagguuacagugag

SEQ ID NO: 182373 - RNA, 32 nt, Human
gcuugaacugauuuaaacauuugucaauauac

SEQ ID NO: 182374 - RNA, 32 nt, Human
gcuugaagaacaguaaaucacagcggaaaaua

SEQ ID NO: 182375 - RNA, 32 nt, Human
gcuugaagaguaaccugagauugcaagggagc

SEQ ID NO: 182376 - RNA, 32 nt, Human
gcuugaagauuucagcaaaugugucuuacaga

SEQ ID NO: 182377 - RNA, 32 nt, Human
gcuugaagccagaggcagagguugcaaugagc

SEQ ID NO: 182378 - RNA, 32 nt, Human
gcuugaagccuggaggcggaggcugcacugag

SEQ ID NO: 182379 - RNA, 32 nt, Human
gcuugaagcugcagugagcuaggaucgugcca

SEQ ID NO: 182380 - RNA, 32 nt, Human
gcuugaagcuguuuccuuuacucacauugaag

SEQ ID NO: 182381 - RNA, 32 nt, Human
gcuugaaggacaguugcccuccaggagguucc

SEQ ID NO: 182382 - RNA, 32 nt, Human
gcuugaagggaccggccaugccuccaagccuu

SEQ ID NO: 182383 - RNA, 32 nt, Human
gcuugaaguccuuuuccccaaaaagagggaag

SEQ ID NO: 182384 - RNA, 32 nt, Human
gcuugaagugcaccuugagcagguucuccugg

SEQ ID NO: 182385 - RNA, 32 nt, Human
gcuugaaguggaagaaaaaugaaguuguuuau

SEQ ID NO: 182386 - RNA, 32 nt, Human
gcuugaaguucugcagagauguugauaugccu

SEQ ID NO: 182387 - RNA, 32 nt, Human
gcuugaauaagaaaaacaaauucuuccuccua

SEQ ID NO: 182388 - RNA, 32 nt, Human
gcuugaauccaggaguuagaccagccugggca

SEQ ID NO: 182389 - RNA, 32 nt, Human
gcuugaauuuaauacagacaucuaauguucuc

SEQ ID NO: 182390 - RNA, 32 nt, Human
gcuugacaagaguucagcucaaguugaacaua

SEQ ID NO: 182391 - RNA, 32 nt, Human
gcuugaccauccucugacuuccugggccccua

SEQ ID NO: 182392 - RNA, 32 nt, Human
gcuugacccaggaagcggagguugcagugagc

SEQ ID NO: 182393 - RNA, 32 nt, Human
gcuugacccaggaggcagagguugcagugagc

SEQ ID NO: 182394 - RNA, 32 nt, Human
gcuugacccaggaggcggagguugcggugacc

SEQ ID NO: 182395 - RNA, 32 nt, Human
gcuugaccccaggagguggacauugcagugag

SEQ ID NO: 182396 - RNA, 32 nt, Human
gcuugaccccgggagguggaggcugcagugag

SEQ ID NO: 182397 - RNA, 32 nt, Human
gcuugaccugcucuucacauguggcugcuuaa

SEQ ID NO: 182398 - RNA, 32 nt, Human
gcuugaccugggaggcggagauugcggugagc

SEQ ID NO: 182399 - RNA, 32 nt, Human
gcuugaccuuuccuuguugccguuuuugcuug

SEQ ID NO: 182400 - RNA, 31 nt, Human
gcuugacgcccuuccccuugccccaggccau

SEQ ID NO: 182401 - RNA, 32 nt, Human
gcuugacgggaagcggagguugcagugagccg

SEQ ID NO: 182402 - RNA, 32 nt, Human
gcuugacuccaaagcuuauguguuuuccagua

SEQ ID NO: 182403 - RNA, 32 nt, Human
gcuugacuccaggaggcgcaggcugcagugag

SEQ ID NO: 182404 - RNA, 22 nt, Human
gcuugacuggauuaaagaauac

SEQ ID NO: 182405 - RNA, 32 nt, Human
gcuugacugggcagagccgagccggcuggcug

SEQ ID NO: 182406 - RNA, 23 nt, Human
gcuugacuguuuccauguucucc

SEQ ID NO: 182407 - RNA, 32 nt, Human
gcuugacuucuuuccaguccacguggauauaa

SEQ ID NO: 182408 - RNA, 32 nt, Human
gcuugagaauacucagcuuucccagcaccuac

SEQ ID NO: 182409 - RNA, 32 nt, Human
gcuugagaccagccugggcaacauggugaaac

SEQ ID NO: 182410 - RNA, 32 nt, Human
gcuugagaccagccuggggaacauagugagac

SEQ ID NO: 182411 - RNA, 32 nt, Human
gcuugagaccaggaguuugaggcuucagugag

SEQ ID NO: 182412 - RNA, 32 nt, Human
gcuugagacuaggaguuugaggcugcagugaa

SEQ ID NO: 182413 - RNA, 32 nt, Human
gcuugagacugagaguuggaggcugcgaugag

SEQ ID NO: 182414 - RNA, 32 nt, Human
gcuugagagacacugggacacugucagugcua

SEQ ID NO: 182415 - RNA, 32 nt, Human
gcuugagaggcaggucccuggagaucaucuag

SEQ ID NO: 182416 - RNA, 32 nt, Human
gcuugagaggucuuucaggacugauuuuggug

SEQ ID NO: 182417 - RNA, 32 nt, Human
gcuugagagguugaagcugcagugagcuguga

SEQ ID NO: 182418 - RNA, 32 nt, Human
gcuugagaugaagggaagacucuuaccagaua

SEQ ID NO: 182419 - RNA, 32 nt, Human
gcuugagcagcaauucauauuacugucacagg

SEQ ID NO: 182420 - RNA, 22 nt, Human
gcuugagccaaggaguucaaga

SEQ ID NO: 182421 - RNA, 32 nt, Human
gcuugagccaaugaguuggaggcugcagugag

SEQ ID NO: 182422 - RNA, 32 nt, Human
gcuugagccaggaagguugagguugcagugag

SEQ ID NO: 182423 - RNA, 32 nt, Human
gcuugagccaggaguuuuaaguccagcuuggc

SEQ ID NO: 182424 - RNA, 32 nt, Human
gcuugagccagggaggucaaggcugcagugag

SEQ ID NO: 182425 - RNA, 32 nt, Human
gcuugagcccaagaggcagagguugcaggguc

SEQ ID NO: 182426 - RNA, 32 nt, Human
gcuugagcccaagagguagagguugcagugag

SEQ ID NO: 182427 - RNA, 32 nt, Human
gcuugagcccaagagguggagguuacagugag

SEQ ID NO: 182428 - RNA, 32 nt, Human
gcuugagcccaagagguugaggcugcagugag

SEQ ID NO: 182429 - RNA, 32 nt, Human
gcuugagcccaagaguucgacgcugcagugag

SEQ ID NO: 182430 - RNA, 22 nt, Human
gcuugagcccagaaguuugaga

SEQ ID NO: 182431 - RNA, 32 nt, Human
gcuugagcccagaaguuugaggcugcaaugag

SEQ ID NO: 182432 - RNA, 32 nt, Human
gcuugagcccagaggcggagguugcagugagc

SEQ ID NO: 182433 - RNA, 22 nt, Human
gcuugagcccagagguucgaga

SEQ ID NO: 182434 - RNA, 32 nt, Human
gcuugagcccagcaguuggaggcugcagugag

SEQ ID NO: 182435 - RNA, 32 nt, Human
gcuugagcccaggaagcggagguugcaaugag

SEQ ID NO: 182436 - RNA, 32 nt, Human
gcuugagcccaggaaguggaggcugcagugac

SEQ ID NO: 182437 - RNA, 32 nt, Human
gcuugagcccaggaauucaaggcuucaccgag

SEQ ID NO: 182438 - RNA, 32 nt, Human
gcuugagcccaggaauucaaguguagccuagg

SEQ ID NO: 182439 - RNA, 22 nt, Human
gcuugagcccaggaauuugaga

SEQ ID NO: 182440 - RNA, 32 nt, Human
gcuugagcccaggaauuugagguuguagugag

SEQ ID NO: 182441 - RNA, 32 nt, Human
gcuugagcccaggacaucgaggcugcggugaa

SEQ ID NO: 182442 - RNA, 32 nt, Human
gcuugagcccaggacucuaaggcugcagugag

SEQ ID NO: 182443 - RNA, 32 nt, Human
gcuugagcccaggagaccagguuggagaccag

SEQ ID NO: 182444 - RNA, 32 nt, Human
gcuugagcccaggagagugaggcuaggcaucu

SEQ ID NO: 182445 - RNA, 32 nt, Human
gcuugagcccaggagauugaggcugaggcugc

SEQ ID NO: 182446 - RNA, 22 nt, Human
gcuugagcccaggagcucgaga

SEQ ID NO: 182447 - RNA, 32 nt, Human
gcuugagcccaggagcuggagaucagccuggg

SEQ ID NO: 182448 - RNA, 32 nt, Human
gcuugagcccaggaggcagaggcugcagugag

SEQ ID NO: 182449 - RNA, 32 nt, Human
gcuugagcccaggaggcagagguugcaguaag

SEQ ID NO: 182450 - RNA, 32 nt, Human
gcuugagcccaggaggcagagguugcagugag

SEQ ID NO: 182451 - RNA, 32 nt, Human
gcuugagcccaggaggcggagauugcagugag

SEQ ID NO: 182452 - RNA, 32 nt, Human
gcuugagcccaggaggcggagguugcagugag

SEQ ID NO: 182453 - RNA, 32 nt, Human
gcuugagcccaggaggcugaggcugcagugca

SEQ ID NO: 182454 - RNA, 32 nt, Human
gcuugagcccaggaggucaaggcugcagugag

SEQ ID NO: 182455 - RNA, 32 nt, Human
gcuugagcccaggaggucaaggguacagugag

SEQ ID NO: 182456 - RNA, 32 nt, Human
gcuugagcccaggaggucagggcugcagugag

SEQ ID NO: 182457 - RNA, 32 nt, Human
gcuugagcccaggaggucgaagcugcagugag

SEQ ID NO: 182458 - RNA, 32 nt, Human
gcuugagcccaggaggucgaggcugcagugag

SEQ ID NO: 182459 - RNA, 32 nt, Human
gcuugagcccaggagguggagguugcaaugag

SEQ ID NO: 182460 - RNA, 32 nt, Human
gcuugagcccaggagguggagguugcagugag

SEQ ID NO: 182461 - RNA, 32 nt, Human
gcuugagcccaggagguugaggcugcagugaa

SEQ ID NO: 182462 - RNA, 32 nt, Human
gcuugagcccaggagguugaggcugcagugag

SEQ ID NO: 182463 - RNA, 32 nt, Human
gcuugagcccaggagguugaggucacagugag

SEQ ID NO: 182464 - RNA, 22 nt, Human
gcuugagcccaggagucugaga

SEQ ID NO: 182465 - RNA, 32 nt, Human
gcuugagcccaggaguucaaagcugcagugag

SEQ ID NO: 182466 - RNA, 22 nt, Human
gcuugagcccaggaguucaaga

SEQ ID NO: 182467 - RNA, 32 nt, Human
gcuugagcccaggaguucaagaccggccugag

SEQ ID NO: 182468 - RNA, 32 nt, Human
gcuugagcccaggaguucaagagcagccuggg

SEQ ID NO: 182469 - RNA, 32 nt, Human
gcuugagcccaggaguucaaggaugcagugug

SEQ ID NO: 182470 - RNA, 22 nt, Human
gcuugagcccaggaguucagga

SEQ ID NO: 182471 - RNA, 32 nt, Human
gcuugagcccaggaguucaggaccugccuggg

SEQ ID NO: 182472 - RNA, 32 nt, Human
gcuugagcccaggaguucagggcugcagugag

SEQ ID NO: 182473 - RNA, 22 nt, Human
gcuugagcccaggaguucgaga

SEQ ID NO: 182474 - RNA, 32 nt, Human
gcuugagcccaggaguucgagacuugccuggg

SEQ ID NO: 182475 - RNA, 22 nt, Human
gcuugagcccaggaguucgagg

SEQ ID NO: 182476 - RNA, 32 nt, Human
gcuugagcccaggaguucgaggcugcagucag

SEQ ID NO: 182477 - RNA, 32 nt, Human
gcuugagcccaggaguucgaggcugcagugag

SEQ ID NO: 182478 - RNA, 32 nt, Human
gcuugagcccaggaguugaagaacguggcgaa

SEQ ID NO: 182479 - RNA, 22 nt, Human
gcuugagcccaggaguuggaga

SEQ ID NO: 182480 - RNA, 32 nt, Human
gcuugagcccaggaguuggaggcugaagagag

SEQ ID NO: 182481 - RNA, 32 nt, Human
gcuugagcccaggaguuuaaagcugcagugcc

SEQ ID NO: 182482 - RNA, 22 nt, Human
gcuugagcccaggaguuuaaga

SEQ ID NO: 182483 - RNA, 32 nt, Human
gcuugagcccaggaguuuaagaccugccuggg

SEQ ID NO: 182484 - RNA, 32 nt, Human
gcuugagcccaggaguuuaagguuguagugcg

SEQ ID NO: 182485 - RNA, 20 nt, Human
gcuugagcccaggaguuuga

SEQ ID NO: 182486 - RNA, 32 nt, Human
gcuugagcccaggaguuugaagcugcagugag

SEQ ID NO: 182487 - RNA, 32 nt, Human
gcuugagcccaggaguuugacaccagcauggg

SEQ ID NO: 182488 - RNA, 22 nt, Human
gcuugagcccaggaguuugaga

SEQ ID NO: 182489 - RNA, 32 nt, Human
gcuugagcccaggaguuugagaccagcaugga

SEQ ID NO: 182490 - RNA, 32 nt, Human
gcuugagcccaggaguuugagaccaggcgagg

SEQ ID NO: 182491 - RNA, 32 nt, Human
gcuugagcccaggaguuugagaccgacauggg

SEQ ID NO: 182492 - RNA, 32 nt, Human
gcuugagcccaggaguuugagacuguagugca

SEQ ID NO: 182493 - RNA, 32 nt, Human
gcuugagcccaggaguuugagaucagccuggu

SEQ ID NO: 182494 - RNA, 32 nt, Human
gcuugagcccaggaguuugagccuucagugag

SEQ ID NO: 182495 - RNA, 32 nt, Human
gcuugagcccaggaguuugaggaugcagugag

SEQ ID NO: 182496 - RNA, 32 nt, Human
gcuugagcccaggaguuugaggcuacagugag

SEQ ID NO: 182497 - RNA, 32 nt, Human
gcuugagcccaggaguuugaggcugcagugag

SEQ ID NO: 182498 - RNA, 32 nt, Human
gcuugagcccaggaguuugagggcagccuggg

SEQ ID NO: 182499 - RNA, 32 nt, Human
gcuugagcccaggaguuugagggugaugugca

SEQ ID NO: 182500 - RNA, 32 nt, Human
gcuugagcccaggaguuugagguugcagugag

SEQ ID NO: 182501 - RNA, 32 nt, Human
gcuugagcccaggaguuugagguugcagugca

SEQ ID NO: 182502 - RNA, 32 nt, Human
gcuugagcccaggaguuugagguuguagggag

SEQ ID NO: 182503 - RNA, 32 nt, Human
gcuugagcccaggcaguuggagaccagucugg

SEQ ID NO: 182504 - RNA, 32 nt, Human
gcuugagcccaggcgguugaggcugcagugag

SEQ ID NO: 182505 - RNA, 32 nt, Human
gcuugagcccagggguuugcggcugcagugag

SEQ ID NO: 182506 - RNA, 32 nt, Human
gcuugagcccaguaggucgaggcugcagugag

SEQ ID NO: 182507 - RNA, 32 nt, Human
gcuugagcccaguaguuugaggcugcagcgag

SEQ ID NO: 182508 - RNA, 32 nt, Human
gcuugagcccaugagauugaggcugcagugag

SEQ ID NO: 182509 - RNA, 32 nt, Human
gcuugagccccggaggucgaggcugcaguggg

SEQ ID NO: 182510 - RNA, 32 nt, Human
gcuugagcccgcuugcccaacuccugagaugu

SEQ ID NO: 182511 - RNA, 32 nt, Human
gcuugagcccgggaggcagaggcugcagugaa

SEQ ID NO: 182512 - RNA, 32 nt, Human
gcuugagcccgugaagucgaggcugcagugag

SEQ ID NO: 182513 - RNA, 32 nt, Human
gcuugagcccuagaggucgaggcugcagugag

SEQ ID NO: 182514 - RNA, 32 nt, Human
gcuugagcccuagagguugaggcugcagugag

SEQ ID NO: 182515 - RNA, 32 nt, Human
gcuugagcccugcuuuaauauguagugaaaga

SEQ ID NO: 182516 - RNA, 32 nt, Human
gcuugagcccuggaggucaaggcugcagugag

SEQ ID NO: 182517 - RNA, 32 nt, Human
gcuugagcccuggaguucaaggcugcagugag

SEQ ID NO: 182518 - RNA, 32 nt, Human
gcuugagcccuggaguuggagguugcagugag

SEQ ID NO: 182519 - RNA, 22 nt, Human
gcuugagccgaggaguucaaga

SEQ ID NO: 182520 - RNA, 22 nt, Human
gcuugagccgaggaguucgaga

SEQ ID NO: 182521 - RNA, 32 nt, Human
gcuugagccggggaggaggggguugcagugag

SEQ ID NO: 182522 - RNA, 32 nt, Human
gcuugagccggggagguggaggcugcagugaa

SEQ ID NO: 182523 - RNA, 32 nt, Human
gcuugagccuaggaagucgaggcugcagugag

SEQ ID NO: 182524 - RNA, 32 nt, Human
gcuugagccuaggaggucgaggcugcaguggg

SEQ ID NO: 182525 - RNA, 32 nt, Human
gcuugagccuaggaguugaaggccagccuggg

SEQ ID NO: 182526 - RNA, 32 nt, Human
gcuugagccugaggccuugucgagaagcuucc

SEQ ID NO: 182527 - RNA, 32 nt, Human
gcuugagccugggaagucaagccugcagugag

SEQ ID NO: 182528 - RNA, 32 nt, Human
gcuugagccugggaaguggaggcugcagugag

SEQ ID NO: 182529 - RNA, 32 nt, Human
gcuugagccugggacauugaggcugcagugaa

SEQ ID NO: 182530 - RNA, 32 nt, Human
gcuugagccugggagauugaggcugcacugag

SEQ ID NO: 182531 - RNA, 32 nt, Human
gcuugagccugggagcaaggguugcagugagc

SEQ ID NO: 182532 - RNA, 32 nt, Human
gcuugagccugggagcgcagguugcaaugagc

SEQ ID NO: 182533 - RNA, 32 nt, Human
gcuugagccugggaggcagaggcugcagugag

SEQ ID NO: 182534 - RNA, 32 nt, Human
gcuugagccugggaggucaaggcugcagugag

SEQ ID NO: 182535 - RNA, 32 nt, Human
gcuugagccugggaggucgaggcugcagugag

SEQ ID NO: 182536 - RNA, 32 nt, Human
gcuugagccugggagguugaggcugcagugag

SEQ ID NO: 182537 - RNA, 32 nt, Human
gcuugagccugggaguuugaggcugcagugag

SEQ ID NO: 182538 - RNA, 32 nt, Human
gcuugagccugugaggucgaggcugcagugag

SEQ ID NO: 182539 - RNA, 32 nt, Human
gcuugagcucacacucaaagaucagaggaccu

SEQ ID NO: 182540 - RNA, 23 nt, Human
gcuugagcucagagaguucgaga

SEQ ID NO: 182541 - RNA, 32 nt, Human
gcuugagcucaggagguugaggcugcagagag

SEQ ID NO: 182542 - RNA, 22 nt, Human
gcuugagcucaggaguuagaga

SEQ ID NO: 182543 - RNA, 22 nt, Human
gcuugagcucaggaguucaaga

SEQ ID NO: 182544 - RNA, 32 nt, Human
gcuugagcucaggaguucaaggcugcagagag

SEQ ID NO: 182545 - RNA, 22 nt, Human
gcuugagcucaggaguucgaga

SEQ ID NO: 182546 - RNA, 32 nt, Human
gcuugagcucaggaguucgagagcagccuggg

SEQ ID NO: 182547 - RNA, 22 nt, Human
gcuugagcucaggaguucguga

SEQ ID NO: 182548 - RNA, 32 nt, Human
gcuugagcucaggaguuugaagccugcuuggg

SEQ ID NO: 182549 - RNA, 22 nt, Human
gcuugagcucaggaguuugaga

SEQ ID NO: 182550 - RNA, 32 nt, Human
gcuugagcucaggaguuugagaccagcugggc

SEQ ID NO: 182551 - RNA, 32 nt, Human
gcuugagcucaggaguuugagaccaggcuggg

SEQ ID NO: 182552 - RNA, 32 nt, Human
gcuugagcucagggggccaaggcugcagugag

SEQ ID NO: 182553 - RNA, 32 nt, Human
gcuugagcucggaagauggaggcugcagugag

SEQ ID NO: 182554 - RNA, 32 nt, Human
gcuugagcugcagaaacugagaccagaccucu

SEQ ID NO: 182555 - RNA, 32 nt, Human
gcuugagcuggguggggugaggggugagcagc

SEQ ID NO: 182556 - RNA, 32 nt, Human
gcuugagcuucccucugccugcccguggaagg

SEQ ID NO: 182557 - RNA, 32 nt, Human
gcuugagcuugggaagucgaggcugcagucag

SEQ ID NO: 182558 - RNA, 32 nt, Human
gcuugagcuuuggaaucagacugcccacauuc

SEQ ID NO: 182559 - RNA, 20 nt, Human
gcuugaggaaagaaauucug

SEQ ID NO: 182560 - RNA, 32 nt, Human
gcuugaggaggaaccugucuuuaaagcugucc

SEQ ID NO: 182561 - RNA, 32 nt, Human
gcuugaggccagccugggcaacauagugagac

SEQ ID NO: 182562 - RNA, 32 nt, Human
gcuugaggccaggaguuagagacugcagugag

SEQ ID NO: 182563 - RNA, 32 nt, Human
gcuugaggccaggaguuuaaguuacagaacua

SEQ ID NO: 182564 - RNA, 32 nt, Human
gcuugaggcccagagucugaggcugcgguaag

SEQ ID NO: 182565 - RNA, 22 nt, Human
gcuugaggccccgauggacucc

SEQ ID NO: 182566 - RNA, 32 nt, Human
gcuugagggaggaggaagagauagaggaggag

SEQ ID NO: 182567 - RNA, 32 nt, Human
gcuugaggggaggggcaagugggacccugcca

SEQ ID NO: 182568 - RNA, 32 nt, Human
gcuugaggucugggaggguggcccuggccagc

SEQ ID NO: 182569 - RNA, 32 nt, Human
gcuugaguaucagcuaugcugaaggaaaagac

SEQ ID NO: 182570 - RNA, 32 nt, Human
gcuugaguccaggagguugaggcugcagucag

SEQ ID NO: 182571 - RNA, 32 nt, Human
gcuugaguccaggaguucaaggcugcagugag

SEQ ID NO: 182572 - RNA, 32 nt, Human
gcuugaguccaggaguucacugcacugagcug

SEQ ID NO: 182573 - RNA, 32 nt, Human
gcuugaguccaggaguuugagacuagccugau

SEQ ID NO: 182574 - RNA, 32 nt, Human
gcuugaguccaggaguuugagguuacagugau

SEQ ID NO: 182575 - RNA, 32 nt, Human
gcuugagucccaugccuccacccugccaucug

SEQ ID NO: 182576 - RNA, 32 nt, Human
gcuugagucugugagccagugucugccuauag

SEQ ID NO: 182577 - RNA, 32 nt, Human
gcuugagugcaagaguuugaggcugcagagag

SEQ ID NO: 182578 - RNA, 32 nt, Human
gcuugagugcaggaguuugagaccagccuggg

SEQ ID NO: 182579 - RNA, 32 nt, Human
gcuugaguguguuguguuaugcccagaacagg

SEQ ID NO: 182580 - RNA, 32 nt, Human
gcuugauagaaucacccccaccuggaggggcu

SEQ ID NO: 182581 - RNA, 24 nt, Human
gcuugauccgccgccugcugcacc

SEQ ID NO: 182582 - RNA, 32 nt, Human
gcuugaucucaggagguugaggcugcagugaa

SEQ ID NO: 182583 - RNA, 32 nt, Human
gcuugaucucggcucacuauaaccuccaccuc

SEQ ID NO: 182584 - RNA, 32 nt, Human
gcuugaucuggacacccccucgcccagauugc

SEQ ID NO: 182585 - RNA, 31 nt, Human
gcuugaugacuucuuuugcucucaaaguucc

SEQ ID NO: 182586 - RNA, 17 nt, Human
gcuugaugcuggccagg

SEQ ID NO: 182587 - RNA, 18 nt, Human
gcuugauggucaguguga

SEQ ID NO: 182588 - RNA, 32 nt, Human
gcuugaugugugugcaauguacauacuugaua

SEQ ID NO: 182589 - RNA, 32 nt, Human
gcuugauuaugucaccagacucuuucagcaug

SEQ ID NO: 182590 - RNA, 32 nt, Human
gcuugauugucuccccuucaagccccugcccu

SEQ ID NO: 182591 - RNA, 32 nt, Human
gcuugauuugccuggugaccaaauuacuagug

SEQ ID NO: 182592 - RNA, 32 nt, Human
gcuugauuugccuggugaccgaauuacuagug

SEQ ID NO: 182593 - RNA, 24 nt, Human
gcuugcaaaaaguauguuauugcc

SEQ ID NO: 182594 - RNA, 21 nt, Human
gcuugcaaaacccgccuccag

SEQ ID NO: 182595 - RNA, 32 nt, Human
gcuugcaaaguuggcccuuggcuggcaucugg

SEQ ID NO: 182596 - RNA, 32 nt, Human
gcuugcaagaagcaggaaggggaauggaauag

SEQ ID NO: 182597 - RNA, 32 nt, Human
gcuugcaauagggauuuuaaaauacacuaacu

SEQ ID NO: 182598 - RNA, 32 nt, Human
gcuugcacacaugcacacagaccacauagcac

SEQ ID NO: 182599 - RNA, 32 nt, Human
gcuugcacagaucagaccgagaagcaggguga

SEQ ID NO: 182600 - RNA, 32 nt, Human
gcuugcacaggcugugcacagccuugcagaug

SEQ ID NO: 182601 - RNA, 32 nt, Human
gcuugcaccauugcacuccagccugggcgaca

SEQ ID NO: 182602 - RNA, 32 nt, Human
gcuugcacccaggagguggagguugcagugag

SEQ ID NO: 182603 - RNA, 19 nt, Human
gcuugcaccugcagccccg

SEQ ID NO: 182604 - RNA, 32 nt, Human
gcuugcaccuguaaucccagcacuuugggagg

SEQ ID NO: 182605 - RNA, 32 nt, Human
gcuugcacgguggcucacgccuguaaucccag

SEQ ID NO: 182606 - RNA, 32 nt, Human
gcuugcacuacugcacuccagccugggugaca

SEQ ID NO: 182607 - RNA, 20 nt, Human
gcuugcacugcccaauccca

SEQ ID NO: 182608 - RNA, 32 nt, Human
gcuugcagacaagugccuucucaauguguccu

SEQ ID NO: 182609 - RNA, 32 nt, Human
gcuugcagagugggugacagagccacggagcu

SEQ ID NO: 182610 - RNA, 32 nt, Human
gcuugcagcaacuugauuuccccaaguccugu

SEQ ID NO: 182611 - RNA, 32 nt, Human
gcuugcaggccccagcccuguuccaaucaaug

SEQ ID NO: 182612 - RNA, 32 nt, Human
gcuugcaguauagugagaaaagccugccaagu

SEQ ID NO: 182613 - RNA, 32 nt, Human
gcuugcaguccagugagguggacagaccuguc

SEQ ID NO: 182614 - RNA, 32 nt, Human
gcuugcagugagcugggauugcaucacugcac

SEQ ID NO: 182615 - RNA, 32 nt, Human
gcuugcaucccccaucccuuguucacacgccc

SEQ ID NO: 182616 - RNA, 20 nt, Human
gcuugcaucccucagaugca

SEQ ID NO: 182617 - RNA, 32 nt, Human
gcuugcaugaaccucccuucuggcccccucca

SEQ ID NO: 182618 - RNA, 32 nt, Human
gcuugcauuuugguggaggaagacagacaaaa

SEQ ID NO: 182619 - RNA, 32 nt, Human
gcuugccaggaggcuggcaguacagagugcag

SEQ ID NO: 182620 - RNA, 32 nt, Human
gcuugccauccagccaagcugcucgaggcccu

SEQ ID NO: 182621 - RNA, 32 nt, Human
gcuugccauuugcacuuuucaaaugccuuugg

SEQ ID NO: 182622 - RNA, 32 nt, Human
gcuugcccaaaaggcuggagagggcagggagc

SEQ ID NO: 182623 - RNA, 32 nt, Human
gcuugcccauuuacagaugagaaggcugauau

SEQ ID NO: 182624 - RNA, 32 nt, Human
gcuugccccacucugccugccugcuguugguc

SEQ ID NO: 182625 - RNA, 32 nt, Human
gcuugccccagccuguaccccagccccugcag

SEQ ID NO: 182626 - RNA, 32 nt, Human
gcuugcccggcugcagagcagagaugugcagc

SEQ ID NO: 182627 - RNA, 32 nt, Human
gcuugcccugcuggccucucaucccccuucuu

SEQ ID NO: 182628 - RNA, 32 nt, Human
gcuugcccugcugugaacuugcacuuggagcc

SEQ ID NO: 182629 - RNA, 17 nt, Human
gcuugccguggguccag

SEQ ID NO: 182630 - RNA, 32 nt, Human
gcuugccuagguaguaucagcacuggggugag

SEQ ID NO: 182631 - RNA, 32 nt, Human
gcuugccucacacccacccacaucacaggaug

SEQ ID NO: 182632 - RNA, 32 nt, Human
gcuugccuccacucccuucugacuuuccagac

SEQ ID NO: 182633 - RNA, 32 nt, Human
gcuugccucccaggccccuuguggacuuagac

SEQ ID NO: 182634 - RNA, 32 nt, Human
gcuugccucccagguaccccaguguggccugc

SEQ ID NO: 182635 - RNA, 32 nt, Human
gcuugccuccccucggauuuggaguguccguu

SEQ ID NO: 182636 - RNA, 32 nt, Human
gcuugccugcacuccauccugucugcaacgcu

SEQ ID NO: 182637 - RNA, 22 nt, Human
gcuugccugcagcucucagggu

SEQ ID NO: 182638 - RNA, 32 nt, Human
gcuugccugcaggaucagaaaaguuugagaaa

SEQ ID NO: 182639 - RNA, 32 nt, Human
gcuugccugccaacccucagagucacauacac

SEQ ID NO: 182640 - RNA, 21 nt, Human
gcuugccuggaguucagggca

SEQ ID NO: 182641 - RNA, 32 nt, Human
gcuugccugggcagauguaggcaggggcuaga

SEQ ID NO: 182642 - RNA, 32 nt, Human
gcuugccugguccccucuccucuccgcccucc

SEQ ID NO: 182643 - RNA, 32 nt, Human
gcuugccuguaaucccagcacuuugggaggcc

SEQ ID NO: 182644 - RNA, 19 nt, Human
gcuugccuguaucccagcu

SEQ ID NO: 182645 - RNA, 32 nt, Human
gcuugccuguaucccagcuacucaggaagcug

SEQ ID NO: 182646 - RNA, 32 nt, Human
gcuugccuuaggauggggccaggaggccaggc

SEQ ID NO: 182647 - RNA, 32 nt, Human
gcuugccuugcaacagugccugcgggaccugc

SEQ ID NO: 182648 - RNA, 32 nt, Human
gcuugccuuuccucccuccacaacaggacgcu

SEQ ID NO: 182649 - RNA, 32 nt, Human
gcuugccuuuggcuuuccccaggauuucuguc

SEQ ID NO: 182650 - RNA, 32 nt, Human
gcuugccuuuuccuccuccucacagaggagau

SEQ ID NO: 182651 - RNA, 32 nt, Human
gcuugcgacccuccucucaggcugcuucugac

SEQ ID NO: 182652 - RNA, 20 nt, Human
gcuugcgaggagcgcagggu

SEQ ID NO: 182653 - RNA, 32 nt, Human
gcuugcgggaggcgguggggcaugggaggaag

SEQ ID NO: 182654 - RNA, 19 nt, Human
gcuugcgugcugcugggcc

SEQ ID NO: 182655 - RNA, 32 nt, Human
gcuugcuaccucagcccauccccaccaccccu

SEQ ID NO: 182656 - RNA, 32 nt, Human
gcuugcuagggagcuugaaucuuuucuuuuua

SEQ ID NO: 182657 - RNA, 32 nt, Human
gcuugcuaggucagaaugagagacuggugggu

SEQ ID NO: 182658 - RNA, 31 nt, Human
gcuugcuaucaaugccuacucacuuaaaaga

SEQ ID NO: 182659 - RNA, 32 nt, Human
gcuugcucacaucuuggcacauuuaagagaca

SEQ ID NO: 182660 - RNA, 32 nt, Human
gcuugcuccaauuuuccaucugcucucucuuc

SEQ ID NO: 182661 - RNA, 20 nt, Human
gcuugcuccccucacugcag

SEQ ID NO: 182662 - RNA, 32 nt, Human
gcuugcucucucucaccaugugacacacuggc

SEQ ID NO: 182663 - RNA, 32 nt, Human
gcuugcucucuuccuucucauucaagaaaccu

SEQ ID NO: 182664 - RNA, 32 nt, Human
gcuugcugaaacccaggagcugaacagugagg

SEQ ID NO: 182665 - RNA, 32 nt, Human
gcuugcugauuggaugguguggggaagggaua

SEQ ID NO: 182666 - RNA, 32 nt, Human
gcuugcugcagaaaccuggccuacggaagaua

SEQ ID NO: 182667 - RNA, 32 nt, Human
gcuugcugcagccucaaccuccugggcucacg

SEQ ID NO: 182668 - RNA, 32 nt, Human
gcuugcugcccuaggauguccucuguucugag

SEQ ID NO: 182669 - RNA, 32 nt, Human
gcuugcuggaaacugugggaggaugugugaau

SEQ ID NO: 182670 - RNA, 29 nt, Human
gcuugcuggcugcccucuuugccuucugg

SEQ ID NO: 182671 - RNA, 32 nt, Human
gcuugcugggcuggggacuggaggggaacgug

SEQ ID NO: 182672 - RNA, 32 nt, Human
gcuugcugggugacccugggugaguggcuucc

SEQ ID NO: 182673 - RNA, 32 nt, Human
gcuugcugggugcugagugcagggggugccuu

SEQ ID NO: 182674 - RNA, 32 nt, Human
gcuugcugguuuugcuugcaucugaugaguag

SEQ ID NO: 182675 - RNA, 32 nt, Human
gcuugcuguaguggaagagcucagggaagagc

SEQ ID NO: 182676 - RNA, 32 nt, Human
gcuugcuguggaccacaggcaccgcaggauaa

SEQ ID NO: 182677 - RNA, 32 nt, Human
gcuugcugugugaccuuggguaagucccuuga

SEQ ID NO: 182678 - RNA, 32 nt, Human
gcuugcuuagauaacuccacacugugaugccu

SEQ ID NO: 182679 - RNA, 32 nt, Human
gcuugcuucagcugcagccugccugugcuggc

SEQ ID NO: 182680 - RNA, 32 nt, Human
gcuugcuuccugguaaccagcucucuuaucuc

SEQ ID NO: 182681 - RNA, 32 nt, Human
gcuugcuugauagacaucucuuacagugagac

SEQ ID NO: 182682 - RNA, 32 nt, Human
gcuugcuugcuggccggccugccugccugccu

SEQ ID NO: 182683 - RNA, 32 nt, Human
gcuugcuugguaugcuuaccugggcuugugua

SEQ ID NO: 182684 - RNA, 32 nt, Human
gcuugcuuuccuccucccuccuuuuuauuuuc

SEQ ID NO: 182685 - RNA, 32 nt, Human
gcuugcuuuugccucugcccaaccagguugca

SEQ ID NO: 182686 - RNA, 32 nt, Human
gcuuggaacagaggccuuggcugcuccgcagu

SEQ ID NO: 182687 - RNA, 32 nt, Human
gcuuggaacagggccagagccccacaugagau

SEQ ID NO: 182688 - RNA, 32 nt, Human
gcuuggaaccucugaagguggggagcggaaca

SEQ ID NO: 182689 - RNA, 23 nt, Human
gcuuggaagacgcugccuucccc

SEQ ID NO: 182690 - RNA, 32 nt, Human
gcuuggaagagauucuuggcagagagaagagg

SEQ ID NO: 182691 - RNA, 18 nt, Human
gcuuggacagcaaggugg

SEQ ID NO: 182692 - RNA, 17 nt, Human
gcuuggacagcaagugg

SEQ ID NO: 182693 - RNA, 24 nt, Human
gcuuggacagcuagagcacauccu

SEQ ID NO: 182694 - RNA, 23 nt, Human
gcuuggacaugaagacccucccc

SEQ ID NO: 182695 - RNA, 32 nt, Human
gcuuggacccuggagguagaggcugcagugag

SEQ ID NO: 182696 - RNA, 32 nt, Human
gcuuggacccuggugggcugagugcuccgagg

SEQ ID NO: 182697 - RNA, 32 nt, Human
gcuuggaccuaggagguggagguugcagugag

SEQ ID NO: 182698 - RNA, 32 nt, Human
gcuuggacggcagagucagagaucuccagucc

SEQ ID NO: 182699 - RNA, 29 nt, Human
gcuuggacuccagagguggagguugcagu

SEQ ID NO: 182700 - RNA, 32 nt, Human
gcuuggacugauucccagucuccugggucaag

SEQ ID NO: 182701 - RNA, 32 nt, Human
gcuuggacuugcccaucuagcacuuuggaaau

SEQ ID NO: 182702 - RNA, 23 nt, Human
gcuuggacuuuucugacuucccc

SEQ ID NO: 182703 - RNA, 32 nt, Human
gcuuggagaccucccucucagucaacagcuga

SEQ ID NO: 182704 - RNA, 32 nt, Human
gcuuggagagggagacagggccagacauguuc

SEQ ID NO: 182705 - RNA, 32 nt, Human
gcuuggaguaagggaggguggccucucugugg

SEQ ID NO: 182706 - RNA, 32 nt, Human
gcuuggaguuucugcuggucuugggccagccg

SEQ ID NO: 182707 - RNA, 32 nt, Human
gcuuggauaacaacugcacuccagccuggaug

SEQ ID NO: 182708 - RNA, 32 nt, Human
gcuuggauaccagcuucaugcaccuucuaguu

SEQ ID NO: 182709 - RNA, 32 nt, Human
gcuuggaugaauggucuucagagcgugguccc

SEQ ID NO: 182710 - RNA, 18 nt, Human
gcuuggaugccaaaggga

SEQ ID NO: 182711 - RNA, 32 nt, Human
gcuuggauguuucuuuugcauguugccuagca

SEQ ID NO: 182712 - RNA, 17 nt, Human
gcuuggauuacagguga

SEQ ID NO: 182713 - RNA, 32 nt, Human
gcuuggauugagggguuggagaggagccauuu

SEQ ID NO: 182714 - RNA, 32 nt, Human
gcuuggcaaaacuguccagcaaaaugaaaaga

SEQ ID NO: 182715 - RNA, 32 nt, Human
gcuuggcaaccagggaugaagcauccguucau

SEQ ID NO: 182716 - RNA, 32 nt, Human
gcuuggcacacagcaggcuuucaagaagugcc

SEQ ID NO: 182717 - RNA, 32 nt, Human
gcuuggcacaggaaguuccccuuuguagcuaa

SEQ ID NO: 182718 - RNA, 27 nt, Human
gcuuggcacaggccacaucugccccaa

SEQ ID NO: 182719 - RNA, 17 nt, Human
gcuuggcacccaccucu

SEQ ID NO: 182720 - RNA, 17 nt, Human
gcuuggcacuccaccuu

SEQ ID NO: 182721 - RNA, 32 nt, Human
gcuuggcacugaggucccuggcgucccugguu

SEQ ID NO: 182722 - RNA, 32 nt, Human
gcuuggcacugccuuuuccuuucucaggccaa

SEQ ID NO: 182723 - RNA, 32 nt, Human
gcuuggcagcugaacuauuggagggugggaga

SEQ ID NO: 182724 - RNA, 32 nt, Human
gcuuggcagcuggaccaagggagccagucuug

SEQ ID NO: 182725 - RNA, 19 nt, Human
gcuuggcaggcugggccuc

SEQ ID NO: 182726 - RNA, 32 nt, Human
gcuuggcaggugucgggggaaugggccagaug

SEQ ID NO: 182727 - RNA, 32 nt, Human
gcuuggcauacagcaggagcccaguaaauguu

SEQ ID NO: 182728 - RNA, 32 nt, Human
gcuuggccaggugaggaugaggcagggcagac

SEQ ID NO: 182729 - RNA, 32 nt, Human
gcuuggccagucuuugccuuucauccuguaaa

SEQ ID NO: 182730 - RNA, 32 nt, Human
gcuuggccaguguggagaggaaaggagccaca

SEQ ID NO: 182731 - RNA, 32 nt, Human
gcuuggcccaggaguucauaaccagccuggau

SEQ ID NO: 182732 - RNA, 18 nt, Human
gcuuggccccagccucca

SEQ ID NO: 182733 - RNA, 32 nt, Human
gcuuggcccccgcgcuccccucccucuccacu

SEQ ID NO: 182734 - RNA, 32 nt, Human
gcuuggccccuccagccagucccauucgggaa

SEQ ID NO: 182735 - RNA, 32 nt, Human
gcuuggcccugccaccuuccuccaggggaggg

SEQ ID NO: 182736 - RNA, 32 nt, Human
gcuuggcccuggcccuggcccagaucuuagau

SEQ ID NO: 182737 - RNA, 16 nt, Human
gcuuggccuagagugg

SEQ ID NO: 182738 - RNA, 32 nt, Human
gcuuggccuagauccagccaccacucugaaac

SEQ ID NO: 182739 - RNA, 32 nt, Human
gcuuggccuccaacaucccuugccugcugcca

SEQ ID NO: 182740 - RNA, 32 nt, Human
gcuuggccuccaccaccucccacgcuucugag

SEQ ID NO: 182741 - RNA, 32 nt, Human
gcuuggccucucucuguuccucccucugcacc

SEQ ID NO: 182742 - RNA, 32 nt, Human
gcuuggccucuggcuccaucugaguccccugg

SEQ ID NO: 182743 - RNA, 32 nt, Human
gcuuggcgaaacugaggucucauggagaagcc

SEQ ID NO: 182744 - RNA, 32 nt, Human
gcuuggcgaaugcacgucugccugagaacccc

SEQ ID NO: 182745 - RNA, 32 nt, Human
gcuuggcggcuguggaggcgagugggccacgu

SEQ ID NO: 182746 - RNA, 18 nt, Human
gcuuggcguccacccugc

SEQ ID NO: 182747 - RNA, 32 nt, Human
gcuuggcguccagcaaugaaggcuggagaaug

SEQ ID NO: 182748 - RNA, 32 nt, Human
gcuuggcuacaguguaauuccucuccuuguuc

SEQ ID NO: 182749 - RNA, 32 nt, Human
gcuuggcucacaaggcccaggagaccuccagc

SEQ ID NO: 182750 - RNA, 32 nt, Human
gcuuggcucaccgcaaccuccgccucccgggu

SEQ ID NO: 182751 - RNA, 32 nt, Human
gcuuggcucacugccaccccucuuugguccag

SEQ ID NO: 182752 - RNA, 32 nt, Human
gcuuggcucacugcuaccuccgccucccaggu

SEQ ID NO: 182753 - RNA, 32 nt, Human
gcuuggcucaggauguguucugggcuugcaag

SEQ ID NO: 182754 - RNA, 32 nt, Human
gcuuggcuccacccauuuccuugaccuggaau

SEQ ID NO: 182755 - RNA, 32 nt, Human
gcuuggcucccaggagcuccaggacagcccuc

SEQ ID NO: 182756 - RNA, 32 nt, Human
gcuuggcucccucugcugaucucaguuuccug

SEQ ID NO: 182757 - RNA, 32 nt, Human
gcuuggcugagaggagggggagaaggagggga

SEQ ID NO: 182758 - RNA, 32 nt, Human
gcuuggcugccuggccagggccgggggcucag

SEQ ID NO: 182759 - RNA, 31 nt, Human
gcuuggcugcgcuucugacagggcaggccgu

SEQ ID NO: 182760 - RNA, 31 nt, Human
gcuuggcugcuucuggggccuguguggcccu

SEQ ID NO: 182761 - RNA, 32 nt, Human
gcuuggcugucccuguagcccagccugcaccu

SEQ ID NO: 182762 - RNA, 32 nt, Human
gcuuggcuguucugcugcaccugaaugcuuuc

SEQ ID NO: 182763 - RNA, 32 nt, Human
gcuuggcuguuuagugguuuggagcauaguga

SEQ ID NO: 182764 - RNA, 32 nt, Human
gcuuggcuguuuccuguuuucucccgauugcu

SEQ ID NO: 182765 - RNA, 32 nt, Human
gcuuggcuuggguggcggguucauggccaguu

SEQ ID NO: 182766 - RNA, 32 nt, Human
gcuugggaaaacugcauugacuccaggacucc

SEQ ID NO: 182767 - RNA, 20 nt, Human
gcuugggaaauaaggcucug

SEQ ID NO: 182768 - RNA, 32 nt, Human
gcuugggaaaucaagguugcagugagcuauga

SEQ ID NO: 182769 - RNA, 21 nt, Human
gcuugggaaauuauggauucu

SEQ ID NO: 182770 - RNA, 19 nt, Human
gcuugggaaugugauuuug

SEQ ID NO: 182771 - RNA, 32 nt, Human
gcuugggacuacaggcgugugccaccaguccu

SEQ ID NO: 182772 - RNA, 31 nt, Human
gcuugggacucaaggccacucacuuaauacc

SEQ ID NO: 182773 - RNA, 32 nt, Human
gcuugggacuccugucuuuccagcaugcccug

SEQ ID NO: 182774 - RNA, 32 nt, Human
gcuugggacuggggcugcgagugagcaccagc

SEQ ID NO: 182775 - RNA, 31 nt, Human
gcuugggagagaccuguggcaccagguugga

SEQ ID NO: 182776 - RNA, 32 nt, Human
gcuugggagaucgaggcuacagugagcuauga

SEQ ID NO: 182777 - RNA, 20 nt, Human
gcuugggagccagccugcca

SEQ ID NO: 182778 - RNA, 32 nt, Human
gcuugggagccccuggccccagccuccaugcu

SEQ ID NO: 182779 - RNA, 30 nt, Human
gcuugggaggaccauggggcacaaugcggu

SEQ ID NO: 182780 - RNA, 32 nt, Human
gcuugggaggcugaagugggaggaucccuuga

SEQ ID NO: 182781 - RNA, 32 nt, Human
gcuugggaggcugaggcacgagaaucacuuga

SEQ ID NO: 182782 - RNA, 32 nt, Human
gcuugggaggcugaggcagagaauugcuugaa

SEQ ID NO: 182783 - RNA, 32 nt, Human
gcuugggaggcugaggcaggagaaucacuuga

SEQ ID NO: 182784 - RNA, 32 nt, Human
gcuugggaggcugaggcaggagaaucgcuuga

SEQ ID NO: 182785 - RNA, 32 nt, Human
gcuugggaggcugaggcaguagaaucacuuga

SEQ ID NO: 182786 - RNA, 32 nt, Human
gcuugggaggcugagggcaggagaauugcuug

SEQ ID NO: 182787 - RNA, 32 nt, Human
gcuugggaggcugagguaggaggaucacuugg

SEQ ID NO: 182788 - RNA, 32 nt, Human
gcuugggaggcugaggugaggaucacuugagc

SEQ ID NO: 182789 - RNA, 32 nt, Human
gcuugggaggcugaggugggaggaucacuuga

SEQ ID NO: 182790 - RNA, 32 nt, Human
gcuugggaggcugagguugcaggaucgcuuga

SEQ ID NO: 182791 - RNA, 32 nt, Human
gcuugggaggucgaggcugcagugagucauga

SEQ ID NO: 182792 - RNA, 32 nt, Human
gcuugggaucuucaaugaacugugcuuuucgc

SEQ ID NO: 182793 - RNA, 18 nt, Human
gcuugggcaacaaaguga

SEQ ID NO: 182794 - RNA, 18 nt, Human
gcuugggcaacacaguga

SEQ ID NO: 182795 - RNA, 18 nt, Human
gcuugggcaacagaguga

SEQ ID NO: 182796 - RNA, 18 nt, Human
gcuugggcaacagggcga

SEQ ID NO: 182797 - RNA, 18 nt, Human
gcuugggcaacauaguga

SEQ ID NO: 182798 - RNA, 32 nt, Human
gcuugggcacugcugucuacugaccccaaccc

SEQ ID NO: 182799 - RNA, 32 nt, Human
gcuugggcauugccaccagcuguggacugaac

SEQ ID NO: 182800 - RNA, 20 nt, Human
gcuugggccagcggcggcgg

SEQ ID NO: 182801 - RNA, 32 nt, Human
gcuugggccaggaguuugagaccagccuggcc

SEQ ID NO: 182802 - RNA, 32 nt, Human
gcuugggccaucugcacuuuucccaaggcccu

SEQ ID NO: 182803 - RNA, 32 nt, Human
gcuugggcccagcugggcucugccacccuacc

SEQ ID NO: 182804 - RNA, 32 nt, Human
gcuugggcccaggagauggagguugcggugag

SEQ ID NO: 182805 - RNA, 32 nt, Human
gcuugggcccaggagauggaugcugcgggaag

SEQ ID NO: 182806 - RNA, 32 nt, Human
gcuugggcccaggaggucgaggcugcggugag

SEQ ID NO: 182807 - RNA, 32 nt, Human
gcuugggcccaggagguggagguugcagugag

SEQ ID NO: 182808 - RNA, 32 nt, Human
gcuugggcccaggaguucaacgcugcagugag

SEQ ID NO: 182809 - RNA, 32 nt, Human
gcuugggcccaggaguucaaggccagccuggg

SEQ ID NO: 182810 - RNA, 32 nt, Human
gcuugggcccaggaguucaaggcugcagugag

SEQ ID NO: 182811 - RNA, 32 nt, Human
gcuugggcccucagaccggggacagcaggagg

SEQ ID NO: 182812 - RNA, 32 nt, Human
gcuugggcccuggaggucaaggcugcagugag

SEQ ID NO: 182813 - RNA, 32 nt, Human
gcuugggccgugacuuaggcagaggagugcag

SEQ ID NO: 182814 - RNA, 32 nt, Human
gcuugggccugggaggucgaggcugcagugag

SEQ ID NO: 182815 - RNA, 18 nt, Human
gcuugggcgacagagcga

SEQ ID NO: 182816 - RNA, 18 nt, Human
gcuugggcgacggaguga

SEQ ID NO: 182817 - RNA, 32 nt, Human
gcuugggcucaagcuaucugucugccuugggu

SEQ ID NO: 182818 - RNA, 32 nt, Human
gcuugggcucaggaaguuucucugugcaacua

SEQ ID NO: 182819 - RNA, 32 nt, Human
gcuugggcuccaggagggaggcugggaggcag

SEQ ID NO: 182820 - RNA, 32 nt, Human
gcuugggcuggaggggugucagaggaagcuga

SEQ ID NO: 182821 - RNA, 32 nt, Human
gcuugggcuggcgggcccuggagcucaagccg

SEQ ID NO: 182822 - RNA, 32 nt, Human
gcuugggcugugcagggcucuuugaggugggu

SEQ ID NO: 182823 - RNA, 32 nt, Human
gcuuggggaacgaggagcaggacgcggccucg

SEQ ID NO: 182824 - RNA, 30 nt, Human
gcuuggggaagccaauggggcacaauccuu

SEQ ID NO: 182825 - RNA, 32 nt, Human
gcuuggggacuuccuucgucagcacuggcuuu

SEQ ID NO: 182826 - RNA, 32 nt, Human
gcuuggggaugugcuuggagaggcagauaacg

SEQ ID NO: 182827 - RNA, 32 nt, Human
gcuuggggcagagacagcauggggaaggaggu

SEQ ID NO: 182828 - RNA, 24 nt, Human
gcuuggggcccccgucugcugcug

SEQ ID NO: 182829 - RNA, 24 nt, Human
gcuuggggccccugucugcugcug

SEQ ID NO: 182830 - RNA, 32 nt, Human
gcuuggggcgcuggcaccuccucuuacagcuu

SEQ ID NO: 182831 - RNA, 23 nt, Human
gcuuggggcucacgccuguaauc

SEQ ID NO: 182832 - RNA, 32 nt, Human
gcuuggggcucacgccuguaaucccagcacuu

SEQ ID NO: 182833 - RNA, 32 nt, Human
gcuuggggcugaugaaaggagcuguccgcgcc

SEQ ID NO: 182834 - RNA, 32 nt, Human
gcuugggggaaaagagguggauuccugggcaa

SEQ ID NO: 182835 - RNA, 32 nt, Human
gcuugggggugggaggugaggaaaaucugagg

SEQ ID NO: 182836 - RNA, 31 nt, Human
gcuugggggugugcaggcacagcagauggcc

SEQ ID NO: 182837 - RNA, 19 nt, Human
gcuuggggugcagauccug

SEQ ID NO: 182838 - RNA, 32 nt, Human
gcuugggguggugggaggcggggagcugccac

SEQ ID NO: 182839 - RNA, 32 nt, Human
gcuugggguugcaaugauggcugggccaguca

SEQ ID NO: 182840 - RNA, 32 nt, Human
gcuuggguagcuuggcuuauauucuagagcag

SEQ ID NO: 182841 - RNA, 32 nt, Human
gcuuggguaggcggggaagcagcuggagugcg

SEQ ID NO: 182842 - RNA, 23 nt, Human
gcuugggucacugucaccugagu

SEQ ID NO: 182843 - RNA, 23 nt, Human
gcuugggucauggucaucuucca

SEQ ID NO: 182844 - RNA, 21 nt, Human
gcuuggguccagacugcgcca

SEQ ID NO: 182845 - RNA, 18 nt, Human
gcuugggucccccugcug

SEQ ID NO: 182846 - RNA, 32 nt, Human
gcuugggucccugaacacugucauucacccaa

SEQ ID NO: 182847 - RNA, 32 nt, Human
gcuuggguccugcaguggccugggcaacccuc

SEQ ID NO: 182848 - RNA, 19 nt, Human
gcuugggugacagagccag

SEQ ID NO: 182849 - RNA, 18 nt, Human
gcuugggugacagaguga

SEQ ID NO: 182850 - RNA, 21 nt, Human
gcuugggugacagccagguga

SEQ ID NO: 182851 - RNA, 16 nt, Human
gcuugggugagagugg

SEQ ID NO: 182852 - RNA, 32 nt, Human
gcuugggugcuuaucaggugccaagcccuguu

SEQ ID NO: 182853 - RNA, 32 nt, Human
gcuuggguggcccgucgcucccuggcuucuuc

SEQ ID NO: 182854 - RNA, 32 nt, Human
gcuuggguggccugggacccugugggaggcuu

SEQ ID NO: 182855 - RNA, 32 nt, Human
gcuuggguuggugaucaugucuccucuuguca

SEQ ID NO: 182856 - RNA, 32 nt, Human
gcuuggguuuuuacuuucacuucauuucugag

SEQ ID NO: 182857 - RNA, 32 nt, Human
gcuugguagcuggcaggggcucaauaaaaggu

SEQ ID NO: 182858 - RNA, 32 nt, Human
gcuugguagguggguuucaggagcagucacua

SEQ ID NO: 182859 - RNA, 21 nt, Human
gcuugguauccccuggucuuc

SEQ ID NO: 182860 - RNA, 32 nt, Human
gcuugguauugagucuguggccgacuucgguu

SEQ ID NO: 182861 - RNA, 32 nt, Human
gcuuggucaucuaugacaccacaccagcacag

SEQ ID NO: 182862 - RNA, 32 nt, Human
gcuuggucgguucuggggucuaccucucuggc

SEQ ID NO: 182863 - RNA, 32 nt, Human
gcuuggucuucaagggcuucuaccuccccaaa

SEQ ID NO: 182864 - RNA, 32 nt, Human
gcuuggugaaguuacgaaacuuguccaaaauc

SEQ ID NO: 182865 - RNA, 32 nt, Human
gcuuggugaggaaggggacuccccagcucccc

SEQ ID NO: 182866 - RNA, 26 nt, Human
gcuuggugcagggaaggcgggcgcgg

SEQ ID NO: 182867 - RNA, 32 nt, Human
gcuuggugcauggagaaaaaggaagacccgua

SEQ ID NO: 182868 - RNA, 19 nt, Human
gcuuggugcccacccugcu

SEQ ID NO: 182869 - RNA, 18 nt, Human
gcuugguggagucagugg

SEQ ID NO: 182870 - RNA, 32 nt, Human
gcuugguggcucugggaguaagaucccugaag

SEQ ID NO: 182871 - RNA, 32 nt, Human
gcuuggugggagugaauuugcccacaccuuac

SEQ ID NO: 182872 - RNA, 32 nt, Human
gcuuggugggggaggugggcgcagcaggcacg

SEQ ID NO: 182873 - RNA, 32 nt, Human
gcuugguggucaugccuguaaucccagcauuu

SEQ ID NO: 182874 - RNA, 32 nt, Human
gcuugguggugaagccaccaagcugucuuugg

SEQ ID NO: 182875 - RNA, 32 nt, Human
gcuugguguaguccugcuccucuugggauggg

SEQ ID NO: 182876 - RNA, 24 nt, Human
gcuugguguucuacagugucucca

SEQ ID NO: 182877 - RNA, 32 nt, Human
gcuugguuaccuccaccuuccugcacucauuc

SEQ ID NO: 182878 - RNA, 32 nt, Human
gcuugguuccugaugcccauguuccagaggaa

SEQ ID NO: 182879 - RNA, 32 nt, Human
gcuugguuccuggaaaguaaaggugaaaacau

SEQ ID NO: 182880 - RNA, 32 nt, Human
gcuugguucgugccuccgagaaaggggucucc

SEQ ID NO: 182881 - RNA, 32 nt, Human
gcuugguuuucucacccagugcauguggcagg

SEQ ID NO: 182882 - RNA, 32 nt, Human
gcuugguuuucuugaccugccugccugcucuu

SEQ ID NO: 182883 - RNA, 32 nt, Human
gcuuguaaaguuuucagaauuugaaaugccuc

SEQ ID NO: 182884 - RNA, 21 nt, Human
gcuuguaaucccagcuacuca

SEQ ID NO: 182885 - RNA, 24 nt, Human
gcuuguaaucccagcuacucaaga

SEQ ID NO: 182886 - RNA, 32 nt, Human
gcuuguaauguucuuuacaggaguuuaaaacg

SEQ ID NO: 182887 - RNA, 32 nt, Human
gcuuguacagaaagugaaaauuaguuggcaau

SEQ ID NO: 182888 - RNA, 32 nt, Human
gcuuguacagccugcagaacugugagccaaau

SEQ ID NO: 182889 - RNA, 32 nt, Human
gcuuguacagguugaguaucccuuauccaaaa

SEQ ID NO: 182890 - RNA, 32 nt, Human
gcuuguacccaggaggcggagguuguagugag

SEQ ID NO: 182891 - RNA, 32 nt, Human
gcuuguacccaggagguggagguugcagugag

SEQ ID NO: 182892 - RNA, 32 nt, Human
gcuuguacccguaaucccagcacuuugggagg

SEQ ID NO: 182893 - RNA, 21 nt, Human
gcuuguaccucugauuucacc

SEQ ID NO: 182894 - RNA, 32 nt, Human
gcuuguacguagcuugccacucagugaaaaua

SEQ ID NO: 182895 - RNA, 32 nt, Human
gcuuguagacagggguugguuggcagcauagu

SEQ ID NO: 182896 - RNA, 32 nt, Human
gcuuguagcugaccaacagccugcucucccca

SEQ ID NO: 182897 - RNA, 32 nt, Human
gcuuguaggagagauggccaggguggcagccc

SEQ ID NO: 182898 - RNA, 32 nt, Human
gcuuguaggugugcuggucauggugggcuuca

SEQ ID NO: 182899 - RNA, 23 nt, Human
gcuuguagucccaacuaccuggg

SEQ ID NO: 182900 - RNA, 32 nt, Human
gcuuguagugagugcuguuuuccaggagaugg

SEQ ID NO: 182901 - RNA, 32 nt, Human
gcuuguauauuccgaaacuuucaguuccaauu

SEQ ID NO: 182902 - RNA, 32 nt, Human
gcuuguauuugccuaguucuccagaauguagg

SEQ ID NO: 182903 - RNA, 23 nt, Human
gcuuguauuuggggccuguggga

SEQ ID NO: 182904 - RNA, 32 nt, Human
gcuugucaaguucaccaccaacacagaggggg

SEQ ID NO: 182905 - RNA, 32 nt, Human
gcuugucacccaggcuggagugcaauggcaug

SEQ ID NO: 182906 - RNA, 32 nt, Human
gcuugucauccaagcuggaguacagugccaug

SEQ ID NO: 182907 - RNA, 32 nt, Human
gcuugucaugggagacuggagugcagauucuu

SEQ ID NO: 182908 - RNA, 32 nt, Human
gcuuguccacaugcgcugggcgucugggaccu

SEQ ID NO: 182909 - RNA, 32 nt, Human
gcuuguccagauggcaggaaggagaacggaug

SEQ ID NO: 182910 - RNA, 32 nt, Human
gcuugucccaggcugcugggcuguggucucug

SEQ ID NO: 182911 - RNA, 32 nt, Human
gcuuguccucacaaccaccucaguccucccuc

SEQ ID NO: 182912 - RNA, 20 nt, Human
gcuuguccucccuuccgucu

SEQ ID NO: 182913 - RNA, 32 nt, Human
gcuuguccugcucucacgcuugaaccuagucu

SEQ ID NO: 182914 - RNA, 32 nt, Human
gcuuguccugcucucuucaggaggcccuggug

SEQ ID NO: 182915 - RNA, 32 nt, Human
gcuuguccuggcaguaaggcucuccccuguaa

SEQ ID NO: 182916 - RNA, 18 nt, Human
gcuugucgguggccggua

SEQ ID NO: 182917 - RNA, 32 nt, Human
gcuugucuacuaauacaucugcuucaaaauga

SEQ ID NO: 182918 - RNA, 20 nt, Human
gcuugucuccucuccuguca

SEQ ID NO: 182919 - RNA, 20 nt, Human
gcuugucucuucaccugcua

SEQ ID NO: 182920 - RNA, 19 nt, Human
gcuugucucuugccugcca

SEQ ID NO: 182921 - RNA, 22 nt, Human
gcuugucucuugccugccacug

SEQ ID NO: 182922 - RNA, 32 nt, Human
gcuugucugccugguuuuccuccuacacaugg

SEQ ID NO: 182923 - RNA, 24 nt, Human
gcuugucuggaacuccugggcuca

SEQ ID NO: 182924 - RNA, 32 nt, Human
gcuugucugggcagagacagaagcugauuuaa

SEQ ID NO: 182925 - RNA, 32 nt, Human
gcuugucuguuucucaggcuccugugagccuc

SEQ ID NO: 182926 - RNA, 32 nt, Human
gcuugucuuagcgucagcgagggaagguugag

SEQ ID NO: 182927 - RNA, 32 nt, Human
gcuugucuucaaauacggccaagcagaaaaug

SEQ ID NO: 182928 - RNA, 19 nt, Human
gcuugucuucugguacuuu

SEQ ID NO: 182929 - RNA, 32 nt, Human
gcuugucuugccaauagacuccaggcuuacac

SEQ ID NO: 182930 - RNA, 21 nt, Human
gcuugugaaaaaacagcuucu

SEQ ID NO: 182931 - RNA, 32 nt, Human
gcuugugaaagaauuaucagugagugaaaggc

SEQ ID NO: 182932 - RNA, 32 nt, Human
gcuugugacgcuauaagacagagcaggccaca

SEQ ID NO: 182933 - RNA, 32 nt, Human
gcuugugacuggacuccagccugggcaacaga

SEQ ID NO: 182934 - RNA, 32 nt, Human
gcuugugagacgggcuccagagaaaggaccuc

SEQ ID NO: 182935 - RNA, 19 nt, Human
gcuugugaggcccgaggca

SEQ ID NO: 182936 - RNA, 32 nt, Human
gcuugugagucaggccagagcgagaggacagu

SEQ ID NO: 182937 - RNA, 32 nt, Human
gcuugugauacaguucuggaauucugauagug

SEQ ID NO: 182938 - RNA, 32 nt, Human
gcuugugauguauuucugccuccuggaguuuu

SEQ ID NO: 182939 - RNA, 32 nt, Human
gcuugugcaguagaaccugaaaguaugaugau

SEQ ID NO: 182940 - RNA, 32 nt, Human
gcuugugccacuguacuccagccuggcccaca

SEQ ID NO: 182941 - RNA, 32 nt, Human
gcuugugccaggaggugggguaugcggccacc

SEQ ID NO: 182942 - RNA, 32 nt, Human
gcuugugcccagaaguuugaggcugcagugag

SEQ ID NO: 182943 - RNA, 32 nt, Human
gcuugugcccagggguugcaggcugcagugag

SEQ ID NO: 182944 - RNA, 32 nt, Human
gcuugugccuauggggaguuacuccaacccac

SEQ ID NO: 182945 - RNA, 32 nt, Human
gcuugugccugauucuguggcccaaaacaauc

SEQ ID NO: 182946 - RNA, 32 nt, Human
gcuugugccuguaaucccagaacuuuggaagg

SEQ ID NO: 182947 - RNA, 32 nt, Human
gcuugugccuguagucccagcuacuugggagg

SEQ ID NO: 182948 - RNA, 32 nt, Human
gcuuguggacaacaggucaaucauuuucaaaa

SEQ ID NO: 182949 - RNA, 32 nt, Human
gcuuguggacugccucggacccagccacgcug

SEQ ID NO: 182950 - RNA, 32 nt, Human
gcuuguggccaaugcauccaaauaaggauacc

SEQ ID NO: 182951 - RNA, 23 nt, Human
gcuuguggccacgagccaugccc

SEQ ID NO: 182952 - RNA, 24 nt, Human
gcuuguggcuacagcucagccacu

SEQ ID NO: 182953 - RNA, 32 nt, Human
gcuuguggcuaggccagccuaggauguggguu

SEQ ID NO: 182954 - RNA, 32 nt, Human
gcuugugguuccucccuuggauagccuccaug

SEQ ID NO: 182955 - RNA, 32 nt, Human
gcuuguguagccccagucauuugauaaagaug

SEQ ID NO: 182956 - RNA, 32 nt, Human
gcuugugucuucaggggcagcucagcuuuccu

SEQ ID NO: 182957 - RNA, 32 nt, Human
gcuuguuaaugucagucugugcugaggaccuc

SEQ ID NO: 182958 - RNA, 32 nt, Human
gcuuguucaccucuuccuccagccgugguuag

SEQ ID NO: 182959 - RNA, 32 nt, Human
gcuuguuccccugagccccaccaggaaaucuc

SEQ ID NO: 182960 - RNA, 32 nt, Human
gcuuguucccuguccucuggcccuuugcaaau

SEQ ID NO: 182961 - RNA, 32 nt, Human
gcuuguucccugucuuguccaugugguucuuc

SEQ ID NO: 182962 - RNA, 32 nt, Human
gcuuguuccuauagucccagcacuuugggagg

SEQ ID NO: 182963 - RNA, 32 nt, Human
gcuuguucgacuguuucaaaacaugcuaauuc

SEQ ID NO: 182964 - RNA, 32 nt, Human
gcuuguucuccucugugugccaugugaggaca

SEQ ID NO: 182965 - RNA, 32 nt, Human
gcuuguucucugagggagguuccggagacuca

SEQ ID NO: 182966 - RNA, 32 nt, Human
gcuuguucuuccugccaaaugaucagagaggg

SEQ ID NO: 182967 - RNA, 32 nt, Human
gcuuguugacauuugaagaaguggccauguau

SEQ ID NO: 182968 - RNA, 32 nt, Human
gcuuguugcccaggcuggaaugcaauggcgug

SEQ ID NO: 182969 - RNA, 32 nt, Human
gcuuguugcccaggcuggagugcaauggcgcg

SEQ ID NO: 182970 - RNA, 32 nt, Human
gcuuguugcccaggcuggagugcaguggugca

SEQ ID NO: 182971 - RNA, 32 nt, Human
gcuuguugcgcuccuggcucucccggggcggg

SEQ ID NO: 182972 - RNA, 19 nt, Human
gcuuguuucccugcuggcc

SEQ ID NO: 182973 - RNA, 32 nt, Human
gcuuguuuccuuucucuuuuuguuuggcuucu

SEQ ID NO: 182974 - RNA, 32 nt, Human
gcuuguuugcuuguuuguuugcaccugguuga

SEQ ID NO: 182975 - RNA, 32 nt, Human
gcuuguuugggagauuagagaauaagauaaaa

SEQ ID NO: 182976 - RNA, 32 nt, Human
gcuuguuuuaaucuagccuguuccuccacuau

SEQ ID NO: 182977 - RNA, 32 nt, Human
gcuuguuuuccagucucuuguacagcguuuua

SEQ ID NO: 182978 - RNA, 32 nt, Human
gcuuguuuugacuuaauucuaaaauaggucuc

SEQ ID NO: 182979 - RNA, 32 nt, Human
gcuuguuuugauucuuuucccccuacuuuucc

SEQ ID NO: 182980 - RNA, 32 nt, Human
gcuuuaaaacaaaaccaaacaaaacuuuaaaa

SEQ ID NO: 182981 - RNA, 32 nt, Human
gcuuuaaaagaagccaaagcacuacuagcuuu

SEQ ID NO: 182982 - RNA, 32 nt, Human
gcuuuaaaauggagcuauuuugcuacaauaua

SEQ ID NO: 182983 - RNA, 32 nt, Human
gcuuuaaagaugaucuccucuaaccccuuuau

SEQ ID NO: 182984 - RNA, 32 nt, Human
gcuuuaaaguugugaccuucuuguacaugaau

SEQ ID NO: 182985 - RNA, 32 nt, Human
gcuuuaaauccuguggaaguggcauuggugac

SEQ ID NO: 182986 - RNA, 32 nt, Human
gcuuuaaaugcuguuugcauuucuggaugacu

SEQ ID NO: 182987 - RNA, 32 nt, Human
gcuuuaacacaccuuggcugggucuggauaaa

SEQ ID NO: 182988 - RNA, 32 nt, Human
gcuuuaacccaggaggcagagguugcagugag

SEQ ID NO: 182989 - RNA, 32 nt, Human
gcuuuaagaaucacugaaucacuguggccuca

SEQ ID NO: 182990 - RNA, 32 nt, Human
gcuuuaaggccuugcuuacugccugcaaauuu

SEQ ID NO: 182991 - RNA, 32 nt, Human
gcuuuaaguauuagcuaauuuucuuguuuugg

SEQ ID NO: 182992 - RNA, 32 nt, Human
gcuuuaagugacucagcacccugccucagcuu

SEQ ID NO: 182993 - RNA, 32 nt, Human
gcuuuaaugcacacuucucagagcugugaucc

SEQ ID NO: 182994 - RNA, 32 nt, Human
gcuuuaaugucuaugcugacaguuagguuuug

SEQ ID NO: 182995 - RNA, 32 nt, Human
gcuuuaauugaaugaaaguuccuaguagaucu

SEQ ID NO: 182996 - RNA, 32 nt, Human
gcuuuaauugaaugucugugcuuaugagaggc

SEQ ID NO: 182997 - RNA, 20 nt, Human
gcuuuacaauaaaacaugag

SEQ ID NO: 182998 - RNA, 32 nt, Human
gcuuuacacuucacaggagauugauggcauug

SEQ ID NO: 182999 - RNA, 32 nt, Human
gcuuuacaggagacgcgggcugugaagaugcu

SEQ ID NO: 183000 - RNA, 32 nt, Human
gcuuuacaucuggggaaaggaaaaccaggggu

SEQ ID NO: 183001 - RNA, 32 nt, Human
gcuuuaccagcaucuguuguuucuggacuuuu

SEQ ID NO: 183002 - RNA, 32 nt, Human
gcuuuacccagccuguuugcuuuacugcauga

SEQ ID NO: 183003 - RNA, 32 nt, Human
gcuuuaccucauucacuucucuuaaucgaaaa

SEQ ID NO: 183004 - RNA, 32 nt, Human
gcuuuaccuguauuuucauuccaguacuuuuu

SEQ ID NO: 183005 - RNA, 22 nt, Human
gcuuuacgaaacugcacuccug

SEQ ID NO: 183006 - RNA, 32 nt, Human
gcuuuacgaaacugcacuccugucuucuggcu

SEQ ID NO: 183007 - RNA, 32 nt, Human
gcuuuacgcaucagcugccuuagacagcuucu

SEQ ID NO: 183008 - RNA, 19 nt, Human
gcuuuacucuuucaugcca

SEQ ID NO: 183009 - RNA, 32 nt, Human
gcuuuacugagaugguacaaugucaagggcuu

SEQ ID NO: 183010 - RNA, 32 nt, Human
gcuuuacugagccauuugcaucucuaagaaau

SEQ ID NO: 183011 - RNA, 32 nt, Human
gcuuuacuucuuuccuguuuugccuggaccac

SEQ ID NO: 183012 - RNA, 32 nt, Human
gcuuuagaaaugcagguucuagggcuucuccc

SEQ ID NO: 183013 - RNA, 32 nt, Human
gcuuuagagcaguggucuucaaacuuugaaag

SEQ ID NO: 183014 - RNA, 32 nt, Human
gcuuuagagcuguguguugagcuaaaaauaua

SEQ ID NO: 183015 - RNA, 32 nt, Human
gcuuuagccaaaagcugaaugaccaccguuuc

SEQ ID NO: 183016 - RNA, 32 nt, Human
gcuuuagcccaggaguucaagaucagcuugug

SEQ ID NO: 183017 - RNA, 32 nt, Human
gcuuuagcccaggaguuugaggcugcggugag

SEQ ID NO: 183018 - RNA, 32 nt, Human
gcuuuagccugagacuugccauaagaaacugc

SEQ ID NO: 183019 - RNA, 32 nt, Human
gcuuuagcucaggaguuggagacaagccuggg

SEQ ID NO: 183020 - RNA, 32 nt, Human
gcuuuaggaacagcucaagaaccuuggaguuc

SEQ ID NO: 183021 - RNA, 32 nt, Human
gcuuuaggcccaggcaucggaguagaccaugg

SEQ ID NO: 183022 - RNA, 32 nt, Human
gcuuuaggugagcucugaaagccccacuguua

SEQ ID NO: 183023 - RNA, 32 nt, Human
gcuuuaguacuugcacccucacacacacucuc

SEQ ID NO: 183024 - RNA, 32 nt, Human
gcuuuagucuuucuguucccauuuuuauaaau

SEQ ID NO: 183025 - RNA, 21 nt, Human
gcuuuaguguggcacuccuga

SEQ ID NO: 183026 - RNA, 32 nt, Human
gcuuuauaaaugugccuggugcaugagaaacu

SEQ ID NO: 183027 - RNA, 32 nt, Human
gcuuuauaaggagagacaccagagagaugauc

SEQ ID NO: 183028 - RNA, 32 nt, Human
gcuuuauaaucagcugagacccucacaucugu

SEQ ID NO: 183029 - RNA, 32 nt, Human
gcuuuauagugguuuaccuucauuuagcuuug

SEQ ID NO: 183030 - RNA, 32 nt, Human
gcuuuauauacuaaaugcauuguagcucugag

SEQ ID NO: 183031 - RNA, 21 nt, Human
gcuuuauauccucugggccug

SEQ ID NO: 183032 - RNA, 32 nt, Human
gcuuuaucagcccagaaccuaaagaagagagu

SEQ ID NO: 183033 - RNA, 32 nt, Human
gcuuuaucgcccaggcuggaguacagugaugc

SEQ ID NO: 183034 - RNA, 32 nt, Human
gcuuuaucugcuguuguugaugcauccgucca

SEQ ID NO: 183035 - RNA, 32 nt, Human
gcuuuaucuguguucucccuugcuacauuccu

SEQ ID NO: 183036 - RNA, 32 nt, Human
gcuuuaugaaaauuauaucucaguccucagaa

SEQ ID NO: 183037 - RNA, 22 nt, Human
gcuuuaugaccuuggccaugug

SEQ ID NO: 183038 - RNA, 32 nt, Human
gcuuuauuacuuucauuuucugacccugcugu

SEQ ID NO: 183039 - RNA, 32 nt, Human
gcuuuauucaccugacuguuuccagagaccca

SEQ ID NO: 183040 - RNA, 32 nt, Human
gcuuuauucaggacacacuucuugccuucacu

SEQ ID NO: 183041 - RNA, 32 nt, Human
gcuuuauucuacucccuagucaugcggaacaa

SEQ ID NO: 183042 - RNA, 32 nt, Human
gcuuuauucucaaaugcuggguugaaaaaugu

SEQ ID NO: 183043 - RNA, 32 nt, Human
gcuuuauugcaaaugugaaaacuuuuuaugug

SEQ ID NO: 183044 - RNA, 32 nt, Human
gcuuuauuuuggggaaucaggggugaggaggg

SEQ ID NO: 183045 - RNA, 32 nt, Human
gcuuucaaaaggacuuuucucuccuagcugac

SEQ ID NO: 183046 - RNA, 32 nt, Human
gcuuucaaacaugaucccagcuacacggacug

SEQ ID NO: 183047 - RNA, 32 nt, Human
gcuuucaaccaggcucacccaggcuggggucu

SEQ ID NO: 183048 - RNA, 32 nt, Human
gcuuucaacgaccacuuuggacugccugucau

SEQ ID NO: 183049 - RNA, 32 nt, Human
gcuuucaagcuacagcuguaacaucaacuuuu

SEQ ID NO: 183050 - RNA, 32 nt, Human
gcuuucacaaauuuguaccacaugguaauucu

SEQ ID NO: 183051 - RNA, 20 nt, Human
gcuuucacaacauuugcaga

SEQ ID NO: 183052 - RNA, 32 nt, Human
gcuuucacaacugcagagccuccuggggccac

SEQ ID NO: 183053 - RNA, 32 nt, Human
gcuuucacagaauuauuccagaguuuauaugc

SEQ ID NO: 183054 - RNA, 32 nt, Human
gcuuucacagucagaagugggucugugggauc

SEQ ID NO: 183055 - RNA, 32 nt, Human
gcuuucacaucaagccuuccucggugacuugc

SEQ ID NO: 183056 - RNA, 32 nt, Human
gcuuucaccagcugcagggucugcuuuuacuu

SEQ ID NO: 183057 - RNA, 32 nt, Human
gcuuucaccauguuggccaggcuggucucaaa

SEQ ID NO: 183058 - RNA, 32 nt, Human
gcuuucacuaaggggagacuucaggggaggau

SEQ ID NO: 183059 - RNA, 32 nt, Human
gcuuucacuacguuagccaggcuggucucaaa

SEQ ID NO: 183060 - RNA, 32 nt, Human
gcuuucacugucagcaguuuuaaaggugaaau

SEQ ID NO: 183061 - RNA, 32 nt, Human
gcuuucagcugauucugucuuuucaggccagg

SEQ ID NO: 183062 - RNA, 32 nt, Human
gcuuucagugaagauggcagggccagaacugu

SEQ ID NO: 183063 - RNA, 32 nt, Human
gcuuucagugauaucuuucucauuaccaguga

SEQ ID NO: 183064 - RNA, 32 nt, Human
gcuuucagugcugcuguuuggcccagcucauu

SEQ ID NO: 183065 - RNA, 32 nt, Human
gcuuucaguggaagaugauauuagagaccaaa

SEQ ID NO: 183066 - RNA, 31 nt, Human
gcuuucaguuagggagaaaaauuagauugua

SEQ ID NO: 183067 - RNA, 32 nt, Human
gcuuucauaaagucuguugccauuccaucucu

SEQ ID NO: 183068 - RNA, 24 nt, Human
gcuuucauagcaguguguagagug

SEQ ID NO: 183069 - RNA, 32 nt, Human
gcuuucauaggccacacacaggugugcugcgc

SEQ ID NO: 183070 - RNA, 32 nt, Human
gcuuucaugcagaguguuuugccuucauguua

SEQ ID NO: 183071 - RNA, 22 nt, Human
gcuuucauuccugacacugccc

SEQ ID NO: 183072 - RNA, 32 nt, Human
gcuuuccacagcugccccgggccugcagaaca

SEQ ID NO: 183073 - RNA, 32 nt, Human
gcuuuccacccacagggagaagcacaaucagg

SEQ ID NO: 183074 - RNA, 32 nt, Human
gcuuuccagaacuugggguggcaacggguccu

SEQ ID NO: 183075 - RNA, 32 nt, Human
gcuuuccagacuccuggcucuggcucccugga

SEQ ID NO: 183076 - RNA, 32 nt, Human
gcuuuccagaugaucugccucggaugcgauuc

SEQ ID NO: 183077 - RNA, 32 nt, Human
gcuuuccagcagcugcgucagacaacgaccca

SEQ ID NO: 183078 - RNA, 32 nt, Human
gcuuuccaggcugguuucugguccccauccgc

SEQ ID NO: 183079 - RNA, 32 nt, Human
gcuuuccaggggccuuccugugcccagcuucu

SEQ ID NO: 183080 - RNA, 32 nt, Human
gcuuuccaggguaucuaugugugugcaugugu

SEQ ID NO: 183081 - RNA, 32 nt, Human
gcuuuccaggugaacauuggaaaugagaaucu

SEQ ID NO: 183082 - RNA, 22 nt, Human
gcuuuccagucucagcaugguu

SEQ ID NO: 183083 - RNA, 23 nt, Human
gcuuuccauaauucccaucacuu

SEQ ID NO: 183084 - RNA, 23 nt, Human
gcuuuccauccacucaccuuacc

SEQ ID NO: 183085 - RNA, 32 nt, Human
gcuuuccauccaucuucugugaucacaaggca

SEQ ID NO: 183086 - RNA, 32 nt, Human
gcuuuccaugaguuuugcuguaacuacuaugg

SEQ ID NO: 183087 - RNA, 31 nt, Human
gcuuucccacuuuucggggcugcuagauugc

SEQ ID NO: 183088 - RNA, 32 nt, Human
gcuuucccaggccuggugauucugcucuccag

SEQ ID NO: 183089 - RNA, 32 nt, Human
gcuuucccauccuugggcuuggcuccagcagu

SEQ ID NO: 183090 - RNA, 32 nt, Human
gcuuucccauggugcugcuccaaccaucagau

SEQ ID NO: 183091 - RNA, 32 nt, Human
gcuuucccauuuuacugaugagaaaaucaagg

SEQ ID NO: 183092 - RNA, 32 nt, Human
gcuuuccccagaggcuuccucauggcucacag

SEQ ID NO: 183093 - RNA, 32 nt, Human
gcuuuccccagcuccaaccucucuggucuuca

SEQ ID NO: 183094 - RNA, 32 nt, Human
gcuuucccccuuccgcccucucccacccucuc

SEQ ID NO: 183095 - RNA, 32 nt, Human
gcuuuccccgaagacccuccuggaccagcccc

SEQ ID NO: 183096 - RNA, 32 nt, Human
gcuuuccccgccagagugagguugggaagcag

SEQ ID NO: 183097 - RNA, 32 nt, Human
gcuuuccccggcgcuggcugggcucagcggcc

SEQ ID NO: 183098 - RNA, 32 nt, Human
gcuuuccccgucccccuuccucucucucacca

SEQ ID NO: 183099 - RNA, 32 nt, Human
gcuuuccccugccugccugucucuaguuucuc

SEQ ID NO: 183100 - RNA, 32 nt, Human
gcuuuccccuggcugcuucugccuccuaauag

SEQ ID NO: 183101 - RNA, 32 nt, Human
gcuuuccccuuccuccucccucucucccuuuc

SEQ ID NO: 183102 - RNA, 32 nt, Human
gcuuucccgaguagcugggacuacagagaugg

SEQ ID NO: 183103 - RNA, 22 nt, Human
gcuuucccuacuccugccccaa

SEQ ID NO: 183104 - RNA, 32 nt, Human
gcuuucccuccaucugccccaggacaagagca

SEQ ID NO: 183105 - RNA, 32 nt, Human
gcuuucccuccccugucaggucucuccugucc

SEQ ID NO: 183106 - RNA, 19 nt, Human
gcuuucccuccugggcuca

SEQ ID NO: 183107 - RNA, 32 nt, Human
gcuuucccucucgcgucucuggcugcagguga

SEQ ID NO: 183108 - RNA, 32 nt, Human
gcuuucccuucccuccucucuggcccucccuc

SEQ ID NO: 183109 - RNA, 32 nt, Human
gcuuuccgacauuuugccucucucacugguca

SEQ ID NO: 183110 - RNA, 32 nt, Human
gcuuuccggagaggcuuccugaugcucuaccc

SEQ ID NO: 183111 - RNA, 20 nt, Human
gcuuuccggagcucagcagg

SEQ ID NO: 183112 - RNA, 32 nt, Human
gcuuuccggcgcacuccagggggcguggcucg

SEQ ID NO: 183113 - RNA, 32 nt, Human
gcuuuccgggacuguggagggagcacaggcgg

SEQ ID NO: 183114 - RNA, 32 nt, Human
gcuuuccuaagauaggaacccagaagaggacu

SEQ ID NO: 183115 - RNA, 28 nt, Human
gcuuuccuacaugcugccucuccucagg

SEQ ID NO: 183116 - RNA, 32 nt, Human
gcuuuccucaaaucagaccauaugagaggaua

SEQ ID NO: 183117 - RNA, 32 nt, Human
gcuuuccuccacugccaucauuaaaccucagc

SEQ ID NO: 183118 - RNA, 32 nt, Human
gcuuuccucccccagcaugcauccaaaaauca

SEQ ID NO: 183119 - RNA, 20 nt, Human
gcuuuccuccgcccggggug

SEQ ID NO: 183120 - RNA, 32 nt, Human
gcuuuccucgcccucacugccuugcuccacaa

SEQ ID NO: 183121 - RNA, 21 nt, Human
gcuuuccucggccugagccag

SEQ ID NO: 183122 - RNA, 32 nt, Human
gcuuuccucugccgcaugguccugggccguug

SEQ ID NO: 183123 - RNA, 32 nt, Human
gcuuuccugacacuccagugucuggggugguu

SEQ ID NO: 183124 - RNA, 18 nt, Human
gcuuuccugagacuugag

SEQ ID NO: 183125 - RNA, 32 nt, Human
gcuuuccugaugcucuggacaaauuccuuucu

SEQ ID NO: 183126 - RNA, 32 nt, Human
gcuuuccugcagccauuuagugccgccccaug

SEQ ID NO: 183127 - RNA, 23 nt, Human
gcuuuccugcccccucuuccucu

SEQ ID NO: 183128 - RNA, 32 nt, Human
gcuuuccugccuccuucucuuugauuuauuua

SEQ ID NO: 183129 - RNA, 18 nt, Human
gcuuuccuggaacuugag

SEQ ID NO: 183130 - RNA, 18 nt, Human
gcuuuccugggccucuca

SEQ ID NO: 183131 - RNA, 32 nt, Human
gcuuuccugggccucucaguugaacaaagcag

SEQ ID NO: 183132 - RNA, 32 nt, Human
gcuuuccuggggagggagggagggaugaggca

SEQ ID NO: 183133 - RNA, 21 nt, Human
gcuuuccuguauuucuuccca

SEQ ID NO: 183134 - RNA, 32 nt, Human
gcuuuccuguccauucccagcauccagcuccu

SEQ ID NO: 183135 - RNA, 32 nt, Human
gcuuuccuuuauucuugaaucucccauggaag

SEQ ID NO: 183136 - RNA, 32 nt, Human
gcuuuccuuuuuaaaagauauuuuacugaaga

SEQ ID NO: 183137 - RNA, 32 nt, Human
gcuuuccuuuuugccucuuugccauuuccuug

SEQ ID NO: 183138 - RNA, 19 nt, Human
gcuuucgccuguaauccca

SEQ ID NO: 183139 - RNA, 32 nt, Human
gcuuucgccuguaaucccaacacuuugggagg

SEQ ID NO: 183140 - RNA, 32 nt, Human
gcuuucgcuggcgggaggcagcaacgaggcgg

SEQ ID NO: 183141 - RNA, 32 nt, Human
gcuuucggagcagcggugugaggaccagcaga

SEQ ID NO: 183142 - RNA, 20 nt, Human
gcuuucggagggacccgggc

SEQ ID NO: 183143 - RNA, 32 nt, Human
gcuuucgggaaagggaauaaggagcacgaugc

SEQ ID NO: 183144 - RNA, 32 nt, Human
gcuuucggucccuuucuuuuaaugcccauccu

SEQ ID NO: 183145 - RNA, 32 nt, Human
gcuuucguccauguuucucacauugcuguauu

SEQ ID NO: 183146 - RNA, 32 nt, Human
gcuuucgugcuuguuagugaacaccaacucag

SEQ ID NO: 183147 - RNA, 32 nt, Human
gcuuucguuuguuuuaaaugggagaaacugga

SEQ ID NO: 183148 - RNA, 32 nt, Human
gcuuucuaaggauauggcccaagaggaaggcu

SEQ ID NO: 183149 - RNA, 32 nt, Human
gcuuucuaccaaaagaaaauauagucacagga

SEQ ID NO: 183150 - RNA, 32 nt, Human
gcuuucuagaucucucccagugaggcauggag

SEQ ID NO: 183151 - RNA, 32 nt, Human
gcuuucuaggaaaauuuuacagacacuuaaag

SEQ ID NO: 183152 - RNA, 32 nt, Human
gcuuucuaucaucugccccacauugguccccu

SEQ ID NO: 183153 - RNA, 32 nt, Human
gcuuucuauggcuucuccuuaacuuauugauu

SEQ ID NO: 183154 - RNA, 32 nt, Human
gcuuucuaugugaauauaagcuugugcacaau

SEQ ID NO: 183155 - RNA, 32 nt, Human
gcuuucucaaagagaaugaaacuuuugcacca

SEQ ID NO: 183156 - RNA, 25 nt, Human
gcuuucucaccccaggcucugcagc

SEQ ID NO: 183157 - RNA, 32 nt, Human
gcuuucucacgggcuugauuccugccuacaga

SEQ ID NO: 183158 - RNA, 32 nt, Human
gcuuucucacuggcgugcucucuuucucucuc

SEQ ID NO: 183159 - RNA, 32 nt, Human
gcuuucucagcccugggaggggcgccugaacc

SEQ ID NO: 183160 - RNA, 32 nt, Human
gcuuucucauacauuaccucauugaauuaucc

SEQ ID NO: 183161 - RNA, 32 nt, Human
gcuuucuccagagccugugcaggauuuccuuc

SEQ ID NO: 183162 - RNA, 32 nt, Human
gcuuucuccagccaucggagaccagagccgcc

SEQ ID NO: 183163 - RNA, 32 nt, Human
gcuuucucccugucccuuccuuucuccccuau

SEQ ID NO: 183164 - RNA, 32 nt, Human
gcuuucucuaaccccugcagucacuuccagau

SEQ ID NO: 183165 - RNA, 32 nt, Human
gcuuucucucuggcuucucucuuuuccuccuc

SEQ ID NO: 183166 - RNA, 32 nt, Human
gcuuucucuggcagaauugaggaggaagaggu

SEQ ID NO: 183167 - RNA, 32 nt, Human
gcuuucucuuuuccucuaccuuccucaucccc

SEQ ID NO: 183168 - RNA, 32 nt, Human
gcuuucugaacugccaagaggggaucuggcuu

SEQ ID NO: 183169 - RNA, 32 nt, Human
gcuuucugacauguccagcccaucucuaauga

SEQ ID NO: 183170 - RNA, 32 nt, Human
gcuuucugaggauccaacgugugccagccacu

SEQ ID NO: 183171 - RNA, 32 nt, Human
gcuuucugccagccaauaucucucccucgugu

SEQ ID NO: 183172 - RNA, 32 nt, Human
gcuuucugccagccugggcaacauagugagac

SEQ ID NO: 183173 - RNA, 32 nt, Human
gcuuucugcccaggaggaaugagcuuucaagc

SEQ ID NO: 183174 - RNA, 32 nt, Human
gcuuucugcccccaccaacacccuccaaccag

SEQ ID NO: 183175 - RNA, 32 nt, Human
gcuuucugcuugggcccugcaccuggccagcg

SEQ ID NO: 183176 - RNA, 32 nt, Human
gcuuucuggccuucuuuucccaccuuaggcuu

SEQ ID NO: 183177 - RNA, 29 nt, Human
gcuuucuggcugcugugcugccuccuggg

SEQ ID NO: 183178 - RNA, 32 nt, Human
gcuuucuggguccugggcugcccccagugcuc

SEQ ID NO: 183179 - RNA, 32 nt, Human
gcuuucuguacuucucauagcuuuggagucug

SEQ ID NO: 183180 - RNA, 32 nt, Human
gcuuucugucuuccaacugcagucuccacagu

SEQ ID NO: 183181 - RNA, 32 nt, Human
gcuuucugugccagccuggcucugccccuccc

SEQ ID NO: 183182 - RNA, 32 nt, Human
gcuuucugugccaggaccaucuuuacuuucuc

SEQ ID NO: 183183 - RNA, 32 nt, Human
gcuuucuguggcugaggggcuggugagauuuu

SEQ ID NO: 183184 - RNA, 32 nt, Human
gcuuucuuccaaacuccugggccuccgacacu

SEQ ID NO: 183185 - RNA, 32 nt, Human
gcuuucuucccaggacccacaggcugccaugg

SEQ ID NO: 183186 - RNA, 32 nt, Human
gcuuucuuccccucaacucuggagccccaucc

SEQ ID NO: 183187 - RNA, 32 nt, Human
gcuuucuucccuuuuugaccuuuaguuuucca

SEQ ID NO: 183188 - RNA, 32 nt, Human
gcuuucuuccuugagcucuggucaccaaggag

SEQ ID NO: 183189 - RNA, 32 nt, Human
gcuuucuucuacugcccugagccugaacgcuu

SEQ ID NO: 183190 - RNA, 32 nt, Human
gcuuucuucucccaauucauccucacucaguc

SEQ ID NO: 183191 - RNA, 32 nt, Human
gcuuucuucuucagaucugccacccucuagcu

SEQ ID NO: 183192 - RNA, 32 nt, Human
gcuuucuucuuuccuuuacuccuggcucaagc

SEQ ID NO: 183193 - RNA, 32 nt, Human
gcuuucuucuuucugccccucuuccucccccu

SEQ ID NO: 183194 - RNA, 32 nt, Human
gcuuucuugcuucuggggaaauggcagguggu

SEQ ID NO: 183195 - RNA, 32 nt, Human
gcuuucuuggaagaagaaagaaacaaaaacug

SEQ ID NO: 183196 - RNA, 32 nt, Human
gcuuucuuggagccuuucucuuaaucaguccu

SEQ ID NO: 183197 - RNA, 32 nt, Human
gcuuucuuggcuguauugcuacuccagaccuc

SEQ ID NO: 183198 - RNA, 32 nt, Human
gcuuucuuucccuauguuuauuugaaauuuca

SEQ ID NO: 183199 - RNA, 32 nt, Human
gcuuucuuucuugcuuucuuucuugcuuucuu

SEQ ID NO: 183200 - RNA, 32 nt, Human
gcuuucuuucuuucuuucuuucuuucuuucuu

SEQ ID NO: 183201 - RNA, 32 nt, Human
gcuuucuuuggccucugacccugcugcccauu

SEQ ID NO: 183202 - RNA, 32 nt, Human
gcuuucuuuucucugcugcgguuccauauuca

SEQ ID NO: 183203 - RNA, 32 nt, Human
gcuuugaaagagaaacuggcucacagugagug

SEQ ID NO: 183204 - RNA, 32 nt, Human
gcuuugaaaggcauuuggggucucagcagugg

SEQ ID NO: 183205 - RNA, 32 nt, Human
gcuuugaacuugauguggcauuacauguucuu

SEQ ID NO: 183206 - RNA, 20 nt, Human
gcuuugaagaccuaccuguu

SEQ ID NO: 183207 - RNA, 32 nt, Human
gcuuugaagacgcggcccugccccgacacagg

SEQ ID NO: 183208 - RNA, 32 nt, Human
gcuuugaagagaguagcaguccucccagcaug

SEQ ID NO: 183209 - RNA, 30 nt, Human
gcuuugaagcuuuuugagggcaaacuuuac

SEQ ID NO: 183210 - RNA, 19 nt, Human
gcuuugaaggaucaaguaa

SEQ ID NO: 183211 - RNA, 32 nt, Human
gcuuugaaguugugaccuucuuguacaugaau

SEQ ID NO: 183212 - RNA, 32 nt, Human
gcuuugaaguuugcgucuuuucugccucuuuc

SEQ ID NO: 183213 - RNA, 32 nt, Human
gcuuugacacccaggcuggagugcaguagcac

SEQ ID NO: 183214 - RNA, 22 nt, Human
gcuuugacccccaaccuucucc

SEQ ID NO: 183215 - RNA, 32 nt, Human
gcuuugacuuccugggcucaagcaauccuccc

SEQ ID NO: 183216 - RNA, 32 nt, Human
gcuuugacuuuccuuugcuguggagguuuuug

SEQ ID NO: 183217 - RNA, 32 nt, Human
gcuuugagaagcagauaggcuugaaugagcau

SEQ ID NO: 183218 - RNA, 32 nt, Human
gcuuugagacuccacuuuugagcuuacuccuc

SEQ ID NO: 183219 - RNA, 32 nt, Human
gcuuugagcuaggccguuuccgggaggcggag

SEQ ID NO: 183220 - RNA, 32 nt, Human
gcuuugaggagaauccucucugccauucuucc

SEQ ID NO: 183221 - RNA, 32 nt, Human
gcuuugaggauggaggaaggaggccacaaacc

SEQ ID NO: 183222 - RNA, 31 nt, Human
gcuuugaggguggaaggaugggauggguucc

SEQ ID NO: 183223 - RNA, 32 nt, Human
gcuuugaggugguggaggaugccauugacacc

SEQ ID NO: 183224 - RNA, 32 nt, Human
gcuuugagucaaggggcuucacugccugcagc

SEQ ID NO: 183225 - RNA, 20 nt, Human
gcuuugagucaguggcauca

SEQ ID NO: 183226 - RNA, 20 nt, Human
gcuuugagugacagcaucau

SEQ ID NO: 183227 - RNA, 32 nt, Human
gcuuugauaaccugcuuaauacuccaaagugu

SEQ ID NO: 183228 - RNA, 32 nt, Human
gcuuugaucccuuggucugggggucgaaggaa

SEQ ID NO: 183229 - RNA, 32 nt, Human
gcuuugaucgccacuuucauaucuccugugau

SEQ ID NO: 183230 - RNA, 32 nt, Human
gcuuugaucuucuucaauaugugaauuugggc

SEQ ID NO: 183231 - RNA, 32 nt, Human
gcuuugaugccuagccaugucugccucauccu

SEQ ID NO: 183232 - RNA, 32 nt, Human
gcuuugaugucugggcaucgauuucccucggu

SEQ ID NO: 183233 - RNA, 32 nt, Human
gcuuugauucauaguaacuucuuauggaauug

SEQ ID NO: 183234 - RNA, 32 nt, Human
gcuuugauugcugaagaaguauguuuaagagg

SEQ ID NO: 183235 - RNA, 32 nt, Human
gcuuugauugguugugccuucccuucucuggu

SEQ ID NO: 183236 - RNA, 32 nt, Human
gcuuugauuuucuacauuugacauguauucau

SEQ ID NO: 183237 - RNA, 32 nt, Human
gcuuugcaaggggaaaucaagcugggagaauc

SEQ ID NO: 183238 - RNA, 32 nt, Human
gcuuugcaauaaaucacagccuuuuccauaua

SEQ ID NO: 183239 - RNA, 32 nt, Human
gcuuugcaaugccauaauccaaccaccuuauu

SEQ ID NO: 183240 - RNA, 32 nt, Human
gcuuugcaaugcugggauaauagggaagccac

SEQ ID NO: 183241 - RNA, 32 nt, Human
gcuuugcacagcccucugggcgcacugugugc

SEQ ID NO: 183242 - RNA, 32 nt, Human
gcuuugcacauguccacccaaacuaaagacua

SEQ ID NO: 183243 - RNA, 32 nt, Human
gcuuugcaccaaauccuccaccccuccaauug

SEQ ID NO: 183244 - RNA, 32 nt, Human
gcuuugcaccuccuauccccaggguccgccga

SEQ ID NO: 183245 - RNA, 32 nt, Human
gcuuugcaccuggccuucucagcucugaggca

SEQ ID NO: 183246 - RNA, 32 nt, Human
gcuuugcagaagcaagagguguagucacagug

SEQ ID NO: 183247 - RNA, 23 nt, Human
gcuuugcagagugucuugguuga

SEQ ID NO: 183248 - RNA, 32 nt, Human
gcuuugcagcaaccucugugcccagaacauac

SEQ ID NO: 183249 - RNA, 32 nt, Human
gcuuugcagccacacagcgaggucaguccggg

SEQ ID NO: 183250 - RNA, 27 nt, Human
gcuuugcagccacggaagcaacaagug

SEQ ID NO: 183251 - RNA, 26 nt, Human
gcuuugcagccagagaagcaagaagu

SEQ ID NO: 183252 - RNA, 32 nt, Human
gcuuugcaggacuauuuugagauacagcaaau

SEQ ID NO: 183253 - RNA, 32 nt, Human
gcuuugcaucuucuccaggcccuggacuuccu

SEQ ID NO: 183254 - RNA, 32 nt, Human
gcuuugccacacacaguuacagagugaacacu

SEQ ID NO: 183255 - RNA, 32 nt, Human
gcuuugccacauuguucacauuuguagggcuu

SEQ ID NO: 183256 - RNA, 22 nt, Human
gcuuugcccacuggacuccuga

SEQ ID NO: 183257 - RNA, 32 nt, Human
gcuuugcccaguaguuggaaagugaacucgac

SEQ ID NO: 183258 - RNA, 32 nt, Human
gcuuugcccucacgucaguuguacauggcaug

SEQ ID NO: 183259 - RNA, 32 nt, Human
gcuuugccuccaccagcgcccuggccuccgcu

SEQ ID NO: 183260 - RNA, 32 nt, Human
gcuuugccuccaccaucccuaaccaaccucuc

SEQ ID NO: 183261 - RNA, 32 nt, Human
gcuuugccuccaccauucccaccccacccucc

SEQ ID NO: 183262 - RNA, 32 nt, Human
gcuuugccugccacuucugccuccagaucagg

SEQ ID NO: 183263 - RNA, 32 nt, Human
gcuuugccuuuugcugacacagcuccauaaag

SEQ ID NO: 183264 - RNA, 32 nt, Human
gcuuugcggaggcugcucagauggccugagcc

SEQ ID NO: 183265 - RNA, 32 nt, Human
gcuuugcggggaagggaaguggcggagcccga

SEQ ID NO: 183266 - RNA, 23 nt, Human
gcuuugcgggguccgccugugug

SEQ ID NO: 183267 - RNA, 32 nt, Human
gcuuugcuauucagaccugugcagcccugauu

SEQ ID NO: 183268 - RNA, 32 nt, Human
gcuuugcucagaagccuccugucuccagcucu

SEQ ID NO: 183269 - RNA, 32 nt, Human
gcuuugcucagcacacucuccugggccccaag

SEQ ID NO: 183270 - RNA, 32 nt, Human
gcuuugcucuauuaagauuggaaauguacacu

SEQ ID NO: 183271 - RNA, 32 nt, Human
gcuuugcucugcccucugacucacuguguugg

SEQ ID NO: 183272 - RNA, 32 nt, Human
gcuuugcugagauguuaauuuguagcuuugcc

SEQ ID NO: 183273 - RNA, 19 nt, Human
gcuuugcugcacggucuga

SEQ ID NO: 183274 - RNA, 32 nt, Human
gcuuugcugccuggccuccugccagcaacaag

SEQ ID NO: 183275 - RNA, 32 nt, Human
gcuuugcugcugucagugcuuuccagucucag

SEQ ID NO: 183276 - RNA, 32 nt, Human
gcuuugcugggggaaagcaggagcaacagggc

SEQ ID NO: 183277 - RNA, 32 nt, Human
gcuuugcugugggcaccugcacuggcaucuau

SEQ ID NO: 183278 - RNA, 32 nt, Human
gcuuugcuuaugggugcucgcugggguccggu

SEQ ID NO: 183279 - RNA, 32 nt, Human
gcuuugcuuucuuguggacagcuuguaguuug

SEQ ID NO: 183280 - RNA, 32 nt, Human
gcuuuggaaauguuccugccaggacagugccu

SEQ ID NO: 183281 - RNA, 32 nt, Human
gcuuuggaaggcggaguucaggcugaggagau

SEQ ID NO: 183282 - RNA, 32 nt, Human
gcuuuggacacacgcguggcccagaggggaca

SEQ ID NO: 183283 - RNA, 32 nt, Human
gcuuuggaggcugagguuggaggauugcuuaa

SEQ ID NO: 183284 - RNA, 32 nt, Human
gcuuuggaguggguggccaucaugcauggccu

SEQ ID NO: 183285 - RNA, 32 nt, Human
gcuuuggaguuuaaccuuucugccaauccaga

SEQ ID NO: 183286 - RNA, 32 nt, Human
gcuuuggaucacugucuucuccuuuauaaaug

SEQ ID NO: 183287 - RNA, 32 nt, Human
gcuuuggcaagaucaaaggguugcuaugaccu

SEQ ID NO: 183288 - RNA, 32 nt, Human
gcuuuggcacucagaaugggcccagugggggc

SEQ ID NO: 183289 - RNA, 32 nt, Human
gcuuuggcaguuucuuggcacgcuggcugaag

SEQ ID NO: 183290 - RNA, 32 nt, Human
gcuuuggccacuaucugccacuccuuucucuu

SEQ ID NO: 183291 - RNA, 32 nt, Human
gcuuuggccaugggaggagcaagaacacuacg

SEQ ID NO: 183292 - RNA, 32 nt, Human
gcuuuggcccagccagcuucagaucuggucuu

SEQ ID NO: 183293 - RNA, 32 nt, Human
gcuuuggcccuucuucagcuuacucuuagugg

SEQ ID NO: 183294 - RNA, 23 nt, Human
gcuuuggcguuccaccccugcug

SEQ ID NO: 183295 - RNA, 32 nt, Human
gcuuuggcucaagauggccuucauuuacguuu

SEQ ID NO: 183296 - RNA, 32 nt, Human
gcuuuggcucccaggcuggaguccaguggugu

SEQ ID NO: 183297 - RNA, 32 nt, Human
gcuuuggcugcuaaaccugcugccuucagcug

SEQ ID NO: 183298 - RNA, 32 nt, Human
gcuuuggcuggcacaggggugaaggagagcca

SEQ ID NO: 183299 - RNA, 32 nt, Human
gcuuuggcuggcugggcguguaggacggugag

SEQ ID NO: 183300 - RNA, 32 nt, Human
gcuuuggcuguuaccuuucccugcugaggggc

SEQ ID NO: 183301 - RNA, 32 nt, Human
gcuuuggcuucugucuguuccugucuguuggg

SEQ ID NO: 183302 - RNA, 32 nt, Human
gcuuugggaaaacucuuuaucuuaugaggcug

SEQ ID NO: 183303 - RNA, 19 nt, Human
gcuuugggaagccagagga

SEQ ID NO: 183304 - RNA, 32 nt, Human
gcuuugggaagggcuucagaauucagccugag

SEQ ID NO: 183305 - RNA, 32 nt, Human
gcuuugggagagaguagcaaggagagaagaau

SEQ ID NO: 183306 - RNA, 32 nt, Human
gcuuugggagccaccccacaccuggccaacgc

SEQ ID NO: 183307 - RNA, 32 nt, Human
gcuuugggaggcggaggcaggaggaucgcuca

SEQ ID NO: 183308 - RNA, 31 nt, Human
gcuuugggcccuacugggccuggggaggucu

SEQ ID NO: 183309 - RNA, 23 nt, Human
gcuuugggccggggcagcgggug

SEQ ID NO: 183310 - RNA, 32 nt, Human
gcuuugggccuggaauugaggagaaagugagc

SEQ ID NO: 183311 - RNA, 32 nt, Human
gcuuugggcugagaggaugagggaggucuuuc

SEQ ID NO: 183312 - RNA, 32 nt, Human
gcuuugggcuggggccaugggaagaaaccauu

SEQ ID NO: 183313 - RNA, 32 nt, Human
gcuuugggcuggggcucuuuggacuugaaucc

SEQ ID NO: 183314 - RNA, 32 nt, Human
gcuuugggcuuuccugggcucucccaaaagga

SEQ ID NO: 183315 - RNA, 32 nt, Human
gcuuugggcuuugcaccugcacuuuggugaca

SEQ ID NO: 183316 - RNA, 32 nt, Human
gcuuuggggauggcuggaagugcaaugucuuc

SEQ ID NO: 183317 - RNA, 32 nt, Human
gcuuuggggccaaacucuucugucacuaucag

SEQ ID NO: 183318 - RNA, 32 nt, Human
gcuuugggggugccucacgaagcaucccugua

SEQ ID NO: 183319 - RNA, 32 nt, Human
gcuuuggggguggaggggguggugcuggugcu

SEQ ID NO: 183320 - RNA, 32 nt, Human
gcuuugggugguuccaauugguggagagaagc

SEQ ID NO: 183321 - RNA, 32 nt, Human
gcuuuggguucugggccucugccgcucucugg

SEQ ID NO: 183322 - RNA, 32 nt, Human
gcuuuggguuugcagagauuacacaggaaugu

SEQ ID NO: 183323 - RNA, 32 nt, Human
gcuuugguagcuggugggacugacgccuucuu

SEQ ID NO: 183324 - RNA, 32 nt, Human
gcuuuggucaugccaaagaggcagaguucagg

SEQ ID NO: 183325 - RNA, 24 nt, Human
gcuuuggugagaaaacuaaucuug

SEQ ID NO: 183326 - RNA, 32 nt, Human
gcuuugguguauuuaccuuccuucccuuccug

SEQ ID NO: 183327 - RNA, 32 nt, Human
gcuuugguuuucauuucucuucuucacugccu

SEQ ID NO: 183328 - RNA, 32 nt, Human
gcuuuguacauucaggagcugcagagaggaaa

SEQ ID NO: 183329 - RNA, 32 nt, Human
gcuuuguacugggggcguggggagacaggagg

SEQ ID NO: 183330 - RNA, 32 nt, Human
gcuuuguaggggcaagcaggcaaagaguacua

SEQ ID NO: 183331 - RNA, 32 nt, Human
gcuuuguauuagcagguuugcaugcagcaaaa

SEQ ID NO: 183332 - RNA, 32 nt, Human
gcuuugucaccaggcuggagugcaguggugca

SEQ ID NO: 183333 - RNA, 32 nt, Human
gcuuugucacccacgcuggaaugcaguggcgg

SEQ ID NO: 183334 - RNA, 32 nt, Human
gcuuugucacccaggcuggaguacaguggcgu

SEQ ID NO: 183335 - RNA, 32 nt, Human
gcuuugucacccaggcuggagugcaauggcac

SEQ ID NO: 183336 - RNA, 32 nt, Human
gcuuugucacccaggcuggagugcaguggugu

SEQ ID NO: 183337 - RNA, 32 nt, Human
gcuuugucacccaggcuggagugcagugucgu

SEQ ID NO: 183338 - RNA, 32 nt, Human
gcuuugucacccaggcuggagugcuguggugu

SEQ ID NO: 183339 - RNA, 32 nt, Human
gcuuugucacccaggguggugugcaguggagc

SEQ ID NO: 183340 - RNA, 32 nt, Human
gcuuugucacccaugcuggaguacaauggcac

SEQ ID NO: 183341 - RNA, 32 nt, Human
gcuuugucaccuaagcuggagugcagugcgcg

SEQ ID NO: 183342 - RNA, 32 nt, Human
gcuuugucaccuaggcuggcauguaguggcau

SEQ ID NO: 183343 - RNA, 32 nt, Human
gcuuugucacgcaggcuagagugcaguggcgc

SEQ ID NO: 183344 - RNA, 32 nt, Human
gcuuugucagccaggcuggagugcagugacac

SEQ ID NO: 183345 - RNA, 32 nt, Human
gcuuugucaugcuucuucaguaccauggauuu

SEQ ID NO: 183346 - RNA, 19 nt, Human
gcuuuguccaagaagguca

SEQ ID NO: 183347 - RNA, 17 nt, Human
gcuuuguccacccagaa

SEQ ID NO: 183348 - RNA, 32 nt, Human
gcuuugucccccaggcuggagugcgauggcag

SEQ ID NO: 183349 - RNA, 32 nt, Human
gcuuugucccuugccaucaugcccaacaagag

SEQ ID NO: 183350 - RNA, 32 nt, Human
gcuuuguccugagacauccggaaaggaaaggg

SEQ ID NO: 183351 - RNA, 32 nt, Human
gcuuuguccuucaguaccuggcucccuuuuca

SEQ ID NO: 183352 - RNA, 32 nt, Human
gcuuuguccuucagugccugccuccuuuuuca

SEQ ID NO: 183353 - RNA, 32 nt, Human
gcuuuguccuucagugccuggcuccuuuuuca

SEQ ID NO: 183354 - RNA, 32 nt, Human
gcuuugucgcccaggcuggagcgcagucccgc

SEQ ID NO: 183355 - RNA, 32 nt, Human
gcuuugucgcccaggcuggagugcaaugcacg

SEQ ID NO: 183356 - RNA, 32 nt, Human
gcuuugucgcccaggcuggagugcaguggcac

SEQ ID NO: 183357 - RNA, 32 nt, Human
gcuuugucgcccaggcuggagugcaguggcag

SEQ ID NO: 183358 - RNA, 32 nt, Human
gcuuugucgcccaggcuggagugcaguggcgu

SEQ ID NO: 183359 - RNA, 32 nt, Human
gcuuugucgcccuggcuggagugcaguugcgc

SEQ ID NO: 183360 - RNA, 32 nt, Human
gcuuugucucauuccuuuuuggaacaagcaca

SEQ ID NO: 183361 - RNA, 32 nt, Human
gcuuugucucugcuggcuucuuuuuccaugcg

SEQ ID NO: 183362 - RNA, 32 nt, Human
gcuuugucugcaauggcagcugccugagaacc

SEQ ID NO: 183363 - RNA, 32 nt, Human
gcuuugugaacuuuuaugugugcaaaggauca

SEQ ID NO: 183364 - RNA, 32 nt, Human
gcuuugugaagaaaccaucagcaggcugugag

SEQ ID NO: 183365 - RNA, 32 nt, Human
gcuuugugagaagaaugaaaaauaauguccau

SEQ ID NO: 183366 - RNA, 32 nt, Human
gcuuugugccacccucucccuugccaaagaag

SEQ ID NO: 183367 - RNA, 32 nt, Human
gcuuugugcccagaggccacugaagaugguag

SEQ ID NO: 183368 - RNA, 32 nt, Human
gcuuugugcuaaaagcaugggaaauguaaagg

SEQ ID NO: 183369 - RNA, 32 nt, Human
gcuuugugcucugagcaggagcugccaccgcc

SEQ ID NO: 183370 - RNA, 32 nt, Human
gcuuuguggauuccaaaggccaccaggcccuu

SEQ ID NO: 183371 - RNA, 32 nt, Human
gcuuugugucugcaugugugacacugauucuu

SEQ ID NO: 183372 - RNA, 32 nt, Human
gcuuugugucugcuggcaccaagagggcugag

SEQ ID NO: 183373 - RNA, 32 nt, Human
gcuuuguguggguuggaagagacugaagauau

SEQ ID NO: 183374 - RNA, 32 nt, Human
gcuuuguguguggaguuuuccaugaagugcag

SEQ ID NO: 183375 - RNA, 32 nt, Human
gcuuuguuaucucaagugguggcacagaguuc

SEQ ID NO: 183376 - RNA, 32 nt, Human
gcuuuguucacuuaaaaguuuccucuuccugg

SEQ ID NO: 183377 - RNA, 32 nt, Human
gcuuuguuccaggaguuuggugacaaaguuuu

SEQ ID NO: 183378 - RNA, 32 nt, Human
gcuuuguuccaguaaaacuuuguuuacaaaug

SEQ ID NO: 183379 - RNA, 32 nt, Human
gcuuuguugccaggcuggagugcaguggcgcg

SEQ ID NO: 183380 - RNA, 32 nt, Human
gcuuuguugcccagacuggagggcaguggcgc

SEQ ID NO: 183381 - RNA, 32 nt, Human
gcuuuguugcccagacuggagugcaguggcau

SEQ ID NO: 183382 - RNA, 32 nt, Human
gcuuuguugcccaggcuggagugcaguagcac

SEQ ID NO: 183383 - RNA, 32 nt, Human
gcuuuguugcccaggcuggagugccuuggcgc

SEQ ID NO: 183384 - RNA, 32 nt, Human
gcuuuguugcccaggcuggagugcgguggugc

SEQ ID NO: 183385 - RNA, 32 nt, Human
gcuuuguugcccaggcuggaguggaguggcgu

SEQ ID NO: 183386 - RNA, 32 nt, Human
gcuuuguugcccaggcuggagugugguggggc

SEQ ID NO: 183387 - RNA, 32 nt, Human
gcuuuguugcccaggcuggggugcaguggcac

SEQ ID NO: 183388 - RNA, 32 nt, Human
gcuuuguugccugucuugcugucuagggaugg

SEQ ID NO: 183389 - RNA, 32 nt, Human
gcuuuguuggaucagagcagauuuuucacccu

SEQ ID NO: 183390 - RNA, 32 nt, Human
gcuuuguuuaaaaacaauaaaugaagugaaaa

SEQ ID NO: 183391 - RNA, 32 nt, Human
gcuuuguuucccaggcuggagugcaguggcac

SEQ ID NO: 183392 - RNA, 32 nt, Human
gcuuuuaaaauacauuuggccucugcccuuca

SEQ ID NO: 183393 - RNA, 32 nt, Human
gcuuuuaaaauuauaauaagggaaguuuauuu

SEQ ID NO: 183394 - RNA, 32 nt, Human
gcuuuuaaacgucagguaagaggggaacagcu

SEQ ID NO: 183395 - RNA, 26 nt, Human
gcuuuuaaagcaaaaaaugcuuuaaa

SEQ ID NO: 183396 - RNA, 32 nt, Human
gcuuuuaaccaagucucaacacuuacuauaca

SEQ ID NO: 183397 - RNA, 32 nt, Human
gcuuuuaacgaaaaucacaacuucaggagaca

SEQ ID NO: 183398 - RNA, 32 nt, Human
gcuuuuaacugauucucaacucuuacuacaug

SEQ ID NO: 183399 - RNA, 32 nt, Human
gcuuuuaagagcuuccuuugaccacugucuuu

SEQ ID NO: 183400 - RNA, 32 nt, Human
gcuuuuaaguugagagcggaaucuuuuugaaa

SEQ ID NO: 183401 - RNA, 32 nt, Human
gcuuuuacaagagauuuucuuccucacaugaa

SEQ ID NO: 183402 - RNA, 32 nt, Human
gcuuuuacaauguguuagcagaaaccaguggg

SEQ ID NO: 183403 - RNA, 32 nt, Human
gcuuuuacagggagaauggaagcauguggcgu

SEQ ID NO: 183404 - RNA, 32 nt, Human
gcuuuuaccagcuggccccauuccuucugcug

SEQ ID NO: 183405 - RNA, 20 nt, Human
gcuuuuaccuacccacuccu

SEQ ID NO: 183406 - RNA, 32 nt, Human
gcuuuuacuaugagagguacuacuuuuuauaa

SEQ ID NO: 183407 - RNA, 32 nt, Human
gcuuuuagaacuuggguucaaggaagauggag

SEQ ID NO: 183408 - RNA, 32 nt, Human
gcuuuuagacuuuucaguguuuucuuuuucca

SEQ ID NO: 183409 - RNA, 32 nt, Human
gcuuuuagaugagacaucuuuccaggaguaga

SEQ ID NO: 183410 - RNA, 32 nt, Human
gcuuuuaggacuagccgccaacuuucuguaca

SEQ ID NO: 183411 - RNA, 32 nt, Human
gcuuuuaggagaaacgaagacaacucaggacc

SEQ ID NO: 183412 - RNA, 32 nt, Human
gcuuuuagucuccccuuccuucugccuugggg

SEQ ID NO: 183413 - RNA, 32 nt, Human
gcuuuuaguuggagagauacaggaagccuccu

SEQ ID NO: 183414 - RNA, 32 nt, Human
gcuuuuauccauucuucucuguccugucuucc

SEQ ID NO: 183415 - RNA, 32 nt, Human
gcuuuuaucugugucuuuuggaaaaggagcug

SEQ ID NO: 183416 - RNA, 32 nt, Human
gcuuuuaucuuuacuauuuucucccucuuaau

SEQ ID NO: 183417 - RNA, 32 nt, Human
gcuuuuauucauuucccccauccugguuuaag

SEQ ID NO: 183418 - RNA, 32 nt, Human
gcuuuuauugcccaggcuggaguguaguggcg

SEQ ID NO: 183419 - RNA, 32 nt, Human
gcuuuuauugggaggaaaggaggcagcugcag

SEQ ID NO: 183420 - RNA, 32 nt, Human
gcuuuuauuuucuccucuccagugggguuggc

SEQ ID NO: 183421 - RNA, 32 nt, Human
gcuuuucacccaggaggagaggcguggcugag

SEQ ID NO: 183422 - RNA, 32 nt, Human
gcuuuucacuagcugugaaccagccuuccugu

SEQ ID NO: 183423 - RNA, 32 nt, Human
gcuuuucagaacuugagauguggcagcacugg

SEQ ID NO: 183424 - RNA, 23 nt, Human
gcuuuucaguauccucuuucaca

SEQ ID NO: 183425 - RNA, 32 nt, Human
gcuuuucaugggguucuauaaggaggcaugcc

SEQ ID NO: 183426 - RNA, 32 nt, Human
gcuuuucauucccacccccacccggaaccucc

SEQ ID NO: 183427 - RNA, 32 nt, Human
gcuuuuccaagaaaagcuagagcagagcagcc

SEQ ID NO: 183428 - RNA, 32 nt, Human
gcuuuuccaagaaacaauacaauauuacuggc

SEQ ID NO: 183429 - RNA, 31 nt, Human
gcuuuucccagauagcaccuacccaacccag

SEQ ID NO: 183430 - RNA, 18 nt, Human
gcuuuuccccugcaccac

SEQ ID NO: 183431 - RNA, 32 nt, Human
gcuuuuccuaggagaacgauaagaaauggaaa

SEQ ID NO: 183432 - RNA, 32 nt, Human
gcuuuuccucaggcucuucauugguuuccaag

SEQ ID NO: 183433 - RNA, 32 nt, Human
gcuuuuccuccaggaaggggcuucuggguguc

SEQ ID NO: 183434 - RNA, 32 nt, Human
gcuuuuccuuccaucuccuucucuccacccgc

SEQ ID NO: 183435 - RNA, 32 nt, Human
gcuuuucuacccuacccugccggugagggaca

SEQ ID NO: 183436 - RNA, 32 nt, Human
gcuuuucuagcuguuuuuaccuaguuagcuug

SEQ ID NO: 183437 - RNA, 32 nt, Human
gcuuuucuccacccagcaugucuccugcccau

SEQ ID NO: 183438 - RNA, 32 nt, Human
gcuuuucuccacugccauguguccuggucaag

SEQ ID NO: 183439 - RNA, 32 nt, Human
gcuuuucucccaccccuccuagcacccccaca

SEQ ID NO: 183440 - RNA, 32 nt, Human
gcuuuucucccucauccuccccaauccccaaa

SEQ ID NO: 183441 - RNA, 21 nt, Human
gcuuuucucccugucggccag

SEQ ID NO: 183442 - RNA, 32 nt, Human
gcuuuucucucucacucucucucccccaaccc

SEQ ID NO: 183443 - RNA, 32 nt, Human
gcuuuucucugccuuucuaccgaccaugugac

SEQ ID NO: 183444 - RNA, 32 nt, Human
gcuuuucugcgaguucuucugccuccugcugg

SEQ ID NO: 183445 - RNA, 32 nt, Human
gcuuuucugcugucuuuguuacuucuugugcc

SEQ ID NO: 183446 - RNA, 23 nt, Human
gcuuuucuggauaaaguuugguu

SEQ ID NO: 183447 - RNA, 32 nt, Human
gcuuuucuguuuaaagugugugugcacaugag

SEQ ID NO: 183448 - RNA, 32 nt, Human
gcuuuucuucuuggaaauuccucguggaccuc

SEQ ID NO: 183449 - RNA, 32 nt, Human
gcuuuucuugacucacagcccagguucuucug

SEQ ID NO: 183450 - RNA, 32 nt, Human
gcuuuucuugacuugccaaaucagugaauggu

SEQ ID NO: 183451 - RNA, 32 nt, Human
gcuuuucuuuauguuuuuaaagggccucugcu

SEQ ID NO: 183452 - RNA, 32 nt, Human
gcuuuucuuuucccuuccacaggcugguugca

SEQ ID NO: 183453 - RNA, 32 nt, Human
gcuuuugaaagaagagaaauauggcucuguuc

SEQ ID NO: 183454 - RNA, 32 nt, Human
gcuuuugaacccaggaggcagagguugcagcg

SEQ ID NO: 183455 - RNA, 32 nt, Human
gcuuuugaauccuuaauuagcacaguagaaau

SEQ ID NO: 183456 - RNA, 32 nt, Human
gcuuuugaccucaagucuuuugucuucugagu

SEQ ID NO: 183457 - RNA, 32 nt, Human
gcuuuugagaaaacaaugauguaaauuccuua

SEQ ID NO: 183458 - RNA, 32 nt, Human
gcuuuugaggagacagacucccagugguacua

SEQ ID NO: 183459 - RNA, 32 nt, Human
gcuuuugagucugacaaaaucagaguuaggau

SEQ ID NO: 183460 - RNA, 32 nt, Human
gcuuuugcagccaggggucaggagguggcucg

SEQ ID NO: 183461 - RNA, 32 nt, Human
gcuuuugcaggugaggcagggaagaggcauga

SEQ ID NO: 183462 - RNA, 32 nt, Human
gcuuuugcaugcuuaaggauuccaaacgacua

SEQ ID NO: 183463 - RNA, 32 nt, Human
gcuuuugcaugcuuaaggauuccaaaggacua

SEQ ID NO: 183464 - RNA, 32 nt, Human
gcuuuugccucugcccaaccagguugcaguag

SEQ ID NO: 183465 - RNA, 32 nt, Human
gcuuuugccugcacucuugccugcugcccuga

SEQ ID NO: 183466 - RNA, 32 nt, Human
gcuuuugccugggaccacuuccucccugaaac

SEQ ID NO: 183467 - RNA, 32 nt, Human
gcuuuugccugggagaguauucucuugcugcu

SEQ ID NO: 183468 - RNA, 32 nt, Human
gcuuuugccuguaaucccaacacuuugggagg

SEQ ID NO: 183469 - RNA, 32 nt, Human
gcuuuugccuguuuguagaggaaaaggugggc

SEQ ID NO: 183470 - RNA, 32 nt, Human
gcuuuugccuucuugaugccagccugcugcaa

SEQ ID NO: 183471 - RNA, 32 nt, Human
gcuuuugcgucaggcuucugccugagcucggu

SEQ ID NO: 183472 - RNA, 32 nt, Human
gcuuuugcugagcuuugcaucuugccuccuuc

SEQ ID NO: 183473 - RNA, 32 nt, Human
gcuuuugcuggagcugugcuaggcugagggaa

SEQ ID NO: 183474 - RNA, 32 nt, Human
gcuuuugcuggcacguaggcuaccacucuccg

SEQ ID NO: 183475 - RNA, 32 nt, Human
gcuuuugcuguuggugggcuuugagaaaaaca

SEQ ID NO: 183476 - RNA, 32 nt, Human
gcuuuugcuguuuucuuuacucuugucaaggu

SEQ ID NO: 183477 - RNA, 32 nt, Human
gcuuuugcuugauccagaagagcccauaucac

SEQ ID NO: 183478 - RNA, 32 nt, Human
gcuuuuggagugaccaaaagcacagaggcagc

SEQ ID NO: 183479 - RNA, 32 nt, Human
gcuuuuggccggcuuggcauugggugggcggc

SEQ ID NO: 183480 - RNA, 21 nt, Human
gcuuuugggaagucucagcag

SEQ ID NO: 183481 - RNA, 32 nt, Human
gcuuuugggcucaucacuggccuggggagggc

SEQ ID NO: 183482 - RNA, 32 nt, Human
gcuuuugggcuuauuuucuugcacuggugcag

SEQ ID NO: 183483 - RNA, 32 nt, Human
gcuuuugguccuccaggcaucuugcugaaacu

SEQ ID NO: 183484 - RNA, 32 nt, Human
gcuuuuguaaauugaauaaagauggacuucua

SEQ ID NO: 183485 - RNA, 32 nt, Human
gcuuuugucaaagaggccuccuuucccucacc

SEQ ID NO: 183486 - RNA, 32 nt, Human
gcuuuugucaccaagacaugaaaagcugccau

SEQ ID NO: 183487 - RNA, 32 nt, Human
gcuuuugucaucucccggaguauucauccuca

SEQ ID NO: 183488 - RNA, 32 nt, Human
gcuuuugucccccaagcuggaguacaaugaca

SEQ ID NO: 183489 - RNA, 32 nt, Human
gcuuuugucccuucucuucaucuggucuuggg

SEQ ID NO: 183490 - RNA, 32 nt, Human
gcuuuugucugguccucugagccccagugaga

SEQ ID NO: 183491 - RNA, 32 nt, Human
gcuuuugucuuuucauaguuuuccuuguauag

SEQ ID NO: 183492 - RNA, 32 nt, Human
gcuuuuguugcccaggcuggagugcaauggcg

SEQ ID NO: 183493 - RNA, 32 nt, Human
gcuuuuguugugugugacuccaaagaaugccc

SEQ ID NO: 183494 - RNA, 32 nt, Human
gcuuuuuaaaugauguaauucccacuguaaua

SEQ ID NO: 183495 - RNA, 32 nt, Human
gcuuuuuaacagggcauuuaaguggcuagcaa

SEQ ID NO: 183496 - RNA, 32 nt, Human
gcuuuuucagaucagucuccacagcuaccauc

SEQ ID NO: 183497 - RNA, 32 nt, Human
gcuuuuuccucucaucagcccugugcaguagg

SEQ ID NO: 183498 - RNA, 32 nt, Human
gcuuuuuccugccuccuuccucuccucucucu

SEQ ID NO: 183499 - RNA, 32 nt, Human
gcuuuuuccugccucuguuucccuagcaagug

SEQ ID NO: 183500 - RNA, 32 nt, Human
gcuuuuucuccccuccucuauuccuuuuaggg

SEQ ID NO: 183501 - RNA, 17 nt, Human
gcuuuuugaaaauuuug

SEQ ID NO: 183502 - RNA, 32 nt, Human
gcuuuuugaauagagacuccauggaguugguc

SEQ ID NO: 183503 - RNA, 32 nt, Human
gcuuuuugagacaaggucucacugucacccag

SEQ ID NO: 183504 - RNA, 32 nt, Human
gcuuuuugauugcugcagguaacugaaacaaa

SEQ ID NO: 183505 - RNA, 32 nt, Human
gcuuuuugcaccacuguucuagccuuuaaugc

SEQ ID NO: 183506 - RNA, 32 nt, Human
gcuuuuugcauguaucuucuaagaauuuuauc

SEQ ID NO: 183507 - RNA, 22 nt, Human
gcuuuuuggucuguuuguuuga

SEQ ID NO: 183508 - RNA, 32 nt, Human
gcuuuuuguuaaaacaugucuauagaguuggc

SEQ ID NO: 183509 - RNA, 32 nt, Human
gcuuuuuguucuguuuugcaacauuuuguagu

SEQ ID NO: 183510 - RNA, 32 nt, Human
gcuuuuuguuugcaucauuuaacugaacugug

SEQ ID NO: 183511 - RNA, 20 nt, Human
ggaaaaaaucaaugaucuca

SEQ ID NO: 183512 - RNA, 18 nt, Human
ggaaaaaauugcuuuuga

SEQ ID NO: 183513 - RNA, 32 nt, Human
ggaaaaacaaaaagauauugcugagaugaccu

SEQ ID NO: 183514 - RNA, 32 nt, Human
ggaaaaacaaacaugaauccugugauauuggg

SEQ ID NO: 183515 - RNA, 32 nt, Human
ggaaaaacaaaugaucuguuaacaaaggacug

SEQ ID NO: 183516 - RNA, 32 nt, Human
ggaaaaacaaauuugcacaauggccugggaag

SEQ ID NO: 183517 - RNA, 32 nt, Human
ggaaaaacaauggaaaugcacaguacugaaua

SEQ ID NO: 183518 - RNA, 19 nt, Human
ggaaaaacagacuuuggga

SEQ ID NO: 183519 - RNA, 22 nt, Human
ggaaaaacagggccacuuacca

SEQ ID NO: 183520 - RNA, 20 nt, Human
ggaaaaacagugccuggaga

SEQ ID NO: 183521 - RNA, 17 nt, Human
ggaaaaacaucucuggg

SEQ ID NO: 183522 - RNA, 18 nt, Human
ggaaaaacccucugaaga

SEQ ID NO: 183523 - RNA, 32 nt, Human
ggaaaaacuacaaauuucuaauuuagcugaag

SEQ ID NO: 183524 - RNA, 32 nt, Human
ggaaaaacuaccaucuccccugcccaccaugg

SEQ ID NO: 183525 - RNA, 32 nt, Human
ggaaaaacucuugcuuucugcacuuucgcccc

SEQ ID NO: 183526 - RNA, 32 nt, Human
ggaaaaagaaaauucuugggcucacaaaacug

SEQ ID NO: 183527 - RNA, 19 nt, Human
ggaaaaagagccaauguca

SEQ ID NO: 183528 - RNA, 32 nt, Human
ggaaaaagagccagggccggaaggagggugca

SEQ ID NO: 183529 - RNA, 32 nt, Human
ggaaaaagaggagaagaaaaagaaguaccacu

SEQ ID NO: 183530 - RNA, 32 nt, Human
ggaaaaagaguguugcaauuuaucaucaauuu

SEQ ID NO: 183531 - RNA, 32 nt, Human
ggaaaaagaucauucgggaaauggcgguggcu

SEQ ID NO: 183532 - RNA, 32 nt, Human
ggaaaaagcauacacccccaaacagaaaggag

SEQ ID NO: 183533 - RNA, 32 nt, Human
ggaaaaagccuuggaagagaaaaguagaauuc

SEQ ID NO: 183534 - RNA, 32 nt, Human
ggaaaaagcugaugguccuguccaaaggcuau

SEQ ID NO: 183535 - RNA, 32 nt, Human
ggaaaaaggagaaaggagaggagaguucucug

SEQ ID NO: 183536 - RNA, 32 nt, Human
ggaaaaaggagagacucuagacauucagaguc

SEQ ID NO: 183537 - RNA, 32 nt, Human
  misc_feature (22)..(22): n is a, c, g, or u
ggaaaaaggagaggaggaaacnagugaggcag

SEQ ID NO: 183538 - RNA, 32 nt, Human
ggaaaaaggcccagagcuguggccggacagag

SEQ ID NO: 183539 - RNA, 32 nt, Human
ggaaaaaggccuucccaggcgcgagaagauga

SEQ ID NO: 183540 - RNA, 21 nt, Human
ggaaaaaguaggagaggcaga

SEQ ID NO: 183541 - RNA, 19 nt, Human
ggaaaaauagacugcagaa

SEQ ID NO: 183542 - RNA, 32 nt, Human
ggaaaaaucacccuucagacuuugcuuuucuu

SEQ ID NO: 183543 - RNA, 32 nt, Human
ggaaaaaucacuuuccagucuguuuugcaagg

SEQ ID NO: 183544 - RNA, 18 nt, Human
ggaaaaaucauucuggga

SEQ ID NO: 183545 - RNA, 32 nt, Human
ggaaaaauccacugcaccuccacuuggugacu

SEQ ID NO: 183546 - RNA, 32 nt, Human
ggaaaaaucgagccucucccacccucagucgc

SEQ ID NO: 183547 - RNA, 32 nt, Human
ggaaaaaucuccuuucugcuucccagagaggg

SEQ ID NO: 183548 - RNA, 32 nt, Human
ggaaaaaugagguauguggacaaguagaaggu

SEQ ID NO: 183549 - RNA, 32 nt, Human
ggaaaaaugaugguuugggcauauugguauaa

SEQ ID NO: 183550 - RNA, 32 nt, Human
ggaaaaaugcugcuucuccucccagcgugugu

SEQ ID NO: 183551 - RNA, 32 nt, Human
ggaaaaauggaugauuccaaagcaagggcaag

SEQ ID NO: 183552 - RNA, 32 nt, Human
ggaaaaauggcugaccccauggacaccuccuc

SEQ ID NO: 183553 - RNA, 32 nt, Human
ggaaaaauuaggagaaagugaggugcuauaua

SEQ ID NO: 183554 - RNA, 32 nt, Human
ggaaaaauuauaaucacuaaucuugguucuuu

SEQ ID NO: 183555 - RNA, 32 nt, Human
ggaaaaauucuuugaugguuuuuccuugaaaa

SEQ ID NO: 183556 - RNA, 32 nt, Human
ggaaaacaaacaguagcagcuaauauucucaa

SEQ ID NO: 183557 - RNA, 32 nt, Human
ggaaaacaacagcaacaaaaucuguuuuuaaa

SEQ ID NO: 183558 - RNA, 21 nt, Human
ggaaaacaaccacuucuggga

SEQ ID NO: 183559 - RNA, 22 nt, Human
ggaaaacaaggggcuaccuacc

SEQ ID NO: 183560 - RNA, 19 nt, Human
ggaaaacaauugcuuuuga

SEQ ID NO: 183561 - RNA, 21 nt, Human
ggaaaacacaccccggucuca

SEQ ID NO: 183562 - RNA, 32 nt, Human
ggaaaacacagcaaacuagaaaguccaguugg

SEQ ID NO: 183563 - RNA, 32 nt, Human
ggaaaacaccucuuccuuuuaauugcucugag

SEQ ID NO: 183564 - RNA, 17 nt, Human
ggaaaacaccuuuggga

SEQ ID NO: 183565 - RNA, 32 nt, Human
ggaaaacacuggccuaucggcuguaauaggaa

SEQ ID NO: 183566 - RNA, 32 nt, Human
ggaaaacagaaaccacacuaaguauuucaaga

SEQ ID NO: 183567 - RNA, 32 nt, Human
ggaaaacagaagccacacuguauuccagauga

SEQ ID NO: 183568 - RNA, 21 nt, Human
ggaaaacagcccugcuucuga

SEQ ID NO: 183569 - RNA, 32 nt, Human
ggaaaacaggccuccccucccucucucggcac

SEQ ID NO: 183570 - RNA, 32 nt, Human
ggaaaacaggucacagcuauguuuccaguguc

SEQ ID NO: 183571 - RNA, 32 nt, Human
ggaaaacauacccuuuuucuucaacaggcuuu

SEQ ID NO: 183572 - RNA, 24 nt, Human
ggaaaacauggaggaggaggcuga

SEQ ID NO: 183573 - RNA, 32 nt, Human
ggaaaacauggcuguuucaaaagagaaaaaua

SEQ ID NO: 183574 - RNA, 23 nt, Human
ggaaaaccaaaccuagugauacu

SEQ ID NO: 183575 - RNA, 19 nt, Human
ggaaaaccacugcagugug

SEQ ID NO: 183576 - RNA, 32 nt, Human
ggaaaaccagaagaacagagcaguggcacugg

SEQ ID NO: 183577 - RNA, 19 nt, Human
ggaaaacccauucucuggg

SEQ ID NO: 183578 - RNA, 32 nt, Human
ggaaaaccccuaaaaauccccaaaacagaaac

SEQ ID NO: 183579 - RNA, 21 nt, Human
ggaaaacccgucccugggccg

SEQ ID NO: 183580 - RNA, 32 nt, Human
ggaaaaccggagaggcgcaucuugccggcuac

SEQ ID NO: 183581 - RNA, 23 nt, Human
ggaaaacgcagcuacaccuggag

SEQ ID NO: 183582 - RNA, 32 nt, Human
ggaaaacggaaaggaaagaucagcagaaauag

SEQ ID NO: 183583 - RNA, 17 nt, Human
ggaaaacuacuuuggga

SEQ ID NO: 183584 - RNA, 32 nt, Human
ggaaaacucggggcuuugugccagucucuaag

SEQ ID NO: 183585 - RNA, 32 nt, Human
ggaaaacugaaaacuguucaacucccuugacu

SEQ ID NO: 183586 - RNA, 32 nt, Human
ggaaaacugcaagccgcucuguuccugggccu

SEQ ID NO: 183587 - RNA, 32 nt, Human
ggaaaacugcacugugaggcggggcgaugggg

SEQ ID NO: 183588 - RNA, 32 nt, Human
ggaaaacuggaaaaucuggauggcagagaaau

SEQ ID NO: 183589 - RNA, 32 nt, Human
ggaaaacuggacuguggccagggcuggccccc

SEQ ID NO: 183590 - RNA, 32 nt, Human
ggaaaacuguaaagacuuccaggucccaucca

SEQ ID NO: 183591 - RNA, 32 nt, Human
ggaaaacuugcaguuauucuggaagcaccggc

SEQ ID NO: 183592 - RNA, 32 nt, Human
ggaaaagaaaaaggagaaaaacaaagagauuu

SEQ ID NO: 183593 - RNA, 32 nt, Human
ggaaaagaaacuuggauuaaaugagugugcug

SEQ ID NO: 183594 - RNA, 32 nt, Human
ggaaaagaaagagagaucagacuguuacugug

SEQ ID NO: 183595 - RNA, 31 nt, Human
ggaaaagaacaaugccacucucuuuuaugua

SEQ ID NO: 183596 - RNA, 32 nt, Human
ggaaaagaauacuuuguuuccagcccccuucc

SEQ ID NO: 183597 - RNA, 32 nt, Human
ggaaaagacacaagaccuuccccacauccugu

SEQ ID NO: 183598 - RNA, 32 nt, Human
ggaaaagacagagucagacagggagccugggg

SEQ ID NO: 183599 - RNA, 32 nt, Human
ggaaaagacuccuucucccaaagaagaagaug

SEQ ID NO: 183600 - RNA, 32 nt, Human
ggaaaagagaaaacugcaucacagucccauuc

SEQ ID NO: 183601 - RNA, 32 nt, Human
ggaaaagagaaaagggaaagaaauccagagaa

SEQ ID NO: 183602 - RNA, 31 nt, Human
ggaaaagagaggagagaaaagcaacugaguu

SEQ ID NO: 183603 - RNA, 18 nt, Human
ggaaaagagcucuggaga

SEQ ID NO: 183604 - RNA, 32 nt, Human
ggaaaagaggagaagagcaaacaggcacuuug

SEQ ID NO: 183605 - RNA, 32 nt, Human
ggaaaagaggucaccuuccagcagugaaauga

SEQ ID NO: 183606 - RNA, 17 nt, Human
ggaaaagagguuuuuga

SEQ ID NO: 183607 - RNA, 32 nt, Human
ggaaaagaguccaaacaccuacccacaccugc

SEQ ID NO: 183608 - RNA, 32 nt, Human
ggaaaagauaccaaaugccugcugcuaccacc

SEQ ID NO: 183609 - RNA, 32 nt, Human
ggaaaagcaagaaacgcuugaaagaagugaaa

SEQ ID NO: 183610 - RNA, 32 nt, Human
ggaaaagcagccugggcuucacuggcaggaag

SEQ ID NO: 183611 - RNA, 28 nt, Human
ggaaaagcagcugcugccucucuccugg

SEQ ID NO: 183612 - RNA, 32 nt, Human
ggaaaagcaggagguaguugugccucaauuau

SEQ ID NO: 183613 - RNA, 32 nt, Human
ggaaaagcaggauggcauacaccccacugaag

SEQ ID NO: 183614 - RNA, 32 nt, Human
ggaaaagcagggccaaggaugaggcuuucuuc

SEQ ID NO: 183615 - RNA, 32 nt, Human
ggaaaagcaguuugcucgaggaaagguauucg

SEQ ID NO: 183616 - RNA, 32 nt, Human
ggaaaagcaucugccacaaaaauguucacuuc

SEQ ID NO: 183617 - RNA, 32 nt, Human
ggaaaagcaucuugucaggaagcguccuuucu

SEQ ID NO: 183618 - RNA, 32 nt, Human
ggaaaagcccagggucuggggcagcagagcca

SEQ ID NO: 183619 - RNA, 32 nt, Human
ggaaaagcccggugggcucugagucuucuggg

SEQ ID NO: 183620 - RNA, 32 nt, Human
ggaaaagccuguccgcaguccugggccgccuc

SEQ ID NO: 183621 - RNA, 32 nt, Human
ggaaaagcgugccuccagccguggggacaggc

SEQ ID NO: 183622 - RNA, 32 nt, Human
ggaaaagcucuaaacaggcuuaaugauucuuc

SEQ ID NO: 183623 - RNA, 32 nt, Human
ggaaaagcuguucccaugucuaacaggacuug

SEQ ID NO: 183624 - RNA, 19 nt, Human
ggaaaagcuuuugaucuua

SEQ ID NO: 183625 - RNA, 32 nt, Human
ggaaaaggaagcaccagguggaaagggagguu

SEQ ID NO: 183626 - RNA, 32 nt, Human
ggaaaaggaagugcccuuauccacgaccaagc

SEQ ID NO: 183627 - RNA, 32 nt, Human
ggaaaaggaauuguuuucaaaguaauuucaua

SEQ ID NO: 183628 - RNA, 32 nt, Human
ggaaaaggagaaaauguccuuuuggaagaaua

SEQ ID NO: 183629 - RNA, 21 nt, Human
ggaaaaggaggaggaggaaga

SEQ ID NO: 183630 - RNA, 32 nt, Human
ggaaaaggaggaggugucuggggugagggagu

SEQ ID NO: 183631 - RNA, 32 nt, Human
ggaaaaggagucaggagccacugugaggugag

SEQ ID NO: 183632 - RNA, 32 nt, Human
ggaaaaggagucgggcuggcaggacagaggga

SEQ ID NO: 183633 - RNA, 18 nt, Human
ggaaaaggauuguucugg

SEQ ID NO: 183634 - RNA, 32 nt, Human
ggaaaaggcaaaggagcacauucugucuagag

SEQ ID NO: 183635 - RNA, 32 nt, Human
ggaaaaggccucugccuuccucaggagggaca

SEQ ID NO: 183636 - RNA, 32 nt, Human
ggaaaaggccugccaccaaagcaggaagcugc

SEQ ID NO: 183637 - RNA, 32 nt, Human
ggaaaaggcugaugcuucagggaacagauguu

SEQ ID NO: 183638 - RNA, 32 nt, Human
ggaaaagggaaaggcagacgaauggcauggcu

SEQ ID NO: 183639 - RNA, 32 nt, Human
ggaaaagggaacgugguacucacuggaugcac

SEQ ID NO: 183640 - RNA, 32 nt, Human
ggaaaagggaauggguagcauaaggaaaggaa

SEQ ID NO: 183641 - RNA, 32 nt, Human
ggaaaagggaauucauuaaacauaucauccuu

SEQ ID NO: 183642 - RNA, 32 nt, Human
ggaaaagggagaaagggaggcucccgggagca

SEQ ID NO: 183643 - RNA, 32 nt, Human
ggaaaagggcaaucagcaaucaacugagguuu

SEQ ID NO: 183644 - RNA, 32 nt, Human
ggaaaagggcuggcucggagucuagacucuuc

SEQ ID NO: 183645 - RNA, 17 nt, Human
ggaaaagggucuuggga

SEQ ID NO: 183646 - RNA, 17 nt, Human
ggaaaagguguuuuuga

SEQ ID NO: 183647 - RNA, 32 nt, Human
ggaaaagguuauggaacuggagggggugagcu

SEQ ID NO: 183648 - RNA, 24 nt, Human
ggaaaagguugauauaauaaugca

SEQ ID NO: 183649 - RNA, 32 nt, Human
ggaaaaguauugaaguucaaauccagauagua

SEQ ID NO: 183650 - RNA, 21 nt, Human
ggaaaaguccuggcugggaga

SEQ ID NO: 183651 - RNA, 32 nt, Human
ggaaaagugaagagcagugugcugucacacac

SEQ ID NO: 183652 - RNA, 32 nt, Human
ggaaaauacacaccuggggaguacauuugaca

SEQ ID NO: 183653 - RNA, 32 nt, Human
ggaaaauagaggcauuguagaauagcaguuca

SEQ ID NO: 183654 - RNA, 32 nt, Human
ggaaaauagaucuaggcagagugccuuaguca

SEQ ID NO: 183655 - RNA, 32 nt, Human
ggaaaaucaucccauuccuaucuucuuccuca

SEQ ID NO: 183656 - RNA, 32 nt, Human
ggaaaaucaucucccauuucuccacagggcag

SEQ ID NO: 183657 - RNA, 32 nt, Human
ggaaaaucauuucuuguccuuuaaggcaggga

SEQ ID NO: 183658 - RNA, 32 nt, Human
ggaaaauccagcagguggagguugcagugagc

SEQ ID NO: 183659 - RNA, 32 nt, Human
ggaaaauccagccugggagccccuggaguggc

SEQ ID NO: 183660 - RNA, 32 nt, Human
ggaaaaucuacccccuuccuccagcacauugc

SEQ ID NO: 183661 - RNA, 32 nt, Human
ggaaaaucuaguuucacagcuauuugaauuuu

SEQ ID NO: 183662 - RNA, 32 nt, Human
ggaaaaucuccaagagcccugaccucaucuuc

SEQ ID NO: 183663 - RNA, 19 nt, Human
ggaaaaugaagagagccag

SEQ ID NO: 183664 - RNA, 32 nt, Human
ggaaaaugaauccacagcucuacuccagguuc

SEQ ID NO: 183665 - RNA, 32 nt, Human
ggaaaaugacaucacccaggagugauuucucu

SEQ ID NO: 183666 - RNA, 19 nt, Human
ggaaaaugcaaugauuuca

SEQ ID NO: 183667 - RNA, 32 nt, Human
ggaaaaugccuuguugacauuuucuuucagca

SEQ ID NO: 183668 - RNA, 20 nt, Human
ggaaaauggacuguuucuga

SEQ ID NO: 183669 - RNA, 32 nt, Human
ggaaaauggagauguccucuccacuuuauccc

SEQ ID NO: 183670 - RNA, 30 nt, Human
ggaaaauggcggcugccaggcccagccugg

SEQ ID NO: 183671 - RNA, 30 nt, Human
ggaaaaugggggaaaguuuggaacuuccua

SEQ ID NO: 183672 - RNA, 21 nt, Human
ggaaaaugggugguugggaga

SEQ ID NO: 183673 - RNA, 20 nt, Human
ggaaaauggguuucucuggg

SEQ ID NO: 183674 - RNA, 32 nt, Human
ggaaaaugguuucuucauguuuucccaacucu

SEQ ID NO: 183675 - RNA, 32 nt, Human
ggaaaaugugggaaaauuuggaagagauuucc

SEQ ID NO: 183676 - RNA, 32 nt, Human
ggaaaauguggugaaauccugucucuauuuaa

SEQ ID NO: 183677 - RNA, 32 nt, Human
ggaaaauuaauggcucaacaagcacaauaccu

SEQ ID NO: 183678 - RNA, 32 nt, Human
ggaaaauucuuuuugugcauuugagggcaaaa

SEQ ID NO: 183679 - RNA, 18 nt, Human
ggaaaauugacugcagaa

SEQ ID NO: 183680 - RNA, 16 nt, Human
ggaaaauugcuuuuga

SEQ ID NO: 183681 - RNA, 32 nt, Human
ggaaaauuucaaauuuccuuauaguaaaaaua

SEQ ID NO: 183682 - RNA, 20 nt, Human
ggaaaauuuuggaagucaag

SEQ ID NO: 183683 - RNA, 32 nt, Human
ggaaacaaaccagcucgucucagaggccagca

SEQ ID NO: 183684 - RNA, 32 nt, Human
ggaaacaaagaaguaaucauuccccagccccc

SEQ ID NO: 183685 - RNA, 32 nt, Human
ggaaacaaagcauauagaauacaugcuagaag

SEQ ID NO: 183686 - RNA, 32 nt, Human
ggaaacaaaggggaagaggacagugaaugaac

SEQ ID NO: 183687 - RNA, 32 nt, Human
ggaaacaaaugcuguaauucaaaagcauuuga

SEQ ID NO: 183688 - RNA, 32 nt, Human
ggaaacaacacacacuggggccuaugagaggg

SEQ ID NO: 183689 - RNA, 21 nt, Human
ggaaacaacggaggagcucug

SEQ ID NO: 183690 - RNA, 32 nt, Human
ggaaacaagacgggguuucuuggcaggcccug

SEQ ID NO: 183691 - RNA, 32 nt, Human
ggaaacaagccccugucccacgccgucugcac

SEQ ID NO: 183692 - RNA, 32 nt, Human
ggaaacaagguagagaaaaggacgaagaagug

SEQ ID NO: 183693 - RNA, 32 nt, Human
ggaaacaauccuuccuucugguggcagagcca

SEQ ID NO: 183694 - RNA, 32 nt, Human
ggaaacacaauuugagagucaugugaaacgug

SEQ ID NO: 183695 - RNA, 24 nt, Human
ggaaacacacacagcuccugcuga

SEQ ID NO: 183696 - RNA, 32 nt, Human
ggaaacacagggcuucuuggccccagauggca

SEQ ID NO: 183697 - RNA, 32 nt, Human
ggaaacacaugccuucccagacuggccuguug

SEQ ID NO: 183698 - RNA, 32 nt, Human
ggaaacaccuguaggcagaggcugccgagaca

SEQ ID NO: 183699 - RNA, 18 nt, Human
ggaaacacgacucuggga

SEQ ID NO: 183700 - RNA, 21 nt, Human
ggaaacacugacuucugggaa

SEQ ID NO: 183701 - RNA, 32 nt, Human
ggaaacacugcaacuuuccuuaacagccuguu

SEQ ID NO: 183702 - RNA, 22 nt, Human
ggaaacacuggguuccugggaa

SEQ ID NO: 183703 - RNA, 32 nt, Human
ggaaacacugucuaugauaggauuuccaaaag

SEQ ID NO: 183704 - RNA, 32 nt, Human
ggaaacagaacugacugucccggggugcccac

SEQ ID NO: 183705 - RNA, 32 nt, Human
ggaaacagaaugggccagggagguugagugac

SEQ ID NO: 183706 - RNA, 32 nt, Human
ggaaacagacgcgugaaaacugagccccagaa

SEQ ID NO: 183707 - RNA, 32 nt, Human
ggaaacagagggcuggagccagguucugaucc

SEQ ID NO: 183708 - RNA, 32 nt, Human
ggaaacagauggaaaaagugagggaccgguga

SEQ ID NO: 183709 - RNA, 32 nt, Human
ggaaacagcagauggaaauggaaauagccaag

SEQ ID NO: 183710 - RNA, 19 nt, Human
ggaaacagccgcacaguga

SEQ ID NO: 183711 - RNA, 19 nt, Human
ggaaacagcucuccaggga

SEQ ID NO: 183712 - RNA, 17 nt, Human
ggaaacagcuucagaga

SEQ ID NO: 183713 - RNA, 32 nt, Human
ggaaacaggaauaauaaaggcaucacugacca

SEQ ID NO: 183714 - RNA, 21 nt, Human
ggaaacaggagccgaccuccc

SEQ ID NO: 183715 - RNA, 32 nt, Human
ggaaacaggagugaagcccaccagccugccug

SEQ ID NO: 183716 - RNA, 20 nt, Human
ggaaacaggccagcccagug

SEQ ID NO: 183717 - RNA, 32 nt, Human
ggaaacaggcuggagacugcgggugcugcgug

SEQ ID NO: 183718 - RNA, 32 nt, Human
ggaaacagggagaccugggguccuguggauaa

SEQ ID NO: 183719 - RNA, 31 nt, Human
ggaaacagugaaagagaaaaaucugauauug

SEQ ID NO: 183720 - RNA, 32 nt, Human
ggaaacaguggaggcagcggggcaggucgccu

SEQ ID NO: 183721 - RNA, 32 nt, Human
ggaaacaguucaccuccucccuucaucacguc

SEQ ID NO: 183722 - RNA, 32 nt, Human
ggaaacaguuugaaaauguugagacagcacag

SEQ ID NO: 183723 - RNA, 32 nt, Human
ggaaacauacccaggaaguacaguugauaaau

SEQ ID NO: 183724 - RNA, 32 nt, Human
ggaaacaucagaaugucugcucuccuuggucu

SEQ ID NO: 183725 - RNA, 32 nt, Human
ggaaacaugaauaaauccacauggacaggaug

SEQ ID NO: 183726 - RNA, 32 nt, Human
ggaaacauggcaaaauccucucucuauuuuca

SEQ ID NO: 183727 - RNA, 32 nt, Human
ggaaacauggguggcugccugccugccugccu

SEQ ID NO: 183728 - RNA, 32 nt, Human
ggaaacauuuugcugauuuugugaauugccag

SEQ ID NO: 183729 - RNA, 32 nt, Human
ggaaaccaaaguaaccuuuugcaccugcucuc

SEQ ID NO: 183730 - RNA, 32 nt, Human
ggaaaccaacaggugaccucagggagguuugu

SEQ ID NO: 183731 - RNA, 32 nt, Human
ggaaaccaaccgggaugcuaacuacaacaugg

SEQ ID NO: 183732 - RNA, 32 nt, Human
ggaaaccaagaagugagaagcauuucagggga

SEQ ID NO: 183733 - RNA, 32 nt, Human
ggaaaccaagacaggaggauggcuugaagcca

SEQ ID NO: 183734 - RNA, 32 nt, Human
ggaaaccaagccccacacucccgggaagccuc

SEQ ID NO: 183735 - RNA, 32 nt, Human
ggaaaccaaggaagaggaaugggagccacgcg

SEQ ID NO: 183736 - RNA, 32 nt, Human
ggaaaccaauuaaaaugugccuuuggugggcg

SEQ ID NO: 183737 - RNA, 32 nt, Human
ggaaaccacagcagcccaugcacacagaaugg

SEQ ID NO: 183738 - RNA, 32 nt, Human
ggaaaccacaguuugcauuuaggauugugcua

SEQ ID NO: 183739 - RNA, 32 nt, Human
ggaaaccaccugcugggagacaaugggggugg

SEQ ID NO: 183740 - RNA, 32 nt, Human
ggaaaccagaagcuggggauuccagggacccc

SEQ ID NO: 183741 - RNA, 32 nt, Human
ggaaaccagaaggccaaguggaucugcuggca

SEQ ID NO: 183742 - RNA, 31 nt, Human
ggaaaccagagagucggagggaguccaucug

SEQ ID NO: 183743 - RNA, 32 nt, Human
ggaaaccaggcagaggaggcacagggugcucu

SEQ ID NO: 183744 - RNA, 23 nt, Human
ggaaaccaggcuccccucucuca

SEQ ID NO: 183745 - RNA, 32 nt, Human
ggaaaccauacuccuauaaugagcaaaguaac

SEQ ID NO: 183746 - RNA, 32 nt, Human
ggaaaccauggaggccagaaggaagugagaca

SEQ ID NO: 183747 - RNA, 22 nt, Human
ggaaaccauggcagcauggaga

SEQ ID NO: 183748 - RNA, 32 nt, Human
ggaaacccaagaggcugagaauucuuuugucu

SEQ ID NO: 183749 - RNA, 32 nt, Human
ggaaacccaaguguccaucuccaucggaacag

SEQ ID NO: 183750 - RNA, 32 nt, Human
ggaaacccaauccacauuggaacaaggcuucu

SEQ ID NO: 183751 - RNA, 32 nt, Human
ggaaacccaccucucuggaaggccccuucccu

SEQ ID NO: 183752 - RNA, 32 nt, Human
ggaaacccacugucugaagaccacagaggggu

SEQ ID NO: 183753 - RNA, 32 nt, Human
ggaaacccagaagggagagucacugcauguga

SEQ ID NO: 183754 - RNA, 32 nt, Human
ggaaacccagagagacagagacccaaagggag

SEQ ID NO: 183755 - RNA, 19 nt, Human
ggaaacccgacaaacaggg

SEQ ID NO: 183756 - RNA, 32 nt, Human
ggaaacccuauucaauaaauggugcugggaua

SEQ ID NO: 183757 - RNA, 32 nt, Human
ggaaacccuccaggaaaaaguggccccggacg

SEQ ID NO: 183758 - RNA, 32 nt, Human
ggaaacccucuucaauaagaccugugugauga

SEQ ID NO: 183759 - RNA, 32 nt, Human
ggaaacccugguguaccucucaguggcagaau

SEQ ID NO: 183760 - RNA, 20 nt, Human
ggaaacccuuucacuucucu

SEQ ID NO: 183761 - RNA, 32 nt, Human
ggaaaccgacaagauuaaaaauaacuuggcag

SEQ ID NO: 183762 - RNA, 22 nt, Human
ggaaaccgagaugcuucccgca

SEQ ID NO: 183763 - RNA, 32 nt, Human
ggaaaccgcggagcaugacuccuccgaagcug

SEQ ID NO: 183764 - RNA, 32 nt, Human
ggaaaccgcugccuuuaucuugaagucagcca

SEQ ID NO: 183765 - RNA, 32 nt, Human
ggaaaccgggccagcguggggcucccugccuu

SEQ ID NO: 183766 - RNA, 32 nt, Human
ggaaaccuaaacugaggucagcacuugggccc

SEQ ID NO: 183767 - RNA, 32 nt, Human
ggaaaccuacagacaaggaggaguuccaccau

SEQ ID NO: 183768 - RNA, 32 nt, Human
ggaaaccuaccuagaaccuccacccucugaca

SEQ ID NO: 183769 - RNA, 32 nt, Human
ggaaaccucccuuuacagcaccaccuugcgau

SEQ ID NO: 183770 - RNA, 32 nt, Human
ggaaaccugcccugggcgcucccuucauuagc

SEQ ID NO: 183771 - RNA, 28 nt, Human
ggaaaccugcccuguccaccccuucuca

SEQ ID NO: 183772 - RNA, 32 nt, Human
ggaaaccugccuggccccuaaccacaggaggc

SEQ ID NO: 183773 - RNA, 18 nt, Human
ggaaaccugcgaccccuu

SEQ ID NO: 183774 - RNA, 32 nt, Human
ggaaaccugcguucuccuaccucuuccaaccc

SEQ ID NO: 183775 - RNA, 32 nt, Human
ggaaaccuggacugcgugggcucgggcgccug

SEQ ID NO: 183776 - RNA, 18 nt, Human
ggaaaccuggcucaggga

SEQ ID NO: 183777 - RNA, 32 nt, Human
ggaaaccuggugguauggaagcauguacucaa

SEQ ID NO: 183778 - RNA, 32 nt, Human
ggaaaccuuacaggccaggagagagugcuaug

SEQ ID NO: 183779 - RNA, 22 nt, Human
ggaaaccuuuauacccuuguga

SEQ ID NO: 183780 - RNA, 32 nt, Human
ggaaacgagaugguuguagcaccaccagaggu

SEQ ID NO: 183781 - RNA, 32 nt, Human
ggaaacgaggguuuauuccguugcccacuccg

SEQ ID NO: 183782 - RNA, 32 nt, Human
ggaaacgagugcugcacacagaguaggcaucu

SEQ ID NO: 183783 - RNA, 32 nt, Human
ggaaacgccuccgucucuauauaaggaauuuu

SEQ ID NO: 183784 - RNA, 32 nt, Human
ggaaacgccucguccugcucucaggccagaac

SEQ ID NO: 183785 - RNA, 32 nt, Human
ggaaacgcuaccucucugucccuugcuguaug

SEQ ID NO: 183786 - RNA, 32 nt, Human
ggaaacgcugccucugcuugcgugacucugcu

SEQ ID NO: 183787 - RNA, 32 nt, Human
ggaaacgcuggguucagaaaaguguuacaaga

SEQ ID NO: 183788 - RNA, 32 nt, Human
ggaaacggcagauguagauaauucagcauugg

SEQ ID NO: 183789 - RNA, 17 nt, Human
ggaaacguugcuucuga

SEQ ID NO: 183790 - RNA, 32 nt, Human
ggaaacuaagacauuggacugaaggaacuggc

SEQ ID NO: 183791 - RNA, 32 nt, Human
ggaaacuacagaugaaauuuaacuuacucaaa

SEQ ID NO: 183792 - RNA, 32 nt, Human
ggaaacuacuaaucuugccaucuugcuuuaag

SEQ ID NO: 183793 - RNA, 32 nt, Human
ggaaacuagggagggagggagagggagagagg

SEQ ID NO: 183794 - RNA, 32 nt, Human
ggaaacucaagaaugacagcuucuauauuuug

SEQ ID NO: 183795 - RNA, 32 nt, Human
ggaaacucaagccuuaaauguuuaaguaaacu

SEQ ID NO: 183796 - RNA, 32 nt, Human
ggaaacucaaugccccugcuggcuccauuucc

SEQ ID NO: 183797 - RNA, 32 nt, Human
ggaaacucaguaauucucccaccuucacauug

SEQ ID NO: 183798 - RNA, 32 nt, Human
ggaaacucagugcugccuucagaugucauuga

SEQ ID NO: 183799 - RNA, 32 nt, Human
ggaaacuccacaucugccuuaaaaccaaagag

SEQ ID NO: 183800 - RNA, 32 nt, Human
ggaaacucuaaacuccccuuauggucuaccag

SEQ ID NO: 183801 - RNA, 32 nt, Human
ggaaacucugcagcuuugucaucuaacucuuc

SEQ ID NO: 183802 - RNA, 32 nt, Human
ggaaacucugcuuuuaaaaucaucauuuacug

SEQ ID NO: 183803 - RNA, 23 nt, Human
ggaaacugaacuugggcugggag

SEQ ID NO: 183804 - RNA, 32 nt, Human
ggaaacugaagaaaaagacauguggguuacaa

SEQ ID NO: 183805 - RNA, 32 nt, Human
ggaaacugaccuuuuaaaggccacuggcagua

SEQ ID NO: 183806 - RNA, 32 nt, Human
ggaaacugagagaagaggggcuggagugcggc

SEQ ID NO: 183807 - RNA, 22 nt, Human
ggaaacugaggcacggagcggg

SEQ ID NO: 183808 - RNA, 32 nt, Human
ggaaacugaggccuggaauggcccagagucac

SEQ ID NO: 183809 - RNA, 32 nt, Human
ggaaacugaggcgcagagacuugcuuagacac

SEQ ID NO: 183810 - RNA, 32 nt, Human
ggaaacugaggcucaaagagucccacguggac

SEQ ID NO: 183811 - RNA, 18 nt, Human
ggaaacugaggcugagaa

SEQ ID NO: 183812 - RNA, 18 nt, Human
ggaaacugaggcugagag

SEQ ID NO: 183813 - RNA, 22 nt, Human
ggaaacugaggcugagcgggaa

SEQ ID NO: 183814 - RNA, 24 nt, Human
ggaaacugaggcuuggugaaguua

SEQ ID NO: 183815 - RNA, 20 nt, Human
ggaaacugaggcuuugggag

SEQ ID NO: 183816 - RNA, 32 nt, Human
ggaaacugaggugggagaaucgcuugagccug

SEQ ID NO: 183817 - RNA, 32 nt, Human
ggaaacugagucucagaagggcuuugacacuu

SEQ ID NO: 183818 - RNA, 18 nt, Human
ggaaacugaucucuggga

SEQ ID NO: 183819 - RNA, 32 nt, Human
ggaaacugcacacccuccacucaccucuagca

SEQ ID NO: 183820 - RNA, 32 nt, Human
ggaaacugcacacccuccacucaccucuagcu

SEQ ID NO: 183821 - RNA, 32 nt, Human
ggaaacugccaaggccaggugcaguggcuuac

SEQ ID NO: 183822 - RNA, 32 nt, Human
ggaaacugccuuccccaugcagguuugucuua

SEQ ID NO: 183823 - RNA, 23 nt, Human
ggaaacugcgauauuaaaugcca

SEQ ID NO: 183824 - RNA, 19 nt, Human
ggaaacugcgccucagaga

SEQ ID NO: 183825 - RNA, 32 nt, Human
ggaaacugcuagacagccugguccgaaagcau

SEQ ID NO: 183826 - RNA, 32 nt, Human
ggaaacugcugcuguguaccgacugagccagg

SEQ ID NO: 183827 - RNA, 32 nt, Human
ggaaacuggaagagaagcaggcuugcaagaau

SEQ ID NO: 183828 - RNA, 32 nt, Human
ggaaacuggaagcuaaaaauacagagggugac

SEQ ID NO: 183829 - RNA, 32 nt, Human
ggaaacuggauggagagauuuggggaagcaug

SEQ ID NO: 183830 - RNA, 21 nt, Human
ggaaacuggcagaaauaguua

SEQ ID NO: 183831 - RNA, 32 nt, Human
ggaaacuggcuuuucaaaaugggcuaugggag

SEQ ID NO: 183832 - RNA, 32 nt, Human
ggaaacugggagagagaagcuguggucuccug

SEQ ID NO: 183833 - RNA, 31 nt, Human
ggaaacuggguggacggcauggguuggucuc

SEQ ID NO: 183834 - RNA, 32 nt, Human
ggaaacuguggcagaugagugggagacugguu

SEQ ID NO: 183835 - RNA, 32 nt, Human
ggaaacuguguguauguauacauacauuuucc

SEQ ID NO: 183836 - RNA, 32 nt, Human
ggaaacuucuccccucccaccuucaccuuuag

SEQ ID NO: 183837 - RNA, 32 nt, Human
ggaaacuucuucuuccguggcuuuuggggccc

SEQ ID NO: 183838 - RNA, 32 nt, Human
ggaaacuugguauagcagcuaaaagaguuuag

SEQ ID NO: 183839 - RNA, 21 nt, Human
ggaaacuuuuacucuucagga

SEQ ID NO: 183840 - RNA, 25 nt, Human
ggaaacuuuucugggcuccuggaga

SEQ ID NO: 183841 - RNA, 32 nt, Human
ggaaagaaaauuaguauuuaaggagaguauaa

SEQ ID NO: 183842 - RNA, 19 nt, Human
ggaaagaaaccuuagccag

SEQ ID NO: 183843 - RNA, 32 nt, Human
ggaaagaaaccuuucaaauguaaagaaugugg

SEQ ID NO: 183844 - RNA, 32 nt, Human
ggaaagaaagagaucgcagcaggggugaaggg

SEQ ID NO: 183845 - RNA, 32 nt, Human
ggaaagaaauaacaaaugacaugugggaauug

SEQ ID NO: 183846 - RNA, 32 nt, Human
ggaaagaaauacaaggaggaggaggguuagca

SEQ ID NO: 183847 - RNA, 23 nt, Human
ggaaagaacagaaggagaccaga

SEQ ID NO: 183848 - RNA, 32 nt, Human
ggaaagaagcugaaaauguaaaaccacaccag

SEQ ID NO: 183849 - RNA, 23 nt, Human
ggaaagaaggaacaauuauuagg

SEQ ID NO: 183850 - RNA, 32 nt, Human
ggaaagaaggaggcagaaguggaacugaacuu

SEQ ID NO: 183851 - RNA, 32 nt, Human
ggaaagaagucacuguugcaauaaaagcaccc

SEQ ID NO: 183852 - RNA, 32 nt, Human
ggaaagaauggacuggcagagugugggccuuc

SEQ ID NO: 183853 - RNA, 19 nt, Human
ggaaagaauggagaaucua

SEQ ID NO: 183854 - RNA, 32 nt, Human
ggaaagacagaggaaggaaggagggagaaggg

SEQ ID NO: 183855 - RNA, 32 nt, Human
ggaaagacagaggcgggaggauugagugaggc

SEQ ID NO: 183856 - RNA, 32 nt, Human
ggaaagacagcggcucagaugaggcuucaggc

SEQ ID NO: 183857 - RNA, 32 nt, Human
ggaaagacaggaguucgaaaccagccugggca

SEQ ID NO: 183858 - RNA, 32 nt, Human
ggaaagaccagccucacuccugggaacugucu

SEQ ID NO: 183859 - RNA, 32 nt, Human
ggaaagacccaggcugcgggacgcggugcagg

SEQ ID NO: 183860 - RNA, 32 nt, Human
ggaaagaccgcccaccaugcccacggagaccc

SEQ ID NO: 183861 - RNA, 32 nt, Human
ggaaagaccucaguugggcauucuuuaauagg

SEQ ID NO: 183862 - RNA, 24 nt, Human
ggaaagacgugucccuucugaacu

SEQ ID NO: 183863 - RNA, 32 nt, Human
ggaaagacucacuugagauacccucuccuugc

SEQ ID NO: 183864 - RNA, 32 nt, Human
ggaaagacucuucucauuuauuccucauugaa

SEQ ID NO: 183865 - RNA, 32 nt, Human
ggaaagacugaggcuucugccuacugagcaag

SEQ ID NO: 183866 - RNA, 32 nt, Human
ggaaagacuuuauaaucaggagcuugaccugu

SEQ ID NO: 183867 - RNA, 32 nt, Human
ggaaagacuuuucuuuuccuuccggaacaugu

SEQ ID NO: 183868 - RNA, 32 nt, Human
ggaaagagaaaaagaccacggagugcugagcu

SEQ ID NO: 183869 - RNA, 21 nt, Human
ggaaagagaacucucccaggg

SEQ ID NO: 183870 - RNA, 32 nt, Human
ggaaagagacaggcagagaaggagagaggcag

SEQ ID NO: 183871 - RNA, 32 nt, Human
ggaaagagacccggggaggccaggaguagcug

SEQ ID NO: 183872 - RNA, 32 nt, Human
ggaaagagaccuguaucuugguguuuuucugg

SEQ ID NO: 183873 - RNA, 31 nt, Human
ggaaagagacuucucccauagcaaagaggcu

SEQ ID NO: 183874 - RNA, 20 nt, Human
ggaaagagagauucccugga

SEQ ID NO: 183875 - RNA, 21 nt, Human
ggaaagagagguggggggaga

SEQ ID NO: 183876 - RNA, 32 nt, Human
ggaaagagagugagagccugugcaggcugcug

SEQ ID NO: 183877 - RNA, 32 nt, Human
ggaaagagaucuucuacucacaauguguucaa

SEQ ID NO: 183878 - RNA, 20 nt, Human
ggaaagagauuuacucucug

SEQ ID NO: 183879 - RNA, 32 nt, Human
ggaaagagcaggcuuccaggagagaggccccc

SEQ ID NO: 183880 - RNA, 32 nt, Human
ggaaagagccaaaaugucacaguuccuaucug

SEQ ID NO: 183881 - RNA, 32 nt, Human
ggaaagagccucugaccucccuuguuuaguuu

SEQ ID NO: 183882 - RNA, 32 nt, Human
ggaaagagccuggguguuugggucagauaaau

SEQ ID NO: 183883 - RNA, 32 nt, Human
ggaaagagcggagcagccauuguugagggaaa

SEQ ID NO: 183884 - RNA, 26 nt, Human
ggaaagagcugcgggaaaagccgggg

SEQ ID NO: 183885 - RNA, 18 nt, Human
ggaaagaggacugggaga

SEQ ID NO: 183886 - RNA, 32 nt, Human
ggaaagaggagaaggacaugaauugaaagagg

SEQ ID NO: 183887 - RNA, 32 nt, Human
ggaaagaggagaaggagagggaguacaaagac

SEQ ID NO: 183888 - RNA, 32 nt, Human
ggaaagaggcaggcagggggagaggggcagag

SEQ ID NO: 183889 - RNA, 21 nt, Human
ggaaagaggggagggacucua

SEQ ID NO: 183890 - RNA, 32 nt, Human
ggaaagaggggcuuggagagggagacagggcc

SEQ ID NO: 183891 - RNA, 20 nt, Human
ggaaagagggugcugggaga

SEQ ID NO: 183892 - RNA, 19 nt, Human
ggaaagagucuugcucugu

SEQ ID NO: 183893 - RNA, 32 nt, Human
ggaaagauacacagagugaauaucaaauuuua

SEQ ID NO: 183894 - RNA, 21 nt, Human
ggaaagauaggcaggaguccc

SEQ ID NO: 183895 - RNA, 32 nt, Human
ggaaagaucccuuaugccaggaggccugccau

SEQ ID NO: 183896 - RNA, 32 nt, Human
ggaaagauggagagaagacugcagugagcgga

SEQ ID NO: 183897 - RNA, 22 nt, Human
ggaaagauggagagaucaaacg

SEQ ID NO: 183898 - RNA, 19 nt, Human
ggaaagauggggagcucug

SEQ ID NO: 183899 - RNA, 32 nt, Human
ggaaagcaaaugguaucgaauaccuuucuugc

SEQ ID NO: 183900 - RNA, 32 nt, Human
ggaaagcaacacaggacagaauucagcuagug

SEQ ID NO: 183901 - RNA, 32 nt, Human
ggaaagcaaguuugaaccagcugcugguguaa

SEQ ID NO: 183902 - RNA, 20 nt, Human
ggaaagcacacagacuucua

SEQ ID NO: 183903 - RNA, 20 nt, Human
ggaaagcacgccgggagcuc

SEQ ID NO: 183904 - RNA, 32 nt, Human
ggaaagcacggggccuuucccacccacccuca

SEQ ID NO: 183905 - RNA, 18 nt, Human
ggaaagcacugugcucug

SEQ ID NO: 183906 - RNA, 32 nt, Human
ggaaagcagaaaugaaugaacugugaaagcuc

SEQ ID NO: 183907 - RNA, 22 nt, Human
ggaaagcagagguugcagugag

SEQ ID NO: 183908 - RNA, 32 nt, Human
ggaaagcagaugucaggcuuuggugugccugu

SEQ ID NO: 183909 - RNA, 32 nt, Human
ggaaagcagcaagaaaagguagagaggaacca

SEQ ID NO: 183910 - RNA, 32 nt, Human
ggaaagcagcccauuccugggcucagagacuc

SEQ ID NO: 183911 - RNA, 32 nt, Human
ggaaagcagccccuccucacacauacaugugc

SEQ ID NO: 183912 - RNA, 19 nt, Human
ggaaagcagccuccaggga

SEQ ID NO: 183913 - RNA, 32 nt, Human
ggaaagcagcuguggacucucaaggacaggca

SEQ ID NO: 183914 - RNA, 32 nt, Human
ggaaagcagcuuguugagccccugcagcugga

SEQ ID NO: 183915 - RNA, 32 nt, Human
ggaaagcaggagagagacugaguggcacaucc

SEQ ID NO: 183916 - RNA, 19 nt, Human
ggaaagcaggccucugagg

SEQ ID NO: 183917 - RNA, 21 nt, Human
ggaaagcaguuagaaugucug

SEQ ID NO: 183918 - RNA, 32 nt, Human
ggaaagcauauguauauaacaugugucauguc

SEQ ID NO: 183919 - RNA, 32 nt, Human
ggaaagcauccucaaaacugugggucagugag

SEQ ID NO: 183920 - RNA, 20 nt, Human
ggaaagcauucaucauucua

SEQ ID NO: 183921 - RNA, 21 nt, Human
ggaaagcauuugugaaacuuu

SEQ ID NO: 183922 - RNA, 32 nt, Human
ggaaagccaaaagaacacacagagccaaaaag

SEQ ID NO: 183923 - RNA, 32 nt, Human
ggaaagccaagggggaggguugcccacuagga

SEQ ID NO: 183924 - RNA, 32 nt, Human
ggaaagccaccugagaccacuucauagcaagg

SEQ ID NO: 183925 - RNA, 32 nt, Human
ggaaagccaccuugacagcccaggucccucca

SEQ ID NO: 183926 - RNA, 20 nt, Human
ggaaagccagaagacugcag

SEQ ID NO: 183927 - RNA, 32 nt, Human
ggaaagccagccugggagcaugugaaaggauc

SEQ ID NO: 183928 - RNA, 21 nt, Human
ggaaagccaggcccaccugcc

SEQ ID NO: 183929 - RNA, 21 nt, Human
ggaaagccaguugcccugaac

SEQ ID NO: 183930 - RNA, 32 nt, Human
ggaaagccauggagagcgcucuccccgccgcc

SEQ ID NO: 183931 - RNA, 32 nt, Human
ggaaagccauuaaguggggugcagccccuggc

SEQ ID NO: 183932 - RNA, 32 nt, Human
ggaaagcccaggagaugaugccagccuugagc

SEQ ID NO: 183933 - RNA, 23 nt, Human
ggaaagcccaucccauauucuga

SEQ ID NO: 183934 - RNA, 32 nt, Human
ggaaagccccugccccuccucucccucaucaa

SEQ ID NO: 183935 - RNA, 32 nt, Human
ggaaagcccgagggaggaagagagggagggag

SEQ ID NO: 183936 - RNA, 18 nt, Human
ggaaagccucucauggga

SEQ ID NO: 183937 - RNA, 32 nt, Human
ggaaagccuuuuccuguuugauccugagacac

SEQ ID NO: 183938 - RNA, 32 nt, Human
ggaaagcgcagugcaugcugggugcaugaagg

SEQ ID NO: 183939 - RNA, 25 nt, Human
ggaaagcgccacgaucccaccuacu

SEQ ID NO: 183940 - RNA, 32 nt, Human
ggaaagcggaggaggaaagcgagggggugggg

SEQ ID NO: 183941 - RNA, 22 nt, Human
ggaaagcgggcgacccaccucc

SEQ ID NO: 183942 - RNA, 32 nt, Human
ggaaagcgggugagcuguugugcugcugggcc

SEQ ID NO: 183943 - RNA, 32 nt, Human
ggaaagcggugaggacgcagagugcaggcugu

SEQ ID NO: 183944 - RNA, 32 nt, Human
ggaaagcuaagacaaacaaaacuacaauggaa

SEQ ID NO: 183945 - RNA, 32 nt, Human
ggaaagcuagaaggggacagaggugucccuga

SEQ ID NO: 183946 - RNA, 32 nt, Human
ggaaagcucucauuuguuccaguucacuuuaa

SEQ ID NO: 183947 - RNA, 32 nt, Human
ggaaagcugacuguaagucccaccucccacuc

SEQ ID NO: 183948 - RNA, 23 nt, Human
ggaaagcugaggcagguggauca

SEQ ID NO: 183949 - RNA, 32 nt, Human
ggaaagcugcagcuagaaaauggucuuaaugg

SEQ ID NO: 183950 - RNA, 20 nt, Human
ggaaagcuggaaggacucug

SEQ ID NO: 183951 - RNA, 32 nt, Human
ggaaagcuuacaauuaacuuaccagguuuuuc

SEQ ID NO: 183952 - RNA, 32 nt, Human
ggaaagcuucaaucaaagaacaacccuuauuc

SEQ ID NO: 183953 - RNA, 32 nt, Human
ggaaagcuuccagcccuccucccuucacccug

SEQ ID NO: 183954 - RNA, 16 nt, Human
ggaaagcuuccuggga

SEQ ID NO: 183955 - RNA, 17 nt, Human
ggaaagcuucucugggg

SEQ ID NO: 183956 - RNA, 21 nt, Human
ggaaagcuuuggcaguguuuu

SEQ ID NO: 183957 - RNA, 32 nt, Human
ggaaaggaaagagacggggcucugaggccgag

SEQ ID NO: 183958 - RNA, 32 nt, Human
ggaaaggaaagcagcugagauccagaggagug

SEQ ID NO: 183959 - RNA, 32 nt, Human
ggaaaggaagaaggaaaaccgaguaaaggagg

SEQ ID NO: 183960 - RNA, 32 nt, Human
ggaaaggaagauugagcaacauaggaaaaggg

SEQ ID NO: 183961 - RNA, 32 nt, Human
ggaaaggaaggaaggaaggaaaaggaggggag

SEQ ID NO: 183962 - RNA, 32 nt, Human
ggaaaggaaggagagaaagaaaagcuggaaac

SEQ ID NO: 183963 - RNA, 24 nt, Human
ggaaaggaagggcuuggcuugcca

SEQ ID NO: 183964 - RNA, 32 nt, Human
ggaaaggaaucuuuagaaaugcagcccgcuga

SEQ ID NO: 183965 - RNA, 32 nt, Human
ggaaaggaccacgccuggcagcaaagaucucu

SEQ ID NO: 183966 - RNA, 32 nt, Human
ggaaaggacucuguccccuuggggcucaucac

SEQ ID NO: 183967 - RNA, 31 nt, Human
ggaaaggagaaaagagaaaacaggcugggcc

SEQ ID NO: 183968 - RNA, 32 nt, Human
ggaaaggagaaaggagaaagaaggugaagucu

SEQ ID NO: 183969 - RNA, 32 nt, Human
ggaaaggagaggagggacacuggagagcaggg

SEQ ID NO: 183970 - RNA, 32 nt, Human
ggaaaggagagggcggaaaaggaccagcggga

SEQ ID NO: 183971 - RNA, 24 nt, Human
ggaaaggagagggcucacuuauca

SEQ ID NO: 183972 - RNA, 32 nt, Human
ggaaaggagcauucgaggucucaguccucgcu

SEQ ID NO: 183973 - RNA, 32 nt, Human
ggaaaggaggcugagguuguagcucacacaua

SEQ ID NO: 183974 - RNA, 32 nt, Human
ggaaaggaggugggggcggggaguauugaaug

SEQ ID NO: 183975 - RNA, 19 nt, Human
ggaaaggaugucucugggg

SEQ ID NO: 183976 - RNA, 32 nt, Human
ggaaaggcagaagcugggagccucccuucccu

SEQ ID NO: 183977 - RNA, 32 nt, Human
ggaaaggcagcccccucagucucccuccuccu

SEQ ID NO: 183978 - RNA, 32 nt, Human
ggaaaggcaucagcagggugcuuucaaccaca

SEQ ID NO: 183979 - RNA, 26 nt, Human
ggaaaggcauccgcagcccucaccaa

SEQ ID NO: 183980 - RNA, 32 nt, Human
ggaaaggccagcagccuuccaguggcuucucc

SEQ ID NO: 183981 - RNA, 32 nt, Human
ggaaaggccauaaacaaagacagacuuguagu

SEQ ID NO: 183982 - RNA, 32 nt, Human
ggaaaggcccucuccaaucauuuuggaagagc

SEQ ID NO: 183983 - RNA, 32 nt, Human
ggaaaggcucaagugauccuccuguaucaccc

SEQ ID NO: 183984 - RNA, 32 nt, Human
ggaaaggcugggcuggaccugcucugagaggc

SEQ ID NO: 183985 - RNA, 32 nt, Human
ggaaaggcugguuccuuagccuccugguuugu

SEQ ID NO: 183986 - RNA, 32 nt, Human
ggaaaggcuguaagccugagauuguggggaau

SEQ ID NO: 183987 - RNA, 32 nt, Human
ggaaaggcuuuuauucucccacgucauuucaa

SEQ ID NO: 183988 - RNA, 32 nt, Human
ggaaagggaaauugcugucucucugaacaaaa

SEQ ID NO: 183989 - RNA, 32 nt, Human
ggaaagggaagcaggguaggaguccuucugag

SEQ ID NO: 183990 - RNA, 32 nt, Human
ggaaagggaaggguugggggauggauuuaggc

SEQ ID NO: 183991 - RNA, 32 nt, Human
ggaaagggagaagggugguaaauauuuucaaa

SEQ ID NO: 183992 - RNA, 32 nt, Human
ggaaagggagacaaagacuggcuucuggacuu

SEQ ID NO: 183993 - RNA, 32 nt, Human
ggaaagggagagaagagaugucugaggaaggu

SEQ ID NO: 183994 - RNA, 32 nt, Human
ggaaagggaggcacugccauuuggagacauuc

SEQ ID NO: 183995 - RNA, 32 nt, Human
ggaaagggagugagaggaggcucaggccaggg

SEQ ID NO: 183996 - RNA, 32 nt, Human
ggaaagggaugggucauagccauggagacaug

SEQ ID NO: 183997 - RNA, 32 nt, Human
ggaaagggcagggcaugcaaauucgaaaugaa

SEQ ID NO: 183998 - RNA, 32 nt, Human
ggaaagggccaccacaccacacccaagcccau

SEQ ID NO: 183999 - RNA, 32 nt, Human
ggaaagggccuccagccucuacagcuucaagg

SEQ ID NO: 184000 - RNA, 32 nt, Human
ggaaagggcuacaccuccugcaggaaggggug

SEQ ID NO: 184001 - RNA, 32 nt, Human
ggaaaggggaaaucucacagggcagaagaaau

SEQ ID NO: 184002 - RNA, 32 nt, Human
ggaaaggggacaaggaaggaaaagaaagaaga

SEQ ID NO: 184003 - RNA, 32 nt, Human
ggaaaggggacugugcccuggaggcucacuuc

SEQ ID NO: 184004 - RNA, 32 nt, Human
ggaaaggggagagagaagcaguagauacacuc

SEQ ID NO: 184005 - RNA, 32 nt, Human
ggaaaggggaggaggaaggaaaugauauggua

SEQ ID NO: 184006 - RNA, 32 nt, Human
ggaaaggggauaccuucccacucagcacugcu

SEQ ID NO: 184007 - RNA, 32 nt, Human
ggaaaggggccugggcucuucauuuaaaggua

SEQ ID NO: 184008 - RNA, 32 nt, Human
ggaaaggggcugucccagcccaagaaggcagu

SEQ ID NO: 184009 - RNA, 32 nt, Human
ggaaagggggcgggcccuuuucacaacaggcu

SEQ ID NO: 184010 - RNA, 32 nt, Human
ggaaagggggugggacagggacucggggcugg

SEQ ID NO: 184011 - RNA, 32 nt, Human
ggaaaggguaaucuuuucaaugaaugaugugg

SEQ ID NO: 184012 - RNA, 32 nt, Human
ggaaaggguuauaaugucugugguguacaagu

SEQ ID NO: 184013 - RNA, 32 nt, Human
ggaaagguagcauaggauagaugaagaugaag

SEQ ID NO: 184014 - RNA, 32 nt, Human
ggaaagguauccaccuuucugaaucagacaca

SEQ ID NO: 184015 - RNA, 32 nt, Human
ggaaaggugcuccugcccacacccagcaugga

SEQ ID NO: 184016 - RNA, 32 nt, Human
ggaaagguugaaaugacuccguuuccuuauaa

SEQ ID NO: 184017 - RNA, 32 nt, Human
ggaaagguugaauuaauuccugggcauggacu

SEQ ID NO: 184018 - RNA, 32 nt, Human
ggaaagguugcauugguugaaaccacugagga

SEQ ID NO: 184019 - RNA, 32 nt, Human
ggaaaguaaggaguuaggcauuaccuucuggg

SEQ ID NO: 184020 - RNA, 22 nt, Human
ggaaaguaauuugagaacuuua

SEQ ID NO: 184021 - RNA, 32 nt, Human
ggaaaguaguuaagaaaucaagaaaagugucu

SEQ ID NO: 184022 - RNA, 32 nt, Human
ggaaaguaucagugagcuugaagacuggcuau

SEQ ID NO: 184023 - RNA, 32 nt, Human
ggaaaguauucucuuuucaagaaguucuuuga

SEQ ID NO: 184024 - RNA, 32 nt, Human
ggaaagucacccauaaggauggcaaugccagu

SEQ ID NO: 184025 - RNA, 32 nt, Human
ggaaagucagccacugugucuuaugaggaauu

SEQ ID NO: 184026 - RNA, 32 nt, Human
ggaaagucagcuuucagagccagugaaggagc

SEQ ID NO: 184027 - RNA, 32 nt, Human
ggaaagucauagugccuugggucagagaagcu

SEQ ID NO: 184028 - RNA, 32 nt, Human
ggaaagucaucuaugaauucaucaugaaagac

SEQ ID NO: 184029 - RNA, 32 nt, Human
ggaaaguccucagaaagggaaugguauaucaa

SEQ ID NO: 184030 - RNA, 32 nt, Human
ggaaaguccuccuccagcuccaccucccuccc

SEQ ID NO: 184031 - RNA, 32 nt, Human
ggaaaguccugaacuccuggcuuuccaggaga

SEQ ID NO: 184032 - RNA, 32 nt, Human
ggaaagucguacuguucacacacacaguuuga

SEQ ID NO: 184033 - RNA, 32 nt, Human
ggaaagucucucuccuuccucauaagacaugc

SEQ ID NO: 184034 - RNA, 32 nt, Human
ggaaagucuuagauuccaguagauggaauugc

SEQ ID NO: 184035 - RNA, 21 nt, Human
ggaaagugagaaaaaccucca

SEQ ID NO: 184036 - RNA, 32 nt, Human
ggaaagugagagcuggauggaggcagacaaga

SEQ ID NO: 184037 - RNA, 25 nt, Human
ggaaagugagaggcguccauuucca

SEQ ID NO: 184038 - RNA, 22 nt, Human
ggaaagugaggauucccugcca

SEQ ID NO: 184039 - RNA, 32 nt, Human
ggaaagugcaagacacuaagucaggacaucug

SEQ ID NO: 184040 - RNA, 32 nt, Human
ggaaaguggccugcucuggcaggugugugcag

SEQ ID NO: 184041 - RNA, 32 nt, Human
ggaaagugggccugggcugggcuggggcuagg

SEQ ID NO: 184042 - RNA, 32 nt, Human
ggaaaguguaugauauaaaggacuuccagaca

SEQ ID NO: 184043 - RNA, 32 nt, Human
ggaaagugucugcaguaggggacccagagucc

SEQ ID NO: 184044 - RNA, 32 nt, Human
ggaaaguuccaagugaggacauggaagaggcc

SEQ ID NO: 184045 - RNA, 32 nt, Human
ggaaaguuccagcaguuucaugagaugcagua

SEQ ID NO: 184046 - RNA, 32 nt, Human
ggaaaguucccaagcccuggcucaugaacuca

SEQ ID NO: 184047 - RNA, 32 nt, Human
ggaaaguucccugauggcugucaacaaagugc

SEQ ID NO: 184048 - RNA, 32 nt, Human
ggaaaguugauuuuuaugauaauauggaaaac

SEQ ID NO: 184049 - RNA, 32 nt, Human
ggaaaguugcccaaggaagggaaguugaguuc

SEQ ID NO: 184050 - RNA, 32 nt, Human
ggaaaguugcccacuuuucucuuucagguuaa

SEQ ID NO: 184051 - RNA, 32 nt, Human
ggaaaguuuuagaggaccuucugcaagguuaa

SEQ ID NO: 184052 - RNA, 32 nt, Human
ggaaauaaaacuuuuaagacacuacuauaagu

SEQ ID NO: 184053 - RNA, 32 nt, Human
ggaaauaaacaaggaaacuaagugcuuggacc

SEQ ID NO: 184054 - RNA, 32 nt, Human
ggaaauaaacacaggcaccaaaccacuauccu

SEQ ID NO: 184055 - RNA, 32 nt, Human
ggaaauaaagagaacugagauggaauucaaga

SEQ ID NO: 184056 - RNA, 32 nt, Human
ggaaauaaaggagaaccuggagaucugggaga

SEQ ID NO: 184057 - RNA, 32 nt, Human
ggaaauaaauccugacagaugugcacagcaua

SEQ ID NO: 184058 - RNA, 32 nt, Human
ggaaauaaauuguuauggaggggcuguuuuug

SEQ ID NO: 184059 - RNA, 32 nt, Human
ggaaauaacagacaacaugagcaauggaggac

SEQ ID NO: 184060 - RNA, 32 nt, Human
ggaaauaagcagcuggucuggaagaaaaggac

SEQ ID NO: 184061 - RNA, 32 nt, Human
ggaaauaaguccuuauugauuggaccgagcca

SEQ ID NO: 184062 - RNA, 32 nt, Human
ggaaauacaagugcucuguaaucacaggcagu

SEQ ID NO: 184063 - RNA, 32 nt, Human
ggaaauagaacagcugggcaaaccccaaacgc

SEQ ID NO: 184064 - RNA, 32 nt, Human
ggaaauagaagagcagaagcaaaagcaauugg

SEQ ID NO: 184065 - RNA, 32 nt, Human
ggaaauagcgcaggacaucacaaggaccaaaa

SEQ ID NO: 184066 - RNA, 32 nt, Human
ggaaauaggaagaggauugccauggccuggcc

SEQ ID NO: 184067 - RNA, 32 nt, Human
ggaaauagggcaccaugguccggugguuugua

SEQ ID NO: 184068 - RNA, 32 nt, Human
ggaaauagugauuuccacagugacuccacucu

SEQ ID NO: 184069 - RNA, 32 nt, Human
ggaaauauagaugucaccuaagugauaguuaa

SEQ ID NO: 184070 - RNA, 32 nt, Human
ggaaauauagccacugccuauaggcucuucag

SEQ ID NO: 184071 - RNA, 32 nt, Human
ggaaauaucugugggcuugugcacggacucaa

SEQ ID NO: 184072 - RNA, 32 nt, Human
ggaaaucaagccugucuuccaguggggcacgg

SEQ ID NO: 184073 - RNA, 32 nt, Human
ggaaaucaaucagcacugggacuggcuggaac

SEQ ID NO: 184074 - RNA, 20 nt, Human
ggaaaucacuggggacagga

SEQ ID NO: 184075 - RNA, 23 nt, Human
ggaaaucagcacuuacauuaaga

SEQ ID NO: 184076 - RNA, 32 nt, Human
ggaaaucaguagaaagcuaaagugauccuaaa

SEQ ID NO: 184077 - RNA, 24 nt, Human
ggaaauccaaacucaccaccauga

SEQ ID NO: 184078 - RNA, 32 nt, Human
ggaaauccagcagggggugggaugugugauuu

SEQ ID NO: 184079 - RNA, 32 nt, Human
ggaaauccgagagugagagagacauccaggcu

SEQ ID NO: 184080 - RNA, 32 nt, Human
ggaaauccuccaccaagcuuccagaacuacag

SEQ ID NO: 184081 - RNA, 32 nt, Human
ggaaauccugggguccuugagacagaggcagg

SEQ ID NO: 184082 - RNA, 32 nt, Human
ggaaauccuggugugcugcagggaucaggcug

SEQ ID NO: 184083 - RNA, 32 nt, Human
ggaaaucuaggacuuccagcuucccucauguc

SEQ ID NO: 184084 - RNA, 32 nt, Human
ggaaaucucaccucugccacccaucuacuugc

SEQ ID NO: 184085 - RNA, 32 nt, Human
ggaaaucucauuuuggaugccugccuuaugaa

SEQ ID NO: 184086 - RNA, 32 nt, Human
ggaaaucuccuugggccuugugcagcauuugg

SEQ ID NO: 184087 - RNA, 32 nt, Human
ggaaaucucucaucuuguuuuuguuucaugua

SEQ ID NO: 184088 - RNA, 32 nt, Human
ggaaaucucuguuauuaagucauuucaagaug

SEQ ID NO: 184089 - RNA, 32 nt, Human
ggaaaucucuuaccuuucauuaggguuucuuu

SEQ ID NO: 184090 - RNA, 32 nt, Human
ggaaaucugagagcaagaugccagcagauuca

SEQ ID NO: 184091 - RNA, 23 nt, Human
ggaaaucugggggcucccaggaa

SEQ ID NO: 184092 - RNA, 32 nt, Human
ggaaaucuguaacgcagcuucuguaagcaugu

SEQ ID NO: 184093 - RNA, 32 nt, Human
ggaaaugaaacagagacagagggaagccugag

SEQ ID NO: 184094 - RNA, 32 nt, Human
ggaaaugaaaggaagccugaagacugacuacc

SEQ ID NO: 184095 - RNA, 32 nt, Human
ggaaaugaaagugccaagaaagguguuccauu

SEQ ID NO: 184096 - RNA, 32 nt, Human
ggaaaugaagacagaaggacuugagaaagcau

SEQ ID NO: 184097 - RNA, 21 nt, Human
ggaaaugaagcuccagccaga

SEQ ID NO: 184098 - RNA, 32 nt, Human
ggaaaugaauauaaaaugcaucuaaacaugac

SEQ ID NO: 184099 - RNA, 32 nt, Human
ggaaaugacauggcuugauuguucuguuuaaa

SEQ ID NO: 184100 - RNA, 32 nt, Human
ggaaaugagaaggccagcagaaguagauuaaa

SEQ ID NO: 184101 - RNA, 32 nt, Human
ggaaaugagaugguuuggccaugcaccaccuc

SEQ ID NO: 184102 - RNA, 20 nt, Human
ggaaaugaggcuccugagga

SEQ ID NO: 184103 - RNA, 20 nt, Human
ggaaaugaguccccugggaa

SEQ ID NO: 184104 - RNA, 32 nt, Human
ggaaaugaucacuaggcaauuucagccuugca

SEQ ID NO: 184105 - RNA, 26 nt, Human
ggaaaugauguucuggacagaguuuu

SEQ ID NO: 184106 - RNA, 32 nt, Human
ggaaaugcacaagccucuugaugcauaaaaac

SEQ ID NO: 184107 - RNA, 32 nt, Human
ggaaaugcagacgcuuuccuccuucacaauuu

SEQ ID NO: 184108 - RNA, 32 nt, Human
ggaaaugcagagcucagagagacagcaaguca

SEQ ID NO: 184109 - RNA, 32 nt, Human
ggaaaugccugccucuggccuuggcuguaggc

SEQ ID NO: 184110 - RNA, 32 nt, Human
ggaaaugccugcugcccccagugacucuuggu

SEQ ID NO: 184111 - RNA, 32 nt, Human
ggaaaugcgauuuguuuugugccugaacgguc

SEQ ID NO: 184112 - RNA, 32 nt, Human
ggaaaugcgucuauaauacuccugccugagaa

SEQ ID NO: 184113 - RNA, 32 nt, Human
ggaaaugcuaucuuugcucuucuccuacucug

SEQ ID NO: 184114 - RNA, 19 nt, Human
ggaaaugcucuugagcuca

SEQ ID NO: 184115 - RNA, 32 nt, Human
ggaaaugcucuuuaugaaaaugcagcauuucu

SEQ ID NO: 184116 - RNA, 32 nt, Human
ggaaaugcugaccuuuuacauaaaaucaagga

SEQ ID NO: 184117 - RNA, 32 nt, Human
ggaaaugcuggggaggugggggcagaucacau

SEQ ID NO: 184118 - RNA, 27 nt, Human
ggaaauggaacccgcaaagccugcagg

SEQ ID NO: 184119 - RNA, 32 nt, Human
ggaaauggaauagaauugguauaaauucauaa

SEQ ID NO: 184120 - RNA, 32 nt, Human
ggaaauggacugccucucuugagcacuucccu

SEQ ID NO: 184121 - RNA, 32 nt, Human
ggaaauggagggggaagagaggaggggagagg

SEQ ID NO: 184122 - RNA, 32 nt, Human
ggaaauggccaccacagcguccuccuccuccc

SEQ ID NO: 184123 - RNA, 22 nt, Human
ggaaauggcucuggacaugcuc

SEQ ID NO: 184124 - RNA, 32 nt, Human
ggaaauggcugaaguggagagaucgccugagc

SEQ ID NO: 184125 - RNA, 29 nt, Human
ggaaauggcugcuucaucaucauccuccu

SEQ ID NO: 184126 - RNA, 21 nt, Human
ggaaauggcuggacucagaga

SEQ ID NO: 184127 - RNA, 32 nt, Human
ggaaaugggagcauaugcugggaaaugggagc

SEQ ID NO: 184128 - RNA, 32 nt, Human
ggaaaugggagguggaggguuguacugugacc

SEQ ID NO: 184129 - RNA, 24 nt, Human
ggaaauggggaagggggccuggag

SEQ ID NO: 184130 - RNA, 32 nt, Human
ggaaauggggaagggggccuggagaggggagg

SEQ ID NO: 184131 - RNA, 29 nt, Human
ggaaaugguaaagagaaagaggaccggag

SEQ ID NO: 184132 - RNA, 32 nt, Human
ggaaaugguacucauucaucugcacagaauga

SEQ ID NO: 184133 - RNA, 24 nt, Human
ggaaaugguggagaugggccugca

SEQ ID NO: 184134 - RNA, 32 nt, Human
ggaaauguccccgcaguggaugcagcucacau

SEQ ID NO: 184135 - RNA, 32 nt, Human
ggaaaugucugcuuuaugaaacuaugcacaua

SEQ ID NO: 184136 - RNA, 32 nt, Human
ggaaaugugagccccaggcugcagaaggaaga

SEQ ID NO: 184137 - RNA, 32 nt, Human
ggaaauguggcugccccucuccucacuacuuc

SEQ ID NO: 184138 - RNA, 32 nt, Human
ggaaaugugggguagauuugguggugguuaga

SEQ ID NO: 184139 - RNA, 32 nt, Human
ggaaaugugugugggggugugucuguggccag

SEQ ID NO: 184140 - RNA, 32 nt, Human
ggaaauguguuucggcuuggucagggguccac

SEQ ID NO: 184141 - RNA, 32 nt, Human
ggaaauguucucaaggucucaggcuauuuggg

SEQ ID NO: 184142 - RNA, 32 nt, Human
ggaaauguucuuuagaugguggcacauuccuu

SEQ ID NO: 184143 - RNA, 29 nt, Human
ggaaauguugcaggaggagucggaccucu

SEQ ID NO: 184144 - RNA, 32 nt, Human
ggaaauguugcuuucuguacucccucuucccu

SEQ ID NO: 184145 - RNA, 32 nt, Human
ggaaauguuugauaucucagcaauuuugcauu

SEQ ID NO: 184146 - RNA, 21 nt, Human
ggaaauuaaguuucuugcgga

SEQ ID NO: 184147 - RNA, 32 nt, Human
ggaaauuagaauaugaagaacuccuucaaguc

SEQ ID NO: 184148 - RNA, 32 nt, Human
ggaaauuagcuuucaauuuaguauacggaaag

SEQ ID NO: 184149 - RNA, 32 nt, Human
ggaaauucagugugugagucucagcaggaguu

SEQ ID NO: 184150 - RNA, 32 nt, Human
ggaaauuccaccaacauccagaccaaaaagaa

SEQ ID NO: 184151 - RNA, 32 nt, Human
ggaaauuccucuuuuagccucuccuuagaggu

SEQ ID NO: 184152 - RNA, 32 nt, Human
ggaaauuccuucaggugcucucaagcccugcu

SEQ ID NO: 184153 - RNA, 32 nt, Human
ggaaauucuauuuggccacccuuccgcacugg

SEQ ID NO: 184154 - RNA, 32 nt, Human
ggaaauucucuugcccaggcuuuuugcuccuu

SEQ ID NO: 184155 - RNA, 32 nt, Human
ggaaauucugacuggucucagagucuacuuga

SEQ ID NO: 184156 - RNA, 32 nt, Human
ggaaauucuggacuaagacuuaagucucguua

SEQ ID NO: 184157 - RNA, 32 nt, Human
ggaaauucuuccuaguaucuaaccuuggccug

SEQ ID NO: 184158 - RNA, 32 nt, Human
ggaaauugaaaaggaagaaacugauuuagaaa

SEQ ID NO: 184159 - RNA, 21 nt, Human
ggaaauugccuggacaagaga

SEQ ID NO: 184160 - RNA, 32 nt, Human
ggaaauugggcuaugucauugagccacuggag

SEQ ID NO: 184161 - RNA, 23 nt, Human
ggaaauuguagggaagaucgaug

SEQ ID NO: 184162 - RNA, 32 nt, Human
ggaaauuguccaccacuucccaaugauaaugc

SEQ ID NO: 184163 - RNA, 32 nt, Human
ggaaauugucuucuccucagcccguucgcugg

SEQ ID NO: 184164 - RNA, 32 nt, Human
ggaaauugugcuuccgaugggguggggacuga

SEQ ID NO: 184165 - RNA, 32 nt, Human
ggaaauuguggucuccggccugggugagacaa

SEQ ID NO: 184166 - RNA, 32 nt, Human
ggaaauuguguuuuccccauuuauggugcucu

SEQ ID NO: 184167 - RNA, 32 nt, Human
ggaaauuguuugacauaacacaggguucaggg

SEQ ID NO: 184168 - RNA, 32 nt, Human
ggaaauuuauagcaccgaguacccacaucaaa

SEQ ID NO: 184169 - RNA, 32 nt, Human
ggaaauuucaugggauaauuagcaggcugguc

SEQ ID NO: 184170 - RNA, 32 nt, Human
ggaaauuuccucaucauuuucaccauaaaguc

SEQ ID NO: 184171 - RNA, 32 nt, Human
ggaaauuugcagaggggcaggugugugguaaa

SEQ ID NO: 184172 - RNA, 32 nt, Human
ggaaauuugcugagcccccaccagggaaccgg

SEQ ID NO: 184173 - RNA, 32 nt, Human
ggaaauuuggaaacgggacauacacaaaaguu

SEQ ID NO: 184174 - RNA, 23 nt, Human
ggaacaaaaaccaacacauaguu

SEQ ID NO: 184175 - RNA, 32 nt, Human
ggaacaaaaccagcuggauccauccaucaccg

SEQ ID NO: 184176 - RNA, 32 nt, Human
ggaacaaagggagggggaaggggcggcgcggg

SEQ ID NO: 184177 - RNA, 32 nt, Human
ggaacaaccagaggaggaggaggacagaggga

SEQ ID NO: 184178 - RNA, 32 nt, Human
ggaacaacccuugagccucugcagucggaaga

SEQ ID NO: 184179 - RNA, 32 nt, Human
ggaacaacugccuguuuccuccaccuccaccc

SEQ ID NO: 184180 - RNA, 32 nt, Human
ggaacaagaacauaaugggaugguggugcaga

SEQ ID NO: 184181 - RNA, 32 nt, Human
ggaacaagaacccaggcugaucccagacaugc

SEQ ID NO: 184182 - RNA, 32 nt, Human
ggaacaagcaacaaaacuaauccuuagcuauc

SEQ ID NO: 184183 - RNA, 32 nt, Human
ggaacaagcaagaaaaugagccuaaugguggc

SEQ ID NO: 184184 - RNA, 32 nt, Human
ggaacaagcauuggaagagaugaagaccaaac

SEQ ID NO: 184185 - RNA, 32 nt, Human
ggaacaaggaggugggggcaguguggccccuu

SEQ ID NO: 184186 - RNA, 23 nt, Human
ggaacaaggcagaauauaaaaua

SEQ ID NO: 184187 - RNA, 32 nt, Human
ggaacaaggcaggccgccuguggaggaccuca

SEQ ID NO: 184188 - RNA, 32 nt, Human
ggaacaagggagugagccuuauaagaggacgu

SEQ ID NO: 184189 - RNA, 19 nt, Human
ggaacaagggucucagaga

SEQ ID NO: 184190 - RNA, 32 nt, Human
ggaacaaggugaggaaaaagagacugacccca

SEQ ID NO: 184191 - RNA, 32 nt, Human
ggaacaaguggggcugggaagcugacuucgug

SEQ ID NO: 184192 - RNA, 32 nt, Human
ggaacaaugauagucacauuagagaacaagaa

SEQ ID NO: 184193 - RNA, 32 nt, Human
ggaacacaaagaagcuuagaagaggguccaga

SEQ ID NO: 184194 - RNA, 31 nt, Human
ggaacacaagugucuucucauaagauuuaua

SEQ ID NO: 184195 - RNA, 32 nt, Human
ggaacacacagaaccaaaccagguguguucua

SEQ ID NO: 184196 - RNA, 32 nt, Human
ggaacacagaagcuuuauuuuauaguggaguc

SEQ ID NO: 184197 - RNA, 23 nt, Human
ggaacacagaugaagcagucuua

SEQ ID NO: 184198 - RNA, 32 nt, Human
ggaacacagauggagggcaagagggacagaug

SEQ ID NO: 184199 - RNA, 32 nt, Human
ggaacacagcagaagaggaggugguggaggag

SEQ ID NO: 184200 - RNA, 32 nt, Human
ggaacacagucugggagcccagagcucuggga

SEQ ID NO: 184201 - RNA, 32 nt, Human
ggaacaccaccuggucccuggcuugucccuca

SEQ ID NO: 184202 - RNA, 32 nt, Human
ggaacaccacugcuuuucagcauuguacugga

SEQ ID NO: 184203 - RNA, 32 nt, Human
ggaacaccagugcuaagguagagcuccccagc

SEQ ID NO: 184204 - RNA, 32 nt, Human
ggaacacccuggaagccgagaaauggacccag

SEQ ID NO: 184205 - RNA, 32 nt, Human
ggaacacuagaauccccaccucagcgugagga

SEQ ID NO: 184206 - RNA, 32 nt, Human
ggaacacucagagaaaggggagaucugggccu

SEQ ID NO: 184207 - RNA, 32 nt, Human
ggaacacugagaaagaggcagggaccuaaagg

SEQ ID NO: 184208 - RNA, 19 nt, Human
ggaacacuggaacauucca

SEQ ID NO: 184209 - RNA, 32 nt, Human
ggaacacuggcugccauuucaucacagucaac

SEQ ID NO: 184210 - RNA, 32 nt, Human
ggaacacugggcugagcacaugacagggagcc

SEQ ID NO: 184211 - RNA, 32 nt, Human
ggaacacugucaauggacugcaccuugugaag

SEQ ID NO: 184212 - RNA, 32 nt, Human
ggaacacuuagugacuaucacagccgaggccg

SEQ ID NO: 184213 - RNA, 32 nt, Human
ggaacacuucugaaccugcauuuuuaucugga

SEQ ID NO: 184214 - RNA, 32 nt, Human
ggaacacuugugagcacacagagcagcaucug

SEQ ID NO: 184215 - RNA, 32 nt, Human
ggaacagaacagaucugcagggccagugagug

SEQ ID NO: 184216 - RNA, 32 nt, Human
ggaacagaacagcuccaggguauaaggagggu

SEQ ID NO: 184217 - RNA, 32 nt, Human
ggaacagaacauggguuugaggucagguggcu

SEQ ID NO: 184218 - RNA, 26 nt, Human
ggaacagaagaaggccauggagcagg

SEQ ID NO: 184219 - RNA, 32 nt, Human
ggaacagaagugaggaugagacccagccccuu

SEQ ID NO: 184220 - RNA, 32 nt, Human
ggaacagacccaaaucugaaccucuuuugagu

SEQ ID NO: 184221 - RNA, 20 nt, Human
ggaacagagaagagagcaga

SEQ ID NO: 184222 - RNA, 18 nt, Human
ggaacagagaagccuggg

SEQ ID NO: 184223 - RNA, 32 nt, Human
ggaacagagaaguguggggaagagauaggaac

SEQ ID NO: 184224 - RNA, 32 nt, Human
ggaacagagaugccaguugaggggagggcauu

SEQ ID NO: 184225 - RNA, 19 nt, Human
ggaacagaggagcuugggg

SEQ ID NO: 184226 - RNA, 32 nt, Human
ggaacagauccaggugugagagcucuugaguc

SEQ ID NO: 184227 - RNA, 32 nt, Human
ggaacagcaacgcgggcuccagccaggcucuc

SEQ ID NO: 184228 - RNA, 32 nt, Human
ggaacagcacagcaugcugggcucuggauuua

SEQ ID NO: 184229 - RNA, 32 nt, Human
ggaacagcagagacacagagggcagucaugag

SEQ ID NO: 184230 - RNA, 32 nt, Human
ggaacagcagaggcggcggcacuggcuggacc

SEQ ID NO: 184231 - RNA, 32 nt, Human
ggaacagcagagguggaggcaagcagugacuc

SEQ ID NO: 184232 - RNA, 18 nt, Human
ggaacagcagcucuggga

SEQ ID NO: 184233 - RNA, 32 nt, Human
ggaacagcaggccgugcuuaacaggaaaggac

SEQ ID NO: 184234 - RNA, 32 nt, Human
ggaacagcaggugggaggggugggacagaggu

SEQ ID NO: 184235 - RNA, 32 nt, Human
ggaacagcauugugaucaaagacucaacuuua

SEQ ID NO: 184236 - RNA, 32 nt, Human
ggaacagccaauuuggaaaauccuucuaaggc

SEQ ID NO: 184237 - RNA, 32 nt, Human
ggaacagccacuccccuccacucucuaccaga

SEQ ID NO: 184238 - RNA, 32 nt, Human
ggaacagcucacuaagucaguccuuccuuagc

SEQ ID NO: 184239 - RNA, 32 nt, Human
ggaacagcucuccagccccaggacuucugcug

SEQ ID NO: 184240 - RNA, 32 nt, Human
ggaacaggaacagcuggaguggaguugaggac

SEQ ID NO: 184241 - RNA, 32 nt, Human
ggaacaggagaaaggagaagggagugauagua

SEQ ID NO: 184242 - RNA, 32 nt, Human
ggaacaggaucaucugucucagcggugggcag

SEQ ID NO: 184243 - RNA, 32 nt, Human
ggaacaggauucauccuguguaggggaucagg

SEQ ID NO: 184244 - RNA, 32 nt, Human
ggaacaggauuccaggaccccuuucuuguugu

SEQ ID NO: 184245 - RNA, 32 nt, Human
ggaacaggcccaugggaagaaggggguuuuaa

SEQ ID NO: 184246 - RNA, 17 nt, Human
ggaacaggcguuucuga

SEQ ID NO: 184247 - RNA, 32 nt, Human
ggaacaggcuccagggcaggaaccugggccca

SEQ ID NO: 184248 - RNA, 32 nt, Human
ggaacagggagcggccaggaugcugaaucugc

SEQ ID NO: 184249 - RNA, 32 nt, Human
ggaacagggcauggcacaggcacacaggaccc

SEQ ID NO: 184250 - RNA, 17 nt, Human
ggaacagggcucagagg

SEQ ID NO: 184251 - RNA, 32 nt, Human
ggaacaggggaggaagagggauggggcugcaa

SEQ ID NO: 184252 - RNA, 32 nt, Human
ggaacagguaguaucuauuuuucuccauuauu

SEQ ID NO: 184253 - RNA, 32 nt, Human
ggaacagguguggcagcaccugcccuucaccu

SEQ ID NO: 184254 - RNA, 32 nt, Human
ggaacaguagagaccuagucugccuucuuuca

SEQ ID NO: 184255 - RNA, 31 nt, Human
ggaacaguagagagagacaggccugaugcca

SEQ ID NO: 184256 - RNA, 32 nt, Human
ggaacaguaggagcuggagugggaucuccaag

SEQ ID NO: 184257 - RNA, 32 nt, Human
ggaacaguggauagcucauacuuuaugguggu

SEQ ID NO: 184258 - RNA, 22 nt, Human
ggaacaguggauguccacccca

SEQ ID NO: 184259 - RNA, 32 nt, Human
ggaacaguggcugugcuggaccccagaggcag

SEQ ID NO: 184260 - RNA, 31 nt, Human
ggaacaguggggaacugucagaugcucgaac

SEQ ID NO: 184261 - RNA, 32 nt, Human
ggaacaguggggacaggaggaggcaggucuca

SEQ ID NO: 184262 - RNA, 32 nt, Human
ggaacagugguggccagcuuggaggauggaca

SEQ ID NO: 184263 - RNA, 32 nt, Human
ggaacagugugguuugggaaagauggauaaac

SEQ ID NO: 184264 - RNA, 32 nt, Human
ggaacaguguguccucugcccccugggccagg

SEQ ID NO: 184265 - RNA, 32 nt, Human
ggaacaguuauugucugugccaugaccuucau

SEQ ID NO: 184266 - RNA, 32 nt, Human
ggaacaguucaccuaaaugacacugaguuggg

SEQ ID NO: 184267 - RNA, 18 nt, Human
ggaacauaaaggguuuca

SEQ ID NO: 184268 - RNA, 32 nt, Human
ggaacauaccacugccucuagacuaaggccag

SEQ ID NO: 184269 - RNA, 32 nt, Human
ggaacauagaaaacacaaaaacucaccuuaaa

SEQ ID NO: 184270 - RNA, 32 nt, Human
ggaacaucacacuccggggacuguuguggggu

SEQ ID NO: 184271 - RNA, 32 nt, Human
ggaacaucacacucuggggacuguuguggggg

SEQ ID NO: 184272 - RNA, 32 nt, Human
ggaacaucacacucuggggacuguuguggggu

SEQ ID NO: 184273 - RNA, 32 nt, Human
ggaacaucacacucuggggccuguuguggggu

SEQ ID NO: 184274 - RNA, 32 nt, Human
ggaacaucagagccacagggccuggacgcugc

SEQ ID NO: 184275 - RNA, 32 nt, Human
ggaacaucccagagagagcugggcccauccuc

SEQ ID NO: 184276 - RNA, 32 nt, Human
ggaacaucccgagggucacagggacagugcag

SEQ ID NO: 184277 - RNA, 32 nt, Human
ggaacaucggccgccuccagcucccggcgcgg

SEQ ID NO: 184278 - RNA, 32 nt, Human
ggaacaucugcaggaggcccaacuagugaaag

SEQ ID NO: 184279 - RNA, 32 nt, Human
ggaacaugagccuggagacccauggcagucca

SEQ ID NO: 184280 - RNA, 32 nt, Human
ggaacaugcccugucugugcugucccuccugu

SEQ ID NO: 184281 - RNA, 30 nt, Human
ggaacaugccgcgcuccuuccuggugaaaa

SEQ ID NO: 184282 - RNA, 32 nt, Human
ggaacaugccuguggucccagcuucuugggag

SEQ ID NO: 184283 - RNA, 32 nt, Human
ggaacauggaugcucccugcucugaacaucca

SEQ ID NO: 184284 - RNA, 32 nt, Human
ggaacauggugacgaguacaagagaccaaagc

SEQ ID NO: 184285 - RNA, 32 nt, Human
ggaacaugucaggugcuuacugggugagaccc

SEQ ID NO: 184286 - RNA, 32 nt, Human
ggaacauguggcugagcagacuuuuguauaau

SEQ ID NO: 184287 - RNA, 32 nt, Human
ggaacauguucuucaccaccuuuuggagauuu

SEQ ID NO: 184288 - RNA, 32 nt, Human
ggaacauuccuuggaccagguguuguauugca

SEQ ID NO: 184289 - RNA, 32 nt, Human
ggaacauuucaggccuggcacgaaaugcaguu

SEQ ID NO: 184290 - RNA, 32 nt, Human
ggaacauuugacuuccuugggacucuuaagug

SEQ ID NO: 184291 - RNA, 32 nt, Human
ggaacauuuguuuucuccaauuuccuuucaga

SEQ ID NO: 184292 - RNA, 32 nt, Human
ggaaccaaagagaacugucucaagagaagauu

SEQ ID NO: 184293 - RNA, 32 nt, Human
ggaaccaaagucacaaaagcccuucagaaaaa

SEQ ID NO: 184294 - RNA, 32 nt, Human
ggaaccaacccugaucuaaccagcacacuaaa

SEQ ID NO: 184295 - RNA, 32 nt, Human
ggaaccaagcuauuccuuucccuuccucuucg

SEQ ID NO: 184296 - RNA, 22 nt, Human
ggaaccaauauuucagcauucu

SEQ ID NO: 184297 - RNA, 32 nt, Human
ggaaccaaugugcccugguccacugggccgug

SEQ ID NO: 184298 - RNA, 32 nt, Human
ggaaccacacacugcuaugacauauccacccc

SEQ ID NO: 184299 - RNA, 32 nt, Human
ggaaccacagaacaucagcacuggaauggcca

SEQ ID NO: 184300 - RNA, 32 nt, Human
ggaaccacagcccagaugugcaggaggacggu

SEQ ID NO: 184301 - RNA, 18 nt, Human
ggaaccacagcucuggga

SEQ ID NO: 184302 - RNA, 32 nt, Human
ggaaccacaggcuggggcacuccggagucagg

SEQ ID NO: 184303 - RNA, 32 nt, Human
ggaaccacaggugcuucccguccuggucacaa

SEQ ID NO: 184304 - RNA, 23 nt, Human
ggaaccacaugaaucccuuggca

SEQ ID NO: 184305 - RNA, 32 nt, Human
ggaaccacauuuucaauccuccuucacugucu

SEQ ID NO: 184306 - RNA, 32 nt, Human
ggaaccaccuucucuacucucacugacacccc

SEQ ID NO: 184307 - RNA, 32 nt, Human
ggaaccacuccugguucagagaggcagcuccc

SEQ ID NO: 184308 - RNA, 32 nt, Human
ggaaccagacacagccugccucucaauccuca

SEQ ID NO: 184309 - RNA, 32 nt, Human
ggaaccagaccaggcagaucgggagcggugcc

SEQ ID NO: 184310 - RNA, 32 nt, Human
ggaaccagaccgcaggcugugccaccauuaaa

SEQ ID NO: 184311 - RNA, 32 nt, Human
ggaaccagaccucaucagcccaacaucaaaga

SEQ ID NO: 184312 - RNA, 32 nt, Human
ggaaccagagggcagaaggcgggaccuaagga

SEQ ID NO: 184313 - RNA, 32 nt, Human
ggaaccagaggguggagguugguguggaagag

SEQ ID NO: 184314 - RNA, 32 nt, Human
ggaaccagcccagcuuaauuuguacuccucca

SEQ ID NO: 184315 - RNA, 32 nt, Human
ggaaccagccgaguggcugagagcagauaaau

SEQ ID NO: 184316 - RNA, 32 nt, Human
ggaaccagccugcacgcgcuggcuccggguga

SEQ ID NO: 184317 - RNA, 32 nt, Human
ggaaccaggagaaaggggugaggccucccgcu

SEQ ID NO: 184318 - RNA, 23 nt, Human
ggaaccaggaggaaguugccgcc

SEQ ID NO: 184319 - RNA, 32 nt, Human
ggaaccaggaggcuugggaacagggaaagagg

SEQ ID NO: 184320 - RNA, 32 nt, Human
ggaaccaggaguugaagaccugggucugaggc

SEQ ID NO: 184321 - RNA, 32 nt, Human
ggaaccaggcuacagagcaggaguugccaaaa

SEQ ID NO: 184322 - RNA, 31 nt, Human
ggaaccagggagagagaggaagaagggacuc

SEQ ID NO: 184323 - RNA, 32 nt, Human
ggaaccagggagguagagguugcagugagcug

SEQ ID NO: 184324 - RNA, 32 nt, Human
ggaaccagugcuuugcuggaucacagcagaau

SEQ ID NO: 184325 - RNA, 32 nt, Human
ggaaccagugggagacuuaagagcaaggaaca

SEQ ID NO: 184326 - RNA, 32 nt, Human
ggaaccauaccccagcccauggucccaugacu

SEQ ID NO: 184327 - RNA, 32 nt, Human
ggaaccauaucuuuacaauagacucuccaccc

SEQ ID NO: 184328 - RNA, 32 nt, Human
ggaaccaucaaauuguucacuuacaaugggua

SEQ ID NO: 184329 - RNA, 32 nt, Human
ggaaccaucuggugguauuccagcacauuguu

SEQ ID NO: 184330 - RNA, 21 nt, Human
ggaaccauggaaucaaacaca

SEQ ID NO: 184331 - RNA, 31 nt, Human
ggaaccauggugcaaaagaagaaguucuguc

SEQ ID NO: 184332 - RNA, 19 nt, Human
ggaaccauuccccuucuua

SEQ ID NO: 184333 - RNA, 32 nt, Human
ggaacccaaguuugaacccaacuugugaugga

SEQ ID NO: 184334 - RNA, 19 nt, Human
ggaacccacagcgcaaucc

SEQ ID NO: 184335 - RNA, 32 nt, Human
ggaacccaccaggacagcagucucagugcugu

SEQ ID NO: 184336 - RNA, 32 nt, Human
ggaacccagaagguggagguugcagugagccg

SEQ ID NO: 184337 - RNA, 32 nt, Human
ggaacccagccuugccaacggagcuggcggag

SEQ ID NO: 184338 - RNA, 32 nt, Human
ggaacccagcucccaucugcugcccauggaug

SEQ ID NO: 184339 - RNA, 32 nt, Human
ggaacccaggagacugcugugugaccucagac

SEQ ID NO: 184340 - RNA, 32 nt, Human
ggaacccaggaggcaaagguugcagugagcca

SEQ ID NO: 184341 - RNA, 32 nt, Human
ggaacccaggaggcagaggucgcagugagucg

SEQ ID NO: 184342 - RNA, 32 nt, Human
ggaacccaggaggcagagguugcagugagcug

SEQ ID NO: 184343 - RNA, 32 nt, Human
ggaacccaggagguggagguugcagugagcug

SEQ ID NO: 184344 - RNA, 32 nt, Human
ggaacccaggcggagacccgaggcucucgcug

SEQ ID NO: 184345 - RNA, 32 nt, Human
ggaacccagggacuucagaagggcugguuugu

SEQ ID NO: 184346 - RNA, 32 nt, Human
ggaccggaaguggcucgcggaggcucagaagc

SEQ ID NO: 184347 - RNA, 32 nt, Human
ggaccggacgcaggcggcagauuugcagcccg

SEQ ID NO: 184348 - RNA, 32 nt, Human
ggaccggacgccugugcacccccagcccugcc

SEQ ID NO: 184349 - RNA, 32 nt, Human
ggaccggagcugcucccggaacuggcaggacu

SEQ ID NO: 184350 - RNA, 32 nt, Human
ggaccggcaccacuggaaaggagucugguugg

SEQ ID NO: 184351 - RNA, 32 nt, Human
ggaccggcagagggaggaagaggaagacaaga

SEQ ID NO: 184352 - RNA, 22 nt, Human
ggaccggccaacugcccuggag

SEQ ID NO: 184353 - RNA, 32 nt, Human
ggaccggccaaggacacuccuggcauugguua

SEQ ID NO: 184354 - RNA, 21 nt, Human
ggaccggcccccuuccugggg

SEQ ID NO: 184355 - RNA, 32 nt, Human
ggaccggccccugccccagccuccgcagccgc

SEQ ID NO: 184356 - RNA, 20 nt, Human
ggaccggcgcggcggggcgg

SEQ ID NO: 184357 - RNA, 32 nt, Human
ggaccggcuucugggcggcugaaggggcaagg

SEQ ID NO: 184358 - RNA, 32 nt, Human
ggaccgggacagaaagacuuacaugguccuca

SEQ ID NO: 184359 - RNA, 32 nt, Human
ggaccgggagagagggggcgcggaaggaagga

SEQ ID NO: 184360 - RNA, 32 nt, Human
ggaccgggaggcaguggcuuggagaggcagcu

SEQ ID NO: 184361 - RNA, 24 nt, Human
ggaccgggauuuucuacccagaga

SEQ ID NO: 184362 - RNA, 20 nt, Human
ggaccgggcagccccucucc

SEQ ID NO: 184363 - RNA, 24 nt, Human
ggaccgggcgaugcgcuuuagaga

SEQ ID NO: 184364 - RNA, 32 nt, Human
ggaccgggcggagaaaggcaagagaugggggu

SEQ ID NO: 184365 - RNA, 23 nt, Human
ggaccgggcggcugaccgagggg

SEQ ID NO: 184366 - RNA, 32 nt, Human
ggaccggggaucgggaccugaccuggggcugg

SEQ ID NO: 184367 - RNA, 20 nt, Human
ggaccggggcagccccugcc

SEQ ID NO: 184368 - RNA, 32 nt, Human
ggaccgggggaccccagagggaggccuaggag

SEQ ID NO: 184369 - RNA, 32 nt, Human
ggaccggucacuguccagccuggagggaggca

SEQ ID NO: 184370 - RNA, 23 nt, Human
ggaccggugaacaccugauucca

SEQ ID NO: 184371 - RNA, 16 nt, Human
ggaccgguggugggaa

SEQ ID NO: 184372 - RNA, 32 nt, Human
ggaccguauuuauacagaacugaagggaauau

SEQ ID NO: 184373 - RNA, 32 nt, Human
ggaccgucaucagcacauucccuagugagccu

SEQ ID NO: 184374 - RNA, 32 nt, Human
ggaccguccucuuccuugucuuggccacccaa

SEQ ID NO: 184375 - RNA, 32 nt, Human
ggaccgugaagaaaucaagccugugauggcac

SEQ ID NO: 184376 - RNA, 32 nt, Human
ggaccgugcagcuacgggguucuuggagaguc

SEQ ID NO: 184377 - RNA, 31 nt, Human
ggaccgugcgcucucccuuccugagcaccca

SEQ ID NO: 184378 - RNA, 32 nt, Human
ggaccguguuucccugcaccagcuccacgcug

SEQ ID NO: 184379 - RNA, 32 nt, Human
ggaccuaagaaagaaggggaguuuucugacaa

SEQ ID NO: 184380 - RNA, 21 nt, Human
ggaccuacccaggucuccacc

SEQ ID NO: 184381 - RNA, 32 nt, Human
ggaccuaggagguggagguugcagugagcuga

SEQ ID NO: 184382 - RNA, 32 nt, Human
ggaccuaggccuggcccuccgccugccuggag

SEQ ID NO: 184383 - RNA, 32 nt, Human
ggaccuaguaaacuagucaguguuggaaacgg

SEQ ID NO: 184384 - RNA, 32 nt, Human
ggaccuauacugaccucuuccccagccauuua

SEQ ID NO: 184385 - RNA, 32 nt, Human
ggaccuaugcacuuuauuucugaccccguggc

SEQ ID NO: 184386 - RNA, 32 nt, Human
ggaccucaaaauacaaaauuagcagggccuca

SEQ ID NO: 184387 - RNA, 32 nt, Human
ggaccucaacgggcaaaguugugcacacuaaa

SEQ ID NO: 184388 - RNA, 32 nt, Human
ggaccucaagcagacuuccuagagacuuguuu

SEQ ID NO: 184389 - RNA, 32 nt, Human
ggaccucacccaggauggacugauggaccugg

SEQ ID NO: 184390 - RNA, 32 nt, Human
ggaccucagagcccacucuccuuggcacccug

SEQ ID NO: 184391 - RNA, 32 nt, Human
ggaccucagauguccagagacugaucuugaau

SEQ ID NO: 184392 - RNA, 32 nt, Human
ggaccucagcaacaaggcugugccugagccca

SEQ ID NO: 184393 - RNA, 32 nt, Human
ggaccucagcaacuauggccuccugcccagac

SEQ ID NO: 184394 - RNA, 32 nt, Human
ggaccucagcgcugaagcagaaguccccggag

SEQ ID NO: 184395 - RNA, 32 nt, Human
ggaccucaggaauccggaaaagacugagaagc

SEQ ID NO: 184396 - RNA, 32 nt, Human
ggaccucaggagagaugcuacucuccauaaag

SEQ ID NO: 184397 - RNA, 32 nt, Human
ggaccuccaaaaacauagaggcaucaccugac

SEQ ID NO: 184398 - RNA, 20 nt, Human
ggaccuccaaccugcuggug

SEQ ID NO: 184399 - RNA, 21 nt, Human
ggaccuccaaggaggcugcac

SEQ ID NO: 184400 - RNA, 32 nt, Human
ggaccuccaggaugaggcagaggcaugaugcu

SEQ ID NO: 184401 - RNA, 26 nt, Human
ggaccucccaccuucaggucugcauc

SEQ ID NO: 184402 - RNA, 21 nt, Human
ggaccucccccacccuucuca

SEQ ID NO: 184403 - RNA, 22 nt, Human
ggaccuccuaggacugggccuu

SEQ ID NO: 184404 - RNA, 32 nt, Human
ggaccuccucagcauggcccaagccuugcaug

SEQ ID NO: 184405 - RNA, 32 nt, Human
ggaccuccuccaggacccugcggggcugggua

SEQ ID NO: 184406 - RNA, 32 nt, Human
ggaccuccuccaggauacagcacuggaguugg

SEQ ID NO: 184407 - RNA, 32 nt, Human
ggaccuccuggugucugccucucggagucugu

SEQ ID NO: 184408 - RNA, 32 nt, Human
ggaccucgaacaggggcggcugccucacuccc

SEQ ID NO: 184409 - RNA, 32 nt, Human
ggaccucgaggccgcugcuggggaggacgcug

SEQ ID NO: 184410 - RNA, 32 nt, Human
ggaccucgcuguguuucacugccuccugccca

SEQ ID NO: 184411 - RNA, 21 nt, Human
ggaccucggaccagagccaug

SEQ ID NO: 184412 - RNA, 32 nt, Human
ggaccucggacugcagggagccagucuucuag

SEQ ID NO: 184413 - RNA, 20 nt, Human
ggaccucggaggggggccgc

SEQ ID NO: 184414 - RNA, 32 nt, Human
ggaccucuccacugccuccuccaccccuguau

SEQ ID NO: 184415 - RNA, 32 nt, Human
ggaccucugacccugagggccgaugaggccag

SEQ ID NO: 184416 - RNA, 32 nt, Human
ggaccucugagcauccacgcaggauggcucuc

SEQ ID NO: 184417 - RNA, 32 nt, Human
ggaccucugccauccagcgccacaaagagaca

SEQ ID NO: 184418 - RNA, 32 nt, Human
ggaccucuuccaucauggaaaggaaagagguu

SEQ ID NO: 184419 - RNA, 32 nt, Human
ggaccucuucuaaaggaugguauaaaaugacu

SEQ ID NO: 184420 - RNA, 32 nt, Human
ggaccugaccucaagccucagcuccaguggga

SEQ ID NO: 184421 - RNA, 32 nt, Human
ggaccugaccucagaggugcaccagugccgcc

SEQ ID NO: 184422 - RNA, 32 nt, Human
ggaccugacuggggaggaagaagaagagaaac

SEQ ID NO: 184423 - RNA, 31 nt, Human
ggaccugagagaccucuucaaucagguggag

SEQ ID NO: 184424 - RNA, 32 nt, Human
ggaccugagccccgcgccugggaugccgggga

SEQ ID NO: 184425 - RNA, 32 nt, Human
ggaccugagccgucuuccccagucuccauaug

SEQ ID NO: 184426 - RNA, 32 nt, Human
ggaccugaggaaccugggcucugcuuccuccg

SEQ ID NO: 184427 - RNA, 32 nt, Human
ggaccugaguagcugggaccacaggcaugcgc

SEQ ID NO: 184428 - RNA, 32 nt, Human
ggaccugaguuuacuuuuuacuuuuggcaggu

SEQ ID NO: 184429 - RNA, 19 nt, Human
ggaccugcagagggggcug

SEQ ID NO: 184430 - RNA, 32 nt, Human
ggaccugcagggaaggugagaccccucaaauc

SEQ ID NO: 184431 - RNA, 32 nt, Human
ggaccugcagggcugaaguucacucaucgacc

SEQ ID NO: 184432 - RNA, 17 nt, Human
ggaccugcagguggcug

SEQ ID NO: 184433 - RNA, 32 nt, Human
ggaccugcauguuaacaaaccccacaucugug

SEQ ID NO: 184434 - RNA, 32 nt, Human
ggaccugccacaggcugggcucuugugcuaga

SEQ ID NO: 184435 - RNA, 32 nt, Human
ggaccugccacccagagccccaugaagcugau

SEQ ID NO: 184436 - RNA, 32 nt, Human
ggaccugccccucuuucuuucccuucacacca

SEQ ID NO: 184437 - RNA, 32 nt, Human
ggaccugccucgagccucaggcugcugaaauc

SEQ ID NO: 184438 - RNA, 23 nt, Human
ggaccugccucugccacccaggg

SEQ ID NO: 184439 - RNA, 32 nt, Human
ggaccugccugggagcuuucucuugcauaccc

SEQ ID NO: 184440 - RNA, 32 nt, Human
ggaccugcgcuccaggguggucucggucccag

SEQ ID NO: 184441 - RNA, 32 nt, Human
ggaccugcuaucuucaucuacaugcaccccuu

SEQ ID NO: 184442 - RNA, 32 nt, Human
ggaccugcucccacaggggccauguccucucu

SEQ ID NO: 184443 - RNA, 32 nt, Human
ggaccugcucuggggcuaccucagggccccac

SEQ ID NO: 184444 - RNA, 32 nt, Human
ggaccugcugaccaacaauagccagacacccc

SEQ ID NO: 184445 - RNA, 21 nt, Human
ggaccugcuggcucuggggua

SEQ ID NO: 184446 - RNA, 32 nt, Human
ggaccugcugucauccccaucuguggccuggg

SEQ ID NO: 184447 - RNA, 32 nt, Human
ggaccugcuugaacuaccagggccacaggagg

SEQ ID NO: 184448 - RNA, 32 nt, Human
ggaccuggacacagugcucccuucuuuaaaaa

SEQ ID NO: 184449 - RNA, 32 nt, Human
ggaccuggacguugccuccagagcaggcacca

SEQ ID NO: 184450 - RNA, 32 nt, Human
ggaccuggacucaguagugguggaauuugacg

SEQ ID NO: 184451 - RNA, 32 nt, Human
ggaccuggaguuggccagucaccaccaccauc

SEQ ID NO: 184452 - RNA, 32 nt, Human
ggaccuggauugaggaggugugcaguucgcug

SEQ ID NO: 184453 - RNA, 32 nt, Human
ggaccuggcaaccacaagacccuccccauaag

SEQ ID NO: 184454 - RNA, 19 nt, Human
ggaccuggccuucugcacg

SEQ ID NO: 184455 - RNA, 32 nt, Human
ggaccuggcggggagagcugccuccacggccg

SEQ ID NO: 184456 - RNA, 32 nt, Human
ggaccuggcuccgaaaugugaugugucuuucc

SEQ ID NO: 184457 - RNA, 32 nt, Human
ggaccugggaaugcacaggacccccugaagca

SEQ ID NO: 184458 - RNA, 32 nt, Human
ggaccugggaggcagagguuucagugagccca

SEQ ID NO: 184459 - RNA, 32 nt, Human
ggaccugggaggcggagcuugcagugagcuga

SEQ ID NO: 184460 - RNA, 32 nt, Human
ggaccugggagguggagguugcagugagcuga

SEQ ID NO: 184461 - RNA, 32 nt, Human
ggaccugggagguggagguugcggugagcuga

SEQ ID NO: 184462 - RNA, 32 nt, Human
ggaccugggcauucagccuccugcucuuaacu

SEQ ID NO: 184463 - RNA, 32 nt, Human
ggaccuggggaaaggagauggagcagcucuug

SEQ ID NO: 184464 - RNA, 32 nt, Human
ggaccuggggagugguuaggcagcaagcuuug

SEQ ID NO: 184465 - RNA, 32 nt, Human
ggaccuggucucaaggcagccccacucgaguc

SEQ ID NO: 184466 - RNA, 32 nt, Human
ggaccuggugcaggaagcuucaucugaagaug

SEQ ID NO: 184467 - RNA, 32 nt, Human
ggaccugguggaggacgccgggccggcccuag

SEQ ID NO: 184468 - RNA, 22 nt, Human
ggaccugguggcccaccggagg

SEQ ID NO: 184469 - RNA, 32 nt, Human
ggaccuguaccgcagccgccugugcugguacg

SEQ ID NO: 184470 - RNA, 32 nt, Human
ggaccuguagccaccugcaccaggagcuggac

SEQ ID NO: 184471 - RNA, 32 nt, Human
ggaccuguauguggggguggucucugguuucg

SEQ ID NO: 184472 - RNA, 32 nt, Human
ggaccuguauuuccaugucaaauguuuucaaa

SEQ ID NO: 184473 - RNA, 32 nt, Human
ggaccugugcaaaugacccuggaguugguuuc

SEQ ID NO: 184474 - RNA, 32 nt, Human
ggaccugugcagacuucuucugggcuuaccca

SEQ ID NO: 184475 - RNA, 32 nt, Human
ggaccugugcaggaucacuggacacaggcugu

SEQ ID NO: 184476 - RNA, 32 nt, Human
ggaccugugcgggcaguggccccggugaccuu

SEQ ID NO: 184477 - RNA, 32 nt, Human
ggaccuguggaggcacugccugccucaccugc

SEQ ID NO: 184478 - RNA, 32 nt, Human
ggaccuguggcagcucacaggcaugaggggug

SEQ ID NO: 184479 - RNA, 32 nt, Human
ggaccugugugugugcaaguuucuaucuucca

SEQ ID NO: 184480 - RNA, 32 nt, Human
ggaccuguuaaacaaucucuggcuauuaaaaa

SEQ ID NO: 184481 - RNA, 32 nt, Human
ggaccuguuccagugggcacuguacuuggauc

SEQ ID NO: 184482 - RNA, 19 nt, Human
ggaccuguuggaaguggga

SEQ ID NO: 184483 - RNA, 32 nt, Human
ggaccuguuuauaaauugaggaauggaugagg

SEQ ID NO: 184484 - RNA, 32 nt, Human
ggaccuguuugccgcccugccccagguugugg

SEQ ID NO: 184485 - RNA, 18 nt, Human
ggaccuguuuugguggga

SEQ ID NO: 184486 - RNA, 32 nt, Human
ggaccuguuuuuaucuaccugugugacuugaa

SEQ ID NO: 184487 - RNA, 32 nt, Human
ggaccuguuuuuccuguuucccgcagaguucc

SEQ ID NO: 184488 - RNA, 31 nt, Human
ggaccuucaauaaacacuuguccagugaaaa

SEQ ID NO: 184489 - RNA, 32 nt, Human
ggaccuucaucacuaccucuggccgcaauucc

SEQ ID NO: 184490 - RNA, 32 nt, Human
ggaccuuccagggcccaugcagggugagggaa

SEQ ID NO: 184491 - RNA, 32 nt, Human
ggaccuucuagacugcucacagggccuuaacu

SEQ ID NO: 184492 - RNA, 32 nt, Human
ggaccuucugacucagaggacaugagauggcc

SEQ ID NO: 184493 - RNA, 32 nt, Human
ggaccuucugcaguggaagugccacauccagu

SEQ ID NO: 184494 - RNA, 32 nt, Human
ggaccuucugcuccgagaaaugcagcugcuca

SEQ ID NO: 184495 - RNA, 32 nt, Human
ggaccuucuggaccaaccgacccugcucccgg

SEQ ID NO: 184496 - RNA, 32 nt, Human
ggaccuucuuucucugucaggcccuugaccug

SEQ ID NO: 184497 - RNA, 25 nt, Human
ggaccuucuuucuguucucuuuacu

SEQ ID NO: 184498 - RNA, 32 nt, Human
ggaccuugaccuucuggugccugccccucccc

SEQ ID NO: 184499 - RNA, 32 nt, Human
ggaccuugaguguggcccucccuuucugggcc

SEQ ID NO: 184500 - RNA, 32 nt, Human
ggaccuugaugugagaggagcagguucaggua

SEQ ID NO: 184501 - RNA, 32 nt, Human
ggaccuugccgccacaccagcccuguccuggg

SEQ ID NO: 184502 - RNA, 31 nt, Human
ggaccuugccucucuggaaucugucaaccca

SEQ ID NO: 184503 - RNA, 32 nt, Human
ggaccuugcuuggacaaaaugccuucaccgcu

SEQ ID NO: 184504 - RNA, 32 nt, Human
ggaccuuggaggagauugccugcugcaccccu

SEQ ID NO: 184505 - RNA, 32 nt, Human
ggaccuuggccuguucauuugcagagaagaua

SEQ ID NO: 184506 - RNA, 32 nt, Human
ggaccuuggcugcuggaggcugcaccuacuga

SEQ ID NO: 184507 - RNA, 32 nt, Human
ggaccuuggcuucugacuuggagaguguacag

SEQ ID NO: 184508 - RNA, 32 nt, Human
ggaccuuggggccacuggcacugucagauagu

SEQ ID NO: 184509 - RNA, 32 nt, Human
ggaccuugucccaggcugggcagaggucagga

SEQ ID NO: 184510 - RNA, 32 nt, Human
ggaccuuuccaucucagacuggcuggccaggg

SEQ ID NO: 184511 - RNA, 32 nt, Human
ggaccuuucucaggaucuguguucacacagcc

SEQ ID NO: 184512 - RNA, 32 nt, Human
ggaccuuucucuuccuccuccuccaauucccc

SEQ ID NO: 184513 - RNA, 23 nt, Human
ggaccuuugagaggaggcugugu

SEQ ID NO: 184514 - RNA, 32 nt, Human
ggaccuuuggcaaaugaagguuuacauuucug

SEQ ID NO: 184515 - RNA, 32 nt, Human
ggaccuuugugcugggaacugaaagagugggg

SEQ ID NO: 184516 - RNA, 32 nt, Human
ggaccuuuuccugcccuucuccuuccucugcu

SEQ ID NO: 184517 - RNA, 32 nt, Human
ggaccuuuucuuucuucuugucccacgguugc

SEQ ID NO: 184518 - RNA, 32 nt, Human
ggacgaaaccaacacauauacaaucaucuccc

SEQ ID NO: 184519 - RNA, 32 nt, Human
ggacgaacccaaggacgggggcagugugggga

SEQ ID NO: 184520 - RNA, 32 nt, Human
ggacgaacuucucuuccucacaugagguuacu

SEQ ID NO: 184521 - RNA, 32 nt, Human
ggacgaagaggaggaggaugaggaggacacag

SEQ ID NO: 184522 - RNA, 32 nt, Human
ggacgaagccuccagugaccuggaccuggagc

SEQ ID NO: 184523 - RNA, 32 nt, Human
ggacgaaugcugcuucaugcgacuccauguca

SEQ ID NO: 184524 - RNA, 18 nt, Human
ggacgaauuugcacagug

SEQ ID NO: 184525 - RNA, 24 nt, Human
ggacgacagagcaagacucugucu

SEQ ID NO: 184526 - RNA, 24 nt, Human
ggacgacagagugagacuccaucu

SEQ ID NO: 184527 - RNA, 24 nt, Human
ggacgacagagugagauucugucu

SEQ ID NO: 184528 - RNA, 32 nt, Human
ggacgacagagugagauucugucucaaaauaa

SEQ ID NO: 184529 - RNA, 32 nt, Human
ggacgaccccaggucuccagacaucuagggac

SEQ ID NO: 184530 - RNA, 32 nt, Human
ggacgacccugccuccgucucgugacacaaug

SEQ ID NO: 184531 - RNA, 32 nt, Human
ggacgacccuugcucugaccggaagagaaguc

SEQ ID NO: 184532 - RNA, 32 nt, Human
ggacgaccugcucucuacauugcugggcaccu

SEQ ID NO: 184533 - RNA, 32 nt, Human
ggacgaccugggaaggucacccccaucgccua

SEQ ID NO: 184534 - RNA, 22 nt, Human
ggacgaccuucccugcuccaug

SEQ ID NO: 184535 - RNA, 17 nt, Human
ggacgacggcucuggga

SEQ ID NO: 184536 - RNA, 32 nt, Human
ggacgacucacugcggcugcgccacugggacc

SEQ ID NO: 184537 - RNA, 24 nt, Human
ggacgacugagugagacccugucu

SEQ ID NO: 184538 - RNA, 32 nt, Human
ggacgagacccccauccagccuccagggcauu

SEQ ID NO: 184539 - RNA, 26 nt, Human
ggacgagagcaaggagaggcuaggga

SEQ ID NO: 184540 - RNA, 32 nt, Human
ggacgagcuggcugaccccacugagcgguuca

SEQ ID NO: 184541 - RNA, 18 nt, Human
ggacgaggagcacuguga

SEQ ID NO: 184542 - RNA, 32 nt, Human
ggacgaggaggaggaggaggaagaggggaugg

SEQ ID NO: 184543 - RNA, 32 nt, Human
ggacgaggaggcagcaggagcagugacgguga

SEQ ID NO: 184544 - RNA, 32 nt, Human
ggacgaggcaggcggaucaugaggucaggaga

SEQ ID NO: 184545 - RNA, 32 nt, Human
ggacgaggccuccugcggacaccagcuccucu

SEQ ID NO: 184546 - RNA, 32 nt, Human
ggacgagggcgggaugucugccuccaguucca

SEQ ID NO: 184547 - RNA, 32 nt, Human
ggacgaggggcaggacgugugggcaggagccu

SEQ ID NO: 184548 - RNA, 32 nt, Human
ggacgaguagggccacccagggccaggagaac

SEQ ID NO: 184549 - RNA, 32 nt, Human
ggacgaguucauguccaucacgggcagccugg

SEQ ID NO: 184550 - RNA, 30 nt, Human
ggacgaugacugcaguguauaugaauggag

SEQ ID NO: 184551 - RNA, 32 nt, Human
ggacgaugcaagauuucaucacacuacucaga

SEQ ID NO: 184552 - RNA, 32 nt, Human
ggacgauggaaauccuguaugaauguggaagc

SEQ ID NO: 184553 - RNA, 32 nt, Human
ggacgauggugaucaguaucacucccucugac

SEQ ID NO: 184554 - RNA, 32 nt, Human
ggacgauuagauagguguuuuaaggccugaaa

SEQ ID NO: 184555 - RNA, 32 nt, Human
ggacgcacagcccaggccacagccagggcucc

SEQ ID NO: 184556 - RNA, 32 nt, Human
ggacgcacccuccacagugggaggugguggug

SEQ ID NO: 184557 - RNA, 32 nt, Human
ggacgcaccggccuggcugcagcugggcagca

SEQ ID NO: 184558 - RNA, 32 nt, Human
ggacgcacucgucccugaggccuggguguccc

SEQ ID NO: 184559 - RNA, 32 nt, Human
ggacgcagagggcagaggcccaguggagccuc

SEQ ID NO: 184560 - RNA, 32 nt, Human
ggacgcagaggguccucagagcaggagugaca

SEQ ID NO: 184561 - RNA, 32 nt, Human
ggacgcagccgugguggagguggagaaguuga

SEQ ID NO: 184562 - RNA, 32 nt, Human
ggacgcagcgcagauguuggugaccuucaagg

SEQ ID NO: 184563 - RNA, 32 nt, Human
ggacgcagggcccaagacugggcacaggagug

SEQ ID NO: 184564 - RNA, 32 nt, Human
ggacgcauaagacaccaaaaucccagacacuc

SEQ ID NO: 184565 - RNA, 32 nt, Human
ggacgcauccccgccggcccugaggccagaga

SEQ ID NO: 184566 - RNA, 32 nt, Human
ggacgcaucuggagacaagugagaaacaguag

SEQ ID NO: 184567 - RNA, 32 nt, Human
ggacgcauggaggagaaaaauuugaacgaggc

SEQ ID NO: 184568 - RNA, 32 nt, Human
ggacgccaaagcugaggcaggggagggagcca

SEQ ID NO: 184569 - RNA, 32 nt, Human
ggacgccaagcagacacaccugcccuccccag

SEQ ID NO: 184570 - RNA, 32 nt, Human
ggacgccaagcuccgggaggcugcaguggcgg

SEQ ID NO: 184571 - RNA, 17 nt, Human
ggacgccauccccuccu

SEQ ID NO: 184572 - RNA, 32 nt, Human
ggacgcccaagaucaagaggccagcagauucg

SEQ ID NO: 184573 - RNA, 32 nt, Human
ggacgcccagcacccuggauaggacccaacag

SEQ ID NO: 184574 - RNA, 32 nt, Human
ggacgcccaggccuucucacaugggcaccaug

SEQ ID NO: 184575 - RNA, 16 nt, Human
ggacgccccagcuggc

SEQ ID NO: 184576 - RNA, 20 nt, Human
ggacgccccaggcucugcug

SEQ ID NO: 184577 - RNA, 20 nt, Human
ggacgccccgaggaaggggc

SEQ ID NO: 184578 - RNA, 32 nt, Human
ggacgccccugccucccucugcgggcuccaga

SEQ ID NO: 184579 - RNA, 20 nt, Human
ggacgccccugggugaacug

SEQ ID NO: 184580 - RNA, 19 nt, Human
ggacgcccgcuuccugcug

SEQ ID NO: 184581 - RNA, 32 nt, Human
ggacgcccucacugcaggcuccccuccucggc

SEQ ID NO: 184582 - RNA, 32 nt, Human
ggacgcccuccccucaccgcgcccccgcagac

SEQ ID NO: 184583 - RNA, 32 nt, Human
ggacgcccuccugguuugggaagcugcugcuc

SEQ ID NO: 184584 - RNA, 22 nt, Human
ggacgcccucgcaccccuggac

SEQ ID NO: 184585 - RNA, 32 nt, Human
ggacgcccugcaacccugccaggcugggaagg

SEQ ID NO: 184586 - RNA, 19 nt, Human
ggacgcccugcccucacug

SEQ ID NO: 184587 - RNA, 32 nt, Human
ggacgcccuggaccugcccggcuguuuccgca

SEQ ID NO: 184588 - RNA, 32 nt, Human
ggacgccgaggccuggagugggugguagcccc

SEQ ID NO: 184589 - RNA, 32 nt, Human
ggacgccgccagcgaguccagcagggagucca

SEQ ID NO: 184590 - RNA, 32 nt, Human
ggacgccgccgccguugcugcccggcccggag

SEQ ID NO: 184591 - RNA, 32 nt, Human
ggacgccggccccaggguaacaggaggcgccu

SEQ ID NO: 184592 - RNA, 32 nt, Human
ggacgccggcgccccugugcgagugaccgcca

SEQ ID NO: 184593 - RNA, 19 nt, Human
ggacgccggcggcgcccug

SEQ ID NO: 184594 - RNA, 18 nt, Human
ggacgccggcuccuggag

SEQ ID NO: 184595 - RNA, 32 nt, Human
ggacgccgugagccgccgccgcagucgucucg

SEQ ID NO: 184596 - RNA, 32 nt, Human
ggacgccuccacccugccccacaaggcuccgu

SEQ ID NO: 184597 - RNA, 19 nt, Human
ggacgccugggaagccugg

SEQ ID NO: 184598 - RNA, 32 nt, Human
ggacgccugguguggacgaugagggaagaacg

SEQ ID NO: 184599 - RNA, 32 nt, Human
ggacgccuguaaucccagcuacuuggaaggcu

SEQ ID NO: 184600 - RNA, 32 nt, Human
ggacgccuguaaucccagcuacuugggaggcu

SEQ ID NO: 184601 - RNA, 17 nt, Human
ggacgccuguaguccca

SEQ ID NO: 184602 - RNA, 32 nt, Human
ggacgccuguagucccagcuacuuggaggcug

SEQ ID NO: 184603 - RNA, 32 nt, Human
ggacgccuguauucacagcuacucgggagguu

SEQ ID NO: 184604 - RNA, 32 nt, Human
ggacgcgaaagaaaugggcauaaguagaauga

SEQ ID NO: 184605 - RNA, 32 nt, Human
ggacgcgaggagccaugaggcgccagccugcg

SEQ ID NO: 184606 - RNA, 32 nt, Human
ggacgcgaugcuauucgacaaggugaaagcgu

SEQ ID NO: 184607 - RNA, 32 nt, Human
ggacgcgccgggcuggagugggcgguuauagg

SEQ ID NO: 184608 - RNA, 32 nt, Human
ggacgcggaacugcggaagauccacagggcgg

SEQ ID NO: 184609 - RNA, 32 nt, Human
ggacgcggaaggcccugggggugcaguggagc

SEQ ID NO: 184610 - RNA, 32 nt, Human
ggacgcggcagagucacgguggcagcauugag

SEQ ID NO: 184611 - RNA, 16 nt, Human
ggacgcggcggcuggc

SEQ ID NO: 184612 - RNA, 32 nt, Human
ggacgcggcgucuggggagcacccaggcagca

SEQ ID NO: 184613 - RNA, 32 nt, Human
ggacgcgggaaagaccgaaaggaagaggaaga

SEQ ID NO: 184614 - RNA, 32 nt, Human
ggacgcgggaggacauggagguaggcgggaac

SEQ ID NO: 184615 - RNA, 32 nt, Human
ggacgcgggagugagagagggugagucagcca

SEQ ID NO: 184616 - RNA, 23 nt, Human
ggacgcgguggcucaugccugua

SEQ ID NO: 184617 - RNA, 32 nt, Human
ggacgcgguggguguggagcagcaucccuggc

SEQ ID NO: 184618 - RNA, 32 nt, Human
ggacgcgucugggcuccccuaggcaaaggucc

SEQ ID NO: 184619 - RNA, 32 nt, Human
ggacgcgucugggcugcuggaggcagcccgag

SEQ ID NO: 184620 - RNA, 32 nt, Human
ggacgcgugggguuccguguccccagcaguga

SEQ ID NO: 184621 - RNA, 32 nt, Human
ggacgcguucugccugggcauguaggggaggu

SEQ ID NO: 184622 - RNA, 23 nt, Human
ggacgcucccagggccccagagg

SEQ ID NO: 184623 - RNA, 18 nt, Human
ggacgcucccugcuccac

SEQ ID NO: 184624 - RNA, 32 nt, Human
ggacgcuccuuucugcugacagcccagccagu

SEQ ID NO: 184625 - RNA, 23 nt, Human
ggacgcucuuggcagguccccuc

SEQ ID NO: 184626 - RNA, 19 nt, Human
ggacgcugagaccaagaag

SEQ ID NO: 184627 - RNA, 32 nt, Human
ggacgcugaggcaggagaaucgcuugaaccca

SEQ ID NO: 184628 - RNA, 32 nt, Human
ggacgcugaggcaggaggaucauuugagccug

SEQ ID NO: 184629 - RNA, 32 nt, Human
ggacgcugaggugggaggauugcuugagccca

SEQ ID NO: 184630 - RNA, 32 nt, Human
ggacgcugcugguguccuccaggccugggugg

SEQ ID NO: 184631 - RNA, 32 nt, Human
ggacgcuggaaaugccuuaaggauagaggcug

SEQ ID NO: 184632 - RNA, 32 nt, Human
ggacgcugggagguggaugcugcagugagcag

SEQ ID NO: 184633 - RNA, 32 nt, Human
ggacgcugggccggucuacaccgccgccuggg

SEQ ID NO: 184634 - RNA, 25 nt, Human
ggacgcugucuacaagacccuggag

SEQ ID NO: 184635 - RNA, 32 nt, Human
ggacgcuucugcucaugguccaaggcuguguu

SEQ ID NO: 184636 - RNA, 32 nt, Human
ggacggaaggcugaauguagggucauuuugua

SEQ ID NO: 184637 - RNA, 32 nt, Human
ggacggacacacucauuacacacucacacgcc

SEQ ID NO: 184638 - RNA, 32 nt, Human
ggacggaccgacgcggagaggaagggaagccg

SEQ ID NO: 184639 - RNA, 32 nt, Human
ggacggacucacuucucuuuuuaguugaggcc

SEQ ID NO: 184640 - RNA, 32 nt, Human
ggacggacuguacuacagggagcagauccccc

SEQ ID NO: 184641 - RNA, 32 nt, Human
ggacggagaggaacaaggauggggagguagga

SEQ ID NO: 184642 - RNA, 32 nt, Human
ggacggagcagcgaggaggggagcagccggga

SEQ ID NO: 184643 - RNA, 32 nt, Human
ggacggagccugggagcggggcggggccgccg

SEQ ID NO: 184644 - RNA, 22 nt, Human
ggacggagcucggcgcugggaa

SEQ ID NO: 184645 - RNA, 32 nt, Human
ggacggaggaagagaugaaggcucugcagccc

SEQ ID NO: 184646 - RNA, 32 nt, Human
ggacggagugucccucuuguugcccaggcugg

SEQ ID NO: 184647 - RNA, 32 nt, Human
ggacggaucugagcagcugggcagcaggugcc

SEQ ID NO: 184648 - RNA, 22 nt, Human
ggacggaugaggacgacuugga

SEQ ID NO: 184649 - RNA, 23 nt, Human
ggacggauugacgaacugaugga

SEQ ID NO: 184650 - RNA, 32 nt, Human
ggacggauugugaauucagagcugaauaagga

SEQ ID NO: 184651 - RNA, 17 nt, Human
ggacggcagcucuggga

SEQ ID NO: 184652 - RNA, 24 nt, Human
ggacggcaggagccagccccggac

SEQ ID NO: 184653 - RNA, 32 nt, Human
ggacggccucaaacucagcucagaggagucgc

SEQ ID NO: 184654 - RNA, 20 nt, Human
ggacggcggagccccagcgg

SEQ ID NO: 184655 - RNA, 32 nt, Human
ggacggcggcgugcccuuccuuuccucccucc

SEQ ID NO: 184656 - RNA, 17 nt, Human
ggacggcgggcgcccgg

SEQ ID NO: 184657 - RNA, 32 nt, Human
ggacggcuggaggaccgcucagucucuccucu

SEQ ID NO: 184658 - RNA, 32 nt, Human
ggacgggaagggacagcggccuucgaccgccc

SEQ ID NO: 184659 - RNA, 32 nt, Human
ggacgggacucauguaaggacucaauuugggg

SEQ ID NO: 184660 - RNA, 32 nt, Human
ggacgggagaggccguguagcgucgccguuac

SEQ ID NO: 184661 - RNA, 32 nt, Human
ggacgggagagggcagugcaaugggaaguaaa

SEQ ID NO: 184662 - RNA, 32 nt, Human
ggacgggagccagcaggucgcguucgaugacu

SEQ ID NO: 184663 - RNA, 32 nt, Human
ggacgggaggagggagggcgggcaggcgccag

SEQ ID NO: 184664 - RNA, 32 nt, Human
ggacgggaggcagagccggcucagagcagguc

SEQ ID NO: 184665 - RNA, 32 nt, Human
ggacgggaggcuggaagcugggaggucaggug

SEQ ID NO: 184666 - RNA, 32 nt, Human
ggacgggagguggcggagguggcggcggaggc

SEQ ID NO: 184667 - RNA, 20 nt, Human
ggacgggagucaccaggugg

SEQ ID NO: 184668 - RNA, 18 nt, Human
ggacgggagucucagaga

SEQ ID NO: 184669 - RNA, 32 nt, Human
ggacgggcaggacgggcagggcuuccaggaga

SEQ ID NO: 184670 - RNA, 32 nt, Human
ggacgggcagggcuuccaggagagcucaagca

SEQ ID NO: 184671 - RNA, 32 nt, Human
ggacgggcccagugcuggguguuuucaccacc

SEQ ID NO: 184672 - RNA, 32 nt, Human
ggacgggcccuccuucccuccugugccccagc

SEQ ID NO: 184673 - RNA, 32 nt, Human
ggacgggcguuuucacagggcucugaguggga

SEQ ID NO: 184674 - RNA, 32 nt, Human
ggacggggaagggagagugagcgcaugcugaa

SEQ ID NO: 184675 - RNA, 20 nt, Human
ggacggggacgcaaggcaga

SEQ ID NO: 184676 - RNA, 32 nt, Human
ggacggggagcugagacccagaagaaaggagg

SEQ ID NO: 184677 - RNA, 32 nt, Human
ggacggggaguguuaccggggagcagcugcuc

SEQ ID NO: 184678 - RNA, 32 nt, Human
ggacggggcccaggaggucaggagagcagccc

SEQ ID NO: 184679 - RNA, 32 nt, Human
ggacggggcccgcaguccgcagccucucccgu

SEQ ID NO: 184680 - RNA, 22 nt, Human
ggacggggcgcccgcgcagcug

SEQ ID NO: 184681 - RNA, 32 nt, Human
ggacggggcugcacuccaaccgucugcaccug

SEQ ID NO: 184682 - RNA, 32 nt, Human
ggacgggggaggaggaaggggacagagggagc

SEQ ID NO: 184683 - RNA, 32 nt, Human
ggacgggggcagagaagugaugaagggaaaug

SEQ ID NO: 184684 - RNA, 32 nt, Human
ggacgggggcagcgcagcugugcucaagacug

SEQ ID NO: 184685 - RNA, 32 nt, Human
ggacgggguacagaggauagugugggucagag

SEQ ID NO: 184686 - RNA, 32 nt, Human
ggacggggugcagacggcagggccaguauggg

SEQ ID NO: 184687 - RNA, 18 nt, Human
ggacgggugacaguguga

SEQ ID NO: 184688 - RNA, 16 nt, Human
ggacgggugcuucugg

SEQ ID NO: 184689 - RNA, 32 nt, Human
ggacgggugggccugaggugcccagcucaggg

SEQ ID NO: 184690 - RNA, 16 nt, Human
ggacggguggugggaa

SEQ ID NO: 184691 - RNA, 32 nt, Human
ggacggucaucugcuccggaaggaaagagaac

SEQ ID NO: 184692 - RNA, 32 nt, Human
ggacggucuuuucuaaacuuuacaugagacuu

SEQ ID NO: 184693 - RNA, 32 nt, Human
ggacggugauaaccucuccccgaucggguugc

SEQ ID NO: 184694 - RNA, 32 nt, Human
ggacggugccacuuccagacaagacccacaaa

SEQ ID NO: 184695 - RNA, 32 nt, Human
ggacgguggaccggugaccccuuuguauucug

SEQ ID NO: 184696 - RNA, 20 nt, Human
ggacgguggccccugcaucu

SEQ ID NO: 184697 - RNA, 32 nt, Human
ggacgguggcccugccuucaugcccaggacac

SEQ ID NO: 184698 - RNA, 32 nt, Human
ggacggugucucuggccagcacuggcagcuuc

SEQ ID NO: 184699 - RNA, 32 nt, Human
ggacgguguugugguuuaccgucuccagcuuc

SEQ ID NO: 184700 - RNA, 32 nt, Human
ggacguaagggugugaaaggagccaaaggcuu

SEQ ID NO: 184701 - RNA, 31 nt, Human
ggacguaccgggcuuccuacagcagagccag

SEQ ID NO: 184702 - RNA, 32 nt, Human
ggacguaggagguggagguuguggaauucgcc

SEQ ID NO: 184703 - RNA, 32 nt, Human
ggacguccacgaucucuuucgccggcucggcg

SEQ ID NO: 184704 - RNA, 32 nt, Human
ggacguccuccagggacagccagcuccuccuc

SEQ ID NO: 184705 - RNA, 21 nt, Human
ggacgucgcgugguggggcag

SEQ ID NO: 184706 - RNA, 32 nt, Human
ggacgucggcuucuccccgcgggagcccccag

SEQ ID NO: 184707 - RNA, 32 nt, Human
ggacgucugcccccgcaugcaggagggggugu

SEQ ID NO: 184708 - RNA, 32 nt, Human
ggacgucuguaaucccagcuacuugggagacu

SEQ ID NO: 184709 - RNA, 32 nt, Human
ggacgugaagugaggaggggguugggagggga

SEQ ID NO: 184710 - RNA, 32 nt, Human
ggacgugaggccaagaccccagcagagaugcc

SEQ ID NO: 184711 - RNA, 32 nt, Human
ggacgugauaggagcaaagucucuccauucuc

SEQ ID NO: 184712 - RNA, 32 nt, Human
ggacgugcaccucgagcugaaggaccugacuc

SEQ ID NO: 184713 - RNA, 19 nt, Human
ggacgugcagagggugcag

SEQ ID NO: 184714 - RNA, 32 nt, Human
ggacgugcugcagaugcugaagauccaccgca

SEQ ID NO: 184715 - RNA, 32 nt, Human
ggacgugcuggguggcuggguggggcgggugc

SEQ ID NO: 184716 - RNA, 32 nt, Human
ggacguggccagaucuucucgcaggucacaag

SEQ ID NO: 184717 - RNA, 32 nt, Human
ggacguggcgcugucgguguuuggaggcugcu

SEQ ID NO: 184718 - RNA, 20 nt, Human
ggacgugggcugggcccaca

SEQ ID NO: 184719 - RNA, 23 nt, Human
ggacgugguggcacaugccugua

SEQ ID NO: 184720 - RNA, 23 nt, Human
ggacgugguggcaggugccugua

SEQ ID NO: 184721 - RNA, 23 nt, Human
ggacgugguggcgcaugccugua

SEQ ID NO: 184722 - RNA, 23 nt, Human
ggacgugguggcucacgccugua

SEQ ID NO: 184723 - RNA, 32 nt, Human
ggacguggugggcaccuguaaucccagcuacu

SEQ ID NO: 184724 - RNA, 32 nt, Human
ggacguguucagaguuucuucuuucugguggg

SEQ ID NO: 184725 - RNA, 32 nt, Human
ggacguucagcugucuguacgucugucugcug

SEQ ID NO: 184726 - RNA, 32 nt, Human
ggacguucaucuccuguacuccaggcugucau

SEQ ID NO: 184727 - RNA, 32 nt, Human
ggacguugaaaugggagaauugcuugagucca

SEQ ID NO: 184728 - RNA, 32 nt, Human
ggacguugauaggaagcggaaggggaaucgcg

SEQ ID NO: 184729 - RNA, 22 nt, Human
ggacguugucacggguuugggg

SEQ ID NO: 184730 - RNA, 32 nt, Human
ggacguugucugcaggcacucagaauggucca

SEQ ID NO: 184731 - RNA, 32 nt, Human
ggacguuuaaaguauugcuguguguuucaagu

SEQ ID NO: 184732 - RNA, 32 nt, Human
ggacguuuccaucagguuccaucccgaaaauc

SEQ ID NO: 184733 - RNA, 32 nt, Human
ggacguuucugcccuguuccccgaucagagcu

SEQ ID NO: 184734 - RNA, 19 nt, Human
ggacguuucuguuuacuca

SEQ ID NO: 184735 - RNA, 32 nt, Human
ggacguuucuguuuacucagagcugcuagaga

SEQ ID NO: 184736 - RNA, 32 nt, Human
ggacuaaaaaucuuguaaaaacuucggaggca

SEQ ID NO: 184737 - RNA, 32 nt, Human
ggacuaaacaacaaaaaggaggcaugagauuc

SEQ ID NO: 184738 - RNA, 32 nt, Human
ggacuaaacacguguuccgguggcagauugaa

SEQ ID NO: 184739 - RNA, 32 nt, Human
ggacuaaacucauuagaguucuuaaggcaguu

SEQ ID NO: 184740 - RNA, 32 nt, Human
ggacuaaagcagaauguaggagagggauucuu

SEQ ID NO: 184741 - RNA, 32 nt, Human
ggacuaaagcccagagagcaagacaguugggc

SEQ ID NO: 184742 - RNA, 32 nt, Human
ggacuaacccaagggggaaagcuaguguugau

SEQ ID NO: 184743 - RNA, 32 nt, Human
ggacuaagaaguuuugugagcaccaauggcaa

SEQ ID NO: 184744 - RNA, 32 nt, Human
ggacuaagacacacauugucaaaaucuucaug

SEQ ID NO: 184745 - RNA, 32 nt, Human
ggacuaagcuuggaauugccugucccacagca

SEQ ID NO: 184746 - RNA, 32 nt, Human
ggacuaaugagacugaggaagcagcuuuuccu

SEQ ID NO: 184747 - RNA, 32 nt, Human
ggacuacaagcaugcaccaccacgcccagcua

SEQ ID NO: 184748 - RNA, 32 nt, Human
ggacuacaagcgcacaccaccacgccugacua

SEQ ID NO: 184749 - RNA, 32 nt, Human
ggacuacaagcgcgcaccaccacucccagcua

SEQ ID NO: 184750 - RNA, 32 nt, Human
ggacuacaagugugcaccaccauggcuggcua

SEQ ID NO: 184751 - RNA, 32 nt, Human
ggacuacaaguuaaagucacucagcuggaucc

SEQ ID NO: 184752 - RNA, 32 nt, Human
ggacuacaauugugagccaccaugccaggcuc

SEQ ID NO: 184753 - RNA, 24 nt, Human
ggacuacagagugagacuccaucu

SEQ ID NO: 184754 - RNA, 32 nt, Human
ggacuacagaugcauuccaccaugcccagcua

SEQ ID NO: 184755 - RNA, 32 nt, Human
ggacuacagaugugggccaccaugucuggcua

SEQ ID NO: 184756 - RNA, 32 nt, Human
ggacuacagauguuugccaccaugcccgccuc

SEQ ID NO: 184757 - RNA, 32 nt, Human
ggacuacagcaaggggaagugccugaagacau

SEQ ID NO: 184758 - RNA, 32 nt, Human
ggacuacaggaguaugccaccaugcccagcua

SEQ ID NO: 184759 - RNA, 32 nt, Human
ggacuacaggcaaccaccaccacuccuaccuu

SEQ ID NO: 184760 - RNA, 32 nt, Human
ggacuacaggcacacaccacaacaccuggcua

SEQ ID NO: 184761 - RNA, 32 nt, Human
ggacuacaggcacacaccaccacgcccagcua

SEQ ID NO: 184762 - RNA, 32 nt, Human
ggacuacaggcacacaccaccaugcccagcua

SEQ ID NO: 184763 - RNA, 32 nt, Human
ggacuacaggcacaugccaccaugcccggcua

SEQ ID NO: 184764 - RNA, 32 nt, Human
ggacuacaggcacccgccaccaugcccagcua

SEQ ID NO: 184765 - RNA, 32 nt, Human
ggacuacaggcacccgccaccaugcccggcua

SEQ ID NO: 184766 - RNA, 32 nt, Human
ggacuacaggcaccugccaccaugcccagcua

SEQ ID NO: 184767 - RNA, 32 nt, Human
ggacuacaggcacgagccaccaugcccagcua

SEQ ID NO: 184768 - RNA, 32 nt, Human
ggacuacaggcacgcaccaccacaccuggcua

SEQ ID NO: 184769 - RNA, 32 nt, Human
ggacuacaggcacgcaccaccaugccaggcua

SEQ ID NO: 184770 - RNA, 32 nt, Human
ggacuacaggcacgcaccaccaugccuagcua

SEQ ID NO: 184771 - RNA, 32 nt, Human
ggacuacaggcacgcgccaccaugcccggcua

SEQ ID NO: 184772 - RNA, 32 nt, Human
ggacuacaggcacucaccaccaugcccagcuc

SEQ ID NO: 184773 - RNA, 32 nt, Human
ggacuacaggcacucgccaccaugcccggcug

SEQ ID NO: 184774 - RNA, 32 nt, Human
ggacuacaggcaugcaccaccacacccggcua

SEQ ID NO: 184775 - RNA, 32 nt, Human
ggacuacaggcaugcaccaccacacccugcua

SEQ ID NO: 184776 - RNA, 32 nt, Human
ggacuacaggcaugcaccaccacauccggcua

SEQ ID NO: 184777 - RNA, 32 nt, Human
ggacuacaggcaugcaccaccacgccaggcua

SEQ ID NO: 184778 - RNA, 32 nt, Human
ggacuacaggcaugcaccaccacgcccagcua

SEQ ID NO: 184779 - RNA, 32 nt, Human
ggacuacaggcaugcaccaccaugcccagcua

SEQ ID NO: 184780 - RNA, 32 nt, Human
ggacuacaggcaugcaccaccaugcccaguua

SEQ ID NO: 184781 - RNA, 32 nt, Human
ggacuacaggcaugcaccaccaugccuagcua

SEQ ID NO: 184782 - RNA, 32 nt, Human
ggacuacaggcaugcaccaccaugccuggcua

SEQ ID NO: 184783 - RNA, 32 nt, Human
ggacuacaggcaugugccaccaugcccggcua

SEQ ID NO: 184784 - RNA, 32 nt, Human
ggacuacaggcaugugccaccauguccagcua

SEQ ID NO: 184785 - RNA, 32 nt, Human
ggacuacaggcauguggcaccaugcccgcuaa

SEQ ID NO: 184786 - RNA, 32 nt, Human
ggacuacaggcgcacaccaccacacuggcuaa

SEQ ID NO: 184787 - RNA, 32 nt, Human
ggacuacaggcgcacaccaccacgccaggcua

SEQ ID NO: 184788 - RNA, 32 nt, Human
ggacuacaggcgcacaccaccaugcccagcua

SEQ ID NO: 184789 - RNA, 32 nt, Human
ggacuacaggcgcacgccgcaccaccacgucu

SEQ ID NO: 184790 - RNA, 32 nt, Human
ggacuacaggcgcaugccaccacacccggcua

SEQ ID NO: 184791 - RNA, 32 nt, Human
ggacuacaggcgcaugccaccaugcccagcua

SEQ ID NO: 184792 - RNA, 32 nt, Human
ggacuacaggcgcaugucaccaagcccggcua

SEQ ID NO: 184793 - RNA, 32 nt, Human
ggacuacaggcgccaccaccuugcccaacuaa

SEQ ID NO: 184794 - RNA, 32 nt, Human
ggacuacaggcgccagccaccaugccuggcua

SEQ ID NO: 184795 - RNA, 32 nt, Human
ggacuacaggcgcccaccaccacacaugcuaa

SEQ ID NO: 184796 - RNA, 32 nt, Human
ggacuacaggcgcccaccaccacaccaggcua

SEQ ID NO: 184797 - RNA, 32 nt, Human
ggacuacaggcgcccaccaccacaguuggcua

SEQ ID NO: 184798 - RNA, 32 nt, Human
ggacuacaggcgcccaccaccacgcccagcua

SEQ ID NO: 184799 - RNA, 32 nt, Human
ggacuacaggcgcccaccaccacgcccggcua

SEQ ID NO: 184800 - RNA, 32 nt, Human
ggacuacaggcgcccaccaccacgcccggcuu

SEQ ID NO: 184801 - RNA, 32 nt, Human
ggacuacaggcgcccaccaccaugcccggcua

SEQ ID NO: 184802 - RNA, 32 nt, Human
ggacuacaggcgcccaccacgacgccuggcuc

SEQ ID NO: 184803 - RNA, 32 nt, Human
ggacuacaggcgcccacgaccacgcccggcug

SEQ ID NO: 184804 - RNA, 32 nt, Human
ggacuacaggcgcccgcaaccacgcccggcua

SEQ ID NO: 184805 - RNA, 32 nt, Human
ggacuacaggcgcccgccaccacacccggcua

SEQ ID NO: 184806 - RNA, 32 nt, Human
ggacuacaggcgcccgccaccacaccuggcua

SEQ ID NO: 184807 - RNA, 32 nt, Human
ggacuacaggcgcccgccaccacaucuggcua

SEQ ID NO: 184808 - RNA, 32 nt, Human
ggacuacaggcgcccgccaccacgcccagcua

SEQ ID NO: 184809 - RNA, 32 nt, Human
ggacuacaggcgcccgccaccacgcccggcca

SEQ ID NO: 184810 - RNA, 32 nt, Human
ggacuacaggcgcccgccaccacgcccggcua

SEQ ID NO: 184811 - RNA, 32 nt, Human
ggacuacaggcgcccgccaccacgcccggcuc

SEQ ID NO: 184812 - RNA, 32 nt, Human
ggacuacaggcgcccgccaccacggccggcua

SEQ ID NO: 184813 - RNA, 32 nt, Human
ggacuacaggcgcccgccaccaugcccagcua

SEQ ID NO: 184814 - RNA, 32 nt, Human
ggacuacaggcgcccgccaccaugccccggcu

SEQ ID NO: 184815 - RNA, 32 nt, Human
ggacuacaggcgcccgccaccaugccuggcua

SEQ ID NO: 184816 - RNA, 32 nt, Human
ggacuacaggcgcccgccaccgcucccggcua

SEQ ID NO: 184817 - RNA, 32 nt, Human
ggacuacaggcgcccgccaccucgcccggcua

SEQ ID NO: 184818 - RNA, 32 nt, Human
ggacuacaggcgcccgccacugcgcccggcua

SEQ ID NO: 184819 - RNA, 32 nt, Human
ggacuacaggcgcccgccaucacgcccggcua

SEQ ID NO: 184820 - RNA, 32 nt, Human
ggacuacaggcgcccgccgccacgcccgucaa

SEQ ID NO: 184821 - RNA, 32 nt, Human
ggacuacaggcgcccgcuaccguacccggcua

SEQ ID NO: 184822 - RNA, 32 nt, Human
ggacuacaggcgccuaccaccaugcccagcua

SEQ ID NO: 184823 - RNA, 32 nt, Human
ggacuacaggcgccuaucaccaugccuggcua

SEQ ID NO: 184824 - RNA, 32 nt, Human
ggacuacaggcgccugccaccacauccgguua

SEQ ID NO: 184825 - RNA, 32 nt, Human
ggacuacaggcgccugccaccacuccuggcua

SEQ ID NO: 184826 - RNA, 32 nt, Human
ggacuacaggcgccugccaccaugcccgccua

SEQ ID NO: 184827 - RNA, 32 nt, Human
ggacuacaggcgcgcaccaccacgcccagcua

SEQ ID NO: 184828 - RNA, 32 nt, Human
ggacuacaggcgcgugccaccacaaccagcua

SEQ ID NO: 184829 - RNA, 32 nt, Human
ggacuacaggcgcgugccaccacgccaggcua

SEQ ID NO: 184830 - RNA, 32 nt, Human
ggacuacaggcgcgugccaccacgcccggcua

SEQ ID NO: 184831 - RNA, 32 nt, Human
ggacuacaggcgcgugccaccaugccuggcuu

SEQ ID NO: 184832 - RNA, 32 nt, Human
ggacuacaggcgcgugccaugacacccagcua

SEQ ID NO: 184833 - RNA, 32 nt, Human
ggacuacaggcggccgccaccaugcccgggua

SEQ ID NO: 184834 - RNA, 32 nt, Human
ggacuacaggcguccaccaccacgcccggcua

SEQ ID NO: 184835 - RNA, 32 nt, Human
ggacuacaggcgugagccaccaugcccggcua

SEQ ID NO: 184836 - RNA, 32 nt, Human
ggacuacaggcgugcaccaccacacccagcua

SEQ ID NO: 184837 - RNA, 32 nt, Human
ggacuacaggcgugcaccaccacaccuggcua

SEQ ID NO: 184838 - RNA, 32 nt, Human
ggacuacaggcgugcaccaccacgccugguua

SEQ ID NO: 184839 - RNA, 32 nt, Human
ggacuacaggcgugcgccaccaugcccggcua

SEQ ID NO: 184840 - RNA, 32 nt, Human
ggacuacaggcgugcgccaccaugccuggcua

SEQ ID NO: 184841 - RNA, 32 nt, Human
ggacuacaggcgugugccaccaugcccagcua

SEQ ID NO: 184842 - RNA, 32 nt, Human
ggacuacaggcucaugccaucaugcccagcua

SEQ ID NO: 184843 - RNA, 32 nt, Human
ggacuacaggcuugcaccaccacacccggcua

SEQ ID NO: 184844 - RNA, 32 nt, Human
ggacuacaggggugcaccaccaugcccagcua

SEQ ID NO: 184845 - RNA, 32 nt, Human
ggacuacagguacccaccaccacgcccagcua

SEQ ID NO: 184846 - RNA, 32 nt, Human
ggacuacaggucuacaccaccacucccggcua

SEQ ID NO: 184847 - RNA, 32 nt, Human
ggacuacaggugcacaccaccacaccuggcua

SEQ ID NO: 184848 - RNA, 32 nt, Human
ggacuacaggugcaugccaccaugccaggcua

SEQ ID NO: 184849 - RNA, 32 nt, Human
ggacuacaggugcccaccaccacacccggcua

SEQ ID NO: 184850 - RNA, 32 nt, Human
ggacuacaggugcccaccaccacgcuuggcuu

SEQ ID NO: 184851 - RNA, 32 nt, Human
ggacuacaggugcccaccaccaugcccagcua

SEQ ID NO: 184852 - RNA, 32 nt, Human
ggacuacaggugcccgccaccaugcccggcug

SEQ ID NO: 184853 - RNA, 32 nt, Human
ggacuacaggugcgcaccaccaugcccggcuu

SEQ ID NO: 184854 - RNA, 32 nt, Human
ggacuacaggugcgugccaccaugcccgggua

SEQ ID NO: 184855 - RNA, 32 nt, Human
ggacuacaggugcgugccaccaugccuggcua

SEQ ID NO: 184856 - RNA, 32 nt, Human
ggacuacaggugcucaccaccacacccggcua

SEQ ID NO: 184857 - RNA, 32 nt, Human
ggacuacagguguccaccaccaugccuggcua

SEQ ID NO: 184858 - RNA, 31 nt, Human
ggacuacaggugugagucaccaaagcccagu

SEQ ID NO: 184859 - RNA, 32 nt, Human
ggacuacaggugugcaccaccacaccaggcua

SEQ ID NO: 184860 - RNA, 32 nt, Human
ggacuacaggugugcaccaccacaccuggcua

SEQ ID NO: 184861 - RNA, 32 nt, Human
ggacuacaggugugcaccaccacagcuggcua

SEQ ID NO: 184862 - RNA, 32 nt, Human
ggacuacaggugugcaccaccaugcccagcua

SEQ ID NO: 184863 - RNA, 32 nt, Human
ggacuacaggugugcaccaccaugcccaggua

SEQ ID NO: 184864 - RNA, 32 nt, Human
ggacuacaggugugcgccaccaugcccgacua

SEQ ID NO: 184865 - RNA, 32 nt, Human
ggacuacaggugugugccaccaugcccagacg

SEQ ID NO: 184866 - RNA, 32 nt, Human
ggacuacaugaucaccaucacccggcugcugc

SEQ ID NO: 184867 - RNA, 32 nt, Human
ggacuacaugcgcacaccaccacguccggcua

SEQ ID NO: 184868 - RNA, 32 nt, Human
ggacuacauggugaaacuccaucucuacuaaa

SEQ ID NO: 184869 - RNA, 32 nt, Human
ggacuaccggcgugcaccaccaugccaggcua

SEQ ID NO: 184870 - RNA, 32 nt, Human
ggacuacgggcacacaccaccaugccuggcua

SEQ ID NO: 184871 - RNA, 32 nt, Human
ggacuacuaugggcgugcgccgccgugcuggu

SEQ ID NO: 184872 - RNA, 32 nt, Human
ggacuacucuggagggcucuucugccuggcau

SEQ ID NO: 184873 - RNA, 32 nt, Human
ggacuacugugcuuccggaggcucccuguguc

SEQ ID NO: 184874 - RNA, 32 nt, Human
ggacuagaagcaugcaccaccaugcccaucua

SEQ ID NO: 184875 - RNA, 32 nt, Human
ggacuagaggcauguaucaccaugcccagcua

SEQ ID NO: 184876 - RNA, 32 nt, Human
ggacuagauaccuugguacuguugaccuucuc

SEQ ID NO: 184877 - RNA, 32 nt, Human
ggacuagcacagacacacggaugagugggguc

SEQ ID NO: 184878 - RNA, 32 nt, Human
ggacuagcugcaggguuugagcuaggcugaag

SEQ ID NO: 184879 - RNA, 32 nt, Human
ggacuagcuggguugguaggaaaagagcagga

SEQ ID NO: 184880 - RNA, 32 nt, Human
ggacuaggacuugcccaagaccacagccaggu

SEQ ID NO: 184881 - RNA, 32 nt, Human
ggacuaggcccuggggcuacagcugcugcugc

SEQ ID NO: 184882 - RNA, 32 nt, Human
ggacuagggcaggcagcugggggcacuugguu

SEQ ID NO: 184883 - RNA, 32 nt, Human
ggacuagggcccaggaggcuaaggcugggaga

SEQ ID NO: 184884 - RNA, 32 nt, Human
ggacuaggggcaggacucuugccugaaccccc

SEQ ID NO: 184885 - RNA, 32 nt, Human
ggacuaggggcaguguuaauuuugaaaaggug

SEQ ID NO: 184886 - RNA, 32 nt, Human
ggacuaggggcugaggcccgcccagguaaggg

SEQ ID NO: 184887 - RNA, 21 nt, Human
ggacuagggugagagggagug

SEQ ID NO: 184888 - RNA, 32 nt, Human
ggacuagguaagcaucuuacaaccauuugugg

SEQ ID NO: 184889 - RNA, 32 nt, Human
ggacuaguacauuccuguuauuuucuggguuu

SEQ ID NO: 184890 - RNA, 16 nt, Human
ggacuaguguggggug

SEQ ID NO: 184891 - RNA, 32 nt, Human
ggacuauagaucauaggcaaugcaugaaccac

SEQ ID NO: 184892 - RNA, 32 nt, Human
ggacuauagcaaccucccccagagagaggcua

SEQ ID NO: 184893 - RNA, 32 nt, Human
ggacuauaggcacgcaccaccaugccuggcua

SEQ ID NO: 184894 - RNA, 32 nt, Human
ggacuauaggcaugcaccaccacgcccagcuu

SEQ ID NO: 184895 - RNA, 32 nt, Human
ggacuauaggcauguaccaccaugcccagcua

SEQ ID NO: 184896 - RNA, 32 nt, Human
ggacuauaggcgugugccaccaugcccagcua

SEQ ID NO: 184897 - RNA, 32 nt, Human
ggacuauaggugcaugccaccaugcccagcua

SEQ ID NO: 184898 - RNA, 32 nt, Human
ggacuauaggugcgugccaccaugcccagcua

SEQ ID NO: 184899 - RNA, 32 nt, Human
ggacuauaggugugcgccaccaugcccagcua

SEQ ID NO: 184900 - RNA, 32 nt, Human
ggacuauagguucgcaccaccacucccagcua

SEQ ID NO: 184901 - RNA, 32 nt, Human
ggacuaugguaccaagcagguaggacuguuca

SEQ ID NO: 184902 - RNA, 32 nt, Human
ggacuauuaaaacccuugcacuguaaggaaaa

SEQ ID NO: 184903 - RNA, 32 nt, Human
ggacuauuagcaauggcuuccagaaugugcuu

SEQ ID NO: 184904 - RNA, 32 nt, Human
ggacucaaaugccugcauuugagccuggcauu

SEQ ID NO: 184905 - RNA, 32 nt, Human
ggacucaaccugagcacccacacccaccuccu

SEQ ID NO: 184906 - RNA, 23 nt, Human
ggacucaagcaauccuccugccu

SEQ ID NO: 184907 - RNA, 32 nt, Human
ggacucaagccagccacccccuucuuuccccc

SEQ ID NO: 184908 - RNA, 23 nt, Human
ggacucaagcgaucuuccugccu

SEQ ID NO: 184909 - RNA, 23 nt, Human
ggacucaagcgauuuuccugccu

SEQ ID NO: 184910 - RNA, 32 nt, Human
ggacucaaggaggaggagagagauuccgcgag

SEQ ID NO: 184911 - RNA, 32 nt, Human
ggacucaaggauggcuuccuggaggaaauaca

SEQ ID NO: 184912 - RNA, 32 nt, Human
ggacucaagggacagagcacuuccagucgacc

SEQ ID NO: 184913 - RNA, 32 nt, Human
ggacucaagggugggucuuuggagcugauuag

SEQ ID NO: 184914 - RNA, 19 nt, Human
ggacucacaacccuggaua

SEQ ID NO: 184915 - RNA, 32 nt, Human
ggacucacacagauauuuacacugccauauuc

SEQ ID NO: 184916 - RNA, 32 nt, Human
ggacucacaggugggagacaggaguuccaacc

SEQ ID NO: 184917 - RNA, 32 nt, Human
ggacucacagugccacugcaaucaagcuccca

SEQ ID NO: 184918 - RNA, 32 nt, Human
ggacucacccaguuggaauucugggugggcuc

SEQ ID NO: 184919 - RNA, 32 nt, Human
ggacucaccuugaaagggggagcugcugggcc

SEQ ID NO: 184920 - RNA, 32 nt, Human
ggacucacgggccuggggcccacccagcacag

SEQ ID NO: 184921 - RNA, 32 nt, Human
ggacucacguggcuucaacagcuuuggaaaug

SEQ ID NO: 184922 - RNA, 32 nt, Human
ggacucacuccaccagcuuccuauaacuugga

SEQ ID NO: 184923 - RNA, 32 nt, Human
ggacucagaacaaaccaaaaagcagcuccaag

SEQ ID NO: 184924 - RNA, 32 nt, Human
ggacucagaacccagguuugcaggugggcaua

SEQ ID NO: 184925 - RNA, 32 nt, Human
ggacucagaagcacuuggaggaaggccuauuc

SEQ ID NO: 184926 - RNA, 24 nt, Human
ggacucagaauuguagggauaaua

SEQ ID NO: 184927 - RNA, 32 nt, Human
ggacucagacaggcacugugugggcacgaggu

SEQ ID NO: 184928 - RNA, 32 nt, Human
ggacucagaccccugaggagugggugcugccc

SEQ ID NO: 184929 - RNA, 32 nt, Human
ggacucagagcaauuuacaagagcuguucaug

SEQ ID NO: 184930 - RNA, 32 nt, Human
ggacucagagccagacagggcagccucagacc

SEQ ID NO: 184931 - RNA, 32 nt, Human
ggacucagagccuuccuugagcuaaacucggc

SEQ ID NO: 184932 - RNA, 32 nt, Human
ggacucagaggaugaggucaauuuccugaugc

SEQ ID NO: 184933 - RNA, 32 nt, Human
ggacucagaggccgugcuccugaccgauccag

SEQ ID NO: 184934 - RNA, 32 nt, Human
ggacucagagggccugaccccucaccuccccu

SEQ ID NO: 184935 - RNA, 32 nt, Human
ggacucagauacaaugcaaaaaguucaaguuu

SEQ ID NO: 184936 - RNA, 32 nt, Human
ggacucagaucagggcuggcaguagaugguag

SEQ ID NO: 184937 - RNA, 32 nt, Human
ggacucagcaguggccuggacaacagccucag

SEQ ID NO: 184938 - RNA, 32 nt, Human
ggacucagccuccuguguuuuggagaaggggc

SEQ ID NO: 184939 - RNA, 32 nt, Human
ggacucagcgaccugucuuccagccuggaagg

SEQ ID NO: 184940 - RNA, 32 nt, Human
ggacucagcgguagcaaccucgccccuugcaa

SEQ ID NO: 184941 - RNA, 32 nt, Human
ggacucagcucuggcucucugugugaccuugg

SEQ ID NO: 184942 - RNA, 32 nt, Human
ggacucaggaggcggaguuugcagugagcuga

SEQ ID NO: 184943 - RNA, 32 nt, Human
ggacucaggaguggagauggcaguuggggaca

SEQ ID NO: 184944 - RNA, 32 nt, Human
ggacucaggcagcagaggcaucugggaagucu

SEQ ID NO: 184945 - RNA, 30 nt, Human
ggacucaggccuguuuaguaaugcagggaa

SEQ ID NO: 184946 - RNA, 19 nt, Human
ggacucaggcugcugccag

SEQ ID NO: 184947 - RNA, 32 nt, Human
ggacucaggcuggggucugcagugcagcauua

SEQ ID NO: 184948 - RNA, 32 nt, Human
ggacucaggcuucucauccccuccucccgcaa

SEQ ID NO: 184949 - RNA, 32 nt, Human
ggacucaggucuaggucccuucccagaagccc

SEQ ID NO: 184950 - RNA, 32 nt, Human
ggacucaggugccucccugauuccugugggaa

SEQ ID NO: 184951 - RNA, 32 nt, Human
ggacucagugcuggcagauggcaguggaagcu

SEQ ID NO: 184952 - RNA, 22 nt, Human
ggacucauaaucugaagacuca

SEQ ID NO: 184953 - RNA, 22 nt, Human
ggacucauagccugaaagcuca

SEQ ID NO: 184954 - RNA, 32 nt, Human
ggacucaugccuuuaauuccaguguuuuggga

SEQ ID NO: 184955 - RNA, 32 nt, Human
ggacuccaaccgcuuguuuuguacaugaacaa

SEQ ID NO: 184956 - RNA, 32 nt, Human
ggacuccacacagcguuugccaccagaaacca

SEQ ID NO: 184957 - RNA, 22 nt, Human
ggacuccacagcacccagagga

SEQ ID NO: 184958 - RNA, 19 nt, Human
ggacuccacccccagcggg

SEQ ID NO: 184959 - RNA, 32 nt, Human
ggacuccaccugccuccuccccaaucccacac

SEQ ID NO: 184960 - RNA, 32 nt, Human
ggacuccagagggagagaggaagcgcugcagg

SEQ ID NO: 184961 - RNA, 20 nt, Human
ggacuccagcaccucugguc

SEQ ID NO: 184962 - RNA, 32 nt, Human
ggacuccagccuggacaacagagcaagacucc

SEQ ID NO: 184963 - RNA, 32 nt, Human
ggacuccagccuggccgccggcgcccgcagcc

SEQ ID NO: 184964 - RNA, 32 nt, Human
ggacuccagccugggcaacagagcaagacccu

SEQ ID NO: 184965 - RNA, 32 nt, Human
ggacuccaggagagagguuuuugcagcaugua

SEQ ID NO: 184966 - RNA, 32 nt, Human
ggacuccaggaggagggaccagcugaaggcac

SEQ ID NO: 184967 - RNA, 32 nt, Human
ggacuccaggcacccaccaccacucccggcua

SEQ ID NO: 184968 - RNA, 32 nt, Human
ggacuccaggcaugcaccaccaugccuggcua

SEQ ID NO: 184969 - RNA, 32 nt, Human
ggacuccaggugagcacuauguucucagagga

SEQ ID NO: 184970 - RNA, 22 nt, Human
ggacuccaguccugaaggcugg

SEQ ID NO: 184971 - RNA, 32 nt, Human
ggacuccagucuaacuccuauaucauguuguc

SEQ ID NO: 184972 - RNA, 32 nt, Human
ggacuccagugcccuccucucccaagagacaa

SEQ ID NO: 184973 - RNA, 32 nt, Human
ggacuccaucuucauucucucccuucucuccg

SEQ ID NO: 184974 - RNA, 32 nt, Human
ggacucccaaagugcugggauuacagacguga

SEQ ID NO: 184975 - RNA, 32 nt, Human
ggacucccaaagugcugggauuacaggcguga

SEQ ID NO: 184976 - RNA, 32 nt, Human
ggacucccaaagugcugggauuacaggcuuga

SEQ ID NO: 184977 - RNA, 32 nt, Human
ggacucccaccagggucugggagaggacggag

SEQ ID NO: 184978 - RNA, 21 nt, Human
ggacucccauccucacccuga

SEQ ID NO: 184979 - RNA, 32 nt, Human
ggacuccccacugucagcagcagccccgggac

SEQ ID NO: 184980 - RNA, 32 nt, Human
ggacuccccaggagcacccaggcaugggcagc

SEQ ID NO: 184981 - RNA, 32 nt, Human
ggacuccccaggagcacccaggcuugggcagc

SEQ ID NO: 184982 - RNA, 24 nt, Human
ggacucccccugugucagugcucu

SEQ ID NO: 184983 - RNA, 32 nt, Human
ggacuccccuggcaccugacaucucccacgcu

SEQ ID NO: 184984 - RNA, 32 nt, Human
ggacucccgugagcuggaaggaacagauuuaa

SEQ ID NO: 184985 - RNA, 32 nt, Human
ggacucccuccaggugcccgagacaagguuga

SEQ ID NO: 184986 - RNA, 32 nt, Human
ggacucccuccccucugcuucuacuccuccug

SEQ ID NO: 184987 - RNA, 32 nt, Human
ggacucccuggcagacagagcagugaguacaa

SEQ ID NO: 184988 - RNA, 32 nt, Human
ggacucccuuuucuuuggcaagauggcggagu

SEQ ID NO: 184989 - RNA, 32 nt, Human
ggacuccgauggaaaucagacucuccauuggc

SEQ ID NO: 184990 - RNA, 32 nt, Human
ggacuccgugagccucaugucugggaccuugg

SEQ ID NO: 184991 - RNA, 32 nt, Human
ggacuccguucugcaggcuggacgccuucuca

SEQ ID NO: 184992 - RNA, 32 nt, Human
ggacuccuaaacuaagcacagaagaguuggcg

SEQ ID NO: 184993 - RNA, 32 nt, Human
ggacuccuauuuccucuucuacccuggccucu

SEQ ID NO: 184994 - RNA, 32 nt, Human
ggacuccucuuccucucucuucuccuacucug

SEQ ID NO: 184995 - RNA, 22 nt, Human
ggacuccucuuuuccacuguga

SEQ ID NO: 184996 - RNA, 32 nt, Human
ggacuccuggggauccaggaaguaauucagaa

SEQ ID NO: 184997 - RNA, 32 nt, Human
ggacuccuggguggcacagcagcaggaccuug

SEQ ID NO: 184998 - RNA, 32 nt, Human
ggacuccuucaaggaagcugcagcucggucag

SEQ ID NO: 184999 - RNA, 32 nt, Human
ggacuccuucucacgggcggagcugcugcgcg

SEQ ID NO: 185000 - RNA, 32 nt, Human
ggacuccuuuccuccacuucuccaguaacaua

SEQ ID NO: 185001 - RNA, 18 nt, Human
ggacucgagcgcuggcug

SEQ ID NO: 185002 - RNA, 32 nt, Human
ggacucgagcuucccaucuccucgccuccccc

SEQ ID NO: 185003 - RNA, 32 nt, Human
ggacucgcaagugcccucaucacagccacccc

SEQ ID NO: 185004 - RNA, 32 nt, Human
ggacucgcacuggggcaagggugacagacacg

SEQ ID NO: 185005 - RNA, 32 nt, Human
ggacucgcugcugccaggugagucaccgccug

SEQ ID NO: 185006 - RNA, 32 nt, Human
ggacucgcuugccaccacgcaggaagcagccc

SEQ ID NO: 185007 - RNA, 32 nt, Human
ggacucgggaagagagaaccuaacagaacaau

SEQ ID NO: 185008 - RNA, 32 nt, Human
ggacucgggaggugccagaggcggcggcugcu

SEQ ID NO: 185009 - RNA, 20 nt, Human
ggacucggggugccgggcca

SEQ ID NO: 185010 - RNA, 32 nt, Human
ggacucggugcuguggcaggacaugaaggaga

SEQ ID NO: 185011 - RNA, 32 nt, Human
ggacucuacaggccagccucugccucacagug

SEQ ID NO: 185012 - RNA, 32 nt, Human
ggacucuacaggucagccucugccucacagug

SEQ ID NO: 185013 - RNA, 32 nt, Human
ggacucuacccaggcagguggaugaaaaugcu

SEQ ID NO: 185014 - RNA, 32 nt, Human
ggacucuacuaaaaguacaaaaauuagcuggc

SEQ ID NO: 185015 - RNA, 25 nt, Human
ggacucuagugaucugcccaccuca

SEQ ID NO: 185016 - RNA, 32 nt, Human
ggacucucacuccugcacugccagccccuucu

SEQ ID NO: 185017 - RNA, 32 nt, Human
ggacucucagccuucuuuucccuucccugagg

SEQ ID NO: 185018 - RNA, 32 nt, Human
ggacucuccaaacccccaaagcagagagaggg

SEQ ID NO: 185019 - RNA, 32 nt, Human
ggacucucucacacaggaaacuucccuauacu

SEQ ID NO: 185020 - RNA, 32 nt, Human
ggacucucucccaccacauacagcacagcacu

SEQ ID NO: 185021 - RNA, 32 nt, Human
ggacucucucugcugccacuucaccuuccuga

SEQ ID NO: 185022 - RNA, 32 nt, Human
ggacucucugccugcuuccuggaccggggccu

SEQ ID NO: 185023 - RNA, 32 nt, Human
ggacucucuggaggaugggaugacagaugcag

SEQ ID NO: 185024 - RNA, 32 nt, Human
ggacucugaaaccacaggccgacagauagagg

SEQ ID NO: 185025 - RNA, 32 nt, Human
ggacucugaauuucuaacaaugcccagugacu

SEQ ID NO: 185026 - RNA, 18 nt, Human
ggacucugacaacuucau

SEQ ID NO: 185027 - RNA, 32 nt, Human
ggacucugaggcucuuucugggccaaguuccu

SEQ ID NO: 185028 - RNA, 32 nt, Human
ggacucugagggaggagcuggggacggcgacc

SEQ ID NO: 185029 - RNA, 32 nt, Human
ggacucugaucccagccauggccuuccucucc

SEQ ID NO: 185030 - RNA, 32 nt, Human
ggacucugauccggcucagcuuuccaaucagc

SEQ ID NO: 185031 - RNA, 32 nt, Human
ggacucugaucuucccccucuucaggugucag

SEQ ID NO: 185032 - RNA, 32 nt, Human
ggacucugccacccucccucaggaugccugag

SEQ ID NO: 185033 - RNA, 32 nt, Human
ggacucugcccaggccagcguguucugaaaau

SEQ ID NO: 185034 - RNA, 32 nt, Human
ggacucugcccuuccaaauaaaccuugcuaag

SEQ ID NO: 185035 - RNA, 32 nt, Human
ggacucugcucacuaccugggugacaggauca

SEQ ID NO: 185036 - RNA, 32 nt, Human
ggacucugcucacuaccuuggugacaggauca

SEQ ID NO: 185037 - RNA, 32 nt, Human
ggacucuggagaggagauugaaauauaauugc

SEQ ID NO: 185038 - RNA, 32 nt, Human
ggacucugggaccugcagcucugccuuugcug

SEQ ID NO: 185039 - RNA, 32 nt, Human
ggacucugggaggcgaggagagcuggcugggc

SEQ ID NO: 185040 - RNA, 32 nt, Human
ggacucugggauggacauuguucuccaacagg

SEQ ID NO: 185041 - RNA, 32 nt, Human
ggacucugggcagagucagggacagucacacc

SEQ ID NO: 185042 - RNA, 32 nt, Human
ggacucugggcuccugcugccugggccccgau

SEQ ID NO: 185043 - RNA, 21 nt, Human
ggacucuggggccacagggug

SEQ ID NO: 185044 - RNA, 32 nt, Human
ggacucuggggucaugucuugcucugagaguu

SEQ ID NO: 185045 - RNA, 32 nt, Human
ggacucuggugucucacccauccaccaggcgg

SEQ ID NO: 185046 - RNA, 32 nt, Human
ggacucuguuaccaaaucccaggcugggcacu

SEQ ID NO: 185047 - RNA, 32 nt, Human
ggacucuucagccugucaagcugccagcuuau

SEQ ID NO: 185048 - RNA, 32 nt, Human
ggacucuuccagagucaucuaccugaguccca

SEQ ID NO: 185049 - RNA, 32 nt, Human
ggacucuugcccacccucagccauggcuccga

SEQ ID NO: 185050 - RNA, 32 nt, Human
ggacucuugccugaacccccagccugggcuua

SEQ ID NO: 185051 - RNA, 32 nt, Human
ggacucuuggugcaacagacucaauuggaacu

SEQ ID NO: 185052 - RNA, 32 nt, Human
ggacucuuugccaggauggcuuuuccugcugu

SEQ ID NO: 185053 - RNA, 32 nt, Human
ggacugaacuacaccauuggcuuuccugggcu

SEQ ID NO: 185054 - RNA, 32 nt, Human
ggacugaacugaaccccuccccaugaacacaa

SEQ ID NO: 185055 - RNA, 32 nt, Human
ggacugaagauaauuuacagugccccaucuaa

SEQ ID NO: 185056 - RNA, 32 nt, Human
ggacugaagcugaagaggaauacuaaguccau

SEQ ID NO: 185057 - RNA, 21 nt, Human
ggacugaagggcaguccccuc

SEQ ID NO: 185058 - RNA, 32 nt, Human
ggacugaagugcagguugcucacagcauccua

SEQ ID NO: 185059 - RNA, 32 nt, Human
ggacugaaucgccacuacagccugggugcaaa

SEQ ID NO: 185060 - RNA, 32 nt, Human
ggacugaaucucaucaccccacaaacauacca

SEQ ID NO: 185061 - RNA, 32 nt, Human
ggacugaaucucaucaccccacaaacauacua

SEQ ID NO: 185062 - RNA, 24 nt, Human
ggacugaaugccuguguccccugg

SEQ ID NO: 185063 - RNA, 20 nt, Human
ggacugacaccacagaugac

SEQ ID NO: 185064 - RNA, 32 nt, Human
ggacugacaggcugacauagaaaauaaacuuu

SEQ ID NO: 185065 - RNA, 21 nt, Human
ggacugaccacagccuggcug

SEQ ID NO: 185066 - RNA, 32 nt, Human
ggacugacccuuuccccacaaggaccugccau

SEQ ID NO: 185067 - RNA, 31 nt, Human
ggacugacgccuucuucaccuguguccucug

SEQ ID NO: 185068 - RNA, 32 nt, Human
ggacugacucaccucucucuuucucaguccca

SEQ ID NO: 185069 - RNA, 32 nt, Human
ggacugacugcgccguggaggcugcugcagug

SEQ ID NO: 185070 - RNA, 32 nt, Human
ggacugacuggguauagaaggaagacagacuc

SEQ ID NO: 185071 - RNA, 32 nt, Human
ggacugagaacagcuguugagcaguuuaccug

SEQ ID NO: 185072 - RNA, 32 nt, Human
ggacugagagcagggagcagcaggcauggggc

SEQ ID NO: 185073 - RNA, 32 nt, Human
ggacugagaggauggaggcagguccaacucga

SEQ ID NO: 185074 - RNA, 19 nt, Human
ggacugagauugccucuga

SEQ ID NO: 185075 - RNA, 32 nt, Human
ggacugagccaaggaagagucugccugagaga

SEQ ID NO: 185076 - RNA, 32 nt, Human
ggacugagcccuuuauucccucucacaccacc

SEQ ID NO: 185077 - RNA, 23 nt, Human
ggacugagccgugcacccggagg

SEQ ID NO: 185078 - RNA, 32 nt, Human
ggacugagccuggggacgcccacccacaccca

SEQ ID NO: 185079 - RNA, 21 nt, Human
ggacugagcgucccccggaga

SEQ ID NO: 185080 - RNA, 32 nt, Human
ggacugagcuccaggggacugcagcccucuga

SEQ ID NO: 185081 - RNA, 32 nt, Human
ggacugaggauggaguuaaaucacucagcccc

SEQ ID NO: 185082 - RNA, 32 nt, Human
ggacugaggcaugcaagccucugccuuuccuu

SEQ ID NO: 185083 - RNA, 32 nt, Human
ggacugaggggaggggagcaugggaagugacg

SEQ ID NO: 185084 - RNA, 32 nt, Human
ggacugaggggguggagagaggggaccucuuc

SEQ ID NO: 185085 - RNA, 32 nt, Human
ggacugagggugcuugaguaggaugugagacu

SEQ ID NO: 185086 - RNA, 32 nt, Human
ggacugaguccauauggaagaagaacuuccuc

SEQ ID NO: 185087 - RNA, 23 nt, Human
ggacugagugggaacccugcagc

SEQ ID NO: 185088 - RNA, 32 nt, Human
ggacugaucaacucuugccagucucaaaccau

SEQ ID NO: 185089 - RNA, 19 nt, Human
ggacugaugcgaggucccc

SEQ ID NO: 185090 - RNA, 19 nt, Human
ggacugaugcuguggggug

SEQ ID NO: 185091 - RNA, 19 nt, Human
ggacugauggccucagaga

SEQ ID NO: 185092 - RNA, 21 nt, Human
ggacugauucagggcccccuc

SEQ ID NO: 185093 - RNA, 32 nt, Human
ggacugauucugucguguucaccagagaaagc

SEQ ID NO: 185094 - RNA, 32 nt, Human
ggacugcaacaucacggauggugacuacuacg

SEQ ID NO: 185095 - RNA, 32 nt, Human
ggacugcaagauggaggaaggcgggaaccuag

SEQ ID NO: 185096 - RNA, 32 nt, Human
ggacugcaagcagggcucugccccagaggccu

SEQ ID NO: 185097 - RNA, 32 nt, Human
ggacugcacacagcacccacaaccagccccau

SEQ ID NO: 185098 - RNA, 32 nt, Human
ggacugcacgagcuggugaggcugaggagcag

SEQ ID NO: 185099 - RNA, 32 nt, Human
ggacugcacguacucucucaucaugaaaacag

SEQ ID NO: 185100 - RNA, 32 nt, Human
ggacugcacguuucuuucucucuugauucuug

SEQ ID NO: 185101 - RNA, 32 nt, Human
ggacugcacuguagggccuggagaccuguucc

SEQ ID NO: 185102 - RNA, 32 nt, Human
ggacugcagauuuuucuacucugugaucgauu

SEQ ID NO: 185103 - RNA, 32 nt, Human
ggacugcagccugcugugcugagcccugcugc

SEQ ID NO: 185104 - RNA, 32 nt, Human
ggacugcagcgcagugggugggccaguggcag

SEQ ID NO: 185105 - RNA, 32 nt, Human
ggacugcagcuagcauccaugcucugaugggc

SEQ ID NO: 185106 - RNA, 32 nt, Human
ggacugcagcuaugugccaucaugccuggcug

SEQ ID NO: 185107 - RNA, 32 nt, Human
ggacugcaggcaugcgccaccaugccaggcug

SEQ ID NO: 185108 - RNA, 32 nt, Human
ggacugcaggccuuagaggccaugccauuugg

SEQ ID NO: 185109 - RNA, 32 nt, Human
ggacugcagguaaaaugcaauuaggacaacua

SEQ ID NO: 185110 - RNA, 32 nt, Human
ggacugcaggugcacaccaccacgcccagcua

SEQ ID NO: 185111 - RNA, 32 nt, Human
ggacugcaggugugcaccaccaugcccagcua

SEQ ID NO: 185112 - RNA, 32 nt, Human
ggacugcaucacagcaagggacgccauucacu

SEQ ID NO: 185113 - RNA, 32 nt, Human
ggacugcaucaucugcugaagcuccagucccu

SEQ ID NO: 185114 - RNA, 32 nt, Human
ggacugcauuuuaagcccugcaggcuucugcc

SEQ ID NO: 185115 - RNA, 32 nt, Human
ggacugccaaauuuucucaugaucucaccuau

SEQ ID NO: 185116 - RNA, 32 nt, Human
ggacugccagccccuguccucccuucaccccc

SEQ ID NO: 185117 - RNA, 20 nt, Human
ggacugccaggacucaggca

SEQ ID NO: 185118 - RNA, 32 nt, Human
ggacugccaggaggaggagaggaggaggggag

SEQ ID NO: 185119 - RNA, 32 nt, Human
ggacugcccaccccaccucugcucauuccaca

SEQ ID NO: 185120 - RNA, 32 nt, Human
ggacugccggcuguuucguacaacauucuugc

SEQ ID NO: 185121 - RNA, 21 nt, Human
ggacugccugacucccagagg

SEQ ID NO: 185122 - RNA, 32 nt, Human
ggacugccugacuccccuccccagacuggcuu

SEQ ID NO: 185123 - RNA, 32 nt, Human
ggacugccuuucccucuccucagcccguccuc

SEQ ID NO: 185124 - RNA, 32 nt, Human
ggacugcgaccuccuucccuccugggagagcc

SEQ ID NO: 185125 - RNA, 17 nt, Human
ggacugcgcggcuggcu

SEQ ID NO: 185126 - RNA, 32 nt, Human
ggacugcgggagagaguaugggggcacccucc

SEQ ID NO: 185127 - RNA, 32 nt, Human
ggacugcgggauaggaagcuggggauauggac

SEQ ID NO: 185128 - RNA, 32 nt, Human
ggacugcggggcucuugaggccagcugcagag

SEQ ID NO: 185129 - RNA, 32 nt, Human
ggacugcgggugcggcccugcccgccaccaga

SEQ ID NO: 185130 - RNA, 32 nt, Human
ggacugcggguguucgccaccaugcccagcua

SEQ ID NO: 185131 - RNA, 32 nt, Human
ggacugcgguggacaccagaggaagcuguuuc

SEQ ID NO: 185132 - RNA, 18 nt, Human
ggacugcuaccuuucaaa

SEQ ID NO: 185133 - RNA, 32 nt, Human
ggacugcuccauugcugacugccugcaguucc

SEQ ID NO: 185134 - RNA, 32 nt, Human
ggacugcucugaccuuuuacggcgacaaacaa

SEQ ID NO: 185135 - RNA, 32 nt, Human
ggacugcucuggacugacauugcucagguucg

SEQ ID NO: 185136 - RNA, 18 nt, Human
ggacugcugcccuugucc

SEQ ID NO: 185137 - RNA, 32 nt, Human
ggacugcugguccccucuccuucccuccuucc

SEQ ID NO: 185138 - RNA, 32 nt, Human
ggacugcuucuaggugcagugacagggcagcg

SEQ ID NO: 185139 - RNA, 32 nt, Human
ggacugcuucugcccucugccugccagugccc

SEQ ID NO: 185140 - RNA, 32 nt, Human
ggacugcuugagcucaggagguugaggcugca

SEQ ID NO: 185141 - RNA, 32 nt, Human
ggacugcuugagcucaggaguucgagaccagc

SEQ ID NO: 185142 - RNA, 32 nt, Human
ggacugcuugcuggucgcuuacaucacuuuac

SEQ ID NO: 185143 - RNA, 32 nt, Human
ggacugcuuuggagaccuagccccagaaagcc

SEQ ID NO: 185144 - RNA, 32 nt, Human
ggacugcuuuuccuccuucauccucgugagcc

SEQ ID NO: 185145 - RNA, 32 nt, Human
ggacuggaaauggcagaccauaugauggcaau

SEQ ID NO: 185146 - RNA, 22 nt, Human
ggacuggaagagaggacgcggu

SEQ ID NO: 185147 - RNA, 32 nt, Human
ggacuggaagcucuaguggauguggcccgucu

SEQ ID NO: 185148 - RNA, 32 nt, Human
ggacuggaaggguggagaguaggcggaaccag

SEQ ID NO: 185149 - RNA, 19 nt, Human
ggacuggaagguggcggug

SEQ ID NO: 185150 - RNA, 32 nt, Human
ggacuggacaccuucacuccagcuggacaaag

SEQ ID NO: 185151 - RNA, 32 nt, Human
ggacuggacgguucccgcuggacuauacuaga

SEQ ID NO: 185152 - RNA, 32 nt, Human
ggacuggacucacuuuucugcuccagggacuc

SEQ ID NO: 185153 - RNA, 32 nt, Human
ggacuggacuguucccucuggacuauacuaga

SEQ ID NO: 185154 - RNA, 21 nt, Human
ggacuggagaagacgcgggug

SEQ ID NO: 185155 - RNA, 32 nt, Human
ggacuggagagugaggaggaggaggagccuug

SEQ ID NO: 185156 - RNA, 32 nt, Human
ggacuggagaucuccuggauggaguuggauua

SEQ ID NO: 185157 - RNA, 31 nt, Human
ggacuggagcagacgacgaggagggaagagu

SEQ ID NO: 185158 - RNA, 32 nt, Human
ggacuggaggcgugugccaccaugcccagcua

SEQ ID NO: 185159 - RNA, 32 nt, Human
ggacuggaggggccagguggcuaaccacucuc

SEQ ID NO: 185160 - RNA, 32 nt, Human
ggacuggaguccaggcagccuggcuccugaau

SEQ ID NO: 185161 - RNA, 32 nt, Human
ggacuggauggcucccgcuggacuauacugga

SEQ ID NO: 185162 - RNA, 32 nt, Human
ggacuggaugugccaauggcccuucagggccu

SEQ ID NO: 185163 - RNA, 32 nt, Human
ggacuggauuucuucuggagggaagcaccaug

SEQ ID NO: 185164 - RNA, 32 nt, Human
ggacuggcaagauguccaggagcccacugccu

SEQ ID NO: 185165 - RNA, 32 nt, Human
ggacuggcaagcacggcuggcccagugcagca

SEQ ID NO: 185166 - RNA, 32 nt, Human
ggacuggcacacacagacacacgagaccgagg

SEQ ID NO: 185167 - RNA, 32 nt, Human
ggacuggcaccgagaguucugaagggaucuua

SEQ ID NO: 185168 - RNA, 32 nt, Human
ggacuggcagagccaggggucagccaccugcc

SEQ ID NO: 185169 - RNA, 32 nt, Human
ggacuggcaggggauaugagggccaguguaga

SEQ ID NO: 185170 - RNA, 32 nt, Human
ggacuggcccaggcacacaggucccggggcau

SEQ ID NO: 185171 - RNA, 32 nt, Human
ggacuggcccccagugucaggcaggaggugac

SEQ ID NO: 185172 - RNA, 32 nt, Human
ggacuggccgggaggugaugggcggggaaggu

SEQ ID NO: 185173 - RNA, 32 nt, Human
ggacuggccuccaggaugaggauggggguggc

SEQ ID NO: 185174 - RNA, 32 nt, Human
ggacuggcggcaggauguucagcuggaugggg

SEQ ID NO: 185175 - RNA, 32 nt, Human
ggacuggcuggcacagggaggauggaaaccuu

SEQ ID NO: 185176 - RNA, 32 nt, Human
ggacuggcugugccccugaugcagccuguggc

SEQ ID NO: 185177 - RNA, 16 nt, Human
ggacugggacuggggu

SEQ ID NO: 185178 - RNA, 32 nt, Human
ggacugggagaggcacacccacccucaaucug

SEQ ID NO: 185179 - RNA, 32 nt, Human
ggacugggaggcagagccgccgccaagggggc

SEQ ID NO: 185180 - RNA, 32 nt, Human
ggacugggaggggagagaagagaaggagggaa

SEQ ID NO: 185181 - RNA, 21 nt, Human
ggacugggagguggaggcaga

SEQ ID NO: 185182 - RNA, 32 nt, Human
ggacugggaguggggagccagagggagcagcu

SEQ ID NO: 185183 - RNA, 32 nt, Human
ggacugggaugagagaaagugggaccuggugg

SEQ ID NO: 185184 - RNA, 32 nt, Human
ggacugggcaaagauugcuuguguaauaucca

SEQ ID NO: 185185 - RNA, 23 nt, Human
ggacugggccccggggcggggug

SEQ ID NO: 185186 - RNA, 32 nt, Human
ggacugggcuccucucgaaccccucuuuggcu

SEQ ID NO: 185187 - RNA, 32 nt, Human
ggacugggcucuuuggagcucauccuuggacc

SEQ ID NO: 185188 - RNA, 32 nt, Human
ggacugggcuggggcgaggagugaagagcggu

SEQ ID NO: 185189 - RNA, 32 nt, Human
ggacuggggaagggaggggagacuauguguga

SEQ ID NO: 185190 - RNA, 32 nt, Human
ggacuggggaaugcgauagggaggggugggga

SEQ ID NO: 185191 - RNA, 32 nt, Human
ggacuggggagggauaugauggagagccagcc

SEQ ID NO: 185192 - RNA, 32 nt, Human
ggacuggggccaugaggccuucccuggucccc

SEQ ID NO: 185193 - RNA, 32 nt, Human
ggacugggggcccucagcuagcuuaaaagagg

SEQ ID NO: 185194 - RNA, 32 nt, Human
ggacugggguggguugguggcaccaauggcag

SEQ ID NO: 185195 - RNA, 18 nt, Human
ggacugggguuggaggug

SEQ ID NO: 185196 - RNA, 32 nt, Human
ggacugggugcgucccaucuccccagcuugcu

SEQ ID NO: 185197 - RNA, 32 nt, Human
ggacugggugggggcaggauggaguuagaccc

SEQ ID NO: 185198 - RNA, 32 nt, Human
ggacuggguuggcagugacacgggggaccagu

SEQ ID NO: 185199 - RNA, 31 nt, Human
ggacuggucuuccuggagccugugucagcug

SEQ ID NO: 185200 - RNA, 22 nt, Human
ggacuggugaugguggagggug

SEQ ID NO: 185201 - RNA, 32 nt, Human
ggacugguggcaucauguaacugcuaaccuua

SEQ ID NO: 185202 - RNA, 32 nt, Human
ggacugguggcccagagagggcugugccuuac

SEQ ID NO: 185203 - RNA, 32 nt, Human
ggacuggugggcuccccucugggccagcacag

SEQ ID NO: 185204 - RNA, 19 nt, Human
ggacuggugggggccgggg

SEQ ID NO: 185205 - RNA, 16 nt, Human
ggacuggugguggagu

SEQ ID NO: 185206 - RNA, 32 nt, Human
ggacugguuccagugagagaaaccaaccacag

SEQ ID NO: 185207 - RNA, 21 nt, Human
ggacugguugguggaggugca

SEQ ID NO: 185208 - RNA, 32 nt, Human
ggacuguaccaggcagcugggccccgcaggac

SEQ ID NO: 185209 - RNA, 32 nt, Human
ggacuguagggagggcggcaggggccuggaga

SEQ ID NO: 185210 - RNA, 32 nt, Human
ggacugucaagugcuuuaucuuaucuaagccu

SEQ ID NO: 185211 - RNA, 20 nt, Human
ggacugucaguucucuggga

SEQ ID NO: 185212 - RNA, 32 nt, Human
ggacuguccagcucugcccccugcugcugcca

SEQ ID NO: 185213 - RNA, 20 nt, Human
ggacugucccuccuugagac

SEQ ID NO: 185214 - RNA, 17 nt, Human
ggacuguccuaggugac

SEQ ID NO: 185215 - RNA, 32 nt, Human
ggacugucggagguguggacucugccugccua

SEQ ID NO: 185216 - RNA, 32 nt, Human
ggacugucuaccucccuuccuccucugcucac

SEQ ID NO: 185217 - RNA, 32 nt, Human
ggacugucugcucaggcugguggugacaggau

SEQ ID NO: 185218 - RNA, 32 nt, Human
ggacugucuucucucccuucacaaaaaucuga

SEQ ID NO: 185219 - RNA, 32 nt, Human
ggacugugacacugcacuccagccugggcaac

SEQ ID NO: 185220 - RNA, 32 nt, Human
ggacugugacucuguguuaccuuccaacuucc

SEQ ID NO: 185221 - RNA, 32 nt, Human
ggacugugaucucccugggauuuaaaguggga

SEQ ID NO: 185222 - RNA, 21 nt, Human
ggacugugauucuaagugggg

SEQ ID NO: 185223 - RNA, 32 nt, Human
ggacugugccauuuuugcuauuuaaaggaauc

SEQ ID NO: 185224 - RNA, 32 nt, Human
ggacugugcucacuaccugggugacaggauca

SEQ ID NO: 185225 - RNA, 32 nt, Human
ggacuguggagaauaggcaaucccagggggua

SEQ ID NO: 185226 - RNA, 32 nt, Human
ggacuguggccgggcaaguggaucacaggccu

SEQ ID NO: 185227 - RNA, 32 nt, Human
ggacugugggagcagaggcauugccaggacuu

SEQ ID NO: 185228 - RNA, 32 nt, Human
ggacugugggccagugccagagccaggcuugu

SEQ ID NO: 185229 - RNA, 32 nt, Human
ggacugugguugggggaggugggagcuguuuu

SEQ ID NO: 185230 - RNA, 32 nt, Human
ggacuguguccucagcuccuuccagaugacca

SEQ ID NO: 185231 - RNA, 32 nt, Human
ggacugugugaaccaacaaggggccaguuuuc

SEQ ID NO: 185232 - RNA, 32 nt, Human
ggacugugugcucaggagcacugugguagagc

SEQ ID NO: 185233 - RNA, 32 nt, Human
ggacugugugugucuggcuguagcagacgcga

SEQ ID NO: 185234 - RNA, 22 nt, Human
ggacuguguucaggacacaggg

SEQ ID NO: 185235 - RNA, 32 nt, Human
ggacuguguugacugacgagccgagggguggc

SEQ ID NO: 185236 - RNA, 32 nt, Human
ggacuguuccagcacgggccagauggccagcu

SEQ ID NO: 185237 - RNA, 32 nt, Human
ggacuguugcugguaugaagcagcccuucgug

SEQ ID NO: 185238 - RNA, 19 nt, Human
ggacuguugugaggggcug

SEQ ID NO: 185239 - RNA, 24 nt, Human
ggacuguuuucucucggaggccgg

SEQ ID NO: 185240 - RNA, 32 nt, Human
ggacuuaaaaagauaaggaggccagguguggu

SEQ ID NO: 185241 - RNA, 32 nt, Human
ggacuuaaucuagaccugaaacuacaaaaauu

SEQ ID NO: 185242 - RNA, 32 nt, Human
ggacuuaccauccacaaugcaccacggaagag

SEQ ID NO: 185243 - RNA, 31 nt, Human
ggacuuagccucccugggccucaguuucuuu

SEQ ID NO: 185244 - RNA, 32 nt, Human
ggacuuagccucccugggccucaguuucuuua

SEQ ID NO: 185245 - RNA, 32 nt, Human
ggacuuagggacaggguauagcuuagauggug

SEQ ID NO: 185246 - RNA, 32 nt, Human
ggacuuagggccagcccuugagguccuuaucc

SEQ ID NO: 185247 - RNA, 32 nt, Human
ggacuuagucuugccauuucugcuucuuugaa

SEQ ID NO: 185248 - RNA, 32 nt, Human
ggacuuaugggugggaggggagcauuuuuagu

SEQ ID NO: 185249 - RNA, 32 nt, Human
ggacuucaacauaggaacuugagggggacaaa

SEQ ID NO: 185250 - RNA, 32 nt, Human
ggacuucaagcaggaggaggugggugggguga

SEQ ID NO: 185251 - RNA, 32 nt, Human
ggacuucacaggcugcuugggagaagacaauc

SEQ ID NO: 185252 - RNA, 32 nt, Human
ggacuucaccaauggauuacaugccaucuggg

SEQ ID NO: 185253 - RNA, 32 nt, Human
ggacuucacccaggaggaguggggucaacuag

SEQ ID NO: 185254 - RNA, 19 nt, Human
ggacuucagggucaccaag

SEQ ID NO: 185255 - RNA, 32 nt, Human
ggacuucagguaugcuaauuuggccauuaauu

SEQ ID NO: 185256 - RNA, 23 nt, Human
ggacuucaguaaucaguggcagg

SEQ ID NO: 185257 - RNA, 32 nt, Human
ggacuucagugcccugaggaaaaggcuuuggg

SEQ ID NO: 185258 - RNA, 23 nt, Human
ggacuucaguuaauaauaaugua

SEQ ID NO: 185259 - RNA, 32 nt, Human
ggacuucaguucagguuguauggcaguaggcc

SEQ ID NO: 185260 - RNA, 32 nt, Human
ggacuucauagcagaagaauuggaguuggaag

SEQ ID NO: 185261 - RNA, 32 nt, Human
ggacuuccaaagugcugggauuacagguguga

SEQ ID NO: 185262 - RNA, 32 nt, Human
ggacuuccagccaccagaacugugaagaagaa

SEQ ID NO: 185263 - RNA, 32 nt, Human
ggacuuccagccucaagaacugugagaaaaua

SEQ ID NO: 185264 - RNA, 32 nt, Human
ggacuuccagccuccagaacugugagaaauuu

SEQ ID NO: 185265 - RNA, 32 nt, Human
ggacuuccagcuuccagaacugugagagaaua

SEQ ID NO: 185266 - RNA, 32 nt, Human
ggacuucccgcccuccuucuccaccuucuagu

SEQ ID NO: 185267 - RNA, 32 nt, Human
ggacuuccgaaagcuaccagcacugcacugug

SEQ ID NO: 185268 - RNA, 32 nt, Human
ggacuuccucaagguuuuccugugugcagugg

SEQ ID NO: 185269 - RNA, 32 nt, Human
ggacuuccucacccucuucuauacucuucgcu

SEQ ID NO: 185270 - RNA, 32 nt, Human
ggacuuccugggaggcuguggaucaauuacca

SEQ ID NO: 185271 - RNA, 19 nt, Human
ggacuuccugugggacaag

SEQ ID NO: 185272 - RNA, 32 nt, Human
ggacuucguguccccucuauguucuccuugga

SEQ ID NO: 185273 - RNA, 19 nt, Human
ggacuucucagcgcuccgc

SEQ ID NO: 185274 - RNA, 32 nt, Human
ggacuucugagaugcuugugaaguauagaugu

SEQ ID NO: 185275 - RNA, 32 nt, Human
ggacuucugcaacagauucuguuucuuuuucc

SEQ ID NO: 185276 - RNA, 32 nt, Human
ggacuucugcaggauccgcaacagggcagagg

SEQ ID NO: 185277 - RNA, 31 nt, Human
ggacuucugcauuucugacauagaacacugg

SEQ ID NO: 185278 - RNA, 32 nt, Human
ggacuucugcugcugccaccugcgccagcccu

SEQ ID NO: 185279 - RNA, 32 nt, Human
ggacuucuggccugcagaacugugagacaaua

SEQ ID NO: 185280 - RNA, 18 nt, Human
ggacuucuggcuaugcaa

SEQ ID NO: 185281 - RNA, 32 nt, Human
ggacuucugguuuuggcuuuuucuuuuuaagc

SEQ ID NO: 185282 - RNA, 22 nt, Human
ggacuucuguuccaaaggcugg

SEQ ID NO: 185283 - RNA, 32 nt, Human
ggacuucuuauucaaagcaucaauaauuaaaa

SEQ ID NO: 185284 - RNA, 32 nt, Human
ggacuucuuccagcaauaaguugaaagaauaa

SEQ ID NO: 185285 - RNA, 32 nt, Human
ggacuucuugcagcuccuggaggcagacgcug

SEQ ID NO: 185286 - RNA, 32 nt, Human
ggacuucuugcuggucuagucacgcaugcagu

SEQ ID NO: 185287 - RNA, 32 nt, Human
ggacuucuugugguaagagcaagugcagguau

SEQ ID NO: 185288 - RNA, 32 nt, Human
ggacuugaaagagaacugaggggccacaaaau

SEQ ID NO: 185289 - RNA, 32 nt, Human
ggacuugaagaaagagaaggaagacaugaaga

SEQ ID NO: 185290 - RNA, 32 nt, Human
ggacuugaagaauggccauuccuguacuccac

SEQ ID NO: 185291 - RNA, 32 nt, Human
ggacuugacuuagcauuauccaagcaccaguc

SEQ ID NO: 185292 - RNA, 32 nt, Human
ggacuugagaucugggucuucugaaucuagag

SEQ ID NO: 185293 - RNA, 32 nt, Human
ggacuugagcgagccaguugccggauuauucu

SEQ ID NO: 185294 - RNA, 32 nt, Human
ggacuugaggcagagccugcagcagcugugug

SEQ ID NO: 185295 - RNA, 32 nt, Human
ggacuugaucucaaguggucacaaaguuuucu

SEQ ID NO: 185296 - RNA, 32 nt, Human
ggacuugauuauacacauuucuaaaacccaug

SEQ ID NO: 185297 - RNA, 32 nt, Human
ggacuugcaagggcugccagagguucugauau

SEQ ID NO: 185298 - RNA, 32 nt, Human
ggacuugcagagcccuacgugaagguccagcu

SEQ ID NO: 185299 - RNA, 32 nt, Human
ggacuugccaugagguguugaagccuuguuuc

SEQ ID NO: 185300 - RNA, 32 nt, Human
ggacuugccauugcccccuccacccaccccca

SEQ ID NO: 185301 - RNA, 32 nt, Human
ggacuugccccagggcagcuaccuaugggucu

SEQ ID NO: 185302 - RNA, 32 nt, Human
ggacuugcccucucccuuccuggcacucucau

SEQ ID NO: 185303 - RNA, 32 nt, Human
ggacuugccuguucaaccuuguggccaucauc

SEQ ID NO: 185304 - RNA, 32 nt, Human
ggacuugcggggcagaggagggcgugggcgug

SEQ ID NO: 185305 - RNA, 32 nt, Human
ggacuugcugguaaaggggcagaugcuuuuua

SEQ ID NO: 185306 - RNA, 32 nt, Human
ggacuugcuuccaagcccuucccucuguugga

SEQ ID NO: 185307 - RNA, 19 nt, Human
ggacuuggaacucaggaug

SEQ ID NO: 185308 - RNA, 32 nt, Human
ggacuuggagguagcuuugagguggaagaggg

SEQ ID NO: 185309 - RNA, 32 nt, Human
ggacuuggcuuccgcagggcaggggguggggc

SEQ ID NO: 185310 - RNA, 32 nt, Human
ggacuugggaggcgguuguugcagugagcugu

SEQ ID NO: 185311 - RNA, 18 nt, Human
ggacuuggggguggggug

SEQ ID NO: 185312 - RNA, 32 nt, Human
ggacuuggguggguacuugggugaggaucccu

SEQ ID NO: 185313 - RNA, 32 nt, Human
ggacuugguaaucauagcugaagaggguucau

SEQ ID NO: 185314 - RNA, 32 nt, Human
ggacuuggucuggagcagggacuacuuggaau

SEQ ID NO: 185315 - RNA, 32 nt, Human
ggacuugguggaggaucgugaggaggauuucg

SEQ ID NO: 185316 - RNA, 25 nt, Human
ggacuuggugguucguccugucuca

SEQ ID NO: 185317 - RNA, 32 nt, Human
ggacuugguguugguuucuuucuuucuuuucu

SEQ ID NO: 185318 - RNA, 23 nt, Human
ggacuuguaaaugaaacaaugca

SEQ ID NO: 185319 - RNA, 32 nt, Human
ggacuugucagacuagccacagaggcacuuug

SEQ ID NO: 185320 - RNA, 32 nt, Human
ggacuugucugggggcugcaguggagucagcu

SEQ ID NO: 185321 - RNA, 32 nt, Human
ggacuugugccagcagaacaugugggaggaag

SEQ ID NO: 185322 - RNA, 32 nt, Human
ggacuugugucacaucucucuggaguuuucua

SEQ ID NO: 185323 - RNA, 32 nt, Human
ggacuuguguuccaaugagugacuaggaaaaa

SEQ ID NO: 185324 - RNA, 32 nt, Human
ggacuuguuagacacuuccuuccuucccucau

SEQ ID NO: 185325 - RNA, 16 nt, Human
ggacuuguuccagccc

SEQ ID NO: 185326 - RNA, 32 nt, Human
ggacuuuaaaaagaauaaguauuugagaaaau

SEQ ID NO: 185327 - RNA, 32 nt, Human
ggacuuuaacauccuaugaauuugaaacaucc

SEQ ID NO: 185328 - RNA, 32 nt, Human
ggacuuuaguagccaugaagguccucauccuu

SEQ ID NO: 185329 - RNA, 22 nt, Human
ggacuuuaucgaucucuuuauu

SEQ ID NO: 185330 - RNA, 32 nt, Human
ggacuuuaugccuguuuaccacugagcucugg

SEQ ID NO: 185331 - RNA, 32 nt, Human
ggacuuucacaaucagagauggcagcgguaaa

SEQ ID NO: 185332 - RNA, 32 nt, Human
ggacuuuccuucccucuccugcuuccucuuuu

SEQ ID NO: 185333 - RNA, 32 nt, Human
ggacuuuccuuccucccucccuuuccuccccu

SEQ ID NO: 185334 - RNA, 22 nt, Human
ggacuuucugucuuuuuucauu

SEQ ID NO: 185335 - RNA, 32 nt, Human
ggacuuugaaagucauggggguuuuuauuuug

SEQ ID NO: 185336 - RNA, 32 nt, Human
ggacuuugcaagagauggagacagguuaggug

SEQ ID NO: 185337 - RNA, 32 nt, Human
ggacuuugcaaggacugauggauagcuaccuc

SEQ ID NO: 185338 - RNA, 32 nt, Human
ggacuuugccaccggcuugccuggugguuugc

SEQ ID NO: 185339 - RNA, 32 nt, Human
ggacuuuggagguggggcucugcagcugugag

SEQ ID NO: 185340 - RNA, 32 nt, Human
ggacuuuggggacucaggaagggaggcuugga

SEQ ID NO: 185341 - RNA, 32 nt, Human
ggacuuuguccccagagacccacugugugccc

SEQ ID NO: 185342 - RNA, 32 nt, Human
ggacuuugugcaacugccugugcccgucaucc

SEQ ID NO: 185343 - RNA, 32 nt, Human
ggacuuugugucgagccgagccuggacuuccc

SEQ ID NO: 185344 - RNA, 24 nt, Human
ggacuuuguucucacucacaggga

SEQ ID NO: 185345 - RNA, 32 nt, Human
ggacuuuuauuuucucucuguuuggugcucua

SEQ ID NO: 185346 - RNA, 32 nt, Human
ggacuuuuccagcauguggccucugguggggc

SEQ ID NO: 185347 - RNA, 32 nt, Human
ggacuuuuccuguuguuguacacacacaacag

SEQ ID NO: 185348 - RNA, 32 nt, Human
ggacuuuuguggcugugucugugucugcaaga

SEQ ID NO: 185349 - RNA, 22 nt, Human
ggacuuuuucauuuuucucauu

SEQ ID NO: 185350 - RNA, 21 nt, Human
ggacuuuuuucaucuuuuccu

SEQ ID NO: 185351 - RNA, 24 nt, Human
ggacuuuuuucauguuuucuucac

SEQ ID NO: 185352 - RNA, 32 nt, Human
ggagaaaaacccagacgccaggaaaagaagaa

SEQ ID NO: 185353 - RNA, 32 nt, Human
ggagaaaaagaggggagagagcagagggaggg

SEQ ID NO: 185354 - RNA, 32 nt, Human
ggagaaaaccaaacaaaugcuuuuuggaaagg

SEQ ID NO: 185355 - RNA, 32 nt, Human
ggagaaaacccuaggguuuccucugcccccuc

SEQ ID NO: 185356 - RNA, 32 nt, Human
ggagaaaacuggagauaauugggagaaaauug

SEQ ID NO: 185357 - RNA, 32 nt, Human
ggagaaaacuucuacaagugugaaugaacagu

SEQ ID NO: 185358 - RNA, 32 nt, Human
ggagaaaagcagccugauucggaggaacgggu

SEQ ID NO: 185359 - RNA, 32 nt, Human
ggagaaaagcagggcuagaauuggaacccaaa

SEQ ID NO: 185360 - RNA, 32 nt, Human
ggagaaaagccuuuugagugcaaagaaugugg

SEQ ID NO: 185361 - RNA, 22 nt, Human
ggagaaaagggugcggaggcag

SEQ ID NO: 185362 - RNA, 19 nt, Human
ggagaaaaguggagguaga

SEQ ID NO: 185363 - RNA, 32 nt, Human
ggagaaaauagagacccauccccaaauaccau

SEQ ID NO: 185364 - RNA, 32 nt, Human
ggagaaaaucacccuuucccuuuuucuuugua

SEQ ID NO: 185365 - RNA, 32 nt, Human
ggagaaacaaaauaaaaauuagcuuccaggca

SEQ ID NO: 185366 - RNA, 19 nt, Human
ggagaaacaaagcucaggg

SEQ ID NO: 185367 - RNA, 22 nt, Human
ggagaaacaaggaggaggcagg

SEQ ID NO: 185368 - RNA, 18 nt, Human
ggagaaacaaggaggcag

SEQ ID NO: 185369 - RNA, 22 nt, Human
ggagaaacaaugcauuuugggg

SEQ ID NO: 185370 - RNA, 32 nt, Human
ggagaaacacccuguuaguucccagggagaga

SEQ ID NO: 185371 - RNA, 17 nt, Human
ggagaaacagaccuggg

SEQ ID NO: 185372 - RNA, 16 nt, Human
ggagaaacagccuggg

SEQ ID NO: 185373 - RNA, 32 nt, Human
ggagaaacagccugggcuggggcuacaggucu

SEQ ID NO: 185374 - RNA, 19 nt, Human
ggagaaacagcugcugagg

SEQ ID NO: 185375 - RNA, 18 nt, Human
ggagaaacaggacuuggg

SEQ ID NO: 185376 - RNA, 19 nt, Human
ggagaaacaggcucugaga

SEQ ID NO: 185377 - RNA, 32 nt, Human
ggagaaacaguacauaucuuucugucuuuagu

SEQ ID NO: 185378 - RNA, 19 nt, Human
ggagaaacaguggagggga

SEQ ID NO: 185379 - RNA, 16 nt, Human
ggagaaacauccggga

SEQ ID NO: 185380 - RNA, 21 nt, Human
ggagaaacaucgagaggcaga

SEQ ID NO: 185381 - RNA, 32 nt, Human
ggagaaaccaacauguugaaaagacaaagaau

SEQ ID NO: 185382 - RNA, 32 nt, Human
ggagaaaccagagaugccaacuuccugcuucc

SEQ ID NO: 185383 - RNA, 17 nt, Human
ggagaaaccaggucgga

SEQ ID NO: 185384 - RNA, 32 nt, Human
ggagaaaccaugcacauaaauacggcacaguc

SEQ ID NO: 185385 - RNA, 21 nt, Human
ggagaaaccccaucucuacua

SEQ ID NO: 185386 - RNA, 21 nt, Human
ggagaaacccuaucucuacua

SEQ ID NO: 185387 - RNA, 32 nt, Human
ggagaaacccuugaguugacuugucuagucac

SEQ ID NO: 185388 - RNA, 32 nt, Human
ggagaaaccguuggguaacuuguucaagauau

SEQ ID NO: 185389 - RNA, 18 nt, Human
ggagaaaccucccuggga

SEQ ID NO: 185390 - RNA, 32 nt, Human
ggagaaacuagaaauaugcaacucccuugauu

SEQ ID NO: 185391 - RNA, 18 nt, Human
ggagaaacucuacuaggg

SEQ ID NO: 185392 - RNA, 16 nt, Human
ggagaaacucucuagg

SEQ ID NO: 185393 - RNA, 21 nt, Human
ggagaaacucuggcucugggg

SEQ ID NO: 185394 - RNA, 16 nt, Human
ggagaaacucugguga

SEQ ID NO: 185395 - RNA, 20 nt, Human
ggagaaacuguagucucagg

SEQ ID NO: 185396 - RNA, 18 nt, Human
ggagaaacugugaugggg

SEQ ID NO: 185397 - RNA, 20 nt, Human
ggagaaacuugauucuggga

SEQ ID NO: 185398 - RNA, 32 nt, Human
ggagaaagaaaaugggcacuuuaugucucaga

SEQ ID NO: 185399 - RNA, 32 nt, Human
ggagaaagaacuuccccauacaaauaaggcau

SEQ ID NO: 185400 - RNA, 32 nt, Human
ggagaaagaagagggugaggaggcgacagagg

SEQ ID NO: 185401 - RNA, 32 nt, Human
ggagaaagaagggagaggcagcagucuccucc

SEQ ID NO: 185402 - RNA, 32 nt, Human
ggagaaagacaugcucucaaacugcagacaaa

SEQ ID NO: 185403 - RNA, 25 nt, Human
ggagaaagagagagaaggagagaga

SEQ ID NO: 185404 - RNA, 26 nt, Human
ggagaaagagcugggggaagggcaga

SEQ ID NO: 185405 - RNA, 32 nt, Human
ggagaaagaggaagauggaauccuggaccacu

SEQ ID NO: 185406 - RNA, 19 nt, Human
ggagaaagaggagagacag

SEQ ID NO: 185407 - RNA, 32 nt, Human
ggagaaagagggaggaagagagggagggaggg

SEQ ID NO: 185408 - RNA, 19 nt, Human
ggagaaagagggagggaga

SEQ ID NO: 185409 - RNA, 23 nt, Human
ggagaaagagggagggagagaga

SEQ ID NO: 185410 - RNA, 32 nt, Human
ggagaaagaguccacuccaggacccuuuuccc

SEQ ID NO: 185411 - RNA, 18 nt, Human
ggagaaagaugaggcaga

SEQ ID NO: 185412 - RNA, 32 nt, Human
ggagaaagcaccagggcagcuggcaggaggcg

SEQ ID NO: 185413 - RNA, 32 nt, Human
ggagaaagcagcacuaaagcacucugagucaa

SEQ ID NO: 185414 - RNA, 21 nt, Human
ggagaaagcauaucccaccaa

SEQ ID NO: 185415 - RNA, 32 nt, Human
ggagaaagccuagguucugggcucagguccag

SEQ ID NO: 185416 - RNA, 32 nt, Human
ggagaaagccuuccucuucucucauaggauag

SEQ ID NO: 185417 - RNA, 20 nt, Human
ggagaaagcucuggaggccu

SEQ ID NO: 185418 - RNA, 32 nt, Human
ggagaaagcugauggagccaggacagagaucu

SEQ ID NO: 185419 - RNA, 21 nt, Human
ggagaaaggaaagaaggcaga

SEQ ID NO: 185420 - RNA, 21 nt, Human
ggagaaaggaaggagaggaga

SEQ ID NO: 185421 - RNA, 32 nt, Human
ggagaaaggaagggaagcauuacuggguuacu

SEQ ID NO: 185422 - RNA, 25 nt, Human
ggagaaaggaagggcugcaugcggg

SEQ ID NO: 185423 - RNA, 18 nt, Human
ggagaaaggagaauugaa

SEQ ID NO: 185424 - RNA, 32 nt, Human
ggagaaaggagagaggauaagaagggaaaguu

SEQ ID NO: 185425 - RNA, 21 nt, Human
ggagaaaggagaggaagcaga

SEQ ID NO: 185426 - RNA, 24 nt, Human
ggagaaaggaggggagaaagcggg

SEQ ID NO: 185427 - RNA, 32 nt, Human
ggagaaaggaggucgaggaggagguggucggu

SEQ ID NO: 185428 - RNA, 25 nt, Human
ggagaaaggaucaggaggagacaga

SEQ ID NO: 185429 - RNA, 18 nt, Human
ggagaaagggaagucagg

SEQ ID NO: 185430 - RNA, 32 nt, Human
ggagaaaggggauggagcaguggugcauagcu

SEQ ID NO: 185431 - RNA, 22 nt, Human
ggagaaaggguggcagccggga

SEQ ID NO: 185432 - RNA, 31 nt, Human
ggagaaagugagaggagaguucucugcaucc

SEQ ID NO: 185433 - RNA, 31 nt, Human
ggagaaagugagauuuaaagagguguuccca

SEQ ID NO: 185434 - RNA, 32 nt, Human
ggagaaagugaucugcagggagguggacaccg

SEQ ID NO: 185435 - RNA, 18 nt, Human
ggagaaagugguuuggga

SEQ ID NO: 185436 - RNA, 32 nt, Human
ggagaaauaaagggaggagagaagcacaguga

SEQ ID NO: 185437 - RNA, 18 nt, Human
ggagaaauacaguuggga

SEQ ID NO: 185438 - RNA, 29 nt, Human
ggagaaauaggaguugcaggcagcagcag

SEQ ID NO: 185439 - RNA, 32 nt, Human
ggagaaauauccaucacaugcagcuaaacaag

SEQ ID NO: 185440 - RNA, 18 nt, Human
ggagaaauaucuuuuaga

SEQ ID NO: 185441 - RNA, 32 nt, Human
ggagaaaucugacagacaccagcucagccagg

SEQ ID NO: 185442 - RNA, 32 nt, Human
ggagaaaucuguagugagcaaaggacagacca

SEQ ID NO: 185443 - RNA, 17 nt, Human
ggagaaaugucaugaga

SEQ ID NO: 185444 - RNA, 19 nt, Human
ggagaaauucccucuagga

SEQ ID NO: 185445 - RNA, 17 nt, Human
ggagaaauuccuaggga

SEQ ID NO: 185446 - RNA, 18 nt, Human
ggagaaauuucugcagga

SEQ ID NO: 185447 - RNA, 32 nt, Human
ggagaacacacguguuggcgcuucuuggcagc

SEQ ID NO: 185448 - RNA, 32 nt, Human
ggagaacaccaagaggccagagcccaggacac

SEQ ID NO: 185449 - RNA, 32 nt, Human
ggagaacacuuacuguggacagucccagaugu

SEQ ID NO: 185450 - RNA, 32 nt, Human
ggagaacaggcaggugagcugguaguggagca

SEQ ID NO: 185451 - RNA, 32 nt, Human
ggagaacaggguggaagaucugggggagcuaa

SEQ ID NO: 185452 - RNA, 32 nt, Human
ggagaacaggugacaauauacacaugugcgcu

SEQ ID NO: 185453 - RNA, 17 nt, Human
ggagaacagucccuggg

SEQ ID NO: 185454 - RNA, 32 nt, Human
ggagaacaugcuuguuaaauaugcagguagau

SEQ ID NO: 185455 - RNA, 32 nt, Human
ggagaacaugggcagagucuccauccagcagc

SEQ ID NO: 185456 - RNA, 32 nt, Human
ggagaaccaaaggccacauacaugacaaaaag

SEQ ID NO: 185457 - RNA, 32 nt, Human
ggagaaccaaauagauaaauagccagguuguu

SEQ ID NO: 185458 - RNA, 18 nt, Human
ggagaaccacuacaugca

SEQ ID NO: 185459 - RNA, 32 nt, Human
ggagaaccagaugggcugggcagaucaagcac

SEQ ID NO: 185460 - RNA, 16 nt, Human
ggagaaccagcuggga

SEQ ID NO: 185461 - RNA, 22 nt, Human
ggagaacccagggauucuggga

SEQ ID NO: 185462 - RNA, 22 nt, Human
ggagaaccccagaucucugggg

SEQ ID NO: 185463 - RNA, 32 nt, Human
ggagaaccccaggacgcccucacugcaggcuc

SEQ ID NO: 185464 - RNA, 32 nt, Human
ggagaacccgggaggcggagcuugcagugagc

SEQ ID NO: 185465 - RNA, 32 nt, Human
ggagaaccucaagcuccuggccugauccagcu

SEQ ID NO: 185466 - RNA, 32 nt, Human
ggagaaccucuuuuucucccucgacucuuccu

SEQ ID NO: 185467 - RNA, 20 nt, Human
ggagaaccugcucucuggga

SEQ ID NO: 185468 - RNA, 32 nt, Human
ggagaaccugcugggcaccccugcugcaggug

SEQ ID NO: 185469 - RNA, 23 nt, Human
ggagaaccuggauguacuuaaga

SEQ ID NO: 185470 - RNA, 31 nt, Human
ggagaacggagaagaaguuguagcagaggga

SEQ ID NO: 185471 - RNA, 32 nt, Human
ggagaacggagaagaaguuguagcagagggaa

SEQ ID NO: 185472 - RNA, 32 nt, Human
ggagaacguguguucguacuccaggcuaaccc

SEQ ID NO: 185473 - RNA, 32 nt, Human
ggagaacuaguuaggaggauggccugaggcca

SEQ ID NO: 185474 - RNA, 22 nt, Human
ggagaacucaggaggccugcag

SEQ ID NO: 185475 - RNA, 32 nt, Human
ggagaacucgccaaccucgcugugcugccaag

SEQ ID NO: 185476 - RNA, 32 nt, Human
ggagaacugaccucucugggacucaaccgugg

SEQ ID NO: 185477 - RNA, 32 nt, Human
ggagaacugcaacgccuacgcccccagucgug

SEQ ID NO: 185478 - RNA, 32 nt, Human
ggagaacugcagcugcugugccugugugggaa

SEQ ID NO: 185479 - RNA, 32 nt, Human
ggagaacugccucauucuggcuuugguagagu

SEQ ID NO: 185480 - RNA, 32 nt, Human
ggagaacuggugacccagaagggguggcgaag

SEQ ID NO: 185481 - RNA, 32 nt, Human
ggagaacuucugaaacagcaguucucaaaaug

SEQ ID NO: 185482 - RNA, 32 nt, Human
ggagaacuuguuuccugcuauuuggaagagau

SEQ ID NO: 185483 - RNA, 17 nt, Human
ggagaacuuuuuuggga

SEQ ID NO: 185484 - RNA, 32 nt, Human
ggagaagaaaaguugcuggagaccauggccaa

SEQ ID NO: 185485 - RNA, 18 nt, Human
ggagaagaaaggaggcag

SEQ ID NO: 185486 - RNA, 32 nt, Human
ggagaagaaccauuuacaugcaccuuauauuu

SEQ ID NO: 185487 - RNA, 32 nt, Human
ggagaagaagaaagcggaaaagaggcagauuc

SEQ ID NO: 185488 - RNA, 32 nt, Human
ggagaagaagaguccagccaccaucuuccuga

SEQ ID NO: 185489 - RNA, 32 nt, Human
ggagaagaauacuuuucuucaacaaauuuugg

SEQ ID NO: 185490 - RNA, 32 nt, Human
ggagaagaaugaauccucugagguccccagcu

SEQ ID NO: 185491 - RNA, 32 nt, Human
ggagaagaccucuugccucauggaugucuggu

SEQ ID NO: 185492 - RNA, 32 nt, Human
ggagaagacuguguggauccaccagaagaugg

SEQ ID NO: 185493 - RNA, 32 nt, Human
ggagaagagaagcagacgggagcagaagggac

SEQ ID NO: 185494 - RNA, 32 nt, Human
ggagaagagacaaacuccuaugucaugagaau

SEQ ID NO: 185495 - RNA, 32 nt, Human
ggagaagagagaagaaacuggagcagccuguu

SEQ ID NO: 185496 - RNA, 32 nt, Human
ggagaagagagggagggguagggagaggagcc

SEQ ID NO: 185497 - RNA, 32 nt, Human
ggagaagagccugcaaauggccaaugaaggag

SEQ ID NO: 185498 - RNA, 32 nt, Human
ggagaagaggagagacaggcaggaaaggccac

SEQ ID NO: 185499 - RNA, 32 nt, Human
ggagaagagggagggagcgagagcgagagaau

SEQ ID NO: 185500 - RNA, 32 nt, Human
ggagaagagugaggagaaaggaaacucaaguc

SEQ ID NO: 185501 - RNA, 32 nt, Human
ggagaagaugcagacacaggagauccugagga

SEQ ID NO: 185502 - RNA, 32 nt, Human
ggagaagaugcugaggaugcggaccgcgggau

SEQ ID NO: 185503 - RNA, 32 nt, Human
ggagaagauuccagaaggucuugagacacucc

SEQ ID NO: 185504 - RNA, 18 nt, Human
ggagaagauucucugggg

SEQ ID NO: 185505 - RNA, 32 nt, Human
ggagaagcaagggucauucuguucucaagugg

SEQ ID NO: 185506 - RNA, 32 nt, Human
ggagaagcacuauccuugcagcccuuguggug

SEQ ID NO: 185507 - RNA, 32 nt, Human
ggagaagcagaagcagucaguguugggguacc

SEQ ID NO: 185508 - RNA, 32 nt, Human
ggagaagcagagccauggguacgccggagaug

SEQ ID NO: 185509 - RNA, 32 nt, Human
ggagaagcagcucuacagcagagauuaucuuc

SEQ ID NO: 185510 - RNA, 32 nt, Human
ggagaagcaggcauagacagauucagauaagu

SEQ ID NO: 185511 - RNA, 17 nt, Human
ggagaagcagucugggg

SEQ ID NO: 185512 - RNA, 32 nt, Human
ggagaagcagugagccgcaucuucuccaucug

SEQ ID NO: 185513 - RNA, 26 nt, Human
ggagaagccaaagaggaggaggcagg

SEQ ID NO: 185514 - RNA, 32 nt, Human
ggagaagcccaggacugggagaaucgcacgug

SEQ ID NO: 185515 - RNA, 17 nt, Human
ggagaagcccucuggga

SEQ ID NO: 185516 - RNA, 16 nt, Human
ggagaagccucaggga

SEQ ID NO: 185517 - RNA, 32 nt, Human
ggagaagccuccacuccauugucuccuggccc

SEQ ID NO: 185518 - RNA, 32 nt, Human
ggagaagccugagacaagccacagaaccccuc

SEQ ID NO: 185519 - RNA, 32 nt, Human
ggagaagccuugcaucaaccucuugggccuca

SEQ ID NO: 185520 - RNA, 32 nt, Human
ggagaagcgaauguguccguccauccagcgga

SEQ ID NO: 185521 - RNA, 32 nt, Human
ggagaagcgcugucccggggccguggugcccg

SEQ ID NO: 185522 - RNA, 32 nt, Human
ggagaagcucaaguggacgucccccuucaccu

SEQ ID NO: 185523 - RNA, 16 nt, Human
ggagaagcucccuggg

SEQ ID NO: 185524 - RNA, 18 nt, Human
ggagaagcucuccgagga

SEQ ID NO: 185525 - RNA, 32 nt, Human
ggagaagcucugcuuucuuucucuccaacuuu

SEQ ID NO: 185526 - RNA, 32 nt, Human
ggagaagcucugggacuggggcagcagcaagg

SEQ ID NO: 185527 - RNA, 32 nt, Human
ggagaagcugcagcugcaggagugcuuguggg

SEQ ID NO: 185528 - RNA, 18 nt, Human
ggagaagcugccagggca

SEQ ID NO: 185529 - RNA, 18 nt, Human
ggagaagcuggccaggga

SEQ ID NO: 185530 - RNA, 17 nt, Human
ggagaagcugucaggga

SEQ ID NO: 185531 - RNA, 19 nt, Human
ggagaagcuguugcugaga

SEQ ID NO: 185532 - RNA, 32 nt, Human
ggagaaggaagcuuccaaguucugagagccca

SEQ ID NO: 185533 - RNA, 19 nt, Human
ggagaaggacuuucuggga

SEQ ID NO: 185534 - RNA, 32 nt, Human
ggagaaggagagaaagagacgggagagaggag

SEQ ID NO: 185535 - RNA, 17 nt, Human
ggagaaggagaggcaga

SEQ ID NO: 185536 - RNA, 32 nt, Human
ggagaaggagcaaugcugaggggugaggccuc

SEQ ID NO: 185537 - RNA, 32 nt, Human
ggagaaggagccccaccucucccaggcgagua

SEQ ID NO: 185538 - RNA, 32 nt, Human
ggagaaggagcccccagcccagccucauccug

SEQ ID NO: 185539 - RNA, 32 nt, Human
ggagaaggaggaagagggggaggaggaagagg

SEQ ID NO: 185540 - RNA, 21 nt, Human
ggagaaggaggaggaggaaga

SEQ ID NO: 185541 - RNA, 32 nt, Human
ggagaaggaggaggaggaagagagugugaaac

SEQ ID NO: 185542 - RNA, 32 nt, Human
ggagaaggaggaggaggaagaggaggagcgca

SEQ ID NO: 185543 - RNA, 32 nt, Human
ggagaaggaggcagcgcaggaggccggagcgg

SEQ ID NO: 185544 - RNA, 32 nt, Human
ggagaaggaggcggagggagcgauuguggccc

SEQ ID NO: 185545 - RNA, 32 nt, Human
ggagaaggauucgcggcggugacagauuaaau

SEQ ID NO: 185546 - RNA, 32 nt, Human
ggagaaggcagcacaucacaaccugucacauu

SEQ ID NO: 185547 - RNA, 32 nt, Human
ggagaaggcaggcagggcccagugagagggga

SEQ ID NO: 185548 - RNA, 32 nt, Human
ggagaaggcccugcggcugcagaaggagcagc

SEQ ID NO: 185549 - RNA, 32 nt, Human
ggagaaggcgagcgcggcagucgcgccggcgc

SEQ ID NO: 185550 - RNA, 32 nt, Human
ggagaaggcgucuugcuuugucacccacgcug

SEQ ID NO: 185551 - RNA, 32 nt, Human
ggagaaggcucccuccccauggggcagcauca

SEQ ID NO: 185552 - RNA, 18 nt, Human
ggagaaggcucuacagga

SEQ ID NO: 185553 - RNA, 32 nt, Human
ggagaaggcucugcaagagcucccuggcaaua

SEQ ID NO: 185554 - RNA, 32 nt, Human
ggagaaggcugaagacugaggaauccucuuuc

SEQ ID NO: 185555 - RNA, 32 nt, Human
ggagaaggcugcaugcagccucaggccugccc

SEQ ID NO: 185556 - RNA, 32 nt, Human
ggagaagggaaacuguacuuuucccugugagg

SEQ ID NO: 185557 - RNA, 32 nt, Human
ggagaagggaccuggcuggaaagcuuugcccc

SEQ ID NO: 185558 - RNA, 31 nt, Human
ggagaagggagaccuggcaguggagggaggc

SEQ ID NO: 185559 - RNA, 32 nt, Human
ggagaagggaggugggaggaggcaaagaaacu

SEQ ID NO: 185560 - RNA, 32 nt, Human
ggagaagggauauguugugagcauauaccuuc

SEQ ID NO: 185561 - RNA, 32 nt, Human
ggagaagggcauuucuggaggcagcaauauga

SEQ ID NO: 185562 - RNA, 32 nt, Human
ggagaaggggaaggaaggggcuuugggaucug

SEQ ID NO: 185563 - RNA, 32 nt, Human
ggagaaggggagacaaaaccacugcagaccua

SEQ ID NO: 185564 - RNA, 32 nt, Human
ggagaaggggaugugcaagcacauauggaggg

SEQ ID NO: 185565 - RNA, 32 nt, Human
ggagaaggggccagggguucugggcagcgcug

SEQ ID NO: 185566 - RNA, 32 nt, Human
ggagaagggugaggaugggcauuuagacccga

SEQ ID NO: 185567 - RNA, 32 nt, Human
ggagaagguaacauuggaguccugguuugauu

SEQ ID NO: 185568 - RNA, 32 nt, Human
ggagaagguauaguggaaugagugugagcauc

SEQ ID NO: 185569 - RNA, 16 nt, Human
ggagaaggucugggga

SEQ ID NO: 185570 - RNA, 32 nt, Human
ggagaaggugugagcaugagccuauuggacac

SEQ ID NO: 185571 - RNA, 32 nt, Human
ggagaagguguuauggggcagguggagggccc

SEQ ID NO: 185572 - RNA, 17 nt, Human
ggagaagguucguggga

SEQ ID NO: 185573 - RNA, 18 nt, Human
ggagaagguugcagugag

SEQ ID NO: 185574 - RNA, 32 nt, Human
ggagaaguauuuuuaugagacucuuuacucag

SEQ ID NO: 185575 - RNA, 32 nt, Human
ggagaagucaucucaugacaacagaagggagg

SEQ ID NO: 185576 - RNA, 16 nt, Human
ggagaagucuauggga

SEQ ID NO: 185577 - RNA, 32 nt, Human
ggagaagugaaaaggccccagccggggugaau

SEQ ID NO: 185578 - RNA, 32 nt, Human
ggagaagugaagauguaacauguuaucugucg

SEQ ID NO: 185579 - RNA, 32 nt, Human
ggagaagugagcaccaguaaagaucuggccuc

SEQ ID NO: 185580 - RNA, 32 nt, Human
ggagaagugcagcugcugcgccugugucggga

SEQ ID NO: 185581 - RNA, 32 nt, Human
ggagaagugcagcugcugugccugauguggga

SEQ ID NO: 185582 - RNA, 32 nt, Human
ggagaagugcagcugcugugccugugugggaa

SEQ ID NO: 185583 - RNA, 32 nt, Human
ggagaagugcagcugcugugccugugugggga

SEQ ID NO: 185584 - RNA, 31 nt, Human
ggagaaguggagagagaccgcuggcaggaug

SEQ ID NO: 185585 - RNA, 32 nt, Human
ggagaagugguaucagcugcuccuccucuccu

SEQ ID NO: 185586 - RNA, 32 nt, Human
ggagaaguucuagauucccacuguccaauaga

SEQ ID NO: 185587 - RNA, 32 nt, Human
ggagaauacucacccuucagaaacagaccaaa

SEQ ID NO: 185588 - RNA, 19 nt, Human
ggagaauagggcucugaga

SEQ ID NO: 185589 - RNA, 32 nt, Human
ggagaauaguaguucuggaauauugccgggug

SEQ ID NO: 185590 - RNA, 32 nt, Human
ggagaauaugcuggacuggccacuauccgagc

SEQ ID NO: 185591 - RNA, 32 nt, Human
ggagaaucacaaggucaggagacugagaccau

SEQ ID NO: 185592 - RNA, 32 nt, Human
ggagaaucaccugaacccccaggcuggaguac

SEQ ID NO: 185593 - RNA, 32 nt, Human
ggagaaucaccugagccugggcaauagaacaa

SEQ ID NO: 185594 - RNA, 32 nt, Human
ggagaaucacuagaagccaggaggcagagguu

SEQ ID NO: 185595 - RNA, 23 nt, Human
ggagaaucacuuaaacccaggug

SEQ ID NO: 185596 - RNA, 22 nt, Human
ggagaaucacuucaacccagga

SEQ ID NO: 185597 - RNA, 21 nt, Human
ggagaaucacuugaacccaga

SEQ ID NO: 185598 - RNA, 21 nt, Human
ggagaaucacuugaacccagg

SEQ ID NO: 185599 - RNA, 22 nt, Human
ggagaaucacuugaacccagga

SEQ ID NO: 185600 - RNA, 21 nt, Human
ggagaaucacuugaacccgga

SEQ ID NO: 185601 - RNA, 21 nt, Human
ggagaaucacuugaacccggg

SEQ ID NO: 185602 - RNA, 32 nt, Human
ggagaaucacuugaaccuggaggcagagguug

SEQ ID NO: 185603 - RNA, 32 nt, Human
ggagaaucacuugaacuaggaggcagagguug

SEQ ID NO: 185604 - RNA, 32 nt, Human
ggagaaucacuugaagccaggaggcggagguu

SEQ ID NO: 185605 - RNA, 32 nt, Human
ggagaaucacuugacccaggagguggaggucg

SEQ ID NO: 185606 - RNA, 23 nt, Human
ggagaaucacuugaccccaggug

SEQ ID NO: 185607 - RNA, 32 nt, Human
ggagaaucacuugaggccaggaauuccagauc

SEQ ID NO: 185608 - RNA, 22 nt, Human
ggagaaucacuugcacuccgga

SEQ ID NO: 185609 - RNA, 21 nt, Human
ggagaaucacuuuaacccggg

SEQ ID NO: 185610 - RNA, 21 nt, Human
ggagaaucagcccugcuggga

SEQ ID NO: 185611 - RNA, 32 nt, Human
ggagaaucauuuccaaccauuauuuacugcag

SEQ ID NO: 185612 - RNA, 32 nt, Human
ggagaaucauuuccuugucauuccaccuucua

SEQ ID NO: 185613 - RNA, 32 nt, Human
ggagaauccaccagcacaagaagaggaggcag

SEQ ID NO: 185614 - RNA, 24 nt, Human
ggagaaucccuuuggacagucuuu

SEQ ID NO: 185615 - RNA, 32 nt, Human
ggagaauccucucugccauucuuccaaucucc

SEQ ID NO: 185616 - RNA, 32 nt, Human
ggagaauccuugaggccaggagguugaggcug

SEQ ID NO: 185617 - RNA, 21 nt, Human
ggagaaucgccugaacccaga

SEQ ID NO: 185618 - RNA, 21 nt, Human
ggagaaucgccugaacccggg

SEQ ID NO: 185619 - RNA, 21 nt, Human
ggagaaucgcucugguggaug

SEQ ID NO: 185620 - RNA, 21 nt, Human
ggagaaucgcuuaaacccagg

SEQ ID NO: 185621 - RNA, 17 nt, Human
ggagaaucgcuuaaccc

SEQ ID NO: 185622 - RNA, 21 nt, Human
ggagaaucgcuucaaccuggg

SEQ ID NO: 185623 - RNA, 18 nt, Human
ggagaaucgcuugaaccc

SEQ ID NO: 185624 - RNA, 21 nt, Human
ggagaaucgcuugaacccaga

SEQ ID NO: 185625 - RNA, 22 nt, Human
ggagaaucgcuugaacccgcga

SEQ ID NO: 185626 - RNA, 32 nt, Human
ggagaaucgcuugacccaggaggcggagguug

SEQ ID NO: 185627 - RNA, 21 nt, Human
ggagaaucgcuugagcccaga

SEQ ID NO: 185628 - RNA, 32 nt, Human
ggagaaucgcuugagccugggcaguugaggcu

SEQ ID NO: 185629 - RNA, 32 nt, Human
ggagaaucgcuugagcuggagugcaguggugc

SEQ ID NO: 185630 - RNA, 32 nt, Human
ggagaaucgcuugaggccagaagugcaagacc

SEQ ID NO: 185631 - RNA, 21 nt, Human
ggagaaucgcuuuaacuggga

SEQ ID NO: 185632 - RNA, 22 nt, Human
ggagaaucgcuuuaaucuagga

SEQ ID NO: 185633 - RNA, 32 nt, Human
ggagaaucucacuuuuccuacucucguauuuu

SEQ ID NO: 185634 - RNA, 32 nt, Human
ggagaaucugaggacucagaauucagcaacua

SEQ ID NO: 185635 - RNA, 32 nt, Human
ggagaaucuguaccaccucuuugccaggggga

SEQ ID NO: 185636 - RNA, 32 nt, Human
ggagaaugaaaaacuagagucagacagcuuua

SEQ ID NO: 185637 - RNA, 32 nt, Human
ggagaaugaaggagguagagguuugacugugg

SEQ ID NO: 185638 - RNA, 32 nt, Human
ggagaaugacuggcccaaagucacucggcugg

SEQ ID NO: 185639 - RNA, 32 nt, Human
ggagaaugagacaugcuuuuccagcuguuugg

SEQ ID NO: 185640 - RNA, 32 nt, Human
ggagaaugaggugggaggauugcuugagcuca

SEQ ID NO: 185641 - RNA, 30 nt, Human
ggagaauggaggagcacacagaggcaggcu

SEQ ID NO: 185642 - RNA, 31 nt, Human
ggagaauggcuucucccuugggaggcgcugg

SEQ ID NO: 185643 - RNA, 32 nt, Human
ggagaauggcuugacccaggaagcggagguug

SEQ ID NO: 185644 - RNA, 32 nt, Human
ggagaauggugcggagcuugcagugagccgag

SEQ ID NO: 185645 - RNA, 32 nt, Human
ggagaauguauucuuuugaugaugugcuggag

SEQ ID NO: 185646 - RNA, 32 nt, Human
ggagaaugucaaggcaaguucuaaauuaguuu

SEQ ID NO: 185647 - RNA, 16 nt, Human
ggagaauguccugggg

SEQ ID NO: 185648 - RNA, 23 nt, Human
ggagaaugugaaggaugguuugg

SEQ ID NO: 185649 - RNA, 32 nt, Human
ggagaauguggaaugcagagugauaauccugc

SEQ ID NO: 185650 - RNA, 32 nt, Human
ggagaauugcuggaacguggaggcagagguug

SEQ ID NO: 185651 - RNA, 32 nt, Human
ggagaauugcuugaacagggaggcagagguug

SEQ ID NO: 185652 - RNA, 32 nt, Human
ggagaauugcuugaacccggaggcagagguug

SEQ ID NO: 185653 - RNA, 32 nt, Human
ggagaauugcuugaaccgggaggcagaaguug

SEQ ID NO: 185654 - RNA, 32 nt, Human
ggagaauugcuugacccaggaggcagagguug

SEQ ID NO: 185655 - RNA, 32 nt, Human
ggagaauugcuugaggccaggaguuugagacc

SEQ ID NO: 185656 - RNA, 32 nt, Human
ggagaauugggggugguugccgggaggaccag

SEQ ID NO: 185657 - RNA, 32 nt, Human
ggagaauuuuuaaaacaaaaucucucauucca

SEQ ID NO: 185658 - RNA, 32 nt, Human
ggagacaagauccaaacugagauggagacugu

SEQ ID NO: 185659 - RNA, 32 nt, Human
ggagacaagcacagcacacagacauuuuagga

SEQ ID NO: 185660 - RNA, 32 nt, Human
ggagacaaggcggccauggauuugcccuugau

SEQ ID NO: 185661 - RNA, 32 nt, Human
ggagacaaggcuuugccauguugcccaggcug

SEQ ID NO: 185662 - RNA, 32 nt, Human
ggagacaaggucucgccauguugccuaggaug

SEQ ID NO: 185663 - RNA, 32 nt, Human
ggagacaaggucucuccauguugccuaggcug

SEQ ID NO: 185664 - RNA, 19 nt, Human
ggagacaauccugguuuca

SEQ ID NO: 185665 - RNA, 32 nt, Human
ggagacaauguguaccaggacagcagaaagac

SEQ ID NO: 185666 - RNA, 20 nt, Human
ggagacacaaaagagacaga

SEQ ID NO: 185667 - RNA, 19 nt, Human
ggagacacagcagcggugu

SEQ ID NO: 185668 - RNA, 32 nt, Human
ggagacacagccgccacucccccagucuacuu

SEQ ID NO: 185669 - RNA, 32 nt, Human
ggagacacauggccacuggccacugaauggcu

SEQ ID NO: 185670 - RNA, 32 nt, Human
ggagacaccagcagguggcugcagugacguua

SEQ ID NO: 185671 - RNA, 32 nt, Human
ggagacacccaggaggaaggccgugcuccugg

SEQ ID NO: 185672 - RNA, 16 nt, Human
ggagacaccucugggg

SEQ ID NO: 185673 - RNA, 32 nt, Human
ggagacacuacccuuccaugccccagaccucu

SEQ ID NO: 185674 - RNA, 32 nt, Human
ggagacacuccaggaagaccugcaggugggag

SEQ ID NO: 185675 - RNA, 32 nt, Human
ggagacacugacuccagccaagaaaccugagc

SEQ ID NO: 185676 - RNA, 32 nt, Human
ggagacagaacaacagagucucagggaaagag

SEQ ID NO: 185677 - RNA, 22 nt, Human
ggagacagaaggcagcaaacaa

SEQ ID NO: 185678 - RNA, 32 nt, Human
ggagacagaaucucacuccagccugggcaaca

SEQ ID NO: 185679 - RNA, 32 nt, Human
ggagacagacagagaaggcagcaggcggccuu

SEQ ID NO: 185680 - RNA, 22 nt, Human
ggagacagacggcagcaaacaa

SEQ ID NO: 185681 - RNA, 32 nt, Human
ggagacagacuggacauuucccuguuucgagc

SEQ ID NO: 185682 - RNA, 32 nt, Human
ggagacagagucucacucugucacccaggcug

SEQ ID NO: 185683 - RNA, 32 nt, Human
ggagacagagucuggcucugucacccaggcug

SEQ ID NO: 185684 - RNA, 32 nt, Human
ggagacagagucuugcucugucacccaggcug

SEQ ID NO: 185685 - RNA, 32 nt, Human
ggagacagagucuugcucugucucaaaagaau

SEQ ID NO: 185686 - RNA, 32 nt, Human
ggagacagagucuugcuuuguugcccaggcug

SEQ ID NO: 185687 - RNA, 32 nt, Human
ggagacagcaugggaugccauugccuagaguu

SEQ ID NO: 185688 - RNA, 21 nt, Human
ggagacagccacccacaguga

SEQ ID NO: 185689 - RNA, 32 nt, Human
ggagacagccagggugugucaccugacaggcu

SEQ ID NO: 185690 - RNA, 32 nt, Human
ggagacagccgccaccccacaggccgggcuac

SEQ ID NO: 185691 - RNA, 16 nt, Human
ggagacagccucagag

SEQ ID NO: 185692 - RNA, 32 nt, Human
ggagacagcuguuccacuugcacacacgcaca

SEQ ID NO: 185693 - RNA, 32 nt, Human
ggagacaggaaguggagguaaagcaaaggaag

SEQ ID NO: 185694 - RNA, 32 nt, Human
ggagacaggaugcuuaugagggccagugcaag

SEQ ID NO: 185695 - RNA, 32 nt, Human
ggagacaggauuuuaccauguuggccaggcug

SEQ ID NO: 185696 - RNA, 32 nt, Human
ggagacaggcagacauuuggucucagcagcca

SEQ ID NO: 185697 - RNA, 32 nt, Human
ggagacaggcagggagggcuuggggcugcacc

SEQ ID NO: 185698 - RNA, 32 nt, Human
ggagacaggcauauucaugggucaucaaaauc

SEQ ID NO: 185699 - RNA, 32 nt, Human
ggagacaggccguccugcugucuugcuucucc

SEQ ID NO: 185700 - RNA, 17 nt, Human
ggagacaggcucagaga

SEQ ID NO: 185701 - RNA, 32 nt, Human
ggagacaggcuucuauccacucugccugcggu

SEQ ID NO: 185702 - RNA, 32 nt, Human
ggagacagggacgcaggagggugcaaggaagu

SEQ ID NO: 185703 - RNA, 21 nt, Human
ggagacagggcagggguucag

SEQ ID NO: 185704 - RNA, 32 nt, Human
ggagacagggcuuuuucucucccucuggcgag

SEQ ID NO: 185705 - RNA, 32 nt, Human
ggagacagggucucaccauguuggcuaggcug

SEQ ID NO: 185706 - RNA, 32 nt, Human
ggagacagggucucacucugucacacaggcug

SEQ ID NO: 185707 - RNA, 32 nt, Human
ggagacagggucucacuguguugcccaggcug

SEQ ID NO: 185708 - RNA, 32 nt, Human
ggagacagggucucgcucuguugcccaggcug

SEQ ID NO: 185709 - RNA, 32 nt, Human
ggagacagggucuugcacuaucacccaggcug

SEQ ID NO: 185710 - RNA, 32 nt, Human
ggagacagggucuugcucugucacccagacug

SEQ ID NO: 185711 - RNA, 32 nt, Human
ggagacagggucuugcucugucgcccagacug

SEQ ID NO: 185712 - RNA, 32 nt, Human
ggagacaggguuucaacauguuggccaggcug

SEQ ID NO: 185713 - RNA, 32 nt, Human
ggagacaggguuucaccauguuggccaggcug

SEQ ID NO: 185714 - RNA, 32 nt, Human
ggagacaggguuuugccauguugcccagguug

SEQ ID NO: 185715 - RNA, 32 nt, Human
ggagacaguggauucuugccucggugagguca

SEQ ID NO: 185716 - RNA, 32 nt, Human
ggagacaguggccgccggcggcccaacccguc

SEQ ID NO: 185717 - RNA, 32 nt, Human
ggagacaguuguguggugugugcauugugugu

SEQ ID NO: 185718 - RNA, 32 nt, Human
ggagacaguuuuggucgucacagcagaggggc

SEQ ID NO: 185719 - RNA, 32 nt, Human
ggagacaucacugacccaggacaccuagcaca

SEQ ID NO: 185720 - RNA, 32 nt, Human
ggagacaucgcccaugugcuucugcuacuggu

SEQ ID NO: 185721 - RNA, 32 nt, Human
ggagacaucugucuggcgaucagcaucaccaa

SEQ ID NO: 185722 - RNA, 32 nt, Human
ggagacaugaagaugaccagacugggcaaauu

SEQ ID NO: 185723 - RNA, 31 nt, Human
ggagacauggaggcagcuguggcgguguuag

SEQ ID NO: 185724 - RNA, 32 nt, Human
ggagacaugucauuuguaaaagcagaaaaagg

SEQ ID NO: 185725 - RNA, 21 nt, Human
ggagacauuaaaggauggaug

SEQ ID NO: 185726 - RNA, 32 nt, Human
ggagacauuauggggcguccaccaccaccccu

SEQ ID NO: 185727 - RNA, 32 nt, Human
ggagacauuccaucuccagacacccagagacg

SEQ ID NO: 185728 - RNA, 32 nt, Human
ggagacauugucaugaacucuuugccaagguc

SEQ ID NO: 185729 - RNA, 25 nt, Human
ggagaccaaaugagaaggauugcuu

SEQ ID NO: 185730 - RNA, 17 nt, Human
ggagaccaacucugggg

SEQ ID NO: 185731 - RNA, 32 nt, Human
ggagaccaagcagcagaugcagguguggaccc

SEQ ID NO: 185732 - RNA, 25 nt, Human
ggagaccaaggcaagaggauugcuu

SEQ ID NO: 185733 - RNA, 32 nt, Human
ggagaccaaggcaagaggauugcuugagucca

SEQ ID NO: 185734 - RNA, 20 nt, Human
ggagaccaaggcagguggau

SEQ ID NO: 185735 - RNA, 32 nt, Human
ggagaccaagguggguggaucgcuugagcuca

SEQ ID NO: 185736 - RNA, 21 nt, Human
ggagaccaaugguaugacaga

SEQ ID NO: 185737 - RNA, 32 nt, Human
ggagaccaauuccuaaaggguaaagaaggguu

SEQ ID NO: 185738 - RNA, 19 nt, Human
ggagaccacgcuccuggag

SEQ ID NO: 185739 - RNA, 32 nt, Human
ggagaccacggugaaaccccgucucuacuaaa

SEQ ID NO: 185740 - RNA, 19 nt, Human
ggagaccagacauacucua

SEQ ID NO: 185741 - RNA, 32 nt, Human
ggagaccagccuccuuaaucccuucccccgcc

SEQ ID NO: 185742 - RNA, 32 nt, Human
ggagaccagccuggccaagauggugaaacccu

SEQ ID NO: 185743 - RNA, 16 nt, Human
ggagaccaggaagcca

SEQ ID NO: 185744 - RNA, 22 nt, Human
ggagaccaggaauggaguucca

SEQ ID NO: 185745 - RNA, 22 nt, Human
ggagaccaggacaaggaacaga

SEQ ID NO: 185746 - RNA, 32 nt, Human
ggagaccagggacaggagagccagcagggugg

SEQ ID NO: 185747 - RNA, 24 nt, Human
ggagaccagggcaggauagacaga

SEQ ID NO: 185748 - RNA, 32 nt, Human
ggagaccagggccaggaggguggaggccucuc

SEQ ID NO: 185749 - RNA, 32 nt, Human
ggagaccagguguugucugacaucccacacac

SEQ ID NO: 185750 - RNA, 32 nt, Human
ggagaccaucuuggcaaucucugccucugcaa

SEQ ID NO: 185751 - RNA, 32 nt, Human
ggagacccaagugggcccggcgccaacggcuc

SEQ ID NO: 185752 - RNA, 32 nt, Human
ggagacccagcagcccccagacuacuucuauc

SEQ ID NO: 185753 - RNA, 32 nt, Human
ggagacccagcagccuguagguggagggugag

SEQ ID NO: 185754 - RNA, 19 nt, Human
ggagacccagcccgggcug

SEQ ID NO: 185755 - RNA, 17 nt, Human
ggagaccccagaccccu

SEQ ID NO: 185756 - RNA, 32 nt, Human
ggagaccccagggccucucaggagacagugag

SEQ ID NO: 185757 - RNA, 21 nt, Human
ggagaccccaucucuacaaaa

SEQ ID NO: 185758 - RNA, 23 nt, Human
ggagaccccgaagggaggcugcu

SEQ ID NO: 185759 - RNA, 19 nt, Human
ggagaccccucccgagccg

SEQ ID NO: 185760 - RNA, 23 nt, Human
ggagaccccugccuggccccggg

SEQ ID NO: 185761 - RNA, 32 nt, Human
ggagaccccuggcugcuacagcugcgucacag

SEQ ID NO: 185762 - RNA, 32 nt, Human
ggagacccucauuugccacccagaccaaugug

SEQ ID NO: 185763 - RNA, 21 nt, Human
ggagacccuggcaucacaaaa

SEQ ID NO: 185764 - RNA, 19 nt, Human
ggagaccgacgggcagaac

SEQ ID NO: 185765 - RNA, 32 nt, Human
ggagaccgaggcaugagagucacuugaaccuc

SEQ ID NO: 185766 - RNA, 32 nt, Human
ggagaccgcguuuagaggaucaguggcggcgg

SEQ ID NO: 185767 - RNA, 23 nt, Human
ggagaccgcuggggacagacagg

SEQ ID NO: 185768 - RNA, 32 nt, Human
ggagaccggggaagaaggaggagcagccaagg

SEQ ID NO: 185769 - RNA, 32 nt, Human
ggagaccuagaggugggggccugccuuggcca

SEQ ID NO: 185770 - RNA, 32 nt, Human
ggagaccucuacucaugcuaucaucaccaaag

SEQ ID NO: 185771 - RNA, 32 nt, Human
ggagaccugagcuguaggcaguggagauggca

SEQ ID NO: 185772 - RNA, 32 nt, Human
ggagaccuggaaggcccucgcagcgccugcuc

SEQ ID NO: 185773 - RNA, 32 nt, Human
ggagaccuggccuccuggucagcuuuggaggg

SEQ ID NO: 185774 - RNA, 32 nt, Human
ggagaccuggcuuagaaucagaucauaugaaa

SEQ ID NO: 185775 - RNA, 32 nt, Human
ggagaccugggugacggaagaacgcccaaggc

SEQ ID NO: 185776 - RNA, 32 nt, Human
ggagaccuugcuuucuguuucacugggaaaca

SEQ ID NO: 185777 - RNA, 32 nt, Human
ggagaccuuguccuuggccuagaguccuccca

SEQ ID NO: 185778 - RNA, 32 nt, Human
ggagaccuuugguggggacuucucccugaacu

SEQ ID NO: 185779 - RNA, 32 nt, Human
ggagacgaacagagugcucucagugagaagug

SEQ ID NO: 185780 - RNA, 32 nt, Human
ggagacgaaggagagagagcugaggguggagg

SEQ ID NO: 185781 - RNA, 32 nt, Human
ggagacgacaggcgagagaggagccagacaga

SEQ ID NO: 185782 - RNA, 21 nt, Human
ggagacgacgcguguguguug

SEQ ID NO: 185783 - RNA, 32 nt, Human
ggagacgaggggcuggcucucaguccccgcuu

SEQ ID NO: 185784 - RNA, 32 nt, Human
ggagacgcaaggacaggacugguagacggguc

SEQ ID NO: 185785 - RNA, 32 nt, Human
ggagacgcagccgccggacccugcccagggca

SEQ ID NO: 185786 - RNA, 32 nt, Human
ggagacgcagccuuucaacaccuggcagggca

SEQ ID NO: 185787 - RNA, 32 nt, Human
ggagacgcauuguauauaauauaugucaaagg

SEQ ID NO: 185788 - RNA, 32 nt, Human
ggagacgcgaggaggagggaggaggaagagag

SEQ ID NO: 185789 - RNA, 32 nt, Human
ggagacgcucaggaggugggaaaggcggaggu

SEQ ID NO: 185790 - RNA, 32 nt, Human
ggagacgcucgcccgacagcauaguacuugcc

SEQ ID NO: 185791 - RNA, 32 nt, Human
ggagacgcugcuccauucugccuggaucauuu

SEQ ID NO: 185792 - RNA, 32 nt, Human
ggagacggacucuugcuauguugcccaggcug

SEQ ID NO: 185793 - RNA, 32 nt, Human
ggagacggagcugagcaugcaaggaagggcaa

SEQ ID NO: 185794 - RNA, 20 nt, Human
ggagacggagguuacaguga

SEQ ID NO: 185795 - RNA, 21 nt, Human
ggagacggagguuacagugag

SEQ ID NO: 185796 - RNA, 20 nt, Human
ggagacggagguugcuguga

SEQ ID NO: 185797 - RNA, 21 nt, Human
ggagacggagguugcugugag

SEQ ID NO: 185798 - RNA, 32 nt, Human
ggagacggagucucacucugucacccauucug

SEQ ID NO: 185799 - RNA, 32 nt, Human
ggagacggagucuugcucugcgcccaggaugg

SEQ ID NO: 185800 - RNA, 19 nt, Human
ggagacggaguguggggga

SEQ ID NO: 185801 - RNA, 32 nt, Human
ggagacggaugggaauucugcagccacaccca

SEQ ID NO: 185802 - RNA, 32 nt, Human
ggagacggcaggcuuaggucucacugacagca

SEQ ID NO: 185803 - RNA, 32 nt, Human
ggagacggccggaagccaguaaaagaagagaa

SEQ ID NO: 185804 - RNA, 32 nt, Human
ggagacggccugggugcuggcgaagcggaggc

SEQ ID NO: 185805 - RNA, 32 nt, Human
ggagacgggagguuguggugagcugagaucgu

SEQ ID NO: 185806 - RNA, 32 nt, Human
ggagacgggauuucaccauguuggccaugcug

SEQ ID NO: 185807 - RNA, 32 nt, Human
ggagacggggccucacuauguugccuaggcug

SEQ ID NO: 185808 - RNA, 32 nt, Human
ggagacggggucuugcccugucacccaggcug

SEQ ID NO: 185809 - RNA, 32 nt, Human
ggagacgggguuucaccaugcuggccagacug

SEQ ID NO: 185810 - RNA, 32 nt, Human
ggagacgggguuucaccauguuggccaggcug

SEQ ID NO: 185811 - RNA, 32 nt, Human
ggagacgggguuucaccauguuggcuaagcug

SEQ ID NO: 185812 - RNA, 32 nt, Human
ggagacgggguuucaccauguuggucaggaug

SEQ ID NO: 185813 - RNA, 32 nt, Human
ggagacgggguuucaccauguuggucaggcug

SEQ ID NO: 185814 - RNA, 32 nt, Human
ggagacgggguuucaccauguuguccaggaug

SEQ ID NO: 185815 - RNA, 32 nt, Human
ggagacgggguuucaccguguuagccaggaua

SEQ ID NO: 185816 - RNA, 32 nt, Human
ggagacgggguuucaccguguuggccgggcug

SEQ ID NO: 185817 - RNA, 32 nt, Human
ggagacgggguuucacuguguuagccacgaug

SEQ ID NO: 185818 - RNA, 32 nt, Human
ggagacgggguuucacuguguuagccaggaug

SEQ ID NO: 185819 - RNA, 32 nt, Human
ggagacgggguuucgccauguuugccaggcug

SEQ ID NO: 185820 - RNA, 32 nt, Human
ggagacgggguuucgcuguguuggccgggcug

SEQ ID NO: 185821 - RNA, 32 nt, Human
ggagacgggguuucuccauguuggucaggcug

SEQ ID NO: 185822 - RNA, 32 nt, Human
ggagacgggguuuugccauguugaccuggcug

SEQ ID NO: 185823 - RNA, 32 nt, Human
ggagacguccuccauaaguggagcacagggua

SEQ ID NO: 185824 - RNA, 32 nt, Human
ggagacgucugccucagccacugccuccgaga

SEQ ID NO: 185825 - RNA, 32 nt, Human
ggagacguggaaccucugucucauccuccugg

SEQ ID NO: 185826 - RNA, 32 nt, Human
ggagacguggagaagaggaaugcugagugaug

SEQ ID NO: 185827 - RNA, 32 nt, Human
ggagacguucccagaugcaggccaucugucuc

SEQ ID NO: 185828 - RNA, 21 nt, Human
ggagacguuucaacccugcag

SEQ ID NO: 185829 - RNA, 32 nt, Human
ggagacuaaggcaggaggaaggauagcuugag

SEQ ID NO: 185830 - RNA, 32 nt, Human
ggagacuacauuuuguccccuccuggggucuu

SEQ ID NO: 185831 - RNA, 32 nt, Human
ggagacuaccauugcggcugcaucgccuucuc

SEQ ID NO: 185832 - RNA, 32 nt, Human
ggagacuagaaaacauucuaccccuucagguc

SEQ ID NO: 185833 - RNA, 32 nt, Human
ggagacuauggaacgucaggugcugcugagcg

SEQ ID NO: 185834 - RNA, 32 nt, Human
ggagacucacccacccucucccucucccuuca

SEQ ID NO: 185835 - RNA, 32 nt, Human
ggagacucacugcaaguuccugcccaggaggc

SEQ ID NO: 185836 - RNA, 32 nt, Human
ggagacucaggcaguggccuggagaggcuuug

SEQ ID NO: 185837 - RNA, 32 nt, Human
ggagacucccauccucucuucccccucaccaa

SEQ ID NO: 185838 - RNA, 32 nt, Human
ggagacuccgcucacuccccacggccagcgug

SEQ ID NO: 185839 - RNA, 32 nt, Human
ggagacucgcagcagcugcuacccacagccua

SEQ ID NO: 185840 - RNA, 19 nt, Human
ggagacucggaaagaugga

SEQ ID NO: 185841 - RNA, 32 nt, Human
ggagacucugcaggcuccaucccuccuuauuc

SEQ ID NO: 185842 - RNA, 32 nt, Human
ggagacucugcuccugcauggaaagggagccu

SEQ ID NO: 185843 - RNA, 32 nt, Human
ggagacucuggagagaggaccucugccagugg

SEQ ID NO: 185844 - RNA, 32 nt, Human
ggagacucuguggggccuugguucccuugugu

SEQ ID NO: 185845 - RNA, 32 nt, Human
ggagacucuuucucccuugcuggcuuugggcc

SEQ ID NO: 185846 - RNA, 32 nt, Human
ggagacugaagagcaacugggaacucggaucu

SEQ ID NO: 185847 - RNA, 32 nt, Human
ggagacugaagcaggagaaucgcucgagcccg

SEQ ID NO: 185848 - RNA, 32 nt, Human
ggagacugacacugaagaagcuuaaaaucacu

SEQ ID NO: 185849 - RNA, 32 nt, Human
ggagacugagacaggagaaucgcuugagcugg

SEQ ID NO: 185850 - RNA, 32 nt, Human
ggagacugagacaugagaaucgcuugagccug

SEQ ID NO: 185851 - RNA, 25 nt, Human
ggagacugagaugggaggaucgcuu

SEQ ID NO: 185852 - RNA, 32 nt, Human
ggagacugagaugggaggaucgcuugagacca

SEQ ID NO: 185853 - RNA, 32 nt, Human
ggagacugaggcagaagaaucgcuugaaccca

SEQ ID NO: 185854 - RNA, 32 nt, Human
ggagacugaggcagaaggaucgcuugaaccug

SEQ ID NO: 185855 - RNA, 32 nt, Human
ggagacugaggcaggaaaauugcuugaaccca

SEQ ID NO: 185856 - RNA, 32 nt, Human
ggagacugaggcaggagaaucgcaugaacccg

SEQ ID NO: 185857 - RNA, 32 nt, Human
ggagacugaggcaggagaaucgcuugaacccg

SEQ ID NO: 185858 - RNA, 32 nt, Human
ggagacugaggcaggagaaucgcuugaaccug

SEQ ID NO: 185859 - RNA, 32 nt, Human
ggagacugaggcaggagaaucgcuugaacuca

SEQ ID NO: 185860 - RNA, 32 nt, Human
ggagacugaggcaggagaauggggagaacccg

SEQ ID NO: 185861 - RNA, 32 nt, Human
ggagacugaggcaggagaauugcuugaaacug

SEQ ID NO: 185862 - RNA, 32 nt, Human
ggagacugaggcaggagaauugcuugaaccca

SEQ ID NO: 185863 - RNA, 32 nt, Human
ggagacugaggcaggagaauugcuugaaccug

SEQ ID NO: 185864 - RNA, 32 nt, Human
ggagacugaggcgggaggauuacuugagccca

SEQ ID NO: 185865 - RNA, 25 nt, Human
ggagacugaggugggagaaucgcuu

SEQ ID NO: 185866 - RNA, 32 nt, Human
ggagacugaggugggagaaucgcuugagacug

SEQ ID NO: 185867 - RNA, 25 nt, Human
ggagacugaggugggaggaucgcuu

SEQ ID NO: 185868 - RNA, 32 nt, Human
ggagacugaggugggaggaucgcuugagccca

SEQ ID NO: 185869 - RNA, 32 nt, Human
ggagacugaggugggaggaucgcuugagccuc

SEQ ID NO: 185870 - RNA, 32 nt, Human
ggagacugaggugggaggauugcuagaagcca

SEQ ID NO: 185871 - RNA, 32 nt, Human
ggagacugagguuggaggaucgcuugagccug

SEQ ID NO: 185872 - RNA, 32 nt, Human
ggagacugaucuguuccauccguuagcgcgag

SEQ ID NO: 185873 - RNA, 32 nt, Human
ggagacugauuugggcccagccccagggcgca

SEQ ID NO: 185874 - RNA, 32 nt, Human
ggagacugcaccacugcacuucagccugggug

SEQ ID NO: 185875 - RNA, 32 nt, Human
ggagacugccccugcugccuucugcccagugg

SEQ ID NO: 185876 - RNA, 32 nt, Human
ggagacuggaagaaggggccagaaauucagac

SEQ ID NO: 185877 - RNA, 18 nt, Human
ggagacuggacuacaaca

SEQ ID NO: 185878 - RNA, 29 nt, Human
ggagacuggcugcuggggccuccuugcuu

SEQ ID NO: 185879 - RNA, 32 nt, Human
ggagacugggggcagcccucacccaacucaca

SEQ ID NO: 185880 - RNA, 32 nt, Human
ggagacugggucuugcucuguuacccaggcug

SEQ ID NO: 185881 - RNA, 32 nt, Human
ggagacuggguggaggcucaguguguaauaau

SEQ ID NO: 185882 - RNA, 32 nt, Human
ggagacuguagucccagcuacucgggagguug

SEQ ID NO: 185883 - RNA, 32 nt, Human
ggagacugucugcagcuuagggcagaaauggg

SEQ ID NO: 185884 - RNA, 32 nt, Human
ggagacugucuggaaggcuuggaaugguuuau

SEQ ID NO: 185885 - RNA, 32 nt, Human
ggagacuguggcucagacccaggugugcgggc

SEQ ID NO: 185886 - RNA, 32 nt, Human
ggagacugugucugcuuucugccuccucuucc

SEQ ID NO: 185887 - RNA, 32 nt, Human
ggagacuucagggagaccagagcccagcuugc

SEQ ID NO: 185888 - RNA, 32 nt, Human
ggagacuugagcaagcccuaaaguccccugcu

SEQ ID NO: 185889 - RNA, 24 nt, Human
ggagacuuguaugaaagauggcug

SEQ ID NO: 185890 - RNA, 32 nt, Human
ggagacuuugcggggaggaggcagcagacacu

SEQ ID NO: 185891 - RNA, 32 nt, Human
ggagagaaaaccucugcgaggaaagggaagga

SEQ ID NO: 185892 - RNA, 32 nt, Human
ggagagaaaggagggaaaagccagucucuccg

SEQ ID NO: 185893 - RNA, 20 nt, Human
ggagagaaaggcagcucccu

SEQ ID NO: 185894 - RNA, 32 nt, Human
ggagagaaagugguaugagagcagugugguuu

SEQ ID NO: 185895 - RNA, 32 nt, Human
ggagagaaaugguuugugucucccuuauuccc

SEQ ID NO: 185896 - RNA, 22 nt, Human
ggagagaacagagaagaaaaga

SEQ ID NO: 185897 - RNA, 32 nt, Human
ggagagaaccaaggaagacuuccuggaggaaa

SEQ ID NO: 185898 - RNA, 32 nt, Human
ggagagaacccugaugauggagaagaacugug

SEQ ID NO: 185899 - RNA, 32 nt, Human
ggagagaaccucuacugaucagagcaucuaaa

SEQ ID NO: 185900 - RNA, 32 nt, Human
ggagagaagagggagaggcaggagccggccca

SEQ ID NO: 185901 - RNA, 32 nt, Human
ggagagaagauggggaagugugugagacaaaa

SEQ ID NO: 185902 - RNA, 21 nt, Human
ggagagaagcaggagucggga

SEQ ID NO: 185903 - RNA, 32 nt, Human
ggagagaaggaaggaaggaacuuccguaguac

SEQ ID NO: 185904 - RNA, 32 nt, Human
ggagagaaggagguggggauccgagugcagug

SEQ ID NO: 185905 - RNA, 32 nt, Human
ggagagaauacaauaacuacuacaguaaaguc

SEQ ID NO: 185906 - RNA, 32 nt, Human
ggagagaauccccuacccuacucugauguaua

SEQ ID NO: 185907 - RNA, 32 nt, Human
ggagagaaucuugcagaccccaugucuauuaa

SEQ ID NO: 185908 - RNA, 32 nt, Human
ggagagaaugaagagcgcugugccaguaaaua

SEQ ID NO: 185909 - RNA, 32 nt, Human
ggagagaaugugcuaccauggaaacuggagga

SEQ ID NO: 185910 - RNA, 32 nt, Human
ggagagacacccggggccuggccacgcucugg

SEQ ID NO: 185911 - RNA, 32 nt, Human
ggagagacacugguggggauaggccagccgcg

SEQ ID NO: 185912 - RNA, 19 nt, Human
ggagagacagagaacucug

SEQ ID NO: 185913 - RNA, 32 nt, Human
ggagagacagcgcagagcagggggcggcuugc

SEQ ID NO: 185914 - RNA, 32 nt, Human
ggagagacagcucugcaguuucccacacuguc

SEQ ID NO: 185915 - RNA, 32 nt, Human
ggagagaccagagggggccugaggcuucacug

SEQ ID NO: 185916 - RNA, 32 nt, Human
ggagagaccagccuggccagcauagugaaacc

SEQ ID NO: 185917 - RNA, 32 nt, Human
ggagagaccagcucuccagccuggcaggaaag

SEQ ID NO: 185918 - RNA, 19 nt, Human
ggagagacccagaaaagaa

SEQ ID NO: 185919 - RNA, 32 nt, Human
ggagagaccccuccccucccacccacagccau

SEQ ID NO: 185920 - RNA, 17 nt, Human
ggagagacccucagaga

SEQ ID NO: 185921 - RNA, 32 nt, Human
ggagagaccgagugaaccuaccuucauuucag

SEQ ID NO: 185922 - RNA, 32 nt, Human
ggagagaccuggcugcugugucccgcggcuug

SEQ ID NO: 185923 - RNA, 32 nt, Human
ggagagacggagcggaccucagcgcugaagca

SEQ ID NO: 185924 - RNA, 32 nt, Human
ggagagacgggcccugcucacagacuagacag

SEQ ID NO: 185925 - RNA, 32 nt, Human
ggagagacuggauuccagccugcaaaagcugu

SEQ ID NO: 185926 - RNA, 32 nt, Human
ggagagacugggacucaaagaggaacuugauu

SEQ ID NO: 185927 - RNA, 32 nt, Human
ggagagagaaaggcuuccccaccacacuuucc

SEQ ID NO: 185928 - RNA, 32 nt, Human
ggagagagaaaggggcauugacugggacccac

SEQ ID NO: 185929 - RNA, 32 nt, Human
ggagagagaacccauccucucccuucuuacac

SEQ ID NO: 185930 - RNA, 19 nt, Human
ggagagagaagcaggcaga

SEQ ID NO: 185931 - RNA, 32 nt, Human
ggagagagacagaaagagagauggauagaugg

SEQ ID NO: 185932 - RNA, 18 nt, Human
ggagagagagcaccgaga

SEQ ID NO: 185933 - RNA, 22 nt, Human
ggagagagagcgggagccgcgg

SEQ ID NO: 185934 - RNA, 32 nt, Human
ggagagagagcugaggguggaggcagagcacg

SEQ ID NO: 185935 - RNA, 32 nt, Human
ggagagagaggagagagaaggaaauaugugua

SEQ ID NO: 185936 - RNA, 32 nt, Human
ggagagagaggagagaggagagagggagggaa

SEQ ID NO: 185937 - RNA, 32 nt, Human
ggagagagagggagggagagggagugaagagc

SEQ ID NO: 185938 - RNA, 32 nt, Human
ggagagagagggagggagcgagagggagagca

SEQ ID NO: 185939 - RNA, 32 nt, Human
ggagagagagugaacagggagcggggcuuuug

SEQ ID NO: 185940 - RNA, 22 nt, Human
ggagagagcagcaaagccggga

SEQ ID NO: 185941 - RNA, 32 nt, Human
ggagagagccagagagaggagugaggguggcu

SEQ ID NO: 185942 - RNA, 32 nt, Human
ggagagagccuaccuagacagugcaguccugc

SEQ ID NO: 185943 - RNA, 16 nt, Human
ggagagagccugucca

SEQ ID NO: 185944 - RNA, 32 nt, Human
ggagagagcugaggauuuccaggacuuuguaa

SEQ ID NO: 185945 - RNA, 32 nt, Human
ggagagagcugaugacugcaguucucaaaggu

SEQ ID NO: 185946 - RNA, 32 nt, Human
ggagagaggaagacaagaaggagaagcagaaa

SEQ ID NO: 185947 - RNA, 21 nt, Human
ggagagaggaagaggagcaga

SEQ ID NO: 185948 - RNA, 32 nt, Human
ggagagaggagagagggagggaagagagugac

SEQ ID NO: 185949 - RNA, 22 nt, Human
ggagagaggagccagccaggga

SEQ ID NO: 185950 - RNA, 32 nt, Human
ggagagaggaggaggaggaggcugagagaggg

SEQ ID NO: 185951 - RNA, 32 nt, Human
ggagagaggagugaguuuguuuaggugggaag

SEQ ID NO: 185952 - RNA, 32 nt, Human
ggagagaggcagagagacagagagggagagag

SEQ ID NO: 185953 - RNA, 32 nt, Human
ggagagaggcgcgggccagggcucuagcaggg

SEQ ID NO: 185954 - RNA, 22 nt, Human
ggagagaggcggcaggggccag

SEQ ID NO: 185955 - RNA, 32 nt, Human
ggagagaggcugccuuucugguuccaucuccu

SEQ ID NO: 185956 - RNA, 32 nt, Human
ggagagagggacaacaguaggagcaggcagau

SEQ ID NO: 185957 - RNA, 32 nt, Human
ggagagagggagggaggaaggaaggaagggag

SEQ ID NO: 185958 - RNA, 32 nt, Human
ggagagagggagucugcuuagaguuugagguu

SEQ ID NO: 185959 - RNA, 32 nt, Human
ggagagagguguggugggcacacagauugccu

SEQ ID NO: 185960 - RNA, 32 nt, Human
ggagagaguucuugugguugcuuuuguugcuu

SEQ ID NO: 185961 - RNA, 32 nt, Human
ggagagaguuuggacaucucacucaaaaguac

SEQ ID NO: 185962 - RNA, 32 nt, Human
ggagagaugaaaaaggaggaugaggagaagaa

SEQ ID NO: 185963 - RNA, 24 nt, Human
ggagagaugcuacccggaguucca

SEQ ID NO: 185964 - RNA, 20 nt, Human
ggagagaugcugaggagucc

SEQ ID NO: 185965 - RNA, 19 nt, Human
ggagagauggauucugggg

SEQ ID NO: 185966 - RNA, 31 nt, Human
ggagagauggcaucuguuucaaccuggauga

SEQ ID NO: 185967 - RNA, 32 nt, Human
ggagagaugguauacagcagguaacugugaau

SEQ ID NO: 185968 - RNA, 32 nt, Human
ggagagauggucagaaauauccuguacauauu

SEQ ID NO: 185969 - RNA, 32 nt, Human
ggagagauugcuugcuucacuuguacaagaau

SEQ ID NO: 185970 - RNA, 32 nt, Human
ggagagcaaagcacaagcuugccugaagaaug

SEQ ID NO: 185971 - RNA, 32 nt, Human
ggagagcaaaggagucaggaauggcuuuuacu

SEQ ID NO: 185972 - RNA, 32 nt, Human
ggagagcaacacaggauggucucugccaugaa

SEQ ID NO: 185973 - RNA, 32 nt, Human
ggagagcaaggucaugaaggaggggaccucuc

SEQ ID NO: 185974 - RNA, 23 nt, Human
ggagagcaagguggcagccggga

SEQ ID NO: 185975 - RNA, 22 nt, Human
ggagagcaagucuguuuuggga

SEQ ID NO: 185976 - RNA, 31 nt, Human
ggagagcaaguuucugggccuguucccauaa

SEQ ID NO: 185977 - RNA, 32 nt, Human
ggagagcacagcccagcguuggggccgggacc

SEQ ID NO: 185978 - RNA, 22 nt, Human
ggagagcacucgguugucuuua

SEQ ID NO: 185979 - RNA, 20 nt, Human
ggagagcagaaagcuuuggg

SEQ ID NO: 185980 - RNA, 23 nt, Human
ggagagcagaaaguugucugggg

SEQ ID NO: 185981 - RNA, 32 nt, Human
ggagagcagaaccuugcgcgggcacagggccc

SEQ ID NO: 185982 - RNA, 32 nt, Human
ggagagcagagcugugugguccuaaucauggu

SEQ ID NO: 185983 - RNA, 24 nt, Human
ggagagcagaggaguggguuggga

SEQ ID NO: 185984 - RNA, 22 nt, Human
ggagagcagaggcaggauucug

SEQ ID NO: 185985 - RNA, 32 nt, Human
ggagagcagcaaccuaaacgaagaggacacug

SEQ ID NO: 185986 - RNA, 21 nt, Human
ggagagcagcagcuggccgga

SEQ ID NO: 185987 - RNA, 32 nt, Human
ggagagcaggacguugagauauccugacccuc

SEQ ID NO: 185988 - RNA, 32 nt, Human
ggagagcaggcagggugggagugagcguggcu

SEQ ID NO: 185989 - RNA, 20 nt, Human
ggagagcaggcugaguuugg

SEQ ID NO: 185990 - RNA, 32 nt, Human
ggagagcaggcuggcagcucuccagucaggag

SEQ ID NO: 185991 - RNA, 21 nt, Human
ggagagcagggccuggugugg

SEQ ID NO: 185992 - RNA, 32 nt, Human
ggagagcaggggugaggagagcaggagaguag

SEQ ID NO: 185993 - RNA, 32 nt, Human
ggagagcagggugucagcaagaaaaccuguga

SEQ ID NO: 185994 - RNA, 32 nt, Human
ggagagcagugcagugacacagaugagaagcu

SEQ ID NO: 185995 - RNA, 32 nt, Human
ggagagcaguuaguacaaagaggcagaacagu

SEQ ID NO: 185996 - RNA, 32 nt, Human
ggagagcaucauucucugccuaggcaaggccc

SEQ ID NO: 185997 - RNA, 32 nt, Human
ggagagcauccaucuucugacauacaacugag

SEQ ID NO: 185998 - RNA, 32 nt, Human
ggagagcaugggcaauggagacccaccaauga

SEQ ID NO: 185999 - RNA, 20 nt, Human
ggagagcauugaaaacucug

SEQ ID NO: 186000 - RNA, 32 nt, Human
ggagagccagaguucagguucagaucugggcu

SEQ ID NO: 186001 - RNA, 32 nt, Human
ggagagccagccaccagccagccacugcucca

SEQ ID NO: 186002 - RNA, 32 nt, Human
ggagagccagcugugggguccagacuuguugg

SEQ ID NO: 186003 - RNA, 32 nt, Human
ggagagccaggagaacuggggacuuagaaaau

SEQ ID NO: 186004 - RNA, 32 nt, Human
ggagagccaguguguaccugaaugacagcuug

SEQ ID NO: 186005 - RNA, 32 nt, Human
ggagagcccaaagcucccccagaucuuuagga

SEQ ID NO: 186006 - RNA, 32 nt, Human
ggagagcccacugucccacucccacaugucug

SEQ ID NO: 186007 - RNA, 25 nt, Human
ggagagcccagaaggacauugcaga

SEQ ID NO: 186008 - RNA, 22 nt, Human
ggagagcccagaggcugccaga

SEQ ID NO: 186009 - RNA, 32 nt, Human
ggagagcccaggauucaacacgggccuugaga

SEQ ID NO: 186010 - RNA, 21 nt, Human
ggagagccccauagacuaaga

SEQ ID NO: 186011 - RNA, 22 nt, Human
ggagagcccccacucucugcca

SEQ ID NO: 186012 - RNA, 32 nt, Human
ggagagccccuggggcgaggaggcgagggcag

SEQ ID NO: 186013 - RNA, 20 nt, Human
ggagagcccggacggagcag

SEQ ID NO: 186014 - RNA, 26 nt, Human
ggagagccgcgaagggccugccuuca

SEQ ID NO: 186015 - RNA, 32 nt, Human
ggagagccuagaccaggcuccgggcugccaau

SEQ ID NO: 186016 - RNA, 32 nt, Human
ggagagccuaggggcuuagaccagccauauuu

SEQ ID NO: 186017 - RNA, 20 nt, Human
ggagagccucaugcccugga

SEQ ID NO: 186018 - RNA, 25 nt, Human
ggagagccucgcgggggagccggga

SEQ ID NO: 186019 - RNA, 18 nt, Human
ggagagccucucugugca

SEQ ID NO: 186020 - RNA, 25 nt, Human
ggagagccugcccucagacugcagg

SEQ ID NO: 186021 - RNA, 32 nt, Human
ggagagccugcggguaaaguaccaccugcuac

SEQ ID NO: 186022 - RNA, 24 nt, Human
ggagagccuggauaagacugcaga

SEQ ID NO: 186023 - RNA, 32 nt, Human
ggagagccuggcccuguccuuugcuacccagg

SEQ ID NO: 186024 - RNA, 21 nt, Human
ggagagccuggccugccacca

SEQ ID NO: 186025 - RNA, 32 nt, Human
ggagagccugggaacuuucaucccccacugaa

SEQ ID NO: 186026 - RNA, 24 nt, Human
ggagagccugggcaagacuggaga

SEQ ID NO: 186027 - RNA, 22 nt, Human
ggagagccugugaggaccgaga

SEQ ID NO: 186028 - RNA, 32 nt, Human
ggagagccugugaguuugaggcugcaaugagc

SEQ ID NO: 186029 - RNA, 32 nt, Human
ggagagccuuggcccaagucuggaccaaugac

SEQ ID NO: 186030 - RNA, 32 nt, Human
ggagagcgacucaggaacaagugugggagagg

SEQ ID NO: 186031 - RNA, 23 nt, Human
ggagagcgagggggcccccagcu

SEQ ID NO: 186032 - RNA, 32 nt, Human
ggagagcgcacacccaggcagcccucugcgga

SEQ ID NO: 186033 - RNA, 23 nt, Human
ggagagcgccagggccugagcug

SEQ ID NO: 186034 - RNA, 23 nt, Human
ggagagcgcucgggucaugucug

SEQ ID NO: 186035 - RNA, 32 nt, Human
ggagagcgcuggggcuaccaggugggcuccca

SEQ ID NO: 186036 - RNA, 32 nt, Human
ggagagcggccugcuugugcagugggucgccg

SEQ ID NO: 186037 - RNA, 32 nt, Human
ggagagcgugugcgcuccagcccagcccgcug

SEQ ID NO: 186038 - RNA, 32 nt, Human
ggagagcuaaaauguucaugaguaucaagcag

SEQ ID NO: 186039 - RNA, 32 nt, Human
ggagagcuauccacucaggccccagugccucu

SEQ ID NO: 186040 - RNA, 32 nt, Human
ggagagcuaugagaauaaagaggccuaucaga

SEQ ID NO: 186041 - RNA, 32 nt, Human
ggagagcucagauguggagcuggaccuccaga

SEQ ID NO: 186042 - RNA, 23 nt, Human
ggagagcucagcugagaauucug

SEQ ID NO: 186043 - RNA, 16 nt, Human
ggagagcucccugggg

SEQ ID NO: 186044 - RNA, 32 nt, Human
ggagagcucugccuagucugguuuggcgaggg

SEQ ID NO: 186045 - RNA, 32 nt, Human
ggagagcugagagagccuccuguccauggaga

SEQ ID NO: 186046 - RNA, 32 nt, Human
ggagagcugcggcaucacaucgcuugggccca

SEQ ID NO: 186047 - RNA, 32 nt, Human
ggagagcugcucggacaggcccccucccggcc

SEQ ID NO: 186048 - RNA, 32 nt, Human
ggagagcugcuuccaguggauaguugaugaga

SEQ ID NO: 186049 - RNA, 32 nt, Human
ggagagcuggcaggacccuguggcugggcugg

SEQ ID NO: 186050 - RNA, 17 nt, Human
ggagagcuggccaggga

SEQ ID NO: 186051 - RNA, 32 nt, Human
ggagagcuggcucugcagugggggagggaugc

SEQ ID NO: 186052 - RNA, 32 nt, Human
ggagagcuggcugcgcgggcugugagugagac

SEQ ID NO: 186053 - RNA, 32 nt, Human
ggagagcugguccuccagcccuggcaggcccu

SEQ ID NO: 186054 - RNA, 32 nt, Human
ggagagcuugacacuucgccucccugauggcc

SEQ ID NO: 186055 - RNA, 32 nt, Human
ggagagcuuugagggccccugcuuugggacuc

SEQ ID NO: 186056 - RNA, 32 nt, Human
ggagaggaagagaaagaaaaagagacagagau

SEQ ID NO: 186057 - RNA, 20 nt, Human
ggagaggaagaggaggaaga

SEQ ID NO: 186058 - RNA, 32 nt, Human
ggagaggaagcauauguggaaggagcauuucc

SEQ ID NO: 186059 - RNA, 32 nt, Human
ggagaggaaggaggugggggagagggcugggg

SEQ ID NO: 186060 - RNA, 32 nt, Human
ggagaggaagggaaggaaggagagggaggggg

SEQ ID NO: 186061 - RNA, 32 nt, Human
ggagaggaagggacauagcaguauuucaggug

SEQ ID NO: 186062 - RNA, 32 nt, Human
ggagaggaagggcugaaagccccaagccccau

SEQ ID NO: 186063 - RNA, 32 nt, Human
ggagaggaagguuggcuccaggccaggugucc

SEQ ID NO: 186064 - RNA, 32 nt, Human
ggagaggaagugaaagcgucaaguacaucccg

SEQ ID NO: 186065 - RNA, 20 nt, Human
ggagaggacaaagagacaga

SEQ ID NO: 186066 - RNA, 32 nt, Human
ggagaggacacagagacacagagaaggaagca

SEQ ID NO: 186067 - RNA, 20 nt, Human
ggagaggacacagagacaga

SEQ ID NO: 186068 - RNA, 32 nt, Human
ggagaggacacaugaaggcaccacagucccag

SEQ ID NO: 186069 - RNA, 32 nt, Human
ggagaggaccccagccagcugugugacagcug

SEQ ID NO: 186070 - RNA, 32 nt, Human
ggagaggacccggacccaggacccucugagcu

SEQ ID NO: 186071 - RNA, 32 nt, Human
ggagaggacugauucagggcccccucagcugu

SEQ ID NO: 186072 - RNA, 32 nt, Human
ggagaggagagaagcuggacuccaggcaugac

SEQ ID NO: 186073 - RNA, 32 nt, Human
ggagaggagagccagagaaaugacagggaauc

SEQ ID NO: 186074 - RNA, 32 nt, Human
ggagaggagagggcaaaggcgaggcgggggag

SEQ ID NO: 186075 - RNA, 32 nt, Human
ggagaggagagggcggcggcggcggugggagg

SEQ ID NO: 186076 - RNA, 32 nt, Human
ggagaggagcaguggaggggcccaggcucuga

SEQ ID NO: 186077 - RNA, 32 nt, Human
ggagaggagccggaauggagggcagaggugaa

SEQ ID NO: 186078 - RNA, 32 nt, Human
ggagaggagcuggcccggaaggcgugguugug

SEQ ID NO: 186079 - RNA, 32 nt, Human
ggagaggagcuguacccugcaaagucacaggg

SEQ ID NO: 186080 - RNA, 32 nt, Human
ggagaggaggaugagcagaacuccuaugcagc

SEQ ID NO: 186081 - RNA, 32 nt, Human
ggagaggaggcagcggcaguuugagccccugu

SEQ ID NO: 186082 - RNA, 32 nt, Human
ggagaggaggcaggggcugggcugggggcgca

SEQ ID NO: 186083 - RNA, 32 nt, Human
ggagaggaggcuguugguaggaaaguggcagg

SEQ ID NO: 186084 - RNA, 32 nt, Human
ggagaggaggcuucagucucaguggcucagcc

SEQ ID NO: 186085 - RNA, 32 nt, Human
ggagaggaggcuucagucucagugguucagcu

SEQ ID NO: 186086 - RNA, 32 nt, Human
ggagaggaggggcagaggagcugccaggggaa

SEQ ID NO: 186087 - RNA, 32 nt, Human
ggagaggaggggccuggaguugccgaggaagu

SEQ ID NO: 186088 - RNA, 32 nt, Human
ggagaggagguguggaguggaggggucagcag

SEQ ID NO: 186089 - RNA, 32 nt, Human
ggagaggauugugcugagcucaugggauuaca

SEQ ID NO: 186090 - RNA, 32 nt, Human
ggagaggcaagaaaauuaugcuguccauagaa

SEQ ID NO: 186091 - RNA, 32 nt, Human
ggagaggcacacauccacuagcaauauccagg

SEQ ID NO: 186092 - RNA, 32 nt, Human
ggagaggcacagaauggcuuccucuguugauc

SEQ ID NO: 186093 - RNA, 32 nt, Human
ggagaggcaccaugggcguggaggggcuuccc

SEQ ID NO: 186094 - RNA, 32 nt, Human
ggagaggcagcuuuccagccuugguggggaag

SEQ ID NO: 186095 - RNA, 32 nt, Human
ggagaggcaggcagagggcagugguucuccca

SEQ ID NO: 186096 - RNA, 32 nt, Human
ggagaggcaguagagucaggcugcaguggaau

SEQ ID NO: 186097 - RNA, 32 nt, Human
ggagaggcagucggaugcaggcugagaccauc

SEQ ID NO: 186098 - RNA, 32 nt, Human
ggagaggccaguugucacgugccugaaacaug

SEQ ID NO: 186099 - RNA, 32 nt, Human
ggagaggccauuggcucccagagggaacagug

SEQ ID NO: 186100 - RNA, 32 nt, Human
ggagaggcccauagggcugaguggggucgggu

SEQ ID NO: 186101 - RNA, 18 nt, Human
ggagaggcccggggccag

SEQ ID NO: 186102 - RNA, 17 nt, Human
ggagaggcccucaggga

SEQ ID NO: 186103 - RNA, 32 nt, Human
ggagaggccuccaggaauguggggacuuccag

SEQ ID NO: 186104 - RNA, 32 nt, Human
ggagaggccucgggaugucucuggcagaugag

SEQ ID NO: 186105 - RNA, 16 nt, Human
ggagaggccucgggga

SEQ ID NO: 186106 - RNA, 32 nt, Human
ggagaggccuugguacccccucuccccugggg

SEQ ID NO: 186107 - RNA, 19 nt, Human
ggagaggcggucccggugu

SEQ ID NO: 186108 - RNA, 32 nt, Human
ggagaggcucagccuggcucccuucccuggag

SEQ ID NO: 186109 - RNA, 32 nt, Human
ggagaggcucugucuccuuccugcugccagga

SEQ ID NO: 186110 - RNA, 32 nt, Human
ggagaggcugcugaauccagggccaggagggc

SEQ ID NO: 186111 - RNA, 32 nt, Human
ggagaggcugcuggaagagguggagaagcugu

SEQ ID NO: 186112 - RNA, 32 nt, Human
ggagaggcuggaccaggccuugcugggagcca

SEQ ID NO: 186113 - RNA, 32 nt, Human
ggagaggcugugaaaggagggcgaggacauuu

SEQ ID NO: 186114 - RNA, 32 nt, Human
ggagaggcuuccugaugcucuaccccuucagc

SEQ ID NO: 186115 - RNA, 32 nt, Human
ggagaggcuuccuuuguuacagcugggaaaga

SEQ ID NO: 186116 - RNA, 32 nt, Human
ggagagggaaccagauaugcagaucagagaua

SEQ ID NO: 186117 - RNA, 32 nt, Human
ggagagggaagaggagagaaaagacagggacu

SEQ ID NO: 186118 - RNA, 32 nt, Human
ggagagggaaggcagggguggaccgccaugag

SEQ ID NO: 186119 - RNA, 32 nt, Human
ggagagggaagggaagucaggcuugggcacgg

SEQ ID NO: 186120 - RNA, 32 nt, Human
ggagagggacuuccagacuucagcucgacgca

SEQ ID NO: 186121 - RNA, 32 nt, Human
ggagagggagaaaaggaggagaacaggagacg

SEQ ID NO: 186122 - RNA, 32 nt, Human
ggagagggagagagcgaacacccacgcugguu

SEQ ID NO: 186123 - RNA, 32 nt, Human
ggagagggagagaggagcggaagcugagggug

SEQ ID NO: 186124 - RNA, 32 nt, Human
ggagagggagagagggggagagaaggagagcg

SEQ ID NO: 186125 - RNA, 32 nt, Human
ggagagggagggaggaaggaagggagggaggg

SEQ ID NO: 186126 - RNA, 18 nt, Human
ggagagggagggccggga

SEQ ID NO: 186127 - RNA, 32 nt, Human
ggagagggaguggagggucaggugagaucuca

SEQ ID NO: 186128 - RNA, 32 nt, Human
ggagagggauagaggagggagagccagcccag

SEQ ID NO: 186129 - RNA, 32 nt, Human
ggagagggaucucuaguuuuugugguuuaauu

SEQ ID NO: 186130 - RNA, 32 nt, Human
ggagagggaugcaggccagccagggauccagc

SEQ ID NO: 186131 - RNA, 32 nt, Human
ggagagggcaauagagggaagacugaggcuga

SEQ ID NO: 186132 - RNA, 32 nt, Human
ggagagggccaccacgcucccuuccccucgcc

SEQ ID NO: 186133 - RNA, 20 nt, Human
ggagagggcgcgggggccgg

SEQ ID NO: 186134 - RNA, 32 nt, Human
ggagagggcucagccugccauaacuccaagug

SEQ ID NO: 186135 - RNA, 32 nt, Human
ggagagggcuggggcaggggagagggaaagga

SEQ ID NO: 186136 - RNA, 32 nt, Human
ggagaggggaaugguggugguggggaaugcag

SEQ ID NO: 186137 - RNA, 32 nt, Human
ggagaggggaccccaccaugcccaaagucuuc

SEQ ID NO: 186138 - RNA, 19 nt, Human
ggagaggggacuuaguaaa

SEQ ID NO: 186139 - RNA, 32 nt, Human
ggagaggggagaagaaggaagggaagggcaga

SEQ ID NO: 186140 - RNA, 32 nt, Human
ggagaggggagaagaagggaaaacccaggaaa

SEQ ID NO: 186141 - RNA, 32 nt, Human
ggagaggggagaggagagaguuugggaaaggg

SEQ ID NO: 186142 - RNA, 32 nt, Human
ggagaggggaggacuccucucccuacgccagc

SEQ ID NO: 186143 - RNA, 23 nt, Human
ggagaggggagggaugccuggga

SEQ ID NO: 186144 - RNA, 32 nt, Human
ggagaggggagugcagggcaccaccugggcga

SEQ ID NO: 186145 - RNA, 19 nt, Human
ggagaggggcaaccuggga

SEQ ID NO: 186146 - RNA, 32 nt, Human
ggagaggggcaccagaaucugcauuuguagug

SEQ ID NO: 186147 - RNA, 24 nt, Human
ggagaggggccagggaaguggaug

SEQ ID NO: 186148 - RNA, 32 nt, Human
ggagaggggcuguccauggcagcuggucuuua

SEQ ID NO: 186149 - RNA, 32 nt, Human
ggagagggggccagggccagaggggacagagg

SEQ ID NO: 186150 - RNA, 18 nt, Human
ggagagggggcuccggga

SEQ ID NO: 186151 - RNA, 32 nt, Human
ggagaggggguuucaccauguuggccagucug

SEQ ID NO: 186152 - RNA, 32 nt, Human
ggagaggggucccucaacagucagccucaccu

SEQ ID NO: 186153 - RNA, 32 nt, Human
ggagaggggugugauggggcagaggaacuuac

SEQ ID NO: 186154 - RNA, 32 nt, Human
ggagaggguggaaggggaauaagaagacauuc

SEQ ID NO: 186155 - RNA, 32 nt, Human
ggagagggugguaaguggggaggacuuuggua

SEQ ID NO: 186156 - RNA, 32 nt, Human
ggagagguaggguggagcggggcagagaaaau

SEQ ID NO: 186157 - RNA, 32 nt, Human
ggagaggucaaaacauccaccuaccuucaaaa

SEQ ID NO: 186158 - RNA, 19 nt, Human
ggagaggucacuccggaga

SEQ ID NO: 186159 - RNA, 32 nt, Human
ggagaggucauugucacccaagcagaggccac

SEQ ID NO: 186160 - RNA, 17 nt, Human
ggagaggucccugcggg

SEQ ID NO: 186161 - RNA, 32 nt, Human
ggagaggucugagggaagggaggcaggcagcu

SEQ ID NO: 186162 - RNA, 32 nt, Human
ggagaggucuuaaccucuguucucagacucug

SEQ ID NO: 186163 - RNA, 32 nt, Human
ggagaggugacaccucacuaaggggccgaccc

SEQ ID NO: 186164 - RNA, 32 nt, Human
ggagaggugcagcugcagcaguguucuaccgg

SEQ ID NO: 186165 - RNA, 32 nt, Human
ggagaggugcagcugggccguccagcaucaaa

SEQ ID NO: 186166 - RNA, 32 nt, Human
ggagaggugccuggcuucuaccugggugcuca

SEQ ID NO: 186167 - RNA, 32 nt, Human
ggagaggugcugucugcuggagccucuagucc

SEQ ID NO: 186168 - RNA, 18 nt, Human
ggagagguggcucugaga

SEQ ID NO: 186169 - RNA, 32 nt, Human
ggagagguuacccgagaagcacuugagcauga

SEQ ID NO: 186170 - RNA, 32 nt, Human
ggagagguucaggcacauggcauagcugcuau

SEQ ID NO: 186171 - RNA, 32 nt, Human
ggagagguugcaaaccaaaucaagaguauuua

SEQ ID NO: 186172 - RNA, 32 nt, Human
ggagagguugggcagugagugagggaccccua

SEQ ID NO: 186173 - RNA, 32 nt, Human
ggagagguuuugcucacagggacucuccauau

SEQ ID NO: 186174 - RNA, 32 nt, Human
ggagaguaccugcugcaggaccuggaggucag

SEQ ID NO: 186175 - RNA, 21 nt, Human
ggagaguacuguggagagcuc

SEQ ID NO: 186176 - RNA, 32 nt, Human
ggagaguagcgccauugugcucuucgccuucc

SEQ ID NO: 186177 - RNA, 32 nt, Human
ggagaguaggagagaccgaaaaggcugggggu

SEQ ID NO: 186178 - RNA, 32 nt, Human
ggagaguaguaagacgugaaaggaauacacuu

SEQ ID NO: 186179 - RNA, 32 nt, Human
ggagaguagucagaggcccaccuuccugugac

SEQ ID NO: 186180 - RNA, 20 nt, Human
ggagaguaugcgagaaccua

SEQ ID NO: 186181 - RNA, 32 nt, Human
ggagagucaaagggaucaaggagaguugggga

SEQ ID NO: 186182 - RNA, 26 nt, Human
ggagagucaacaucuggaggauuuua

SEQ ID NO: 186183 - RNA, 31 nt, Human
ggagagucacucaauggacaggcgagaaagc

SEQ ID NO: 186184 - RNA, 32 nt, Human
ggagagucagccuguggacccugugcacagcu

SEQ ID NO: 186185 - RNA, 32 nt, Human
ggagagucaugagcugucuggauguuauguac

SEQ ID NO: 186186 - RNA, 32 nt, Human
ggagagucauuuuccccagacacuacauuugg

SEQ ID NO: 186187 - RNA, 32 nt, Human
ggagaguccaaacagaacacucuuuugaguag

SEQ ID NO: 186188 - RNA, 32 nt, Human
ggagagucccuuguaaguuuggcuccuccaug

SEQ ID NO: 186189 - RNA, 32 nt, Human
ggagaguccucagcaaccucuggaacacagga

SEQ ID NO: 186190 - RNA, 32 nt, Human
ggagaguccugcugcccuccagccgggcuccu

SEQ ID NO: 186191 - RNA, 32 nt, Human
ggagaguccuggggccuuguuuugaaaaagac

SEQ ID NO: 186192 - RNA, 32 nt, Human
ggagagucugccuuaugucccuuccuugugga

SEQ ID NO: 186193 - RNA, 32 nt, Human
ggagagucugggguccugagaggcagagaccu

SEQ ID NO: 186194 - RNA, 32 nt, Human
ggagagugaagccaagccccagagccacggac

SEQ ID NO: 186195 - RNA, 32 nt, Human
ggagagugaaggagggauaugugguagagcac

SEQ ID NO: 186196 - RNA, 32 nt, Human
ggagagugagaaagaggaugagagggaugguc

SEQ ID NO: 186197 - RNA, 24 nt, Human
ggagagugaggaugaccaucucca

SEQ ID NO: 186198 - RNA, 25 nt, Human
ggagagugaggcuaggcaucuauca

SEQ ID NO: 186199 - RNA, 24 nt, Human
ggagagugaggggccccgccagcc

SEQ ID NO: 186200 - RNA, 32 nt, Human
ggagagugauaaggaaagaacucaccuuucug

SEQ ID NO: 186201 - RNA, 32 nt, Human
ggagagugaugauucugugaauauugcugaga

SEQ ID NO: 186202 - RNA, 32 nt, Human
ggagagugccucuccccucugccauccacguc

SEQ ID NO: 186203 - RNA, 32 nt, Human
ggagagugcuugaacccaggaggcggagguug

SEQ ID NO: 186204 - RNA, 32 nt, Human
ggagaguggaaggacuguggcugcagguggga

SEQ ID NO: 186205 - RNA, 32 nt, Human
ggagaguggccgggccggcagagcagggggcc

SEQ ID NO: 186206 - RNA, 32 nt, Human
ggagaguggccuccaugauggaagaugauagg

SEQ ID NO: 186207 - RNA, 32 nt, Human
ggagaguggggagcaggguggggaagagggga

SEQ ID NO: 186208 - RNA, 32 nt, Human
ggagaguggggagcccgucuucugcugagugc

SEQ ID NO: 186209 - RNA, 22 nt, Human
ggagaguggggggcucauucca

SEQ ID NO: 186210 - RNA, 32 nt, Human
ggagaguggggugggucuggaaacccccgagg

SEQ ID NO: 186211 - RNA, 32 nt, Human
ggagagugguacuggcaguuuauggcugaaau

SEQ ID NO: 186212 - RNA, 32 nt, Human
ggagagugucugcagggcggcggagggcagag

SEQ ID NO: 186213 - RNA, 32 nt, Human
ggagagugugacauguggggagaggaccagcu

SEQ ID NO: 186214 - RNA, 32 nt, Human
ggagaguguggaguccagagugcugccaggac

SEQ ID NO: 186215 - RNA, 32 nt, Human
ggagagugugggcagcuggagccagguccucc

SEQ ID NO: 186216 - RNA, 32 nt, Human
ggagagugugucuuuccuucugugucuggugu

SEQ ID NO: 186217 - RNA, 32 nt, Human
ggagagugugugugggcagcuguguguaagcc

SEQ ID NO: 186218 - RNA, 20 nt, Human
ggagaguuccaugcagugug

SEQ ID NO: 186219 - RNA, 32 nt, Human
ggagaguugagauuuccuccucccucuggcug

SEQ ID NO: 186220 - RNA, 32 nt, Human
ggagaguuguucaggucacugcacaaauauau

SEQ ID NO: 186221 - RNA, 32 nt, Human
ggagauaaaaggaugaauuucugugacugcca

SEQ ID NO: 186222 - RNA, 32 nt, Human
ggagauaaacagccaaauagcaaauaggucac

SEQ ID NO: 186223 - RNA, 32 nt, Human
ggagauaagacuggggagagacaccccaaccu

SEQ ID NO: 186224 - RNA, 32 nt, Human
ggagauacaaagcaaggagcuggugagcccag

SEQ ID NO: 186225 - RNA, 32 nt, Human
ggagauacaaaguagacccaggaaugaggcua

SEQ ID NO: 186226 - RNA, 19 nt, Human
ggagauacaggugugugug

SEQ ID NO: 186227 - RNA, 16 nt, Human
ggagauacaucuggga

SEQ ID NO: 186228 - RNA, 32 nt, Human
ggagauagagccuugcucugccacccaggcug

SEQ ID NO: 186229 - RNA, 32 nt, Human
ggagauagagucucgcucugucgcccagggug

SEQ ID NO: 186230 - RNA, 32 nt, Human
ggagauagccaaggaacaggauuuccccuagc

SEQ ID NO: 186231 - RNA, 32 nt, Human
ggagauaggcuccugaguauuuugaaaaacaa

SEQ ID NO: 186232 - RNA, 23 nt, Human
ggagauaggggagaaccugcagg

SEQ ID NO: 186233 - RNA, 32 nt, Human
ggagauaggguuucacaauguuggccaugcug

SEQ ID NO: 186234 - RNA, 32 nt, Human
ggagauaucugagggaggaggccaccucucca

SEQ ID NO: 186235 - RNA, 31 nt, Human
ggagauauuugauacucucauuuaaacuggu

SEQ ID NO: 186236 - RNA, 32 nt, Human
ggagaucaaauauguaaaaucauuucaaauau

SEQ ID NO: 186237 - RNA, 32 nt, Human
ggagaucaagcaagggcugccuuucaggaguc

SEQ ID NO: 186238 - RNA, 32 nt, Human
ggagaucaagccuuuuuccuaugcucaugagc

SEQ ID NO: 186239 - RNA, 32 nt, Human
ggagaucacgccacugcaacuccagcuugggu

SEQ ID NO: 186240 - RNA, 32 nt, Human
ggagaucacgccacugcgcuccagccugggcg

SEQ ID NO: 186241 - RNA, 21 nt, Human
ggagaucagccgaaagagcaa

SEQ ID NO: 186242 - RNA, 23 nt, Human
ggagaucagcguccagcaaauaa

SEQ ID NO: 186243 - RNA, 32 nt, Human
ggagaucaugaaggaguucaaaagccagagca

SEQ ID NO: 186244 - RNA, 32 nt, Human
ggagaucaugaucuuuauacugugaauagcag

SEQ ID NO: 186245 - RNA, 32 nt, Human
ggagaucaugccacugcaccccagccugggca

SEQ ID NO: 186246 - RNA, 32 nt, Human
ggagaucaugccacugcauucuagccugggca

SEQ ID NO: 186247 - RNA, 32 nt, Human
ggagaucaugccagugcacuccagccugggca

SEQ ID NO: 186248 - RNA, 32 nt, Human
ggagaucauggagcuaagaagcagagccaagu

SEQ ID NO: 186249 - RNA, 32 nt, Human
ggagaucauuuccuuuuuaacuuuguucaggu

SEQ ID NO: 186250 - RNA, 22 nt, Human
ggagauccagaccauccuggcc

SEQ ID NO: 186251 - RNA, 24 nt, Human
ggagauccauaggcagccugcagg

SEQ ID NO: 186252 - RNA, 32 nt, Human
ggagaucccagccugggcagccugcgcugcug

SEQ ID NO: 186253 - RNA, 18 nt, Human
ggagaucccucccuucuc

SEQ ID NO: 186254 - RNA, 32 nt, Human
ggagaucccugggggcuccucuugccuggcag

SEQ ID NO: 186255 - RNA, 32 nt, Human
ggagaucccuuucaauuauuucugggaugcag

SEQ ID NO: 186256 - RNA, 25 nt, Human
ggagauccuggggccuuaccuacua

SEQ ID NO: 186257 - RNA, 32 nt, Human
ggagaucgagaccauggugaaaccccgucucu

SEQ ID NO: 186258 - RNA, 32 nt, Human
ggagaucgcaccacugcccuccagccuaggug

SEQ ID NO: 186259 - RNA, 32 nt, Human
ggagaucgcaucauugcacucuagccugggcc

SEQ ID NO: 186260 - RNA, 32 nt, Human
ggagaucgccccacuacacuccagccugguca

SEQ ID NO: 186261 - RNA, 32 nt, Human
ggagaucgcgccacugcacuccagccugggcg

SEQ ID NO: 186262 - RNA, 32 nt, Human
ggagaucgcgccauugcacuccagccugggcg

SEQ ID NO: 186263 - RNA, 32 nt, Human
ggagaucgcggaggggagggggcgggaggggg

SEQ ID NO: 186264 - RNA, 32 nt, Human
ggagaucgcuggaacucaggaggcagagguug

SEQ ID NO: 186265 - RNA, 32 nt, Human
ggagaucggucaccaggagagcagccacaaag

SEQ ID NO: 186266 - RNA, 32 nt, Human
ggagaucgugccauugcacuccagccugggcg

SEQ ID NO: 186267 - RNA, 32 nt, Human
ggagaucuacagccaccugcucucugugggcu

SEQ ID NO: 186268 - RNA, 32 nt, Human
ggagaucuccauccuuuguccagagcagaaca

SEQ ID NO: 186269 - RNA, 32 nt, Human
ggagaucucuccucagcuggaaugaggaaugu

SEQ ID NO: 186270 - RNA, 32 nt, Human
ggagaucugcagcugggccaugcucacuuccu

SEQ ID NO: 186271 - RNA, 32 nt, Human
ggagaucugggaggggucaggagccacuaagu

SEQ ID NO: 186272 - RNA, 32 nt, Human
ggagaucuugccacugcacuccagccugggca

SEQ ID NO: 186273 - RNA, 32 nt, Human
ggagaugaaggccacauacaucaaccucaagc

SEQ ID NO: 186274 - RNA, 32 nt, Human
ggagaugaagucacugucauuugcucggagau

SEQ ID NO: 186275 - RNA, 19 nt, Human
ggagaugaauccugggccg

SEQ ID NO: 186276 - RNA, 32 nt, Human
ggagaugaccaacagggggcaggaccugggga

SEQ ID NO: 186277 - RNA, 32 nt, Human
ggagaugaccaugauuuucaggaacagcagcc

SEQ ID NO: 186278 - RNA, 32 nt, Human
ggagaugacgacacaucaugcauggaagaagu

SEQ ID NO: 186279 - RNA, 32 nt, Human
ggagaugacgccauugcacuccagccugggug

SEQ ID NO: 186280 - RNA, 32 nt, Human
ggagaugagauagggaaggagcagggaugaga

SEQ ID NO: 186281 - RNA, 29 nt, Human
ggagaugagcacgaagaaagaagacagua

SEQ ID NO: 186282 - RNA, 23 nt, Human
ggagaugagggccaccuugcagg

SEQ ID NO: 186283 - RNA, 23 nt, Human
ggagaugagggccguggccugca

SEQ ID NO: 186284 - RNA, 32 nt, Human
ggagaugauaagggccaaaggagcagucaggg

SEQ ID NO: 186285 - RNA, 32 nt, Human
ggagaugauaguggcuugcaugauggugguag

SEQ ID NO: 186286 - RNA, 32 nt, Human
ggagaugaugccacuguacugcaaccugggac

SEQ ID NO: 186287 - RNA, 24 nt, Human
ggagaugauggauaaggcaaacaa

SEQ ID NO: 186288 - RNA, 32 nt, Human
ggagaugaugucagaggcaucuguuuccuuua

SEQ ID NO: 186289 - RNA, 32 nt, Human
ggagaugauuccuagacuucacaaacacucgg

SEQ ID NO: 186290 - RNA, 31 nt, Human
ggagaugcagagaugcccaugccgagaccca

SEQ ID NO: 186291 - RNA, 32 nt, Human
ggagaugcaggaaggaguaaagagcacuggaa

SEQ ID NO: 186292 - RNA, 32 nt, Human
ggagaugcauuuuccgucuggcucacaggggg

SEQ ID NO: 186293 - RNA, 32 nt, Human
ggagaugccaugagccgcccaaggccuucccc

SEQ ID NO: 186294 - RNA, 32 nt, Human
ggagaugccuggguccuguucuuccuacauaa

SEQ ID NO: 186295 - RNA, 32 nt, Human
ggagaugccuucucccccaccucccaggaccu

SEQ ID NO: 186296 - RNA, 24 nt, Human
ggagaugcgaggaccuaucuauua

SEQ ID NO: 186297 - RNA, 32 nt, Human
ggagaugcgccacugcacuccagccugggcga

SEQ ID NO: 186298 - RNA, 32 nt, Human
ggagaugcgcuugggaggaaauugcagaggcc

SEQ ID NO: 186299 - RNA, 32 nt, Human
ggagaugcggggagcagggugggcaggaauac

SEQ ID NO: 186300 - RNA, 32 nt, Human
ggagaugcgguuucaccauguuggccgggcca

SEQ ID NO: 186301 - RNA, 32 nt, Human
ggagaugcgguuucaccauguuggcugggcca

SEQ ID NO: 186302 - RNA, 32 nt, Human
ggagaugcucacugagcugcugcuuuuaugug

SEQ ID NO: 186303 - RNA, 32 nt, Human
ggagaugcugaucuugaguuguaaugagaaaa

SEQ ID NO: 186304 - RNA, 32 nt, Human
ggagaugcuggccugcgccugcaccugcgccu

SEQ ID NO: 186305 - RNA, 32 nt, Human
ggagaugcugggacccucggggcaggaagucc

SEQ ID NO: 186306 - RNA, 32 nt, Human
ggagaugcugggacugagagugucauggugga

SEQ ID NO: 186307 - RNA, 32 nt, Human
ggagaugcugggauagccauuuccauggcucu

SEQ ID NO: 186308 - RNA, 32 nt, Human
ggagaugcugugccccuggccuugggauccag

SEQ ID NO: 186309 - RNA, 32 nt, Human
ggagaugcugugcugccuacagccuggacagg

SEQ ID NO: 186310 - RNA, 29 nt, Human
ggagauggaagacuucgcccgaggggcgg

SEQ ID NO: 186311 - RNA, 22 nt, Human
ggagauggacggugaugagcuc

SEQ ID NO: 186312 - RNA, 32 nt, Human
ggagauggagaggaaggacuacagaggacaag

SEQ ID NO: 186313 - RNA, 23 nt, Human
ggagauggagaggcgggccugca

SEQ ID NO: 186314 - RNA, 32 nt, Human
ggagauggagaggcgggccugcaagugcgaac

SEQ ID NO: 186315 - RNA, 32 nt, Human
ggagauggaggcagcagacgugcagugccaua

SEQ ID NO: 186316 - RNA, 32 nt, Human
ggagauggaguaauuuugcuguggaaagacuu

SEQ ID NO: 186317 - RNA, 32 nt, Human
ggagauggagucucacucuguugcccaggcug

SEQ ID NO: 186318 - RNA, 32 nt, Human
ggagauggagucucgcucugucgcccaagcug

SEQ ID NO: 186319 - RNA, 32 nt, Human
ggagauggagucuugcucuguugcccaggcug

SEQ ID NO: 186320 - RNA, 32 nt, Human
ggagauggaguuaaacuguuccccuaccuugg

SEQ ID NO: 186321 - RNA, 32 nt, Human
ggagauggauuccguccucgggggcucugggu

SEQ ID NO: 186322 - RNA, 32 nt, Human
ggagauggcaggacacagcaaacaggacacau

SEQ ID NO: 186323 - RNA, 32 nt, Human
ggagauggcgccacugcacucccgucuggggg

SEQ ID NO: 186324 - RNA, 32 nt, Human
ggagauggcguuuuaccauguuggucaggcug

SEQ ID NO: 186325 - RNA, 32 nt, Human
ggagauggcuuccccacuaugggaugacgagg

SEQ ID NO: 186326 - RNA, 32 nt, Human
ggagaugggaagagcaucuccaggcaaugagu

SEQ ID NO: 186327 - RNA, 32 nt, Human
ggagaugggaagggaugggauuucuggguccc

SEQ ID NO: 186328 - RNA, 32 nt, Human
ggagaugggaggaagccgcgggguggagcagg

SEQ ID NO: 186329 - RNA, 32 nt, Human
ggagaugggagguggggaaugaauggaagcug

SEQ ID NO: 186330 - RNA, 31 nt, Human
ggagaugggaugguugcuaugccaagccuug

SEQ ID NO: 186331 - RNA, 32 nt, Human
ggagaugggcaggauuuaguaggacaacucgg

SEQ ID NO: 186332 - RNA, 29 nt, Human
ggagaugggcaucuaccagauguacuugu

SEQ ID NO: 186333 - RNA, 32 nt, Human
ggagauggggaggaagccccaucucugcuguu

SEQ ID NO: 186334 - RNA, 32 nt, Human
ggagauggggccggugcugauggggaacagcu

SEQ ID NO: 186335 - RNA, 18 nt, Human
ggagauggggcucuggga

SEQ ID NO: 186336 - RNA, 32 nt, Human
ggagauggggcucugggagacggccaaggccu

SEQ ID NO: 186337 - RNA, 32 nt, Human
ggagauggggcugaggacagcucaaaaaggag

SEQ ID NO: 186338 - RNA, 32 nt, Human
ggagaugggggcggagggagcuggagcuguca

SEQ ID NO: 186339 - RNA, 32 nt, Human
ggagauggggucuugcuuuguugcccaggcug

SEQ ID NO: 186340 - RNA, 20 nt, Human
ggagaugggguggccugcag

SEQ ID NO: 186341 - RNA, 32 nt, Human
ggagauggggugucaccauguuggccaggcug

SEQ ID NO: 186342 - RNA, 32 nt, Human
ggagaugggguuucacaauguuggccaggcug

SEQ ID NO: 186343 - RNA, 32 nt, Human
ggagaugggguuucaccauguuagccaggaug

SEQ ID NO: 186344 - RNA, 32 nt, Human
ggagaugggguuucaccauguugccaaggcca

SEQ ID NO: 186345 - RNA, 32 nt, Human
ggagaugggguuucaccauguuggccaggcua

SEQ ID NO: 186346 - RNA, 32 nt, Human
ggagaugggguuucaccauguuggccaggcug

SEQ ID NO: 186347 - RNA, 32 nt, Human
ggagaugggguuucaccauguuggccaggcuu

SEQ ID NO: 186348 - RNA, 32 nt, Human
ggagaugggguuucacuauguugccuaagcug

SEQ ID NO: 186349 - RNA, 32 nt, Human
ggagaugggguuucacuguguuggccaggcug

SEQ ID NO: 186350 - RNA, 32 nt, Human
ggagaugggguuucaucauguuggccaggcua

SEQ ID NO: 186351 - RNA, 32 nt, Human
ggagaugggguuucgccauauugaucaggcug

SEQ ID NO: 186352 - RNA, 32 nt, Human
ggagaugggguuucuccauauuggucaggcug

SEQ ID NO: 186353 - RNA, 32 nt, Human
ggagaugggguuuuaccauguuggccagagug

SEQ ID NO: 186354 - RNA, 32 nt, Human
ggagaugggguuuuaccauguuggccaggcug

SEQ ID NO: 186355 - RNA, 32 nt, Human
ggagaugggguuuugccauguugcgcaacuaa

SEQ ID NO: 186356 - RNA, 32 nt, Human
ggagaugggguuuugcuauguugcccaggcug

SEQ ID NO: 186357 - RNA, 32 nt, Human
ggagaugggguuuugucauguuggccagucug

SEQ ID NO: 186358 - RNA, 32 nt, Human
ggagauggguuuucaccauguuggccaggcug

SEQ ID NO: 186359 - RNA, 32 nt, Human
ggagauggucagguugguaggagaagcuauaa

SEQ ID NO: 186360 - RNA, 32 nt, Human
ggagaugguggagucacaggaugaacacaggc

SEQ ID NO: 186361 - RNA, 32 nt, Human
ggagaugguguuucaccauguuggccagacug

SEQ ID NO: 186362 - RNA, 32 nt, Human
ggagaugucaucaagcuccacccuccuggccu

SEQ ID NO: 186363 - RNA, 32 nt, Human
ggagaugugaugacaauugucuuuuggcacaa

SEQ ID NO: 186364 - RNA, 32 nt, Human
ggagauguggcuguaggccauugaggaagacg

SEQ ID NO: 186365 - RNA, 29 nt, Human
ggagauguucccggcgcuggaguccgacu

SEQ ID NO: 186366 - RNA, 32 nt, Human
ggagauuaaaggacagggcauugauggaaggu

SEQ ID NO: 186367 - RNA, 32 nt, Human
ggagauuaaggcaggaggaucacuugagccca

SEQ ID NO: 186368 - RNA, 31 nt, Human
ggagauuaggaaagagaaaagguugagaaga

SEQ ID NO: 186369 - RNA, 32 nt, Human
ggagauuagucauuauagcucagaccuaagcu

SEQ ID NO: 186370 - RNA, 32 nt, Human
ggagauucaagucaugccccagaagcaaggug

SEQ ID NO: 186371 - RNA, 32 nt, Human
ggagauucacuggguucugcauuuucaggauu

SEQ ID NO: 186372 - RNA, 32 nt, Human
ggagauucaggcagacugguggcaguggagua

SEQ ID NO: 186373 - RNA, 32 nt, Human
ggagauuccauuccauuuucaaguguacagcc

SEQ ID NO: 186374 - RNA, 32 nt, Human
ggagauucccucgcagcugagcagaaaacagu

SEQ ID NO: 186375 - RNA, 22 nt, Human
ggagauucccugggccugcagg

SEQ ID NO: 186376 - RNA, 32 nt, Human
ggagauucgggcuguggaaggcucccuagcgu

SEQ ID NO: 186377 - RNA, 32 nt, Human
ggagauucuaggcagaggcuggaaugcaauga

SEQ ID NO: 186378 - RNA, 32 nt, Human
ggagauugaccuggauggggcaggccaccugg

SEQ ID NO: 186379 - RNA, 32 nt, Human
ggagauugagagaaaagguugaaaaugguugc

SEQ ID NO: 186380 - RNA, 32 nt, Human
ggagauugagcugggaggauugcuugagacca

SEQ ID NO: 186381 - RNA, 32 nt, Human
ggagauugaggugggagagagaagcagagcga

SEQ ID NO: 186382 - RNA, 32 nt, Human
ggagauugauucauaauucacaugucaauuuu

SEQ ID NO: 186383 - RNA, 32 nt, Human
ggagauugcaccacugcacuccagccugggug

SEQ ID NO: 186384 - RNA, 23 nt, Human
ggagauugcagaaaaggcuuccc

SEQ ID NO: 186385 - RNA, 32 nt, Human
ggagauugcaguaagccaggaucaugccacug

SEQ ID NO: 186386 - RNA, 32 nt, Human
ggagauugcccaggaucaagggugcgguguug

SEQ ID NO: 186387 - RNA, 32 nt, Human
ggagauugcgccgcugcacuccagccugggcg

SEQ ID NO: 186388 - RNA, 32 nt, Human
ggagauugcucugggcagcagugagucucggc

SEQ ID NO: 186389 - RNA, 32 nt, Human
ggagauuggaauggggacucccagggagaccu

SEQ ID NO: 186390 - RNA, 32 nt, Human
ggagauuggaugccuggcuuucuuugaggaca

SEQ ID NO: 186391 - RNA, 32 nt, Human
ggagauuguaccacugcacuccagccugguca

SEQ ID NO: 186392 - RNA, 32 nt, Human
ggagauuguaccauggcacuccagccuggaca

SEQ ID NO: 186393 - RNA, 32 nt, Human
ggagauuucaguucagcgguugaggagaauug

SEQ ID NO: 186394 - RNA, 32 nt, Human
ggagauuuccagauggaagcuguacuuggguc

SEQ ID NO: 186395 - RNA, 32 nt, Human
ggagauuugcucaauaccuggccucauuuaaa

SEQ ID NO: 186396 - RNA, 32 nt, Human
ggagauuuucaucagagguggguggguguuca

SEQ ID NO: 186397 - RNA, 32 nt, Human
ggagcaaaaacauuaaccagcugcccaggguu

SEQ ID NO: 186398 - RNA, 32 nt, Human
ggagcaaaacagacuuugucuccugauuagua

SEQ ID NO: 186399 - RNA, 22 nt, Human
ggagcaaaaccuaugacuucca

SEQ ID NO: 186400 - RNA, 32 nt, Human
ggagcaaaaccugaagugucuucaugugcauu

SEQ ID NO: 186401 - RNA, 32 nt, Human
ggagcaaaauggcugcuugagcuacucugugu

SEQ ID NO: 186402 - RNA, 22 nt, Human
ggagcaaaauugugaucuuucc

SEQ ID NO: 186403 - RNA, 32 nt, Human
ggagcaaaccugaaagccagagccuccugaau

SEQ ID NO: 186404 - RNA, 17 nt, Human
ggagcaaacuucagaga

SEQ ID NO: 186405 - RNA, 19 nt, Human
ggagcaaagaggggggcag

SEQ ID NO: 186406 - RNA, 32 nt, Human
ggagcaaagcaggaggucuugggcuaaaaauc

SEQ ID NO: 186407 - RNA, 32 nt, Human
ggagcaaagcucccucccuccagcagaaggcu

SEQ ID NO: 186408 - RNA, 32 nt, Human
ggagcaaaucacuucugucacaguuauuaugg

SEQ ID NO: 186409 - RNA, 32 nt, Human
ggagcaacacucaucaucaccaagucaaacuu

SEQ ID NO: 186410 - RNA, 32 nt, Human
ggagcaacagccaggcccccaggaggacagcc

SEQ ID NO: 186411 - RNA, 24 nt, Human
ggagcaaccauuagaaaaugcagg

SEQ ID NO: 186412 - RNA, 23 nt, Human
ggagcaacccccaggucuuuacu

SEQ ID NO: 186413 - RNA, 32 nt, Human
ggagcaaccuagguguccaacaacagaugaau

SEQ ID NO: 186414 - RNA, 32 nt, Human
ggagcaacuagaaaauugucauuucccucaac

SEQ ID NO: 186415 - RNA, 19 nt, Human
ggagcaacugucucaggga

SEQ ID NO: 186416 - RNA, 32 nt, Human
ggagcaagaacagaaacagggagccaguuaca

SEQ ID NO: 186417 - RNA, 32 nt, Human
ggagcaagagaagaaagccaaggaggcagcag

SEQ ID NO: 186418 - RNA, 32 nt, Human
ggagcaagagcugccuguuucaaggugauguc

SEQ ID NO: 186419 - RNA, 32 nt, Human
ggagcaagaggagagguugcuggagcaagagg

SEQ ID NO: 186420 - RNA, 32 nt, Human
ggagcaagaggagagguugcuggagcugcagg

SEQ ID NO: 186421 - RNA, 32 nt, Human
ggagcaagcaagguuagcaacugugaacagag

SEQ ID NO: 186422 - RNA, 32 nt, Human
ggagcaaggagagagggaagaaggaccccguc

SEQ ID NO: 186423 - RNA, 32 nt, Human
ggagcaaggggcugccuugcaggccugccuuc

SEQ ID NO: 186424 - RNA, 32 nt, Human
ggagcaaggguagccaauggcagaggggguug

SEQ ID NO: 186425 - RNA, 32 nt, Human
ggagcaaguagcccuguccugacauugacccu

SEQ ID NO: 186426 - RNA, 32 nt, Human
ggagcaagugaagaacucugugaaggauggaa

SEQ ID NO: 186427 - RNA, 32 nt, Human
ggagcaaguggagugguugcaggcagaugaga

SEQ ID NO: 186428 - RNA, 32 nt, Human
ggagcaaguucugcuugaccuagccgacgguu

SEQ ID NO: 186429 - RNA, 32 nt, Human
ggagcaaguuucugccucuggaaagggggcgg

SEQ ID NO: 186430 - RNA, 32 nt, Human
ggagcaaucuaagcuguguuacuccaaaggac

SEQ ID NO: 186431 - RNA, 32 nt, Human
ggagcaaugaccauugugcacaugcguguggg

SEQ ID NO: 186432 - RNA, 32 nt, Human
ggagcaauggccagaccaguuucaguaucucu

SEQ ID NO: 186433 - RNA, 32 nt, Human
ggagcacaaagcccaugagggaaagugaguuu

SEQ ID NO: 186434 - RNA, 32 nt, Human
ggagcacacagacagaagacugugucaugggu

SEQ ID NO: 186435 - RNA, 32 nt, Human
ggagcacacaucuggcacugauaagcacacug

SEQ ID NO: 186436 - RNA, 32 nt, Human
ggagcacaccucagugcagcaggaaggacccc

SEQ ID NO: 186437 - RNA, 32 nt, Human
ggagcacacgcuccacgcacacacaccccagc

SEQ ID NO: 186438 - RNA, 32 nt, Human
ggagcacacuccuucaguucagcaagacauaa

SEQ ID NO: 186439 - RNA, 32 nt, Human
ggagcacagaacaccaugaagccucaagaugu

SEQ ID NO: 186440 - RNA, 32 nt, Human
ggagcacagagggagcggaggaggggcgaagg

SEQ ID NO: 186441 - RNA, 32 nt, Human
ggagcacagaggggaggaggaggacuaaauga

SEQ ID NO: 186442 - RNA, 32 nt, Human
ggagcacagaugggggaaaccggcagggcugg

SEQ ID NO: 186443 - RNA, 32 nt, Human
ggagcacaggcagggguguugguguuggggca

SEQ ID NO: 186444 - RNA, 32 nt, Human
ggagcacaggcagguggcugcggggucccagc

SEQ ID NO: 186445 - RNA, 32 nt, Human
ggagcacaggcauaacacagguacccagugug

SEQ ID NO: 186446 - RNA, 32 nt, Human
ggagcacagugcugggaaaugggagcacaaag

SEQ ID NO: 186447 - RNA, 32 nt, Human
ggagcacaguggugaaagaugcaguccuggcu

SEQ ID NO: 186448 - RNA, 32 nt, Human
ggagcacauagagauagaggaggaggccgaag

SEQ ID NO: 186449 - RNA, 32 nt, Human
ggagcacauucuggggagcacacaccugcggu

SEQ ID NO: 186450 - RNA, 32 nt, Human
ggagcacauucuuugccugccuucccuucauc

SEQ ID NO: 186451 - RNA, 32 nt, Human
ggagcaccaggagcccuggagccccuuccacc

SEQ ID NO: 186452 - RNA, 32 nt, Human
ggagcacccaauucuucuugagaacaccaacc

SEQ ID NO: 186453 - RNA, 32 nt, Human
ggagcacccaggcuugggcagcaaucucugca

SEQ ID NO: 186454 - RNA, 22 nt, Human
ggagcaccccacccccagcgag

SEQ ID NO: 186455 - RNA, 24 nt, Human
ggagcaccccaccugcccccgaga

SEQ ID NO: 186456 - RNA, 19 nt, Human
ggagcacccugucuucucu

SEQ ID NO: 186457 - RNA, 32 nt, Human
ggagcacccugucuucuuaauucuccaagcgg

SEQ ID NO: 186458 - RNA, 32 nt, Human
ggagcaccgccuccacccaggucucacaggau

SEQ ID NO: 186459 - RNA, 32 nt, Human
ggagcaccgcggggccacagccccagacgcca

SEQ ID NO: 186460 - RNA, 21 nt, Human
ggagcaccucagucucuguga

SEQ ID NO: 186461 - RNA, 32 nt, Human
ggagcaccugcauccaagagcaugcuuacauu

SEQ ID NO: 186462 - RNA, 32 nt, Human
ggagcaccugcucagguaccucaagaaccccu

SEQ ID NO: 186463 - RNA, 32 nt, Human
ggagcaccugggaagcucugggugcaggauag

SEQ ID NO: 186464 - RNA, 23 nt, Human
ggagcacgaccuguuugcugggc

SEQ ID NO: 186465 - RNA, 32 nt, Human
ggagcacgcgggaccucgguggagaucuccag

SEQ ID NO: 186466 - RNA, 17 nt, Human
ggagcacgguucuggga

SEQ ID NO: 186467 - RNA, 32 nt, Human
ggagcacguccaggaacuccucagcagcgccu

SEQ ID NO: 186468 - RNA, 18 nt, Human
ggagcacucacucuuccu

SEQ ID NO: 186469 - RNA, 32 nt, Human
ggagcacugagugccagcaucuuccagcacca

SEQ ID NO: 186470 - RNA, 32 nt, Human
ggagcacugcacuccuaggaagcaggaaaugg

SEQ ID NO: 186471 - RNA, 32 nt, Human
ggagcacugccucagccuuugcacaugguaau

SEQ ID NO: 186472 - RNA, 32 nt, Human
ggagcacugccuggccaaggccucauccuggg

SEQ ID NO: 186473 - RNA, 32 nt, Human
ggagcacugcugggcuccuggacugagaauag

SEQ ID NO: 186474 - RNA, 32 nt, Human
ggagcacuggcaguugguggcagugagaccag

SEQ ID NO: 186475 - RNA, 32 nt, Human
ggagcacugguaccugcugggcccgccggcug

SEQ ID NO: 186476 - RNA, 32 nt, Human
ggagcacuggugugaacucacccugggagcca

SEQ ID NO: 186477 - RNA, 32 nt, Human
ggagcacugguucugggcaggcaguggcaggg

SEQ ID NO: 186478 - RNA, 32 nt, Human
ggagcacuguaaucgcgcuugcugaguuagca

SEQ ID NO: 186479 - RNA, 32 nt, Human
ggagcacuucgaggaggaggaggaggccgggg

SEQ ID NO: 186480 - RNA, 32 nt, Human
ggagcacuuuggggacugggguugcagaacac

SEQ ID NO: 186481 - RNA, 17 nt, Human
ggagcagaaaaugcaga

SEQ ID NO: 186482 - RNA, 32 nt, Human
ggagcagaaagaguuauggcagagguuccacu

SEQ ID NO: 186483 - RNA, 32 nt, Human
ggagcagaagagaguggggccugcccucugcc

SEQ ID NO: 186484 - RNA, 20 nt, Human
ggagcagaaggcuucagaga

SEQ ID NO: 186485 - RNA, 32 nt, Human
ggagcagaccaugcccucccaacccuggaguu

SEQ ID NO: 186486 - RNA, 32 nt, Human
ggagcagacccugagaucugggcauaggcacc

SEQ ID NO: 186487 - RNA, 32 nt, Human
ggagcagaccucugugggcacugugaggcgga

SEQ ID NO: 186488 - RNA, 18 nt, Human
ggagcagacuccugggga

SEQ ID NO: 186489 - RNA, 32 nt, Human
ggagcagagaaaacuacuagaugugaacuuga

SEQ ID NO: 186490 - RNA, 32 nt, Human
ggagcagagacacuaacgacuucagggcaggg

SEQ ID NO: 186491 - RNA, 32 nt, Human
ggagcagagagcacccagcccgggagguggau

SEQ ID NO: 186492 - RNA, 32 nt, Human
ggagcagagagggacagcuccggggcccaagc

SEQ ID NO: 186493 - RNA, 32 nt, Human
ggagcagagaugagagcaaaauucagacuugc

SEQ ID NO: 186494 - RNA, 32 nt, Human
ggagcagagcccugcacccugccuaguggcuu

SEQ ID NO: 186495 - RNA, 32 nt, Human
ggagcagagccuuugucucaggagcaaaccag

SEQ ID NO: 186496 - RNA, 26 nt, Human
ggagcagagcgggcugcgagggucuu

SEQ ID NO: 186497 - RNA, 23 nt, Human
ggagcagaggccacuaauggaga

SEQ ID NO: 186498 - RNA, 32 nt, Human
ggagcagaggcccucaggguauagagaaggaa

SEQ ID NO: 186499 - RNA, 32 nt, Human
ggagcagagggaagagcugcugaggggguggg

SEQ ID NO: 186500 - RNA, 32 nt, Human
ggagcagaggggcgggggcgagagggaagugg

SEQ ID NO: 186501 - RNA, 32 nt, Human
ggagcagaggugagcugagugcagugagccaa

SEQ ID NO: 186502 - RNA, 32 nt, Human
ggagcagaguagcccugucccuucccugccug

SEQ ID NO: 186503 - RNA, 32 nt, Human
ggagcagauggccaagcagauagguuaugucu

SEQ ID NO: 186504 - RNA, 19 nt, Human
ggagcagcaaagggccuca

SEQ ID NO: 186505 - RNA, 32 nt, Human
ggagcagcaaguaaaggagcugcaggagaagc

SEQ ID NO: 186506 - RNA, 32 nt, Human
ggagcagcacucgcaggagcugcuggcugagc

SEQ ID NO: 186507 - RNA, 32 nt, Human
ggagcagcagagccaugaagaagaaguuagug

SEQ ID NO: 186508 - RNA, 32 nt, Human
ggagcagcagaggcggucuucaacauccugcc

SEQ ID NO: 186509 - RNA, 19 nt, Human
ggagcagcagcagaggcag

SEQ ID NO: 186510 - RNA, 32 nt, Human
ggagcagcagcucugggccgcuggcagggccg

SEQ ID NO: 186511 - RNA, 32 nt, Human
ggagcagcagggaggcgagcagagggccccca

SEQ ID NO: 186512 - RNA, 32 nt, Human
ggagcagcagucccucacuuugaaaccuucgc

SEQ ID NO: 186513 - RNA, 32 nt, Human
ggagcagcagugaugaagaaggaugauaucau

SEQ ID NO: 186514 - RNA, 32 nt, Human
ggagcagcaucccuggcuuccacccacgaaag

SEQ ID NO: 186515 - RNA, 32 nt, Human
ggagcagcauggagcggcggagcgagagcccg

SEQ ID NO: 186516 - RNA, 32 nt, Human
ggagcagcauuuguuucuccccaaaucuagaa

SEQ ID NO: 186517 - RNA, 32 nt, Human
ggagcagccacagccccaagacgaggcaggga

SEQ ID NO: 186518 - RNA, 18 nt, Human
ggagcagccagggggagg

SEQ ID NO: 186519 - RNA, 20 nt, Human
ggagcagcccacccagcaga

SEQ ID NO: 186520 - RNA, 24 nt, Human
ggagcagcccagauuaucuuuacu

SEQ ID NO: 186521 - RNA, 22 nt, Human
ggagcagcccagcaccuccacu

SEQ ID NO: 186522 - RNA, 24 nt, Human
ggagcagcccaguugugucucucu

SEQ ID NO: 186523 - RNA, 18 nt, Human
ggagcagcccccgggccg

SEQ ID NO: 186524 - RNA, 32 nt, Human
ggagcagccccugggcucccugggcaggggag

SEQ ID NO: 186525 - RNA, 18 nt, Human
ggagcagccggcuggcug

SEQ ID NO: 186526 - RNA, 32 nt, Human
ggagcagccgggaggagggggccgcagucggg

SEQ ID NO: 186527 - RNA, 32 nt, Human
ggagcagccuccagaggugaaggcagggcauc

SEQ ID NO: 186528 - RNA, 18 nt, Human
ggagcagccucuagaacg

SEQ ID NO: 186529 - RNA, 32 nt, Human
ggagcagccugaggccccagagucugagacga

SEQ ID NO: 186530 - RNA, 32 nt, Human
ggagcagcgagcgggcuucagcgagccgcagg

SEQ ID NO: 186531 - RNA, 21 nt, Human
ggagcagcgcgggagagccgg

SEQ ID NO: 186532 - RNA, 32 nt, Human
ggagcagcggggagcuugcagugaccaagagg

SEQ ID NO: 186533 - RNA, 32 nt, Human
ggagcagcggggucucacaaagaggauaccug

SEQ ID NO: 186534 - RNA, 32 nt, Human
ggagcagcgguggggagcagggccaagguccc

SEQ ID NO: 186535 - RNA, 32 nt, Human
ggagcagcucaauccugggccuggugacauca

SEQ ID NO: 186536 - RNA, 32 nt, Human
ggagcagcuccaggggcugguggaggagcggc

SEQ ID NO: 186537 - RNA, 18 nt, Human
ggagcagcuccuccagga

SEQ ID NO: 186538 - RNA, 32 nt, Human
ggagcagcuccuccaggauucccacaggccuc

SEQ ID NO: 186539 - RNA, 32 nt, Human
ggagcagcuccucuuccaucuccagggucuca

SEQ ID NO: 186540 - RNA, 32 nt, Human
ggagcagcucuccugccacagcuccucacccc

SEQ ID NO: 186541 - RNA, 18 nt, Human
ggagcagcugacagacga

SEQ ID NO: 186542 - RNA, 32 nt, Human
ggagcagcugaggaggaggcaggagagaggga

SEQ ID NO: 186543 - RNA, 20 nt, Human
ggagcagcugaugcccagag

SEQ ID NO: 186544 - RNA, 32 nt, Human
ggagcagcugcaauugcaccugagggacaggc

SEQ ID NO: 186545 - RNA, 32 nt, Human
ggagcagcugccgccucccgacaccuucagaa

SEQ ID NO: 186546 - RNA, 32 nt, Human
ggagcagcugccucucuggggagaugcuggag

SEQ ID NO: 186547 - RNA, 21 nt, Human
ggagcagcuggaggcacgaga

SEQ ID NO: 186548 - RNA, 19 nt, Human
ggagcagcugggacccaga

SEQ ID NO: 186549 - RNA, 32 nt, Human
ggagcagcuggggguuccaccucagggugggg

SEQ ID NO: 186550 - RNA, 32 nt, Human
ggagcagcuguuuuccaucccuucccagacaa

SEQ ID NO: 186551 - RNA, 32 nt, Human
ggagcagcuuuucuucuaguuugaugucauuu

SEQ ID NO: 186552 - RNA, 17 nt, Human
ggagcaggacucaggga

SEQ ID NO: 186553 - RNA, 32 nt, Human
ggagcaggagagaaaggaggguggguggucuc

SEQ ID NO: 186554 - RNA, 32 nt, Human
ggagcaggagagagaggguaggcuaggggugg

SEQ ID NO: 186555 - RNA, 32 nt, Human
ggagcaggagaggcugcuggagagggagaggc

SEQ ID NO: 186556 - RNA, 32 nt, Human
ggagcaggagcugcgggagacugagcacuugc

SEQ ID NO: 186557 - RNA, 32 nt, Human
ggagcaggaggaacuccaguccgucccggcau

SEQ ID NO: 186558 - RNA, 32 nt, Human
ggagcaggaggaagagggggaggagaaggagg

SEQ ID NO: 186559 - RNA, 32 nt, Human
ggagcaggaggcagaggagcagauggagcagc

SEQ ID NO: 186560 - RNA, 32 nt, Human
ggagcaggaggcugaugguccuccucaggguc

SEQ ID NO: 186561 - RNA, 32 nt, Human
ggagcaggagugauuucaguccccagcaagug

SEQ ID NO: 186562 - RNA, 32 nt, Human
ggagcaggaguggagaaagggaaaggcagguc

SEQ ID NO: 186563 - RNA, 21 nt, Human
ggagcaggaucaugccagaaa

SEQ ID NO: 186564 - RNA, 32 nt, Human
ggagcaggauggggaggagcugagccggaccc

SEQ ID NO: 186565 - RNA, 32 nt, Human
ggagcaggauuucaaggacggaauuaguauug

SEQ ID NO: 186566 - RNA, 32 nt, Human
ggagcaggcaccagcuauggagagggauacag

SEQ ID NO: 186567 - RNA, 32 nt, Human
ggagcaggcacggcacauggcaacagcaggag

SEQ ID NO: 186568 - RNA, 32 nt, Human
ggagcaggcagcccuggcaucccacagccgcc

SEQ ID NO: 186569 - RNA, 32 nt, Human
ggagcaggcaggcaucccccggaguugucucu

SEQ ID NO: 186570 - RNA, 32 nt, Human
ggagcaggcaggcauccccgggaguugucucu

SEQ ID NO: 186571 - RNA, 21 nt, Human
ggagcaggcaggggccucagg

SEQ ID NO: 186572 - RNA, 32 nt, Human
ggagcaggccagagccucuuuugcuuccuuuu

SEQ ID NO: 186573 - RNA, 32 nt, Human
ggagcaggcgcgcauggcgggccccgcgcggg

SEQ ID NO: 186574 - RNA, 32 nt, Human
ggagcaggcugccaccccuucuaccucaccac

SEQ ID NO: 186575 - RNA, 32 nt, Human
ggagcagggaaggccugacuucugcuggcauc

SEQ ID NO: 186576 - RNA, 23 nt, Human
ggagcagggagacaggaggcaga

SEQ ID NO: 186577 - RNA, 32 nt, Human
ggagcagggagggagacggcuagggcagcaag

SEQ ID NO: 186578 - RNA, 32 nt, Human
ggagcagggaguauguggucuccuucauugug

SEQ ID NO: 186579 - RNA, 31 nt, Human
ggagcagggcaacagcaccugccccacccug

SEQ ID NO: 186580 - RNA, 19 nt, Human
ggagcagggcagcuggcug

SEQ ID NO: 186581 - RNA, 32 nt, Human
ggagcagggcaggcuggcugcuggcucuacca

SEQ ID NO: 186582 - RNA, 23 nt, Human
ggagcagggcagggaagccggga

SEQ ID NO: 186583 - RNA, 32 nt, Human
ggagcagggccuggaaaccugcauuuuaguua

SEQ ID NO: 186584 - RNA, 32 nt, Human
ggagcagggcugggacgcugcaccccgcagga

SEQ ID NO: 186585 - RNA, 32 nt, Human
ggagcagggcugggacgcugcacccggcagga

SEQ ID NO: 186586 - RNA, 32 nt, Human
ggagcaggggcagagauuauuuggaauaacgu

SEQ ID NO: 186587 - RNA, 32 nt, Human
ggagcaggggcaggggcaggggcagggagagc

SEQ ID NO: 186588 - RNA, 32 nt, Human
ggagcaggggcccugguguugcauuuagcccu

SEQ ID NO: 186589 - RNA, 32 nt, Human
ggagcaggggccugccuucaucuccaaggccc

SEQ ID NO: 186590 - RNA, 32 nt, Human
ggagcaggggcuuggaguggggcuggugcccg

SEQ ID NO: 186591 - RNA, 32 nt, Human
ggagcagggguuuugcauucacggaggaccug

SEQ ID NO: 186592 - RNA, 32 nt, Human
ggagcagggugguggcuggggcgaugguggac

SEQ ID NO: 186593 - RNA, 18 nt, Human
ggagcaggguuuaacuca

SEQ ID NO: 186594 - RNA, 19 nt, Human
ggagcagguagaggggcag

SEQ ID NO: 186595 - RNA, 32 nt, Human
ggagcagguccagggaugaugcagcccccuuc

SEQ ID NO: 186596 - RNA, 32 nt, Human
ggagcaggugcuuguggacaaggcuccacaag

SEQ ID NO: 186597 - RNA, 32 nt, Human
ggagcagguggcuggagagaggcgggguaggu

SEQ ID NO: 186598 - RNA, 32 nt, Human
ggagcagguggggguagagcagcucugcucgc

SEQ ID NO: 186599 - RNA, 21 nt, Human
ggagcaggugggucucuggga

SEQ ID NO: 186600 - RNA, 32 nt, Human
ggagcaggugugagcuucaaaugcuuagggcc

SEQ ID NO: 186601 - RNA, 32 nt, Human
ggagcagguuggggugggggagagggaaagga

SEQ ID NO: 186602 - RNA, 31 nt, Human
ggagcaguagagagagaaaaagagggggugc

SEQ ID NO: 186603 - RNA, 32 nt, Human
ggagcaguagcagggacagcagagccaaaggc

SEQ ID NO: 186604 - RNA, 32 nt, Human
ggagcagucaauauaggaucucaggccaggcc

SEQ ID NO: 186605 - RNA, 17 nt, Human
ggagcagucagcauucu

SEQ ID NO: 186606 - RNA, 32 nt, Human
ggagcagucaucuacaaugcuuuccucuauug

SEQ ID NO: 186607 - RNA, 32 nt, Human
ggagcagucccucuuugaccucaccccuugga

SEQ ID NO: 186608 - RNA, 32 nt, Human
ggagcagucucccagcccugggucugcucccc

SEQ ID NO: 186609 - RNA, 32 nt, Human
ggagcagucucuuccauggaguaagaaggaag

SEQ ID NO: 186610 - RNA, 32 nt, Human
ggagcagucuucguucuuccuccccucagugg

SEQ ID NO: 186611 - RNA, 32 nt, Human
ggagcaguggagguaagggcuccaccccaucu

SEQ ID NO: 186612 - RNA, 32 nt, Human
ggagcaguucaugcagcaccucuacccacaga

SEQ ID NO: 186613 - RNA, 32 nt, Human
ggagcaguugcaggccacagugaaguguguug

SEQ ID NO: 186614 - RNA, 23 nt, Human
ggagcaguuguuagcagaggcag

SEQ ID NO: 186615 - RNA, 32 nt, Human
ggagcaguuguuuuucccucccugggccucac

SEQ ID NO: 186616 - RNA, 32 nt, Human
ggagcauacauacauugucauuggucuucuau

SEQ ID NO: 186617 - RNA, 21 nt, Human
ggagcauaccaccaugccuga

SEQ ID NO: 186618 - RNA, 32 nt, Human
ggagcaucaccagcuccucagagccacuccgc

SEQ ID NO: 186619 - RNA, 32 nt, Human
ggagcaucacugucuacucagaagacugagaa

SEQ ID NO: 186620 - RNA, 24 nt, Human
ggagcaucaggguuggcuugggag

SEQ ID NO: 186621 - RNA, 22 nt, Human
ggagcaucaguggaggaggcag

SEQ ID NO: 186622 - RNA, 32 nt, Human
ggagcauccccagcugcuggaugcugggaccc

SEQ ID NO: 186623 - RNA, 32 nt, Human
ggagcauccuggggcucccuggcuccuggccg

SEQ ID NO: 186624 - RNA, 32 nt, Human
ggagcaucucaagagguggaaggggccgggcg

SEQ ID NO: 186625 - RNA, 32 nt, Human
ggagcaucucagaauaagauggugguacaauu

SEQ ID NO: 186626 - RNA, 32 nt, Human
ggagcaucucuugaggccaggaguuugagacc

SEQ ID NO: 186627 - RNA, 32 nt, Human
ggagcaucugcccuccuccuucucaggaauca

SEQ ID NO: 186628 - RNA, 32 nt, Human
ggagcaucugccuugugccuggcacucugccg

SEQ ID NO: 186629 - RNA, 26 nt, Human
ggagcaucuggcaggcaggggggcag

SEQ ID NO: 186630 - RNA, 32 nt, Human
ggagcaucuuaaggagcucagcucaguaaaca

SEQ ID NO: 186631 - RNA, 32 nt, Human
ggagcaucuucuuggcagccaggcugggccau

SEQ ID NO: 186632 - RNA, 32 nt, Human
ggagcaugaaccagucauauccuguugaaagc

SEQ ID NO: 186633 - RNA, 30 nt, Human
ggagcaugaacgccccuccagccuucgagu

SEQ ID NO: 186634 - RNA, 32 nt, Human
ggagcaugaagaggaugguucagagacagagg

SEQ ID NO: 186635 - RNA, 32 nt, Human
ggagcaugcccguaaucccagcuacucaggag

SEQ ID NO: 186636 - RNA, 32 nt, Human
ggagcaugccuguagucucagcuacucaggag

SEQ ID NO: 186637 - RNA, 32 nt, Human
ggagcaugccugucaucccagcuacuugggag

SEQ ID NO: 186638 - RNA, 32 nt, Human
ggagcaugccugugaucccagcuacucaggag

SEQ ID NO: 186639 - RNA, 32 nt, Human
ggagcauggaguuuggacuuugcugagcaacu

SEQ ID NO: 186640 - RNA, 32 nt, Human
ggagcaugggaagagggugagcugagggcugg

SEQ ID NO: 186641 - RNA, 32 nt, Human
ggagcaugggcagaggagacaggaacaagcgu

SEQ ID NO: 186642 - RNA, 32 nt, Human
ggagcaugggccagggcagacagucucugagg

SEQ ID NO: 186643 - RNA, 19 nt, Human
ggagcaugggcucagcuca

SEQ ID NO: 186644 - RNA, 32 nt, Human
ggagcauguaugucugcaggugucugacacgc

SEQ ID NO: 186645 - RNA, 19 nt, Human
ggagcaugucacuccagca

SEQ ID NO: 186646 - RNA, 30 nt, Human
ggagcaugucugggagucagagcgaggugg

SEQ ID NO: 186647 - RNA, 32 nt, Human
ggagcaugucuguaaucccagcuacucgggag

SEQ ID NO: 186648 - RNA, 32 nt, Human
ggagcauucucccagacccuucuuuagaagag

SEQ ID NO: 186649 - RNA, 32 nt, Human
ggagcauucugaaaacagauauucuggcccag

SEQ ID NO: 186650 - RNA, 32 nt, Human
ggagcauugaaggagaagaucugccugugggu

SEQ ID NO: 186651 - RNA, 32 nt, Human
ggagcauugauguuggguggcuuuuguucuuu

SEQ ID NO: 186652 - RNA, 32 nt, Human
ggagcauuggacaacacaggaagucccucugg

SEQ ID NO: 186653 - RNA, 32 nt, Human
ggagcauuucuuuggagagguggaaucagaag

SEQ ID NO: 186654 - RNA, 32 nt, Human
ggagcauuugagauggaagcuuacuuuggaau

SEQ ID NO: 186655 - RNA, 18 nt, Human
ggagcauuuguagccuua

SEQ ID NO: 186656 - RNA, 32 nt, Human
ggagccaaaguuucuguuccugguggucggga

SEQ ID NO: 186657 - RNA, 20 nt, Human
ggagccaacagagggagcag

SEQ ID NO: 186658 - RNA, 32 nt, Human
ggagccaacucucagccuuucccaccagggcg

SEQ ID NO: 186659 - RNA, 32 nt, Human
ggagccaagaaugcaccacugcaguccagccu

SEQ ID NO: 186660 - RNA, 20 nt, Human
ggagccaagaggaacaggaa

SEQ ID NO: 186661 - RNA, 32 nt, Human
ggagccaagaucccuccagacagcaccagcuc

SEQ ID NO: 186662 - RNA, 32 nt, Human
ggagccaagcuuucccccacagccuagccucc

SEQ ID NO: 186663 - RNA, 32 nt, Human
ggagccaaggcuuuauacgucuaaagaaaaua

SEQ ID NO: 186664 - RNA, 32 nt, Human
ggagccaauccacccacccauagaaugacuug

SEQ ID NO: 186665 - RNA, 21 nt, Human
ggagccacaacacccgaccau

SEQ ID NO: 186666 - RNA, 32 nt, Human
ggagccacaagccgcccugccuucugcaccuc

SEQ ID NO: 186667 - RNA, 23 nt, Human
ggagccacacacucccuuccuca

SEQ ID NO: 186668 - RNA, 23 nt, Human
ggagccacaccaccugugacucc

SEQ ID NO: 186669 - RNA, 32 nt, Human
ggagccacagaagauagacagauggaaggugg

SEQ ID NO: 186670 - RNA, 32 nt, Human
ggagccacagcccaggggcagaugaaggggcu

SEQ ID NO: 186671 - RNA, 32 nt, Human
ggagccacagccgcagccccagccccggccac

SEQ ID NO: 186672 - RNA, 32 nt, Human
ggagccacagccgcgcucagccuggagggaag

SEQ ID NO: 186673 - RNA, 32 nt, Human
ggagccacagccgcggcucacgccccaccgca

SEQ ID NO: 186674 - RNA, 32 nt, Human
ggagccacaggcagggucugcugguuucggug

SEQ ID NO: 186675 - RNA, 32 nt, Human
ggagccacagucccuaaugacacccacuccua

SEQ ID NO: 186676 - RNA, 32 nt, Human
ggagccacauccugaccccagcagccucagaa

SEQ ID NO: 186677 - RNA, 32 nt, Human
ggagccacauggacccacaggucccacuguca

SEQ ID NO: 186678 - RNA, 32 nt, Human
ggagccaccaacaccacugaaauucaccgugg

SEQ ID NO: 186679 - RNA, 32 nt, Human
ggagccaccacuuccaguucugaucuucucau

SEQ ID NO: 186680 - RNA, 32 nt, Human
ggagccaccaguaccaaacccaauacuuacuc

SEQ ID NO: 186681 - RNA, 32 nt, Human
ggagccaccuaccucuggccucaggcuguggg

SEQ ID NO: 186682 - RNA, 27 nt, Human
ggagccaccucacuuagacagcuucgg

SEQ ID NO: 186683 - RNA, 32 nt, Human
ggagccaccuccucagcuucccugagggcugc

SEQ ID NO: 186684 - RNA, 32 nt, Human
ggagccaccugccucuggcuucaugugagcug

SEQ ID NO: 186685 - RNA, 17 nt, Human
ggagccacgggugcaag

SEQ ID NO: 186686 - RNA, 32 nt, Human
ggagccacuacccucucuuuugaucugccaag

SEQ ID NO: 186687 - RNA, 32 nt, Human
ggagccacuagcaccaucccagagcugucagc

SEQ ID NO: 186688 - RNA, 32 nt, Human
ggagccacugcacccggccugaaugaugacuc

SEQ ID NO: 186689 - RNA, 32 nt, Human
ggagccacugcacuccagcccaggugacagag

SEQ ID NO: 186690 - RNA, 32 nt, Human
ggagccacugcacuccagccugggcgacagag

SEQ ID NO: 186691 - RNA, 32 nt, Human
ggagccacugcacuccagccugggggaaagag

SEQ ID NO: 186692 - RNA, 32 nt, Human
ggagccacugcacuccagccugggugacagag

SEQ ID NO: 186693 - RNA, 32 nt, Human
ggagccacugcacugcuggcugcagacacagg

SEQ ID NO: 186694 - RNA, 32 nt, Human
ggagccacugccacuccaguccugccaccacc

SEQ ID NO: 186695 - RNA, 32 nt, Human
ggagccacugcucucccccuugcccuccgguc

SEQ ID NO: 186696 - RNA, 32 nt, Human
ggagccacuggguggaggggcagggaggcaaa

SEQ ID NO: 186697 - RNA, 32 nt, Human
ggagccacuguggccccaugguucggagccac

SEQ ID NO: 186698 - RNA, 32 nt, Human
ggagccacuugcaggacugaggguuuuugcaa

SEQ ID NO: 186699 - RNA, 32 nt, Human
ggagccagaagagggaggaaaggagaugagau

SEQ ID NO: 186700 - RNA, 32 nt, Human
ggagccagaccaggaaccugagccagagcugg

SEQ ID NO: 186701 - RNA, 23 nt, Human
ggagccagaggaaaagaagagga

SEQ ID NO: 186702 - RNA, 32 nt, Human
ggagccagaggacccguagcugcuaaagggca

SEQ ID NO: 186703 - RNA, 32 nt, Human
ggagccagaggugccuuuguggaggacagcag

SEQ ID NO: 186704 - RNA, 32 nt, Human
ggagccagagugagaccagcagacucucacac

SEQ ID NO: 186705 - RNA, 19 nt, Human
ggagccagagugggggcag

SEQ ID NO: 186706 - RNA, 25 nt, Human
ggagccagaucugccccucagugca

SEQ ID NO: 186707 - RNA, 32 nt, Human
ggagccagcagauugcagcccagcugaccacc

SEQ ID NO: 186708 - RNA, 32 nt, Human
ggagccagcagugcccccagcacuguccccac

SEQ ID NO: 186709 - RNA, 32 nt, Human
ggagccagccacugcaaauccuuugugucuuc

SEQ ID NO: 186710 - RNA, 32 nt, Human
ggagccagccugacaccaaggacagcacuugu

SEQ ID NO: 186711 - RNA, 32 nt, Human
ggagccagccugggugacgcuccagagaacua

SEQ ID NO: 186712 - RNA, 32 nt, Human
ggagccagcgagcauaugcugcaugaggaccu

SEQ ID NO: 186713 - RNA, 16 nt, Human
ggagccagcucagaga

SEQ ID NO: 186714 - RNA, 32 nt, Human
ggagccagcucucaggacuguggcuggaggcu

SEQ ID NO: 186715 - RNA, 32 nt, Human
ggagccaggaagagagcugugaccagcagcgu

SEQ ID NO: 186716 - RNA, 32 nt, Human
ggagccaggaaggaagaagagggagggccagu

SEQ ID NO: 186717 - RNA, 32 nt, Human
ggagccaggagcuccgcagcugugucagaagc

SEQ ID NO: 186718 - RNA, 32 nt, Human
ggagccaggaggggaugugugugugcagagcu

SEQ ID NO: 186719 - RNA, 32 nt, Human
ggagccaggaguuugagaccagccugggcaac

SEQ ID NO: 186720 - RNA, 32 nt, Human
ggagccaggcagcuguguacagugagaaggga

SEQ ID NO: 186721 - RNA, 32 nt, Human
ggagccaggcccguaaguucgcaggcaggggu

SEQ ID NO: 186722 - RNA, 32 nt, Human
ggagccaggcgcuguggacagggucuguccac

SEQ ID NO: 186723 - RNA, 16 nt, Human
ggagccaggcuggcug

SEQ ID NO: 186724 - RNA, 32 nt, Human
ggagccagggcaccgugagccuggugguuggc

SEQ ID NO: 186725 - RNA, 32 nt, Human
ggagccagggcuggccauggguccccuacccu

SEQ ID NO: 186726 - RNA, 32 nt, Human
ggagccaggggaggggcaggagucccagcacc

SEQ ID NO: 186727 - RNA, 32 nt, Human
ggagccaggguuuugccauguuggccaggcug

SEQ ID NO: 186728 - RNA, 32 nt, Human
ggagccaggugaggaggagccaggaaggcagu

SEQ ID NO: 186729 - RNA, 18 nt, Human
ggagccagucaugccgga

SEQ ID NO: 186730 - RNA, 32 nt, Human
ggagccagucuccuggaacuucucccucccua

SEQ ID NO: 186731 - RNA, 32 nt, Human
ggagccagugagacaggaaaaaccuaguaacg

SEQ ID NO: 186732 - RNA, 32 nt, Human
ggagccagugccugugguuguuucuccagagu

SEQ ID NO: 186733 - RNA, 32 nt, Human
ggagccagugcugccuguccguccccaugggc

SEQ ID NO: 186734 - RNA, 32 nt, Human
ggagccaguuguguucagacacacacaucaca

SEQ ID NO: 186735 - RNA, 32 nt, Human
ggagccauaagccucugccucgaugccguuuu

SEQ ID NO: 186736 - RNA, 32 nt, Human
ggagccauaguggagcuuuccucucuaagcuc

SEQ ID NO: 186737 - RNA, 32 nt, Human
ggagccaucccccaagacccuguccaaggccc

SEQ ID NO: 186738 - RNA, 32 nt, Human
ggagccauccuggcggagcccugcugcagggg

SEQ ID NO: 186739 - RNA, 32 nt, Human
ggagccaucuauccaagaagccuucacucacc

SEQ ID NO: 186740 - RNA, 32 nt, Human
ggagccaugagugcucagucccuuggcacacu

SEQ ID NO: 186741 - RNA, 32 nt, Human
ggagccaugauggacacagaggggcaguagag

SEQ ID NO: 186742 - RNA, 32 nt, Human
ggagccaugccuggguuucagagcagagcucc

SEQ ID NO: 186743 - RNA, 31 nt, Human
ggagccauggccuauaggguccugggccgcg

SEQ ID NO: 186744 - RNA, 31 nt, Human
ggagccaugguccacgccuuccucauucaca

SEQ ID NO: 186745 - RNA, 32 nt, Human
ggagccaugucugugcucaggaagagggaagg

SEQ ID NO: 186746 - RNA, 32 nt, Human
ggagccauuagucccugccucguagugggaaa

SEQ ID NO: 186747 - RNA, 32 nt, Human
ggagcccaacuuccugugggcccucccggggc

SEQ ID NO: 186748 - RNA, 32 nt, Human
ggagcccaagagguggggugucguggcucugc

SEQ ID NO: 186749 - RNA, 32 nt, Human
ggagcccaaggcaggaagauugcuugaggcua

SEQ ID NO: 186750 - RNA, 32 nt, Human
ggagcccaauuauucauucucccuuuauugau

SEQ ID NO: 186751 - RNA, 31 nt, Human
ggagcccacagcuagggaggacagaggcugg

SEQ ID NO: 186752 - RNA, 32 nt, Human
ggagcccacuguccuggcuggcggcgggaucg

SEQ ID NO: 186753 - RNA, 32 nt, Human
ggagcccagaaaaggcagcagauggaccaugc

SEQ ID NO: 186754 - RNA, 32 nt, Human
ggagcccagaagggacacaccagcacagucug

SEQ ID NO: 186755 - RNA, 23 nt, Human
ggagcccagagaauagcgcucag

SEQ ID NO: 186756 - RNA, 20 nt, Human
ggagcccagagccgguucgg

SEQ ID NO: 186757 - RNA, 19 nt, Human
ggagcccagaggagggcag

SEQ ID NO: 186758 - RNA, 32 nt, Human
ggagcccagaggagggcagcagaagggggugg

SEQ ID NO: 186759 - RNA, 32 nt, Human
ggagcccagcacuccugggucucggggucggg

SEQ ID NO: 186760 - RNA, 32 nt, Human
ggagcccagccuaugccucccacuagccgcgu

SEQ ID NO: 186761 - RNA, 32 nt, Human
ggagcccagcugcugcagcccagggcucucug

SEQ ID NO: 186762 - RNA, 32 nt, Human
ggagcccaggaauucaagaccagucugagcaa

SEQ ID NO: 186763 - RNA, 32 nt, Human
ggagcccaggagcagaggaaguagagagagag

SEQ ID NO: 186764 - RNA, 32 nt, Human
ggagcccaggaggcacaggcugcagugagcag

SEQ ID NO: 186765 - RNA, 32 nt, Human
ggagcccaggaggucaaggcugcagugagcug

SEQ ID NO: 186766 - RNA, 32 nt, Human
ggagcccaggcagaggaggcaccgagagugag

SEQ ID NO: 186767 - RNA, 32 nt, Human
ggagcccaggcagaggaggcgccgagagcgag

SEQ ID NO: 186768 - RNA, 32 nt, Human
ggagcccaggcagagggggcgccgagagcgag

SEQ ID NO: 186769 - RNA, 32 nt, Human
ggagcccaggccaggacucugcagccucagag

SEQ ID NO: 186770 - RNA, 32 nt, Human
ggagcccaggcccucccuccaggguagagaug

SEQ ID NO: 186771 - RNA, 21 nt, Human
ggagcccaggggccuugcagg

SEQ ID NO: 186772 - RNA, 32 nt, Human
ggagcccagguggugcccgcgcaccucucaca

SEQ ID NO: 186773 - RNA, 18 nt, Human
ggagcccagucccgggcc

SEQ ID NO: 186774 - RNA, 32 nt, Human
ggagcccagugggggcugcagguccagcccac

SEQ ID NO: 186775 - RNA, 32 nt, Human
ggagcccaugaggagaaaaaggaagacuggaa

SEQ ID NO: 186776 - RNA, 32 nt, Human
ggagccccaagucuuggggaccacagaagaug

SEQ ID NO: 186777 - RNA, 32 nt, Human
ggagccccacacagaugcugggcugggacaug

SEQ ID NO: 186778 - RNA, 32 nt, Human
ggagccccaccaaccccaaaccaugcggagaa

SEQ ID NO: 186779 - RNA, 19 nt, Human
ggagccccacccccaugca

SEQ ID NO: 186780 - RNA, 32 nt, Human
ggagccccacuaaacccagcggagcggagccu

SEQ ID NO: 186781 - RNA, 32 nt, Human
ggagccccacugcuuccagccucuggugccaa

SEQ ID NO: 186782 - RNA, 32 nt, Human
ggagccccagcagacuuugagaggcgugugcg

SEQ ID NO: 186783 - RNA, 32 nt, Human
ggagccccagcuuaguggaggcugggccugaa

SEQ ID NO: 186784 - RNA, 21 nt, Human
ggagccccagggcagaaugca

SEQ ID NO: 186785 - RNA, 32 nt, Human
ggagccccaucccggugcugacagugcccacc

SEQ ID NO: 186786 - RNA, 22 nt, Human
ggagccccaugggccccaggca

SEQ ID NO: 186787 - RNA, 28 nt, Human
ggagcccccagcccagccucauccugga

SEQ ID NO: 186788 - RNA, 32 nt, Human
ggagcccccaggagcugggagaggcaggaagg

SEQ ID NO: 186789 - RNA, 22 nt, Human
ggagccccccaaauggccuggc

SEQ ID NO: 186790 - RNA, 22 nt, Human
ggagccccccacccccucagca

SEQ ID NO: 186791 - RNA, 32 nt, Human
ggagcccccugaccccuucuuucaaacagauc

SEQ ID NO: 186792 - RNA, 32 nt, Human
ggagccccgagagacgccccgggguucuagaa

SEQ ID NO: 186793 - RNA, 32 nt, Human
ggagccccgcgcuuucgugagcccccucgagg

SEQ ID NO: 186794 - RNA, 32 nt, Human
ggagccccggacacacuguggggaggaggagg

SEQ ID NO: 186795 - RNA, 32 nt, Human
ggagccccucaucuuccccagaaggacuucuc

SEQ ID NO: 186796 - RNA, 21 nt, Human
ggagccccucugagaagagga

SEQ ID NO: 186797 - RNA, 32 nt, Human
ggagccccugcuccuucacuuugcagccuccu

SEQ ID NO: 186798 - RNA, 32 nt, Human
ggagccccugggugggugguggggaggggcgc

SEQ ID NO: 186799 - RNA, 32 nt, Human
ggagcccgagagguggagguugcagugagccg

SEQ ID NO: 186800 - RNA, 32 nt, Human
ggagcccgaggagaggagagagcugacuggac

SEQ ID NO: 186801 - RNA, 32 nt, Human
ggagcccgcacucgggcgcggagggagcggcg

SEQ ID NO: 186802 - RNA, 32 nt, Human
ggagcccgcagaggcaggguaaggggagcggg

SEQ ID NO: 186803 - RNA, 32 nt, Human
ggagcccgcccuagggacgcugggcaggucag

SEQ ID NO: 186804 - RNA, 19 nt, Human
ggagcccgcgcaggccgag

SEQ ID NO: 186805 - RNA, 32 nt, Human
ggagcccgcgggaggagauccuguaccaccug

SEQ ID NO: 186806 - RNA, 32 nt, Human
ggagcccgcucaggauggccugggcaggggag

SEQ ID NO: 186807 - RNA, 32 nt, Human
ggagcccggagcucuacucaucauccccauca

SEQ ID NO: 186808 - RNA, 20 nt, Human
ggagcccggcggcucuggga

SEQ ID NO: 186809 - RNA, 21 nt, Human
ggagcccggggggcaaggggu

SEQ ID NO: 186810 - RNA, 32 nt, Human
ggagcccguaaugaaggcccagguuccaguca

SEQ ID NO: 186811 - RNA, 32 nt, Human
ggagcccguagcaacaguguagugagaacagc

SEQ ID NO: 186812 - RNA, 32 nt, Human
ggagcccuaucuuuacaaaaguuuccuacugu

SEQ ID NO: 186813 - RNA, 32 nt, Human
ggagcccucagccauggccucgggcgacaccc

SEQ ID NO: 186814 - RNA, 22 nt, Human
ggagcccuccuggccucacuga

SEQ ID NO: 186815 - RNA, 32 nt, Human
ggagcccuccuuggagcuggagagcaccucag

SEQ ID NO: 186816 - RNA, 24 nt, Human
ggagcccucgacccgcccagcuga

SEQ ID NO: 186817 - RNA, 32 nt, Human
ggagcccucgccgcugccguucuucagccggc

SEQ ID NO: 186818 - RNA, 32 nt, Human
ggagcccucgcggccccuccccggcugcuggc

SEQ ID NO: 186819 - RNA, 24 nt, Human
ggagcccucuggaaagaaaaggac

SEQ ID NO: 186820 - RNA, 28 nt, Human
ggagcccugagggcugccucucugccag

SEQ ID NO: 186821 - RNA, 32 nt, Human
ggagcccugaguggcugagcucaggccuucgc

SEQ ID NO: 186822 - RNA, 18 nt, Human
ggagcccugauccggggg

SEQ ID NO: 186823 - RNA, 20 nt, Human
ggagcccugcacccccggga

SEQ ID NO: 186824 - RNA, 24 nt, Human
ggagcccugcauaaagagaaggac

SEQ ID NO: 186825 - RNA, 32 nt, Human
ggagcccugccugccccugcuccccagcuccu

SEQ ID NO: 186826 - RNA, 32 nt, Human
ggagcccugcgcuuccagcuacuugcagccag

SEQ ID NO: 186827 - RNA, 22 nt, Human
ggagcccugcugcccacaugca

SEQ ID NO: 186828 - RNA, 22 nt, Human
ggagcccuggaaaggagaagga

SEQ ID NO: 186829 - RNA, 32 nt, Human
ggagcccuggaguucuggcgggagggaagcug

SEQ ID NO: 186830 - RNA, 32 nt, Human
ggagcccuggcugaagcaagcagucaguacuu

SEQ ID NO: 186831 - RNA, 32 nt, Human
ggagcccugggaggcuggagccccaggugcag

SEQ ID NO: 186832 - RNA, 32 nt, Human
ggagcccugggcuggggcaggagccgcaaugu

SEQ ID NO: 186833 - RNA, 21 nt, Human
ggagcccuggucacacacaca

SEQ ID NO: 186834 - RNA, 32 nt, Human
ggagcccugguugccaucagccauggcuccca

SEQ ID NO: 186835 - RNA, 32 nt, Human
ggagcccugguuucagcccccucagucugaug

SEQ ID NO: 186836 - RNA, 21 nt, Human
ggagcccuuaagccccagcug

SEQ ID NO: 186837 - RNA, 21 nt, Human
ggagcccuuacucuguucagu

SEQ ID NO: 186838 - RNA, 32 nt, Human
ggagccgaaguuaagguggccugggagccacg

SEQ ID NO: 186839 - RNA, 32 nt, Human
ggagccgagaggaggcggaggagauggcgucc

SEQ ID NO: 186840 - RNA, 32 nt, Human
ggagccgagauggagccacacaugaguuugcu

SEQ ID NO: 186841 - RNA, 32 nt, Human
ggagccgagggugcuuuagagaggugguuuuc

SEQ ID NO: 186842 - RNA, 32 nt, Human
ggagccgauggcugcguauuucauggcaguca

SEQ ID NO: 186843 - RNA, 32 nt, Human
ggagccgauucugcaacccucacuuccuaagc

SEQ ID NO: 186844 - RNA, 31 nt, Human
ggagccgcaaggagccacacagcaggaggug

SEQ ID NO: 186845 - RNA, 32 nt, Human
ggagccgcacacagccacaucuuccuagaccu

SEQ ID NO: 186846 - RNA, 32 nt, Human
ggagccgcagagaggggaagaggcagaaaccg

SEQ ID NO: 186847 - RNA, 32 nt, Human
ggagccgcagaggcccgaggcaccggacgcug

SEQ ID NO: 186848 - RNA, 32 nt, Human
ggagccgcagccgccgccccagcaucacgucc

SEQ ID NO: 186849 - RNA, 32 nt, Human
ggagccgcagcugcaggaguccugcccgccca

SEQ ID NO: 186850 - RNA, 32 nt, Human
ggagccgcaggaggaaggagguugugcagggu

SEQ ID NO: 186851 - RNA, 19 nt, Human
ggagccgcauccacugugg

SEQ ID NO: 186852 - RNA, 32 nt, Human
ggagccgcccuccugagcuugaaaauggaaga

SEQ ID NO: 186853 - RNA, 32 nt, Human
ggagccgccggcagaggucucuccccagccuc

SEQ ID NO: 186854 - RNA, 32 nt, Human
ggagccgcgagccaggauggaggcagagggca

SEQ ID NO: 186855 - RNA, 20 nt, Human
ggagccgcgggaggccggga

SEQ ID NO: 186856 - RNA, 32 nt, Human
ggagccgcucaagccacagcucccaggccccu

SEQ ID NO: 186857 - RNA, 32 nt, Human
ggagccgcucaagucugggagggcaugggagc

SEQ ID NO: 186858 - RNA, 25 nt, Human
ggagccgcugcccccagcgaagucc

SEQ ID NO: 186859 - RNA, 32 nt, Human
ggagccgcugcucuccggcugagggaaucaga

SEQ ID NO: 186860 - RNA, 32 nt, Human
ggagccggaagagagcagugcuucacaauaaa

SEQ ID NO: 186861 - RNA, 32 nt, Human
ggagccggagccgccugggauguucagucaug

SEQ ID NO: 186862 - RNA, 32 nt, Human
ggagccggaggaggaggaggaggaggaggcaa

SEQ ID NO: 186863 - RNA, 32 nt, Human
ggagccggcgcgcaccagccuagcgaucggcc

SEQ ID NO: 186864 - RNA, 32 nt, Human
ggagccggcucacugcacuacccccgcccccu

SEQ ID NO: 186865 - RNA, 19 nt, Human
ggagccgggaggccugcgg

SEQ ID NO: 186866 - RNA, 20 nt, Human
ggagccgggcauucaacuca

SEQ ID NO: 186867 - RNA, 19 nt, Human
ggagccgggccccugggag

SEQ ID NO: 186868 - RNA, 18 nt, Human
ggagccgggcgccugcgg

SEQ ID NO: 186869 - RNA, 32 nt, Human
ggagccgggcuggagaguggggagcacggaga

SEQ ID NO: 186870 - RNA, 32 nt, Human
ggagccgggcuggggguggggaagggaggccg

SEQ ID NO: 186871 - RNA, 32 nt, Human
ggagccgggcuucucuuuuggcccccagcgug

SEQ ID NO: 186872 - RNA, 32 nt, Human
ggagccgggggacugugcuggucugagcccca

SEQ ID NO: 186873 - RNA, 17 nt, Human
ggagccgguggacagcg

SEQ ID NO: 186874 - RNA, 32 nt, Human
ggagccgguugcaggccgagaugcugcagaug

SEQ ID NO: 186875 - RNA, 32 nt, Human
ggagccguacucccagcggccccacaccacga

SEQ ID NO: 186876 - RNA, 21 nt, Human
ggagccgucgugggugccgag

SEQ ID NO: 186877 - RNA, 19 nt, Human
ggagccgugcgccagggca

SEQ ID NO: 186878 - RNA, 32 nt, Human
ggagccguggaggaugcaaagacggcccggcu

SEQ ID NO: 186879 - RNA, 32 nt, Human
ggagccguggggccuggauguggacugugcag

SEQ ID NO: 186880 - RNA, 32 nt, Human
ggaggugcucuugugcacacagcaggucaaag

SEQ ID NO: 186881 - RNA, 32 nt, Human
ggaggugcugaggaguuggugguagcagcaga

SEQ ID NO: 186882 - RNA, 32 nt, Human
ggaggugcugguagcugaggggacgggcaagu

SEQ ID NO: 186883 - RNA, 32 nt, Human
ggaggugcuuccugcaccucaggaugggcgag

SEQ ID NO: 186884 - RNA, 32 nt, Human
ggagguggacgucugggcugggcgccggacaa

SEQ ID NO: 186885 - RNA, 32 nt, Human
ggagguggacguugcagugaucccagauugug

SEQ ID NO: 186886 - RNA, 24 nt, Human
ggagguggagcagaagaucgcggg

SEQ ID NO: 186887 - RNA, 24 nt, Human
ggagguggagcccagagcccaagg

SEQ ID NO: 186888 - RNA, 32 nt, Human
ggagguggagcccagagcccaaggaagagcug

SEQ ID NO: 186889 - RNA, 32 nt, Human
ggagguggagcuugcagugagcggagaucgcg

SEQ ID NO: 186890 - RNA, 32 nt, Human
ggagguggagcuuguagugaggcgagauggcg

SEQ ID NO: 186891 - RNA, 21 nt, Human
ggagguggaggaggaggaaga

SEQ ID NO: 186892 - RNA, 32 nt, Human
ggagguggaggaggaggaagaggagaaggaaa

SEQ ID NO: 186893 - RNA, 32 nt, Human
ggagguggaggaggaggaggaggaggaggagg

SEQ ID NO: 186894 - RNA, 32 nt, Human
ggagguggaggcagagauuacugugggccaag

SEQ ID NO: 186895 - RNA, 32 nt, Human
ggagguggaggcagugagcugagaucgugcca

SEQ ID NO: 186896 - RNA, 32 nt, Human
ggagguggagggaggaaggugggaauuauuau

SEQ ID NO: 186897 - RNA, 32 nt, Human
ggagguggaggggaggcugcagugagcugaga

SEQ ID NO: 186898 - RNA, 32 nt, Human
ggagguggagggugccuguaaucccagcuccu

SEQ ID NO: 186899 - RNA, 32 nt, Human
ggagguggagguaggaagauugcuugaggcca

SEQ ID NO: 186900 - RNA, 32 nt, Human
ggagguggagguggagguugcagugagccgag

SEQ ID NO: 186901 - RNA, 20 nt, Human
ggagguggagguugcaguga

SEQ ID NO: 186902 - RNA, 21 nt, Human
ggagguggagguugcagugag

SEQ ID NO: 186903 - RNA, 32 nt, Human
ggagguggagguugcagugaggugagaucgug

SEQ ID NO: 186904 - RNA, 23 nt, Human
ggagguggaguggcaccugcugg

SEQ ID NO: 186905 - RNA, 24 nt, Human
ggagguggaguucuuccaugcagg

SEQ ID NO: 186906 - RNA, 32 nt, Human
ggagguggauagacggggcagcugcaggcucc

SEQ ID NO: 186907 - RNA, 32 nt, Human
ggagguggauggaucacuugaggccaggaguu

SEQ ID NO: 186908 - RNA, 32 nt, Human
ggagguggcagccucuaccuuccuggacaggg

SEQ ID NO: 186909 - RNA, 19 nt, Human
ggagguggccagcccgcag

SEQ ID NO: 186910 - RNA, 19 nt, Human
ggagguggccagcuccagg

SEQ ID NO: 186911 - RNA, 18 nt, Human
ggagguggccaggccugc

SEQ ID NO: 186912 - RNA, 32 nt, Human
ggagguggcccagccacuucugcagaguuccu

SEQ ID NO: 186913 - RNA, 32 nt, Human
ggagguggcccagguggucaaguucacagaag

SEQ ID NO: 186914 - RNA, 20 nt, Human
ggagguggcggccucugggg

SEQ ID NO: 186915 - RNA, 22 nt, Human
ggagguggcggcggcugggaga

SEQ ID NO: 186916 - RNA, 21 nt, Human
ggagguggcgggaggacggcu

SEQ ID NO: 186917 - RNA, 32 nt, Human
ggagguggcgguugcagugagcacagaucaug

SEQ ID NO: 186918 - RNA, 18 nt, Human
ggagguggcucuggcuca

SEQ ID NO: 186919 - RNA, 32 nt, Human
ggagguggcugcagagagccacuugucccacg

SEQ ID NO: 186920 - RNA, 24 nt, Human
ggaggugggacaacacuugcaugg

SEQ ID NO: 186921 - RNA, 23 nt, Human
ggaggugggacaggggcaagagg

SEQ ID NO: 186922 - RNA, 32 nt, Human
ggaggugggagaaucacuugagcccaggaguu

SEQ ID NO: 186923 - RNA, 32 nt, Human
ggaggugggagaugcagccaggaggaacagcu

SEQ ID NO: 186924 - RNA, 32 nt, Human
ggaggugggaggagggagugacgagucaagga

SEQ ID NO: 186925 - RNA, 32 nt, Human
ggaggugggaggauugcccgaguccaggaauu

SEQ ID NO: 186926 - RNA, 32 nt, Human
ggaggugggaggggguugagggcugaguaugc

SEQ ID NO: 186927 - RNA, 32 nt, Human
ggaggugggaggugggagaggaagguggagua

SEQ ID NO: 186928 - RNA, 21 nt, Human
ggaggugggaguggcugcagg

SEQ ID NO: 186929 - RNA, 32 nt, Human
ggaggugggagugggcuggaggccucuggaga

SEQ ID NO: 186930 - RNA, 32 nt, Human
ggaggugggauuuugccauguuggccaggcug

SEQ ID NO: 186931 - RNA, 32 nt, Human
ggaggugggcagcucagacuccacaugcuggu

SEQ ID NO: 186932 - RNA, 32 nt, Human
ggaggugggcagggaaggggagggcugugcgu

SEQ ID NO: 186933 - RNA, 32 nt, Human
ggaggugggcagggcugcuccaggcaggucag

SEQ ID NO: 186934 - RNA, 32 nt, Human
ggaggugggcagguagcugauaggggcagcca

SEQ ID NO: 186935 - RNA, 24 nt, Human
ggaggugggcccagaaaggggcuu

SEQ ID NO: 186936 - RNA, 27 nt, Human
ggaggugggcccagaaaggggcuuccc

SEQ ID NO: 186937 - RNA, 18 nt, Human
ggaggugggccugcccca

SEQ ID NO: 186938 - RNA, 32 nt, Human
ggaggugggcggaucacuugagcccaggaauu

SEQ ID NO: 186939 - RNA, 25 nt, Human
ggaggugggcuggcgcggagggagg

SEQ ID NO: 186940 - RNA, 32 nt, Human
ggaggugggcugggcccucgcuccugacuguu

SEQ ID NO: 186941 - RNA, 32 nt, Human
ggaggugggcugggcccucucuucucaccuuu

SEQ ID NO: 186942 - RNA, 32 nt, Human
ggagguggggauccgagugcagugagagccuc

SEQ ID NO: 186943 - RNA, 21 nt, Human
ggagguggggcaggaggaugu

SEQ ID NO: 186944 - RNA, 18 nt, Human
ggagguggggcaggggga

SEQ ID NO: 186945 - RNA, 22 nt, Human
ggagguggggcauggcacagca

SEQ ID NO: 186946 - RNA, 32 nt, Human
ggagguggggcguuugggggugugcggugggg

SEQ ID NO: 186947 - RNA, 32 nt, Human
ggagguggggcucugcagcugugagauggccc

SEQ ID NO: 186948 - RNA, 32 nt, Human
ggaggugggggaaugugguaacauugaauaca

SEQ ID NO: 186949 - RNA, 20 nt, Human
ggaggugggggaccgcugca

SEQ ID NO: 186950 - RNA, 32 nt, Human
ggagguggggguagggggcacagaacaccaga

SEQ ID NO: 186951 - RNA, 31 nt, Human
ggaggugggguggaaauagggugggcuccuu

SEQ ID NO: 186952 - RNA, 32 nt, Human
ggaggugggguuuugccauguugcccaggugg

SEQ ID NO: 186953 - RNA, 32 nt, Human
ggagguggguauugugugugugggaagguggg

SEQ ID NO: 186954 - RNA, 17 nt, Human
ggagguggguccuggga

SEQ ID NO: 186955 - RNA, 32 nt, Human
ggaggugggugagacagaggguggggaggaua

SEQ ID NO: 186956 - RNA, 23 nt, Human
ggagguggguggaggcaugcagg

SEQ ID NO: 186957 - RNA, 32 nt, Human
ggagguggucuuaggcaguguggacccuccau

SEQ ID NO: 186958 - RNA, 32 nt, Human
ggagguggugacauuggaacagugcauacagc

SEQ ID NO: 186959 - RNA, 27 nt, Human
ggagguggugaggaagaggaagggagg

SEQ ID NO: 186960 - RNA, 32 nt, Human
ggagguggugaguuggcuacaagagaaaggga

SEQ ID NO: 186961 - RNA, 32 nt, Human
ggagguggugcucucagccauuguagaagaug

SEQ ID NO: 186962 - RNA, 32 nt, Human
ggagguggugcugcuggacugagccaguggag

SEQ ID NO: 186963 - RNA, 32 nt, Human
ggaggugguggaggaggaggaggaggaggaag

SEQ ID NO: 186964 - RNA, 32 nt, Human
ggaggugguggaggaggaguuggugggggaag

SEQ ID NO: 186965 - RNA, 19 nt, Human
ggaggugguggcggcggga

SEQ ID NO: 186966 - RNA, 22 nt, Human
ggaggugguggcugggcugcag

SEQ ID NO: 186967 - RNA, 26 nt, Human
ggagguggugggagggagaaggaagg

SEQ ID NO: 186968 - RNA, 32 nt, Human
ggaggugguggggaaaauggucaguaggacag

SEQ ID NO: 186969 - RNA, 20 nt, Human
ggagguggugguauugggau

SEQ ID NO: 186970 - RNA, 21 nt, Human
ggaggugguguuggcugcagg

SEQ ID NO: 186971 - RNA, 32 nt, Human
ggaggugguuucgguugcggcagucgcguccc

SEQ ID NO: 186972 - RNA, 18 nt, Human
ggaggugucucuggcuca

SEQ ID NO: 186973 - RNA, 16 nt, Human
ggaggugucucugggg

SEQ ID NO: 186974 - RNA, 32 nt, Human
ggaggugugcaggggguggggagcagcccagc

SEQ ID NO: 186975 - RNA, 32 nt, Human
ggaggugugcuaaggcugcccuccacacccgc

SEQ ID NO: 186976 - RNA, 32 nt, Human
ggagguguggcaaggaucuuaucagaaggcuu

SEQ ID NO: 186977 - RNA, 21 nt, Human
ggaggugugggguaagggagg

SEQ ID NO: 186978 - RNA, 32 nt, Human
ggagguguugagugagcaacacgcagaagcuc

SEQ ID NO: 186979 - RNA, 32 nt, Human
ggagguguugcggcagagguuugagugaaccc

SEQ ID NO: 186980 - RNA, 32 nt, Human
ggagguguugggggacacuccuccccuccccc

SEQ ID NO: 186981 - RNA, 32 nt, Human
ggagguuaaauacugaccuaaguucacuuagc

SEQ ID NO: 186982 - RNA, 32 nt, Human
ggagguuaaggugggaggauugcuugggcccu

SEQ ID NO: 186983 - RNA, 32 nt, Human
ggagguuaagucuacauuuccaccacugagca

SEQ ID NO: 186984 - RNA, 32 nt, Human
ggagguucacuuaaggucaggaauucuagacc

SEQ ID NO: 186985 - RNA, 32 nt, Human
ggagguucagccccuucucugggaugugguuc

SEQ ID NO: 186986 - RNA, 32 nt, Human
ggagguuccaacaaucuccagaaccuuuggcc

SEQ ID NO: 186987 - RNA, 32 nt, Human
ggagguucuacaacaggaaaucaggccuacag

SEQ ID NO: 186988 - RNA, 32 nt, Human
ggagguucucugcccaccucaggcacuggaaa

SEQ ID NO: 186989 - RNA, 32 nt, Human
ggagguugaaaacuaagcauggggaagagcug

SEQ ID NO: 186990 - RNA, 32 nt, Human
ggagguugacuugccucucgggccccguaggu

SEQ ID NO: 186991 - RNA, 24 nt, Human
ggagguugagcaggaggauugcuu

SEQ ID NO: 186992 - RNA, 32 nt, Human
ggagguugaggcagaagaaucgcuugaaccca

SEQ ID NO: 186993 - RNA, 32 nt, Human
ggagguugaggcagaaggauugcuggagccca

SEQ ID NO: 186994 - RNA, 25 nt, Human
ggagguugaggcagaaggauugcuu

SEQ ID NO: 186995 - RNA, 32 nt, Human
ggagguugaggcagcagaauugcuugaaccca

SEQ ID NO: 186996 - RNA, 32 nt, Human
ggagguugaggcagcaggauugcuggagccca

SEQ ID NO: 186997 - RNA, 22 nt, Human
ggagguugaggcaggagaauca

SEQ ID NO: 186998 - RNA, 32 nt, Human
ggagguugaggcaggagaaucgcuugaacccg

SEQ ID NO: 186999 - RNA, 32 nt, Human
ggagguugaggcaggagaaucgcuugaaccug

SEQ ID NO: 187000 - RNA, 32 nt, Human
ggagguugaggcaggagaauggggugaacccg

SEQ ID NO: 187001 - RNA, 32 nt, Human
ggagguugaggcaggagaauugcuugaaccca

SEQ ID NO: 187002 - RNA, 32 nt, Human
ggagguugaggcaggaggaucgcuugagccca

SEQ ID NO: 187003 - RNA, 32 nt, Human
ggagguugaggcaggaggauugcuugaggcca

SEQ ID NO: 187004 - RNA, 24 nt, Human
ggagguugaggcgggagaacugcu

SEQ ID NO: 187005 - RNA, 32 nt, Human
ggagguugagguaggagaauugcuugaaccug

SEQ ID NO: 187006 - RNA, 32 nt, Human
ggagguugagguaggaggaucgcuugaaccca

SEQ ID NO: 187007 - RNA, 32 nt, Human
ggagguugagguagguagauugcuugagccca

SEQ ID NO: 187008 - RNA, 25 nt, Human
ggagguugaggugggaagauugcuu

SEQ ID NO: 187009 - RNA, 32 nt, Human
ggagguugaggugggaagauugcuugagccca

SEQ ID NO: 187010 - RNA, 25 nt, Human
ggagguugaggugggaggaucacuu

SEQ ID NO: 187011 - RNA, 25 nt, Human
ggagguugaggugggaggaucgcuu

SEQ ID NO: 187012 - RNA, 32 nt, Human
ggagguugaggugggaggaucgcuugagccca

SEQ ID NO: 187013 - RNA, 32 nt, Human
ggagguugaggugggaggauuugcuugaaccc

SEQ ID NO: 187014 - RNA, 32 nt, Human
ggagguugagguggguggaucaugaggucagg

SEQ ID NO: 187015 - RNA, 32 nt, Human
ggagguugagucacgagaauugcuugaaccug

SEQ ID NO: 187016 - RNA, 32 nt, Human
ggagguugcaaccacaaaauucagagagguga

SEQ ID NO: 187017 - RNA, 32 nt, Human
ggagguugcacugagcugagaccauggaauug

SEQ ID NO: 187018 - RNA, 32 nt, Human
ggagguugcaguaagccaagaucgugccauug

SEQ ID NO: 187019 - RNA, 32 nt, Human
ggagguugcagugagccgagaucaugucacug

SEQ ID NO: 187020 - RNA, 32 nt, Human
ggagguugcauucaacugagaucauaccacuu

SEQ ID NO: 187021 - RNA, 32 nt, Human
ggagguugcggugacccuccagcuugggcaac

SEQ ID NO: 187022 - RNA, 30 nt, Human
ggagguugcuugaaaucagaaaauacagac

SEQ ID NO: 187023 - RNA, 32 nt, Human
ggagguuggaaaugcuccaguggagaugggaa

SEQ ID NO: 187024 - RNA, 32 nt, Human
ggagguuggaaguccgagaucaaggugccgac

SEQ ID NO: 187025 - RNA, 32 nt, Human
ggagguuggagagagaaagggugaaagcagag

SEQ ID NO: 187026 - RNA, 25 nt, Human
ggagguuggcccagagcccugcagg

SEQ ID NO: 187027 - RNA, 32 nt, Human
ggagguugggugggccggcuucaugccagcua

SEQ ID NO: 187028 - RNA, 32 nt, Human
ggagguuguaccacugcacuccagccuggcug

SEQ ID NO: 187029 - RNA, 32 nt, Human
ggagguugucugggacagacugcuccugacag

SEQ ID NO: 187030 - RNA, 32 nt, Human
ggagguuguggcggagguuguggugagcugag

SEQ ID NO: 187031 - RNA, 32 nt, Human
ggagguugugggcauugauggggaaggaggcu

SEQ ID NO: 187032 - RNA, 32 nt, Human
ggagguuuaggcaggagaaucgcuugaacccu

SEQ ID NO: 187033 - RNA, 32 nt, Human
ggagguuuccacaccccuccccugggccgcug

SEQ ID NO: 187034 - RNA, 21 nt, Human
ggagguuuccgggaggcugcu

SEQ ID NO: 187035 - RNA, 32 nt, Human
ggagguuucuauaaugccacauagaaagaggc

SEQ ID NO: 187036 - RNA, 32 nt, Human
ggagguuucugaggcugacagaaacaagcauu

SEQ ID NO: 187037 - RNA, 32 nt, Human
ggagguuuggggaguucagaccuccaaaccuu

SEQ ID NO: 187038 - RNA, 32 nt, Human
ggagguuuguaggaguccucggacgugggaua

SEQ ID NO: 187039 - RNA, 21 nt, Human
ggagguuuucuuuguuccaua

SEQ ID NO: 187040 - RNA, 32 nt, Human
ggagguuuuuaacagaacguguauuuauuaau

SEQ ID NO: 187041 - RNA, 32 nt, Human
ggaguaaagcucaggaggugagugagucucuu

SEQ ID NO: 187042 - RNA, 32 nt, Human
ggaguaaauagaauugagacugcaaaggaaga

SEQ ID NO: 187043 - RNA, 32 nt, Human
ggaguaacacuaaagcuacaagaaauauguaa

SEQ ID NO: 187044 - RNA, 19 nt, Human
ggaguaacaggcucagaga

SEQ ID NO: 187045 - RNA, 32 nt, Human
ggaguaacaggugucuggaggcugaagggugg

SEQ ID NO: 187046 - RNA, 32 nt, Human
ggaguaaccaaagagaguauggaccagaguga

SEQ ID NO: 187047 - RNA, 32 nt, Human
ggaguaagaaaagaugguuagugauauuugga

SEQ ID NO: 187048 - RNA, 32 nt, Human
ggaguaagaagaggauuaaaaaggaaaggcaa

SEQ ID NO: 187049 - RNA, 32 nt, Human
ggaguaagagugagaaagaguaagauuaauag

SEQ ID NO: 187050 - RNA, 21 nt, Human
ggaguaagcguuguugcugaa

SEQ ID NO: 187051 - RNA, 32 nt, Human
ggaguaaggcuggacuccaauggcccauuccc

SEQ ID NO: 187052 - RNA, 32 nt, Human
ggaguaagugaaaaccugccuuuugccacucu

SEQ ID NO: 187053 - RNA, 32 nt, Human
ggaguaaugagcuccugguuccucgggagucc

SEQ ID NO: 187054 - RNA, 32 nt, Human
ggaguaauucagcauuaaaauaaauguaauua

SEQ ID NO: 187055 - RNA, 32 nt, Human
ggaguacaaauccugcucuggucucuggcccc

SEQ ID NO: 187056 - RNA, 32 nt, Human
ggaguacaauggugcgaucuuugcucacugca

SEQ ID NO: 187057 - RNA, 32 nt, Human
ggaguacacagcaguguccuucugcuaaugac

SEQ ID NO: 187058 - RNA, 32 nt, Human
ggaguacaccaggcucagcuguggaccccuca

SEQ ID NO: 187059 - RNA, 32 nt, Human
ggaguacaccuugagcgcuugugugcaguuau

SEQ ID NO: 187060 - RNA, 32 nt, Human
ggaguacacugagguucuagaggcaacagggu

SEQ ID NO: 187061 - RNA, 32 nt, Human
ggaguacagaugcacaccaccacacccagccu

SEQ ID NO: 187062 - RNA, 32 nt, Human
ggaguacaggugcacaccaccaugccuggcua

SEQ ID NO: 187063 - RNA, 32 nt, Human
ggaguacaguagugcaaucacagcugacugca

SEQ ID NO: 187064 - RNA, 32 nt, Human
ggaguaccucaagggccccggccuggguggcg

SEQ ID NO: 187065 - RNA, 32 nt, Human
ggaguaccugcucuguuuuuggcugugagacu

SEQ ID NO: 187066 - RNA, 32 nt, Human
ggaguacggacgggagucagaggcagagcgag

SEQ ID NO: 187067 - RNA, 23 nt, Human
ggaguacggagcagguggaccau

SEQ ID NO: 187068 - RNA, 32 nt, Human
ggaguagaauaccaaaugauagaaacagacug

SEQ ID NO: 187069 - RNA, 32 nt, Human
ggaguagaauuugaugcaaagcagaaagaaau

SEQ ID NO: 187070 - RNA, 32 nt, Human
ggaguagaccauggccuccagcccauggggcu

SEQ ID NO: 187071 - RNA, 32 nt, Human
ggaguagagaaagaaagagcaagagcaggcag

SEQ ID NO: 187072 - RNA, 32 nt, Human
ggaguagagagaucugaccucuugccaggaau

SEQ ID NO: 187073 - RNA, 23 nt, Human
ggaguagcccagcgaaggcacuu

SEQ ID NO: 187074 - RNA, 32 nt, Human
ggaguagcuguggacagaggaaccaacaucug

SEQ ID NO: 187075 - RNA, 32 nt, Human
ggaguaggaagaucaggagcuagagggagacu

SEQ ID NO: 187076 - RNA, 32 nt, Human
ggaguaggaauagaagugcaagcuggaaaggc

SEQ ID NO: 187077 - RNA, 32 nt, Human
ggaguaggagaaauccaccugcugggggcuga

SEQ ID NO: 187078 - RNA, 18 nt, Human
ggaguaggaggaggcagg

SEQ ID NO: 187079 - RNA, 18 nt, Human
ggaguaggcagguggauc

SEQ ID NO: 187080 - RNA, 22 nt, Human
ggaguaggcggcagugaguuuc

SEQ ID NO: 187081 - RNA, 32 nt, Human
ggaguaggcggcagugaguuucccugggaggg

SEQ ID NO: 187082 - RNA, 32 nt, Human
ggaguaggcugugggagccgggagccaacagc

SEQ ID NO: 187083 - RNA, 21 nt, Human
ggaguagggcggagcgggcgg

SEQ ID NO: 187084 - RNA, 32 nt, Human
ggaguagggcgggaaggggcagugaggagccg

SEQ ID NO: 187085 - RNA, 32 nt, Human
ggaguagggcuggggacccuagggccgcucca

SEQ ID NO: 187086 - RNA, 32 nt, Human
ggaguagggggaagaaaggagucagggacaga

SEQ ID NO: 187087 - RNA, 32 nt, Human
ggaguagggguggagucaccaaaaccagugcu

SEQ ID NO: 187088 - RNA, 32 nt, Human
ggaguagguccucugaaaaggcagcagguucc

SEQ ID NO: 187089 - RNA, 21 nt, Human
ggaguagugaccugcagugug

SEQ ID NO: 187090 - RNA, 22 nt, Human
ggaguaguggcucacaccugua

SEQ ID NO: 187091 - RNA, 32 nt, Human
ggaguauaagggggagcuagccuccuaugaua

SEQ ID NO: 187092 - RNA, 32 nt, Human
ggaguauacagaugguaagaaauuccacuuug

SEQ ID NO: 187093 - RNA, 32 nt, Human
ggaguauacuuccugaagauggagccucagga

SEQ ID NO: 187094 - RNA, 32 nt, Human
ggaguaucaguucugagccacagaugaggaaa

SEQ ID NO: 187095 - RNA, 32 nt, Human
ggaguaucauuugagccaggagguugagguug

SEQ ID NO: 187096 - RNA, 32 nt, Human
ggaguaugacaccuucggcuccaaguuccacc

SEQ ID NO: 187097 - RNA, 32 nt, Human
ggaguaugcuggaggcagagggcaagggaggg

SEQ ID NO: 187098 - RNA, 32 nt, Human
ggaguaugguaccaagcagguaggacuguuca

SEQ ID NO: 187099 - RNA, 30 nt, Human
ggaguauggucuggcgggugcccccuuucu

SEQ ID NO: 187100 - RNA, 32 nt, Human
ggaguauguauucacacacauacauauacccc

SEQ ID NO: 187101 - RNA, 32 nt, Human
ggaguauuuccacaacccaaguuuagaguugg

SEQ ID NO: 187102 - RNA, 32 nt, Human
ggaguauuuccccucauucuaccucucuaagg

SEQ ID NO: 187103 - RNA, 32 nt, Human
ggagucaaagaaacugagccuggggcaaacga

SEQ ID NO: 187104 - RNA, 32 nt, Human
ggagucaaagagaggccugcuuuucuaccaga

SEQ ID NO: 187105 - RNA, 25 nt, Human
ggagucaagcgauucuccugccuca

SEQ ID NO: 187106 - RNA, 32 nt, Human
ggagucacagccgcagccagagccgcagccaa

SEQ ID NO: 187107 - RNA, 32 nt, Human
ggagucacaggccccacccaggaagggcauuc

SEQ ID NO: 187108 - RNA, 32 nt, Human
ggagucacaguaaacagaaacccaaaaaucuc

SEQ ID NO: 187109 - RNA, 32 nt, Human
ggagucacugaugcugccucugccuucugaug

SEQ ID NO: 187110 - RNA, 32 nt, Human
ggagucacugcaaggcccccagggugggaugg

SEQ ID NO: 187111 - RNA, 32 nt, Human
ggagucacuuugggcuuccugucccaacuugu

SEQ ID NO: 187112 - RNA, 32 nt, Human
ggagucacuuuuguauucuuuuuaaccagauu

SEQ ID NO: 187113 - RNA, 32 nt, Human
ggagucagaggugacuggcggcuuccaggcug

SEQ ID NO: 187114 - RNA, 32 nt, Human
ggagucagaggugccuccaggagcagcaggag

SEQ ID NO: 187115 - RNA, 32 nt, Human
ggagucagccugaagacacaggguggauuauu

SEQ ID NO: 187116 - RNA, 32 nt, Human
ggagucagcuggaacauaccacugccucuaga

SEQ ID NO: 187117 - RNA, 32 nt, Human
ggagucaggaccuccggggagagcagaggguu

SEQ ID NO: 187118 - RNA, 32 nt, Human
ggagucaggagaaucacuugagcucaggaguu

SEQ ID NO: 187119 - RNA, 32 nt, Human
ggagucaggaggugggaggccgugggcuuugg

SEQ ID NO: 187120 - RNA, 32 nt, Human
ggagucaggcgcagccucacaccagcugccuc

SEQ ID NO: 187121 - RNA, 32 nt, Human
ggagucagguccaaacagucccuaucgccacu

SEQ ID NO: 187122 - RNA, 32 nt, Human
ggagucagugaugcagagaaccucaggagaug

SEQ ID NO: 187123 - RNA, 32 nt, Human
ggagucaguuugcaguaugcuccacgugguaa

SEQ ID NO: 187124 - RNA, 32 nt, Human
ggagucaucagcagguuuaauuuuggaggaac

SEQ ID NO: 187125 - RNA, 32 nt, Human
ggagucaucaggagaggagaaugaggaugagg

SEQ ID NO: 187126 - RNA, 22 nt, Human
ggagucaugccacuccccacug

SEQ ID NO: 187127 - RNA, 32 nt, Human
ggagucauggucaggggugagaccugaaggac

SEQ ID NO: 187128 - RNA, 32 nt, Human
ggagucaugucccucacauccuuuguacaaau

SEQ ID NO: 187129 - RNA, 32 nt, Human
ggagucauguccuaugucugccugaacgcguc

SEQ ID NO: 187130 - RNA, 32 nt, Human
ggagucaugugacccacacaauggcugagugg

SEQ ID NO: 187131 - RNA, 32 nt, Human
ggagucauuccaagacuccuguccucacucag

SEQ ID NO: 187132 - RNA, 32 nt, Human
ggagucauugcugccaucauuaucauccccuc

SEQ ID NO: 187133 - RNA, 32 nt, Human
ggaguccaagcccccaggcuacagagaggagc

SEQ ID NO: 187134 - RNA, 32 nt, Human
ggaguccaaggcaggaggauugcuugagccca

SEQ ID NO: 187135 - RNA, 32 nt, Human
ggaguccaccaaccuagccacagggaccccag

SEQ ID NO: 187136 - RNA, 32 nt, Human
ggaguccaccugcugagcaggaccggguguga

SEQ ID NO: 187137 - RNA, 32 nt, Human
ggaguccacugagguucuugcauccugaagca

SEQ ID NO: 187138 - RNA, 31 nt, Human
ggaguccagagaggcaggaggauggagcucg

SEQ ID NO: 187139 - RNA, 32 nt, Human
ggaguccaggcuucucugaaaccagggcugag

SEQ ID NO: 187140 - RNA, 32 nt, Human
ggaguccagggagggagcugaggagcccuuac

SEQ ID NO: 187141 - RNA, 32 nt, Human
ggaguccagggugggaguauugcuugagguaa

SEQ ID NO: 187142 - RNA, 32 nt, Human
ggaguccauuauuugaguuugacauuuaauaa

SEQ ID NO: 187143 - RNA, 31 nt, Human
ggagucccacaauagaauacccaacaaagug

SEQ ID NO: 187144 - RNA, 32 nt, Human
ggagucccagaagagggcgagaucaaagcgcu

SEQ ID NO: 187145 - RNA, 32 nt, Human
ggaguccccaggagcugggagaggcaggaagg

SEQ ID NO: 187146 - RNA, 20 nt, Human
ggaguccccgggggacugcu

SEQ ID NO: 187147 - RNA, 32 nt, Human
ggaguccccugaguccuuugacuuaguacuga

SEQ ID NO: 187148 - RNA, 32 nt, Human
ggaguccccugccucuaugguguuuaaggcuc

SEQ ID NO: 187149 - RNA, 32 nt, Human
ggaguccccugggcucccucaggcucugguau

SEQ ID NO: 187150 - RNA, 32 nt, Human
ggagucccuguucaaaacccgggagaaggagu

SEQ ID NO: 187151 - RNA, 32 nt, Human
ggagucccuuaaauacaguugcuucucaagaa

SEQ ID NO: 187152 - RNA, 32 nt, Human
ggagucccuuuugaugggaagugcagucagca

SEQ ID NO: 187153 - RNA, 32 nt, Human
ggaguccgaggcagguggauugcuugaggcca

SEQ ID NO: 187154 - RNA, 32 nt, Human
ggaguccgaggugggaggauugcuugagacca

SEQ ID NO: 187155 - RNA, 32 nt, Human
ggaguccgcagugagauucugggucucaguac

SEQ ID NO: 187156 - RNA, 32 nt, Human
ggaguccuacagccugcagccccuaccagaga

SEQ ID NO: 187157 - RNA, 32 nt, Human
ggaguccuccuguguugcccaggcugguauuc

SEQ ID NO: 187158 - RNA, 32 nt, Human
ggaguccugaacaucuggggacagcgggaaaa

SEQ ID NO: 187159 - RNA, 32 nt, Human
ggaguccugaaggagggccugaugucuucauc

SEQ ID NO: 187160 - RNA, 32 nt, Human
ggaguccugagaugcagucaugggaacccgca

SEQ ID NO: 187161 - RNA, 32 nt, Human
ggaguccuggccccugaaucaccagagccacc

SEQ ID NO: 187162 - RNA, 32 nt, Human
ggaguccuguucucugagcuccacagaagaca

SEQ ID NO: 187163 - RNA, 32 nt, Human
ggaguccuguugggugaaugaggcagauggga

SEQ ID NO: 187164 - RNA, 32 nt, Human
ggaguccuugcccaggcuggagugcaguggcg

SEQ ID NO: 187165 - RNA, 32 nt, Human
ggagucgagccgcggccgggagccgggcgggc

SEQ ID NO: 187166 - RNA, 32 nt, Human
ggagucgcgugucagggcuggagggagaucuu

SEQ ID NO: 187167 - RNA, 32 nt, Human
ggagucgcuccaggaggggcuggagugguagc

SEQ ID NO: 187168 - RNA, 32 nt, Human
ggagucggaggaagaggagggaggagggaggc

SEQ ID NO: 187169 - RNA, 32 nt, Human
ggagucggagggaggaagugaggaagggucaa

SEQ ID NO: 187170 - RNA, 32 nt, Human
ggagucggaucuagccauggcuggcagagguu

SEQ ID NO: 187171 - RNA, 32 nt, Human
ggagucggauucccuccugccugcacgccuuc

SEQ ID NO: 187172 - RNA, 32 nt, Human
ggagucggcugcagcagagggcaggagcccca

SEQ ID NO: 187173 - RNA, 23 nt, Human
ggagucgggcagggaccugcagg

SEQ ID NO: 187174 - RNA, 32 nt, Human
ggagucgggccgcugagcccacggcagcggcc

SEQ ID NO: 187175 - RNA, 32 nt, Human
ggagucgggcggagcggcuggggaugagcgcg

SEQ ID NO: 187176 - RNA, 18 nt, Human
ggagucggggagccggga

SEQ ID NO: 187177 - RNA, 32 nt, Human
ggagucggggaucucccuccccuagccaaggg

SEQ ID NO: 187178 - RNA, 32 nt, Human
ggagucgggugaggaaaaugacccugcuggag

SEQ ID NO: 187179 - RNA, 32 nt, Human
ggagucguguaugguaggguaagugagagagg

SEQ ID NO: 187180 - RNA, 19 nt, Human
ggagucgugucgugccuga

SEQ ID NO: 187181 - RNA, 32 nt, Human
ggagucuaaagaagagaaagaaaaucaagaug

SEQ ID NO: 187182 - RNA, 19 nt, Human
ggagucuauagucuuggga

SEQ ID NO: 187183 - RNA, 32 nt, Human
ggagucuaucagacgugggcugaauuuugcug

SEQ ID NO: 187184 - RNA, 32 nt, Human
ggagucuauuuaugaagucuccagaccuuggg

SEQ ID NO: 187185 - RNA, 32 nt, Human
ggagucucaaagcuggagaguuuaccaacaaa

SEQ ID NO: 187186 - RNA, 32 nt, Human
ggagucucacuccauugcccaggcuggaguac

SEQ ID NO: 187187 - RNA, 32 nt, Human
ggagucucacucuggugcccaggcuggagugg

SEQ ID NO: 187188 - RNA, 32 nt, Human
ggagucucacucuguaacccaggcuggagugc

SEQ ID NO: 187189 - RNA, 32 nt, Human
ggagucucacucugucaccagacuggagugca

SEQ ID NO: 187190 - RNA, 32 nt, Human
ggagucucacucuguuacccaggcuggaaugc

SEQ ID NO: 187191 - RNA, 32 nt, Human
ggagucucacucuugucaccuaggcaagagug

SEQ ID NO: 187192 - RNA, 32 nt, Human
ggagucucacugggcgacagagccagauucug

SEQ ID NO: 187193 - RNA, 32 nt, Human
ggagucucacuuuguaacccaggcuggaaugc

SEQ ID NO: 187194 - RNA, 32 nt, Human
ggagucucagcuucacccugaggugagcauca

SEQ ID NO: 187195 - RNA, 32 nt, Human
ggagucucaggcaggagaauugcuugaaucca

SEQ ID NO: 187196 - RNA, 32 nt, Human
ggagucucaguggauguuugacuuuugcuuuc

SEQ ID NO: 187197 - RNA, 32 nt, Human
ggagucucccuauguugcccaggcuggucucc

SEQ ID NO: 187198 - RNA, 32 nt, Human
ggagucucccucugucguccaggcuggagugc

SEQ ID NO: 187199 - RNA, 32 nt, Human
ggagucucccucuguugcccaggcuggagugc

SEQ ID NO: 187200 - RNA, 32 nt, Human
ggagucucccuuggaauucauccugcuccuuc

SEQ ID NO: 187201 - RNA, 32 nt, Human
ggagucuccuucugucgcccaggcuggagugc

SEQ ID NO: 187202 - RNA, 32 nt, Human
ggagucucgagguugaaccacagaucuggacg

SEQ ID NO: 187203 - RNA, 32 nt, Human
ggagucucgauuucaagggagcuccuggaguu

SEQ ID NO: 187204 - RNA, 32 nt, Human
ggagucucgcucagcugcccaggcuggagugu

SEQ ID NO: 187205 - RNA, 32 nt, Human
ggagucucgcuccgucacccaggcuggagugc

SEQ ID NO: 187206 - RNA, 32 nt, Human
ggagucucgcucucuggagugcaauggcgcaa

SEQ ID NO: 187207 - RNA, 32 nt, Human
ggagucucgcuguguuguccaggcuggagugc

SEQ ID NO: 187208 - RNA, 32 nt, Human
ggagucucuagcaugcagcccaggccuucucc

SEQ ID NO: 187209 - RNA, 32 nt, Human
ggagucucucugcacuccagccugggugacag

SEQ ID NO: 187210 - RNA, 32 nt, Human
ggagucucuuccuauguggucuucucuacccc

SEQ ID NO: 187211 - RNA, 32 nt, Human
ggagucucuuugugguucugauuugcaucucu

SEQ ID NO: 187212 - RNA, 32 nt, Human
ggagucugagccggugguugcagcggaggcgg

SEQ ID NO: 187213 - RNA, 32 nt, Human
ggagucugagccugaagagccccaaagcagga

SEQ ID NO: 187214 - RNA, 32 nt, Human
ggagucugagcucugcugcaucugucacagca

SEQ ID NO: 187215 - RNA, 32 nt, Human
ggagucugaggcaggagaaucgcuugaaccca

SEQ ID NO: 187216 - RNA, 32 nt, Human
ggagucugaggcaggagaauugcuugaaccug

SEQ ID NO: 187217 - RNA, 32 nt, Human
ggagucugaggcaggagaauugcuugagccca

SEQ ID NO: 187218 - RNA, 32 nt, Human
ggagucugaggcagguggaucgcuugaggcca

SEQ ID NO: 187219 - RNA, 32 nt, Human
ggagucugagucugaguccugucucugccugc

SEQ ID NO: 187220 - RNA, 32 nt, Human
ggagucugaugcuuuugcaguacucugaucgc

SEQ ID NO: 187221 - RNA, 32 nt, Human
ggagucugcacagaagugcacacaccucauug

SEQ ID NO: 187222 - RNA, 32 nt, Human
ggagucugcaccugcagagccuuugcccuagg

SEQ ID NO: 187223 - RNA, 32 nt, Human
ggagucugcacuccaggcuucuucccggccgg

SEQ ID NO: 187224 - RNA, 32 nt, Human
ggagucugcuucauuucuaucauuccauuuuu

SEQ ID NO: 187225 - RNA, 32 nt, Human
ggagucuggcgacugccccacgcccagccgug

SEQ ID NO: 187226 - RNA, 31 nt, Human
ggagucuggcucucuggcuccugugcauucu

SEQ ID NO: 187227 - RNA, 32 nt, Human
ggagucugggcccaggcugugaguuccagguc

SEQ ID NO: 187228 - RNA, 32 nt, Human
ggagucugggcugaguagaggcaccagauuug

SEQ ID NO: 187229 - RNA, 32 nt, Human
ggagucugggguccaugcguggagagggagug

SEQ ID NO: 187230 - RNA, 32 nt, Human
ggagucuguaccaagcugcuucuggaugacca

SEQ ID NO: 187231 - RNA, 32 nt, Human
ggagucuguagucucagcuauucgggaggaug

SEQ ID NO: 187232 - RNA, 32 nt, Human
ggagucuguccaccccaacuccugacagcauc

SEQ ID NO: 187233 - RNA, 32 nt, Human
ggagucugucuuuccuuagccgucugagugag

SEQ ID NO: 187234 - RNA, 25 nt, Human
ggagucuguggcaggaggauugcuu

SEQ ID NO: 187235 - RNA, 32 nt, Human
ggagucuguggcaggaggauugcuugaggcca

SEQ ID NO: 187236 - RNA, 32 nt, Human
ggagucuguggcuggggaggggcuggcagaac

SEQ ID NO: 187237 - RNA, 32 nt, Human
ggagucuuccccuguugcccaggcuggagugc

SEQ ID NO: 187238 - RNA, 32 nt, Human
ggagucuuccucugucgcccaggcuggagugc

SEQ ID NO: 187239 - RNA, 32 nt, Human
ggagucuucuguccuccuccccaacccccgag

SEQ ID NO: 187240 - RNA, 32 nt, Human
ggagucuugagaccagccugggcaacaggcua

SEQ ID NO: 187241 - RNA, 32 nt, Human
ggagucuugcgcuguugcccaggcucuagugc

SEQ ID NO: 187242 - RNA, 32 nt, Human
ggagucuugcucuauuacucaggcuggaguaa

SEQ ID NO: 187243 - RNA, 32 nt, Human
ggagucuugcucugucgccuaggcugcagugc

SEQ ID NO: 187244 - RNA, 32 nt, Human
ggagucuugcugcugcauguuccaggcuccac

SEQ ID NO: 187245 - RNA, 32 nt, Human
ggagucuugcuguguuguccaggcuggagugc

SEQ ID NO: 187246 - RNA, 32 nt, Human
ggagucuuucucugucacccaggcuggaaugc

SEQ ID NO: 187247 - RNA, 32 nt, Human
ggagucuuucucugucugugcauucauugaac

SEQ ID NO: 187248 - RNA, 32 nt, Human
ggagucuuugaucaggaugacaugugccauuu

SEQ ID NO: 187249 - RNA, 32 nt, Human
ggagugaaacagcaaaccccaaaucuucaaag

SEQ ID NO: 187250 - RNA, 32 nt, Human
ggagugaacagucccugacugccuguaggcug

SEQ ID NO: 187251 - RNA, 32 nt, Human
ggagugaaccaccaugcccagccuaaagacau

SEQ ID NO: 187252 - RNA, 32 nt, Human
ggagugaagaagcaaaaagaggaggaggaaga

SEQ ID NO: 187253 - RNA, 17 nt, Human
ggagugaagaggggcag

SEQ ID NO: 187254 - RNA, 32 nt, Human
ggagugaagagguggcucuugagggaaauggu

SEQ ID NO: 187255 - RNA, 32 nt, Human
ggagugaagcagggcuuggagcagaugguaaa

SEQ ID NO: 187256 - RNA, 32 nt, Human
ggagugaaggcagagccuggugcagauggacg

SEQ ID NO: 187257 - RNA, 32 nt, Human
ggagugaagggaagauugcaccagagaugaag

SEQ ID NO: 187258 - RNA, 32 nt, Human
ggagugaagggcccugaggucagcucccaggu

SEQ ID NO: 187259 - RNA, 32 nt, Human
ggagugacagccgcagacacacgacagccggc

SEQ ID NO: 187260 - RNA, 32 nt, Human
ggagugacaggucucaagacugcauuaaauga

SEQ ID NO: 187261 - RNA, 32 nt, Human
ggagugaccauagccacugcugaaaagucacg

SEQ ID NO: 187262 - RNA, 21 nt, Human
ggagugacccagcguuauucc

SEQ ID NO: 187263 - RNA, 19 nt, Human
ggagugacccagugcuucc

SEQ ID NO: 187264 - RNA, 32 nt, Human
ggagugaccccgggggcacacaggcuccacac

SEQ ID NO: 187265 - RNA, 17 nt, Human
ggagugacgcaucucca

SEQ ID NO: 187266 - RNA, 32 nt, Human
ggagugacugcauaaugucagcauuuugugcu

SEQ ID NO: 187267 - RNA, 32 nt, Human
ggagugacuggcuucuccuuguccucauuuau

SEQ ID NO: 187268 - RNA, 32 nt, Human
ggagugagaagagccgcucccgcuagaggaaa

SEQ ID NO: 187269 - RNA, 32 nt, Human
ggagugagaagaugccuggcgagguuuuggcc

SEQ ID NO: 187270 - RNA, 32 nt, Human
ggagugagaauagaaagaccaguuucaggcuu

SEQ ID NO: 187271 - RNA, 32 nt, Human
ggagugagaccagcuucuggcaacugccccag

SEQ ID NO: 187272 - RNA, 32 nt, Human
ggagugagaccccagcccuaggcugggguucu

SEQ ID NO: 187273 - RNA, 32 nt, Human
ggagugagagagaggcaggucuccagcugugc

SEQ ID NO: 187274 - RNA, 32 nt, Human
ggagugagagauggcaccucagccuggcccau

SEQ ID NO: 187275 - RNA, 31 nt, Human
ggagugagcaaaggaagcauuuaccccgaug

SEQ ID NO: 187276 - RNA, 32 nt, Human
ggagugagcagucagagagggagacagccuug

SEQ ID NO: 187277 - RNA, 32 nt, Human
ggagugagccucccugguccuuccugccugaa

SEQ ID NO: 187278 - RNA, 32 nt, Human
ggagugagcuaaauugaucccaauuaaguuuu

SEQ ID NO: 187279 - RNA, 32 nt, Human
ggagugagcuagccaugcuggggcagggagcc

SEQ ID NO: 187280 - RNA, 32 nt, Human
ggagugagggagaaacagggagcugaauccuc

SEQ ID NO: 187281 - RNA, 32 nt, Human
ggagugagggagcaggaucugggagggacaag

SEQ ID NO: 187282 - RNA, 32 nt, Human
ggagugagggccugaacugugcccccacccuc

SEQ ID NO: 187283 - RNA, 32 nt, Human
ggagugagguccagaagcaccugagccuguua

SEQ ID NO: 187284 - RNA, 32 nt, Human
ggagugagugugugucgcgcguguccgcacug

SEQ ID NO: 187285 - RNA, 32 nt, Human
ggagugauaagaaacaucugcuccacgccaac

SEQ ID NO: 187286 - RNA, 32 nt, Human
ggagugaucccccaggcaucgugugccauguu

SEQ ID NO: 187287 - RNA, 21 nt, Human
ggagugaucuagaaguguuaa

SEQ ID NO: 187288 - RNA, 32 nt, Human
ggagugaugaacgggcuggagcagucugagga

SEQ ID NO: 187289 - RNA, 19 nt, Human
ggagugaugagcccgccca

SEQ ID NO: 187290 - RNA, 32 nt, Human
ggagugaugaugguaacugaugaacagagaac

SEQ ID NO: 187291 - RNA, 16 nt, Human
ggagugauggaagcca

SEQ ID NO: 187292 - RNA, 32 nt, Human
ggagugcaacccaggagcaacgcucaaggugg

SEQ ID NO: 187293 - RNA, 32 nt, Human
ggagugcaaguggcaugaucuuggcucacaac

SEQ ID NO: 187294 - RNA, 20 nt, Human
ggagugcacagcuccugcug

SEQ ID NO: 187295 - RNA, 32 nt, Human
ggagugcaccacugcacuccagccugggcaac

SEQ ID NO: 187296 - RNA, 18 nt, Human
ggagugcagaccucuggg

SEQ ID NO: 187297 - RNA, 32 nt, Human
ggagugcagagaggagaacugaaaauaaaacu

SEQ ID NO: 187298 - RNA, 32 nt, Human
ggagugcagccugaaugucaccugccucgaug

SEQ ID NO: 187299 - RNA, 32 nt, Human
ggagugcaggaguucaagaccagccugggcaa

SEQ ID NO: 187300 - RNA, 32 nt, Human
ggagugcaggcagagggguccauggcuucccc

SEQ ID NO: 187301 - RNA, 32 nt, Human
ggagugcagugagccgagaucacgccacugca

SEQ ID NO: 187302 - RNA, 32 nt, Human
ggagugcaguggcauaaucauaccucauugca

SEQ ID NO: 187303 - RNA, 32 nt, Human
ggagugcaguggugcaaucauagcucauugaa

SEQ ID NO: 187304 - RNA, 32 nt, Human
ggagugcccaggauggagugcaguggcuauuc

SEQ ID NO: 187305 - RNA, 17 nt, Human
ggagugccucucuggga

SEQ ID NO: 187306 - RNA, 32 nt, Human
ggagugcggcaccuucccgucugaugcuggcg

SEQ ID NO: 187307 - RNA, 32 nt, Human
ggagugcggcuggucugcgcuccugugcauug

SEQ ID NO: 187308 - RNA, 32 nt, Human
ggagugcgggaaagccuucaguucuuccaguu

SEQ ID NO: 187309 - RNA, 32 nt, Human
ggagugcgggggagggaaagaaaacaaacagu

SEQ ID NO: 187310 - RNA, 20 nt, Human
ggagugcgguccucuaggga

SEQ ID NO: 187311 - RNA, 32 nt, Human
ggagugcgugagccacuuuagccaggauauac

SEQ ID NO: 187312 - RNA, 32 nt, Human
ggagugcguucugugucgguguuugugacgcc

SEQ ID NO: 187313 - RNA, 24 nt, Human
ggagugcuaaagggugcacacucc

SEQ ID NO: 187314 - RNA, 32 nt, Human
ggagugcucgagaacagauggggccaggcacc

SEQ ID NO: 187315 - RNA, 32 nt, Human
ggagugcugagggcuggagugggugggcccuc

SEQ ID NO: 187316 - RNA, 32 nt, Human
ggagugcugaugagaggcagaggcucuucugg

SEQ ID NO: 187317 - RNA, 19 nt, Human
ggagugcugggcucccaga

SEQ ID NO: 187318 - RNA, 32 nt, Human
ggaguggaacucaucaggcuugccaagagguu

SEQ ID NO: 187319 - RNA, 32 nt, Human
ggaguggacagaaugaugcauccaccccguuc

SEQ ID NO: 187320 - RNA, 31 nt, Human
ggaguggaccaaaacuggugaucuguuugcc

SEQ ID NO: 187321 - RNA, 32 nt, Human
ggaguggacccccauaacugggccucuccugg

SEQ ID NO: 187322 - RNA, 16 nt, Human
ggaguggaccucuggg

SEQ ID NO: 187323 - RNA, 32 nt, Human
ggaguggagaggcauggagaggccccaugggg

SEQ ID NO: 187324 - RNA, 32 nt, Human
ggaguggagauggagggauuauugagcagaaa

SEQ ID NO: 187325 - RNA, 32 nt, Human
ggaguggagcugcugguucucccagguggauu

SEQ ID NO: 187326 - RNA, 32 nt, Human
ggaguggagcugggcuggcugggcaggcaggg

SEQ ID NO: 187327 - RNA, 16 nt, Human
ggaguggaggaaucca

SEQ ID NO: 187328 - RNA, 32 nt, Human
ggaguggaggcagaggccugagagcuccccgg

SEQ ID NO: 187329 - RNA, 32 nt, Human
ggaguggagggaggcucagagauacugauaug

SEQ ID NO: 187330 - RNA, 32 nt, Human
ggaguggaggguggaggaacguguggaguuuc

SEQ ID NO: 187331 - RNA, 32 nt, Human
ggaguggagggugucucauccacuguggagau

SEQ ID NO: 187332 - RNA, 32 nt, Human
ggaguggaguauaaagaguguagggggugguu

SEQ ID NO: 187333 - RNA, 32 nt, Human
ggaguggaguccaguagucugcauuuaacgag

SEQ ID NO: 187334 - RNA, 32 nt, Human
ggaguggaguuucuuaggcugcuuccucugcu

SEQ ID NO: 187335 - RNA, 32 nt, Human
ggaguggaugcugaugaacaucgaacauaucu

SEQ ID NO: 187336 - RNA, 32 nt, Human
ggaguggauggcagaggugggcuguagagcca

SEQ ID NO: 187337 - RNA, 32 nt, Human
ggaguggcagcaccuggaucaugcucagaaga

SEQ ID NO: 187338 - RNA, 20 nt, Human
ggaguggcagcuccucggcc

SEQ ID NO: 187339 - RNA, 32 nt, Human
ggaguggcagcucugcuagcagcuggguucac

SEQ ID NO: 187340 - RNA, 32 nt, Human
ggaguggcaguggcaugaucucagcuuaaugc

SEQ ID NO: 187341 - RNA, 32 nt, Human
ggaguggccaaagagaagcagugcagggaugg

SEQ ID NO: 187342 - RNA, 32 nt, Human
ggaguggccaggaagaggcugcaggcucaagg

SEQ ID NO: 187343 - RNA, 17 nt, Human
ggaguggcccuggucca

SEQ ID NO: 187344 - RNA, 32 nt, Human
ggaguggcccuuuaacucuauuuggcuaucug

SEQ ID NO: 187345 - RNA, 25 nt, Human
ggaguggccucaaggccacccagug

SEQ ID NO: 187346 - RNA, 32 nt, Human
ggaguggccugaaagagagcaagaacaugugg

SEQ ID NO: 187347 - RNA, 32 nt, Human
ggaguggccuuuuaugagaggggacccgucaa

SEQ ID NO: 187348 - RNA, 32 nt, Human
ggaguggcgggcacgccagggucagggugccg

SEQ ID NO: 187349 - RNA, 32 nt, Human
ggaguggcguuuccgcacaggauuuccuaaga

SEQ ID NO: 187350 - RNA, 32 nt, Human
ggaguggcucaggagccccugaaaguguccag

SEQ ID NO: 187351 - RNA, 32 nt, Human
ggaguggcuggauguggagcaccgcaccgugg

SEQ ID NO: 187352 - RNA, 32 nt, Human
ggaguggcuuacauuuccacauacuuaucaga

SEQ ID NO: 187353 - RNA, 32 nt, Human
ggaguggcuuuccugggaacaaaagccggucu

SEQ ID NO: 187354 - RNA, 32 nt, Human
ggaguggcuuuuccagcucucaugccccgcag

SEQ ID NO: 187355 - RNA, 32 nt, Human
ggagugggaaacuuugcccaagcaauggcacg

SEQ ID NO: 187356 - RNA, 32 nt, Human
ggagugggaagagguggcaggaaggggaucug

SEQ ID NO: 187357 - RNA, 32 nt, Human
ggagugggaagugagagacacugauuuuuaaa

SEQ ID NO: 187358 - RNA, 32 nt, Human
ggagugggaaugagccacucccaguucuggag

SEQ ID NO: 187359 - RNA, 20 nt, Human
ggagugggagaaggaggaga

SEQ ID NO: 187360 - RNA, 32 nt, Human
ggagugggagagaccuuccagcaggggucaac

SEQ ID NO: 187361 - RNA, 32 nt, Human
ggagugggaggaagagccugggacaguggcca

SEQ ID NO: 187362 - RNA, 32 nt, Human
ggagugggaggaggagagaugggugaagacaa

SEQ ID NO: 187363 - RNA, 20 nt, Human
ggagugggagggagacgcag

SEQ ID NO: 187364 - RNA, 21 nt, Human
ggagugggagggguggagcag

SEQ ID NO: 187365 - RNA, 32 nt, Human
ggagugggagguugguggugccuccagcccau

SEQ ID NO: 187366 - RNA, 31 nt, Human
ggagugggauagucucccauuuaagcagcua

SEQ ID NO: 187367 - RNA, 32 nt, Human
ggagugggcaaagauuucuuguguaauaccug

SEQ ID NO: 187368 - RNA, 32 nt, Human
ggagugggcacuagaugaagcaaaugggauug

SEQ ID NO: 187369 - RNA, 32 nt, Human
ggagugggcaggccugagugagggucacugac

SEQ ID NO: 187370 - RNA, 32 nt, Human
ggagugggcccaggaaugugcauuuuaaauca

SEQ ID NO: 187371 - RNA, 18 nt, Human
ggagugggcgcugggaga

SEQ ID NO: 187372 - RNA, 32 nt, Human
ggagugggcuacuguagugugugugauucaaa

SEQ ID NO: 187373 - RNA, 32 nt, Human
ggagugggcucuggaagcagagagaugccagg

SEQ ID NO: 187374 - RNA, 32 nt, Human
ggagugggcugggaugggagaaucgcuugagc

SEQ ID NO: 187375 - RNA, 32 nt, Human
ggaguggggagggagagggcaggaaggaggca

SEQ ID NO: 187376 - RNA, 32 nt, Human
ggaguggggauggcagaaucagcugcuguaug

SEQ ID NO: 187377 - RNA, 18 nt, Human
ggaguggggcgcggcagc

SEQ ID NO: 187378 - RNA, 32 nt, Human
ggagugggggcugggcgggucucuccaccgcu

SEQ ID NO: 187379 - RNA, 32 nt, Human
ggagugggggcuucugagagucagccugaggu

SEQ ID NO: 187380 - RNA, 32 nt, Human
ggagugggucuggauuucugguguguggacuu

SEQ ID NO: 187381 - RNA, 32 nt, Human
ggagugggugggcagggguagaggagggggcc

SEQ ID NO: 187382 - RNA, 23 nt, Human
ggaguggguuuuggugguguuuu

SEQ ID NO: 187383 - RNA, 32 nt, Human
ggagugguauuauauaggucucagccaagaca

SEQ ID NO: 187384 - RNA, 32 nt, Human
ggaguggugaugacucucaacgagcaugcugc

SEQ ID NO: 187385 - RNA, 32 nt, Human
ggaguggugcagccccuggcaucucagacaug

SEQ ID NO: 187386 - RNA, 32 nt, Human
ggaguggugcccagagaaguuaagcaguuugc

SEQ ID NO: 187387 - RNA, 32 nt, Human
ggagugguggugguugaaagggcgauggaauu

SEQ ID NO: 187388 - RNA, 32 nt, Human
ggagugguuaccucuaggaagaaaggaggugg

SEQ ID NO: 187389 - RNA, 32 nt, Human
ggaguguaagugacaugaucauagcucacucc

SEQ ID NO: 187390 - RNA, 32 nt, Human
ggaguguagaccugugugugggaccugcucca

SEQ ID NO: 187391 - RNA, 32 nt, Human
ggaguguagggaggggccgagcaggaggagga

SEQ ID NO: 187392 - RNA, 32 nt, Human
ggaguguauggcagcuggcacaauuauccuug

SEQ ID NO: 187393 - RNA, 32 nt, Human
ggagugucagcuuuuagaaggaucauggucau

SEQ ID NO: 187394 - RNA, 18 nt, Human
ggagugucaggggcccuc

SEQ ID NO: 187395 - RNA, 17 nt, Human
ggagugucccugcucca

SEQ ID NO: 187396 - RNA, 32 nt, Human
ggagugucucugaggugaggccggggguaugg

SEQ ID NO: 187397 - RNA, 32 nt, Human
ggagugucugucugcugagcggcgcugugacc

SEQ ID NO: 187398 - RNA, 32 nt, Human
ggagugugagugugcauggcauguguguggca

SEQ ID NO: 187399 - RNA, 32 nt, Human
ggagugugaugauucccaaccgaaagcagcug

SEQ ID NO: 187400 - RNA, 32 nt, Human
ggagugugcacugugcuugcucagagaggcca

SEQ ID NO: 187401 - RNA, 32 nt, Human
ggagugugccaugcucaugaagccacaggucc

SEQ ID NO: 187402 - RNA, 32 nt, Human
ggagugugcccaggucacugcuauggccuucg

SEQ ID NO: 187403 - RNA, 32 nt, Human
ggagugugcgggaggggguagaguuggcaggu

SEQ ID NO: 187404 - RNA, 32 nt, Human
ggaguguggcugaggcccugaguguccagcca

SEQ ID NO: 187405 - RNA, 32 nt, Human
ggagugugggaacaacagucucuccuguccac

SEQ ID NO: 187406 - RNA, 32 nt, Human
ggagugugggaaugaaggaauucuggagcuuu

SEQ ID NO: 187407 - RNA, 32 nt, Human
ggagugugggugcucauaaguugcccagccca

SEQ ID NO: 187408 - RNA, 31 nt, Human
ggagugugggugguugggcgugaggggccga

SEQ ID NO: 187409 - RNA, 32 nt, Human
ggagugugugaaugccuuccaggagguggcuu

SEQ ID NO: 187410 - RNA, 19 nt, Human
ggagugugugacgaugcug

SEQ ID NO: 187411 - RNA, 32 nt, Human
ggaguguguggaggagcgaugggcagaaccag

SEQ ID NO: 187412 - RNA, 32 nt, Human
ggagugugugggggucugggaggcaggucccg

SEQ ID NO: 187413 - RNA, 32 nt, Human
ggaguguguuccugaagagcagccaggaggcc

SEQ ID NO: 187414 - RNA, 19 nt, Human
ggaguguuacacacugcuu

SEQ ID NO: 187415 - RNA, 22 nt, Human
ggaguguuacaguagggagcag

SEQ ID NO: 187416 - RNA, 32 nt, Human
ggaguguuccauaguuuauuguuuuccuauua

SEQ ID NO: 187417 - RNA, 24 nt, Human
ggaguguuccugggaccucagaga

SEQ ID NO: 187418 - RNA, 32 nt, Human
ggaguguuccugggaccucagagaccaggcuc

SEQ ID NO: 187419 - RNA, 32 nt, Human
ggaguguugagugaagggaccagguggagaug

SEQ ID NO: 187420 - RNA, 20 nt, Human
ggaguguugggagccucaga

SEQ ID NO: 187421 - RNA, 31 nt, Human
ggaguguugguggaaaggaaacugaagguaa

SEQ ID NO: 187422 - RNA, 32 nt, Human
ggaguguuuuccaugggauaaaggacacccua

SEQ ID NO: 187423 - RNA, 32 nt, Human
ggaguguuuuuaaugagggaaggaagguagcu

SEQ ID NO: 187424 - RNA, 32 nt, Human
ggaguuaaaaagagcuuuuguugagauuuggc

SEQ ID NO: 187425 - RNA, 32 nt, Human
ggaguuaaaacaaugcuguaauaaauaaagug

SEQ ID NO: 187426 - RNA, 32 nt, Human
ggaguuaaaaccccagccagagccuagguuuu

SEQ ID NO: 187427 - RNA, 32 nt, Human
ggaguuaaaagcuucuucuucaauagaggaau

SEQ ID NO: 187428 - RNA, 32 nt, Human
ggaguuaacacauguaaaagacacagaacagu

SEQ ID NO: 187429 - RNA, 32 nt, Human
ggaguuaaggcggugccuuuccacucuggcug

SEQ ID NO: 187430 - RNA, 32 nt, Human
ggaguuaaucucauuuucaaagcuguuucuca

SEQ ID NO: 187431 - RNA, 22 nt, Human
ggaguuacaagacagcucuaga

SEQ ID NO: 187432 - RNA, 32 nt, Human
ggaguuaccaauauugccaaguagacucacuc

SEQ ID NO: 187433 - RNA, 32 nt, Human
ggaguuaccauggugaccgcagccccuuggac

SEQ ID NO: 187434 - RNA, 32 nt, Human
ggaguuacuuuccuccugaccuguaaauuugu

SEQ ID NO: 187435 - RNA, 32 nt, Human
ggaguuagaagcgucuguaucucuggagcagc

SEQ ID NO: 187436 - RNA, 32 nt, Human
ggaguuagagcacggacucucuccaccugcac

SEQ ID NO: 187437 - RNA, 32 nt, Human
ggaguuagaggaggaggaggaggaggaagagg

SEQ ID NO: 187438 - RNA, 24 nt, Human
ggaguuagccgcggugugcgugaa

SEQ ID NO: 187439 - RNA, 32 nt, Human
ggaguuagggagagagaagcaggcagauaagu

SEQ ID NO: 187440 - RNA, 32 nt, Human
ggaguuauuacggaaaggacaccaagaauauc

SEQ ID NO: 187441 - RNA, 32 nt, Human
ggaguucaagacgagccugggcaacauggcaa

SEQ ID NO: 187442 - RNA, 32 nt, Human
ggaguucaccuugcccgcuaccuagacagagc

SEQ ID NO: 187443 - RNA, 32 nt, Human
ggaguucacugcacugagcugugaucacacca

SEQ ID NO: 187444 - RNA, 32 nt, Human
ggaguucagaaacgggguaccaugaccuggaa

SEQ ID NO: 187445 - RNA, 32 nt, Human
ggaguucaggaguucaagaccagccuggccaa

SEQ ID NO: 187446 - RNA, 32 nt, Human
ggaguucaggaucagaaugguuucagaagcuc

SEQ ID NO: 187447 - RNA, 32 nt, Human
ggaguucaguauuuggaaacuaauuuguucua

SEQ ID NO: 187448 - RNA, 32 nt, Human
ggaguucaguggagagguuagagccagccaca

SEQ ID NO: 187449 - RNA, 23 nt, Human
ggaguuccagaccagccuggcca

SEQ ID NO: 187450 - RNA, 32 nt, Human
ggaguuccauuuucuuaauuuuucauucuaaa

SEQ ID NO: 187451 - RNA, 32 nt, Human
ggaguucccgagaagcauggcugagggaagcu

SEQ ID NO: 187452 - RNA, 32 nt, Human
ggaguucccuuaccugggguccagucuguaaa

SEQ ID NO: 187453 - RNA, 32 nt, Human
ggaguuccugaacagauuuuucacucccauga

SEQ ID NO: 187454 - RNA, 20 nt, Human
ggaguucgaggcugcaguga

SEQ ID NO: 187455 - RNA, 23 nt, Human
ggaguucgaguccagccuggcca

SEQ ID NO: 187456 - RNA, 32 nt, Human
ggaguucucuuugaggcuggaaugcaguagcg

SEQ ID NO: 187457 - RNA, 32 nt, Human
ggaguucugagaccagccuggcuuacauggug

SEQ ID NO: 187458 - RNA, 32 nt, Human
ggaguucugaggcuccugcucucccauccacc

SEQ ID NO: 187459 - RNA, 32 nt, Human
ggaguucugagugcugagcugcagggugaggc

SEQ ID NO: 187460 - RNA, 32 nt, Human
ggaguucuucagcugcuugaugaccacgaaga

SEQ ID NO: 187461 - RNA, 32 nt, Human
ggaguucuugaauuccaggguggcggauauuc

SEQ ID NO: 187462 - RNA, 32 nt, Human
ggaguucuuggcuuuaaucauucauuacaaag

SEQ ID NO: 187463 - RNA, 32 nt, Human
ggaguugagagcuggggcaggagccccagccg

SEQ ID NO: 187464 - RNA, 32 nt, Human
ggaguugaggcagaagccagucaggauggugg

SEQ ID NO: 187465 - RNA, 20 nt, Human
ggaguugagggaaggagcug

SEQ ID NO: 187466 - RNA, 32 nt, Human
ggaguugauggccaggaaagaagccagcacag

SEQ ID NO: 187467 - RNA, 32 nt, Human
ggaguugcaccaggaggugccucugccucucg

SEQ ID NO: 187468 - RNA, 32 nt, Human
ggaguugcauaccaguauuccccagcuuguga

SEQ ID NO: 187469 - RNA, 32 nt, Human
ggaguugcggugagccgagaucgcgccauugc

SEQ ID NO: 187470 - RNA, 32 nt, Human
ggaguugcuacauuaggcagaguaaauauuuu

SEQ ID NO: 187471 - RNA, 32 nt, Human
ggaguugcuagcaaacaaauggcuuacuuaca

SEQ ID NO: 187472 - RNA, 32 nt, Human
ggaguugcucagaggcucacaugggcaccccc

SEQ ID NO: 187473 - RNA, 32 nt, Human
ggaguugcugggguccacuccugggccugccc

SEQ ID NO: 187474 - RNA, 32 nt, Human
ggaguuggaagaggagggauuagaaacaggag

SEQ ID NO: 187475 - RNA, 32 nt, Human
ggaguuggagagaaaggguggcaagagagaag

SEQ ID NO: 187476 - RNA, 32 nt, Human
ggaguuggaggaggaggaggaggaggcgaggg

SEQ ID NO: 187477 - RNA, 32 nt, Human
ggaguugggaaagaguggguguguguccgcau

SEQ ID NO: 187478 - RNA, 32 nt, Human
ggaguugggaucugccuuuuucauccagagcu

SEQ ID NO: 187479 - RNA, 21 nt, Human
ggaguuggggaagcucuuuca

SEQ ID NO: 187480 - RNA, 32 nt, Human
ggaguuggggacagugcugucccccaccccug

SEQ ID NO: 187481 - RNA, 32 nt, Human
ggaguuggggauguccuacaaacccaucgccc

SEQ ID NO: 187482 - RNA, 32 nt, Human
ggaguugggggcccagggagaagggacaaggc

SEQ ID NO: 187483 - RNA, 32 nt, Human
ggaguuggucauggaaugggcugggcuccugg

SEQ ID NO: 187484 - RNA, 32 nt, Human
ggaguuggugccccucauuccagaaucuccua

SEQ ID NO: 187485 - RNA, 23 nt, Human
ggaguuggugcuggucuuccucu

SEQ ID NO: 187486 - RNA, 32 nt, Human
ggaguuggugggcagcaggggagacaauagcg

SEQ ID NO: 187487 - RNA, 32 nt, Human
ggaguugguguuaggacagaagauccaagacg

SEQ ID NO: 187488 - RNA, 32 nt, Human
ggaguuguagggcuccgucauggccauggaga

SEQ ID NO: 187489 - RNA, 32 nt, Human
ggaguugugcagggacucuggcccaggcaggg

SEQ ID NO: 187490 - RNA, 32 nt, Human
ggaguugugcaggguuuggggaaaggaaggcu

SEQ ID NO: 187491 - RNA, 32 nt, Human
ggaguugugccgagugccugcugcagucucau

SEQ ID NO: 187492 - RNA, 32 nt, Human
ggaguuguggcuuugugucugcuggcaccaag

SEQ ID NO: 187493 - RNA, 32 nt, Human
ggaguuguggugaaacuaaucacgucugugag

SEQ ID NO: 187494 - RNA, 32 nt, Human
ggaguuguuccaucuucagccaguuuacuagu

SEQ ID NO: 187495 - RNA, 32 nt, Human
ggaguuguugauuugugaggacagauugaaag

SEQ ID NO: 187496 - RNA, 32 nt, Human
ggaguuuaauaguuacacauucaugcuaauau

SEQ ID NO: 187497 - RNA, 32 nt, Human
ggaguuuauauaagagagacagugaugagcaa

SEQ ID NO: 187498 - RNA, 32 nt, Human
ggaguuucaaaaccaggucugaagcaauccag

SEQ ID NO: 187499 - RNA, 32 nt, Human
ggaguuucaaaucaucuucuucauuucuguga

SEQ ID NO: 187500 - RNA, 32 nt, Human
ggaguuucaccaugguggucaggcuggucuug

SEQ ID NO: 187501 - RNA, 32 nt, Human
ggaguuucaguggaaccaaauuuuugccauua

SEQ ID NO: 187502 - RNA, 32 nt, Human
ggaguuuccccgaggcaucacagggcuucccg

SEQ ID NO: 187503 - RNA, 22 nt, Human
ggaguuucuccuccaccucuca

SEQ ID NO: 187504 - RNA, 32 nt, Human
ggaguuucuccucugggugccugaagcuauag

SEQ ID NO: 187505 - RNA, 32 nt, Human
ggaguuucuguggagccagccacccucaccag

SEQ ID NO: 187506 - RNA, 32 nt, Human
ggaguuucuguuagugguagugguguuuugga

SEQ ID NO: 187507 - RNA, 32 nt, Human
ggaguuucuguugacagagauggagucaguca

SEQ ID NO: 187508 - RNA, 32 nt, Human
ggaguuugagaccaagccugaccaauauggag

SEQ ID NO: 187509 - RNA, 32 nt, Human
ggaguuugagaccagccugacauggugaaacc

SEQ ID NO: 187510 - RNA, 32 nt, Human
ggaguuugagccugaccaacaugcuaaaaucc

SEQ ID NO: 187511 - RNA, 32 nt, Human
ggaguuugaggcaggaggauggcuugaaccca

SEQ ID NO: 187512 - RNA, 32 nt, Human
ggaguuugcaucauccacguggcuccguugcc

SEQ ID NO: 187513 - RNA, 19 nt, Human
ggaguuuggagguuggaga

SEQ ID NO: 187514 - RNA, 32 nt, Human
ggaguuuggccacaagauguuguugacggaac

SEQ ID NO: 187515 - RNA, 26 nt, Human
ggaguuugugaaaaaugcacaucucu

SEQ ID NO: 187516 - RNA, 32 nt, Human
ggaguuugugcccaagcuucucccucuucucu

SEQ ID NO: 187517 - RNA, 32 nt, Human
ggaguuugugugaccccuggccccugagccca

SEQ ID NO: 187518 - RNA, 32 nt, Human
ggaguuuuaagaccagccugaccaacauggug

SEQ ID NO: 187519 - RNA, 32 nt, Human
ggaguuuuagagagcuaugcucuguagcauga

SEQ ID NO: 187520 - RNA, 32 nt, Human
ggaguuuuaggaagucaguugucagagacagg

SEQ ID NO: 187521 - RNA, 32 nt, Human
ggaguuuucaugacagaauauacacauuuugu

SEQ ID NO: 187522 - RNA, 32 nt, Human
ggaguuuuccucaguuuuucuuccucagaaua

SEQ ID NO: 187523 - RNA, 32 nt, Human
ggaguuuugagaccagccuggccaacauggua

SEQ ID NO: 187524 - RNA, 32 nt, Human
ggaguuuugagaccagccuggccaacauggug

SEQ ID NO: 187525 - RNA, 32 nt, Human
ggaguuuugagaccagccuggccaacguggca

SEQ ID NO: 187526 - RNA, 32 nt, Human
ggaguuuugagaccagccugggaaacaucugc

SEQ ID NO: 187527 - RNA, 32 nt, Human
ggaguuuugagaccagccugggcaacaucagg

SEQ ID NO: 187528 - RNA, 32 nt, Human
ggaguuuugaguccagccugaacaacauaaca

SEQ ID NO: 187529 - RNA, 32 nt, Human
ggaguuuugcccuucuugcccaggcuggagug

SEQ ID NO: 187530 - RNA, 32 nt, Human
ggaguuuugcuugaggccagagguucaagacc

SEQ ID NO: 187531 - RNA, 32 nt, Human
ggaguuuuguugaaguugcaaaguccuggagc

SEQ ID NO: 187532 - RNA, 32 nt, Human
ggaguuuuuaggguaaaacgugcagcucuuca

SEQ ID NO: 187533 - RNA, 32 nt, Human
ggaguuuuuccagacaacuuuguacucccacc

SEQ ID NO: 187534 - RNA, 22 nt, Human
ggaguuuuuuaaaaagacauuu

SEQ ID NO: 187535 - RNA, 32 nt, Human
ggauaaaaggaccaaagaaaaagcuuuacuua

SEQ ID NO: 187536 - RNA, 32 nt, Human
ggauaaaagugagggcagaaguagcuguggga

SEQ ID NO: 187537 - RNA, 32 nt, Human
ggauaaaauuuccuuuggaaagaacccaugga

SEQ ID NO: 187538 - RNA, 32 nt, Human
ggauaaacauggcgacgucucugcaugaggga

SEQ ID NO: 187539 - RNA, 32 nt, Human
ggauaaacgcucuccccucggcucccggacgc

SEQ ID NO: 187540 - RNA, 32 nt, Human
ggauaaacugccucgucugaucuuguggcccc

SEQ ID NO: 187541 - RNA, 32 nt, Human
ggauaaacuuggccuuucuaagugguaagaau

SEQ ID NO: 187542 - RNA, 32 nt, Human
ggauaaagaaaaggaauuuuagaagugaccag

SEQ ID NO: 187543 - RNA, 32 nt, Human
ggauaaagaagagauggcaucgcuuacgccac

SEQ ID NO: 187544 - RNA, 32 nt, Human
ggauaaagcagcuucacucaacucuggggaau

SEQ ID NO: 187545 - RNA, 32 nt, Human
ggauaaaggcaguuagcuaacacagauggccg

SEQ ID NO: 187546 - RNA, 32 nt, Human
ggauaaagggacaaucaaacucaaggugccca

SEQ ID NO: 187547 - RNA, 32 nt, Human
ggauaaagggaggaggaggagcuagcagacac

SEQ ID NO: 187548 - RNA, 32 nt, Human
ggauaaaugcauuuuuauuuccuauuucuuua

SEQ ID NO: 187549 - RNA, 32 nt, Human
ggauaaauguggagaaaaugaugagaauuagc

SEQ ID NO: 187550 - RNA, 32 nt, Human
ggauaaauuccaucucugggaauugugugggu

SEQ ID NO: 187551 - RNA, 32 nt, Human
ggauaacaacugcacuccagccuggaugacag

SEQ ID NO: 187552 - RNA, 32 nt, Human
ggauaacacagugaaaccccgucucuacuaaa

SEQ ID NO: 187553 - RNA, 32 nt, Human
ggauaacacggagaaaccccgucucuacuaaa

SEQ ID NO: 187554 - RNA, 32 nt, Human
ggauaacaggcgcccaccaccgcacccugcua

SEQ ID NO: 187555 - RNA, 32 nt, Human
ggauaacaggugccagccaccaugcccagcua

SEQ ID NO: 187556 - RNA, 32 nt, Human
ggauaacagugauguucacggaacaagagaga

SEQ ID NO: 187557 - RNA, 32 nt, Human
ggauaacauggugaaaccacaucccuacuaca

SEQ ID NO: 187558 - RNA, 32 nt, Human
ggauaacgacugcacuccagccuggaugacag

SEQ ID NO: 187559 - RNA, 32 nt, Human
ggauaagaaggaccagcggaaaagagguagau

SEQ ID NO: 187560 - RNA, 32 nt, Human
ggauaagaauaggucauuuucuauucaccauc

SEQ ID NO: 187561 - RNA, 32 nt, Human
ggauaagacagagaaaaucacuuauuucucua

SEQ ID NO: 187562 - RNA, 32 nt, Human
ggauaagagagaagaaaagaagaauggagaga

SEQ ID NO: 187563 - RNA, 32 nt, Human
ggauaagagugugagagagacugauggggucg

SEQ ID NO: 187564 - RNA, 32 nt, Human
ggauaagcagcucagucacaggcagaagaagg

SEQ ID NO: 187565 - RNA, 32 nt, Human
ggauaagccuggggcuacuguugcugggaacu

SEQ ID NO: 187566 - RNA, 32 nt, Human
ggauaagcucaaugcucagaaaaugcugcuga

SEQ ID NO: 187567 - RNA, 32 nt, Human
ggauaagcucuuuaaaggcaaagcuuuauuuu

SEQ ID NO: 187568 - RNA, 25 nt, Human
ggauaaggagacugaggcuuagaga

SEQ ID NO: 187569 - RNA, 20 nt, Human
ggauaaggcagcccuccucc

SEQ ID NO: 187570 - RNA, 32 nt, Human
ggauaaggccuucuguacuuugcuuauuugaa

SEQ ID NO: 187571 - RNA, 32 nt, Human
ggauaagggaugcuuccugugacaacuugaau

SEQ ID NO: 187572 - RNA, 32 nt, Human
ggauaaggggccgggugcaguggcucacaccu

SEQ ID NO: 187573 - RNA, 32 nt, Human
ggauaagugcuaccuuaaaggguauacuaagu

SEQ ID NO: 187574 - RNA, 32 nt, Human
ggauaaguucuuuaguggugaguucugagauu

SEQ ID NO: 187575 - RNA, 32 nt, Human
ggauaauauaacuguuuuaaaacucuuucugg

SEQ ID NO: 187576 - RNA, 32 nt, Human
ggauaauauaugaaauuagcuuuccuuauuuu

SEQ ID NO: 187577 - RNA, 32 nt, Human
ggauaaucagugagcacuguucugcucagagc

SEQ ID NO: 187578 - RNA, 32 nt, Human
ggauaauccacugucucccaucccaggaggug

SEQ ID NO: 187579 - RNA, 32 nt, Human
ggauaaucuuaacuaaucagaguuggagacuu

SEQ ID NO: 187580 - RNA, 32 nt, Human
ggauaauggaggagguaaagguugaauuauau

SEQ ID NO: 187581 - RNA, 32 nt, Human
ggauaauggggaggcuaugcaggugugugggc

SEQ ID NO: 187582 - RNA, 32 nt, Human
ggauaauuacuggcaccugccucccaggccau

SEQ ID NO: 187583 - RNA, 32 nt, Human
ggauaauucucacugauggaucucaagcuaaa

SEQ ID NO: 187584 - RNA, 32 nt, Human
ggauaauuggaauaaagggaggugcuugaaga

SEQ ID NO: 187585 - RNA, 32 nt, Human
ggauacaaagagaacuuagagguggagcaguu

SEQ ID NO: 187586 - RNA, 32 nt, Human
ggauacaaucacagcaacccuggccucggccc

SEQ ID NO: 187587 - RNA, 20 nt, Human
ggauacaaugcauuuccuca

SEQ ID NO: 187588 - RNA, 32 nt, Human
ggauacacacuuuccccucuguagauucaaaa

SEQ ID NO: 187589 - RNA, 17 nt, Human
ggauacacagcaguguc

SEQ ID NO: 187590 - RNA, 19 nt, Human
ggauacaccgugggccuga

SEQ ID NO: 187591 - RNA, 32 nt, Human
ggauacagacuugcccaaaggagagccaggau

SEQ ID NO: 187592 - RNA, 32 nt, Human
ggauacagagaguggauuuucuccccaagucc

SEQ ID NO: 187593 - RNA, 32 nt, Human
ggauacagaguguugcuguccucagggagguc

SEQ ID NO: 187594 - RNA, 32 nt, Human
ggauacagcuggaccugaauuccugaugccca

SEQ ID NO: 187595 - RNA, 32 nt, Human
ggauacaggcuggaaaguaagggaagcagaag

SEQ ID NO: 187596 - RNA, 32 nt, Human
ggauacaguaaugaauuggccaggcaauuccu

SEQ ID NO: 187597 - RNA, 32 nt, Human
ggauacaugugcagaacgugcagcguuguuac

SEQ ID NO: 187598 - RNA, 32 nt, Human
ggauacauguuacuuuugauccagcaucaaaa

SEQ ID NO: 187599 - RNA, 32 nt, Human
ggauaccacagcugugccuuauguguuucaag

SEQ ID NO: 187600 - RNA, 32 nt, Human
ggauaccagcaccccacuccagccucgaggaa

SEQ ID NO: 187601 - RNA, 32 nt, Human
ggauacccagaacccucacuacuguaacauac

SEQ ID NO: 187602 - RNA, 32 nt, Human
ggauacccagaacuagcagccuagggaaaagg

SEQ ID NO: 187603 - RNA, 32 nt, Human
ggauacccgcacuccuccuccugggccggacc

SEQ ID NO: 187604 - RNA, 32 nt, Human
ggauaccgcucaaagcauuuuguggcugaaga

SEQ ID NO: 187605 - RNA, 32 nt, Human
ggauaccuacuucuuuucaugggaaggugagg

SEQ ID NO: 187606 - RNA, 32 nt, Human
ggauaccuccagccaggccucuguggccucug

SEQ ID NO: 187607 - RNA, 32 nt, Human
ggauaccuguaaucccagcuacgugggaggcu

SEQ ID NO: 187608 - RNA, 32 nt, Human
ggauaccuuggcugcccuauggcugucgcuug

SEQ ID NO: 187609 - RNA, 20 nt, Human
ggauacgggucaggcccauc

SEQ ID NO: 187610 - RNA, 32 nt, Human
ggauacgguccuuauagcuggagggaggcggu

SEQ ID NO: 187611 - RNA, 27 nt, Human
ggauacguaugguggcucacgccugua

SEQ ID NO: 187612 - RNA, 32 nt, Human
ggauacuaaauaaacuuucccuaacaaguguc

SEQ ID NO: 187613 - RNA, 20 nt, Human
ggauacuaaggaugugccaa

SEQ ID NO: 187614 - RNA, 23 nt, Human
ggauacuagagggaggcugcacc

SEQ ID NO: 187615 - RNA, 32 nt, Human
ggauacuauucaacccauagcacauccccuca

SEQ ID NO: 187616 - RNA, 32 nt, Human
ggauacuccagccggagaguccagagccccag

SEQ ID NO: 187617 - RNA, 32 nt, Human
ggauacuccugccucagccuccuggguagcug

SEQ ID NO: 187618 - RNA, 25 nt, Human
ggauacugaugggugacauugaaaa

SEQ ID NO: 187619 - RNA, 32 nt, Human
ggauacugcuggcuuuacucuaccucauauua

SEQ ID NO: 187620 - RNA, 31 nt, Human
ggauacuggacuuucugacgcagaugaacaa

SEQ ID NO: 187621 - RNA, 20 nt, Human
ggauacuggucuucucgucg

SEQ ID NO: 187622 - RNA, 32 nt, Human
ggauacuucgccccaucucugccuucaccugu

SEQ ID NO: 187623 - RNA, 21 nt, Human
ggauacuuucaaggacauuca

SEQ ID NO: 187624 - RNA, 32 nt, Human
ggauacuuucccucagcugacugguguucuac

SEQ ID NO: 187625 - RNA, 32 nt, Human
ggauacuuugcagcuuccuauguuugagugac

SEQ ID NO: 187626 - RNA, 32 nt, Human
ggauagaacaucacaacacugcucuaguuucu

SEQ ID NO: 187627 - RNA, 32 nt, Human
ggauagaagaaggagggaaggaaguagggagg

SEQ ID NO: 187628 - RNA, 21 nt, Human
ggauagaaggacaaggacaga

SEQ ID NO: 187629 - RNA, 32 nt, Human
ggauagacaugugcacuccuuccaggaguggg

SEQ ID NO: 187630 - RNA, 32 nt, Human
ggauagaccugcguuccggacacugagcgccu

SEQ ID NO: 187631 - RNA, 32 nt, Human
ggauagagaagcaggaagagcacuggacuugg

SEQ ID NO: 187632 - RNA, 32 nt, Human
ggauagagggcuggugccacgccccaggcuca

SEQ ID NO: 187633 - RNA, 32 nt, Human
ggauagaucaaauuggcagucaggcccaugau

SEQ ID NO: 187634 - RNA, 32 nt, Human
ggauagauggguuuucuggccauguugggaau

SEQ ID NO: 187635 - RNA, 32 nt, Human
ggauagauguuaggaggagacacaccucuugu

SEQ ID NO: 187636 - RNA, 32 nt, Human
ggauagcaacaucaguuaugggagcugugagg

SEQ ID NO: 187637 - RNA, 32 nt, Human
ggauagcacaggacucagcccaaaggagggcc

SEQ ID NO: 187638 - RNA, 32 nt, Human
ggauagcagaguaugugguugcaggaggcggu

SEQ ID NO: 187639 - RNA, 32 nt, Human
ggauagcagcagccucagccucugccugucca

SEQ ID NO: 187640 - RNA, 32 nt, Human
ggauagcaggugugugccaccaugcccagcua

SEQ ID NO: 187641 - RNA, 32 nt, Human
ggauagcaguaagccacacaccugccacuuag

SEQ ID NO: 187642 - RNA, 32 nt, Human
ggauagccucagccacaaaacucugucaggca

SEQ ID NO: 187643 - RNA, 32 nt, Human
ggauagcuagucacucaggcugcagagagaga

SEQ ID NO: 187644 - RNA, 32 nt, Human
ggauagcuuaguuuuaaaagacugauuaaaaa

SEQ ID NO: 187645 - RNA, 30 nt, Human
ggauagcuucagaaaucagaaaaacauuug

SEQ ID NO: 187646 - RNA, 31 nt, Human
ggauaggaagcaagucccaugcuuagaggca

SEQ ID NO: 187647 - RNA, 32 nt, Human
ggauaggagaagaggcauccugccuggguggg

SEQ ID NO: 187648 - RNA, 32 nt, Human
ggauaggaguuugagguugcagucagcuauga

SEQ ID NO: 187649 - RNA, 32 nt, Human
ggauaggccuucagccugcucuccuccucugu

SEQ ID NO: 187650 - RNA, 32 nt, Human
ggauagggaguuguaacagagcagugccagag

SEQ ID NO: 187651 - RNA, 32 nt, Human
ggauaggggaccagagagagcuuggaauguca

SEQ ID NO: 187652 - RNA, 32 nt, Human
ggauagguggugacccacugagccugaucaua

SEQ ID NO: 187653 - RNA, 32 nt, Human
ggauaguagauggggagggagaacagaaaaau

SEQ ID NO: 187654 - RNA, 32 nt, Human
ggauaguaugagcccuaaaaauccagacucuu

SEQ ID NO: 187655 - RNA, 32 nt, Human
ggauagucaagggcaggaaaccagguuucgcc

SEQ ID NO: 187656 - RNA, 32 nt, Human
ggauagugaacucagggacaucaggguaggga

SEQ ID NO: 187657 - RNA, 32 nt, Human
ggauaguggagugcagggaugaguggccuggc

SEQ ID NO: 187658 - RNA, 32 nt, Human
ggauagugggugugacaauggaagguccacag

SEQ ID NO: 187659 - RNA, 31 nt, Human
ggauagugugagagaauuaggcuguagaaca

SEQ ID NO: 187660 - RNA, 32 nt, Human
ggauaguucccuuuugagauacuuuccugucu

SEQ ID NO: 187661 - RNA, 32 nt, Human
ggauauaagcaguugaggaagaacgguccaug

SEQ ID NO: 187662 - RNA, 32 nt, Human
ggauauacugcagcuuuacugccuuccuccuu

SEQ ID NO: 187663 - RNA, 23 nt, Human
ggauauaucggguuggggucuuc

SEQ ID NO: 187664 - RNA, 32 nt, Human
ggauauaucuaguaccuuuauuuggaaugugu

SEQ ID NO: 187665 - RNA, 32 nt, Human
ggauauaugcuaccaauaaccccagccccaac

SEQ ID NO: 187666 - RNA, 32 nt, Human
ggauauaugggccagccuggauauacaacaga

SEQ ID NO: 187667 - RNA, 32 nt, Human
ggauaucaacagcucaucugugaccaacaggg

SEQ ID NO: 187668 - RNA, 32 nt, Human
ggauaucacaugaagaaguagacugaaauauc

SEQ ID NO: 187669 - RNA, 32 nt, Human
ggauaucacaugaagaaguagacugaauauca

SEQ ID NO: 187670 - RNA, 32 nt, Human
ggauaucaguguauuuugguucuugaaauagc

SEQ ID NO: 187671 - RNA, 32 nt, Human
ggauauccagugccaucuccaaggacuuucag

SEQ ID NO: 187672 - RNA, 32 nt, Human
ggauaucccaagaaucagagguuauauaaaaa

SEQ ID NO: 187673 - RNA, 32 nt, Human
ggauaucccuggaauguggggcuugaacauug

SEQ ID NO: 187674 - RNA, 32 nt, Human
ggauaucuacaccgccuuucugaccccacccu

SEQ ID NO: 187675 - RNA, 32 nt, Human
ggauaucugacuggaaccacagauacagaauc

SEQ ID NO: 187676 - RNA, 31 nt, Human
ggauaucugcucucugggauggcaucaguug

SEQ ID NO: 187677 - RNA, 32 nt, Human
ggauaucuggauugagauggccuaggaaaagu

SEQ ID NO: 187678 - RNA, 20 nt, Human
ggauaucuuuuggccgugua

SEQ ID NO: 187679 - RNA, 32 nt, Human
ggauaugagaaagcaaacuagauggaauaaau

SEQ ID NO: 187680 - RNA, 32 nt, Human
ggauaugaggcaggagggcuuggggacaacug

SEQ ID NO: 187681 - RNA, 32 nt, Human
ggauaugauuacugcaggaacuucuggaggaa

SEQ ID NO: 187682 - RNA, 32 nt, Human
ggauaugcacguuuguucuggaaaagauagaa

SEQ ID NO: 187683 - RNA, 32 nt, Human
ggauaugccuccgcaacucacacaccugccug

SEQ ID NO: 187684 - RNA, 31 nt, Human
ggauaugcucacuuaaauuguugaaaaccau

SEQ ID NO: 187685 - RNA, 32 nt, Human
ggauaugcuccccauaaauaccaccuugccac

SEQ ID NO: 187686 - RNA, 32 nt, Human
ggauaugcuccuggguggggacugggcugugc

SEQ ID NO: 187687 - RNA, 32 nt, Human
ggauauggagccaauucacuguggccgaucac

SEQ ID NO: 187688 - RNA, 32 nt, Human
ggauauggagcuuuggagguucagagaagaga

SEQ ID NO: 187689 - RNA, 32 nt, Human
ggauaugguauuccuuggaaucuggggaaaga

SEQ ID NO: 187690 - RNA, 32 nt, Human
ggauauggucuugagccaguaaucuuuguacu

SEQ ID NO: 187691 - RNA, 32 nt, Human
ggauauguaacaaaccuuacaaauauaaggaa

SEQ ID NO: 187692 - RNA, 32 nt, Human
ggauauguguuuuggauguaugauaugcuugg

SEQ ID NO: 187693 - RNA, 20 nt, Human
ggauauuaaacagaaacucu

SEQ ID NO: 187694 - RNA, 32 nt, Human
ggauauuaaaguuaggggaaagaaaagaucau

SEQ ID NO: 187695 - RNA, 23 nt, Human
ggauauuaacagucugucaguua

SEQ ID NO: 187696 - RNA, 32 nt, Human
ggauauuauuggagacgggguuucacuguguu

SEQ ID NO: 187697 - RNA, 32 nt, Human
ggauauucacugcuguggcaaggccuguagag

SEQ ID NO: 187698 - RNA, 32 nt, Human
ggauauuccucuuccucuaucaaggccuucuc

SEQ ID NO: 187699 - RNA, 32 nt, Human
ggauauucucuuccugauggugcagaacccag

SEQ ID NO: 187700 - RNA, 32 nt, Human
ggauauucugcagcgcuucugucuuuuucuug

SEQ ID NO: 187701 - RNA, 32 nt, Human
ggauauugaggcaggagaaucgcuugaaccca

SEQ ID NO: 187702 - RNA, 32 nt, Human
ggauauugagggcuucagcugcugcuauuaug

SEQ ID NO: 187703 - RNA, 31 nt, Human
ggauauuggagaccuguuuuagaaggagccu

SEQ ID NO: 187704 - RNA, 32 nt, Human
ggauauuucagcccucuccauccuagucaaca

SEQ ID NO: 187705 - RNA, 32 nt, Human
ggauauuucuaauauuuguauuucauggugga

SEQ ID NO: 187706 - RNA, 32 nt, Human
ggauauuugcuaugcagcaccaugaagaagag

SEQ ID NO: 187707 - RNA, 32 nt, Human
ggauauuuuacaaccaaauacagguuuucugg

SEQ ID NO: 187708 - RNA, 32 nt, Human
ggauauuuuguacaaaaagaaaacccacggga

SEQ ID NO: 187709 - RNA, 32 nt, Human
ggaucaaaagagacuugccuuuuaaggaucga

SEQ ID NO: 187710 - RNA, 32 nt, Human
ggaucaaagcaaaccuaaauguguacaucucc

SEQ ID NO: 187711 - RNA, 32 nt, Human
ggaucaacacaaaguguuccugguugguugag

SEQ ID NO: 187712 - RNA, 32 nt, Human
ggaucaacagugaaaagacagaagaggcaaua

SEQ ID NO: 187713 - RNA, 32 nt, Human
ggaucaaccugacagggaucugggagaggcua

SEQ ID NO: 187714 - RNA, 32 nt, Human
ggaucaacuguacgccuuugguaucugaccau

SEQ ID NO: 187715 - RNA, 32 nt, Human
ggaucaacuuacagcuacuauaagauguacua

SEQ ID NO: 187716 - RNA, 32 nt, Human
ggaucaagcaaucccacuucagccucuugaau

SEQ ID NO: 187717 - RNA, 32 nt, Human
ggaucaagcaggcacuucaagccucaauagga

SEQ ID NO: 187718 - RNA, 32 nt, Human
ggaucaagcaggcauuuggagcacaggugucu

SEQ ID NO: 187719 - RNA, 31 nt, Human
ggaucaagcucauggccucagaugcuccauc

SEQ ID NO: 187720 - RNA, 32 nt, Human
ggaucaaggaagcagagauggacggugaggca

SEQ ID NO: 187721 - RNA, 32 nt, Human
ggaucaaggaaggcugccccuguacccugugg

SEQ ID NO: 187722 - RNA, 32 nt, Human
ggaucaaggcucaugggcucugagccaaagaa

SEQ ID NO: 187723 - RNA, 24 nt, Human
ggaucaagggauucuccugccuca

SEQ ID NO: 187724 - RNA, 32 nt, Human
ggaucaagggcaacauaguacuucuccuucac

SEQ ID NO: 187725 - RNA, 24 nt, Human
ggaucaagugauccuccugccuca

SEQ ID NO: 187726 - RNA, 21 nt, Human
ggaucaagugauucuccugcc

SEQ ID NO: 187727 - RNA, 24 nt, Human
ggaucaagugauucuccugccuca

SEQ ID NO: 187728 - RNA, 24 nt, Human
ggaucaagugauucuccugccuua

SEQ ID NO: 187729 - RNA, 32 nt, Human
ggaucaaguucagccaccgaauugcuuuuauc

SEQ ID NO: 187730 - RNA, 32 nt, Human
ggaucaaugaccccuguaaggggccagagccu

SEQ ID NO: 187731 - RNA, 19 nt, Human
ggaucaaugcaguggcuga

SEQ ID NO: 187732 - RNA, 32 nt, Human
ggaucaauuuuauuuuguaucuucauuuuaug

SEQ ID NO: 187733 - RNA, 32 nt, Human
ggaucacaagagcccaggagguugagaaugca

SEQ ID NO: 187734 - RNA, 32 nt, Human
ggaucacaagggcaggagaucgagaccauccu

SEQ ID NO: 187735 - RNA, 32 nt, Human
ggaucacaaggucaggaguuugagacuagccu

SEQ ID NO: 187736 - RNA, 32 nt, Human
ggaucacaccacugcacuccagccuggacaac

SEQ ID NO: 187737 - RNA, 32 nt, Human
ggaucacaccacugcacuccagccugggugac

SEQ ID NO: 187738 - RNA, 32 nt, Human
ggaucacaccacugcacuucagccugggcaac

SEQ ID NO: 187739 - RNA, 32 nt, Human
ggaucacaccauugcuguccagccugggugac

SEQ ID NO: 187740 - RNA, 32 nt, Human
ggaucacaccugcaaucccagcacuuugggag

SEQ ID NO: 187741 - RNA, 32 nt, Human
ggaucacaccuguaaucccagcacuuugggag

SEQ ID NO: 187742 - RNA, 32 nt, Human
ggaucacacgccccacauucugggucaagcau

SEQ ID NO: 187743 - RNA, 32 nt, Human
ggaucacaggaaguggaggagccagaggugcc

SEQ ID NO: 187744 - RNA, 32 nt, Human
ggaucacaggcacacaccaccaugcccggcua

SEQ ID NO: 187745 - RNA, 32 nt, Human
ggaucacaggcaugcaccaccaugccuggcua

SEQ ID NO: 187746 - RNA, 32 nt, Human
ggaucacaggccuggccagccuaggaguugcc

SEQ ID NO: 187747 - RNA, 32 nt, Human
ggaucacaggcgccagccacugcgcccggccc

SEQ ID NO: 187748 - RNA, 32 nt, Human
ggaucacaggugugcaccaccaugcccagcua

SEQ ID NO: 187749 - RNA, 32 nt, Human
ggaucacagugcugggaaaugggagcacagua

SEQ ID NO: 187750 - RNA, 32 nt, Human
ggaucacaugcuuuugucuccacagcaaccag

SEQ ID NO: 187751 - RNA, 32 nt, Human
ggaucacauuucaacaugugauuugacaggau

SEQ ID NO: 187752 - RNA, 32 nt, Human
ggaucaccacaaccuccgucucccagguucaa

SEQ ID NO: 187753 - RNA, 32 nt, Human
ggaucaccagccccaaggucccgaagggcagg

SEQ ID NO: 187754 - RNA, 32 nt, Human
ggaucaccggcgugccccaccaugucagacgc

SEQ ID NO: 187755 - RNA, 18 nt, Human
ggaucaccugaggucagg

SEQ ID NO: 187756 - RNA, 22 nt, Human
ggaucaccugccccaccuguca

SEQ ID NO: 187757 - RNA, 32 nt, Human
ggaucacgagggcagauuucucccuugcuguu

SEQ ID NO: 187758 - RNA, 18 nt, Human
ggaucacgagguggugaa

SEQ ID NO: 187759 - RNA, 32 nt, Human
ggaucacgccacugaacuccagccugggugac

SEQ ID NO: 187760 - RNA, 32 nt, Human
ggaucacgccacugcacuccagcuugggugac

SEQ ID NO: 187761 - RNA, 32 nt, Human
ggaucacgccuguaaucccagcacuuagggag

SEQ ID NO: 187762 - RNA, 32 nt, Human
ggaucacgccuguaaucccagcgcuuugggag

SEQ ID NO: 187763 - RNA, 32 nt, Human
ggaucacggcagggccagaggguggugugguc

SEQ ID NO: 187764 - RNA, 32 nt, Human
ggaucacgucacugcauuccagccuggauaau

SEQ ID NO: 187765 - RNA, 32 nt, Human
ggaucacuacaaccuccaccucccggguucaa

SEQ ID NO: 187766 - RNA, 32 nt, Human
ggaucacuaguggccagcauccccagaguucc

SEQ ID NO: 187767 - RNA, 32 nt, Human
ggaucacucaggcuccagcccagcccuacccc

SEQ ID NO: 187768 - RNA, 32 nt, Human
ggaucacucuacagccugccuccuggguuuuc

SEQ ID NO: 187769 - RNA, 32 nt, Human
ggaucacugagaccagccugggcaacauagag

SEQ ID NO: 187770 - RNA, 32 nt, Human
ggaucacugcaaccuccaccuccuagguucaa

SEQ ID NO: 187771 - RNA, 32 nt, Human
ggaucacugcaaccucugccuccuggguucaa

SEQ ID NO: 187772 - RNA, 32 nt, Human
ggaucacuucagccuaggacguugaggcugca

SEQ ID NO: 187773 - RNA, 32 nt, Human
ggaucacuugaacccaggagguugaggcugca

SEQ ID NO: 187774 - RNA, 21 nt, Human
ggaucacuugaaccccagagg

SEQ ID NO: 187775 - RNA, 21 nt, Human
ggaucacuugagccccagagg

SEQ ID NO: 187776 - RNA, 32 nt, Human
ggaucacuugagcucaggagcuugagaccagc

SEQ ID NO: 187777 - RNA, 32 nt, Human
ggaucacuugagcucaggaguuugagaccagc

SEQ ID NO: 187778 - RNA, 31 nt, Human
ggaucacuugaggucggaguuggagaucagc

SEQ ID NO: 187779 - RNA, 32 nt, Human
ggaucacuugaguucaauaccagccugagcaa

SEQ ID NO: 187780 - RNA, 32 nt, Human
ggaucacuuuugucuguuccagccugcuugca

SEQ ID NO: 187781 - RNA, 32 nt, Human
ggaucagaacccaugggaaacaggagguacua

SEQ ID NO: 187782 - RNA, 32 nt, Human
ggaucagaagggaccagcuggagaccacggag

SEQ ID NO: 187783 - RNA, 21 nt, Human
ggaucagaccaccaccccuca

SEQ ID NO: 187784 - RNA, 22 nt, Human
ggaucagacucagaaagacacu

SEQ ID NO: 187785 - RNA, 32 nt, Human
ggaucagagaaagggagggcagagggagaaug

SEQ ID NO: 187786 - RNA, 21 nt, Human
ggaucagagaccagcagcagg

SEQ ID NO: 187787 - RNA, 32 nt, Human
ggaucagagagaaaggagaaccauccaggaga

SEQ ID NO: 187788 - RNA, 19 nt, Human
ggaucagauagauguuaua

SEQ ID NO: 187789 - RNA, 32 nt, Human
ggaucagauagcaggaggaacuuucaaaaguc

SEQ ID NO: 187790 - RNA, 32 nt, Human
ggaucagaugauaaaccacuacgcccgggcug

SEQ ID NO: 187791 - RNA, 18 nt, Human
ggaucagcaggccaggca

SEQ ID NO: 187792 - RNA, 32 nt, Human
ggaucagcaguaucacuaucacuugggcuagu

SEQ ID NO: 187793 - RNA, 32 nt, Human
ggaucagcaucauuaacaccuuccccaccccc

SEQ ID NO: 187794 - RNA, 32 nt, Human
ggaucagccacaucaacucaguuguccaccac

SEQ ID NO: 187795 - RNA, 32 nt, Human
ggaucagccacgggauuccagccuuggucuuc

SEQ ID NO: 187796 - RNA, 32 nt, Human
ggaucagccagccaugccuccaguucagguac

SEQ ID NO: 187797 - RNA, 32 nt, Human
ggaucagcuggcugggaggauuagugagcacc

SEQ ID NO: 187798 - RNA, 32 nt, Human
ggaucaggaaucaggagagaugcugaacacaa

SEQ ID NO: 187799 - RNA, 20 nt, Human
ggaucaggacagcugcaggu

SEQ ID NO: 187800 - RNA, 32 nt, Human
ggaucaggaugccguguuuggcccagagacuc

SEQ ID NO: 187801 - RNA, 23 nt, Human
ggaucaggcagcggcucaggcga

SEQ ID NO: 187802 - RNA, 19 nt, Human
ggaucaggcaggguggcuc

SEQ ID NO: 187803 - RNA, 32 nt, Human
ggaucaggccaaccccaaagaagaagugacca

SEQ ID NO: 187804 - RNA, 32 nt, Human
ggaucaggccacugcacuccagccuggguaac

SEQ ID NO: 187805 - RNA, 32 nt, Human
ggaucaggcugcuggaaacacagucacuuggg

SEQ ID NO: 187806 - RNA, 32 nt, Human
ggaucagggagguggagggacagugugaauaa

SEQ ID NO: 187807 - RNA, 22 nt, Human
ggaucaggggaucacccugaga

SEQ ID NO: 187808 - RNA, 32 nt, Human
ggaucagggguaggaauggaaggauggagcau

SEQ ID NO: 187809 - RNA, 32 nt, Human
ggaucagguucucugggcucucgcuccacuug

SEQ ID NO: 187810 - RNA, 32 nt, Human
ggaucagguuuggccaggagaacacucagagc

SEQ ID NO: 187811 - RNA, 32 nt, Human
ggaucaguaauauuucauuuuauuucaguuuu

SEQ ID NO: 187812 - RNA, 32 nt, Human
ggaucagucugcugcaucuucuaccuccugau

SEQ ID NO: 187813 - RNA, 32 nt, Human
ggaucagugacauucagggauguggccauuga

SEQ ID NO: 187814 - RNA, 32 nt, Human
ggaucaguggggccccaaagcccagcccggcu

SEQ ID NO: 187815 - RNA, 22 nt, Human
ggaucagugucccacccagagg

SEQ ID NO: 187816 - RNA, 32 nt, Human
ggaucauacuaacuacaaccagucuuccauca

SEQ ID NO: 187817 - RNA, 32 nt, Human
ggaucauaucuagcuaaaagcaagaacaccca

SEQ ID NO: 187818 - RNA, 32 nt, Human
ggaucaucuuguagcaugaaugcagacuggag

SEQ ID NO: 187819 - RNA, 32 nt, Human
ggaucaucuuugucuuuugggaccuaauacuu

SEQ ID NO: 187820 - RNA, 32 nt, Human
ggaucaugaagacgaguuuaaugaggaggaug

SEQ ID NO: 187821 - RNA, 32 nt, Human
ggaucaugagaucaggaguuugagacuagccu

SEQ ID NO: 187822 - RNA, 32 nt, Human
ggaucaugccacugcacuccaaccugggcagc

SEQ ID NO: 187823 - RNA, 32 nt, Human
ggaucaugccacugcacuccagcuugggcgac

SEQ ID NO: 187824 - RNA, 32 nt, Human
ggaucaugccuguaaucccagcacuuugggaa

SEQ ID NO: 187825 - RNA, 32 nt, Human
ggaucaugccuguaaucccaguacuuugggag

SEQ ID NO: 187826 - RNA, 32 nt, Human
ggaucauggagacgaacuaaaccaucauggag

SEQ ID NO: 187827 - RNA, 32 nt, Human
ggaucauggggacagaucccucaugaauggcu

SEQ ID NO: 187828 - RNA, 32 nt, Human
ggaucauggugaggacuagggguaaggucagg

SEQ ID NO: 187829 - RNA, 32 nt, Human
ggaucauguacaacagcaugccuagugagacu

SEQ ID NO: 187830 - RNA, 32 nt, Human
ggaucaugucuguaauccuagcacugugggag

SEQ ID NO: 187831 - RNA, 32 nt, Human
ggaucaugugccagcuucaucuguucucaagu

SEQ ID NO: 187832 - RNA, 32 nt, Human
ggaucaugugccagcuucgucuguucucaauu

SEQ ID NO: 187833 - RNA, 32 nt, Human
ggaucaugugccagcuucgucuguucuuaauu

SEQ ID NO: 187834 - RNA, 32 nt, Human
ggaucauugcagacucugccucucaggcucag

SEQ ID NO: 187835 - RNA, 32 nt, Human
ggaucauuucagcccaggagguuguggauaca

SEQ ID NO: 187836 - RNA, 32 nt, Human
ggaucauuuccauaagucugcuuuucagggau

SEQ ID NO: 187837 - RNA, 32 nt, Human
ggaucauuucuacuugcugugcauuuuaacca

SEQ ID NO: 187838 - RNA, 32 nt, Human
ggaucauuugagcucaugagggcccaggaggu

SEQ ID NO: 187839 - RNA, 32 nt, Human
ggaucauuuucuucggaaaaaguuuuccaaag

SEQ ID NO: 187840 - RNA, 32 nt, Human
ggauccaaaguggcaggaggucuguguuguca

SEQ ID NO: 187841 - RNA, 32 nt, Human
ggauccaagaaccacagcucaucugccaacaa

SEQ ID NO: 187842 - RNA, 25 nt, Human
ggauccaaguuuccuuauuugugaa

SEQ ID NO: 187843 - RNA, 32 nt, Human
ggauccacgacgcuuaaauacagcuuuuggau

SEQ ID NO: 187844 - RNA, 19 nt, Human
ggauccacgucccacgggc

SEQ ID NO: 187845 - RNA, 32 nt, Human
ggauccagaagcauugaaggggaccagccgcu

SEQ ID NO: 187846 - RNA, 32 nt, Human
ggauccagacagggcacauugggggcauggaa

SEQ ID NO: 187847 - RNA, 32 nt, Human
ggauccagagccacagaaagaaauguaggugu

SEQ ID NO: 187848 - RNA, 32 nt, Human
ggauccagcugugcuccagucuguccccuccu

SEQ ID NO: 187849 - RNA, 32 nt, Human
ggauccaggaauaugacacaaagguggaauaa

SEQ ID NO: 187850 - RNA, 32 nt, Human
ggauccaggagaaggagacgacuccugaguga

SEQ ID NO: 187851 - RNA, 32 nt, Human
ggauccaggaggagcaggggccagcagugggc

SEQ ID NO: 187852 - RNA, 32 nt, Human
ggauccaggguaagggguuaaggaggugaugc

SEQ ID NO: 187853 - RNA, 32 nt, Human
ggauccaggucugcaaggccagcccgacccug

SEQ ID NO: 187854 - RNA, 32 nt, Human
ggauccaguaccuccaaaacaccagaauccac

SEQ ID NO: 187855 - RNA, 31 nt, Human
ggauccagugagaggaaagauucugggugcu

SEQ ID NO: 187856 - RNA, 32 nt, Human
ggauccagugaucucuacuggcccagggcuuc

SEQ ID NO: 187857 - RNA, 20 nt, Human
ggauccaguguccacacuua

SEQ ID NO: 187858 - RNA, 32 nt, Human
ggauccagugugcagaagagccagcagggaac

SEQ ID NO: 187859 - RNA, 32 nt, Human
ggauccaguucccucaucucuggcaggaaaga

SEQ ID NO: 187860 - RNA, 32 nt, Human
ggauccaucuggguuggucuguggauuuuuaa

SEQ ID NO: 187861 - RNA, 32 nt, Human
ggauccauuaguucucauaccaugaagaaauu

SEQ ID NO: 187862 - RNA, 32 nt, Human
ggaucccaaaaacuucagaaagaggauagcaa

SEQ ID NO: 187863 - RNA, 32 nt, Human
ggaucccaaaaagguacaggcagcaguugcac

SEQ ID NO: 187864 - RNA, 32 nt, Human
ggaucccaaggcaggagagccaaagcuggagu

SEQ ID NO: 187865 - RNA, 32 nt, Human
ggaucccaagggacccucaaggaccucgaggu

SEQ ID NO: 187866 - RNA, 19 nt, Human
ggaucccagaaccuggaca

SEQ ID NO: 187867 - RNA, 32 nt, Human
ggaucccagcaacccuaaugcuggaaaggugc

SEQ ID NO: 187868 - RNA, 32 nt, Human
ggaucccagcacuuugggaggccgaggcaggc

SEQ ID NO: 187869 - RNA, 32 nt, Human
ggaucccagccuaaaagacaccagagaccuca

SEQ ID NO: 187870 - RNA, 32 nt, Human
ggaucccagcugguagagcagccuccaccugg

SEQ ID NO: 187871 - RNA, 32 nt, Human
ggaucccaggacuccggcuuucgccgagccgc

SEQ ID NO: 187872 - RNA, 32 nt, Human
ggaucccaggaguucaaauccugccugggcaa

SEQ ID NO: 187873 - RNA, 32 nt, Human
ggaucccaggggacccgcaggaugugucaggc

SEQ ID NO: 187874 - RNA, 32 nt, Human
ggaucccaguguugccuuaacagggugucugu

SEQ ID NO: 187875 - RNA, 32 nt, Human
ggaucccauccaguugguuuccaagggugauc

SEQ ID NO: 187876 - RNA, 32 nt, Human
ggauccccaagaagagggaaggcaggaggggc

SEQ ID NO: 187877 - RNA, 19 nt, Human
ggauccccaccugcgccca

SEQ ID NO: 187878 - RNA, 22 nt, Human
ggauccccagccuacugccucu

SEQ ID NO: 187879 - RNA, 32 nt, Human
ggauccccgucagcucauccaggcuggacaaa

SEQ ID NO: 187880 - RNA, 32 nt, Human
ggauccccguuuuacagaggaggaaacugagg

SEQ ID NO: 187881 - RNA, 21 nt, Human
ggauccccuggcccauccucu

SEQ ID NO: 187882 - RNA, 32 nt, Human
ggauccccugggagaacuuggcgggccgagag

SEQ ID NO: 187883 - RNA, 18 nt, Human
ggauccccuuccuuuaca

SEQ ID NO: 187884 - RNA, 32 nt, Human
ggaucccggaagacggaacacugugugcaacg

SEQ ID NO: 187885 - RNA, 32 nt, Human
ggaucccggaggugaaagaaacuucccccuga

SEQ ID NO: 187886 - RNA, 32 nt, Human
ggaucccggccaaggcggaggcugcggcuccg

SEQ ID NO: 187887 - RNA, 32 nt, Human
ggaucccgugcgccuggagacaggguccagau

SEQ ID NO: 187888 - RNA, 32 nt, Human
ggaucccgugggccucacaugccaggucacca

SEQ ID NO: 187889 - RNA, 32 nt, Human
ggaucccuaaaauuaggagcaacaaccacuug

SEQ ID NO: 187890 - RNA, 32 nt, Human
ggaucccuaaccuggaggaaauugccagggac

SEQ ID NO: 187891 - RNA, 32 nt, Human
ggaucccucccagauccucugcugacuccaua

SEQ ID NO: 187892 - RNA, 32 nt, Human
ggaucccuccccugcuaaucugaacugugucc

SEQ ID NO: 187893 - RNA, 32 nt, Human
ggaucccucccgcuugucaggaggcggccagc

SEQ ID NO: 187894 - RNA, 32 nt, Human
ggaucccugacgauugcuuagcauuaaggccc

SEQ ID NO: 187895 - RNA, 32 nt, Human
ggaucccugcuuucccccucuuccuggcucau

SEQ ID NO: 187896 - RNA, 32 nt, Human
ggaucccugggccacagagcaagucuccaaau

SEQ ID NO: 187897 - RNA, 32 nt, Human
ggaucccuggggagaguggagagaggggcaga

SEQ ID NO: 187898 - RNA, 32 nt, Human
ggaucccuuaguuucaucacucaucuggacug

SEQ ID NO: 187899 - RNA, 32 nt, Human
ggaucccuucaagacuuugucacagccucuau

SEQ ID NO: 187900 - RNA, 32 nt, Human
ggaucccuugagccuaggagguugaggcugca

SEQ ID NO: 187901 - RNA, 32 nt, Human
ggaucccuugagcucaggaguuugaggccagg

SEQ ID NO: 187902 - RNA, 32 nt, Human
ggaucccuugaguccaggagguugaggcugca

SEQ ID NO: 187903 - RNA, 21 nt, Human
ggauccgacgggccccagagg

SEQ ID NO: 187904 - RNA, 22 nt, Human
ggauccgcaagcugcgcgccca

SEQ ID NO: 187905 - RNA, 32 nt, Human
ggauccggaccagccaaggaaggguccaggug

SEQ ID NO: 187906 - RNA, 32 nt, Human
ggauccggaguauagugcuugauucuauugag

SEQ ID NO: 187907 - RNA, 32 nt, Human
ggauccggcugccagcccugaggccaagcacg

SEQ ID NO: 187908 - RNA, 32 nt, Human
ggauccggggcugagggcaggggucggguggg

SEQ ID NO: 187909 - RNA, 32 nt, Human
ggauccguacuuggcagaugaggaaauugauu

SEQ ID NO: 187910 - RNA, 32 nt, Human
ggauccuacaauauuuuauucuaggguuucuu

SEQ ID NO: 187911 - RNA, 32 nt, Human
ggauccuacaguguaucaacaaaaggagccaa

SEQ ID NO: 187912 - RNA, 32 nt, Human
ggauccuaguagcuguugcucucuguauuguu

SEQ ID NO: 187913 - RNA, 32 nt, Human
ggauccuaguguuuuaauuaccugugugcagc

SEQ ID NO: 187914 - RNA, 32 nt, Human
ggauccucagccaggccugacuggaaggagcu

SEQ ID NO: 187915 - RNA, 32 nt, Human
ggauccucauaggucagggagugggggagggg

SEQ ID NO: 187916 - RNA, 32 nt, Human
ggauccuccugccucagucucccaacuaagug

SEQ ID NO: 187917 - RNA, 21 nt, Human
ggauccucucagucccagagc

SEQ ID NO: 187918 - RNA, 32 nt, Human
ggauccucucucucuugagcaaaguauagcaa

SEQ ID NO: 187919 - RNA, 32 nt, Human
ggauccucuggaagcuguauuucuugaauuag

SEQ ID NO: 187920 - RNA, 32 nt, Human
ggauccugauuggggugccaagagaaacagca

SEQ ID NO: 187921 - RNA, 32 nt, Human
ggauccugcaggaagccugcgggcggggacug

SEQ ID NO: 187922 - RNA, 32 nt, Human
ggauccugccaacuuucuggggcuucuggaug

SEQ ID NO: 187923 - RNA, 32 nt, Human
ggauccugccgcguacacagcaggugcagaau

SEQ ID NO: 187924 - RNA, 32 nt, Human
ggauccuggaaggugaguguguaugaauugcg

SEQ ID NO: 187925 - RNA, 32 nt, Human
ggauccuggagcugugcuguggcuugaggaga

SEQ ID NO: 187926 - RNA, 32 nt, Human
ggauccuggccauuaaggaaaccuugccuucg

SEQ ID NO: 187927 - RNA, 32 nt, Human
ggauccugugcugcugucugguugagagccug

SEQ ID NO: 187928 - RNA, 32 nt, Human
ggauccuguggcuggaagcgaggaggcuccac

SEQ ID NO: 187929 - RNA, 32 nt, Human
ggauccuguucccagacaggucccugaguacu

SEQ ID NO: 187930 - RNA, 32 nt, Human
ggauccuuccauucuuucauccuucgcauuca

SEQ ID NO: 187931 - RNA, 32 nt, Human
ggauccuucucaggaagcuucaugucuaaugg

SEQ ID NO: 187932 - RNA, 32 nt, Human
ggauccuugccuggaacaaguuauggaaagaa

SEQ ID NO: 187933 - RNA, 32 nt, Human
ggauccuuggcaggaaagcagggauuguguuc

SEQ ID NO: 187934 - RNA, 32 nt, Human
ggauccuuucuugauugguucuuccaaacaaa

SEQ ID NO: 187935 - RNA, 32 nt, Human
ggaucgauugagccucggaggucgagaucagc

SEQ ID NO: 187936 - RNA, 32 nt, Human
ggaucgcaccacugcacuccagccugggcuac

SEQ ID NO: 187937 - RNA, 32 nt, Human
ggaucgcaccacugcacuccagccuggguuac

SEQ ID NO: 187938 - RNA, 32 nt, Human
ggaucgcaccgcugcacuccagccugggugac

SEQ ID NO: 187939 - RNA, 32 nt, Human
ggaucgccugggaggugaggugugugugaccc

SEQ ID NO: 187940 - RNA, 32 nt, Human
ggaucgccuugauccaggggccgccgggccgc

SEQ ID NO: 187941 - RNA, 32 nt, Human
ggaucgcgcagggcccgcagggcacaggcgcc

SEQ ID NO: 187942 - RNA, 32 nt, Human
ggaucgcgccacugcauuccagccuggacgac

SEQ ID NO: 187943 - RNA, 32 nt, Human
ggaucgcgccacuguacuccagccugggugac

SEQ ID NO: 187944 - RNA, 32 nt, Human
ggaucgcgccauugcacuccagccuggcugac

SEQ ID NO: 187945 - RNA, 32 nt, Human
ggaucgcgccauugcacuccagccugggcaac

SEQ ID NO: 187946 - RNA, 32 nt, Human
ggaucgcuugaauccaggaguuagaccagccu

SEQ ID NO: 187947 - RNA, 32 nt, Human
ggaucgcuugagcucaggaguucgagagcagc

SEQ ID NO: 187948 - RNA, 32 nt, Human
ggaucgcuugagcucaggaguuugagaccagc

SEQ ID NO: 187949 - RNA, 32 nt, Human
ggaucgcuugggccugggaggcggagguugca

SEQ ID NO: 187950 - RNA, 32 nt, Human
ggaucggaggcugaaggaagauuauagagacu

SEQ ID NO: 187951 - RNA, 32 nt, Human
ggaucggaggcuugucagagcugggagggguu

SEQ ID NO: 187952 - RNA, 32 nt, Human
ggaucggauccagcacauccaggcuucuccuc

SEQ ID NO: 187953 - RNA, 32 nt, Human
ggaucggcaggauguuagggcagcagcagcag

SEQ ID NO: 187954 - RNA, 32 nt, Human
ggaucggccacugcacuccgggcugggcgaca

SEQ ID NO: 187955 - RNA, 32 nt, Human
ggaucgggcacugguuccuccuuguccccgcu

SEQ ID NO: 187956 - RNA, 32 nt, Human
ggaucggucucuucccgccgggucucuuaccg

SEQ ID NO: 187957 - RNA, 32 nt, Human
ggaucgguugagcccaggagguuguggcugca

SEQ ID NO: 187958 - RNA, 32 nt, Human
ggaucguaccacugcacuccagccugggcuac

SEQ ID NO: 187959 - RNA, 32 nt, Human
ggaucguacuacugcacuccagcauggaagac

SEQ ID NO: 187960 - RNA, 32 nt, Human
ggaucgucuauuggaugugaaaccagagaugc

SEQ ID NO: 187961 - RNA, 32 nt, Human
ggaucgugccacugcacuccaaccugggugag

SEQ ID NO: 187962 - RNA, 32 nt, Human
ggaucgugccacugcacucuagccggggcgac

SEQ ID NO: 187963 - RNA, 32 nt, Human
ggaucuaaaugccuugugcacugcaaaauggg

SEQ ID NO: 187964 - RNA, 32 nt, Human
ggaucuaacccuaggaucuggcuagggcucug

SEQ ID NO: 187965 - RNA, 32 nt, Human
ggaucuaagggaagaucacuguaguuuaguuc

SEQ ID NO: 187966 - RNA, 32 nt, Human
ggaucuacacccugccuuggcugcuacagcuu

SEQ ID NO: 187967 - RNA, 32 nt, Human
ggaucuaccuuugaaggccaggccuuccgagg

SEQ ID NO: 187968 - RNA, 32 nt, Human
ggaucuacuuuaauuccacacucucauuaaua

SEQ ID NO: 187969 - RNA, 32 nt, Human
ggaucuagagaugcucucugcuugacaacaaa

SEQ ID NO: 187970 - RNA, 18 nt, Human
ggaucuagcuucuccucg

SEQ ID NO: 187971 - RNA, 32 nt, Human
ggaucuagcuuuuggaaaauggugguuaaauu

SEQ ID NO: 187972 - RNA, 32 nt, Human
ggaucuaguguccucccaggagucagaucaua

SEQ ID NO: 187973 - RNA, 32 nt, Human
ggaucuaugccuggaauccuggcagggauucc

SEQ ID NO: 187974 - RNA, 32 nt, Human
ggaucucaagccuucagcucuccccugaacuc

SEQ ID NO: 187975 - RNA, 32 nt, Human
ggaucucaaugcuuuccacauuucuuucucca

SEQ ID NO: 187976 - RNA, 31 nt, Human
ggaucucacagcugcagucuaauaguaacac

SEQ ID NO: 187977 - RNA, 32 nt, Human
ggaucucacgugagauuccugaggcaugauua

SEQ ID NO: 187978 - RNA, 32 nt, Human
ggaucucagggaagcccagggaagagagggac

SEQ ID NO: 187979 - RNA, 32 nt, Human
ggaucuccagauacuggauagccagcauccuc

SEQ ID NO: 187980 - RNA, 22 nt, Human
ggaucuccaggaguccccugca

SEQ ID NO: 187981 - RNA, 32 nt, Human
ggaucuccagugccugggccaggaaagcccuc

SEQ ID NO: 187982 - RNA, 32 nt, Human
ggaucucccacacucaccuggcaccacccucc

SEQ ID NO: 187983 - RNA, 32 nt, Human
ggaucucccauagcuucuccuuugcuuccagg

SEQ ID NO: 187984 - RNA, 32 nt, Human
ggaucuccugcaggguccuggggacaaacccu

SEQ ID NO: 187985 - RNA, 32 nt, Human
ggaucucgaggagguggugaaaaagagggauu

SEQ ID NO: 187986 - RNA, 32 nt, Human
ggaucucggcugccuuuuccucuaucuugagc

SEQ ID NO: 187987 - RNA, 32 nt, Human
ggaucucgguggacucagucacaaaacaaagg

SEQ ID NO: 187988 - RNA, 32 nt, Human
ggaucucucgggccagggagguugaggcugca

SEQ ID NO: 187989 - RNA, 32 nt, Human
ggaucucucuaggagcugacacucgaaccuuc

SEQ ID NO: 187990 - RNA, 32 nt, Human
ggaucucugaacacugacaauuugucauuuug

SEQ ID NO: 187991 - RNA, 32 nt, Human
ggaucucugaagaacccacagaccaggugaau

SEQ ID NO: 187992 - RNA, 32 nt, Human
ggaucugaaacagaguuuaugaccucagagac

SEQ ID NO: 187993 - RNA, 32 nt, Human
ggaucugaaaguacagaacaugaacauugaug

SEQ ID NO: 187994 - RNA, 23 nt, Human
ggaucugaauccuccacuuccca

SEQ ID NO: 187995 - RNA, 32 nt, Human
ggaucugagaaggagaaggaaaugugggguag

SEQ ID NO: 187996 - RNA, 32 nt, Human
ggaucugagaugguuuuugcaucuuuccagga

SEQ ID NO: 187997 - RNA, 32 nt, Human
ggaucugagcacuugucugugcuuggggagca

SEQ ID NO: 187998 - RNA, 32 nt, Human
ggaucugagcucccaccucccuucccaccuac

SEQ ID NO: 187999 - RNA, 32 nt, Human
ggaucugauggcaaaguauucuagccuggaag

SEQ ID NO: 188000 - RNA, 32 nt, Human
ggaucugcacaaggucuuguauacaaauguuc

SEQ ID NO: 188001 - RNA, 32 nt, Human
ggaucugccaggacugggaagggaggcaggag

SEQ ID NO: 188002 - RNA, 32 nt, Human
ggaucugccauccauucugcagucuccagcag

SEQ ID NO: 188003 - RNA, 32 nt, Human
ggaucugcgcaggaagggugacuuuaagggau

SEQ ID NO: 188004 - RNA, 32 nt, Human
ggaucugcucccucucgcucucucacuccacu

SEQ ID NO: 188005 - RNA, 32 nt, Human
ggaucuggagguuguucucugcagagaaccag

SEQ ID NO: 188006 - RNA, 32 nt, Human
ggaucuggagucugcauucacgcacgcuggug

SEQ ID NO: 188007 - RNA, 32 nt, Human
ggaucuggccugccuuucuuuggucagucccu

SEQ ID NO: 188008 - RNA, 32 nt, Human
ggaucuggcucaggucacuccuccagcuacga

SEQ ID NO: 188009 - RNA, 32 nt, Human
ggaucugggaaaggggacaagaggcuuuucgu

SEQ ID NO: 188010 - RNA, 18 nt, Human
ggaucugggaauggggug

SEQ ID NO: 188011 - RNA, 32 nt, Human
ggaucugggaaugggguggagaggacauccuc

SEQ ID NO: 188012 - RNA, 32 nt, Human
ggaucugggcaaaugaaaauguuucaggaagu

SEQ ID NO: 188013 - RNA, 20 nt, Human
ggaucugggcguucgcaccc

SEQ ID NO: 188014 - RNA, 22 nt, Human
ggaucuggggaggaggggcaga

SEQ ID NO: 188015 - RNA, 23 nt, Human
ggaucuggucgcugccccagggg

SEQ ID NO: 188016 - RNA, 32 nt, Human
ggaucugugcagggagucauagguguguguga

SEQ ID NO: 188017 - RNA, 32 nt, Human
ggaucugugccuggacaguggcagaaccuuuc

SEQ ID NO: 188018 - RNA, 32 nt, Human
ggaucugugggaggggguuaggagggagcaga

SEQ ID NO: 188019 - RNA, 32 nt, Human
ggaucuguggucccuguccucccugcuguccc

SEQ ID NO: 188020 - RNA, 32 nt, Human
ggaucuguugagcgcuucaggaaaggcggaca

SEQ ID NO: 188021 - RNA, 32 nt, Human
ggaucuucaucugguucauuguauuuauaugu

SEQ ID NO: 188022 - RNA, 32 nt, Human
ggaucuucucuccauuccccuuucuagcuuua

SEQ ID NO: 188023 - RNA, 24 nt, Human
ggaucuugauuccacuggcaugaa

SEQ ID NO: 188024 - RNA, 25 nt, Human
ggaucuuucgccaggaagauuaucc

SEQ ID NO: 188025 - RNA, 32 nt, Human
ggaucuuucucccuuucuccucuccuuuuucu

SEQ ID NO: 188026 - RNA, 32 nt, Human
ggaucuuugaagcacaaaugcagcaaauccuu

SEQ ID NO: 188027 - RNA, 32 nt, Human
ggaucuuuuaacauaggugguucugugauaac

SEQ ID NO: 188028 - RNA, 32 nt, Human
ggaugaaaaagcucccgaagaagagccagaau

SEQ ID NO: 188029 - RNA, 32 nt, Human
ggaugaaaagccucagaaagcaacucaaagga

SEQ ID NO: 188030 - RNA, 32 nt, Human
ggaugaaaauguuuucaaugcacagaacagga

SEQ ID NO: 188031 - RNA, 32 nt, Human
ggaugaaacugaagccuagaaagaagugacug

SEQ ID NO: 188032 - RNA, 21 nt, Human
ggaugaaaggagaaggcuaga

SEQ ID NO: 188033 - RNA, 32 nt, Human
ggaugaaaucucagcauauguugcaggacacc

SEQ ID NO: 188034 - RNA, 32 nt, Human
ggaugaacaaauucuggaaauggauagcgaug

SEQ ID NO: 188035 - RNA, 32 nt, Human
ggaugaacgagaugugccugaguaccagccac

SEQ ID NO: 188036 - RNA, 32 nt, Human
ggaugaagagucagauguuacagaagaagaca

SEQ ID NO: 188037 - RNA, 32 nt, Human
ggaugaagccaagaguggugguaaggguagga

SEQ ID NO: 188038 - RNA, 32 nt, Human
ggaugaagcccagccacauuucagccgagguc

SEQ ID NO: 188039 - RNA, 32 nt, Human
ggaugaagccccaugccacuccacacugcugg

SEQ ID NO: 188040 - RNA, 32 nt, Human
ggaugaagcuuuuccaaaaucacaugccuuca

SEQ ID NO: 188041 - RNA, 32 nt, Human
ggaugaaggagagcgaguguucauggagcucu

SEQ ID NO: 188042 - RNA, 32 nt, Human
ggaugaaggagagcgaguguucguggagcucu

SEQ ID NO: 188043 - RNA, 24 nt, Human
ggaugaaggauagaggcugagaga

SEQ ID NO: 188044 - RNA, 27 nt, Human
ggaugaaggauuccugcaucacuguga

SEQ ID NO: 188045 - RNA, 32 nt, Human
ggaugaaggccugaccagggagggagaagcag

SEQ ID NO: 188046 - RNA, 32 nt, Human
ggaugaaggcugccaggacacagggucuggcc

SEQ ID NO: 188047 - RNA, 32 nt, Human
ggaugaagucuaccauuaccagcugggucacc

SEQ ID NO: 188048 - RNA, 21 nt, Human
ggaugaagugagugaggcuga

SEQ ID NO: 188049 - RNA, 32 nt, Human
ggaugaaucagaauuuucuuaauaugguacaa

SEQ ID NO: 188050 - RNA, 32 nt, Human
ggaugaaucucccaucaucccaucccuuaacc

SEQ ID NO: 188051 - RNA, 32 nt, Human
ggaugaaugagaggacagcaaugcauguguga

SEQ ID NO: 188052 - RNA, 17 nt, Human
ggaugaauggcuggcug

SEQ ID NO: 188053 - RNA, 32 nt, Human
ggaugacaaggcagaggagaaugacccugugg

SEQ ID NO: 188054 - RNA, 24 nt, Human
ggaugacagagagagacccugucu

SEQ ID NO: 188055 - RNA, 24 nt, Human
ggaugacagagcgaaacccugucu

SEQ ID NO: 188056 - RNA, 24 nt, Human
ggaugacagagcgagacccugccu

SEQ ID NO: 188057 - RNA, 24 nt, Human
ggaugacagagcgagacucuaucu

SEQ ID NO: 188058 - RNA, 23 nt, Human
ggaugacagagugaaacccuguc

SEQ ID NO: 188059 - RNA, 22 nt, Human
ggaugacagagugagacccugu

SEQ ID NO: 188060 - RNA, 24 nt, Human
ggaugacagagugagacccugucu

SEQ ID NO: 188061 - RNA, 24 nt, Human
ggaugacagagugagaccuugucu

SEQ ID NO: 188062 - RNA, 24 nt, Human
ggaugacagagugagacuccaucu

SEQ ID NO: 188063 - RNA, 24 nt, Human
ggaugacagagugagacuccgucu

SEQ ID NO: 188064 - RNA, 24 nt, Human
ggaugacagagugagacuucaucu

SEQ ID NO: 188065 - RNA, 21 nt, Human
ggaugacagagugagaucucc

SEQ ID NO: 188066 - RNA, 20 nt, Human
ggaugacagcaagacuucug

SEQ ID NO: 188067 - RNA, 32 nt, Human
ggaugacagcaccccugagcugggcaaaggua

SEQ ID NO: 188068 - RNA, 32 nt, Human
ggaugacagcucccggguccccaaaccuguuc

SEQ ID NO: 188069 - RNA, 32 nt, Human
ggaugacaggcagagcagcgaggccaccacau

SEQ ID NO: 188070 - RNA, 32 nt, Human
ggaugacaggcgcacaccaccacgcccagcaa

SEQ ID NO: 188071 - RNA, 32 nt, Human
ggaugacaggcgccugccaccacgcccggcua

SEQ ID NO: 188072 - RNA, 32 nt, Human
ggaugacagggaaugugucuucugcuggcugu

SEQ ID NO: 188073 - RNA, 32 nt, Human
ggaugaccaagcuuggugaaauuccucccugu

SEQ ID NO: 188074 - RNA, 32 nt, Human
ggaugaccagcaccuaggacagugcccagcac

SEQ ID NO: 188075 - RNA, 18 nt, Human
ggaugaccaggucccugg

SEQ ID NO: 188076 - RNA, 21 nt, Human
ggaugaccaggucccugggaa

SEQ ID NO: 188077 - RNA, 32 nt, Human
ggaugaccauuggguggaugaggaaucaauag

SEQ ID NO: 188078 - RNA, 32 nt, Human
ggaugacccacuguccgcgguggacucucaug

SEQ ID NO: 188079 - RNA, 32 nt, Human
ggaugacccugacaggugcccucaggggucug

SEQ ID NO: 188080 - RNA, 20 nt, Human
ggaugacccugcgaaggggc

SEQ ID NO: 188081 - RNA, 32 nt, Human
ggaugaccugaagagcgcuccucugccuugga

SEQ ID NO: 188082 - RNA, 21 nt, Human
ggaugaccugccugcagagag

SEQ ID NO: 188083 - RNA, 15 nt, Human
ggaugaccugcucca

SEQ ID NO: 188084 - RNA, 24 nt, Human
ggaugacgggaugagacucugucu

SEQ ID NO: 188085 - RNA, 32 nt, Human
ggaugacucagcccugggaccugcacagggac

SEQ ID NO: 188086 - RNA, 32 nt, Human
ggaugacuccacccuccccuacuaugcccagg

SEQ ID NO: 188087 - RNA, 32 nt, Human
ggaugacuugagcucaggaguuugagaccagc

SEQ ID NO: 188088 - RNA, 32 nt, Human
ggaugacuuuucaguacauaaaagcaagcagu

SEQ ID NO: 188089 - RNA, 32 nt, Human
ggaugagaauccagccccucacaagcuguggg

SEQ ID NO: 188090 - RNA, 32 nt, Human
ggaugagaauuaggaaagacacuauugaauuu

SEQ ID NO: 188091 - RNA, 32 nt, Human
ggaugagacagcaacacaaacacucgagcuuc

SEQ ID NO: 188092 - RNA, 32 nt, Human
ggaugagagccaguggaugaaauucacuaaua

SEQ ID NO: 188093 - RNA, 32 nt, Human
ggaugagagcccagagguaacagaacagcuuc

SEQ ID NO: 188094 - RNA, 32 nt, Human
ggaugagaggaagggaaaccuuacauuaugcu

SEQ ID NO: 188095 - RNA, 32 nt, Human
ggaugagagggagggagaggagagagagugcg

SEQ ID NO: 188096 - RNA, 32 nt, Human
ggaugagaguccugggugugaggaacaccucc

SEQ ID NO: 188097 - RNA, 22 nt, Human
ggaugagaugaggaacccaggg

SEQ ID NO: 188098 - RNA, 32 nt, Human
ggaugagaugcucagcagggguccccauccua

SEQ ID NO: 188099 - RNA, 32 nt, Human
ggaugagauucugcuguuucuuugucuagggu

SEQ ID NO: 188100 - RNA, 32 nt, Human
ggaugagcaaacugaggcagagugcuggagug

SEQ ID NO: 188101 - RNA, 31 nt, Human
ggaugagcagcacuggagccugguaaaugca

SEQ ID NO: 188102 - RNA, 32 nt, Human
ggaugagccgugaguccucugagaacugcuuc

SEQ ID NO: 188103 - RNA, 22 nt, Human
ggaugagcgcccaugcagcaag

SEQ ID NO: 188104 - RNA, 32 nt, Human
ggaugagcguccaggaugggagaaggggagau

SEQ ID NO: 188105 - RNA, 32 nt, Human
ggaugagcugaugguugcuggaggaggccagu

SEQ ID NO: 188106 - RNA, 32 nt, Human
ggaugagcuggagcacagccugggggagagug

SEQ ID NO: 188107 - RNA, 32 nt, Human
ggaugagcuuaccacuaaucucuuuuaaagca

SEQ ID NO: 188108 - RNA, 25 nt, Human
ggaugaggaaacucaggcucagaga

SEQ ID NO: 188109 - RNA, 32 nt, Human
ggaugaggaaacugaggccuggagagguuaaa

SEQ ID NO: 188110 - RNA, 32 nt, Human
ggaugaggaacauggagcuguacuugaauccc

SEQ ID NO: 188111 - RNA, 32 nt, Human
ggaugaggaagcacacaaaaggcuccaccagu

SEQ ID NO: 188112 - RNA, 32 nt, Human
ggaugaggacagggcaucccagaucuggacua

SEQ ID NO: 188113 - RNA, 32 nt, Human
ggaugaggacaucagaccucccuaccuuucca

SEQ ID NO: 188114 - RNA, 32 nt, Human
ggaugaggaggcaccuuaucagcagagcacuu

SEQ ID NO: 188115 - RNA, 32 nt, Human
ggaugaggagguggagugcaggggauguuagg

SEQ ID NO: 188116 - RNA, 32 nt, Human
ggaugaggcaccuccuuucccugcugaaggac

SEQ ID NO: 188117 - RNA, 32 nt, Human
ggaugaggccuggagucaggagucaaaagccc

SEQ ID NO: 188118 - RNA, 32 nt, Human
ggaugaggcugcaguccaugcagcuguucuug

SEQ ID NO: 188119 - RNA, 32 nt, Human
ggaugaggcugcugaagagccugagcucacuu

SEQ ID NO: 188120 - RNA, 20 nt, Human
ggaugaggcuucagccccca

SEQ ID NO: 188121 - RNA, 32 nt, Human
ggaugaggcuucuuccuggauggggcagagcu

SEQ ID NO: 188122 - RNA, 18 nt, Human
ggaugaggcuuuaccuca

SEQ ID NO: 188123 - RNA, 32 nt, Human
ggaugagggagaagaauaagcagcugccugga

SEQ ID NO: 188124 - RNA, 32 nt, Human
ggaugagggagacagaccacuuuucuauauug

SEQ ID NO: 188125 - RNA, 32 nt, Human
ggaugagggagagaggagagaggagaggaaag

SEQ ID NO: 188126 - RNA, 32 nt, Human
ggaugagggaggucggggcugcagugagccaa

SEQ ID NO: 188127 - RNA, 32 nt, Human
ggaugaggggcccugacccugugucuccaacu

SEQ ID NO: 188128 - RNA, 32 nt, Human
ggaugagggugagggcaaaggcugacgaagag

SEQ ID NO: 188129 - RNA, 32 nt, Human
ggaugaggucaccaggggaggagccugugcgu

SEQ ID NO: 188130 - RNA, 32 nt, Human
ggaugaggucugggcuggagcaguagaagcca

SEQ ID NO: 188131 - RNA, 32 nt, Human
ggaugagguggguggguauggagccagcuuaa

SEQ ID NO: 188132 - RNA, 32 nt, Human
ggaugaguaaugagccucaucuugaugcagag

SEQ ID NO: 188133 - RNA, 32 nt, Human
ggaugagucaccgacagcaaggcauggacucc

SEQ ID NO: 188134 - RNA, 32 nt, Human
ggaugagucccaagaagguucuuuggaaggag

SEQ ID NO: 188135 - RNA, 24 nt, Human
ggaugagugaggcccugcagagag

SEQ ID NO: 188136 - RNA, 32 nt, Human
ggaugaguucuuuaguggugacuucugaguuu

SEQ ID NO: 188137 - RNA, 32 nt, Human
ggaugaguugaggugauauuuuuaugugcagc

SEQ ID NO: 188138 - RNA, 24 nt, Human
ggaugauagagcaagacccugucu

SEQ ID NO: 188139 - RNA, 32 nt, Human
ggaugaucacaaugguaaggcacauaaauuau

SEQ ID NO: 188140 - RNA, 32 nt, Human
ggaugaucacuugaggccaggaguucgagacc

SEQ ID NO: 188141 - RNA, 32 nt, Human
ggaugaucaugaauauaacaacuucgaggaaa

SEQ ID NO: 188142 - RNA, 32 nt, Human
ggaugaucaugaggaacaacugccuguuuccu

SEQ ID NO: 188143 - RNA, 32 nt, Human
ggaugaucccccaacaggaagaugcaacccca

SEQ ID NO: 188144 - RNA, 32 nt, Human
ggaugaugauagcauggaugugccugaaaugc

SEQ ID NO: 188145 - RNA, 25 nt, Human
ggaugaugcagggccacacagagag

SEQ ID NO: 188146 - RNA, 23 nt, Human
ggaugaugccagccccggauccg

SEQ ID NO: 188147 - RNA, 20 nt, Human
ggaugauggccaguuuugcc

SEQ ID NO: 188148 - RNA, 21 nt, Human
ggaugauggcuugagcccagg

SEQ ID NO: 188149 - RNA, 32 nt, Human
ggaugauggucuucagccucuuucugucccuu

SEQ ID NO: 188150 - RNA, 32 nt, Human
ggaugauuagacuuggcaaucuguaagcagga

SEQ ID NO: 188151 - RNA, 32 nt, Human
ggaugauuauccucagaacaauggagcaauaa

SEQ ID NO: 188152 - RNA, 32 nt, Human
ggaugauucagaguuaaaagauaaaaagacgc

SEQ ID NO: 188153 - RNA, 25 nt, Human
ggaugauucugccaaaaagguacuu

SEQ ID NO: 188154 - RNA, 21 nt, Human
ggaugauugcuuaagcccagg

SEQ ID NO: 188155 - RNA, 32 nt, Human
ggaugauugcuucucuaggcuccuggauguug

SEQ ID NO: 188156 - RNA, 32 nt, Human
ggaugcaacuucuauccucaguccaguucaua

SEQ ID NO: 188157 - RNA, 32 nt, Human
ggaugcaaggucugcgguccagaagcuugcgg

SEQ ID NO: 188158 - RNA, 32 nt, Human
ggaugcacaagagcagaaucuccaugggacgc

SEQ ID NO: 188159 - RNA, 32 nt, Human
ggaugcacacacaacccugccucccacaguuc

SEQ ID NO: 188160 - RNA, 32 nt, Human
ggaugcacagaggaacgagcugagcuggcaga

SEQ ID NO: 188161 - RNA, 19 nt, Human
ggaugcaccccucagggag

SEQ ID NO: 188162 - RNA, 17 nt, Human
ggaugcaccucucggcg

SEQ ID NO: 188163 - RNA, 19 nt, Human
ggaugcaccuguaauccca

SEQ ID NO: 188164 - RNA, 19 nt, Human
ggaugcagaauaaugcaga

SEQ ID NO: 188165 - RNA, 32 nt, Human
ggaugcagagguggagguugaggccgugacuc

SEQ ID NO: 188166 - RNA, 32 nt, Human
ggaugcagccugaucagggucuggagcaagga

SEQ ID NO: 188167 - RNA, 20 nt, Human
ggaugcagcgagcccacgga

SEQ ID NO: 188168 - RNA, 32 nt, Human
ggaugcagcugccccuucucagccucugagga

SEQ ID NO: 188169 - RNA, 32 nt, Human
ggaugcaggaacagcucuagucuacuaagcug

SEQ ID NO: 188170 - RNA, 21 nt, Human
ggaugcaggaggcugaaggga

SEQ ID NO: 188171 - RNA, 32 nt, Human
ggaugcagucucuuugugguuccugguccugu

SEQ ID NO: 188172 - RNA, 32 nt, Human
ggaugcaguggaaaggagggggcccuccugag

SEQ ID NO: 188173 - RNA, 32 nt, Human
ggaugcaguuccagggcaggcaguagaggccc

SEQ ID NO: 188174 - RNA, 17 nt, Human
ggaugcaguucuaggca

SEQ ID NO: 188175 - RNA, 32 nt, Human
ggaugcaucugaaccagcagagcuguguuaua

SEQ ID NO: 188176 - RNA, 32 nt, Human
ggaugcaugucugucuguucuaucuagagauc

SEQ ID NO: 188177 - RNA, 32 nt, Human
ggaugcauuuuuacccuccacacaaaccuaaa

SEQ ID NO: 188178 - RNA, 32 nt, Human
ggaugccaaagugggaggauugcuugagcuca

SEQ ID NO: 188179 - RNA, 32 nt, Human
ggaugccaccuggagccccacccaggagcugg

SEQ ID NO: 188180 - RNA, 32 nt, Human
ggaugccagaacuguagguuauaaggcaguca

SEQ ID NO: 188181 - RNA, 22 nt, Human
ggaugccagagggacuggggag

SEQ ID NO: 188182 - RNA, 28 nt, Human
ggaugccagagggcugccucuccagcgg

SEQ ID NO: 188183 - RNA, 20 nt, Human
ggaugccagcaacgcgggag

SEQ ID NO: 188184 - RNA, 22 nt, Human
ggaugccagcaccugccaggug

SEQ ID NO: 188185 - RNA, 20 nt, Human
ggaugccagcaguggccgag

SEQ ID NO: 188186 - RNA, 32 nt, Human
ggaugccagcucuccccuuugugcuucccugc

SEQ ID NO: 188187 - RNA, 32 nt, Human
ggaugccagcuuuaaucuuucugucauuuaaa

SEQ ID NO: 188188 - RNA, 32 nt, Human
ggaugccagggaacagagagugagacaccuac

SEQ ID NO: 188189 - RNA, 32 nt, Human
ggaugccagggagggaggagaaagccgaagcg

SEQ ID NO: 188190 - RNA, 32 nt, Human
ggaugccauacaacaggacuaugugaugauuu

SEQ ID NO: 188191 - RNA, 32 nt, Human
ggaugccauacaacaggacuaugugaugguuu

SEQ ID NO: 188192 - RNA, 32 nt, Human
ggaugccaugccacgcagcagccagcacucgg

SEQ ID NO: 188193 - RNA, 32 nt, Human
ggaugccauucaaccacgggccccacugucac

SEQ ID NO: 188194 - RNA, 32 nt, Human
ggaugccauucaagugucaaucauccagcccu

SEQ ID NO: 188195 - RNA, 32 nt, Human
ggaugccauucaaucagagccugggccugggg

SEQ ID NO: 188196 - RNA, 32 nt, Human
ggaugcccaggccgcagaggaagcugggcacu

SEQ ID NO: 188197 - RNA, 32 nt, Human
ggaugcccauuuuacagaggaggagacugagg

SEQ ID NO: 188198 - RNA, 32 nt, Human
ggaugccccaggaaggcuccuaggaagagggg

SEQ ID NO: 188199 - RNA, 32 nt, Human
ggaugcccccuaauccccuucuccccugcacu

SEQ ID NO: 188200 - RNA, 32 nt, Human
ggaugcccucucuccccuuugcccagcaagag

SEQ ID NO: 188201 - RNA, 32 nt, Human
ggaugcccugaacaugcaauucuuucuuccaa

SEQ ID NO: 188202 - RNA, 32 nt, Human
ggaugcccugagcuccacaggucuucaugggc

SEQ ID NO: 188203 - RNA, 32 nt, Human
ggaugcccugcaccggguccggcagaaagcca

SEQ ID NO: 188204 - RNA, 20 nt, Human
ggaugccgccgcggcugcug

SEQ ID NO: 188205 - RNA, 27 nt, Human
ggaugccgggggaggaagaggagcggg

SEQ ID NO: 188206 - RNA, 32 nt, Human
ggaugccuacgagcagguacaaaaaggacuuc

SEQ ID NO: 188207 - RNA, 32 nt, Human
ggaugccuccacucucuaugacuaaauccaaa

SEQ ID NO: 188208 - RNA, 18 nt, Human
ggaugccucgcuggggag

SEQ ID NO: 188209 - RNA, 32 nt, Human
ggaugccugacgagguguagccuuuuaucuug

SEQ ID NO: 188210 - RNA, 32 nt, Human
ggaugccugcauucugggcaggauccccacca

SEQ ID NO: 188211 - RNA, 32 nt, Human
ggaugccugccugcccugcccugugcugugga

SEQ ID NO: 188212 - RNA, 32 nt, Human
ggaugccugccuggaaauguccuugcauucgu

SEQ ID NO: 188213 - RNA, 32 nt, Human
ggaugccugccuggacccuguugguggcugaa

SEQ ID NO: 188214 - RNA, 32 nt, Human
ggaugccuggacugcagagcccuugcuccgug

SEQ ID NO: 188215 - RNA, 32 nt, Human
ggaugccuggaguccccaggagcugggagagg

SEQ ID NO: 188216 - RNA, 32 nt, Human
ggaugccugggugccaggcaagacaagccccu

SEQ ID NO: 188217 - RNA, 17 nt, Human
ggaugccuguaauccca

SEQ ID NO: 188218 - RNA, 32 nt, Human
ggaugccuguaaucccagcuacuugggaggcu

SEQ ID NO: 188219 - RNA, 32 nt, Human
ggaugccuguaauccuagcuccucgggaggcu

SEQ ID NO: 188220 - RNA, 32 nt, Human
ggaugccuguccugugggaaccgucagugcgg

SEQ ID NO: 188221 - RNA, 32 nt, Human
ggaugccuucuacaacgcggaugugguggugc

SEQ ID NO: 188222 - RNA, 32 nt, Human
ggaugccuugagacccaggaggugugcggaug

SEQ ID NO: 188223 - RNA, 32 nt, Human
ggaugcgcagaguucggcuggaaaagaggaca

SEQ ID NO: 188224 - RNA, 32 nt, Human
ggaugcgcugggcggagggugcaggggagggc

SEQ ID NO: 188225 - RNA, 32 nt, Human
ggaugcggaaggcaguuuugcuugggaaacaa

SEQ ID NO: 188226 - RNA, 32 nt, Human
ggaugcggagagguuggcagagccagggguag

SEQ ID NO: 188227 - RNA, 32 nt, Human
ggaugcgggaaccuggucccagcuugaguucc

SEQ ID NO: 188228 - RNA, 32 nt, Human
ggaugcgggagcgggagcgggagcagcgcugg

SEQ ID NO: 188229 - RNA, 32 nt, Human
ggaugcgggugagagacauggaggacugguca

SEQ ID NO: 188230 - RNA, 32 nt, Human
ggaugcggucgcgucugugguccuggcagccg

SEQ ID NO: 188231 - RNA, 23 nt, Human
ggaugcgguggcucacaccugua

SEQ ID NO: 188232 - RNA, 23 nt, Human
ggaugcgguggcucacgccugua

SEQ ID NO: 188233 - RNA, 23 nt, Human
ggaugcgguggcucaugccugua

SEQ ID NO: 188234 - RNA, 32 nt, Human
ggaugcuaaaagcaaggaauaaaaguugaaaa

SEQ ID NO: 188235 - RNA, 32 nt, Human
ggaugcuaccucucccuuucccacuugaggac

SEQ ID NO: 188236 - RNA, 27 nt, Human
ggaugcuagcagcaaggaccccaaaga

SEQ ID NO: 188237 - RNA, 32 nt, Human
ggaugcucagcccucaugugucaguccccuca

SEQ ID NO: 188238 - RNA, 32 nt, Human
ggaugcucagcggccaggcacugaccugccau

SEQ ID NO: 188239 - RNA, 32 nt, Human
ggaugcucaucuuuaacagucucccucaugua

SEQ ID NO: 188240 - RNA, 32 nt, Human
ggaugcucauugccugggcaaggccuguuuag

SEQ ID NO: 188241 - RNA, 32 nt, Human
ggaugcucgauuuccucugccucucucuuugc

SEQ ID NO: 188242 - RNA, 32 nt, Human
ggaugcucucgaacuccugaccucgugaucua

SEQ ID NO: 188243 - RNA, 32 nt, Human
ggaugcucucucgguuugcuuuugccacuuuc

SEQ ID NO: 188244 - RNA, 32 nt, Human
ggaugcucucucuguuugcuuuugccacuuuc

SEQ ID NO: 188245 - RNA, 32 nt, Human
ggaugcucuucauccagcugaagacggucccu

SEQ ID NO: 188246 - RNA, 32 nt, Human
ggaugcugaaguaggaggaucgcuugagccca

SEQ ID NO: 188247 - RNA, 32 nt, Human
ggaugcugaggcaggagaaucgcuugaauaug

SEQ ID NO: 188248 - RNA, 32 nt, Human
ggaugcugaggugggaggauugcuugagccca

SEQ ID NO: 188249 - RNA, 32 nt, Human
ggaugcugccacccucuucugacccugcugcu

SEQ ID NO: 188250 - RNA, 32 nt, Human
ggaugcugccuaacccaguucaucucuauguc

SEQ ID NO: 188251 - RNA, 32 nt, Human
ggaugcugcuccauuagcguggauccugggau

SEQ ID NO: 188252 - RNA, 32 nt, Human
ggaugcugcugaggcagcuggaggagugggag

SEQ ID NO: 188253 - RNA, 32 nt, Human
ggaugcugcugcccucuccucaaccucucacg

SEQ ID NO: 188254 - RNA, 32 nt, Human
ggaugcuggacauccaccgccuccaggcaguu

SEQ ID NO: 188255 - RNA, 32 nt, Human
ggaugcuggcacagggcacuguucacagacug

SEQ ID NO: 188256 - RNA, 32 nt, Human
ggaugcuggcgggugacuugcagugggcgccu

SEQ ID NO: 188257 - RNA, 32 nt, Human
ggaugcuggggacuugccacccauggaagcug

SEQ ID NO: 188258 - RNA, 32 nt, Human
ggaugcuggggguccgcugccugcugcggucc

SEQ ID NO: 188259 - RNA, 32 nt, Human
ggaugcuguggggcaccaccuccuugaggacc

SEQ ID NO: 188260 - RNA, 32 nt, Human
ggaugcuguugucauggagcugugggaguugg

SEQ ID NO: 188261 - RNA, 32 nt, Human
ggaugcuucaaaaauauuuggcuaaaggauga

SEQ ID NO: 188262 - RNA, 32 nt, Human
ggaugcuucgggcuucugacugcuccauaggu

SEQ ID NO: 188263 - RNA, 32 nt, Human
ggaugcuucuaauucagccacugugaaccauu

SEQ ID NO: 188264 - RNA, 32 nt, Human
ggaugcuucucuggaaccucaaggcaggcagc

SEQ ID NO: 188265 - RNA, 24 nt, Human
ggaugcuugcccagaaaggugcuu

SEQ ID NO: 188266 - RNA, 32 nt, Human
ggaugcuuggcuggagucacccccaggacuua

SEQ ID NO: 188267 - RNA, 32 nt, Human
ggaugcuugggccugggucucuccgccagcag

SEQ ID NO: 188268 - RNA, 27 nt, Human
ggaugcuuguucucuuucuccugggca

SEQ ID NO: 188269 - RNA, 32 nt, Human
ggaugcuuucaaggagcucacuuggccugcuu

SEQ ID NO: 188270 - RNA, 32 nt, Human
ggaugcuuugggccuuugacugcuccauaggu

SEQ ID NO: 188271 - RNA, 32 nt, Human
ggaugcuuuugcccacucccauggccccugga

SEQ ID NO: 188272 - RNA, 32 nt, Human
ggaugcuuuuuaccuuuugcugucugcugugg

SEQ ID NO: 188273 - RNA, 20 nt, Human
ggauggaaacugaccaccua

SEQ ID NO: 188274 - RNA, 23 nt, Human
ggauggaaagcccagggucucca

SEQ ID NO: 188275 - RNA, 32 nt, Human
ggauggaaaggcuguuggcaucaauaggggac

SEQ ID NO: 188276 - RNA, 32 nt, Human
ggauggaaaugagaagcauucuaaauuugagu

SEQ ID NO: 188277 - RNA, 32 nt, Human
ggauggaagaccaggcuugugugucuuguguu

SEQ ID NO: 188278 - RNA, 32 nt, Human
ggauggaagagagggcuggcugcccaagggaa

SEQ ID NO: 188279 - RNA, 31 nt, Human
ggauggaaggauggagaaaaacagacugugg

SEQ ID NO: 188280 - RNA, 32 nt, Human
ggauggaaggcagaggguggguguggggccug

SEQ ID NO: 188281 - RNA, 32 nt, Human
ggauggaaugugcugggccacuguugggugga

SEQ ID NO: 188282 - RNA, 32 nt, Human
ggauggaauucugguauuuacaggcauuggug

SEQ ID NO: 188283 - RNA, 32 nt, Human
ggauggacagcuuggcucucccagagagguga

SEQ ID NO: 188284 - RNA, 32 nt, Human
ggauggacauuuuucuucuaagauggaacuua

SEQ ID NO: 188285 - RNA, 32 nt, Human
ggauggacccugggcauggcuucugggcugcu

SEQ ID NO: 188286 - RNA, 27 nt, Human
ggauggacgaggacgugcuaaccaccc

SEQ ID NO: 188287 - RNA, 32 nt, Human
ggauggacgccucucccccggagcagcacuuu

SEQ ID NO: 188288 - RNA, 32 nt, Human
ggauggacugcaaccuuaauuuacuugccgga

SEQ ID NO: 188289 - RNA, 32 nt, Human
ggauggacuuacugcaaccuagcaggcaccua

SEQ ID NO: 188290 - RNA, 32 nt, Human
ggauggagagaaggauggaaagccuggacuua

SEQ ID NO: 188291 - RNA, 32 nt, Human
ggauggagagcaaaggagaccccucccgagcc

SEQ ID NO: 188292 - RNA, 32 nt, Human
ggauggagagggagagacugaauuguuaguag

SEQ ID NO: 188293 - RNA, 31 nt, Human
ggauggagagugaggggauccaggccauuca

SEQ ID NO: 188294 - RNA, 32 nt, Human
ggauggagcacuuaaacuuucagcuaaggauc

SEQ ID NO: 188295 - RNA, 32 nt, Human
ggauggagcagguggaggugcagaggggauuu

SEQ ID NO: 188296 - RNA, 32 nt, Human
ggauggagcaucccaugagagccgggccaugg

SEQ ID NO: 188297 - RNA, 32 nt, Human
ggauggagcccagcgccugaggcccuuaucau

SEQ ID NO: 188298 - RNA, 32 nt, Human
ggauggagcccaggcgggagcgguggcccugu

SEQ ID NO: 188299 - RNA, 32 nt, Human
ggauggagccugggaagcagcgaggaaaucac

SEQ ID NO: 188300 - RNA, 32 nt, Human
ggauggaggaagaaggcauuaguaaaagguua

SEQ ID NO: 188301 - RNA, 32 nt, Human
ggauggaggcgcuggggagcuucuaggcuucc

SEQ ID NO: 188302 - RNA, 32 nt, Human
ggauggagggaggcaggcuggggagaagagaa

SEQ ID NO: 188303 - RNA, 32 nt, Human
ggauggagugaagaccuggagaggaggggcuc

SEQ ID NO: 188304 - RNA, 27 nt, Human
ggauggagugugaaacagaugaacaaa

SEQ ID NO: 188305 - RNA, 32 nt, Human
ggauggaguucugggcuuagucuggagagaau

SEQ ID NO: 188306 - RNA, 32 nt, Human
ggauggauaauaguuggagaucccagacagga

SEQ ID NO: 188307 - RNA, 32 nt, Human
ggauggauagggacaccaggaagaggacaaac

SEQ ID NO: 188308 - RNA, 22 nt, Human
ggauggaucacuugagcccagg

SEQ ID NO: 188309 - RNA, 32 nt, Human
ggauggauguggggagaguggaagaggcaggg

SEQ ID NO: 188310 - RNA, 22 nt, Human
ggauggauucacccuacaggga

SEQ ID NO: 188311 - RNA, 32 nt, Human
ggauggauuccuccuccucuuccuccgcggcg

SEQ ID NO: 188312 - RNA, 32 nt, Human
ggauggcaagaaggaaguaaaagggagagagg

SEQ ID NO: 188313 - RNA, 32 nt, Human
ggauggcaagcacgggacaggaggggcccaca

SEQ ID NO: 188314 - RNA, 32 nt, Human
ggauggcaaugccaguggaaccaugcugcuug

SEQ ID NO: 188315 - RNA, 32 nt, Human
ggauggcacaguggucaagagcacagacucua

SEQ ID NO: 188316 - RNA, 32 nt, Human
ggauggcaccucaggcugagggccccaaugua

SEQ ID NO: 188317 - RNA, 32 nt, Human
ggauggcagaggaggugaggagggaggaagcg

SEQ ID NO: 188318 - RNA, 18 nt, Human
ggauggcagccucugggg

SEQ ID NO: 188319 - RNA, 20 nt, Human
ggauggccacccuccugcug

SEQ ID NO: 188320 - RNA, 19 nt, Human
ggauggccagggaaggaga

SEQ ID NO: 188321 - RNA, 32 nt, Human
ggauggccagggagccaugagaagacucuucc

SEQ ID NO: 188322 - RNA, 32 nt, Human
ggauggcccagccuguaagauacuguauaugc

SEQ ID NO: 188323 - RNA, 32 nt, Human
ggauggcccagcugcccuagugugugcuugcc

SEQ ID NO: 188324 - RNA, 32 nt, Human
ggauggcccaggaggugcuggagcuaggucuc

SEQ ID NO: 188325 - RNA, 22 nt, Human
ggauggccccuagcuuaggaag

SEQ ID NO: 188326 - RNA, 32 nt, Human
ggauggcccugaccagcagggagcuggggugg

SEQ ID NO: 188327 - RNA, 32 nt, Human
ggauggcccuuccuccuccaccaccgcccguc

SEQ ID NO: 188328 - RNA, 32 nt, Human
ggauggccuagacuuggggaacagagccgggu

SEQ ID NO: 188329 - RNA, 32 nt, Human
ggauggccuggugcccccaccugcugcagcag

SEQ ID NO: 188330 - RNA, 32 nt, Human
ggauggccuugaacuccugggcucaagugauc

SEQ ID NO: 188331 - RNA, 32 nt, Human
ggauggccuuggacccugucaggcccagcaug

SEQ ID NO: 188332 - RNA, 32 nt, Human
ggauggcgaggccucucucaggagcaggggca

SEQ ID NO: 188333 - RNA, 32 nt, Human
ggauggcgagguaggauggccacccagcgcga

SEQ ID NO: 188334 - RNA, 27 nt, Human
ggauggcgcggagcugccucuccggga

SEQ ID NO: 188335 - RNA, 32 nt, Human
ggauggcgcugguacugcugcuugcuggugga

SEQ ID NO: 188336 - RNA, 32 nt, Human
ggauggcggcagcggcgcuggggagggcgagg

SEQ ID NO: 188337 - RNA, 32 nt, Human
ggauggcggcgggagguugauggcgaguggug

SEQ ID NO: 188338 - RNA, 32 nt, Human
ggauggcucaaaggagucaggacuuggaagug

SEQ ID NO: 188339 - RNA, 32 nt, Human
ggauggcucaaaggagucaggacuuggaauug

SEQ ID NO: 188340 - RNA, 32 nt, Human
ggauggcucuauggacaaaaagacucgggccc

SEQ ID NO: 188341 - RNA, 32 nt, Human
ggauggcucuccagagaagaggugcccgggcg

SEQ ID NO: 188342 - RNA, 32 nt, Human
ggauggcugcaaucucagugccugagggaaga

SEQ ID NO: 188343 - RNA, 32 nt, Human
ggauggcugcagugccagccuggggcagcagg

SEQ ID NO: 188344 - RNA, 32 nt, Human
ggauggcugcugcuugccaggugggcccaaau

SEQ ID NO: 188345 - RNA, 32 nt, Human
ggauggcuggcggaaagauauaugagaaagaa

SEQ ID NO: 188346 - RNA, 32 nt, Human
ggauggcuuaugauuguaaagcauuuuaucac

SEQ ID NO: 188347 - RNA, 32 nt, Human
ggauggcuugagcccaggagguugaggucaca

SEQ ID NO: 188348 - RNA, 32 nt, Human
ggauggcuugccagggccuugggguuugguag

SEQ ID NO: 188349 - RNA, 32 nt, Human
ggauggcuuuuagguuuguuugaauaagagau

SEQ ID NO: 188350 - RNA, 27 nt, Human
ggaugggaaccggauugguugcagugu

SEQ ID NO: 188351 - RNA, 32 nt, Human
ggaugggaaugaggaaggagugaggggaagaa

SEQ ID NO: 188352 - RNA, 32 nt, Human
ggaugggaauggcaauggccuagcuuuuauuu

SEQ ID NO: 188353 - RNA, 32 nt, Human
ggaugggacgggcaggccagaggucagccagc

SEQ ID NO: 188354 - RNA, 32 nt, Human
ggaugggacucuacacauccugagcuaagaca

SEQ ID NO: 188355 - RNA, 32 nt, Human
ggaugggacugucuaccucccuuccuccucug

SEQ ID NO: 188356 - RNA, 32 nt, Human
ggaugggagaagaaggaaggggguggcccguc

SEQ ID NO: 188357 - RNA, 32 nt, Human
ggaugggagagaaggugagggagccggcgagc

SEQ ID NO: 188358 - RNA, 32 nt, Human
ggaugggagagggguaggauguacagggguag

SEQ ID NO: 188359 - RNA, 32 nt, Human
ggaugggagagggguggggagcgagucacugc

SEQ ID NO: 188360 - RNA, 32 nt, Human
ggaugggagcgaugcuuaucucucacagugug

SEQ ID NO: 188361 - RNA, 32 nt, Human
ggaugggaggagagaaacacagcgaucacaaa

SEQ ID NO: 188362 - RNA, 32 nt, Human
ggaugggaggaggcgggaucugcucugaggcc

SEQ ID NO: 188363 - RNA, 32 nt, Human
ggaugggaggcaggucuaacuucuacugauuc

SEQ ID NO: 188364 - RNA, 32 nt, Human
ggaugggagguaccuuagagggaguauuuucu

SEQ ID NO: 188365 - RNA, 32 nt, Human
ggaugggagugggaggaggagagaugggugaa

SEQ ID NO: 188366 - RNA, 32 nt, Human
ggaugggaugguggcaaagcccaggaucuggc

SEQ ID NO: 188367 - RNA, 32 nt, Human
ggaugggcaaacugcaggccugggaaggcagc

SEQ ID NO: 188368 - RNA, 32 nt, Human
ggaugggcaaagcaucuuucgagagcuugccu

SEQ ID NO: 188369 - RNA, 32 nt, Human
ggaugggcaaaggagaguccugccuggcccua

SEQ ID NO: 188370 - RNA, 32 nt, Human
ggaugggcagaggcucucucccugcccacucu

SEQ ID NO: 188371 - RNA, 32 nt, Human
ggaugggcaggcaguggcggucccgccugccg

SEQ ID NO: 188372 - RNA, 32 nt, Human
ggaugggccauggagguccgugagcuggaacu

SEQ ID NO: 188373 - RNA, 32 nt, Human
ggaugggcccaggauggagccugccaagugug

SEQ ID NO: 188374 - RNA, 32 nt, Human
ggaugggccugauccaauucaguugaaggccu

SEQ ID NO: 188375 - RNA, 32 nt, Human
ggaugggccuggcugcacagcauccuccucug

SEQ ID NO: 188376 - RNA, 32 nt, Human
ggaugggcuggguggguggguggggaagaaau

SEQ ID NO: 188377 - RNA, 32 nt, Human
ggaugggcuguggugggaggguugcagcgccg

SEQ ID NO: 188378 - RNA, 32 nt, Human
ggauggggaagggagagcuggccuuggucagc

SEQ ID NO: 188379 - RNA, 32 nt, Human
ggauggggacauuugaacauguuuaaugggua

SEQ ID NO: 188380 - RNA, 32 nt, Human
ggauggggaggaagaggaggaagaggaagggg

SEQ ID NO: 188381 - RNA, 32 nt, Human
ggauggggagugaagcaaggugggcccagaag

SEQ ID NO: 188382 - RNA, 32 nt, Human
ggauggggcccaaaugaugggauuagugcccu

SEQ ID NO: 188383 - RNA, 32 nt, Human
ggauggggcggccugcagacccugccaggggg

SEQ ID NO: 188384 - RNA, 32 nt, Human
ggaugggggagaagaagcuaaggggagaaguc

SEQ ID NO: 188385 - RNA, 32 nt, Human
ggaugggggcggagcugggguuuggugcaguu

SEQ ID NO: 188386 - RNA, 32 nt, Human
ggaugggggcuggagucauucuuagcuguuuc

SEQ ID NO: 188387 - RNA, 32 nt, Human
ggaugggggugcaggccagggaaacaacgggu

SEQ ID NO: 188388 - RNA, 32 nt, Human
ggauggggguugugggagagaggcagcuggga

SEQ ID NO: 188389 - RNA, 23 nt, Human
ggaugggguagcacucacaggga

SEQ ID NO: 188390 - RNA, 32 nt, Human
ggauggggucaagggacagugggcagguccuc

SEQ ID NO: 188391 - RNA, 31 nt, Human
ggauggguaccauggaauaccaaagugaagg

SEQ ID NO: 188392 - RNA, 27 nt, Human
ggaugggucaucuggaacccacuuaca

SEQ ID NO: 188393 - RNA, 32 nt, Human
ggaugggugacuagacccauggagaggaacuc

SEQ ID NO: 188394 - RNA, 32 nt, Human
ggaugggugggaacaaggaggaguagauggca

SEQ ID NO: 188395 - RNA, 32 nt, Human
ggaugggugggugguaaaaagggaaggaugag

SEQ ID NO: 188396 - RNA, 32 nt, Human
ggauggguucaggccaggucuuuugauggcca

SEQ ID NO: 188397 - RNA, 24 nt, Human
ggaugguaaacugaggcacagaga

SEQ ID NO: 188398 - RNA, 32 nt, Human
ggaugguacagcuguguggugcuucuguggug

SEQ ID NO: 188399 - RNA, 32 nt, Human
ggaugguaggcacgcaccaccaugccagcuaa

SEQ ID NO: 188400 - RNA, 32 nt, Human
ggaugguagucaggggaaggagcgagauucca

SEQ ID NO: 188401 - RNA, 32 nt, Human
ggauggucagcaugucaggaaugcuggaggag

SEQ ID NO: 188402 - RNA, 32 nt, Human
ggauggucagggggaaggaggaaugcgcucaa

SEQ ID NO: 188403 - RNA, 32 nt, Human
ggauggucaugugaaccaacagagccagucac

SEQ ID NO: 188404 - RNA, 32 nt, Human
ggaugguccuguacccaguccccagccucagg

SEQ ID NO: 188405 - RNA, 21 nt, Human
ggauggucgccaagcaagcac

SEQ ID NO: 188406 - RNA, 32 nt, Human
ggauggucggaggcagagguguuuccagugau

SEQ ID NO: 188407 - RNA, 32 nt, Human
ggauggucucaaacuccugaccucgugaucca

SEQ ID NO: 188408 - RNA, 32 nt, Human
ggauggucucaggguucugucuugccuucaug

SEQ ID NO: 188409 - RNA, 32 nt, Human
ggauggucuccaacuccugacuucaugaucca

SEQ ID NO: 188410 - RNA, 32 nt, Human
ggauggucucgaacuccugaccucaggugauc

SEQ ID NO: 188411 - RNA, 32 nt, Human
ggauggucucgaacuccugacuucaugaucca

SEQ ID NO: 188412 - RNA, 32 nt, Human
ggauggucucgagucuccugaccucgugaucc

SEQ ID NO: 188413 - RNA, 32 nt, Human
ggauggucucugcugcucuugccucuaguuca

SEQ ID NO: 188414 - RNA, 32 nt, Human
ggauggucucuuaacuccugcccucaagugau

SEQ ID NO: 188415 - RNA, 32 nt, Human
ggauggucuggcccaccuccagccucagcuag

SEQ ID NO: 188416 - RNA, 22 nt, Human
ggauggugagccccugaugccg

SEQ ID NO: 188417 - RNA, 32 nt, Human
ggauggugaggguacuuagucuuagguuuugg

SEQ ID NO: 188418 - RNA, 32 nt, Human
ggauggugaugucggcugggugcaguggcuca

SEQ ID NO: 188419 - RNA, 32 nt, Human
ggauggugcaggauggcuuugcggaaaggaga

SEQ ID NO: 188420 - RNA, 19 nt, Human
ggauggugccauccaggga

SEQ ID NO: 188421 - RNA, 32 nt, Human
ggaugguggaaccauucccucccaacuccccc

SEQ ID NO: 188422 - RNA, 31 nt, Human
ggaugguggaguggacacugggugaaccacg

SEQ ID NO: 188423 - RNA, 32 nt, Human
ggauggugggcagaucacuugaggucaggagu

SEQ ID NO: 188424 - RNA, 27 nt, Human
ggauggugggcugugggguggcaguuu

SEQ ID NO: 188425 - RNA, 32 nt, Human
ggaugguggguguucagccugaaugcccagga

SEQ ID NO: 188426 - RNA, 32 nt, Human
ggaugguggucuucuccccuugccaggccuug

SEQ ID NO: 188427 - RNA, 32 nt, Human
ggauggugucuuccucuccucagccgagaaug

SEQ ID NO: 188428 - RNA, 32 nt, Human
ggauggugugcuggcccugcgcugccuggagg

SEQ ID NO: 188429 - RNA, 17 nt, Human
ggauggugugggcccuc

SEQ ID NO: 188430 - RNA, 23 nt, Human
ggaugguucccggcgcugggguc

SEQ ID NO: 188431 - RNA, 32 nt, Human
ggaugguucugggaggugagggcucaggaaca

SEQ ID NO: 188432 - RNA, 32 nt, Human
ggaugguugccaccccuccugcuguaggaugg

SEQ ID NO: 188433 - RNA, 32 nt, Human
ggaugguuugagcucaggcauuugaggcuguc

SEQ ID NO: 188434 - RNA, 20 nt, Human
ggaugguuugguugguccca

SEQ ID NO: 188435 - RNA, 22 nt, Human
ggauguaaauaaagaggcauuu

SEQ ID NO: 188436 - RNA, 29 nt, Human
ggauguaacaaauauauucaguaccauuu

SEQ ID NO: 188437 - RNA, 32 nt, Human
ggauguaacaaauauauucaguaccauuucuu

SEQ ID NO: 188438 - RNA, 32 nt, Human
ggauguaacuccuuuuagcuccaucuuuuccu

SEQ ID NO: 188439 - RNA, 32 nt, Human
ggauguaagagaauccagcagagauggacugg

SEQ ID NO: 188440 - RNA, 32 nt, Human
ggauguaagugagagaccuugggaccagcaaa

SEQ ID NO: 188441 - RNA, 32 nt, Human
ggauguagacugagaauggcuuugaguggcau

SEQ ID NO: 188442 - RNA, 32 nt, Human
ggauguagcugcagaaagcaugcacaacuuug

SEQ ID NO: 188443 - RNA, 32 nt, Human
ggauguauaauauuucugucugcucagaauau

SEQ ID NO: 188444 - RNA, 32 nt, Human
ggauguauggggagcuggcagagcagguggca

SEQ ID NO: 188445 - RNA, 32 nt, Human
ggauguauguauuggaauuaugaggcauaagu

SEQ ID NO: 188446 - RNA, 21 nt, Human
ggaugucaaagaacggcacuu

SEQ ID NO: 188447 - RNA, 32 nt, Human
ggaugucaagaucagacuggccaacagaauga

SEQ ID NO: 188448 - RNA, 32 nt, Human
ggaugucacagcuugaggcuguggugugaaag

SEQ ID NO: 188449 - RNA, 32 nt, Human
ggaugucagugaggcugggagcagggagccac

SEQ ID NO: 188450 - RNA, 32 nt, Human
ggaugucaucaggcuggcccagaaggaggagg

SEQ ID NO: 188451 - RNA, 32 nt, Human
ggaugucccaggaggcagcucuccccacacag

SEQ ID NO: 188452 - RNA, 32 nt, Human
ggaugucccucaagaaugagacaggaagugca

SEQ ID NO: 188453 - RNA, 32 nt, Human
ggauguccuccaggugacagaggguggcaagg

SEQ ID NO: 188454 - RNA, 26 nt, Human
ggauguccucgagcugcugggcugcu

SEQ ID NO: 188455 - RNA, 21 nt, Human
ggaugucgucaagugaugcuu

SEQ ID NO: 188456 - RNA, 32 nt, Human
ggaugucuauaacuucauccucaguauguucc

SEQ ID NO: 188457 - RNA, 32 nt, Human
ggaugucucccaggacaagccagucugccucu

SEQ ID NO: 188458 - RNA, 21 nt, Human
ggaugucugaaugggacgcuu

SEQ ID NO: 188459 - RNA, 32 nt, Human
ggaugucugcaggcaguggcaugugggcaggg

SEQ ID NO: 188460 - RNA, 32 nt, Human
ggaugucugccuggucccuucucacugugagg

SEQ ID NO: 188461 - RNA, 32 nt, Human
ggaugugaauuuugagacaugaaggaggguaa

SEQ ID NO: 188462 - RNA, 32 nt, Human
ggaugugacugaggccagcucuggggucucag

SEQ ID NO: 188463 - RNA, 32 nt, Human
ggaugugaucauaccacuguacugcagucugg

SEQ ID NO: 188464 - RNA, 32 nt, Human
ggaugugauggaccagcucagcuguccccaga

SEQ ID NO: 188465 - RNA, 23 nt, Human
ggaugugauggcacaugccugua

SEQ ID NO: 188466 - RNA, 23 nt, Human
ggaugugauggcucaugccugua

SEQ ID NO: 188467 - RNA, 31 nt, Human
ggaugugcagggcugccucagaagcuggcug

SEQ ID NO: 188468 - RNA, 32 nt, Human
ggaugugcauuuucaccugagguuucccugca

SEQ ID NO: 188469 - RNA, 32 nt, Human
ggaugugcugaggccuaaauguuagcaggugg

SEQ ID NO: 188470 - RNA, 32 nt, Human
ggaugugcugcacucggcaguccuaguguaau

SEQ ID NO: 188471 - RNA, 32 nt, Human
ggaugugcugugugugcaccugcucacaggau

SEQ ID NO: 188472 - RNA, 32 nt, Human
ggaugugcuuccagcagugccuucccuuuaug

SEQ ID NO: 188473 - RNA, 32 nt, Human
ggauguggaagagauaggaaaggccucaccac

SEQ ID NO: 188474 - RNA, 32 nt, Human
ggauguggagggcucagccacucugggacggg

SEQ ID NO: 188475 - RNA, 32 nt, Human
ggauguggaggggaaaaagaugacagagaagu

SEQ ID NO: 188476 - RNA, 32 nt, Human
ggauguggagucaggagcaaccagagaccccc

SEQ ID NO: 188477 - RNA, 32 nt, Human
ggauguggccccucccccuccuucucacccuu

SEQ ID NO: 188478 - RNA, 32 nt, Human
ggauguggccuuucaggcagagcccagaaaaa

SEQ ID NO: 188479 - RNA, 32 nt, Human
ggaugugggaaugaauuggcauugcaggaaag

SEQ ID NO: 188480 - RNA, 32 nt, Human
ggaugugggaaugacuggggugaggcaggguc

SEQ ID NO: 188481 - RNA, 32 nt, Human
ggaugugggaggaggggcuggcagggccgccu

SEQ ID NO: 188482 - RNA, 32 nt, Human
ggaugugggcaucccuggguucuuggaagcag

SEQ ID NO: 188483 - RNA, 32 nt, Human
ggaugugggcaugcaggugacaagggcccugc

SEQ ID NO: 188484 - RNA, 32 nt, Human
ggaugugggccaagcccuacagcuucccuagg

SEQ ID NO: 188485 - RNA, 31 nt, Human
ggauguggggcacugccucacagcucugcag

SEQ ID NO: 188486 - RNA, 32 nt, Human
ggaugugggggcugugcagggugcagcgcuca

SEQ ID NO: 188487 - RNA, 32 nt, Human
ggaugugggugucccuggcucugugagucuuc

SEQ ID NO: 188488 - RNA, 23 nt, Human
ggauguggugccgcaugccugua

SEQ ID NO: 188489 - RNA, 32 nt, Human
ggaugugguggagcugggcugggaccuccggg

SEQ ID NO: 188490 - RNA, 32 nt, Human
ggaugugguggcacacauaccuguaaucccag

SEQ ID NO: 188491 - RNA, 23 nt, Human
ggaugugguggcucacgccugua

SEQ ID NO: 188492 - RNA, 23 nt, Human
ggaugugguggcucaugccugua

SEQ ID NO: 188493 - RNA, 32 nt, Human
ggaugugguggggaacaggcaagucuugugca

SEQ ID NO: 188494 - RNA, 32 nt, Human
ggauguggugucugugcucagcgucaccuccu

SEQ ID NO: 188495 - RNA, 23 nt, Human
ggauguguaggaucacuacugca

SEQ ID NO: 188496 - RNA, 32 nt, Human
ggaugugucaacuagccaagaucgaggaccug

SEQ ID NO: 188497 - RNA, 32 nt, Human
ggauguguccccaggauccgucacaguguucc

SEQ ID NO: 188498 - RNA, 32 nt, Human
ggauguguccgccaccuucauccuccagacgg

SEQ ID NO: 188499 - RNA, 32 nt, Human
ggaugugucugccccaggcucagagugcugag

SEQ ID NO: 188500 - RNA, 32 nt, Human
ggaugugucugggcuuucuuuuugccaggcuu

SEQ ID NO: 188501 - RNA, 32 nt, Human
ggaugugugguuauaucugauuucugagcucu

SEQ ID NO: 188502 - RNA, 32 nt, Human
ggauguguguaccauugagaugagaaugggua

SEQ ID NO: 188503 - RNA, 32 nt, Human
ggauguguguacuguguucacaucgaguuggc

SEQ ID NO: 188504 - RNA, 32 nt, Human
ggaugugugugggggccaguugcaguguuucu

SEQ ID NO: 188505 - RNA, 32 nt, Human
ggauguguguuuugggguacggggagaggcga

SEQ ID NO: 188506 - RNA, 32 nt, Human
ggauguguucucuaggccuucaggacucuaga

SEQ ID NO: 188507 - RNA, 32 nt, Human
ggauguguuugugguuuguaaccauuacgguu

SEQ ID NO: 188508 - RNA, 22 nt, Human
ggauguuaaagccaacaagcac

SEQ ID NO: 188509 - RNA, 32 nt, Human
ggauguuaaagugcuugguggagacugguccc

SEQ ID NO: 188510 - RNA, 32 nt, Human
ggauguuagacacaauaucacaaaaaggugua

SEQ ID NO: 188511 - RNA, 19 nt, Human
ggauguuagacuccuggga

SEQ ID NO: 188512 - RNA, 32 nt, Human
ggauguuauaaauauacauauacauuuuugcc

SEQ ID NO: 188513 - RNA, 32 nt, Human
ggauguucuccaacuccugacuucaugaucca

SEQ ID NO: 188514 - RNA, 32 nt, Human
ggauguucucucuuccccaaaauccagcacca

SEQ ID NO: 188515 - RNA, 21 nt, Human
ggauguucucuguggcuguga

SEQ ID NO: 188516 - RNA, 32 nt, Human
ggauguucugcucucacuuguccacuguggcc

SEQ ID NO: 188517 - RNA, 32 nt, Human
ggauguucuggcacagcagacuggagacugag

SEQ ID NO: 188518 - RNA, 32 nt, Human
ggauguucuggcuuuacauuuuauuuauuagc

SEQ ID NO: 188519 - RNA, 22 nt, Human
ggauguugaacaaaaggcaguu

SEQ ID NO: 188520 - RNA, 32 nt, Human
ggauguugagcugaggccggaggagaaguagc

SEQ ID NO: 188521 - RNA, 32 nt, Human
ggauguugcaccagaagagagugcaguguugg

SEQ ID NO: 188522 - RNA, 32 nt, Human
ggauguugcuugcacuccagccugggugacag

SEQ ID NO: 188523 - RNA, 21 nt, Human
ggauguuggcaguggacacuu

SEQ ID NO: 188524 - RNA, 22 nt, Human
ggauguuggccaaaagcugcuu

SEQ ID NO: 188525 - RNA, 21 nt, Human
ggauguuguggagcuggggug

SEQ ID NO: 188526 - RNA, 32 nt, Human
ggauguuguguguguauacaugcauacacacg

SEQ ID NO: 188527 - RNA, 23 nt, Human
ggauguuguuggggaaggcacuu

SEQ ID NO: 188528 - RNA, 21 nt, Human
ggauguuuaccuaggucccuc

SEQ ID NO: 188529 - RNA, 32 nt, Human
ggauguuucggggagaauaggagccagaaccu

SEQ ID NO: 188530 - RNA, 32 nt, Human
ggauguuugggacuucacucgaccugcacggg

SEQ ID NO: 188531 - RNA, 31 nt, Human
ggauguuugggauccccuugcccaagggaca

SEQ ID NO: 188532 - RNA, 32 nt, Human
ggauguuuucuuucuccucuuugcuuccauuc

SEQ ID NO: 188533 - RNA, 21 nt, Human
ggauguuuuguccccuccuua

SEQ ID NO: 188534 - RNA, 32 nt, Human
ggauguuuuuccucccccuuaccgcccaugcc

SEQ ID NO: 188535 - RNA, 25 nt, Human
ggauguuuuucuuaccgacaagcac

SEQ ID NO: 188536 - RNA, 32 nt, Human
ggauuaaaaguuuccauuuaauuucccuuaaa

SEQ ID NO: 188537 - RNA, 32 nt, Human
ggauuaaaggcgugagccaccaugcccagccu

SEQ ID NO: 188538 - RNA, 32 nt, Human
ggauuaaaggugcgugccaccaugcccggcua

SEQ ID NO: 188539 - RNA, 32 nt, Human
ggauuaacaaaacaggaaaaauaaccaauccu

SEQ ID NO: 188540 - RNA, 32 nt, Human
ggauuaacuuugacaaaucaugcugcuguuau

SEQ ID NO: 188541 - RNA, 24 nt, Human
ggauuaagccuaggccacuugagg

SEQ ID NO: 188542 - RNA, 32 nt, Human
ggauuaaggaggggagguuacccaagaaacaa

SEQ ID NO: 188543 - RNA, 32 nt, Human
ggauuaaggcaauugaaaacacugccucagug

SEQ ID NO: 188544 - RNA, 32 nt, Human
ggauuaagugagccagucaugcaugggccgag

SEQ ID NO: 188545 - RNA, 21 nt, Human
ggauuaaugcugccacagggg

SEQ ID NO: 188546 - RNA, 32 nt, Human
ggauuaauguggguuuuucuguucauuuuauu

SEQ ID NO: 188547 - RNA, 32 nt, Human
ggauuaauugcaaacucugaacuuuuuacaaa

SEQ ID NO: 188548 - RNA, 32 nt, Human
ggauuacaagcacccaaccacgcccagcuaau

SEQ ID NO: 188549 - RNA, 32 nt, Human
ggauuacaagcaugcaccaccaugcccagcua

SEQ ID NO: 188550 - RNA, 32 nt, Human
ggauuacaagcaugcgccaccaugcccagcuu

SEQ ID NO: 188551 - RNA, 32 nt, Human
ggauuacaagcaugcgucaccacagcaggccc

SEQ ID NO: 188552 - RNA, 32 nt, Human
ggauuacaagcgugagccacugugcugggccc

SEQ ID NO: 188553 - RNA, 32 nt, Human
ggauuacaagugcccaccaccaugcccagcua

SEQ ID NO: 188554 - RNA, 32 nt, Human
ggauuacaccauugcauuccagccugggcaac

SEQ ID NO: 188555 - RNA, 32 nt, Human
ggauuacacgugcccaccaccaugcccagcua

SEQ ID NO: 188556 - RNA, 19 nt, Human
ggauuacagacaugagcca

SEQ ID NO: 188557 - RNA, 32 nt, Human
ggauuacagacgcacgccaccaugcccggcua

SEQ ID NO: 188558 - RNA, 32 nt, Human
ggauuacagacuccagcauaaccuucuccagg

SEQ ID NO: 188559 - RNA, 32 nt, Human
ggauuacagaugccugccaccaugucuugcua

SEQ ID NO: 188560 - RNA, 32 nt, Human
ggauuacagaugugagccaccaugcccagcuu

SEQ ID NO: 188561 - RNA, 32 nt, Human
ggauuacagaugugagccaccgugccuagcca

SEQ ID NO: 188562 - RNA, 17 nt, Human
ggauuacagcucuggga

SEQ ID NO: 188563 - RNA, 32 nt, Human
ggauuacaggaacccaccaccaugcuggcuaa

SEQ ID NO: 188564 - RNA, 32 nt, Human
ggauuacaggagugaaccaccaugcccagccu

SEQ ID NO: 188565 - RNA, 32 nt, Human
ggauuacaggagugagccaccaugcccggcug

SEQ ID NO: 188566 - RNA, 32 nt, Human
ggauuacaggcaacugccaccaugcccggcua

SEQ ID NO: 188567 - RNA, 32 nt, Human
ggauuacaggcaagcaccaccaugccugcuaa

SEQ ID NO: 188568 - RNA, 32 nt, Human
ggauuacaggcacacaccacaaugccuggcaa

SEQ ID NO: 188569 - RNA, 32 nt, Human
ggauuacaggcacacaccaccacgcccagcua

SEQ ID NO: 188570 - RNA, 32 nt, Human
ggauuacaggcacacaccaccacgcuugguua

SEQ ID NO: 188571 - RNA, 32 nt, Human
ggauuacaggcacacaccaccagccagcuaau

SEQ ID NO: 188572 - RNA, 32 nt, Human
ggauuacaggcacacaccaccauaccuggcua

SEQ ID NO: 188573 - RNA, 32 nt, Human
ggauuacaggcacacaccaccaugcccagcua

SEQ ID NO: 188574 - RNA, 32 nt, Human
ggauuacaggcacacgccaccaugcccggcua

SEQ ID NO: 188575 - RNA, 32 nt, Human
ggauuacaggcacaugccaccaugcccagcua

SEQ ID NO: 188576 - RNA, 32 nt, Human
ggauuacaggcacaugccaccaugcccguaua

SEQ ID NO: 188577 - RNA, 32 nt, Human
ggauuacaggcacaugccaccaugcucagcua

SEQ ID NO: 188578 - RNA, 32 nt, Human
ggauuacaggcacccaccaccacgcccagcua

SEQ ID NO: 188579 - RNA, 32 nt, Human
ggauuacaggcacccaccaccacgcucggcua

SEQ ID NO: 188580 - RNA, 32 nt, Human
ggauuacaggcacccaccaccauaucuggcua

SEQ ID NO: 188581 - RNA, 32 nt, Human
ggauuacaggcacccaccaccaugcccaacua

SEQ ID NO: 188582 - RNA, 32 nt, Human
ggauuacaggcacccaccaccaugcccagcua

SEQ ID NO: 188583 - RNA, 32 nt, Human
ggauuacaggcacccgccaccaugccaggcua

SEQ ID NO: 188584 - RNA, 32 nt, Human
ggauuacaggcaccugccaccaugcccggcua

SEQ ID NO: 188585 - RNA, 32 nt, Human
ggauuacaggcacgcaccaccacaccuggcua

SEQ ID NO: 188586 - RNA, 32 nt, Human
ggauuacaggcacgcaccaccaugccuggcua

SEQ ID NO: 188587 - RNA, 32 nt, Human
ggauuacaggcacgcaccacuacugccuggcu

SEQ ID NO: 188588 - RNA, 32 nt, Human
ggauuacaggcaucagccaccaugcccggaug

SEQ ID NO: 188589 - RNA, 32 nt, Human
ggauuacaggcauccgccaccaugcccggcua

SEQ ID NO: 188590 - RNA, 19 nt, Human
ggauuacaggcaugaacca

SEQ ID NO: 188591 - RNA, 19 nt, Human
ggauuacaggcaugagcca

SEQ ID NO: 188592 - RNA, 32 nt, Human
ggauuacaggcaugagccaccaugccagacuu

SEQ ID NO: 188593 - RNA, 32 nt, Human
ggauuacaggcaugagccaccaugcccaaccc

SEQ ID NO: 188594 - RNA, 32 nt, Human
ggauuacaggcaugagccaccaugcccagcca

SEQ ID NO: 188595 - RNA, 32 nt, Human
ggauuacaggcaugagccaccaugcccagccc

SEQ ID NO: 188596 - RNA, 32 nt, Human
ggauuacaggcaugagccaccaugcccagccu

SEQ ID NO: 188597 - RNA, 32 nt, Human
ggauuacaggcaugagccaccaugcccagcug

SEQ ID NO: 188598 - RNA, 32 nt, Human
ggauuacaggcaugagccaccaugcccagucg

SEQ ID NO: 188599 - RNA, 32 nt, Human
ggauuacaggcaugagccaccaugcccggccc

SEQ ID NO: 188600 - RNA, 32 nt, Human
ggauuacaggcaugagccaccaugcccggccu

SEQ ID NO: 188601 - RNA, 32 nt, Human
ggauuacaggcaugagccaccaugcccggcug

SEQ ID NO: 188602 - RNA, 32 nt, Human
ggauuacaggcaugagccaccaugucuugcca

SEQ ID NO: 188603 - RNA, 32 nt, Human
ggauuacaggcaugcaccaccacacacagcua

SEQ ID NO: 188604 - RNA, 32 nt, Human
ggauuacaggcaugcaccaccacaccaggcua

SEQ ID NO: 188605 - RNA, 32 nt, Human
ggauuacaggcaugcaccaccacacccagcua

SEQ ID NO: 188606 - RNA, 32 nt, Human
ggauuacaggcaugcaccaccacaccuggcua

SEQ ID NO: 188607 - RNA, 32 nt, Human
ggauuacaggcaugcaccaccacagcccagcu

SEQ ID NO: 188608 - RNA, 32 nt, Human
ggauuacaggcaugcaccaccacgcccagcua

SEQ ID NO: 188609 - RNA, 32 nt, Human
ggauuacaggcaugcaccaccacgcccagcuu

SEQ ID NO: 188610 - RNA, 32 nt, Human
ggauuacaggcaugcaccaccacgcccggcua

SEQ ID NO: 188611 - RNA, 32 nt, Human
ggauuacaggcaugcaccaccacgcucgacua

SEQ ID NO: 188612 - RNA, 32 nt, Human
ggauuacaggcaugcaccaccacgcuggcuaa

SEQ ID NO: 188613 - RNA, 32 nt, Human
ggauuacaggcaugcaccaccacuccuggcua

SEQ ID NO: 188614 - RNA, 32 nt, Human
ggauuacaggcaugcaccaccaugcccagaua

SEQ ID NO: 188615 - RNA, 32 nt, Human
ggauuacaggcaugcaccaccaugcccagcua

SEQ ID NO: 188616 - RNA, 32 nt, Human
ggauuacaggcaugcaccaccaugcccggaua

SEQ ID NO: 188617 - RNA, 32 nt, Human
ggauuacaggcaugcaccaccaugcccggcua

SEQ ID NO: 188618 - RNA, 32 nt, Human
ggauuacaggcaugcaccaccaugccuggcua

SEQ ID NO: 188619 - RNA, 32 nt, Human
ggauuacaggcaugcaccaccugacugauuuu

SEQ ID NO: 188620 - RNA, 32 nt, Human
ggauuacaggcaugcgccaccaugaccggcua

SEQ ID NO: 188621 - RNA, 32 nt, Human
ggauuacaggcaugcgccaccaugccaggcua

SEQ ID NO: 188622 - RNA, 32 nt, Human
ggauuacaggcaugcgccaccaugcccagcua

SEQ ID NO: 188623 - RNA, 32 nt, Human
ggauuacaggcaugcgccaccaugcccagcug

SEQ ID NO: 188624 - RNA, 32 nt, Human
ggauuacaggcaugcgccaccaugcccggcua

SEQ ID NO: 188625 - RNA, 32 nt, Human
ggauuacaggcaugcuccaccaugcccagcua

SEQ ID NO: 188626 - RNA, 32 nt, Human
ggauuacaggcaugggccaccaugcccggcua

SEQ ID NO: 188627 - RNA, 19 nt, Human
ggauuacaggcaugugcca

SEQ ID NO: 188628 - RNA, 32 nt, Human
ggauuacaggcaugugccaccaugcccagcua

SEQ ID NO: 188629 - RNA, 32 nt, Human
ggauuacaggcaugugucaccaugcccagcua

SEQ ID NO: 188630 - RNA, 32 nt, Human
ggauuacaggccugagccaccaugcccagcug

SEQ ID NO: 188631 - RNA, 32 nt, Human
ggauuacaggcgcaaaccaccaugcguggcua

SEQ ID NO: 188632 - RNA, 32 nt, Human
ggauuacaggcgcaagccacccagcccagcuu

SEQ ID NO: 188633 - RNA, 32 nt, Human
ggauuacaggcgcacaccaccacacacagcua

SEQ ID NO: 188634 - RNA, 32 nt, Human
ggauuacaggcgcacaccaccacauccagcuu

SEQ ID NO: 188635 - RNA, 32 nt, Human
ggauuacaggcgcacaucaccaugcccaaccu

SEQ ID NO: 188636 - RNA, 32 nt, Human
ggauuacaggcgcacgccaccaugcccagcua

SEQ ID NO: 188637 - RNA, 32 nt, Human
ggauuacaggcgcacgccaccgugccuggcua

SEQ ID NO: 188638 - RNA, 32 nt, Human
ggauuacaggcgcacgccacuaugcuggcuaa

SEQ ID NO: 188639 - RNA, 32 nt, Human
ggauuacaggcgcaugccaccacaccuggcua

SEQ ID NO: 188640 - RNA, 32 nt, Human
ggauuacaggcgcaugccaccaugccaggcua

SEQ ID NO: 188641 - RNA, 32 nt, Human
ggauuacaggcgcccaccaccacaccuggcua

SEQ ID NO: 188642 - RNA, 32 nt, Human
ggauuacaggcgcccaccaccacagccugcua

SEQ ID NO: 188643 - RNA, 32 nt, Human
ggauuacaggcgcccaccaccacgcccagcua

SEQ ID NO: 188644 - RNA, 32 nt, Human
ggauuacaggcgcccaccaccaugcccagcua

SEQ ID NO: 188645 - RNA, 32 nt, Human
ggauuacaggcgcccaccaccaugcccggcua

SEQ ID NO: 188646 - RNA, 32 nt, Human
ggauuacaggcgcccaccacuaugcccagcua

SEQ ID NO: 188647 - RNA, 32 nt, Human
ggauuacaggcgcccaccgccaugcccggcua

SEQ ID NO: 188648 - RNA, 32 nt, Human
ggauuacaggcgcccgccaccacacccggcuc

SEQ ID NO: 188649 - RNA, 32 nt, Human
ggauuacaggcgcccgccaccacaccuggcua

SEQ ID NO: 188650 - RNA, 32 nt, Human
ggauuacaggcgcccgccaccacgcccagcua

SEQ ID NO: 188651 - RNA, 32 nt, Human
ggauuacaggcgcccgccaccacgcccggcua

SEQ ID NO: 188652 - RNA, 32 nt, Human
ggauuacaggcgcccgccaccaugcccggcua

SEQ ID NO: 188653 - RNA, 32 nt, Human
ggauuacaggcgcccgccacuacgcccagcua

SEQ ID NO: 188654 - RNA, 32 nt, Human
ggauuacaggcgcccgccaucacgcccgggua

SEQ ID NO: 188655 - RNA, 32 nt, Human
ggauuacaggcgcccgccaucgugcccagcua

SEQ ID NO: 188656 - RNA, 32 nt, Human
ggauuacaggcgccgaucaccaagcccggcua

SEQ ID NO: 188657 - RNA, 32 nt, Human
ggauuacaggcgccugccaccacgcccagcua

SEQ ID NO: 188658 - RNA, 32 nt, Human
ggauuacaggcgccugccaccaugccuagcaa

SEQ ID NO: 188659 - RNA, 32 nt, Human
ggauuacaggcgccugccaccaugccuggcua

SEQ ID NO: 188660 - RNA, 32 nt, Human
ggauuacaggcgccugccaccaugccuggcug

SEQ ID NO: 188661 - RNA, 32 nt, Human
ggauuacaggcgccugccaccaugcugggcua

SEQ ID NO: 188662 - RNA, 32 nt, Human
ggauuacaggcgccugcuaccacauccagcua

SEQ ID NO: 188663 - RNA, 32 nt, Human
ggauuacaggcgccugcuaccucgcccggcuu

SEQ ID NO: 188664 - RNA, 32 nt, Human
ggauuacaggcgcgagccaccaugcccggcca

SEQ ID NO: 188665 - RNA, 32 nt, Human
ggauuacaggcgcgagccaccgcgcccagccu

SEQ ID NO: 188666 - RNA, 32 nt, Human
ggauuacaggcgcgagccaccgcgcccgacag

SEQ ID NO: 188667 - RNA, 32 nt, Human
ggauuacaggcgcgcaucaccaugcccagcua

SEQ ID NO: 188668 - RNA, 32 nt, Human
ggauuacaggcgcguaucaccauacccagcua

SEQ ID NO: 188669 - RNA, 32 nt, Human
ggauuacaggcgcgugccaccacacccagcua

SEQ ID NO: 188670 - RNA, 32 nt, Human
ggauuacaggcgcgugccaccauaccgagcua

SEQ ID NO: 188671 - RNA, 32 nt, Human
ggauuacaggcguacaccaccaugccuggcua

SEQ ID NO: 188672 - RNA, 32 nt, Human
ggauuacaggcguacgccaccaugcccaguua

SEQ ID NO: 188673 - RNA, 32 nt, Human
ggauuacaggcgucagccaccaugcccagccu

SEQ ID NO: 188674 - RNA, 32 nt, Human
ggauuacaggcguccgccaccaugcccagcca

SEQ ID NO: 188675 - RNA, 19 nt, Human
ggauuacaggcgugagcca

SEQ ID NO: 188676 - RNA, 32 nt, Human
ggauuacaggcgugagccaccaugaccagccc

SEQ ID NO: 188677 - RNA, 32 nt, Human
ggauuacaggcgugagccaccaugcccagaug

SEQ ID NO: 188678 - RNA, 32 nt, Human
ggauuacaggcgugagccaccaugcccagccu

SEQ ID NO: 188679 - RNA, 32 nt, Human
ggauuacaggcgugagccaccaugccccgccc

SEQ ID NO: 188680 - RNA, 32 nt, Human
ggauuacaggcgugagccaccaugcccggcca

SEQ ID NO: 188681 - RNA, 32 nt, Human
ggauuacaggcgugagccaccaugcccggccc

SEQ ID NO: 188682 - RNA, 32 nt, Human
ggauuacaggcgugagccaccaugcccggccu

SEQ ID NO: 188683 - RNA, 32 nt, Human
ggauuacaggcgugagccaccaugccugccca

SEQ ID NO: 188684 - RNA, 32 nt, Human
ggauuacaggcgugagccaccaugccuggcca

SEQ ID NO: 188685 - RNA, 32 nt, Human
ggauuacaggcgugagccaccaugccuggccu

SEQ ID NO: 188686 - RNA, 32 nt, Human
ggauuacaggcgugagccaccaugcucggccu

SEQ ID NO: 188687 - RNA, 32 nt, Human
ggauuacaggcgugagccaccauguccagcca

SEQ ID NO: 188688 - RNA, 32 nt, Human
ggauuacaggcgugagccaccauguccggcuu

SEQ ID NO: 188689 - RNA, 32 nt, Human
ggauuacaggcgugcaccaccacgcccaguug

SEQ ID NO: 188690 - RNA, 32 nt, Human
ggauuacaggcgugcaccaccacgcccggcug

SEQ ID NO: 188691 - RNA, 32 nt, Human
ggauuacaggcgugcaccaccaugccuggcua

SEQ ID NO: 188692 - RNA, 32 nt, Human
ggauuacaggcgugcgccaccauguccagcua

SEQ ID NO: 188693 - RNA, 32 nt, Human
ggauuacaggcguguaccaccauacccagcua

SEQ ID NO: 188694 - RNA, 32 nt, Human
ggauuacaggcgugugccaccaugcccaaccu

SEQ ID NO: 188695 - RNA, 32 nt, Human
ggauuacaggcgugugccaccaugcccagcua

SEQ ID NO: 188696 - RNA, 32 nt, Human
ggauuacaggcgugugccaccaugccuggcua

SEQ ID NO: 188697 - RNA, 32 nt, Human
ggauuacaggcucaugccaccaugcccagcua

SEQ ID NO: 188698 - RNA, 19 nt, Human
ggauuacagggaugagcca

SEQ ID NO: 188699 - RNA, 32 nt, Human
ggauuacagguaccugccaccaugcccggcua

SEQ ID NO: 188700 - RNA, 32 nt, Human
ggauuacagguacgcaccaccacgcccagcuc

SEQ ID NO: 188701 - RNA, 19 nt, Human
ggauuacagguaugagcca

SEQ ID NO: 188702 - RNA, 32 nt, Human
ggauuacagguaugagccaccaugcccggcug

SEQ ID NO: 188703 - RNA, 32 nt, Human
ggauuacagguaugcaccaccacgcccggcua

SEQ ID NO: 188704 - RNA, 32 nt, Human
ggauuacaggugcacaccaccacaccuggcua

SEQ ID NO: 188705 - RNA, 32 nt, Human
ggauuacaggugcacaccaccacgcuuggcua

SEQ ID NO: 188706 - RNA, 32 nt, Human
ggauuacaggugcacaccaccaugcccggcaa

SEQ ID NO: 188707 - RNA, 32 nt, Human
ggauuacaggugcacaccaccaugccugucua

SEQ ID NO: 188708 - RNA, 32 nt, Human
ggauuacaggugcacgccaccaugcuuggcuc

SEQ ID NO: 188709 - RNA, 32 nt, Human
ggauuacaggugcaggccaccaugcccggcua

SEQ ID NO: 188710 - RNA, 32 nt, Human
ggauuacaggugcaugccaccauggcuggcua

SEQ ID NO: 188711 - RNA, 32 nt, Human
ggauuacaggugcccaccaccacaccaggcua

SEQ ID NO: 188712 - RNA, 32 nt, Human
ggauuacaggugcccaccaccacauccagcua

SEQ ID NO: 188713 - RNA, 32 nt, Human
ggauuacaggugcccaccaccaccccuggcua

SEQ ID NO: 188714 - RNA, 32 nt, Human
ggauuacaggugcccaccaccaugccaggcua

SEQ ID NO: 188715 - RNA, 32 nt, Human
ggauuacaggugcccaccaccaugcccggcaa

SEQ ID NO: 188716 - RNA, 32 nt, Human
ggauuacaggugcccaccaccaugcccggcua

SEQ ID NO: 188717 - RNA, 32 nt, Human
ggauuacaggugcccaccaccaugccuggaua

SEQ ID NO: 188718 - RNA, 32 nt, Human
ggauuacaggugcccaccaccaugccuggcua

SEQ ID NO: 188719 - RNA, 32 nt, Human
ggauuacaggugcccaccaccaugccuggcug

SEQ ID NO: 188720 - RNA, 32 nt, Human
ggauuacaggugcccaccaccaugucaagaua

SEQ ID NO: 188721 - RNA, 32 nt, Human
ggauuacaggugcccgccaccaugcucagcua

SEQ ID NO: 188722 - RNA, 32 nt, Human
ggauuacaggugccugccaccaugcccagcua

SEQ ID NO: 188723 - RNA, 32 nt, Human
ggauuacaggugcgcaccaccaugcccggcua

SEQ ID NO: 188724 - RNA, 32 nt, Human
ggauuacaggugcgcaccauuacauccagcua

SEQ ID NO: 188725 - RNA, 32 nt, Human
ggauuacaggugcgccccaccaugcccagcua

SEQ ID NO: 188726 - RNA, 32 nt, Human
ggauuacaggugcucaccaccacguccagcua

SEQ ID NO: 188727 - RNA, 32 nt, Human
ggauuacagguguaagccaccaugcccagccu

SEQ ID NO: 188728 - RNA, 24 nt, Human
ggauuacaggugugagacagugca

SEQ ID NO: 188729 - RNA, 32 nt, Human
ggauuacaggugugagccaccaugccaggccc

SEQ ID NO: 188730 - RNA, 32 nt, Human
ggauuacaggugugagccaccaugcccaacac

SEQ ID NO: 188731 - RNA, 32 nt, Human
ggauuacaggugugagccaccaugcccagccc

SEQ ID NO: 188732 - RNA, 32 nt, Human
ggauuacaggugugagccaccaugcccagccu

SEQ ID NO: 188733 - RNA, 32 nt, Human
ggauuacaggugugagccaccaugcccggccu

SEQ ID NO: 188734 - RNA, 32 nt, Human
ggauuacaggugugagccaccaugcucugcca

SEQ ID NO: 188735 - RNA, 32 nt, Human
ggauuacaggugugcaccaccacacccggcua

SEQ ID NO: 188736 - RNA, 32 nt, Human
ggauuacaggugugcaccaccauuccuggcua

SEQ ID NO: 188737 - RNA, 32 nt, Human
ggauuacaggugugcgccaccaugcccggccu

SEQ ID NO: 188738 - RNA, 32 nt, Human
ggauuacaggugugcgccaccaugcccggcua

SEQ ID NO: 188739 - RNA, 32 nt, Human
ggauuacaggugugcgccaccauguccggcua

SEQ ID NO: 188740 - RNA, 32 nt, Human
ggauuacaggugugugccaccaugcccgucuc

SEQ ID NO: 188741 - RNA, 32 nt, Human
ggauuacaggugugugccaccaugcuuggcua

SEQ ID NO: 188742 - RNA, 32 nt, Human
ggauuacaggugugugccaucaugccugacua

SEQ ID NO: 188743 - RNA, 32 nt, Human
ggauuacagguguguggcaccaugcccagcua

SEQ ID NO: 188744 - RNA, 32 nt, Human
ggauuacagguuugcaccaccaugcccggcua

SEQ ID NO: 188745 - RNA, 32 nt, Human
ggauuacaguguuauaguuuugccgcuggacu

SEQ ID NO: 188746 - RNA, 32 nt, Human
ggauuacaugcaugagccacugugcugggcuu

SEQ ID NO: 188747 - RNA, 32 nt, Human
ggauuacauuuuuauggggcagggguaagcgg

SEQ ID NO: 188748 - RNA, 32 nt, Human
ggauuaccggcgugagccaccaugcccagccu

SEQ ID NO: 188749 - RNA, 32 nt, Human
ggauuacgccuguaaucccagcacuuugggag

SEQ ID NO: 188750 - RNA, 32 nt, Human
ggauuacgcugaggcccagccugggggagaau

SEQ ID NO: 188751 - RNA, 32 nt, Human
ggauuacgggcgcccaccaccaugcccagcua

SEQ ID NO: 188752 - RNA, 32 nt, Human
ggauuacgggcgcccgccaccaugcccagcua

SEQ ID NO: 188753 - RNA, 32 nt, Human
ggauuacgucacugcaggaacugcuucugaaa

SEQ ID NO: 188754 - RNA, 24 nt, Human
ggauuacgugauccacccgccuca

SEQ ID NO: 188755 - RNA, 32 nt, Human
ggauuacuccugcauaacaagaucccauuucu

SEQ ID NO: 188756 - RNA, 32 nt, Human
ggauuacugcugucuaucuucuugcuccacuc

SEQ ID NO: 188757 - RNA, 32 nt, Human
ggauuacuggugcacaccaccacacucagcua

SEQ ID NO: 188758 - RNA, 32 nt, Human
ggauuacuggugcccaccaccaugcccagcua

SEQ ID NO: 188759 - RNA, 32 nt, Human
ggauuacuucaaccugggagguugaggcugca

SEQ ID NO: 188760 - RNA, 31 nt, Human
ggauuagaaaaaugccuauuuuucuuguauc

SEQ ID NO: 188761 - RNA, 32 nt, Human
ggauuagaacaugcuuauaccuauuaacaaga

SEQ ID NO: 188762 - RNA, 32 nt, Human
ggauuagaauaaauccuaaucucuaaucuaag

SEQ ID NO: 188763 - RNA, 23 nt, Human
ggauuagacgccgggaagcacuu

SEQ ID NO: 188764 - RNA, 32 nt, Human
ggauuaggcaggcagaggcaguuaugggcuuc

SEQ ID NO: 188765 - RNA, 32 nt, Human
ggauuagggaaggacauaauguauuuaagaau

SEQ ID NO: 188766 - RNA, 32 nt, Human
ggauuagggaccuaccaaaauauuucauuaau

SEQ ID NO: 188767 - RNA, 32 nt, Human
ggauuagggguggaggcagcaggaugagcaga

SEQ ID NO: 188768 - RNA, 32 nt, Human
ggauuaggugguccucacagggguggggccau

SEQ ID NO: 188769 - RNA, 32 nt, Human
ggauuaggugugagccaccgcaccuggccgau

SEQ ID NO: 188770 - RNA, 32 nt, Human
ggauuaguagucaguugcuguaaacuauuuug

SEQ ID NO: 188771 - RNA, 32 nt, Human
ggauuauacuugaaaugcauugugcugauguu

SEQ ID NO: 188772 - RNA, 32 nt, Human
ggauuauaggcacacaccaccauguccagcua

SEQ ID NO: 188773 - RNA, 32 nt, Human
ggauuauaggcacgagccaccaugccaagccu

SEQ ID NO: 188774 - RNA, 19 nt, Human
ggauuauaggcaugagcca

SEQ ID NO: 188775 - RNA, 32 nt, Human
ggauuauaggcaugagccaccaugcccagcca

SEQ ID NO: 188776 - RNA, 32 nt, Human
ggauuauaggcaugcaccaccacgcccagcua

SEQ ID NO: 188777 - RNA, 32 nt, Human
ggauuauaggcaugcaccaccaugcccagcua

SEQ ID NO: 188778 - RNA, 32 nt, Human
ggauuauaggcaugcgccaccaugcccggccg

SEQ ID NO: 188779 - RNA, 32 nt, Human
ggauuauaggcgagugccaucaugcccggcua

SEQ ID NO: 188780 - RNA, 32 nt, Human
ggauuauaggcgugagccaccaugcccagccu

SEQ ID NO: 188781 - RNA, 32 nt, Human
ggauuauaggcgugagccaccaugcucagcca

SEQ ID NO: 188782 - RNA, 32 nt, Human
ggauuauaggcgugcaccaccaugcccagcua

SEQ ID NO: 188783 - RNA, 32 nt, Human
ggauuauaggcgugugccaccaugcccagcaa

SEQ ID NO: 188784 - RNA, 32 nt, Human
ggauuauaggugcaugccaccaugcccagcua

SEQ ID NO: 188785 - RNA, 32 nt, Human
ggauuauaggugcccaccaccaagcccagcua

SEQ ID NO: 188786 - RNA, 32 nt, Human
ggauuauaggugccugccaccaugcccggcua

SEQ ID NO: 188787 - RNA, 32 nt, Human
ggauuauaggugcgcaccaccacacccggcua

SEQ ID NO: 188788 - RNA, 32 nt, Human
ggauuauaggugugaaccaccauacccaggcu

SEQ ID NO: 188789 - RNA, 32 nt, Human
ggauuauaggugugagccaccaugcccagccc

SEQ ID NO: 188790 - RNA, 32 nt, Human
ggauuauauuaauugcuaaauauuuuauucac

SEQ ID NO: 188791 - RNA, 32 nt, Human
ggauuaucauuaccuuuacaauacuguauaau

SEQ ID NO: 188792 - RNA, 32 nt, Human
ggauuaucgcacagacugggagguuuaguggu

SEQ ID NO: 188793 - RNA, 32 nt, Human
ggauuaucgccaccaucaccucuuucaauugc

SEQ ID NO: 188794 - RNA, 32 nt, Human
ggauuaucuuugcuaccuguguuaaagaauau

SEQ ID NO: 188795 - RNA, 32 nt, Human
ggauuaugaagggguggccugccccuccacau

SEQ ID NO: 188796 - RNA, 32 nt, Human
ggauuaugagcuucuuucaagggcuaaggcug

SEQ ID NO: 188797 - RNA, 32 nt, Human
ggauuaugcccagccacuuggggagggcaguc

SEQ ID NO: 188798 - RNA, 32 nt, Human
ggauuaugccuaguuugucauaucacagaaaa

SEQ ID NO: 188799 - RNA, 32 nt, Human
ggauuaugggcgcccaccaccaugcccagcua

SEQ ID NO: 188800 - RNA, 32 nt, Human
ggauuaugggcgcccaccaccaugccuggcua

SEQ ID NO: 188801 - RNA, 32 nt, Human
ggauuaugucuuauauuuucucugucagaguu

SEQ ID NO: 188802 - RNA, 17 nt, Human
ggauuauguggagugaa

SEQ ID NO: 188803 - RNA, 32 nt, Human
ggauuauguguguacacuccaucucugaagaa

SEQ ID NO: 188804 - RNA, 32 nt, Human
ggauuauuaccugaagugguggaagguugauc

SEQ ID NO: 188805 - RNA, 32 nt, Human
ggauuauuagguuggugcaaaaguaauugugg

SEQ ID NO: 188806 - RNA, 32 nt, Human
ggauuauuuaauaacauuaccuuacuguggag

SEQ ID NO: 188807 - RNA, 18 nt, Human
ggauuauuuccacuguga

SEQ ID NO: 188808 - RNA, 32 nt, Human
ggauuauuucuuucuccucuuacagaaugaag

SEQ ID NO: 188809 - RNA, 32 nt, Human
ggauucaaaaacacagggaggggcuccauuuu

SEQ ID NO: 188810 - RNA, 23 nt, Human
ggauucaaacaauucuccugccu

SEQ ID NO: 188811 - RNA, 32 nt, Human
ggauucaaaggaaaaaucuuugggugauuccc

SEQ ID NO: 188812 - RNA, 32 nt, Human
ggauucaacagcuuuauugucuggaagcagug

SEQ ID NO: 188813 - RNA, 22 nt, Human
ggauucaagcaauucuccugcc

SEQ ID NO: 188814 - RNA, 23 nt, Human
ggauucaagcaauucuccugccu

SEQ ID NO: 188815 - RNA, 23 nt, Human
ggauucaagcaauucuucugccu

SEQ ID NO: 188816 - RNA, 23 nt, Human
ggauucaagcgauuccccugccu

SEQ ID NO: 188817 - RNA, 23 nt, Human
ggauucaagcgauucuccugccu

SEQ ID NO: 188818 - RNA, 25 nt, Human
ggauucaagcgauucuccugccuca

SEQ ID NO: 188819 - RNA, 22 nt, Human
ggauucaagcgauucuccuguc

SEQ ID NO: 188820 - RNA, 25 nt, Human
ggauucaagcgguuuuccugccuca

SEQ ID NO: 188821 - RNA, 25 nt, Human
ggauucaagugauuccccugucuca

SEQ ID NO: 188822 - RNA, 25 nt, Human
ggauucaagugauucuacugccuca

SEQ ID NO: 188823 - RNA, 25 nt, Human
ggauucaagugauucuccagccuca

SEQ ID NO: 188824 - RNA, 25 nt, Human
ggauucaagugauucuccugccuca

SEQ ID NO: 188825 - RNA, 32 nt, Human
ggauucacaccagccacaagccuggaaagaug

SEQ ID NO: 188826 - RNA, 32 nt, Human
ggauucacuaaauuuguuuguuguuguuguug

SEQ ID NO: 188827 - RNA, 32 nt, Human
ggauucacugcuucucauaccuccagugaaga

SEQ ID NO: 188828 - RNA, 32 nt, Human
ggauucacuucuuuaaggguaaggaggcuagu

SEQ ID NO: 188829 - RNA, 32 nt, Human
ggauucagacacuguaucccagaacugcucua

SEQ ID NO: 188830 - RNA, 32 nt, Human
ggauucagaccauccauaaugaacacgcauca

SEQ ID NO: 188831 - RNA, 32 nt, Human
ggauucagagagucugggggacaggaauccug

SEQ ID NO: 188832 - RNA, 32 nt, Human
ggauucagagguaggcucuggagccagucuac

SEQ ID NO: 188833 - RNA, 32 nt, Human
ggauucagagugacuugccuaagauuacacag

SEQ ID NO: 188834 - RNA, 32 nt, Human
ggauucagccuccugcuggguccuucugcugg

SEQ ID NO: 188835 - RNA, 22 nt, Human
ggauucagcucggagagcucug

SEQ ID NO: 188836 - RNA, 32 nt, Human
ggauucaggagaaggcaaaagcuagaaacacu

SEQ ID NO: 188837 - RNA, 32 nt, Human
ggauucaguugcagagcaggaagccuggaucc

SEQ ID NO: 188838 - RNA, 32 nt, Human
ggauucauaaacuucuucccuaccugcaucau

SEQ ID NO: 188839 - RNA, 22 nt, Human
ggauucaucuguuuucuucacu

SEQ ID NO: 188840 - RNA, 32 nt, Human
ggauucaugcucccugccccuaccccacccug

SEQ ID NO: 188841 - RNA, 32 nt, Human
ggauuccacagaguugaccucucugauuuucu

SEQ ID NO: 188842 - RNA, 32 nt, Human
ggauuccacccaggucugucugcagcgaguug

SEQ ID NO: 188843 - RNA, 32 nt, Human
ggauuccacuggcauccagccucccacagggc

SEQ ID NO: 188844 - RNA, 32 nt, Human
ggauuccagaagcucaggugguggugacuaaa

SEQ ID NO: 188845 - RNA, 23 nt, Human
ggauuccagcaauucuccugccu

SEQ ID NO: 188846 - RNA, 32 nt, Human
ggauuccagccuguuggccccugucuucgacc

SEQ ID NO: 188847 - RNA, 32 nt, Human
ggauuccagcuuuguguccuccuuggcaagcu

SEQ ID NO: 188848 - RNA, 32 nt, Human
ggauuccaggucuggaguuuuccaauguuaau

SEQ ID NO: 188849 - RNA, 32 nt, Human
ggauuccauauuuuuguuucucuccaauucag

SEQ ID NO: 188850 - RNA, 32 nt, Human
ggauuccauccagcucagaagggcaggaguaa

SEQ ID NO: 188851 - RNA, 32 nt, Human
ggauuccaucuaugagacuuugucuacauaac

SEQ ID NO: 188852 - RNA, 32 nt, Human
ggauuccaugguagcugggauguuagggcuca

SEQ ID NO: 188853 - RNA, 32 nt, Human
ggauuccauucaagcaugcacauaacuagcag

SEQ ID NO: 188854 - RNA, 32 nt, Human
ggauucccacaucuucuaguuggacaauauug

SEQ ID NO: 188855 - RNA, 32 nt, Human
ggauucccagaagcauagcuuagaugggacca

SEQ ID NO: 188856 - RNA, 23 nt, Human
ggauucccagccucacucccucu

SEQ ID NO: 188857 - RNA, 32 nt, Human
ggauucccagucuacaaaaccccacagcuccu

SEQ ID NO: 188858 - RNA, 22 nt, Human
ggauucccccggcucgccugcc

SEQ ID NO: 188859 - RNA, 32 nt, Human
ggauuccccugccccgcccccggcacgaggcc

SEQ ID NO: 188860 - RNA, 32 nt, Human
ggauucccgcaggccgguguguuuucaaaaca

SEQ ID NO: 188861 - RNA, 32 nt, Human
ggauucccugacuuugacacacauggccaccu

SEQ ID NO: 188862 - RNA, 32 nt, Human
ggauucccuggagaaaguggaccuaaggguga

SEQ ID NO: 188863 - RNA, 32 nt, Human
ggauuccgaggcagaaggguguaauuaaggau

SEQ ID NO: 188864 - RNA, 32 nt, Human
ggauuccuacuuccugcucuaagguuugacac

SEQ ID NO: 188865 - RNA, 32 nt, Human
ggauuccuagagccugcuaacagaauaauccc

SEQ ID NO: 188866 - RNA, 32 nt, Human
ggauuccucaugggggaggcagagcccacccg

SEQ ID NO: 188867 - RNA, 20 nt, Human
ggauuccugccagguccccg

SEQ ID NO: 188868 - RNA, 32 nt, Human
ggauuccugcuggcauucggcuguggcccuag

SEQ ID NO: 188869 - RNA, 32 nt, Human
ggauuccugcuugugcaggagccuguguacac

SEQ ID NO: 188870 - RNA, 32 nt, Human
ggauuccuuccaagucaguuacaggugguuuu

SEQ ID NO: 188871 - RNA, 17 nt, Human
ggauuccuugccaggga

SEQ ID NO: 188872 - RNA, 32 nt, Human
ggauuccuuuuucgccaggcaccaaggcacag

SEQ ID NO: 188873 - RNA, 32 nt, Human
ggauucgaaggcauaagcagaagaggaaaggg

SEQ ID NO: 188874 - RNA, 32 nt, Human
ggauucgacagcagugacagaucagugcauuu

SEQ ID NO: 188875 - RNA, 32 nt, Human
ggauucgaggagaagggaaggaugcagcuuug

SEQ ID NO: 188876 - RNA, 25 nt, Human
ggauucgagugauucuccugccuca

SEQ ID NO: 188877 - RNA, 32 nt, Human
ggauucgcgcuccacuggucagcuggggucgc

SEQ ID NO: 188878 - RNA, 32 nt, Human
ggauucggaccacuuggggaucccagaaccuc

SEQ ID NO: 188879 - RNA, 32 nt, Human
ggauucggcugccauggcgccugcugcugagc

SEQ ID NO: 188880 - RNA, 32 nt, Human
ggauucgggaaguggcugaagagcacuggaaa

SEQ ID NO: 188881 - RNA, 32 nt, Human
ggauucuaggagaaagagaaggucuaugucaa

SEQ ID NO: 188882 - RNA, 32 nt, Human
ggauucuauccagcaagauccuguccaagagu

SEQ ID NO: 188883 - RNA, 32 nt, Human
ggauucucauaagaagcacgcaaccuagaucc

SEQ ID NO: 188884 - RNA, 32 nt, Human
ggauucuccauggcuaggcccagaaacacagg

SEQ ID NO: 188885 - RNA, 32 nt, Human
ggauucucccaggagccuccagaaggaaccuu

SEQ ID NO: 188886 - RNA, 32 nt, Human
ggauucuccccaaggucauuuguauucagagu

SEQ ID NO: 188887 - RNA, 32 nt, Human
ggauucuccugccucagccuccaacuagcugg

SEQ ID NO: 188888 - RNA, 32 nt, Human
ggauucuccugccucagccuccugaguagcug

SEQ ID NO: 188889 - RNA, 32 nt, Human
ggauucuccugccucaggcuccugaguagcua

SEQ ID NO: 188890 - RNA, 32 nt, Human
ggauucugaugggaagaggccugggaugcugc

SEQ ID NO: 188891 - RNA, 32 nt, Human
ggauucugcacuuuagccagccugggucggca

SEQ ID NO: 188892 - RNA, 31 nt, Human
ggauucugccucuuuaguccucacuguuaaa

SEQ ID NO: 188893 - RNA, 32 nt, Human
ggauucugggaggugacgucgcgggucucggu

SEQ ID NO: 188894 - RNA, 32 nt, Human
ggauucuggucagcuauaaaggaggacuuucc

SEQ ID NO: 188895 - RNA, 20 nt, Human
ggauucuggugggguguguu

SEQ ID NO: 188896 - RNA, 32 nt, Human
ggauucugguuccagccaggguugaggaaaag

SEQ ID NO: 188897 - RNA, 32 nt, Human
ggauucugguuccagccaggguugaggaaagg

SEQ ID NO: 188898 - RNA, 32 nt, Human
ggauucugguugucacuuuucuuaguuaugag

SEQ ID NO: 188899 - RNA, 32 nt, Human
ggauucuguaauguuccuccauacaguuaaaa

SEQ ID NO: 188900 - RNA, 32 nt, Human
ggauucuguaguaaggugacauagcuaugaca

SEQ ID NO: 188901 - RNA, 23 nt, Human
ggauucuucaacacagccaauga

SEQ ID NO: 188902 - RNA, 23 nt, Human
ggauucuucccgaacaggcgcuu

SEQ ID NO: 188903 - RNA, 32 nt, Human
ggauucuuguucuuccucuuaucuuccuuuug

SEQ ID NO: 188904 - RNA, 32 nt, Human
ggauucuuucucucuucucccaacaauccaaa

SEQ ID NO: 188905 - RNA, 32 nt, Human
ggauucuuuguucaccccgcagauaguuaaug

SEQ ID NO: 188906 - RNA, 32 nt, Human
ggauugaaaaacagaaacacaaaacuuugacu

SEQ ID NO: 188907 - RNA, 32 nt, Human
ggauugaaaaagcaaaccacagcagaaccauc

SEQ ID NO: 188908 - RNA, 32 nt, Human
ggauugaaagaaugugugugaagggguagaau

SEQ ID NO: 188909 - RNA, 32 nt, Human
ggauugaaggauuggguuuucucuuucccaug

SEQ ID NO: 188910 - RNA, 32 nt, Human
ggauugagaacagcuggucuacaccaguuccu

SEQ ID NO: 188911 - RNA, 32 nt, Human
ggauugagacugacacagguaaggcgucuucu

SEQ ID NO: 188912 - RNA, 32 nt, Human
ggauugagcacccuguacucuccagccaccuu

SEQ ID NO: 188913 - RNA, 32 nt, Human
ggauugagccaagaggugagggugcacgucuu

SEQ ID NO: 188914 - RNA, 32 nt, Human
ggauugaggagacugaagaaugcugaagacag

SEQ ID NO: 188915 - RNA, 20 nt, Human
ggauugaggcacagaguguu

SEQ ID NO: 188916 - RNA, 32 nt, Human
ggauugaggggcccuggcaggacccugaccuc

SEQ ID NO: 188917 - RNA, 32 nt, Human
ggauugaucggagagggcagauccucagguuc

SEQ ID NO: 188918 - RNA, 32 nt, Human
ggauugaucuucagggcuguuuuuguuccugc

SEQ ID NO: 188919 - RNA, 32 nt, Human
ggauugcaccacugcacuccagccugggcuac

SEQ ID NO: 188920 - RNA, 32 nt, Human
ggauugcacccuggcgagcuuaccaagggccu

SEQ ID NO: 188921 - RNA, 32 nt, Human
ggauugcagacgugcaccaccacgccaggcua

SEQ ID NO: 188922 - RNA, 32 nt, Human
ggauugcaggcacucaccaccaugcccggcua

SEQ ID NO: 188923 - RNA, 19 nt, Human
ggauugcaggcaugagcca

SEQ ID NO: 188924 - RNA, 32 nt, Human
ggauugcaggcgugagccaccaugcccggcuc

SEQ ID NO: 188925 - RNA, 32 nt, Human
ggauugcaggugcacaccaccacgcccagcua

SEQ ID NO: 188926 - RNA, 32 nt, Human
ggauugcaggugcccaccaccacgcccagcua

SEQ ID NO: 188927 - RNA, 32 nt, Human
ggauugcaggugcccaccaucaugcccagcua

SEQ ID NO: 188928 - RNA, 32 nt, Human
ggauugcagugaucauuaaucaaaaauauuug

SEQ ID NO: 188929 - RNA, 32 nt, Human
ggauugcaucacugcacuccagccugggugac

SEQ ID NO: 188930 - RNA, 32 nt, Human
ggauugccugagaccaggagguugaggcugca

SEQ ID NO: 188931 - RNA, 32 nt, Human
ggauugccuggguuccaugagacaggccagcg

SEQ ID NO: 188932 - RNA, 32 nt, Human
ggauugcgagggaagccaggggaggaucgcga

SEQ ID NO: 188933 - RNA, 32 nt, Human
ggauugcgccaccacacuccagccugggcaac

SEQ ID NO: 188934 - RNA, 32 nt, Human
ggauugcgccacugcaccccagcccgggugac

SEQ ID NO: 188935 - RNA, 32 nt, Human
ggauugcgccacugcacuccagccugggcaac

SEQ ID NO: 188936 - RNA, 32 nt, Human
ggauugcgccacugcacuccagccugggugac

SEQ ID NO: 188937 - RNA, 32 nt, Human
ggauugcgccagugcacuccagcugggcgaca

SEQ ID NO: 188938 - RNA, 32 nt, Human
ggauugcgcuacugcacuccagccugggugac

SEQ ID NO: 188939 - RNA, 32 nt, Human
ggauugcuacuguaucagaaauauuguuucaa

SEQ ID NO: 188940 - RNA, 32 nt, Human
ggauugcucaugcagaacaccacccagugccc

SEQ ID NO: 188941 - RNA, 32 nt, Human
ggauugcugcauaucagcaguuggauguucuu

SEQ ID NO: 188942 - RNA, 32 nt, Human
ggauugcuggauggaaacccuggaauaggcua

SEQ ID NO: 188943 - RNA, 32 nt, Human
ggauugcuguuuacgauagugccuucauuagu

SEQ ID NO: 188944 - RNA, 32 nt, Human
ggauugcuuaagucugggagguugaggcugca

SEQ ID NO: 188945 - RNA, 22 nt, Human
ggauugcuuacggagaacucug

SEQ ID NO: 188946 - RNA, 32 nt, Human
ggauugcuucaacccaggcauucgagacuagc

SEQ ID NO: 188947 - RNA, 18 nt, Human
ggauugcuugagcccagg

SEQ ID NO: 188948 - RNA, 32 nt, Human
ggauugcuugagccugggagguugaggcugca

SEQ ID NO: 188949 - RNA, 32 nt, Human
ggauugcuugagcguagccauucgagagcagc

SEQ ID NO: 188950 - RNA, 32 nt, Human
ggauugcuugagcucaggaguucgagaccagu

SEQ ID NO: 188951 - RNA, 32 nt, Human
ggauugcuugagcucaggaguuugagaccaac

SEQ ID NO: 188952 - RNA, 32 nt, Human
ggauugcuugagcucaggaguuugagaccagc

SEQ ID NO: 188953 - RNA, 32 nt, Human
ggauugcuugagcucggaagauggaggcugca

SEQ ID NO: 188954 - RNA, 32 nt, Human
ggauugcuugagcucgggaguuugagaccagc

SEQ ID NO: 188955 - RNA, 18 nt, Human
ggauugcuugaguccagg

SEQ ID NO: 188956 - RNA, 32 nt, Human
ggauugcuugaguccaggagguugaggcugca

SEQ ID NO: 188957 - RNA, 32 nt, Human
ggauugcuugggccugggaggucgaggcugca

SEQ ID NO: 188958 - RNA, 32 nt, Human
ggauuggaaagaauguugggaaaggacaucuu

SEQ ID NO: 188959 - RNA, 32 nt, Human
ggauuggaccuggaagaagugagucuccucuc

SEQ ID NO: 188960 - RNA, 32 nt, Human
ggauuggacuggaaggacuggcugucuuuccu

SEQ ID NO: 188961 - RNA, 32 nt, Human
ggauuggagaagguaccuggauccuuguggac

SEQ ID NO: 188962 - RNA, 32 nt, Human
ggauuggagcagugugcucuggcgggaagggc

SEQ ID NO: 188963 - RNA, 32 nt, Human
ggauuggaggcaaaccaucaagguggucccuc

SEQ ID NO: 188964 - RNA, 32 nt, Human
ggauuggagguggggguuucagaguguugcca

SEQ ID NO: 188965 - RNA, 32 nt, Human
ggauuggccagagaaguagggagcagcagugg

SEQ ID NO: 188966 - RNA, 32 nt, Human
ggauuggccuccagggcgcaggggagggugcg

SEQ ID NO: 188967 - RNA, 32 nt, Human
ggauuggcuaccucuaggugaaaugagcggug

SEQ ID NO: 188968 - RNA, 32 nt, Human
ggauuggcugugagccaauucaccucagucuc

SEQ ID NO: 188969 - RNA, 32 nt, Human
ggauugggcuaguuagcacagagcagggacgg

SEQ ID NO: 188970 - RNA, 32 nt, Human
ggauuggggaaaggggagagagaagcaguaga

SEQ ID NO: 188971 - RNA, 21 nt, Human
ggauuggggaccauggucugg

SEQ ID NO: 188972 - RNA, 32 nt, Human
ggauuggggcuccaccuggcuuggagauggcc

SEQ ID NO: 188973 - RNA, 32 nt, Human
ggauugggggcuggugccagccuuccucugca

SEQ ID NO: 188974 - RNA, 32 nt, Human
ggauuggggguaaccuuucauuugucaaccuu

SEQ ID NO: 188975 - RNA, 32 nt, Human
ggauugggguguugaguccaggcugaguaggg

SEQ ID NO: 188976 - RNA, 32 nt, Human
ggauuggucaucucaguauccggaguuacucg

SEQ ID NO: 188977 - RNA, 32 nt, Human
ggauuggugaugacucuuaaugagcaugcugc

SEQ ID NO: 188978 - RNA, 32 nt, Human
ggauuggugguuuuguuuugcuuuguuuaaag

SEQ ID NO: 188979 - RNA, 32 nt, Human
ggauugguugagcuuaggagguugaggcugca

SEQ ID NO: 188980 - RNA, 32 nt, Human
ggauuguagggaggggaaccgagggacaucau

SEQ ID NO: 188981 - RNA, 32 nt, Human
ggauuguagggagucagaaagacaaggggagc

SEQ ID NO: 188982 - RNA, 32 nt, Human
ggauuguauugugaauauguaucuuauuuguu

SEQ ID NO: 188983 - RNA, 32 nt, Human
ggauugucagcugaggccccaggaggaaaccu

SEQ ID NO: 188984 - RNA, 32 nt, Human
ggauugucucaaggaguccgcagugagauucu

SEQ ID NO: 188985 - RNA, 32 nt, Human
ggauugugacauauugcugggcccagcaccac

SEQ ID NO: 188986 - RNA, 32 nt, Human
ggauugugagaaucaagucacucucaugggaa

SEQ ID NO: 188987 - RNA, 32 nt, Human
ggauugugaggaucaagucacucucaugggaa

SEQ ID NO: 188988 - RNA, 32 nt, Human
ggauugugaggguucccucacagccagcacga

SEQ ID NO: 188989 - RNA, 32 nt, Human
ggauugugaggugagggguuaauaaguuacuc

SEQ ID NO: 188990 - RNA, 32 nt, Human
ggauugugccacuacacuccagccuggccgac

SEQ ID NO: 188991 - RNA, 32 nt, Human
ggauugugccacugcacucaagccugggugac

SEQ ID NO: 188992 - RNA, 32 nt, Human
ggauugugccacuguacuccagccugggcgac

SEQ ID NO: 188993 - RNA, 32 nt, Human
ggauugugccauugcacuccagccugggcaac

SEQ ID NO: 188994 - RNA, 32 nt, Human
ggauugugcugacuuugggauuaacaugagcu

SEQ ID NO: 188995 - RNA, 32 nt, Human
ggauugugcugcucucguuucagcuuugauuu

SEQ ID NO: 188996 - RNA, 32 nt, Human
ggauuguguuucuauucagcaagggaaaccgg

SEQ ID NO: 188997 - RNA, 32 nt, Human
ggauuguuacugguugaagugggggcagaugc

SEQ ID NO: 188998 - RNA, 32 nt, Human
ggauuguuccauccauggcgugcaugugccaa

SEQ ID NO: 188999 - RNA, 32 nt, Human
ggauuguuccaucuuguguugguauaccaauu

SEQ ID NO: 189000 - RNA, 32 nt, Human
ggauuguucccacuucuugggcuguuaggaau

SEQ ID NO: 189001 - RNA, 32 nt, Human
ggauuguuccuagugaggaaggucuuguccca

SEQ ID NO: 189002 - RNA, 24 nt, Human
ggauuguugcggggccacccagug

SEQ ID NO: 189003 - RNA, 32 nt, Human
ggauuguuggcaggccagccugcagugacagu

SEQ ID NO: 189004 - RNA, 32 nt, Human
ggauuguuggugcuguggggagaagcuggugu

SEQ ID NO: 189005 - RNA, 32 nt, Human
ggauuguuugagcccaggagguugaggcugca

SEQ ID NO: 189006 - RNA, 32 nt, Human
ggauuguuugagcccuggagguugaggcugca

SEQ ID NO: 189007 - RNA, 32 nt, Human
ggauuguuugugugcuguuauuuggaauuuug

SEQ ID NO: 189008 - RNA, 32 nt, Human
ggauuuaaagcagucacuucagacaggagcca

SEQ ID NO: 189009 - RNA, 24 nt, Human
ggauuuaaaugcagaguguaugaa

SEQ ID NO: 189010 - RNA, 32 nt, Human
ggauuuaaccauuguucauugucaggcuauau

SEQ ID NO: 189011 - RNA, 32 nt, Human
ggauuuaagacguucuuguuacacuccaccaa

SEQ ID NO: 189012 - RNA, 25 nt, Human
ggauuuaagcgauucuccugcuuca

SEQ ID NO: 189013 - RNA, 25 nt, Human
ggauuuaagcgauucuucugccuca

SEQ ID NO: 189014 - RNA, 32 nt, Human
ggauuuaauagaauugagggucaagcaacuac

SEQ ID NO: 189015 - RNA, 32 nt, Human
ggauuuacauuuuaagguaaacuuuuuauuga

SEQ ID NO: 189016 - RNA, 32 nt, Human
ggauuuagaccagcccggcuguauccacggca

SEQ ID NO: 189017 - RNA, 32 nt, Human
ggauuuaggaagcagacagggauucgggaagu

SEQ ID NO: 189018 - RNA, 32 nt, Human
ggauuuaggaucgcccucccauccucucaccc

SEQ ID NO: 189019 - RNA, 23 nt, Human
ggauuuaggugauucuccugccu

SEQ ID NO: 189020 - RNA, 25 nt, Human
ggauuuauaaccuuucagucaucac

SEQ ID NO: 189021 - RNA, 32 nt, Human
ggauuuauacagggaccaaagacugaaugcuc

SEQ ID NO: 189022 - RNA, 32 nt, Human
ggauuuaucuucuguggcagauaaaugaagua

SEQ ID NO: 189023 - RNA, 32 nt, Human
ggauuuauugguaggacauuuaugugccagag

SEQ ID NO: 189024 - RNA, 32 nt, Human
ggauuuauuuugcuaaacaguuuacuaacaca

SEQ ID NO: 189025 - RNA, 32 nt, Human
ggauuucaacauaugaauuuuggaaggacaua

SEQ ID NO: 189026 - RNA, 32 nt, Human
ggauuucaagagcaaccaaguaaagucaugaa

SEQ ID NO: 189027 - RNA, 32 nt, Human
ggauuucaagaugacaagaacagagcauuaaa

SEQ ID NO: 189028 - RNA, 32 nt, Human
ggauuucacccaggaggaguggcagcaacugg

SEQ ID NO: 189029 - RNA, 32 nt, Human
ggauuucacccaggaggagugguggcaacugg

SEQ ID NO: 189030 - RNA, 32 nt, Human
ggauuucacuguguuggcugggauggucuuga

SEQ ID NO: 189031 - RNA, 32 nt, Human
ggauuucagggccuucccucccugccugggug

SEQ ID NO: 189032 - RNA, 31 nt, Human
ggauuucaguuucagcaaguuggcaucauuu

SEQ ID NO: 189033 - RNA, 32 nt, Human
ggauuucauauugugaaacagaacaaguccac

SEQ ID NO: 189034 - RNA, 32 nt, Human
ggauuucauccaguggccaagagcuuugugug

SEQ ID NO: 189035 - RNA, 32 nt, Human
ggauuucaugccacuaaucauguccauagccu

SEQ ID NO: 189036 - RNA, 32 nt, Human
ggauuucauguaaccaagaguauuccauuuuu

SEQ ID NO: 189037 - RNA, 18 nt, Human
ggauuucauuaccaggug

SEQ ID NO: 189038 - RNA, 32 nt, Human
ggauuuccagaaggugauaaaaagagcacucu

SEQ ID NO: 189039 - RNA, 32 nt, Human
ggauuuccagccagggcugcuagacggaggcc

SEQ ID NO: 189040 - RNA, 32 nt, Human
ggauuuccaguuccuugaugaagagaaguuac

SEQ ID NO: 189041 - RNA, 32 nt, Human
ggauuucccaggaugcgugagcacuugauuaa

SEQ ID NO: 189042 - RNA, 32 nt, Human
ggauuucccauaggaagagaucugccagacgc

SEQ ID NO: 189043 - RNA, 32 nt, Human
ggauuucccugacccaauucagagauucuuua

SEQ ID NO: 189044 - RNA, 32 nt, Human
ggauuuccuccaccuguaccuccagggacccc

SEQ ID NO: 189045 - RNA, 32 nt, Human
ggauuuccuccccucagcagccuuccccaucu

SEQ ID NO: 189046 - RNA, 32 nt, Human
ggauuuccugacuuugacacacauggccaccu

SEQ ID NO: 189047 - RNA, 20 nt, Human
ggauuuccugcuuugggaag

SEQ ID NO: 189048 - RNA, 32 nt, Human
ggauuuccuuuuccuccaaggcugucuuauuu

SEQ ID NO: 189049 - RNA, 32 nt, Human
ggauuucggggaugaaggcggcagcagcaaga

SEQ ID NO: 189050 - RNA, 32 nt, Human
ggauuucuacagccuggguacccauagccaca

SEQ ID NO: 189051 - RNA, 32 nt, Human
ggauuucuauuccagugggaaggaaaccucuc

SEQ ID NO: 189052 - RNA, 32 nt, Human
ggauuucucaacauuuguucagcuuccuaaug

SEQ ID NO: 189053 - RNA, 32 nt, Human
ggauuucucacuucaauuauagaucauaauag

SEQ ID NO: 189054 - RNA, 32 nt, Human
ggauuucucugcucacagaaggguguggcauu

SEQ ID NO: 189055 - RNA, 32 nt, Human
ggauuucucuucuguggcuuauuguggcacuc

SEQ ID NO: 189056 - RNA, 32 nt, Human
ggauuucucuuuuacuccugauuugcagaaug

SEQ ID NO: 189057 - RNA, 19 nt, Human
ggauuucugcauugcuaug

SEQ ID NO: 189058 - RNA, 32 nt, Human
ggauuucugccuggagcccuuugcccuguccc

SEQ ID NO: 189059 - RNA, 32 nt, Human
ggauuugaacaacaugguuauaauuuucaaau

SEQ ID NO: 189060 - RNA, 32 nt, Human
ggauuugaacccaggucuaccuguugcagagu

SEQ ID NO: 189061 - RNA, 32 nt, Human
ggauuugaagagucagugaacuuuuaguguca

SEQ ID NO: 189062 - RNA, 32 nt, Human
ggauuugaauagugguuuuucucuagcuuuuu

SEQ ID NO: 189063 - RNA, 32 nt, Human
ggauuugaaucucuuucucucccuucagaauc

SEQ ID NO: 189064 - RNA, 32 nt, Human
ggauuugaauucaggcuugcccaacucacauu

SEQ ID NO: 189065 - RNA, 24 nt, Human
ggauuugacacugguuuucucacu

SEQ ID NO: 189066 - RNA, 32 nt, Human
ggauuugacucugaaagaagcuuugccaauuu

SEQ ID NO: 189067 - RNA, 32 nt, Human
ggauuugagaagaaaaucagagagggaagauc

SEQ ID NO: 189068 - RNA, 32 nt, Human
ggauuugagcuuccguccuuccuuccucccuc

SEQ ID NO: 189069 - RNA, 32 nt, Human
ggauuugaggagcagcuucaguuguuuucccg

SEQ ID NO: 189070 - RNA, 32 nt, Human
ggauuugaggguagaggcaggggaagaucugu

SEQ ID NO: 189071 - RNA, 32 nt, Human
ggauuugauaaauaaaaguucuuuaaacacua

SEQ ID NO: 189072 - RNA, 32 nt, Human
ggauuugaucauaccaaaucccaguccuccug

SEQ ID NO: 189073 - RNA, 32 nt, Human
ggauuugcacacaaaugcagcagagucuggcu

SEQ ID NO: 189074 - RNA, 32 nt, Human
ggauuugcacagagaagggcggcggaagggug

SEQ ID NO: 189075 - RNA, 32 nt, Human
ggauuugcacccacugcauuugcagccuugag

SEQ ID NO: 189076 - RNA, 32 nt, Human
ggauuugccaauguauguucagucucucaaga

SEQ ID NO: 189077 - RNA, 32 nt, Human
ggauuugccacacagccccacccuugggcuga

SEQ ID NO: 189078 - RNA, 32 nt, Human
ggauuugccagcaucccucuucugcuucucag

SEQ ID NO: 189079 - RNA, 32 nt, Human
ggauuugcccuucacaauucuacuccccagau

SEQ ID NO: 189080 - RNA, 32 nt, Human
ggauuugcuaugcagacagggaagggaauuuc

SEQ ID NO: 189081 - RNA, 32 nt, Human
ggauuugcucgcacggcauuggcuccaucccc

SEQ ID NO: 189082 - RNA, 32 nt, Human
ggauuugcuuagaaggauggcgcucccaguga

SEQ ID NO: 189083 - RNA, 32 nt, Human
ggauuugcuucuuagaagcucaugugguuguu

SEQ ID NO: 189084 - RNA, 32 nt, Human
ggauuugcuuucccaaggagcuuuccaaaagc

SEQ ID NO: 189085 - RNA, 32 nt, Human
ggauuuggaaggaggcggcugggcagggcggc

SEQ ID NO: 189086 - RNA, 32 nt, Human
ggauuuggacgagagacacaggaugaguaccg

SEQ ID NO: 189087 - RNA, 32 nt, Human
ggauuuggacuggcagugagaauaagagacaa

SEQ ID NO: 189088 - RNA, 32 nt, Human
ggauuuggccuuucaaacucuaggcacuaacg

SEQ ID NO: 189089 - RNA, 32 nt, Human
ggauuugggcuccuaugauaaucuaaugccac

SEQ ID NO: 189090 - RNA, 32 nt, Human
ggauuuggguugugacccagggugcauuaacu

SEQ ID NO: 189091 - RNA, 32 nt, Human
ggauuugguaagaggugagcaagacaaaucuu

SEQ ID NO: 189092 - RNA, 31 nt, Human
ggauuugucaggugcaucacagaggucaaag

SEQ ID NO: 189093 - RNA, 32 nt, Human
ggauuuguccuggagaaaaucaagcagccgaa

SEQ ID NO: 189094 - RNA, 32 nt, Human
ggauuugucugagacauuuccaagcagacugu

SEQ ID NO: 189095 - RNA, 32 nt, Human
ggauuugugcuccuaugagaaucuaacaugcu

SEQ ID NO: 189096 - RNA, 32 nt, Human
ggauuugugcugcugcuguuauucaaagauca

SEQ ID NO: 189097 - RNA, 32 nt, Human
ggauuuguugggggcaaaggggguggcgggac

SEQ ID NO: 189098 - RNA, 32 nt, Human
ggauuuguuuccuaacgccauuggaggccuuc

SEQ ID NO: 189099 - RNA, 32 nt, Human
ggauuuuagaggaacaaaggaagaauauucua

SEQ ID NO: 189100 - RNA, 32 nt, Human
ggauuuuaggugugcaccaccaugccuggcua

SEQ ID NO: 189101 - RNA, 32 nt, Human
ggauuuuauuuuuagggaguggguaauuucuu

SEQ ID NO: 189102 - RNA, 32 nt, Human
ggauuuucaagcgauuugucuguuauaggaaa

SEQ ID NO: 189103 - RNA, 32 nt, Human
ggauuuucacacaccauauuucuuucaccuuu

SEQ ID NO: 189104 - RNA, 32 nt, Human
ggauuuucagcaggaacuuuauuccaaugcua

SEQ ID NO: 189105 - RNA, 32 nt, Human
ggauuuucagcccucagaaucgcuccaccuug

SEQ ID NO: 189106 - RNA, 24 nt, Human
ggauuuucaucaggggccugcagg

SEQ ID NO: 189107 - RNA, 32 nt, Human
ggauuuucauuucuucgcacuucugagacggc

SEQ ID NO: 189108 - RNA, 32 nt, Human
ggauuuucccacccugcucuucuuggcaggag

SEQ ID NO: 189109 - RNA, 32 nt, Human
ggauuuuccuccucucuccaucccugacaguu

SEQ ID NO: 189110 - RNA, 32 nt, Human
ggauuuuccuggaagaucuggauuugguggaa

SEQ ID NO: 189111 - RNA, 31 nt, Human
ggauuuucuagaauuaguuguaggcgacagu

SEQ ID NO: 189112 - RNA, 32 nt, Human
ggauuuucucagcccccauccccagcacugug

SEQ ID NO: 189113 - RNA, 32 nt, Human
ggauuuucucauuagcacaggguuccaagccc

SEQ ID NO: 189114 - RNA, 32 nt, Human
ggauuuucucuacaaaaauuauugagcaaccc

SEQ ID NO: 189115 - RNA, 32 nt, Human
ggauuuucugaccuuccccugaaguagaucau

SEQ ID NO: 189116 - RNA, 32 nt, Human
ggauuuucuucccagggaccuccuaucacccu

SEQ ID NO: 189117 - RNA, 32 nt, Human
ggauuuugagcagggcagggaugggacagaag

SEQ ID NO: 189118 - RNA, 32 nt, Human
ggauuuugccagcuccauacauguuggggccu

SEQ ID NO: 189119 - RNA, 19 nt, Human
ggauuuugcccucuccuua

SEQ ID NO: 189120 - RNA, 32 nt, Human
ggauuuuggcgaccugugugguggccuugagc

SEQ ID NO: 189121 - RNA, 32 nt, Human
ggauuuuguagguccuguuuuucccaucugug

SEQ ID NO: 189122 - RNA, 32 nt, Human
ggauuuuguuacuguguagaguggauugagaa

SEQ ID NO: 189123 - RNA, 32 nt, Human
ggauuuuuaaagauucuucccaccuuaauuuu

SEQ ID NO: 189124 - RNA, 32 nt, Human
ggauuuuuccaugguuuccucagugauggugu

SEQ ID NO: 189125 - RNA, 23 nt, Human
ggcaaaaacaaaacaaccaacac

SEQ ID NO: 189126 - RNA, 24 nt, Human
ggcaaaaacaaagccucacacacc

SEQ ID NO: 189127 - RNA, 32 nt, Human
ggcaaaaauguuguauuggcuaugauggugac

SEQ ID NO: 189128 - RNA, 32 nt, Human
ggcaaaacaagaaaguccuauuuuuccaagcu

SEQ ID NO: 189129 - RNA, 21 nt, Human
ggcaaaaccccaucucuacua

SEQ ID NO: 189130 - RNA, 21 nt, Human
ggcaaaaccccaucucugcua

SEQ ID NO: 189131 - RNA, 21 nt, Human
ggcaaaaccccaucuuuacua

SEQ ID NO: 189132 - RNA, 21 nt, Human
ggcaaaaccccgucucuacua

SEQ ID NO: 189133 - RNA, 32 nt, Human
ggcaaaaccuccaaacuggggucuccagccac

SEQ ID NO: 189134 - RNA, 32 nt, Human
ggcaaaacucaacagccccuggagcugcgcuu

SEQ ID NO: 189135 - RNA, 32 nt, Human
ggcaaaacuggaaugaaacaaggaaccaccug

SEQ ID NO: 189136 - RNA, 32 nt, Human
ggcaaaacuggcugaggccucuguugaugcuc

SEQ ID NO: 189137 - RNA, 32 nt, Human
ggcaaaagaagagauaagaggcccauugccag

SEQ ID NO: 189138 - RNA, 32 nt, Human
ggcaaaagaagaggaaggaauuuaauccuaau

SEQ ID NO: 189139 - RNA, 32 nt, Human
ggcaaaagagaauccccugccuucccuugucg

SEQ ID NO: 189140 - RNA, 25 nt, Human
ggcaaaagaguccccacaagaugaa

SEQ ID NO: 189141 - RNA, 20 nt, Human
ggcaaaagcacuugcucucc

SEQ ID NO: 189142 - RNA, 24 nt, Human
ggcaaaaggaaacacucgauugca

SEQ ID NO: 189143 - RNA, 32 nt, Human
ggcaaaagggaagggaaggaaacuuagcagag

SEQ ID NO: 189144 - RNA, 23 nt, Human
ggcaaaaguccacauagcucucc

SEQ ID NO: 189145 - RNA, 32 nt, Human
ggcaaaaugcagguguuuucucaguaucacag

SEQ ID NO: 189146 - RNA, 32 nt, Human
ggcaaaauucuuucuggugucuccuaacuuca

SEQ ID NO: 189147 - RNA, 20 nt, Human
ggcaaacaaaggaacacuag

SEQ ID NO: 189148 - RNA, 32 nt, Human
ggcaaacaauguacaaaagggaagugcuggac

SEQ ID NO: 189149 - RNA, 32 nt, Human
ggcaaacacggugaaacccugucucuacuaaa

SEQ ID NO: 189150 - RNA, 24 nt, Human
ggcaaacacuggccauggccgugg

SEQ ID NO: 189151 - RNA, 22 nt, Human
ggcaaacagcaaugaucuucca

SEQ ID NO: 189152 - RNA, 32 nt, Human
ggcaaacagugcagugaauauguaggagccug

SEQ ID NO: 189153 - RNA, 32 nt, Human
ggcaaacaugaugaaacccugucucuacuaaa

SEQ ID NO: 189154 - RNA, 32 nt, Human
ggcaaacauggcgaaaccccaucuuaacuaaa

SEQ ID NO: 189155 - RNA, 32 nt, Human
ggcaaacauggugaaaccccaucucuaguaaa

SEQ ID NO: 189156 - RNA, 32 nt, Human
ggcaaacauggugaaaccccgucuguacuaau

SEQ ID NO: 189157 - RNA, 32 nt, Human
ggcaaacauggugaaacgccgucucuacugaa

SEQ ID NO: 189158 - RNA, 32 nt, Human
ggcaaacauggugaaacgcugucucuacuaaa

SEQ ID NO: 189159 - RNA, 32 nt, Human
ggcaaacauggugaaucuaucucuccggagau

SEQ ID NO: 189160 - RNA, 32 nt, Human
ggcaaaccaacucuauccugugccgcaguuuu

SEQ ID NO: 189161 - RNA, 32 nt, Human
ggcaaaccauggugggccccagcuguggugcg

SEQ ID NO: 189162 - RNA, 32 nt, Human
ggcaaacccaaguaacaaaucagcacgguucc

SEQ ID NO: 189163 - RNA, 32 nt, Human
ggcaaacccugccucugcccaguccagcgccc

SEQ ID NO: 189164 - RNA, 32 nt, Human
ggcaaacccuggcaaauccugccacuuguuuc

SEQ ID NO: 189165 - RNA, 32 nt, Human
ggcaaaccuuucuauaauuuuacaagggagua

SEQ ID NO: 189166 - RNA, 32 nt, Human
ggcaaacgcagaacguuucagagccaugagga

SEQ ID NO: 189167 - RNA, 32 nt, Human
ggcaaacuauguuacaugaaugcuucugccuc

SEQ ID NO: 189168 - RNA, 32 nt, Human
ggcaaacuauugauauuucauuaauuuuaaau

SEQ ID NO: 189169 - RNA, 32 nt, Human
ggcaaacuccaccccuucucacucuguccugg

SEQ ID NO: 189170 - RNA, 32 nt, Human
ggcaaacugggcugauguaaauguuuuacuuu

SEQ ID NO: 189171 - RNA, 32 nt, Human
ggcaaacuucauuuuauucuugguuuucauuu

SEQ ID NO: 189172 - RNA, 32 nt, Human
ggcaaagaaaaauuccacuguuccacguguac

SEQ ID NO: 189173 - RNA, 32 nt, Human
ggcaaagaaagaaaacacgaauguaggucagg

SEQ ID NO: 189174 - RNA, 32 nt, Human
ggcaaagaaaugcagaaugcuuaaggcugaau

SEQ ID NO: 189175 - RNA, 32 nt, Human
ggcaaagaacuaagccaggaagacaugggcca

SEQ ID NO: 189176 - RNA, 21 nt, Human
ggcaaagaaggaaggcagcuu

SEQ ID NO: 189177 - RNA, 18 nt, Human
ggcaaagacucugagguu

SEQ ID NO: 189178 - RNA, 32 nt, Human
ggcaaagagaaaaggacccaagauagagguuu

SEQ ID NO: 189179 - RNA, 32 nt, Human
ggcaaagagccaaguggccugcgcuacaacaa

SEQ ID NO: 189180 - RNA, 32 nt, Human
ggcaaagaggagggcaggucugagggaccccg

SEQ ID NO: 189181 - RNA, 32 nt, Human
ggcaaagaguguggggcgucucuguguuccag

SEQ ID NO: 189182 - RNA, 32 nt, Human
ggcaaagauagagaaugcccucagcucuuagc

SEQ ID NO: 189183 - RNA, 31 nt, Human
ggcaaagaugagagagguggagagagaaaga

SEQ ID NO: 189184 - RNA, 32 nt, Human
ggcaaagauuagcugcuuccagaaggcugauu

SEQ ID NO: 189185 - RNA, 32 nt, Human
ggcaaagcacagccugggaagaauugguuugc

SEQ ID NO: 189186 - RNA, 32 nt, Human
ggcaaagcagcucacacacugcagccacacuc

SEQ ID NO: 189187 - RNA, 32 nt, Human
ggcaaagcaucuuucgagagcuugccugccaa

SEQ ID NO: 189188 - RNA, 32 nt, Human
ggcaaagcuauauuucuguuucuccacaucca

SEQ ID NO: 189189 - RNA, 32 nt, Human
ggcaaagcucacugucucucuacuggcugcaa

SEQ ID NO: 189190 - RNA, 22 nt, Human
ggcaaagcugaacaaagaugaa

SEQ ID NO: 189191 - RNA, 32 nt, Human
ggcaaagcuguauugaaaguucugagcuucuc

SEQ ID NO: 189192 - RNA, 32 nt, Human
ggcaaaggacagcacuguucucugccugccug

SEQ ID NO: 189193 - RNA, 32 nt, Human
ggcaaaggagaaacgggacuuacuucacagga

SEQ ID NO: 189194 - RNA, 32 nt, Human
ggcaaaggagccaagugugacugagcagugug

SEQ ID NO: 189195 - RNA, 32 nt, Human
ggcaaaggagugugaguuuuggggaagcucaa

SEQ ID NO: 189196 - RNA, 32 nt, Human
ggcaaaggccuucaguuucccggcuggcuguc

SEQ ID NO: 189197 - RNA, 32 nt, Human
ggcaaaggcgaggcgggggagcagcgugugag

SEQ ID NO: 189198 - RNA, 32 nt, Human
ggcaaagggcaagugggcugacguccggccca

SEQ ID NO: 189199 - RNA, 32 nt, Human
ggcaaagggcugcuuuagcacuuuucuuuuag

SEQ ID NO: 189200 - RNA, 32 nt, Human
ggcaaagggggaaagagacugagguuguaaac

SEQ ID NO: 189201 - RNA, 17 nt, Human
ggcaaaggucagauucu

SEQ ID NO: 189202 - RNA, 31 nt, Human
ggcaaaguaaaauaaauaguucagaugacua

SEQ ID NO: 189203 - RNA, 32 nt, Human
ggcaaaguacuugucauagacuccuuugcuaa

SEQ ID NO: 189204 - RNA, 32 nt, Human
ggcaaagucaccugcaugguagcacauaguga

SEQ ID NO: 189205 - RNA, 32 nt, Human
ggcaaagugacucuugagcaugggugggggaa

SEQ ID NO: 189206 - RNA, 32 nt, Human
ggcaaagugcacaucuuacucaacaucaaaga

SEQ ID NO: 189207 - RNA, 32 nt, Human
ggcaaaguggcacagucugccuuucccagucu

SEQ ID NO: 189208 - RNA, 32 nt, Human
ggcaaaguuuuuaacuaauacaccuuauugca

SEQ ID NO: 189209 - RNA, 32 nt, Human
ggcaaauaaaguaucaguauacauggugaugu

SEQ ID NO: 189210 - RNA, 20 nt, Human
ggcaaauaacuaauguauga

SEQ ID NO: 189211 - RNA, 18 nt, Human
ggcaaaucaccugagguc

SEQ ID NO: 189212 - RNA, 18 nt, Human
ggcaaaucacuugagcuc

SEQ ID NO: 189213 - RNA, 18 nt, Human
ggcaaaucacuugagguc

SEQ ID NO: 189214 - RNA, 32 nt, Human
ggcaaauccaggcugguguucugucugggcuc

SEQ ID NO: 189215 - RNA, 32 nt, Human
ggcaaauccauagacacagaaugcagauccgu

SEQ ID NO: 189216 - RNA, 32 nt, Human
ggcaaaucgcaauggcagcaugugaguggacc

SEQ ID NO: 189217 - RNA, 32 nt, Human
ggcaaaucgcuuaaucuuugagucuaguuuuc

SEQ ID NO: 189218 - RNA, 32 nt, Human
ggcaaaucugcagccgcucgcuuucuccucug

SEQ ID NO: 189219 - RNA, 32 nt, Human
ggcaaaucuuuaucagccacugccuucugcug

SEQ ID NO: 189220 - RNA, 32 nt, Human
ggcaaaugagggcuggacucucuucccuccag

SEQ ID NO: 189221 - RNA, 18 nt, Human
ggcaaaugagugcucuuc

SEQ ID NO: 189222 - RNA, 32 nt, Human
ggcaaaugagugugugugagguauaggaaaug

SEQ ID NO: 189223 - RNA, 32 nt, Human
ggcaaaugcagcccugggucuuugggccaguu

SEQ ID NO: 189224 - RNA, 18 nt, Human
ggcaaaugcaggacuccc

SEQ ID NO: 189225 - RNA, 18 nt, Human
ggcaaaugcccaaccucc

SEQ ID NO: 189226 - RNA, 32 nt, Human
ggcaaaugccuauaaucccagcuacucgggag

SEQ ID NO: 189227 - RNA, 19 nt, Human
ggcaaaugccugaaugguc

SEQ ID NO: 189228 - RNA, 32 nt, Human
ggcaaaugccugaauggucugucugaaggaag

SEQ ID NO: 189229 - RNA, 32 nt, Human
ggcaaaugccuguaauaccagcuacucaggag

SEQ ID NO: 189230 - RNA, 32 nt, Human
ggcaaaugccuguaaucccagcacuuugggag

SEQ ID NO: 189231 - RNA, 21 nt, Human
ggcaaaugcugaauauucucc

SEQ ID NO: 189232 - RNA, 20 nt, Human
ggcaaaugcugcaaacuucc

SEQ ID NO: 189233 - RNA, 32 nt, Human
ggcaaauggaaaucuuuccccaaagggcacac

SEQ ID NO: 189234 - RNA, 32 nt, Human
ggcaaauggaagggaauggguucuggaaggcc

SEQ ID NO: 189235 - RNA, 32 nt, Human
ggcaaauggaucugucaacaggcuccauugcc

SEQ ID NO: 189236 - RNA, 21 nt, Human
ggcaaauggcccagcucugcc

SEQ ID NO: 189237 - RNA, 32 nt, Human
ggcaaauggcuggcguggaagcacaacccgcu

SEQ ID NO: 189238 - RNA, 18 nt, Human
ggcaaaugggauuguccc

SEQ ID NO: 189239 - RNA, 32 nt, Human
ggcaaauggggaguagagagaaaacaggcgag

SEQ ID NO: 189240 - RNA, 32 nt, Human
ggcaaauggguugggugcaauggcucacgccu

SEQ ID NO: 189241 - RNA, 18 nt, Human
ggcaaaugucuugccucc

SEQ ID NO: 189242 - RNA, 20 nt, Human
ggcaaaugugacccgccucc

SEQ ID NO: 189243 - RNA, 20 nt, Human
ggcaaaugugaugugcuccc

SEQ ID NO: 189244 - RNA, 32 nt, Human
ggcaaauguuucucagucauaguuggacuguu

SEQ ID NO: 189245 - RNA, 32 nt, Human
ggcaaauucaaguguuuuccugggugaagacu

SEQ ID NO: 189246 - RNA, 32 nt, Human
ggcaaauucuccuuggugaguuuucuaaaagu

SEQ ID NO: 189247 - RNA, 32 nt, Human
ggcaacaaaggccaucucaccaaaggauuauu

SEQ ID NO: 189248 - RNA, 32 nt, Human
ggcaacaaagugagacccccaucucuacaaaa

SEQ ID NO: 189249 - RNA, 30 nt, Human
ggcaacaaagugagacccccaucucuauag

SEQ ID NO: 189250 - RNA, 32 nt, Human
ggcaacaaauagacuauugucauuuuauuagu

SEQ ID NO: 189251 - RNA, 24 nt, Human
ggcaacaagagcuagacucugucu

SEQ ID NO: 189252 - RNA, 32 nt, Human
ggcaacaagaggagcugguagagaugcuaaca

SEQ ID NO: 189253 - RNA, 24 nt, Human
ggcaacaagagugaaacucugucu

SEQ ID NO: 189254 - RNA, 19 nt, Human
ggcaacaaggguccugcug

SEQ ID NO: 189255 - RNA, 32 nt, Human
ggcaacaaugggcuagaagccaugaagcaaua

SEQ ID NO: 189256 - RNA, 32 nt, Human
ggcaacacaagaaucuguccuccauuaaaaau

SEQ ID NO: 189257 - RNA, 32 nt, Human
ggcaacacagggcgacccccaucucuacaaaa

SEQ ID NO: 189258 - RNA, 21 nt, Human
ggcaacacagugaaacccugu

SEQ ID NO: 189259 - RNA, 32 nt, Human
ggcaacacagugagugagacccugucucuauu

SEQ ID NO: 189260 - RNA, 17 nt, Human
ggcaacaccaagagggu

SEQ ID NO: 189261 - RNA, 32 nt, Human
ggcaacacccuucucgcagccugggccucucg

SEQ ID NO: 189262 - RNA, 32 nt, Human
ggcaacacggagcacaggucucugcugcugau

SEQ ID NO: 189263 - RNA, 32 nt, Human
ggcaacacugaggauacgcagggaugaggugc

SEQ ID NO: 189264 - RNA, 32 nt, Human
ggcaacacugcgcuccagccuggcagacagag

SEQ ID NO: 189265 - RNA, 32 nt, Human
ggcaacacugggguugcagagcucaggagcca

SEQ ID NO: 189266 - RNA, 32 nt, Human
ggcaacagacacagccauugccuccaccucca

SEQ ID NO: 189267 - RNA, 21 nt, Human
ggcaacagagaagagagcaga

SEQ ID NO: 189268 - RNA, 32 nt, Human
ggcaacagagagaggaucuggagccaggauua

SEQ ID NO: 189269 - RNA, 23 nt, Human
ggcaacagagcaagacucugucu

SEQ ID NO: 189270 - RNA, 23 nt, Human
ggcaacagagcgagacucugucu

SEQ ID NO: 189271 - RNA, 32 nt, Human
ggcaacagaggccacggccauggccaugggca

SEQ ID NO: 189272 - RNA, 23 nt, Human
ggcaacagagggagacucugucu

SEQ ID NO: 189273 - RNA, 23 nt, Human
ggcaacagagugagacccugucu

SEQ ID NO: 189274 - RNA, 23 nt, Human
ggcaacagagugagacuccaucu

SEQ ID NO: 189275 - RNA, 23 nt, Human
ggcaacagagugagacuccgucu

SEQ ID NO: 189276 - RNA, 32 nt, Human
ggcaacagagugagacucugucaaaaucaaaa

SEQ ID NO: 189277 - RNA, 23 nt, Human
ggcaacagagugagacucugucu

SEQ ID NO: 189278 - RNA, 23 nt, Human
ggcaacagagugagacuuugucu

SEQ ID NO: 189279 - RNA, 21 nt, Human
ggcaacagagugccugaccca

SEQ ID NO: 189280 - RNA, 32 nt, Human
ggcaacagaucuggaaccucagccuggccaga

SEQ ID NO: 189281 - RNA, 32 nt, Human
ggcaacagaugaucuggucaggcaacccaccc

SEQ ID NO: 189282 - RNA, 32 nt, Human
ggcaacagcucugugcaggcaggaugaagcac

SEQ ID NO: 189283 - RNA, 32 nt, Human
ggcaacagcuuugccacuugacuuuccaacau

SEQ ID NO: 189284 - RNA, 32 nt, Human
ggcaacaggagaaaggaaucaaaccacagaaa

SEQ ID NO: 189285 - RNA, 24 nt, Human
ggcaacagguaucucgugcaugaa

SEQ ID NO: 189286 - RNA, 32 nt, Human
ggcaacagucacagcccagggauugauuggaa

SEQ ID NO: 189287 - RNA, 32 nt, Human
ggcaacagugggacaauugcccccgacggcgg

SEQ ID NO: 189288 - RNA, 32 nt, Human
ggcaacagugguuacccaggaggaaacaggua

SEQ ID NO: 189289 - RNA, 32 nt, Human
ggcaacauaacaagacccccaucucuacaaaa

SEQ ID NO: 189290 - RNA, 32 nt, Human
ggcaacauagcaagacccccaucucugcaaaa

SEQ ID NO: 189291 - RNA, 32 nt, Human
ggcaacauagggagacccccaucucuacaaaa

SEQ ID NO: 189292 - RNA, 32 nt, Human
ggcaacauagggagacccccaucuuuacgaag

SEQ ID NO: 189293 - RNA, 32 nt, Human
ggcaacauaguaagacccccaucucuacaaaa

SEQ ID NO: 189294 - RNA, 32 nt, Human
ggcaacauagugagacccccaucucuacaaaa

SEQ ID NO: 189295 - RNA, 32 nt, Human
ggcaacauagugagacccccaucucuacaauu

SEQ ID NO: 189296 - RNA, 32 nt, Human
ggcaacauagugagacccccaucucuacagaa

SEQ ID NO: 189297 - RNA, 32 nt, Human
ggcaacauagugagaccuccaucucuacaaaa

SEQ ID NO: 189298 - RNA, 32 nt, Human
ggcaacaucacuggggcccagagagagcuguc

SEQ ID NO: 189299 - RNA, 32 nt, Human
ggcaacaucacuucugggauuugguuuacugg

SEQ ID NO: 189300 - RNA, 32 nt, Human
ggcaacaucccgccugaugaccagcuuagcaa

SEQ ID NO: 189301 - RNA, 32 nt, Human
ggcaacaucccugguacuccagcuuugagguc

SEQ ID NO: 189302 - RNA, 32 nt, Human
ggcaacaugaugugaaaacccaucucuacaaa

SEQ ID NO: 189303 - RNA, 21 nt, Human
ggcaacauggagaaaccccgu

SEQ ID NO: 189304 - RNA, 21 nt, Human
ggcaacauggcgaaacccugu

SEQ ID NO: 189305 - RNA, 21 nt, Human
ggcaacauggugaaacccagu

SEQ ID NO: 189306 - RNA, 19 nt, Human
ggcaacauggugaaacccc

SEQ ID NO: 189307 - RNA, 21 nt, Human
ggcaacauggugaaacccugu

SEQ ID NO: 189308 - RNA, 18 nt, Human
ggcaacauggugaaaccu

SEQ ID NO: 189309 - RNA, 19 nt, Human
ggcaacauggugaaaccuc

SEQ ID NO: 189310 - RNA, 32 nt, Human
ggcaacauuacacucuagccugagcaacaaga

SEQ ID NO: 189311 - RNA, 32 nt, Human
ggcaaccaccaccaccugucuuccaggacaca

SEQ ID NO: 189312 - RNA, 32 nt, Human
ggcaaccacugcagauuccuccccuggccagc

SEQ ID NO: 189313 - RNA, 32 nt, Human
ggcaaccagaacuagggagcugguggagaagg

SEQ ID NO: 189314 - RNA, 32 nt, Human
ggcaaccagcugacacaggagccagagugaga

SEQ ID NO: 189315 - RNA, 16 nt, Human
ggcaaccagcuuugcu

SEQ ID NO: 189316 - RNA, 32 nt, Human
ggcaaccaggggugccccaggcuagcucuucu

SEQ ID NO: 189317 - RNA, 32 nt, Human
ggcaaccauggcauggccaggagcccucaugc

SEQ ID NO: 189318 - RNA, 18 nt, Human
ggcaaccauuauucuguu

SEQ ID NO: 189319 - RNA, 32 nt, Human
ggcaaccauuuuuagaaggaaaaaggauuagg

SEQ ID NO: 189320 - RNA, 32 nt, Human
ggcaacccacacaggcaggcuggagaggagug

SEQ ID NO: 189321 - RNA, 32 nt, Human
ggcaacccagaacugauagugcaucagccgac

SEQ ID NO: 189322 - RNA, 32 nt, Human
ggcaacccagaacugauagugcaucagcugac

SEQ ID NO: 189323 - RNA, 32 nt, Human
ggcaacccagcaccggggaagccgucagcugc

SEQ ID NO: 189324 - RNA, 32 nt, Human
ggcaacccaggcccggaguccuuggggagcgg

SEQ ID NO: 189325 - RNA, 32 nt, Human
ggcaacccauggaggcagaaagaaggacgcca

SEQ ID NO: 189326 - RNA, 23 nt, Human
ggcaaccccugugccccuccccu

SEQ ID NO: 189327 - RNA, 32 nt, Human
ggcaacccuccuggacuaggcugcucuuguua

SEQ ID NO: 189328 - RNA, 18 nt, Human
ggcaaccguccaugccca

SEQ ID NO: 189329 - RNA, 32 nt, Human
ggcaaccguugcuguucacacgcucagccugu

SEQ ID NO: 189330 - RNA, 21 nt, Human
ggcaaccucccaucccacccc

SEQ ID NO: 189331 - RNA, 32 nt, Human
ggcaaccucuacugcccaucuccccugcucaa

SEQ ID NO: 189332 - RNA, 32 nt, Human
ggcaaccucugccuucuucccucuuccacucg

SEQ ID NO: 189333 - RNA, 32 nt, Human
ggcaaccugcaaggagcuggccagccagccug

SEQ ID NO: 189334 - RNA, 20 nt, Human
ggcaaccugcuuccauggcc

SEQ ID NO: 189335 - RNA, 32 nt, Human
ggcaacggauugcuuuucuguuucauguuagu

SEQ ID NO: 189336 - RNA, 32 nt, Human
ggcaacggcagugccacucaccccagaauggg

SEQ ID NO: 189337 - RNA, 32 nt, Human
ggcaacggcuuaguggcaucucccaggugcca

SEQ ID NO: 189338 - RNA, 32 nt, Human
ggcaacgggcggcagguugcaguggaggggcc

SEQ ID NO: 189339 - RNA, 32 nt, Human
ggcaacgguggaggaggagagacgggagggga

SEQ ID NO: 189340 - RNA, 32 nt, Human
ggcaacgucacaccuccugaggacagccagga

SEQ ID NO: 189341 - RNA, 32 nt, Human
ggcaacuaagcagucccugagaccauuuaaca

SEQ ID NO: 189342 - RNA, 32 nt, Human
ggcaacuaucuacuuucugucucuguggauuu

SEQ ID NO: 189343 - RNA, 32 nt, Human
ggcaacuauuggugcgcuccagccgggcaggu

SEQ ID NO: 189344 - RNA, 32 nt, Human
ggcaacuccagcccaacauucccucgcucugg

SEQ ID NO: 189345 - RNA, 32 nt, Human
ggcaacuccagccgaggccugggcuucugccu

SEQ ID NO: 189346 - RNA, 21 nt, Human
ggcaacuccccaaguacaaug

SEQ ID NO: 189347 - RNA, 32 nt, Human
ggcaacuccucugugaauuugccuuccaggcc

SEQ ID NO: 189348 - RNA, 32 nt, Human
ggcaacucuacauuggaacacugaggcuuaca

SEQ ID NO: 189349 - RNA, 32 nt, Human
ggcaacugaaucuagcaaggacucuuucgugu

SEQ ID NO: 189350 - RNA, 32 nt, Human
ggcaacugagaacggagagggaugcaggccag

SEQ ID NO: 189351 - RNA, 32 nt, Human
ggcaacugcauguaccuccucccuuucucauu

SEQ ID NO: 189352 - RNA, 32 nt, Human
ggcaacugcccaggaaggacugugcuuccguc

SEQ ID NO: 189353 - RNA, 32 nt, Human
ggcaacugcggcagcaggcuugugugugugag

SEQ ID NO: 189354 - RNA, 32 nt, Human
ggcaacugcucacacaguuguuucucugugaa

SEQ ID NO: 189355 - RNA, 32 nt, Human
ggcaacugcugaugcucaugguccccauggca

SEQ ID NO: 189356 - RNA, 32 nt, Human
ggcaacugcuuaccagccuggcuggccgugcu

SEQ ID NO: 189357 - RNA, 32 nt, Human
ggcaacuggaaagagggaguuggccugauuuu

SEQ ID NO: 189358 - RNA, 24 nt, Human
ggcaacuguguacagcuuaccccu

SEQ ID NO: 189359 - RNA, 32 nt, Human
ggcaacuuccaaugcuucucuaggcccugcac

SEQ ID NO: 189360 - RNA, 32 nt, Human
ggcaagaaacaacuccccacacacaacccacc

SEQ ID NO: 189361 - RNA, 32 nt, Human
ggcaagaaacaugaggaugaaaagccaauaug

SEQ ID NO: 189362 - RNA, 32 nt, Human
ggcaagaaaccagggcuucaaacugcuaguuc

SEQ ID NO: 189363 - RNA, 32 nt, Human
ggcaagaaagaauagugugaaagggaacuguu

SEQ ID NO: 189364 - RNA, 19 nt, Human
ggcaagaacagggcagcuu

SEQ ID NO: 189365 - RNA, 32 nt, Human
ggcaagaaccaccacaccuggccuugggagcu

SEQ ID NO: 189366 - RNA, 24 nt, Human
ggcaagaaccagaggcccaggcug

SEQ ID NO: 189367 - RNA, 32 nt, Human
ggcaagaacuggaaaaugcaagcgcccugaac

SEQ ID NO: 189368 - RNA, 32 nt, Human
ggcaagaagaaagagaugacagagucaauaua

SEQ ID NO: 189369 - RNA, 32 nt, Human
ggcaagaagaagagaagagagaaggagacaag

SEQ ID NO: 189370 - RNA, 32 nt, Human
ggcaagaagaagagaagagagaaggagagaag

SEQ ID NO: 189371 - RNA, 32 nt, Human
ggcaagaagaggagaugaaggccaaggaggag

SEQ ID NO: 189372 - RNA, 32 nt, Human
ggcaagaagaggaggaaggaauagcacagguc

SEQ ID NO: 189373 - RNA, 32 nt, Human
ggcaagaagaugacauguaugagaaccaaaaa

SEQ ID NO: 189374 - RNA, 32 nt, Human
ggcaagaaggagaaaguugaaggacucagcua

SEQ ID NO: 189375 - RNA, 32 nt, Human
ggcaagacacuggcuuugaaauuaggcucaug

SEQ ID NO: 189376 - RNA, 32 nt, Human
ggcaagaccaaaguguggcggggaguggggug

SEQ ID NO: 189377 - RNA, 32 nt, Human
ggcaagaccucuucccucugggccuguucucu

SEQ ID NO: 189378 - RNA, 17 nt, Human
ggcaagacgccacaccu

SEQ ID NO: 189379 - RNA, 32 nt, Human
ggcaagagaaaaauacuuuucuucucaauuuu

SEQ ID NO: 189380 - RNA, 32 nt, Human
ggcaagagaagcuggaaccacauucagagagu

SEQ ID NO: 189381 - RNA, 32 nt, Human
ggcaagagaugggggucucacuguguugcucu

SEQ ID NO: 189382 - RNA, 32 nt, Human
ggcaagagcacucuggguuccacagcacagca

SEQ ID NO: 189383 - RNA, 32 nt, Human
ggcaagagcccaggagacugugugguuugucc

SEQ ID NO: 189384 - RNA, 32 nt, Human
ggcaagagccuguaaucucagcuacucaggag

SEQ ID NO: 189385 - RNA, 32 nt, Human
ggcaagaggagggagaaggcagggccgugacu

SEQ ID NO: 189386 - RNA, 32 nt, Human
ggcauguacgagggaagagggaggcaggccuc

SEQ ID NO: 189387 - RNA, 32 nt, Human
ggcauguauuagacacaagcauauuugcugcc

SEQ ID NO: 189388 - RNA, 32 nt, Human
ggcauguccauaaggucugacaacagcuugcc

SEQ ID NO: 189389 - RNA, 32 nt, Human
ggcauguccgcggcgggcgccgucuagaggaa

SEQ ID NO: 189390 - RNA, 32 nt, Human
ggcauguccuaggcucugggugcaguagugag

SEQ ID NO: 189391 - RNA, 32 nt, Human
ggcaugucuggcaguagucucucauucacucc

SEQ ID NO: 189392 - RNA, 32 nt, Human
ggcaugugagaagccauggaagguugugguug

SEQ ID NO: 189393 - RNA, 18 nt, Human
ggcaugugcagggagcug

SEQ ID NO: 189394 - RNA, 32 nt, Human
ggcaugugccaggaguuugaggcugcagugca

SEQ ID NO: 189395 - RNA, 32 nt, Human
ggcaugugcccaggugagcuccuguguguguc

SEQ ID NO: 189396 - RNA, 32 nt, Human
ggcaugugccugcaaucccagcuacucaggag

SEQ ID NO: 189397 - RNA, 32 nt, Human
ggcaugugccuguaaccccagcuacucaggag

SEQ ID NO: 189398 - RNA, 32 nt, Human
ggcaugugccuguaaucccagcuacucaggag

SEQ ID NO: 189399 - RNA, 32 nt, Human
ggcaugugccuguaaucccagcuauuuggcag

SEQ ID NO: 189400 - RNA, 32 nt, Human
ggcaugugccuguaaucccagcuucuggaggc

SEQ ID NO: 189401 - RNA, 32 nt, Human
ggcaugugccuguaaucccaguuacuggggag

SEQ ID NO: 189402 - RNA, 32 nt, Human
ggcaugugccuguaaucccugcuacucaggag

SEQ ID NO: 189403 - RNA, 20 nt, Human
ggcaugugccuguaguccca

SEQ ID NO: 189404 - RNA, 32 nt, Human
ggcaugugccuguagucccaacuacucaggag

SEQ ID NO: 189405 - RNA, 23 nt, Human
ggcaugugccuguagucccagcu

SEQ ID NO: 189406 - RNA, 32 nt, Human
ggcaugugccuguagucccagcuacucaggag

SEQ ID NO: 189407 - RNA, 32 nt, Human
ggcaugugccuguagucccagcuacucuggag

SEQ ID NO: 189408 - RNA, 32 nt, Human
ggcaugugccuguagucccagcuacuugggag

SEQ ID NO: 189409 - RNA, 32 nt, Human
ggcaugugccuguaguuccagcuacucaggag

SEQ ID NO: 189410 - RNA, 32 nt, Human
ggcaugugccuguauucccagcuacucaugag

SEQ ID NO: 189411 - RNA, 32 nt, Human
ggcaugugcucuagcauauuaaccucaaacca

SEQ ID NO: 189412 - RNA, 16 nt, Human
ggcaugugcugagguu

SEQ ID NO: 189413 - RNA, 32 nt, Human
ggcaugugcuuccuucccucugaggcccauag

SEQ ID NO: 189414 - RNA, 21 nt, Human
ggcaugugcuuggccacugcc

SEQ ID NO: 189415 - RNA, 32 nt, Human
ggcaugugcuuguaaucccagcuacucuggag

SEQ ID NO: 189416 - RNA, 20 nt, Human
ggcauguggccuuuaucuca

SEQ ID NO: 189417 - RNA, 32 nt, Human
ggcauguggcgugcucuggguagcacaugacu

SEQ ID NO: 189418 - RNA, 32 nt, Human
ggcauguggcucagagguaucacagugacaaa

SEQ ID NO: 189419 - RNA, 17 nt, Human
ggcaugugggccuggau

SEQ ID NO: 189420 - RNA, 31 nt, Human
ggcauguggguggacagugguggagagucac

SEQ ID NO: 189421 - RNA, 32 nt, Human
ggcauguggguggacagugguggagagucacu

SEQ ID NO: 189422 - RNA, 31 nt, Human
ggcaugugguaucuggagcauuguguauaga

SEQ ID NO: 189423 - RNA, 32 nt, Human
ggcaugugguuccagagaaagagaggauaccu

SEQ ID NO: 189424 - RNA, 32 nt, Human
ggcaugugucccagggacaagcaguggcugga

SEQ ID NO: 189425 - RNA, 32 nt, Human
ggcauguucaaagacacuacacugccucucca

SEQ ID NO: 189426 - RNA, 32 nt, Human
ggcauguuccuguuucuucaucguugagcuuu

SEQ ID NO: 189427 - RNA, 20 nt, Human
ggcauguucuacacacagac

SEQ ID NO: 189428 - RNA, 32 nt, Human
ggcauguugaaugagccaggaggucuagaacu

SEQ ID NO: 189429 - RNA, 32 nt, Human
ggcauguuggacucugagcucauuuggggacc

SEQ ID NO: 189430 - RNA, 32 nt, Human
ggcauguugguuuugucucucuuucuuuucuc

SEQ ID NO: 189431 - RNA, 32 nt, Human
ggcauguugguuuugucuuucuuuucuccuuu

SEQ ID NO: 189432 - RNA, 32 nt, Human
ggcauguuucuggagguuucaaaggaaauaaa

SEQ ID NO: 189433 - RNA, 32 nt, Human
ggcauguuuuucuagagcagcugugcuaugcc

SEQ ID NO: 189434 - RNA, 32 nt, Human
ggcauuaagaugagagacgggccaggcgcagu

SEQ ID NO: 189435 - RNA, 32 nt, Human
ggcauuacauuccauccagccugggcgacaag

SEQ ID NO: 189436 - RNA, 32 nt, Human
ggcauuacuuguucguuauagacauggacguu

SEQ ID NO: 189437 - RNA, 21 nt, Human
ggcauuagacacuaggccaua

SEQ ID NO: 189438 - RNA, 20 nt, Human
ggcauuagauucucauagca

SEQ ID NO: 189439 - RNA, 32 nt, Human
ggcauuagcauaguaagcagauauuucuacuu

SEQ ID NO: 189440 - RNA, 32 nt, Human
ggcauuaugcauuuguccaaacccaccgaacg

SEQ ID NO: 189441 - RNA, 32 nt, Human
ggcauucacgucccuucuugcagggcauuuua

SEQ ID NO: 189442 - RNA, 32 nt, Human
ggcauucacgugcauccccuggaggggagggu

SEQ ID NO: 189443 - RNA, 21 nt, Human
ggcauucaguaccugacugca

SEQ ID NO: 189444 - RNA, 17 nt, Human
ggcauucaugccuggac

SEQ ID NO: 189445 - RNA, 32 nt, Human
ggcauucauggcugaaguggaggaucaggcag

SEQ ID NO: 189446 - RNA, 32 nt, Human
ggcauuccaacaugucagugauacuggguaga

SEQ ID NO: 189447 - RNA, 32 nt, Human
ggcauuccaaguuugacagcauggaacauugc

SEQ ID NO: 189448 - RNA, 32 nt, Human
ggcauuccagaaagacugggaauucauuucug

SEQ ID NO: 189449 - RNA, 17 nt, Human
ggcauuccagccugggc

SEQ ID NO: 189450 - RNA, 32 nt, Human
ggcauuccagccugggcaacagagugaggcug

SEQ ID NO: 189451 - RNA, 32 nt, Human
ggcauucccaguaggaaugugaagccagaggu

SEQ ID NO: 189452 - RNA, 32 nt, Human
ggcauucccaucaagagcaccauggacaaccc

SEQ ID NO: 189453 - RNA, 32 nt, Human
ggcauucccaugaacauccggggccugguguu

SEQ ID NO: 189454 - RNA, 32 nt, Human
ggcauucccuggccucucuggcugccacuugg

SEQ ID NO: 189455 - RNA, 32 nt, Human
ggcauuccuaggcuuagccaaagcuuaauauu

SEQ ID NO: 189456 - RNA, 32 nt, Human
ggcauuccuuucuccuccucucauccuacaca

SEQ ID NO: 189457 - RNA, 22 nt, Human
ggcauucgagacuagccuggac

SEQ ID NO: 189458 - RNA, 17 nt, Human
ggcauucggacuuggac

SEQ ID NO: 189459 - RNA, 32 nt, Human
ggcauucgucuguaaucccagcuacuugaugc

SEQ ID NO: 189460 - RNA, 18 nt, Human
ggcauucuacaccuggac

SEQ ID NO: 189461 - RNA, 32 nt, Human
ggcauucuaggaugaggucagaccccuuggcc

SEQ ID NO: 189462 - RNA, 32 nt, Human
ggcauucuauacuuaacuuggcaauuugagga

SEQ ID NO: 189463 - RNA, 18 nt, Human
ggcauucucagcuuagac

SEQ ID NO: 189464 - RNA, 17 nt, Human
ggcauucuccacuggac

SEQ ID NO: 189465 - RNA, 32 nt, Human
ggcauucucuucaguuccauguuuucaaguua

SEQ ID NO: 189466 - RNA, 32 nt, Human
ggcauucucuuuccuuuuccuucucuccugag

SEQ ID NO: 189467 - RNA, 32 nt, Human
ggcauucugaaaugaaagaaacuccuuuauau

SEQ ID NO: 189468 - RNA, 16 nt, Human
ggcauucugacuggau

SEQ ID NO: 189469 - RNA, 32 nt, Human
ggcauucugccucuacauuucuuuuuguuugu

SEQ ID NO: 189470 - RNA, 25 nt, Human
ggcauucugcuaaacaucugaccca

SEQ ID NO: 189471 - RNA, 17 nt, Human
ggcauucugcucaggac

SEQ ID NO: 189472 - RNA, 32 nt, Human
ggcauucugcucaggaccccuaucccagcuca

SEQ ID NO: 189473 - RNA, 17 nt, Human
ggcauucuuaccacgac

SEQ ID NO: 189474 - RNA, 18 nt, Human
ggcauucuuagcugagac

SEQ ID NO: 189475 - RNA, 32 nt, Human
ggcauucuuagucauaggagguuggcaggacg

SEQ ID NO: 189476 - RNA, 18 nt, Human
ggcauucuuuucugguac

SEQ ID NO: 189477 - RNA, 32 nt, Human
ggcauugacaacacaaaaacuguguagugguc

SEQ ID NO: 189478 - RNA, 17 nt, Human
ggcauugacccugagac

SEQ ID NO: 189479 - RNA, 32 nt, Human
ggcauugagaaaaaggaaguggguccuguucu

SEQ ID NO: 189480 - RNA, 32 nt, Human
ggcauugauuguaauucugccuuuuuggaaau

SEQ ID NO: 189481 - RNA, 32 nt, Human
ggcauugcaaccagagaggugcccaucccugu

SEQ ID NO: 189482 - RNA, 17 nt, Human
ggcauugcacucugcac

SEQ ID NO: 189483 - RNA, 21 nt, Human
ggcauugccacgccuaccaca

SEQ ID NO: 189484 - RNA, 32 nt, Human
ggcauugcucgcccaagcagcugguaauucca

SEQ ID NO: 189485 - RNA, 24 nt, Human
ggcauugcugauuuugucugccca

SEQ ID NO: 189486 - RNA, 20 nt, Human
ggcauuggaagcucucucca

SEQ ID NO: 189487 - RNA, 32 nt, Human
ggcauuggaaguuuagccuuuacuugaaugua

SEQ ID NO: 189488 - RNA, 32 nt, Human
ggcauuggaugcagaaccuagagccaguuuuc

SEQ ID NO: 189489 - RNA, 32 nt, Human
ggcauuggauuccgucucccugcuccaugccu

SEQ ID NO: 189490 - RNA, 19 nt, Human
ggcauuggccacgggacau

SEQ ID NO: 189491 - RNA, 27 nt, Human
ggcauuggccacgggacaucggccaca

SEQ ID NO: 189492 - RNA, 32 nt, Human
ggcauugguggaagcuggggucagaaaagaga

SEQ ID NO: 189493 - RNA, 19 nt, Human
ggcauugguguccauggcc

SEQ ID NO: 189494 - RNA, 21 nt, Human
ggcauuggugugggguagcuu

SEQ ID NO: 189495 - RNA, 32 nt, Human
ggcauuguaacucugugcuuugagugcaguuu

SEQ ID NO: 189496 - RNA, 32 nt, Human
ggcauuguaguuaaugaugguugauggguucu

SEQ ID NO: 189497 - RNA, 32 nt, Human
ggcauugugauguacagggcugcucugugaga

SEQ ID NO: 189498 - RNA, 32 nt, Human
ggcauugugcacccuuugccacccuggucccu

SEQ ID NO: 189499 - RNA, 32 nt, Human
ggcauuguguacaaauugcuucucaccauccc

SEQ ID NO: 189500 - RNA, 22 nt, Human
ggcauuguucgccgccgccgcc

SEQ ID NO: 189501 - RNA, 32 nt, Human
ggcauuguucuuggcauauuauuguacuaucc

SEQ ID NO: 189502 - RNA, 32 nt, Human
ggcauuuaaggagcauuuaaaaauauguauau

SEQ ID NO: 189503 - RNA, 32 nt, Human
ggcauuuacuacaucggucacuucuccaggcu

SEQ ID NO: 189504 - RNA, 32 nt, Human
ggcauuuaggauuccaucuggcccagccccug

SEQ ID NO: 189505 - RNA, 21 nt, Human
ggcauuuaggccucucugcca

SEQ ID NO: 189506 - RNA, 17 nt, Human
ggcauuuaggucuggau

SEQ ID NO: 189507 - RNA, 32 nt, Human
ggcauuuaguacauccagaaaguuguguaggc

SEQ ID NO: 189508 - RNA, 32 nt, Human
ggcauuucaccccagcuccaucagggcuggca

SEQ ID NO: 189509 - RNA, 31 nt, Human
ggcauuucacucaaguggacaggggaaaaag

SEQ ID NO: 189510 - RNA, 32 nt, Human
ggcauuucagagccaucagcugaagacaucug

SEQ ID NO: 189511 - RNA, 32 nt, Human
ggcauuucaguuccuccuaccaccucaacagg

SEQ ID NO: 189512 - RNA, 32 nt, Human
ggcauuuccagacuugaaauucucaucagucc

SEQ ID NO: 189513 - RNA, 32 nt, Human
ggcauuucugcucucuaugcuugagaccggga

SEQ ID NO: 189514 - RNA, 32 nt, Human
ggcauuucuggaugaaaaugcaaauggaaaaa

SEQ ID NO: 189515 - RNA, 20 nt, Human
ggcauuugaacaugcuccuc

SEQ ID NO: 189516 - RNA, 32 nt, Human
ggcauuugaacauguaaucaccagagauucug

SEQ ID NO: 189517 - RNA, 32 nt, Human
ggcauuugaucagaccaaacagugcuguuucc

SEQ ID NO: 189518 - RNA, 32 nt, Human
ggcauuugcaaugcaguucucacagcugguug

SEQ ID NO: 189519 - RNA, 21 nt, Human
ggcauuugccaaaccaagcca

SEQ ID NO: 189520 - RNA, 32 nt, Human
ggcauuugcccaguuagagcugagaaaauggu

SEQ ID NO: 189521 - RNA, 32 nt, Human
ggcauuugccuuugaguauguucuuguaggag

SEQ ID NO: 189522 - RNA, 32 nt, Human
ggcauuugcuuccaauuguagcuagcgcacag

SEQ ID NO: 189523 - RNA, 32 nt, Human
ggcauuuguauucauguauucaguuagccacu

SEQ ID NO: 189524 - RNA, 18 nt, Human
ggcauuuguccccgcgac

SEQ ID NO: 189525 - RNA, 32 nt, Human
ggcauuugugcguagguggcuguggggugaga

SEQ ID NO: 189526 - RNA, 18 nt, Human
ggcauuuuagaaccagac

SEQ ID NO: 189527 - RNA, 19 nt, Human
ggcauuuuauagccugggc

SEQ ID NO: 189528 - RNA, 32 nt, Human
ggcauuuuauucagcuaccagauggcuuaaaa

SEQ ID NO: 189529 - RNA, 24 nt, Human
ggcauuuuauuccuaaaucuucca

SEQ ID NO: 189530 - RNA, 32 nt, Human
ggcauuuuccaugcaaccuccuucugccagca

SEQ ID NO: 189531 - RNA, 32 nt, Human
ggcauuuucccccugccaagggcugaaauggc

SEQ ID NO: 189532 - RNA, 32 nt, Human
ggcauuuugcuaccaagccucuucccaacgcc

SEQ ID NO: 189533 - RNA, 17 nt, Human
ggcauuuugggcuggau

SEQ ID NO: 189534 - RNA, 32 nt, Human
ggcauuuugucagaaaaagaccuguguuucca

SEQ ID NO: 189535 - RNA, 19 nt, Human
ggcauuuuguugccuggac

SEQ ID NO: 189536 - RNA, 32 nt, Human
ggccaaaaacauccuuuugcucugucucguuc

SEQ ID NO: 189537 - RNA, 32 nt, Human
ggccaaaacaccaggaaacacauuucuguggc

SEQ ID NO: 189538 - RNA, 32 nt, Human
ggccaaaacagcuuuaauuucccugcgaggaa

SEQ ID NO: 189539 - RNA, 32 nt, Human
ggccaaaacagugaaaccccgucucuacuaaa

SEQ ID NO: 189540 - RNA, 32 nt, Human
ggccaaaagaagcgggccuguuggaggcuggg

SEQ ID NO: 189541 - RNA, 32 nt, Human
ggccaaaaggaaacugauggagaauauucugc

SEQ ID NO: 189542 - RNA, 32 nt, Human
ggccaaaagggagggcccuuuggaggagcgug

SEQ ID NO: 189543 - RNA, 24 nt, Human
ggccaaaagggccccuccuugcca

SEQ ID NO: 189544 - RNA, 32 nt, Human
ggccaaaauggugaaaccucgucucugcuaac

SEQ ID NO: 189545 - RNA, 32 nt, Human
ggccaaaauggugaaacuccaucucuacuaaa

SEQ ID NO: 189546 - RNA, 32 nt, Human
ggccaaaauucauuauuguauuuccaauacag

SEQ ID NO: 189547 - RNA, 32 nt, Human
ggccaaaauuguuuuaaaaucuugcaaggaaa

SEQ ID NO: 189548 - RNA, 32 nt, Human
ggccaaacaugggaguuaagugcugcuugucu

SEQ ID NO: 189549 - RNA, 32 nt, Human
ggccaaaccacaguuuguaccaaaaaccuugu

SEQ ID NO: 189550 - RNA, 32 nt, Human
ggccaaacccuggaaugugccugcuggcugca

SEQ ID NO: 189551 - RNA, 32 nt, Human
ggccaaaccuuggcuguuccagaaacugaacc

SEQ ID NO: 189552 - RNA, 32 nt, Human
ggccaaacggugccugcggugccugagcugag

SEQ ID NO: 189553 - RNA, 32 nt, Human
ggccaaacucccagugcugggggucccugugc

SEQ ID NO: 189554 - RNA, 32 nt, Human
ggccaaacugcaggcaaccaccucgggccgcu

SEQ ID NO: 189555 - RNA, 24 nt, Human
ggccaaagaccaaauuccuuggca

SEQ ID NO: 189556 - RNA, 32 nt, Human
ggccaaagagaccucagaugaaccugaaagac

SEQ ID NO: 189557 - RNA, 32 nt, Human
ggccaaagccugggagccugcgaggggaggag

SEQ ID NO: 189558 - RNA, 32 nt, Human
ggccaaagcuguucacgucugugcucaaccau

SEQ ID NO: 189559 - RNA, 18 nt, Human
ggccaaagcuuccggcgu

SEQ ID NO: 189560 - RNA, 32 nt, Human
ggccaaaggcuaagccagcagauuguucuguu

SEQ ID NO: 189561 - RNA, 32 nt, Human
ggccaaaggugagugggcuauuggccuucucc

SEQ ID NO: 189562 - RNA, 26 nt, Human
ggccaaaguggguggaucaccugagg

SEQ ID NO: 189563 - RNA, 32 nt, Human
ggccaaaguggugaaacccugucucuacuaaa

SEQ ID NO: 189564 - RNA, 32 nt, Human
ggccaaauggaaaaggagaggcuacuucaagu

SEQ ID NO: 189565 - RNA, 21 nt, Human
ggccaaaugucacagcaccaa

SEQ ID NO: 189566 - RNA, 21 nt, Human
ggccaaauuccaucugcugcc

SEQ ID NO: 189567 - RNA, 32 nt, Human
ggccaaauugcccuuuaacugcaccugaaucc

SEQ ID NO: 189568 - RNA, 32 nt, Human
ggccaacaaggugaaaccccaucucuacuaaa

SEQ ID NO: 189569 - RNA, 32 nt, Human
ggccaacaaggugaaaccccgucucuacuaaa

SEQ ID NO: 189570 - RNA, 32 nt, Human
ggccaacaaucagaaaggaacugaggcuugcc

SEQ ID NO: 189571 - RNA, 32 nt, Human
ggccaacaauggcaaaaccccgucucuaccaa

SEQ ID NO: 189572 - RNA, 32 nt, Human
ggccaacacagcgagacccccaucucuaaaaa

SEQ ID NO: 189573 - RNA, 32 nt, Human
ggccaacacagugaaaccccaucucuacuaau

SEQ ID NO: 189574 - RNA, 32 nt, Human
ggccaacacagugaaaccccaucuguacuaaa

SEQ ID NO: 189575 - RNA, 32 nt, Human
ggccaacacagugaaaccccaugucuacuaaa

SEQ ID NO: 189576 - RNA, 29 nt, Human
ggccaacacagugaaaccucgucucuagu

SEQ ID NO: 189577 - RNA, 32 nt, Human
ggccaacacgaugaaaccccgucucuacuaaa

SEQ ID NO: 189578 - RNA, 21 nt, Human
ggccaacacgcccuggcagca

SEQ ID NO: 189579 - RNA, 32 nt, Human
ggccaacacggugaaaccccaucucuacuaaa

SEQ ID NO: 189580 - RNA, 32 nt, Human
ggccaacacggugaaaccccaucucucuaaaa

SEQ ID NO: 189581 - RNA, 32 nt, Human
ggccaacacggugaaacccccgucuccacuaa

SEQ ID NO: 189582 - RNA, 32 nt, Human
ggccaacacggugaaaccccgacucuacuaaa

SEQ ID NO: 189583 - RNA, 32 nt, Human
ggccaacacggugaaaccccgccucuacuaaa

SEQ ID NO: 189584 - RNA, 32 nt, Human
ggccaacacggugaaaccccgucacugaaaaa

SEQ ID NO: 189585 - RNA, 32 nt, Human
ggccaacacggugaaaccccgucucuacuaaa

SEQ ID NO: 189586 - RNA, 32 nt, Human
ggccaacacggugaaaccccgucucuccuaaa

SEQ ID NO: 189587 - RNA, 32 nt, Human
ggccaacacggugaaacccggucucuacuaaa

SEQ ID NO: 189588 - RNA, 32 nt, Human
ggccaacacggugaaacccuguaucuacuaaa

SEQ ID NO: 189589 - RNA, 29 nt, Human
ggccaacacggugaaacccugucucuacu

SEQ ID NO: 189590 - RNA, 32 nt, Human
ggccaacacggugaaacccugucucuacuaaa

SEQ ID NO: 189591 - RNA, 32 nt, Human
ggccaacacggugaaacgcugucucuacuaaa

SEQ ID NO: 189592 - RNA, 32 nt, Human
ggccaacagaaugaaacccugucucuacaaaa

SEQ ID NO: 189593 - RNA, 32 nt, Human
ggccaacagagaaccaggaggccaggccugag

SEQ ID NO: 189594 - RNA, 32 nt, Human
ggccaacagaugugagccacuuuucucagccu

SEQ ID NO: 189595 - RNA, 32 nt, Human
ggccaacagcccagagcucaggacacuuggcu

SEQ ID NO: 189596 - RNA, 32 nt, Human
ggccaacagggugaaaccccgucucuacaaaa

SEQ ID NO: 189597 - RNA, 32 nt, Human
ggccaacaguagccaaaccccuagagacagug

SEQ ID NO: 189598 - RNA, 32 nt, Human
ggccaacauaaugaaaccccaucucuacuaaa

SEQ ID NO: 189599 - RNA, 32 nt, Human
ggccaacauacugaaaccccgucucuacuaaa

SEQ ID NO: 189600 - RNA, 32 nt, Human
ggccaacauagcaaaaccccaucucuauuaaa

SEQ ID NO: 189601 - RNA, 32 nt, Human
ggccaacauagcgaaaccccgucucuacuaaa

SEQ ID NO: 189602 - RNA, 32 nt, Human
ggccaacauaguaaaaccucaucucuacuaaa

SEQ ID NO: 189603 - RNA, 32 nt, Human
ggccaacauagugaaaccccaucucuaccaaa

SEQ ID NO: 189604 - RNA, 32 nt, Human
ggccaacauagugaaaccccaucucuacuaaa

SEQ ID NO: 189605 - RNA, 32 nt, Human
ggccaacauagugaaaccccaucucuacugaa

SEQ ID NO: 189606 - RNA, 32 nt, Human
ggccaacauagugaaacccccucucuacuaaa

SEQ ID NO: 189607 - RNA, 32 nt, Human
ggccaacauagugaaaccccgccucuacuaaa

SEQ ID NO: 189608 - RNA, 32 nt, Human
ggccaacauagugaaaccccgucucuacuaaa

SEQ ID NO: 189609 - RNA, 32 nt, Human
ggccaacauagugaaaccccgucucuaguaaa

SEQ ID NO: 189610 - RNA, 32 nt, Human
ggccaacauagugaaaccccgucucuauuaaa

SEQ ID NO: 189611 - RNA, 32 nt, Human
ggccaacauagugaaaccccgucucuucuaaa

SEQ ID NO: 189612 - RNA, 32 nt, Human
ggccaacauagugaaaccccgugucuacuaaa

SEQ ID NO: 189613 - RNA, 32 nt, Human
ggccaacauagugaaaccccuucucuacuaaa

SEQ ID NO: 189614 - RNA, 32 nt, Human
ggccaacauagugaaacccuaucucuacuaaa

SEQ ID NO: 189615 - RNA, 22 nt, Human
ggccaacauagugaaacccugu

SEQ ID NO: 189616 - RNA, 32 nt, Human
ggccaacauagugaaacccugucccuacuaua

SEQ ID NO: 189617 - RNA, 32 nt, Human
ggccaacauagugaaacccugucucuaauaaa

SEQ ID NO: 189618 - RNA, 32 nt, Human
ggccaacauagugaaacccugucucuaccaaa

SEQ ID NO: 189619 - RNA, 32 nt, Human
ggccaacauagugaaacccugucucuacuaaa

SEQ ID NO: 189620 - RNA, 32 nt, Human
ggccaacauagugaaaucccaucucuacuaaa

SEQ ID NO: 189621 - RNA, 32 nt, Human
ggccaacauauagugaaacccagucucuacua

SEQ ID NO: 189622 - RNA, 32 nt, Human
ggccaacauauagugaaacccugucucuacua

SEQ ID NO: 189623 - RNA, 32 nt, Human
ggccaacauaugcagacauuuguacuccucaa

SEQ ID NO: 189624 - RNA, 32 nt, Human
ggccaacaucaugaaaccccgucucuacuaaa

SEQ ID NO: 189625 - RNA, 32 nt, Human
ggccaacaucaugaaacccugucuguacuaaa

SEQ ID NO: 189626 - RNA, 32 nt, Human
ggccaacaucgugaaaccccaucucuacuaaa

SEQ ID NO: 189627 - RNA, 32 nt, Human
ggccaacaucgugaaacccugucucuacuaaa

SEQ ID NO: 189628 - RNA, 32 nt, Human
ggccaacaugacgaaaccccaucucuacuaaa

SEQ ID NO: 189629 - RNA, 32 nt, Human
ggccaacaugacgaaaccccgucucuacuaaa

SEQ ID NO: 189630 - RNA, 32 nt, Human
ggccaacaugauaaaaccccaacucuacuaaa

SEQ ID NO: 189631 - RNA, 32 nt, Human
ggccaacaugaugaaaccccaucuccacuaaa

SEQ ID NO: 189632 - RNA, 32 nt, Human
ggccaacaugaugaaaccccaucucuacuaaa

SEQ ID NO: 189633 - RNA, 32 nt, Human
ggccaacaugaugaaaccccgucucuaccaaa

SEQ ID NO: 189634 - RNA, 32 nt, Human
ggccaacaugaugaaaccccgucucuacuaaa

SEQ ID NO: 189635 - RNA, 32 nt, Human
ggccaacaugaugaaaccccgucucuacuaca

SEQ ID NO: 189636 - RNA, 32 nt, Human
ggccaacaugaugaaaccccguuucuacuaaa

SEQ ID NO: 189637 - RNA, 32 nt, Human
ggccaacaugaugaaacccuaucucuacuaaa

SEQ ID NO: 189638 - RNA, 32 nt, Human
ggccaacaugaugaaacccugucucuaccaaa

SEQ ID NO: 189639 - RNA, 32 nt, Human
ggccaacaugaugaaacccugucucuacuaaa

SEQ ID NO: 189640 - RNA, 32 nt, Human
ggccaacaugaugaaacccugucucuacugaa

SEQ ID NO: 189641 - RNA, 32 nt, Human
ggccaacaugaugaaacccugucucuauuaaa

SEQ ID NO: 189642 - RNA, 32 nt, Human
ggccaacaugaugaaacccuguucucuacuaa

SEQ ID NO: 189643 - RNA, 32 nt, Human
ggccaacaugaugaaacccuugucucuauuaa

SEQ ID NO: 189644 - RNA, 32 nt, Human
ggccaacaugaugagaccuccgucucuacuaa

SEQ ID NO: 189645 - RNA, 32 nt, Human
ggccaacaugcugaaacccugucuguacuaaa

SEQ ID NO: 189646 - RNA, 32 nt, Human
ggccaacauggagaaaccccaucucuaccaaa

SEQ ID NO: 189647 - RNA, 32 nt, Human
ggccaacauggagaaaccccaucucuacuaaa

SEQ ID NO: 189648 - RNA, 32 nt, Human
ggccaacauggagaaaccccaucuuuacuaaa

SEQ ID NO: 189649 - RNA, 32 nt, Human
ggccaacauggagaaaccccgucucuacuaaa

SEQ ID NO: 189650 - RNA, 32 nt, Human
ggccaacauggagaaaccccgugacuacuaaa

SEQ ID NO: 189651 - RNA, 32 nt, Human
ggccaacauggagcuuaguugggaggauaaag

SEQ ID NO: 189652 - RNA, 32 nt, Human
ggccaacauggcaaaaccacaucucuacuaaa

SEQ ID NO: 189653 - RNA, 32 nt, Human
ggccaacauggcaaaaccccaucacuaaaaau

SEQ ID NO: 189654 - RNA, 32 nt, Human
ggccaacauggcaaaaccccaucuccacaaaa

SEQ ID NO: 189655 - RNA, 32 nt, Human
ggccaacauggcaaaaccccaucucuaccaaa

SEQ ID NO: 189656 - RNA, 32 nt, Human
ggccaacauggcaaaaccccaucucuacuaaa

SEQ ID NO: 189657 - RNA, 32 nt, Human
ggccaacauggcaaaaccccaucucuacugaa

SEQ ID NO: 189658 - RNA, 32 nt, Human
ggccaacauggcaaaaccccaucuguacuaaa

SEQ ID NO: 189659 - RNA, 32 nt, Human
ggccaacauggcaaaaccccaucuuuacuaaa

SEQ ID NO: 189660 - RNA, 32 nt, Human
ggccaacauggcaaaaccccaugucuacuaaa

SEQ ID NO: 189661 - RNA, 32 nt, Human
ggccaacauggcaaaacccccaucucgacuaa

SEQ ID NO: 189662 - RNA, 32 nt, Human
ggccaacauggcaaaacccccgucucuacuaa

SEQ ID NO: 189663 - RNA, 32 nt, Human
ggccaacauggcaaaaccucaucucuacuaaa

SEQ ID NO: 189664 - RNA, 32 nt, Human
ggccaacauggcaaaaucccaucucuacuaaa

SEQ ID NO: 189665 - RNA, 32 nt, Human
ggccaacauggcaagaccccaucucuacuaaa

SEQ ID NO: 189666 - RNA, 32 nt, Human
ggccaacauggcagaaaccccaucucuacuaa

SEQ ID NO: 189667 - RNA, 32 nt, Human
ggccaacauggcgaaaacccaucucuacuaaa

SEQ ID NO: 189668 - RNA, 32 nt, Human
ggccaacauggcgaaaccccaucgcuacuaaa

SEQ ID NO: 189669 - RNA, 32 nt, Human
ggccaacauggcgaaaccccaucucuaccgaa

SEQ ID NO: 189670 - RNA, 29 nt, Human
ggccaacauggcgaaaccccaucucuacu

SEQ ID NO: 189671 - RNA, 32 nt, Human
ggccaacauggcgaaaccccaucucuacuaaa

SEQ ID NO: 189672 - RNA, 32 nt, Human
ggccaacauggcgaaaccccaucucuacuuaa

SEQ ID NO: 189673 - RNA, 32 nt, Human
ggccaacauggcgaaaccccaucucugcuaaa

SEQ ID NO: 189674 - RNA, 32 nt, Human
ggccaacauggcgaaaccccauuucuacuaaa

SEQ ID NO: 189675 - RNA, 29 nt, Human
ggccaacauggcgaaaccccgucucuacu

SEQ ID NO: 189676 - RNA, 32 nt, Human
ggccaacauggcgaaaccccgucucuacuaaa

SEQ ID NO: 189677 - RNA, 32 nt, Human
ggccaacauggcgaaaccccgucucuacuaua

SEQ ID NO: 189678 - RNA, 32 nt, Human
ggccaacauggcgaaaccccgucucuauuaaa

SEQ ID NO: 189679 - RNA, 32 nt, Human
ggccaacauggcgaaaccccgucuuuacuaaa

SEQ ID NO: 189680 - RNA, 32 nt, Human
ggccaacauggcgaaaccccucucuacuaaaa

SEQ ID NO: 189681 - RNA, 32 nt, Human
ggccaacauggcgaaaccccuucucuacuaaa

SEQ ID NO: 189682 - RNA, 32 nt, Human
ggccaacauggcgaaaccucaucucuacuaaa

SEQ ID NO: 189683 - RNA, 32 nt, Human
ggccaacauggcgaaauuccaucucuaguaaa

SEQ ID NO: 189684 - RNA, 32 nt, Human
ggccaacauggcgagaccccaucucuacuaaa

SEQ ID NO: 189685 - RNA, 32 nt, Human
ggccaacauggcggaaccccaucuccacuaaa

SEQ ID NO: 189686 - RNA, 32 nt, Human
ggccaacauggggaaaccccaucucuacuaaa

SEQ ID NO: 189687 - RNA, 32 nt, Human
ggccaacauggggaaaccccgucucuacuaaa

SEQ ID NO: 189688 - RNA, 32 nt, Human
ggccaacauggggaaaucccaucucuacuaaa

SEQ ID NO: 189689 - RNA, 32 nt, Human
ggccaacaugguaaaaccccaucucuacuaaa

SEQ ID NO: 189690 - RNA, 32 nt, Human
ggccaacaugguaaaaccccauuucuacuaaa

SEQ ID NO: 189691 - RNA, 32 nt, Human
ggccaacauggugaaaacccaucucuauuaaa

SEQ ID NO: 189692 - RNA, 32 nt, Human
ggccaacauggugaaaacccaucucugcugaa

SEQ ID NO: 189693 - RNA, 32 nt, Human
ggccaacauggugaaaaccugucucuacuaaa

SEQ ID NO: 189694 - RNA, 32 nt, Human
ggccaacauggugaaaacuccucucuacuaaa

SEQ ID NO: 189695 - RNA, 32 nt, Human
ggccaacauggugaaacaccgucuccacuaaa

SEQ ID NO: 189696 - RNA, 32 nt, Human
ggccaacauggugaaacacuaucucuacuaaa

SEQ ID NO: 189697 - RNA, 32 nt, Human
ggccaacauggugaaacacugucucuacuaaa

SEQ ID NO: 189698 - RNA, 32 nt, Human
ggccaacauggugaaacacugucuguacuaaa

SEQ ID NO: 189699 - RNA, 32 nt, Human
ggccaacauggugaaaccacauuucuacaaaa

SEQ ID NO: 189700 - RNA, 32 nt, Human
ggccaacauggugaaaccacguuccugcuaaa

SEQ ID NO: 189701 - RNA, 19 nt, Human
ggccaacauggugaaaccc

SEQ ID NO: 189702 - RNA, 32 nt, Human
ggccaacauggugaaacccagucucuacuaaa

SEQ ID NO: 189703 - RNA, 32 nt, Human
ggccaacauggugaaacccagucuuuacuaaa

SEQ ID NO: 189704 - RNA, 20 nt, Human
ggccaacauggugaaacccc

SEQ ID NO: 189705 - RNA, 32 nt, Human
ggccaacauggugaaaccccaccucuacaaaa

SEQ ID NO: 189706 - RNA, 32 nt, Human
ggccaacauggugaaaccccaccucuacuaaa

SEQ ID NO: 189707 - RNA, 32 nt, Human
ggccaacauggugaaaccccacgucuacuaaa

SEQ ID NO: 189708 - RNA, 32 nt, Human
ggccaacauggugaaaccccauauccauuaaa

SEQ ID NO: 189709 - RNA, 32 nt, Human
ggccaacauggugaaaccccauaucuacuaaa

SEQ ID NO: 189710 - RNA, 32 nt, Human
ggccaacauggugaaaccccauccuuacuaaa

SEQ ID NO: 189711 - RNA, 32 nt, Human
ggccaacauggugaaaccccaucgcuacuaaa

SEQ ID NO: 189712 - RNA, 32 nt, Human
ggccaacauggugaaaccccaucuccacaaaa

SEQ ID NO: 189713 - RNA, 32 nt, Human
ggccaacauggugaaaccccaucuccacuaaa

SEQ ID NO: 189714 - RNA, 32 nt, Human
ggccaacauggugaaaccccaucucuacaaaa

SEQ ID NO: 189715 - RNA, 32 nt, Human
ggccaacauggugaaaccccaucucuacaguu

SEQ ID NO: 189716 - RNA, 32 nt, Human
ggccaacauggugaaaccccaucucuaccaaa

SEQ ID NO: 189717 - RNA, 29 nt, Human
ggccaacauggugaaaccccaucucuacu

SEQ ID NO: 189718 - RNA, 32 nt, Human
ggccaacauggugaaaccccaucucuacuaaa

SEQ ID NO: 189719 - RNA, 32 nt, Human
ggccaacauggugaaaccccaucucuacuaau

SEQ ID NO: 189720 - RNA, 32 nt, Human
ggccaacauggugaaaccccaucucuacuaga

SEQ ID NO: 189721 - RNA, 32 nt, Human
ggccaacauggugaaaccccaucucuacugaa

SEQ ID NO: 189722 - RNA, 32 nt, Human
ggccaacauggugaaaccccaucucuaucaga

SEQ ID NO: 189723 - RNA, 32 nt, Human
ggccaacauggugaaaccccaucucuauuaaa

SEQ ID NO: 189724 - RNA, 32 nt, Human
ggccaacauggugaaaccccaucucuauuaua

SEQ ID NO: 189725 - RNA, 32 nt, Human
ggccaacauggugaaaccccaucucugcuaaa

SEQ ID NO: 189726 - RNA, 32 nt, Human
ggccaacauggugaaaccccaucuguacuaaa

SEQ ID NO: 189727 - RNA, 32 nt, Human
ggccaacauggugaaaccccaucuguauuaau

SEQ ID NO: 189728 - RNA, 32 nt, Human
ggccaacauggugaaaccccaucuuuacuaaa

SEQ ID NO: 189729 - RNA, 32 nt, Human
ggccaacauggugaaaccccaugucuacuaaa

SEQ ID NO: 189730 - RNA, 32 nt, Human
ggccaacauggugaaaccccauuucuacuaaa

SEQ ID NO: 189731 - RNA, 32 nt, Human
ggccaacauggugaaacccccaucucuacuaa

SEQ ID NO: 189732 - RNA, 32 nt, Human
ggccaacauggugaaacccccaucucuccugg

SEQ ID NO: 189733 - RNA, 32 nt, Human
ggccaacauggugaaacccccucucuacuaaa

SEQ ID NO: 189734 - RNA, 22 nt, Human
ggccaacauggugaaaccccgu

SEQ ID NO: 189735 - RNA, 32 nt, Human
ggccaacauggugaaaccccgucacuaauaaa

SEQ ID NO: 189736 - RNA, 32 nt, Human
ggccaacauggugaaaccccgucacuacuaaa

SEQ ID NO: 189737 - RNA, 32 nt, Human
ggccaacauggugaaaccccgucuauacuaaa

SEQ ID NO: 189738 - RNA, 32 nt, Human
ggccaacauggugaaaccccgucuccacuaaa

SEQ ID NO: 189739 - RNA, 32 nt, Human
ggccaacauggugaaaccccgucucuacaaaa

SEQ ID NO: 189740 - RNA, 32 nt, Human
ggccaacauggugaaaccccgucucuaccaaa

SEQ ID NO: 189741 - RNA, 32 nt, Human
ggccaacauggugaaaccccgucucuacuaaa

SEQ ID NO: 189742 - RNA, 32 nt, Human
ggccaacauggugaaaccccgucucuacuuaa

SEQ ID NO: 189743 - RNA, 32 nt, Human
ggccaacauggugaaaccccgucucuaguaaa

SEQ ID NO: 189744 - RNA, 32 nt, Human
ggccaacauggugaaaccccgucucuauuaaa

SEQ ID NO: 189745 - RNA, 32 nt, Human
ggccaacauggugaaaccccgucucuauuaca

SEQ ID NO: 189746 - RNA, 32 nt, Human
ggccaacauggugaaaccccgucuguacuaaa

SEQ ID NO: 189747 - RNA, 32 nt, Human
ggccaacauggugaaaccccgucuguauuaaa

SEQ ID NO: 189748 - RNA, 32 nt, Human
ggccaacauggugaaaccccguuucuaccaaa

SEQ ID NO: 189749 - RNA, 32 nt, Human
ggccaacauggugaaaccccuucucuacuaaa

SEQ ID NO: 189750 - RNA, 32 nt, Human
ggccaacauggugaaaccccuucucuacugaa

SEQ ID NO: 189751 - RNA, 32 nt, Human
ggccaacauggugaaaccccuucucuaguaaa

SEQ ID NO: 189752 - RNA, 32 nt, Human
ggccaacauggugaaacccgcugucuacuaaa

SEQ ID NO: 189753 - RNA, 32 nt, Human
ggccaacauggugaaacccggucucuaccaaa

SEQ ID NO: 189754 - RNA, 32 nt, Human
ggccaacauggugaaacccggucucuacuaaa

SEQ ID NO: 189755 - RNA, 22 nt, Human
ggccaacauggugaaacccguc

SEQ ID NO: 189756 - RNA, 32 nt, Human
ggccaacauggugaaacccgucucuacuaaaa

SEQ ID NO: 189757 - RNA, 32 nt, Human
ggccaacauggugaaacccuaucuccacuaaa

SEQ ID NO: 189758 - RNA, 32 nt, Human
ggccaacauggugaaacccuaucucuacuaaa

SEQ ID NO: 189759 - RNA, 32 nt, Human
ggccaacauggugaaacccuaucucuacugca

SEQ ID NO: 189760 - RNA, 32 nt, Human
ggccaacauggugaaacccucaucucaacuaa

SEQ ID NO: 189761 - RNA, 32 nt, Human
ggccaacauggugaaacccuggcucuacuaca

SEQ ID NO: 189762 - RNA, 22 nt, Human
ggccaacauggugaaacccugu

SEQ ID NO: 189763 - RNA, 32 nt, Human
ggccaacauggugaaacccuguaucuacuaaa

SEQ ID NO: 189764 - RNA, 32 nt, Human
ggccaacauggugaaacccugucgacuaaaaa

SEQ ID NO: 189765 - RNA, 32 nt, Human
ggccaacauggugaaacccugucuacuaaaaa

SEQ ID NO: 189766 - RNA, 32 nt, Human
ggccaacauggugaaacccugucucuacaaaa

SEQ ID NO: 189767 - RNA, 29 nt, Human
ggccaacauggugaaacccugucucuacu

SEQ ID NO: 189768 - RNA, 32 nt, Human
ggccaacauggugaaacccugucucuacuaaa

SEQ ID NO: 189769 - RNA, 32 nt, Human
ggccaacauggugaaacccugucucuacuaca

SEQ ID NO: 189770 - RNA, 32 nt, Human
ggccaacauggugaaacccugucucuacuaga

SEQ ID NO: 189771 - RNA, 32 nt, Human
ggccaacauggugaaacccugucucuacugaa

SEQ ID NO: 189772 - RNA, 32 nt, Human
ggccaacauggugaaacccugucucuaguaaa

SEQ ID NO: 189773 - RNA, 32 nt, Human
ggccaacauggugaaacccugucucuauuaaa

SEQ ID NO: 189774 - RNA, 32 nt, Human
ggccaacauggugaaacccugucucuccuaaa

SEQ ID NO: 189775 - RNA, 32 nt, Human
ggccaacauggugaaacccugucugcauuaaa

SEQ ID NO: 189776 - RNA, 32 nt, Human
ggccaacauggugaaacccugucuguaccaaa

SEQ ID NO: 189777 - RNA, 32 nt, Human
ggccaacauggugaaacccugucuguacuaaa

SEQ ID NO: 189778 - RNA, 32 nt, Human
ggccaacauggugaaacccugucuguaguaaa

SEQ ID NO: 189779 - RNA, 32 nt, Human
ggccaacauggugaaacccugucuuuacuaaa

SEQ ID NO: 189780 - RNA, 32 nt, Human
ggccaacauggugaaacccugugccuacuaaa

SEQ ID NO: 189781 - RNA, 32 nt, Human
ggccaacauggugaaacccugugucugcuaaa

SEQ ID NO: 189782 - RNA, 32 nt, Human
ggccaacauggugaaacccuguugcuacuaaa

SEQ ID NO: 189783 - RNA, 32 nt, Human
ggccaacauggugaaacccuguuucuacuaaa

SEQ ID NO: 189784 - RNA, 32 nt, Human
ggccaacauggugaaacccuguuucuacugaa

SEQ ID NO: 189785 - RNA, 32 nt, Human
ggccaacauggugaaacccuguuucugccaaa

SEQ ID NO: 189786 - RNA, 32 nt, Human
ggccaacauggugaaacccuucucuacugaaa

SEQ ID NO: 189787 - RNA, 32 nt, Human
ggccaacauggugaaacccuuucucuacugaa

SEQ ID NO: 189788 - RNA, 32 nt, Human
ggccaacauggugaaaccgcaucucugcugaa

SEQ ID NO: 189789 - RNA, 32 nt, Human
ggccaacauggugaaaccgugucucuacuaaa

SEQ ID NO: 189790 - RNA, 32 nt, Human
ggccaacauggugaaaccucaucucuacuaaa

SEQ ID NO: 189791 - RNA, 32 nt, Human
ggccaacauggugaaaccucauuucuacuaaa

SEQ ID NO: 189792 - RNA, 32 nt, Human
ggccaacauggugaaaccuccgucucuauuaa

SEQ ID NO: 189793 - RNA, 32 nt, Human
ggccaacauggugaaaccucgucucuacuaaa

SEQ ID NO: 189794 - RNA, 32 nt, Human
ggccaacauggugaaaccucgucucuacuaca

SEQ ID NO: 189795 - RNA, 32 nt, Human
ggccaacauggugaaaccucgucucuacugaa

SEQ ID NO: 189796 - RNA, 32 nt, Human
ggccaacauggugaaaccucgucuguacuaaa

SEQ ID NO: 189797 - RNA, 32 nt, Human
ggccaacauggugaaaccucgucuuuacuaaa

SEQ ID NO: 189798 - RNA, 32 nt, Human
ggccaacauggugaaaccuggccucuaccuaa

SEQ ID NO: 189799 - RNA, 32 nt, Human
ggccaacauggugaaaccugucucuacuaaaa

SEQ ID NO: 189800 - RNA, 32 nt, Human
ggccaacauggugaaaccuugucuacuaaaaa

SEQ ID NO: 189801 - RNA, 32 nt, Human
ggccaacauggugaaaccuugucucuacuaaa

SEQ ID NO: 189802 - RNA, 32 nt, Human
ggccaacauggugaaaccuugucucuacugaa

SEQ ID NO: 189803 - RNA, 32 nt, Human
ggccaacauggugaaacgccaucucuaccaaa

SEQ ID NO: 189804 - RNA, 32 nt, Human
ggccaacauggugaaacgccaucucuacuaaa

SEQ ID NO: 189805 - RNA, 29 nt, Human
ggccaacauggugaaacgcugucucuacu

SEQ ID NO: 189806 - RNA, 32 nt, Human
ggccaacauggugaaacgucgucucugcuaaa

SEQ ID NO: 189807 - RNA, 32 nt, Human
ggccaacauggugaaacuccaucucuacuaaa

SEQ ID NO: 189808 - RNA, 32 nt, Human
ggccaacauggugaaacuccaucucuccuaaa

SEQ ID NO: 189809 - RNA, 32 nt, Human
ggccaacauggugaaacuccgucucuacuaaa

SEQ ID NO: 189810 - RNA, 32 nt, Human
ggccaacauggugaaacuccgucucugcuaaa

SEQ ID NO: 189811 - RNA, 32 nt, Human
ggccaacauggugaaacucugucucuacuaaa

SEQ ID NO: 189812 - RNA, 29 nt, Human
ggccaacauggugaaacugcaucucuacu

SEQ ID NO: 189813 - RNA, 32 nt, Human
ggccaacauggugaaacuucaucucuacuaaa

SEQ ID NO: 189814 - RNA, 32 nt, Human
ggccaacauggugaaaucccaucuauuaaaaa

SEQ ID NO: 189815 - RNA, 32 nt, Human
ggccaacauggugaaaucccaucucuacugaa

SEQ ID NO: 189816 - RNA, 32 nt, Human
ggccaacauggugaaauccccucucuacuaaa

SEQ ID NO: 189817 - RNA, 32 nt, Human
ggccaacauggugaaaucccgucucuacuaaa

SEQ ID NO: 189818 - RNA, 32 nt, Human
ggccaacauggugaaaucccgucucuacugca

SEQ ID NO: 189819 - RNA, 32 nt, Human
ggccaacauggugaaauccugucucugcuaaa

SEQ ID NO: 189820 - RNA, 32 nt, Human
ggccaacauggugaaauccugucuguacuaaa

SEQ ID NO: 189821 - RNA, 32 nt, Human
ggccaacauggugaaaucgugucucugcuaaa

SEQ ID NO: 189822 - RNA, 32 nt, Human
ggccaacauggugaaaucucaucuguacuaaa

SEQ ID NO: 189823 - RNA, 32 nt, Human
ggccaacauggugaaaugccgucucuacuaaa

SEQ ID NO: 189824 - RNA, 32 nt, Human
ggccaacauggugaaauucugucucuacuaaa

SEQ ID NO: 189825 - RNA, 32 nt, Human
ggccaacauggugaaccccaucucuacuaaaa

SEQ ID NO: 189826 - RNA, 32 nt, Human
ggccaacauggugaacccucagcucuacuaag

SEQ ID NO: 189827 - RNA, 29 nt, Human
ggccaacauggugaagccccaucucuacu

SEQ ID NO: 189828 - RNA, 32 nt, Human
ggccaacauggugaagcccugucucuacuaaa

SEQ ID NO: 189829 - RNA, 32 nt, Human
ggccaacauggugaagcuccgucucuacuaaa

SEQ ID NO: 189830 - RNA, 32 nt, Human
ggccaacauggugaagcucugucucuacuaaa

SEQ ID NO: 189831 - RNA, 32 nt, Human
ggccaacauggugaagucccgucucuacuaaa

SEQ ID NO: 189832 - RNA, 32 nt, Human
ggccaacauggugaauccccgucucuauuaaa

SEQ ID NO: 189833 - RNA, 32 nt, Human
ggccaacauggugaauuaucucuacuaaaaau

SEQ ID NO: 189834 - RNA, 32 nt, Human
ggccaacauggugacaccccgucucuacuaaa

SEQ ID NO: 189835 - RNA, 32 nt, Human
ggccaacauggugacacccugucucuacuaag

SEQ ID NO: 189836 - RNA, 32 nt, Human
ggccaacauggugagacacccgucucuacaaa

SEQ ID NO: 189837 - RNA, 32 nt, Human
ggccaacauggugagacaccgucucuacuaaa

SEQ ID NO: 189838 - RNA, 32 nt, Human
ggccaacauggugagaccccaucucuacaaaa

SEQ ID NO: 189839 - RNA, 32 nt, Human
ggccaacauggugagaccccaucucugcuaaa

SEQ ID NO: 189840 - RNA, 32 nt, Human
ggccaacauggugagacccugucucugcuaaa

SEQ ID NO: 189841 - RNA, 32 nt, Human
ggccaacauggugagcccccgucucuacuaaa

SEQ ID NO: 189842 - RNA, 32 nt, Human
ggccaacauggugauacccgucucuacuaaaa

SEQ ID NO: 189843 - RNA, 32 nt, Human
ggccaacauggugauaucucgucucuacugaa

SEQ ID NO: 189844 - RNA, 23 nt, Human
ggccaacauggugcaaccucguc

SEQ ID NO: 189845 - RNA, 32 nt, Human
ggccaacauggugcaaccucgucuuuacuaaa

SEQ ID NO: 189846 - RNA, 32 nt, Human
ggccaacaugguggaacccaaucucuacuaaa

SEQ ID NO: 189847 - RNA, 32 nt, Human
ggccaacaugguggaacccagucucuacuaaa

SEQ ID NO: 189848 - RNA, 32 nt, Human
ggccaacaugguggaacccuaucucuacuaaa

SEQ ID NO: 189849 - RNA, 32 nt, Human
ggccaacaugguguaaccucaucucuacuaaa

SEQ ID NO: 189850 - RNA, 32 nt, Human
ggccaacaugguguaacgcugucucuacuaaa

SEQ ID NO: 189851 - RNA, 32 nt, Human
ggccaacauggugugagaccccgucucuacua

SEQ ID NO: 189852 - RNA, 32 nt, Human
ggccaacaugguuaaaccccaucucuacgaaa

SEQ ID NO: 189853 - RNA, 32 nt, Human
ggccaacaugucgaaacuucaucucuacuaaa

SEQ ID NO: 189854 - RNA, 32 nt, Human
ggccaacaugucgaagugccaucucuacuaaa

SEQ ID NO: 189855 - RNA, 32 nt, Human
ggccaacauguuguaaaccccgucucuacuaa

SEQ ID NO: 189856 - RNA, 32 nt, Human
ggccaacauuguaaaaccccaucucuacuaaa

SEQ ID NO: 189857 - RNA, 32 nt, Human
ggccaacauugugaaaccccaucucuacaaaa

SEQ ID NO: 189858 - RNA, 32 nt, Human
ggccaacauugugaaaccccaucucugccaaa

SEQ ID NO: 189859 - RNA, 32 nt, Human
ggccaacauugugaaacccugucucuacuaaa

SEQ ID NO: 189860 - RNA, 17 nt, Human
ggccaaccacagcuucc

SEQ ID NO: 189861 - RNA, 32 nt, Human
ggccaaccagaggcgagguugagagcccggcg

SEQ ID NO: 189862 - RNA, 32 nt, Human
ggccaaccaugcacuccacaaaggggagcauu

SEQ ID NO: 189863 - RNA, 23 nt, Human
ggccaacccagcaguccuucccu

SEQ ID NO: 189864 - RNA, 32 nt, Human
ggccaacccagccuggucaacauggugaaacc

SEQ ID NO: 189865 - RNA, 32 nt, Human
ggccaaccucaaggauuugggggugaacgggc

SEQ ID NO: 189866 - RNA, 32 nt, Human
ggccaaccucaaggcagugcucucugguuugc

SEQ ID NO: 189867 - RNA, 32 nt, Human
ggccaaccucccucccccuucucccaccaggc

SEQ ID NO: 189868 - RNA, 32 nt, Human
ggccaaccuggugaaaccccaucucugcuaaa

SEQ ID NO: 189869 - RNA, 32 nt, Human
ggccaaccuggugaaaccccgucucuauuaaa

SEQ ID NO: 189870 - RNA, 32 nt, Human
ggccaaccuggugaaacccugucucuacuaaa

SEQ ID NO: 189871 - RNA, 32 nt, Human
ggccaacgcuccucucaauccugggcuggugg

SEQ ID NO: 189872 - RNA, 32 nt, Human
ggccaacggggugaaacccugucucuacuaaa

SEQ ID NO: 189873 - RNA, 32 nt, Human
ggccaacguagugaaaccccgucucuacaaaa

SEQ ID NO: 189874 - RNA, 32 nt, Human
ggccaacgugaugaaaccccaucuguacugaa

SEQ ID NO: 189875 - RNA, 32 nt, Human
ggccaacgugaugaaacuccaucucuacaaaa

SEQ ID NO: 189876 - RNA, 32 nt, Human
ggccaacguggcaaaaccccaucucuacuaaa

SEQ ID NO: 189877 - RNA, 32 nt, Human
ggccaacguggcaaaacuccaucucuauuaaa

SEQ ID NO: 189878 - RNA, 32 nt, Human
ggccaacguggcaaauacccaucucuacuaaa

SEQ ID NO: 189879 - RNA, 32 nt, Human
ggccaacguggggaaaccccaucucuacgaaa

SEQ ID NO: 189880 - RNA, 32 nt, Human
ggccaacguggugaaacaccgucucuacuaaa

SEQ ID NO: 189881 - RNA, 32 nt, Human
ggccaacguggugaaacacugucucuacuaaa

SEQ ID NO: 189882 - RNA, 32 nt, Human
ggccaacguggugaaaccccaucucuacuaaa

SEQ ID NO: 189883 - RNA, 32 nt, Human
ggccaacguggugaaaccccaucuucacuaaa

SEQ ID NO: 189884 - RNA, 32 nt, Human
ggccaacguggugaaacccccucucuacuaaa

SEQ ID NO: 189885 - RNA, 32 nt, Human
ggccaacguggugaaaccccgucacuacuaaa

SEQ ID NO: 189886 - RNA, 32 nt, Human
ggccaacguggugaaaccccgucuccaguaaa

SEQ ID NO: 189887 - RNA, 32 nt, Human
ggccaacguggugaaaccccgucucuacuaaa

SEQ ID NO: 189888 - RNA, 32 nt, Human
ggccaacguggugaaaccccgucucuacugaa

SEQ ID NO: 189889 - RNA, 32 nt, Human
ggccaacguggugaaaccccguguacuaaaau

SEQ ID NO: 189890 - RNA, 32 nt, Human
ggccaacguggugaaacccuaucucuacuaaa

SEQ ID NO: 189891 - RNA, 32 nt, Human
ggccaacguggugaaacccugucucuacuaaa

SEQ ID NO: 189892 - RNA, 32 nt, Human
ggccaacguggugaaacccugucucuacuuaa

SEQ ID NO: 189893 - RNA, 32 nt, Human
ggccaacguggugaaaccucgucuguacuaaa

SEQ ID NO: 189894 - RNA, 32 nt, Human
ggccaacguggugaaacgcugucucuacuaaa

SEQ ID NO: 189895 - RNA, 32 nt, Human
ggccaacguggugaaagccuguaucuauuaaa

SEQ ID NO: 189896 - RNA, 21 nt, Human
ggccaacuccuggcucaggga

SEQ ID NO: 189897 - RNA, 32 nt, Human
ggccaacugcacucuggaggcggcggcagcca

SEQ ID NO: 189898 - RNA, 32 nt, Human
ggccaacugcauauuauuuucuauggcagugg

SEQ ID NO: 189899 - RNA, 32 nt, Human
ggccaacugcuugugggggcaccugggagguc

SEQ ID NO: 189900 - RNA, 32 nt, Human
ggccaacuucaauacauauccugcugaccuug

SEQ ID NO: 189901 - RNA, 32 nt, Human
ggccaacuugaugaaaccccaucucuacccgu

SEQ ID NO: 189902 - RNA, 32 nt, Human
ggccaacuuggagaaaccccagcucuacaaaa

SEQ ID NO: 189903 - RNA, 32 nt, Human
ggccaacuuggcaaaaccccaucucuacuaaa

SEQ ID NO: 189904 - RNA, 32 nt, Human
ggccaacuuggugaaaccccaucucuacaaaa

SEQ ID NO: 189905 - RNA, 32 nt, Human
ggccaacuuggugaaaccccgucuuuacuaaa

SEQ ID NO: 189906 - RNA, 32 nt, Human
ggccaacuuggugaaacccugucucuacuaaa

SEQ ID NO: 189907 - RNA, 32 nt, Human
ggccaacuuggugaaaccuugucucuacuaga

SEQ ID NO: 189908 - RNA, 32 nt, Human
ggccaagaagcauaugaaaauauguucaaucu

SEQ ID NO: 189909 - RNA, 32 nt, Human
ggccaagaaggcaguguggcuggagaaggagg

SEQ ID NO: 189910 - RNA, 32 nt, Human
ggccaagaaggugaguuuauguaaagauaugg

SEQ ID NO: 189911 - RNA, 21 nt, Human
ggccaagacccucccauugca

SEQ ID NO: 189912 - RNA, 32 nt, Human
ggccaagaccucccacuccgcccucugaggau

SEQ ID NO: 189913 - RNA, 32 nt, Human
ggccaagacgggcggaucaugaggucaagaga

SEQ ID NO: 189914 - RNA, 32 nt, Human
ggccaagacucaccuccccuucccagggccua

SEQ ID NO: 189915 - RNA, 32 nt, Human
ggccaagagaagcuggagcagagagcuggcau

SEQ ID NO: 189916 - RNA, 32 nt, Human
ggccaagagacaccaugcggagccuagucugu

SEQ ID NO: 189917 - RNA, 32 nt, Human
ggccaagagcauacuccagggaccaggauaca

SEQ ID NO: 189918 - RNA, 32 nt, Human
ggccaagagccccucaagaccauccuggaugc

SEQ ID NO: 189919 - RNA, 32 nt, Human
ggccaagaggagccuguccugcccuacacguu

SEQ ID NO: 189920 - RNA, 32 nt, Human
ggccaagagguuaaggcuacagugagcuauga

SEQ ID NO: 189921 - RNA, 32 nt, Human
ggccaagaguuggagagcagacugggcaacau

SEQ ID NO: 189922 - RNA, 32 nt, Human
ggccaagaugaugaagccccaucuguacuaaa

SEQ ID NO: 189923 - RNA, 32 nt, Human
ggccaagauggcggugcagguggugcaggcgg

SEQ ID NO: 189924 - RNA, 26 nt, Human
ggccaagaugggcggaucaccugagg

SEQ ID NO: 189925 - RNA, 32 nt, Human
ggccaagauggugaaaccccaucucuacuaaa

SEQ ID NO: 189926 - RNA, 32 nt, Human
ggccaagauggugaaaccccaucucugcaaaa

SEQ ID NO: 189927 - RNA, 32 nt, Human
ggccaagauggugaaaccccgucucuacuaaa

SEQ ID NO: 189928 - RNA, 32 nt, Human
ggccaagauggugaaaccccgucucuacugaa

SEQ ID NO: 189929 - RNA, 32 nt, Human
ggccaagauggugaaacccugucucuacuaaa

SEQ ID NO: 189930 - RNA, 32 nt, Human
ggccaagauggugaaacccuguuucuacuaaa

SEQ ID NO: 189931 - RNA, 32 nt, Human
ggccaagauggugaaaucccaucucuacaaaa

SEQ ID NO: 189932 - RNA, 32 nt, Human
ggccaagauggugaaaucccgucucuacuaaa

SEQ ID NO: 189933 - RNA, 32 nt, Human
ggccaagauggugaaauccugucucuaauaaa

SEQ ID NO: 189934 - RNA, 32 nt, Human
ggccaagaugguggaacccugccucuacuaaa

SEQ ID NO: 189935 - RNA, 32 nt, Human
ggccaagauuauuccuuuggcacagcaguaag

SEQ ID NO: 189936 - RNA, 32 nt, Human
ggccaagauuguaccacuguauuccagcccgg

SEQ ID NO: 189937 - RNA, 32 nt, Human
ggccaagcaaaaagaaagccccgcuauuagac

SEQ ID NO: 189938 - RNA, 19 nt, Human
ggccaagcaacacaaugca

SEQ ID NO: 189939 - RNA, 32 nt, Human
ggccaagcacacacaggcugcgcccaguuccg

SEQ ID NO: 189940 - RNA, 32 nt, Human
ggccaagcagaggcuccccucaugaaggaagc

SEQ ID NO: 189941 - RNA, 32 nt, Human
ggccaagcagccgccaccacgcugucggucgc

SEQ ID NO: 189942 - RNA, 32 nt, Human
ggccaagccagccugggccacccuggucccag

SEQ ID NO: 189943 - RNA, 16 nt, Human
ggccaagcccaugcca

SEQ ID NO: 189944 - RNA, 18 nt, Human
ggccaagcccccacccca

SEQ ID NO: 189945 - RNA, 32 nt, Human
ggccaagccccuggcuucuuacugcggcuuca

SEQ ID NO: 189946 - RNA, 32 nt, Human
ggccaagcccgcagcagaguccugggcaaaga

SEQ ID NO: 189947 - RNA, 32 nt, Human
ggccaagccuccucaacuaugaccucaaccgg

SEQ ID NO: 189948 - RNA, 32 nt, Human
ggccaagccugugacucaacuccaggggcaag

SEQ ID NO: 189949 - RNA, 32 nt, Human
ggccaagcucagaagcggggagaagagcgaga

SEQ ID NO: 189950 - RNA, 32 nt, Human
ggccaagcugacgucccuccauuuucucaacu

SEQ ID NO: 189951 - RNA, 15 nt, Human
ggccaagcugccccu

SEQ ID NO: 189952 - RNA, 32 nt, Human
ggccaagcugcucaaguaccuccgccggccug

SEQ ID NO: 189953 - RNA, 17 nt, Human
ggccaagcugggucuag

SEQ ID NO: 189954 - RNA, 32 nt, Human
ggccaaggaacauugggaccagaagaggcgag

SEQ ID NO: 189955 - RNA, 32 nt, Human
ggccaaggaagugaugucagugugacagaagg

SEQ ID NO: 189956 - RNA, 24 nt, Human
ggccaaggaguagcauggaggagg

SEQ ID NO: 189957 - RNA, 32 nt, Human
ggccaaggagugagauagccagcgcugauggu

SEQ ID NO: 189958 - RNA, 32 nt, Human
ggccaaggaucacgaggucaggagaucgagac

SEQ ID NO: 189959 - RNA, 31 nt, Human
ggccaaggcaaaggggaagcauucacagacc

SEQ ID NO: 189960 - RNA, 26 nt, Human
ggccaaggcacccauucuucuugcua

SEQ ID NO: 189961 - RNA, 19 nt, Human
ggccaaggcaggacauggc

SEQ ID NO: 189962 - RNA, 32 nt, Human
ggccaaggcaggcagaccacgaggucaggagu

SEQ ID NO: 189963 - RNA, 32 nt, Human
ggccaaggcaggcagauaacaaagucaggaga

SEQ ID NO: 189964 - RNA, 32 nt, Human
ggccaaggcaggcagaucacgaggucaggaga

SEQ ID NO: 189965 - RNA, 32 nt, Human
ggccaaggcaggcagaucacgaggucaggagu

SEQ ID NO: 189966 - RNA, 32 nt, Human
ggccaaggcaggcagaucacgagguuaggagu

SEQ ID NO: 189967 - RNA, 26 nt, Human
ggccaaggcaggcagaucacuugagg

SEQ ID NO: 189968 - RNA, 32 nt, Human
ggccaaggcaggcagaucacuugaggucgggc

SEQ ID NO: 189969 - RNA, 32 nt, Human
ggccaaggcaggcagcaguggggcugugacag

SEQ ID NO: 189970 - RNA, 26 nt, Human
ggccaaggcaggcggaucacuugagg

SEQ ID NO: 189971 - RNA, 32 nt, Human
ggccaaggcccuuugcacugcaucacccuggu

SEQ ID NO: 189972 - RNA, 21 nt, Human
ggccaaggccugaaggccccg

SEQ ID NO: 189973 - RNA, 32 nt, Human
ggccaaggccugguuggguccuuggggcgggc

SEQ ID NO: 189974 - RNA, 32 nt, Human
ggccaaggcgagcggaucaugaggucagaaga

SEQ ID NO: 189975 - RNA, 26 nt, Human
ggccaaggcggacggaucacuugagg

SEQ ID NO: 189976 - RNA, 26 nt, Human
ggccaaggcgggcaaaucaccugagg

SEQ ID NO: 189977 - RNA, 32 nt, Human
ggccaaggcgggcagaccaugaggucaggaga

SEQ ID NO: 189978 - RNA, 26 nt, Human
ggccaaggcgggcagaucacuugagg

SEQ ID NO: 189979 - RNA, 32 nt, Human
ggccaaggcgggcggaucaugaggucaggaga

SEQ ID NO: 189980 - RNA, 26 nt, Human
ggccaaggcggguggaucacuugagg

SEQ ID NO: 189981 - RNA, 32 nt, Human
ggccaaggcugcagacaagggacgcagacaau

SEQ ID NO: 189982 - RNA, 32 nt, Human
ggccaaggcugccugcacugagugucccaggc

SEQ ID NO: 189983 - RNA, 32 nt, Human
ggccaagggacaagagaucacauggagcacaa

SEQ ID NO: 189984 - RNA, 32 nt, Human
ggccaagggcgaggaggagggcugggaguaug

SEQ ID NO: 189985 - RNA, 24 nt, Human
ggccaagggcgaugggccccugag

SEQ ID NO: 189986 - RNA, 21 nt, Human
ggccaagggcggccccuggga

SEQ ID NO: 189987 - RNA, 22 nt, Human
ggccaaggggaugggcagaggu

SEQ ID NO: 189988 - RNA, 32 nt, Human
ggccaagggugagguggccaaaaccagaacca

SEQ ID NO: 189989 - RNA, 32 nt, Human
ggccaagguauucaggccaggagaccucgucc

SEQ ID NO: 189990 - RNA, 32 nt, Human
ggccaagguccccacuuucuugcugacuguaa

SEQ ID NO: 189991 - RNA, 32 nt, Human
ggccaaggugaacugugcauccugagaccuug

SEQ ID NO: 189992 - RNA, 26 nt, Human
ggccaaggugaguggaucaccugagg

SEQ ID NO: 189993 - RNA, 32 nt, Human
ggccaaggugcugccagcaauccuuuccauac

SEQ ID NO: 189994 - RNA, 25 nt, Human
ggccaagguggacagaucacuugag

SEQ ID NO: 189995 - RNA, 26 nt, Human
ggccaagguggauagaucacuugagg

SEQ ID NO: 189996 - RNA, 26 nt, Human
ggccaaggugggcagaucaccugagg

SEQ ID NO: 189997 - RNA, 24 nt, Human
ggccaaggugggcagaucacuuga

SEQ ID NO: 189998 - RNA, 25 nt, Human
ggccaaggugggcagaucacuugag

SEQ ID NO: 189999 - RNA, 32 nt, Human
ggccaaggugggcagaucaugaggucaggaga

SEQ ID NO: 190000 - RNA, 32 nt, Human
ggccaaggugggcagaucaugaggucaggagu

SEQ ID NO: 190001 - RNA, 32 nt, Human
ggccaaggugggcggaucaugaggucaggaga

SEQ ID NO: 190002 - RNA, 26 nt, Human
ggccaagguggguaaaucacuugagg

SEQ ID NO: 190003 - RNA, 26 nt, Human
ggccaagguggguggaucaccugagg

SEQ ID NO: 190004 - RNA, 32 nt, Human
ggccaaggugguccggaagcugcaggggaagc

SEQ ID NO: 190005 - RNA, 32 nt, Human
ggccaaguaaagcccuuccgggucgcucuccu

SEQ ID NO: 190006 - RNA, 32 nt, Human
ggccaagucugagcuaaaauguuaacacuccu

SEQ ID NO: 190007 - RNA, 21 nt, Human
ggccaagugagagagcccagg

SEQ ID NO: 190008 - RNA, 32 nt, Human
ggccaaguucauccccagccaggccaagccaa

SEQ ID NO: 190009 - RNA, 32 nt, Human
ggccaaguucuccgugcgccccugcacccuuc

SEQ ID NO: 190010 - RNA, 32 nt, Human
ggccaauaaauggacugggagcguuuuagcug

SEQ ID NO: 190011 - RNA, 32 nt, Human
ggccaauaaggugaaacccugucucuacuaaa

SEQ ID NO: 190012 - RNA, 32 nt, Human
ggccaauaaggugaaacuccaucucuacuaaa

SEQ ID NO: 190013 - RNA, 32 nt, Human
ggccaauacauaccuucuguaacuccucccua

SEQ ID NO: 190014 - RNA, 32 nt, Human
ggccaauagaagagacaggagacaggaagccu

SEQ ID NO: 190015 - RNA, 30 nt, Human
ggccaauagggugaaacuccgucucuacug

SEQ ID NO: 190016 - RNA, 32 nt, Human
ggccaauauagugggacccccaucucuacaaa

SEQ ID NO: 190017 - RNA, 32 nt, Human
ggccaauaugaugaaaccccaucucuacuaaa

SEQ ID NO: 190018 - RNA, 32 nt, Human
ggccaauaugcugaaacccugucucuacuaaa

SEQ ID NO: 190019 - RNA, 32 nt, Human
ggccaauauggcaaaaccccaucucuacuaaa

SEQ ID NO: 190020 - RNA, 32 nt, Human
ggccaauauggcgaaaccccaucucuacuaaa

SEQ ID NO: 190021 - RNA, 32 nt, Human
ggccaauauggugaaaccacgucucuauuaaa

SEQ ID NO: 190022 - RNA, 32 nt, Human
ggccaauauggugaaacccagcucuacuuaag

SEQ ID NO: 190023 - RNA, 32 nt, Human
ggccaauauggugaaacccagucucuacuaaa

SEQ ID NO: 190024 - RNA, 32 nt, Human
ggccaauauggugaaaccccaucucuacaaaa

SEQ ID NO: 190025 - RNA, 32 nt, Human
ggccaauauggugaaaccccaucucuacuaaa

SEQ ID NO: 190026 - RNA, 32 nt, Human
ggccaauauggugaaaccccaucucuacuaag

SEQ ID NO: 190027 - RNA, 32 nt, Human
ggccaauauggugaaaccccaugucuacuaaa

SEQ ID NO: 190028 - RNA, 32 nt, Human
ggccaauauggugaaaccccgacucuacuaaa

SEQ ID NO: 190029 - RNA, 32 nt, Human
ggccaauauggugaaaccccgucucuacuaaa

SEQ ID NO: 190030 - RNA, 32 nt, Human
ggccaauauggugaaacccgucucuauuaaaa

SEQ ID NO: 190031 - RNA, 32 nt, Human
ggccaauauggugaaacccugucucuacuaaa

SEQ ID NO: 190032 - RNA, 32 nt, Human
ggccaauauggugaaacccugucuguacuaaa

SEQ ID NO: 190033 - RNA, 32 nt, Human
ggccaauauggugaaaccucgucucuaccaaa

SEQ ID NO: 190034 - RNA, 32 nt, Human
ggccaauauggugaaacuucgucucuacuaaa

SEQ ID NO: 190035 - RNA, 32 nt, Human
ggccaauauggugagaccccaucucuacuaaa

SEQ ID NO: 190036 - RNA, 20 nt, Human
ggccaaucaccuugggccca

SEQ ID NO: 190037 - RNA, 32 nt, Human
ggccaauccaggugggagagacacucccaggg

SEQ ID NO: 190038 - RNA, 22 nt, Human
ggccaaucccaggcuugccccc

SEQ ID NO: 190039 - RNA, 32 nt, Human
ggccaaucccaguucccaggcugcaguugagg

SEQ ID NO: 190040 - RNA, 23 nt, Human
ggccaaucccucccuccccuccc

SEQ ID NO: 190041 - RNA, 32 nt, Human
ggccaaucgguguggcuucagcuucugaggau

SEQ ID NO: 190042 - RNA, 32 nt, Human
ggccaaugacaccuaccucacugggucaccau

SEQ ID NO: 190043 - RNA, 21 nt, Human
ggccaaugauucuuuuacuua

SEQ ID NO: 190044 - RNA, 17 nt, Human
ggccaaugccaccaggg

SEQ ID NO: 190045 - RNA, 32 nt, Human
ggccaaugccacuucacucagcacuuuaagag

SEQ ID NO: 190046 - RNA, 32 nt, Human
ggccaauggaaaggagacugaggggagucccg

SEQ ID NO: 190047 - RNA, 32 nt, Human
ggccaauggagacagaggcuuagugcagagca

SEQ ID NO: 190048 - RNA, 22 nt, Human
ggccaauggggagccccaggug

SEQ ID NO: 190049 - RNA, 32 nt, Human
ggccaauguagugaaaccccgucucuacuaaa

SEQ ID NO: 190050 - RNA, 32 nt, Human
ggccaaugugaugaaaccccgucucuacuaaa

SEQ ID NO: 190051 - RNA, 32 nt, Human
ggccaauguggguggaucaugaggucaggagu

SEQ ID NO: 190052 - RNA, 32 nt, Human
ggccaaugugguaaaaccucaucucuacuaaa

SEQ ID NO: 190053 - RNA, 32 nt, Human
ggccaauguggugaaaccccaccucuacuaaa

SEQ ID NO: 190054 - RNA, 32 nt, Human
ggccaauguggugaaaccccaucucuacuaaa

SEQ ID NO: 190055 - RNA, 32 nt, Human
ggccaauguggugaaaccccaucucuacuaag

SEQ ID NO: 190056 - RNA, 32 nt, Human
ggccaauguggugaaacccugucucuacuaaa

SEQ ID NO: 190057 - RNA, 32 nt, Human
ggccaauguggugaaacuccaucucuucuaaa

SEQ ID NO: 190058 - RNA, 32 nt, Human
ggccaauucucccaggaguccuggccacuuug

SEQ ID NO: 190059 - RNA, 32 nt, Human
ggccaauuggaggguggagagugaagagccgg

SEQ ID NO: 190060 - RNA, 32 nt, Human
ggccacaagacuuccccaacgauugugugggu

SEQ ID NO: 190061 - RNA, 16 nt, Human
ggccacaaggacagug

SEQ ID NO: 190062 - RNA, 32 nt, Human
ggccacaagggcauagugcaguucacuuacgu

SEQ ID NO: 190063 - RNA, 32 nt, Human
ggccacaagggggaggcuucaggcuagcugca

SEQ ID NO: 190064 - RNA, 32 nt, Human
ggccacaaguuuccuccacuucucagguuugg

SEQ ID NO: 190065 - RNA, 32 nt, Human
ggccacaauagccucaucaacauggcugcuug

SEQ ID NO: 190066 - RNA, 21 nt, Human
ggccacaaucaucagcuccua

SEQ ID NO: 190067 - RNA, 22 nt, Human
ggccacacacaacacgcaagca

SEQ ID NO: 190068 - RNA, 22 nt, Human
ggccacacacaacaugcaagca

SEQ ID NO: 190069 - RNA, 18 nt, Human
ggccacacacagcuucga

SEQ ID NO: 190070 - RNA, 20 nt, Human
ggccacacagcaggguccag

SEQ ID NO: 190071 - RNA, 32 nt, Human
ggccacacagccagggagaggagguggcucgu

SEQ ID NO: 190072 - RNA, 32 nt, Human
ggccacacagcccaaagauuagcuucaugucc

SEQ ID NO: 190073 - RNA, 32 nt, Human
ggccacacagcuaucuggaggcuuugcaggga

SEQ ID NO: 190074 - RNA, 19 nt, Human
ggccacacagcuggggcgg

SEQ ID NO: 190075 - RNA, 32 nt, Human
ggccacacagucaggcccaggcacugggcucc

SEQ ID NO: 190076 - RNA, 32 nt, Human
ggccacacagugggugcugggccucgccccga

SEQ ID NO: 190077 - RNA, 32 nt, Human
ggccacaccagcuguuucccaccugcugugca

SEQ ID NO: 190078 - RNA, 17 nt, Human
ggccacaccauccaggg

SEQ ID NO: 190079 - RNA, 19 nt, Human
ggccacaccccucugcugc

SEQ ID NO: 190080 - RNA, 32 nt, Human
ggccacaccucucuccccagggcccggcagug

SEQ ID NO: 190081 - RNA, 22 nt, Human
ggccacacgcaacacgcaagca

SEQ ID NO: 190082 - RNA, 21 nt, Human
ggccacacgcgguggcaugca

SEQ ID NO: 190083 - RNA, 32 nt, Human
ggccacacggaacacccccaucccauguuccc

SEQ ID NO: 190084 - RNA, 32 nt, Human
ggccacacugguugcauagccauggagcuggc

SEQ ID NO: 190085 - RNA, 25 nt, Human
ggccacacuuccacccgccaggguc

SEQ ID NO: 190086 - RNA, 18 nt, Human
ggccacacuuucagcaaa

SEQ ID NO: 190087 - RNA, 32 nt, Human
ggccacacuuuccuugccuguguuguugcuau

SEQ ID NO: 190088 - RNA, 32 nt, Human
ggccacagaaaaccagacaccccacaugucug

SEQ ID NO: 190089 - RNA, 32 nt, Human
ggccacagacuggggaggagaaucaguggccc

SEQ ID NO: 190090 - RNA, 17 nt, Human
ggccacagagcuauggg

SEQ ID NO: 190091 - RNA, 32 nt, Human
ggccacagaggacucacuugcccacaccgagg

SEQ ID NO: 190092 - RNA, 32 nt, Human
ggccacagagggcagcaucgcccgccccuucc

SEQ ID NO: 190093 - RNA, 23 nt, Human
ggccacagcaaguguggaccaga

SEQ ID NO: 190094 - RNA, 17 nt, Human
ggccacagcagcccccu

SEQ ID NO: 190095 - RNA, 23 nt, Human
ggccacagccccccacccgccag

SEQ ID NO: 190096 - RNA, 22 nt, Human
ggccacagccccucaccuugcc

SEQ ID NO: 190097 - RNA, 32 nt, Human
ggccacagcccuucuccuccaugggaggcccu

SEQ ID NO: 190098 - RNA, 23 nt, Human
ggccacagccgccaccaccacca

SEQ ID NO: 190099 - RNA, 32 nt, Human
ggccacagccuggguggaaggcagaccugaau

SEQ ID NO: 190100 - RNA, 32 nt, Human
ggccacagccugucccugucuccuagcgccca

SEQ ID NO: 190101 - RNA, 19 nt, Human
ggccacagccuugccauuu

SEQ ID NO: 190102 - RNA, 32 nt, Human
ggccacagcucagccgccuccucugccaccag

SEQ ID NO: 190103 - RNA, 32 nt, Human
ggccacagcucaggcugggcuguggugccagc

SEQ ID NO: 190104 - RNA, 26 nt, Human
ggccacagcugcugcuggagugcaau

SEQ ID NO: 190105 - RNA, 32 nt, Human
ggccacagcuggggcucugguuggcugugacc

SEQ ID NO: 190106 - RNA, 32 nt, Human
ggccacagcugguuucuauugcaucaaggcuc

SEQ ID NO: 190107 - RNA, 23 nt, Human
ggccacagcuuuggcgggcacuu

SEQ ID NO: 190108 - RNA, 32 nt, Human
ggccacaggagaggaggggacaggcucucagg

SEQ ID NO: 190109 - RNA, 32 nt, Human
ggccacaggccucagagcucagcugggcccca

SEQ ID NO: 190110 - RNA, 32 nt, Human
ggccacaggccuggaacccuggaagggaggga

SEQ ID NO: 190111 - RNA, 17 nt, Human
ggccacaggcugaggcg

SEQ ID NO: 190112 - RNA, 32 nt, Human
ggccacaggcugguuucuugggugcaaugaau

SEQ ID NO: 190113 - RNA, 19 nt, Human
ggccacagggccccugccu

SEQ ID NO: 190114 - RNA, 32 nt, Human
ggccacagggcugagugcagggacaaaggggu

SEQ ID NO: 190115 - RNA, 32 nt, Human
ggccacaguccaaucccucugccuucagauag

SEQ ID NO: 190116 - RNA, 20 nt, Human
ggccacaguccuuccugggg

SEQ ID NO: 190117 - RNA, 32 nt, Human
ggccacaguccuuccuggggcauuccaggcag

SEQ ID NO: 190118 - RNA, 32 nt, Human
ggccacagugaacuccggcguggcugaggaag

SEQ ID NO: 190119 - RNA, 19 nt, Human
ggccacagugccggccaca

SEQ ID NO: 190120 - RNA, 32 nt, Human
ggccacaguggcuucccauccuggugacuaca

SEQ ID NO: 190121 - RNA, 32 nt, Human
ggccacaguggucucucagagcucuggagaac

SEQ ID NO: 190122 - RNA, 32 nt, Human
ggccacaguuccaugaaucuuugcucccuucc

SEQ ID NO: 190123 - RNA, 32 nt, Human
ggccacaguugcugcaaaguccuggaucugcc

SEQ ID NO: 190124 - RNA, 32 nt, Human
ggccacauacaugacaaaaagacugaaccguu

SEQ ID NO: 190125 - RNA, 32 nt, Human
ggccacauccaaguaaaacucuaagaggcagg

SEQ ID NO: 190126 - RNA, 32 nt, Human
ggccacauccaccacuuucccugcucuguuac

SEQ ID NO: 190127 - RNA, 32 nt, Human
ggccacauccaccauucacuugcacuugagug

SEQ ID NO: 190128 - RNA, 32 nt, Human
ggccacauccucauggcccaucaggggcagga

SEQ ID NO: 190129 - RNA, 22 nt, Human
ggccacauccugccccacccca

SEQ ID NO: 190130 - RNA, 19 nt, Human
ggccacaugcaaaaaagca

SEQ ID NO: 190131 - RNA, 21 nt, Human
ggccacaugcaagugugagca

SEQ ID NO: 190132 - RNA, 19 nt, Human
ggccacaugcacacacagc

SEQ ID NO: 190133 - RNA, 20 nt, Human
ggccacaugcacccacucgc

SEQ ID NO: 190134 - RNA, 19 nt, Human
ggccacaugcagggaugca

SEQ ID NO: 190135 - RNA, 20 nt, Human
ggccacaugccagccaagca

SEQ ID NO: 190136 - RNA, 32 nt, Human
ggccacauggacuggggugcaaugggacagcu

SEQ ID NO: 190137 - RNA, 21 nt, Human
ggccacauggcuggccaagca

SEQ ID NO: 190138 - RNA, 32 nt, Human
ggccacaugggguucccuguuuucucucugcc

SEQ ID NO: 190139 - RNA, 32 nt, Human
ggccacauuccauugaccagagcucagccacg

SEQ ID NO: 190140 - RNA, 32 nt, Human
ggccacauugaugacuacagugcccuaagaca

SEQ ID NO: 190141 - RNA, 32 nt, Human
ggccaccaaaaccagaguggggccaggacagu

SEQ ID NO: 190142 - RNA, 32 nt, Human
ggccaccaaauggcugcucuuucccaggccgg

SEQ ID NO: 190143 - RNA, 32 nt, Human
ggccaccaacacagaggcccugcagagcggca

SEQ ID NO: 190144 - RNA, 32 nt, Human
ggccaccaacacagaggcccugcagaguggcu

SEQ ID NO: 190145 - RNA, 20 nt, Human
ggccaccaagaacaaaugca

SEQ ID NO: 190146 - RNA, 32 nt, Human
ggccaccaagcccucugcaagugugacugcca

SEQ ID NO: 190147 - RNA, 32 nt, Human
ggccaccaaggaagaagagagaggagaagagg

SEQ ID NO: 190148 - RNA, 32 nt, Human
ggccaccacacgagcaauucacaaagcugcag

SEQ ID NO: 190149 - RNA, 20 nt, Human
ggccaccacagccagacuga

SEQ ID NO: 190150 - RNA, 22 nt, Human
ggccaccacagcccucgcccca

SEQ ID NO: 190151 - RNA, 32 nt, Human
ggccaccacuacgccuucacuugucacccaag

SEQ ID NO: 190152 - RNA, 32 nt, Human
ggccaccagacuugcauuucagccucugucau

SEQ ID NO: 190153 - RNA, 32 nt, Human
ggccaccagagacugcagcccacaacccuugg

SEQ ID NO: 190154 - RNA, 32 nt, Human
ggccaccagcacugcugccacuucuuccagcc

SEQ ID NO: 190155 - RNA, 32 nt, Human
ggccaccagcuccgugacccaggcuggaaugc

SEQ ID NO: 190156 - RNA, 32 nt, Human
ggccaccagcucuggcucgucuugccccagug

SEQ ID NO: 190157 - RNA, 32 nt, Human
ggccaccaggaguucaagaccagcccgggcaa

SEQ ID NO: 190158 - RNA, 32 nt, Human
ggccaccaggcugaggacucgcccaggacaug

SEQ ID NO: 190159 - RNA, 23 nt, Human
ggccaccagggggcgccagagaa

SEQ ID NO: 190160 - RNA, 32 nt, Human
ggccaccauccuggguauccagggccccuccu

SEQ ID NO: 190161 - RNA, 32 nt, Human
ggccaccauggugagaccccgucucuacuaaa

SEQ ID NO: 190162 - RNA, 32 nt, Human
ggccaccauggugugaggagaccaucaccucg

SEQ ID NO: 190163 - RNA, 32 nt, Human
ggccacccaaagugcuaggauuacagguauga

SEQ ID NO: 190164 - RNA, 32 nt, Human
ggccacccaaagugcugggauuacaggcguga

SEQ ID NO: 190165 - RNA, 32 nt, Human
ggccacccaaaguguugggauuauaggcauga

SEQ ID NO: 190166 - RNA, 19 nt, Human
ggccacccaccuccaaguc

SEQ ID NO: 190167 - RNA, 32 nt, Human
ggccacccacgagggccucccggccuagggcc

SEQ ID NO: 190168 - RNA, 19 nt, Human
ggccacccacucagcccag

SEQ ID NO: 190169 - RNA, 23 nt, Human
ggccacccagauccccuaggguc

SEQ ID NO: 190170 - RNA, 18 nt, Human
ggccacccagcuaaucag

SEQ ID NO: 190171 - RNA, 18 nt, Human
ggccacccagcugaccgg

SEQ ID NO: 190172 - RNA, 17 nt, Human
ggccacccaggaccagg

SEQ ID NO: 190173 - RNA, 32 nt, Human
ggccacccaggcagcagccacagcggggagug

SEQ ID NO: 190174 - RNA, 18 nt, Human
ggccacccaggccccagg

SEQ ID NO: 190175 - RNA, 21 nt, Human
ggccacccagggacaaagggu

SEQ ID NO: 190176 - RNA, 32 nt, Human
ggccacccaguacucccuccagccucagcugg

SEQ ID NO: 190177 - RNA, 20 nt, Human
ggccaccccaccgcacaggg

SEQ ID NO: 190178 - RNA, 32 nt, Human
ggccaccccacucuaccuccuuagcuuucccu

SEQ ID NO: 190179 - RNA, 32 nt, Human
ggccaccccagggccauuaacaaccaguacuc

SEQ ID NO: 190180 - RNA, 22 nt, Human
ggccaccccauguccagcacuu

SEQ ID NO: 190181 - RNA, 23 nt, Human
ggccacccccagcucuggauccc

SEQ ID NO: 190182 - RNA, 32 nt, Human
ggccacccccagggagggugaugcuuccaagc

SEQ ID NO: 190183 - RNA, 21 nt, Human
ggccaccccccacagccucca

SEQ ID NO: 190184 - RNA, 18 nt, Human
ggccaccccgagcccagg

SEQ ID NO: 190185 - RNA, 19 nt, Human
ggccaccccgaguccgccu

SEQ ID NO: 190186 - RNA, 19 nt, Human
ggccaccccucccacccca

SEQ ID NO: 190187 - RNA, 22 nt, Human
ggccacccgcgaguccagcguc

SEQ ID NO: 190188 - RNA, 32 nt, Human
ggccacccucaggaaaugcacucggcaucugc

SEQ ID NO: 190189 - RNA, 16 nt, Human
ggccacccugcccagg

SEQ ID NO: 190190 - RNA, 32 nt, Human
ggccacccugcuccccaccuuguccagccuga

SEQ ID NO: 190191 - RNA, 20 nt, Human
ggccacccuugcccaguguc

SEQ ID NO: 190192 - RNA, 32 nt, Human
ggccaccgagaggcuggggcuggggcugacca

SEQ ID NO: 190193 - RNA, 32 nt, Human
ggccaccgaucuguaucuguugaaugccucuu

SEQ ID NO: 190194 - RNA, 32 nt, Human
ggccaccgcagagcccaggaggcagcaucucc

SEQ ID NO: 190195 - RNA, 32 nt, Human
ggccaccgcgccuggccgaggcugcuggaauc

SEQ ID NO: 190196 - RNA, 23 nt, Human
ggccaccgcugccucagccucug

SEQ ID NO: 190197 - RNA, 32 nt, Human
ggccaccgcugccucagccucugccucccagc

SEQ ID NO: 190198 - RNA, 22 nt, Human
ggccaccgggcgccggagccag

SEQ ID NO: 190199 - RNA, 18 nt, Human
ggccaccguuggccccag

SEQ ID NO: 190200 - RNA, 32 nt, Human
ggccaccuaagcucugucuucucccucugccc

SEQ ID NO: 190201 - RNA, 32 nt, Human
ggccaccucaguccugccuggguccuggugcc

SEQ ID NO: 190202 - RNA, 17 nt, Human
ggccaccucauccaggg

SEQ ID NO: 190203 - RNA, 19 nt, Human
ggccaccucauccguaagg

SEQ ID NO: 190204 - RNA, 25 nt, Human
ggccaccucauugggauccacuuca

SEQ ID NO: 190205 - RNA, 18 nt, Human
ggccaccuccaggaacag

SEQ ID NO: 190206 - RNA, 32 nt, Human
ggccaccuccaggcuggcuucagucucccauc

SEQ ID NO: 190207 - RNA, 22 nt, Human
ggccaccucccacagcccucca

SEQ ID NO: 190208 - RNA, 32 nt, Human
ggccaccuccccucaucuuccccgcccugucc

SEQ ID NO: 190209 - RNA, 32 nt, Human
ggccaccucuaacuccuccuccuccucucuuc

SEQ ID NO: 190210 - RNA, 20 nt, Human
ggccaccucuccaagggcuu

SEQ ID NO: 190211 - RNA, 28 nt, Human
ggccaccugaaugcugccuuaucacaag

SEQ ID NO: 190212 - RNA, 32 nt, Human
ggccaccugaggcacauccucucugaaacggc

SEQ ID NO: 190213 - RNA, 32 nt, Human
ggccaccugagugcaggugacaaggaccugac

SEQ ID NO: 190214 - RNA, 32 nt, Human
ggccaccugccucauugccugcccugccagag

SEQ ID NO: 190215 - RNA, 32 nt, Human
ggccaccugccuggcuccugccccaagugccu

SEQ ID NO: 190216 - RNA, 32 nt, Human
ggccaccugcuguucccugggauucauguccu

SEQ ID NO: 190217 - RNA, 32 nt, Human
ggccaccuggaauuuucagucaucucaugaua

SEQ ID NO: 190218 - RNA, 32 nt, Human
ggccaccuucagaagguggaugugguggccga

SEQ ID NO: 190219 - RNA, 22 nt, Human
ggccaccuucuccaacaagcuc

SEQ ID NO: 190220 - RNA, 32 nt, Human
ggccaccuucucccuuuccuggaccccagagu

SEQ ID NO: 190221 - RNA, 24 nt, Human
ggccaccuucuccuuggcaggcuc

SEQ ID NO: 190222 - RNA, 32 nt, Human
ggccaccuugcaggacgcugugguguggaggc

SEQ ID NO: 190223 - RNA, 20 nt, Human
ggccaccuuggcacaaaagc

SEQ ID NO: 190224 - RNA, 21 nt, Human
ggccaccuuucccagccugcc

SEQ ID NO: 190225 - RNA, 32 nt, Human
ggccaccuuuccccagugucugaggcccaggu

SEQ ID NO: 190226 - RNA, 32 nt, Human
ggccaccuuuucucagcuucugaggcugcgau

SEQ ID NO: 190227 - RNA, 32 nt, Human
ggccacgaaucugccugccucccaggcagcug

SEQ ID NO: 190228 - RNA, 32 nt, Human
ggccacgaaucugccugccucccaggcaggug

SEQ ID NO: 190229 - RNA, 32 nt, Human
ggccacgacagggcucugagaggcucaucccu

SEQ ID NO: 190230 - RNA, 32 nt, Human
ggccacgacccuccugaucacucugaggacaa

SEQ ID NO: 190231 - RNA, 32 nt, Human
ggccacgauguaggcuccacuuugccaacuuc

SEQ ID NO: 190232 - RNA, 23 nt, Human
ggccacgcaccccuaccuugcca

SEQ ID NO: 190233 - RNA, 19 nt, Human
ggccacgcagagccgggag

SEQ ID NO: 190234 - RNA, 32 nt, Human
ggccacgcagccgccugcccgggagaacccug

SEQ ID NO: 190235 - RNA, 32 nt, Human
ggccacgcccaacuaauuuuuguauuuuuagu

SEQ ID NO: 190236 - RNA, 21 nt, Human
ggccacgcccaucgccuccag

SEQ ID NO: 190237 - RNA, 18 nt, Human
ggccacgccccgcucccg

SEQ ID NO: 190238 - RNA, 20 nt, Human
ggccacgcccucccucuccc

SEQ ID NO: 190239 - RNA, 27 nt, Human
ggccacgcgaguccggcagcccugugg

SEQ ID NO: 190240 - RNA, 32 nt, Human
ggccacgcugagacggacaggcagcaggggag

SEQ ID NO: 190241 - RNA, 32 nt, Human
ggccacggaaggcauucagugaaggcuuguuu

SEQ ID NO: 190242 - RNA, 32 nt, Human
ggccacggaguucuucagcugcuugaugacca

SEQ ID NO: 190243 - RNA, 32 nt, Human
ggccacggcacuccagccugggugacagagug

SEQ ID NO: 190244 - RNA, 21 nt, Human
ggccacggcaggccaccagcc

SEQ ID NO: 190245 - RNA, 32 nt, Human
ggccacggccuaugcccucccugggccccugu

SEQ ID NO: 190246 - RNA, 32 nt, Human
ggccacggccuccuggcuguguuccugagccc

SEQ ID NO: 190247 - RNA, 32 nt, Human
ggccacggcggcuccagcagggucugguuaag

SEQ ID NO: 190248 - RNA, 32 nt, Human
ggccacggcucugccaugcagcuccugcuggc

SEQ ID NO: 190249 - RNA, 32 nt, Human
ggccacgggacaccucaggugccacccaccuu

SEQ ID NO: 190250 - RNA, 32 nt, Human
ggccacgggaggcggggcugcauggcuggggg

SEQ ID NO: 190251 - RNA, 20 nt, Human
ggccacggguccagcccagc

SEQ ID NO: 190252 - RNA, 32 nt, Human
ggccacggugccagagguucagggagaacagc

SEQ ID NO: 190253 - RNA, 32 nt, Human
ggccacgguggcgccucacuccggggccugcg

SEQ ID NO: 190254 - RNA, 32 nt, Human
ggccacgucacaaccucugaucucagaccgug

SEQ ID NO: 190255 - RNA, 32 nt, Human
ggccacgucauugugcuccugcccugcaggcu

SEQ ID NO: 190256 - RNA, 32 nt, Human
ggccacgugaggacacagugagaagguggccg

SEQ ID NO: 190257 - RNA, 32 nt, Human
ggccacguggagguggugaagcugcugguggg

SEQ ID NO: 190258 - RNA, 32 nt, Human
ggccacguggcaggccacagugcccuaugggc

SEQ ID NO: 190259 - RNA, 32 nt, Human
ggccacgugucacccacgucugcgcuugguca

SEQ ID NO: 190260 - RNA, 32 nt, Human
ggccacgugucccagcccagcguccaguggug

SEQ ID NO: 190261 - RNA, 32 nt, Human
ggccacguugugcggagcuccccugcugguug

SEQ ID NO: 190262 - RNA, 32 nt, Human
ggccacuacacuccagccugggugacagagag

SEQ ID NO: 190263 - RNA, 32 nt, Human
ggccacuauaggaacaaaacaaaaagaaugga

SEQ ID NO: 190264 - RNA, 32 nt, Human
ggccacucaccacucacaccuuccuuggcuuu

SEQ ID NO: 190265 - RNA, 32 nt, Human
ggccacucaggucaucaggugaacuugugacg

SEQ ID NO: 190266 - RNA, 20 nt, Human
ggccacucccucccacccca

SEQ ID NO: 190267 - RNA, 32 nt, Human
ggccacucccugcccccagccuggcuggacag

SEQ ID NO: 190268 - RNA, 32 nt, Human
ggccacucccugcccccagccuggcuugagaa

SEQ ID NO: 190269 - RNA, 32 nt, Human
ggccacuccgccucuucccucccuucgucccu

SEQ ID NO: 190270 - RNA, 32 nt, Human
ggccacuccgugugcaaccgcuccuucuuccc

SEQ ID NO: 190271 - RNA, 32 nt, Human
ggccacuccuaugcagaggucuccgcuugugu

SEQ ID NO: 190272 - RNA, 21 nt, Human
ggccacuccucugcuuccucu

SEQ ID NO: 190273 - RNA, 19 nt, Human
ggccacuccugcugcugcc

SEQ ID NO: 190274 - RNA, 32 nt, Human
ggccacucgccccucccugcccgggguugcca

SEQ ID NO: 190275 - RNA, 32 nt, Human
ggccacucgucuagggcaguggagucugcgug

SEQ ID NO: 190276 - RNA, 32 nt, Human
ggccacucuccccucccucuuccuucccccau

SEQ ID NO: 190277 - RNA, 32 nt, Human
ggccacucugcugagcaucuucucccaggagu

SEQ ID NO: 190278 - RNA, 23 nt, Human
ggccacucuguuucuccacccca

SEQ ID NO: 190279 - RNA, 19 nt, Human
ggccacucuuccugcugcc

SEQ ID NO: 190280 - RNA, 32 nt, Human
ggccacucuuucuucuucacuuucuccagcug

SEQ ID NO: 190281 - RNA, 32 nt, Human
ggccacugaaccauuucaccucuuggaaaaac

SEQ ID NO: 190282 - RNA, 32 nt, Human
ggccacugaaggagggcaggagcaguccuccc

SEQ ID NO: 190283 - RNA, 22 nt, Human
ggccacugacaguccacacuua

SEQ ID NO: 190284 - RNA, 32 nt, Human
ggccacugacaucacgggcuucgggauuuugg

SEQ ID NO: 190285 - RNA, 32 nt, Human
ggccacugagccggggugcaguggcagcggga

SEQ ID NO: 190286 - RNA, 32 nt, Human
ggccacugcaaagauuccagccuggguccagg

SEQ ID NO: 190287 - RNA, 32 nt, Human
ggccacugcaagcuccaccucccagguucaca

SEQ ID NO: 190288 - RNA, 32 nt, Human
ggccacugcaauccagccugggcgauagagug

SEQ ID NO: 190289 - RNA, 32 nt, Human
ggccacugcacuccacccugggcgacagagug

SEQ ID NO: 190290 - RNA, 32 nt, Human
ggccacugcacuccagccugagugacagaaug

SEQ ID NO: 190291 - RNA, 32 nt, Human
ggccacugcacuccagccuggaugacagagug

SEQ ID NO: 190292 - RNA, 32 nt, Human
ggccacugcacuccagcuugggugacagagca

SEQ ID NO: 190293 - RNA, 32 nt, Human
ggccacugcacuccgggcugggcgacagagcg

SEQ ID NO: 190294 - RNA, 32 nt, Human
ggccacugcacucuagccuggcaacagagcaa

SEQ ID NO: 190295 - RNA, 32 nt, Human
ggccacugcacugcaaggugcauuucugucau

SEQ ID NO: 190296 - RNA, 32 nt, Human
ggccacugcacugcagccugugugacaaaggg

SEQ ID NO: 190297 - RNA, 32 nt, Human
ggccacugcaggagaugagaccagccuucugu

SEQ ID NO: 190298 - RNA, 21 nt, Human
ggccacugccauccugcugcc

SEQ ID NO: 190299 - RNA, 32 nt, Human
ggccacugcugaccuggcuggaugcaucgggc

SEQ ID NO: 190300 - RNA, 32 nt, Human
ggccacugcugguuauuuuaagccacaucaca

SEQ ID NO: 190301 - RNA, 32 nt, Human
ggccacuggcaggccuuccugaguuagauuug

SEQ ID NO: 190302 - RNA, 18 nt, Human
ggccacuggcccucugca

SEQ ID NO: 190303 - RNA, 32 nt, Human
ggccacugggcuuucccccucccaggccuccu

SEQ ID NO: 190304 - RNA, 32 nt, Human
ggccacugggcuuuccccuucccaggccuccu

SEQ ID NO: 190305 - RNA, 32 nt, Human
ggccacuggggccaccacccugaccaccacug

SEQ ID NO: 190306 - RNA, 21 nt, Human
ggccacugucuucucuuccuc

SEQ ID NO: 190307 - RNA, 32 nt, Human
ggccacugugccagaugccccugaccagcguu

SEQ ID NO: 190308 - RNA, 32 nt, Human
ggccacugugccaggcucagguggccuccugg

SEQ ID NO: 190309 - RNA, 32 nt, Human
ggccacuuagggaaagauguagaaagaugcua

SEQ ID NO: 190310 - RNA, 32 nt, Human
ggccacuuaugcuaaauacacaauaagauaca

SEQ ID NO: 190311 - RNA, 24 nt, Human
ggccacuucccucuuucugacccc

SEQ ID NO: 190312 - RNA, 25 nt, Human
ggccacuucuccagcucugacccca

SEQ ID NO: 190313 - RNA, 32 nt, Human
ggccacuugcauugcgucuuccaggcugcgug

SEQ ID NO: 190314 - RNA, 32 nt, Human
ggccacuugggaggcugagauaggagaaucgc

SEQ ID NO: 190315 - RNA, 32 nt, Human
ggccacuugugagagcugcuucagccaggacu

SEQ ID NO: 190316 - RNA, 32 nt, Human
ggccacuuuaacuccaaggccuugcucugucu

SEQ ID NO: 190317 - RNA, 22 nt, Human
ggccacuuuccucuccacccca

SEQ ID NO: 190318 - RNA, 32 nt, Human
ggccacuuuucuuuccccuuccuuccuuccuu

SEQ ID NO: 190319 - RNA, 32 nt, Human
ggccagaacagacagccugggcccugccgcag

SEQ ID NO: 190320 - RNA, 32 nt, Human
ggccagaaggagagaagacgugcagggacccc

SEQ ID NO: 190321 - RNA, 32 nt, Human
ggccagaaguaccaggugccccaugaagugcu

SEQ ID NO: 190322 - RNA, 32 nt, Human
ggccagaaguagcuuugcacuuuucuaaacua

SEQ ID NO: 190323 - RNA, 32 nt, Human
ggccagaauggaacgacuucaaagagaacuug

SEQ ID NO: 190324 - RNA, 32 nt, Human
ggccagacacauauguauaaacuuuucagcag

SEQ ID NO: 190325 - RNA, 24 nt, Human
ggccagacaccaccccccacccca

SEQ ID NO: 190326 - RNA, 32 nt, Human
ggccagacaugacuccugcuuccccuuaggaa

SEQ ID NO: 190327 - RNA, 16 nt, Human
ggccagacccggcgag

SEQ ID NO: 190328 - RNA, 32 nt, Human
ggccagacccugcugcucacucagcugcccug

SEQ ID NO: 190329 - RNA, 32 nt, Human
ggccagacccuugcuccaucagagagggcagu

SEQ ID NO: 190330 - RNA, 32 nt, Human
ggccagaccuagaguguccacagcaggccugu

SEQ ID NO: 190331 - RNA, 32 nt, Human
ggccagaccuuggcugugccuccugcucucuu

SEQ ID NO: 190332 - RNA, 32 nt, Human
ggccagacuggucucaaacuccugggcugaaa

SEQ ID NO: 190333 - RNA, 32 nt, Human
ggccagacuucuagccaggcugggcugccagu

SEQ ID NO: 190334 - RNA, 32 nt, Human
ggccagacuucucuccccugcggcucccaccu

SEQ ID NO: 190335 - RNA, 32 nt, Human
ggccagagaacagcagugaaggcagcuggaga

SEQ ID NO: 190336 - RNA, 32 nt, Human
ggccagagacacaccuggcccucagggggcug

SEQ ID NO: 190337 - RNA, 32 nt, Human
ggccagagagaggacuccacugagggagaugg

SEQ ID NO: 190338 - RNA, 16 nt, Human
ggccagagagaggcag

SEQ ID NO: 190339 - RNA, 32 nt, Human
ggccagagaggaggagaaggagggugagagga

SEQ ID NO: 190340 - RNA, 32 nt, Human
ggccagagaggcaccuucucaagcgcaggauu

SEQ ID NO: 190341 - RNA, 32 nt, Human
ggccagagagggaaaaggcaggugcuuuuggc

SEQ ID NO: 190342 - RNA, 32 nt, Human
ggccagagccuggggccuccagccugggacug

SEQ ID NO: 190343 - RNA, 32 nt, Human
ggccagagcugaggccaguccauauuacagug

SEQ ID NO: 190344 - RNA, 32 nt, Human
ggccagagcugguucugcuccugcugcaggga

SEQ ID NO: 190345 - RNA, 32 nt, Human
ggccagagcugucucagaucauggacaggcca

SEQ ID NO: 190346 - RNA, 32 nt, Human
ggccagaggagcuugucuuccuuguccucugu

SEQ ID NO: 190347 - RNA, 32 nt, Human
ggccagaggagggaggggcacagugaagaagg

SEQ ID NO: 190348 - RNA, 32 nt, Human
ggccagaggauaacacuugucucuuaaaaacu

SEQ ID NO: 190349 - RNA, 32 nt, Human
ggccagaggccuaggaaugucaccugggcaca

SEQ ID NO: 190350 - RNA, 31 nt, Human
ggccagaggcucuucuuuauccauccuaugg

SEQ ID NO: 190351 - RNA, 20 nt, Human
ggccagagggaagucugcug

SEQ ID NO: 190352 - RNA, 18 nt, Human
ggccagaggggaaccgcc

SEQ ID NO: 190353 - RNA, 32 nt, Human
ggccagaggugucagccagggugaggaccucu

SEQ ID NO: 190354 - RNA, 32 nt, Human
ggccagaguccccagccccagaucacagauac

SEQ ID NO: 190355 - RNA, 32 nt, Human
ggccagagugcuaggggcagggugaaggcuuc

SEQ ID NO: 190356 - RNA, 32 nt, Human
ggccagaguguuagacucuggaacauaagaag

SEQ ID NO: 190357 - RNA, 32 nt, Human
ggccagauaagcuaggaugagagcagagacuc

SEQ ID NO: 190358 - RNA, 32 nt, Human
ggccagaucccuuccccacggugucuuggagu

SEQ ID NO: 190359 - RNA, 32 nt, Human
ggccagaucggugagguggagcuguccuccua

SEQ ID NO: 190360 - RNA, 32 nt, Human
ggccagaucucaggccagccguuugugcuccu

SEQ ID NO: 190361 - RNA, 32 nt, Human
ggccagaugcagauggcuggagaugggugcag

SEQ ID NO: 190362 - RNA, 31 nt, Human
ggccagaugcugagcauccaggaugaugccu

SEQ ID NO: 190363 - RNA, 32 nt, Human
ggccagaugcugggcaggaaaccccagcggca

SEQ ID NO: 190364 - RNA, 32 nt, Human
ggccagaugcuguucuucacaccagaacguca

SEQ ID NO: 190365 - RNA, 32 nt, Human
ggccagauguacaggacauuguugucugcagu

SEQ ID NO: 190366 - RNA, 32 nt, Human
ggccagauuuuaugcuaaaaaugguaguuugu

SEQ ID NO: 190367 - RNA, 32 nt, Human
ggccagcaaagaggagggguccagagaacagc

SEQ ID NO: 190368 - RNA, 18 nt, Human
ggccagcaagcugaugug

SEQ ID NO: 190369 - RNA, 32 nt, Human
ggccagcaaggugaaaccccaucucuacuaaa

SEQ ID NO: 190370 - RNA, 17 nt, Human
ggccagcaaggugcagg

SEQ ID NO: 190371 - RNA, 20 nt, Human
ggccagcaagguggagugga

SEQ ID NO: 190372 - RNA, 32 nt, Human
ggccagcaaguggcgcugggccacacuggcuu

SEQ ID NO: 190373 - RNA, 32 nt, Human
ggccagcaccccuggcuggaguggguuaaagg

SEQ ID NO: 190374 - RNA, 25 nt, Human
ggccagcaccugggugaaguugcgu

SEQ ID NO: 190375 - RNA, 32 nt, Human
ggccagcaccuguaaucccagcuacucaggag

SEQ ID NO: 190376 - RNA, 32 nt, Human
ggccagcacggugaaaccccgucucugcugaa

SEQ ID NO: 190377 - RNA, 19 nt, Human
ggccagcacugcugcugcc

SEQ ID NO: 190378 - RNA, 22 nt, Human
ggccagcagaaaagugacugga

SEQ ID NO: 190379 - RNA, 23 nt, Human
ggccagcagaccucuuccugagg

SEQ ID NO: 190380 - RNA, 20 nt, Human
ggccagcagaucuccugugg

SEQ ID NO: 190381 - RNA, 32 nt, Human
ggccagcagaugugucgggccuggugagaggg

SEQ ID NO: 190382 - RNA, 32 nt, Human
ggccagcagcagagggcggcggaggaaggguu

SEQ ID NO: 190383 - RNA, 32 nt, Human
ggccagcagccccugcgccaacaccaccuucu

SEQ ID NO: 190384 - RNA, 21 nt, Human
ggccagcagcguggccaugga

SEQ ID NO: 190385 - RNA, 19 nt, Human
ggccagcagggagcucagg

SEQ ID NO: 190386 - RNA, 32 nt, Human
ggccagcagggcagacaccaggaaaagagggc

SEQ ID NO: 190387 - RNA, 32 nt, Human
ggccagcagggcucagaacaacagagacggau

SEQ ID NO: 190388 - RNA, 32 nt, Human
ggccagcaggggcgucguuuuguugccauuuu

SEQ ID NO: 190389 - RNA, 32 nt, Human
ggccagcaguccuucagggaagaugggaggcg

SEQ ID NO: 190390 - RNA, 18 nt, Human
ggccagcagugggggcug

SEQ ID NO: 190391 - RNA, 32 nt, Human
ggccagcagugugggagcaggaggggaaggau

SEQ ID NO: 190392 - RNA, 32 nt, Human
ggccagcauagugaaaccccaucucuacuaaa

SEQ ID NO: 190393 - RNA, 32 nt, Human
ggccagcauggcgaaaccccaucucuacuaaa

SEQ ID NO: 190394 - RNA, 32 nt, Human
ggccagcauggugaaaaccuaucucuacuaaa

SEQ ID NO: 190395 - RNA, 32 nt, Human
ggccagcauggugaaaccccaucucuaccaaa

SEQ ID NO: 190396 - RNA, 32 nt, Human
ggccagcauggugaaaccccaucucuacuaaa

SEQ ID NO: 190397 - RNA, 32 nt, Human
ggccagcauggugaaaccccaucucuacuaua

SEQ ID NO: 190398 - RNA, 32 nt, Human
ggccagcauggugaaaccccgucucuacuaaa

SEQ ID NO: 190399 - RNA, 32 nt, Human
ggccagcauggugaaaccccgucuguacuaaa

SEQ ID NO: 190400 - RNA, 32 nt, Human
ggccagcauggugaaacccugucucuacuaaa

SEQ ID NO: 190401 - RNA, 32 nt, Human
ggccagcauggugaaacccugucuuuacuaaa

SEQ ID NO: 190402 - RNA, 32 nt, Human
ggccagcauggugaaaccucaucccucuaaca

SEQ ID NO: 190403 - RNA, 32 nt, Human
ggccagcauggugaaacucugucucuacuaaa

SEQ ID NO: 190404 - RNA, 32 nt, Human
ggccagcauggugagaccccgucucuauuaaa

SEQ ID NO: 190405 - RNA, 32 nt, Human
ggccagccaccaaaccguaccaugccuuaguu

SEQ ID NO: 190406 - RNA, 32 nt, Human
ggccagccagaccaugaacccacugggaggaa

SEQ ID NO: 190407 - RNA, 32 nt, Human
ggccagccagcaccucugccuucucagggaca

SEQ ID NO: 190408 - RNA, 32 nt, Human
ggccagccaugccaccgcccuggccacccugc

SEQ ID NO: 190409 - RNA, 32 nt, Human
ggccagccauuuuucaguagcaggaccugcca

SEQ ID NO: 190410 - RNA, 32 nt, Human
ggccagcccacagccugguguggaggggaguc

SEQ ID NO: 190411 - RNA, 20 nt, Human
ggccagcccacccccagaag

SEQ ID NO: 190412 - RNA, 32 nt, Human
ggccagcccacuccccagccagagagggcuug

SEQ ID NO: 190413 - RNA, 32 nt, Human
ggccagcccagccucugacugcgcaugcccaa

SEQ ID NO: 190414 - RNA, 32 nt, Human
ggccagcccagccuggcucuguucucuguccu

SEQ ID NO: 190415 - RNA, 32 nt, Human
ggccagccccagccaaacacacaaaagcccau

SEQ ID NO: 190416 - RNA, 32 nt, Human
ggccagcccgucuuauggacucugccuugcuu

SEQ ID NO: 190417 - RNA, 17 nt, Human
ggccagcccucccagca

SEQ ID NO: 190418 - RNA, 32 nt, Human
ggccagcccuccuccuccucggaauccugggu

SEQ ID NO: 190419 - RNA, 22 nt, Human
ggccagcccugaccuggcuucu

SEQ ID NO: 190420 - RNA, 32 nt, Human
ggccagcccuggacgaaagaagagggccccuc

SEQ ID NO: 190421 - RNA, 32 nt, Human
ggccagcccuggagguaggcugggaccaagcu

SEQ ID NO: 190422 - RNA, 32 nt, Human
ggccagccuagccugcagcccucccuugcagg

SEQ ID NO: 190423 - RNA, 32 nt, Human
ggccagccuaggaguugccacaugugaggggc

SEQ ID NO: 190424 - RNA, 32 nt, Human
ggccagccuaucugccccaguacugccccagg

SEQ ID NO: 190425 - RNA, 32 nt, Human
ggccagccugggacagcucaucccagccgacu

SEQ ID NO: 190426 - RNA, 32 nt, Human
ggccagccuggggagcucuggccacugcuucc

SEQ ID NO: 190427 - RNA, 32 nt, Human
ggccagccuuuccucucugcgagguucucuca

SEQ ID NO: 190428 - RNA, 23 nt, Human
ggccagcgacagggccccugaga

SEQ ID NO: 190429 - RNA, 18 nt, Human
ggccagcgauuuuugagg

SEQ ID NO: 190430 - RNA, 24 nt, Human
ggccagcgcuggugccagccuucu

SEQ ID NO: 190431 - RNA, 32 nt, Human
ggccagcggaccucagggcggaggcuucccac

SEQ ID NO: 190432 - RNA, 32 nt, Human
ggccagcggagcccugggcuggggcaggagcc

SEQ ID NO: 190433 - RNA, 18 nt, Human
ggccagcggcauccuggg

SEQ ID NO: 190434 - RNA, 20 nt, Human
ggccagcggcuuccgcugag

SEQ ID NO: 190435 - RNA, 32 nt, Human
ggccagcggggagaagagaggcggaacugcug

SEQ ID NO: 190436 - RNA, 32 nt, Human
ggccagcgguguccacccuugcccucagcaag

SEQ ID NO: 190437 - RNA, 18 nt, Human
ggccagcuagaaccaaga

SEQ ID NO: 190438 - RNA, 22 nt, Human
ggccagcucacgccugcuuccu

SEQ ID NO: 190439 - RNA, 32 nt, Human
ggccagcucagggcuuccugcgggugacuguc

SEQ ID NO: 190440 - RNA, 32 nt, Human
ggccagcuccacaucugacuggguucuuacuu

SEQ ID NO: 190441 - RNA, 32 nt, Human
ggccagcuccagggaccccaguugcaggggcc

SEQ ID NO: 190442 - RNA, 32 nt, Human
ggccagcuccauaacauaaaagugcgagguga

SEQ ID NO: 190443 - RNA, 32 nt, Human
ggccagcucccaggacgucucaggugcaggcu

SEQ ID NO: 190444 - RNA, 32 nt, Human
ggccagcucccaggcccuuggaucaccgcggg

SEQ ID NO: 190445 - RNA, 21 nt, Human
ggccagcuccuuuucugugaa

SEQ ID NO: 190446 - RNA, 32 nt, Human
ggccagcucucuggcaucaggcugcuuggaca

SEQ ID NO: 190447 - RNA, 19 nt, Human
ggccagcucugccccaggg

SEQ ID NO: 190448 - RNA, 32 nt, Human
ggccagcugcguucugagccugggcgcagcug

SEQ ID NO: 190449 - RNA, 22 nt, Human
ggccagcugcucaggcucggca

SEQ ID NO: 190450 - RNA, 21 nt, Human
ggccagcugcugccccagagu

SEQ ID NO: 190451 - RNA, 32 nt, Human
ggccagcugcuuccuguccuucagaacacuuc

SEQ ID NO: 190452 - RNA, 32 nt, Human
ggccagcuguguaaaucccaugaaucagagag

SEQ ID NO: 190453 - RNA, 18 nt, Human
ggccagcuugcugcugcc

SEQ ID NO: 190454 - RNA, 32 nt, Human
ggccagcuugggcaagccaagaucagaugucu

SEQ ID NO: 190455 - RNA, 32 nt, Human
ggccaggaagcaugcagggggagugaggaccg

SEQ ID NO: 190456 - RNA, 32 nt, Human
ggccaggaagguaggggagaucaaagagggcu

SEQ ID NO: 190457 - RNA, 19 nt, Human
ggccaggaaguggccggua

SEQ ID NO: 190458 - RNA, 32 nt, Human
ggccaggaaucugccauuacucugcgguggug

SEQ ID NO: 190459 - RNA, 32 nt, Human
ggccaggacaaggggaaggaaaaugaggucaa

SEQ ID NO: 190460 - RNA, 32 nt, Human
ggccaggacacagcccucucucucacagcagu

SEQ ID NO: 190461 - RNA, 17 nt, Human
ggccaggacggccaggu

SEQ ID NO: 190462 - RNA, 32 nt, Human
ggccaggacgugcucccugacucucggcaggg

SEQ ID NO: 190463 - RNA, 32 nt, Human
ggccaggacucugagaucagagcuggggugga

SEQ ID NO: 190464 - RNA, 32 nt, Human
ggccaggacugaaccccuucuccacaccugaa

SEQ ID NO: 190465 - RNA, 32 nt, Human
ggccaggagagccacagccaugauacagggcu

SEQ ID NO: 190466 - RNA, 32 nt, Human
ggccaggagaggggccaagagcgcggcugacc

SEQ ID NO: 190467 - RNA, 32 nt, Human
ggccaggagaggggccgagagcgcggcugacc

SEQ ID NO: 190468 - RNA, 32 nt, Human
ggccaggagaucaagaccauccuggcuaacac

SEQ ID NO: 190469 - RNA, 32 nt, Human
ggccaggagaugagagagaaggucgaguaggu

SEQ ID NO: 190470 - RNA, 32 nt, Human
ggccaggagcagcaggucaugugcacaugccg

SEQ ID NO: 190471 - RNA, 32 nt, Human
ggccaggagccaggaguggggaagggagggau

SEQ ID NO: 190472 - RNA, 18 nt, Human
ggccaggagcuugugccu

SEQ ID NO: 190473 - RNA, 32 nt, Human
ggccaggaggaggaagagucugcagcauuugu

SEQ ID NO: 190474 - RNA, 22 nt, Human
ggccaggaggaugaaaggcccc

SEQ ID NO: 190475 - RNA, 32 nt, Human
ggccaggaggcggagcuugcagugagccgaga

SEQ ID NO: 190476 - RNA, 32 nt, Human
ggccaggaggcugcagcaccagggaaucugug

SEQ ID NO: 190477 - RNA, 32 nt, Human
ggccaggagguugaggcugcagugagcuguga

SEQ ID NO: 190478 - RNA, 32 nt, Human
ggccaggaguaguggcugagcucugugaucgc

SEQ ID NO: 190479 - RNA, 32 nt, Human
ggccaggaguaguggcugaugccugucauccc

SEQ ID NO: 190480 - RNA, 32 nt, Human
ggccaggagugacauuuaagcuagucaguuua

SEQ ID NO: 190481 - RNA, 32 nt, Human
ggccaggaguuagagacugcagugagcuauga

SEQ ID NO: 190482 - RNA, 32 nt, Human
ggccaggaguucgagaccagccuggacaacau

SEQ ID NO: 190483 - RNA, 32 nt, Human
ggccaggaguugcagaccagccuggguaacau

SEQ ID NO: 190484 - RNA, 32 nt, Human
ggccaggaguuggacacgagccuggucaaugu

SEQ ID NO: 190485 - RNA, 32 nt, Human
ggccaggaguuugagaccugccugggcaacau

SEQ ID NO: 190486 - RNA, 32 nt, Human
ggccaggaguuugaggcugcagugagcuauga

SEQ ID NO: 190487 - RNA, 32 nt, Human
ggccaggaguuugaggcugcagugaguuauga

SEQ ID NO: 190488 - RNA, 20 nt, Human
ggccaggauacccucugcca

SEQ ID NO: 190489 - RNA, 32 nt, Human
ggccaggaucagcagguuugaguggauaauug

SEQ ID NO: 190490 - RNA, 32 nt, Human
ggccaggauggacggccaggggccaggcacac

SEQ ID NO: 190491 - RNA, 32 nt, Human
ggccaggauggaggaggccggagcagcggugg

SEQ ID NO: 190492 - RNA, 32 nt, Human
ggccaggaugugggguuggaugggccauuuuc

SEQ ID NO: 190493 - RNA, 32 nt, Human
ggccaggcaagagaaccaggaggcagagcggg

SEQ ID NO: 190494 - RNA, 18 nt, Human
ggccaggcacagcugccc

SEQ ID NO: 190495 - RNA, 19 nt, Human
ggccaggcacggaggcucg

SEQ ID NO: 190496 - RNA, 32 nt, Human
ggccaggcacuugccuuaggacggggccagga

SEQ ID NO: 190497 - RNA, 32 nt, Human
ggccaggcagagaagaccaugggaguucccga

SEQ ID NO: 190498 - RNA, 32 nt, Human
ggccaggcagagcauuuggcuguagggaggcc

SEQ ID NO: 190499 - RNA, 32 nt, Human
ggccaggcagaggcaccccucaccucccggau

SEQ ID NO: 190500 - RNA, 32 nt, Human
ggccaggcagaggcgccccucaccucccggac

SEQ ID NO: 190501 - RNA, 32 nt, Human
ggccaggcagaggugcuccucacuucccagaa

SEQ ID NO: 190502 - RNA, 32 nt, Human
ggccaggcagaugaccucguacucaggagccc

SEQ ID NO: 190503 - RNA, 19 nt, Human
ggccaggcagcggguccag

SEQ ID NO: 190504 - RNA, 32 nt, Human
ggccaggcagcugagggccaggaaagauguga

SEQ ID NO: 190505 - RNA, 32 nt, Human
ggccaggcagcugugggcaaugcuggaggcug

SEQ ID NO: 190506 - RNA, 32 nt, Human
ggccaggcaggcaaaaggagucauggcuucug

SEQ ID NO: 190507 - RNA, 32 nt, Human
ggccaggcaggcagggaucccgcagcgagggg

SEQ ID NO: 190508 - RNA, 32 nt, Human
ggccaggcaggcgccgccugcggagagcaccg

SEQ ID NO: 190509 - RNA, 32 nt, Human
ggccaggcagugcuggagugcguuugcuggca

SEQ ID NO: 190510 - RNA, 32 nt, Human
ggccaggcauaguggugcaugccaguaauccc

SEQ ID NO: 190511 - RNA, 32 nt, Human
ggccaggccaagcugcaaaaggguggagucau

SEQ ID NO: 190512 - RNA, 32 nt, Human
ggccaggcccagacaugucuguccuugugaga

SEQ ID NO: 190513 - RNA, 18 nt, Human
ggccaggcccccagcggg

SEQ ID NO: 190514 - RNA, 20 nt, Human
ggccaggcccccagcgggca

SEQ ID NO: 190515 - RNA, 23 nt, Human
ggccaggcccccucccccacgca

SEQ ID NO: 190516 - RNA, 20 nt, Human
ggccaggcccgacaccuaca

SEQ ID NO: 190517 - RNA, 19 nt, Human
ggccaggcccugcuccuca

SEQ ID NO: 190518 - RNA, 22 nt, Human
ggccaggcccuuuuccugcaug

SEQ ID NO: 190519 - RNA, 32 nt, Human
ggccaggccgagagaccaagcagggaccaugc

SEQ ID NO: 190520 - RNA, 32 nt, Human
ggccaggccggcccuccagccugcugcugcau

SEQ ID NO: 190521 - RNA, 32 nt, Human
ggccaggccggucucgaacuccuggccuuaag

SEQ ID NO: 190522 - RNA, 16 nt, Human
ggccaggccucacaga

SEQ ID NO: 190523 - RNA, 32 nt, Human
ggccaggccucauucuccucuggccucuaaua

SEQ ID NO: 190524 - RNA, 32 nt, Human
ggccaggccugcagacccagacuccagccaga

SEQ ID NO: 190525 - RNA, 32 nt, Human
ggccaggccuggggcuuggugucugacugucg

SEQ ID NO: 190526 - RNA, 18 nt, Human
ggccaggccugggucuag

SEQ ID NO: 190527 - RNA, 19 nt, Human
ggccaggccuguagucuca

SEQ ID NO: 190528 - RNA, 32 nt, Human
ggccaggcgaugucuaaucagguuccggucag

SEQ ID NO: 190529 - RNA, 18 nt, Human
ggccaggcggggugcuca

SEQ ID NO: 190530 - RNA, 32 nt, Human
ggccaggcgggugcccuuggacagcuuggaag

SEQ ID NO: 190531 - RNA, 32 nt, Human
ggccaggcgguggcaguggagcugcuucugac

SEQ ID NO: 190532 - RNA, 32 nt, Human
ggccaggcuaaggggaaugcagaggagacaca

SEQ ID NO: 190533 - RNA, 19 nt, Human
ggccaggcuagagugcagu

SEQ ID NO: 190534 - RNA, 32 nt, Human
ggccaggcucagagcugagauguggccugaac

SEQ ID NO: 190535 - RNA, 32 nt, Human
ggccaggcucaggggcagaggcugggacacaa

SEQ ID NO: 190536 - RNA, 32 nt, Human
ggccaggcuccuggcaaccucucuugcuagag

SEQ ID NO: 190537 - RNA, 32 nt, Human
ggccaggcucgaagcagucucuguuuccagca

SEQ ID NO: 190538 - RNA, 32 nt, Human
ggccaggcucugagccacugagcaccagcugg

SEQ ID NO: 190539 - RNA, 32 nt, Human
ggccaggcuggaggcagggauggggacagggu

SEQ ID NO: 190540 - RNA, 19 nt, Human
ggccaggcuggagugcagu

SEQ ID NO: 190541 - RNA, 20 nt, Human
ggccaggcuggagugcagug

SEQ ID NO: 190542 - RNA, 32 nt, Human
ggccaggcuggcuacccuguguacaaguauag

SEQ ID NO: 190543 - RNA, 17 nt, Human
ggccaggcuggguccag

SEQ ID NO: 190544 - RNA, 32 nt, Human
ggccaggcuggucucaaacuccugggcucaag

SEQ ID NO: 190545 - RNA, 32 nt, Human
ggccaggcuggucucaaccucuggaccucagg

SEQ ID NO: 190546 - RNA, 23 nt, Human
ggccaggcuggucucgaauucca

SEQ ID NO: 190547 - RNA, 32 nt, Human
ggccaggcuggucuugaacucccaggcauaag

SEQ ID NO: 190548 - RNA, 32 nt, Human
ggccaggcuguguauuucuuucccaggaaauu

SEQ ID NO: 190549 - RNA, 18 nt, Human
ggccaggcuuccguggcc

SEQ ID NO: 190550 - RNA, 19 nt, Human
ggccaggcuuccugucaga

SEQ ID NO: 190551 - RNA, 32 nt, Human
ggccaggcuugggaaggaaggagggaucaaca

SEQ ID NO: 190552 - RNA, 31 nt, Human
ggccaggcuuggguggagccugugucccaga

SEQ ID NO: 190553 - RNA, 32 nt, Human
ggccaggcuuguuaugaacugaccucaaguga

SEQ ID NO: 190554 - RNA, 32 nt, Human
ggccaggcuuuguagcuccugcagcagcucug

SEQ ID NO: 190555 - RNA, 32 nt, Human
ggccagggaacauuuuuaacagcuucugccgg

SEQ ID NO: 190556 - RNA, 32 nt, Human
ggccagggaagaggaggaagaagaggaggagg

SEQ ID NO: 190557 - RNA, 20 nt, Human
ggccagggacgucaugccca

SEQ ID NO: 190558 - RNA, 32 nt, Human
ggccagggacuggccaggcagccauggcugac

SEQ ID NO: 190559 - RNA, 32 nt, Human
ggccagggagaagcuccucuccccagcccaga

SEQ ID NO: 190560 - RNA, 19 nt, Human
ggccagggagaggcgcagg

SEQ ID NO: 190561 - RNA, 32 nt, Human
ggccagggagcagagcuuccacaagacauuuc

SEQ ID NO: 190562 - RNA, 32 nt, Human
ggccagggagcugcaagagugaggcucagcuc

SEQ ID NO: 190563 - RNA, 19 nt, Human
ggccagggagcugcugcca

SEQ ID NO: 190564 - RNA, 20 nt, Human
ggccagggaggaagaggcag

SEQ ID NO: 190565 - RNA, 32 nt, Human
ggccagggaggcaggggaggcaggagaggcug

SEQ ID NO: 190566 - RNA, 32 nt, Human
ggccagggaggcaguggaggcaggagaggcug

SEQ ID NO: 190567 - RNA, 32 nt, Human
ggccagggaggcauugcugcaggugagccugg

SEQ ID NO: 190568 - RNA, 32 nt, Human
ggccagggaggggaacucagcaguucaggagc

SEQ ID NO: 190569 - RNA, 32 nt, Human
ggccagggaggggagugguggagccagucgcu

SEQ ID NO: 190570 - RNA, 32 nt, Human
ggccagggagguugaggcugcagugagcuaug

SEQ ID NO: 190571 - RNA, 22 nt, Human
ggccagggaugcugcccugcca

SEQ ID NO: 190572 - RNA, 32 nt, Human
ggccagggauggucucuguuccccagcccacc

SEQ ID NO: 190573 - RNA, 23 nt, Human
ggccagggcacacggugcgcccg

SEQ ID NO: 190574 - RNA, 22 nt, Human
ggccagggcacugagggccccg

SEQ ID NO: 190575 - RNA, 19 nt, Human
ggccagggccagaggcccc

SEQ ID NO: 190576 - RNA, 21 nt, Human
ggccagggcccaagacccccg

SEQ ID NO: 190577 - RNA, 22 nt, Human
ggccagggccccucacccugcc

SEQ ID NO: 190578 - RNA, 18 nt, Human
ggccagggccugggccuc

SEQ ID NO: 190579 - RNA, 32 nt, Human
ggccagggccuuuugaacaguaguguccccau

SEQ ID NO: 190580 - RNA, 21 nt, Human
ggccagggcgccccgcccacc

SEQ ID NO: 190581 - RNA, 22 nt, Human
ggccagggcgcgggggccgcca

SEQ ID NO: 190582 - RNA, 21 nt, Human
ggccagggcggagggaggaag

SEQ ID NO: 190583 - RNA, 19 nt, Human
ggccagggcggcagcacca

SEQ ID NO: 190584 - RNA, 32 nt, Human
ggccagggcgggcggagggaggcuguggagag

SEQ ID NO: 190585 - RNA, 21 nt, Human
ggccagggcuaccccaggccc

SEQ ID NO: 190586 - RNA, 32 nt, Human
ggccagggcugcugccugccagccuggggucc

SEQ ID NO: 190587 - RNA, 32 nt, Human
ggccagggcuggucucuggagcuguucugcca

SEQ ID NO: 190588 - RNA, 32 nt, Human
ggccagggcuggucucuguuccccagcccacc

SEQ ID NO: 190589 - RNA, 32 nt, Human
ggccagggcugugcucccugaaguggcuuuga

SEQ ID NO: 190590 - RNA, 21 nt, Human
ggccagggcuguucacgccca

SEQ ID NO: 190591 - RNA, 32 nt, Human
ggccagggcuuauccuggguuggccacuggau

SEQ ID NO: 190592 - RNA, 32 nt, Human
ggccagggcuuccucaaauacaugcacaguca

SEQ ID NO: 190593 - RNA, 22 nt, Human
ggccagggcuuggccuuagcca

SEQ ID NO: 190594 - RNA, 32 nt, Human
ggccaggggaagcagaagggagacucuaggag

SEQ ID NO: 190595 - RNA, 31 nt, Human
ggccaggggaauaugccucagugaugcauuu

SEQ ID NO: 190596 - RNA, 32 nt, Human
ggccaggggagagagaagaggaucagcagugc

SEQ ID NO: 190597 - RNA, 17 nt, Human
ggccaggggaucugaug

SEQ ID NO: 190598 - RNA, 32 nt, Human
ggccaggggaucugcacgucguguuagacaug

SEQ ID NO: 190599 - RNA, 17 nt, Human
ggccaggggcacuguga

SEQ ID NO: 190600 - RNA, 32 nt, Human
ggccaggggccaggcuguuugcgagaccagcc

SEQ ID NO: 190601 - RNA, 32 nt, Human
ggccaggggccugacccucagcacuuucagcc

SEQ ID NO: 190602 - RNA, 32 nt, Human
ggccaggggcuaauggugucacuguguaaagu

SEQ ID NO: 190603 - RNA, 32 nt, Human
ggccaggggcucugcugggaucaaaggacuug

SEQ ID NO: 190604 - RNA, 18 nt, Human
ggccaggggguugugaug

SEQ ID NO: 190605 - RNA, 15 nt, Human
ggccaggggugcagg

SEQ ID NO: 190606 - RNA, 32 nt, Human
ggccaggggugguggagggugggaagagucau

SEQ ID NO: 190607 - RNA, 22 nt, Human
ggccaggguauaaaaagggccc

SEQ ID NO: 190608 - RNA, 32 nt, Human
ggccagggugcugacugucaagcauccccugu

SEQ ID NO: 190609 - RNA, 20 nt, Human
ggccaggguggccagccccg

SEQ ID NO: 190610 - RNA, 23 nt, Human
ggccaggguggccagccccgcca

SEQ ID NO: 190611 - RNA, 32 nt, Human
ggccagggugggaggcaggcagcugccugcuc

SEQ ID NO: 190612 - RNA, 32 nt, Human
ggccagggugggcagaucaugaggucagaagu

SEQ ID NO: 190613 - RNA, 21 nt, Human
ggccaggguguguggagcaag

SEQ ID NO: 190614 - RNA, 24 nt, Human
ggccaggguugccucagaggccaa

SEQ ID NO: 190615 - RNA, 32 nt, Human
ggccagguaagggggugcagcagugaggggua

SEQ ID NO: 190616 - RNA, 32 nt, Human
ggccagguacaacaccuuuuucauacaaggcc

SEQ ID NO: 190617 - RNA, 31 nt, Human
ggccagguacgguucuucacagcagauauag

SEQ ID NO: 190618 - RNA, 22 nt, Human
ggccaggucacugucuacccca

SEQ ID NO: 190619 - RNA, 32 nt, Human
ggccaggucugucuggcuccgguacaggaagg

SEQ ID NO: 190620 - RNA, 28 nt, Human
ggccaggucuguguggacguggaggaag

SEQ ID NO: 190621 - RNA, 32 nt, Human
ggccaggugagguuggggccugugggccgcca

SEQ ID NO: 190622 - RNA, 32 nt, Human
ggccagguggacuguggcagaucaauaaagaa

SEQ ID NO: 190623 - RNA, 32 nt, Human
ggccaggugggaaaugcuuucacuggaccaac

SEQ ID NO: 190624 - RNA, 26 nt, Human
ggccaggugggaacggcugaugugga

SEQ ID NO: 190625 - RNA, 32 nt, Human
ggccaggugguggagacagagacaggcccuga

SEQ ID NO: 190626 - RNA, 32 nt, Human
ggccaggugguggcucaugccuguaaucccag

SEQ ID NO: 190627 - RNA, 16 nt, Human
ggccagguggugguga

SEQ ID NO: 190628 - RNA, 32 nt, Human
ggccagguguggugauucaugccugaaauccc

SEQ ID NO: 190629 - RNA, 32 nt, Human
ggccagguguucuccuggggcgggggcaggca

SEQ ID NO: 190630 - RNA, 30 nt, Human
ggccagguucuccguuagcuccuguggccc

SEQ ID NO: 190631 - RNA, 32 nt, Human
ggccagguuggucucaagcuccugaccucaga

SEQ ID NO: 190632 - RNA, 32 nt, Human
ggccaguaacauugccaauacuaccuaccggc

SEQ ID NO: 190633 - RNA, 20 nt, Human
ggccaguagccuucugcucc

SEQ ID NO: 190634 - RNA, 32 nt, Human
ggccaguaggagacacgacagcacacacagug

SEQ ID NO: 190635 - RNA, 21 nt, Human
ggccaguagugcagcccgugg

SEQ ID NO: 190636 - RNA, 32 nt, Human
ggccaguaucauuuuacccccaccucccaagc

SEQ ID NO: 190637 - RNA, 32 nt, Human
ggccaguauggugaaacccugucucuacuaaa

SEQ ID NO: 190638 - RNA, 32 nt, Human
ggccaguauggugaaacccugucucuccuaaa

SEQ ID NO: 190639 - RNA, 32 nt, Human
ggccagucagauguuucucauccuucuugcuc

SEQ ID NO: 190640 - RNA, 32 nt, Human
ggccagucccccagagcuugggagacuucgau

SEQ ID NO: 190641 - RNA, 32 nt, Human
ggccaguccccugccugugcuccugcugggga

SEQ ID NO: 190642 - RNA, 32 nt, Human
ggccagucccuggugcccuccuggcccugcug

SEQ ID NO: 190643 - RNA, 32 nt, Human
ggccagucucaaacuccugaccucaggugauc

SEQ ID NO: 190644 - RNA, 32 nt, Human
ggccagucucaaacuccugaccucgugauccg

SEQ ID NO: 190645 - RNA, 32 nt, Human
ggccagucucaaacuccuggacucaagcaauc

SEQ ID NO: 190646 - RNA, 32 nt, Human
ggccagucucaaacuccuggccucaugugauc

SEQ ID NO: 190647 - RNA, 21 nt, Human
ggccagucucuccugaccuca

SEQ ID NO: 190648 - RNA, 32 nt, Human
ggccagucugccagcugaguccugguuuugga

SEQ ID NO: 190649 - RNA, 32 nt, Human
ggccagugacagaccccaaggacucuaggcua

SEQ ID NO: 190650 - RNA, 32 nt, Human
ggccagugacagagaaggcagaggggagugug

SEQ ID NO: 190651 - RNA, 32 nt, Human
ggccagugcaggaauccagguaguggaggaug

SEQ ID NO: 190652 - RNA, 32 nt, Human
ggccagugcccagguuagugagcagugcccgg

SEQ ID NO: 190653 - RNA, 19 nt, Human
ggccagugcccgccugguu

SEQ ID NO: 190654 - RNA, 18 nt, Human
ggccagugcucaccaggg

SEQ ID NO: 190655 - RNA, 32 nt, Human
ggccagugcucuucugggugauccugguguug

SEQ ID NO: 190656 - RNA, 32 nt, Human
ggccagugcugggugggcauugaggggucaca

SEQ ID NO: 190657 - RNA, 32 nt, Human
ggccagugcuuccccagccccugggccugguc

SEQ ID NO: 190658 - RNA, 32 nt, Human
ggccagugcuuggcaggugcucagggaaugua

SEQ ID NO: 190659 - RNA, 32 nt, Human
ggccagugggaggggguuugggccagugcacc

SEQ ID NO: 190660 - RNA, 32 nt, Human
ggccaguguaaggucgaucccagaggcugauc

SEQ ID NO: 190661 - RNA, 32 nt, Human
ggccagugucaggccagcaggugcagggacag

SEQ ID NO: 190662 - RNA, 32 nt, Human
ggccagugugccaggcacaugucccugucaca

SEQ ID NO: 190663 - RNA, 32 nt, Human
ggccaguguugucugucaugugccagaagcuu

SEQ ID NO: 190664 - RNA, 32 nt, Human
ggccaguguuuuuaacccuccucaaauuccau

SEQ ID NO: 190665 - RNA, 32 nt, Human
ggccaguucuauaaccauccccaaacuagcug

SEQ ID NO: 190666 - RNA, 32 nt, Human
ggccaguucucuuccuccugcgcaccugcccc

SEQ ID NO: 190667 - RNA, 32 nt, Human
ggccaguuguuugagcgguggggaagauuuug

SEQ ID NO: 190668 - RNA, 32 nt, Human
ggccaguuucucccucuucaccccugcgccuc

SEQ ID NO: 190669 - RNA, 32 nt, Human
ggccaguuugaagccugugccucccagcuuaa

SEQ ID NO: 190670 - RNA, 32 nt, Human
ggccaguuuggaggcaggcguugagcugugca

SEQ ID NO: 190671 - RNA, 32 nt, Human
ggccauacuuuggcccacacuauucuuuccac

SEQ ID NO: 190672 - RNA, 32 nt, Human
ggccauagaacagcugagcuguggagcuggac

SEQ ID NO: 190673 - RNA, 32 nt, Human
ggccauagcugaagcuguggggccaguugaua

SEQ ID NO: 190674 - RNA, 32 nt, Human
ggccauagggagggagauucgcuacggaucca

SEQ ID NO: 190675 - RNA, 32 nt, Human
ggccauaguugagaauuuugacuugggauacu

SEQ ID NO: 190676 - RNA, 24 nt, Human
ggccauaguuugagccacagagaa

SEQ ID NO: 190677 - RNA, 32 nt, Human
ggccauauaaagucaccugaggcccucuccac

SEQ ID NO: 190678 - RNA, 32 nt, Human
ggccauauaagggaaggagcucagggaggccu

SEQ ID NO: 190679 - RNA, 32 nt, Human
ggccauauccacccauugacucugccuucauc

SEQ ID NO: 190680 - RNA, 21 nt, Human
ggccauaugacacuccucccg

SEQ ID NO: 190681 - RNA, 32 nt, Human
ggccauauggccugggcgcugggucguggagg

SEQ ID NO: 190682 - RNA, 19 nt, Human
ggccauauucuuccugggg

SEQ ID NO: 190683 - RNA, 32 nt, Human
ggccaucaacaucgcagaugagcugccccgcu

SEQ ID NO: 190684 - RNA, 17 nt, Human
ggccaucacaccuggau

SEQ ID NO: 190685 - RNA, 31 nt, Human
ggccaucacagcugcgugccugggggccgug

SEQ ID NO: 190686 - RNA, 32 nt, Human
ggccaucacaucaacagaaaaccccucccagu

SEQ ID NO: 190687 - RNA, 19 nt, Human
ggccaucagaggcucaggc

SEQ ID NO: 190688 - RNA, 32 nt, Human
ggccaucagcgugcacuguucguauuuggagu

SEQ ID NO: 190689 - RNA, 32 nt, Human
ggccaucauggugaaaccccaucucuacuaaa

SEQ ID NO: 190690 - RNA, 32 nt, Human
ggccaucauggugaaacccugucucuacugaa

SEQ ID NO: 190691 - RNA, 32 nt, Human
ggccaucauggugaaauccugucucuagugaa

SEQ ID NO: 190692 - RNA, 32 nt, Human
ggccaucauuugguacagucucauuuccaagu

SEQ ID NO: 190693 - RNA, 32 nt, Human
ggccauccacacccucuccuugucacagaauc

SEQ ID NO: 190694 - RNA, 32 nt, Human
ggccauccccacccccuccaucugccccuguc

SEQ ID NO: 190695 - RNA, 32 nt, Human
ggccauccccgcccccgacuccugcggccggu

SEQ ID NO: 190696 - RNA, 18 nt, Human
ggccaucccucuguugcc

SEQ ID NO: 190697 - RNA, 32 nt, Human
ggccauccuccaaggcucacugugcuucucca

SEQ ID NO: 190698 - RNA, 32 nt, Human
ggccauccucuuucugcugugugucuguguag

SEQ ID NO: 190699 - RNA, 32 nt, Human
ggccauccugugagacacagaguuaaagaagu

SEQ ID NO: 190700 - RNA, 32 nt, Human
ggccaucgagagcggggacacugaccuggugu

SEQ ID NO: 190701 - RNA, 32 nt, Human
ggccaucgccacccuccgcagccauguccacc

SEQ ID NO: 190702 - RNA, 19 nt, Human
ggccaucucugugauccca

SEQ ID NO: 190703 - RNA, 32 nt, Human
ggccaucugacccugagcauugccugcaagug

SEQ ID NO: 190704 - RNA, 32 nt, Human
ggccaucugcugucauugucauugucauaguu

SEQ ID NO: 190705 - RNA, 32 nt, Human
ggccaucuggaaacuuguggacagagaagaag

SEQ ID NO: 190706 - RNA, 32 nt, Human
ggccaucuggggcuccuucuccaccccagccc

SEQ ID NO: 190707 - RNA, 32 nt, Human
ggccaucuucuuucuuccacccacaaacucca

SEQ ID NO: 190708 - RNA, 21 nt, Human
ggccaugaaagccacagagga

SEQ ID NO: 190709 - RNA, 32 nt, Human
ggccaugaaagccacagaggaugggcugagga

SEQ ID NO: 190710 - RNA, 32 nt, Human
ggccaugagacagaaagaaagacugaaaaaga

SEQ ID NO: 190711 - RNA, 32 nt, Human
ggccaugaggcugcaggcuggugcuaugacag

SEQ ID NO: 190712 - RNA, 32 nt, Human
ggccaugagggugggagccggccugggcagcu

SEQ ID NO: 190713 - RNA, 29 nt, Human
ggccaugaguaagaggcagacagcagagg

SEQ ID NO: 190714 - RNA, 32 nt, Human
ggccaugaguuacucgggaggcugaggcagga

SEQ ID NO: 190715 - RNA, 32 nt, Human
ggccaugauagccacuggcagcuuugaagaac

SEQ ID NO: 190716 - RNA, 29 nt, Human
ggccaugcaccuccagcccgccugggcac

SEQ ID NO: 190717 - RNA, 32 nt, Human
ggccaugcagccaugccugcaggaugaucaga

SEQ ID NO: 190718 - RNA, 32 nt, Human
ggccaugcagcugcacuccccucccaggaaag

SEQ ID NO: 190719 - RNA, 19 nt, Human
ggccaugcauccugcugcc

SEQ ID NO: 190720 - RNA, 21 nt, Human
ggccaugcauccugcugccaa

SEQ ID NO: 190721 - RNA, 22 nt, Human
ggccaugccaaacagcacccag

SEQ ID NO: 190722 - RNA, 22 nt, Human
ggccaugccaagcaucccccca

SEQ ID NO: 190723 - RNA, 23 nt, Human
ggccaugccgaagcccaccucua

SEQ ID NO: 190724 - RNA, 21 nt, Human
ggccaugccgucucacccaca

SEQ ID NO: 190725 - RNA, 22 nt, Human
ggccaugccgucucacccacag

SEQ ID NO: 190726 - RNA, 32 nt, Human
ggccaugccgugccaccgucaccagagccagc

SEQ ID NO: 190727 - RNA, 31 nt, Human
ggccaugccuugguggggccugugucgggcg

SEQ ID NO: 190728 - RNA, 32 nt, Human
ggccaugcuccuugaacuuggaaaugucaacc

SEQ ID NO: 190729 - RNA, 32 nt, Human
ggccaugcucuuagcccugcccugugcuacgc

SEQ ID NO: 190730 - RNA, 32 nt, Human
ggccaugcuggggccagaaccccagcccugug

SEQ ID NO: 190731 - RNA, 32 nt, Human
ggccaugcuggucaucggcuugcccaggcucc

SEQ ID NO: 190732 - RNA, 32 nt, Human
ggccauggaaagucaccuucccuuucgguucu

SEQ ID NO: 190733 - RNA, 32 nt, Human
ggccauggagaaagcugacuuggcuggugugg

SEQ ID NO: 190734 - RNA, 32 nt, Human
ggccauggagaagcugguggggaccagaccca

SEQ ID NO: 190735 - RNA, 29 nt, Human
ggccauggagcugagcagcaagaagaagc

SEQ ID NO: 190736 - RNA, 21 nt, Human
ggccauggaguguccacaccu

SEQ ID NO: 190737 - RNA, 18 nt, Human
ggccauggcagcuguagu

SEQ ID NO: 190738 - RNA, 32 nt, Human
ggccauggcaggaaguggagccucccaccgaa

SEQ ID NO: 190739 - RNA, 29 nt, Human
ggccauggccagccuggggcugcugcucc

SEQ ID NO: 190740 - RNA, 29 nt, Human
ggccauggcccaggccggcgucgucggug

SEQ ID NO: 190741 - RNA, 29 nt, Human
ggccauggcgugcggagccacucugaaaa

SEQ ID NO: 190742 - RNA, 32 nt, Human
ggccauggcuaugcuucccuggcuccaagggc

SEQ ID NO: 190743 - RNA, 32 nt, Human
ggccaugggaauuauuuagaaugugaucugcc

SEQ ID NO: 190744 - RNA, 32 nt, Human
ggccaugggagauacaauuccaaguucucgcu

SEQ ID NO: 190745 - RNA, 23 nt, Human
ggccaugggaggagcucuaggga

SEQ ID NO: 190746 - RNA, 31 nt, Human
ggccaugggccgaggccuggcauucacguuc

SEQ ID NO: 190747 - RNA, 20 nt, Human
ggccaugggccucugccaga

SEQ ID NO: 190748 - RNA, 21 nt, Human
ggccauggggaacuucaggga

SEQ ID NO: 190749 - RNA, 29 nt, Human
ggccauggggacccaaccagagccuggcc

SEQ ID NO: 190750 - RNA, 29 nt, Human
ggccauggggcucugggcgcuguugccug

SEQ ID NO: 190751 - RNA, 32 nt, Human
ggccaugggggcuacaaaguccagccgaguca

SEQ ID NO: 190752 - RNA, 21 nt, Human
ggccaugggucgcucccgccg

SEQ ID NO: 190753 - RNA, 22 nt, Human
ggccaugguggcucauaccugu

SEQ ID NO: 190754 - RNA, 19 nt, Human
ggccauguagcaagugggg

SEQ ID NO: 190755 - RNA, 32 nt, Human
ggccaugucaguuuucugccaccuacaggaua

SEQ ID NO: 190756 - RNA, 32 nt, Human
ggccaugucauggagauagaccauguagacau

SEQ ID NO: 190757 - RNA, 29 nt, Human
ggccaugucauugucccacuuauaccggg

SEQ ID NO: 190758 - RNA, 32 nt, Human
ggccauguccaguuuauauaguuuacaaaaua

SEQ ID NO: 190759 - RNA, 32 nt, Human
ggccauguccccaggcuuggggauucucugac

SEQ ID NO: 190760 - RNA, 23 nt, Human
ggccauguccccuucuugcugcc

SEQ ID NO: 190761 - RNA, 32 nt, Human
ggccaugugagcacacugugagaagaugccau

SEQ ID NO: 190762 - RNA, 20 nt, Human
ggccaugugcacacagcucc

SEQ ID NO: 190763 - RNA, 23 nt, Human
ggccaugugccgcgccugcuccc

SEQ ID NO: 190764 - RNA, 32 nt, Human
ggccaugugguuuucuccuuccuggccuuggc

SEQ ID NO: 190765 - RNA, 32 nt, Human
ggccauguugcccaggcuggucucgaacuccu

SEQ ID NO: 190766 - RNA, 32 nt, Human
ggccauguuggccaggcugguuucaaacuccu

SEQ ID NO: 190767 - RNA, 32 nt, Human
ggccauuaggcagggcuucaguuccucgccau

SEQ ID NO: 190768 - RNA, 32 nt, Human
ggccauuaugccacuaacuuuaaccuauccca

SEQ ID NO: 190769 - RNA, 32 nt, Human
ggccauuauggugaaaccccgucucuacuaaa

SEQ ID NO: 190770 - RNA, 32 nt, Human
ggccauuauuuucauuuucauuuuuggcucuu

SEQ ID NO: 190771 - RNA, 32 nt, Human
ggccauucaggccuccagccccucucuugucu

SEQ ID NO: 190772 - RNA, 18 nt, Human
ggccauucccagcuccuu

SEQ ID NO: 190773 - RNA, 32 nt, Human
ggccauucgggcagacaccgagcuagcuguag

SEQ ID NO: 190774 - RNA, 32 nt, Human
ggccauucuccccucacccuccucaccuuccu

SEQ ID NO: 190775 - RNA, 18 nt, Human
ggccauugacacauggac

SEQ ID NO: 190776 - RNA, 23 nt, Human
ggccauugcacuccagccucagc

SEQ ID NO: 190777 - RNA, 32 nt, Human
ggccauugcacuccagccugggcaauagggca

SEQ ID NO: 190778 - RNA, 32 nt, Human
ggccauugcacuccagccugggugacagagug

SEQ ID NO: 190779 - RNA, 32 nt, Human
ggccauugcacuccagcgugggcaacagagug

SEQ ID NO: 190780 - RNA, 32 nt, Human
ggccauugcacuucagccugggugacagagug

SEQ ID NO: 190781 - RNA, 32 nt, Human
ggccauugcccagccagauguggucaccucag

SEQ ID NO: 190782 - RNA, 32 nt, Human
ggccauuuccagcagacccucuacccaggcuu

SEQ ID NO: 190783 - RNA, 32 nt, Human
ggccauuuccagccagcucccacccaucuuuu

SEQ ID NO: 190784 - RNA, 32 nt, Human
ggccauuuccauuaugguggcagcccuccauu

SEQ ID NO: 190785 - RNA, 32 nt, Human
ggccauuucccuuucgcaguucuuucaauagg

SEQ ID NO: 190786 - RNA, 32 nt, Human
ggccauuucucaucuaccgucauugccacauc

SEQ ID NO: 190787 - RNA, 32 nt, Human
ggccauuucucccaccuuuacucacacccuuc

SEQ ID NO: 190788 - RNA, 23 nt, Human
ggccauuucuccugguuacccua

SEQ ID NO: 190789 - RNA, 32 nt, Human
ggccauuucuguaguuagugaacagagcagau

SEQ ID NO: 190790 - RNA, 32 nt, Human
ggccauuucuguguuucccuuuaaaccagauc

SEQ ID NO: 190791 - RNA, 32 nt, Human
ggccauuucuucccaucuccaaaaauccagag

SEQ ID NO: 190792 - RNA, 32 nt, Human
ggccauuugccuggcuaguugcugucuacaag

SEQ ID NO: 190793 - RNA, 32 nt, Human
ggccauuuuaucuucagcugaccaauaugccu

SEQ ID NO: 190794 - RNA, 32 nt, Human
ggccauuuucccugcucuuccucaguuguccg

SEQ ID NO: 190795 - RNA, 32 nt, Human
ggccauuuuucuuccugguguuugaaugacuc

SEQ ID NO: 190796 - RNA, 32 nt, Human
ggcccaaaaccucacaauaugggcucccaacc

SEQ ID NO: 190797 - RNA, 20 nt, Human
ggcccaaacccaguuuccuu

SEQ ID NO: 190798 - RNA, 32 nt, Human
ggcccaaagaagcaaggaaccaaauuuaagac

SEQ ID NO: 190799 - RNA, 32 nt, Human
ggcccaaaggcaggagcagcagacaagagugc

SEQ ID NO: 190800 - RNA, 32 nt, Human
ggcccaaauggugaaacccugucucuacuaaa

SEQ ID NO: 190801 - RNA, 32 nt, Human
ggcccaacaagaagguuucuguccuaaucaua

SEQ ID NO: 190802 - RNA, 32 nt, Human
ggcccaacacugcauagcacugugcauaggcc

SEQ ID NO: 190803 - RNA, 32 nt, Human
ggcccaacauaaacaagcuuuggagacaaaca

SEQ ID NO: 190804 - RNA, 18 nt, Human
ggcccaacccccacccca

SEQ ID NO: 190805 - RNA, 32 nt, Human
ggcccaacggggacacaaggaggcagaggagc

SEQ ID NO: 190806 - RNA, 32 nt, Human
ggcccaacucacagucucaaagccuguccucc

SEQ ID NO: 190807 - RNA, 32 nt, Human
ggcccaacuccaggacgccccagcuggcccag

SEQ ID NO: 190808 - RNA, 32 nt, Human
ggcccaacugcggcgucaucccggcuauaagc

SEQ ID NO: 190809 - RNA, 32 nt, Human
ggcccaacuggccggcagccuggugagcccuc

SEQ ID NO: 190810 - RNA, 24 nt, Human
ggcccaacuuccccuggagcucag

SEQ ID NO: 190811 - RNA, 32 nt, Human
ggcccaacuucugauaacuacuugucuuccau

SEQ ID NO: 190812 - RNA, 17 nt, Human
ggcccaacuuuucugcc

SEQ ID NO: 190813 - RNA, 32 nt, Human
ggcccaagacugggcuguaguuacauuaaugc

SEQ ID NO: 190814 - RNA, 25 nt, Human
ggcccaagagcagagucugggccuc

SEQ ID NO: 190815 - RNA, 32 nt, Human
ggcccaagagcagagucugggccucugacucu

SEQ ID NO: 190816 - RNA, 23 nt, Human
ggcccaagagcccgugccacccc

SEQ ID NO: 190817 - RNA, 20 nt, Human
ggcccaagagcugcacucac

SEQ ID NO: 190818 - RNA, 24 nt, Human
ggcccaagcaauccuccugcuuca

SEQ ID NO: 190819 - RNA, 19 nt, Human
ggcccaagcaauccugccu

SEQ ID NO: 190820 - RNA, 24 nt, Human
ggcccaagcaauucucccaccuca

SEQ ID NO: 190821 - RNA, 21 nt, Human
ggcccaagcaggagcugcagc

SEQ ID NO: 190822 - RNA, 20 nt, Human
ggcccaagcaugccccaccc

SEQ ID NO: 190823 - RNA, 24 nt, Human
ggcccaagcgauccuccugccuca

SEQ ID NO: 190824 - RNA, 16 nt, Human
ggcccaagcugccccu

SEQ ID NO: 190825 - RNA, 26 nt, Human
ggcccaagcugccccugacagcacag

SEQ ID NO: 190826 - RNA, 32 nt, Human
ggcccaaggagaggacccaggagaggagucug

SEQ ID NO: 190827 - RNA, 22 nt, Human
ggcccaaggaucuggaugaccu

SEQ ID NO: 190828 - RNA, 32 nt, Human
ggcccaaggaugugaccuugagugucaaggcu

SEQ ID NO: 190829 - RNA, 24 nt, Human
ggcccaagggacaagcugggccuc

SEQ ID NO: 190830 - RNA, 26 nt, Human
ggcccaagggacaagcugggccuccc

SEQ ID NO: 190831 - RNA, 32 nt, Human
ggcccaagggagcagagggaggagaggugagg

SEQ ID NO: 190832 - RNA, 23 nt, Human
ggcccaagggcagaacugcaccc

SEQ ID NO: 190833 - RNA, 23 nt, Human
ggcccaagggccuguccccaucc

SEQ ID NO: 190834 - RNA, 22 nt, Human
ggcccaaggucccagcugcucg

SEQ ID NO: 190835 - RNA, 17 nt, Human
ggcccaagucguucuca

SEQ ID NO: 190836 - RNA, 32 nt, Human
ggcccaagucugucuuugacucugccuauccc

SEQ ID NO: 190837 - RNA, 23 nt, Human
ggcccaagugaaggccagaguga

SEQ ID NO: 190838 - RNA, 22 nt, Human
ggcccaagugauccuccaauca

SEQ ID NO: 190839 - RNA, 24 nt, Human
ggcccaagugauccucccgucuca

SEQ ID NO: 190840 - RNA, 24 nt, Human
ggcccaagugauccuuccaccuca

SEQ ID NO: 190841 - RNA, 16 nt, Human
ggcccaauccaugcca

SEQ ID NO: 190842 - RNA, 19 nt, Human
ggcccacaacccccacccc

SEQ ID NO: 190843 - RNA, 18 nt, Human
ggcccacaacugggucca

SEQ ID NO: 190844 - RNA, 32 nt, Human
ggcccacaaguuggaggucuaagugcgagggg

SEQ ID NO: 190845 - RNA, 24 nt, Human
ggcccacacacggccccgcccugg

SEQ ID NO: 190846 - RNA, 26 nt, Human
ggcccacacaggcacccuggaucccc

SEQ ID NO: 190847 - RNA, 21 nt, Human
ggcccacaccuacaguuccag

SEQ ID NO: 190848 - RNA, 32 nt, Human
ggcccacaccuguaaucccagcacuuugggag

SEQ ID NO: 190849 - RNA, 26 nt, Human
ggcccacacgggcacccuggaucccc

SEQ ID NO: 190850 - RNA, 22 nt, Human
ggcccacacucccuggguccag

SEQ ID NO: 190851 - RNA, 21 nt, Human
ggcccacacucuccugcugcc

SEQ ID NO: 190852 - RNA, 32 nt, Human
ggcccacacuuguaaucccagcacuuugggag

SEQ ID NO: 190853 - RNA, 32 nt, Human
ggcccacagcacucugaacaggcacagcccuc

SEQ ID NO: 190854 - RNA, 19 nt, Human
ggcccacagcacugcugcc

SEQ ID NO: 190855 - RNA, 32 nt, Human
ggcccacagccccagagagccugucugugcau

SEQ ID NO: 190856 - RNA, 32 nt, Human
ggcccacaggcagggcaagucucgguggcccu

SEQ ID NO: 190857 - RNA, 32 nt, Human
ggcccacaggccaggcuucggugcuaccucag

SEQ ID NO: 190858 - RNA, 20 nt, Human
ggcccacaggcgguccugcc

SEQ ID NO: 190859 - RNA, 20 nt, Human
ggcccacauaucccaucacu

SEQ ID NO: 190860 - RNA, 32 nt, Human
ggcccacaucuguaaucccagcacuuugggag

SEQ ID NO: 190861 - RNA, 32 nt, Human
ggcccacauggugaaacccaugucuacuaaaa

SEQ ID NO: 190862 - RNA, 32 nt, Human
ggcccacauggugaaaccccaucuuuacuaaa

SEQ ID NO: 190863 - RNA, 32 nt, Human
ggcccacauggugaaacccugucucuacuaaa

SEQ ID NO: 190864 - RNA, 19 nt, Human
ggcccacauuuaaguggga

SEQ ID NO: 190865 - RNA, 21 nt, Human
ggcccaccaaguguguaccau

SEQ ID NO: 190866 - RNA, 32 nt, Human
ggcccaccaaguuugaggaggguggugcuuuc

SEQ ID NO: 190867 - RNA, 23 nt, Human
ggcccaccacaaccugcugggcc

SEQ ID NO: 190868 - RNA, 19 nt, Human
ggcccaccagaguccugcu

SEQ ID NO: 190869 - RNA, 32 nt, Human
ggcccaccagccgccacacacagcuugggccu

SEQ ID NO: 190870 - RNA, 32 nt, Human
ggcccaccauggcucucgggccugugccccuc

SEQ ID NO: 190871 - RNA, 32 nt, Human
ggcccacccaaccuugaagagagucaagucua

SEQ ID NO: 190872 - RNA, 32 nt, Human
ggcccacccaggccuggagcugggaugcaaug

SEQ ID NO: 190873 - RNA, 32 nt, Human
ggcccacccaguggccgagccugcugcugcuc

SEQ ID NO: 190874 - RNA, 32 nt, Human
ggcccacccaucucccuagcauaaggucugcu

SEQ ID NO: 190875 - RNA, 22 nt, Human
ggcccaccccagagccaagaga

SEQ ID NO: 190876 - RNA, 15 nt, Human
ggcccaccccuccca

SEQ ID NO: 190877 - RNA, 19 nt, Human
ggcccaccccuggcuccac

SEQ ID NO: 190878 - RNA, 32 nt, Human
ggcccacccgggcucgcgucuccguuucuccg

SEQ ID NO: 190879 - RNA, 32 nt, Human
ggcccacccugccuacuucccuacugacaagu

SEQ ID NO: 190880 - RNA, 32 nt, Human
ggcccacccugccugcaccuccgcgggcugac

SEQ ID NO: 190881 - RNA, 32 nt, Human
ggcccaccgagcccugguguggcagcggcuca

SEQ ID NO: 190882 - RNA, 22 nt, Human
ggcccaccgcccauccugcaca

SEQ ID NO: 190883 - RNA, 21 nt, Human
ggcccaccgccucccaccaca

SEQ ID NO: 190884 - RNA, 32 nt, Human
ggcccaccuagaggcuuucuuggucagugccu

SEQ ID NO: 190885 - RNA, 32 nt, Human
ggcccaccuccuggcccucuuggaggucugug

SEQ ID NO: 190886 - RNA, 32 nt, Human
ggcccaccucuucuccaagcuggccuucuguu

SEQ ID NO: 190887 - RNA, 18 nt, Human
ggcccaccuucugcuucc

SEQ ID NO: 190888 - RNA, 32 nt, Human
ggcccacgaaaucugcuacuccguauuauguc

SEQ ID NO: 190889 - RNA, 32 nt, Human
ggcccacgacaguugcucaagagccauuucgg

SEQ ID NO: 190890 - RNA, 20 nt, Human
ggcccacgccuguaauccca

SEQ ID NO: 190891 - RNA, 32 nt, Human
ggcccacgccuguaaucccagcacuuugggag

SEQ ID NO: 190892 - RNA, 32 nt, Human
ggcccacgccuguaaucccagcuacucgggag

SEQ ID NO: 190893 - RNA, 32 nt, Human
ggcccacgccuguaaucccagcuacuuggaag

SEQ ID NO: 190894 - RNA, 31 nt, Human
ggcccacgcugccccuggccuguguuaggca

SEQ ID NO: 190895 - RNA, 32 nt, Human
ggcccacggagcccaccaugccgcgcccggcc

SEQ ID NO: 190896 - RNA, 21 nt, Human
ggcccacgggcagcagaguga

SEQ ID NO: 190897 - RNA, 32 nt, Human
ggcccacgggguaggcggggaggcggaagcgg

SEQ ID NO: 190898 - RNA, 24 nt, Human
ggcccacgguggaggccucaggca

SEQ ID NO: 190899 - RNA, 18 nt, Human
ggcccacgugccccgagc

SEQ ID NO: 190900 - RNA, 32 nt, Human
ggcccacguggaggcugggcaggaagggccug

SEQ ID NO: 190901 - RNA, 23 nt, Human
ggcccacuacagccccagccucc

SEQ ID NO: 190902 - RNA, 32 nt, Human
ggcccacucacgccuucacuccugggcccggg

SEQ ID NO: 190903 - RNA, 21 nt, Human
ggcccacucccaccugcugcc

SEQ ID NO: 190904 - RNA, 21 nt, Human
ggcccacucuacccuacccca

SEQ ID NO: 190905 - RNA, 23 nt, Human
ggcccacucuccucucuccuucu

SEQ ID NO: 190906 - RNA, 19 nt, Human
ggcccacucugccccaggg

SEQ ID NO: 190907 - RNA, 32 nt, Human
ggcccacugaaaccuccaccucccggguucaa

SEQ ID NO: 190908 - RNA, 32 nt, Human
ggcccacugcaaccucugccucccggguucaa

SEQ ID NO: 190909 - RNA, 32 nt, Human
ggcccacugcaaccucugccuccuggguucaa

SEQ ID NO: 190910 - RNA, 24 nt, Human
ggcccacugcaaccucugcuuccu

SEQ ID NO: 190911 - RNA, 32 nt, Human
ggcccacugcaaccucugcuuccuagguucaa

SEQ ID NO: 190912 - RNA, 19 nt, Human
ggcccacugcaagcuccgc

SEQ ID NO: 190913 - RNA, 23 nt, Human
ggcccacugcaagcuccgccucc

SEQ ID NO: 190914 - RNA, 32 nt, Human
ggcccacugcaagcuccgccucccagguucac

SEQ ID NO: 190915 - RNA, 20 nt, Human
ggcccacugcaggacaggug

SEQ ID NO: 190916 - RNA, 32 nt, Human
ggcccacugcucagcccagcuguauguagaag

SEQ ID NO: 190917 - RNA, 32 nt, Human
ggcccacuggaagcauccagaacagcaccacc

SEQ ID NO: 190918 - RNA, 20 nt, Human
ggcccacugugccucagaga

SEQ ID NO: 190919 - RNA, 32 nt, Human
ggcccacugugccucagagaccagggcuccag

SEQ ID NO: 190920 - RNA, 32 nt, Human
ggcccacuuuaugguuugcagauggcuaccuu

SEQ ID NO: 190921 - RNA, 32 nt, Human
ggcccagaaaccagagccauuugucucagacc

SEQ ID NO: 190922 - RNA, 32 nt, Human
ggcccagaaagacuagccagaggccugauggu

SEQ ID NO: 190923 - RNA, 22 nt, Human
ggcccagaacacccagccuccu

SEQ ID NO: 190924 - RNA, 32 nt, Human
ggcccagaacacucauggcacauuuguuuaau

SEQ ID NO: 190925 - RNA, 32 nt, Human
ggcccagaacgguccucacacauccgggugau

SEQ ID NO: 190926 - RNA, 32 nt, Human
ggcccagaacuuucuccagucagccuccacag

SEQ ID NO: 190927 - RNA, 32 nt, Human
ggcccagaacuuucuccagucagccucuacag

SEQ ID NO: 190928 - RNA, 32 nt, Human
ggcccagaagccaucagaauuaucaguggaga

SEQ ID NO: 190929 - RNA, 32 nt, Human
ggcccagaaggaggaggagaugaaggugaagc

SEQ ID NO: 190930 - RNA, 32 nt, Human
ggcccagaagguugcgaugaagaaaagcgggc

SEQ ID NO: 190931 - RNA, 24 nt, Human
ggcccagaauggccuguugccaua

SEQ ID NO: 190932 - RNA, 21 nt, Human
ggcccagacaacucuacccca

SEQ ID NO: 190933 - RNA, 32 nt, Human
ggcccagacaacucuaccccacugccuagaag

SEQ ID NO: 190934 - RNA, 20 nt, Human
ggcccagacacacggucccu

SEQ ID NO: 190935 - RNA, 22 nt, Human
ggcccagacagaaggaucgcuu

SEQ ID NO: 190936 - RNA, 22 nt, Human
ggcccagacagccaggcugugg

SEQ ID NO: 190937 - RNA, 23 nt, Human
ggcccagaccacugucuccaccc

SEQ ID NO: 190938 - RNA, 24 nt, Human
ggcccagaccagccagggcuccuu

SEQ ID NO: 190939 - RNA, 23 nt, Human
ggcccagaccaugcaggcccccu

SEQ ID NO: 190940 - RNA, 23 nt, Human
ggcccagacccaaccuggccccu

SEQ ID NO: 190941 - RNA, 21 nt, Human
ggcccagacccagcccagccu

SEQ ID NO: 190942 - RNA, 20 nt, Human
ggcccagaccccagccuccc

SEQ ID NO: 190943 - RNA, 32 nt, Human
ggcccagaccccaucaccaagacuggccaccc

SEQ ID NO: 190944 - RNA, 20 nt, Human
ggcccagaccccuagucccu

SEQ ID NO: 190945 - RNA, 26 nt, Human
ggcccagaccuacacuuggagcccag

SEQ ID NO: 190946 - RNA, 18 nt, Human
ggcccagaccucgggccc

SEQ ID NO: 190947 - RNA, 32 nt, Human
ggcccagaccuucagaggcucagucuguugag

SEQ ID NO: 190948 - RNA, 20 nt, Human
ggcccagacgccaaagcccu

SEQ ID NO: 190949 - RNA, 21 nt, Human
ggcccagacuauccagaguga

SEQ ID NO: 190950 - RNA, 22 nt, Human
ggcccagacuggcggaucaccu

SEQ ID NO: 190951 - RNA, 32 nt, Human
ggcccagagaagcagaacagcccagagcccca

SEQ ID NO: 190952 - RNA, 20 nt, Human
ggcccagagagccagagugg

SEQ ID NO: 190953 - RNA, 32 nt, Human
ggcccagagagggaggcccaggugcagggagc

SEQ ID NO: 190954 - RNA, 32 nt, Human
ggcccagagaugaccguccuauuugcccaccg

SEQ ID NO: 190955 - RNA, 23 nt, Human
ggcccagagauuuggauucccuu

SEQ ID NO: 190956 - RNA, 32 nt, Human
ggcccagagcagaccugcauaucugagcaaaa

SEQ ID NO: 190957 - RNA, 20 nt, Human
ggcccagagcaguccucccu

SEQ ID NO: 190958 - RNA, 21 nt, Human
ggcccagagccaggccgcccu

SEQ ID NO: 190959 - RNA, 32 nt, Human
ggcccagagcccagagcaaccagcacaauagc

SEQ ID NO: 190960 - RNA, 18 nt, Human
ggcccagagccgggaccc

SEQ ID NO: 190961 - RNA, 20 nt, Human
ggcccagaggaagcccaggg

SEQ ID NO: 190962 - RNA, 21 nt, Human
ggcccagaggcccucucccca

SEQ ID NO: 190963 - RNA, 32 nt, Human
ggcccagaggcugcccucugagguccccacuc

SEQ ID NO: 190964 - RNA, 20 nt, Human
ggcccagaggucuggguccc

SEQ ID NO: 190965 - RNA, 32 nt, Human
ggcccagaguccagccguccagcugcuccuuu

SEQ ID NO: 190966 - RNA, 23 nt, Human
ggcccagaguuuucagggcacag

SEQ ID NO: 190967 - RNA, 19 nt, Human
ggcccagaucacagauccc

SEQ ID NO: 190968 - RNA, 32 nt, Human
ggcccagauccaaggccgcggcccagacccac

SEQ ID NO: 190969 - RNA, 21 nt, Human
ggcccagaucccccugcccca

SEQ ID NO: 190970 - RNA, 21 nt, Human
ggcccagauccuccacuccca

SEQ ID NO: 190971 - RNA, 22 nt, Human
ggcccagauccucuggacuccu

SEQ ID NO: 190972 - RNA, 20 nt, Human
ggcccagaucucugaccaca

SEQ ID NO: 190973 - RNA, 32 nt, Human
ggcccagaucuucucaccuaggacuuuuuaaa

SEQ ID NO: 190974 - RNA, 22 nt, Human
ggcccagaugagccggcagcau

SEQ ID NO: 190975 - RNA, 20 nt, Human
ggcccagaugauggagcaua

SEQ ID NO: 190976 - RNA, 32 nt, Human
ggcccagaugcaggccaucaaggguguggugg

SEQ ID NO: 190977 - RNA, 32 nt, Human
ggcccagauuuguuuguaaagcacuuugacuc

SEQ ID NO: 190978 - RNA, 31 nt, Human
ggcccagcaaacuugguuacauuccucagca

SEQ ID NO: 190979 - RNA, 32 nt, Human
ggcccagcaacagaccuugaagacugaaaucu

SEQ ID NO: 190980 - RNA, 21 nt, Human
ggcccagcacaagcccugcuu

SEQ ID NO: 190981 - RNA, 32 nt, Human
ggcccagcacuagaggaagacaaggaucccgc

SEQ ID NO: 190982 - RNA, 32 nt, Human
ggcccagcacugcccaucccaccccaugaggc

SEQ ID NO: 190983 - RNA, 32 nt, Human
ggcccagcacuuccucagacacaacuucuucc

SEQ ID NO: 190984 - RNA, 21 nt, Human
ggcccagcagacccugcuguc

SEQ ID NO: 190985 - RNA, 32 nt, Human
ggcccagcagaggcgcuccucacaucccggac

SEQ ID NO: 190986 - RNA, 19 nt, Human
ggcccagcagagggaguag

SEQ ID NO: 190987 - RNA, 17 nt, Human
ggcccagcagagggcag

SEQ ID NO: 190988 - RNA, 32 nt, Human
ggcccagcagagggcagcacccccaucauuuu

SEQ ID NO: 190989 - RNA, 32 nt, Human
ggcccagcagcaggagcuccaggcuggcugga

SEQ ID NO: 190990 - RNA, 24 nt, Human
ggcccagcagcaucucagccuccu

SEQ ID NO: 190991 - RNA, 23 nt, Human
ggcccagcagcccagccaucacu

SEQ ID NO: 190992 - RNA, 18 nt, Human
ggcccagcagcucacaga

SEQ ID NO: 190993 - RNA, 32 nt, Human
ggcccagcagcuccuguggccacagcagcuuu

SEQ ID NO: 190994 - RNA, 20 nt, Human
ggcccagcagcugccccugg

SEQ ID NO: 190995 - RNA, 32 nt, Human
ggcccagcaggcggggguuugagcccuggacc

SEQ ID NO: 190996 - RNA, 32 nt, Human
ggcccagcaguccaggagguggagcucucggg

SEQ ID NO: 190997 - RNA, 32 nt, Human
ggcccagcauucuccacccuuaacccugugcu

SEQ ID NO: 190998 - RNA, 32 nt, Human
ggcccagccaacuccuggaaugagccgggagg

SEQ ID NO: 190999 - RNA, 21 nt, Human
ggcccagccacagccacagcc

SEQ ID NO: 191000 - RNA, 18 nt, Human
ggcccagccacagcuccc

SEQ ID NO: 191001 - RNA, 23 nt, Human
ggcccagccaccaggacagcagg

SEQ ID NO: 191002 - RNA, 20 nt, Human
ggcccagccacccccagggg

SEQ ID NO: 191003 - RNA, 32 nt, Human
ggcccagccacguguuugcagcgaccagaguc

SEQ ID NO: 191004 - RNA, 32 nt, Human
ggcccagccacugcacuucaccggaugccguc

SEQ ID NO: 191005 - RNA, 20 nt, Human
ggcccagccagcccucugca

SEQ ID NO: 191006 - RNA, 32 nt, Human
ggcccagccccgagccugccucccucuuggcc

SEQ ID NO: 191007 - RNA, 32 nt, Human
ggcccagccccuccagcuccagcgaccccacc

SEQ ID NO: 191008 - RNA, 19 nt, Human
ggcccagccccucucaguc

SEQ ID NO: 191009 - RNA, 32 nt, Human
ggcccagccccucuccccucugucuugauccc

SEQ ID NO: 191010 - RNA, 32 nt, Human
ggcccagccgccgcccugcuccaggcucuagg

SEQ ID NO: 191011 - RNA, 26 nt, Human
ggcccagccgugcccagcuccaagca

SEQ ID NO: 191012 - RNA, 32 nt, Human
ggcccagccuccaucuucgucucucaggacgg

SEQ ID NO: 191013 - RNA, 18 nt, Human
ggcccagccucuauggcc

SEQ ID NO: 191014 - RNA, 23 nt, Human
ggcccagccucugccucacagca

SEQ ID NO: 191015 - RNA, 18 nt, Human
ggcccagccucugcuguc

SEQ ID NO: 191016 - RNA, 32 nt, Human
ggcccagccugccugccgcaccccuguggccu

SEQ ID NO: 191017 - RNA, 21 nt, Human
ggcccagccuggcccccaagc

SEQ ID NO: 191018 - RNA, 22 nt, Human
ggcccagccuguggccucagca

SEQ ID NO: 191019 - RNA, 32 nt, Human
ggcccagccuucacagcgcuccagaagaagcu

SEQ ID NO: 191020 - RNA, 18 nt, Human
ggcccagccuuccugcug

SEQ ID NO: 191021 - RNA, 20 nt, Human
ggcccagccuuccugcugcc

SEQ ID NO: 191022 - RNA, 32 nt, Human
ggcccagccuucuccccuguuacccauaauuc

SEQ ID NO: 191023 - RNA, 32 nt, Human
ggcccagcggacaaccugggaacacauccugg

SEQ ID NO: 191024 - RNA, 32 nt, Human
ggcccagcguuacuuuucuugauaagaauuua

SEQ ID NO: 191025 - RNA, 32 nt, Human
ggcccagcucaggccucacgguggccucucca

SEQ ID NO: 191026 - RNA, 32 nt, Human
ggcccagcucaggccucgcgguggccucucca

SEQ ID NO: 191027 - RNA, 32 nt, Human
ggcccagcucaugcuucuuugcagccucucca

SEQ ID NO: 191028 - RNA, 18 nt, Human
ggcccagcucccauggcc

SEQ ID NO: 191029 - RNA, 19 nt, Human
ggcccagcuccuccugccu

SEQ ID NO: 191030 - RNA, 20 nt, Human
ggcccagcuccugucccagg

SEQ ID NO: 191031 - RNA, 32 nt, Human
ggcccagcucggaaggugcguggagaaggcuc

SEQ ID NO: 191032 - RNA, 32 nt, Human
ggcccagcucugcccuucaucccuucagcacc

SEQ ID NO: 191033 - RNA, 32 nt, Human
ggcccagcucuggagugcaugugugugugcuc

SEQ ID NO: 191034 - RNA, 32 nt, Human
ggcccagcucuguccuccagagccuagcgucu

SEQ ID NO: 191035 - RNA, 32 nt, Human
ggcccagcugaacccagguuaggggcagauca

SEQ ID NO: 191036 - RNA, 24 nt, Human
ggcccagcugccaaugaaucagua

SEQ ID NO: 191037 - RNA, 21 nt, Human
ggcccagcugccagaccucag

SEQ ID NO: 191038 - RNA, 27 nt, Human
ggcccagcugccagggaagacagagca

SEQ ID NO: 191039 - RNA, 22 nt, Human
ggcccagcuggcuuuugcugcc

SEQ ID NO: 191040 - RNA, 22 nt, Human
ggcccagcugggccuggagcca

SEQ ID NO: 191041 - RNA, 22 nt, Human
ggcccaggaacuggagccacag

SEQ ID NO: 191042 - RNA, 32 nt, Human
ggcccaggaacuguuguuuucucaggauucuu

SEQ ID NO: 191043 - RNA, 22 nt, Human
ggcccaggaagcccacacuaug

SEQ ID NO: 191044 - RNA, 32 nt, Human
ggcccaggaaggugccuggcccagaauaagga

SEQ ID NO: 191045 - RNA, 19 nt, Human
ggcccaggacuugggccuc

SEQ ID NO: 191046 - RNA, 32 nt, Human
ggcccaggagaauaacuuuucccagcugacag

SEQ ID NO: 191047 - RNA, 32 nt, Human
ggcccaggagaccccaccucuggcagagccac

SEQ ID NO: 191048 - RNA, 32 nt, Human
ggcccaggagauccuacucucccccgagcacc

SEQ ID NO: 191049 - RNA, 32 nt, Human
ggcccaggagauggagguugcggugagugggg

SEQ ID NO: 191050 - RNA, 21 nt, Human
ggcccaggagcucugcgccag

SEQ ID NO: 191051 - RNA, 26 nt, Human
ggcccaggaggcagagguugcaguga

SEQ ID NO: 191052 - RNA, 32 nt, Human
ggcccaggaggcagagguugcagugagcugag

SEQ ID NO: 191053 - RNA, 32 nt, Human
ggcccaggaggcagcuggguugcauggagagg

SEQ ID NO: 191054 - RNA, 21 nt, Human
ggcccaggaggcugaagacag

SEQ ID NO: 191055 - RNA, 21 nt, Human
ggcccaggagguccucaagca

SEQ ID NO: 191056 - RNA, 26 nt, Human
ggcccaggagguggagguugcaguga

SEQ ID NO: 191057 - RNA, 32 nt, Human
ggcccaggagguggagguugcagugagccgag

SEQ ID NO: 191058 - RNA, 32 nt, Human
ggcccaggagguuucuucucccugggagggcu

SEQ ID NO: 191059 - RNA, 32 nt, Human
ggcccaggaguucaaggcugcagugagcuaug

SEQ ID NO: 191060 - RNA, 32 nt, Human
ggcccaggaguuugaggcugcagugagccauc

SEQ ID NO: 191061 - RNA, 32 nt, Human
ggcccaggaugguggaggcugaggaacuggca

SEQ ID NO: 191062 - RNA, 32 nt, Human
ggcccaggcaaaugccagugugcaccaggcug

SEQ ID NO: 191063 - RNA, 32 nt, Human
ggcccaggcacuaccugcuggcucccaccuau

SEQ ID NO: 191064 - RNA, 19 nt, Human
ggcccaggcagcuggacag

SEQ ID NO: 191065 - RNA, 32 nt, Human
ggcccaggcaggcgggucaugaggucaggaga

SEQ ID NO: 191066 - RNA, 20 nt, Human
ggcccaggccaaccgugcac

SEQ ID NO: 191067 - RNA, 32 nt, Human
ggcccaggccaagauggagaaggcagccaaug

SEQ ID NO: 191068 - RNA, 23 nt, Human
ggcccaggccagcugaguccguu

SEQ ID NO: 191069 - RNA, 21 nt, Human
ggcccaggccagggcagccag

SEQ ID NO: 191070 - RNA, 21 nt, Human
ggcccaggccccaggagccag

SEQ ID NO: 191071 - RNA, 19 nt, Human
ggcccaggcccgagccccu

SEQ ID NO: 191072 - RNA, 18 nt, Human
ggcccaggcccgcgcccg

SEQ ID NO: 191073 - RNA, 32 nt, Human
ggcccaggcccuccaaccauaaacaguccagg

SEQ ID NO: 191074 - RNA, 23 nt, Human
ggcccaggccgaggaccugccag

SEQ ID NO: 191075 - RNA, 21 nt, Human
ggcccaggccgcagggggccc

SEQ ID NO: 191076 - RNA, 32 nt, Human
ggcccaggccuguaaucccaucacuuugggag

SEQ ID NO: 191077 - RNA, 19 nt, Human
ggcccaggccuguugaucc

SEQ ID NO: 191078 - RNA, 15 nt, Human
ggcccaggcgggcac

SEQ ID NO: 191079 - RNA, 32 nt, Human
ggcccaggcucuccccugacccauccucgcuc

SEQ ID NO: 191080 - RNA, 23 nt, Human
ggcccaggcucuuuggaagacag

SEQ ID NO: 191081 - RNA, 32 nt, Human
ggcccaggcugaagcucagggcccugucugcu

SEQ ID NO: 191082 - RNA, 24 nt, Human
ggcccaggcugccugcagaaccag

SEQ ID NO: 191083 - RNA, 32 nt, Human
ggcccaggcugggagagggagcagggcggcgg

SEQ ID NO: 191084 - RNA, 20 nt, Human
ggcccagggagaggccauga

SEQ ID NO: 191085 - RNA, 32 nt, Human
ggcccagggaggauugcugcucggaugaagga

SEQ ID NO: 191086 - RNA, 32 nt, Human
ggcccagggaggcuaagaguccugccaggauc

SEQ ID NO: 191087 - RNA, 32 nt, Human
ggcccagggcaaaggccucuccccagaggaug

SEQ ID NO: 191088 - RNA, 21 nt, Human
ggcccagggcagcugauuccc

SEQ ID NO: 191089 - RNA, 21 nt, Human
ggcccagggcccagagcccag

SEQ ID NO: 191090 - RNA, 20 nt, Human
ggcccagggcgggggcagcu

SEQ ID NO: 191091 - RNA, 32 nt, Human
ggcccagggcucaggcuaccagcuggacuucu

SEQ ID NO: 191092 - RNA, 32 nt, Human
ggcccagggcugcguuugcuccuggccccuua

SEQ ID NO: 191093 - RNA, 32 nt, Human
ggcccaggggcaagugacaccugcugagagag

SEQ ID NO: 191094 - RNA, 32 nt, Human
ggcccagggggcagcuggaguggugcucuggg

SEQ ID NO: 191095 - RNA, 32 nt, Human
ggcccaggguccagggcccaggagagagaagc

SEQ ID NO: 191096 - RNA, 22 nt, Human
ggcccagggugcgcuggagcac

SEQ ID NO: 191097 - RNA, 32 nt, Human
ggcccaggguggccuugguggcuuccacgugc

SEQ ID NO: 191098 - RNA, 32 nt, Human
ggcccaggguucccagagcagugauggaggag

SEQ ID NO: 191099 - RNA, 32 nt, Human
ggcccaggucaggccucacgguggccucucca

SEQ ID NO: 191100 - RNA, 32 nt, Human
ggcccaggucauggugcuuagaggaggagccu

SEQ ID NO: 191101 - RNA, 21 nt, Human
ggcccaggucccaaaucucuu

SEQ ID NO: 191102 - RNA, 32 nt, Human
ggcccaggucuccucagccucugccccaguuc

SEQ ID NO: 191103 - RNA, 19 nt, Human
ggcccaggucugggccccu

SEQ ID NO: 191104 - RNA, 21 nt, Human
ggcccaggugagcugaagaca

SEQ ID NO: 191105 - RNA, 32 nt, Human
ggcccaggugcaacccccagcccaggaggaga

SEQ ID NO: 191106 - RNA, 21 nt, Human
ggcccagguggggccaggcug

SEQ ID NO: 191107 - RNA, 22 nt, Human
ggcccagguggucccauugcca

SEQ ID NO: 191108 - RNA, 32 nt, Human
ggcccagguggugagcgguuugcaguguccgu

SEQ ID NO: 191109 - RNA, 22 nt, Human
ggcccaggugugcugggccccu

SEQ ID NO: 191110 - RNA, 21 nt, Human
ggcccagguuugcucucccca

SEQ ID NO: 191111 - RNA, 22 nt, Human
ggcccaguagccccacugaagc

SEQ ID NO: 191112 - RNA, 32 nt, Human
ggcccagucacugggaaggagccccagagagc

SEQ ID NO: 191113 - RNA, 32 nt, Human
ggcccagucccauccagagcauggagcccgac

SEQ ID NO: 191114 - RNA, 32 nt, Human
ggcccagucuccaggaucaacacagucaguuu

SEQ ID NO: 191115 - RNA, 32 nt, Human
ggcccagucugcccacaauccuggcccugagc

SEQ ID NO: 191116 - RNA, 32 nt, Human
ggcccagucuuguccuccucugucaccgacuu

SEQ ID NO: 191117 - RNA, 22 nt, Human
ggcccagugagccgggucccuu

SEQ ID NO: 191118 - RNA, 32 nt, Human
ggcccagugauggaagcagcuagugaacgauu

SEQ ID NO: 191119 - RNA, 32 nt, Human
ggcccagugccaggcugggcccaagugucgau

SEQ ID NO: 191120 - RNA, 32 nt, Human
ggcccagugggauugagggggcuggguccccc

SEQ ID NO: 191121 - RNA, 32 nt, Human
ggcccaguggggaggagcaggagccugagccu

SEQ ID NO: 191122 - RNA, 21 nt, Human
ggcccagugggggccagagga

SEQ ID NO: 191123 - RNA, 32 nt, Human
ggcccaguggguggguggggugggguggggca

SEQ ID NO: 191124 - RNA, 21 nt, Human
ggcccaguguccccuucugcc

SEQ ID NO: 191125 - RNA, 20 nt, Human
ggcccaguucucaugcugcc

SEQ ID NO: 191126 - RNA, 23 nt, Human
ggcccauccaagggccacuccac

SEQ ID NO: 191127 - RNA, 32 nt, Human
ggcccaucccagauguuugugauguccugaaa

SEQ ID NO: 191128 - RNA, 32 nt, Human
ggcccauccccaggcaccucacaggccccagg

SEQ ID NO: 191129 - RNA, 32 nt, Human
ggcccauccuagaccagaggagcccaggcccu

SEQ ID NO: 191130 - RNA, 32 nt, Human
ggcccauccucccacaucuugccauuaccagu

SEQ ID NO: 191131 - RNA, 21 nt, Human
ggcccaucgagccggguccag

SEQ ID NO: 191132 - RNA, 32 nt, Human
ggcccaucucagaauuaacgcuuugauggcau

SEQ ID NO: 191133 - RNA, 32 nt, Human
ggcccaucucagaauugcaaaucugucagguu

SEQ ID NO: 191134 - RNA, 19 nt, Human
ggcccaucucuucugugcc

SEQ ID NO: 191135 - RNA, 19 nt, Human
ggcccaucugccugcugcc

SEQ ID NO: 191136 - RNA, 32 nt, Human
ggcccaucugcuucugucggugccucagugcc

SEQ ID NO: 191137 - RNA, 32 nt, Human
ggcccaucugucuccccuuggggccaccucuc

SEQ ID NO: 191138 - RNA, 32 nt, Human
ggcccaucuucugugggccccuucccagacac

SEQ ID NO: 191139 - RNA, 32 nt, Human
ggcccaugaaagucuuacugggcccuggggaa

SEQ ID NO: 191140 - RNA, 21 nt, Human
ggcccaugaggccauccaggu

SEQ ID NO: 191141 - RNA, 32 nt, Human
ggcccaugauccucaucggugggugcccauca

SEQ ID NO: 191142 - RNA, 32 nt, Human
ggcccaugcacuuggagaccagccugguuccc

SEQ ID NO: 191143 - RNA, 32 nt, Human
ggcccaugcagggugagggaaaggguagaggu

SEQ ID NO: 191144 - RNA, 23 nt, Human
ggcccaugccagcaucccaguga

SEQ ID NO: 191145 - RNA, 32 nt, Human
ggcccaugcccaggaugagggacaggugcagc

SEQ ID NO: 191146 - RNA, 20 nt, Human
ggcccaugccuauaauccca

SEQ ID NO: 191147 - RNA, 32 nt, Human
ggcccaugccuauaaucccagcacuuugggag

SEQ ID NO: 191148 - RNA, 20 nt, Human
ggcccaugccuguaauccca

SEQ ID NO: 191149 - RNA, 32 nt, Human
ggcccaugccuguaaucccagcacuuugggag

SEQ ID NO: 191150 - RNA, 32 nt, Human
ggcccaugccuguaaucccagcacuuuggggg

SEQ ID NO: 191151 - RNA, 32 nt, Human
ggcccaugccuguaaucucagcacucugggag

SEQ ID NO: 191152 - RNA, 22 nt, Human
ggcccaugccuguagccccagc

SEQ ID NO: 191153 - RNA, 22 nt, Human
ggcccaugccuguagucccagc

SEQ ID NO: 191154 - RNA, 32 nt, Human
ggcccaugccuguagucccagcuacucaggag

SEQ ID NO: 191155 - RNA, 32 nt, Human
ggcccaugccuguagugccagcauuuugggag

SEQ ID NO: 191156 - RNA, 32 nt, Human
ggcccaugccuguuaucccagcacuuggggag

SEQ ID NO: 191157 - RNA, 32 nt, Human
ggcccaugcucuggcagagagacucggaguaa

SEQ ID NO: 191158 - RNA, 31 nt, Human
ggcccauggacaaucuccaccucacgcuucu

SEQ ID NO: 191159 - RNA, 32 nt, Human
ggcccauggauuugaaagaagcugcugcaccc

SEQ ID NO: 191160 - RNA, 21 nt, Human
ggcccauggcugauuuuacca

SEQ ID NO: 191161 - RNA, 32 nt, Human
ggcccauggcuucacacugggcucaggcugcg

SEQ ID NO: 191162 - RNA, 21 nt, Human
ggcccauggggcugggccccu

SEQ ID NO: 191163 - RNA, 32 nt, Human
ggcccauguaggcugagcucagcugguccauc

SEQ ID NO: 191164 - RNA, 32 nt, Human
ggcccauguauaccuauguaacaaaccugcac

SEQ ID NO: 191165 - RNA, 32 nt, Human
ggcccaugucacaaacccuaucucaggaauuu

SEQ ID NO: 191166 - RNA, 17 nt, Human
ggcccaugugagcauca

SEQ ID NO: 191167 - RNA, 25 nt, Human
ggcccauuaggucccucacuccaca

SEQ ID NO: 191168 - RNA, 32 nt, Human
ggcccauugccaccugaggaaaugccuuggag

SEQ ID NO: 191169 - RNA, 22 nt, Human
ggcccauugcccacccacccau

SEQ ID NO: 191170 - RNA, 32 nt, Human
ggcccauugcccacccacccaucucacuaugc

SEQ ID NO: 191171 - RNA, 32 nt, Human
ggcccauugcuuguaguuaguugauccauguc

SEQ ID NO: 191172 - RNA, 17 nt, Human
ggcccauuuaugucccu

SEQ ID NO: 191173 - RNA, 32 nt, Human
ggcccauuucaucucuggcagugccuuggcgg

SEQ ID NO: 191174 - RNA, 32 nt, Human
ggcccauuucccuccugucucccgggggcucu

SEQ ID NO: 191175 - RNA, 18 nt, Human
ggccccaacuccccaggg

SEQ ID NO: 191176 - RNA, 32 nt, Human
ggccccaagacccaguuccuuuacagaaucaa

SEQ ID NO: 191177 - RNA, 32 nt, Human
ggccccaagaggagaggagaagugcugagguu

SEQ ID NO: 191178 - RNA, 15 nt, Human
ggccccaagccccug

SEQ ID NO: 191179 - RNA, 21 nt, Human
ggccccacacccaccaggguc

SEQ ID NO: 191180 - RNA, 22 nt, Human
ggccccacacccagcccugccu

SEQ ID NO: 191181 - RNA, 19 nt, Human
ggccccacaccgccagcug

SEQ ID NO: 191182 - RNA, 20 nt, Human
ggccccacacuuucugcgcc

SEQ ID NO: 191183 - RNA, 32 nt, Human
ggccccacagcagugugggccgauccuguuua

SEQ ID NO: 191184 - RNA, 32 nt, Human
ggccccacagccgagacgacguguccagugac

SEQ ID NO: 191185 - RNA, 32 nt, Human
ggccccacaguaugucagcuguauaggcaaua

SEQ ID NO: 191186 - RNA, 20 nt, Human
ggccccaccaaaguccugcc

SEQ ID NO: 191187 - RNA, 32 nt, Human
ggccccacccacccucugguccuucugacccc

SEQ ID NO: 191188 - RNA, 32 nt, Human
ggccccacccagcagacugaggggcagaggca

SEQ ID NO: 191189 - RNA, 32 nt, Human
ggccccacccccaggaagcauggauggggaug

SEQ ID NO: 191190 - RNA, 32 nt, Human
ggccccacccccgggcggucacggugacccau

SEQ ID NO: 191191 - RNA, 24 nt, Human
ggccccacccgggccuuccaguga

SEQ ID NO: 191192 - RNA, 32 nt, Human
ggccccacccucaccagccugggcagcagcaa

SEQ ID NO: 191193 - RNA, 23 nt, Human
ggccccacccuggagucuugccu

SEQ ID NO: 191194 - RNA, 18 nt, Human
ggccccaccucuucugcc

SEQ ID NO: 191195 - RNA, 21 nt, Human
ggccccaccugcuccucaggg

SEQ ID NO: 191196 - RNA, 22 nt, Human
ggccccaccuuccaacacuguu

SEQ ID NO: 191197 - RNA, 22 nt, Human
ggccccacgaagcccccagugg

SEQ ID NO: 191198 - RNA, 32 nt, Human
ggccccacguuucaagucaaaucaagcugcug

SEQ ID NO: 191199 - RNA, 32 nt, Human
ggccccacugccucucacugcccgugaguccc

SEQ ID NO: 191200 - RNA, 18 nt, Human
ggccccacugggguccag

SEQ ID NO: 191201 - RNA, 32 nt, Human
ggccccacugugcugcucuucagguccccaca

SEQ ID NO: 191202 - RNA, 32 nt, Human
ggccccacuucuuauccacccuucccucuacc

SEQ ID NO: 191203 - RNA, 32 nt, Human
ggccccacuuucaagucacccuugccacugag

SEQ ID NO: 191204 - RNA, 32 nt, Human
ggccccagaagggugaggggccagcaggaccc

SEQ ID NO: 191205 - RNA, 21 nt, Human
ggccccagaccaagccaagcc

SEQ ID NO: 191206 - RNA, 17 nt, Human
ggccccagacugggccc

SEQ ID NO: 191207 - RNA, 17 nt, Human
ggccccagagccccgca

SEQ ID NO: 191208 - RNA, 32 nt, Human
ggccccagauccuucucucuggaggaagaggg

SEQ ID NO: 191209 - RNA, 19 nt, Human
ggccccagcaagccccagc

SEQ ID NO: 191210 - RNA, 32 nt, Human
ggccccagcaaggcuggagagcagggacgugg

SEQ ID NO: 191211 - RNA, 21 nt, Human
ggccccagccagccccgacgg

SEQ ID NO: 191212 - RNA, 32 nt, Human
ggccccagcccaaacacaucuuguuuucacua

SEQ ID NO: 191213 - RNA, 32 nt, Human
ggccccagcccacuccacccugccagcagcuu

SEQ ID NO: 191214 - RNA, 18 nt, Human
ggccccagcccccagucc

SEQ ID NO: 191215 - RNA, 19 nt, Human
ggccccagccuaccugcac

SEQ ID NO: 191216 - RNA, 32 nt, Human
ggccccagccuccaugcugggucuggagggcc

SEQ ID NO: 191217 - RNA, 32 nt, Human
ggccccagccuccugccugccucuccaaggac

SEQ ID NO: 191218 - RNA, 32 nt, Human
ggccccagccuccugcucaucccuccuucuuu

SEQ ID NO: 191219 - RNA, 32 nt, Human
ggccccagccuuccucuucuuccugcucugug

SEQ ID NO: 191220 - RNA, 17 nt, Human
ggccccagcgcccgcac

SEQ ID NO: 191221 - RNA, 20 nt, Human
ggccccagcuccagccccgc

SEQ ID NO: 191222 - RNA, 21 nt, Human
ggccccagcucugcugcugcc

SEQ ID NO: 191223 - RNA, 21 nt, Human
ggccccagcugcuggcggggg

SEQ ID NO: 191224 - RNA, 23 nt, Human
ggccccagcuggcuuagaguagg

SEQ ID NO: 191225 - RNA, 32 nt, Human
ggccccagcuggggccuguugucugggacccu

SEQ ID NO: 191226 - RNA, 21 nt, Human
ggccccagcugggggcagugg

SEQ ID NO: 191227 - RNA, 21 nt, Human
ggccccagcuucccucugcac

SEQ ID NO: 191228 - RNA, 32 nt, Human
ggccccaggaacauuuauuucaucucagcauc

SEQ ID NO: 191229 - RNA, 32 nt, Human
ggccccaggaaggggccauagguaggucugaa

SEQ ID NO: 191230 - RNA, 19 nt, Human
ggccccaggaccucagcac

SEQ ID NO: 191231 - RNA, 32 nt, Human
ggccccaggacuucugaucucaguccucuggg

SEQ ID NO: 191232 - RNA, 22 nt, Human
ggccccaggagagccgcagggg

SEQ ID NO: 191233 - RNA, 25 nt, Human
ggccccaggauggcaggccaccuga

SEQ ID NO: 191234 - RNA, 21 nt, Human
ggccccaggccagccaggccc

SEQ ID NO: 191235 - RNA, 32 nt, Human
ggccccaggccuguuuggaggaugggcugggu

SEQ ID NO: 191236 - RNA, 32 nt, Human
ggccccaggcggugcuucuccccaccaccgcc

SEQ ID NO: 191237 - RNA, 18 nt, Human
ggccccaggcuggugagg

SEQ ID NO: 191238 - RNA, 21 nt, Human
ggccccaggcuuccugccagg

SEQ ID NO: 191239 - RNA, 32 nt, Human
ggccccaggcuuuccccugccucgcggccggg

SEQ ID NO: 191240 - RNA, 32 nt, Human
ggccccagggagagaauggaggacugggagga

SEQ ID NO: 191241 - RNA, 32 nt, Human
ggccccaggggagaaagaggaguagcaugaac

SEQ ID NO: 191242 - RNA, 19 nt, Human
ggccccaggggucuccacc

SEQ ID NO: 191243 - RNA, 32 nt, Human
ggccccaggucaagggcucuugggagacagcu

SEQ ID NO: 191244 - RNA, 21 nt, Human
ggccccaggucgcuugcugcc

SEQ ID NO: 191245 - RNA, 32 nt, Human
ggccccaggugaaaacuccaggcuccaaguag

SEQ ID NO: 191246 - RNA, 23 nt, Human
ggccccaggugcaggccaccacc

SEQ ID NO: 191247 - RNA, 32 nt, Human
ggccccagguggccaccuuccuucccucaagg

SEQ ID NO: 191248 - RNA, 32 nt, Human
ggccccagugccaucuugcccagcuuggcagc

SEQ ID NO: 191249 - RNA, 20 nt, Human
ggccccaguucuucucugcc

SEQ ID NO: 191250 - RNA, 32 nt, Human
ggccccaguucuucucugcccucucucccaag

SEQ ID NO: 191251 - RNA, 32 nt, Human
ggccccauccaccucccucccuugacucccag

SEQ ID NO: 191252 - RNA, 32 nt, Human
ggccccauccauuagcuuccacugccucgugu

SEQ ID NO: 191253 - RNA, 32 nt, Human
ggccccauccauuaguuuccacugccucgugu

SEQ ID NO: 191254 - RNA, 32 nt, Human
ggccccaucccccaccaccauuccuuuccucc

SEQ ID NO: 191255 - RNA, 32 nt, Human
ggccccaucccccauggucaagauccagcugc

SEQ ID NO: 191256 - RNA, 21 nt, Human
ggccccauccucacuuccucu

SEQ ID NO: 191257 - RNA, 22 nt, Human
ggccccaucucuaguuuuucca

SEQ ID NO: 191258 - RNA, 19 nt, Human
ggccccaucugcaaugcca

SEQ ID NO: 191259 - RNA, 32 nt, Human
ggccccaucuguccuuccucacagcacccuca

SEQ ID NO: 191260 - RNA, 31 nt, Human
ggccccauggagguggcggugcccgugaagc

SEQ ID NO: 191261 - RNA, 22 nt, Human
ggccccauggccuugccaguga

SEQ ID NO: 191262 - RNA, 24 nt, Human
ggccccauggucagcccuagggug

SEQ ID NO: 191263 - RNA, 22 nt, Human
ggccccauguccucucugugga

SEQ ID NO: 191264 - RNA, 32 nt, Human
ggccccauguccucuuggaggauuuuucugcc

SEQ ID NO: 191265 - RNA, 18 nt, Human
ggccccauuacugcugcc

SEQ ID NO: 191266 - RNA, 32 nt, Human
ggccccauucaagccuccuccuccaggaagcc

SEQ ID NO: 191267 - RNA, 32 nt, Human
ggccccauuccaccgccuccccaacuugagcc

SEQ ID NO: 191268 - RNA, 22 nt, Human
ggccccauugcccagagcacag

SEQ ID NO: 191269 - RNA, 20 nt, Human
ggccccauugcuuccaugcc

SEQ ID NO: 191270 - RNA, 18 nt, Human
ggcccccaaagagcaagc

SEQ ID NO: 191271 - RNA, 32 nt, Human
ggcccccaaauacucagcauuucagagugagu

SEQ ID NO: 191272 - RNA, 22 nt, Human
ggcccccaaccccuccucccuc

SEQ ID NO: 191273 - RNA, 21 nt, Human
ggcccccaacucaccagcauc

SEQ ID NO: 191274 - RNA, 24 nt, Human
ggcccccaacuccauuuccugucu

SEQ ID NO: 191275 - RNA, 20 nt, Human
ggcccccaagcagaggaggc

SEQ ID NO: 191276 - RNA, 32 nt, Human
ggcccccaagcagaggaggcugcaccucccuc

SEQ ID NO: 191277 - RNA, 20 nt, Human
ggcccccaagccggcggggc

SEQ ID NO: 191278 - RNA, 18 nt, Human
ggcccccaagccuuggua

SEQ ID NO: 191279 - RNA, 32 nt, Human
ggcccccaaggcucucuggccucuguuuccuu

SEQ ID NO: 191280 - RNA, 20 nt, Human
ggcccccaaucaucagaagg

SEQ ID NO: 191281 - RNA, 32 nt, Human
ggcccccaaugccugcccaucccaccccagca

SEQ ID NO: 191282 - RNA, 19 nt, Human
ggcccccacacccccuccu

SEQ ID NO: 191283 - RNA, 32 nt, Human
ggcccccaccacugcuuguuccgagcuccccc

SEQ ID NO: 191284 - RNA, 19 nt, Human
ggcccccacccaguccugc

SEQ ID NO: 191285 - RNA, 16 nt, Human
ggcccccaccccggga

SEQ ID NO: 191286 - RNA, 21 nt, Human
ggcccccacccucuugcugcu

SEQ ID NO: 191287 - RNA, 21 nt, Human
ggcccccacccugcugcugcc

SEQ ID NO: 191288 - RNA, 32 nt, Human
ggcccccaccuccaucgcccagccuuuuauua

SEQ ID NO: 191289 - RNA, 32 nt, Human
ggcccccacgacaagucuucuacucuagaaga

SEQ ID NO: 191290 - RNA, 20 nt, Human
ggcccccacugcaccagcaa

SEQ ID NO: 191291 - RNA, 32 nt, Human
ggcccccacugccugucgguugcuuggauucc

SEQ ID NO: 191292 - RNA, 32 nt, Human
ggcccccagaaccuggcuccagccagggggcc

SEQ ID NO: 191293 - RNA, 24 nt, Human
ggcccccagagaacaccugucccc

SEQ ID NO: 191294 - RNA, 32 nt, Human
ggcccccagaggcuuccagucucacugacaca

SEQ ID NO: 191295 - RNA, 32 nt, Human
ggcccccagagggaggucaccugggggcagcu

SEQ ID NO: 191296 - RNA, 32 nt, Human
ggcccccagcaagcucaccgccuccuuggagg

SEQ ID NO: 191297 - RNA, 22 nt, Human
ggcccccagcacacccccgggg

SEQ ID NO: 191298 - RNA, 19 nt, Human
ggcccccagcacugcucca

SEQ ID NO: 191299 - RNA, 32 nt, Human
ggcccccagccacucccuccagcagccugguu

SEQ ID NO: 191300 - RNA, 23 nt, Human
ggcccccagccccuccccuggcu

SEQ ID NO: 191301 - RNA, 20 nt, Human
ggcccccagccccucugccu

SEQ ID NO: 191302 - RNA, 18 nt, Human
ggcccccagccucccccu

SEQ ID NO: 191303 - RNA, 17 nt, Human
ggcccccagccuccccu

SEQ ID NO: 191304 - RNA, 18 nt, Human
ggcccccagccuggucca

SEQ ID NO: 191305 - RNA, 32 nt, Human
ggcccccagcucccaggagggcccacugaccc

SEQ ID NO: 191306 - RNA, 20 nt, Human
ggcccccagcuccccgcggg

SEQ ID NO: 191307 - RNA, 32 nt, Human
ggcccccagcuggcuugaggauuugaucauac

SEQ ID NO: 191308 - RNA, 22 nt, Human
ggcccccagcugguguccugcc

SEQ ID NO: 191309 - RNA, 20 nt, Human
ggcccccaggagcacugccu

SEQ ID NO: 191310 - RNA, 23 nt, Human
ggcccccaggcaaggccaccacc

SEQ ID NO: 191311 - RNA, 32 nt, Human
ggcccccaggcugaggugcacccagaggcccg

SEQ ID NO: 191312 - RNA, 18 nt, Human
ggcccccagggcuggcuu

SEQ ID NO: 191313 - RNA, 32 nt, Human
ggcccccaggggccaccaugccagcugggggc

SEQ ID NO: 191314 - RNA, 32 nt, Human
ggcccccaggugggaaaggcugggcucuuagu

SEQ ID NO: 191315 - RNA, 19 nt, Human
ggcccccagguuccugucu

SEQ ID NO: 191316 - RNA, 24 nt, Human
ggcccccaguccucuucugcugcu

SEQ ID NO: 191317 - RNA, 23 nt, Human
ggcccccagucuacaacccugca

SEQ ID NO: 191318 - RNA, 32 nt, Human
ggcccccaguggggacagggagggggaccugu

SEQ ID NO: 191319 - RNA, 25 nt, Human
ggcccccaugcucccuucucugcca

SEQ ID NO: 191320 - RNA, 32 nt, Human
ggcccccaugggccagggacagugccaaguga

SEQ ID NO: 191321 - RNA, 18 nt, Human
ggcccccaugucugcacc

SEQ ID NO: 191322 - RNA, 26 nt, Human
ggccccccaccaaccagcccccagcc

SEQ ID NO: 191323 - RNA, 16 nt, Human
ggccccccaccagcug

SEQ ID NO: 191324 - RNA, 21 nt, Human
ggccccccaccgccggguccc

SEQ ID NO: 191325 - RNA, 21 nt, Human
ggccccccgcagccccccagc

SEQ ID NO: 191326 - RNA, 25 nt, Human
ggccccccgccccucccucccagcc

SEQ ID NO: 191327 - RNA, 21 nt, Human
ggccccccgcgcccccgcgcg

SEQ ID NO: 191328 - RNA, 21 nt, Human
ggccccccucagccccugccu

SEQ ID NO: 191329 - RNA, 19 nt, Human
ggccccccucucugcugcc

SEQ ID NO: 191330 - RNA, 21 nt, Human
ggccccccuggccccgccugc

SEQ ID NO: 191331 - RNA, 20 nt, Human
ggccccccugugcccaggga

SEQ ID NO: 191332 - RNA, 22 nt, Human
ggccccccuguguccccaguga

SEQ ID NO: 191333 - RNA, 32 nt, Human
ggcccccgagccccaaggccaacagagagaag

SEQ ID NO: 191334 - RNA, 32 nt, Human
ggcccccgaggaggaggaggaggacgcgggcc

SEQ ID NO: 191335 - RNA, 32 nt, Human
ggcccccgaggaggaggaggaggaggaggacg

SEQ ID NO: 191336 - RNA, 20 nt, Human
ggcccccgauccccggcggg

SEQ ID NO: 191337 - RNA, 32 nt, Human
ggcccccgcccccaccgucccacucggugacc

SEQ ID NO: 191338 - RNA, 23 nt, Human
ggcccccgccccccagcccccca

SEQ ID NO: 191339 - RNA, 23 nt, Human
ggcccccgcccccgccccccggg

SEQ ID NO: 191340 - RNA, 17 nt, Human
ggcccccgccccuggga

SEQ ID NO: 191341 - RNA, 19 nt, Human
ggcccccgcccucacccca

SEQ ID NO: 191342 - RNA, 19 nt, Human
ggcccccgcgagcgcaggg

SEQ ID NO: 191343 - RNA, 19 nt, Human
ggcccccgcuccugcugcu

SEQ ID NO: 191344 - RNA, 32 nt, Human
ggcccccgcugucccugguguaaagaagucgc

SEQ ID NO: 191345 - RNA, 32 nt, Human
ggcccccgcuucagucaagaccugccuagaaa

SEQ ID NO: 191346 - RNA, 16 nt, Human
ggcccccggccccggg

SEQ ID NO: 191347 - RNA, 32 nt, Human
ggcccccggcgccgccgcgggaggccgcgccc

SEQ ID NO: 191348 - RNA, 32 nt, Human
ggcccccggcggcuggagcgcggcggcagcgg

SEQ ID NO: 191349 - RNA, 32 nt, Human
ggcccccgggauugguggaucauuggucagug

SEQ ID NO: 191350 - RNA, 19 nt, Human
ggcccccgggcccgucaca

SEQ ID NO: 191351 - RNA, 32 nt, Human
ggcccccggucaagggagagaacucacgucag

SEQ ID NO: 191352 - RNA, 32 nt, Human
ggcccccgucugcugcuggacacagagccaug

SEQ ID NO: 191353 - RNA, 32 nt, Human
ggcccccguucccacccccgccccaggcugga

SEQ ID NO: 191354 - RNA, 32 nt, Human
ggcccccuacagccucagguucugccugagcc

SEQ ID NO: 191355 - RNA, 25 nt, Human
ggcccccuaguucccaaagggagca

SEQ ID NO: 191356 - RNA, 32 nt, Human
ggcccccucaggagaagguggaagagaaaggg

SEQ ID NO: 191357 - RNA, 32 nt, Human
ggcccccucaguuagccuuuuugaggcaaugc

SEQ ID NO: 191358 - RNA, 32 nt, Human
ggcccccuccccaggcuggagaucagacauug

SEQ ID NO: 191359 - RNA, 19 nt, Human
ggcccccuccccuccccca

SEQ ID NO: 191360 - RNA, 19 nt, Human
ggcccccuccccugcugcu

SEQ ID NO: 191361 - RNA, 26 nt, Human
ggcccccucccucccucagcccccca

SEQ ID NO: 191362 - RNA, 20 nt, Human
ggcccccucccucuacugcc

SEQ ID NO: 191363 - RNA, 32 nt, Human
ggcccccuccuccuucucucaggauuucucuu

SEQ ID NO: 191364 - RNA, 19 nt, Human
ggcccccucggcaccgccu

SEQ ID NO: 191365 - RNA, 23 nt, Human
ggcccccucggcaccgccugcuc

SEQ ID NO: 191366 - RNA, 32 nt, Human
ggcccccucuccccacugcccuuuuugagcca

SEQ ID NO: 191367 - RNA, 32 nt, Human
ggcccccucugggcauaccugccuguggagcg

SEQ ID NO: 191368 - RNA, 23 nt, Human
ggcccccugcaaccuccgccucc

SEQ ID NO: 191369 - RNA, 32 nt, Human
ggcccccugcaaccuccgccucccggguucga

SEQ ID NO: 191370 - RNA, 32 nt, Human
ggcccccugcacugccugguccagaaggggug

SEQ ID NO: 191371 - RNA, 32 nt, Human
ggcccccugccugguucucccgccucugcaag

SEQ ID NO: 191372 - RNA, 21 nt, Human
ggcccccuggcgccugcugcu

SEQ ID NO: 191373 - RNA, 32 nt, Human
ggcccccugggaacugggggugcgggaguucu

SEQ ID NO: 191374 - RNA, 22 nt, Human
ggcccccugggugguccaccug

SEQ ID NO: 191375 - RNA, 22 nt, Human
ggcccccugucugucuuccucu

SEQ ID NO: 191376 - RNA, 21 nt, Human
ggcccccuuaccccugcugcu

SEQ ID NO: 191377 - RNA, 21 nt, Human
ggcccccuucccaaggccuua

SEQ ID NO: 191378 - RNA, 20 nt, Human
ggcccccuucugcucccugc

SEQ ID NO: 191379 - RNA, 32 nt, Human
ggcccccuuguuccaggggugccugagccccu

SEQ ID NO: 191380 - RNA, 22 nt, Human
ggcccccuuuccguccuccucu

SEQ ID NO: 191381 - RNA, 21 nt, Human
ggccccgaagccagagccgga

SEQ ID NO: 191382 - RNA, 18 nt, Human
ggccccgaccggguccag

SEQ ID NO: 191383 - RNA, 32 nt, Human
ggccccgagcgaaggaaggaagggaggcgcgc

SEQ ID NO: 191384 - RNA, 32 nt, Human
ggccccgagcucagggcagcugugcuggguga

SEQ ID NO: 191385 - RNA, 32 nt, Human
ggccccgagugccuccccucccucccucugug

SEQ ID NO: 191386 - RNA, 32 nt, Human
ggccccgcaaguccccgggaggcgacggugcc

SEQ ID NO: 191387 - RNA, 23 nt, Human
ggccccgcauagcucucgcugcc

SEQ ID NO: 191388 - RNA, 24 nt, Human
ggccccgcauagcucucgcugcca

SEQ ID NO: 191389 - RNA, 23 nt, Human
ggccccgccaccugcccagcgug

SEQ ID NO: 191390 - RNA, 32 nt, Human
ggccccgccagcccgggucuccgcgcucggag

SEQ ID NO: 191391 - RNA, 21 nt, Human
ggccccgcccacagcaccaag

SEQ ID NO: 191392 - RNA, 21 nt, Human
ggccccgccccagccagggug

SEQ ID NO: 191393 - RNA, 32 nt, Human
ggccccgcccccaggauccuacggauugaggu

SEQ ID NO: 191394 - RNA, 17 nt, Human
ggccccgccccuuccca

SEQ ID NO: 191395 - RNA, 20 nt, Human
ggccccgccccuuuccugcc

SEQ ID NO: 191396 - RNA, 32 nt, Human
ggccccgcccucucacagaggaugggugagga

SEQ ID NO: 191397 - RNA, 25 nt, Human
ggccccgccgagccacagcccccca

SEQ ID NO: 191398 - RNA, 22 nt, Human
ggccccgccgcagcgcccgccg

SEQ ID NO: 191399 - RNA, 22 nt, Human
ggccccgccgcgcucccgcucg

SEQ ID NO: 191400 - RNA, 32 nt, Human
ggccccgccgucucccugccgcaggccccgca

SEQ ID NO: 191401 - RNA, 32 nt, Human
ggccccgccucaccccggcuccugggccccag

SEQ ID NO: 191402 - RNA, 23 nt, Human
ggccccgccucgcgaguccuccu

SEQ ID NO: 191403 - RNA, 32 nt, Human
ggccccgcggagagcgagagacccugcgcacc

SEQ ID NO: 191404 - RNA, 32 nt, Human
ggccccgcggugagccaugauucgccucgggg

SEQ ID NO: 191405 - RNA, 32 nt, Human
ggccccgcgucccagcccugcccagcccgcgc

SEQ ID NO: 191406 - RNA, 32 nt, Human
ggccccgcuccucugaaggaucaccugcccca

SEQ ID NO: 191407 - RNA, 20 nt, Human
ggccccgcugaaccccaggg

SEQ ID NO: 191408 - RNA, 32 nt, Human
ggccccgcuguugggagugugcauuuaacugu

SEQ ID NO: 191409 - RNA, 21 nt, Human
ggccccgcuucagucccaggg

SEQ ID NO: 191410 - RNA, 32 nt, Human
ggccccgcuugccucggcuccugcugcaccaa

SEQ ID NO: 191411 - RNA, 32 nt, Human
ggccccggagccaagagaagaagcagguccca

SEQ ID NO: 191412 - RNA, 21 nt, Human
ggccccggagcggccgcagcg

SEQ ID NO: 191413 - RNA, 32 nt, Human
ggccccggaggacucggcuuccccgcuaaccc

SEQ ID NO: 191414 - RNA, 32 nt, Human
ggccccggagguagagguugcagugagcugag

SEQ ID NO: 191415 - RNA, 18 nt, Human
ggccccggccccccggga

SEQ ID NO: 191416 - RNA, 19 nt, Human
ggccccggcccccgcggga

SEQ ID NO: 191417 - RNA, 32 nt, Human
ggccccggccccuccuggaaucgccugcucgc

SEQ ID NO: 191418 - RNA, 32 nt, Human
ggccccggcucccuccugagcugcgccgugcc

SEQ ID NO: 191419 - RNA, 22 nt, Human
ggccccggcucucgcugcagcg

SEQ ID NO: 191420 - RNA, 24 nt, Human
ggccccgggaaccccagccugcca

SEQ ID NO: 191421 - RNA, 32 nt, Human
ggccccgggaccccgccuccccgccagccccg

SEQ ID NO: 191422 - RNA, 22 nt, Human
ggccccgggccccagcccccca

SEQ ID NO: 191423 - RNA, 32 nt, Human
ggccccgggccuggcccggccgagcgccgcgc

SEQ ID NO: 191424 - RNA, 32 nt, Human
ggccccgggccuggcccuggcacccgcuggcc

SEQ ID NO: 191425 - RNA, 24 nt, Human
ggccccgggcugcgcccucccccg

SEQ ID NO: 191426 - RNA, 32 nt, Human
ggccccgggcugggcagagccuccuccugccg

SEQ ID NO: 191427 - RNA, 32 nt, Human
ggccccgggcuuguuucuccucuuguuuuccu

SEQ ID NO: 191428 - RNA, 32 nt, Human
ggccccggggcaggcucucucuccccagcagu

SEQ ID NO: 191429 - RNA, 23 nt, Human
ggccccgggggaccugccugcuc

SEQ ID NO: 191430 - RNA, 32 nt, Human
ggccccgggggcccagggaugggcaggggcag

SEQ ID NO: 191431 - RNA, 32 nt, Human
ggccccgggggugaagucgcagcuucacuuac

SEQ ID NO: 191432 - RNA, 21 nt, Human
ggccccgguccgcgcccgccg

SEQ ID NO: 191433 - RNA, 20 nt, Human
ggccccggugaccccgggug

SEQ ID NO: 191434 - RNA, 31 nt, Human
ggccccggugcugccugcaugccaagcgcuu

SEQ ID NO: 191435 - RNA, 32 nt, Human
ggccccgguggaggcccggccugggcggcgcc

SEQ ID NO: 191436 - RNA, 32 nt, Human
ggccccgguggccauggggaauaaaccagcau

SEQ ID NO: 191437 - RNA, 25 nt, Human
ggccccgguggcuccaccgcagcgu

SEQ ID NO: 191438 - RNA, 32 nt, Human
ggccccguacugcuuccaucagcuccagcccc

SEQ ID NO: 191439 - RNA, 32 nt, Human
ggccccuaagccacccccagaggucccaucug

SEQ ID NO: 191440 - RNA, 19 nt, Human
ggccccuacacuguggcag

SEQ ID NO: 191441 - RNA, 22 nt, Human
ggccccuacagcgcccggcagc

SEQ ID NO: 191442 - RNA, 32 nt, Human
ggccccuacaggcuggcccugcaauggggccc

SEQ ID NO: 191443 - RNA, 22 nt, Human
ggccccuacccuaagccagcca

SEQ ID NO: 191444 - RNA, 32 nt, Human
ggccccuaccugcuguaagauuauggguccau

SEQ ID NO: 191445 - RNA, 32 nt, Human
ggccccuagcagugcagaacuacaagucccag

SEQ ID NO: 191446 - RNA, 32 nt, Human
ggccccuaugagucaacucacagcuugcgggg

SEQ ID NO: 191447 - RNA, 17 nt, Human
ggccccucaaagccuga

SEQ ID NO: 191448 - RNA, 32 nt, Human
ggccccucagaagauggccagguccaucccgc

SEQ ID NO: 191449 - RNA, 18 nt, Human
ggccccucagcagccuga

SEQ ID NO: 191450 - RNA, 32 nt, Human
ggccccucagccacccuuggucucaugccccg

SEQ ID NO: 191451 - RNA, 20 nt, Human
ggccccucagcccugcugcc

SEQ ID NO: 191452 - RNA, 22 nt, Human
ggccccucagccuggccugcuc

SEQ ID NO: 191453 - RNA, 32 nt, Human
ggccccucagcgucuuucugugccucugaauu

SEQ ID NO: 191454 - RNA, 32 nt, Human
ggccccucagcuucuuucugugccucugaauu

SEQ ID NO: 191455 - RNA, 28 nt, Human
ggccccucagguacgcccucucuucccu

SEQ ID NO: 191456 - RNA, 32 nt, Human
ggccccucaucgugcaguucugugccaaugac

SEQ ID NO: 191457 - RNA, 21 nt, Human
ggccccucaugccccaggcug

SEQ ID NO: 191458 - RNA, 32 nt, Human
ggccccuccaacccucucugcugcuguuucca

SEQ ID NO: 191459 - RNA, 23 nt, Human
ggccccuccaauccuccccgcuc

SEQ ID NO: 191460 - RNA, 32 nt, Human
ggccccuccagccaguacuccaggucucccug

SEQ ID NO: 191461 - RNA, 26 nt, Human
ggccccuccaguuucccucuguccuc

SEQ ID NO: 191462 - RNA, 19 nt, Human
ggccccucccaccgcccgc

SEQ ID NO: 191463 - RNA, 21 nt, Human
ggccccucccagcaccagcuc

SEQ ID NO: 191464 - RNA, 23 nt, Human
ggccccucccagggccgccgcuc

SEQ ID NO: 191465 - RNA, 23 nt, Human
ggccccucccaguaaagccccuc

SEQ ID NO: 191466 - RNA, 24 nt, Human
ggccccuccccaacuccuuccucu

SEQ ID NO: 191467 - RNA, 24 nt, Human
ggccccuccccauccccucccucu

SEQ ID NO: 191468 - RNA, 20 nt, Human
ggccccuccccggccugcuc

SEQ ID NO: 191469 - RNA, 19 nt, Human
ggccccuccccuccccugc

SEQ ID NO: 191470 - RNA, 24 nt, Human
ggccccuccccucucccucccucu

SEQ ID NO: 191471 - RNA, 23 nt, Human
ggccccuccccuggacccgccgc

SEQ ID NO: 191472 - RNA, 32 nt, Human
ggccccucccgcagcaguuccccaccacggcu

SEQ ID NO: 191473 - RNA, 19 nt, Human
ggccccucccggccccugc

SEQ ID NO: 191474 - RNA, 23 nt, Human
ggccccucccggccgcccagcuc

SEQ ID NO: 191475 - RNA, 21 nt, Human
ggccccucccggcgccugccc

SEQ ID NO: 191476 - RNA, 32 nt, Human
ggccccucccucccccuccuccccucuuuuac

SEQ ID NO: 191477 - RNA, 20 nt, Human
ggccccucccucccggcugc

SEQ ID NO: 191478 - RNA, 24 nt, Human
ggccccuccucagcagcgcagggg

SEQ ID NO: 191479 - RNA, 32 nt, Human
ggccccuccuccauuccagcauuucaucugcc

SEQ ID NO: 191480 - RNA, 24 nt, Human
ggccccuccucccucuuuuccucu

SEQ ID NO: 191481 - RNA, 20 nt, Human
ggccccuccucccugcugcc

SEQ ID NO: 191482 - RNA, 21 nt, Human
ggccccuccugcccccacccc

SEQ ID NO: 191483 - RNA, 24 nt, Human
ggccccuccugccuggcccugcuc

SEQ ID NO: 191484 - RNA, 24 nt, Human
ggccccuccuggaaucgccugcuc

SEQ ID NO: 191485 - RNA, 16 nt, Human
ggccccuccuggagcc

SEQ ID NO: 191486 - RNA, 32 nt, Human
ggccccuccuggccaggcaggguuuccccgcg

SEQ ID NO: 191487 - RNA, 23 nt, Human
ggccccuccuguccuccugcucu

SEQ ID NO: 191488 - RNA, 19 nt, Human
ggccccuccuuccugcaga

SEQ ID NO: 191489 - RNA, 32 nt, Human
ggccccucgcagggcccugccgcgccgccuuc

SEQ ID NO: 191490 - RNA, 32 nt, Human
ggccccucggacagcccaucugccuguucuga

SEQ ID NO: 191491 - RNA, 21 nt, Human
ggccccucgggccucugcaca

SEQ ID NO: 191492 - RNA, 19 nt, Human
ggccccucgggcuuccaca

SEQ ID NO: 191493 - RNA, 32 nt, Human
ggccccucgugagcucggcgcccagccuguca

SEQ ID NO: 191494 - RNA, 20 nt, Human
ggccccucuaccaccugcuc

SEQ ID NO: 191495 - RNA, 32 nt, Human
ggccccucuccugcagccccugccccucaccu

SEQ ID NO: 191496 - RNA, 32 nt, Human
ggccccucuccugcaggggccccacacaggca

SEQ ID NO: 191497 - RNA, 32 nt, Human
ggccccucucucuagcagaaaaauagacuaaa

SEQ ID NO: 191498 - RNA, 22 nt, Human
ggccccucucuguccugccucu

SEQ ID NO: 191499 - RNA, 20 nt, Human
ggccccucugcccggcagcg

SEQ ID NO: 191500 - RNA, 32 nt, Human
ggccccucugccugcacuccucaggcuugccc

SEQ ID NO: 191501 - RNA, 27 nt, Human
ggccccucugcguauucccuucucucu

SEQ ID NO: 191502 - RNA, 22 nt, Human
ggccccucugggcuccucccuc

SEQ ID NO: 191503 - RNA, 23 nt, Human
ggccccucuguccccuuggcucu

SEQ ID NO: 191504 - RNA, 32 nt, Human
ggccccucuguggagcgcccgccgucugcucc

SEQ ID NO: 191505 - RNA, 32 nt, Human
ggccccucuucacucugcucacagcagagcug

SEQ ID NO: 191506 - RNA, 32 nt, Human
ggccccugaacuguucuuuguuuacaggacuc

SEQ ID NO: 191507 - RNA, 22 nt, Human
ggccccugaaucaccagagcca

SEQ ID NO: 191508 - RNA, 24 nt, Human
ggccccugacucuaagcugaacca

SEQ ID NO: 191509 - RNA, 32 nt, Human
ggccccugagauugcauuugauaccauuuuau

SEQ ID NO: 191510 - RNA, 22 nt, Human
ggccccugagccagccccaggg

SEQ ID NO: 191511 - RNA, 27 nt, Human
ggccccugagcccgcggcgcugagcca

SEQ ID NO: 191512 - RNA, 24 nt, Human
ggccccugagccuuggaccagcca

SEQ ID NO: 191513 - RNA, 23 nt, Human
ggccccugaggcagaccaggcca

SEQ ID NO: 191514 - RNA, 32 nt, Human
ggccccugaggcuguguguaacaaaaugacag

SEQ ID NO: 191515 - RNA, 25 nt, Human
ggccccugaguggcagggcugacuc

SEQ ID NO: 191516 - RNA, 32 nt, Human
ggccccugaugaggaagacuucagaauuggga

SEQ ID NO: 191517 - RNA, 18 nt, Human
ggccccugcacaccaggg

SEQ ID NO: 191518 - RNA, 32 nt, Human
ggccccugcaggaaaacugaggcccuugggca

SEQ ID NO: 191519 - RNA, 32 nt, Human
ggccccugcaggagucaggccuggucucacgc

SEQ ID NO: 191520 - RNA, 32 nt, Human
ggccccugcccagcucuccaaagucuuucaga

SEQ ID NO: 191521 - RNA, 32 nt, Human
ggccccugcccagggcuugggucuggugagcu

SEQ ID NO: 191522 - RNA, 22 nt, Human
ggccccugcccccagccccugc

SEQ ID NO: 191523 - RNA, 18 nt, Human
ggccccugccccgcgccc

SEQ ID NO: 191524 - RNA, 18 nt, Human
ggccccugcccucuuccu

SEQ ID NO: 191525 - RNA, 18 nt, Human
ggccccugcccugcugcc

SEQ ID NO: 191526 - RNA, 31 nt, Human
ggccccugccucuucugucauuguucaaagg

SEQ ID NO: 191527 - RNA, 24 nt, Human
ggccccugcgcuccucgccagccg

SEQ ID NO: 191528 - RNA, 31 nt, Human
ggccccugcgucucugggcgcuggagcgcgg

SEQ ID NO: 191529 - RNA, 32 nt, Human
ggccccugcucacugaugggcccucccaggcc

SEQ ID NO: 191530 - RNA, 32 nt, Human
ggccccuggaggaggaggcggaggaggaggag

SEQ ID NO: 191531 - RNA, 32 nt, Human
ggccccuggagucccagcuacucgggaggcug

SEQ ID NO: 191532 - RNA, 32 nt, Human
ggccccuggagugguggggccauggcaagaga

SEQ ID NO: 191533 - RNA, 32 nt, Human
ggccccuggcaccugggugcucuggcuggaga

SEQ ID NO: 191534 - RNA, 22 nt, Human
ggccccuggccccagcacccug

SEQ ID NO: 191535 - RNA, 32 nt, Human
ggccccuggccccaucuugccugcugcggccu

SEQ ID NO: 191536 - RNA, 32 nt, Human
ggccccuggcgagaaccgcacacaccccuccc

SEQ ID NO: 191537 - RNA, 24 nt, Human
ggccccuggcuucccccuuccucu

SEQ ID NO: 191538 - RNA, 32 nt, Human
ggccccugggcauggauucagcucccccaggu

SEQ ID NO: 191539 - RNA, 18 nt, Human
ggccccugggccucuaug

SEQ ID NO: 191540 - RNA, 21 nt, Human
ggccccugggucuucgcugcc

SEQ ID NO: 191541 - RNA, 32 nt, Human
ggccccugguaaaauuccaggccaggccucug

SEQ ID NO: 191542 - RNA, 32 nt, Human
ggccccuggucccagagcagagcugacaaagg

SEQ ID NO: 191543 - RNA, 32 nt, Human
ggccccuggucugcccugggcucaucagccuu

SEQ ID NO: 191544 - RNA, 16 nt, Human
ggccccuguaauccca

SEQ ID NO: 191545 - RNA, 32 nt, Human
ggccccuguaaucccagcuaauugggaggcug

SEQ ID NO: 191546 - RNA, 32 nt, Human
ggccccuguaaucccagcuacucgggaggcug

SEQ ID NO: 191547 - RNA, 32 nt, Human
ggccccuguaaucccagcuacucgggagguug

SEQ ID NO: 191548 - RNA, 32 nt, Human
ggccccuguaaucccagcuacuugggaggcug

SEQ ID NO: 191549 - RNA, 32 nt, Human
ggccccuguagucccagcuacucaggaggcua

SEQ ID NO: 191550 - RNA, 32 nt, Human
ggccccuguagucccagcuacucgggaggcug

SEQ ID NO: 191551 - RNA, 32 nt, Human
ggccccuguccuccagccugaccagcccuggc

SEQ ID NO: 191552 - RNA, 19 nt, Human
ggccccugugacugcugcc

SEQ ID NO: 191553 - RNA, 19 nt, Human
ggccccugugagcugggag

SEQ ID NO: 191554 - RNA, 31 nt, Human
ggccccugugugcucuguccugugucugcag

SEQ ID NO: 191555 - RNA, 32 nt, Human
ggccccuguucaccccagugcacuggcccuga

SEQ ID NO: 191556 - RNA, 32 nt, Human
ggccccuuagcuggaagcguuucuccaggacc

SEQ ID NO: 191557 - RNA, 32 nt, Human
ggccccuucaaaccucauagcaaccagaggaa

SEQ ID NO: 191558 - RNA, 32 nt, Human
ggccccuucccaaucuccauuucucugccaag

SEQ ID NO: 191559 - RNA, 32 nt, Human
ggccccuucccccugccagcagcugcuccuuc

SEQ ID NO: 191560 - RNA, 31 nt, Human
ggccccuuccucucugccuuguuccccguuc

SEQ ID NO: 191561 - RNA, 19 nt, Human
ggccccuuccucugcugcu

SEQ ID NO: 191562 - RNA, 25 nt, Human
ggccccuucgggccccacacgcauu

SEQ ID NO: 191563 - RNA, 32 nt, Human
ggccccuucguaccugcaauaugucaggagcc

SEQ ID NO: 191564 - RNA, 22 nt, Human
ggccccuucucucccugccaga

SEQ ID NO: 191565 - RNA, 18 nt, Human
ggccccuucucugcugcc

SEQ ID NO: 191566 - RNA, 32 nt, Human
ggccccuucucuuccucauuuuggaaacuuuu

SEQ ID NO: 191567 - RNA, 21 nt, Human
ggccccuucuggaccuuucca

SEQ ID NO: 191568 - RNA, 32 nt, Human
ggccccuucuggcccccugccuggagcaucug

SEQ ID NO: 191569 - RNA, 32 nt, Human
ggccccuugacagucagcugggcugaguguau

SEQ ID NO: 191570 - RNA, 21 nt, Human
ggccccuugccccauuuuaag

SEQ ID NO: 191571 - RNA, 23 nt, Human
ggccccuuggugacccgcugcuc

SEQ ID NO: 191572 - RNA, 32 nt, Human
ggccccuuuacaugcccucucccuuuuauaaa

SEQ ID NO: 191573 - RNA, 22 nt, Human
ggccccuuuaccucuaugccau

SEQ ID NO: 191574 - RNA, 32 nt, Human
ggccccuuuccaagcaaucucacguuuacugg

SEQ ID NO: 191575 - RNA, 32 nt, Human
ggccccuuuccgccucccuugcagcucagguu

SEQ ID NO: 191576 - RNA, 32 nt, Human
ggccccuuugaccucagggccaugaagcugcc

SEQ ID NO: 191577 - RNA, 23 nt, Human
ggccccuuuguucucgcgcgcuc

SEQ ID NO: 191578 - RNA, 21 nt, Human
ggcccgacauggcucggccuc

SEQ ID NO: 191579 - RNA, 32 nt, Human
ggcccgacauggucugggacacagaguuggag

SEQ ID NO: 191580 - RNA, 32 nt, Human
ggcccgaccuguacccagccuggcaggaagac

SEQ ID NO: 191581 - RNA, 22 nt, Human
ggcccgacgagacccagaguga

SEQ ID NO: 191582 - RNA, 32 nt, Human
ggcccgacuagcucuaggugccauggaagagg

SEQ ID NO: 191583 - RNA, 20 nt, Human
ggcccgacuggcugggcuuc

SEQ ID NO: 191584 - RNA, 32 nt, Human
ggcccgagaagagaucagagauugguucuggg

SEQ ID NO: 191585 - RNA, 32 nt, Human
ggcccgagaagcuuccucucagugaccacaau

SEQ ID NO: 191586 - RNA, 23 nt, Human
ggcccgagagcugcuccagagug

SEQ ID NO: 191587 - RNA, 19 nt, Human
ggcccgagcagcugagcag

SEQ ID NO: 191588 - RNA, 17 nt, Human
ggcccgagccacugcag

SEQ ID NO: 191589 - RNA, 21 nt, Human
ggcccgagcgccagccccagc

SEQ ID NO: 191590 - RNA, 32 nt, Human
ggcccgaggaagccucucuggggccaggggua

SEQ ID NO: 191591 - RNA, 32 nt, Human
ggcccgaggacccacugugagcacuccaccca

SEQ ID NO: 191592 - RNA, 22 nt, Human
ggcccgagggacccacacagug

SEQ ID NO: 191593 - RNA, 32 nt, Human
ggcccgaggggagacgccgugacaacuuucgu

SEQ ID NO: 191594 - RNA, 32 nt, Human
ggcccgagguccaagccuccgcuaagcugcuu

SEQ ID NO: 191595 - RNA, 19 nt, Human
ggcccgagguggcucacca

SEQ ID NO: 191596 - RNA, 24 nt, Human
ggcccgauaccaugauuuugcugc

SEQ ID NO: 191597 - RNA, 23 nt, Human
ggcccgcaacccccagcgcugcg

SEQ ID NO: 191598 - RNA, 19 nt, Human
ggcccgcaagccgcugcca

SEQ ID NO: 191599 - RNA, 20 nt, Human
ggcccgcacacucgcuccag

SEQ ID NO: 191600 - RNA, 32 nt, Human
ggcccgcacagagcuggggcugagggauggac

SEQ ID NO: 191601 - RNA, 22 nt, Human
ggcccgcaccaagacccgcucg

SEQ ID NO: 191602 - RNA, 32 nt, Human
ggcccgcaccugccuuggauguuuucagcaau

SEQ ID NO: 191603 - RNA, 21 nt, Human
ggcccgcagaugcuaagaggg

SEQ ID NO: 191604 - RNA, 21 nt, Human
ggcccgcagccgggcgcccug

SEQ ID NO: 191605 - RNA, 32 nt, Human
ggcccgcagccucacccggcucccucuccuca

SEQ ID NO: 191606 - RNA, 32 nt, Human
ggcccgcaggcaaggucucccacugcagggcu

SEQ ID NO: 191607 - RNA, 21 nt, Human
ggcccgcaggcagcgcgaggg

SEQ ID NO: 191608 - RNA, 32 nt, Human
ggcccgcagggacauggccggggacacccagu

SEQ ID NO: 191609 - RNA, 32 nt, Human
ggcccgcagggugucgggcgaggcaaagugca

SEQ ID NO: 191610 - RNA, 20 nt, Human
ggcccgcauccaggccgcca

SEQ ID NO: 191611 - RNA, 32 nt, Human
ggcccgcaugaggcagccucguuguggccuag

SEQ ID NO: 191612 - RNA, 22 nt, Human
ggcccgccccgcccuccccucc

SEQ ID NO: 191613 - RNA, 32 nt, Human
ggcccgccccuucacguacucggagcucggau

SEQ ID NO: 191614 - RNA, 19 nt, Human
ggcccgcccgagccccagc

SEQ ID NO: 191615 - RNA, 23 nt, Human
ggcccgcccgagccccagcagca

SEQ ID NO: 191616 - RNA, 32 nt, Human
ggcccgcccgggaauuggcggcggcgcugcag

SEQ ID NO: 191617 - RNA, 20 nt, Human
ggcccgcccugcaggcaaca

SEQ ID NO: 191618 - RNA, 22 nt, Human
ggcccgccgcacgcccggcagc

SEQ ID NO: 191619 - RNA, 19 nt, Human
ggcccgccgccccccgggg

SEQ ID NO: 191620 - RNA, 21 nt, Human
ggcccgccgccucccccggga

SEQ ID NO: 191621 - RNA, 22 nt, Human
ggcccgccguucuucugcugcc

SEQ ID NO: 191622 - RNA, 32 nt, Human
ggcccgccucuggcuccugggccugggcuuua

SEQ ID NO: 191623 - RNA, 18 nt, Human
ggcccgccugccacgccc

SEQ ID NO: 191624 - RNA, 22 nt, Human
ggcccgccuuugccccacccua

SEQ ID NO: 191625 - RNA, 32 nt, Human
ggcccgcgcaggcggcgaguccuccgagcccc

SEQ ID NO: 191626 - RNA, 25 nt, Human
ggcccgcgccccgcgccccccacgg

SEQ ID NO: 191627 - RNA, 22 nt, Human
ggcccgcgcccggccuccgcgg

SEQ ID NO: 191628 - RNA, 24 nt, Human
ggcccgcgccuccuccccccagcg

SEQ ID NO: 191629 - RNA, 21 nt, Human
ggcccgcgcgcucccaggguc

SEQ ID NO: 191630 - RNA, 19 nt, Human
ggcccgcggccggguccag

SEQ ID NO: 191631 - RNA, 32 nt, Human
ggcccgcucccuuuuucuucugccucacuuga

SEQ ID NO: 191632 - RNA, 32 nt, Human
ggcccgcucuccccacccuguucugagccaaa

SEQ ID NO: 191633 - RNA, 32 nt, Human
ggcccgcucuucucccccuccugcugcggccg

SEQ ID NO: 191634 - RNA, 32 nt, Human
ggcccgcugcagccucugccucuuggguucaa

SEQ ID NO: 191635 - RNA, 32 nt, Human
ggcccgcugcuggccgcucucuucucugccuc

SEQ ID NO: 191636 - RNA, 32 nt, Human
ggcccgcuugccucagcuucuugcugccgcca

SEQ ID NO: 191637 - RNA, 32 nt, Human
ggcccgcuuggcuguccaaucacacuccagug

SEQ ID NO: 191638 - RNA, 19 nt, Human
ggcccgcuuugggguccag

SEQ ID NO: 191639 - RNA, 32 nt, Human
ggcccggaacugcuucaaccugggagguagag

SEQ ID NO: 191640 - RNA, 22 nt, Human
ggcccggacaggacugauggcc

SEQ ID NO: 191641 - RNA, 32 nt, Human
ggcccggagccagccaggcaguuuuauugaaa

SEQ ID NO: 191642 - RNA, 17 nt, Human
ggcccggagccggagga

SEQ ID NO: 191643 - RNA, 32 nt, Human
ggcccggagcggaggaaggagucgccgaggag

SEQ ID NO: 191644 - RNA, 32 nt, Human
ggcccggagcggggguugggggaguagagaaa

SEQ ID NO: 191645 - RNA, 22 nt, Human
ggcccggaggcggcggcgcagg

SEQ ID NO: 191646 - RNA, 32 nt, Human
ggcccggaggcugagacuaaggcuuucgaccc

SEQ ID NO: 191647 - RNA, 32 nt, Human
ggcccggaggggaacuguuuucuccggaagug

SEQ ID NO: 191648 - RNA, 19 nt, Human
ggcccggaggggcaggccu

SEQ ID NO: 191649 - RNA, 32 nt, Human
ggcccggcacccggucccaccuggugacacug

SEQ ID NO: 191650 - RNA, 32 nt, Human
ggcccggcagagccgcaggcgcuaggccgccc

SEQ ID NO: 191651 - RNA, 32 nt, Human
ggcccggcagccagcucugcagagccauuugu

SEQ ID NO: 191652 - RNA, 32 nt, Human
ggcccggcagccugagcggcaggccuguauuc

SEQ ID NO: 191653 - RNA, 32 nt, Human
ggcccggcagggaggcagggaggcugcagagu

SEQ ID NO: 191654 - RNA, 32 nt, Human
ggcccggcaguuggaggaaggccagaggaaca

SEQ ID NO: 191655 - RNA, 32 nt, Human
ggcccggcaugaagcggcguugaggagcugcu

SEQ ID NO: 191656 - RNA, 32 nt, Human
ggcccggccaccucucugucauggcucuggcg

SEQ ID NO: 191657 - RNA, 32 nt, Human
ggcccggccacugcaggaugcccaccugggcc

SEQ ID NO: 191658 - RNA, 32 nt, Human
ggcccggccacuggcccugcagcugcuuuuug

SEQ ID NO: 191659 - RNA, 32 nt, Human
ggcccggccauggcggacaacgagaaacugga

SEQ ID NO: 191660 - RNA, 32 nt, Human
ggcccggcccaauccaggccccggccccgccg

SEQ ID NO: 191661 - RNA, 32 nt, Human
ggcccggcccagccuaggcccgggguggccac

SEQ ID NO: 191662 - RNA, 32 nt, Human
ggcccggcccccgcgugccucccaggcuccgc

SEQ ID NO: 191663 - RNA, 22 nt, Human
ggcccggccccgucgcugcccg

SEQ ID NO: 191664 - RNA, 20 nt, Human
ggcccggcccgugcagcccg

SEQ ID NO: 191665 - RNA, 32 nt, Human
ggcccggcccugcucuguucugcccggaggag

SEQ ID NO: 191666 - RNA, 20 nt, Human
ggcccggccgcagcgcaggg

SEQ ID NO: 191667 - RNA, 23 nt, Human
ggcccggccuccacagcacccca

SEQ ID NO: 191668 - RNA, 32 nt, Human
ggcccggccuuuccuuuuuccucuccucuccu

SEQ ID NO: 191669 - RNA, 23 nt, Human
ggcccggcgaggcagcgcagagg

SEQ ID NO: 191670 - RNA, 32 nt, Human
ggcccggcgcgagaggaggcagagggggcguc

SEQ ID NO: 191671 - RNA, 18 nt, Human
ggcccggcgcgccuggua

SEQ ID NO: 191672 - RNA, 32 nt, Human
ggcccggcgugggcacacagacagcccgcuuu

SEQ ID NO: 191673 - RNA, 21 nt, Human
ggcccggcucccccgccccgg

SEQ ID NO: 191674 - RNA, 32 nt, Human
ggcccgggaagugcagcaggcagcuuuucuuu

SEQ ID NO: 191675 - RNA, 32 nt, Human
ggcccgggaaucugagggccucaccccacuuc

SEQ ID NO: 191676 - RNA, 32 nt, Human
ggcccgggaccccuguuuucugcucccuggac

SEQ ID NO: 191677 - RNA, 32 nt, Human
ggcccgggacgacagccugggcucagagucag

SEQ ID NO: 191678 - RNA, 18 nt, Human
ggcccgggacgaggccuc

SEQ ID NO: 191679 - RNA, 18 nt, Human
ggcccgggagccgggagg

SEQ ID NO: 191680 - RNA, 32 nt, Human
ggcccgggaggcagaccugccccaagggugau

SEQ ID NO: 191681 - RNA, 32 nt, Human
ggcccgggaggcagaccugcccuaagggugau

SEQ ID NO: 191682 - RNA, 32 nt, Human
ggcccgggaggcagagguugcagugagccgag

SEQ ID NO: 191683 - RNA, 17 nt, Human
ggcccgggaggcgcagg

SEQ ID NO: 191684 - RNA, 32 nt, Human
ggcccgggaggcggaggcgcgggggaggaggc

SEQ ID NO: 191685 - RNA, 32 nt, Human
ggcccgggagggcugggggcucuucccuggag

SEQ ID NO: 191686 - RNA, 32 nt, Human
ggcccgggaggucaagguugcagugagcuguc

SEQ ID NO: 191687 - RNA, 32 nt, Human
ggcccgggagguggagguugcagugagcugag

SEQ ID NO: 191688 - RNA, 32 nt, Human
ggcccgggagguggagguugcagugagucaag

SEQ ID NO: 191689 - RNA, 18 nt, Human
ggcccgggagugggucuc

SEQ ID NO: 191690 - RNA, 32 nt, Human
ggcccgggaguuugaaguugcagugagcuaug

SEQ ID NO: 191691 - RNA, 32 nt, Human
ggcccgggcaccugagggcuucucccucugga

SEQ ID NO: 191692 - RNA, 19 nt, Human
ggcccgggcagacaaggcc

SEQ ID NO: 191693 - RNA, 32 nt, Human
ggcccgggcaugggcugcaagggagacgcgag

SEQ ID NO: 191694 - RNA, 32 nt, Human
ggcccgggccagggagaugcaggaugaggaga

SEQ ID NO: 191695 - RNA, 32 nt, Human
ggcccgggcccaccuuggacucccucuggaga

SEQ ID NO: 191696 - RNA, 22 nt, Human
ggcccgggccccacgguaccuc

SEQ ID NO: 191697 - RNA, 18 nt, Human
ggcccgggccccucggga

SEQ ID NO: 191698 - RNA, 32 nt, Human
ggcccgggccggggcccugccugaggccaucg

SEQ ID NO: 191699 - RNA, 19 nt, Human
ggcccgggccucgggcccc

SEQ ID NO: 191700 - RNA, 32 nt, Human
ggcccgggccugggaacugcuggcucuaagaa

SEQ ID NO: 191701 - RNA, 20 nt, Human
ggcccgggcggagccccggg

SEQ ID NO: 191702 - RNA, 19 nt, Human
ggcccgggcgggcgggagc

SEQ ID NO: 191703 - RNA, 18 nt, Human
ggcccgggcucccagagg

SEQ ID NO: 191704 - RNA, 32 nt, Human
ggcccgggcucccagccgcagucccacacugg

SEQ ID NO: 191705 - RNA, 20 nt, Human
ggcccgggcucggggaccuu

SEQ ID NO: 191706 - RNA, 32 nt, Human
ggcccgggcuggagaggaaggggcaccaccca

SEQ ID NO: 191707 - RNA, 18 nt, Human
ggcccgggcuggggccuc

SEQ ID NO: 191708 - RNA, 18 nt, Human
ggcccgggcugggggccc

SEQ ID NO: 191709 - RNA, 32 nt, Human
ggcccgggcugugauuuaccugggugagacag

SEQ ID NO: 191710 - RNA, 32 nt, Human
ggcccggggacacaucuccugagggaucccag

SEQ ID NO: 191711 - RNA, 19 nt, Human
ggcccggggaccugugcca

SEQ ID NO: 191712 - RNA, 32 nt, Human
ggcccggggagacaguuguguggugugugcau

SEQ ID NO: 191713 - RNA, 21 nt, Human
ggcccggggauccucccgccg

SEQ ID NO: 191714 - RNA, 32 nt, Human
ggcccggggccaugcaguaccuggaguguccu

SEQ ID NO: 191715 - RNA, 32 nt, Human
ggcccggggccugaccccaacaccugcaugcu

SEQ ID NO: 191716 - RNA, 32 nt, Human
ggcccggggccuggggcgucagcugggauaua

SEQ ID NO: 191717 - RNA, 32 nt, Human
ggcccggggcucgagcccggaggcaggagcag

SEQ ID NO: 191718 - RNA, 32 nt, Human
ggcccggggcuggagcgcagcgggaagcggga

SEQ ID NO: 191719 - RNA, 32 nt, Human
ggcccgggggccugagccugggaccccacccc

SEQ ID NO: 191720 - RNA, 32 nt, Human
ggcccggggguggagcccucaccagggaccug

SEQ ID NO: 191721 - RNA, 32 nt, Human
ggcccgggguugagacaggcggcaggugccug

SEQ ID NO: 191722 - RNA, 16 nt, Human
ggcccgggucgggccu

SEQ ID NO: 191723 - RNA, 32 nt, Human
ggcccgguauccugccuguccgcugccaccaa

SEQ ID NO: 191724 - RNA, 32 nt, Human
ggcccggucagugcugcaugcacugcauauga

SEQ ID NO: 191725 - RNA, 19 nt, Human
ggcccggugaggugcugcc

SEQ ID NO: 191726 - RNA, 22 nt, Human
ggcccggugcuucccgcagcug

SEQ ID NO: 191727 - RNA, 32 nt, Human
ggcccguacacaggcggggccagcacaguagu

SEQ ID NO: 191728 - RNA, 32 nt, Human
ggcccguacuccuggggguuucccuuugccau

SEQ ID NO: 191729 - RNA, 23 nt, Human
ggcccguccagagccccagcagg

SEQ ID NO: 191730 - RNA, 32 nt, Human
ggcccgucucccaggcugggcgugggccgggc

SEQ ID NO: 191731 - RNA, 32 nt, Human
ggcccgucuccucuucccuacaacaggcugcu

SEQ ID NO: 191732 - RNA, 32 nt, Human
ggcccgucugcccgccuuccuccaucuaaccu

SEQ ID NO: 191733 - RNA, 32 nt, Human
ggcccgucuggguuugggaugcacugaguugg

SEQ ID NO: 191734 - RNA, 32 nt, Human
ggcccgugaaaggcaacugagcagggauccau

SEQ ID NO: 191735 - RNA, 32 nt, Human
ggcccgugcagcagugucugagcuguagugaa

SEQ ID NO: 191736 - RNA, 32 nt, Human
ggcccgugcccagcccuaaaguuuuaaacucu

SEQ ID NO: 191737 - RNA, 19 nt, Human
ggcccgugcccgggaccgc

SEQ ID NO: 191738 - RNA, 23 nt, Human
ggcccguggacuccgcacaggga

SEQ ID NO: 191739 - RNA, 19 nt, Human
ggcccguggccaacccagc

SEQ ID NO: 191740 - RNA, 21 nt, Human
ggcccguggcucaugccugua

SEQ ID NO: 191741 - RNA, 32 nt, Human
ggcccguggggcagguggagggagcagucuuc

SEQ ID NO: 191742 - RNA, 21 nt, Human
ggcccguguccccuuccucca

SEQ ID NO: 191743 - RNA, 32 nt, Human
ggcccguguccuggaagccacccggaccugga

SEQ ID NO: 191744 - RNA, 32 nt, Human
ggcccguguguugggagguuguggucugcgug

SEQ ID NO: 191745 - RNA, 22 nt, Human
ggcccguugccaccgacuccca

SEQ ID NO: 191746 - RNA, 32 nt, Human
ggcccguugccaccgacucccaccuccagcac

SEQ ID NO: 191747 - RNA, 32 nt, Human
ggcccguuggguagcuggggccaggcuucucu

SEQ ID NO: 191748 - RNA, 32 nt, Human
ggcccuaacaggcacagagagcaggggcaacu

SEQ ID NO: 191749 - RNA, 19 nt, Human
ggcccuacaagugcggcga

SEQ ID NO: 191750 - RNA, 22 nt, Human
ggcccuacaccugccccgagug

SEQ ID NO: 191751 - RNA, 32 nt, Human
ggcccuacaucaucugcuacccugaaagaucu

SEQ ID NO: 191752 - RNA, 32 nt, Human
ggcccuacaucaucugcuacccugaaggaucu

SEQ ID NO: 191753 - RNA, 21 nt, Human
ggcccuaccagcgcccgcugg

SEQ ID NO: 191754 - RNA, 32 nt, Human
ggcccuacuacccauuguucccuuccucuucc

SEQ ID NO: 191755 - RNA, 24 nt, Human
ggcccuacugcuccccucugcugc

SEQ ID NO: 191756 - RNA, 32 nt, Human
ggcccuagagagaaguauauacuaggguacuu

SEQ ID NO: 191757 - RNA, 32 nt, Human
ggcccuagaggaguuuguaucaauuugugagu

SEQ ID NO: 191758 - RNA, 20 nt, Human
ggcccuaggacacugccaga

SEQ ID NO: 191759 - RNA, 32 nt, Human
ggcccuaggaggcuucugccaccagcucacug

SEQ ID NO: 191760 - RNA, 32 nt, Human
ggcccuaggauuguccacucaucccaguauca

SEQ ID NO: 191761 - RNA, 21 nt, Human
ggcccuaggccccucagcagg

SEQ ID NO: 191762 - RNA, 18 nt, Human
ggcccuaggccugcuguc

SEQ ID NO: 191763 - RNA, 32 nt, Human
ggcccuagggagcaccgugauggagaggacag

SEQ ID NO: 191764 - RNA, 32 nt, Human
ggcccuauaccuggccgagguggagaagcagg

SEQ ID NO: 191765 - RNA, 32 nt, Human
ggcccuauagcagaagucugauucuaagagca

SEQ ID NO: 191766 - RNA, 32 nt, Human
ggcccuaucagccugugaacuucacuuaggcc

SEQ ID NO: 191767 - RNA, 30 nt, Human
ggcccuauccucuccauuagcuccuuccgg

SEQ ID NO: 191768 - RNA, 32 nt, Human
ggcccuaucuccugcaaccucagugccucagc

SEQ ID NO: 191769 - RNA, 22 nt, Human
ggcccuaugcuacacagucccu

SEQ ID NO: 191770 - RNA, 20 nt, Human
ggcccuauuuuccugcugcu

SEQ ID NO: 191771 - RNA, 32 nt, Human
ggcccuauuuuccugcugcuucccagcucaga

SEQ ID NO: 191772 - RNA, 21 nt, Human
ggcccucaaaccacuucugcc

SEQ ID NO: 191773 - RNA, 21 nt, Human
ggcccucaaacccaguuuggc

SEQ ID NO: 191774 - RNA, 22 nt, Human
ggcccucaaacccucucccucu

SEQ ID NO: 191775 - RNA, 20 nt, Human
ggcccucaaacuauauugca

SEQ ID NO: 191776 - RNA, 19 nt, Human
ggcccucaacuuccauccu

SEQ ID NO: 191777 - RNA, 32 nt, Human
ggcccucaagagccauccccacugccuggcca

SEQ ID NO: 191778 - RNA, 32 nt, Human
ggcccucaagaggcaugcuagaacguuagguc

SEQ ID NO: 191779 - RNA, 20 nt, Human
ggcccucaagcuuuccugcu

SEQ ID NO: 191780 - RNA, 23 nt, Human
ggcccucaagcuuuccugcuguc

SEQ ID NO: 191781 - RNA, 32 nt, Human
ggcccucaagggacagacauggcucagcggau

SEQ ID NO: 191782 - RNA, 20 nt, Human
ggcccucacaccauccaccu

SEQ ID NO: 191783 - RNA, 24 nt, Human
ggcccucacagaaccgagucugcc

SEQ ID NO: 191784 - RNA, 32 nt, Human
ggcccucacagcccugggcagcuacaaccgcu

SEQ ID NO: 191785 - RNA, 20 nt, Human
ggcccucacagcgcccugcc

SEQ ID NO: 191786 - RNA, 21 nt, Human
ggcccucaccacagcccaccu

SEQ ID NO: 191787 - RNA, 21 nt, Human
ggcccucaccaggguccuucc

SEQ ID NO: 191788 - RNA, 21 nt, Human
ggcccucaccccaucacgccu

SEQ ID NO: 191789 - RNA, 16 nt, Human
ggcccucaccccugcc

SEQ ID NO: 191790 - RNA, 21 nt, Human
ggcccucacccgaagggcugc

SEQ ID NO: 191791 - RNA, 32 nt, Human
ggcccucacccuccucuguggucaagauggag

SEQ ID NO: 191792 - RNA, 19 nt, Human
ggcccucaccugcaccgcc

SEQ ID NO: 191793 - RNA, 20 nt, Human
ggcccucaccugccggcgcc

SEQ ID NO: 191794 - RNA, 17 nt, Human
ggcccucaccugcuguc

SEQ ID NO: 191795 - RNA, 21 nt, Human
ggcccucaccuuaucacuggc

SEQ ID NO: 191796 - RNA, 19 nt, Human
ggcccucaccuuccucccu

SEQ ID NO: 191797 - RNA, 24 nt, Human
ggcccucacgcgcgcccucucccg

SEQ ID NO: 191798 - RNA, 20 nt, Human
ggcccucacgguguccgccu

SEQ ID NO: 191799 - RNA, 18 nt, Human
ggcccucacguuccugcc

SEQ ID NO: 191800 - RNA, 18 nt, Human
ggcccucacucuccggcc

SEQ ID NO: 191801 - RNA, 19 nt, Human
ggcccucacucucucgccu

SEQ ID NO: 191802 - RNA, 19 nt, Human
ggcccucacucucugugcc

SEQ ID NO: 191803 - RNA, 22 nt, Human
ggcccucacucuugaaguccag

SEQ ID NO: 191804 - RNA, 32 nt, Human
ggcccucacugaggagauucagccugggcucc

SEQ ID NO: 191805 - RNA, 19 nt, Human
ggcccucagaacaccugcc

SEQ ID NO: 191806 - RNA, 20 nt, Human
ggcccucagaacgcccugcu

SEQ ID NO: 191807 - RNA, 32 nt, Human
ggcccucagaagcagcucuuggaggagaugag

SEQ ID NO: 191808 - RNA, 18 nt, Human
ggcccucagacccugccu

SEQ ID NO: 191809 - RNA, 32 nt, Human
ggcccucagagcagcgccugugggugucagua

SEQ ID NO: 191810 - RNA, 19 nt, Human
ggcccucagaggacagugc

SEQ ID NO: 191811 - RNA, 32 nt, Human
ggcccucagaggaccaggggaucaugucucca

SEQ ID NO: 191812 - RNA, 21 nt, Human
ggcccucagaggcuccucccu

SEQ ID NO: 191813 - RNA, 32 nt, Human
ggcccucagagugcucuguagagcuguagacu

SEQ ID NO: 191814 - RNA, 32 nt, Human
ggcccucagcaaccagcucuguagggagcucu

SEQ ID NO: 191815 - RNA, 21 nt, Human
ggcccucagcaagcccuggcc

SEQ ID NO: 191816 - RNA, 32 nt, Human
ggcccucagcacuguccacuguuucggugcca

SEQ ID NO: 191817 - RNA, 31 nt, Human
ggcccucagcacuuugggccuggucacauac

SEQ ID NO: 191818 - RNA, 17 nt, Human
ggcccucagcagcugcu

SEQ ID NO: 191819 - RNA, 19 nt, Human
ggcccucagcagcugcucc

SEQ ID NO: 191820 - RNA, 19 nt, Human
ggcccucagccacagugcc

SEQ ID NO: 191821 - RNA, 19 nt, Human
ggcccucagccagcuggcu

SEQ ID NO: 191822 - RNA, 32 nt, Human
ggcccucagccaugcguggacucagugggcca

SEQ ID NO: 191823 - RNA, 20 nt, Human
ggcccucagccccuccugcc

SEQ ID NO: 191824 - RNA, 19 nt, Human
ggcccucagcccuccaccu

SEQ ID NO: 191825 - RNA, 19 nt, Human
ggcccucagcccucugucu

SEQ ID NO: 191826 - RNA, 18 nt, Human
ggcccucagcccugccgc

SEQ ID NO: 191827 - RNA, 19 nt, Human
ggcccucagccgacaggcc

SEQ ID NO: 191828 - RNA, 20 nt, Human
ggcccucagccuucccugcu

SEQ ID NO: 191829 - RNA, 23 nt, Human
ggcccucagccuucccugcugcc

SEQ ID NO: 191830 - RNA, 22 nt, Human
ggcccucagcgccgccccggcc

SEQ ID NO: 191831 - RNA, 32 nt, Human
ggcccucagcgucuccccaugcugggcucacu

SEQ ID NO: 191832 - RNA, 21 nt, Human
ggcccucagcucccccucccu

SEQ ID NO: 191833 - RNA, 19 nt, Human
ggcccucagcugcccuccu

SEQ ID NO: 191834 - RNA, 32 nt, Human
ggcccucaggagagaccaggaggacugacagc

SEQ ID NO: 191835 - RNA, 21 nt, Human
ggcccucaggccaggccuacc

SEQ ID NO: 191836 - RNA, 22 nt, Human
ggcccucaggcccacccuggcu

SEQ ID NO: 191837 - RNA, 18 nt, Human
ggcccucaggcugcugcu

SEQ ID NO: 191838 - RNA, 20 nt, Human
ggcccucagggggccugccu

SEQ ID NO: 191839 - RNA, 21 nt, Human
ggcccucaggucgcccuggcc

SEQ ID NO: 191840 - RNA, 32 nt, Human
ggcccucaguaaauaccuggaggaaugugacc

SEQ ID NO: 191841 - RNA, 19 nt, Human
ggcccucaguagucccugc

SEQ ID NO: 191842 - RNA, 19 nt, Human
ggcccucagucaccccgcc

SEQ ID NO: 191843 - RNA, 19 nt, Human
ggcccucaguccacccccu

SEQ ID NO: 191844 - RNA, 19 nt, Human
ggcccucagucuuccugcc

SEQ ID NO: 191845 - RNA, 19 nt, Human
ggcccucaguggacugccu

SEQ ID NO: 191846 - RNA, 23 nt, Human
ggcccucaguggacugccugcuc

SEQ ID NO: 191847 - RNA, 21 nt, Human
ggcccucaguggaugcuggcc

SEQ ID NO: 191848 - RNA, 20 nt, Human
ggcccucaguuucccuaucu

SEQ ID NO: 191849 - RNA, 18 nt, Human
ggcccucauaaugaugcc

SEQ ID NO: 191850 - RNA, 18 nt, Human
ggcccucauagcccugcu

SEQ ID NO: 191851 - RNA, 20 nt, Human
ggcccucauagcccugcucc

SEQ ID NO: 191852 - RNA, 19 nt, Human
ggcccucauauuugcugcu

SEQ ID NO: 191853 - RNA, 21 nt, Human
ggcccucaucacuucgccgcc

SEQ ID NO: 191854 - RNA, 17 nt, Human
ggcccucauccccugcc

SEQ ID NO: 191855 - RNA, 20 nt, Human
ggcccucauccccugccgcu

SEQ ID NO: 191856 - RNA, 21 nt, Human
ggcccucauccuucugcugcc

SEQ ID NO: 191857 - RNA, 21 nt, Human
ggcccucaugaagccaugccu

SEQ ID NO: 191858 - RNA, 19 nt, Human
ggcccucaugagcuacgcc

SEQ ID NO: 191859 - RNA, 26 nt, Human
ggcccucaugguggccugucaccaug

SEQ ID NO: 191860 - RNA, 20 nt, Human
ggcccucauucgcuccugcc

SEQ ID NO: 191861 - RNA, 21 nt, Human
ggcccucauucgcuccugccu

SEQ ID NO: 191862 - RNA, 32 nt, Human
ggcccucauuucucagcuucugcauuuccuuc

SEQ ID NO: 191863 - RNA, 32 nt, Human
ggcccuccagccuggccuaacacuuggggagc

SEQ ID NO: 191864 - RNA, 19 nt, Human
ggcccuccaggcugcugcu

SEQ ID NO: 191865 - RNA, 32 nt, Human
ggcccuccagggaaguggagccuccagccccu

SEQ ID NO: 191866 - RNA, 23 nt, Human
ggcccuccaucaccuucugcucc

SEQ ID NO: 191867 - RNA, 32 nt, Human
ggcccuccccagggguacccagugccagcggg

SEQ ID NO: 191868 - RNA, 23 nt, Human
ggcccuccccccggcccucccgg

SEQ ID NO: 191869 - RNA, 32 nt, Human
ggcccucccuccgcccccuccgcccucgcgcg

SEQ ID NO: 191870 - RNA, 32 nt, Human
ggcccucccugcacuccccucuugcugcgugu

SEQ ID NO: 191871 - RNA, 32 nt, Human
ggcccuccgaguagcugggaccacagguguac

SEQ ID NO: 191872 - RNA, 32 nt, Human
ggcccuccgcacccucugcccucugccuggca

SEQ ID NO: 191873 - RNA, 22 nt, Human
ggcccuccgccccagccccagc

SEQ ID NO: 191874 - RNA, 32 nt, Human
ggcccuccgcccugacccuccugcugccuucc

SEQ ID NO: 191875 - RNA, 32 nt, Human
ggcccuccgccuccuccccuccuccuucucgu

SEQ ID NO: 191876 - RNA, 32 nt, Human
ggcccuccgcucuccccuccgcuccccucccc

SEQ ID NO: 191877 - RNA, 24 nt, Human
ggcccuccgcugggaagcacuuga

SEQ ID NO: 191878 - RNA, 32 nt, Human
ggcccuccgucugccccuucuccgcagggccc

SEQ ID NO: 191879 - RNA, 32 nt, Human
ggcccuccucaaggucagccuucagauuuggg

SEQ ID NO: 191880 - RNA, 32 nt, Human
ggcccuccucaggccuccaguggccccaugcc

SEQ ID NO: 191881 - RNA, 22 nt, Human
ggcccuccuccacuucuuggua

SEQ ID NO: 191882 - RNA, 32 nt, Human
ggcccuccuccagggcccucugggguuggggu

SEQ ID NO: 191883 - RNA, 32 nt, Human
ggcccuccucccccucuccccacucccucaua

SEQ ID NO: 191884 - RNA, 32 nt, Human
ggcccuccuccccuucccuccccuccgccccc

SEQ ID NO: 191885 - RNA, 32 nt, Human
ggcccuccuccuccuccugguccuugcuaacg

SEQ ID NO: 191886 - RNA, 19 nt, Human
ggcccuccucucugcugcc

SEQ ID NO: 191887 - RNA, 19 nt, Human
ggcccuccucuggguccag

SEQ ID NO: 191888 - RNA, 32 nt, Human
ggcccuccugcagguccuagaucugagggacc

SEQ ID NO: 191889 - RNA, 32 nt, Human
ggcccuccugcucugaggguugaggaaggcuc

SEQ ID NO: 191890 - RNA, 32 nt, Human
ggcccuccugggaaggagggagcugcucagaa

SEQ ID NO: 191891 - RNA, 24 nt, Human
ggcccuccugugcuuauuuuucca

SEQ ID NO: 191892 - RNA, 32 nt, Human
ggcccuccuuucuccaggccugggcuacaggg

SEQ ID NO: 191893 - RNA, 18 nt, Human
ggcccuccuuucuugggu

SEQ ID NO: 191894 - RNA, 32 nt, Human
ggcccucgagccaccaucgcccgagccggagc

SEQ ID NO: 191895 - RNA, 18 nt, Human
ggcccucgccauccuccc

SEQ ID NO: 191896 - RNA, 20 nt, Human
ggcccucggaccccucugcc

SEQ ID NO: 191897 - RNA, 18 nt, Human
ggcccucggccgccccgc

SEQ ID NO: 191898 - RNA, 21 nt, Human
ggcccucggcgcgcgcagggg

SEQ ID NO: 191899 - RNA, 32 nt, Human
ggcccucggcuuccaccccucgucuucccucc

SEQ ID NO: 191900 - RNA, 20 nt, Human
ggcccucgggcgucugcgcc

SEQ ID NO: 191901 - RNA, 18 nt, Human
ggcccucgguccccugcc

SEQ ID NO: 191902 - RNA, 19 nt, Human
ggcccucgguccgcccucc

SEQ ID NO: 191903 - RNA, 18 nt, Human
ggcccucgucauccugcc

SEQ ID NO: 191904 - RNA, 32 nt, Human
ggcccucguggcccacgcuccaugccaguggc

SEQ ID NO: 191905 - RNA, 21 nt, Human
ggcccucgugggacugccgcc

SEQ ID NO: 191906 - RNA, 20 nt, Human
ggcccucuaguugccaugac

SEQ ID NO: 191907 - RNA, 32 nt, Human
ggcccucucagaggugcagcuuccaugucagu

SEQ ID NO: 191908 - RNA, 32 nt, Human
ggcccucuccucugcugacucugccguuucuc

SEQ ID NO: 191909 - RNA, 19 nt, Human
ggcccucuccuguccugcc

SEQ ID NO: 191910 - RNA, 32 nt, Human
ggcccucugaggcugcugagggccaaguacgc

SEQ ID NO: 191911 - RNA, 24 nt, Human
ggcccucugcaagaagcucaagga

SEQ ID NO: 191912 - RNA, 32 nt, Human
ggcccucugccgcaagaaacagugugagcuac

SEQ ID NO: 191913 - RNA, 32 nt, Human
ggcccucugcugcaagauguccguggaguaug

SEQ ID NO: 191914 - RNA, 32 nt, Human
ggcccucuggcccacagccauugguagcggug

SEQ ID NO: 191915 - RNA, 32 nt, Human
ggcccucugggagcuguuaucaucucagaucu

SEQ ID NO: 191916 - RNA, 20 nt, Human
ggcccucugguggccaggug

SEQ ID NO: 191917 - RNA, 32 nt, Human
ggcccucugucugggcgaacagcccccuccuc

SEQ ID NO: 191918 - RNA, 20 nt, Human
ggcccucugugaucaugccu

SEQ ID NO: 191919 - RNA, 21 nt, Human
ggcccucuuagcccucugccg

SEQ ID NO: 191920 - RNA, 23 nt, Human
ggcccucuucagcgcauccugcc

SEQ ID NO: 191921 - RNA, 22 nt, Human
ggcccucuugccuuggagccag

SEQ ID NO: 191922 - RNA, 18 nt, Human
ggcccucuugcugcugcc

SEQ ID NO: 191923 - RNA, 19 nt, Human
ggcccucuuucucuguggg

SEQ ID NO: 191924 - RNA, 32 nt, Human
ggcccugaagacacagaugacucaaccuaagc

SEQ ID NO: 191925 - RNA, 32 nt, Human
ggcccugaaggaggggcaggaggcaggggugg

SEQ ID NO: 191926 - RNA, 32 nt, Human
ggcccugaaggcugggggccaggcugucagug

SEQ ID NO: 191927 - RNA, 32 nt, Human
ggcccugaauccuccucugcuccagggcuggc

SEQ ID NO: 191928 - RNA, 17 nt, Human
ggcccugacccugccag

SEQ ID NO: 191929 - RNA, 18 nt, Human
ggcccugacccugcugcc

SEQ ID NO: 191930 - RNA, 18 nt, Human
ggcccugaccucugcugc

SEQ ID NO: 191931 - RNA, 32 nt, Human
ggcccugacuccccugcccuccagaggcccca

SEQ ID NO: 191932 - RNA, 32 nt, Human
ggcccugacuguaaacuagugaagagugaaug

SEQ ID NO: 191933 - RNA, 32 nt, Human
ggcccugacuguaaauuagugaagagugaaug

SEQ ID NO: 191934 - RNA, 32 nt, Human
ggcccugagaaaagccauuguggagccaacuc

SEQ ID NO: 191935 - RNA, 19 nt, Human
ggcccugagaaccccaggg

SEQ ID NO: 191936 - RNA, 20 nt, Human
ggcccugagaggcccccaga

SEQ ID NO: 191937 - RNA, 32 nt, Human
ggcccugagauggugggcccuugacaggccuu

SEQ ID NO: 191938 - RNA, 32 nt, Human
ggcccugagcaggggcuuggggcagcccagcc

SEQ ID NO: 191939 - RNA, 32 nt, Human
ggcccugagccccagcccccagccuccucccu

SEQ ID NO: 191940 - RNA, 32 nt, Human
ggcccugagccucccuuucucucccauguuuc

SEQ ID NO: 191941 - RNA, 32 nt, Human
ggcccugagcuggggagguggggaagauucgg

SEQ ID NO: 191942 - RNA, 20 nt, Human
ggcccugagcuucugcugcc

SEQ ID NO: 191943 - RNA, 25 nt, Human
ggcccugaggaacacccggcaguau

SEQ ID NO: 191944 - RNA, 24 nt, Human
ggcccugaggaacagccgcagcgu

SEQ ID NO: 191945 - RNA, 21 nt, Human
ggcccugaggacaguccugcc

SEQ ID NO: 191946 - RNA, 32 nt, Human
ggcccugaggcaggaccgcccuccugaccccu

SEQ ID NO: 191947 - RNA, 32 nt, Human
ggcccugagggacugcugcuuccuuccuuccu

SEQ ID NO: 191948 - RNA, 32 nt, Human
ggcccugaggggcagggagaugccaccaugcu

SEQ ID NO: 191949 - RNA, 32 nt, Human
ggcccugaggucaggauggggagcugcugccu

SEQ ID NO: 191950 - RNA, 32 nt, Human
ggcccugaguaccucuugccuuguuugcugcc

SEQ ID NO: 191951 - RNA, 32 nt, Human
ggcccugaguccugguuuccuggcagccugcu

SEQ ID NO: 191952 - RNA, 32 nt, Human
ggcccugaugauuuuuguauuuuuaguagaga

SEQ ID NO: 191953 - RNA, 32 nt, Human
ggcccugauguggaguagacagugcgcaccuc

SEQ ID NO: 191954 - RNA, 32 nt, Human
ggcccugauuucccugguuugagacucacuuc

SEQ ID NO: 191955 - RNA, 32 nt, Human
ggcccugcaagacacaggcucagcaugcagaa

SEQ ID NO: 191956 - RNA, 18 nt, Human
ggcccugcagccccuggg

SEQ ID NO: 191957 - RNA, 32 nt, Human
ggcccugcagccgucgccgcugccucgggcua

SEQ ID NO: 191958 - RNA, 32 nt, Human
ggcccugcagcuccagggcuggugcucuagca

SEQ ID NO: 191959 - RNA, 23 nt, Human
ggcccugcagcucucaugcugcc

SEQ ID NO: 191960 - RNA, 32 nt, Human
ggcccugcagggaccauggaauccagagcuga

SEQ ID NO: 191961 - RNA, 32 nt, Human
ggcccugcagggggccagccugggggaaccuc

SEQ ID NO: 191962 - RNA, 32 nt, Human
ggcccugcagugaggacacgcccugcccaguc

SEQ ID NO: 191963 - RNA, 32 nt, Human
ggcccugcaguguggagagacacauaagccuu

SEQ ID NO: 191964 - RNA, 19 nt, Human
ggcccugcauccugccagg

SEQ ID NO: 191965 - RNA, 32 nt, Human
ggcccugcauuuucacgcugugcuaagcagcc

SEQ ID NO: 191966 - RNA, 21 nt, Human
ggcccugccacagcccucccu

SEQ ID NO: 191967 - RNA, 17 nt, Human
ggcccugccacccaggg

SEQ ID NO: 191968 - RNA, 32 nt, Human
ggcccugccacucuccccaagagggccuccau

SEQ ID NO: 191969 - RNA, 19 nt, Human
ggcccugccacugcccagg

SEQ ID NO: 191970 - RNA, 32 nt, Human
ggcccugccagguuguuuugcauaugugcauu

SEQ ID NO: 191971 - RNA, 32 nt, Human
ggcccugccccagccuguguagcucuuccugc

SEQ ID NO: 191972 - RNA, 32 nt, Human
ggcccugcccccgggcgauggugcaggcuggu

SEQ ID NO: 191973 - RNA, 32 nt, Human
ggcccugccccucuccccacauguaucccucg

SEQ ID NO: 191974 - RNA, 18 nt, Human
ggcccugcccuugccaga

SEQ ID NO: 191975 - RNA, 27 nt, Human
ggcccugcccuuggcaccaccagggug

SEQ ID NO: 191976 - RNA, 23 nt, Human
ggcccugccgggaacccaggcug

SEQ ID NO: 191977 - RNA, 21 nt, Human
ggcccugccggguggugcagg

SEQ ID NO: 191978 - RNA, 23 nt, Human
ggcccugccuaagccucagcaga

SEQ ID NO: 191979 - RNA, 32 nt, Human
ggcccugccuauacucugguggccugguccug

SEQ ID NO: 191980 - RNA, 18 nt, Human
ggcccugccucugcugcc

SEQ ID NO: 191981 - RNA, 18 nt, Human
ggcccugccugagccagg

SEQ ID NO: 191982 - RNA, 20 nt, Human
ggcccugccugcagccaggg

SEQ ID NO: 191983 - RNA, 21 nt, Human
ggcccugccugccacccuagg

SEQ ID NO: 191984 - RNA, 19 nt, Human
ggcccugccugcucccagg

SEQ ID NO: 191985 - RNA, 20 nt, Human
ggcccugccuggacccaggg

SEQ ID NO: 191986 - RNA, 21 nt, Human
ggcccugccuucccaccacca

SEQ ID NO: 191987 - RNA, 18 nt, Human
ggcccugccuucugccgc

SEQ ID NO: 191988 - RNA, 30 nt, Human
ggcccugccuugucccugcuccugugcuuu

SEQ ID NO: 191989 - RNA, 32 nt, Human
ggcccugccuugugcauguccauagugaggcu

SEQ ID NO: 191990 - RNA, 32 nt, Human
ggcccugcgagcagcagugccgagaugaaccc

SEQ ID NO: 191991 - RNA, 32 nt, Human
ggcccugcgcccugugcagggaaagggauggu

SEQ ID NO: 191992 - RNA, 32 nt, Human
ggcccugcgccugcccagccucgggugagccg

SEQ ID NO: 191993 - RNA, 32 nt, Human
ggcccugcggggcccagcccugccucagcugg

SEQ ID NO: 191994 - RNA, 25 nt, Human
ggcccugcuaagauucccucuacca

SEQ ID NO: 191995 - RNA, 18 nt, Human
ggcccugcuacuugaggg

SEQ ID NO: 191996 - RNA, 32 nt, Human
ggcccugcucacgucucggggcauuuuggcag

SEQ ID NO: 191997 - RNA, 32 nt, Human
ggcccugcuccucugcuggggucggccccgca

SEQ ID NO: 191998 - RNA, 32 nt, Human
ggcccugcuccuuccuccucuagguccaggcc

SEQ ID NO: 191999 - RNA, 32 nt, Human
ggcccugcucugugaccgccaggaugacugug

SEQ ID NO: 192000 - RNA, 32 nt, Human
ggcccugcucuuccucagcugugugggucaua

SEQ ID NO: 192001 - RNA, 22 nt, Human
ggcccugcugccucucucccuc

SEQ ID NO: 192002 - RNA, 32 nt, Human
ggcccugcugcucucucaggaccauccgauca

SEQ ID NO: 192003 - RNA, 32 nt, Human
ggcccugcugcuggugcuccucgccucuuggg

SEQ ID NO: 192004 - RNA, 20 nt, Human
ggcccugcuggaccagugug

SEQ ID NO: 192005 - RNA, 21 nt, Human
ggcccugcuggaccccaaggg

SEQ ID NO: 192006 - RNA, 32 nt, Human
ggcccugcuggagcaucucccccaagcccacu

SEQ ID NO: 192007 - RNA, 32 nt, Human
ggcccugcuggcagggacuugcaguggauucu

SEQ ID NO: 192008 - RNA, 22 nt, Human
ggcccugcuggccacgcagggg

SEQ ID NO: 192009 - RNA, 32 nt, Human
ggcccugcugucaaccucuccuccaggcccug

SEQ ID NO: 192010 - RNA, 22 nt, Human
ggcccugcugucgggccccagg

SEQ ID NO: 192011 - RNA, 23 nt, Human
ggcccugcuucacccacgccaga

SEQ ID NO: 192012 - RNA, 32 nt, Human
ggcgcgugcuuguaaucccagcuacucaggag

SEQ ID NO: 192013 - RNA, 32 nt, Human
ggcgcguggaggaggaggaaaaggagggaaag

SEQ ID NO: 192014 - RNA, 24 nt, Human
ggcgcguggcggcgcucggccucg

SEQ ID NO: 192015 - RNA, 22 nt, Human
ggcgcguggggugcagcgggag

SEQ ID NO: 192016 - RNA, 32 nt, Human
ggcgcguguguguagagccucagggcugagug

SEQ ID NO: 192017 - RNA, 32 nt, Human
ggcgcuacugaggccgcggagccggacugcgg

SEQ ID NO: 192018 - RNA, 32 nt, Human
ggcgcuagaggcaagaggaagggggucugcga

SEQ ID NO: 192019 - RNA, 21 nt, Human
ggcgcuagcaaacuucugcca

SEQ ID NO: 192020 - RNA, 22 nt, Human
ggcgcuagcccagcccgaccca

SEQ ID NO: 192021 - RNA, 32 nt, Human
ggcgcuagugggagacagggggcaggccagag

SEQ ID NO: 192022 - RNA, 22 nt, Human
ggcgcuaucucggcucgcugca

SEQ ID NO: 192023 - RNA, 32 nt, Human
ggcgcuauugcacuccagucuggguaacaggg

SEQ ID NO: 192024 - RNA, 32 nt, Human
ggcgcucaccuguaaucccaccauuuugggag

SEQ ID NO: 192025 - RNA, 32 nt, Human
ggcgcucaccuguaaucccggcuacucgggag

SEQ ID NO: 192026 - RNA, 32 nt, Human
ggcgcucagccuuggcuggaguagaauuaagu

SEQ ID NO: 192027 - RNA, 32 nt, Human
ggcgcucaucacagccacacuguacaagcuug

SEQ ID NO: 192028 - RNA, 32 nt, Human
ggcgcucauggacggaagaccccuggcucuau

SEQ ID NO: 192029 - RNA, 32 nt, Human
ggcgcuccaggccgcgcccccuuggcgccggg

SEQ ID NO: 192030 - RNA, 32 nt, Human
ggcgcuccgauccccuccucccucucuccgaa

SEQ ID NO: 192031 - RNA, 32 nt, Human
ggcgcuccgggacguggcaccuccucggcugg

SEQ ID NO: 192032 - RNA, 32 nt, Human
ggcgcuccuaaccucccgaacggggcggcugg

SEQ ID NO: 192033 - RNA, 32 nt, Human
ggcgcuccucaagauggcugccgacagugagc

SEQ ID NO: 192034 - RNA, 32 nt, Human
ggcgcuccugcugccgucucugcuccaggaag

SEQ ID NO: 192035 - RNA, 32 nt, Human
ggcgcuccuggugugugacuggguguccuggc

SEQ ID NO: 192036 - RNA, 32 nt, Human
ggcgcucgcucgggaccuuccaccucuccaac

SEQ ID NO: 192037 - RNA, 32 nt, Human
ggcgcucggggcccggccccucccucucccug

SEQ ID NO: 192038 - RNA, 20 nt, Human
ggcgcucgucccgucccaag

SEQ ID NO: 192039 - RNA, 31 nt, Human
ggcgcucucgcaaaugaagcugcaggccaag

SEQ ID NO: 192040 - RNA, 32 nt, Human
ggcgcucucuggguuuuauuguuauguggguu

SEQ ID NO: 192041 - RNA, 32 nt, Human
ggcgcucugcccuggagacuccggacacugac

SEQ ID NO: 192042 - RNA, 32 nt, Human
ggcgcucuggaaaagacagggagccaggcccu

SEQ ID NO: 192043 - RNA, 32 nt, Human
ggcgcucugggaacucugcuagaaucacucau

SEQ ID NO: 192044 - RNA, 19 nt, Human
ggcgcucuggguccacagg

SEQ ID NO: 192045 - RNA, 32 nt, Human
ggcgcucuggguggaggagaccagcucuaggc

SEQ ID NO: 192046 - RNA, 32 nt, Human
ggcgcucugucugccucugccugccagcucau

SEQ ID NO: 192047 - RNA, 32 nt, Human
ggcgcucuucagguucugccucugggaggcug

SEQ ID NO: 192048 - RNA, 26 nt, Human
ggcgcucuuggagguggugucggaga

SEQ ID NO: 192049 - RNA, 19 nt, Human
ggcgcugagauccccacag

SEQ ID NO: 192050 - RNA, 32 nt, Human
ggcgcugaggugucuggccugaggucaauggu

SEQ ID NO: 192051 - RNA, 32 nt, Human
ggcgcugauggccauggagggcuaccggcgcu

SEQ ID NO: 192052 - RNA, 32 nt, Human
ggcgcugcacucuagccugggugacagaguca

SEQ ID NO: 192053 - RNA, 19 nt, Human
ggcgcugcagccaccaggg

SEQ ID NO: 192054 - RNA, 31 nt, Human
ggcgcugccacgucugggccgcgguucccaa

SEQ ID NO: 192055 - RNA, 32 nt, Human
ggcgcugccagccucacgcucugggcacagcu

SEQ ID NO: 192056 - RNA, 32 nt, Human
ggcgcugccagccuccuccugcgcacagaucg

SEQ ID NO: 192057 - RNA, 32 nt, Human
ggcgcugccagccuggcugcuacugcccacca

SEQ ID NO: 192058 - RNA, 32 nt, Human
ggcgcugccccagagccacaaccagcccgccu

SEQ ID NO: 192059 - RNA, 32 nt, Human
ggcgcugccgccugccaggccauccggccccc

SEQ ID NO: 192060 - RNA, 21 nt, Human
ggcgcugcggcaguccagauc

SEQ ID NO: 192061 - RNA, 32 nt, Human
ggcgcugcggccugggagccucggggagaugc

SEQ ID NO: 192062 - RNA, 18 nt, Human
ggcgcugcgggcggggca

SEQ ID NO: 192063 - RNA, 32 nt, Human
ggcgcugcucacuguuuuccugcuucaguuuu

SEQ ID NO: 192064 - RNA, 32 nt, Human
ggcgcugcugagacgguggccagaucccagcg

SEQ ID NO: 192065 - RNA, 32 nt, Human
ggcgcugcugcacucaagcuuggaugacagag

SEQ ID NO: 192066 - RNA, 32 nt, Human
ggcgcugcugccaucuuuccucccagguggaa

SEQ ID NO: 192067 - RNA, 22 nt, Human
ggcgcuggaauuacaugaacau

SEQ ID NO: 192068 - RNA, 18 nt, Human
ggcgcuggacagaggggc

SEQ ID NO: 192069 - RNA, 19 nt, Human
ggcgcuggaccucagcaug

SEQ ID NO: 192070 - RNA, 20 nt, Human
ggcgcuggagccaggaccug

SEQ ID NO: 192071 - RNA, 32 nt, Human
ggcgcuggagccaggaccuggcguugggcggu

SEQ ID NO: 192072 - RNA, 19 nt, Human
ggcgcuggauuuugggaca

SEQ ID NO: 192073 - RNA, 17 nt, Human
ggcgcuggcagaggaca

SEQ ID NO: 192074 - RNA, 32 nt, Human
ggcgcuggcggcgcgcccugccccacggaccc

SEQ ID NO: 192075 - RNA, 32 nt, Human
ggcgcuggcuccgucugccagggaugacggcg

SEQ ID NO: 192076 - RNA, 21 nt, Human
ggcgcuggcuucaggaauaug

SEQ ID NO: 192077 - RNA, 32 nt, Human
ggcgcugggaauggccauguggaacaggccau

SEQ ID NO: 192078 - RNA, 32 nt, Human
ggcgcugggagagggcggagggggaggcggcg

SEQ ID NO: 192079 - RNA, 32 nt, Human
ggcgcugggaggacgcggcggcgcugggaacg

SEQ ID NO: 192080 - RNA, 32 nt, Human
ggcgcugggagggagaccagggcgcaguuccg

SEQ ID NO: 192081 - RNA, 32 nt, Human
ggcgcugggagguggagucguugcuguugcug

SEQ ID NO: 192082 - RNA, 32 nt, Human
ggcgcugggcuggagagcagguucgggcagcc

SEQ ID NO: 192083 - RNA, 32 nt, Human
ggcgcugguacugcugcuugcugguggagucc

SEQ ID NO: 192084 - RNA, 32 nt, Human
ggcgcuggugcuagguuccagugugggaggag

SEQ ID NO: 192085 - RNA, 18 nt, Human
ggcgcuguagucucaaag

SEQ ID NO: 192086 - RNA, 32 nt, Human
ggcgcugucuuccucccuuccccugggggucc

SEQ ID NO: 192087 - RNA, 32 nt, Human
ggcgcugugcagccucaccccgggcaggggcg

SEQ ID NO: 192088 - RNA, 19 nt, Human
ggcgcuguggagcgcaggg

SEQ ID NO: 192089 - RNA, 32 nt, Human
ggcgcuguggaggaggcagagaucagauuugu

SEQ ID NO: 192090 - RNA, 19 nt, Human
ggcgcuguuccacagugac

SEQ ID NO: 192091 - RNA, 32 nt, Human
ggcgcuuacccugcuuugggccugcguugcug

SEQ ID NO: 192092 - RNA, 32 nt, Human
ggcgcuucaauuaucccuccccacaaagauag

SEQ ID NO: 192093 - RNA, 32 nt, Human
ggcgcuucacacaccuuuucacuucuuggcac

SEQ ID NO: 192094 - RNA, 32 nt, Human
ggcgcuuccccuucuccucuggcuccgggguu

SEQ ID NO: 192095 - RNA, 32 nt, Human
ggcgcuuccugccucauccucggcugcauggg

SEQ ID NO: 192096 - RNA, 32 nt, Human
ggcgcuucuagaaggagguuaaaauggaaaau

SEQ ID NO: 192097 - RNA, 18 nt, Human
ggcgcuugagcccgcaag

SEQ ID NO: 192098 - RNA, 32 nt, Human
ggcgcuugccuguagucuagcuacuuggggug

SEQ ID NO: 192099 - RNA, 16 nt, Human
ggcgcuuguaauccca

SEQ ID NO: 192100 - RNA, 19 nt, Human
ggcgcuuguaaucccagcu

SEQ ID NO: 192101 - RNA, 32 nt, Human
ggcgcuuguaaucccagcuacuugggaggcug

SEQ ID NO: 192102 - RNA, 32 nt, Human
ggcgcuugucccauccuggacuuuuccucuca

SEQ ID NO: 192103 - RNA, 32 nt, Human
ggcgcuuguccccagugaguggcuguguccuc

SEQ ID NO: 192104 - RNA, 32 nt, Human
ggcgcuuuagggacuggacuugcaguguaaac

SEQ ID NO: 192105 - RNA, 32 nt, Human
ggcgcuuucauuuugcacucuaacuuaagagu

SEQ ID NO: 192106 - RNA, 19 nt, Human
ggcggaaagaaggcaccag

SEQ ID NO: 192107 - RNA, 19 nt, Human
ggcggaaaugcucucccca

SEQ ID NO: 192108 - RNA, 18 nt, Human
ggcggaacagccagagga

SEQ ID NO: 192109 - RNA, 32 nt, Human
ggcggaaccagccccggcugggcagcagcggg

SEQ ID NO: 192110 - RNA, 32 nt, Human
ggcggaaccgcgcugccgcagccugggauucc

SEQ ID NO: 192111 - RNA, 32 nt, Human
ggcggaacgcacuucgaccaccucucaggcgc

SEQ ID NO: 192112 - RNA, 32 nt, Human
ggcggaagaggaggaggaggaggaggaagggg

SEQ ID NO: 192113 - RNA, 32 nt, Human
ggcggaagaucaagcaaaggcagagagggagg

SEQ ID NO: 192114 - RNA, 20 nt, Human
ggcggaagcggcgagggcgg

SEQ ID NO: 192115 - RNA, 32 nt, Human
ggcggaaggcggacgaaaacagaacggaagac

SEQ ID NO: 192116 - RNA, 32 nt, Human
ggcggaaggcggggcgugggggucuguggcug

SEQ ID NO: 192117 - RNA, 20 nt, Human
ggcggaaucccuucugcucu

SEQ ID NO: 192118 - RNA, 20 nt, Human
ggcggacacuugagcccagg

SEQ ID NO: 192119 - RNA, 24 nt, Human
ggcggacagagugagacccuaucu

SEQ ID NO: 192120 - RNA, 32 nt, Human
ggcggacagcagggcggacagcagggaggaca

SEQ ID NO: 192121 - RNA, 32 nt, Human
ggcggacaucuguaaucccagcuacucaggag

SEQ ID NO: 192122 - RNA, 32 nt, Human
ggcggacccagaggggacauggagaggaacgc

SEQ ID NO: 192123 - RNA, 32 nt, Human
ggcggaccucacccuucucuucccaggucuau

SEQ ID NO: 192124 - RNA, 32 nt, Human
ggcggaccugggaagccuggauggcaaguggg

SEQ ID NO: 192125 - RNA, 32 nt, Human
ggcggacgcaggcagagaagcugcaggagcug

SEQ ID NO: 192126 - RNA, 32 nt, Human
ggcggacgccuguaaucccagcuacuuggaag

SEQ ID NO: 192127 - RNA, 32 nt, Human
ggcggacucaggcuggggucugcagugcagca

SEQ ID NO: 192128 - RNA, 32 nt, Human
ggcggacugugaggcagccaggagccagcugc

SEQ ID NO: 192129 - RNA, 32 nt, Human
ggcggagaagucgggaggggacaggaagggag

SEQ ID NO: 192130 - RNA, 32 nt, Human
ggcggagagagaaggaaggaggugguugugca

SEQ ID NO: 192131 - RNA, 32 nt, Human
ggcggagaggggagaagaaggaagggaagggc

SEQ ID NO: 192132 - RNA, 32 nt, Human
ggcggagcaggcggcggugcaggaggcccgug

SEQ ID NO: 192133 - RNA, 32 nt, Human
ggcggagcagggcugagcccgcugcccgcccg

SEQ ID NO: 192134 - RNA, 32 nt, Human
ggcggagccagagagauguaacuucacccugg

SEQ ID NO: 192135 - RNA, 22 nt, Human
ggcggagcgcgucccgcagccg

SEQ ID NO: 192136 - RNA, 32 nt, Human
ggcggagcugcugcggaucaggacccgagccg

SEQ ID NO: 192137 - RNA, 20 nt, Human
ggcggagcuggagccccggg

SEQ ID NO: 192138 - RNA, 24 nt, Human
ggcggaggaggaggaggagcggga

SEQ ID NO: 192139 - RNA, 32 nt, Human
ggcggaggaggaggaggagcgggaggagcgcg

SEQ ID NO: 192140 - RNA, 32 nt, Human
ggcggaggaggagggaaggaagauggcggccg

SEQ ID NO: 192141 - RNA, 32 nt, Human
ggcggaggaggcggcggcggcgauggagguga

SEQ ID NO: 192142 - RNA, 32 nt, Human
ggcggaggcaccaagcccuguuuucuuggugu

SEQ ID NO: 192143 - RNA, 32 nt, Human
ggcggaggcagaggaagagggagcgggagcuc

SEQ ID NO: 192144 - RNA, 32 nt, Human
ggcggaggcgggaggaucaugaggucaggaga

SEQ ID NO: 192145 - RNA, 18 nt, Human
ggcggaggcggggcggcu

SEQ ID NO: 192146 - RNA, 32 nt, Human
ggcggaggcgggguuucaguggcuucuggugc

SEQ ID NO: 192147 - RNA, 19 nt, Human
ggcggaggcucccguggcc

SEQ ID NO: 192148 - RNA, 32 nt, Human
ggcggaggcuucccacggggaggcaggaagaa

SEQ ID NO: 192149 - RNA, 32 nt, Human
ggcggagggagagcaggagccacugagaugag

SEQ ID NO: 192150 - RNA, 32 nt, Human
ggcggagggaggcggcggcggcggcggcggga

SEQ ID NO: 192151 - RNA, 32 nt, Human
ggcggagggggagagcgcgggccgcgcgggcg

SEQ ID NO: 192152 - RNA, 32 nt, Human
ggcggaggugggcaccacugaguugcacucag

SEQ ID NO: 192153 - RNA, 32 nt, Human
ggcggagguugcagugaguugcagucacaccc

SEQ ID NO: 192154 - RNA, 32 nt, Human
ggcggaguaaagggacuugagcgagccaguug

SEQ ID NO: 192155 - RNA, 20 nt, Human
ggcggagucggcgccgagaa

SEQ ID NO: 192156 - RNA, 32 nt, Human
ggcggagucggggauggagggagcuggccaca

SEQ ID NO: 192157 - RNA, 32 nt, Human
ggcggagucugaggcccgagccaagauggcgg

SEQ ID NO: 192158 - RNA, 32 nt, Human
ggcggagugagggugaggagccugguccaggg

SEQ ID NO: 192159 - RNA, 32 nt, Human
ggcggaguucugagaggaacugggaagcaggc

SEQ ID NO: 192160 - RNA, 18 nt, Human
ggcggauaaccugagguc

SEQ ID NO: 192161 - RNA, 32 nt, Human
ggcggaucacaaggucaggagaucgagaccau

SEQ ID NO: 192162 - RNA, 32 nt, Human
ggcggaucacaugaggccaggaauucgagacc

SEQ ID NO: 192163 - RNA, 32 nt, Human
ggcggaucaccugaggccaggaguucaagacc

SEQ ID NO: 192164 - RNA, 16 nt, Human
ggcggaucacgagguc

SEQ ID NO: 192165 - RNA, 19 nt, Human
ggcggaucacgaggucagg

SEQ ID NO: 192166 - RNA, 32 nt, Human
ggcggaucacgaggucaggaaaucgagaccau

SEQ ID NO: 192167 - RNA, 32 nt, Human
ggcggaucacgaggucaggagaccgagaucau

SEQ ID NO: 192168 - RNA, 32 nt, Human
ggcggaucacuugaggccagcaguuugagacc

SEQ ID NO: 192169 - RNA, 32 nt, Human
ggcggaucacuugaggccaggaguucaagacc

SEQ ID NO: 192170 - RNA, 32 nt, Human
ggcggaucacuugaggccaggaguucgagacc

SEQ ID NO: 192171 - RNA, 32 nt, Human
ggcggaucacuugaggccaggaguuugagacc

SEQ ID NO: 192172 - RNA, 32 nt, Human
ggcggaucacuugaggccagggguuugagacc

SEQ ID NO: 192173 - RNA, 19 nt, Human
ggcggaucacuugagguca

SEQ ID NO: 192174 - RNA, 32 nt, Human
ggcggaucaucugaggccaggaguucgagacc

SEQ ID NO: 192175 - RNA, 32 nt, Human
ggcggaucccuuacacucaggaguucaagacc

SEQ ID NO: 192176 - RNA, 32 nt, Human
ggcggaucgcuugagcccaggagaccagguug

SEQ ID NO: 192177 - RNA, 21 nt, Human
ggcggaucgcuugagcucagg

SEQ ID NO: 192178 - RNA, 32 nt, Human
ggcggaucgcuugaggagaguucgugaucagc

SEQ ID NO: 192179 - RNA, 32 nt, Human
ggcggaucugcaagcaccucggagcacccacc

SEQ ID NO: 192180 - RNA, 23 nt, Human
ggcggaugccuguaaucccagcu

SEQ ID NO: 192181 - RNA, 32 nt, Human
ggcggaugccuguaaucccagcuacuugggag

SEQ ID NO: 192182 - RNA, 32 nt, Human
ggcggauggaggccugacgucccuggaguuga

SEQ ID NO: 192183 - RNA, 32 nt, Human
ggcggauggaucaccugaggucgggaauucga

SEQ ID NO: 192184 - RNA, 32 nt, Human
ggcggauggaucacuugaggucaggggaucac

SEQ ID NO: 192185 - RNA, 32 nt, Human
ggcggauguugcuugcacuccagccuggguga

SEQ ID NO: 192186 - RNA, 21 nt, Human
ggcggauugccugagcucagg

SEQ ID NO: 192187 - RNA, 32 nt, Human
ggcggauuggguaggaggauuacuugaggcca

SEQ ID NO: 192188 - RNA, 21 nt, Human
ggcggcaagggcgggagggag

SEQ ID NO: 192189 - RNA, 32 nt, Human
ggcggcacaguggccaagucgauuggccgugg

SEQ ID NO: 192190 - RNA, 32 nt, Human
ggcggcaccacugccgucauuucagcuucugg

SEQ ID NO: 192191 - RNA, 32 nt, Human
ggcggcagagacagaagagcggggucggggcc

SEQ ID NO: 192192 - RNA, 19 nt, Human
ggcggcagaggaacaggag

SEQ ID NO: 192193 - RNA, 32 nt, Human
ggcggcagcagguugguuuccacagcccggcc

SEQ ID NO: 192194 - RNA, 20 nt, Human
ggcggcagccagcgagggag

SEQ ID NO: 192195 - RNA, 18 nt, Human
ggcggcagcgacgaagga

SEQ ID NO: 192196 - RNA, 32 nt, Human
ggcggcagcgcccugccgacgccggggaggga

SEQ ID NO: 192197 - RNA, 32 nt, Human
ggcggcagcggugggagaugccggggcggccg

SEQ ID NO: 192198 - RNA, 32 nt, Human
ggcggcagcgguuggagguuguaggaccggcg

SEQ ID NO: 192199 - RNA, 32 nt, Human
ggcggcaggaccagcaugcaccaccgaaacga

SEQ ID NO: 192200 - RNA, 32 nt, Human
ggcggcaggcagcaggcuguggaggaggcccc

SEQ ID NO: 192201 - RNA, 32 nt, Human
ggcggcaggcccgggucaggugccucgagauc

SEQ ID NO: 192202 - RNA, 22 nt, Human
ggcggcaggcggcaggcagcag

SEQ ID NO: 192203 - RNA, 32 nt, Human
ggcggcagggcccgggcggagccccggggagu

SEQ ID NO: 192204 - RNA, 22 nt, Human
ggcggcaggguggcggacggag

SEQ ID NO: 192205 - RNA, 22 nt, Human
ggcggcagggugggggagggag

SEQ ID NO: 192206 - RNA, 32 nt, Human
ggcggcaguggaggggacaguggaggcuggag

SEQ ID NO: 192207 - RNA, 32 nt, Human
ggcggcaucacugagaugcucaguccugaauu

SEQ ID NO: 192208 - RNA, 32 nt, Human
ggcggcaucugcaaauuaaggggacagagcaa

SEQ ID NO: 192209 - RNA, 32 nt, Human
ggcggcauuuugccccuguccuagagauuugu

SEQ ID NO: 192210 - RNA, 32 nt, Human
ggcggccacacuucccucccucccucccuucc

SEQ ID NO: 192211 - RNA, 32 nt, Human
ggcggccacccccgccuccaccacuuuccacc

SEQ ID NO: 192212 - RNA, 32 nt, Human
ggcggccacuggcucuguguccuuggggaagc

SEQ ID NO: 192213 - RNA, 20 nt, Human
ggcggccagaggccugggca

SEQ ID NO: 192214 - RNA, 32 nt, Human
ggcggccaggaggugagauggcagcugggcaa

SEQ ID NO: 192215 - RNA, 32 nt, Human
ggcggccagugaccacggccaagcagggccug

SEQ ID NO: 192216 - RNA, 19 nt, Human
ggcggccauccagaagcug

SEQ ID NO: 192217 - RNA, 32 nt, Human
ggcggccauggaguugggcgagcugcucuaca

SEQ ID NO: 192218 - RNA, 28 nt, Human
ggcggcccaaguggagcucaccucuccc

SEQ ID NO: 192219 - RNA, 32 nt, Human
ggcggcccagcacuuccucagacacaacuucu

SEQ ID NO: 192220 - RNA, 21 nt, Human
ggcggcccaggcccccagcac

SEQ ID NO: 192221 - RNA, 32 nt, Human
ggcggccccacuggcccucucaggcugcggag

SEQ ID NO: 192222 - RNA, 18 nt, Human
ggcggcccccauggcguc

SEQ ID NO: 192223 - RNA, 32 nt, Human
ggcggccccugcccagccccagcuaugugcac

SEQ ID NO: 192224 - RNA, 32 nt, Human
ggcggcccuccagcuucugcagguggugcugg

SEQ ID NO: 192225 - RNA, 32 nt, Human
ggcggcccugggagcagagguggagcgacccc

SEQ ID NO: 192226 - RNA, 32 nt, Human
ggcggcccuguugcccuggagacgcuuucccu

SEQ ID NO: 192227 - RNA, 32 nt, Human
ggcggccgagacuggcggggguggacgcccgg

SEQ ID NO: 192228 - RNA, 32 nt, Human
ggcggccgagaggggcggcggcggcggcggcg

SEQ ID NO: 192229 - RNA, 32 nt, Human
ggcggccgaggaggaggagggggaagcggcgg

SEQ ID NO: 192230 - RNA, 22 nt, Human
ggcggccgaggcgcccggcgca

SEQ ID NO: 192231 - RNA, 32 nt, Human
ggcggccgcagcccuggcugacugcacggcuu

SEQ ID NO: 192232 - RNA, 22 nt, Human
ggcggccgcagccucggcuaca

SEQ ID NO: 192233 - RNA, 32 nt, Human
ggcggccgccccagugcugauggagaugccac

SEQ ID NO: 192234 - RNA, 32 nt, Human
ggcggccgcugcaaaguuuccccggcggcggc

SEQ ID NO: 192235 - RNA, 32 nt, Human
ggcggccggaggaucgccgagcucaggguccc

SEQ ID NO: 192236 - RNA, 32 nt, Human
ggcggccggcgcaauucugccucucagagaga

SEQ ID NO: 192237 - RNA, 32 nt, Human
ggcggccggcgugggagccgggggaccaccau

SEQ ID NO: 192238 - RNA, 32 nt, Human
ggcggccgggagggaguugucggcgccgcggc

SEQ ID NO: 192239 - RNA, 21 nt, Human
ggcggccgggucucgaccaca

SEQ ID NO: 192240 - RNA, 32 nt, Human
ggcggccggguggcgggggugaguggggccag

SEQ ID NO: 192241 - RNA, 32 nt, Human
ggcggccgugaacucagacaccagagaugaag

SEQ ID NO: 192242 - RNA, 32 nt, Human
ggcggccuaccuccacaccacaaccaccuuca

SEQ ID NO: 192243 - RNA, 32 nt, Human
ggcggccuccaggaagcggaaaagcaaggggc

SEQ ID NO: 192244 - RNA, 32 nt, Human
ggcggccucuaugugcucaggugcagaccuuc

SEQ ID NO: 192245 - RNA, 32 nt, Human
ggcggccucuuugcgagcaucagucuauugag

SEQ ID NO: 192246 - RNA, 32 nt, Human
ggcggccugagcgugaugcuccggguucucgg

SEQ ID NO: 192247 - RNA, 19 nt, Human
ggcggccuggagccccggg

SEQ ID NO: 192248 - RNA, 32 nt, Human
ggcggccugugcagcgcggcccccggcggggg

SEQ ID NO: 192249 - RNA, 22 nt, Human
ggcggccuuccccugcaguccu

SEQ ID NO: 192250 - RNA, 32 nt, Human
ggcggcgacggcagcccugaaaugcauuuucc

SEQ ID NO: 192251 - RNA, 18 nt, Human
ggcggcgacggccgggcg

SEQ ID NO: 192252 - RNA, 32 nt, Human
ggcggcgacggcgacauggagagcggggccua

SEQ ID NO: 192253 - RNA, 32 nt, Human
ggcggcgacugccugccugccuggguugcgga

SEQ ID NO: 192254 - RNA, 32 nt, Human
ggcggcgagaucagccuccugucucaucugga

SEQ ID NO: 192255 - RNA, 32 nt, Human
ggcggcgagaucugggcucggguugaggaguu

SEQ ID NO: 192256 - RNA, 32 nt, Human
ggcggcgagccgcggcccagaccccggcagag

SEQ ID NO: 192257 - RNA, 32 nt, Human
ggcggcgaggagcagagggagcggaggagggg

SEQ ID NO: 192258 - RNA, 32 nt, Human
ggcggcgcagagaagagcacggcgccggcgca

SEQ ID NO: 192259 - RNA, 32 nt, Human
ggcggcgcaggcggagagaacauugaaaguau

SEQ ID NO: 192260 - RNA, 32 nt, Human
ggcggcgccagccuggcucucggcucgggcga

SEQ ID NO: 192261 - RNA, 32 nt, Human
ggcggcgccggaggacgcggaggacucccugg

SEQ ID NO: 192262 - RNA, 29 nt, Human
ggcggcgccuguaaucccagcuacuuggg

SEQ ID NO: 192263 - RNA, 17 nt, Human
ggcggcgcgcggaggag

SEQ ID NO: 192264 - RNA, 32 nt, Human
ggcggcgcugggagguggagucguugcuguug

SEQ ID NO: 192265 - RNA, 32 nt, Human
ggcggcgcuuggcagccaggagcucugcauug

SEQ ID NO: 192266 - RNA, 32 nt, Human
ggcggcggaggaggagaaaggaaagaggaagg

SEQ ID NO: 192267 - RNA, 32 nt, Human
ggcggcggaggaggaggaggagcgggaggagc

SEQ ID NO: 192268 - RNA, 32 nt, Human
ggcggcggagggcagagcaggcccugcggaga

SEQ ID NO: 192269 - RNA, 32 nt, Human
ggcggcggcaaaggaaaaugcuuggacagaag

SEQ ID NO: 192270 - RNA, 32 nt, Human
ggcggcggcaacaaugcacggagccgccagag

SEQ ID NO: 192271 - RNA, 20 nt, Human
ggcggcggcagcagaggcgg

SEQ ID NO: 192272 - RNA, 32 nt, Human
ggcggcggcagccucuccucuggccgauggac

SEQ ID NO: 192273 - RNA, 32 nt, Human
ggcggcggcccgggcucagaggggccuuccag

SEQ ID NO: 192274 - RNA, 32 nt, Human
ggcggcggccgaggcggcgucguuauuuccgu

SEQ ID NO: 192275 - RNA, 20 nt, Human
ggcggcggcgacgggugcgg

SEQ ID NO: 192276 - RNA, 18 nt, Human
ggcggcggcgcagaggag

SEQ ID NO: 192277 - RNA, 32 nt, Human
ggcggcggcgcagaggaggaggcaggcggcgg

SEQ ID NO: 192278 - RNA, 18 nt, Human
ggcggcggcgcggaggag

SEQ ID NO: 192279 - RNA, 20 nt, Human
ggcggcggcgcuuggccaua

SEQ ID NO: 192280 - RNA, 32 nt, Human
ggcggcggcggcagaggcggcgggaggaugac

SEQ ID NO: 192281 - RNA, 32 nt, Human
ggcggcggcggcagcagcaggagcagccccgg

SEQ ID NO: 192282 - RNA, 32 nt, Human
ggcggcggcggcagcagcgcggcucggucucu

SEQ ID NO: 192283 - RNA, 32 nt, Human
ggcggcggcggcagcggcgcucgagcgguucc

SEQ ID NO: 192284 - RNA, 18 nt, Human
ggcggcggcggcgcggcg

SEQ ID NO: 192285 - RNA, 32 nt, Human
ggcggcggcggcggaggcaggagcagccuggg

SEQ ID NO: 192286 - RNA, 32 nt, Human
ggcggcggcggcggaggcgucgguggaggagg

SEQ ID NO: 192287 - RNA, 32 nt, Human
ggcggcggcggcggaggcugccauggacgacg

SEQ ID NO: 192288 - RNA, 32 nt, Human
ggcggcggcggcggccccagacucccuccgga

SEQ ID NO: 192289 - RNA, 26 nt, Human
ggcggcggcggcggccgaggaggagg

SEQ ID NO: 192290 - RNA, 32 nt, Human
ggcggcggcggcggcggcagcugcuugggcgc

SEQ ID NO: 192291 - RNA, 32 nt, Human
ggcggcggcggcggcggcgggagcagcagcgg

SEQ ID NO: 192292 - RNA, 18 nt, Human
ggcggcggcggcgggcgg

SEQ ID NO: 192293 - RNA, 32 nt, Human
ggcggcggcugcagcagcagcaacaagucggg

SEQ ID NO: 192294 - RNA, 32 nt, Human
ggcggcggcugcagcgcuagcggcgcgggggc

SEQ ID NO: 192295 - RNA, 32 nt, Human
ggcggcggcugcaggcacgggcacgggcacgg

SEQ ID NO: 192296 - RNA, 32 nt, Human
ggcggcggcugcagggcagguccaggggccac

SEQ ID NO: 192297 - RNA, 32 nt, Human
ggcggcggcugcugugcugggugcagugagga

SEQ ID NO: 192298 - RNA, 19 nt, Human
ggcggcggcuggggggcug

SEQ ID NO: 192299 - RNA, 32 nt, Human
ggcggcgggaacaggugccggcgccuccgccc

SEQ ID NO: 192300 - RNA, 32 nt, Human
ggcggcgggacccggagcaggagcggcggcag

SEQ ID NO: 192301 - RNA, 32 nt, Human
ggcggcgggaggcggaggaggcggcggcggcg

SEQ ID NO: 192302 - RNA, 32 nt, Human
ggcggcgggauggcaacagccuccggggccuc

SEQ ID NO: 192303 - RNA, 32 nt, Human
ggcggcgggcaggaggcugcugagggauggag

SEQ ID NO: 192304 - RNA, 32 nt, Human
ggcggcgggcaggccggggacccggacgccag

SEQ ID NO: 192305 - RNA, 32 nt, Human
ggcggcgggcaggcgggugggggcacaccccu

SEQ ID NO: 192306 - RNA, 32 nt, Human
ggcggcgggcaggcgugcggaggacacuccug

SEQ ID NO: 192307 - RNA, 32 nt, Human
ggcggcggugagaagagcgaggcggaggaggg

SEQ ID NO: 192308 - RNA, 32 nt, Human
ggcggcgguggaggcugaggcggcggccgagg

SEQ ID NO: 192309 - RNA, 32 nt, Human
ggcggcgguggcggcagcugcuugggcgcggu

SEQ ID NO: 192310 - RNA, 32 nt, Human
ggcggcgguggcgguggaggaggcggggcggc

SEQ ID NO: 192311 - RNA, 32 nt, Human
ggcggcgguggcuguagguugugcggcugcag

SEQ ID NO: 192312 - RNA, 32 nt, Human
ggcggcgguggucugaggaaguucuaucuugg

SEQ ID NO: 192313 - RNA, 17 nt, Human
ggcggcgguugauccca

SEQ ID NO: 192314 - RNA, 32 nt, Human
ggcggcgguugcgagagagaugagccgcggcg

SEQ ID NO: 192315 - RNA, 32 nt, Human
ggcggcguaggggcggaggucgcgccugagug

SEQ ID NO: 192316 - RNA, 32 nt, Human
ggcggcgucacugcacccuccgccaggcuccg

SEQ ID NO: 192317 - RNA, 32 nt, Human
ggcggcgucugugguuugaauuccagcggcgc

SEQ ID NO: 192318 - RNA, 32 nt, Human
ggcggcguggagccugcugccaugaagucagc

SEQ ID NO: 192319 - RNA, 32 nt, Human
ggcggcguggucucccugcucuguccccacac

SEQ ID NO: 192320 - RNA, 32 nt, Human
ggcggcuacagcucaccguggggaagaucaac

SEQ ID NO: 192321 - RNA, 32 nt, Human
ggcggcuauuuuugccaccugccuugggugcc

SEQ ID NO: 192322 - RNA, 22 nt, Human
ggcggcucaacaccgcgaggag

SEQ ID NO: 192323 - RNA, 23 nt, Human
ggcggcucacaccuguaauccca

SEQ ID NO: 192324 - RNA, 23 nt, Human
ggcggcucacgccuguaauccca

SEQ ID NO: 192325 - RNA, 32 nt, Human
ggcggcucaguucugcggugccagggagugga

SEQ ID NO: 192326 - RNA, 23 nt, Human
ggcggcucaugccuauaauccca

SEQ ID NO: 192327 - RNA, 20 nt, Human
ggcggcucaugccuguaauc

SEQ ID NO: 192328 - RNA, 23 nt, Human
ggcggcucaugccuguaauccca

SEQ ID NO: 192329 - RNA, 32 nt, Human
ggcggcuccaagagccccagagcugccugcau

SEQ ID NO: 192330 - RNA, 32 nt, Human
ggcggcuccagccccagacaacagcccaggca

SEQ ID NO: 192331 - RNA, 32 nt, Human
ggcggcucccgccugugaucccggcacuuugg

SEQ ID NO: 192332 - RNA, 32 nt, Human
ggcggcuccgacgcagguggagcugcugaccu

SEQ ID NO: 192333 - RNA, 32 nt, Human
ggcggcuccuccucccacucugcuccuccucu

SEQ ID NO: 192334 - RNA, 32 nt, Human
ggcggcucugcaggaccagccagcagccucug

SEQ ID NO: 192335 - RNA, 23 nt, Human
ggcggcugaaucacuugagguua

SEQ ID NO: 192336 - RNA, 32 nt, Human
ggcggcugagccaggggcccuccuguguuuga

SEQ ID NO: 192337 - RNA, 32 nt, Human
ggcggcugagccugagcggggauguagaggcg

SEQ ID NO: 192338 - RNA, 32 nt, Human
ggcggcugagcuccagccaccccgcagucacu

SEQ ID NO: 192339 - RNA, 16 nt, Human
ggcggcugcaaggggc

SEQ ID NO: 192340 - RNA, 19 nt, Human
ggcggcugcuccagcucca

SEQ ID NO: 192341 - RNA, 32 nt, Human
ggcggcugcucgcggaggcacuucuccgagcg

SEQ ID NO: 192342 - RNA, 32 nt, Human
ggcggcugcucuggaccucgguguucacugac

SEQ ID NO: 192343 - RNA, 32 nt, Human
ggcggcuggaaagaggagaaggagagggagua

SEQ ID NO: 192344 - RNA, 32 nt, Human
ggcggcuggacggggcuggagcugucgggagg

SEQ ID NO: 192345 - RNA, 32 nt, Human
ggcggcugggacucacccugauuuaaagcucc

SEQ ID NO: 192346 - RNA, 22 nt, Human
ggcggcugucccugugcauccu

SEQ ID NO: 192347 - RNA, 25 nt, Human
ggcggcugugcuggcacccuuggca

SEQ ID NO: 192348 - RNA, 32 nt, Human
ggcggcuuaccagcugggucagucccaucucg

SEQ ID NO: 192349 - RNA, 32 nt, Human
ggcggcuucuaggagcuagucgaaggagcgag

SEQ ID NO: 192350 - RNA, 32 nt, Human
ggcggcuuguguccacgggacgcgggcggauc

SEQ ID NO: 192351 - RNA, 32 nt, Human
ggcgggaaaagggaucaaagacucagagagac

SEQ ID NO: 192352 - RNA, 32 nt, Human
ggcgggaagaaagagggaguucuggccaccug

SEQ ID NO: 192353 - RNA, 32 nt, Human
ggcgggaagaggaggcgcgagaauggaggugg

SEQ ID NO: 192354 - RNA, 32 nt, Human
ggcgggaaggggcagaggccgugagcucucag

SEQ ID NO: 192355 - RNA, 32 nt, Human
ggcgggaaugggaccugcgcuccagggugguc

SEQ ID NO: 192356 - RNA, 32 nt, Human
ggcgggacaacucaaagguggggagagggaug

SEQ ID NO: 192357 - RNA, 19 nt, Human
ggcgggacaguccuucccu

SEQ ID NO: 192358 - RNA, 32 nt, Human
ggcgggaccaaggaggugcggggcaagaagga

SEQ ID NO: 192359 - RNA, 19 nt, Human
ggcgggacccgccagcuuc

SEQ ID NO: 192360 - RNA, 21 nt, Human
ggcgggacuaucaggagucca

SEQ ID NO: 192361 - RNA, 32 nt, Human
ggcgggacuaucaggaguccacugccuccaug

SEQ ID NO: 192362 - RNA, 32 nt, Human
ggcgggacuccagacugggaacggaagucagc

SEQ ID NO: 192363 - RNA, 32 nt, Human
ggcgggacugggucaaguggguggagcuccuc

SEQ ID NO: 192364 - RNA, 32 nt, Human
ggcgggacugggugaagagugggauugggaga

SEQ ID NO: 192365 - RNA, 32 nt, Human
ggcgggacuuccucuuccucggggacaacugu

SEQ ID NO: 192366 - RNA, 32 nt, Human
ggcgggagaagggagaggagugacauccguuu

SEQ ID NO: 192367 - RNA, 32 nt, Human
ggcgggagagaggaagagaggggagcgcggug

SEQ ID NO: 192368 - RNA, 21 nt, Human
ggcgggagaucagccgaaaga

SEQ ID NO: 192369 - RNA, 32 nt, Human
ggcgggagcaaugagauugccacuccaucccc

SEQ ID NO: 192370 - RNA, 20 nt, Human
ggcgggagccaagccgagga

SEQ ID NO: 192371 - RNA, 18 nt, Human
ggcgggagcggcgcggug

SEQ ID NO: 192372 - RNA, 23 nt, Human
ggcgggaggacggcuccgcgcug

SEQ ID NO: 192373 - RNA, 32 nt, Human
ggcgggaggagagaagggacagcucugggagg

SEQ ID NO: 192374 - RNA, 32 nt, Human
ggcgggaggagggaguggagagacugacuggc

SEQ ID NO: 192375 - RNA, 26 nt, Human
ggcgggaggcggaggcgggagggcgg

SEQ ID NO: 192376 - RNA, 32 nt, Human
ggcgggaggcuggaguagagggaagccugcaa

SEQ ID NO: 192377 - RNA, 20 nt, Human
ggcgggagggagccgagaga

SEQ ID NO: 192378 - RNA, 15 nt, Human
ggcgggagggggcag

SEQ ID NO: 192379 - RNA, 16 nt, Human
ggcgggaggggggcag

SEQ ID NO: 192380 - RNA, 31 nt, Human
ggcgggagugagaggagaagggagagagcug

SEQ ID NO: 192381 - RNA, 21 nt, Human
ggcgggaucacucaggcucca

SEQ ID NO: 192382 - RNA, 32 nt, Human
ggcgggauugcuugaguccagccugggcagua

SEQ ID NO: 192383 - RNA, 32 nt, Human
ggcgggcaaacaguggcgcccacccagaccgg

SEQ ID NO: 192384 - RNA, 32 nt, Human
ggcgggcaccuguaaucccagccacuugggag

SEQ ID NO: 192385 - RNA, 32 nt, Human
ggcgggcaccuguaaucccagcuacucaggag

SEQ ID NO: 192386 - RNA, 32 nt, Human
ggcgggcaccuguaaucccagcuacucgggag

SEQ ID NO: 192387 - RNA, 32 nt, Human
ggcgggcaccuguaaucccagcuacuugggag

SEQ ID NO: 192388 - RNA, 32 nt, Human
ggcgggcacuuguaaucccagcuacucccaag

SEQ ID NO: 192389 - RNA, 32 nt, Human
ggcgggcaggcagggguuagugaaaggacacu

SEQ ID NO: 192390 - RNA, 32 nt, Human
ggcgggcagggugggccauggguaauuuagga

SEQ ID NO: 192391 - RNA, 32 nt, Human
ggcgggcagugaacgaguguggggaaggauug

SEQ ID NO: 192392 - RNA, 32 nt, Human
ggcgggcagugcauccagaagcguuuauauuc

SEQ ID NO: 192393 - RNA, 32 nt, Human
ggcgggccacagucuccagccugaagcggaag

SEQ ID NO: 192394 - RNA, 20 nt, Human
ggcgggcccacucagccccg

SEQ ID NO: 192395 - RNA, 24 nt, Human
ggcgggcccagaccggcuucucgg

SEQ ID NO: 192396 - RNA, 23 nt, Human
ggcgggcccagcaccccggccgg

SEQ ID NO: 192397 - RNA, 20 nt, Human
ggcgggcccagcacuuuccg

SEQ ID NO: 192398 - RNA, 32 nt, Human
ggcgggcccaggagccucagccagccacgugg

SEQ ID NO: 192399 - RNA, 21 nt, Human
ggcgggccccccagcacccgg

SEQ ID NO: 192400 - RNA, 24 nt, Human
ggcgggcccggccgccgcuuccgg

SEQ ID NO: 192401 - RNA, 32 nt, Human
ggcgggcccggcggcgggcaagugacugcccg

SEQ ID NO: 192402 - RNA, 32 nt, Human
ggcgggcccugagccggcaccuccccuuucgg

SEQ ID NO: 192403 - RNA, 32 nt, Human
ggcgggcccugggagagcugggacgggcggcg

SEQ ID NO: 192404 - RNA, 21 nt, Human
ggcgggccuggcggcucccgg

SEQ ID NO: 192405 - RNA, 32 nt, Human
ggcgggcgcccguaaucccagcuacucgggag

SEQ ID NO: 192406 - RNA, 32 nt, Human
ggcgggcgcccuguugggcuuccugugacggg

SEQ ID NO: 192407 - RNA, 32 nt, Human
ggcgggcgccgcacccccucccuggccgccug

SEQ ID NO: 192408 - RNA, 32 nt, Human
ggcgggcgccgggacgccugggugccgcagac

SEQ ID NO: 192409 - RNA, 32 nt, Human
ggcgggcgccuguaaucacagcuacucaggag

SEQ ID NO: 192410 - RNA, 32 nt, Human
ggcgggcgccuguaaucccaacuacucaggag

SEQ ID NO: 192411 - RNA, 32 nt, Human
ggcgggcgccuguaaucccagcuacucaagag

SEQ ID NO: 192412 - RNA, 32 nt, Human
ggcgggcgccuguaaucccagcuacucaggag

SEQ ID NO: 192413 - RNA, 32 nt, Human
ggcgggcgccuguaaucccagcuacucgggaa

SEQ ID NO: 192414 - RNA, 32 nt, Human
ggcgggcgccuguaaucccagcuacucgggag

SEQ ID NO: 192415 - RNA, 32 nt, Human
ggcgggcgccuguaaucccagcuacugagggg

SEQ ID NO: 192416 - RNA, 32 nt, Human
ggcgggcgccuguaaucccagcuacuugggaa

SEQ ID NO: 192417 - RNA, 32 nt, Human
ggcgggcgccuguaaucccagcuacuugggag

SEQ ID NO: 192418 - RNA, 32 nt, Human
ggcgggcgccuguaaucccagcuacuugggug

SEQ ID NO: 192419 - RNA, 32 nt, Human
ggcgggcgccuguaaucccagguacucaggag

SEQ ID NO: 192420 - RNA, 32 nt, Human
ggcgggcgccuguaauccuagcugcuugggag

SEQ ID NO: 192421 - RNA, 32 nt, Human
ggcgggcgccuguuaucccagcuacuugggag

SEQ ID NO: 192422 - RNA, 32 nt, Human
ggcgggcgcugguaaucccagcuacucaggug

SEQ ID NO: 192423 - RNA, 32 nt, Human
ggcgggcggaggcggcgggagcgguggugccc

SEQ ID NO: 192424 - RNA, 32 nt, Human
ggcgggcggcaggugagcaaggagaacguguc

SEQ ID NO: 192425 - RNA, 32 nt, Human
ggcgggcggccgcggcgccgcgcuggugggug

SEQ ID NO: 192426 - RNA, 32 nt, Human
ggcgggcggcgcgugucugcagcugcuccggg

SEQ ID NO: 192427 - RNA, 22 nt, Human
ggcgggcgggaggcggacgcgg

SEQ ID NO: 192428 - RNA, 32 nt, Human
ggcgggcggguggcaggggcugucugugaaau

SEQ ID NO: 192429 - RNA, 32 nt, Human
ggcgggcgguggcgguggcugggcagggcugg

SEQ ID NO: 192430 - RNA, 32 nt, Human
ggcgggcgucuucuccacuccucugccgcguc

SEQ ID NO: 192431 - RNA, 32 nt, Human
ggcgggcuacaccccauucacacucaugaauc

SEQ ID NO: 192432 - RNA, 32 nt, Human
ggcgggcucgggcuggagaagggccgcgggac

SEQ ID NO: 192433 - RNA, 32 nt, Human
ggcgggcugagggugacagucacguccguuuc

SEQ ID NO: 192434 - RNA, 18 nt, Human
ggcgggcugaguccugcc

SEQ ID NO: 192435 - RNA, 32 nt, Human
ggcgggcugcuggcucccccggcuccggcagc

SEQ ID NO: 192436 - RNA, 18 nt, Human
ggcgggcuggcgggcugg

SEQ ID NO: 192437 - RNA, 21 nt, Human
ggcgggcugguuaggauucca

SEQ ID NO: 192438 - RNA, 32 nt, Human
ggcggggaaggaggaggagggggagagucgcu

SEQ ID NO: 192439 - RNA, 32 nt, Human
ggcggggaagugaaccccgacggucagcgcuu

SEQ ID NO: 192440 - RNA, 32 nt, Human
ggcggggaccaagcuggaaggagcagcgacuc

SEQ ID NO: 192441 - RNA, 32 nt, Human
ggcggggacgaggcucgggcugugcugggcgg

SEQ ID NO: 192442 - RNA, 32 nt, Human
ggcggggagagccacagaggagcaggaggggg

SEQ ID NO: 192443 - RNA, 32 nt, Human
ggcggggagagcgccagagggaggccggucgg

SEQ ID NO: 192444 - RNA, 32 nt, Human
ggcggggagagggaaggaccgcacggagcacc

SEQ ID NO: 192445 - RNA, 32 nt, Human
ggcggggagagggcaagcgggaccgguagggg

SEQ ID NO: 192446 - RNA, 32 nt, Human
ggcggggagccaagcccggcuugagagcagag

SEQ ID NO: 192447 - RNA, 32 nt, Human
ggcggggagcuaggaggagggagcucgagagu

SEQ ID NO: 192448 - RNA, 32 nt, Human
ggcggggaggaggaggaggacaaggacuccug

SEQ ID NO: 192449 - RNA, 32 nt, Human
ggcggggaggcagcaggcgcgggagcgggcgc

SEQ ID NO: 192450 - RNA, 32 nt, Human
ggcggggaggcagggaugucgagggccccuca

SEQ ID NO: 192451 - RNA, 32 nt, Human
ggcggggaggcuggaggaggguccaugagguu

SEQ ID NO: 192452 - RNA, 32 nt, Human
ggcggggagggagggaaggggaggggcgcggc

SEQ ID NO: 192453 - RNA, 32 nt, Human
ggcggggcacagauuggagagggcucugugcu

SEQ ID NO: 192454 - RNA, 32 nt, Human
ggcggggcagaggcgccccucaccucccggac

SEQ ID NO: 192455 - RNA, 32 nt, Human
ggcggggcagaggcgcuccccacaucucagac

SEQ ID NO: 192456 - RNA, 32 nt, Human
ggcggggcaggccuccuuuguucuccacaauc

SEQ ID NO: 192457 - RNA, 32 nt, Human
ggcggggcauguugggagagggggagggaggg

SEQ ID NO: 192458 - RNA, 32 nt, Human
ggcggggccacugccccgcuugggggaagccg

SEQ ID NO: 192459 - RNA, 32 nt, Human
ggcggggccacugcggucgccggggcggggcc

SEQ ID NO: 192460 - RNA, 32 nt, Human
ggcggggcccggaagagcaggauggcggcgcg

SEQ ID NO: 192461 - RNA, 32 nt, Human
ggcggggcccuuugaugucuucaucuguaugg

SEQ ID NO: 192462 - RNA, 32 nt, Human
ggcggggccggcucucugacccucucuucccc

SEQ ID NO: 192463 - RNA, 19 nt, Human
ggcggggccuuucuuguca

SEQ ID NO: 192464 - RNA, 32 nt, Human
ggcggggcgagggagaggggcggccgcgcgga

SEQ ID NO: 192465 - RNA, 18 nt, Human
ggcggggcgagggcagcu

SEQ ID NO: 192466 - RNA, 32 nt, Human
ggcggggcggccuccggcucaggcuggcugag

SEQ ID NO: 192467 - RNA, 20 nt, Human
ggcggggcggggcgggucgg

SEQ ID NO: 192468 - RNA, 32 nt, Human
ggcggggcucgcgcaaccucccucgccucccc

SEQ ID NO: 192469 - RNA, 18 nt, Human
ggcgggggacaguaguug

SEQ ID NO: 192470 - RNA, 32 nt, Human
ggcgggggacggaggggcaggagcccugggcu

SEQ ID NO: 192471 - RNA, 32 nt, Human
ggcgggggagcgcgggacaggaggcuucgggg

SEQ ID NO: 192472 - RNA, 32 nt, Human
ggcgggggaggcagcgugagcagccggaggag

SEQ ID NO: 192473 - RNA, 32 nt, Human
ggcgggggcagcugugucaucuuucuggggcc

SEQ ID NO: 192474 - RNA, 32 nt, Human
ggcgggggccgcgggccaggggaggcgcucag

SEQ ID NO: 192475 - RNA, 32 nt, Human
ggcgggggccgggggccagggagcgggcuggg

SEQ ID NO: 192476 - RNA, 32 nt, Human
ggcgggggccuguaaucccagcuacucaggag

SEQ ID NO: 192477 - RNA, 32 nt, Human
ggcgggggccuguaauccuagcuacuuggggu

SEQ ID NO: 192478 - RNA, 32 nt, Human
ggcgggggcgagagggaagugggcgggagccg

SEQ ID NO: 192479 - RNA, 32 nt, Human
ggcgggggcgagggccacccaccuccaagucu

SEQ ID NO: 192480 - RNA, 32 nt, Human
ggcgggggcgcucaccccacagcccaggcccc

SEQ ID NO: 192481 - RNA, 17 nt, Human
ggcgggggcgggugagg

SEQ ID NO: 192482 - RNA, 17 nt, Human
ggcgggggcuaggggga

SEQ ID NO: 192483 - RNA, 32 nt, Human
ggcgggggcucugcauagccaggaugacgccu

SEQ ID NO: 192484 - RNA, 32 nt, Human
ggcgggggucaccaaaggcggcgggcccgucg

SEQ ID NO: 192485 - RNA, 23 nt, Human
ggcggggguguuguggguacagg

SEQ ID NO: 192486 - RNA, 32 nt, Human
ggcggggguuggggcggagggagcagcggccc

SEQ ID NO: 192487 - RNA, 32 nt, Human
ggcgggguagugcggagguggggcagggggag

SEQ ID NO: 192488 - RNA, 32 nt, Human
ggcggggucacagcucgcgcacccucaucugg

SEQ ID NO: 192489 - RNA, 32 nt, Human
ggcgggguccuggguagaguccuagccccaga

SEQ ID NO: 192490 - RNA, 23 nt, Human
ggcgggguggagcggagcugcug

SEQ ID NO: 192491 - RNA, 32 nt, Human
ggcggggugggcaguggcugccguaggggagg

SEQ ID NO: 192492 - RNA, 32 nt, Human
ggcgggguggggccuccagagcuuugcaggga

SEQ ID NO: 192493 - RNA, 17 nt, Human
ggcggggugggggcagc

SEQ ID NO: 192494 - RNA, 32 nt, Human
ggcgggguuucaucauguuggccaggcugguc

SEQ ID NO: 192495 - RNA, 32 nt, Human
ggcgggguuuccucaucuccccagccugaacu

SEQ ID NO: 192496 - RNA, 32 nt, Human
ggcggguacacggcccaggcccagggaacccc

SEQ ID NO: 192497 - RNA, 32 nt, Human
ggcggguaccuguaaucccagcuacucaggag

SEQ ID NO: 192498 - RNA, 32 nt, Human
ggcggguacggcuaugggcgaggcggaggcgc

SEQ ID NO: 192499 - RNA, 32 nt, Human
ggcggguagcuggcaggcgccgacuuccgaag

SEQ ID NO: 192500 - RNA, 32 nt, Human
ggcgggucagucuccgugcaggaugugagcag

SEQ ID NO: 192501 - RNA, 32 nt, Human
ggcggguccuuuccuuguucucuugcucccug

SEQ ID NO: 192502 - RNA, 32 nt, Human
ggcgggucucagccucaccccaccucucgcug

SEQ ID NO: 192503 - RNA, 20 nt, Human
ggcgggucuccgggauucca

SEQ ID NO: 192504 - RNA, 32 nt, Human
ggcgggucucgaacuccugaccucgugaucca

SEQ ID NO: 192505 - RNA, 32 nt, Human
ggcgggugagaagcaggaaggaggcugaugau

SEQ ID NO: 192506 - RNA, 32 nt, Human
ggcgggugaguggagagcagagccaggagcuc

SEQ ID NO: 192507 - RNA, 32 nt, Human
ggcgggugccuguaaccccagcuacuugggag

SEQ ID NO: 192508 - RNA, 32 nt, Human
ggcgggugccuguaaucagcuacucgggaggc

SEQ ID NO: 192509 - RNA, 32 nt, Human
ggcgggugccuguaaucccagcuacucaggag

SEQ ID NO: 192510 - RNA, 32 nt, Human
ggcgggugccuguaaucccagcuacucgggag

SEQ ID NO: 192511 - RNA, 32 nt, Human
ggcgggugccuguaaucccagcuacuggggag

SEQ ID NO: 192512 - RNA, 32 nt, Human
ggcgggugccuguaaucccagcuacuugggag

SEQ ID NO: 192513 - RNA, 32 nt, Human
ggcgggugccuguaaucccggcuacucaggag

SEQ ID NO: 192514 - RNA, 32 nt, Human
ggcgggugccuguaaucucagcuacucaggag

SEQ ID NO: 192515 - RNA, 32 nt, Human
ggcgggugccuguaaucucagcuacuugagag

SEQ ID NO: 192516 - RNA, 17 nt, Human
ggcgggugccuguaguc

SEQ ID NO: 192517 - RNA, 32 nt, Human
ggcgggugccuguagucccaacuacucggggg

SEQ ID NO: 192518 - RNA, 32 nt, Human
ggcgggugccuguagucccagccacuugggag

SEQ ID NO: 192519 - RNA, 32 nt, Human
ggcgggugccuguagucccagcuacucaggag

SEQ ID NO: 192520 - RNA, 32 nt, Human
ggcgggugccuguagucccagcuacucgggag

SEQ ID NO: 192521 - RNA, 32 nt, Human
ggcgggugccuguagucccagcuacugguagg

SEQ ID NO: 192522 - RNA, 32 nt, Human
ggcgggugccuguagucccagcuauuugggag

SEQ ID NO: 192523 - RNA, 32 nt, Human
ggcgggugccuguagucccagcugcucgggag

SEQ ID NO: 192524 - RNA, 32 nt, Human
ggcgggugccuguagucccaguacucaggagg

SEQ ID NO: 192525 - RNA, 32 nt, Human
ggcggguggaucaccugacaucaggaguucga

SEQ ID NO: 192526 - RNA, 32 nt, Human
ggcggguggaucaccugaggucgggaguuuga

SEQ ID NO: 192527 - RNA, 31 nt, Human
ggcgggugggggagagaaacccuggcucuuc

SEQ ID NO: 192528 - RNA, 31 nt, Human
ggcggguggguggaggaugcggugcgcggga

SEQ ID NO: 192529 - RNA, 32 nt, Human
ggcgggugggugguggaggcugcgagggugca

SEQ ID NO: 192530 - RNA, 32 nt, Human
ggcgggugugagccauugcgcccagccuugaa

SEQ ID NO: 192531 - RNA, 32 nt, Human
ggcggguguguuucggccuggccugggcaggc

SEQ ID NO: 192532 - RNA, 23 nt, Human
ggcggguucggcugcccccagca

SEQ ID NO: 192533 - RNA, 32 nt, Human
ggcggguugggaggggcaggagguggggugga

SEQ ID NO: 192534 - RNA, 22 nt, Human
ggcggguuucgccgccgcugcc

SEQ ID NO: 192535 - RNA, 32 nt, Human
ggcgguaaacagacaggcucuggcagugcaga

SEQ ID NO: 192536 - RNA, 32 nt, Human
ggcgguacugccccaaggccccagggacagag

SEQ ID NO: 192537 - RNA, 32 nt, Human
ggcgguagaggggagguugggguuggagcagc

SEQ ID NO: 192538 - RNA, 32 nt, Human
ggcgguagcucauaccuguaaauccuaggacu

SEQ ID NO: 192539 - RNA, 32 nt, Human
ggcgguaggaagggagagggggagcuguuugu

SEQ ID NO: 192540 - RNA, 32 nt, Human
ggcgguaggcagcagcaggcugaagggaucau

SEQ ID NO: 192541 - RNA, 32 nt, Human
ggcgguaucuagcccuuucucuguaaaauauc

SEQ ID NO: 192542 - RNA, 32 nt, Human
ggcgguauggaaggcaggcuguacugguugag

SEQ ID NO: 192543 - RNA, 24 nt, Human
ggcggucagcagcugcccuuggca

SEQ ID NO: 192544 - RNA, 18 nt, Human
ggcggucagccggaguga

SEQ ID NO: 192545 - RNA, 32 nt, Human
ggcgguccaugccaacugugcugugucacaua

SEQ ID NO: 192546 - RNA, 32 nt, Human
ggcgguccaugcugccccucugccucguggcc

SEQ ID NO: 192547 - RNA, 32 nt, Human
ggcgguccccagcugccagggugcuuggggag

SEQ ID NO: 192548 - RNA, 32 nt, Human
ggcgguccgcggcggagguucaugugggggug

SEQ ID NO: 192549 - RNA, 32 nt, Human
ggcgguccuacuaaucagauuugcagaagaaa

SEQ ID NO: 192550 - RNA, 32 nt, Human
ggcggucgggcccgggacacccccucccgguc

SEQ ID NO: 192551 - RNA, 22 nt, Human
ggcggugaaaaaccuacguccu

SEQ ID NO: 192552 - RNA, 32 nt, Human
ggcggugaagagacaggagagggggaucggug

SEQ ID NO: 192553 - RNA, 21 nt, Human
ggcggugacccagacaugccu

SEQ ID NO: 192554 - RNA, 32 nt, Human
ggcggugaccccggccuggaacugccccggua

SEQ ID NO: 192555 - RNA, 32 nt, Human
ggcggugagcucaguggauugcaguggugugc

SEQ ID NO: 192556 - RNA, 32 nt, Human
ggcggugcaauggcggaaagaaaaggaacagc

SEQ ID NO: 192557 - RNA, 32 nt, Human
ggcggugcaggagagcgccccgagucccggcg

SEQ ID NO: 192558 - RNA, 32 nt, Human
ggcggugcugaggagggggcaggguuggagaa

SEQ ID NO: 192559 - RNA, 32 nt, Human
ggcggugcuggcaagauggcugcacuugagaa

SEQ ID NO: 192560 - RNA, 32 nt, Human
ggcggugcugggagggguaggugagggucgcg

SEQ ID NO: 192561 - RNA, 20 nt, Human
ggcgguggaaggaagaagac

SEQ ID NO: 192562 - RNA, 32 nt, Human
ggcgguggagccaccacacagccgacucucuc

SEQ ID NO: 192563 - RNA, 32 nt, Human
ggcgguggaggcucuguacccuggcccugcug

SEQ ID NO: 192564 - RNA, 32 nt, Human
ggcgguggcacagugcuguauccugccugggc

SEQ ID NO: 192565 - RNA, 32 nt, Human
ggcgguggcacggugcuguauccugccugggc

SEQ ID NO: 192566 - RNA, 32 nt, Human
ggcgguggcagcagagguggcaggggcggggc

SEQ ID NO: 192567 - RNA, 32 nt, Human
ggcgguggcggccauggcggcagauggagagc

SEQ ID NO: 192568 - RNA, 19 nt, Human
ggcgguggcggcgggucgg

SEQ ID NO: 192569 - RNA, 24 nt, Human
ggcgguggcgggcgcgcugaccgc

SEQ ID NO: 192570 - RNA, 32 nt, Human
ggcgguggcucacaccuguaaucccagcacuu

SEQ ID NO: 192571 - RNA, 32 nt, Human
ggcgguggcucaccccuguaaucccagcacuu

SEQ ID NO: 192572 - RNA, 32 nt, Human
ggcgguggcucacgccuguaaucccaacacuu

SEQ ID NO: 192573 - RNA, 32 nt, Human
ggcgguggcucacgccuguaaucccagcacgc

SEQ ID NO: 192574 - RNA, 32 nt, Human
ggcgguggcucacgccuguaaucccagcacuu

SEQ ID NO: 192575 - RNA, 32 nt, Human
ggcgguggcucaugccuguaaucccagcacuu

SEQ ID NO: 192576 - RNA, 32 nt, Human
ggcgguggcugggcagggcugggcagggccgc

SEQ ID NO: 192577 - RNA, 32 nt, Human
ggcggugggaggaggauggccgggggugcugg

SEQ ID NO: 192578 - RNA, 32 nt, Human
ggcggugggaggcggcggcggcggcggcgcuc

SEQ ID NO: 192579 - RNA, 32 nt, Human
ggcggugggcagggugcagcagugagcaaaac

SEQ ID NO: 192580 - RNA, 32 nt, Human
ggcggugggccccagccccacagaccagccca

SEQ ID NO: 192581 - RNA, 32 nt, Human
ggcgguggggauguucucauaacaaucaccgu

SEQ ID NO: 192582 - RNA, 32 nt, Human
ggcgguggggcaguggagguugaggagaaugu

SEQ ID NO: 192583 - RNA, 32 nt, Human
ggcggugguggaggugggaucagcggccaggg

SEQ ID NO: 192584 - RNA, 32 nt, Human
ggcgguggugggggugucucacucucugucuu

SEQ ID NO: 192585 - RNA, 32 nt, Human
ggcgguguccaggagggaaggaacgggaaagg

SEQ ID NO: 192586 - RNA, 32 nt, Human
ggcgguguccgaguaggggccucugccccacc

SEQ ID NO: 192587 - RNA, 32 nt, Human
ggcggugugcuauguaccuauguguccaugac

SEQ ID NO: 192588 - RNA, 32 nt, Human
ggcgguguggguggagugcagagcagggcacu

SEQ ID NO: 192589 - RNA, 32 nt, Human
ggcggugugguuguagguggggugggggugga

SEQ ID NO: 192590 - RNA, 32 nt, Human
ggcgguguuuugcugaucuguuaaauucuuag

SEQ ID NO: 192591 - RNA, 21 nt, Human
ggcgguuagcaggcuccagca

SEQ ID NO: 192592 - RNA, 32 nt, Human
ggcgguuagggugggaagggggacagagaggg

SEQ ID NO: 192593 - RNA, 32 nt, Human
ggcgguucagccaagacagauguagacggagu

SEQ ID NO: 192594 - RNA, 32 nt, Human
ggcgguuccggcuccucccucuccuugugccu

SEQ ID NO: 192595 - RNA, 32 nt, Human
ggcgguugcuggucaguaacagccaagaugcu

SEQ ID NO: 192596 - RNA, 32 nt, Human
ggcgguuugugagcucauaguuagggcagagu

SEQ ID NO: 192597 - RNA, 32 nt, Human
ggcgguuuuguucugcucaguuucuggagagg

SEQ ID NO: 192598 - RNA, 32 nt, Human
ggcguaagccaccacacccagccagaaagugg

SEQ ID NO: 192599 - RNA, 32 nt, Human
ggcguacacaugcacgcuugcacacaugcaca

SEQ ID NO: 192600 - RNA, 19 nt, Human
ggcguacggaggguggcag

SEQ ID NO: 192601 - RNA, 32 nt, Human
ggcguacuuugggcuucaucauggaggacuac

SEQ ID NO: 192602 - RNA, 32 nt, Human
ggcguagaaagccacgagcaggaauccgcguu

SEQ ID NO: 192603 - RNA, 32 nt, Human
ggcguagggcuggagggcaggggcgggcccug

SEQ ID NO: 192604 - RNA, 22 nt, Human
ggcguaguggcucaugccugua

SEQ ID NO: 192605 - RNA, 22 nt, Human
ggcguaguggcuuaugccugua

SEQ ID NO: 192606 - RNA, 32 nt, Human
ggcguauaguacaugauaauuucucuagucua

SEQ ID NO: 192607 - RNA, 18 nt, Human
ggcguaucaccugagguc

SEQ ID NO: 192608 - RNA, 18 nt, Human
ggcguaucaccugagguu

SEQ ID NO: 192609 - RNA, 32 nt, Human
ggcguaugccuguaaucccagcuacuuaggag

SEQ ID NO: 192610 - RNA, 32 nt, Human
ggcgucacagagcuuucagacgcccagaagaa

SEQ ID NO: 192611 - RNA, 32 nt, Human
ggcgucacagccgaggaagcggcccggccggg

SEQ ID NO: 192612 - RNA, 32 nt, Human
ggcgucaccucucugcuacucuggugcugcgc

SEQ ID NO: 192613 - RNA, 32 nt, Human
ggcgucacgccuguaaucccagcacuuuggga

SEQ ID NO: 192614 - RNA, 32 nt, Human
ggcgucacguguguucagagcuugucuccacc

SEQ ID NO: 192615 - RNA, 32 nt, Human
ggcgucacuacugcuacccucauuucaccugc

SEQ ID NO: 192616 - RNA, 32 nt, Human
ggcgucagaaaaauggcuacaaacuuccuagc

SEQ ID NO: 192617 - RNA, 23 nt, Human
ggcgucagaaguaggaagggcag

SEQ ID NO: 192618 - RNA, 23 nt, Human
ggcgucagcgcgguggccagcgc

SEQ ID NO: 192619 - RNA, 32 nt, Human
ggcgucaggcuaagcacuuugauaaacugguu

SEQ ID NO: 192620 - RNA, 32 nt, Human
ggcgucaguguucuccagccugggcaacagag

SEQ ID NO: 192621 - RNA, 32 nt, Human
ggcgucaucaugcacaguuguaucgcgcccgc

SEQ ID NO: 192622 - RNA, 32 nt, Human
ggcgucauuccucugcugaauuuuuaaauguu

SEQ ID NO: 192623 - RNA, 22 nt, Human
ggcguccagcgugccgaccaca

SEQ ID NO: 192624 - RNA, 32 nt, Human
ggcguccagcuccacuagggccuggaucccca

SEQ ID NO: 192625 - RNA, 32 nt, Human
ggcgucccaaagugcuaggauuacaggcauga

SEQ ID NO: 192626 - RNA, 32 nt, Human
ggcgucccaagaccucaucugccugcagcguc

SEQ ID NO: 192627 - RNA, 24 nt, Human
ggcgucccaagacggagcuggcug

SEQ ID NO: 192628 - RNA, 24 nt, Human
ggcgucccaagauguggcuggcug

SEQ ID NO: 192629 - RNA, 24 nt, Human
ggcgucccagaacgcggcuggcug

SEQ ID NO: 192630 - RNA, 25 nt, Human
ggcgucccagaaugcuggcuggcug

SEQ ID NO: 192631 - RNA, 22 nt, Human
ggcgucccaucccccgcccuga

SEQ ID NO: 192632 - RNA, 21 nt, Human
ggcgucccccagagccugaga

SEQ ID NO: 192633 - RNA, 19 nt, Human
ggcguccccugccauggcc

SEQ ID NO: 192634 - RNA, 32 nt, Human
ggcguccccugccuccagaacgcgggcuggac

SEQ ID NO: 192635 - RNA, 24 nt, Human
ggcgucccgaaacggagcugguug

SEQ ID NO: 192636 - RNA, 24 nt, Human
ggcgucccgagacgcggcugccug

SEQ ID NO: 192637 - RNA, 24 nt, Human
ggcgucccgagauguggcuggcug

SEQ ID NO: 192638 - RNA, 22 nt, Human
ggcgucccgagcagcgcagggg

SEQ ID NO: 192639 - RNA, 32 nt, Human
ggcgucccgggacagcucaguguuggagggcc

SEQ ID NO: 192640 - RNA, 21 nt, Human
ggcgucccgggcgcggcuggc

SEQ ID NO: 192641 - RNA, 32 nt, Human
ggcgucccuccaggccuugccuccugcgggag

SEQ ID NO: 192642 - RNA, 32 nt, Human
ggcguccgccuccucccuccccuugaggcugg

SEQ ID NO: 192643 - RNA, 19 nt, Human
ggcguccgcucuccacacc

SEQ ID NO: 192644 - RNA, 32 nt, Human
ggcguccgcugcgccgccccugggcaggcuca

SEQ ID NO: 192645 - RNA, 21 nt, Human
ggcguccggggcgagcgggag

SEQ ID NO: 192646 - RNA, 32 nt, Human
ggcguccuaaccccagauaccugugaauguga

SEQ ID NO: 192647 - RNA, 32 nt, Human
ggcguccuagggcaccuggcgcaggggcggac

SEQ ID NO: 192648 - RNA, 32 nt, Human
ggcguccuccacccacgcccacuagccugcca

SEQ ID NO: 192649 - RNA, 32 nt, Human
ggcguccucuuuccggcuguugcugcucuucu

SEQ ID NO: 192650 - RNA, 32 nt, Human
ggcguccuucacagggagggugcagcugaccu

SEQ ID NO: 192651 - RNA, 32 nt, Human
ggcguccuuggaggcagcuugggagggugacu

SEQ ID NO: 192652 - RNA, 16 nt, Human
ggcgucgagggggcag

SEQ ID NO: 192653 - RNA, 32 nt, Human
ggcgucgcagcugagggaguaaggaggcuccc

SEQ ID NO: 192654 - RNA, 32 nt, Human
ggcgucgccugagaucagggcccgggaagccc

SEQ ID NO: 192655 - RNA, 21 nt, Human
ggcgucgcuaggcagcuucga

SEQ ID NO: 192656 - RNA, 32 nt, Human
ggcgucggcagcgcagaccucuuggccuucuc

SEQ ID NO: 192657 - RNA, 17 nt, Human
ggcgucggcggcggcag

SEQ ID NO: 192658 - RNA, 32 nt, Human
ggcgucgggagagagcgcggagguagcgggcg

SEQ ID NO: 192659 - RNA, 21 nt, Human
ggcgucggggccagcuuccgg

SEQ ID NO: 192660 - RNA, 17 nt, Human
ggcgucuacaccugcac

SEQ ID NO: 192661 - RNA, 32 nt, Human
ggcgucucaaagugcugggauuacaagcguga

SEQ ID NO: 192662 - RNA, 32 nt, Human
ggcgucuccagccucgguaccauggccgggau

SEQ ID NO: 192663 - RNA, 32 nt, Human
ggcgucuccuuuccuuccuucuuccucucuua

SEQ ID NO: 192664 - RNA, 32 nt, Human
ggcgucucgcucgcgcucacacacgcucugcc

SEQ ID NO: 192665 - RNA, 21 nt, Human
ggcgucucucaggagcucagg

SEQ ID NO: 192666 - RNA, 32 nt, Human
ggcgucucuccaccagccagaucccccaaucc

SEQ ID NO: 192667 - RNA, 18 nt, Human
ggcgucugcagggggcag

SEQ ID NO: 192668 - RNA, 32 nt, Human
ggcgucugcggccgcagcagcacuuuuugcac

SEQ ID NO: 192669 - RNA, 16 nt, Human
ggcgucuggcuggcug

SEQ ID NO: 192670 - RNA, 32 nt, Human
ggcgucugggcugagccggagggaggcgggag

SEQ ID NO: 192671 - RNA, 16 nt, Human
ggcgucuguaauccca

SEQ ID NO: 192672 - RNA, 32 nt, Human
ggcgucuguaaucccagcugcuugggaggcug

SEQ ID NO: 192673 - RNA, 32 nt, Human
ggcgucuucaucucccugccaucccccucuca

SEQ ID NO: 192674 - RNA, 32 nt, Human
ggcgucuucauucaguucaugcagggcaaagg

SEQ ID NO: 192675 - RNA, 32 nt, Human
ggcgucuucccaggaccuccugccagcuccca

SEQ ID NO: 192676 - RNA, 32 nt, Human
ggcgucuuucuuucuccccucaacucugacag

SEQ ID NO: 192677 - RNA, 32 nt, Human
ggcgugaaccaccacgcccagcugguuccuga

SEQ ID NO: 192678 - RNA, 32 nt, Human
ggcgugaaccacugcacccagccugcugaucc

SEQ ID NO: 192679 - RNA, 32 nt, Human
ggcgugaaccacugcacccggcgaggcauuuu

SEQ ID NO: 192680 - RNA, 32 nt, Human
ggcgugaauacacacaugcacacacauauaca

SEQ ID NO: 192681 - RNA, 32 nt, Human
ggcgugacugagguaauagaugaaaaguguuc

SEQ ID NO: 192682 - RNA, 32 nt, Human
ggcgugagccaccacacccagccaaauuuuug

SEQ ID NO: 192683 - RNA, 32 nt, Human
ggcgugagccaccacacccagccagugaacuc

SEQ ID NO: 192684 - RNA, 32 nt, Human
ggcgugagccaccacacccagccaguuuuccu

SEQ ID NO: 192685 - RNA, 32 nt, Human
ggcgugagccaccacacccagcccuuucacua

SEQ ID NO: 192686 - RNA, 32 nt, Human
ggcgugagccaccacauccagccuaauuuaag

SEQ ID NO: 192687 - RNA, 32 nt, Human
ggcgugagccaccaugccugcccagcaauacc

SEQ ID NO: 192688 - RNA, 32 nt, Human
ggcgugagccaccgcacguagcauuuacauua

SEQ ID NO: 192689 - RNA, 32 nt, Human
ggcgugagccacugcacccagccucauguuga

SEQ ID NO: 192690 - RNA, 32 nt, Human
ggcgugagccacugcacccagccugggagagg

SEQ ID NO: 192691 - RNA, 32 nt, Human
ggcgugagccacugcaccuggccuuauaaaua

SEQ ID NO: 192692 - RNA, 32 nt, Human
ggcgugagccacugcgcccagccugaauuuuu

SEQ ID NO: 192693 - RNA, 32 nt, Human
ggcgugagccacugcgcccagccuguuccuua

SEQ ID NO: 192694 - RNA, 19 nt, Human
ggcgugagcccccacgcug

SEQ ID NO: 192695 - RNA, 32 nt, Human
ggcgugagucacugcacccaagccuccuuucu

SEQ ID NO: 192696 - RNA, 22 nt, Human
ggcgugaucucagcucacugca

SEQ ID NO: 192697 - RNA, 32 nt, Human
ggcgugaucucggcuuuacugcagccuccgcu

SEQ ID NO: 192698 - RNA, 22 nt, Human
ggcgugauggcucaugccugug

SEQ ID NO: 192699 - RNA, 32 nt, Human
ggcgugcaaggggcucagcaaggugugaauga

SEQ ID NO: 192700 - RNA, 32 nt, Human
ggcgugcacaggacacagcgugggcggccugg

SEQ ID NO: 192701 - RNA, 32 nt, Human
ggcgugcaccacugaguccagccuauauucuu

SEQ ID NO: 192702 - RNA, 32 nt, Human
ggcgugcaccuguaaucccagcuacucaggag

SEQ ID NO: 192703 - RNA, 32 nt, Human
ggcgugcaccuguaaucccagcuacuugggag

SEQ ID NO: 192704 - RNA, 32 nt, Human
ggcgugcaccuguaaucucagcuacucgggag

SEQ ID NO: 192705 - RNA, 32 nt, Human
ggcgugcagggcccugaucacagcugccagua

SEQ ID NO: 192706 - RNA, 32 nt, Human
ggcgugcaggggcgguccagaggaggugcccg

SEQ ID NO: 192707 - RNA, 32 nt, Human
ggcgugcaggguggacgcgugggguuccgugu

SEQ ID NO: 192708 - RNA, 32 nt, Human
ggcgugcauauguaaagcacaucagauccgug

SEQ ID NO: 192709 - RNA, 22 nt, Human
ggcgugcaugugccaagaaaug

SEQ ID NO: 192710 - RNA, 32 nt, Human
ggcgugccucucugcccuccagccuucuucac

SEQ ID NO: 192711 - RNA, 32 nt, Human
ggcgugccugcggaugggcccgcuaaaggagu

SEQ ID NO: 192712 - RNA, 32 nt, Human
ggcgugcgaaguccaaacgcacuggcaacuuc

SEQ ID NO: 192713 - RNA, 21 nt, Human
ggcgugcgcaacgccaccacc

SEQ ID NO: 192714 - RNA, 32 nt, Human
ggcgugcgccuguaaucccagcuacucaagag

SEQ ID NO: 192715 - RNA, 32 nt, Human
ggcgugcgccuguaaucccagcuacucaggag

SEQ ID NO: 192716 - RNA, 32 nt, Human
ggcgugcgccuguaaucccagcuacucgggag

SEQ ID NO: 192717 - RNA, 32 nt, Human
ggcgugcgccuguaaucccagcuacuugggag

SEQ ID NO: 192718 - RNA, 32 nt, Human
ggcgugcgccuguaaucucagcuacuugggag

SEQ ID NO: 192719 - RNA, 23 nt, Human
ggcgugcggaucaucugagauca

SEQ ID NO: 192720 - RNA, 32 nt, Human
ggcgugcggccccagccccgccaccuuccugg

SEQ ID NO: 192721 - RNA, 32 nt, Human
ggcgugcggugacucggugcuucuguuuugga

SEQ ID NO: 192722 - RNA, 16 nt, Human
ggcgugcgucagguca

SEQ ID NO: 192723 - RNA, 32 nt, Human
ggcgugcgugagcgcacagcauguccgagccc

SEQ ID NO: 192724 - RNA, 32 nt, Human
ggcgugcugggcuauuugcugugguacuuuag

SEQ ID NO: 192725 - RNA, 20 nt, Human
ggcgugcugguggugcucac

SEQ ID NO: 192726 - RNA, 32 nt, Human
ggcguggaccuccagccuuggaagcuuucuuu

SEQ ID NO: 192727 - RNA, 32 nt, Human
ggcguggagggcacgggugccacccacaaacc

SEQ ID NO: 192728 - RNA, 32 nt, Human
ggcguggcacuuccuuccuuccugggcccgca

SEQ ID NO: 192729 - RNA, 32 nt, Human
ggcguggcaggcagugcugggagaggaaggcc

SEQ ID NO: 192730 - RNA, 18 nt, Human
ggcguggcagggaggcag

SEQ ID NO: 192731 - RNA, 32 nt, Human
ggcguggcagggccaaggcccacccacugcca

SEQ ID NO: 192732 - RNA, 20 nt, Human
ggcguggccuggcgcuggga

SEQ ID NO: 192733 - RNA, 32 nt, Human
ggcgugggaggaagauggacucgguggagaag

SEQ ID NO: 192734 - RNA, 32 nt, Human
ggcgugggaggcugggccgcagugaguggggg

SEQ ID NO: 192735 - RNA, 32 nt, Human
ggcgugggauccagagagaagcaccccaccac

SEQ ID NO: 192736 - RNA, 32 nt, Human
ggcgugggcagcgggggcaugggcaggaccac

SEQ ID NO: 192737 - RNA, 32 nt, Human
ggcgugggcaggcagugagaacacagauggua

SEQ ID NO: 192738 - RNA, 32 nt, Human
ggcgugggccaaccugugcugugucaucaguu

SEQ ID NO: 192739 - RNA, 32 nt, Human
ggcgugggccugccggggguugcgugacaggc

SEQ ID NO: 192740 - RNA, 32 nt, Human
ggcgugggcggcugaggggcugaggggcugag

SEQ ID NO: 192741 - RNA, 32 nt, Human
ggcguggggagcugcacugcaccagccagggc

SEQ ID NO: 192742 - RNA, 32 nt, Human
ggcguggggcuggggcagagcaggguuccugg

SEQ ID NO: 192743 - RNA, 32 nt, Human
ggcgugggggaggcacggcccgcaacucggcg

SEQ ID NO: 192744 - RNA, 32 nt, Human
ggcguggggugagacccagcguuggauaacgu

SEQ ID NO: 192745 - RNA, 22 nt, Human
ggcgugggugugagccaggcug

SEQ ID NO: 192746 - RNA, 32 nt, Human
ggcgugggugugagccaggcugcaggaggaac

SEQ ID NO: 192747 - RNA, 32 nt, Human
ggcgugguccuagcuacucgggagacugaagu

SEQ ID NO: 192748 - RNA, 22 nt, Human
ggcgugguggcacacaccugua

SEQ ID NO: 192749 - RNA, 22 nt, Human
ggcgugguggcacaugccugua

SEQ ID NO: 192750 - RNA, 32 nt, Human
ggcgugguggcacgucuguaaucccagcuacu

SEQ ID NO: 192751 - RNA, 22 nt, Human
ggcgugguggcacgugccugua

SEQ ID NO: 192752 - RNA, 22 nt, Human
ggcgugguggcacuugccugua

SEQ ID NO: 192753 - RNA, 22 nt, Human
ggcgugguggcagguaccugua

SEQ ID NO: 192754 - RNA, 22 nt, Human
ggcgugguggcaggugccugua

SEQ ID NO: 192755 - RNA, 22 nt, Human
ggcgugguggcgcacaccugua

SEQ ID NO: 192756 - RNA, 22 nt, Human
ggcgugguggcgcauaccugua

SEQ ID NO: 192757 - RNA, 22 nt, Human
ggcgugguggcgcaugccugua

SEQ ID NO: 192758 - RNA, 22 nt, Human
ggcgugguggcgcgcaccugua

SEQ ID NO: 192759 - RNA, 22 nt, Human
ggcgugguggcgggugccugua

SEQ ID NO: 192760 - RNA, 22 nt, Human
ggcgugguggcggucaccugua

SEQ ID NO: 192761 - RNA, 24 nt, Human
ggcgugguggcucaaaugccugua

SEQ ID NO: 192762 - RNA, 22 nt, Human
ggcgugguggcucacaccugua

SEQ ID NO: 192763 - RNA, 22 nt, Human
ggcgugguggcucacgccugua

SEQ ID NO: 192764 - RNA, 22 nt, Human
ggcgugguggcucacuccugua

SEQ ID NO: 192765 - RNA, 22 nt, Human
ggcgugguggcucaugccugua

SEQ ID NO: 192766 - RNA, 22 nt, Human
ggcgugguggcucaugcuugua

SEQ ID NO: 192767 - RNA, 22 nt, Human
ggcgugguggcucaugcuugug

SEQ ID NO: 192768 - RNA, 22 nt, Human
ggcgugguggcucauguaugua

SEQ ID NO: 192769 - RNA, 22 nt, Human
ggcgugguggcuggcaccugua

SEQ ID NO: 192770 - RNA, 22 nt, Human
ggcguggugguacaugccugua

SEQ ID NO: 192771 - RNA, 32 nt, Human
ggcguggugguccucagaggacaacucccagc

SEQ ID NO: 192772 - RNA, 22 nt, Human
ggcgugguggugcacaccugua

SEQ ID NO: 192773 - RNA, 22 nt, Human
ggcgugguggugcaugccugua

SEQ ID NO: 192774 - RNA, 32 nt, Human
ggcgugguggugggcaccuguacuggggaggu

SEQ ID NO: 192775 - RNA, 22 nt, Human
ggcguggugguucacaccugua

SEQ ID NO: 192776 - RNA, 22 nt, Human
ggcguggugguucaugccugua

SEQ ID NO: 192777 - RNA, 32 nt, Human
ggcgugguucgagagcgcgcagaguccagacu

SEQ ID NO: 192778 - RNA, 32 nt, Human
ggcguguaccaccacacccgucuaaguuuugu

SEQ ID NO: 192779 - RNA, 32 nt, Human
ggcguguaucugguauauguaaguguucagaa

SEQ ID NO: 192780 - RNA, 32 nt, Human
ggcgugucuuuggggagucagauggcugauug

SEQ ID NO: 192781 - RNA, 32 nt, Human
ggcgugugagccaccacgcccggccaugaaau

SEQ ID NO: 192782 - RNA, 32 nt, Human
ggcgugugccuguaaucccagcuacuugggag

SEQ ID NO: 192783 - RNA, 32 nt, Human
ggcgugugccuguaaucccagcuauuugggag

SEQ ID NO: 192784 - RNA, 32 nt, Human
ggcgugugccuguaaucucagcuacucaggag

SEQ ID NO: 192785 - RNA, 32 nt, Human
ggcgugugccuguaaugccagcuacucgggag

SEQ ID NO: 192786 - RNA, 20 nt, Human
ggcgugugccuguaguccca

SEQ ID NO: 192787 - RNA, 23 nt, Human
ggcgugugccuguagucccagcu

SEQ ID NO: 192788 - RNA, 32 nt, Human
ggcgugugccuguagucccagcuacucaggag

SEQ ID NO: 192789 - RNA, 32 nt, Human
ggcgugugccuguagucccagcuacuugggag

SEQ ID NO: 192790 - RNA, 32 nt, Human
ggcgugugccuguagucccagcugcuugggag

SEQ ID NO: 192791 - RNA, 32 nt, Human
ggcgugugccuguagugcuagcuacucagaag

SEQ ID NO: 192792 - RNA, 32 nt, Human
ggcgugugcgguugugggggagcucgccgugg

SEQ ID NO: 192793 - RNA, 32 nt, Human
ggcgugugcuaaggccagagcuaccagauggg

SEQ ID NO: 192794 - RNA, 23 nt, Human
ggcguguggaucaccugagguca

SEQ ID NO: 192795 - RNA, 32 nt, Human
ggcguguggcagccacacacaggcggccaggg

SEQ ID NO: 192796 - RNA, 21 nt, Human
ggcguguggcucacgccugua

SEQ ID NO: 192797 - RNA, 32 nt, Human
ggcguguggggcucuuucagggaccacagagg

SEQ ID NO: 192798 - RNA, 18 nt, Human
ggcgugugguggggcagu

SEQ ID NO: 192799 - RNA, 32 nt, Human
ggcguguguaacaucccaugugccucaccuaa

SEQ ID NO: 192800 - RNA, 20 nt, Human
ggcgugugucuguaauccca

SEQ ID NO: 192801 - RNA, 23 nt, Human
ggcgugugucuguaaucccagcu

SEQ ID NO: 192802 - RNA, 32 nt, Human
ggcgugugucuguaaucccagcuacucgggag

SEQ ID NO: 192803 - RNA, 32 nt, Human
ggcguuacacagaaggcuggcugacaugccca

SEQ ID NO: 192804 - RNA, 15 nt, Human
ggcguuagugggcag

SEQ ID NO: 192805 - RNA, 32 nt, Human
ggcguucaggcaggugaucgguguggcggcgg

SEQ ID NO: 192806 - RNA, 32 nt, Human
ggcguuccagcccagauccggccacgaagaca

SEQ ID NO: 192807 - RNA, 32 nt, Human
ggcguuccaugagaugcaagcacacaagaaug

SEQ ID NO: 192808 - RNA, 32 nt, Human
ggcguugcgcccuucgccucucccagaggagc

SEQ ID NO: 192809 - RNA, 19 nt, Human
ggcguugcgggaggccucg

SEQ ID NO: 192810 - RNA, 32 nt, Human
ggcguugcugggacuguuuugcacuggagcca

SEQ ID NO: 192811 - RNA, 32 nt, Human
ggcguuggagggaagagagaccagagaguuua

SEQ ID NO: 192812 - RNA, 19 nt, Human
ggcguugguaagggggcag

SEQ ID NO: 192813 - RNA, 32 nt, Human
ggcguugguuccaagccgguucccgucccugg

SEQ ID NO: 192814 - RNA, 32 nt, Human
ggcguugucaccacccacccuaccugcagagu

SEQ ID NO: 192815 - RNA, 32 nt, Human
ggcguuuacugaugcuuccugguccgguggcc

SEQ ID NO: 192816 - RNA, 32 nt, Human
ggcguuuccagggggaggacugcccacccuuc

SEQ ID NO: 192817 - RNA, 18 nt, Human
ggcguuuccuucauggcc

SEQ ID NO: 192818 - RNA, 32 nt, Human
ggcguuuguggugccagagaaaaguagccaga

SEQ ID NO: 192819 - RNA, 32 nt, Human
ggcguuuucuuugugcauugauuugcauuuuu

SEQ ID NO: 192820 - RNA, 32 nt, Human
ggcuaaaacggugaaaccccgucucuacuaaa

SEQ ID NO: 192821 - RNA, 20 nt, Human
ggcuaaaacuuuuuucacuu

SEQ ID NO: 192822 - RNA, 32 nt, Human
ggcuaaaaugaacugguuaucuuaggaucaug

SEQ ID NO: 192823 - RNA, 32 nt, Human
ggcuaaacagaauuuugagggcauggcccaaa

SEQ ID NO: 192824 - RNA, 32 nt, Human
ggcuaaaccgauacaggaaagcucucuuagaa

SEQ ID NO: 192825 - RNA, 21 nt, Human
ggcuaaagaauccccuugaua

SEQ ID NO: 192826 - RNA, 32 nt, Human
ggcuaaagacacugggcucugccaggggccuu

SEQ ID NO: 192827 - RNA, 32 nt, Human
ggcuaaagaggaaggaggggaggaggucgcua

SEQ ID NO: 192828 - RNA, 32 nt, Human
ggcuaaagaugaagcuacaagaaauaaguugg

SEQ ID NO: 192829 - RNA, 32 nt, Human
ggcuaaagcagaggugucacagcugcucaaga

SEQ ID NO: 192830 - RNA, 32 nt, Human
ggcuaaagccccgugaggccaggggcucuugu

SEQ ID NO: 192831 - RNA, 32 nt, Human
ggcuaaagccuguaaucccagcacuuugggag

SEQ ID NO: 192832 - RNA, 32 nt, Human
ggcuaaagcggaggaggggaccagccucaucc

SEQ ID NO: 192833 - RNA, 24 nt, Human
ggcuaaagcugguggaggaggaag

SEQ ID NO: 192834 - RNA, 32 nt, Human
ggcuaaagcuguuuuugacacagcacaugugu

SEQ ID NO: 192835 - RNA, 32 nt, Human
ggcuaaaggcggccagguuugcagugcgggaa

SEQ ID NO: 192836 - RNA, 32 nt, Human
ggcuaacaaggugaaaccccgucucuacuaaa

SEQ ID NO: 192837 - RNA, 32 nt, Human
ggcuaacaaggugaaaccucgucucuacuaaa

SEQ ID NO: 192838 - RNA, 32 nt, Human
ggcuaacacagugaaaccccaucucuaauaaa

SEQ ID NO: 192839 - RNA, 32 nt, Human
ggcuaacacagugaaaccccaucucuacuaaa

SEQ ID NO: 192840 - RNA, 32 nt, Human
ggcuaacacagugaaacccccucugauaaaaa

SEQ ID NO: 192841 - RNA, 32 nt, Human
ggcuaacacagugaaaccccgucucuaccaaa

SEQ ID NO: 192842 - RNA, 29 nt, Human
ggcuaacacagugaaaccccgucucuacu

SEQ ID NO: 192843 - RNA, 32 nt, Human
ggcuaacacagugaaaccccgucucuacuaaa

SEQ ID NO: 192844 - RNA, 32 nt, Human
ggcuaacacagugaaaccccgucucuucuaaa

SEQ ID NO: 192845 - RNA, 32 nt, Human
ggcuaacacagugaaaccccuccucuacuaaa

SEQ ID NO: 192846 - RNA, 32 nt, Human
ggcuaacacagugaaacccugucucuacuaaa

SEQ ID NO: 192847 - RNA, 32 nt, Human
ggcuaacacagugaaacccugucucuacuuaa

SEQ ID NO: 192848 - RNA, 32 nt, Human
ggcuaacacagugaaacccugucucuccuaaa

SEQ ID NO: 192849 - RNA, 32 nt, Human
ggcuaacacagugaaaccucaucucuacuaaa

SEQ ID NO: 192850 - RNA, 32 nt, Human
ggcuaacaccgugaaaccccaucucuacuaaa

SEQ ID NO: 192851 - RNA, 32 nt, Human
ggcuaacaccuguaaucccagcacuuugggag

SEQ ID NO: 192852 - RNA, 32 nt, Human
ggcuaacacgaugaaaccccgucucuacuaaa

SEQ ID NO: 192853 - RNA, 32 nt, Human
ggcuaacacggcgaaaccccgucucuacuaaa

SEQ ID NO: 192854 - RNA, 32 nt, Human
ggcuaacacggcgaaacgccaucucuacugaa

SEQ ID NO: 192855 - RNA, 32 nt, Human
ggcuaacacgggugaaaccccgucucuauuaa

SEQ ID NO: 192856 - RNA, 32 nt, Human
ggcuaacacgguaaaaccccaucucuacuaaa

SEQ ID NO: 192857 - RNA, 32 nt, Human
ggcuaacacggugaaacccaaucucuacuaaa

SEQ ID NO: 192858 - RNA, 32 nt, Human
ggcuaacacggugaaacccagccucuacuaaa

SEQ ID NO: 192859 - RNA, 32 nt, Human
ggcuaacacggugaaacccagucucuacuaaa

SEQ ID NO: 192860 - RNA, 32 nt, Human
ggcuaacacggugaaaccccaccucuacuaaa

SEQ ID NO: 192861 - RNA, 32 nt, Human
ggcuaacacggugaaaccccaucuccacuaaa

SEQ ID NO: 192862 - RNA, 32 nt, Human
ggcuaacacggugaaaccccaucucuacaaaa

SEQ ID NO: 192863 - RNA, 32 nt, Human
ggcuaacacggugaaaccccaucucuacuaaa

SEQ ID NO: 192864 - RNA, 32 nt, Human
ggcuaacacggugaaaccccaucucuacugaa

SEQ ID NO: 192865 - RNA, 32 nt, Human
ggcuaacacggugaaaccccauuuccacuaaa

SEQ ID NO: 192866 - RNA, 32 nt, Human
ggcuaacacggugaaaccccggcucuacuaaa

SEQ ID NO: 192867 - RNA, 32 nt, Human
ggcuaacacggugaaaccccgucucuaauaaa

SEQ ID NO: 192868 - RNA, 32 nt, Human
ggcuaacacggugaaaccccgucucuacauaa

SEQ ID NO: 192869 - RNA, 32 nt, Human
ggcuaacacggugaaaccccgucucuacuaaa

SEQ ID NO: 192870 - RNA, 32 nt, Human
ggcuaacacggugaaaccccgucucuacuaca

SEQ ID NO: 192871 - RNA, 32 nt, Human
ggcuaacacggugaaaccccgucucuacuacg

SEQ ID NO: 192872 - RNA, 32 nt, Human
ggcuaacacggugaaaccccgucucuacugaa

SEQ ID NO: 192873 - RNA, 32 nt, Human
ggcuaacacggugaaaccccgucucuaguaaa

SEQ ID NO: 192874 - RNA, 32 nt, Human
ggcuaacacggugaaaccccgucuuuacuaaa

SEQ ID NO: 192875 - RNA, 32 nt, Human
ggcuaacacggugaaaccccgucuuuacuaac

SEQ ID NO: 192876 - RNA, 32 nt, Human
ggcuaacacggugaaaccccuuaucuaugcgc

SEQ ID NO: 192877 - RNA, 32 nt, Human
ggcuaacacggugaaacccgaucccuacuaaa

SEQ ID NO: 192878 - RNA, 32 nt, Human
ggcuaacacggugaaacccgucucuacuaaaa

SEQ ID NO: 192879 - RNA, 32 nt, Human
ggcuaacacggugaaacccuaucucuacuaaa

SEQ ID NO: 192880 - RNA, 32 nt, Human
ggcuaacacggugaaacccugccucuacuaaa

SEQ ID NO: 192881 - RNA, 32 nt, Human
ggcuaacacggugaaacccugucucuacuaaa

SEQ ID NO: 192882 - RNA, 32 nt, Human
ggcuaacacggugaaacccugucuuuacuaaa

SEQ ID NO: 192883 - RNA, 32 nt, Human
ggcuaacacggugaaaccgucucuacuaaaac

SEQ ID NO: 192884 - RNA, 32 nt, Human
ggcuaacacggugaaaccucgucucuacuaaa

SEQ ID NO: 192885 - RNA, 32 nt, Human
ggcuaacacggugaaaccugucucuacuaaaa

SEQ ID NO: 192886 - RNA, 32 nt, Human
ggcuaacacggugaaacuccaucucuacuaaa

SEQ ID NO: 192887 - RNA, 32 nt, Human
ggcuaacacggugaaacuccgucucuacuaaa

SEQ ID NO: 192888 - RNA, 32 nt, Human
ggcuaacacggugagaccccaucucuacuaaa

SEQ ID NO: 192889 - RNA, 32 nt, Human
ggcuaacagggugaaaccacgucucuacuaaa

SEQ ID NO: 192890 - RNA, 32 nt, Human
ggcuaacagggugaaaccccaucgcuacuaaa

SEQ ID NO: 192891 - RNA, 32 nt, Human
ggcuaacagggugaaaccccgucucuacuaaa

SEQ ID NO: 192892 - RNA, 29 nt, Human
ggcuaacagggugaaacccugucucuacu

SEQ ID NO: 192893 - RNA, 32 nt, Human
ggcuaacauagugaaacccugucucuacuaaa

SEQ ID NO: 192894 - RNA, 32 nt, Human
ggcuaacauggcaaaaccccaucucuacuaaa

SEQ ID NO: 192895 - RNA, 32 nt, Human
ggcuaacauggcaaaaccucaucucuacuaaa

SEQ ID NO: 192896 - RNA, 32 nt, Human
ggcuaacauggcgaaaccccgucucuacuaaa

SEQ ID NO: 192897 - RNA, 32 nt, Human
ggcuaacauggugaaaccccaucuccacuaaa

SEQ ID NO: 192898 - RNA, 29 nt, Human
ggcuaacauggugaaaccccaucucuacu

SEQ ID NO: 192899 - RNA, 32 nt, Human
ggcuaacauggugaaaccccaucucuacuaaa

SEQ ID NO: 192900 - RNA, 32 nt, Human
ggcuaacauggugaaaccccaucucuacugaa

SEQ ID NO: 192901 - RNA, 32 nt, Human
ggcuaacauggugaaaccccaucucuaguaaa

SEQ ID NO: 192902 - RNA, 32 nt, Human
ggcuaacauggugaaaccccaugucuacuaaa

SEQ ID NO: 192903 - RNA, 32 nt, Human
ggcuaacauggugaaacccccgucucuacuaa

SEQ ID NO: 192904 - RNA, 32 nt, Human
ggcuaacauggugaaacccccguuucuacuaa

SEQ ID NO: 192905 - RNA, 32 nt, Human
ggcuaacauggugaaaccccgccucuacuaaa

SEQ ID NO: 192906 - RNA, 32 nt, Human
ggcuaacauggugaaaccccgucucuaccaaa

SEQ ID NO: 192907 - RNA, 32 nt, Human
ggcuaacauggugaaaccccgucucuacuaaa

SEQ ID NO: 192908 - RNA, 32 nt, Human
ggcuaacauggugaaaccccgucucuacugaa

SEQ ID NO: 192909 - RNA, 32 nt, Human
ggcuaacauggugaaaccccgucucuacuuaa

SEQ ID NO: 192910 - RNA, 32 nt, Human
ggcuaacauggugaaaccccgucucugcuaaa

SEQ ID NO: 192911 - RNA, 32 nt, Human
ggcuaacauggugaaaccccgucuguacuaaa

SEQ ID NO: 192912 - RNA, 32 nt, Human
ggcuaacauggugaaacccgcgucucuggugg

SEQ ID NO: 192913 - RNA, 32 nt, Human
ggcuaacauggugaaacccuaucucuacuaaa

SEQ ID NO: 192914 - RNA, 32 nt, Human
ggcuaacauggugaaacccugccucuacuaaa

SEQ ID NO: 192915 - RNA, 32 nt, Human
ggcuaacauggugaaacccuggcucuacuaaa

SEQ ID NO: 192916 - RNA, 32 nt, Human
ggcuaacauggugaaacccugucucuacuaaa

SEQ ID NO: 192917 - RNA, 32 nt, Human
ggcuaacauggugaaacccugucucuacugaa

SEQ ID NO: 192918 - RNA, 32 nt, Human
ggcuaacauggugaaacccugucucuauuaaa

SEQ ID NO: 192919 - RNA, 32 nt, Human
ggcuaacauggugaaacccugucuuuacuaaa

SEQ ID NO: 192920 - RNA, 32 nt, Human
ggcuaacauggugaaacccuguuucugcuaga

SEQ ID NO: 192921 - RNA, 32 nt, Human
ggcuaacauggugaaacccuuccccgucucua

SEQ ID NO: 192922 - RNA, 32 nt, Human
ggcuaacauggugaaaccucaucuccacuuaa

SEQ ID NO: 192923 - RNA, 32 nt, Human
ggcuaacauggugaaagccccucucuacuaaa

SEQ ID NO: 192924 - RNA, 32 nt, Human
ggcuaacauggugaaaucccgucucuacugaa

SEQ ID NO: 192925 - RNA, 32 nt, Human
ggcuaacauggugaaauccuaucucuaccaaa

SEQ ID NO: 192926 - RNA, 32 nt, Human
ggcuaacauggugaaccccgucucuacuaaaa

SEQ ID NO: 192927 - RNA, 32 nt, Human
ggcuaacauggugguaccccgucucuacugaa

SEQ ID NO: 192928 - RNA, 32 nt, Human
ggcuaacccggugaaaccccgucucuacuaaa

SEQ ID NO: 192929 - RNA, 32 nt, Human
ggcuaaccugggaggucaggggcugugguaua

SEQ ID NO: 192930 - RNA, 32 nt, Human
ggcuaacgauguagguuucauuucucagacuu

SEQ ID NO: 192931 - RNA, 32 nt, Human
ggcuaacgccuguaaucccagaacuuugggaa

SEQ ID NO: 192932 - RNA, 32 nt, Human
ggcuaacgccuguaaucccagcacuugggagg

SEQ ID NO: 192933 - RNA, 32 nt, Human
ggcuaacgccuguaaucccagcacuuugagau

SEQ ID NO: 192934 - RNA, 32 nt, Human
ggcuaacgcuuguaaucccagcgcuuugggag

SEQ ID NO: 192935 - RNA, 23 nt, Human
ggcuaacgugggcagcgcagggg

SEQ ID NO: 192936 - RNA, 32 nt, Human
ggcuaacguggugaaaccccaucucuacuaaa

SEQ ID NO: 192937 - RNA, 32 nt, Human
ggcuaacguggugaaaccccgucccuacuaaa

SEQ ID NO: 192938 - RNA, 32 nt, Human
ggcuaacugcaaccuccagcuccuggguucag

SEQ ID NO: 192939 - RNA, 32 nt, Human
ggcuaacugcaaccuccgccucccagguucaa

SEQ ID NO: 192940 - RNA, 32 nt, Human
ggcuaacugcaacuuccaccuccuggguucaa

SEQ ID NO: 192941 - RNA, 32 nt, Human
ggcuaacugccuggcccuccuggcucgcagcc

SEQ ID NO: 192942 - RNA, 32 nt, Human
ggcuaacuuggugaaaccccgucucuaauaaa

SEQ ID NO: 192943 - RNA, 32 nt, Human
ggcuaacuuggugaaacccugucucuacuaaa

SEQ ID NO: 192944 - RNA, 32 nt, Human
ggcuaagaaaugucagccacggaaacaacucu

SEQ ID NO: 192945 - RNA, 32 nt, Human
ggcuaagaaccucagcccuggggacuucaccu

SEQ ID NO: 192946 - RNA, 32 nt, Human
ggcuaagaaggaaauggcgaagagugaacaua

SEQ ID NO: 192947 - RNA, 32 nt, Human
ggcuaagaagucagagguagccaauguuuccu

SEQ ID NO: 192948 - RNA, 32 nt, Human
ggcuaagaagugagauggugcugccagagugc

SEQ ID NO: 192949 - RNA, 32 nt, Human
ggcuaagacgacucuuccacacacaggucgca

SEQ ID NO: 192950 - RNA, 32 nt, Human
ggcuaagaguguccuaggaguauccucauuug

SEQ ID NO: 192951 - RNA, 32 nt, Human
ggcuaagauggagaaacagguacuggacuuuu

SEQ ID NO: 192952 - RNA, 32 nt, Human
ggcuaagauggccacagaggaguuaggagccu

SEQ ID NO: 192953 - RNA, 32 nt, Human
ggcuaagauuccauggauggagcaauaaaggu

SEQ ID NO: 192954 - RNA, 32 nt, Human
ggcuaagccuggacacagucagggcggggcug

SEQ ID NO: 192955 - RNA, 32 nt, Human
ggcuaaggagaggaaagagcaggcacccaaac

SEQ ID NO: 192956 - RNA, 32 nt, Human
ggcuaaggcaggcacacaguggcggagaagau

SEQ ID NO: 192957 - RNA, 32 nt, Human
ggcuaaggggacagcggugugguuuggcuuua

SEQ ID NO: 192958 - RNA, 32 nt, Human
ggcuaaggggacgccggccggggaagaggcgc

SEQ ID NO: 192959 - RNA, 32 nt, Human
ggcuaagguaggaucacuugaucccaggaggc

SEQ ID NO: 192960 - RNA, 32 nt, Human
ggcuaagucccagcaauacaaaggacauaaga

SEQ ID NO: 192961 - RNA, 23 nt, Human
ggcuaagugauccucccaccuca

SEQ ID NO: 192962 - RNA, 32 nt, Human
ggcuaauacagugaaaccccaucucuacuaaa

SEQ ID NO: 192963 - RNA, 32 nt, Human
ggcuaauacggugaaaccccgucucuacuaaa

SEQ ID NO: 192964 - RNA, 32 nt, Human
ggcuaauauggugaaaccccaucucuacuaaa

SEQ ID NO: 192965 - RNA, 32 nt, Human
ggcuaauauggugaaaccccgucucuacuaaa

SEQ ID NO: 192966 - RNA, 32 nt, Human
ggcuaauauggugaaacccugucucuacuaaa

SEQ ID NO: 192967 - RNA, 32 nt, Human
ggcuaauauggugaaaccucgucucuacuaaa

SEQ ID NO: 192968 - RNA, 32 nt, Human
ggcuaaugaaggagggagaaaaacuguugauu

SEQ ID NO: 192969 - RNA, 32 nt, Human
ggcuaauggaguguuugaaaacugacaucaga

SEQ ID NO: 192970 - RNA, 32 nt, Human
ggcuaauguaaagccuuuccugccuugcauua

SEQ ID NO: 192971 - RNA, 32 nt, Human
ggcuaaugugcugauagccaggucugaaacuu

SEQ ID NO: 192972 - RNA, 32 nt, Human
ggcuaauguggugaaaccccgucucuacuaaa

SEQ ID NO: 192973 - RNA, 32 nt, Human
ggcuaauguugacuggagugucaagaagagug

SEQ ID NO: 192974 - RNA, 32 nt, Human
ggcuaauugccaccaauuucagccugccacga

SEQ ID NO: 192975 - RNA, 32 nt, Human
ggcuaauuugucucucauuugggguccuucau

SEQ ID NO: 192976 - RNA, 32 nt, Human
ggcuacaaaggcuccgcucacaaaagaaagcc

SEQ ID NO: 192977 - RNA, 32 nt, Human
ggcuacaaccccgacacaguagcauuugugcc

SEQ ID NO: 192978 - RNA, 32 nt, Human
ggcuacaacccugacacaguagcauuugugcc

SEQ ID NO: 192979 - RNA, 21 nt, Human
ggcuacaacgccgaugucauc

SEQ ID NO: 192980 - RNA, 21 nt, Human
ggcuacaacuaagcagccuca

SEQ ID NO: 192981 - RNA, 21 nt, Human
ggcuacaacuauuuuuucuca

SEQ ID NO: 192982 - RNA, 32 nt, Human
ggcuacaacucauaaauaugcaacauauaugu

SEQ ID NO: 192983 - RNA, 21 nt, Human
ggcuacaagcaggcuuaggca

SEQ ID NO: 192984 - RNA, 23 nt, Human
ggcuacaaggccugcccacggcc

SEQ ID NO: 192985 - RNA, 32 nt, Human
ggcuacaccacucucccagccugugaccaccg

SEQ ID NO: 192986 - RNA, 21 nt, Human
ggcuacacccccacaggugac

SEQ ID NO: 192987 - RNA, 32 nt, Human
ggcuacaccuucagugcuguguguuuccacag

SEQ ID NO: 192988 - RNA, 32 nt, Human
ggcuacacuagauauuuugugauuggcaagac

SEQ ID NO: 192989 - RNA, 32 nt, Human
ggcuacacuccucugcugaggaugucuacauu

SEQ ID NO: 192990 - RNA, 32 nt, Human
ggcuacacucuuuaagcaccuuccugagccac

SEQ ID NO: 192991 - RNA, 32 nt, Human
ggcuacacugcaacuuccguccagugcuguga

SEQ ID NO: 192992 - RNA, 22 nt, Human
ggcuacagaaugagacucugcc

SEQ ID NO: 192993 - RNA, 32 nt, Human
ggcuacagacuggcuuccaggguacucaagca

SEQ ID NO: 192994 - RNA, 21 nt, Human
ggcuacagagcugccgcggcu

SEQ ID NO: 192995 - RNA, 32 nt, Human
ggcuacagcacuccagccugggcaacaagagc

SEQ ID NO: 192996 - RNA, 32 nt, Human
ggcuacagcaggugucggauugcagugcgcuc

SEQ ID NO: 192997 - RNA, 21 nt, Human
ggcuacagcaugugcuaggcc

SEQ ID NO: 192998 - RNA, 21 nt, Human
ggcuacagccccgcuacagcc

SEQ ID NO: 192999 - RNA, 22 nt, Human
ggcuacagcccuucauguggcu

SEQ ID NO: 193000 - RNA, 22 nt, Human
ggcuacagccuuugugcuuuua

SEQ ID NO: 193001 - RNA, 25 nt, Human
ggcuacagcuaugcgccaccaugcc

SEQ ID NO: 193002 - RNA, 21 nt, Human
ggcuacagcugagcaauggcu

SEQ ID NO: 193003 - RNA, 32 nt, Human
ggcuacagcugcgccggaucugggcgaccacg

SEQ ID NO: 193004 - RNA, 32 nt, Human
ggcuacagcugcugcugccucuucuaauaaag

SEQ ID NO: 193005 - RNA, 23 nt, Human
ggcuacagcuucuaucacaugcc

SEQ ID NO: 193006 - RNA, 32 nt, Human
ggcuacagcuucugccuccucaccuggccguc

SEQ ID NO: 193007 - RNA, 32 nt, Human
ggcuacaggacccccaacaaccccaauccacg

SEQ ID NO: 193008 - RNA, 25 nt, Human
ggcuacaggagcauaccaccaugcc

SEQ ID NO: 193009 - RNA, 25 nt, Human
ggcuacaggcacgcaucaccaugcc

SEQ ID NO: 193010 - RNA, 25 nt, Human
ggcuacaggcauauaccaccaugcc

SEQ ID NO: 193011 - RNA, 20 nt, Human
ggcuacagggcaggcagagg

SEQ ID NO: 193012 - RNA, 32 nt, Human
ggcuacagggcuguaagagucgcuugaccuuc

SEQ ID NO: 193013 - RNA, 25 nt, Human
ggcuacaggugugagccaccaugcc

SEQ ID NO: 193014 - RNA, 25 nt, Human
ggcuacagugagccaucaucgugcc

SEQ ID NO: 193015 - RNA, 20 nt, Human
ggcuacaguuuagcauggcc

SEQ ID NO: 193016 - RNA, 32 nt, Human
ggcuacaucaucccuggcuguggauagugcuu

SEQ ID NO: 193017 - RNA, 32 nt, Human
ggcuacauuggugggugguggaguacugcccg

SEQ ID NO: 193018 - RNA, 32 nt, Human
ggcuacauuucccauggguuguuuccauaaga

SEQ ID NO: 193019 - RNA, 20 nt, Human
ggcuaccagucccaccaggg

SEQ ID NO: 193020 - RNA, 32 nt, Human
ggcuaccauggacugaagggcaguccccuccc

SEQ ID NO: 193021 - RNA, 32 nt, Human
ggcuacccaccagggaauggcacuagcagggg

SEQ ID NO: 193022 - RNA, 32 nt, Human
ggcuacccggaugaagagguuggaggugggca

SEQ ID NO: 193023 - RNA, 32 nt, Human
ggcuacccuaaagggagaaggaagggcagaga

SEQ ID NO: 193024 - RNA, 32 nt, Human
ggcuacccuccccaccccacuucuaucucaau

SEQ ID NO: 193025 - RNA, 23 nt, Human
ggcuaccgcggcccgccguggcc

SEQ ID NO: 193026 - RNA, 20 nt, Human
ggcuaccgcggcggcgcagg

SEQ ID NO: 193027 - RNA, 22 nt, Human
ggcuaccgcuaccgccacugcu

SEQ ID NO: 193028 - RNA, 32 nt, Human
ggcuaccggaucggucggaaauggcagaggug

SEQ ID NO: 193029 - RNA, 32 nt, Human
ggcuaccuacuucuuaaauuccguuuguggac

SEQ ID NO: 193030 - RNA, 27 nt, Human
ggcuaccuaggccuggccugcaugggc

SEQ ID NO: 193031 - RNA, 32 nt, Human
ggcuaccucccaggaaaccgugauagccauuu

SEQ ID NO: 193032 - RNA, 32 nt, Human
ggcuaccucuucguucugauuggccgcuagug

SEQ ID NO: 193033 - RNA, 32 nt, Human
ggcuaccugacuuggugggagcuccaggcagu

SEQ ID NO: 193034 - RNA, 32 nt, Human
ggcuaccugaggcugcacaggccagggcucgg

SEQ ID NO: 193035 - RNA, 22 nt, Human
ggcuaccuggcacccuauggcu

SEQ ID NO: 193036 - RNA, 32 nt, Human
ggcuaccugggcaggcagaaaaguuccugagg

SEQ ID NO: 193037 - RNA, 22 nt, Human
ggcuaccugucucccacagaug

SEQ ID NO: 193038 - RNA, 32 nt, Human
ggcuacgaccgggaccacguggugcuauggga

SEQ ID NO: 193039 - RNA, 32 nt, Human
ggcuacgccuguaaucccagcacuuugggagg

SEQ ID NO: 193040 - RNA, 32 nt, Human
ggcuacggaugggcgggacggagcagcccacc

SEQ ID NO: 193041 - RNA, 26 nt, Human
ggcuacggggaggccaccaccaggcc

SEQ ID NO: 193042 - RNA, 21 nt, Human
ggcuacggugacggccuggcc

SEQ ID NO: 193043 - RNA, 21 nt, Human
ggcuacggugagccgaagcca

SEQ ID NO: 193044 - RNA, 32 nt, Human
ggcuacuagagaacaagagggaaaguagggca

SEQ ID NO: 193045 - RNA, 32 nt, Human
ggcuacucaccccucugggauggcuaugggag

SEQ ID NO: 193046 - RNA, 32 nt, Human
ggcuacuccagccgcuucagacugccgggcag

SEQ ID NO: 193047 - RNA, 32 nt, Human
ggcuacuccugcucagcauggcugcuuuaggg

SEQ ID NO: 193048 - RNA, 32 nt, Human
ggcuacucucaaacuccugaccucaggugauc

SEQ ID NO: 193049 - RNA, 32 nt, Human
ggcuacucuggccuggcuucagcuuggaaccc

SEQ ID NO: 193050 - RNA, 32 nt, Human
ggcuacuggaggucacguucccuaacugaucc

SEQ ID NO: 193051 - RNA, 23 nt, Human
ggcuacugucucucugcacucug

SEQ ID NO: 193052 - RNA, 32 nt, Human
ggcuacuguucuguucuguauuuuggcaucug

SEQ ID NO: 193053 - RNA, 32 nt, Human
ggcuacuucuccccuccucuugccucccuccu

SEQ ID NO: 193054 - RNA, 32 nt, Human
ggcuacuucucccuucccucgguuccagucuu

SEQ ID NO: 193055 - RNA, 32 nt, Human
ggcuacuugggaggcagaggcaggagaauugc

SEQ ID NO: 193056 - RNA, 32 nt, Human
ggcuagaaaaggggcuuugccuuuguaacuuu

SEQ ID NO: 193057 - RNA, 32 nt, Human
ggcuagaaccuguagagcuagaacauggagag

SEQ ID NO: 193058 - RNA, 32 nt, Human
ggcuagaacuacaggcgugcaccacugugccc

SEQ ID NO: 193059 - RNA, 32 nt, Human
ggcuagaacuacccccucccagucuucaggcu

SEQ ID NO: 193060 - RNA, 32 nt, Human
ggcuagacgagggcccugggcaccagugauua

SEQ ID NO: 193061 - RNA, 32 nt, Human
ggcuagagaacagcaggucugugcagugucug

SEQ ID NO: 193062 - RNA, 32 nt, Human
ggcuagagaggcaccuuccugcgugaauccug

SEQ ID NO: 193063 - RNA, 32 nt, Human
ggcuagagccagcugcacuauccuuuucagag

SEQ ID NO: 193064 - RNA, 32 nt, Human
ggcuagagcgcaguggcaagauccucaggcuu

SEQ ID NO: 193065 - RNA, 22 nt, Human
ggcuagaggcaugggccaggua

SEQ ID NO: 193066 - RNA, 22 nt, Human
ggcuagaggcgccgccgccgcc

SEQ ID NO: 193067 - RNA, 20 nt, Human
ggcuagaggcggccgaggca

SEQ ID NO: 193068 - RNA, 32 nt, Human
ggcuagaguacagugggaacagucauggcuca

SEQ ID NO: 193069 - RNA, 32 nt, Human
ggcuagagugaacuugggccacugugaagaga

SEQ ID NO: 193070 - RNA, 21 nt, Human
ggcuagaucaguguuuuucca

SEQ ID NO: 193071 - RNA, 32 nt, Human
ggcuagauuuaucuugggugauggaggaaaug

SEQ ID NO: 193072 - RNA, 20 nt, Human
ggcuagcacagggcuaggca

SEQ ID NO: 193073 - RNA, 32 nt, Human
ggcuagcaccgugucugugucugucucccccu

SEQ ID NO: 193074 - RNA, 18 nt, Human
ggcuagcagcaugcggua

SEQ ID NO: 193075 - RNA, 32 nt, Human
ggcuagcauaguaaaaccccaucucuacugaa

SEQ ID NO: 193076 - RNA, 32 nt, Human
ggcuagcauccccagcccuuaauccacgucgg

SEQ ID NO: 193077 - RNA, 19 nt, Human
ggcuagcaugcucauggca

SEQ ID NO: 193078 - RNA, 32 nt, Human
ggcuagcauggugaaaccccgucucuacuaaa

SEQ ID NO: 193079 - RNA, 32 nt, Human
ggcuagcauggugagaccgucucuacuaaaaa

SEQ ID NO: 193080 - RNA, 32 nt, Human
ggcuagccacugugcuccagccugggcaacac

SEQ ID NO: 193081 - RNA, 32 nt, Human
ggcuagccagcuuuccaccaccauuuauuaaa

SEQ ID NO: 193082 - RNA, 32 nt, Human
ggcuagccccaaacuccugggcucaagugaug

SEQ ID NO: 193083 - RNA, 32 nt, Human
ggcuagccccuaccucugccauccuggagggc

SEQ ID NO: 193084 - RNA, 32 nt, Human
ggcuagccucaaacuccugggcucaagcgauc

SEQ ID NO: 193085 - RNA, 32 nt, Human
ggcuagccucaaacuccugggcuccagugacc

SEQ ID NO: 193086 - RNA, 32 nt, Human
ggcuagccucgaacuccugaacucaggugauc

SEQ ID NO: 193087 - RNA, 20 nt, Human
ggcuagccuggagcucacca

SEQ ID NO: 193088 - RNA, 32 nt, Human
ggcuagcgaggaaccugccccuccaguggccc

SEQ ID NO: 193089 - RNA, 32 nt, Human
ggcuagcgugagcgcugauucucaaccuacca

SEQ ID NO: 193090 - RNA, 32 nt, Human
ggcuagcucucaucauuuuggcacuuccgacu

SEQ ID NO: 193091 - RNA, 32 nt, Human
ggcuagcucugccuuccacaugcuucucagga

SEQ ID NO: 193092 - RNA, 32 nt, Human
ggcuagcucuugcccuuauaugacuuuaaugu

SEQ ID NO: 193093 - RNA, 20 nt, Human
ggcuaggaaagggcccaggg

SEQ ID NO: 193094 - RNA, 32 nt, Human
ggcuaggaagugaaaggaucaagauauuuacu

SEQ ID NO: 193095 - RNA, 31 nt, Human
ggcuaggacagcuagagugcagggaagccgg

SEQ ID NO: 193096 - RNA, 32 nt, Human
ggcuaggacagggaacagggaagcacuuacaa

SEQ ID NO: 193097 - RNA, 24 nt, Human
ggcuaggacuuuuacuaccauggu

SEQ ID NO: 193098 - RNA, 20 nt, Human
ggcuaggagaagagcccagg

SEQ ID NO: 193099 - RNA, 32 nt, Human
ggcuaggaggcaggggcugcaggcucagccug

SEQ ID NO: 193100 - RNA, 32 nt, Human
ggcuaggaguuagaggaagagagugacucaaa

SEQ ID NO: 193101 - RNA, 32 nt, Human
ggcuaggaguucgagaccauccuggccaacau

SEQ ID NO: 193102 - RNA, 32 nt, Human
ggcuaggcagcuggaagagaaagaccgagugc

SEQ ID NO: 193103 - RNA, 32 nt, Human
ggcuaggccaaggacagcaacaaguguucaaa

SEQ ID NO: 193104 - RNA, 32 nt, Human
ggcuaggccgcccuccccacuguuaccaacau

SEQ ID NO: 193105 - RNA, 32 nt, Human
ggcuaggcugcagccugccuccuggggacuca

SEQ ID NO: 193106 - RNA, 20 nt, Human
ggcuaggcuuuuuuauuuca

SEQ ID NO: 193107 - RNA, 32 nt, Human
ggcuagggacucggcugcaccugcucuuggac

SEQ ID NO: 193108 - RNA, 32 nt, Human
ggcuagggagggcaugaacacaaacauaagaa

SEQ ID NO: 193109 - RNA, 32 nt, Human
ggcuagggccuccugcaggguuguggggugga

SEQ ID NO: 193110 - RNA, 32 nt, Human
ggcuagggccugauucgggaagaugccuuugc

SEQ ID NO: 193111 - RNA, 32 nt, Human
ggcuagggcuugggccuggcauggaaggccuu

SEQ ID NO: 193112 - RNA, 32 nt, Human
ggcuaggggcucuguuucccccggcucuggca

SEQ ID NO: 193113 - RNA, 32 nt, Human
ggcuaggggcugggagcugcagauucugaccc

SEQ ID NO: 193114 - RNA, 20 nt, Human
ggcuaggggcuggggaagga

SEQ ID NO: 193115 - RNA, 32 nt, Human
ggcuagggguggaggccaggguuccaaggaaa

SEQ ID NO: 193116 - RNA, 32 nt, Human
ggcuaggguacuuggcuugcuuugcuaugugu

SEQ ID NO: 193117 - RNA, 32 nt, Human
ggcuagggugaaaugacaucaucuugcauuua

SEQ ID NO: 193118 - RNA, 23 nt, Human
ggcuagguagggucaccuaggga

SEQ ID NO: 193119 - RNA, 32 nt, Human
ggcuaggucccucuguccaucugggccuuugu

SEQ ID NO: 193120 - RNA, 18 nt, Human
ggcuaggucuggguccag

SEQ ID NO: 193121 - RNA, 32 nt, Human
ggcuagguuagaaagggagugagggaagggac

SEQ ID NO: 193122 - RNA, 32 nt, Human
ggcuagucacgaacuccugaccucgugauccg

SEQ ID NO: 193123 - RNA, 32 nt, Human
ggcuagucucaaacucccgaccuuaggugaug

SEQ ID NO: 193124 - RNA, 32 nt, Human
ggcuagucucaaacuccugaccucaggugauc

SEQ ID NO: 193125 - RNA, 32 nt, Human
ggcuagucucaaacuccugaccucaggugcuc

SEQ ID NO: 193126 - RNA, 32 nt, Human
ggcuagucucaaacuccugaccuccagugauc

SEQ ID NO: 193127 - RNA, 32 nt, Human
ggcuagucucaaacuccugacgucgugauccg

SEQ ID NO: 193128 - RNA, 32 nt, Human
ggcuagucucaaacuccugggcucaagcaauc

SEQ ID NO: 193129 - RNA, 32 nt, Human
ggcuagucucaaacuccugggcucaagugauc

SEQ ID NO: 193130 - RNA, 32 nt, Human
ggcuagucuccaacuccugggcucagaugagc

SEQ ID NO: 193131 - RNA, 32 nt, Human
ggcuagucucgaacuccugaccucaggugauc

SEQ ID NO: 193132 - RNA, 32 nt, Human
ggcuagucucgaauuccugggcucaagugauu

SEQ ID NO: 193133 - RNA, 32 nt, Human
ggcuagucuugaacuccugaccucaggugauc

SEQ ID NO: 193134 - RNA, 32 nt, Human
ggcuagucuuggaacuacugaccucaggugau

SEQ ID NO: 193135 - RNA, 32 nt, Human
ggcuagugagccacagacccauuugaggccaa

SEQ ID NO: 193136 - RNA, 20 nt, Human
ggcuaguuacucuucagaug

SEQ ID NO: 193137 - RNA, 32 nt, Human
ggcuaguuaggaagaaaggaggugggauaagg

SEQ ID NO: 193138 - RNA, 32 nt, Human
ggcuaguucuuuucagccuuguggagccuguc

SEQ ID NO: 193139 - RNA, 32 nt, Human
ggcuaguuucaaacuccugaccuuaggugauc

SEQ ID NO: 193140 - RNA, 32 nt, Human
ggcuaguuugcaggagagaacccagaauaaac

SEQ ID NO: 193141 - RNA, 32 nt, Human
ggcuauaaaauaaaggcuucaaauucuucaaa

SEQ ID NO: 193142 - RNA, 32 nt, Human
ggcuauaacauacaugucaauaucacuguuuu

SEQ ID NO: 193143 - RNA, 32 nt, Human
ggcuauaauacacacuaccucccuucacuaca

SEQ ID NO: 193144 - RNA, 22 nt, Human
ggcuauaauaguucuguucuua

SEQ ID NO: 193145 - RNA, 22 nt, Human
ggcuauagcagauggccauggc

SEQ ID NO: 193146 - RNA, 32 nt, Human
ggcuauaggacagguagcccucauuuccaugc

SEQ ID NO: 193147 - RNA, 20 nt, Human
ggcuauagucugagcuacuc

SEQ ID NO: 193148 - RNA, 32 nt, Human
ggcuauaucugcacuucaagaggccaccuucu

SEQ ID NO: 193149 - RNA, 32 nt, Human
ggcuauauuuugcuaaacugcccucucaaaug

SEQ ID NO: 193150 - RNA, 32 nt, Human
ggcuaucaaggugacacaccgugagacaggug

SEQ ID NO: 193151 - RNA, 32 nt, Human
ggcuaucagagucaacguccugccugugcagc

SEQ ID NO: 193152 - RNA, 32 nt, Human
ggcuaucagcagagaaagacaggugggcagca

SEQ ID NO: 193153 - RNA, 32 nt, Human
ggcuaucaggggcauuuaucaugugugagauu

SEQ ID NO: 193154 - RNA, 32 nt, Human
ggcuauccagagauucccaguaggagacacgg

SEQ ID NO: 193155 - RNA, 32 nt, Human
ggcuauccauccacccaccaagacccuguucc

SEQ ID NO: 193156 - RNA, 19 nt, Human
ggcuauccuacaccugggc

SEQ ID NO: 193157 - RNA, 32 nt, Human
ggcuauccucaccaugacccagcucuacaagg

SEQ ID NO: 193158 - RNA, 31 nt, Human
ggcuaucugagggugugaugggugaagcugu

SEQ ID NO: 193159 - RNA, 32 nt, Human
ggcuaucuugcccaggcuugcaauuuauagag

SEQ ID NO: 193160 - RNA, 32 nt, Human
ggcuaugaaagaacuaaauaugaguacauaaa

SEQ ID NO: 193161 - RNA, 32 nt, Human
ggcuaugcaacagcucucaccuacgcgagucu

SEQ ID NO: 193162 - RNA, 32 nt, Human
ggcuaugcuucugugauauggaaagggcaccc

SEQ ID NO: 193163 - RNA, 22 nt, Human
ggcuauggcuugacucaugggc

SEQ ID NO: 193164 - RNA, 23 nt, Human
ggcuaugggacgcggcuacggcc

SEQ ID NO: 193165 - RNA, 32 nt, Human
ggcuaugggaggauuauuuuaacagaucaaga

SEQ ID NO: 193166 - RNA, 32 nt, Human
ggcuaugggagugucuagaugccugaaagggc

SEQ ID NO: 193167 - RNA, 24 nt, Human
ggcuaugguccugccaggugcagg

SEQ ID NO: 193168 - RNA, 32 nt, Human
ggcuaugguggggguagguaggucacuugucc

SEQ ID NO: 193169 - RNA, 32 nt, Human
ggcuauguugcccaggcuggucucgaacucug

SEQ ID NO: 193170 - RNA, 32 nt, Human
ggcuauucucgaacuccugaccucgugaucca

SEQ ID NO: 193171 - RNA, 32 nt, Human
ggcuauucugugccuucuaccucuuucuucuc

SEQ ID NO: 193172 - RNA, 32 nt, Human
ggcuauucuugaaggccagguuuuaauaacca

SEQ ID NO: 193173 - RNA, 32 nt, Human
ggcuauugagauuauuguggcuuuuguauuuc

SEQ ID NO: 193174 - RNA, 29 nt, Human
ggcuauuggcugcucccaauccuugcccc

SEQ ID NO: 193175 - RNA, 32 nt, Human
ggcuauuuccacugcucuauuucugacucuca

SEQ ID NO: 193176 - RNA, 32 nt, Human
ggcuauuuugaacccaggaauccuugggggug

SEQ ID NO: 193177 - RNA, 32 nt, Human
ggcuauuuugaugaagaaaacuuuguucauuu

SEQ ID NO: 193178 - RNA, 24 nt, Human
ggcucaaacaauucuccugccuca

SEQ ID NO: 193179 - RNA, 32 nt, Human
ggcucaaaccaauaggacaauuugcugagguc

SEQ ID NO: 193180 - RNA, 32 nt, Human
ggcucaaaccuguaaucccagcacuuugggag

SEQ ID NO: 193181 - RNA, 32 nt, Human
ggcucaaagacuguucgcgcagccacacaggu

SEQ ID NO: 193182 - RNA, 32 nt, Human
ggcucaaagcaaguggaagugggcagagauuc

SEQ ID NO: 193183 - RNA, 32 nt, Human
ggcucaaagcagcaggacugugggaaagagcc

SEQ ID NO: 193184 - RNA, 32 nt, Human
ggcucaaaggcugggagggagggaaggagaga

SEQ ID NO: 193185 - RNA, 24 nt, Human
ggcucaaaucauccuccugccuca

SEQ ID NO: 193186 - RNA, 19 nt, Human
ggcucaaaugauccuccca

SEQ ID NO: 193187 - RNA, 24 nt, Human
ggcucaaaugauccucccaccuca

SEQ ID NO: 193188 - RNA, 23 nt, Human
ggcucaaaugauccucccaucuc

SEQ ID NO: 193189 - RNA, 24 nt, Human
ggcucaaaugauccuuccaccuca

SEQ ID NO: 193190 - RNA, 19 nt, Human
ggcucaaaugcucucccca

SEQ ID NO: 193191 - RNA, 32 nt, Human
ggcucaacauucacgugccucuugcuuucuuu

SEQ ID NO: 193192 - RNA, 32 nt, Human
ggcucaacgcaaccuccgccucccagguucaa

SEQ ID NO: 193193 - RNA, 24 nt, Human
ggcucaacggauccuuccaccuca

SEQ ID NO: 193194 - RNA, 32 nt, Human
ggcucaacuucccugcuucugccugugcccuc

SEQ ID NO: 193195 - RNA, 21 nt, Human
ggcucaacuucugggcuccca

SEQ ID NO: 193196 - RNA, 24 nt, Human
ggcucaagaaauccucccaccuca

SEQ ID NO: 193197 - RNA, 20 nt, Human
ggcucaagaacagcuccaag

SEQ ID NO: 193198 - RNA, 24 nt, Human
ggcucaagagauccucccacuuca

SEQ ID NO: 193199 - RNA, 32 nt, Human
ggcucaagaugaaacucuuuccccagcaguuu

SEQ ID NO: 193200 - RNA, 24 nt, Human
ggcucaagcaaaccucucaccuca

SEQ ID NO: 193201 - RNA, 24 nt, Human
ggcucaagcaacccugccaccuca

SEQ ID NO: 193202 - RNA, 24 nt, Human
ggcucaagcaacucuuccaccuca

SEQ ID NO: 193203 - RNA, 24 nt, Human
ggcucaagcaauccuaccauguca

SEQ ID NO: 193204 - RNA, 24 nt, Human
ggcucaagcaauccucccaccuca

SEQ ID NO: 193205 - RNA, 24 nt, Human
ggcucaagcaauccucccacuuca

SEQ ID NO: 193206 - RNA, 24 nt, Human
ggcucaagcaauccucccaucuua

SEQ ID NO: 193207 - RNA, 24 nt, Human
ggcucaagcaauccucccgccuca

SEQ ID NO: 193208 - RNA, 24 nt, Human
ggcucaagcaauccucccgcuuca

SEQ ID NO: 193209 - RNA, 24 nt, Human
ggcucaagcaauccucccuccuca

SEQ ID NO: 193210 - RNA, 24 nt, Human
ggcucaagcaauccuccugccuca

SEQ ID NO: 193211 - RNA, 32 nt, Human
ggcucaagcaauccuccugccucggccuccca

SEQ ID NO: 193212 - RNA, 32 nt, Human
ggcucaagcaauccuccugccucggcuuccua

SEQ ID NO: 193213 - RNA, 24 nt, Human
ggcucaagcaauccucucaccgca

SEQ ID NO: 193214 - RNA, 24 nt, Human
ggcucaagcaauccucucaccuca

SEQ ID NO: 193215 - RNA, 23 nt, Human
ggcucaagcaauccucucaucuc

SEQ ID NO: 193216 - RNA, 24 nt, Human
ggcucaagcaauccuuccuacuca

SEQ ID NO: 193217 - RNA, 24 nt, Human
ggcucaagcaaucuucccaccuca

SEQ ID NO: 193218 - RNA, 24 nt, Human
ggcucaagcaaugcucccaucuca

SEQ ID NO: 193219 - RNA, 24 nt, Human
ggcucaagcaauucucccaccuca

SEQ ID NO: 193220 - RNA, 24 nt, Human
ggcucaagcaauucuccuaccuca

SEQ ID NO: 193221 - RNA, 22 nt, Human
ggcucaagcaauucuccugccu

SEQ ID NO: 193222 - RNA, 24 nt, Human
ggcucaagcaauucuccugccuca

SEQ ID NO: 193223 - RNA, 24 nt, Human
ggcucaagcacuccucccuccuca

SEQ ID NO: 193224 - RNA, 24 nt, Human
ggcucaagcacucugcccaccuca

SEQ ID NO: 193225 - RNA, 24 nt, Human
ggcucaagcaguccucccaccuca

SEQ ID NO: 193226 - RNA, 24 nt, Human
ggcucaagcaguccuccccacuca

SEQ ID NO: 193227 - RNA, 32 nt, Human
ggcucaagcaguccuccugccuuggccuccua

SEQ ID NO: 193228 - RNA, 19 nt, Human
ggcucaagcaguccuuccc

SEQ ID NO: 193229 - RNA, 24 nt, Human
ggcucaagcagucuacccaccuca

SEQ ID NO: 193230 - RNA, 24 nt, Human
ggcucaagcagucuuccugccuca

SEQ ID NO: 193231 - RNA, 24 nt, Human
ggcucaagcaguucucccaccuca

SEQ ID NO: 193232 - RNA, 22 nt, Human
ggcucaagcaguucuccugccu

SEQ ID NO: 193233 - RNA, 24 nt, Human
ggcucaagcaguucuccugccuca

SEQ ID NO: 193234 - RNA, 28 nt, Human
ggcucaagccauccauccuccuaccuca

SEQ ID NO: 193235 - RNA, 24 nt, Human
ggcucaagccauccucccuccuca

SEQ ID NO: 193236 - RNA, 24 nt, Human
ggcucaagccauccuuccgccuca

SEQ ID NO: 193237 - RNA, 24 nt, Human
ggcucaagccaucuuuccaccuca

SEQ ID NO: 193238 - RNA, 24 nt, Human
ggcucaagccauuuucccaccuca

SEQ ID NO: 193239 - RNA, 32 nt, Human
ggcucaagcccauaaucccagcacuuugggag

SEQ ID NO: 193240 - RNA, 32 nt, Human
ggcucaagccuguaaucccagcacuuuaggug

SEQ ID NO: 193241 - RNA, 32 nt, Human
ggcucaagccuguaaucccagcacuuugggag

SEQ ID NO: 193242 - RNA, 32 nt, Human
ggcucaagccuguaaucccagcacuuugggug

SEQ ID NO: 193243 - RNA, 32 nt, Human
ggcucaagccuguaaucccagcauuuugggag

SEQ ID NO: 193244 - RNA, 32 nt, Human
ggcucaagccuguaaugucagcacuuuaaaag

SEQ ID NO: 193245 - RNA, 32 nt, Human
ggcucaagccuguacucccagcacuuuuggag

SEQ ID NO: 193246 - RNA, 32 nt, Human
ggcucaagccuguauuccagcacuuugggagg

SEQ ID NO: 193247 - RNA, 24 nt, Human
ggcucaagcgacccucccaccuca

SEQ ID NO: 193248 - RNA, 24 nt, Human
ggcucaagcgacccuccugccuca

SEQ ID NO: 193249 - RNA, 24 nt, Human
ggcucaagcgauacucccaccuca

SEQ ID NO: 193250 - RNA, 23 nt, Human
ggcucaagcgaucccuccccuca

SEQ ID NO: 193251 - RNA, 24 nt, Human
ggcucaagcgauccuaucaccuca

SEQ ID NO: 193252 - RNA, 24 nt, Human
ggcucaagcgauccucacaccuca

SEQ ID NO: 193253 - RNA, 24 nt, Human
ggcucaagcgauccuccacccuca

SEQ ID NO: 193254 - RNA, 19 nt, Human
ggcucaagcgauccuccca

SEQ ID NO: 193255 - RNA, 24 nt, Human
ggcucaagcgauccucccaccuca

SEQ ID NO: 193256 - RNA, 23 nt, Human
ggcucaagcgauccucccacuuu

SEQ ID NO: 193257 - RNA, 24 nt, Human
ggcucaagcgauccucccagcuca

SEQ ID NO: 193258 - RNA, 24 nt, Human
ggcucaagcgauccucccgcuuca

SEQ ID NO: 193259 - RNA, 22 nt, Human
ggcucaagcgauccuccugccu

SEQ ID NO: 193260 - RNA, 24 nt, Human
ggcucaagcgauccuccugccuca

SEQ ID NO: 193261 - RNA, 24 nt, Human
ggcucaagcgauccuccuggcuca

SEQ ID NO: 193262 - RNA, 24 nt, Human
ggcucaagcgauccuucugccuca

SEQ ID NO: 193263 - RNA, 24 nt, Human
ggcucaagcgauucuccagccuca

SEQ ID NO: 193264 - RNA, 24 nt, Human
ggcucaagcgauucucccaccuca

SEQ ID NO: 193265 - RNA, 24 nt, Human
ggcucaagcgauucucucaccuca

SEQ ID NO: 193266 - RNA, 24 nt, Human
ggcucaagcgauucucucacuuca

SEQ ID NO: 193267 - RNA, 24 nt, Human
ggcucaagcgauucucuugccuca

SEQ ID NO: 193268 - RNA, 24 nt, Human
ggcucaagcgguccuucuaccuca

SEQ ID NO: 193269 - RNA, 24 nt, Human
ggcucaagcuauccucccaccuca

SEQ ID NO: 193270 - RNA, 24 nt, Human
ggcucaagcuauccuccugccuca

SEQ ID NO: 193271 - RNA, 24 nt, Human
ggcucaagcuguccucccaccuca

SEQ ID NO: 193272 - RNA, 32 nt, Human
ggcucaagcuuguauuaccagcacuuuaggag

SEQ ID NO: 193273 - RNA, 32 nt, Human
ggcucaaggauguggauacaggaagccuacua

SEQ ID NO: 193274 - RNA, 32 nt, Human
ggcucaaggcagcucuggacaagggagcaggc

SEQ ID NO: 193275 - RNA, 24 nt, Human
ggcucaaggcauccucccaccuca

SEQ ID NO: 193276 - RNA, 24 nt, Human
ggcucaagggauccucucaccuca

SEQ ID NO: 193277 - RNA, 24 nt, Human
ggcucaagggauccugccaccuca

SEQ ID NO: 193278 - RNA, 24 nt, Human
ggcucaagggauccugccaucuca

SEQ ID NO: 193279 - RNA, 32 nt, Human
ggcucaagggccagggcagccgagggaagcuc

SEQ ID NO: 193280 - RNA, 24 nt, Human
ggcucaaguaauccuaccgccuca

SEQ ID NO: 193281 - RNA, 19 nt, Human
ggcucaaguaauccuccca

SEQ ID NO: 193282 - RNA, 24 nt, Human
ggcucaaguaaucuuccugccuca

SEQ ID NO: 193283 - RNA, 32 nt, Human
ggcucaaguaaucuuccugccucaaccuccca

SEQ ID NO: 193284 - RNA, 32 nt, Human
ggcucaagucuguaaucccagcgcuuugggag

SEQ ID NO: 193285 - RNA, 24 nt, Human
ggcucaagugacccucccaccuca

SEQ ID NO: 193286 - RNA, 24 nt, Human
ggcucaagugacccuccugcauca

SEQ ID NO: 193287 - RNA, 24 nt, Human
ggcucaagugacccuccugccuca

SEQ ID NO: 193288 - RNA, 24 nt, Human
ggcucaagugaucaucccaccuca

SEQ ID NO: 193289 - RNA, 24 nt, Human
ggcucaagugaucauuccaccuca

SEQ ID NO: 193290 - RNA, 18 nt, Human
ggcucaagugauccuccc

SEQ ID NO: 193291 - RNA, 19 nt, Human
ggcucaagugauccuccca

SEQ ID NO: 193292 - RNA, 23 nt, Human
ggcucaagugauccucccaccuc

SEQ ID NO: 193293 - RNA, 24 nt, Human
ggcucaagugauccucccaccuca

SEQ ID NO: 193294 - RNA, 32 nt, Human
ggcucaagugauccucccacuucaccuuccug

SEQ ID NO: 193295 - RNA, 24 nt, Human
ggcucaagugauccucccagcuca

SEQ ID NO: 193296 - RNA, 23 nt, Human
ggcucaagugauccucccaucuu

SEQ ID NO: 193297 - RNA, 24 nt, Human
ggcucaagugauccuccccacuca

SEQ ID NO: 193298 - RNA, 19 nt, Human
ggcucaagugauccucccg

SEQ ID NO: 193299 - RNA, 24 nt, Human
ggcucaagugauccucccgccuca

SEQ ID NO: 193300 - RNA, 24 nt, Human
ggcucaagugauccucccgcuuca

SEQ ID NO: 193301 - RNA, 18 nt, Human
ggcucaagugauccuccu

SEQ ID NO: 193302 - RNA, 19 nt, Human
ggcucaagugauccuccua

SEQ ID NO: 193303 - RNA, 24 nt, Human
ggcucaagugauccuccuaccuca

SEQ ID NO: 193304 - RNA, 24 nt, Human
ggcucaagugauccuccuauuuca

SEQ ID NO: 193305 - RNA, 23 nt, Human
ggcucaagugauccuccugccuc

SEQ ID NO: 193306 - RNA, 24 nt, Human
ggcucaagugauccuccugccuca

SEQ ID NO: 193307 - RNA, 32 nt, Human
ggcucaagugauccuccugccugggccugcca

SEQ ID NO: 193308 - RNA, 24 nt, Human
ggcucaagugauccuccugccuua

SEQ ID NO: 193309 - RNA, 24 nt, Human
ggcucaagugauccuccugcuuca

SEQ ID NO: 193310 - RNA, 23 nt, Human
ggcucaagugauccuccugucuc

SEQ ID NO: 193311 - RNA, 18 nt, Human
ggcucaagugauccucuc

SEQ ID NO: 193312 - RNA, 24 nt, Human
ggcucaagugauccucucaccuca

SEQ ID NO: 193313 - RNA, 32 nt, Human
ggcucaagugauccucucacuucagcuccuca

SEQ ID NO: 193314 - RNA, 19 nt, Human
ggcucaagugauccucuua

SEQ ID NO: 193315 - RNA, 23 nt, Human
ggcucaagugauccucuugccuu

SEQ ID NO: 193316 - RNA, 24 nt, Human
ggcucaagugauccuuccaucuca

SEQ ID NO: 193317 - RNA, 24 nt, Human
ggcucaagugauccuucugccuca

SEQ ID NO: 193318 - RNA, 23 nt, Human
ggcucaagugaucucccacuuca

SEQ ID NO: 193319 - RNA, 24 nt, Human
ggcucaagugaucugcccuccuca

SEQ ID NO: 193320 - RNA, 24 nt, Human
ggcucaagugaucuuccugcuuca

SEQ ID NO: 193321 - RNA, 23 nt, Human
ggcucaagugauucaccugccuu

SEQ ID NO: 193322 - RNA, 19 nt, Human
ggcucaagugauucuccca

SEQ ID NO: 193323 - RNA, 24 nt, Human
ggcucaagugauucucccaccuca

SEQ ID NO: 193324 - RNA, 24 nt, Human
ggcucaagugauucuccucccuca

SEQ ID NO: 193325 - RNA, 32 nt, Human
ggcucaagugauucuccucccucagccuccca

SEQ ID NO: 193326 - RNA, 22 nt, Human
ggcucaagugauucuccugccu

SEQ ID NO: 193327 - RNA, 23 nt, Human
ggcucaagugauucuccugcuuc

SEQ ID NO: 193328 - RNA, 19 nt, Human
ggcucaagugauucuucca

SEQ ID NO: 193329 - RNA, 24 nt, Human
ggcucaagugauucuucugccuca

SEQ ID NO: 193330 - RNA, 24 nt, Human
ggcucaagugguccuccugccuca

SEQ ID NO: 193331 - RNA, 24 nt, Human
ggcucaaguguuccuccugccuca

SEQ ID NO: 193332 - RNA, 29 nt, Human
ggcucaauaaagcaagucaaagcacaaaa

SEQ ID NO: 193333 - RNA, 32 nt, Human
ggcucaaugacaccgcuaccucccagggauuc

SEQ ID NO: 193334 - RNA, 21 nt, Human
ggcucaaugagcagccaggua

SEQ ID NO: 193335 - RNA, 23 nt, Human
ggcucaaugauucuccugucuca

SEQ ID NO: 193336 - RNA, 32 nt, Human
ggcucaaugcaaccuccaccucccagguucaa

SEQ ID NO: 193337 - RNA, 23 nt, Human
ggcucaaugcaaccucugccccc

SEQ ID NO: 193338 - RNA, 32 nt, Human
ggcucacaaagggagaggagagaacagggcaa

SEQ ID NO: 193339 - RNA, 20 nt, Human
ggcucacaaaugaggaccag

SEQ ID NO: 193340 - RNA, 22 nt, Human
ggcucacaagcagaaccccacc

SEQ ID NO: 193341 - RNA, 32 nt, Human
ggcucacacaaaacagcugacacugacuaagg

SEQ ID NO: 193342 - RNA, 32 nt, Human
ggcucacacacucucauucacacacacaaauc

SEQ ID NO: 193343 - RNA, 18 nt, Human
ggcucacacaugcaucag

SEQ ID NO: 193344 - RNA, 19 nt, Human
ggcucacacaugcaucagc

SEQ ID NO: 193345 - RNA, 32 nt, Human
ggcucacacaugcaucagcacugcacacugga

SEQ ID NO: 193346 - RNA, 19 nt, Human
ggcucacacauguaauccc

SEQ ID NO: 193347 - RNA, 32 nt, Human
ggcucacacauguuaauuccagcacuuuggga

SEQ ID NO: 193348 - RNA, 32 nt, Human
ggcucacaccaauccaggauucaggcccaccc

SEQ ID NO: 193349 - RNA, 32 nt, Human
ggcucacacccauaaucccagcacuuugggag

SEQ ID NO: 193350 - RNA, 17 nt, Human
ggcucacaccccuccag

SEQ ID NO: 193351 - RNA, 32 nt, Human
ggcucacacccguaaucccagcacuuugcggg

SEQ ID NO: 193352 - RNA, 32 nt, Human
ggcucacacccguaaucccagcacuuugggag

SEQ ID NO: 193353 - RNA, 21 nt, Human
ggcucacaccgguaaucccag

SEQ ID NO: 193354 - RNA, 32 nt, Human
ggcucacaccgguaaucccagcacuuugggag

SEQ ID NO: 193355 - RNA, 19 nt, Human
ggcucacaccuaaucccag

SEQ ID NO: 193356 - RNA, 32 nt, Human
ggcucacaccuaaucccagcacuuugggaggc

SEQ ID NO: 193357 - RNA, 32 nt, Human
ggcucacaccuauaaccccagcacuuugggag

SEQ ID NO: 193358 - RNA, 20 nt, Human
ggcucacaccuauaauccca

SEQ ID NO: 193359 - RNA, 21 nt, Human
ggcucacaccuauaaucccag

SEQ ID NO: 193360 - RNA, 32 nt, Human
ggcucacaccuauaaucccagcacuuuaggag

SEQ ID NO: 193361 - RNA, 28 nt, Human
ggcucacaccuauaaucccagcacuuug

SEQ ID NO: 193362 - RNA, 32 nt, Human
ggcucacaccuauaaucccagcacuuugggaa

SEQ ID NO: 193363 - RNA, 32 nt, Human
ggcucacaccuauaaucccagcacuuugggag

SEQ ID NO: 193364 - RNA, 32 nt, Human
ggcucacaccuauaaucccagcgcuuuggagg

SEQ ID NO: 193365 - RNA, 20 nt, Human
ggcucacaccuauaaucgag

SEQ ID NO: 193366 - RNA, 32 nt, Human
ggcucacaccuauaaucgagcacuuugggagg

SEQ ID NO: 193367 - RNA, 32 nt, Human
ggcucacaccuauaaucucagcacuuugggag

SEQ ID NO: 193368 - RNA, 21 nt, Human
ggcucacaccuauaauuccag

SEQ ID NO: 193369 - RNA, 18 nt, Human
ggcucacaccuauagucc

SEQ ID NO: 193370 - RNA, 20 nt, Human
ggcucacaccuauaguccca

SEQ ID NO: 193371 - RNA, 21 nt, Human
ggcucacaccuaugaucucag

SEQ ID NO: 193372 - RNA, 19 nt, Human
ggcucacaccucauaccag

SEQ ID NO: 193373 - RNA, 18 nt, Human
ggcucacaccuccagucc

SEQ ID NO: 193374 - RNA, 21 nt, Human
ggcucacaccucuaaucccag

SEQ ID NO: 193375 - RNA, 32 nt, Human
ggcucacaccucuaaucccagcacuuugggag

SEQ ID NO: 193376 - RNA, 21 nt, Human
ggcucacaccugaaaucccag

SEQ ID NO: 193377 - RNA, 32 nt, Human
ggcucacaccugaaaucccagcacuuugggag

SEQ ID NO: 193378 - RNA, 21 nt, Human
ggcucacaccugcaaucccag

SEQ ID NO: 193379 - RNA, 32 nt, Human
ggcucacaccugcaaucccagcacuuuggaag

SEQ ID NO: 193380 - RNA, 32 nt, Human
ggcucacaccugcaaucccagcacuuugggag

SEQ ID NO: 193381 - RNA, 32 nt, Human
ggcucacaccugcaaucccaguacuuugagag

SEQ ID NO: 193382 - RNA, 21 nt, Human
ggcucacaccuggaaucccag

SEQ ID NO: 193383 - RNA, 17 nt, Human
ggcucacaccuggccca

SEQ ID NO: 193384 - RNA, 17 nt, Human
ggcucacaccugggccc

SEQ ID NO: 193385 - RNA, 20 nt, Human
ggcucacaccuguaacccca

SEQ ID NO: 193386 - RNA, 21 nt, Human
ggcucacaccuguaaccccag

SEQ ID NO: 193387 - RNA, 32 nt, Human
ggcucacaccuguaaccccagcacuuugggac

SEQ ID NO: 193388 - RNA, 32 nt, Human
ggcucacaccuguaaccccagcacuuugggag

SEQ ID NO: 193389 - RNA, 21 nt, Human
ggcucacaccuguaacccuag

SEQ ID NO: 193390 - RNA, 32 nt, Human
ggcucacaccuguaacccuagcacuuugggag

SEQ ID NO: 193391 - RNA, 32 nt, Human
ggcucacaccuguaauaaucccagcacuuugg

SEQ ID NO: 193392 - RNA, 32 nt, Human
ggcucacaccuguaauaccagcacuuugggaa

SEQ ID NO: 193393 - RNA, 32 nt, Human
ggcucacaccuguaauaccagcaguuugagaa

SEQ ID NO: 193394 - RNA, 32 nt, Human
ggcucacaccuguaaucacagcacuuugggag

SEQ ID NO: 193395 - RNA, 32 nt, Human
ggcucacaccuguaauccaagcacuuugggag

SEQ ID NO: 193396 - RNA, 20 nt, Human
ggcucacaccuguaauccca

SEQ ID NO: 193397 - RNA, 32 nt, Human
ggcucacaccuguaaucccaacacuuugagag

SEQ ID NO: 193398 - RNA, 32 nt, Human
ggcucacaccuguaaucccaacacuuugagcg

SEQ ID NO: 193399 - RNA, 32 nt, Human
ggcucacaccuguaaucccaacacuuuggaag

SEQ ID NO: 193400 - RNA, 32 nt, Human
ggcucacaccuguaaucccaacacuuugggaa

SEQ ID NO: 193401 - RNA, 32 nt, Human
ggcucacaccuguaaucccaacacuuugggac

SEQ ID NO: 193402 - RNA, 32 nt, Human
ggcucacaccuguaaucccaacacuuugggag

SEQ ID NO: 193403 - RNA, 32 nt, Human
ggcucacaccuguaaucccaacacuuugggau

SEQ ID NO: 193404 - RNA, 32 nt, Human
ggcucacaccuguaaucccaacaguuuggaag

SEQ ID NO: 193405 - RNA, 32 nt, Human
ggcucacaccuguaaucccaacauuuugggaa

SEQ ID NO: 193406 - RNA, 32 nt, Human
ggcucacaccuguaaucccaacauuuugggag

SEQ ID NO: 193407 - RNA, 32 nt, Human
ggcucacaccuguaaucccaauacuuugggug

SEQ ID NO: 193408 - RNA, 21 nt, Human
ggcucacaccuguaaucccag

SEQ ID NO: 193409 - RNA, 32 nt, Human
ggcucacaccuguaaucccagaacuuugggag

SEQ ID NO: 193410 - RNA, 22 nt, Human
ggcucacaccuguaaucccagc

SEQ ID NO: 193411 - RNA, 26 nt, Human
ggcucacaccuguaaucccagcacuu

SEQ ID NO: 193412 - RNA, 32 nt, Human
ggcucacaccuguaaucccagcacuuagagag

SEQ ID NO: 193413 - RNA, 32 nt, Human
ggcucacaccuguaaucccagcacuuagggaa

SEQ ID NO: 193414 - RNA, 32 nt, Human
ggcucacaccuguaaucccagcacuuagggag

SEQ ID NO: 193415 - RNA, 32 nt, Human
ggcucacaccuguaaucccagcacuucgggaa

SEQ ID NO: 193416 - RNA, 32 nt, Human
ggcucacaccuguaaucccagcacuugggaag

SEQ ID NO: 193417 - RNA, 32 nt, Human
ggcucacaccuguaaucccagcacuuggggaa

SEQ ID NO: 193418 - RNA, 32 nt, Human
ggcucacaccuguaaucccagcacuuggggag

SEQ ID NO: 193419 - RNA, 32 nt, Human
ggcucacaccuguaaucccagcacuuugagag

SEQ ID NO: 193420 - RNA, 32 nt, Human
ggcucacaccuguaaucccagcacuuugcggg

SEQ ID NO: 193421 - RNA, 32 nt, Human
ggcucacaccuguaaucccagcacuuuggcag

SEQ ID NO: 193422 - RNA, 32 nt, Human
ggcucacaccuguaaucccagcacuuugggaa

SEQ ID NO: 193423 - RNA, 32 nt, Human
ggcucacaccuguaaucccagcacuuugggac

SEQ ID NO: 193424 - RNA, 32 nt, Human
ggcucacaccuguaaucccagcacuuugggag

SEQ ID NO: 193425 - RNA, 32 nt, Human
ggcucacaccuguaaucccagcacuuugggau

SEQ ID NO: 193426 - RNA, 32 nt, Human
ggcucacaccuguaaucccagcacuuugggga

SEQ ID NO: 193427 - RNA, 32 nt, Human
ggcucacaccuguaaucccagcacuuugguag

SEQ ID NO: 193428 - RNA, 32 nt, Human
ggcucacaccuguaaucccagcacuuuuggag

SEQ ID NO: 193429 - RNA, 32 nt, Human
ggcucacaccuguaaucccagcaguuuggaag

SEQ ID NO: 193430 - RNA, 32 nt, Human
ggcucacaccuguaaucccagcaguuugggag

SEQ ID NO: 193431 - RNA, 32 nt, Human
ggcucacaccuguaaucccagcauuuugggaa

SEQ ID NO: 193432 - RNA, 32 nt, Human
ggcucacaccuguaaucccagcauuuugggag

SEQ ID NO: 193433 - RNA, 32 nt, Human
ggcucacaccuguaaucccagcccuuugggag

SEQ ID NO: 193434 - RNA, 32 nt, Human
ggcucacaccuguaaucccagcgcuuugggag

SEQ ID NO: 193435 - RNA, 32 nt, Human
ggcucacaccuguaaucccagcuacucagcag

SEQ ID NO: 193436 - RNA, 32 nt, Human
ggcucacaccuguaaucccagcuacucaggaa

SEQ ID NO: 193437 - RNA, 32 nt, Human
ggcucacaccuguaaucccagcuacuugggag

SEQ ID NO: 193438 - RNA, 32 nt, Human
ggcucacaccuguaaucccagcucuuuggagg

SEQ ID NO: 193439 - RNA, 32 nt, Human
ggcucacaccuguaaucccagcucuuugggag

SEQ ID NO: 193440 - RNA, 32 nt, Human
ggcucacaccuguaaucccaggacuuugggag

SEQ ID NO: 193441 - RNA, 32 nt, Human
ggcucacaccuguaaucccaguacuuugagac

SEQ ID NO: 193442 - RNA, 32 nt, Human
ggcucacaccuguaaucccaguacuuugggag

SEQ ID NO: 193443 - RNA, 32 nt, Human
ggcucacaccuguaaucccagugcuuugggag

SEQ ID NO: 193444 - RNA, 22 nt, Human
ggcucacaccuguaauccccag

SEQ ID NO: 193445 - RNA, 32 nt, Human
ggcucacaccuguaauccccagcacuuuggga

SEQ ID NO: 193446 - RNA, 21 nt, Human
ggcucacaccuguaaucccgg

SEQ ID NO: 193447 - RNA, 32 nt, Human
ggcucacaccuguaaucccugcacuuugggag

SEQ ID NO: 193448 - RNA, 20 nt, Human
ggcucacaccuguaauccua

SEQ ID NO: 193449 - RNA, 32 nt, Human
ggcucacaccuguaauccuaacacuuugggag

SEQ ID NO: 193450 - RNA, 32 nt, Human
ggcucacaccuguaauccuagcacuuugggag

SEQ ID NO: 193451 - RNA, 32 nt, Human
ggcucacaccuguaauccuagcgcuuugggag

SEQ ID NO: 193452 - RNA, 32 nt, Human
ggcucacaccuguaauccugcacuuugggagu

SEQ ID NO: 193453 - RNA, 32 nt, Human
ggcucacaccuguaauccuugcauuuuggaag

SEQ ID NO: 193454 - RNA, 20 nt, Human
ggcucacaccuguaaucuca

SEQ ID NO: 193455 - RNA, 32 nt, Human
ggcucacaccuguaaucucaacacuuugggag

SEQ ID NO: 193456 - RNA, 32 nt, Human
ggcucacaccuguaaucucaacgcuuugggag

SEQ ID NO: 193457 - RNA, 21 nt, Human
ggcucacaccuguaaucucag

SEQ ID NO: 193458 - RNA, 32 nt, Human
ggcucacaccuguaaucucagcacuuugggaa

SEQ ID NO: 193459 - RNA, 32 nt, Human
ggcucacaccuguaaucucagcacuuugggag

SEQ ID NO: 193460 - RNA, 32 nt, Human
ggcucacaccuguaaucucagcauuuugggag

SEQ ID NO: 193461 - RNA, 26 nt, Human
ggcucacaccuguaaucucagccucc

SEQ ID NO: 193462 - RNA, 32 nt, Human
ggcucacaccuguaaucucagccucccagacg

SEQ ID NO: 193463 - RNA, 32 nt, Human
ggcucacaccuguaaucucggcacuuuggggg

SEQ ID NO: 193464 - RNA, 32 nt, Human
ggcucacaccuguaaugccagcacuuugggca

SEQ ID NO: 193465 - RNA, 32 nt, Human
ggcucacaccuguaaugccagcccuuugggag

SEQ ID NO: 193466 - RNA, 20 nt, Human
ggcucacaccuguaauucca

SEQ ID NO: 193467 - RNA, 32 nt, Human
ggcucacaccuguaauuccaacacuuugggag

SEQ ID NO: 193468 - RNA, 21 nt, Human
ggcucacaccuguaauuccag

SEQ ID NO: 193469 - RNA, 32 nt, Human
ggcucacaccuguaauuccagcacuuugggag

SEQ ID NO: 193470 - RNA, 32 nt, Human
ggcucacaccuguaauuccagcacuuugugag

SEQ ID NO: 193471 - RNA, 32 nt, Human
ggcucacaccuguaauucuagcacuuugggag

SEQ ID NO: 193472 - RNA, 21 nt, Human
ggcucacaccuguaauuucag

SEQ ID NO: 193473 - RNA, 21 nt, Human
ggcucacaccuguacucccag

SEQ ID NO: 193474 - RNA, 18 nt, Human
ggcucacaccuguagucc

SEQ ID NO: 193475 - RNA, 20 nt, Human
ggcucacaccuguaguccca

SEQ ID NO: 193476 - RNA, 32 nt, Human
ggcucacaccuguagucccagcacuuuaggag

SEQ ID NO: 193477 - RNA, 32 nt, Human
ggcucacaccuguaucccagcacuuugggagg

SEQ ID NO: 193478 - RNA, 21 nt, Human
ggcucacaccuguauucccag

SEQ ID NO: 193479 - RNA, 32 nt, Human
ggcucacaccuguauucccagcacuuugggag

SEQ ID NO: 193480 - RNA, 19 nt, Human
ggcucacaccugucauccc

SEQ ID NO: 193481 - RNA, 21 nt, Human
ggcucacaccugucaucccag

SEQ ID NO: 193482 - RNA, 32 nt, Human
ggcucacaccugucaucccagcacuuugggag

SEQ ID NO: 193483 - RNA, 32 nt, Human
ggcucacaccugucaucccagcaguuugggag

SEQ ID NO: 193484 - RNA, 32 nt, Human
ggcucacaccugucauuccagcacuuugagag

SEQ ID NO: 193485 - RNA, 21 nt, Human
ggcucacaccugugaucccag

SEQ ID NO: 193486 - RNA, 32 nt, Human
ggcucacaccugugaucccagcacuuugggag

SEQ ID NO: 193487 - RNA, 21 nt, Human
ggcucacaccugugaucucag

SEQ ID NO: 193488 - RNA, 32 nt, Human
ggcucacaccugugcucccagcacuuugggag

SEQ ID NO: 193489 - RNA, 17 nt, Human
ggcucacaccuguguuc

SEQ ID NO: 193490 - RNA, 21 nt, Human
ggcucacaccuguuaucccag

SEQ ID NO: 193491 - RNA, 20 nt, Human
ggcucacaccuuaaucccag

SEQ ID NO: 193492 - RNA, 32 nt, Human
ggcucacaccuuaaucccagcacuuugggagg

SEQ ID NO: 193493 - RNA, 20 nt, Human
ggcucacaccuuaaucucag

SEQ ID NO: 193494 - RNA, 22 nt, Human
ggcucacaccuuguaaucccag

SEQ ID NO: 193495 - RNA, 18 nt, Human
ggcucacaccuuuaaucc

SEQ ID NO: 193496 - RNA, 21 nt, Human
ggcucacaccuuuaaucccag

SEQ ID NO: 193497 - RNA, 32 nt, Human
ggcucacaccuuuaaucccagcacuuugggaa

SEQ ID NO: 193498 - RNA, 32 nt, Human
ggcucacaccuuuaaucccagcacuuugggag

SEQ ID NO: 193499 - RNA, 32 nt, Human
ggcucacacggggagccaccaggcuggacugg

SEQ ID NO: 193500 - RNA, 18 nt, Human
ggcucacacgguggugca

SEQ ID NO: 193501 - RNA, 19 nt, Human
ggcucacacgugccauccc

SEQ ID NO: 193502 - RNA, 32 nt, Human
ggcucacacguguaaucccaacacuuugggag

SEQ ID NO: 193503 - RNA, 32 nt, Human
ggcucacacucaggcugggcugggcgcugaug

SEQ ID NO: 193504 - RNA, 18 nt, Human
ggcucacacucuugccca

SEQ ID NO: 193505 - RNA, 32 nt, Human
ggcucacacuguaaucccagcacuuugggagg

SEQ ID NO: 193506 - RNA, 32 nt, Human
ggcucacacuguaaugccagcacuuugggagg

SEQ ID NO: 193507 - RNA, 18 nt, Human
ggcucacacugugcucag

SEQ ID NO: 193508 - RNA, 21 nt, Human
ggcucacacuuauaaucccag

SEQ ID NO: 193509 - RNA, 32 nt, Human
ggcucacacuuauaaucccagcacuuugggag

SEQ ID NO: 193510 - RNA, 21 nt, Human
ggcucacacuuaucaucucag

SEQ ID NO: 193511 - RNA, 32 nt, Human
ggcucacacuuguaaucauagcacuuugggag

SEQ ID NO: 193512 - RNA, 32 nt, Human
ggcucacacuuguaaucccaacacuuuggaag

SEQ ID NO: 193513 - RNA, 21 nt, Human
ggcucacacuuguaaucccag

SEQ ID NO: 193514 - RNA, 32 nt, Human
ggcucacacuuguaaucccagcacuuugaggu

SEQ ID NO: 193515 - RNA, 32 nt, Human
ggcucacacuuguaaucccagcacuuugggaa

SEQ ID NO: 193516 - RNA, 32 nt, Human
ggcucacacuuguaaucccagcacuuugggag

SEQ ID NO: 193517 - RNA, 32 nt, Human
ggcucacacuuguaaucccagcacuuugggau

SEQ ID NO: 193518 - RNA, 32 nt, Human
ggcucacacuuguaaucccagcauuuugggag

SEQ ID NO: 193519 - RNA, 32 nt, Human
ggcucacacuuguaauccuaguacuuugggag

SEQ ID NO: 193520 - RNA, 32 nt, Human
ggcucacagaaaccuccgccucccagguucaa

SEQ ID NO: 193521 - RNA, 32 nt, Human
ggcucacagaaguucugacaauaaaagauacu

SEQ ID NO: 193522 - RNA, 20 nt, Human
ggcucacagaccaccccacc

SEQ ID NO: 193523 - RNA, 24 nt, Human
ggcucacagcaaccucuaccuccu

SEQ ID NO: 193524 - RNA, 32 nt, Human
ggcucacagcaaccucuaccuccuggguucaa

SEQ ID NO: 193525 - RNA, 32 nt, Human
ggcucacagcaaccucucugccuccagaaaug

SEQ ID NO: 193526 - RNA, 23 nt, Human
ggcucacagcaaccucugccucc

SEQ ID NO: 193527 - RNA, 32 nt, Human
ggcucacagcaaccucugccucccggauuuaa

SEQ ID NO: 193528 - RNA, 32 nt, Human
ggcucacagcaccccucuauuucuuucugggc

SEQ ID NO: 193529 - RNA, 32 nt, Human
ggcucacagcagccucugccucccggguucaa

SEQ ID NO: 193530 - RNA, 21 nt, Human
ggcucacagcuauaaucucag

SEQ ID NO: 193531 - RNA, 32 nt, Human
ggcucacagcuauaaucucagcacuuugggag

SEQ ID NO: 193532 - RNA, 32 nt, Human
ggcucacaggaaccuccgccucccagguucaa

SEQ ID NO: 193533 - RNA, 19 nt, Human
ggcucacaggaggauccag

SEQ ID NO: 193534 - RNA, 19 nt, Human
ggcucacagguggggucca

SEQ ID NO: 193535 - RNA, 22 nt, Human
ggcucacaguccagccaccagc

SEQ ID NO: 193536 - RNA, 32 nt, Human
ggcucacagugcaaccucugcuucccagguuc

SEQ ID NO: 193537 - RNA, 19 nt, Human
ggcucacagugggaaccag

SEQ ID NO: 193538 - RNA, 18 nt, Human
ggcucacaguggggccag

SEQ ID NO: 193539 - RNA, 32 nt, Human
ggcucacagugugggagcagcuggacaccagg

SEQ ID NO: 193540 - RNA, 32 nt, Human
ggcucacaguucuggaaccugggaaauccaaa

SEQ ID NO: 193541 - RNA, 20 nt, Human
ggcucacauagccaguguga

SEQ ID NO: 193542 - RNA, 16 nt, Human
ggcucacaucauccag

SEQ ID NO: 193543 - RNA, 21 nt, Human
ggcucacaucuguaaccccag

SEQ ID NO: 193544 - RNA, 32 nt, Human
ggcucacaucuguaaccccagcacuuugggag

SEQ ID NO: 193545 - RNA, 21 nt, Human
ggcucacaucuguaaucccag

SEQ ID NO: 193546 - RNA, 32 nt, Human
ggcucacaucuguaaucccagcacuuuggaag

SEQ ID NO: 193547 - RNA, 32 nt, Human
ggcucacaucuguaaucccagcacuuugggag

SEQ ID NO: 193548 - RNA, 32 nt, Human
ggcucacaucuguaaucccagcacuuuuggag

SEQ ID NO: 193549 - RNA, 32 nt, Human
ggcucacaucuguaaucucaacacuuugggag

SEQ ID NO: 193550 - RNA, 21 nt, Human
ggcucacaucuguaaucucag

SEQ ID NO: 193551 - RNA, 32 nt, Human
ggcucacaucuguaaucucagcauuuugggag

SEQ ID NO: 193552 - RNA, 21 nt, Human
ggcucacaucuguaaugccag

SEQ ID NO: 193553 - RNA, 32 nt, Human
ggcucacaucuguaaugccagcacuuugggag

SEQ ID NO: 193554 - RNA, 17 nt, Human
ggcucacaugggcccag

SEQ ID NO: 193555 - RNA, 18 nt, Human
ggcucacauuugccccag

SEQ ID NO: 193556 - RNA, 32 nt, Human
ggcucaccacaacauccgccuccuggguucaa

SEQ ID NO: 193557 - RNA, 32 nt, Human
ggcucaccacaaccuccaccucccagguucaa

SEQ ID NO: 193558 - RNA, 32 nt, Human
ggcucaccacaaccuccgccucccggauucaa

SEQ ID NO: 193559 - RNA, 32 nt, Human
ggcucaccacaaccuccgccuccuggguucau

SEQ ID NO: 193560 - RNA, 32 nt, Human
ggcucaccacaaccuccuccucuuggguucaa

SEQ ID NO: 193561 - RNA, 32 nt, Human
ggcucaccacaaccucuaccuccaggguucaa

SEQ ID NO: 193562 - RNA, 32 nt, Human
ggcucaccacaaccucugccuacuggguucca

SEQ ID NO: 193563 - RNA, 32 nt, Human
ggcucaccacaaccucugccucccggguucaa

SEQ ID NO: 193564 - RNA, 32 nt, Human
ggcucaccacaaccucugccuccuggguucaa

SEQ ID NO: 193565 - RNA, 32 nt, Human
ggcucaccacucccaggccucugacaugaggg

SEQ ID NO: 193566 - RNA, 32 nt, Human
ggcucaccagcccugccaucuuugucacagcc

SEQ ID NO: 193567 - RNA, 32 nt, Human
ggcucaccauaaccuccgccucccagguucaa

SEQ ID NO: 193568 - RNA, 32 nt, Human
ggcucacccagagcagcugggucuccaggcug

SEQ ID NO: 193569 - RNA, 32 nt, Human
ggcucacccaggcucugcucaggcugggaggc

SEQ ID NO: 193570 - RNA, 32 nt, Human
ggcucacccaggcuggggucugagugucacug

SEQ ID NO: 193571 - RNA, 18 nt, Human
ggcucacccaguccugcc

SEQ ID NO: 193572 - RNA, 32 nt, Human
ggcucaccccaaccuccgccuccuggguucag

SEQ ID NO: 193573 - RNA, 32 nt, Human
ggcucaccccucucccccgcccaaggcugcag

SEQ ID NO: 193574 - RNA, 21 nt, Human
ggcucaccccuguaauuccag

SEQ ID NO: 193575 - RNA, 32 nt, Human
ggcucacccuccaccugcauccccaccccacu

SEQ ID NO: 193576 - RNA, 19 nt, Human
ggcucacccucugccugcc

SEQ ID NO: 193577 - RNA, 32 nt, Human
ggcucacccugagagcagaggccgugcagggg

SEQ ID NO: 193578 - RNA, 32 nt, Human
ggcucaccgaaagcucacagauugcagaaauu

SEQ ID NO: 193579 - RNA, 28 nt, Human
ggcucaccgagaccagccucaucucggg

SEQ ID NO: 193580 - RNA, 32 nt, Human
ggcucaccgcaaaguccgccucccaggcgauu

SEQ ID NO: 193581 - RNA, 24 nt, Human
ggcucaccgcaaccuccaccuccu

SEQ ID NO: 193582 - RNA, 32 nt, Human
ggcucaccgcaaccuccaccuccugaguucca

SEQ ID NO: 193583 - RNA, 23 nt, Human
ggcucaccgcaaccuccaccuuc

SEQ ID NO: 193584 - RNA, 32 nt, Human
ggcucaccgcaaccuccaccuuccugguucaa

SEQ ID NO: 193585 - RNA, 24 nt, Human
ggcucaccgcaaccuccgcccccu

SEQ ID NO: 193586 - RNA, 32 nt, Human
ggcucaccgcaaccuccgcccccuggguucaa

SEQ ID NO: 193587 - RNA, 23 nt, Human
ggcucaccgcaaccuccgccucc

SEQ ID NO: 193588 - RNA, 32 nt, Human
ggcucaccgcaaccuccgccucccagguucaa

SEQ ID NO: 193589 - RNA, 32 nt, Human
ggcucaccgcaaccuccgccucccggauucaa

SEQ ID NO: 193590 - RNA, 32 nt, Human
ggcucaccgcaaccuccgccucccggguucaa

SEQ ID NO: 193591 - RNA, 24 nt, Human
ggcucaccgcaaccuccgccuccu

SEQ ID NO: 193592 - RNA, 32 nt, Human
ggcucaccgcaaccuccgccuccuagguccag

SEQ ID NO: 193593 - RNA, 32 nt, Human
ggcucaccgcaaccuccgccuccuggguucaa

SEQ ID NO: 193594 - RNA, 23 nt, Human
ggcucaccgcaaccuccuccucc

SEQ ID NO: 193595 - RNA, 23 nt, Human
ggcucaccgcaaccuccucuucu

SEQ ID NO: 193596 - RNA, 32 nt, Human
ggcucaccgcaaccuccucuucuggguuaaag

SEQ ID NO: 193597 - RNA, 24 nt, Human
ggcucaccgcaaccucugccuacc

SEQ ID NO: 193598 - RNA, 32 nt, Human
ggcucaccgcaaccucugccuaccggguucaa

SEQ ID NO: 193599 - RNA, 23 nt, Human
ggcucaccgcaaccucugccucc

SEQ ID NO: 193600 - RNA, 32 nt, Human
ggcucaccgcaaccucugccucccaggugcaa

SEQ ID NO: 193601 - RNA, 32 nt, Human
ggcucaccgcaaccucugccucccggguucaa

SEQ ID NO: 193602 - RNA, 32 nt, Human
ggcucaccgcaaccucugccucccugguucaa

SEQ ID NO: 193603 - RNA, 24 nt, Human
ggcucaccgcaaccucugccuccu

SEQ ID NO: 193604 - RNA, 32 nt, Human
ggcucaccgcaaccucugccuccuggguucaa

SEQ ID NO: 193605 - RNA, 24 nt, Human
ggcucaccgcaaccucugcuuccu

SEQ ID NO: 193606 - RNA, 32 nt, Human
ggcucaccgcaaccucugcuuccuggcuuaaa

SEQ ID NO: 193607 - RNA, 23 nt, Human
ggcucaccgcaaccuuccucucc

SEQ ID NO: 193608 - RNA, 32 nt, Human
ggcucaccgcaagcuccgccucccggguucac

SEQ ID NO: 193609 - RNA, 32 nt, Human
ggcucaccgcaagcuccgccucccggguucag

SEQ ID NO: 193610 - RNA, 32 nt, Human
ggcucaccgcaagcuccgcuucccaggcuggg

SEQ ID NO: 193611 - RNA, 32 nt, Human
ggcucaccgcagccuccaccuccaggguucaa

SEQ ID NO: 193612 - RNA, 24 nt, Human
ggcucaccgcagccuccgccuccu

SEQ ID NO: 193613 - RNA, 32 nt, Human
ggcucaccgcagccuccgccuccuggggucag

SEQ ID NO: 193614 - RNA, 21 nt, Human
ggcucaccgcauugaccuccu

SEQ ID NO: 193615 - RNA, 32 nt, Human
ggcucaccgggacccguucugcuaggaagaag

SEQ ID NO: 193616 - RNA, 23 nt, Human
ggcucaccguaaucuccgccucc

SEQ ID NO: 193617 - RNA, 32 nt, Human
ggcucaccguaaucuccgccucccaggcucaa

SEQ ID NO: 193618 - RNA, 32 nt, Human
ggcucaccucaaccucugccucccagguucag

SEQ ID NO: 193619 - RNA, 32 nt, Human
ggcucaccucuguaaucccagcacuuugggag

SEQ ID NO: 193620 - RNA, 32 nt, Human
ggcucaccugaagucugagauuuugggagcuu

SEQ ID NO: 193621 - RNA, 32 nt, Human
ggcucaccuguaaucccaacacuuugggaggc

SEQ ID NO: 193622 - RNA, 32 nt, Human
ggcucaccuguaaucccagcacuuugggaggc

SEQ ID NO: 193623 - RNA, 23 nt, Human
ggcucaccuguuacucggccucc

SEQ ID NO: 193624 - RNA, 32 nt, Human
ggcucaccuguuacucggccucccagaaagau

SEQ ID NO: 193625 - RNA, 32 nt, Human
ggcucacgacaaccucugccucucggauucaa

SEQ ID NO: 193626 - RNA, 32 nt, Human
ggcucacgaggagaucaagaccauccuggcua

SEQ ID NO: 193627 - RNA, 19 nt, Human
ggcucacgaguuaguccag

SEQ ID NO: 193628 - RNA, 23 nt, Human
ggcucacgcagacgccggccaca

SEQ ID NO: 193629 - RNA, 32 nt, Human
ggcucacgcauguaaucccagcacuuugggag

SEQ ID NO: 193630 - RNA, 32 nt, Human
ggcucacgcauguaaucccugcacuuugggag

SEQ ID NO: 193631 - RNA, 32 nt, Human
ggcucacgcauguaauccuaacacuuugggag

SEQ ID NO: 193632 - RNA, 32 nt, Human
ggcucacgccaggaaucccagcacuuugggag

SEQ ID NO: 193633 - RNA, 32 nt, Human
ggcucacgccaguaaucccagcacuuuggagg

SEQ ID NO: 193634 - RNA, 32 nt, Human
ggcucacgccaguaaucccagcacuuugggag

SEQ ID NO: 193635 - RNA, 24 nt, Human
ggcucacgccauucuccugccuca

SEQ ID NO: 193636 - RNA, 20 nt, Human
ggcucacgcccauaauccag

SEQ ID NO: 193637 - RNA, 32 nt, Human
ggcucacgcccauaauccagcacuuugggaag

SEQ ID NO: 193638 - RNA, 32 nt, Human
ggcucacgcccauaaucccagcacuuugggag

SEQ ID NO: 193639 - RNA, 32 nt, Human
ggcucacgcccguaaucccagggcuuugggag

SEQ ID NO: 193640 - RNA, 21 nt, Human
ggcucacgccgguaaucccag

SEQ ID NO: 193641 - RNA, 32 nt, Human
ggcucacgccgguaaucccagcacuuugggag

SEQ ID NO: 193642 - RNA, 32 nt, Human
ggcucacgccuauaauccaagcacuuugggag

SEQ ID NO: 193643 - RNA, 20 nt, Human
ggcucacgccuauaauccca

SEQ ID NO: 193644 - RNA, 32 nt, Human
ggcucacgccuauaaucccaacacuuugagag

SEQ ID NO: 193645 - RNA, 21 nt, Human
ggcucacgccuauaaucccag

SEQ ID NO: 193646 - RNA, 32 nt, Human
ggcucacgccuauaaucccagcacuuagggag

SEQ ID NO: 193647 - RNA, 32 nt, Human
ggcucacgccuauaaucccagcacuuccagag

SEQ ID NO: 193648 - RNA, 32 nt, Human
ggcucacgccuauaaucccagcacuuuaggag

SEQ ID NO: 193649 - RNA, 32 nt, Human
ggcucacgccuauaaucccagcacuuugcgag

SEQ ID NO: 193650 - RNA, 32 nt, Human
ggcucacgccuauaaucccagcacuuugggag

SEQ ID NO: 193651 - RNA, 32 nt, Human
ggcucacgccuauaaucccagcaguuugggag

SEQ ID NO: 193652 - RNA, 20 nt, Human
ggcucacgccuauaaucuca

SEQ ID NO: 193653 - RNA, 21 nt, Human
ggcucacgccuauaauuccag

SEQ ID NO: 193654 - RNA, 21 nt, Human
ggcucacgccuauacacccag

SEQ ID NO: 193655 - RNA, 32 nt, Human
ggcucacgccuauacacccagcacuuuggaag

SEQ ID NO: 193656 - RNA, 32 nt, Human
ggcucacgccuauaucccagcacuuugggagg

SEQ ID NO: 193657 - RNA, 20 nt, Human
ggcucacgccuaugauccca

SEQ ID NO: 193658 - RNA, 21 nt, Human
ggcucacgccuaugaucccag

SEQ ID NO: 193659 - RNA, 32 nt, Human
ggcucacgccuaugaucccagcacuuugggag

SEQ ID NO: 193660 - RNA, 32 nt, Human
ggcucacgccuauuaucuuagcacuuugggag

SEQ ID NO: 193661 - RNA, 32 nt, Human
ggcucacgccuccccuucagcuucucuucacg

SEQ ID NO: 193662 - RNA, 21 nt, Human
ggcucacgccucuaaucccag

SEQ ID NO: 193663 - RNA, 32 nt, Human
ggcucacgccucuaaucccagcacuuugggag

SEQ ID NO: 193664 - RNA, 32 nt, Human
ggcucacgccucuaaucccaggacuuugggag

SEQ ID NO: 193665 - RNA, 32 nt, Human
ggcucacgccucuaaucgcagcacuuugggag

SEQ ID NO: 193666 - RNA, 32 nt, Human
ggcucacgccucuaaucucagcacuuugggag

SEQ ID NO: 193667 - RNA, 32 nt, Human
ggcucacgccugaaaucccagcacuuugggag

SEQ ID NO: 193668 - RNA, 21 nt, Human
ggcucacgccugcaaucccag

SEQ ID NO: 193669 - RNA, 32 nt, Human
ggcucacgccugcaaucccagagcuuugggaa

SEQ ID NO: 193670 - RNA, 32 nt, Human
ggcucacgccugcaaucccagcacuuugggag

SEQ ID NO: 193671 - RNA, 32 nt, Human
ggcucacgccugcaaucccagcgcuuugggag

SEQ ID NO: 193672 - RNA, 32 nt, Human
ggcucacgccugcaaugccagcacuuugagag

SEQ ID NO: 193673 - RNA, 18 nt, Human
ggcucacgccugcagucc

SEQ ID NO: 193674 - RNA, 32 nt, Human
ggcucacgccugcagucccagcacuuugggag

SEQ ID NO: 193675 - RNA, 32 nt, Human
ggcucacgccuggaaucccagcacuugaggcc

SEQ ID NO: 193676 - RNA, 32 nt, Human
ggcucacgccuggaaucccagcacuuugggaa

SEQ ID NO: 193677 - RNA, 32 nt, Human
ggcucacgccuggaaucccagcacuuugggag

SEQ ID NO: 193678 - RNA, 32 nt, Human
ggcucacgccuguaaacccagcacuuuaggag

SEQ ID NO: 193679 - RNA, 32 nt, Human
ggcucacgccuguaaccccaacacuuugggag

SEQ ID NO: 193680 - RNA, 21 nt, Human
ggcucacgccuguaaccccag

SEQ ID NO: 193681 - RNA, 32 nt, Human
ggcucacgccuguaaccccagcacuuugggag

SEQ ID NO: 193682 - RNA, 32 nt, Human
ggcucacgccuguaaccccaucacuuugggag

SEQ ID NO: 193683 - RNA, 32 nt, Human
ggcucacgccuguaacccuagcacuuugggag

SEQ ID NO: 193684 - RNA, 32 nt, Human
ggcucacgccuguaaccucagcacuuugggag

SEQ ID NO: 193685 - RNA, 32 nt, Human
ggcucacgccuguaacuccagcacuuugggag

SEQ ID NO: 193686 - RNA, 32 nt, Human
ggcucacgccuguaauaucaacacuuugggac

SEQ ID NO: 193687 - RNA, 32 nt, Human
ggcucacgccuguaaucacaacacuuugggag

SEQ ID NO: 193688 - RNA, 32 nt, Human
ggcucacgccuguaaucacacuuucggaggcc

SEQ ID NO: 193689 - RNA, 32 nt, Human
ggcucacgccuguaaucacagcacuuugggag

SEQ ID NO: 193690 - RNA, 19 nt, Human
ggcucacgccuguaaucca

SEQ ID NO: 193691 - RNA, 32 nt, Human
ggcucacgccuguaauccaacacuuugagagg

SEQ ID NO: 193692 - RNA, 32 nt, Human
ggcucacgccuguaauccaagcacuuggggag

SEQ ID NO: 193693 - RNA, 20 nt, Human
ggcucacgccuguaauccag

SEQ ID NO: 193694 - RNA, 32 nt, Human
ggcucacgccuguaauccagcacuuugggaga

SEQ ID NO: 193695 - RNA, 32 nt, Human
ggcucacgccuguaauccagcacuuugggagg

SEQ ID NO: 193696 - RNA, 20 nt, Human
ggcucacgccuguaauccca

SEQ ID NO: 193697 - RNA, 32 nt, Human
ggcucacgccuguaaucccaacaacacuuugg

SEQ ID NO: 193698 - RNA, 32 nt, Human
ggcucacgccuguaaucccaacacuuuaggag

SEQ ID NO: 193699 - RNA, 32 nt, Human
ggcucacgccuguaaucccaacacuuugggag

SEQ ID NO: 193700 - RNA, 32 nt, Human
ggcucacgccuguaaucccaacacuuuucgag

SEQ ID NO: 193701 - RNA, 32 nt, Human
ggcucacgccuguaaucccaacauuuugggag

SEQ ID NO: 193702 - RNA, 32 nt, Human
ggcucacgccuguaaucccaccacuuuggaaa

SEQ ID NO: 193703 - RNA, 32 nt, Human
ggcucacgccuguaaucccaccacuuugggag

SEQ ID NO: 193704 - RNA, 21 nt, Human
ggcucacgccuguaaucccag

SEQ ID NO: 193705 - RNA, 32 nt, Human
ggcucacgccuguaaucccagaacuuugagag

SEQ ID NO: 193706 - RNA, 32 nt, Human
ggcucacgccuguaaucccagaacuuugggaa

SEQ ID NO: 193707 - RNA, 32 nt, Human
ggcucacgccuguaaucccagaacuuugggag

SEQ ID NO: 193708 - RNA, 32 nt, Human
ggcucacgccuguaaucccagacuuugggagg

SEQ ID NO: 193709 - RNA, 22 nt, Human
ggcucacgccuguaaucccagc

SEQ ID NO: 193710 - RNA, 32 nt, Human
ggcucacgccuguaaucccagcaaguugggag

SEQ ID NO: 193711 - RNA, 32 nt, Human
ggcucacgccuguaaucccagcacuaggaggc

SEQ ID NO: 193712 - RNA, 32 nt, Human
ggcucacgccuguaaucccagcacucugggag

SEQ ID NO: 193713 - RNA, 32 nt, Human
ggcucacgccuguaaucccagcacugagaggc

SEQ ID NO: 193714 - RNA, 32 nt, Human
ggcucacgccuguaaucccagcacuggaaggc

SEQ ID NO: 193715 - RNA, 32 nt, Human
ggcucacgccuguaaucccagcacugggaggc

SEQ ID NO: 193716 - RNA, 32 nt, Human
ggcucacgccuguaaucccagcacugugagag

SEQ ID NO: 193717 - RNA, 32 nt, Human
ggcucacgccuguaaucccagcacugugggag

SEQ ID NO: 193718 - RNA, 32 nt, Human
ggcucacgccuguaaucccagcacuuagggug

SEQ ID NO: 193719 - RNA, 32 nt, Human
ggcucacgccuguaaucccagcacuucggggg

SEQ ID NO: 193720 - RNA, 32 nt, Human
ggcucacgccuguaaucccagcacuugggagg

SEQ ID NO: 193721 - RNA, 32 nt, Human
ggcucacgccuguaaucccagcacuuggggag

SEQ ID NO: 193722 - RNA, 32 nt, Human
ggcucacgccuguaaucccagcacuuuaagag

SEQ ID NO: 193723 - RNA, 32 nt, Human
ggcucacgccuguaaucccagcacuuuaggag

SEQ ID NO: 193724 - RNA, 32 nt, Human
ggcucacgccuguaaucccagcacuuucggag

SEQ ID NO: 193725 - RNA, 32 nt, Human
ggcucacgccuguaaucccagcacuuugagaa

SEQ ID NO: 193726 - RNA, 32 nt, Human
ggcucacgccuguaaucccagcacuuugagag

SEQ ID NO: 193727 - RNA, 32 nt, Human
ggcucacgccuguaaucccagcacuuugagau

SEQ ID NO: 193728 - RNA, 32 nt, Human
ggcucacgccuguaaucccagcacuuugcgau

SEQ ID NO: 193729 - RNA, 32 nt, Human
ggcucacgccuguaaucccagcacuuugcggg

SEQ ID NO: 193730 - RNA, 32 nt, Human
ggcucacgccuguaaucccagcacuuuggaag

SEQ ID NO: 193731 - RNA, 32 nt, Human
ggcucacgccuguaaucccagcacuuuggagg

SEQ ID NO: 193732 - RNA, 32 nt, Human
ggcucacgccuguaaucccagcacuuuggcag

SEQ ID NO: 193733 - RNA, 32 nt, Human
ggcucacgccuguaaucccagcacuuugggaa

SEQ ID NO: 193734 - RNA, 32 nt, Human
ggcucacgccuguaaucccagcacuuugggac

SEQ ID NO: 193735 - RNA, 32 nt, Human
ggcucacgccuguaaucccagcacuuugggag

SEQ ID NO: 193736 - RNA, 32 nt, Human
ggcucacgccuguaaucccagcacuuuggggg

SEQ ID NO: 193737 - RNA, 32 nt, Human
ggcucacgccuguaaucccagcacuuugguag

SEQ ID NO: 193738 - RNA, 32 nt, Human
ggcucacgccuguaaucccagcacuuugguug

SEQ ID NO: 193739 - RNA, 32 nt, Human
ggcucacgccuguaaucccagcacuuuguggg

SEQ ID NO: 193740 - RNA, 32 nt, Human
ggcucacgccuguaaucccagcacuuuuggag

SEQ ID NO: 193741 - RNA, 32 nt, Human
ggcucacgccuguaaucccagcacuuuuggga

SEQ ID NO: 193742 - RNA, 32 nt, Human
ggcucacgccuguaaucccagcaguuugggaa

SEQ ID NO: 193743 - RNA, 32 nt, Human
ggcucacgccuguaaucccagcaguuugggag

SEQ ID NO: 193744 - RNA, 32 nt, Human
ggcucacgccuguaaucccagcauuugggagg

SEQ ID NO: 193745 - RNA, 32 nt, Human
ggcucacgccuguaaucccagcauuuugggag

SEQ ID NO: 193746 - RNA, 32 nt, Human
ggcucacgccuguaaucccagcccuuugggag

SEQ ID NO: 193747 - RNA, 32 nt, Human
ggcucacgccuguaaucccagcgcuuugggag

SEQ ID NO: 193748 - RNA, 32 nt, Human
ggcucacgccuguaaucccagcuacucaggag

SEQ ID NO: 193749 - RNA, 32 nt, Human
ggcucacgccuguaaucccagcucuuugggag

SEQ ID NO: 193750 - RNA, 32 nt, Human
ggcucacgccuguaaucccagcucuuuguggg

SEQ ID NO: 193751 - RNA, 32 nt, Human
ggcucacgccuguaaucccaggacuuuaggag

SEQ ID NO: 193752 - RNA, 32 nt, Human
ggcucacgccuguaaucccaggacuuugggag

SEQ ID NO: 193753 - RNA, 32 nt, Human
ggcucacgccuguaaucccaguacuugggagg

SEQ ID NO: 193754 - RNA, 32 nt, Human
ggcucacgccuguaaucccaguacuuugggag

SEQ ID NO: 193755 - RNA, 32 nt, Human
ggcucacgccuguaaucccaguaguuugggag

SEQ ID NO: 193756 - RNA, 32 nt, Human
ggcucacgccuguaaucccaguauuuugggag

SEQ ID NO: 193757 - RNA, 32 nt, Human
ggcucacgccuguaauccccgcacuuugggag

SEQ ID NO: 193758 - RNA, 32 nt, Human
ggcucacgccuguaaucccggcacuuugggag

SEQ ID NO: 193759 - RNA, 32 nt, Human
ggcucacgccuguaaucccggcaguuugggag

SEQ ID NO: 193760 - RNA, 32 nt, Human
ggcucacgccuguaaucccgguauuuugggag

SEQ ID NO: 193761 - RNA, 32 nt, Human
ggcucacgccuguaaucccuacacuuugggag

SEQ ID NO: 193762 - RNA, 32 nt, Human
ggcucacgccuguaaucccugcauuuuggggg

SEQ ID NO: 193763 - RNA, 32 nt, Human
ggcucacgccuguaaucccuuagcuacucagg

SEQ ID NO: 193764 - RNA, 32 nt, Human
ggcucacgccuguaauccuaacacuuugggag

SEQ ID NO: 193765 - RNA, 32 nt, Human
ggcucacgccuguaauccuagcacuugggagg

SEQ ID NO: 193766 - RNA, 32 nt, Human
ggcucacgccuguaauccuagcacuuuggaag

SEQ ID NO: 193767 - RNA, 32 nt, Human
ggcucacgccuguaauccuagcacuuugggag

SEQ ID NO: 193768 - RNA, 32 nt, Human
ggcucacgccuguaauccuagcacuuuguaag

SEQ ID NO: 193769 - RNA, 32 nt, Human
ggcucacgccuguaauccuagcaguuugggag

SEQ ID NO: 193770 - RNA, 32 nt, Human
ggcucacgccuguaauccuagcauuuugggag

SEQ ID NO: 193771 - RNA, 32 nt, Human
ggcucacgccuguaauccuagcauuuugggug

SEQ ID NO: 193772 - RNA, 32 nt, Human
ggcucacgccuguaauccuagcauuuuuggag

SEQ ID NO: 193773 - RNA, 32 nt, Human
ggcucacgccuguaauccuagcccuuuggaag

SEQ ID NO: 193774 - RNA, 32 nt, Human
ggcucacgccuguaauccuagcgguuuggggg

SEQ ID NO: 193775 - RNA, 32 nt, Human
ggcucacgccuguaauccugacacuuugggag

SEQ ID NO: 193776 - RNA, 32 nt, Human
ggcucacgccuguaauccuggcacuuugggag

SEQ ID NO: 193777 - RNA, 32 nt, Human
ggcucacgccuguaaucgcagcacuuugggag

SEQ ID NO: 193778 - RNA, 32 nt, Human
ggcucacgccuguaaucgcggcacuuugggag

SEQ ID NO: 193779 - RNA, 32 nt, Human
ggcucacgccuguaaucucaacacuuugggag

SEQ ID NO: 193780 - RNA, 32 nt, Human
ggcucacgccuguaaucucagcacuuuaagag

SEQ ID NO: 193781 - RNA, 32 nt, Human
ggcucacgccuguaaucucagcacuuugggag

SEQ ID NO: 193782 - RNA, 32 nt, Human
ggcucacgccuguaaucucagcacuuugggug

SEQ ID NO: 193783 - RNA, 32 nt, Human
ggcucacgccuguaaucucagcauuuugggag

SEQ ID NO: 193784 - RNA, 32 nt, Human
ggcucacgccuguaaucucggcacuuugggag

SEQ ID NO: 193785 - RNA, 32 nt, Human
ggcucacgccuguaaugccagcacuuugggag

SEQ ID NO: 193786 - RNA, 21 nt, Human
ggcucacgccuguaauuccag

SEQ ID NO: 193787 - RNA, 32 nt, Human
ggcucacgccuguaauuccagcacuuugggag

SEQ ID NO: 193788 - RNA, 32 nt, Human
ggcucacgccuguaauuccagugcuuugggag

SEQ ID NO: 193789 - RNA, 32 nt, Human
ggcucacgccuguaauuccaucauuuugggag

SEQ ID NO: 193790 - RNA, 32 nt, Human
ggcucacgccuguaauucuagcacuuugggag

SEQ ID NO: 193791 - RNA, 32 nt, Human
ggcucacgccuguacucccagcauuuugugag

SEQ ID NO: 193792 - RNA, 18 nt, Human
ggcucacgccuguagucc

SEQ ID NO: 193793 - RNA, 32 nt, Human
ggcucacgccuguagucccagcacuuugagag

SEQ ID NO: 193794 - RNA, 32 nt, Human
ggcucacgccuguagucccagcacuuugggag

SEQ ID NO: 193795 - RNA, 32 nt, Human
ggcucacgccuguagucccagcauuuugggag

SEQ ID NO: 193796 - RNA, 32 nt, Human
ggcucacgccuguaucccagcacuuuggaagg

SEQ ID NO: 193797 - RNA, 32 nt, Human
ggcucacgccuguaucccagcacuuugggagg

SEQ ID NO: 193798 - RNA, 32 nt, Human
ggcucacgccuguauuccagcacuuugggagg

SEQ ID NO: 193799 - RNA, 32 nt, Human
ggcucacgccugucaucccagcacuuugggag

SEQ ID NO: 193800 - RNA, 32 nt, Human
ggcucacgccugucaucucagcacuuugggag

SEQ ID NO: 193801 - RNA, 32 nt, Human
ggcucacgccugugauaccagcacuuuuggga

SEQ ID NO: 193802 - RNA, 21 nt, Human
ggcucacgccugugaucccag

SEQ ID NO: 193803 - RNA, 32 nt, Human
ggcucacgccugugaucccagcacuuugggag

SEQ ID NO: 193804 - RNA, 32 nt, Human
ggcucacgccugugaucccagcauuuugggag

SEQ ID NO: 193805 - RNA, 32 nt, Human
ggcucacgccugugauccuagcacuuugggag

SEQ ID NO: 193806 - RNA, 32 nt, Human
ggcucacgccugugaucucagcacuuugaggg

SEQ ID NO: 193807 - RNA, 21 nt, Human
ggcucacgccuguggucccag

SEQ ID NO: 193808 - RNA, 32 nt, Human
ggcucacgccuguggucccagcacuuuggcag

SEQ ID NO: 193809 - RNA, 32 nt, Human
ggcucacgccuguggucccagcacuuugggag

SEQ ID NO: 193810 - RNA, 32 nt, Human
ggcucacgccuguggucccagcacuuuggggg

SEQ ID NO: 193811 - RNA, 32 nt, Human
ggcucacgccuguggucucagcacuuugggag

SEQ ID NO: 193812 - RNA, 20 nt, Human
ggcucacgccuguuauccca

SEQ ID NO: 193813 - RNA, 32 nt, Human
ggcucacgccuguuaucccagcacuuugggag

SEQ ID NO: 193814 - RNA, 22 nt, Human
ggcucacgcguccgcccgcccg

SEQ ID NO: 193815 - RNA, 19 nt, Human
ggcucacgcuuaacuccag

SEQ ID NO: 193816 - RNA, 32 nt, Human
ggcucacgcuuacagucccagcacuuuaagag

SEQ ID NO: 193817 - RNA, 20 nt, Human
ggcucacgcuuauaauccca

SEQ ID NO: 193818 - RNA, 21 nt, Human
ggcucacgcuuauaaucccag

SEQ ID NO: 193819 - RNA, 32 nt, Human
ggcucacgcuuauaaucccagcacuuugggag

SEQ ID NO: 193820 - RNA, 21 nt, Human
ggcucacgcuugcaaucccag

SEQ ID NO: 193821 - RNA, 32 nt, Human
ggcucacgcuugcaaucccagugcuuugggag

SEQ ID NO: 193822 - RNA, 32 nt, Human
ggcucacgcuuguaaucccaacacuuugggag

SEQ ID NO: 193823 - RNA, 21 nt, Human
ggcucacgcuuguaaucccag

SEQ ID NO: 193824 - RNA, 32 nt, Human
ggcucacgcuuguaaucccagcacuuugggaa

SEQ ID NO: 193825 - RNA, 32 nt, Human
ggcucacgcuuguaaucccagcacuuugggag

SEQ ID NO: 193826 - RNA, 32 nt, Human
ggcucacgcuuguaaucccaguacuuugggag

SEQ ID NO: 193827 - RNA, 32 nt, Human
ggcucacgcuuguaaucccggcacuuuaggag

SEQ ID NO: 193828 - RNA, 32 nt, Human
ggcucacgcuuguaaucgcagcacuuugggag

SEQ ID NO: 193829 - RNA, 32 nt, Human
ggcucacgcuuguaaucucagcacuuugggag

SEQ ID NO: 193830 - RNA, 21 nt, Human
ggcucacgcuuguaauuccag

SEQ ID NO: 193831 - RNA, 32 nt, Human
ggcucacgcuuguaauuccagcacuuugggag

SEQ ID NO: 193832 - RNA, 20 nt, Human
ggcucacggcaaccuccacc

SEQ ID NO: 193833 - RNA, 23 nt, Human
ggcucacggcaaccuccaccucc

SEQ ID NO: 193834 - RNA, 32 nt, Human
ggcucacggcaaccuccaccucccggguucaa

SEQ ID NO: 193835 - RNA, 23 nt, Human
ggcucacggcaaccucugccucc

SEQ ID NO: 193836 - RNA, 32 nt, Human
ggcucacggcacgcuccgccucccggguucac

SEQ ID NO: 193837 - RNA, 23 nt, Human
ggcucacggcagccucagccacc

SEQ ID NO: 193838 - RNA, 32 nt, Human
ggcucacggcuguaaucccagcacuuugggag

SEQ ID NO: 193839 - RNA, 23 nt, Human
ggcucacgguaaccucugccucc

SEQ ID NO: 193840 - RNA, 32 nt, Human
ggcucacgguaaccucugccucccagguucaa

SEQ ID NO: 193841 - RNA, 19 nt, Human
ggcucacggugcaggguga

SEQ ID NO: 193842 - RNA, 32 nt, Human
ggcucacguauguaaucccagcacuuugggaa

SEQ ID NO: 193843 - RNA, 32 nt, Human
ggcucacgucuguaaucccagcacuuuggaag

SEQ ID NO: 193844 - RNA, 32 nt, Human
ggcucacgucuguaaucccagcacuuugggag

SEQ ID NO: 193845 - RNA, 32 nt, Human
ggcucacgucuguaaucccagcaguuugggag

SEQ ID NO: 193846 - RNA, 32 nt, Human
ggcucacgucuguaaucccagcgcuuugggag

SEQ ID NO: 193847 - RNA, 32 nt, Human
ggcucacgucuguaaucccaggacuuugggag

SEQ ID NO: 193848 - RNA, 32 nt, Human
ggcucacgucuguaaucucagcacuuagggag

SEQ ID NO: 193849 - RNA, 32 nt, Human
ggcucacgucuguaaucuuugggagcacuuug

SEQ ID NO: 193850 - RNA, 16 nt, Human
ggcucacguggcccag

SEQ ID NO: 193851 - RNA, 32 nt, Human
ggcucacguuuguaaucccagcacuuugggag

SEQ ID NO: 193852 - RNA, 32 nt, Human
ggcucacguuuuuaaucccagcacuuugggag

SEQ ID NO: 193853 - RNA, 24 nt, Human
ggcucacuacaaccaccaccuccu

SEQ ID NO: 193854 - RNA, 32 nt, Human
ggcucacuacaaccaccaccuccuggguccaa

SEQ ID NO: 193855 - RNA, 32 nt, Human
ggcucacuacaaccuccaccucccagguucaa

SEQ ID NO: 193856 - RNA, 32 nt, Human
ggcucacuacaaccuccaccucccggguucag

SEQ ID NO: 193857 - RNA, 24 nt, Human
ggcucacuacaaccuccaccuccu

SEQ ID NO: 193858 - RNA, 32 nt, Human
ggcucacuacaaccuccaccuccuggguucca

SEQ ID NO: 193859 - RNA, 32 nt, Human
ggcucacuacaaccuccaccuuccaggcuuaa

SEQ ID NO: 193860 - RNA, 32 nt, Human
ggcucacuacaaccuccgccucccagguucaa

SEQ ID NO: 193861 - RNA, 32 nt, Human
ggcucacuacaaccuccgccuccuggguucaa

SEQ ID NO: 193862 - RNA, 24 nt, Human
ggcucacuacaaccucgaccuccu

SEQ ID NO: 193863 - RNA, 32 nt, Human
ggcucacuacaaccucgaccuccuggguucaa

SEQ ID NO: 193864 - RNA, 22 nt, Human
ggcucacuacaaccucugccuc

SEQ ID NO: 193865 - RNA, 23 nt, Human
ggcucacuacaaccucugccucc

SEQ ID NO: 193866 - RNA, 32 nt, Human
ggcucacuacaaccucugccucccagguucaa

SEQ ID NO: 193867 - RNA, 32 nt, Human
ggcucacuacaaccucugccucccggguucaa

SEQ ID NO: 193868 - RNA, 32 nt, Human
ggcucacuacaaccucugccucgcagguucag

SEQ ID NO: 193869 - RNA, 23 nt, Human
ggcucacuacaacuuccgccucc

SEQ ID NO: 193870 - RNA, 32 nt, Human
ggcucacuacaagcucugccucccggguucac

SEQ ID NO: 193871 - RNA, 32 nt, Human
ggcucacuacagccucaaacucccagacucaa

SEQ ID NO: 193872 - RNA, 32 nt, Human
ggcucacuacagccuccgccuccuggguucaa

SEQ ID NO: 193873 - RNA, 32 nt, Human
ggcucacuacagccucgaacuccuggucucuu

SEQ ID NO: 193874 - RNA, 32 nt, Human
ggcucacuacagccucgcucucccgggcucca

SEQ ID NO: 193875 - RNA, 23 nt, Human
ggcucacuacagccucugccccc

SEQ ID NO: 193876 - RNA, 27 nt, Human
ggcucacuacagugagccucagccucc

SEQ ID NO: 193877 - RNA, 21 nt, Human
ggcucacuacucuaauuccag

SEQ ID NO: 193878 - RNA, 32 nt, Human
ggcucacuacugcugugcccucaggcugggcg

SEQ ID NO: 193879 - RNA, 32 nt, Human
ggcucacuacuguaauuccagcacuuugggag

SEQ ID NO: 193880 - RNA, 32 nt, Human
ggcucacuauaaccuccaccucccagguucaa

SEQ ID NO: 193881 - RNA, 32 nt, Human
ggcucacuauaaccucuuccuccaggguucaa

SEQ ID NO: 193882 - RNA, 22 nt, Human
ggcucacucagaagcucaggca

SEQ ID NO: 193883 - RNA, 32 nt, Human
ggcucacucaggagcaggucucaggcacaguc

SEQ ID NO: 193884 - RNA, 32 nt, Human
ggcucacuccaaccuccaccuacuagguucaa

SEQ ID NO: 193885 - RNA, 32 nt, Human
ggcucacuccaaccuccaccuuccagguucaa

SEQ ID NO: 193886 - RNA, 24 nt, Human
ggcucacuccaaccuccgccuccu

SEQ ID NO: 193887 - RNA, 32 nt, Human
ggcucacuccaaccuccgccuccuggguucaa

SEQ ID NO: 193888 - RNA, 32 nt, Human
ggcucacuccaaccuccuccuggguuccagcg

SEQ ID NO: 193889 - RNA, 32 nt, Human
ggcucacuccaaucuccaccucccggauucaa

SEQ ID NO: 193890 - RNA, 32 nt, Human
ggcucacucccugugccucugccaucagcaca

SEQ ID NO: 193891 - RNA, 32 nt, Human
ggcucacucccuugccucucccccuccaccac

SEQ ID NO: 193892 - RNA, 32 nt, Human
ggcucacuccguaauuccggcacuuugggagg

SEQ ID NO: 193893 - RNA, 20 nt, Human
ggcucacuccuguaauccca

SEQ ID NO: 193894 - RNA, 32 nt, Human
ggcucacuccuguaaucccaacacuuugagag

SEQ ID NO: 193895 - RNA, 32 nt, Human
ggcucacuccuguaaucccaccacuuugggag

SEQ ID NO: 193896 - RNA, 22 nt, Human
ggcucacuccuguaaucccagc

SEQ ID NO: 193897 - RNA, 32 nt, Human
ggcucacuccuguaaucccagcacuuuggagg

SEQ ID NO: 193898 - RNA, 32 nt, Human
ggcucacuccuguaaucccagcacuuugggaa

SEQ ID NO: 193899 - RNA, 32 nt, Human
ggcucacuccuguaaucccagcacuuugggag

SEQ ID NO: 193900 - RNA, 32 nt, Human
ggcucacuccuguaaucccagcauuuugagag

SEQ ID NO: 193901 - RNA, 32 nt, Human
ggcucacuccuguaaucccagcauuuugggag

SEQ ID NO: 193902 - RNA, 32 nt, Human
ggcucacuccuguaaucccggcacuuuggaau

SEQ ID NO: 193903 - RNA, 32 nt, Human
ggcucacuccuguaauccuagcaguuuggaag

SEQ ID NO: 193904 - RNA, 32 nt, Human
ggcucacuccuguaaucucagaacuuugggag

SEQ ID NO: 193905 - RNA, 32 nt, Human
ggcucacuccuguaauuccagcacuuugggag

SEQ ID NO: 193906 - RNA, 32 nt, Human
ggcucacuccuguagucccagcacuuugggag

SEQ ID NO: 193907 - RNA, 32 nt, Human
ggcucacucuagggagaaugguucacuccacc

SEQ ID NO: 193908 - RNA, 32 nt, Human
ggcucacucugucauugggagcugucagcugc

SEQ ID NO: 193909 - RNA, 23 nt, Human
ggcucacugaaaccucugccucc

SEQ ID NO: 193910 - RNA, 32 nt, Human
ggcucacugaaaccucugccucccggguucaa

SEQ ID NO: 193911 - RNA, 32 nt, Human
ggcucacugaaaccucugccucccgguucaag

SEQ ID NO: 193912 - RNA, 32 nt, Human
ggcucacugaaaccucugccuuccagguucaa

SEQ ID NO: 193913 - RNA, 32 nt, Human
ggcucacugaaaccugugccuccccgguucga

SEQ ID NO: 193914 - RNA, 32 nt, Human
ggcucacugaaacuucugccucccggguacaa

SEQ ID NO: 193915 - RNA, 22 nt, Human
ggcucacugcaaacccgccucc

SEQ ID NO: 193916 - RNA, 21 nt, Human
ggcucacugcaaaccgccucc

SEQ ID NO: 193917 - RNA, 32 nt, Human
ggcucacugcaaacuccacuucccuaguucaa

SEQ ID NO: 193918 - RNA, 21 nt, Human
ggcucacugcaaacuccgccu

SEQ ID NO: 193919 - RNA, 23 nt, Human
ggcucacugcaaacuccgccucc

SEQ ID NO: 193920 - RNA, 32 nt, Human
ggcucacugcaaacuccgccucccagguucaa

SEQ ID NO: 193921 - RNA, 32 nt, Human
ggcucacugcaaacuccgccucccggguucac

SEQ ID NO: 193922 - RNA, 32 nt, Human
ggcucacugcaaacuccgccuuccagguucac

SEQ ID NO: 193923 - RNA, 32 nt, Human
ggcucacugcaaacuccgccuuccagguucau

SEQ ID NO: 193924 - RNA, 32 nt, Human
ggcucacugcaaacucugccuaccagguucaa

SEQ ID NO: 193925 - RNA, 32 nt, Human
ggcucacugcaaacucugccucccagguucaa

SEQ ID NO: 193926 - RNA, 32 nt, Human
ggcucacugcaaacucugccucccggguucaa

SEQ ID NO: 193927 - RNA, 24 nt, Human
ggcucacugcaaacucugccuccu

SEQ ID NO: 193928 - RNA, 32 nt, Human
ggcucacugcaaacucugccuccuggauucaa

SEQ ID NO: 193929 - RNA, 32 nt, Human
ggcucacugcaaacucugccuuuuggguucaa

SEQ ID NO: 193930 - RNA, 22 nt, Human
ggcucacugcaaaucuccgccu

SEQ ID NO: 193931 - RNA, 32 nt, Human
ggcucacugcaaaucuccgccucccagguuca

SEQ ID NO: 193932 - RNA, 32 nt, Human
ggcucacugcaacauccaccuccuggguucaa

SEQ ID NO: 193933 - RNA, 32 nt, Human
ggcucacugcaacauccagcuccuggguuuca

SEQ ID NO: 193934 - RNA, 23 nt, Human
ggcucacugcaacauccgccucc

SEQ ID NO: 193935 - RNA, 32 nt, Human
ggcucacugcaacauccgccucccggguucag

SEQ ID NO: 193936 - RNA, 24 nt, Human
ggcucacugcaacaucugacuccu

SEQ ID NO: 193937 - RNA, 32 nt, Human
ggcucacugcaacaucugacuccuggguucaa

SEQ ID NO: 193938 - RNA, 23 nt, Human
ggcucacugcaacaucugccucc

SEQ ID NO: 193939 - RNA, 23 nt, Human
ggcucacugcaaccaccaucucc

SEQ ID NO: 193940 - RNA, 32 nt, Human
ggcucacugcaaccaccaucucccaggagagg

SEQ ID NO: 193941 - RNA, 32 nt, Human
ggcucacugcaaccacugccucccagguucaa

SEQ ID NO: 193942 - RNA, 24 nt, Human
ggcucacugcaaccacugcuuccu

SEQ ID NO: 193943 - RNA, 32 nt, Human
ggcucacugcaaccacugcuuccuggguucaa

SEQ ID NO: 193944 - RNA, 32 nt, Human
ggcucacugcaaccacugucucccggguucaa

SEQ ID NO: 193945 - RNA, 23 nt, Human
ggcucacugcaacccccacaucc

SEQ ID NO: 193946 - RNA, 32 nt, Human
ggcucacugcaacccccacaucccggguucaa

SEQ ID NO: 193947 - RNA, 32 nt, Human
ggcucacugcaacccccaccucccggguucaa

SEQ ID NO: 193948 - RNA, 23 nt, Human
ggcucacugcaacccccaucucc

SEQ ID NO: 193949 - RNA, 32 nt, Human
ggcucacugcaacccccaucucccagguucaa

SEQ ID NO: 193950 - RNA, 24 nt, Human
ggcucacugcaacccccgccaccu

SEQ ID NO: 193951 - RNA, 32 nt, Human
ggcucacugcaacccccgccaccuagguucaa

SEQ ID NO: 193952 - RNA, 23 nt, Human
ggcucacugcaacccccgccccc

SEQ ID NO: 193953 - RNA, 23 nt, Human
ggcucacugcaacccccgccucc

SEQ ID NO: 193954 - RNA, 32 nt, Human
ggcucacugcaacccccgccuccaggguucaa

SEQ ID NO: 193955 - RNA, 23 nt, Human
ggcucacugcaacccccgucucc

SEQ ID NO: 193956 - RNA, 32 nt, Human
ggcucacugcaacccccgucucccggguucaa

SEQ ID NO: 193957 - RNA, 22 nt, Human
ggcucacugcaaccccgccucc

SEQ ID NO: 193958 - RNA, 32 nt, Human
ggcucacugcaaccccgccucccagguucaag

SEQ ID NO: 193959 - RNA, 22 nt, Human
ggcucacugcaacccucccucc

SEQ ID NO: 193960 - RNA, 32 nt, Human
ggcucacugcaacccucccucccggguuccag

SEQ ID NO: 193961 - RNA, 24 nt, Human
ggcucacugcaaccucaaauuccu

SEQ ID NO: 193962 - RNA, 32 nt, Human
ggcucacugcaaccucaaccagcccagguuca

SEQ ID NO: 193963 - RNA, 24 nt, Human
ggcucacugcaaccucaaccuucu

SEQ ID NO: 193964 - RNA, 32 nt, Human
ggcucacugcaaccucaaccuucugguuucaa

SEQ ID NO: 193965 - RNA, 22 nt, Human
ggcucacugcaaccucaccucc

SEQ ID NO: 193966 - RNA, 32 nt, Human
ggcucacugcaaccucaccucccggguucaag

SEQ ID NO: 193967 - RNA, 23 nt, Human
ggcucacugcaaccucagccucc

SEQ ID NO: 193968 - RNA, 32 nt, Human
ggcucacugcaaccucagccucccagguucaa

SEQ ID NO: 193969 - RNA, 24 nt, Human
ggcucacugcaaccucagccuccu

SEQ ID NO: 193970 - RNA, 32 nt, Human
ggcucacugcaaccucagccuccugggcucaa

SEQ ID NO: 193971 - RNA, 23 nt, Human
ggcucacugcaaccuccaacucc

SEQ ID NO: 193972 - RNA, 32 nt, Human
ggcucacugcaaccuccaacucccagguucaa

SEQ ID NO: 193973 - RNA, 32 nt, Human
ggcucacugcaaccuccaacucccugguucaa

SEQ ID NO: 193974 - RNA, 32 nt, Human
ggcucacugcaaccuccaacucccugguuuaa

SEQ ID NO: 193975 - RNA, 23 nt, Human
ggcucacugcaaccuccacaucc

SEQ ID NO: 193976 - RNA, 32 nt, Human
ggcucacugcaaccuccacaucccauguugaa

SEQ ID NO: 193977 - RNA, 23 nt, Human
ggcucacugcaaccuccaccccc

SEQ ID NO: 193978 - RNA, 32 nt, Human
ggcucacugcaaccuccacccccggggaucaa

SEQ ID NO: 193979 - RNA, 24 nt, Human
ggcucacugcaaccuccacccgcc

SEQ ID NO: 193980 - RNA, 32 nt, Human
ggcucacugcaaccuccacccgccggguucaa

SEQ ID NO: 193981 - RNA, 21 nt, Human
ggcucacugcaaccuccaccu

SEQ ID NO: 193982 - RNA, 22 nt, Human
ggcucacugcaaccuccaccuc

SEQ ID NO: 193983 - RNA, 32 nt, Human
ggcucacugcaaccuccaccucacagguucaa

SEQ ID NO: 193984 - RNA, 23 nt, Human
ggcucacugcaaccuccaccucc

SEQ ID NO: 193985 - RNA, 32 nt, Human
ggcucacugcaaccuccaccuccagguucaag

SEQ ID NO: 193986 - RNA, 32 nt, Human
ggcucacugcaaccuccaccucccagaaggaa

SEQ ID NO: 193987 - RNA, 32 nt, Human
ggcucacugcaaccuccaccucccagauucaa

SEQ ID NO: 193988 - RNA, 32 nt, Human
ggcucacugcaaccuccaccucccaggucagc

SEQ ID NO: 193989 - RNA, 32 nt, Human
ggcucacugcaaccuccaccucccagguccaa

SEQ ID NO: 193990 - RNA, 32 nt, Human
ggcucacugcaaccuccaccucccagguucaa

SEQ ID NO: 193991 - RNA, 32 nt, Human
ggcucacugcaaccuccaccucccagguucac

SEQ ID NO: 193992 - RNA, 32 nt, Human
ggcucacugcaaccuccaccucccaguucaag

SEQ ID NO: 193993 - RNA, 32 nt, Human
ggcucacugcaaccuccaccuccccaguucac

SEQ ID NO: 193994 - RNA, 32 nt, Human
ggcucacugcaaccuccaccuccccggguuca

SEQ ID NO: 193995 - RNA, 32 nt, Human
ggcucacugcaaccuccaccucccgaguucaa

SEQ ID NO: 193996 - RNA, 32 nt, Human
ggcucacugcaaccuccaccucccggauucaa

SEQ ID NO: 193997 - RNA, 32 nt, Human
ggcucacugcaaccuccaccucccgggcucaa

SEQ ID NO: 193998 - RNA, 32 nt, Human
ggcucacugcaaccuccaccucccggguucaa

SEQ ID NO: 193999 - RNA, 32 nt, Human
ggcucacugcaaccuccaccucccggguucac

SEQ ID NO: 194000 - RNA, 32 nt, Human
ggcucacugcaaccuccaccucccggguucag

SEQ ID NO: 194001 - RNA, 32 nt, Human
ggcucacugcaaccuccaccucccggguucca

SEQ ID NO: 194002 - RNA, 24 nt, Human
ggcucacugcaaccuccaccuccu

SEQ ID NO: 194003 - RNA, 32 nt, Human
ggcucacugcaaccuccaccuccuagguucaa

SEQ ID NO: 194004 - RNA, 32 nt, Human
ggcucacugcaaccuccaccuccugaguucaa

SEQ ID NO: 194005 - RNA, 32 nt, Human
ggcucacugcaaccuccaccuccuggauucaa

SEQ ID NO: 194006 - RNA, 32 nt, Human
ggcucacugcaaccuccaccuccuggcuucaa

SEQ ID NO: 194007 - RNA, 32 nt, Human
ggcucacugcaaccuccaccuccugggcucaa

SEQ ID NO: 194008 - RNA, 32 nt, Human
ggcucacugcaaccuccaccuccugggucaag

SEQ ID NO: 194009 - RNA, 32 nt, Human
ggcucacugcaaccuccaccuccuggguucaa

SEQ ID NO: 194010 - RNA, 32 nt, Human
ggcucacugcaaccuccaccuccuggguucag

SEQ ID NO: 194011 - RNA, 32 nt, Human
ggcucacugcaaccuccaccuccuggguuuaa

SEQ ID NO: 194012 - RNA, 32 nt, Human
ggcucacugcaaccuccaccuccugguucaag

SEQ ID NO: 194013 - RNA, 23 nt, Human
ggcucacugcaaccuccaccucu

SEQ ID NO: 194014 - RNA, 32 nt, Human
ggcucacugcaaccuccaccucucggcuucaa

SEQ ID NO: 194015 - RNA, 32 nt, Human
ggcucacugcaaccuccaccucugggauucaa

SEQ ID NO: 194016 - RNA, 23 nt, Human
ggcucacugcaaccuccaccuuc

SEQ ID NO: 194017 - RNA, 32 nt, Human
ggcucacugcaaccuccaccuucaggguguca

SEQ ID NO: 194018 - RNA, 32 nt, Human
ggcucacugcaaccuccaccuuccugguucaa

SEQ ID NO: 194019 - RNA, 23 nt, Human
ggcucacugcaaccuccacuucc

SEQ ID NO: 194020 - RNA, 32 nt, Human
ggcucacugcaaccuccacuucccagguucua

SEQ ID NO: 194021 - RNA, 32 nt, Human
ggcucacugcaaccuccacuucccggguucaa

SEQ ID NO: 194022 - RNA, 24 nt, Human
ggcucacugcaaccuccacuuccu

SEQ ID NO: 194023 - RNA, 32 nt, Human
ggcucacugcaaccuccacuuccuggguucaa

SEQ ID NO: 194024 - RNA, 23 nt, Human
ggcucacugcaaccuccacuucu

SEQ ID NO: 194025 - RNA, 32 nt, Human
ggcucacugcaaccuccacuucucagguucaa

SEQ ID NO: 194026 - RNA, 24 nt, Human
ggcucacugcaaccuccacuucuu

SEQ ID NO: 194027 - RNA, 32 nt, Human
ggcucacugcaaccuccacuucuuggguucaa

SEQ ID NO: 194028 - RNA, 32 nt, Human
ggcucacugcaaccuccagcucccagguugaa

SEQ ID NO: 194029 - RNA, 22 nt, Human
ggcucacugcaaccuccaggcc

SEQ ID NO: 194030 - RNA, 32 nt, Human
ggcucacugcaaccuccaggccagccucagcc

SEQ ID NO: 194031 - RNA, 24 nt, Human
ggcucacugcaaccuccagguccc

SEQ ID NO: 194032 - RNA, 23 nt, Human
ggcucacugcaaccuccaucucc

SEQ ID NO: 194033 - RNA, 32 nt, Human
ggcucacugcaaccuccaucuccggggcucaa

SEQ ID NO: 194034 - RNA, 23 nt, Human
ggcucacugcaaccucccucucc

SEQ ID NO: 194035 - RNA, 23 nt, Human
ggcucacugcaaccucccugccu

SEQ ID NO: 194036 - RNA, 32 nt, Human
ggcucacugcaaccucccugccugauucuccu

SEQ ID NO: 194037 - RNA, 32 nt, Human
ggcucacugcaaccucccugccugauucucuu

SEQ ID NO: 194038 - RNA, 23 nt, Human
ggcucacugcaaccuccgacucc

SEQ ID NO: 194039 - RNA, 32 nt, Human
ggcucacugcaaccuccgacucccagguucaa

SEQ ID NO: 194040 - RNA, 32 nt, Human
ggcucacugcaaccuccgacucccugguucaa

SEQ ID NO: 194041 - RNA, 24 nt, Human
ggcucacugcaaccuccgacuccu

SEQ ID NO: 194042 - RNA, 32 nt, Human
ggcucacugcaaccuccgacuccuggguucaa

SEQ ID NO: 194043 - RNA, 19 nt, Human
ggcucacugcaaccuccgc

SEQ ID NO: 194044 - RNA, 23 nt, Human
ggcucacugcaaccuccgcaucc

SEQ ID NO: 194045 - RNA, 32 nt, Human
ggcucacugcaaccuccgcaucccggguucaa

SEQ ID NO: 194046 - RNA, 24 nt, Human
ggcucacugcaaccuccgcauccu

SEQ ID NO: 194047 - RNA, 23 nt, Human
ggcucacugcaaccuccgccacc

SEQ ID NO: 194048 - RNA, 24 nt, Human
ggcucacugcaaccuccgccaccu

SEQ ID NO: 194049 - RNA, 24 nt, Human
ggcucacugcaaccuccgcccccu

SEQ ID NO: 194050 - RNA, 32 nt, Human
ggcucacugcaaccuccgcccccuggguuuaa

SEQ ID NO: 194051 - RNA, 24 nt, Human
ggcucacugcaaccuccgccuacc

SEQ ID NO: 194052 - RNA, 32 nt, Human
ggcucacugcaaccuccgccuaccggguucaa

SEQ ID NO: 194053 - RNA, 23 nt, Human
ggcucacugcaaccuccgccucc

SEQ ID NO: 194054 - RNA, 32 nt, Human
ggcucacugcaaccuccgccuccagggcgcag

SEQ ID NO: 194055 - RNA, 32 nt, Human
ggcucacugcaaccuccgccuccaggguucgg

SEQ ID NO: 194056 - RNA, 32 nt, Human
ggcucacugcaaccuccgccucccaaguucaa

SEQ ID NO: 194057 - RNA, 32 nt, Human
ggcucacugcaaccuccgccucccaaguucag

SEQ ID NO: 194058 - RNA, 32 nt, Human
ggcucacugcaaccuccgccucccagguucaa

SEQ ID NO: 194059 - RNA, 32 nt, Human
ggcucacugcaaccuccgccucccagguucac

SEQ ID NO: 194060 - RNA, 32 nt, Human
ggcucacugcaaccuccgccucccagguucag

SEQ ID NO: 194061 - RNA, 32 nt, Human
ggcucacugcaaccuccgccucccagguucca

SEQ ID NO: 194062 - RNA, 32 nt, Human
ggcucacugcaaccuccgccucccagguugac

SEQ ID NO: 194063 - RNA, 32 nt, Human
ggcucacugcaaccuccgccucccagguuuaa

SEQ ID NO: 194064 - RNA, 32 nt, Human
ggcucacugcaaccuccgccucccaguuucaa

SEQ ID NO: 194065 - RNA, 32 nt, Human
ggcucacugcaaccuccgccucccgaguucaa

SEQ ID NO: 194066 - RNA, 32 nt, Human
ggcucacugcaaccuccgccucccggcuucaa

SEQ ID NO: 194067 - RNA, 32 nt, Human
ggcucacugcaaccuccgccucccgggcugaa

SEQ ID NO: 194068 - RNA, 32 nt, Human
ggcucacugcaaccuccgccucccggguuaaa

SEQ ID NO: 194069 - RNA, 32 nt, Human
ggcucacugcaaccuccgccucccggguucaa

SEQ ID NO: 194070 - RNA, 32 nt, Human
ggcucacugcaaccuccgccucccggguucag

SEQ ID NO: 194071 - RNA, 32 nt, Human
ggcucacugcaaccuccgccucccggguucca

SEQ ID NO: 194072 - RNA, 32 nt, Human
ggcucacugcaaccuccgccucccggguucgg

SEQ ID NO: 194073 - RNA, 32 nt, Human
ggcucacugcaaccuccgccucccgguucaag

SEQ ID NO: 194074 - RNA, 32 nt, Human
ggcucacugcaaccuccgccucccugguucaa

SEQ ID NO: 194075 - RNA, 32 nt, Human
ggcucacugcaaccuccgccuccgggguucaa

SEQ ID NO: 194076 - RNA, 24 nt, Human
ggcucacugcaaccuccgccuccu

SEQ ID NO: 194077 - RNA, 32 nt, Human
ggcucacugcaaccuccgccuccugaguucac

SEQ ID NO: 194078 - RNA, 32 nt, Human
ggcucacugcaaccuccgccuccugggcucaa

SEQ ID NO: 194079 - RNA, 32 nt, Human
ggcucacugcaaccuccgccuccuggguuaaa

SEQ ID NO: 194080 - RNA, 32 nt, Human
ggcucacugcaaccuccgccuccuggguucaa

SEQ ID NO: 194081 - RNA, 32 nt, Human
ggcucacugcaaccuccgccuccuggguucag

SEQ ID NO: 194082 - RNA, 32 nt, Human
ggcucacugcaaccuccgccuccuggguucca

SEQ ID NO: 194083 - RNA, 32 nt, Human
ggcucacugcaaccuccgccuccuggguucgg

SEQ ID NO: 194084 - RNA, 32 nt, Human
ggcucacugcaaccuccgccuccuugguucca

SEQ ID NO: 194085 - RNA, 23 nt, Human
ggcucacugcaaccuccgccucu

SEQ ID NO: 194086 - RNA, 32 nt, Human
ggcucacugcaaccuccgccucucagguucaa

SEQ ID NO: 194087 - RNA, 32 nt, Human
ggcucacugcaaccuccgccucucggguucaa

SEQ ID NO: 194088 - RNA, 24 nt, Human
ggcucacugcaaccuccgccucuu

SEQ ID NO: 194089 - RNA, 32 nt, Human
ggcucacugcaaccuccgccucuuggguucaa

SEQ ID NO: 194090 - RNA, 22 nt, Human
ggcucacugcaaccuccgccuu

SEQ ID NO: 194091 - RNA, 32 nt, Human
ggcucacugcaaccuccgccuuccugaguuca

SEQ ID NO: 194092 - RNA, 32 nt, Human
ggcucacugcaaccuccgccuuccugguucaa

SEQ ID NO: 194093 - RNA, 32 nt, Human
ggcucacugcaaccuccgccuucuggguucaa

SEQ ID NO: 194094 - RNA, 32 nt, Human
ggcucacugcaaccuccgccuugcugguugag

SEQ ID NO: 194095 - RNA, 32 nt, Human
ggcucacugcaaccuccgccuuuccaccuucc

SEQ ID NO: 194096 - RNA, 32 nt, Human
ggcucacugcaaccuccgcucccuggguucaa

SEQ ID NO: 194097 - RNA, 23 nt, Human
ggcucacugcaaccuccgucucc

SEQ ID NO: 194098 - RNA, 32 nt, Human
ggcucacugcaaccuccgucucccagguucaa

SEQ ID NO: 194099 - RNA, 24 nt, Human
ggcucacugcaaccuccgucuccu

SEQ ID NO: 194100 - RNA, 32 nt, Human
ggcucacugcaaccuccgucuccuggguucaa

SEQ ID NO: 194101 - RNA, 23 nt, Human
ggcucacugcaaccuccgucuuc

SEQ ID NO: 194102 - RNA, 32 nt, Human
ggcucacugcaaccuccgucuuccggguucaa

SEQ ID NO: 194103 - RNA, 23 nt, Human
ggcucacugcaaccuccuccucc

SEQ ID NO: 194104 - RNA, 32 nt, Human
ggcucacugcaaccuccuccucccagagguac

SEQ ID NO: 194105 - RNA, 32 nt, Human
ggcucacugcaaccuccuccucccggguucaa

SEQ ID NO: 194106 - RNA, 24 nt, Human
ggcucacugcaaccuccuccuccu

SEQ ID NO: 194107 - RNA, 32 nt, Human
ggcucacugcaaccuccuccuccuggauucaa

SEQ ID NO: 194108 - RNA, 32 nt, Human
ggcucacugcaaccuccugcuuccuggguuca

SEQ ID NO: 194109 - RNA, 23 nt, Human
ggcucacugcaaccuccuucucc

SEQ ID NO: 194110 - RNA, 32 nt, Human
ggcucacugcaaccuccuucucccagguucaa

SEQ ID NO: 194111 - RNA, 22 nt, Human
ggcucacugcaaccucgccucc

SEQ ID NO: 194112 - RNA, 32 nt, Human
ggcucacugcaaccucgccucccugguucaag

SEQ ID NO: 194113 - RNA, 23 nt, Human
ggcucacugcaaccucuaccucc

SEQ ID NO: 194114 - RNA, 32 nt, Human
ggcucacugcaaccucuaccucccagguucaa

SEQ ID NO: 194115 - RNA, 24 nt, Human
ggcucacugcaaccucuaccuccu

SEQ ID NO: 194116 - RNA, 32 nt, Human
ggcucacugcaaccucuaccuccuggauucaa

SEQ ID NO: 194117 - RNA, 32 nt, Human
ggcucacugcaaccucuaccuccuggguucaa

SEQ ID NO: 194118 - RNA, 19 nt, Human
ggcucacugcaaccucugc

SEQ ID NO: 194119 - RNA, 20 nt, Human
ggcucacugcaaccucugcc

SEQ ID NO: 194120 - RNA, 32 nt, Human
ggcucacugcaaccucugccacacggguucag

SEQ ID NO: 194121 - RNA, 32 nt, Human
ggcucacugcaaccucugccaccuggguucaa

SEQ ID NO: 194122 - RNA, 32 nt, Human
ggcucacugcaaccucugccaucaggauuaaa

SEQ ID NO: 194123 - RNA, 24 nt, Human
ggcucacugcaaccucugcccccu

SEQ ID NO: 194124 - RNA, 32 nt, Human
ggcucacugcaaccucugcccccuggguucaa

SEQ ID NO: 194125 - RNA, 24 nt, Human
ggcucacugcaaccucugccgucu

SEQ ID NO: 194126 - RNA, 24 nt, Human
ggcucacugcaaccucugccuacc

SEQ ID NO: 194127 - RNA, 32 nt, Human
ggcucacugcaaccucugccuaccggauucaa

SEQ ID NO: 194128 - RNA, 22 nt, Human
ggcucacugcaaccucugccuc

SEQ ID NO: 194129 - RNA, 23 nt, Human
ggcucacugcaaccucugccuca

SEQ ID NO: 194130 - RNA, 32 nt, Human
ggcucacugcaaccucugccucacaggcucaa

SEQ ID NO: 194131 - RNA, 32 nt, Human
ggcucacugcaaccucugccucacagguucaa

SEQ ID NO: 194132 - RNA, 32 nt, Human
ggcucacugcaaccucugccucacggguucaa

SEQ ID NO: 194133 - RNA, 23 nt, Human
ggcucacugcaaccucugccucc

SEQ ID NO: 194134 - RNA, 32 nt, Human
ggcucacugcaaccucugccucccaaguucaa

SEQ ID NO: 194135 - RNA, 32 nt, Human
ggcucacugcaaccucugccucccagguucaa

SEQ ID NO: 194136 - RNA, 32 nt, Human
ggcucacugcaaccucugccucccagguucac

SEQ ID NO: 194137 - RNA, 32 nt, Human
ggcucacugcaaccucugccucccagguucag

SEQ ID NO: 194138 - RNA, 32 nt, Human
ggcucacugcaaccucugccucccagguucau

SEQ ID NO: 194139 - RNA, 32 nt, Human
ggcucacugcaaccucugccucccagguucca

SEQ ID NO: 194140 - RNA, 32 nt, Human
ggcucacugcaaccucugccucccgaguucaa

SEQ ID NO: 194141 - RNA, 32 nt, Human
ggcucacugcaaccucugccucccgcauucaa

SEQ ID NO: 194142 - RNA, 32 nt, Human
ggcucacugcaaccucugccucccggauucaa

SEQ ID NO: 194143 - RNA, 32 nt, Human
ggcucacugcaaccucugccucccgggcucaa

SEQ ID NO: 194144 - RNA, 32 nt, Human
ggcucacugcaaccucugccucccggguucaa

SEQ ID NO: 194145 - RNA, 32 nt, Human
ggcucacugcaaccucugccucccggguucca

SEQ ID NO: 194146 - RNA, 32 nt, Human
ggcucacugcaaccucugccucccggguucgg

SEQ ID NO: 194147 - RNA, 32 nt, Human
ggcucacugcaaccucugccucccgguuucaa

SEQ ID NO: 194148 - RNA, 32 nt, Human
ggcucacugcaaccucugccucccguguucaa

SEQ ID NO: 194149 - RNA, 32 nt, Human
ggcucacugcaaccucugccucccugguucaa

SEQ ID NO: 194150 - RNA, 24 nt, Human
ggcucacugcaaccucugccuccu

SEQ ID NO: 194151 - RNA, 32 nt, Human
ggcucacugcaaccucugccuccuagguugaa

SEQ ID NO: 194152 - RNA, 25 nt, Human
ggcucacugcaaccucugccuccug

SEQ ID NO: 194153 - RNA, 32 nt, Human
ggcucacugcaaccucugccuccugaauucca

SEQ ID NO: 194154 - RNA, 32 nt, Human
ggcucacugcaaccucugccuccugagcucaa

SEQ ID NO: 194155 - RNA, 32 nt, Human
ggcucacugcaaccucugccuccugaguucac

SEQ ID NO: 194156 - RNA, 32 nt, Human
ggcucacugcaaccucugccuccuggauucaa

SEQ ID NO: 194157 - RNA, 32 nt, Human
ggcucacugcaaccucugccuccugggcucaa

SEQ ID NO: 194158 - RNA, 32 nt, Human
ggcucacugcaaccucugccuccugggguuca

SEQ ID NO: 194159 - RNA, 32 nt, Human
ggcucacugcaaccucugccuccugggugcaa

SEQ ID NO: 194160 - RNA, 32 nt, Human
ggcucacugcaaccucugccuccuggguucaa

SEQ ID NO: 194161 - RNA, 32 nt, Human
ggcucacugcaaccucugccuccuggguucag

SEQ ID NO: 194162 - RNA, 32 nt, Human
ggcucacugcaaccucugccuccuggguuuaa

SEQ ID NO: 194163 - RNA, 32 nt, Human
ggcucacugcaaccucugccuccuucguucaa

SEQ ID NO: 194164 - RNA, 32 nt, Human
ggcucacugcaaccucugccuccuugguucaa

SEQ ID NO: 194165 - RNA, 32 nt, Human
ggcucacugcaaccucugccucuuggguucaa

SEQ ID NO: 194166 - RNA, 32 nt, Human
ggcucacugcaaccucugccugccggguucaa

SEQ ID NO: 194167 - RNA, 32 nt, Human
ggcucacugcaaccucugccuuccagguucaa

SEQ ID NO: 194168 - RNA, 24 nt, Human
ggcucacugcaaccucugccuucu

SEQ ID NO: 194169 - RNA, 32 nt, Human
ggcucacugcaaccucugccuucuggguucaa

SEQ ID NO: 194170 - RNA, 32 nt, Human
ggcucacugcaaccucugccuucuggguucag

SEQ ID NO: 194171 - RNA, 32 nt, Human
ggcucacugcaaccucugcgggcucacgcaau

SEQ ID NO: 194172 - RNA, 23 nt, Human
ggcucacugcaaccucugcuucc

SEQ ID NO: 194173 - RNA, 32 nt, Human
ggcucacugcaaccucugcuucccagguuuaa

SEQ ID NO: 194174 - RNA, 32 nt, Human
ggcucacugcaaccucugcuucccgaguucaa

SEQ ID NO: 194175 - RNA, 32 nt, Human
ggcucacugcaaccucugcuucccggguucaa

SEQ ID NO: 194176 - RNA, 23 nt, Human
ggcucacugcaaccucugucucc

SEQ ID NO: 194177 - RNA, 32 nt, Human
ggcucacugcaaccucugucuccaggguugaa

SEQ ID NO: 194178 - RNA, 32 nt, Human
ggcucacugcaaccucugucucccagguucag

SEQ ID NO: 194179 - RNA, 24 nt, Human
ggcucacugcaaccucugucuccu

SEQ ID NO: 194180 - RNA, 32 nt, Human
ggcucacugcaaccucugucuccugaguucaa

SEQ ID NO: 194181 - RNA, 32 nt, Human
ggcucacugcaaccucugucuccugggcucaa

SEQ ID NO: 194182 - RNA, 32 nt, Human
ggcucacugcaaccucugucuccuggguucaa

SEQ ID NO: 194183 - RNA, 32 nt, Human
ggcucacugcaaccucugucuccuggguuuaa

SEQ ID NO: 194184 - RNA, 32 nt, Human
ggcucacugcaaccucugucuuccagguucaa

SEQ ID NO: 194185 - RNA, 32 nt, Human
ggcucacugcaaccucugucuucuggguucaa

SEQ ID NO: 194186 - RNA, 24 nt, Human
ggcucacugcaaccucuguguccu

SEQ ID NO: 194187 - RNA, 32 nt, Human
ggcucacugcaaccucuguguccugggcucaa

SEQ ID NO: 194188 - RNA, 24 nt, Human
ggcucacugcaaccucuuccuccu

SEQ ID NO: 194189 - RNA, 32 nt, Human
ggcucacugcaaccucuuccuccugguucaag

SEQ ID NO: 194190 - RNA, 24 nt, Human
ggcucacugcaaccucuugccucc

SEQ ID NO: 194191 - RNA, 32 nt, Human
ggcucacugcaaccucuugccucccagguuca

SEQ ID NO: 194192 - RNA, 24 nt, Human
ggcucacugcaaccugcgccuccu

SEQ ID NO: 194193 - RNA, 32 nt, Human
ggcucacugcaaccugcgccuccuggguucaa

SEQ ID NO: 194194 - RNA, 24 nt, Human
ggcucacugcaaccuggaacuccu

SEQ ID NO: 194195 - RNA, 32 nt, Human
ggcucacugcaaccuggaacuccugggcucaa

SEQ ID NO: 194196 - RNA, 32 nt, Human
ggcucacugcaaccugucucucagguugaagu

SEQ ID NO: 194197 - RNA, 32 nt, Human
ggcucacugcaaccuucaccgcccagguucaa

SEQ ID NO: 194198 - RNA, 23 nt, Human
ggcucacugcaaccuucaccucc

SEQ ID NO: 194199 - RNA, 32 nt, Human
ggcucacugcaaccuucaccuccagguucaag

SEQ ID NO: 194200 - RNA, 24 nt, Human
ggcucacugcaaccuucgccuccu

SEQ ID NO: 194201 - RNA, 23 nt, Human
ggcucacugcaaccuucgccucu

SEQ ID NO: 194202 - RNA, 32 nt, Human
ggcucacugcaaccuucgccucuggguucaag

SEQ ID NO: 194203 - RNA, 23 nt, Human
ggcucacugcaaccuugaccucc

SEQ ID NO: 194204 - RNA, 32 nt, Human
ggcucacugcaaccuugaccucccaggcucag

SEQ ID NO: 194205 - RNA, 24 nt, Human
ggcucacugcaaccuugacguccc

SEQ ID NO: 194206 - RNA, 32 nt, Human
ggcucacugcaaccuugacgucccagguucaa

SEQ ID NO: 194207 - RNA, 24 nt, Human
ggcucacugcaaccuuugccuccu

SEQ ID NO: 194208 - RNA, 32 nt, Human
ggcucacugcaaccuuugccuccuagguucaa

SEQ ID NO: 194209 - RNA, 23 nt, Human
ggcucacugcaacguccgccucc

SEQ ID NO: 194210 - RNA, 32 nt, Human
ggcucacugcaacguccgccucccagguucaa

SEQ ID NO: 194211 - RNA, 32 nt, Human
ggcucacugcaacguccgccucccggguugac

SEQ ID NO: 194212 - RNA, 24 nt, Human
ggcucacugcaacguccgccuccu

SEQ ID NO: 194213 - RNA, 32 nt, Human
ggcucacugcaacguccgccuccuggguucaa

SEQ ID NO: 194214 - RNA, 24 nt, Human
ggcucacugcaacgucugccuccu

SEQ ID NO: 194215 - RNA, 32 nt, Human
ggcucacugcaacgucugccuccuggguucaa

SEQ ID NO: 194216 - RNA, 24 nt, Human
ggcucacugcaacuaccaccuccu

SEQ ID NO: 194217 - RNA, 32 nt, Human
ggcucacugcaacuaccaccuccuggguucaa

SEQ ID NO: 194218 - RNA, 22 nt, Human
ggcucacugcaacuccaccucc

SEQ ID NO: 194219 - RNA, 32 nt, Human
ggcucacugcaacuccaccucccggguucacg

SEQ ID NO: 194220 - RNA, 32 nt, Human
ggcucacugcaacucugccucccggguucaag

SEQ ID NO: 194221 - RNA, 32 nt, Human
ggcucacugcaacucugcuucccagguucaag

SEQ ID NO: 194222 - RNA, 32 nt, Human
ggcucacugcaacugcagccucccggguucag

SEQ ID NO: 194223 - RNA, 23 nt, Human
ggcucacugcaacuuccaccucc

SEQ ID NO: 194224 - RNA, 32 nt, Human
ggcucacugcaacuuccaccucccggguucaa

SEQ ID NO: 194225 - RNA, 24 nt, Human
ggcucacugcaacuuccaccuccu

SEQ ID NO: 194226 - RNA, 23 nt, Human
ggcucacugcaacuuccaccucu

SEQ ID NO: 194227 - RNA, 32 nt, Human
ggcucacugcaacuuccaccucugggaucaag

SEQ ID NO: 194228 - RNA, 23 nt, Human
ggcucacugcaacuuccacuucc

SEQ ID NO: 194229 - RNA, 32 nt, Human
ggcucacugcaacuuccacuucccggguucaa

SEQ ID NO: 194230 - RNA, 32 nt, Human
ggcucacugcaacuuccgccucccggguucaa

SEQ ID NO: 194231 - RNA, 32 nt, Human
ggcucacugcaacuuccgccucccgguuucaa

SEQ ID NO: 194232 - RNA, 24 nt, Human
ggcucacugcaacuuccgccuccu

SEQ ID NO: 194233 - RNA, 32 nt, Human
ggcucacugcaacuuccgccuccugggaucaa

SEQ ID NO: 194234 - RNA, 32 nt, Human
ggcucacugcaacuuccgccuccuguguucaa

SEQ ID NO: 194235 - RNA, 32 nt, Human
ggcucacugcaacuuccgucucccggguucaa

SEQ ID NO: 194236 - RNA, 24 nt, Human
ggcucacugcaacuucuaccaccu

SEQ ID NO: 194237 - RNA, 32 nt, Human
ggcucacugcaacuucuaccaccuagguucaa

SEQ ID NO: 194238 - RNA, 23 nt, Human
ggcucacugcaacuucuaccucc

SEQ ID NO: 194239 - RNA, 32 nt, Human
ggcucacugcaacuucuaccuccgagguucaa

SEQ ID NO: 194240 - RNA, 24 nt, Human
ggcucacugcaacuucugccaccu

SEQ ID NO: 194241 - RNA, 32 nt, Human
ggcucacugcaacuucugccaccuggguucaa

SEQ ID NO: 194242 - RNA, 23 nt, Human
ggcucacugcaacuucugccucc

SEQ ID NO: 194243 - RNA, 32 nt, Human
ggcucacugcaacuucugccucccaugcuuac

SEQ ID NO: 194244 - RNA, 32 nt, Human
ggcucacugcaacuucugccucccggguucaa

SEQ ID NO: 194245 - RNA, 24 nt, Human
ggcucacugcaacuucugccuccu

SEQ ID NO: 194246 - RNA, 32 nt, Human
ggcucacugcaacuucugccuccuagguucaa

SEQ ID NO: 194247 - RNA, 24 nt, Human
ggcucacugcaacuucugccucuu

SEQ ID NO: 194248 - RNA, 32 nt, Human
ggcucacugcaacuucugccucuuggguucaa

SEQ ID NO: 194249 - RNA, 32 nt, Human
ggcucacugcaacuucugccuuccagguucaa

SEQ ID NO: 194250 - RNA, 32 nt, Human
ggcucacugcaacuugggccucccagguucaa

SEQ ID NO: 194251 - RNA, 23 nt, Human
ggcucacugcaagauccgccucc

SEQ ID NO: 194252 - RNA, 32 nt, Human
ggcucacugcaagauccgccucccggguucau

SEQ ID NO: 194253 - RNA, 32 nt, Human
ggcucacugcaagccccaccucccaaguucac

SEQ ID NO: 194254 - RNA, 24 nt, Human
ggcucacugcaagcccugccuccu

SEQ ID NO: 194255 - RNA, 32 nt, Human
ggcucacugcaagcccugccuccuggguucau

SEQ ID NO: 194256 - RNA, 23 nt, Human
ggcucacugcaagcucagccucc

SEQ ID NO: 194257 - RNA, 23 nt, Human
ggcucacugcaagcuccaccucc

SEQ ID NO: 194258 - RNA, 32 nt, Human
ggcucacugcaagcuccaccucccagguucac

SEQ ID NO: 194259 - RNA, 32 nt, Human
ggcucacugcaagcuccaccucccggguucac

SEQ ID NO: 194260 - RNA, 24 nt, Human
ggcucacugcaagcuccaccuccu

SEQ ID NO: 194261 - RNA, 32 nt, Human
ggcucacugcaagcuccaccuccuggguucaa

SEQ ID NO: 194262 - RNA, 32 nt, Human
ggcucacugcaagcuccaccuccuggguucac

SEQ ID NO: 194263 - RNA, 32 nt, Human
ggcucacugcaagcuccaccuccuggguucau

SEQ ID NO: 194264 - RNA, 32 nt, Human
ggcucacugcaagcuccaucucccagguucac

SEQ ID NO: 194265 - RNA, 19 nt, Human
ggcucacugcaagcuccgc

SEQ ID NO: 194266 - RNA, 21 nt, Human
ggcucacugcaagcuccgccu

SEQ ID NO: 194267 - RNA, 23 nt, Human
ggcucacugcaagcuccgccucc

SEQ ID NO: 194268 - RNA, 32 nt, Human
ggcucacugcaagcuccgccucccagauucac

SEQ ID NO: 194269 - RNA, 32 nt, Human
ggcucacugcaagcuccgccucccaggaucaa

SEQ ID NO: 194270 - RNA, 32 nt, Human
ggcucacugcaagcuccgccucccagguucac

SEQ ID NO: 194271 - RNA, 32 nt, Human
ggcucacugcaagcuccgccucccagguucau

SEQ ID NO: 194272 - RNA, 32 nt, Human
ggcucacugcaagcuccgccucccagguuccc

SEQ ID NO: 194273 - RNA, 32 nt, Human
ggcucacugcaagcuccgccucccgaguucaa

SEQ ID NO: 194274 - RNA, 32 nt, Human
ggcucacugcaagcuccgccucccggauucaa

SEQ ID NO: 194275 - RNA, 32 nt, Human
ggcucacugcaagcuccgccucccggcuucau

SEQ ID NO: 194276 - RNA, 32 nt, Human
ggcucacugcaagcuccgccucccggguucac

SEQ ID NO: 194277 - RNA, 32 nt, Human
ggcucacugcaagcuccgccucccggguucau

SEQ ID NO: 194278 - RNA, 32 nt, Human
ggcucacugcaagcuccgccucccggguucuc

SEQ ID NO: 194279 - RNA, 24 nt, Human
ggcucacugcaagcuccgccuccu

SEQ ID NO: 194280 - RNA, 32 nt, Human
ggcucacugcaagcuccgccuccuggguucaa

SEQ ID NO: 194281 - RNA, 32 nt, Human
ggcucacugcaagcuccgccuccuggguucac

SEQ ID NO: 194282 - RNA, 32 nt, Human
ggcucacugcaagcuccgccuccuggguucau

SEQ ID NO: 194283 - RNA, 32 nt, Human
ggcucacugcaagcuccgccuccuggguugac

SEQ ID NO: 194284 - RNA, 32 nt, Human
ggcucacugcaagcuccgccucucggguucac

SEQ ID NO: 194285 - RNA, 32 nt, Human
ggcucacugcaagcuccgccucucggguuugc

SEQ ID NO: 194286 - RNA, 32 nt, Human
ggcucacugcaagcuccggcucccagguucac

SEQ ID NO: 194287 - RNA, 32 nt, Human
ggcucacugcaagcuccggcucccggguucac

SEQ ID NO: 194288 - RNA, 32 nt, Human
ggcucacugcaagcuccgucugccggguucac

SEQ ID NO: 194289 - RNA, 24 nt, Human
ggcucacugcaagcucggccuccu

SEQ ID NO: 194290 - RNA, 32 nt, Human
ggcucacugcaagcucggccuccuggguucaa

SEQ ID NO: 194291 - RNA, 32 nt, Human
ggcucacugcaagcucugcccuccccggguuc

SEQ ID NO: 194292 - RNA, 23 nt, Human
ggcucacugcaagcucugccucc

SEQ ID NO: 194293 - RNA, 32 nt, Human
ggcucacugcaagcucugccucccagguucac

SEQ ID NO: 194294 - RNA, 32 nt, Human
ggcucacugcaagcucugccucccgggcucac

SEQ ID NO: 194295 - RNA, 32 nt, Human
ggcucacugcaagcucugccucccggguucaa

SEQ ID NO: 194296 - RNA, 32 nt, Human
ggcucacugcaagcucugccucccggguucac

SEQ ID NO: 194297 - RNA, 32 nt, Human
ggcucacugcaagcucugccucccggguucca

SEQ ID NO: 194298 - RNA, 32 nt, Human
ggcucacugcaagcucugccucccgguugcug

SEQ ID NO: 194299 - RNA, 24 nt, Human
ggcucacugcaagcucugccuccu

SEQ ID NO: 194300 - RNA, 32 nt, Human
ggcucacugcaagcucugccuccuggguucaa

SEQ ID NO: 194301 - RNA, 32 nt, Human
ggcucacugcaagcucugccuccuggguucac

SEQ ID NO: 194302 - RNA, 32 nt, Human
ggcucacugcaagcucugccucucggguucac

SEQ ID NO: 194303 - RNA, 32 nt, Human
ggcucacugcaagcucugcguccuggguugac

SEQ ID NO: 194304 - RNA, 32 nt, Human
ggcucacugcaagcucugcuucccagguucac

SEQ ID NO: 194305 - RNA, 32 nt, Human
ggcucacugcaagcuuccccuuccggguucau

SEQ ID NO: 194306 - RNA, 23 nt, Human
ggcucacugcaagcuucgccucc

SEQ ID NO: 194307 - RNA, 32 nt, Human
ggcucacugcaagcuucgccucccggguucac

SEQ ID NO: 194308 - RNA, 23 nt, Human
ggcucacugcaaguuccgccucc

SEQ ID NO: 194309 - RNA, 32 nt, Human
ggcucacugcaaguuccgccucccggguucac

SEQ ID NO: 194310 - RNA, 32 nt, Human
ggcucacugcaaucuccaucucccggguucaa

SEQ ID NO: 194311 - RNA, 23 nt, Human
ggcucacugcaaucuccgccucc

SEQ ID NO: 194312 - RNA, 32 nt, Human
ggcucacugcaaucuccgccucccagguucaa

SEQ ID NO: 194313 - RNA, 32 nt, Human
ggcucacugcaaucuccgccuccccaguucaa

SEQ ID NO: 194314 - RNA, 32 nt, Human
ggcucacugcaaucucuauccccuggguucaa

SEQ ID NO: 194315 - RNA, 23 nt, Human
ggcucacugcaaucucugccucc

SEQ ID NO: 194316 - RNA, 32 nt, Human
ggcucacugcaaucucugccucccaagcaauc

SEQ ID NO: 194317 - RNA, 32 nt, Human
ggcucacugcaaucucugccucccagguucaa

SEQ ID NO: 194318 - RNA, 32 nt, Human
ggcucacugcaaucucugccucccggauucaa

SEQ ID NO: 194319 - RNA, 32 nt, Human
ggcucacugcaaucucugccucccggguucaa

SEQ ID NO: 194320 - RNA, 32 nt, Human
ggcucacugcaaucucugccuccuggguucaa

SEQ ID NO: 194321 - RNA, 32 nt, Human
ggcucacugcaaucucugccucucggguucaa

SEQ ID NO: 194322 - RNA, 32 nt, Human
ggcucacugcaaucucugccuuccggguucaa

SEQ ID NO: 194323 - RNA, 23 nt, Human
ggcucacugcaauuugcgucucc

SEQ ID NO: 194324 - RNA, 32 nt, Human
ggcucacugcacccuccgccuccugggcucaa

SEQ ID NO: 194325 - RNA, 32 nt, Human
ggcucacugcacccucugccucuuggguucaa

SEQ ID NO: 194326 - RNA, 22 nt, Human
ggcucacugcaccuccgccucc

SEQ ID NO: 194327 - RNA, 23 nt, Human
ggcucacugcaccucugccuccu

SEQ ID NO: 194328 - RNA, 24 nt, Human
ggcucacugcagacuucaccuccu

SEQ ID NO: 194329 - RNA, 32 nt, Human
ggcucacugcagacuucaccuccugaguucaa

SEQ ID NO: 194330 - RNA, 32 nt, Human
ggcucacugcagccccaaccuucagggcucag

SEQ ID NO: 194331 - RNA, 32 nt, Human
ggcucacugcagccccgaacuacugggcucaa

SEQ ID NO: 194332 - RNA, 32 nt, Human
ggcucacugcagccccugccucccaggcucaa

SEQ ID NO: 194333 - RNA, 32 nt, Human
ggcucacugcagccuagaccucccagcuggag

SEQ ID NO: 194334 - RNA, 32 nt, Human
ggcucacugcagccucaaacuccugaguccaa

SEQ ID NO: 194335 - RNA, 23 nt, Human
ggcucacugcagccucaaccucc

SEQ ID NO: 194336 - RNA, 32 nt, Human
ggcucacugcagccucaaccucccaggcucaa

SEQ ID NO: 194337 - RNA, 32 nt, Human
ggcucacugcagccucaaccucccagguucaa

SEQ ID NO: 194338 - RNA, 24 nt, Human
ggcucacugcagccucaaccuccu

SEQ ID NO: 194339 - RNA, 32 nt, Human
ggcucacugcagccucaaccuccugagcucaa

SEQ ID NO: 194340 - RNA, 32 nt, Human
ggcucacugcagccucaaccuccuggacucag

SEQ ID NO: 194341 - RNA, 32 nt, Human
ggcucacugcagccucaaccuccugggcuaag

SEQ ID NO: 194342 - RNA, 32 nt, Human
ggcucacugcagccucaaccuccugggcucaa

SEQ ID NO: 194343 - RNA, 24 nt, Human
ggcucacugcagccucaaccugcu

SEQ ID NO: 194344 - RNA, 24 nt, Human
ggcucacugcagccucaaccuucu

SEQ ID NO: 194345 - RNA, 23 nt, Human
ggcucacugcagccucaacuucc

SEQ ID NO: 194346 - RNA, 24 nt, Human
ggcucacugcagccucagcguccu

SEQ ID NO: 194347 - RNA, 23 nt, Human
ggcucacugcagccuccaccucc

SEQ ID NO: 194348 - RNA, 32 nt, Human
ggcucacugcagccuccaccucccaggcucaa

SEQ ID NO: 194349 - RNA, 32 nt, Human
ggcucacugcagccuccaccucccagguucaa

SEQ ID NO: 194350 - RNA, 32 nt, Human
ggcucacugcagccuccaccuccccgguucca

SEQ ID NO: 194351 - RNA, 32 nt, Human
ggcucacugcagccuccaccucccggguucaa

SEQ ID NO: 194352 - RNA, 24 nt, Human
ggcucacugcagccuccaccuccu

SEQ ID NO: 194353 - RNA, 32 nt, Human
ggcucacugcagccuccaccuccugggcucaa

SEQ ID NO: 194354 - RNA, 32 nt, Human
ggcucacugcagccuccaccuccugggcucuc

SEQ ID NO: 194355 - RNA, 32 nt, Human
ggcucacugcagccuccaccuccuugacucgc

SEQ ID NO: 194356 - RNA, 32 nt, Human
ggcucacugcagccuccaucucccggggcuca

SEQ ID NO: 194357 - RNA, 23 nt, Human
ggcucacugcagccuccgccucc

SEQ ID NO: 194358 - RNA, 32 nt, Human
ggcucacugcagccuccgccucccagguucaa

SEQ ID NO: 194359 - RNA, 32 nt, Human
ggcucacugcagccuccgccucccggguucaa

SEQ ID NO: 194360 - RNA, 32 nt, Human
ggcucacugcagccuccgccucccguauucaa

SEQ ID NO: 194361 - RNA, 32 nt, Human
ggcucacugcagccuccgccucccugguucaa

SEQ ID NO: 194362 - RNA, 32 nt, Human
ggcucacugcagccuccgccugccgggucaag

SEQ ID NO: 194363 - RNA, 32 nt, Human
ggcucacugcagccuccgccuucuggguucaa

SEQ ID NO: 194364 - RNA, 32 nt, Human
ggcucacugcagccuccuucuccuggguccaa

SEQ ID NO: 194365 - RNA, 32 nt, Human
ggcucacugcagccucgaacuccugggcucaa

SEQ ID NO: 194366 - RNA, 23 nt, Human
ggcucacugcagccucgaccucc

SEQ ID NO: 194367 - RNA, 32 nt, Human
ggcucacugcagccucgaccucccaggcucaa

SEQ ID NO: 194368 - RNA, 24 nt, Human
ggcucacugcagccucgaccuccu

SEQ ID NO: 194369 - RNA, 32 nt, Human
ggcucacugcagccucgaccuccugggcucaa

SEQ ID NO: 194370 - RNA, 32 nt, Human
ggcucacugcagccucgagcuccugagcucaa

SEQ ID NO: 194371 - RNA, 23 nt, Human
ggcucacugcagccucuaccucc

SEQ ID NO: 194372 - RNA, 23 nt, Human
ggcucacugcagccucugccucc

SEQ ID NO: 194373 - RNA, 32 nt, Human
ggcucacugcagccucugccucccaggcucaa

SEQ ID NO: 194374 - RNA, 32 nt, Human
ggcucacugcagccucugccucccagguucaa

SEQ ID NO: 194375 - RNA, 32 nt, Human
ggcucacugcagccucugccucccggguucaa

SEQ ID NO: 194376 - RNA, 24 nt, Human
ggcucacugcagccucugccuccu

SEQ ID NO: 194377 - RNA, 32 nt, Human
ggcucacugcagccucugccuccugaguagcu

SEQ ID NO: 194378 - RNA, 32 nt, Human
ggcucacugcagccucugccuccuggguucaa

SEQ ID NO: 194379 - RNA, 32 nt, Human
ggcucacugcagccucugccuccuggguucca

SEQ ID NO: 194380 - RNA, 23 nt, Human
ggcucacugcagccugcgccucc

SEQ ID NO: 194381 - RNA, 32 nt, Human
ggcucacugcagccugcgccucccagcgucca

SEQ ID NO: 194382 - RNA, 32 nt, Human
ggcucacugcagccuggaccuccugguucaag

SEQ ID NO: 194383 - RNA, 32 nt, Human
ggcucacugcagccuggagcuccugggcacaa

SEQ ID NO: 194384 - RNA, 23 nt, Human
ggcucacugcagccuucaccucc

SEQ ID NO: 194385 - RNA, 32 nt, Human
ggcucacugcagccuucaccucccggguucaa

SEQ ID NO: 194386 - RNA, 23 nt, Human
ggcucacugcagccuucgccucc

SEQ ID NO: 194387 - RNA, 32 nt, Human
ggcucacugcagccuucgccucccggguucaa

SEQ ID NO: 194388 - RNA, 32 nt, Human
ggcucacugcagccuugaacucccagacucaa

SEQ ID NO: 194389 - RNA, 32 nt, Human
ggcucacugcagccuugaacuccugagcucaa

SEQ ID NO: 194390 - RNA, 32 nt, Human
ggcucacugcagccuugaccucccaggcucaa

SEQ ID NO: 194391 - RNA, 32 nt, Human
ggcucacugcagccuugacuucccaggcucag

SEQ ID NO: 194392 - RNA, 32 nt, Human
ggcucacugcagccuuugccucccggguucaa

SEQ ID NO: 194393 - RNA, 21 nt, Human
ggcucacugcagcgcgcuccu

SEQ ID NO: 194394 - RNA, 32 nt, Human
ggcucacugcagcuuaagcucacugccugggc

SEQ ID NO: 194395 - RNA, 32 nt, Human
ggcucacugcagcuucaaacuccugggcucaa

SEQ ID NO: 194396 - RNA, 32 nt, Human
ggcucacugcagcuuugacuucccaggcucaa

SEQ ID NO: 194397 - RNA, 23 nt, Human
ggcucacugcaggcucugccucc

SEQ ID NO: 194398 - RNA, 32 nt, Human
ggcucacugcaggcucugccucccgguuucaa

SEQ ID NO: 194399 - RNA, 24 nt, Human
ggcucacugcaggcucugccuccu

SEQ ID NO: 194400 - RNA, 32 nt, Human
ggcucacugcaggcucugccuccuggguucac

SEQ ID NO: 194401 - RNA, 24 nt, Human
ggcucacugcagucuccaccuccu

SEQ ID NO: 194402 - RNA, 23 nt, Human
ggcucacugcagucucgaccucc

SEQ ID NO: 194403 - RNA, 32 nt, Human
ggcucacugcagucucugccucccagauggaa

SEQ ID NO: 194404 - RNA, 32 nt, Human
ggcucacugcagucucugccucccaggcucaa

SEQ ID NO: 194405 - RNA, 23 nt, Human
ggcucacugcagucuucaccucc

SEQ ID NO: 194406 - RNA, 23 nt, Human
ggcucacugcaguuucaaccucc

SEQ ID NO: 194407 - RNA, 32 nt, Human
ggcucacugcaguuucaaccucccagauucca

SEQ ID NO: 194408 - RNA, 23 nt, Human
ggcucacugcaguuuugaccucc

SEQ ID NO: 194409 - RNA, 32 nt, Human
ggcucacugcaguuuugaccucccaggcucaa

SEQ ID NO: 194410 - RNA, 24 nt, Human
ggcucacugcauccucaaccuccu

SEQ ID NO: 194411 - RNA, 32 nt, Human
ggcucacugcauccucaaccuccuggguucag

SEQ ID NO: 194412 - RNA, 24 nt, Human
ggcucacugcauccuccaccuccu

SEQ ID NO: 194413 - RNA, 32 nt, Human
ggcucacugcauccuccaccuccuggguucaa

SEQ ID NO: 194414 - RNA, 23 nt, Human
ggcucacugcauccuccgccucc

SEQ ID NO: 194415 - RNA, 32 nt, Human
ggcucacugcauccuccgccucccggguucaa

SEQ ID NO: 194416 - RNA, 32 nt, Human
ggcucacugcauccuccgccuuccagguuuaa

SEQ ID NO: 194417 - RNA, 23 nt, Human
ggcucacugcauccucugccucc

SEQ ID NO: 194418 - RNA, 32 nt, Human
ggcucacugcauccucugccucccggguucaa

SEQ ID NO: 194419 - RNA, 24 nt, Human
ggcucacugcauccucugccuccu

SEQ ID NO: 194420 - RNA, 32 nt, Human
ggcucacugcauccucugccuccuggguucaa

SEQ ID NO: 194421 - RNA, 32 nt, Human
ggcucacugcaucuccggcuccuggacucaag

SEQ ID NO: 194422 - RNA, 23 nt, Human
ggcucacugcaucuuccgccucc

SEQ ID NO: 194423 - RNA, 32 nt, Human
ggcucacugcaucuuccgccucccggguucaa

SEQ ID NO: 194424 - RNA, 21 nt, Human
ggcucacugcaugcagccccu

SEQ ID NO: 194425 - RNA, 23 nt, Human
ggcucacugcaugcagccccugg

SEQ ID NO: 194426 - RNA, 32 nt, Human
ggcucacugcaugcucugccacuuggguucaa

SEQ ID NO: 194427 - RNA, 32 nt, Human
ggcucacugccaccccucuuugguccagcugu

SEQ ID NO: 194428 - RNA, 23 nt, Human
ggcucacugccaccuccaccucc

SEQ ID NO: 194429 - RNA, 32 nt, Human
ggcucacugccaccucugccucccagguucaa

SEQ ID NO: 194430 - RNA, 32 nt, Human
ggcucacugccaggccagccuccgagagggag

SEQ ID NO: 194431 - RNA, 23 nt, Human
ggcucacugccgccucaaccucu

SEQ ID NO: 194432 - RNA, 32 nt, Human
ggcucacugccuccuguuccagcuccugcugc

SEQ ID NO: 194433 - RNA, 32 nt, Human
ggcucacugcgaccuccgucucccgggcucac

SEQ ID NO: 194434 - RNA, 24 nt, Human
ggcucacugcgaccucggccuccu

SEQ ID NO: 194435 - RNA, 32 nt, Human
ggcucacugcgaccucggccuccuggauucaa

SEQ ID NO: 194436 - RNA, 32 nt, Human
ggcucacugcgaccucugccucccagguucaa

SEQ ID NO: 194437 - RNA, 32 nt, Human
ggcucacugcgaccucugcuuccuggguucaa

SEQ ID NO: 194438 - RNA, 32 nt, Human
ggcucacugcgagcuccaccucucggguucac

SEQ ID NO: 194439 - RNA, 32 nt, Human
ggcucacugcgagcucugccuccuggguucaa

SEQ ID NO: 194440 - RNA, 32 nt, Human
ggcucacugcggccucugccucccggcuucaa

SEQ ID NO: 194441 - RNA, 32 nt, Human
ggcucacugcuaccuccgccucccagguucag

SEQ ID NO: 194442 - RNA, 20 nt, Human
ggcucacugcugcaaccucc

SEQ ID NO: 194443 - RNA, 32 nt, Human
ggcucacuggaacucaggcucaagcaauccuc

SEQ ID NO: 194444 - RNA, 24 nt, Human
ggcucacuguaaacucaagcuccu

SEQ ID NO: 194445 - RNA, 23 nt, Human
ggcucacuguaaccuccaccucc

SEQ ID NO: 194446 - RNA, 32 nt, Human
ggcucacuguaaccuccaccucccaggcucaa

SEQ ID NO: 194447 - RNA, 32 nt, Human
ggcucacuguaaccuccaccuccuggguucac

SEQ ID NO: 194448 - RNA, 32 nt, Human
ggcucacuguaaccuccgacuccuggguucaa

SEQ ID NO: 194449 - RNA, 23 nt, Human
ggcucacuguaaccuccgccucc

SEQ ID NO: 194450 - RNA, 32 nt, Human
ggcucacuguaaccuccgccucccagguucaa

SEQ ID NO: 194451 - RNA, 32 nt, Human
ggcucacuguaaccuccgccucccggguucaa

SEQ ID NO: 194452 - RNA, 24 nt, Human
ggcucacuguaaccuccgccuccu

SEQ ID NO: 194453 - RNA, 32 nt, Human
ggcucacuguaaccuccgccuccugaauucaa

SEQ ID NO: 194454 - RNA, 32 nt, Human
ggcucacuguaaccuccgccuccuggguucaa

SEQ ID NO: 194455 - RNA, 23 nt, Human
ggcucacuguaaccucugccucc

SEQ ID NO: 194456 - RNA, 32 nt, Human
ggcucacuguaaccucugccuccaggauucaa

SEQ ID NO: 194457 - RNA, 32 nt, Human
ggcucacuguaaccucugccucccaggcucga

SEQ ID NO: 194458 - RNA, 32 nt, Human
ggcucacuguaaccucugccucccaguucaag

SEQ ID NO: 194459 - RNA, 32 nt, Human
ggcucacuguaaccucugccuccugccucccg

SEQ ID NO: 194460 - RNA, 32 nt, Human
ggcucacuguaaccuucaccuacuggguucaa

SEQ ID NO: 194461 - RNA, 32 nt, Human
ggcucacuguaacuuccacuugccaggcucaa

SEQ ID NO: 194462 - RNA, 23 nt, Human
ggcucacuguaagcuccgccucc

SEQ ID NO: 194463 - RNA, 32 nt, Human
ggcucacuguaagcuccgccucccggguucac

SEQ ID NO: 194464 - RNA, 24 nt, Human
ggcucacuguaaucuccgccuccu

SEQ ID NO: 194465 - RNA, 32 nt, Human
ggcucacuguaaucuccgccuccuggguucaa

SEQ ID NO: 194466 - RNA, 32 nt, Human
ggcucacuguagccacaaccucucaggcucaa

SEQ ID NO: 194467 - RNA, 24 nt, Human
ggcucacuguagccucaaccugcc

SEQ ID NO: 194468 - RNA, 23 nt, Human
ggcucacuguagccuccaccucc

SEQ ID NO: 194469 - RNA, 32 nt, Human
ggcucacuguagccucgaccuccugggcucaa

SEQ ID NO: 194470 - RNA, 23 nt, Human
ggcucacuguagccucugccucc

SEQ ID NO: 194471 - RNA, 24 nt, Human
ggcucacuguagucucaaccuccu

SEQ ID NO: 194472 - RNA, 32 nt, Human
ggcucacuguagucucaaccuccugggcucaa

SEQ ID NO: 194473 - RNA, 23 nt, Human
ggcucacuguagucucgaccucc

SEQ ID NO: 194474 - RNA, 32 nt, Human
ggcucacuguagucucgaccucccaggcucaa

SEQ ID NO: 194475 - RNA, 24 nt, Human
ggcucacugugaccuccgccuccu

SEQ ID NO: 194476 - RNA, 32 nt, Human
ggcucacugugaccuccgccucucggguucaa

SEQ ID NO: 194477 - RNA, 32 nt, Human
ggcucacugugaccucugccuccuggguuuaa

SEQ ID NO: 194478 - RNA, 32 nt, Human
ggcucacuguucgcaggggagcauuuuggaac

SEQ ID NO: 194479 - RNA, 32 nt, Human
ggcucacuucaaacuccgccucccggguucaa

SEQ ID NO: 194480 - RNA, 32 nt, Human
ggcucacuucaaccuccgcccccaagguucaa

SEQ ID NO: 194481 - RNA, 32 nt, Human
ggcucacuucuuuggugauacacuguagccac

SEQ ID NO: 194482 - RNA, 32 nt, Human
ggcucacuuuaaccuccacuucccugguucaa

SEQ ID NO: 194483 - RNA, 31 nt, Human
ggcucagaaauaauugcucuguugaaaauaa

SEQ ID NO: 194484 - RNA, 21 nt, Human
ggcucagaacacggccaggua

SEQ ID NO: 194485 - RNA, 32 nt, Human
ggcucagaagacacaggagcugcccugggugu

SEQ ID NO: 194486 - RNA, 32 nt, Human
ggcucagaagcacagcagcgccaucuuuccgu

SEQ ID NO: 194487 - RNA, 32 nt, Human
ggcucagaagcaggggccacagcuggaguaaa

SEQ ID NO: 194488 - RNA, 32 nt, Human
ggcucagaagccagcuacccagcuucgacugu

SEQ ID NO: 194489 - RNA, 21 nt, Human
ggcucagaaggcagcaucacc

SEQ ID NO: 194490 - RNA, 21 nt, Human
ggcucagacacugggcuccca

SEQ ID NO: 194491 - RNA, 32 nt, Human
ggcucagaccuauaaucccagcacuuugggag

SEQ ID NO: 194492 - RNA, 22 nt, Human
ggcucagaccucauuucaggca

SEQ ID NO: 194493 - RNA, 32 nt, Human
ggcucagaccuguaaucccagaacuuugggag

SEQ ID NO: 194494 - RNA, 32 nt, Human
ggcucagagaauaaagguagcuaaucucauca

SEQ ID NO: 194495 - RNA, 32 nt, Human
ggcucagagacaagcagaaucucucuauggag

SEQ ID NO: 194496 - RNA, 31 nt, Human
ggcucagagagaccugguguugacucuggaa

SEQ ID NO: 194497 - RNA, 32 nt, Human
ggcucagagcaaccuccagccuucuccagcag

SEQ ID NO: 194498 - RNA, 32 nt, Human
ggcucagagccaccccugcacccccggcacac

SEQ ID NO: 194499 - RNA, 21 nt, Human
ggcucagagcccucugccuca

SEQ ID NO: 194500 - RNA, 32 nt, Human
ggcucagaggcaggcgaggucccugauucacu

SEQ ID NO: 194501 - RNA, 32 nt, Human
ggcucagagggaccucaccccugagcagguca

SEQ ID NO: 194502 - RNA, 18 nt, Human
ggcucagagggcuacaga

SEQ ID NO: 194503 - RNA, 16 nt, Human
ggcucagaggggguag

SEQ ID NO: 194504 - RNA, 32 nt, Human
ggcucagaguccaauguaccauguugcccaga

SEQ ID NO: 194505 - RNA, 32 nt, Human
ggcucagagugcaggccguggggcgcgagggu

SEQ ID NO: 194506 - RNA, 20 nt, Human
ggcucagaucuggccaggug

SEQ ID NO: 194507 - RNA, 24 nt, Human
ggcucagaugguccuccugccuca

SEQ ID NO: 194508 - RNA, 32 nt, Human
ggcucagcaaacagcccucccucccaguauuu

SEQ ID NO: 194509 - RNA, 32 nt, Human
ggcucagcaaauucaaucccacccuuaccaau

SEQ ID NO: 194510 - RNA, 31 nt, Human
ggcucagcaaugucuucgaccacguggugag

SEQ ID NO: 194511 - RNA, 32 nt, Human
ggcucagcacagaaagaggaaggacagcacag

SEQ ID NO: 194512 - RNA, 32 nt, Human
ggcucagcacgaccacacaggacacccagcca

SEQ ID NO: 194513 - RNA, 32 nt, Human
ggcucagcagaggugggaucccacgcccccuc

SEQ ID NO: 194514 - RNA, 18 nt, Human
ggcucagcagccagagga

SEQ ID NO: 194515 - RNA, 32 nt, Human
ggcucagcagcgcaacugcgaggacaugaucc

SEQ ID NO: 194516 - RNA, 32 nt, Human
ggcucagcagcuccugaguuccuaaugcucag

SEQ ID NO: 194517 - RNA, 18 nt, Human
ggcucagcaggggggcag

SEQ ID NO: 194518 - RNA, 19 nt, Human
ggcucagcauggccaggug

SEQ ID NO: 194519 - RNA, 20 nt, Human
ggcucagcaugggcucagca

SEQ ID NO: 194520 - RNA, 32 nt, Human
ggcucagccaaugcugcccagccugagggucc

SEQ ID NO: 194521 - RNA, 32 nt, Human
ggcucagccagaaccucuugguguacccgaua

SEQ ID NO: 194522 - RNA, 32 nt, Human
ggcucagccauguccccuccccagguccuuca

SEQ ID NO: 194523 - RNA, 32 nt, Human
ggcucagcccaccccuccaccucucucucgau

SEQ ID NO: 194524 - RNA, 22 nt, Human
ggcucagcccaggccaccaacu

SEQ ID NO: 194525 - RNA, 19 nt, Human
ggcucagccccggcggcag

SEQ ID NO: 194526 - RNA, 32 nt, Human
ggcucagccuccagauuaacugggucucacuc

SEQ ID NO: 194527 - RNA, 20 nt, Human
ggcucagccucuggguccag

SEQ ID NO: 194528 - RNA, 21 nt, Human
ggcucagccuuguaaucccag

SEQ ID NO: 194529 - RNA, 32 nt, Human
ggcucagcggggcugcaccaaggggccaagag

SEQ ID NO: 194530 - RNA, 32 nt, Human
ggcucagcucagcucuccuccucuagcucaau

SEQ ID NO: 194531 - RNA, 32 nt, Human
ggcucagcugaccgagcggaaagccagagggg

SEQ ID NO: 194532 - RNA, 32 nt, Human
ggcucagcugcuucagggaaugugucccuccc

SEQ ID NO: 194533 - RNA, 32 nt, Human
ggcucagcuucuaaucccagcacuuugguagg

SEQ ID NO: 194534 - RNA, 18 nt, Human
ggcucagcuuggauuugu

SEQ ID NO: 194535 - RNA, 32 nt, Human
ggcucaggaaaacgggaccggccaggccaccu

SEQ ID NO: 194536 - RNA, 32 nt, Human
ggcucaggaaccacacugagcuugagauacug

SEQ ID NO: 194537 - RNA, 32 nt, Human
ggcucaggacagccacucacccucucugugcu

SEQ ID NO: 194538 - RNA, 20 nt, Human
ggcucaggacguuuuaccca

SEQ ID NO: 194539 - RNA, 17 nt, Human
ggcucaggacuagagga

SEQ ID NO: 194540 - RNA, 32 nt, Human
ggcucaggagagaagggagcagcuggcaugug

SEQ ID NO: 194541 - RNA, 21 nt, Human
ggcucaggagcccuaccuccc

SEQ ID NO: 194542 - RNA, 18 nt, Human
ggcucaggagcucauaga

SEQ ID NO: 194543 - RNA, 21 nt, Human
ggcucaggauguccacaucca

SEQ ID NO: 194544 - RNA, 32 nt, Human
ggcucaggauuccgcuggaagaaucucagcca

SEQ ID NO: 194545 - RNA, 24 nt, Human
ggcucaggcaauccuccugccuca

SEQ ID NO: 194546 - RNA, 32 nt, Human
ggcucaggcacucgggaacacacacaugaaau

SEQ ID NO: 194547 - RNA, 21 nt, Human
ggcucaggcagacucaccuca

SEQ ID NO: 194548 - RNA, 32 nt, Human
ggcucaggcagguccugugcugugcugcaggc

SEQ ID NO: 194549 - RNA, 32 nt, Human
ggcucaggccagcauccuagggagcuugaguc

SEQ ID NO: 194550 - RNA, 32 nt, Human
ggcucaggccccguaccgugugcaaugggcgg

SEQ ID NO: 194551 - RNA, 32 nt, Human
ggcucaggccuauaaucccaguacuuugggag

SEQ ID NO: 194552 - RNA, 18 nt, Human
ggcucaggccugggucua

SEQ ID NO: 194553 - RNA, 32 nt, Human
ggcucaggccuggucauugccuccucagcacu

SEQ ID NO: 194554 - RNA, 32 nt, Human
ggcucaggccuguaaccccaguacuuugggag

SEQ ID NO: 194555 - RNA, 32 nt, Human
ggcucaggccuguaaccucagcacuuugguga

SEQ ID NO: 194556 - RNA, 32 nt, Human
ggcucaggccuguaaucccaacacuuugggag

SEQ ID NO: 194557 - RNA, 32 nt, Human
ggcucaggccuguaaucccaacccuuuggaag

SEQ ID NO: 194558 - RNA, 32 nt, Human
ggcucaggccuguaaucccagcacucugggag

SEQ ID NO: 194559 - RNA, 32 nt, Human
ggcucaggccuguaaucccagcacugugggag

SEQ ID NO: 194560 - RNA, 32 nt, Human
ggcucaggccuguaaucccagcacuucaggaa

SEQ ID NO: 194561 - RNA, 32 nt, Human
ggcucaggccuguaaucccagcacuuuccaag

SEQ ID NO: 194562 - RNA, 32 nt, Human
ggcucaggccuguaaucccagcacuuugggaa

SEQ ID NO: 194563 - RNA, 32 nt, Human
ggcucaggccuguaaucccagcacuuugggag

SEQ ID NO: 194564 - RNA, 32 nt, Human
ggcucaggccuguaaucccagcauuuucagag

SEQ ID NO: 194565 - RNA, 32 nt, Human
ggcucaggccuguaaucccagcauuuugggag

SEQ ID NO: 194566 - RNA, 32 nt, Human
ggcucaggccuguaaucccagcuacuagggag

SEQ ID NO: 194567 - RNA, 32 nt, Human
ggcucaggccuguaauccuaacacuuugggag

SEQ ID NO: 194568 - RNA, 32 nt, Human
ggcucaggccuguaauccuggcacuuugggag

SEQ ID NO: 194569 - RNA, 32 nt, Human
ggcucaggccugugaucccagcacuuugggag

SEQ ID NO: 194570 - RNA, 17 nt, Human
ggcucaggcgcugccca

SEQ ID NO: 194571 - RNA, 18 nt, Human
ggcucaggcggccccacc

SEQ ID NO: 194572 - RNA, 20 nt, Human
ggcucaggcggggcauccua

SEQ ID NO: 194573 - RNA, 22 nt, Human
ggcucaggcucagagccucuca

SEQ ID NO: 194574 - RNA, 32 nt, Human
ggcucaggcugcagaacagcguagaccaggga

SEQ ID NO: 194575 - RNA, 23 nt, Human
ggcucaggcuggcccccacauca

SEQ ID NO: 194576 - RNA, 20 nt, Human
ggcucaggcugucagaguga

SEQ ID NO: 194577 - RNA, 32 nt, Human
ggcucagggaacaguugauaucaacagucucu

SEQ ID NO: 194578 - RNA, 21 nt, Human
ggcucagggagcaggaggcug

SEQ ID NO: 194579 - RNA, 32 nt, Human
ggcucagggaugaccuugcccauagccuuggc

SEQ ID NO: 194580 - RNA, 32 nt, Human
ggcucagggccaggcuguugaccugagaacac

SEQ ID NO: 194581 - RNA, 32 nt, Human
ggcucagggccccugacugcauggugcaugag

SEQ ID NO: 194582 - RNA, 32 nt, Human
ggcucagggccuuccccacagaucuaaggacu

SEQ ID NO: 194583 - RNA, 32 nt, Human
ggcucagggcuggaacugcugccugauuccug

SEQ ID NO: 194584 - RNA, 23 nt, Human
ggcucaggggacuguccaccuca

SEQ ID NO: 194585 - RNA, 24 nt, Human
ggcucagguaaucuucccacuuca

SEQ ID NO: 194586 - RNA, 32 nt, Human
ggcucaggucugucccgcugcccugggcacga

SEQ ID NO: 194587 - RNA, 32 nt, Human
ggcuuaugccuguaauccuagaacuuugggag

SEQ ID NO: 194588 - RNA, 32 nt, Human
ggcuuaugccuguaauccuagcgcuuugggag

SEQ ID NO: 194589 - RNA, 32 nt, Human
ggcuuaugccuguaauugcagcacuuuuagag

SEQ ID NO: 194590 - RNA, 32 nt, Human
ggcuuaugccuguagucgcagcuacucagaag

SEQ ID NO: 194591 - RNA, 32 nt, Human
ggcuuaugcuuguaaucccaacacuuagggag

SEQ ID NO: 194592 - RNA, 32 nt, Human
ggcuuaugcuuguaaucccagaacuuugggaa

SEQ ID NO: 194593 - RNA, 32 nt, Human
ggcuuaugcuuguaaucccagcacuuugggag

SEQ ID NO: 194594 - RNA, 23 nt, Human
ggcuuauggcaaccuccgccucc

SEQ ID NO: 194595 - RNA, 32 nt, Human
ggcuuauggcaaccuccgccucccggguucaa

SEQ ID NO: 194596 - RNA, 32 nt, Human
ggcuuauggguggagguugggaagaggaugaa

SEQ ID NO: 194597 - RNA, 32 nt, Human
ggcuuauugaagccucugccuccuggguucaa

SEQ ID NO: 194598 - RNA, 32 nt, Human
ggcuuauugcaaccuccgcuuccuggguucaa

SEQ ID NO: 194599 - RNA, 22 nt, Human
ggcuuauuggaugaaacagugu

SEQ ID NO: 194600 - RNA, 32 nt, Human
ggcuuauuucaggcugacagcuggacccucug

SEQ ID NO: 194601 - RNA, 32 nt, Human
ggcuuauuuuacaaggauguuggcaaacgaac

SEQ ID NO: 194602 - RNA, 32 nt, Human
ggcuucaaaccaccuggaaugcacagcucagg

SEQ ID NO: 194603 - RNA, 31 nt, Human
ggcuucaagaacacaaccuuaggaccuuggg

SEQ ID NO: 194604 - RNA, 25 nt, Human
ggcuucaagcaguccuccugccuca

SEQ ID NO: 194605 - RNA, 32 nt, Human
ggcuucaaggugguaacagagagagcugcaga

SEQ ID NO: 194606 - RNA, 24 nt, Human
ggcuucaagugauccucuugcuuu

SEQ ID NO: 194607 - RNA, 32 nt, Human
ggcuucaaugccuaucgguagcaagccaugga

SEQ ID NO: 194608 - RNA, 32 nt, Human
ggcuucaauuugaaggaggaggaaugauggga

SEQ ID NO: 194609 - RNA, 32 nt, Human
ggcuucacaacguguccugccggggcaacgag

SEQ ID NO: 194610 - RNA, 32 nt, Human
ggcuucacaagucacgagauggcaguuuugga

SEQ ID NO: 194611 - RNA, 32 nt, Human
ggcuucacaccaauacccuguguauacaagaa

SEQ ID NO: 194612 - RNA, 32 nt, Human
ggcuucacagccgcccucaccgcccggccuuc

SEQ ID NO: 194613 - RNA, 32 nt, Human
ggcuucacauggcauuugucugucucuguguc

SEQ ID NO: 194614 - RNA, 32 nt, Human
ggcuucaccgagauaaggaggugccacuguag

SEQ ID NO: 194615 - RNA, 32 nt, Human
ggcuucaccugacauuauggaccucagaccug

SEQ ID NO: 194616 - RNA, 32 nt, Human
ggcuucacgccuguaauucuagcacuuuggga

SEQ ID NO: 194617 - RNA, 32 nt, Human
ggcuucacucccaaaagugcagccaggcccug

SEQ ID NO: 194618 - RNA, 32 nt, Human
ggcuucacugcagcggccuccacccaccuauu

SEQ ID NO: 194619 - RNA, 32 nt, Human
ggcuucagagagggagaagcacugugaggccu

SEQ ID NO: 194620 - RNA, 32 nt, Human
ggcuucagagcaccuuccuagccauggacacg

SEQ ID NO: 194621 - RNA, 32 nt, Human
ggcuucagagguggaagauaaacagugacggg

SEQ ID NO: 194622 - RNA, 32 nt, Human
ggcuucagcacaacagacaccagccugugguc

SEQ ID NO: 194623 - RNA, 22 nt, Human
ggcuucagcaccgcgcccaugg

SEQ ID NO: 194624 - RNA, 17 nt, Human
ggcuucagcacugcagc

SEQ ID NO: 194625 - RNA, 32 nt, Human
ggcuucagcaggaagcccagggacagcagagc

SEQ ID NO: 194626 - RNA, 32 nt, Human
ggcuucagccaccacacccagccucauucaua

SEQ ID NO: 194627 - RNA, 32 nt, Human
ggcuucagccuccccaccuucuucagccaccu

SEQ ID NO: 194628 - RNA, 25 nt, Human
ggcuucagccugcuugcuuguggug

SEQ ID NO: 194629 - RNA, 19 nt, Human
ggcuucagcgagccgcagg

SEQ ID NO: 194630 - RNA, 19 nt, Human
ggcuucagcugccauggcc

SEQ ID NO: 194631 - RNA, 32 nt, Human
ggcuucagcugcguggucaccaaccgauucga

SEQ ID NO: 194632 - RNA, 19 nt, Human
ggcuucaggacgcgggagg

SEQ ID NO: 194633 - RNA, 32 nt, Human
ggcuucaggauuccaaagagagugagaguaga

SEQ ID NO: 194634 - RNA, 32 nt, Human
ggcuucaggcauggccaugagcaagaccagca

SEQ ID NO: 194635 - RNA, 21 nt, Human
ggcuucaggcugagguggcag

SEQ ID NO: 194636 - RNA, 23 nt, Human
ggcuucagggagggaaacugugu

SEQ ID NO: 194637 - RNA, 32 nt, Human
ggcuucaggugggacugcucagaaagugggcc

SEQ ID NO: 194638 - RNA, 23 nt, Human
ggcuucagugucuguucucugga

SEQ ID NO: 194639 - RNA, 32 nt, Human
ggcuucaguucauucccccaucuugcugccaa

SEQ ID NO: 194640 - RNA, 32 nt, Human
ggcuucaguuuggaauccaaaggcgacaacug

SEQ ID NO: 194641 - RNA, 21 nt, Human
ggcuucaguuuucucaucugu

SEQ ID NO: 194642 - RNA, 32 nt, Human
ggcuucauccuuuccauauucuuacucuuuac

SEQ ID NO: 194643 - RNA, 32 nt, Human
ggcuucaugaacuaggaugaaaggaggccccu

SEQ ID NO: 194644 - RNA, 32 nt, Human
ggcuucaugccucccuucucccagcucaggug

SEQ ID NO: 194645 - RNA, 31 nt, Human
ggcuucaugcugaggaagauucuugaagacu

SEQ ID NO: 194646 - RNA, 32 nt, Human
ggcuuccaaacuuuuccuggugauugaauucu

SEQ ID NO: 194647 - RNA, 32 nt, Human
ggcuuccaaguuccugggggcugcagugaaca

SEQ ID NO: 194648 - RNA, 32 nt, Human
ggcuuccacagcccuccucucccaagaaaucc

SEQ ID NO: 194649 - RNA, 21 nt, Human
ggcuuccacauccugggcuca

SEQ ID NO: 194650 - RNA, 32 nt, Human
ggcuuccacaucugcacaucugggagacaaau

SEQ ID NO: 194651 - RNA, 32 nt, Human
ggcuuccacccacgcaguguucuaagugaagg

SEQ ID NO: 194652 - RNA, 32 nt, Human
ggcuuccaccuggcacgugccugcugcuuccu

SEQ ID NO: 194653 - RNA, 32 nt, Human
ggcuuccaccuuuaacccuuccaccugggagc

SEQ ID NO: 194654 - RNA, 32 nt, Human
ggcuuccacugcauccuggccaggggacggag

SEQ ID NO: 194655 - RNA, 24 nt, Human
ggcuuccacuguuuggcuauccca

SEQ ID NO: 194656 - RNA, 32 nt, Human
ggcuuccagaaacaggauugccaaauuguccc

SEQ ID NO: 194657 - RNA, 32 nt, Human
ggcuuccagaagacaugcugcuauggucacug

SEQ ID NO: 194658 - RNA, 32 nt, Human
ggcuuccagagcuguggguagaggacaucgcc

SEQ ID NO: 194659 - RNA, 32 nt, Human
ggcuuccagcagggagcuuccccucuggcguc

SEQ ID NO: 194660 - RNA, 23 nt, Human
ggcuuccagcgggcccucugccg

SEQ ID NO: 194661 - RNA, 32 nt, Human
ggcuuccagcuggugugugaugggcagccuga

SEQ ID NO: 194662 - RNA, 32 nt, Human
ggcuuccaggagagcucaagcacuccgggggc

SEQ ID NO: 194663 - RNA, 32 nt, Human
ggcuuccaggcccugaggacauguggucaggu

SEQ ID NO: 194664 - RNA, 32 nt, Human
ggcuuccagggccaacucaaggaugugcaggu

SEQ ID NO: 194665 - RNA, 32 nt, Human
ggcuuccagguggaggugcggcuucagugcgc

SEQ ID NO: 194666 - RNA, 21 nt, Human
ggcuuccaucucagcacucug

SEQ ID NO: 194667 - RNA, 32 nt, Human
ggcuucccaaaccaagugccuugagcugccug

SEQ ID NO: 194668 - RNA, 21 nt, Human
ggcuucccaaaccacccagcc

SEQ ID NO: 194669 - RNA, 32 nt, Human
ggcuucccaaaguacugggauuauaggcuuga

SEQ ID NO: 194670 - RNA, 32 nt, Human
ggcuucccaaaguccugggauuacagguguga

SEQ ID NO: 194671 - RNA, 32 nt, Human
ggcuucccaaagugcucggauuacagguguga

SEQ ID NO: 194672 - RNA, 32 nt, Human
ggcuucccaaagugcugagauuacaggcaugg

SEQ ID NO: 194673 - RNA, 32 nt, Human
ggcuucccaaagugcugagauuacagguguga

SEQ ID NO: 194674 - RNA, 32 nt, Human
ggcuucccaaagugcuggaauuacaggccuga

SEQ ID NO: 194675 - RNA, 32 nt, Human
ggcuucccaaagugcugggauuacaggaauga

SEQ ID NO: 194676 - RNA, 32 nt, Human
ggcuucccaaagugcugggauuacaggcauga

SEQ ID NO: 194677 - RNA, 32 nt, Human
ggcuucccaaagugcugggauuacaggcguga

SEQ ID NO: 194678 - RNA, 32 nt, Human
ggcuucccaaagugcugggauuacaggcgugc

SEQ ID NO: 194679 - RNA, 32 nt, Human
ggcuucccaaagugcugggauuacaggcuuga

SEQ ID NO: 194680 - RNA, 32 nt, Human
ggcuucccaaagugcugggauuacgggcguga

SEQ ID NO: 194681 - RNA, 32 nt, Human
ggcuucccaaagugcugggauuauaggcagca

SEQ ID NO: 194682 - RNA, 32 nt, Human
ggcuucccaaagugcugggauuauaggcaugu

SEQ ID NO: 194683 - RNA, 32 nt, Human
ggcuucccaaagugcugggauugcaggcguga

SEQ ID NO: 194684 - RNA, 32 nt, Human
ggcuucccaaaguucugggauuacaggcauga

SEQ ID NO: 194685 - RNA, 32 nt, Human
ggcuucccaaggugcuggaauuacaggcguga

SEQ ID NO: 194686 - RNA, 32 nt, Human
ggcuucccaaguagcugggauuacaggcacgu

SEQ ID NO: 194687 - RNA, 23 nt, Human
ggcuucccaggaguuugagguug

SEQ ID NO: 194688 - RNA, 32 nt, Human
ggcuucccaggcccagagaagggagaaaguaa

SEQ ID NO: 194689 - RNA, 32 nt, Human
ggcuucccaggguuggggaggcugugggacca

SEQ ID NO: 194690 - RNA, 32 nt, Human
ggcuucccaucuuccacagagacaucucccug

SEQ ID NO: 194691 - RNA, 32 nt, Human
ggcuuccccaaaaugggcaacuucagcuuaag

SEQ ID NO: 194692 - RNA, 17 nt, Human
ggcuucccccaagacca

SEQ ID NO: 194693 - RNA, 32 nt, Human
ggcuucccccuggagcugggagagaggccggg

SEQ ID NO: 194694 - RNA, 32 nt, Human
ggcuuccccggccccugcuguggugcuagguc

SEQ ID NO: 194695 - RNA, 25 nt, Human
ggcuuccccuacaccccagccuccu

SEQ ID NO: 194696 - RNA, 17 nt, Human
ggcuuccccugcaccac

SEQ ID NO: 194697 - RNA, 32 nt, Human
ggcuuccccugcccucacuccccucuggcugg

SEQ ID NO: 194698 - RNA, 32 nt, Human
ggcuuccccugccuauccucuccgaucaccaa

SEQ ID NO: 194699 - RNA, 24 nt, Human
ggcuuccccuucgccgccgccgcc

SEQ ID NO: 194700 - RNA, 32 nt, Human
ggcuucccgaagugcugggauuauaggcguaa

SEQ ID NO: 194701 - RNA, 32 nt, Human
ggcuucccggcccccacugccugcggcauggc

SEQ ID NO: 194702 - RNA, 32 nt, Human
ggcuucccuaacuccuccccuugccccuacca

SEQ ID NO: 194703 - RNA, 32 nt, Human
ggcuucccuaacuuaguccaggaacacagccu

SEQ ID NO: 194704 - RNA, 32 nt, Human
ggcuucccucagcuccaacucuucucuuccgc

SEQ ID NO: 194705 - RNA, 32 nt, Human
ggcuucccuccaccaauccuggagcuaaaaga

SEQ ID NO: 194706 - RNA, 32 nt, Human
ggcuucccuccuccuccccugcagccugguua

SEQ ID NO: 194707 - RNA, 18 nt, Human
ggcuucccuccugcugcu

SEQ ID NO: 194708 - RNA, 25 nt, Human
ggcuucccugagccagcgaauugug

SEQ ID NO: 194709 - RNA, 21 nt, Human
ggcuucccugagugccugagu

SEQ ID NO: 194710 - RNA, 32 nt, Human
ggcuucccugcaggagccccaucuugucgcua

SEQ ID NO: 194711 - RNA, 32 nt, Human
ggcuucccugcucuuuccuuuuucccggcuuc

SEQ ID NO: 194712 - RNA, 22 nt, Human
ggcuucccuggacaaagaagac

SEQ ID NO: 194713 - RNA, 32 nt, Human
ggcuucccuuugacccucuuccuuccuuuccc

SEQ ID NO: 194714 - RNA, 23 nt, Human
ggcuuccgagcacgugcuggacc

SEQ ID NO: 194715 - RNA, 32 nt, Human
ggcuuccgcaagugcugggauuacaggcguga

SEQ ID NO: 194716 - RNA, 21 nt, Human
ggcuuccgcagccccccucca

SEQ ID NO: 194717 - RNA, 20 nt, Human
ggcuuccgcagcccccucca

SEQ ID NO: 194718 - RNA, 19 nt, Human
ggcuuccggaagcgcaggg

SEQ ID NO: 194719 - RNA, 32 nt, Human
ggcuuccggagcuguauuugcaguuuuguguu

SEQ ID NO: 194720 - RNA, 20 nt, Human
ggcuuccgguguggccggua

SEQ ID NO: 194721 - RNA, 32 nt, Human
ggcuuccgugaaagaccaugccuggucugcuc

SEQ ID NO: 194722 - RNA, 24 nt, Human
ggcuuccguggccagcagcccuag

SEQ ID NO: 194723 - RNA, 32 nt, Human
ggcuuccguucccagcgugcccagugagccgg

SEQ ID NO: 194724 - RNA, 32 nt, Human
ggcuuccuaaagugcugggauugcaggcguga

SEQ ID NO: 194725 - RNA, 32 nt, Human
ggcuuccuaaaguguugggauuacaggcuuga

SEQ ID NO: 194726 - RNA, 21 nt, Human
ggcuuccuacuggcccagggu

SEQ ID NO: 194727 - RNA, 32 nt, Human
ggcuuccucaaauacaugcacagucauacaag

SEQ ID NO: 194728 - RNA, 32 nt, Human
ggcuuccucacugcccugugacuuccaccugc

SEQ ID NO: 194729 - RNA, 21 nt, Human
ggcuuccucagccgcugucuc

SEQ ID NO: 194730 - RNA, 32 nt, Human
ggcuuccucauaggaagcacugaggguguguc

SEQ ID NO: 194731 - RNA, 32 nt, Human
ggcuuccucaugggagggcaugaggcuccacu

SEQ ID NO: 194732 - RNA, 32 nt, Human
ggcuuccuccacugcugaagacccugcuguag

SEQ ID NO: 194733 - RNA, 25 nt, Human
ggcuuccucccauccucccaucuca

SEQ ID NO: 194734 - RNA, 32 nt, Human
ggcuuccuccgucugcaaugucccuugcacag

SEQ ID NO: 194735 - RNA, 32 nt, Human
ggcuuccuccucccucucccgcccggccagcc

SEQ ID NO: 194736 - RNA, 32 nt, Human
ggcuuccuccuggaugugauggggauugccag

SEQ ID NO: 194737 - RNA, 32 nt, Human
ggcuuccucgcaagccucuccaucagcgcccu

SEQ ID NO: 194738 - RNA, 32 nt, Human
ggcuuccucucucucccuuccucucucucccu

SEQ ID NO: 194739 - RNA, 32 nt, Human
ggcuuccucucuguuaguccccaaauccuuac

SEQ ID NO: 194740 - RNA, 32 nt, Human
ggcuuccugaaggaugugggaugguggacucc

SEQ ID NO: 194741 - RNA, 32 nt, Human
ggcuuccugacggaggaguccggggacguguu

SEQ ID NO: 194742 - RNA, 32 nt, Human
ggcuuccugcagcugagaucuaugcaggccau

SEQ ID NO: 194743 - RNA, 23 nt, Human
ggcuuccugccgugccuggaacc

SEQ ID NO: 194744 - RNA, 32 nt, Human
ggcuuccugccucugcacgccaccccgugcac

SEQ ID NO: 194745 - RNA, 32 nt, Human
ggcuuccugccugguuuuucucuucucacauu

SEQ ID NO: 194746 - RNA, 32 nt, Human
ggcuuccuggaugacaguugggugauaugugu

SEQ ID NO: 194747 - RNA, 32 nt, Human
ggcuuccuggccagggcauuuucucugcggcc

SEQ ID NO: 194748 - RNA, 32 nt, Human
ggcuucgcagcccaaaaacaaaugguuaggcu

SEQ ID NO: 194749 - RNA, 24 nt, Human
ggcuucgcaggcacaucgacuaca

SEQ ID NO: 194750 - RNA, 25 nt, Human
ggcuucgcaguuccucuucugugaa

SEQ ID NO: 194751 - RNA, 32 nt, Human
ggcuucgccacaggaccuggaguuaucagggg

SEQ ID NO: 194752 - RNA, 32 nt, Human
ggcuucgcugcaggaauccggugucucaaugu

SEQ ID NO: 194753 - RNA, 32 nt, Human
ggcuucggagcugaggagcagcuguucugaug

SEQ ID NO: 194754 - RNA, 32 nt, Human
ggcuucgggcaggaccugucagcugggaggcc

SEQ ID NO: 194755 - RNA, 32 nt, Human
ggcuucgggccugcagccaccaugcuccacuc

SEQ ID NO: 194756 - RNA, 32 nt, Human
ggcuucggggaaauguggguuugcuggucucu

SEQ ID NO: 194757 - RNA, 32 nt, Human
ggcuucgucacugagaccucaggccucugcca

SEQ ID NO: 194758 - RNA, 18 nt, Human
ggcuucgugcaggagggc

SEQ ID NO: 194759 - RNA, 32 nt, Human
ggcuucgugcgccguucgcaccuggccaacca

SEQ ID NO: 194760 - RNA, 32 nt, Human
ggcuucguggccugcucucaggaaguggguca

SEQ ID NO: 194761 - RNA, 32 nt, Human
ggcuucuaaaggacagguguuugggagccucu

SEQ ID NO: 194762 - RNA, 24 nt, Human
ggcuucuaagcacccagcuaucuc

SEQ ID NO: 194763 - RNA, 32 nt, Human
ggcuucuaccaaagagaauggagaauugguug

SEQ ID NO: 194764 - RNA, 19 nt, Human
ggcuucuaccaggguccag

SEQ ID NO: 194765 - RNA, 32 nt, Human
ggcuucuagggaggccucaggaagcuuacagu

SEQ ID NO: 194766 - RNA, 16 nt, Human
ggcuucuauggccagg

SEQ ID NO: 194767 - RNA, 32 nt, Human
ggcuucucaacugcucggccucuugggccagg

SEQ ID NO: 194768 - RNA, 21 nt, Human
ggcuucucaggagcugucuca

SEQ ID NO: 194769 - RNA, 32 nt, Human
ggcuucuccaaagccaaagagcucucccggag

SEQ ID NO: 194770 - RNA, 32 nt, Human
ggcuucuccaccccaagucuggcuccauuccu

SEQ ID NO: 194771 - RNA, 32 nt, Human
ggcuucuccacuccugccccagaguguggagg

SEQ ID NO: 194772 - RNA, 32 nt, Human
ggcuucuccaucuuccucgucuggacgguggu

SEQ ID NO: 194773 - RNA, 32 nt, Human
ggcuucucccacgcagccccagaagaggacac

SEQ ID NO: 194774 - RNA, 32 nt, Human
ggcuucucccccucagcucucccucacaccuc

SEQ ID NO: 194775 - RNA, 32 nt, Human
ggcuucucccuuaagaagagagagauacuugu

SEQ ID NO: 194776 - RNA, 24 nt, Human
ggcuucuccggaucaguacaugca

SEQ ID NO: 194777 - RNA, 25 nt, Human
ggcuucuccugcaugggaguugugu

SEQ ID NO: 194778 - RNA, 32 nt, Human
ggcuucuccugccucagccucacgaguagcug

SEQ ID NO: 194779 - RNA, 32 nt, Human
ggcuucuccugccuccaucacaucacagaagu

SEQ ID NO: 194780 - RNA, 32 nt, Human
ggcuucuccuucagcccauccacucuccucua

SEQ ID NO: 194781 - RNA, 32 nt, Human
ggcuucucucaccuccauuagcucuuuaccuu

SEQ ID NO: 194782 - RNA, 32 nt, Human
ggcuucucucauuccauuuuguggcuaaccuu

SEQ ID NO: 194783 - RNA, 32 nt, Human
ggcuucucuccuccugcuggagugccaguccc

SEQ ID NO: 194784 - RNA, 32 nt, Human
ggcuucucuccucuguuuucaaugaacugcua

SEQ ID NO: 194785 - RNA, 22 nt, Human
ggcuucucugagguccacauca

SEQ ID NO: 194786 - RNA, 24 nt, Human
ggcuucucugaguugggguugugu

SEQ ID NO: 194787 - RNA, 32 nt, Human
ggcuucucugcagagcucugcuuccugcagcc

SEQ ID NO: 194788 - RNA, 32 nt, Human
ggcuucucugggucccacucucuggcugccuu

SEQ ID NO: 194789 - RNA, 32 nt, Human
ggcuucugaagaagaggaagggcgaguagggg

SEQ ID NO: 194790 - RNA, 32 nt, Human
ggcuucugaagaccccuccucaauuucuuggc

SEQ ID NO: 194791 - RNA, 32 nt, Human
ggcuucugacccuucaggcagggacaguucua

SEQ ID NO: 194792 - RNA, 21 nt, Human
ggcuucugaucccagccgcca

SEQ ID NO: 194793 - RNA, 32 nt, Human
ggcuucugauggucagcaucuuccccaacacu

SEQ ID NO: 194794 - RNA, 32 nt, Human
ggcuucugcagcagcagaguccugggugacca

SEQ ID NO: 194795 - RNA, 32 nt, Human
ggcuucugcauuaagcuuuccuggugaagacc

SEQ ID NO: 194796 - RNA, 32 nt, Human
ggcuucugccuaagccucucccuccagccaau

SEQ ID NO: 194797 - RNA, 32 nt, Human
ggcuucugccugaaaucccaguacucuggaag

SEQ ID NO: 194798 - RNA, 24 nt, Human
ggcuucugcuccgguaccuuguga

SEQ ID NO: 194799 - RNA, 32 nt, Human
ggcuucugcucugacuuuacugcagcuaguca

SEQ ID NO: 194800 - RNA, 17 nt, Human
ggcuucugcuggccagg

SEQ ID NO: 194801 - RNA, 22 nt, Human
ggcuucugcuguggcuauccca

SEQ ID NO: 194802 - RNA, 32 nt, Human
ggcuucuggaaccugaggcuuggccccgguug

SEQ ID NO: 194803 - RNA, 32 nt, Human
ggcuucuggccacugccuccucccucuucuaa

SEQ ID NO: 194804 - RNA, 29 nt, Human
ggcuucuggcugcccccuucccucccgcc

SEQ ID NO: 194805 - RNA, 32 nt, Human
ggcuucuggggcugggucccacaugcccuuga

SEQ ID NO: 194806 - RNA, 22 nt, Human
ggcuucuguaaaccgccaggua

SEQ ID NO: 194807 - RNA, 32 nt, Human
ggcuucuguaaucccagcuacuugggaggcug

SEQ ID NO: 194808 - RNA, 32 nt, Human
ggcuucuguccucugcuguucucugcugugug

SEQ ID NO: 194809 - RNA, 21 nt, Human
ggcuucugugguugucugaga

SEQ ID NO: 194810 - RNA, 32 nt, Human
ggcuucuguucucugcugagggccaauacccu

SEQ ID NO: 194811 - RNA, 32 nt, Human
ggcuucuucacgaagcuuagaguuuggccuuu

SEQ ID NO: 194812 - RNA, 32 nt, Human
ggcuucuucccaagacuuauuuuucccaucag

SEQ ID NO: 194813 - RNA, 32 nt, Human
ggcuucuugacuugccccuugugacuugaaac

SEQ ID NO: 194814 - RNA, 32 nt, Human
ggcuucuugagugagguggccuuugaacugaa

SEQ ID NO: 194815 - RNA, 32 nt, Human
ggcuucuugcccagguuucaaagcugaaguac

SEQ ID NO: 194816 - RNA, 31 nt, Human
ggcuucuuucacucugggcuguguuuaugag

SEQ ID NO: 194817 - RNA, 32 nt, Human
ggcuucuuucuccucggcccucggugaaccca

SEQ ID NO: 194818 - RNA, 32 nt, Human
ggcuugaaauguuacaucaccagagccaaguc

SEQ ID NO: 194819 - RNA, 19 nt, Human
ggcuugaacaagucacuua

SEQ ID NO: 194820 - RNA, 19 nt, Human
ggcuugaaccuaaucaggu

SEQ ID NO: 194821 - RNA, 17 nt, Human
ggcuugaaccugggagg

SEQ ID NO: 194822 - RNA, 19 nt, Human
ggcuugaaccugggaggug

SEQ ID NO: 194823 - RNA, 16 nt, Human
ggcuugaacuugccag

SEQ ID NO: 194824 - RNA, 20 nt, Human
ggcuugaauccgggcggcag

SEQ ID NO: 194825 - RNA, 32 nt, Human
ggcuugaccagguacaaggcccauggggaagg

SEQ ID NO: 194826 - RNA, 18 nt, Human
ggcuugacgcgccggaaa

SEQ ID NO: 194827 - RNA, 32 nt, Human
ggcuugagaacgaccuuucuuucuuuauuucu

SEQ ID NO: 194828 - RNA, 32 nt, Human
ggcuugagagacaccugcaucuauaauccccg

SEQ ID NO: 194829 - RNA, 32 nt, Human
ggcuugagagagccucagagacacgaaaugca

SEQ ID NO: 194830 - RNA, 32 nt, Human
ggcuugagaggagagcgcuggccaugccagga

SEQ ID NO: 194831 - RNA, 32 nt, Human
ggcuugagccaccacaccugaccuauucuugu

SEQ ID NO: 194832 - RNA, 32 nt, Human
ggcuugagccacugcaccuggccucaugucuc

SEQ ID NO: 194833 - RNA, 32 nt, Human
ggcuugagcucaggauguaaggcugcagagag

SEQ ID NO: 194834 - RNA, 32 nt, Human
ggcuugaggaagaagaaaaacgcuucggcauu

SEQ ID NO: 194835 - RNA, 32 nt, Human
ggcuugaggagaagaaaggaagaaaagauauc

SEQ ID NO: 194836 - RNA, 32 nt, Human
ggcuugaggcaggccguccuggagggggcucc

SEQ ID NO: 194837 - RNA, 32 nt, Human
ggcuugaggggaggggauggggagucgguguu

SEQ ID NO: 194838 - RNA, 24 nt, Human
ggcuugagguuccacaucugugaa

SEQ ID NO: 194839 - RNA, 32 nt, Human
ggcuugauagaguucccugaaaacuccuugua

SEQ ID NO: 194840 - RNA, 32 nt, Human
ggcuugauagaguucccugaaaacuccuuuua

SEQ ID NO: 194841 - RNA, 19 nt, Human
ggcuugaucacagcucccu

SEQ ID NO: 194842 - RNA, 32 nt, Human
ggcuugaugccuuucugaaggcgagagggaag

SEQ ID NO: 194843 - RNA, 18 nt, Human
ggcuugaugguggccagg

SEQ ID NO: 194844 - RNA, 32 nt, Human
ggcuugauugggagggcggugggagccaguaa

SEQ ID NO: 194845 - RNA, 29 nt, Human
ggcuugauugugagugugccugggaggau

SEQ ID NO: 194846 - RNA, 32 nt, Human
ggcuugcaaccagcagcugacugcuaagcuag

SEQ ID NO: 194847 - RNA, 32 nt, Human
ggcuugcaacccagagagagcagcuucccuug

SEQ ID NO: 194848 - RNA, 32 nt, Human
ggcuugcacacagcaggugcucagcaaaugcc

SEQ ID NO: 194849 - RNA, 32 nt, Human
ggcuugcaccaccacacacauaccuggucuca

SEQ ID NO: 194850 - RNA, 32 nt, Human
ggcuugcaccuguaaucccagcacuuugggag

SEQ ID NO: 194851 - RNA, 32 nt, Human
ggcuugcacugagggccuggcugcccagacag

SEQ ID NO: 194852 - RNA, 17 nt, Human
ggcuugcacuugggcca

SEQ ID NO: 194853 - RNA, 32 nt, Human
ggcuugcagagacuccuugcucccaggagaua

SEQ ID NO: 194854 - RNA, 23 nt, Human
ggcuugcaggcacuuuccucuug

SEQ ID NO: 194855 - RNA, 32 nt, Human
ggcuugcagggcaaugauggcaguccagguua

SEQ ID NO: 194856 - RNA, 32 nt, Human
ggcuugcaggggacaggagugggagcagggag

SEQ ID NO: 194857 - RNA, 32 nt, Human
ggcuugcagugagccaugaucaugccacugua

SEQ ID NO: 194858 - RNA, 19 nt, Human
ggcuugcaguguggccagg

SEQ ID NO: 194859 - RNA, 32 nt, Human
ggcuugcaucacgucacuccagugguucccuc

SEQ ID NO: 194860 - RNA, 32 nt, Human
ggcuugcauggauguagggcuuggggugggaa

SEQ ID NO: 194861 - RNA, 32 nt, Human
ggcuugccaaaacccacccagcuaauaagugc

SEQ ID NO: 194862 - RNA, 32 nt, Human
ggcuugccaagagguuggaagggaaauggcuc

SEQ ID NO: 194863 - RNA, 27 nt, Human
ggcuugccacacaguccccgccugcca

SEQ ID NO: 194864 - RNA, 19 nt, Human
ggcuugccaccaucuugga

SEQ ID NO: 194865 - RNA, 32 nt, Human
ggcuugccaccugaagcagccacugcccaggg

SEQ ID NO: 194866 - RNA, 32 nt, Human
ggcuugcccaaaaggcuggagagggcagggag

SEQ ID NO: 194867 - RNA, 32 nt, Human
ggcuugcccagauagacuaacaacccuuuagu

SEQ ID NO: 194868 - RNA, 32 nt, Human
ggcuugcccagcugggaggccccacacgaaag

SEQ ID NO: 194869 - RNA, 32 nt, Human
ggcuugcccaggaaaggggcugugcugucguc

SEQ ID NO: 194870 - RNA, 32 nt, Human
ggcuugcccaggcuggagugcgguggcuaguc

SEQ ID NO: 194871 - RNA, 19 nt, Human
ggcuugcccucugccugcc

SEQ ID NO: 194872 - RNA, 32 nt, Human
ggcuugccgcacucccccugaggugcccgccg

SEQ ID NO: 194873 - RNA, 32 nt, Human
ggcuugccucccuccuuccuccccucucaacc

SEQ ID NO: 194874 - RNA, 32 nt, Human
ggcuugccuccuccugcguccugcuagcuauu

SEQ ID NO: 194875 - RNA, 32 nt, Human
ggcuugccuccugccucuggauuuuagguguu

SEQ ID NO: 194876 - RNA, 32 nt, Human
ggcuugccugaacuuugggcauggaagaaaga

SEQ ID NO: 194877 - RNA, 32 nt, Human
ggcuugccugcaggcaugagucagucugauga

SEQ ID NO: 194878 - RNA, 18 nt, Human
ggcuugccuguaauccca

SEQ ID NO: 194879 - RNA, 20 nt, Human
ggcuugccuguaaucccagc

SEQ ID NO: 194880 - RNA, 32 nt, Human
ggcuugccuguaaucccagcacuuugggaggc

SEQ ID NO: 194881 - RNA, 32 nt, Human
ggcuugccuguggcccauaccccagcccuccu

SEQ ID NO: 194882 - RNA, 17 nt, Human
ggcuugcgcugggccag

SEQ ID NO: 194883 - RNA, 23 nt, Human
ggcuugcgggcaggggcugcagg

SEQ ID NO: 194884 - RNA, 32 nt, Human
ggcuugcgggcugucagcacucacugugggug

SEQ ID NO: 194885 - RNA, 32 nt, Human
ggcuugcuccaaugccacugagcccugcuccc

SEQ ID NO: 194886 - RNA, 32 nt, Human
ggcuugcuccucuauucuaccucucuuucucc

SEQ ID NO: 194887 - RNA, 32 nt, Human
ggcuugcucuucuccccggcccucagaggccu

SEQ ID NO: 194888 - RNA, 32 nt, Human
ggcuugcugaagaagggagaaaaagaacagca

SEQ ID NO: 194889 - RNA, 20 nt, Human
ggcuugcugaggcucacaga

SEQ ID NO: 194890 - RNA, 32 nt, Human
ggcuugcugcagccucaaccuccugggcucac

SEQ ID NO: 194891 - RNA, 32 nt, Human
ggcuugcuuggcaggcugggccucugugucac

SEQ ID NO: 194892 - RNA, 32 nt, Human
ggcuugcuuucaaauugugagcucuuuuuggu

SEQ ID NO: 194893 - RNA, 32 nt, Human
ggcuugcuuuccugcaucucugugaagccucu

SEQ ID NO: 194894 - RNA, 20 nt, Human
ggcuuggaaaagucaaguga

SEQ ID NO: 194895 - RNA, 32 nt, Human
ggcuuggaaauuugcauuucuaacacaaguuc

SEQ ID NO: 194896 - RNA, 32 nt, Human
ggcuuggaacauuugggagacugagcuugauu

SEQ ID NO: 194897 - RNA, 32 nt, Human
ggcuuggaaccagcucauauguuuggaggggu

SEQ ID NO: 194898 - RNA, 32 nt, Human
ggcuuggaacccaccccaccucccucauuggg

SEQ ID NO: 194899 - RNA, 18 nt, Human
ggcuuggaagaagaguga

SEQ ID NO: 194900 - RNA, 17 nt, Human
ggcuuggaagaggauga

SEQ ID NO: 194901 - RNA, 32 nt, Human
ggcuuggaaugaauucucucuaaaaauaaaau

SEQ ID NO: 194902 - RNA, 15 nt, Human
ggcuuggacagagug

SEQ ID NO: 194903 - RNA, 20 nt, Human
ggcuuggacagccccaguga

SEQ ID NO: 194904 - RNA, 17 nt, Human
ggcuuggacagcuguga

SEQ ID NO: 194905 - RNA, 19 nt, Human
ggcuuggacagugugugug

SEQ ID NO: 194906 - RNA, 20 nt, Human
ggcuuggacccauuugagga

SEQ ID NO: 194907 - RNA, 18 nt, Human
ggcuuggacuagagagga

SEQ ID NO: 194908 - RNA, 19 nt, Human
ggcuuggacugaggagcgg

SEQ ID NO: 194909 - RNA, 32 nt, Human
ggcuuggagagggagacagggccagacauguu

SEQ ID NO: 194910 - RNA, 17 nt, Human
ggcuuggagagugagug

SEQ ID NO: 194911 - RNA, 18 nt, Human
ggcuuggagcaagagaga

SEQ ID NO: 194912 - RNA, 32 nt, Human
ggcuuggagcacauaguugguucuuucuacug

SEQ ID NO: 194913 - RNA, 32 nt, Human
ggcuuggaggagcugggcucuaucccacaccc

SEQ ID NO: 194914 - RNA, 32 nt, Human
ggcuuggaggcugagguaggaggaucgccuga

SEQ ID NO: 194915 - RNA, 32 nt, Human
ggcuuggaggcugccuagagggacaggugggu

SEQ ID NO: 194916 - RNA, 20 nt, Human
ggcuuggaggcuggggguga

SEQ ID NO: 194917 - RNA, 32 nt, Human
ggcuuggaggcugggggugagucucaagauau

SEQ ID NO: 194918 - RNA, 32 nt, Human
ggcuuggagggaacuucccacucccauugccu

SEQ ID NO: 194919 - RNA, 32 nt, Human
ggcuuggaggggcacggaggagccgauugggg

SEQ ID NO: 194920 - RNA, 20 nt, Human
ggcuuggagggugaagagga

SEQ ID NO: 194921 - RNA, 18 nt, Human
ggcuuggagguggccagg

SEQ ID NO: 194922 - RNA, 19 nt, Human
ggcuuggaguuagagauga

SEQ ID NO: 194923 - RNA, 17 nt, Human
ggcuuggauaggcguga

SEQ ID NO: 194924 - RNA, 32 nt, Human
ggcuuggauuccugggccuggcccagguggcu

SEQ ID NO: 194925 - RNA, 32 nt, Human
ggcuuggcacacugccagugucuuagcagggu

SEQ ID NO: 194926 - RNA, 32 nt, Human
ggcuuggcaccggaguucauguucaauaaaua

SEQ ID NO: 194927 - RNA, 32 nt, Human
ggcuuggcacugccuuuuccuuucucaggcca

SEQ ID NO: 194928 - RNA, 32 nt, Human
ggcuuggcaucugcacuccagcccaggacugu

SEQ ID NO: 194929 - RNA, 32 nt, Human
ggcuuggccagcagaacacagaguagauuuug

SEQ ID NO: 194930 - RNA, 32 nt, Human
ggcuuggccugcaguaguagggagacaaguuc

SEQ ID NO: 194931 - RNA, 16 nt, Human
ggcuuggccugggguc

SEQ ID NO: 194932 - RNA, 32 nt, Human
ggcuuggcgagugccacaucuggcagguuugg

SEQ ID NO: 194933 - RNA, 19 nt, Human
ggcuuggcggaacugcggg

SEQ ID NO: 194934 - RNA, 20 nt, Human
ggcuuggcguccagcaauga

SEQ ID NO: 194935 - RNA, 32 nt, Human
ggcuuggcucaccgcaaccuccgccucccggg

SEQ ID NO: 194936 - RNA, 32 nt, Human
ggcuuggcucacugccaccccucuuuggucca

SEQ ID NO: 194937 - RNA, 32 nt, Human
ggcuuggcucacugcuaccuccgccucccagg

SEQ ID NO: 194938 - RNA, 32 nt, Human
ggcuuggcuccaccacuuuccucccccagccu

SEQ ID NO: 194939 - RNA, 32 nt, Human
ggcuuggcucggcgcccccaccccuggcuacc

SEQ ID NO: 194940 - RNA, 19 nt, Human
ggcuuggcugcagaguaga

SEQ ID NO: 194941 - RNA, 32 nt, Human
ggcuuggcugugguccugagaagcuucugugu

SEQ ID NO: 194942 - RNA, 22 nt, Human
ggcuuggcuuauuucacuuaca

SEQ ID NO: 194943 - RNA, 32 nt, Human
ggcuugggagagaccuguggcaccagguugga

SEQ ID NO: 194944 - RNA, 17 nt, Human
ggcuugggagcagaaug

SEQ ID NO: 194945 - RNA, 32 nt, Human
ggcuugggagcaucgccaugcccugccaccug

SEQ ID NO: 194946 - RNA, 19 nt, Human
ggcuugggagccaggauga

SEQ ID NO: 194947 - RNA, 32 nt, Human
ggcuugggccuaggcugcauugaaaagagcug

SEQ ID NO: 194948 - RNA, 17 nt, Human
ggcuugggcgagaguga

SEQ ID NO: 194949 - RNA, 18 nt, Human
ggcuugggcuccagagga

SEQ ID NO: 194950 - RNA, 32 nt, Human
ggcuugggcuccaggagggaggcugggaggca

SEQ ID NO: 194951 - RNA, 32 nt, Human
ggcuugggcuuccccagcgccccaccaccacc

SEQ ID NO: 194952 - RNA, 32 nt, Human
ggcuugggcuucccuuugacccucuuccuucc

SEQ ID NO: 194953 - RNA, 19 nt, Human
ggcuuggggaacagagaga

SEQ ID NO: 194954 - RNA, 17 nt, Human
ggcuuggggagcagagu

SEQ ID NO: 194955 - RNA, 20 nt, Human
ggcuuggggagccagaggga

SEQ ID NO: 194956 - RNA, 20 nt, Human
ggcuuggggcaacagauuga

SEQ ID NO: 194957 - RNA, 32 nt, Human
ggcuugggggcugaggcccagcggcccgagac

SEQ ID NO: 194958 - RNA, 32 nt, Human
ggcuugggggugugcaggcacagcagauggcc

SEQ ID NO: 194959 - RNA, 16 nt, Human
ggcuuggguaggggga

SEQ ID NO: 194960 - RNA, 21 nt, Human
ggcuugggucccccugcugcu

SEQ ID NO: 194961 - RNA, 32 nt, Human
ggcuugggugccugggcuggguguggggcagg

SEQ ID NO: 194962 - RNA, 32 nt, Human
ggcuugggugugagacagcagcgguggcagac

SEQ ID NO: 194963 - RNA, 32 nt, Human
ggcuuggguuuggagcugggaacagcacccac

SEQ ID NO: 194964 - RNA, 32 nt, Human
ggcuugguagcucugggauuugccuuccuuca

SEQ ID NO: 194965 - RNA, 18 nt, Human
ggcuuggucauaggguga

SEQ ID NO: 194966 - RNA, 17 nt, Human
ggcuugguccagaguga

SEQ ID NO: 194967 - RNA, 32 nt, Human
ggcuuggugacuggagcaaagcugcugugaga

SEQ ID NO: 194968 - RNA, 32 nt, Human
ggcuugguggccugagacaggggugacuugcc

SEQ ID NO: 194969 - RNA, 22 nt, Human
ggcuugguggcucacgccugua

SEQ ID NO: 194970 - RNA, 22 nt, Human
ggcuugguggcucaugccugua

SEQ ID NO: 194971 - RNA, 32 nt, Human
ggcuugguggugguagcauuugggucugagau

SEQ ID NO: 194972 - RNA, 32 nt, Human
ggcuugguucugccuggacgcacagcaugccu

SEQ ID NO: 194973 - RNA, 32 nt, Human
ggcuuguaaauacccgccccgccaaaccgcau

SEQ ID NO: 194974 - RNA, 32 nt, Human
ggcuuguaccaauuuacugacacugucuuaaa

SEQ ID NO: 194975 - RNA, 32 nt, Human
ggcuuguacccguaaucccagcacuuugggag

SEQ ID NO: 194976 - RNA, 22 nt, Human
ggcuuguagcuuuuuuacguca

SEQ ID NO: 194977 - RNA, 32 nt, Human
ggcuuguaugagugugacuggguguguuucuu

SEQ ID NO: 194978 - RNA, 32 nt, Human
ggcuuguauucaugggauacaggacagggaug

SEQ ID NO: 194979 - RNA, 22 nt, Human
ggcuugucauuuguguauuuag

SEQ ID NO: 194980 - RNA, 18 nt, Human
ggcuuguccaucccuuga

SEQ ID NO: 194981 - RNA, 32 nt, Human
ggcuuguccccuccucuuuccccuccccaggc

SEQ ID NO: 194982 - RNA, 20 nt, Human
ggcuugucuuccuaaugcua

SEQ ID NO: 194983 - RNA, 32 nt, Human
ggcuugucuugaacuccugaccuugagauauc

SEQ ID NO: 194984 - RNA, 32 nt, Human
ggcuugucuugagacguggcaaauucuccuug

SEQ ID NO: 194985 - RNA, 32 nt, Human
ggcuugugacccuggcuucccauguccuucug

SEQ ID NO: 194986 - RNA, 32 nt, Human
ggcuugugccuguaaucccagaacuuuggaag

SEQ ID NO: 194987 - RNA, 32 nt, Human
ggcuugugccuguagucccagcuacuugggag

SEQ ID NO: 194988 - RNA, 32 nt, Human
ggcuugugcucugcaaagacucugcugcuggg

SEQ ID NO: 194989 - RNA, 32 nt, Human
ggcuugugggaggcugggagguggcugucucc

SEQ ID NO: 194990 - RNA, 32 nt, Human
ggcuugugggguggcaggaugcaggagagagu

SEQ ID NO: 194991 - RNA, 32 nt, Human
ggcuuguggggugggagccagaguggaggucg

SEQ ID NO: 194992 - RNA, 32 nt, Human
ggcuuguguauccaugcaccuaccucagaaaa

SEQ ID NO: 194993 - RNA, 32 nt, Human
ggcuugugucugccaguacgacaaaggacgcu

SEQ ID NO: 194994 - RNA, 32 nt, Human
ggcuuguguguguauauaguguguuuggggga

SEQ ID NO: 194995 - RNA, 32 nt, Human
ggcuuguguucuguuccuuucacaaaagcucu

SEQ ID NO: 194996 - RNA, 21 nt, Human
ggcuuguuaaugucagaguga

SEQ ID NO: 194997 - RNA, 23 nt, Human
ggcuuguuacauuugucauuuaa

SEQ ID NO: 194998 - RNA, 29 nt, Human
ggcuuguuaugugcugugccuggacuugg

SEQ ID NO: 194999 - RNA, 32 nt, Human
ggcuuguucacuacuucugcuuuacaggcuuu

SEQ ID NO: 195000 - RNA, 32 nt, Human
ggcuuguuccuauagucccagcacuuugggag

SEQ ID NO: 195001 - RNA, 18 nt, Human
ggcuuguugagccaggua

SEQ ID NO: 195002 - RNA, 21 nt, Human
ggcuuguugcuuggcuuuuaa

SEQ ID NO: 195003 - RNA, 32 nt, Human
ggcuuguuuaaugcaguaccauuggagaguua

SEQ ID NO: 195004 - RNA, 32 nt, Human
ggcuuguuuccuggcccugcucaguugccucu

SEQ ID NO: 195005 - RNA, 19 nt, Human
ggcuuguuucucuccauug

SEQ ID NO: 195006 - RNA, 32 nt, Human
ggcuuguuugcagacugggugagguggagccc

SEQ ID NO: 195007 - RNA, 32 nt, Human
ggcuuguuuguuguuuucaccagagugagcuc

SEQ ID NO: 195008 - RNA, 32 nt, Human
ggcuuuaaaaaugcaugaaaccaccuuuaauu

SEQ ID NO: 195009 - RNA, 20 nt, Human
ggcuuuaaaacaugcucucu

SEQ ID NO: 195010 - RNA, 19 nt, Human
ggcuuuaaagagggggcag

SEQ ID NO: 195011 - RNA, 32 nt, Human
ggcuuuaacuaucuucucuauauuuuuauuuc

SEQ ID NO: 195012 - RNA, 32 nt, Human
ggcuuuaaucaccaacccaucaacaucaagcc

SEQ ID NO: 195013 - RNA, 18 nt, Human
ggcuuuaauuggguucag

SEQ ID NO: 195014 - RNA, 32 nt, Human
ggcuuuacagaugacucacuccauuccuaggu

SEQ ID NO: 195015 - RNA, 32 nt, Human
ggcuuuacaguguaaacugucuugccccuuca

SEQ ID NO: 195016 - RNA, 21 nt, Human
ggcuuuacuguauuucacuca

SEQ ID NO: 195017 - RNA, 32 nt, Human
ggcuuuagagcuggcuucugcccacacuuucu

SEQ ID NO: 195018 - RNA, 32 nt, Human
ggcuuuagaggcagaugaaguggucuuugacc

SEQ ID NO: 195019 - RNA, 32 nt, Human
ggcuuuagcgagccuggagggaagggaaggcu

SEQ ID NO: 195020 - RNA, 32 nt, Human
ggcuuuagcuaccucacuaugcugcuucacaa

SEQ ID NO: 195021 - RNA, 31 nt, Human
ggcuuuauauccucugggccuggguuuccug

SEQ ID NO: 195022 - RNA, 32 nt, Human
ggcuuuaucucccuuuuccagaaaguucuuug

SEQ ID NO: 195023 - RNA, 19 nt, Human
ggcuuuauuucuuucauca

SEQ ID NO: 195024 - RNA, 32 nt, Human
ggcuuucaaagauaauucgcagugaugugaaa

SEQ ID NO: 195025 - RNA, 32 nt, Human
ggcuuucacagcaaggguaccuauuucauggc

SEQ ID NO: 195026 - RNA, 32 nt, Human
ggcuuucaccuugcccuggugucuuuuuccag

SEQ ID NO: 195027 - RNA, 32 nt, Human
ggcuuucagaguacaauaaacagggaaugaga

SEQ ID NO: 195028 - RNA, 32 nt, Human
ggcuuucaggaggugccagcagcucuguuggc

SEQ ID NO: 195029 - RNA, 32 nt, Human
ggcuuucauacaaauagacuguucauaauuua

SEQ ID NO: 195030 - RNA, 32 nt, Human
ggcuuucauuucucuuggggugcaguggggau

SEQ ID NO: 195031 - RNA, 32 nt, Human
ggcuuuccaaagugcugggauuacagauguga

SEQ ID NO: 195032 - RNA, 32 nt, Human
ggcuuuccaggccaaaaugaagaggguggagg

SEQ ID NO: 195033 - RNA, 32 nt, Human
ggcuuuccagggcagcucagaccucaucggac

SEQ ID NO: 195034 - RNA, 32 nt, Human
ggcuuuccaguggagcagccuguuugacccca

SEQ ID NO: 195035 - RNA, 22 nt, Human
ggcuuucccaacagcugccucu

SEQ ID NO: 195036 - RNA, 32 nt, Human
ggcuuucccacauucuuuacauuuguaggauu

SEQ ID NO: 195037 - RNA, 32 nt, Human
ggcuuucccacauucuuuacauuuguaggguu

SEQ ID NO: 195038 - RNA, 32 nt, Human
ggcuuucccaggccuggugauucugcucucca

SEQ ID NO: 195039 - RNA, 20 nt, Human
ggcuuuccccgccagaguga

SEQ ID NO: 195040 - RNA, 21 nt, Human
ggcuuuccccgccuccucccg

SEQ ID NO: 195041 - RNA, 32 nt, Human
ggcuuucccucgggcagguggcagcggccauc

SEQ ID NO: 195042 - RNA, 32 nt, Human
ggcuuucccucucugggccucagucuguucau

SEQ ID NO: 195043 - RNA, 32 nt, Human
ggcuuucccugacucugcgacagggucaaacc

SEQ ID NO: 195044 - RNA, 32 nt, Human
ggcuuucccuguaacccaaaacaaggagagag

SEQ ID NO: 195045 - RNA, 32 nt, Human
ggcuuuccuaacccugccuuuuuagucccggu

SEQ ID NO: 195046 - RNA, 32 nt, Human
ggcuuuccucaaggaucccucaaguuuccaac

SEQ ID NO: 195047 - RNA, 32 nt, Human
ggcuuuccucaagggguccccgagcagcgucg

SEQ ID NO: 195048 - RNA, 32 nt, Human
ggcuuuccuccacucuaccuuggccacagucu

SEQ ID NO: 195049 - RNA, 30 nt, Human
ggcuuuccucucugccugcuccugucucuc

SEQ ID NO: 195050 - RNA, 25 nt, Human
ggcuuuccugagacuugagguugug

SEQ ID NO: 195051 - RNA, 26 nt, Human
ggcuuuccugauuucugagucugugu

SEQ ID NO: 195052 - RNA, 32 nt, Human
ggcuuuccugcucugcuuuugggucgucaauu

SEQ ID NO: 195053 - RNA, 32 nt, Human
ggcuuuccuggcacccuggccugggugucugg

SEQ ID NO: 195054 - RNA, 32 nt, Human
ggcuuuccugggcuccagcuugcacauagcag

SEQ ID NO: 195055 - RNA, 26 nt, Human
ggcuuucgcaguuuuucguccgugaa

SEQ ID NO: 195056 - RNA, 20 nt, Human
ggcuuucgcccgcugcugcc

SEQ ID NO: 195057 - RNA, 32 nt, Human
ggcuuucgcucugugcugaugugugacaguca

SEQ ID NO: 195058 - RNA, 32 nt, Human
ggcuuucgguugcugguugggggugggauaua

SEQ ID NO: 195059 - RNA, 32 nt, Human
ggcuuucuaugcugccugcuucccuuucaaac

SEQ ID NO: 195060 - RNA, 19 nt, Human
ggcuuucucacagcucccu

SEQ ID NO: 195061 - RNA, 32 nt, Human
ggcuuucucaccccagcucuggcuaugcccag

SEQ ID NO: 195062 - RNA, 32 nt, Human
ggcuuucucaggaaguggcucugccaggcagg

SEQ ID NO: 195063 - RNA, 32 nt, Human
ggcuuucucggcacccagaagaaguggggagc

SEQ ID NO: 195064 - RNA, 21 nt, Human
ggcuuucucuaaauccugccu

SEQ ID NO: 195065 - RNA, 32 nt, Human
ggcuuucucuggggaccccauuccugucagua

SEQ ID NO: 195066 - RNA, 32 nt, Human
ggcuuucugacaguuccaugcugauguaucag

SEQ ID NO: 195067 - RNA, 32 nt, Human
ggcuuucugagguuuagcuggguggggacugc

SEQ ID NO: 195068 - RNA, 23 nt, Human
ggcuuucugcaaccucugccucc

SEQ ID NO: 195069 - RNA, 32 nt, Human
ggcuuucugcaaccucugccucccagguucaa

SEQ ID NO: 195070 - RNA, 32 nt, Human
ggcuuucugcagaaugacacagccucagaagc

SEQ ID NO: 195071 - RNA, 32 nt, Human
ggcuuucuggcugcugugcugccuccugggcu

SEQ ID NO: 195072 - RNA, 32 nt, Human
ggcuuucuguaucccagguucuugccuaggua

SEQ ID NO: 195073 - RNA, 32 nt, Human
ggcuuucugucucucguuguuugcuuucuuuu

SEQ ID NO: 195074 - RNA, 32 nt, Human
ggcuuucugucugccccagggugcuccaugga

SEQ ID NO: 195075 - RNA, 32 nt, Human
ggcuuucuucucuccugcucaggaccucaucu

SEQ ID NO: 195076 - RNA, 32 nt, Human
ggcuuucuugacauguagguugcuugguaaua

SEQ ID NO: 195077 - RNA, 32 nt, Human
ggcuuugaaacuuacauuuuaaaagaggguua

SEQ ID NO: 195078 - RNA, 32 nt, Human
ggcuuugaaagccagacaaagcagcugccccu

SEQ ID NO: 195079 - RNA, 32 nt, Human
ggcuuugaaaucuccccuugcacugagauuag

SEQ ID NO: 195080 - RNA, 32 nt, Human
ggcuuugaacaaccuccuccagggacuuuggg

SEQ ID NO: 195081 - RNA, 32 nt, Human
ggcuuugaacacugcccaucagcuacagucau

SEQ ID NO: 195082 - RNA, 32 nt, Human
ggcuuugaagaaugcagccggggaaagcauua

SEQ ID NO: 195083 - RNA, 32 nt, Human
ggcuuugaagaccucuggacaugagaacauau

SEQ ID NO: 195084 - RNA, 32 nt, Human
ggcuuugaccauacacauuucugcacagcccu

SEQ ID NO: 195085 - RNA, 21 nt, Human
ggcuuugaccaugaaacugug

SEQ ID NO: 195086 - RNA, 31 nt, Human
ggcuuugagcucucuggguacagugucugag

SEQ ID NO: 195087 - RNA, 32 nt, Human
ggcuuugaggagaauccucucugccauucuuc

SEQ ID NO: 195088 - RNA, 32 nt, Human
ggcuuugaggguggaaggaugggauggguucc

SEQ ID NO: 195089 - RNA, 19 nt, Human
ggcuuugaugucuuucaaa

SEQ ID NO: 195090 - RNA, 32 nt, Human
ggcuuugcaaaaacaacagguuaaucuagucg

SEQ ID NO: 195091 - RNA, 21 nt, Human
ggcuuugcaaacccagccucc

SEQ ID NO: 195092 - RNA, 32 nt, Human
ggcuuugcaaaguggcacgccuggagagaacu

SEQ ID NO: 195093 - RNA, 32 nt, Human
ggcuuugcaccugguggcuauuacaaagcagu

SEQ ID NO: 195094 - RNA, 31 nt, Human
ggcuuugcacuuugguuacacagaacauugg

SEQ ID NO: 195095 - RNA, 32 nt, Human
ggcuuugcagggcggccagugcagugaugccu

SEQ ID NO: 195096 - RNA, 32 nt, Human
ggcuuugcagguggugggccugccugggcauc

SEQ ID NO: 195097 - RNA, 32 nt, Human
ggcuuugccagccuggccagcagcucagagug

SEQ ID NO: 195098 - RNA, 32 nt, Human
ggcuuugccauggagaaggacaugaagaacgu

SEQ ID NO: 195099 - RNA, 23 nt, Human
ggcuuugcccugcaggggaucug

SEQ ID NO: 195100 - RNA, 32 nt, Human
ggcuuugccgucugcgcuccagccuucgccug

SEQ ID NO: 195101 - RNA, 32 nt, Human
ggcuuugcgugagaaaggggaggagagugguu

SEQ ID NO: 195102 - RNA, 21 nt, Human
ggcuuugcguguugcugugaa

SEQ ID NO: 195103 - RNA, 32 nt, Human
ggcuuugcuaaacagaaaagauauaaaacaaa

SEQ ID NO: 195104 - RNA, 32 nt, Human
ggcuuugcucuccaccgcccugggcaaacccc

SEQ ID NO: 195105 - RNA, 31 nt, Human
ggcuuugcuggguccaucacagaagagucuc

SEQ ID NO: 195106 - RNA, 19 nt, Human
ggcuuugcuguucuucacu

SEQ ID NO: 195107 - RNA, 32 nt, Human
ggcuuugcuuucccugcuggggccacagcugu

SEQ ID NO: 195108 - RNA, 32 nt, Human
ggcuuuggaagcaguuugauuuugaaaugcuu

SEQ ID NO: 195109 - RNA, 19 nt, Human
ggcuuuggaagggcagcuu

SEQ ID NO: 195110 - RNA, 32 nt, Human
ggcuuuggagacccccucaucugugacaacca

SEQ ID NO: 195111 - RNA, 32 nt, Human
ggcuuuggagagaagagcaguucugcagcugg

SEQ ID NO: 195112 - RNA, 32 nt, Human
ggcuuuggagugugacacuggccuagaaucca

SEQ ID NO: 195113 - RNA, 19 nt, Human
ggcuuuggccucugcugcc

SEQ ID NO: 195114 - RNA, 32 nt, Human
ggcuuuggccucugcugccucucagucaccaa

SEQ ID NO: 195115 - RNA, 32 nt, Human
ggcuuuggcuccccuggguccccugguugugc

SEQ ID NO: 195116 - RNA, 32 nt, Human
ggcuuugggaagcacccccagcccagggugaa

SEQ ID NO: 195117 - RNA, 32 nt, Human
ggcuuugggaggcugaggugggaggauugcuu

SEQ ID NO: 195118 - RNA, 32 nt, Human
ggcuuugggagggagaaagagggaccuagcgc

SEQ ID NO: 195119 - RNA, 32 nt, Human
ggcuuugggcaguucaggaggaggacuccauc

SEQ ID NO: 195120 - RNA, 32 nt, Human
ggcuuugggguuucgcccuaucccacucccuc

SEQ ID NO: 195121 - RNA, 32 nt, Human
ggcuuuggucaccacgagucuagcucagggca

SEQ ID NO: 195122 - RNA, 32 nt, Human
ggcuuugguccccagcauugcaguauggugug

SEQ ID NO: 195123 - RNA, 32 nt, Human
ggcuuugguuuucauuccuuuuuguuuggcuu

SEQ ID NO: 195124 - RNA, 22 nt, Human
ggcuuuguaaaccggcuggacc

SEQ ID NO: 195125 - RNA, 32 nt, Human
ggcuuugucauuccuuucucuuccuguacauc

SEQ ID NO: 195126 - RNA, 32 nt, Human
ggcuuuguccauaacaaugcucugggauuuca

SEQ ID NO: 195127 - RNA, 32 nt, Human
ggcuuugucccccaggcuggagugcgauggca

SEQ ID NO: 195128 - RNA, 32 nt, Human
ggcuuugugauccucaguguccagugucaccc

SEQ ID NO: 195129 - RNA, 32 nt, Human
ggcuuugugccacccucucccuugccaaagaa

SEQ ID NO: 195130 - RNA, 23 nt, Human
ggcuuuguguucuucacugugaa

SEQ ID NO: 195131 - RNA, 32 nt, Human
ggcuuuguuaccugggcaauaagggacuagca

SEQ ID NO: 195132 - RNA, 32 nt, Human
ggcuuuguucucucaagucaggucugagggaa

SEQ ID NO: 195133 - RNA, 32 nt, Human
ggcuuuuacaucuugccuaccauugcaugaaa

SEQ ID NO: 195134 - RNA, 32 nt, Human
ggcuuuuagaaaaugguuguaaaucugacuuc

SEQ ID NO: 195135 - RNA, 32 nt, Human
ggcuuuuagaggcacacacacaaaaagagguc

SEQ ID NO: 195136 - RNA, 32 nt, Human
ggcuuuuaggauguuuauauuccuucaucccu

SEQ ID NO: 195137 - RNA, 32 nt, Human
ggcuuuuaguaaucauguuggcuggucugguc

SEQ ID NO: 195138 - RNA, 32 nt, Human
ggcuuuuaucugugucuuuuggaaaaggagcu

SEQ ID NO: 195139 - RNA, 22 nt, Human
ggcuuuuaucuuauuucacuua

SEQ ID NO: 195140 - RNA, 19 nt, Human
ggcuuuuaucuucuucauu

SEQ ID NO: 195141 - RNA, 32 nt, Human
ggcuuuuauguuuguccgauggagauuuguuu

SEQ ID NO: 195142 - RNA, 32 nt, Human
ggcuuuucauucuucaauucaugacgagugcc

SEQ ID NO: 195143 - RNA, 32 nt, Human
ggcuuuuccacauucuucacauguguaggguu

SEQ ID NO: 195144 - RNA, 32 nt, Human
ggcuuuuccagguugugauagcccuuaaagca

SEQ ID NO: 195145 - RNA, 23 nt, Human
ggcuuuucccccaaaguaucaug

SEQ ID NO: 195146 - RNA, 32 nt, Human
ggcuuuuccucugguagccacacaccugagca

SEQ ID NO: 195147 - RNA, 32 nt, Human
ggcuuuuccuucaugauuguucucucccuugu

SEQ ID NO: 195148 - RNA, 32 nt, Human
ggcuuuuccuucuccaaacuuugaggcgugau

SEQ ID NO: 195149 - RNA, 32 nt, Human
ggcuuuuccuuuccuuucuucuccauucccug

SEQ ID NO: 195150 - RNA, 32 nt, Human
ggcuuuucgagugugggacaaggucugauguc

SEQ ID NO: 195151 - RNA, 32 nt, Human
ggcuuuucgugcacaugagaaaauguuggcca

SEQ ID NO: 195152 - RNA, 32 nt, Human
ggcuuuucuguuuaaagugugugugcacauga

SEQ ID NO: 195153 - RNA, 32 nt, Human
ggcuuuugaacccaggaggcagagguugcagc

SEQ ID NO: 195154 - RNA, 32 nt, Human
ggcuuuugaauggucucccucuccccagccca

SEQ ID NO: 195155 - RNA, 32 nt, Human
ggcuuuugaauuaacugaauccauccaucaaa

SEQ ID NO: 195156 - RNA, 32 nt, Human
ggcuuuugaccuaagaacccuagcaggagaau

SEQ ID NO: 195157 - RNA, 32 nt, Human
ggcuuuugagacugaaguuaagugggcacagg

SEQ ID NO: 195158 - RNA, 22 nt, Human
ggcuuuugcaggagggcagcuu

SEQ ID NO: 195159 - RNA, 32 nt, Human
ggcuuuugcauugucucuugacaucagaaguu

SEQ ID NO: 195160 - RNA, 23 nt, Human
ggcuuuugcccuuugaaacugug

SEQ ID NO: 195161 - RNA, 32 nt, Human
ggcuuuugccuguaaucccaacacuuugggag

SEQ ID NO: 195162 - RNA, 32 nt, Human
ggcuuuuggaaaggagaaacuugcagucagaa

SEQ ID NO: 195163 - RNA, 32 nt, Human
ggcuuuuggagacauauuacacagguaugagu

SEQ ID NO: 195164 - RNA, 32 nt, Human
ggcuuuuggggugcucugcagcagggcaggca

SEQ ID NO: 195165 - RNA, 32 nt, Human
ggcuuuuggucucccugggaguggguggaggc

SEQ ID NO: 195166 - RNA, 24 nt, Human
ggcuuuuguagauggcgacugugu

SEQ ID NO: 195167 - RNA, 22 nt, Human
ggcuuuuguaucucuucauuua

SEQ ID NO: 195168 - RNA, 32 nt, Human
ggcuuuuguccaggguggcucugguguguggg

SEQ ID NO: 195169 - RNA, 21 nt, Human
ggcuuuuguuaucuuucacuu

SEQ ID NO: 195170 - RNA, 21 nt, Human
ggcuuuuguuuagcagaguga

SEQ ID NO: 195171 - RNA, 32 nt, Human
ggcuuuuuauacaccacauacuagcuucuuuc

SEQ ID NO: 195172 - RNA, 32 nt, Human
ggcuuuuuccucagucccuguucauaccaucu

SEQ ID NO: 195173 - RNA, 32 nt, Human
ggcuuuuucuaagaaagggauucugggagcag

SEQ ID NO: 195174 - RNA, 32 nt, Human
ggcuuuuucucccuccccaugucuguucuggg

SEQ ID NO: 195175 - RNA, 20 nt, Human
ggcuuuuucuuucugcugcc

SEQ ID NO: 195176 - RNA, 32 nt, Human
ggcuuuuugguuguggcuucaagggagggaag

SEQ ID NO: 195177 - RNA, 17 nt, Human
gggaaaaaaggcuccag

SEQ ID NO: 195178 - RNA, 31 nt, Human
gggaaaaagagacucuuuuaggaucagaucu

SEQ ID NO: 195179 - RNA, 32 nt, Human
gggaaaaaggaaaugggcugggaauggugguu

SEQ ID NO: 195180 - RNA, 32 nt, Human
gggaaaaaggccauuggcuaauugcacgugug

SEQ ID NO: 195181 - RNA, 32 nt, Human
gggaaaaauuuuaguuaugauagccacaaacc

SEQ ID NO: 195182 - RNA, 20 nt, Human
gggaaaacggaggugggaga

SEQ ID NO: 195183 - RNA, 32 nt, Human
gggaaaacucuucuugaauaaccaggcgauac

SEQ ID NO: 195184 - RNA, 32 nt, Human
gggaaaacuuccagcccucuguuaauugugug

SEQ ID NO: 195185 - RNA, 32 nt, Human
gggaaaagaaaccucgucggagagcagaggca

SEQ ID NO: 195186 - RNA, 32 nt, Human
gggaaaagaagaggaggcuuaggauggucaag

SEQ ID NO: 195187 - RNA, 32 nt, Human
gggaaaagaccacgagcaccccugacugcacc

SEQ ID NO: 195188 - RNA, 32 nt, Human
gggaaaagagagaaggcagggagaguagggag

SEQ ID NO: 195189 - RNA, 32 nt, Human
gggaaaagagguuuuucuccugcaggguacug

SEQ ID NO: 195190 - RNA, 32 nt, Human
gggaaaagcauccgguggccucagggagcccu

SEQ ID NO: 195191 - RNA, 32 nt, Human
gggaaaagccagagcuuccagauggaggugau

SEQ ID NO: 195192 - RNA, 32 nt, Human
gggaaaagccuccuuagcuuuugaagcuccuc

SEQ ID NO: 195193 - RNA, 32 nt, Human
gggaaaagcgggugagcaggaggcaugaggua

SEQ ID NO: 195194 - RNA, 32 nt, Human
gggaaaagcuuuuuccucuguauucuuuuggg

SEQ ID NO: 195195 - RNA, 32 nt, Human
gggaaaagcuuuuugcuuauuugucuuuugaa

SEQ ID NO: 195196 - RNA, 32 nt, Human
gggaaaaggaaaggaucagacauuucggggac

SEQ ID NO: 195197 - RNA, 32 nt, Human
gggaaaaggaagcacaaaaaggagaagcagca

SEQ ID NO: 195198 - RNA, 32 nt, Human
gggaaaaggaggugggagugcagaugaaacaa

SEQ ID NO: 195199 - RNA, 32 nt, Human
gggaaaaggcagaccgugugagggggccugug

SEQ ID NO: 195200 - RNA, 32 nt, Human
gggaaaaggcaugucaucagguuguuggugug

SEQ ID NO: 195201 - RNA, 32 nt, Human
gggaaaaggccuuccaaaagagcagcaccggc

SEQ ID NO: 195202 - RNA, 32 nt, Human
gggaaaaggcuuccguuuauuuagcauaauga

SEQ ID NO: 195203 - RNA, 32 nt, Human
gggaaaagggaaggcgugcuguggaaauaaaa

SEQ ID NO: 195204 - RNA, 21 nt, Human
gggaaaagggaggugcagaga

SEQ ID NO: 195205 - RNA, 20 nt, Human
gggaaaaggggaggggaaga

SEQ ID NO: 195206 - RNA, 18 nt, Human
gggaaaaggggggcccug

SEQ ID NO: 195207 - RNA, 25 nt, Human
gggaaaaggucaagaaagaggcaga

SEQ ID NO: 195208 - RNA, 32 nt, Human
gggaaaaguguggacguggccagagcgagaga

SEQ ID NO: 195209 - RNA, 32 nt, Human
gggaaaauacccuuuaaauuaugacagacauc

SEQ ID NO: 195210 - RNA, 32 nt, Human
gggaaaaucauauauccuaucuucucaaagga

SEQ ID NO: 195211 - RNA, 22 nt, Human
gggaaaaucugagaacacugaa

SEQ ID NO: 195212 - RNA, 31 nt, Human
gggaaaaugaacaucaguguugauuuggaaa

SEQ ID NO: 195213 - RNA, 32 nt, Human
gggaaaaugcaaagcacccaaaccacuaacac

SEQ ID NO: 195214 - RNA, 32 nt, Human
gggaaaaugccggucuccuacucuucauggcc

SEQ ID NO: 195215 - RNA, 19 nt, Human
gggaaaaugcugggaccaa

SEQ ID NO: 195216 - RNA, 32 nt, Human
gggaaaaugcuuccucauuugcuucucccagc

SEQ ID NO: 195217 - RNA, 24 nt, Human
gggaaaauucauguugcugcagaa

SEQ ID NO: 195218 - RNA, 21 nt, Human
gggaaaauucuguugcaagaa

SEQ ID NO: 195219 - RNA, 21 nt, Human
gggaaaauuguaccugcagaa

SEQ ID NO: 195220 - RNA, 32 nt, Human
gggaaaauuugaaagaaauuacuuccugaaaa

SEQ ID NO: 195221 - RNA, 24 nt, Human
gggaaaauuugcaucuguaaagaa

SEQ ID NO: 195222 - RNA, 32 nt, Human
gggaaacaaaugcccuccuaagccacaaggcg

SEQ ID NO: 195223 - RNA, 32 nt, Human
gggaaacaacacacacuggggccuaugagagg

SEQ ID NO: 195224 - RNA, 32 nt, Human
gggaaacaacuucuccccaggggccccuggga

SEQ ID NO: 195225 - RNA, 32 nt, Human
gggaaacacagcagcaucucuccacugaaaga

SEQ ID NO: 195226 - RNA, 32 nt, Human
gggaaacacagcccugcuggccucggacugca

SEQ ID NO: 195227 - RNA, 18 nt, Human
gggaaacagaagagacag

SEQ ID NO: 195228 - RNA, 32 nt, Human
gggaaacagcacagccugucacaguaauugca

SEQ ID NO: 195229 - RNA, 20 nt, Human
gggaaacagccuuccuggag

SEQ ID NO: 195230 - RNA, 32 nt, Human
gggaaacaggcagagguuggaacaguuuggag

SEQ ID NO: 195231 - RNA, 32 nt, Human
gggaaacagucauuugcgcacaacuuaaaaag

SEQ ID NO: 195232 - RNA, 32 nt, Human
gggaaacauagcgaaacccccucucuacaaaa

SEQ ID NO: 195233 - RNA, 32 nt, Human
gggaaacauggcaaaaccccaucucuauaaaa

SEQ ID NO: 195234 - RNA, 32 nt, Human
gggaaacauggcaaaaucccaucucuacaaca

SEQ ID NO: 195235 - RNA, 32 nt, Human
gggaaaccaaaccguugacacccccuagaaac

SEQ ID NO: 195236 - RNA, 32 nt, Human
gggaaaccaccagcaucggcagaggugauagc

SEQ ID NO: 195237 - RNA, 32 nt, Human
gggaaaccacuaacuauccaaccagcuuauac

SEQ ID NO: 195238 - RNA, 23 nt, Human
gggaaaccccagagacucuucug

SEQ ID NO: 195239 - RNA, 32 nt, Human
gggaaacgggagcagaggaagcacagagcugg

SEQ ID NO: 195240 - RNA, 32 nt, Human
gggaaacguccucgugagaugagagccugagc

SEQ ID NO: 195241 - RNA, 32 nt, Human
gggaaacguggcgaaaccccaucucuacuaaa

SEQ ID NO: 195242 - RNA, 32 nt, Human
gggaaacguggugagaccucaucucuacaaaa

SEQ ID NO: 195243 - RNA, 27 nt, Human
gggaaacucaauaaacacauuuuggau

SEQ ID NO: 195244 - RNA, 32 nt, Human
gggaaacucacagaugagcugaucuguaaguc

SEQ ID NO: 195245 - RNA, 32 nt, Human
gggaaacucauuuuccccugcagcucccccaa

SEQ ID NO: 195246 - RNA, 32 nt, Human
gggaaacugagcuucuuucuucugcacugggg

SEQ ID NO: 195247 - RNA, 32 nt, Human
gggaaacugcagcuuucauuacagauuccuug

SEQ ID NO: 195248 - RNA, 25 nt, Human
gggaaacuggaaaugaauuugacau

SEQ ID NO: 195249 - RNA, 32 nt, Human
gggaaagaaaccaggcaucuggucaaaccagc

SEQ ID NO: 195250 - RNA, 32 nt, Human
gggaaagaaaccuggaaaguacccuuggcugu

SEQ ID NO: 195251 - RNA, 32 nt, Human
gggaaagaaagagagaucagacuguuacugug

SEQ ID NO: 195252 - RNA, 32 nt, Human
gggaaagaaaggaagaaagagaaaaagagaaa

SEQ ID NO: 195253 - RNA, 32 nt, Human
gggaaagaaauagagaccuucugggauuauuu

SEQ ID NO: 195254 - RNA, 32 nt, Human
gggaaagaagcaccagcacucgccuuagaacu

SEQ ID NO: 195255 - RNA, 32 nt, Human
gggaaagaaggaaagucgagaggcucaugaau

SEQ ID NO: 195256 - RNA, 22 nt, Human
gggaaagaaugguagagacaga

SEQ ID NO: 195257 - RNA, 32 nt, Human
gggaaagacauucagacccacagaaaggaggc

SEQ ID NO: 195258 - RNA, 32 nt, Human
gggaaagacccaggcugcgggacgcggugcag

SEQ ID NO: 195259 - RNA, 32 nt, Human
gggaaagacccuucugucucaguuuugcuaug

SEQ ID NO: 195260 - RNA, 32 nt, Human
gggaaagagaaagagacagagacuggcauuuu

SEQ ID NO: 195261 - RNA, 32 nt, Human
gggaaagagaaggagaugggagagggcguagc

SEQ ID NO: 195262 - RNA, 32 nt, Human
gggaaagagaggagagaaagaaaaagagagug

SEQ ID NO: 195263 - RNA, 32 nt, Human
gggaaagagaggcagagagggggaaggccccc

SEQ ID NO: 195264 - RNA, 32 nt, Human
gggaaagagcccaggugggacgugggacaggc

SEQ ID NO: 195265 - RNA, 32 nt, Human
gggaaagagccuggggaggagcuuaaaacuca

SEQ ID NO: 195266 - RNA, 32 nt, Human
gggaaagaggcagagaaggaaagagacaggca

SEQ ID NO: 195267 - RNA, 32 nt, Human
gggaaagagggagggggacuccaggaaaagcc

SEQ ID NO: 195268 - RNA, 32 nt, Human
gggaaagauaaauagacauaaauauauaacaa

SEQ ID NO: 195269 - RNA, 24 nt, Human
gggaaagauaccagcugcaugaca

SEQ ID NO: 195270 - RNA, 32 nt, Human
gggaaagaucugucagaggagccuuucgauau

SEQ ID NO: 195271 - RNA, 32 nt, Human
gggaaagcaagccgaguguacgggaagggccg

SEQ ID NO: 195272 - RNA, 32 nt, Human
gggaaagcagaacugaagccacuuggcccaga

SEQ ID NO: 195273 - RNA, 32 nt, Human
gggaaagcagaagaagucugcuggucacacgg

SEQ ID NO: 195274 - RNA, 32 nt, Human
gggaaagcagccugccccaugcuuccagccug

SEQ ID NO: 195275 - RNA, 32 nt, Human
gggaaagcagggcagccgggaccugcggcugu

SEQ ID NO: 195276 - RNA, 32 nt, Human
gggaaagccagccugggagcaugugaaaggau

SEQ ID NO: 195277 - RNA, 32 nt, Human
gggaaagcccauaugcuaccaccagcuguguc

SEQ ID NO: 195278 - RNA, 32 nt, Human
gggaaagcucuggugacccugggcuucgcagg

SEQ ID NO: 195279 - RNA, 32 nt, Human
gggaaagcugauaaaacuuucacuggacugga

SEQ ID NO: 195280 - RNA, 32 nt, Human
gggaaagcuuucagccauaccccagccuucau

SEQ ID NO: 195281 - RNA, 32 nt, Human
gggaaaggaccccagagaaguggcugugaccc

SEQ ID NO: 195282 - RNA, 32 nt, Human
gggaaaggacgcugagaugacaucaccacaga

SEQ ID NO: 195283 - RNA, 32 nt, Human
gggaaaggagcccagacggagaaggggccaug

SEQ ID NO: 195284 - RNA, 32 nt, Human
gggaaaggaggaacaucccucccaggacucac

SEQ ID NO: 195285 - RNA, 32 nt, Human
gggaaaggcaaaggagcacauucugucuagag

SEQ ID NO: 195286 - RNA, 32 nt, Human
gggaaaggcgcacggcagccucggugccuccc

SEQ ID NO: 195287 - RNA, 32 nt, Human
gggaaaggcugcugccuccugcucuguccuca

SEQ ID NO: 195288 - RNA, 32 nt, Human
gggaaagggaaaggaaaucagcaacucuucaa

SEQ ID NO: 195289 - RNA, 21 nt, Human
gggaaagggaaaggaagcagg

SEQ ID NO: 195290 - RNA, 32 nt, Human
gggaaagggaaaggaagcagggcagugguggg

SEQ ID NO: 195291 - RNA, 32 nt, Human
gggaaagggaagguuaguagcagaacagguuu

SEQ ID NO: 195292 - RNA, 20 nt, Human
gggaaagggagaggggcaga

SEQ ID NO: 195293 - RNA, 32 nt, Human
gggaaagggccaccacaccacacccaagccca

SEQ ID NO: 195294 - RNA, 32 nt, Human
gggaaagggcugggccucaccgcucccagcaa

SEQ ID NO: 195295 - RNA, 32 nt, Human
gggaaaggggagacagagggugaaguggugcu

SEQ ID NO: 195296 - RNA, 32 nt, Human
gggaaaggggagccggccugcccacacccccg

SEQ ID NO: 195297 - RNA, 20 nt, Human
gggaaaggggaggaggaagg

SEQ ID NO: 195298 - RNA, 32 nt, Human
gggaaaggggaugauaaagcagugaguugucu

SEQ ID NO: 195299 - RNA, 32 nt, Human
gggaaagggugagggagacuggggccuggucu

SEQ ID NO: 195300 - RNA, 32 nt, Human
gggaaaggguuuuuccuuagcacacgaaaaag

SEQ ID NO: 195301 - RNA, 32 nt, Human
gggaaaggugaagcugugacuggaggggcagg

SEQ ID NO: 195302 - RNA, 32 nt, Human
gggaaagguggugagaggggcaaaggaggaug

SEQ ID NO: 195303 - RNA, 32 nt, Human
gggaaaguaaaggguuuaaaggaaugugcauc

SEQ ID NO: 195304 - RNA, 32 nt, Human
gggaaaguaagccuguaucagucauauuucca

SEQ ID NO: 195305 - RNA, 32 nt, Human
gggaaaguagcagcaacuagauuaagacuggg

SEQ ID NO: 195306 - RNA, 32 nt, Human
gggaaaguaguuaagaaaucaagaaaaguguc

SEQ ID NO: 195307 - RNA, 32 nt, Human
gggaaagucagggcaguggaaguggaugcacu

SEQ ID NO: 195308 - RNA, 32 nt, Human
gggaaagucaucuguuuaauuuacacacuugc

SEQ ID NO: 195309 - RNA, 32 nt, Human
gggaaagugcucagcaaggaggcucuccuucc

SEQ ID NO: 195310 - RNA, 32 nt, Human
gggaaagugcugaaaucugcagugagugaaag

SEQ ID NO: 195311 - RNA, 32 nt, Human
gggaaaguggaagaccccaugaugacaucaug

SEQ ID NO: 195312 - RNA, 32 nt, Human
gggaaagugggucgccccacagcuucaaaggc

SEQ ID NO: 195313 - RNA, 32 nt, Human
gggaaagugguaagggagagugcugguccaaa

SEQ ID NO: 195314 - RNA, 32 nt, Human
gggaaagugugugguuuuaguacguucaaaag

SEQ ID NO: 195315 - RNA, 22 nt, Human
gggaaaguucuuccuugcuccg

SEQ ID NO: 195316 - RNA, 32 nt, Human
gggaaauaaaaggugguaaaauucaguuuuca

SEQ ID NO: 195317 - RNA, 32 nt, Human
gggaaauaaaggcagaaggcagugagagggag

SEQ ID NO: 195318 - RNA, 32 nt, Human
gggaaauaagaccgaucuccugaccccauugg

SEQ ID NO: 195319 - RNA, 32 nt, Human
gggaaauaggucuccuaggugccugaagcgcu

SEQ ID NO: 195320 - RNA, 32 nt, Human
gggaaauaguaacagugaucugcuuagagugg

SEQ ID NO: 195321 - RNA, 32 nt, Human
gggaaauaucuagcuauuuuaauagauagaua

SEQ ID NO: 195322 - RNA, 32 nt, Human
gggaaauauuccaggcuuuggccaaggccagu

SEQ ID NO: 195323 - RNA, 32 nt, Human
gggaaauauuuuaauuuagcuuuuggauuucc

SEQ ID NO: 195324 - RNA, 32 nt, Human
gggaaaucacaauaauauagcaguaguuauac

SEQ ID NO: 195325 - RNA, 32 nt, Human
gggaaaucaguaucugucuucccagugguugc

SEQ ID NO: 195326 - RNA, 32 nt, Human
gggaaaucauagacaauuucuuuuguagggcg

SEQ ID NO: 195327 - RNA, 32 nt, Human
gggaaaucauagccaaggggaaaucuaucagu

SEQ ID NO: 195328 - RNA, 32 nt, Human
gggaaaucccaguggugggcagccuggcacgc

SEQ ID NO: 195329 - RNA, 24 nt, Human
gggaaauccugcucuaugaauuca

SEQ ID NO: 195330 - RNA, 32 nt, Human
gggaaaucgcacuggugaagcugccguggggu

SEQ ID NO: 195331 - RNA, 21 nt, Human
gggaaaugaaaggaagccuga

SEQ ID NO: 195332 - RNA, 21 nt, Human
gggaaaugaagagaccucaga

SEQ ID NO: 195333 - RNA, 23 nt, Human
gggaaaugacuucuccaggcaga

SEQ ID NO: 195334 - RNA, 32 nt, Human
gggaaaugagggcugaaaauauccuccccaca

SEQ ID NO: 195335 - RNA, 32 nt, Human
gggaaaugcaggaaggccggguugugaggggu

SEQ ID NO: 195336 - RNA, 32 nt, Human
gggaaaugccaaggaugcuucugguggacuuc

SEQ ID NO: 195337 - RNA, 32 nt, Human
gggaaaugccaaggcagauucuagaggaagaa

SEQ ID NO: 195338 - RNA, 32 nt, Human
gggaaaugccuuuguacuuuagggaaguacuu

SEQ ID NO: 195339 - RNA, 30 nt, Human
gggaaauggacucugugcugaggcccuuca

SEQ ID NO: 195340 - RNA, 32 nt, Human
gggaaauggagacaaauucuggguacuagagu

SEQ ID NO: 195341 - RNA, 32 nt, Human
gggaaauggagaccccaacagccagcagcagu

SEQ ID NO: 195342 - RNA, 32 nt, Human
gggaaauggggccaugugaaugcagcugcucu

SEQ ID NO: 195343 - RNA, 32 nt, Human
gggaaauguuuucugccuuccugcuucuagaa

SEQ ID NO: 195344 - RNA, 32 nt, Human
gggaaauuauuugucaagcaaauguuuaaaau

SEQ ID NO: 195345 - RNA, 32 nt, Human
gggaaauugcucuccccucuguggcuuggacu

SEQ ID NO: 195346 - RNA, 32 nt, Human
gggaaauuguggucuccggccugggugagaca

SEQ ID NO: 195347 - RNA, 22 nt, Human
gggaacaaaggaggcucagaga

SEQ ID NO: 195348 - RNA, 32 nt, Human
gggaacaaagggagguugggcggggcggugcu

SEQ ID NO: 195349 - RNA, 32 nt, Human
gggaacaaaucucaaacugauccaucagucau

SEQ ID NO: 195350 - RNA, 32 nt, Human
gggaacaacaacagcaagccgcccccauccug

SEQ ID NO: 195351 - RNA, 32 nt, Human
gggaacaagccccucccuccacugccucagag

SEQ ID NO: 195352 - RNA, 32 nt, Human
gggaacaaguugagcuaugacuuaacauagcc

SEQ ID NO: 195353 - RNA, 32 nt, Human
gggaacacaagugucuucucauaagauuuaua

SEQ ID NO: 195354 - RNA, 32 nt, Human
gggaacaccugccucucccagaugcacagcug

SEQ ID NO: 195355 - RNA, 32 nt, Human
gggaacacgugcagugccgugguguggggauc

SEQ ID NO: 195356 - RNA, 22 nt, Human
gggaacacuagcuguccaggga

SEQ ID NO: 195357 - RNA, 32 nt, Human
gggaacacucucccaaggugauuuucuuuuuc

SEQ ID NO: 195358 - RNA, 32 nt, Human
gggaacagaagggcuuuuguuuuggaggguuu

SEQ ID NO: 195359 - RNA, 32 nt, Human
gggaacagaauuacaggaaguuuagggcaagg

SEQ ID NO: 195360 - RNA, 32 nt, Human
gggaacagacuccauucagacaucuuuauacu

SEQ ID NO: 195361 - RNA, 22 nt, Human
gggaacagagcaacagucuuuc

SEQ ID NO: 195362 - RNA, 31 nt, Human
gggaacagaugggacaauaaagacuggagac

SEQ ID NO: 195363 - RNA, 32 nt, Human
gggaacagaugggacaauaaagacuggagacu

SEQ ID NO: 195364 - RNA, 32 nt, Human
gggaacagcaggcagggcucugggugacgcau

SEQ ID NO: 195365 - RNA, 32 nt, Human
gggaacagccuggaugugagagccggugggag

SEQ ID NO: 195366 - RNA, 20 nt, Human
gggaacagcugggcccaggg

SEQ ID NO: 195367 - RNA, 24 nt, Human
gggaacagcugggcggccccagag

SEQ ID NO: 195368 - RNA, 32 nt, Human
gggaacagcuuccaauggcaugggaguucugu

SEQ ID NO: 195369 - RNA, 32 nt, Human
gggaacaggagagaggcaaugaugagugauca

SEQ ID NO: 195370 - RNA, 32 nt, Human
gggaacaggaggaggaagagggucagggugga

SEQ ID NO: 195371 - RNA, 32 nt, Human
gggaacaggccugucuggcccugagggagucc

SEQ ID NO: 195372 - RNA, 32 nt, Human
gggaacagggaacaaggcuggggagggaggag

SEQ ID NO: 195373 - RNA, 32 nt, Human
gggaacagggagcggugugcagaggagguggc

SEQ ID NO: 195374 - RNA, 32 nt, Human
gggaacagggccagggcaggcggggcagggcu

SEQ ID NO: 195375 - RNA, 32 nt, Human
gggaacaggggaggggaggagcuagggaaaga

SEQ ID NO: 195376 - RNA, 32 nt, Human
gggaacagggggcugaaggggcacuugucgua

SEQ ID NO: 195377 - RNA, 32 nt, Human
gggaacaggguagggaaaucuccauaccuucu

SEQ ID NO: 195378 - RNA, 32 nt, Human
gggaacagucauggcucacugcagcuuaagcu

SEQ ID NO: 195379 - RNA, 32 nt, Human
gggaacagugcaggagggaugggcuggugggg

SEQ ID NO: 195380 - RNA, 32 nt, Human
gggaacaguggggaacugucagaugcucgaac

SEQ ID NO: 195381 - RNA, 32 nt, Human
gggaacagugguggccagcuuggaggauggac

SEQ ID NO: 195382 - RNA, 32 nt, Human
gggaacagugguuggccaggcugcaguauaac

SEQ ID NO: 195383 - RNA, 32 nt, Human
gggaacauauauugcuguuuacuccaguguaa

SEQ ID NO: 195384 - RNA, 32 nt, Human
gggaacaucacacaccagggccugucaugggg

SEQ ID NO: 195385 - RNA, 32 nt, Human
gggaacaucacacuccggggacuguugugggg

SEQ ID NO: 195386 - RNA, 32 nt, Human
gggaacaucacacucuggggacuguugugggg

SEQ ID NO: 195387 - RNA, 32 nt, Human
gggaacaucacacucuggggccuguugugggg

SEQ ID NO: 195388 - RNA, 32 nt, Human
gggaacaucccucgucuuguccucucuucugc

SEQ ID NO: 195389 - RNA, 32 nt, Human
gggaacaucucaaaaugccaauguaaaauuua

SEQ ID NO: 195390 - RNA, 32 nt, Human
gggaacaugaccuggaaccacauggcaauacu

SEQ ID NO: 195391 - RNA, 32 nt, Human
gggaacaugccagggcuucagagcaccuuccu

SEQ ID NO: 195392 - RNA, 21 nt, Human
gggaacauguaggguggggag

SEQ ID NO: 195393 - RNA, 20 nt, Human
gggaaccacagagccaggag

SEQ ID NO: 195394 - RNA, 32 nt, Human
gggaaccaccucucugcucuccaucgcuacca

SEQ ID NO: 195395 - RNA, 32 nt, Human
gggaaccacugcaucaugucccgguauagcua

SEQ ID NO: 195396 - RNA, 32 nt, Human
gggaaccagagcugguuaagggccuagugaag

SEQ ID NO: 195397 - RNA, 23 nt, Human
gggaaccaggauuccucccuccu

SEQ ID NO: 195398 - RNA, 32 nt, Human
gggaaccauggcugccccgagagacaauguca

SEQ ID NO: 195399 - RNA, 32 nt, Human
gggaacccacggcuggagagaaauagggagau

SEQ ID NO: 195400 - RNA, 32 nt, Human
gggaacccaggaggcagagguugcagugagcu

SEQ ID NO: 195401 - RNA, 32 nt, Human
gggaacccaggagggcccuucuggggcagugg

SEQ ID NO: 195402 - RNA, 26 nt, Human
gggaacccaggcuggcaaccugccuc

SEQ ID NO: 195403 - RNA, 32 nt, Human
gggaaccccagccugccacgcugccuuccgcu

SEQ ID NO: 195404 - RNA, 32 nt, Human
gggaaccccaggaauugacccugaguuuuaaa

SEQ ID NO: 195405 - RNA, 32 nt, Human
gggaaccccugacccaggaggcuggaaguguc

SEQ ID NO: 195406 - RNA, 32 nt, Human
gggaaccccuggcagcugcugccaguccugga

SEQ ID NO: 195407 - RNA, 29 nt, Human
gggaacccgagccugcggcgccuuccccu

SEQ ID NO: 195408 - RNA, 26 nt, Human
gggaacccgggcugugcaccugccuc

SEQ ID NO: 195409 - RNA, 29 nt, Human
gggaacccgguuccuggcugccugccucu

SEQ ID NO: 195410 - RNA, 32 nt, Human
gggaacccgugcagcccuuggcugagugguuc

SEQ ID NO: 195411 - RNA, 32 nt, Human
gggaacccuccuaucagccacagggaagcugg

SEQ ID NO: 195412 - RNA, 32 nt, Human
gggaacccugcguuucuacugugugauucugc

SEQ ID NO: 195413 - RNA, 32 nt, Human
gggaacccuuacuuaugggcagucuccgaugu

SEQ ID NO: 195414 - RNA, 32 nt, Human
gggaacccuuucucauucuccaagccugguca

SEQ ID NO: 195415 - RNA, 32 nt, Human
gggaaccgagcagcaggucagagcaggcgagc

SEQ ID NO: 195416 - RNA, 32 nt, Human
gggaaccgcagucuucaucacagagguaccgu

SEQ ID NO: 195417 - RNA, 32 nt, Human
gggaaccguauguccuggaauauuagaugccu

SEQ ID NO: 195418 - RNA, 32 nt, Human
gggaaccguucccgggccguugaucuucggcc

SEQ ID NO: 195419 - RNA, 21 nt, Human
gggaaccucccuccccuccca

SEQ ID NO: 195420 - RNA, 32 nt, Human
gggaaccucccuggcccggcccggugcuuguc

SEQ ID NO: 195421 - RNA, 32 nt, Human
gggaaccucuccugccggaagccggacggcag

SEQ ID NO: 195422 - RNA, 32 nt, Human
gggaaccucugaacuccuccuuccucugggcu

SEQ ID NO: 195423 - RNA, 32 nt, Human
gggaaccucugccuaguuuucagaggauguau

SEQ ID NO: 195424 - RNA, 32 nt, Human
gggaaccugaacuaggaguccugggagagcug

SEQ ID NO: 195425 - RNA, 32 nt, Human
gggaaccuguguuuguuugugugcacauguaa

SEQ ID NO: 195426 - RNA, 32 nt, Human
gggaaccuguuccugcucacucuuugccuucu

SEQ ID NO: 195427 - RNA, 32 nt, Human
gggaacgauggccauggaguccacagccacug

SEQ ID NO: 195428 - RNA, 23 nt, Human
gggaacgcagagcaggaaugcgu

SEQ ID NO: 195429 - RNA, 32 nt, Human
gggaacgcuggcuggggacgaucacaaagccu

SEQ ID NO: 195430 - RNA, 24 nt, Human
gggaacggcccuagccuugggaag

SEQ ID NO: 195431 - RNA, 24 nt, Human
gggaacggcccuagcuuugggaag

SEQ ID NO: 195432 - RNA, 20 nt, Human
gggaacggccgcccuggaag

SEQ ID NO: 195433 - RNA, 22 nt, Human
gggaacgggcaagccuggaaag

SEQ ID NO: 195434 - RNA, 22 nt, Human
gggaacgggcggggcgggccgg

SEQ ID NO: 195435 - RNA, 32 nt, Human
gggaacuagugaucacuagcucaagaacugca

SEQ ID NO: 195436 - RNA, 32 nt, Human
gggaacucagccacuggugacguucagguugu

SEQ ID NO: 195437 - RNA, 28 nt, Human
gggaacucauuugcugccucuuggucau

SEQ ID NO: 195438 - RNA, 32 nt, Human
gggaacuccaggggaagugaggggagaagguu

SEQ ID NO: 195439 - RNA, 32 nt, Human
gggaacuccccuccucaacgccaggauguaga

SEQ ID NO: 195440 - RNA, 32 nt, Human
gggaacuccuuccucagccucucgucagcgcc

SEQ ID NO: 195441 - RNA, 20 nt, Human
gggaacucgcgugggcugag

SEQ ID NO: 195442 - RNA, 32 nt, Human
gggaacucuggccucgcugcacucauggcuuc

SEQ ID NO: 195443 - RNA, 32 nt, Human
gggaacucugugaggagaugcugguaaauuau

SEQ ID NO: 195444 - RNA, 32 nt, Human
gggaacugaaucaggaaacucaaaucgaauag

SEQ ID NO: 195445 - RNA, 19 nt, Human
gggaacugagcuucagaga

SEQ ID NO: 195446 - RNA, 32 nt, Human
gggaacugcaccagcuuccugcucuggauaca

SEQ ID NO: 195447 - RNA, 32 nt, Human
gggaacugccacuccugguugccauggaaaua

SEQ ID NO: 195448 - RNA, 31 nt, Human
gggaacugccucuuuccuguuguuguuaaug

SEQ ID NO: 195449 - RNA, 32 nt, Human
gggaacugcucacugacagcuucucuguaacc

SEQ ID NO: 195450 - RNA, 32 nt, Human
gggaacuggaaagaaaguuacagaaaggauag

SEQ ID NO: 195451 - RNA, 32 nt, Human
gggaacuggaaugccacacaaggcaaggccug

SEQ ID NO: 195452 - RNA, 22 nt, Human
gggaacuggcaggauucugggg

SEQ ID NO: 195453 - RNA, 32 nt, Human
gggaacuggcuuugagaugacaggguccagga

SEQ ID NO: 195454 - RNA, 32 nt, Human
gggaacugggagaagagcuggagcaacagccu

SEQ ID NO: 195455 - RNA, 32 nt, Human
gggaacugggcugucuagccggguauagguaa

SEQ ID NO: 195456 - RNA, 32 nt, Human
gggaacugugacaaacagccucgggcagauga

SEQ ID NO: 195457 - RNA, 32 nt, Human
gggaacugugguuacaggaaauggagcacucu

SEQ ID NO: 195458 - RNA, 32 nt, Human
gggaacuucagcacuacugugaaagagacaau

SEQ ID NO: 195459 - RNA, 32 nt, Human
gggaacuucucccucaccuccacacugccucu

SEQ ID NO: 195460 - RNA, 32 nt, Human
gggaacuucugccuagaugucagaggaaguau

SEQ ID NO: 195461 - RNA, 32 nt, Human
gggaacuugaaagacauuuaugccauauuauu

SEQ ID NO: 195462 - RNA, 32 nt, Human
gggaacuugagguuuaaagcagggggaggagg

SEQ ID NO: 195463 - RNA, 32 nt, Human
gggaacuugccucucccucuuguuuugcuccu

SEQ ID NO: 195464 - RNA, 32 nt, Human
gggaacuuggaguucagggggcuuccaccauu

SEQ ID NO: 195465 - RNA, 32 nt, Human
gggaacuuggauuagguggagaggcaguuggg

SEQ ID NO: 195466 - RNA, 21 nt, Human
gggaacuuugaggcucagaga

SEQ ID NO: 195467 - RNA, 32 nt, Human
gggaagaaaguggucacuggauggacuuaccc

SEQ ID NO: 195468 - RNA, 32 nt, Human
gggaagaaauccuaguaugccaaaaauauaug

SEQ ID NO: 195469 - RNA, 19 nt, Human
gggaagaacaaucagcaga

SEQ ID NO: 195470 - RNA, 32 nt, Human
gggaagaagaaagcagucagugcugggccuua

SEQ ID NO: 195471 - RNA, 31 nt, Human
gggaagaagagaccugggcuuggaaggaacc

SEQ ID NO: 195472 - RNA, 32 nt, Human
gggaagaagaggacgagguggcgcagagaccg

SEQ ID NO: 195473 - RNA, 22 nt, Human
gggaagaauggccauugggaga

SEQ ID NO: 195474 - RNA, 19 nt, Human
gggaagaauugcagaccag

SEQ ID NO: 195475 - RNA, 21 nt, Human
gggaagacacagaaggacaga

SEQ ID NO: 195476 - RNA, 32 nt, Human
gggaagacacuggcguccauagucagacccac

SEQ ID NO: 195477 - RNA, 32 nt, Human
gggaagacagccggccagagugcggugugcug

SEQ ID NO: 195478 - RNA, 32 nt, Human
gggaagacaggacguaaaggaaaaugagagaa

SEQ ID NO: 195479 - RNA, 32 nt, Human
gggaagacaugcugguucucugaugagcuggg

SEQ ID NO: 195480 - RNA, 18 nt, Human
gggaagacccagagcaag

SEQ ID NO: 195481 - RNA, 23 nt, Human
gggaagacccaggagcugggagg

SEQ ID NO: 195482 - RNA, 32 nt, Human
gggaagacccaggagcugggaggcacgggagu

SEQ ID NO: 195483 - RNA, 19 nt, Human
gggaagaccuuggaugcag

SEQ ID NO: 195484 - RNA, 21 nt, Human
gggaagacgagaagagacagg

SEQ ID NO: 195485 - RNA, 32 nt, Human
gggaagacggagcccugaagccugcgugugga

SEQ ID NO: 195486 - RNA, 32 nt, Human
gggaagacuuggggcucuuucugugacugagg

SEQ ID NO: 195487 - RNA, 32 nt, Human
gggaagagaaaaucgacucuucuuuuuacugu

SEQ ID NO: 195488 - RNA, 18 nt, Human
gggaagagaaagcugccu

SEQ ID NO: 195489 - RNA, 18 nt, Human
gggaagagaagaaacaga

SEQ ID NO: 195490 - RNA, 32 nt, Human
gggaagagaagcccaggucaccugccaagacc

SEQ ID NO: 195491 - RNA, 32 nt, Human
gggaagagagaagggaggagguuccaaguagu

SEQ ID NO: 195492 - RNA, 32 nt, Human
gggaagagagagggacagggacaagggcaaga

SEQ ID NO: 195493 - RNA, 32 nt, Human
gggaagagagaguuggggaaagagaaaugaga

SEQ ID NO: 195494 - RNA, 32 nt, Human
gggaagagaggaggaguggcagaagaaagaua

SEQ ID NO: 195495 - RNA, 32 nt, Human
gggaagagaggaggggagaggagaagggaaau

SEQ ID NO: 195496 - RNA, 32 nt, Human
gggaagagaguagaguagcuuucuccaagucc

SEQ ID NO: 195497 - RNA, 32 nt, Human
gggaagagagugacccagaugguaggaaaagg

SEQ ID NO: 195498 - RNA, 32 nt, Human
gggaagagagugacggagaaggagagaaagag

SEQ ID NO: 195499 - RNA, 32 nt, Human
gggaagagaguuucaagggaggcagcuggauu

SEQ ID NO: 195500 - RNA, 32 nt, Human
gggaagagauggggucuuacuauguuguccag

SEQ ID NO: 195501 - RNA, 32 nt, Human
gggaagagcauguggcaaggcacagaggagau

SEQ ID NO: 195502 - RNA, 32 nt, Human
gggaagagcucaucagugacccuucagugccu

SEQ ID NO: 195503 - RNA, 32 nt, Human
gggaagagcucccaccuucucuggaugugccu

SEQ ID NO: 195504 - RNA, 32 nt, Human
gggaagagcucccugcugugugccugcaccac

SEQ ID NO: 195505 - RNA, 32 nt, Human
gggaagagcuggggcccagagggaccuugagu

SEQ ID NO: 195506 - RNA, 32 nt, Human
gggaagaggaaaacgaggcaagaugcugagaa

SEQ ID NO: 195507 - RNA, 32 nt, Human
gggaagaggaaaaugaggcaagaugcugagaa

SEQ ID NO: 195508 - RNA, 32 nt, Human
gggaagaggaacaggccacagguucuccaagc

SEQ ID NO: 195509 - RNA, 32 nt, Human
gggaagaggacacggaugugaggugggaugag

SEQ ID NO: 195510 - RNA, 32 nt, Human
gggaagaggagagaaaagacagggacuuugaa

SEQ ID NO: 195511 - RNA, 32 nt, Human
gggaagaggaggaggaaggaaagaaagaaagc

SEQ ID NO: 195512 - RNA, 32 nt, Human
gggaagaggaggaggagguuguugaugacaca

SEQ ID NO: 195513 - RNA, 32 nt, Human
gggaagaggaugagcagagggaggaagauggc

SEQ ID NO: 195514 - RNA, 32 nt, Human
gggaagaggccugggaugcugcuaaacauccu

SEQ ID NO: 195515 - RNA, 32 nt, Human
gggaagaggcugggauggucucugcugcucuu

SEQ ID NO: 195516 - RNA, 32 nt, Human
gggaagaggcuuccugggcccccuggucuucg

SEQ ID NO: 195517 - RNA, 19 nt, Human
gggaagagggagugggagg

SEQ ID NO: 195518 - RNA, 32 nt, Human
gggaagagggccaggacaucuucugagccagg

SEQ ID NO: 195519 - RNA, 21 nt, Human
gggaagagguggaggaggagg

SEQ ID NO: 195520 - RNA, 32 nt, Human
gggaagagguggaggaggaggggccagggcag

SEQ ID NO: 195521 - RNA, 20 nt, Human
gggaagagguggcucuggag

SEQ ID NO: 195522 - RNA, 19 nt, Human
gggaagaggugguggcaga

SEQ ID NO: 195523 - RNA, 19 nt, Human
gggaagagugugggggagg

SEQ ID NO: 195524 - RNA, 19 nt, Human
gggaagauaagcugggagg

SEQ ID NO: 195525 - RNA, 32 nt, Human
gggaagauaccagcuuuuucucucaggguucu

SEQ ID NO: 195526 - RNA, 22 nt, Human
gggaagaucacuugagcccagg

SEQ ID NO: 195527 - RNA, 31 nt, Human
gggaagaucaucuaugagguuggagaugaaa

SEQ ID NO: 195528 - RNA, 32 nt, Human
gggaagaucccuugagcccaggaguucgagac

SEQ ID NO: 195529 - RNA, 32 nt, Human
gggaagauggaggccaccucagcuggagaaca

SEQ ID NO: 195530 - RNA, 31 nt, Human
gggaagauggcggagcuggggaagaaguacu

SEQ ID NO: 195531 - RNA, 22 nt, Human
gggaagauggcgguccuggggu

SEQ ID NO: 195532 - RNA, 31 nt, Human
gggaagauggcugcacggagcuggcaggacg

SEQ ID NO: 195533 - RNA, 16 nt, Human
gggaagauggcuggga

SEQ ID NO: 195534 - RNA, 32 nt, Human
gggaagaugggcagagaaaaaggggacaccua

SEQ ID NO: 195535 - RNA, 21 nt, Human
gggaagaugggugcugggaga

SEQ ID NO: 195536 - RNA, 26 nt, Human
gggaagauggugggguuuguuugcca

SEQ ID NO: 195537 - RNA, 21 nt, Human
gggaagcaaaccgugcccugg

SEQ ID NO: 195538 - RNA, 32 nt, Human
gggaagcaaaggcagaggcccuggggugggag

SEQ ID NO: 195539 - RNA, 32 nt, Human
gggaagcaagggggcuuagaauuuguggggua

SEQ ID NO: 195540 - RNA, 32 nt, Human
gggaagcacaugcuugcucuaggaauaucucc

SEQ ID NO: 195541 - RNA, 32 nt, Human
gggaagcacgccgccucccuacgcaccagcau

SEQ ID NO: 195542 - RNA, 32 nt, Human
gggaagcacuggccguucgcucccgggccggc

SEQ ID NO: 195543 - RNA, 20 nt, Human
gggaagcagaccgccuugga

SEQ ID NO: 195544 - RNA, 32 nt, Human
gggaagcagaggaggccagggaggcaggggag

SEQ ID NO: 195545 - RNA, 32 nt, Human
gggaagcagaguguccacccaccagggcagga

SEQ ID NO: 195546 - RNA, 32 nt, Human
gggaagcagccccagcaguggggucaugccug

SEQ ID NO: 195547 - RNA, 19 nt, Human
gggaagcagcugauggaga

SEQ ID NO: 195548 - RNA, 24 nt, Human
gggaagcagcuggaaagagacaga

SEQ ID NO: 195549 - RNA, 32 nt, Human
gggaagcaggagcaucuucuuggcagccaggc

SEQ ID NO: 195550 - RNA, 32 nt, Human
gggaagcaggcagagcggggaggugccugagc

SEQ ID NO: 195551 - RNA, 32 nt, Human
gggaagcaggcagcggucccagagccacccug

SEQ ID NO: 195552 - RNA, 32 nt, Human
gggaagcaggggaggggagggagcagcugggc

SEQ ID NO: 195553 - RNA, 32 nt, Human
gggaagcaggggcagagcgcucaggccagggc

SEQ ID NO: 195554 - RNA, 32 nt, Human
gggaagcauaguuuauuugcaaguguucaccu

SEQ ID NO: 195555 - RNA, 32 nt, Human
gggaagcaucagcaaccaagguagucucugcc

SEQ ID NO: 195556 - RNA, 32 nt, Human
gggaagcaucaucugcacagucccuguccuag

SEQ ID NO: 195557 - RNA, 20 nt, Human
gggaagccaaaugccucuca

SEQ ID NO: 195558 - RNA, 22 nt, Human
gggaagccaagacagguggauc

SEQ ID NO: 195559 - RNA, 24 nt, Human
gggaagccaaggcagguagauugu

SEQ ID NO: 195560 - RNA, 23 nt, Human
gggaagccaaggcagguggaucg

SEQ ID NO: 195561 - RNA, 22 nt, Human
gggaagccaaggcagguggauu

SEQ ID NO: 195562 - RNA, 23 nt, Human
gggaagccaaggcggguggauua

SEQ ID NO: 195563 - RNA, 32 nt, Human
gggaagccacugucccucccacuccaguaggg

SEQ ID NO: 195564 - RNA, 22 nt, Human
gggaagccagagccgccugcca

SEQ ID NO: 195565 - RNA, 32 nt, Human
gggaagccagcagagaccagggaaguggcagc

SEQ ID NO: 195566 - RNA, 32 nt, Human
gggaagccaguggagcugagcgggcugcaaga

SEQ ID NO: 195567 - RNA, 23 nt, Human
gggaagccauauguuuccaggga

SEQ ID NO: 195568 - RNA, 32 nt, Human
gggaagccaucacuuaccuugcacugagaaag

SEQ ID NO: 195569 - RNA, 32 nt, Human
gggaagccauuuuucugcaauggaauuaaaug

SEQ ID NO: 195570 - RNA, 32 nt, Human
gggaagcccacacacaccugcuuccuucaugg

SEQ ID NO: 195571 - RNA, 32 nt, Human
gggaagcccacgggacccucaggcgggcagga

SEQ ID NO: 195572 - RNA, 22 nt, Human
gggaagcccaucucaguuccug

SEQ ID NO: 195573 - RNA, 23 nt, Human
gggaagccccagagcuuuccuga

SEQ ID NO: 195574 - RNA, 21 nt, Human
gggaagccccaggcucuccga

SEQ ID NO: 195575 - RNA, 32 nt, Human
gggaagccccagggacugcaaguggccauuac

SEQ ID NO: 195576 - RNA, 32 nt, Human
gggaagccccuccaggagggaacacggucauc

SEQ ID NO: 195577 - RNA, 32 nt, Human
gggaagcccguggcagggcacaggguuguccc

SEQ ID NO: 195578 - RNA, 32 nt, Human
gggaagcccugaggcgccuuguuccgcuggcc

SEQ ID NO: 195579 - RNA, 32 nt, Human
gggaagcccuucuccccgggucugcccugugg

SEQ ID NO: 195580 - RNA, 23 nt, Human
gggaagccgaggcgggcagauca

SEQ ID NO: 195581 - RNA, 23 nt, Human
gggaagccgaggcggguggaaca

SEQ ID NO: 195582 - RNA, 23 nt, Human
gggaagccgaggcggguggauca

SEQ ID NO: 195583 - RNA, 23 nt, Human
gggaagccgaggugggcagauca

SEQ ID NO: 195584 - RNA, 24 nt, Human
gggaagccgaggugggcagaucau

SEQ ID NO: 195585 - RNA, 23 nt, Human
gggaagccgaggugggcggauca

SEQ ID NO: 195586 - RNA, 32 nt, Human
gggaagccgugcucgccccagcaggugcugac

SEQ ID NO: 195587 - RNA, 32 nt, Human
gggaagccucacccuucugcccuucacaggcu

SEQ ID NO: 195588 - RNA, 32 nt, Human
gggaagccuguaaucccagcuacuugggaggc

SEQ ID NO: 195589 - RNA, 32 nt, Human
gggaagccugugucuccugcccccagggcgca

SEQ ID NO: 195590 - RNA, 32 nt, Human
gggaagccuuucugccgcccaggcccacaggu

SEQ ID NO: 195591 - RNA, 17 nt, Human
gggaagcgcaaaggggc

SEQ ID NO: 195592 - RNA, 22 nt, Human
gggaagcgcccgcguccgggga

SEQ ID NO: 195593 - RNA, 32 nt, Human
gggaagcgcuguuugggcaggcugcaggagcu

SEQ ID NO: 195594 - RNA, 32 nt, Human
gggaagcgcuucacuccagguugguagcuucu

SEQ ID NO: 195595 - RNA, 19 nt, Human
gggaagcggaggugggaga

SEQ ID NO: 195596 - RNA, 21 nt, Human
gggaagcggagguugcaguga

SEQ ID NO: 195597 - RNA, 22 nt, Human
gggaagcggagguugcagugag

SEQ ID NO: 195598 - RNA, 32 nt, Human
gggaagcggcagcagaggcagggaccacucgg

SEQ ID NO: 195599 - RNA, 32 nt, Human
gggaagcuacuuccuuuccuuuuggagaugau

SEQ ID NO: 195600 - RNA, 32 nt, Human
gggaagcuagcaccagccugggccgcacacac

SEQ ID NO: 195601 - RNA, 32 nt, Human
gggaagcuaucggagaaaauacuccagcaaaa

SEQ ID NO: 195602 - RNA, 32 nt, Human
gggaagcucaguccucacagggccgacccuuc

SEQ ID NO: 195603 - RNA, 32 nt, Human
gggaagcuccuccucagcuuugagcuguggcu

SEQ ID NO: 195604 - RNA, 32 nt, Human
gggaagcucugccucuuuccccagugggcgag

SEQ ID NO: 195605 - RNA, 32 nt, Human
gggaagcucuuuagcaauaucagcuaaaagga

SEQ ID NO: 195606 - RNA, 23 nt, Human
gggaagcugaggcaggagaauca

SEQ ID NO: 195607 - RNA, 23 nt, Human
gggaagcugaggcaggaggauca

SEQ ID NO: 195608 - RNA, 32 nt, Human
gggaagcugaggcaggugaauuguuugaaccu

SEQ ID NO: 195609 - RNA, 23 nt, Human
gggaagcugaggcgggcggauca

SEQ ID NO: 195610 - RNA, 32 nt, Human
gggaagcugcaccagcccugaggugucagcug

SEQ ID NO: 195611 - RNA, 21 nt, Human
gggaagcugcagcuugggaga

SEQ ID NO: 195612 - RNA, 20 nt, Human
gggaagcugcccugcccugg

SEQ ID NO: 195613 - RNA, 32 nt, Human
gggaagcugcuggccuggcccuccuggucucu

SEQ ID NO: 195614 - RNA, 32 nt, Human
gggaagcugcuuggacccagucucaaacuuaa

SEQ ID NO: 195615 - RNA, 32 nt, Human
gggaagcuggaggaggugggggagacagagcu

SEQ ID NO: 195616 - RNA, 32 nt, Human
gggaagcuggggacuugggaagugaugggugu

SEQ ID NO: 195617 - RNA, 32 nt, Human
gggaagcuggggcuccccugcccacaggagag

SEQ ID NO: 195618 - RNA, 21 nt, Human
gggaagcugggguccaccgcu

SEQ ID NO: 195619 - RNA, 32 nt, Human
gggaagcugggucugaggggagacugaccucg

SEQ ID NO: 195620 - RNA, 26 nt, Human
gggaagcuggugucugaguccucuga

SEQ ID NO: 195621 - RNA, 32 nt, Human
gggaagcuuagcaauguaucuucaaauuuauu

SEQ ID NO: 195622 - RNA, 32 nt, Human
gggaagcuuucuuuuggugguuuuguuuauua

SEQ ID NO: 195623 - RNA, 32 nt, Human
gggaaggaaaaccaguagcaucagcagcagca

SEQ ID NO: 195624 - RNA, 32 nt, Human
gggaaggaaacuuagcagagugcuauugacua

SEQ ID NO: 195625 - RNA, 32 nt, Human
gggaaggaaagccagacacaaugcugcaauga

SEQ ID NO: 195626 - RNA, 32 nt, Human
gggaaggaaaggagguuuguucugcuccccgc

SEQ ID NO: 195627 - RNA, 32 nt, Human
gggaaggaacaggcacuuggaguccagacauu

SEQ ID NO: 195628 - RNA, 20 nt, Human
gggaaggaaccaagcugaca

SEQ ID NO: 195629 - RNA, 32 nt, Human
gggaaggaagaaaggaaggagggagaagggaa

SEQ ID NO: 195630 - RNA, 32 nt, Human
gggaaggaagagggcgagaucuuggcauccug

SEQ ID NO: 195631 - RNA, 20 nt, Human
gggaaggaagcagauucgga

SEQ ID NO: 195632 - RNA, 21 nt, Human
gggaaggaaggaacuacaaga

SEQ ID NO: 195633 - RNA, 32 nt, Human
gggaaggaaggaagagagggaggcgggcaagc

SEQ ID NO: 195634 - RNA, 32 nt, Human
gggaaggaaggaugaggccagauacaguccug

SEQ ID NO: 195635 - RNA, 32 nt, Human
gggaaggaaggggguuucaaccauguccccuu

SEQ ID NO: 195636 - RNA, 32 nt, Human
gggaaggaaugagagagagugaaaaggagagg

SEQ ID NO: 195637 - RNA, 26 nt, Human
gggaaggacagcaggggcccuggggu

SEQ ID NO: 195638 - RNA, 26 nt, Human
gggaaggacagcaggggucccggggu

SEQ ID NO: 195639 - RNA, 26 nt, Human
gggaaggacagcagggguccuggggu

SEQ ID NO: 195640 - RNA, 19 nt, Human
gggaaggacaucuccaggg

SEQ ID NO: 195641 - RNA, 32 nt, Human
gggaaggaccaagccucacucccaugcagaga

SEQ ID NO: 195642 - RNA, 32 nt, Human
gggaaggagaaaggguacuauaaggaauugcu

SEQ ID NO: 195643 - RNA, 32 nt, Human
gggaaggagaauuuucagaaguugcuggaguu

SEQ ID NO: 195644 - RNA, 32 nt, Human
gggaaggagagagguuuagugccauguucagu

SEQ ID NO: 195645 - RNA, 32 nt, Human
gggaaggagagggaagaagggaggagcggugc

SEQ ID NO: 195646 - RNA, 32 nt, Human
gggaaggagagggaggggaccgucaggaagcc

SEQ ID NO: 195647 - RNA, 32 nt, Human
gggaaggagaggggagagcagcgacaggccuc

SEQ ID NO: 195648 - RNA, 32 nt, Human
gggaaggagaggggagggcaggggauagguag

SEQ ID NO: 195649 - RNA, 32 nt, Human
gggaaggagaugccucuuccuucccuucaaua

SEQ ID NO: 195650 - RNA, 32 nt, Human
gggaaggagcacggggcugaucaagccaucca

SEQ ID NO: 195651 - RNA, 32 nt, Human
gggaaggagcagaaagcugggaaaggggaugg

SEQ ID NO: 195652 - RNA, 32 nt, Human
gggaaggagcagucacugggagagguuacccg

SEQ ID NO: 195653 - RNA, 31 nt, Human
gggaaggagcagucucccagcccugggucug

SEQ ID NO: 195654 - RNA, 32 nt, Human
gggaaggagccccagagagccggcugucugac

SEQ ID NO: 195655 - RNA, 32 nt, Human
gggaaggagccccaggagggagagggacccgg

SEQ ID NO: 195656 - RNA, 32 nt, Human
gggaaggagccgcgcccccaccuggagcugaa

SEQ ID NO: 195657 - RNA, 32 nt, Human
gggaaggagcugggagaaggagccccaccucu

SEQ ID NO: 195658 - RNA, 32 nt, Human
gggaaggaggaggaggaggagcaaagguguug

SEQ ID NO: 195659 - RNA, 32 nt, Human
gggaaggaggcaggggugcugagaaggcggcu

SEQ ID NO: 195660 - RNA, 32 nt, Human
gggaaggagggagggagguaagaggggcuugg

SEQ ID NO: 195661 - RNA, 32 nt, Human
gggaaggagggccuguggcugcaguccaggca

SEQ ID NO: 195662 - RNA, 32 nt, Human
gggaaggaggggcaaggucuuucaggaaccag

SEQ ID NO: 195663 - RNA, 32 nt, Human
gggaaggagugaaggaaggagugaaaaagggg

SEQ ID NO: 195664 - RNA, 32 nt, Human
gggaaggaucccucuccucucugccauuucuu

SEQ ID NO: 195665 - RNA, 22 nt, Human
gggaaggaugaguccucggggu

SEQ ID NO: 195666 - RNA, 32 nt, Human
gggaaggauggaagaaugggcagaagcagcag

SEQ ID NO: 195667 - RNA, 32 nt, Human
gggaaggauggcagagucgugagaaagguguu

SEQ ID NO: 195668 - RNA, 32 nt, Human
gggaaggcaaacccucuuuauugaacauuagc

SEQ ID NO: 195669 - RNA, 32 nt, Human
gggaaggcaacuugauucugugggaagggcug

SEQ ID NO: 195670 - RNA, 32 nt, Human
gggaaggcacugaaacgucaccagagagacag

SEQ ID NO: 195671 - RNA, 32 nt, Human
gggaaggcacuuccgcuuaggcucccaacaaa

SEQ ID NO: 195672 - RNA, 32 nt, Human
gggaaggcagaagucccagggauccuggggga

SEQ ID NO: 195673 - RNA, 32 nt, Human
gggaaggcagacuucugugcuuucuuuccugu

SEQ ID NO: 195674 - RNA, 18 nt, Human
gggaaggcagcuggggga

SEQ ID NO: 195675 - RNA, 32 nt, Human
gggaaggcagggaaauuugacaucauccccac

SEQ ID NO: 195676 - RNA, 32 nt, Human
gggaaggcauacaggccucauccaccaggcaa

SEQ ID NO: 195677 - RNA, 32 nt, Human
gggaaggcauccaggaugcggugcggggcggc

SEQ ID NO: 195678 - RNA, 32 nt, Human
gggaaggccaagaagcagguguucuauggcga

SEQ ID NO: 195679 - RNA, 32 nt, Human
gggaaggccauggggaccugaaacauugcccc

SEQ ID NO: 195680 - RNA, 19 nt, Human
gggaaggcccugagcguca

SEQ ID NO: 195681 - RNA, 32 nt, Human
gggaaggccgcugggagcaugaacuucugagc

SEQ ID NO: 195682 - RNA, 22 nt, Human
gggaaggcgcgggagccagggg

SEQ ID NO: 195683 - RNA, 32 nt, Human
gggaaggcggacggcgccucacugcaggaaag

SEQ ID NO: 195684 - RNA, 19 nt, Human
gggaaggcuauuugggaca

SEQ ID NO: 195685 - RNA, 32 nt, Human
gggaaggcucagaagggcagaguugaagaagg

SEQ ID NO: 195686 - RNA, 32 nt, Human
gggaaggcugagcaaagggggagcagcuacag

SEQ ID NO: 195687 - RNA, 32 nt, Human
gggaaggcugagguaggagaaucuuuugaauc

SEQ ID NO: 195688 - RNA, 32 nt, Human
gggaaggcuuuccccucuugggccacaccugc

SEQ ID NO: 195689 - RNA, 22 nt, Human
gggaagggaagccgucaggugg

SEQ ID NO: 195690 - RNA, 32 nt, Human
gggaagggaaggaggagaaagcaggcgaagcg

SEQ ID NO: 195691 - RNA, 32 nt, Human
gggaagggaagggagaggcaagcuggcuguga

SEQ ID NO: 195692 - RNA, 32 nt, Human
gggaagggaagugccacacaaccagaucuugu

SEQ ID NO: 195693 - RNA, 32 nt, Human
gggaagggacaacauggaagaaacagcgauuu

SEQ ID NO: 195694 - RNA, 32 nt, Human
gggaagggagacuggcccugcccagccggucu

SEQ ID NO: 195695 - RNA, 32 nt, Human
gggaagggagagagugagacugggagaaagag

SEQ ID NO: 195696 - RNA, 32 nt, Human
gggaagggagagugagcgcaugcugaaauuua

SEQ ID NO: 195697 - RNA, 32 nt, Human
gggaagggagaugugacggaugaaaaggagac

SEQ ID NO: 195698 - RNA, 32 nt, Human
gggaagggaggagggagagggaggacagggag

SEQ ID NO: 195699 - RNA, 32 nt, Human
gggaagggaggauuggaagggagccauccucu

SEQ ID NO: 195700 - RNA, 32 nt, Human
gggaagggaggcaggaggcuucucuggguaua

SEQ ID NO: 195701 - RNA, 32 nt, Human
gggaagggaggcgggaggugggcuggggcagc

SEQ ID NO: 195702 - RNA, 32 nt, Human
gggaagggauccuauauguccuguuggcucuu

SEQ ID NO: 195703 - RNA, 32 nt, Human
gggaagggcagaaggaaggagggaagaaaaga

SEQ ID NO: 195704 - RNA, 32 nt, Human
gggaagggcccagccacuuccagcuuuugauc

SEQ ID NO: 195705 - RNA, 32 nt, Human
gggaagggcgaguggcggggacuggggaaggg

SEQ ID NO: 195706 - RNA, 32 nt, Human
gggaaggggaaagagggaggaaggggaggggc

SEQ ID NO: 195707 - RNA, 32 nt, Human
gggaaggggaacacagaccaggaagcucggug

SEQ ID NO: 195708 - RNA, 32 nt, Human
gggaaggggaagaggaagaagagugaacaaag

SEQ ID NO: 195709 - RNA, 32 nt, Human
gggaaggggagagagaaggaauggggagugaa

SEQ ID NO: 195710 - RNA, 32 nt, Human
gggaaggggcugaaagcggcagaggagugccc

SEQ ID NO: 195711 - RNA, 32 nt, Human
gggaaggggcugaggacgagacccccauccag

SEQ ID NO: 195712 - RNA, 32 nt, Human
gggaaggggcugggaucggaacuuccugcucu

SEQ ID NO: 195713 - RNA, 32 nt, Human
gggaagggggaaagguguaggcugggggauug

SEQ ID NO: 195714 - RNA, 32 nt, Human
gggaagggggcugaggcguggaggaaacgcuu

SEQ ID NO: 195715 - RNA, 20 nt, Human
gggaaggggucacugugcug

SEQ ID NO: 195716 - RNA, 32 nt, Human
gggaaggguggggaggggaugggcuggagcuc

SEQ ID NO: 195717 - RNA, 32 nt, Human
gggaagguaggugggaaaugacaagaugagug

SEQ ID NO: 195718 - RNA, 32 nt, Human
gggaaggucaccagaguucaguucaccugugg

SEQ ID NO: 195719 - RNA, 32 nt, Human
gggaaggucagaggagaaggcaggcagggccc

SEQ ID NO: 195720 - RNA, 20 nt, Human
gggaaggucuaugauacuca

SEQ ID NO: 195721 - RNA, 16 nt, Human
gggaaggucucccaca

SEQ ID NO: 195722 - RNA, 32 nt, Human
gggaaggucugcagcuucacuccugagccagc

SEQ ID NO: 195723 - RNA, 32 nt, Human
gggaaggucuugggaccaguucucucucacuc

SEQ ID NO: 195724 - RNA, 32 nt, Human
gggaaggugagccagacacaggccgggacaaa

SEQ ID NO: 195725 - RNA, 32 nt, Human
gggaaggugccucuggaugcugugaagagucu

SEQ ID NO: 195726 - RNA, 32 nt, Human
gggaagguggacaggcuaaccucuccagcugu

SEQ ID NO: 195727 - RNA, 32 nt, Human
gggaagguggggcuauggcagcugcuagggac

SEQ ID NO: 195728 - RNA, 32 nt, Human
gggaagguuagaaguacgaaggcaguuuggag

SEQ ID NO: 195729 - RNA, 25 nt, Human
gggaaguagaaugagaggucuguug

SEQ ID NO: 195730 - RNA, 19 nt, Human
gggaaguagaggcugggag

SEQ ID NO: 195731 - RNA, 32 nt, Human
gggaaguaggcccuuacuucuggcagggugcu

SEQ ID NO: 195732 - RNA, 32 nt, Human
gggaaguaguugaaucauggaggcagguauuu

SEQ ID NO: 195733 - RNA, 32 nt, Human
gggaaguauccaugggccccaggggaagcugc

SEQ ID NO: 195734 - RNA, 22 nt, Human
gggaagucaaggcagguggauc

SEQ ID NO: 195735 - RNA, 32 nt, Human
gggaagucacuguugaaguugcaguggcuugu

SEQ ID NO: 195736 - RNA, 32 nt, Human
gggaaguccaggagaacuauaaguugucucug

SEQ ID NO: 195737 - RNA, 32 nt, Human
gggaaguccuggcgcagaugggccacggggcc

SEQ ID NO: 195738 - RNA, 32 nt, Human
gggaagugagagaaaaggggaugagugcaggg

SEQ ID NO: 195739 - RNA, 32 nt, Human
gggaagugagcuugugcuuaguauuuacauug

SEQ ID NO: 195740 - RNA, 32 nt, Human
gggaagugccuguguggucuguuuacagugca

SEQ ID NO: 195741 - RNA, 32 nt, Human
gggaagugcuaccucagcuaagccgcucaggu

SEQ ID NO: 195742 - RNA, 32 nt, Human
gggaaguggaggaaaugcuggacaagaaggca

SEQ ID NO: 195743 - RNA, 32 nt, Human
gggaagugggaaucguuagguucguucuggac

SEQ ID NO: 195744 - RNA, 32 nt, Human
gggaagugggacuccuggcuccccagggccug

SEQ ID NO: 195745 - RNA, 32 nt, Human
gggaagugggagagacagagggagagugugca

SEQ ID NO: 195746 - RNA, 32 nt, Human
gggaaguggguggcagggagaaaagaacauca

SEQ ID NO: 195747 - RNA, 32 nt, Human
gggaaguggguuggagggaggccaggccggca

SEQ ID NO: 195748 - RNA, 22 nt, Human
gggaagugucugcccaccugcc

SEQ ID NO: 195749 - RNA, 32 nt, Human
gggaaguuaguggccacagaagagagaugaaa

SEQ ID NO: 195750 - RNA, 21 nt, Human
gggaaguucgcgacuuucuga

SEQ ID NO: 195751 - RNA, 23 nt, Human
gggaaguugagguaggcagauca

SEQ ID NO: 195752 - RNA, 32 nt, Human
gggaaguugcuggcugacugggcuugcgagga

SEQ ID NO: 195753 - RNA, 18 nt, Human
gggaaguuggcuggagga

SEQ ID NO: 195754 - RNA, 32 nt, Human
gggaaguugggcccaggcaguguugcugcggu

SEQ ID NO: 195755 - RNA, 32 nt, Human
gggaaguuguucacagaugcaaagauucaguu

SEQ ID NO: 195756 - RNA, 32 nt, Human
gggaaguuuacugggccaucacagacuuuugu

SEQ ID NO: 195757 - RNA, 22 nt, Human
gggaaguuuccugacuuucuga

SEQ ID NO: 195758 - RNA, 32 nt, Human
gggaaguuugucucuccuuucuugcccaacca

SEQ ID NO: 195759 - RNA, 25 nt, Human
gggaauaaagaguauguugucaagc

SEQ ID NO: 195760 - RNA, 32 nt, Human
gggaauaagggucuugacuguugcccaagcug

SEQ ID NO: 195761 - RNA, 32 nt, Human
gggaauaaugaacuagaaaccagcaagugaaa

SEQ ID NO: 195762 - RNA, 32 nt, Human
gggaauacagugccaugaucauagcucacugc

SEQ ID NO: 195763 - RNA, 32 nt, Human
gggaauaccugucucugcucuagcagaggcua

SEQ ID NO: 195764 - RNA, 32 nt, Human
gggaauagaaaggggcagggaggggacaucug

SEQ ID NO: 195765 - RNA, 32 nt, Human
gggaauaggauuuuauuuuaaauguggaacca

SEQ ID NO: 195766 - RNA, 32 nt, Human
gggaauauauuucagggaaccccacccccaca

SEQ ID NO: 195767 - RNA, 32 nt, Human
gggaaucaaauuacaagcuauuuaaguuuaua

SEQ ID NO: 195768 - RNA, 32 nt, Human
gggaaucaauaugcccuuucacaugccuuaga

SEQ ID NO: 195769 - RNA, 32 nt, Human
gggaaucacagcuggggcagaccucauccugg

SEQ ID NO: 195770 - RNA, 32 nt, Human
gggaaucacuugaaccugggaggcagagguug

SEQ ID NO: 195771 - RNA, 32 nt, Human
gggaaucacuugaaccugggaggcagaguuug

SEQ ID NO: 195772 - RNA, 19 nt, Human
gggaauccaacaucaguga

SEQ ID NO: 195773 - RNA, 32 nt, Human
gggaauccacagagaagcggguagggagagag

SEQ ID NO: 195774 - RNA, 32 nt, Human
gggaauccagaauguugagauagagacggccu

SEQ ID NO: 195775 - RNA, 24 nt, Human
gggaauccuaaaagaaaaccccga

SEQ ID NO: 195776 - RNA, 25 nt, Human
gggaauccuaagagauaaaccccga

SEQ ID NO: 195777 - RNA, 25 nt, Human
gggaauccuagaaagagaacccuga

SEQ ID NO: 195778 - RNA, 25 nt, Human
gggaauccuagaaucagaacccuga

SEQ ID NO: 195779 - RNA, 32 nt, Human
gggaauccugcccucugguugugucugucauc

SEQ ID NO: 195780 - RNA, 32 nt, Human
gggaauccuggugaauauagugcugcuauguu

SEQ ID NO: 195781 - RNA, 32 nt, Human
gggaauccuggugcucaaauuacccuccaaaa

SEQ ID NO: 195782 - RNA, 32 nt, Human
gggaaucucaacaaccagggaucaggaggguc

SEQ ID NO: 195783 - RNA, 32 nt, Human
gggaaucucaguagcugggaauuauggaaaaa

SEQ ID NO: 195784 - RNA, 32 nt, Human
gggaaucuccccaggaugacugaagaugacuu

SEQ ID NO: 195785 - RNA, 32 nt, Human
gggaaucucccccgucaggugccugcagauua

SEQ ID NO: 195786 - RNA, 32 nt, Human
gggaaucugaggcagaggagggugaggccugu

SEQ ID NO: 195787 - RNA, 32 nt, Human
gggaaucugcaagaaccucccuuucccccucc

SEQ ID NO: 195788 - RNA, 32 nt, Human
gggaaucugcaagcugugcauugggcuuaccu

SEQ ID NO: 195789 - RNA, 32 nt, Human
gggaaucugcauuuuaguagcuucucagguga

SEQ ID NO: 195790 - RNA, 26 nt, Human
gggaaucugcuacagagaaggacaga

SEQ ID NO: 195791 - RNA, 32 nt, Human
gggaaucuggggacccaacacaacauccugaa

SEQ ID NO: 195792 - RNA, 32 nt, Human
gggaaucuucuuuccuccccucccauggacac

SEQ ID NO: 195793 - RNA, 22 nt, Human
gggaaugaaugggccucugaug

SEQ ID NO: 195794 - RNA, 23 nt, Human
gggaaugaauggggaggccgcug

SEQ ID NO: 195795 - RNA, 32 nt, Human
gggaaugacagugucugcaagccauugauauu

SEQ ID NO: 195796 - RNA, 32 nt, Human
gggaaugagaacaagccagacuuggugguuuc

SEQ ID NO: 195797 - RNA, 32 nt, Human
gggaaugaggaaggagugaggggaagaacaga

SEQ ID NO: 195798 - RNA, 32 nt, Human
gggaaugaggggaagccauuuuccagugacuu

SEQ ID NO: 195799 - RNA, 32 nt, Human
gggaaugcacacacgugcacuggagcagcugc

SEQ ID NO: 195800 - RNA, 32 nt, Human
gggaaugcagaggagacacagagccggcgggc

SEQ ID NO: 195801 - RNA, 32 nt, Human
gggaaugcauuccguuuuccuggguggaagcu

SEQ ID NO: 195802 - RNA, 32 nt, Human
gggaaugcgugagaggagagcagcucugagcc

SEQ ID NO: 195803 - RNA, 32 nt, Human
gggaaugcuauuuauuuuuauauuguguauau

SEQ ID NO: 195804 - RNA, 32 nt, Human
gggaauggaaagucugaguaacaagacaucuc

SEQ ID NO: 195805 - RNA, 32 nt, Human
gggaauggacuguacauugcucauuucacacu

SEQ ID NO: 195806 - RNA, 32 nt, Human
gggaauggaggaggcaggcggggcuggagacg

SEQ ID NO: 195807 - RNA, 32 nt, Human
gggaauggagucucagucuguugcccaggcug

SEQ ID NO: 195808 - RNA, 32 nt, Human
gggaauggaugcuucacuugaucuccggaccu

SEQ ID NO: 195809 - RNA, 32 nt, Human
gggaauggcgcuggcaucuggcugccacucug

SEQ ID NO: 195810 - RNA, 32 nt, Human
gggaauggcgugaacccaggaggcagagcuug

SEQ ID NO: 195811 - RNA, 32 nt, Human
gggaauggcuugaacccaggaggcagagguug

SEQ ID NO: 195812 - RNA, 29 nt, Human
gggaaugggaaagacagaagagaagggaa

SEQ ID NO: 195813 - RNA, 32 nt, Human
gggaaugggaaagacagaagagaagggaaaug

SEQ ID NO: 195814 - RNA, 32 nt, Human
gggaaugggagaagaugggagcuaagaaugua

SEQ ID NO: 195815 - RNA, 31 nt, Human
gggaauggggagagagaggaagcgacugagc

SEQ ID NO: 195816 - RNA, 32 nt, Human
gggaauggggucccggccgggaggcuuggccu

SEQ ID NO: 195817 - RNA, 31 nt, Human
gggaaugggguggaagggugauggggagcua

SEQ ID NO: 195818 - RNA, 32 nt, Human
gggaaugggguuucaaccacguuggccaggcu

SEQ ID NO: 195819 - RNA, 32 nt, Human
gggaaugguuaaauacauuauggccagcuuaa

SEQ ID NO: 195820 - RNA, 32 nt, Human
gggaauguaaagcuuucauccuuuguaugcaa

SEQ ID NO: 195821 - RNA, 32 nt, Human
gggaauguaaaggcuucauccuuuguauguaa

SEQ ID NO: 195822 - RNA, 32 nt, Human
gggaauguacugaaaggagccugcucuaccgc

SEQ ID NO: 195823 - RNA, 32 nt, Human
gggaauguagagcuagccaacauaucacauuc

SEQ ID NO: 195824 - RNA, 24 nt, Human
gggaauguagguuuuggcuuuuua

SEQ ID NO: 195825 - RNA, 29 nt, Human
gggaaugugcugccccacauguccaggcu

SEQ ID NO: 195826 - RNA, 32 nt, Human
gggaauguggggaucagggagguggagggaca

SEQ ID NO: 195827 - RNA, 32 nt, Human
gggaauguuauggguaacagacaugcaggcau

SEQ ID NO: 195828 - RNA, 22 nt, Human
gggaauguugucauccaggugg

SEQ ID NO: 195829 - RNA, 32 nt, Human
gggaauguuguuuucugacuaggcugaucauu

SEQ ID NO: 195830 - RNA, 32 nt, Human
gggaauguuugccucugccucugacacacagc

SEQ ID NO: 195831 - RNA, 24 nt, Human
gggaauuaaaaaagaacucugcag

SEQ ID NO: 195832 - RNA, 32 nt, Human
gggaauuagggugggggugggggaugaaggga

SEQ ID NO: 195833 - RNA, 32 nt, Human
gggaauuaguuugagggugaggguacauaugu

SEQ ID NO: 195834 - RNA, 32 nt, Human
gggaauuccaauucuuuuucucuccuuagauc

SEQ ID NO: 195835 - RNA, 32 nt, Human
gggaauucgagaccagccugaccaacauggag

SEQ ID NO: 195836 - RNA, 32 nt, Human
gggaauucgagaucagcgggaccaacauggug

SEQ ID NO: 195837 - RNA, 32 nt, Human
gggaauucucaaauaacaaaagaauggguucc

SEQ ID NO: 195838 - RNA, 32 nt, Human
gggaauugaacugggaccugcacugaacuuaa

SEQ ID NO: 195839 - RNA, 32 nt, Human
gggaauugagggcucaggggaggcaggaagau

SEQ ID NO: 195840 - RNA, 32 nt, Human
gggaauugcuugaacccgggaggcagagguua

SEQ ID NO: 195841 - RNA, 32 nt, Human
gggaauuggacagaggaaaggaaggggaaccc

SEQ ID NO: 195842 - RNA, 32 nt, Human
gggaauuggccugccuugcaugugagcuugau

SEQ ID NO: 195843 - RNA, 32 nt, Human
gggaauuggggaggggucguggcaggcagggu

SEQ ID NO: 195844 - RNA, 25 nt, Human
gggaauuggucccagguacaacaga

SEQ ID NO: 195845 - RNA, 32 nt, Human
gggaauuguugccuccugcucuuuuguuacug

SEQ ID NO: 195846 - RNA, 32 nt, Human
gggaauuuaucaccaacauccauuguaggggg

SEQ ID NO: 195847 - RNA, 20 nt, Human
gggaauuuccaccucugccu

SEQ ID NO: 195848 - RNA, 32 nt, Human
gggaauuucuggaaucucguauuugggggcuu

SEQ ID NO: 195849 - RNA, 32 nt, Human
gggaauuugggggauucgacagcagugacaga

SEQ ID NO: 195850 - RNA, 32 nt, Human
gggaauuuugcugcucccuauugcuucuguuu

SEQ ID NO: 195851 - RNA, 20 nt, Human
gggacaaaagaaucugaaca

SEQ ID NO: 195852 - RNA, 31 nt, Human
gggacaaagagacuguugguaacuguggauu

SEQ ID NO: 195853 - RNA, 22 nt, Human
gggacaaaggugcgucccuuca

SEQ ID NO: 195854 - RNA, 32 nt, Human
gggacaaagugugggugauccuggagacgcca

SEQ ID NO: 195855 - RNA, 32 nt, Human
gggacaacauguuucacagacaaaucauccaa

SEQ ID NO: 195856 - RNA, 32 nt, Human
gggacaaccaaaacaggucugcagagcaaagg

SEQ ID NO: 195857 - RNA, 32 nt, Human
gggacaaccagcuccccgacaacuccuaggug

SEQ ID NO: 195858 - RNA, 32 nt, Human
gggacaaccagcuuucagaguagccucaucag

SEQ ID NO: 195859 - RNA, 19 nt, Human
gggacaacccccuuccuua

SEQ ID NO: 195860 - RNA, 32 nt, Human
gggacaacugauuugcauuaugcucagcuggg

SEQ ID NO: 195861 - RNA, 32 nt, Human
gggacaagacuccgacuccagcucugacuuuu

SEQ ID NO: 195862 - RNA, 32 nt, Human
gggacaagagggcggaggaagaaguggggagc

SEQ ID NO: 195863 - RNA, 32 nt, Human
gggacaagauacauaugaggacaagguauaca

SEQ ID NO: 195864 - RNA, 32 nt, Human
gggacaagccauccaaaaaccccaggcccaca

SEQ ID NO: 195865 - RNA, 19 nt, Human
gggacaagcccuggagaaa

SEQ ID NO: 195866 - RNA, 23 nt, Human
gggacaagcuguggagcuggcug

SEQ ID NO: 195867 - RNA, 32 nt, Human
gggacaaggacaccuccagacagguugccagg

SEQ ID NO: 195868 - RNA, 32 nt, Human
gggacaagguaggggagagggaaaaacaguuu

SEQ ID NO: 195869 - RNA, 32 nt, Human
gggacaagguguuagaugaauuugaacaaaac

SEQ ID NO: 195870 - RNA, 32 nt, Human
gggacaaguacacgauccgcuggcauccagga

SEQ ID NO: 195871 - RNA, 32 nt, Human
gggacaagugcuugugugaguccuccgacaau

SEQ ID NO: 195872 - RNA, 32 nt, Human
gggacaaugccggcagccugagcccaggcacc

SEQ ID NO: 195873 - RNA, 32 nt, Human
gggacacaaagagggauggaagaaaagaacaa

SEQ ID NO: 195874 - RNA, 32 nt, Human
gggacacacacagucuucacugugcugcagcc

SEQ ID NO: 195875 - RNA, 31 nt, Human
gggacacacagccaggcaaggagggagcuca

SEQ ID NO: 195876 - RNA, 32 nt, Human
gggacacacgccuucagguuugcucagggguu

SEQ ID NO: 195877 - RNA, 32 nt, Human
gggacacacgugaagaggggaggcaggaagau

SEQ ID NO: 195878 - RNA, 32 nt, Human
gggacacagcacaaacgguguuuacgccacug

SEQ ID NO: 195879 - RNA, 32 nt, Human
gggacacagcagcguccggcgagaugaaggcg

SEQ ID NO: 195880 - RNA, 32 nt, Human
gggacacagcuauaacuguccagcucugugca

SEQ ID NO: 195881 - RNA, 18 nt, Human
gggacacagcucuucucu

SEQ ID NO: 195882 - RNA, 24 nt, Human
gggacacagcucuucucuccuucu

SEQ ID NO: 195883 - RNA, 32 nt, Human
gggacacaggcagcuggcaugggagggacuuu

SEQ ID NO: 195884 - RNA, 32 nt, Human
gggacacaggcuuggggcccacccucagaccu

SEQ ID NO: 195885 - RNA, 32 nt, Human
gggacacaugagacgcuacugcagcuuuugcc

SEQ ID NO: 195886 - RNA, 32 nt, Human
gggacaccagagagucguguggcugagguuuc

SEQ ID NO: 195887 - RNA, 32 nt, Human
gggacaccaggaugaggucagagagugcacug

SEQ ID NO: 195888 - RNA, 21 nt, Human
gggacacccacucgcuggcug

SEQ ID NO: 195889 - RNA, 32 nt, Human
gggacacccuggaagccaggaaauggacucag

SEQ ID NO: 195890 - RNA, 32 nt, Human
gggacacccuugcuguggaaaggacauccuua

SEQ ID NO: 195891 - RNA, 23 nt, Human
gggacaccgaggcaggagaauca

SEQ ID NO: 195892 - RNA, 32 nt, Human
gggacaccucucccccucaucccccgauguac

SEQ ID NO: 195893 - RNA, 32 nt, Human
gggacaccuggaagccaggaauugauuguacg

SEQ ID NO: 195894 - RNA, 22 nt, Human
gggacacgaauugccuggcuga

SEQ ID NO: 195895 - RNA, 22 nt, Human
gggacacggcccugcuggguga

SEQ ID NO: 195896 - RNA, 20 nt, Human
gggacacgggcagcucaggu

SEQ ID NO: 195897 - RNA, 23 nt, Human
gggacacgggggaccaccaggug

SEQ ID NO: 195898 - RNA, 32 nt, Human
gggacacgguguccaccauccccagcuggugg

SEQ ID NO: 195899 - RNA, 32 nt, Human
gggacacguagaggagagaaaagcgaccaaga

SEQ ID NO: 195900 - RNA, 22 nt, Human
gggacacguggggaguggggug

SEQ ID NO: 195901 - RNA, 20 nt, Human
gggacacuaaccauccaggu

SEQ ID NO: 195902 - RNA, 32 nt, Human
gggacacuaucaugaccacagacucagcauca

SEQ ID NO: 195903 - RNA, 32 nt, Human
gggacacucccaggccagcccaggggucaggg

SEQ ID NO: 195904 - RNA, 32 nt, Human
gggacacucugggccggccuucugccugcaug

SEQ ID NO: 195905 - RNA, 32 nt, Human
gggacacugccuggcagaggcugcgagcaugg

SEQ ID NO: 195906 - RNA, 32 nt, Human
gggacacugggucauggccuggaguugcugau

SEQ ID NO: 195907 - RNA, 32 nt, Human
gggacacugggucccggguucgugcuccuggu

SEQ ID NO: 195908 - RNA, 32 nt, Human
gggacacuuucagcuucuacuuuugccuucua

SEQ ID NO: 195909 - RNA, 32 nt, Human
gggacacuuuucuucccuccagccaggguuuc

SEQ ID NO: 195910 - RNA, 22 nt, Human
gggacagaaaagagaagacaga

SEQ ID NO: 195911 - RNA, 32 nt, Human
gggacagaaagagggucaguggacuuuugugg

SEQ ID NO: 195912 - RNA, 22 nt, Human
gggacagaaagguggacugggg

SEQ ID NO: 195913 - RNA, 32 nt, Human
gggacagaaauguggcuccaguugcucugucu

SEQ ID NO: 195914 - RNA, 21 nt, Human
gggacagaagaaauaaugggg

SEQ ID NO: 195915 - RNA, 32 nt, Human
gggacagaagaagaggaugaggaugagaugga

SEQ ID NO: 195916 - RNA, 26 nt, Human
gggacagaagaagccuccaaaucugg

SEQ ID NO: 195917 - RNA, 32 nt, Human
gggacagacagagagagggcccauggccugcu

SEQ ID NO: 195918 - RNA, 32 nt, Human
gggacagacauggguguuucagguugggaucu

SEQ ID NO: 195919 - RNA, 32 nt, Human
gggacagacuggccguugcuguggagacgccu

SEQ ID NO: 195920 - RNA, 32 nt, Human
gggacagagaaagaagggacagaggaaagggg

SEQ ID NO: 195921 - RNA, 20 nt, Human
gggacagagacagacagagg

SEQ ID NO: 195922 - RNA, 32 nt, Human
gggacagagagaggagaggaggaagauugagc

SEQ ID NO: 195923 - RNA, 21 nt, Human
gggacagagagcagggggcag

SEQ ID NO: 195924 - RNA, 22 nt, Human
gggacagagauggcaccugggg

SEQ ID NO: 195925 - RNA, 32 nt, Human
gggacagagcagaggaaggcaggggauuuagg

SEQ ID NO: 195926 - RNA, 21 nt, Human
gggacagagcagaggggccag

SEQ ID NO: 195927 - RNA, 32 nt, Human
gggacagagcugggaguccugaaggagaaagc

SEQ ID NO: 195928 - RNA, 32 nt, Human
gggacagaggaaaaggagagagagggggcucu

SEQ ID NO: 195929 - RNA, 24 nt, Human
gggacagaggaagcaauauggugg

SEQ ID NO: 195930 - RNA, 24 nt, Human
gggacagaggaaggccuccugagg

SEQ ID NO: 195931 - RNA, 22 nt, Human
gggacagaggaggcucgugggg

SEQ ID NO: 195932 - RNA, 20 nt, Human
gggacagaggagguaacaga

SEQ ID NO: 195933 - RNA, 18 nt, Human
gggacagaggcagagaga

SEQ ID NO: 195934 - RNA, 21 nt, Human
gggacagaggccaaggacuga

SEQ ID NO: 195935 - RNA, 20 nt, Human
gggacagaggcucaccuggg

SEQ ID NO: 195936 - RNA, 32 nt, Human
gggacagaggcugaugcuggaguggccaguag

SEQ ID NO: 195937 - RNA, 21 nt, Human
gggacagaggucagccuaagg

SEQ ID NO: 195938 - RNA, 32 nt, Human
gggacagagguggagacaggugcagugaccca

SEQ ID NO: 195939 - RNA, 22 nt, Human
gggacagagugagacccugucu

SEQ ID NO: 195940 - RNA, 22 nt, Human
gggacagagugagacuccaucu

SEQ ID NO: 195941 - RNA, 22 nt, Human
gggacagagugagacucugucu

SEQ ID NO: 195942 - RNA, 32 nt, Human
gggacagaguuucacucuuguugcccaggcgg

SEQ ID NO: 195943 - RNA, 32 nt, Human
gggacagauacuggaaucgggggugggacuug

SEQ ID NO: 195944 - RNA, 32 nt, Human
gggacagauccagaaacugagaagcuuauccg

SEQ ID NO: 195945 - RNA, 32 nt, Human
gggacagauccagcaggccccagucucgcauc

SEQ ID NO: 195946 - RNA, 32 nt, Human
gggacagcacagacccucuggcuggggcagcg

SEQ ID NO: 195947 - RNA, 20 nt, Human
gggacagcagaacgccaggg

SEQ ID NO: 195948 - RNA, 32 nt, Human
gggacagcagagaagaaacuagccagcuguga

SEQ ID NO: 195949 - RNA, 18 nt, Human
gggacagcagcugggaga

SEQ ID NO: 195950 - RNA, 32 nt, Human
gggacagccaaguugcugggcccagcugaacc

SEQ ID NO: 195951 - RNA, 16 nt, Human
gggacagcccagguca

SEQ ID NO: 195952 - RNA, 23 nt, Human
gggacagccggccaccugcccag

SEQ ID NO: 195953 - RNA, 32 nt, Human
gggacagccuggggcugcccagagacuguggg

SEQ ID NO: 195954 - RNA, 32 nt, Human
gggacagcgauucugagggugacugaggcuac

SEQ ID NO: 195955 - RNA, 20 nt, Human
gggacagcggcgggcggcug

SEQ ID NO: 195956 - RNA, 32 nt, Human
gggacagcgucagccccuccagccuggcucuu

SEQ ID NO: 195957 - RNA, 32 nt, Human
gggacagcuaaggacgacaagaggaggccgaa

SEQ ID NO: 195958 - RNA, 32 nt, Human
gggacagcucuggccagggcucugggacugca

SEQ ID NO: 195959 - RNA, 32 nt, Human
gggacagcuggacggcugccucccaggggcau

SEQ ID NO: 195960 - RNA, 32 nt, Human
gggacaggaaaagcaugaccagaugcucccuc

SEQ ID NO: 195961 - RNA, 32 nt, Human
gggacaggagaaaugaaauaccuggaacgaga

SEQ ID NO: 195962 - RNA, 32 nt, Human
gggacaggagugaauagaaagggaggagagcu

SEQ ID NO: 195963 - RNA, 21 nt, Human
gggacaggcaacaucuaucca

SEQ ID NO: 195964 - RNA, 32 nt, Human
gggacaggccaugugggagaccccaguugugc

SEQ ID NO: 195965 - RNA, 32 nt, Human
gggacaggcccaggcccgaccucaggucaucc

SEQ ID NO: 195966 - RNA, 24 nt, Human
gggacaggccgggcagugucccca

SEQ ID NO: 195967 - RNA, 32 nt, Human
gggacaggccucaccucuacccaaacccuagg

SEQ ID NO: 195968 - RNA, 21 nt, Human
gggacaggcucagccuccuca

SEQ ID NO: 195969 - RNA, 32 nt, Human
gggacaggcugcagccggugcaguuacacguu

SEQ ID NO: 195970 - RNA, 32 nt, Human
gggacagggaauuggcccugggagaaaacgcg

SEQ ID NO: 195971 - RNA, 32 nt, Human
gggacagggaggugacaguggaacaggcuacc

SEQ ID NO: 195972 - RNA, 32 nt, Human
gggacagggaggugugaggcaggagagacagu

SEQ ID NO: 195973 - RNA, 20 nt, Human
gggacagggccucacucugu

SEQ ID NO: 195974 - RNA, 32 nt, Human
gggacagggcuaauuaauuugcuuuauacauu

SEQ ID NO: 195975 - RNA, 32 nt, Human
gggacagggcugaggaugaggagaacccuggg

SEQ ID NO: 195976 - RNA, 32 nt, Human
gggacaggggcaggaggaagggguaggauuac

SEQ ID NO: 195977 - RNA, 32 nt, Human
gggacaggggcaggggcaggggcggagccccu

SEQ ID NO: 195978 - RNA, 32 nt, Human
gggacagggggaggggaggagcuagggaaaga

SEQ ID NO: 195979 - RNA, 32 nt, Human
gggacagggugaggguauacccaaagcugaug

SEQ ID NO: 195980 - RNA, 32 nt, Human
gggacaggguggcugagaaccaggacagggcc

SEQ ID NO: 195981 - RNA, 32 nt, Human
gggacagggugggcgggggugaggcugugaca

SEQ ID NO: 195982 - RNA, 23 nt, Human
gggacagggugugagcugggguc

SEQ ID NO: 195983 - RNA, 32 nt, Human
gggacaggguuucaccauguuaaccagucugg

SEQ ID NO: 195984 - RNA, 32 nt, Human
gggacagguagaggaugcuuuucguuucacug

SEQ ID NO: 195985 - RNA, 32 nt, Human
gggacagguccaggcuggcugaagacagucca

SEQ ID NO: 195986 - RNA, 32 nt, Human
gggacagguuccugccuuaucauuuucucccu

SEQ ID NO: 195987 - RNA, 32 nt, Human
gggacaguaagccagggguuaagguucuuucc

SEQ ID NO: 195988 - RNA, 32 nt, Human
gggacaguaagguuuggaggaagggggaucgu

SEQ ID NO: 195989 - RNA, 32 nt, Human
gggacagucaccgcugggguccuggcugcucu

SEQ ID NO: 195990 - RNA, 32 nt, Human
gggacagucagucaggaugacacuucggcauc

SEQ ID NO: 195991 - RNA, 25 nt, Human
gggacagucaugggaauguggggga

SEQ ID NO: 195992 - RNA, 22 nt, Human
gggacagucccucuccgugcgg

SEQ ID NO: 195993 - RNA, 32 nt, Human
gggacagugaaaggcagguuugagcugcugaa

SEQ ID NO: 195994 - RNA, 22 nt, Human
gggacagugcagagcaccgggg

SEQ ID NO: 195995 - RNA, 23 nt, Human
gggacagugccaagaguggggug

SEQ ID NO: 195996 - RNA, 32 nt, Human
gggacagugcugucccccaccccugcacacag

SEQ ID NO: 195997 - RNA, 32 nt, Human
gggacaguggccagggacuucggugcagauua

SEQ ID NO: 195998 - RNA, 32 nt, Human
gggacagugugggccuggccucuccuuuccuu

SEQ ID NO: 195999 - RNA, 21 nt, Human
gggacauaaacggggcggcug

SEQ ID NO: 196000 - RNA, 32 nt, Human
gggacauaugcagauccaaagaccuaaacaau

SEQ ID NO: 196001 - RNA, 26 nt, Human
gggacaucaaaaacagcagaacuucu

SEQ ID NO: 196002 - RNA, 32 nt, Human
gggacaucagcccuucauguagccccuugcug

SEQ ID NO: 196003 - RNA, 32 nt, Human
gggacauccuggacuugagccuagagauuuag

SEQ ID NO: 196004 - RNA, 32 nt, Human
gggacaucgcuguuccccagaaacccacucua

SEQ ID NO: 196005 - RNA, 32 nt, Human
gggacaucgggggcaaguuugcaguggggccg

SEQ ID NO: 196006 - RNA, 32 nt, Human
gggacaucucacuccacuccuaccucccuuac

SEQ ID NO: 196007 - RNA, 32 nt, Human
gggacaugaaggaggcggauacggcuggaccu

SEQ ID NO: 196008 - RNA, 18 nt, Human
gggacaugacaaaggugg

SEQ ID NO: 196009 - RNA, 32 nt, Human
gggacaugagccauucacaacagaggagaguu

SEQ ID NO: 196010 - RNA, 32 nt, Human
gggacaugaggccucaguggguggugagaggg

SEQ ID NO: 196011 - RNA, 20 nt, Human
gggacaugauccucuccuua

SEQ ID NO: 196012 - RNA, 19 nt, Human
gggacaugcaagggccaga

SEQ ID NO: 196013 - RNA, 32 nt, Human
gggacaugcacauaucagggguuguuugcagg

SEQ ID NO: 196014 - RNA, 21 nt, Human
gggacauggaggcauggguga

SEQ ID NO: 196015 - RNA, 23 nt, Human
gggacauggaugaagcuagguga

SEQ ID NO: 196016 - RNA, 23 nt, Human
gggacauggcccaggacacgggg

SEQ ID NO: 196017 - RNA, 32 nt, Human
gggacauggcccaucuggaauauucacaaaca

SEQ ID NO: 196018 - RNA, 32 nt, Human
gggacauggcuacccuucacuuuuggagggag

SEQ ID NO: 196019 - RNA, 17 nt, Human
gggacaugggggcccuc

SEQ ID NO: 196020 - RNA, 31 nt, Human
gggacauggguggaaugauggcagaauccag

SEQ ID NO: 196021 - RNA, 32 nt, Human
gggacauguuaaggaaaacaaauauguucauc

SEQ ID NO: 196022 - RNA, 20 nt, Human
gggacauuaaaccugaccuc

SEQ ID NO: 196023 - RNA, 32 nt, Human
gggacauugcagccgccuaccugcuccaggga

SEQ ID NO: 196024 - RNA, 18 nt, Human
gggacauuggggaguggg

SEQ ID NO: 196025 - RNA, 32 nt, Human
gggacauuugccagacccugugcuucucugcu

SEQ ID NO: 196026 - RNA, 18 nt, Human
gggacauuugcccccucc

SEQ ID NO: 196027 - RNA, 32 nt, Human
gggacauuuuggugaagaugcaauauuuuuau

SEQ ID NO: 196028 - RNA, 32 nt, Human
gggaccaaaaggauuaaugauaauuaauaaag

SEQ ID NO: 196029 - RNA, 32 nt, Human
gggaccaaauagugcuccugggugcauuguca

SEQ ID NO: 196030 - RNA, 32 nt, Human
gggaccaacaucaccacugacauucuguggcu

SEQ ID NO: 196031 - RNA, 32 nt, Human
gggaccaacauggugaaaccccgucucuacua

SEQ ID NO: 196032 - RNA, 32 nt, Human
gggaccaaccaaagugugucaacccuguuucc

SEQ ID NO: 196033 - RNA, 18 nt, Human
gggaccaaggcugggccc

SEQ ID NO: 196034 - RNA, 32 nt, Human
gggaccaagguggcacggugguacugggggug

SEQ ID NO: 196035 - RNA, 24 nt, Human
gggaccaaguacccucuggucuuu

SEQ ID NO: 196036 - RNA, 32 nt, Human
gggaccaagucacuugcuuccuuacuuagcaa

SEQ ID NO: 196037 - RNA, 32 nt, Human
gggaccacagagcaccagccugcauggaacuu

SEQ ID NO: 196038 - RNA, 32 nt, Human
gggaccacaggcgcccccaccauguccggcua

SEQ ID NO: 196039 - RNA, 32 nt, Human
gggaccacauggucaguaggcacacugccccu

SEQ ID NO: 196040 - RNA, 32 nt, Human
gggaccaccgaggacucugucacugcagaccc

SEQ ID NO: 196041 - RNA, 32 nt, Human
gggaccaccgagggcucugucacugcagaccc

SEQ ID NO: 196042 - RNA, 32 nt, Human
gggaccacugaaucuguuucuccagucuuggc

SEQ ID NO: 196043 - RNA, 32 nt, Human
gggaccacugggaaaugccccuugucccuuug

SEQ ID NO: 196044 - RNA, 32 nt, Human
gggaccacuucugccuuccuacguggcagugg

SEQ ID NO: 196045 - RNA, 32 nt, Human
gggaccagaacuuccccucccuuccccuuuuc

SEQ ID NO: 196046 - RNA, 32 nt, Human
gggaccagagggagccaggcagcuguguacag

SEQ ID NO: 196047 - RNA, 32 nt, Human
gggaccagagggugggacggccagguaucacu

SEQ ID NO: 196048 - RNA, 21 nt, Human
gggaccagcacaccugggcug

SEQ ID NO: 196049 - RNA, 22 nt, Human
gggaccagcagccagcaugcug

SEQ ID NO: 196050 - RNA, 32 nt, Human
gggaccagcagucuuucugauaacugggagag

SEQ ID NO: 196051 - RNA, 20 nt, Human
gggaccagccagggaggcag

SEQ ID NO: 196052 - RNA, 32 nt, Human
gggaccagcccuggugggcaugggguggggag

SEQ ID NO: 196053 - RNA, 21 nt, Human
gggaccagccggccugggaga

SEQ ID NO: 196054 - RNA, 32 nt, Human
gggaccagccugagguguaagggcagacaaac

SEQ ID NO: 196055 - RNA, 32 nt, Human
gggaccagccugggcaacauagggggauccca

SEQ ID NO: 196056 - RNA, 32 nt, Human
gggaccagccugggcuauauagcaagacccca

SEQ ID NO: 196057 - RNA, 26 nt, Human
gggaccagccuugccaacugcugcug

SEQ ID NO: 196058 - RNA, 32 nt, Human
gggaccagcgcuagccugaggagcucagagcc

SEQ ID NO: 196059 - RNA, 32 nt, Human
gggaccagcugggcagaugagaggcugagccu

SEQ ID NO: 196060 - RNA, 32 nt, Human
gggaccaggaaaccucuugcuugagugcugga

SEQ ID NO: 196061 - RNA, 32 nt, Human
gggaccaggaagacucauuccaaaaaggagcc

SEQ ID NO: 196062 - RNA, 32 nt, Human
gggaccaggaggaggaggaggaggaggaggag

SEQ ID NO: 196063 - RNA, 32 nt, Human
gggaccaggaguagcugucauuugauauguau

SEQ ID NO: 196064 - RNA, 24 nt, Human
gggaccaggaguuugagacuagcu

SEQ ID NO: 196065 - RNA, 21 nt, Human
gggaccaggcccuugaucaca

SEQ ID NO: 196066 - RNA, 32 nt, Human
gggaccaggccuguugucuuuugggugaggac

SEQ ID NO: 196067 - RNA, 32 nt, Human
gggaccaggcucccagugggcagcccuggccu

SEQ ID NO: 196068 - RNA, 32 nt, Human
gggaccaggcugggaggacagagccagcagcu

SEQ ID NO: 196069 - RNA, 32 nt, Human
gggaccaggcugggaggggaguguggcaggga

SEQ ID NO: 196070 - RNA, 32 nt, Human
gggaccaggcuggggucgcugcguugcugugc

SEQ ID NO: 196071 - RNA, 32 nt, Human
gggaccagggaggggaacaggagccagacaug

SEQ ID NO: 196072 - RNA, 32 nt, Human
gggaccaggucuguggaaaguggugcaugguc

SEQ ID NO: 196073 - RNA, 20 nt, Human
gggaccagguggggcgggug

SEQ ID NO: 196074 - RNA, 26 nt, Human
gggaccagucaguguuggcgcuggag

SEQ ID NO: 196075 - RNA, 32 nt, Human
gggaccagugaccaccuggacaugcaggaggg

SEQ ID NO: 196076 - RNA, 32 nt, Human
gggaccagugcagccgccgccucccaggaucg

SEQ ID NO: 196077 - RNA, 32 nt, Human
gggaccagugggaugggcucuaccucucuuuc

SEQ ID NO: 196078 - RNA, 32 nt, Human
gggaccaucacugagagucaggaguuuuacug

SEQ ID NO: 196079 - RNA, 17 nt, Human
gggaccaucccccuucu

SEQ ID NO: 196080 - RNA, 32 nt, Human
gggaccauccuggcuaacacgcgguaaaacau

SEQ ID NO: 196081 - RNA, 32 nt, Human
gggaccaugagaccucccacuccuggggccag

SEQ ID NO: 196082 - RNA, 32 nt, Human
gggaccaugaggguuggugugggaucuggugg

SEQ ID NO: 196083 - RNA, 32 nt, Human
gggaccaugccagcaacuaccaaaaaucucuu

SEQ ID NO: 196084 - RNA, 32 nt, Human
gggaccauggcagagaaaagcaggagaggagc

SEQ ID NO: 196085 - RNA, 32 nt, Human
gggaccauggggcuccugaccauucugaagaa

SEQ ID NO: 196086 - RNA, 32 nt, Human
gggaccauuauuaugcucauuucccagaggag

SEQ ID NO: 196087 - RNA, 32 nt, Human
gggacccaaaacacaggaagucagucacguuu

SEQ ID NO: 196088 - RNA, 32 nt, Human
gggacccaaacaggcccagcuaccagccuggc

SEQ ID NO: 196089 - RNA, 32 nt, Human
gggacccaacugcccugccugccucuagcucc

SEQ ID NO: 196090 - RNA, 32 nt, Human
gggacccaaggcaggagguacaccagcuggac

SEQ ID NO: 196091 - RNA, 21 nt, Human
gggacccaaggccacaaagga

SEQ ID NO: 196092 - RNA, 22 nt, Human
gggacccaagucugaacgugga

SEQ ID NO: 196093 - RNA, 20 nt, Human
gggacccaccagcucucucc

SEQ ID NO: 196094 - RNA, 19 nt, Human
gggacccaccucccccucc

SEQ ID NO: 196095 - RNA, 19 nt, Human
gggacccacgcaccucccu

SEQ ID NO: 196096 - RNA, 21 nt, Human
gggacccacggagcccucccu

SEQ ID NO: 196097 - RNA, 32 nt, Human
gggacccacggcucgccuccagccuccugcgc

SEQ ID NO: 196098 - RNA, 32 nt, Human
gggacccacucuacuacugcaggaugaccuca

SEQ ID NO: 196099 - RNA, 21 nt, Human
gggacccacuggacacaugga

SEQ ID NO: 196100 - RNA, 18 nt, Human
gggacccacuucucuccu

SEQ ID NO: 196101 - RNA, 20 nt, Human
gggacccagacccaccccca

SEQ ID NO: 196102 - RNA, 20 nt, Human
gggacccagaccucugggcc

SEQ ID NO: 196103 - RNA, 32 nt, Human
gggacccagagcaacaggaucugucacccacc

SEQ ID NO: 196104 - RNA, 32 nt, Human
gggacccagaguagaugcugaccugggcacuc

SEQ ID NO: 196105 - RNA, 32 nt, Human
gggacccagaucuugcuguggagacuguaagu

SEQ ID NO: 196106 - RNA, 32 nt, Human
gggacccagcagagcugggggagggaucagcc

SEQ ID NO: 196107 - RNA, 19 nt, Human
gggacccagcagguggaca

SEQ ID NO: 196108 - RNA, 32 nt, Human
gggacccagccuucagucacaugcuagcagcu

SEQ ID NO: 196109 - RNA, 32 nt, Human
gggacccagccuugcccuccacccgaggcucu

SEQ ID NO: 196110 - RNA, 32 nt, Human
gggacccagcgggccagguggggacggcgcgg

SEQ ID NO: 196111 - RNA, 32 nt, Human
gggacccaggcaggguuggguguugugacuca

SEQ ID NO: 196112 - RNA, 20 nt, Human
gggacccaggcuccgccuua

SEQ ID NO: 196113 - RNA, 19 nt, Human
gggacccaggcuucuccuc

SEQ ID NO: 196114 - RNA, 21 nt, Human
gggacccaggggccccucccu

SEQ ID NO: 196115 - RNA, 21 nt, Human
gggacccagguaacccccucu

SEQ ID NO: 196116 - RNA, 32 nt, Human
gggacccagguguggaguggagacuugauggg

SEQ ID NO: 196117 - RNA, 19 nt, Human
gggacccagguguguucag

SEQ ID NO: 196118 - RNA, 32 nt, Human
gggacccagugacucagagccugcucuuccug

SEQ ID NO: 196119 - RNA, 22 nt, Human
gggacccauaccaacugccuug

SEQ ID NO: 196120 - RNA, 17 nt, Human
gggacccauccaucucc

SEQ ID NO: 196121 - RNA, 19 nt, Human
gggacccaucugcuccucc

SEQ ID NO: 196122 - RNA, 32 nt, Human
gggacccaucuuccaccucaccucuuuguucu

SEQ ID NO: 196123 - RNA, 24 nt, Human
gggacccaugcagcacccagguca

SEQ ID NO: 196124 - RNA, 20 nt, Human
gggacccauggccucucucc

SEQ ID NO: 196125 - RNA, 18 nt, Human
gggacccauguaauccuu

SEQ ID NO: 196126 - RNA, 19 nt, Human
gggacccauuguucucuuc

SEQ ID NO: 196127 - RNA, 32 nt, Human
gggaccccacacacuccaggugggaucagaug

SEQ ID NO: 196128 - RNA, 17 nt, Human
gggaccccacccucucc

SEQ ID NO: 196129 - RNA, 32 nt, Human
gggaccccagacugucagcacagggaagaugg

SEQ ID NO: 196130 - RNA, 19 nt, Human
gggacccccagcccccucc

SEQ ID NO: 196131 - RNA, 32 nt, Human
gggacccccagccucauccucuuaguuggguc

SEQ ID NO: 196132 - RNA, 18 nt, Human
gggacccccgccuccuug

SEQ ID NO: 196133 - RNA, 32 nt, Human
gggaccccgagugccacuccagccucaccccc

SEQ ID NO: 196134 - RNA, 19 nt, Human
gggaccccgggcccccuuc

SEQ ID NO: 196135 - RNA, 32 nt, Human
gggaccccucaaggagggagacgcuccauauc

SEQ ID NO: 196136 - RNA, 32 nt, Human
gggaccccuccacccccaguacccuggacccc

SEQ ID NO: 196137 - RNA, 32 nt, Human
gggaccccuccccagggccuuuuccuccucug

SEQ ID NO: 196138 - RNA, 32 nt, Human
gggaccccuccugggauccccagcacauucuc

SEQ ID NO: 196139 - RNA, 32 nt, Human
gggaccccugccacuguccccugcugcagcac

SEQ ID NO: 196140 - RNA, 19 nt, Human
gggaccccugcgccccucc

SEQ ID NO: 196141 - RNA, 32 nt, Human
gggaccccugcucccagccugcugagagcccc

SEQ ID NO: 196142 - RNA, 32 nt, Human
gggaccccugcugccaccucuccugggccugu

SEQ ID NO: 196143 - RNA, 32 nt, Human
gggaccccuguuggccacuuguugaccucuca

SEQ ID NO: 196144 - RNA, 32 nt, Human
gggaccccuucccuugcugcuucucuuggcac

SEQ ID NO: 196145 - RNA, 32 nt, Human
gggacccgccagcuucagccuccagggccugg

SEQ ID NO: 196146 - RNA, 32 nt, Human
gggacccgccuuucuguguuguguucugcccu

SEQ ID NO: 196147 - RNA, 18 nt, Human
gggacccgcuccucccuu

SEQ ID NO: 196148 - RNA, 32 nt, Human
gggacccggagccgcgguacaggugugguugc

SEQ ID NO: 196149 - RNA, 17 nt, Human
gggacccggcccccacc

SEQ ID NO: 196150 - RNA, 32 nt, Human
gggacccggcgccgaugaaaccgaccaaacug

SEQ ID NO: 196151 - RNA, 32 nt, Human
gggacccguuggcagagguggcggcggcggca

SEQ ID NO: 196152 - RNA, 18 nt, Human
gggacccuaccacccucc

SEQ ID NO: 196153 - RNA, 20 nt, Human
gggacccuaccaggacacgg

SEQ ID NO: 196154 - RNA, 32 nt, Human
gggacccuauugcauuaaaguacaaauacuau

SEQ ID NO: 196155 - RNA, 19 nt, Human
gggacccuccagagagggu

SEQ ID NO: 196156 - RNA, 17 nt, Human
gggacccuccccuuccu

SEQ ID NO: 196157 - RNA, 32 nt, Human
gggacccuccugggaaggcaaguggccagugc

SEQ ID NO: 196158 - RNA, 17 nt, Human
gggacccugaacccucc

SEQ ID NO: 196159 - RNA, 32 nt, Human
gggacccugaagaaagggggccagcagcaggu

SEQ ID NO: 196160 - RNA, 32 nt, Human
gggacccugagcugcucucaggacgguggacc

SEQ ID NO: 196161 - RNA, 32 nt, Human
gggacccugcacucgacccugggggcuccuuc

SEQ ID NO: 196162 - RNA, 20 nt, Human
gggacccugcagcuccaggu

SEQ ID NO: 196163 - RNA, 32 nt, Human
gggacccuggccccagcguccccugccagcau

SEQ ID NO: 196164 - RNA, 18 nt, Human
gggacccuggugggggug

SEQ ID NO: 196165 - RNA, 20 nt, Human
gggacccugugccccuccuu

SEQ ID NO: 196166 - RNA, 32 nt, Human
gggacccugugggagcagcaggcuuccgagca

SEQ ID NO: 196167 - RNA, 32 nt, Human
gggacccuguuuggaccaggccaagccacacg

SEQ ID NO: 196168 - RNA, 21 nt, Human
gggacccuuugcaguggggug

SEQ ID NO: 196169 - RNA, 32 nt, Human
gggaccgaacuagcuuaacccgagucggccgu

SEQ ID NO: 196170 - RNA, 32 nt, Human
gggaccgacugaggccuaggcgccggagccgg

SEQ ID NO: 196171 - RNA, 22 nt, Human
gggaccgacugccugcguccag

SEQ ID NO: 196172 - RNA, 23 nt, Human
gggaccgagaagauuucgaaggu

SEQ ID NO: 196173 - RNA, 23 nt, Human
gggaccgaucucugcccccuccu

SEQ ID NO: 196174 - RNA, 32 nt, Human
gggaccgcaauccugaagacauugaauggcug

SEQ ID NO: 196175 - RNA, 15 nt, Human
gggaccgcacugaca

SEQ ID NO: 196176 - RNA, 32 nt, Human
gggaccgccagccgugggcacuggugggcccu

SEQ ID NO: 196177 - RNA, 32 nt, Human
gggaccgccucggggugugcagccggcucgcg

SEQ ID NO: 196178 - RNA, 19 nt, Human
gggaccgcguggccccccu

SEQ ID NO: 196179 - RNA, 32 nt, Human
gggaccgcuccucccuuuuuccuugucccaca

SEQ ID NO: 196180 - RNA, 32 nt, Human
gggaccgcugucuucccucccauacgccuuuc

SEQ ID NO: 196181 - RNA, 32 nt, Human
gggaccggauaacaccagaaagagggaugcua

SEQ ID NO: 196182 - RNA, 32 nt, Human
gggaccggcggcggcggcaaugcuggagaccc

SEQ ID NO: 196183 - RNA, 32 nt, Human
gggaccgggcucuggguaaccagcagaaggua

SEQ ID NO: 196184 - RNA, 32 nt, Human
gggaccggggcggucuuccagcagggaaaaug

SEQ ID NO: 196185 - RNA, 19 nt, Human
gggaccgggggguggggug

SEQ ID NO: 196186 - RNA, 32 nt, Human
gggaccggucacuguccagccuggagggaggc

SEQ ID NO: 196187 - RNA, 32 nt, Human
gggaccggugcuggggccucuccuugcugugu

SEQ ID NO: 196188 - RNA, 32 nt, Human
gggaccgucugaggacuggaguuugauccaug

SEQ ID NO: 196189 - RNA, 32 nt, Human
gggaccguucucugaucaucaggauuuucuug

SEQ ID NO: 196190 - RNA, 32 nt, Human
gggaccguucugugaucaucaggauuuucuug

SEQ ID NO: 196191 - RNA, 32 nt, Human
gggaccuacuccucccccuccuccaugcuguc

SEQ ID NO: 196192 - RNA, 32 nt, Human
gggaccuaugcuacccuucaggcaucagaaca

SEQ ID NO: 196193 - RNA, 22 nt, Human
gggaccucaaggacgacuuuca

SEQ ID NO: 196194 - RNA, 32 nt, Human
gggaccucaagggccuucugucagccuugccc

SEQ ID NO: 196195 - RNA, 19 nt, Human
gggaccucagugggggcag

SEQ ID NO: 196196 - RNA, 32 nt, Human
gggaccucauugaggucuggggcugcacccca

SEQ ID NO: 196197 - RNA, 21 nt, Human
gggaccuccaguugggccagg

SEQ ID NO: 196198 - RNA, 17 nt, Human
gggaccucgcccccucc

SEQ ID NO: 196199 - RNA, 32 nt, Human
gggaccucgggggagcucaagccucgacuguc

SEQ ID NO: 196200 - RNA, 32 nt, Human
gggaccucucacuccgugaagacuccaucacc

SEQ ID NO: 196201 - RNA, 32 nt, Human
gggaccucuguggcacucagggcugcagccac

SEQ ID NO: 196202 - RNA, 32 nt, Human
gggaccucuuucuccuggacauugaagauaug

SEQ ID NO: 196203 - RNA, 20 nt, Human
gggaccugaaggggccgcug

SEQ ID NO: 196204 - RNA, 32 nt, Human
gggaccugacagcacaccacugucuuccccag

SEQ ID NO: 196205 - RNA, 32 nt, Human
gggaccugacuuccaccucucugcccagauuu

SEQ ID NO: 196206 - RNA, 19 nt, Human
gggaccugagaacguuuca

SEQ ID NO: 196207 - RNA, 32 nt, Human
gggaccugagcuacaugcagguugugagcugg

SEQ ID NO: 196208 - RNA, 32 nt, Human
gggaccugagcuuugcuacccaaccagauucc

SEQ ID NO: 196209 - RNA, 32 nt, Human
gggaccugcacugcccuuuccagccugacauc

SEQ ID NO: 196210 - RNA, 32 nt, Human
gggaccugcccaggauggagaugagagagggu

SEQ ID NO: 196211 - RNA, 17 nt, Human
gggaccugcccccuccu

SEQ ID NO: 196212 - RNA, 32 nt, Human
gggaccugcccggagaccucaggcggccuucu

SEQ ID NO: 196213 - RNA, 32 nt, Human
gggaccugcccucccuuggucccaggucacug

SEQ ID NO: 196214 - RNA, 19 nt, Human
gggaccugccgggccucug

SEQ ID NO: 196215 - RNA, 32 nt, Human
gggaccugccugagggcucccugcugcaguuc

SEQ ID NO: 196216 - RNA, 32 nt, Human
gggaccugcgguaccugcuguagucacgaggg

SEQ ID NO: 196217 - RNA, 32 nt, Human
gggaccugcucagcaggugugaccaggguucu

SEQ ID NO: 196218 - RNA, 22 nt, Human
gggaccugcugggaauggggug

SEQ ID NO: 196219 - RNA, 32 nt, Human
gggaccuggaaccugggcguacuagagugccg

SEQ ID NO: 196220 - RNA, 32 nt, Human
gggaccuggagugcugggcuugugcacaggaa

SEQ ID NO: 196221 - RNA, 32 nt, Human
gggaccuggaguguguuuggacugcaguuugc

SEQ ID NO: 196222 - RNA, 32 nt, Human
gggaccuggcagcgugauuggaguauggaugu

SEQ ID NO: 196223 - RNA, 32 nt, Human
gggaccuggccaagggcuccacacaccaagac

SEQ ID NO: 196224 - RNA, 21 nt, Human
gggaccuggccagccgugcag

SEQ ID NO: 196225 - RNA, 32 nt, Human
gggaccuggccaggguggagcauugucugggu

SEQ ID NO: 196226 - RNA, 32 nt, Human
gggaccugggagaauggggcugagaggaggcu

SEQ ID NO: 196227 - RNA, 32 nt, Human
gggaccugggccugacgggcccuucucagccc

SEQ ID NO: 196228 - RNA, 32 nt, Human
gggaccuggugggagagaggggacuuccaggg

SEQ ID NO: 196229 - RNA, 22 nt, Human
gggaccugguguggguggagug

SEQ ID NO: 196230 - RNA, 32 nt, Human
gggaccuguaaucccagcuacuugggaggcug

SEQ ID NO: 196231 - RNA, 32 nt, Human
gggaccugucugcauauacacacggggaaugc

SEQ ID NO: 196232 - RNA, 32 nt, Human
gggaccugucuuggacugugggagacucaccc

SEQ ID NO: 196233 - RNA, 32 nt, Human
gggaccugugguuugcuggcggaaacaaauga

SEQ ID NO: 196234 - RNA, 32 nt, Human
gggaccuguguccuuccgccuccagagcugcc

SEQ ID NO: 196235 - RNA, 17 nt, Human
gggaccuguguggggug

SEQ ID NO: 196236 - RNA, 32 nt, Human
gggaccuuaauuugucuugcauggacauuugu

SEQ ID NO: 196237 - RNA, 31 nt, Human
gggaccuucaauaaacacuuguccagugaaa

SEQ ID NO: 196238 - RNA, 32 nt, Human
gggaccuucucccucacuccccucccuccuag

SEQ ID NO: 196239 - RNA, 17 nt, Human
gggaccuucucccuccu

SEQ ID NO: 196240 - RNA, 32 nt, Human
gggaccuucucgcgcuccuccuggccucugag

SEQ ID NO: 196241 - RNA, 20 nt, Human
gggaccuugauggagugggg

SEQ ID NO: 196242 - RNA, 32 nt, Human
gggaccuuggcauguggcuggccacaccaagc

SEQ ID NO: 196243 - RNA, 32 nt, Human
gggaccuugggcaggucucuccaccucucugg

SEQ ID NO: 196244 - RNA, 32 nt, Human
gggacgaacaaggacugggcuggguccagcug

SEQ ID NO: 196245 - RNA, 20 nt, Human
gggacgaacgcugcuggcug

SEQ ID NO: 196246 - RNA, 32 nt, Human
gggacgaaguuucacucuuguugcccaggcug

SEQ ID NO: 196247 - RNA, 32 nt, Human
gggacgacagccugggcucagagucaggcuug

SEQ ID NO: 196248 - RNA, 32 nt, Human
gggacgagcuucccaggauuccccgaccuucc

SEQ ID NO: 196249 - RNA, 32 nt, Human
gggacgaggaagagcuggagcccgcagaagcc

SEQ ID NO: 196250 - RNA, 20 nt, Human
gggacgaggagcagcggcug

SEQ ID NO: 196251 - RNA, 32 nt, Human
gggacgaggaggaggaggaggaagaggggaug

SEQ ID NO: 196252 - RNA, 32 nt, Human
gggacgaggauggggaaagaggcagcaugucu

SEQ ID NO: 196253 - RNA, 20 nt, Human
gggacgaggcggaccggcug

SEQ ID NO: 196254 - RNA, 32 nt, Human
gggacgcagaaagguuaaggcacuuuuaaaaa

SEQ ID NO: 196255 - RNA, 32 nt, Human
gggacgcagagcugcgagagaaucuuguucag

SEQ ID NO: 196256 - RNA, 21 nt, Human
gggacgcagccccaguggcug

SEQ ID NO: 196257 - RNA, 32 nt, Human
gggacgccaaagagagguugcagucagaaccg

SEQ ID NO: 196258 - RNA, 19 nt, Human
gggacgccagcgccugcag

SEQ ID NO: 196259 - RNA, 18 nt, Human
gggacgccagcgccuggc

SEQ ID NO: 196260 - RNA, 32 nt, Human
gggacgccauguccauggaggaccccuucuuu

SEQ ID NO: 196261 - RNA, 23 nt, Human
gggacgcccaaggccacccacug

SEQ ID NO: 196262 - RNA, 20 nt, Human
gggacgcccagauccugcug

SEQ ID NO: 196263 - RNA, 20 nt, Human
gggacgcccccgcccaccug

SEQ ID NO: 196264 - RNA, 19 nt, Human
gggacgccccgcgccgagc

SEQ ID NO: 196265 - RNA, 19 nt, Human
gggacgccccgcugccgcu

SEQ ID NO: 196266 - RNA, 17 nt, Human
gggacgccccggccgcu

SEQ ID NO: 196267 - RNA, 19 nt, Human
gggacgccccguccggggc

SEQ ID NO: 196268 - RNA, 18 nt, Human
gggacgccccugccuagc

SEQ ID NO: 196269 - RNA, 22 nt, Human
gggacgccgaggcggcgggcgg

SEQ ID NO: 196270 - RNA, 32 nt, Human
gggacgccggcagacacgggugaccucucgcc

SEQ ID NO: 196271 - RNA, 32 nt, Human
gggacgccucggcucgcgccucccgggcgggc

SEQ ID NO: 196272 - RNA, 24 nt, Human
gggacgccugcccugcccaggugg

SEQ ID NO: 196273 - RNA, 20 nt, Human
gggacgccuggagccugcug

SEQ ID NO: 196274 - RNA, 20 nt, Human
gggacgccuggccacugcug

SEQ ID NO: 196275 - RNA, 16 nt, Human
gggacgccugugcugg

SEQ ID NO: 196276 - RNA, 21 nt, Human
gggacgccuguggcuuggcug

SEQ ID NO: 196277 - RNA, 32 nt, Human
gggacgccuuucugucucugcugagcuguggc

SEQ ID NO: 196278 - RNA, 20 nt, Human
gggacgcgaguggcuggcug

SEQ ID NO: 196279 - RNA, 22 nt, Human
gggacgcggaaguggcagguga

SEQ ID NO: 196280 - RNA, 32 nt, Human
gggacgcgggagggguggaggcugcggggagc

SEQ ID NO: 196281 - RNA, 21 nt, Human
gggacgcgugcggcgggacgg

SEQ ID NO: 196282 - RNA, 20 nt, Human
gggacgcuccagcuggucug

SEQ ID NO: 196283 - RNA, 20 nt, Human
gggacgcugcucagcugcug

SEQ ID NO: 196284 - RNA, 17 nt, Human
gggacgcugcugcuggc

SEQ ID NO: 196285 - RNA, 32 nt, Human
gggacgcuggcacugguggggagcuguugggg

SEQ ID NO: 196286 - RNA, 32 nt, Human
gggacgcuggugucucuggaggcccuuccuga

SEQ ID NO: 196287 - RNA, 32 nt, Human
gggacggaaaggacaggucccaagggaugggg

SEQ ID NO: 196288 - RNA, 20 nt, Human
gggacggacagggcuggcug

SEQ ID NO: 196289 - RNA, 21 nt, Human
gggacggaccccagcuggggu

SEQ ID NO: 196290 - RNA, 20 nt, Human
gggacggagcgagcaaggag

SEQ ID NO: 196291 - RNA, 32 nt, Human
gggacggaugaaauucaccaaagucucuacca

SEQ ID NO: 196292 - RNA, 31 nt, Human
gggacggcaacuuucugacaucccacagcag

SEQ ID NO: 196293 - RNA, 32 nt, Human
gggacggcccacucugccccagggagucccuu

SEQ ID NO: 196294 - RNA, 18 nt, Human
gggacggccgccccuccu

SEQ ID NO: 196295 - RNA, 32 nt, Human
gggacggccucuggacugccaggcuggguugg

SEQ ID NO: 196296 - RNA, 32 nt, Human
gggacggcuccucugaguguucccuggcccca

SEQ ID NO: 196297 - RNA, 16 nt, Human
gggacggcuggcuggc

SEQ ID NO: 196298 - RNA, 32 nt, Human
gggacggcugugagccaagagccgcggagcac

SEQ ID NO: 196299 - RNA, 32 nt, Human
gggacggcugugguaggcauuggcuugcagcu

SEQ ID NO: 196300 - RNA, 19 nt, Human
gggacggcuugaugggaga

SEQ ID NO: 196301 - RNA, 32 nt, Human
gggacgggaggaggagaaagguggaggagaag

SEQ ID NO: 196302 - RNA, 32 nt, Human
gggacgggagugagagcgggagugagagcagg

SEQ ID NO: 196303 - RNA, 32 nt, Human
gggacggggaagagaagcaaagcggcgcgcau

SEQ ID NO: 196304 - RNA, 32 nt, Human
gggacggggcaggcaggagucugggaggcggg

SEQ ID NO: 196305 - RNA, 17 nt, Human
gggacgggggcggggug

SEQ ID NO: 196306 - RNA, 32 nt, Human
gggacgggguggggaaacggaggcaggggaca

SEQ ID NO: 196307 - RNA, 20 nt, Human
gggacggugcaggcugguug

SEQ ID NO: 196308 - RNA, 32 nt, Human
gggacggugcagggaaaggagcccugccaggc

SEQ ID NO: 196309 - RNA, 32 nt, Human
gggacggugccacuuccagacaagacccacaa

SEQ ID NO: 196310 - RNA, 32 nt, Human
gggacggugcugcuguccacgguuacagccca

SEQ ID NO: 196311 - RNA, 32 nt, Human
gggacgguuggcaccuuccucgggggcgggcc

SEQ ID NO: 196312 - RNA, 32 nt, Human
gggacgucacccaaggcugguggucaguguga

SEQ ID NO: 196313 - RNA, 20 nt, Human
gggacgucagcggacggggc

SEQ ID NO: 196314 - RNA, 16 nt, Human
gggacguccagcuggc

SEQ ID NO: 196315 - RNA, 20 nt, Human
gggacgucggcgagcggcug

SEQ ID NO: 196316 - RNA, 32 nt, Human
gggacgucuguaaucccagcuacuugggagac

SEQ ID NO: 196317 - RNA, 32 nt, Human
gggacgugagccgcugcgcccaccgggcuaga

SEQ ID NO: 196318 - RNA, 32 nt, Human
gggacguggagagacggcgccgcccggguccu

SEQ ID NO: 196319 - RNA, 32 nt, Human
gggacguggggaggggaccugcaggggccagc

SEQ ID NO: 196320 - RNA, 22 nt, Human
gggacgugggggcagccaggga

SEQ ID NO: 196321 - RNA, 21 nt, Human
gggacgugggggccccgggug

SEQ ID NO: 196322 - RNA, 32 nt, Human
gggacguguuggguuuuucuuccuuacacuau

SEQ ID NO: 196323 - RNA, 21 nt, Human
gggacguugcugagcuggcug

SEQ ID NO: 196324 - RNA, 20 nt, Human
gggacguugguggcuggcug

SEQ ID NO: 196325 - RNA, 19 nt, Human
gggacguuuggagcugcug

SEQ ID NO: 196326 - RNA, 32 nt, Human
gggacguuugugaaugacaugcgcaucccgga

SEQ ID NO: 196327 - RNA, 32 nt, Human
gggacuaagaaagagaaauugaucagaaucua

SEQ ID NO: 196328 - RNA, 32 nt, Human
gggacuaagccaagggauucagguguggugcc

SEQ ID NO: 196329 - RNA, 32 nt, Human
gggacuacaagaagaggagcugccugaguggu

SEQ ID NO: 196330 - RNA, 23 nt, Human
gggacuacagacacccgccacca

SEQ ID NO: 196331 - RNA, 20 nt, Human
gggacuacaggcaugcgcca

SEQ ID NO: 196332 - RNA, 23 nt, Human
gggacuacaggggcccgccacca

SEQ ID NO: 196333 - RNA, 32 nt, Human
gggacuacauuaaacccaaaacuccugcacaa

SEQ ID NO: 196334 - RNA, 32 nt, Human
gggacuaccagccagaggguucauggagguag

SEQ ID NO: 196335 - RNA, 23 nt, Human
gggacuacccaugagaguggggu

SEQ ID NO: 196336 - RNA, 32 nt, Human
gggacuagaauacaaugucacuuuaagauuua

SEQ ID NO: 196337 - RNA, 32 nt, Human
gggacuagaauguauaugagaaacccccacuc

SEQ ID NO: 196338 - RNA, 18 nt, Human
gggacuagaggcggggug

SEQ ID NO: 196339 - RNA, 32 nt, Human
gggacuaggacagugucacuucugcuaaguuc

SEQ ID NO: 196340 - RNA, 32 nt, Human
gggacuaggcaaggaagaaggaaggagagggc

SEQ ID NO: 196341 - RNA, 18 nt, Human
gggacuaggcuggugggg

SEQ ID NO: 196342 - RNA, 32 nt, Human
gggacuaucagguaauaaaagcuuugacuccc

SEQ ID NO: 196343 - RNA, 32 nt, Human
gggacuaucugaagcgcuuccauccuaaagcc

SEQ ID NO: 196344 - RNA, 32 nt, Human
gggacuaugaccuuuuucuccaguaugcuacc

SEQ ID NO: 196345 - RNA, 32 nt, Human
gggacuaugaucuccugguggucggcggggga

SEQ ID NO: 196346 - RNA, 32 nt, Human
gggacuauguugugagccugcgaaagaaguuu

SEQ ID NO: 196347 - RNA, 32 nt, Human
gggacucacaugcacauaggcccacacacaca

SEQ ID NO: 196348 - RNA, 32 nt, Human
gggacucacguggcuucaacagcuuuggaaau

SEQ ID NO: 196349 - RNA, 25 nt, Human
gggacucacugguucgcacaucuaa

SEQ ID NO: 196350 - RNA, 32 nt, Human
gggacucagaccccugaggagugggugcugcc

SEQ ID NO: 196351 - RNA, 32 nt, Human
gggacucagcccagacugcccuggggcagcuu

SEQ ID NO: 196352 - RNA, 32 nt, Human
gggacucagcgggcguggaggucgcggcggac

SEQ ID NO: 196353 - RNA, 32 nt, Human
gggacucagggugggucagguaacuggaaagc

SEQ ID NO: 196354 - RNA, 32 nt, Human
gggacucauccccucaucuuccucuuaccuca

SEQ ID NO: 196355 - RNA, 19 nt, Human
gggacucaugacuguaauc

SEQ ID NO: 196356 - RNA, 32 nt, Human
gggacuccacagccucuccaaguucagaguga

SEQ ID NO: 196357 - RNA, 21 nt, Human
gggacuccaccugccuccucc

SEQ ID NO: 196358 - RNA, 32 nt, Human
gggacuccaggggcagcugccauucguuccag

SEQ ID NO: 196359 - RNA, 32 nt, Human
gggacuccauggucuucagagucguucacaga

SEQ ID NO: 196360 - RNA, 32 nt, Human
gggacuccauguccuagagugccccgcgggcg

SEQ ID NO: 196361 - RNA, 32 nt, Human
gggacucccaggcuggagagcacugccaggac

SEQ ID NO: 196362 - RNA, 32 nt, Human
gggacucccaugcugcuguuggcuccaucucu

SEQ ID NO: 196363 - RNA, 32 nt, Human
gggacucccuagggcacaugcaucagcacaua

SEQ ID NO: 196364 - RNA, 32 nt, Human
gggacucccuccaagcuaggguuuggcaaguc

SEQ ID NO: 196365 - RNA, 32 nt, Human
gggacucccuccugggaagccgaauucuaucu

SEQ ID NO: 196366 - RNA, 32 nt, Human
gggacuccgaguugugaaaauuagcuggggac

SEQ ID NO: 196367 - RNA, 32 nt, Human
gggacuccggcauagcagacccugccccagca

SEQ ID NO: 196368 - RNA, 32 nt, Human
gggacuccgggcggcccugccuggugccauug

SEQ ID NO: 196369 - RNA, 32 nt, Human
gggacuccucacaacccccagccucagcuucc

SEQ ID NO: 196370 - RNA, 32 nt, Human
gggacucgcaggggccgggucuccgugacugg

SEQ ID NO: 196371 - RNA, 22 nt, Human
gggacucgcgguguccggguga

SEQ ID NO: 196372 - RNA, 32 nt, Human
gggacucgggggauauacaguggcugcaccaa

SEQ ID NO: 196373 - RNA, 20 nt, Human
gggacucgucaugagugggg

SEQ ID NO: 196374 - RNA, 24 nt, Human
gggacucgugggggccaccugcca

SEQ ID NO: 196375 - RNA, 32 nt, Human
gggacucucuccacucuuuccugggcucgggg

SEQ ID NO: 196376 - RNA, 32 nt, Human
gggacucucuugacaauaaugugaauugcuga

SEQ ID NO: 196377 - RNA, 32 nt, Human
gggacucugcaccuaccucacaggguuguugu

SEQ ID NO: 196378 - RNA, 18 nt, Human
gggacucugcaguggggu

SEQ ID NO: 196379 - RNA, 32 nt, Human
gggacucugcccuucgcuccuccuggucucug

SEQ ID NO: 196380 - RNA, 32 nt, Human
gggacucugccugccuuccuguccccagugcu

SEQ ID NO: 196381 - RNA, 19 nt, Human
gggacucugggcucagaga

SEQ ID NO: 196382 - RNA, 32 nt, Human
gggacucugguucccucgccaaguguggcagc

SEQ ID NO: 196383 - RNA, 32 nt, Human
gggacucuuccaggauggguuggagaggagua

SEQ ID NO: 196384 - RNA, 32 nt, Human
gggacucuuggaauuggcuuuuggugucugua

SEQ ID NO: 196385 - RNA, 22 nt, Human
gggacugaaccagcugguggug

SEQ ID NO: 196386 - RNA, 18 nt, Human
gggacugaagaauguuaa

SEQ ID NO: 196387 - RNA, 19 nt, Human
gggacugacacuccaggca

SEQ ID NO: 196388 - RNA, 32 nt, Human
gggacugaccagccccuuccucuuggagccug

SEQ ID NO: 196389 - RNA, 32 nt, Human
gggacugacccaggggaaggaaguggggaagg

SEQ ID NO: 196390 - RNA, 32 nt, Human
gggacugaccugcugacagucacccucccucu

SEQ ID NO: 196391 - RNA, 19 nt, Human
gggacugacgccagguucc

SEQ ID NO: 196392 - RNA, 32 nt, Human
gggacugacuccagcccuuggacucaggacau

SEQ ID NO: 196393 - RNA, 32 nt, Human
gggacugacuccagccucugcuccgggaggcc

SEQ ID NO: 196394 - RNA, 32 nt, Human
gggacugagagggagucagcaggcaugcugcg

SEQ ID NO: 196395 - RNA, 32 nt, Human
gggacugagcagcugggagcaggcgaccgagc

SEQ ID NO: 196396 - RNA, 32 nt, Human
gggacugagcugccuccugucucuccacucug

SEQ ID NO: 196397 - RNA, 32 nt, Human
gggacugagcuggucuuugaggcugcagagcu

SEQ ID NO: 196398 - RNA, 32 nt, Human
gggacugaggcaguagagggaggcgagagccc

SEQ ID NO: 196399 - RNA, 32 nt, Human
gggacugagggagggauggggaaguguagcca

SEQ ID NO: 196400 - RNA, 16 nt, Human
gggacugagggugggg

SEQ ID NO: 196401 - RNA, 22 nt, Human
gggacugaugcuguccaggaga

SEQ ID NO: 196402 - RNA, 32 nt, Human
gggacugauucugucguguucaccagagaaag

SEQ ID NO: 196403 - RNA, 32 nt, Human
gggacugcacuccagccugggugacagagcca

SEQ ID NO: 196404 - RNA, 32 nt, Human
gggacugcagcccucugagugcuugucauccu

SEQ ID NO: 196405 - RNA, 32 nt, Human
gggacugccauccaccauggugaagcugggcu

SEQ ID NO: 196406 - RNA, 32 nt, Human
gggacugccaugcacucugccuggugucacau

SEQ ID NO: 196407 - RNA, 32 nt, Human
gggacugccgggcacucccuggaguugggugg

SEQ ID NO: 196408 - RNA, 32 nt, Human
gggacugccguggagccgcauccacuguggau

SEQ ID NO: 196409 - RNA, 32 nt, Human
gggacugccuguaauagcacugggauuuugcc

SEQ ID NO: 196410 - RNA, 17 nt, Human
gggacugcugguggggu

SEQ ID NO: 196411 - RNA, 32 nt, Human
gggacugcuguugcgguaccgugugucugaca

SEQ ID NO: 196412 - RNA, 32 nt, Human
gggacuggacgagcaguagauccagcagccug

SEQ ID NO: 196413 - RNA, 17 nt, Human
gggacuggagagaggug

SEQ ID NO: 196414 - RNA, 32 nt, Human
gggacuggagaggagugaguggcgggcugggc

SEQ ID NO: 196415 - RNA, 32 nt, Human
gggacuggagccagggucuggggagagcaaca

SEQ ID NO: 196416 - RNA, 21 nt, Human
gggacuggaggaggagccaga

SEQ ID NO: 196417 - RNA, 22 nt, Human
gggacuggaggccagcgguguc

SEQ ID NO: 196418 - RNA, 18 nt, Human
gggacuggagggcagggg

SEQ ID NO: 196419 - RNA, 18 nt, Human
gggacuggaguuagggug

SEQ ID NO: 196420 - RNA, 32 nt, Human
gggacuggauccuaggaggugaagccauuucc

SEQ ID NO: 196421 - RNA, 32 nt, Human
gggacuggaucuccuaaaugcugaagaaggug

SEQ ID NO: 196422 - RNA, 32 nt, Human
gggacuggcccuguaggguugagccacagaca

SEQ ID NO: 196423 - RNA, 31 nt, Human
gggacuggccucucugcacggcuguguacac

SEQ ID NO: 196424 - RNA, 32 nt, Human
gggacuggccucugcugauccucccaggcuuc

SEQ ID NO: 196425 - RNA, 20 nt, Human
gggacuggcggcucggaggu

SEQ ID NO: 196426 - RNA, 20 nt, Human
gggacuggcggggggagggg

SEQ ID NO: 196427 - RNA, 17 nt, Human
gggacuggcggugaggu

SEQ ID NO: 196428 - RNA, 19 nt, Human
gggacuggcguggcuccag

SEQ ID NO: 196429 - RNA, 23 nt, Human
gggacuggcguggcuccagggug

SEQ ID NO: 196430 - RNA, 19 nt, Human
gggacuggcuggaggaagg

SEQ ID NO: 196431 - RNA, 18 nt, Human
gggacuggcuggagggug

SEQ ID NO: 196432 - RNA, 32 nt, Human
gggacugggaaaguccugcuucacuucugggg

SEQ ID NO: 196433 - RNA, 32 nt, Human
gggacugggaagaagagggggaaaguggggca

SEQ ID NO: 196434 - RNA, 32 nt, Human
gggacugggacccucccuacccugccccagcu

SEQ ID NO: 196435 - RNA, 19 nt, Human
gggacugggacuggcggug

SEQ ID NO: 196436 - RNA, 32 nt, Human
gggacugggacuucugggucuccagggagggu

SEQ ID NO: 196437 - RNA, 32 nt, Human
gggacugggagaggcaauggagagggagggua

SEQ ID NO: 196438 - RNA, 20 nt, Human
gggacugggaggugggggug

SEQ ID NO: 196439 - RNA, 19 nt, Human
gggacugggagugugagug

SEQ ID NO: 196440 - RNA, 31 nt, Human
gggacugggaugagagaaagugggaccuggu

SEQ ID NO: 196441 - RNA, 17 nt, Human
gggacugggauuggggu

SEQ ID NO: 196442 - RNA, 20 nt, Human
gggacugggccagggaagcu

SEQ ID NO: 196443 - RNA, 24 nt, Human
gggacugggccccggggcggggug

SEQ ID NO: 196444 - RNA, 32 nt, Human
gggacugggcggcuugucccaggcugcugggc

SEQ ID NO: 196445 - RNA, 19 nt, Human
gggacugggcggggcgggg

SEQ ID NO: 196446 - RNA, 20 nt, Human
gggacugggcugagagggug

SEQ ID NO: 196447 - RNA, 32 nt, Human
gggacugggcugagaggguggacgaguucagg

SEQ ID NO: 196448 - RNA, 31 nt, Human
gggacuggggaacugccuccggcuucacgau

SEQ ID NO: 196449 - RNA, 16 nt, Human
gggacuggggaagggg

SEQ ID NO: 196450 - RNA, 32 nt, Human
gggacuggggagcugggcucuaccaucccucc

SEQ ID NO: 196451 - RNA, 18 nt, Human
gggacuggggaucagggu

SEQ ID NO: 196452 - RNA, 32 nt, Human
gggacuggggaugugggagggagcagacagga

SEQ ID NO: 196453 - RNA, 32 nt, Human
gggacuggggccugugcucaggaucagcagag

SEQ ID NO: 196454 - RNA, 32 nt, Human
gggacugggggaaggaaacuuauuggaaaacu

SEQ ID NO: 196455 - RNA, 17 nt, Human
gggacugggggaggggu

SEQ ID NO: 196456 - RNA, 21 nt, Human
gggacugggggccggggggug

SEQ ID NO: 196457 - RNA, 16 nt, Human
gggacugggggcgggg

SEQ ID NO: 196458 - RNA, 20 nt, Human
gggacugggguuucuggggu

SEQ ID NO: 196459 - RNA, 19 nt, Human
gggacuggguggggggcgg

SEQ ID NO: 196460 - RNA, 18 nt, Human
gggacuggucaguggagu

SEQ ID NO: 196461 - RNA, 32 nt, Human
gggacuggucuagacccucccuuuccugucac

SEQ ID NO: 196462 - RNA, 19 nt, Human
gggacuggugagaaugggg

SEQ ID NO: 196463 - RNA, 20 nt, Human
gggacugguggagcuggcug

SEQ ID NO: 196464 - RNA, 32 nt, Human
gggacugguggagguggauggcagguccgacu

SEQ ID NO: 196465 - RNA, 19 nt, Human
gggacugguggcugggagg

SEQ ID NO: 196466 - RNA, 20 nt, Human
gggacugguggggaagaggg

SEQ ID NO: 196467 - RNA, 18 nt, Human
gggacugguggggacagg

SEQ ID NO: 196468 - RNA, 18 nt, Human
gggacugguggucggggg

SEQ ID NO: 196469 - RNA, 20 nt, Human
gggacugguguccugaagug

SEQ ID NO: 196470 - RNA, 18 nt, Human
gggacuggugucugcgug

SEQ ID NO: 196471 - RNA, 19 nt, Human
gggacuggugugugguggu

SEQ ID NO: 196472 - RNA, 22 nt, Human
gggacugguugagggagugggg

SEQ ID NO: 196473 - RNA, 18 nt, Human
gggacugguuuggguggg

SEQ ID NO: 196474 - RNA, 20 nt, Human
gggacugucccgagcuggua

SEQ ID NO: 196475 - RNA, 32 nt, Human
gggacugucuucaacccugcccugcaccuugg

SEQ ID NO: 196476 - RNA, 32 nt, Human
gggacugugagcagcuucagggccaagacagu

SEQ ID NO: 196477 - RNA, 32 nt, Human
gggacugugagcuuccuggcuccugggcagug

SEQ ID NO: 196478 - RNA, 32 nt, Human
gggacugugcaggccagagaagguggcauggg

SEQ ID NO: 196479 - RNA, 32 nt, Human
gggacugugcaggccggagcuaggcagggaca

SEQ ID NO: 196480 - RNA, 32 nt, Human
gggacuguggaugcuggaguaaguggaauugu

SEQ ID NO: 196481 - RNA, 32 nt, Human
gggacuguggccugggcugaucuugagccuua

SEQ ID NO: 196482 - RNA, 32 nt, Human
gggacugugguguuuggugaaaaccuuccuga

SEQ ID NO: 196483 - RNA, 32 nt, Human
gggacuguguuucuuuaaggaugcugaccugg

SEQ ID NO: 196484 - RNA, 17 nt, Human
gggacuguuguggggug

SEQ ID NO: 196485 - RNA, 32 nt, Human
gggacuucaggccacauuggcuugaaggcauu

SEQ ID NO: 196486 - RNA, 17 nt, Human
gggacuucaguggggug

SEQ ID NO: 196487 - RNA, 32 nt, Human
gggacuucaucucuaaaacaaaacaaaacaaa

SEQ ID NO: 196488 - RNA, 32 nt, Human
gggacuuccccaggcaggaagcacuugaugga

SEQ ID NO: 196489 - RNA, 32 nt, Human
gggacuuccgccccuucucgugcccgggcggu

SEQ ID NO: 196490 - RNA, 32 nt, Human
gggacuucgccuuugugauuguucagccaauu

SEQ ID NO: 196491 - RNA, 32 nt, Human
gggacuucucauaggaagagucaagaccuccu

SEQ ID NO: 196492 - RNA, 32 nt, Human
gggacuucucucuucgggagaugauaucuugu

SEQ ID NO: 196493 - RNA, 23 nt, Human
gggacuucuucccuuccuccuca

SEQ ID NO: 196494 - RNA, 32 nt, Human
gggacuugaauccaccuuucucaaauauaaaa

SEQ ID NO: 196495 - RNA, 32 nt, Human
gggacuugacagaaugaggugcgcgagggagg

SEQ ID NO: 196496 - RNA, 23 nt, Human
gggacuugauggggagguggggu

SEQ ID NO: 196497 - RNA, 20 nt, Human
gggacuugccguuggcgcuu

SEQ ID NO: 196498 - RNA, 32 nt, Human
gggacuuggaaggugagaaagauacugcauuu

SEQ ID NO: 196499 - RNA, 32 nt, Human
gggacuuggacaggagucagugucuggcuuuu

SEQ ID NO: 196500 - RNA, 32 nt, Human
gggacuugggggccccuggagcucagggguca

SEQ ID NO: 196501 - RNA, 32 nt, Human
gggacuuggugcccugcaucccagccacuccc

SEQ ID NO: 196502 - RNA, 32 nt, Human
gggacuuguauuuuucucuggccaguggccuu

SEQ ID NO: 196503 - RNA, 32 nt, Human
gggacuuugcuacuuguaaaaauaacauaaua

SEQ ID NO: 196504 - RNA, 32 nt, Human
gggacuuuggagguggggcucugcagcuguga

SEQ ID NO: 196505 - RNA, 32 nt, Human
gggacuuuugggaccccacacacuccaggugg

SEQ ID NO: 196506 - RNA, 26 nt, Human
gggagaaaaagaggggagagagcaga

SEQ ID NO: 196507 - RNA, 32 nt, Human
gggagaaaaaggcuuuucgagugugggacaag

SEQ ID NO: 196508 - RNA, 21 nt, Human
gggagaaaaaggggaauccuc

SEQ ID NO: 196509 - RNA, 24 nt, Human
gggagaaaaaguaggggaagcgga

SEQ ID NO: 196510 - RNA, 32 nt, Human
gggagaaaacacaagagggugcggucaggguu

SEQ ID NO: 196511 - RNA, 18 nt, Human
gggagaaaaggagcaggc

SEQ ID NO: 196512 - RNA, 32 nt, Human
gggagaaaaggaggagaacaggagacgagaag

SEQ ID NO: 196513 - RNA, 24 nt, Human
gggagaaaaggugggggaaagaga

SEQ ID NO: 196514 - RNA, 24 nt, Human
gggagaaaauguagaagaggcaga

SEQ ID NO: 196515 - RNA, 32 nt, Human
gggagaaaccuacagaauacuagccagagcuc

SEQ ID NO: 196516 - RNA, 32 nt, Human
gggagaaacgucgacuccuccuuuuccacugc

SEQ ID NO: 196517 - RNA, 18 nt, Human
gggagaaagaaaugggga

SEQ ID NO: 196518 - RNA, 32 nt, Human
gggagaaagaagccagaagccagggggugggg

SEQ ID NO: 196519 - RNA, 22 nt, Human
gggagaaagaagggagaggcag

SEQ ID NO: 196520 - RNA, 20 nt, Human
gggagaaagagaagcacaga

SEQ ID NO: 196521 - RNA, 24 nt, Human
gggagaaagagaaugagagaaaga

SEQ ID NO: 196522 - RNA, 26 nt, Human
gggagaaagagagggagaaagggaga

SEQ ID NO: 196523 - RNA, 32 nt, Human
gggagaaagaggagggccguggaagaaaaggg

SEQ ID NO: 196524 - RNA, 32 nt, Human
gggagaaagauggaggccagauucagccaguc

SEQ ID NO: 196525 - RNA, 32 nt, Human
gggagaaagcucaagaaaauaaugcacagauc

SEQ ID NO: 196526 - RNA, 20 nt, Human
gggagaaagcuggagggagg

SEQ ID NO: 196527 - RNA, 21 nt, Human
gggagaaaggaaaagaacaga

SEQ ID NO: 196528 - RNA, 23 nt, Human
gggagaaaggaaaaggagagaca

SEQ ID NO: 196529 - RNA, 24 nt, Human
gggagaaaggaguuggagacaaga

SEQ ID NO: 196530 - RNA, 23 nt, Human
gggagaaaggcagugggaaaaga

SEQ ID NO: 196531 - RNA, 21 nt, Human
gggagaaagggaaaaagcggg

SEQ ID NO: 196532 - RNA, 21 nt, Human
gggagaaagggaagucccagg

SEQ ID NO: 196533 - RNA, 23 nt, Human
gggagaaagggagcgaggucaga

SEQ ID NO: 196534 - RNA, 32 nt, Human
gggagaaauauucucuccacuuugggggagag

SEQ ID NO: 196535 - RNA, 32 nt, Human
gggagaaauggcgaaugucauacacaugagau

SEQ ID NO: 196536 - RNA, 22 nt, Human
gggagaaaugggaagcaacaga

SEQ ID NO: 196537 - RNA, 21 nt, Human
gggagaacacaagaggacaga

SEQ ID NO: 196538 - RNA, 20 nt, Human
gggagaacacagaaagaaga

SEQ ID NO: 196539 - RNA, 21 nt, Human
gggagaacagcaugcugugug

SEQ ID NO: 196540 - RNA, 32 nt, Human
gggagaacagccaggugaggugggagguugga

SEQ ID NO: 196541 - RNA, 20 nt, Human
gggagaacccaaagagacag

SEQ ID NO: 196542 - RNA, 32 nt, Human
gggagaaccccagcccccaggaggccccugcu

SEQ ID NO: 196543 - RNA, 20 nt, Human
gggagaacgagccugggaga

SEQ ID NO: 196544 - RNA, 27 nt, Human
gggagaacggcuccguccugcggcgug

SEQ ID NO: 196545 - RNA, 21 nt, Human
gggagaacucugaggggcaga

SEQ ID NO: 196546 - RNA, 32 nt, Human
gggagaacugagggguagguggggaggggcca

SEQ ID NO: 196547 - RNA, 32 nt, Human
gggagaacugccucauucuggcuuugguagag

SEQ ID NO: 196548 - RNA, 22 nt, Human
gggagaacugcuugagcccagg

SEQ ID NO: 196549 - RNA, 32 nt, Human
gggagaagaagaggaagaccacaguauuucuc

SEQ ID NO: 196550 - RNA, 32 nt, Human
gggagaagaaggaaagaggcaaguaaggccca

SEQ ID NO: 196551 - RNA, 32 nt, Human
gggagaagacggcgagcaggaggacccgcaga

SEQ ID NO: 196552 - RNA, 32 nt, Human
gggagaagacugaaggagcaguugccgccguu

SEQ ID NO: 196553 - RNA, 32 nt, Human
gggagaagagaaggcuaaaggagcucauagaa

SEQ ID NO: 196554 - RNA, 32 nt, Human
gggagaagagggcuggaguucuaggcaaccuu

SEQ ID NO: 196555 - RNA, 32 nt, Human
gggagaagcacugggucaggugaggucugagg

SEQ ID NO: 196556 - RNA, 20 nt, Human
gggagaagcagucuggggga

SEQ ID NO: 196557 - RNA, 23 nt, Human
gggagaagcccaggacugggaga

SEQ ID NO: 196558 - RNA, 32 nt, Human
gggagaagccugggauugacagaagcuucugc

SEQ ID NO: 196559 - RNA, 22 nt, Human
gggagaagcgugaggggacaga

SEQ ID NO: 196560 - RNA, 32 nt, Human
gggagaagcugcagcuggagcugaaggcucga

SEQ ID NO: 196561 - RNA, 32 nt, Human
gggagaagcugcaggugccuucuuaccagcuc

SEQ ID NO: 196562 - RNA, 32 nt, Human
gggagaaggagaggcaaggaaagagggaggga

SEQ ID NO: 196563 - RNA, 31 nt, Human
gggagaaggaggagagaaaagcugguccucu

SEQ ID NO: 196564 - RNA, 32 nt, Human
gggagaaggaggaggcggcgaaucacuuauaa

SEQ ID NO: 196565 - RNA, 32 nt, Human
gggagaaggcagugauuagcacuugggugacg

SEQ ID NO: 196566 - RNA, 32 nt, Human
gggagaaggcucugcaagagcucccuggcaau

SEQ ID NO: 196567 - RNA, 32 nt, Human
gggagaagggaaggaaggaaagaagagaggaa

SEQ ID NO: 196568 - RNA, 20 nt, Human
gggagaagggaggugggagg

SEQ ID NO: 196569 - RNA, 21 nt, Human
gggagaaggugaagcagcaga

SEQ ID NO: 196570 - RNA, 20 nt, Human
gggagaagguucgugggagg

SEQ ID NO: 196571 - RNA, 32 nt, Human
gggagaaguaugaaugcgugugucuaaauuaa

SEQ ID NO: 196572 - RNA, 31 nt, Human
gggagaagugagagggacaauuggguucauu

SEQ ID NO: 196573 - RNA, 32 nt, Human
gggagaauccacccucccaucaucugcuuccc

SEQ ID NO: 196574 - RNA, 32 nt, Human
gggagaaucccuugaacccgggaaguggaggc

SEQ ID NO: 196575 - RNA, 32 nt, Human
gggagaaucccuugaaccugggaggcggaggu

SEQ ID NO: 196576 - RNA, 22 nt, Human
gggagaaucgcuugagcccagg

SEQ ID NO: 196577 - RNA, 32 nt, Human
gggagaaucuagccuucagccuguccaguguu

SEQ ID NO: 196578 - RNA, 32 nt, Human
gggagaaugagaaagagagggacagagagaua

SEQ ID NO: 196579 - RNA, 32 nt, Human
gggagaaugaggcaguuccaaaaugaauuaua

SEQ ID NO: 196580 - RNA, 32 nt, Human
gggagaauggcagaaauauaggaugagcaaga

SEQ ID NO: 196581 - RNA, 18 nt, Human
gggagaauggggcuggga

SEQ ID NO: 196582 - RNA, 32 nt, Human
gggagaauguggcauuugaggacucucuuaga

SEQ ID NO: 196583 - RNA, 22 nt, Human
gggagaauugcuugaacccagg

SEQ ID NO: 196584 - RNA, 20 nt, Human
gggagaauugcuugaagcca

SEQ ID NO: 196585 - RNA, 32 nt, Human
gggagaauugcuugaguccaggaguuugagau

SEQ ID NO: 196586 - RNA, 32 nt, Human
gggagaauuggaagaaugugaugaugguagga

SEQ ID NO: 196587 - RNA, 32 nt, Human
gggagacaacagaaaaagacaaacagcgaugg

SEQ ID NO: 196588 - RNA, 32 nt, Human
gggagacaagaguugggccagguugauaacua

SEQ ID NO: 196589 - RNA, 32 nt, Human
gggagacacucaggaggagcuggaggaccugg

SEQ ID NO: 196590 - RNA, 32 nt, Human
gggagacagaaaacauguuucccuacaccucu

SEQ ID NO: 196591 - RNA, 32 nt, Human
gggagacagaacuuaaauccagguggagaguc

SEQ ID NO: 196592 - RNA, 32 nt, Human
gggagacagacagagguugcagugagccgaga

SEQ ID NO: 196593 - RNA, 22 nt, Human
gggagacagagacagaaacaga

SEQ ID NO: 196594 - RNA, 32 nt, Human
gggagacagagcagcgucggagccgcgcaggg

SEQ ID NO: 196595 - RNA, 32 nt, Human
gggagacagcacaugucuaaggcccacaagcc

SEQ ID NO: 196596 - RNA, 22 nt, Human
gggagacagcagaagagauaga

SEQ ID NO: 196597 - RNA, 32 nt, Human
gggagacagcagaagagauagaaucagggcug

SEQ ID NO: 196598 - RNA, 32 nt, Human
gggagacagcagcguggucagagugguaggag

SEQ ID NO: 196599 - RNA, 32 nt, Human
gggagacaggcagggagggcuuggggcugcac

SEQ ID NO: 196600 - RNA, 32 nt, Human
gggagacagugacagaucaucaggcauuagau

SEQ ID NO: 196601 - RNA, 32 nt, Human
gggagacaguguggaggccacaggguacucgc

SEQ ID NO: 196602 - RNA, 32 nt, Human
gggagacauauucuuggagaacuuuccaucug

SEQ ID NO: 196603 - RNA, 32 nt, Human
gggagacauugcaccuggccacugcagcccag

SEQ ID NO: 196604 - RNA, 23 nt, Human
gggagaccaaggcagguggauca

SEQ ID NO: 196605 - RNA, 22 nt, Human
gggagaccaaggcggguagauc

SEQ ID NO: 196606 - RNA, 23 nt, Human
gggagaccaaggcggguggauca

SEQ ID NO: 196607 - RNA, 27 nt, Human
gggagacccacagcuaagacaccggga

SEQ ID NO: 196608 - RNA, 22 nt, Human
gggagacccaggagcaccugga

SEQ ID NO: 196609 - RNA, 22 nt, Human
gggagacccaggccccgggcug

SEQ ID NO: 196610 - RNA, 22 nt, Human
gggagacccggaggaggucaga

SEQ ID NO: 196611 - RNA, 24 nt, Human
gggagacccuaaagauguggggga

SEQ ID NO: 196612 - RNA, 23 nt, Human
gggagaccgagacagguggauca

SEQ ID NO: 196613 - RNA, 24 nt, Human
gggagaccgaggcaggcggaucau

SEQ ID NO: 196614 - RNA, 23 nt, Human
gggagaccgaggcagguggauca

SEQ ID NO: 196615 - RNA, 23 nt, Human
gggagaccgaggcuggcagauca

SEQ ID NO: 196616 - RNA, 23 nt, Human
gggagaccgaggugggcagauca

SEQ ID NO: 196617 - RNA, 32 nt, Human
gggagaccugcacugucccugcgaaauacuaa

SEQ ID NO: 196618 - RNA, 23 nt, Human
gggagacgaggagacgcggagaa

SEQ ID NO: 196619 - RNA, 32 nt, Human
gggagacgcaggcaauggggccucgcaggcca

SEQ ID NO: 196620 - RNA, 25 nt, Human
gggagacgcaguagacagagacaga

SEQ ID NO: 196621 - RNA, 32 nt, Human
gggagacguccuccauaaguggagcacagggu

SEQ ID NO: 196622 - RNA, 32 nt, Human
gggagacguguaugugagucucaguggacuaa

SEQ ID NO: 196623 - RNA, 32 nt, Human
gggagacguuucugccacccugggugaugagc

SEQ ID NO: 196624 - RNA, 20 nt, Human
gggagacuaggccucagaga

SEQ ID NO: 196625 - RNA, 23 nt, Human
gggagacucagcgguccaggggu

SEQ ID NO: 196626 - RNA, 32 nt, Human
gggagacucccaguaccugaaugcaggauggg

SEQ ID NO: 196627 - RNA, 23 nt, Human
gggagacugaagcggguggauca

SEQ ID NO: 196628 - RNA, 32 nt, Human
gggagacugagccugugggcguggcuugcucc

SEQ ID NO: 196629 - RNA, 21 nt, Human
gggagacugaggaagggcaga

SEQ ID NO: 196630 - RNA, 32 nt, Human
gggagacugaggaagggcagagccagaagcaa

SEQ ID NO: 196631 - RNA, 23 nt, Human
gggagacugaggcaggagaauca

SEQ ID NO: 196632 - RNA, 23 nt, Human
gggagacugaggcaggaggauca

SEQ ID NO: 196633 - RNA, 23 nt, Human
gggagacugaggcaggcggauca

SEQ ID NO: 196634 - RNA, 19 nt, Human
gggagacugaggcggauca

SEQ ID NO: 196635 - RNA, 24 nt, Human
gggagacugaggcgggcggaucau

SEQ ID NO: 196636 - RNA, 32 nt, Human
gggagacugcaacaaucugugucccuggaaug

SEQ ID NO: 196637 - RNA, 22 nt, Human
gggagacugcucagacaggaac

SEQ ID NO: 196638 - RNA, 32 nt, Human
gggagacugcuugguguucccugaggacaaga

SEQ ID NO: 196639 - RNA, 19 nt, Human
gggagacugggcggaggug

SEQ ID NO: 196640 - RNA, 32 nt, Human
gggagacugggugaaaggcgagcuugguuacg

SEQ ID NO: 196641 - RNA, 32 nt, Human
gggagacuuccucgucuuccagggaaggaagg

SEQ ID NO: 196642 - RNA, 32 nt, Human
gggagagaaagcccagaucagacagauggggg

SEQ ID NO: 196643 - RNA, 32 nt, Human
gggagagaaaggaggggaguucagggugaggg

SEQ ID NO: 196644 - RNA, 32 nt, Human
gggagagaaagggagagagggagggagaggau

SEQ ID NO: 196645 - RNA, 32 nt, Human
gggagagaaaugcaaagcccucucagccugcu

SEQ ID NO: 196646 - RNA, 28 nt, Human
gggagagaacaaaggggaagaagagaga

SEQ ID NO: 196647 - RNA, 32 nt, Human
gggagagaacagggauggccugagggaaaggg

SEQ ID NO: 196648 - RNA, 23 nt, Human
gggagagaacugagccccggggu

SEQ ID NO: 196649 - RNA, 23 nt, Human
gggagagaagagccguccaggga

SEQ ID NO: 196650 - RNA, 32 nt, Human
gggagagaagcagaaaggcacuucgccacugu

SEQ ID NO: 196651 - RNA, 32 nt, Human
gggagagaaggcccuuggucagagugggcagu

SEQ ID NO: 196652 - RNA, 18 nt, Human
gggagagacagagacaga

SEQ ID NO: 196653 - RNA, 32 nt, Human
gggagagacagagacagagaugacagagacag

SEQ ID NO: 196654 - RNA, 32 nt, Human
gggagagaccuguggcaccagguuggagggag

SEQ ID NO: 196655 - RNA, 32 nt, Human
gggagagacggagguagagggaggacacagag

SEQ ID NO: 196656 - RNA, 21 nt, Human
gggagagacggguccuggagu

SEQ ID NO: 196657 - RNA, 32 nt, Human
gggagagacuccugagccugaggucccuggaa

SEQ ID NO: 196658 - RNA, 32 nt, Human
gggagagacuggauuccagccugcaaaagcug

SEQ ID NO: 196659 - RNA, 32 nt, Human
gggagagagaaagacgaagggagagagaaagc

SEQ ID NO: 196660 - RNA, 32 nt, Human
gggagagagaagaggaucagcagugcagcccc

SEQ ID NO: 196661 - RNA, 32 nt, Human
gggagagagaagcagagcgagagagaggaggc

SEQ ID NO: 196662 - RNA, 32 nt, Human
gggagagagaagcaggagagggggaggaaaag

SEQ ID NO: 196663 - RNA, 32 nt, Human
gggagagagaagcaggcagauaaguuggagca

SEQ ID NO: 196664 - RNA, 32 nt, Human
gggagagagaggagaaaggcgaaggagaagga

SEQ ID NO: 196665 - RNA, 19 nt, Human
gggagagagaggagacaga

SEQ ID NO: 196666 - RNA, 32 nt, Human
gggagagagagggagagaaagggagagaggga

SEQ ID NO: 196667 - RNA, 32 nt, Human
gggagagagagggaggaguaaaacugggcaag

SEQ ID NO: 196668 - RNA, 32 nt, Human
gggagagagagugagagagacugacucuuacc

SEQ ID NO: 196669 - RNA, 32 nt, Human
gggagagagcaggaaagcgagcacaggcgagu

SEQ ID NO: 196670 - RNA, 32 nt, Human
gggagagagcagugaaaacaugcagggcugug

SEQ ID NO: 196671 - RNA, 20 nt, Human
gggagagagccggucccggg

SEQ ID NO: 196672 - RNA, 32 nt, Human
gggagagaggcagaggcagcuggagcgccguu

SEQ ID NO: 196673 - RNA, 32 nt, Human
gggagagagggagggggagggcgggcgaagcg

SEQ ID NO: 196674 - RNA, 32 nt, Human
gggagagaucuccaacucucucuguguccgug

SEQ ID NO: 196675 - RNA, 32 nt, Human
gggagagauggagcaaagugagggccgaguga

SEQ ID NO: 196676 - RNA, 32 nt, Human
gggagagauggcaucuguuucaaccuggauga

SEQ ID NO: 196677 - RNA, 25 nt, Human
gggagagauguaguggauucuguga

SEQ ID NO: 196678 - RNA, 32 nt, Human
gggagagcaagaagaccagcugugggugaggg

SEQ ID NO: 196679 - RNA, 32 nt, Human
gggagagcagcugaggccguguggaaaauuag

SEQ ID NO: 196680 - RNA, 32 nt, Human
gggagagcaggagccacugagaugaggaggcg

SEQ ID NO: 196681 - RNA, 32 nt, Human
gggagagcaucgguuuuguuguacuugggacu

SEQ ID NO: 196682 - RNA, 22 nt, Human
gggagagcauggauccuggggu

SEQ ID NO: 196683 - RNA, 32 nt, Human
gggagagccgcagaggcugggcucagagacgu

SEQ ID NO: 196684 - RNA, 32 nt, Human
gggagagccgggagucgcugggugcguggggc

SEQ ID NO: 196685 - RNA, 32 nt, Human
gggagagccugaggcucugcucagggcccauu

SEQ ID NO: 196686 - RNA, 32 nt, Human
gggagagccugggaacuuucaucccccacuga

SEQ ID NO: 196687 - RNA, 32 nt, Human
gggagagcggcagcggggcugcgcaggaguag

SEQ ID NO: 196688 - RNA, 32 nt, Human
gggagagcugaacuccaggggugugaccuggg

SEQ ID NO: 196689 - RNA, 32 nt, Human
gggagagcuggauaguccugggacacagaguu

SEQ ID NO: 196690 - RNA, 32 nt, Human
gggagagcuggauuugaacccaggcagggcag

SEQ ID NO: 196691 - RNA, 32 nt, Human
gggagagcugggagcuguugaagguuuggggg

SEQ ID NO: 196692 - RNA, 32 nt, Human
gggagagcugggcagacaggugggagauggag

SEQ ID NO: 196693 - RNA, 19 nt, Human
gggagagcuuccuggggga

SEQ ID NO: 196694 - RNA, 32 nt, Human
gggagagcuuguaaagcaucuccuaaaugcga

SEQ ID NO: 196695 - RNA, 32 nt, Human
gggagaggaacccguucuauccccagccauga

SEQ ID NO: 196696 - RNA, 32 nt, Human
gggagaggaagaggagucggaagggaggcggg

SEQ ID NO: 196697 - RNA, 32 nt, Human
gggagaggaaugaggggagcagcuggacaugg

SEQ ID NO: 196698 - RNA, 32 nt, Human
gggagaggacaggaggaggagccuuccccagg

SEQ ID NO: 196699 - RNA, 32 nt, Human
gggagaggacucagauuuccuggaggcaaagu

SEQ ID NO: 196700 - RNA, 32 nt, Human
gggagaggagagaaagggcucccaccugcagu

SEQ ID NO: 196701 - RNA, 32 nt, Human
gggagaggagagaacagggcaagacguuuggu

SEQ ID NO: 196702 - RNA, 32 nt, Human
gggagaggagagaagaccccaguuccgccucc

SEQ ID NO: 196703 - RNA, 32 nt, Human
gggagaggagagaagcuggacuccaggcauga

SEQ ID NO: 196704 - RNA, 32 nt, Human
gggagaggagcaucuauuuucuuaaagaaaua

SEQ ID NO: 196705 - RNA, 32 nt, Human
gggagaggaggaagaggaaggggagggaagcu

SEQ ID NO: 196706 - RNA, 21 nt, Human
gggagaggaggaucucagcag

SEQ ID NO: 196707 - RNA, 21 nt, Human
gggagaggaggccccggcaga

SEQ ID NO: 196708 - RNA, 32 nt, Human
gggagaggaggggccuccagggccaggagucc

SEQ ID NO: 196709 - RNA, 32 nt, Human
gggagaggauggaaugcuugccuccaaugaac

SEQ ID NO: 196710 - RNA, 32 nt, Human
gggagaggaugggggaggggacaaauuagaau

SEQ ID NO: 196711 - RNA, 18 nt, Human
gggagaggcaagcuggcu

SEQ ID NO: 196712 - RNA, 20 nt, Human
gggagaggcaccugccccca

SEQ ID NO: 196713 - RNA, 32 nt, Human
gggagaggcacuaucugagaccugcaaucacu

SEQ ID NO: 196714 - RNA, 19 nt, Human
gggagaggcagagcugccu

SEQ ID NO: 196715 - RNA, 32 nt, Human
gggagaggcaggugagguucucagccgaugug

SEQ ID NO: 196716 - RNA, 32 nt, Human
gggagaggccagcagagggcgccagagagcca

SEQ ID NO: 196717 - RNA, 32 nt, Human
gggagaggcccagcgggagucgcggaacagca

SEQ ID NO: 196718 - RNA, 32 nt, Human
gggagaggcccagggacuggggcuggauucca

SEQ ID NO: 196719 - RNA, 27 nt, Human
gggagaggccccgcggucgcucagggg

SEQ ID NO: 196720 - RNA, 32 nt, Human
gggagaggcuguagaguggcugugucgggcau

SEQ ID NO: 196721 - RNA, 32 nt, Human
gggagagggaaagacgaggccgagagggaccc

SEQ ID NO: 196722 - RNA, 32 nt, Human
gggagagggaacggggacaggagcagaggacg

SEQ ID NO: 196723 - RNA, 32 nt, Human
gggagagggaagggagggaaacaguuuugugg

SEQ ID NO: 196724 - RNA, 32 nt, Human
gggagagggaaguaggaaagaaaauggaggaa

SEQ ID NO: 196725 - RNA, 20 nt, Human
gggagagggacagagacaga

SEQ ID NO: 196726 - RNA, 32 nt, Human
gggagagggacccaccacacacccacacaugc

SEQ ID NO: 196727 - RNA, 19 nt, Human
gggagagggagaaggcagg

SEQ ID NO: 196728 - RNA, 32 nt, Human
gggagagggagagagcgaacacccacgcuggu

SEQ ID NO: 196729 - RNA, 32 nt, Human
gggagagggagagagggagaaaacgaagggga

SEQ ID NO: 196730 - RNA, 32 nt, Human
gggagagggagagccugcagggcaggaaaaag

SEQ ID NO: 196731 - RNA, 32 nt, Human
gggagagggagaggggacccgaggcugaggca

SEQ ID NO: 196732 - RNA, 19 nt, Human
gggagagggaggagucaga

SEQ ID NO: 196733 - RNA, 32 nt, Human
gggagagggagguggucgggagagugcacgcc

SEQ ID NO: 196734 - RNA, 32 nt, Human
gggagagggauucucuucccacccucaccauu

SEQ ID NO: 196735 - RNA, 32 nt, Human
gggagaggggacaggagggaagggugggccaa

SEQ ID NO: 196736 - RNA, 32 nt, Human
gggagaggggaggcggggacggugugcccaag

SEQ ID NO: 196737 - RNA, 32 nt, Human
gggagaggggcagcuugggcuggagaagcaca

SEQ ID NO: 196738 - RNA, 32 nt, Human
gggagaggggcgcagcuaagacugggggcagg

SEQ ID NO: 196739 - RNA, 32 nt, Human
gggagaggggcugagggggagccaagggugac

SEQ ID NO: 196740 - RNA, 32 nt, Human
gggagagggggaggggaggaguccagggagag

SEQ ID NO: 196741 - RNA, 32 nt, Human
gggagaggguccugacaccaaaaguucauuuc

SEQ ID NO: 196742 - RNA, 32 nt, Human
gggagagggucuggagaagcagugagccgcau

SEQ ID NO: 196743 - RNA, 32 nt, Human
gggagagggugaagcagguaucagagucacuc

SEQ ID NO: 196744 - RNA, 32 nt, Human
gggagagggugaggaaaucagcugaaugguug

SEQ ID NO: 196745 - RNA, 32 nt, Human
gggagaggguuaagugaccuugcucaaacguu

SEQ ID NO: 196746 - RNA, 32 nt, Human
gggagaggguuuaaaugaggguuauggggcga

SEQ ID NO: 196747 - RNA, 32 nt, Human
gggagaggucagauggcacaacagaagucacc

SEQ ID NO: 196748 - RNA, 32 nt, Human
gggagagguugcugagaaguacaugggguugu

SEQ ID NO: 196749 - RNA, 32 nt, Human
gggagagugagaagcugagauacugggcacag

SEQ ID NO: 196750 - RNA, 32 nt, Human
gggagagugaggauggcagagaccagugccuu

SEQ ID NO: 196751 - RNA, 24 nt, Human
gggagagugagggagagagacaga

SEQ ID NO: 196752 - RNA, 32 nt, Human
gggagagugagucccccagaagaggcugggug

SEQ ID NO: 196753 - RNA, 32 nt, Human
gggagagugaucugcugcccucuccuggcaau

SEQ ID NO: 196754 - RNA, 32 nt, Human
gggagagugcagugaugggagcacagaccagg

SEQ ID NO: 196755 - RNA, 32 nt, Human
gggagaguggagagaggggcagagcucaagau

SEQ ID NO: 196756 - RNA, 32 nt, Human
gggagaguggcugugauauuucaaccaauugu

SEQ ID NO: 196757 - RNA, 32 nt, Human
gggagaguuugcggccacacacaacacgcaag

SEQ ID NO: 196758 - RNA, 32 nt, Human
gggagauagagggagagaugcaguuugacccc

SEQ ID NO: 196759 - RNA, 32 nt, Human
gggagauauaucugccuucuaagaaggcagac

SEQ ID NO: 196760 - RNA, 32 nt, Human
gggagaucacaaggucaggagaucgagaccag

SEQ ID NO: 196761 - RNA, 32 nt, Human
gggagaucagccacggagccuggagggaugcc

SEQ ID NO: 196762 - RNA, 32 nt, Human
gggagaucauguuuucuuaaucaugcuggaau

SEQ ID NO: 196763 - RNA, 27 nt, Human
gggagauccacagcuaagacaccggga

SEQ ID NO: 196764 - RNA, 32 nt, Human
gggagaucccucccuucucugagccuagagca

SEQ ID NO: 196765 - RNA, 32 nt, Human
gggagauccuggaaaagaucccuucaguuugg

SEQ ID NO: 196766 - RNA, 32 nt, Human
gggagauccuuguguuuaucagaaagggcaga

SEQ ID NO: 196767 - RNA, 20 nt, Human
gggagaucuuucccaggccg

SEQ ID NO: 196768 - RNA, 32 nt, Human
gggagaugaagagaacacuucaaggagacuuc

SEQ ID NO: 196769 - RNA, 26 nt, Human
gggagaugagagaggagauaggcaga

SEQ ID NO: 196770 - RNA, 30 nt, Human
gggagaugaugagaaaccacagaauugcua

SEQ ID NO: 196771 - RNA, 32 nt, Human
gggagaugcacccagagccugccagggagggc

SEQ ID NO: 196772 - RNA, 32 nt, Human
gggagaugcaggcucuguucagaugcugucuc

SEQ ID NO: 196773 - RNA, 32 nt, Human
gggagaugcaguguccagggaagcagaggcag

SEQ ID NO: 196774 - RNA, 32 nt, Human
gggagaugcaugcguguccaggcugagaugcc

SEQ ID NO: 196775 - RNA, 32 nt, Human
gggagaugcauugguagcaacuccccagcuua

SEQ ID NO: 196776 - RNA, 32 nt, Human
gggagaugcuggacccagccuugcugucuggc

SEQ ID NO: 196777 - RNA, 32 nt, Human
gggagaugcuuucagguugcagccagaagggg

SEQ ID NO: 196778 - RNA, 32 nt, Human
gggagaugcuuuccaguugcagccagaagggg

SEQ ID NO: 196779 - RNA, 32 nt, Human
gggagauggaaaggggauaucagauugguuuc

SEQ ID NO: 196780 - RNA, 32 nt, Human
gggagauggaagccucccaggcgcgcgaggcu

SEQ ID NO: 196781 - RNA, 32 nt, Human
gggagauggagguugcagagagccaagaucau

SEQ ID NO: 196782 - RNA, 24 nt, Human
gggagauggagucuugcucuguug

SEQ ID NO: 196783 - RNA, 32 nt, Human
gggagaugggagagagauuuaagacaaagggu

SEQ ID NO: 196784 - RNA, 32 nt, Human
gggagauggggugggaaggaggugagccccug

SEQ ID NO: 196785 - RNA, 32 nt, Human
gggagauggguuucuuauucugccuuuacguu

SEQ ID NO: 196786 - RNA, 32 nt, Human
gggagauguacccagugucuuggcaaacccaa

SEQ ID NO: 196787 - RNA, 29 nt, Human
gggagauguuggacugugccuggauccuu

SEQ ID NO: 196788 - RNA, 32 nt, Human
gggagauugagacuagccugaccgacauggag

SEQ ID NO: 196789 - RNA, 19 nt, Human
gggagauugcagaagcacc

SEQ ID NO: 196790 - RNA, 32 nt, Human
gggagauuggacaugguacauccuuugucacu

SEQ ID NO: 196791 - RNA, 32 nt, Human
gggagauuggcacccaggcugggagcuugcca

SEQ ID NO: 196792 - RNA, 32 nt, Human
gggagauuugggcuggaaacuccaugagauuc

SEQ ID NO: 196793 - RNA, 32 nt, Human
gggagcaaaccagcuuguucugggcucaggga

SEQ ID NO: 196794 - RNA, 20 nt, Human
gggagcaacauggccaccca

SEQ ID NO: 196795 - RNA, 32 nt, Human
gggagcaagaagguaggguugcaaggaagggc

SEQ ID NO: 196796 - RNA, 32 nt, Human
gggagcaagaggagauccugaggcucugccua

SEQ ID NO: 196797 - RNA, 18 nt, Human
gggagcaagucuaaggga

SEQ ID NO: 196798 - RNA, 32 nt, Human
gggagcaaugcagacucguagggcccuuagua

SEQ ID NO: 196799 - RNA, 32 nt, Human
gggagcacaccguuuccuguugcucagggacu

SEQ ID NO: 196800 - RNA, 32 nt, Human
gggagcacagccgcuccccaaacccagcaaac

SEQ ID NO: 196801 - RNA, 32 nt, Human
gggagcacagggaggcagaggcuuggguaaac

SEQ ID NO: 196802 - RNA, 16 nt, Human
gggagcacauuccugg

SEQ ID NO: 196803 - RNA, 32 nt, Human
gggagcaccaggaccugcugucugcugucagc

SEQ ID NO: 196804 - RNA, 32 nt, Human
gggagcacccccaggaggaggggaggguggga

SEQ ID NO: 196805 - RNA, 32 nt, Human
gggagcaccgccugggcaaccacuacaagugc

SEQ ID NO: 196806 - RNA, 32 nt, Human
gggagcacggccgaggggagcagugaggggca

SEQ ID NO: 196807 - RNA, 21 nt, Human
gggagcacugcugcccuccug

SEQ ID NO: 196808 - RNA, 23 nt, Human
gggagcacuggaggccacccagu

SEQ ID NO: 196809 - RNA, 32 nt, Human
gggagcacuggagugcagggaggagaggggaa

SEQ ID NO: 196810 - RNA, 32 nt, Human
gggagcacuuccucccagcaaagccauggagc

SEQ ID NO: 196811 - RNA, 19 nt, Human
gggagcagaaccuuaaaga

SEQ ID NO: 196812 - RNA, 32 nt, Human
gggagcagaagagggaugagggggagcaggag

SEQ ID NO: 196813 - RNA, 32 nt, Human
gggagcagagagacccaacugggagccagaga

SEQ ID NO: 196814 - RNA, 32 nt, Human
gggagcagagagagccagacagccccaagcuu

SEQ ID NO: 196815 - RNA, 17 nt, Human
gggagcagagcccagag

SEQ ID NO: 196816 - RNA, 32 nt, Human
gggagcagaggccagcugggggccaguggggg

SEQ ID NO: 196817 - RNA, 32 nt, Human
gggagcagagggcagcacuuccuccagcucca

SEQ ID NO: 196818 - RNA, 32 nt, Human
gggagcagaggugagcugagugcagugagcca

SEQ ID NO: 196819 - RNA, 32 nt, Human
gggagcagaguccagugggugugaggcugacu

SEQ ID NO: 196820 - RNA, 17 nt, Human
gggagcagauccucaga

SEQ ID NO: 196821 - RNA, 32 nt, Human
gggagcagaugagggcccugcccccgccccac

SEQ ID NO: 196822 - RNA, 32 nt, Human
gggagcagcagucuagggcuggcaggacuuau

SEQ ID NO: 196823 - RNA, 24 nt, Human
gggagcagccacagcuuucaggga

SEQ ID NO: 196824 - RNA, 19 nt, Human
gggagcagccagccaagag

SEQ ID NO: 196825 - RNA, 22 nt, Human
gggagcagccagccggcaaagg

SEQ ID NO: 196826 - RNA, 21 nt, Human
gggagcagccauugggaggga

SEQ ID NO: 196827 - RNA, 21 nt, Human
gggagcagcccagacucaagg

SEQ ID NO: 196828 - RNA, 22 nt, Human
gggagcagccccaggccagaga

SEQ ID NO: 196829 - RNA, 21 nt, Human
gggagcagccgccagcaggga

SEQ ID NO: 196830 - RNA, 22 nt, Human
gggagcagccggcagacagagg

SEQ ID NO: 196831 - RNA, 32 nt, Human
gggagcagccggcagcagcccaggcccgggga

SEQ ID NO: 196832 - RNA, 19 nt, Human
gggagcagccgggaggagg

SEQ ID NO: 196833 - RNA, 23 nt, Human
gggagcagccucacacaagcaga

SEQ ID NO: 196834 - RNA, 32 nt, Human
gggagcagccuccuugggccucaggaaaccac

SEQ ID NO: 196835 - RNA, 19 nt, Human
gggagcagcgagaccggga

SEQ ID NO: 196836 - RNA, 21 nt, Human
gggagcagcggcagguggauc

SEQ ID NO: 196837 - RNA, 18 nt, Human
gggagcagcggcugggag

SEQ ID NO: 196838 - RNA, 32 nt, Human
gggagcagcggggagcuugcagugaccaagag

SEQ ID NO: 196839 - RNA, 22 nt, Human
gggagcagcuaaagaugagagg

SEQ ID NO: 196840 - RNA, 32 nt, Human
gggagcagcuacugggcugggcugcggaagcu

SEQ ID NO: 196841 - RNA, 32 nt, Human
gggagcagcuaggaagagagaggcaagcuuuc

SEQ ID NO: 196842 - RNA, 17 nt, Human
gggagcagcuccaggca

SEQ ID NO: 196843 - RNA, 21 nt, Human
gggagcagcugagaaaggagg

SEQ ID NO: 196844 - RNA, 19 nt, Human
gggagcagcugagcugcag

SEQ ID NO: 196845 - RNA, 32 nt, Human
gggagcagcugaugccucacuacuaaugcagu

SEQ ID NO: 196846 - RNA, 19 nt, Human
gggagcagcugggcaagga

SEQ ID NO: 196847 - RNA, 18 nt, Human
gggagcagcugggcacgg

SEQ ID NO: 196848 - RNA, 20 nt, Human
gggagcagcugggcacuggg

SEQ ID NO: 196849 - RNA, 32 nt, Human
gggagcagcuugguccaugugccuucaggggg

SEQ ID NO: 196850 - RNA, 32 nt, Human
gggagcaggagaagaagauacgggagcaggag

SEQ ID NO: 196851 - RNA, 32 nt, Human
gggagcaggagagagaggguaggcuaggggug

SEQ ID NO: 196852 - RNA, 32 nt, Human
gggagcaggagguugcagugagccgaggucgu

SEQ ID NO: 196853 - RNA, 32 nt, Human
gggagcaggauggagagcaggaugaagucagc

SEQ ID NO: 196854 - RNA, 24 nt, Human
gggagcaggccgcagggcgcggag

SEQ ID NO: 196855 - RNA, 18 nt, Human
gggagcagggccaggagg

SEQ ID NO: 196856 - RNA, 32 nt, Human
gggagcagggccugagacugcccaccugagug

SEQ ID NO: 196857 - RNA, 20 nt, Human
gggagcagggcgcggggcgg

SEQ ID NO: 196858 - RNA, 32 nt, Human
gggagcagggcugaggggcgaagaggacaugu

SEQ ID NO: 196859 - RNA, 32 nt, Human
gggagcagggcugaggguaggggcugaaugug

SEQ ID NO: 196860 - RNA, 19 nt, Human
gggagcaggggaccguaga

SEQ ID NO: 196861 - RNA, 32 nt, Human
gggagcaggggaggggucaguagcagaagcag

SEQ ID NO: 196862 - RNA, 32 nt, Human
gggagcaggggcaccucuggaggcaggagagg

SEQ ID NO: 196863 - RNA, 22 nt, Human
gggagcaggguucuccucaaag

SEQ ID NO: 196864 - RNA, 19 nt, Human
gggagcagguggcuggaga

SEQ ID NO: 196865 - RNA, 32 nt, Human
gggagcagguuagagggacaaagagcuuugca

SEQ ID NO: 196866 - RNA, 32 nt, Human
gggagcagguuucugccccaacgccugcccug

SEQ ID NO: 196867 - RNA, 32 nt, Human
gggagcaguagagagagaaaaagagggggugc

SEQ ID NO: 196868 - RNA, 32 nt, Human
gggagcagugacugaauaaacacgagcugugg

SEQ ID NO: 196869 - RNA, 32 nt, Human
gggagcaguggcugaguagcucugccuuugcu

SEQ ID NO: 196870 - RNA, 32 nt, Human
gggagcaguuucugccccuccugccccgucag

SEQ ID NO: 196871 - RNA, 32 nt, Human
gggagcauaugcugggaaaugggagcacagua

SEQ ID NO: 196872 - RNA, 32 nt, Human
gggagcaucaccaacuccagacuggcuccugu

SEQ ID NO: 196873 - RNA, 31 nt, Human
gggagcaucaggcuccucaugccaagagauc

SEQ ID NO: 196874 - RNA, 19 nt, Human
gggagcaucuccagugcuc

SEQ ID NO: 196875 - RNA, 21 nt, Human
gggagcaucucuggaucgggg

SEQ ID NO: 196876 - RNA, 32 nt, Human
gggagcaugauaggauuuggggcagagggaca

SEQ ID NO: 196877 - RNA, 19 nt, Human
gggagcaugcccucagcga

SEQ ID NO: 196878 - RNA, 32 nt, Human
gggagcauggcucagcaccagagcagaggccc

SEQ ID NO: 196879 - RNA, 31 nt, Human
gggagcaugggcaggaggaugcggggcgccg

SEQ ID NO: 196880 - RNA, 32 nt, Human
gggagccaagcccggcuugagagcagagccgg

SEQ ID NO: 196881 - RNA, 32 nt, Human
gggagccaaggugacacuucacugugaagccc

SEQ ID NO: 196882 - RNA, 22 nt, Human
gggagccaaguggucuugcuca

SEQ ID NO: 196883 - RNA, 32 nt, Human
gggagccacaggugccugcuucucccaucccc

SEQ ID NO: 196884 - RNA, 32 nt, Human
gggagccacugcacccggccugaaugaugacu

SEQ ID NO: 196885 - RNA, 32 nt, Human
gggagccacugcaccuggcucuugcacuuguu

SEQ ID NO: 196886 - RNA, 32 nt, Human
gggagccacugcacuggccuucauugucuuuu

SEQ ID NO: 196887 - RNA, 32 nt, Human
gggagccacugcauccagcacauggggugccu

SEQ ID NO: 196888 - RNA, 20 nt, Human
gggagccagaaaccacccag

SEQ ID NO: 196889 - RNA, 32 nt, Human
gggagccagacuauaaggaauaaaaggaaaaa

SEQ ID NO: 196890 - RNA, 32 nt, Human
gggagccagaguggaggucggugaaauaaagu

SEQ ID NO: 196891 - RNA, 32 nt, Human
gggagccagaucucaugaguaaaaauccauuu

SEQ ID NO: 196892 - RNA, 32 nt, Human
gggagccagccugccaagagccgccugggccu

SEQ ID NO: 196893 - RNA, 32 nt, Human
gggagccagccugucccaugccugccugggga

SEQ ID NO: 196894 - RNA, 32 nt, Human
gggagccagcgcucaaggcagcucccuagggc

SEQ ID NO: 196895 - RNA, 21 nt, Human
gggagccagcuugcugggaga

SEQ ID NO: 196896 - RNA, 21 nt, Human
gggagccaggagagagacaga

SEQ ID NO: 196897 - RNA, 31 nt, Human
gggagccaggagagagacagaaaggggcuga

SEQ ID NO: 196898 - RNA, 32 nt, Human
gggagccaggagagagacagaaaggggcugag

SEQ ID NO: 196899 - RNA, 32 nt, Human
gggagccaggcagggccagggcagcugggugg

SEQ ID NO: 196900 - RNA, 32 nt, Human
gggagccagggaagacuggaaaugcugccgcc

SEQ ID NO: 196901 - RNA, 32 nt, Human
gggagccaggggcugggggagguggaaggggc

SEQ ID NO: 196902 - RNA, 32 nt, Human
gggagccagguucucccugccaaaaagggggc

SEQ ID NO: 196903 - RNA, 32 nt, Human
gggagccaucuuggaagcagauccuccagccu

SEQ ID NO: 196904 - RNA, 32 nt, Human
gggagccauggccgaagggggagaaggaggcg

SEQ ID NO: 196905 - RNA, 28 nt, Human
gggagcccaagugcagugccuggugcug

SEQ ID NO: 196906 - RNA, 20 nt, Human
gggagcccacaggccugcag

SEQ ID NO: 196907 - RNA, 23 nt, Human
gggagcccagagcaggaggcaga

SEQ ID NO: 196908 - RNA, 32 nt, Human
gggagcccaggcagaggaggcaccgagaguga

SEQ ID NO: 196909 - RNA, 32 nt, Human
gggagcccaggccaggcagggagcagaugcag

SEQ ID NO: 196910 - RNA, 32 nt, Human
gggagcccagggguuaggaagggaagauaaac

SEQ ID NO: 196911 - RNA, 32 nt, Human
gggagcccagugccagccagagguugugcagg

SEQ ID NO: 196912 - RNA, 32 nt, Human
gggagcccaucuuacagcggugccaagcagag

SEQ ID NO: 196913 - RNA, 32 nt, Human
gggagccccaaaaccuaccacucgcguguucc

SEQ ID NO: 196914 - RNA, 32 nt, Human
gggagccccaaagcauaaccaguguccagagg

SEQ ID NO: 196915 - RNA, 32 nt, Human
gggagccccaccccuucuaaauugguaggcag

SEQ ID NO: 196916 - RNA, 32 nt, Human
gggagccccaggcuggagcagcaugaggccca

SEQ ID NO: 196917 - RNA, 32 nt, Human
gggagccccugcccucuguggcacaucggagu

SEQ ID NO: 196918 - RNA, 23 nt, Human
gggagcccgcccgcugcgcugag

SEQ ID NO: 196919 - RNA, 21 nt, Human
gggagcccgcgucgcgcggag

SEQ ID NO: 196920 - RNA, 21 nt, Human
gggagcccggcgagggcgccg

SEQ ID NO: 196921 - RNA, 17 nt, Human
gggagcccggggccugc

SEQ ID NO: 196922 - RNA, 32 nt, Human
gggagcccucaccucugccucaagccucccgu

SEQ ID NO: 196923 - RNA, 32 nt, Human
gggagcccucauugccuuccugggcaacccgg

SEQ ID NO: 196924 - RNA, 32 nt, Human
gggagcccucccccgcugcagcccucucagaa

SEQ ID NO: 196925 - RNA, 32 nt, Human
gggagcccugacucccagaggcugccaccggg

SEQ ID NO: 196926 - RNA, 21 nt, Human
gggagcccugcacccccggga

SEQ ID NO: 196927 - RNA, 32 nt, Human
gggagcccugcucggcccugaaucaccuucgu

SEQ ID NO: 196928 - RNA, 32 nt, Human
gggagcccuggacgagggugacggggaaagcg

SEQ ID NO: 196929 - RNA, 32 nt, Human
gggagcccuguaucacacggggcaggcggguu

SEQ ID NO: 196930 - RNA, 32 nt, Human
gggagccgaaagcaucuugaccacgcagccgc

SEQ ID NO: 196931 - RNA, 32 nt, Human
gggagccgaagucggagcaggagccaugggcg

SEQ ID NO: 196932 - RNA, 32 nt, Human
gggagccgacuggaagaagggcucuagggagg

SEQ ID NO: 196933 - RNA, 32 nt, Human
gggagccgagagaagggacuuugcugucaggu

SEQ ID NO: 196934 - RNA, 25 nt, Human
gggagccgagcccgcugggcugcgg

SEQ ID NO: 196935 - RNA, 32 nt, Human
gggagccgaggccgcaccacugcacuccagcc

SEQ ID NO: 196936 - RNA, 32 nt, Human
gggagccgaguuaacccugcgugucuguguca

SEQ ID NO: 196937 - RNA, 32 nt, Human
gggagccgcacuccagacuggcccgguaguca

SEQ ID NO: 196938 - RNA, 32 nt, Human
gggagccgccgugaugagcacagccaacccag

SEQ ID NO: 196939 - RNA, 21 nt, Human
gggagccgccuccccuacuca

SEQ ID NO: 196940 - RNA, 20 nt, Human
gggagccggccggccugcgg

SEQ ID NO: 196941 - RNA, 32 nt, Human
gggagccggcgcgcaccagccuagcgaucggc

SEQ ID NO: 196942 - RNA, 23 nt, Human
gggagccgggaaucggggccugc

SEQ ID NO: 196943 - RNA, 19 nt, Human
gggagccgggcugccgcag

SEQ ID NO: 196944 - RNA, 32 nt, Human
gggagccggggcagggcagaggugaacuugaa

SEQ ID NO: 196945 - RNA, 19 nt, Human
gggagccggggcggggcgg

SEQ ID NO: 196946 - RNA, 18 nt, Human
gggagccggggcugggag

SEQ ID NO: 196947 - RNA, 32 nt, Human
gggagccggggugggaaccaggagaaaggggu

SEQ ID NO: 196948 - RNA, 32 nt, Human
gggagccguggagggaacuuucccaguccccg

SEQ ID NO: 196949 - RNA, 32 nt, Human
gggagccguguuuggcagugcagagguagcga

SEQ ID NO: 196950 - RNA, 32 nt, Human
gggagccuaguggagagcagacguggcuuuuu

SEQ ID NO: 196951 - RNA, 21 nt, Human
gggagccucaggagggcucug

SEQ ID NO: 196952 - RNA, 32 nt, Human
gggagccucagguucucucaggggcagcaaag

SEQ ID NO: 196953 - RNA, 32 nt, Human
gggagccuccagccacaaguucccuguccuua

SEQ ID NO: 196954 - RNA, 25 nt, Human
gggagccuccaguagcccucagaga

SEQ ID NO: 196955 - RNA, 32 nt, Human
gggagccucugccugagugugcaccaggccca

SEQ ID NO: 196956 - RNA, 20 nt, Human
gggagccucuguucucugcg

SEQ ID NO: 196957 - RNA, 24 nt, Human
gggagccugaggcaggcggaucau

SEQ ID NO: 196958 - RNA, 32 nt, Human
gggagccugcacuccggagggcuguaccuuua

SEQ ID NO: 196959 - RNA, 32 nt, Human
gggagccugcagcaggcacaucugacccaucc

SEQ ID NO: 196960 - RNA, 32 nt, Human
gggagccugccuggcuucuacuuacugccagg

SEQ ID NO: 196961 - RNA, 32 nt, Human
gggagccugggaggucaaggcugcagugagcc

SEQ ID NO: 196962 - RNA, 32 nt, Human
gggagccugggccccuuccagccgugggcaaa

SEQ ID NO: 196963 - RNA, 32 nt, Human
gggagccugggcuggaagaggcagcaaaaggg

SEQ ID NO: 196964 - RNA, 23 nt, Human
gggagccuggggcaggagaauca

SEQ ID NO: 196965 - RNA, 32 nt, Human
gggagccugguucagacacagcucuuccaggg

SEQ ID NO: 196966 - RNA, 32 nt, Human
gggagccuguagucccagcuacacgggaggcu

SEQ ID NO: 196967 - RNA, 32 nt, Human
gggagccuguagucccagcuacucaggaggcu

SEQ ID NO: 196968 - RNA, 32 nt, Human
gggagccuguagucccagcuacucaggaugcu

SEQ ID NO: 196969 - RNA, 32 nt, Human
gggagccugugagccccaggcacuuugcauca

SEQ ID NO: 196970 - RNA, 32 nt, Human
gggagccugugcccucccugcccagucgcuuu

SEQ ID NO: 196971 - RNA, 25 nt, Human
gggagccugugcuggucccgggcgu

SEQ ID NO: 196972 - RNA, 19 nt, Human
gggagccuguggccugcag

SEQ ID NO: 196973 - RNA, 19 nt, Human
gggagccuguggcuggaga

SEQ ID NO: 196974 - RNA, 32 nt, Human
gggagccuguucugucuugcaucuuccaugac

SEQ ID NO: 196975 - RNA, 32 nt, Human
gggagccuucucaguccucucucccuccaguc

SEQ ID NO: 196976 - RNA, 19 nt, Human
gggagccuuggauggggug

SEQ ID NO: 196977 - RNA, 19 nt, Human
gggagcgaagcgguggcug

SEQ ID NO: 196978 - RNA, 32 nt, Human
gggagcgaaggaggggacggggagaaagaagc

SEQ ID NO: 196979 - RNA, 25 nt, Human
gggagcgacccucaaggccacccag

SEQ ID NO: 196980 - RNA, 32 nt, Human
gggagcgagagggagagcaaaagaaggaaagg

SEQ ID NO: 196981 - RNA, 32 nt, Human
gggagcgagcacgucgcuccgcaccgcucuuc

SEQ ID NO: 196982 - RNA, 32 nt, Human
gggagcgaggucagaggagccggcauggguug

SEQ ID NO: 196983 - RNA, 32 nt, Human
gggagcgaggugguuguuccugggguccgagg

SEQ ID NO: 196984 - RNA, 32 nt, Human
gggagcgcagagccacagucagaccuguccca

SEQ ID NO: 196985 - RNA, 32 nt, Human
gggagcgcagaggcgacggcccccaugccggc

SEQ ID NO: 196986 - RNA, 17 nt, Human
gggagcgccggccgcgg

SEQ ID NO: 196987 - RNA, 32 nt, Human
gggagcgcgagaccagccugaccaacauggag

SEQ ID NO: 196988 - RNA, 23 nt, Human
gggagcgcgcggcagcggggcgg

SEQ ID NO: 196989 - RNA, 32 nt, Human
gggagcgcggaaugugaggcuuggcgggccgc

SEQ ID NO: 196990 - RNA, 32 nt, Human
gggagcgcgggcucacaugacuggccgcgcga

SEQ ID NO: 196991 - RNA, 32 nt, Human
gggagcgcgggguccccgcgcccagccgggcc

SEQ ID NO: 196992 - RNA, 28 nt, Human
gggagcgcggugggggcagcgggcgcgg

SEQ ID NO: 196993 - RNA, 32 nt, Human
gggagcgcuggggucgccugggccacaggcac

SEQ ID NO: 196994 - RNA, 32 nt, Human
gggagcggaagaggcccaggaggcugggugag

SEQ ID NO: 196995 - RNA, 22 nt, Human
gggagcggaagcgcggccgcgg

SEQ ID NO: 196996 - RNA, 32 nt, Human
gggagcggaaggcggagacagcgagacuggcc

SEQ ID NO: 196997 - RNA, 32 nt, Human
gggagcggagcuuggcccugcgcccugugcag

SEQ ID NO: 196998 - RNA, 32 nt, Human
gggagcggcggagacucagccccaccagccuc

SEQ ID NO: 196999 - RNA, 25 nt, Human
gggagcggcggcagcggcggcgcgg

SEQ ID NO: 197000 - RNA, 21 nt, Human
gggagcggcggcagcuggcug

SEQ ID NO: 197001 - RNA, 21 nt, Human
gggagcggcggcggcggccgg

SEQ ID NO: 197002 - RNA, 32 nt, Human
gggagcggcgggcggcgagcagaggagcuaac

SEQ ID NO: 197003 - RNA, 32 nt, Human
gggagcgggaauggguggaggccgggggaaua

SEQ ID NO: 197004 - RNA, 21 nt, Human
gggagcgggaggcagcugcgg

SEQ ID NO: 197005 - RNA, 24 nt, Human
gggagcgggagggcagaggugagg

SEQ ID NO: 197006 - RNA, 32 nt, Human
gggagcgggccaccgguccugccgcucuccug

SEQ ID NO: 197007 - RNA, 32 nt, Human
gggagcgggccgcggcgacggcggcggcgcug

SEQ ID NO: 197008 - RNA, 23 nt, Human
gggagcgggcggagcgggggcgg

SEQ ID NO: 197009 - RNA, 18 nt, Human
gggagcgggcggcggcug

SEQ ID NO: 197010 - RNA, 21 nt, Human
gggagcgggcggcggcugcgg

SEQ ID NO: 197011 - RNA, 20 nt, Human
gggagcggggaccccggaga

SEQ ID NO: 197012 - RNA, 24 nt, Human
gggagcggggacccgagccugcag

SEQ ID NO: 197013 - RNA, 32 nt, Human
gggagcggggcugcuggagagagcggggaacu

SEQ ID NO: 197014 - RNA, 18 nt, Human
gggagcggggcugggagg

SEQ ID NO: 197015 - RNA, 20 nt, Human
gggagcgggucgcggggcgg

SEQ ID NO: 197016 - RNA, 32 nt, Human
gggagcggugcggccaaggaggaagcagugcu

SEQ ID NO: 197017 - RNA, 26 nt, Human
gggagcgguggcggcggcagaggcgg

SEQ ID NO: 197018 - RNA, 23 nt, Human
gggagcgguggcucacaccugua

SEQ ID NO: 197019 - RNA, 17 nt, Human
gggagcgguggcugaga

SEQ ID NO: 197020 - RNA, 18 nt, Human
gggagcgguggcugagga

SEQ ID NO: 197021 - RNA, 32 nt, Human
gggagcguaggggccgggaaagaggcacaagg

SEQ ID NO: 197022 - RNA, 32 nt, Human
gggagcuaaacaucaccaucaucuagagcggg

SEQ ID NO: 197023 - RNA, 32 nt, Human
gggagcuaagaccaggagggggcugggcgcug

SEQ ID NO: 197024 - RNA, 32 nt, Human
gggagcuaaggugggagaauugcuugagcuug

SEQ ID NO: 197025 - RNA, 32 nt, Human
gggagcuacaaacccaccaauaaaacugauau

SEQ ID NO: 197026 - RNA, 19 nt, Human
gggagcuagccagcuucag

SEQ ID NO: 197027 - RNA, 20 nt, Human
gggagcuagccagcuucaga

SEQ ID NO: 197028 - RNA, 32 nt, Human
gggagcuagugccugcucacacauuuuccaaa

SEQ ID NO: 197029 - RNA, 23 nt, Human
gggagcuauagggaccucaggga

SEQ ID NO: 197030 - RNA, 32 nt, Human
gggagcucaccagcaaacgccacugcagacga

SEQ ID NO: 197031 - RNA, 21 nt, Human
gggagcucagcggggaccgag

SEQ ID NO: 197032 - RNA, 32 nt, Human
gggagcucagcuuccaggguccugggccugcu

SEQ ID NO: 197033 - RNA, 32 nt, Human
gggagcucagggcaaaggccaggcuagcgcgg

SEQ ID NO: 197034 - RNA, 23 nt, Human
gggagcucaggggaacgcccgag

SEQ ID NO: 197035 - RNA, 32 nt, Human
gggagcucaguggaauuguaccgccuguacuu

SEQ ID NO: 197036 - RNA, 32 nt, Human
gggagcucauggugcugucugccuccucuuag

SEQ ID NO: 197037 - RNA, 23 nt, Human
gggagcuccagccaggcagcgag

SEQ ID NO: 197038 - RNA, 32 nt, Human
gggagcuccauauacuccuauaacuccuaaag

SEQ ID NO: 197039 - RNA, 32 nt, Human
gggagcucccuccaaucaguuucccaccgagc

SEQ ID NO: 197040 - RNA, 32 nt, Human
gggagcucgagaccagccugaccaacauggcg

SEQ ID NO: 197041 - RNA, 32 nt, Human
gggagcucgagaccagccuggccaacauggug

SEQ ID NO: 197042 - RNA, 20 nt, Human
gggagcucgcgcagggaucg

SEQ ID NO: 197043 - RNA, 23 nt, Human
gggagcucgcgccggagcccgag

SEQ ID NO: 197044 - RNA, 32 nt, Human
gggagcucggcccauccaccucuugggguacc

SEQ ID NO: 197045 - RNA, 25 nt, Human
gggagcucggcggcggcgggcgcgg

SEQ ID NO: 197046 - RNA, 32 nt, Human
gggagcucugcaccacgagcuucagucacccc

SEQ ID NO: 197047 - RNA, 32 nt, Human
gggagcucuuucuuacauuucccuuggagggu

SEQ ID NO: 197048 - RNA, 32 nt, Human
gggagcucuuugagccuuucugucucauuugg

SEQ ID NO: 197049 - RNA, 32 nt, Human
gggagcugagagaaggcacugagagggacagu

SEQ ID NO: 197050 - RNA, 19 nt, Human
gggagcugagcgcagcaga

SEQ ID NO: 197051 - RNA, 32 nt, Human
gggagcugagcugaguggcucuaaaaugucuu

SEQ ID NO: 197052 - RNA, 32 nt, Human
gggagcugaggcaggagaaucgguugaaucca

SEQ ID NO: 197053 - RNA, 22 nt, Human
gggagcugaggcgggcggauca

SEQ ID NO: 197054 - RNA, 20 nt, Human
gggagcugaggcugaggaga

SEQ ID NO: 197055 - RNA, 32 nt, Human
gggagcugagucuccagagggugcuuugggga

SEQ ID NO: 197056 - RNA, 32 nt, Human
gggagcugcagagagaacaagaccugagacua

SEQ ID NO: 197057 - RNA, 32 nt, Human
gggagcugcaggaacaggaaaaagagaccuuc

SEQ ID NO: 197058 - RNA, 32 nt, Human
gggagcugcaggaggcagagaaguaccacucu

SEQ ID NO: 197059 - RNA, 32 nt, Human
gggagcugccagcccagggcucagcuucccau

SEQ ID NO: 197060 - RNA, 32 nt, Human
gggagcugccgggaguuggagccugcggaguu

SEQ ID NO: 197061 - RNA, 32 nt, Human
gggagcugccggucccacucugucuuugccua

SEQ ID NO: 197062 - RNA, 32 nt, Human
gggagcugccugcucacaggcacuuugggacc

SEQ ID NO: 197063 - RNA, 32 nt, Human
gggagcugccuggcuucucugccuccagccuu

SEQ ID NO: 197064 - RNA, 23 nt, Human
gggagcugccuguucagcuccag

SEQ ID NO: 197065 - RNA, 32 nt, Human
gggagcugcggucuccggccauggcccccgcu

SEQ ID NO: 197066 - RNA, 32 nt, Human
gggagcugcguuggaggagagagccaggggcu

SEQ ID NO: 197067 - RNA, 32 nt, Human
gggagcugcugggcuagguccagauccgcucc

SEQ ID NO: 197068 - RNA, 19 nt, Human
gggagcuggaaaacuuccu

SEQ ID NO: 197069 - RNA, 32 nt, Human
gggagcuggaauggggagcaaugagaggaggg

SEQ ID NO: 197070 - RNA, 20 nt, Human
gggagcuggacaguggagug

SEQ ID NO: 197071 - RNA, 32 nt, Human
gggagcuggagguucugcgggagcagcuggcc

SEQ ID NO: 197072 - RNA, 32 nt, Human
gggagcuggcagagcgcagggaagaaguucca

SEQ ID NO: 197073 - RNA, 17 nt, Human
gggagcuggcggacucc

SEQ ID NO: 197074 - RNA, 21 nt, Human
gggagcuggcugagcgccggg

SEQ ID NO: 197075 - RNA, 29 nt, Human
gggagcuggcugcagacacccacucaguc

SEQ ID NO: 197076 - RNA, 32 nt, Human
gggagcugggagggagcagugcaccugccagc

SEQ ID NO: 197077 - RNA, 32 nt, Human
gggagcugggaugcagugggagaggggacacg

SEQ ID NO: 197078 - RNA, 32 nt, Human
gggagcugggccuccccucauccucuguaacu

SEQ ID NO: 197079 - RNA, 32 nt, Human
gggagcugggccuggucucacccuggaggcac

SEQ ID NO: 197080 - RNA, 32 nt, Human
gggagcuggggaucuggauuccugguucccug

SEQ ID NO: 197081 - RNA, 32 nt, Human
gggagcugggggcagagggcggugccaagugc

SEQ ID NO: 197082 - RNA, 32 nt, Human
gggagcuggucuccagccaggugagcaacaac

SEQ ID NO: 197083 - RNA, 22 nt, Human
gggagcugguggccagacccag

SEQ ID NO: 197084 - RNA, 18 nt, Human
gggagcuguagcggggug

SEQ ID NO: 197085 - RNA, 32 nt, Human
gggagcugucagcaaggagcagguaagugagc

SEQ ID NO: 197086 - RNA, 32 nt, Human
gggagcuguccagccaggucuggugcugaagu

SEQ ID NO: 197087 - RNA, 32 nt, Human
gggagcugugaccuccccaacgcucaccccuc

SEQ ID NO: 197088 - RNA, 32 nt, Human
gggagcuguggcuaaaggaaguggaggggccg

SEQ ID NO: 197089 - RNA, 19 nt, Human
gggagcuguggcuggcaga

SEQ ID NO: 197090 - RNA, 32 nt, Human
gggagcugugggaagccacagcagaaauggaa

SEQ ID NO: 197091 - RNA, 32 nt, Human
gggagcugugugaccauagaaagugacguguu

SEQ ID NO: 197092 - RNA, 22 nt, Human
gggagcugugugccaguuccag

SEQ ID NO: 197093 - RNA, 32 nt, Human
gggagcugugugucuccgccagagucacagca

SEQ ID NO: 197094 - RNA, 20 nt, Human
gggagcuguucuagcuccag

SEQ ID NO: 197095 - RNA, 32 nt, Human
gggagcuguuuaucuucugccugucaggcagg

SEQ ID NO: 197096 - RNA, 32 nt, Human
gggagcuguuuaucuucugccugucaggcugg

SEQ ID NO: 197097 - RNA, 16 nt, Human
gggagcuuccagguca

SEQ ID NO: 197098 - RNA, 32 nt, Human
gggagcuuccaggucacagucagauucaaaga

SEQ ID NO: 197099 - RNA, 32 nt, Human
gggagcuuccccauccucccugccuuccccag

SEQ ID NO: 197100 - RNA, 23 nt, Human
gggagcuucggcagggccugcag

SEQ ID NO: 197101 - RNA, 32 nt, Human
gggagcuucucccuuccuuccaucuuccucuc

SEQ ID NO: 197102 - RNA, 32 nt, Human
gggagcuucucuucucaacaggccuugcgagg

SEQ ID NO: 197103 - RNA, 32 nt, Human
gggagcuucuuuggaccuuggagcacacagag

SEQ ID NO: 197104 - RNA, 21 nt, Human
gggagcuugaaaaaaugcaga

SEQ ID NO: 197105 - RNA, 32 nt, Human
gggagcuugaggcucauuggaagaggacgauc

SEQ ID NO: 197106 - RNA, 25 nt, Human
gggagcuugcacuaugcagcuccag

SEQ ID NO: 197107 - RNA, 19 nt, Human
gggagcuugccacacucuu

SEQ ID NO: 197108 - RNA, 32 nt, Human
gggagcuugccaggaacccaguggccagggag

SEQ ID NO: 197109 - RNA, 32 nt, Human
gggagcuuugccaacaggagguuuugaaccau

SEQ ID NO: 197110 - RNA, 32 nt, Human
gggagcuuugccugggaccugaaccuggagca

SEQ ID NO: 197111 - RNA, 20 nt, Human
gggagcuuuggagaauucug

SEQ ID NO: 197112 - RNA, 24 nt, Human
gggaggaaaagaggaggagacgga

SEQ ID NO: 197113 - RNA, 32 nt, Human
gggaggaaaagaggaggagacggaggagaacu

SEQ ID NO: 197114 - RNA, 32 nt, Human
gggaggaaagaaugccugcguggugcagcuac

SEQ ID NO: 197115 - RNA, 18 nt, Human
gggaggaaagcuggaagg

SEQ ID NO: 197116 - RNA, 21 nt, Human
gggaggaaaggggccuggagg

SEQ ID NO: 197117 - RNA, 20 nt, Human
gggaggaacccggugggagg

SEQ ID NO: 197118 - RNA, 32 nt, Human
gggaggaagaggaggaagaggaaggggagagg

SEQ ID NO: 197119 - RNA, 32 nt, Human
gggaggaagaggaggaggaggaggaggcuggg

SEQ ID NO: 197120 - RNA, 32 nt, Human
gggaggaagcacagcuguuggggaagggccag

SEQ ID NO: 197121 - RNA, 17 nt, Human
gggaggaagcugaugaa

SEQ ID NO: 197122 - RNA, 32 nt, Human
gggaggaaggaaggaaggaagggcggcgugga

SEQ ID NO: 197123 - RNA, 32 nt, Human
gggaggaaggcggugagagaggcgggggccuc

SEQ ID NO: 197124 - RNA, 19 nt, Human
gggaggaagggcugggagg

SEQ ID NO: 197125 - RNA, 32 nt, Human
gggaggaaggggcaauuuuccagugaugaaau

SEQ ID NO: 197126 - RNA, 32 nt, Human
gggaggaaggggcaggaggaaggguugagguu

SEQ ID NO: 197127 - RNA, 18 nt, Human
gggaggaaggugguauca

SEQ ID NO: 197128 - RNA, 23 nt, Human
gggaggaagugggaacagggagg

SEQ ID NO: 197129 - RNA, 32 nt, Human
gggaggaagugggaacagggaggugggaggug

SEQ ID NO: 197130 - RNA, 19 nt, Human
gggaggaaguggggaggag

SEQ ID NO: 197131 - RNA, 20 nt, Human
gggaggaaucccuuggggga

SEQ ID NO: 197132 - RNA, 32 nt, Human
gggaggaaucuauuccugucauggucuagugc

SEQ ID NO: 197133 - RNA, 32 nt, Human
gggaggacagagccgguuuccguggcaacccu

SEQ ID NO: 197134 - RNA, 32 nt, Human
gggaggacagcuagcccagcugccuugggcug

SEQ ID NO: 197135 - RNA, 30 nt, Human
gggaggacaggaaggcagccugggacauuu

SEQ ID NO: 197136 - RNA, 32 nt, Human
gggaggacauuuggccagcugguggcugggag

SEQ ID NO: 197137 - RNA, 32 nt, Human
gggaggacauuuucauagccuccuacagugag

SEQ ID NO: 197138 - RNA, 32 nt, Human
gggaggaccaccugaggucaagaguucgagac

SEQ ID NO: 197139 - RNA, 32 nt, Human
gggaggaccagagacgaagggcuuggaaggag

SEQ ID NO: 197140 - RNA, 32 nt, Human
gggaggaccccaaucuaggcccaagagggaaa

SEQ ID NO: 197141 - RNA, 32 nt, Human
gggaggacccugggguggagggugagggauuc

SEQ ID NO: 197142 - RNA, 32 nt, Human
gggaggaccgcuaacuggugcaccuuguccuu

SEQ ID NO: 197143 - RNA, 22 nt, Human
gggaggaccggaggaccgagga

SEQ ID NO: 197144 - RNA, 23 nt, Human
gggaggacgaagcgaguggauca

SEQ ID NO: 197145 - RNA, 23 nt, Human
gggaggacgaggcggguggauca

SEQ ID NO: 197146 - RNA, 32 nt, Human
gggaggacgccaggcugcacacggugaaugug

SEQ ID NO: 197147 - RNA, 32 nt, Human
gggaggacgcgaggccccggcccagccauggc

SEQ ID NO: 197148 - RNA, 32 nt, Human
gggaggacucacugacauaccuaccuucaaga

SEQ ID NO: 197149 - RNA, 32 nt, Human
gggaggacucugcugcuucuuaagcuccagcg

SEQ ID NO: 197150 - RNA, 22 nt, Human
gggaggacugcuugaggccagg

SEQ ID NO: 197151 - RNA, 32 nt, Human
gggaggacuggaccaggcaguggcugcagagg

SEQ ID NO: 197152 - RNA, 31 nt, Human
gggaggagaaaugcuacuggcauuuagugga

SEQ ID NO: 197153 - RNA, 32 nt, Human
gggaggagaaggaggaagagggggaggaggaa

SEQ ID NO: 197154 - RNA, 32 nt, Human
gggaggagaauguccuggaagggcaggacucu

SEQ ID NO: 197155 - RNA, 22 nt, Human
gggaggagacagggcuggggga

SEQ ID NO: 197156 - RNA, 19 nt, Human
gggaggagacaugguagag

SEQ ID NO: 197157 - RNA, 22 nt, Human
gggaggagaccugaucccaggg

SEQ ID NO: 197158 - RNA, 18 nt, Human
gggaggagacgggcggga

SEQ ID NO: 197159 - RNA, 18 nt, Human
gggaggagacugaggaga

SEQ ID NO: 197160 - RNA, 18 nt, Human
gggaggagagaagacaga

SEQ ID NO: 197161 - RNA, 32 nt, Human
gggaggagagaagggggcagagucuucccuac

SEQ ID NO: 197162 - RNA, 32 nt, Human
gggaggagagaagguagagcuguucuuaaauu

SEQ ID NO: 197163 - RNA, 32 nt, Human
gggaggagagacgggcccugcucacagacuag

SEQ ID NO: 197164 - RNA, 19 nt, Human
gggaggagagagcggcaga

SEQ ID NO: 197165 - RNA, 20 nt, Human
gggaggagagauggacgaga

SEQ ID NO: 197166 - RNA, 32 nt, Human
gggaggagagcaucaucacuuuccauuagcug

SEQ ID NO: 197167 - RNA, 17 nt, Human
gggaggagagcugagga

SEQ ID NO: 197168 - RNA, 18 nt, Human
gggaggagaggaggaagg

SEQ ID NO: 197169 - RNA, 18 nt, Human
gggaggagaggagggcga

SEQ ID NO: 197170 - RNA, 32 nt, Human
gggaggagaggaugcagagggaagggaagaga

SEQ ID NO: 197171 - RNA, 17 nt, Human
gggaggagaggcuggga

SEQ ID NO: 197172 - RNA, 18 nt, Human
gggaggagagggcagagg

SEQ ID NO: 197173 - RNA, 18 nt, Human
gggaggagagggcggagg

SEQ ID NO: 197174 - RNA, 18 nt, Human
gggaggagaggguggaga

SEQ ID NO: 197175 - RNA, 16 nt, Human
gggaggagaggugaga

SEQ ID NO: 197176 - RNA, 32 nt, Human
gggaggagagguggagagcggacagaggggcu

SEQ ID NO: 197177 - RNA, 19 nt, Human
gggaggagaguaaaggaga

SEQ ID NO: 197178 - RNA, 20 nt, Human
gggaggagaguaaaugaaga

SEQ ID NO: 197179 - RNA, 18 nt, Human
gggaggagaguuaugaga

SEQ ID NO: 197180 - RNA, 23 nt, Human
gggcaugguggcacaugccugua

SEQ ID NO: 197181 - RNA, 23 nt, Human
gggcaugguggcacgugccugua

SEQ ID NO: 197182 - RNA, 23 nt, Human
gggcaugguggcaggugccugua

SEQ ID NO: 197183 - RNA, 23 nt, Human
gggcaugguggcaugugccugua

SEQ ID NO: 197184 - RNA, 23 nt, Human
gggcaugguggcccaugccugua

SEQ ID NO: 197185 - RNA, 23 nt, Human
gggcaugguggcgagugccugua

SEQ ID NO: 197186 - RNA, 23 nt, Human
gggcaugguggcgcaugccugua

SEQ ID NO: 197187 - RNA, 23 nt, Human
gggcaugguggcgcaugccugug

SEQ ID NO: 197188 - RNA, 23 nt, Human
gggcaugguggcgggugccugua

SEQ ID NO: 197189 - RNA, 23 nt, Human
gggcaugguggcucacaccugua

SEQ ID NO: 197190 - RNA, 23 nt, Human
gggcaugguggcucacgccugua

SEQ ID NO: 197191 - RNA, 23 nt, Human
gggcaugguggcucacgcuugua

SEQ ID NO: 197192 - RNA, 23 nt, Human
gggcaugguggcucauaccugua

SEQ ID NO: 197193 - RNA, 32 nt, Human
gggcaugguggcucaugccugccuguaauccc

SEQ ID NO: 197194 - RNA, 23 nt, Human
gggcaugguggcucaugccugua

SEQ ID NO: 197195 - RNA, 23 nt, Human
gggcaugguggcuuacaucugua

SEQ ID NO: 197196 - RNA, 23 nt, Human
gggcaugguggcuuacgccugua

SEQ ID NO: 197197 - RNA, 23 nt, Human
gggcaugguggcuugcaccugua

SEQ ID NO: 197198 - RNA, 23 nt, Human
gggcaugguggugcaugccugua

SEQ ID NO: 197199 - RNA, 23 nt, Human
gggcauggugguguguaccugua

SEQ ID NO: 197200 - RNA, 32 nt, Human
gggcaugguguaauccuaacacuuugggaggc

SEQ ID NO: 197201 - RNA, 29 nt, Human
gggcauguggauacuggcucucuccuugu

SEQ ID NO: 197202 - RNA, 29 nt, Human
gggcaugugggcugaggcaggcuugccca

SEQ ID NO: 197203 - RNA, 32 nt, Human
gggcauguggucaagaugcauaccucaugaau

SEQ ID NO: 197204 - RNA, 32 nt, Human
gggcaugugugagggaagcugcaugggugggu

SEQ ID NO: 197205 - RNA, 24 nt, Human
gggcaugugugccugcagcuggga

SEQ ID NO: 197206 - RNA, 32 nt, Human
gggcaugugugucuauuucuagagcaggaaga

SEQ ID NO: 197207 - RNA, 32 nt, Human
gggcauguuaaagggaugacugugcauuccag

SEQ ID NO: 197208 - RNA, 32 nt, Human
gggcauguucuucucaugaugaugacugcaac

SEQ ID NO: 197209 - RNA, 32 nt, Human
gggcauuauacaacaaauaaucuaggauuuau

SEQ ID NO: 197210 - RNA, 32 nt, Human
gggcauuaucagugaacuacucugagauuuac

SEQ ID NO: 197211 - RNA, 32 nt, Human
gggcauucaaagaagcuagacugagaacgccu

SEQ ID NO: 197212 - RNA, 32 nt, Human
gggcauucacagugggcaugcuauccacccuc

SEQ ID NO: 197213 - RNA, 32 nt, Human
gggcauucacgucaguucucugaccccgccgu

SEQ ID NO: 197214 - RNA, 32 nt, Human
gggcauucccagagaggaagggccgcugugca

SEQ ID NO: 197215 - RNA, 32 nt, Human
gggcauucuucgggggugcaucagagggaggg

SEQ ID NO: 197216 - RNA, 21 nt, Human
gggcauuucaggcuccugcug

SEQ ID NO: 197217 - RNA, 17 nt, Human
gggcauuucaguggcag

SEQ ID NO: 197218 - RNA, 18 nt, Human
gggcauuucuggaggcag

SEQ ID NO: 197219 - RNA, 32 nt, Human
gggcauuuggaugagguugaggugagaucagg

SEQ ID NO: 197220 - RNA, 32 nt, Human
gggccaaaaucaaucuuaaacgggagggguaa

SEQ ID NO: 197221 - RNA, 31 nt, Human
gggccaaacaacacggccgggaggcggccgc

SEQ ID NO: 197222 - RNA, 32 nt, Human
gggccaaacccccaguggcugggccucugugu

SEQ ID NO: 197223 - RNA, 32 nt, Human
gggccaaaggaucaguugagaaacaguuaagg

SEQ ID NO: 197224 - RNA, 32 nt, Human
gggccaacauggugaaaccccaucucuacaaa

SEQ ID NO: 197225 - RNA, 32 nt, Human
gggccaacauggugaaaccccaucucugcuaa

SEQ ID NO: 197226 - RNA, 32 nt, Human
gggccaacauuauuucugaagacuucauuauu

SEQ ID NO: 197227 - RNA, 32 nt, Human
gggccaaccccuggccugcugcugugcuucag

SEQ ID NO: 197228 - RNA, 32 nt, Human
gggccaagaaaaugagcuugguuuccaacggg

SEQ ID NO: 197229 - RNA, 32 nt, Human
gggccaagagguuaaggcuacagugagcuaug

SEQ ID NO: 197230 - RNA, 32 nt, Human
gggccaagauccccgggaaagcauagccgugc

SEQ ID NO: 197231 - RNA, 32 nt, Human
gggccaagcacaaagguuccagugagcgcaug

SEQ ID NO: 197232 - RNA, 32 nt, Human
gggccaagcccgcuaccuccuguaagaggacu

SEQ ID NO: 197233 - RNA, 25 nt, Human
gggccaagccgggaccaccccgaga

SEQ ID NO: 197234 - RNA, 32 nt, Human
gggccaagccuccucaacuaugaccucaaccg

SEQ ID NO: 197235 - RNA, 28 nt, Human
gggccaagccuggaugggugcucagagg

SEQ ID NO: 197236 - RNA, 32 nt, Human
gggccaaggaaugggggcaggagaggaaacag

SEQ ID NO: 197237 - RNA, 32 nt, Human
gggccaaggacaauugggagggcagcaggcag

SEQ ID NO: 197238 - RNA, 32 nt, Human
gggccaaggaccugagaccugaaggguugacu

SEQ ID NO: 197239 - RNA, 19 nt, Human
gggccaaggacucugcuga

SEQ ID NO: 197240 - RNA, 32 nt, Human
gggccaaggagaaaggcaugaaucuucccugu

SEQ ID NO: 197241 - RNA, 32 nt, Human
gggccaaggagauuaagaagaaaacgacuuuc

SEQ ID NO: 197242 - RNA, 32 nt, Human
gggccaaggaugccaccccacccucagcugua

SEQ ID NO: 197243 - RNA, 32 nt, Human
gggccaaggcaaaggggaagcauucacagacc

SEQ ID NO: 197244 - RNA, 18 nt, Human
gggccaaggcagcccugg

SEQ ID NO: 197245 - RNA, 32 nt, Human
gggccaaggccacugggggaccugccacacug

SEQ ID NO: 197246 - RNA, 32 nt, Human
gggccaagggaaaugcuguuggugagaaucga

SEQ ID NO: 197247 - RNA, 24 nt, Human
gggccaagggaaggcuaucagaga

SEQ ID NO: 197248 - RNA, 32 nt, Human
gggccaagggaucugggugggcauuuuuaacu

SEQ ID NO: 197249 - RNA, 22 nt, Human
gggccaagggcagagggggcug

SEQ ID NO: 197250 - RNA, 32 nt, Human
gggccaagggccaggacuucccgucacaauuu

SEQ ID NO: 197251 - RNA, 32 nt, Human
gggccaaggggugcuugcgccacccacguccc

SEQ ID NO: 197252 - RNA, 22 nt, Human
gggccaaggucgcucaugguca

SEQ ID NO: 197253 - RNA, 19 nt, Human
gggccaaggucugggggug

SEQ ID NO: 197254 - RNA, 25 nt, Human
gggccaaggucuggucacccagagg

SEQ ID NO: 197255 - RNA, 24 nt, Human
gggccaagucagcccaucgagaga

SEQ ID NO: 197256 - RNA, 32 nt, Human
gggccaagucuuagggcaucacaaacagccca

SEQ ID NO: 197257 - RNA, 22 nt, Human
gggccaaguggcauauccagag

SEQ ID NO: 197258 - RNA, 32 nt, Human
gggccaaucccugcccagucagcuggggucug

SEQ ID NO: 197259 - RNA, 32 nt, Human
gggccaauucacagaaacagaugugaggucag

SEQ ID NO: 197260 - RNA, 32 nt, Human
gggccacaagaccagaugagccaguuuaucgu

SEQ ID NO: 197261 - RNA, 32 nt, Human
gggccacacaggugaugcuguaccccugacaa

SEQ ID NO: 197262 - RNA, 24 nt, Human
gggccacacagugagacuccgucu

SEQ ID NO: 197263 - RNA, 32 nt, Human
gggccacacaugcauacacaugcacacucaga

SEQ ID NO: 197264 - RNA, 32 nt, Human
gggccacaccucagugccaaagaccccauggg

SEQ ID NO: 197265 - RNA, 32 nt, Human
gggccacacgagggccuggugccggugagggg

SEQ ID NO: 197266 - RNA, 32 nt, Human
gggccacacugcaaccucagcuuaacaugaau

SEQ ID NO: 197267 - RNA, 17 nt, Human
gggccacagaacccgug

SEQ ID NO: 197268 - RNA, 24 nt, Human
gggccacagaaugagacuccaucu

SEQ ID NO: 197269 - RNA, 32 nt, Human
gggccacagaauuucuuagaaagcuuugauua

SEQ ID NO: 197270 - RNA, 32 nt, Human
gggccacagagaccagccuccgggaagggguc

SEQ ID NO: 197271 - RNA, 32 nt, Human
gggccacagaggagauggaggcaaacaccuuc

SEQ ID NO: 197272 - RNA, 24 nt, Human
gggccacagauggucaucagggga

SEQ ID NO: 197273 - RNA, 20 nt, Human
gggccacagcaccugggcac

SEQ ID NO: 197274 - RNA, 32 nt, Human
gggccacagcagagagacacagcaugggcagu

SEQ ID NO: 197275 - RNA, 24 nt, Human
gggccacagcccuuuuagggcauu

SEQ ID NO: 197276 - RNA, 22 nt, Human
gggccacagcugcuucagcaga

SEQ ID NO: 197277 - RNA, 21 nt, Human
gggccacagcuuaaacagcuu

SEQ ID NO: 197278 - RNA, 32 nt, Human
gggccacaggacgucuguccuccagucacagg

SEQ ID NO: 197279 - RNA, 32 nt, Human
gggccacagggagggaggggagauggaggccc

SEQ ID NO: 197280 - RNA, 18 nt, Human
gggccacagggugggcug

SEQ ID NO: 197281 - RNA, 32 nt, Human
gggccacaggguggggucauagggucacuuca

SEQ ID NO: 197282 - RNA, 20 nt, Human
gggccacagguccuccuaca

SEQ ID NO: 197283 - RNA, 31 nt, Human
gggccacaguuucagcagaccaucaggugaa

SEQ ID NO: 197284 - RNA, 31 nt, Human
gggccacaguuucaguacuucagccucagug

SEQ ID NO: 197285 - RNA, 32 nt, Human
gggccacaucccgggucuccucccucugcgau

SEQ ID NO: 197286 - RNA, 32 nt, Human
gggccacaucucugcaccuuccaggcucugaa

SEQ ID NO: 197287 - RNA, 18 nt, Human
gggccacaucugcccaug

SEQ ID NO: 197288 - RNA, 32 nt, Human
gggccacaucuucugccccuucucagccuccc

SEQ ID NO: 197289 - RNA, 32 nt, Human
gggccacaugacaaagccccaucucuacaaaa

SEQ ID NO: 197290 - RNA, 32 nt, Human
gggccacaugcacacacagccuagcugccccc

SEQ ID NO: 197291 - RNA, 32 nt, Human
gggccacaugcugacccagccccacauccaca

SEQ ID NO: 197292 - RNA, 22 nt, Human
gggccacauggcagcccagggg

SEQ ID NO: 197293 - RNA, 32 nt, Human
gggccacaugguggccccgcugugucuggggu

SEQ ID NO: 197294 - RNA, 32 nt, Human
gggccacauucucaguuccugggauugaaaac

SEQ ID NO: 197295 - RNA, 32 nt, Human
gggccacauugggcucacagaccucagccugg

SEQ ID NO: 197296 - RNA, 32 nt, Human
gggccaccaccagugugcagcaggacauccua

SEQ ID NO: 197297 - RNA, 23 nt, Human
gggccaccagaagcaggccucga

SEQ ID NO: 197298 - RNA, 19 nt, Human
gggccaccaggaccaaagc

SEQ ID NO: 197299 - RNA, 32 nt, Human
gggccaccaggagggagccaagacaaugcaaa

SEQ ID NO: 197300 - RNA, 32 nt, Human
gggccaccaggaguucaagaccagcccgggca

SEQ ID NO: 197301 - RNA, 32 nt, Human
gggccaccaggaucagccaggagggcguucuu

SEQ ID NO: 197302 - RNA, 22 nt, Human
gggccaccaugcacucaauaaa

SEQ ID NO: 197303 - RNA, 32 nt, Human
gggccacccacuugcuggacagucugagccaa

SEQ ID NO: 197304 - RNA, 32 nt, Human
gggccaccccacucccuuccgcuugcagcuuc

SEQ ID NO: 197305 - RNA, 22 nt, Human
gggccacccggcucagcccgug

SEQ ID NO: 197306 - RNA, 32 nt, Human
gggccacccucagagcucacacauccacgaac

SEQ ID NO: 197307 - RNA, 32 nt, Human
gggccacccuggaauggggcaggggaagggca

SEQ ID NO: 197308 - RNA, 32 nt, Human
gggccacccuugccagugacuccaaguggaac

SEQ ID NO: 197309 - RNA, 32 nt, Human
gggccaccgagcugcccuggaugggcugcugg

SEQ ID NO: 197310 - RNA, 32 nt, Human
gggccaccgccuugcccagccuggaugccauc

SEQ ID NO: 197311 - RNA, 19 nt, Human
gggccaccggcggcuucga

SEQ ID NO: 197312 - RNA, 19 nt, Human
gggccaccgucuccaagga

SEQ ID NO: 197313 - RNA, 32 nt, Human
gggccaccuccaggcugcaggggcgggucacu

SEQ ID NO: 197314 - RNA, 32 nt, Human
gggccaccugaaaguucuauucccaggacuaa

SEQ ID NO: 197315 - RNA, 32 nt, Human
gggccaccuggccuuucaguuacuugaguuug

SEQ ID NO: 197316 - RNA, 32 nt, Human
gggccaccugggagauagcagggggcacagag

SEQ ID NO: 197317 - RNA, 32 nt, Human
gggccaccugguguguggagguggcgggaggg

SEQ ID NO: 197318 - RNA, 22 nt, Human
gggccaccuuugccaaccucga

SEQ ID NO: 197319 - RNA, 18 nt, Human
gggccacgccggccacac

SEQ ID NO: 197320 - RNA, 32 nt, Human
gggccacggcacuccagccugggugacagagu

SEQ ID NO: 197321 - RNA, 18 nt, Human
gggccacggcaggggggc

SEQ ID NO: 197322 - RNA, 22 nt, Human
gggccacgggcucgcgggcacu

SEQ ID NO: 197323 - RNA, 18 nt, Human
gggccacggggaggggac

SEQ ID NO: 197324 - RNA, 32 nt, Human
gggccacggggaggggaccgggaagcgcuggg

SEQ ID NO: 197325 - RNA, 32 nt, Human
gggccacgugccccggaagcagguguguccag

SEQ ID NO: 197326 - RNA, 32 nt, Human
gggccacuaagccacacuuucccuucauccug

SEQ ID NO: 197327 - RNA, 32 nt, Human
gggccacuacacuccagccugggugacagaga

SEQ ID NO: 197328 - RNA, 32 nt, Human
gggccacucuccccucccucuuccuuccccca

SEQ ID NO: 197329 - RNA, 32 nt, Human
gggccacugcaaagauuccagccuggguccag

SEQ ID NO: 197330 - RNA, 32 nt, Human
gggccacugcacuccacccugggcgacagagu

SEQ ID NO: 197331 - RNA, 32 nt, Human
gggccacugcacuccagccuggaugacagagu

SEQ ID NO: 197332 - RNA, 32 nt, Human
gggccacugcacuccagcuugggugacagagc

SEQ ID NO: 197333 - RNA, 32 nt, Human
gggccacugcacucuagccuggcaacagagca

SEQ ID NO: 197334 - RNA, 32 nt, Human
gggccacugcacugcagccugugugacaaagg

SEQ ID NO: 197335 - RNA, 32 nt, Human
gggccacugcacugggugauucacgugugccc

SEQ ID NO: 197336 - RNA, 32 nt, Human
gggccacugcagaugacucuccuuugaaauga

SEQ ID NO: 197337 - RNA, 20 nt, Human
gggccacuggaugucugccu

SEQ ID NO: 197338 - RNA, 32 nt, Human
gggccacuggggaaucugaggggugaugggag

SEQ ID NO: 197339 - RNA, 21 nt, Human
gggccacuguccucagaugac

SEQ ID NO: 197340 - RNA, 32 nt, Human
gggccacuuggcuuucuuuugcuguauuguuu

SEQ ID NO: 197341 - RNA, 32 nt, Human
gggccagaaauguucagcagcauuaagaagag

SEQ ID NO: 197342 - RNA, 23 nt, Human
gggccagaagaggcccccaggga

SEQ ID NO: 197343 - RNA, 22 nt, Human
gggccagaagcccguccuccua

SEQ ID NO: 197344 - RNA, 32 nt, Human
gggccagaaggccaugaacuggaaggagagcu

SEQ ID NO: 197345 - RNA, 23 nt, Human
gggccagacaggcucuuccuggg

SEQ ID NO: 197346 - RNA, 32 nt, Human
gggccagaccuuccuccagacuccagcccacc

SEQ ID NO: 197347 - RNA, 32 nt, Human
gggccagagagggagcccgagccaggccaucu

SEQ ID NO: 197348 - RNA, 28 nt, Human
gggccagagauuauaaguuugacacaac

SEQ ID NO: 197349 - RNA, 22 nt, Human
gggccagagcaggcagaacagg

SEQ ID NO: 197350 - RNA, 21 nt, Human
gggccagagcgggcaggaggu

SEQ ID NO: 197351 - RNA, 20 nt, Human
gggccagaggcagaacccug

SEQ ID NO: 197352 - RNA, 19 nt, Human
gggccagagucugugugga

SEQ ID NO: 197353 - RNA, 32 nt, Human
gggccagcaaagucccucccauauucaaagag

SEQ ID NO: 197354 - RNA, 24 nt, Human
gggccagcacgggccuucccggag

SEQ ID NO: 197355 - RNA, 32 nt, Human
gggccagcacuggaggggcccacccacaugac

SEQ ID NO: 197356 - RNA, 32 nt, Human
gggccagcacuguggacuccuccugggacagg

SEQ ID NO: 197357 - RNA, 23 nt, Human
gggccagcagauucucccagagg

SEQ ID NO: 197358 - RNA, 22 nt, Human
gggccagcagcagacccugggc

SEQ ID NO: 197359 - RNA, 20 nt, Human
gggccagcagcagcuccagc

SEQ ID NO: 197360 - RNA, 18 nt, Human
gggccagcagcagggagg

SEQ ID NO: 197361 - RNA, 19 nt, Human
gggccagcagcagguaggu

SEQ ID NO: 197362 - RNA, 18 nt, Human
gggccagcagcggcaggc

SEQ ID NO: 197363 - RNA, 32 nt, Human
gggccagcagggaggugggcauggcagggaau

SEQ ID NO: 197364 - RNA, 22 nt, Human
gggccagcagguucugcugagg

SEQ ID NO: 197365 - RNA, 32 nt, Human
gggccagcagugagacuaugagccaagcaaag

SEQ ID NO: 197366 - RNA, 21 nt, Human
gggccagcauacuccgugagg

SEQ ID NO: 197367 - RNA, 32 nt, Human
gggccagcauggugaaaccccgucucuacuaa

SEQ ID NO: 197368 - RNA, 32 nt, Human
gggccagccagcccugcgggccuccgugcucc

SEQ ID NO: 197369 - RNA, 32 nt, Human
gggccagccccuccacacaucucccuaaguca

SEQ ID NO: 197370 - RNA, 23 nt, Human
gggccagcccuggcuggcaugga

SEQ ID NO: 197371 - RNA, 32 nt, Human
gggccagccgggccacgagaaagaaagugaau

SEQ ID NO: 197372 - RNA, 22 nt, Human
gggccagccgggcugcugcaga

SEQ ID NO: 197373 - RNA, 32 nt, Human
gggccagccggugggugaacccugccagccac

SEQ ID NO: 197374 - RNA, 32 nt, Human
gggccagccucgugcugggcucugcccugggc

SEQ ID NO: 197375 - RNA, 23 nt, Human
gggccagcgaguccaagccggcu

SEQ ID NO: 197376 - RNA, 20 nt, Human
gggccagcgcagggcucagg

SEQ ID NO: 197377 - RNA, 32 nt, Human
gggccagcggggcugcucacccaccucuugug

SEQ ID NO: 197378 - RNA, 19 nt, Human
gggccagcgguauugcuga

SEQ ID NO: 197379 - RNA, 32 nt, Human
gggccagcucaaggugggcacgggggcccaga

SEQ ID NO: 197380 - RNA, 32 nt, Human
gggccagcucagggaggaccugccugggagcu

SEQ ID NO: 197381 - RNA, 25 nt, Human
gggccagcucaguggaccgugugga

SEQ ID NO: 197382 - RNA, 32 nt, Human
gggccagcuccagccucugccccagaccuuaa

SEQ ID NO: 197383 - RNA, 20 nt, Human
gggccagcuccaggcuaguu

SEQ ID NO: 197384 - RNA, 20 nt, Human
gggccagcucgcuccaggga

SEQ ID NO: 197385 - RNA, 21 nt, Human
gggccagcucgcugcucaggc

SEQ ID NO: 197386 - RNA, 32 nt, Human
gggccagcucugccccagcccugagaggggug

SEQ ID NO: 197387 - RNA, 32 nt, Human
gggccagcucuuaaaauaagaaagcugagacu

SEQ ID NO: 197388 - RNA, 32 nt, Human
gggccagcugauaccaaccaacuggccuguau

SEQ ID NO: 197389 - RNA, 32 nt, Human
gggccagcugccugugccugccaugggccagc

SEQ ID NO: 197390 - RNA, 32 nt, Human
gggccagcugcgccgcggcucacagcugacga

SEQ ID NO: 197391 - RNA, 32 nt, Human
gggccagcuucuuccuccuaaccacuuguuug

SEQ ID NO: 197392 - RNA, 18 nt, Human
gggccaggacacccagug

SEQ ID NO: 197393 - RNA, 32 nt, Human
gggccaggaccccuccacaugcaccugcuagu

SEQ ID NO: 197394 - RNA, 32 nt, Human
gggccaggacgcccagccacagcaagcccugu

SEQ ID NO: 197395 - RNA, 21 nt, Human
gggccaggacggggcggcagg

SEQ ID NO: 197396 - RNA, 32 nt, Human
gggccaggacucagucucagagccaaggagag

SEQ ID NO: 197397 - RNA, 32 nt, Human
gggccaggacuucagccugccuccgagggucc

SEQ ID NO: 197398 - RNA, 32 nt, Human
gggccaggagccagggggugacugggguggcu

SEQ ID NO: 197399 - RNA, 32 nt, Human
gggccaggagcuugaaggaacugugaaauaaa

SEQ ID NO: 197400 - RNA, 19 nt, Human
gggccaggauccccaggga

SEQ ID NO: 197401 - RNA, 23 nt, Human
gggccaggaugcucccccaggga

SEQ ID NO: 197402 - RNA, 22 nt, Human
gggccaggcacacccucagagg

SEQ ID NO: 197403 - RNA, 32 nt, Human
gggccaggcaccucccucacaggacaaucaga

SEQ ID NO: 197404 - RNA, 22 nt, Human
gggccaggcaggcagcuugagg

SEQ ID NO: 197405 - RNA, 32 nt, Human
gggccaggcagucgugguugcagaaggagcaa

SEQ ID NO: 197406 - RNA, 32 nt, Human
gggccaggcagugcuggagugcguuugcuggc

SEQ ID NO: 197407 - RNA, 32 nt, Human
gggccaggccacugccuuuuguccucagugac

SEQ ID NO: 197408 - RNA, 22 nt, Human
gggccaggccauggccaagggg

SEQ ID NO: 197409 - RNA, 25 nt, Human
gggccaggccgggccaggagccugc

SEQ ID NO: 197410 - RNA, 22 nt, Human
gggccaggccugggcccaggga

SEQ ID NO: 197411 - RNA, 32 nt, Human
gggccaggcucacaccuguaauccuaaguaac

SEQ ID NO: 197412 - RNA, 32 nt, Human
gggccaggcugcaggaagaagacaaaggcagc

SEQ ID NO: 197413 - RNA, 32 nt, Human
gggccagggaaaggcggggucagggcgggguu

SEQ ID NO: 197414 - RNA, 32 nt, Human
gggccagggagcagcaagccagcugggacuga

SEQ ID NO: 197415 - RNA, 32 nt, Human
gggccagggagguugaggcugcagugagcuau

SEQ ID NO: 197416 - RNA, 32 nt, Human
gggccagggcagacaaaauaagagugagcugg

SEQ ID NO: 197417 - RNA, 25 nt, Human
gggccagggcggcggcccccaggga

SEQ ID NO: 197418 - RNA, 18 nt, Human
gggccagggcucugagga

SEQ ID NO: 197419 - RNA, 32 nt, Human
gggccagggcugcugccugccagccugggguc

SEQ ID NO: 197420 - RNA, 32 nt, Human
gggccagggcuggauggacagacaccuccccc

SEQ ID NO: 197421 - RNA, 32 nt, Human
gggccagggcuggggcacgaggguaccuucac

SEQ ID NO: 197422 - RNA, 32 nt, Human
gggccaggggagaagcagucaccccuguguag

SEQ ID NO: 197423 - RNA, 31 nt, Human
gggccaggggagagagaagaggaucagcagu

SEQ ID NO: 197424 - RNA, 32 nt, Human
gggccaggggagagagaagaggaucagcagug

SEQ ID NO: 197425 - RNA, 17 nt, Human
gggccaggggccucuga

SEQ ID NO: 197426 - RNA, 32 nt, Human
gggccagggggugggagggagaaugggcacag

SEQ ID NO: 197427 - RNA, 32 nt, Human
gggccagggucagggacccucugccucuggca

SEQ ID NO: 197428 - RNA, 32 nt, Human
gggccagggugaggguggggcuggagacgacg

SEQ ID NO: 197429 - RNA, 32 nt, Human
gggccagguacgguucuucacagcagauauag

SEQ ID NO: 197430 - RNA, 32 nt, Human
gggccaggucaccaaggcuaucauccaaggca

SEQ ID NO: 197431 - RNA, 19 nt, Human
gggccagguccuacucaca

SEQ ID NO: 197432 - RNA, 21 nt, Human
gggccaggugacagugaagcu

SEQ ID NO: 197433 - RNA, 32 nt, Human
gggccaggugccugagauugauguuccauccu

SEQ ID NO: 197434 - RNA, 21 nt, Human
gggccaggugcuuccugccag

SEQ ID NO: 197435 - RNA, 32 nt, Human
gggccaggugcuuccugccagcaaagaugagu

SEQ ID NO: 197436 - RNA, 32 nt, Human
gggccaggugggaacaguguguccucugcccc

SEQ ID NO: 197437 - RNA, 32 nt, Human
gggccaggugggaccugaaagcaaagacaaug

SEQ ID NO: 197438 - RNA, 18 nt, Human
gggccagguguggggcug

SEQ ID NO: 197439 - RNA, 19 nt, Human
gggccagguuagggccuuc

SEQ ID NO: 197440 - RNA, 32 nt, Human
gggccaguaggugggaaguagcuuaaacaaug

SEQ ID NO: 197441 - RNA, 21 nt, Human
gggccagucccugcccuccca

SEQ ID NO: 197442 - RNA, 32 nt, Human
gggccagucucaaacuccugacgucaagugau

SEQ ID NO: 197443 - RNA, 32 nt, Human
gggccagucucgaacuccugacgucaagugau

SEQ ID NO: 197444 - RNA, 32 nt, Human
gggccagucugcaggcggagagagucggacgg

SEQ ID NO: 197445 - RNA, 20 nt, Human
gggccagugaagcucaggca

SEQ ID NO: 197446 - RNA, 24 nt, Human
gggccagugaaggcugcccagaga

SEQ ID NO: 197447 - RNA, 32 nt, Human
gggccagugacagagaaggcagaggggagugu

SEQ ID NO: 197448 - RNA, 32 nt, Human
gggccagugcucaugguggccucucugugccu

SEQ ID NO: 197449 - RNA, 32 nt, Human
gggccaguggcacgcuaggccaugucuggucc

SEQ ID NO: 197450 - RNA, 32 nt, Human
gggccaguggggaggagcaggagccugagccu

SEQ ID NO: 197451 - RNA, 18 nt, Human
gggccaguggggccagcu

SEQ ID NO: 197452 - RNA, 24 nt, Human
gggccaguggggccagcucaggga

SEQ ID NO: 197453 - RNA, 21 nt, Human
gggccaguggugccucaggca

SEQ ID NO: 197454 - RNA, 32 nt, Human
gggccagugucaggccagcaggugcagggaca

SEQ ID NO: 197455 - RNA, 32 nt, Human
gggccaguucuagaaagucugaugucucaaag

SEQ ID NO: 197456 - RNA, 32 nt, Human
gggccaguugggggagugcgggguggagagag

SEQ ID NO: 197457 - RNA, 32 nt, Human
gggccaguuuuguuuaaggaucaaagagacaa

SEQ ID NO: 197458 - RNA, 21 nt, Human
gggccauaggcgacccaggga

SEQ ID NO: 197459 - RNA, 32 nt, Human
gggccaucacccagggacagcgggugacugug

SEQ ID NO: 197460 - RNA, 21 nt, Human
gggccaucagcgaacugggcc

SEQ ID NO: 197461 - RNA, 32 nt, Human
gggccauccagccauguucucacuuugguuua

SEQ ID NO: 197462 - RNA, 32 nt, Human
gggccauccucuuucugcuccucgacacacgc

SEQ ID NO: 197463 - RNA, 32 nt, Human
gggccaucguggguucccugagcccagccagc

SEQ ID NO: 197464 - RNA, 21 nt, Human
gggccaucuggaccaaaggug

SEQ ID NO: 197465 - RNA, 23 nt, Human
gggccaucugggccauucagaga

SEQ ID NO: 197466 - RNA, 31 nt, Human
gggccaugacucucugggaccuugccacagc

SEQ ID NO: 197467 - RNA, 32 nt, Human
gggccaugacucucugggaccuugccacagcc

SEQ ID NO: 197468 - RNA, 18 nt, Human
gggccaugagcccugcca

SEQ ID NO: 197469 - RNA, 32 nt, Human
gggccaugcagcaggcaggccauggccugcuc

SEQ ID NO: 197470 - RNA, 32 nt, Human
gggccaugcccagccagguuggcuucccuggg

SEQ ID NO: 197471 - RNA, 23 nt, Human
gggccaugcccguuguccuauug

SEQ ID NO: 197472 - RNA, 32 nt, Human
gggccaugcccugaguguuuucuucacauggc

SEQ ID NO: 197473 - RNA, 32 nt, Human
gggccaugcuuuccuuuucuuccuucuuucuc

SEQ ID NO: 197474 - RNA, 32 nt, Human
gggccauggcagggaggggagccuucuggaag

SEQ ID NO: 197475 - RNA, 32 nt, Human
gggccauggccaaggcccugccacgcacgccc

SEQ ID NO: 197476 - RNA, 20 nt, Human
gggccauggcugggcuccca

SEQ ID NO: 197477 - RNA, 32 nt, Human
gggccaugggccgaggccuggcauucacguuc

SEQ ID NO: 197478 - RNA, 32 nt, Human
gggccaugggguggugcuucccuggaccagaa

SEQ ID NO: 197479 - RNA, 30 nt, Human
gggccaugggugucaucuccuaccucagcc

SEQ ID NO: 197480 - RNA, 21 nt, Human
gggccaugguggagggcacuu

SEQ ID NO: 197481 - RNA, 32 nt, Human
gggccauguggccagggaacccuucaugaaac

SEQ ID NO: 197482 - RNA, 32 nt, Human
gggccauuagauuuggaggcuaccucaccugg

SEQ ID NO: 197483 - RNA, 32 nt, Human
gggccauucaucuacaaccaaguccugaugga

SEQ ID NO: 197484 - RNA, 32 nt, Human
gggccauucauuucuauaggcaaagaaagcuc

SEQ ID NO: 197485 - RNA, 32 nt, Human
gggccauucccugggacucucacuccugcacu

SEQ ID NO: 197486 - RNA, 32 nt, Human
gggccauucuccuuagcuucuggcuuucaacu

SEQ ID NO: 197487 - RNA, 19 nt, Human
gggccauuggacucaggua

SEQ ID NO: 197488 - RNA, 32 nt, Human
gggccauuggggagcacagggccaggcugggg

SEQ ID NO: 197489 - RNA, 32 nt, Human
gggcccaaaugagagaaugguacuuagggaug

SEQ ID NO: 197490 - RNA, 32 nt, Human
gggcccaacgcgcaugcugggcgcccggguga

SEQ ID NO: 197491 - RNA, 32 nt, Human
gggcccaacucccaccugccugggcgaaucuc

SEQ ID NO: 197492 - RNA, 32 nt, Human
gggcccaagagcugcacucacacuccuacaac

SEQ ID NO: 197493 - RNA, 32 nt, Human
gggcccaagaguucgagaccagccugggcaac

SEQ ID NO: 197494 - RNA, 24 nt, Human
gggcccaagcagguguggggccuc

SEQ ID NO: 197495 - RNA, 23 nt, Human
gggcccaagcgauccuccugccu

SEQ ID NO: 197496 - RNA, 32 nt, Human
gggcccaaggagccaugagucuuaggcuugac

SEQ ID NO: 197497 - RNA, 32 nt, Human
gggcccaauuccuggccuuggagcucaaaucu

SEQ ID NO: 197498 - RNA, 32 nt, Human
gggcccacaaagucaaggcugcagugagcugu

SEQ ID NO: 197499 - RNA, 32 nt, Human
gggcccacacaguuaaccagcccauuucucca

SEQ ID NO: 197500 - RNA, 19 nt, Human
gggcccacacccccuuccu

SEQ ID NO: 197501 - RNA, 32 nt, Human
gggcccacacuuagaaggaccccacacuuggu

SEQ ID NO: 197502 - RNA, 21 nt, Human
gggcccacagcccccacccca

SEQ ID NO: 197503 - RNA, 32 nt, Human
gggcccacagccgccgcgccggccggcggggc

SEQ ID NO: 197504 - RNA, 32 nt, Human
gggcccacagccgcuccgccucccggcccgca

SEQ ID NO: 197505 - RNA, 32 nt, Human
gggcccacaugcugacacagacucacucagag

SEQ ID NO: 197506 - RNA, 32 nt, Human
gggcccaccaugucgggguaugguuguaggcc

SEQ ID NO: 197507 - RNA, 32 nt, Human
gggcccaccgccucccaccacaccugccaccu

SEQ ID NO: 197508 - RNA, 18 nt, Human
gggcccaccuccaaggga

SEQ ID NO: 197509 - RNA, 32 nt, Human
gggcccagaaagggguuuccagcugggggcac

SEQ ID NO: 197510 - RNA, 32 nt, Human
gggcccagaacagucccaccugugcugcuaug

SEQ ID NO: 197511 - RNA, 32 nt, Human
gggcccagaacugccuuccauucaauggggaa

SEQ ID NO: 197512 - RNA, 32 nt, Human
gggcccagaauggccccacucuguucccaagc

SEQ ID NO: 197513 - RNA, 32 nt, Human
gggcccagacccaagaggagagggugguccgc

SEQ ID NO: 197514 - RNA, 32 nt, Human
gggcccagaccuacacuuggagcccaggucca

SEQ ID NO: 197515 - RNA, 32 nt, Human
gggcccagacuggcccacguccccaugccugg

SEQ ID NO: 197516 - RNA, 32 nt, Human
gggcccagagagagccgcggccgggagcucgc

SEQ ID NO: 197517 - RNA, 32 nt, Human
gggcccagagagagcuguccgccagugcauca

SEQ ID NO: 197518 - RNA, 22 nt, Human
gggcccagagaggcugggucuc

SEQ ID NO: 197519 - RNA, 19 nt, Human
gggcccagagccagcucag

SEQ ID NO: 197520 - RNA, 18 nt, Human
gggcccagaggcugggcc

SEQ ID NO: 197521 - RNA, 32 nt, Human
gggcccagagucagagggcagccccuggcuca

SEQ ID NO: 197522 - RNA, 32 nt, Human
gggcccagaguuucucccugagucgcuguugc

SEQ ID NO: 197523 - RNA, 32 nt, Human
gggcccagcaccaaggugaugggacucuccuc

SEQ ID NO: 197524 - RNA, 19 nt, Human
gggcccagcaccagcucag

SEQ ID NO: 197525 - RNA, 32 nt, Human
gggcccagcacuagaggaagacaaggaucccg

SEQ ID NO: 197526 - RNA, 32 nt, Human
gggcccagcacuccccgcucuggacuagcagu

SEQ ID NO: 197527 - RNA, 32 nt, Human
gggcccagcaggcggggguuugagcccuggac

SEQ ID NO: 197528 - RNA, 18 nt, Human
gggcccagcagggggcag

SEQ ID NO: 197529 - RNA, 32 nt, Human
gggcccagccacugcacuucaccggaugccgu

SEQ ID NO: 197530 - RNA, 32 nt, Human
gggcccagcccgaggaggcacucaggguuagg

SEQ ID NO: 197531 - RNA, 32 nt, Human
gggcccagcccgcccggggcaggaugaccaag

SEQ ID NO: 197532 - RNA, 19 nt, Human
gggcccagcccugccucag

SEQ ID NO: 197533 - RNA, 32 nt, Human
gggcccagccuccgcucccgcucucugucggu

SEQ ID NO: 197534 - RNA, 32 nt, Human
gggcccagcgcagugccucaugccuguaaucc

SEQ ID NO: 197535 - RNA, 32 nt, Human
gggcccaggaacagccugaggccaccacccag

SEQ ID NO: 197536 - RNA, 32 nt, Human
gggcccaggaacugagacuagggcuuucucau

SEQ ID NO: 197537 - RNA, 32 nt, Human
gggcccaggaacugucaucagagcagaaauca

SEQ ID NO: 197538 - RNA, 32 nt, Human
gggcccaggagagagaagcagggagggagaga

SEQ ID NO: 197539 - RNA, 32 nt, Human
gggcccaggagauggagguugcggugaguggg

SEQ ID NO: 197540 - RNA, 32 nt, Human
gggcccaggagauugagaccagccugggcaac

SEQ ID NO: 197541 - RNA, 17 nt, Human
gggcccaggagccggcu

SEQ ID NO: 197542 - RNA, 32 nt, Human
gggcccaggaggcagcuggguugcauggagag

SEQ ID NO: 197543 - RNA, 32 nt, Human
gggcccaggaggucaagccugcagcgagcuga

SEQ ID NO: 197544 - RNA, 32 nt, Human
gggcccaggaggucaaggcuucagugagccau

SEQ ID NO: 197545 - RNA, 32 nt, Human
gggcccaggaggucgaggcugcggugagccau

SEQ ID NO: 197546 - RNA, 32 nt, Human
gggcccaggagguggagguugcagugagccga

SEQ ID NO: 197547 - RNA, 32 nt, Human
gggcccaggaguucaacgcugcagugagcuau

SEQ ID NO: 197548 - RNA, 32 nt, Human
gggcccaggaguucaaggccagccugggcaac

SEQ ID NO: 197549 - RNA, 32 nt, Human
gggcccaggaguucaaggcugcagugagcuau

SEQ ID NO: 197550 - RNA, 32 nt, Human
gggcccaggaguuugaggcugcagugagccau

SEQ ID NO: 197551 - RNA, 32 nt, Human
gggcccaggauuccgggaagcuggagauucca

SEQ ID NO: 197552 - RNA, 32 nt, Human
gggcccaggcagcacagaggagcugugaaccc

SEQ ID NO: 197553 - RNA, 32 nt, Human
gggcccaggccccugcccagcugcagucuccc

SEQ ID NO: 197554 - RNA, 32 nt, Human
gggcccaggccuggcccuccacacuucauucu

SEQ ID NO: 197555 - RNA, 32 nt, Human
gggcccaggccugggccagaagcuguugacca

SEQ ID NO: 197556 - RNA, 32 nt, Human
gggcccaggcuagagugcaguggcgugagcuc

SEQ ID NO: 197557 - RNA, 20 nt, Human
gggcccaggcuuggggacuc

SEQ ID NO: 197558 - RNA, 22 nt, Human
gggcccagggagcccccagagg

SEQ ID NO: 197559 - RNA, 32 nt, Human
gggcccagggaggauggggagggaguggccca

SEQ ID NO: 197560 - RNA, 21 nt, Human
gggcccagggccacccagagg

SEQ ID NO: 197561 - RNA, 20 nt, Human
gggcccagggcucugggccu

SEQ ID NO: 197562 - RNA, 32 nt, Human
gggcccagguccaaaucacagagcuggggcga

SEQ ID NO: 197563 - RNA, 17 nt, Human
gggcccaggucugggcc

SEQ ID NO: 197564 - RNA, 21 nt, Human
gggcccaggugggcgggcuuc

SEQ ID NO: 197565 - RNA, 20 nt, Human
gggcccaggugugcugggcc

SEQ ID NO: 197566 - RNA, 32 nt, Human
gggcccagguguugaaccccuacccagacgcc

SEQ ID NO: 197567 - RNA, 32 nt, Human
gggcccaguagaaauggucuuguaauaugcua

SEQ ID NO: 197568 - RNA, 19 nt, Human
gggcccagucuucuguggg

SEQ ID NO: 197569 - RNA, 23 nt, Human
gggcccaguguuuugccacucag

SEQ ID NO: 197570 - RNA, 21 nt, Human
gggcccaguucagggggguug

SEQ ID NO: 197571 - RNA, 32 nt, Human
gggcccauaaacaacaggagccuuuuguuccg

SEQ ID NO: 197572 - RNA, 32 nt, Human
gggcccaucccccuguccacccaguguccacu

SEQ ID NO: 197573 - RNA, 32 nt, Human
gggcccaucucagggcugcacuggccccuagu

SEQ ID NO: 197574 - RNA, 32 nt, Human
gggcccaucuuacauccucucucuccaaguuu

SEQ ID NO: 197575 - RNA, 32 nt, Human
gggcccaugacuuggcauuagcauguuccaaa

SEQ ID NO: 197576 - RNA, 32 nt, Human
gggcccaugagguuguggcuggcuuaggcagc

SEQ ID NO: 197577 - RNA, 32 nt, Human
gggcccaugccccaaggagcccuucagagccc

SEQ ID NO: 197578 - RNA, 32 nt, Human
gggcccaugucugacccuggggacucucaacu

SEQ ID NO: 197579 - RNA, 31 nt, Human
gggcccauguggcccaucacacagaagauuc

SEQ ID NO: 197580 - RNA, 32 nt, Human
gggcccaugugguugggcucuuccuccuccag

SEQ ID NO: 197581 - RNA, 21 nt, Human
gggcccauucaggacacaggg

SEQ ID NO: 197582 - RNA, 32 nt, Human
gggccccaaagcucugaggccuaggagacugc

SEQ ID NO: 197583 - RNA, 32 nt, Human
gggccccaacuuguauuucuagcagcagaucu

SEQ ID NO: 197584 - RNA, 31 nt, Human
gggccccaagugucugacucgcaaaggcccu

SEQ ID NO: 197585 - RNA, 32 nt, Human
gggccccacaaacaccacaaacaccuuuucca

SEQ ID NO: 197586 - RNA, 32 nt, Human
gggccccacagcuucagacugaggaucuaggg

SEQ ID NO: 197587 - RNA, 32 nt, Human
gggccccacuggaggggcaggcugcguggagg

SEQ ID NO: 197588 - RNA, 32 nt, Human
gggccccacuucugagcacagagcagagacag

SEQ ID NO: 197589 - RNA, 19 nt, Human
gggccccagagccccgcac

SEQ ID NO: 197590 - RNA, 32 nt, Human
gggccccagaguccuggaagugcacugugcag

SEQ ID NO: 197591 - RNA, 21 nt, Human
gggccccagcagagcaggcag

SEQ ID NO: 197592 - RNA, 18 nt, Human
gggccccagcagcuucga

SEQ ID NO: 197593 - RNA, 21 nt, Human
gggccccagcaggcccagcca

SEQ ID NO: 197594 - RNA, 20 nt, Human
gggccccagcaguucuggac

SEQ ID NO: 197595 - RNA, 32 nt, Human
gggccccagccacgugucucaggggcucccac

SEQ ID NO: 197596 - RNA, 22 nt, Human
gggccccagcccaggucugcac

SEQ ID NO: 197597 - RNA, 23 nt, Human
gggccccagcccaggucugcacu

SEQ ID NO: 197598 - RNA, 32 nt, Human
gggccccagcccuccugcuccuuagggccugg

SEQ ID NO: 197599 - RNA, 32 nt, Human
gggccccagccucuccccuccucuuggccucc

SEQ ID NO: 197600 - RNA, 22 nt, Human
gggccccagcggugggagugca

SEQ ID NO: 197601 - RNA, 32 nt, Human
gggccccagcuggccagccuggcgauggggaa

SEQ ID NO: 197602 - RNA, 23 nt, Human
gggccccagcugggccugccccu

SEQ ID NO: 197603 - RNA, 32 nt, Human
gggccccaggaggcaggggagcccagcugucg

SEQ ID NO: 197604 - RNA, 32 nt, Human
gggccccaggaggcgagucugaguggaaccug

SEQ ID NO: 197605 - RNA, 32 nt, Human
gggccccaggaggcugggggagaagugcacgc

SEQ ID NO: 197606 - RNA, 32 nt, Human
gggccccaggcagggcaggaggugguggaaac

SEQ ID NO: 197607 - RNA, 32 nt, Human
gggccccagggaacuaaagggugugggucagg

SEQ ID NO: 197608 - RNA, 32 nt, Human
gggccccaggugggagacccaacagugggugc

SEQ ID NO: 197609 - RNA, 32 nt, Human
gggccccagugaacuccauaucagguauauac

SEQ ID NO: 197610 - RNA, 32 nt, Human
gggccccaguguccugguaauuuauaggacug

SEQ ID NO: 197611 - RNA, 22 nt, Human
gggccccauccccccagcuggg

SEQ ID NO: 197612 - RNA, 32 nt, Human
gggccccauccugggcagaggggccuggggcu

SEQ ID NO: 197613 - RNA, 32 nt, Human
gggccccaugcuaggcuugccugggugugaga

SEQ ID NO: 197614 - RNA, 32 nt, Human
gggccccauggcagcuccugaccuuggguccu

SEQ ID NO: 197615 - RNA, 21 nt, Human
gggccccauuccagaccaguu

SEQ ID NO: 197616 - RNA, 24 nt, Human
gggcccccaaacugucacagaaag

SEQ ID NO: 197617 - RNA, 32 nt, Human
gggcccccaaguuuugagagaacugggcuuuc

SEQ ID NO: 197618 - RNA, 21 nt, Human
gggcccccaccauucacuuuu

SEQ ID NO: 197619 - RNA, 32 nt, Human
gggcccccagccugugccuugcugccacagua

SEQ ID NO: 197620 - RNA, 19 nt, Human
gggcccccaggcucaagca

SEQ ID NO: 197621 - RNA, 18 nt, Human
gggcccccauguccagcu

SEQ ID NO: 197622 - RNA, 24 nt, Human
gggccccccacuuccccccaaggg

SEQ ID NO: 197623 - RNA, 18 nt, Human
gggcccccgccccccagc

SEQ ID NO: 197624 - RNA, 19 nt, Human
gggcccccgccggcgcgcu

SEQ ID NO: 197625 - RNA, 32 nt, Human
gggcccccguagucccagcuacucaggaggcu

SEQ ID NO: 197626 - RNA, 21 nt, Human
gggcccccuaaccccacccca

SEQ ID NO: 197627 - RNA, 32 nt, Human
gggcccccuaacccucuuguggcuccaguuau

SEQ ID NO: 197628 - RNA, 21 nt, Human
gggcccccucacgccugccuu

SEQ ID NO: 197629 - RNA, 32 nt, Human
gggcccccuccccacauggcccucgcucuguc

SEQ ID NO: 197630 - RNA, 32 nt, Human
gggcccccuccuggcucaaaaauggcugcaac

SEQ ID NO: 197631 - RNA, 32 nt, Human
gggcccccuccugugaccucaggguuuggccc

SEQ ID NO: 197632 - RNA, 32 nt, Human
gggcccccugcacugccugguccagaaggggu

SEQ ID NO: 197633 - RNA, 22 nt, Human
gggccccgagcaggcccagacc

SEQ ID NO: 197634 - RNA, 24 nt, Human
gggccccggagccgcgcugccucu

SEQ ID NO: 197635 - RNA, 32 nt, Human
gggccccggagguagagguugcagugagcuga

SEQ ID NO: 197636 - RNA, 32 nt, Human
gggccccggccugucuaugauccugccuccac

SEQ ID NO: 197637 - RNA, 32 nt, Human
gggccccgggacagaguuuucccagaccuggc

SEQ ID NO: 197638 - RNA, 24 nt, Human
gggccccgggacccugccugccuc

SEQ ID NO: 197639 - RNA, 32 nt, Human
gggccccggggcaggcucucucuccccagcag

SEQ ID NO: 197640 - RNA, 18 nt, Human
gggccccgggucugggcc

SEQ ID NO: 197641 - RNA, 32 nt, Human
gggccccguccaggcagccucaguccaggcuc

SEQ ID NO: 197642 - RNA, 32 nt, Human
gggccccguggaacuccagccugcgccaccac

SEQ ID NO: 197643 - RNA, 32 nt, Human
gggccccgugguuccuggagaaagcaggacgc

SEQ ID NO: 197644 - RNA, 32 nt, Human
gggccccguguccacaggaggccaccucggug

SEQ ID NO: 197645 - RNA, 32 nt, Human
gggccccucaggcagagauggaccaggcggug

SEQ ID NO: 197646 - RNA, 32 nt, Human
gggccccucccaggagcucuuggcuguugcug

SEQ ID NO: 197647 - RNA, 21 nt, Human
gggccccucccaggcucagca

SEQ ID NO: 197648 - RNA, 16 nt, Human
gggccccucgcuccca

SEQ ID NO: 197649 - RNA, 32 nt, Human
gggccccucucacccacaacuggaccaggucc

SEQ ID NO: 197650 - RNA, 32 nt, Human
gggccccucucuguccugccucuuuucaccug

SEQ ID NO: 197651 - RNA, 32 nt, Human
gggccccugcagccacccaacgucaccuccag

SEQ ID NO: 197652 - RNA, 32 nt, Human
gggccccugcagccggacaccagcuccagggu

SEQ ID NO: 197653 - RNA, 19 nt, Human
gggccccugccaucgggcu

SEQ ID NO: 197654 - RNA, 32 nt, Human
gggccccugccccucaccuucuccuucuugau

SEQ ID NO: 197655 - RNA, 32 nt, Human
gggccccuggacacagggagcagacccucugc

SEQ ID NO: 197656 - RNA, 32 nt, Human
gggccccuggagucccagcuacucgggaggcu

SEQ ID NO: 197657 - RNA, 32 nt, Human
gggccccuggccccgccugccugccacccugc

SEQ ID NO: 197658 - RNA, 32 nt, Human
gggccccugggaaugacuccuggaccuccacc

SEQ ID NO: 197659 - RNA, 28 nt, Human
gggccccugggagcagcccccaggcggg

SEQ ID NO: 197660 - RNA, 32 nt, Human
gggccccugggcaguggguuuugggcaaauuc

SEQ ID NO: 197661 - RNA, 32 nt, Human
gggccccuggggaggagggagggugggcggua

SEQ ID NO: 197662 - RNA, 32 nt, Human
gggccccugggggaucugagggccuguggccc

SEQ ID NO: 197663 - RNA, 32 nt, Human
gggccccuguaaucccagcuacucgggaggcu

SEQ ID NO: 197664 - RNA, 32 nt, Human
gggccccuguaaucccagcuacucgggagguu

SEQ ID NO: 197665 - RNA, 32 nt, Human
gggccccuguaaucccagcuacuugggaggcu

SEQ ID NO: 197666 - RNA, 32 nt, Human
gggccccuguagucccagcuacucaggaggcu

SEQ ID NO: 197667 - RNA, 32 nt, Human
gggccccuguagucccagcuacucgggaggcu

SEQ ID NO: 197668 - RNA, 32 nt, Human
gggccccuguccuccagccugaccagcccugg

SEQ ID NO: 197669 - RNA, 32 nt, Human
gggccccugugaccccuccuuucuuccuccaa

SEQ ID NO: 197670 - RNA, 21 nt, Human
gggccccuguggcccccacgg

SEQ ID NO: 197671 - RNA, 32 nt, Human
gggccccuguucucccccuuagagcuccaucc

SEQ ID NO: 197672 - RNA, 32 nt, Human
gggccccuuacacuccacagucccggucccgc

SEQ ID NO: 197673 - RNA, 32 nt, Human
gggccccuuccagccgugggcaaacccugaag

SEQ ID NO: 197674 - RNA, 21 nt, Human
gggccccuugcucuccagcaa

SEQ ID NO: 197675 - RNA, 20 nt, Human
gggccccuuucgccugcuuc

SEQ ID NO: 197676 - RNA, 23 nt, Human
gggccccuuucuuucuucugagg

SEQ ID NO: 197677 - RNA, 32 nt, Human
gggccccuuugcugcacgugacaugcaauuca

SEQ ID NO: 197678 - RNA, 32 nt, Human
gggcccgaacaugcacacgugcagccuauaug

SEQ ID NO: 197679 - RNA, 21 nt, Human
gggcccgaccccccugggccu

SEQ ID NO: 197680 - RNA, 23 nt, Human
gggcccgagagcagguccacacc

SEQ ID NO: 197681 - RNA, 24 nt, Human
gggcccgagcuacaggucugcucc

SEQ ID NO: 197682 - RNA, 32 nt, Human
gggcccgaggaccagggaagacccccuuuccu

SEQ ID NO: 197683 - RNA, 32 nt, Human
gggcccgcagccgccucccacgccaggcuguc

SEQ ID NO: 197684 - RNA, 32 nt, Human
gggcccgccagccaucagccaggguuggccua

SEQ ID NO: 197685 - RNA, 32 nt, Human
gggcccgccucagcuccuggcagaagcugucg

SEQ ID NO: 197686 - RNA, 24 nt, Human
gggcccgccuggcagaacugagcu

SEQ ID NO: 197687 - RNA, 32 nt, Human
gggcccgcguggugccuccugaggcggccccc

SEQ ID NO: 197688 - RNA, 32 nt, Human
gggcccgcugccuccaguuggggcacccacau

SEQ ID NO: 197689 - RNA, 32 nt, Human
gggcccgcugcucuccaugcgggagccggcgc

SEQ ID NO: 197690 - RNA, 32 nt, Human
gggcccggaaugcggcucucugacccucucug

SEQ ID NO: 197691 - RNA, 20 nt, Human
gggcccggacacuugggacc

SEQ ID NO: 197692 - RNA, 18 nt, Human
gggcccggacaugggguc

SEQ ID NO: 197693 - RNA, 21 nt, Human
gggcccggaccagcccccagc

SEQ ID NO: 197694 - RNA, 19 nt, Human
gggcccggagcccggagcc

SEQ ID NO: 197695 - RNA, 21 nt, Human
gggcccggagccuccagcagg

SEQ ID NO: 197696 - RNA, 18 nt, Human
gggcccggaggcugagcc

SEQ ID NO: 197697 - RNA, 21 nt, Human
gggcccggaggucaagauggu

SEQ ID NO: 197698 - RNA, 20 nt, Human
gggcccggcaccuccugcug

SEQ ID NO: 197699 - RNA, 19 nt, Human
gggcccggcagggaggcag

SEQ ID NO: 197700 - RNA, 22 nt, Human
gggcccggcauugccugaggcc

SEQ ID NO: 197701 - RNA, 19 nt, Human
gggcccggccagcagaggg

SEQ ID NO: 197702 - RNA, 21 nt, Human
gggcccggccucccugcggcc

SEQ ID NO: 197703 - RNA, 32 nt, Human
gggcccggcgcagaggauugaggaggagggau

SEQ ID NO: 197704 - RNA, 21 nt, Human
gggcccggcgccccccgggcc

SEQ ID NO: 197705 - RNA, 20 nt, Human
gggcccggcgugcugggccu

SEQ ID NO: 197706 - RNA, 20 nt, Human
gggcccggcuccccgggccu

SEQ ID NO: 197707 - RNA, 20 nt, Human
gggcccggcuccggcggcag

SEQ ID NO: 197708 - RNA, 32 nt, Human
gggcccggcucugcauggccccggcugcugac

SEQ ID NO: 197709 - RNA, 22 nt, Human
gggcccggcucuggggccccca

SEQ ID NO: 197710 - RNA, 21 nt, Human
gggcccggcugacugcgccuc

SEQ ID NO: 197711 - RNA, 32 nt, Human
gggcccggcugggggagggcagcucugggcac

SEQ ID NO: 197712 - RNA, 32 nt, Human
gggcccggcuuuucaggcuugcccucaccagc

SEQ ID NO: 197713 - RNA, 19 nt, Human
gggcccgggaagcgcggug

SEQ ID NO: 197714 - RNA, 19 nt, Human
gggcccgggaggcagaccu

SEQ ID NO: 197715 - RNA, 32 nt, Human
gggcccgggaggcagaccugcccuaaggguga

SEQ ID NO: 197716 - RNA, 32 nt, Human
gggcccgggaggcagagguugcagugagccga

SEQ ID NO: 197717 - RNA, 32 nt, Human
gggcccgggaggucaagguugcagugagcugu

SEQ ID NO: 197718 - RNA, 32 nt, Human
gggcccgggagguggagguugcagugagcuga

SEQ ID NO: 197719 - RNA, 32 nt, Human
gggcccgggagguggagguugcagugagucaa

SEQ ID NO: 197720 - RNA, 32 nt, Human
gggcccgggaguuugaaguugcagugagcuau

SEQ ID NO: 197721 - RNA, 23 nt, Human
gggcccgggcacaccugcacucu

SEQ ID NO: 197722 - RNA, 21 nt, Human
gggcccgggcaggccagcuuc

SEQ ID NO: 197723 - RNA, 20 nt, Human
gggcccgggccaccgggccc

SEQ ID NO: 197724 - RNA, 23 nt, Human
gggcccgggcccaccuuggacuc

SEQ ID NO: 197725 - RNA, 21 nt, Human
gggcccgggcccaggcgccuc

SEQ ID NO: 197726 - RNA, 24 nt, Human
gggcccgggcccgggggaucccag

SEQ ID NO: 197727 - RNA, 21 nt, Human
gggcccgggccggacagccuc

SEQ ID NO: 197728 - RNA, 18 nt, Human
gggcccgggcggggagcc

SEQ ID NO: 197729 - RNA, 18 nt, Human
gggcccgggcucuggacc

SEQ ID NO: 197730 - RNA, 19 nt, Human
gggcccgggcucuggaccu

SEQ ID NO: 197731 - RNA, 18 nt, Human
gggcccgggcugcgggcc

SEQ ID NO: 197732 - RNA, 21 nt, Human
gggcccgggcugggaccagcc

SEQ ID NO: 197733 - RNA, 32 nt, Human
gggcccggggagacaguuguguggugugugca

SEQ ID NO: 197734 - RNA, 19 nt, Human
gggcccggggccacgggcu

SEQ ID NO: 197735 - RNA, 19 nt, Human
gggcccggggcgccugccu

SEQ ID NO: 197736 - RNA, 20 nt, Human
gggcccgggggccugagccu

SEQ ID NO: 197737 - RNA, 17 nt, Human
gggcccgggggcgggaa

SEQ ID NO: 197738 - RNA, 20 nt, Human
gggcccgggguccacagagg

SEQ ID NO: 197739 - RNA, 32 nt, Human
gggcccgggucugagagaggggagacagccug

SEQ ID NO: 197740 - RNA, 19 nt, Human
gggcccgggugccggggcc

SEQ ID NO: 197741 - RNA, 21 nt, Human
gggcccggguugguggcccuc

SEQ ID NO: 197742 - RNA, 19 nt, Human
gggcccgguagcugggccc

SEQ ID NO: 197743 - RNA, 32 nt, Human
gggcccggugccuguagcaaacaccaccaagu

SEQ ID NO: 197744 - RNA, 32 nt, Human
gggcccguccuccucagcacucaggccaaccc

SEQ ID NO: 197745 - RNA, 32 nt, Human
gggcccgucuuccucgcgucuccucggggagc

SEQ ID NO: 197746 - RNA, 20 nt, Human
gggcccgugggaugggccuc

SEQ ID NO: 197747 - RNA, 32 nt, Human
gggcccguugucucccuggcccucaaggcucc

SEQ ID NO: 197748 - RNA, 32 nt, Human
gggcccuaagaguucgucucucaccugggggc

SEQ ID NO: 197749 - RNA, 32 nt, Human
gggcccuacagccucacuuccccagccucacc

SEQ ID NO: 197750 - RNA, 21 nt, Human
gggcccuagaggagcugcacc

SEQ ID NO: 197751 - RNA, 32 nt, Human
gggcccuaggcaggaagcuggcuucugggaga

SEQ ID NO: 197752 - RNA, 32 nt, Human
gggcccuagugccucuguuccugaauuacaua

SEQ ID NO: 197753 - RNA, 32 nt, Human
gggcccucaaagcucauuuuaucuaauuguga

SEQ ID NO: 197754 - RNA, 20 nt, Human
gggcccucaauguccacaaa

SEQ ID NO: 197755 - RNA, 32 nt, Human
gggcccucacggagaggaagggaaggaaggag

SEQ ID NO: 197756 - RNA, 32 nt, Human
gggcccucacuggccugucccugcugcagcgc

SEQ ID NO: 197757 - RNA, 21 nt, Human
gggcccucagaggaaaggcag

SEQ ID NO: 197758 - RNA, 32 nt, Human
gggcccucagggccaucucccgaggcccgguu

SEQ ID NO: 197759 - RNA, 31 nt, Human
gggcccucaguaaauaccuggaggaauguga

SEQ ID NO: 197760 - RNA, 20 nt, Human
gggcccuccagagccugcag

SEQ ID NO: 197761 - RNA, 32 nt, Human
gggcccuccccagcuacucgggaggcugaggc

SEQ ID NO: 197762 - RNA, 32 nt, Human
gggcccuccgcucuccccuccgcuccccuccc

SEQ ID NO: 197763 - RNA, 22 nt, Human
gggcccuccuccccuccuugca

SEQ ID NO: 197764 - RNA, 22 nt, Human
gggcccuccucuccuccucaca

SEQ ID NO: 197765 - RNA, 32 nt, Human
gggcccuccugcacuccacaugaugaggucag

SEQ ID NO: 197766 - RNA, 32 nt, Human
gggcccuccugccugcaggaucaugcccacca

SEQ ID NO: 197767 - RNA, 18 nt, Human
gggcccucggcccugaug

SEQ ID NO: 197768 - RNA, 32 nt, Human
gggcccucuaccaagaaccauggcagucaggg

SEQ ID NO: 197769 - RNA, 32 nt, Human
gggcccucuccucugcugacucugccguuucu

SEQ ID NO: 197770 - RNA, 22 nt, Human
gggcccucugcagaccaggcug

SEQ ID NO: 197771 - RNA, 32 nt, Human
gggcccucugcagaccaggcugagauggagga

SEQ ID NO: 197772 - RNA, 32 nt, Human
gggcccucugcagcccagccuuuccuuccguc

SEQ ID NO: 197773 - RNA, 32 nt, Human
gggcccucugcagcccauccuuuccuuccguc

SEQ ID NO: 197774 - RNA, 19 nt, Human
gggcccucugcguccagcu

SEQ ID NO: 197775 - RNA, 32 nt, Human
gggcccucuucuacucuccauuuaggccuguu

SEQ ID NO: 197776 - RNA, 32 nt, Human
gggcccugaacccauuuuccuccccuguccca

SEQ ID NO: 197777 - RNA, 20 nt, Human
gggcccugaaggcucaggca

SEQ ID NO: 197778 - RNA, 32 nt, Human
gggcccugaauacuucucugaccuccuuucua

SEQ ID NO: 197779 - RNA, 32 nt, Human
gggcccugaccaucuucuccucccagggccac

SEQ ID NO: 197780 - RNA, 32 nt, Human
gggcccugaggaccccagggcagcacuggaaa

SEQ ID NO: 197781 - RNA, 32 nt, Human
gggcccugaggaugcacggugccuggggcucc

SEQ ID NO: 197782 - RNA, 32 nt, Human
gggcccugcaccuggccagcggugccgcgugg

SEQ ID NO: 197783 - RNA, 32 nt, Human
gggcccugcagcccagccuguguuguaaccuc

SEQ ID NO: 197784 - RNA, 32 nt, Human
gggcccugcaggcaggucuguggguucuggca

SEQ ID NO: 197785 - RNA, 32 nt, Human
gggcccugcagggggccauggagaagcugcag

SEQ ID NO: 197786 - RNA, 22 nt, Human
gggcccugcccauggccucaau

SEQ ID NO: 197787 - RNA, 32 nt, Human
gggcccugccgacccccugccugcgcccccag

SEQ ID NO: 197788 - RNA, 32 nt, Human
gggcccugccuccccguuacccuccuucccug

SEQ ID NO: 197789 - RNA, 30 nt, Human
gggcccugccucuccaugccuguaggagcu

SEQ ID NO: 197790 - RNA, 31 nt, Human
gggcccugccucugccuguucuucuggaaug

SEQ ID NO: 197791 - RNA, 20 nt, Human
gggcccugccucuuccugag

SEQ ID NO: 197792 - RNA, 32 nt, Human
gggcccugcugccucugcuccuugccauugga

SEQ ID NO: 197793 - RNA, 32 nt, Human
gggcccugcuggcagggacuugcaguggauuc

SEQ ID NO: 197794 - RNA, 22 nt, Human
gggcccugcuuugcaggggggc

SEQ ID NO: 197795 - RNA, 32 nt, Human
gggcccugcuuuuuguggcaaggccuguucug

SEQ ID NO: 197796 - RNA, 32 nt, Human
gggcccuggaauccaagaaaccuuuuuggcgc

SEQ ID NO: 197797 - RNA, 22 nt, Human
gggcccuggacguggcggcaga

SEQ ID NO: 197798 - RNA, 23 nt, Human
gggcccuggacguugagcccaga

SEQ ID NO: 197799 - RNA, 18 nt, Human
gggcccuggagggcgcgg

SEQ ID NO: 197800 - RNA, 32 nt, Human
gggcccuggaggucaaggcugcagugagucaa

SEQ ID NO: 197801 - RNA, 32 nt, Human
gggcccuggccuggcccgggugcaggcugcau

SEQ ID NO: 197802 - RNA, 32 nt, Human
gggcccugggaccccugcuccagcccgaauga

SEQ ID NO: 197803 - RNA, 32 nt, Human
gggcccugggaggaguguuugcacuguggaaa

SEQ ID NO: 197804 - RNA, 32 nt, Human
gggcccugggcccuggcagcgccgcauccgug

SEQ ID NO: 197805 - RNA, 32 nt, Human
gggcccugggcuggugccuccccucccuagag

SEQ ID NO: 197806 - RNA, 32 nt, Human
gggcccuggggacacugucaccagagacccca

SEQ ID NO: 197807 - RNA, 32 nt, Human
gggcccuggggcccuggcuggcaggaguuggc

SEQ ID NO: 197808 - RNA, 19 nt, Human
gggcccuggggccugggcc

SEQ ID NO: 197809 - RNA, 32 nt, Human
gggcccuggggugggguaggcagaugggccaa

SEQ ID NO: 197810 - RNA, 32 nt, Human
gggcccugguacugaagacgcgguccgggucg

SEQ ID NO: 197811 - RNA, 32 nt, Human
gggcccuguccuggcccaggccucugcccucu

SEQ ID NO: 197812 - RNA, 32 nt, Human
gggcccugucugcaauacaccugcaggaagag

SEQ ID NO: 197813 - RNA, 32 nt, Human
gggcccuguggcucuggcagccccaggccaug

SEQ ID NO: 197814 - RNA, 23 nt, Human
gggcccuuaccuaauccccaccc

SEQ ID NO: 197815 - RNA, 26 nt, Human
gggcccuuagggaggaggaggcgaga

SEQ ID NO: 197816 - RNA, 32 nt, Human
gggcccuucccugggucucugcacugacuccc

SEQ ID NO: 197817 - RNA, 32 nt, Human
gggcccuuccuggcuaggacuguggaggggag

SEQ ID NO: 197818 - RNA, 32 nt, Human
gggcccuuggucuggcucuccugggccuccag

SEQ ID NO: 197819 - RNA, 32 nt, Human
gggcccuugguuguggugcgaggcggcugccc

SEQ ID NO: 197820 - RNA, 32 nt, Human
gggcccuugguuuauuucacuccaguccugaa

SEQ ID NO: 197821 - RNA, 32 nt, Human
gggcccuugugcuuccuguggguggggugagg

SEQ ID NO: 197822 - RNA, 21 nt, Human
gggcccuuuacccucagcagg

SEQ ID NO: 197823 - RNA, 32 nt, Human
gggcccuuuccaaguaggcucuggguguccua

SEQ ID NO: 197824 - RNA, 32 nt, Human
gggcccuuuccccaucgcgccugggccugcuc

SEQ ID NO: 197825 - RNA, 32 nt, Human
gggccgaagauaugcucaugugguguugagga

SEQ ID NO: 197826 - RNA, 32 nt, Human
gggccgaagggaggggacagagggcccuggaa

SEQ ID NO: 197827 - RNA, 32 nt, Human
gggccgagagcugacccgcaagaagggcaucc

SEQ ID NO: 197828 - RNA, 23 nt, Human
gggccgagaggggugcccggagg

SEQ ID NO: 197829 - RNA, 32 nt, Human
gggccgagcccgaggggaagaaccuggcccgu

SEQ ID NO: 197830 - RNA, 25 nt, Human
gggccgagccggggccgccucggga

SEQ ID NO: 197831 - RNA, 25 nt, Human
gggccgagcgcggggcacccggggg

SEQ ID NO: 197832 - RNA, 21 nt, Human
gggccgagcggagcccaggga

SEQ ID NO: 197833 - RNA, 23 nt, Human
gggccgagcggcccaccuagugg

SEQ ID NO: 197834 - RNA, 32 nt, Human
gggccgagcugcaggccggaccggagccggau

SEQ ID NO: 197835 - RNA, 32 nt, Human
gggccgaggagagagcggccgccacccggccc

SEQ ID NO: 197836 - RNA, 32 nt, Human
gggccgaggaggaggaggaggaggaggaggag

SEQ ID NO: 197837 - RNA, 32 nt, Human
gggccgaggccgcggcggaggccgcggcuggu

SEQ ID NO: 197838 - RNA, 16 nt, Human
gggccgaggccugggc

SEQ ID NO: 197839 - RNA, 19 nt, Human
gggccgagggcgggagcug

SEQ ID NO: 197840 - RNA, 22 nt, Human
gggccgagguggcagggggcug

SEQ ID NO: 197841 - RNA, 24 nt, Human
gggccgauuccggagugggacuga

SEQ ID NO: 197842 - RNA, 32 nt, Human
gggccgauugaugacaucaucaccuccucuuc

SEQ ID NO: 197843 - RNA, 32 nt, Human
gggccgauuucagcaggaguucagagggcuua

SEQ ID NO: 197844 - RNA, 32 nt, Human
gggccgcaagccccaaauggaaaacuguuuuu

SEQ ID NO: 197845 - RNA, 32 nt, Human
gggccgcaaugcucccuccuucccagggucca

SEQ ID NO: 197846 - RNA, 32 nt, Human
gggccgcacaugcacgccgcagcaccagcugc

SEQ ID NO: 197847 - RNA, 19 nt, Human
gggccgcacgagcuggcug

SEQ ID NO: 197848 - RNA, 32 nt, Human
gggccgcacucgcagccccaagccuucuucug

SEQ ID NO: 197849 - RNA, 32 nt, Human
gggccgcacugaggcucgggcgcgcggggaca

SEQ ID NO: 197850 - RNA, 32 nt, Human
gggccgcagagcaguaccaguccguggccugu

SEQ ID NO: 197851 - RNA, 32 nt, Human
gggccgcagaggauccaucacagacggauacu

SEQ ID NO: 197852 - RNA, 32 nt, Human
gggccgcagcccccugcugcccgcacacaaca

SEQ ID NO: 197853 - RNA, 20 nt, Human
gggccgcagucagcgggcgc

SEQ ID NO: 197854 - RNA, 25 nt, Human
gggccgcaucauccgggagcugccc

SEQ ID NO: 197855 - RNA, 20 nt, Human
gggccgccacggccuggcug

SEQ ID NO: 197856 - RNA, 17 nt, Human
gggccgccauccugccu

SEQ ID NO: 197857 - RNA, 32 nt, Human
gggccgcccagccugagccaugcgccccaacg

SEQ ID NO: 197858 - RNA, 32 nt, Human
gggccgccccucuccccuggccgcuaagcagc

SEQ ID NO: 197859 - RNA, 23 nt, Human
gggccgcccgcgcuccccaugaa

SEQ ID NO: 197860 - RNA, 32 nt, Human
gggccgcccgggacgcugaggcggcggcggcg

SEQ ID NO: 197861 - RNA, 15 nt, Human
gggccgccgccgccu

SEQ ID NO: 197862 - RNA, 21 nt, Human
gggccgccgccugcccuggag

SEQ ID NO: 197863 - RNA, 18 nt, Human
gggccgccgggcaccgag

SEQ ID NO: 197864 - RNA, 32 nt, Human
gggccgccuacugccccugccuaugcccacgg

SEQ ID NO: 197865 - RNA, 32 nt, Human
gggccgccucccucuucucuccaggcaggugg

SEQ ID NO: 197866 - RNA, 32 nt, Human
gggccgccucgucuccgcuccugggggaccgc

SEQ ID NO: 197867 - RNA, 32 nt, Human
gggccgccuggaccaggcuguccuugaccugc

SEQ ID NO: 197868 - RNA, 32 nt, Human
gggccgccuuaacccuugcucccuucccuucu

SEQ ID NO: 197869 - RNA, 32 nt, Human
gggccgcgcagggaggaugacacugauguccc

SEQ ID NO: 197870 - RNA, 32 nt, Human
gggccgcgcagguagugucccugcacuucuug

SEQ ID NO: 197871 - RNA, 23 nt, Human
gggccgcgccgcggcggggggug

SEQ ID NO: 197872 - RNA, 32 nt, Human
gggccgcgcucccucccuaccugggugcccuc

SEQ ID NO: 197873 - RNA, 32 nt, Human
gggccgcgcucggcgcuggccugcugccccgg

SEQ ID NO: 197874 - RNA, 18 nt, Human
gggccgcggagggggcug

SEQ ID NO: 197875 - RNA, 32 nt, Human
gggccgcggaggugggacgcgaugcaguggcc

SEQ ID NO: 197876 - RNA, 32 nt, Human
gggccgcggggagggggaggaggggcaggugc

SEQ ID NO: 197877 - RNA, 32 nt, Human
gggccgcggggucauggcugggccgcggggcg

SEQ ID NO: 197878 - RNA, 18 nt, Human
gggccgcggucggggcug

SEQ ID NO: 197879 - RNA, 32 nt, Human
gggccgcguggugccaucaacccucugccucc

SEQ ID NO: 197880 - RNA, 32 nt, Human
gggccgcucccagggccaugaggaagcggcgg

SEQ ID NO: 197881 - RNA, 22 nt, Human
gggccgcuccggggggccucaa

SEQ ID NO: 197882 - RNA, 32 nt, Human
gggccgcucggcggcaccuccacacccgcccc

SEQ ID NO: 197883 - RNA, 32 nt, Human
gggccgcucugugcuggcgccugcuggccacu

SEQ ID NO: 197884 - RNA, 32 nt, Human
gggccgcugagcuccccaccggccaacggggc

SEQ ID NO: 197885 - RNA, 32 nt, Human
gggccgcugcacuccagccugggggacagagc

SEQ ID NO: 197886 - RNA, 32 nt, Human
gggccgcugccacccaccucccugccuccagg

SEQ ID NO: 197887 - RNA, 32 nt, Human
gggccgcugcgcuggagaauugaagggggcgg

SEQ ID NO: 197888 - RNA, 32 nt, Human
gggccgcugcugucuggugcccugugagcugu

SEQ ID NO: 197889 - RNA, 32 nt, Human
gggccgcuggaaaggccaggcccaguggcuac

SEQ ID NO: 197890 - RNA, 32 nt, Human
gggccgcuggagccuccgccugcuuccuccag

SEQ ID NO: 197891 - RNA, 32 nt, Human
gggccgcugggcaggcggcgaggacuuggccg

SEQ ID NO: 197892 - RNA, 32 nt, Human
gggccgcugggucucucuuuguggacuuguac

SEQ ID NO: 197893 - RNA, 24 nt, Human
gggccggaacggggagggcgagug

SEQ ID NO: 197894 - RNA, 17 nt, Human
gggccggaaguggggug

SEQ ID NO: 197895 - RNA, 32 nt, Human
gggccggacaccuaggcugagcccucagguga

SEQ ID NO: 197896 - RNA, 32 nt, Human
gggccggacgggagguggcggagguggcggcg

SEQ ID NO: 197897 - RNA, 21 nt, Human
gggccggacgggcgggcgcgg

SEQ ID NO: 197898 - RNA, 32 nt, Human
gggccggacuccccggcguucccuucaccaca

SEQ ID NO: 197899 - RNA, 32 nt, Human
gggccggacuuccagcccccagagcccucucc

SEQ ID NO: 197900 - RNA, 20 nt, Human
gggccggagaaggggcgacg

SEQ ID NO: 197901 - RNA, 32 nt, Human
gggccggagaggagcucacugucuguccuuuu

SEQ ID NO: 197902 - RNA, 22 nt, Human
gggccggagcagagagcaccca

SEQ ID NO: 197903 - RNA, 32 nt, Human
gggccggagcggagcggcgccgccaccgccgc

SEQ ID NO: 197904 - RNA, 21 nt, Human
gggccggagcggcgggcgcgg

SEQ ID NO: 197905 - RNA, 21 nt, Human
gggccggagcgggggcgggug

SEQ ID NO: 197906 - RNA, 32 nt, Human
gggccggaggaaccgagguguugccagugcua

SEQ ID NO: 197907 - RNA, 24 nt, Human
gggccggaugaggaggaacugcgu

SEQ ID NO: 197908 - RNA, 32 nt, Human
gggccggaugaggcagggcagagcagacugau

SEQ ID NO: 197909 - RNA, 32 nt, Human
gggccggcaauggcgggcgcaguuucgcucuu

SEQ ID NO: 197910 - RNA, 32 nt, Human
gggccggcagcaaggacacagaugcagccaca

SEQ ID NO: 197911 - RNA, 32 nt, Human
gggccggcauuuccucccacugagccucugcc

SEQ ID NO: 197912 - RNA, 32 nt, Human
gggccggccagccuugcacugugggggcuggu

SEQ ID NO: 197913 - RNA, 22 nt, Human
gggccggcccccagcugggagg

SEQ ID NO: 197914 - RNA, 32 nt, Human
gggccggccgcgcagacuuucuccccaccccu

SEQ ID NO: 197915 - RNA, 18 nt, Human
gggccggccugggggcug

SEQ ID NO: 197916 - RNA, 32 nt, Human
gggccggcgauggggaugcgggagcacuacgc

SEQ ID NO: 197917 - RNA, 22 nt, Human
gggccggcgcccuggggggcug

SEQ ID NO: 197918 - RNA, 20 nt, Human
gggccggcgcgggagggcug

SEQ ID NO: 197919 - RNA, 18 nt, Human
gggccggcggcggggcgg

SEQ ID NO: 197920 - RNA, 20 nt, Human
gggccggcgggcgggggcug

SEQ ID NO: 197921 - RNA, 17 nt, Human
gggccggcggggcgcgg

SEQ ID NO: 197922 - RNA, 32 nt, Human
gggccggcgggggcuggggaggggguaaguuu

SEQ ID NO: 197923 - RNA, 32 nt, Human
gggccggcuccggagaaguuagacccucggag

SEQ ID NO: 197924 - RNA, 32 nt, Human
gggccggcugaccaggaaccugggcgagcagc

SEQ ID NO: 197925 - RNA, 32 nt, Human
gggccggcugggcuggggguugcccuggccag

SEQ ID NO: 197926 - RNA, 32 nt, Human
gggccggcuuugcgcaggugcacaguacucgc

SEQ ID NO: 197927 - RNA, 32 nt, Human
gggccgggacagcuuuccucucagucauuguu

SEQ ID NO: 197928 - RNA, 32 nt, Human
gggccgggaccaagggcaccaugucguccggg

SEQ ID NO: 197929 - RNA, 20 nt, Human
gggccgggacuccggccgca

SEQ ID NO: 197930 - RNA, 21 nt, Human
gggccgggagccugcccuccu

SEQ ID NO: 197931 - RNA, 21 nt, Human
gggccgggaggaugcgcggug

SEQ ID NO: 197932 - RNA, 19 nt, Human
gggccgggcagaggggcag

SEQ ID NO: 197933 - RNA, 26 nt, Human
gggccgggccauucgcgacccggagg

SEQ ID NO: 197934 - RNA, 23 nt, Human
gggccgggccgaggucccggggg

SEQ ID NO: 197935 - RNA, 16 nt, Human
gggccgggccgggcca

SEQ ID NO: 197936 - RNA, 22 nt, Human
gggccgggccgggccacgggga

SEQ ID NO: 197937 - RNA, 18 nt, Human
gggccgggcggggcgcgg

SEQ ID NO: 197938 - RNA, 20 nt, Human
gggccgggcuccccuggcgg

SEQ ID NO: 197939 - RNA, 19 nt, Human
gggccgggcuccgccccag

SEQ ID NO: 197940 - RNA, 21 nt, Human
gggccgggcuggccaauggga

SEQ ID NO: 197941 - RNA, 25 nt, Human
gggccgggcuggggccgcccggggg

SEQ ID NO: 197942 - RNA, 32 nt, Human
gggccggggagagggugcgggugcaggcgggg

SEQ ID NO: 197943 - RNA, 18 nt, Human
gggccggggaggggguug

SEQ ID NO: 197944 - RNA, 32 nt, Human
gggccggggccagagcucgcgugucggcggga

SEQ ID NO: 197945 - RNA, 21 nt, Human
gggccggggccagcaaagucc

SEQ ID NO: 197946 - RNA, 32 nt, Human
gggccggggccagcugcucgcgcucggcucgg

SEQ ID NO: 197947 - RNA, 32 nt, Human
gggccggggccgcggcagguaggccggccgcg

SEQ ID NO: 197948 - RNA, 19 nt, Human
gggccggggcugcuguggg

SEQ ID NO: 197949 - RNA, 32 nt, Human
gggccggggcugggaggccugcacgccugggu

SEQ ID NO: 197950 - RNA, 21 nt, Human
gggccggggcugggcgcggug

SEQ ID NO: 197951 - RNA, 32 nt, Human
gggccggggcugggggcgcagcgcggccggcg

SEQ ID NO: 197952 - RNA, 32 nt, Human
gggccggggcuguucccuuagcagaacggcuc

SEQ ID NO: 197953 - RNA, 20 nt, Human
gggccgggggaggggcgcgg

SEQ ID NO: 197954 - RNA, 32 nt, Human
gggccgggggcagcacggccuggcuuucccac

SEQ ID NO: 197955 - RNA, 20 nt, Human
gggccgggggcggcgggcgg

SEQ ID NO: 197956 - RNA, 32 nt, Human
gggccgggggcggggccgggacugggggcggg

SEQ ID NO: 197957 - RNA, 32 nt, Human
gggccgggggcugagcggcgcccgcugggguc

SEQ ID NO: 197958 - RNA, 32 nt, Human
gggccgggggcugaggcgggagcgaggacacg

SEQ ID NO: 197959 - RNA, 17 nt, Human
gggccggggggcggcgg

SEQ ID NO: 197960 - RNA, 20 nt, Human
gggccggguagaggcucgag

SEQ ID NO: 197961 - RNA, 32 nt, Human
gggccgggugggagguggcaguagucuuagcc

SEQ ID NO: 197962 - RNA, 20 nt, Human
gggccggguuucagcuccgg

SEQ ID NO: 197963 - RNA, 32 nt, Human
gggccgguacaagauacuuccucuucagcugg

SEQ ID NO: 197964 - RNA, 32 nt, Human
gggccgguagcggcgggagcugcacuggccag

SEQ ID NO: 197965 - RNA, 32 nt, Human
gggccguauuccugccacucugcuccgccuca

SEQ ID NO: 197966 - RNA, 32 nt, Human
gggccgucagcaauaccucugagugcccggau

SEQ ID NO: 197967 - RNA, 19 nt, Human
gggccgucaggacacggga

SEQ ID NO: 197968 - RNA, 32 nt, Human
gggccgucugcacuucuguuccagguuuuucu

SEQ ID NO: 197969 - RNA, 32 nt, Human
gggccgugaauugcagcaggaggcagauuuau

SEQ ID NO: 197970 - RNA, 32 nt, Human
gggccgugagccaaggccugggccuggccaag

SEQ ID NO: 197971 - RNA, 32 nt, Human
gggccgugagcucuauuucuacccaggcugcu

SEQ ID NO: 197972 - RNA, 32 nt, Human
gggccgugcagagcagcaccuccaucaggcug

SEQ ID NO: 197973 - RNA, 32 nt, Human
gggccgugcccagggcgguggcugugagucua

SEQ ID NO: 197974 - RNA, 32 nt, Human
gggccgugcccaggggcccacagggaacccug

SEQ ID NO: 197975 - RNA, 32 nt, Human
gggccguggagccacaguacguggcggcgccu

SEQ ID NO: 197976 - RNA, 20 nt, Human
gggccgugggagggggguug

SEQ ID NO: 197977 - RNA, 23 nt, Human
gggccgugggggccagggacacu

SEQ ID NO: 197978 - RNA, 32 nt, Human
gggccgugugcucugggcagugguuccuuggg

SEQ ID NO: 197979 - RNA, 20 nt, Human
gggccguuguuguggggcug

SEQ ID NO: 197980 - RNA, 32 nt, Human
gggccuaaagcccacuccugggggucuccugc

SEQ ID NO: 197981 - RNA, 32 nt, Human
gggccuaagugccacccuccucccuccaagcc

SEQ ID NO: 197982 - RNA, 32 nt, Human
gggccuacacugccuccucccacgccgugcuu

SEQ ID NO: 197983 - RNA, 22 nt, Human
gggccuacgacgccgaugugga

SEQ ID NO: 197984 - RNA, 32 nt, Human
gggccuacuagagucugaacagcuguaaucua

SEQ ID NO: 197985 - RNA, 32 nt, Human
gggccuagaggagagagcagagcccagaaaug

SEQ ID NO: 197986 - RNA, 21 nt, Human
gggccuagauugcacaaggug

SEQ ID NO: 197987 - RNA, 22 nt, Human
gggccuagcaagcgcccagcgg

SEQ ID NO: 197988 - RNA, 32 nt, Human
gggccuagccuugagcaguguugccucaucca

SEQ ID NO: 197989 - RNA, 16 nt, Human
gggccuagcgcaccaa

SEQ ID NO: 197990 - RNA, 32 nt, Human
gggccuaggccaagggcucaaggacaacaaga

SEQ ID NO: 197991 - RNA, 32 nt, Human
gggccuagguacugugcuggggucgcacagcc

SEQ ID NO: 197992 - RNA, 32 nt, Human
gggccuaguuuuaauaaugaggccaguagcac

SEQ ID NO: 197993 - RNA, 32 nt, Human
gggccuauguacaaauaugugcuugcacucag

SEQ ID NO: 197994 - RNA, 32 nt, Human
gggccuauucuuguaaguuucaguuagcauuu

SEQ ID NO: 197995 - RNA, 32 nt, Human
gggccuauuucuacuuucauuuuguauuucug

SEQ ID NO: 197996 - RNA, 32 nt, Human
gggccucaaugcagcugaucacuuggggcagu

SEQ ID NO: 197997 - RNA, 32 nt, Human
gggccucacaacucgugaccucagcuauggcc

SEQ ID NO: 197998 - RNA, 32 nt, Human
gggccucacaugccaggucaccaggucaccgu

SEQ ID NO: 197999 - RNA, 20 nt, Human
gggccucaccaccccuggag

SEQ ID NO: 198000 - RNA, 19 nt, Human
gggccucaccauccgggaa

SEQ ID NO: 198001 - RNA, 32 nt, Human
gggccucagacucugaacuucccucaagugcc

SEQ ID NO: 198002 - RNA, 24 nt, Human
gggccucagagaugcaucugggag

SEQ ID NO: 198003 - RNA, 28 nt, Human
gggccucagagccgaguguggcugggaa

SEQ ID NO: 198004 - RNA, 23 nt, Human
gggccucagagccugaccugaga

SEQ ID NO: 198005 - RNA, 18 nt, Human
gggccucagagcgucugg

SEQ ID NO: 198006 - RNA, 21 nt, Human
gggccucagaggggccugggg

SEQ ID NO: 198007 - RNA, 20 nt, Human
gggccucagccccucugcug

SEQ ID NO: 198008 - RNA, 32 nt, Human
gggccucagccgccccagaggccugcuuaggg

SEQ ID NO: 198009 - RNA, 32 nt, Human
gggccucaggcagcaguggacaguggccagga

SEQ ID NO: 198010 - RNA, 32 nt, Human
gggccucaggcccugaggauacggggcucccg

SEQ ID NO: 198011 - RNA, 21 nt, Human
gggccucaggcgccgccggga

SEQ ID NO: 198012 - RNA, 24 nt, Human
gggccucagggacaggccuggaaa

SEQ ID NO: 198013 - RNA, 24 nt, Human
gggccucagggagcugcugagggg

SEQ ID NO: 198014 - RNA, 32 nt, Human
gggccucagggcacccuccccaccuagcccuc

SEQ ID NO: 198015 - RNA, 17 nt, Human
gggccucaggggggcag

SEQ ID NO: 198016 - RNA, 22 nt, Human
gggccucaggguguuccgggga

SEQ ID NO: 198017 - RNA, 21 nt, Human
gggccucagguagccagggaa

SEQ ID NO: 198018 - RNA, 32 nt, Human
gggccucaguagccucuugagggaagugggac

SEQ ID NO: 198019 - RNA, 18 nt, Human
gggccucagugggggcug

SEQ ID NO: 198020 - RNA, 32 nt, Human
gggccucaguuucccuccucugccaaacgagg

SEQ ID NO: 198021 - RNA, 32 nt, Human
gggccucauaaggagcuguguggucuuggagg

SEQ ID NO: 198022 - RNA, 32 nt, Human
gggccucauacagggauaucaaaauacccuuu

SEQ ID NO: 198023 - RNA, 32 nt, Human
gggccucaucaucugcauuaacauuagcauca

SEQ ID NO: 198024 - RNA, 32 nt, Human
gggccucaucccuucucucccagguagcagaa

SEQ ID NO: 198025 - RNA, 32 nt, Human
gggccucauggcuguuccccagccccucucau

SEQ ID NO: 198026 - RNA, 32 nt, Human
gggccucauucugccaaagcuggaccaaggcu

SEQ ID NO: 198027 - RNA, 32 nt, Human
gggccucauugauggggagucucaguggaugu

SEQ ID NO: 198028 - RNA, 32 nt, Human
gggccucauuuuaauguucagugagaaguaaa

SEQ ID NO: 198029 - RNA, 20 nt, Human
gggccuccaaccuucugccc

SEQ ID NO: 198030 - RNA, 20 nt, Human
gggccuccaagcuggugccc

SEQ ID NO: 198031 - RNA, 32 nt, Human
gggccuccacacugccuggcagaacauaccac

SEQ ID NO: 198032 - RNA, 24 nt, Human
gggccuccaccgacaccugcuucu

SEQ ID NO: 198033 - RNA, 32 nt, Human
gggccuccaccucugugcagggcacagaaggc

SEQ ID NO: 198034 - RNA, 21 nt, Human
gggccuccacgcaugcgcacc

SEQ ID NO: 198035 - RNA, 24 nt, Human
gggccuccacgccagcgccgggaa

SEQ ID NO: 198036 - RNA, 20 nt, Human
gggccuccacgucccugccc

SEQ ID NO: 198037 - RNA, 21 nt, Human
gggccuccacuuggccugacc

SEQ ID NO: 198038 - RNA, 21 nt, Human
gggccuccagaacuccuguuu

SEQ ID NO: 198039 - RNA, 32 nt, Human
gggccuccagcaggcagaggagaucaugacca

SEQ ID NO: 198040 - RNA, 22 nt, Human
gggccuccaggauuugccugca

SEQ ID NO: 198041 - RNA, 19 nt, Human
gggccuccaggugcuggaa

SEQ ID NO: 198042 - RNA, 23 nt, Human
gggccuccaguaguuccugcgcc

SEQ ID NO: 198043 - RNA, 19 nt, Human
gggccuccauuaucugcac

SEQ ID NO: 198044 - RNA, 32 nt, Human
gggccucccaaaacgcuggaacuacaagugug

SEQ ID NO: 198045 - RNA, 32 nt, Human
gggccucccaaagugcugggauuagaggcaug

SEQ ID NO: 198046 - RNA, 17 nt, Human
gggccucccagugcaaa

SEQ ID NO: 198047 - RNA, 32 nt, Human
gggccuccccagcugccugggcuugaccggcg

SEQ ID NO: 198048 - RNA, 21 nt, Human
gggccuccccaggugugcacc

SEQ ID NO: 198049 - RNA, 32 nt, Human
gggccuccccuaccucaaaccccagcugggcc

SEQ ID NO: 198050 - RNA, 23 nt, Human
gggccuccccuccauccugcacc

SEQ ID NO: 198051 - RNA, 19 nt, Human
gggccucccggcacccacc

SEQ ID NO: 198052 - RNA, 26 nt, Human
gggccucccggcucuggcgccgggga

SEQ ID NO: 198053 - RNA, 21 nt, Human
gggccucccuccgucugcgcc

SEQ ID NO: 198054 - RNA, 32 nt, Human
gggccuccggaacccccagcaggcugggcuua

SEQ ID NO: 198055 - RNA, 23 nt, Human
gggccuccgggacuccccccgca

SEQ ID NO: 198056 - RNA, 21 nt, Human
gggccuccuaccgucuggacc

SEQ ID NO: 198057 - RNA, 32 nt, Human
gggccuccuaggggauccucaggcggccccca

SEQ ID NO: 198058 - RNA, 32 nt, Human
gggccuccucgcaaaugcccaggcccugcauu

SEQ ID NO: 198059 - RNA, 32 nt, Human
gggccuccucuccuagacccuuagcuugugac

SEQ ID NO: 198060 - RNA, 21 nt, Human
gggccuccucuccuccucuca

SEQ ID NO: 198061 - RNA, 20 nt, Human
gggccuccugcgcccucacc

SEQ ID NO: 198062 - RNA, 18 nt, Human
gggccuccugcuccagcu

SEQ ID NO: 198063 - RNA, 32 nt, Human
gggccuccugcucucgucccuggcccucccug

SEQ ID NO: 198064 - RNA, 32 nt, Human
gggccuccugcuucuaauucaggcucugccac

SEQ ID NO: 198065 - RNA, 32 nt, Human
gggccuccuggacuacaggagaugcugucacu

SEQ ID NO: 198066 - RNA, 32 nt, Human
gggccuccuguaaucccagcuacuugggaggc

SEQ ID NO: 198067 - RNA, 32 nt, Human
gggccuccuuccuccccugccugcagcuggcu

SEQ ID NO: 198068 - RNA, 32 nt, Human
gggccucgaccugugacucacacccaguggac

SEQ ID NO: 198069 - RNA, 32 nt, Human
gggccucgauguuccaggcacuguccuaggca

SEQ ID NO: 198070 - RNA, 32 nt, Human
gggccucgcagcccucuccgagcagggcuggu

SEQ ID NO: 198071 - RNA, 22 nt, Human
gggccucggacuuagcugggag

SEQ ID NO: 198072 - RNA, 27 nt, Human
gggccucggagccgccuccgccgggag

SEQ ID NO: 198073 - RNA, 22 nt, Human
gggccucggcuuccgcaggaag

SEQ ID NO: 198074 - RNA, 24 nt, Human
gggccucggggagagggguggaag

SEQ ID NO: 198075 - RNA, 22 nt, Human
gggccucggguguggccagaga

SEQ ID NO: 198076 - RNA, 23 nt, Human
gggccucgugcgggggccgggag

SEQ ID NO: 198077 - RNA, 32 nt, Human
gggccucguuucucccucugggaacagccaaa

SEQ ID NO: 198078 - RNA, 32 nt, Human
gggccucuacugccugucgcuggaccacccgg

SEQ ID NO: 198079 - RNA, 32 nt, Human
gggccucuccaccuacucacauggcaaauccc

SEQ ID NO: 198080 - RNA, 31 nt, Human
gggccucuccucaaggagagauggagggaua

SEQ ID NO: 198081 - RNA, 32 nt, Human
gggccucuccucaaggagagauggagggauac

SEQ ID NO: 198082 - RNA, 32 nt, Human
gggccucuccucacucagagggugaugggguc

SEQ ID NO: 198083 - RNA, 32 nt, Human
gggccucuccugcccucugcucugccuggagu

SEQ ID NO: 198084 - RNA, 32 nt, Human
gggccucuccuggggccuggcuuuggcuggag

SEQ ID NO: 198085 - RNA, 32 nt, Human
gggccucucugcagaccucuucccaggagacc

SEQ ID NO: 198086 - RNA, 32 nt, Human
gggccucucugcccguggagugcaggagcgaa

SEQ ID NO: 198087 - RNA, 32 nt, Human
gggccucucugccucgcccaccccucagcccu

SEQ ID NO: 198088 - RNA, 32 nt, Human
gggccucugaagccugggccaggcucucccgc

SEQ ID NO: 198089 - RNA, 32 nt, Human
gggccucugaauauaacccacacccagcguag

SEQ ID NO: 198090 - RNA, 32 nt, Human
gggccucugagcaggugcaggcuguggugggc

SEQ ID NO: 198091 - RNA, 32 nt, Human
gggccucugaggaggagggaaaaagugaagga

SEQ ID NO: 198092 - RNA, 32 nt, Human
gggccucugcauucuacgccagggacuagacg

SEQ ID NO: 198093 - RNA, 18 nt, Human
gggccucugcccugaaca

SEQ ID NO: 198094 - RNA, 17 nt, Human
gggccucugcgcggcug

SEQ ID NO: 198095 - RNA, 32 nt, Human
gggccucugcucccaugcucauaccucuucuu

SEQ ID NO: 198096 - RNA, 32 nt, Human
gggccucugcuccccugggaccuccugucuca

SEQ ID NO: 198097 - RNA, 32 nt, Human
gggccucuggauggcccugcccugacuggggc

SEQ ID NO: 198098 - RNA, 32 nt, Human
gggccucuggcaccuucaagggcaucaucagc

SEQ ID NO: 198099 - RNA, 20 nt, Human
gggccucuggcagccucacc

SEQ ID NO: 198100 - RNA, 32 nt, Human
gggccucuggccuggcugaguucacagcccag

SEQ ID NO: 198101 - RNA, 32 nt, Human
gggccucugggcagaggaugcaauggcacgga

SEQ ID NO: 198102 - RNA, 32 nt, Human
gggccucuggggcugcccacccuaccugcccu

SEQ ID NO: 198103 - RNA, 19 nt, Human
gggccucugggguggggug

SEQ ID NO: 198104 - RNA, 23 nt, Human
gggccucugguggcggucgggaa

SEQ ID NO: 198105 - RNA, 32 nt, Human
gggccucuguaaccuuccacccccucugcgga

SEQ ID NO: 198106 - RNA, 32 nt, Human
gggccucuguccucacgguccugggccugccu

SEQ ID NO: 198107 - RNA, 32 nt, Human
gggccucugucuccaucucugcccuuugaaac

SEQ ID NO: 198108 - RNA, 32 nt, Human
gggccucugugucacccacuccugggugcgug

SEQ ID NO: 198109 - RNA, 32 nt, Human
gggccucuuccccucaccuggcccuuggauuu

SEQ ID NO: 198110 - RNA, 32 nt, Human
gggccucuugcggucccuucuuacucacacac

SEQ ID NO: 198111 - RNA, 32 nt, Human
gggccucuugcuuccugcaaccccuugcuggc

SEQ ID NO: 198112 - RNA, 32 nt, Human
gggccucuuucaucugugcucuuccaggaugc

SEQ ID NO: 198113 - RNA, 32 nt, Human
gggccugaauuccugacuuugccugcacgcau

SEQ ID NO: 198114 - RNA, 32 nt, Human
gggccugacaucuucugcccugguccccuuuc

SEQ ID NO: 198115 - RNA, 32 nt, Human
gggccugaccuccaguccugcuggccugcucu

SEQ ID NO: 198116 - RNA, 32 nt, Human
gggccugagaaaagaaugggagggggcuauua

SEQ ID NO: 198117 - RNA, 32 nt, Human
gggccugagaaaagcucauacaugccucaugu

SEQ ID NO: 198118 - RNA, 32 nt, Human
gggccugagaauucacauuucccacuggugau

SEQ ID NO: 198119 - RNA, 32 nt, Human
gggccugagaucuugagagacagggucucacu

SEQ ID NO: 198120 - RNA, 32 nt, Human
gggccugagcaggauugagggagccaggggag

SEQ ID NO: 198121 - RNA, 32 nt, Human
gggccugagcugucugucucguuucuguccgc

SEQ ID NO: 198122 - RNA, 32 nt, Human
gggccugaggagagaggggaaggguacagaga

SEQ ID NO: 198123 - RNA, 20 nt, Human
gggccugaggaggccacagg

SEQ ID NO: 198124 - RNA, 32 nt, Human
gggccugagugccagcccuggcagacugagga

SEQ ID NO: 198125 - RNA, 32 nt, Human
gggccugauuguuuccuguaaccaggauacag

SEQ ID NO: 198126 - RNA, 21 nt, Human
gggccugcaaauggagugggg

SEQ ID NO: 198127 - RNA, 32 nt, Human
gggccugcacacacaggguguugaggaaccac

SEQ ID NO: 198128 - RNA, 32 nt, Human
gggccugcacaggaaaaacagagccaaagaca

SEQ ID NO: 198129 - RNA, 22 nt, Human
gggccugcagcucagaggguca

SEQ ID NO: 198130 - RNA, 32 nt, Human
gggccugcagcucccuucuccugggacuuaga

SEQ ID NO: 198131 - RNA, 22 nt, Human
gggccugcaggccauccuggga

SEQ ID NO: 198132 - RNA, 32 nt, Human
gggccugcaguuggcagaagggucccgggccc

SEQ ID NO: 198133 - RNA, 32 nt, Human
gggccugcaguuuccaucacccacugcaacca

SEQ ID NO: 198134 - RNA, 17 nt, Human
gggccugcauuaagugg

SEQ ID NO: 198135 - RNA, 32 nt, Human
gggccugcauuccauccgcucugcagccccaa

SEQ ID NO: 198136 - RNA, 32 nt, Human
gggccugcauuugagaauaagggugucacuag

SEQ ID NO: 198137 - RNA, 22 nt, Human
gggccugccacaggggcacaag

SEQ ID NO: 198138 - RNA, 22 nt, Human
gggccugccacaugggcacaag

SEQ ID NO: 198139 - RNA, 32 nt, Human
gggccugccaggacuagacagaaguggggcgg

SEQ ID NO: 198140 - RNA, 32 nt, Human
gggccugccauagaaaagucacaucccugagg

SEQ ID NO: 198141 - RNA, 32 nt, Human
gggccugccaugagcucuccgccgcccgcccg

SEQ ID NO: 198142 - RNA, 21 nt, Human
gggccugcccugagcucacca

SEQ ID NO: 198143 - RNA, 32 nt, Human
gggccugccugggcagucugucuccgggccag

SEQ ID NO: 198144 - RNA, 20 nt, Human
gggccugcggaggcgguggc

SEQ ID NO: 198145 - RNA, 32 nt, Human
gggccugcggaggggaagcccacccacaaugc

SEQ ID NO: 198146 - RNA, 17 nt, Human
gggccugcgugaguggg

SEQ ID NO: 198147 - RNA, 23 nt, Human
gggccugcuaggagcccacacgg

SEQ ID NO: 198148 - RNA, 32 nt, Human
gggccugcucugacagggcccaugucccacaa

SEQ ID NO: 198149 - RNA, 18 nt, Human
gggccugcugaggugggg

SEQ ID NO: 198150 - RNA, 32 nt, Human
gggccugcugcggggagguccacccacuuccg

SEQ ID NO: 198151 - RNA, 32 nt, Human
gggccugcuggaguuccggccugggcaccagc

SEQ ID NO: 198152 - RNA, 20 nt, Human
gggccugcuggggagugggg

SEQ ID NO: 198153 - RNA, 32 nt, Human
gggccugcuggggccucugcuccagggccuca

SEQ ID NO: 198154 - RNA, 19 nt, Human
gggccugcugggggugggg

SEQ ID NO: 198155 - RNA, 32 nt, Human
gggccugcuuucuccuuugucugucuugggcu

SEQ ID NO: 198156 - RNA, 19 nt, Human
gggccuggaaagcgcagug

SEQ ID NO: 198157 - RNA, 32 nt, Human
gggccuggaacccagcccugaggacauccugc

SEQ ID NO: 198158 - RNA, 32 nt, Human
gggccuggaagaggcgcggggacagggcacuc

SEQ ID NO: 198159 - RNA, 32 nt, Human
gggccuggaauguaaacagccacugggguaca

SEQ ID NO: 198160 - RNA, 19 nt, Human
gggccuggacacagaugac

SEQ ID NO: 198161 - RNA, 21 nt, Human
gggccuggacuccccacccca

SEQ ID NO: 198162 - RNA, 32 nt, Human
gggccuggacugcaggccugaccugcucccug

SEQ ID NO: 198163 - RNA, 20 nt, Human
gggccuggagagcagcagug

SEQ ID NO: 198164 - RNA, 32 nt, Human
gggccuggagcagcccgaggcacugcagcaga

SEQ ID NO: 198165 - RNA, 32 nt, Human
gggccuggagcaguaugagcagaugcugaaga

SEQ ID NO: 198166 - RNA, 32 nt, Human
gggccuggagccaugggcugggugggcgggcg

SEQ ID NO: 198167 - RNA, 32 nt, Human
gggccuggagcugggaccugcccauaggcauc

SEQ ID NO: 198168 - RNA, 23 nt, Human
gggccuggagcugggagucucaa

SEQ ID NO: 198169 - RNA, 32 nt, Human
gggccuggagcuuggcuuguauccaaguguau

SEQ ID NO: 198170 - RNA, 32 nt, Human
gggccuggaggcacccuacaagagcugacuuu

SEQ ID NO: 198171 - RNA, 32 nt, Human
gggccuggagugacggcgggcgaggaagaaaa

SEQ ID NO: 198172 - RNA, 32 nt, Human
gggccuggaguuugggaugcaggcuuguuaaa

SEQ ID NO: 198173 - RNA, 32 nt, Human
gggccuggcaugcaacagguccuuggaguggc

SEQ ID NO: 198174 - RNA, 24 nt, Human
gggccuggccaagcccccaagagg

SEQ ID NO: 198175 - RNA, 20 nt, Human
gggccuggccacacacuucc

SEQ ID NO: 198176 - RNA, 32 nt, Human
gggccuggccaggacagugucaguucccagag

SEQ ID NO: 198177 - RNA, 21 nt, Human
gggccuggccccacuguguug

SEQ ID NO: 198178 - RNA, 24 nt, Human
gggccuggccuacuuugagaucca

SEQ ID NO: 198179 - RNA, 32 nt, Human
gggccuggccuccuggguucuuugcugaaauu

SEQ ID NO: 198180 - RNA, 22 nt, Human
gggccuggccucucccuucuca

SEQ ID NO: 198181 - RNA, 32 nt, Human
gggccuggcgggggaggcaggggugagaggau

SEQ ID NO: 198182 - RNA, 32 nt, Human
gggccuggcuucugaggcugaauggacuccgu

SEQ ID NO: 198183 - RNA, 21 nt, Human
gggccugggaaacuagguucc

SEQ ID NO: 198184 - RNA, 32 nt, Human
gggccugggaaacuagguucccagggguugag

SEQ ID NO: 198185 - RNA, 32 nt, Human
gggccugggaaaggaaaaccagggauagcuau

SEQ ID NO: 198186 - RNA, 22 nt, Human
gggccugggaaucuaaguggga

SEQ ID NO: 198187 - RNA, 32 nt, Human
gggccugggaauuggccauguguuaauuuauu

SEQ ID NO: 198188 - RNA, 32 nt, Human
gggccugggacccugcuccgccccgcgcuccc

SEQ ID NO: 198189 - RNA, 32 nt, Human
gggccugggaggagccgagaccagccuuuuac

SEQ ID NO: 198190 - RNA, 32 nt, Human
gggccugggaggcauagguugcagugagccga

SEQ ID NO: 198191 - RNA, 32 nt, Human
gggccugggaggcggagguugcagugagccga

SEQ ID NO: 198192 - RNA, 32 nt, Human
gggccugggaggucgaggcugcagugagcugu

SEQ ID NO: 198193 - RNA, 32 nt, Human
gggccugggagguggugggagggagaaggaag

SEQ ID NO: 198194 - RNA, 24 nt, Human
gggccugggcagcagguguggcca

SEQ ID NO: 198195 - RNA, 32 nt, Human
gggccugggcaggcagccacagagggcauguu

SEQ ID NO: 198196 - RNA, 23 nt, Human
gggccugggcagucaggcuccag

SEQ ID NO: 198197 - RNA, 32 nt, Human
gggccugggcaucaggcagggugcaggugggg

SEQ ID NO: 198198 - RNA, 32 nt, Human
gggccugggccagacaugcuaauuucagagag

SEQ ID NO: 198199 - RNA, 21 nt, Human
gggccugggccagggccccag

SEQ ID NO: 198200 - RNA, 21 nt, Human
gggccugggccauccauucca

SEQ ID NO: 198201 - RNA, 21 nt, Human
gggccugggcccaggagccag

SEQ ID NO: 198202 - RNA, 22 nt, Human
gggccugggcccgcggacccca

SEQ ID NO: 198203 - RNA, 32 nt, Human
gggccugggccguuaucuccccacaaccccca

SEQ ID NO: 198204 - RNA, 18 nt, Human
gggccugggccucagagg

SEQ ID NO: 198205 - RNA, 21 nt, Human
gggccugggcugcaaaggagc

SEQ ID NO: 198206 - RNA, 32 nt, Human
gggccugggcuggcuggcaucccugggucgau

SEQ ID NO: 198207 - RNA, 32 nt, Human
gggccuggggcagacuuaggaucaggauaaag

SEQ ID NO: 198208 - RNA, 21 nt, Human
gggccuggggcagggggguca

SEQ ID NO: 198209 - RNA, 18 nt, Human
gggccuggggccaagagg

SEQ ID NO: 198210 - RNA, 32 nt, Human
gggccuggggccugagagaauuggcucaauaa

SEQ ID NO: 198211 - RNA, 32 nt, Human
gggccuggggccugggcuucgggcgcggcguu

SEQ ID NO: 198212 - RNA, 24 nt, Human
gggccuggggcuccgaaauuccaa

SEQ ID NO: 198213 - RNA, 32 nt, Human
gggccuggggcuccuuucuccagccagcaaug

SEQ ID NO: 198214 - RNA, 32 nt, Human
gggccugggggcugggcuggaccagggcgugg

SEQ ID NO: 198215 - RNA, 32 nt, Human
gggccugggggugggaggaugggacuuaggua

SEQ ID NO: 198216 - RNA, 32 nt, Human
gggccuggguagcugggcccagacaaaccacc

SEQ ID NO: 198217 - RNA, 20 nt, Human
gggccuggguucaagccucc

SEQ ID NO: 198218 - RNA, 32 nt, Human
gggccuggucaccacaauuagagcuugaugcc

SEQ ID NO: 198219 - RNA, 32 nt, Human
gggccugguccuagcccugccucggccacugu

SEQ ID NO: 198220 - RNA, 32 nt, Human
gggccugguccugaggagggcuuggagcgggc

SEQ ID NO: 198221 - RNA, 32 nt, Human
gggccugguccugagggcaggacagggguuug

SEQ ID NO: 198222 - RNA, 32 nt, Human
gggccuggugcuggacgccaaugcccuccccc

SEQ ID NO: 198223 - RNA, 32 nt, Human
gggccugguggagaaggaggugcuggcugcga

SEQ ID NO: 198224 - RNA, 23 nt, Human
gggccugguggcucacaccugua

SEQ ID NO: 198225 - RNA, 32 nt, Human
gggccuggugucuccccucccccaccacccgg

SEQ ID NO: 198226 - RNA, 32 nt, Human
gggccugguguggaaccagggagcugugggaa

SEQ ID NO: 198227 - RNA, 32 nt, Human
gggccuguagccaccaguucauaggugccaag

SEQ ID NO: 198228 - RNA, 31 nt, Human
gggccuguagggcaacccaugccaacugcgg

SEQ ID NO: 198229 - RNA, 18 nt, Human
gggccuguaggggcgggg

SEQ ID NO: 198230 - RNA, 32 nt, Human
gggccuguaucucagaagggaggggcacagcu

SEQ ID NO: 198231 - RNA, 19 nt, Human
gggccuguaugagacagga

SEQ ID NO: 198232 - RNA, 18 nt, Human
gggccuguauguuuaugg

SEQ ID NO: 198233 - RNA, 32 nt, Human
gggccugucaugggguggagggaugggggagg

SEQ ID NO: 198234 - RNA, 32 nt, Human
gggccugucauugguauuuggccaaggccugc

SEQ ID NO: 198235 - RNA, 32 nt, Human
gggccugucgacgggcccucgugugggaagcc

SEQ ID NO: 198236 - RNA, 23 nt, Human
gggccugucuccagggccaggcu

SEQ ID NO: 198237 - RNA, 19 nt, Human
gggccugugaagguuagga

SEQ ID NO: 198238 - RNA, 18 nt, Human
gggccugugagugcagga

SEQ ID NO: 198239 - RNA, 20 nt, Human
gggccugugauuggauggga

SEQ ID NO: 198240 - RNA, 19 nt, Human
gggccugugcaccgguggg

SEQ ID NO: 198241 - RNA, 17 nt, Human
gggccugugcagcuggg

SEQ ID NO: 198242 - RNA, 32 nt, Human
gggccugugcaucuucuguauguaggaggugg

SEQ ID NO: 198243 - RNA, 32 nt, Human
gggccugugccgcacuagccucccucuccucu

SEQ ID NO: 198244 - RNA, 19 nt, Human
gggccugugccuggggagg

SEQ ID NO: 198245 - RNA, 20 nt, Human
gggccugugccugggugaga

SEQ ID NO: 198246 - RNA, 19 nt, Human
gggccugugcggggcgcgg

SEQ ID NO: 198247 - RNA, 20 nt, Human
gggccugugcugcagucggg

SEQ ID NO: 198248 - RNA, 32 nt, Human
gggccugugcugggaaccaucuggaccuuugc

SEQ ID NO: 198249 - RNA, 20 nt, Human
gggccugugcuggggauggg

SEQ ID NO: 198250 - RNA, 20 nt, Human
gggccugugcuuccagcggg

SEQ ID NO: 198251 - RNA, 18 nt, Human
gggccuguggagaguggg

SEQ ID NO: 198252 - RNA, 19 nt, Human
gggccuguggccuggggga

SEQ ID NO: 198253 - RNA, 18 nt, Human
gggccugugggagcgggg

SEQ ID NO: 198254 - RNA, 19 nt, Human
gggccugugggcuguggga

SEQ ID NO: 198255 - RNA, 20 nt, Human
gggccuguggggugccugga

SEQ ID NO: 198256 - RNA, 32 nt, Human
gggccuguggggugccuggaggugaucuuuga

SEQ ID NO: 198257 - RNA, 17 nt, Human
gggccugugggguugga

SEQ ID NO: 198258 - RNA, 19 nt, Human
gggccuguguaagaauggg

SEQ ID NO: 198259 - RNA, 20 nt, Human
gggccuguguaauuguagga

SEQ ID NO: 198260 - RNA, 20 nt, Human
gggccuguguagccaguggg

SEQ ID NO: 198261 - RNA, 20 nt, Human
gggccugugucgggcguggg

SEQ ID NO: 198262 - RNA, 32 nt, Human
gggccugugucuugagccuggagggagacugc

SEQ ID NO: 198263 - RNA, 32 nt, Human
gggccugugugaugucccugaggcagaagagc

SEQ ID NO: 198264 - RNA, 20 nt, Human
gggccugugugugggugggg

SEQ ID NO: 198265 - RNA, 18 nt, Human
gggccuguguucugaggg

SEQ ID NO: 198266 - RNA, 18 nt, Human
gggccuguguugcuggga

SEQ ID NO: 198267 - RNA, 32 nt, Human
gggccuguuccuggcccgcagccgccaccuac

SEQ ID NO: 198268 - RNA, 32 nt, Human
gggccuguucugcaguuggacagacagagccc

SEQ ID NO: 198269 - RNA, 20 nt, Human
gggccuguugagggcaggga

SEQ ID NO: 198270 - RNA, 20 nt, Human
gggccuguuggaggcuggga

SEQ ID NO: 198271 - RNA, 18 nt, Human
gggccuguuggggcgggg

SEQ ID NO: 198272 - RNA, 19 nt, Human
gggccuguuugauaaagga

SEQ ID NO: 198273 - RNA, 18 nt, Human
gggccuguuuggugagga

SEQ ID NO: 198274 - RNA, 32 nt, Human
gggccuguuuucucccuccugacccugcaucu

SEQ ID NO: 198275 - RNA, 32 nt, Human
gggccuuagguugagcugaugggggaaggaca

SEQ ID NO: 198276 - RNA, 20 nt, Human
gggccuuagugccucagaga

SEQ ID NO: 198277 - RNA, 32 nt, Human
gggccuucacaguuugauuccauucucagcuc

SEQ ID NO: 198278 - RNA, 32 nt, Human
gggccuucacuaccaagggacucucuucaucu

SEQ ID NO: 198279 - RNA, 32 nt, Human
gggccuuccagaagcgccagcagcagcagagc

SEQ ID NO: 198280 - RNA, 32 nt, Human
gggccuuccagugaucuggaccaggaagacgg

SEQ ID NO: 198281 - RNA, 32 nt, Human
gggccuuccaugggcauggccguugccucucu

SEQ ID NO: 198282 - RNA, 32 nt, Human
gggccuuccggaagggucgacgagaugaguuc

SEQ ID NO: 198283 - RNA, 32 nt, Human
gggccuuccuccagccccuccucucccuccuc

SEQ ID NO: 198284 - RNA, 32 nt, Human
gggccuuccuccuccagguuggguuccacucc

SEQ ID NO: 198285 - RNA, 32 nt, Human
gggccuuccugagacacauucagagaaggauc

SEQ ID NO: 198286 - RNA, 24 nt, Human
gggccuucgggaggaggaggcgga

SEQ ID NO: 198287 - RNA, 32 nt, Human
gggccuucuagacugucuucuaugauccugcc

SEQ ID NO: 198288 - RNA, 32 nt, Human
gggccuucucaaugccuccaccuagaaguuga

SEQ ID NO: 198289 - RNA, 32 nt, Human
gggccuucuccagacaucugugcucagcagau

SEQ ID NO: 198290 - RNA, 32 nt, Human
gggccuucucccagggugugcucggugggcag

SEQ ID NO: 198291 - RNA, 32 nt, Human
gggccuucucugaccccugccugagcuguucc

SEQ ID NO: 198292 - RNA, 32 nt, Human
gggccuucugccaccuuugccucccagggugc

SEQ ID NO: 198293 - RNA, 32 nt, Human
gggccuucugccugcugaccauaacagugcca

SEQ ID NO: 198294 - RNA, 32 nt, Human
gggccuucuuucucaucucugucuuuaccaua

SEQ ID NO: 198295 - RNA, 32 nt, Human
gggccuugagcagaauugagaaggaaauaccc

SEQ ID NO: 198296 - RNA, 19 nt, Human
gggccuugcagaggggcag

SEQ ID NO: 198297 - RNA, 32 nt, Human
gggccuugccagagcuccucuccagucaaggc

SEQ ID NO: 198298 - RNA, 32 nt, Human
gggccuugccuagugggccuuccuucccaggu

SEQ ID NO: 198299 - RNA, 32 nt, Human
gggccuugcgucccuguuuggccagagcaagg

SEQ ID NO: 198300 - RNA, 32 nt, Human
gggccuugcucaagguccccagcuucagcccc

SEQ ID NO: 198301 - RNA, 32 nt, Human
gggccuugcucugagcacaggugacagaucau

SEQ ID NO: 198302 - RNA, 32 nt, Human
gggccuugggagcccauguucaaggcaggacc

SEQ ID NO: 198303 - RNA, 32 nt, Human
gggccuugggcuguaggaugacaacacuuuga

SEQ ID NO: 198304 - RNA, 22 nt, Human
gggccuuguccacguccaggaa

SEQ ID NO: 198305 - RNA, 32 nt, Human
gggccuugucuagccccugccucugcgccccc

SEQ ID NO: 198306 - RNA, 32 nt, Human
gggccuuguugaacagauccacacugcucuaa

SEQ ID NO: 198307 - RNA, 32 nt, Human
gggccuuuaggggcacguucgccugcugaccg

SEQ ID NO: 198308 - RNA, 22 nt, Human
gggccuuucucggggccggaga

SEQ ID NO: 198309 - RNA, 32 nt, Human
gggccuuugagcugcugacuuucagcuggaac

SEQ ID NO: 198310 - RNA, 32 nt, Human
gggccuuugaggacaggagcuguaaggaugau

SEQ ID NO: 198311 - RNA, 32 nt, Human
gggccuuugcacugcaacaucaugccucugaa

SEQ ID NO: 198312 - RNA, 32 nt, Human
gggccuuugcaucccugcacuccuggacgugu

SEQ ID NO: 198313 - RNA, 20 nt, Human
gggccuuugccagcagcaag

SEQ ID NO: 198314 - RNA, 32 nt, Human
gggccuuuggagaggggagugcagggcaccac

SEQ ID NO: 198315 - RNA, 32 nt, Human
gggccuuugucuagggaagggacugguaggga

SEQ ID NO: 198316 - RNA, 32 nt, Human
gggcgaaaacugaagugcaaucagggccaaga

SEQ ID NO: 198317 - RNA, 24 nt, Human
gggcgaaagggugagacuccaucu

SEQ ID NO: 198318 - RNA, 22 nt, Human
gggcgaaaguaagacucugucu

SEQ ID NO: 198319 - RNA, 32 nt, Human
gggcgaaccagcuccgcuccggaggggucugc

SEQ ID NO: 198320 - RNA, 32 nt, Human
gggcgaacuaugagaauggccucugacgaugg

SEQ ID NO: 198321 - RNA, 21 nt, Human
gggcgaagagagggcugaacc

SEQ ID NO: 198322 - RNA, 32 nt, Human
gggcgaagagaucuacccgucucccucccucc

SEQ ID NO: 198323 - RNA, 32 nt, Human
gggcgaagaggaggaggaaggggaggacgaug

SEQ ID NO: 198324 - RNA, 32 nt, Human
gggcgaagcuuuggugacagacggagaguggg

SEQ ID NO: 198325 - RNA, 22 nt, Human
gggcgaaggacccggcgcugcg

SEQ ID NO: 198326 - RNA, 32 nt, Human
gggcgaaguccacuguccuccuuggcggcaaa

SEQ ID NO: 198327 - RNA, 32 nt, Human
gggcgaaucucacggaccugaccucagaggug

SEQ ID NO: 198328 - RNA, 24 nt, Human
gggcgacaaagcaagacucugucu

SEQ ID NO: 198329 - RNA, 24 nt, Human
gggcgacaaagcaagacuuuguuu

SEQ ID NO: 198330 - RNA, 24 nt, Human
gggcgacaaagugagacucugucu

SEQ ID NO: 198331 - RNA, 22 nt, Human
gggcgacaaagugggacugucu

SEQ ID NO: 198332 - RNA, 25 nt, Human
gggcgacaagagcaagacucugucu

SEQ ID NO: 198333 - RNA, 25 nt, Human
gggcgacaagagcgaaacucugucu

SEQ ID NO: 198334 - RNA, 25 nt, Human
gggcgacaagagcgagacucugucu

SEQ ID NO: 198335 - RNA, 24 nt, Human
gggcgacacagugagacucugucu

SEQ ID NO: 198336 - RNA, 32 nt, Human
gggcgacacgagggccgcggugcaguguccga

SEQ ID NO: 198337 - RNA, 32 nt, Human
gggcgacacggugaaaccccgucccuacuaaa

SEQ ID NO: 198338 - RNA, 24 nt, Human
gggcgacagaaugagacucugucu

SEQ ID NO: 198339 - RNA, 32 nt, Human
gggcgacagagcaagacucccucucaggaaag

SEQ ID NO: 198340 - RNA, 24 nt, Human
gggcgacagagcaagacucugacu

SEQ ID NO: 198341 - RNA, 22 nt, Human
gggcgacagagcaagacucugu

SEQ ID NO: 198342 - RNA, 24 nt, Human
gggcgacagagcaagacucugucu

SEQ ID NO: 198343 - RNA, 24 nt, Human
gggcgacagagcaaggcucugucu

SEQ ID NO: 198344 - RNA, 23 nt, Human
gggcgacagagcgaaacucuguc

SEQ ID NO: 198345 - RNA, 22 nt, Human
gggcgacagagcgagacucugu

SEQ ID NO: 198346 - RNA, 24 nt, Human
gggcgacagagcgagacucugucu

SEQ ID NO: 198347 - RNA, 24 nt, Human
gggcgacagagcgagacuuuggcu

SEQ ID NO: 198348 - RNA, 24 nt, Human
gggcgacagagcgagacuuuguuu

SEQ ID NO: 198349 - RNA, 24 nt, Human
gggcgacagagcgagauucugccu

SEQ ID NO: 198350 - RNA, 32 nt, Human
gggcgacagagcgagauucugccucaaaaaua

SEQ ID NO: 198351 - RNA, 24 nt, Human
gggcgacagagcgagauucugucu

SEQ ID NO: 198352 - RNA, 24 nt, Human
gggcgacagagggagacucugucu

SEQ ID NO: 198353 - RNA, 24 nt, Human
gggcgacagaguaagacuguguuu

SEQ ID NO: 198354 - RNA, 22 nt, Human
gggcgacagagugacccugccu

SEQ ID NO: 198355 - RNA, 24 nt, Human
gggcgacagagugagacccugucu

SEQ ID NO: 198356 - RNA, 24 nt, Human
gggcgacagagugagacccuguuu

SEQ ID NO: 198357 - RNA, 23 nt, Human
gggcgacagagugagacgcuguu

SEQ ID NO: 198358 - RNA, 24 nt, Human
gggcgacagagugagacuccaucu

SEQ ID NO: 198359 - RNA, 22 nt, Human
gggcgacagagugagacucccu

SEQ ID NO: 198360 - RNA, 23 nt, Human
gggcgacagagugagacuccguc

SEQ ID NO: 198361 - RNA, 24 nt, Human
gggcgacagagugagacuccgucu

SEQ ID NO: 198362 - RNA, 24 nt, Human
gggcgacagagugagacuccuucu

SEQ ID NO: 198363 - RNA, 24 nt, Human
gggcgacagagugagacucggucu

SEQ ID NO: 198364 - RNA, 24 nt, Human
gggcgacagagugagacucugccu

SEQ ID NO: 198365 - RNA, 24 nt, Human
gggcgacagagugagacucugucu

SEQ ID NO: 198366 - RNA, 24 nt, Human
gggcgacagagugagacuucgacu

SEQ ID NO: 198367 - RNA, 24 nt, Human
gggcgacagagugagacuuugucu

SEQ ID NO: 198368 - RNA, 24 nt, Human
gggcgacagagugagagucugucu

SEQ ID NO: 198369 - RNA, 28 nt, Human
gggcgacagagugagugagacucugucu

SEQ ID NO: 198370 - RNA, 25 nt, Human
gggcgacaggagcaagacucugucu

SEQ ID NO: 198371 - RNA, 24 nt, Human
gggcgacagggugagacccugucu

SEQ ID NO: 198372 - RNA, 24 nt, Human
gggcgacagggugagacuccaucu

SEQ ID NO: 198373 - RNA, 24 nt, Human
gggcgacagucugagacucugucu

SEQ ID NO: 198374 - RNA, 24 nt, Human
gggcgacagugcaagacucugucu

SEQ ID NO: 198375 - RNA, 32 nt, Human
gggcgacauggcuccgucuccacagcggggcu

SEQ ID NO: 198376 - RNA, 21 nt, Human
gggcgaccgagcggggccggc

SEQ ID NO: 198377 - RNA, 28 nt, Human
gggcgaccgcaguucucucuccagggug

SEQ ID NO: 198378 - RNA, 32 nt, Human
gggcgaccucacugcugaugacuuugccccua

SEQ ID NO: 198379 - RNA, 24 nt, Human
gggcgaccuccuuggccaagucug

SEQ ID NO: 198380 - RNA, 24 nt, Human
gggcgacggagcgagacucugucu

SEQ ID NO: 198381 - RNA, 24 nt, Human
gggcgacggagugagacccugucu

SEQ ID NO: 198382 - RNA, 32 nt, Human
gggcgacucaugccucugccucagugggccug

SEQ ID NO: 198383 - RNA, 32 nt, Human
gggcgacuguagucccagcuacucgcgagacu

SEQ ID NO: 198384 - RNA, 32 nt, Human
gggcgagaaaaggaucgcaggagccaggcccu

SEQ ID NO: 198385 - RNA, 32 nt, Human
gggcgagagccccagcccugacccucgguccu

SEQ ID NO: 198386 - RNA, 22 nt, Human
gggcgagagugagacuccgucu

SEQ ID NO: 198387 - RNA, 18 nt, Human
gggcgagcaugggggcug

SEQ ID NO: 198388 - RNA, 32 nt, Human
gggcgagccgagugaagaccugguccuguaga

SEQ ID NO: 198389 - RNA, 32 nt, Human
gggcgagccuaguagcuccugcaggcaggggc

SEQ ID NO: 198390 - RNA, 19 nt, Human
gggcgagcgagagccgggc

SEQ ID NO: 198391 - RNA, 32 nt, Human
gggcgagcgagggagaggagggagagggggag

SEQ ID NO: 198392 - RNA, 32 nt, Human
gggcgagcugggaggcaggaggcagcggccug

SEQ ID NO: 198393 - RNA, 32 nt, Human
gggcgaggaaggagggugcugggggagucagg

SEQ ID NO: 198394 - RNA, 32 nt, Human
gggcgaggacuucgcguuucaggggagggccc

SEQ ID NO: 198395 - RNA, 32 nt, Human
gggcgaggccuaggaagagggucauucuuaag

SEQ ID NO: 198396 - RNA, 32 nt, Human
gggcgagggaggaggaagaagcggaggaggcg

SEQ ID NO: 198397 - RNA, 32 nt, Human
gggcgagggcagcaggggacccagaggugaug

SEQ ID NO: 198398 - RNA, 32 nt, Human
gggcgaggggcagaggccaucagaacugcccg

SEQ ID NO: 198399 - RNA, 32 nt, Human
gggcgaggggcugaggucacaccucgggcacc

SEQ ID NO: 198400 - RNA, 32 nt, Human
gggcgagggguccgggcugagcugcgggccgg

SEQ ID NO: 198401 - RNA, 32 nt, Human
gggcgaguagggagugggggagguggguccaa

SEQ ID NO: 198402 - RNA, 32 nt, Human
gggcgagucuuccuccuuguccuaguuacugc

SEQ ID NO: 198403 - RNA, 32 nt, Human
gggcgagugccacccugacagccccaaggaac

SEQ ID NO: 198404 - RNA, 24 nt, Human
gggcgauagagcaagacucugucu

SEQ ID NO: 198405 - RNA, 24 nt, Human
gggcgauagagugagacucagccu

SEQ ID NO: 198406 - RNA, 32 nt, Human
gggcgauagcaugcaggcugugucugcaccag

SEQ ID NO: 198407 - RNA, 32 nt, Human
gggcgaugaggaaugccauugcagccuagaaa

SEQ ID NO: 198408 - RNA, 32 nt, Human
gggcgaugccuaggggcgaugcugugccugug

SEQ ID NO: 198409 - RNA, 24 nt, Human
gggcgauggagugagacuccaucu

SEQ ID NO: 198410 - RNA, 32 nt, Human
gggcgauugccugggaagccugacagggcggc

SEQ ID NO: 198411 - RNA, 19 nt, Human
gggcgcaacccaccugguc

SEQ ID NO: 198412 - RNA, 32 nt, Human
gggcgcaaggcagacggucuccagccacgaua

SEQ ID NO: 198413 - RNA, 32 nt, Human
gggcgcaagguggcggagggcaguguggguuc

SEQ ID NO: 198414 - RNA, 32 nt, Human
gggcgcacaagccugcacuguccguauagaau

SEQ ID NO: 198415 - RNA, 32 nt, Human
gggcgcacacaucagcagccucaccagcugug

SEQ ID NO: 198416 - RNA, 20 nt, Human
gggcgcacggagggccgggc

SEQ ID NO: 198417 - RNA, 20 nt, Human
gggcgcagcagcuggaacgg

SEQ ID NO: 198418 - RNA, 32 nt, Human
gggcgcagcaguacuuugagaaaauggacgcu

SEQ ID NO: 198419 - RNA, 23 nt, Human
gggcgcagcccuagccuaggaag

SEQ ID NO: 198420 - RNA, 32 nt, Human
gggcgcagccgcgguggcugggcgcggagugu

SEQ ID NO: 198421 - RNA, 32 nt, Human
gggcgcagccuccugaguagcugggaggacag

SEQ ID NO: 198422 - RNA, 32 nt, Human
gggcgcagcgcuccagccauggcgcguucgcu

SEQ ID NO: 198423 - RNA, 32 nt, Human
gggcgcaggaagcagggcgccgcagccugucg

SEQ ID NO: 198424 - RNA, 21 nt, Human
gggcgcagugcgcugcugcca

SEQ ID NO: 198425 - RNA, 23 nt, Human
gggcgcaguggcucacaccugua

SEQ ID NO: 198426 - RNA, 23 nt, Human
gggcgcaguggcucaugccugua

SEQ ID NO: 198427 - RNA, 20 nt, Human
gggcgcaugcgcaagggggc

SEQ ID NO: 198428 - RNA, 32 nt, Human
gggcgcauguugaucgcugguucaguccaggc

SEQ ID NO: 198429 - RNA, 18 nt, Human
gggcgccaaggccggcug

SEQ ID NO: 198430 - RNA, 32 nt, Human
gggcgccacaugcucauggccagaaucuuaaa

SEQ ID NO: 198431 - RNA, 23 nt, Human
gggcgccagcagguggcgcugga

SEQ ID NO: 198432 - RNA, 24 nt, Human
gggcgccagcuucaacgggggcag

SEQ ID NO: 198433 - RNA, 32 nt, Human
gggcgccagugaggaggaagggaaggcgguuc

SEQ ID NO: 198434 - RNA, 32 nt, Human
gggcgccauuugagccucaucucuggcuuccc

SEQ ID NO: 198435 - RNA, 19 nt, Human
gggcgcccacagaaggggc

SEQ ID NO: 198436 - RNA, 19 nt, Human
gggcgcccagacucaggua

SEQ ID NO: 198437 - RNA, 32 nt, Human
gggcgcccagcacugguucagugaacagcauu

SEQ ID NO: 198438 - RNA, 32 nt, Human
gggcgcccagcccaggccugguggagggggag

SEQ ID NO: 198439 - RNA, 32 nt, Human
gggcgccccagccauggcccucaggagcuccc

SEQ ID NO: 198440 - RNA, 32 nt, Human
gggcgcccguaaucccagcuacucgggaggcu

SEQ ID NO: 198441 - RNA, 20 nt, Human
gggcgcccugaggcaagggg

SEQ ID NO: 198442 - RNA, 32 nt, Human
gggcgcccugcuccccucagaucagucaggag

SEQ ID NO: 198443 - RNA, 32 nt, Human
gggcgccgcaaaccacacuggacuccggcccc

SEQ ID NO: 198444 - RNA, 32 nt, Human
gggcgccgcacacgcacccacccacccaccca

SEQ ID NO: 198445 - RNA, 21 nt, Human
gggcgccgccuccggcacugc

SEQ ID NO: 198446 - RNA, 21 nt, Human
gggcgccgcgccgaggggcug

SEQ ID NO: 198447 - RNA, 32 nt, Human
gggcgccggacccuggcccugcccugggugcu

SEQ ID NO: 198448 - RNA, 32 nt, Human
gggcgccggaguggagaaaggagccagcggug

SEQ ID NO: 198449 - RNA, 32 nt, Human
gggcgccggcacuccgguccccgccgcucccc

SEQ ID NO: 198450 - RNA, 32 nt, Human
gggcgccuaaaaucccagcuacucgggagacu

SEQ ID NO: 198451 - RNA, 32 nt, Human
gggcgccuauaaucccagcuacuugggaggcc

SEQ ID NO: 198452 - RNA, 32 nt, Human
gggcgccuauaaucccagcuacuugggaggcu

SEQ ID NO: 198453 - RNA, 32 nt, Human
gggcgccuauaaucccagcuauucuggaggcu

SEQ ID NO: 198454 - RNA, 32 nt, Human
gggcgccucacacucagaaccucauaccccag

SEQ ID NO: 198455 - RNA, 32 nt, Human
gggcgccucccuuucccugcucugccugcggg

SEQ ID NO: 198456 - RNA, 20 nt, Human
gggcgccuccucccgacuga

SEQ ID NO: 198457 - RNA, 32 nt, Human
gggcgccucuagucccagcuacccgggaggcu

SEQ ID NO: 198458 - RNA, 18 nt, Human
gggcgccucucugugcca

SEQ ID NO: 198459 - RNA, 32 nt, Human
gggcgccucuuuccuuucucgcccccuuucau

SEQ ID NO: 198460 - RNA, 32 nt, Human
gggcgccugaggaggaggaggagaagcggaug

SEQ ID NO: 198461 - RNA, 32 nt, Human
gggcgccugcagcucagcugaacuuggcgacc

SEQ ID NO: 198462 - RNA, 32 nt, Human
gggcgccugcagucucagcuacucgggaggcu

SEQ ID NO: 198463 - RNA, 20 nt, Human
gggcgccugcccagcaggag

SEQ ID NO: 198464 - RNA, 22 nt, Human
gggcgccugcggcgaacaggag

SEQ ID NO: 198465 - RNA, 32 nt, Human
gggcgccuggagccacacagggauccggagcc

SEQ ID NO: 198466 - RNA, 25 nt, Human
gggcgccuggguccugcgaaggagc

SEQ ID NO: 198467 - RNA, 32 nt, Human
gggcgccuggucagggagguuuguacaagccu

SEQ ID NO: 198468 - RNA, 32 nt, Human
gggcgccuguaauaucagcuacuugggagacu

SEQ ID NO: 198469 - RNA, 32 nt, Human
gggcgccuguaaucacagcuacuugggaggcu

SEQ ID NO: 198470 - RNA, 32 nt, Human
gggcgccuguaauccaagcuacuggggaggcu

SEQ ID NO: 198471 - RNA, 32 nt, Human
gggcgccuguaaucccaacuacucaggaggcu

SEQ ID NO: 198472 - RNA, 32 nt, Human
gggcgccuguaaucccagauacucaggaggcu

SEQ ID NO: 198473 - RNA, 32 nt, Human
gggcgccuguaaucccagccacuccagaggcu

SEQ ID NO: 198474 - RNA, 32 nt, Human
gggcgccuguaaucccagcuaaucaggaagcu

SEQ ID NO: 198475 - RNA, 32 nt, Human
gggcgccuguaaucccagcuaaucaggaggcu

SEQ ID NO: 198476 - RNA, 32 nt, Human
gggcgccuguaaucccagcuacucaagaggcu

SEQ ID NO: 198477 - RNA, 32 nt, Human
gggcgccuguaaucccagcuacucagaaggcu

SEQ ID NO: 198478 - RNA, 32 nt, Human
gggcgccuguaaucccagcuacucaggagaau

SEQ ID NO: 198479 - RNA, 32 nt, Human
gggcgccuguaaucccagcuacucaggaggcu

SEQ ID NO: 198480 - RNA, 32 nt, Human
gggcgccuguaaucccagcuacucgggaagcu

SEQ ID NO: 198481 - RNA, 32 nt, Human
gggcgccuguaaucccagcuacucgggaggcu

SEQ ID NO: 198482 - RNA, 32 nt, Human
gggcgccuguaaucccagcuacucgggagguu

SEQ ID NO: 198483 - RNA, 32 nt, Human
gggcgccuguaaucccagcuacugagggggcu

SEQ ID NO: 198484 - RNA, 32 nt, Human
gggcgccuguaaucccagcuacuggggaggcu

SEQ ID NO: 198485 - RNA, 32 nt, Human
gggcgccuguaaucccagcuacuugggaagcu

SEQ ID NO: 198486 - RNA, 32 nt, Human
gggcgccuguaaucccagcuacuugggaggcu

SEQ ID NO: 198487 - RNA, 32 nt, Human
gggcgccuguaaucccagcuacuuggguggcu

SEQ ID NO: 198488 - RNA, 32 nt, Human
gggcgccuguaaucccagcuaggaggcugaga

SEQ ID NO: 198489 - RNA, 32 nt, Human
gggcgccuguaaucccagcugcucaggaggcu

SEQ ID NO: 198490 - RNA, 32 nt, Human
gggcgccuguaaucccagcugcuggggaagcu

SEQ ID NO: 198491 - RNA, 32 nt, Human
gggcgccuguaaucccagguacucaggaggcu

SEQ ID NO: 198492 - RNA, 32 nt, Human
gggcgccuguaaucccaguuacucgggaggcu

SEQ ID NO: 198493 - RNA, 32 nt, Human
gggcgccuguaauccuagcugcuugggaggcu

SEQ ID NO: 198494 - RNA, 32 nt, Human
gggcgccuguaaucucagcuacuugggaggcu

SEQ ID NO: 198495 - RNA, 32 nt, Human
gggcgccuguaauuccagcuacucaggaggcu
